United States Patent Application Publication US 2013/0129668 A1 - sequence listing, part 9

SEQ ID NO: 136783 - DNA, 122 bp, Homo sapiens
cttcttagaccatagggtctttctcagagtatgcacaagttaagttattgctgtcaggtgcgtctgccatagaacattccagaaaaacttctatcaaaactagactcccttggctatattaa

SEQ ID NO: 136784 - DNA, 122 bp, Homo sapiens
tttgcgcggtgacggttcacgagcacgcagggccattgtccctactacatgcccattgtgcgagatatagtcacgggtgggcataggcattgcccctattgcagatgccctgcgccgtgaca

SEQ ID NO: 136785 - DNA, 122 bp, Homo sapiens
caagtttttaatcctggctacccagtctggggtgtcatcttgttcctgaggaggggtatacgccagtaactgggtaatcacttcactatcagaacttgtggacagatcaataccatgacgca

SEQ ID NO: 136786 - DNA, 122 bp, Homo sapiens
ggtgggattctacatggtcctgcgatatccaggcgacggagtctcgcctctaaagtggcccggggagcaggaaggtatgagcctcagctgagcgaaaccctccttgcagccaccacggaggg

SEQ ID NO: 136787 - DNA, 122 bp, Homo sapiens
gtccaccatggctgagccccgtcctttgttggaatctctgcagatcacaaggagggacatcgaggaatacgtctgagagctcttcccccctcctcatccatagtcaccccatcccaacttaa

SEQ ID NO: 136788 - DNA, 122 bp, Homo sapiens
agggcagcgctgggtgctttatttccatgctgggcgcccgggaagtatgtacacggggtacgtgccaagcatcctcgcgcgaccccgagagcccggggagcgggggcttgccggccctggca

SEQ ID NO: 136789 - DNA, 122 bp, Homo sapiens
gcggggctcagtgatgggatggctttcccagtcctttctcactcccctggtgcttcaggacggaactgggaggcttaagttgagccaaaagagagggagaggaaacctatgaaacccaggag

SEQ ID NO: 136790 - DNA, 122 bp, Homo sapiens
gcacacattcccctgatatgaataatttacatttcaagccctacgagggacagagggccgcgttgctccctcttgggagcagcagtgctaaaatcgaagcaggcagctgcgggaccgctata

SEQ ID NO: 136791 - DNA, 122 bp, Homo sapiens
gatgagaaagtagccacagtggaacagaataggagtctaaacgaagtaaagcatgacgggcgtaggtttctttacacaaggtcctatttaagggcgcaggaaaagttacagaatgacagaag

SEQ ID NO: 136792 - DNA, 122 bp, Homo sapiens
gcctgtcctgggaacatgagcagcatggacaacgcggtacaacggggcgagagcgccaaccgcggacaacaggaagggcgtgagtgagggccaacgcacttccttcttggacagattaagta

SEQ ID NO: 136793 - DNA, 122 bp, Homo sapiens
gcttagaggtgggcagggggtgccaaaggggcgcaggcaagacccggccagagggttagacgccggcccccgttccgaggcggcccagtctacacgccagcgacgccggctgagccgggctt

SEQ ID NO: 136794 - DNA, 122 bp, Homo sapiens
gcagtggctacgggcagctccctggatcactgggacgtcccaccacaatgggggcaggcccggccacccaggacccacacacatgggaggcggtgaaaatgtttttgaagccaggagaaaat

SEQ ID NO: 136795 - DNA, 122 bp, Homo sapiens
cttttttcctgagcctcagagctaaaatgcccccgagctctttcctattggctggaaagacgaattgaagttcccttgcccatgttaggaggtgtacgcctcctgaactaaagatagaaaca

SEQ ID NO: 136796 - DNA, 122 bp, Homo sapiens
tcccaataaccacacttgcataccattcaggacctaaatttactgtgtgaggtaatacctcgttgaaataacagttataacaagataagcttttttatgacacttaagctttcaaaacagac

SEQ ID NO: 136797 - DNA, 122 bp, Homo sapiens
gttctcacagtgctgccatctttcctccgtgtgagcgtgggctgtgcggagagtggacctcggtgtgtgcggggctgcgtgcactgccatcgctccctctacacgagccggcgtggacccag

SEQ ID NO: 136798 - DNA, 122 bp, Homo sapiens
gtcctgagcaccgctgcccaggccttcatgcttcagaagctaccagaagcagaggctgaacgcggccgccccggccactgcagagcccaggaagggcagggcgctgaatggcccgcccagct

SEQ ID NO: 136799 - DNA, 122 bp, Homo sapiens
gtttcaagctcatgttttccgtctcccctccactcttagtaaaccttgatctgtacggagcggcctgtccgaggctacgccggcctcctggctgctgctggactgtgcttaggacagcgccc

SEQ ID NO: 136800 - DNA, 122 bp, Homo sapiens
gcggggatttaaaacatgtagacacaatcatctctgggttcttgtgagaagtcaacaaaacgacctaacacactagaagttaagaaacgtgcattggccaggcatagtggctcacacctgta

SEQ ID NO: 136801 - DNA, 122 bp, Homo sapiens
aggagaggccggaggcgcctggagggactggctgctcacgggaccaggctgttgcttcgacgggttggagacgattcgggcaggactgtcactgaaatctgaagtcgcggggtggcgggagg

SEQ ID NO: 136802 - DNA, 122 bp, Homo sapiens
cacgcacacccctgtgctgggctcacccctgcacccggctctcctgcctgtctgcacttgcgtatcctcaggacgctgggcaccaagttgccttccctcacacgtgctaccctcctttattc

SEQ ID NO: 136803 - DNA, 122 bp, Homo sapiens
ttgacaacaagctctggcactcagtttctatttcccgggagttgcccagcgctccgcccacgcccgcttgcagaactcgccccgcctccgccccacccatcgtgtgacgtcaccatatcggt

SEQ ID NO: 136804 - DNA, 122 bp, Homo sapiens
ctttaagaaggagcgaggggcgcggccaggtaggggcgggtccagggcggatcagcgctgcgccggcgccggcccgggagccggatttggagcgcgaggcgccggtgggggcggagggggct

SEQ ID NO: 136805 - DNA, 122 bp, Homo sapiens
gctctccaattggagagcctttcatctctttgtttttacagtgattaacccgtccgagcgcgctccgagcgtggctccaggcagcgcagggggaggggagaggacggctgggcaagggaagg

SEQ ID NO: 136806 - DNA, 122 bp, Homo sapiens
tgcttggcagagcaggtgtagatgactatagtgacatatcggatcagctcaggcacggttcgcaagcacctagggaagcctgaccggcgggggaaaagcccaggcgacatcagtcgtgccct

SEQ ID NO: 136807 - DNA, 122 bp, Homo sapiens
ctcttccccagcgggcgatgatgagatctcatttgaccctgatgacatcatcaccaacatcgagatgattgacgacggctggtggcgcggggtgtgcaagggccggtacgggctcttcccag

SEQ ID NO: 136808 - DNA, 122 bp, Homo sapiens
caaaccgcagccatggcagaggaacctcagcttaaatagtgtggagcggccactggtttccgcggctcgtagtcgcgcccgcgaggaaacgccagggaggcttcctgccccgcccagcggtg

SEQ ID NO: 136809 - DNA, 122 bp, Homo sapiens
ccctttccgagtcaaagaaaggggtgacggacgcacctggaaaatcgggtcgctcccacccgaatattgcgcttttcagaccggcttaaaacacggcgcaccacgggactatatcccacacc

SEQ ID NO: 136810 - DNA, 122 bp, Homo sapiens
tgggacagaccgtcgggggctgactccgggggtttgcgggcgccgagctgcctccgcgcgcgttccactccttcagcgtggaaaagaaaaccctcagcggccagagaggcggcggggccttc

SEQ ID NO: 136811 - DNA, 122 bp, Homo sapiens
gctcctattagccacagtacaggtactcatcaaaagcagcaggaatgatctcagctaacacggaagcactatggattgagcccagcaattccacccactaattaaacgataattgtatccac

SEQ ID NO: 136812 - DNA, 122 bp, Homo sapiens
agccgcagctaaaagccggaggctccaaagtggaactacgttgtcttgtcgagcctggggcgactcgcctcggggagggcgagcctgaactgcagccctgcgctccttccacggcccgagga

SEQ ID NO: 136813 - DNA, 122 bp, Homo sapiens
tcacccggggtggtactggaggttcaagctggaagcaggggcctccctggcgagcccccacggccctgtcgtcggagccgccccacccttaaggctgataaggagtcttcttgctggcgagc

SEQ ID NO: 136814 - DNA, 122 bp, Homo sapiens
gcccttgccctctgccccaccaggctcacctttcgagtgcggagggtgacggacgccccccgttcaagcagcagctcagccacctcgaagtggccacagttgagggcatcgtggaggggggt

SEQ ID NO: 136815 - DNA, 122 bp, Homo sapiens
gagaagcacgtgccagcaggcaccttgaactcaggatagctgggggttggttgcgatggacggcacgacggtctgcagtggggatccaggatcccagacatggatcctaaactgccatagga

SEQ ID NO: 136816 - DNA, 122 bp, Homo sapiens
gccgagcgcgaggtgtcggtgcccaccttcagctgggaggagattcagaagcataacctgcgcaccgacaggtggctggtcattgaccgcaaggtttacaacatcaccaaatggtccatcca

SEQ ID NO: 136817 - DNA, 122 bp, Homo sapiens
tcgcgtctcactgccatcagtgctatgtgcagtgacatttctgacttgagtggaggaatgcgcgaaggaaacccgggcgaaattggtattagaggatcttcttggcgccaatgctaattgtc

SEQ ID NO: 136818 - DNA, 122 bp, Homo sapiens
gctgcctctctttgaagagagtgttcctgaaccagtgcttgatcactttctggggcaacccggacttgtctgccatctcttttatttgctcttcactgggggagttgttaatgtcaaaatat

SEQ ID NO: 136819 - DNA, 122 bp, Homo sapiens
cttatactctgatgcgggagagagccacaacggagcactcacggaaggttgacaataccacgactttacgcaaagccgttcaccacctgtgtggctttaggaaaaccacttcactcccctga

SEQ ID NO: 136820 - DNA, 122 bp, Homo sapiens
gaaatcatgtgtggtagatagtttgcataactttgggattttccagagagaggatgaaaacggtggccctccttgtaatgtctaggcacatgggacatccagtggaactgttgagggaggag

SEQ ID NO: 136821 - DNA, 122 bp, Homo sapiens
aggtgcaaagaattaagtaatagggtgacatgtgaggggagaattgggtagttctctgtccgtctggagtcagccaaggcttttattggtaggattttaggtgaatagcaaaaagaattagt

SEQ ID NO: 136822 - DNA, 122 bp, Homo sapiens
agtggagtgcctgggatttaaatagaagcagggtgcggggtgggaaggagagcttagtgacgatggaaactatgtgaagcatttcttgccaagatgtggcgcctttgccctgatggtgttct

SEQ ID NO: 136823 - DNA, 122 bp, Homo sapiens
tgaaagggtgtcacctctgcataaagggacacccctgaaagggtgtcggctccggataaacgggaacccctgaaagggtgttggctccggataaacggacaccactgaaagggtgtcagctc

SEQ ID NO: 136824 - DNA, 122 bp, Homo sapiens
acggaggctgaagctgtttttctcttggttaaggtattgtcattagtttcctgtcagagtcggggtcacctctctgcccttgtcggcctgcccaacagtcacacaagttgaacgaattcggc

SEQ ID NO: 136825 - DNA, 122 bp, Homo sapiens
atcgcacccagcccccgagacctgctgcatcagaatctgcctttaataaggcgatttgtgcgtgcattcgagtggcacagcactggataagagagtggttctcaaactcagctgcacactgg

SEQ ID NO: 136826 - DNA, 122 bp, Homo sapiens
accctcctgcttccctccccgccccgcgccgcctctctggtttgtgcgcccgtcgcaggtcgcaggcctctttgtcagctggagttgcgcggtgagtgcatctccagtcttcggctttcggt

SEQ ID NO: 136827 - DNA, 122 bp, Homo sapiens
ccgcgttcctaactgtggggaggagcagagccctgcggtctggatgttccccacgcaccgcgttcctgacactgagtctgcagccccagggctccacgactgcagcctagagtgagtccggc

SEQ ID NO: 136828 - DNA, 122 bp, Homo sapiens
agtcacctaaatgcttttgctccctagggctctatcctgggcctcttatttcacaggtcccgggacctcatccactttccccaaacccctgtctcccattcagatctctcttgtggaagcgg

SEQ ID NO: 136829 - DNA, 122 bp, Homo sapiens
ggttgaagaagaatgagcaaagagtagagtaggagtgtaggagtgtaggaggctagatcacgtggggccttctcagctatttttaagaatcataactttaactgtgagatgacaagccactg

SEQ ID NO: 136830 - DNA, 122 bp, Homo sapiens
ggtgactcttgtctggtgggttcggttcagccccagtgggctttgcatttgcaacaggcacgtgagcgatttctcagtgagtccggctcagccgcactgaggagataagtggggaaagagca

SEQ ID NO: 136831 - DNA, 122 bp, Homo sapiens
aacgacccatcagctccaggacttcacagcgccgcaacaattatgcatgagggagtgattcgggcggaagccaagcaggcaggcgctgagatgtacccggcgtccctcccgctagcggggca

SEQ ID NO: 136832 - DNA, 122 bp, Homo sapiens
cgcctccatccccgcggccgcagctcctctcgccgtccgcgcgcacaccatgacgaagaacgagaagaagtccctcaaccagagcctggccgagtggaagctcttcatctacaacccgacca

SEQ ID NO: 136833 - DNA, 122 bp, Homo sapiens
accccggaggcagaggttgcagttagccacgattgtgccattgcactccagcctgggcaacgagagcgaaactctgtctcagaaaagaaaaggccacacgcaaaggccagagcatctatgat

SEQ ID NO: 136834 - DNA, 122 bp, Homo sapiens
aattctacgggcaaattgttccgagtgcaagggatttggtgtgtgtgtcagtgattgcaccgctgaaaacaattctgtagatgtgtcgatgcctttagaagaaagggctccaaagaatcgtg

SEQ ID NO: 136835 - DNA, 122 bp, Homo sapiens
tccactggttcttccgttgtttaaagacgcgcggctgcgcatgggctgtcgagagagcggcgggaggcactacagcgcccctggaggcccggagggagaacggcccggtcccagttgtgcag

SEQ ID NO: 136836 - DNA, 122 bp, Homo sapiens
cgactgctcaaatctacctaatgtcttctggaaccttcctcaacaaatgctgcctctctccggcatcccccatactgcatcttagccagtcactagccccttgccctgagtggccccaatgt

SEQ ID NO: 136837 - DNA, 122 bp, Homo sapiens
tagccccaaaattaggggactgtgcacgcggttgacgaggcctggctatgggacggtggccgcgaagcacaggacggcgaagccccaacctcccctccacctggcatctgtgctgtgtgttc

SEQ ID NO: 136838 - DNA, 122 bp, Homo sapiens
ctctcctcccaccacaaaagctttctctttcggagcaacctaggtggtttctagtgaggtcgatgagagaaagacagccctgtttacccacgaggccttcagaaaatctccccaggcggggc

SEQ ID NO: 136839 - DNA, 122 bp, Homo sapiens
agcagggccaggccacccccacatccttactcctcttttctcctttgtcccaggcgatgccggcctccttcacctgcgctgtgatgcccagcatcatggacacggccaggacgtcggtgatg

SEQ ID NO: 136840 - DNA, 122 bp, Homo sapiens
tctgagactcctacgaccccaggaaacttacctcggctcggggcgccccccccgacttggcgcagagcctgcgtccccctgccgatgcccacccgactcgctaaagccaccgaggcagacga

SEQ ID NO: 136841 - DNA, 122 bp, Homo sapiens
aactgccgcctggtctgcagcctctggcgggacctcatcgacctcgtgaccctctggaaacgcaagtgcctgcgagagggcttcatcactgaggactgggaccagcccgtggccgactggaa

SEQ ID NO: 136842 - DNA, 122 bp, Homo sapiens
gcaatgcagcactgtggtggggcgcagccgcaaggcctcctttgaccaggacttctgcttcgacggcctctcggaggacgaagtgcgccgcctggccgttcgagtcaaggcccgggacgagg

SEQ ID NO: 136843 - DNA, 122 bp, Homo sapiens
ttgtacaattgataactgaacatcggtgagttagggccccagcagttgtaattagcaccccgggtgtcagccagaaaccaacaaacagccaaatccctgcagccccgcccagcctatccacc

SEQ ID NO: 136844 - DNA, 122 bp, Homo sapiens
tcctgagcaacagaaacagcactttaagaaacgaaatcgtggacgcacttggaacacggccgcagtgactggaatggtgcccagagccattttaatctggaacagactggggaccaagtctc

SEQ ID NO: 136845 - DNA, 122 bp, Homo sapiens
ggagaccccaaccaaagagctggggccctgtggaggagaggcgtgcggcccggacctgagcggcccagccccagcctcaggctctccctacctgagcaggtgcatcaactccgaaagctcca

SEQ ID NO: 136846 - DNA, 122 bp, Homo sapiens
ggagaaagttaactgttagccttcaatccttacgtaaacaagaccggttgcttttggcaccgttaggctctggcttttggataatttgtaacaaggagaattgaagttgttccattgtgttg

SEQ ID NO: 136847 - DNA, 122 bp, Homo sapiens
cgccgggtccaatcagggctgctctgcccgggtgatcgttgctcagttactcaagttatccggaaattcgagaacgatgggggaaagtgggtagaattttaggccaccgagaacttgtgcaa

SEQ ID NO: 136848 - DNA, 122 bp, Homo sapiens
aatcatgtctaaagcactgtaggacaaactgggaatacaactgatagatcaagtctctgccgtgaagagatctatccggtggtggagaaaacttgtaaagaattagtccaggccaggcacag

SEQ ID NO: 136849 - DNA, 122 bp, Homo sapiens
ctgaacccgaagaaaaaattatacgtgctgctagctgcaaattgctgacaaatgctaaggcgctgtaggaaaagacatgcaaccgaaatctgtctgctgcaccattccaatcaaagtcaggt

SEQ ID NO: 136850 - DNA, 122 bp, Homo sapiens
tggccccagcaaagtctgtctatgaagccagagtgattgcataagatgcccccacgtctccggctctgttcacctggtccaggagggactcaatcccccagggcacccccccagagggacac

SEQ ID NO: 136851 - DNA, 122 bp, Homo sapiens
gcctcttgtctggtttaaatgatcgagacgaggaacaatatttttagacagatgcacgcccgtcccagcacggctgttgtgattatgcaaattcagtcgtaagaagtttaaaagcctggaac

SEQ ID NO: 136852 - DNA, 122 bp, Homo sapiens
ggcgtctgctccggttcagctgcaggaggtttcttgggagttcagcccagcgcgcagccccgccgcgacgccgcgagccgagaactctcctggggcgaagggagcgctgagaagtcgctact

SEQ ID NO: 136853 - DNA, 122 bp, Homo sapiens
taaagtatcaagattatgtttcagagtcttacactctgaacattttataagttctggcagcgtgcctttccctgacacccttccttaccctgtaatgcagataaatgagatattttggtcat

SEQ ID NO: 136854 - DNA, 122 bp, Homo sapiens
actcaccgctaccagcgcggcgggctcccggccgctccttcgcctcaggcccgccgctgccgcctccgcgtcggcccacctgcccgccgtaggacaaaggcgccaccaaccgaccggcgcgg

SEQ ID NO: 136855 - DNA, 122 bp, Homo sapiens
ggccggccccagggcgacccctccggaggcccccggagagcaggtgtgcacctcgcctcccgctgggcagccagttcaggagaaaaatgtgaagcttttagctaaacaaaatatttctttcg

SEQ ID NO: 136856 - DNA, 122 bp, Homo sapiens
gactcagaaaactacattttcatttctgacctaggcaaaatgaatcatgttgctattgttcgcctatctcaataacttagaaatgttgtcatttcttttacagagaagacacagtataaagt

SEQ ID NO: 136857 - DNA, 122 bp, Homo sapiens
gtcagaatccccaattcgatagaaacttacaggtcttgtgatctaatctgccacttgatccgtgaattacctataggtcatccctaagaggtggcctccagcttctgcttgaattccttcaa

SEQ ID NO: 136858 - DNA, 122 bp, Homo sapiens
aaaaatcttcttcccaagatacgatggaggtactgtgtaatactagttcatggcttctcccgtaataaagactcaactctcaggttgttggaaattatgagagtttctttatagaaaaaaaa

SEQ ID NO: 136859 - DNA, 122 bp, Homo sapiens
ttccggaactgctccgaaagttccactggggacgatctcgccatggttgagggacttgggcggcagtcacattagagacccagagacagggagggagacagaagaagagggtcacgcacctg

SEQ ID NO: 136860 - DNA, 122 bp, Homo sapiens
tcatggtgggtgggagttgagtggactcgaatcaagtctagggtgaatgtgttatgtctgcgactgagtaagtggggtgctgacagccgagaggccctgctttccatttgaacccgaatttg

SEQ ID NO: 136861 - DNA, 122 bp, Homo sapiens
tggcagccttttctgagcctgtccccttctctgtaaacctggacgtgtttgatctacgctcgcgtcccggcaggaggcttccagcctgcacattcctgggggcccgccttccccaggcacta

SEQ ID NO: 136862 - DNA, 122 bp, Homo sapiens
cctagcgctgggcaggcctctccggacccccacatgggcagtctgtgcacccctattccccgaagcatgggcctaggcctggtgttcccgtgccatccctgggaagacgagccaccctgtgg

SEQ ID NO: 136863 - DNA, 122 bp, Homo sapiens
gggtaagctccgtgagtcccgggcgcccgggggacctcagtggagttggggggaatgaggcgggcacttaccggactccggagttgcctgtgtctctctgcctggacccacggcagcgctcc

SEQ ID NO: 136864 - DNA, 122 bp, Homo sapiens
tttttcatgcctctgtgggaagtccctggtcagttttaaaagggaagggcatgactatgacgctggattctccctgctagtgatgcatgagcacctgtggtgaacgagatggaaatgatgaa

SEQ ID NO: 136865 - DNA, 122 bp, Homo sapiens
ccgtttccaatgggctggaactgcggtcccccgctgttctctgcggccgtctagggatggcgctcctgcctactccggaccatccctgcttggactgaaagcctgggcttcggcggggcggg

SEQ ID NO: 136866 - DNA, 122 bp, Homo sapiens
gactcaaaacaaacaaacaaacaaaaacccaacaggggagatctttatattatcatgttacgtgaaaaatacaaaaacagaaaacaaaacaaaaaccccacaaaactcaaggccttaaattg

SEQ ID NO: 136867 - DNA, 122 bp, Homo sapiens
gctgacacctgcctgcccctccctatctgccgaggccgtggagatcagcagcagcgaaagcgctctgggcttagaagaggaaaagggctgcgtgagcccaagagcttgcatcggaaggctcc

SEQ ID NO: 136868 - DNA, 122 bp, Homo sapiens
tgggcctgacccagccataagcctctgtaagggctctggggatcaaagccaagttcacttcggcttgagaggacatttgaaagaaacgtgcttctaccattaaaaaaatttgcctattattt

SEQ ID NO: 136869 - DNA, 122 bp, Homo sapiens
ctttgattataagaacctgaagtacatggggattgcattttggatgctgatccggggaaccgggtgacaccacagacaccttgctgtggggcttgccgcagtaaacatcactgtcccaattc

SEQ ID NO: 136870 - DNA, 122 bp, Homo sapiens
gcgaggtcagtggcttggaggatctggggctggggtgaggagcctactgtaagaccctaccggatggacactagtagcaggcacgcgccgtaaagatgaaactggtttgttttgggaacttt

SEQ ID NO: 136871 - DNA, 122 bp, Homo sapiens
cgctcagggcggtgtcgctggggcggtgccgctggggcggggcctgcggggtggggctgacggcacggggcggggcctcggggaccccggcaagcccgcgcacttggcaggagctgtagcta

SEQ ID NO: 136872 - DNA, 122 bp, Homo sapiens
aagcacgcgatggggctagcgcccagtcctgcgggggcaggcgccaagctcccgggagtccgcaagtcgcttcctatattggcaagcttcaaatgagacattagaatctccggcaaccttcc

SEQ ID NO: 136873 - DNA, 122 bp, Homo sapiens
cgataaccaactctcagaggtggccaataagttcgccaaagcgacaggagctgtgagttccgggcttggggcggggaccgggctgagatgaccacaaggcttcaggccctgacgtgcttagg

SEQ ID NO: 136874 - DNA, 122 bp, Homo sapiens
cttctgagttcacaaaggagcagagacacaccggtgctgcacaggaacccccagggcccccgtgttcctagcgcagcagagcctgccccgcatccaggctgcatctcctggggctgtgactc

SEQ ID NO: 136875 - DNA, 122 bp, Homo sapiens
gtgtgagcagcagaccagacagctgggcgttgcgcaaggggagctgaagagggccatctgcggctttgatgccctcgccgtggccacgcagcatttctttagaaaggtgaggccccatttcg

SEQ ID NO: 136876 - DNA, 122 bp, Homo sapiens
gggtcctcgctgtggggcaatccgggcttgcagacgaggtaaggtcgattccatttggcccggggatggtcacacgcgcgggggccggaactgccgtcgccggcgcggtcgttgtcgcattg

SEQ ID NO: 136877 - DNA, 122 bp, Homo sapiens
ctgcgtacactcgttgtccgaggcacaatgaggcccgggcaggagcctggaccacgtctccgcggctgcgcagtagcgcttggcatgcgtgcgtgactcctgggggtcaaagggcctcgccc

SEQ ID NO: 136878 - DNA, 122 bp, Homo sapiens
ccaagaaaccacccaataggaggccggaagcatcggaagtcacatgctgcccaggctgcgcgggtgattggcttggctggacctgaatgatgcggctgtgattgctgaattgtctgggcagg

SEQ ID NO: 136879 - DNA, 122 bp, Homo sapiens
ccctgccccacacgggacgaagaacctgcagtgccatgttccgtgagccaagggtgaacacggtcgcacctcacgcagtcgtgcagcaggtcctggcagatgatgcatgtcagcgtctcctc

SEQ ID NO: 136880 - DNA, 122 bp, Homo sapiens
acgacatgaacagtatttcatgattaaagacatcgcgtccatgtataattgagatgctgccgcatttgcggggattttcaagcgaaaaccaggccacgtggaaaggctaagccctcgcaccc

SEQ ID NO: 136881 - DNA, 122 bp, Homo sapiens
gcagattaccaggcaaatgggcaaatggagatggttggttctctgtcgataagtaaatcacggggaacagaggctttcctggaggctgaggctgagctgattgtttcttacactgatgagga

SEQ ID NO: 136882 - DNA, 122 bp, Homo sapiens
ttttgtgtatattttttgatatggagtttcactctgtcacccatggatggaatgcagtgccgcaatcatagctcacagcagcttcaaactcctgggctcaagtgatcctcccatttcattct

SEQ ID NO: 136883 - DNA, 122 bp, Homo sapiens
tctgggaagaacctgggtcatctgcctgagccaaggccttcagggagtccagcccagatccgaggaagcatctttcctctcccaggccccaggaaggggcttggcaaacccttatcgcctga

SEQ ID NO: 136884 - DNA, 122 bp, Homo sapiens
cccctccggggacccggccccgaggcaaggctggagtcgctgccccgggccgacgccgcgcgccaggctaacggacccgaggggccacctgagccctgttaggaacttccctaggcttcgag

SEQ ID NO: 136885 - DNA, 122 bp, Homo sapiens
attagcataaaattatgtataattgggtgattttaaaaataattaatgtctaacatccctcggtgttgctttgggctatttcttatcttaaatataatagggtttgttctatattaagttta

SEQ ID NO: 136886 - DNA, 122 bp, Homo sapiens
ttgcgcgcgctcctgtttcatcgggcttcagtagttgccatcctttctgggtctggcaggcgccccctgagggtcttacatcttttgggccagtggagagggaggggcaagctttgcctggt

SEQ ID NO: 136887 - DNA, 122 bp, Homo sapiens
ccatgaagtcccataaattgggtggctttacccaacagaaatgcaccctctcatagttcccgaggcccgacctccaagtccaggtaccggcagggccaggcttccgctggggctccaggcgg

SEQ ID NO: 136888 - DNA, 122 bp, Homo sapiens
gggccgggggcggaggcgctgggggccggggccggggccgggggcggaggcgctgggggccggggccggggccgggcgccgagcggggtccgcggtgaccgcgccgcccgggcgatgcccgc

SEQ ID NO: 136889 - DNA, 122 bp, Homo sapiens
cagagttcgggtgattttcctgcttcagcttcctgagtagctgggaccaccacaggcactcgccaccatgcccagctaattttgtcttttttttttttttttggacggagtctcgttctgtt

SEQ ID NO: 136890 - DNA, 122 bp, Homo sapiens
aagtgtcccaatggattctgctgcaggggtccctgtttgacttgattccttcttcctgctcgcccctagcctgtctccctaccaccagccctgttcagtgaaagaagaacttgctttcttca

SEQ ID NO: 136891 - DNA, 122 bp, Homo sapiens
tggtggccccggcgagcagcaggtggccttcccgctgagccacaacctcacggccatccacgaggcgctggagaccacacaatacctgaactccttctcgcacgtgggcgcaggcgtggtgc

SEQ ID NO: 136892 - DNA, 122 bp, Homo sapiens
tctctgagttccgcacctacagcttcccctgctacctcccgcagccgctcatcaaccacgcgcccaggtagcccctgcgcccgccgcccctcctgctgcggccctggctctcccatccccaa

SEQ ID NO: 136893 - DNA, 122 bp, Homo sapiens
gcagccctcgcagccctcgctcgctctcggtgcctccttgcccttggcacccaccctgcccgcgattgcaggccccacactcggagccgccagctggccctgccggccctgggcagtgaggg

SEQ ID NO: 136894 - DNA, 122 bp, Homo sapiens
atggagtggcagggaatgccagggcagaggcgccgccaggacggagggtgcaggctcaggcgcagggaaggccgtgctctgcgttgggaaaggagccacgggacgcgctggaggctgcagtg

SEQ ID NO: 136895 - DNA, 122 bp, Homo sapiens
ccctttttaccggttctttgttctgtggtgtgtgtgtggtgtgagcgtggtgttttgtctcgaggagacatgggtcagacacaaagtaagcccactccgctaggaactgtgttgaaaaatgt

SEQ ID NO: 136896 - DNA, 122 bp, Homo sapiens
gatggcttatgattgagatgatggctagctggggcgaggggagcagtctttggctgtggtcgtggatccttatgggatccttattggttgtattctgggctaatcgactgaattaacttctg

SEQ ID NO: 136897 - DNA, 122 bp, Homo sapiens
ggagcggcgcgaggaggaggcgaacgtggtgctcaccgggacggtggaggagatcctcaacgtggacccggtgcagcacacgtactcctgcaaggtgcgcccacccggaccccggcctcccc

SEQ ID NO: 136898 - DNA, 122 bp, Homo sapiens
gtgcgagaagcatcctgtagtgagcggcctcccagctgactgtgaagggtgctgagcagccggggtgcggggtgagatgggcacgaaatcagcacaggcgccggggcaggaccccggcatgg

SEQ ID NO: 136899 - DNA, 122 bp, Homo sapiens
ttgttgggtctttgttaaaacaacttagcctttccatcaaataacatgtacatgttgcatcgtactgaagttattgattgttacgaggaaagtactcattaaattatatgaactcaggaaca

SEQ ID NO: 136900 - DNA, 122 bp, Homo sapiens
ccctcaacccagccagtggggaggggtctttttctgtctctatattcgttatattcatggcgccttgcttagaagaccatggatggcttgccaaattattagaagatgaattgtgatctttt

SEQ ID NO: 136901 - DNA, 122 bp, Homo sapiens
atccaacaccagtgtctgtgaggtgtgggcccggccccaggagcggggcctgggcagccccgtgtgttgaggaaggaaggcagggcccccgctccccgggcctgaccccactgcttcagccc

SEQ ID NO: 136902 - DNA, 122 bp, Homo sapiens
cacctatgaaagatttgcataataaatataacccgttaattgtaactcttttgcctctgccgtgtctggatggtttcccatgagcgacatgaacagaggccactttcttgacacggtttgca

SEQ ID NO: 136903 - DNA, 122 bp, Homo sapiens
caatctccggagggtgtgggaggggaggcaacagcacggcctgtgtgcccagggtgccagcggagccccgagtcatcacggtgactgttccaggagcgcgtcagcagccctcactctaccct

SEQ ID NO: 136904 - DNA, 122 bp, Homo sapiens
ggatatgagggaagagaggtagggaggtaggctagaccaggaaagggacctggttcttttcgtccagactgccacggctgcgagagcgcctcgccgctctttccatcgctcgatagacaggc

SEQ ID NO: 136905 - DNA, 122 bp, Homo sapiens
cagtagttgggcgacttctcaatgtacaccaggtctgtctccatgggcttctgatagctgcgcagctgtttgatgcgcaggaaggtgggctgccgcagacggctggcccgcaccacctccac

SEQ ID NO: 136906 - DNA, 122 bp, Homo sapiens
aactctgccttggctgacttggggaccccttcactgctcagccttcccctctcttcctgccgggcggtccacctaagctccctgactcttcccacgcggccctgggtcccctccccacaggc

SEQ ID NO: 136907 - DNA, 122 bp, Homo sapiens
ttggggggttttcactctttttcaaaatgggaagcaccagctgtagatcaaggagagatgcggggatattgttatggctgtagtcacagtagtatgttttaaatatactttaaggggaaaag

SEQ ID NO: 136908 - DNA, 122 bp, Homo sapiens
gacagcagagcatgtcttactctccctgcctcctaccacagaggccagaatcacctggaccgagctggaggcctgcccagggccctggcccttcacaaggaggagtctcacaggggagagtc

SEQ ID NO: 136909 - DNA, 122 bp, Homo sapiens
cctatggcaatataatctgcatggctgtagctgggtcactgtcacatctgggttctagctcgcttggaagaaagaggcatatccagatgatttctgttctataactggaaggggaagacaga

SEQ ID NO: 136910 - DNA, 122 bp, Homo sapiens
tccaccgctgtcacctcctgctgctcttcctgctgctcgtgtactcgttaggtgcggacccgccacctcttttgtgaagcagcagctgaggagactccggtgttcaccatggccaacgaaaa

SEQ ID NO: 136911 - DNA, 122 bp, Homo sapiens
gcttatgtgtagttgaagcgcacactatacaggcatactgaacatgcactagtctgcccccgcgtgaacacgtgtgcctgggtgcaaaaaaaatggctctctgccgggtctgcgctgtgcca

SEQ ID NO: 136912 - DNA, 122 bp, Homo sapiens
gccgcgcgggcgcaggcccattcacggccagaaaccagggctttgaaatccgagcccgggcgctgccagactggtccggcgagcggggccgacgggcgcgggcgccaccgagggtcgggggg

SEQ ID NO: 136913 - DNA, 122 bp, Homo sapiens
ggactaagcggtccacaggcagccctgctgtacatgaagcggggcaggtactgggttgggcggtgtcctggcacagatgactgtgcaaagccacagagggccacactgcctgaggccccgcg

SEQ ID NO: 136914 - DNA, 122 bp, Homo sapiens
tatgtgcctacacttgtgcacatgttcgtgtgtgtgcacgtgtgttcgtgtgtgcacccacgtgtttgtgtgtgtatgcacatgtactcatgtgtgcatgcacatgtgcatggatgcatgtg

SEQ ID NO: 136915 - DNA, 122 bp, Homo sapiens
atactcgcaaacacgggactacaaactattgattccattccgcgtgcttcaggaaggtggcgctgtttccgtgcagctcatcaggtacctcagaaaaagaaatttggtggagacgtttccgc

SEQ ID NO: 136916 - DNA, 122 bp, Homo sapiens
ggaactcaagatgctaggtattttgtcctcaacatagctgcagcagtccattccactccacggaccaccccagacctgttgaaatgccagcctcatttccatgaccatagaacaactggggc

SEQ ID NO: 136917 - DNA, 122 bp, Homo sapiens
ggaggaagccgcacctcactgagtcatgcagcctgtgagtgggagaacagaattcaaacccggctgggctccatcagacccaggtacgagggcttcctcgctgcctccccagcctcgtcatg

SEQ ID NO: 136918 - DNA, 122 bp, Homo sapiens
catcgtagggcatgtcagagtgggcaggggatgggggggtgtcatcgtccaggtcctggacggggctgacactcctgaggaccgactccccaaagctcttcagcaagttcttgctctcgtgc

SEQ ID NO: 136919 - DNA, 122 bp, Homo sapiens
caccccgcaaaactccgctttctggaccttgtctggggccagcagctgtcatttgccgggcgttccgctttctccactgtaccatgctaatttttcgagggacaattttttgacaatgagtc

SEQ ID NO: 136920 - DNA, 122 bp, Homo sapiens
gaaaccgagaagctgtcatttcccagcgctgcgcgccctccagccacctccaggagggcgcgaggcttgtcagccggggagttaggacagtgtttttgcctcctacaatgatataaaggact

SEQ ID NO: 136921 - DNA, 122 bp, Homo sapiens
cccatttctctttgctttacggtctggatgctcaggcttgacagccgttggagcttccttcgggggacaggcaaattctgggtgtggtgaggaaaagatgctgatggagccaaggtagtata

SEQ ID NO: 136922 - DNA, 122 bp, Homo sapiens
ttctcaaaatgaacttcatctattttttctaattatgtgtttcgcttacacaggctgaagcgtgtttttagttcttagaaactctattctctaatgagaattagcatcttctcatcggggaa

SEQ ID NO: 136923 - DNA, 122 bp, Homo sapiens
ggaggcgccgtgagaaccgggccggccgcggggaggcgcagtgagaaccgggccggctcccgcctcaggaccctgcggcggctcttgctgctgactgtggcacctcctctgcctggatccca

SEQ ID NO: 136924 - DNA, 122 bp, Homo sapiens
tgcgggggcaagtgcgcgctgcgctgtggtcactggctctgtgccgcccccttccccgggcgcaggggacaagagacaggcctgtgccctgaacccggctctctctgcctgcctgtgcggcc

SEQ ID NO: 136925 - DNA, 122 bp, Homo sapiens
gcctcctcgcgccatcgggcggcggcgcggagctagctgacagccggcggcgcgacccgccgctccctacggcgcggcacacgcgcacacacctcccacccggcagccacctcccgccgcag

SEQ ID NO: 136926 - DNA, 122 bp, Homo sapiens
atgacaattttttcctttggtctaggatctcatttggcatcctgcattgcatttagctgtcgagtctttttagtttcctttaatatgagtacagtaccttaaatgtactttgcctttcatta

SEQ ID NO: 136927 - DNA, 122 bp, Homo sapiens
ccccagcagatgacggctctgggccgcctcccccgtgctgctgcctgcacctacctgctgcgtccggaggagccccgaccaccgccagaggcccacagcggcgccaaccccaccgagagcag

SEQ ID NO: 136928 - DNA, 122 bp, Homo sapiens
ccgagtgcagggcgtccagctgcgagtgaggcggacaagcccctcgccccgagacgctcgcggggatcccaaagggtcctaatcatggcagacgccgcgagcgaaatagaaagtgggtgctg

SEQ ID NO: 136929 - DNA, 122 bp, Homo sapiens
aggaagcaaggttatcgattaattataggcacagtctgaggcccaattaaaaagagatctcgtctaccagctctgtgggaaacaagcctggaaatagcattctgcagcagtcagaggtcttg

SEQ ID NO: 136930 - DNA, 122 bp, Homo sapiens
tcattctgttgcctaggctggagtgcagtgttatgatttgcctcactgtaacctcctcttcgtgggttcaagtgattctccagcctcagcctcccaagtagctgggactacaggcatgagcc

SEQ ID NO: 136931 - DNA, 122 bp, Homo sapiens
gcaggggacagagggttaacccagaattcagccaatgtgcttgttccatattcatgcccacgctgggaagtcacaagatggccaaggcacagctgcctgcaagccacgccacctcccacctc

SEQ ID NO: 136932 - DNA, 122 bp, Homo sapiens
ccccctcactgttcttctccaggaagtggctggggtcggggaacagatgaatatttcatccggaagccgccaagtgattttctcttccccaaacccaataggtaggactacgcccgttaccc

SEQ ID NO: 136933 - DNA, 122 bp, Homo sapiens
gacaagaaagaaaagaaagcttgcttcaagctgtactgatgaagaggccaatgtctcacgcgcattctcccatccaagtactaaccagacctgaccctgcttagcttctgagatcagaggag

SEQ ID NO: 136934 - DNA, 122 bp, Homo sapiens
ccactggaagcattgtgaggacattccttgcgacttcagcctggtgaccccaggagagctcggatcctccgcagggtacctagctatgtgccctgcaggcacagagacttgggagccacagg

SEQ ID NO: 136935 - DNA, 122 bp, Homo sapiens
acgcatccggtcgggtcgcgtaacagacagagtgctgctgggacactgtcctgactgcagcgaggggctgagatgtgcctgaggtttgactattacctttttatacgagaacctaaagctag

SEQ ID NO: 136936 - DNA, 122 bp, Homo sapiens
agtgtttttgaatactatttccacagttaacgaagtttagatgctgttacaattaaaggtcgacatttgctgattttcattatgcagtgttcttttggggagccaccccatattttgcgggc

SEQ ID NO: 136937 - DNA, 122 bp, Homo sapiens
catgggcctctgcgaaggcgccggcgtgcccacggctaagaaacttcctctttctgctcccgggaacgaaggctgtagcagagaaggccttcaagtttcgagacccagttccagccgcagct

SEQ ID NO: 136938 - DNA, 122 bp, Homo sapiens
gaggggcgggtcgggtaggtctcccggagctgatgtgtactgtgtgcgccggggaggcgccggcttgtactcggcagcgcgggaataaagtttgctgatttggtgtctagcctggatgcctg

SEQ ID NO: 136939 - DNA, 122 bp, Homo sapiens
tgggttctggtggccgaagccggagctgtgtttctcgcagactcggggagctacattgtgcgtaggcaattgtttagtttgaaaggaggcacatttcaccacgcagccagcgccctgcatgc

SEQ ID NO: 136940 - DNA, 122 bp, Homo sapiens
cctcctgctgctgccggtgctgcagctcctgcttgagcagggagagcggcgagtagtgctcggtggccagggcgcctggccgcagcccggcggacaggacccccagcagcagcagcagcagg

SEQ ID NO: 136941 - DNA, 122 bp, Homo sapiens
cgtgatgaatgagcttcctcgtgtgagggagtctggcgcttgggaggaagggggtcaggccgcctgttagacattagttattcagccacagctgggagagtgtcaccaggctgtgaaccata

SEQ ID NO: 136942 - DNA, 122 bp, Homo sapiens
ggagatgctagcccggaaggagtttcctgtggatgtggagggctctcggcggctcattgacgaacacacacagctcaagaaaaaggtgctgaaggcccctgtggaggagctggaccgggagg

SEQ ID NO: 136943 - DNA, 122 bp, Homo sapiens
tttttcctcagagtgaatataccaggccacctggaggcaggctttcctgagagcacctcccgcttccttttcctgctggcttttaacttttgccccgggggccacagccagctttctcactt

SEQ ID NO: 136944 - DNA, 122 bp, Homo sapiens
ggtgggttcagatttgaagggcgaggttcgaggccaagcccccgtcgcagcctaagactgcgggcttttctcctctgcagggatggggtagggcagggccaggggcggagttttgagcccag

SEQ ID NO: 136945 - DNA, 122 bp, Homo sapiens
tgcaggggccgagtatggatgctggggctcaacctttggattgtaaaagtttcctccttgcgctccccggactttcttttcaaaacgtggatggtgcaatcgtcgcttgcctaagctgctcc

SEQ ID NO: 136946 - DNA, 122 bp, Homo sapiens
tatttgagacattttttgtgtgtgactagttaattttgcaggatgtgccatatcattgaacggaactaaagtctgtgacagtggatatagctgctggaccattccatcttatatgtaaagaa

SEQ ID NO: 136947 - DNA, 122 bp, Homo sapiens
tgggacgcggggtgtacggagggcgggggcgagctgaaacagccaatccggcaagccgcgcgtgaggccagacgccagtcccacggggattgaattatgtacacacacaacccccaggcccg

SEQ ID NO: 136948 - DNA, 122 bp, Homo sapiens
cctctcctgatattgctctgaccaaatccaacctgaattggatctcagggtctcatcctccgatgccctgtggtggctcagacactattaatcaccctctgcttctggaagctcttccttcc

SEQ ID NO: 136949 - DNA, 122 bp, Homo sapiens
agtcagcccagaagcggctcattgaaagcagaccctcttcggcgctcgctgggcggaggacgcgccgcggtccgcagacccgagcgagctgggcaccgccgggcgcccccggccctgccgcc

SEQ ID NO: 136950 - DNA, 122 bp, Homo sapiens
tccagcccagggcctggcactggcgggaatgaatgactctcccccatctgattggtctggcgcagaatggtcaagataacccatctcggggttctgtgctgtcgaattccacggttgtttct

SEQ ID NO: 136951 - DNA, 122 bp, Homo sapiens
ctactgttggcagcagggacagttattgacctcttatccctcaccacctgagaagggacccgagatgcagaacatcttctaacacctgccaggtaaatgacatggaactggcagggctcagc

SEQ ID NO: 136952 - DNA, 122 bp, Homo sapiens
atgctcagccctggtttcagagaagcctggactccactctggaccccatgagatgatatgcgctggtactccaggctttaaatggcctgggaagcctcagtggattttgtttattttcagca

SEQ ID NO: 136953 - DNA, 122 bp, Homo sapiens
acctagatgggacaccagagccatatgtcgagatttttgtttaggtcggtacatctgggccgaccttgcccagcctgtttctcacccaccattcttgtctatcctggtcctcatttctacag

SEQ ID NO: 136954 - DNA, 122 bp, Homo sapiens
agcagcagcccaggcctttcctcccctggtcacatcaggcaaggctgggcaggatgaactcggccgcctctgcgtccccgtcacatgctgggctcagatgggcacttcatcacagctgcctc

SEQ ID NO: 136955 - DNA, 122 bp, Homo sapiens
gaaaggaggtgggagagcaaagggacaggaaagtgaggggaacaacagacgaccaacccccgccccaggagaaactcgcatctgggtgatcccactcgcccctcactagtgccccacgtagg

SEQ ID NO: 136956 - DNA, 122 bp, Homo sapiens
cgcactcagcctggggggctttccgggtggaagcgggcaagtggagcgtggcccagaggacgcagctggtacatggtcacgggaagctgacccttggttaagttgcgaaatgagcctgtggc

SEQ ID NO: 136957 - DNA, 122 bp, Homo sapiens
ggcccgcggccgctgctgtccccagacatagcgccaattcaccgtgcaacttcggaacggcggaagttcgcgccagaaactgaaacccctgctctgcgccagcgcctgctcccggcggaacg

SEQ ID NO: 136958 - DNA, 122 bp, Homo sapiens
acaggtcctgtctttacagtaatggagtaatgcctgcaaatgtcgtactcggggccctgtcgtgggtccatgtattcggggccctgtcgtgggtccgtgtactcggggccctgtcgtgggtc

SEQ ID NO: 136959 - DNA, 122 bp, Homo sapiens
gcagggactcatgcctcttaacaggaactgacaaagaagtgacacacccctaaagctttccgggcttctggtgtcccccaccacccccaccacacacactccagccagccctgggctgcagt

SEQ ID NO: 136960 - DNA, 122 bp, Homo sapiens
tgctggggacaccaatggcagctgtgggcagggccacccgaatgccaccccatagggcagcgggcccacagcatggaggccctccgtgtttgcttttcccagccctgcattagctgtgctgc

SEQ ID NO: 136961 - DNA, 122 bp, Homo sapiens
ctgctgccccgccctcgggaggctggaggccccccaaggacaggtggtttccaggagcagcgggagggagcccgggttgtgtcctgggcctggagcagagaggggaggagcccagcgcctga

SEQ ID NO: 136962 - DNA, 122 bp, Homo sapiens
aggtggctgcggcagggccgcagatcaaagtggtaactggggatctgagttcggcagtgacgcgcgtccctcacgtgaccaggagcctctatgtgcccaagtccctctcgtcccggtctttt

SEQ ID NO: 136963 - DNA, 122 bp, Homo sapiens
ccatgaaggtaaatgcgcgacttcttggagaagtagctttggcagacaacctggcttggtcgggcagtaggaaaaggagtagacacaggatattcccctctcgcttctttttcttctgccgc

SEQ ID NO: 136964 - DNA, 122 bp, Homo sapiens
gaacacacatactaaaaggtccatcttctgagtattttgttttcctgaacttaagctaaacgttaaaaaaaaaaagcacttatctatgaaactaagtttgctcagccaatcccaccttctat

SEQ ID NO: 136965 - DNA, 122 bp, Homo sapiens
cccctcccccacctcctgagccccaaaccgggttgtgcccgtgactgacaggcaaggctccgccctactccccgcccatttagcgcctcctgactgctgaatggcgggctcgccttggtctc

SEQ ID NO: 136966 - DNA, 122 bp, Homo sapiens
tctgcgatatgctaggcactgtgctggatgataagacagcacccctgccctctagaagctcgggcagttaaaatggagcagagggaagcaacggagactcagaaaataactatacacactaa

SEQ ID NO: 136967 - DNA, 122 bp, Homo sapiens
tgtgtctccgcgtggcccagcccctcccgcctcctgcaggtggaggagaaccgccagtaccgcatgcacagcctgcagcacaaggccgccagctccatctacatcaactcacgcagcgtctt

SEQ ID NO: 136968 - DNA, 122 bp, Homo sapiens
acatgagctacatttatccctttcagcttgtaaaaactattatcatcacataaagtgcagcgcgtttaaagaggtactatattataaaacaccaccatctaaataacattttctgctatcaa

SEQ ID NO: 136969 - DNA, 122 bp, Homo sapiens
ggcccgaggccggccagaggcgcttccccggccccgcggcccccgcccagcccggccccgcgacttcccgccccaggctgcggctggctgttgctcctggcccccacgcggcgctcacctcc

SEQ ID NO: 136970 - DNA, 122 bp, Homo sapiens
gtacgcacatgtgtcatcattctgataccccataaataacatgtttacatgcacatgtaacgtggtgccaaattctcccttatctgatgctccctgcccccctcctcaggccactccccaca

SEQ ID NO: 136971 - DNA, 122 bp, Homo sapiens
ggctgctcgtgtcctccctacctacacaatataccctgtatcattcaaggttctagaactcgaactctaacctacctttccagcctcatctcctatcacatcccctaggaatctcatctcta

SEQ ID NO: 136972 - DNA, 122 bp, Homo sapiens
cgagtctctggtgcggcagcttggcggtgccgcccgcgtcggcctcagccttccagggcgcgtcctggcccatcatgctgccgcagcagccggggctggcgctgcatgtccgctcgcccacc

SEQ ID NO: 136973 - DNA, 122 bp, Homo sapiens
tctgcatacgagttcttctctgtaaaaatggcgaccccgcgatgcagcgcctgagtgccgcgcgcctgtgacccgcgggtagatttcttaccacgtcctcctttgtgctgactggctgggct

SEQ ID NO: 136974 - DNA, 122 bp, Homo sapiens
actagccttctgaggaggccgcccagagcctggccagagaggagccagagaggagcggggcggagggggcctataaagccctgtgccaaggggcagactcactggctcagagggaggacgca

SEQ ID NO: 136975 - DNA, 122 bp, Homo sapiens
cagaagcagaggctgtgtttgaagccaccagccagggggtaggcaggatttcctgactctcgagtgtttgggtccagctctggcctggtaccccagaggcctaccaggaggcctgtgctctc

SEQ ID NO: 136976 - DNA, 122 bp, Homo sapiens
taccagctggtcaatcatttgcaaatgtgtagtgaagtcaaagtgctctccaccaggtggcgcactttcaccttagggagtccattgaatggagcccttgaattttgggtgaccagtattcc

SEQ ID NO: 136977 - DNA, 122 bp, Homo sapiens
gtacctgctcccggtggccctgaggacgtgtgggccaggggcggccccgaaattaggaagcggagggggagcaggtaaggaacccggcggggggtccctggggttggtgtgagggagtggct

SEQ ID NO: 136978 - DNA, 122 bp, Homo sapiens
cttcctgtgtgccctgagcccgctggggcagctgctgcaggaccgctacggctggcggggcggcttcctcatcctgggcggcctgctgctcaactgctgcgtgtgtgccgcactcatgaggc

SEQ ID NO: 136979 - DNA, 122 bp, Homo sapiens
gccgcctggcaggtagggctacacccagacggctcctacatggttcacagctgaggtgaccggtggctgcgacggctgctgtagctacccgggccattgacctcgctctctcgcgtcacttc

SEQ ID NO: 136980 - DNA, 122 bp, Homo sapiens
tggggagaaatcatttacagataattgtctagtcacggtgagccacagccaatacgcattcgtatgttaaagagcatatcacatgtttcactttatttggtgggaaatacagaaaagtgggc

SEQ ID NO: 136981 - DNA, 122 bp, Homo sapiens
agcgtctggcgttctaatatgccacaacgatcgtttgcgtcctgggttacgaggacatcgcgggcagccagcctctcggtgcaggggcctcagtgctgctgccgacacacgctcaggtgagg

SEQ ID NO: 136982 - DNA, 122 bp, Homo sapiens
ctgctggccctggttggcgcggggctgtgccacgccggcccgcagcccgggtatcccgcgcggcccagcgccaggaacaagtaagtgcgcgccccttggctggccccaaaccgcctacccct

SEQ ID NO: 136983 - DNA, 122 bp, Homo sapiens
gcttccctagtaaattattttgtctttgtgtcataggaagcacctgcagggagcagctctcgaggaatttctaattaaggacttcttgccaaaggcacatcaccacactgacatgcctcatg

SEQ ID NO: 136984 - DNA, 122 bp, Homo sapiens
catctccaagcacagatgtcaagagggcctccagctcctggtgcttgctagtcatcatgtcgtctgagacgcagccacagggagagactgatatcctagtgccagggatgccggcttccagg

SEQ ID NO: 136985 - DNA, 122 bp, Homo sapiens
tttcctggggagacacctctctgcaccagagatcggccccccggggtctgggcgtgggggcggggatttggatgttgggggtgcagaggccatggcctcgtcatcttctctgactctgccat

SEQ ID NO: 136986 - DNA, 122 bp, Homo sapiens
ccagcccttaaaaccaggactctcccatgtggggcgatgcagtgagacaagaggcaaccacgttgctgggggtgccgaagccaggccagcccttatggagagtgactcggcaacatgcactc

SEQ ID NO: 136987 - DNA, 122 bp, Homo sapiens
ggggtgggtatatttccttttttttttttttttttttaaacccctgtttttctgtttaaacggccagctccctgcaaggaaaaaaatcttctgtggagatcagagcgctggcctcggaccgt

SEQ ID NO: 136988 - DNA, 122 bp, Homo sapiens
acacgcaggcactcaggaacctgcaggagctgtggagtcagcgcagtgaagacgtgtgaccggtgcgaggcagacacccatcacggcaggtgcccccgagaattccgggcagagcccacgtt

SEQ ID NO: 136989 - DNA, 122 bp, Homo sapiens
agtgcgtgcctcgggggcagggatcccggcttttcactactgttagtaacagctcgcgcgcgctgcttcacagcaggtgggtgagcctacttttagtcttcccatcgacacccttagatggc

SEQ ID NO: 136990 - DNA, 122 bp, Homo sapiens
tgacttccctattcccccacgggcctggggaaaaggttctggggacagatgcaaaccccgcggggacactcagcctgctccagcaactaagaccaccaatttccaccagactggcgagtgct

SEQ ID NO: 136991 - DNA, 122 bp, Homo sapiens
cagagagtgagttaaaggcacagagatgaaaacgcggtatgggagagctggttcttgagtcggctaagaggggatgaactcaatggttaataggattggccatggcgaatccctcagcaggg

SEQ ID NO: 136992 - DNA, 122 bp, Homo sapiens
tctccaggaacgcagttaggcttttcgcgctagtcccccggtagggctggccgtctggggcgctcgggcttccttccctgacgggctgcagggtcttttgtggcgtttctgtctccttcgcc

SEQ ID NO: 136993 - DNA, 122 bp, Homo sapiens
tcagtcatccattcattcaacagtcttgttaactgagtgccaattacgctccaggcgctgcgaatacgagtgggtctccaccaccagaatggctaaagtgaaaaagaccgcaccgtgtggag

SEQ ID NO: 136994 - DNA, 122 bp, Homo sapiens
ttgaaagcccaagagatcagcagcctatgccaggaatgaggctctctctggaggcaaggccgagagcagtggccggtcactggctgcacagcccagagcagataccacagagccagggctca

SEQ ID NO: 136995 - DNA, 122 bp, Homo sapiens
ttaggttgcatgaagaggcggggcctcgcggggcggagctgggggtggtctgtgggtccgcgcgggcttcgggtagttcctgggtccggggagcagacgatccgctagccacattaggcgct

SEQ ID NO: 136996 - DNA, 122 bp, Homo sapiens
gcctttccagggaagcgagagaatcctccaacttccttccacgaaggtcacagggtggcccggagcgttacaatggaaatcggcgggcgagtcctgccgtcattttcgtcgtggctagatct

SEQ ID NO: 136997 - DNA, 122 bp, Homo sapiens
ggatggagatggtagatagcaggggctgcttaccttggtgatgcctgggttccacagaggcggcccagctggacggatggagatggcagatagcaggggctgtggagggagggagagggaca

SEQ ID NO: 136998 - DNA, 122 bp, Homo sapiens
ggctcacaggccctgtggcaggagaggagccaagaaatgaaagggcccggtgggtgtgggcgggccctgctccgatctggatctggccagtgcctgtggcacgccctgctctgtccctgggg

SEQ ID NO: 136999 - DNA, 122 bp, Homo sapiens
tcccgccttcatcccccgcactctccgtcaagatccccacctttaaagggatccgagcgacgttctagaaagcagccaaagcctgtcctgtagccacaactttcaggaggcggtatgagcct

SEQ ID NO: 137000 - DNA, 122 bp, Homo sapiens
cgactcttactgaccacggagccgggaggggcccgtcggatgcctccccctcccacttcgcgcctgcttcctctaaggctggatggcgtctcagtgcaccaagtagtttagcaagaagcgct

SEQ ID NO: 137001 - DNA, 122 bp, Homo sapiens
tcttcatgaagatgcagccaagcatgatggcgttgatcatgagccccacgatgttctgcacgatgaggatcaggatggccagtgggcactcctcagtcaccatgcgccccccaaagccaata

SEQ ID NO: 137002 - DNA, 122 bp, Homo sapiens
catgcgcaggaacgcaagctagcgctttggtgtgcgtgttcgtttttccctttgaatggccgtttacggcaccggcaggccccggatgaaagaactgaaatccagaaaagttcacatgcaac

SEQ ID NO: 137003 - DNA, 122 bp, Homo sapiens
gctatgtgcctttcttctatcatgttgctaattttagagtcgggttttttttcctgtactcgcgtctgttttaaacagtcagggagagactgaagggcgccaggatgtcctgtcacaggaca

SEQ ID NO: 137004 - DNA, 122 bp, Homo sapiens
ccgcccgaactttgcgagcctggcgggggagcacagaggcgggccgacctgccccgctagcgctgaggaacgactccctttatgccagctcgctgtccgccttcccgcagcgtacgctgcgg

SEQ ID NO: 137005 - DNA, 122 bp, Homo sapiens
ggaactttacatgtaatatctcactaaatctttccaacttccctataatgtttgtgttaccgctttatcttgagacataaaaaacttaaagctcagaacaatcaggaacttagcctaagttc

SEQ ID NO: 137006 - DNA, 122 bp, Homo sapiens
ctaatcatcagctgtgtaatctctgacaaagcaccaaacctctgcggacctcaaccttctcgtcagcaacatgctgcacctgtcatgtcataaggattaaacaggacagttttgtaaggtgc

SEQ ID NO: 137007 - DNA, 122 bp, Homo sapiens
aagcagatgctcggcttcatcgatacgtctctggtgagaccgtcagcatgggttctcccccgagcctgaccaactttgggtaaagttgggctttggaatctacaaaacccagggccagtccc

SEQ ID NO: 137008 - DNA, 122 bp, Homo sapiens
tgccttagatcataaagtgagcaaatggctaagccttaagccttaaatacacgttacaaacgcatttaactcggggtcttcgattggtctctggctgaataaccagttataaaagacatttt

SEQ ID NO: 137009 - DNA, 122 bp, Homo sapiens
agtctggaaggaactgggcaaacagatgccgcccaggcagtcagcatcagtggtggaagtcgtggtaacttgggccactggaacaatgcagcgtcctccaatgggcctggaagagcaatttc

SEQ ID NO: 137010 - DNA, 122 bp, Homo sapiens
tccctgacgtgaacagaaattggcaggagcagcacacacagaatagtaaaagacagtcctcgattgtaaatggacgaggtcccgcagaagactgaaatcttgggcccagccccacttttcct

SEQ ID NO: 137011 - DNA, 122 bp, Homo sapiens
accgatcctgtgggcctcttcgagcgggacccccaccgtgcctcccctccagcctttcgtcggccgcctacgctccctggactctggtatccggcggctggagctcctcttgagcgcggggg

SEQ ID NO: 137012 - DNA, 122 bp, Homo sapiens
ggaggatgaacaaggagtcagagtggacctgtggctctcccctgagaggataccaggattcgaggctcagcgccctgggaggagtgaacccctcagtttcctgagcctcatcagaagcagtc

SEQ ID NO: 137013 - DNA, 122 bp, Homo sapiens
ggcacccgtagttgggaacagcggaacgctggtcccggggactgagtaaggtgtctggatcggagggaggttcgggtgggcatcgggcggctggaagagctcgactcgtcccgctgggaaag

SEQ ID NO: 137014 - DNA, 122 bp, Homo sapiens
acttgggcaactctgggtttctagcagctaaaaatcatttccaccaaatgatccgtcagccgcggcggctctgggccggaggagggctgtttcctgcctccctcccgccccactggcgtcta

SEQ ID NO: 137015 - DNA, 122 bp, Homo sapiens
gccttccctggacaacgcatttgaaacgtaaccccaaggcaagaagccaccttccaggcgcgcagccgaagcccagtgccaaggaggccggagactcgggtgcccgcgcatcccgaaaacag

SEQ ID NO: 137016 - DNA, 122 bp, Homo sapiens
ttgtggtccccgaatcgctgggctttggcctgttgaagaacctgtcagaagaacaaatcgcggtctacagtgccctgatccaggacgggatgaaggttattctcattgagctggagaaaatc

SEQ ID NO: 137017 - DNA, 122 bp, Homo sapiens
tcctccctccctaccaccacccggacaaagacgtctcgatcgcgtttccccactccaggccgcagtaatagatcgctccggcagcaggcggtttgaaaggaattcattaggacgctgcctgg

SEQ ID NO: 137018 - DNA, 122 bp, Homo sapiens
cacttcgggaggagagatagagattggcagccatcttgctttggggcaagctggcaacgccggtttgtcttgacggctgcttagggcggtaataagggatcgaagaggatagcattcttgaa

SEQ ID NO: 137019 - DNA, 122 bp, Homo sapiens
aaggttcgggggttgtcaggtttctggatgagattcttaggatttctgggctcgggggctcgggatgagggacaactcgggctggacaaaggctgtccacgtccccgagtctgagcgcgtct

SEQ ID NO: 137020 - DNA, 122 bp, Homo sapiens
cacctggggtgtggccctgccatggtgtttccgacaagttcccacgtgacgcggcgaggccggctgcaaagctctgctctgggtctttgttttgcagtttggagtagaagcatcaacaacgc

SEQ ID NO: 137021 - DNA, 122 bp, Homo sapiens
ccacagtcagcgaggagggctggggagcaggtcaagtgctcgagcagacacgaaaatagccgggaccctcagggcagaagacccagagggtacccaggatggctgttccagaacttaagcaa

SEQ ID NO: 137022 - DNA, 122 bp, Homo sapiens
tggggttgggatcccagctctgtggtgacagaagtctttagtcccgtctcaatgcatcatcgccttttctttttatcagtctttctagctcttctagtcttgcaaggaagcccgccagcttt

SEQ ID NO: 137023 - DNA, 122 bp, Homo sapiens
gacttctcctctggctccggcttcgctgtagcctccagcagcctggctggcttccgcctccgaggccgggcatcagtggccccggtctcctgctcaccggagtctccctcctgctcctcctc

SEQ ID NO: 137024 - DNA, 122 bp, Homo sapiens
gaggttaggtccggcacctgtcagaaaccaggcctgacattttcaagatgggcacaggcccgctccgggaaggccccaggcccgtccatgtgggcagcgtcggcgtcgggcttcttgcctgg

SEQ ID NO: 137025 - DNA, 122 bp, Homo sapiens
tcccccccacccccagcacgcgcacacccttccccacctccccagcccgccgcgcctccccggagacccacaccgccacctcccgccgcagaacgggagggacaggaacacggacggaggga

SEQ ID NO: 137026 - DNA, 122 bp, Homo sapiens
agagacaattgaagcgcagggactacagaagtcgcacaccatcagttatttggagctctgcgctcaggtgggccaatctctagctctgcccctaggtgagaacagcttaacaatgtcctaaa

SEQ ID NO: 137027 - DNA, 122 bp, Homo sapiens
gcagaactgacctcactgtcggatgaggacagcgggaaaggctcccagtcccccagcccacgttcacagccttcttcgtctttctcctccacttcagcttcttccttggaggcggaggccga

SEQ ID NO: 137028 - DNA, 122 bp, Homo sapiens
tgagggacccctgggaaaggccccagaagatccttccccctgtggagttgggcgtgttggcgtgggtaggaggcgaggtcccggcccccacgtccccccacaggcactccagtgcgatgtct

SEQ ID NO: 137029 - DNA, 122 bp, Homo sapiens
tatagcgacagacttcatgctcctcggccccaaaactgcgaacggtctgcagccctccaacggcttcccgcaccacctgccccgccctggccactgcatcctggatctcccgaagcacttcc

SEQ ID NO: 137030 - DNA, 122 bp, Homo sapiens
cagcctgacgccgcaggacccctaaaccataatttctaatgttgtaactaatagattaatcgtacaaaggcagactggcacccaggcaagaagggggtcttttcgggaaagggctattattg

SEQ ID NO: 137031 - DNA, 122 bp, Homo sapiens
gccgttctgcagctggtacacgcaggtcacctcccggtgctggaagcctttctcacaggtcgccgagcaggggctccacgggcctgccacccacctgccagacgggaggaaagagagagaga

SEQ ID NO: 137032 - DNA, 122 bp, Homo sapiens
ttcaaagatttcaagaggccatcccacgagtcataaataatcgaaggtgctctgatgctgcgtccaggtgtgttgactgatagccctccccaccggccacggccggcctcctggattggagc

SEQ ID NO: 137033 - DNA, 122 bp, Homo sapiens
gaacaaatttcaaccaacatgaaaagccctggtgagtgtgttagttggatgtcttagactcggaggtaacaaaatgcagagactacctgcagggatagaattgctgattgcatgccctattc

SEQ ID NO: 137034 - DNA, 122 bp, Homo sapiens
ggggcaggtgaggggagactggtgggctccggaaggcttctcagcgcggagctccagctgcggggaggcgcggcccctcccggatgccgggacgagggaggggaagggaggggaagaggcgg

SEQ ID NO: 137035 - DNA, 122 bp, Homo sapiens
taccagggactacaggcacatgccaccatgcccggctatttttccatttttttgtagagacgaggtcttagctgtttcccaggatgagaatagatcttaaatgttcacagcacacacgcgcg

SEQ ID NO: 137036 - DNA, 122 bp, Homo sapiens
tgaagagctgtaacactcaccgtgaaggtctgcagcttcactcctgagccagtgagaccacgagcccaccagaaggaagaaactccaaacacatccgaacgtcagaaggaacaaactccaga

SEQ ID NO: 137037 - DNA, 122 bp, Homo sapiens
atgcagagagctctttttggagctgtaaaatggtttagattggctgaagcatagggtgcacgccaggcagcagctagaggcaaggcttgaaaaggtggcctgggtccagcgtgggaaaacct

SEQ ID NO: 137038 - DNA, 122 bp, Homo sapiens
gtggatgacgtaggtctctgagaggtgacttttgagcccgtatctacatggtaagtgcctcgcagtgacctggggccgtagcgttaccatttaaagcacagaccattaaatgcagaaattat

SEQ ID NO: 137039 - DNA, 122 bp, Homo sapiens
acaggggcgctcatgccttggccacgatcattttggccaccacgtcccgtgcgtgcacatcgatggtgcagatggtcatgatcttcatcctgtcgccagcgttgaggttccccatgagcagc

SEQ ID NO: 137040 - DNA, 122 bp, Homo sapiens
tttcagcgtgatttactaccacccaaacaccagctgtctgttgtgctgcggctgctgcgacgccctgcccggcccccttttgggtagaatctcttctccttgtgaagctctcagagccccca

SEQ ID NO: 137041 - DNA, 122 bp, Homo sapiens
ttcatctgtccctgtctgtttcccacctctgctgcaggtgcatggacatcctggagctgtcggagcgcctggacctgcagcgcttccactcgcacaccctgcgcctctaccgcgctgtgtgc

SEQ ID NO: 137042 - DNA, 122 bp, Homo sapiens
tcatcctggccatgctgcgccttcgtgaaagatgaggacccgaggctatggaccgggaggcgttggtgctattcaccaacagggggcagggctgcatcaaaccatctgcatcttgtagcccg

SEQ ID NO: 137043 - DNA, 122 bp, Homo sapiens
gctcatcaaggttacctgcccctggttttgtaaatcttggagatgattacttaaccggagcgggggctgatcccagatggccactgtgcaggggctggcccagtgttggctcatatttgcca

SEQ ID NO: 137044 - DNA, 122 bp, Homo sapiens
caggaggccttgggtgatggagcccatccacgagactttcagaaccagggtcctgctcttcgtccagaacgggcattccatgcgcaaccttaattccaagtctcactgctggcaactgagtt

SEQ ID NO: 137045 - DNA, 122 bp, Homo sapiens
ggagtgccagaaggaacccacctgactgagaatcgctgggctggacggtccccgccgccacgagaaggctcacccagacccaaagtcctgtcgccggcttcattttttggaagtctcagatc

SEQ ID NO: 137046 - DNA, 122 bp, Homo sapiens
ggttaggacccaggagctgcccttccatgatcacagctggctcgggcttctgctgacaggcgaggctgggctggcttgccagcagaacctcttatctccttcatgtggagtgagtggaaggc

SEQ ID NO: 137047 - DNA, 122 bp, Homo sapiens
aggcggagcgaggactcggggacagtaagttctgttctcgccgcgcagggggcgggctggcgggaccagctgcttccggctgggctgcgggcgtggactcctcattccggctgtggccgcgc

SEQ ID NO: 137048 - DNA, 122 bp, Homo sapiens
gcacacagccgatcccggcacacagccgatcccggcacacagccgatcccggcacacagccgatcccggcacacagccgatcccggcacacagccgatcccggcacactgctggcagcagtg

SEQ ID NO: 137049 - DNA, 122 bp, Homo sapiens
cacgtgtggagccaagcagccacaaacccggaatagcctgcttgacgcgactgctcgaatcgccgtaaagctacgcttttgcgcctcgccccttcacgacttgtagagctctttacggctct

SEQ ID NO: 137050 - DNA, 122 bp, Homo sapiens
ccagggcttcctgaggctgcggtggtcacgcttcgcccgtgtcctcctcacccgctcctgcgccatcctgcccaccgtgctcgtggctgtcttccgggacctgagggacttgtcgggcctca

SEQ ID NO: 137051 - DNA, 122 bp, Homo sapiens
tggagctagcacaggagtggaattttccagggagcgcgccctccgccgaaatgtgagccgcgaggacgcgcacgtgctcgcgggagtgggggagggtggagtaaggcgggcggagtacggcc

SEQ ID NO: 137052 - DNA, 122 bp, Homo sapiens
acttctgcggcgctttgcctctgccaccgtgccaagcttcctccagccgctgctggctgccgggacgtggtcatctcgccaggcacagcctgacaccaccgaagtttccgggtgcccggatg

SEQ ID NO: 137053 - DNA, 122 bp, Homo sapiens
agagcagctgacactccccactcactgcctggaggagcttggcggtgggatcgggcaaggcgggaaagataggtgtaaaacaaagcctggcacttaattacagtgcaaagatctcattatag

SEQ ID NO: 137054 - DNA, 122 bp, Homo sapiens
gaagcccgcctccggctggaagctgctctctcgcctctggccgccggcgtagtacccgggcgagtggtcgctgggtaggtaatcgctctgtgaatattcctcgcatggagggaacttggggt

SEQ ID NO: 137055 - DNA, 122 bp, Homo sapiens
ggcttgaggaggcggtgtctgatttacgtggagcccagagattggttcgaccaggggtgacgtttacgtagcgcgcagggaaggctggtcaccccaccctaatcttgttatgcaaataggct

SEQ ID NO: 137056 - DNA, 122 bp, Homo sapiens
gcagcgtgtgctgcaggaagctggagccaaggagctggtgcgtcaggctgcgccgtgccgcggatctgcagaccttttgtgtttttcagtagccatttgaatacctgttttactactaagtt

SEQ ID NO: 137057 - DNA, 122 bp, Homo sapiens
taaagaaccgtgaagatgcagaggtgggcacacacagcacagtgcaccccagatcacaagcgggacgttctcttcggtgcccgcttcccctgcctgggtgtggatggggcagcagtgggcgc

SEQ ID NO: 137058 - DNA, 122 bp, Homo sapiens
gacctttcaagacctagtacattaacttccctgcggtgttacaaagtaggtctctggacacgactgttggaaagtaatgatcctcgctaagtatttttgcaaaaggggaactgtgtcacaga

SEQ ID NO: 137059 - DNA, 122 bp, Homo sapiens
cttatctgtgtttctccttggaaagcctccctggccatcctgggtagttagccgagaaaacggatacaagtgtttgaaatgcatactccttgtttttggtattttttgttttcctacttcaa

SEQ ID NO: 137060 - DNA, 122 bp, Homo sapiens
gcctttcaccattagctctccctgggccgcgaggagctggggctcaaagttagcgggcgacgtccgaggcttagcctctagccggctgcagggacgggggcctggagttggcagctgctacg

SEQ ID NO: 137061 - DNA, 122 bp, Homo sapiens
gaagaaggcagcgccgccctcgcctgcagaaacctcattcccgagaaagtgcgggacgagcgtcttgggatgtggaagaagggggtcgccaggaggttttcttaagaactcaaaacaagcgc

SEQ ID NO: 137062 - DNA, 122 bp, Homo sapiens
gggtctcacaccctccagggaatgaatggctgcgacatggggcccgacggacgcctcctccgcgggtatcaccagcacgcgtacgacggcaaggattacatctccctgaacgaggacctgcg

SEQ ID NO: 137063 - DNA, 122 bp, Homo sapiens
atcacccacccgggtcccacggaaatctgtctctgtccccaccgctgcttgccttgggaacgcggcccgaaacccaggatctgggtgatgggcacaggcgggcggtcggcggtgtcctcgcc

SEQ ID NO: 137064 - DNA, 122 bp, Homo sapiens
cgtggcttccgcagctaccgtctgcacggtgagagggcacgggcacacggttcgggctggcgtgcagctctcccagccagccacgctctgctcaggcctggaagtgaaagccgcctccttcc

SEQ ID NO: 137065 - DNA, 122 bp, Homo sapiens
cacgcacggcgtgcgtggtggcgtcagcagttctagaacgttgctgtggtagcgctcgggcgccatgttaggacgaaggggaaggaggagaagcgcttaaagcggcgggagcggtgcgggag

SEQ ID NO: 137066 - DNA, 122 bp, Homo sapiens
ttatagcctaaaatgctcacagtagctttgctttgtcatcacagtgtggtattgctatcccgccttcaggtcaaaaaactagatatatcttctccattcccagtcattcttcttcccttgaa

SEQ ID NO: 137067 - DNA, 122 bp, Homo sapiens
caggctttttgagggtatttgaatggaacacaaaccctcctttgccgccagccactctttcgcacaatcactgccaatgaccagttggtttaaatggccctgaggctgacggcataggccac

SEQ ID NO: 137068 - DNA, 122 bp, Homo sapiens
cttctcaatggcctctgcggagcacccccagcccccaagccacagcccccggctcgaccccgaagagactagagttcctgctctcacacagcggattccgtaactgagctttgtctcctcgc

SEQ ID NO: 137069 - DNA, 122 bp, Homo sapiens
caaaagcaagccttaaaggagtatcccaaaaacacattttccccagaaggacgaggtggccgagtggttaaggcgatggactgctaatccattgtgctctgcacgcgtgggttcgaatccca

SEQ ID NO: 137070 - DNA, 122 bp, Homo sapiens
acccgccatgacgccaagcgcgcccttctccgacactggcgttgcattttgtctttgttacgccttcctgtttttgccatctgtggcagaagcaggcaccaaatgttccagaaacactttgg

SEQ ID NO: 137071 - DNA, 122 bp, Homo sapiens
gacgaaatctggctgtttagagtgtggcccctcccgcttcgctctctcttcctcctgctccggctatgtaggatgtgcctgcttcccattcgcctcccaccaggattgtaagtttcctgagg

SEQ ID NO: 137072 - DNA, 122 bp, Homo sapiens
cggagccggggaggcccatgccagcagcccggcagctgggcttccggaagcagcgggagccgggagcctgggaagggcctcgctgcttctctggagctgccgccatctcaacgaggcgtttt

SEQ ID NO: 137073 - DNA, 122 bp, Homo sapiens
caagtgctgaaaaagagaactgtcaacccagaatcttatattcagtgaaaatatccttcacgaatgaagggaaaatcaaaacattaaagatgaaggaaagctaagataatttgttgccagca

SEQ ID NO: 137074 - DNA, 122 bp, Homo sapiens
atggcgactcccaggtaaccggcgaagcgcgggaatccgtgggcgggggccggggagggccgcgagtggaggggggtggggaacggggtggggaggggaagggggaaggagatggggaggag

SEQ ID NO: 137075 - DNA, 122 bp, Homo sapiens
cccgtcatgcttgtggggggtctctttgcgtcgctgggcatggtggctgcgtccttttgccggagcatcatccaggtctacctcaccactggggtcatcacgggtgagtggggccggccggt

SEQ ID NO: 137076 - DNA, 122 bp, Homo sapiens
cagctcccggcctggtgaggcaggcagggcctggctgagcctacactggggtcagcagggcgaggggcctgggctgctgctcaggcctaggaaaggccggggtcagtgtgaaccggaccgag

SEQ ID NO: 137077 - DNA, 122 bp, Homo sapiens
agcctgagtgccagtcccagcctctctgagccggctcaggccaggcagtcagcttatccgcgcctaacttctctacagatgggggcaacaccagggcaaccccggtgggctgctgggaggaa

SEQ ID NO: 137078 - DNA, 122 bp, Homo sapiens
cgccgtattttccgtaagactgagaacagaggctgcaggttgcacctttgggtttggttgcggaagcggccacactcacagtggacacagtcccagtcccaagaagacaagagcgacagttt

SEQ ID NO: 137079 - DNA, 122 bp, Homo sapiens
ggagtttacagtgcacaaaggagatatacacacaccaaggtgtaacaagtcagataatcacgagtagggttagaaatataagcaaaatactacagaaacacaaaggagggacagtgcatcct

SEQ ID NO: 137080 - DNA, 122 bp, Homo sapiens
aaggccgacagcatcaacgccgcagagcccacactctgctgacgggaaggcagaacagtacgaacgccggaaaactgttcagcaggttcctttaaggtaaaaacacctttccctctgatgtg

SEQ ID NO: 137081 - DNA, 122 bp, Homo sapiens
gataatgtagacaaaagtctaatttctaggctggctgcagataccttgttcaagaagcgccggcaggatcttcttttgtacagctatgttagctttaattttgcacagctctagacatcaga

SEQ ID NO: 137082 - DNA, 122 bp, Homo sapiens
gcggacacagttctcattcccactaggtgtcgggtttctagagaagccaatcggtgccgccgcggtcccggttctaaagtccccacgcacccaccgggactcagattctccccagacgccga

SEQ ID NO: 137083 - DNA, 122 bp, Homo sapiens
aagcaaaacagagctccactgcccaaaacaaagatggccgagacgactcccatgcccacacgcaaaatggacgctgactatgacgttccctgcaacaatcctcaactggccccgccccacca

SEQ ID NO: 137084 - DNA, 122 bp, Homo sapiens
gtgaggagctgagcaacaagacccactcgcaggaggggtacagaggatgccctgtgaccccgcaactccactcacaggaaatgcctagggaatctctcacacttgagaatgactgctgcatt

SEQ ID NO: 137085 - DNA, 122 bp, Homo sapiens
cccaggggatggggaagcactggaagggaaaatcattcaccagcaaatgagaacatagtacgaggaggcttgaatcatttctgttaggagagagtgccagccgcctcctccaggaagaaaac

SEQ ID NO: 137086 - DNA, 122 bp, Homo sapiens
tggttgggtggccctgccctcctccccctccctctcctggaacattccagacattccagacgatctgcctgccattgctttcaggatatggattaacatcctagcagagatttgatttcacc

SEQ ID NO: 137087 - DNA, 122 bp, Homo sapiens
cgggtccagggtggcgcatgtcactcatcgaaagtggaggcgtccttgcgagcaagcaggcgggtccagggtggcgtgtcactcatccttttttctggctaccaaaggtgcagataattaat

SEQ ID NO: 137088 - DNA, 122 bp, Homo sapiens
tgcccggccggcggccgctgaggcgctcggggacgcaggggcagggcgcaaggcctggggcgctgaccagtccccggggatgacatcgcgacaacgcgcacgcacggccctgcccggccgcg

SEQ ID NO: 137089 - DNA, 122 bp, Homo sapiens
ttggcactgtcaataagtcttttgagaaggatggcatccctacctcagctactgagcatgcgggaaactgcgcgcaagcgcacaacagcgatttcacactgcctctttagactcctgatccg

SEQ ID NO: 137090 - DNA, 122 bp, Homo sapiens
atgtttatggaaccaattgattaacgtggaaaagtatgggcttcccagttttctgcccttcgtgagaacttaatcctgaaacactgatctcatgtcaaccttctgccttaactgggaattcc

SEQ ID NO: 137091 - DNA, 122 bp, Homo sapiens
ccgggaccctgccaggaaaacacagactgttccatctgtgtgcagaggggaggctggggccggattgccagcgatgtgtgggaagcacctctgaaccttcagcattcttgggctcatgcagg

SEQ ID NO: 137092 - DNA, 122 bp, Homo sapiens
cctgccccagcgcaggtgagctggcgcttgtccttaaccttcttcaacgacgaggcgggacggaggctcggacgcctccccagcctctgggctggcgcaagtcgactgcggttcgtcctcag

SEQ ID NO: 137093 - DNA, 122 bp, Homo sapiens
ttacctgaatgccccagcaaagggcacgactacttccggagccgcaccggaaccccttggcggattatgtgggttcctgcgggaacgatttaagaataggactacttcctgcttctggatat

SEQ ID NO: 137094 - DNA, 122 bp, Homo sapiens
cgaccccctagtaataacaaattcactgttgaccctggacagatggtgttcaaaaagctacgtgcagggggccagtacacttaggtcgcagggaaactcccacgtattaagcaccgactgtg

SEQ ID NO: 137095 - DNA, 122 bp, Homo sapiens
aagaggacgcggggtgggaaacgccggggccgcaggcaagtagtgggcgagtccggagggcgcgaaagaggggaggggcgcgggaggcaatggaaggagcgagcgcggggaggagcgaggcg

SEQ ID NO: 137096 - DNA, 122 bp, Homo sapiens
gaaggtcgtaaaacaccagaattccaacagccatatttccatggcatacatgggctggcgcggaggctcagagtgggcaaggcaggggtcgggctgcagggcgagcagggccacgcagcggt

SEQ ID NO: 137097 - DNA, 122 bp, Homo sapiens
agtgggcggggagcgtggtgagcggatgctgctggagtgcttgaaccccgaggcctggagcggcagtcagcacccccacgccgagtccctggcagtcccggccttccgggggcggccctggg

SEQ ID NO: 137098 - DNA, 122 bp, Homo sapiens
ggcggggtccgggtagggcatcgctgttgagtctatcttctggttccggccttttctttccgaagacctcccgctgcggccaacagccgggccacttccggggcttctcaaaggcaagagga

SEQ ID NO: 137099 - DNA, 122 bp, Homo sapiens
tagtcactcaagcaacagatctgtatgtaacacctactatgtgttgggcactgtgcttggcgctggggaacacagtgaagtggggcagtggcggggatatacagtactgctctcagggagtc

SEQ ID NO: 137100 - DNA, 122 bp, Homo sapiens
aggctgcagtgagttgtgatcgcaccactgcactccagcctgggtgacatagtgagaccccgtctaaaagctgaccttggaatgtcagcttggctgaaagatcacattattttcattcatac

SEQ ID NO: 137101 - DNA, 122 bp, Homo sapiens
aaacaaaggctgttcaaagtgaggagatgggtttccagcacccttcatgttttaaaatgtcgtatttccctgtttatgtgattgttgatgacactggtgtgcctcagggcattgcagaggac

SEQ ID NO: 137102 - DNA, 122 bp, Homo sapiens
aaaagggcttcccccggctagccgaggcggagccatcggggatataccatctctcctcgtcgatctggaaggctttctgaaggaactggggtttgtgtccctggcacgcccgggacctgcgt

SEQ ID NO: 137103 - DNA, 122 bp, Homo sapiens
cggaaaccctcgccgtaaccttgcctcttgagcacactgcacatgaacacttccatggggcgagcattcagctccttcagggtcacattcccctaaaggaggcaaaaccaagaaaggcctgt

SEQ ID NO: 137104 - DNA, 122 bp, Homo sapiens
aggccccagccttgaggactcccttggctggtcttctgactccacattcagagctatgcccgccttattcattcgtccatctatccgtccaaccagccagccagccatctacttgttcattc

SEQ ID NO: 137105 - DNA, 122 bp, Homo sapiens
gaattcggaattctcagttcaccctcgagcgtcttaacgtgggcctggacgcctgtctgacgccctccagaggctggaagcagcaggaagagcccaggactgtggccttgagcagcccggag

SEQ ID NO: 137106 - DNA, 122 bp, Homo sapiens
tcggggcgacagagggcgccacggcgtccgcgacggaccccgcccccaggcagtgcgccgcgctcccgtgacgtatttccgcgtcatctgccgccgaggcttgcccccattggttgtctgcg

SEQ ID NO: 137107 - DNA, 122 bp, Homo sapiens
taagcagtctacagcgtgtccaaggcctttgctattaagaaacatgtcagatgctgaacacgcatctagagtattatagtccagggcctggttacctcttttcctttcctataacatgcatt

SEQ ID NO: 137108 - DNA, 122 bp, Homo sapiens
aagtgagcgcctctgacccggatttggggctcaatggccacatctcctactctatagtggcgagtgacctagagcccctggcggtgtcgtcatacgtgtcagtgagcgcgcagagcggggtg

SEQ ID NO: 137109 - DNA, 122 bp, Homo sapiens
gcgctgagcgcggagccatctggccgggttggctggttataaccgcgcagattctgttcacgggactcagagttgaagctcctctcccttccgaacagctccgcgcaccgccccgcgacgca

SEQ ID NO: 137110 - DNA, 122 bp, Homo sapiens
agccgcggctctacagcagcgggcggcgggacccgggacccagcttggcgacggcgatctcgacgcgggcccccaggatctcccggcgccccacctctggagcagcccctgccgccagcgtc

SEQ ID NO: 137111 - DNA, 122 bp, Homo sapiens
tatgttctcgtccacctcagcacgctcttgtccggtgtggacgctgccaactccactctacgttgaagaagtcgagaggcaagaggttccggagtgctccagattgacacccccagggcacg

SEQ ID NO: 137112 - DNA, 122 bp, Homo sapiens
ggcagtttgatggccagctgttcaattcacgtcccacagacctgacatacctagtgctgacggagtgctccagtagtttaagagttaaaaacatgtgactcatgtgcccattcaggccttct

SEQ ID NO: 137113 - DNA, 122 bp, Homo sapiens
gatggcgtttacacaagacaccgtaactgcatctgtaactaattccagtgtaaaactcgccggaagctgctgcccctgccctccgtgttggagagcacaggcccctggagggccccgagacg

SEQ ID NO: 137114 - DNA, 122 bp, Homo sapiens
gcccatgatgtcaccccaaggccttcccattggctcgcgtcgctctcaggggggcgggcccgcccgtcaccatggagactccaccctagaagattcttctctgggcccgcggaggctcacgg

SEQ ID NO: 137115 - DNA, 122 bp, Homo sapiens
gggccagccacctccggaagtcattccaggaaggtcaaaggccatgggtggggagtcttccggacaaatgcccaccaggtgtgggcctcaggagcactggagttcttctgtccctgagcagc

SEQ ID NO: 137116 - DNA, 122 bp, Homo sapiens
tacgaggagtaactcatttgagtgacgtcactggactgcggcccttagagcctcctgacgcggaggtgggcctttcacttctgccttttgcatgtgtgaatgtgtgtgtgtgtgtgatttta

SEQ ID NO: 137117 - DNA, 122 bp, Homo sapiens
acaagggcaagagaggggtggcgcccgcgtgtccgagccattggtgatacgaagaagctgcgccacggggaacgtgagagccgcggtggagaaactgctggaaggtttccctgaagctgcga

SEQ ID NO: 137118 - DNA, 122 bp, Homo sapiens
gtgggcaacaatgaatcaccggcagaatcactgttcagacaggcggagacgggtctttctcgccctctgatgagtcaccactgtggtgggggggagtggacagtcagccagacagataatgt

SEQ ID NO: 137119 - DNA, 122 bp, Homo sapiens
ctctggcccgcccggctcgctggtgcggctgtgcgggcggggccggaagtgtggggacagcgcggggccgagaaccggaagtgcggggcgggcgcgggggcagagcgaaaggcttgaggacc

SEQ ID NO: 137120 - DNA, 122 bp, Homo sapiens
ttttctttgatttcttaattcgggactttattgtttttgtttccctctcttcttacacaccgactcctcattcagttagttaatgaacctctttccctctacgcttcatagtccacattatt

SEQ ID NO: 137121 - DNA, 122 bp, Homo sapiens
atatattcctccagagatagactaagctggattaagcttatgtgtacacacatgcacgcacgtgcacacacacatttctccacttgtcaatatatcttacagactagtatgtatcagcacct

SEQ ID NO: 137122 - DNA, 122 bp, Homo sapiens
taactgcttagaaacccagaggaactcgggtgaagttaaataaataaggaccagccctctcgagcccctcccagagttattgcatttctcctctcaaggagcatggagtcccaatgggatgt

SEQ ID NO: 137123 - DNA, 122 bp, Homo sapiens
tggtggcttccagacattctctctcacaaatctcaagactgacttaaaaaaaattcctaacgtcagcagtctttaagccccctgagagtaaaacacagttcatatgtctactgagcattact

SEQ ID NO: 137124 - DNA, 122 bp, Homo sapiens
gcgccacctcgtggtttccaaaaggaacagcatcatgctgggcgcaggggccctgccctgcggtgactgaaaggcgtgtgtgtgtgtgtgtgtgtgtgtgtgtgtgtgtgtgtgtgtaggcg

SEQ ID NO: 137125 - DNA, 122 bp, Homo sapiens
ccgtagatacccacgcaccgcacgtccgggttacccgtagatacccacgcatcgcacgtccgggttacccatagatacccacgcaccgcacgcccgggttacccgtagatgtccaagcaccg

SEQ ID NO: 137126 - DNA, 122 bp, Homo sapiens
cgcggcggcctcccgcaggcaaccacccgcccccaccccccgtaccccctgtcccggagccgcttggccgcctcagtcaataccccggcttccggtcccgcccgctagcgcgtgatcgttgt

SEQ ID NO: 137127 - DNA, 122 bp, Homo sapiens
attgcaagtaatttgccaaccagttgtttttctaaaatacagatctgatcctaaagcccacgaaggcgttccacagtcagacccagatgagtctttttcagcctcattttaaatcataccat

SEQ ID NO: 137128 - DNA, 122 bp, Homo sapiens
aaactatagatcaaggggtttaaaatgggagtgataaatgtgtaggccacagataccacccggcccatctcaggagagtagctggaactgggggacaagtatataaagctggtgcagccata

SEQ ID NO: 137129 - DNA, 122 bp, Homo sapiens
tgagcagaagtttgggcaaaaaattctggggttctaggaacctagactactgtctagtagcgttacacaggctctgcgtggatgcacctccttgttcctgggactatttacctcttggacag

SEQ ID NO: 137130 - DNA, 122 bp, Homo sapiens
aggccgtgtggtacacccggggcaggggccatgtaggctctgtccttggggggctggcttcgtgggacggcatcgggatcttctttgactctccggcagaggatactcaggtgcgtagtggt

SEQ ID NO: 137131 - DNA, 122 bp, Homo sapiens
aaatggtcctgtcccttcggagctgactggaccaggatgtaaccacccactgggcctgcacgaggtatctgggtatgagcttctggatgggcgcttccgacaaaccaaaataaaaccaaata

SEQ ID NO: 137132 - DNA, 122 bp, Homo sapiens
agagcctttggctctagagcctggagccttaccgcaaggctgcctctgtgggtttggcgtcgggaaacaacccagcctggagcccaggctgctggttatctggagacagcctccccgtaaga

SEQ ID NO: 137133 - DNA, 122 bp, Homo sapiens
gatgtcactgtacttaggactcactgaaataactgaaggtggtctcctcatttcaagatccgtaacttaagtcacatctgcaaagacccttttattcaactcaggttacattctgagattcc

SEQ ID NO: 137134 - DNA, 122 bp, Homo sapiens
cgcagaggacagggctggtctggagcctgcttccttaggtggcctttatacccaggctaccggcatcctggcaacaagccccctggcatcttcctcgtgggtggtttttcctcctctgccct

SEQ ID NO: 137135 - DNA, 122 bp, Homo sapiens
ccacctccaccagggcagccacctgaatttactcattaagaatttacctaatgtggctcacgcctgtaatcccagcgctttgggaggcctaggcgggaggacctcttgagctcaggagtttg

SEQ ID NO: 137136 - DNA, 122 bp, Homo sapiens
ctggggcttttgtctccaactctgggcatccaaggagcgggtcaccgacaccttaggctacgtggaaatacgcggctgtggacacgggctcacttcctgttttcacccccacacacacattc

SEQ ID NO: 137137 - DNA, 122 bp, Homo sapiens
ggcacaatatagggaagaaacaagactatcacagtctgggcaggaagcatggcagcttgccgttttgccaagattagtcttccaacagcttggagcagaggtggaatgtgactcccccaagg

SEQ ID NO: 137138 - DNA, 122 bp, Homo sapiens
gcagtggcggggagccaaggacagcacagggcatcctccacaagccgtggccagaggcgccgctcccgattagcgaggtctgagagaagccacactttgggaaaaccagggaaggctgagaa

SEQ ID NO: 137139 - DNA, 122 bp, Homo sapiens
agcaaggaggaaaagcaggtaaattccactccaggagcagaatcagtgcaggagaaggagcggagggggacaagctcattggattaagctaagtggaatcccaaacagcacccaggaggaga

SEQ ID NO: 137140 - DNA, 122 bp, Homo sapiens
gctactgagagctgagggaagaacagactgagaggcccagagagaagaaactgggagttccgatgctgcatcagcagcctctgtgtacagactctggcgtccctgccccgctttagcagttc

SEQ ID NO: 137141 - DNA, 122 bp, Homo sapiens
gcaaatgtcaacaggcacagatgatgggaggtgaggccatgggtctaggggtggggcaaacgtcaacagcaggcagtgggcagggtcacaggaagcacaaacagtggtgcgtgggtctatgg

SEQ ID NO: 137142 - DNA, 122 bp, Homo sapiens
aggagcgaggcctccagagaagccagccctgctgacaccctgacctccatttctggcctccggaatgggagacagcctgctttggccacatacactgcccatccctggcgctctgtccctgc

SEQ ID NO: 137143 - DNA, 122 bp, Homo sapiens
acttttacccatagtaaaagccaaagacacatataaaaataagattttcctctttactctcgtccttacatgtccacagacttcatgtagagaggctgagcctttcgaccacaaagtgtgtt

SEQ ID NO: 137144 - DNA, 122 bp, Homo sapiens
acacctgtctcgtgggtggggcagcacgtggggtagaccatcgagcccctctattcccagcgtaaagccaggtagccagagcgtgcaagggaaagagacaggcaggagagacccctcctaag

SEQ ID NO: 137145 - DNA, 122 bp, Homo sapiens
gcccatgttccccaggcacaccttggccacgtccagccgctgggtcttcacgcacatgcgcgccatgttctcccagacggcctcactgtgggcagacgggggtctgtgaggctcctgcccag

SEQ ID NO: 137146 - DNA, 122 bp, Homo sapiens
cagaaccagatcccccatcacagcaggcttttgagatctagaaagaaaagcccccagctgcgtgctctgctgcctagggtggaggttggtctctgctaaggatgggccatctctgccctctg

SEQ ID NO: 137147 - DNA, 122 bp, Homo sapiens
catatctgttttctttcagatggggcgtacaatttaccttttgagttctgtaaatggaatcgaggtgaaatctttactctggtgcacatatgacctgcaggttgatgctgcttgtttggaaa

SEQ ID NO: 137148 - DNA, 122 bp, Homo sapiens
ggagaaagcgaagaccttctgtccccctggatcctcccagtcctgtccccttggatcagccgcttggccaggattttgaaatagtacagttgtctggtctgagcaaggacgccccatctgtc

SEQ ID NO: 137149 - DNA, 122 bp, Homo sapiens
tgtccagagagggagagagcatgatattacgttcaaaatcgcagtaggtgtacacccagccggtgatattgatctgaatataatctgcgggggtggagtatgacgttacattcaatatagca

SEQ ID NO: 137150 - DNA, 122 bp, Homo sapiens
ttgatggggggcctggcccgcccctatctcagggaggcaggaactgcttagagctccgtgcgcgtgggacccatggctctgacaaagtcttggacaaacactgcttcccgatccttctcacc

SEQ ID NO: 137151 - DNA, 122 bp, Homo sapiens
cttcttggttaaaaaacaaagttcgcttacggccctgggaagtcgacatacaacggactccgagtgcctcccgtccccgcgggagcagctgcggcagggcgccgagcgcgtcctaccttaga

SEQ ID NO: 137152 - DNA, 122 bp, Homo sapiens
cggccggcccgggggcggcggcgctgagggcgcggcggggacggtctgggggcttggggacgccggtggggggtgagggcggtgggccgcctggagaccccggggtgccctggctcgccggc

SEQ ID NO: 137153 - DNA, 122 bp, Homo sapiens
acacaggtttccaacgcgtgctgggcctcgttcctgggcttgctcaggctgaagctcctccggaagggttttccagtggagcacagaggcgcctccgttcctcagcatttacctgagagcag

SEQ ID NO: 137154 - DNA, 122 bp, Homo sapiens
ctggtcagctagagggccacatggtgcagaggttggataccagcctgtacagcaggaccacgtattggtctgcagtagaatggaaaatttaaaacttctcttatcacaggtagttcgataaa

SEQ ID NO: 137155 - DNA, 122 bp, Homo sapiens
caccgccgcgcggacaccctcacgaggacaccccggccgcgcggacacctaccgcggggacgccccgaccccatcctacctgctgcgccccgcgccgcgccccgcaccccgcccgccacggc

SEQ ID NO: 137156 - DNA, 122 bp, Homo sapiens
gcgacaccagagctgggacagccgcttcccctgttctctggttccagttttctcattagtcgagtagggacacagcacaacatcacctgtcaccacgcagcatggattcacccgcacacacc

SEQ ID NO: 137157 - DNA, 122 bp, Homo sapiens
gtatctggctctgtttcccaatgttatttttgcccactagttcccatcctgtattcctgccgtcagcactctgattgagccacattctgctctgcctccatgaactgggacacactgctgtg

SEQ ID NO: 137158 - DNA, 122 bp, Homo sapiens
ccggaagacgttgcctttcattcattcattctgcccgcctctgtggactcctttactaggcgaccagccctgaaacagaagttggacattttttaaaggttcttgcgctcggcaaggggagc

SEQ ID NO: 137159 - DNA, 122 bp, Homo sapiens
tacccgtgtggtgacatgaacagcttcagccagggcctgtgcctgagctgcaagaagggccgctgcaacacgctgggctaccacgtccgccaggagccgcggagcaagagcaagaggctctt

SEQ ID NO: 137160 - DNA, 122 bp, Homo sapiens
ctgagccttggggtcacctcagggggtggcagggtcttgagcccaagaaaggaaaagacacgatgtggttcctgattggctgagtgtgacccggctctgtgtgtcagagttgggcaggacat

SEQ ID NO: 137161 - DNA, 122 bp, Homo sapiens
ataatactggctgcccatctgcaccaaaaatatctgcctgtcattggccggctcttgctccggaaaaaccaatcataggtcttatttctgaaacgtcacgaagaggcgggggaaaagaaaca

SEQ ID NO: 137162 - DNA, 122 bp, Homo sapiens
tggctgcaggagagcgtccggattccctgctctaggtcgcggcgggacagtgccagtgggcgtgtggggcggggcagggcagggaagggaagggcggagctggggtgagggtccaaggggcc

SEQ ID NO: 137163 - DNA, 122 bp, Homo sapiens
gaaaccgagataagaggtaaacgggtaacttctgtcttctgtgacccttagcatgtaaaccggacgctgaggtccaggacatgatcactacagcatatgccattttagaaaccggcctcggt

SEQ ID NO: 137164 - DNA, 122 bp, Homo sapiens
gccctgcccccggcagaggcggaagcggagtcggcctgagaggtctctcgtcgctgcaggcgcctcagcccagccgcgtgccttggcccatggccgcctactcttaccgccccggccctggg

SEQ ID NO: 137165 - DNA, 122 bp, Homo sapiens
ctcatcattctagtctcagcttaaatgtgacctcttccaggaaagcttctgtgaagcctgcgtcagggacctcctctgtgatcccagtgccctgatttctcccaccgctcagctctgattga

SEQ ID NO: 137166 - DNA, 122 bp, Homo sapiens
aagacagagattggcagagggaataaacacacgcacataaacacacaacccagctccatacggcctatgcagtctacaaaaaatcccacctcccaaaacccagagcatcccgggaaaggaaa

SEQ ID NO: 137167 - DNA, 122 bp, Homo sapiens
ccaaggtgatacttattgagatggaggctctgagcgagctggacatgctgcaggctgaggcgcttcaggactccctccagcatcttatgaaagtacaggggaccatcaagtggagggaggac

SEQ ID NO: 137168 - DNA, 122 bp, Homo sapiens
ctgcccctctaacataccacataccacccttcttaccctctcttcagatggtaaaatgggcgtttctcacattcttttacctaagatctgacttcaacacttgtttgaactgagttgaaagc

SEQ ID NO: 137169 - DNA, 122 bp, Homo sapiens
tacacagtactcttatgatgtaaatattttttatccccattttacaaatgagggaattcacgtatagaaggaggtaaagttctctgtgcgagtacacacaactgtggtgagttagagccagg

SEQ ID NO: 137170 - DNA, 122 bp, Homo sapiens
atcaggagccaatcaattagggctgacatagcaatgaaatgcatctgccctcctttgattcggtttttactgccaaatgggctgtggatgaggccgctgagtgggggcagaacattcatgtc

SEQ ID NO: 137171 - DNA, 122 bp, Homo sapiens
gacaaatcctccacacggcctcccaggggcccctctcccctggggccaagggcaacctcgcgtccccttgccccgcccgtgctgcaccccaagtctacagcgacctccataggcccccagtg

SEQ ID NO: 137172 - DNA, 122 bp, Homo sapiens
cctgttatgtcagtatttatcaatgaagtttgataattcacttttctgtcattgttaaagcgtacatactgtaaattaaagggaggtgaatggaaattaatgaataaacattttgagtttcc

SEQ ID NO: 137173 - DNA, 122 bp, Homo sapiens
gggagcgcggggcccccacgtggggctgcgggactcggcctacgactgggtgccgctgggcgcgacgtcacaatgccctcttgtgtctaaaactatgcatgaaaagtagcaatcaggcccta

SEQ ID NO: 137174 - DNA, 122 bp, Homo sapiens
ccctgtgcgaattgaggcgaggtgatgagttagcgggttgccatggcaacaggctggccacgtgaccagggtgctgctgccggcgctctgacgtcagctgccagagggcggggccgcaggag

SEQ ID NO: 137175 - DNA, 122 bp, Homo sapiens
gccacacttccctttattctttagtggaaatacaaagtcacagttttctttcatcttttacgagctaatgggaatgtaggcagaggtcaatggtgaacagagtgcctgaaggtttgtggatg

SEQ ID NO: 137176 - DNA, 122 bp, Homo sapiens
tctagatctttgcatttccatataaattttagaatcattttgtcaatttctacccaaaaacgcttacctggattttggttagcattatattgaatctttaaacatcttcacaatatttggtc

SEQ ID NO: 137177 - DNA, 122 bp, Homo sapiens
cctcaactcggaagctgttgtctccagcccctgggggccgggggccaagctcggccattacggccagagactactttctggggtcttggtctcttttcctagtgaccttcagggcctggcca

SEQ ID NO: 137178 - DNA, 122 bp, Homo sapiens
gggcgaccacggcgggacggcattggggggccggaggcgggcatcgggaagcgggtagagcgttgggggcgctgcagtgggagcttggggcggcccccggggcgggattgagggggagggga

SEQ ID NO: 137179 - DNA, 122 bp, Homo sapiens
ctgcgggcgaccatgggccgaacggccgggactccaagcttacctcggacacgaacgccgcgccagtctccaagccaagtacgccatcgccatcccttgggcggctctagggctgcgggggc

SEQ ID NO: 137180 - DNA, 122 bp, Homo sapiens
gaggatccccagctgatgagcagcagcgggccaccctgtcaccgagcgtgggtgcatgtccgatgtgacccagcaccctctcagaggagggagagcacacgttcacactcacacacactcgt

SEQ ID NO: 137181 - DNA, 122 bp, Homo sapiens
tcattacttttcacagtgatgccgacgtgtttattttttacccccatcttacaacgagggcgtaaaagctgagagagtttagattactgacccaagatcacgcagctcgtgacagtggtact

SEQ ID NO: 137182 - DNA, 122 bp, Homo sapiens
agaagaagccacttctctcccatctccccatttttaagctctaatttgttgaaatctagtcgtcatcacaattccaatcactactgctaatagtaaaagtgttttaatagagactgagtcct

SEQ ID NO: 137183 - DNA, 122 bp, Homo sapiens
cataccccagcctgtcagaacccagtgtgccctgagggcctgtgaggagggccttgccagcgtgggggtcagtggatctgagtgcagctccctcctgtctcctcccaataccatataatatt

SEQ ID NO: 137184 - DNA, 122 bp, Homo sapiens
tttttaaaaaagtttatttctcaattacacaatagcccagccagggtgttcttgggcaaacgtaggggtcaggtagggactctgctccagagacccagactgatcattgctctaaggttacc

SEQ ID NO: 137185 - DNA, 122 bp, Homo sapiens
gatcctaggaggagccggtgaaagggtgagatgcgttggaagtggtcgtgagagagtccacgcaaggattcctccaaggttttgggcccaagcacctctctgacactgaccacccacaagca

SEQ ID NO: 137186 - DNA, 122 bp, Homo sapiens
cctcacgcagttgcgcccgctgttgggactacttccggcttccccgccccgccccgtccccgggcgtctccattttggtctcaggtgtggactcggcaagaaccagcgcaagagggaagcag

SEQ ID NO: 137187 - DNA, 122 bp, Homo sapiens
cagggcttacttattagacgggattctttccctcctgtggaactgaaagactcattcgggcggtgtaccgctgcctctgtgtgtgtgtgcgctgtctttggagccgggggtttggtgggatc

SEQ ID NO: 137188 - DNA, 122 bp, Homo sapiens
ccttccagcgctggtagtctagacatcctagggattgactcaacttctcaatcctgggatcgccagagggaggcctgctggaggccagccctgggcagcttctgacaggccccagcttggac

SEQ ID NO: 137189 - DNA, 122 bp, Homo sapiens
aacccaagtcctggagtatatccagactgctgttgtatgagaaaaacagatttctatcttcggctcctgttattttgaacttgataccacttgtagctgaacctaatttgaactgatacaag

SEQ ID NO: 137190 - DNA, 122 bp, Homo sapiens
cggactcctcccccggaccctggccccggacctgcccccgccccgcccctacccggagggcgccagacgctccctccaggcctctggctgagcccagaacgctcaagccccttcctacctgg

SEQ ID NO: 137191 - DNA, 122 bp, Homo sapiens
tcccaaagtgctgagattgcaggcctggccagagagacgactttagccggggtaaggggccgcctgggaaccccgcgtcccgcctggacacaccgatgacctgcagaggccacaccgtgggc

SEQ ID NO: 137192 - DNA, 122 bp, Homo sapiens
gtctgagcgtcttacgcgcctccatcttcaaggcgtagcacagtgactgaaaaaaactgacgttgaacgtgcactaaactgaactgctcaaacacctacaggcacagggcgaggggtagaac

SEQ ID NO: 137193 - DNA, 122 bp, Homo sapiens
ctggcagggacaggtctggtgcccgcgcctgctcgctggaccgcccgccccgcgctctggcggctcctcccgggcgatgcctccgctctgggccctgctggccctcggctgcctgcggttcg

SEQ ID NO: 137194 - DNA, 122 bp, Homo sapiens
gtcaaagaaaggggtgacagagggcacctggaaaatcgggtcaatcccatccaaatattgcgcatttcggaccggcttaaaaaactgcgcaccacgagattatatcccgcacatggctcgga

SEQ ID NO: 137195 - DNA, 122 bp, Homo sapiens
gtgagggctgctgattggagaagcaagcggagcgggaccccttaatgcgactgtagctgacgacggtctcccttgctcaggcatggacagctgggccatgggaccctggaggcagagctgga

SEQ ID NO: 137196 - DNA, 122 bp, Homo sapiens
aacaactccgaaaccgttccttccgctgggctgggctttgttggtctttcgcaattggctcgggctgcagtgcttgctagctcagagatctgggagggacgaagtccagaccggagcaaagc

SEQ ID NO: 137197 - DNA, 122 bp, Homo sapiens
aaataacacaagatttaggaactatgccaacgtttacgaccccaggtctagaggtcaagccgtgcacttggtctctcaagtcgcctgcttggccctcttccaagtgtactttccttcattag

SEQ ID NO: 137198 - DNA, 122 bp, Homo sapiens
cccttgtgtacttgcgcatgtgggtgccgggtgcccgaggcgctgtcttcaactgaaatgcggaagtgccacatcccactcggcccacccctcgcctgcttcagaaccctggggaggcagag

SEQ ID NO: 137199 - DNA, 122 bp, Homo sapiens
gaaagtggcagctgctccaggcaggcacaggtctggaaccagagcatccctgaccaaacccggggactgtgagtcatgcatctcatggcatctgggggcatctaggagggtctctctgctcc

SEQ ID NO: 137200 - DNA, 122 bp, Homo sapiens
taagtcagatgtggagagaagcctaggagctggtggagtgtgcagcgtgtgtgcagctgacgacacaggggtcaagactcttggctgagttgtggacacctgggttctctttgctctgtgac

SEQ ID NO: 137201 - DNA, 122 bp, Homo sapiens
tcaggcctccagctgctagacggctccagtgaagggatcttgactattttagggtacccccggtcacttgaaaagctatctttctctggaagcagatggctcagagtctgttgtgtgagtga

SEQ ID NO: 137202 - DNA, 122 bp, Homo sapiens
tctttgacaacctgaagaaatccatcatgtacaccctgaccagcaacatccccgagatcacgcccttcctgatgttcatcatcctcggtatacccctgcctctgggaaccataaccatcctc

SEQ ID NO: 137203 - DNA, 122 bp, Homo sapiens
gggggtggcggggggtgcggtgaggctgcctgggacagagacacaggtgtaagcaggagtcgactgtgaggctctggctgagatcccaggaagggaagctaggtattcctgggaaaagcctg

SEQ ID NO: 137204 - DNA, 122 bp, Homo sapiens
cacaatacagatatgacacccgcaatacagatatgacaccctcaatactgctatgacccccgcaatacagatatgacccccgcaatactgctatgacacccgcaatactgatatgacacccg

SEQ ID NO: 137205 - DNA, 122 bp, Homo sapiens
agttcaggtatggctggatccaggcactcaagtgctggtgtcaaaactgcctttcacaatcgttcatttctgcacaatctcttttgcactgaacctcatctcataaagcctctcctctcttt

SEQ ID NO: 137206 - DNA, 122 bp, Homo sapiens
gcccgctccattctcacagcagctcccggctgtgctccgtgcctccctccccgccaccaccggcagctgactctccctggggcacatggtcctgacttctagggcatgttttacagatccca

SEQ ID NO: 137207 - DNA, 122 bp, Homo sapiens
cagcagtgctgggcggccagtgtgctgctctccccagacagcatggaacgcaggcagaagcgcgccgtgggctggtagatgtccaggcgctcgcgagggccactggcatccctccaccggaa

SEQ ID NO: 137208 - DNA, 122 bp, Homo sapiens
tccaatcgcatctccccagcaggccccgcccatggaaactcccagggaccacccctaggccgcttccccaaggccccgcccctgccgcccctcgcgccctggtggctaggggcgcacatggg

SEQ ID NO: 137209 - DNA, 122 bp, Homo sapiens
ccactctactttagattaaatatctatctataggctaggtctttggtcccagcacaaactcgctggcctgagtcatagcatctattaaatacagagattaccggagatgcttttgttaagga

SEQ ID NO: 137210 - DNA, 122 bp, Homo sapiens
ctctgggactcacggccatggctgcccacagtgaggccaggccccactctgcagatgaggcggtgaggaccccacaatgctggggctggcacctggctgccgactctctcatcttcctggct

SEQ ID NO: 137211 - DNA, 122 bp, Homo sapiens
gcggcgccaggggcactcggggcgtgggcacctccaggtcatgcttgcgtttctccagggcgatctcaggcttccacagggtctccaggggacaccgctgagagcggactgtcagagcgtcc

SEQ ID NO: 137212 - DNA, 122 bp, Homo sapiens
agccatcatccaagcacaagcacaccggcgctccaggcagaggcgctgggaggctctgaacgctgtcaggagtgcctgtgctttgccggtagcttgcgcccagcacctgagagagcagggcg

SEQ ID NO: 137213 - DNA, 122 bp, Homo sapiens
tgactgctggtggctccccagctgggcatgcctgccctcctcgcctctgcgctcgcctgacgcccccatgcggcctgcaagacacagccgggcctccatctctgcaggaccctcctgcccct

SEQ ID NO: 137214 - DNA, 122 bp, Homo sapiens
cataggaagagtttgttgtttgctaccagacaagctcagtaatagttgtcctagcacagacgttattgtaaaggtctgttgataaaaacaatccagattgtactgcaagtgtaggacaagaa

SEQ ID NO: 137215 - DNA, 122 bp, Homo sapiens
gaccagagtcacagtggtgtccacagcccgcatcggcataaatacagatggactgaaatacgcattttacctaaaataaaggctttataccatgcaagcaaaaatagaggtggttttttttc

SEQ ID NO: 137216 - DNA, 122 bp, Homo sapiens
agaggcggctgagatctggaaacaggtctgcaaatctggtcactggtctcattgcagtaacgctgtgcgcggttgagggagtgtattgggagaaaaaccacgcgttgtctgtcccggaagga

SEQ ID NO: 137217 - DNA, 122 bp, Homo sapiens
tgggaagcgactctgccacttttaaagggcaccctaaaaacggatgtcaaagtctgattgcgccggccactcagttagcccaggcccgtcacccacctctccgcggctgccaggttaccagc

SEQ ID NO: 137218 - DNA, 122 bp, Homo sapiens
gcaccataagcaccagaataccgctgagacttcgaaccagatggagaggattccttcattcgatcaatcacattttctgaaagccggatgcccttcaccacggtaatgttctcattctcgtc

SEQ ID NO: 137219 - DNA, 122 bp, Homo sapiens
cttttatgcaggtgctagaaactttatgtcaaagtggccacaagattgtttaataggagacgaacgaatgtaactccatgtttactgctaaaaaccaaagctttgtgtaaaatcttgaattt

SEQ ID NO: 137220 - DNA, 122 bp, Homo sapiens
acatctagggcactagtagcctcatccaggatgaggacccgcgggtctcgtacaagggcccgggcaatggccagacgttgtttctgtcccgcagccagctggcttcccttctcccctacatc

SEQ ID NO: 137221 - DNA, 122 bp, Homo sapiens
gcgagacccattatcagatgagaaaagcacggcacggaatactgtgtccaatgtgctcaccgtctcaattttaaacctaaaggagggagaacattttctcatgcgtgcatttcatctctggg

SEQ ID NO: 137222 - DNA, 122 bp, Homo sapiens
ccccgcccacgttgactccttgggaccactcctgggccacttccccaaggccccgccccccggtgccagtccaatcgcatctccccagcaggccccgcccatggaaactcccagggaccacc

SEQ ID NO: 137223 - DNA, 122 bp, Homo sapiens
attattagaccaaactatgagttcctctttagaaccgaaccactttcctctcgcctcccacgtcctcactaagttactcggggaccccaaggaaccaagaacgaaaagtaggaaggtccaga

SEQ ID NO: 137224 - DNA, 122 bp, Homo sapiens
tgcatagactttatttcagtttttaaaaattgttagcgtagtatttattctccttgtagtcgtttcaatgttttatatacttattggtctggtcgtgtgctaaatatttttggcttagagtt

SEQ ID NO: 137225 - DNA, 122 bp, Homo sapiens
aaaaaaaaaaaaaaaaaagaaacaaaacaaaagaatgaaagaaaagtccgaaacctcctgcgccactgtccactagctgcgcgcgttaggaaaccagaggtcagcgcccccgaccccgccac

SEQ ID NO: 137226 - DNA, 122 bp, Homo sapiens
tcaccctgaggaagctggggaggcggggctggtgcgggactctgtcttctgcccaggggccgtgctctgccaaagggtgaagagcacaggcctcacaggggagggaggaagaataggagctc

SEQ ID NO: 137227 - DNA, 122 bp, Homo sapiens
acccgcactacgatcgtgtccctgggggaacgcccgcctgcacttggcatctttcctgtccgtctgtgtagtcccgtcaaaacagccatgactgaggtacaaacatctgataatgacaaact

SEQ ID NO: 137228 - DNA, 122 bp, Homo sapiens
acaagtggggacgtcacaggtgtggacgtggtgcgggtgtagacgtagaacaagtggggacgtcacaggtgtggacacaatgcgggtgtagacatagaacaagtggggacgtcacaggtgtg

SEQ ID NO: 137229 - DNA, 122 bp, Homo sapiens
ccgccaggcgagactccgcgggaaaactccctgctagagagactaggagatttggggctgcggccgtttcctccggagcacccacgggactgtgtgctggggtccctccaccggctgtgtcc

SEQ ID NO: 137230 - DNA, 122 bp, Homo sapiens
gcggcgggctgaagggctcctcaagcgcggccagagtgggcgccaaggccgaggaggcgccgacagcgagcgagggcagccagcatgctgtcacgtatcactagcactttgggactacagag

SEQ ID NO: 137231 - DNA, 122 bp, Homo sapiens
tgtgtggcatcaggtgtgacttctgagaagaaacaatcttggcgcgcgccgcttggatgccggagaaaatggttcttgggtgcgctgatcatcccaggggaggggaggaccttgcttgggcc

SEQ ID NO: 137232 - DNA, 122 bp, Homo sapiens
actttcctatgcagactgaggctagtgttaatggtcaaatgctacagccagtgattggaccgccgacattttcttcacctctggttatccctccatctcaggtgtctgaaagtcacggacaa

SEQ ID NO: 137233 - DNA, 122 bp, Homo sapiens
gctctgccggttcctgctccctggggaggtaattgccaaaaggccaggactgctggtgtacgtgcactgtgatgatggtgacagcgggagggtgaggagggccagttatttcacccgcttaa

SEQ ID NO: 137234 - DNA, 122 bp, Homo sapiens
gtacaggagacgactcacaatcggtcggaagctgcttttgcccccccaccccaccgcaaacgggggtttgcttggatcatttatctatcttgtgtgcattaagaaaccagcattagctgcta

SEQ ID NO: 137235 - DNA, 122 bp, Homo sapiens
ggaatttaaagtgctcgtctttcatattcaagaaaggaaaatacttttttagctcaagtccggagtcgtgaacaaataaccaccattatttagagataacttctcgtcggtgcagcagctct

SEQ ID NO: 137236 - DNA, 122 bp, Homo sapiens
cctggactcagggtaccaacctgagatgagttgttcaagagcattgacttggctgggttccgtggctcatgcctgtaatcctagcactttgggaggccaagacaggaggatcacatgagccc

SEQ ID NO: 137237 - DNA, 122 bp, Homo sapiens
cttgcggccacactggggcagcctctcctcggctggcagccgggccgggcggctcgctcccgggagctgacaatgtagccaagtcctgctcgtcggggccgcaaagaatttaaaggggtcta

SEQ ID NO: 137238 - DNA, 122 bp, Homo sapiens
gatggttgccatgaaccggaagtaactggttgttttgctggctccagtttttccgcggggcggaaaaggcgtgtctgcgtgtgtcccaaccatttctagtcccctttcctcgcaggacctca

SEQ ID NO: 137239 - DNA, 122 bp, Homo sapiens
gcacggcccgcgggcgcgcaaagcaccctgggacttgtagtctcgcccccgcccgcccgccggccgttgccccctcagcccccggaggcagggtcctgcgaccagcaccccgcgggtcagtt

SEQ ID NO: 137240 - DNA, 122 bp, Homo sapiens
cagcggggatgggcgtgggccccggcggccaccgccccgccaactcgagcactggaggagcgcacccgctacgccagccccggacctacctggaggggagagcagagctcctggacagcggc

SEQ ID NO: 137241 - DNA, 122 bp, Homo sapiens
gccaggcggggtccgggttccacgaaggccaggtccagtcagtttctcaggtgaggaaaccgagctgacgcggggctggcggcccggaggcaggctcgggaggtccgggcctggggactggg

SEQ ID NO: 137242 - DNA, 122 bp, Homo sapiens
tgtctagactgtgtacatacaagtgtgtacagacaagcttcatacgtatatactgtaatccgttacaacaaataaattttaaatcatcgtttaacatgtatgtggtacttctacagtgtaca

SEQ ID NO: 137243 - DNA, 122 bp, Homo sapiens
ttacctaagagattttctaacagcatggcatttagcgaattctgcactccaactgtataacgagaatagtagcattcataaccctttgtaatcctaaaaagaatatcaaggaaccaaagaca

SEQ ID NO: 137244 - DNA, 122 bp, Homo sapiens
aggcagctggctccaacgggacatgggtcactcaggcactcatccacctctgtttgacagcgtggcccttcaaagcctgtggcacagcaggaaggtcagggacctgcacggatgtctgcctc

SEQ ID NO: 137245 - DNA, 122 bp, Homo sapiens
aggttcgtatagaaaaagcacagctctcactggccagtagctgccaaaaagaacacccatcgtataaggaaatccagccccatagaaaacaatctgcccaccgaccccctttctaaggatag

SEQ ID NO: 137246 - DNA, 122 bp, Homo sapiens
tgggctgcttttagaggagcagtgtggtacggtggaaagattacaggcttcagagccagccggatctagccttatattatagctttctcagtttctgtctgtgcaattgttactggaaattc

SEQ ID NO: 137247 - DNA, 122 bp, Homo sapiens
cccgaggctagcgccgcgccggtcggcgtcttatttacgcgtctagggcttcttccggggcggggcctttgcgtcatgacgtcgcccgctcttggaatttctaagcttaacaattggggtcc

SEQ ID NO: 137248 - DNA, 122 bp, Homo sapiens
aaaaaattaagacctattttgcctgttattcacattacacactgaatatgctgctcccagcggaggccgagactcctgcccgggcaccccctcacagcccccactccagcctccccagactc

SEQ ID NO: 137249 - DNA, 122 bp, Homo sapiens
actgtgtgtgcacaggcttgcctatgcactctcacataaaggctgtaaggacatggaaaacgtgtcatcactgggtatctggggtggaaaagggttgggtgatttttattttcttttttttg

SEQ ID NO: 137250 - DNA, 122 bp, Homo sapiens
tgctaacagaatgtactttctaaaaggacaggctcctttctgtagcactccctgacaaaacgagtcactaatgtatgggtgcctgcaggactttggggcagaaacagagactaagtaagggc

SEQ ID NO: 137251 - DNA, 122 bp, Homo sapiens
aggctgctgcaggcaaaggggcagtggggacagcggtagggcttctcgccagtgtgggtgcgggtatgtcgtgtcaggttgacgagctgggctgaggcgtaggggcagcggccacagcggaa

SEQ ID NO: 137252 - DNA, 122 bp, Homo sapiens
aaacaatataaggtaaaatgaaacttcagatgctattagacaacactaagcataaataaccgttaaagttcattgttaacagagtgaccaaacatcctaatttgcccaggacaggcctggtc

SEQ ID NO: 137253 - DNA, 122 bp, Homo sapiens
ctgaggaccgggcccaaccagtctctagagggctgctacgaggctcttcctgtttccaggcggactgataggggtcacctgaccagaggagacttcagtgtttagggttttggcttcaggtt

SEQ ID NO: 137254 - DNA, 122 bp, Homo sapiens
gtctgctgagcttctgatccagcgaggcacccactgccgctcccgatagggctagaggctcgccattgttcctgcgtggctaagtgcccgggttcgtcctaatcaagctgaacacaagtcgc

SEQ ID NO: 137255 - DNA, 122 bp, Homo sapiens
gcaggggctccctccccatcaatagggccgacccaagtcttcctcccccttcccccatgccgggccccacgatagtgtgaatgtcaggggcttcaggtttccctaaatataggtccctgcca

SEQ ID NO: 137256 - DNA, 122 bp, Homo sapiens
ctcaaaaatgtttgccatagatgagaatgagcatagcctgttcagagacactcatgcctgcgatacctgtcctgctggcacagaggcttctcactggaaggtacctgtccatttgctgaggt

SEQ ID NO: 137257 - DNA, 122 bp, Homo sapiens
cgaactgcctggcgatttcgaagtcgaatgttcatggctcctgactgttcctgcagtgtccggatctcagagctgatggagctgaggtcactctgaaaagctcccaacatctgctccattcg

SEQ ID NO: 137258 - DNA, 122 bp, Homo sapiens
cggagagttgggcctagtttgtcagacatcagacttcacttcccactctgtaaaatggggcgcagggcggcctccttgagggagggggtaagacagaacgaggggtgagtcagagcttagtt

SEQ ID NO: 137259 - DNA, 122 bp, Homo sapiens
gccttgtgtgtcaccaagaggttctcagaagggacctgtcagtttttggttaaaagaacccggaaagagaaggactatgggggaactgatggcgttcctgttacctctcatcattgtgttaa

SEQ ID NO: 137260 - DNA, 122 bp, Homo sapiens
cctctgttagtctaccccaaggcttgtggctggtagtaactcagcatgacagctcacacacggagatagccctgccctgtgtctccctcttctctgtctctcagaaccaattccaaattcct

SEQ ID NO: 137261 - DNA, 122 bp, Homo sapiens
gaggtgggggcgcaaccagaatacctgtgtcagcgggtcctggccagcacatctctccaacgctggctgcccgggctatttctttgcgaagagcgttttcatttgaggcgaaattaaaatcc

SEQ ID NO: 137262 - DNA, 122 bp, Homo sapiens
agggagaaaagcaggcctagaaaaatagagcagagacctagggatagaacaaaaaggaggcggagacagagggagaggaggagaaagtcagaagaccaaagagaaactgtgaggttagaagg

SEQ ID NO: 137263 - DNA, 122 bp, Homo sapiens
aaagtgaggctacggttataaggcgaaaaggtgtcacaattagagaaacaactttgaacacggtaatactgatttttaaaaatctcgaatgggctctgtggttctgatactctggctgttga

SEQ ID NO: 137264 - DNA, 122 bp, Homo sapiens
aagcgcctccccgactccctgaggagggcgccagtcctctggtacccggagaaggagggccgggagctcagtgagcactccctgtgagtcccaggagatggccgctctccctcggaagccgg

SEQ ID NO: 137265 - DNA, 122 bp, Homo sapiens
catttcagcgtggagccatcctgcattagttttcactagcgcttccttagtgtggcaagccgaactaccggagtgttaacccggatggtgccgtgaacgaggccacacaggaactgggtttc

SEQ ID NO: 137266 - DNA, 122 bp, Homo sapiens
gtcgcacacaagagagagagacgcaggtgaccggagccatttacactaatgggtaaatctcgggaaagcgctggtttcggctaccggccagttacaggtttgaggtgcccgtcgccgccacc

SEQ ID NO: 137267 - DNA, 122 bp, Homo sapiens
tcgttctgggcctgaggctgtggtagcagcaacacctgctctggcttcacctgcagcagccgccgcaccgcgggctgtaagccggacgccactgcctccccgcacgacgaggccaaggtcgc

SEQ ID NO: 137268 - DNA, 122 bp, Homo sapiens
ggatcctgaagaattagagggctggggacgggctagatcaattatgtgtttttgacttgacgatttgtttttaaaatttgtgaatgcatttgacatgatggcatgattgagggccctgaaaa

SEQ ID NO: 137269 - DNA, 122 bp, Homo sapiens
atcaattatgttccatgtttgttcagacatagcacataagatccaaggaaggtagggtcacggaaaagcgaggggttagaggaaacatgaagtgtataccaaaggatgcggattttctaccc

SEQ ID NO: 137270 - DNA, 122 bp, Homo sapiens
tagagccaaagtcatcgttactcaaacacatcactctgcagttacacggctgcacgctaccgtcatgtaaactctggaatactgacgtggacctgaccacccgctgaggtgaaaggctacag

SEQ ID NO: 137271 - DNA, 122 bp, Homo sapiens
agctggtcacgtgccccggcgggcgggggagggggcatgtcggggagccggggccgggggcggtcagccccactctaccaacattgatagaaagaaaagaggaggtcttcaaggaaaattag

SEQ ID NO: 137272 - DNA, 122 bp, Homo sapiens
gcgatcgcagggcttcgcctatcccttcctccgggacagtttggatgggagtagctggcgcgagggctcgttcccccgtttttgggtaattcctttggcactgggagacgagatggcctccg

SEQ ID NO: 137273 - DNA, 122 bp, Homo sapiens
aaattcgggctggaatttttcgagagcaaatgtcagtagtcgtagagaagacacgagtggcggggtcttcagggaagccagagggcagccaaaggtctgaaacccgaggaggcaggtaaatt

SEQ ID NO: 137274 - DNA, 122 bp, Homo sapiens
gtgcactggagtctgcagaaaaccctggctgcagagggcgaggcgggaggcggcagagggcgaggcgggaggcggcagagggcgaggcgggaggcggcagagcgtggggtgaggggcggctg

SEQ ID NO: 137275 - DNA, 122 bp, Homo sapiens
tgagcctgcaaagcaggaggcatgctagtgggcaggagggagaaagtgtgcaaacacccccgcttcccatgaatcactaggtcacaaagccccaccgggtgagggaacgtgtgacccactca

SEQ ID NO: 137276 - DNA, 122 bp, Homo sapiens
acttaactgtgtgccaggcactgttctaggtacttcacatgtactaaaagttctctgaagcgtatattatcagaatcccccttttcacatacggtgcaagtgaggcagagagaagctaaata

SEQ ID NO: 137277 - DNA, 122 bp, Homo sapiens
gttcacgtgacttccttccttctcgcggagaccgagttacgcgataggcctgtgagggggcggggcccggcgcctgttcgccgtgttagtggccaatcggcagccaggcagggtgggcgcgc

SEQ ID NO: 137278 - DNA, 122 bp, Homo sapiens
ggccatgtgcgcgccttccttgtcttgtgtgcttcgccaggtagagcgggctcacagcagcggtggggattactttgctgctagttttggtttgcagcatgccgcaggtgtagtctcggtgg

SEQ ID NO: 137279 - DNA, 122 bp, Homo sapiens
agaggcggccccgcacctatcccggggctgggacgaagggtttggcttctctaaacgcagcgggaagctttaagccagagccacacagagcatccctgtcgcaggagagtgcccgggggtcc

SEQ ID NO: 137280 - DNA, 122 bp, Homo sapiens
gccagaaagcctagaaataccactgtaacttccccgctgcctttctgtgtaacagtgggccgtaaagaaatccagacccgcattccagaggagtcttgtccccggtgcctggaggaaggagt

SEQ ID NO: 137281 - DNA, 122 bp, Homo sapiens
ggccggacggcggtgtcccggcgtggcgggaagccggcactggagcgggagcgcactgggcgcgggaccgggaggcgcagggaccggacggctcccgagtcgcccacctgacggtaccgaga

SEQ ID NO: 137282 - DNA, 122 bp, Homo sapiens
ccagcaaggaagctgcctggagtcccttaaggtaaaacacaccaatggtgcagcagttcccggccttgctgcagaaggccctgctactggggcacctagagcctcagaagaggcctggggga

SEQ ID NO: 137283 - DNA, 122 bp, Homo sapiens
cgcccaagcggaggattactcgcagctgcccggagaagatcacatcctggagcacctgcccgcccggctcaatgagggtgcgcacctgggggacgggaggggaggaggggaggcaggaggga

SEQ ID NO: 137284 - DNA, 122 bp, Homo sapiens
gtcaggtccaaatgagaaattgactggcactccgggccaatgggaggcggcgagagcggccgcgattagcataatagtatagaaacaaggaaacttttcggagctgtcaatcagggcccaat

SEQ ID NO: 137285 - DNA, 122 bp, Homo sapiens
taaataataccaggcttgtctctgaacagcagcgagagtgcacttcctctgaggggcacacgagagtgagacccgcacatcctgtgttgcttgaccgtcgggactgaccagggacagaggac

SEQ ID NO: 137286 - DNA, 122 bp, Homo sapiens
catgagccaccactcccagccatgacttctttcttttttttaaagatcgtggctcatattcgttttcttatttctgtagtctctaagagtaatacaacaatgtgtatcactttcgtcatcag

SEQ ID NO: 137287 - DNA, 122 bp, Homo sapiens
atgctcacggtatgacgggcagccctccaggagtggcgtggaggccggggcactcagtcacgtgtgtgccgggagcacaggccttcctcgccgtgcgcggctcctgagctctgagtgaggca

SEQ ID NO: 137288 - DNA, 122 bp, Homo sapiens
gccaggagtaagtacaatgcaagcaaagggctttttgatgcactgatacaatttggtgaacgtggcatttttttttttctctcactctttcttttcaacagaattgctcttaccttttgttc

SEQ ID NO: 137289 - DNA, 122 bp, Homo sapiens
tcctgagatgatgggtaagaaaaacgagctttgggactatcgtaccccaagagcagctggcgtgggttactctgtatgtctaaattggaaagttttagggaaagagtctgaatatctaggtg

SEQ ID NO: 137290 - DNA, 122 bp, Homo sapiens
agctctctgctgcccacaattcaagcgctttcttttatcagggcccaaatggcagctaatcgagttactggcaaatccagaaacaacacagatcccacaaagaggctgattaaagcttactt

SEQ ID NO: 137291 - DNA, 122 bp, Homo sapiens
taacctacgtttcaacaattattcaaagctcgagagatttattgcacacttcactttaaacgcccctgattcaagtcaggaccagaacagttttaaactgtggcaccttcttcagttattgc

SEQ ID NO: 137292 - DNA, 122 bp, Homo sapiens
ggaggccccggcgcttgccccttgggctcgggggcttgggtgcgcaggtgggggctggcacgcagcccgttgggcaggtttcgcgcagcgaccctccccacgccggagctaagttctttggg

SEQ ID NO: 137293 - DNA, 122 bp, Homo sapiens
caaactcctgacctcaagtgatctgcctgccttggcctcccaaagtgctgggattacaggcgtgagccaccacgctcggttgataatttaaaaaatgatttgtatggatgaggtctccctat

SEQ ID NO: 137294 - DNA, 122 bp, Homo sapiens
agtccctcagcacatcattttcctttttcctaccttatcttccttttatatttgaaggctcgtgaatttagagtacctaacggaaattttagttttaggatttcaatttgaccaaaacaacg

SEQ ID NO: 137295 - DNA, 122 bp, Homo sapiens
gtcggagcaaatgtgacgctgattggcttcagctccccagctgcaaatgggtagctttgccggggtttctctcttgagctccaggcactctcaaggatccggttcatgtcttcgccctggcc

SEQ ID NO: 137296 - DNA, 122 bp, Homo sapiens
tcagaccacggaggggcagagccccggctggtgctgcaaacagaggagccgcccaggctgcggccctacagtcccggggtcagcgcccagcccggggaggcagtgccatggacagcctcact

SEQ ID NO: 137297 - DNA, 122 bp, Homo sapiens
gaagcctcctgctctctgtggagcccgggcacctcgcgctgagatgtttctgcacctgtccgaatactttaaaaccgcctgatgcccagcctgggcaccggaagtttgaaatggaaaactgc

SEQ ID NO: 137298 - DNA, 122 bp, Homo sapiens
ggggaacagagaggaagccccatcctcgcgatgccaaggtcccagcagctggaggggcagcgccctgctgattgacgcgctgaatcgtgtgcccccgtccttactggcaggcacgccacatg

SEQ ID NO: 137299 - DNA, 122 bp, Homo sapiens
ctggcctgcacactactcatgacagaaagtcagcttttacttttctttcccctggcaattcgtttttggtgcactcatgcatgcctttgagaaaggattctaggagaaagagaaggtctatg

SEQ ID NO: 137300 - DNA, 122 bp, Homo sapiens
tggattaatgaatcccccctcctatcccgcacttcctgtggaaacagtgtcaggatgtggcgcggacctatgtgcgtcccttataccaggacttgccttcaacgctgaaggtgaaccctggg

SEQ ID NO: 137301 - DNA, 122 bp, Homo sapiens
ccaccccacggccgcgcccctcggcctcccaatgggctgtgcggctgccagcgcttgcgccggacgccacttccggtccccgtggtcacgtgaccgtcacttcacgtgaccgcgcggcggcc

SEQ ID NO: 137302 - DNA, 122 bp, Homo sapiens
tccctgcccctggctccatagatttgcaagatttgtgtgtccattcataagccttccaaacgcagggcctgcttgctgccctctttgctctgtggggcccagatggcagccccggaggcgct

SEQ ID NO: 137303 - DNA, 122 bp, Homo sapiens
actatgtatatcattttaaaaagattttactcatttcaaacactacctcattcaaaaaggcgaccataaattcctgaggctggaaacgaacgaacggcaagccccgaagaaacacgctcttt

SEQ ID NO: 137304 - DNA, 122 bp, Homo sapiens
acgcggcaaccaaccggagcggactactgcggagccggctgcggagggagctggggaatgcgggcaccccccacaggcctcacaggcccgtgctgccccccgcaccctccctcggcccccct

SEQ ID NO: 137305 - DNA, 122 bp, Homo sapiens
tgtgaccagagtacagtgagtgaatgtagctatgacaggaggtgcaggtagagaggtgggcgagcctttgagtttaagggcatccaggcagctgccctacaggaaatggactgcaggagcaa

SEQ ID NO: 137306 - DNA, 122 bp, Homo sapiens
ggcattttagaaatgcccctgggaggttagagtagggggctgctctggatttgtgaggtccgttttaacttcccttgaaaagcgcatcatgtgggcgggggcaagcgcctggctgcgccggg

SEQ ID NO: 137307 - DNA, 122 bp, Homo sapiens
tacaacgagtcctacagccaaccagtgtacaagccctacctgaccttgtgcgctgggaggcgcatctgcagcacttacaggtgagggatggggagatgggaccccaagaaccccaactagga

SEQ ID NO: 137308 - DNA, 122 bp, Homo sapiens
ttgaggcctttggtggtctattatatatctctacccataatgtcttaccccaggtgtctacgggccagtctccctgcaactttcccaagcagcagccactgcttctccctgcttgagatctg

SEQ ID NO: 137309 - DNA, 122 bp, Homo sapiens
ggcgggggtctgtggagccctttgcaagagggtcctcagcacgggctcggagaagctccacgggggtcactctgtcccgatcagaaaccgcgagggcaagagagggagagaggaaagaggta

SEQ ID NO: 137310 - DNA, 122 bp, Homo sapiens
ggtggatgcagttatcataaaagacagcagagtcaaagctgcaaccagaatagcccgactcgcagcgacctatggtgcctgctgatcgtggctttcctagaagtgaaatagataagaagcct

SEQ ID NO: 137311 - DNA, 122 bp, Homo sapiens
ccgcggtgcatggcggcctccagctggcctaggccccgccccgcccccgcagacagaggccggaggctggctggtgcagcgatgtttaatggcaattcgtataaaccaagcccatgcacaag

SEQ ID NO: 137312 - DNA, 122 bp, Homo sapiens
gggtcaggggtgagaggtcagagggccgcgaagtgggcggagcgagccggagtcggatggcggctacggcggctcattgttttccgctgcaggggtgctgaaggggggacgcgggtcggacg

SEQ ID NO: 137313 - DNA, 122 bp, Homo sapiens
gcagaacgtgggacctggagcggggaccgaaagggtgcgggcgggagactatgggtggggcggcctgggagggagcctgagacaagacccgacgcccccagccgctccacgtcgctctgcag

SEQ ID NO: 137314 - DNA, 122 bp, Homo sapiens
attaggtgtggagttagcctagcgtgttcccatgcgacttggttcaagcaaactcccttccgtgtctgggatggcgctggccgccggggcagtggaattcatactgcgctaaacaaagatct

SEQ ID NO: 137315 - DNA, 122 bp, Homo sapiens
ggagatgcttcctcgcgcggcgcagcgctgaggccgtgcgtgcgccccggctgcgctgcgcgctccccacatacacaagctctccatgtgagctgacaggcgagtggaaacccctcgagtca

SEQ ID NO: 137316 - DNA, 122 bp, Homo sapiens
gttggaaatgatccttctgcatgctgaaacccttctgggtggggccacaggagcagtgggcgggtccaggttggagccagaggcgtagatgtcagacatgtaaaaaccctgaaaagatatct

SEQ ID NO: 137317 - DNA, 122 bp, Homo sapiens
ggccggccaatcaacggcaaaggtgtgtgaggcgccggccaatgggctcgcggggccacgcgtgatcggcgactgcccggcagcgtgaagctggtgtcagtggagcgtgtacacaatccccg

SEQ ID NO: 137318 - DNA, 122 bp, Homo sapiens
tcctctcttgcagctcttgaggccatattttaattttgattcttctaatcaagagcatttcgtgaatacctaatatgtgccagatgctgtctcggagctggggatggatacacaagtccggt

SEQ ID NO: 137319 - DNA, 122 bp, Homo sapiens
gataatctcttgcaaattgcttccatttacacatgccactgagatagaagcagcctccagcgccgctacttttcttcatttcttttaactgtcaggtctgaatactgaaagataggctattt

SEQ ID NO: 137320 - DNA, 122 bp, Homo sapiens
gtgagatgcgggagccccggtgtagcgtggagccgcctgttgagacccttccgggtttcacggcttgtcttgccatgctgatgtgccaggtttgccctgcacacaggcaacagaccattgca

SEQ ID NO: 137321 - DNA, 122 bp, Homo sapiens
ctcaccgccgtgcagaagtagccgcagcccgggcagcagtggtgtttgaccatgcgggcgcggtgggtctcacagagcaccatcagggccacacggctggatggcctcatggtctcccgctt

SEQ ID NO: 137322 - DNA, 122 bp, Homo sapiens
ttcttttgggaggtgatgcctctgtccgtgtgagagtcctggctcctggtaggtttcttccggtgcctcccaggcagttggaggacgccgctctcattaggtcatgtttactgaaggtgctt

SEQ ID NO: 137323 - DNA, 122 bp, Homo sapiens
tgccaggcctgctaggggacggacggcgagagggactgccctgcgtcaggtgtggccctgcgctgtcctcaggtggggctgccctcacaaggaggctttgtgcacagcttcccctcgctggg

SEQ ID NO: 137324 - DNA, 122 bp, Homo sapiens
cgccgccgccggaggctgcacctgcctcagaggatgcccaggagcccgcgggagcctctccggatcagaactttttaggccgcccgcccccatccccgcagtccccgggccgtgctccggta

SEQ ID NO: 137325 - DNA, 122 bp, Homo sapiens
ttgggaggctcctcaggtctcaggctcaggtgcagaagcagagcccctaactggaaggctcggaggtgggccggtgaggcaagcaagccctgtggggggttgaggacagcttgggttggatg

SEQ ID NO: 137326 - DNA, 122 bp, Homo sapiens
cgggcaaaaaacagatttggcgtttccgctttctcgcttgtgttgggatccaggaaccggcgacgcgccggccaagtctcctttcctgggtctctctcgcgcgctctctcactgatgcactc

SEQ ID NO: 137327 - DNA, 122 bp, Homo sapiens
tactaaagctttttctacctccaaaggtgtttcctgcttaccaggacttgtaaggctcagcgacattcagaattcctcttttcttcagcagaaagtttcatttactgctgtgaccctcgacc

SEQ ID NO: 137328 - DNA, 122 bp, Homo sapiens
ccggcaggcactgctccggcacccactctctggaggatggagccaacgttgccttggaaacgggcatccaggagtggagttcattcctaacacgttcggctttttgtctcttaattcattgg

SEQ ID NO: 137329 - DNA, 122 bp, Homo sapiens
aacggggagaggaagtgtggcaaatagaagatattcttcaggtagagccagggctcgggccgcgtccccaggtggcccctccaaacgaccgtttaccttgtcaattttctcttttcaatgaa

SEQ ID NO: 137330 - DNA, 122 bp, Homo sapiens
gtaaacatcttctgggcacagtgtcactgggaggatttttgtattgagagggcagtgaggcgtgaaacctcagactcctgtggtacttcctgctacccagtgatgtcagaggcttgctgctc

SEQ ID NO: 137331 - DNA, 122 bp, Homo sapiens
caagggcagctctgcaaggctacagaagagctttgtgggggctctggccagacccaggggcgatggctaaaaccaaagaggaatggatgtactgaattcccatcagagaagtgtggctcccg

SEQ ID NO: 137332 - DNA, 122 bp, Homo sapiens
aaaaaaaaaaaattagccgggtgtggtgcctcgtgtctggtgcctgttgtcccagctactcgggaggctgaagtgtgatgatcacttgagcctaggggctgaagtgaccctatgatcacacc

SEQ ID NO: 137333 - DNA, 122 bp, Homo sapiens
atgtctgcacaagattgttttattgcagcattatttttaacagcgtaagactggaaacaacgcaaatgcccatcaatgggagagtcgtttaaatgttatcatacatccatacaacaaactag

SEQ ID NO: 137334 - DNA, 122 bp, Homo sapiens
ctgttgtctggggagccccagggggtgcaggagcgtgtggacaggaccccacaggccctgcggctgaggacgccgtgcacaccagagtgtttctgctcctctcccctctctgggcgtgaaac

SEQ ID NO: 137335 - DNA, 122 bp, Homo sapiens
ctcacacccccctttatattctgcttcacgtggggtgcggggcaggagggagggggagagcgcaggaaggggaggaaaagcgagaaatgcccaccttctccggccaactccgaagccgcctc

SEQ ID NO: 137336 - DNA, 122 bp, Homo sapiens
gcctggatgcaagaggaagcaattggattcacttaaatgccgcagacataaacccctgcacgccttcgcaggactgggtccccgcacggggaccccagggaatgagaacggtgtcggctaat

SEQ ID NO: 137337 - DNA, 122 bp, Homo sapiens
ataaaatctacataaatggcacctttctgagtagggcattgcacacagcatggctgattgcggaagcgctgccctgtgccccaccattgtcccctgcaggttttatcattcccctcaataga

SEQ ID NO: 137338 - DNA, 122 bp, Homo sapiens
cacgacctgacccgctgcgcctcggcgtgcacttagaggagcccggagctcttcgccaagcgcagaactgaccccccgcaactccacccgcgggggcggacacctaccgtgggccgtgtcgg

SEQ ID NO: 137339 - DNA, 122 bp, Homo sapiens
cggaccaatcagcggccgcagagtgtgggaactgtcgccatggcagccaggaggcgggcgcgcgcggcgggaggaggggcagagcggagcggtgggccgggggctggaggacaggtttgtgc

SEQ ID NO: 137340 - DNA, 122 bp, Homo sapiens
gtacatttgcacaattgtaactattagtgtttttatgacattcaaaaaatgtctaagggccgagagacatgtttatgatagggaacaggatatatgagtgcatacagggttaagattgtaca

SEQ ID NO: 137341 - DNA, 122 bp, Homo sapiens
tcgtccctagctctgaagggggtgccctggtcggaatcagtgctgggtgcactgcagggccgggaagtccatgcccacgttgtggctcagtgcagtgaaagccgatctcacccgctccgcag

SEQ ID NO: 137342 - DNA, 122 bp, Homo sapiens
gataacaccaaaacacttggcctctcaagagctccttaaagacaaccctgcagaacatgccgctagcaggatattcctgcaaggaactagcagccacttcatttagcagcctggcatgcagt

SEQ ID NO: 137343 - DNA, 122 bp, Homo sapiens
tgtcaaacaaatgtgttcgggttgagtttatagctctgtcaacagtcgcaatcgcttccacgatggaggtagctacaaacggatctccatttcgactgacgtcaggaactaggaaaatacaa

SEQ ID NO: 137344 - DNA, 122 bp, Homo sapiens
gcgtctctccttttgcttagtaagctcttggaaggtgaggctgcgggtggtgcgtccctccgttccctagcgtgttgcatagagctagatgccagcggggtcctcggtaactgtacgtggca

SEQ ID NO: 137345 - DNA, 122 bp, Homo sapiens
aggctcttctggcacaaattcattgcctttattctgatgagcttctcttcatgggatttacggacactgaattatatccagactctgctaacttcttggttttctccctcctatcgcctaat

SEQ ID NO: 137346 - DNA, 122 bp, Homo sapiens
ggaagggcttctgagcctcagtcttcgggcggcgctgaccattggcgggcaggatggaggcggagccttgggttgtcgcccgccgccgggggttaaggtgagcgactgcaggcaaacccggc

SEQ ID NO: 137347 - DNA, 122 bp, Homo sapiens
cagtacagacgtccccggttatcgctgccgggcttgtgcgccccacgccacctacctgtccggccttcccgctccaattgctgacccgtttagggagcccggcctggagcccgccgcctcca

SEQ ID NO: 137348 - DNA, 122 bp, Homo sapiens
catgaatgagttgagattgcagttttcagaagcacaggtctcgtccattattctgataaccgatctctttactgccttacaatacatcttattttgtttcttaacttcactgtgtttatatc

SEQ ID NO: 137349 - DNA, 122 bp, Homo sapiens
aagcggtctactaccaaagtacaatgaaggtcagttttcttcataccttaatatgaaaaacgttttaaaatgtctcaatttccctatgctaacctctggtcacagaggcttgagggcttcct

SEQ ID NO: 137350 - DNA, 122 bp, Homo sapiens
aggacaaggggctgacacggacgctagtgttccctggggcagagatacacaatttttatacgtggctcaaaagaaagggtggctgtgacaggcaaaagacccaaagggcaataccagagctg

SEQ ID NO: 137351 - DNA, 122 bp, Homo sapiens
ccggccggctcctggcccctcctagcagacccaaccgacatccttcaccctcagttagtgcgcaggagggaccgggacgccagccgactgcgctccagaactattcccattgggccagagaa

SEQ ID NO: 137352 - DNA, 122 bp, Homo sapiens
ccccacacaagaggaaacaaagacttctcagctcaaggcctcagggctgcctcctgactccggtcagtttgcaggaagaggaaacaacaaaacaaaggaaccgccaatccgccgggtattat

SEQ ID NO: 137353 - DNA, 122 bp, Homo sapiens
gggacccagaagtggtgagagggaaggccacccgccgtgaagggaagtcagtgcccagtccgagcaggaggaggcagagtcaacaggaagttgagaaaggacactggcactcgggagaggat

SEQ ID NO: 137354 - DNA, 122 bp, Homo sapiens
ccgcctcaaacctccctccggaagcaagctgctgtgccttgtagcgtgtggatccggagccgattcccagaacacgaaggggggaaaaaacgcttctaatgatccctcagaacttgcatatt

SEQ ID NO: 137355 - DNA, 122 bp, Homo sapiens
gtctgtcctgctagcggggatcgggcggctggacccaagagcagggcacgtgcgcagcgacgcggggcggccccgccaggagccccgacccgggcgcggcgcagggcccggcggagagcgcg

SEQ ID NO: 137356 - DNA, 122 bp, Homo sapiens
aagtacttacatactttgagtgaattacaccagaacaggatgtgaatgctaaaaagaccccgagggaggccgggcatggtggctcatgcctgtaatcctagcactttgggaggccgaggtgg

SEQ ID NO: 137357 - DNA, 122 bp, Homo sapiens
tctccatatttcccatcacacgctccacggtgatttatatagtcataaacagcattcttgcgactgtagctcctctcatagcttgaggtgagctcctttttcactttcctggcagccactac

SEQ ID NO: 137358 - DNA, 122 bp, Homo sapiens
agccgcccccgccgccgttagctcacccgcccggctgccttagggattggcgctgcccagcgggctccagcgcaggctccagctcagcctcctgccggttttcccaccggtggctcccgcca

SEQ ID NO: 137359 - DNA, 122 bp, Homo sapiens
ccgggcggtgcaggcgcgtttccgctcccagcgggcacgctgctcttgcaccgggcaccgcgaaccggggcaggagagctccatgccctggctgagggatcgacacttccggctgcagtccg

SEQ ID NO: 137360 - DNA, 122 bp, Homo sapiens
ctgaccgggttccctggagcccagtgcgcacggtgctgagcagagctgcagccacgcaggcgcattgcaggaggactccagagcgtctcctggagaccttgagcctgaacgcactcaggcgc

SEQ ID NO: 137361 - DNA, 122 bp, Homo sapiens
ggggaactattggcagagggatggagccacacacattaggttacaatctcagggagggatcgtttgctattgtctgcccaaagcctagctctgcacctggctttagctaaactccaacaaat

SEQ ID NO: 137362 - DNA, 122 bp, Homo sapiens
cccggtgctacaggcccagcctctttccctggtcaccaagtctgcccactaagctccccccgacccctgcaggctgtcacatgactcattgagtagtaatgattcagaagaaaaagaaaaag

SEQ ID NO: 137363 - DNA, 122 bp, Homo sapiens
tttcccctggctgctgttgtaatctacttgttctgctgacgcccgaactgacttctttcccggtctctccccactttctttagatggtcccttccctctttctctccctttccctcctgaat

SEQ ID NO: 137364 - DNA, 122 bp, Homo sapiens
ctacaacaatgtagaagagaaaagcctggagcaggagctggccagccccatcctggacatcgaggacttggtcaagaggggaagcaagcacggagtatgcccttattacctgtcccggaacc

SEQ ID NO: 137365 - DNA, 122 bp, Homo sapiens
ctatctcgcctgactgtcccgtggaggggcggagcctcgcctccagtcctcttccacggccgcctctgtttatccgcttgccattggccccggggactgccagtcggctctagggatggact

SEQ ID NO: 137366 - DNA, 122 bp, Homo sapiens
acagcctcaattagcttctcatttccttgtacaaggataacatcaaatctagccaagcgacggtagtcaactgattcctttttcgccttagctttagcttctttcacttcctttatcaactg

SEQ ID NO: 137367 - DNA, 122 bp, Homo sapiens
ccaaatgcagcctgggtccaacacacaggtgtgatctctgtcacagctgaagcagagccacgctgcagcaagtgaacgtgaaaggatgacaaaaagccacgaggtccgcttgctccaggacc

SEQ ID NO: 137368 - DNA, 122 bp, Homo sapiens
cacctcgggagcccggagcccgtcacccaagtccggtctaccgcggaggcactgtggcctcgggtcggccccggagcgaggcctccagaactaccatcgctctgtcttcagcgacttcccgg

SEQ ID NO: 137369 - DNA, 122 bp, Homo sapiens
taaaatcgggatcctcctaaagacctcctcatggtttggtgaggctcagatcttgtatgtcgaggaactcgtgcttagcatttgcaggttttactttgaagctactgtgtgttcccccgtga

SEQ ID NO: 137370 - DNA, 122 bp, Homo sapiens
gcctgaagtgggcagagggaaaatttcctccctgctgtggcttcttcgagggctgtcggccgatattcccgtgaagtccctgccagctgctgggccgcgtccgcgcccctccctgccgccag

SEQ ID NO: 137371 - DNA, 122 bp, Homo sapiens
tttctctctgggcccgccttttcccagtctgagccaatccaaatggaggcggaagcgctccgccttcatcgcctggaactctgggaggtgcttatttctgggcacgccccctttcccctctg

SEQ ID NO: 137372 - DNA, 122 bp, Homo sapiens
ggaggccatgaccaaggcggtgggtctgcccgcagctgcggcagcgcggcccagaagatgcgttgtgtttccggtagttttctgtgaggattgactcaacctggtcctcatccctattcctt

SEQ ID NO: 137373 - DNA, 122 bp, Homo sapiens
gggggggattaaatgtttacttactcagtgcagattttgttttgtttgtaaaacttgtgtcgtgtggcaaacaaccgagaaatatacttggcattttcgatatcatccttggaaaagaagag

SEQ ID NO: 137374 - DNA, 122 bp, Homo sapiens
aagcagcgcgcggcctcggcgttcctttctgcagaatggggaaactgcaggccaatgtggcgaggggcctgcagacggggaggctccggcagccgcactgacctgttttgagtaaagactcc

SEQ ID NO: 137375 - DNA, 122 bp, Homo sapiens
atgagtggaaagacaatagatatctaggctgcatggtgggaaaagccctctctaaagaggcgacattgaagatgagatctgaataacaagagggagctgctacgttaagatcaggggacagc

SEQ ID NO: 137376 - DNA, 122 bp, Homo sapiens
gagaacaatggccaatggacgcagagggggcggggcctcgggcgctgttcaactgcagggcgtattcccggagggcagttggggagcgcagatcccgaagcagcgctgggagcgtaagtgcg

SEQ ID NO: 137377 - DNA, 122 bp, Homo sapiens
cgagcggcgacgtcacttccgctggttcaagcaccgcgagactatacctagctgcccacccgttactgtttccatggaaacagcctgaattcgccgtagccggaaattagtgttccatagtc

SEQ ID NO: 137378 - DNA, 122 bp, Homo sapiens
atgggcggggagaagcgtgggctgcgcttgcgcactgagaggcggccgaaggggccgaggcggctacgcgtgcgcggtgggcggagcgcggctctcctaccttctcgggcagcccagtcttt

SEQ ID NO: 137379 - DNA, 122 bp, Homo sapiens
gttcatctgtcaacagtcgaagcgcactgctctggtgggggatgttggcggtgcaggaggcgcgggggcaggagagtgtggtaaatcttgtaccctctgctcagctgtgctgtgaacctaaa

SEQ ID NO: 137380 - DNA, 122 bp, Homo sapiens
cacggcgttgctgaggggctgcagcagggtggagcccgtggtgctggtggtggccatggccgggcctcggcgctccggccgcccgcgccgctcgcccgctcgcgctgtgccgggcgacgacg

SEQ ID NO: 137381 - DNA, 122 bp, Homo sapiens
tcttaagagtctgtgtgtcgcataagctcttaggcaattctcatgctgctgaggaccacacggtagtgtagtgagctgtgagggaacaacgcacattctgcacaacagtgactttcaggacc

SEQ ID NO: 137382 - DNA, 122 bp, Homo sapiens
gtggacgctggtgttccagcccgtgacattgctgtggtctcgccatacaacctccaggtacgagggtttccttttgtccctctacagagcagctggggctcacacaacctagagggtgaaag

SEQ ID NO: 137383 - DNA, 122 bp, Homo sapiens
aggccgagggagaagttagaaagggatgatgaacgaagcgttttgaggggactgcaacgccgcggcaatacccgcccctgagctgcgcgcactaccgcctcggtagctatcatggccgccgg

SEQ ID NO: 137384 - DNA, 122 bp, Homo sapiens
cagagacaggccaaaggattggatccgggaggtaccggcccgacccctagctctggcttacgcaaccccacagatgtacatttcgctgcatctgagcagagagagaagagcaccgagggccc

SEQ ID NO: 137385 - DNA, 122 bp, Homo sapiens
gggagggtggcccgctggcctctgtagcctcaggaatggcagggggcatgattgactgcccgaggacctcgtggggagcctggagcgtagctggaagggcctgggcatcgccgctgcccgcc

SEQ ID NO: 137386 - DNA, 122 bp, Homo sapiens
agccgctcatagaccccgcctgccgtccggtcaataaaatccgcctgactcctgcgcccccgcatgcgaccccttcgtctgcttgtgtactttgccgtctagctcagggcgcagacaggcgc

SEQ ID NO: 137387 - DNA, 122 bp, Homo sapiens
catgacccaggcagaaacacagaaagaggctcaccgaagacagggcgacatgcgagaaatcgctttgtggcgcatagggcacattccgccaaagatacatactcacacgggcacacacacag

SEQ ID NO: 137388 - DNA, 122 bp, Homo sapiens
gccccctataggacatcgtgggaatgtgtgtgggtgatctggatgtcacagtgacccagacgaggcttttactgggggaagaggggaaggcaggggtgctagatataatgcttggggaacaa

SEQ ID NO: 137389 - DNA, 122 bp, Homo sapiens
tgtgtgaggcgccggccaatgggctcgcggggccacgcgtgatcggcgactgcccggcagcgtgaagctggtgtcagtggagcgtgtacacaatccccggcagcgtgttccctctgccctgc

SEQ ID NO: 137390 - DNA, 122 bp, Homo sapiens
gtgagtaagtctcacgatacctggagggtttatcaagggttcctgcttttgctgcttcctcgttttcttttgctgctgccacgtaagaagtgtctttcgcctcccgccatgattctgaggcc

SEQ ID NO: 137391 - DNA, 122 bp, Homo sapiens
aagcgcatccccctcaccaggaccaccaccttctgaggagcccttcccctacccaccctgcgtggccacctcccaaggggtgggcaccattcctacagccccgaagactgcatctcctgaat

SEQ ID NO: 137392 - DNA, 122 bp, Homo sapiens
gtgcctcaatggtaccccatgtcgactcctccaacgatgaacggtgtctcaatggtaccccgtgtccactcctgcaatgatgaatggtgtctcaatagtaccccgtgtccactcctccaatg

SEQ ID NO: 137393 - DNA, 122 bp, Homo sapiens
ggttcttttctcaacttcgaaagttctgcgggctgggaaactcccactctctcccttctccgtctcgggccgtcccccttacttggctcggccggatcggcgtcggggcgtcagcgtatcgc

SEQ ID NO: 137394 - DNA, 122 bp, Homo sapiens
tacccctgcttccaggagaagttctcatctccaaacaagaaggtcgcagactgtgggcctcgaagctgcacctgtgtgaacctctgagctcagctgccagcctccatgaagtctccacatct

SEQ ID NO: 137395 - DNA, 122 bp, Homo sapiens
catatagtagttctaaatttaattttttgaggaaccactataccattttcaacagcagtgcgtaagggttccaatttctctacatcctcaccaacacttgttatttatttatttatttattt

SEQ ID NO: 137396 - DNA, 122 bp, Homo sapiens
ctggggaagggaggggctgggtggcctggggcaccccctgggtccttgctgcaggagtaacgggaggcactcacccctgtaggcccaggtttggggcgctcagcacagcagcttgctggttc

SEQ ID NO: 137397 - DNA, 122 bp, Homo sapiens
ttttttccccttgaaggattcatgctgatgtctgcagagtcggttagagagtaaaaacagcgcatgccttcctggagtcaggatccgtaaattctgacgtagcccgtgcatcttaaaaatcc

SEQ ID NO: 137398 - DNA, 122 bp, Homo sapiens
cttcagatagtgatttgaatgattaagtgaaactcttcttaggttaagtgtcctagtccacgctaaaatcatcttgttggtctctttggcgctgtcagcgaccagtatcagcgcccggcttg

SEQ ID NO: 137399 - DNA, 122 bp, Homo sapiens
cagcggagccctgggcaggggacaccgtgtgactggctctagctctcctaaaacacgggacgcaggagtgtttcttaagtgtgacaaggtgaaagcccctcgcgagttgaggaaggtctcat

SEQ ID NO: 137400 - DNA, 122 bp, Homo sapiens
cataaaagctcgcaaggcgtagaactttttcacgttttcatttgtttcccgtaggggccccgagaacgtgcatgacaccatgatttcccccccattataaagatgagaaaaccgaggctctg

SEQ ID NO: 137401 - DNA, 122 bp, Homo sapiens
cctccccctcaaaccaggccagttctctgcggctgggcatggcccagaagcgtcacctgacgtttaatgctactgtccctttggtccatgttgatgatagtgtgtgtgggattgccagagcc

SEQ ID NO: 137402 - DNA, 122 bp, Homo sapiens
cttctaggactcgcttccttccttagcaaacagaatcaaagttttactaggtgccaagttcggtgataaaaagtgatgttacagaggtgaatcagataccacatctgccctggaggtgctaa

SEQ ID NO: 137403 - DNA, 122 bp, Homo sapiens
cagtctgcttgactgtcatgaaattgcctttcagttaaccttcagccaagtatcagtcttcgttctccttgtctgttttatttatttttattttttacttaaattgggtcatgagtcaagcc

SEQ ID NO: 137404 - DNA, 122 bp, Homo sapiens
ccaaccgaggatctgtctagaatacttccgatatcaatataccgtagttgaaaccagaaccgtctccagctgtcagcagtcttggcggctactgtacagctgtcagcatgactacaggcagc

SEQ ID NO: 137405 - DNA, 122 bp, Homo sapiens
cacccccgcaccgcctgattccgaggggcgggagcgcattgggctgcgcacgggtgggggcgccgcgccagcttcgcgtagctgctctgacgccgctgccgccgccgccgccgccgccgccc

SEQ ID NO: 137406 - DNA, 122 bp, Homo sapiens
gaaacttgggggcaacctgcagaacaaaaagcttagcgtgaaaactaaactggccaggagcggtggctcatgcctgtaatcccagcactttggaaggggaggccgagtcgggcggatcaccc

SEQ ID NO: 137407 - DNA, 122 bp, Homo sapiens
gtgctgattggtgcgtttacaatcctttagctagacacaaaagttctccaagtccccacccgacccagaagccggctggtttcacctctcaatggctccagccgctgcctctccctgcacac

SEQ ID NO: 137408 - DNA, 122 bp, Homo sapiens
actctgtacttttttcaaattagacttctctctgctttccacacatgctgtgtggtttcacgcccccaggctttacttaagtttttctctgccctgcccacgtccctacctatctaatttct

SEQ ID NO: 137409 - DNA, 122 bp, Homo sapiens
gcaccatggaagggcgccctgtctgcccgacccctggcccggagccaccagagctctcttcgctcacctctctggtcctagtcttggcccagagcaggtatcaaaaacaacgtgacacagac

SEQ ID NO: 137410 - DNA, 122 bp, Homo sapiens
ctatccaggcgcccagaccagagagtgatgccgattcttggggttaccttacgatctgagcgaatgttcaaagaagtagacccataccctctgcttgagaaaaaaaaaaaaaaaaaaaagca

SEQ ID NO: 137411 - DNA, 122 bp, Homo sapiens
agggtgagcccctactccaaagctcccagagcttctccaaatgctttcacccagagagctcggaggcacacagcacgcgcgcgtgcgcgcgcgcgcacacacacatacacacacacagttgt

SEQ ID NO: 137412 - DNA, 122 bp, Homo sapiens
ataaattttctttttttaaggatatgatattcactttcatgacaagaaaatcctgttgctcgaagcaggtccaaagaaagtactggagaaattgtcagaaacttacagcaacagggtcagct

SEQ ID NO: 137413 - DNA, 122 bp, Homo sapiens
agcatgcagcggtggctagcccttgtcctggtcctctaagccgggaacggagcagccccgcgcgcagacacgcatgagcctagaacggcctgactccccttcggcaccatttatatactgag

SEQ ID NO: 137414 - DNA, 122 bp, Homo sapiens
cgagaatggaataggaagaactagctgcctcacttttcactttcgcgcctacattttcttcgctccctaagttatacaagatgtacatttcctctcttaagcaacttaatttgggtgctact

SEQ ID NO: 137415 - DNA, 122 bp, Homo sapiens
acagcggggctggagctgctgaatgtgcacaacacacttcacccgggcctggttcaggagcgggcgaggcagccgtacaccctgtccttcagcagactcctcttgatcgatggaatcgaagt

SEQ ID NO: 137416 - DNA, 122 bp, Homo sapiens
atttttgtcttcttgaaatacctcttcgaacatgtctttcggcttagatagaactctacacggcacatagaactacttctagcagtctgactccttagccttgtattcacagtctttccctg

SEQ ID NO: 137417 - DNA, 122 bp, Homo sapiens
ctgcttgggctcagcccgtatggatcagctccgagaactccattctgccagtgagagacccggggcccagcagaaggccagactctgagagcgtcaggaggggcaggctggagctccgaaag

SEQ ID NO: 137418 - DNA, 122 bp, Homo sapiens
agcttggtcagagtcggggctgagaccagtcctggccagggcagttaacaggaaggtctccggaggccgggattcgcggagggtccatcaggaggaagaaacctcagacagatctccgggga

SEQ ID NO: 137419 - DNA, 122 bp, Homo sapiens
gtctcatgcagcgagatgggcagttctgccgtgcaatcccagctcgcagttcttgctccgcgtgtactcacgggaggactcgcaggcgttaccgccttcccgcgtgccccgcccaccctccc

SEQ ID NO: 137420 - DNA, 122 bp, Homo sapiens
ccgcaggttgtgcttgtggtggtgccgcttcaccgcctgcttcttcattaggggcttgggcgacttgatcagcccttccgccagcggccgggctagctctgcggccgagggagtggggccgg

SEQ ID NO: 137421 - DNA, 122 bp, Homo sapiens
ggggagccacagagggttcacctaccagagagcaggtgacagctcagaggcacgcgtggccgagccacgggccaaaggaagagtggagagaagggattctaacagcacataaggaaacagcc

SEQ ID NO: 137422 - DNA, 122 bp, Homo sapiens
tatgctttcaagctttgacagacaaatcattgccctgggcttcctggcggccacgagctccggctcacctcccgctctgaggagccgcggaccctccagcagacccaggtctgttctctgca

SEQ ID NO: 137423 - DNA, 122 bp, Homo sapiens
aagaattcttgaccagactcacccggttctgaagcctttggctgtgtcagtcagttaggccgtgcacatggaatctggggattattggggacagcagagcaaaatatttctgctcaggagag

SEQ ID NO: 137424 - DNA, 122 bp, Homo sapiens
atattatggaaaaattttctgtgcatttttcttacaagactacttttccctaaaattatacgtcaactcaaatcttgcatcaccttctgcagagatgaattgtccacattcagtagtacaga

SEQ ID NO: 137425 - DNA, 122 bp, Homo sapiens
ccccttctggtgccaggcttgcttttcagttgggcctgacccacttctcttccaggaaagcgcccgccttccttctgcacccgtcaacctctggagtgtcctgaaaaccctcccttgtggga

SEQ ID NO: 137426 - DNA, 122 bp, Homo sapiens
gcctcagatcccacagacctgatctcaccaaacagttaactggcttgattctcttattatcggtgaaccacacccaaagacggttggcaagcttgatgggataaggacctgcctcaggaagc

SEQ ID NO: 137427 - DNA, 122 bp, Homo sapiens
ggagtaagcttttaacaaaggtttaagggagtaagtcccagagtccaaactggatttcaccgactgactgttgaagctttcgggtctcagctgttggcccaacgaaccttcccaagaccttg

SEQ ID NO: 137428 - DNA, 122 bp, Homo sapiens
gtgatcttgctgtatctaagctgacattggaacatgaacagtctgaaatcccatgagccccgctgccctgcacctgcgaccctcaggctagaccttggactgtctacaacacgagtcaggcc

SEQ ID NO: 137429 - DNA, 122 bp, Homo sapiens
tttctgagcagaacacgtttgctgtcactgaaagcgatgaaacaaagctactccgcaaggcgactacactcattctttgggctcccaaggctgagaaatggagaaccaattggccggtttgc

SEQ ID NO: 137430 - DNA, 122 bp, Homo sapiens
tttagtggtctcctgaaatgccacagccagcattctgaagaagagaaaacaaggatctcacgatttcctgtctaatagcaagagcctcctccacctggataaatgcattaggtgtctgagcc

SEQ ID NO: 137431 - DNA, 122 bp, Homo sapiens
cggagagtcagccgagtgggggcggcgctcaccggtggtgggactatggcgggagcgcagcgcaccctctccgggcgggtctataaatgccatgtaaaagccaaccccgcaggggcctgcgc

SEQ ID NO: 137432 - DNA, 122 bp, Homo sapiens
gtgtgctcaacattgtacattcaattaacattaattttctctcttctaaataatagcttacgctttctccactagtctagcctggtaactttagtaagacctgtaagaaagattttgtgttt

SEQ ID NO: 137433 - DNA, 122 bp, Homo sapiens
gcgtggccttcgtccctgccggggatcctggggagctgtggctcagacctctggtttctgcgcctcctcactctccaaacccaacctcgaggttcccccgccgctgcgcaccctgggaagcc

SEQ ID NO: 137434 - DNA, 122 bp, Homo sapiens
ctgtggagagagaagcaaagtgaccgaggccctggaccctgcagacccaagccaggctgacggtggtaacactgccccacccaaagctgtcccacttccagaacccagagagctcttcattc

SEQ ID NO: 137435 - DNA, 122 bp, Homo sapiens
ccctcccacgcgcattttccacctcgcagctaagaattcagtccagacttccgatcatggcgccacgcacgtcaccttctcccctcgccgccagcaaaatcccacccacgtcggctgacccc

SEQ ID NO: 137436 - DNA, 122 bp, Homo sapiens
ttggtggcttctctgttaaatcgttcgtgtctgctgcacttaagtagccacaaaatcccccgcaagaaggaaggctgctgcaatctcccgccccgatctgcgggccgcgtccccgcgagctg

SEQ ID NO: 137437 - DNA, 122 bp, Homo sapiens
ttttttttttttttttttttttttttttttttttgagacagactttcgctcttgttgccccggctggagtgcaatggcacgatcgatctcggctcaccaaaacctccacctcccgggttcac

SEQ ID NO: 137438 - DNA, 122 bp, Homo sapiens
taactccgcgccccacgctgcccccacccagttggcgccaaagaccacaggcggagcttgcgctacccctcctacttggaattgacactagctgggagggggctgccgaagacagctcccta

SEQ ID NO: 137439 - DNA, 122 bp, Homo sapiens
acgctctggctccgggaagcgtccgagttgcaggcgcccgggcagaggtctctactggtgcgagggtctgggcagagtcctctcaactaaggaccgagccacttcggatggaaggtgggggt

SEQ ID NO: 137440 - DNA, 122 bp, Homo sapiens
ttgtgttctcactgagaataatattcttagttttgtggatgttcgccattctagtagttccgtagtgccaccacatagttgttttaatgtgctctaacttaatggcaaatatgttgtgtatt

SEQ ID NO: 137441 - DNA, 122 bp, Homo sapiens
gcacccaccccctttccctcaagtccctgggttggagaagctgaatttccagccgttatccgcctctccctttcccaaacctcccctgcagcctttcttcccaagccctcgccccaaacaaa

SEQ ID NO: 137442 - DNA, 122 bp, Homo sapiens
tggatttttggagttctggaaattcttgtaactttgaatttgcagcgctagatataacagcggaattttgcagctactgtgtatctggcttcttattaatagtgcaatggcaaaatgcctca

SEQ ID NO: 137443 - DNA, 122 bp, Homo sapiens
ggacggcacagtggtttgggcgggacactggcgggtggcacctcggagacatgagttcggcgtctgttgggaggcctaatctgtcccccaggctgcccgcccacagcctagacacgtctcct

SEQ ID NO: 137444 - DNA, 122 bp, Homo sapiens
cggatacgggtagggggagcccactggtgacgcctacgcctcgccctccagagtaacccccgtgcactctgggactttgggatattcattttctgccccaaattcctggagaggcagtgagt

SEQ ID NO: 137445 - DNA, 122 bp, Homo sapiens
gagagcaaccccttcaccgaaatagccatgagcagctgcaggtacaacgggggcgtcatgcggccgctcagcaacttgagcgcgtcccgccggaacctgcacgagatggactcagaggcgca

SEQ ID NO: 137446 - DNA, 122 bp, Homo sapiens
cgcgggtcctcgagcagaaacccaagcaactctggggtcagcggcgacaggggaatggggcgaggcggcgcaggactccactgcgttccaggcgggggtctgggcgtttctcccgggtccgc

SEQ ID NO: 137447 - DNA, 122 bp, Homo sapiens
agaccaagtaggaagctcttgaataatccaggcaagcgatgtttggtggcttgtatctagcgggtggtagtggaagaggtaagtagccagattctaaatatgctttgaaggtagacagggtt

SEQ ID NO: 137448 - DNA, 122 bp, Homo sapiens
aattagttgaaatactagttttcattagtgatagcagatttaagttaatgaaaccaaggccgatatttatttagaaggcataggaagatttcttgtagtttcagttatgttcatgataagat

SEQ ID NO: 137449 - DNA, 122 bp, Homo sapiens
gcccggttccgtgtagggctcctcaagatggtttcttagctgggaatttcccatgtgccccggagacctccaaaagcgcggtcccctcggaaggcagccagggaaggggcatcactgagact

SEQ ID NO: 137450 - DNA, 122 bp, Homo sapiens
ccatcttgttaatgtctctccttccttcccctgctccccctcccctgcgtggaggaagaccggactctccttggctggacccttcccaaagcacctgcctggcccgggcaggctccaagcca

SEQ ID NO: 137451 - DNA, 122 bp, Homo sapiens
ccagcgaggcaggcaggggcgaggactgagtgaccggcgatactggaagcccagaaagagcgtagcaggagggtccggaagggcccagagctggggctgtaacagggtaaccggctgagggg

SEQ ID NO: 137452 - DNA, 122 bp, Homo sapiens
gggtaggaggaatgaaacacagttactcgtattcagcaagttcctggggtcatatttacccgcatgtgtctccgggtaactggggggtggcgcgtgtttgccgttgtgatgcgggcgtgtgt

SEQ ID NO: 137453 - DNA, 122 bp, Homo sapiens
gaccaccagggctctgtccctccaccctagttcataccatgtctctgcttgggtcatgtgcgctgagccatgacaatgccttacaatctctgagatctggggagacttcagactgtctaact

SEQ ID NO: 137454 - DNA, 122 bp, Homo sapiens
caaagacgcccacaaaagcgcttcctgttgacatcaacacactcttaggcctttctcctccgcgccctccaaggccggcatcgcccaggcgaccactggaccacgaaaaataaagtcatgcc

SEQ ID NO: 137455 - DNA, 122 bp, Homo sapiens
taataataaggggtcagatgggacagtggtccctagcgctgagccaaagggcctgagtttcgggctgtgtctcatctagaattcattcatatctttgactcatagagaaaagaatgaacaca

SEQ ID NO: 137456 - DNA, 122 bp, Homo sapiens
cagcgtaatgaagctgaacttcacagaggtatccacggtggcggttgtgacaaagttctccgccagatctttcaagtactcctgcctcgttcgagtggccattgctcgaaacttttctgatt

SEQ ID NO: 137457 - DNA, 122 bp, Homo sapiens
ctccctatcctcctcagggtcagtgagcgtccgtaagtgcctaccggtcagcatggggatcggtgaccagtttgtccatgggcctagtgacgaaccagtcccagcagctttagaatctgcag

SEQ ID NO: 137458 - DNA, 122 bp, Homo sapiens
agctggccagggcgtctccaggcagtgaaacagaggcggggtcggcgggcgattagcggccgaggcacgctcctcttggggcgggctgggcgcccctcgctggggtgggacggggaggcggg

SEQ ID NO: 137459 - DNA, 122 bp, Homo sapiens
ctgcaggcgggtccggctctgacgaaacgctgcgagaatgccagacagtgtagcctccaccgtttgctcggggtctctgctgccatcagacaagtacttttattcattcatcccttcccatc

SEQ ID NO: 137460 - DNA, 122 bp, Homo sapiens
tggactcctgggtctccagatgggggcagtggtgagcccagatccaggtgagtgaaagcccgacatggcctgcggcacactctctctcacacgccccggcggcaggtcctgaaggtggccat

SEQ ID NO: 137461 - DNA, 122 bp, Homo sapiens
aatgcagagatgaagatgggacagcacggcgcagcccacatcagggaagctggcaggggccgggcgcgagcgctcacgcctgcagtcccaggagcacggcgcggcccaaatcaaggaagctg

SEQ ID NO: 137462 - DNA, 122 bp, Homo sapiens
ttcattttccctaatctggacgcccctaatctacagcttttattgcgcccagttaaaagtcgagggaattcgctgtccctccgcgctcggataattacccctaaatggccacggcagcccct

SEQ ID NO: 137463 - DNA, 122 bp, Homo sapiens
tctttctatacttcttggcaatgagagcattggcatgtgatcaatgcttggttgttccttcgggacagtgcatcttgaggaagtgaccaagggacacatgcaatagttttatgcttcttgcc

SEQ ID NO: 137464 - DNA, 122 bp, Homo sapiens
tctgttgggagttgagggagggggacaacgcggcgtgtgaagagtggggaagaaatcacgcgactggatttggagttctgctgggctcgaatctcagctgtgctttttattaaccgtgggac

SEQ ID NO: 137465 - DNA, 122 bp, Homo sapiens
aaacaggacctgggccttgaggtgggcgtgtgccaggggtttccaagtgatcaagaagagcggggtatgtggtgggagggaagtcagacaggccttgatgaggtcaaggaaataatgtccac

SEQ ID NO: 137466 - DNA, 122 bp, Homo sapiens
aatctgcagaatggcattttgtttgtgaattctcggatcgaccgggaggagctgtgcgggcggagcgcggaatgtagcatccacgtggaggtgatcgtggacaggccgctgcaggttttcca

SEQ ID NO: 137467 - DNA, 122 bp, Homo sapiens
gtcacgctgttcaagcctccaccagtcactcctgactggttatggacactcaatgtgccccgtcctgtgtgcaatgcagtgtgggaaggggatcaaggaccttggctaatcccaggcatttc

SEQ ID NO: 137468 - DNA, 122 bp, Homo sapiens
acagctctccacgcaaggcgtggtagcgccagcggagaataacagcccccagccgtagggcgccccacagccgcagtgcccagagccccacacacagcaggggtgacaggtgccaggactcg

SEQ ID NO: 137469 - DNA, 122 bp, Homo sapiens
ttgctttggagcttcgggataagttaactgcgaagctggggtcctgctgtcttacctctgcggcgatgagcctcaccgtgcacgttggcaggcatagcagattctgtttctgatgccattac

SEQ ID NO: 137470 - DNA, 122 bp, Homo sapiens
agatcaaagggcaaccttaatgacacctggagcacaaaccctgctcagggcgcgtacaaccggagggacagaaaacacgatgcgacgtcggaaagcaggaagggaattgaaattcccgcagt

SEQ ID NO: 137471 - DNA, 122 bp, Homo sapiens
tgcgggcctctctcacccaaggggaacggagttgttatttcccgctgtttccatagcaaccgcagcctcgcgcggggagcgagtcagtgaaccaggcctggcttgcgcctggctccttggga

SEQ ID NO: 137472 - DNA, 122 bp, Homo sapiens
gaaagcgcgctccctaatcacctgttaaacagttattttaaaattagctgtcgcatctgacgccctagggtccccaagggccttttcataagggagtctgtttaacttcactggctttggga

SEQ ID NO: 137473 - DNA, 122 bp, Homo sapiens
gggggcggtgtgcagagtggggcctgggcctcctgcccccaagggcagctgggtgggctccgtgctccctccgagtggacttggccccggctccaaacccagccgagggtcggctcgctcct

SEQ ID NO: 137474 - DNA, 122 bp, Homo sapiens
accctgcaccggagccttcggggctggttccctccgagcctgtaagtgtgagtgtgtgtgcgcgagtgtgtctgtgtgtgcaccagtggggatttctgtgatagaagcagccagattccaga

SEQ ID NO: 137475 - DNA, 122 bp, Homo sapiens
gcccataggacacctggtttaggtagaaggagcctcctcaaaggcagtgctgggcacccacgggtgtgctggatactggagtttgagaggagggaggtgctggggccaaaggagacactaga

SEQ ID NO: 137476 - DNA, 122 bp, Homo sapiens
tagcagccgccagtccgctcgcccctcgcgttctctggctctcaaatccgagtgcagcctcgaacataggtccttctgccgccccgccccctggctggcaatctgctccaccgtaaccacgc

SEQ ID NO: 137477 - DNA, 122 bp, Homo sapiens
tctggtggaagtctgactgagagccactaaatcaggggatccctgggcctaagctgacgtcggtggctgaggtcctgggtcgccgcactcaccggtcactcctgtgccccaccacggtctgc

SEQ ID NO: 137478 - DNA, 122 bp, Homo sapiens
ccaaagcggagcccaagccgcgaccaacttgaaatgtactgggcttcctcaagtcggtggcgttctaagcccgcctcccggagctccctattggtgagttttctcggccaatgcaggagaag

SEQ ID NO: 137479 - DNA, 122 bp, Homo sapiens
atggcgccctggtgcccagcggcagccccgccaccagcagcgcgctgtcggcccaggccgcgccatcctccagctttgccgccgcgctgcgcaagctcgccaaacaggcggaggagcccaga

SEQ ID NO: 137480 - DNA, 122 bp, Homo sapiens
ggtcatgccaagccagcacctgggcctggaaccgggccgcagccccccagcttcgcccaccgcctccctaccatggacccctgcaaagtgaacgagcttcgggcctttgtgaaaatgtgtaa

SEQ ID NO: 137481 - DNA, 122 bp, Homo sapiens
tcggcacactctccgaggtgcctaggctgatgtggttaacgcccggctttctggatgcaccggaagcgtggtgtgtatggagtgcgtctgaaatcagagcttctttcattgcaccaggggaa

SEQ ID NO: 137482 - DNA, 122 bp, Homo sapiens
gtggcggcggcggcgcggggaggtgtgcgcggacgccctgcccgctgccgctgccacccccggcccggccccgcccgccccccgagccccggcctcattttcacacggtccctcccgggccg

SEQ ID NO: 137483 - DNA, 122 bp, Homo sapiens
ttctcttgccatcttattcccatatcctctgccatgataattgcaaaactgctccatgttcgtcaaacctctgaattcctttctctctcttcactcagcagcagacacctccttgtttagat

SEQ ID NO: 137484 - DNA, 122 bp, Homo sapiens
cgcggactgcgcaggcgcactcaggccccgccccggacctgccacgcccctctcctctcgcgcctgcctcgcccatgcccagctcccgggccccgcccttcgctgcccggaccctcagtgac

SEQ ID NO: 137485 - DNA, 122 bp, Homo sapiens
ttgtgtagttgccactgtcattataaaggactgggacaacttgaggtgtagaagagactccggagttgagagagaaatctgcagctatctgtagcccaactggcttaactatttttaaaaat

SEQ ID NO: 137486 - DNA, 122 bp, Homo sapiens
ggcagtgagactctgtaccaccccaatccctcatccccctgagggagctgccaaggcttccgggcactgccacccttgtgaggtgcccttgtgagtaccacaaggtactcagagcaaagtcc

SEQ ID NO: 137487 - DNA, 122 bp, Homo sapiens
ccctcgcaccacgtaccccgcggcctctttgttgttgggcacctcctctcgcacctcgaacgcctcttgctgatccaggacctcctctctgtgaataaccggctctaccgcggggaggagca

SEQ ID NO: 137488 - DNA, 122 bp, Homo sapiens
acactgggcgcgcgctcgctccccgctcgattccaggcggccggcgcccccaactgatcccggaacaccagcgtccagcacctgggctccacacgcccctttcggcctgggtccctggggga

SEQ ID NO: 137489 - DNA, 122 bp, Homo sapiens
aagctggacccacctgttgggagacaccctggggctcccggccagcccggaacagggaagcgagctccctgcccagcgcagggcccctgcccgggccttcctagaggagcagggcgctttta

SEQ ID NO: 137490 - DNA, 122 bp, Homo sapiens
taacctcaatttccagcaacctgagagttcccactgcacccctcccagatggtggagtcccgccaaagggacattactctaggacccggggcaaaggctcagttgccctgggctctgcctct

SEQ ID NO: 137491 - DNA, 122 bp, Homo sapiens
catttccacgcgtgctgtgctgagatgacaacacaactgtgatgaccacaatcatcacaacgagcgccatttccacgcgtgctgtgcaaagacagcagcacgaacacgatcgtcacaatcgc

SEQ ID NO: 137492 - DNA, 122 bp, Homo sapiens
gccagtgcaccaactaccagagcccggtgtgggtacagacgcccagcaccaaggtggtgtcgccggggcccgagaacaagtacgacccggagaaggacaagaccaacttcaccgtctacatc

SEQ ID NO: 137493 - DNA, 122 bp, Homo sapiens
gagccgcgcgttccgaatgggtgcggatgggggacctggctcatcagggagggattaacgcggctcgggcaatcctgcgctaaagcccgctccccccgccgccagcaacgccgcggagccgc

SEQ ID NO: 137494 - DNA, 122 bp, Homo sapiens
tcacatccccggggtccgggtttccaagtctgggtctccgtgcagccttaggcctccgtgcgctgggcgcacctgggtccggctccagagtctgggtctccgtgcagccttaggcctccttg

SEQ ID NO: 137495 - DNA, 122 bp, Homo sapiens
ctcaattcctggtccaaagggcgccttcagtggcgactgcagacaggtgcggggctccagcgaagggaagctgccatttaaaggcaaagctgggaacgcaggctgtggtgatgactgaagtg

SEQ ID NO: 137496 - DNA, 122 bp, Homo sapiens
tcccatattatactgccacacagataagaggaaaagattagctatgtttgttattgaactcggaacatcttatagcagggtctgtttgtattaattgggatgcttacacacagaaatgagtt

SEQ ID NO: 137497 - DNA, 122 bp, Homo sapiens
tgctgttcagacctggggtggaaccctcagaaggtacgtagccatttgccctccagtggtcggtactttacctgacagagagggtgcagctcctggaaactgtatccagtgctgtcaactct

SEQ ID NO: 137498 - DNA, 122 bp, Homo sapiens
atacataattttgaagctagaagaggttggagaagtgaagtaaatagaccaaggtcacaacgtgttaaaagcagaactagagctaaatcccaggtctatttactcacagcctagtgctcttc

SEQ ID NO: 137499 - DNA, 122 bp, Homo sapiens
caaactggcaagaggctgtgaatgaatgggtagtttaagcactgccccattcagtctcagcgggttctttcagtgaaggctgtttaaccctttaaacaactcagaataaaggtctctaggct

SEQ ID NO: 137500 - DNA, 122 bp, Homo sapiens
tagagaacttctggagctctctgtcctcttctggctttcaggccgtgttgagtccaggcccggggatacgggaagagaatctggaagttcactaccagttgggtggtgcctcaaattctggt

SEQ ID NO: 137501 - DNA, 122 bp, Homo sapiens
ggtctgaaagccagggctcccctccgtgtgtgggagcagagcccaagctgcggaaaccaccgggcgcggggttgtttttggaaggctccgacgccgatcagccaaactgatatcccttatat

SEQ ID NO: 137502 - DNA, 122 bp, Homo sapiens
cccacacagaccggtcagccctgtcacctccagaaccggcctggcaccatggaaagggcacggaaagggctgccaaagccgtcctcgcgcccacgcacgaaaccaccacctccgcagccggg

SEQ ID NO: 137503 - DNA, 122 bp, Homo sapiens
gggtccccacatatgccaggctctctggctccctgggtctctgcagggtggacctatgcccggaggagacccaggggaatccccaggaagcccaggcaggagcagctgaggttgccatggcc

SEQ ID NO: 137504 - DNA, 122 bp, Homo sapiens
ccagctacctcatcatggtagccttggtccctgaacactaatgggtaagccccagagccacgagccagtgacctctgaatggatggcttccccttcccccaggcaccaggcaagacaggtag

SEQ ID NO: 137505 - DNA, 122 bp, Homo sapiens
aacgaatgtgggccagatacatcattttcaggtgttaagggtgagcctggtaaatattgacgggctgctgaagttttttgtggatggaagaaactgctaaagaccagccttgttggtcaaga

SEQ ID NO: 137506 - DNA, 122 bp, Homo sapiens
ggcccctgccaagcccccatggcatccggaatgggcaggtccctgcagaaggaggccctccgcatccacctctgcccaaggccacatcaccttcccagggatgggacagaggtttgagccaa

SEQ ID NO: 137507 - DNA, 122 bp, Homo sapiens
tgcggggctgcggggctgcggggctgcggggccacgggacaggagcgggtgctgcggtcccggcagagcaggggcggggtccgggcgggggcggagccgagcgcccgcgcacccggagccgc

SEQ ID NO: 137508 - DNA, 122 bp, Homo sapiens
ctttgctcctatcctaccctcgtgaataatttaagcacaatcactgtttttctagctgtccgcattgacccaccgcgacctcgaagcaggtcccaggcgtgtgcatttatatgcagagtgac

SEQ ID NO: 137509 - DNA, 122 bp, Homo sapiens
gtcgccaacatccctgcgtaggggtttgtatcgcagcgcgcttccagacatcaacggctgcgcggcccacgcgcgcgcatgcgtcctgaccaggggaaccttttcttggggacccggaggcg

SEQ ID NO: 137510 - DNA, 122 bp, Homo sapiens
ctgcttattaatgtcagcaaggcctcctggaggaggaagtgttttcgagggtgcagactgcgggaaatgggacaataggagacaagattaggtcatggggagcctgcagtgccctgctcagg

SEQ ID NO: 137511 - DNA, 122 bp, Homo sapiens
ttgatttgcatttgcgcccacccccaggtccttggcttggtgatttagccttggcaatgccgtgctggctggaaacacttgggcatagggcccagaaattctgttttcttttccacagaatt

SEQ ID NO: 137512 - DNA, 122 bp, Homo sapiens
gtggcgcaggtgcaggactgtgggaagacaggagcgccagggaatgtctggccagcagcgcgctgccctcaaggggcctccttgaaggccccttgaagagggcaacacaactaatgacgata

SEQ ID NO: 137513 - DNA, 122 bp, Homo sapiens
atacgcggccccaccgccccccaggcctgggttccgaggcggcggtggaggtggtggtggcggtggcggcggcagcacctagaagccgcccctgcgtttccctacagctcacgtgggcccga

SEQ ID NO: 137514 - DNA, 122 bp, Homo sapiens
cagggacagcaacactgtgctgaagagtgagaaacacgatggatgcttctgctgttccctcgaacacaagccccagcaggaagaacatccccacgcaggagacgatgtccgcatgattctgc

SEQ ID NO: 137515 - DNA, 122 bp, Homo sapiens
cctcgggtggttctcggcgcgccgcgctgcctccttggaagtgtagtcctcaagttgcagcggccaagagtgagacccgccttgaggactactatgtatcccacagacctcgcggggccgcg

SEQ ID NO: 137516 - DNA, 122 bp, Homo sapiens
caaactcctgacctcagatgatccacctgcctcggcctcccaaagtgctgggattacaggcgtaagccgccgtgccaagcaagtttaccaatcttaatgaaagtccctgttttaaagtgtag

SEQ ID NO: 137517 - DNA, 122 bp, Homo sapiens
ctctgatttgaattaaggtccttcacacagttcgctcccaggcctgttgtgtgcagttaccggcttgaagttggaacatgactggttgtttgcatgtcctcaggtttcccggggctgctgaa

SEQ ID NO: 137518 - DNA, 122 bp, Homo sapiens
gtatcagagcagctaccttctccgaattcagtcctgttgggagaccaaacaggattttaacgcaaaaagagggggaaagggctgatctggggctcccgcgtcccgaatctaacttcgtaagc

SEQ ID NO: 137519 - DNA, 122 bp, Homo sapiens
gggggcagcaagcaagagggagtcccagggtggatcatccatactggcttccaggggtgacgggaaaggatgccagcaaggacttcagcaaggatcaatcagcaaatccgagggtgtctctc

SEQ ID NO: 137520 - DNA, 122 bp, Homo sapiens
ggcatctgctctcccccgcccgtagcatagcccccatgctggtggtcctgggcccccgaacgaggaaaacagctccttcacctgattctaactccatgcctggcactctcagcagcatgagg

SEQ ID NO: 137521 - DNA, 122 bp, Homo sapiens
acaggaccagcctgcactgggtggaggaggggctagagcagagaaccagaaggtccagcccggccgatcatgagctctgtgagcccaggtcgtggcgtcttccagcacctccagccttgctc

SEQ ID NO: 137522 - DNA, 122 bp, Homo sapiens
ttttaagaagttgttagaaatgaatcgtggagtcctaggagaagctttgtttaacctccccgcattttcccagcacaaccccctaaagcaaatgaggaagagtttccctcttatcttcctgt

SEQ ID NO: 137523 - DNA, 122 bp, Homo sapiens
gcccctctaaaccccttgcagggtgtgagcaacccaaaggcagaaccaggatcttctgtgcgctacccactcccaagaaggaagctctggtcctaggttctcggcaacagcagaatactgat

SEQ ID NO: 137524 - DNA, 122 bp, Homo sapiens
aaagacagcaaaccctgccctcgccctggggaagtggcgccttcaggcttctagaagaaccgagatgagcttgtgggtctactatctaatcgccttttctacttgtaggctgccaaggcccg

SEQ ID NO: 137525 - DNA, 122 bp, Homo sapiens
gttaaaagtatcaaagagatagagctaagtgctctggcccagagctaagaccctctgggccgcccagaggctctggagagcttaggaatagcaaacccaattgcccaggagctaaagggact

SEQ ID NO: 137526 - DNA, 122 bp, Homo sapiens
cgaggcagaggcagcggcggcagggatcgccgggcggggagaagtactcctggtggcgggcgtgggccgcgccgggccgtgggcagccggcgggggctggggcggctgcggcgagacagcgc

SEQ ID NO: 137527 - DNA, 122 bp, Homo sapiens
tcacactcatttttgttcccacttgagaaggcttctttccctagagaatgctgcttctcccggcctagccagggccaggcaccagtgaggatagagcgcagcctggctgccttgccttgaca

SEQ ID NO: 137528 - DNA, 122 bp, Homo sapiens
cgccccctccccgcgcactaaaataaccccctgctgccggcccagcgcgcggctcactagcgttcctgcggctcctggcgcactggccgggcccccagccgcctccagcctggagccgccat

SEQ ID NO: 137529 - DNA, 122 bp, Homo sapiens
caacagtagtaacactttttgaccactatgtgctgtataagcactattctaaggactttacgcgtatcagctcattttaacccttaaaaccattcgtgaggtaagtactgtaattatcccca

SEQ ID NO: 137530 - DNA, 122 bp, Homo sapiens
cctcattaacaatttagtaatgccctcctttgcccagagaaactcagcacacatcttcagcggaagggaaaacttggtgaaaactggcacagagtgaaactgtgtaagcatgttcctggctg

SEQ ID NO: 137531 - DNA, 122 bp, Homo sapiens
ctgcctgcaggcccggctgggaggctcagctggccccggggaccgcctgccgtgtcggcccgctaacctgcctgcagggcccgccagcctgagctgctcgctgtcctgcctgcagggcccgc

SEQ ID NO: 137532 - DNA, 122 bp, Homo sapiens
ggttctctacgccatcttcttgtgcttctccataatgatagagtttaacgtctttaccttcgtcaacttgccgatgtgccgggaagacgattagcgctgagtcgcggcccctgggagctgat

SEQ ID NO: 137533 - DNA, 122 bp, Homo sapiens
ccctagcgctgcccggggccaggctcgcgctagcgccgcccgccggagaggagggccaaccgccgctgccccgccaggatcccccgctccactgaggggaatgaatgcagaccgctgcagcc

SEQ ID NO: 137534 - DNA, 122 bp, Homo sapiens
tgtccccacctcctatgttagtggtgcccttactgccgtcgctcatccactcgtgtgggacgtaggattgcacagggctgtgccagtggcgtgtagggaacactgccctggctcagcgtgcg

SEQ ID NO: 137535 - DNA, 122 bp, Homo sapiens
tttttcagcagagagaatgtaaatggcagacacgatggagcctggcgagccatggggccacgtggagatagggggagaggagagtgggcttgactttgaagacagcgttcttacatggctct

SEQ ID NO: 137536 - DNA, 122 bp, Homo sapiens
caatgaagtggcaataggtaaattagactccacattgtatttttccccacaaaatgttcacgtttataactttctcactgcctatgttcagtctttcgggcagcctgagaatcacatgtaat

SEQ ID NO: 137537 - DNA, 122 bp, Homo sapiens
gggctgggggtgtgaggtgttgatcattgcttcttactgataagcagaatatttccagagcgtgaagacttctgtggtgtgtggagaggataactgtaatctgcacccgcacgccaagcgct

SEQ ID NO: 137538 - DNA, 122 bp, Homo sapiens
ggatcttctggttaggatttccctgtcacttaggagctccctggctgtggatctgtcccccgtgtgactgccttaggctcgaggcaggaagagcagcacagatactcctggcaccgagggct

SEQ ID NO: 137539 - DNA, 122 bp, Homo sapiens
ggggagccacggagttgcagctgacgcggtgccagatgcgtttgtgcatccacaggacctcggggtagtaggtcttgtggctgcagtaaggacacgggtgaacgactaaagccgcctgcagg

SEQ ID NO: 137540 - DNA, 122 bp, Homo sapiens
ggctccccggtccgcgggcaggcgggcggcgggctgcgcgccgggcctccgccttccgcccggaacccacccccgggagggcacgctggggcccacactcacacgcgcacaaaaaggcggca

SEQ ID NO: 137541 - DNA, 122 bp, Homo sapiens
aagtgctgagtatccatcgtgtgctaggccccgggatatcaaggaattaggagatgccctcgggagatccaggtgtagctggggaaggaaacagataaagaagttcagcgggatgtgggaat

SEQ ID NO: 137542 - DNA, 122 bp, Homo sapiens
caaaaacatgtttgttccttacaaaattctcaaagccactctttaaggtaagtaatagtacgttctacttaacagatgaaaaaactaagaatcagactgatacaacttcctcaacatcatag

SEQ ID NO: 137543 - DNA, 122 bp, Homo sapiens
ttctattgctggaagctagactgatcactggggatggcagaggatgcattttgccaagttcgtaactcacccaaaacccctgggttcagcatttccacctgaacaggaaactttcaatgttt

SEQ ID NO: 137544 - DNA, 122 bp, Homo sapiens
accgggagctggggggacactcactgagggcaccgggagctggggggacactcactgtgacgggcaccgggagctggggggacactcaccacgggcaccgggagctggggggacactcacca

SEQ ID NO: 137545 - DNA, 122 bp, Homo sapiens
acttattgtcagccaagtggggcagagtttctccactgtacctctattgaaatctagtgccggataattctttgttgagggaggaagtcctgtctattgcaggatgtttagcagcatctccg

SEQ ID NO: 137546 - DNA, 122 bp, Homo sapiens
ttaaaatgcattttgaaattaagctgcctgtatatcattccccactgtcaaattccatttcgtttctatggaaaacatgtgtcatagtcattctggctacttctttagaaagggcataggtt

SEQ ID NO: 137547 - DNA, 122 bp, Homo sapiens
agtccattttctggacacgtgaaaaacatagggacccattcatagttaaaaggaaccgtgcggggcatttgcctaccttggagaaactgctcatcctccacaaacagtgaacttgatggcac

SEQ ID NO: 137548 - DNA, 122 bp, Homo sapiens
atgacaaaaaagaaagaggtttctcctcaatctaacggagccattaacatctattaataacgccgacagggtaagtaacggagccgcgctcctcggggtggtcaccgggctgcgtggtcctc

SEQ ID NO: 137549 - DNA, 122 bp, Homo sapiens
ttcacactcaacacagaacactctcttgaccaggtgtccaagcagttctccagcagactccgtctggatgtcctataattcaattcaatcagacactgtcaacctggagtcatagatcccac

SEQ ID NO: 137550 - DNA, 122 bp, Homo sapiens
ggaggcctctctgcaccagcccctgtactacctgctcagcctcctctccctgctggacatcgtgctctgcctcactgtcatccccaaggtcctgaccatcttctggtttgacctcaggccca

SEQ ID NO: 137551 - DNA, 122 bp, Homo sapiens
cgctggcggcggccgtggtggcggaggcgacggtggagacggctgccctagtgggagaggcggcggcggcggcggccgaggaggaggagggggaagcggcggcggcaaagggtaagcggaca

SEQ ID NO: 137552 - DNA, 122 bp, Homo sapiens
ctgggctgggcgactgagatgggggactgctcttctccgagtgagctggctgagtgtgaccgtgagtcacgcccctgcttccctggagcctgtcccttgcctcacaggcctggctgaggtgg

SEQ ID NO: 137553 - DNA, 122 bp, Homo sapiens
gtgttccgggcccccggcactccacctgggcagccggtcacccattcctctgtgaggtgccgggcagggtgctggctagacactgcccatgcaacccggtgcgccttgtccaccctgtccgc

SEQ ID NO: 137554 - DNA, 122 bp, Homo sapiens
gggcggggggcgtggtgggcggcacctcccccttgctgagcctcagaacccactccttcccgctgcctgcgctcagacccccggcatcctggcccctgcccagcgcccagagcccccggtgg

SEQ ID NO: 137555 - DNA, 122 bp, Homo sapiens
ataataagggcatttctgtgggctgtttctagtcaactcggtgtgtgcccatgcatatgccggaatacatagtaataaaaagctggttaaatgctggtcctttgcaatactggctatttcca

SEQ ID NO: 137556 - DNA, 122 bp, Homo sapiens
aatactatctaatgttgatcaacatattgtgaatgaacagtctcacatacttgtatgttacgacagtatgaaaaaggtacataaattttatgtgtagacacctgtcacacctgtaaattcca

SEQ ID NO: 137557 - DNA, 122 bp, Homo sapiens
gtcacagcctgtaagtgaatggaggacacaaaaataaccagagaggcaggctctgccctccgggagtgcacaggcggtttttaaaatgtgtgcgttcatgtaattaaacgtctccgtttgtt

SEQ ID NO: 137558 - DNA, 122 bp, Homo sapiens
aaattgattcactcttgccaaagcctgcggcccccacaagaatgctgtaaagcttcctcccgctgcttccagacaggcagcagcatcaggtcccccactcctcccattcctggctacagaga

SEQ ID NO: 137559 - DNA, 122 bp, Homo sapiens
cagcttggccaacatggcaaaaccctgtctttactaaaactacaaaaattagccagtcgtcgtggtgcatgtctgtagtcccagctacttgggaggctgaggcacaagaatctcttgaaccc

SEQ ID NO: 137560 - DNA, 122 bp, Homo sapiens
gggcctggcacgaagtcggcatctctaagtgctgttatttaaaacagcaatctggttgcacgacaactgaacatacctaacaccacctaatcttacccttaaaaatggtgaagatggtacat

SEQ ID NO: 137561 - DNA, 122 bp, Homo sapiens
agtgaaggcgcggaggctcaggctcgctgccagagtcccacggagcaaccagagccttcacgtgggcacgaggcccggggagtggggtgcagggtgcgccaggccggtgccctctgtgcggg

SEQ ID NO: 137562 - DNA, 122 bp, Homo sapiens
ttcccttcttgacatcagcccatccctggcaggacgcagagccaccagagccagagccaccggcccgagcagaacgatcatgtcctagttattctcctgagcagattcaatcattttggtca

SEQ ID NO: 137563 - DNA, 122 bp, Homo sapiens
tgaagctcatgctgcatctcaaaaacggcctcacccaaaagaaagaggagaggctgttcgcgcgaggctgttcatcgtggcacgtctgtgacaggaaaagcctggaaacaagcccaagccag

SEQ ID NO: 137564 - DNA, 122 bp, Homo sapiens
ctcttcccaccacctagatcatagcttgaactgaagccaaggacagagtgctgcccccttcggcatttactgatgtgccctctttaaatcatgatgttatctaacccaaacccagacccagg

SEQ ID NO: 137565 - DNA, 122 bp, Homo sapiens
agtgattctgatgcaggagtctgcagaccaccctttgagaaattgctagtctaggctgggcgcgttggctcacgcctgtaatcccaacactttgggaggacgaggcaggcggatcacctgcg

SEQ ID NO: 137566 - DNA, 122 bp, Homo sapiens
ggaagcccgactatgctttgagctctgtgggtaagacccggagacactggaagacagagacgcagacaggaaagaggccaagacactgacacagacagacccatgcacctgaccggccgaag

SEQ ID NO: 137567 - DNA, 122 bp, Homo sapiens
tgaacttcttcagttccacagcctcgagttcttccaagtaggtggacaggcgacagaggccgtccctgcctgcggttcgtagcatgggggtgccgtgagccccaaaggagaggacctggagg

SEQ ID NO: 137568 - DNA, 122 bp, Homo sapiens
ttgcatgctagaagataacttttttgaggatttctctgcagactgcctgccacccggagacgagggaactccagagtctagttgggaagacttggatttgcgagcggacagcagggaatgtt

SEQ ID NO: 137569 - DNA, 122 bp, Homo sapiens
acaccagtgcagtgggcattggacacaagaccacaatgctcaccatggctgatgctggcacgagatagtggttgctgatgcaggcatcgctacctctgcacttgggaacttgccagtactcc

SEQ ID NO: 137570 - DNA, 122 bp, Homo sapiens
aagcaagaggaacgtgcctgggaggacccgagacaggtgcgggtgggtttccgcagtagccgctgatcccgagtgcatgcggcgtgttcccgggtcgggaccgcggccaagggaggcttccc

SEQ ID NO: 137571 - DNA, 122 bp, Homo sapiens
gaggagggtgcttaggcactgcagttgagtggctcacaaggagctaaaatttcactaatgcgtattcagtgggtggttctggtttgcctgatttttgcctctgggcatggctgtttcagcct

SEQ ID NO: 137572 - DNA, 122 bp, Homo sapiens
aagctacatcattaatgagcattagggagtgtaaacaatattgaatttgattaatttcttcggaaaaatgtctggttccactgtttatctggaagttaccagtttgtaagtcttcagtgttt

SEQ ID NO: 137573 - DNA, 122 bp, Homo sapiens
attctggacatccgggagatacattcgggggaaagaggacgagttcagttttgcagatggcgtattctggacatccgggagatacattcgggagaaagaggacgagttcagttttgcagatg

SEQ ID NO: 137574 - DNA, 122 bp, Homo sapiens
ctctgtgctccgtggaggcctccgtgtgccctcgttgccgtggggacccagctccatgcacgtcaacccagtcccgcccagactagtggacagacctggtgtcaccagtttttcctagcatc

SEQ ID NO: 137575 - DNA, 122 bp, Homo sapiens
tgctctatagtgacagtattagtgacaggtaaaacagaaagaccaatttacagatgtgcacgctagaggacattataaaaaagagtgccacagcatacctaggttgtttgaagggcagtagg

SEQ ID NO: 137576 - DNA, 122 bp, Homo sapiens
gtaatttacaaggctgttctgaagctcaaatgaagggaactccctaggaggggggtggatcgttaaaagccttgtgtgggcttgtgaaaattcagtgtcatttggcaaggttgttttatatc

SEQ ID NO: 137577 - DNA, 122 bp, Homo sapiens
ttaaactttggaaacttgtagcctgtaatttgtttctgaatgtacagagcataatggcagcgtctgaggttgctggtgttgtggccaatgcccccagtcctccggaatcttctagtttatgt

SEQ ID NO: 137578 - DNA, 122 bp, Homo sapiens
ttttcctcgccccagcctcttggagcgccctgcatgctgtgggcgtctaataaatgcagtcggccctgcttggtctaaaactctcccttgagtggaccggacactaaacccctccaggggtc

SEQ ID NO: 137579 - DNA, 122 bp, Homo sapiens
ccatggcttgccctgccttagaaagagctcgcgtgtgttcctctgtacctctgtgcactccgtgcaagtagagatactccagataacccacacagtcctcttctcccacggccaggaaagca

SEQ ID NO: 137580 - DNA, 122 bp, Homo sapiens
acagattgtgactggagattagtaaaacacacaaatctgattttccccaggaagagcatccgtcatcaaaggctcttcagagaccaggggtcataagacttacttataaaatgaccgataac

SEQ ID NO: 137581 - DNA, 122 bp, Homo sapiens
ataggccagagccacagacacctgcgcctgctgagcttggcacggttggggatgggggggcggaacttaacctgggagagatggaagtgccttggaatttgtggggtataacgcgagtagtg

SEQ ID NO: 137582 - DNA, 122 bp, Homo sapiens
ggtgcagcgcgaccaatcagacggcgcggctcttttcggccaaccactgcagggtcgcgccggcctatcagagcgtccttgtcaaactgaacgaggaaagaagcctcagcagcgccaactaa

SEQ ID NO: 137583 - DNA, 122 bp, Homo sapiens
gcgctgcggacggggtggggcggcccaatggcccccctggggttactctgctccccttcacgcttccctcccggccccgccccgcgattggccggcgcgccccggggctgccgccgattggt

SEQ ID NO: 137584 - DNA, 122 bp, Homo sapiens
accagctgtaatttgagagcagagagatcctcaggatatctttagccaaaggaaaagctccgcattcccacccagtccagaaattgaaatactatcagggggcaagagcctttctctccagc

SEQ ID NO: 137585 - DNA, 122 bp, Homo sapiens
tgggtgacagagcaagactccgtctcaaaaacaaaacaaaacaaatcagtacttccatctcgaaatgatttcaggttgactatctgggatgttttgactgaagctcacaagagcggtctata

SEQ ID NO: 137586 - DNA, 122 bp, Homo sapiens
cctagttcataggtggtacattcttgctgtgtcctcacatgatggaagaactaactagctcgctgcggcctcttttataaaggcactaatcccattcaggagagttccccttcatgacctaa

SEQ ID NO: 137587 - DNA, 122 bp, Homo sapiens
ggccactgctttcttacgccccagaccgagtacacatgtttcccatctggactggtcacccgaccatcatctctcacctggacttgagattgtgctcggatcccccagtggcttcctcgcat

SEQ ID NO: 137588 - DNA, 122 bp, Homo sapiens
gccagcacatggtaagctctcagatgtggctggtactattactatttcctgaagctggaccgccctccctccctactgccacactcaagtccagctctgttccttctctctggaccacttct

SEQ ID NO: 137589 - DNA, 122 bp, Homo sapiens
atgaagacgggtgtccagaggcagggactggcgtctgcaggagggcagctgtaggaagagcgctgagcttgtggggtcagcactgactctgggtagtgtcattagtgagttgctggacaccc

SEQ ID NO: 137590 - DNA, 122 bp, Homo sapiens
tcggtacctactcttggatggagacatcctatgaaaacccctattttcactcttaaatgacggtatttcctttctgtttccccacagtgcctcagctgcactggacgttgctgccaagcttc

SEQ ID NO: 137591 - DNA, 122 bp, Homo sapiens
acaggaagcctacgggttgggagtggcctccgtgcttttgggtaagtactcccaaggctacgcccttgtttacattgacgaaaagatggaatggctgcttagggagggtaaagctaggacag

SEQ ID NO: 137592 - DNA, 122 bp, Homo sapiens
agcacctgacctcacacttacttagcaagctccacccatctgaggacatcaggagggaggcgggccttcccacggactcgcttggcaggcagctcagcaggcagcaggcggagcagagcctc

SEQ ID NO: 137593 - DNA, 122 bp, Homo sapiens
cagccaacggctcgggcggcgacgaggggcccgaccccgacctcatctgccgcaaccggacggctaccaacatgatgtacttgctgctcattggggcccaggtgctcctgggcatcggtgct

SEQ ID NO: 137594 - DNA, 122 bp, Homo sapiens
caggtagaaccgcatgagaggcagatccacggtactggatggaaggcccagtgtggccggcgtggcgggacgcggagcctggagcccctgcctggggtgttgccggccctacgagcgatggc

SEQ ID NO: 137595 - DNA, 122 bp, Homo sapiens
gggctatcggaaggaggacttcctgggcccataggtgaagccttctggaggagaaggtgacgtggcccagcgtccaagggacagactcagctccaggctgcttggcagcccagcctggagga

SEQ ID NO: 137596 - DNA, 122 bp, Homo sapiens
cttctgcgcgcggggggcggggggggtggggtggtccattagggtcccctggcgagggggcggctttctagtgtgtgagggcgacgccctagaagctccccttcaaagttggccccacgcgc

SEQ ID NO: 137597 - DNA, 122 bp, Homo sapiens
gtttaatcaaacgggttaaactttagtggtgtctttattaccgcattatgctctcctgggcggcagcctggaggtgggaggaggggacacaaaacgctactgcactttacctcccctcttgc

SEQ ID NO: 137598 - DNA, 122 bp, Homo sapiens
atgaataagccacagcaccggcagccaggacaggatcctgctgaggactcagaccaggggcgccgcctcttgctcgcagcgcaggggaacgagcctcacctttgaccttgtctcagcagcgc

SEQ ID NO: 137599 - DNA, 122 bp, Homo sapiens
attttaagtagtatagtggaagttctggtctgtgggccgtctttaatccagcagagaaagcgttgtggctttgctctgtctgccacatggagaaatgcagtaaccagctgcagctgacccag

SEQ ID NO: 137600 - DNA, 122 bp, Homo sapiens
ccttggcctctcaaagtgctgggattataggcgtgacatgcctggccgacgtatcttcaacgttccaaaaagttcagtggaaaatatcaattttcttgcttatagtctggccgttcaggcaa

SEQ ID NO: 137601 - DNA, 122 bp, Homo sapiens
agagggggacacattgactcaactgatttcctgggagttgcttcaggagcccaggtggaccgctcacctcctcctccctagccatctctgctcctccacccaagcaaggctggtattgtgta

SEQ ID NO: 137602 - DNA, 122 bp, Homo sapiens
ctccccggcggaagcccagctctccatcctcctggggatcaaagtcaaagagggcctggacgtatgtcggctgctgcaaaacaggagcaggaaaaacccacattgcattcctggtctgtgac

SEQ ID NO: 137603 - DNA, 122 bp, Homo sapiens
tccctggcagcccctgaccttccgctcagaagcaaagctggaacagcccagcagggtggccgccagatgaggaacctggcactgagactggtccaggccacacaaccagaagaagagctgga

SEQ ID NO: 137604 - DNA, 122 bp, Homo sapiens
tccataaatgcggctgctttaaagggaatgtaaaaagggctgtaaattggtattgattgccggtggtcttgaagaaccccaactgaggattgaccgttccttggagtgaaggctccgcattc

SEQ ID NO: 137605 - DNA, 122 bp, Homo sapiens
aggctaaaggctgaaaagagatttgctactgaacctctcttaagtctccctgcatcgcctcgtacataatacaagtgaggtgtactggggactgcggtaactttcttgcctctgtcaccccg

SEQ ID NO: 137606 - DNA, 122 bp, Homo sapiens
gcgcgcgcacacacacaaatgcacacccgaaactcttgtgaaatgtctgggggtctcctgcgttagaggacggacgagccccggcggcccctctgtcggaaaggcaactcacacgcgcgccc

SEQ ID NO: 137607 - DNA, 122 bp, Homo sapiens
actccaggagtagagaagacagcccttgagatggggatcagtggaggaagatattttctgcgaaggatatggtcaaggtcatgagctaatatgggcccagaggtttttaaagggcttttaaa

SEQ ID NO: 137608 - DNA, 122 bp, Homo sapiens
acaaggaagggctgcagggccagcgagccccgggagggcagggcctgcacctccgagaagcgggtaccctcccagcgcaggatcttggagtcgccaatgtagcggctgaggcacaggtagct

SEQ ID NO: 137609 - DNA, 122 bp, Homo sapiens
gtattccgcacgtcccctccgcgctgtgtgtctactgagacggggaggcgtgacagggcccgggtcccttctcagtggtgctctgtgcttcagggcaagctccccgtctccgggcgcacttc

SEQ ID NO: 137610 - DNA, 122 bp, Homo sapiens
cctgggggccgctcctgcaagccggggcgctgggttacatcacggttccctggagactcccgccccagcggccgggtccctgaggcccgcgcccgcccgccgcctgtgtccgagaagcagag

SEQ ID NO: 137611 - DNA, 122 bp, Homo sapiens
tttccccgggtccgtctttggatccctctttctttgtctctcccaggtcggagtggctggcgctgtcggccggccggggaggtcggcgcgggtggctggagacacacagccacaattacgaa

SEQ ID NO: 137612 - DNA, 122 bp, Homo sapiens
cactgcatggggagaataggcaggatctgctgcctattattatgtctatctcagaataagcgacggatttatttttgcaacactgtatgtttgggtgtcttgaaatctgatgactaaatgta

SEQ ID NO: 137613 - DNA, 122 bp, Homo sapiens
actgagctagccgggcggctatgaggaaaatggtttcccacacctctgttggagctctcccgaacttccctattctatataaaattggtggggatgagtcctggatccgagacatgagacat

SEQ ID NO: 137614 - DNA, 122 bp, Homo sapiens
aggcggggtcacttggaaaaacgcctccctggggccggatggccgtggagtcatggttcccggagtctggctggggcaggacgttgtctccagcccacccaggcgtggagcggaggcgtcct

SEQ ID NO: 137615 - DNA, 122 bp, Homo sapiens
tccaactcctttcatgagactagctcagtaaacagcctggcccttagtttcacctcctgccgagatcaaacccaccagcttggctgtcttctgggggaggctggcactgcgaagagcctatt

SEQ ID NO: 137616 - DNA, 122 bp, Homo sapiens
tctgtaattcctttttgaacatgccttcgaagtggaggtctttggccatgagctcttcttcgacatcatctagtgcccactggtgatccgtcagctccaaagcttcccactctgtctgtaat

SEQ ID NO: 137617 - DNA, 122 bp, Homo sapiens
cttggcaccttcctcagatcatacaagaatgtggacaagttaaaatatgaaacacgttgtcgtgggtctgcatcctgcttctcccaaacaagggaggcatgggctttttgccccactggctg

SEQ ID NO: 137618 - DNA, 122 bp, Homo sapiens
tgtgtccagagtaagaaaaggctagggttgcgcttccctcccaagttgactaggggtgggcgcgagtaaaatcatgacatattcgaattccagtggacattagatattctttgagagacggc

SEQ ID NO: 137619 - DNA, 122 bp, Homo sapiens
tgtgtgaatggagcccctcccccaacacgggcccctgcacttacctccgctcatgacccacgcaccacgcctgccacccacagccggccttccacaccggcaccgtgtggcttaaggcctgc

SEQ ID NO: 137620 - DNA, 122 bp, Homo sapiens
gcctgctccaaagacaaataaacggggcagtgagtgctgcggcgcagtcccgggcgcaggcggggcgcggcggggcctggagcggcgcgcgcagcggacggaggcgcacaaaactcagccct

SEQ ID NO: 137621 - DNA, 122 bp, Homo sapiens
gatgatcgcagccagggtggccgagcgcccggcccactgcacccggcggctgttttgcagcgcccctggcattcagggaatggtttgcaaatctcaatgcaccacagactagttttcaccgt

SEQ ID NO: 137622 - DNA, 122 bp, Homo sapiens
ctcaaaggtcggggactgggcacaacgaggcattgaccccagatgaatccacagagctcccggagcaggggaagtagcccttgttcacccacatgcacacacacacgcgcgcacacacgcac

SEQ ID NO: 137623 - DNA, 122 bp, Homo sapiens
cgtcgcattcccatggctgcgagatgccgcagggtcaccgagagggcaaacgaggcaaagcgctgtcacctccgcagagctgacccagccgcccttcctcccgcccgtcctgcaggtggctc

SEQ ID NO: 137624 - DNA, 122 bp, Homo sapiens
tcagatcaagtatttccctcatgcccattattctttgtttagacttgggataatgctcagcggggatcatacagttctgattgccccagaggctttctatctgtttacattggaaggtgaac

SEQ ID NO: 137625 - DNA, 122 bp, Homo sapiens
cccgggggagcggcgggcgaggtctcctggtgggctgatgggcaggcgcgtcgacgggagcgctgcgggggctcaggcgtccgggtggctccggggggctccaggcgggggcgccatgggcg

SEQ ID NO: 137626 - DNA, 122 bp, Homo sapiens
cctctgctgtagcactggagtggttctttttcttcaaggtctttgctttcttgccttggccgttcctgtggtgatctcgtcgtggtcgtgatcattggatgcatcctctcgattctcatcgt

SEQ ID NO: 137627 - DNA, 122 bp, Homo sapiens
tttatcaggagcctttcatctctccaaaagtccaagttgttttcctggtacagagattcgcgcgcgtgtgtgtgtgtgtgtttgttttctaggcatacagttgtatgtttaattcaaaactt

SEQ ID NO: 137628 - DNA, 122 bp, Homo sapiens
ttgaagggaggtcagagacttgggtttgggagtcagctttcttctccagtctgggggaggcgcctggacgcttcagcggtctcctctgtacgtggacaatcccgccgcgctcttccctgtga

SEQ ID NO: 137629 - DNA, 122 bp, Homo sapiens
cattttcttttcttatttttgagacagggtctcactttgtcacccaagctagagtgcggtcgcatgatgatgactcactacagccttgaactcctgagctcaagctgtcctccttccttagc

SEQ ID NO: 137630 - DNA, 122 bp, Homo sapiens
cagcgttccgtatcgttttgttcccttcattccactagagcggctccaagtcatgacaaccggtggggataattgacgtaaaagtgctcaaccccgagtggccgagcttcccccagacaatt

SEQ ID NO: 137631 - DNA, 122 bp, Homo sapiens
ctccctgactggccggttagcaccctttggccctttggggcctgacctcagcctggacctcggcccgtccacaccgcacggggtgcctacggtcccccacagaggcctcaacacacactgcc

SEQ ID NO: 137632 - DNA, 122 bp, Homo sapiens
caggctcccaggcttggggcccggtggaagtccatctgacaaccccacccaggccagggtcgaatctggaatgggagggtctggcttcagctatcagggcaccctccccagggattggaaac

SEQ ID NO: 137633 - DNA, 122 bp, Homo sapiens
gtatttgatttacatagggcataggggatcggtttgaccaggtgtcccatttacatagcccgcgaatcttttattatgtaaatggagtttccagcccagcgaacaaccgcatacattgctac

SEQ ID NO: 137634 - DNA, 122 bp, Homo sapiens
actgtagcagaggtcgacgaaaacgagtacctgagtgtgcgccagatcctgctgcacctacggaacgagtatgccaccttgcgtgatgtaatccttaaaaacattgagaagatcaagatccc

SEQ ID NO: 137635 - DNA, 122 bp, Homo sapiens
ggtcagggaatctgagtccccgggaggctggggacagagctgaagcccaggttcagatggcggccatggaaggcggagagccgtcagcgaggcagcgccggggctgcgggagcttgcgggag

SEQ ID NO: 137636 - DNA, 122 bp, Homo sapiens
cgcctccatcccctgccgcgtagcccacgcatccaacctcttgagggaaaggcgggagggcggtgtctcccaaaagagctcccacctcttgtgttggcactgcacattgatgccattcttag

SEQ ID NO: 137637 - DNA, 122 bp, Homo sapiens
ggcgcccagggccgggagtgttggacccctaggcccaagtcactagggctccccgagagccgagggccaggctccccgcaccctgcccgccgccccggggacggcccggccaggcggccccg

SEQ ID NO: 137638 - DNA, 122 bp, Homo sapiens
gttagaggctgggtccatgcgtctgcgaatggggaacagtgccttcaggaagtcatagcccggatcagagagcaaggcagacaccacggctatgatgctggccatggtccagagagctgaaa

SEQ ID NO: 137639 - DNA, 122 bp, Homo sapiens
gaggctgcagctcccgggggccccttctcccctggaaaaggcctctcggcgggtcctggccgtggtgctagaagatgtcatggctgttcacatggtgagccccctgaaccaagagactctct

SEQ ID NO: 137640 - DNA, 122 bp, Homo sapiens
ctgaccccagagagcagctccagctcgcaggaagcccaacgggggtgtaggccttgtctccgcttaagatccaggaggagaccctgaaaagaaaataaacccaagtccacccctctcgggat

SEQ ID NO: 137641 - DNA, 122 bp, Homo sapiens
gaattattaaatactcaacatggcgctgcactacgttattttaatttaaaaaaaaaaacgcgtaccaaacaacgaagctcctgcccttgggagtttatacacaggctatgttaatatttgca

SEQ ID NO: 137642 - DNA, 122 bp, Homo sapiens
gctgggaagtggagtgggaggctggaccaatttgcctggaagccaggtttgcaaagcaggcgcaccgattctcctgggctcctatgttattaagggatgccctctgcaccccactaaagcca

SEQ ID NO: 137643 - DNA, 122 bp, Homo sapiens
gatcataggtctggacactccatccttgccaaacctctacccaaaagtggccttaagcaccggaatgccaattaactagagaccctccagcccccaaggggaggatttgggcagaacctgag

SEQ ID NO: 137644 - DNA, 122 bp, Homo sapiens
gagccgggctagatatacctgcagccccctttggttcgcggagtgcggaccgcgtggggacgagaactctagccagagtctcctccgcctcattcaggggtacctgcacttccgccagcacc

SEQ ID NO: 137645 - DNA, 122 bp, Homo sapiens
gaagaactacaagggcaactccatcaaagagagcatccggcgcggccacgacgacctgggcgaccactacctggactgtggggacctcagcaacgccctcaagtgctattcccgggcccggg

SEQ ID NO: 137646 - DNA, 122 bp, Homo sapiens
atcaccgcagctcctgtgctgggtagactttctctcctctgcagcctggcttccagctcccgccacgtgtactgctgacattctctccagtgttcccagggacttcacagcctttggccctg

SEQ ID NO: 137647 - DNA, 122 bp, Homo sapiens
gccactccaagactggccctttaaactggagaccatgatgtcaccatagacagcaagggacgggagggggactgcaggcctgaggatggactgcatctcccagcaggcttgggtgcaccaca

SEQ ID NO: 137648 - DNA, 122 bp, Homo sapiens
ctcccctcctcccccaccatgtcccatgtcaggatcagttcgaggtgctcgagcgccacacgcagtgggggctggacctgttggacagatatgtaaagttcgtgaaagaacgcaccgaagtg

SEQ ID NO: 137649 - DNA, 122 bp, Homo sapiens
aaaaaaagaatgacggcgggggtgttcttttccccctctgcgggcctttaagcttcgcggcgttgtgttgctgttctgctgcgagctgcggtctaactaatcgaggcgcttagaacccggag

SEQ ID NO: 137650 - DNA, 122 bp, Homo sapiens
gcactgtgcccgccagcaggggcgggtgggggcccctctctcctgggtgtggagtgttggcgcagactcggcctggcttctgggggggggggtctgggatggggccaggagggtgaggcgct

SEQ ID NO: 137651 - DNA, 122 bp, Homo sapiens
gacctgtcctgggagatgagggttccacgtgtgtcttgttcctgccccagagagtgaagacgagtacagcgatgacgatgacatgagctggaaggtgcgccgggcagctgccaagtgcatcg

SEQ ID NO: 137652 - DNA, 122 bp, Homo sapiens
tacttgtaaaatttagcaggacattgaacatttacagatactttgtttttttgctttaggcgtcagtattacattgcatgaccaacaatggttgtagtctcctgctgtttgctggggcatgc

SEQ ID NO: 137653 - DNA, 122 bp, Homo sapiens
gtgcgaggttgggggagccccggggcagacccgagggaacctttgcggagggaaaagccacgaccaggccccggccgaacctaccatcctcgagagtggtggtgatgatttcctgagaagaa

SEQ ID NO: 137654 - DNA, 122 bp, Homo sapiens
agtctgcgctgagtgaagaggtgccagaatccgcgaagagggtcgacgaatgcgctgccgcggagggtagggcgctgagggtctgaaccctgatgcaaggaggggctggaggtcgcgggcac

SEQ ID NO: 137655 - DNA, 122 bp, Homo sapiens
tgtatattgttctcaactggtaagctgttagactggatagcccatgaataatagcctctgcgctgttgcgggtccggcggaagtcctcggagcggccctcgcggaaagctccgcaaagagag

SEQ ID NO: 137656 - DNA, 122 bp, Homo sapiens
agaatcactgtgctgctccacaagcagatatgaagagccagtccagtcacacaaagaaaacggacaggcatcccacacggcaggacgtctgtgactcatcaaagctggagtgcaggacagca

SEQ ID NO: 137657 - DNA, 122 bp, Homo sapiens
ccttggcggggagaagctttttttcttgctagtattcgctgtgttcatggtctagaaatgcggtctggtctcgcctcgcctaccaatctctgctctctatgtatgtagcgtacgggttgttt

SEQ ID NO: 137658 - DNA, 122 bp, Homo sapiens
gtccctggtgtaaacagccttgccagtgttggggacttctgcctggattctgtggcatctcgttaccacaccaatctggtaacggcttgttccccagcctccccatcacacacacacacaca

SEQ ID NO: 137659 - DNA, 122 bp, Homo sapiens
tggtgctgtacaggacgctgttcagggcaggggagagggttccgagggagtcccagagcccgatgtcccgggacagggtactggaactaagttgtgtttgtggatattgggctggggtccca

SEQ ID NO: 137660 - DNA, 122 bp, Homo sapiens
gcatcctggccctgagacagctgggccagccccgcagggctctgcagcatgtgggagctccgctccatagccttctccagggctgtgttcgcagagttcctggccacactcctcttcgtctt

SEQ ID NO: 137661 - DNA, 122 bp, Homo sapiens
aaacccgtgtaggcaacactaagaagttcaggctttctcctgaagactatgggaagatttcgaagtatttcaaccagaaagtcacactggtttaagcacagagggctgtaggacaggacgtc

SEQ ID NO: 137662 - DNA, 122 bp, Homo sapiens
gtagagttaaacccatttatatcagtaactttattaaatagaaagtcctatggccaggcacggtggctcacgcctcccagcactttgggaggctgaggcaggtggaccaccagaggttagga

SEQ ID NO: 137663 - DNA, 122 bp, Homo sapiens
actgagggctccctcctcatccagctgtcaaagcctgggcatggccagtgctgagaccctcgctgtcccaccagcgaatccctcgagttctgccccctcaggctgtcagcccaggtagggga

SEQ ID NO: 137664 - DNA, 122 bp, Homo sapiens
tatgaatcggccaatgagaagggccgtcttttccagtgcgcctccgagcagtagatgttgcgaaagtccgggtagaggccggagaagaaggcggtgccagggcgtcctgcggaagggccggg

SEQ ID NO: 137665 - DNA, 122 bp, Homo sapiens
gcctgcctgaaagatggtggttggggtggggtctcatagagttaggcttctcacccactgcgtattaactggcagagaatttaggggaggttcagaagacagagttttagaagcaaagcaca

SEQ ID NO: 137666 - DNA, 122 bp, Homo sapiens
gggagacaaaatggccgccacgccccgagccgaaattacatccgggctccgcgacacgcccgaaccacaactcccagaatgctctgcatcgacagcgggagacgagacgcgctcgggcgtcg

SEQ ID NO: 137667 - DNA, 122 bp, Homo sapiens
cacccctgtgacccacctgtgccatcctcctcctcagttaggtgaggcagcaaggagaggcggggctgggctccacctctgcactgtggccctctgaagctgccaggcccgccggcacacac

SEQ ID NO: 137668 - DNA, 122 bp, Homo sapiens
tttccaacccgccacttggtggcactctgtaccggctgcaaattttcattccagctgtgccgaactaaacctatgtccaaagaggacttcattcagcctggctaatttcaatatggctatac

SEQ ID NO: 137669 - DNA, 122 bp, Homo sapiens
tgaggaccgcggttcctctcccaccaattggggtcctgaattagggtgcgagcagccaggcgccatcccggggcgggttgtggggtcctcggtatggggaggttgggaaacagagaggacac

SEQ ID NO: 137670 - DNA, 122 bp, Homo sapiens
cgtggctcctgacaaccccaccggcactgtttctttgcactggaggtcctgaagagctcacggaaggtgcacttgcagttgtagttcagagatgatgcttttagacaatctttcccttcgag

SEQ ID NO: 137671 - DNA, 122 bp, Homo sapiens
ccacatctactattcttaccactgctcttttgtctcctgtctttaatgactttgatatttcgttagtgtctgtgtgaagaagggcacatacatctgaatatcctcagtgcaaaatgaaaatt

SEQ ID NO: 137672 - DNA, 122 bp, Homo sapiens
caacatccatgcctgcctggcggtctcagcctctgaggagacgacacagggagctttggacgctgcaggtgtcttcaatattcattttcaaaatatcagtcttaagtctcagcggggccttt

SEQ ID NO: 137673 - DNA, 122 bp, Homo sapiens
catgttgaagggcatgcagatggcttaggaaagttggaaaggattggtcattctgcggctcgtggctcacttagtagccatgtgcatgtagacctggtggtggttgtcagatgtcgttgagc

SEQ ID NO: 137674 - DNA, 122 bp, Homo sapiens
cggggtttgtgctgcaggaggcctctgtttggggagagctctgtcccggctccagtgcggcggccctcccccagcctgctggaatgggacctcatccctgctccagcgtcatggacttttcc

SEQ ID NO: 137675 - DNA, 122 bp, Homo sapiens
gaggagagtgagcagtgggaaagcgagcctggagggcgcagacggacgactagctgtgctcgagggtgcggaaacagcagggtggggggagttgggaataattttaggacgtcactgtgaca

SEQ ID NO: 137676 - DNA, 122 bp, Homo sapiens
gggtctttgccattactgctgctctgagaggtgcaggcacacacatctctggcttggggacgggcaatcaaggggcatatttgggcgtgaggagcttccctatgcccctcacctctgcatta

SEQ ID NO: 137677 - DNA, 122 bp, Homo sapiens
aaaccacctaccatcactctccctttcctggacttggaaatatatccttcccttcaagcacgcggaattcccaactgtattttctgatatgagagactaaatctgtttttgaaactgagttc

SEQ ID NO: 137678 - DNA, 122 bp, Homo sapiens
aggcccaactcaggctccgcacctcaaggctccgcccccagcaaggctccgccccaggcccggctccaccccgcacaggccccaccccgagtcaggctccgccccgcccaggccccgccccg

SEQ ID NO: 137679 - DNA, 122 bp, Homo sapiens
acctatgataagaggcactagagaacagacaagcctcaggaaagcaatattaaacttaagcggggtctcagaaaggtctttgtagttgaatcaagttaaaacaagtttggttccaagggtct

SEQ ID NO: 137680 - DNA, 122 bp, Homo sapiens
agcctgggcaacatagggagactgtctctaaaaaaaatcaatcccaatgatggcattccccgcctcagggaatgccagcccccacttcttctgtcacctctcccccatgggccccgttaacg

SEQ ID NO: 137681 - DNA, 122 bp, Homo sapiens
aggttttccatgatcctaagataaccagttcattttagccctgcgcacttgcaacggcaacgccaccaaacactagaggaacggggggaaatgaataaataccccagttgtgccttttctat

SEQ ID NO: 137682 - DNA, 122 bp, Homo sapiens
tacatattgaacagaaactccttctctagctccagcgtctggtatttggtgtagggacagcgctttttccgggaagagcgagcgtgcagccagttggcggaggggttggctgaaagagaagc

SEQ ID NO: 137683 - DNA, 122 bp, Homo sapiens
agtgacagccagccgcagcccgatcaaaacaaagagccgctgcacgagaggggcagattgcggaagcatattgtgaacacattctctggtaactgtgaatcgtgtcgtaaaacgcgtctttg

SEQ ID NO: 137684 - DNA, 122 bp, Homo sapiens
ttgcctgtactctttgccccccagtaaatttcccacgacactaagattttctacgatccacgaggagctgcttattagttgccaaagtaggaattggtgaagccaacgtagtcatagccaga

SEQ ID NO: 137685 - DNA, 122 bp, Homo sapiens
gaaccagttccctcccaccttttgtttggagccagtgattcagctgagcacttctgggtccggaaatgcctcagcaccagaatcaagttcacaagaaagctgaatcaggagcgtttgtctcg

SEQ ID NO: 137686 - DNA, 122 bp, Homo sapiens
aatttctctgatccttggacccagctgcgtaaaaataaacttcctctcctgccacgggcgcgaataactgtgttaacatcaaataaaaacgtctgggagaaataccaagttagggtcgctgt

SEQ ID NO: 137687 - DNA, 122 bp, Homo sapiens
tggggctgtggaacaattttggaaagggtggtggggtttagcacatgggtgggtggaagccgtgggtgctctgagtggctcagcttacatcagctaaagcacaaatcaccaatgggggaccc

SEQ ID NO: 137688 - DNA, 122 bp, Homo sapiens
aactagttaagctacctcaactattaagaaatcctgattttggaataaaatgctagccatcgtagtcaccaacttcaccaacttctgggcccctcttgcctctttgatagcttcagtgtaag

SEQ ID NO: 137689 - DNA, 122 bp, Homo sapiens
atagaaaagggcttagatagtaatgcagtataaacaaccctgacagaaatcttgatttatcggttcttgggggattcagcaaaggctttagggcatgaaaggcataaagaaaacttggcagg

SEQ ID NO: 137690 - DNA, 122 bp, Homo sapiens
tagctgtaccattgggtaaagggtcagtcccctaagttcttttggatgcctgtctgagaccgtatctaccccaactcctctcctgagactgtcatgcatctcccatgatgcagcagctaaag

SEQ ID NO: 137691 - DNA, 122 bp, Homo sapiens
ggctggagcttggccccaacctcggaattgctgccaagggcttgtaatacaatctctccccgtttgaagggtaaatcagtgtcaactgcatttgcgtccaccaaaaaaagtaagcattttac

SEQ ID NO: 137692 - DNA, 122 bp, Homo sapiens
caggctggggacagtgggggcagtgtcggggtgaggatctggtctcccgacaccccttcccgggagcgagacctcaggcccagtcttcactccccagctgtgaaatgggtgagaacagaggg

SEQ ID NO: 137693 - DNA, 122 bp, Homo sapiens
atatgctgagagtaccaacaactgccaggctgccaagcagtttggagtattggaaaaaaacgttcgagactggcgcaaagtgaagccacagcttcaaaacgcccacgccatgcggcgggcat

SEQ ID NO: 137694 - DNA, 122 bp, Homo sapiens
cctcatcccttgggtggtcgatgggactgggcgccgtggagtagggggtggtgctcccgtcggggaggctcgggctgcacaggagcccacggagtgggtgggaggctcaggcatggtgggct

SEQ ID NO: 137695 - DNA, 122 bp, Homo sapiens
actcaacactgtcaaccgtctgctcccccaaaacacgcacagctcttaaagcgccatattcgtctgggcgtacacgttgttgggtgctttattcctgtagctctggtagggttcatccctca

SEQ ID NO: 137696 - DNA, 122 bp, Homo sapiens
acgcaagtcactggctgtggacattctgtcccatctgactctctggggtctgatgaagagcgtgccccatatctaaggtgaaggtgaagctgatgacagcagcagcggctgttttacttcct

SEQ ID NO: 137697 - DNA, 122 bp, Homo sapiens
ctcctgggttcaagcaattctcctgcctcagcctcccgagtagctgggattacaggtgtgcgccaccacacccagctaatttttggtggttttttttaagtagagacaggatttcaccatgc

SEQ ID NO: 137698 - DNA, 122 bp, Homo sapiens
ttcatgtcgtgggaaatcactggaagttattaccaaggcctcatagtttcccatggcatgcgatgcttctgacaatatgaatgtgttcctctatttggacagaatagcaacacacccttatt

SEQ ID NO: 137699 - DNA, 122 bp, Homo sapiens
ccgacatccgcctcaacccccggcgcttgcctgacctggtctccagctgccgctcccgtccggccctctcgccactgggggacatcgacttctgcccacccaacccaggacccgatggcccc

SEQ ID NO: 137700 - DNA, 122 bp, Homo sapiens
tgaggcgctgggctgcgacagggacatcaccgttctcctcctcagggagatggtgctcgtcgtgcacggcttcccgtcctccgtggccgcccttcgggtaaggaaggagaccgggcagcggc

SEQ ID NO: 137701 - DNA, 122 bp, Homo sapiens
aatcacaaatatagctgagaggcaagtggagtctccccgctggaggcccggcgttgcaggcgcccctggcacgtctggaagccaggactctggcggctcccatggccctgggcccctcgttg

SEQ ID NO: 137702 - DNA, 122 bp, Homo sapiens
ccatcagatgcccctcaaggcccacaggaattctccaggttgccgatttgcggggatgaacgaggccctcctggcgtaggttcagaccaggtggcggcgaggttcagaccaggtggcggcga

SEQ ID NO: 137703 - DNA, 122 bp, Homo sapiens
ctcccgcatccctcctagagcctctgctgacgtgtcagtcggaaactgctcagaccttcgcgggcgccgcccctctgcgcttgtcttcccacatgcccccggcgctccgcctggtccctgcc

SEQ ID NO: 137704 - DNA, 122 bp, Homo sapiens
gaaacgactccggctgtatacccactgctgtcacttgctgccctgtccaaggagtgctgccggactggggagtctgtctgactcagaatcgaaggcgggggttaaagaccagctaggccata

SEQ ID NO: 137705 - DNA, 122 bp, Homo sapiens
gacctgagacccgagggactctggagcccagctgcccctagttcagtactgggtagagtccgaggaggggcggggccccggctaccacagagacggcgtttgatagagaggaaggtgcggga

SEQ ID NO: 137706 - DNA, 122 bp, Homo sapiens
gaagcggcggggcagtcagcctagccaccttcggaactctccacgcctgatcccgttccccggagcccgcggccgttaccttggtgcctccgagccgtaacacttcctccagggagaaccca

SEQ ID NO: 137707 - DNA, 122 bp, Homo sapiens
gtgagctcagtccgggtctgggtgccagcggctgttctttttctccccgcccagccccgccgcccacgtgtctgggctccatttgcattagaggggctaggggctgtagttttggtcaggaa

SEQ ID NO: 137708 - DNA, 122 bp, Homo sapiens
gtacaggagtgatcactctgtgtttgaaaccagagactagatgagatcaccatgggagcacgagtagcagagatgaggtctaagggtttgaggtgctctggcatatcaacatgtaaaggtta

SEQ ID NO: 137709 - DNA, 122 bp, Homo sapiens
aacagcccagaccaccaagcccgacaggccgggaaagctgagcgcgcgctgctggggggacgcacactttggaggctgtgtgggcgcgcgccggcaccccacaagttctcatccgtctgctc

SEQ ID NO: 137710 - DNA, 122 bp, Homo sapiens
gtggagactggaggattgtcagcttagtggcaaagcgagcagggtgcgtggcgtggagagcgcccccttccagtcacgtgcagcgttcacttgttctccaggcaaggattagagccgaaggt

SEQ ID NO: 137711 - DNA, 122 bp, Homo sapiens
tggttccccagggctcctccagagcaggcaaggtcgggtgctctctgcagctaagttgcccgcgtacattgaattgctgaacaaaacagggtcccatttgctttgcaggctcttagcctcat

SEQ ID NO: 137712 - DNA, 122 bp, Homo sapiens
gggaagcagtttttcttccttgcctgacgtgggactagttctgagtctttttttatataacgttgttggaaaatacaattgccgtgtgtaatattgagaagaactgcctctctaccctcaag

SEQ ID NO: 137713 - DNA, 122 bp, Homo sapiens
ccggcctgggtcaggctgagcctgcagcccctgcctcctagccctgacacaggtgagcagcgggagagggaacccctgagagaccctgagataggagggcccacatttccaatggggtgtgg

SEQ ID NO: 137714 - DNA, 122 bp, Homo sapiens
cccacgggagactgtggcagaggcgcggcacggcgagttcaccattccccagtgcccggccgccccaggggactcagcagctgacatgacaggggcccctcttgtatcgactgtcctgtctc

SEQ ID NO: 137715 - DNA, 122 bp, Homo sapiens
cttatctccaggagcagacaccagagaggagccctgcccaatcctttaccccaaagggggcgtgcttagcccgaggaggaagaagagggtttccagctaagagtcagcaccaagggcacccg

SEQ ID NO: 137716 - DNA, 122 bp, Homo sapiens
ctcttaagctgtcctccataccctccccacttatattaggagctggaagctatcaaagctcgagtcagggagatggaggaagaagctgagaagctaaaggagctacagaacgaggtagagaa

SEQ ID NO: 137717 - DNA, 122 bp, Homo sapiens
ggcgccggggaggggcgcggctagggggcgaggtcgaagggcgggcacctgcgggtggggcggggcctgaattagcgggagcgcccgggaggggcggggccggggcctgcgtgagcgggtcg

SEQ ID NO: 137718 - DNA, 122 bp, Homo sapiens
agtgaatgttaccgcttttaaggcggcgcgtctagagttgttcgtttctcccggtgggctcgcggtctcccgggcttgaggagtgaagctgcagaccttcccagtgagtgttacaactcaca

SEQ ID NO: 137719 - DNA, 122 bp, Homo sapiens
gagatctcccagtctacctcttcgaggcacccgttgccagtcctccatctctgtttgccgcgcgtccctcggttaccccagaggcaacacgtcaggctgccccgcacctccaagcctgcgcg

SEQ ID NO: 137720 - DNA, 122 bp, Homo sapiens
ccaagtgtagcccctcccaccgcagagcctgtttctaacgtacctgccattcgtggaagtcgcctgggttttgtaaaggagaattttttggactcaagctgtcatcttcaagcacgccaact

SEQ ID NO: 137721 - DNA, 122 bp, Homo sapiens
gcccggctaaatggacacaggaaaggcctgagtcaggcttctcataataaataaactgcacgtgaataattcagcagtcgcgcgggggccggttgcatcagcgccgccgccgccgcgcggcg

SEQ ID NO: 137722 - DNA, 122 bp, Homo sapiens
agagcttggaagcggccgaggtgggggtccctgggtgtggatgtagtgaccccggagccacgtggagccaccttcagacccagagctgaagcaggagggtgaccggtagagcaaggccgtgc

SEQ ID NO: 137723 - DNA, 122 bp, Homo sapiens
accacctgcagcgggaaacaccgggagcctgttagcagccggcctgcggggcagcgctcccgcccacccgctccggggaggcctagacatttccggcccagacgcagtccgagagtccagac

SEQ ID NO: 137724 - DNA, 122 bp, Homo sapiens
ctactgctttctgtgtttagttctaaatcattctgtaccataggtttcgggagtcctagacgttaaccttaactatgttaactgtgtaacttggctcactgtgtgaaagcaaaaaaacaatt

SEQ ID NO: 137725 - DNA, 122 bp, Homo sapiens
ctcaaataagtcttaaccctagcaatgatacaagcctttgaagacagtaaaactaagtaacgagagacagcctcaatttgttatctatataatgcttaaatgcagcctttgttgtctttaac

SEQ ID NO: 137726 - DNA, 122 bp, Homo sapiens
ggtggaggggagcacacgtgggagccaggggcaccggcggagacacgagcgcagaaggcacgcgctcaagcccacgcccgcgactgccgggactgaaggtgttgcgagccccggctccaccc

SEQ ID NO: 137727 - DNA, 122 bp, Homo sapiens
agaaagaaaaaaaaaagaaaagaaagaaagaaagaaaaagaaagagaaaaagaaatgattcgccaatccctgatacagacaattgtttcaaggtcatatacctggtacatcccagagtcagg

SEQ ID NO: 137728 - DNA, 122 bp, Homo sapiens
gcggagactattgcgcaggcaagcgcgtacgcagaagcgtgcgcgcgcccgttcaacgtccggagcatcggtgcagtttcgagggtaaagcctttggcgcggtgatgtggacttttgttctc

SEQ ID NO: 137729 - DNA, 122 bp, Homo sapiens
ccagagaaaggtgggcatagaacccatggattcgagctgcagagattcaagaatcgcacacgaattattgccctgaatgggacccaccctgttgagcaatgtcccatcccagggcacctctt

SEQ ID NO: 137730 - DNA, 122 bp, Homo sapiens
cagtttatatacatgatcccactgacttatcataccttgcaaggtacagcttcattaccccgttgaggaaagcaaagcttccagaagggaaggcatttgccaaagatcacacagcgggtaga

SEQ ID NO: 137731 - DNA, 122 bp, Homo sapiens
aggtcttctccggagtaaaggctgccaagcgaggctgacacagccgaacagcggtgagggcggggccgtctcctgaactgggcggcctggagacggcgctgtcggggaggcggccccggaga

SEQ ID NO: 137732 - DNA, 122 bp, Homo sapiens
cagctggatggctctgctgtccgctcgccgggcccccacgtgacctactgcgcgggccgccgcctccaccgcgcccaggccccgcccccgtgacgtctcatcgccctctgcctgtccgagcg

SEQ ID NO: 137733 - DNA, 122 bp, Homo sapiens
taccatttaagaggaaaatttaaatattcagtggaatgaggcactcaaagggttgaaatgcgatttttctttggtttccagggacctgtccctgggctctcactccaaggttaagttccaaa

SEQ ID NO: 137734 - DNA, 122 bp, Homo sapiens
ctggttgaattgtaaatgctcaggatttgtttaattaaggatgcaggaaaggtgatataccggtgtgcagaagtcaggatgcattccctgtccaaatcacagtgttccactgaggcaaggcc

SEQ ID NO: 137735 - DNA, 122 bp, Homo sapiens
gctgcgccgggggcgcgcgtccgggaagcgcccctcctgccccgcccccggccccggccccggccccgccccgtgcttgcagtttcctataagtagccggctctcggtgccagcctcagcct

SEQ ID NO: 137736 - DNA, 122 bp, Homo sapiens
ctttctccaccccggcacaatggctttatttctgctcccccggcccgaaagtttaaaaatcgggagaaagtgtgagactcagccggctactttcccatcacacagcgcccccactgcagccc

SEQ ID NO: 137737 - DNA, 122 bp, Homo sapiens
ccgggtttgtgggtgatgccgggctgcgggtgatgccgggctgtgcgtgatgccgggctgcgggtgatgccgggctgcgggtgatgccggggctgtgtgtgatgccgggtttgtgtgtgatg

SEQ ID NO: 137738 - DNA, 122 bp, Homo sapiens
aaagcaagtggggggggcggccacgggggcccggggattgcagatgtaagtggggtgatgcggaggggcatttgtgctgagcccaccgccagcacagaacccagctttgctgccacacaaaa

SEQ ID NO: 137739 - DNA, 122 bp, Homo sapiens
ctaagagactaaagacgggcgtggaggggcggagctgggcggggggcgcctcatgaaggccgggctgggtgtcccaaaccagggccacggaagggcagcgggaaggaggcgtgcgggccgta

SEQ ID NO: 137740 - DNA, 122 bp, Homo sapiens
gtgctccacaacagcaaccacagggaattttttaatgccaatattgaccaactctctctccggaagacacacctctcactctccagggcaccccatgaggtctggtgtgtggtttcagctcc

SEQ ID NO: 137741 - DNA, 122 bp, Homo sapiens
ttggatgaattatagccatctcaaatttaccatgtccaaaatggaactctctaatttccccgcaaatctggttctgtccagtctcccccgtctcagtgaaaaaccccaccattcacctggtc

SEQ ID NO: 137742 - DNA, 122 bp, Homo sapiens
ccgaccctgcaggcggctggatgttggggcgaggggcggacttggtgggtgtcgggacgacgcggggctgggaaggcctgtccgggccttcatgtccgggtcctcgtaacccggagccgcga

SEQ ID NO: 137743 - DNA, 122 bp, Homo sapiens
ttaacaacaaacctagatattacttttaattaaaaaaaaaaaaaaagaagccaaaaatgacggtcacaatccctcatgaggacacagactattcagtgagaatccttgagggaggccctctg

SEQ ID NO: 137744 - DNA, 122 bp, Homo sapiens
aagtttctgctcttagctgcgcccccaccccctccttgccaagaatgttggaggcagccacgatctaatcaaagaaaggtaggagtttagatttcaaaatgtagatgtcacatttcagtgcc

SEQ ID NO: 137745 - DNA, 122 bp, Homo sapiens
gagaggagcgctggggccactgttgcttgtgagcatttgccaacctgacaagttgggcttcgaccttggagggagtaggggggtagacagaggtcaaggtatgaggaggctgataggggatt

SEQ ID NO: 137746 - DNA, 122 bp, Homo sapiens
tgcctgacagactcttattcaagactccagccgcacggaggatgcagcatgagagttaatcgccaccgtgtgcattttagagtctaaagggcaattttttccttggatgcaagaggccagct

SEQ ID NO: 137747 - DNA, 122 bp, Homo sapiens
ctctccatcccctaaccttctctgttccagacaaaaattagcttccttgtagttcttcaacgtgccaggcatccgctcacctcaagggctttgtacttcctcttcctccccaagatatccat

SEQ ID NO: 137748 - DNA, 122 bp, Homo sapiens
gacttagggttgagttggttgcctccactctctgattccctaagccaccctggccagactcgtttctccggaccttgtgacctgcagaagcttacagtggtagggccagacatggtggctca

SEQ ID NO: 137749 - DNA, 122 bp, Homo sapiens
gaatgacagacaaaaaggtgcacacacttacacatagcacaataattcaaacacaagtcacgcgacacccacacacctcccacacatacacacatcacgttattgcagcactatcgcagaca

SEQ ID NO: 137750 - DNA, 122 bp, Homo sapiens
gcctctcacagctcccagacatcacctcaccagctgctgtggtcaggatctctgtccttccgctgtgaggtgaaccaggccctcttcctgcctggtcccaacctttgatgccatatccctcc

SEQ ID NO: 137751 - DNA, 122 bp, Homo sapiens
cccccgtttccggctatttagcgcggcgggaggtggaactacaagttccggcagcgcccgcgctaccccgctgcggttttcccgggggccgacgggagtcgaagttcagggacagggcgcaa

SEQ ID NO: 137752 - DNA, 122 bp, Homo sapiens
ccgccggcttccggcgggggccgccggctgggtgagctgcagcccagtcccgtgttgccacgctgggaactggcgttctgtttacatatcttagagaacgatcagaaggacgtgctgtgttt

SEQ ID NO: 137753 - DNA, 122 bp, Homo sapiens
aggggtttctgggcctcggggccaggcaggaaagctagcaggctcctctgctcaccagtccggcatttgcacaacactgagactgacagcttgggttgctgataaatgtgtttactcacagg

SEQ ID NO: 137754 - DNA, 122 bp, Homo sapiens
atttaaatttgcaggctgctactctgagtgactgaacaggaagctagctggtccctttagcgctaacaaagcttgatttaggctgaaagattagaaagcacatcttattctataaacgcttc

SEQ ID NO: 137755 - DNA, 122 bp, Homo sapiens
gagtgtctgggtgtgtggcataggaggaaggtttgcttgtgaaatgaggctgggtgggagcggggagggactagatcagaagagatcaagggctctattcaggaacgttggtgggaggacag

SEQ ID NO: 137756 - DNA, 122 bp, Homo sapiens
ggcaggaccgacagcatcggggcttgaaacccagtgctcgggagcccgcccctccccccacgaccttttgggcccagaagccatgatgggggcacagaggagggagtttcgggccccggccc

SEQ ID NO: 137757 - DNA, 122 bp, Homo sapiens
caagagtaggaaaatatgatgcatgtttgggaccaggcaaccgaaatcccttctcagcagcgcctcccaaagccgggcaccgccttccttcggagaaggcgcagagtccccagactcgggct

SEQ ID NO: 137758 - DNA, 122 bp, Homo sapiens
gcccatttcaaggtgcgttgaagtgtggcgagcacagagccgcagaatcatgcgcattgccggggagaaggtggtatagcgtctctgcccgcttctctctcggctcacactgcgtggcaagt

SEQ ID NO: 137759 - DNA, 122 bp, Homo sapiens
gctgtggcggaagtggtcgcgttaccgcttgtttgtgcgcatgcgccactctcgtctggccgccgcgctttcaggaggtgcttttggttctctccggtcttgtccacgctagggggtgcacg

SEQ ID NO: 137760 - DNA, 122 bp, Homo sapiens
ggagcctcgcccagctcctgtgtttcagccaatgagcggcggaagcggctccgaggggggcgggtccgggaggctgtgcgtgtcttgtgagagctcttgaaccaagtcagcgctggagtcgg

SEQ ID NO: 137761 - DNA, 122 bp, Homo sapiens
tcaagaaaaggtagccggcaaggggtggagctggaggtgagcgtggagctcccaaggctgcggtgggaggggtggaggccgggtaggaggatggggcagggctctgtctcagtcctgatcct

SEQ ID NO: 137762 - DNA, 122 bp, Homo sapiens
gctgggcacccagccggagctcaaatgctgggggtgcagccgggagcctgtgcattccttcgacaaatatttaccaagcacctcctgggtgccaggctctgttttaggccccgggggctcgg

SEQ ID NO: 137763 - DNA, 122 bp, Homo sapiens
ctcccacctctcagcacttcgtttgcccctctcgtacccccggcgcctggagagcagaggcggtatctggtgccggtatcttcccagggctaggctgaagggcgttcctagttaccactcgg

SEQ ID NO: 137764 - DNA, 122 bp, Homo sapiens
actccccggcagcgggctgagaaggctcaggacaccgagctggccgcctacctggagaaccggcagcactaccagatgatccagcgggaggaccaggagacggctgtgtagcgggccgccca

SEQ ID NO: 137765 - DNA, 122 bp, Homo sapiens
gtccctgccatccgcttccgggtctatgccaatcagcgcaggacagaggccaggcctgggcgggacccccgagaaggtaggcggggcctggactaggccgggatgagacgcgaagaggtggg

SEQ ID NO: 137766 - DNA, 122 bp, Homo sapiens
gcaatttcccacaagacctgtgtgaacatatcctactaggccctggaaccccagtaaggccggaccggcagggagggagggagagaggggctgatctaaggagcaacaggaaattatcaaaa

SEQ ID NO: 137767 - DNA, 122 bp, Homo sapiens
aggcgctgtccctgggtccggactccgctgtcgctgcccaccccgcttcgcccgtcgcgccgaggagtgtgtgtgcttgcatctgcaaaccgtgcgtcccgtgcacagaatacgtccggtgc

SEQ ID NO: 137768 - DNA, 122 bp, Homo sapiens
aagttttttcctagtgttcccttattcggcttctttggaaatggagaaattggatgtgatcggatagtcactgggaactttatattgaggaaatgtaatgaggtaaaagatgatgatctgtt

SEQ ID NO: 137769 - DNA, 122 bp, Homo sapiens
ctttgaaaggatgggcattaggaaccagagacctgaaatgggtcctcaggagggaggatgcggggtaagattttgactctgtgaagagaaataacaagcacagtctcctccagtctgctctg

SEQ ID NO: 137770 - DNA, 122 bp, Homo sapiens
taaatcagtgcttcgactcactcttatctgttctgttcaaaactatttgttcaaagaacccgttagtgttgtttacagggttacagtttctctcacatgctttcctcacccctttacccccc

SEQ ID NO: 137771 - DNA, 122 bp, Homo sapiens
cggaagtgacattatcaacgcgcgccaggggttcagtgaggtcgggcaggttcgctgtggcgggcgcctgggccgccggctgtttaacttcgcttccgctggcccatagtgatctttgcagt

SEQ ID NO: 137772 - DNA, 122 bp, Homo sapiens
ccatcggtttccttcgggagtcttcaaagccagtgcacgtgctcccaggtctcagggaggcgacccagggggaggggcagagagaagggggtccgagcccttgggcccctaaccccgtccct

SEQ ID NO: 137773 - DNA, 122 bp, Homo sapiens
actcttctttccaatgaaggaggaggctgagaggtgcaccaatggctggatccaggcacacgcaggctccgagttcacagaagcagggccatcatgtcccggctgttgggagttcctgtgaa

SEQ ID NO: 137774 - DNA, 122 bp, Homo sapiens
gacagcctcaggcaagtgccctaccctcgtacagcctccgcttctccatctgtcctctggcgatgaccacaaaggcatcctgggcatttgccacttgctgtgggctttgccagacctcagac

SEQ ID NO: 137775 - DNA, 122 bp, Homo sapiens
agggggacctggggctgtgtgtggctgagctggagctcctgtccagctggttcagtgccccgacggtgggtgccgggaggaagaagtccatggaccagccggaggggacccctgtggagctc

SEQ ID NO: 137776 - DNA, 122 bp, Homo sapiens
ccgcacacacaaccaaagccggcacacctgggcgagtgtgagggcttcacgtggctgtcccggcacacacacctgatgctgacgcacctgggctagtctgagggcttcacgtggccatcccc

SEQ ID NO: 137777 - DNA, 122 bp, Homo sapiens
tagatgcggccccgccctctcatggccccaacccctccgcctcccgcagcgggctcagcgcggttaacgctgtttctaggccctcgggctggctgtcctcagtctttaagatcgcaacgcac

SEQ ID NO: 137778 - DNA, 122 bp, Homo sapiens
gcccgggacgctgctggggatgggcccgggcacagggcccggcatccgcgccatggaccgcgcagcttcggccactgggccttcccgagcctcctgcacccgaaccccgccgccgactgccc

SEQ ID NO: 137779 - DNA, 122 bp, Homo sapiens
gagagaatcacaattgcgatagtcatacttagtcttgatgtatcacctttcttctgagaacgtaaaaacatatcataagtggtaattaagcttcccaacacccactgggaaatggatattat

SEQ ID NO: 137780 - DNA, 122 bp, Homo sapiens
acttgtgacaatggttacagctgtaagagcggatctgatggaaaaggatacatagccccccgtattgatttcttactggtttgtctgcaaactaccctgtccttagatactgcagataaaga

SEQ ID NO: 137781 - DNA, 122 bp, Homo sapiens
ttagtaatactccactgtgtggacggaccacatgttgtgtatccatcattagttgacggccgtgtgggctgttgtaaataatagtgcttacgtcagcatgcacacgcagtcttaggtggaca

SEQ ID NO: 137782 - DNA, 122 bp, Homo sapiens
cacctggcttccatcacggtcagccttggcctcaacaggagaaacccattcattgcgagacgcggactctgcttgaatccgggtcctgcagctgagagaatgggctgcattttttttctcgg

SEQ ID NO: 137783 - DNA, 122 bp, Homo sapiens
ggtcacaagaaagccacaagaccaggcagggatgacatctgcctgttctgtcctcagcaacgggcagggaccttggcatgaaggaggtgttctaaaaatatgtatgtaatgaatgcttgaac

SEQ ID NO: 137784 - DNA, 122 bp, Homo sapiens
aaggcaccaggggtgccgggggctgtcagccacacctgttcctgatgggctgtggggcaccggctgcctttccccagggaatcctctccagatcttaaccaagagccccttgcaaacttctt

SEQ ID NO: 137785 - DNA, 122 bp, Homo sapiens
tggtcacatgggcaggagcctcaaagctggctcagaacaggaattccaatgattgactatcggggcaactaaattcccactattaagttgcaaggttgtagtgtaaggttgtagcacacgtt

SEQ ID NO: 137786 - DNA, 122 bp, Homo sapiens
actgcagcctctacctcctgggctcaaatgattttcccacctcagcctcctgagtagctgcgactacaggcatgcgactacaggcatgcgcaacacctggcttatttttttattttttgtag

SEQ ID NO: 137787 - DNA, 122 bp, Homo sapiens
agacatagatgtgggttcatgactacaaaataatgcaagggcttacatatagctgtaaaacgatcataggacataacagccaggagaaggcactcaactgagcccaaccacatgtaaacata

SEQ ID NO: 137788 - DNA, 122 bp, Homo sapiens
cgcagccgcaacccgtcccggaggtgtcctgtctcctgtcgccgccgccgccgccaccaccgctgccactgccgccctgccggggccatgttcgctctgggcttgcccttcttggtgctctt

SEQ ID NO: 137789 - DNA, 122 bp, Homo sapiens
cccaggctgtggccggcagggagctgcttcagggacaagatgtggggctggatgtgctcacgccccagaggcgaccccctcctgcccgctggcacgccgcggggtcaaactgtgctctccag

SEQ ID NO: 137790 - DNA, 122 bp, Homo sapiens
agacaaagagaagaaaagacagctgggcccaggggaccactaccacctggacgcggagaccggtagtggccccgaatgcctggctgcactgttatttattggatacgaggcaaaaggggcag

SEQ ID NO: 137791 - DNA, 122 bp, Homo sapiens
ggccgcttcctggagagcctgggtgctgtcttcccccatgagccctggctgcggctgtgccgggagagaggcggcacgttctggagctgcgaggccacccaccggcaagcgcccactgcccc

SEQ ID NO: 137792 - DNA, 122 bp, Homo sapiens
caccccgaaggcttcctgctaacgtccaagggcagcaagctctgcagacggtaccactgccgggctaaattttttattaagtggcactttcttttctgcgcagatccagcaaccttgtcaat

SEQ ID NO: 137793 - DNA, 122 bp, Homo sapiens
ccgccttgccctccagctagttcccccgcgcgcaggatcgcactactccctctgcagtctcgcctgccgacttccttctgcgcgcctcgtaaaaccggggaagttcaatcattccgcagcga

SEQ ID NO: 137794 - DNA, 122 bp, Homo sapiens
gccggaaaccggtggaggtggtgtccgcccgcagaggagcttgcctggtctcggtctgagcgtcgcccagcgatttgccaccgcacgcacgccggatcccgggctttaccgcccgcctttcc

SEQ ID NO: 137795 - DNA, 122 bp, Homo sapiens
cgaactcctgacctcagctgatctgcctgctttggcctcccgaagtgctgggattacaggcgtgagccaccacacctggcccctatgtcccttgtgttctctgctaattggtaattagatct

SEQ ID NO: 137796 - DNA, 122 bp, Homo sapiens
ttcctggatgtagttgcccaggtttttctttgctggaagataaatgtgcaaagccagatgcggtggcttacgcctgcaaattccagtactttgaggggcccaggcgggagggctgcctaaga

SEQ ID NO: 137797 - DNA, 122 bp, Homo sapiens
gagctccaactaaatgccagcatttctaaaatacgtattttctcttagggctcataataccgctgcaatgtgggtagtattatccacattttatatacgagaaaactaaggctcggacatat

SEQ ID NO: 137798 - DNA, 122 bp, Homo sapiens
tgacctcctgggcagacacctgcacgaaacaagccacactctccacacaaatccggaagacgaaggcccactgtccccaacacaggcttctaaccaagactcaatggggccctcaagccagt

SEQ ID NO: 137799 - DNA, 122 bp, Homo sapiens
atcacctgagacaccttctcagtcccagaagctaaactagggaggcatcccgggacaagacgggcaacaatcttttcccaaacgacccccgagcctggccagggagatgctgcctgcaaggc

SEQ ID NO: 137800 - DNA, 122 bp, Homo sapiens
tgggatctccttcctcgggccagcggtgggaagacaggcgcaccacatcgatgagctgagcgatggacagtccaaagcgcacaatcaccacgtctgaagtgttgggcaccgggcgcgcccag

SEQ ID NO: 137801 - DNA, 122 bp, Homo sapiens
ggacaactctgcacggaggaggagccagaaagcccagcagggctctcatgtctgggagatcgcacaaggagactgtctgatatcattccatgggggggttctgtgcttttttaagagctggc

SEQ ID NO: 137802 - DNA, 122 bp, Homo sapiens
ccaggaaggaatgatgagtccatctgctcgtgacctgagtctctaaaccaggaggacagacgtcctgggtaaccgctgatgggtgagcgttgcacccccaggatccctgtaattataggttc

SEQ ID NO: 137803 - DNA, 122 bp, Homo sapiens
gtgagccacagcccctccaccacctcactctgtggccttggcaggtcactttctcagtgtcgatgttctactctgtagaggacagtgaccttgcacagctgacagagttgttgcagacacca

SEQ ID NO: 137804 - DNA, 122 bp, Homo sapiens
tcctagaactttccatacaaatgaatgtaaaacaccataaaaattaatcttaaggccgggcgcggtggctcacgcctgtaatcccagcactttgggaggccgaggtgggcggatcacgaggt

SEQ ID NO: 137805 - DNA, 122 bp, Homo sapiens
ccaagggaatctcctggtcggcaggttgtgaagactgtgggaaaggcatagtatctgggccggagtacaccatttctgaagacacagtcccccacggcttcccttggctagggcagggagtt

SEQ ID NO: 137806 - DNA, 122 bp, Homo sapiens
actgtgcactacaattgcctaaagcgacctctcattctcacaggactgctctacttttggcgtgtgcccatggccgtccaggagtggtagctgacctggtggccagaaaatgccagcttaac

SEQ ID NO: 137807 - DNA, 122 bp, Homo sapiens
aaaggagtttatcagggagaattggctcaaatgatcacaaggcgaagtcccatgataggccgtctgcaagctggggaagaaagcagccagtagtgactcagtctgagtccaaaagcctcaaa

SEQ ID NO: 137808 - DNA, 122 bp, Homo sapiens
tcatgacactggttcaaagccaaacagaaaagcccgacgagtttattatcccctaaaggacgtcatgtagataattaaatgacatgaataccgtcgaagatacctgcctgatattccaaaat

SEQ ID NO: 137809 - DNA, 122 bp, Homo sapiens
cactgtattgattactggtctgactgaggtgacagggcagcaggagccttagagcatggacggtgccatggggcctcgggggctgctgttgtgcatgtacctggtatctctcctcatcctgc

SEQ ID NO: 137810 - DNA, 122 bp, Homo sapiens
gactgccttttaatgcgcagcctagagagcggttaaaaaaccctaatgctcctatgttaccgccacctaaaaacaaagaggattttgagaaggtaatttaaaaaatggacataaggccgcat

SEQ ID NO: 137811 - DNA, 122 bp, Homo sapiens
gacgtcccattgaggacagacggagaaagacaaacgtgctcccccgacactcacacgggacgccccgattccatttgccgccccagctcccaggccagcagcctccatcggggctcaccggg

SEQ ID NO: 137812 - DNA, 122 bp, Homo sapiens
gagcattggaacctggagagcttgggcaggcattcaccctccttccagcagggggcggaacgtaaaacgccttgtggccgacgccctctctctttcacacgtcactggcgtgaccgtccgcg

SEQ ID NO: 137813 - DNA, 122 bp, Homo sapiens
agaataatctaaaaataaaggctgattacctcatgtggtataaacttaccaatgactccccgttgcctagaggctcaaattgctagcatggcctggcgtgtggccctggtcaaccaagtctc

SEQ ID NO: 137814 - DNA, 122 bp, Homo sapiens
cctagcctactcctcctcttcctggccctcttccccaggctccaggctggggggtgctcgcgtctcccctgtaggccagagcagccccaagttctgggggcggtggggctgctgctttatcc

SEQ ID NO: 137815 - DNA, 122 bp, Homo sapiens
gaaaatgctggcatctgagcggggtggtcagaacgcaccccacagccagaggcgccttcccggtaacacagcacgccttcctgttagtgtgtcgccaggaccaggctctacccgaataagag

SEQ ID NO: 137816 - DNA, 122 bp, Homo sapiens
gcccccgcctccgagaccaaatagagacgctgcttctccctcgcctggtgccgcccccgccgggcaggggccatccacccgccccaggaccagccctcagggaggggaaacggccgagagcc

SEQ ID NO: 137817 - DNA, 122 bp, Homo sapiens
ttcttaagagttcagttaagaacacctataaaatcttttccatcatgaattccttcagcacgcatttattaaatgccacactcacacaccgcttggaaaaccttgagaggcaaaatctgtgc

SEQ ID NO: 137818 - DNA, 122 bp, Homo sapiens
gaggactgcagcagtgatggcgcctgcctcccaggaagggaatgaaatgaggcatctccgcgcgcattccggatcgggcatcagtatgtgacatcgccagcacgatgctatttccatctgtg

SEQ ID NO: 137819 - DNA, 122 bp, Homo sapiens
cagggctgcaggtaaggactatgacattttactgtgtcttaagaggcttccttctccagccgttcagtttgcaccccagaaatgacccattcacactaaggttaaatatccttaggtatatc

SEQ ID NO: 137820 - DNA, 122 bp, Homo sapiens
aagaggagtggggaggcgcagcttggttagtgaatatgaactacagcgagacatgaggaacgggttctggggctctgcagcactgtagggtgaatctggttaaccataattcattgtatatt

SEQ ID NO: 137821 - DNA, 122 bp, Homo sapiens
acggggacaccctccggagtataaacagccaggggcttgcacaggcacactcacattggacgtttgtgttcacagactccaggaggccagcttatactcagctgaggactgaagaaatctct

SEQ ID NO: 137822 - DNA, 122 bp, Homo sapiens
gttctaacgctcacaatgagaattccagcacccacgcccatgtgcaggaggcgtcctctgcgaggtgccctgtgtgctggccacctcgaggcccactgcgcatgctgaggccactcacagac

SEQ ID NO: 137823 - DNA, 122 bp, Homo sapiens
gcagctggctgcttcctctcctccggtggccttattataaaggcaggatgggggagccagcgccctcttccgaggggaaggtaacttccccttcctcccgcgccggggctacccacctgccg

SEQ ID NO: 137824 - DNA, 122 bp, Homo sapiens
cgctcatccatcccgcagaccgggcggtgagatgactccgagccccgcgcacggcggccgcgagcaaacgctccgacgtctgtggtgacgtctcgtattgatttagggacacggggcggctg

SEQ ID NO: 137825 - DNA, 122 bp, Homo sapiens
cccactgatttcattccacaaaagtattcccatcattttcactgttaaaacatttacagccgggttagccagacgcggtggctcatgcctgtaatcccagcactttggggggccaaggcagg

SEQ ID NO: 137826 - DNA, 122 bp, Homo sapiens
gcaaggtgggaggaccacaggcctttgatctgtctgattcctggctctgccactccttagcgccataactttggctaaagactttatctccttgagatatgctttccaaatctatacaatgg

SEQ ID NO: 137827 - DNA, 122 bp, Homo sapiens
acaatgtggcttgctagaagcatctgataccagccagagtcagttttgtgcatttctttccgattcagtgttcagtgaagtcaagttggtagcttgaatcaaccatggtgggaatatttaca

SEQ ID NO: 137828 - DNA, 122 bp, Homo sapiens
ttatttcaaatcagttctcagagacgttgtaggtggctggcttgggccgcggaggagcttcgccaatcagaagcaagggggtgggtcctgggagccagaaaggctgcctccgcgaggattag

SEQ ID NO: 137829 - DNA, 122 bp, Homo sapiens
gactaatccggatctgcatttgctcctcagcacatagctcattgccacagcagagtccaacgcaggtactgtcacaagggcatgacaaaaaatcagacatgggtcacagaattcattctcct

SEQ ID NO: 137830 - DNA, 122 bp, Homo sapiens
ggcggaggagcggcagaggccaggcaggctggcgggtctcgcccttagggtcacgggtaccggccccgcccgcctcgccccgccccgccccgccccggtcctgcccccgcagcgcgcggacc

SEQ ID NO: 137831 - DNA, 122 bp, Homo sapiens
tccccggcagcttcttaatccctactgtatggccaaaatgcttggttcccaataaaggctcgtcagcccttgaggtagacacttctgtataaaacagaccagaaagaaaaccgcaggcctga

SEQ ID NO: 137832 - DNA, 122 bp, Homo sapiens
ctaagaggtacccatgcatcgctgggccgatgatgaaaatgaagaagtcttctgatgaagcgagaccccggaagtgcagcttcaggcaaaatcctgagcgaattctttgctgccaggacagt

SEQ ID NO: 137833 - DNA, 122 bp, Homo sapiens
aagggcaagagtaggggcaggaggggcccttcctgcccctgctcctggtccccacttggccgccagcagagaaggcaaaaagcaggaactagaggccagcaaggtacaggatgggggaggga

SEQ ID NO: 137834 - DNA, 122 bp, Homo sapiens
cctccccattgtgactcgtttgagctcttagccaggcgtgtagtctggcgggagccgtcgcggctggctcggcagctccaggctattccgaggaacagtcttcagagagcctggggtgctga

SEQ ID NO: 137835 - DNA, 122 bp, Homo sapiens
tgacagtgtgctggcagccctcgcagccctcgctcgctctcggtgcctccttggccttggcgcccactctggccgcacttgagcgcttcaacccgccgctgcactgtgggagcccctttctg

SEQ ID NO: 137836 - DNA, 122 bp, Homo sapiens
ccgctgggctgtggagcgcgagggagccacaccttacaactctcgcaccgtcatgaacggcgctctcgtgaaaccgacccacatcattgtggagaccatgatgtgagctctctcgggtcgac

SEQ ID NO: 137837 - DNA, 122 bp, Homo sapiens
ccccctaaaacctctcttctcaccgatgtcccagctcagaaaatgcaacttccgttgttccggtatcacatgccaaaaccttggcgccatgcatggctcctctctgcgtttcacatctgtgt

SEQ ID NO: 137838 - DNA, 122 bp, Homo sapiens
tccagtgagacaggaggcttacatagtcagccctcctttgctgtgaagcaaatggcaaatcgagggctcccttaccatgctgggttgcgattagctgttcctgacacaaacgtttcatacag

SEQ ID NO: 137839 - DNA, 122 bp, Homo sapiens
taaacagctgtggcggctggagatggccacgctggacggtgcggagctgagacgggccttcggagcagagcgggaggtgcgacctgtgcagctgtcactctgctctgtggtttagggtcacc

SEQ ID NO: 137840 - DNA, 122 bp, Homo sapiens
gctcgtaaatctgtttctcttgttccacacgagctgcctgggaaaaggccccatttgctgcgtctgctcctccttccaaatgctcgacgcctttgagattttatgatttcgggttattgact

SEQ ID NO: 137841 - DNA, 122 bp, Homo sapiens
agggccgaactggagggtgggcgcagccttggctgccttgggaaccgtgctgcctcgactcggctacccctcgctgggcggtcgtgcgcactcgctaggtcgggcagccccgggtcgcttag

SEQ ID NO: 137842 - DNA, 122 bp, Homo sapiens
cggtgggcgcctgcgcctacgcgcgccgggaagcagaaggtgatctctgccttcgagacacggagtgtgctgcctcagtctgtgatccctcgcgtttcaatccaattcaaaccatgctgcag

SEQ ID NO: 137843 - DNA, 122 bp, Homo sapiens
gatcctgaggcgatgggtggtgacacttctagccaatagtaggagaattccctgcctttgcgggaggaggtgagatgaagagagatggtgcacggaaaggagaggaagggcggggcaagccc

SEQ ID NO: 137844 - DNA, 122 bp, Homo sapiens
ggcgccatgagtgagctggagcaactgagacaggaggccgagcagctccggaaccagatccgggtgagggcctggtgcggggcgggcgattcatgtgtacaccgcccggtgccctggaccgg

SEQ ID NO: 137845 - DNA, 122 bp, Homo sapiens
ccactgtttacacctgggagctggtcactcctggccccagagagtcacagcctcatcccacgccatgagaaagtcagtcctgcaggatataggattctgtagggtctgtgggagtgtctggg

SEQ ID NO: 137846 - DNA, 122 bp, Homo sapiens
gcctcactgaaaggacactggagagagacccaggactgcacccatccctcccgggtcagacgagtccaacaggactggtagcttagcttcctgggaggggaagggagccagacccagaggga

SEQ ID NO: 137847 - DNA, 122 bp, Homo sapiens
gcgggtcacagggaccctggaccggcacaagaaactgctttcttctcgaggtataaccgtcggcagaagaaaagggttccacctctccccaaccggagtttttggcaaggagtccccaatgc

SEQ ID NO: 137848 - DNA, 122 bp, Homo sapiens
ccccagcaccgacacctctggctgggcacagacggccgcagcaaagtagcctcggtggagcggccccttggcgggcaggggcggggcacactcaccccgccggcccgcaggagcttgtaccg

SEQ ID NO: 137849 - DNA, 122 bp, Homo sapiens
ttcttaagggctgtctgaattggcagcttttctaacatggaggccttcctccctgtcagtcgtccggtttgaccccgtgtcttgaagcctgttctcgtgcgacgtgctgatgtcaggggtgt

SEQ ID NO: 137850 - DNA, 122 bp, Homo sapiens
ggaatccctgagccaggagagctggaccaggagcacccctcagagctgcccttgccaggacgccagtagagctggcagccgagtctgccgctcccgccctcagagccgtggcggcggggaca

SEQ ID NO: 137851 - DNA, 122 bp, Homo sapiens
atcgaggaaagcatacaagtgtttcaaagaaaaccacttatgcactcagctgagcaagaacgttaagtggactagagaagagacaacacggaatgtctaggaggagtgagtaaaaaggaagg

SEQ ID NO: 137852 - DNA, 122 bp, Homo sapiens
acaaatattaacccacgcaaccctcacaaccaccttaggagataagttgctattattttccgcattttacacttgaaactgagaaagagaagtgaagtgacttgcagaggtcccaaagccag

SEQ ID NO: 137853 - DNA, 122 bp, Homo sapiens
tgtatgaaatactccactgcacagatgtttgcttttaggcttaactgttcttttattttgcgtgtgctggttacagccgggcacagtggctcatgcctgtaatcacaacactttgagagggt

SEQ ID NO: 137854 - DNA, 122 bp, Homo sapiens
gccggcaccgggcagcggaagtggctccggcggtgggacttgagtgtttgtgttttggttcgtgaaggagccggcggctggccttaggggaggaggcagagggaggaggaggaggaagaatt

SEQ ID NO: 137855 - DNA, 122 bp, Homo sapiens
ggagaagaagaggggcggagaaggggcggggagaatcacctttccttttttacaattggtcgtagtagactccgagtcctgccgcccgtcctgcagccgacaggctgccaggactgtcactc

SEQ ID NO: 137856 - DNA, 122 bp, Homo sapiens
ccgaggcacagggaagccgggagcagccgaggaacgcggagggcgccgaatcagagcctgcggggcttgacagcttctcttgcggcgtccaaggtgggcgtaatgtccaacaaaaaggtcgg

SEQ ID NO: 137857 - DNA, 122 bp, Homo sapiens
gagggaggaatcacgcatatctcccaggtttgctgctggggtggccgcagaaccgggagtcggtcacagagttcacagacgaggtcacatggaggagaagcctggtgccaggaacaagctag

SEQ ID NO: 137858 - DNA, 122 bp, Homo sapiens
gtccacctgttcagttttcacagatgtgccggagacggggactgctattgccccatttaccgatgaggaagccgtggtggggtgtggggtggctaagcctctgagctaggtccccccaaccc

SEQ ID NO: 137859 - DNA, 122 bp, Homo sapiens
ctattgagtaactcagcttctcagcctttaggctgctatgggccctagatgcatgctggtcgattctgatcaacgagcaactgcttttgtttgtttgcttttttctacagctgcagctgtgg

SEQ ID NO: 137860 - DNA, 122 bp, Homo sapiens
ggagccccatctccagataccatcacattaataagggcttcaacatataaattttggggacgggaacatctagtccaaaacattcactaacagaaaaattgacactggctccatatcatcaa

SEQ ID NO: 137861 - DNA, 122 bp, Homo sapiens
cccaccttccatttagcttgcagaaatacatcggcctactgagtaagcaaccaggcattgcggctgacttaaagaacatctttatgtccatggaaatgaacattttttaaacatctgtaagc

SEQ ID NO: 137862 - DNA, 122 bp, Homo sapiens
ggaaccacatagaacgtttgcaatattgaaatcaaaatacaggagcttccagtctacattcgtcactgaaataggtagaaagagaagagagagagatgacactggtactttctagttgaaag

SEQ ID NO: 137863 - DNA, 122 bp, Homo sapiens
gataatttttagagactagtaatcaaagcaattgtagagttagctatttgattggcattgcgcagaatgaaaagcctgataaagtttacttgtgtagaaagccacactggctgcccagaagc

SEQ ID NO: 137864 - DNA, 122 bp, Homo sapiens
ttccctagtgccccagagactggacggagacttagaccagcctgtgggcatcagggttcacgggaggcttccctagtgccccagagactggacggagccttagaccaggctgtgggcatcag

SEQ ID NO: 137865 - DNA, 122 bp, Homo sapiens
agcgtacctgtcccgttctggccttggagaacgcagtggctcacaagggcaccgctagcacgcgaggcgcggcgaagggagcggagggaagcggcgggctgtcgcgcaggtgcggccccacc

SEQ ID NO: 137866 - DNA, 122 bp, Homo sapiens
ctcgcacctgtgaagtgctattggattcacccactgtgccagccccttcctacgaacagtcggtctcactctgctactcgtgtctcgaggcttctctacacgcccatcatattgatgctgtc

SEQ ID NO: 137867 - DNA, 122 bp, Homo sapiens
gagctctaccagcaggctttcatgggagcggaggtgcccacgtttccattgtgcggtaaccgcgcttcatcacagccacctccaatcgaggccgcacggtgtccccagaaccacgctcggta

SEQ ID NO: 137868 - DNA, 122 bp, Homo sapiens
atgggtggggcggagcgtctgggatgcgctgggagcctaggatccccgacaggtaacctgcgggcggatctgaacggggggcgagggtggcagctggagttgatggcctagatcgctcgggg

SEQ ID NO: 137869 - DNA, 122 bp, Homo sapiens
gaggcctcaatctcgagcccagggctcatcgtgacatctgagctgggctggtcctgagtccgggaggtgtctctctctgcctcccacgtggactgaccggccggtagccctgccctctggcc

SEQ ID NO: 137870 - DNA, 122 bp, Homo sapiens
ccccgccctctcggaggtcgcttggggtcggaatgtgggtggcaggtctccaatcaactccgcctaccgctggggcccccagctccaaggagcagagcttcaaggggcagaattcagcccca

SEQ ID NO: 137871 - DNA, 122 bp, Homo sapiens
gggaggcaggcggtgccccggcccctgactgacgcgaccgggaccagcgcgcttcgtccccgcccacccgacaggccccgcccccgagcccggccccgccccgcgctccccggctttcgcga

SEQ ID NO: 137872 - DNA, 122 bp, Homo sapiens
aacacacggtcccagtttccaaagcaaactactgggagatcagacacaagctgctgttcgcgctcgccccaccccaagcacccagcactctaaggtgcccacatttcacacccatctgttgc

SEQ ID NO: 137873 - DNA, 122 bp, Homo sapiens
agacacaatgtgaacagagcacctcaggtcttgcccgccctggacagggcagctctcaggcgcagaacaccctccccacaccaaaggcacaggagctgagctctgcctgcaggaaataggca

SEQ ID NO: 137874 - DNA, 122 bp, Homo sapiens
ggggaaggagcgaggctgaggggccaggacgaggctgggcgcgagggccgagggcgccctcgggaacctccgggggagacgagagggcaaaagggcgcaggggcggggcgggcgcaggcgga

SEQ ID NO: 137875 - DNA, 122 bp, Homo sapiens
aagaaaaagaaccacgtgtgctaacagggaagcactctttcagtgctacaggatcctctacgctctggcccttctgcagtcagttgtaaccacatccacccaggttaaggtgaaggcaggag

SEQ ID NO: 137876 - DNA, 122 bp, Homo sapiens
gctgagccttcacctaagtccgccgaagtgtgcagagcctggagacgggatcgaggtcaccggaagcccacggttgcggggacatgatcaagctacagcgcgctgggggaagcgaccactgc

SEQ ID NO: 137877 - DNA, 122 bp, Homo sapiens
gagaagatgaagaactctgttcggacttgttgagtctgatgtgtctgttagacacgtagacggagatgcaagtgagcagtggtctatataagtctagaatcaggaatgtccaggctggagat

SEQ ID NO: 137878 - DNA, 122 bp, Homo sapiens
atggcatgtaccccgccctgcccagggctcctgccagccccctgctgggggtccgggatacggcacatcccttgtccagggctcctgccagcccccctgctgggggtccgggatatggcatg

SEQ ID NO: 137879 - DNA, 122 bp, Homo sapiens
tggctgtggcctacagtgtagacagactgtgcccagccagactaaatgaagacatataaccggaagtcagccaccagcctgacccctcccagtttcaggaggagactgagcaaaacactatc

SEQ ID NO: 137880 - DNA, 122 bp, Homo sapiens
ctctctctgactccagttgccctccctcgccttagacctggatacacaccaggggctccccggcttggagttctggggcccagcaaagaatcatactccgagagagacttcgagaccaaaaa

SEQ ID NO: 137881 - DNA, 122 bp, Homo sapiens
aaagctggagaggactgggcgcggccagcgcagagacccgctggcgttggtctgacacctcgtcttgggctcttgacacctgctgtgggaggtaacaccagctctaggctgtttccacccct

SEQ ID NO: 137882 - DNA, 122 bp, Homo sapiens
aggcaggcgaatcacttgagtccaggagttcaacaccagcctggccaacacggtaaaccccggtttctactaaaaataagaaaaagttagccgggcgtggtggcacatgcctgtaatcccag

SEQ ID NO: 137883 - DNA, 122 bp, Homo sapiens
acagataaaaatacagacaggcccatagcccagactcctgtttcacagttctccctgctgcgaacgggtcgaccacaaaccaccgccactcccaaccaccccagttcatggaattcccccag

SEQ ID NO: 137884 - DNA, 122 bp, Homo sapiens
cggcgggctccgcccggaggcggtccctccgggttcctcacccggatgggtgaggctttccgatcactcctaggggcggggcttctggcaactccctgtcgctccggtctgtcggctctggg

SEQ ID NO: 137885 - DNA, 122 bp, Homo sapiens
tttaaaagattactttatgtcttatcttaatccacacaggtggtctgcatgtaagggcctcgccctgttacaactctagttaagaattcagctcaactgtcatctcccatgtgaggtttttt

SEQ ID NO: 137886 - DNA, 122 bp, Homo sapiens
gcaaagcccggaacggatgaagctccggcgcctctgtccggaagaggagagccaagaacacgcgagcatgtccgaagcagaaagtcaacaactaggctggagtttccccctcgcgcatattc

SEQ ID NO: 137887 - DNA, 122 bp, Homo sapiens
ttctggcgttgggggctgtactcaggtccaccggaggagtcgtcgggggttcggggggggcggggaagaactctgtctagtcttgtgtgcctgtttagagggttttccaggtgtttgacctc

SEQ ID NO: 137888 - DNA, 122 bp, Homo sapiens
tgctctggaagacccagcccaggtctggctgacccagagcactggccccttcccagcctgcgtcctcaggacataggtgtgggcacccatatacaccaagtgggttctagggcagccaggcc

SEQ ID NO: 137889 - DNA, 122 bp, Homo sapiens
cagactcctaagggcctggaccagcaggtgcctggattggtaccttctgctcttcagcagcgggggctcaactcacaagcctctgcgtcagtctcttgggtccctttcacactgtagctcaa

SEQ ID NO: 137890 - DNA, 122 bp, Homo sapiens
gaaagcccataaaatagaaactcaggcctcgttgtgtgtgactcactctcggagcacgcccgtgcctctcctgtgcgcaggcattcacttcacaataaaagcttcttgccttttgtctcatt

SEQ ID NO: 137891 - DNA, 122 bp, Homo sapiens
tagttaggacaagggatcaatttattttgtaaataacaagaggaaagaaccttcttatgacgtcggccttatgacgttggcctgggtcccaagaagtgtagttgttttcattctttctgcaa

SEQ ID NO: 137892 - DNA, 122 bp, Homo sapiens
gacccatttttccacctattttgaattggatatcccagaataaccctgctccccctggcacgggtggatgaacaccccatcctgcttcttgcaactggcagcccttgaatatccctacctgc

SEQ ID NO: 137893 - DNA, 122 bp, Homo sapiens
aacctcatcaaagcccagtttcctcctgttgtagatgggagaggaacagtttttgaactgcgtagaacctcggcaagtcttagcgctgcatttgtgttttctaagctgtaattctagttatt

SEQ ID NO: 137894 - DNA, 122 bp, Homo sapiens
cgcgttatagagaactgccccctcgctgccccaataccagcgccggggccgcgagcccgccgctgattgggccgcaccgcccgtgacgttagcccggaccccacccctccggcggcaccgcc

SEQ ID NO: 137895 - DNA, 122 bp, Homo sapiens
aaggcgggaccacagtggtgtccgagaagtcaggcacgtagctcagcggcggccgcggcgcgtgcgtctgtgcctctgcgcgggtctcctggtccttctgccatcatgccgatgttcatcgt

SEQ ID NO: 137896 - DNA, 122 bp, Homo sapiens
caaattgcttccattattagctcatcccgggcggcctggtcattggccagcccctggccacgtggtccctcgtaccaatcgatcgaattctagtcgcaattctctgtctgtccctcggctct

SEQ ID NO: 137897 - DNA, 122 bp, Homo sapiens
cgcaaggggccagcttggtgtcgccttcgttcttctgccaccccattcggtaggggctcccgttcccgccacgccccctgaagttgtggctcgcgcgtcttcccaggactcccccgcgccgg

SEQ ID NO: 137898 - DNA, 122 bp, Homo sapiens
aattcctccagcagtagagcaaacttggtattccaattccctccaggctttgaccaagagcgcacacgagggccaccgccttcgtgatcagaagcgggtatgactgggcaccggttggtcca

SEQ ID NO: 137899 - DNA, 122 bp, Homo sapiens
ccagtaagtttagtcttgtgaagtccgaacgtttgaataatttactcgctgcaggcaaaccgcctacaactaaatccatcaggcccccgtatccgaatcttccttcacgcgagaagccggcc

SEQ ID NO: 137900 - DNA, 122 bp, Homo sapiens
taggcgtcaccggagcctgctgaggggtctggttcggggtctggatggggctcgacttcacgcctcggcctcgcttctccatctcgctctgttctccaagacgcccaccgcctccccttcac

SEQ ID NO: 137901 - DNA, 122 bp, Homo sapiens
tagacagctgtgttcctacaattggcccagcaccctggggcacgggagaagggtggggaccgttgctgtcactactcaggctgactggggcctggtcagattacgtatgcccttggtggttt

SEQ ID NO: 137902 - DNA, 122 bp, Homo sapiens
tctgtcctccctgctcagggtcctgcagcgttgcctctgctcagccatgctcctgctgctcgtcccagtgctcgaggtgatttttactctgggtgagtaacattccattctttttcctcctt

SEQ ID NO: 137903 - DNA, 122 bp, Homo sapiens
cgcacgggaagggtgcacagtgggagctgcccgctcacgtccctgtccccactccctgggcgcccaccatgggcagggccggctctgagccttttgtgtgcattgactcatctaatcctcaa

SEQ ID NO: 137904 - DNA, 122 bp, Homo sapiens
ttccatgtagctcgccagctgcccaccgctagccaggtgtcgcttgcaatccatggacaccgttcccgtagcaaccccaggtgactgtcacagctgcccctgacacaaactgctttagcaaa

SEQ ID NO: 137905 - DNA, 122 bp, Homo sapiens
tggggttctggggcgtgaaggacacctgtgcaggggtgggaacagtggcgctcacctgaccggggcaaggagggggctgatggggcaggaggagcggagaaggtgctggcatgtctgggccc

SEQ ID NO: 137906 - DNA, 122 bp, Homo sapiens
gaggtagaatatgttccttcctctcttctagtagtctagtaaatcgactgtctcttcatccgaaaacctggatttctagtcccagattcaccacttaccatctgtttgactgtagaaaagtt

SEQ ID NO: 137907 - DNA, 122 bp, Homo sapiens
gtcttttttatagtgttctggaaggttctctgcctgtgtttgtatttcctttagcctccacgttcctctatccagttcccgcacccttccccccaggccccattcttcaaggcttcagagca

SEQ ID NO: 137908 - DNA, 122 bp, Homo sapiens
ggcagagtgaaggaagagaaagccctgtggttcagtggctgcaccagtagctttatcatccggggcctggtctctctccctgttgatcttctgaaaagattgttatttgagagcctttgtcg

SEQ ID NO: 137909 - DNA, 122 bp, Homo sapiens
ggggatcctgtgtcagagccgtggatcgcagaggcagcgaggctcggtctgcaaacaagacgctgcaaggctgagtgagagagagagggtgtgcgagcagcgagcacatgttacatcagaca

SEQ ID NO: 137910 - DNA, 122 bp, Homo sapiens
cctcctcctcccaaggcgattgtcatatgatagctaagaagtggcacattaatgaagcgccgctacaggggtcttttctgctcctgtcaccgcttaaaactatcagatggttcgagggagga

SEQ ID NO: 137911 - DNA, 122 bp, Homo sapiens
ctccgagtgaagacacagaggtgatgagatcgggtaacccacgggcgcccgagccccagccgcgcaagctcacgattgggccagaagtgaggatgaacaagcatttagcccaatagaaagtc

SEQ ID NO: 137912 - DNA, 122 bp, Homo sapiens
ctggtgcacaagggtcccattctttgcacaccaggggtataatggactccggactgttggcgagagtgacagcaaaaagagccagcctcttctcccaggcttcttagcaacctgcctgtctc

SEQ ID NO: 137913 - DNA, 122 bp, Homo sapiens
ggttcgcagttctcaccccagggcgggacactcccagggacttgtttcccattggtttaacggaaggagcggggcgggaaaacccgtgtcggcttggctgcaacacctattgaccaatgttc

SEQ ID NO: 137914 - DNA, 122 bp, Homo sapiens
agttggcggaggtaaggttcccagctgaagtttgaactgggagaagcgccgccttctagtcgcagctcctgtgctgtaaacaaagagtcctttccgcagtctgtttactgacactttttttt

SEQ ID NO: 137915 - DNA, 122 bp, Homo sapiens
acgccagggtctggcgctggcccgctgggcacagctgggccgtctcccgtgactcagacacggtgtccagcaccgtcgcgtccctgttagaccctcagcggagggcacaggccacggcggac

SEQ ID NO: 137916 - DNA, 122 bp, Homo sapiens
cagacgcggccactcacctgcggtgtgtgaggaagctgccgctgacgtggcctgagccgtcgcatcctggcgtggggcaggacatgccttccgtcttgaccgacttccaggagaactgggag

SEQ ID NO: 137917 - DNA, 122 bp, Homo sapiens
cagtccttttccgagatgaggtgagacaagggtccaacttttcctggattcgcctcccagcggacgtgagcttccactgcggctgcagagacgcgagcaacctcttctcatcggctcttatg

SEQ ID NO: 137918 - DNA, 122 bp, Homo sapiens
tcttcttttttttttgagatagagtttttctgggagtgcaatggaatgatctcggctcaccgcaaccaccacatcccaggttcaagtgattctcctgcctcagcctcccgagtaactgggat

SEQ ID NO: 137919 - DNA, 122 bp, Homo sapiens
ttatccaaaaatggccaagatgaggattctgccctcacgttgcctaccatctgggagacacgacacacacacaaatactggagctataaaggaaaaggggctaagacacttgctgaccaagg

SEQ ID NO: 137920 - DNA, 122 bp, Homo sapiens
gaagccccgtggggagccccatggtcaaggccgggactgagggccgggtgggccctgggccgcctccacctctgggcccgccctgcgccacaccctaacccgcctgctcttggctaacgggc

SEQ ID NO: 137921 - DNA, 122 bp, Homo sapiens
accgtcctgtgactgtggggactggcaaagctaaatggcctgagtgggttgaactgtggccgcacctggttagcaccgttctttttcttcttctgaaggaaaggcgtggctgttccgaggtg

SEQ ID NO: 137922 - DNA, 122 bp, Homo sapiens
ccgggtcccggtgccggccgcccccgccgccgccgccgccgccgcgtccccgtacccgctcggccgaacccccgtgtccgggcccccaggccccgcctcatgctgacccgcgccgggagggg

SEQ ID NO: 137923 - DNA, 122 bp, Homo sapiens
agtggatctgagggtctggactcgcaataagcaatctggttctatctcctgtatttgctccgctttatagatggaaaaaaaaagtagcttgtattttcctttctctttctcgtctgttgtta

SEQ ID NO: 137924 - DNA, 122 bp, Homo sapiens
gccggagtctgcggaggctaagccctggaaccggctcacagcacggagggagaacctcaccgtgtccactcccgccaatagcaactctgtcacatttcccaggatggactgggcaggcaact

SEQ ID NO: 137925 - DNA, 122 bp, Homo sapiens
attcagtaaatattagtgtgcccctccctcctcctttcgcctctctcctctctctgggcccgggtggaatagcatttccccagctttaagagttgccacggagcccagacctcccgcctggg

SEQ ID NO: 137926 - DNA, 122 bp, Homo sapiens
aatcgacttctcagcagcccccgcattttctttacggtggacatcgattctgatagtgggcgcaagcagagaggaaaacgagagcagtaagcgtgtattcacagtggagtctgtaattacca

SEQ ID NO: 137927 - DNA, 122 bp, Homo sapiens
acgcccttggggcagcaggaaacagagcaggtgggacgccctgagcccctgcatcctccacggctgccccaggaggtggcttcagccccagcacgagctgcgatcacatccctgctttctcc

SEQ ID NO: 137928 - DNA, 122 bp, Homo sapiens
aaaagtaatagtatctcttttctacagatcacaaatagaagctcagggaggttaactccccgacaaagctacacaggtaactagagctgaacctggatacctgactaagaagttcatgctct

SEQ ID NO: 137929 - DNA, 122 bp, Homo sapiens
tgtagcaggtgagcatggctgccccctcgaggctgtaccctggcaggcagcggtactggacgtgggagccaacggggaagccggcgtccgaggcggtgcggtgcccgttggcaatctcgcca

SEQ ID NO: 137930 - DNA, 122 bp, Homo sapiens
ggcactgcccctgtgggaagacagagctgcagatgggccgggcgtccagcaagggagcgccgggaagctcactgtctcaggcgctttctgtttctgagagccacgtgtactgcagatgcaag

SEQ ID NO: 137931 - DNA, 122 bp, Homo sapiens
ggcctcaagcgtcagctgcctccagggcctcaggagcagtggctagggcctgccctccagcgcccggggtcctcggcccagccctgctccgagcgcgtcacaatggcgtcgcggccccgccc

SEQ ID NO: 137932 - DNA, 122 bp, Homo sapiens
gttactgaagccaagagggcgggtgacctgcctatgaaatgaatctgagtggtctcagctcggggcaactttgtccctcacaggacatttggagatgtctggagagatttttagttgttaca

SEQ ID NO: 137933 - DNA, 122 bp, Homo sapiens
cggactggggaggtgctctgcgtgtctcggtcgcgtccgtcggactggggaggttctctgcgtgtctcggtcgcgtccgtcggactggggaggtgctctgcgtctgggggttttgggagagc

SEQ ID NO: 137934 - DNA, 122 bp, Homo sapiens
ggcagtttcccacttctgggagaagagagggcactgtcggcccttggcagacttggggggcgtcactgcccatatgtgggggacgtcactgctcaccttgagggacttaagggttcccagtg

SEQ ID NO: 137935 - DNA, 122 bp, Homo sapiens
gctcctctctccgcccccgtccggaatgctgagtgcccgagaaggaggcggaaatgagcgcgctcaacagcccaccagccgggtgtttacttaattagggcctgcatcccgaggctcgtttg

SEQ ID NO: 137936 - DNA, 122 bp, Homo sapiens
attgagccttggactgcccctgtttgatttccagcatccccgtgagtcttggggagcacgcgcaggagccgtagcctgggttgttgaggaaggctcctggagccctttgaggcgtggcagcc

SEQ ID NO: 137937 - DNA, 122 bp, Homo sapiens
gggaggagggcagcctccccccaccccccaacgccctccctctcctgctcccaggcgtcacgaaagtccaggaaaattatgctaatgaggacaaacggctctcacaaaggggctctcttgct

SEQ ID NO: 137938 - DNA, 122 bp, Homo sapiens
taaattaaagtttgactatgtctgtttccccagagacacaccatctgattgggatgcagccgtagagtagcagaaagagcagtgaagctggtattagaatgcctggattacagtgtttgttc

SEQ ID NO: 137939 - DNA, 122 bp, Homo sapiens
aagaaagaattagtttagtgtagcgaatggtagctatttgcagctcacccacgtgtgctccgaaggtcaaaaccctacatcagcaatttgtagcaagctcttgagctcctctacctcttaga

SEQ ID NO: 137940 - DNA, 122 bp, Homo sapiens
aataaccgtgtgacattgagattgttactactgacacgtccagacagcaaatctaatggacgagctaagtaatctatccaaggatatacttctagtgaacagtggaaccagggagactgact

SEQ ID NO: 137941 - DNA, 122 bp, Homo sapiens
cttaccttccctggttgacagtggggggtctccatgctggctgttctgcagaaggctttccgggcagcaggtaaatcagagaccagttgcaaaatcaattgtctttgttaggtgatcccagc

SEQ ID NO: 137942 - DNA, 122 bp, Homo sapiens
caagagcttcaagacgcgaatgacacttgagcagcctgggctcacgtctggtaaggtttacgccgcctgttcccgccatctggcaactccctcccagaagggtgagtttggttcttggcaaa

SEQ ID NO: 137943 - DNA, 122 bp, Homo sapiens
ggcggccagagcacggtaaatgccccagaagtttggcagattaggccaaccttgtccgctcgcctgggggccccggacctgcactggcgggagaccgcgaaggcgcggggacgcagagggcg

SEQ ID NO: 137944 - DNA, 122 bp, Homo sapiens
cgccccgccccttggcctgaagaccccgcccacacgcagacaccatcccgccttccccggcgcggccaccgccccgccacgcccattggccagtcccgagctgagcatgcctatgaacatcg

SEQ ID NO: 137945 - DNA, 122 bp, Homo sapiens
acttcgcggacttccggttcaagccggaagttgtggttaccaaggcgacgcaacgccgcccggccaggtgagcaaaactgatcttacctttggatgccggggctcccctcgagtcccaggac

SEQ ID NO: 137946 - DNA, 122 bp, Homo sapiens
cgccctcttacgacaggaaagtcccgcctcttcagcctgactccctctaggatctgaaagcgtccgtggccccgcgccagccccgccccgagaaaccctgcctcggaccggaaggtgtcccc

SEQ ID NO: 137947 - DNA, 122 bp, Homo sapiens
gccttgggggagcttgccggagccggctctcctggggctgacctggtagtccccgccgcccgccagcgtcaggtccttcacctggcatgcagagcgatctctcattgtcaagttgggatagg

SEQ ID NO: 137948 - DNA, 122 bp, Homo sapiens
gggcggcctggccagagaccgcggggcctggggctgggggaggggagcggtaagtgggggcgggaggaggtccctttgcagagggaaaccaatgtcatccgtctccaacttctgaggagaga

SEQ ID NO: 137949 - DNA, 122 bp, Homo sapiens
ctgcctgcatgggagtggcctggaccatcgccccagggcccagtgctccaacaggaccctcggtttattgctgtgctatcaccacgatgaaataattaatttttaaacgcgaggcctccgtg

SEQ ID NO: 137950 - DNA, 122 bp, Homo sapiens
tcccagaaacaaatgtcgcggagcagatgtgtataacagcaatcgtctgtcagcgtcttccgtcggcagagacctgcttggagacaatgctgaattaaatgagggactggctgctcctctca

SEQ ID NO: 137951 - DNA, 122 bp, Homo sapiens
gtgacttcgcccagcagcttgttaagctcctcgccgttgcgaatggccagctacaggtggcgcaggatgatgcgggtcttcttgtcgcgggccgggttgccagccagctccaggatctcggc

SEQ ID NO: 137952 - DNA, 122 bp, Homo sapiens
cgccgccgccgccattttgttgggaggactcaagctccggaagcgcctgcttcatctcgtcgtctccgccgccgccactttcccaactcgcatccgtcggctgacaggcctccgtctccaca

SEQ ID NO: 137953 - DNA, 122 bp, Homo sapiens
tgaatgatggtaacagtcacaaagaaacctccagagtcctttacctttttaaagagtagccgccaatacgcctcccagtctcggtcttgggtgagcacaggagagtcctcgtccactgttcc

SEQ ID NO: 137954 - DNA, 122 bp, Homo sapiens
agggaggtgggcaaagccactggctggcccgagagcatcctcacgtaagtgcacagatcccgggcttgggtgcgactgcggtcgcacgtggacacgggttgcagacccctggcaaattgtgg

SEQ ID NO: 137955 - DNA, 122 bp, Homo sapiens
aaaacctcactcactagtattaacccaaattatccaaccaggaactcggagcagagactccgagagcgcgagacactggagagggagcgtgcgaggaaaggaggaggggagggggaggatac

SEQ ID NO: 137956 - DNA, 122 bp, Homo sapiens
atgaatgtaacacaatttaatgaagcaactgtagctctgtaagaaaaacttttatgttcacgggtacctgtgcaggactgttacacgggtgaattgtatgccactgggtttggtctacagat

SEQ ID NO: 137957 - DNA, 122 bp, Homo sapiens
tctcacacagacgcagctgtttccgaggaatgtccggccgagcccgcagggtgcgggcagcgagtatcctgggaccttcaggggaggaggtggctcccacaccccaataccgtacagagagt

SEQ ID NO: 137958 - DNA, 122 bp, Homo sapiens
caaaatgcgctctcttaactacgcctgcgcgcatttatatacgttgcccctcgtccctcgcgggaaccatagagtcctgaggccggaaccatagagtcctgaggaggatgtgacgactctct

SEQ ID NO: 137959 - DNA, 122 bp, Homo sapiens
ccaggtacatggagccctctgtgcccagcctggttctgagctacactgctgggcagtgggcggattcatagccagccctgactcagggaactctcagtccagccaaaagactcactcatgag

SEQ ID NO: 137960 - DNA, 122 bp, Homo sapiens
tcgttcccccaaataggagcatgttataatctagggaggagagagagaacacagtgtgaacggtagcaacagaagaatagatctgggccgggcgtggtggctcacacctttaatcccagcaa

SEQ ID NO: 137961 - DNA, 122 bp, Homo sapiens
gacagttcagcctgcccagaactactgagacaaagaaagcgcttcctctccacaaacaagcgtgtgtcaggctacagtatgttgatttttgctttcaatgaatctaactctgtatagagaaa

SEQ ID NO: 137962 - DNA, 122 bp, Homo sapiens
tttcattactctatttccatatggagattcagaataaacctaaagaaaccactcttccgacgtaatatatacaacgcgtgtttctaaattcctcagattttcagtgctacaattcttttgcc

SEQ ID NO: 137963 - DNA, 122 bp, Homo sapiens
tctgaataaaagttgactagctgcccaaatcactctaatttactggcactggtgcccagccgggataactggttggctggacatgaacttatcacatgatgttatagcctttctattcagat

SEQ ID NO: 137964 - DNA, 122 bp, Homo sapiens
cctattggctagctttgttcggcgccaaagcgcggagcggaggccgaggcgagagcctggcgctgtaggactagaacgaaaggagtgaggcgccgagagcccagataccattttggcgtgag

SEQ ID NO: 137965 - DNA, 122 bp, Homo sapiens
tgcaggaatctgggagtggataggctgacgggtgatgaatattcaaagcacaactgtaagcgactttagttacagcgaaactctaaggcacgctgcccttcggaaggaaacacggcattccc

SEQ ID NO: 137966 - DNA, 122 bp, Homo sapiens
agccatgggtcatggaagagaatcgtggaacccagcgactagcgttgagctcgattaggacgaacctgggcacttggccgcacagaaacaatggcgagcctctagcccaaacaggaatggca

SEQ ID NO: 137967 - DNA, 122 bp, Homo sapiens
ctgatactgaggccgcatccctccccgtgatctcaagtagggacgcgggcgccagccacccggctttcgaggactttgctccccaaaaggtcctggggatgcagagtagggagggcgcgccc

SEQ ID NO: 137968 - DNA, 122 bp, Homo sapiens
catcttcgccccgccagctcctcgagatgggatataccagggttgctctccaaccctctccgcaggagggactgatggaaacgcctgggaaagtagcccggtacccacaaaggctgtctaca

SEQ ID NO: 137969 - DNA, 122 bp, Homo sapiens
atttttttccaggaccagaagagaccagcttaactcagagcacactccctccaagcggtgcggacaaggggccaccccgagagtctttgggggccgcggcggaatcgggagggaggaagtga

SEQ ID NO: 137970 - DNA, 122 bp, Homo sapiens
taaagtactggttctcaaacttttgcatgtattagaatgcacagagtacatatatatatacgggccctagctctaaaatttctgattaagtaggtatagggcggggtccaagaatttgcatt

SEQ ID NO: 137971 - DNA, 122 bp, Homo sapiens
tcaattccaggtcttgtgtgagtgtggcacatgcacctgactagctcctgcctgtttattcgcagctctgcctaggcctagttatgcattgcaggaggaggagcaaggagagggaggagttg

SEQ ID NO: 137972 - DNA, 122 bp, Homo sapiens
ctcctcccacctctgcggcagcgtcacaatcaataatgcagggctctgcggcagaggaagcgcctgcttttatataggggcgcccggaccccagagcagggctagtcccttaacccattccg

SEQ ID NO: 137973 - DNA, 122 bp, Homo sapiens
tggtggtgcccgtggtggtgggaacccacacccaccctcagactccaactcgcgcatctccgcaggcccaacagcccccgctccagtggcgcagagacccccgaaggccggcacctggacgt

SEQ ID NO: 137974 - DNA, 122 bp, Homo sapiens
ccggagttggcggctgagactgaaggaactactggcgatcgggagcacccacaaaagtctcgccttttctccccacctcccactccaggcatcacgtgacggctgccgagttggggtggggg

SEQ ID NO: 137975 - DNA, 122 bp, Homo sapiens
cgtgtgccctgcccggaggaggcgtttgtgtgcttgtgcgtgttcatgtgcgcgctcgtgcgtgtgcatgtggacttccttgtgtctccgtatgggcggaggccccccatctctgcctcaga

SEQ ID NO: 137976 - DNA, 122 bp, Homo sapiens
ggagatgggattatctttattttattttattatttatttattttttttgagacggagtctcgctctggcaccaggcctgaagggcagtggcgtgatctcggctcactgcaacctccgcctcc

SEQ ID NO: 137977 - DNA, 122 bp, Homo sapiens
gcagggaacaaaggagcggagaggggaggggagagagttgggcgagggagagcccccggccggctgccagaagatcccggcgggaggaagcccaagtgtcacttgaattccacccaaggagc

SEQ ID NO: 137978 - DNA, 122 bp, Homo sapiens
tgcagaggctctgcaggagcctgggcacccttgcagccacgatcccagctctccctccagcgacttcccgcagcctgaacctcccagctccggctagaaaatccccagctggaggctgccca

SEQ ID NO: 137979 - DNA, 122 bp, Homo sapiens
cggcagctggaaaaggcacacggccccgggctcctcctccacccagccccacccctcctccgctgaagaccagccctaataaggcagccaccagaattagaaccaggtcaagtgcactccga

SEQ ID NO: 137980 - DNA, 122 bp, Homo sapiens
ctttcggcttgcctcagttgccactgccatcttggatcagggtaattcccgcctcttgggcgctcccggttacaacctcggcgccatcttggattagttcaatgtagccaccctctccaggc

SEQ ID NO: 137981 - DNA, 122 bp, Homo sapiens
attcctcattaatctctgatccctgaggcttcctaacctcatactcctaaatctgacttccgatgctgaacttcctgacctctaacccccgagtcctaacttttaacaaaaccaatcttcta

SEQ ID NO: 137982 - DNA, 122 bp, Homo sapiens
tagctaggagtagaaagggagaaggtaggggtggagatgaaaaaagcattccttgcaggacgaacagcaagtgaaacaaaggtctcagggctggggtgtaaggctctatgaaaggacctagt

SEQ ID NO: 137983 - DNA, 122 bp, Homo sapiens
ctcaagtaatctgcccacctcggcctcccaaagtgctgggattacaggcataagccaccacgccaggccattggcaactttttctgagccttagtttctcatctgggtgcctctctgggtgg

SEQ ID NO: 137984 - DNA, 122 bp, Homo sapiens
agaaaatcagcgcatgcttactctgattttggaagaatcgaaagagaaaatcagaccgtgcgtactctgagtatggaagaatcgaaagagagagaaagtcagagcatgcatactctgaactt

SEQ ID NO: 137985 - DNA, 122 bp, Homo sapiens
agtgatccacctgcctcggcctcccaaagtgctgggattacaggcgtgagccaccatggccggccgacaatggaactttatttctcacagttctggcggccggaagtctgaaaaggggtgtc

SEQ ID NO: 137986 - DNA, 122 bp, Homo sapiens
ggtaccttccagagagtgagacccagcgcccttgtctcgcacccagtaggctttcatccccgccatggcggagctgatccagaagaagctacagggagaagtggagaaatatcaacagctac

SEQ ID NO: 137987 - DNA, 122 bp, Homo sapiens
atgtctgtgtcctaatctgctcttcttacaaggaaactggtcatgttggattagggcccacgcatatgacctcatttttacttaattatttctttaaagattctatctccaagtatagtcac

SEQ ID NO: 137988 - DNA, 122 bp, Homo sapiens
gcgcagcccggaggcagaggcagtgcgccggggcctggagcagctgcagagcgcctgggccggactgcgggaggctgccgagcgacggcagcaggtgctggacgccgccttccaggtggagc

SEQ ID NO: 137989 - DNA, 122 bp, Homo sapiens
agtgacatagctaatatgtgtagaatagagccagaatttcaaacctagtgcctgactgcacgtttgttccttttactctctatttttttttttctttttgagaccgagtctcgctctgtcgc

SEQ ID NO: 137990 - DNA, 122 bp, Homo sapiens
caccacacagccggctctggaactgcaggccgaactcctggatgaggtcgaaggactctacgaggaagacgtgctcgtctagcgggggcgatgccatggcgcgcagggagcccacgtccgcg

SEQ ID NO: 137991 - DNA, 122 bp, Homo sapiens
aggattttcacccactaacaaagatacctactagaggccccgccccgccccgcctccccgcgccgttggctgaggcttagggctgcgacccccagcacccctgcgaacgtggcgctggagag

SEQ ID NO: 137992 - DNA, 122 bp, Homo sapiens
taccagcgcgactacgaggagatggccagtcggctgggccgcctggatgctgtgctgcagcgcatccgcacgggcagcgcgctggtgcagaggatgaagtgctacgcctcggaccaggaggt

SEQ ID NO: 137993 - DNA, 122 bp, Homo sapiens
ctgacaattcaagaaaaagaaaaaaaaaaggtactctttctccctgggaataggctgctccgttttgttttgttttctgttgtttcaaacaatagtgtggcatcttaggagagtgactttca

SEQ ID NO: 137994 - DNA, 122 bp, Homo sapiens
gagccttcgccgttcccgagacccgcccccttctctcttacagtttgttaaagacacaggcgtgtaatttctaaaggataacgcagggtattttaattactgggtagcagaagtgaggacct

SEQ ID NO: 137995 - DNA, 122 bp, Homo sapiens
cggaggcgcattggggtggggggtgtctactgaaggccgctcccgacgtgcgcgtctttacgtagacgtcgggggcgcagccgcgctgtgcgcggtgactggcggctgcactggcggcagct

SEQ ID NO: 137996 - DNA, 122 bp, Homo sapiens
aatcttttttttaatttccaatttttgattgggccgtgggtccccgctgagctccggctgcgcgcgggggcgggagggcgcgcgcaggggagggaccgagagacgcgccgactttttagagg

SEQ ID NO: 137997 - DNA, 122 bp, Homo sapiens
ccgtgcacctccctcagcggatatatacagtttcctcgcctatagagcagggccgcacctcgaagagccccatctcctcccctgcccagtctacctcctcattcagtaattgtttcatgcag

SEQ ID NO: 137998 - DNA, 122 bp, Homo sapiens
caggcccccctgggctcccctcgccccccgctgcccccagagtccctgccgacgcacacgcgggcttgctcagccacgcgaagaccttcctgttagctggggacgcccaggccgagggcaaa

SEQ ID NO: 137999 - DNA, 122 bp, Homo sapiens
aataattctcgcaggtaacttttatgagaaggtatcttataatttattcaaagagtccaacgatactcttgaacagttaaacgggagatcaagacaatataagaccttcagaagaatttttt

SEQ ID NO: 138000 - DNA, 122 bp, Homo sapiens
atgtgtcttgtggcaattacaggtgtcttcaagcattgcctcagggacatgccaagggaacggaaaccagtcccagtaccctgctctgggagatgtggtcacagggttcggggtgttgagta

SEQ ID NO: 138001 - DNA, 122 bp, Homo sapiens
cttcactcctgaagccagcgagaccacgaacccactgggaggaaggaacaactccggatgcgccgccttaagagctataacactcaccacgaaggtccacagcttcactcctgagccagcga

SEQ ID NO: 138002 - DNA, 122 bp, Homo sapiens
gctattctctgctctggaggcttaagtgagacagagagtattggatgatgaggttggagacgaaggtggggtgaaaagcctcatattaagtacttggacttgaacctcaagtctaagtaatg

SEQ ID NO: 138003 - DNA, 122 bp, Homo sapiens
ctccctgcagcgttcctggataaccctggcatcctgagcgagctctgtggaaccctgtcccgcctggccattcgcaacgagttctgccaggaggtcgtcgacctcgggggcctgagcattct

SEQ ID NO: 138004 - DNA, 122 bp, Homo sapiens
ggttcatcatctctcgtcaagatgattaacgacatggacacacatgggtgagttaagaagcggaaagtttaataggcggaagaaaagagtgaggagaccagctctcagacatccttaaggga

SEQ ID NO: 138005 - DNA, 122 bp, Homo sapiens
cacatttttccccaagaacactttttgagaaaactattagaaaatgaacttcaggccaggcgcagtggctcacacccacaatcccagcaccttgggaggctgaggtgagcggatcacctgag

SEQ ID NO: 138006 - DNA, 122 bp, Homo sapiens
ttcagggccatggagaagcgtcttgtgcggctcagacagtgattgtgttttccagtttcccggttggaggagcgggagtcggagatgaagaaggagtacaatgccctgcaccagcggcacac

SEQ ID NO: 138007 - DNA, 122 bp, Homo sapiens
gaaagcaaaacacaagtaaatatgttcattccgctcttgcgatcggtgataaaccggaggcggccgaggccgacagaggtcagcaggccgctcgccacgggtctgcgagcggacactgccac

SEQ ID NO: 138008 - DNA, 122 bp, Homo sapiens
gctacagctgaaggaagaacgtgagcacgaggcactgaggtgattggctgaaggcacttccgttgagcatctagacgtttccttggctcttctggcgccaaaatgtcgttcgtggcaggggt

SEQ ID NO: 138009 - DNA, 122 bp, Homo sapiens
tatgagctgtaacactcaccgcgaaggtctgcagcttcactcctgaagccagcgagaccacgaatccaccgagagggaccaacaactccggatggaaggaacaactccagacgcactgcctt

SEQ ID NO: 138010 - DNA, 122 bp, Homo sapiens
cgcccttgagctgtggggcggagccgggcggagtccggggctcagaggtggagccagggccgacccctgagcctcgcaccaccgccaagcccccggactcacccgaggtcggccgcctgtag

SEQ ID NO: 138011 - DNA, 122 bp, Homo sapiens
gtgatggtaagactcacactccttactgaggcccctcattctctgcctcgtgtggttacccgcatctttcctgcccatacagccatgcgtgggtcagaggtgtaccagctccagcctgggtg

SEQ ID NO: 138012 - DNA, 122 bp, Homo sapiens
ctaagcaaaaagcctgttcaacatttgttgaaagaataaatgaacaggagagagggaaggcgagaggcattttgaaggactgagtttaaaaatcaactaccttgaagccggtcgaggtggtt

SEQ ID NO: 138013 - DNA, 122 bp, Homo sapiens
gtgggataagattgccctggtgacgcggagcggatctggacccgagcctaataaaggctgcgtaaataaaggtgtagttaataaaggacgggatggggcgcgcggttgccaggggcgccagc

SEQ ID NO: 138014 - DNA, 122 bp, Homo sapiens
aaccattagatcagtgactctcaaattgtagtccccaaaccagcagcatcagcattatctcggagcttgttagaattgcaaattctctgcccagcccagacctactgaatcagaaactctag

SEQ ID NO: 138015 - DNA, 122 bp, Homo sapiens
agtgggagggcggagggcgggggccttcggggtgggcgcccagggtagggcaggtggccgcggcgtggaggcagggagaatgcgactctccaaaaccctcgtcgacatggacatggccgact

SEQ ID NO: 138016 - DNA, 122 bp, Homo sapiens
ggaatacaaagataggtgcgtgcatgcttgctggtcacaggccctgcaggcgccatgtgccgcgctagacagccgaggctggcagccgctgctgagagacatgagcagttggctgtcaggtg

SEQ ID NO: 138017 - DNA, 122 bp, Homo sapiens
tcacacttcatttctgtccaccttctgttggcaaaaacttagctgtatggtcacactttgcgacaagggaggctgagaaatgtaatttgtagctgagcaggcatgtgccttgctttacttta

SEQ ID NO: 138018 - DNA, 122 bp, Homo sapiens
gcgtctgtgcctgtgcagcccacaccagtgcagcccggggccctctcagacctcaccacacgcgtgcccagcacatgtgtgcacacgcagatgcaggagagaacacacaccaccgtctcttt

SEQ ID NO: 138019 - DNA, 122 bp, Homo sapiens
ggaaccgcctccttcctctgtcgctaatggaggactaagatgggactgggagcaaaggagcgtctctgaatggcggggcagttgcagcatcccacttggcaagggtccttgaattacctccg

SEQ ID NO: 138020 - DNA, 122 bp, Homo sapiens
tgccaaacttgaattcctagtgattcacactagctggcccttcacaggcctcagagagcacgggcaggaagaggccacaggctccaggcctcctgatgcccctgcccccagcagccctaaga

SEQ ID NO: 138021 - DNA, 122 bp, Homo sapiens
aggagacacgaccatcgtcttcattttgacgattttgagtgggggttccaatgacttgaacgaaaggagccagggcaccaatccgggtttgtgtagcagatgccggtgagacccgactactg

SEQ ID NO: 138022 - DNA, 122 bp, Homo sapiens
gggagcgaagcagtgtggccgaggtgggaggcagccggcacttggctccagcttggtcctcgcgactccccaaaaccgtatataaatatatctcttataaaagccgagaggaagcaaatcag

SEQ ID NO: 138023 - DNA, 122 bp, Homo sapiens
ggtagtagggactcaataaagaaacacaaaggagacgaacacggcacgatcgccggggtccgcggctgctctgcgaggcccagcgcgccccaggtcgcggctccccggccgccagcgcacct

SEQ ID NO: 138024 - DNA, 122 bp, Homo sapiens
gcgggggctctccggcaattgtccccgaccctccgtcctggggagggcaggatcagcgcgcgggctgctttgcatctctttgcattttagtgatgtttggtccagtcctggcccgggcagat

SEQ ID NO: 138025 - DNA, 122 bp, Homo sapiens
cggctgaggtccaaggtttggagagtttccgggactggccgggtcaccctgcggctcggccgtgtctggcagccccacccttcctggcagccaggccctctgaaattccgccagcaccgggg

SEQ ID NO: 138026 - DNA, 122 bp, Homo sapiens
agttgaccatcaactcacttccatacagtgctttggagttcacaaagggcttacaaaatgcgctaagctcattttttcctcctccccatctctgaagtctgaaatatcattagccccatttc

SEQ ID NO: 138027 - DNA, 122 bp, Homo sapiens
cgcggccctcctcatccacccactgtttttctggctacttcttcagccacgttgtgcacgcgtgcatgtgtgtgtgtgtatgcgtgtgcgcacgcacgcgtgtgtgtgtgtttaggtggtta

SEQ ID NO: 138028 - DNA, 122 bp, Homo sapiens
ccgtggccctggccagtgcaggcacagcgggaagcactgggagctgcggtgcctgagtctcggtcctgtgctggagctggctgtgaggtgcccggaggtcgccccgggtggccctcaggtcc

SEQ ID NO: 138029 - DNA, 122 bp, Homo sapiens
gcgcgcggcggaggacgaggaagagttgtggcgaggcagatcctgccccgtggccgcggccgtctcgtaggtgcgggcggcggggcccacgggaccgcggcggggtcggccgggcgcagagc

SEQ ID NO: 138030 - DNA, 122 bp, Homo sapiens
caggtagggctctcatatcagtagcattcttgggaacaccctctgactgatctccaggaacgcatgcaaatgactgcataacatatgcaaatgactgcataacaacaggtacacatcttggc

SEQ ID NO: 138031 - DNA, 122 bp, Homo sapiens
gcccacctcctccttttcctggtaggcagggcagagcgcgtgcggcgggtctccgggcagcggtactgccgccccctggcggccgtacaggcagtggcaccaccagccgcctaacagctccg

SEQ ID NO: 138032 - DNA, 122 bp, Homo sapiens
gctgccctccccagtgggccggagggctccaggcggcaacagggagggcagcaccagtgacgggcacacctgggctgagggaactttgggcacccaggctctgggccactcagccactgcca

SEQ ID NO: 138033 - DNA, 122 bp, Homo sapiens
caattcactcccaaccataatgaataatccagtttagctgatcagctaccaacctgtaatcgcctgggcagggctcctccaaatgctgggtggggagccccggcaagcacggccgcagggag

SEQ ID NO: 138034 - DNA, 122 bp, Homo sapiens
agagaggccattctggtagctaaaaatactgtgtagacaggcagactgaggggcaccctacgcctgttttgaagattaagaattgttacatgctttggaaattctcagctagaagtacatga

SEQ ID NO: 138035 - DNA, 122 bp, Homo sapiens
atcggggaggcggcggcctcgcgcttcctcgcggcggacgggcgagagcgccccagtctccggcggcccctgctcggctcccctcgtgcccccttcgcgccacagaatggactcgcccgggc

SEQ ID NO: 138036 - DNA, 122 bp, Homo sapiens
catggctgatgtccggggctcggggttcgcgccccctttggccccccagacaagaccaggcgaggaagcacaggggcatccccaaatgacttaccgcagtctgctggagagaggcaccgaag

SEQ ID NO: 138037 - DNA, 122 bp, Homo sapiens
cgtggaggtttccacctctgagatgtggcagagcccctgagcctgtgtgtcccctcgtggcgtggcctcactggaaggtcaccgggcgtgggggtttgggcccggggcacccgcccacccgc

SEQ ID NO: 138038 - DNA, 122 bp, Homo sapiens
ggaggaagagagagtgcagttctagaagaagctcctccgtggttcagatcccagccccaccgtccagggaagttggcctctcctaggtttgcagcaaggatgaaggcagaaggccgggcaca

SEQ ID NO: 138039 - DNA, 122 bp, Homo sapiens
gcctcctgggagcttcattctcatgcaggaagacaatgaatagatgagaaaaacatttggcgcgtcagatgataggtgctatggagaaaaaaaataaagcagatagggatgaaaggagggct

SEQ ID NO: 138040 - DNA, 122 bp, Homo sapiens
gggtgacagcgtgagactctgtctcaaaaaaaaaaaaaaattcttagctgagtgcgctggcgcacacctgtagtcccaagtagctaggaggctaagagattactagagcccaggaagtcgag

SEQ ID NO: 138041 - DNA, 122 bp, Homo sapiens
cgctgtgtcccgtccctggcccccgagcagcgctcaccatctccggaccttctcgatggtcgccatcaccttcttgatgtcatccttggcccggctccgggtctcggcccgtacagtccggc

SEQ ID NO: 138042 - DNA, 122 bp, Homo sapiens
tgaaaactattcccgttacgccatctctgcgcgcctcacgtcagggccaagagcctagcgcgtagctttatggctgactcggctctggcgctctagccaattccgaggctgcaaactccgct

SEQ ID NO: 138043 - DNA, 122 bp, Homo sapiens
aaaagagtgagtgagttagagtgcgcgaaggagtagccaaagggagcgtcgcggagctgccgcggctgctgcgcacttctccgactccccgttttggagctgtagttcacccccttttatag

SEQ ID NO: 138044 - DNA, 122 bp, Homo sapiens
ccctccttccgggggttattctgaagaagtctcagaccctagacccagcctcccagaccccgtccccgagctcgcccggtgggcctgtaggccggtcctccttcgcccagaggagagcgcag

SEQ ID NO: 138045 - DNA, 122 bp, Homo sapiens
ccgtctgggggggcgcggtctgaacatggggcaccagtggtggagctgctggtctggggccgtggtctctgctgccgcctgctggggccgaaccgcactgcactgcggccccggagcctggt

SEQ ID NO: 138046 - DNA, 122 bp, Homo sapiens
gggtggcagcgtgctgactgggaacggctgctggagggatgggcgctgggccccggggaccgcgggaggacagtgggccgctctgggcgcacgtgggtggctggacatccaggtctgcgtgg

SEQ ID NO: 138047 - DNA, 122 bp, Homo sapiens
agctgctccaggagcaaccgtgtagcggactccacttcggcaactcccactttgccagcccgcctgtcacctccagctcctcagagcagctgtcgcgatcccaccatcagcgcagcgaccgc

SEQ ID NO: 138048 - DNA, 122 bp, Homo sapiens
catgtgaccggaaagggcactctgccttgtcgccatcttgagtgagggcaggagactgcccgagtatcatctgtcctacctttaaatattgaatttgggtcttcttctctggcagagattcc

SEQ ID NO: 138049 - DNA, 122 bp, Homo sapiens
ttgattcaaccgcagacccgggtcgccgccccctcccccgccttcctcttcgcctgagcccgcccgccccgggttccagccacccccacccgcggaccccggtggtgtcttctacctggtgt

SEQ ID NO: 138050 - DNA, 122 bp, Homo sapiens
taccctcaggataaatctaaatcctttaacaaaaaatcctcattgtgtggcccttacagtcggcctttcctccacgcacttcaggcttcaggcagaccagcttcctctgcgtctttggtcct

SEQ ID NO: 138051 - DNA, 122 bp, Homo sapiens
tgagagggtgggggacacagagagaatagagaggatgtgggaactgccagagggccggagcgcaggagttcaagtggaggaatgctggctttgagccctctacactgctggttgtatgacct

SEQ ID NO: 138052 - DNA, 122 bp, Homo sapiens
gcttcatcgctgtcaacatggtgcagagtcatgacaaattcatcacagttgggaaaaccacgcatttgccatccctgattatataccaactccctgtccccactccctttttaaaaagctat

SEQ ID NO: 138053 - DNA, 122 bp, Homo sapiens
cccatgggggccctacttgttctcagggaagaattgaagccgtgactggctgggagttgacggaatgggagcctacaggtgggggaccccaggccaactacttggcctctccgggccctggt

SEQ ID NO: 138054 - DNA, 122 bp, Homo sapiens
ggcttcgaccaaacatacaagttgagcctgttgacttctctctttgtggatgcacacgtgcgtctctgcgtatatttgtgcatgctttcccgaataagtcctcttttaaaactcagcctttc

SEQ ID NO: 138055 - DNA, 122 bp, Homo sapiens
ggaagactggggaaatggaaggaagtgtggcctgaaacgcttggggttttcccacggagccgcagcatttggttggggttgttcacattaaaggtttgaccccagtggtcccaaacccagac

SEQ ID NO: 138056 - DNA, 122 bp, Homo sapiens
cccgcgctgggccagctcacgcagctgcagcacggccagccccaccgtgcggtcctcgcgcgcgaagcagtagtccttgacgcacacctgcagctcatagcactcgggacccgcgtcggcgc

SEQ ID NO: 138057 - DNA, 122 bp, Homo sapiens
tagcagctctctttccgcaagctggtatcttgaacctggtgtaatatcccgggatgtcagcgtcgaaaggcccgaaagagcatgcctggttcaaccctactctctccaactcattttgcaga

SEQ ID NO: 138058 - DNA, 122 bp, Homo sapiens
gcttccgaagcaccacttcttcttttggaacatatcatctgtaaaatatcatgttgacttcggctgatagacactctctttgaaggcaggttgccactctttctccctcctctcttaggaac

SEQ ID NO: 138059 - DNA, 122 bp, Homo sapiens
aggctttccggagtatcttccatctgtcaatacaggctacaggactcagtggccctaattcgagaaccaaacgtcccccgccggtcagtcttttcccccagggcagtcccaagggcggcgag

SEQ ID NO: 138060 - DNA, 122 bp, Homo sapiens
gagcaggacacgcgcaatcgcccgccggccctgcctagggcagcggccgtcatctcggggcgtgcaagccgccaccgaggccccaggcggaacagaataggactccatgttcccaaaggccc

SEQ ID NO: 138061 - DNA, 122 bp, Homo sapiens
tcactactaggcggagttaaactatggagccggtacccccaataccctgcccggcaaggccgcctcgtgacgtccccgtctgacagagtccctccccatagggccgcgacagaaccaccgca

SEQ ID NO: 138062 - DNA, 122 bp, Homo sapiens
tgtctccagggacgggcggagaccagcgggtgggcttgggcagtacgcgcttttctcttccgactttgggccaaagccttgtccggagatcacagtgtctcgctcggggacacgccctctct

SEQ ID NO: 138063 - DNA, 122 bp, Homo sapiens
gcgccttgggactgggcctgaagagggaggagttattcattcccttaagctttcagggcccggagagaatctttcaatttgaggccaggaattcgaggctgcagtgagctatgatcatgcct

SEQ ID NO: 138064 - DNA, 122 bp, Homo sapiens
gctccatatttgcttaattaccttaaaccagtaccctgggtgtggaaagggacgattgagcgaagtcttcctcagactgcggttcacctcaccagagcgaaggaagctgcagcgggctccag

SEQ ID NO: 138065 - DNA, 122 bp, Homo sapiens
gtcatggtgctgtgagcccggcctgtgggcgcctgcccgggttgcagcggggagaaggagcgcagggcagaggcgacttcagccctgtgcctggagccctgcaggtctctgggcagtggagg

SEQ ID NO: 138066 - DNA, 122 bp, Homo sapiens
ggagcagagcctgtgccaagggcatctggtagcagtagaggcagatgagatggccggcgccgaagcaccccaccgcgacgcagagtctgctgaagccccgagtgctgatgggaaagtggcag

SEQ ID NO: 138067 - DNA, 122 bp, Homo sapiens
cagaagcggagagcaaggcggcggcggggccgcgcgctgggcgcgacgggagcgcgcgcccgcctggccaccccagcccaggctcccgagcccgggccctgcggcaccccccgcgccgccgc

SEQ ID NO: 138068 - DNA, 122 bp, Homo sapiens
gcctgaagaccccgcccacacgcagacaccatcccgccttccccggcgcggccaccgccccgccacgcccattggccagtcccgagctgagcatgcctatgaacatcgccgagtcctttccc

SEQ ID NO: 138069 - DNA, 122 bp, Homo sapiens
ttccagggagctttggagcttgggaattgctgatgagggactgcgggcgtgcacccctcacgtttcgcggttggggagagggagctcatccgaagtcttcggacagaggtgggcgtcgtgcc

SEQ ID NO: 138070 - DNA, 122 bp, Homo sapiens
ccagccccggcgagcctgcctccttgagcacgcccgtgggcgtcacgaagatgcccgagccgataatggtccccacgatgatggccacgccgttgagcagcgtgatgttccgctgcagggtc

SEQ ID NO: 138071 - DNA, 122 bp, Homo sapiens
gttcttagaactgtagctccattgaaactcattctcatggtgtcatttagaaagcaccaacgtcccataggatcacatgaaaacagagtctaaaggagttatcaaaatgatacttaagaagt

SEQ ID NO: 138072 - DNA, 122 bp, Homo sapiens
cctccggagtctgccgggtgacggcgccacaggccgcgcgcccccgccccgcgcgcgccgcgccccgccccgcccagccccgcccccacccgggctccctgaggggccgggccgcgcgggtc

SEQ ID NO: 138073 - DNA, 122 bp, Homo sapiens
cacggttcagatcccatgctccctctgtttcacagctgccagagacagactcagggattccgggctttggaagaaggtcagaccatgacctcctatctcctgttctcttctcccctcactca

SEQ ID NO: 138074 - DNA, 122 bp, Homo sapiens
tcgctccgggtcctggtgttttcacatagcagaggagagtgccccaagcctggcgagcaccgcctgtagccgccagcaacaccccccacctccgttacgcaggaatagtcccagccaccatt

SEQ ID NO: 138075 - DNA, 122 bp, Homo sapiens
aaaacctgtatacacattggattttagaaattattattggaggccgggcgaggtggctcacgcctgtaatcccagcactttgggaggccgaggcgggcagatcacgaggtcaggagatcgag

SEQ ID NO: 138076 - DNA, 122 bp, Homo sapiens
attctaggtccaagaggagacaggaccaaccgaagtgaaggattttataggccagctctacgtaagactggaaagttaagcctatagtccatcctggcagttaaaaatgcagcaaaggccgg

SEQ ID NO: 138077 - DNA, 122 bp, Homo sapiens
gagggtcacagagctcggtcagcgcggaaagctgaggggaacggagggcgaggggcacgccgggcccccgagggacaccgagggaagtccttcccgaacatctccgccccggcggtggtggc

SEQ ID NO: 138078 - DNA, 122 bp, Homo sapiens
cgatgagaacatagtgagcagaattgcaggcctgcatgacctcaccttctgtgaggagtccggcctcccaagacgctttcctgcctaggtgcccggctcagagtgtcccctacaaggctact

SEQ ID NO: 138079 - DNA, 122 bp, Homo sapiens
acaaatgacccattcaaaacagttcagttgaaaagagtttatcaaaggaatgacttaacacggtgtggccacagtaagggaatcaacaaggaatggtgaagcacccagtaactagcaacagt

SEQ ID NO: 138080 - DNA, 122 bp, Homo sapiens
tgccagaaatacccccaactcccatgaccctcgcctaggactcgcaaacctggtccccgccgcccttcctcgcatcaacttctaccaggaaagcctccgggggccgctccccgccagcctcc

SEQ ID NO: 138081 - DNA, 122 bp, Homo sapiens
cacaatagttcctggacttcctgcctctccggagcccacgaaatatacatgaaatggtttcgtgccacctgcaaatgaaaaagtcaaataaaatttatagtttggaggcagatttccaaaaa

SEQ ID NO: 138082 - DNA, 122 bp, Homo sapiens
tgttcacagaggccggcccggcaaaggagagagggcgagctattgtccagggctgggctgcgggctgcaggaatgtgctggaatgccggcccgcatggcacagtcccagagcggggcctttg

SEQ ID NO: 138083 - DNA, 122 bp, Homo sapiens
cgagctacagctcgtttctgcggagccagaggtggccgcactggcacgccaggctgaggacgagttcatgctcctggcctctgatggcgtctgggacactgtgtctggtgctgccctggcgg

SEQ ID NO: 138084 - DNA, 122 bp, Homo sapiens
gcaggccccactcaccaggccagcaaaggaaacgcaatgcgtcccgggcaaaccaataagcgaaagcatagtgtgtagaggctgcagaataagacgaggaaatctctccaaatacagcagga

SEQ ID NO: 138085 - DNA, 122 bp, Homo sapiens
cgccttaaaaccctgctgtttgtccagtcccggagcaggcgtgtgacctccaccgcgcgacgcctaggtggctagggcttcctgcctgccgggactgaactttctctagccaggagcagcca

SEQ ID NO: 138086 - DNA, 122 bp, Homo sapiens
tcagcgtggcggcgctggtgctggcgttggccctggaggacggccccgagtgatggctggcgcctgcctcccgggtgtctcccgggtacagatggagtcgtcccgcggccgccggcggcaag

SEQ ID NO: 138087 - DNA, 122 bp, Homo sapiens
tgcactccagcctgggtgacaaagcaagactccatctcaaaacaaaacaaaaaaccacaccgaaaatgtgcttgacggaatcctatttcgtgagtgagactgttgccaaaaggttggagaaa

SEQ ID NO: 138088 - DNA, 122 bp, Homo sapiens
gaaccaagaaggcgtctggggtctgcggtccagacccctccaactctccccaccccgggtcggtgtttctatggcctgggagacaaggggaactgctcaccgactgcacaacgccaggaaca

SEQ ID NO: 138089 - DNA, 122 bp, Homo sapiens
gttttcgggcgagggtctggtgctggggagcgagcgcggagcgaggtgtctctttaaatacgctctgcagtgtgacggcggccgcccggctggaagagccatccccaccctgcggcaggagc

SEQ ID NO: 138090 - DNA, 122 bp, Homo sapiens
gcaggcatcacaacctgcttctctctcttcccccttcccccttccctctgtaggagtccccggtcctgacaacagatgtcccttccatcagcctgcagcagacgcccagtagcaccttgaca

SEQ ID NO: 138091 - DNA, 122 bp, Homo sapiens
ccatgcgaaggagctaaggacacaaaggtgagcagcagagacgcggttccagctctcccccggctcccactccagcgggataggtagataatttcggtaaatttcgccaagcaggggcagga

SEQ ID NO: 138092 - DNA, 122 bp, Homo sapiens
aacattctctcagacagcatgctccccctgttagaccatgactttagctctctggcaccgcgcagaggcaggaagaagcaaatatgccttttgctcctccgcagatgtctgccagcccagca

SEQ ID NO: 138093 - DNA, 122 bp, Homo sapiens
gagctttttagggaaaatgtgcctctgccagctggaggaagtgtgggtgtaccggggtcccggtgacaccttgtgatgtcagtcacccccagcctgaggttgattggctatgaagagctgca

SEQ ID NO: 138094 - DNA, 122 bp, Homo sapiens
gaagacagtttaactacaatacctctccaaacaaggactgcaagatggacacttgagactcgcgacaaagcaccacgttttccaagtggggcattctggcaggcaccaccgcagaggccagt

SEQ ID NO: 138095 - DNA, 122 bp, Homo sapiens
ggtaaaagcatattaacttttgaaacaaacgaatcccaccactgcagttaacacagcacacgtttttttctgcctcagtcatccaaatgagaatgtggtgctgcctgctcctcagagtcatt

SEQ ID NO: 138096 - DNA, 122 bp, Homo sapiens
acttgggatttcgcagttctggccctcgggcccgcctcggaggcgcacccccaatccccacggaacgaattccgcggctaaaatgcattttcccaaggcagtaaaagtgacccctgcaccta

SEQ ID NO: 138097 - DNA, 122 bp, Homo sapiens
ctgctgagctttactgtgggaagagggggaggtgaaggaaattattacaaaatttttgtacgtgatgaggagacagcctctggacttccccaaatatttccgtattccctaaaacagctcta

SEQ ID NO: 138098 - DNA, 122 bp, Homo sapiens
tttccccctcgcttggttctgcccctgctccccctgcacaggcctcacagtgcgtctggccggcgctttatagctgcagcctgggcggctccgctagctgtttttcgtcttccctaggctat

SEQ ID NO: 138099 - DNA, 122 bp, Homo sapiens
ctggtgcgtgcgtgtgtgtgtgtgtgtgtgtgtgtgtgcgcgcgcgcgccctcgagcgcgcgttggggcctggcaagacacactcaaaccggactgcctgacaaatccccccttttcatcct

SEQ ID NO: 138100 - DNA, 122 bp, Homo sapiens
tgtcagaaagtgctcataaatagcatgccccttgcgaagacaggcgagtctgcagacggccgtggctcctctgttcttcccgaggctacagcaacaggttcattctgggatgggttgggggt

SEQ ID NO: 138101 - DNA, 122 bp, Homo sapiens
tcaaggactgggaagggtcttagaagttatagtgcaaccctcttttttacaatgttctgacgctcagaggaggggagccactagcagttcacaaagcaagagagaggtggagtcaggctgac

SEQ ID NO: 138102 - DNA, 122 bp, Homo sapiens
tgggtacacccacacaccacacacacactatgctaggtcaagtccgaagagatctgaggccgggtttggggcgcacgtggatggggaagataaaacaaatgagctacagggaagatggttag

SEQ ID NO: 138103 - DNA, 122 bp, Homo sapiens
ggcgcacggtccgttgttcatttgccattcgacctccgccagggcctggtcggacggaaacgctccgccggctttattgtcgcttcgttatgtggcggagccgagcagtttagcgtgcctct

SEQ ID NO: 138104 - DNA, 122 bp, Homo sapiens
agagcgagagcgtttccatctgtgctgcgagcgggaagagcctctctgtgctccccggcacgtccagcgcgcgggcgggaacacgctctcctgtggggggcagctttcccagggaccttgcc

SEQ ID NO: 138105 - DNA, 122 bp, Homo sapiens
ggactttggtggctacagcgccctctttagccagaggccagtagcacaggtcaataagggcgtgtatgcacccttcagaattcaaacagtgaggcacagggaagtccctctgcccgatccgc

SEQ ID NO: 138106 - DNA, 122 bp, Homo sapiens
tgccagtaggcatttgcagtcctttttttcttttttttttgacttggagtctcgcgatctcggctcactacaacctccgcctaccaagttcaagtgattcttgcgcctcagcctcctgagta

SEQ ID NO: 138107 - DNA, 122 bp, Homo sapiens
agggaagcattgcgtgttccggtggcctgggggctccccttgggggtgaaaaagggagggcgattccaggtctgcaagaagtggtgggcagcccagagcatcctgtttgttggagtcagggc

SEQ ID NO: 138108 - DNA, 122 bp, Homo sapiens
aaaaatgtttcgtgtttacaaagataaacggcctctttacccagagatcaaaacctcaaacgacaagggggaagataaaaccgccctcccccacatcccctgagctgacccttgtcatctta

SEQ ID NO: 138109 - DNA, 122 bp, Homo sapiens
ttttagatgcaaatactcttctgtactcactttgagacttgctgaactctcatgctctctcgctacaccagaattctgcttatgtggcatcataaaggctgtatgataatgaggcaacaagg

SEQ ID NO: 138110 - DNA, 122 bp, Homo sapiens
acagcacagcgctcggcacagcgttagggacagaagtcaccgttgttgagcccagggcagcgatcccagctggctcggcccccgggaagggaggagaaggaccgggtctactccccgagggc

SEQ ID NO: 138111 - DNA, 122 bp, Homo sapiens
tcatctccattatctttacagtcatcttctccatcacaaacccagttttgataaatgcatcggccactggggcaagtgaactggtaaccaccgcaggtcggatagtctggaataaagcaaca

SEQ ID NO: 138112 - DNA, 122 bp, Homo sapiens
gggccgtattcggacaccaccagaagttcctgtcggagacgctaagggtgcccacggtgtcgggcaccatgtaaagctctcctaactctaagcagactgcagtttcatgcacatcataaggg

SEQ ID NO: 138113 - DNA, 122 bp, Homo sapiens
tgccgccggacgcctccattgtttgaccacaacaagggccggattctcacccaggtaaaccggctgccggcgctgtccacttccctctgactcccgcctccgcaggcgttctcaccccttcc

SEQ ID NO: 138114 - DNA, 122 bp, Homo sapiens
ccgccaaaccgagattagcaaggaccaggaccttaatataaacccagctccccattttcccgggtttctcatgcttccctaaactcggtcgccccctacagccccctgcccctgggttcttt

SEQ ID NO: 138115 - DNA, 122 bp, Homo sapiens
ggtcggggcatgacatcaccaggcctagcattcattggccacgcggctggcaggtgggagcggcctggctcgggcgcccccagcctgctccgaggggcctgacccgcgcagattgccccccg

SEQ ID NO: 138116 - DNA, 122 bp, Homo sapiens
gaaataggagaagaaaaaaggcaaatcaaaacagactgtcccaggtctcagagaagtcatcggagcgctttttcctgctgaattcaccctaggagtttgtgagttcctagttttcttggact

SEQ ID NO: 138117 - DNA, 122 bp, Homo sapiens
cgagggtggcttggagcggggttgcattttgatctctcagtgcctctctcccatggggggcgagagcgcgagcagcccacgttgggctcggattggcattctcctgactcccgcccggaact

SEQ ID NO: 138118 - DNA, 122 bp, Homo sapiens
agctctgatcgagagcctggccggccccctggggatcgggcccgaaaatggcccaataagcggagaagaaaagaggtgaggttgtcccttaaaactctttaggcagaatgtatttcccacag

SEQ ID NO: 138119 - DNA, 122 bp, Homo sapiens
cgcatggatcctcacatttgaaggggttctcattaagcagtttctgaatcagcattagaacgatgtttgacatatccattttctgggagtccaggtgttggttctccttttgacaggtggat

SEQ ID NO: 138120 - DNA, 122 bp, Homo sapiens
tgttccaaggtccaaaaggcaagttcaagaatgtttctgttaagtgctgaaaaggaggctcggcctagcatgagactctgggccagctgctttgaggtgtctatagctggaggaagcttcct

SEQ ID NO: 138121 - DNA, 122 bp, Homo sapiens
cagcgggtcgtcttccgtggggatctccctccggcgcccctggctggttgtcagtcctgccggctacacctgggccatcgcttgggctgcttttggtctggcccttggaggaaacgggtggt

SEQ ID NO: 138122 - DNA, 122 bp, Homo sapiens
attacctctaggaaggaaatgtaaagtcagctcttgtagggtgcctccaggcccctgacacgtggaaagatcgtgcaggagaaaaccaacccagaggtcagtggaggtggagaggaagttgt

SEQ ID NO: 138123 - DNA, 122 bp, Homo sapiens
cgactccctcatcattttgaagcaaatcccagacatggcatcacaaaacgccatctttggcggggcgcagtggctcacacctgtaatcccaacactctggggggctgaggtgggtggatcac

SEQ ID NO: 138124 - DNA, 122 bp, Homo sapiens
tcactacttcggataggaaggaactgatatttttttagcatctgccagatactttataaacgtaagttcatttaatggcttagcacatgaggtggatatcacatggccccattttacgatga

SEQ ID NO: 138125 - DNA, 122 bp, Homo sapiens
aaataagcaaggtatccaaaaaggcatctcacagacaaggaaaccacatggctagaaacacgtggaagtccgcttcagcacatcaagagattaaggaaatgcaaattagggtggctttgcgc

SEQ ID NO: 138126 - DNA, 122 bp, Homo sapiens
ccttgagctgctactctgaggtcgtgtgcctgttgtcatcttttaaagcctcagttttgtcgccatttcccaggtgacctctagcacactcaagtttgagaagcgctggtgtggttcaggag

SEQ ID NO: 138127 - DNA, 122 bp, Homo sapiens
gggcgaggcagggaacacttacccagcagtagcacgttcttccccgcagggagcttggagcgcgagcgggtggagacctcgctgaggatgcaggacctaacgggaagcaaggcgtacggtga

SEQ ID NO: 138128 - DNA, 122 bp, Homo sapiens
agctcatggtggcctctttcggtggtggtcgcctatgctccgctgcagagccgagagctgcgccggggctggggtgggcgggggggcggcggggagggtggccagcccagtccctgacattg

SEQ ID NO: 138129 - DNA, 122 bp, Homo sapiens
gtgaggaccggcacggtgagcgcgaggctgccttcgggtgtgtccagcagcggcaccgtgcgggtgtgcagcaggttgcccgcggtgatctcacctaccagtgtggcccagcccagcgactg

SEQ ID NO: 138130 - DNA, 122 bp, Homo sapiens
tcgccccaggctcccacacttagaaaactaaagggaacgcctaacggagcgatggatctccgtgttcccagcaaagcagggagcacggagagtcaaagctaacatagagcccaaccgacgct

SEQ ID NO: 138131 - DNA, 122 bp, Homo sapiens
cggggggttggggtggctggaaccttagatggtcccatcctgttggggggcttcctgggccgctttgctgctcccaactgtggaaggttctctcttgccttccctttcctgctgttagaagc

SEQ ID NO: 138132 - DNA, 122 bp, Homo sapiens
ggtctgacgtccccttgtctctgggttctctctaggggtcccggggagagagagtgcctgcgactgccctcaccttccgggcagaagcacccgaaggtgcaggagctggagcagctgtgctg

SEQ ID NO: 138133 - DNA, 122 bp, Homo sapiens
aaataaagccaaacaaaactgtttctaccgctgcggtggatgattttttaaaggcatctccgcccaaggatgctctgccctcgccctcttcctggctctccaggcaagaaacgagagtccct

SEQ ID NO: 138134 - DNA, 122 bp, Homo sapiens
tttcaaggataatttcactggatatagaattcccgtatttttctctcagcactttagagacggcgcgcctcagctgccttcgggtgtcactctgcaggtcatgcattcccaccccgtcctgt

SEQ ID NO: 138135 - DNA, 122 bp, Homo sapiens
tctctccatagataaggaatatcttctgatcgtcattcagaatccatgtgaatagacctgcgatggccaaggctgtttaagcgacactgggttggaaacacttggctctctcatgagtatta

SEQ ID NO: 138136 - DNA, 122 bp, Homo sapiens
tgatggtttcttggcttgaactgatcaagttctccatcatctgaagttgtgctttgaggtcgaccacttccgtatgaggcacgattcgttggcattcttcacctgcagcaaccgctgtggga

SEQ ID NO: 138137 - DNA, 122 bp, Homo sapiens
ccttcagacaatcaggggccccgtgtggggagggcgtatgctctcggcgggctagagcgccgctaaaacgcgctcttcgttctacttggaggacttgttccagccagcgtgagtgcgcgagt

SEQ ID NO: 138138 - DNA, 122 bp, Homo sapiens
ccagggcctcaaacccggaggcccgcgagctgcgcgggccgtcagcacccctagccccggcgcggcggcgtgcgttcccgcctttgtccagctctgggttttcaaaccttgccccgctgaac

SEQ ID NO: 138139 - DNA, 122 bp, Homo sapiens
tctgattgctgcccgtcagcagcttcaccgcgagctaatctggactgcagtccgacctcccgggctccctcatgctccacgtgattgccatggtcaggaaggcaggaagcaaaaaatgcagc

SEQ ID NO: 138140 - DNA, 122 bp, Homo sapiens
gcgaggaaaaaatgggccattgcccgagcgatcagtccatataaggctgggctccactcacgaacctggggaggcggggagagggggagaaagagagggagggagggaaagaaagagggagg

SEQ ID NO: 138141 - DNA, 122 bp, Homo sapiens
taatcaacaatttgttcctgatatatctagatgagccagtgagacaattataagtaataacgggaagaacaataccagagtaaaatcaaataggaagaaagtggtaggcgtatttacactaa

SEQ ID NO: 138142 - DNA, 122 bp, Homo sapiens
gggtcatgcctggcctctgggatttgggggtcacgctgcacatctgggatttgggggtcacgccgggcctctgggatttgggggtcacgcccgacctctgggatttgggggtcacgcccggc

SEQ ID NO: 138143 - DNA, 122 bp, Homo sapiens
cacgcgcgccgcgtcgtttacgcggcgatttcatcatgctccgagccgggcggcgcgcgccgcttccgtcgccaccctctctggacagcccagggccgcaggctcatgccctctccgcgtcc

SEQ ID NO: 138144 - DNA, 122 bp, Homo sapiens
caagtgaattatgctaaatgaaagacactagacccaataagctacatacagtatttatatcggcattctgggaaaggcgaaaccaaagggacccaaaactgagctgtcaggggcttggaaag

SEQ ID NO: 138145 - DNA, 122 bp, Homo sapiens
tgtcacgcgtgtgtgctgatgtcacgcgtgtggatgtcacgtgtgtgtgctgatgtcacgcgtgtggatgtcgcgtgtgtgctgatgccatacgtgtggatgtcacacgtgtgtgctgatgt

SEQ ID NO: 138146 - DNA, 122 bp, Homo sapiens
ggcttcctcctctcctgttgtcagttgggatcagctgatcggagtgaacttctcccagctcggactaacaggaaggcgtgagcggtgcagcccagaaagggaggagcgagagagggaggatc

SEQ ID NO: 138147 - DNA, 122 bp, Homo sapiens
ttctgaaatgaaggatcctcaggttgtgatggctctaattgctaaaaggtggcctgttcacgacattcttgtgatttacatttttaaataccctctcctttcattaggtggggatttatctg

SEQ ID NO: 138148 - DNA, 122 bp, Homo sapiens
agaatcctccatttgtgggtagacccggctggtttacagagttttctccaagagccgacacgactttccagctgtgctggggtcccctctaacagcagagaggtgactgtgaccattcgcaa

SEQ ID NO: 138149 - DNA, 122 bp, Homo sapiens
ggtgccacagagcttggagctgtgagtggactgctcagccaccccagccggggcgggcggcgggcgctctggggaccctccttgaccagtccttcgttcctttcctttcccagggctgggga

SEQ ID NO: 138150 - DNA, 122 bp, Homo sapiens
ccctctcctcttctctgggtggtgctgacgccttcttcccaggctgcacctttgctgggccggaggatgcccccggcagcggagcgccagagtgaccaggcaacctccccagcctccaccct

SEQ ID NO: 138151 - DNA, 122 bp, Homo sapiens
cctggtggagagagaacagaggagaggaagggtaggtcagcccctcttgcccctccccaccgcaaatcacacaggcccacctccccggagtgggtttagggagtctgcacctcccagtcccc

SEQ ID NO: 138152 - DNA, 122 bp, Homo sapiens
cagggctgcaaaaccgccaggtagagaaccgctaccatgcaggatgctaccatcaaagtgcgcccacagcagcaaccttggagcaggcaggcaagtatcctccaggctactttgcagacggg

SEQ ID NO: 138153 - DNA, 122 bp, Homo sapiens
tctatcaagacagaaagcagatgaatggttgccaggggtctgggagcagcggctgtttaacggggacagaccttctgtttggggtgataaaaaagctctggaactcggatagaggtgacagt

SEQ ID NO: 138154 - DNA, 122 bp, Homo sapiens
ggaagcgaagacacaggccccactgccgcacagtggagcgggacttgaaccaaaattcgacggcttccaaacccaacaatttttcatactaagcgctcaaacatcaatactaataataatag

SEQ ID NO: 138155 - DNA, 122 bp, Homo sapiens
aacaaaaaatcaatggtgctggagcaagaagatctcagcctgtgaccctctagagggaagcgctttctgttgtctgaaagaaaagaaagtgcatctttttagaggattacagtttgagaaaa

SEQ ID NO: 138156 - DNA, 122 bp, Homo sapiens
gaaagtcgaattatgctgtttgcttggacaccataccactgaacaaactccacagagtctcgccatctgccagcgggggcgccgtccaaactcacggcaaataaaaggcatcaggtgctcac

SEQ ID NO: 138157 - DNA, 122 bp, Homo sapiens
ggacggggccccggcggttcagacccggaggcggctcctcccggaggcagatcctcccggcgtcggccttcggtcctccccgccaaagccctcttgggacaagccggggattccccgccgcc

SEQ ID NO: 138158 - DNA, 122 bp, Homo sapiens
agcttgaaatccttagcgatggggacaggtgaggggacataccttaaaattctcccaaatcgacccgggatgtgggccatgcctccagtggcctgagatgccaacataaagaaaagaaaaat

SEQ ID NO: 138159 - DNA, 122 bp, Homo sapiens
ggtgccgcagccacacggtgtccacgaaccagctgggcccaaagccctcgcccgtgtgcccgagccggagcttatagacctcgcccacgtcggccgcctcaagctgttcaaagggcagggca

SEQ ID NO: 138160 - DNA, 122 bp, Homo sapiens
ccccattgagctgtctcatgcgcaggttaatggagccgtaggtcttcctggagcccttgccggggacgaaggtcctccggcggtacagctcgcccttgcacagggagaccatgagcagcacc

SEQ ID NO: 138161 - DNA, 122 bp, Homo sapiens
cctccgctggctccttcttgaagatggcgccctcctccttgttcgcgtcctcggccttctcgctggctcctgcccgagtccctagcccctctgcaccacaggtttctggggcttcgtcccgg

SEQ ID NO: 138162 - DNA, 122 bp, Homo sapiens
gaggaggctggcgagggcacctcgttctcggttttgggcactgtagcagagagatgcacgcgtacatcaccgtgtcctgcagcccctccatcctgctgcccctccctccttccagcaactcc

SEQ ID NO: 138163 - DNA, 122 bp, Homo sapiens
cgcaggccagacttttccaaggactctacgtgttctgcggagcgggaccagcctgcgctgcgctctcgccccaaggatcgcagaggggccaaggcaggaagctgcaccctggcgatgtggct

SEQ ID NO: 138164 - DNA, 122 bp, Homo sapiens
gtgtgaaaaccctgcactgcgtttgtgatcctgcctgctttccctgggcacgtgttgctgcgtgttcacgcaggggagaggatggggaattccatatgtgaccctgccagtcacagctgcat

SEQ ID NO: 138165 - DNA, 122 bp, Homo sapiens
cctcccgctggcggcggcgggctgtgaggacggctcgcgtgagtccacgtgtaatcggcccgggcccagcactggcgggactgacgcagttcttctacctgctttcccaagggcgacactcg

SEQ ID NO: 138166 - DNA, 122 bp, Homo sapiens
caagtctctcctctgtccagctcaattgcctcgtgtctgagtctgttcaggctgctagaacggaataccatactgggtaatttataatcaacagaaatttatttcccacagttctggaggct

SEQ ID NO: 138167 - DNA, 122 bp, Homo sapiens
cgtcggggtggtggtcacccccagcgccctgaacctgcgaaggcccagtgtaggggtgagcgcgcaccggctggggggacgttggagaagccaagcagaggcagccgggcgcgccttcctgc

SEQ ID NO: 138168 - DNA, 122 bp, Homo sapiens
cggagagaaagccgcagcttccttccacctcgcgccgggcccgcggccgcgcacggggaccgctccgagttcctcccggcgggaaccccccgccccagaactttggtctcgtcccacccacc

SEQ ID NO: 138169 - DNA, 122 bp, Homo sapiens
cgcccttcttatagctgctcgcgcagtgggggcctccggaactgaccaatggggagaggccgtgcgggggcgtgcccagggggcgtggctccaggcttccctcgccctctccttgagctggc

SEQ ID NO: 138170 - DNA, 122 bp, Homo sapiens
cagccgaggctgcctcatgggtgtgtggggatgggggtggtggctgcccccatactcccccgtactcacgggagaaggtggggagcccagaccttgtgtgctgctcttttctctgtctctga

SEQ ID NO: 138171 - DNA, 122 bp, Homo sapiens
gggccactttgggcatcttcaaactgggcatctgcaccttggggaggtgccctttgaagccggctccctcgggaagggggccctccgggagtttcacgttcacttggccagcctggacctcc

SEQ ID NO: 138172 - DNA, 122 bp, Homo sapiens
agagttgtcagcgtaaggatgtagaacattgtcatgaaaataagtcaggagagccctgcacgtcagagccaaggaaaatagtttagaatcttggaacaataccagccttcaaaatggggaaa

SEQ ID NO: 138173 - DNA, 122 bp, Homo sapiens
ctgccctgcactgccctggaccacgaggctgcccaccccagacaggtgggacccctttcccgcatgcagactctgagcagcagcctcctgtgacccccaccgcgtcctgctcctcaggctca

SEQ ID NO: 138174 - DNA, 122 bp, Homo sapiens
gtagggatgttgctctcctatagccctaataattatagcagggcccaagacaagtcttcccgagccccactgcagaagcaagaacggggcccctctcaggcctggcacaggtctctgtcatg

SEQ ID NO: 138175 - DNA, 122 bp, Homo sapiens
gaggcagtccctgctgtgcacctgggggtacaggtacgctggggccggggctgggcggcccgcggggagtggggagtgcttggggtgggtgcagggcgggttggcgtcatctgtgggctgca

SEQ ID NO: 138176 - DNA, 122 bp, Homo sapiens
gccaccgcgaccgggaaacaaagacacattaccttttattttttgcgcttccaagggatccgaggaacttctggctgcaagcggctggtaccccggaacgggcgtcccattcgcccgggcga

SEQ ID NO: 138177 - DNA, 122 bp, Homo sapiens
acgtgtcagaaagccacggtgaccaccaccccgccagggaggccagaagaagttctgcggcgacaattctctaaagcagggcttaagtccaggctcggtactgacagccgtgtcccttcttg

SEQ ID NO: 138178 - DNA, 122 bp, Homo sapiens
gcgcaggccccgccccgcccccaagcccaggctccgcctcggaacgtaatctcctccctacgcccgctcttgcctccagccccgccatcttggatccgggcaccgttcgggcgcccgccctg

SEQ ID NO: 138179 - DNA, 122 bp, Homo sapiens
tgtcctttcagtgtcacccatcctttcagtggcacaagtcagaagttctggggtcatttccgatacacccgcttcctcaccacctgcccatcacctcaagcccatcaccaagccaggcttac

SEQ ID NO: 138180 - DNA, 122 bp, Homo sapiens
gcgagcacaacggtggtcaccgccgccagggaaccgcccgctcgctggggtccaggcgttcggggccaaatgagaatgtctcagacctgtccgcaatggaggcagcctgcttaattcgaacc

SEQ ID NO: 138181 - DNA, 122 bp, Homo sapiens
caggttcaccaggaagctgtgttatttaaactcggatggtctaggagaactgtagacttccgggtgctagatgattcctgctctggaaactcaccgagccatttcagctgcgctctagagga

SEQ ID NO: 138182 - DNA, 122 bp, Homo sapiens
cttgcatctattaacaaatgcatttcctcattgctgggcatttctgattgcctacataggcgtctggtctttgaattctcctttgaaccagtttaacaccttagggtttcctcattaattgg

SEQ ID NO: 138183 - DNA, 122 bp, Homo sapiens
ggtgggtcgggcaggaggtgtgggttgggcaggctggtgctggcctcacccaggtgcagccgctctcgggggaattcccactggctggcatcgtaggacaggtattcgcattgctcctccag

SEQ ID NO: 138184 - DNA, 122 bp, Homo sapiens
ggcactttgtttctacaagggcccgtttccatttccttcctaaggtttccttatcccctgcggcaggaggggcccgctgggctcgggttttcagctgcgttggagctgcagaggctgcggag

SEQ ID NO: 138185 - DNA, 122 bp, Homo sapiens
ggcgcccggcgccgaggccgcgcccgtccgcccgccgcccgagccgccgcccgccctggacgtggcctcggcctccagcgcgcagctcttccgcctccgccacctgcagctgggcctggagc

SEQ ID NO: 138186 - DNA, 122 bp, Homo sapiens
cgctgctcacaaccgacatggataatccagaaaggactggccctgaactgtcccagctcacggcgctcaggagcgttgaacttgaggagtccagtacagatgaggacttcttccaaagcagt

SEQ ID NO: 138187 - DNA, 122 bp, Homo sapiens
cagtcattgttacagtcacacatacctggaagaagcaatggtccctgcatttctgtggtacgggtatcccacgccagccagccctggaagctctctactgtgccgtaagccaaccacctttc

SEQ ID NO: 138188 - DNA, 122 bp, Homo sapiens
ccaagagcagatctgatcgatggcccagaccttaggccccaactctgggactgacagctccgggacagtgcccacccagcccgcgcttttctcccctctaaccctcaaggcctggtccctgg

SEQ ID NO: 138189 - DNA, 122 bp, Homo sapiens
ggctggatttgggggaggaatattagactcggaggagtctgcgcgcttttctcctccccgcgcctcccggtcgccgcgggttcaccgctcagtccccgcgctcgctccgcaccccacccact

SEQ ID NO: 138190 - DNA, 122 bp, Homo sapiens
ttcactgctatctattaggagaaactgccacttttagcaacaactaccctgattagtcagcggccaacagcacttgagtccagaccttccaacagctaaaagactgtaactcactgcaggct

SEQ ID NO: 138191 - DNA, 122 bp, Homo sapiens
cctgggggcaggtgtttaggtcacgggcgtgactccctcaggaatggcttgagccatccccgtggtgaagagtgagctctcactctgggttcctgtgagatctggtgtttaaacgtgtgtgg

SEQ ID NO: 138192 - DNA, 122 bp, Homo sapiens
tcaaagacataacagataaggtgcttcaaacacacaagctccctgccaagtgggctatggcggtgtgcacctgtgtcctagctacccaggaggctgaggtcggaagatcacttgagcccagg

SEQ ID NO: 138193 - DNA, 122 bp, Homo sapiens
gcccagcgcccgctcggtggcctcccagtcacccaggtccacgcacacgggttctatccccgggcactgtgtgtatcagggggcagttaccagaggctctgtgcccagcaagcggcacagct

SEQ ID NO: 138194 - DNA, 122 bp, Homo sapiens
acccagggcgcggactgtctccaactcgagcatctctgtccctagcggcggcccctggagcggggagaaacagaactggctccatcctttgaacagcgggtacaagtaatgctgcagaggat

SEQ ID NO: 138195 - DNA, 122 bp, Homo sapiens
cgagccgaggacccctgcggggcaaggggggctggtggaatctggcggtccccagctgcccgtgtcccgggtcggtgcgctcggcgcacccgtggtgacagtgcccggcgtctgctcccacc

SEQ ID NO: 138196 - DNA, 122 bp, Homo sapiens
gaagaagttgcacctcagagctgatcatgatcaagttaaaaacaccagacatacattatacgtctaataaatttccttcaggtcatgaccagcatgaaaaaatcagacacagacactcagca

SEQ ID NO: 138197 - DNA, 122 bp, Homo sapiens
gggaaccggggctgtgcgcggggcttgcaggccagctagagttccaggtgggcctgggctcggcggtcccgcactcggagcggttggggggtcctgctggcccacggcagtgcggggcttag

SEQ ID NO: 138198 - DNA, 122 bp, Homo sapiens
gcagctttgtttataattcccaaaacctgaaagcaaccaagaagtccctcagtaggtaaacggataaacaaactgtggcacatccatataatagaatattattcaataataaaagcaatatc

SEQ ID NO: 138199 - DNA, 122 bp, Homo sapiens
aagacaccaatcttcagaggcagcgtagggaattcttacccatcgaagaccgtgaaccaccgcaggtccgatcggggagttccagcccctggcggcgcgctcaaccccaagtcagccctgca

SEQ ID NO: 138200 - DNA, 122 bp, Homo sapiens
tgcgggagctccacgggcaagctgggtttcacgctccctgtcttctaggtctcctgtgggcgagttcctcctagcgggtggcaggaccaaaacctggctggttgggaacaagcttgtcactg

SEQ ID NO: 138201 - DNA, 122 bp, Homo sapiens
ttctgcattcccaagcagagccagccttgtccagcaaggagtaggcaaccgacgctgtggcgctgtctccgagggtcacggaggccctgtgaccacttgcttctagaagctgaaagtctgtt

SEQ ID NO: 138202 - DNA, 122 bp, Homo sapiens
cacgtgctgatccacaccggggagaagccctacccttgccctacctgcggaacccgcttccgccacctgcagaccctcaagagccacgttcgcatccacaccggagagaagccttaccacgt

SEQ ID NO: 138203 - DNA, 122 bp, Homo sapiens
ttactgcatgctcccaaagtttcctctgaaagctagtgatctttggctgccactgcagtccggccaggcctgagccaggctgtgcctgcccagccctacctagagcaccacagacctttctg

SEQ ID NO: 138204 - DNA, 122 bp, Homo sapiens
gtgcatcccactgagggtccccatcatctcagggggagcacgaggagttgtgaaaagtaacgcacaactggtcatcagaataattcattccctccaccttctctgtagcacctcccacttct

SEQ ID NO: 138205 - DNA, 122 bp, Homo sapiens
ccccagctcagggtccgtgtacttggggaccatttcctgctctgctgtggtctactggaccgtctggcatcgctgtgaccgcatgggccgtgctccatcaatattgtttttttgtgtgtggg

SEQ ID NO: 138206 - DNA, 122 bp, Homo sapiens
ctggccttgtgtaccggaaactctcttggctggatccagcccttcctcctgatgtgctgtcgggcttgtccctggtgccctcttctctgattgttccagtctgcctgcgggcacttagcata

SEQ ID NO: 138207 - DNA, 122 bp, Homo sapiens
cacacggcatggctctgttctccccggctggttttctggttttcgtgagcattgagcccccgtgggttttggtgggagcacacggcacggctctgggttttggtgggagcacacggcacggc

SEQ ID NO: 138208 - DNA, 122 bp, Homo sapiens
gaaaggggctggggggcaaggcaaaacgaagcaggcagggactcagtgcctcagtgggaccgagaggctgggtcacttccctcatctgtgaaatgggcaccataggccgggcgcggtggctc

SEQ ID NO: 138209 - DNA, 122 bp, Homo sapiens
tggtgcctctgcctcctccagactcagctgtcaccacgacctggccagcagcaggaccaccggcacccaggtctgacctcaggctccatcccctgctggacccatgggacctggcccagtgg

SEQ ID NO: 138210 - DNA, 122 bp, Homo sapiens
atttgattttttaaaaatcaaacgccctccaatcttaagcaaggatgatggccaaaaggtcggcttattacccaactgcaacaataggagggacaggtaattaaaaggcaattgccatgaca

SEQ ID NO: 138211 - DNA, 122 bp, Homo sapiens
gtgatacaactacgtattttaagaatatgggtctatctcctattcaaaaaataactgcctcgatgacctgtatgaaatttttgagttcagatattgccttcaaaaacagtagatgactgctg

SEQ ID NO: 138212 - DNA, 122 bp, Homo sapiens
tgagaacataatttaattataataaatgggttgggtgcttcagccccatccttcagaggccgagtcagagcggatgtatttatctttattcgagcgtgtaagggggtgggggcggatcggcc

SEQ ID NO: 138213 - DNA, 122 bp, Homo sapiens
gcccaagctcgcggccacacccccaccgcgcgggcgctacgtcccgccccgcacagggctcgctcccaggcacaccctgagctcgcggccacgccctctacaccgcccgcccgcgctgtcat

SEQ ID NO: 138214 - DNA, 122 bp, Homo sapiens
aatccaacttaattcaatgtacattatttgtcttaaacaggagcaaacaactacaggatacgggatttaataataacagtaaagaggtataatgcttactatgggccaggcattagttcaag

SEQ ID NO: 138215 - DNA, 122 bp, Homo sapiens
ctgaattagtttcattaagtctttgtcaccttcatacaataacttttattacactgtggccggtgggtttagaattagacctcagttcctttgctgaatttctgggcgacggtgggcaagtc

SEQ ID NO: 138216 - DNA, 122 bp, Homo sapiens
ggagggaccagcgtcgaagacaaaggaatctctgacgagaaccggccagtccgggagggacggcggggaagggggtgctgctctggcggagccctcacttcactcgcttcccctcgagcgcc

SEQ ID NO: 138217 - DNA, 122 bp, Homo sapiens
tcagcaagcgtaggatcaatatgcccaccctcaaaactctcccctcacctctcctcggtccgctgtgctggaaggagattgcgttgcactcagaagagtccaaatcatcttaaacaaaataa

SEQ ID NO: 138218 - DNA, 122 bp, Homo sapiens
cagtgtcttctgcgttccatctttgtgccatcattgacagcttttgttgttatgtagacacgaagcagtggacaaaggaccccagatgatgtaagccacacctccttacctcctctgagagc

SEQ ID NO: 138219 - DNA, 122 bp, Homo sapiens
ttccctaggctttcttgtctcagcaactttcccatcttgtctctcttggatgatgtttgccgtcagcattcaccaaataaacttgctctctgggccctcggttcggttctttctttcctgaa

SEQ ID NO: 138220 - DNA, 122 bp, Homo sapiens
cggcaccaagatcatcaaggagcacgaggagcgcatgttccaggaggccgtcatcaagaccgtgggtgcggcgcggggccgggccggggcggggcggggccgaggcgcggagtggggagggg

SEQ ID NO: 138221 - DNA, 122 bp, Homo sapiens
tggcgcttcctgcttgcagcccagggactttctattataaccatccttttcttggggttgcgctactgtccaatgagcgcatagtgagggcagtactgctaacgcctgaacaacacacccgc

SEQ ID NO: 138222 - DNA, 122 bp, Homo sapiens
ccaaaataacttcttaaagtggttttcactaggggtgtgtgattagccatttaggctggacgattcttccttatgagaaactgagctggacactgcaggatattaagtatccctggtgtctg

SEQ ID NO: 138223 - DNA, 122 bp, Homo sapiens
ataaagccctgttttttcgtcagcaggaaaaggcaaggaacccgctttctgccggttaaccggggggaaagtgcaacccttaaggattaggttttgctgagtttaacacactccagagagta

SEQ ID NO: 138224 - DNA, 122 bp, Homo sapiens
gccgtctcagttctcaattgcccgttcacgagggcgcccctcccccgcctcagctgccgccgcccttcccaggcaccgcactatccccgttagtggttctccccgcggtccccgtccccctc

SEQ ID NO: 138225 - DNA, 122 bp, Homo sapiens
aaatattgatattttatttcatcaaaagtgccatttggtatgccactattgaaagcttatcgctgtctttttctccttcagcaagtagaggtcaatgaagcagggtgtgttagttacgcaaa

SEQ ID NO: 138226 - DNA, 122 bp, Homo sapiens
ttgccctttcaacccactgaacacataaacatgctttctccttaactgaacttatggccacgatgaacttgaactctgagattcacagaggagagtttgttttaacagctgcttttacaatg

SEQ ID NO: 138227 - DNA, 122 bp, Homo sapiens
gggtcttgctccgttgcccaggttggagtgcagtggcccatcagggctcactgtaacctccgactcctgggttcaagtgaccctcccacctcagcctctcaagtagctgggactacaggtgc

SEQ ID NO: 138228 - DNA, 122 bp, Homo sapiens
agaatttcagccattcagagacttaggtccatcgctaagcggtagaagccaagcctcttgcgctgcaaccccatggccggcagagggcgagggaacacgccgtcccgccctccggggcgcat

SEQ ID NO: 138229 - DNA, 122 bp, Homo sapiens
ggacccgccatgctcagggctcagcacccccgagttaaggagacaagagcagccatctcccggcccccaagcacccggactcacacccgcctctgctgcgacttcaccaaggaaggaaaaat

SEQ ID NO: 138230 - DNA, 122 bp, Homo sapiens
ccacccagttcccattctattctaggaattgtgtcatcttgtttcagcagagatggaattcgttgcaatgtgtaatttggaaatattagactagaaaacaatgatgtcttttaaatatttag

SEQ ID NO: 138231 - DNA, 122 bp, Homo sapiens
tgccatgcctgccaccctcctacccctccacgttaaatatgcacgctggcgagcaggcagcggagaacacagaccttagagttccttggttttggatcctagctctatcactcataaacagt

SEQ ID NO: 138232 - DNA, 122 bp, Homo sapiens
tccatgttaccgtgaagttctcatactgttgagcgaacgtgggagtcagggtggagaaagcgtggcctggccggcagggcaccgcacactgtgccgctgtctccccacttcgttttcattct

SEQ ID NO: 138233 - DNA, 122 bp, Homo sapiens
tcctccccgtgcttggcggccgtttctgccttgttgaggcctgtgaggcccccgtaatgccgctcattgaggcgccaagtgcgcaccacaggcagccacatctggtccgtgccgtccaggat

SEQ ID NO: 138234 - DNA, 122 bp, Homo sapiens
gtggccccatggactatcgaagcctctaggggcagaaaaccctggattcaccctcgggctcgggctctggctcgggctctggctctggctctcctaggttgggagacaaagggaagctgcct

SEQ ID NO: 138235 - DNA, 122 bp, Homo sapiens
gcggcggcgcgcgggtgagcgggtgagcgtgtgagcgggcgggcgggcaggcgagtgcgccgggtattggcagctgaggagtggaggctgggcagctccgactccctgacgccagcgcgacc

SEQ ID NO: 138236 - DNA, 122 bp, Homo sapiens
ctaaggcccattcatggcagctaaggcccattcaggtcagctaagatgaaggcagttgtgcgtaagcaattgccatcttccataacaaaagcattatacaaaaataactttaaaaatccaga

SEQ ID NO: 138237 - DNA, 122 bp, Homo sapiens
agcctcagcctccgggtctcaggtctccgccgtttcttctcaaggagtcggtcgggggagcggcactgcacagcttttctccaatcagacacctcaaggctggcgcctgatccaatctcctc

SEQ ID NO: 138238 - DNA, 122 bp, Homo sapiens
gttcggacttctgcaactgttggcactttgggggcttggcttagcgctctgctgtttacccgtctctcctcgctgcctcggaaccaaagctcccggccccctccgccctcgcgcgcccaccc

SEQ ID NO: 138239 - DNA, 122 bp, Homo sapiens
aaacgcaaacaaagcattatgtaaatggacgccattctttttaggaccacgtttctagcacgccccacaaacagcagagccgcgattcggcaggcggccgtgagtgggtttcggtctttctg

SEQ ID NO: 138240 - DNA, 122 bp, Homo sapiens
ctttcccgagcggggcggggcggggccgagatcacgctgatgcccacaggaccggcacggcgtggggtgcaacaaggggcagccacccacctaggaaagggtgcacagtgggggcacccacg

SEQ ID NO: 138241 - DNA, 122 bp, Homo sapiens
tatatatatatacacacatatatatatacacacacatatatatactcatgcgtcacttaacggatatctcttgagaaaagtgtcatgaggcaagttgtgtgaacattgtaatgaaatgaaat

SEQ ID NO: 138242 - DNA, 122 bp, Homo sapiens
gtcccaaacgaggggttcctctccgccccgtggttcctatggatgctgtttcccctcccccgggccaggtgtgagcacccaactggattgatgtctgccgcctgaaatacacttgatctgcg

SEQ ID NO: 138243 - DNA, 122 bp, Homo sapiens
aagagacattgattttcttgtagatagcggtgctgaacattcgctagtaactgccgcggtcgcccccttatccaaaaagactattgacgtcatcggagccacgggggtttcagcaaagcaag

SEQ ID NO: 138244 - DNA, 122 bp, Homo sapiens
ttacgccttcctttccgggttttcctggagaaggctgcctcactgggtctttgcagttggcgtgttccccggtgccattcgtatctgattcatgcgtgtgcgaccagtactccatttcactt

SEQ ID NO: 138245 - DNA, 122 bp, Homo sapiens
gactcggtcctcagtgtgccgaagcctaagcgctgcggggcgcggggcgggaacgggaggcggtgcctggggccacggggtcgtcccccaggatgagggcgtgtcccagcgcgcgggaccct

SEQ ID NO: 138246 - DNA, 122 bp, Homo sapiens
ccccacccccggacctgccgggccttctggggcggccccttagcaccagtgctccttaggcggaaagcgttcgcccgctgtatttaactcccgtgttaaaggtttaaagaggtctaagttaa

SEQ ID NO: 138247 - DNA, 122 bp, Homo sapiens
ctgggtattttgtgaatcaaagggaatggaggtttgtgttggactgatgcattttaatgacgtattgcttaacttcattgagaatagaaacgatggaggggtctaaattttctgagcatctg

SEQ ID NO: 138248 - DNA, 122 bp, Homo sapiens
tgccacctcctaaaagacaccccttccagaaccccggctccccgcgccacgcctcccccgcgacttgggaactctgggtcatcagactcccctaaacaggtcggcgtacccgcccccttctc

SEQ ID NO: 138249 - DNA, 122 bp, Homo sapiens
gccagagggagaaccaccaggaggccgcgcgcgcgcacacgccgggcgccctcctcgtgccgaggtggaaagagcctgcgacaggcaggcccaggttgtcatttaggctccgccactttccg

SEQ ID NO: 138250 - DNA, 122 bp, Homo sapiens
agaggggaagcctcctccccagtggggtgcagtctgggattgcagtccccaccccaggggcgcagctgccagcccaacgcctgggacacaccccctcccgaggcctctagccgccgccgcga

SEQ ID NO: 138251 - DNA, 122 bp, Homo sapiens
cctttgattccccctcctttgtcggatagtgtctgcggcggggaggcggtgacactagtccgagtggggcgtggagaccgaccagcacgaagggcggagttccggcccgcacccctccgccg

SEQ ID NO: 138252 - DNA, 122 bp, Homo sapiens
aaggtccctgctatttcgagtgtgggaggcagaggggtaaaaagaaattaaaatacatggcgataagtcttgtgatcagaaccgagtctttgggcaccttgggggcaatcgagtgaacttcc

SEQ ID NO: 138253 - DNA, 122 bp, Homo sapiens
cgccccttccggccagccgagcctcatggcttagatggcgtccatggccgcaggggtagccgtgggctcggctgtgggacacgtcatgggcagcgccctgacctgagccttcagatggggga

SEQ ID NO: 138254 - DNA, 122 bp, Homo sapiens
tccaccactaaaaccattcctttgtatcatttccccagagggatcttgataattgtgaaacgccaaacaacttgccagccatgagtcccaaatcacagctatgaaagtgctttacagtttat

SEQ ID NO: 138255 - DNA, 122 bp, Homo sapiens
ccatctgcccgagcacaggcgtgggggtgggacagggcaggcaagtcagggccaccggggcgctgagggacagagttctgcacgtagcactgcagcctcaaagaccttgaacgggaggtgga

SEQ ID NO: 138256 - DNA, 122 bp, Homo sapiens
ctgcttctaactggtcatgttggaataaaaacaagcaactgtcatccgggatattaaccacgcaggctgtggtgttgcaaagcaggggagcacggagcagggagcataccaccctgctgaga

SEQ ID NO: 138257 - DNA, 122 bp, Homo sapiens
cccaaagaaacatctgcacattccagacacgtgtggtcagcagcgggtgtgcgccaggcccggcacccccgcccgcgctggccgcctcactggaaactgggctggggggaccggctcggagg

SEQ ID NO: 138258 - DNA, 122 bp, Homo sapiens
agactgagtcggcccggagctgcgaaaatgtgttctttccttccgccccacacccatccgcgtctgccccaggaatggggcccaggtcccaagcctcctgcgcccttccttccagcccccag

SEQ ID NO: 138259 - DNA, 122 bp, Homo sapiens
gggagagggcgcgcgtgagggccgcgggctcgggcagaagcagcaggaagcctcggaaggcgcgcgccgcccgccgccagctcggtcccgcgccggcgctcagggctcggggcagcagggcc

SEQ ID NO: 138260 - DNA, 122 bp, Homo sapiens
gtcgggacggaactagaaaagctcagtggggctggcggcaactctaggtctaacatccctcggaagttcgtgcagcggcctcgctgaaaatggctttacagcccggcagaaccctccgactc

SEQ ID NO: 138261 - DNA, 122 bp, Homo sapiens
cgcgttaagtcgccgggcggggcggggcggggatgggagaggcggggcagggggaggaggcggggctcggatcaccccaggccttcagccccgccccgcctggggccgcctcctgcccgctc

SEQ ID NO: 138262 - DNA, 122 bp, Homo sapiens
aaagcgggacttgccgctaagggtgaaggaccaaggcaggcatccctgcgtggtctgaaacgtgaaatcagagaggcgtccctgcaatgattaaacaccaagggaagactgccttcccagtc

SEQ ID NO: 138263 - DNA, 122 bp, Homo sapiens
ctcgccccctgcccctatttaaattctggggttccagggacctccgtgcagtgaggggcgcggacgctttcaattgaaatgggagctggcgaggccctggcattttggggaacctcagcggc

SEQ ID NO: 138264 - DNA, 122 bp, Homo sapiens
ttggctgatggccgtctacccaatcagaaagtcgtactagaatcgcctcatttgcattcacgccacttcccattgtccaatcagattttggataccgaacgcggcgtttgagggccgtgcct

SEQ ID NO: 138265 - DNA, 122 bp, Homo sapiens
ggcagcggcgtccagggggtccggcggcactcgcggtggggctgcctgggttgcgggtgacgatctgcggggtcccgcacccggccccgcggagcccggacccgcacgtaggcggcgcggca

SEQ ID NO: 138266 - DNA, 122 bp, Homo sapiens
caccgccgcggcctcagggggcctggggctcgggctggcgctgggcgcggggggcggtggcggcagcggtagtggcagcggcggtggctccagccccgcgttcccgggcaccttctgcctgc

SEQ ID NO: 138267 - DNA, 122 bp, Homo sapiens
cctgggagggtgggggaccccaggggcaggtgtctaactcactacctttttgtttagccgcggtgccttcttttcaaaatcaatgaaacctgtagcctttaaaagtagacatctttttccaa

SEQ ID NO: 138268 - DNA, 122 bp, Homo sapiens
accacaatcctgtcatttcggcttattcatccagcagctgccggaaggaccgggctgaagcgtggccacgaggagggggatacccgtgcgagcgctgagccggcagagcggctgcagcccac

SEQ ID NO: 138269 - DNA, 122 bp, Homo sapiens
tttatttcaatcgacagttacgcgaattcagtttagccgggaccgggaggtttgagagtgcggcggggtggggaggggaaaaaaacaaaaacgctgcggagcgttttcgactttgcaaagct

SEQ ID NO: 138270 - DNA, 122 bp, Homo sapiens
agcactaaccctcaccctcccgggtacccggtctacgaggcccggaggctgccggagacccgctctcctgaccagagcacgagtgacccagccactgccaccagcaccccacgagcgagtcg

SEQ ID NO: 138271 - DNA, 122 bp, Homo sapiens
cacaggaataggtctgtttcagtgtcccagctgtgctcagtcactggttgtgagaaggttcgttcaaagcgtggcctccatgtaaacaaggtgggagattcagatcgtagcagctgggggcg

SEQ ID NO: 138272 - DNA, 122 bp, Homo sapiens
tttgccccaatcttacagactttggatgggaaattcagcccattcaccgtgttacgaaggcgggtagccatggctttatttattttatctcatcttatgtttactattattaagcttattgt

SEQ ID NO: 138273 - DNA, 122 bp, Homo sapiens
attttaaaagataaccgagtgcccaatattttagaagaagaagaaagggagtggattaaacgctaattcagtaatacctgaattttagcaaaacacataagtctatgcgactgagggtggga

SEQ ID NO: 138274 - DNA, 122 bp, Homo sapiens
ctcgccgcccttctcctttccgttctccgtatcacccttctcagcctgggtcattatggccggagacacccaccaacctctcgcctcagcgctgcagccacgactgccgggatggaagggcc

SEQ ID NO: 138275 - DNA, 122 bp, Homo sapiens
caaaggccagagggattatcccacttaatagctccacagatgcgcccagaagaatgtggacgcgcgacaggacgggctgaaaggctgcaggaggaagcaggcagccccggctcctggcttta

SEQ ID NO: 138276 - DNA, 122 bp, Homo sapiens
actgagctgaggaggagaagaaaaaaggagcagggagtgaggggctgggcctctagaagccgaggcagcctttgtacttgcagagacaattccccccaagagtgagggccgagcgcagaaag

SEQ ID NO: 138277 - DNA, 122 bp, Homo sapiens
gagctttccaggacagagaagaaacgtgttccaagcagctgctaagggaataccaatggccgccagccggggatgcatcaggtgacaaggcccggctaccctgtccggcgcccccgccccca

SEQ ID NO: 138278 - DNA, 122 bp, Homo sapiens
tgacctcttgatccgcccgccttggcctcccaaagtgctgggattacaggcctgagccaccgcacctggcctgtccagcttcttaagctgcttgttttgcttattaacacggtcttctcatt

SEQ ID NO: 138279 - DNA, 122 bp, Homo sapiens
caattttcactaaggctgactggagacacgttgtttgctcctttgcagttagtgatggttcgttgtctcatatgcagagtgggctgtggtcatgaacattcacagagtgggaagaggcccaa

SEQ ID NO: 138280 - DNA, 122 bp, Homo sapiens
atagactttggagaagatacacaggtggtaactgaacacgcagaaagtgtgttaaacacgcgaaccacagccccagcgagacgccaccaccagggaaatggctaaaatgtaaaaacctgccg

SEQ ID NO: 138281 - DNA, 122 bp, Homo sapiens
gcgggagtagaggcaggacatggtgcggtggcggcaggggcgggcggctggaccccaagccggcgctgcgccttatatgacggcccgcgggcccggggagggagctcgcggccaaggcgttt

SEQ ID NO: 138282 - DNA, 122 bp, Homo sapiens
ttcctgaaaatctaaaattattccaaagtaaaaagtttattttgtaaaaaaaaaaaaccccgcaaagcaggtcacatctcctgtgcagctcaacagcttcccatggttccctagtgctgtca

SEQ ID NO: 138283 - DNA, 122 bp, Homo sapiens
acatgcaaattgtatacaatctgtaaaaattgtattccataagaatgtgacagttgagtacggtttttggggggcttttttggtgtaccataataatgtcatctggtttcttttctgaacat

SEQ ID NO: 138284 - DNA, 122 bp, Homo sapiens
ctgtcggagctgttcgggctgcgggatgggggccgagggacgtgggccggatcccgcacacgtggctggaaacctcacaccccggcttagacttgccaggcgaggatcctgcatcctggcgg

SEQ ID NO: 138285 - DNA, 122 bp, Homo sapiens
tgtctagcactaggcacagcactgcacccgtgtggccccgcagcgtctggtggcagcagccgctggccacctgccacaccttggctgtgccatctgtgctgccggtcaccagaagccccccg

SEQ ID NO: 138286 - DNA, 122 bp, Homo sapiens
tcgtatctgccaccaccgaaggttggcttggggagtggaagaaaggccctgtcttgtagccgggaccttgaccctcttacagctgccgtcctctctggacgcagacctccctagagggcatg

SEQ ID NO: 138287 - DNA, 122 bp, Homo sapiens
ccccggagacccttaagggctgggaaccccaaggctcccgaggctggggctgcagagtctcggccccacggccagtaccacggcccccacttctgggccggaatggaaggaacaggccttct

SEQ ID NO: 138288 - DNA, 122 bp, Homo sapiens
cggctccggctctctggtctcccgctcggccccgccccctgccccgaccccggtcacgtgcgcgccagaccccgccccggcctgtccccggcgattcctgcggacccagctgcggcgacgcc

SEQ ID NO: 138289 - DNA, 122 bp, Homo sapiens
gcgaacggagccacgagggaagggagcgccgccggcagctgccgggacaccaggataccacgcggccagcaccgaaacgctaggctcgcgctcacaaccgcaatctacactgagtagccgcg

SEQ ID NO: 138290 - DNA, 122 bp, Homo sapiens
cctatacatcagcaggtcccggctgcagcagctgggcaggaggcctaccgcattggttcacgtctgctgaccaagtggagagaagcagaagcagacctgggcagggcaggaggaagccatct

SEQ ID NO: 138291 - DNA, 122 bp, Homo sapiens
gagaaaataatttcacctaaggactcttggaagacggggctgaggaggtagtggggacagcgagggatgggactgtgacttcggatatttttacaaacaaccaagcacatgaagacagcttc

SEQ ID NO: 138292 - DNA, 122 bp, Homo sapiens
gaatctgccttatagaactgttataaaggaacaaagaaacttaataaatggaagatgcttcgaacagtgccagagatatagtaagggttcagtaaatattaactctaataattatttttaac

SEQ ID NO: 138293 - DNA, 122 bp, Homo sapiens
gccagggtcccaggggctctcctggaggctgcagaggaacccagcctgggtggggggctccgacgctccacagcctgtcctggcccggccaggcccggcccggcccggccccctgcccagtc

SEQ ID NO: 138294 - DNA, 122 bp, Homo sapiens
gtttggagctgtactctcagctactcggggctggtccttgattttggctgcgctcgcgcacgctcccccttttctggccgccaggtcccgccttctaaatttccccaggtctccaggccgct

SEQ ID NO: 138295 - DNA, 122 bp, Homo sapiens
cgtcgtcagtgccaggagcgcttggattgggatggggacggagaagggtgcctcgctcgccgagccccgctgcccttggggacctggcaaagtcgaggtttcctcacagcgttgagattgag

SEQ ID NO: 138296 - DNA, 122 bp, Homo sapiens
caacatgcctgggagtcgagtctgttacctccgctcaggggaagccagcgcgcatgcacgcgcacacccccacagcacacccggccatgactcataccctctgagtggcgtgattcagcatc

SEQ ID NO: 138297 - DNA, 122 bp, Homo sapiens
ggagactgcagtttgcagtgatgtggctaagatacccttgtgctattaaaggcacatttacgtatctttcaacgcagtttgtacctttgtttagggttctattgaactttctctgtgctctt

SEQ ID NO: 138298 - DNA, 122 bp, Homo sapiens
ggcggcgtgtccggagtttgttcgttctgatgttgggatgtgttcggccttctggtggttcgtggtctcgtgagtgaagctcacagcggtgtggggaggctcaggcatggggggctgcagga

SEQ ID NO: 138299 - DNA, 122 bp, Homo sapiens
gcgccgtacccacgggcagttcgagagggccgcgcgtggcggagccaggcccttcgccagcgcccagtacaaatttagtactagaattaagagaaacacactgaaatctgacagccccgcct

SEQ ID NO: 138300 - DNA, 122 bp, Homo sapiens
agtcgctatccacagctcggttcaggcatcatcactccctggaaaacttggctcttaattcgggtgccgaccaagtcctccggggtccgcaaaggctggcatcccaccaccaacgcgcgtga

SEQ ID NO: 138301 - DNA, 122 bp, Homo sapiens
ggtagaggctaggatattgctaaacattctacaatccacagctcagaaacagaattattccgccccaaatgtcaatagcatactattcagaaaccttactctatagggcagatttggggcca

SEQ ID NO: 138302 - DNA, 122 bp, Homo sapiens
gtgtttgggagtgggaggcagctgctagtcagagttgggtccttagggcgcagtgcttcacggaaacgcacagacgtctatggcagacgctctcagacacgtgtgcagaagcgacgtggctt

SEQ ID NO: 138303 - DNA, 122 bp, Homo sapiens
cgtgcgggggccggcccgagcgcctacgcgcgcccctccggcgcttgtcgcagaggctgccgggagacgtagtcttgtaacgctctctcgccggacattcctaatggttagcgcccagcctg

SEQ ID NO: 138304 - DNA, 122 bp, Homo sapiens
cgggggccctggcggggactgtggggaccacgcgcccggcctcccccgcagcttccacttcgagagcactttgcgaaagtttgcgaagttggtttcaagatggctcctccgcgcgtcccggg

SEQ ID NO: 138305 - DNA, 122 bp, Homo sapiens
gcgcggcgccctcctcgcccaccttcccctctcctccctgctgctggcccagctcactcacgctggtgagcttggggtttgcacccgggtttgtgcaatggtccaaaacaagcgcctaaaaa

SEQ ID NO: 138306 - DNA, 122 bp, Homo sapiens
ctgaggccaggccccagctctgctgctgacgagctgtgtggtcctgggcagagtggtctccgagttccagtccctcctctgtaaaatgggcatgattagagtgcccaccgcattagggatgt

SEQ ID NO: 138307 - DNA, 122 bp, Homo sapiens
gtgcggggctgttgagaagagcaagcagattcccagtattgccacgctggaatggagcaccgtgagttctgatatatgccaatctgtggcagtgaggaaagtcgaccagtggcatagctaat

SEQ ID NO: 138308 - DNA, 122 bp, Homo sapiens
gcccaggccccgcccaccagcggggaagcctcattggtgatcgcaccgctcgctcatcggcgtgccccagtagcagcgcgacgaagcctccagaaggcgggacttcagcccggcagcgccga

SEQ ID NO: 138309 - DNA, 122 bp, Homo sapiens
gggcgggccgcagcctccctgcgccagggactggcccaggaacccccgaaggcgtgggtgcggccccctaccccaccaggcacacaaggaccccagaaggagaagagaccccaccccggggg

SEQ ID NO: 138310 - DNA, 122 bp, Homo sapiens
gggggcggacagggtgtcccgccccggcccctcctcaccgggctgagagggggagggagacgcggaaacctgggttcttccggcccccacctttgagcaatcacttccccaggctttgagct

SEQ ID NO: 138311 - DNA, 122 bp, Homo sapiens
ttaggccagtcactccgccttaagtgggtgcgtgagaaccagaagagggactggctgtagcgctgcaagtgagatcctgtcccaaaagatgagcctgacttaggctgggccccgcaggccgg

SEQ ID NO: 138312 - DNA, 122 bp, Homo sapiens
gccgcggcgcctgccgggaaatgcagtccctggttcgggacgctggggctccggaggaagcggcgagtcggcggggcggagggggcgggagcgcgaaccaggaacgcccgcggcagctagcg

SEQ ID NO: 138313 - DNA, 122 bp, Homo sapiens
cctacctgccgcacctagtaactgcagcgcgcctacctgccgcacctagtaactgcagcgcgcctacctcctgcacctagtaactgcagagtacctacctgccgcacctagtaactgcagag

SEQ ID NO: 138314 - DNA, 122 bp, Homo sapiens
gcacccatagaatatgacaaacttaatcgattaatgttttgtgtcttctgactgctccaccgatgagctgttccgcgtctctcttccttttcttgggcctccctatttcctgagacacagca

SEQ ID NO: 138315 - DNA, 122 bp, Homo sapiens
tttttttccctgtgtctcccaagagaaaaagtaaatttcagattgtgttccccctcctagcgccagagaaaggaactacaacaaagcctagctgctgagtccagagcgcacagcacagtcgc

SEQ ID NO: 138316 - DNA, 122 bp, Homo sapiens
agcagagggatctgcagggaaggctctgctgggatttgccaggaggtggcagccgaggcccggctagcggctaacactcggcacatggctggcctcacagtaactatcccagagccacttcc

SEQ ID NO: 138317 - DNA, 122 bp, Homo sapiens
gaggccaggatggcccttggcctgaggccagcggtgtcctgtcatctttggctgccttgccggccacggaagaccttgggtggagggtgtaaggaagaagccacctccctgggaccatgtga

SEQ ID NO: 138318 - DNA, 122 bp, Homo sapiens
ggccccaccacccccggccccgccgccccccgcccgcacccgcgcccgcgcccccgccgccgccatgggcgtgcagggcttccaggactacatcgagaagcactgcccgagcgccgtggtgc

SEQ ID NO: 138319 - DNA, 122 bp, Homo sapiens
gtgaggcctctatttctctctttcgcctgcattttgtccgcccccgcccctgtggatggccgctgatgggggggaacacaagtgtcctttgtccgtccccgaaagaaaaccttttccagaga

SEQ ID NO: 138320 - DNA, 122 bp, Homo sapiens
ccgtctaggattggctgtggtgcccccgatcagccaatcggaaggaaggcggtagcggggcgtggaaggaagcgaaccctggatctgacccactgtcccttcaaggtctcgggaatggtcgg

SEQ ID NO: 138321 - DNA, 122 bp, Homo sapiens
tcttcggcgcctccagcgcttccccggcgtcttgggctgcgaggggccctttccgcagggcgatgttttagcagttctgggaggaagggcccactgccgttgccctctgaggaccgaggccg

SEQ ID NO: 138322 - DNA, 122 bp, Homo sapiens
tgactcttgtgtagactcgggcacatggggcaactttttttgtgttttgctctaccaggtcgtccctattccgtgggactagtgtctagccccatttcttcagcagtggagcctaggatgta

SEQ ID NO: 138323 - DNA, 122 bp, Homo sapiens
aatggaaggcgcagtagatgagaagtcagatttgggatttagttccagtgctgctaatgccgctttcctgtgcattatcctctgccagctgcaagcaaagactattggagacttgtcctgtg

SEQ ID NO: 138324 - DNA, 122 bp, Homo sapiens
agcagatgtgtatcagcactctctgataaaagcatgccagcacactgcaccagtctgtatcggcacccatcctccaacaaagcaatggtccctcaaccaagacggtaacagctcaggttaga

SEQ ID NO: 138325 - DNA, 122 bp, Homo sapiens
cagtcatccagacacatcgaactttggaggggcaggtgatggggggtggaaatgaggggacggaggggcagcggatggtcccagagagtcaggcaggaacctcagtcaccaccagaggtccc

SEQ ID NO: 138326 - DNA, 122 bp, Homo sapiens
ccgtccaccttgtaaaagaccgggccgtcattaggctggatgcgcagcgcgatggagaggcgcacgaggcccggcaggtcccccatgtctgggcgagggtctggcgcggcggctccgggggg

SEQ ID NO: 138327 - DNA, 122 bp, Homo sapiens
actctgagaatgaggctttctccgggccagggtaccctgtatgtacctggacagggaatccggtgctgtggagcagagatgggctaacacccactcgtgtctgtgggatgtgtgtctgctag

SEQ ID NO: 138328 - DNA, 122 bp, Homo sapiens
tcccattcagaaagaaagagacagagaacttgacagtaattttacctaaatcagccgaatcgacttgaccagcaatctggcattggatgcagcatcaatttccccaagtggatctaagcctt

SEQ ID NO: 138329 - DNA, 122 bp, Homo sapiens
acgaactcgccggcgttgttctgcatttcgaggctccgcctgctgccaccacaccgcgcacgcgagagaaagccgagggtttgtcctcttatgccaagttagggcagccctcaaagcagatc

SEQ ID NO: 138330 - DNA, 122 bp, Homo sapiens
aatgtttccagggagcaacgactcgcaagcacacccctggggctgtgcggtggccgtcggcggggccagcttcaaagtccaacccacaaggcacaggttttcaaatctttacctctgtgtac

SEQ ID NO: 138331 - DNA, 122 bp, Homo sapiens
tgattgctggctgcccgtcctctgccgaggacacgtaggcagggttgtctaggccaggctcgtctgtcattaaggagatggtggcagctgcagaaacctctggggagggagccgtggctgtg

SEQ ID NO: 138332 - DNA, 122 bp, Homo sapiens
ggccccggggggggtaccgtgggggaacacatcggacgggtaccctgggtcagcgctctccgcgactctcctagccctgggccgggggcaggaggggaaatcacctgctccgtcgggcgccg

SEQ ID NO: 138333 - DNA, 122 bp, Homo sapiens
attatgtcttagtatagaggtatttgaactacccacatttgtcactataactaatactttcggtattatttttgttatgctgtttcatgctttctgatttttttttttttttttgagaccgg

SEQ ID NO: 138334 - DNA, 122 bp, Homo sapiens
ggtccgccaggcactgtggtaagtgcttgatgtatatgaactctatacaacctacaaggtcggtattactgttctgcctgttttacagatgaggaggctgaggtccaagtcagggaccttgc

SEQ ID NO: 138335 - DNA, 122 bp, Homo sapiens
gttccgggactgcgcgcttttcagccactgtgggagaggatccgtgtttaaccagctccccggggctcccaagtcgaagacctactgccttgagagcgctgtccagggtgtccgggggtgtt

SEQ ID NO: 138336 - DNA, 122 bp, Homo sapiens
ccaggtagggacactgagtttgcatttgcgccactgcatagtggcccaaagctaggggagcgtggctggagcaggctgcgcagttgagcagacaccctcctagcagaagagaaagtccagca

SEQ ID NO: 138337 - DNA, 122 bp, Homo sapiens
accacgtttggccatcagtcatggcattaatattaggttctatgattacaacctcgtggtcgtccttttgtgagctcatggtctactgtcccagggactaaagaaaaggcatatgtaagcag

SEQ ID NO: 138338 - DNA, 122 bp, Homo sapiens
ccattctcggcctgcagaggacggagttagtccaacttgaaaaaattattcccctccccccgcaactttcccaaggcacccgcattccacccggccccctttcgtcgtttccttcttggcca

SEQ ID NO: 138339 - DNA, 122 bp, Homo sapiens
aacttggcccatgcctgctctgaagctttgacagctgcaggctggattaactgatccattcgtcaaactggttgtcagagccagcatgttttagttatccttcagtttctaacagaaaaatc

SEQ ID NO: 138340 - DNA, 122 bp, Homo sapiens
ctcatacaaatgagcaggttatctcagagaattaaaggtgcgccttctttctcccaggaccgaaattttgttactgctgcttctgttgttattctggttcttctttacctatcactactatt

SEQ ID NO: 138341 - DNA, 122 bp, Homo sapiens
ggtaagcactgtgtttgggtgtacatctcctaggatactagcatgtggccacttggaaggcggctgcctagcagccctcagcctagcttcaggagaggaactatgggatccagcttctctgg

SEQ ID NO: 138342 - DNA, 122 bp, Homo sapiens
acgtgggaaaccctgagataggacattggcccggcgctgggctcgggtaacgatgcggggcggggagcgcgggcggccggggagggcggcggcccctttaagagcaggccacgccccctccc

SEQ ID NO: 138343 - DNA, 122 bp, Homo sapiens
tggccagtagggggctccaccaagcgcagtctcagaatgcccaagagctccaccgtcgcccggggtctccaccaagcgcagtctcagaatgcccaagagccccaccgtcgcccggggtctcc

SEQ ID NO: 138344 - DNA, 122 bp, Homo sapiens
ggtgcgcccaaagggttagtgccaatgcgaattctgacatttttcatgactttgaggatgcgactggggcgcggggagggaggtgtccgactcgtgtctaagtagttaaagtgattcttcac

SEQ ID NO: 138345 - DNA, 122 bp, Homo sapiens
cgacgtgccaggtgtgcctccggagagcagccaccaaaaccaccagcagcccgtccgcgccgggaaatgcgccctcgctggcttacggggccactcagacagttctaagtgcctttccctgt

SEQ ID NO: 138346 - DNA, 122 bp, Homo sapiens
ctgtctatgagctgggggaaggccggagccaggcacagggacagaaaatgggggtccccacgcgacatctaaaaaacgaaaaaaccaaactgactaaaacgtgcacagaaacacgattcaga

SEQ ID NO: 138347 - DNA, 122 bp, Homo sapiens
cacccccctcagcctcctcttcctcctcccatccttccttcccttcccgccttcccccagcgccccatgaagctagttttagaatggctttttggagcagttatgttataaggattggcagc

SEQ ID NO: 138348 - DNA, 122 bp, Homo sapiens
cttactgccaccttctctcctcacgctttcctccaggctcggctcccgggacacaaaggccgaatcgccaggactttcactcaacccggcaacaccctcagagccattctggggggtcccag

SEQ ID NO: 138349 - DNA, 122 bp, Homo sapiens
acccgaccgtccagagcgcctcattggactgcgctgagcccagtccacctgcaccactgccgtcctcctcgctcggccaccgttggttaccatgggaaccatgaccgcagccagcccccgag

SEQ ID NO: 138350 - DNA, 122 bp, Homo sapiens
atggggagcacaggaaggctcctggcaccagaaaaaaaaaagttcaaggtttgatctgaacgtagcaatcactgagtttacaggcagctaagatataaaaaggttaaactacccacacccac

SEQ ID NO: 138351 - DNA, 122 bp, Homo sapiens
agacctttctgaatgaatgacctttgaataaagatccagttgaagtgagggagcaaaccacgtgggtatatagggaaatcacaatccatagggtgggaacaacaagaataagaaccctaagg

SEQ ID NO: 138352 - DNA, 122 bp, Homo sapiens
cccttttgtttacaagatgttttgtataagcctatgtctctaatacattttttgtttggtcgtaatgtctgcatgatatttgtgcacatttattaagtatcgaagcttaataaattattgtg

SEQ ID NO: 138353 - DNA, 122 bp, Homo sapiens
cgggctccagggaaggagaggacagccagagcgccatgcgtgtgaacacgtccacagtgacgggtctcactctcacaccaacgcctctccggtggttgtgacaaaagcaagccagtttcaag

SEQ ID NO: 138354 - DNA, 122 bp, Homo sapiens
gcttcatgggacgcaagccctcccccagagttcggttttgcaaaagaggtctggagccctcgctacagatcccctccctgggccacggaggatgagaagggtcaccgagccgagccgtaatc

SEQ ID NO: 138355 - DNA, 122 bp, Homo sapiens
cacgcggcgtcatcacacgcagacgtgtgatggggctttcgcagagggactggcggttttcggactcagcccaggcggcgggtcttagttctggaaacaggagtactaaatgtcttgtgttc

SEQ ID NO: 138356 - DNA, 122 bp, Homo sapiens
ctggtgggacggagtggctgcagtgccggctctgggtacagttctgcgtgttgcctgcaccgctgcacggcctgggtgcggggcgaggcgcaggcccacaggtccttctggaaggactcagg

SEQ ID NO: 138357 - DNA, 122 bp, Homo sapiens
aagtacaatatatcagatcagaaatgtgagggataaaattatttgctttccagaaatgtgcggaaaaagacaaatagatgaaaacaaagtacattagactttggagattgagcttgatagat

SEQ ID NO: 138358 - DNA, 122 bp, Homo sapiens
acacattacacacaggcgcgcgcgcacacttctcaggatgatagctacaactgcagagatcgtaaattcactaagtctctcagtgcaggagggtgggggaccgggagaaggtgggctaggga

SEQ ID NO: 138359 - DNA, 122 bp, Homo sapiens
cccatgttcttggcatatgattggcagaggcaaacattaatgccctgttcgatgaagtggcgcacagcccaggcatccttatcaccatcaccactggcaaagccttggtaggccatgtcaaa

SEQ ID NO: 138360 - DNA, 122 bp, Homo sapiens
tatgttccccacgagcaaaggacaacaatatcatttttactattcatacagtaacctgcacggaattcaactcacgctcagactgtacaatgccaaacagcgcttctgaaacgcgaagagcg

SEQ ID NO: 138361 - DNA, 122 bp, Homo sapiens
gtgaggctgaacagttgggctcctctgggagctttccactgtgttggtgctagtttggatcgtgtgtgtgcgcgtatgcgcgcacgcgcgcgtggaaaaaccgggtatttccctaaaggagt

SEQ ID NO: 138362 - DNA, 122 bp, Homo sapiens
gctcctcatgtgagaaggaccataggaatctcccgtttcacaggtgggcacaccaaggcccgacaatgggtccaggctgccaagggtggagccgagatgcaaaggggcacctcagagcctgc

SEQ ID NO: 138363 - DNA, 122 bp, Homo sapiens
tcgaagtgcaccaaatggcagaaccagatttgaattcaggcactccaattccacagcatacgcatttaactattatacaagtacctactaaagcattatctatttgtttatacttttgtccc

SEQ ID NO: 138364 - DNA, 122 bp, Homo sapiens
caataagccagattaactttacaggccttagttcaccaactctggctaaaaacagtaaaacggtatttctcattctagctatgtgtccagtgcggttcaatagagcaaccttcttatcaaga

SEQ ID NO: 138365 - DNA, 122 bp, Homo sapiens
aataaaagagaaatggaataaaacttcaagaaaaagatacgaaaatgatgctgcaataaacgtgaattcctgtggataggcaaaatgtggatactccttctggatatttgtaaatggacaga

SEQ ID NO: 138366 - DNA, 122 bp, Homo sapiens
tcgggcgagggttggatgggctccgccttcagtcccttgcaggtccttggcgcggcccggcggcccctggatcaaggcgatccgaactgaacaaagcgggctagacgccacctttccgcccc

SEQ ID NO: 138367 - DNA, 122 bp, Homo sapiens
agattactttcaattccccaaataatcttgtgctctctcttactttttggcttttgaacacgctggtctccctgtctggatgtcctgccataaaatataccttttccatgtctcttagttaa

SEQ ID NO: 138368 - DNA, 122 bp, Homo sapiens
gctcccctcccacgctccgccggagcctcccctccagagcggaccatcacacacacctgtcgcttccacctagtccggtgggctcagcagagaaagcaagacagtccctaccccacgcagaa

SEQ ID NO: 138369 - DNA, 122 bp, Homo sapiens
gcgcgcagttccgggggcagccccccgacgaaaaggccgctgaacaccgtcatgtccctgcgcttggacttgacctccacccacttggcctccacctggtcgatgaagagcgtggtgttgcg

SEQ ID NO: 138370 - DNA, 122 bp, Homo sapiens
ttgtgcagtttcactcacatgtaaacaagtcacttggctatgatttgacccacgcccccccgcttagttttgggagggcagaggctctaccggctgtcacagcaacccggaatcacagacaa

SEQ ID NO: 138371 - DNA, 122 bp, Homo sapiens
tcatttagctgctctttgtctgctacacctttatatcatctttcatattcaaacattccacgtgctgcagctctaaataggagagatgttaatgaaatgcaaagactgtctcaacagttaaa

SEQ ID NO: 138372 - DNA, 122 bp, Homo sapiens
acctggaggcatgagcccctggttggacatatgtcctcctcctgtacccccagatggcagcgctggaggaggacttgtactggggccgctggccccacatcagtgtccgtcatcccggcgtc

SEQ ID NO: 138373 - DNA, 122 bp, Homo sapiens
gagtccccatgcttgggtacacaccagccgtgcccctactttcactgttcttccttaggacgttatttaatccccgcagaaaggacatcgtctcacctgtagcaaggagctaacatcataat

SEQ ID NO: 138374 - DNA, 122 bp, Homo sapiens
agccccagagaggtcacaccttccctcctggtgttcccgggagacaggctcagccaggggcgccggtcctgcccaggaccagccaagtgttaggagcagagtgaggacaagtcatggcaaag

SEQ ID NO: 138375 - DNA, 122 bp, Homo sapiens
acaaaagccgctttgtggaagactgtgggaccgtccaacggcgccaccgtgtggcggcgccgggcagcggcagacagcgcatcccggttctcacacacacctggaccttctaagacaggtga

SEQ ID NO: 138376 - DNA, 122 bp, Homo sapiens
aacaagccccagctgtgcttctggctgggacttaaaccccccttctgggccctaaagccacgcttctttgtggaccggacctgactctccaggaatctgggaacccgctatttcactctatt

SEQ ID NO: 138377 - DNA, 122 bp, Homo sapiens
gatctcgggtcactgcaacctccgcctcttgggttcaagcaattcttctgcctcagcctccgtagtagctggaattatggggcaccccccaccatgcccagctaatttttgtgttttagtag

SEQ ID NO: 138378 - DNA, 122 bp, Homo sapiens
tgagatcctttggctaatctcccccaccccaacgcagacggtggcccccaagggcagagacgtgtctggcttgctccccactcctaggcctggcaccgcagtaggtgctcctgtaaataggg

SEQ ID NO: 138379 - DNA, 122 bp, Homo sapiens
ggcggagctggccgctcttcctctcactgtgcactctggagggaaacaacgccgtgaaagcgtccctgcacagagatacacgggcaagccagcctttggggtacctgttgctaacacgctct

SEQ ID NO: 138380 - DNA, 122 bp, Homo sapiens
ggaatccaggggttccctccagaaccccacagcggcccatgctgaaaaccagacaacgcccgcccccgccagaaggcaccctgggaacggaaagctggcagccttccaagtcccaggacgcg

SEQ ID NO: 138381 - DNA, 122 bp, Homo sapiens
gagctttcttgctgcgctgccgagtccgctgtccgaagctgtttaattccctctagtggccgcttacccactttccacctgctgttctcaaagcacgcaaggcttttgggctgcgtggaatg

SEQ ID NO: 138382 - DNA, 122 bp, Homo sapiens
atagagtcttcctaagttccatagggcacatcagctgctctttcctactttgctcaacctcggctggtcattgactctcaatcttgttcgttgtaaaagacattgtaatgtgtaggaattgc

SEQ ID NO: 138383 - DNA, 122 bp, Homo sapiens
ggggagccctcctctaggccatcacgggccctcacccggtcccccacctctcttttgcagcgcagtctgaggaataaaattggagaaagttggtggctaaaccgggtgggggtttagggggt

SEQ ID NO: 138384 - DNA, 122 bp, Homo sapiens
agggggtgcaacgggccagtcagggttctcactgatgtcttgggtgtggctctgagactgcgggctccttggggtggggccggacttgatctcttgggatccccactgggcccggcaaaagt

SEQ ID NO: 138385 - DNA, 122 bp, Homo sapiens
atttttgccctcttgaagacaatatcaccccagttgagaatgcatgctgtggcctaattccgtatatcaaaatgagtaaccagtccagccctactctgtgtataaatcttttattggaactt

SEQ ID NO: 138386 - DNA, 122 bp, Homo sapiens
tatccaagcgcggagtcagtttataaggtgggtaaccaagtccctggaaggcaattaaggcgcccatttcagaagagttacagccgtgaaaattactcagcagtgcagttggctgagaagag

SEQ ID NO: 138387 - DNA, 122 bp, Homo sapiens
aaaaagccaccgggctgaggaacaaggcggctgctgtctccgcggggctctgaggtttcccggccccttcccgccagcggccagcctcctggcagccgggaccagcggtgggagggctgggc

SEQ ID NO: 138388 - DNA, 122 bp, Homo sapiens
attttggagataatgtgagccacgctggccaagcacagccctcagccctttcagcagagccgtgtgctgcacacacatcttcagcttttctgggcctccgttgcctctgggtacatttggat

SEQ ID NO: 138389 - DNA, 122 bp, Homo sapiens
ttatagctgttgagagctgaattgccggcattgatcacaagtgagactggaaaaacaacccggggaacactcttatgttaagtcagtagcaccatctcaaacatacatccaacttctgaggg

SEQ ID NO: 138390 - DNA, 122 bp, Homo sapiens
ctctctgtgtgtcattttcctattctgtgaaatacaatagaaataataatttgtctgcttcgtaaagctgttgtaagaatcaaactgttaattaattggtagggatcattgtgtgattcact

SEQ ID NO: 138391 - DNA, 122 bp, Homo sapiens
tctctcaccactcatctcttccatcttgggagaagcctccagatctccagatgtggaatacgagtaactaagtctctactgcctgcctcgggacagagtggatcccaagaattgggcaattg

SEQ ID NO: 138392 - DNA, 122 bp, Homo sapiens
tataatcaagaccccattggtttggactggggagggggtgtcgtgtccaccagctctcagcgctctgttatggaaccaaactgggtctgtttgcccatgcgcaatggaaaaccaaacactga

SEQ ID NO: 138393 - DNA, 122 bp, Homo sapiens
agtcatttccccaaactgtccagtagttcttcacaagtcatgtgtggcccccgtgtggtccgcccatgctaacttcctgccgggggttcccactaggcgcctgctgccgcttacccgcaggc

SEQ ID NO: 138394 - DNA, 122 bp, Homo sapiens
cgctgttctctggagccctggcagtgcgagtatccgggacgcgcctgtctgggaattctccggccaagcactcacctactgtagatattgtcaggattttggcagcctctgagagcaggacc

SEQ ID NO: 138395 - DNA, 122 bp, Homo sapiens
tagggctgctagaacactgtaaattgcatatatggctcacattaggtttccactgggccacgctagtaaagaacacatcttcaaccatagtatgattaagcctgtggaatcctctagaggct

SEQ ID NO: 138396 - DNA, 122 bp, Homo sapiens
acttaggataagattatattttattatcagtcctgcttcatggaaaccagcctctggatgcgacagttttgctcagacatcctctctcaccctaactatgaccatgactcagtcctttctta

SEQ ID NO: 138397 - DNA, 122 bp, Homo sapiens
gcaatcccagctccttgaaaggttttttctttttgtaccgacactatcattcccgcccttcgtccccaactcctttagtcccctaaggagtgaggggggtacacatttctgctcggtaaccc

SEQ ID NO: 138398 - DNA, 122 bp, Homo sapiens
ccgggcacgcgcacatgtgagaagcgctgcctgtggccgctgggaggctgcgccatggcccgctccggagagctgcgaggtggctctgcgaggtttggctggagctgggcagcgaggcctgc

SEQ ID NO: 138399 - DNA, 122 bp, Homo sapiens
ggttccgaaatacaatgaagactcttggaacaaaggtgtctgcaggtttctgaacctcaccgcagaacaggcgcggagtcaggcccctggatttgccctgttggaaggagggccgcggagac

SEQ ID NO: 138400 - DNA, 122 bp, Homo sapiens
acaaggtaacaacagtgactccctcaaagggcaatggtgaggattaaatgaggtaacacacgcaaagtgctcgccaggcaggcccacagtaatcattgaataaatatgggcagtgtggccca

SEQ ID NO: 138401 - DNA, 122 bp, Homo sapiens
cagaccccgtgcgtggtaggggcttcaagaatacgcatcaaatgaacccgaacccaaggacgcttgctcacctgtgtcatctgggggtctccttccacaggaagcacatctgggcagagtga

SEQ ID NO: 138402 - DNA, 122 bp, Homo sapiens
ggccgggtcaggtcgaccccccaacctcctgacccccttcctgcgacaattaggctttcccgctagtctgtctggctccctggctcttccatctggctccctggctagtccgactcccctct

SEQ ID NO: 138403 - DNA, 122 bp, Homo sapiens
aagcacatgccagggtggctggggcccagccagggcagtgggtggtgacctgtttctggccggggctggcggctctctcagagccttaggaaaaagcccggcctcctggtggggcagtgccg

SEQ ID NO: 138404 - DNA, 122 bp, Homo sapiens
tgacatttcttatcagaggccctgaggaatcagagataggagccctttctttttcctggccgccaggcctccatgtgcagggctggcagggaggctgggaggggctggctgggtctggtagt

SEQ ID NO: 138405 - DNA, 122 bp, Homo sapiens
ttccctgagtcggagggggaggggggcgaggggcggacctggcccagccccgccccgcgccggagcagtgccggagccccgccagagcccgacttcagccccagccagatcccgcgtcaacg

SEQ ID NO: 138406 - DNA, 122 bp, Homo sapiens
tttagggattgttggctacaaagtgaggaagaaagagaacctggttcattcttatcaacacgtatttttggaggtctatactgggctaccagcatagagtattcagcagagtaaagtgtctc

SEQ ID NO: 138407 - DNA, 122 bp, Homo sapiens
tccaaaatggacgcttgcatgtgtctttcccgagcggtagcgattctggggccggctacacggctgtatgtaagttaggtgtactagtttttttgtatgtttttttgaaacagagcctcgct

SEQ ID NO: 138408 - DNA, 122 bp, Homo sapiens
gcactgcacagattcatcctcctgtaccaggcaaggcgtgtggaggacgaggcccaggggcgcgagctggtgtttgctctgtggcagcagctgggcgcggtgctgaaggacatcacccctga

SEQ ID NO: 138409 - DNA, 122 bp, Homo sapiens
gctccagaggaatgtccccagcatgaagagcccggggaacatggacttgggcactgccaccgtgtactctgcagggtggcagggagagcgaggtgaggaccggtgcatagcagcctggtagc

SEQ ID NO: 138410 - DNA, 122 bp, Homo sapiens
ttgaagttattccacattttccccactttatccattgattataaaatcatcgggggcgcacggggcagcctcatccaggacacctaaggccaggcaggacgggcctggacggcgcagtcacc

SEQ ID NO: 138411 - DNA, 122 bp, Homo sapiens
ccacgacgcgctgtgggcactcacagcggctagttgggcatttcccagcagccaaggctgcgcactccgcccccgctgaggtcccctttggttcccgaggacccagctcctcccgcccctct

SEQ ID NO: 138412 - DNA, 122 bp, Homo sapiens
gggacctcaaccacctggtgtccgccaccatgagtggggtcaccacctcgctgcgcttcccgggccagctcaatgctgacctgcgcaagctggcggtgaacatggtgcccttcccgcgcctg

SEQ ID NO: 138413 - DNA, 122 bp, Homo sapiens
ctagagggagggacgaagaggggacggctgagtcttcttctcaaagtggttgggttgggccgcgggaactgccttcccaggcctattggcttccctgaatgggttgttatggtaacaaatga

SEQ ID NO: 138414 - DNA, 122 bp, Homo sapiens
gccggtgacagagtccagcggagttgtgggggccgggggcgccatgggagccactggcgacgccgagcagccgcggggacctagcggggccgagaggggcggcttggagctgggggatgcgg

SEQ ID NO: 138415 - DNA, 122 bp, Homo sapiens
taaacttactgtgagatctcaggcagagttgaagctaaatcagcagcagacagaatatatcgaatattattaacagtttagacaacattgggctattccccacatgttcatattctctttct

SEQ ID NO: 138416 - DNA, 122 bp, Homo sapiens
atttccattcctttccccaaccgggctctgtcttttcaaagagccagccttgggggaggccggtgagaatgatgcctggggaaagaatgtgccctgctctgtcaggctgagggggacagctg

SEQ ID NO: 138417 - DNA, 122 bp, Homo sapiens
acggaactgttgtctggacccctcccgccagctacaaaagctcctgcaccatggacgtcacgtttttcccgttcgaccgacagaactgctccatgaagtttggatcctggacttatgatggc

SEQ ID NO: 138418 - DNA, 122 bp, Homo sapiens
actcaccacaccggaacacggagagctgggccagcattggcacttgataggatttcccgtcggctgccacgaaagtgcgtttctttgtgttctcgggttggaaccgtgatttccacagaccc

SEQ ID NO: 138419 - DNA, 122 bp, Homo sapiens
cgttccatgacccagctgacttcgatgctgcaagcctccctttcggtttcccggagcaagcgcccgagtgcgtgttgggctcccggcagggctcctggccggccctcgacggacttccccgc

SEQ ID NO: 138420 - DNA, 122 bp, Homo sapiens
ctgcgggagaaaggcggagggtggcggagccggaaccgcagacgtatctgggatctctcacgcgcggcgcttcggcttccccagccgccgccgccgcagcccaacctgctgagtgcgcgagc

SEQ ID NO: 138421 - DNA, 122 bp, Homo sapiens
gaccccagcgaatactttaggaagcacccacctgttcgcagatcagggctccggactaagcgcacgagcccaggtcccagctgagcgcacgcgaccccaagtaactgggtacaagtctgcat

SEQ ID NO: 138422 - DNA, 122 bp, Homo sapiens
gaggagagatgaggcgcgggcagtgagttcaagcacggttttggcttccgaggtttcggacgtctgcagaatcggacagagtcgaagagcgcagtgttcggttgacggttgggattcacgcg

SEQ ID NO: 138423 - DNA, 122 bp, Homo sapiens
gcccatggggtgggctccgcagaggctgtagtgttccaggagaggggtgccatgaaagcgcggttagtagcctgcaaagtgttgaagggtaaagctgcctgtgaagcaaagggaaggtgcag

SEQ ID NO: 138424 - DNA, 122 bp, Homo sapiens
aaggcctgaccctgccacccgccctggcgtgaaccacaaagggcactgacttctcgctcccgctcagtcttggtcagtctcatctgccgcagcatctgcgaccgctgctccatcatcagcgt

SEQ ID NO: 138425 - DNA, 122 bp, Homo sapiens
cagacagggcagctgccgggcggaggggctcctcacttctcagacagggcggctgccgggcggaggggctcctccatacacgtgagtttctttggttgagtccgttgtacaaaaatcttcct

SEQ ID NO: 138426 - DNA, 122 bp, Homo sapiens
caacgtgggaggacgatctgtctgactcccttcctcatctcccagcctcgaccctgcctgcgctcgcccccttgggtcctttgagtctcatccagagcactgggctgccttccggggtgggt

SEQ ID NO: 138427 - DNA, 122 bp, Homo sapiens
accaggcactcttccattcactctgcatattgcatcttatttggttaccacaaagtccagcgagacagctataattatcctcactttacaaatgagaagctggggagctgagaaggtaaatg

SEQ ID NO: 138428 - DNA, 122 bp, Homo sapiens
gagggtctcagggctcagaggctttgttgatgttaggccatcagttcaagaacaggaccacgcagtggggagctgtgtgctgatgcggaaggaccctgtggatgttaccggggaagaatgaa

SEQ ID NO: 138429 - DNA, 122 bp, Homo sapiens
aaggccctttggagtaactgcagcaatgagtgcccgggctgtgcttggagtaccagtgctcgcccggggctatactgaatgagtaagcagccccgtctgcttttgctgtgcaaaggtaaggg

SEQ ID NO: 138430 - DNA, 122 bp, Homo sapiens
accttgcccgtcagacttcaggtaaaattctcctttatccagtcagcccatggctacactcgtgcttttagaaaatttgttctgctcatgtcagaaaccattaggcatttaccggaatctaa

SEQ ID NO: 138431 - DNA, 122 bp, Homo sapiens
ccgcgccagccgcccccagtcccggtccccagtccacctccacaggcccccacaaccacccgtcaccttggctaagtgaccgcacaggaccaacggcacagccacaccgggacgctgaagca

SEQ ID NO: 138432 - DNA, 122 bp, Homo sapiens
gccggagcaccgtgcccagacacacgccgaatccggttcctaactccgctgctttggacgcgcctcgacgcgaggcccccagcgctcagccacaaaatacagcctggcacgcgcagcgctcc

SEQ ID NO: 138433 - DNA, 122 bp, Homo sapiens
ctttaaacatttgatttgattaagtcctacaaggaacaagcagagttatgctagccacagcgtggtatttggaattccttttgttattaaaaaattccatgctggttgtatgagttcaggaa

SEQ ID NO: 138434 - DNA, 122 bp, Homo sapiens
cacacctaacgaatggaggcgggccggaggccggtggaaccagctcgagctctcgagggccgtttgggggctcgcgccgtacggcttgtgaagtctcgcgcctctccccttagtccgcctct

SEQ ID NO: 138435 - DNA, 122 bp, Homo sapiens
gagtaagaggaagtaccgcttctttacaagcacgacttggcacggaagaacttcccgctgcgcctgcgcctgtgcgtatgaggtcgacccggacgagattcttcgtcgccttggcccaaatc

SEQ ID NO: 138436 - DNA, 122 bp, Homo sapiens
gcagcctaggttcaagaagaagaaaacctgaggcctcggctcaccctgacagggaagtggcgtggggaccgctaaaggactgcgaggttccactgcccagggctgtctaaccgcttgcttta

SEQ ID NO: 138437 - DNA, 122 bp, Homo sapiens
agtcagtaaggccccacttcggcaggttttgttttcgtttcctcatgcctctgcaatgctcggagtcacccacgccttactcactgcggctggaacgaacccagactcctcactcctcccac

SEQ ID NO: 138438 - DNA, 122 bp, Homo sapiens
cctggagcacatccgggactcggcgaggcgtggtctcgggaggcggagtctgacgcaagccggcccagcccacctggctaaattcacagtcgcgctcgctccttccgcccgccagaggtcgc

SEQ ID NO: 138439 - DNA, 122 bp, Homo sapiens
acctgaggcggggcctggagaggctgacggggcgcagggcaccctgggagtcgtagtcgccgcgggcgcgccggcgcagagcaccctgggagtcgtagtcgccgcggccgcaccggcgcaga

SEQ ID NO: 138440 - DNA, 122 bp, Homo sapiens
catttttctccactggcgaatgcaatctaagggtcttcggaaactgtgggagcccttgggcgcacctatccgcctcacctcgaggcttctcacccgctggccgcccccttgcgcccctcgtt

SEQ ID NO: 138441 - DNA, 122 bp, Homo sapiens
ggcatgaacttagagctccctggtcctggccagaccaggctgggctccttgctgggcacacggaagcctctgccttgtgttggtgcccgtgcgggatgctgccaggagtgtgttggtggcgt

SEQ ID NO: 138442 - DNA, 122 bp, Homo sapiens
acacagctgaaagattttagctgactaaatgctcaatatgagttcataggaaccaagccacgttaagcagctcatgtttcccctttgccttcaggatgccagatccctccttagtgtccagc

SEQ ID NO: 138443 - DNA, 122 bp, Homo sapiens
acgggcagtgtggcgtggcatggagtggtgtggcgtggcgtggcgtgttgtgtggcgtggcgtggcgcggtgtgtcgtggtgtggcgcggtgtggcatggcgtggtgtccctgcttgctaca

SEQ ID NO: 138444 - DNA, 122 bp, Homo sapiens
ccccggccccgcccctgttcttgtcctcccccacgggtctccataaagttcatttggcgtcgcaccgcgcgagggcttctgggagcggccagccttggccaatcaggaagcgggggagagcg

SEQ ID NO: 138445 - DNA, 122 bp, Homo sapiens
ggcagcttaggctagaaagccgctcatattcgcaggtacaagggctgggtaagaacgccccgcctggctgactaacttgagttccgcgctctggacaggaattatgcacagggcgtcgctgt

SEQ ID NO: 138446 - DNA, 122 bp, Homo sapiens
gtcccttcacgattcttttatatggcaacctgttcttggacctggcagggcccagagaagcgaggaactccgcagctcgtcgacacgtctcgtctcctgtcccaattcagggcttggtgagg

SEQ ID NO: 138447 - DNA, 122 bp, Homo sapiens
gcctatcgccgccgccgagaccctccggccaacagggacccgcggtggccccggcccccccggtagtgtctccctgacccgagtcccgtccccgggcctcttgccttcaaccctggtctttc

SEQ ID NO: 138448 - DNA, 122 bp, Homo sapiens
ccctgaaaaacctttctccctcctccttgcccacccttatccctagtactcactggatgtcggatatcagtgataagcaggacgatgtcagacatctctaacacccgccacagctgcctcca

SEQ ID NO: 138449 - DNA, 122 bp, Homo sapiens
gcgtggacctgaggggctgccctgccgggggagcagctttgccatcctttgaatcagcagcgacagctctcgggctctgaggccaggcgctgcctaagaagccggagccacgggtgtctcac

SEQ ID NO: 138450 - DNA, 122 bp, Homo sapiens
gatatgtactgaggggacgtggggtacactcggatgaggggtctgtggacatattcgtggcgcatgtgggtatcgctggtgtcccgaggtggggagggagaatgcggagcgcgtgcgtgcgg

SEQ ID NO: 138451 - DNA, 122 bp, Homo sapiens
gcgacagccatgcagatcctgagcgggctggagcacctggccgtgaggcagtcccctgtgcgtccccctcgggccccaaggcgggggtgggtacccgcacggccgcaggaggctcacctgtg

SEQ ID NO: 138452 - DNA, 122 bp, Homo sapiens
gcggccagagctggggtcaacacccacctcagcccttcttgcattctcttcatgtgacagcgcagcttccccgcgagtttcgctggccgcgagcctcaggtccggacgcagtgggggcgcct

SEQ ID NO: 138453 - DNA, 122 bp, Homo sapiens
gtgggtggctgctgtgtggctgggtggggcctcctgcacgtcgttgtcctgcttgtcctgcgaggtgtcttgcaggccgtcatgcaggccacactgacggtaacgttgcaggtcgtcttgca

SEQ ID NO: 138454 - DNA, 122 bp, Homo sapiens
ctgggagacacagagactgagggccaaaaggacagagatggaggaagacgacagagacaccggaagaaaaggaatacagccagcgacagaaacacagaaggggaaatcaggaggaaggaaat

SEQ ID NO: 138455 - DNA, 122 bp, Homo sapiens
agggacctgccctggcccacaggactcctctcttctccaggtctgaagatgccaagaatccggacatcccaaggcctccctgctgaactttcccaccatgccggcccccgccttgccctcgc

SEQ ID NO: 138456 - DNA, 122 bp, Homo sapiens
ccttatgactctgacctgtcagccataagccctagcaaggcaggcgtggaggtgaaggcccggtgggtagccaggaaggctgacatgaagctcacatcagtccctgatgtccgggtatccag

SEQ ID NO: 138457 - DNA, 122 bp, Homo sapiens
cctcgcccgggaagaggggacagccccttccaggcccagggctgggggtcccaggtctgccgcagcccctcccccgggcctcgctctgccaaggaggggtcctgagcccgggatgtgcacgg

SEQ ID NO: 138458 - DNA, 122 bp, Homo sapiens
ggaaagctggcgtgtgagacagccaacactcacggcgcagctgatacagccagggatgcccggagggccgcgctgctgccaacatgggtaggagacactctgatgtgcacacacacgtgtgg

SEQ ID NO: 138459 - DNA, 122 bp, Homo sapiens
tgtagagaaaaggagggagggcataaggatggcagcaggagggcatccctggcctgagcccgcccctcaggatgagctctgtgacacataagctctgcactggaccacgccagcctctgtct

SEQ ID NO: 138460 - DNA, 122 bp, Homo sapiens
ggcggctggccgggtgggggtgctgacccccccatctccctcccggatggggtggctggccgggctgaggggctcctcacttcccagtaggggcggccgggcagaggcgcccctcacctccc

SEQ ID NO: 138461 - DNA, 122 bp, Homo sapiens
tcgcgacacttgccgcccgtgccctgcggccctgcacgccccacccgcggtcgcgcgccgcgctccccgccgcctcaccttttcgcctggcatccgggcccgctactcgcccactgggagcg

SEQ ID NO: 138462 - DNA, 122 bp, Homo sapiens
ctctcagacttgagcgttaattggcttatttatttatggctttaaataaaatcgatttaacgttagttttgttttgaagatttttgtgtcacccttgatgatctgaaatacctaaatatgcc

SEQ ID NO: 138463 - DNA, 122 bp, Homo sapiens
cttgaacggtggcccatggcccccaccccctcactgtttccttgtccctaccccccaaaacgttggactcagttctggggggactagatcccctgctcctcacccagactcaccagggccct

SEQ ID NO: 138464 - DNA, 122 bp, Homo sapiens
cctctgtttttctgttctattggggccctcagtggattggataatatccacccctgttggcgagggtgatcttgtttactcagtccactaatactaatgctaatctcttccaaaaacatcct

SEQ ID NO: 138465 - DNA, 122 bp, Homo sapiens
ataaacattagattttgggtgtactggacagtagaaaacaaaaatgtatataacagctcccgttacttattatggctacttgtattgatgtggctcatgggctgctctcagagtggatttct

SEQ ID NO: 138466 - DNA, 122 bp, Homo sapiens
gggtgacggacggcacctggaaaatcgagtcactcccacccgaatactgcgcttttccgacgggcttaaaaaacggcgcaccacgagattgtatcccgcacctggcttggagggtcctatgc

SEQ ID NO: 138467 - DNA, 122 bp, Homo sapiens
agagtcactgaaggtggccagaatgaggtcacaggcaactatggaaatcatgtaggaaggcgaggaggtggccacagaaggccatgggaagggaaaagttggcacagaagctacaatacagt

SEQ ID NO: 138468 - DNA, 122 bp, Homo sapiens
ctaatgcggaaatctgcacccagggcggaactcgccggtgtcttccgcgcgcgcactgcacgtgtcggcatcctttctagtgcgcctgcgcagccagcaccgcctgcacctgcgctgacgct

SEQ ID NO: 138469 - DNA, 122 bp, Homo sapiens
gggttggggaggcatcggatcgcactttcgcctcctaggctggggaagatggtgcacatgcgttgtaatgcgcacgtgttactggcacatgactcccggtcccttgtgagccgaaacttgga

SEQ ID NO: 138470 - DNA, 122 bp, Homo sapiens
gggtggtcctctcccgctgcttgctagcccgggctgcgcctcttccagttccccgctgtgcgtcctctggatgggagaagctggcagctcgatgcattaccaaactcttctgaaagtttcac

SEQ ID NO: 138471 - DNA, 122 bp, Homo sapiens
aacaggagtgggacccgcatcacaacctttcccttgagggacttttcttgtctcttcacccgggttgtaggctcctcaaaacaagaaccacctgctcaaagttccacaaatatgtttcctga

SEQ ID NO: 138472 - DNA, 122 bp, Homo sapiens
gaaccagttcctcggagatgaattctgcctgcctggttatctacggtgtaaaacaacaaccgtttcacagtgttcacagattctctgggtcaggtcagggcggagcaaggatgacttgtctc

SEQ ID NO: 138473 - DNA, 122 bp, Homo sapiens
gcgctttgactgtgtgacattctgttccgtaggaaagcctgaggagtctcgtgtctctagcgtcttggaggaaagcaagcgcctggtggacaccgccatgtacgccacgatgcagaggtgag

SEQ ID NO: 138474 - DNA, 122 bp, Homo sapiens
ccagcctgtctcagggcagattaaatgcagctgagaatgttgggctcactcggcggcgggcgtcctccgggaataggcaggaacctcggcccggcctggccttggcggtgccggccgagggc

SEQ ID NO: 138475 - DNA, 122 bp, Homo sapiens
tcccgatggtgaactgccaaactttacctcgtcccgatggtgaactgcctaactctacctcgtcccaatggtgaactgcctaactctaccacatcctgatggtgaactgctaactctgccgc

SEQ ID NO: 138476 - DNA, 122 bp, Homo sapiens
caaaactcctcagacaccggattaaagaaggaagaggtttttttgttcagccgggagcgtcggcagactcgtgtcttaagagccgagctcccggaaaaagaaattcctagcccttttaaggg

SEQ ID NO: 138477 - DNA, 122 bp, Homo sapiens
atgaaagatctacgtgataataaacatgaaatggcgaaatactaaagcccaactaagggacgggtagcaagggctttccacagttcaacgcaggaaggaagagggagtgcaattatttttat

SEQ ID NO: 138478 - DNA, 122 bp, Homo sapiens
ctctgggttaaatccttgcttccaccacttaaatagctatctagccttggaaaagttattcggcctagggttgagagtgtgaaatatgtaatgttaatatgtaaaaccctaaaaacaattcc

SEQ ID NO: 138479 - DNA, 122 bp, Homo sapiens
ctgccaccagctcgatcttgttttctcttcccctttgcgcttttccacagagctctgattcggacctgagtgtactcctctgtgtgcacgtgccgggccctgcgacacacgcctgtgcttct

SEQ ID NO: 138480 - DNA, 122 bp, Homo sapiens
acaacactggtgtgcgcacctggtgctcagggagaaatgccgggtaggcggagtcgtagacggatgtgggtctttgttgcaggaatgatttaggctgtgcttctagttgccttcacactctg

SEQ ID NO: 138481 - DNA, 122 bp, Homo sapiens
ctccaattctcaggtttcctgatagacctgatgagccgcttcaccagcgccgcttagcttcgcttctttactgtcattggctgtcgctgttccaggtcccgcccacagcgacctcaatcctg

SEQ ID NO: 138482 - DNA, 122 bp, Homo sapiens
cggtgagaagagagagcacccggctcgtgtcagggctgtaaggtagctgccgcttactcccggaaaccggtggccagtgacagatgctagcggtccataacttcggctttcatgcagctccc

SEQ ID NO: 138483 - DNA, 122 bp, Homo sapiens
agccaacgggcttatgcagaccagcaagctgtgagagtgcaggcggggggtgggcggccccgtgtcacccccaggagcggaggttgcactgcggtgacccccacccatgacctgccagtcag

SEQ ID NO: 138484 - DNA, 122 bp, Homo sapiens
ttgccaacagtcttcttggtaaggttaagggaatggttatcaaattgtggtaagaactatcggatggggtggcagaaccacagtcagtaaaatttaaggtgcttgcaacagtttgggagagc

SEQ ID NO: 138485 - DNA, 122 bp, Homo sapiens
ggcctcccagtggagctgttctctgctgttttaaattactttctactcctccctttctaacgtccactcctggactcatttgttagatcaatatatactgggactgttgtgttttctttgag

SEQ ID NO: 138486 - DNA, 122 bp, Homo sapiens
tgcctctgcactcgtgtttccaggttgggtggctctgacagccccttcctgtgggtcctgcgtccttgtgtggagtcacgcttgctcggcagctgctcacttcctccggttgttttgccgct

SEQ ID NO: 138487 - DNA, 122 bp, Homo sapiens
agctacttttgatggaaacgacagcaatgctggatcttctggtaattcgtcagctgaaatcggcactgtcacaaactctcctgtgtcaccttctgatactggttctcatttgttctagtaga

SEQ ID NO: 138488 - DNA, 122 bp, Homo sapiens
cagctcaacatggattgaagactcaacatagacttgaaaagacctgaaaccatacaactacgagaagcacatacaaagataaagctttggacattgacgtgagtaatgatttcttggctatg

SEQ ID NO: 138489 - DNA, 122 bp, Homo sapiens
gttccttccctccacaagatgggaagtcagtcacacctggttatacctcctcccttatgtcgtttagaaacaacaaacgaccggccgggcgcggtggctcaagcctgtaatcccagcacttt

SEQ ID NO: 138490 - DNA, 122 bp, Homo sapiens
ccccaccacacctgaggaaaacttttccctcgcccctcaattcaaattcagcagtgcccacggttgccgcaaaccgcccggtccctagcaacaaggttccggccgtagagcgagagcctcta

SEQ ID NO: 138491 - DNA, 122 bp, Homo sapiens
tggccacgccgagatgtggcgccacaggcccagggtacggccttgcggtgctgacatctccgtacctaaggaaacagggcatgctgagcggatggcacacggtggtccgctggccccacgac

SEQ ID NO: 138492 - DNA, 122 bp, Homo sapiens
cgaggagataaccgtttttgaatgaacggcagtgcaaagcgtggtcggggttagcagcaacgtggctgggcgcctttaactcggcgtgacctccgggtcccaggcccgcgtcccgggcccag

SEQ ID NO: 138493 - DNA, 122 bp, Homo sapiens
tccctgctcacacaaggcccaaaggcagggagaggaaggcctgggggcccccaggaaacacggtccccttgagtttcagtccctgcacagccgcgcacagctgtgcatccttgggtatatgg

SEQ ID NO: 138494 - DNA, 122 bp, Homo sapiens
tgcccgatcccgccgtggcagaaggaaaggaccatcgctcaggggccggagccggaggcacgagcagcagtacctgcaggccgccatgacacccggcacgcggtcaacgcaggctgtgccct

SEQ ID NO: 138495 - DNA, 122 bp, Homo sapiens
ggagatagcattgagggcccttccgcggcccggcgtttcgtctcttgggacgattttgtgcgttccctcggtccccgtggggcccatagtcctcacttctgccaccccagagtcgtcgcgct

SEQ ID NO: 138496 - DNA, 122 bp, Homo sapiens
tcttgagttgatcatgttttttctatttggaggaaaaaatgaaaaacaaaagtgacaagccggagagaaaacaaaaggaataactaaagacaatcagaacagaatttggactttaatatagc

SEQ ID NO: 138497 - DNA, 122 bp, Homo sapiens
cttggtggacctgggatgaccacggatgtggttttaaaccagcaggtttcagagtcggggcgggtgcaacaggcttataaagggaatggtggaaaatattatacgttagtgaaagaggttgc

SEQ ID NO: 138498 - DNA, 122 bp, Homo sapiens
ttgccgcccactctgtccccacttttcccaggcctagatgctgctcccgtggcagtgggacgacagggcagctcagcacagacccacgggggcccggcaacttctctctgcatttccgcaaa

SEQ ID NO: 138499 - DNA, 122 bp, Homo sapiens
gcaaaatctgatgccctgtcggcccagcagggggcggtgctgctttagttttggcctggtcggggttgagcggaggagggagcgacttcgaattcagtctgcacctgactgacctcgagcaa

SEQ ID NO: 138500 - DNA, 122 bp, Homo sapiens
acctcccaaaaaagggcaggctgggctgcagactcggagtgtgagtgcacagcctttgcccgccgggcagcggggctgagcggagggagggtcgcctgggaacactagttctgtgctcgtcc

SEQ ID NO: 138501 - DNA, 122 bp, Homo sapiens
tcctccagaacctgccccaccctaccagtattcaaaagtattagcacaataccataatcacgcaatctaaataaaaggaacatccatttaacattaactgtcacttttttatgcacgtgaat

SEQ ID NO: 138502 - DNA, 122 bp, Homo sapiens
cccaggagtgcggaggagctgtctccggattgggggcgagaacgccaggggcaccagctccgagctcaggccccactcccgggcggttcgggacgaatcccctctacaggccagtgtgtgtg

SEQ ID NO: 138503 - DNA, 122 bp, Homo sapiens
ttgaaccttggaattaaattctgctggggcctgggacaaaggatggggccctgagtcggccgccccctccctcatggccccgacctggaaacatctgagggcttcggggccgggggtggtcg

SEQ ID NO: 138504 - DNA, 122 bp, Homo sapiens
cggctttttgccccaagcaccacctcggcttttcccccgccgccgcggctttttccccaccgcggctttttgcccgacccggctttttgcccctcgctgccacggctttttgccccccgccg

SEQ ID NO: 138505 - DNA, 122 bp, Homo sapiens
gtgcccttgcaggagcctcctgtccctttgttccagcaggtgtctgtgagtctgtgtgcacgcccttgggggcttatgggacctataagaacagatgattcttcccgtctgttctgccacaa

SEQ ID NO: 138506 - DNA, 122 bp, Homo sapiens
cctggggatatggcctgcccctctgcaaccgtgctttagtgagacaacaaatagtcaacacgtacaaaagctcagaaagtgctgtggaaaacatcagctagggagagagggggctacttgag

SEQ ID NO: 138507 - DNA, 122 bp, Homo sapiens
cggggtggcctctacctgggtctaacttgctgtctgactctctctcagctcctgaacacccgcaccaagatgtcctgccagcagaaccagcagcagtgccagccccctcccaagtgcatccc

SEQ ID NO: 138508 - DNA, 122 bp, Homo sapiens
aggaaataaaagcagagtcaagaaagtgccttttatccatggagtgcccaatgtgttgtgcggccggccacgtatatagggatgtgtcagcacctgagatttttccttctctgagctagctt

SEQ ID NO: 138509 - DNA, 122 bp, Homo sapiens
accacgctgttactggcgtagtcgtagttctggtcggcgtcctgtgcaatggcgctggcccggacctggggacaagcggtgggagcaggtgagccggggcacctcttcccgcgcctttgctc

SEQ ID NO: 138510 - DNA, 122 bp, Homo sapiens
ctagggagggagagcagaggcaaggggatcagtcgagccccgctggtgggatgagtctgccgggacaaggggtgctagctgtggtcctcgtctgccttgttctcagctgtatcctggccccc

SEQ ID NO: 138511 - DNA, 122 bp, Homo sapiens
cacacacgtgtacaaggtgtgacggagccccgcacgcccacgtgcccctcaccggtcgctcgatgagctcgatgcagggctgtaggtccagcccaaagtcgatgaagttccactcgatgccc

SEQ ID NO: 138512 - DNA, 122 bp, Homo sapiens
tttttctctcaggatgaggtgtatttctccgttcatttcagatatgcatcagctagtcagcgtaaattgtgctttttatatgctcaccaggtgtaggtaagagctttggctgagatggagaa

SEQ ID NO: 138513 - DNA, 122 bp, Homo sapiens
gcctgtactgagacaccctggggagcagggggagaggctgacggattggacagaaggaagcgacgaagtgaagcttacgttgtttttttaaaaggactttctgatgtagttcatacaaaaat

SEQ ID NO: 138514 - DNA, 122 bp, Homo sapiens
aaggggggtgggggcctgaccaggacaggcaaatgggaggggcgcgccagctggggagtccgcgtggggtggcaacgcgaccccacgaggggcgcggtgcaatgtcacccccagaccccggg

SEQ ID NO: 138515 - DNA, 122 bp, Homo sapiens
aggccctcggggaacccagccctctcccggcagcgacatctaagaccttagtaggatgtacgcacccccctttctccaacgccaccctctccccctcccgccagtctccacccgaagaatct

SEQ ID NO: 138516 - DNA, 122 bp, Homo sapiens
tcacctggagcttgatgccaattcacaggaaggtggccctgagggcgccagctaggagggcggccaccccaccgggggctctgggatggagcctcccctggactgcctgaggccgggcccat

SEQ ID NO: 138517 - DNA, 122 bp, Homo sapiens
tgaagactggatacagcggcaccttcctggagcagtggtaccccttaaaggtgaagggaacgtgggtgttgcaacagaggaccattatcaagaagactcttttgggtttggtctgagaggca

SEQ ID NO: 138518 - DNA, 122 bp, Homo sapiens
gtgccttcttggggaggatgaggtgggtcccactggtgctaacaaagaccacccgccctccgcccctggccgtgaccttagcaagccagggccagatgctcagggctcattccctgccactc

SEQ ID NO: 138519 - DNA, 122 bp, Homo sapiens
cacactataggatttatcttgatttgctgcctttgaattgagtcaactcttttgtatgctcgttgaattgcccagctgctggcggcgagcggagagcgtgccgggggtactgaggccgggaa

SEQ ID NO: 138520 - DNA, 122 bp, Homo sapiens
ttttgaatgagcagttgtagagctgttgcttctgaaatgtgcccagatattaacatgttacgtataacaatcagggccagttgtcttactaacatccttgcagtcaattgaaaaggtaatct

SEQ ID NO: 138521 - DNA, 122 bp, Homo sapiens
gaggaacgaaagccccgggaggaaggaaagaaggaaaaggagctcatcacagccagctgccgaccctcccatcgccatgtcgtgggtgggccccatgcaggcagcggcatgcaagttgagtg

SEQ ID NO: 138522 - DNA, 122 bp, Homo sapiens
catcaggactgacttggcttcttaaaggggccagtgtcggggacggggagagccgctcagcgaacacctctccttggaaaggaggctgggcaaccactaaatcattcttcagggcttcccct

SEQ ID NO: 138523 - DNA, 122 bp, Homo sapiens
ctgctcgagaggccagggtagggtaaggactccgcaacctagggtcccaaaaccctggagcgaatgcggactaagggagagcggccggcgcgtcaccggcgctggcgtgtgacgtcagcgcg

SEQ ID NO: 138524 - DNA, 122 bp, Homo sapiens
cgggaccccaggtaagtcccgagcgcagctccggtgggcaaggctaggtgcggagatgagcggaaccaggaggggacgccaaaaccggttcccacgacgcgcagcgggtgggggttagggcc

SEQ ID NO: 138525 - DNA, 122 bp, Homo sapiens
tgagggccccgcattggactggagctcacagagctcttcctgtacccagccgtacagggacgggccggggttggggctgccagccgggcaggtgggcccacacctcagcctggctgcgtgga

SEQ ID NO: 138526 - DNA, 122 bp, Homo sapiens
gaggcaaaggaagggaagtcaaggcccagccggtccagggctgtgggaaggaggcacacccgggagtccactgccggaccggggttcccagctgctcctgcgcctcttttccttgccacatc

SEQ ID NO: 138527 - DNA, 122 bp, Homo sapiens
gtggtaaaggggtggcatgatttgatttgtaacttgatctcagcaggacaaggacactgacgtaatctccctttcccagtcatggggctaactggttggtataagtctcatttcaacataag

SEQ ID NO: 138528 - DNA, 122 bp, Homo sapiens
atctcagtgtgttggcatttttttcatgactcctgaccatgattccttacactgggcctgcgtaagagagatgtgttaatataccacaatccaggcagctgaacgcttgaccaaactttagt

SEQ ID NO: 138529 - DNA, 122 bp, Homo sapiens
ccaggctccagccactcacagattcacaacgcttttaaaaatacagcagtggagtatgagcggctatgtcagatatgagggttttccaccccctcccttttcttttaaaatatgattttgta

SEQ ID NO: 138530 - DNA, 122 bp, Homo sapiens
gaggatcattctaaagcctgtcaggtgaacgtatgctttcagatcttcataaatgcaaatcgctccttctggggtgggtgagcaagctgagccgcagagctgccttgggaggcgatggggtg

SEQ ID NO: 138531 - DNA, 122 bp, Homo sapiens
ttatgaatttgaaaggcatgtaagtaatttataatatgacttataaattaggaaggcaaccgaaagatgtttctacactgtaattcttgcagcacagctttgtatcggatggtccagtgatc

SEQ ID NO: 138532 - DNA, 122 bp, Homo sapiens
accacttattttactgaggaggaaatggaatctcagggaagtcatgtagccagcacgtggcggggcctgactccagcctgtaaactgtaaggcattttgggcttatctactgtgaccaccat

SEQ ID NO: 138533 - DNA, 122 bp, Homo sapiens
aacacactttgcctattgccggctccaacaagaagtaactttccaggaagctgccggccccggcagccgccaggatcgctgcctgcgctgcgctggccgccggggattcacccagggaggcg

SEQ ID NO: 138534 - DNA, 122 bp, Homo sapiens
tctctgcccttattcacagtgcctgagtggaagcctccctagaccctgtctgttacctcccgcctagcctaaaaagtgcagtctggcgggcctctcacccccaaactctgtatcttcaggga

SEQ ID NO: 138535 - DNA, 122 bp, Homo sapiens
ccccccctgctgcgtaacaggcggactcactttgttgtacattttgtctcatctcaacaccgaagtctgaggttcacgtgcactcaggcacctccggttaccgctcaagcagcaaggtcacc

SEQ ID NO: 138536 - DNA, 122 bp, Homo sapiens
ttcgctggtctgtgttgtgggtgagatccatctagtctttgagcttgttatatgggcatgcgtgtgtgatatctgggtggatactgttgaagataactcctataataagaaggaaaatattg

SEQ ID NO: 138537 - DNA, 122 bp, Homo sapiens
taagagagtcatcattgtggttgtgagctgggcccaggtatatgccacaatttcacctgccggcaagaacaaaacaggagaatcacatcacctgggtgctagatccagtgatatgtcacaat

SEQ ID NO: 138538 - DNA, 122 bp, Homo sapiens
tcacccagctctttgttccacgcctgctccaaagcctattaatttgtcagatggtcttctcgggaaagataaagttgctatatcacctgtctgcttatctttcagtcaactgttagcggtgg

SEQ ID NO: 138539 - DNA, 122 bp, Homo sapiens
gccccaccgagagccgctgaatgggcgtgattagcatgtgaaaaggcgagcaaaactccgcggttcaacagctaaagagcaatttgatggggctgggatggggaaattacttgattagcgtc

SEQ ID NO: 138540 - DNA, 122 bp, Homo sapiens
ctgacccgagatcaaagaatctaagcaccccgttgatgtttgggtctgtcatacagttttcgtgacaagtcaccgctcagcctatacttgaacacctccaataatggggagctcaccacttt

SEQ ID NO: 138541 - DNA, 122 bp, Homo sapiens
acacagctgcacaggtggggagcctggtgtctggtcccagcccgcttctgcttccttacccggcagctgcccaggcacagccgcagggaagccaggctgcattcacggcatctccgggagag

SEQ ID NO: 138542 - DNA, 122 bp, Homo sapiens
gcggggcggggcctgaggcgaagcaggccccgcctcaaactgcgtgggcggggagagtgacgtcacttggcccgcgcttagggccctcgcggggggcttgtgggtcctcctccccctcccac

SEQ ID NO: 138543 - DNA, 122 bp, Homo sapiens
gccatttaatcaattcaagtcacattcctagaagacaatatagccatctgatgagttcagcgtcaatggaatgagccaaatccacacaacagcattttacaaaaataatcagtggtttaaag

SEQ ID NO: 138544 - DNA, 122 bp, Homo sapiens
atcgactcggacacagaggacagcggcagcgacgagaacctggatcaggtgagggcaggccgcggaggcgcgggccggcggagccagagggctgtcggggccgcgggagccggagacggccg

SEQ ID NO: 138545 - DNA, 122 bp, Homo sapiens
ggtttctactgacaccgaccccctgggaatgctgaaaacactagaacacagctcttgattcgctcagattttcttatttaagacaaagaaaatttcttgtgcaaaaatcgagtcagtatcat

SEQ ID NO: 138546 - DNA, 122 bp, Homo sapiens
ctgccacccgctcatctttaacatgatacgctcagtgccttagacttaagtctctgacctcgggagcgcctggctgtaatcttttaccatggccttgccctcctctcaggggcgggacccca

SEQ ID NO: 138547 - DNA, 122 bp, Homo sapiens
ccacaccccaggaaacaacacggggggctgcggctggcttcagtttcagtacccactgagcgccggcatggggtggggtccatgcttgctgttcgacctgcattcgggtctggaatcaccac

SEQ ID NO: 138548 - DNA, 122 bp, Homo sapiens
ctcccacagtgaacaagggttggtctgtgtgaccaacagcacatggcagaagtgatagtacgtcacttctaagattgggtgataaaagacttgcgtgctgtcttaccacttggtacacactc

SEQ ID NO: 138549 - DNA, 122 bp, Homo sapiens
gaaataggagtctaagaatgtattatctcatatggcccctaaaggtcaccaggggcctgtcggtggcattctgagaaaatccaagcacccaatatgctctgcatttggagaaactgggctgc

SEQ ID NO: 138550 - DNA, 122 bp, Homo sapiens
gaaaatgctcctgggaacctgagttgggctgggtttggtaggagaatgggtcctggggtgcgagtacagctgcaggggccagaagggaagccaagcttcattgtgggttctagagaatgagc

SEQ ID NO: 138551 - DNA, 122 bp, Homo sapiens
ctactagaaaacatagacatccagctaaagaatacaccaatattttcttgtctccttagacgagcatttattctctcaaagattattgagcttctactctttgaaagagctcttaagatact

SEQ ID NO: 138552 - DNA, 122 bp, Homo sapiens
gcgttccttagcttggcagagccagaagacccagaagctggagtcccagctcaaccaaatcggagttgtgggcagtcacgggcttccacaagcctcgagttgccccatctattcagtgggac

SEQ ID NO: 138553 - DNA, 122 bp, Homo sapiens
gcagacaggccggacccccagcagccagaccccggcaggcccggtccccagcagacaggccggacccccagcagcctgacctccagcaagcagccggactttcagcagccgcactcctagca

SEQ ID NO: 138554 - DNA, 122 bp, Homo sapiens
cgggtgtggtggctcatgtctgtaatccccgcactttgggtggcggacactggtggatcacgaggtcaggagttcgagatcagcctggccaacatggtgaaaccccgtctctactaaagata

SEQ ID NO: 138555 - DNA, 122 bp, Homo sapiens
tcaagagctggcaacagaagccctggggctccaagtcagggcagtggctgccgtggggaccggagccgggagcatgcaggccgttccgagggacagaagtctctgcaccttgactggggtgt

SEQ ID NO: 138556 - DNA, 122 bp, Homo sapiens
aagcaggcccaccctgtcagccaataagatccaggaaaagcagatgttgttaactgagaccgcacctgctgagaattaaacagccaattacaagcttcccggcgtcctcgcagaccacctct

SEQ ID NO: 138557 - DNA, 122 bp, Homo sapiens
gctagcagcattgtttcctggcaaatgtggcagtggtggggtcgctgccgctgctgctgccgccgctgctgctgcctcttctctcaagggtggttcttcgtccttcctgagcccctcaagct

SEQ ID NO: 138558 - DNA, 122 bp, Homo sapiens
gctcgcgccgcaggggatagtacggcggggtcggcccggccggcggaggggtggggctggcgcccgagggggaggggtgccgggggaagccgagctgcacctccgctccgcggccgacccgc

SEQ ID NO: 138559 - DNA, 122 bp, Homo sapiens
aaaaaaaaatagcgtgacgtggtggtgggtgcctgtagacccagacactcgggaggctgacgcaggagaatggcgtgaacccaggaggcggagcttgcagtgagctgagatcgcgccactgc

SEQ ID NO: 138560 - DNA, 122 bp, Homo sapiens
ctccctctcccaggaggtgaagaaaagccagcctcacccgggtggcgggggtccagtgcccgcctgctgcccgcccggccacgcacctgctgcagttgataaccacatcctctggcgtgatc

SEQ ID NO: 138561 - DNA, 122 bp, Homo sapiens
agctggggcacagtcagcttcctggttgccatctcaggcaaggctcggtgtgtgtccatgcgagtccaaacaaggaactgtggagccaggtgcagatgactcgagcccgagcagcgtcctcc

SEQ ID NO: 138562 - DNA, 122 bp, Homo sapiens
ttaggggacaacttttggaaagagcttttggtgtgctatcagtcctactctttcccccaccgaggagcaggtaaaaggtaattcctcctccatctcaaatctgggtgaaaggtcttcagaga

SEQ ID NO: 138563 - DNA, 122 bp, Homo sapiens
tgctcgacacctccggggtcttgctgcaagagggagctcctaggaagcctgttggactcccgcgctccaggtgtttcacactcaccgcagtgcagaggaaagagccccgggcttctggaggt

SEQ ID NO: 138564 - DNA, 122 bp, Homo sapiens
agcgacaaagtgattattttctctctcccaccagctaaatatagtactgaaatgttgatccggtcattgggttttcctacttctaatgaggggcctggcacaactctctatgtaaggatctt

SEQ ID NO: 138565 - DNA, 122 bp, Homo sapiens
ggcgagtcctacctatgttcccacggcaggaaggtgcagcctgtagacctggacaaagcccgtcggcgcccgcggccctggctcagcagccgggccattagcgcgcactcaccgccccaccc

SEQ ID NO: 138566 - DNA, 122 bp, Homo sapiens
gaactaaccgcgctctgaaaggttctaaatgtctgcggggctcagagccggatgtcacgtcgtcctcctctgccggttttctcttgggtccttttccgtgccgtcccgcgactccgcctctg

SEQ ID NO: 138567 - DNA, 122 bp, Homo sapiens
aattggagagaacttcactgaagcatataagccctttttttctaggccttctttctttgtcggcttaccaagaatcatccttcaaagataaatgggtgtgtgtgtgtgtgtgtgaatatttg

SEQ ID NO: 138568 - DNA, 122 bp, Homo sapiens
ttccaaaacccctgtactcaagattacagagtgtcctcagaagcttcatggttgctcacccgtgaagagtggaggactggaatccaaactcttatggtgcttttgtaatttctgtaaatata

SEQ ID NO: 138569 - DNA, 122 bp, Homo sapiens
aggtgggagcacccatggtgaggttgggagaatcggccgatcgaagagctccgtccgtctcgcgagagtatgaggcagcatctcctgtgtctaatcctcagggcaagggagggagggagcag

SEQ ID NO: 138570 - DNA, 122 bp, Homo sapiens
ttaagaatgatcaggcctggcactgtggctcacacgggtaatcccagtgctttgggaggtcgagatagatagatcacttgagaccaggagtttgagaccagcctggccaacatagcaagacc

SEQ ID NO: 138571 - DNA, 122 bp, Homo sapiens
gatttaggcaacaggaaggacaccaccccaactggccaaggctccacagagaacacagcccggggagcagggggctcacccacctcgccctgagccagccggattcatgtgatgagctctgc

SEQ ID NO: 138572 - DNA, 122 bp, Homo sapiens
tttgaagtaagtacaacagacatgctcctagtgagaagtcagactcttacttagacttagcgaaagactctccctcctttcctgcctgccaattttgtgttgaaatattgactttggattgc

SEQ ID NO: 138573 - DNA, 122 bp, Homo sapiens
ggggctttactctcgcggaagcccaaaagttggggtttgacctcatgaccttggccttcccggggggcgggaggccctcgggacaggacgcgctgtccccggagtccggagctcaggccagt

SEQ ID NO: 138574 - DNA, 122 bp, Homo sapiens
ggtgatccacctgcctcggactcccaaagtgctgggattacaggtgtgagccaccgcgtccggccatgagttataaatattaacaatttcttgctgtaaattgaaagcatccttcgcgtctt

SEQ ID NO: 138575 - DNA, 122 bp, Homo sapiens
gacacgatgggtttgggggatcatgtgtccaaagggattttgttccagagatgctatgcgcggcatgatgtttccctgttaccactttgggaacacaatctcttggcaactaaacctgtaaa

SEQ ID NO: 138576 - DNA, 122 bp, Homo sapiens
acggaaacgaaaggcgagcgaagcgcggaggatccggcgagaagaagcgtcagggagcctcggcggtgtccccggggtccgccgaagccacccggccgccggctggggcccggggtggtgag

SEQ ID NO: 138577 - DNA, 122 bp, Homo sapiens
tcagacagcaggacagaggtgggtcaagtgcctgtaattggcacctgacgccagggccggcggtggcttttgcccctcatcattaggacgccttcccggactcaagtgaggctggcagaaag

SEQ ID NO: 138578 - DNA, 122 bp, Homo sapiens
cgggcagggaggcaggcagccccaggcgctgtgtgggcactgggtgagaagcagggatcccggcgccctggctctgtgctgcttcctgagacgagagtggcagagggcaagaagaaaaccaa

SEQ ID NO: 138579 - DNA, 122 bp, Homo sapiens
tatcttgtttgtgcaggcacatgctgagagatgcatacctgtctgagtcaatgtggaaggcgtgctatcccttccacattggggcccagtctcatctccagccactgctgttgtatttgacg

SEQ ID NO: 138580 - DNA, 122 bp, Homo sapiens
gtttcccttgtcgcgctgacaggaaacgcggttgtgctctggctcctgggctgccgcatgcgcaggaacgctgtctccatctacatcctcaacctggtcgcggccgacttcctcttccttag

SEQ ID NO: 138581 - DNA, 122 bp, Homo sapiens
gtgcatgcttcgtgtgtctacacagacgtaagacttcgtgaacggagatgcgcgtgtgggcgtgtgcactgtgtgggcatacatgtaccaccacgtctacagacgcatgcgtagatctatcc

SEQ ID NO: 138582 - DNA, 122 bp, Homo sapiens
atccacccatcttggcctcccaaagtgctgggattacaggtgtgagccactgtgcctggccgctgagtagtattttgttgaatccactggcagcttaaaggacatttgggcttgagctatgt

SEQ ID NO: 138583 - DNA, 122 bp, Homo sapiens
cccggaagttccggggcttttggacctctgtgattccggaagttccggggcgttccggggcgttctggggcctttggagcgtgggataagcagtaatggcggaggctgcagctcccggaaca

SEQ ID NO: 138584 - DNA, 122 bp, Homo sapiens
agtttggttttctaattctgccatcatgagatttctttcccatcccttcttcacaggggccggacatggtacattctttcactgaccctctgccgtttcctggcctggaattattttgcaca

SEQ ID NO: 138585 - DNA, 122 bp, Homo sapiens
cttgatcccagcagaggcagaagcgaggcctgttaaataataatgtcgctcaccggggcccgtgtcaacaccgcgtcctccgcgttcatgatctagatcgcaccgccttcaaagtctaatcc

SEQ ID NO: 138586 - DNA, 122 bp, Homo sapiens
tgtcctccaggggttggaggccttcatggagcttcgttccgtggggttgacgttactgaacgagtccctccacgggtgcactgaggacgttcctgcacatcgagggcaccctcagagctgct

SEQ ID NO: 138587 - DNA, 122 bp, Homo sapiens
gtgcaaggtccggagggctgaggcttgtgtggagccgaatccgagaaacgcatccagacgcggatctgaaccccaggaatatcgggaagttcattggagagtgtcccctcatattcccatcc

SEQ ID NO: 138588 - DNA, 122 bp, Homo sapiens
tctggctccgcccggccctggtggtgtctagtccctgggctgggggttcctcggcctgggcgtctccgcggtccaggcgtgggtgcggggctcccgggcagcgcgcccagccccagtcccgg

SEQ ID NO: 138589 - DNA, 122 bp, Homo sapiens
tcctggtcacctgaggcccaagaactgtccgggactcacttcctctcttcttgctttaaccggggtcgctcagcagcggccagcgctgcaccccttatcctctcccggtcttgtccgttcca

SEQ ID NO: 138590 - DNA, 122 bp, Homo sapiens
ggtccccggcttggcccgcaggctccacaggtttgggggcatcagggcctgctggggacccggagaggccgggaagcggaaggtctcggccgggtacggtgacatggtccgcccgaagcctg

SEQ ID NO: 138591 - DNA, 122 bp, Homo sapiens
acaaaggaggagaatccgataggacaaacagcctgaggcccttccgagctggcatctgcccggagcagctgacctaggggctctctgccaccggctctttagcaccccagaatcgttctgat

SEQ ID NO: 138592 - DNA, 122 bp, Homo sapiens
aaaaatgcatgtgtacactagaaaatatacaaatctaagcactctcagaaaatgcatttgcgtttgtacacgagaaattcctaggatatcaaagtgattatctccaaacaatgccatttcag

SEQ ID NO: 138593 - DNA, 122 bp, Homo sapiens
caggtttccggtgacccttgtgtctgtgtcacttccttcagaaatcgacgtggccgtcctcggaagtacccagtgagcgctcccatggctccccctgcagttgggggcggggagccctgtgc

SEQ ID NO: 138594 - DNA, 122 bp, Homo sapiens
taatttttgagaattcccctcaaatgacaaaggaagtgcacgtcctaacacagcctacaccgggaagccccgggtgactcagctgagttcagggctgagaagtgacacttatttagagactg

SEQ ID NO: 138595 - DNA, 122 bp, Homo sapiens
cgcttgacaatggcctcgcccagggaggacgggaagtagcccacccggtcattgcccgtccggttgtcatggatgcagcccttccaccggccatccggatgctgctcgaggacctggccagt

SEQ ID NO: 138596 - DNA, 122 bp, Homo sapiens
cccttaaccagattattggacagaccaaagcaccctgctcacgccagcaggtcagaaaaacgaaggaaagtctgagattgtagtgctttaggggaagggtcacaggccttgttgctcgtgca

SEQ ID NO: 138597 - DNA, 122 bp, Homo sapiens
gctctgggcatctgcttggcttcactcttacgccggctggccatcagggctgcagcacatcgctcagcagcatcccggcggggccgacgtgagcccaataagagggacccttcatctcggga

SEQ ID NO: 138598 - DNA, 122 bp, Homo sapiens
gagaaatagagtcactggatgtgtatttcctctttccagtcaacatgtgtgttctccatgcgcccctacctgcgcaggccacacccagaattccagaggctgcccagttaagtcccagtatt

SEQ ID NO: 138599 - DNA, 122 bp, Homo sapiens
ggaagtcactccctgaggcagtggcgacagcggcggcgagaggatgaacaacaagttcgacgcgtgagtggctcgtggccgcccccggggccccttccccgaacagttcccccgcgcccgcc

SEQ ID NO: 138600 - DNA, 122 bp, Homo sapiens
gagagcgcgagcggagctggaggctgcggcctccgggagcaggcggggagctgggggggccgctgggtcggtgggggtgggggggagctggggcagggggcggggcggggggcgcggcgtcg

SEQ ID NO: 138601 - DNA, 122 bp, Homo sapiens
ggggcagcacagacaggtatggatgtagaagaatggtttttactgaccatctactctgtgcgtccgcattttctcacacagctcacaggtgagagaactgaggctctcgggggttaggtgat

SEQ ID NO: 138602 - DNA, 122 bp, Homo sapiens
gccaccttcccccagtggcactttctttgtaagtcatacttgggtgactttcattctgaccgccagcaaagactccatttattcaacaagggaaaaatgaggcgatttagaatgtggagccg

SEQ ID NO: 138603 - DNA, 122 bp, Homo sapiens
gcggtgcgcccgggtggcgggctgctttccacgcacctgcacctgcgcagccctccaaggcgctcttttggaggagggacttctctttcggtaaccagctcccttgcggatagtctatgttc

SEQ ID NO: 138604 - DNA, 122 bp, Homo sapiens
gagtaagcaaacttatctcctaccagccccattccagccttggggtcagaggtatttgggcggaagggtgtgtcatgacagacaaggacactagaggccagaataagggtctgtacacctga

SEQ ID NO: 138605 - DNA, 122 bp, Homo sapiens
ttttaaaaacccagctgccagtccctcttcactcacttcaccggcctccaacttggcctgcgctgggactgatactgtggtcctggtcaccagagccaaaatagggggaaagctggcttgga

SEQ ID NO: 138606 - DNA, 122 bp, Homo sapiens
gggaagggccccaccccccagggaagcccgatctccgccccacaggtaagccccggtccccgcctccccccaggtgaggctccaacaccacccaagtgtggcctactggccttggctcccca

SEQ ID NO: 138607 - DNA, 122 bp, Homo sapiens
caacttgtaagtatattttggtactgctttacttctcccaaaacaacagaggtgaacttccggaggatgacagcaatgcagattctcttcttcatcctgtgtcaccaagagaatccttcctg

SEQ ID NO: 138608 - DNA, 122 bp, Homo sapiens
caggctggggagggtgatcggggccgcgggccatctcccccgagccgggcgggcagactgcggaggcaggccccacacgcgccgcttttccgagcccggttttcttcaggagcgaagctgtt

SEQ ID NO: 138609 - DNA, 122 bp, Homo sapiens
ctccctcacacgttgcctttccaccgttattccagttaaaatgggttctgaatagggaatcgcatcctgcagccataaagtcttaagaaacaacgtctcctctctcgcagacggtggggcgt

SEQ ID NO: 138610 - DNA, 122 bp, Homo sapiens
ggaaggaaggaaggaaggaaagggaaggagggaagaaggggaagagccgggggaggggtacggggagagggagggaaagagcatccttgtaataaaattacttcttgatgtggaatttcttc

SEQ ID NO: 138611 - DNA, 122 bp, Homo sapiens
ggtcgagcacataacggggttcgggtgtctcgtgtgtgaacatcacaggttagtgcctgtcgtctccatgggagttcctggggcttgcggggttggggtacttgtgtttcaagggggaggga

SEQ ID NO: 138612 - DNA, 122 bp, Homo sapiens
gctggctcaggagtgaagctgccgaccttcacggtgagtgttacagctcttaaggcggcgcgtctggagttgttcattcctgccagtgggttcgtggtctcgctggcttcaggagtgaagct

SEQ ID NO: 138613 - DNA, 122 bp, Homo sapiens
aactactgcctggtcgatggtctttcagcagggaggaatgctggttagttgtgttgaaaccgcaaaaatggaagggccatagtctggcacttggttgatgtcagtggtggagtctccccaaa

SEQ ID NO: 138614 - DNA, 122 bp, Homo sapiens
tggggagggggtgtcaaacctcaaggttctgagaagggacaccccagaggtgtcagagaccggagttgtgggggagggccggagctggagccggagggaaagggaggggaaaggagagggag

SEQ ID NO: 138615 - DNA, 122 bp, Homo sapiens
tccgcgctcttgcggcccgcccccgagcaccgagcctcgcatccatacgcgcagcactcacggaagtcctcaaggcgccctctcaatcccaccgcgcgcacacacaggctcccctggggcga

SEQ ID NO: 138616 - DNA, 122 bp, Homo sapiens
agacttacaaccattcctgaaatacatcttgggacatgaggctccctcaattttggaattcggcaaacttattgggagattctcttctggtaccttccagagtttcaaccccataaggaaac

SEQ ID NO: 138617 - DNA, 122 bp, Homo sapiens
gcacggctgcggggacggcagcggcatgaccggccaccacggctggggctacggccaggacgacggtaggcacagacctcccccaccgcctctggctcggacccccgacccaactgcactcg

SEQ ID NO: 138618 - DNA, 122 bp, Homo sapiens
gccagccagccagtttgctatggggcatcccctcctccttgtaaccttcactccctgtcacgtgcccagttattccctggagccaaacaaaattgctaccacagtgtactctccagcccaaa

SEQ ID NO: 138619 - DNA, 122 bp, Homo sapiens
cttgacctcacgtggctcccgcactgagcttctgtaggccacgcgggaggggctgccctccggccttcccatggcgagtcccaggctgaagaaacagccccacgcggccccacgcagagggc

SEQ ID NO: 138620 - DNA, 122 bp, Homo sapiens
ggttctgggaaattgggatctacaagccaaaaaccacagtgacctcagataagcaaatgacgaacgtcccatggaccttggctgggggcaggaatgtataccaaagaaaggtaggctcagtt

SEQ ID NO: 138621 - DNA, 122 bp, Homo sapiens
ggctcagcccagcttgccctgtgtggtttaaggcctttaactatgaggcaggtcattaaccggctggtgaagcaacagcacattgttctgttattttcaaaccacaacagcctctgtggaat

SEQ ID NO: 138622 - DNA, 122 bp, Homo sapiens
acggaagccgggagccggccggaagcagttcctgcgctctggcttctgggtcctgtcctgcgcgatcgcggggtcttagacagctcaactcgccgagatgacctgggcacctctgcgttgaa

SEQ ID NO: 138623 - DNA, 122 bp, Homo sapiens
tgatggcggggaaggggtcacggccctgatggcccacagatggccactcgctagaggtgacggaggagggcttaccagagtgtgaccccgaacactggagccgagctgagggaagtcaggga

SEQ ID NO: 138624 - DNA, 122 bp, Homo sapiens
ctcgagtccaacacagaattaagggctgatccctggcagcgatgagcacaagtcaagatgcgtcttgggaggttcggacgtccctcgccctcggccactccggcaactaggccgggtactaa

SEQ ID NO: 138625 - DNA, 122 bp, Homo sapiens
ctccctatccccagccccgttacctatccacaaacatgatgatcatatcctcccggtcagcgtatttctccatttccttctttaaccaccggaccttctgtcctccaccaactgttcgagcc

SEQ ID NO: 138626 - DNA, 122 bp, Homo sapiens
ctaggcggcgcgcggcctcttccagccaccacctccaccccaaccccgcgaagccaaccgcgtggaggtggggaccacagaaaggaacaaataagggagacttgataatatgtattgtactc

SEQ ID NO: 138627 - DNA, 122 bp, Homo sapiens
tggagcgccgcatccggtagcgagagttcaacttcctgactaggagccaatcagcggggccgcctcgctgtctacgacagagggtggggcagacgctccgtttccggtggcagggtctgggg

SEQ ID NO: 138628 - DNA, 122 bp, Homo sapiens
gctgctaggaagagtcctctgtcgggttttgtccgaacctcggttttatttcactggaatcgacacccaggaatgcgactgctggtcatatgggagctgcagtgcagtttttaagaaaccct

SEQ ID NO: 138629 - DNA, 122 bp, Homo sapiens
cacagtataaaatatacaaataaaacaggtaccaaggaacttaaaacattcaacccataacgtcgtctaggtttttctgctttaagaaaattgactcaattcttccaagagaataaccctat

SEQ ID NO: 138630 - DNA, 122 bp, Homo sapiens
ccgatatgcatgggtgggctcacgtacacccagacacccgcacgcaggcatgcaccggagcgctgactcacgctgctcagcccaggaattcttgcagacggctgtgtgtccacatgtgcggt

SEQ ID NO: 138631 - DNA, 122 bp, Homo sapiens
tcccccagccccaccccccgcgcctgggctccctttctccctcccctctgggatgcgaaacgcgaggttttgtaacctttcctggcaattttagattttgtgtgggatttcctgtctagaag

SEQ ID NO: 138632 - DNA, 122 bp, Homo sapiens
agttaatggatgtttgttttcctgaattcacgggtcctttgtaagtcttctatcccataacgtaagatgggggtataaacaaagaagcaagcgctagctgaccttatgtggggcatggttag

SEQ ID NO: 138633 - DNA, 122 bp, Homo sapiens
gggtcccaggggccgccatcgggctcagcagcgtggtgcgcaagccggccacgaagcgctcgaaggtcaagtagccgctggcctgggccacctggcacaagccctccagcaccccgcgtggc

SEQ ID NO: 138634 - DNA, 122 bp, Homo sapiens
gagaaaatgagacagtttcccggggagttcagatttcttggaaacaagctgtctcttttgcgtcattgaagaaagttggaaaaaaattctactgtcttactaacctgcatcactgtgtttct

SEQ ID NO: 138635 - DNA, 122 bp, Homo sapiens
ctcacacacacatcctacgaggacggctccaggaaccacaatgggcgaggagggctcgggcggccgctgattctcatgactctgtgggtctcaatgctccatgagaacgtagcccagctcat

SEQ ID NO: 138636 - DNA, 122 bp, Homo sapiens
tctcagagccacaggtgtagacaggtgaaaacactggacagtgagtgagctacccacacacgacccactggtgccttcagagccttagcctggagcgacagtgtaccgttgataatggaacg

SEQ ID NO: 138637 - DNA, 122 bp, Homo sapiens
cgaccccctcccggcgcccggcgtccggcctgccgctcccgctgctgcgcgccccccttccgaaggcaaagcaggagcccgccttattatcataatgtattcaccttggcccagcccgcggg

SEQ ID NO: 138638 - DNA, 122 bp, Homo sapiens
agaagccagcagtggagcgtgggggagtcccagggagcgtgcccggctcgcgagcggaggcggcggagcagctggcctgctcgcggtgcccccttgccaccctctgccccggccctgcggat

SEQ ID NO: 138639 - DNA, 122 bp, Homo sapiens
gtttaaaaaatagatctggaaaaatgtgaacgcacaccgtgcatagtggtgaagactgaacgagctgataaagtttttaccattgttttatgaggattttatttacagagtaattgattttc

SEQ ID NO: 138640 - DNA, 122 bp, Homo sapiens
gggggagcagcccgtggaggcaccgggaggcgtgtggggggcggtcggcgagcggagatccgcctgtatttctcccggttctcgagcattttcacggtctgtacctctgatggttggagggg

SEQ ID NO: 138641 - DNA, 122 bp, Homo sapiens
agaggtaagcagatttccatagcagacttcccagggcctttaatgtgctaatacgcatggcgaatctccaagagggaggcagagcatgtggcgcagcccagccttatgtgaccaaggaaccc

SEQ ID NO: 138642 - DNA, 122 bp, Homo sapiens
aaatactcaagcttcccatgcagtgccacggtgagcagagatgccacgtaggcacggtcccgagctgaaaaggtgcgctggctctccagcgtgtggatgaactgcagccaaagagaagggat

SEQ ID NO: 138643 - DNA, 122 bp, Homo sapiens
ccgcgtctcttcgcactacgccacgcccactggcgccacgccccttcgcgccgcgcgacgcgccgctccatcgcacacgctctctgggccccgccccactcacgacccgcccgcgccacgcc

SEQ ID NO: 138644 - DNA, 122 bp, Homo sapiens
gaaaataaacatggacagcttatatgagcttttgtgtatatattttctggtctaaatctgcggcagatatgtgtgtctttctgcgcatgtatatagtagatcaaatatgttagctctattga

SEQ ID NO: 138645 - DNA, 122 bp, Homo sapiens
gtcatcagaggcctggttggaatacagagtgttaattcttccatatctaagcctctttgtcgaaattccctttgtctcctgccccaagtcattaaacactaatcccatcactcttcctaatc

SEQ ID NO: 138646 - DNA, 122 bp, Homo sapiens
gcagctctcctaccttctgagtctggcccccatctagcagatgagagggagaacacatcacgctcaggagccagacaggccatgcagcggtaccatccaatgttgttccctcccagaatcat

SEQ ID NO: 138647 - DNA, 122 bp, Homo sapiens
ccaatgacgcgcggcgggcgggtttcacgcggcgttcggaggcgggcttctgggggtgggcggagcgtgccgcggcaggaagttggcgatgcgcaggcgcgagggctcgcccggcgctccca

SEQ ID NO: 138648 - DNA, 122 bp, Homo sapiens
agccccagggcagcggctcctgtccccaagtcctcgggccctcctccagcctcccttcggcgcaggaccctgggggagctcgtccccaccgccaagccgctcgcccttccccgttcgccgcc

SEQ ID NO: 138649 - DNA, 122 bp, Homo sapiens
atcacccctcgccactacctggacttcatcaatcactatgccaacctgttccacgagaagcggagcgagctggaggagcagcagatgcacttgaacgtggggctcaggaagatcaaagagac

SEQ ID NO: 138650 - DNA, 122 bp, Homo sapiens
gcccacctgcggaggcacatggagatccacgaccgggtagagaactacaacccgcggcagcgcaagctccgcaacctgatcatcgaggacgagaagatggtggtggtggcgctgcagccgcc

SEQ ID NO: 138651 - DNA, 122 bp, Homo sapiens
ctgcatttggccccagtggcttcatgccttatgtgtgactgtgcctctctgtctctgttgcggttatccacagtctgtgtggctttgtggtttggaacatgtgtttcagtacatatctctca

SEQ ID NO: 138652 - DNA, 122 bp, Homo sapiens
tccctttcttcgtggctacatgagaggcagtggtgcccaccaaacattctatcaccctcccgcttccagtgcccggtggaggctggcccacgtgacggcccggggaggaggggtggaatggc

SEQ ID NO: 138653 - DNA, 122 bp, Homo sapiens
tttctattttaaatcaatggattggcaacttgaattccacctgcaactgtaatttcccttcgtggggtagcataacatattcacagattctgggcattagaaccagggcatcttttgaggag

SEQ ID NO: 138654 - DNA, 122 bp, Homo sapiens
tgcagacttgcggcagttttgctcacttccgattgctggccatctctgggggggcgcccccgtgggcggggtcttgggtgggtagagcaatcaggggacggtgacgtttggcctccctgaac

SEQ ID NO: 138655 - DNA, 122 bp, Homo sapiens
tttttttaaatttcaacttgtgtcgcagttcgagttgctgggctccgctaggccgagccccgcagccctccagccgctgccaacctgcgccccctggtggcctggttgccggccgcacgcgc

SEQ ID NO: 138656 - DNA, 122 bp, Homo sapiens
gctttttgactaatggcatctcagagtgtagggctggagggggttgctgcttagtggtaccggctgactttgcatttctggctttgtcagttatgtgctttgtgaccttggccaagttactt

SEQ ID NO: 138657 - DNA, 122 bp, Homo sapiens
ccgaaggtctggttgaaaacttgaacccgcctggagcggatgcctaagaaaatgcaggcccgctgaagcctccccgccgggccctgggccctgaaagcctccggcagtttcccgtgaccccg

SEQ ID NO: 138658 - DNA, 122 bp, Homo sapiens
cctcatctctaaagaatgggcacccttgtaaatatgctaagagaaatagatgagttactacgtggaaagtcttggaacaatgcctggcccattttaaacagttgataaatattagtcatgtt

SEQ ID NO: 138659 - DNA, 122 bp, Homo sapiens
gtcatctaagcgaattggaaatgctgagcttccataagtcagctgagttttaaaggtaaacgttatggctgaaatagtaaagcacctgaccacaaaacctcttgtaaaaacagccctgagta

SEQ ID NO: 138660 - DNA, 122 bp, Homo sapiens
gccccgcccttcggggctgcgggccgggcatggggtgagcgcgcgcggccaatcagcggccgcgctgccgcctcgctagggcccggccccggcccccgccccacctccccacggcggcgggg

SEQ ID NO: 138661 - DNA, 122 bp, Homo sapiens
aggtccccggcgcttctgtccctgggacgtggggtccctacagacctggaaattctcacccgtcttccttcgcccagagcaaattgagacgtccccgtgagagcccgggggtcacttccttt

SEQ ID NO: 138662 - DNA, 122 bp, Homo sapiens
ggcaagcaggtcgggcttggtggtgagctgcaggggctgctctccaaaggcctccttggtcggggacagcttgcgggagccggcatcctggggctgcggatcgctaaccccggacacctcct

SEQ ID NO: 138663 - DNA, 122 bp, Homo sapiens
cggggggcacggggcgggccgggcctagggaggggtcagggcgccgcaccactggtgttacgaatattaattagcaggcaaagaagacctggctgggaaaaccctgggtccaagtcccagcc

SEQ ID NO: 138664 - DNA, 122 bp, Homo sapiens
ttgccggggcctttggtggccctgccgggcccaggggccgagctggctttgctctcactgcgtacattcaggggctccaaaagggtgacgacgcgggagcccgtctggacctgcttctggaa

SEQ ID NO: 138665 - DNA, 122 bp, Homo sapiens
tacatctaaacagtcaccaacatagaaatcgcccccagcacaaaataaaacagcgagggtcgaagctttccgggtgtagtacctcggtgatctctcaggggaaattccagagggggacagag

SEQ ID NO: 138666 - DNA, 122 bp, Homo sapiens
tcaatgtgtggtgtgtgttatggttccacaagagtggggatgttcctctgttttctttgccgtggtactcttagtgcttagaatggtacatatagtggatgctcaataaatatttgttaaat

SEQ ID NO: 138667 - DNA, 122 bp, Homo sapiens
ctacttcctcagccacatccccatcaccctgttcatggacctgcaggcggtgctgccgcgcgagctctacccagtcgaggtgaggggcgcccctcttatcccggcccgctgaggctctcccg

SEQ ID NO: 138668 - DNA, 122 bp, Homo sapiens
gtagtcccgccccgaagccgtgcgtggccggggccacagcgtttggggtagatgacgtcacgcggccgcgggcgctcgcttggtagggtgtgctggggcgtagagtttagggtcctgaggct

SEQ ID NO: 138669 - DNA, 122 bp, Homo sapiens
attgagctggcgccgggacttgggcggggcctgccctacagtgagcagcccacacaggaacgctcctctcgcgagcggcccgggcagggaccctgtcccaacaccaacacctcctctccagc

SEQ ID NO: 138670 - DNA, 122 bp, Homo sapiens
tcatcttccaaggcaatgcctcagctgttcaagccactcccgtatacacaatccttaccgcgtctagactcctgcttggaagccggggcgttctcactgccctcgctgcgccgcgccttccc

SEQ ID NO: 138671 - DNA, 122 bp, Homo sapiens
ttccagcctcagggtggctgagctgcaggtgcagcacccggcctccaggtggcaccaatccgcttactttgaggtgggctctgacaaccagctgagctgcccacagtccctcagactcccga

SEQ ID NO: 138672 - DNA, 122 bp, Homo sapiens
gcccccaccttcaaccatgtccaaattacagtaataatctcccctcttgactcccagccacgagttgctttcttcattttaatccatcttctttcatgctgatagattaatatttctgaaat

SEQ ID NO: 138673 - DNA, 122 bp, Homo sapiens
cttcctgatccttgacccagcctcgtctctcctttgcccttgccgcaaacgcactctcctcgtatcccggcattctgccaggaccctgagaactggttcatcccccatcccccatcccgggt

SEQ ID NO: 138674 - DNA, 122 bp, Homo sapiens
tgtgaaccttcacatgtgagggatctatgaatctaactccttatgaatctaactcatgcccgatgacctgagataggcactttgtctcaaaaataaaaaataaaagatgcttatattaagtg

SEQ ID NO: 138675 - DNA, 122 bp, Homo sapiens
tacttctaactacctttctagctatctcttctattgtaccacctcaatacctagcactatcgcctctcaaacctctgatcccaaacatccttgcccattcctgtctccctacctttgcttaa

SEQ ID NO: 138676 - DNA, 122 bp, Homo sapiens
gcaccgggacagcagccgccgccgctgccgccgtcctcccctgtctacccggagctgtctcgagctgagccccctaccgggccggatcccgaggtgagtcccccacctgcggtcagcccctg

SEQ ID NO: 138677 - DNA, 122 bp, Homo sapiens
tccccttcccactagcctaggtcataaagaggcgttgctttcactctcctatgccttttacgagtgctaagtgtaggatattttgtcaccagaacacaatgctaccgccccaaagtaaaaga

SEQ ID NO: 138678 - DNA, 122 bp, Homo sapiens
cggtggcagcccttcctgaacttcgctctgcaggcctgttcagcccgtctcccctcctcccgtctcctttgtcgtgttcccgctcccacgaaaccgcatcctgagaacgtgcaatacccaaa

SEQ ID NO: 138679 - DNA, 122 bp, Homo sapiens
cctgcacaacatctccaggggaccgggtactccactagggtcgagaaacgttgaatagtgcggtgggtgcgggaggcgcgcctaggtgccgaaacccggtctgtgctgccatcctgtggcca

SEQ ID NO: 138680 - DNA, 122 bp, Homo sapiens
cctgtctgccttcctcctccagagtgggctccttacccacagaggcggcccgggtctccacgcagagccacagggcgacggccagcagcaccttgctctgcatcctgcacctcgagccgggc

SEQ ID NO: 138681 - DNA, 122 bp, Homo sapiens
cctcctccacccccgagtctcgtgcgggctcctgcctaggctaccctggatgcccacctccgccgcctgccccgcccagagccggcccagccctacccggctgccggcctgggatctcggcc

SEQ ID NO: 138682 - DNA, 122 bp, Homo sapiens
gctagtgaggatgctgctgagactggccaggtgcactctgtgcagaacacccgtgagaaacgccaagcacgtatgtgtggcaggatggggcaagtcaagaaccaatacagtcatacaagctg

SEQ ID NO: 138683 - DNA, 122 bp, Homo sapiens
caaagtggaatgcggttcaagcaaaaattctcagccagatgggagcattggagagacttccgcctcccagaggctgccgatccacgcggtcgtctctgccgcccgtcgggagggtgcggtta

SEQ ID NO: 138684 - DNA, 122 bp, Homo sapiens
tgcagtggtcccccaattacgcttcctcactaagtgtctgagggagcatttgcccagcatcgcgattcctttagcccagagccctccctgagcaggcccaggatatagaaatggtccagcgt

SEQ ID NO: 138685 - DNA, 122 bp, Homo sapiens
cacatagtcgcccaaagaggcggatcagcttacgcttcaaccgtgcctcctgcaggtatgcggagtctgggtcatccaattctgagagatccaactccttttcctgcagccgccggatctct

SEQ ID NO: 138686 - DNA, 122 bp, Homo sapiens
taactgactgcagttgaaaacaggtaattgaaattgtggtaagtgaaaccatggataaagcgggactactgtacatgctcattaaaaaaaattaagggccaggcatggtggcttacacctgt

SEQ ID NO: 138687 - DNA, 122 bp, Homo sapiens
tacccctttgcacatcaaggtgaaacccaagcgggtaggcatattcctagactatgaggccggcacactgtctttctacaatgtcacagaccgctctcatatctacaccttcactgatactt

SEQ ID NO: 138688 - DNA, 122 bp, Homo sapiens
aaaaaaaaaaaaaaaggaaatgtcaaacatgaaatgcgagatagagtttaacttgccctccgtggtagaagggaagcaaaagtgacatgtaactgaccaacttaggtgctcctttgcccaca

SEQ ID NO: 138689 - DNA, 122 bp, Homo sapiens
ccgacctcctacaccagccgcgcccctcccccatcgcctgagtcctcccttgggaataaccggccacagaacaacagcaaaagtagcaaaaagtgttgtcctctcacctctgtaaaataaac

SEQ ID NO: 138690 - DNA, 122 bp, Homo sapiens
cgcgggcggtgtcccgggagtcccgagagcgcgctccccctttgcgcaaccttcccgaggcgtcctgcccgggaagccagttcctgggttctgggctggctaggttggcagcgaatgaggct

SEQ ID NO: 138691 - DNA, 122 bp, Homo sapiens
ggcggcggccgcgggccttggggaccagcctgcgtatgcccggaggccctggccgcgctgcgtcccgctcgcttcagatgccggcccgcggatccgtcagcccagcaaccccgcgaagctcg

SEQ ID NO: 138692 - DNA, 122 bp, Homo sapiens
acttggcccctggaagacctggaaaccaggaacctcggaggcgctggcggccttggaggccgcttatctccgcgtgtctgaaattctgttttccaccttttccctttaggctggtaggaggc

SEQ ID NO: 138693 - DNA, 122 bp, Homo sapiens
tctctatcaatagagtaaaaaattagctttttaaagagagtctcaccctgtttcccagaccggaatgcagtggcgtgatcaacctcgtgggctcaagtgatcctcccacctcaaactcctga

SEQ ID NO: 138694 - DNA, 122 bp, Homo sapiens
atggatcccagctgcttaaaatggacccctcccaagggcacttaaagtgacctgtcattccgagccagcgaaccccagcagtaggaatccgtaccctagggatctgtctgtcatttctctgt

SEQ ID NO: 138695 - DNA, 122 bp, Homo sapiens
tcccccatctccttttcccagaaaaggctgggaacaccctgagaagtaaaatcatcctaacgagagaagacatgttcttgaagaaattttgacttatggcttgcagctttataagcatttca

SEQ ID NO: 138696 - DNA, 122 bp, Homo sapiens
gggtttcctgtttgtggagcctcctcatgccccctggacctgcctgggcctggtcacagacgaccccgtcggcgagggtggatggccactgcatcgtccagccttgtcactcgggcctggcg

SEQ ID NO: 138697 - DNA, 122 bp, Homo sapiens
tttctgccccgatctatagtcccttgagtctccacacacactcctcacagagatctgtagcgtaggtacgtgacagctctgcctacatctgacgtccggagtcattaaccaggaatgtatgt

SEQ ID NO: 138698 - DNA, 122 bp, Homo sapiens
atgcagcctaatgacagggcgtgggaagacctcctgctcaccagtgtgggcagagtgtagcgtggcctgggctcctaatacaggtaaattgtctccaaaggactagtaaaggtgactgggtc

SEQ ID NO: 138699 - DNA, 122 bp, Homo sapiens
aagcctcctgggaatggccaagtttaggagcttcagcctgtttgggcctggaggctccagcgcctgcggtgatgggagcggcgtggccagcggggcccggcagcctgttgccctccagctgc

SEQ ID NO: 138700 - DNA, 122 bp, Homo sapiens
gttttttctcagcagtggggataaacatgtggttgcaggacacacaggcatcttaaaattcggacttaattaaataaatgaaaaataaaccatttcacttcatttttctgctcaggtcagat

SEQ ID NO: 138701 - DNA, 122 bp, Homo sapiens
cacctcccagacggggtggcggccgggcagaagggctccttacttcccagacggggcagccgggcagaggcgtcccccacctccctccctgacggggcagctggcccggcagggcctgcccc

SEQ ID NO: 138702 - DNA, 122 bp, Homo sapiens
cggagaacacttcctaattaactctcagtcacctactggtgacagcgcctcaaaggacagcgctggggccagccgagccccagccgcgacttgccggccgggcgcctgctgcccaaaacccg

SEQ ID NO: 138703 - DNA, 122 bp, Homo sapiens
tgaacacaagatctgtatacggattattccttattaaaaataattttggccaagcgtggccgggcgtggtggctcacgcctgtaatcccagcactttgggaggccgaggcaggtggatcacg

SEQ ID NO: 138704 - DNA, 122 bp, Homo sapiens
gcgatttcggcggtgacggggattctcagaggagccgcgtgcccgtgcgctcccgcctgtcggccccagagagcgcagccctgacacctcctcccggaagcccgccggcccgaccctggttt

SEQ ID NO: 138705 - DNA, 122 bp, Homo sapiens
tcgctccctggctttctcagttcgttttgggagataacttgttttgctccaagccgcatccgttgaccccttacagtcggatggtctagatgactgaatggagttttgagttggacttttgt

SEQ ID NO: 138706 - DNA, 122 bp, Homo sapiens
tcatcgggcattgtggaggcaccctacggtgattcctctcagagcctgtttgtaggtgaccgtgacagagacaaaaccatggaagtgactgggtttggagtgaccaggtgttcctccctccc

SEQ ID NO: 138707 - DNA, 122 bp, Homo sapiens
ctccactgacacccccgggcgcgaggtctggtccatcccggagtgggagctaggcagggacgccacctggcagcccactctgggcccctggcccgcgtttcccgcaggcgccggcggcgtcg

SEQ ID NO: 138708 - DNA, 122 bp, Homo sapiens
acaacaggaagtggctacattaacagcacactgtgtactatagttaattttatgcagttacggtttcagactgcatcccgacattggtttacatttctcttgactgagaatggtgccacgtg

SEQ ID NO: 138709 - DNA, 122 bp, Homo sapiens
ccatgagctgtgggcccggaaaggaaaatagggggcagtttgcagcagagaggagtggttcggggggcagaatgattccgtttgatttcaggtttgcattttattttccaaggcatccttgt

SEQ ID NO: 138710 - DNA, 122 bp, Homo sapiens
aagcaatactgaagcagagaggtgatgtggtgtgtgactaagagttagggaagaagtaagcgacagagccttccagtgccttgcaaattgtaagacttcagtgaagcaaagcctgtgctact

SEQ ID NO: 138711 - DNA, 122 bp, Homo sapiens
aatgctttgaagaggccccgcccttcctggggctgcggctcagctccggcctccctcacccggcagggattcccgttctagggaacatgtggttcgtgccagccagttgatgtgggcgcttt

SEQ ID NO: 138712 - DNA, 122 bp, Homo sapiens
ggcgtccagcagaggccggtcagggcaagaatgcccgaccctcagggtcctcctcagagtcgctgcgggatcacttaggcgcctccggaaacaacactgtctttgcactggaattttcaaaa

SEQ ID NO: 138713 - DNA, 122 bp, Homo sapiens
ccctgattcagaagatggcggggcaggaggtgtctgtgtctcagcagatgctggatttcacgtccacggccgcctggaaataaatgccagcaccgtgcaagctggctttgcattctctgcct

SEQ ID NO: 138714 - DNA, 122 bp, Homo sapiens
accccagggtcctccctctctacttccattcttggttccttcctacaatcgatgctaacacgccccgcctccaagatcacggaggccccgccccacggggctatgcaaatgagacgcccgga

SEQ ID NO: 138715 - DNA, 122 bp, Homo sapiens
acgccccctccttccctcagccgcatcccgcgcccccatccctctgcccgccagattctgcggagtctgcgaaacaaaaccgccgttgtttccagccgggctgctcaggaaaaacaacaggt

SEQ ID NO: 138716 - DNA, 122 bp, Homo sapiens
tctgtcttgcgcccgggatgggggggtgaagctccctcctggacccagagccggttgtgccggagtgggcgagcctctttatgccctgctgcccctagccgacttcggcccgcttcgcgcct

SEQ ID NO: 138717 - DNA, 122 bp, Homo sapiens
cccacaccccctctctctgggtccaccggatctctgggacagagggtgcaccttgatccccgggtccgggcttccgtccggaaagctccctcattgtttggtaagatttcagcgattcttaa

SEQ ID NO: 138718 - DNA, 122 bp, Homo sapiens
gtgttggaagctggtgttctcggggcccacgtggtctgtgcaccagcctcaccgccagtccgctgacccacagaggcttccagaaccccgtcagcctggggtttttccttccctccccctca

SEQ ID NO: 138719 - DNA, 122 bp, Homo sapiens
atatcactctctccctctcctgaaagaccagagattgtgtattttcagtgtcccatgttccgactgcaccttctttacaataaagactgtaactgagctgactgtgacctggacgctcctgg

SEQ ID NO: 138720 - DNA, 122 bp, Homo sapiens
ggtaaaggtgggattgtaccctcagcatcctgctcaattttaaattcagctatgctgttccgtctcctgaaatgaccctgggtatccttctcggagtccatcctagggctgtcgtgttcact

SEQ ID NO: 138721 - DNA, 122 bp, Homo sapiens
ccccagcagcacccaggagggggtcttcaaggctcatggttgagaaccccagaaaagccccggagctgcctgggtgctggagagaggggatatgtcgtactgatgtgaagcaaacttactgt

SEQ ID NO: 138722 - DNA, 122 bp, Homo sapiens
ccggtccccctggcctggccggtcgtttcctgtggcggcgcggcccagccccgcgtcaggcgctttgttctcctgcccgcctgggccgcctcccaggcccaacctgctttgagttttcggct

SEQ ID NO: 138723 - DNA, 122 bp, Homo sapiens
gagcggggggaatggtgcaggcaacgaatgcaaattagagaagcagagccggcttggtcacgtgcccagggcgggaaatctgacgaccaggccgagctggaaacctccacggaatcgtggct

SEQ ID NO: 138724 - DNA, 122 bp, Homo sapiens
acggcccagggtctgtgccaggtcccccagtgctgccagcgtgtagcctttctggttggtcgggccctcgcccagcaggatgcgggcgacctcgtgcatagcccctcgtgtgcccaggggcc

SEQ ID NO: 138725 - DNA, 122 bp, Homo sapiens
tctatgtgaaaactcaggggtggaatgaggcaaatacccacaaaaaaaaacacaaaaactcgacaacaaaatgccccaaatgaagacaaaggtttttcagaaagtgcctgtactggaaaagc

SEQ ID NO: 138726 - DNA, 122 bp, Homo sapiens
ggagcgagaaagagagggagacggaaggtgccacacacttttaaacaaccagatctcgggcggactgattcactatcttaaggatgcaccaagaggatgatgctaaactactcatgagaaat

SEQ ID NO: 138727 - DNA, 122 bp, Homo sapiens
cccgggcgcccggggcgtaccttttcggtgcatcgacggacaggcggccggggctcggagcgaactggtacagcgtgtatcccatttagtaatccattatcgaggggatctctccgggccgc

SEQ ID NO: 138728 - DNA, 122 bp, Homo sapiens
cggccagtggctcagctcccaagccgaggccgctggttgtcgccagcgtacccaggagagcggtgccctagaaaatgctaggtctctttcagtgcccacagcctcagtttgccacctgataa

SEQ ID NO: 138729 - DNA, 122 bp, Homo sapiens
cctgccacagcaacaacatgcaaaccagcttcagcctacttcctccttcctttatgctgtcgagttcctctagctcttgccctctgctggcaggggcgggtaatatattggtttgctgctac

SEQ ID NO: 138730 - DNA, 122 bp, Homo sapiens
tggagaataagcagaaacatgggtaagaactggcgcctgtggaatggtcttcagacactccgagatttaccccacgtctgttcgttacttgcgaatagagcacaaattttcatatagaattc

SEQ ID NO: 138731 - DNA, 122 bp, Homo sapiens
cctcaaatgatccgctgacctcaagcttctcaaagtgctggcgttacaggcgtgagccaccgcgccccgccggaattcaaatattaaatgattcctgctcagggaatcagactctgagagac

SEQ ID NO: 138732 - DNA, 122 bp, Homo sapiens
ccccgatctcccagatggggtggcggccaggcagaggggttccccacttcccagacggggcggttgccgggcggaggggctcctcacttctcagacggggcggccggtcagagacgctcctc

SEQ ID NO: 138733 - DNA, 122 bp, Homo sapiens
tgtggacacatagttccacttgagggcacggacgatgtccaccatggcctgggcctggtacgtgtccgagggcaccacgcgggagaagaagtcgtagcggctgttgtcactcaggtctggcg

SEQ ID NO: 138734 - DNA, 122 bp, Homo sapiens
cccgcacaccgcacgtcggagggagggcgcaccgcggcggtcagcacccgcgcccccgcacgtgcctcaccttctgtcaccctttggctgcacaccttcggctggggctttcggaaaccagc

SEQ ID NO: 138735 - DNA, 122 bp, Homo sapiens
gcggcctcggcaccccaggtcctcatagctcccagattcaccccacacacccaccggccccggcctagaacccaacctggttgttaaatggtgactcctccagccgcttcccgtacagggcc

SEQ ID NO: 138736 - DNA, 122 bp, Homo sapiens
gggggtgtcggtgatctactgggagaggctcctgctaggctcaggcagtgggcaagccagcgtcagcctgcgactgacctccccgcttaggcctcccgagggcgtccggcttagagaaaaga

SEQ ID NO: 138737 - DNA, 122 bp, Homo sapiens
ccttgccggaccgcaaagagctgagccagcctctgtgttcttgtttgcatttcatttgaacggctttctcctcctgtcccccaccttcctgcccgagctattttggctttccctagatggga

SEQ ID NO: 138738 - DNA, 122 bp, Homo sapiens
acaaacccttgtaagcctcactagtagcaagaatggctttattccaaagtcagaaatgtgcggccccatcagggctgacccttgggctgcctgttacgagctatgagcctcgcttggtcaga

SEQ ID NO: 138739 - DNA, 122 bp, Homo sapiens
ccccttcgaagtgacagccgtaatgcaaagggattgctatgggcgatctcatttgtttcccggtatccccgagaggtgggtactgtgattgctctaactccgtcagagcgcaggcttataga

SEQ ID NO: 138740 - DNA, 122 bp, Homo sapiens
tgccccacccatctagatctattctctcaaggacccgaggtgggaggacttactgtggggcgcgtggcctggggcgctgggtgcgtcctgaaggatgacgggcatcagggcctggcggatgg

SEQ ID NO: 138741 - DNA, 122 bp, Homo sapiens
ccactaacgtgcgaggaaccctgagagctgaccaatggtagcgagctttactgggcgggtcgccagctgcagccacggccaataggcgagagacttcttgtttcctggcagagcggggtccc

SEQ ID NO: 138742 - DNA, 122 bp, Homo sapiens
cttcatggcgtgccatttggtgaacctgtttaattctgcttttcccccctcagctttcagcgcccccagctgcgtcttctcgccccttcatgtttccctctcctctgccaggcagtgaactt

SEQ ID NO: 138743 - DNA, 122 bp, Homo sapiens
tttagcagtgtgattttgttgattaagtcccctttgtttagaaaactgggataattcaggcggagtttcacctaaaattgtcacagtggtcgctaaccaaaatctcttggggaaagttttac

SEQ ID NO: 138744 - DNA, 122 bp, Homo sapiens
acccaaagcttagaggcagctctggggttggaaggcacactggctacacagatccaccagcgacacccacatccaggcccatcagaagttctcacacccaagattggtgcagacaatgaatg

SEQ ID NO: 138745 - DNA, 122 bp, Homo sapiens
aggcggcgacagaccaggcacagggccccatcgccctccggaggctccaccaccaaataacgctgggtccactcgggccggaaaactagagcctcgtcgacttccatcttgcttcttttggg

SEQ ID NO: 138746 - DNA, 122 bp, Homo sapiens
gttcccggagaggaagactcgctccctcccaggggacggctagagactcactgactcatgcgtgtgtggtaggaatcttccaggaagtccccgtcccgttcgccctctctgcctgggcgggg

SEQ ID NO: 138747 - DNA, 122 bp, Homo sapiens
gggtatccttccacggggtgaaggctgcggagagtcgcagctgcaggcatggcctccggtcggcggacgctggtgacctggcgtcgtgcagggtgtcactttctcctttaattttttttgat

SEQ ID NO: 138748 - DNA, 122 bp, Homo sapiens
gcgattggttttagtggtaggtgtgtggggatctgttctggtcatctggatgctggtcatcggtgtgcagtattgatcaggacctgcaaacccaaaagcttatgggagctggcacgtcacgt

SEQ ID NO: 138749 - DNA, 122 bp, Homo sapiens
aggctggagtgtcacccaggctgcagtgaactgtgacacaaccacaattaattgcatcctcgaattccagggctcaatagatcctcccacctcagccttatgagtagctgggattgcaggaa

SEQ ID NO: 138750 - DNA, 122 bp, Homo sapiens
tgggtgctggaaagggacagaacaagggtccgtggcaaccacaaagcacctgcaggccagcgcttcccgatgagcagaggcgggggctggcacctggcgctggctgcagacgggaagtcaac

SEQ ID NO: 138751 - DNA, 122 bp, Homo sapiens
ggaggctttccagccgcaggaagaccccagttctgggaaggggcggcccaagggaattcacgcacgccccagcctttggagcatcccttgccgaggctaaactgatcccgcggggagcgagg

SEQ ID NO: 138752 - DNA, 122 bp, Homo sapiens
cgcagcgcagtgttgcactcttggttgttgtagtgagactgcctttccgacagttgcaagcgctgttgcatcgttcgaatgcgaagtcgcagccctgggaacttgagggtttacaggacaca

SEQ ID NO: 138753 - DNA, 122 bp, Homo sapiens
aaagttgcctgttggtaaattgcgtcttttttctttttcttcaacatctttatagtaccgcgagtgtacccagtgttattaaattatgccaaaacaaagagcaaagtccctgcccttaggag

SEQ ID NO: 138754 - DNA, 122 bp, Homo sapiens
cgggggcgcgcgggccggggcgggggcgcgcggggccggtcggcgcgcgggggcggcgggcgcggcgctgccaatcgcagacaaaggccgtcccagtgaatcatgtggtgccgggggaggaa

SEQ ID NO: 138755 - DNA, 122 bp, Homo sapiens
gaccgctagtggcaccctggggagctgtgtgaagaaggatgctcgaggccggtgggcaagcgcatcacaatccctggtcgatgtctgaagtggaggcaggaggggcgcctggccacgcacat

SEQ ID NO: 138756 - DNA, 122 bp, Homo sapiens
gatgcccatgagacttcctgggccccagtcttccaggtcacgcagggtcactgcgcttcacgtggccctgcagcaccaagaatatgcagggccttgcaatccagatggagaattgtgcaaac

SEQ ID NO: 138757 - DNA, 122 bp, Homo sapiens
gttaccatttattaaaagcctggccaggaatcttaccaacatactttttcacgtgaccctcgcggggtaaccgcaccaggccttcctcagaagcagtgttgctgctgccggttcacctggtg

SEQ ID NO: 138758 - DNA, 122 bp, Homo sapiens
cctgatcttgactattaggacaacttgtattggacagctgacatttatttctgtctggatcgggggctagagttcataatttctggtaatcgctcaaccctgtgattacgggcactttgagg

SEQ ID NO: 138759 - DNA, 122 bp, Homo sapiens
ttttttttttgagataggttcttgatctgccacccaagctggagagcaggagcgcaatctcggctcactgcaacctctgcctcccgggttcaagcgattctcctgcctcagcctcccgagta

SEQ ID NO: 138760 - DNA, 122 bp, Homo sapiens
cccatcagagtccacctcccagctggcatcacagcaggagggctggggagcccaggtgcacgacgcacagcagggccaggtcacgctcagggtgtgggtgctgccccacagagccaggacta

SEQ ID NO: 138761 - DNA, 122 bp, Homo sapiens
aggaggtgggtggaaccacaaaggaaaagctagctgctggtggggtctcagcttggaagacgtcagggtgtgaactgtcacttaaggaacagtttaggatagagcaagggatgaggaagccc

SEQ ID NO: 138762 - DNA, 122 bp, Homo sapiens
gtagctcggactctacctgtggctcaggcataccaggacaacctgtacaggcagctgtcccgagactctcggcaagggcagacatcccctatcaaaccaaagagaccgttcgtggagtctaa

SEQ ID NO: 138763 - DNA, 122 bp, Homo sapiens
agccccggatcacctgggctcgccgcgcatcgtccttctccccaaccgagccggactccacgggctcaacagcccccagccccggtggtccccgctgccctgcccgctgccgcccccactgg

SEQ ID NO: 138764 - DNA, 122 bp, Homo sapiens
ggcagacgtgtcggttccattccatttccatttctgcagcttagcttgtgtcctgccctccgcccgaggcaaaacgtatcctgaggacttcttccggagagggtggggtggagcagcggggg

SEQ ID NO: 138765 - DNA, 122 bp, Homo sapiens
taaaactttacaagtgagtcaaaacggccccctatggagttggaatgcaacacccaactccgtccccacctctcggagctctcagcctacacgctgcaggggcgcgagccacagccaacctg

SEQ ID NO: 138766 - DNA, 122 bp, Homo sapiens
aggcagagttgggaatattacatccattatcattccacaaaatgtaagatcctgtgaggacgcgtggtggcgctgcaggataagaaggcacaaaccagaaccgcagctgcagctccattaac

SEQ ID NO: 138767 - DNA, 122 bp, Homo sapiens
gctccaggaggctgtcacgcacactgtgctcctggcaggcgcaaaggccctgagggtggacgctggcaatgaccctgccgccagccaggtatggtgagccttgagcagcaggaggggccgcc

SEQ ID NO: 138768 - DNA, 122 bp, Homo sapiens
gcaatcagcacttttctttaggcacaaagtcttaagctccagatttgaatcaagaagccccgggccatgaaggattccccatttcttggtgagacagtaaggctcggtaacctgccctattt

SEQ ID NO: 138769 - DNA, 122 bp, Homo sapiens
cggacggctggcgcgcaaggcctgctggggcttgtagtctagaccacttccgcgctcaggcgcctgcgctttagctgctaactcgctctagtagctgtggtcggggctcgggaccggctgcc

SEQ ID NO: 138770 - DNA, 122 bp, Homo sapiens
gatgtgtaacaagcagctctccactggcgaggaactctacatcatcgacgagaataagttcgtctgcaaagaggattacctaagtaacagcagtgttgccaaagagaacagccttcactcgg

SEQ ID NO: 138771 - DNA, 122 bp, Homo sapiens
acagcagtctagaagcagcagctgggcctctgggctgctgtagatgactacttgggccatcggggggtgggagggatggggagtcggttagtcattgatagaactactttgaaaacaattca

SEQ ID NO: 138772 - DNA, 122 bp, Homo sapiens
aaggtggagggatgcagaggctccccaaagagccgagaaagacacgcgacccctccggatcgggacagctcctgaaagcccggcgcagagccgcctcgaagatcctaagagtgggcgactca

SEQ ID NO: 138773 - DNA, 122 bp, Homo sapiens
tggcagccagcaggaaacagggactttctagcactaaagcattagtgctgaggtcctggccgtgcccagaaattgccatgtgggtgctctggagttttgaggttgacaactgcaagttgtgt

SEQ ID NO: 138774 - DNA, 122 bp, Homo sapiens
attgtcagtaaatttcttcttcgcctactagttccaatatcttatttaaaatctatggcccggtgaggtggctcaggcttgtaatcccagcactttgggaagtcaaggcgggtggattgcct

SEQ ID NO: 138775 - DNA, 122 bp, Homo sapiens
gaaccctggaacccgctggccctgaggccacggaccgagacgtggtgctgagcccctgcgcggtttctggtgcgtagagactgtaaatcgctgcgcttctcagtcatcatcatcccagcttt

SEQ ID NO: 138776 - DNA, 122 bp, Homo sapiens
gaaagcggagccaaaaggggcgggagctgtgagtcactcccacgcaacagggcagaggttcgccccgcctcggctggcagggagctaacaggggaggcgcgacgggtcgggacgggcattcg

SEQ ID NO: 138777 - DNA, 122 bp, Homo sapiens
cagccctaggtcctcaaagtctggatttgtgtggaaaaggcagctctcacttggccttggcgaggcctcggttggttggtgagtgccacacggtttctttgtgtgcttgcatggattggaat

SEQ ID NO: 138778 - DNA, 122 bp, Homo sapiens
gggggcggggagaagagtccccgcccagagcccagactgccggaggatacaggccagagccgcctggactgggcggctgggcaggggaggggaggggagggcccaggcagcccccggtcgct

SEQ ID NO: 138779 - DNA, 122 bp, Homo sapiens
acaggaacaggagggcgggggcccaaaggaaaggtgataagttagggaagcctgagcaaacgcttcccatatcggaaatgggcagtaccagttaccgaagaagttactgcgcctgcgtgcgc

SEQ ID NO: 138780 - DNA, 122 bp, Homo sapiens
gctgtcagataccattcatctacttctctgtaaaatgtctgttctacttcacacagtggtcgagaggctaaaataaaatgaaaagcataaaactctctgaaaagtatgtttttaattggata

SEQ ID NO: 138781 - DNA, 122 bp, Homo sapiens
ctggccttcgccgccatcatgtacgtgcccgcgctgggctgggagttcctggcctccacgcgcctcacctccgagctcaacttcctgctgcaggagatcgacaactgttaccaccgggcggc

SEQ ID NO: 138782 - DNA, 122 bp, Homo sapiens
ccctgtggttaccacatccactgctttttggtctcctcacccaaccccttaacataaactcgacaccagggaaggcatcttggacgattttggtccctgagggtcctagtgcgaagggcagg

SEQ ID NO: 138783 - DNA, 122 bp, Homo sapiens
caaggatggtgatgttcttaagagaaactgaggaggaagagaggatgatatggtggcagacgtatagagagtctttgtagatctctcacattggaggggactatggtcggaggtacagatgt

SEQ ID NO: 138784 - DNA, 122 bp, Homo sapiens
gcacacacctgcagtaggttatataacctcccagcagggcttggggcagcagccgaccatcgagctcatttgcatttctgcagcgaaacatgaatattcacacaagtgcgataaataaagac

SEQ ID NO: 138785 - DNA, 122 bp, Homo sapiens
cagcccgcacccggccgcagccaagcgtgggcctgccgggttcgtagcgcccgaggcgcgcggccccacctccgggccctagacaacggccgccactgccccctgccggccgccgtagcccg

SEQ ID NO: 138786 - DNA, 122 bp, Homo sapiens
ccacgaactcctcgtatccataagtctcccagctcgtttgaacacacgccacgaactcctcgtatccataagtctcccagctcgtttgaacacatgccacgaagaactgccaaaggcaactc

SEQ ID NO: 138787 - DNA, 122 bp, Homo sapiens
gtcccgttgccaggagaacttctttcttgttctcggaatagatgctgcgcagaaggtaggcggtttgggttgacacagggctcctgggagtgtggttgaacttcactgtcaccagtggccct

SEQ ID NO: 138788 - DNA, 122 bp, Homo sapiens
tccagctcgggccccttccgatgggtctgctggctcaggtgcgggcgatggccggggagccgcgccccgcacgtgactcagcactttccccagagcccggactgcggagaacaatatcctcc

SEQ ID NO: 138789 - DNA, 122 bp, Homo sapiens
ctggtgcacagctcctgggacaaggtgaaagaaacctttggggagggagacagagatggccgcactgcactgcatctggcctgccacaagggaagtgtggtcctggtgcagctcctgatctg

SEQ ID NO: 138790 - DNA, 122 bp, Homo sapiens
cttgggatcacttagttgtgaccgagttttaatgtttcatcagagtatggctcttgttctcggtgccttgaaataccagagaaggtgttggagaacaagccctcctctacaaatcacagaaa

SEQ ID NO: 138791 - DNA, 122 bp, Homo sapiens
cccggggaggaggcggctgaggaatgccacggcttgtcattctggaccttgctcgccccccggtatggcgggcattcctctgcagtgataaaaccaagcgaaatctcagcagcccaggcagc

SEQ ID NO: 138792 - DNA, 122 bp, Homo sapiens
tgtttgagaaccatgtataaactaatctaaaggaatttttagcggcttctaaataaaattcgtttatgcacattaatgtctgtcccccttgagtatgaggaaggaagagtgacaaagcaaag

SEQ ID NO: 138793 - DNA, 122 bp, Homo sapiens
ggaaaagatggcccagcctcaagctctccagtcaacttggggcgggggaatacatttttccgtagcttgtaaaaagacttttcagccagtttgaggttagctgccaggggcagacagttgta

SEQ ID NO: 138794 - DNA, 122 bp, Homo sapiens
tcctcaatttcttcttgtttttacattttcttgtctgtcttctgctagagacatgcttctcggtatttattccacaaaggctatcccaatgcctactataaaatagcttctcaatgaaagtt

SEQ ID NO: 138795 - DNA, 122 bp, Homo sapiens
agggttgtgattttgtggatggattcagaggcttccaaccttcctgaatatttgcaaacccgggatgttggatcctttcctagggagaatgtgcccagcgctcctagagttcctggagggtc

SEQ ID NO: 138796 - DNA, 122 bp, Homo sapiens
ttttttccttctggtgggttggtggtctcgctggctcaggagtgaagttacagaccttcgcggtgttacagctcttaaggcagcgcgtctggaggagttgttcctcctggtctcgcggttca

SEQ ID NO: 138797 - DNA, 122 bp, Homo sapiens
ccatttatccaaatcaggtagccgaaaggtaaatgaggcttcaagttgggcggcgggcagcgaacttgacagaacctcgaaactctgcagatccgccgcccaacccagccgccagctccccg

SEQ ID NO: 138798 - DNA, 122 bp, Homo sapiens
tcatgcacgcgcccaggaaaatcacaaacgcaggggcccagcatagtgcctgatacgcggcgagagtttagtcaccgacgtcggttgttggtggtgacgtgagcagtgacatagaggacaaa

SEQ ID NO: 138799 - DNA, 122 bp, Homo sapiens
ttcatactccaaaataatggcctcaatgtagcttgtcttccagttcaagaattacgttgccgactcctatcgtcagagaatgaggggaggggtggaggcattcaccaggctcagcctctggt

SEQ ID NO: 138800 - DNA, 122 bp, Homo sapiens
tccgcagtccacaggcaggggacgcaccgcacagagcaggacccacggctgctgctgggtcgggttttatttcaaatgcagccacagaggcggtttctgcacaggtacgtgatccgactcca

SEQ ID NO: 138801 - DNA, 122 bp, Homo sapiens
tctctccctctcgctccctctcactctctctccgctcacacacacgcagaggtgctggggcgaaatcgggagcttaccagagaattccttgggattgttggggggcatctcccctccgctgc

SEQ ID NO: 138802 - DNA, 122 bp, Homo sapiens
ccttgccaccagtaccctcgcgggccgaggtcgttctcccggtcggcttcccgcctcacccgaaaaggaattagagcatctacccaagacggtgactggcagggcagatcaaggtgtcctgg

SEQ ID NO: 138803 - DNA, 122 bp, Homo sapiens
tcaaggcacatctgtctctgggtctttggataatcaaaatgaccactaaaaacagaacagcggtatctccaatggggccaacatgagccacccccaatcctaagagactcctgtgagatggg

SEQ ID NO: 138804 - DNA, 122 bp, Homo sapiens
tagagaaacaagcagagggtttgcagcgtagtacaggcgcactgcctgtgcatggctgtgcgtcggactgaccttgcctctctgatacaaagcagggttttccgcggcttctgttgttgagg

SEQ ID NO: 138805 - DNA, 122 bp, Homo sapiens
caggtcctggctctggctctggtctggtgccagtgctggggtgggtgtgtcggctgcccacgcagctgcggggtccagttccagaactatctccaccagctgggatggggggcttcttcttc

SEQ ID NO: 138806 - DNA, 122 bp, Homo sapiens
gagagcggcgcgggtgagtgggagcggcgggtgtgcgcgagtgcgagtgtgcgagcgcgccggtggcgctgcccctgcccgctccctcccgctcgtgcagctccggcatcagtttcggggat

SEQ ID NO: 138807 - DNA, 122 bp, Homo sapiens
gctccagaacttccggccagcgcagccattttggcttcctgaccttgggctacggctgaccgttttttgtggtgtactccgtgccatcatgtccgtcctgacgccgctgctgctgcggggct

SEQ ID NO: 138808 - DNA, 122 bp, Homo sapiens
agattaatggtaacagcagtgttgtcaagcgcaggacaggacaaactctgtagcagcttgcggtcactctttcacagcctgctagatagagcagtgctgtggagccaccaggagcaaccaga

SEQ ID NO: 138809 - DNA, 122 bp, Homo sapiens
gtcttcaaagttgtggccactaatggagatacttatctgggtggagaagactttgaccagcgtgtcatggaacacttcatcaaactgtacaaaaagaagactggcaaagatgtcaggaaaga

SEQ ID NO: 138810 - DNA, 122 bp, Homo sapiens
gcgtgggggaccgtgaggatccgaaggtgcacacgactcggagtttgcgggagcagcccacggcgtggggtccccaggcctgggcaggtggagggcgcagccaggaggctgttggtgccagg

SEQ ID NO: 138811 - DNA, 122 bp, Homo sapiens
aaagcagggatagttatgaaattcagaaactgcgtatatgggcggctgacagtaattcttcgacactgggaaacataacggattcaaaagaattcttcatctcagattcctctaaaaccaag

SEQ ID NO: 138812 - DNA, 122 bp, Homo sapiens
aacggcggggttgaagccggagccgccctccgtgagacccaccggggatcctcttccaggcgcctgatttgctggagataggcgatacaggcagacgctgtccagtcggtggcctctccaga

SEQ ID NO: 138813 - DNA, 122 bp, Homo sapiens
gctccagacacctggcctgtgcagactggagctcagggtctgggaggcgtagggctcggccgcgtggaaatccagtccggctgaccgactggagggcagcccaggcccggccagggtgactc

SEQ ID NO: 138814 - DNA, 122 bp, Homo sapiens
gcacctcgtagtagtccaccatgctggatggccagaacggcccaccaggcactggcacagcgagcggcaaggctgccagcacccaggcgcaggcccgagtgctcggagacctgggccgcctg

SEQ ID NO: 138815 - DNA, 122 bp, Homo sapiens
gcagggtttgggtagtgggataggtcacttacttgttggggaagactcgggtgatgccaccgtctgtggcagcgaacacggccagtaggctgtacctgggggtagcaggggggtggggtcac

SEQ ID NO: 138816 - DNA, 122 bp, Homo sapiens
ggccccttctaggggctatttcccactctgttccctggtgcctgcctggccctcgacacccggagcctgcaggcatccctgggccctggctcccatcgccgggccaaacactgctcaggccc

SEQ ID NO: 138817 - DNA, 122 bp, Homo sapiens
gcccgggcattgtcatagcagctgacccagccaagcagatgttcaggccccacgtgcttacgacccggaagtccgtgggctcagcggcggcttttgcagggaccccagagcaggcagcctgg

SEQ ID NO: 138818 - DNA, 122 bp, Homo sapiens
gctcggggtggcagagacagctgtgcggtcccagctgttcctgagcgcaccgctgagggacgcactcccttctacaacggctgcaccccaagtcctcctcccattcctatatttttctccat

SEQ ID NO: 138819 - DNA, 122 bp, Homo sapiens
agcgcccgttatttcggcagtcaggggcaggccgggtgaaggaatgcgcagagaagggtccgccaagaagctccaaaagggtccccagaccttaccagcactggaggtggaaggcagccggg

SEQ ID NO: 138820 - DNA, 122 bp, Homo sapiens
ctcttcaggctgaaagcaggtgacttagatgaaatctgaatccacacaaacaagcaagcacgaggaatgcagattatgtaactctgtaaggtagcgtgttgcttctcctttattctcttgat

SEQ ID NO: 138821 - DNA, 122 bp, Homo sapiens
cctgtgaaatctattttaaaagatcagaattttctttacatccacctccgaaatgtgctgcgggagataagtggggcataaacacatgggggtgccgggggcggcggagagccaggagcggg

SEQ ID NO: 138822 - DNA, 122 bp, Homo sapiens
ctgcagagctgctcggctgcgcgcacctggagccgccgccccgtggcctccacctcctcacggtcagctgtccggaaggcctcgagtcgcccctcctggatctcgatgtgccacatggtgtt

SEQ ID NO: 138823 - DNA, 122 bp, Homo sapiens
gggggcggggagtgggagtgtcacagccccacacagagccttgctcctgaggtccgtctgcgctcagtcacctctggcccgtcaagccctcccaatgcccggcagctagcacgaagcccctg

SEQ ID NO: 138824 - DNA, 122 bp, Homo sapiens
ttgtccaactcttcctgggaggtgggggccaccgtctcttctcctggcaaagctagaggacgcgaaaaggaaaagtccaccccaacacttttcttgcaaaacaactgtctcgaactctcagc

SEQ ID NO: 138825 - DNA, 122 bp, Homo sapiens
taagaagctgatgattaactattgagctggggaaagataatttgataggctttggacttccgggatgggggaaacagaaaagacattccagaccaggcaagacattttaagattatgagttc

SEQ ID NO: 138826 - DNA, 122 bp, Homo sapiens
cgtgcttgcatactcggcatcccctctccctcgcctctctctgcttctttggtgggctcacgaccacctgtcgcatccctacgcgtgcctgcgccccttcccaggcaccaaaagccttgcgc

SEQ ID NO: 138827 - DNA, 122 bp, Homo sapiens
tgcagcgtggagactggaaccggcaatttcaaaggacgccacgttcaatcgcagcgctggcgcgggcggaggctaaaacacgggggtcctgagactgaggaaaacgcgccaagttcccctcg

SEQ ID NO: 138828 - DNA, 122 bp, Homo sapiens
cgttttctacccgcaaattctcaattgctagataaacaacaataacaacactttattgggcgctcatcgtgtcaaaccctgtgttgagggctccattcctcaaggtccattttaccggcgag

SEQ ID NO: 138829 - DNA, 122 bp, Homo sapiens
ccagtgccgagagcgacaggttgatcttggtggcctccttgagccgctcgcccgtggccccggtcttggactgccgctcgctgcccgccaggtccaccaggttcagcttgcccgcccggagg

SEQ ID NO: 138830 - DNA, 122 bp, Homo sapiens
agccgtagcccgccgcacggcgacccccaggcccagacagcggggcggaggtctcgtaggcgcgggactggcttctctcaggatgagcccttagagccgggctccggatctttctcagcctc

SEQ ID NO: 138831 - DNA, 122 bp, Homo sapiens
ggaaccaggacagaaaggtccttccgctagctgtcaggtgcgtaacaatcgctaggcgtccgccccgccctccctaccgcaggagccgcagcatcagcaggcgcccgcgaaccgcgtctgcc

SEQ ID NO: 138832 - DNA, 122 bp, Homo sapiens
ccaagcagaatgtacttgatattatttcagggtcccattgctgttcagcctttgtttttacgtcattacaagctgagtaaaattccttctgatgatgttatagttaatctgtatgtttttta

SEQ ID NO: 138833 - DNA, 122 bp, Homo sapiens
tgtgtgaggtgaaggccagcagtgtccgaatgctctcagatgcccctgtgctcaacagcacgatccccagtccccaggcgcccagctgggaaattctgcttggtctgtggtaaatgcccttt

SEQ ID NO: 138834 - DNA, 122 bp, Homo sapiens
gagagtagttgttccactgatgcacgttttcagcgggggtttcccctgaccctttggtctcgggaaaccggactgtgtgtttgttcagctgttcacgttttgctgtggaatgtcaaggagaa

SEQ ID NO: 138835 - DNA, 122 bp, Homo sapiens
gtctgcatcttcatggaactcagggtcacagtcacgtggggaaggaagtggacaggcacgcggcctctctctgcatcttcgcggaacccaggttcacagttgcgtggaaaggaagtggagtg

SEQ ID NO: 138836 - DNA, 122 bp, Homo sapiens
ttacttcctctccatggccactgtcccgagtatggcgtgcgcgccacaaagttcaggaagcgtggctgacctctgagaccccgaccctcttcctcacgccttgcatttggtgccagcagcag

SEQ ID NO: 138837 - DNA, 122 bp, Homo sapiens
ggtggctcttgccctttagactacagttcccagcatgcccaggcgattgcgtcccagaaccgacgtcccaccgccttcccacatcggatcgcagggctcccaaaatggcgagtgaggctgcg

SEQ ID NO: 138838 - DNA, 122 bp, Homo sapiens
tgctgagtaatgcgcactcaagccggctgcgggcttgacccccagcccccgcgacaggtgcggctgttcacccccaaagtccagcccttgtgcccccggctgcgtctgccctgtccacagtc

SEQ ID NO: 138839 - DNA, 122 bp, Homo sapiens
aaaaataaaaagaagctgagcatggtgcctgacacctgtattcctagcactttgggaggccgaggtgggcggatcacttgaggtcaggagttcaagaccagcctgaccaacatggtgaaacc

SEQ ID NO: 138840 - DNA, 122 bp, Homo sapiens
gtttgtttttacattgtataagggctccagtaagccatatttcttcccattgcccttttccgcctaggacgtatttcaagcttcacacttgtttatcgttgccttatcttttatgggattgc

SEQ ID NO: 138841 - DNA, 122 bp, Homo sapiens
gtttgtgtttaagcattccctcgcaatatttgcaacccaaaccttgtagcatggagtcagcgcctgagaaactgggaaggacatctgacccaaagccaaaccgccagtactagatgtagaaa

SEQ ID NO: 138842 - DNA, 122 bp, Homo sapiens
aaggttaagctggcccgggcaccgctcttacgcgccctgtgttccaggagagcggcccttcgtgtgcctgatctgcctgtcggccttcaccaccaaggccaactgcgagcggcacctcaagg

SEQ ID NO: 138843 - DNA, 122 bp, Homo sapiens
ctgacagtccccgtcccatttccccgtgacttgggccccctctccgtcttcgcccagcctcggtctgttttccagggccaactctcggggttccgttctccccatggtccttgctttcgggt

SEQ ID NO: 138844 - DNA, 122 bp, Homo sapiens
cacataccatttaatggtcactgcaggccctgtgctaggggctttctgcagaccatctcacgtaatacaaaacacctatgagctaggaatgataagccttcccattttagagatttagagac

SEQ ID NO: 138845 - DNA, 122 bp, Homo sapiens
cctttcagtctatgcgacagagagaggagctgtcctctcattgctccctgggtccctttacgtagctttcaccacgctgtggttattgatttactcctctgtgtttccacatccacctccag

SEQ ID NO: 138846 - DNA, 122 bp, Homo sapiens
gcagctccccgccagacgctggaccaatggttgtgcgcttgaggtctggcaaccgcctcccgcaagatatcaccgggtaatgtagtccttcgcgaccaagggcaggacagctggacggcgca

SEQ ID NO: 138847 - DNA, 122 bp, Homo sapiens
acaacgcctcctccccttgaggcacgggcgctctgggttgtgggagttggggagctgctccggcttcggcgcggaggggcggcggccggggaggcggcggcggcggcaggtgagaggccggg

SEQ ID NO: 138848 - DNA, 122 bp, Homo sapiens
gggcggctggaggtgcggcctgggagccctgcgtgctgggccctgggcagggacggcaggcgaggcgtgtggaggaagagccgcgaagagctgggcgctgtcttctccacgcctccgtttct

SEQ ID NO: 138849 - DNA, 122 bp, Homo sapiens
ctcagtggaagggtttgttgtccccattaattattccattgttggctgggcgtggtggttcgcacctgtaatcccagcactttgggaggctgaggtgggcagatcacccgaagtcaggagtt

SEQ ID NO: 138850 - DNA, 122 bp, Homo sapiens
attcataggcctactacctagattctaacacaaacgttttactttgcttgctttatcactcgcctgcccatctaaccatccctctacccacccatatttttaaaaatatgctcctttttact

SEQ ID NO: 138851 - DNA, 122 bp, Homo sapiens
caaagactcaagtcttttcatatttatttcccatcctgcgtggctttccctgaactgttccgtggctgtgccctctgctccccaaacccaggttcccacagccttgggccctaggtacccca

SEQ ID NO: 138852 - DNA, 122 bp, Homo sapiens
tctgattccagaaatccttgtaacccaatatagtctccagctccgatgccatgtccttcccgggtcccaacgtgctggggctggagactcatctaggggattccggggaggagggatcttcc

SEQ ID NO: 138853 - DNA, 122 bp, Homo sapiens
actgtaaccagagactcaggttcctgctgcccctcttgtcaaacgatgtaaaagtatttccgggccagtgctggagagttcccagcaggaatctgattttaagaccctctgtgggccgggcg

SEQ ID NO: 138854 - DNA, 122 bp, Homo sapiens
ggtaaagaattcaggcctgcttgttgactctaaacaagcatttgagaacagaaacacaaacgctgtactctccctccagtgccatcacaaattttcttgttttttacctattctctctcctc

SEQ ID NO: 138855 - DNA, 122 bp, Homo sapiens
cacaagatttctggtctggattgggccattgtagagtgagaacaggcctgggaacttgggcgactttgtgccacccaaggaaggaaaagcgtgtctggggacacacttttggatgatgttcc

SEQ ID NO: 138856 - DNA, 122 bp, Homo sapiens
taaggaggaggggtgatgtcatggattggtcagattcaagagaactgaaccacaggcctgcgtggaacctcagtgtgtgaagtaaagggattaaaggctagtctcaggctggggatggctcc

SEQ ID NO: 138857 - DNA, 122 bp, Homo sapiens
gttagccagaaaatcaaaggagcgagtgctctggacttacccaggctgggggtgggcggccggggagcgagaggagcttcctgggaagaaaattcttgcttgctcaggctggagccagctga

SEQ ID NO: 138858 - DNA, 122 bp, Homo sapiens
aggctacagaatgctgctagaagacatacatctctaaacttctttttttgttgttggagacggagtcttgctctgtcgcctagactggagtgcagtggcacgatctcggctcactgcaaggt

SEQ ID NO: 138859 - DNA, 122 bp, Homo sapiens
agccagctgctgcagaaactgacatcctccagcaaatcctgaatgaatgaatgaaaacaacgtgatcgccctaataatgaccacaactgaacacacatctttggctgtattttatagaaaag

SEQ ID NO: 138860 - DNA, 122 bp, Homo sapiens
caggacctccaacactactacttgggccttcctcttcgccttttcttcctcctcttcctccggactctaagaaagtacaataggcccccaggtcctcagggcaggtggtcagtttgtgtgta

SEQ ID NO: 138861 - DNA, 122 bp, Homo sapiens
agtgcgcaacctgagcctggagcagttgagggagacggcaagaccccacgcgccgtgtaacgaccataacgcgcgtgcactacaacctcgccgccggcgtccaggcttctgtgttctatagc

SEQ ID NO: 138862 - DNA, 122 bp, Homo sapiens
taaagacattacattggccctacagaacaaatgtgcggattgaattctgcctataggacacgaatttatgatccttagcaatgtgaagttagagaaggggttttattgtgaaattgacacag

SEQ ID NO: 138863 - DNA, 122 bp, Homo sapiens
actagacggccttgcactccgcgtgcactggccacacatcctcgcctcctccacccgctccgccgccggtttccttggaagttaaatcttggaggatttgtccacacccaggccgctgccaa

SEQ ID NO: 138864 - DNA, 122 bp, Homo sapiens
cggttgattgaagttcatgaaagcgcgctggatggggcgcgggggattgaaataagtgagcgccctagtgtcctgcctgcggatgatcatgaatctgttgggctgcgaatggtttaaaaagg

SEQ ID NO: 138865 - DNA, 122 bp, Homo sapiens
cactgtatcttcgttctctctgtccttgtctgtctgtctctctcttcgttgtggttatggcgtctgttggaaatagaattcggttcatttgttctggttcactttcagtctcatgttttccg

SEQ ID NO: 138866 - DNA, 122 bp, Homo sapiens
gacgggtggatgacttccttctggacgcagatgagggacgggtggatgattccttctggacgcagatgaggaacgggcggatgacctccttccggacgcagatgagggaggggtggatgatt

SEQ ID NO: 138867 - DNA, 122 bp, Homo sapiens
agctaagataattagtatttgtacgcctttgttttcaggtggggcagccagtaacagctacgtgcccaagcaatgttgcaagatctcaagttaagattattctctgttcaaaatgcatgcct

SEQ ID NO: 138868 - DNA, 122 bp, Homo sapiens
tgtcagaaacgctgctgaggtttgaacctccttgactgggaggattatgtacaatttcaccgcccagcaaatctgaaggaggaaatgttttgaggatagtatgtttggttctaggtctagaa

SEQ ID NO: 138869 - DNA, 122 bp, Homo sapiens
ttcctggaaatgtgaaaagcctgagtgagattacatgaatagagaccacaaaccctgaggcgcatagctgctcagtcatgccctgtgtgatccttaggagttaaaagactggatatggattt

SEQ ID NO: 138870 - DNA, 122 bp, Homo sapiens
ctgctgttattattattgctactgccagcaataataagtggtggatgtactcaagacggtcgggagggaaggcaagggcagcctctccctcattttcaccgaaaatcctccgggtgtccctg

SEQ ID NO: 138871 - DNA, 122 bp, Homo sapiens
tggccaggatttgggattgcggtgggtttgcgttccggatttgggattgcggtgggtttgcgttccagatttgggattgctgggctcgcactgggatagtttggaagccgtggccactcttg

SEQ ID NO: 138872 - DNA, 122 bp, Homo sapiens
cccactgatgatattggagttgtgttttgaagactaaataggatttactatgacggagctcgtgttttagaaagataagttttgaggcagtgccaactttgttctgtgggctaagactttaa

SEQ ID NO: 138873 - DNA, 122 bp, Homo sapiens
gtgcaggggtgtcgccagcctgagtgtttgagcgcaaggcgggaacgaggggactgcgagcgcggaaccaagatattcatgctcatgcgtgtgctccgcggcatcgtatgctcgccagttac

SEQ ID NO: 138874 - DNA, 122 bp, Homo sapiens
ccctccgtcacccagagcaggggggttaatgttttggagacacgaagccccctgagaacacgaggaaagcagaatccccgagatacacagactttgcaaagctgcacacagcacaggagact

SEQ ID NO: 138875 - DNA, 122 bp, Homo sapiens
ggtgacggcgcattggaaaccgtaaggcatgacaacgggaggcccgcggggtgtttcaggcgcgttgacgcaggtgcatggctggcaggcggcctctacagaaggagggagcgcaattcaca

SEQ ID NO: 138876 - DNA, 122 bp, Homo sapiens
ttcattgtgctaaagttttccttactggctctggcaccccggctttgggttgtggtcctgcggaagaaacattcttccttgtctgtggttctttagtggattgcttgttagctcagggattg

SEQ ID NO: 138877 - DNA, 122 bp, Homo sapiens
ccaggcggctatgagtggatgcggggtcaggtggcgtcagcccttagtggtgagcagaggcggcgatgggctttcttcacccagcattggtctgcccggctccccagacgccaaggccctca

SEQ ID NO: 138878 - DNA, 122 bp, Homo sapiens
tgatccagaaacgaaatggacttcaagattcagacactgggcagagtgatggggccgacacggcccctactggagagtgtccagtcttgatcgccccaagcttttgagcagggatgtcctgt

SEQ ID NO: 138879 - DNA, 122 bp, Homo sapiens
cgtgggttgccgtggggggagccgagggcctgtctgtggctgctgctgtggctgtggaggcggcggtgcctgctgctgctgctgctgctgttgctgttgctgctgctgttgctgcaaagaaa

SEQ ID NO: 138880 - DNA, 122 bp, Homo sapiens
gatttttttaaataaaaacatgtaagtacagtctaatcatgatacaatatcaggcgaactcgtattgggaatgttctacaggatacctggccagtgctcaagactatgaaggtcatgaaaaa

SEQ ID NO: 138881 - DNA, 122 bp, Homo sapiens
gaaatagaactgacaatttccttagagatgaagaatccacaacaggcaagaagtaatttacgtgcccaagatcatccaaagagcatgtgaggaaactacacagcagtgtgattgtcccaatc

SEQ ID NO: 138882 - DNA, 122 bp, Homo sapiens
tttcaagttcccatgcaacacctacacgtaaacctggccaactggtctgttagaacagagcggggtgtttcctgaagtttgaacctaaactattaaataaaacagttatcctgcaagaccca

SEQ ID NO: 138883 - DNA, 122 bp, Homo sapiens
agccgggaacggctgggaaggtctccacagggaccaccacatgggcaaggctggtgtccgcgccgagggatcggcgatcccaggtccggggaaactccgcgagcgacgcgctcgcccgcggc

SEQ ID NO: 138884 - DNA, 122 bp, Homo sapiens
tcagaggtgtatacatgttcctggccactctgcttcttagggtggagttagaggactccccgccctccttgcctgcgaaggaggaggcgtggccacacagataaagctggtctgaaaagagc

SEQ ID NO: 138885 - DNA, 122 bp, Homo sapiens
cttaggagatacatactgaaatacttgggaccttgtgttgctatgtctgcagcttacactcggacaattcaaaacctgacaataatcataatgagtagcagccttctgagagggagggaaaa

SEQ ID NO: 138886 - DNA, 122 bp, Homo sapiens
gcccggtgtgtgacctcactaacctccaccagcgcgcaccctgtcctgccccttcacgggcgaacaaccccacacgaggcagtggtgtgggagccagtacccggaaccgtaaaagcacgact

SEQ ID NO: 138887 - DNA, 122 bp, Homo sapiens
ctaatttaaacagcaaggggaactgaaactcttgagaatctctgattatacagaaaatctcggtgtcgtttacacacagggcaagccaaggggatccttctaaacagtctggggctgtttgc

SEQ ID NO: 138888 - DNA, 122 bp, Homo sapiens
ttgtcacggtgcttgtaaagccactgcttgaggggtcgcgccatgtcttgcagggcctgccgcttgtgcctcaccttcccgccattctgccgggcgctgggacatggggagaggaggcggcc

SEQ ID NO: 138889 - DNA, 122 bp, Homo sapiens
aatagagcagctcatgggcgtatttgcgctagtgttgggtgttccgctgtgctgtttttccgtcatggctcgcactaagcaaactgctcggaagtctactggtggcaaggcgccacgcaaac

SEQ ID NO: 138890 - DNA, 122 bp, Homo sapiens
ccaagtgttttgtatgtgcaagtcattaaaatgttataataatcagatgatataggaccccgttcccagtgtacagataaaactgagggctcaggaggtcaagtaatttcccaaagacatgc

SEQ ID NO: 138891 - DNA, 122 bp, Homo sapiens
cagtcttcgttacaacctcatggtgctgtcccaggatggatctgtgcagtcagggtttctcgctgagggacatctggatggtcagcccttcctgcgctatgacaggcagaaacgcagggcaa

SEQ ID NO: 138892 - DNA, 122 bp, Homo sapiens
cgcctccttctgccggcactcctcctccagctgcttcagcttctcctccaggatcgcctgcggcttcctgcctggaattcccagaaacgccgttactcccgcggcaggcacaggttctccaa

SEQ ID NO: 138893 - DNA, 122 bp, Homo sapiens
tgggaaaaccaaaactccttagtggcaagaggccaaagatggtcagcgaattgttgtttccggctggtaggtgacatttcttctattcgctaagcccattttgtgataacacagttttccat

SEQ ID NO: 138894 - DNA, 122 bp, Homo sapiens
gggctgggtagaatggaaacaggcctgctagccaccctggggagggcataagctctggcacgggcctttgggagaacaagatggcagcatccaccaaaatgtaaaacatgctcacccagcaa

SEQ ID NO: 138895 - DNA, 122 bp, Homo sapiens
attcatgttgtgcataatggatttggcaggcccaagcacagaaatttccagaagtgtttgcgtggcagcagttcttagccaattcacattttttagcagttctggccagctgcccagcctgc

SEQ ID NO: 138896 - DNA, 122 bp, Homo sapiens
aacagcaccccaggtgtaccccgttcgcggttggtttgccccacggagggaggggtccagcgagaggccgccccctgatgctcccgcccctccgcagtgagccagcaccccggggtcctcac

SEQ ID NO: 138897 - DNA, 122 bp, Homo sapiens
cttcaacacccttacaggacaatgaaggacccgtgtgttccctctgccggctggactgggcgtcgatcctgctgcccggaacctctcactcgattttactcaatgaagtagagcacagcatg

SEQ ID NO: 138898 - DNA, 122 bp, Homo sapiens
cgccagggtccgcagagatccccttctgagttctgggagcgggggtctggtccgggacagcgcggagcaggaggaggccggtggttctcagacctgggaacttgcggcttttgctgtgtacc

SEQ ID NO: 138899 - DNA, 122 bp, Homo sapiens
cccctggggccatgcttactgtgatgatgtcccctgccttcacgttgaggctggtcaggtcgtaattgttgcaataatccttggtcgcccggacctgcagggccgctgaggcctctggggat

SEQ ID NO: 138900 - DNA, 122 bp, Homo sapiens
taaggtgcctgaagggcattagaagcctgctagcacctgtgacccttgcaggttacttctcgtgtcttgatttccaagcattagtgatgactaccttggaagctattggctgatagaggatg

SEQ ID NO: 138901 - DNA, 122 bp, Homo sapiens
gtgcctacatacaaaatacttctcggggtagtcccggaggtgctgcaaactggtggcaaccgtcttgcgatcctgctcccacttgcgcgaacagaagaccatctcggtgaagtaccacatcc

SEQ ID NO: 138902 - DNA, 122 bp, Homo sapiens
cgacattcccgatggcttctcgggtgcccactcaacgggagtgatcgtgtcattccaaagcgctttccattctgaaggtgcatgacctggagacaactgcttagcagggttgggaaccctca

SEQ ID NO: 138903 - DNA, 122 bp, Homo sapiens
atactgacgactgaagctggagcagagagggggtatgtttctgcaaaaccacatacaaaacggactacggaaatcttactaccgaggcttgcccaggcaggagagaaaggtgtagcatccct

SEQ ID NO: 138904 - DNA, 122 bp, Homo sapiens
tggccccgcatggcctggcactttgtgatcgcttgtgggcaggccgggctattttggagccggcaggatgtgatatcatttggacgtttatttagccccggctgggtgtgggggctgcgttc

SEQ ID NO: 138905 - DNA, 122 bp, Homo sapiens
tattggctaacactccaacccagtagttcccacatgctggtctgagaaccagggccaatccgtggaaatgaagaaaaataaagacaacatagtaaatgtaccataatattaaatttctagga

SEQ ID NO: 138906 - DNA, 122 bp, Homo sapiens
aaactcaccttcccttgggaagtgtggggccccacagagacagggacacaggggcatggacgaggaggtgaggatgtgagtgtggtcaggcgggcaggcagtgaggctgcagctcgaagtcc

SEQ ID NO: 138907 - DNA, 122 bp, Homo sapiens
aagcaatcctcccacctcagcctcccaaagtgttgggattacaggcattagccactgcgacggactcaactcaagtgttttaccagtccctccaggacactctgacactgctgaggtttaga

SEQ ID NO: 138908 - DNA, 122 bp, Homo sapiens
cacacacctgtctcgctccctccttccagaactcttaaaacgcctagatgacgtgtccaacgatgtgaggatggcagccgcctccaccttggtcacctggctgcagtgtgtcaagggtgcca

SEQ ID NO: 138909 - DNA, 122 bp, Homo sapiens
gggaaagctctggttgacttctggcacgggcatctgtcctcgttttacaagtgaggagtccgaggctcacaggggaactgacaaggtctcaagaaataggagggggtgaatggagctcagat

SEQ ID NO: 138910 - DNA, 122 bp, Homo sapiens
tgtgcacggccaggtgattgcattgtcgtgcaagcatcctacagggacttacacagagctcgatggtgcggcctcctccacacccaggctgtagggcatagcctgtggctcccaggctacaa

SEQ ID NO: 138911 - DNA, 122 bp, Homo sapiens
caatgcaggaatgggcaacagagaagtacatagttgaacaaccttctctctcttctctcccgagggacaagcatattttcccgtcaactttagtagcagttgccccctgtggatttcccaat

SEQ ID NO: 138912 - DNA, 122 bp, Homo sapiens
cttgaactgctgacctcaggtgatccatacgcctcagcttcccaaagtgttgggattacacgtgtgagccaccaggccccggccttgagtaacattttatacttgtttcactttactattat

SEQ ID NO: 138913 - DNA, 122 bp, Homo sapiens
ctccggctgggaccctgcgccccgcctagctcccggctctgctcgctgcgcgccatcctccgctcgggcttgcgcccaccaagacccgctctcctcggccacccacagctgcatggcccggc

SEQ ID NO: 138914 - DNA, 122 bp, Homo sapiens
tctcaacctcggatcctctttgcccagaactgtgttcccaggtggctgacgagcctgtcacgtgccagccctgcgctgcctgcgctcctctgaccggctgtggtgctggcacaggccacact

SEQ ID NO: 138915 - DNA, 122 bp, Homo sapiens
tgctggcgtccacgaaggaagtgagcgcgttgatctggttgcggatggtgatgttgctcccggggcaagccgggcaggagcggaagaacgggatgcagtcggcttggttcttgatgcggggg

SEQ ID NO: 138916 - DNA, 122 bp, Homo sapiens
ctacaatggcatcacatgatgttctgtggttttcttctgtattacaatggataaaagaaacgacccccttgaggaaagataaatgacaaaggtgagtggcaaggtaattacagaaaggttcc

SEQ ID NO: 138917 - DNA, 122 bp, Homo sapiens
cactcagagtgtcaggaagcacaggagcgtaaatatttagagaaagccgggagccagcagcgccgcacccccgccagcctacatccacgcagagagatcgcactattctcatatccacagtt

SEQ ID NO: 138918 - DNA, 122 bp, Homo sapiens
ggattttactaaatagaattactggtgaagcagatttatccatcgagactatctggtatgcgttatgtatgtagtctgttgctgctgaaagatgtctgtgtgcctgtatcaacatgtgactt

SEQ ID NO: 138919 - DNA, 122 bp, Homo sapiens
ctcaccgcccttgaggcccggactggtgttcagtcccaatagactgggggtctgcagaggcggggagtgagctgagggccaggcagcaagtgcggagagctggctctgtaaattcgcctggg

SEQ ID NO: 138920 - DNA, 122 bp, Homo sapiens
tggatcactggattagaaaccagcatgtgtgtgtgggagtggagggagagctcatgcatacgctgggcacgttgccctggtgatgttgacacaaagcaccacaccacctcctgaaaccacat

SEQ ID NO: 138921 - DNA, 122 bp, Homo sapiens
ccttttcatgattttaagtttctctgcagaaactactgacggagtcctgtgtttgtgagtcgtttcccctatggggaaggttatcagtgcttcccgagtgagcatggaacacttcgagttcc

SEQ ID NO: 138922 - DNA, 122 bp, Homo sapiens
atgtattgttttacttggattgttgagacaaatttcttatatttgtccaggatgtcggctcgtgttaatggctggcattaataagggattcctctacaggggatagttttttcttttcttat

SEQ ID NO: 138923 - DNA, 122 bp, Homo sapiens
tcaaagccttatttgctcaggggaaatcaacaagtcacagatcagctccattaaggggcccggcccggcaaggacagtcctggagccgagggacgccccgacggacctcgggcctcccccga

SEQ ID NO: 138924 - DNA, 122 bp, Homo sapiens
tccaggttcttctcatttccctgtggtgtctgcacacatcctgcttaggattttcccgcccgatacctgtaccccgggttttgcgctgacacatgctccattgcttcctcgtgagagctttg

SEQ ID NO: 138925 - DNA, 122 bp, Homo sapiens
tgctgcccgggaccgtgccgcacggcaccgtctccaccacgttggtgatgaccgagacagcgatgaagaagccagtcacgtagtagaagaccagggccagcgtgctggtgtgggggttctcg

SEQ ID NO: 138926 - DNA, 122 bp, Homo sapiens
tacctaagattttttggattctggtttgtggagaagcacccttatatttaggctgatgggcggcaaaattagaaagtattttttgtgatttagacttttatacagagatgttcattgtgatt

SEQ ID NO: 138927 - DNA, 122 bp, Homo sapiens
tccggtgacaggcacttccaacagcaaaccccacccccaccccgacatgtgctggggaaccgggagttcctgcccctgagaggctgatgttgttggagaaaatatgacctggagaaacacat

SEQ ID NO: 138928 - DNA, 122 bp, Homo sapiens
gccaaatatttttgtagattaagttttactgggacagaaccatacctattcatttacgtacggtctaggcctgcttttgcactatgatggcagagctgagtagtcacaaagaagaccatacg

SEQ ID NO: 138929 - DNA, 122 bp, Homo sapiens
gcgccgcgacgacagcgaggcggtgaccgagcctcagcggacgcagaactgactaggcagcggcggcacccccattcccggccctataagcgctgggtgccgcggcttcttccggtcggggc

SEQ ID NO: 138930 - DNA, 122 bp, Homo sapiens
gaggtgctgatcaacgggcagatggtgaagctgaagtactgcttcacctgcaagatgttccggccaccccgaacctcacactgcagtgtctgcgacaactgtgtgggtgagtaggaggcagc

SEQ ID NO: 138931 - DNA, 122 bp, Homo sapiens
tattagcataaagtcatggttagtatatagtctggtggcctttggaggaacattcttgttcgaatctatcctgtcatggacccagtgaatgtccatatgtatattccttcaagtgatatttc

SEQ ID NO: 138932 - DNA, 122 bp, Homo sapiens
gaggagggtgaggaccagaggctgattgcatgagctctgttggagtgcaggacccactaacgggttatctcagggttcctggaggccacggctgtgccttgtggtccaagacctggggaagc

SEQ ID NO: 138933 - DNA, 122 bp, Homo sapiens
caggaaggcgttctgacccgctagagctcggggacagggaccccatcccggtgcctagagcgtctcccttagtcggcgtgggccagcgccagttacctcacgagcactgaactagcgcctgc

SEQ ID NO: 138934 - DNA, 122 bp, Homo sapiens
gtgggtgtgcgcggggccttctgctcaggcctgcggcaggccgcgtgcggacttggtggtcgctggggtccgcgacggggtgggggctcccggggaaccgcacgcggccgggccgggcggac

SEQ ID NO: 138935 - DNA, 122 bp, Homo sapiens
gtagggcacagtggctcacacatataatcccaccgctgaggaaggtcaagttgggaggatcgcttgaactccaggcgttcaagacttgcctgggcaacatggtgagaccctgtctctccaaa

SEQ ID NO: 138936 - DNA, 122 bp, Homo sapiens
tggttctccggacctggtcccacgtggttcccaggtaagcccccgcccaggatgcagccccgttgtccatcagttttcttggagagggcatgggaaaccttcgtcagtgtgtcatctcctgc

SEQ ID NO: 138937 - DNA, 122 bp, Homo sapiens
aacgtgatagcagcactcgctcgctctgggcgcctcctccgcttcggcgtcctctctggccgcgctcgaggagcccttcagccctctgctgcactatgaaggcccctctctggggctggcag

SEQ ID NO: 138938 - DNA, 122 bp, Homo sapiens
aaagtgcatagcacaatgcctgtcacatatcaacacttccacaaatgatttggggacttgcggggagagattgagaggaatggtttccattctaattatgttccagacctgcttattaaagc

SEQ ID NO: 138939 - DNA, 122 bp, Homo sapiens
agttcagtgacatttggggaagtgaaaagatcacacttactgcagctgagccatagatagcgtgaacttaaaagtgaaacttgtgaatattttaagaaccaaatatcttctggaagcaagct

SEQ ID NO: 138940 - DNA, 122 bp, Homo sapiens
tccaagtttatcacacacaacttgcacctggattcagggatgtgtgagccaagatgccgccgtttctagctttgattcctacttttatttcttcccctcagctatttgtagttttctaacca

SEQ ID NO: 138941 - DNA, 122 bp, Homo sapiens
ggaggaggggaaggaaagggtgcccgttcatccgcacagagtcaatctagtgaatcttcccgtgttgatcccagcacccaggctgtgcgacatctgagggtgcggagtgggagctaaaggag

SEQ ID NO: 138942 - DNA, 122 bp, Homo sapiens
acgatcttacggctaagtagtggcacagtttttaccttctcaaacaaaattttttttgatcgctttccaggggactgtggccaactcagtgaaccaatcagtacatttcagatggcacagcc

SEQ ID NO: 138943 - DNA, 122 bp, Homo sapiens
agcctcacaggaggaatttcttaatcagagcagtgaaaagccaggtggcatcacttttcccggattttttttttttttttttgagatggagtctcactctatcatccaggctggagtgcagt

SEQ ID NO: 138944 - DNA, 122 bp, Homo sapiens
tcggcctcccaaagtgctgggattccaggcctgagcccggcgcccggtcagcgaaggcaacgtctaaaaaaacttctcacctcctgtcaccatttcagtgacaaattcccgagttttcagag

SEQ ID NO: 138945 - DNA, 122 bp, Homo sapiens
cggaccctgtcctgggcaggcagaattccgcggacaggctgttgtttcgcctaagcagcacgggctgcggagacagaaacctacctgagtagtacggtgtattatatgagaacatccactta

SEQ ID NO: 138946 - DNA, 122 bp, Homo sapiens
aggaagtagtctttcccagcagctggtacgggggcagccaggtagtggtttgggagacaccgcacagaccacgacgccctgctggagtcccactgggaagggttagggaggcaggactggta

SEQ ID NO: 138947 - DNA, 122 bp, Homo sapiens
cagagggcatggcctgcacaaaggtctgggggccggacagcctgcacgtgttctgggaagcgggaaggagacacaggccttgtgtttctgaggcccaactttagactgtgccctgctgggga

SEQ ID NO: 138948 - DNA, 122 bp, Homo sapiens
actggctagtggaggatctggggctacaactcagtacgcccctgcgcctggctctgtgagcgggccccagcaccacaggccgagtttatactcagatcagtaagcaaagaggagccacggga

SEQ ID NO: 138949 - DNA, 122 bp, Homo sapiens
ggccgccgccgctacctggtgcccgcaggtgcctgcaggagtcctggggccagctggcctcgatgtacgtcagcacgcgggaacggtacaagtggctgcgcttcagcgaggactgtctgtac

SEQ ID NO: 138950 - DNA, 122 bp, Homo sapiens
aggagctgagtcggggctggcgtgctggcgggacggtcagagctgcagccactgaggtcacgactacggaaaagcatcttctcttgagccgtgggggaaggtggggcgctggggcgcagggg

SEQ ID NO: 138951 - DNA, 122 bp, Homo sapiens
cctgccccatggcctttttctttcatgctggggctccctcccccaggcccgggctacccgcgtgttcacaccaatagctctgccccagtgactgtttactctaacccccgcccaggagttct

SEQ ID NO: 138952 - DNA, 122 bp, Homo sapiens
gcacgccggcttcgcttctgaagctgcagacggaggccgtggtgagccttagaaagatcccgggacaaaggcgaaaccccagattaatccccataagattcctaggagccattcccccttcc

SEQ ID NO: 138953 - DNA, 122 bp, Homo sapiens
gggggcggggcgccacggaggctcaggtgtgggcggcggggccggggcagcacgggttcccggaccgctgcctcccggcgttggcaactcctccacgtgctatccaggaagtaaacaacatc

SEQ ID NO: 138954 - DNA, 122 bp, Homo sapiens
agactccaaccacacacatcagttaagctgccaacactgtttcctccccattctgctctgcgaacaacgcacagtccagccaggagctcaacagggagggttttcttgttgtgtcatggctg

SEQ ID NO: 138955 - DNA, 122 bp, Homo sapiens
cacacgcttcagtgcgttgagttaggagccctcacccatcccctttattagaaggctgagcggcgctctggtggtgttctaacaaggatcaggcagcaggattaagcactgtgacaaagagg

SEQ ID NO: 138956 - DNA, 122 bp, Homo sapiens
ccacggaacacttcctaactgcctgtccttgtggctgcattcacagaaacaaacataagtcggttctttgttcacagaaaggaaaacaaatatttcctttgagctgacccaggaggaggaga

SEQ ID NO: 138957 - DNA, 122 bp, Homo sapiens
gtgccaaccccggagctggtgcccgtccttaccttagcagattagacaggggcaggggtccggatccaccgcccaggatccctcctttcctgccagacaggagtttctccaccagagccaca

SEQ ID NO: 138958 - DNA, 122 bp, Homo sapiens
aaaatgttctaaaatttacttatggtgatagttgcacaacttcgtgaatatgctaaaacccgttaaattggacactagctggctgaacttgatgggatgtaaattacatctcaataaagctg

SEQ ID NO: 138959 - DNA, 122 bp, Homo sapiens
ggacttggaggaggctctcgagctcctttgagcctcgagtctggtagattagtacgtagacgccacttaattgtgaacccctcggctctccggggccattaggcactgatttatttttctgt

SEQ ID NO: 138960 - DNA, 122 bp, Homo sapiens
cccacaggagcctcttcagctttcctccagctgtggcacaggacatgtgttcggttcactcgatcacattattaagtaacataggtattatttaaaaggagaagagtgagggcggagtccta

SEQ ID NO: 138961 - DNA, 122 bp, Homo sapiens
gcagacagctgacatgttgggagtcctctgataacagaactggatggcctaggggttgggcggggatcgcccacaggcgatagggaattcggacgccttgtcccctgtaaagcacccaacgc

SEQ ID NO: 138962 - DNA, 122 bp, Homo sapiens
ccctcccccagccttcccggacacagttaacccggggcgccgcgtccccgccccgccgcccgcacagcggcccgcacctgcaccatgatggccatccggagcgagtccttggggatgctctc

SEQ ID NO: 138963 - DNA, 122 bp, Homo sapiens
caacgctgcccgggagaatgaggcaggagccggcggcagcctcctttttttccttctcctcgccttcctgcggctccggcgctccgggtccgggccgggctgcggctctgctgcgtgccccg

SEQ ID NO: 138964 - DNA, 122 bp, Homo sapiens
cagtccgcccaatccccggccgcccgccatcctgggcgcccccggcccggggcccggtcccgcccgtaaatcagctccgtcagcgttaatggctcctgactaattgcctggacttgggctcc

SEQ ID NO: 138965 - DNA, 122 bp, Homo sapiens
cgccctttgaaggcccagcggcggcgctgggtcagccaggccagcttgtgggggagcggccgcccgcgcacggctggggccggggccagggccggagggcgccgcaggaaggggccggggcc

SEQ ID NO: 138966 - DNA, 122 bp, Homo sapiens
ggccaccccgctcgggcttaggggagggggctccgggtgaccgccctcggcccggctctgcgcaggagaggaggggcctcctagaggctctggtctgccacaattgatccgcccctaactgc

SEQ ID NO: 138967 - DNA, 122 bp, Homo sapiens
gctgcactgggcagcagagggacaggcgtgctgtcaacaggatggggacagcctcagacacgcatgggacattccaggagcagttacctaggtgcaaactccctatgcccatcctccccgct

SEQ ID NO: 138968 - DNA, 122 bp, Homo sapiens
cgcccagaagggctggtccgaagggaagagagtggggcggggacggtgctgtggaagggacgggagagataaaagaggctttcttgtcacgtacaacctcgggtcggctgtttactcagcca

SEQ ID NO: 138969 - DNA, 122 bp, Homo sapiens
accgcgcctccgactcttctcccccgcgccgcggcgcccaccgcgtctcaggtttaatcccgggttggacctgctggtttgctctccccgctctgagcctcacagccagcccagagaagtgg

SEQ ID NO: 138970 - DNA, 122 bp, Homo sapiens
agggtgggccggtgggtggaggctgccgagttgcgagccccggtctagtgtggggagcctcgccaggcccgcatcgaattaccccggggcccagccgagggggttgcaggacgccgcttctc

SEQ ID NO: 138971 - DNA, 122 bp, Homo sapiens
agcaggagcccccacatggcggggattgagtgccaggggcgcgcgggctacggcgggtggcgggtcggtctcttcctgccgagtgcgccgagccccccgccccttcctgccccccgcccctc

SEQ ID NO: 138972 - DNA, 122 bp, Homo sapiens
actggggggctggggaggaagtgagaaggatgcgaaagccgaggcgggaggagggggtgccgcctgaggcccttgcggccagcagtggaaacgcaaacttgacatttccattttccatcacc

SEQ ID NO: 138973 - DNA, 122 bp, Homo sapiens
gccgggggtcggggtgcgccctgggcagctgggtggcctcaagccctactggcgagactccgccctgtgtcccggctggggagtgggactgaggatggtggtgtctcgggttttggtggtgg

SEQ ID NO: 138974 - DNA, 122 bp, Homo sapiens
cttccccatagatataaaactagaacacctttatgatttggggtctatgtaatgactgaccgataagaacccaggcagatgctaacatacttaacagctcgcattaaaatactttaaatcag

SEQ ID NO: 138975 - DNA, 122 bp, Homo sapiens
gcccaagacgcgggtagagcaccgcgtctcagcgcctgagtctcagcccccgaactccaccgcacctgcaggtccccttggcagcactcaagcgcggggatgctccgcttagacgaactcac

SEQ ID NO: 138976 - DNA, 122 bp, Homo sapiens
tgggtgaaactggagcctgctgttccagtgggagggatttaagtgtaggagttgagccctcggggcgtagagatgcacctgatattcctcctgcccgcagctacgattcatgtgtttgcacc

SEQ ID NO: 138977 - DNA, 122 bp, Homo sapiens
cttctcaaaaaaaaaaaaaggggggggcatagtgtagagaggtggtgtgggaaccggagccggcccagaatggtggtggggcacgtcactcactcctgtggcttctgccgccgagtgtggta

SEQ ID NO: 138978 - DNA, 122 bp, Homo sapiens
cgggggccgcccgccttgcaggccgggggcggggtgggtggcggccgcagggtggcagctcggccgggcggcggcggcgcgggcgtcccgagctgcggagggcgggaggacgccggtctttc

SEQ ID NO: 138979 - DNA, 122 bp, Homo sapiens
aaatcttgtaaaaacgtttcttccttttcttctttttagagaatccctggatttgtaagccgggaacgcaaccccaggcgacatggagaccagcaagcagtaacctggcaaccgagcgtgga

SEQ ID NO: 138980 - DNA, 122 bp, Homo sapiens
cacccccaaatgccacacaccgcccctctaccgcatgggaatctttgcgcctaatcatgtcgtcgccgagtcccgcttctggtacttcgtatctcagttaaagaagatgaagaagttttcag

SEQ ID NO: 138981 - DNA, 122 bp, Homo sapiens
gggacgcctagagctaattcctctgattaaaaatgcattagtttggaggtgtcagggacacgcagctgttttcaaggaaagcctggctccaagaggtcctccccggccgggccgcctggcgg

SEQ ID NO: 138982 - DNA, 122 bp, Homo sapiens
ctccccagctgtcatgtccgttgacatttcactgttcctggcagtggctgtgcccagacgcgccgtggcacgtgggagtgatgctggtctttgccagtgctctgcacacctgtggggaggcc

SEQ ID NO: 138983 - DNA, 122 bp, Homo sapiens
tattcagttataaatgtgttctaaggttaggctgagcactctctacaggcctggtcagcgcggacaaggccatccccggctgccacagagcgctgtcacccacttggaaaccccactcacca

SEQ ID NO: 138984 - DNA, 122 bp, Homo sapiens
gcccggactcctctaaccaccttggggtcacagggaccgaggcacgggcccacagggttccggaccaaagcgctttgccgacctccttccaggaggaatcctcccagccgccgcccaggcac

SEQ ID NO: 138985 - DNA, 122 bp, Homo sapiens
ttaattcttcccacctcccaccccagggccctatatgggaatgaaggaagaatcccattccggctccaacaagactcatgtttttcagactggtaaacctggagtgagggaatggcttgcac

SEQ ID NO: 138986 - DNA, 122 bp, Homo sapiens
acttccacctttggagtatgggagtgccggaattgctcggctgagggtcactttgtctgccgcacagtggtggcagctgcgcccgtttttattgaacttgctcaacaaatatttattgaggg

SEQ ID NO: 138987 - DNA, 122 bp, Homo sapiens
tggcaaggggtaaagactcaaatgtttctataactagggaaatgatctgctgggttctgacggaaggataggatgcacgactacttccatcctttaaggggttcatcccctgaaagtctctt

SEQ ID NO: 138988 - DNA, 122 bp, Homo sapiens
ggacaacttccacgagcagggcacctcactacacacttcacacagtcctcccaatcaccacgggagggtggaaccatcacgctccttttacagacaagacatgggggcctggagaaatgaca

SEQ ID NO: 138989 - DNA, 122 bp, Homo sapiens
ggccggccgcgcagacgcaaagcctcggggatggaggatcagatttcaagatggcgccagcggcttcgcgtctgcggcctccacaaggctcttctgggagctgtagtccggtcagcgggctt

SEQ ID NO: 138990 - DNA, 122 bp, Homo sapiens
tcgcacgtgggagggtgaccgtgggtgaagctccccagtctccttctttaaaatggagggcgatcataacagggtggttgtgaaaagcaccgagatgacggctgacgataagacgggcacag

SEQ ID NO: 138991 - DNA, 122 bp, Homo sapiens
gatcccactcctgtgggacctgagggtgggagatggggtgccaggcagccagtggtagaacgtttaagactcaggcattcaatggagaccaagccttggcctattagggccaccggaccctg

SEQ ID NO: 138992 - DNA, 122 bp, Homo sapiens
gggctctgcgctcccactcggccctaattcatgaccctatgtcaggagcctgggagcacacggtccatactcgggatgcacataggttaatgttcctgccagacctcagcatgtcaaaagac

SEQ ID NO: 138993 - DNA, 122 bp, Homo sapiens
aggtgtgaagatgaggccaaggatggggctcaggaaccaggtgaggctgtagtactgctccggaaggcctgcaagggacacgagggccgtcgcacacgcaggcactggccgggctctgccac

SEQ ID NO: 138994 - DNA, 122 bp, Homo sapiens
ggtgctcatgaatggccacaacgcccaccagtggccacttcctggaagccaagttaactgcgaggattttctctgctcactctgagcctcttgagtcttggccctgggagctcagccttaag

SEQ ID NO: 138995 - DNA, 122 bp, Homo sapiens
ttctttcttttttctgagctcaggtcaagtgtagaaaacttcatagttacaaaggtcagtcgtaaaacctttacatcattgcccagaaatgattaggctttcatagacatacatatgcaccc

SEQ ID NO: 138996 - DNA, 122 bp, Homo sapiens
acagcccccttggaagcctgccagcccagcctcttcagcatccagatgggaacccggaggcgcatctcacagcggaccgttgattaacccaaggtcacctggctctggtttctgacggagcg

SEQ ID NO: 138997 - DNA, 122 bp, Homo sapiens
tgtggaatggagacgcggaccctggatagtggttctatgactctgcgagggacaggcccacgcgtgtggggagaacatctcccttccggggctgccctcaagagcttctgaaaaactaatga

SEQ ID NO: 138998 - DNA, 122 bp, Homo sapiens
caggtcccactaatgcttggtttcccagtctgtaaaatggagatactacccacctcataccggttttttgtttttgtaaggtctcaaatatttcaaaaggagacaatgtatttataaatgtt

SEQ ID NO: 138999 - DNA, 122 bp, Homo sapiens
gcccggaggccggggggcgggagggggcggccggggaagggggcgccggaagcctctgggcgtctgcgtgttgccgcgtgttacacgcacgcacgccccttacacaccttttcacagacccc

SEQ ID NO: 139000 - DNA, 122 bp, Homo sapiens
taaaaaaaaaaaaaaaaaaaaaaacactgcaggccccaccacatcctgctttactcctgacgtccctagaatgtggggacccagtggtagtcggctgagcataggattggaagtcagagggc

SEQ ID NO: 139001 - DNA, 122 bp, Homo sapiens
gtggaggtcacagggatgaagtcagcaggactgcagggcaccgaggcactggtgagccatcgagggcaggtgaactaggttctgctgctcagcataagctggggaaaggggcttggagcttc

SEQ ID NO: 139002 - DNA, 122 bp, Homo sapiens
gaagaggggcagcggagacgccatctgcgcagcctggattctccagggtatggtcagcaacggagtgcccaagcccctgctcattccatggtgtgtggtccatgggatggacagagcgcagt

SEQ ID NO: 139003 - DNA, 122 bp, Homo sapiens
gtgccccacggcgtgctgctgcatggccgctgttggcggtgccgcctggccctgcctgtacgccgccagcggagccccgaggccgccgccctccatgcccactttcttgtagctttcctcca

SEQ ID NO: 139004 - DNA, 122 bp, Homo sapiens
attccttttggattgacatggtatcaaaatatgtaaactgacttcagtcccagatgttgtcgaaacttcattcccaagatctgaatagagcagtcagagcggattgtgattgaaagaccacc

SEQ ID NO: 139005 - DNA, 122 bp, Homo sapiens
aggccgggtggggaggcgcccagtgccttaaaacagggtccccaccccctcccggaggggcgggagaagaaaaaccagtgaagaaattcacaccgtgttacccaccgtgggagcgggggggg

SEQ ID NO: 139006 - DNA, 122 bp, Homo sapiens
ggctccaataacgaaggaagccacaaaaaacccaagagctgcaggcgagttcaatgagaccggtttccgcccgccaccctgcctcttataccctatcttagaaccttccagaaggggcccgc

SEQ ID NO: 139007 - DNA, 122 bp, Homo sapiens
ttccttcctccctccctctctcttccgtcttacacatgtggctgcacatgtgacggggagcgcgggagccatccccacagggcaggggagacaggaaggtgataggcgaggccggactgtga

SEQ ID NO: 139008 - DNA, 122 bp, Homo sapiens
gaaggaaaagccttgcactagagctctctattagtccgaggctgcgcacccggcttagagcgcgctgagtgtccgttggggcccctgctcttgggggcgcctggggctctgcgcgcccgcag

SEQ ID NO: 139009 - DNA, 122 bp, Homo sapiens
aggtgttttcctccatagtggcctggatttcggtctgggcctggtcaaacatggcaggatcgatcagctgcttcatgatgcagccctttatgaagctcttggtggctggcttggtctgccgg

SEQ ID NO: 139010 - DNA, 122 bp, Homo sapiens
ggtctccgccccgcgggaaccaggattgcgatccgttcctcggcggctagaggttgaggccggaggctgacaccaccagggacccaacggagggtttattctgcccagcttcacatctgggg

SEQ ID NO: 139011 - DNA, 122 bp, Homo sapiens
agcttggaaactgtagccccgtctaacttctcgtgtaggatactgacgtgcctcccttaacgctgcaataaagaaagctgtgcttggaaacgtcaccgctaatgaaggcatcttccaagatc

SEQ ID NO: 139012 - DNA, 122 bp, Homo sapiens
gtgaagcctcgctgcagagatgcatctgctcccagccctggcaggggtcctggccacactcgtcctcgcccagccctgtgagggcactgacccaggtaatagtcccctagacaggcaaggag

SEQ ID NO: 139013 - DNA, 122 bp, Homo sapiens
gcagagacctcccaggagggtggtgcgtggcccctccctacagcccatgggacgaccgcacgggaagccgctggagagccgccactgagcaacgtgttttccgtgaaataaaactaaaaggc

SEQ ID NO: 139014 - DNA, 122 bp, Homo sapiens
ggcaagagatcataacatctggctgcttctgggcaccaattaagtacattaagtggggagcgacagcagctaaacaacccaagcccataaagccttctaattgctccgacccacgtggtcac

SEQ ID NO: 139015 - DNA, 122 bp, Homo sapiens
tctataaaattcaaaaaaaccatgcaaaactagcctatggtatttggatgtatgcttccacggcaaaaccataggagaagtatggaagtgaatgccataaaattctgggcagtggttacctt

SEQ ID NO: 139016 - DNA, 122 bp, Homo sapiens
tgattttgtgagtgcctcagggaagggctgcggaaactcggaaagcaggcgggcagcatgcgaggaaaatgacactgagttgataaagagctcagacggctccacacattgccagtttcatc

SEQ ID NO: 139017 - DNA, 122 bp, Homo sapiens
gagagaggcagcgatggaggcgggggaagggagtgatgcccgcctgccacgccttcaccgcggtccccagaatcaggtctgaggcgcgaggacagcagcccccggactcacgcggtgaccct

SEQ ID NO: 139018 - DNA, 122 bp, Homo sapiens
aagaaagaggagggacagctggggccctaggagctccccctgagggtctgtccctgggaacggggcgctaggacgggcactccttctggctggaatgctacgccggtgagggaaaggagtcc

SEQ ID NO: 139019 - DNA, 122 bp, Homo sapiens
tccctgagactggcagttgctcaagataggaagctcccgggaccagacccgagcgccagccggctacgccgtccgctggcctgagcaaataaacgcgtgtcttcaaaaaactacaatcccca

SEQ ID NO: 139020 - DNA, 122 bp, Homo sapiens
ctgccccagaaaagaagaatcacacctttggcagaggcctgaaggcaggatgagtaataccgtatttataggaaccccaaaagaaacaccccaaacccttcggctgtcgcctgtctcattct

SEQ ID NO: 139021 - DNA, 122 bp, Homo sapiens
ttgttctcttcgcagttgtcggccctgggccgggagctggagtcccagactcataggtcccggcccagcccccgaagagccgcctcagccggggggagttgctcggactcaaacgtccagtc

SEQ ID NO: 139022 - DNA, 122 bp, Homo sapiens
gatccccactaccttaccctactcccactttgatcagctccaagtcatgggctggaggcgcggggggctcagggcaccaactcctcaggtatcttgggatgtcccagcctgctctggggaga

SEQ ID NO: 139023 - DNA, 122 bp, Homo sapiens
ggcttcttatgtggttcagagttctgttgtcacatactatctggccattcatgtatattgcgtttctgagaccatactctgggaaacacatggtcctctggtggtggtgaaggtccctgtga

SEQ ID NO: 139024 - DNA, 122 bp, Homo sapiens
ttgcgcaagagccgtcgcctgcccttcgaccggaaatcagccgcccctcccaccttcgaccggaaatcacttcctgggacttttcactgtgggctgcctcttccagcgtttttttggtggcg

SEQ ID NO: 139025 - DNA, 122 bp, Homo sapiens
gccgtggacgcggggggcggggcgagcgcggtcaggccccgccccggtcaggcccggccccgcccccagtcagaccccgcccccgcagcggcgtccgcccagcagttgctcagtcgtcggcg

SEQ ID NO: 139026 - DNA, 122 bp, Homo sapiens
gctacacgcatgctctccccacctcggcaccatcctgctacacgcgtgctctccccgcctcggcaccatcctgctacacgcgtgctccgttttccgtgcctcagtgtcacgtttgtgtttct

SEQ ID NO: 139027 - DNA, 122 bp, Homo sapiens
cggagcgccttccgggtcggtgggctggggcgggctgggggctggggccgggccgacccccgcggtggggcccaccccgcaggacaaagcagcggccccgcccctcggcgcgcgcccgaggc

SEQ ID NO: 139028 - DNA, 122 bp, Homo sapiens
gtgcttttgcaaggagctgctgagaagtgaggcagctttccagaggtaatggggcaactccgcagctcctgggctgttatgcagaccagagtgtgctcagaggaggcttgttctgggaggag

SEQ ID NO: 139029 - DNA, 122 bp, Homo sapiens
atctaggcaattttttctttacattgaaagcttagcctcttgatcctgttggggctggagcgagtgtggagttaggctcagagaagtggttaatgtacgctttgctcctgatagctgtttct

SEQ ID NO: 139030 - DNA, 122 bp, Homo sapiens
gagcgattggggagctgagcgaccacccaccgctccatggccgtccccttcgaaacacggcgcactggccatgactgactcgcccatcgccctggtttccgtccctctggtttcctggggtt

SEQ ID NO: 139031 - DNA, 122 bp, Homo sapiens
gcgttcccgcccgggcggtgtatggtggctccggtgtatggtggttctcgcacgcacagccgcaggggtttcctctcctagactcgaggcggtggcgcacctgcaccctctaaaactccccc

SEQ ID NO: 139032 - DNA, 122 bp, Homo sapiens
cagccttctcaccccctagggcctggaagggatccaaggggaaggaaaggagaggagacccgtgggtcagggccagactttaacctggctccagggccttggacctgctcccagggccctgc

SEQ ID NO: 139033 - DNA, 122 bp, Homo sapiens
ttactcagcaaatatgtcggcgagcacccacccaaatgcaatcatttgaccccctgcggacgatagctgccgtgccccttcccaccgctggtcctgcttggccagggtcgctgggggccaga

SEQ ID NO: 139034 - DNA, 122 bp, Homo sapiens
aaacggagaacggacagtcagtgtgttctttgtagggctctgcctactgaaaacggagaacggatttgttttcgggattatcacacccccaccctaaccagccaagctgacaaatggcgctg

SEQ ID NO: 139035 - DNA, 122 bp, Homo sapiens
accagccccagcctggaagggccaggtcctcccatgcctactttccccacagatctctctcgggctcaccccgtgcctgtgggatatgtatttgctggaaggggaacagatgttgatgctga

SEQ ID NO: 139036 - DNA, 122 bp, Homo sapiens
caccctcaccatgtgaccagctgccaaagaggcgcgcggaaactgggagggcggggcgaacgccggacgttctgggcacgtgaccgccacccatgcgctgaggggcggacaggaggtgcttc

SEQ ID NO: 139037 - DNA, 122 bp, Homo sapiens
tgtagtagatgttattttctacaggaagaaatcagcattcagaggggtctggtaatgacccgagatcatacagctagtaagttgcagcccctggattcaaacacaagcttgttggactccac

SEQ ID NO: 139038 - DNA, 122 bp, Homo sapiens
aaacctgcaccaagactctcaacttggagctgggctggtggtccctgagttctgtcctgccggacagtagagtccccctaggtagggaacgtggccccacacggcggccgggtgaccgacca

SEQ ID NO: 139039 - DNA, 122 bp, Homo sapiens
atttttcatccgtgacacatgcttacaaatcccttaatggcttttctattcttgttttgtcgttttttatcccagactaatttcttcttccccaggctggcacttatttggcattgtgctgc

SEQ ID NO: 139040 - DNA, 122 bp, Homo sapiens
caccttctgtccttggagaaactccctcctcctcgctgcctgccgggcttcggagtgactcggcagagacagaggcacaggggctgccctgctgctcaccggtccacccatctgcctggtct

SEQ ID NO: 139041 - DNA, 122 bp, Homo sapiens
ctcctctcccgcaggtctgaagttggccccccagcgcagagtagctgcttcctggacgtgcgcgcccaggccagtgctgtgagcaggcggggaggaggctgccggagggagccctgagcctg

SEQ ID NO: 139042 - DNA, 122 bp, Homo sapiens
cagcctcgctccccgcctcggactctctggccccgactggtgcgcggggctctggggctgcggctcctacggcccgcctcgctggggctccaggttgccgcctccccaggtctgcgatcgtc

SEQ ID NO: 139043 - DNA, 122 bp, Homo sapiens
agaataaagtggcagaaggacccggcgaaggtcccagcgtgtctcgaggggcatacagggcggccagctggagccgggtcaacaaaaaagcaggtgatttttgtctaccaatgaatgccggc

SEQ ID NO: 139044 - DNA, 122 bp, Homo sapiens
cagtacctgtctgcaaaacacagggcgcttgccagacaagcccagcgctccttgaaacaccgccccatgctgttacccctttcgtttggaaagcagccccgtggggtcgatcggttttccac

SEQ ID NO: 139045 - DNA, 122 bp, Homo sapiens
tcctatctggacagaagtgtcacccgagggagaaaaaggcagtgtcgaagcaaacctcgccgatgacagaccctgtaattagaaactgtagtgtccccgagactggtctttaaaactgtcag

SEQ ID NO: 139046 - DNA, 122 bp, Homo sapiens
gacggggcgccggcgccgccgcccccgggctcgcggcctgcaggtgggtgccgggccaggcgggaccgtggagcgaccccgcttctcgctcgcaggatctctcgctccctccctgttccctt

SEQ ID NO: 139047 - DNA, 122 bp, Homo sapiens
aggccgccccggcagtgctggcaacactcgggagcgctgcgcagaggaagaaagctgcctcgccacaccccagagggtcaagtcaggccaccactagctgccagtgatctggaatggatctg

SEQ ID NO: 139048 - DNA, 122 bp, Homo sapiens
ctcgtccatttggaacaggagtcacaggtctgctcagagatggtgactctcccaccagcacgtggttgagttgtacacaaactcgcatttgtctggcgctgaagcctccgctcttaacaatg

SEQ ID NO: 139049 - DNA, 122 bp, Homo sapiens
tagtccacgcccgcagccatgccgaccaagggcccgctgcagtcggtgcaggtcttcggacgcaagaagacagccacagctgtggcgcactgcaaacgcggcaatggtctcatcaaggtgaa

SEQ ID NO: 139050 - DNA, 122 bp, Homo sapiens
tctcaccgccgccccctcaacaggccccagtgtgtgttgttccgctaaacaatgggaacacgaagcttatcataaggaaggaaggttagtggggaaggcattcagcagagggaagaacatgg

SEQ ID NO: 139051 - DNA, 122 bp, Homo sapiens
tgtgaggctggcccagcaccagctgcgtgaaaatcaaagctgccgtggcacttcaacaaccggaagttaccaccatgtgatcagctggtttccaggcaccagcggttccaaagatggacaga

SEQ ID NO: 139052 - DNA, 122 bp, Homo sapiens
tgttaccctgtaagcctttggatttacaattaaagaatatataatgcttttttttggcttcgaagtttccagctgcatcttttttgatgaagtaaaaagcatagtgtacgtgccctatctcc

SEQ ID NO: 139053 - DNA, 122 bp, Homo sapiens
gcgcatgcgcccgctcagcggcctgcttctatttatgtgggggatccaacatggcggccgcggcgaccctggcgatggcggtgaagcccatcagaacgtagtagcggggaaggggacacggt

SEQ ID NO: 139054 - DNA, 122 bp, Homo sapiens
cattcgcgctttcccctgtatttttgtcgttttaaaaataggttttgtttgctgcagaaacgcatactgggcgtcagcgtaagctgagaatcaggtctttgttcccatctgtaacttcactg

SEQ ID NO: 139055 - DNA, 122 bp, Homo sapiens
tcctgtcagggaagaggagcgccccggctgtccccctagagtctcctgctggggggacatcgcttccatgaagaaaatcttcaaacaaatcccagcccaggaggaggctacacgatcatgtc

SEQ ID NO: 139056 - DNA, 122 bp, Homo sapiens
gacactacgaatgccataggtcttgtcgtacagatgtcaggcaagaacgtgctcaaagcacggtaaaaaggaaaaacttgcctttagaggatttcagggatgtagatgtttccgtataaagg

SEQ ID NO: 139057 - DNA, 122 bp, Homo sapiens
ccagcccattctaccccaagaactgctgtgtcccaggctttactgtgtccatgtggctaacgtcctgccctctcgctttgcccttttacccttgtcttagttctccatctcctttctatcag

SEQ ID NO: 139058 - DNA, 122 bp, Homo sapiens
cccttgcccgcagtcggggctggcccagtcttttcgattgtgtccagaacaatacagtaacgcctctggttgggtgagttcagaggctgcccgcttcctgacaggacacaactggtcagcct

SEQ ID NO: 139059 - DNA, 122 bp, Homo sapiens
gccatcgacgagcccgcgaaacctcggccgtcctgggcttgtccctgcatgtttgtaaagcgggactggcaccaacctcagaaaggatgggagatgtgtgcaaaaaagcgccttgtaaaacg

SEQ ID NO: 139060 - DNA, 122 bp, Homo sapiens
tatggacttagagctaaaggtttgcaagtcacttttacttttctggtctcccaatccttgcggcgtttgtgaggtgggtgtggctctatgccccctttaactgtgagctaaataaagataaa

SEQ ID NO: 139061 - DNA, 122 bp, Homo sapiens
atactggttgaattaacgaataattgggtgagtgaatgaacgaacgcacgcatgcaaacccgaaagtccctggaggaaatggtcaccttcggaggtttagtctggcccagaagccctaagac

SEQ ID NO: 139062 - DNA, 122 bp, Homo sapiens
cgtgccctgcggccgcgcgcccggagaccccggcccagcgccgccggagaccgtgaggcccgcacttcaaagaccccgacccccgggagcccaactgttgacccaaggctcaaagttcccag

SEQ ID NO: 139063 - DNA, 122 bp, Homo sapiens
ccgcacaccagacacagcggcctctggacaggaagcaccaatcttcagtcaaagaatgaccgaccgacatgcaaactctggttgttcggacatgagtactggcagatcatttctaaaaaatg

SEQ ID NO: 139064 - DNA, 122 bp, Homo sapiens
ccagagccccaggggacggaaaatctagccccgggcacttgccttggagtctgagtgatgcgcgtcgttggagcgcgaagccggtctccctagcctccgcccgacacagcgtctccaggggt

SEQ ID NO: 139065 - DNA, 122 bp, Homo sapiens
gaggcccccggacgcctcagtcccccggcggcgccggaggagcggccggccgcggacacgcgctccattgtgtcgggctactccaccctgtccaccatggaccgcagcgtgtgctcgggcgc

SEQ ID NO: 139066 - DNA, 122 bp, Homo sapiens
ttccttctcctcggagccctcagaccctctgaaatcctctggtctgtgttttgtttcctccgtctctatctctctccccactagaaggcaggtctcaggagggcaaggacccggcctgtcca

SEQ ID NO: 139067 - DNA, 122 bp, Homo sapiens
ccaggtaaacagcattaaaagaaaagccggctttatctttcgagtacagcctactatacacgacactgtactttaactgtttagggtgatggaaggaaatggtttccatacccagtgccttc

SEQ ID NO: 139068 - DNA, 122 bp, Homo sapiens
gccaccgcgcccggccaaccctgggtagaatttttgacaccgagagctctgacccagtcacggcagcaaggtgcccggcaggtgggctcgggcagttgtgcatggaaattttggggtgctcc

SEQ ID NO: 139069 - DNA, 122 bp, Homo sapiens
gcttctgaaccgtgcacagttgtaggcctgtctcaagtgttccgtcgttgacttgtgtcccgcctcgccgggcaatgatgtatgtgtggagcgcagtcatgttctttgttacgcaacacagt

SEQ ID NO: 139070 - DNA, 122 bp, Homo sapiens
aggaggtgccgctgaggaaaagcaagtttctgatgtgactcctgacttctcacaatggggcgtggcaccagcaatcagaagggtaaaggctgtgggtcgaatcagaaggtgcatcatacgta

SEQ ID NO: 139071 - DNA, 122 bp, Homo sapiens
gagagccagcggcggacctcgctgggaactgggtgggtcgtggggagcccacgttcccctcgcctcacaccctgctgtggtggactgagcccggggaaggaaatccagaaaccacttggctt

SEQ ID NO: 139072 - DNA, 122 bp, Homo sapiens
ccaacgtgtttcctctttctccagcctagggcggtgccagcccagggagcctgcgcttagcggccccaggcccgcccctgacactgaacgccgcttgtcccctccggcttgccgtcctcgca

SEQ ID NO: 139073 - DNA, 122 bp, Homo sapiens
catctttctctatgatatcttcccactcaccctacttttttccttctcaggaaacactgacgggaacacacgtgccggtgctaccctccagtgactggactagatccttgcgcaacttcaac

SEQ ID NO: 139074 - DNA, 122 bp, Homo sapiens
atggacgctgctcgaaatgaaaagcaattcaattcaatcccagggtcgtaagagacttcccggagcctcactaagtgggtctggagcagtgatcagcgttgcaaatctattagctgtgctcg

SEQ ID NO: 139075 - DNA, 122 bp, Homo sapiens
gcttgaaccaggtgagttgtacctcaaagacggaaccattaggccacactcccccgacgccggccccagggcccatcagaaaacaggtgagcctccccaggcctcccagacccctatttcac

SEQ ID NO: 139076 - DNA, 122 bp, Homo sapiens
acagagcggccgagttcggagagagtgccccctggcggtgatcctccaggcggactgtggcgcgggccgggcggcgcccccagccccgcagcctggctttcttcctgctcgggtgtcccacc

SEQ ID NO: 139077 - DNA, 122 bp, Homo sapiens
tttttgtctcctttttagcagctttcggtaagtagcacattttatttttaaaaaaagaatcggagccgttattgagcagcctcgccctaaggaaggtcaagagattagggaacggaagtagg

SEQ ID NO: 139078 - DNA, 122 bp, Homo sapiens
ggaagtggcactcaggccacagggaaccactgggccacggaaggagggtcccagggtgcccgtggcacccagcgaggggaggatccgcaatttgggtgccgggggaggcaactggtgcctgc

SEQ ID NO: 139079 - DNA, 122 bp, Homo sapiens
tggctgaatctgactaccagtacaggcagggcaccgaaaaatgccgctgtgggccaggtgcggtggctcatgcctgtcttcctagcactttgggaggccaaggtgggaggattgcttgaact

SEQ ID NO: 139080 - DNA, 122 bp, Homo sapiens
ggagctaggggttccgaatggagggtggcagttcttcggagagaagttctctgacagaaacgttccctgatggggatgtagggtttcctgctacgaatatggggctgcctgacaggctcccc

SEQ ID NO: 139081 - DNA, 122 bp, Homo sapiens
gggcggtgaccagcagctaaaaccctggacaaaccgtccactgcttttgtgacactgtctcgactcccccagaacgtacacagcttaaataggtcggtgaaccacctgcaacgaggacgttc

SEQ ID NO: 139082 - DNA, 122 bp, Homo sapiens
aataaagagagttgaattcaccttgcccttggggaagaaggaagatgaagacatttcccccgggctgggcagaggcccaaattagcccatgaggccaaaggcaataaataatccccggacct

SEQ ID NO: 139083 - DNA, 122 bp, Homo sapiens
ttgtgatgtcatgtcagcctctgagagacagagctgtttgggaaaccaagtcaggaaaaacgagccattgtatccatttcataaatgaagacagagtggtcattgtttgatcttgctgagaa

SEQ ID NO: 139084 - DNA, 122 bp, Homo sapiens
tacttactagggaagctagtgcagtacgcacaatacatactgagtggtgagtgggtgggacgcgcagggcagctcgctcaggctctccctcacgaagcgccccacgctctgcaaccaggagc

SEQ ID NO: 139085 - DNA, 122 bp, Homo sapiens
agggaaggaaacctctttgaaattgcatttgtaaacctcatttcctaattcatgcttttacgtattttctctaatcatttactggagcacctgcatgtgcaatgcactctgcacaaattaca

SEQ ID NO: 139086 - DNA, 122 bp, Homo sapiens
ggggctctcgggaacgtgagcgtggatgtggttcaacacccttttgagacctgcagccaccgcctcaccccgtaaggcggttcctccttttccaaggtaaatgacaggaattagctgtttgt

SEQ ID NO: 139087 - DNA, 122 bp, Homo sapiens
tgaggtggaggggccccagaagccaaaggcagaggccccaggtccggccaaagacaacggcgtgctgctgagtggagggctctggtaattcacaagtggattttacaaacagctcacaactt

SEQ ID NO: 139088 - DNA, 122 bp, Homo sapiens
aaaagggaagatcagcaccagcagaagcaatccagagaccaagagaaccattacactgaccgtgattaccggaaagaaagggattctcataggcacagagaggccagtcatagagattccca

SEQ ID NO: 139089 - DNA, 122 bp, Homo sapiens
cgctggctttgctaatcacatcacaagaccttgagccagggccaaaggcgcggagtggcgcgggacgtcccgggcgggggagctgactctgaggacaggaggaaaggccgggagagccgtgc

SEQ ID NO: 139090 - DNA, 122 bp, Homo sapiens
gagttgatgtgtcaatctgcttctgaaatgctgctcgctgaggctttgtttgctgctgatcgtagagaacaccacggcagacatctctgtccctgtcttttagtttcattttaatgattgag

SEQ ID NO: 139091 - DNA, 122 bp, Homo sapiens
agaatcttgcactgctgcaagattggttccaccacttttggaaagcgatatggcattactcggacacattaaacagatttatacccagtagcccagcagcaattcctcccctaagtaacata

SEQ ID NO: 139092 - DNA, 122 bp, Homo sapiens
gaagacagacatttaccactgtgttggttttcaatcgaaatgatgtacataaatttggggcgtgcttgcaccgtccgaatgggcctggggtccggcggcggagagtgacctgggcggggcag

SEQ ID NO: 139093 - DNA, 122 bp, Homo sapiens
ctgtcagtctttctttcagcatggaaggagcacccactgtatgccaggcacactgccaggcgctggagatacagagagaaataaacggtgattctacacgggacagttaagtgattcctgcc

SEQ ID NO: 139094 - DNA, 122 bp, Homo sapiens
agttcaggcttccccaaattgttctcagcagtttcccgccgaggacatttaggtagcaaacgggaaggggactggtgaggcttccttagcagcaagagttggcccgacccccaggcggagcc

SEQ ID NO: 139095 - DNA, 122 bp, Homo sapiens
ctgcctttctgtgcttgcacctgaggctaagcaggcactgctgagtgaatgtgaacgggtcgggctggcatgagtgctgtccagcagggggagagagagaggcaatgggaaggagaggcgga

SEQ ID NO: 139096 - DNA, 122 bp, Homo sapiens
gaggaagtgcgggctcccggcatgcctcgcatccggccccagccctgagccacctcaggccgcccctggccagccctgaggcccgcccctcagcccaccactgtcagctggagcaggccggc

SEQ ID NO: 139097 - DNA, 122 bp, Homo sapiens
cacactgccctcttgtggccaccgtgtctctgagctggaagggccctgagctgccacgcccgggacaggtgactctaggcaggatgccagcacccaccccagggccactgggggcctgtagg

SEQ ID NO: 139098 - DNA, 122 bp, Homo sapiens
aagggggaactaacaggtctttctttcgctcggatcaggactggactccttctgactccacgcggccccagctcctgaaccagcgcagtgagcctcagccgcttctcaaactgggtctcaga

SEQ ID NO: 139099 - DNA, 122 bp, Homo sapiens
attttagtttgtgtatggaacccatgggcttattgagtgaatttgttatgcatctcaggccgcccaggcctttgtgtggcctgcctctgaaggaaggtggagaaagacagcagcaaatcccc

SEQ ID NO: 139100 - DNA, 122 bp, Homo sapiens
gtcacggcggcggtcagagggtaaaggtcttgctcccagcagcctccgcggtggatacgtcgccatcttggatccgcgggacaagaaaattcatgcggtgagtttttggtaaattttcggaa

SEQ ID NO: 139101 - DNA, 122 bp, Homo sapiens
agctcaaattccagagctgacatcgaagtccaccttgtcacctctccactgtaccagtgacgatgcgcattctgggggggactagggaccaccccattgaaacccctctctgaccctaagag

SEQ ID NO: 139102 - DNA, 122 bp, Homo sapiens
ctattaagacatccgtctgcctacacagagaagtccccaacagctggtgatcttatctgacgtttgattataccaactttgacagttgtatttgttatactcatcagggaaaaactgggact

SEQ ID NO: 139103 - DNA, 122 bp, Homo sapiens
ttgtcagcatgcatctgtcaggtttcaatgtagtcttcaactcaatcactgtactgccatcgagtaacatccaggaaataataagaaatgtagacaaataataatagctaacatttaagcgg

SEQ ID NO: 139104 - DNA, 122 bp, Homo sapiens
cctttccaggcccagtttttcccttccggcggcctctccgggcccagaacctcctcaagtcggcctctccagacccacttgcaccctccgggcatcctctccgggcccagctcttcttcctg

SEQ ID NO: 139105 - DNA, 122 bp, Homo sapiens
atcagggctctgatcgaaggcattacctgagaacggcggctgttatctgaagctgcaaaccgctgccactgccaacaattctcaacaaagagtggcgatcatgaaaggctgagccaccgagg

SEQ ID NO: 139106 - DNA, 122 bp, Homo sapiens
gggagggcggggggaagacttaaagacccctgagccagggccattattatttaacttggtcgggtctctgaaccattcggaggaagcttgggtttctatccttcccgactgagccacagacc

SEQ ID NO: 139107 - DNA, 122 bp, Homo sapiens
cctttaaaaatatgtctccccatctggttagtaattacctttgacctgccacccttgatacgtgatcactgcatgcttcaccatgctttctactgtgtagttcacagtaattctgggaaaat

SEQ ID NO: 139108 - DNA, 122 bp, Homo sapiens
catttctccagcccagagcatattagcataagaagagtacaagtaatcaagcattctacacggtgtccaggtgaaaaccatacaatcagcaatagtgtggtcaagtttcagccatgaatatg

SEQ ID NO: 139109 - DNA, 122 bp, Homo sapiens
ctgggtcccaggcgctgccaggaggagccgaggcgagtgggcgtggctctggcgagtgcccgccccttccctggcaccgcaggccgacctggcccctcccacactgctgggccttgcatggt

SEQ ID NO: 139110 - DNA, 122 bp, Homo sapiens
gaaacaacggggaatacaaactaaaagacataaaccagacaagaaactagagaatgggggcgtcgatcccgctacctctcgcatgctaagggagcgctctaccgcttgagctaattccccga

SEQ ID NO: 139111 - DNA, 122 bp, Homo sapiens
ctgacgtcaggctaggaggcgcccccagatctcaccagcccttttacgcaccattagcctcgcaaaatcaatcacagaagacaggggaggtgacaagatctaaagtggcttacttaaaaaaa

SEQ ID NO: 139112 - DNA, 122 bp, Homo sapiens
ggccgaggtcacggccagggtctgagcccgcggtcgcaggtctggttcggggtcagattccgcgcggcctccagggggcgccgtcgcccgcccggctcggcccctcgcgggctcgctggcgt

SEQ ID NO: 139113 - DNA, 122 bp, Homo sapiens
gtgtttgtttcaacaacagggcacatgatgaggtagctgcctcaggctttacctttccatcgtatgcacaatccactatcaacacagaaacaattccactcagggtcctctgatcagcctgc

SEQ ID NO: 139114 - DNA, 122 bp, Homo sapiens
gcgccgggaggagtgggggcactgaggaggcctgaggggccggctcaggggctgggggaccgggaggccgggcggcctgagagggtcgtggggaccgcgaggaccgcggaggcctgagggcc

SEQ ID NO: 139115 - DNA, 122 bp, Homo sapiens
ccagagtaaactgacccaggaagccctctcctctctttgaaccatggagaatcatgctaccgtagaaattatggtttggggaggtgtgtgtttcaagtagaggtggtttgccacaggtaggt

SEQ ID NO: 139116 - DNA, 122 bp, Homo sapiens
ctgaatttaagtagagatggcaagatcctaaggtagtatagttaaatagcagtttaacaccgcgagagagtgctgcatctttctacccagaacaagagctttttgttggttggttttttttt

SEQ ID NO: 139117 - DNA, 122 bp, Homo sapiens
gcgcgattctactgagagaggcctgagtgtgcaagagcttggcgaacacagaactttttacgggtatcgaggcggtgcgtggactgaagaagggcgagggcgattggggaggggtggggggt

SEQ ID NO: 139118 - DNA, 122 bp, Homo sapiens
ctcaggtgatccgcccacctcggcctcccaaaatgctgggattacaggtgtgaaccaccgcgcctggccgattcagattcttattagatctttgtgcttatcttctagcagttctccctgcc

SEQ ID NO: 139119 - DNA, 122 bp, Homo sapiens
gggaggaggcatccgtgggtgcagctggtactcctgcatgaggacccagagggtcagggtcggggactccttctgctgcaggacagcgctgaccccaggcttcttacccgcccccgacctgt

SEQ ID NO: 139120 - DNA, 122 bp, Homo sapiens
cccagttcagctttaggtagagtaccgcaggcaccaagtgcagctttcctgtcgccatagcgacgggcggggcgagatggcaaagtctccctttggaactacatctcccatcatgcatccgc

SEQ ID NO: 139121 - DNA, 122 bp, Homo sapiens
gagtctcaaggatgggctggcgtcagggaggggcccagggggcgctttcccaacactggtcgcagtcattgttggtataacggctagagacgcccagtgagttagcatggagggcagtggga

SEQ ID NO: 139122 - DNA, 122 bp, Homo sapiens
aagtccatctgtgaagcgcctaggtttaaaggggtccgggtttcctccactgccacagcccgggtgcggggagagggcccctagccttatccggagatacaggatgtctcgggctctccatc

SEQ ID NO: 139123 - DNA, 122 bp, Homo sapiens
tccgccaaagaatcagatacctggatggcaaataaacacacaaaacgatattcgacatcacgagccattagggaaatgctgattaaaaccacaatgagatgtcactacacacccatcaggat

SEQ ID NO: 139124 - DNA, 122 bp, Homo sapiens
ttccagtcttgggataggtattttcttggtgatcattttacctaagagtgataatatcatcggctgcatttctgtcttagcatgttgaactctgctaatctgaggaagaaacacacacatac

SEQ ID NO: 139125 - DNA, 122 bp, Homo sapiens
cttgtggctgtataactaagaactctggcattttgctggctgttggctgaggctacccttcggttctagaggctgccttgtaaacttcttcaacacagctgctcacttcatcaagcctgcga

SEQ ID NO: 139126 - DNA, 122 bp, Homo sapiens
cctcaccgactccttcacctctgcctccagacccttcatcctggcctcgtactctgccagcgcctccttctggaactgtggagacagcaaggacccctgcctggctcaggaggggcctgctg

SEQ ID NO: 139127 - DNA, 122 bp, Homo sapiens
aaacaaataaataaaagagtgggggaaggggggaagtgaagcagggaaggagggaaagaacgtacaagatagtgtcttactgagaagttggccagtgcctcaaagaaaatacaactagttgc

SEQ ID NO: 139128 - DNA, 122 bp, Homo sapiens
gatttcacccttttcctccctctttccattcgcatccaagatctttgatcctaccttcaacgtattttttggatcacagcagaataagagtttttagaatgcacatctggacaggagcctcc

SEQ ID NO: 139129 - DNA, 122 bp, Homo sapiens
taaactgtctgcagacacctgttagggaaattgctgatcatgggcagcaggatctgaactcgctttaccttctcgtttggagcacagggaccgcccagctagaggagcaccagcgcactgcg

SEQ ID NO: 139130 - DNA, 122 bp, Homo sapiens
gaacgcctcctccggagtggagcagcctcacatgtggcctgtgggccttgtcccacgggccggctccggattggctccgccgaagagaaaaccctgccgacagcccttccgatctcgtcagc

SEQ ID NO: 139131 - DNA, 122 bp, Homo sapiens
ggcacgctcgtgcgctgtgtgcccgtccgcccacccgtcgcctgctgcagggcctggagccgctgctgggagaggaagtgcgttcagttaccaatcgggttattttcataacggctgtctca

SEQ ID NO: 139132 - DNA, 122 bp, Homo sapiens
tgtcatggaggagcatgaagtcctgcattcctgtctcccattttgtaggaaggtctcccacgtggccagaggctggagacatgaatgtggctgtgtagcaggatgagctgcagacaaaaccc

SEQ ID NO: 139133 - DNA, 122 bp, Homo sapiens
tttgttatcctggaaaccatggctgccgaattcctctcctgccaacttctaatttatatgcgtgccctggctgggagaagggaagtcaagccaggaatctcccctttccacaggtcctctac

SEQ ID NO: 139134 - DNA, 122 bp, Homo sapiens
tacttcctacagggcaggaggacgccaacatgcgaccaccttcctcccctcgccgacctccgactcccgcccagcccaggcgccccccaggctcctggaggttgctccgcgttgctgttgct

SEQ ID NO: 139135 - DNA, 122 bp, Homo sapiens
gcgccaaggtcgtacggctccagccacaaagtgggagcactttgtcaacaatttaaggtgcggcgaggggctggcacccggcgcgtctctactaacgccgcgccgggcctccgcccggcacc

SEQ ID NO: 139136 - DNA, 122 bp, Homo sapiens
ttcatacagacaacctggcctatggctattttgtgccactgagtggtggtggggagtgctcgtatttgcgggggcctgggtggctcttgaaggcgatggttgtccaagtttttcggaaatac

SEQ ID NO: 139137 - DNA, 122 bp, Homo sapiens
ctttagcccgcaggtgttcgagcagccggggcccagcatcccacgggccattgtggaatccgtggagtcctgcgagatctccctgcgccccctgctggtctcccacgtgatggcctgcgggg

SEQ ID NO: 139138 - DNA, 122 bp, Homo sapiens
ccagcggcgactgcgcggcgccgagagctctcgggggcgcggcgggcggttcctgcctcgcgtacggattggggcccgctcggccccgcccgcacacgcctcctacttacctgagcggcccg

SEQ ID NO: 139139 - DNA, 122 bp, Homo sapiens
cccagctgccctgctgagagagcgggaggatagtcgcacctaattagtacgcggctccggcggagatgagtgcgtgggcactgtgcgtgcatcttgcacatgacacccaagttcaaagcgcc

SEQ ID NO: 139140 - DNA, 122 bp, Homo sapiens
cctagcttcagtgaagaaagcctgacggctcccccgcgtccaacaaagacaacgctcttccggtcttcgtgacccaccccgtgagcagcccaaaccgaccaccgtcctcccccagctcccac

SEQ ID NO: 139141 - DNA, 122 bp, Homo sapiens
actccagggctatcctctggggaaaactccatgctctgtttttcttggaaacccctggatcgtgggagttcttaattgctcactgggcttcagtttctgaattggatgctggggaatcttcc

SEQ ID NO: 139142 - DNA, 122 bp, Homo sapiens
attagcacgagttctctctatcctgagagcaaaaccacttccaattctccccagacagaccgcagtgtttgctggaatttcaggcgacaagtgagactggatggctgatgctgtctacggag

SEQ ID NO: 139143 - DNA, 122 bp, Homo sapiens
agcacttgctcttcaaatggaccacttggcgctctctcaagtgcactttcctttctttcccgtgctaaagctttttaataaacttccaatcctgctctgaaacttggcctcagtctcttttt

SEQ ID NO: 139144 - DNA, 122 bp, Homo sapiens
tcggcgagtcgggtggtccctttggctggagtgcctctctggtctggggatcacctcaggcgctgtccttcactgggcgatccagcatggaccccgaggacgaaggggtagcgggagtgatg

SEQ ID NO: 139145 - DNA, 122 bp, Homo sapiens
tgggggattatggcatgggaggagagctgtcaggcatcaggcttatgtgggaaggacccacgctgactacaacagtacaagtaactgcctgagtggctccataacatggaaacagcaatcgt

SEQ ID NO: 139146 - DNA, 122 bp, Homo sapiens
cccgcctcctcccgcctcctcctcctcccctcaccaaccaatcccacccccacccacccccgggcactgacctgtctaacgctctaaggcagcggcaaaatttcggtccgggctgtgccggg

SEQ ID NO: 139147 - DNA, 122 bp, Homo sapiens
atatattcatagcccagtctgagcgcacaccccatgtggcaaaggggtcacagatcttagcgctccacagagacactatagggcgcgctgccttgcccgccagcttgtttgtaaagctctag

SEQ ID NO: 139148 - DNA, 122 bp, Homo sapiens
gtactttaaatatctgtttcaatctgctgtctaaggacctgtgtcctaaagagtttagtccgtatcttgtgtggcagacatgattacctgtcttacaaactgggacacagaggctcagacaa

SEQ ID NO: 139149 - DNA, 122 bp, Homo sapiens
gtcgcccagcgtggggccgcggcggcgtgggtggctctgcctctatcctgtgcccatcctcgcccgctcccgctcgccccagcacacgcacttacactctgggtcggccggctgctgcaccg

SEQ ID NO: 139150 - DNA, 122 bp, Homo sapiens
gtacaaatgtttaaaggtggtcaggcactgccacagagccctagtgtggtgttgtaggaacgtacgggccatggaggcaaggcacatgtggattcacccctggctctataacttccttgtga

SEQ ID NO: 139151 - DNA, 122 bp, Homo sapiens
ctttgggtaccaaaagtccgctacttccaagctcagcactagaaatgagaacccagccagcgtgtcaggaaacgctccctgaaagagctcctggagtttagagctaacatgctgtggcagga

SEQ ID NO: 139152 - DNA, 122 bp, Homo sapiens
ttttcatcatgcgctgatgctcacagaatgacacaatatcactgctgtgatactggcccccgccaaagaagtaaattataattcaaatctaatcataaagaaacaagttttatgcaaaaagc

SEQ ID NO: 139153 - DNA, 122 bp, Homo sapiens
ttcctctcatgttgcccaaaagcattttccttaggtttctaccgtcccctgtccccttcacgcccagccccaccccctcccgtgcccagggcctctgaggaggtcccctcaacccctgtccg

SEQ ID NO: 139154 - DNA, 122 bp, Homo sapiens
agtatgttttcacgaagactggagagacagcagtgtcttccagggccatcttccccacctcgcctcactcacacttactcacctgtcacacccacagcggacactgggcccacgcgctgccc

SEQ ID NO: 139155 - DNA, 122 bp, Homo sapiens
aaaaccagcaggcattccctgattaatcagtattctggggaggtaaggggctcacaggaacgcaaaagaaattcaggctgtaaatccagttggacgccccgctgccccatcccctccatccg

SEQ ID NO: 139156 - DNA, 122 bp, Homo sapiens
cttttcatgaggaagataaaaataaactagattgggattggaaaatccatttcatatcatcgacctcaagcagtcttcatctgtagtcattccagagtggtttcatctactttctaacctat

SEQ ID NO: 139157 - DNA, 122 bp, Homo sapiens
ccgcctcgttttgcagagtctcgtcctccgcaggcgccactgtctgcgcatctgggggctcgcttgtccctgtgaggacaatgctggacacccaggccggaaccacaatcagagcgaagtag

SEQ ID NO: 139158 - DNA, 122 bp, Homo sapiens
cagccagcgctggggctaggcacacgcccgttgccatggagacggggcggggcaggcctccgccctccgggtcccgcgcgcacgcgcccacggccacggccatgtcccgccgcgagaggggg

SEQ ID NO: 139159 - DNA, 122 bp, Homo sapiens
cctgagtctccctacacagcagggacccaggctcactgctgccttctggcctttgcttttcggagccgagctgagtgagtcccaagggaatcaccctctgttttataagctttgaaaccaga

SEQ ID NO: 139160 - DNA, 122 bp, Homo sapiens
cgtactggagaagatctggaaggaaggaactggaggataaatacccagagctctcctcctcgcctctatcatgttgctggtgctccccattgcctaggtccacctggaagacatagtgctgg

SEQ ID NO: 139161 - DNA, 122 bp, Homo sapiens
tgattcttagagatacctcaagtgacccagcccctggtttgctgggatgctcttggtgttcgtttccatggagcaccagagattgtctgtaggcgaaaccctttccaaccaaacccaactca

SEQ ID NO: 139162 - DNA, 122 bp, Homo sapiens
tgagctgccagtacttcctggctcagattctggtctccctggtcctggggcccctgacctcggccgtgggcagtgccaacggggtgatgtacttctccagcctcgtgtccttcctgggctgc

SEQ ID NO: 139163 - DNA, 122 bp, Homo sapiens
ctctcgtcagatctcctatccctactcggcccaagtgcccccggtccgggaggtctcctacggcctggagccatccggcaagtggcaccatcggaacagctactcctcctgctatgcggcgg

SEQ ID NO: 139164 - DNA, 122 bp, Homo sapiens
agaatgaaacttcaaccagctgatgagatcattcatgaaccaagcttatcactgcgtcttcgcagtaaattgttttctttttaatacccctcacccccggtctccaatccccctctgcctct

SEQ ID NO: 139165 - DNA, 122 bp, Homo sapiens
acaaaccgacgagaggcgtcaaccttttaccctagggggcggatttgggtaggagccgagcgttcggtcggaaacgcccccttcttcctcctgggcggggcaagtgaggccaagtactgggc

SEQ ID NO: 139166 - DNA, 122 bp, Homo sapiens
ggttttaagaagaaaaaaaaactgcacccaggattctacgtcatagtacaacagcatcatcgttttgtttacacataaattaaatcattacatgcctgcattttcagcttccttttgttcac

SEQ ID NO: 139167 - DNA, 122 bp, Homo sapiens
cgagccagccgtccccccaccaaggcacgcaaggaggccattcatcttcactgcctctgccgaaaatatacgtctacgggagagccaggaatctctctccaagggtgaccgggttgggggtt

SEQ ID NO: 139168 - DNA, 122 bp, Homo sapiens
atgttctcacttctccggattccaccgggatgcaggactctagctgcccagccgcacctgcgaagagactacacttcccgaggtgctcagcggcagcgagggcctccacgcatgcgcaccgc

SEQ ID NO: 139169 - DNA, 122 bp, Homo sapiens
caccacatccagcaaatcatttttgatgaggatgacgttggctgcctcgatgaccacatccgtgccagtgccagtggcaatgcccaagtctgcctgggccaaggccagggaatcattgaccc

SEQ ID NO: 139170 - DNA, 122 bp, Homo sapiens
gggcagcatatcctcaccagcagctcaactgttctggcaagagcagcctgtagcctgagccgggccttccctctcacctcctcttcccctcagaaaggtgttgcaagagctgctccctgctg

SEQ ID NO: 139171 - DNA, 122 bp, Homo sapiens
ggaaccgggtggacccggcagcaggcgggggcgggcggacacgacctttgttgtggtcggcgggcagacaggggaatcggcacagggcctgcgccccacctacagcctctgtgggtggaagg

SEQ ID NO: 139172 - DNA, 122 bp, Homo sapiens
tgttggagacctgagccctggctggagtgggggtggggtaccaggctgggccccctcccccgcccagtggcggaatcttgcaaagaccaaacaggtgaagtgttgacagaggggggtctaat

SEQ ID NO: 139173 - DNA, 122 bp, Homo sapiens
ctaaactccaaggcatcgtctcacattctgctttgtctcccctgcccaagaccttccacccgccctgcggtgcatctgggccccagctgtgccaatgttgttaggcttaggaaagatttcaa

SEQ ID NO: 139174 - DNA, 122 bp, Homo sapiens
tttctgtctccaacaaggaggccctaattgattcttccctctgtcactgcagtaaggctgcgtgtgtccagttaatctgtatccatcctttttttcaatctaatatgcctcttattttccac

SEQ ID NO: 139175 - DNA, 122 bp, Homo sapiens
aaaaaaaaaaccctcaaagtgtctgcaggccaaccacatggcagcatgtgtgaatatggacgttggcttagttagagggcttacttttgccatttattattttagctttgtttcttggtcta

SEQ ID NO: 139176 - DNA, 122 bp, Homo sapiens
gtggacaaggtgaggaggagaccagagccttcctcccagactcgcagagccacccccgcgcgagccctccgcaccacccgcacctcctgagctctcaggtatggtggtgccagggcggtgca

SEQ ID NO: 139177 - DNA, 122 bp, Homo sapiens
cacttaggcagacaccatattatttacaccataaggcttaatttgtatggttagttgcatcgcctgcagcaggggtgagcagaacatcgctcactccagagccctctgtaaggcgctgcgac

SEQ ID NO: 139178 - DNA, 122 bp, Homo sapiens
ggaccactgtgtgtgcccgcatgtgcccagcagggggtgtcctggctccagccttgtgtccgggtccccacctcacccctgtgtcacaatgggcgagtgaagcacttagccaggggcctttc

SEQ ID NO: 139179 - DNA, 122 bp, Homo sapiens
tcattccgagtttctctgtgtttcgaccatgcttttgtggtctcgccgcgtcctcgggtccgcaagcgcctgtgatggtgtttggctgcgcacctccctgtgggtagcattcccgtcaccat

SEQ ID NO: 139180 - DNA, 122 bp, Homo sapiens
taagggcgacagtggtaattaaaacacaaagatcaacgcactgttcaaagattcccagtgcgcggcgctgctagagtcgctgagtcctcacaaccccggctcgtggcgcgagcctggtgcca

SEQ ID NO: 139181 - DNA, 122 bp, Homo sapiens
gctatgctacgaccaccggacagacgtgtgggaggagcggcggcccatgaccacggcgcgcggctggcacagcatgtgcagcctgggtgacagcatctactccatcgggggcagcgatgaca

SEQ ID NO: 139182 - DNA, 122 bp, Homo sapiens
gtgggcggcggcggggcctgaggtctggggctcgggcggtgggcgctgctctggccggcgcgcgtgggccccggcgaggcggcgctgcaggagctttgcgggcagctggagcgctacctggg

SEQ ID NO: 139183 - DNA, 122 bp, Homo sapiens
ggcgggctgttcttaagggcccagcccctgcttctccagtatcgagaagagccaagcaaacgccctcccctcccgggctgccgggcgcggagcggggagcagccgccgcaggtccccgggcc

SEQ ID NO: 139184 - DNA, 122 bp, Homo sapiens
acacggccacctgccttctctcctgcaggtaccttacaggtgaccagctgcggagcgagtcgtccccagaagcttacatccgctgcctgcgcatgggctgtcgctgcattgaacgtgagtag

SEQ ID NO: 139185 - DNA, 122 bp, Homo sapiens
aagggggcggtcccttatgtgaaacctaatctttatagctaggccgatgggtgtgctcaccgccgaggcacgtcattacgatgctctttggctagtcattgtcattagaaatgtaaacactg

SEQ ID NO: 139186 - DNA, 122 bp, Homo sapiens
ggaagaatgaggtacacagataagtggagggtgagcgagatgaagaggagctttattgagcgacagaacagctcagtctcccacagcgggcagctcctttctgcagccagggtatcctgatg

SEQ ID NO: 139187 - DNA, 122 bp, Homo sapiens
agctttctctgaaccgggctggcttcctagcagatagggcgggaccgtcgggttgagtgacggccggtggcccgccctgggcgtgacgttgttctagtgttgttgccagcagctgcacgtgg

SEQ ID NO: 139188 - DNA, 122 bp, Homo sapiens
ggcaacagtgcgagaccctgtcttaaaaaaaaaaaaagatatgtgccaggtattcagcaccgtgccttgcacgcagcaaacccttataacattggttgttatttatggagaggaaaaggata

SEQ ID NO: 139189 - DNA, 122 bp, Homo sapiens
cggccggccagtgccgacagcccctggcagtgatgggcttaacacctgggccagctgctgcggagggtgcaccaggtcccccagcagtgccggcctgctgcgctgcacttgaattgttgcag

SEQ ID NO: 139190 - DNA, 122 bp, Homo sapiens
gagaggggccctttgcttccttcactttgaacagggcgtgtttctgtgagaatctggcttcggctttgacgttttttatttgtttctggcacattgtgttgggaccgaagcgtaaggtagac

SEQ ID NO: 139191 - DNA, 122 bp, Homo sapiens
aaccaggtccccgaagtctgcaaaggcaagtaaggacaataaggagtttcctccatgtgccgagctgtataggttacaaagtgcacaggaaggcggggagggcagggtaccaagggcacagt

SEQ ID NO: 139192 - DNA, 122 bp, Homo sapiens
ggtgctcccccgggtgcccttggagcgtgggagccaccaggggaggcgcctcagaccggccgaggggagtgggtgtcccagcacacacatcaagtggcaactttatctcaaggctccggtaa

SEQ ID NO: 139193 - DNA, 122 bp, Homo sapiens
cattatggacagctccaggcccttggtgagtgcttaatatacatttatgagatggatgaccgacaggtaggacaaacagcgggttgggaaatgaaaggaaaggctgatgtgagagaaaagga

SEQ ID NO: 139194 - DNA, 122 bp, Homo sapiens
attatcttagtaacaacaatcagacttctgtgacacctgtaccatcagttttaccaaatgcgattggttcttctgccatggcttcaacaagtggcctagtaatcacctctccttccaacctc

SEQ ID NO: 139195 - DNA, 122 bp, Homo sapiens
cactcacaagcaccgtatggttcacgcacccgtcggctcacccgtccactcaccaagcaccgtatcgttcacgcacccgtcggctcacccgtccattcaccaagcaccgtatcgttcaggca

SEQ ID NO: 139196 - DNA, 122 bp, Homo sapiens
gggaaaccgaaaagaactgccaactgcaacagagttgcagcttgagcagcgtcggctcgccgaagccccttcttgtctgcaaaagaaactttttcgcctccaccccgcggcactgcgccaag

SEQ ID NO: 139197 - DNA, 122 bp, Homo sapiens
tactcaggacccctctgactccttcaatatcaggtccctcctaagagatctctaccattacggcccatctggacatcttcaacttactggggagccgctggcttggggaggataaggcccta

SEQ ID NO: 139198 - DNA, 122 bp, Homo sapiens
tcacgggactagccttcgtttccttggcaacgcagtacacaagtgctagccctagcagctcgcgatgtgcttcagcagagcaggtgaggagggctgccgagaagcctagagtagagggcagg

SEQ ID NO: 139199 - DNA, 122 bp, Homo sapiens
gacccactccggacaatatggtaactggcctgttctaaactgaggatcaatgccaggttccgcctgcattccacatgaggcctattattagctaatagatggaatttcaggcactgaagatg

SEQ ID NO: 139200 - DNA, 122 bp, Homo sapiens
gcgggaagacactccaagctactttttcctgggccatttcctttccatggtccaagaaaacgggagggagccctcgctcttccccgaggctgcctttcaaactctcagcgtgtcgctctcct

SEQ ID NO: 139201 - DNA, 122 bp, Homo sapiens
tcaccttctgaatttttaccttcataaacagcaaggactgcgctctttcgcacggcgccccgttttttcgtagagttccgtcggccaaaaccacttgaaactcgctcagcggcgtcggggct

SEQ ID NO: 139202 - DNA, 122 bp, Homo sapiens
gaacagtgttaagtatcctggcaaaggagcattagggttacagatagaattgaagttgctcgtcagctgattgaagataaggagattggcctggattatccaggtaggctcaatgtaatcag

SEQ ID NO: 139203 - DNA, 122 bp, Homo sapiens
cagtgccaggctcttggtctcttgacaaggaagctcattatggccgcatctcacctcctccggggaggtgccagatctgtgtgcagcactgctgcatggccgtccacttgttcatcattcat

SEQ ID NO: 139204 - DNA, 122 bp, Homo sapiens
agaagggctcaccatcccggtgctcgtggggcagccagtggtgctgggcgtcgccgtgctcgaagtacaggtcccactggcggcactgctcctcgcggaagtcagccagggagtcggggcag

SEQ ID NO: 139205 - DNA, 122 bp, Homo sapiens
cttccgcctgggcgtgaagggcgtgctcttccagccctgcgagcggacctcactctgctacgcacccagctgggtgtgtgatggcgccaatgactgtggggactacagtgatgagcgcgact

SEQ ID NO: 139206 - DNA, 122 bp, Homo sapiens
agcagagagcagcaacaacagacctttgttcaactgaaatgagtatgaagctataggatccgtaaactgactggatgtgggaggggccactataaatgattctcagtctgaacaactggaag

SEQ ID NO: 139207 - DNA, 122 bp, Homo sapiens
aagcttcttaaaaactcttgcagagcctccggttataaactttaatcaacagagggcgctcggagcccaccaaacacgctttgggcccccagctacttagaaatgcaaatcagagcagctct

SEQ ID NO: 139208 - DNA, 122 bp, Homo sapiens
tccctgaatgcccttctgttctccagaatgtctgtgttgtcacctgcctcagccttgtgtcgtgcgctctgtgactctgcctctctgcaggccccctcctgccttccatgtctgtctcattc

SEQ ID NO: 139209 - DNA, 122 bp, Homo sapiens
tggcgtcttggagcagccaaccggagagattgacatcgctgataaagaggtagattcacacgacctcatctttgtcagtgcacaaaatggctccctacagcccactggtgacccggctgcag

SEQ ID NO: 139210 - DNA, 122 bp, Homo sapiens
gtgactgcacagttaagaatgctctcatagatgtaaacttccaatctacactgtgggcaacgctagatttttacaaatcaggtttgctgtgtaacatatgcgtgtactgtgcattactaaac

SEQ ID NO: 139211 - DNA, 122 bp, Homo sapiens
gtggcctgggagagctaacctgcctgtgccttgtctgagaaacagttgttgaatggaaaacgtctcaatgacagcctggcacagggcaagctcactcccagcatgaaagtgccatcctggaa

SEQ ID NO: 139212 - DNA, 122 bp, Homo sapiens
accgcaccgcctttgcctggaacacaggcagcttccagctatcgattttattgaccggagcgccatgccggcttcctaacctctttgccctcaagtgtaatggcgctgcgattgggcttcac

SEQ ID NO: 139213 - DNA, 122 bp, Homo sapiens
tcagccccccggcggctcagcgcatcctgggactggagagcctgctgggggccttggagccgggcgaggcctcggggcgggggcagttagaccggggccgggcgggggggccccagcgaggg

SEQ ID NO: 139214 - DNA, 122 bp, Homo sapiens
gcgggagggggcctaaatctctaaaacccagaggactgggcttccttcaataggccactccgcatgggctgcgcgttcagttctaccttctgaaagctctgactcacaaatggtggggggag

SEQ ID NO: 139215 - DNA, 122 bp, Homo sapiens
ctaaggaaatctccctgcttccgctggccccgccttactctgttgcaccgcccagtcgcccggctttccactgagggacgccccctgctctggactgcttagcctactccagctggccccac

SEQ ID NO: 139216 - DNA, 122 bp, Homo sapiens
cccacgttgcacagacagcaccgccagcacggcctaccttttccatgcccgactccttcacggccttgtccacgatgttgcggacctcatcctcgtaactgtggaggttcagctgcagtaaa

SEQ ID NO: 139217 - DNA, 122 bp, Homo sapiens
tctttagaaaatcccagaatgagttgtcaggttcttgggagatctgtaactgtgggaaagcgtcacatcccagggaaagccaccagctgggagagccatcccagacaaggcctgctcccttt

SEQ ID NO: 139218 - DNA, 122 bp, Homo sapiens
tggcttccctttgcaattagaatgaattccaaagccctcagcctggtctgaaaagacccacgtgatcagaaccctgttcacttcttgtttattatgctccaactacacagtcttctttctgc

SEQ ID NO: 139219 - DNA, 122 bp, Homo sapiens
tttgcacgggggtgaaagttacaggcagacactgcccgcggggctccggacagcaaggagcgagccctctgagcctggccacgctggcccgccactgccctctgctggcggctgcggtcttc

SEQ ID NO: 139220 - DNA, 122 bp, Homo sapiens
gagaatggaaggacatctatgagctgtagcccaagaggaagaggtcactggggctagatgcggcagaccctcgcaggctttgggaagggcttcagaattcagcctgagggcaatggggagcc

SEQ ID NO: 139221 - DNA, 122 bp, Homo sapiens
gggagcctcttttgcttgacagtgggatgtgtgggaggcaccagcatgagaggtcagaggcgggactccccagaggtaaaagacactgcagctcaagccttgtgctgcccggggacccggca

SEQ ID NO: 139222 - DNA, 122 bp, Homo sapiens
ggagacggggagcgcctggaaatggaggtcagcgtgcagccggacgccaggaacctgcatcgggggccacgagccaggttcaggctcagaggagccagtctgggaggcgcagaatctcctcc

SEQ ID NO: 139223 - DNA, 122 bp, Homo sapiens
ggcccggcccaggtctgtggtctgggaccggaaccacacatctgctttgggtctgctggacgtggcgcaggcgctggagcagaaccacagcctgaaggccatgcctctgccactgaacgacg

SEQ ID NO: 139224 - DNA, 122 bp, Homo sapiens
atttgcatatgcagagctaagtacaaagagttttccagcagaggaaacaggtgtgcattacgtagagaaggcagcagaggccagtgatgatagtgttcttgccaggaactttctgcactcag

SEQ ID NO: 139225 - DNA, 122 bp, Homo sapiens
aatatttcttcttcaaaatatctttttcttgtgttttactatgtgaccttctcacattgtcggggtgctgtgagcactgggagacagtgcggtgcctcactacttttggcctataaatcatc

SEQ ID NO: 139226 - DNA, 122 bp, Homo sapiens
tacttgacactcagtactctttatgaaaaataaagctctcctttctaaatttatgaacctcgttattcttcagttgacagtgtaaaaccatgaaactggatgaggtcacctggcaagagggt

SEQ ID NO: 139227 - DNA, 122 bp, Homo sapiens
tgtggaacgagatccaccacaagaccgagtttggatccaacctcacgggccacggctacccggacgctagctacctagacaacgtgctggctgagctcacagcccagggcgtatccgaggct

SEQ ID NO: 139228 - DNA, 122 bp, Homo sapiens
gaagagaagttgtactggcaggggaacagcaagctaccctgaaaagtcaacaactcctctcgaaagaacaatgaccacagtcaacatcctctgaggatgagcaagctgattctggtttgtat

SEQ ID NO: 139229 - DNA, 122 bp, Homo sapiens
agcaaatgacaaattccttctcttttctgagactcagtttccccacctgcatagtggtagcgtgggtgtgggtggtgaagtgaagctcactccttcaatgtcctgagaaccttttagctgat

SEQ ID NO: 139230 - DNA, 122 bp, Homo sapiens
ttatgtctttggatgaaaaatgtggtgctcctgccctggagtggatgtcactgcacatggcggcttcccccatgaggctgtggctcatgattgtgggagagtgggaggggcgactcgtgagt

SEQ ID NO: 139231 - DNA, 122 bp, Homo sapiens
cacgggccaagtatttgaaaataccactccatatagctccagggccctgagagaagctaccgtggcagctttgggaaaccagccacccttggcttcactttgatcttcctcagtctacatcc

SEQ ID NO: 139232 - DNA, 122 bp, Homo sapiens
cttggagaccggagggagggcccacagggctggaggcggggcctgtcagcagggcggggccggtggaagaggtggggcctaccggtgaggcggggcctgtggggctgaaagcaggggctgtc

SEQ ID NO: 139233 - DNA, 122 bp, Homo sapiens
taagttgatttcccacagtccacagtggcaggtatctctgctccacagaatcagggacctcggctttttccatcacattcctccacagcctctaagacgttgtccttgtcctcatggtcaag

SEQ ID NO: 139234 - DNA, 122 bp, Homo sapiens
caccgcttcctcctcggaaaaagaagaattttttcttgaactggaactgcaactaaagtccgttcggagatccaaaaatctgcaatacagaggttatttgtaacccggcgtctccaggctgg

SEQ ID NO: 139235 - DNA, 122 bp, Homo sapiens
tggtggtgcgggtcccaggctgcggacctcggaactgatgctgtcccgccggttccctggcgcttaggctcagcaggctgggcctgtctccggaggttctggtccttctgttaatcagagct

SEQ ID NO: 139236 - DNA, 122 bp, Homo sapiens
gccacgggcagcggtcggcggctgcgctggccccgatgcctggtgcccgccgctcattcccgggctggggaaaactttcggccgcctcccccaaggcgcgcccccacctcccgggacccccg

SEQ ID NO: 139237 - DNA, 122 bp, Homo sapiens
cataagaaaataaatttgtgttgttttaagccatcatgttttaagccatcaaaataacaacgttatttgttacagcagccaatacaaaactgaatccttcccactcaaatctcagctcaaat

SEQ ID NO: 139238 - DNA, 122 bp, Homo sapiens
agcaacaaacagcccggcccagccagcttgggcaaccaggcctcactccacaaggcggggcgcaggtcaggggacactgtcgaggatgtttccaaagcccggcaggtcagggcctggcacac

SEQ ID NO: 139239 - DNA, 122 bp, Homo sapiens
ggtccaacattatttcctgaaatgagcttttctttttctttcttttgtcagacaggatctcgctctctggcccaggcaggagggcagtggtgcaatctcggctcactgcaacttccgcctct

SEQ ID NO: 139240 - DNA, 122 bp, Homo sapiens
agcctcccgcagccgctcggtgctcctggacgtctcggcgggccagctgcttatggtggacggacgccaccctgacgccgtggcctgggccaacctcaccaacgccatccgcgagactgggt

SEQ ID NO: 139241 - DNA, 122 bp, Homo sapiens
tgtgtggccaggttcaggaacatgacctgtggccatggtctgcttttggccagcatctcccgttaatctctgggacagctgctgcagcatcacctgagtgccctttggaaatgcaccttctc

SEQ ID NO: 139242 - DNA, 122 bp, Homo sapiens
cggcggcccgcctcttcattggccgtcgggctgcgggggcggagcgtcttgattctctggcggccaatcccagaccggaaggcttgcgcaactccgcggtgggggctggagtaggggctttg

SEQ ID NO: 139243 - DNA, 122 bp, Homo sapiens
ctctccagggcggggcaggggctggcagggccgccgggtgttccctgaccctggaggcttcggggagggaggggaggacgccaagcaggggcgggagcttagagtcccccccacagctcatc

SEQ ID NO: 139244 - DNA, 122 bp, Homo sapiens
gtggtcagcaaagcctcccgtgctgaggcgaggcaagccatggctgtgtgcaccacgcggcggctacagaaactttcgtgagtctcactgccccgtgtggcccgggatcccacagggctgct

SEQ ID NO: 139245 - DNA, 122 bp, Homo sapiens
tcgcaacgacgcacagggccctaagttggagctggcgcaggcccttcagggttctatccccgccagagcctggcttcggccttcagaagccaaacgagtaataggtccttctggggcgctgt

SEQ ID NO: 139246 - DNA, 122 bp, Homo sapiens
cttctcggaggcggcgagctacaccacatgtcctggggcctgtaaaccgcagctcgaggtcgtctgtgggtttagctcatttcccttcagcccacctgaagtctccttcttcctacggtcac

SEQ ID NO: 139247 - DNA, 122 bp, Homo sapiens
aatacagccccctccccaaactccccaaaccacccaattagagacctccgtgattgatgtcgcctggtatcctcagctccttgattagttttcattgttaatgcttaattgtgaaacttttt

SEQ ID NO: 139248 - DNA, 122 bp, Homo sapiens
cacacagagaacgctccatatatttttgcagaaagacaaaagtaaggggatggagcatgtcgaccatatgggttcaggtctttaaaatgagggactggcctaggtcagagtcttttaatgat

SEQ ID NO: 139249 - DNA, 122 bp, Homo sapiens
agatgaggcctatgactgagggggcagatgcaggaaacacctagagcagccccagagtcacggggctgagggggcgggagctgcccctgtcatagggagggggattcccagcgtctgtagtg

SEQ ID NO: 139250 - DNA, 122 bp, Homo sapiens
ggggtacctgcggtgtccggctggcgcgagggccctgaggttcaagttgtctcgtcgggacgttcacgtccgattgacagacttgctggactcggcttggggctgcgccctcgcctcttccc

SEQ ID NO: 139251 - DNA, 122 bp, Homo sapiens
ctaagagcagcaggacttgagtgacacccaacagctggtctgatctctttcaggcgccaacgccagacgccagcctcccagcggaccctctcgcagacccaccttcaccccacgcgccctcc

SEQ ID NO: 139252 - DNA, 122 bp, Homo sapiens
tttcttttcagatcaaaccctacctggagaatttccagaagcaacagcaccctcaggaggcggcctgcagccggagccctctccagggcaggtgcctgagggccgcccatgggacaggcccg

SEQ ID NO: 139253 - DNA, 122 bp, Homo sapiens
gagggacggcggggcctggagcgagcataggggcgcacggaggggcatctgggcgtggggcgagcacaggggcgcacggagaggagcatggagggacatggggcgtacggaggggcagcggg

SEQ ID NO: 139254 - DNA, 122 bp, Homo sapiens
gtagcctgcccggcggggccggggtgtggcaggaccgaagcctgctcctcgtgtggggcccggcgcgaaaacagcttgtgcagccgctgagtgactgaggaccgtgtcccagtgtagtgtca

SEQ ID NO: 139255 - DNA, 122 bp, Homo sapiens
ttgtaagaagaagagtttggtttcttgtttgtttgtttgttttggtttgtttttggcatgcgaagagctgtgtcctggaattggtgcccaaaaaattttaagtgtggtatgaactgtttatg

SEQ ID NO: 139256 - DNA, 122 bp, Homo sapiens
cccacggcaccccctgcatcctcagagggctgcggtgaagctggaatgagcggaagcgggcgcggtgccggatgaggaactcacatccaggatggggccgttgcagtagtagcagcgcgggg

SEQ ID NO: 139257 - DNA, 122 bp, Homo sapiens
tccagaaaaagactgccaaattggcaagaacaactttcctatctttgaagagcatcaactcggaagttattttatttccgaatagcctttctcttattgccaacagaaatccattacaatat

SEQ ID NO: 139258 - DNA, 122 bp, Homo sapiens
atttttttcctttttcttttttaaactcacacctgggcacgcatctgcgtactgccctggcgactgacgtgagcatgaagggagctttagtcagccgctcggcccgcgggaaggaagaggcg

SEQ ID NO: 139259 - DNA, 122 bp, Homo sapiens
ggtctccatcctggaagaaacccggcgcttaacaccggcggtgccgctaccgcatagacgcgtggttttgtttttaaacatcctgagcaccctcacctcagcggctgcccagtagagaaagt

SEQ ID NO: 139260 - DNA, 122 bp, Homo sapiens
gcgccgcgccatgtcggtgaacatggacgagctgcggcaccaggtcatgatcaaccagttcgtgctggccgcgggctgcgcggccgaccaggcgaagcagttgctgcaggcggcccactggc

SEQ ID NO: 139261 - DNA, 122 bp, Homo sapiens
caaggtcagctgatccatgtttccttgagtctatccgaccagcaattgaggcattctaaccgcccttccctcagtcatgcaccagagctagagctggtgtttggatctacagagcccagctg

SEQ ID NO: 139262 - DNA, 122 bp, Homo sapiens
ctggccaacgtggtgaaacctcgtctctaaatacaaaaattagctgggcaaggtagcgcgcgcctgtagttccggctacttgggaggctgaggcaggagaatcgcttgaacccgggaggcgg

SEQ ID NO: 139263 - DNA, 122 bp, Homo sapiens
gttcaggggtgaaagttcttcaggtacgaggagggcattgttgtcagtctggaccgagcccgcagagcccctcctcggcgtcctggtcccggccgtgcccgcggtgtcccgggaggaagggg

SEQ ID NO: 139264 - DNA, 122 bp, Homo sapiens
ggggcgggggcgcggacaggccaagccagggggtgaggcggaggcagggccaggccggtccgtggggagagggcgggccaagccggtgggcgcgggcagggacgccctgtgcgcgccggacc

SEQ ID NO: 139265 - DNA, 122 bp, Homo sapiens
cggtccggggagggacggggctccccggccgggtcggggccagagcgaggattccgtgcccgcctcgcaccctggccagcctgctgagtccggtggttttgccaggtgccgcccatggaggt

SEQ ID NO: 139266 - DNA, 122 bp, Homo sapiens
aattttctcacagttccagatgctggaagtctaagatcaaggtgcagtcagggttagtgtcgggtgggacctctcttcctggcttgtagggacactttttgccatgtcccttcgtggcctct

SEQ ID NO: 139267 - DNA, 122 bp, Homo sapiens
cccctccctgaccacaggagcaggcctggtggcggcaacagaaacagggctggttcctgccgccctgcatttcagcagtgacgtgttccaggctccggctttagatggctgtgtctctcaag

SEQ ID NO: 139268 - DNA, 122 bp, Homo sapiens
ctaaaaacattttccattttgggcgccctccgagattggaggcgcgcaccaccgtctcgccgatgtgccaccctgggctgcagctgcagcttcgtggacccccagtgtgctcgagttctttc

SEQ ID NO: 139269 - DNA, 122 bp, Homo sapiens
ctcgacctggccggaatgagagtaagcgtgaggctggcggtgctggcagcagggtgggcacgtacctttcctcgcggttctgtcccacgcacacccggcccccgtgcctgggagtggggttg

SEQ ID NO: 139270 - DNA, 122 bp, Homo sapiens
catttcggtccctttcgagtgctgggaagttcaatggaagttggccggaagatgtgggcccgcttcagattcccaaatctgggaagccaatctgatgatttcgcccgtacttccttccttcc

SEQ ID NO: 139271 - DNA, 122 bp, Homo sapiens
ggaggtaattgagtcatggggccagtcttccccgtgctattctgatgatagtaaataagtcgcatgagatctgatgggttcatcggggctttccgcctttgcttcttcctcattttctcttt

SEQ ID NO: 139272 - DNA, 122 bp, Homo sapiens
caaagggtatgagagaatcatcctcacttcccctcctcaccccaggaatcatagttcatgcgtgccccagggcaagtgcaggaaaaggctttctatccaatgtaagactgaagcgttctttt

SEQ ID NO: 139273 - DNA, 122 bp, Homo sapiens
aaaccaataaaccattattaaatttccattctgcagcagaaggcacctctggacggctcccggcttgtagtttaatgaagtatgtgctccctgctgttaacccgcagccctccccaactctc

SEQ ID NO: 139274 - DNA, 122 bp, Homo sapiens
cgggcgcccctccccgcggccgcagcctgtttcccgggcctctcctccgcattctcacatcgctccagctcgacctccccacccgcccgcctccccgggaggccgcggcccggcgcggcacc

SEQ ID NO: 139275 - DNA, 122 bp, Homo sapiens
ttgcaaatgtcaaaggtgcctgctattaatactataaagaatcctttggccaatggctcacgcctgcaatcccagcactttgggaggccgaggcgggtggatcacaaggtcaggagttcgag

SEQ ID NO: 139276 - DNA, 122 bp, Homo sapiens
cctggagcccaatctcggctccacccacttagcagctctgagatctttattgttttgtttcgtttttatgagacagggtcatgccctgttgcccagtctggagtgcagtggcacaatcatgg

SEQ ID NO: 139277 - DNA, 122 bp, Homo sapiens
cttagaaccacctggggggcttgttacaagtttgctaggctccaccctacctctgccccccgagttgctgattcagtagatctgggatgtggcccaagagtctgcatttctagcaagttccc

SEQ ID NO: 139278 - DNA, 122 bp, Homo sapiens
gcgcggggagtcccgtgaagacatgagggcgccaggagcgcaggctggtcttctagagcccgggctgggggtccggggtccggggtgggggaggggaggcgcggggccccgggagggagggg

SEQ ID NO: 139279 - DNA, 122 bp, Homo sapiens
aggttcccttcgtttttatcttgattctgaggaacgaacattggctgcattcccgacagccgggccaggagcagggatgtaggtttaggataccaggagaccctggggctgatgtggggggc

SEQ ID NO: 139280 - DNA, 122 bp, Homo sapiens
aaataatttcttcagtccagttgccaagaatctggagcccccgactgacccatcaaggtccgatttggcttcggacacctcgcagatcaccccgcggctcagagcccggatcctgaagggcg

SEQ ID NO: 139281 - DNA, 122 bp, Homo sapiens
ttaaacactatttcaaacccacacacgggacattcatgtaaagcttccaaacagtagagacggtggatcaaactgaaaaaaggccaaactttaattgcagatttgtgagtaattatgcaaca

SEQ ID NO: 139282 - DNA, 122 bp, Homo sapiens
gggggcagtgggcggaacaaacgcgccgactacagaggctggacgtaagcttagcggtggcgcgcgtgcgcagcgccggcccgaggtaacggcgggaaggctcaggggcgtgcttgcggcaa

SEQ ID NO: 139283 - DNA, 122 bp, Homo sapiens
cgggggccggggtcagtggtggtgcagagccggggaccggggtcagtggtggtgcagagccggggaccggggtcagtggtgctggagagccggggaccggggtcagtggtgctggagagccg

SEQ ID NO: 139284 - DNA, 122 bp, Homo sapiens
tctccgctccctctgctcttggaggtgccatgaggtcagttagctacgtgcagcgcgtggcgctggagttcagcgggagcctcttcccgcacgcaatctgcctcggagacgttgataacgat

SEQ ID NO: 139285 - DNA, 122 bp, Homo sapiens
cggcatgggcagctttctgggccaaagtgtttcttcctgtggtttgatggagaatctgcacgtcacagaggacacgatcatggcgtttgcgttccacttacctggtacgtcagctccttgac

SEQ ID NO: 139286 - DNA, 122 bp, Homo sapiens
cggccggcgtccagctctccgggaacccggtacctatccgccctttggtcgggccttctccgcctcatgacactggttcaaagccaaacagaaaagcccgacgagtttattatcccctaaag

SEQ ID NO: 139287 - DNA, 122 bp, Homo sapiens
tcgtttttcctcacattccggcaaaatttcgtttaatctttatactaaggctttcgggtacgcaggtgactgctggccagccattgaggctgagatcatcatcaacattaagaattaagaag

SEQ ID NO: 139288 - DNA, 122 bp, Homo sapiens
tactctccttatctttcccttttgtcttgtatccaataaatatcagtgcagcctggcattcggggccactaccggtctctgcgacttggtggtagtggtcccccgggcccagctgccttttc

SEQ ID NO: 139289 - DNA, 122 bp, Homo sapiens
cctggacactgaagccaaggggcttccctcctgatgatgctctgtgctgtcacgcaccatcgtcaggaggagttggtgctgtccatggctccacgaggagaggacagtgggagactgtgcct

SEQ ID NO: 139290 - DNA, 122 bp, Homo sapiens
attctaaaatgcagttctattctcattttctttctcctatgagattctaagaagcaatcccggaagaaggcaagaatcaagatactaagctctatcttccctactcatttagggtaaaataa

SEQ ID NO: 139291 - DNA, 122 bp, Homo sapiens
taacgtcaggagtgaggcggcagattttcaaggtgaagattacagctcacaaacgcagcgcgcagtcagagtgagcactaagatttatcgcaaagaatgaaagaacaaacctcccacgacct

SEQ ID NO: 139292 - DNA, 122 bp, Homo sapiens
tcttccactaccaatccaaccccacagtgtcaggcaaaagctcatgatgtctttgcagcacggcattttcagagaaggcttgacttggctctggcctggacaggttaccaattataggctta

SEQ ID NO: 139293 - DNA, 122 bp, Homo sapiens
gaagtacctatacttattatcagctgttttcactatgtataaaaataaatctctctcctacgtaaaggattgaaggctcaactctgtgttgtaaactgaataagaaacacaagacctgacag

SEQ ID NO: 139294 - DNA, 122 bp, Homo sapiens
gtcgccacccccttctcctcctctcccaccccgcattgtctttctgaaaccgccccctcccggagcaagtccctgcaccctcgcccagaatcccgggctcgcacacactccgcgcaggccgc

SEQ ID NO: 139295 - DNA, 122 bp, Homo sapiens
ttttgcccttaattgttctactgtctcttcctctcctggttcatgcacttaaaatcccagcgtcaatgtgtctgtttcccacttggttccatgagttttcccactttgtaagataaatgtca

SEQ ID NO: 139296 - DNA, 122 bp, Homo sapiens
ttctttgttaggttatcaatagttaatcttttgttttttaaataaactacatacttaatgcgtatggcaaggggagtcattctgtgacatagcttcttcccacgggttgctaattgtccatc

SEQ ID NO: 139297 - DNA, 122 bp, Homo sapiens
ttcagcctctttgaattttatttactgttagcctttgattttcaattacccttaaaaccacgcagtcacattcaggccgtgactaacattttaaaaaaatacaataaaaatctttggctgga

SEQ ID NO: 139298 - DNA, 122 bp, Homo sapiens
gagcgggagccccaggtctctgccactcggaccagagggcagaggcggcgccaagcccaacggcgcgctcacctgaccctgcgtgctcttagaaggacacgagggcatgagtgggaagaagc

SEQ ID NO: 139299 - DNA, 122 bp, Homo sapiens
ggggcgggagaggaggccgcgggcactggtgcccttgctggagccctcctgaagcaagagcgaggagcggagccacatcccacatcctggcgggccctcctcctgctcggggcaggaggggt

SEQ ID NO: 139300 - DNA, 122 bp, Homo sapiens
ttagtctaagcctctattattaccaataaggaaacaaggcccgaaagaagctaaatgactcgcctaaggtcactcatctaatgagtggctaagtgaagaatagaagctgtagctgttgcctg

SEQ ID NO: 139301 - DNA, 122 bp, Homo sapiens
ctctagccctccagtgcccagggagactctcaagtctctcaaccccagggcccctaccggcggggcatttcctggggcctggccaggccctggctgcacagctgtgaccctgccctcccgca

SEQ ID NO: 139302 - DNA, 122 bp, Homo sapiens
gaaacgctgatccggaaggcgctggctgagtcgattgcaggtctgccggtcggtgaaatccgttctggtattttctttttctttttcgtgaagagtgcagtgatatccgttctggtgatatt

SEQ ID NO: 139303 - DNA, 122 bp, Homo sapiens
cgcatccctccgccgcccccggggccgctcccgcacgccgccgccgcccgtcccgcgctccgcggccccaggtctccagccggcgggcactcacatcatctctgccatcaccgccgccgccg

SEQ ID NO: 139304 - DNA, 122 bp, Homo sapiens
agtgcgagaagcggagagcagtcttgtcagggtagacgggttgttggtggtggatgtgagcgttggtgtgtgttatctctgtcaggattccccaaactcccaagtgttcatacgtgtgagtt

SEQ ID NO: 139305 - DNA, 122 bp, Homo sapiens
ctgctcttttgcttgggaaaagtattcctacagccgaggccccagcgagatttgaactcgcgacccctggtttacaagaccagtgctctaacccctgagctatggagccgccacagagagca

SEQ ID NO: 139306 - DNA, 122 bp, Homo sapiens
cgcggcgtaaacaaggccgtggactgcaggaggcggggcagacgggctgcaatagggagccggcccgacgcggaccgcttccctgcagtgccccgagtcccgggcccgcgccgccgccgccc

SEQ ID NO: 139307 - DNA, 122 bp, Homo sapiens
tgtggtgaggtgggctaattgctgggagtgcaatggtgatacacaatagagtctccaactcgtagaatttactacaaattagtgagaggcacagctagtcaaggagctgtgcaaatatagta

SEQ ID NO: 139308 - DNA, 122 bp, Homo sapiens
actctactctccttttgggtaattcagatgcattctccaggtcccagctcagctgtcattcgcacagcccgggtcggcagtctccagcccccaaccggtgtccaccgcgtggtccaggcgac

SEQ ID NO: 139309 - DNA, 122 bp, Homo sapiens
aatgagccctaaaaagctcgcgcgtattcttctgtgtcgctagacgcaatcaaaaacacacggaagaagcgttacaagcagtgcaggtttaccaacggcttggggcagcgatatactaaaca

SEQ ID NO: 139310 - DNA, 122 bp, Homo sapiens
gctggagcagagggcggccccgccgaggggcgtggtcagtgtgggcggagccttgggggccgagtccgctggtgggcgggacccaaggggagcagccagtagggaagttgggcgagttccag

SEQ ID NO: 139311 - DNA, 122 bp, Homo sapiens
ccatgccctacttctcttctgagccctcccggccagggagcaccttctctacccacctcccgctcaggactcaccaggcggcagcagaggtccaccaggccaggttaaggaaatctgcaacg

SEQ ID NO: 139312 - DNA, 122 bp, Homo sapiens
gacacgcctccaatcgccacacgccaattcccgtgggatgggcggagtcagcgagaggggcgtggccacagtcaaagatggagaatccatggtgccactttcccggtgatcccggtggggga

SEQ ID NO: 139313 - DNA, 122 bp, Homo sapiens
tacaaagagagtagactgaaattatatgttttgggagtccttggcacatgtgattaaggccgtaggaatgaatagtttctataaaagcatcccaattgggcactcctgatgtgaaaaatatg

SEQ ID NO: 139314 - DNA, 122 bp, Homo sapiens
tccctggtgagctctccagccccagactcatcatcctcactcttgttcatcttcacaatccgatgggcttccaggtaggtttctgagagtaaacccttgggcaggaaaatgccaggatacag

SEQ ID NO: 139315 - DNA, 122 bp, Homo sapiens
gcccggccgtggaagatgaaaacaggaaagagcggacgggagaaataaagggggaaacggcgatgtggagccccaattgctagcagatggcgctggtattaggaaaatgaaaatacatgcag

SEQ ID NO: 139316 - DNA, 122 bp, Homo sapiens
ggcatttcctgtgagcagaatcatgctgtgtttgcccctttgtgtctggcttcttccactcggccccgtgttttcaaggttcctccacgttgcttcatgtgctagtgtttcactcctcttcg

SEQ ID NO: 139317 - DNA, 122 bp, Homo sapiens
cgtttcctacaggggcagtgcgtttgcgtttcaaattcccgttgattgtgtcgcagcccgcgtggtcccgagctccccggcctgcgcctgcacggccgcgggacgcccgcttgcatttccgc

SEQ ID NO: 139318 - DNA, 122 bp, Homo sapiens
aagaaaatgaatagctgttcttctaacttcatcaatccaagactcataggtattttggaacgaactggaaattccttagttgagccaatgaggctcattctttttggatccctgagaccctt

SEQ ID NO: 139319 - DNA, 122 bp, Homo sapiens
tctctcctctaaaatcttgatggtttttcgtgcacacagaataaaatctaaactccttagcgagaccctccatgatctgaacttcacatcttgtaacgcctacccctcgcccgcaaaagcct

SEQ ID NO: 139320 - DNA, 122 bp, Homo sapiens
ccctccccgcggcagcctggccgagtccgcccagcctgcctaggacgtccctgacccgcgcgctcagtttcattcagtggccgtgggatgttgcatctgagtttttcctttaggccaaaact

SEQ ID NO: 139321 - DNA, 122 bp, Homo sapiens
gttaggaggctgagcttattcttgtggggagcccggagaacccagccctgggagccagcacgggcacaggacaaggctgcacaggccaggagccggaggctggcctggcccctcacccagca

SEQ ID NO: 139322 - DNA, 122 bp, Homo sapiens
ttgcggacgcaggggctggctgaagggcccaggagagacaaagtttaagaagtggagactcgtcgctcttaacaatccttaattcctgggagctgttatatcttggcttcctgctcaggtca

SEQ ID NO: 139323 - DNA, 122 bp, Homo sapiens
gaaacaatacatctgaacgttctggagttgaattaaaccatctcaatgccggtttccaaccgtcctgggcttctctctgacgctcagcgaagggcgcgcatcacggcatcaccgctctcagg

SEQ ID NO: 139324 - DNA, 122 bp, Homo sapiens
agtgggttacctcacactgctacgcggactctaatgttggccacctgggcgtctggaaaccggccggaaggccacaggcagagaggcctgctcaacagttggatctctatcgcctagcacag

SEQ ID NO: 139325 - DNA, 122 bp, Homo sapiens
agaggggacgggaactgaaattattgagcatgcggggcactgcgctaaacaaagggcagccgcgagagtaagaggctgggatgatataggggcagatgaagggcacaggcatggttgggcca

SEQ ID NO: 139326 - DNA, 122 bp, Homo sapiens
gcaggtgttctggaaatgacgtcgttaccaccgctgggtctgtggcggtttgtccgcaggcgctggtgttctggaaatgacgtcgttcccgccgctgggtccgtggcgctgtgtccgcaggc

SEQ ID NO: 139327 - DNA, 122 bp, Homo sapiens
ggcagaagtagtggtcgcggcgcaggtgcttaagcagctcatcattgtccaggtagcgctcgtcacagaacttgcagagcgggtgcccacggtgcgacgtgtcatcggggtcaccctgcatg

SEQ ID NO: 139328 - DNA, 122 bp, Homo sapiens
tattattatctgcttgcagggaacttacaaactagttaagaaagcagttgagatttagagcgtaacaagataggatagtatgcgccagattgtggggtgatcctacagggcttccctcacct

SEQ ID NO: 139329 - DNA, 122 bp, Homo sapiens
ccaggcgcttcagagctgtttagaagcgtccagacgccctccagtggtgggcctgcaatccgcacccagcaggggcattgcctgccgctcaggccgggttgaatttgatgggaaatctaggg

SEQ ID NO: 139330 - DNA, 122 bp, Homo sapiens
caaccactgtctacacccctatgtgccaggccagctgccctggccattgaaggtccattacggaccattaaagtgcctggagactatcccctggcctcaactggcacagccatggtcctcag

SEQ ID NO: 139331 - DNA, 122 bp, Homo sapiens
gggtccccagaaggagcttagtttgctgctgaatcctccccaccaccccagaaaaaaaaacgtgtggttagtggataggacctgttctcccatccagcagggcatcccaagggagcagatat

SEQ ID NO: 139332 - DNA, 122 bp, Homo sapiens
cccatccttgcaccccgcgctgtccccggcggtctggcctggcgtctggagctccgggagcgcctgtcctcccagggccgatgccagcgcccgccctccgcgttcccggcattgacagaatg

SEQ ID NO: 139333 - DNA, 122 bp, Homo sapiens
cacctcatgtaccctctgtttttggtgaggcagtgtggatggatgaatccaccttgctcccgaaacacccccaaatctgtcccgcccgggccctggactctggctcctaaaatgccaccact

SEQ ID NO: 139334 - DNA, 122 bp, Homo sapiens
attcttcaaccatcagcagtaattagttggcttttagcttttgggcaccagacaatggatcgtgatccatagtggctatcatgtgggagatgaggctgcaggtgaaaggtgaaaggaacttt

SEQ ID NO: 139335 - DNA, 122 bp, Homo sapiens
ctgggaaggaagagggaacgggtcctggcggtgctttgcaaagggcccgtgtttctgttgcgggaagctcccgggggtcgcacgtgcgtccgagcccaagcccctcccctccactccccttc

SEQ ID NO: 139336 - DNA, 122 bp, Homo sapiens
gggactcctaaactctggaagtcgcgctagacctcaggaggccggaaaatgaccacctggcgtcggtggctccagcagatctgagcccctaggccccctgggctccacgctgagccgcgctc

SEQ ID NO: 139337 - DNA, 122 bp, Homo sapiens
agagggcaggcggcggccgggcgcgcaggctgccgtcccggggcggggccgcgctcgggccgccctccggtaatgattaacgtccccagccagggacgcgctcggcctgcttgcttccagca

SEQ ID NO: 139338 - DNA, 122 bp, Homo sapiens
aaaacccatccagtttcttcatcatattttaagtggcttaatggccatttaggcccaactcgtttgggtggaactcgatccaggtttttccttttcagaaaggccaagaaagataacagatt

SEQ ID NO: 139339 - DNA, 122 bp, Homo sapiens
ctttatctcctttagcatctccttcagcctttctcttgggcatggtggccgcggcgatggcgacggcggcgggacgtaggtgctggacgcgggacacagcggcgcacgggctttggtcggtc

SEQ ID NO: 139340 - DNA, 122 bp, Homo sapiens
caccagagtcagtagcgtccccagcaacagcaacgtggtggtgggcactactaacgcctgcgccccctccgcccgggttggcgtctgcggcggcagctgtaagaggtgctaggaggctgccg

SEQ ID NO: 139341 - DNA, 122 bp, Homo sapiens
cctccggtccctgttttcctcatgagcattcccgttagcaggggcttctcttccattttccgcctcttccacaacttccttcttctcccgtaagtccttggtggtgatttcggagctggtgt

SEQ ID NO: 139342 - DNA, 122 bp, Homo sapiens
cgtggaactcactactggcgatcgcggacgccccaggaaggcgagtggcacgaggtgtggcggggctgccacaggcagtcacggagcacccgctggtgccaggctcacccctcagatacagc

SEQ ID NO: 139343 - DNA, 122 bp, Homo sapiens
aaataccttcctcgatggccttttaaatgccttagggatggcaccatgtacagattgcatcgcctgagtgtgcaggggcagagactgattgcagaaggcggcaaggctgatgagcaagacaa

SEQ ID NO: 139344 - DNA, 122 bp, Homo sapiens
ggactattgagaagtgcagatgggtttgatgggggcagaactctgggtacaatggagggccgcttctctgcactctgtttggagcactgtcgtggtgtggtagacaccagggagcctgtact

SEQ ID NO: 139345 - DNA, 122 bp, Homo sapiens
tatgcgaaattttaatttgtgatgactaaaagcactaaagtggtgactctttgggtagaacgtaaaaacgaacggtcctcaacggccacaaggcgccccttctaggagtggtacctcccagg

SEQ ID NO: 139346 - DNA, 122 bp, Homo sapiens
tggcttgtaatcttgtggagtaaaagaggagcagagaaaatggaggtaaaagaaagaggccgaatggcttaaacttgtctggggcttgagttaagctgggtcagttgttcaggcttcattac

SEQ ID NO: 139347 - DNA, 122 bp, Homo sapiens
ttgtggtggtggtgcgtgtctgtctgtcagtcagtccctggccgtgcggctcctggcacgcgactcccaggcactccagttaacgcgaagctgcttgtggttcagtggctgcgtgtctggca

SEQ ID NO: 139348 - DNA, 122 bp, Homo sapiens
accgcttggtctccctgcagctttaacagccctgacatggaaaccccattgcagttccagcgcggcttcttcccagagcagccgccgccgccgccgcgctcctcacacctgcattgccagca

SEQ ID NO: 139349 - DNA, 122 bp, Homo sapiens
cgggcagggctcctgtcagagccaaaccagctcagggcccagtgcaagcagcttctgtcccgtggcacctccgctagtcgccgctcccacccaagccctgccccgccctgacccgctcaggg

SEQ ID NO: 139350 - DNA, 122 bp, Homo sapiens
ctagcctcccttgctggttttgaatctccacctcctctcccctctcctttcccgcacccacgaaactcccagagtggaagcacatcactgacccaccatggaggcctgggcatgacgtccct

SEQ ID NO: 139351 - DNA, 122 bp, Homo sapiens
gtctcgaactcctgagcttaagctatctgcccgcctcagcctcccaaagtgctgggatttcgggcatgagctaacatgcctggcctcttgcacttcatggttgtacttcagatcttattggg

SEQ ID NO: 139352 - DNA, 122 bp, Homo sapiens
ggagcttcgttccgtggggttgacgttactgaacgagtccctccacgggtgcactgaggacgttcctgcacatcgagggcaccctcagagctgctctttctgtcattgctattttgtttata

SEQ ID NO: 139353 - DNA, 122 bp, Homo sapiens
ggcaccggattcgcaccccgggccgggggcgggctgggggcggggcctcccaaccggccccgccccgaccctggcggagccttaagggcagaatcccactggagagcaggagcgcgcgggat

SEQ ID NO: 139354 - DNA, 122 bp, Homo sapiens
ctcaggagagtaacggagccagctgtgggtgtgaacacgcatttatttacacattgtcatcggtaggcacatacccagcccagcccgttgaagggacagatctcaggctgtcacccatggaa

SEQ ID NO: 139355 - DNA, 122 bp, Homo sapiens
tgctaggctgtccagacactttccagaaccactgagtgtctcatgatggcagccactacccgcatggagtaaaacggggttcagcttccagcttagcaagttttcgaaaactttttggtttc

SEQ ID NO: 139356 - DNA, 122 bp, Homo sapiens
cggcctcagaacactgctctaccacacggcccacgctcgctcctctagcccaggcgcagccgattcgcattctgcacatgccctgtgcttcgtggacatttagcatccatggcttccgcctg

SEQ ID NO: 139357 - DNA, 122 bp, Homo sapiens
tataaaacgcttatgttttctcaagttgaaccacccagcagtgatgccatgatgcatgcacgttcttcagggcctgaaccttcttatgccttgtctgataatgagggctcccaacacatctt

SEQ ID NO: 139358 - DNA, 122 bp, Homo sapiens
tttctccttctcctctgctctctggtccagaatgaagccagcctggaagatccccagtctcgagacagagcctgacaggggcagatgcactggaaggaccctgtctgggtttagcaaccaag

SEQ ID NO: 139359 - DNA, 122 bp, Homo sapiens
taaaacaaatacacaatcaaagcctacacatattccaaattccctgggtcatggcatgaacgtgctgcagagtcattctaatctcagcacctttcccatttcttagcctacactgaacatcc

SEQ ID NO: 139360 - DNA, 122 bp, Homo sapiens
gtcttaaactttccccttcctcacagcctgtgcctcatttcagagcagctccactttgagcggttttatttattgggtgtcaaataagatattgcagggaaaacatgtccttaaaagtctga

SEQ ID NO: 139361 - DNA, 122 bp, Homo sapiens
tcattcatttaacttgtatttctcagcttacagaagctacccccgatcccttcactcatgcgcccattgcagccagcaaccacctcactctgacctctgcttccatattcacatcttcttct

SEQ ID NO: 139362 - DNA, 122 bp, Homo sapiens
atctttccttcttcctgtcgatttagtaaacgtattccaggtaactcgccgggtgcagtgcgtattaccccagggtgtgtgcagagagatgtagtttccggcaggtataggaggggtgcagc

SEQ ID NO: 139363 - DNA, 122 bp, Homo sapiens
ccttagggaagggcctcagattcggagatcagttgagcttgcacaaagtgaacattgagccgcaggcgctggggggccaaggggcgtccagagcagagctgtcactgttttacattcacctc

SEQ ID NO: 139364 - DNA, 122 bp, Homo sapiens
ttgtccaatcattactgggacgttctccgcgtggatagcgctttctgtccaataatcactcggacgttctccacatggatagcgctttctgtccaatcatcactcggacgttctccacatgg

SEQ ID NO: 139365 - DNA, 122 bp, Homo sapiens
caccgctgaacttcgggtgccggggaggagaaattgggctgatgtgagctccccgtcacccgccatggagccggctgtgtgtgttcatcagatacagttctcccttaaccttgtcctttctc

SEQ ID NO: 139366 - DNA, 122 bp, Homo sapiens
agcaggttcctacatgggtttcacatgaggggatttcattggtgcaaaccctgtgagaaccgttcagtaggaggcaattctgaccccaagtgcaggagggagggacaggaggttgggcaggt

SEQ ID NO: 139367 - DNA, 122 bp, Homo sapiens
cggagaagctaagacaagggcaccggagccgcgtccttccacacggagtttggaacacgtcgagaataacgcacactgaaacctcgccgtgcaagacccaagcggtgaccggcacacggtac

SEQ ID NO: 139368 - DNA, 122 bp, Homo sapiens
tctctgccatgacttttgggaaagtgatcatgttcccggtgttctgaaagtttaaagagacgtatgcaaagagatgaggttttagcaatcgctccagaaattatcccatcacatagtgtagg

SEQ ID NO: 139369 - DNA, 122 bp, Homo sapiens
gccactccccggaaccagacaggctggagagcttcatgccagcattttcctaagatgtgccgagtttaattttaacacagtagacagagcagggccatcatcagtgccgtcgggcacccttc

SEQ ID NO: 139370 - DNA, 122 bp, Homo sapiens
acttgttgccgacgatcttgccacaagtgaagcagcgtacagggatgatcatggcggcggcgcgtcccagactgcccggcccggcccggccgcacgcgaagaacccccccaggccccgcccc

SEQ ID NO: 139371 - DNA, 122 bp, Homo sapiens
acgttcaccgtttcacgtaaagaaagccctcgatggctcctctctggcaatctgaattgccggcatcaccgctcctgcaccttggtgccattttcaaggaaaatacgggttctttgaacaca

SEQ ID NO: 139372 - DNA, 122 bp, Homo sapiens
caaagagagagagcgaatcaccgggctgcgggcgcgccgcggccgaggcgggggccggggcgcgcagcctggctccaggcggctgcagctgctgctgctgctcaggacttaaccttccatcc

SEQ ID NO: 139373 - DNA, 122 bp, Homo sapiens
ccggtttcatcttcctcctcgttgtaattgtttcatgaccggagtcaatgctagaggccccgaggaatgcaggaaagcaccagccatcaggacgtgttgatgagacacacactgtctgggac

SEQ ID NO: 139374 - DNA, 122 bp, Homo sapiens
ctgagtattaactcttttaaatgtaactcagatattattttttccagaagaccccactgccgctaggttaggtgctttcttctgtgttttcatagctctttgtacatctcagtcattatcat

SEQ ID NO: 139375 - DNA, 122 bp, Homo sapiens
accttgtgcaagttacttcacccctgggtgagtcagtgtcttcattataggagagaaaaacggaaaaggtcccacctcatagggttatgaggcttaaatgagcttagcatttgcctggcgtg

SEQ ID NO: 139376 - DNA, 122 bp, Homo sapiens
tgcccattcatcttgtggtagaggccacaggcattgcacaggtagtggccggtgccgtcccgccgccagagaggggtggctgtggccccacagttgacacactcccggccttctgcagggga

SEQ ID NO: 139377 - DNA, 122 bp, Homo sapiens
acaaagtgagaccctgcctctaaacacaaacaaacaaaaaataggccaggtgcagtggctcgtgcctgtaatcccagaacttccggaggccaaggcaggtggatcacttgaggtcaggagtt

SEQ ID NO: 139378 - DNA, 122 bp, Homo sapiens
cagtttgaaagacattgagatctaaacacggctctgcccaagacctctgccaagcagcgccgtctgtctgtctgtctgtctgaagggacgggaaggtggagaaactgcaggtactgacctgt

SEQ ID NO: 139379 - DNA, 122 bp, Homo sapiens
tacaaccaagccacattcaggacagatcatatcaccggctctgtagtcctccactaaaatcgcatctggatggtttggacatgtgactcttggaagagcatccaaactaaaagaaaaaagtt

SEQ ID NO: 139380 - DNA, 122 bp, Homo sapiens
gaaaaactgctctctaattgtttcctcaggcttgtttaacagatttgagaaagggtcatccgacattgatgtttgagagtgtcctttgaaaaagagtggcaccttcaacacttttctggttt

SEQ ID NO: 139381 - DNA, 122 bp, Homo sapiens
gcgtctccggctgctcctattgagctgtctgctcgctgtgcccgctgtgcctgctgtgcccgcgctgtcgccgctgctaccgcgtctgctggacgcgggagacgccagcgagctggtgattg

SEQ ID NO: 139382 - DNA, 122 bp, Homo sapiens
ttgcaaacaatgctgcaatgagtgaccttgtacatatatacacttttatactggtgtaggcgtttctccagagtaaattcctacctgtagaattgctgggtcaaggggtaaatgcatatgta

SEQ ID NO: 139383 - DNA, 122 bp, Homo sapiens
attgggcaccatgcgctgtgctagatgctctacagacctaactgtcctcttcagtcattgcgaaagcgttagcaatggtcgccattgaccagctctatttatgagtagaccaaggctgggaa

SEQ ID NO: 139384 - DNA, 122 bp, Homo sapiens
ggcatttagcctcaaaagcatgtagtaccaagcacttgtatttccgtatattttgtttcgcgggggagtgagggggaagaacacggatgaaaatgtcagtttttgaagggtccatgcacatc

SEQ ID NO: 139385 - DNA, 122 bp, Homo sapiens
tcttgcgtttattctttcaacaaatatttattgaatgaatgcctagtttgttacaggtaccgcgcttctcgcttcagatacaaagatgaataagatagtacctgcactgaaagaacttagta

SEQ ID NO: 139386 - DNA, 122 bp, Homo sapiens
cactgcaaccggagacccagagtataccatctgcccacggaactcatgcagtggggggcacgggagaaacccccacatctcagagcctggcccaacacccggcccaattcctgccttggaag

SEQ ID NO: 139387 - DNA, 122 bp, Homo sapiens
cagggacctgggccatgtgggtcacttgaggccagccccgggggccgcgcacaccggaggcggcctcggccctgcctgcccttgagtgcccttatatccgggcccatcgtgcggtcctggcc

SEQ ID NO: 139388 - DNA, 122 bp, Homo sapiens
aaaagaaagatggggtttaataaagtggaaaggatcttgacaagtgagatattctggatacgttgatacaatcaaatacgacgaggctagagagtcacctgcttggggattaaagttctgag

SEQ ID NO: 139389 - DNA, 122 bp, Homo sapiens
tcacaatgtcacctgtgtgttgggcttttataagacaccctcagtgccacttaagggcttcgtatggtatgcatgacaaacctgttctgagaccttcatcatggtataaacccatgatcctg

SEQ ID NO: 139390 - DNA, 122 bp, Homo sapiens
ccgtcccttccacccccgggcggggacccctcccagcgacccggccagctctcagcacttcggtccccactggcctactcgctccgacggaggggctcctgcaactgcgctgtaccgtaaat

SEQ ID NO: 139391 - DNA, 122 bp, Homo sapiens
ggctcacgcaggcttggtaggtgagaggttttcctgaggatgatgaagttggagtgtccccggctagaatccctgaggcaggagactggagccctgtggcagcattggctgagagaagccac

SEQ ID NO: 139392 - DNA, 122 bp, Homo sapiens
gaaaccaccctgggctacatagtgagaccccatctctattattttaaattaacaagaaaacggagaaaaattcattcatcctatgccattggagttttggatacaagtgtgctaaccagggg

SEQ ID NO: 139393 - DNA, 122 bp, Homo sapiens
ggtgggctaaccagaaggtgccaggctggccgcttagttcgccttaggtgggagaaggggcgccccacctgccccagtgccccgagcccagccctggtttcttcaccgcgctttccgctcag

SEQ ID NO: 139394 - DNA, 122 bp, Homo sapiens
attctgacacctgactcttcctggtgccgcccttagttggttgtctcttactgaaatggtcgtgtccctgggtcttcatatgatgagtgattcttaactgtatcttctctcaagggttttca

SEQ ID NO: 139395 - DNA, 122 bp, Homo sapiens
gaactgcagctcatcattatagctgcgactcatggtggcgaaaactgtagcaaaaactcccggctccgctttgaagagccgctgccgcgtagtccggcttctcagagcaccgccttccaaga

SEQ ID NO: 139396 - DNA, 122 bp, Homo sapiens
agtatttctcggacttgcggctgatgacaaggcacagcagcctgggaattacacaatctccgctcttacgcatttcttaatcattcactggatacagttgcatgaatactttctgttcctgt

SEQ ID NO: 139397 - DNA, 122 bp, Homo sapiens
acacactgcaagaccacaacttctctaactgtgcaggcacatattaaagtgattaattctcgtagttaaacatgttgcttccctgcagttctaaggctctacattttattgaagtcctaata

SEQ ID NO: 139398 - DNA, 122 bp, Homo sapiens
ggcgatcagctgcagaggagccctgcccgtggacccgggatttgtggggggcacttctgccgggcggggggtcggtgtccaggtgctgcagggcacagggtgagtgcccattgtgcccttgg

SEQ ID NO: 139399 - DNA, 122 bp, Homo sapiens
ggacagcgtctttaatccccggtgccggtgcggggatcagggcaacgtggagtgagacagcgaagggatggcgccgtgagccctcagcgcggggagacacacgccgggccggggcgccagga

SEQ ID NO: 139400 - DNA, 122 bp, Homo sapiens
ctcgctcccaggtctcggcaccgcctctctcgccttcggccctcgccctcctctcctccccgatctgtccaccatccggccctgaccctcccagattagggccgctctgtttctctcttcag

SEQ ID NO: 139401 - DNA, 122 bp, Homo sapiens
gcgctcccgggggccccctccctgctccggggtgcaggtggcaggctggggagcacagcccggttggaggcggtaggagcccgctcgccccccacccgtcactaacttgcagattgcagggc

SEQ ID NO: 139402 - DNA, 122 bp, Homo sapiens
agacttgaaggaaggagttcaagctgagaggggctggggacaggcaggcgccaagccggtcgctccgacagatcacccccgccaggcgcctagtggttcatgccgagcatccggtgggtggg

SEQ ID NO: 139403 - DNA, 122 bp, Homo sapiens
atctgaaaaccaggacttagccatgcttgaagctaggaatacccccggatttatctgttacgtaaatcaaattatctgttaccagagttcccctaagccagtttgagcctctatcccttaca

SEQ ID NO: 139404 - DNA, 122 bp, Homo sapiens
gaagctggaatactgccctgtccctgacacctgctggggtgttctggcggggcccggaaacggaagccctctcctggctttgttgggtttcctggggaaggcggagctggtccacgggtgac

SEQ ID NO: 139405 - DNA, 122 bp, Homo sapiens
cgtgaagcgcatcttgtatattgctagttgaatagagcccaattggcgagttataggaagcgctcactacctgtcttttgtcatcaatgtttgcagctgcaacaaaaggctgggcccttctg

SEQ ID NO: 139406 - DNA, 122 bp, Homo sapiens
gacagaatcagaatttgcccagcaagcaggtgagtcatttctggacttgagctggcttcacgtaaatcctacgggcatcagagcccgagccacacatgtccccggcccaagtccagggaagt

SEQ ID NO: 139407 - DNA, 122 bp, Homo sapiens
tgcaagaagagaagccctttaaggtctgggtcgccgggacaccccgctagggccccgccccggctctgccctcacctctcgcagccagacccgcgggtctcccggaacccacctcggcgtcg

SEQ ID NO: 139408 - DNA, 122 bp, Homo sapiens
tttagcaggctcagaccacgcatctaaaaagactgttatccgaaaagtgtgtgtgccctgcgtgtaagtcatgacgtaataataagatgagcagttgagaatctgcaccctaatctgggtgc

SEQ ID NO: 139409 - DNA, 122 bp, Homo sapiens
cggccgtggctccggcgtcggcgggggcagcagcagctgaggcagcagctgaggcagccgcgacggccgcgcccccccccgctgacctggattaggcccagcagctccgtggccgccgccgc

SEQ ID NO: 139410 - DNA, 122 bp, Homo sapiens
tgagtgggggtggcagagcttgggaaggggggaggggagaggtcagagccaaaccacccccgcagctcctgacagaaccagaaattccagcgcaaccgaggaggcgggagagaaagagagag

SEQ ID NO: 139411 - DNA, 122 bp, Homo sapiens
tgcccgctgcggtcgcccatgccgggggctggcggggctgtgcgcgggccccggctcaggcggcctcgctggaggtcattctccggcgtctttatttccccggatcctccctgcggcttccg

SEQ ID NO: 139412 - DNA, 122 bp, Homo sapiens
tagctgggactacgggggcatatatgcacccaacttgaaaaagtattatcaaatatttcacggttataaaaactgtatttatatataattatgtgtttaatatataattacacataggtttt

SEQ ID NO: 139413 - DNA, 122 bp, Homo sapiens
aagctgaaactttgtcatcataaaacttcttcattgcaaacctgtcaagggcctggtcggcgctgaaggggagagagagagaaagagagttaactcagtggagcccacaccacgtgggtact

SEQ ID NO: 139414 - DNA, 122 bp, Homo sapiens
ggggtttcaccgtattagccaggatggtcttgatctccttaccttgtgattcacccacttcggcctcccaaagtgctgggattacaggcatgagccaccgcgcctagctgagtcctttttaa

SEQ ID NO: 139415 - DNA, 122 bp, Homo sapiens
aggcgactccagcagcgtccgcggcgccgcggtcgacataatcagcacccactgcgcaggcgcaaacagcccaaggctgcggccggctgcaaagcgggaacaatcatttacagggttgctgt

SEQ ID NO: 139416 - DNA, 122 bp, Homo sapiens
tgacctaaaaattgtcccgggcagcaggtctgttgaaagcagaagccatcgagagccacccgtggccctgggctgtcgcgcccccgagcagagtccggcttgctgaggggacccaggacacc

SEQ ID NO: 139417 - DNA, 122 bp, Homo sapiens
gtttcccgatgaaggggcggccatggcagctgcgcagaggcaacgcaggctgctacggagcgcgcgcccggctttgaatgagcggggctgggagtgagcgggcggagcgcgagctcgaggaa

SEQ ID NO: 139418 - DNA, 122 bp, Homo sapiens
aataattattaagtttgctgttacaatcctctctctctctgtgaacaacccctaatgatgcgtggctttgagagcaaaaaagtcagggcaaagttttgccacaaagtccagagggcaagaca

SEQ ID NO: 139419 - DNA, 122 bp, Homo sapiens
agggattgctgaagctatatcaaaagtttatataacctggtggctgggcatggtggttcacgcctgtaatcccagcactttgggaggcccaggcgggtggatcgcttaaggccaaggggttc

SEQ ID NO: 139420 - DNA, 122 bp, Homo sapiens
cgaggccgctggccaaggcctcttaggtctattagcttatgggccccgtttgtctgctgtcggctcccctcgcggtggttctgctgaagcagcctggctgccggcccggggacaccctgcct

SEQ ID NO: 139421 - DNA, 122 bp, Homo sapiens
ctgatttggacagaagcgcactgccttcctcactgagtctttggtcacagcagtcagccccggcctctgtgcagggggacgctctgaacgtccttactgtgcttgtgtgtagggcttggggt

SEQ ID NO: 139422 - DNA, 122 bp, Homo sapiens
cagatcgccgccctggtgggcgctcctggccctgtcctccgcgcttagtttgtcattgggcgcccagatccggaaccccagcctcgaagcttccggtggccgggaacaaagccggttttgct

SEQ ID NO: 139423 - DNA, 122 bp, Homo sapiens
gtagctcctcgatctcccggatgtagttctggatcagcgcaccaatggcctcattgccatcgcctggagtgggacggcgggaagaagggtgcgataaagaagataaataggccagcgcggtg

SEQ ID NO: 139424 - DNA, 122 bp, Homo sapiens
acatcacaaatgatagatggaaacaacccaccatgtgggaatcggcaagaacaacaaaaccgagaaatgactccaaaatgtccacaaatattaaaacaatgtggaaaagacaacaagctgcg

SEQ ID NO: 139425 - DNA, 122 bp, Homo sapiens
ctggaaggaccagaaagcaggcgagcagaccgtggaggacagccattgcgcgcacttctgcgggactcgggccactgctgcgcgcacccgcgcggatctctgccctaccaccttcccgtgag

SEQ ID NO: 139426 - DNA, 122 bp, Homo sapiens
ttcgtgtgttcgagtccctgggttgcttcctggggtctgtggtgctgggtgtgctatctgcgtgtgattctctagcgagagattgtgggcgagtgaccgagtgggcaaggggccgtcactgt

SEQ ID NO: 139427 - DNA, 122 bp, Homo sapiens
aggtcagaattccagggagcagattgcttccttctgcagcaaagaaaagaaactgtcaaacgcccaaggtgcttccagaggttttacgtaataacaatgaaaagaaagtgctgatgtacgat

SEQ ID NO: 139428 - DNA, 122 bp, Homo sapiens
ggcccccttcacgcggggcagatcccactccatcaccattgacttcacgcacccttgccacgttgccctgatcagaatttggaactacaataaatctcggatacattccttccgaggcgtga

SEQ ID NO: 139429 - DNA, 122 bp, Homo sapiens
tacttcggcttttacccttagtgagatgggaagtcattggaggctcttgaggagatgatacggaagctgtagagaggttaaatagtttttccaaggtaaaacagcttgtaagtggcagaagg

SEQ ID NO: 139430 - DNA, 122 bp, Homo sapiens
gtcctgtcagcgatgggttacgagagctggagccggggggcgggactgggaccgagttaacgaagtggaaatgaattcaggaccggcccagtggccctgcaggcagcgccgaaggcggcgcc

SEQ ID NO: 139431 - DNA, 122 bp, Homo sapiens
caagagaggggggtggggggcaaagctggctcagtgtctcttggctgtcccgtcccgccccgctgcccaagcctggggatggccggggcagcagcaggtctaggagcgggcaggaaaagggc

SEQ ID NO: 139432 - DNA, 122 bp, Homo sapiens
gctgcagaaggattacgagtcggcgtcgctgacagaggtgcgggctctgctgcggaagcacgaggcgttcgagagcgacctggcagcgcaccaggaccgcgtggagcagatcgcagccatcg

SEQ ID NO: 139433 - DNA, 122 bp, Homo sapiens
agaaagcgtttaaagagcacagaacaggcaccgacttgacaaggcggggtgacactttctcgcggcgggtcccctccgcagcccgctcccgcggccagcccgacggcaagacgcaagtctag

SEQ ID NO: 139434 - DNA, 122 bp, Homo sapiens
gttcctgcctgcctcttcagctttattccagtcttcctcttgcttactaccctccagctgcgctggccaaaagagttgaactttttaaggaattgaccagttaataaggaatcagcctcatg

SEQ ID NO: 139435 - DNA, 122 bp, Homo sapiens
agtcctgcctctgcccgtcctgcggcagagagtgggggctccccagcgccatctggcggccgcacagcagcacctcggccaccagaggcttccagccaagcggcccgcaagtgcctggacaa

SEQ ID NO: 139436 - DNA, 122 bp, Homo sapiens
tccggatacagacccaggcttctatgggctggctatgtcccctatgacccctgctgacctcgccccatctgctgactcatattctcctgcccagaacccccctccccgggacccggccccag

SEQ ID NO: 139437 - DNA, 122 bp, Homo sapiens
ccgaagctgttcgggcagtgtccgaacggcttcggaggggcgagaagccagcatccgagccgcctctccggaataccagcagcctgacgcacgcgtgctgtcgggggagggatgctgggaca

SEQ ID NO: 139438 - DNA, 122 bp, Homo sapiens
gtcccccaaacaacaagctacagtacaaccaggtctatggttttcgggccgggccggctccgggccacaagaccgcctaggtcggccgctgccgggtttcacatttctccttcccaaggtgg

SEQ ID NO: 139439 - DNA, 122 bp, Homo sapiens
ccgccgcaccacgtgggctgcagagcgcacggggcaggcagctgccggtgggcccagggccgggcgctgcgcggccagcgtccgtgcgtgcgtgcgcgcgcgcgcgtgcgcgtgcctgcgtc

SEQ ID NO: 139440 - DNA, 122 bp, Homo sapiens
accagacggcggtccaggacaacgtgaaggtgtcgctggccttcgggctgagcatcgccacgctggcgcagagtgtgggccacatcagcggcgcccacctcaacccggctgtcacactgggg

SEQ ID NO: 139441 - DNA, 122 bp, Homo sapiens
accgttcacagattggttcgaacaggtatgacgtttacatagcgtgtgaggaaggctgttcgcctcaccctaatcttattatgcaaaagagctttccagatgatcggtgccatcttctctgc

SEQ ID NO: 139442 - DNA, 122 bp, Homo sapiens
ttagagccctgtatacctctcctgcccccgcctctccgcccccacatcctggcctcccaccgcccccgatccccgccccgcagggatggaccaatgagaccagatgagaattcctggggcta

SEQ ID NO: 139443 - DNA, 122 bp, Homo sapiens
taaaaattaaaattcgtttttgcaataatgacaaatgccctgcacctacccacatgcactcgtgtgagacaaggcccataggtatggccccccccttccccctcccagtactagttaatttt

SEQ ID NO: 139444 - DNA, 122 bp, Homo sapiens
ctactttttttttttttttttgagacagaatctcgccttgtcacctaggctggagtgcagcggtgcaatcttggctccacctccacaacctctgccccaagggttcaagtgatcctcccacc

SEQ ID NO: 139445 - DNA, 122 bp, Homo sapiens
cctgaggctccaagctggggaaccagcctggtctccagctggaaaaaatgcctggccagacgctttctcccgaacgggggagctaatgcccgaggcgttctctggtggcgagggcagccacg

SEQ ID NO: 139446 - DNA, 122 bp, Homo sapiens
gcgctgccctcgatgtggtcatgaaggaatggcataccacaccagacagatgcgttcagccgatgaagggcaaactgtcttctacacctgtaccaactgcaagtgagtattctttcccctcc

SEQ ID NO: 139447 - DNA, 122 bp, Homo sapiens
ggaagattctgtctctatttttttttaaagggggtgggggatgaagagatgaagactgagcggttgtggccgcgttgccgacctcaagcagtagttggcttctccacgtagaacccgggagt

SEQ ID NO: 139448 - DNA, 122 bp, Homo sapiens
ggtagaccctcagtgagcccagaagaagatggcgcccactgcccctccggtccggacaaacggacgtacggtttatctgcccatgcgctctgcaggcgcaacccaccaccaagcttgcgcac

SEQ ID NO: 139449 - DNA, 122 bp, Homo sapiens
tgttgtcaaatacttccttgaagaacatcatggaaaatgcgtacatttgggtaaaagggccggtggaaggggtgagctcgggctgcggcagcacatgcaccagacttttttcttttacattt

SEQ ID NO: 139450 - DNA, 122 bp, Homo sapiens
taacattgtttttgctacagaccatggatagcaactcactggtctagtgtctaggcatgtcgatgaccatggatttctatggacaccaccttgagcagctggaagagattctggtctaacct

SEQ ID NO: 139451 - DNA, 122 bp, Homo sapiens
atccaccgacgtgattcaggttccgtgtgacatgtgctcgaatgtgcatgcatatgcgtgcgtgcgtgtgtgtgtgtgtgcgcgcgcctcactccatgcagttttatcacagggcgtttttc

SEQ ID NO: 139452 - DNA, 122 bp, Homo sapiens
ccctgtctctgccgggctgggactccgcgagtcactcacctgtaggggaggtccgaggcccgcgcgggcgcaggggcggcgcctgtctcctcccagagcatggctcagctgggcgcttgcag

SEQ ID NO: 139453 - DNA, 122 bp, Homo sapiens
gctgccgccctcctgggctccggggcctgctccgggacggccgcaggaggggttcattcccgggcctggctccccgcaggtggacaccaccgagcaattgaagaggatctcgcgcatgcggc

SEQ ID NO: 139454 - DNA, 122 bp, Homo sapiens
tttgggaggtggtatctgaaacccacaaaggatgttgaaggatgggttgctatagaatttcgccagattctctagaagggacattgtggcctttgagtaccttggccgtacttattggttgc

SEQ ID NO: 139455 - DNA, 122 bp, Homo sapiens
gccttaggctggccccattgtcactgtcttcccacttgagggtgaccacactgttacaaccgaaaagagccctgtgcaaacttgtgaatgggaacctgccagggaatagatgctattgctgg

SEQ ID NO: 139456 - DNA, 122 bp, Homo sapiens
caaaccctcatcctaagcaactcacagctcagatttcttctctggacagctggcttttttcgtccttctgaaatactctgcaaagataggagaggggctatgaactacctctgctatggatc

SEQ ID NO: 139457 - DNA, 122 bp, Homo sapiens
ggcggggaaggggagctgggggcgggcactggggagccaccacccggcgggcgcgggagtcgcaggagcagcggccgcagtggccgcagggtgcccggtcgccgccccctccgcccgcagtt

SEQ ID NO: 139458 - DNA, 122 bp, Homo sapiens
gctgaccccttatattccccgagagtataaagagatcggaaataactgattaaacaaatccgccactttcatgactagagatgaggaagaacaagggatagttctgtaagtgttcgggggac

SEQ ID NO: 139459 - DNA, 122 bp, Homo sapiens
cgctgaggccccgcctggccatgcccattggcggaggctgccccgggggcggggtcagggcgccccattcccagaccccgcagccccgcccgccgcgggtgcgtgtggagaggcccaggtga

SEQ ID NO: 139460 - DNA, 122 bp, Homo sapiens
ccctttcccacattatatcttagcaatgatgagctacttcaaggtcaccacccacacaagcggctggaccctggtgggcctctgcaaaggctgttccttgcctgtaacacctttcccatctt

SEQ ID NO: 139461 - DNA, 122 bp, Homo sapiens
cccctgcccctcgggagggagctccctccgcggtgaagtcgggtcccttgcaggggaccgcgcctgagctacccaaggcccagtaaatgcaaccatagaggatgatagggtcgctaagaatt

SEQ ID NO: 139462 - DNA, 122 bp, Homo sapiens
atagtgtggtactggagcgcatcgagcaggcctgtgacccagcctggagcgctgatgtggcggctgtggtcatgcaggaaggcctcgcccatatctgcttagtcactcccagcatgaccctc

SEQ ID NO: 139463 - DNA, 122 bp, Homo sapiens
ttgaccttcagaagctcttgattgtgactcttcttcatatgtcgagtcaggtgatcctttcgcccaaatctctgtgcacaatactgacagaggaagtcctttcttccagtgtgcaccaccat

SEQ ID NO: 139464 - DNA, 122 bp, Homo sapiens
gaactgtgatggagccaggatttctttcctgaagtcgctcccttgatctccacacaggagcgcctgtttctccagtctctagcacaggtccccagcatgggcccctaggaagcctcttccct

SEQ ID NO: 139465 - DNA, 122 bp, Homo sapiens
gaaggccagaggtgaggggaccatcctttccccctgccttgggaatgctgggtgagctgacgaacgtggagcagttcatcaggcgtcctggtggtggcactgcagggcctttcgaagggagt

SEQ ID NO: 139466 - DNA, 122 bp, Homo sapiens
gaggagcacctcttcctggccgccatcccatctgggaagtgaggagcgtctctgcccggccgcccgtcgtctgagatgtggggagcacctctgccctgccaccccgtccgggatgtgaggag

SEQ ID NO: 139467 - DNA, 122 bp, Homo sapiens
agaggatctacagatatctgcggtagacacgcccacgaagtcgcctctgtgcctacctatcgggtcctgtgaccacaggcgacctcagtccccgaaccatctttgcagcttctcaaacgcac

SEQ ID NO: 139468 - DNA, 122 bp, Homo sapiens
gtctcggccgactcctgcgggaaacgactgtaaatccacattactgttcgagctgccgctcgggcccccgcattgctctcctccggctgctggcagcggtgctctaaaccggcggccgccgg

SEQ ID NO: 139469 - DNA, 122 bp, Homo sapiens
accccagcttcgccatctacgaaggaagcggcctgtccgagctctgaggtccgtcaagcgcggcacctcaggacccagagtgcgctgtcctggcccctctgcagtaggactgacgggaagct

SEQ ID NO: 139470 - DNA, 122 bp, Homo sapiens
aagctgcttgggggctcataggagagggatgaaaccaagagtttggctttccagcaacagcggacaaagagtgggaaggggtactctatgccccaggtctgcaacatcttgccctatgcgct

SEQ ID NO: 139471 - DNA, 122 bp, Homo sapiens
ccagggaccttccctcccacctccctcccatgctgggctcctcactggctggagccagcccggagccagagggcagcggccctaaatgcagcccccacaggtgggccctggacacagagcag

SEQ ID NO: 139472 - DNA, 122 bp, Homo sapiens
cggctcgatgacaggtctgagggaggccccagaggcggcgggaaggtggcccgcagaacgcgggttctgtaaagacacgtggagaagattcgattccgagaacaggaagaggcggatggaaa

SEQ ID NO: 139473 - DNA, 122 bp, Homo sapiens
gagcgcaatggggcgtggcgcccggggaggtccggcttggggctgggctggggagcgcggcggctgcggctggggcacggggcggccgggtgagctggccggcgctcgctctctccattcag

SEQ ID NO: 139474 - DNA, 122 bp, Homo sapiens
gggggaagggtagatgctaggccggagataggaacagctccagtcaagtgcaggcccgatcgactaagaacttaaccagagcccgcggagcaaaaccaatgtaccaacaagaaactcggagc

SEQ ID NO: 139475 - DNA, 122 bp, Homo sapiens
ggcggcggagcggggccccgctgtcgggccgagggcgccaggtccggggggcctcacccccgggaaaggcccatgttcaggcttggtttcagtagcacccagtagcgctgaagtcttatttt

SEQ ID NO: 139476 - DNA, 122 bp, Homo sapiens
aaatggcgcgctcggagacggggcggcggcggctgggctcccggggtcttgcttgcggggcggatcccttccactgcctcccgccaacgacaacgtgttggtttttgccctgccttggccgc

SEQ ID NO: 139477 - DNA, 122 bp, Homo sapiens
ctactgtcagtagtaagctggtggaaccctccatgtatgagattttcacttgtcagttaacggttatggcaatattaaaaccaaattccattttttgcctatcctaacactttctaccactc

SEQ ID NO: 139478 - DNA, 122 bp, Homo sapiens
ggcctcgtgttttctcttgtcctcctgactggagttccagttcttaccttgcagatggtgcgcttgtcaccctctgccgtctccacagcatctgggccgggtccccccaggaactgggctct

SEQ ID NO: 139479 - DNA, 122 bp, Homo sapiens
gtggcggggggtaaggtgggcccttccccaaacggctctggggcatggagaggtacagaacgtcctccgggttcagagtttccaagtgcgtgcgctggttgacgcctgaaggagaccaagca

SEQ ID NO: 139480 - DNA, 122 bp, Homo sapiens
atctcgactcactgcaacctctgagtcctgggttcaagtgattcttttgcctcagtctaccgagtagctgggattacaggcacctgccactacacccagaccattttttgtatttttagtag

SEQ ID NO: 139481 - DNA, 122 bp, Homo sapiens
tagggaccctcctaccaggttgcagatggcttaattcttgctgcatcatcacgtgaaatgcggcaggagactggaagaagaaggggagaatgagagagatagagcaagctctctggtctctt

SEQ ID NO: 139482 - DNA, 122 bp, Homo sapiens
tgaccatccaattcacagacctcattcagaatttgccaacatttcccatcaatgaatttccgatcagtgtttctttttttccttctttccttccttctttccttccttccttccttgtttcc

SEQ ID NO: 139483 - DNA, 122 bp, Homo sapiens
gagggcaaatcggcaaagatgatgtagcacaaagagcgccattaacaccataaggtgtgacgtgcacagcggggcctccgccagcctaatactgggcacggctttaaggcaccgtcaaccaa

SEQ ID NO: 139484 - DNA, 122 bp, Homo sapiens
gcttggtttcctgggcgaccaccgctggctagtccgttagaggcgtgcgggcttcggaggcgtgcgggcttcgggtgccatggggactcctcccggcctgcagaccgactgcgaggcgctgc

SEQ ID NO: 139485 - DNA, 122 bp, Homo sapiens
gccccggcccgcccactgttttccttggtgcgtttctctttaaatgcaaataagtgcaggcgtggtgttggcagggggcggagagggtgcggaaccactggctggggctccccactcccgcc

SEQ ID NO: 139486 - DNA, 122 bp, Homo sapiens
ttcgttaatttgctagtttttggactgagtaaaacagcccccaaagacgcgggcaaacgccgctctaaagcccactaccatgcaacgccaggttgctcggagccacgctggtggcacttccc

SEQ ID NO: 139487 - DNA, 122 bp, Homo sapiens
accagtagaggatgctaacaaaaatgattattggtgtggtagcatcataagtctctctatcgactgtgctgattgggaccttcagtataattctgagtcttattgttacttaaaactagcct

SEQ ID NO: 139488 - DNA, 122 bp, Homo sapiens
tcctcctctcaccagcaccatcatcatcacggccatcaggccatcatcattcccttggttcgtcaccattctctctcctggattattgcagtactttaatgaggttcaatgcttttgttctt

SEQ ID NO: 139489 - DNA, 122 bp, Homo sapiens
gctctccgtttctctggacctggatggaattgttttactttgcatcgccggactgcgctgcggacggggtggggcggcccaatggcccccctggggttactctgctccccttcacgcttccc

SEQ ID NO: 139490 - DNA, 122 bp, Homo sapiens
tacaggctgctgggtagctgacttccccaagaagggctgctgccatgtgatcaggacccacgcccctgacatcaacccctcccccgtgttccagagcacggagcagcccggaactctgcggc

SEQ ID NO: 139491 - DNA, 122 bp, Homo sapiens
tcgccgatctgagggattcggagcttccccagctggggtgagcctggcgttcccgggcggcggcggcggcgctgggctaggggagcccgccgctcctccaagccggtgacaggggagctgcc

SEQ ID NO: 139492 - DNA, 122 bp, Homo sapiens
ttaaatgtattgtgttgattctgacaattctatgaagtaggaaatgtggagacatttatccgaagagagaaagtgaactacctaacaaaacagttaggaagtggtgggatcccaggtcggct

SEQ ID NO: 139493 - DNA, 122 bp, Homo sapiens
actctatgacgttcacacggcgttgaaatcgctaaacatgcacgtgtcagaacatttccccgtagtgacacctcacgtgactgcattggtacctctctcatagtgagtcagtgcgtgttgga

SEQ ID NO: 139494 - DNA, 122 bp, Homo sapiens
agtcgctactcaagatgtagtcattattatgagacatgtgtttaaaaacatattttctaacgttcctttttgaatatgcacttcagaggtgtgtgtcattgtggctaaccagcattagcatg

SEQ ID NO: 139495 - DNA, 122 bp, Homo sapiens
cggggctgaccgagccatattcgggcgtggccggtggtgattggtgagggcggggcctgccgcagggggcggggcctgcaggtttggcccccgcagggagcgcagctggcgccgctgggagc

SEQ ID NO: 139496 - DNA, 122 bp, Homo sapiens
aaagaagcgaaccaagtcaattctcaggcagaagcagcggagattctccgcagccggcagcgcccagggcgcccggaacccagagagcgagaccgcgtgaaggaagtcccgccccgccccgt

SEQ ID NO: 139497 - DNA, 122 bp, Homo sapiens
ggaccagcattgaccgtgttaggcacacaaatctaattgccccctggttacttaccaacccggtggccgtggctcagctactgcacacacacaccaagttcctacacacctttcccctgctt

SEQ ID NO: 139498 - DNA, 122 bp, Homo sapiens
atccacccaccttgggctcccaaaatgttaggatgacaggcgtgagccactgcgcttggccgggaaggattctttatctttgactaggagtgcttgatgaaacaccggggctggggaagggg

SEQ ID NO: 139499 - DNA, 122 bp, Homo sapiens
gcccgcactctcacagggcgcgtatacactcatctgcatggactcacatccacaaggatgcgcgtgctcctgtgcccacaatgacacgcagttctacacacacatccccaggaccggcggca

SEQ ID NO: 139500 - DNA, 122 bp, Homo sapiens
ccagcgcagccgggtcaagaacatcttgcaggaggtgcggcagggccgcctgttcatgatcgacctggctggctcagagcgcgcctcgcaggtgaggctgggacctgggctgggcagaggag

SEQ ID NO: 139501 - DNA, 122 bp, Homo sapiens
gtgctccggttggcgcactgattcccagttgggtaggggaggcttgactgagctcccacccggaatttcaccttagacctttaaagaccttgctccggcctcccgcgccagcgctaacacct

SEQ ID NO: 139502 - DNA, 122 bp, Homo sapiens
ggtatatttctgggactgactagcctgagcagaataaaggtatgctgaaagagaaatgcacgtaaagcatccagtacaggacctggaaaattctcttattcgttcattcgtcacatttaatt

SEQ ID NO: 139503 - DNA, 122 bp, Homo sapiens
gctcggacctagcacaagtacagaacgtagtggctgcaggctcggccgtgctcctaacagcgctgacagctggattggcggacgcactccagcatcactgtcaggaattaacacgttcccaa

SEQ ID NO: 139504 - DNA, 122 bp, Homo sapiens
cccgctacccaccgagcatgcccctccaccaccgaggagcggcctggggcagcccatccgcggcaccctcggggcagtaaatattatattactacagggtgtgcagtacgtgacctgagaca

SEQ ID NO: 139505 - DNA, 122 bp, Homo sapiens
ctacattgagagtatggaaggtgcgggagacggccgtcacgtgacgcggagaaggcgcggcgcccgtgggaggttggttgcagaactcggaaccgctgtgcgcgcgcatgtgtgggattcgg

SEQ ID NO: 139506 - DNA, 122 bp, Homo sapiens
aaaaagccagagttgtgtggattaaaaagataaacgaaaaggaatgctttcacttttcatcgactatggtatcagtgctggatctgtgctttgccatgaggaacttcacagctgaaagctca

SEQ ID NO: 139507 - DNA, 122 bp, Homo sapiens
attatcacattggtaatcttggtcacactggccagaacgttttctcagagaggaaacctccggtttttttgtgaggttttgattctgggcatctgctttaaggtgggagaggtttctgactc

SEQ ID NO: 139508 - DNA, 122 bp, Homo sapiens
gtgccctggctgacgccctcctcacccgggcgctcggcgcgcttcctggcagaggccacgcggttgaccctcgccagcccattcgcggctcttggactttgtctctggactgggcagctcgc

SEQ ID NO: 139509 - DNA, 122 bp, Homo sapiens
cccactactctttgccccacctctccactctcttgcccgtgtaggtgccggtgctgctggcgaaagtcccagttcttaaggctcctgagctcggaaggggtgtggaggagccagatgggaag

SEQ ID NO: 139510 - DNA, 122 bp, Homo sapiens
gcacccactaccctgcacgcagcacacttccgcctggcatcccagcggagtgttctggctcggagccttccctgtgtgcttagacctcctgtgtacctcagtcacttaccgtaagtttccag

SEQ ID NO: 139511 - DNA, 122 bp, Homo sapiens
agaagagaataagctcgaaatctaaagagcaggttttgcgttgctgctatgctcgggccccgggcttatataagccggcgctgccctgtgattggtggagcgtccaatccaccgccctctgg

SEQ ID NO: 139512 - DNA, 122 bp, Homo sapiens
ttagtgaaaggaattttcctgctttataaatataggatattttctcatgaaacaagttggcgtactctttcagtgaagggactagaccgattaggtctctaaaatgttaaaggagtcactgc

SEQ ID NO: 139513 - DNA, 122 bp, Homo sapiens
accttgacagttaatgttggattacacctggacttggtaccgcgctgtggtatccaccaccgttcggagggtttaagggagcagagaaggacaggctgatgaacacaacatcgttcatgttt

SEQ ID NO: 139514 - DNA, 122 bp, Homo sapiens
ccagctctgagagaaaaaatttctgttgtttcaagccatcacatttgtagtaatttgtgacgggatcctcaggaaactaatgcaatatgtaatgggtttattgtttattttaaatgaattat

SEQ ID NO: 139515 - DNA, 122 bp, Homo sapiens
agccgcctctggacctaggctcggtgacacctgcacggccggtgtagcctggagggcgagcgcgagcagagctggctatgctgggttaactgcacgcccctcgggactgtgaccgcttggaa

SEQ ID NO: 139516 - DNA, 122 bp, Homo sapiens
ccctctcccctgggctgctgtgaggctggagacaggctgcagtaaactccacctttgtgtcgccggcgccgtgaaccctcaaagcaggctttcgcgtaagtcccgacggtctgtcctcaccc

SEQ ID NO: 139517 - DNA, 122 bp, Homo sapiens
cacagcgagcagatctgtttttattacaatgcagtttccatccaggaccttgactgagcccgtgggcatcatgctgctcgcgttgtgccctacctctggcggtcacggggacgtccaggcac

SEQ ID NO: 139518 - DNA, 122 bp, Homo sapiens
gaggtgtagagggagaggcgcggttgggaaccggggctgggtgcgacgcttgtgagccagcgcgaatgccagatgggcatgggcttggtgggccccgcactcagagcggccagtcgaccccg

SEQ ID NO: 139519 - DNA, 122 bp, Homo sapiens
gacccatcttcgtgaaggaagacctaaatcctcccaactcccaggggtggccctccagtacgaaggctgaaaacaaggaaccaagaaacagaaccacatgacacagggctctggtttctgaa

SEQ ID NO: 139520 - DNA, 122 bp, Homo sapiens
acccgacccgcctaccttctccctgcccctggtgagcttgtgcagaacccgagggcacagcgtcttttgcgcagaaggcgcaccgcgcgaccagcaccttgttgagcagctgagggccttgg

SEQ ID NO: 139521 - DNA, 122 bp, Homo sapiens
ctggagccaaactaacttaattccaaatcctgatgctgccccatattaattctgtgaattcgggcaaatgacttagtttgtctaaacctcaattatctcatctataaaaggcagctagatct

SEQ ID NO: 139522 - DNA, 122 bp, Homo sapiens
acgggcgggtgcccgaggccctcgtgagctgggattgggggaaagcaagcgggctttgggcgggagtccatctctctggatccctacaaggacccagaagagagtcgggagcgagagaggcc

SEQ ID NO: 139523 - DNA, 122 bp, Homo sapiens
cagagcaggtccttgggtcatgccgcaacacctcagggtcccctctctgcccctgggccccgcaatgccacctcccaggaggacgggccccttcacctagaaaccaatagcatcagaaagaa

SEQ ID NO: 139524 - DNA, 122 bp, Homo sapiens
cgaggcagcctctgctcctctgtaaccagattccagccttctgtctcagagccataaacacgaaaccactcaaggtctatctaggaccctgcaactccaggaccagcacatgcagggccaca

SEQ ID NO: 139525 - DNA, 122 bp, Homo sapiens
gccagcaggcgacgcctaaaacttctccatcctccctgttggcagctttatgcctggctacgggaaaacaagctcctgagacaaaggatgggaggaagccacagagcgcacctcgcacagct

SEQ ID NO: 139526 - DNA, 122 bp, Homo sapiens
cccgcgctgctagcgggtccaccgcgtcgtagccgacagccgcccttcttcctcgcagcgcgccgcgattcaccagcctggtcccttctgcggagagcgatgccgcttcccgacaccatgtt

SEQ ID NO: 139527 - DNA, 122 bp, Homo sapiens
tctcgacgcaggggacgcccacttgtctgacgcaggggacgtggctgaagtcagtcgggccgcccgcttgctgcacggcagccgtgggactggcacaggctcctcggcagcattatgggcag

SEQ ID NO: 139528 - DNA, 122 bp, Homo sapiens
acggaatttgccttgagtgcgcgggcggccagtgagcctttaacttcttgtgctcagccccggcctgccggcgcggagcacggcggcaggaaaccattctcttctcccattgggagcgcgac

SEQ ID NO: 139529 - DNA, 122 bp, Homo sapiens
cggctcagccgtgggctctaacgcggggctgggggccggagacagacttcgcccaggtgacgggtagtaggggcggcgccgcttggcctcgtggggtgtaagacccacttgctgttgccccc

SEQ ID NO: 139530 - DNA, 122 bp, Homo sapiens
ttcgtttcccaccacatccctccacggaccttgttttaggcaatgcactgacccatgctccgatttttagaaatttctaaaagcctggaaaggagccaggaggaggccgggaggaagccctc

SEQ ID NO: 139531 - DNA, 122 bp, Homo sapiens
gtgcaccaagtaacaagtcctgtgcttaaatgcgtgctcagatgaaaagcggggcagtcgcggcccgtagacagcgggcggctgggtcagaccgcagagggaagtttccagcggcaagcctc

SEQ ID NO: 139532 - DNA, 122 bp, Homo sapiens
aactgtctttttaggcaagaaactgagcccactaaatagattcagttttcactcttttcccgcttgatggttttattcattcaccatttgcatctctttcagatagactgggtggtattgat

SEQ ID NO: 139533 - DNA, 122 bp, Homo sapiens
cagttcttaaggtaaattatatagcatagcgcctctcagctctgaattcagaaaccaatacgatggtaaagcagagagtgttcaatttttacattgtaatagggtatagtagacatgtgcgc

SEQ ID NO: 139534 - DNA, 122 bp, Homo sapiens
ttggcgacggccggtgggaacacgccctgcgggctccgggggcggggtctggtcgccacgcgctccgcctcccgcggggtgcgccttcagccccgcccgcccccgcccctcctcggcggcac

SEQ ID NO: 139535 - DNA, 122 bp, Homo sapiens
agagagtgggttgaggaaaaatgaagtcctgagctggtcagcccaggcggaagagccacccgaatccaaccccacagtgaatagggaaggggctgagaaaacaacaggagggatgaggatta

SEQ ID NO: 139536 - DNA, 122 bp, Homo sapiens
tgtacttgtgtctgcctttcttctttactccacccagaggaaaatgcatctcagtaagtgcgccttctagaagaccattagagtagcttgtgactctctaagctgcagaggtgaaagggcca

SEQ ID NO: 139537 - DNA, 122 bp, Homo sapiens
acacccgggagccctgcctggcttcagctgcccgacatccctcgggagtcagagcagaggcgcacacggagggctccggcctccagagcgtggcccagcggccgcaggggaaggggcagaaa

SEQ ID NO: 139538 - DNA, 122 bp, Homo sapiens
tgatttttctttatccgtgattctactcagcccatattttgtacctttgactggttggtccgttttctagtctgcccctttcagtcccagtggaatattcaagcttatagtaaagaatgaaa

SEQ ID NO: 139539 - DNA, 122 bp, Homo sapiens
ccgggcccgctcccgcagctcccgggtgcgctgctccaccaaatgctcgtagttctcctgcgcacggcccaaactggcttccagcgagctccgcaggccctctcgctcctggcgctgctgcc

SEQ ID NO: 139540 - DNA, 122 bp, Homo sapiens
cgaagctgactggggggagcagcagcagtgcagcaggtggagctgcgaaaggggagctctcggggtcctagacaagcaccccgagtctggggtctccaggtgagcccctgcaaggccagcct

SEQ ID NO: 139541 - DNA, 122 bp, Homo sapiens
ccgggctgtgagaaggcggatacgaatcccagcagggcaagcgggcgtctccttggccctcgctccaagaggcgcacaagaaatgaagccgctggcagcagaaggtgcaggaaagtggacag

SEQ ID NO: 139542 - DNA, 122 bp, Homo sapiens
tgaaacaaaactgtgatgacatccctaagcttcctccagaagagcttcgacgtggagaaacggggtggacgctccacctaaccgcgccattgggaaaagaggaggcacctggagcagaagct

SEQ ID NO: 139543 - DNA, 122 bp, Homo sapiens
ggaaatacggacgatggacgtaagggggtccgggacactggctgggctcgaggagtggcccggacacctcccttggggccccaattcactcctggccgagttgcatccttgagcccgcgtgg

SEQ ID NO: 139544 - DNA, 122 bp, Homo sapiens
ggtagtaggtcatataggggcatctgagcccctgctgctaagtgagatcacattatttatcgtccataccattacttcttgtgaacagtaacatgtcactcctcctggcaggaaagtttctc

SEQ ID NO: 139545 - DNA, 122 bp, Homo sapiens
cacccggaagagcctggcgaaccggaagggcgtccaggtaaaaaacaggaacagcacatgcgcagaaaggcccccgggccgcctttcccggggctctcccgggccccccgccggctttccgg

SEQ ID NO: 139546 - DNA, 122 bp, Homo sapiens
gtgctgggattataggtgtgagcacctggccttccacaaaacatttaaaaataagccaggcgcagtggctggcacctctggtccaagctactcaggaggctgaggcaggagtattgcttgag

SEQ ID NO: 139547 - DNA, 122 bp, Homo sapiens
ttcacccacacgccccttcttgccttccttctgagggagcgcctccgagtcaggtgattccgtcaggcttaaggagaagaaggcgggtcttcggcagggcgggtagaggggacgggcatcaa

SEQ ID NO: 139548 - DNA, 122 bp, Homo sapiens
acgctgctcatgcgtggagcggccgcaggaaaggtactccccgctaaggccttcagggagcggccctttgccctgtgcgatctcttccttcctttcccacgggttgccaaatcctgtgacgc

SEQ ID NO: 139549 - DNA, 122 bp, Homo sapiens
ggagagccaggcgggaaggaggcacaggtgttccagctgccgcacactcaccagtaatggcgacggccgagatggggcccacacgcttgccgtggtgcagcccgtagagcagcagcttgtac

SEQ ID NO: 139550 - DNA, 122 bp, Homo sapiens
tggggtggggaaggggagtggcgcggccctgcggggtgaggctgccgtttgctgagtgtccggcaggggtctgctcgctgccagcccggcccctcctcagagcagctgccgcagcccgaggt

SEQ ID NO: 139551 - DNA, 122 bp, Homo sapiens
gtagggccagcaggcagcaccaaagttcccgtatgcgcgttttcagtcttcatttaggtccgaattcccggcatataagaatactaccgtcgcttgtttttcagatttttgcggctattttc

SEQ ID NO: 139552 - DNA, 122 bp, Homo sapiens
ctaaacttaggggtgaggtacctgatactttcatcggagaaataggatggaatctagcggcgccccctagcagggttaccaaagaacggaagtgtttctcatcggacagtgtaaaccgtttc

SEQ ID NO: 139553 - DNA, 122 bp, Homo sapiens
agcatgtgcaaccaagccagagattgtgtgagggcctagtggggtgttcattgagacaggcgctgtgggtagaggcttgttttggcattgatagtttctgaccccatctcccctaccccagc

SEQ ID NO: 139554 - DNA, 122 bp, Homo sapiens
tcccatggtgagtccgagcgggcggggcgcaggccctgccgtctggcgcttctgtcgagacgtcggctttccaacctggcaggacccaggacgcattgctgcctgtggaaattaattttctt

SEQ ID NO: 139555 - DNA, 122 bp, Homo sapiens
tgtacatacctaatttcaaaattattgctaaaaaatgctaaggattatctgagccttcagcgagttgtattctttttgctcatggagggtcttcctctatgtagttggctactgactgatta

SEQ ID NO: 139556 - DNA, 122 bp, Homo sapiens
gtgcagagaggcgatttgtacaaatgggtatgactgggttttccttgggcggagaagagccggctggcctgctgagaagctggcttcctactccggtggacgccatgctggaaagggtcagc

SEQ ID NO: 139557 - DNA, 122 bp, Homo sapiens
gcacaagcagttcaggcaccaaattgtgctgattggatttaaaggtatctaccacagggacgatcacaaatacaccagaaagattctgccagcactttcaggtgatatttcccaaggtgata

SEQ ID NO: 139558 - DNA, 122 bp, Homo sapiens
ttacaagatgattcagagaaactgaaaacctatgctactgaggccacaccactgacttcccgtaacttacttcttctccctatccttcccgcccaggactagcttttgaatgcctgtgactt

SEQ ID NO: 139559 - DNA, 122 bp, Homo sapiens
gcgggtgggaggtgggtggggaggggggcctggggaaggatggagcccgctgaaggcaggcgatgacgcaggcccagtgtacttctcctgggggctcctttctaggcccacggaagctccgt

SEQ ID NO: 139560 - DNA, 122 bp, Homo sapiens
taaaaggacatgggttgggatttgggaacacgtttattccagaggcaggaacaaaggagtcgcttgtcaaggatctggttagagaagactagggtcttcctcgaaggaagcacgcgcacgcc

SEQ ID NO: 139561 - DNA, 122 bp, Homo sapiens
ctccgagagtgcgcctttgaaggagatcctcctggaggggccggcggagcagctcagcctcggggcacaacatctgcctgctccaaaccctccaccggccccgctgagctccgagaggactc

SEQ ID NO: 139562 - DNA, 122 bp, Homo sapiens
taggcgatagaccacgccttcctaatcagcgggcgcattccctgacttttgcggaaatagcggtccaaaaccgcgtctagcattagcaaaagcacgtggtctccgtctccccgcaacaacaa

SEQ ID NO: 139563 - DNA, 122 bp, Homo sapiens
gggccgcactcaccatgagctcgatggtcttgtcctcaatcaccgagtcgggctccatggcggccccggcggccccgcctcgctctccccgcgcagcagcgaacggcccgggcggaggaggc

SEQ ID NO: 139564 - DNA, 122 bp, Homo sapiens
ggtacgccaggatggaggcctgcagcagccggtacagcaggcccaccttcttgttcttggcgatgacatacttctcggtcttgtagtcgaacagcgacaggcagagccccttgcagcccgcc

SEQ ID NO: 139565 - DNA, 122 bp, Homo sapiens
gcacagagaaaaccaactcactgaggccagggcattgcaataaagaaggagtttaactgacggaggagactgagctgtcacccacagccatctcacaaagacttggagattagggattttcg

SEQ ID NO: 139566 - DNA, 122 bp, Homo sapiens
ctaacataaagatgtctctgaacctaaaatactcccccaaatcacactcagttctgtcctcggaggttttccagggacattgagcaacttacctattttgcagctcggagcttccccatccc

SEQ ID NO: 139567 - DNA, 122 bp, Homo sapiens
gatttggaactacagaagatagctgagaaattcagccaaaggggctgactgtcattggagcggtgggcactgttaagaagcagccatcacatgatctgtttttcaccacttcactgaaagac

SEQ ID NO: 139568 - DNA, 122 bp, Homo sapiens
tggtgccaagcgaactttaaaaagctgcttcggacaaaccagagccaggatttccactgtcggggacccgggatcggaagggtctagcccgagggaaatgctggaagatcccatcggccagt

SEQ ID NO: 139569 - DNA, 122 bp, Homo sapiens
gttaggctaaaggagaaattttccatgaattttgtctctagaatgatgattaagagttagcgagagtcaagatttcaggcctgttagagcaaagccctaaggaaataagagttggaccctgg

SEQ ID NO: 139570 - DNA, 122 bp, Homo sapiens
acaggcgtgagccactgcacctggcccatctggttcttttgatgtggttcctgcccttatcgagccctcagcatagtctattgggggagggggtgacagacaaatgccatgtagaaccattc

SEQ ID NO: 139571 - DNA, 122 bp, Homo sapiens
aagtattcagacatgatcgtggctgccatccaggccgagaagaaccgcgctggctcctcgcgccagtccattcagaagtatatcaagagccactacaaggtgggtgagaacgctgactcgca

SEQ ID NO: 139572 - DNA, 122 bp, Homo sapiens
gggcagggggggatccgcagcccgggattggccgccgccccgccagccggtgacgcgaggcgggcgggcccctttgtgacgtcacaatcagctgtttgaacgttccaatttgtgccgtgagc

SEQ ID NO: 139573 - DNA, 122 bp, Homo sapiens
tctcggaaagtggggtgtctccagctcctccttccaggcctcttctcagccgtgaggctgcgctctgggcctcagtcccacccactgcaccgtcctccccaccgcggcatccatgccggccc

SEQ ID NO: 139574 - DNA, 122 bp, Homo sapiens
agaagcttttataggcagatagtttgtcagcccagctcgaaatgtgaacaaggtagcagccgagcccccacccatccggctgcactcccctgcatgtccagccccgagccctgtgtcaagca

SEQ ID NO: 139575 - DNA, 122 bp, Homo sapiens
ggcgcggggttaggccggcgtggggaacaaaggcacgagtgagaggcgggagggtcccgccgccaatctcagcagacagccccgaagagcagttcagcagatgccctggaaagttaatcctt

SEQ ID NO: 139576 - DNA, 122 bp, Homo sapiens
cggctccctccagcccccagaagggagaggagggctgggggggtagtcagggaagctccccgtcccccgacggctcctcccggctctggtccatggcgtcactgtctgaggcctcggagtcg

SEQ ID NO: 139577 - DNA, 122 bp, Homo sapiens
ggtggtcaatgggactgggcgctgtggagcagggggtggtgctcgtcggggaggctcaggcggcacaggagcccacggaggggatgggaggctcaggcatggtgagctgcaggtcccaagcc

SEQ ID NO: 139578 - DNA, 122 bp, Homo sapiens
ctcttgtgtgggctgcgtgtgcattgcttggtgagtgagggacctagagctgcctttgaacgctggagtccgaacctctgtcaggaaaagcttgggtcaccggcagttccaggtgctgagga

SEQ ID NO: 139579 - DNA, 122 bp, Homo sapiens
cccagccagaggccacttctaacctggggagacaggatgcgaaagctgctcactacccaccggcttttgggtgcagccttcaggcctcttgttccaggaggcctggaaaacgagcggggctg

SEQ ID NO: 139580 - DNA, 122 bp, Homo sapiens
ggcggggaggaagagtgaatggaggtcacccatcgaggggagtgtataagtcatccctgccggctacctctgcagctcacaggacacacgttcacctccctccctccctccttcccttccca

SEQ ID NO: 139581 - DNA, 122 bp, Homo sapiens
tccatctcccccagaaggtaacagtctggtgcagatccataaaaacgtgggaggaaggcgcgctggggagaggcctgtccctcttggaaggggccccacctctacatccgcaggaagagaag

SEQ ID NO: 139582 - DNA, 122 bp, Homo sapiens
gaagattgctaacaagcagttcacagctgttaaaaatgactacgagatgaccttcaataacgagacttccgtcatgccctgtgaggacgaccatcatttacctacggttcagtttgatttca

SEQ ID NO: 139583 - DNA, 122 bp, Homo sapiens
agcaaagtcttctctagggccaaggtctcccccaacatttcagagatggggaccccttgtcggaactgataccccagctaaattccagcttgacttctggaagggctggagactaaggtcag

SEQ ID NO: 139584 - DNA, 122 bp, Homo sapiens
gtccccacgcagcgcgttgcccaggagaccgcagggctgagctgcaggctgaagtcggcccgctgtgtttacgcttccgtatgtgttcaccctgctccaccccaggcccaggagggattcag

SEQ ID NO: 139585 - DNA, 122 bp, Homo sapiens
agaactcgaagaagttggatgtctgatcttcaccttggatttgtggtctcggcccgcgggcgactcaccccacccaccaggatcccacgaagccgggccggctcagcccgctggcgccatct

SEQ ID NO: 139586 - DNA, 122 bp, Homo sapiens
agtggtccctatcccacttctctctggggcggcgctgtagccagcggctgacaggcgcagcgaaaggcagccctctgctgtaaggaggaaaactgaggcctgggagcaggaacctgtaggca

SEQ ID NO: 139587 - DNA, 122 bp, Homo sapiens
cggccaagggggttccctgagctggtggagcggcgtggcgtggcctaggaagtccctgggcgagggaggcggggcgcggcgtggtgggggcgactgggtggtgcaggcctgcgcacgcgcgc

SEQ ID NO: 139588 - DNA, 122 bp, Homo sapiens
acacatgagtaaatacagagtgagctgagatgaagggtaaccttgaaaacagtgaagtcacgtgtatgctcacttagacagttaatggggttctgttgattggtacagaaataagtgactgg

SEQ ID NO: 139589 - DNA, 122 bp, Homo sapiens
tagtgttggacaaagcactggatcgggaggagcaggaagagctcagcttaaccctcacagcgctggatggtgggtctccatccaggtctgggacctccactatacgcattgtggtcttggat

SEQ ID NO: 139590 - DNA, 122 bp, Homo sapiens
caggcggcccaggagatggcctcgaccatggaggactgggacctgcacctccgccatcttcggcagccgcctgggaaagcacatctttttattgttctaatcgttaacagataaggaaagtg

SEQ ID NO: 139591 - DNA, 122 bp, Homo sapiens
ttccatgctgtacaagtacagctttcacacaatttctcttctgatcttcaaaacaatgcacggaggggtgtattattcctgtgtcctagtccagccaggacttcctgctcccctttcccccc

SEQ ID NO: 139592 - DNA, 122 bp, Homo sapiens
gaggtgagcgtccgccagcccagcttggctgctttcttgccaaaccccggggttcccactcgagcacagcggtcttggcctggccccgaacaggcctctgacgccaaggagccagccagaaa

SEQ ID NO: 139593 - DNA, 122 bp, Homo sapiens
gtccagccggggcaagaaggtgcggggtgtgctgccgcatgggccgttctggctgtagggcggttgcagggtctatagggtgggtggggagctgtgtgctgctgctgctgctgctgctgctg

SEQ ID NO: 139594 - DNA, 122 bp, Homo sapiens
gcctgttactataccagagttcacattgcacctagaccctgtgggccctaagactgtctccgggaccccaggtgcacaagctacctgtcaatatgtgactccaagcccctgcttccctgccc

SEQ ID NO: 139595 - DNA, 122 bp, Homo sapiens
tactccgcagtgcaacagtttgcagctgcctcttgggagcagcaaggaggctctcctgtgcgctgcgggtctaccggctccagtatgccggaaaagcctcggggcctttgggctgggtctgg

SEQ ID NO: 139596 - DNA, 122 bp, Homo sapiens
gctcgaaagagccggctggggtagaaggtgtaggcgcgggtcaggaactccggtcctgggcgcacctcgcagctgcaggggtggaaggagatgggctgggtgcagagggaacaccgcgccgc

SEQ ID NO: 139597 - DNA, 122 bp, Homo sapiens
aaatcacctgcaaacctattaagcaccattgacattttggtgtacgtccctctgtggtcccgttgctgcctgtctctctttctgtctctctctctctccatacttttccccaaccaaattag

SEQ ID NO: 139598 - DNA, 122 bp, Homo sapiens
caccgcactggacttatgtggccttatttcattcgtcctgtaaactttgttgaaccctaccgtaatgtgctgggcactgaaggtacagagaaagacatatcttgtcttcaagttgtgtacag

SEQ ID NO: 139599 - DNA, 122 bp, Homo sapiens
cctgagaaaggctttttctatgccacagagaagttgggctcccagtcacgggagcagctgcggccggttccagcagggggcagctctcaatgacagctgaagggcattgcatagccagatgc

SEQ ID NO: 139600 - DNA, 122 bp, Homo sapiens
taaggcgaagacagccatcttgggccttacccaggcagctgtgggcgcaccgcccacctacgccccatccgcaacagccacgagccccgccccccgggttccggcaggaggggcctctacca

SEQ ID NO: 139601 - DNA, 122 bp, Homo sapiens
caatggaaataaagtcctcccccctacacacgccactagagacaagattaaaagcgagagcgagagagaaaatgcttaaaacaagtcgctgagcagctcggagcctgttaaccagcgcataa

SEQ ID NO: 139602 - DNA, 122 bp, Homo sapiens
ccctcccaaacgccggacctgtaaggccagcagggtccaagacacacatcctttgcccagcggggaagattaaagctaaagctcagagagggaaaacatttcctaagctcgcacagcgaatc

SEQ ID NO: 139603 - DNA, 122 bp, Homo sapiens
cattccaggatttgatacccttagcagtgaagttattccggaatctgccctgactctcttcgcttattatttaagccctcgtaagccttgctagacatcagatgagtcgccgggacccctgg

SEQ ID NO: 139604 - DNA, 122 bp, Homo sapiens
tgctgggattacaggcgtgagccaccgcgcccggcagagatcaggttcttaagggaagtccggagaaatggggtttttaaaaaacccgagtccaggctatctgtttggaggggttgggaggc

SEQ ID NO: 139605 - DNA, 122 bp, Homo sapiens
atccgcgacgcccctccagctatacccatgccggaggcttgtcgcgccgccagggtgtcccgggccctgcaggctgaagcatttgctcaccttcccatgtgcattgcatattgcatgtccct

SEQ ID NO: 139606 - DNA, 122 bp, Homo sapiens
gactccggaacgccgtggggaaggcggggccgaagcccagccatcgccaacttggaggggcggggcagaaccagggggcggggcctgcgtggtgcgtgcgtgcgcgttctggaggaggcgcc

SEQ ID NO: 139607 - DNA, 122 bp, Homo sapiens
cacacaaaggtgactcttttggcttcatttcatctctctaagagctctgcttaacaaactcgttgctccaacctaaaaaatgaaggggcacttaaagaaaataagaccagcgagacagttct

SEQ ID NO: 139608 - DNA, 122 bp, Homo sapiens
agccggcccgggaggagcggctagcaggtcccgaaggcgggtgaggtggcaggcaggggccggcagggcagccgagggcctttcctacgtcatgccaagagggctgggagcccctagagctg

SEQ ID NO: 139609 - DNA, 122 bp, Homo sapiens
cacatggccaagcgcagcatcagcgcaggtgagagcgtgcatgagagttttcccaacagtcgcctaacaaccgaagtctcttatctcctggcccctttaatccagttccctatactacctgg

SEQ ID NO: 139610 - DNA, 122 bp, Homo sapiens
cgccatcattgattcgataggcgacgcggggagcggaagccctttacactacggtgtttccggcttcaagatggtcgcctaagctgtttagtgaaacttcttccacctttctccattcctct

SEQ ID NO: 139611 - DNA, 122 bp, Homo sapiens
aggccgaccccgcagggcccttcttgcgctcctctgcggtgtgtgggggggtctctggtccgcgagaggacagtccctgccgcgccgagcgtcctccagcgtccgcggccgccgcgagcagc

SEQ ID NO: 139612 - DNA, 122 bp, Homo sapiens
ctagggggcaaggtctacaggcggggctcctggaaataaagactccgagaggcggtgcggcgagaggaggggcggaagtgacgtcgtgtggggcgggtccgaccgcgcacaatgggccatgg

SEQ ID NO: 139613 - DNA, 122 bp, Homo sapiens
gcagagcagaactagccccaaacctgcccttcctgacccactgctccctccccatgcccacggggtactgcccttcctagttccggcttgaggggctccggcttcccactggcccacctcag

SEQ ID NO: 139614 - DNA, 122 bp, Homo sapiens
actgaggggacctccgctctccagaccccgggccgggggcaacagcgacccacagccgctcggacgcccaaagtcgcatcccacccggcagcccctcacgacagccgacagcgccgtcgcca

SEQ ID NO: 139615 - DNA, 122 bp, Homo sapiens
gtgttcctcatgctgagggtggccgtgcgcttcgggtgtttaaagaggaactccctgaggcgggaagaaacgtgtcagctgatgtgtcctctgtcaaggggtgcccccgtgacactgagaac

SEQ ID NO: 139616 - DNA, 122 bp, Homo sapiens
tgtcaaaggtctcacagccaagcatggcagacctggggataaatagatcactccagcaaccgcgcacagtggtttccaggactgaccccatcattcacagaggagaaacaagcccagagggg

SEQ ID NO: 139617 - DNA, 122 bp, Homo sapiens
ccaggtttatctcaccagagccattgggtccaatgatggcggtgaacctctgaaatggtccgataatctgtcgacccttgtacgacttaaagttctcaatctcaatcagtttcaggaacccc

SEQ ID NO: 139618 - DNA, 122 bp, Homo sapiens
ctggccaagtgccggcccatcgcggtgcgcagcggagacgccttccacgagatccggccgcgcgccgaggtggccaacctcagcgcgcacagcgccagccccatccaggatgcggtcctgaa

SEQ ID NO: 139619 - DNA, 122 bp, Homo sapiens
ctgtaccggactctcctggtgacagttttagtggctgcatatgtttgcagaagaaggaagcgtggtaacttggcaaacagctccaaacgctcctggcttgctgccacaggattgtccttgag

SEQ ID NO: 139620 - DNA, 122 bp, Homo sapiens
gccggcgaggtgcaggcccccgaacgccagacatccgccagccagcctcggaaggcgccccgcccgcccgccttcgccaaacacacaactgctcgggagacagtgacctttcctgtgggggc

SEQ ID NO: 139621 - DNA, 122 bp, Homo sapiens
ccctcccccgctgggggaggccatggcgtgagcgtgaggccgggccccggggccctcaggcgccagacggggcatgggccgggggccgcccccatgagggtcccgggagggggggcgcgggc

SEQ ID NO: 139622 - DNA, 122 bp, Homo sapiens
agtgaggggctgttctgaaaagaggtctgccgggaagaaactggctgtgcctctgcagcccgggagagcctcactctctgaggccacaaacaccgcaccgtcctgcttggggatattccagt

SEQ ID NO: 139623 - DNA, 122 bp, Homo sapiens
ctcccctccgcgtcctgctgcccgcgttctgtacctgcccgcgccccgctcctacgcgtgcgccactcctatccgtgccccgctcctagctaagcccggcccgtgcccactcccacccgccg

SEQ ID NO: 139624 - DNA, 122 bp, Homo sapiens
ataaacttaaggaagattcaaagaatcagggtatcttttcctccaaaaacacaaatgtcccgtgtaagtcaaaccaaggtgcgaccaccaacccatgaatgaagtcccctccccctgcagct

SEQ ID NO: 139625 - DNA, 122 bp, Homo sapiens
ggaatgcggttccccactctgcccacatacctctcctgcagcagcgctgaacaccgtctccggacgtctggagctatcaccatgggcaacactttcgtggtctttatttttagcttctcctt

SEQ ID NO: 139626 - DNA, 122 bp, Homo sapiens
tggagtccctcctccctcctcctacttcagcgccagaagcattgaaagccgcccgcccgccgagagtggaaccggtacctcgaatctcgctcattccgggtcaattggaggcgcattagcgg

SEQ ID NO: 139627 - DNA, 122 bp, Homo sapiens
gctctgcgcagggccgcccggggcagcgtccctggggtccacccctcatcggggtgaccgcgggcctgacacaacagacggctgggccctggcccacgatccgctcccggaggcgccctgcc

SEQ ID NO: 139628 - DNA, 122 bp, Homo sapiens
gccaacatctttctgctgtcctttggttgttctgggccccaaatttggcaagaggaatcacgtccagtgctcctgacttttctcaggaaaaggtggttagtgaaaccacctttgcaaaatta

SEQ ID NO: 139629 - DNA, 122 bp, Homo sapiens
cgagcagatgccccagcaatgtggagctccgcctcttgcaggtggaacctacttgtagctcgtcatgatgggaggctttttagtttctgcacattacagaggtgacactcttagggttgggg

SEQ ID NO: 139630 - DNA, 122 bp, Homo sapiens
aatgcagcagccgtaaagaacctctggcccactcaacacagccccagacccacagctctgcgcgctcagcgccacgtgtggacgctggagacccttccaagaagctaaaagctgagggtggg

SEQ ID NO: 139631 - DNA, 122 bp, Homo sapiens
actggtgctgaacccagtgggaagccatcagagcaagggatctgcaatagataggggcagcgtccatagggcacagagcagtgcagagaatagatcacagtggggacggtggaaatggagaa

SEQ ID NO: 139632 - DNA, 122 bp, Homo sapiens
ctgctctgcgcttctgcgtcctggcgggtgggtgaccagactgcgtgtcagacagacccacgccactgccccgtgtccgggtgaccttgagccaggcttgttccgtcgcggcgccactcatc

SEQ ID NO: 139633 - DNA, 122 bp, Homo sapiens
aaaacctccgcaggaggggcaggcccgcccccgtgtcctgctcccctccccagtccccgccgcgagtgccacttccccagtgacagggcaatgatcagggcgcagcctcggctcggatgggc

SEQ ID NO: 139634 - DNA, 122 bp, Homo sapiens
acaggtgacatacaggaagccccaggaagcatgaggttctggtcatagtaaacacccaaccgtactctgtggttatgacttcatctcctttgacttaccttgctctacacctactgacacgg

SEQ ID NO: 139635 - DNA, 122 bp, Homo sapiens
gctttatttccttggttcctctaagttgtaatctcggagttaaaaacagctttagaaccccgcccccccaaaaaaaaaaaaaaaacttttgagaatttttttcaaataaatgtccattgcat

SEQ ID NO: 139636 - DNA, 122 bp, Homo sapiens
gtgcgatgatgcaagggaggacttgcagcttcacagtgcagagcagttggagccctgagccgtcccgttgcaccgccgctctgtggccttccgctagtgggcgccgctgagcggacttcggc

SEQ ID NO: 139637 - DNA, 122 bp, Homo sapiens
aggtattaggtaaggcttatcagctgcctgtccgctttgtgcccccagggtggtccgtgccgccaggtaggcctttctcagccatcactgaaagcaagctctggaaatcagtagccccattt

SEQ ID NO: 139638 - DNA, 122 bp, Homo sapiens
tctttagttttcccatgatttatcacaagcaagttcacagcaggttaaaataattgaatgcggtgatagcatacatactggcatgattttatgagccgtcattcataacatatttgtcccaa

SEQ ID NO: 139639 - DNA, 122 bp, Homo sapiens
gtgtattataagaaatcaatttggaaggtgagatacaaatgcagtctgagaaagtaaagacgttttaaagacattttactgtgtcatgaattttcagagaccacactgacatggtaaaaagt

SEQ ID NO: 139640 - DNA, 122 bp, Homo sapiens
gtttgggaggagaagctcactcttggagccacagccagcactaggtcaggacccaggccccggcccaggagtggggcaatacccagcgtctaccccagatggcaccctgctgtgaactgggc

SEQ ID NO: 139641 - DNA, 122 bp, Homo sapiens
atggttctgtgggaagagaagggtgttcacaatgcacaatacacaatggtggcattatctcgacttcacagatgctctcctctgcaaaggctgggaccagagaaggatgggaaaggggccat

SEQ ID NO: 139642 - DNA, 122 bp, Homo sapiens
tgtgtttgggccagcgacggcttcccctgcactaccatcagagggttcgagcccctggagcgggaacaaccctccaggacgttagtgattgggcaccacatcccgccacttcaagggagcct

SEQ ID NO: 139643 - DNA, 122 bp, Homo sapiens
gtgcccagccagtcggtgacagagcagggattagagatggacccctgaggcttagccccacgctctcttccccaaaccctggggcctcagtcagcctctggtaatcccttctgtgcccaggg

SEQ ID NO: 139644 - DNA, 122 bp, Homo sapiens
tcaggctgcagtcacaaaagctgctcagcctggttgatggggcatccttgagccaaagtccgtcattaaaagagtctgtattagtaaagaatgagtctgtattagtaaagaatgagtctgta

SEQ ID NO: 139645 - DNA, 122 bp, Homo sapiens
ctcggtgttccgaggtatattcttgggaatggcctgcagccccgtgccgtggcagtccaccgtggttccggtgcaggtgcagagggcggggcacgccgaggcacccaggcgccacgcggctg

SEQ ID NO: 139646 - DNA, 122 bp, Homo sapiens
gtgcggccgtgccttggaatagcacgtcctgcggcctcagccgcctcttccgccatcctccgtaggctgcattctgccctagtgagcgccggtttttgagccttgctcttccctcgctaccg

SEQ ID NO: 139647 - DNA, 122 bp, Homo sapiens
ggcctataaataggagaggtggaatcagccccactgccagatcaatagggcccgtctcctcgccatttcagctgagctgtcttattaattatgaaaggattcacctgatccctgccagggaa

SEQ ID NO: 139648 - DNA, 122 bp, Homo sapiens
tcacttaaaaagaaaaagctctggagatggatagtggtggtggttgcacagcaatgtgaacggacctaatgcaactgaattatacactttaaaatggttaagtatacactggaaaatggtga

SEQ ID NO: 139649 - DNA, 122 bp, Homo sapiens
ttaatacttccttttcactgtcctccaatcctctgtcccctaaatgcaggcatgcatatgcgcacacagttgtgcacacacacacacctctcaaaatacctggtgccattagttcctcagtc

SEQ ID NO: 139650 - DNA, 122 bp, Homo sapiens
cgattgtccttcctaacgcctgactgaatcctgaggctagccttcagcgaacatgtacaccgccttgcccttcacgtgaagccgagcctgtgactacacttatccttccgtcgccggcctca

SEQ ID NO: 139651 - DNA, 122 bp, Homo sapiens
gtgtttccaaaaatccttccttcctgtctgagtgggggtccgcagggaaatgagaaggcgcgcatctctggcttcttgaagagctgtgagggaagggactatgacggtgttggcagcctcag

SEQ ID NO: 139652 - DNA, 122 bp, Homo sapiens
agccgcagctgtccgtctcacttggcccgggggaaactgagtccccgaagggtagttgctcgtcggagttccccagcaaacagtgaccaagccagacctcaggcttctagtttcggcttcgc

SEQ ID NO: 139653 - DNA, 122 bp, Homo sapiens
gtagctgtaggtcaggtgctctggaagtgcgctgtgtgctcctaattagcgctgctggcccggcaggtcattgcaacaactccctcaggggaaaaggccaatggcacagaggactcaacttg

SEQ ID NO: 139654 - DNA, 122 bp, Homo sapiens
ccctctcaggctgcggagaaagggcgggaggccgcggggctctccaggactcagtggtttcggagaaactcgacttcccaggctcggagggccagtttgggattgttatagaacaaaacgtg

SEQ ID NO: 139655 - DNA, 122 bp, Homo sapiens
cctgcccgcgcatcctctgttttatcctgcccttgcatcctctgtcttatcctgtccgtgcgtcctctgttttatccttcccctgcgtcctctgcccagcctgcccgtgcgtcctctgtctt

SEQ ID NO: 139656 - DNA, 122 bp, Homo sapiens
ggctgagagcagagcaccccaacgctgggagacgggaggaaaagtcgcagaaaaagagggcgggcatctggatgggtcagtgaggatgctggctacacggcctcgcttcacagacgggtcct

SEQ ID NO: 139657 - DNA, 122 bp, Homo sapiens
ggactttggaatgggcaatgggtttactgaagatcacgtccgtggaatgctgggctctggcgtggtctgacccttgcagtgagcctcttttctcagctatttcatgactctatccagatagg

SEQ ID NO: 139658 - DNA, 122 bp, Homo sapiens
agttttgagacaggagactggagtggggatgctttagtcccagaggtatgcagttttcagcgaaagtggccaaaggaatgtcccaaccagacatttctaccaatgaggcaagctaagggatt

SEQ ID NO: 139659 - DNA, 122 bp, Homo sapiens
cacatctttaaacttcctttgcaaatagatgggggctgagtagttctggccaataaactacgtaacagtggtatgtgtgtgtgtcacttcccagctcagccagttcattgctggtgtgcctc

SEQ ID NO: 139660 - DNA, 122 bp, Homo sapiens
acataagtcatgcaacagctctgtaaaacaaaacaaaacaagaaactacgatgtcggctgcgggttaaataaaaagaaaaccacacatacaaaaaagaatgtaaggaatggttagtggtgct

SEQ ID NO: 139661 - DNA, 122 bp, Homo sapiens
agcccctggtgagctgaagctcaggcccttcctggcaccctggtctgctgcactgagctgcggtgagcctatctgggtcccactggatgcatgggttgcggggcagtggagggtgatgccct

SEQ ID NO: 139662 - DNA, 122 bp, Homo sapiens
aagcactcaagatttctttaaaaaatgaaagcaggagggcaacgaagggccgcacaggaacggctgttctttggatcgagatgtcctccaacagcaatacattcatagtaaccacgggcagg

SEQ ID NO: 139663 - DNA, 122 bp, Homo sapiens
ccagcaagtggacagctggggacaggtctgcagacagggtggggcgtgggaggagccacacgccccccaccttccacgcgctaggaaaggctccagacatttccccaccgcagaagccaccc

SEQ ID NO: 139664 - DNA, 122 bp, Homo sapiens
tcaggcctgcattacaccaaaagccacaggatttttcaagggtgtggtcatggagtctcacgttattattctgcctaccacaaaacatgaggcaatttagttaataccactgcaaagtcttc

SEQ ID NO: 139665 - DNA, 122 bp, Homo sapiens
tttataaaaagcagatataaaaataaatcacaaggctgatgggcaacctctgaaacgcggcgcagacgaggaggagagcgagaggagcaggctggttactcccctccaacaagttttaagcc

SEQ ID NO: 139666 - DNA, 122 bp, Homo sapiens
atggtaattgtgttttaaaactttcaatggcaacaagttacaacagtaacttcagaatagcgttcacttgaaaacattgggtgaatggcctctataatttttttagctgaaatgtatacacc

SEQ ID NO: 139667 - DNA, 122 bp, Homo sapiens
ccttctaactcaatacatctcttaaattcatcccagaaaaataacctgttttccaagtgacgttagattcagcagcaccacccctaccctattgcccctgggactgatgatctccaggcaga

SEQ ID NO: 139668 - DNA, 122 bp, Homo sapiens
aaatgcactccctccctccctagtgaaaacacatgtggactcatgtgaacgccgtcctctcgccttcatctacttctggagataatgaaatagagagctaggaactgctgttcagattgggg

SEQ ID NO: 139669 - DNA, 122 bp, Homo sapiens
aactcagagtcggcaaagactctcctaaaacatctgtcctggccagctcttcatctggatcggtgctgacagaaacagaaacgccaggggccggaaatgcggccagcgcgatgcccctctgt

SEQ ID NO: 139670 - DNA, 122 bp, Homo sapiens
gcgggcgggccgggggcgggcctggggccgggctcaggccttgtaaggagtgggctggggcggctgccagctccctgctccctcttccccgggggccgctagagcaggaagcagtggggtgg

SEQ ID NO: 139671 - DNA, 122 bp, Homo sapiens
ggaggagcgttggcgtggaaagccaggtcactccgatcttggtcctcaggctcgggataacgtgtcagccccaagagagcgctgcccacagccccgggtgggttgggttcaactgcacgggg

SEQ ID NO: 139672 - DNA, 122 bp, Homo sapiens
cgggggtctcggttctaacttcagcagagacccggcacccgggcaggccagggcaggggccgcctggaccgggagaggctcggctccgagagggcgggcgagccctgcagccctcgggccca

SEQ ID NO: 139673 - DNA, 122 bp, Homo sapiens
tcagggctgtgaaggtggtgatttccccttcagccatggctcagcagctgctgcttgtggcgctttcaagactgtaagaaattgaacaaacctgtagtcggttcttccagcaaaggcacaaa

SEQ ID NO: 139674 - DNA, 122 bp, Homo sapiens
catttacctaaattccagagtaacctgctcccactcttggttgaatttaacatgggtgctcgttccagaaaaagaaagcaacattaataacacatcattgtcagtgctaccaaaagaagaat

SEQ ID NO: 139675 - DNA, 122 bp, Homo sapiens
ctgatggatgaagtgtttctgacagggcccacgtccagtcagtgcattcgcagctcccaccgccgcagggcctgggtcccggcctctggccagtgtgcctgtgcgtgacacattgcagccgc

SEQ ID NO: 139676 - DNA, 122 bp, Homo sapiens
gcggagtcccagggctgcaaaacccggcctggctcctgctgtgtgaaagtggagccaggccgctggggcggagcagggacaggacgcgagaaagggacacgggctgaatgggcgaggggcgt

SEQ ID NO: 139677 - DNA, 122 bp, Homo sapiens
ttgcatgctgagtgtgccggtcccctgggctgactgttctttctctatactttgtctctgcgtcttgtttcttttctcagtctctcatctccacctgaagagaaatacccacaggtgtggat

SEQ ID NO: 139678 - DNA, 122 bp, Homo sapiens
aggccgtggcaagctcttaccaccggacacacatggtaggtgccctactggcccccaaagcgcccaggaatcagctgcaggcctgccggggttctgccttcaaaggcagttggggaggccca

SEQ ID NO: 139679 - DNA, 122 bp, Homo sapiens
gtttccagcctcaccctcccctggcacaatgcccagtgcaggggaggcttctggttatctcggggaggttatttatacagtggaattaacaggttctaaagaaaaaaccaatcctaagaatc

SEQ ID NO: 139680 - DNA, 122 bp, Homo sapiens
tccctgttccttccccagtgaggtctggctgtctccatggctggaagacaaacagcgtgtcgccagattcccatagtgatgattcactttgcaaaaggcactcccccccaccccaggatttg

SEQ ID NO: 139681 - DNA, 122 bp, Homo sapiens
cttcccagccagaatggaaatgagtgtttacacgtcaaatcgacgaaagccatctcttgacgtcagatctacctggactaagatccgaatggtattcccggcggggcggagaagcggctaaa

SEQ ID NO: 139682 - DNA, 122 bp, Homo sapiens
cagggaatgcacttagtgcaacagtggtgctcggtcaatgtttggcgattctagagtgctcggctcatgttaagcagttgttttcctggcagaagaaacagtccacaatgagtcaacaatcc

SEQ ID NO: 139683 - DNA, 122 bp, Homo sapiens
gcagaagccgcaggctgcacagcctcacaaccgcccagagggcacggcggccctggggctcggtctcttccgagcagagcaacctccgtgtctatcagctccttccggcgttgcgattggcc

SEQ ID NO: 139684 - DNA, 122 bp, Homo sapiens
aactccctttatcaacatgctgtggcgttcagatgtgaacagtcttcatgtgctttcacacgtttatttgtaaaataactccaaagagaaaaaattattcttttttttatttaaaaaaattc

SEQ ID NO: 139685 - DNA, 122 bp, Homo sapiens
cagtatttataggaaaacatcatcagtgacaggtaggctgggtgaaaattcttctctccccgtatggctgacaacaaacaaattgctcgtctgatcttctggtgtcacatcctgcagcgcag

SEQ ID NO: 139686 - DNA, 122 bp, Homo sapiens
aaatggaaaacccggctcctgtgccttgcgtgtacctgtggcttcgtcattggaacgtgacgcaggcgggacaaggagcagccccgggccagggatctgagttggtctcccattagctccat

SEQ ID NO: 139687 - DNA, 122 bp, Homo sapiens
gtgagcaggatggggccctgccctcccgtgggagttgtggactcgagcccaggggctgcccgtcacagcggtgtcccaggtccctgccatccgattttacctgggatgtcttctctggagtt

SEQ ID NO: 139688 - DNA, 122 bp, Homo sapiens
ttggggctcgctcgcgcttcctgggagcctttgatgtgggttcttggtagatcctgcccgcggggcctggatgcgggcggagcctccgggcagggcggggcctcagcctgggtccgcactgg

SEQ ID NO: 139689 - DNA, 122 bp, Homo sapiens
gtgggaacttgatttctccttttggtcgcgcttcgggggctggagcttgtttccccacgtcgcccaatgagcgccctctaaagggaactgcctccttggcctcctctcgtccgcagctgcct

SEQ ID NO: 139690 - DNA, 122 bp, Homo sapiens
gtcgtgcggagagctttaaagtgcgggccgggccgggcgtccgagggtctggtcgggagtcgggccgcgtctccgcagcagccctccgcggcatgaggcgctgccggcgcccctgccccgcg

SEQ ID NO: 139691 - DNA, 122 bp, Homo sapiens
cagacctccagttctctgaaaccccaatccttaccaatgtcagacttggtagctagttaacgtaaccctgaaaccctggcccacctggggcttagccatggtaggggggctgcccactgcta

SEQ ID NO: 139692 - DNA, 122 bp, Homo sapiens
cttctgcctccaatcgtcttatcagaagtcactgtccacttatccaaatcttctttcccccggaattgccagacaaccttggcttgttccagcaagacctcatgcagagggtggccttccgg

SEQ ID NO: 139693 - DNA, 122 bp, Homo sapiens
caccgtagagactggttagtatggatttagtatcccttatcagaaatgcattggggcggccgggcgcagtggctcatgcctgtaatccctgctactcgggaggctgaggcaggagaatcact

SEQ ID NO: 139694 - DNA, 122 bp, Homo sapiens
ggacaatgtagacgccctttctgggaggccggggctcagttcagagaggtcgaggtggcgcggtgcagcggtgctctcctgcaggaacaggcgagtcacccagagtttactgaataccgccc

SEQ ID NO: 139695 - DNA, 122 bp, Homo sapiens
gttgaagcatagggcttttcctcattactcccatgacaaagcaaaatagtaaaatgttcacggccatattcttaaaaatattttttaaataatctgttggcttgtttactcataaattcaca

SEQ ID NO: 139696 - DNA, 122 bp, Homo sapiens
cggatgtgattatagtacactacagcctcaactcctgggctcaagcaaagcttcccaaatcggtgggactataggcacacgccactgtgctgttcaataataagatttctgtctaacaccac

SEQ ID NO: 139697 - DNA, 122 bp, Homo sapiens
cgctcccttccttcccacaagtcccttcccgcgcgcgccccacggccctgcccgccctcccgcgtcagcgccccaaccgtcaagccagcaattgaaacgtttccaaaacggtctatttattt

SEQ ID NO: 139698 - DNA, 122 bp, Homo sapiens
tcagcgcgcagaggagtttctgcgagcacccgggagttgtagccaccgcttccccacccccgactcagcaggacagccccagaacgggaccccacagccagtcagctgggtcagctccccag

SEQ ID NO: 139699 - DNA, 122 bp, Homo sapiens
ctggtcgctccggcaaccttctctcagcttgtttttctccgtgagctggaagctcttgggcgttggttccatcagctatctgcggcatctgccttgccgccatggaggaacagatactctcc

SEQ ID NO: 139700 - DNA, 122 bp, Homo sapiens
tcgcctggggagagtgggtgcgatagggtcacggggtcacgatgactgcacgcacccacccgaatttcgcccaatttacagacctcattctcagaaccaagaaagggcactgcgtctcccac

SEQ ID NO: 139701 - DNA, 122 bp, Homo sapiens
gcctgttgcaatctgccccactccatcactggcaacacctggccagagtcacctgtgacccgatagtcagtgtcatgaccttgtgtccccttcagcatggacttcctgtggcccctcactct

SEQ ID NO: 139702 - DNA, 122 bp, Homo sapiens
cagtcttttgtgtgcctgtgaggtcctgggcaagctgtggagctgtaaatatttgcccttcgcccagagctggccagctgctgagactgcagctgacagacaggccaggggccaggaagggg

SEQ ID NO: 139703 - DNA, 122 bp, Homo sapiens
ctgcgggagaagctgccatttgcagacaaggtgtgtcagccagaagaaatgagcaataaccgttttctggtttctactggcaaaagctttgtatttttttcatatagaagtgttaaaaatag

SEQ ID NO: 139704 - DNA, 122 bp, Homo sapiens
gtactgctgccatctcggctcactgcaacctccctgcctgattctcctgcctcagcctgccgagtgcctgcgattgcaggcaagcgccaccacacctgactggttttcgtatttttttggtg

SEQ ID NO: 139705 - DNA, 122 bp, Homo sapiens
tgttagagcgaccttcttaaccatttattttcttgaaagcagcaagacagagtgcttctgcgcttgtgaatcttctagcagtataagctccctctaagttttttaaacagcagatttttaaa

SEQ ID NO: 139706 - DNA, 122 bp, Homo sapiens
tgcaggtaccaaaatggaactacttccaccaatccctaaacaaatggagtcgggaggccacgaagggggagctctcatgcaggaatacctgcagcaggcctcctcacaagacgctcctgcac

SEQ ID NO: 139707 - DNA, 122 bp, Homo sapiens
gtggcccaaaggaggaaccgttacccagagctagaaggtcccgggatcgggagggcgggtcgtttccgccaggctggaggggccgggctagctatctgacagcccctccccaaagctcagga

SEQ ID NO: 139708 - DNA, 122 bp, Homo sapiens
acgccagaagtccagctccgcggtgacagggactcctgtccaccaccacagccccagcaccgaggactatcccggcacaggctccatgtggaagatgtgtttgctgaatgaatgcatgatga

SEQ ID NO: 139709 - DNA, 122 bp, Homo sapiens
gaggagctcgcccggtccccgaggggcccccagagctggggaagcaggcgtctcgccaggcgctcagcaaggaacccgcaagaaagagaggcccgggcgcctcgcccccttgcattttacta

SEQ ID NO: 139710 - DNA, 122 bp, Homo sapiens
caagtcccaccccggcgcttctgtctctacctggcctcacctccccccgccccgagcgggcgtctcagacgaagacggaccctgccactgtagagtggcaatgtgtgtgccgtgccacacct

SEQ ID NO: 139711 - DNA, 122 bp, Homo sapiens
ccaggaacgctgccggagcaacaccgccgtctaggctggacgctgagagaggatcgtccacgactcacttcaaggctgaaccaagaaaacacagtaaaggaacttgccggcggccgcgacgg

SEQ ID NO: 139712 - DNA, 122 bp, Homo sapiens
tcacgttttgcctgggggagctgatcgcaagactaggcaacctccagccagtccctgggtcgggcggatcctcccagaggtggcacaatggagcgatctccaggagagggccccagccccag

SEQ ID NO: 139713 - DNA, 122 bp, Homo sapiens
ccctggcattccttcctcctccagtgatcacgacctgtttctggggttcacctcagcaaacgccgacctcacactcacctctcccagggaggctttactcctccccgcctgggccttctctc

SEQ ID NO: 139714 - DNA, 122 bp, Homo sapiens
ttcatcacagcttgctttctaagcacatccagagttcaccctccctaggagaagtctccccgtcctgccctctgtcctctttcatccccatggggagcagagagagagctcctgtgttgcct

SEQ ID NO: 139715 - DNA, 122 bp, Homo sapiens
tccacagggccgcccaaaatctggtgagagagggcgtagacgcctcaccttctgcctctacgggtcacaaaagcctgggtcaccctggttgccactgttcctagttcaaagtcttcttctgt

SEQ ID NO: 139716 - DNA, 122 bp, Homo sapiens
cgcgtggatgggcggggccagtgggccggaccttggtggtgggcggggcctaggggaatccggggagtttggcttgccgggttgtggttgggggacctacattaatgaggcttccaagaagc

SEQ ID NO: 139717 - DNA, 122 bp, Homo sapiens
gccgagagcgacactaggataacactaggcaaggctgagcaacccaggctaccaacagcacggacttgaaccgggtcgcatgccggagcggacgggatgaggtgcaccgcagaactggggac

SEQ ID NO: 139718 - DNA, 122 bp, Homo sapiens
tcctcgggcctgtcccagcagtgacagggtcccaggagtgagaattcaactgtggatgcacggccatggcccttccttcctatcacagcccacagtccagctgtaatgcctgctggcctggg

SEQ ID NO: 139719 - DNA, 122 bp, Homo sapiens
atttacacggaggctacgcacaatctcaggggaggctcaaacagcagttcgttcctcacacgcactgttgggtgcaaagggcacctggagagtgagggagacctgggcgctttcctgcgggg

SEQ ID NO: 139720 - DNA, 122 bp, Homo sapiens
tttgggaaaagtggtgggcttatcctctacacctggccagccaatgacaggcccagcacgcggtctgaccgccttgccgtgggcttcagcaccactgtgaaggatggcatcttggtccgcat

SEQ ID NO: 139721 - DNA, 122 bp, Homo sapiens
gtctagaatcaatacggcccagacagcccttcacaaaggggctccaggcgggcgcctccgcggcacagcctccgccccaccgcccgcggcgaattaattgggccctgaaagaaggggcgaca

SEQ ID NO: 139722 - DNA, 122 bp, Homo sapiens
tgggaagccgccttgccacagaacttctgcaccttttgcttcctgctctagggttcagcgcgtgctataaaccgctggccagggctactggtcgttaaaaacgataaactagggaaagcgcc

SEQ ID NO: 139723 - DNA, 122 bp, Homo sapiens
tcagttctgataacctccaaattactttttaacttcctaacgacctgagaacagggacttcggctcttcagacaaaagagggtatggaacttccatatcccctctggagtgagcttcctttg

SEQ ID NO: 139724 - DNA, 122 bp, Homo sapiens
acccaggctggcggcggggctggcggcgcgtgttgatccaggtgcgggctgggggctgggcgcgggatcctctttcctgcaggcccatctgggacttcaaagcgcagcgcggggctcaaagg

SEQ ID NO: 139725 - DNA, 122 bp, Homo sapiens
ggggtgggggcgacaggtgctgggcggggaggcgctacattgtgtaacactcagcagccacgctacacttgggaagagcggatgtgctgaaaatgcccagtgcaggaccaaggtgcgccaac

SEQ ID NO: 139726 - DNA, 122 bp, Homo sapiens
tcaaagatgaacttagtaataggagcggagacaacgcctcgcctgaaggagcatccagaccgctgacctggtggcgaggggaggggggtggtcctcgaacgccttgcagaactggcctggat

SEQ ID NO: 139727 - DNA, 122 bp, Homo sapiens
gcggggccacgcgggacgacgagggcggagccatcgggtgggcgggggcgcccccgcccccgccccccactctcgtcaaaggccgcctagtttgtcctcagtgggggcatcggatgcacggg

SEQ ID NO: 139728 - DNA, 122 bp, Homo sapiens
ggtatctttctctttcctctcttgtctgctttatatagttaggaatttattagaaactctcgtgttttctactatataggaaaaatgaaattggtggcacatctacctccactacccatgcc

SEQ ID NO: 139729 - DNA, 122 bp, Homo sapiens
agtctgcagagcgtggaaaaaaaaccttttttccacgagataaccacatccacattcttccgccccggaggaagtcacctgtcacaggtgttcaggatgtggcaggcccacgggagtgactg

SEQ ID NO: 139730 - DNA, 122 bp, Homo sapiens
aagatttaaacagtacatatgcatttaataattgttgctaagaatatgtgcacttgtagacgtggactatacagtgatatgcaaaaataaaatttggttggtagattatggctgatgcttga

SEQ ID NO: 139731 - DNA, 122 bp, Homo sapiens
ctgtcatgacacctgtaggactcaatacatggaacgcagagtaggttcactgggcaacagcgggagacagaggtaagaggtaggctgaggccgtgtcgtcgggagctggtgtgggcgggtca

SEQ ID NO: 139732 - DNA, 122 bp, Homo sapiens
acatataaacagacaaagccccagtggataagtcataaagatctgacagcaaggaccatacgtctttaaaactctcagcttttctactcaagtaatgtgttatttgtcccaggtttgcagtt

SEQ ID NO: 139733 - DNA, 122 bp, Homo sapiens
gcggggaaaccaagagaaaagtttaaaaaggtcaaaagggggagaagggaagacagcttccgggtaacagagaaggttgaccaggtcaatagtaaaggatttcctcaaaccgaagggaggac

SEQ ID NO: 139734 - DNA, 122 bp, Homo sapiens
ttataacaacaacaaaaaaagatgtttaaacagaagaaaaaattcaagctatcttggttgcgccacgaagttgagatttctgcttctgctttggctggagagtgaggagaggcagaacatag

SEQ ID NO: 139735 - DNA, 122 bp, Homo sapiens
ccagttacttttgggactggaaccagaccaggtctcctgacttgtctcttttgacttttgcgcactgccttctcttctaagctcaacaaccagacttagggcagagagggctctgcctcctt

SEQ ID NO: 139736 - DNA, 122 bp, Homo sapiens
cggaccctcgcccactccccaggtggctgggagtgcccaccctggaactgccggccccgccggtgccacagtgttctctgccgtgccagtgccacaatgtcctctgccgtgccggcgccgca

SEQ ID NO: 139737 - DNA, 122 bp, Homo sapiens
gtctggggtaatacccgaggtttgttgtcccacagatatagggggtctccctatagtggacgcacaaagaataaggttaagagcagaggttggataggtgaaagaaagagaaaagctctctc

SEQ ID NO: 139738 - DNA, 122 bp, Homo sapiens
cgaaagagagggtgccacccacggctcggtgtctctgccctgggtctagggtctgagttccggagtgatggagggggccaagcgtctgtgaaacttggggggtggtctgggtcacgactggg

SEQ ID NO: 139739 - DNA, 122 bp, Homo sapiens
aagggcggggaaaatagggcatccggagtgcaggagattcctcagggccgcccccttctccgggggtgccctgaggaaccgcggcggggactcgccgctggcagcctgcgggtcctggtgcc

SEQ ID NO: 139740 - DNA, 122 bp, Homo sapiens
cagaaggttttctctaaagtcaaacccaaattcctgctgctgcaaagacctgaggaagtacgagcaacccctgctgaatctgatgtgagttcgagtcctaattgcaggacttacttgctctg

SEQ ID NO: 139741 - DNA, 122 bp, Homo sapiens
ctctcaatagagagactgatagcccgtggcctggccggggcgactttaaccccctccaatcggcaataaaaggaaactaattaaaccagcaagagaaaatcctgagactcacccctagaagt

SEQ ID NO: 139742 - DNA, 122 bp, Homo sapiens
acgcccaggtacgtgggagcactccacagatggcgcaagtacggttgggccaggcggttgcggccccgtcgcgccgcggcctctgtgacgcacggcgaggcctcccgggctgctgcgcggcg

SEQ ID NO: 139743 - DNA, 122 bp, Homo sapiens
ttctccgggccctggactgggccgaaacccaggcagcggagcaggcacgggaggtggggacgccgctggaccctggagccctcgggcggggtccctcagcacgaaagaggcacgggagtgcg

SEQ ID NO: 139744 - DNA, 122 bp, Homo sapiens
cgtggggttgttggcattttcttcctctctgctgtcccccttgtgtgtctggagctccggcgtgggatcccggatataggtaagtgtgactttttcccttcgacagtcacagctgggtaatt

SEQ ID NO: 139745 - DNA, 122 bp, Homo sapiens
ccacacaggttccggtggaccatgtgaggcagagaatccttatccttagagaggagatgtcgtctctggatgtggtgtgagacagccgggaagttcctccctacacgaagatccttcttgct

SEQ ID NO: 139746 - DNA, 122 bp, Homo sapiens
ccttccctctgtcctccctgcacaggccgcacacacttaacgttttgttcccaaggagaccggcggaaagtagaaacctgcaatgctgcatctgggaactgacttgtgaccaggctgagaag

SEQ ID NO: 139747 - DNA, 122 bp, Homo sapiens
tcagggcctataggattttcttcccccctcgcagctgcaagaatccatttcaagtcatatcgggtaacaaggagcttatagcctaccatagtaaacaattataataggtcagtgatgaggct

SEQ ID NO: 139748 - DNA, 122 bp, Homo sapiens
ccttattgaagagaaagggcccttttgatacaatgctagataacatggctaatgaaactacgtcaattcactgaaatgtctgcaaagggcttcagtgggggtaaaattaaactgttcccatc

SEQ ID NO: 139749 - DNA, 122 bp, Homo sapiens
tgctgccgcttgctcatttctgcctccaggcgccgcttctgctccgtctcctcgcgaagccgcctctgcagctgtccctgctgctgccgcatgagctgcacgttccgctcgagctcctgcag

SEQ ID NO: 139750 - DNA, 122 bp, Homo sapiens
gttcatttcttaattccctcctcttcaggctacgactggcaaagatgagggaggctgaagcggcccaggggcaggcaggtaaagaatacacccaccccaccccccaggcccaacacctgaac

SEQ ID NO: 139751 - DNA, 122 bp, Homo sapiens
ccaggccctctttttaataaagttcgttcatgatacacactgattgatttaatgacagcccgtttgggaattttctccatttggctggcaggataaatggaatgtcttgcagcactcaaagt

SEQ ID NO: 139752 - DNA, 122 bp, Homo sapiens
cgttccagggtgcactcgccggcgaggctgcacggcgccggtttcattgctaaaatccgacggacttgttgcagaactcgttttttttgtcgggaaagggcttccccgtgtaactttacagc

SEQ ID NO: 139753 - DNA, 122 bp, Homo sapiens
catctgactaatcttatgcatttcccccaccataaatctaaagctgcacttgtactaatacgagcagtttactgaatgagccatactgtttcctgactcagagccttcacatatgttctctc

SEQ ID NO: 139754 - DNA, 122 bp, Homo sapiens
ttgtcttgttcaatcctcactcccatcctgtgaggcagtcccacttattcccccatcgtccggaggaagaaactggggctcagggaggtgaagtcacttgctccaaaccacccagtaacagg

SEQ ID NO: 139755 - DNA, 122 bp, Homo sapiens
cccacccacgacgcccccgcccacttccggcgcgccccctcttcgccccgcccactcccccggctccgcctagtgacgtctttgccccgcgccgcgccgtcccacccatctccctggcctcc

SEQ ID NO: 139756 - DNA, 122 bp, Homo sapiens
gcaccctgggagcttttactgcaacacagaggcaccaagagctgccgctgggacgtggtgcgtgaaccagcctctgctcagctcgcctcgggaaaggcacaggtgggaaggctggacaggta

SEQ ID NO: 139757 - DNA, 122 bp, Homo sapiens
ggaaggttctatctcctgctggtctggtctccacaagctcagtgtcctgagtttggtcctcgccatcccgctgccaggtcagtgtgatctccgcagggtagaaacccagggcccagcacctc

SEQ ID NO: 139758 - DNA, 122 bp, Homo sapiens
ccttttaaccgcgccccaccccgcctctgccctgacgcggctcgggcgggctgcgggaggcgagcgctgtcactcgacgagccccccgcccccacctacccggggcgcactagccgctgggc

SEQ ID NO: 139759 - DNA, 122 bp, Homo sapiens
cttcttctcttcctgggcggcagagtcaagggagtgagaaaggcaggagtaggcgggatccggacaggtctgcccaatcccctcgcagttctcaggggagggacagaactaagggaaacccc

SEQ ID NO: 139760 - DNA, 122 bp, Homo sapiens
cggggattcgtttccgtacgcagcctggaaaccagcctgggcctatcctgcgcgccgctgcgggctactattggctgccaagaaaccccgcccatcttcctgctcattggccggtgcggttt

SEQ ID NO: 139761 - DNA, 122 bp, Homo sapiens
acgccctctccctggcgcgcaggtttagaaacagggcggcctctccggccgccgcctcggcggctcgggtccccatatatagtcatatccaccgtcaactgggaggccggcggccggcagcg

SEQ ID NO: 139762 - DNA, 122 bp, Homo sapiens
cagcccccgccgcccccctccttgggaacctgggctcgggctgaatttttctcacctgcacgcgaggctgggggcccccggctgttcgcacccgggtgtggggccgcccctggccatatggg

SEQ ID NO: 139763 - DNA, 122 bp, Homo sapiens
ttgttactactttggctcagtggtttcctgggctcgctgctcattccctggcagggctcgcggcgtccgcggcgactcctgggatcggcaggggcctggcttccagcccagcgccggcagca

SEQ ID NO: 139764 - DNA, 122 bp, Homo sapiens
tcgggcggcggcgcggagctagctgacagccggcggcgcgacccgccgctccctacggcgcggcacacgcgcacacacctcccacccggcagccacctcccgccgcagcgcgaacaaagggg

SEQ ID NO: 139765 - DNA, 122 bp, Homo sapiens
cgcccctggcctcgctagcactttctctgacaaccatgcaggcagcatctgggaagagcccggagcacacctggggccgcccctcgtccggcactgttccaggggacactggggtacctttc

SEQ ID NO: 139766 - DNA, 122 bp, Homo sapiens
cagcgctatcagcctgcagctggcacacaggtgcgtgtagatggacagccaggaaggcagcgcagggtcgaggggagagcgcggggcaagcgagacttcagtggctctgcactttacgcagc

SEQ ID NO: 139767 - DNA, 122 bp, Homo sapiens
ctcctcttggtcaatggctcggaataggtcggtcacggtgagctctgccacccccagggccgtcttgaggatgcaggacaggtcaccttcgccgacgctgccgtcctcttgcgctccgtaca

SEQ ID NO: 139768 - DNA, 122 bp, Homo sapiens
tgccccatggctttgcctgggtcttgatctgttccttttggttcttgatggattccctaccgggggaagaggcagtccttgaatgtgagtaaatataatatagagaaatggtagaaggagaa

SEQ ID NO: 139769 - DNA, 122 bp, Homo sapiens
tccgtgagaaaacccctaaaagccggcaccggctccggtggggccacagagtctctggagcgaggctctctccaatgcctgggccctgggaccgagcaactgtcccagtagaatccctttcg

SEQ ID NO: 139770 - DNA, 122 bp, Homo sapiens
gataaggccaaggtgggtggtcaggagttcgagaccagcctggccaacatggtgaaaccccgtctgtgctaaagatataaacattagccagacatgatggtacatgcctgtaatcccagcta

SEQ ID NO: 139771 - DNA, 122 bp, Homo sapiens
tctgcaaaaaggaaaaagaaaccacaaattggggaaaaaaaaagaagaaaaacctgtttccgtgtgcaaaagcacacatatgtatgtctgtgttataaaatgactgtgcttgttcgtaacag

SEQ ID NO: 139772 - DNA, 122 bp, Homo sapiens
ttctgaccttcgccttctgaccccgagagctactcttccgtcttccgtagcacaggaatgcgttctggggcttcaagaagctgctgtttttgaaaatgagtcctaccgaggcaagatggcag

SEQ ID NO: 139773 - DNA, 122 bp, Homo sapiens
tacagataaggaggcagggttctgggtggggttgggggtagttgcttttccaaagccgcacggtgagtcagtgacagctaggaccagaatgtgggaaatctgcctaccctagctcagcaacc

SEQ ID NO: 139774 - DNA, 122 bp, Homo sapiens
cgagtccgccccgccaagttttcctccccgctcctcgctcttcccacggcgcacccggcccggacagccccattgtacagacccgcagagcgaggcctcgagccgcagcagccgggttaagc

SEQ ID NO: 139775 - DNA, 122 bp, Homo sapiens
gaacgcgagatccccctcatctgtaatctttaaagaggaggaagtgtactccaaatcaagcgatagtccatccgtccttggcacggtgactgccgggaggccaggaccaaatgtgtctcctt

SEQ ID NO: 139776 - DNA, 122 bp, Homo sapiens
ttcattatcagttggatcctggaatgaaggtgcacgggactccagggttccacaggaccacgcgagcacctcccctcccgcccggtgtcatttcatcttcttccaaattctcaaaacccttc

SEQ ID NO: 139777 - DNA, 122 bp, Homo sapiens
ctgactagactgcaggagcttcatgaattcgccagttcccggagtcttcttggaagaggacggctgcaagcctcgtccggctccctgaggagggaagagcatccagtgctcctgtgacccct

SEQ ID NO: 139778 - DNA, 122 bp, Homo sapiens
cctggctcagaagcgcacagatgtttactgcttagagccggtaccgctggggagatcgagcgacttgcgcggcgcacagtgcggcgctggcagggctctgggctcccggtcgggggttcgag

SEQ ID NO: 139779 - DNA, 122 bp, Homo sapiens
aaactaatgtgttttctccatgcaacttgagtagcagcacagatacgtcaacagtatcaccggggcccttcgttccatgcgtaaacccacacatgcgtaggtgaggcttcttggagctgggt

SEQ ID NO: 139780 - DNA, 122 bp, Homo sapiens
ggggcgcggctcatcccagcgccacttgctctgcagctcccagaggtggtggttgtgttacgaaggctgaccctgccaatggccgacaaaatggtgcgcacccccaagtgctcgagatgcag

SEQ ID NO: 139781 - DNA, 122 bp, Homo sapiens
aactttcatgggtggggcaaaaggctgggaaggaagagaattcgttttggcttgctccagcgctggaagaacactgagcaccacactctccgcaaaggcctaacacagcaaaggcgactgtc

SEQ ID NO: 139782 - DNA, 122 bp, Homo sapiens
aaaatgagtcagaatggagatcactgtttctcagctttccattcagaggtgtgtttctcccggttaaattgccggcacgggaagggagggggtgcagttggggacccccgcaaggaccgact

SEQ ID NO: 139783 - DNA, 122 bp, Homo sapiens
cgccgccgccgaccgctcgcgccgcaccccctcgcacgtcaccacgtgcgctgccgccgccgacgcctcccagcccgcttccgtctcgaatccatctgcaaatcacaggcgagctccataaa

SEQ ID NO: 139784 - DNA, 122 bp, Homo sapiens
ggtgccctggagctgaggcacggctgaggggagcatctccactcaggggccaggacgcctcgctgaggcctcacctatgcagaagcatgtgccgagagatgtgcttcacctctttttaaagc

SEQ ID NO: 139785 - DNA, 122 bp, Homo sapiens
tttatccacttacccaaggtcacacagctaggagctagcagagttgggattcaagctggacgtgtctgtcttgttaccatgaaactattgggatcatcagtcagaatcttttcttttttttt

SEQ ID NO: 139786 - DNA, 122 bp, Homo sapiens
ctagggtcttgcaatcattttgtacccagggctcagcctttgatgtttgtagcctttgctcgaggctactgtttgagtgagcccaagtgttccagatgaaacgatacagggacaagttcaca

SEQ ID NO: 139787 - DNA, 122 bp, Homo sapiens
ggtgccgtaggctgcgaggaagatgagacggccaaagatgagaaggccaaagattgcgagcgactagtacaaaagaaggaaagagtttgaaataggtgaggctgagcgccagggggaaggaa

SEQ ID NO: 139788 - DNA, 122 bp, Homo sapiens
ccgtgggtgcccccgccggccccgccctcccaggctgcccccggcgccccgggcctcctccgcgcagtccctgagtcccgcaggccctgcgtccccgctgcacacccccgtccactcccgtg

SEQ ID NO: 139789 - DNA, 122 bp, Homo sapiens
tggctcaggagcctggggaaaaccccagaagcccagagaaggctcaaagctgccagactccgccgagagcctggcctatttcctgttctccccaccacctgcccctgccccgccaagctaaa

SEQ ID NO: 139790 - DNA, 122 bp, Homo sapiens
cccctacaccccaccgttccgtgggtccctcctctccaggaggccagacgaggaaataagcgaggcctctttaaaggagctctcaaagaaaggtacccggggtatcccgggctgtggagcaa

SEQ ID NO: 139791 - DNA, 122 bp, Homo sapiens
aatctctggtattcatttgcttctttgaagccatccctgctctcctttttcatacttcaacgttaatataaattttgttttatattcttttccgattaaaattaatgtatttgttttagaat

SEQ ID NO: 139792 - DNA, 122 bp, Homo sapiens
acgggatcccacgcggcctcgacgggagccgggagtaggcggactcccaggccgggctcgcgctctggatccctgaatccggcctttccggccggactgccgcgcctgtggccggaagagcc

SEQ ID NO: 139793 - DNA, 122 bp, Homo sapiens
aattttccaatgagaaaagtgccctgtaagaaagatgctgcatcaggttcattctttgctcgggacaataccgcaaacttccttcactggtgtagggacattggggttgatgaaacttacct

SEQ ID NO: 139794 - DNA, 122 bp, Homo sapiens
ccacgaggcctgccactcccctttctggacctacccaagcccggtgctcagggccctcgccgcctgctcactgggacaccttacctggctccactgcccttctgcgtcctgcgcgagcccgg

SEQ ID NO: 139795 - DNA, 122 bp, Homo sapiens
gaccgtttatagaaggatgactgagatacctctgccttcatcaagggcttacatataacacggccccaaacagcagcgactgtttactgagtgtctactatgtgccaggcaccagacatggt

SEQ ID NO: 139796 - DNA, 122 bp, Homo sapiens
acctacaaagggcacaattttcctgctggctcagaaatgccagacactggcctgcaaggccgactcggaaaagtagtgcctcgcctctacctcctccatttcctgccctctcgcatcctctc

SEQ ID NO: 139797 - DNA, 122 bp, Homo sapiens
agcacctagaaatctggaggggctgcttggagagcagggagaagagggaagcctctgccccgcggccagcatggtgggtcctgctgctacagagctgcatgtgaacctggcaccgtcatggg

SEQ ID NO: 139798 - DNA, 122 bp, Homo sapiens
aacctttacgcgaggcagcaatgacaacgcgcgattttaaaggcgagtggtgaggacatccgcatttcctcactccaccttgcacggctatgaggtcccctccttttttttttttttttttt

SEQ ID NO: 139799 - DNA, 122 bp, Homo sapiens
ccgaggggcttcctcccagcccatcgcccgaggcgtccgccctgcaaatctgccagcccccgagaggggtttggaaccttagcacccaagtctaagtcaacttcatgtgcgtaataagtccc

SEQ ID NO: 139800 - DNA, 122 bp, Homo sapiens
ggacggcggccccgtcctactctccggtcttcgcaagggccgacaggtgtaccggcatttcggcaaggccctgggaaccccacacagccacaccaaacgctatttccgctccagggaccaga

SEQ ID NO: 139801 - DNA, 122 bp, Homo sapiens
gtaatagaatgtagatgacaggtcagtgtcagtgttggcttcaaaggctcttcctttcggcggcagtctttgtaactaggatctgatatttgtggcacggacaggtttgtacacattctcgc

SEQ ID NO: 139802 - DNA, 122 bp, Homo sapiens
cttccccgccagcgccagcgccagctccgcgctggtgttggttcctctttcactgtttcccgaggaggggcacaccagacactttccagattgctgcgccccctccccaggagaccgctggg

SEQ ID NO: 139803 - DNA, 122 bp, Homo sapiens
cctcgagaaaaaccagggtattcatccgggtcgtcggaggtgctgagaacggaggttggccggcagaaaaggtaggggaaaggggccactcttcattggttgctcctctttcccaccgttca

SEQ ID NO: 139804 - DNA, 122 bp, Homo sapiens
gggagtcgcagattcatggcttcttttggagaaacagtaggtattggtaccccaggccctcgtggccaaatagactgggccttttaaatagagtgaatgactcacaagtttgcactttccac

SEQ ID NO: 139805 - DNA, 122 bp, Homo sapiens
gtcgcctgggggagcagaagcgggtgggaggtgcgggtggccttggcctcagccctggtgcgcgggggccgggggtggtgaccctcctggccgaggaggggcggcgtccagacgcccgctcg

SEQ ID NO: 139806 - DNA, 122 bp, Homo sapiens
cagtcaaaacaaaatgggaaagatgagcccaggctcgtgggcactggcacgtcggccacacgtgaggctgcgtggggcacagtcggatgcacgtgcccacacactcattttcattttactgg

SEQ ID NO: 139807 - DNA, 122 bp, Homo sapiens
agagattttaaagcaggaatgaggctgagttctctgcggccggagcctcagttttcgactcgctacaaagttatgaacacactggcagccaagaagtatttatactcaccccatgccatcca

SEQ ID NO: 139808 - DNA, 122 bp, Homo sapiens
gctggaatgataggtgtgagccaccatgcccataataggcataaactgggaagatatttacgttatctgatttaactacctgatagagctgttttgaggatgaaatgatataatactagtga

SEQ ID NO: 139809 - DNA, 122 bp, Homo sapiens
tctcttgtccccagcttttgcacacgcagtttcttctgcctggaatgcggtcggctgtgacgacccccaggtaaaccaactcctaccaccacaggtgaaacgaacgccctcctcctcctcgc

SEQ ID NO: 139810 - DNA, 122 bp, Homo sapiens
ctgcccgctgtggcactccggttacccggaggagagttgctactctcgagttcaccgaggcggaaagcccctctgactccaaagcagggctcagcgcgacgtcccagaggccgcttctagtg

SEQ ID NO: 139811 - DNA, 122 bp, Homo sapiens
gcatgagagaggatccttgtaggtttcggaggtgggggggctgcactccattgttcactccgggccaatcagggttggcccacttcctcccagccaatctcccttcacccccagcctccaac

SEQ ID NO: 139812 - DNA, 122 bp, Homo sapiens
tacttaggaggctgaggcaggagaatcgcttgaacccaggaggtggaggttgcagtgagccgagattgtgccattgcacgccaacctgggcgacgagtgaaactccatctcaaaaaaaaagg

SEQ ID NO: 139813 - DNA, 122 bp, Homo sapiens
atttgccatcttgaccacctcgcagtactgatacaagtatcaaatgagaataatgtgtgccgtaaaccttaagacactggtcaaatagtagttacggatactgttgtacacattctactgtg

SEQ ID NO: 139814 - DNA, 122 bp, Homo sapiens
aggaactgggttaaagatggcctctgctgaacacatatgtcaaaatcagctaagctaaaccgaatagggcccagttaacctcaacgatgttcaccacaacagagcaggctggaagattcccc

SEQ ID NO: 139815 - DNA, 122 bp, Homo sapiens
gaggctgcccgccatgttcagggccacctggtgtgaccgtggatgcctcatcaattacgacgaggacctggggatgacgtgcggagggcagaggggagtgggcggctgcaccaggaggaagc

SEQ ID NO: 139816 - DNA, 122 bp, Homo sapiens
ctgctgcgccatcgagggccaagacaatgagctcatcacactggagctgatccaccgatacgtggagctcttagacaaatactttggcagtgtaagtctcctctgcccaccagtttccattc

SEQ ID NO: 139817 - DNA, 122 bp, Homo sapiens
ctcccctctgcaagtcatggtcttcccatatttgcattgctagcttgatgcctcattcctcggactagattccttcatatttgaggtcttaggtagacatcttcccaatgaaagcagaatgt

SEQ ID NO: 139818 - DNA, 122 bp, Homo sapiens
atgccaatgacaacgccaaccacgatgaccctgtctcccaagagaaaatgccaatgacaacgccaacaaagatgacccgtctcccaagagaagatgccaacgacaacaccaaccaagatgac

SEQ ID NO: 139819 - DNA, 122 bp, Homo sapiens
gttgggctgccagatggggtgtcttttcttggctctcggcccaggccaccccagctgtcccggcctacctgggcagggcccagatttatgggttccggggcagcattctcccggccccgccc

SEQ ID NO: 139820 - DNA, 122 bp, Homo sapiens
tttcttgttggaggcccagaaagcactgacttaacgtgtgtgaaagattgtagacagagacgggataaagagccccgcgctggaaaaagagcaggctttggaaccagcagggtcacgggcag

SEQ ID NO: 139821 - DNA, 122 bp, Homo sapiens
gttttgccagatcatttccaataggtgcccttgtcattttgtctaaaccaatcagagaagcgtagggtttaacatcatcagtcactggggagacgcctggggccagtaacctcctgaagact

SEQ ID NO: 139822 - DNA, 122 bp, Homo sapiens
agcctggcgccccgccgcagggtaggtccggcgggggcggccaaggccgggctggggtcgcggttggccgcgtacctccgcgtcacccacggcctctctgcagtgcgtccctgcgcccgtcg

SEQ ID NO: 139823 - DNA, 122 bp, Homo sapiens
ggagactccgctccggcagcaaaccccacgtggtgcacctctgagcctccgcccctctcccgagggaaccgcaactctacttctcgcgagaattgcttctatggctccatcctgctttccgg

SEQ ID NO: 139824 - DNA, 122 bp, Homo sapiens
ccactagtcctaaaccaactctgtcaaccaagtttctttacccttttttctattcctggccgtatcctttctgctccccaccagcactatcaggagtaggaagtgacatgcttagatttgga

SEQ ID NO: 139825 - DNA, 122 bp, Homo sapiens
ctgcagcagacctaggcccccaggggagctgcccctgccggcaccgtgactttggacttccggcctccagaacagagagagcgtaagtctccattgtgtacagccacccggtctgtggtcag

SEQ ID NO: 139826 - DNA, 122 bp, Homo sapiens
tggaagtttgctgtggagtcaacactgcagaaaggccacattcaggtggaggcagggaaccggcgggcatgcctcgggggttgggcagcagagagggggcagacaccccaccgtgtccatgg

SEQ ID NO: 139827 - DNA, 122 bp, Homo sapiens
gagccccggatgaggaagtggtgcggccaccgagacgagacggaggcccggcgagagcggcgcgggggcgcgagggcgggaaggaggcggggccccggggcggagccaccggagcggcgcgg

SEQ ID NO: 139828 - DNA, 122 bp, Homo sapiens
ctgtgctcagctgcggctcagtgggcctgaactccggagcccacagaatctggcgctgggcgtccgctctccgcgcctgaccgcacctcagaactccggtaggacgggggggtggccccccg

SEQ ID NO: 139829 - DNA, 122 bp, Homo sapiens
gcaactcagactttgtagccatggaaggtcagccaagagccctgatttacatgaagtcggcgagagaacaaatgtgaaaagaatcagaagaaaaagaggatagagatgcaaagaaattacag

SEQ ID NO: 139830 - DNA, 122 bp, Homo sapiens
atgttcaaaacacgctcacaactttgatatctctctttctcaaacagacagagcatgcgtcgtgagaggctcctgatgaaataataaaacccaattttcatctagaaacaagaatcattata

SEQ ID NO: 139831 - DNA, 122 bp, Homo sapiens
ctggggtgtaactggaggggcgggcccttctccaagttagagttggggttctgagcgagtcgtgcgttttaggtttagtgtcttttccttgtccctgctcggggagcgtgaggcagatcggc

SEQ ID NO: 139832 - DNA, 122 bp, Homo sapiens
cggcccctaaagtaggacctagttctccaggttttacctgtttccactagtggcgcggggcggggtaatgaaacccagtcaagaaacccagtaaagggcttggcaggaccaggcaccaagtg

SEQ ID NO: 139833 - DNA, 122 bp, Homo sapiens
ctggagcccaggacttgcagcgtggaattggtggaccccattgaactcttaccaatgactcgatggttttattccgtcgactgattgttatataactcgagtccagggcgactgttacctct

SEQ ID NO: 139834 - DNA, 122 bp, Homo sapiens
ggtgtgagacgcgttccagaacctgggagtgaggttcaaatgggggaatcggcaggaagccgcccagctgaagatcagtagcgtgaccgctggctcacctctgtgcctttcttctggatcct

SEQ ID NO: 139835 - DNA, 122 bp, Homo sapiens
ctttggggtagaagctcgagaccatggcactccagcactcactgcctcggccagtgtcagcgtgactgtcctggatgtcaacgacaacaatccaacctttacccaaccagagtacacagtgc

SEQ ID NO: 139836 - DNA, 122 bp, Homo sapiens
tgaggagctcatgaggatgctggccgaggacgagctccgggatgctgtcctcctggtgttcgccaacaagcaggtaggcgcccgggccagcctggggaatgtgaggagccagtgtgggttcc

SEQ ID NO: 139837 - DNA, 122 bp, Homo sapiens
ggtagagggtgggaggagggaccttgtctgtccccctcagctgggtaggaaaccccgactcggacctgtccttgagcgcgggggatctgggcaccccctcccccagcaggttcccgagagtc

SEQ ID NO: 139838 - DNA, 122 bp, Homo sapiens
cagcttgcagccagggccgttccagcaactccaaggctggctggtgtgcgctgaagctgtcgggagtcggaccagctgcacagttaatacatatgtgtcctaggctcctctctccttccaac

SEQ ID NO: 139839 - DNA, 122 bp, Homo sapiens
caggaagaaagcaagcttatgtgcttgatactttatcctaactaggtatattcttatttccgccctttttacttgaggcacagatacaccatcatctgcactttctgtgcctaacttatctt

SEQ ID NO: 139840 - DNA, 122 bp, Homo sapiens
agctcctccctccgggcccccccccgccaccccctcgcggaccccacgagtccccctttacgcctccatagtggattaccgcggtgcccgcaggtttcgggctccccttacccggctcaggt

SEQ ID NO: 139841 - DNA, 122 bp, Homo sapiens
gcctggagctagcagagccaagggcaggagcggggccgactccttcccgccgcgattcctcgggacttactgtggttgcagtaaagggtgataaccagtgacaggagaaggaccccacaagt

SEQ ID NO: 139842 - DNA, 122 bp, Homo sapiens
gctccgcagccctccaatggctgacttccttcagctgctgtcctggggtgccgatcgctgcggcagacgcaattttccgcacctgcgtgttgttttttgccgccgggttttggcggagccat

SEQ ID NO: 139843 - DNA, 122 bp, Homo sapiens
tttctagcacacaacgcagcctcacacctgtgcactcagtgatgggcactgcggggagggcgcaggtgctcagtggaggccgccatggactgtcctctgtccacttggggtggccctgtgat

SEQ ID NO: 139844 - DNA, 122 bp, Homo sapiens
cactcccgaagtggagcgcaggccgccgccgggcggctgcgggaagctgggccaggcggccgcagatccccacaacatccgggagccggcgaccacttccagttgctatggttacgagttgc

SEQ ID NO: 139845 - DNA, 122 bp, Homo sapiens
ggatctgaagggactgtgtgatgtggctaagcaagtgcagctgccctgcatctcttcctacgtccaagaacctcttgggcccttcctttagcccccagacaccttgaacaaccagatacaaa

SEQ ID NO: 139846 - DNA, 122 bp, Homo sapiens
aatggataaagaagttaaagctactgcttagaatgaagaaggccccaggcttacctgtcccgatctttaaactgtccgaaggaaattcaatagcctgttaagtgaataccttcattcttact

SEQ ID NO: 139847 - DNA, 122 bp, Homo sapiens
ccgtttcagccccatcctcgagaatgggctcctttcctgctccctctccgctcctgctggcgagtggagaccggcacctaggtccagacgcggctgcgctgcctctcctagccatcgagaca

SEQ ID NO: 139848 - DNA, 122 bp, Homo sapiens
gggccgtgaggtaactgttgcagccagcggaggtgggaggcgacactgagtctccagtcccgagaggtgcccgagggaaaaggaggcggcagctaaactggtcctggagagaagccccttcc

SEQ ID NO: 139849 - DNA, 122 bp, Homo sapiens
gcagtgagtacctttgtttctgggattaaacagatggctggatcgatcccaccagcttctcgcctaaggcagccctggagaggtggacctttgacagggaacctgatcccctgtctccctga

SEQ ID NO: 139850 - DNA, 122 bp, Homo sapiens
aagcccacgatgtcatctgtgaggggatcaagccaacagggggtgagggagcttctggcacgcaccccccagcatcccacgacaagggcccccaggcctgggcccccagcaggccctgagct

SEQ ID NO: 139851 - DNA, 122 bp, Homo sapiens
ctccaccgcgagcgttgtgggtggggcccgccgagcccgcctccccacctcccccggcggcgccccaggctgcagtgttccgggagctgggttataaaatgccgggttaagcggcaactcag

SEQ ID NO: 139852 - DNA, 122 bp, Homo sapiens
tgttctggggtggtctcgtggggcaaccccagagggtcctgaggccggggtagggttgggcgaccccacctagggtctacgggctgaaagcgcctgggttggccaggcctgggcacagggga

SEQ ID NO: 139853 - DNA, 122 bp, Homo sapiens
ccctgtaaagttcagaccatttgcctttaactgaccacacagcagtagaattgcaaggtgcggtggtaggagtattataaagggagttgggagctgctagtcctagtaactcatgtgcccgt

SEQ ID NO: 139854 - DNA, 122 bp, Homo sapiens
gagcgggggcccagccagcgaggccgccgagccaggcccggccgcgtacccaggctttgacggctgccattcagggtggacgatgcctaaagattccaccgctaatattttttttattaata

SEQ ID NO: 139855 - DNA, 122 bp, Homo sapiens
tctgcccagccacagcctgccccgcctggagggcacaccttgcctcagtgccttctgctgcggttttccatgctccatcagcatccctgggttccttgtgttcttccagtccgccctctgtc

SEQ ID NO: 139856 - DNA, 122 bp, Homo sapiens
cattgttcctggacaagatctctactgttatttctaagttcacaataccattcagactgtcgcatagacctgtagcttaaattaaatttgaccactgcataaacattttcttgaccacttat

SEQ ID NO: 139857 - DNA, 122 bp, Homo sapiens
gatcaacacttaggttgattccatatctttgctattgtaaacacggctctacagtaaacacggagatgcaggttatcttttttatatactgatttcttttcctttggataaattccaggtag

SEQ ID NO: 139858 - DNA, 122 bp, Homo sapiens
acttacttgcaactcagcacagcctttgttggagatgtccaggcagctcaaagctggagccgctgaggcaagcctgcagaagggctaggctggtgatgaggagcaaggcgtggttgagtcct

SEQ ID NO: 139859 - DNA, 122 bp, Homo sapiens
agaagaaggctgaacacaggctgtgcactggttaccagatgcagttcacaggtagacttccgctggatcacatgatgttttcaaaattatttgaattaatagccaacattttaaaattggga

SEQ ID NO: 139860 - DNA, 122 bp, Homo sapiens
tttccactttccccttggctaaagcgaagggctgatttcctgggtgaccgtgaggagtgccgttactattgtggcgtattaactctttctgaacctcgggcctcatttgtcagtggctttca

SEQ ID NO: 139861 - DNA, 122 bp, Homo sapiens
gcagtatttgtagtaccgctgggaaaatgtcaacaatcacttctgggccatgaaacctgacgtttctctgatttatggcaaaacacacctctagctgtctagggctgatgcagtcaggtgtc

SEQ ID NO: 139862 - DNA, 122 bp, Homo sapiens
gagggacggccgcatgggatggccagggtgggggccccaagaggacagcctccgcccgctcgcccgcccgccaaggaaagccctgggggaacacactttcaggctaaggggtctgaggaaga

SEQ ID NO: 139863 - DNA, 122 bp, Homo sapiens
aaaaaacaaaaaaccaggatggcatctgttgggcggggctacggggcttgtgatgccgcccgctgaactttgtgacacagccgcttgcggagacaggaagcggtcgcagcacgtcaggcccg

SEQ ID NO: 139864 - DNA, 122 bp, Homo sapiens
gaggtgggagcagcatcgtttacttcctctccatggccactgtcccgagtatggcgtgcgcgccacaaagttcaggaagcgtggctgacctctgagaccccgaccctcttcctcacgccttg

SEQ ID NO: 139865 - DNA, 122 bp, Homo sapiens
aatgagatacgtgggagcccaggtccatgagttctgggacccatgtgggtgggcttccaacggtcctacaggacaacgacaaatggcccttgacttagggcaattctgcttatttctaattg

SEQ ID NO: 139866 - DNA, 122 bp, Homo sapiens
gtcttgacgccatggaagcgtctggccacctcgtggatgtacgacttcactttgtagcgccggtagtacctgattattgtcagagctgccttggttcttttgtaccgcatgcgggccagggt

SEQ ID NO: 139867 - DNA, 122 bp, Homo sapiens
ccgggcctgtgtgcgaactgagtgcggggattgccacttctgccgagacatgaagaagttcggggggcccgggcgcatgaagcagtcgtgcctgctccggcagtgcactgccgtgagttctg

SEQ ID NO: 139868 - DNA, 122 bp, Homo sapiens
agttggtgacccagcccacgtagagcaggcagatgatgttagtcatgccgctcaggatcacgcaagtggacaccaaagttttggtcttcctggtgcacaccattctgggctccttcctccat

SEQ ID NO: 139869 - DNA, 122 bp, Homo sapiens
cggcttctgagttgctttgtgggggactctggtttttcactgaggaaagtggacggtcctcgtgagggctcagccagcattcagccctcagtctccagcttgcactctccatagaggtggca

SEQ ID NO: 139870 - DNA, 122 bp, Homo sapiens
ggtaagcgcgtggaggagagccccgtgagggttcgcacggttgctcactaggtacgcacccgggtccaaagggatgcgcacccgcgctcagacttctcggcgcacacgactgtactttcagt

SEQ ID NO: 139871 - DNA, 122 bp, Homo sapiens
gaagaaatgccacatgtgtgcactgcgggtgggcgcaggcccacgtgaagaaatgccacacgtgtgcgctgcgggcgggcgcaggcccacgtgaagaaatgccacacgtgtgcgctgcgggc

SEQ ID NO: 139872 - DNA, 122 bp, Homo sapiens
cgaactccggactgggggccacgtggaggaggccttggttcagctctgccccatgcctcacgggacacacatttatcacctggaaacagcggccagtgctcaggaaggctcatgccattgcg

SEQ ID NO: 139873 - DNA, 122 bp, Homo sapiens
accccgcagcggagcggcggcttacagacctggggccacctggagacgccgggatgggaccgcgagggcagctccgcgcggaggtgggaccggcgggttgggaacggagttggggcccgtcg

SEQ ID NO: 139874 - DNA, 122 bp, Homo sapiens
cattttccactctgcctactaagccttttcctagactgaaagacacagatcacgcttccacgagctgagccaacacagcatggcaggagtaaatccacaacccaaagaaaaccgtactcctg

SEQ ID NO: 139875 - DNA, 122 bp, Homo sapiens
gttcccctccggccggtcatccccccgcaggttcccctccggcccgggtcctcctgcggccggtcaccctcggatgcttagagaagtgaagaaacttggggcttggttgttgttgggttggt

SEQ ID NO: 139876 - DNA, 122 bp, Homo sapiens
ccacagctccgctagcaatcgcatcatcggtgccaaggaccacgcatccatccagatgaacgtggccgaggtgagctgggagcccgggaggcgggaaggttgtgatatatgtgcgggaaagg

SEQ ID NO: 139877 - DNA, 122 bp, Homo sapiens
gccagcctggcactggctctggcaccaggtccctggactggacaccaatctccacggttccgaattttcctaagtgatgactgtgaacaccacatgcacagaaacgagccctgagaaggggg

SEQ ID NO: 139878 - DNA, 122 bp, Homo sapiens
cgaaataacagtaactgatagagcaagttccgcacttaacctgagcctaaacgaccaaggcgctgccggcattagcgttcgtccacggccctcctcctcttagagccaagtgtattaatagg

SEQ ID NO: 139879 - DNA, 122 bp, Homo sapiens
gcacctattgggatgagggcgcgggcatgtctttttcctgcctcctgaactgcgaggtctcgttttccgacgtccgctgcagcgaatggtctctagccagtctaggatttgcagcggcagta

SEQ ID NO: 139880 - DNA, 122 bp, Homo sapiens
cggagtttgagaaaggggctgcgtccaatgagtggagcggtgagtacagcgcgtcgacggcggaggcgggaagggggcggaggccgaccgaaggcggctagggactggctgaagagggttag

SEQ ID NO: 139881 - DNA, 122 bp, Homo sapiens
gcagtatggcttgctgcctgggaagatgttcccataatgaggcattttggcccttgttcccgcagaatgtgatgctgatgttccttggactttttcccagcagagtgtgataaagtcaggga

SEQ ID NO: 139882 - DNA, 122 bp, Homo sapiens
actatcacaggtgggtgagcttgggtgcttcctgaattcttccctgagaaggatggtggccggtaaggtccgtgtaggtggggtgcggctccccaggccccggcccgtggtggtggccgctg

SEQ ID NO: 139883 - DNA, 122 bp, Homo sapiens
ctcaaggaaaaattcaatatttcatcacagatgctgggaggaccaaggtttcattgtttccgaatcactagaggtttatagcttaacaaactttgctttgtgctcattctgtccaagtacta

SEQ ID NO: 139884 - DNA, 122 bp, Homo sapiens
ggagcagaggagccgaaggcgagggcactggggtgacagggccggatctcgcagccttgccgcagcctcaacactggctttgtctcgtatgggacagggagctggcggagggtagggccttc

SEQ ID NO: 139885 - DNA, 122 bp, Homo sapiens
aacaggcttactctgtgaaacatgctggattacaagcacagactacccaggacgcagaggcggtgcaggcgcaggtttgttgtttcttctgtatggggtttccttgccagatagggggctaa

SEQ ID NO: 139886 - DNA, 122 bp, Homo sapiens
gtcctggctgtctggggcgggggtcctgcattcggtgtccgcgggagagtccctgcaggtcggcgcagcccccggccgccccctagccccgccttgcccggccccgcatgctcctgccgggc

SEQ ID NO: 139887 - DNA, 122 bp, Homo sapiens
agaccttgccaacagagtgggcgctggagaaggagccctttagtggggaccctggggccacgactaggctggcaggcccagccagcaccaattaatccatgagtattgcccagcattgagcc

SEQ ID NO: 139888 - DNA, 122 bp, Homo sapiens
gtatcaaatccgacacttgagtttttcgactgtgctcgcttagagttgaggtttctacctcgtaacaggaccgaggacctacttcaaaagcaaagggcctgggaacaggggtgaacgaaggg

SEQ ID NO: 139889 - DNA, 122 bp, Homo sapiens
atgctcggcggcatgacgtcacggagcgtaccacaccgcagtccctcgcggacggcgaggcggggcgggtagccgaagacttatgtttggtaaattctattagttaagtcttttctgtccta

SEQ ID NO: 139890 - DNA, 122 bp, Homo sapiens
tttctgctcctcagggtggcctttgtgattcctccggtggtggcagcacccccgtccctacgggtgccgcggccgccacccctgtacagccacagaatgaggatcttgaggcagggcctgag

SEQ ID NO: 139891 - DNA, 122 bp, Homo sapiens
agccagccgagggtcgccgcgccagccaaggtgggatgggggcccacagccaccgcccggcgcccgagaggccacctgcgtgctagaggcaaacttttgtctctctcggtaaagttgcattg

SEQ ID NO: 139892 - DNA, 122 bp, Homo sapiens
ttctctcactttcgccagggcgcctgtgctgggcagtggttgggagcaggaggtgtgtcccggggctctccatcatccgcctctggcctgatgggtgggggcccagcagggcccacagctac

SEQ ID NO: 139893 - DNA, 122 bp, Homo sapiens
gcagctttgactcccagcccagtaacaaacacgtccatgacgctgtggactgacagagaccgcagagctggtcaacgtgaggaatggggcccgcgccccgggggacctccaaggctgggggc

SEQ ID NO: 139894 - DNA, 122 bp, Homo sapiens
tcccgcacgagcctacaggctgtcgcagcctcccgagcttccccctgcaggacgcaccggcgaaaatctgacagaaaccactggccctgcaaagaagtccttctggtaaccagctatcccct

SEQ ID NO: 139895 - DNA, 122 bp, Homo sapiens
gagttaggaatgtgttaaaaagagctgatcagagcttttaacatgctcatcagagaaacacgcatgatcagtaaattcagcaattttcaggaggttcacagatgcccggtggcaaagccctg

SEQ ID NO: 139896 - DNA, 122 bp, Homo sapiens
tgaagttcatgacattttgtttcttacttgctgcccttagttgagatgatagtctggccccgtgtagggctgtgtgaccctgggcacttacctaacctctctgagcctcacatccctcctct

SEQ ID NO: 139897 - DNA, 122 bp, Homo sapiens
gggcgcggctttagtccagggggcggagcctgaccggacctgggtttttcgggcggctggcggacttgacagagagcgggaggggcccggatcctgggcctaaggagggtggggcgtgtgct

SEQ ID NO: 139898 - DNA, 122 bp, Homo sapiens
catgagggtgtttttcaggaattctggaggtggtgctggagagaacacgcttcttctacacgcgccccctaccagtttggtatgcacctgcagccccaaagaagaactggcgggactcgagt

SEQ ID NO: 139899 - DNA, 122 bp, Homo sapiens
ctaccagctcactgggtcggtcgctagaagactgctatagcacatatgctgcagaactgacgttcattaccaggtcactttcaaagtgttggctagcaagtctgtagttagttcttattttt

SEQ ID NO: 139900 - DNA, 122 bp, Homo sapiens
aagatgaagaagggagcgacaagccaaggaatacaggtgattgactgcctgtcattagcgcggtggctcacgcctgccattgcctgttgtccccgtcctctgtggccctcttggcttctgta

SEQ ID NO: 139901 - DNA, 122 bp, Homo sapiens
gcgtggccagctcggccttggcctgccgcgtctcctcctcagaggctgccagccggtcctcgaactcctggcggatcacctgggccaggttgctgcgctcgctagaaagctgctcgttcacc

SEQ ID NO: 139902 - DNA, 122 bp, Homo sapiens
gagcggcgggctgagtggcgtccagcggcggggaggcgaaaaccctgggggactcagaagcgggtggcggtgtagggcgtgtaaggaggagatagccaggcccctgcggggggggcgggccc

SEQ ID NO: 139903 - DNA, 122 bp, Homo sapiens
tatccgcaaagaccgcctgggcacttttgggggaatgtggccaaaaggggactctaactgcgacatctacagaggaaggagaaactggtggtgcctaagaagttgatctcgatgcgcgcagt

SEQ ID NO: 139904 - DNA, 122 bp, Homo sapiens
ggtttgcgttggggattggggtggggatttgcaccctgggtcagcctgggtgcatctcatcgggaccaccggggcgggggacatgggccgggtggctccttgggagaagagggacagggagc

SEQ ID NO: 139905 - DNA, 122 bp, Homo sapiens
cacacggccactcgcagggagcccccacccacgcagccacagcaccttgtcggaactgatcggagctgggtgataaggtgtggatcagtgaaacatctctggtgtttttccccatttcaaat

SEQ ID NO: 139906 - DNA, 122 bp, Homo sapiens
aatcctcttagcttccgtatccaccacctgcccggattgtcaaactctctgtgttttcgtcgccacccattgaaccctggagaaacaaacctgattgcagaaaatcgcacgcagcttggaat

SEQ ID NO: 139907 - DNA, 122 bp, Homo sapiens
cgagagggggcgacttgcaggaggctccccccgggggcggaggcgaaggtaattaagcggcggggagtggcgggccggcgctgggttctcggtcctcggggtcctctcccgccggcggccgg

SEQ ID NO: 139908 - DNA, 122 bp, Homo sapiens
gcaaccgcctcctgcaatttcaatgcctgatttggaccctgctgagttacatgagggaggcgagggaggcaagcgagggaggcaagggaggcaggcagccagcaggcaggctgctggctgct

SEQ ID NO: 139909 - DNA, 122 bp, Homo sapiens
agctctcacactctggccagtgtctgatgcaaaccagaacccagtgaaatcaccatgagtcgatgggggttatggatggtaactgatgggtttttctcaggccagatcacagttccagtctt

SEQ ID NO: 139910 - DNA, 122 bp, Homo sapiens
cgcctggagcctggcggggaggcggcaggaggggccgggagagcctgattgagcggcggccgcagctgcataaggactgcccggggctgcgcgccgggaacctcgcggggctggcgggcgcc

SEQ ID NO: 139911 - DNA, 122 bp, Homo sapiens
tggagctcttcgcctgagtcgtttcatttgacagctgtgaggatgacacaaaacaaggaacgggaagacaccaggagggtacagagtcatttgccgaggtattgattctgtgaaaaaattaa

SEQ ID NO: 139912 - DNA, 122 bp, Homo sapiens
gcagcctcgcgggctgaggccggagggtgaaggcgccgctccttgaagtgaggaaaactccggtgaggaagaggctctttccaggtcctgtgcgtgttgctgtctttagagctcattagggt

SEQ ID NO: 139913 - DNA, 122 bp, Homo sapiens
taaaacaagcagcagttttaaacagctctgaagcacgtgtcctctgttagtgtgtggtcgcgtccctcacgcgtgttcccgttgccttcagggaagagtcttctagacctaactcagcaagc

SEQ ID NO: 139914 - DNA, 122 bp, Homo sapiens
ggcaggcagggctgggtcatgcaggccttggactttattcagaatgaggcgggcagcctccgaaggttcagcaggggagagacaggtcaactggacattttcagtagagtaccctggccacg

SEQ ID NO: 139915 - DNA, 122 bp, Homo sapiens
cccgcggggtgaggtgggcctgtattccatgatggcggtggtcgtggctagacagacttccgccatcctgactcccgccctggcagccttggagcggcagcgccccttgtgtggagcagggg

SEQ ID NO: 139916 - DNA, 122 bp, Homo sapiens
tgctaggaaattaaatacataatttaaagaacataagatagcccagaagtatcattatcccgttggggaagtgttaattaaaagatataataaagacaaattttctaagttcctttcatggg

SEQ ID NO: 139917 - DNA, 122 bp, Homo sapiens
cagttctggggcctctttaggcagcaacagccaaggcgggtgggaatatatgcagaggcccggctgcctggctcttcatggtggtgggagcaaccctactgccaccaggaggggcgttgggg

SEQ ID NO: 139918 - DNA, 122 bp, Homo sapiens
atgtggcagactctccttccttttgaaggctgagtaatactccattgtgtggctacacaacgtttatccactcacccgtcggtggacacctgggctgctttcaccttttggctgttgtgaat

SEQ ID NO: 139919 - DNA, 122 bp, Homo sapiens
cattgcgcgcgccggaagtacctacctgggataacggcggcgagcggacggctgcatttacggggtctcccggagggccagagtcggtgagcgctttttacctttcccagagatggatgcag

SEQ ID NO: 139920 - DNA, 122 bp, Homo sapiens
aaagcatggattaaatccacagtcagccataataactcctcagacatgttatgctggggccgtgtcgatgtatcagtgccagccagaacctcagcacacccacgtgggtcagatgcagtaca

SEQ ID NO: 139921 - DNA, 122 bp, Homo sapiens
accgggagaccaggcgctcgccaatacactcaatcccactccaccgggagaccaggcgctcgtcaatacattccatggtatagaggcgtgtgtatgcttggcttgagggaaatgaagaaaga

SEQ ID NO: 139922 - DNA, 122 bp, Homo sapiens
ccttgcccaacctcctcgaatacagcctctctgggagtttccctctccccgactcagccgcgctggtccctgccttttcagcgctacctgccctccgtctgggacctggctcctttcctctc

SEQ ID NO: 139923 - DNA, 122 bp, Homo sapiens
agcggcctccttaatgcgagcgggggctcgtggcgggagctggagcgcgtctacagccagcgcagccgcatccacgacgagctgagccgcgccgcccgcgccccggacgggccccgccacgc

SEQ ID NO: 139924 - DNA, 122 bp, Homo sapiens
cacagagggaatatctcagcagaatctggaaggataattcagctctgtgggctgcagatgcgtctaagtgtgtttctggttacaaaaattcatagaattgaatttggataagtctttaaaga

SEQ ID NO: 139925 - DNA, 122 bp, Homo sapiens
ataagtcggtccgtcggaaagcatactcagaggagcgtcctttggggccagagtaacttacggcctggtaagaaagacacagtgaaaccacttataatttgggaaatctcccctcactgcca

SEQ ID NO: 139926 - DNA, 122 bp, Homo sapiens
acgaagggcgccaatccttcctgtatccctcctacagataccgggtgactactgcttttgcgcccaaagcgcagtgctctggctcagctccctacagtagcgacctccaccgcagattctca

SEQ ID NO: 139927 - DNA, 122 bp, Homo sapiens
cgaccggccgcgaggggcctgcacccgcccgacaccagggagttttcaccccgcgcctcccgggtgtagttgaaatatctcgcgtctgggcctgtgagggcccaagtctcactcccctcaaa

SEQ ID NO: 139928 - DNA, 122 bp, Homo sapiens
gttaaggccccttacacttctgggtggcatcatctagccccttctcagctgctcaggtgccgtgccccactatgtagcatttcatctgtgacactgggaatgaggcgccaactgagagaaga

SEQ ID NO: 139929 - DNA, 122 bp, Homo sapiens
cttcaactatttattaccaaaggatcacaggtcaccaagcatgaggaagtactgtctatacgttttaagtaagagtccaggtaacacttattgttgttgctgcttcagagaattctccttgg

SEQ ID NO: 139930 - DNA, 122 bp, Homo sapiens
tcccgcagcagaccacccataacgggagccatttgcccagtgaggcagtttgaaaaaggccgggcgtgtagggtgcagtgagtatgcagtgatgtgggcgctgcaggcaggaggaaggtgaa

SEQ ID NO: 139931 - DNA, 122 bp, Homo sapiens
acggcggcccctgcggcttccggcttcctggccgtcaagcgacgaccgctgtcgcaaaggcgccgtcacgtagataggcggcctctaccaactcacgacagctaggcggggagcgccgcctc

SEQ ID NO: 139932 - DNA, 122 bp, Homo sapiens
acgcggaacatgaactcaggaagtggggagacagagagacccatcccccaactcccaggacgggggccaggccccctaaaaaggcacaatggcagggcaggtttggcagagtggttgagtgt

SEQ ID NO: 139933 - DNA, 122 bp, Homo sapiens
gtgcctgctactatagactatggtgagaataagcccaacctctttccctgtagagaagatcggctatcatcacctgaatgtgtaaagtaataacaccgtacaggcctactatcaaaggataa

SEQ ID NO: 139934 - DNA, 122 bp, Homo sapiens
ggcccgaaaagccccctcttgcctcaattccccgaagtaaatctgagctttgtgcagctccggagccagagcgtccagatgcggtccgggagattagcaaagtcggtggaagccaagctgga

SEQ ID NO: 139935 - DNA, 122 bp, Homo sapiens
gaaatctgcctaatgagggtcgaggccagcacacacagggacctatttgcagtaaaacaacgtggggtgacgcctaagaaatagacaacattaacacaaagggagcctactacgtagcacat

SEQ ID NO: 139936 - DNA, 122 bp, Homo sapiens
tttgaaaacctccactctagagaagaggacagctctgaggtgttagcacccacagcatctcgcaaaggggatcaggaaagcacctactacatgaaggcacatgccagggacagatggattgg

SEQ ID NO: 139937 - DNA, 122 bp, Homo sapiens
gtgtgtgtgtgtgtgtgaccactggaatgtcagaatcccccatccctaccttggaagtcccgctttttcctccctactgttaaggaacttcagactgcccctccacaaggttgcctgcctgg

SEQ ID NO: 139938 - DNA, 122 bp, Homo sapiens
cttactttttaggccttcttggggttttgtttgtttgtttgttgttttcgttttttgagtcggcaaagactagtgccaaaaagtggcgtgttttctcaggttttgagtagtgaggggaagaa

SEQ ID NO: 139939 - DNA, 122 bp, Homo sapiens
tgacacggacgtatacggatgggacactgacgcggaccgtatacttacgggacactgacgcggaccgtatacagatgggacactgacgcggaccttatacggacgggacactgacgcggaca

SEQ ID NO: 139940 - DNA, 122 bp, Homo sapiens
aaactgagcatgctcccaagactctttcatgaacatcatataaccccagcacctcagtttcgctcccataaaccttctggggcctgccttcctgacctcttggtcactccataaacctgctc

SEQ ID NO: 139941 - DNA, 122 bp, Homo sapiens
caagcgtcgaaatcgcatggtgggcggcactggtctccctggcggcctgtagggtgggagcggacgtgaagaccagtggtcttcatgacaccaagaagtggaaactagggtagaggggtctc

SEQ ID NO: 139942 - DNA, 122 bp, Homo sapiens
ccgccccacccgcagggtgcgctcgccaggcctggggcgtggtgttgtctgcgcaggcgccgtgtgcccaggcgcctggcgtccgcgtcggcgatccggggtctgggcgcggcgaggtgggc

SEQ ID NO: 139943 - DNA, 122 bp, Homo sapiens
cctcagggctcccaggggtctccctggctccctcctccaggcctgcctcccacttcactgcgaagaccctcttgcccatcctgactgaaagtagggggctttctggggcctagcgatctctc

SEQ ID NO: 139944 - DNA, 122 bp, Homo sapiens
tttccacctgcataatgggggcccacaaggcgctgtccccatgccccgagaggcgtgtctcggcacagcaaagtccacctgcgctggtccgcggagccccgcccagctaggtgagctagggg

SEQ ID NO: 139945 - DNA, 122 bp, Homo sapiens
gaaagggccgggaggggcgccggaacgctgacacccgaggggcgcgggaggtgccaagagcgcgccgcacactcgcacccgaccccgggagacacaaagagcggctccgcgacgccggccct

SEQ ID NO: 139946 - DNA, 122 bp, Homo sapiens
acggcaaagtgagtccatctccagcaagtgacaggtgccaagatgaagggtccagtgactcgcacaagtcctcagcggcatgcagggcgccgaggccccttccctgccacccggagtgctgt

SEQ ID NO: 139947 - DNA, 122 bp, Homo sapiens
agcgtctaacaacttccaggcccttgactgtgatgtccttggcatctcccaggcccaacccgatgagataaagcatttcaaacttgaggagaagagagactgcaagacgaagtggacagaaa

SEQ ID NO: 139948 - DNA, 122 bp, Homo sapiens
ggctgttaggaagcccctcgaattctgtgaaaatgagggtttcttaactcacactgagagcggaaaggggcagacccttttcataactccctcaagtgtgtgttacctttctttaccagcat

SEQ ID NO: 139949 - DNA, 122 bp, Homo sapiens
tccgggcgaggcggtgaggggcttccggttggggtggcagggtggtggatctgtcggtcccgttttcccgtcgcacgtggtggccactgttggcttctgaatggtttgcaaggcggatatcc

SEQ ID NO: 139950 - DNA, 122 bp, Homo sapiens
gaagcccactgcaatccgtgtgtgtcttctcagaaatcaaaacatccccgggacttcacacggttattaccaggatcagagactgaggcagacatgaagggcgaataaaaaagattcgatct

SEQ ID NO: 139951 - DNA, 122 bp, Homo sapiens
agcaataggacggcccgtgagaggcaggatccaggtaggagagaaaaggagaccaaagcacgtcttgcacaaggctggtatggaaagggctgatccttcttgcaagaacgggagaatgcact

SEQ ID NO: 139952 - DNA, 122 bp, Homo sapiens
tggggtgtgccatcagctgccttgcagctaccactgtctactgctttcacacagcgtggtcgggaagaatggaaactaaagaggcttgtaactacctgtaactgttccaccaggaaatggat

SEQ ID NO: 139953 - DNA, 122 bp, Homo sapiens
gtcctcagcaaggctgaccttgagaccctggcgggagtagcagggcgggcttcttacctccgcagcccagccgtctggctgctccgagccccttgtccttccactccctgcggtggccgtgg

SEQ ID NO: 139954 - DNA, 122 bp, Homo sapiens
ggaggggaaacactatccttggggtttgatttctgagtaaaaagtaatccaacgttttcacgttgctaaatgcaatagtctttcttgtttatttgtttccagtcgtccttctggttctcttg

SEQ ID NO: 139955 - DNA, 122 bp, Homo sapiens
atccggtaagttttttatctgagcagcggcctgggtgagagcgaacatgagctttggaagcgcactatttgtgtgttgtgcatctctggacaggttacttatgctctctgggctccagtttc

SEQ ID NO: 139956 - DNA, 122 bp, Homo sapiens
gtatggccacatcatcgctcgtcccgcgagggacatgagagccctcccggcctgagctggcgaagctgagacggggcctttcccatgggctctgctgtgcaccggctgctcactttgcttta

SEQ ID NO: 139957 - DNA, 122 bp, Homo sapiens
cagctggacccggacgccgcggcccggctcgcccgcccccgccctcaccgctcccggggacgccagctgcccacccggccacaaaacacccggccagagaaagagctgtccgcgagcaagaa

SEQ ID NO: 139958 - DNA, 122 bp, Homo sapiens
aagcggccccaattagaggctttggttctgcaaacttgatgctcggcacttgaactgtcacggcggagccttaattagcagcggcggggagaggtcaggacaactcagcagtcttgacaagc

SEQ ID NO: 139959 - DNA, 122 bp, Homo sapiens
agaacaccagcctccggagaaagagaagcaaaggtgattgcatagctgccagctggaagccgactctcgtcatagggcatactcgccccactgtgcatcgccggtgcctacctcacccagtt

SEQ ID NO: 139960 - DNA, 122 bp, Homo sapiens
aaagccacagcagcaactacacagcccacagaagaaccaaaggtggtcacatatcctgggcgaagggtttgaatggcagggtgggaacgggagtggaatctgagctcctatggaaagtcagt

SEQ ID NO: 139961 - DNA, 122 bp, Homo sapiens
aacatgctgtcaatgattaatgtttgcggcatgactaaggtgcttgacagttgtgagctccgccgtcaatgctctctgagacggagaagaccactgggcctaggagaggccttggcgccgcg

SEQ ID NO: 139962 - DNA, 122 bp, Homo sapiens
cggcggcctctgggaaatgtagttccggagaacacggagtccttctggggctaggttttccgcttccggtgctcagtggctagccgaatagccgtgtttgggacctgggctcgggcttcttg

SEQ ID NO: 139963 - DNA, 122 bp, Homo sapiens
ggggagcagagcgcgggacccgcaccgtggtcctctgattagggttgggtcgtggagagccggcgacgtggaaacgctccggattcaggaacggcgcccaccccattgccgctcggccgcgt

SEQ ID NO: 139964 - DNA, 122 bp, Homo sapiens
aggaaaagcaaaataaaatgcacgaagcttatcagaccatactctgctgctcgttttttccgaagcttagaacctgactacaattccctagatcctggggcgggggagctctctaggttccc

SEQ ID NO: 139965 - DNA, 122 bp, Homo sapiens
atacatgttacagctgaggaaactgaaaaattggggctgcttctcactgataggtggtaacgctgagatctggaccaggtatctggctccactatgggtggagatctgggtccagattcagg

SEQ ID NO: 139966 - DNA, 122 bp, Homo sapiens
gggcgcagggtctgctcaacagaagcgtctgcccagggcacatgggatgtcagtggcctccgggccttgccctgcctgcccgtcccagcctgaagaaagtgcccagccttctcaccagtgcg

SEQ ID NO: 139967 - DNA, 122 bp, Homo sapiens
ttgaggaaaacgttcctccgcttccagatccacccagatgtgtagcagaagacatttcatcgccactattaagtattgacacatttatcagaaagaagaaatccggtgacaaatttcagaga

SEQ ID NO: 139968 - DNA, 122 bp, Homo sapiens
ggtcctggcagaagccctctgctctccacagcccctagcacagccccacgtccacagcagcgctacatccagggatgagcagggagaatctgagaccgaaacctctggggcctgcccgtgct

SEQ ID NO: 139969 - DNA, 122 bp, Homo sapiens
tcacaagttcctatgatggcttggaaccctgaccagcattttcttctgaagcaacaccctcgtggtatgttcagcctttttctagatctctccaagacagagaaatacttgttgctcctgca

SEQ ID NO: 139970 - DNA, 122 bp, Homo sapiens
gccggggaagggatagggaggtgaactggtcggtggagggggccctcctcgccggggtcccgccgagaggaaggctgggccagagggacgtccggggcaaggctgggaggagccggccgcac

SEQ ID NO: 139971 - DNA, 122 bp, Homo sapiens
aaaaccaaattaaggtcccagtgtggagttcaggatgctgggacctcagaccatgctgggcgcccgcctcccgcccgccgtggcccgaccgcgtccaagaaggcccagcggaggctccgggg

SEQ ID NO: 139972 - DNA, 122 bp, Homo sapiens
ggttttctaattaacttatcaaacgcttcccgatgctaggcactggggaaaatgcaaactcggattagaaaggggtttctggtctctaaagaaattcgatctagtaatgaactcccgaatta

SEQ ID NO: 139973 - DNA, 122 bp, Homo sapiens
cgggtgtttaaaagtatctaaaaataacagctccatcgccgagtccaccgccatgtttgccgcgggcggggaacaggggggaggacttccggggcagcgctccagcctccgcgacagcgact

SEQ ID NO: 139974 - DNA, 122 bp, Homo sapiens
tacagggcttaactcattttatccttaccacaatcctatgaagtaggaacttttataaaacgcattttataaacaaggcacagagaggttaattaacttgccctctggtcacacagctagga

SEQ ID NO: 139975 - DNA, 122 bp, Homo sapiens
tcacggtggctgaggtcaaggagcccttcctctgtgaagggcggccccaggtctgcgcggcggtgaagacagactggcagtgggagggagggaacccgacaaagagttgagacgcgtagtcc

SEQ ID NO: 139976 - DNA, 122 bp, Homo sapiens
aatcaaacgcaacactcagagagactataagccatgcaacaatgtcttttattatgtatgcggttttaaaattatttcttgaatctctccatacacaggcaaaaataagtgtgttacttaac

SEQ ID NO: 139977 - DNA, 122 bp, Homo sapiens
gcttctaggggggagcccccacgctaaaggtaaagacaaattgcataaaatgtctggacacgatgcgaacaggtgagaatagcgtaggtacaggccgccagggaggaagaaacttggaactt

SEQ ID NO: 139978 - DNA, 122 bp, Homo sapiens
gtgtacacgtgtacatgcatgggcaaggtaccagccacctgtcttaggctggctgctagacggagggccaagtgtgtgagggggtattgtgcagatttggtgagttgagggagtgcaggata

SEQ ID NO: 139979 - DNA, 122 bp, Homo sapiens
ggcgtgagcccatgcccagcctgaccactgtgtattctttgcagttttaccatttgtgtgcgggtacaggtacagggtagtaattgctttaggcatgtgcatttaaatatctcaaagctatt

SEQ ID NO: 139980 - DNA, 122 bp, Homo sapiens
ctcgcccagccccagcctggccgaggcacgccgtcatgcataattcatgaaaggccagctcgttcggccacccagaggtcccagtgcgtgtgcggtacagccgaagccccgcccactgacca

SEQ ID NO: 139981 - DNA, 122 bp, Homo sapiens
gctggcagatgcagcaaaactaatatgtgtaaatgctttaaagcaataatctgcttacagcgacacttccccgaacggcggcaggactgagggggaaagagaaggcgcttggcagccagggg

SEQ ID NO: 139982 - DNA, 122 bp, Homo sapiens
ctcctcattctaggcggcagtggcgggcgaagcgtgagcgctgcggtattttgtcccgaacggtgacccctcctcccaggcaggctgcggcggcgtcggtggcagcggagcacggagaagag

SEQ ID NO: 139983 - DNA, 122 bp, Homo sapiens
ggacagatcaaggagcccttctccagccccctaatacactagtgctggacaggggaatgccggcacctactgtgtgccagatatttgcaaacacccttttccaagcttacaccgccaccgct

SEQ ID NO: 139984 - DNA, 122 bp, Homo sapiens
cactcacacacacatacacgcatgcaggtgcacacacagacacaaaaagacacaaaaatgcgaaacttgtggcactaaaaagactgtggaaagggtgcttccttacagtatgaaaactgaaa

SEQ ID NO: 139985 - DNA, 122 bp, Homo sapiens
aacatttgcgcacaggtttttgtgtgaacagagcataagttttcattcctgttggataaacgcccaacagtgcaatggctgggtcatatggtaagcacatgtttagttttttaagaaactat

SEQ ID NO: 139986 - DNA, 122 bp, Homo sapiens
ttattcttccttggccaaaatctatcttctgcattgaactccaacagcacttaattttttcgtttcttttttctttttgacacggagtctgactctgttgcccaggctggagtgcagtgtgg

SEQ ID NO: 139987 - DNA, 122 bp, Homo sapiens
aacacagggagctttgggtcaggcacgcctggtctgaaggcccagctccaaagtgaaggccgcatgcattgtctctggagcccaccgtgccaggcctcgtgctgagcccacacatgcatgac

SEQ ID NO: 139988 - DNA, 122 bp, Homo sapiens
gcagaaatgaggctgatcgacccagcagctctaacaaagatcatccatcggacatctggtcgcctctctattttggagccagaggctgtacgctcttccccggtggggagggtggggcccca

SEQ ID NO: 139989 - DNA, 122 bp, Homo sapiens
acacctctcaagcctctatggaagcagaaggagcataaaaataaatacagaatttgcccacgttcctcttaagcccaattgagtaggattggcttgtggatgcagcagcgtaagtgacaaac

SEQ ID NO: 139990 - DNA, 122 bp, Homo sapiens
gccctctggacatcgttcctcattcagaatgggcggggctgggggagttgctgcttactccgcggggttgaactggagatggcagatgatgactgtgaagtgggtgcctgctgcaggcagca

SEQ ID NO: 139991 - DNA, 122 bp, Homo sapiens
ttatcaacatgagtcacattttcactttcttgttcatttgcacactttagatctaaatgccgagaactaggtttttgtttatatagcctcggttgtctctggaaggaaaaatagttccacgt

SEQ ID NO: 139992 - DNA, 122 bp, Homo sapiens
atatttcactaagggtttttcaaaagaaaatgttccctggttactggtttcccattgtttcggtgtgaggataaagcataattgaatgcagtaacacagctgtcagtcccctcatatgcttt

SEQ ID NO: 139993 - DNA, 122 bp, Homo sapiens
aagaaaaacaatcaattatcaaagaaaataaatgtagtcatactatactacttgacttagcggtgaacaatgattacatggtcatattaatgaagaacttaaataagatattaaccagaaat

SEQ ID NO: 139994 - DNA, 122 bp, Homo sapiens
gcagaaggcatgcattaaagggttgtcttgctaggcagagttttgacttttaaggacaagcgtagaaaggcatctcttcctggcttgaggagctggcaattaccagggagatgcctgccttg

SEQ ID NO: 139995 - DNA, 122 bp, Homo sapiens
tctaagtggcctcacttagcgtaagtaactctataaatcaggggaactgttagcatccaccgcacaggctggctatcaatctcccccaggtcacagccaaacaggaaggggagaaaaaagag

SEQ ID NO: 139996 - DNA, 122 bp, Homo sapiens
ctgttgtgagaaagccttcagcagcaagtcataccttctagtgcatcagcaaactcatgccgaagagaaaccctatggttgtaatgaatgtgggaaagacttcagtagtaaatcatacctca

SEQ ID NO: 139997 - DNA, 122 bp, Homo sapiens
tgctgatgcttcattcatgagaagtagcttcagtcaggaatctgccctccctccatccaccgtacgtatgcacacatttagaaagtcttagtataaatatcagtaagtcttaaactcataga

SEQ ID NO: 139998 - DNA, 122 bp, Homo sapiens
cccgttgttggcagcgtcgtgcaaaggcgtgtcgtcatctaggcccttggtgttcacctccgcacctgcagccagcagctgcttcgcgacgtcgtagtagccccggttacaggcctcgtgca

SEQ ID NO: 139999 - DNA, 122 bp, Homo sapiens
cccagcacccaagttctctgggagagggcgtgcgtttcccgggccacagacacaccttcccgcaccttcctgcactacggagcttgcgaacgcgagcacacaatgaaatcgcacagagcatg

SEQ ID NO: 140000 - DNA, 122 bp, Homo sapiens
ggcggggacggggcggagggcgccgtttgtcagccctattgacagacgtgatggggtttccgtccgtgatcaatgattctcatctccgggccgaatgagccgcggggcgcccatccatcccc

SEQ ID NO: 140001 - DNA, 122 bp, Homo sapiens
agatgcgggtgtcggggtggacctgcttcagcagagtagctctccttgcggctgcgcttgcgcttcttgccaaccttctgcgccttggtcaccgccttcttggagcccttcttcagggaggg

SEQ ID NO: 140002 - DNA, 122 bp, Homo sapiens
gagtggaaatcggaggcatatttggggcatggcaaatcgcgctctgtggctggaaggtcacgttcattggcaaggggaggaaaggcctttcagggatgtatgcaggcagccttctggcacag

SEQ ID NO: 140003 - DNA, 122 bp, Homo sapiens
gggcaggggcgcgcctggcctggggtgtgtctgggccccggctccgggctcttgaaggaccgcgagcaggaggcttgcgcaatcccttggctgagcgtccacggagaaagaaaaagagcaaa

SEQ ID NO: 140004 - DNA, 122 bp, Homo sapiens
cagagtccactgagcagtagagggttgctgggatgcgagcccctcccaggagccagggcccggctggagggtctgcatgccgctgcggcagaggaagatgtgtaggcacatccccatgtgtt

SEQ ID NO: 140005 - DNA, 122 bp, Homo sapiens
tccaaacgggaatgggtgctggggttttctttatggagccaaggggtatgtggagagcagcggtgtttagttaaattacaggtctagatgcagaactttccagcaatgatttgtgagagcct

SEQ ID NO: 140006 - DNA, 122 bp, Homo sapiens
ggccaagttactaaggaagaagtacataggggaatggaggtgagagtcaaagccaatcgtcgcaatgatgagcatgttccccaaggtggtggctaaatacatacagagaaagagcacagaca

SEQ ID NO: 140007 - DNA, 122 bp, Homo sapiens
gccagagacaaagcaggacagacagatggggagagaaagcagaactaaagtcagtggccccggagcagagtggaacagaagccaagagccatgagagtaggcagatctggaacctgggtctg

SEQ ID NO: 140008 - DNA, 122 bp, Homo sapiens
ctccctacccctggggcccagctcagaaccgggcagacacccccttcaaatgtcttcgcacgtaggttttgcacagtgtttatctgctggtgtctcagggatttgacagtttccttaatatt

SEQ ID NO: 140009 - DNA, 122 bp, Homo sapiens
caggtgaatatgcttcctggaaagattcactgacacccggaggcttagaggagggcagggcgggcccgggcaatctggggaagtctatggcattcagtcctggccagagggcaagagaaggg

SEQ ID NO: 140010 - DNA, 122 bp, Homo sapiens
gagccgggagagagtagcactacgccccctccctccctcctctctctacccctcaccctccggggctaaatgctgctagctcaaaaacccacagtccgcacggggtggggattggggacaag

SEQ ID NO: 140011 - DNA, 122 bp, Homo sapiens
gaaaggaggagcctcaacagaacttgccaagtgtctgcatgaaactatgacaacagaggccgggcgcagtggctcacgcctgtaatcccagaactttgggaggccaaggcaggcggatcaca

SEQ ID NO: 140012 - DNA, 122 bp, Homo sapiens
cgctgttaaattctttgagagtgtgttcgaggggggtgctgtttatttgtttgtgttttccgttgaaaatgttgcggtacgtggtctatcactgtcttcacggtctgggggtggactgaggt

SEQ ID NO: 140013 - DNA, 122 bp, Homo sapiens
cccagggtagcagtggctgaagcagcttccgaatcccgaaccccagcgctgcaaggtttccgggcaaccccacttaactgggagcaggtcaaagtcatggagctaagtctagggaggatgga

SEQ ID NO: 140014 - DNA, 122 bp, Homo sapiens
tcccaatatcgcaggaagtgtacacccccgtgtgagatggtccttcataatattccaaggcggagggggtgatatgactacatatgtcgcacaaagtgtacaccccccaggaatattgttcc

SEQ ID NO: 140015 - DNA, 122 bp, Homo sapiens
cctgaccactaggtccagcgcagccccagtgcctttctgtcactgcaccctgattcatgacgttgtgtgtgctcctgctatcacagcctggccctcatcactgtctgcaataatcgtactcc

SEQ ID NO: 140016 - DNA, 122 bp, Homo sapiens
cctgttaggtccgtgcgcccgctccctgcccggcggtggctctgcgccctctgggccacccggcaccatcgcttttgggaggacatgcacgtggtgttctcgcaaaaggccgtttccagccg

SEQ ID NO: 140017 - DNA, 122 bp, Homo sapiens
tccagcacaaatgaacattcacaggactcacctctgctcctgggctccttcctgaatccccgatcaagaagaggaaggttctctcccaaaggaagcaagcgtgaaggcagagagcacttgca

SEQ ID NO: 140018 - DNA, 122 bp, Homo sapiens
cgcatccttgagagggggtaggttctaggacaagggtggggctcaaaggccttgtctccacgacaacacaaacacagacttcaggcacagactacaaccacctgacccctgaccctgtgact

SEQ ID NO: 140019 - DNA, 122 bp, Homo sapiens
atagcaaaaggaaagggccgctgggtgtctgtgggtcctgggcagtcacagaagccaccgcgctggcggggaggagggggaccgatgcggtccatgtcccgggcagccccaccttctctgcc

SEQ ID NO: 140020 - DNA, 122 bp, Homo sapiens
aaagtactaaaagtctttgaaatgcagaagtaatggcgtaagctgtctctttctccgcctcggctgccaaacagggaaaggtgccctgtccagtggacacgtgacccacatgaccttagcta

SEQ ID NO: 140021 - DNA, 122 bp, Homo sapiens
ctactgggcgagcccgccgcccgcaggttgggtggcagcacccgccgcgaaccccagccacgctccccagtggacccaccaggcaaaggcacctgctgcctgccctccagggctgatgctgt

SEQ ID NO: 140022 - DNA, 122 bp, Homo sapiens
tgcgcgcgcaaccagggtggtggcggagtgcgcatgcgtggttcccgggcgaagggaacgcgcgctcaccgtgcgcgctcgcggccgggtggtagtggcggaggagaaaggggtcggcgcac

SEQ ID NO: 140023 - DNA, 122 bp, Homo sapiens
ccacggcacacgctctgaggtaccagaggtagcaaagcaaaataagcgcggggtcccgcacggcagcgcgggtgcagcgcccaaacctcgcgagatttgttggctgggccaagtaccaccca

SEQ ID NO: 140024 - DNA, 122 bp, Homo sapiens
tttccatggcccccatagtagctaacatgtactgaacagtgggccaggcactgagctcagcgctctacctggaggattgccttgggccttactgccatttttccaaggaagagactgaggcc

SEQ ID NO: 140025 - DNA, 122 bp, Homo sapiens
gaagccccaggctggtgttagaagctttggcttcaaagtctggctctgctgctgcccagccgtgtgaccctagatggtcacttacccgctgagtctcagcttcctcacttttattttatttt

SEQ ID NO: 140026 - DNA, 122 bp, Homo sapiens
acctacggtaccagtaattctggggaggcaagtactctggaaacgacggagaattaactccggaattacctagttatctggcatcacggtgaaaagagttccacagtgtgagtagtgctgga

SEQ ID NO: 140027 - DNA, 122 bp, Homo sapiens
gttctcccacgggtttacacgaacgcgccacattaatgaaggcaagggactgacaaactacgaaggcgtgttttcatctactctgtcccatcctgtgtgtcaaccttatttatgttatttca

SEQ ID NO: 140028 - DNA, 122 bp, Homo sapiens
tttaggatacactgtttcaagtatacagtgatttttataaaattaaaattccttacagaacgaaaggttttaaaatgtggcaaaggcatttttgttttgaaactgtgtgcatttatccagat

SEQ ID NO: 140029 - DNA, 122 bp, Homo sapiens
aggtgagtcgctcccgtggctgccacgcacaggcctctccctgtggctccggccgaggggcgaccccagtccccaaccgtcttagccgccacctgtacgggcgccctgcctcctaagggcgt

SEQ ID NO: 140030 - DNA, 122 bp, Homo sapiens
ggatggttctttaaccagccatggcaggcagagcgaggtgtgcagacactcggcggcgttcgcggcttcctgacggtcccctccctctccttccccccgaggctcctccctctgcctctccg

SEQ ID NO: 140031 - DNA, 122 bp, Homo sapiens
ggcggcgatggaggcgagcaccacgctgatggagacgcagctgaagagcttgctcggcagcgagtagcccgggttctccatggtcagccagaggcggcggcgcaggcggccacagcgcgccg

SEQ ID NO: 140032 - DNA, 122 bp, Homo sapiens
ctgggagaggatagggactccggaggggtgtaccgtcctccaggaagccctctgctgggtcggctccgtgcctctgtcttgggaagtgatggacttggttgccttatgctgactggggtctg

SEQ ID NO: 140033 - DNA, 122 bp, Homo sapiens
ccaattccttacctatttccagacttctcagactgttgccctctgagctggatgctactgcggctgccactgctattactactgataatggtgatagcttattttattatttattattttac

SEQ ID NO: 140034 - DNA, 122 bp, Homo sapiens
gggcagcaaagtgtggagaattagcccggaggaatggcctgggctgtgtgcgctctccgccggccctcacagctgcagccctgctcatgcgatcttgctgtgcagtcctccccctctaccgt

SEQ ID NO: 140035 - DNA, 122 bp, Homo sapiens
cagggatcctaggttcgaatcctgtctctgttcgcaattcgctccgcaacctcaaacaaacgacctcagtttcatctatgaaaagctggtaaccatcgtcagttgccaggccatgaagagag

SEQ ID NO: 140036 - DNA, 122 bp, Homo sapiens
tcgccaggcttctgtaccaggcaatcaatcaaaagagaccttcccacgcggaacagccgccgcccctccaccagactgctgcctctgacatttcctgcgtgcctggactgagcctgtttgga

SEQ ID NO: 140037 - DNA, 122 bp, Homo sapiens
gcccagaggagagaaggcggcggcgcggctgaggtccccgcagctgggccaagactcgggcgctgggaccgtccccgtcgaacagcgtcagcatgtccccttcccgcacattcaatctgcag

SEQ ID NO: 140038 - DNA, 122 bp, Homo sapiens
agagcgccgctcacggaagcccagcgtcggaggacccctggctgcagccgccaatcccgacgtgtcggccgaaacccctcctccggcgcagttggctcctcctggatcccgcgggactcggc

SEQ ID NO: 140039 - DNA, 122 bp, Homo sapiens
agaagtggaaaccggtgtgaagccccggcacacccacctcccactcgctcctggatggtccgatctgccccagtatgcaatccccagggccagagtctcgagcccactgccccggaaccgtt

SEQ ID NO: 140040 - DNA, 122 bp, Homo sapiens
atggggctctggggcagctgctctcctccagggtttctaatgaaactcccggctctcagccgggactgtcccctgtgtcctccaggaaagacactggcttcagggcccgttcccaccggagc

SEQ ID NO: 140041 - DNA, 122 bp, Homo sapiens
acgtgctgagtgggtcgggcagggaggaggggaaagtcgccatttggaaaggcgaataaacgtggctgagtctgccaagtggaactgtgccctatgtgtggggactggctgccccctagagc

SEQ ID NO: 140042 - DNA, 122 bp, Homo sapiens
gtgggtcccggccgccgcgctctcctctctgcgtccgcgcccggcgcgccccgagggtggcgggagcggtgccggctactgcccccaagtctaggcctagactgggccccgcgccccccagg

SEQ ID NO: 140043 - DNA, 122 bp, Homo sapiens
cctggtcccggccggctctgcccgcgggcgggtgtttctctcggggtcgtagggtcggagcggagctcaatggcaggtgcttgggggaccaggaggtctcatcccaggacctggctcctcta

SEQ ID NO: 140044 - DNA, 122 bp, Homo sapiens
gagggcataagaggacggggttgacggggggaagccaggcaggagagtcctggagggggacggtggccccgtgtacagcctgcgcagctgccagagttcctgaggagaccgaggcgcagaca

SEQ ID NO: 140045 - DNA, 122 bp, Homo sapiens
cggtgattctgttccgccgctgttctcggcctttctgatttctcggtgattctgttccaccgctgttctcggcctttctgatttctcggtgattctgttccacagctgttctcggcctttct

SEQ ID NO: 140046 - DNA, 122 bp, Homo sapiens
tcggacctggagctgtggggagaaggcagccttttagtgaggagccgccgcgtggcgggacgcaaggaaaaccacccgagccgctgaacagtattccgcgactgcactccagggcaccggga

SEQ ID NO: 140047 - DNA, 122 bp, Homo sapiens
ctcctcctccctgcgctgctccccaggagccagtggacacaagcagagggatacaaatttcgcgcgggcagcgctgaggtgggccgtaaagaggaacggaccggaagtggtggtggttatag

SEQ ID NO: 140048 - DNA, 122 bp, Homo sapiens
acatatcacacgtgcaactggcctgagcccttttcagacaattagtccgctccaggtcagcgtggatccagggtgagtcagaggcgtcttcagatgcaaaacctcagaatcaaaaaggagga

SEQ ID NO: 140049 - DNA, 122 bp, Homo sapiens
ggagctgttctgctggtcagggggctgggggctgccgtcagtggacctggacagcctggccgtgctggtgaggggtggcgccggcgccctctgctgtgccctgatgactggggagggggccg

SEQ ID NO: 140050 - DNA, 122 bp, Homo sapiens
gagggtaagggagtgcagcggaaaggtgataatcagggggaatatctctgtgttccatctcgctgcttttctgttgctcaataaacacagttttggttacgcttttttttcttgttaaaaaa

SEQ ID NO: 140051 - DNA, 122 bp, Homo sapiens
gggtactgtccaagatccagcaaacacaaaagcttgcaggtggggggaccctccatgtcacgcagaggccaacgatttctccttctcttgtcaggaaacaaaatgtggtgtgaaagcttccc

SEQ ID NO: 140052 - DNA, 122 bp, Homo sapiens
agggtggggactagaggtcacagaggggccctttgacctctggggctattccctggggtccgcggagtagaagtttgctttgtgctgtagtgcactctgttgggagagcctaactcagcacc

SEQ ID NO: 140053 - DNA, 122 bp, Homo sapiens
ggaaggccgagttgctccccacagcctcacgatcgtgagaggcagggctgggactcatggcgtccaaggcgtttggtgctgtgtctctccctgagggctgcgtgcagcctccccttccagac

SEQ ID NO: 140054 - DNA, 122 bp, Homo sapiens
gtgtgtatgcgcgcgcgcgcgagagagagacagagaattagctctagaagccctactcatcgccggagggtccatttgctccccgcaagtctagcatctaggaaaaggtgagcgtctggggg

SEQ ID NO: 140055 - DNA, 122 bp, Homo sapiens
aaatgcctggccggggctggatgtgccagggctggagaccaaattgtctccctgagaccccggtcttacggagacccttaatagaggagtcatagtagcttaaaagaaaacaagaaagaaat

SEQ ID NO: 140056 - DNA, 122 bp, Homo sapiens
gtctgcccagggagaggccggcaggcaggccatttagggcggcaaaacctctattttaaccgtcttctgccccggtgattcacaggacagccaagacagaggcggcattgacttcaggatgg

SEQ ID NO: 140057 - DNA, 122 bp, Homo sapiens
cagcttctatctctcccctccatcttcttgggtccttgttgtccactaaatgatctgtggcggcaaattgatctcaagctttttcttgcaagagatagaatgctgtcttattttattatctc

SEQ ID NO: 140058 - DNA, 122 bp, Homo sapiens
gcagccgcgggctctcggccgccgcctgggaactcagggtcagatttagtttcacaacaacgtctcctcgtcacggcaacccaactggaggcagaagccggcggggcggccgagcggggcgg

SEQ ID NO: 140059 - DNA, 122 bp, Homo sapiens
tgtcaatgaaattctcaactccaggcttctcttagggaaagaggcctccccaggatcccccgtcctaccccgggcggtcgggttgagttctggagagactgctccaatccccgaggcggaag

SEQ ID NO: 140060 - DNA, 122 bp, Homo sapiens
gatcatccatggggtcacccatgacgtggagctgcaggagtctgtcatcactgtggtggccgcccgtgtcctccgccagacaccgccgctgttccaggcggggcgatccggggaccaggggc

SEQ ID NO: 140061 - DNA, 122 bp, Homo sapiens
agattctaaagctcaattcaagtgacacattaatgataaactcagatctgatcaagagtccggatttctaacagtccttgctttggggggtgtgctgacaacttagctcaggtgccttacat

SEQ ID NO: 140062 - DNA, 122 bp, Homo sapiens
gggctaaatgaaagacacaccctaaaacacatcctgaggtgaaactttggtggggcacaccgttgccgtaggttcagatcttctctcttgtctttagacatgtattttcatacatttttaaa

SEQ ID NO: 140063 - DNA, 122 bp, Homo sapiens
aaagacgttcttccgggggcgttgggaagaacacactcggtcctgcaaatcaaatcaccccggtttgggtgggactgcacttgaccctccccttacgtaacagcgcctgggacggcctgtca

SEQ ID NO: 140064 - DNA, 122 bp, Homo sapiens
attcccttacacaggcttcgccaaaggccctgacacttagggctttttcactgctgcaaacgttggaccggcttgtgagaaggagtacagttaatctaactttggtatactgtatccagaga

SEQ ID NO: 140065 - DNA, 122 bp, Homo sapiens
tccagcccttcctcttgagctgtcagtgagcgagataagcggaggatgtggggctccggccggcggtgcaggactgtgtccctggccagccagggtgacaccggcggggacgactgtagcat

SEQ ID NO: 140066 - DNA, 122 bp, Homo sapiens
gttaaattagggttccgccaagagccggagcggtgtgccaagtgaaaactacatttcccacggggcagcgggtcacgtcacagaggaacgactacgcatgcgtgcaaggtcctccgcgcgcg

SEQ ID NO: 140067 - DNA, 122 bp, Homo sapiens
catggggcgagcaaaggacactgatctggacctgctctctttgcaaagatttgaggaaggcgcccctttctagggatggggccacagtgattatcacacttggataactttcctgctcaacg

SEQ ID NO: 140068 - DNA, 122 bp, Homo sapiens
actccgtctcaaaacataaaaaaagaaaatgaaaaagaaatgcccacctgcctttctggacgactgcttaccgcggttccctgcatacggccacgaaaatcagcaacggcttcacatttatt

SEQ ID NO: 140069 - DNA, 122 bp, Homo sapiens
aatcagggctcctcggagaaatggctgattttagtactgggcaggaaatatagaaatggacgtggagcatctcatagagctagaaagtaaggaaatgcttaaaaaccaagaacaaccaaact

SEQ ID NO: 140070 - DNA, 122 bp, Homo sapiens
ctccaggagggagcttaacgggtgtggtggacctaagtaagggctgtcctgcctgcctgccgtgtggtcctggaggatgaggcttaccaaaggctcaaaacagcgtccccgtggagtgacat

SEQ ID NO: 140071 - DNA, 122 bp, Homo sapiens
gtctgcagatgaagaaatggaggctccgaaagaagcaaagcagttcatcgattcgctgagcgcggttgtgccccaggcgctgttgtgggcctggggacgctgtcgcgaacgaaactgcgaac

SEQ ID NO: 140072 - DNA, 122 bp, Homo sapiens
gaatgcagttgatttatttcaggttcttagtgcctggaagaatgtaaacatttaaaagggcgatcattattgaggttgtagatatacagtaccccgtgacttcctatttgtgctgtagcttt

SEQ ID NO: 140073 - DNA, 122 bp, Homo sapiens
aagggctgggctggggcagcccggaggcagagagaccgagagtgcggggcgggcgagggacgccagggccgcgtcaccccagcccgttcctagctccgctcccggcagggggcgccctggcc

SEQ ID NO: 140074 - DNA, 122 bp, Homo sapiens
ctttccggaaggacctcatcaccgggcagcgcaggagcagcccctggagcgtggtggaggcgtcggtgaagccaggtgagccaggagggcgtgggacccggcagtgcgcagggcagggccgg

SEQ ID NO: 140075 - DNA, 122 bp, Homo sapiens
ttacaagcatgagccaccgtgcccggctgtttttctttctttctttctttctttttgagccggagtttctctctggtcacccaggctggaatgcaatggcgcgatcttggctcactgcaacc

SEQ ID NO: 140076 - DNA, 122 bp, Homo sapiens
tttgtcttactagttaaatcctcacctaatctcttgggtatgaatataaatgtgtgtcatcgttatattgttcagctagatgagcaagtatcttagggtagtaggtagcctggtggttttag

SEQ ID NO: 140077 - DNA, 122 bp, Homo sapiens
cagagccccggccccggccccggccccgatccccgcgccccggccccggccgggcaaccgcgacagctcgtgcactcaccgcagggtctggcccggacctgccctgtcgcgctgccatcgtc

SEQ ID NO: 140078 - DNA, 122 bp, Homo sapiens
gcccgttctcagtgtgggtcttcctggcttctcagtgtacttcttgtctacttttcaccacggttcggtctactcttgatagcggctttgccaaatctccctctcccttcctgtcccttcaa

SEQ ID NO: 140079 - DNA, 122 bp, Homo sapiens
tgcatcgccccggacctggccgggaggaggcttggccggcgggagatgctctacgggcggcgcgggaggagcggccggcgggacggaggtaggtggccgggccgggggacccagcgctgccc

SEQ ID NO: 140080 - DNA, 122 bp, Homo sapiens
aataataacaataaaaaaaattataaataactttcttcattcagcatctgctatagatgccgaatgagaaacaagggcaggggattaagcttgaaatctcattccttgctgactcaggctct

SEQ ID NO: 140081 - DNA, 122 bp, Homo sapiens
cttccccagacttccaacccaagttcctgatgtgtagctcaatggcctggttcagatgcacgaactagggctgtgagggggctgattggtcagccatggagtcacatgacccccatggacag

SEQ ID NO: 140082 - DNA, 122 bp, Homo sapiens
ggcggaagttctagggagaacagcaccagacccgtcaggccttgcagggcgtgtgcatggcgggcagtgggccgggcaggggtccctcctcaccttggtggagttgggctgcagggcatgca

SEQ ID NO: 140083 - DNA, 122 bp, Homo sapiens
cctgccagcccaccgtgctagtcttaagagcagccagggcagttaggaaggtccttctgccgcgagagaaaaatcacatgtggtttgggggcttggagggaagagaaacggcttttgctctg

SEQ ID NO: 140084 - DNA, 122 bp, Homo sapiens
tcgtcggggaggctcgggccgcacaggagccctttgagtgggtgggaggctcaggcatggcgggctgcaggtcccgagccctgccccgcgggaaggcagctaaggctcggtgagaaatcgag

SEQ ID NO: 140085 - DNA, 122 bp, Homo sapiens
tgaactgagactaggggaggtgggggctgggctctctgcgggaaatgattgtcacaacggcggaccaataggcaacattagtatcactcttgaaggaccgttttccaattcagttttttttt

SEQ ID NO: 140086 - DNA, 122 bp, Homo sapiens
ctcttgaaaacaaacccctttttctgaatctgctcagaaacctccgttctcatggtcactcggcaacatgctgcggagaagaagactcggcctcggaacagccatgcccgggttcgatccca

SEQ ID NO: 140087 - DNA, 122 bp, Homo sapiens
gagaactgggtgatggcaccattgatgctattgtagatggccaagtctagctcctcaaggcgggccaggaggcgatactcatgctcctttaaggagtgatacagctgctcaaactcccaaac

SEQ ID NO: 140088 - DNA, 122 bp, Homo sapiens
ctccctctccccgagaggcacctcagtgtgcccggctgctgccaccacttccgcaggtcacggctgcattccctgggcagcatgtctgctggctctgagggccgggagctgcaacgtcctca

SEQ ID NO: 140089 - DNA, 122 bp, Homo sapiens
caaggtggcagggcactgaataaaatgcagccccccagattttcttccaagtggtgtaatcgtaaacatgggttagctcctttctaaggtggcaggaatcaaagacagaggtaataaacttt

SEQ ID NO: 140090 - DNA, 122 bp, Homo sapiens
aacccccaccagtctggaggattttgagcctagacactcctccagagcaggctcctgtcccggctgcggaagtgcgcgcgccctcggcaccttaacagttccgcccctctcccggacccagc

SEQ ID NO: 140091 - DNA, 122 bp, Homo sapiens
agatcatgatccgctcgattaacgggcaggaggtaatggatggagcccgccatgctgctccgggtgccgctgctgatgctggggaccgagccaggatggagggaggggcgtgcacaggagaa

SEQ ID NO: 140092 - DNA, 122 bp, Homo sapiens
cggagctggagagcgcagcccggcctcccgccccgccccggccgcccgccgcccgccgcccgcagcccgcccgggacccacttgtagccgccgcaggatcaaactcagttcacctctcgcct

SEQ ID NO: 140093 - DNA, 122 bp, Homo sapiens
ggaatatgaaacctgtcttctacccttttcctcttggattgccaagatgataggattgagcgtataaaaaaagagggtccacatctaacccagtattggcactcccactaacccctagatat

SEQ ID NO: 140094 - DNA, 122 bp, Homo sapiens
aaaaaaaaaatgtgggcactggagctttagagtagactggagaggtcttaacttcatctgcgcacgtgggccgcgtctttagtgactttttaaactctcgtaagggaagtagagtttgtttt

SEQ ID NO: 140095 - DNA, 122 bp, Homo sapiens
tgaaggaggcagacggtcagcccagggaggacagggctgaaaagcaaggaggaagagtctcgaagttgcaggcaccgtgtcactagcacatgtggtggaagatggttttgggaaataagagc

SEQ ID NO: 140096 - DNA, 122 bp, Homo sapiens
tcagggtggccgctccactcttcgtgcaggcgagatggggctttctgtgtctgaggaaggcgagcggcccagccagccggccagtagtgcccccaccgctagggagtcctcctgccctgtgg

SEQ ID NO: 140097 - DNA, 122 bp, Homo sapiens
atcaagggatccttgggacagatgtgcttgggcgttaaggcagcctgaggacctagtctccggaagcttctgtgaagtgtgactgggctgccctgcctggcacggtgacttgaatcttcagt

SEQ ID NO: 140098 - DNA, 122 bp, Homo sapiens
ggccaagactcagggagacattgagacagagcgcttcgcacaggagcagaggggtcagggcgaagtcccagggccccaggcgtggctctcagagtctcaggccccgaaggcggtgtatggat

SEQ ID NO: 140099 - DNA, 122 bp, Homo sapiens
tggggggtcccaggggcacccactgtgtgcgtcccaataacagcagagactgagccagggcggccgatgtgaggggtggagtcagaggtcaggtgtgaggaagagccagtgggcaggagaga

SEQ ID NO: 140100 - DNA, 122 bp, Homo sapiens
tataaaatccttagccagattttgttttcttgcagttagcttctgttttgctaacttgcccgttgcacccttgcaacgtattttcttttcttttctgtttttcttttgagatgaagtctcac

SEQ ID NO: 140101 - DNA, 122 bp, Homo sapiens
caggagggtttgcatgttgtgtgggagcgacactggtgccctcagctaactgccaagacccgccaaagtggaccctttcggccagcacagccttggtgatggacgcagaggggcagggcgga

SEQ ID NO: 140102 - DNA, 122 bp, Homo sapiens
tcgcgttcccgctgctcgcgcctgcgccgcccgccggcctcaggaacgcgccctcttcgccggcgcgcgccctcgcagtcaccgccacccaccagctccggcaccaacagcagcgccgctgc

SEQ ID NO: 140103 - DNA, 122 bp, Homo sapiens
ccgccattcatcatcactgcggtaatggaaaagatggctcacttccgcgcacacccgccgcgtgcccgtggtcattctgcttttacggaatcgtcatttgaagttcctttcccatgacccga

SEQ ID NO: 140104 - DNA, 122 bp, Homo sapiens
cgcggctggtttcaggtttctggcgaggccggtgttcggctggcggctagctgggactagcggaacggcggagtctcgattggcagtgcctggacaggcgcaagggccggcgcgggctccgg

SEQ ID NO: 140105 - DNA, 122 bp, Homo sapiens
tctctgttcttgggaagtcgattgagcaacagcgggggtcaggtgaggctccttcactaccgatgcacaccgagtgctgggggaggttctcttctctctcaggcccaaccccagggcccctg

SEQ ID NO: 140106 - DNA, 122 bp, Homo sapiens
ctacttccggaaggaattcttcaccccctggcacgactcccgggaggaccctgtcagcaccgagcttatttaccgccaagtcctccgaggagtctggtctggcgagtacagcttcgagaagg

SEQ ID NO: 140107 - DNA, 122 bp, Homo sapiens
tgttgaggctcctgatgcagacaagggagcagtgtctgcacagggggtctggatcgcacccgacaccatccaggtgcctgcgtgtgctggtcccgccatcaggacttcccctcgtgaggagc

SEQ ID NO: 140108 - DNA, 122 bp, Homo sapiens
tggctctgtccatcagtgtccaaagcagcatccacttgtacacagtggaaataaccttcccgtctcctgaaacacatgtctgcctctcccatatcactcagtttttgaagtgggctttgtga

SEQ ID NO: 140109 - DNA, 122 bp, Homo sapiens
aactgtttgacagaatctactaaatgtactaaaggtgaacacatgcaaaccctatgaccccgcaattccactcctaggaatatacccaacatagctcataatagccccaaactgggaactac

SEQ ID NO: 140110 - DNA, 122 bp, Homo sapiens
ctgtttgggggagttatttggtccatcaagcctcccctttatcccagcatccaggaagctcggagctcaagttcagtcactgtggcaaatggcagcgtggccacatctgctccctcctcctc

SEQ ID NO: 140111 - DNA, 122 bp, Homo sapiens
aataccaatgcagcagtcagggagaaaaacagagttcttggtcccttgtaaatagcttgccgttactagtgctgggaaacagaagcccataagagaatcggtggtttagttctggaaaattc

SEQ ID NO: 140112 - DNA, 122 bp, Homo sapiens
tggaaagactaaattcattgtggactgaagcataatcacaaacaaaagtgtcatgatacacgcagccaagattagcaaacttcgctaggaaaatgagttgctgggtggtactagggtagact

SEQ ID NO: 140113 - DNA, 122 bp, Homo sapiens
tttttcccaggctgttgtttttctcagttctgtgccctgcaggggtctctgtgtgctccccgcctccccaggcctcccccacactcccgttccctctgtcactccccgtgctggcccacggg

SEQ ID NO: 140114 - DNA, 122 bp, Homo sapiens
gctattttacaacattgtagctgattgcaatgcaaaaatagcccggcccctagacaggtacgtgaattctgttccgtggagattcggttgactacgctccccaactgtggaagaggccagct

SEQ ID NO: 140115 - DNA, 122 bp, Homo sapiens
ggggatggggaagaatgcactatcttggggtggggggacacggtgtttaaggaccaatgccggagcacttaggatgatggggtgtttaggaattaaaactggattcttttccggatgccaaa

SEQ ID NO: 140116 - DNA, 122 bp, Homo sapiens
gacgtgcagagaatacaatttgtgatgactatcctgcatatgcaaaaattctgtaagtatcggggtggctgtcagatttttaattagcccgttcttatttttaggagatgcttctgaaagaa

SEQ ID NO: 140117 - DNA, 122 bp, Homo sapiens
aggaaggccaggtgttccttatgctcctcggacaattccagcagcatcttcactgtcctacgatttcacccggcagcgccgaccccgccttcgccacttccggcgcccgtgtcccggcgcct

SEQ ID NO: 140118 - DNA, 122 bp, Homo sapiens
gactgccctacacaatgcttagtgcataatgggtattccaaaaaacattacttcactctccgatttgaagatgctacttttcactgtggcattattcacaacagcaaagacttggaaccaac

SEQ ID NO: 140119 - DNA, 122 bp, Homo sapiens
ctccccattcttgtcttaccctctgcaaatgtgataggcacaggacaggagtaggcacctcgcctactgctgcttaacctttcagcttctccaggcccccaatcctgcttgctcccagcttg

SEQ ID NO: 140120 - DNA, 122 bp, Homo sapiens
agagggaagcaggatgggtgccctgagtgcttggccccatttcctggggcttactggcctcgtgggtgggagttttataggctactgctccttggggaggcctcagtgattgaggatactcc

SEQ ID NO: 140121 - DNA, 122 bp, Homo sapiens
aggaggccaaggagctgggccggggaccgcgggcaaccgggagcctgcgcggagaggacgcgggctgttggcctgtgaatttaaggagcccgaagctcgcctggcagctcggggcgatgcat

SEQ ID NO: 140122 - DNA, 122 bp, Homo sapiens
acagaaccccgttcttctctagactgagctgacctgtggtttccccagaaataaaaacgacgcgtgcaggtttctccctccccttgacgtcatttcgtttgatcctttgtaatgattttccc

SEQ ID NO: 140123 - DNA, 122 bp, Homo sapiens
ttctgccctgtctcccctgcctcccggcacttctgtcttttcagggacatcaacctttgccgcacttcacagcaattttctggaatgtagttgtagccgcaaccatcttgcatggtagactg

SEQ ID NO: 140124 - DNA, 122 bp, Homo sapiens
agaaaagtaacctacttgcaactttgaaatggtttgggtttagaatagccaaatgatttccgacagtaaaacttcaggcatgacatgagcaaaaaatataatgtgtaatataaagcactggc

SEQ ID NO: 140125 - DNA, 122 bp, Homo sapiens
ctccatggcgctgtctctgccaagcccttccctttctggcccacgagccctctgtctggccgccagcctgggctttctccagctgatttgtaggtatggtgaataatgggtgagcctgtcca

SEQ ID NO: 140126 - DNA, 122 bp, Homo sapiens
tttctgccttcaacactgactcctaaagatctcttcacctgaccatgcagggcccttagccgggctgtcccctctgtcaagtggtttctaatccagagacagtggcagcaattgtctgtggg

SEQ ID NO: 140127 - DNA, 122 bp, Homo sapiens
caagaccaagacgtgtgagagccccgtgagtcccattaagatggagttgctgtttgaccccgatgatgagcattctgagcctgtgcacaccgtggtgttccagggggcggcagggattggga

SEQ ID NO: 140128 - DNA, 122 bp, Homo sapiens
cgtatcccccagggagcccgaggctgtgaccgggaggcctgcagctgccacggatgctgacggacctgcactcaccacaggaggtccggctggagggcgggtctgggcaggggccaccgggt

SEQ ID NO: 140129 - DNA, 122 bp, Homo sapiens
aggactgagtatttggaaacgtgttcctttggggcaaagatgacacctcctaggttgatgcgtgattggcatcagccagggcctgaatttatgtttcttataatggttttatagttcttgat

SEQ ID NO: 140130 - DNA, 122 bp, Homo sapiens
ccgggtctcgcggtcgctgggaggagggtgcagttccaggtttcactcttgaagttgcttcgctggagaggccttagaggcctttgaaatttgaaagatttcttggaccagcggccacatcc

SEQ ID NO: 140131 - DNA, 122 bp, Homo sapiens
caaattccttgagcaaatgtgtgtttgctgaccctggaacccatctttgaagctccccatcgctaatgaaaagtgaactctacttcctgaccttttcagctgttctgggaatccagccataa

SEQ ID NO: 140132 - DNA, 122 bp, Homo sapiens
gagctgcacccaccatttcaaggaatattaaaaccacatgaggtttttcagttcctcttacgtcgatcaccacctttgattaaacatcctctcttgcaaattttttttttcttttttgagac

SEQ ID NO: 140133 - DNA, 122 bp, Homo sapiens
gactccctgtggttagcctgaaagatggtgtcattttcttgtgggcaacagctataaaagcgcttcctgcattataacccaaaatgctagaatttcaaaataatgatcacctgcaactctca

SEQ ID NO: 140134 - DNA, 122 bp, Homo sapiens
ccctccagtgatactgtgaccatgatccagaagggaagaggatgatactactttcaatgtcgcagggggtgtacacgcccccagtgataatgttcctaatttccacgtgggagaggctgagt

SEQ ID NO: 140135 - DNA, 122 bp, Homo sapiens
ggaatatggaggttgtttactttgccctcttcttctcactaagtgcactgaagctctagacgttacatgtaaaacaaacgtaggattctaaaaggtagagaaaagaaggcagagtagctggt

SEQ ID NO: 140136 - DNA, 122 bp, Homo sapiens
ctgcatccgtgaggaagtataagtcagcctcccggagaactccccgcgttcgtttcctctcggacttccaacccaggcagtgggctggaactaaagtgggaacctccaaaaacaaacaagta

SEQ ID NO: 140137 - DNA, 122 bp, Homo sapiens
agattttttttccattaaagagatgaagatggcgtgggactcacatgtaggcagcgtttgcgatcagatcatcactaacctctctgtgttacattctgacgtttctggccctgtttgccttt

SEQ ID NO: 140138 - DNA, 122 bp, Homo sapiens
taaaaactcctaagtgcattctggcaggaataaataaaaaatggcaaagcctgttgtggacggtgcagagcccaggaaggtaaccaagtgagtaaacagctaaggcaggattatcctcattt

SEQ ID NO: 140139 - DNA, 122 bp, Homo sapiens
cggcgagcttggcttgctggtttacaggcgcctcagctcaggcaccctgtcgcccatggccgtccagggttttcagggcacctgtgtcactctccgaaatttgtgtcagcgctgcgccagac

SEQ ID NO: 140140 - DNA, 122 bp, Homo sapiens
ccaaacagggcttctccaacactcttcttaagtaccaaaggacagaacattcatcttcatcgtacctaaaacaggtccttgagcaagtaaatgtttaaaaaaatgcttctatccgatcttca

SEQ ID NO: 140141 - DNA, 122 bp, Homo sapiens
tccgggagcatcagggatccggttggagagaggctcatacggcggtcccaggggccacctcgagggggttgaccggagctgggtctgggagctgcagcagagggaaggcggcatgaggagag

SEQ ID NO: 140142 - DNA, 122 bp, Homo sapiens
gctagggagtgaccatggtaccactggacatgagacactttcctttagctccataagggacgcataaacctccagtgggcaaactggacatgccccatcctcaccttcctttgttaaaaatc

SEQ ID NO: 140143 - DNA, 122 bp, Homo sapiens
agggcagaggttgtgcttccggtgaggagggtccctttcccttttgtgtatcagtgcactcgaaaacacgccgggcttaatcttaagcaccgcgcctcaccgcccgtgcttcgtaatttgtt

SEQ ID NO: 140144 - DNA, 122 bp, Homo sapiens
aggagcacatagcagccttggtgtccccagagcagctgagaggaggtagagctgagccagcgctggctctggagccaggcctccagctggaccccagctttgctgaagactcgctgtgtggc

SEQ ID NO: 140145 - DNA, 122 bp, Homo sapiens
gcagtggtggtcccgacgcaggatgcagacgcggcaggcagagcagtgtccgctgcgtggcggcacctggctttggcattggtagcagtaactgcaggaaggaaccacagcgtcagttcccc

SEQ ID NO: 140146 - DNA, 122 bp, Homo sapiens
ggcgccgcaggggtcccccagattcaattctagctctcgggctggtggggcggtcgcgggcgcctctccaagggagctgattcattgtctggtaggccctctgcagggcccagctggcggcc

SEQ ID NO: 140147 - DNA, 122 bp, Homo sapiens
gcgccgcccgcattgtgcggctgcgggacacttgtgtctttggataactgggcgactgtgcgcgcgtccctgcgggacggtgttgtgaaactatggctgggctgcgtgtccgcggagccgcg

SEQ ID NO: 140148 - DNA, 122 bp, Homo sapiens
tatggcactgaggggtgcgccggctggtggaggagcagtccgatggagccctgcgttccccggggacacagggccaagctttgaggtggaaagtttctggttctgaaacaacaaggagagag

SEQ ID NO: 140149 - DNA, 122 bp, Homo sapiens
agtccaacaaatgactgtgggcctttctaggggatggctgggtattgctgcttctgcacacgtagccaagcctttatatgatacactaaaagggaaagatttagagattcttgaatgtaatt

SEQ ID NO: 140150 - DNA, 122 bp, Homo sapiens
ccctcgccacagcaggtgctgcggacagctgggcatggttggagggagcctgcagtcccacgccgtgtgcaggatcagcagtggcggcgggtgtcaggaatgcttggagggccaggagggag

SEQ ID NO: 140151 - DNA, 122 bp, Homo sapiens
cacagatcagctgcagccagggaggccgctggccggagtcagatcagatctggctgccggcgatattgcctctccaggagacaaagccaggcggccaccggaacccacgggtggctgcacat

SEQ ID NO: 140152 - DNA, 122 bp, Homo sapiens
gggccggcgcggcgtgatgtaatctcgggggcgggacgaagcctaggtgggcggggcctgcgggggcgctgtggcggtacaagaacccaggcggggccggcgagcaggtgacctccgtccct

SEQ ID NO: 140153 - DNA, 122 bp, Homo sapiens
ccccctccccagaagtgggggccgagttgcccactccccttcctagcagcggggtaggggcggaggaggccaaataatgggacccctccctccgcgcgccccctcctctcctccggccgctt

SEQ ID NO: 140154 - DNA, 122 bp, Homo sapiens
aagcgcctgagaactttaagcacattaagatgtcaagttgaatgtgttatttcagaaactcgcctacgttttctccatttgttattcatttcaaaaggtcacaaactagtaccacaagcact

SEQ ID NO: 140155 - DNA, 122 bp, Homo sapiens
gacaggcacatggtggtgtctcacagcggtcctcctctgcgttgccagaatggctaatgacggcgaacatctcttcccgccgcctttgccatccacgtgtcctctctggtgaaatgtctgtg

SEQ ID NO: 140156 - DNA, 122 bp, Homo sapiens
ctgtgctggactgagctcttgaggacggaggcacttctgttttctcacagtcatcgcccccgggtgcttcggacacgggaggtgctcagtgaaggtggcgcgggggatggctgagtggcagt

SEQ ID NO: 140157 - DNA, 122 bp, Homo sapiens
taagaggtttgagtttcttgaaagaacctcaggcagcaggccttgcagccactggggctccggaccctgccaacacctaattctgggaggaagactccttagggcgacgagggcatgcggtg

SEQ ID NO: 140158 - DNA, 122 bp, Homo sapiens
tcaaacattcctgcctcgatgcttcctacaccgccatttgcatactgtgtcccctttgtgcgtccgccacacagtatgggctctgtccagagctatcagaggcacatgaggtctaaatagga

SEQ ID NO: 140159 - DNA, 122 bp, Homo sapiens
ccccttgaagctgtttggtttgctcttgtcccagcccctgactgagccgccagcccagaacgggggcagccctcccccatgcagtcagggccagaggagcataatattgcccccccgggtgc

SEQ ID NO: 140160 - DNA, 122 bp, Homo sapiens
ctgaaaaaggtaaacctagtaatgtaattcagtaatacccaaaacatcttaggtttagaccgcagctgttctcagagcagcttggttgaccaccaccaaatacaaggttgaggacacactgg

SEQ ID NO: 140161 - DNA, 122 bp, Homo sapiens
ccacccatgcctcctatctgaacaacggcagcaacacagcgtccagccatgagcagacgacgtcccacagcatgggctccccctttctgctggcgggcttgatcgggggcgcggtgatattt

SEQ ID NO: 140162 - DNA, 122 bp, Homo sapiens
ctcggccttgcgctgctgcttcaggaggaaggccgcccgcttcttggcgagctcatcttccgctttctgttcatcctgcaagacagaggccacacagagcatgacaggaaccccctcagacg

SEQ ID NO: 140163 - DNA, 122 bp, Homo sapiens
ggaagcccccgcacacgctgtggctgccgaagcctccggtgaggccgcggtagcaggagacgccgcggtagggggcggcggtgatgcagcagcggccgggccggggcccgcaggccgagatg

SEQ ID NO: 140164 - DNA, 122 bp, Homo sapiens
cgctgggactgctgttcctgggggcgctacgagccttcccacaggtaagcgggtgacgggcgcctggggaggtgccggcggtccagagcccggacagtgtggggtgcgtgggacgcaaggga

SEQ ID NO: 140165 - DNA, 122 bp, Homo sapiens
ggcctatgacccacaagtgggtggtcaggagcagtttagaaaacactggaccaggccgggcgcggtggctcacgcttgtaatcccagcactttgggaggccaaggcgggcagatcatgaggt

SEQ ID NO: 140166 - DNA, 122 bp, Homo sapiens
gagaaaggataggcaagttccagtgcaacttccgtctcctccttccccgggtccttctcacgcactcacacacaccctgctgaaacctgatcctgaggctgcctcgcgtgccggggtgctgg

SEQ ID NO: 140167 - DNA, 122 bp, Homo sapiens
tcccagggtcaatgtaccgtgagaacgtcgctcctggaatatttccccggtctcaaaatacgaaagtgaccctgcagggacagcagaggacttccatcttgggaccatgaggttactgcacg

SEQ ID NO: 140168 - DNA, 122 bp, Homo sapiens
ggccctgttgccacctggggcctcacatgggcactgcttgtgcatttcccctttctgtctcgagcagagtgtgtgctcatgtgcgtcccttagcgcggggtctgtgtgactgaagttttagg

SEQ ID NO: 140169 - DNA, 122 bp, Homo sapiens
gaatcctttcatcttccactcgttttctggggtgcagcgagtgccattccctcagttctacgtaagtcaactgagctgttccctgctggtgggtgtgcggttggtttcccttttgaaggctg

SEQ ID NO: 140170 - DNA, 122 bp, Homo sapiens
gtcaccatgcgcgtcaccgaacaacattacgagttattggttgagattggaagcaggtttcgccaataggaagcgctcttaaagcggcagtgagggtggctgcgtgtttccggaagacgtgg

SEQ ID NO: 140171 - DNA, 122 bp, Homo sapiens
ggagaagacaggtggctggagagccctggtctcgtggcttttatgagcatcctgtgggggcggggcactgctagtggagagggccttctgatggcattccctgggcatccgccaaccctgag

SEQ ID NO: 140172 - DNA, 122 bp, Homo sapiens
ttgggaagtcttccttgcctacaaacattagctaaattagacgcctctgaactcctatgccgccctttaattgcacttaacatgtatttcgtatgttttatgatactgcctccttctttatt

SEQ ID NO: 140173 - DNA, 122 bp, Homo sapiens
gggctcccccgcgcaccctctccggggccgaccagctcgggccgctggcacagtcacgcgcgtccacacatcacccccgcacccacacgccgggcagggtcctcgcctcttcgccccgcgcc

SEQ ID NO: 140174 - DNA, 122 bp, Homo sapiens
ctcaccgactacctgggaccccgtcacaccaagcgctgggctctgcttctccattactggcgctttgccccaaccacagcctccagccccacgtggcaggttgcctggcaacaccttaaaca

SEQ ID NO: 140175 - DNA, 122 bp, Homo sapiens
cctgcccggccgaggtgggggtcgagggcggcccggcaggcgcagctctgatggcctcggcgggttgtgggctatttaaaacggcttgtcccagctcgaagcggtcctggaagactcgggcc

SEQ ID NO: 140176 - DNA, 122 bp, Homo sapiens
gcaagcgccaagcttccatccggacttcaaggccagtggctgggtctggttttctcaacacggcctcctagtctccttcccgcttgggcatctgtttttcttatatagaccctgaagccgcc

SEQ ID NO: 140177 - DNA, 122 bp, Homo sapiens
tggccactgtcacgccagctctcgtggttgacccggtcgaggatggagaggctgtccaggcgatgaccctgcagggagcccagctcccccagcagcctcgtgagcaggtagtcagtggaggt

SEQ ID NO: 140178 - DNA, 122 bp, Homo sapiens
gcaggtctggcgcgatgcccgcccggctcagcccatctccctagcaacgaaacccttccgcgccgcgaggttgctgagccccgccccctccattggcgcgccctcgccatcccccgccctgg

SEQ ID NO: 140179 - DNA, 122 bp, Homo sapiens
ggccctccgcggtcactgcgggattcggcgttgccgccagcccagtggggagtgaattagcgccctccttcgtcctcggcccttccgacggcacgaggaactcctgtcctgccccacagacc

SEQ ID NO: 140180 - DNA, 122 bp, Homo sapiens
cccgccctcgacccaggtcctcgtccctggcccttctcccctggcatctcctggggtggccgtccctgctccgcccgtccccgtcctgccctggccgcgctcaccgtgccgcgcagagactc

SEQ ID NO: 140181 - DNA, 122 bp, Homo sapiens
cttttggctgacgtagatgttacgtactatttcatgtgttatcacactctccagtaaacacgtaacataagagaataattaaccactatcaagcgttctcatcttgagacaggaagatgtag

SEQ ID NO: 140182 - DNA, 122 bp, Homo sapiens
cggaactcaaccttgcacagcttataggcacacataaggggccccgtctgtgccgccgtccgtgcccagtcatcagacagtggccctcggcccgtcttgaccgagtgataaagccgggggtc

SEQ ID NO: 140183 - DNA, 122 bp, Homo sapiens
caacagagcgaagggaagacagaacgaaagtgctcacggggaggcggggagcagaggggtcgatagcacagatgttggctcttccgctgaacagcgggcggcctcaggcacaggactcggcc

SEQ ID NO: 140184 - DNA, 122 bp, Homo sapiens
gtgtctgggagggtttgtggatgagatcagcatttgaatcggggactcagcagacggccccgggcagcatgggtaggcctcctccaaccccttgaggccggaatgaaatgaaaactggagga

SEQ ID NO: 140185 - DNA, 122 bp, Homo sapiens
acgcgcagagatgagtttttatagacgactcacccacgcagtcgtagcagagcagggctacgggtcgggagaagggccaagaacagtgagatcccatacgtcacgtgctttgcgatttctta

SEQ ID NO: 140186 - DNA, 122 bp, Homo sapiens
tttcgagggttgtgggttttcgtgctgaggccagcagttcctgcagagcagaggtgaggtcgggctccaggctagagtcatgtctggtccgcacttgatctctcacccataaatcctttcct

SEQ ID NO: 140187 - DNA, 122 bp, Homo sapiens
cactcagcccgtgaagagggcctgctggtcctctggagcccacagccctttgtccagaggcgactcctaacctttagcaggctctgccctaacttacagtcccaccattgtctgccccacat

SEQ ID NO: 140188 - DNA, 122 bp, Homo sapiens
cagctggggcgtcctggggcacggcaggcggaaaggcgcgggccaggggtgcagtcagcacgttcgcgcccgcccccagcgagcgtcccagaggcccggggtccaggagggcgcccttggcg

SEQ ID NO: 140189 - DNA, 122 bp, Homo sapiens
cgtgccacgcgaaccctaatgctatacaaagtgtccccctccagcctggcctatgcagagcgcattctagacaaggccccagtgcaccaacagcccaattttggctatattctctgagcgat

SEQ ID NO: 140190 - DNA, 122 bp, Homo sapiens
agctagcaagttaagtggagccacggctgacgtgagtcaacaaaggtcacgtgaggcgtgcgggccgcgccgattggtggcgccagccgggcggggagggggggtcacggcggcggcgtggg

SEQ ID NO: 140191 - DNA, 122 bp, Homo sapiens
ccgtccagcacagcctgatgagaaacgggtggatgattccttcaggacgcagatgagggacgggtggatgattccttccggacgcagatgagggacgggcggatgacttccttccggacgca

SEQ ID NO: 140192 - DNA, 122 bp, Homo sapiens
tgagtggcagggctgtgattcatagccagcttcagagccacagcccatgacagcagctgccgatgctctgcccctatcctcttgccctcaacttccaactgctggcacccaagtccctctct

SEQ ID NO: 140193 - DNA, 122 bp, Homo sapiens
ctggctcttggaggtaagatgggcgtggctgatcccgaactccgcctgcgtttgcagaagcgaagggaaccgagcgagcggagctgagctcgggtaggccgcgcgaggtccctcctctccgg

SEQ ID NO: 140194 - DNA, 122 bp, Homo sapiens
catcttgccaaagaaaagggagtctgtgctcactaaaactttattggtagcgccgacaaacgaacagacagatcctgtactgcgcatgtgctgtggtaaaactggcctaaagaaaggggcgg

SEQ ID NO: 140195 - DNA, 122 bp, Homo sapiens
aataagaagcgacgtgtcccactgtcctggctccgtgggtccagtgagattgggcctgggcgctggagctgctgtggctcccgccgcggcggctgccatggaggccatgccagagcccagaa

SEQ ID NO: 140196 - DNA, 122 bp, Homo sapiens
tctcgccaagggaggcgggcatcccttccggcctcggggcggggtcgacgccgaaagaggcgggatctttgaggtgaaggcgcttctcattggacgcccaggctgaggttctttctttcaga

SEQ ID NO: 140197 - DNA, 122 bp, Homo sapiens
accctgctcattttacaggctggctcatgggtggcagaaagccctccactgggagcaggccgatccgagtgccagcctaggctctcattaacctgccaaatcatctcatctctctgagcctc

SEQ ID NO: 140198 - DNA, 122 bp, Homo sapiens
accttacacagcagcagagactcaggttctcatgccctcagctggggatccctgagcatccgggtcttctgaaatggactgctgcaaatgctaagttctgcagcaactggggagaagagtgt

SEQ ID NO: 140199 - DNA, 122 bp, Homo sapiens
tcctcatctatctcactgaccatggcacagctcagttcctgccatggcaagaacacagttcggcccacacatcccagcaccaaataacacatgaggctccatacacataaacggccagtgtt

SEQ ID NO: 140200 - DNA, 122 bp, Homo sapiens
tggacacctgggggcccagcctggtccgccgcggatgctcctaatttcaacatcatttatcgagctccactgtgtgccagtttgtgggtcaggcccgggatgtagcactgagcaagccagaa

SEQ ID NO: 140201 - DNA, 122 bp, Homo sapiens
gttcaggttgggtcttggggtggggcggggcggggcaggggcaccggtcccagcatggcacgggctgacccattcttggctcctccagctatgactgcagtaaccccctctttggccagacc

SEQ ID NO: 140202 - DNA, 122 bp, Homo sapiens
tttacttccgggacccaccactgccctcacctccagaccgctaagggctcccgcggtaaacgcccagcagcagctaggctccccacaaagtcgcccccaacccaaaaggcgtacttacgccc

SEQ ID NO: 140203 - DNA, 122 bp, Homo sapiens
cttatcgccctctgtctgtgggcctgcttccaagccattcaaaatatgcatcaaattgctcgggtttgttcatgatctccgggctaggacacagccctgttttaagctgtttaagatgagaa

SEQ ID NO: 140204 - DNA, 122 bp, Homo sapiens
attaactgaagttggaacttaagacgcaaactgccctggacacagagatacagagctgtccgtgcgcacaccccccacaaagggccggggccggggtgggagtcggcttacagggcacagcg

SEQ ID NO: 140205 - DNA, 122 bp, Homo sapiens
gatgaaacattatctgcctggctttccagagaggtgatttccccagcctccacttaccaacgtgtcaaacacattccgactggaagcattcatggctggaaaaagcaaggaagtggtgctgg

SEQ ID NO: 140206 - DNA, 122 bp, Homo sapiens
ccttgcgtctctgcgctggagcttctgacacctttcgcagtgaaaggcagggtggatagtcggtgaggagagggtctggaagcggtgggcctcgtgggagtgaccccagccaggcagagtct

SEQ ID NO: 140207 - DNA, 122 bp, Homo sapiens
atttattctcaagagtggtgaagacataacttcgattctcccagtcgacttgaaaacaaccgttgttttctttacaccttctgattccagaaggtacagtttaaacctccctcatttgcagc

SEQ ID NO: 140208 - DNA, 122 bp, Homo sapiens
cctgaccgtcatcagcaaaggctgcagcttgaactgcgtggatgactcacaggactactacgtgggcaagaagaacatcacgtgctgtgacaccgacttgtgcaacgccagcggggcccatg

SEQ ID NO: 140209 - DNA, 122 bp, Homo sapiens
ctgaatgttttccaggtactatttgcaaattttaccaaactcccaaggtaaactcattgccgaaacctcgacttgtcattgtgaaaacttgacaacctggtgttgtcactggtacccatgtc

SEQ ID NO: 140210 - DNA, 122 bp, Homo sapiens
acatcatagcactcaagtttaggcagtgttttggacaacaaatgtctggggtggaaattgcgtgtatgctgaccgtgaaaatgaaattagagtgttcctctgtccttgagagcaggaattcc

SEQ ID NO: 140211 - DNA, 122 bp, Homo sapiens
tgggtgctaataaaaatgatcagaaagaaccttaggacaccgaccatgctgtgcagccggcgggaggggacaggagctccctgggaggggcaaaacactcttcccggaccctccccctcccg

SEQ ID NO: 140212 - DNA, 122 bp, Homo sapiens
gtgacataaacaaaacatacatggaaaaatccagggccccaagcaagtagtcttggcagccgcgctgtaaggagggttcagctaacataccagtctcccaagtggaggacagcatggaccag

SEQ ID NO: 140213 - DNA, 122 bp, Homo sapiens
cccacagctttgctgggcgtggtgagatcacaccacttcattccagcctgggtgaaagagcgaaactccgtctcaaaaaaataaattaattaaaaaaaaaaagtagctcattcaaagcccac

SEQ ID NO: 140214 - DNA, 122 bp, Homo sapiens
acaatgagcaagccagggtttgtccgactttgcaacaggctctccaaggaaaagcaagatcgcaggggctgcactgagccccagtactggggccagtttctggggccctttagacaagaagg

SEQ ID NO: 140215 - DNA, 122 bp, Homo sapiens
ttccttgtcccccttcccctctggaacataagctccacaaaggcagggacctgggaatcccgttcgcctgcattccccagcaaacgcctaacgaacccaatggcccaggactgaaaattcct

SEQ ID NO: 140216 - DNA, 122 bp, Homo sapiens
ccgccccgggagagtggggttgcgggggtggtagcatggggagctcagcaggattcagcccgcacctcggctccgggtagtcgggaaccgcgcggagcgccctgcaagaggccacggctccc

SEQ ID NO: 140217 - DNA, 122 bp, Homo sapiens
tcctccttccttctcctccacaccctctcggcaccgtgccccctttcctcacctaggatgcgcgtgatgcccagggtcagcttctccaggtgcggcttgctgcagcccagccccggggacga

SEQ ID NO: 140218 - DNA, 122 bp, Homo sapiens
gtgtatgtctgtgtacaaaaaaatgacagagctgatggccagtgtatacagagcgtggcccgcggtgtacaatacccatataaggtacattgtgcaggaggggaattgctggctgcttttac

SEQ ID NO: 140219 - DNA, 122 bp, Homo sapiens
aggttttggaccatggagcctgtgtcttttgcggaatacccccatatgcaaaaatggggccgcagcctggcgtgggtgggcggcagggactcagggtgaagttgaagcaggcagaggggaga

SEQ ID NO: 140220 - DNA, 122 bp, Homo sapiens
ggaaggagtgattagttctgctcaggagagctcccaaacgtctccatgggggtgctggcacgtgacctgggcctaagtgtctgatcaggacctcagtgggcaggaagagggaagaagtaaga

SEQ ID NO: 140221 - DNA, 122 bp, Homo sapiens
atcctccagaacccttcagtaatcaaaataaataatagttcaatgcaatatatcttatctcgattataagataatcaagccatttatctggattgctgagtcttttggtgcccccttatttt

SEQ ID NO: 140222 - DNA, 122 bp, Homo sapiens
aagccggtcggggggctcagggggtcccctgggcaggcccccagagggttctgggggtgtcggtgggtggcgccgggagcggagctgctgccgagactggagttgatggcgcagttcagaga

SEQ ID NO: 140223 - DNA, 122 bp, Homo sapiens
ggcgcccggctccgctgccgccgcgaggtccatatttgcttagtgccgaggattcgcctgcgccacgctcgaccgccacaagtcgcttttttccagacgctgcagctttgcgcgcgccgccg

SEQ ID NO: 140224 - DNA, 122 bp, Homo sapiens
aggcactggtttccgacggaggacccaaccctcctcttcagattcgctgcgtttttttcccgacctgcctcaacatccccttgaaagcctgcaagcctggtgtcctgacccatcaatccggg

SEQ ID NO: 140225 - DNA, 122 bp, Homo sapiens
cttgaactcctaaccttgtgatccacccgcctcggactcccaaagttctggaattacaggcgtgagccacctcacccgacctgtatggttttttgacaggcagagatggacgtaacatcagt

SEQ ID NO: 140226 - DNA, 122 bp, Homo sapiens
atcctaaactttaagaagcactggaaggtaaaacgttctgaaggtggagagatacctctccgggactctaaaaatctgttgggggtcgtcagttgtcagttgggatcccctttataattaag

SEQ ID NO: 140227 - DNA, 122 bp, Homo sapiens
cccggcagtgccaggcagggcccgggtctgggcggtggaggacaacttctgccagcagcccgccgcgagtcctgtccgcctcccgcgcgctgcggtgcccagccccgcgccagccctcccgg

SEQ ID NO: 140228 - DNA, 122 bp, Homo sapiens
cagctgggaaggggcaggccggtgccccaggggcggctggcacagtgcccccttcccggacgggtggcaggccctggagaggaactgagtgtcaccctgatctcaggccaccagcctctgcc

SEQ ID NO: 140229 - DNA, 122 bp, Homo sapiens
agtccaggacgcgccggggagcctggaacgcggtgctgtccagagccattgcctgggcaccggggagctggactccctgctgaaccagctcagctgtcgcccaatcctagtgagtgggaaaa

SEQ ID NO: 140230 - DNA, 122 bp, Homo sapiens
gcccaggaagtttctgcgatccatagaaccctctattattacctgctcttccccttcatccggtccaagggagtcagcccttgccttaaatatttctttgaatttcctgccaagaacaccag

SEQ ID NO: 140231 - DNA, 122 bp, Homo sapiens
tgatagagatcgccaaggtaaccgagatctaaggtcctcccctcaggcttctttgcacaccgcttccaccagatgccttctgacctttgcactctggcccctcacactacctactctccccg

SEQ ID NO: 140232 - DNA, 122 bp, Homo sapiens
gtcaagcgccgccatggacacacctccagatctggagccaccttcttccttgtcaccctccgcagtttggcaggacagccaataggcacacgagatcctccatcaaggggcgttcccatctg

SEQ ID NO: 140233 - DNA, 122 bp, Homo sapiens
gcaggtctacatcagactaacagctgccttaaggtggaagaatcctctacaattcatgcccgatttcttttccagccagccagtggagtctggggagagggctgatgaggacacctaagtga

SEQ ID NO: 140234 - DNA, 122 bp, Homo sapiens
gcattagggtgttccagaaaggaagagtctcatgtgtatgtgtgtgtgtgtgcgcgcgtgcgtgtgtcttcagcaaccagtactcaccagggacctagccataggagtgcccacaaacagtg

SEQ ID NO: 140235 - DNA, 122 bp, Homo sapiens
ctaaatcactctaaaatattatgcaaatgactcttactgagtcagcctctggggtttaaacgtttcagattccttatgaggcaggggaggggcaagaggcctcttaaaggcagccgaaggcc

SEQ ID NO: 140236 - DNA, 122 bp, Homo sapiens
atttttagatctcttcttcctaagttcattaaagctttttttccccctcctgtaacagtacgttgttagccttggggttctggccaagttccaatttgagcaattaattttatttcagtgct

SEQ ID NO: 140237 - DNA, 122 bp, Homo sapiens
gctgtctctgctttttggagagtgtctggctgcctccacggggtggccggggacgaggtgcgggcattaaacattaacagtgccaggtaatatttaccctggtcacaagaaaagctgcagtg

SEQ ID NO: 140238 - DNA, 122 bp, Homo sapiens
ccctcccgactaggtctgagcggggcagccggtgaaggggccgctactggctgcagcagccgctccgggcgtcttggcccgggtgccagggcgcgcctgcaggacgtgacctcacaatgggc

SEQ ID NO: 140239 - DNA, 122 bp, Homo sapiens
ttttccctcctggagtgggaaggctcataaagggttattctacactagccaggctgaggccgccatgagcaggggtttctgtagccactgggtaggcttctccacttggcctctttctgaca

SEQ ID NO: 140240 - DNA, 122 bp, Homo sapiens
gagaaacagctgcatgcagtggtatgagaacaagtcttggactcataacacataggctcgcgtcgttggtcctccccactttttagcataaagaccaagtaggttgtggtatttgttgctaa

SEQ ID NO: 140241 - DNA, 122 bp, Homo sapiens
ttgctgggtctaaggactgagtctttgacacgtgaatgctgctgggtctgctgtcccacacgctgcatctctttcgttaggatacaagtcatcatagtcaaagcactagctggacccagact

SEQ ID NO: 140242 - DNA, 122 bp, Homo sapiens
ttggctgggggtggaagggggttcctttggctatgtgccactcgcaggtggaccatcacccgactctgcttttcttcattctccatgggtcgagttgtttgcctagtcagtcccagtgagag

SEQ ID NO: 140243 - DNA, 122 bp, Homo sapiens
gaagacgctggaataagaaacatttttgctccagcccccatcccagtcccgggaggctgccgcgccagctgcgccgagcgagcccctccccggctccagcccggtccggggccgcgcccgga

SEQ ID NO: 140244 - DNA, 122 bp, Homo sapiens
cagagccggaggaagggccactctgtgacaccgcgagcccggacgtctgtcctccagagccggaggaagggccactctgctgacactgcgatcccagacgtctgtgctccagagccggagga

SEQ ID NO: 140245 - DNA, 122 bp, Homo sapiens
ctaagttatccaggaaccttggcagagtttaatcgacagcaaggttggagcctaggagagcggagtccctagaggcagtaaaaagacactgaaaaagtggtggagagctttttctccttccc

SEQ ID NO: 140246 - DNA, 122 bp, Homo sapiens
ttgtagagcccgagagccagcaggtcttaaaggggcagtacagcgctggtagctccttttcgggctggggaaagtggagacgcacgggagagtattatagtttggtttaactccctactttt

SEQ ID NO: 140247 - DNA, 122 bp, Homo sapiens
gccaggcgctggagcgtggctaaggcagggaccacgtcccagccgccctttcccgccctgcggcgcaggcccactctcttggctctcctggcccgcacactcagctcggccgccgcggctgc

SEQ ID NO: 140248 - DNA, 122 bp, Homo sapiens
gcagggctgcaaactgaaagtgcaagaggaacagtgtccagacagtcccacagatgcaaccgcgaccctcgaccaaggtccgcagcagccccaccacggaagggcctacaggggcccagcca

SEQ ID NO: 140249 - DNA, 122 bp, Homo sapiens
ggcctggggcccacccgccgtggaagcagcctggttcgtaggaatggattcagctggagtcggctgtggacctttgtctgtgttcgctgcctcagcctgactgccattgtctttgtcgatct

SEQ ID NO: 140250 - DNA, 122 bp, Homo sapiens
caggcccggccctagctctggaggtggttggattggttcaagggctgcagccccacctcgcgtcttcccaccgcgtcggaggacgtaggcgcctgggatcctggaaggcggccagcctctgc

SEQ ID NO: 140251 - DNA, 122 bp, Homo sapiens
agcccacgttgtggggccacagacttgcagtggaagcatttttacatcaccactggctcccgctgagaccaaagttagttctgactcttcactttccggtctgtcactgtgtgggagcaggg

SEQ ID NO: 140252 - DNA, 122 bp, Homo sapiens
cctggggacccagcagcacagatgggatgtagtggatctcatgagtggcttctgtgcttgcgctcttctgggggatgcggcgacgcttctgccaacgtcgctgggcgtacagcgccacggtg

SEQ ID NO: 140253 - DNA, 122 bp, Homo sapiens
tcgcgacgcctccagcaggcccggctgccccactgcgcacatgggcacaggcttggcacacgcactgcggcattcacgtatccgcgaacacatgggtatctatttatacatgaagacacgaa

SEQ ID NO: 140254 - DNA, 122 bp, Homo sapiens
ttagaatgcgatctaaggaagccgagcttagccctggggcccccaaaatggccggagattcgggagaagtcgcttctcgtgcccacaaatcacaggaatgttgggggtgggggtgagaggag

SEQ ID NO: 140255 - DNA, 122 bp, Homo sapiens
tgaaatggttacatctttaagtgggactttcccagctgcacttctgatcccagggcctgacgatttgtactgtcccccaacacaccttccccatcttccttagctgagtgaagtgttaaaaa

SEQ ID NO: 140256 - DNA, 122 bp, Homo sapiens
cggcttccagccagcggtcagcaacctttctgaagtggcggcgggccgagtctttatttgcgctgaattcagctctggccagttttgtgcagatcagagcctctaagtaaggcgggacgatt

SEQ ID NO: 140257 - DNA, 122 bp, Homo sapiens
taaactccttgttgaaaagaactatattttatatattttttagaatttccctgggcacctcgcacagaagtggacatatagtaagctctcaatgaatacttattatttgattgaattgccag

SEQ ID NO: 140258 - DNA, 122 bp, Homo sapiens
gatgaggtggccagccttgcctctgcttcaggaggctttggcaccaaagttcctgctccacggctgcctgccaaggactggaagaccaagggatcccctcgaacctcacccaagctcaagag

SEQ ID NO: 140259 - DNA, 122 bp, Homo sapiens
cgaactccgagtgggcgtcttctgtgactgtcagggcgtgtgtggctttttagggctggccggtggggctgctgctgtttggagccctgggcttgttgctgcgcagcgggcagagttctggt

SEQ ID NO: 140260 - DNA, 122 bp, Homo sapiens
gggcgcgggtggcacgagcacctgtcacctgaccggctcgggccctcacttctccagccccggccctgcccaccctctggccggtgagagccgacagggcccccgccctcccggacccggac

SEQ ID NO: 140261 - DNA, 122 bp, Homo sapiens
cgtggccccagggaggtcttgggacagcagcaatcctgatggagcctggagcaggtggttcgaagggaactccttccttcctcccaagaggaagatctcccctccacctcaccctgccccct

SEQ ID NO: 140262 - DNA, 122 bp, Homo sapiens
aagacccttcctccgtaatcatttctgtgccttcaccaaacactggaattccagagactgcgtcttccaaacagggtttgatttttttcggggattgagatttttggggatgatttccattt

SEQ ID NO: 140263 - DNA, 122 bp, Homo sapiens
tcgcgcagccgcagtggactgcgccgggctcgggctgcggaaaaggggcgggtcttcccccgaccgagagggccagtagctcctcggctcattcctatcccgcaccaggccttctcgttttt

SEQ ID NO: 140264 - DNA, 122 bp, Homo sapiens
ggttcttccccagccggggggcctcccacggggcgtgtcctacctcttgtcacggaatcccgtgcactgggggctccttggccagagggaccttgaatacccggcccaggcagggccggacc

SEQ ID NO: 140265 - DNA, 122 bp, Homo sapiens
tctattatttcttgacctgctgatctgcctgggaacaaagagagagccccgttgcattgccggctgctggccagatcccgcagtacttcttgctttatattttcaggttctgggaattagga

SEQ ID NO: 140266 - DNA, 122 bp, Homo sapiens
cgggacctgctgttatatcgggggctcccattgcaaagcccctgcgtgggctggcttccccgggtttggtttctccccattgtgcagggtcttggggtagggtctgagccaggtcaccctgg

SEQ ID NO: 140267 - DNA, 122 bp, Homo sapiens
tgcgtcgcatcggagcgtacccatgtttcttctaacaaaggcacgatcttgaggccatttcgcgggcccttttcccactcccagcgccagctttgtctccccgccggtatgaggctgagact

SEQ ID NO: 140268 - DNA, 122 bp, Homo sapiens
cggcctcccgccccactggctcgtcctcctaccgcggccccatccggagctgcgctagggcgagtccctgctgcgcccgccaagcctccccagcacttgctcctggcaggtgccccactcca

SEQ ID NO: 140269 - DNA, 122 bp, Homo sapiens
gtactgcagacaccaggatagcctgtagtagacatggagcctgcaggcatgctcagtggtcgctgtgcagtgtgtctgtggcctaaggacgttttataccttccctggtgattgtcaaaagc

SEQ ID NO: 140270 - DNA, 122 bp, Homo sapiens
ttttaaattgcatgctgccttgagttgcatgatgaactctcaagccatgcttctccttcccgcctcgcacataaatcatccttttactcaacatatccacaccgtagatgctacccacccct

SEQ ID NO: 140271 - DNA, 122 bp, Homo sapiens
gagccgtctgcatcagaatctctggagactgaagcttggacttccttcctccctaggggccggcaggggctgcgattgctgtaagagtaggtcacgtggcagggcttcctgtatgctgctgc

SEQ ID NO: 140272 - DNA, 122 bp, Homo sapiens
tccttccgcctcccggaggacttgggtttctagtagtaagagtccggggggcattactcacggtctccccgcctcctcttcatcgtgattgggctgtcaaagtgatgttggcaagtagattg

SEQ ID NO: 140273 - DNA, 122 bp, Homo sapiens
aatctcctcggaaaggcttgctctggtctgcagctgatattggtgccacggtttgggcagcggagttccactcttacctttcagtccgaatgaggaaaacagatccatttgaaatatgtatg

SEQ ID NO: 140274 - DNA, 122 bp, Homo sapiens
ccccccgcgcccgggccaagtacgtgcggggcaacctcagttccaaggaggtgagcatgccgagccctcctctgcggcccgccggcccccgggggacgcaagggaggcgaggggagcgggta

SEQ ID NO: 140275 - DNA, 122 bp, Homo sapiens
cgcgccgcctcttgctcggcctccttgcgcagcttctctgcagccgcctgtgcctgagcccgggcctgtgcctgctcctctgccgactgcttcagccgctcggcctcttccacctgccgccg

SEQ ID NO: 140276 - DNA, 122 bp, Homo sapiens
aaaataggcatcatcttgggtagctgccgaaagtcacgtttctgtattactttgcaagtacgtattttggaaattcctgtgcagcgtgatctcggctcactgcaacctccgcctcccgggtt

SEQ ID NO: 140277 - DNA, 122 bp, Homo sapiens
ccctattgccgtctctggtttccattgactgggatgggacctcacattctgtatctgtcccgattggctagcaacgtacaactttttaaaagaggcaaaggcagaggagaacaaaggaagga

SEQ ID NO: 140278 - DNA, 122 bp, Homo sapiens
ttgcgggcagagagctgcttgaggccaccacgctgcaggaagtgcagcttctgggcccggcgccgctgcttcaggatctgctgcttggtcttgagttccgggcggactcggcctgcaggggt

SEQ ID NO: 140279 - DNA, 122 bp, Homo sapiens
caggaaacagctgaaggagtgacctccaatcaagtcagctctgtgtcaatccttcattttcggatgttttttcttccttttctcacagggtcataaggatcaaatgtaataatgatgtaaga

SEQ ID NO: 140280 - DNA, 122 bp, Homo sapiens
cagcagcatcctcccgggccagcttcctgctccccgcacccacctgcacccctgccggtgcgcaccacagtctagctcatcgctgccgtcctcgcagtcctcctgtccgtcgcagaggtagt

SEQ ID NO: 140281 - DNA, 122 bp, Homo sapiens
caggaggaaaacgggccggggactttcggcaactcggggctgtccccacactgcctgactcgcgcctactactgtgtcagggtttgataatgagggaactagccaggaattcagcttgtacg

SEQ ID NO: 140282 - DNA, 122 bp, Homo sapiens
caaccgttgagccattggtgtcaagtattttaattctctttaaaatttaaaacctgcaagcgcgggagctcagggacctggccaggaaggcctgagcttccgggtcatcttagcacgccccc

SEQ ID NO: 140283 - DNA, 122 bp, Homo sapiens
tcaggttcagggggagaggatgatattactgccaatatctcaggggttgtacacacctcccgtgatgcggggagtaagagccagcccctcttccccccctggctcttaggactcccatcgca

SEQ ID NO: 140284 - DNA, 122 bp, Homo sapiens
agaagttgagctacagataggtaaaaagaagaaaatagcccgcatagtcccccggctccccgatgaccattggtgagaagtgaggcctggtattcacaatgactcacatccagatgtttctt

SEQ ID NO: 140285 - DNA, 122 bp, Homo sapiens
gagccagggctgagatcccgaaggcgggcgaggtctgggatggggcggggcctatgggagcggggctgaagccctgggcccggcagaggaaggtcgagatggaccatgttgggccccttctc

SEQ ID NO: 140286 - DNA, 122 bp, Homo sapiens
cccactcggacccgagccggcttcaagaggggcaagaggccaaggatccagcagaggcctcgggctcgagtctcaggtgaatagagcagccctgggtggcctcctacctctccaaggccaag

SEQ ID NO: 140287 - DNA, 122 bp, Homo sapiens
tataagatgcggacaatagcagctacctcatatgactgttatggagcttaaatgagattgcgtataaggtgcatctactctcatcccaagcaaaaagttggctactactaccaaaaagcctg

SEQ ID NO: 140288 - DNA, 122 bp, Homo sapiens
aggaagcaccagacattggacccctgcgtgtgacagctgagccttgcagcctgagggctgcggacaggagaactgtcattatttagagtgagtagagtttggtggggcaggaggggtacagg

SEQ ID NO: 140289 - DNA, 122 bp, Homo sapiens
aaaacccaaaccgagtcttttctgctgaattgctgcaagatcacaagagaccaagagatccggagtcaggctgtgaacttgggaaagataagttgcccggcgaggttggaggtagactgagg

SEQ ID NO: 140290 - DNA, 122 bp, Homo sapiens
atgtccagggagagagagagcatgatattacgttcaatatcgcagtacgtgtacacccaccggtgatattgatccaaatataatctccagggggtggagtatgacgttactcacaatatagc

SEQ ID NO: 140291 - DNA, 122 bp, Homo sapiens
cttagaatgactgggagtaaacaatcctccgattcgaagctgtgcgggaggcggctccagcgagtacacagtcagttgctccttgcttagggtcctagctcacaaagatcctagaaacacca

SEQ ID NO: 140292 - DNA, 122 bp, Homo sapiens
ctggggagggagtggggacgccaggagctcctatatttgactggtccctgggcgggagtccgggtgagaggtgtcattcctcaaggagaggggtgccaaaggggtctgggaagacctggagc

SEQ ID NO: 140293 - DNA, 122 bp, Homo sapiens
gtggttctgctgcctgtcccccaaccacaagctgctgcagtacggagacatggaggagggcgccagcccgcctaccctggagagtctgcccgagcaacgtaaggcgggcaggggcgggggcc

SEQ ID NO: 140294 - DNA, 122 bp, Homo sapiens
ccgtccccagccactccagggttctgccacccaaaccacgctttcccacacccctggggccgagatgtcattccagcgccagcttcctggacccggttattcccagcctttaactccgcctc

SEQ ID NO: 140295 - DNA, 122 bp, Homo sapiens
aaataaatagaaataaaaatatgcagccccctccgctccacttgaactttaatgctgaaccggtttcccacgtatacgtgtatcgcaccgcattttgacgctttgcatcgagtcgcattaat

SEQ ID NO: 140296 - DNA, 122 bp, Homo sapiens
gcggttccaggcagggtccagtcggggggcggcggttccaggcagagtccagtcggggggcggcggttccaggcagagtccagtcggggggtggcggttccaggcagagtccagttgcgtct

SEQ ID NO: 140297 - DNA, 122 bp, Homo sapiens
aaagtggaatccagtaacggtttccggcgtagcactaatttacagtccacgcctgtggatcgattccgtcaccaggaattccagcgccttccagttagggtggttattgccgagtagggggc

SEQ ID NO: 140298 - DNA, 122 bp, Homo sapiens
ccgaattcaaacaaaacacattccgtcaggattaaattcctttttgtttgcctgtgtcaccgtctcagcattttggagggtacatggatgttctcatgaaaccagtcagactcaaaatacac

SEQ ID NO: 140299 - DNA, 122 bp, Homo sapiens
ctttaggtacgccctcttatttccctatttcttttcatgtgaatcaaaatctgaggctgtcgttctcctgcagattcttggagaaaggtgagatttctcactcataagtgggagctaagcga

SEQ ID NO: 140300 - DNA, 122 bp, Homo sapiens
catcaagggtcagaaagaaacttccggcacagtcttttcccagcattccttgtttacttccgggtttattactactgaaggaagaacgtgagtaggttaggatttcggttgagaggcttggg

SEQ ID NO: 140301 - DNA, 122 bp, Homo sapiens
tggcggagcacgtgcgcaagtgcatgggggaggaactctaccagctcttcctggtaagtgcgcccttcctgccccgccgcaatgagcagatggcggctcggacagtgtgatgccccttcaga

SEQ ID NO: 140302 - DNA, 122 bp, Homo sapiens
atgcccaatgggaaattagaaacccagaggcggggccgggtgggcggggtaaacgaagtacggaggtgccgagggagcagcacggggagggggagcggtgattgacaagactcccagcaaac

SEQ ID NO: 140303 - DNA, 122 bp, Homo sapiens
gaggcactccacttcagccaggcgggcgttgagggccatggcggggtggttggggtcctgcgtcatgttcaggtacgcggccctccggagctgctcctcaatgaccaacgcctgctccagca

SEQ ID NO: 140304 - DNA, 122 bp, Homo sapiens
cagggcgaccgttggccccgctcctatggggcagcagggaccgacgtcagcagggtggggcgggcacccgagtggtatgccccgccctgccccgcctgcccgccctggtggccgtctggggg

SEQ ID NO: 140305 - DNA, 122 bp, Homo sapiens
gtgccgccgcgccccgccaggtgttttcagttctatgcactccattccctgggctcttgacgaatgtgcgggagctgaatattcgttatttggactccggcaggaaggcgtgggctcagctt

SEQ ID NO: 140306 - DNA, 122 bp, Homo sapiens
cacagcacgctggggccacaggccccctcacacggtctgccttctcccaggtgctgcagccgggactgcggctctccagcccgacgccatcaagctgcgccccagtcagccaatcagcgtct

SEQ ID NO: 140307 - DNA, 122 bp, Homo sapiens
acaataccatccggggcaccttgggtgtatcacctggatgacagaactgagctgttcatccgccagttttcgggcacgggagcggggcagctcatctgcgatgttgatggccctcatggctg

SEQ ID NO: 140308 - DNA, 122 bp, Homo sapiens
cgctgctgcctcgctggagcccactccgatgggccaggtccaggcagcagttgcagcagtcgaggccgacaggtgagcggcaatcgagcttggactgggccatcttctcaggctcggaggtc

SEQ ID NO: 140309 - DNA, 122 bp, Homo sapiens
agcttgactgaagtgtttgtggttaaaggactttgctcaggatcctgtccttactggttgcgtttaagtatcccttccaccccaaagactatacctctcttgtcctcctctcagagagaaag

SEQ ID NO: 140310 - DNA, 122 bp, Homo sapiens
gaacacatacttcatacctaaggccttcttttcctcttgtttttaaaagtattgtatacacgttgcagttgcacatggatttgttttactaagatgcaagttaaaaccctccttaaaatcct

SEQ ID NO: 140311 - DNA, 122 bp, Homo sapiens
aggctttgtgtgagcaacatggctgttgctcacttcacctgggtgcaggcaggctgagtccgaaaagggtcagtgaagggagataagggtgaggccgttttataggatttgggtaggtaaag

SEQ ID NO: 140312 - DNA, 122 bp, Homo sapiens
tcgattcatttattgagcgccgactgtgtccaaggccgagggaggggcggggtttccacgcggggagaccccctaggttctcgcctcggtaagcgcccgcgttccagcacctcgagtcgccc

SEQ ID NO: 140313 - DNA, 122 bp, Homo sapiens
ggacgagtggagtggcctcccctgactggcgggttgagtgccctgagcagcccaggcccacgaggcaggcctggctcctagccccggggctgccccttgctagccctgtgccctggagcagc

SEQ ID NO: 140314 - DNA, 122 bp, Homo sapiens
accgccaggcggagcagaggaaggggcaggaggtcagcagcgtcctccgggcgggagccacggagtcccatttgcgtctggtgctgctggaaaaagcaagagaaggtggaggggcgtcaggg

SEQ ID NO: 140315 - DNA, 122 bp, Homo sapiens
tccgcgcggcattgtggggcttgtagttcttgtgccgcagggctttaaaggaaacgcccacgtttcttccgaccagggatttccgacccgagaaccttacctcaaaggccgggaggcctttg

SEQ ID NO: 140316 - DNA, 122 bp, Homo sapiens
agtcggtgttttcccccttccatgttcctcagcaaagctggtgcttatctgagcagcgggcgatttttctgaagtgacctccgccgagcgggagatttatggtggcgtttgctttcattatg

SEQ ID NO: 140317 - DNA, 122 bp, Homo sapiens
cccaggagtgggtgggaaacgggcattctgagaacacatccccagagtccagaggggatgcgagggctggccacttggggaagcagcaagccaagaaaaaccctgcactctcagaaaacatg

SEQ ID NO: 140318 - DNA, 122 bp, Homo sapiens
ctctttccatttctgggcacgccttatcccctttgggtgaatctgtcattttgtccctttcgtgaaccaccgtcggggccaaagacgtctgctgccacctggtggcgggacctggaatgaca

SEQ ID NO: 140319 - DNA, 122 bp, Homo sapiens
taaaaagagttatgcctgtacattcttacccatagcacaaaccagtttaagacagtcattcgctcacttgcctctttataacatttataaatacacatagtaattattttcatatctgtctc

SEQ ID NO: 140320 - DNA, 122 bp, Homo sapiens
gcgccaccggaagttccggcaagtgggccctgaggctggccccagcttccgggttggtcgcgcgccttcctgcggctaagatggcgacggagcatcccgagcctcccaaagcagaattgcag

SEQ ID NO: 140321 - DNA, 122 bp, Homo sapiens
tgaaccagaattttagagtgccctggcctgggagaaagtccattccgatggttggcgacacggggggcttagaattgtattttcggtttacatctaaaagaagaacaaaggtctaggcttcc

SEQ ID NO: 140322 - DNA, 122 bp, Homo sapiens
ggggctggccggccgctccgagtgcgggggccgctccgagtgcggggtccaccgagcccacgcccacccggaactcgcactggcagacaagcaccgcgcgcagccccggttcccgcccgcgc

SEQ ID NO: 140323 - DNA, 122 bp, Homo sapiens
ctaaatacacattttcccctttccttagcctccaccagtctccagagcaattcctcctcccgcccacatcccatgtgtctcggctttcaatttgggcagacctacctctctcctactcgctg

SEQ ID NO: 140324 - DNA, 122 bp, Homo sapiens
ttgggatcctttatcctggtcatcttctatttccaaagtatgttgcacccaggtagggggcgcgttagcgtggttttgttggatattttcttctctctcgcgctctagctcgctccgcctga

SEQ ID NO: 140325 - DNA, 122 bp, Homo sapiens
gtagctcaccaaatattaggtggtgttgcgattaagatgccttagaacaattcagttctccgactctctagacctgaggaaccttcccagggaacccctaactttcccagaccacactgtca

SEQ ID NO: 140326 - DNA, 122 bp, Homo sapiens
gcatggttttttggaatcagcacccagcactcaatactggttatatgagaccaggaggcccgtcctatgcctgaagaatcttattgcaggactagaggagcctgggcttttgacatctcact

SEQ ID NO: 140327 - DNA, 122 bp, Homo sapiens
gaatcctcatttttcaatcatgcccgcgtttcagccgtcttccccttgacgtcactccttcggcatcgtctctccgtcgaagagatacttttaaccattcagtgccctgaccctggactccc

SEQ ID NO: 140328 - DNA, 122 bp, Homo sapiens
actccacacgctgagagtcagctgagcttgaacaaagagacctttctcctctgcagaaatcgctcgagccgccagcgccagaattcacagcagctttctcttgaaatgcttggcatttcccc

SEQ ID NO: 140329 - DNA, 122 bp, Homo sapiens
gcccttccctgtgctcgggcactattgggcgttacgcgagggcggggccggttgccaggacgacgcctgcgaagatggccgctgcgtcctcatcggattccgacgcctgcggagctgagagg

SEQ ID NO: 140330 - DNA, 122 bp, Homo sapiens
ctcccaaatcttgcccaggcgcctcccaccgtgtgcagctgaggaaggctgtgctctgagcgtggggttgccaagtcagctcccaaggcagctctggcaccaacgacccagagaaacaggcc

SEQ ID NO: 140331 - DNA, 122 bp, Homo sapiens
gcgcggggctcgtgctccgcaaatcccggcctgcgtcattggagtctctttcactagagtcgttcattcattccgcacgcattcattgaaccggcgacctgggccaggctccttcccaggct

SEQ ID NO: 140332 - DNA, 122 bp, Homo sapiens
tctctttcaaacatagttgaattatcatctccctcagtctctccactgttagcaggattacgttctgattttatagcaggagtgcaaaatatgggattagacaatgaaatgaaaaatgtatt

SEQ ID NO: 140333 - DNA, 122 bp, Homo sapiens
atggagggtaggaatagagtggagagagccgtgaacccagagtatggtgagaaaaggcaccgcccagaatggccatgatgtgaagacagagacctctatgtgtgggctccgttctgatggtc

SEQ ID NO: 140334 - DNA, 122 bp, Homo sapiens
gcccggacacgggcgtggacgaagtggtcccggacagagggctggtggcgctgccagaggcggagaagccccagctcccccagacaccctctccccgccccgcgtcccgccctcccgacctc

SEQ ID NO: 140335 - DNA, 122 bp, Homo sapiens
gcagctggaccgtctggactatgagccctggggcagcagcagcagtgcctgtgctgggaccgcctctgggagatgtcatctgccaagagagcagttttcctgatggtgcatgcagcaaaggc

SEQ ID NO: 140336 - DNA, 122 bp, Homo sapiens
ttttaggtattttagatgacctaattaaagtataccagttatgaagagaggcttggtaagcgcctgttgatgaatggcttttaagttttacaccttttagagaatattaatctgaaagtagt

SEQ ID NO: 140337 - DNA, 122 bp, Homo sapiens
tcattcataggtgcgatcatagtgcactgcagctgcctagttcacattcttcacctggcccgttgttccatccagtcttgacctcgctagcctgcagggggcgtgtgcaagcccacactaca

SEQ ID NO: 140338 - DNA, 122 bp, Homo sapiens
atgaggataaagaggaagactggtgccaatttgttaacttaaaggttatgaatgaactttcgattttatgactttaaggcaacacagatcaaaaacaacttggtatcaagctgaatgtcaac

SEQ ID NO: 140339 - DNA, 122 bp, Homo sapiens
agtgatccccctgccttggcctcccaaagtgttgggattacaggtgtgagccaccgcgcccggccagaatggacaacttttaacactatggtaagatgccttcttggccctcagataatcat

SEQ ID NO: 140340 - DNA, 122 bp, Homo sapiens
tcgtgaggtgagagtaagtaagggaccccctgggactgcagtctcctcaggaagaggggacgtgatacctctgctcttggtggctttggagttcagacaggacccatgcggtgtgggtgagg

SEQ ID NO: 140341 - DNA, 122 bp, Homo sapiens
agaacaatcaccaggggaaacccatgctttgactgacccagaagctgtctatccataagtcgggagtacccttccctgaaacacattaggacacagtaaaaacctgaataaaattgaggttt

SEQ ID NO: 140342 - DNA, 122 bp, Homo sapiens
ccgggacctctgagcgcacgggctcttcctcgtcgtcgtcctcttctgccgttgtagcggcgcgcccggaggctcccccagccaaagagtgcccagcacccacgcctgcagcggccgctgca

SEQ ID NO: 140343 - DNA, 122 bp, Homo sapiens
tgccgggcggcggtggcggctccgctcggcggccgcaggaggccattttagttaaggggccgctgaagggccctgaggcctccacgtccctacacctccgccgtctctacctcccccctact

SEQ ID NO: 140344 - DNA, 122 bp, Homo sapiens
ggaagtcgtgagacggtgcaacgctgagcggctttccgcagaaggaggtgccttcgaggccggctctggaggagccacagccaagccggccacagcaaagcacttctctcgggatgctcaga

SEQ ID NO: 140345 - DNA, 122 bp, Homo sapiens
ttaaagagacaggactgtcatcaaccttaggtgtcaataatgctgcaagtgcagcattgtcgttcattgtgggggtgacaaccaaccacacgtttttgttctcttcacttgcaaaggctaat

SEQ ID NO: 140346 - DNA, 122 bp, Homo sapiens
tgaacgcgcggcggcagcaatggccgctctggagcggcgggtgccgagtctcgatgacttcgcgggacagagctggagctcgtgggtggagcgggccgacctgcccgcggctgacggtgagt

SEQ ID NO: 140347 - DNA, 122 bp, Homo sapiens
taacagaagcctccaccagcaacagcatgtggaagatacagatttgtcatttctcccttccgccctcccttctttccttccttccttccctgtttccttccctctttccttccttcctcctg

SEQ ID NO: 140348 - DNA, 122 bp, Homo sapiens
gcggcccccgctctccgcccgctcgccgggagcacggaagtcgccgcacccagcggcccgcgggaccttgccctgtgaccctgcccactggccgccggctctctcggagcgcagggattggc

SEQ ID NO: 140349 - DNA, 122 bp, Homo sapiens
ctggccaagaggactggggagaagcctgagattattcatttttaacaaactttctggggacgctgaagctgctgctcctggtaacacctttagtaacaacatagaaaaagagaccccactgg

SEQ ID NO: 140350 - DNA, 122 bp, Homo sapiens
cgacctgcggcgggccccgggactgctcctcctcggaccaggtggccgcgcgcgctaagccgcccgccccattgatcaggacgcggctttgccggcgcgcctcctccacccggcagggactg

SEQ ID NO: 140351 - DNA, 122 bp, Homo sapiens
gcaccaagcgggcagccaggacccccgggctgcagacaagaaaaggactgtggggtccaccgggtctgggccacatcaaggaatgtggttgaagacccgcccttaggagctgaaagccaggg

SEQ ID NO: 140352 - DNA, 122 bp, Homo sapiens
ttatatttcaccatgcataaaatagctgtccttggtatttggcaatttgtttaggatgtccggagccagatggtgttcaaatgttatgcatgggaagaattgttaccatcatgtttttaaaa

SEQ ID NO: 140353 - DNA, 122 bp, Homo sapiens
agaagagaagctcagccaattatagtgaatgcatttggaaattaaaggctgaggccagggcggggattccaggctttgtggaaccagctccaggcagagtcattagtgttcttgatgtgaca

SEQ ID NO: 140354 - DNA, 122 bp, Homo sapiens
attgggtaagagggttcggtttctacggtgcgtctccggcccaccggccaaccaccaaaccgaacaaagactacagcacccaggatacactgcgcagtctgggggcggggccggagttcaag

SEQ ID NO: 140355 - DNA, 122 bp, Homo sapiens
cgctaattctccggggtggaggcacttgcacaaccatgtgatgaattcttcagcagcgcccggaagctcggaggacatgagaggtggcaccaaggctgtggcagctgctcagccggtctcac

SEQ ID NO: 140356 - DNA, 122 bp, Homo sapiens
aacaattgtgtatagaaattgctgaaaagggtggtttaaataaaacagaaaggagatattcggaattatttcactacctctgtgactgactgtgttttggagttttccttttccactgaaga

SEQ ID NO: 140357 - DNA, 122 bp, Homo sapiens
taagtccttgtcggtcagaccgtgtcttatctgcaatgtgtgaccgtcgcttcaggacggcgagagtgctcagtgcatagttgttgaataagtggataagtagatccctggaaggatggaaa

SEQ ID NO: 140358 - DNA, 122 bp, Homo sapiens
ttgctttttgaagcatgttaacactgtaaagagaacattttgtagtaaaatatcaacgttcggagagtctttaaaattcttagcaatgcttcatttgcctgtaaaactgtgacttttcggcg

SEQ ID NO: 140359 - DNA, 122 bp, Homo sapiens
gagaggtcccatgtgctttccaataacagttcagtatattagaagacagtgtggcatccacggccaagtactactagtgagtaatacagtaattgctttttacatttgataaacacggagaa

SEQ ID NO: 140360 - DNA, 122 bp, Homo sapiens
acaaaaacctcattacctttctcctgaaatttgcatctatttaaacacctgagggtcaaccgcaaagctcagtagaaaaaatgagtcccctgacataaaatcaagatataaagataaaagaa

SEQ ID NO: 140361 - DNA, 122 bp, Homo sapiens
gcgcaggttcatagcaggtccagataaagacatgatacgtttcaataaataagatatttccggccagggctgggcgcggtggctcacgcctgtaatcccagcactttgggaggccgaggcgg

SEQ ID NO: 140362 - DNA, 122 bp, Homo sapiens
aacgctcttatagtctctcaggcccgtgggtttcagcccttaaagtagatcgggcatcgtcggtgtattttgtgggcgcagagattgcggggttctccggccgcgtgctgatttatgtgtcc

SEQ ID NO: 140363 - DNA, 122 bp, Homo sapiens
tgggacggtggggtgggctggggcccttggctccaagcattagttctccaagctctggtccgttctcctacctccttcaaggggcaccagggctacaaggtggtagttgagtattggggccc

SEQ ID NO: 140364 - DNA, 122 bp, Homo sapiens
aataattccatcgtttcattttgtggcatcagagatgagtcattgacccggaagaagtcccgtaatgtttctcaactcagtatctgtgactatatttcctgctcttaaaagtttagcatgcc

SEQ ID NO: 140365 - DNA, 122 bp, Homo sapiens
gagaagtccaagatcaaggtgccagagggttggtaccttgtcagacctctctcccgggctcgcaggtggccactttctcactgagtcctcacttcatcttttccttgtgagtgtgcatcttt

SEQ ID NO: 140366 - DNA, 122 bp, Homo sapiens
ccagttttctaattttgcaagcccagctttcattagaattttgcaaaaatccttgctttgcgagcatggcacaggcaagagatgaggcactctctctttcttcccccagagcctttgactgc

SEQ ID NO: 140367 - DNA, 122 bp, Homo sapiens
ttcacagttctccagtgtgccatagactgttagaccagatccttcagatctagaggcacacgcagtgggtgacaggagagtgccccctccccccgggcgggtgggggtggggagaggagcag

SEQ ID NO: 140368 - DNA, 122 bp, Homo sapiens
aaggctggccataagggtcacccctgtgtggccaggagaggtgcattagtggtgggtgaccgggactctgggtccctcgcacatgttccctctgcctgcctcatccctggtgccccacttct

SEQ ID NO: 140369 - DNA, 122 bp, Homo sapiens
gctcaggtggtactgagtgctaacccacccaccactcccctcctgctgtgtggcctagttcgtaacaggtcacagatggtcaggggcttaggagacctctgacataagcgatagaaacaatt

SEQ ID NO: 140370 - DNA, 122 bp, Homo sapiens
gaggggaggagtcctcagggatcctgtttcaacaaacgtttctttcggaggaggggaaggcgggggagagggggagaaggacctatttaaagctaccctgttgctttggctttctctgtctg

SEQ ID NO: 140371 - DNA, 122 bp, Homo sapiens
taagggctgccgcgggttccgcaaagactcactccagaatccccagctccctcgcgtcagcgaatgtcccgctggtccaggcagccttttcctgcgcggttcttcagttcctttttctaaag

SEQ ID NO: 140372 - DNA, 122 bp, Homo sapiens
gttggcagcttgcacactcagccatgagatcccaacctgaaacacccatgtctgtcccaacggatttagcctcctttaaccagggcctcccggagatctaggtttgcaaactccttggagcc

SEQ ID NO: 140373 - DNA, 122 bp, Homo sapiens
gcagtatcatgcatgctgtcctctgccttcctaagaagtgcagacagagggcagaccctccgagtgaagtacctttttttcttatttgagcctgctctgcattgagggagagtttgacacac

SEQ ID NO: 140374 - DNA, 122 bp, Homo sapiens
taagaaagagttggggttagtctaaaagaacacagcataaaatggaatattaactatccccgctctggggacttcctggtctctctgttcagcagccttggactgtcccctttggaagattc

SEQ ID NO: 140375 - DNA, 122 bp, Homo sapiens
gtgacaggagctgtaatcagacaatgggccgaatgagacagcaaggacaggtgctggccgcgatcttttggagcggggcttcctgcctgcgctgtccggccccacctagaggatatttacat

SEQ ID NO: 140376 - DNA, 122 bp, Homo sapiens
ctagcatagttgaatgtattccctttcctaccaggagttcagaggatcattaaagactcacgctggccatagggtgagtaataagatgctgttttctgggcgtcgccaaaatcatagaccac

SEQ ID NO: 140377 - DNA, 122 bp, Homo sapiens
ctccacagcagcctcccgggccggctcctcctccttccaggtctcctcccagtgccgccgcggctctcaggcctgaggtgcggcgctcaccccggcagtccccagcctcagacgctgcgtgg

SEQ ID NO: 140378 - DNA, 122 bp, Homo sapiens
tctgagatgcattgttcctatgacttcctacactccgcccttgtctgacgaattagggcacggagcccccccatggcacagctgggccctgctggcattgttaatgaggtaggaagggcgcg

SEQ ID NO: 140379 - DNA, 122 bp, Homo sapiens
gacgttcaggcactggatatccacgcaggccttaaggaacccctgtgcagccttgtgccacgagaggagtggattcactaactttcacgctgattcctcaaaccaagttgtttcatttttgg

SEQ ID NO: 140380 - DNA, 122 bp, Homo sapiens
tcgggaggtgccagtcactgtgcccagggatttcacggacctgcttgtcactacgctccccggagtcaccccagggattctgggagggtccctgttgcacaaacaaggaaaccgagacacag

SEQ ID NO: 140381 - DNA, 122 bp, Homo sapiens
aaaaacaaaagcccgttactccaccaagaaggcgcttttgcacattgttttaatgcttaacgccttcaggatgccagcgtgacggaagcaagtaaccaccaaggcatcaccactggcgctaa

SEQ ID NO: 140382 - DNA, 122 bp, Homo sapiens
taaaaaaacggttcgtctttttaaaccaatgatgcaggtaacataccattcattatctagcgacaggtaaaggatacacttaatgttacaaagaagcactgcacccgcagttaagaaccacc

SEQ ID NO: 140383 - DNA, 122 bp, Homo sapiens
aaacctagaggtgggtgcgattgtcaccctatcttacaggtgtggaaactaactcagctccgagatgtgactgaccttccccggccatagtacgcgcagcgcagtggggcctggacgcggct

SEQ ID NO: 140384 - DNA, 122 bp, Homo sapiens
cttcaacaaggacccttttacaggaaatgtccttgatgccaggaactccactggggaagccgctggaaaggcacctggacacccacacacatggaggggatgcgggggcgcgccgcagggac

SEQ ID NO: 140385 - DNA, 122 bp, Homo sapiens
ctagtggcagggtgggattcagccagatttgtcgcactccaaagcctgagcttttacccacgttctttactgagtgtgtgctgtggggcaggcatggagaagggtggtcagcaatcccctgc

SEQ ID NO: 140386 - DNA, 122 bp, Homo sapiens
gtattgctattaatattataaccaccaaagacctcttatctgtactcttcatttgaacaccgtctactcttgaacaccctttcaacacactgtattatacacagagtgggtacacatttact

SEQ ID NO: 140387 - DNA, 122 bp, Homo sapiens
ctgctctcgatccccaggacatggacatggagacaccagcagagcagggcctcagtgcctcgtgggagagaggtcagccaggggaccgtggccggggcagctggctgtaagaggatacgctg

SEQ ID NO: 140388 - DNA, 122 bp, Homo sapiens
atccatttatccaccacttctcaccagtcacctggtcccagtcacttcccctcacctcttcgcagatgtatcagcatgcctgccaaccaacctccctgctgcaactctgcagctgcctctcc

SEQ ID NO: 140389 - DNA, 122 bp, Homo sapiens
cggcctgggcggctcgtgtcctcccacaccgccacccgtgcccgcttcccggggtgcgcccggagcctggccgctctccctgcaggtgaccagtactcgtttggagttcaagattcccgccg

SEQ ID NO: 140390 - DNA, 122 bp, Homo sapiens
aagtgatctccttgaacgcgtcttttcaaactccgcgatagcccaaggagctgcgcggcgcggcggctgcggctaagacctgtgactaatgccatttgacctgagcccatggggttttgtgc

SEQ ID NO: 140391 - DNA, 122 bp, Homo sapiens
atttatacactattttgttcagccagtgtttttaaaaaaaatctatgaaaagtgtacttccggttttctgtgattacttatctgggcttgatctgaccagtgaaatgacattgccctatttg

SEQ ID NO: 140392 - DNA, 122 bp, Homo sapiens
aacctgtgcgccatccacgccaagcgggtgactatcatgcccaaggacatccagctcgcacgtcgtatccgcggcgagagggcttgagtctcaaggactcactgattacatacccaaaggct

SEQ ID NO: 140393 - DNA, 122 bp, Homo sapiens
atttaaataacacgagcagtaaatttgattcaacaagcgtatagagtccactatacccaacgacttcaaattacaaagcacatgttcaagcacatttggaacatttaagaaactgaccagat

SEQ ID NO: 140394 - DNA, 122 bp, Homo sapiens
cctgactcattctttggaagtcacctgcatgctggaaatggcagccacccccgctcaggtcgcacaggactctcctctgggacagcagtcgagtcaagcagggagacggctttcctcacaac

SEQ ID NO: 140395 - DNA, 122 bp, Homo sapiens
aaataataataataataataataataataataataataataatggaatcaggggtctcaccgtgatgcccaagctgttcttgaactcctgagctcaaacaattcttctgccttggccttcca

SEQ ID NO: 140396 - DNA, 122 bp, Homo sapiens
ggagggaagggggaggaagcgcccgaggaggcttctgagcgggagctgggtccggcggtgcggaggcaaggcgggtccccctctcccggtgtctggtctctctccgccccggcgggcgagga

SEQ ID NO: 140397 - DNA, 122 bp, Homo sapiens
aacggaatgacctgctcgggtgataaataatttccaacagcgactcgccttactgcaggccgcctgtgtggaggtcaccatcccggcctcagcggccagcacaggctgtcctgatgacaaga

SEQ ID NO: 140398 - DNA, 122 bp, Homo sapiens
cataatcctgttacctgccctaacctgacagctctgaattagtctgatccacctatgtgccgtacaaagcattatattgctatgatttcataaactgaacttgaactacactttttcagaga

SEQ ID NO: 140399 - DNA, 122 bp, Homo sapiens
agagaaatgagaatacaggaccccctcctcacactcgcacaccctggttcgcacgcattccggtacccgtcacctcggagccagcgagacctgggatccaaatgcggttctgcctcctccgg

SEQ ID NO: 140400 - DNA, 122 bp, Homo sapiens
cccacttggacctgtcctccaaccggctggagatggtgaatgagtcggtgttggcggggccgggctacacgacgttggctggcctggatctcagccacaacctgctcaccagcatctcaccc

SEQ ID NO: 140401 - DNA, 122 bp, Homo sapiens
catgtatacctccatgaatccatcttcacaatcaagattataaatatttccttgactagccgggtgcagtggctcatgcctgtaatcccagcattttgggaggctgaggcgggcagatcacc

SEQ ID NO: 140402 - DNA, 122 bp, Homo sapiens
cttcagtctccccgccgctagctgagggccgtggccgctgcacagaggcttgtgaggattcgggggttcaggcagcgcccgccgcgcatctgccagacgtgcggccacagggtaggagcagt

SEQ ID NO: 140403 - DNA, 122 bp, Homo sapiens
cagtgagagttgcccaaggcagcaggtccagggtctgagcagaggctgaaggcctggcaccggcaatgtccccttcttaggccagggtctgggctcctggggatcggccagcactccatggc

SEQ ID NO: 140404 - DNA, 122 bp, Homo sapiens
agttggcagtctgcaacaagggaaaaaaaaccttcatcagacacaggatctgccagtcctcgatcttggactgcgcagcctccagaactatgagaagtagatgtttgttgtatgagcttctc

SEQ ID NO: 140405 - DNA, 122 bp, Homo sapiens
gagccggtcattccacccagggggacttcagctgccactggacacttcaattgtacgctgcgaccagttgccaggaaggagagggctggcaagagagccgcggcagccgtggcagggtgtag

SEQ ID NO: 140406 - DNA, 122 bp, Homo sapiens
ttagggagcaagttgatccgtgtaaataatgcaaaggattatgaatatgaataggggactcgttctgttctgaggaagtcagcttcctgggctgcgtctctcatcttgtttattaacatgct

SEQ ID NO: 140407 - DNA, 122 bp, Homo sapiens
ctggccggtgggggctttgggcagtgctgggctcaccaccgtctcctaggagtgcaccagcgtcttctccaggggcggcggagaggagctggcccagctcgccggggtgcccttcttaggtg

SEQ ID NO: 140408 - DNA, 122 bp, Homo sapiens
caccatccccaaccgcggcggcccaggcggcggccctgacgagtgggcggacttcggcttcgacctgcccgactgcaaggcccgcaagcagcccatcaaggaggagttcacggaggccgaga

SEQ ID NO: 140409 - DNA, 122 bp, Homo sapiens
acaaggcagagcctcggctgaatgctcacacatcacagaggaagtggaggaaagggggcacgccaacaagggggtcacagagaagagacactttccatcccataggtgtgtacggcgtgtct

SEQ ID NO: 140410 - DNA, 122 bp, Homo sapiens
tgcaatgtccatgcagctctcaccatgtccatcaatccaccccaccacggtgagcgtctgcgatgtccgtgcaggggagagagacctggcctatcctcagcacagcccatgtgacgttagaa

SEQ ID NO: 140411 - DNA, 122 bp, Homo sapiens
gcagtctcctgaagatgtcacccagattgccctgccatcaccccagggccttgagtcactcgcttctcttggtgtctaggcaggcttgaagaaaatcaaacagtacaaaatcatgcaaattc

SEQ ID NO: 140412 - DNA, 122 bp, Homo sapiens
ccccaacatcgtgccctgctctgagtggctggtgctgagattgaaacctgacactcctgtcgggactctcctggcccaggccttactggccttttccttctcccttgcaagtagctggtgtg

SEQ ID NO: 140413 - DNA, 122 bp, Homo sapiens
acctagctttgaagggctgttttatgtgacagccactcccctgcctgtcgtgagggggcccgggtgttcatctcagattgatggatccctgccatcaagactgggcattcctgtccaacagg

SEQ ID NO: 140414 - DNA, 122 bp, Homo sapiens
actagggtcttctgttttgcgcgtcttccagttccactgagggccgagactttgtctttgcggccccagtacttgcttagttccgagagtgcggtttgcactcagtaagtagccacttactg

SEQ ID NO: 140415 - DNA, 122 bp, Homo sapiens
caccctccgcctcccaacagttcgggcttttgtgtacgctgtggctgctgcttctgctgccgaagcttggcattggagacacctcgtcctcctctcaggacagatccatgaacccatcggca

SEQ ID NO: 140416 - DNA, 122 bp, Homo sapiens
tggtgtcttcatcccttacaggctcactgccttgtgctggggtttgttctctctccaaatcgagggcctctgtccttccccatgagtcagacatccaggtttccgccgttctgtgctgttca

SEQ ID NO: 140417 - DNA, 122 bp, Homo sapiens
tggcttaaacctagaggccagaagaacccccagctgcctcctggcaggagcctgcttgtgcgtagttcgtgtgcatgagtgtggatgggtgcctgtgggtgtttttagacaccagagaaaac

SEQ ID NO: 140418 - DNA, 122 bp, Homo sapiens
gttttggtggaacaagcccctcgcagctccccgtgaggtgcagggggtgggcccccaccacgcccacagctgcagctgcctgtgaagggcacagggcgggcccccaccaaggccttcgcttc

SEQ ID NO: 140419 - DNA, 122 bp, Homo sapiens
gagaggacctcatgagagagttttctaaatcacaggcggggtagggtggagaatagtcaacgaagatcacgtaaaagactgagagctagtgaccacacaacagctcaaaaggcgactgcagg

SEQ ID NO: 140420 - DNA, 122 bp, Homo sapiens
cttcataggtctgcctggtagtgggatttggggcatcatttcaggctgtgtggtctccagcgtggattttctagctatcctggagattatttgagctgtccagtgttttttttgtttgtttg

SEQ ID NO: 140421 - DNA, 122 bp, Homo sapiens
ataattgagtttaattctgtttgtctttctccccctaatcatttgactcctctaggacagcgactgttacacaattaattgttagaactaagtccacaataaactccctgataatagctcta

SEQ ID NO: 140422 - DNA, 122 bp, Homo sapiens
ggcagtcccggcgggagacgcgcggggcctgggtttccagaaggtgcctccccaagggggcgggccccgggtgcaccccggtgccccgaggccccccagcctgaaggcaggccgaatccgcc

SEQ ID NO: 140423 - DNA, 122 bp, Homo sapiens
cgggcgcgggctgcgtggggtttcagttactcgtggagtttcagttactcgtggacaaagcgccgcgcgctagcatagcggcccgggcggagttccccttccctttccctttccttccacat

SEQ ID NO: 140424 - DNA, 122 bp, Homo sapiens
caggagttcaagatcaacctgggcaacgtggcaagactgcatcaattatttttttcaaaacgtggtatatgcccatagtcctggcttctcagggaggctgaagcgggaggatcacttgagcc

SEQ ID NO: 140425 - DNA, 122 bp, Homo sapiens
tgggctccgactttccctctagggcagcactcagtggtccaggcttatccagctaggtgacggctgaaatgggcaggggacccaggtggggtgaggaggagatttccacaccagctgtggga

SEQ ID NO: 140426 - DNA, 122 bp, Homo sapiens
cctgaggcagttcgacgtgaccgagtggtgcgtcagtggttcgcccatcgagacactgagcgagtagatcaagcaccagccccagaaggtgggcacctaccacaactacatccagggcggct

SEQ ID NO: 140427 - DNA, 122 bp, Homo sapiens
gagctgattaaaagtatagattaccagaattatttcttaaagatttttatccagtatttacgggtcgagacctagcaatctgtgcttcagcatgcactcccacgtccttcttgaacaacatg

SEQ ID NO: 140428 - DNA, 122 bp, Homo sapiens
ctttgctgcagtcacgactccttccaccttggggaccaatcagtggtggtttctcttccacgtattgcctcactgtctgtgcagtcacatctctcaaagcaacgtgggactttgccagagcc

SEQ ID NO: 140429 - DNA, 122 bp, Homo sapiens
gcagacctgtaaacaggcagacaagcgctgtgatggggtgctgtgggatcttggaaaaatcgagaaggcagaagaagtaattccgaagaggactcctgaaggacgcctaagagcaggcaacg

SEQ ID NO: 140430 - DNA, 122 bp, Homo sapiens
ttactcttgaagtcggtgagaagcgagaccatgaacccaccagaaggaacacattccggacgcatctgaacatcagaggaaacaaactccagacacactacttttcagaactgtattaagaa

SEQ ID NO: 140431 - DNA, 122 bp, Homo sapiens
agaggcggggccaaggaggcgtcgcgacctggttggccggccggggcctgggggatgtcacggattggtcgcggccgcgagcgcagtggtgtggagcgcgccgggtcccggagccggctgtc

SEQ ID NO: 140432 - DNA, 122 bp, Homo sapiens
tgggaggctaaggcaggatgatggcttcaatccagaagttcgagaccagcctgggcaacacggcgagaccctgtttctacaaacaattctaaaatgagctgggtgaggtagaacacgactgc

SEQ ID NO: 140433 - DNA, 122 bp, Homo sapiens
agagaccgagaaacacacaccacaccgcccccaccatggagatcggtggcctcgttcttccggtagcttccaaactcctgtttgatcatgatggtctgtctcttgtgtggcctgacacggtt

SEQ ID NO: 140434 - DNA, 122 bp, Homo sapiens
tcggttgagaggcttggggtcttgcgtttcgcccaccatctcctggggacagggtggagtcgatatccgggacgggggggaggttgcggtgcccctcagggctacctctcaagagtgctatc

SEQ ID NO: 140435 - DNA, 122 bp, Homo sapiens
cctctcatgagcaacaggatatgtgaaagtacttgcagccagaagcaaaaccacaatcctcgggtgctagatggagctccccaaggagcagagaggaaaaggcaggaggagagggccaggca

SEQ ID NO: 140436 - DNA, 122 bp, Homo sapiens
caatcctgagtcccttaaactcgaacccaagaaattcagttcagcatcagttccaagacacgtttccaggtacggaaaaactccagagtactgcctaacgggcgagccgactaacagtcaga

SEQ ID NO: 140437 - DNA, 122 bp, Homo sapiens
tcacatgtagaaacaagcctagagaatactgtaacacaaagttagaagggttgaggagggcgagggaagggtcaacaccttaccgctgatcgctttgctttactcctgcattttttgttcag

SEQ ID NO: 140438 - DNA, 122 bp, Homo sapiens
cacccactaggccagcccgagcgcgtctgccacgccctgctgcattccgcggcgagagcgcgcgataggattggctctcaaggccccgccccaacaggtcgccgctcagggtgacccggaag

SEQ ID NO: 140439 - DNA, 122 bp, Homo sapiens
cggggctgttcgctggatcgtccgcccgggcgcggcgagaatgcacaaccccgtccagagcgcaccacctcgatcctcggggggaaacggatcaccccggctgtcctccgagctcgggatca

SEQ ID NO: 140440 - DNA, 122 bp, Homo sapiens
cggagtcgggcgtcgtggtggggtggacaccggggatccccggggcgcggacgaggggggcgtccaccctgcgagctcaccccacggcccccgcgtcccgccctcagccgcaggccccgccc

SEQ ID NO: 140441 - DNA, 122 bp, Homo sapiens
acagacggtgtagccaaggcaacggctcagcccgccgcggattggctcccaggctgcccgcgacgtagccaaagctacagctgggccccgcccatcggctcagcgactgctcgcgctgggtt

SEQ ID NO: 140442 - DNA, 122 bp, Homo sapiens
caacttctagcagatccccttaccctggctctagtccactagctccttcctagtcacaaccgaactcacggggcggaggcccttaaggagcactcgcatccttcaatcgccgactagaagct

SEQ ID NO: 140443 - DNA, 122 bp, Homo sapiens
aacttaatactatatcccaaactaaatctattgactcatgaccttcaggtcaactctccccgattctgcactgtattctcaattctggctaatgatacaaccatctacctagtctcctaacc

SEQ ID NO: 140444 - DNA, 122 bp, Homo sapiens
ccagggaagcccgcctttgtctgcagaaactcatgtctggctgaatgtggcagatgacaacgataaccctcccgtttttcctcactcctcttactctgcctacattcccgaaaacaacccca

SEQ ID NO: 140445 - DNA, 122 bp, Homo sapiens
cgcctctgcgggaccacttccggcgccttcctatgccgtctgcccgcccccttccctccacggcctatatcctttcagggccgccacagcgctcgcgagtccctgcgtaacttccgctttta

SEQ ID NO: 140446 - DNA, 122 bp, Homo sapiens
ttatttaccggtggctgtgcttccaatttaggaagaccccggcgacctgttcctcacccccgcttcgccctcacactttcgggatgtctgcgattcctgctgaggagagcgaccagctgctg

SEQ ID NO: 140447 - DNA, 122 bp, Homo sapiens
agagggaaggaattgggaacccagcaggttggtgtccttggatatgtgccccgcagaagtcgggcagcagttcctggttcgtgtggttacgctagagagaaactgacctggttcatctggtt

SEQ ID NO: 140448 - DNA, 122 bp, Homo sapiens
ggccgcataccccaatcttcattcctgggtgtcctgaccatcccccacagacccataagacgcagatccgagaccgcttcttgtttgtttatttatttatttagctaaaagtttactaaaac

SEQ ID NO: 140449 - DNA, 122 bp, Homo sapiens
gtgagggagagagagtgttgcaaagcagagaggggatgggctggggcattggtatgggggcgggggtacttaccaggaaaaatagaagcctcctgacttttatcagagcaagtatcaaatac

SEQ ID NO: 140450 - DNA, 122 bp, Homo sapiens
gagaaggctgggttcctttaactgtgatggtaatctagcatagtcagttggctttgtatccggaagttttcagagggctaaggctctgtaagggtctttgtggttgaattcttgcccttggt

SEQ ID NO: 140451 - DNA, 122 bp, Homo sapiens
ttttgtataaagggatggaagtaccacgggtgattttcgggggagttaaccccgggagcgcgccaacagacagcacaaggcagtgtggagcctcacgctgtttaaagagcgcctgggtgcag

SEQ ID NO: 140452 - DNA, 122 bp, Homo sapiens
agggcatggttcagtggctaggcatgcacatttgcatttgttgttgacaactgtcagcttcgacctccttctcctcacaaccccgtctaaatggggtttgtaatcctccttcccacccactc

SEQ ID NO: 140453 - DNA, 122 bp, Homo sapiens
ccggaaacaagtgaaatgattgctttcctgtttgtaagatttgtttacatctttcgtatccgtaagaagtcccacaagcctatgatggttagttatccctgtctgaaaatctggactgaggg

SEQ ID NO: 140454 - DNA, 122 bp, Homo sapiens
tgaggctcaccgtggccatgcagacctaccaggctgagactcctgggcccttctgagccacgtgtgcaccggccgtcctcacacctcacccacggggctcgggatggccgcactcacgcctt

SEQ ID NO: 140455 - DNA, 122 bp, Homo sapiens
gcggccgaggctgctgtgagagggcgctcgaggctgccgagagctagctagcgaaggaggcggggaggcggcgtctgcactcgctcgcccgctcgctcgcttcccggcgccgctgcgggtcc

SEQ ID NO: 140456 - DNA, 122 bp, Homo sapiens
cctctgcaaaggaaaggggagcgtggagacgtgttcgaggtggtatcggcgaggatctctcgggcgccgctcactccttggtcgccttgcttgccagcagttgctcccttagtccttggctc

SEQ ID NO: 140457 - DNA, 122 bp, Homo sapiens
cccccactaaggatcgcccagaggatgcggctggaggcaacgcagctggaaggggttgcccgaaggatgacggtaagactctcaggcccaggtgagcaactgccccacctacagggaggaag

SEQ ID NO: 140458 - DNA, 122 bp, Homo sapiens
gtgactcaatcaattagtcactcgctggccccgaacctcgcccccaacactcacgcccaccgcctgtgtcactcaatccccacaaggacgctcacccgtggccccatgaccccacggccccg

SEQ ID NO: 140459 - DNA, 122 bp, Homo sapiens
gggtagagggaacgactgcacgggggagtagtctgttttagccggctccctgtgaatgaacgtggtatcaatggaacagaagaggcctacccttcttcgcccctccccgatttctctcacac

SEQ ID NO: 140460 - DNA, 122 bp, Homo sapiens
gggtgagggggtccaagggtggcgaagatcccaaaggtctgggactcctccctgccccgtcgtcccccatccctcggcctcgcccgccccggagctgtcccaggtctctgtctcctccagga

SEQ ID NO: 140461 - DNA, 122 bp, Homo sapiens
aaccctccccttcgctcaccccctcttctcccctttcctcccccgctgcgacccacgaggcgcatcctcacttctcggacttcaaagagaagctgagaactggagggggaagtggggtaggc

SEQ ID NO: 140462 - DNA, 122 bp, Homo sapiens
gctctgacacatgtggccgcaccccacttctggaaagctccccgctcaggctctgcagagcgtttctcgcgacacttcccgtgctggatccgtgccgccagcatggattccttcagcctggc

SEQ ID NO: 140463 - DNA, 122 bp, Homo sapiens
aagtcgtttgattggctaaaagcggagccgtatctaacagccaatagaaaagcagaaagccgcctcttggtttgcgtcctgcactgaaaggaaatgacggattttgtaagtatctaccaatc

SEQ ID NO: 140464 - DNA, 122 bp, Homo sapiens
ggtcttaagccggactgggacccccaatagccccgcgacccccgtcccctcccccaatgccgcgtccacgaacctacaagcccgctgcagccgcaaaagacccagttgtccccgccctctcc

SEQ ID NO: 140465 - DNA, 122 bp, Homo sapiens
cattccttctttggaagacgcagctcctgcattccttctttggaagactccccccttcaccgaggttacctaccaaatccgccatagggtgtggtccagggtcgagttatcacagacctgtc

SEQ ID NO: 140466 - DNA, 122 bp, Homo sapiens
tggagtaggcctgttgcatggcttctgtgcgggcatgttacgcacgaggacagccctttccgggttccatgagcctcaggggaagcaggaggcgcctgcagacacggagctgaccccggaac

SEQ ID NO: 140467 - DNA, 122 bp, Homo sapiens
taattactaataaaaagtaaacttgatccaataataccctggaatctttgaagatctcttcgggaaggaaagcatactttaatatacctaatttaagtgactatgtcaacaaaccacccaca

SEQ ID NO: 140468 - DNA, 122 bp, Homo sapiens
gagcccaaggcagttgtggggaaaccccttgcccttcctcgccgcttggcgctgtcgcctcgccctcccgactccagcccgccgcccgccagcctccaggccatgcatcctcttcgcaggcc

SEQ ID NO: 140469 - DNA, 122 bp, Homo sapiens
tttccttttgaatgggttacccggagaacagcttgtctagggaactgttggccctgggaccgtgaacagctttcacaccccggaaacctgtcacaagaggatcctgacctattgggacagag

SEQ ID NO: 140470 - DNA, 122 bp, Homo sapiens
tacagccttccgggagctggacggggcctccccagctttgggcagcttgggacagtggcccgagactgtgggaatccgaaacctcgcttctggctagccacaaggtctgggcgcgccccagg

SEQ ID NO: 140471 - DNA, 122 bp, Homo sapiens
gtgttcttttgcatatatttgcttaactcttcagccccatctctggctggctttgactttcgcctctaaaacacaaccccatcctgggcctagggctcttcatccaccagttacaagattta

SEQ ID NO: 140472 - DNA, 122 bp, Homo sapiens
ctgtgccttgggcttattatttcaaacttgaattcgtatcattcaactgccttggaaaaacgtgcagaaggtacaaaacttagttggaatgtgttaaactcaggaaatctagaattttgttg

SEQ ID NO: 140473 - DNA, 122 bp, Homo sapiens
gaatgttctagaatctgtgttggactgcattaaatacggtcataggctgcatgcagcccgcgggctgagggttggaaaagcttgtctgacttaatgacaaacccagagactgacatgtagac

SEQ ID NO: 140474 - DNA, 122 bp, Homo sapiens
agagggcgggcattcgggcagaaagaactgcttagcgaaggtaaggcacgaggaggcaaacgcataaggcacaaggcaagaacatgcagagcagaggacaaggccgatggacggggaggctg

SEQ ID NO: 140475 - DNA, 122 bp, Homo sapiens
ttgcagaaagtgaatgaaacagaattagacattggcctccttaaagcggccaccagcggccgcgggtaatgcctcttatgcgcgaacgttttccttgtagtacctggatatgagcaaaaccc

SEQ ID NO: 140476 - DNA, 122 bp, Homo sapiens
tcctgtaatcatttcttcacaaagcaacccatgtctcctggttaagcatggaccagattccgctgctctcccactctgaatcttcccatggtttctttcacacttggaataaaatccagagg

SEQ ID NO: 140477 - DNA, 122 bp, Homo sapiens
ttttcacctcaataacaagacagatgtttttcacagagccctccatgttttagagcatttcgaaaggtgataactattcaatgctaaggatataaaggtccaggaaaaaaaactcaaaattc

SEQ ID NO: 140478 - DNA, 122 bp, Homo sapiens
cgccggcggtggcggcgacagctgctgctgctgttgctgctgctgcggcggcggcggcggcggctgcccggacatcccggccgcgactcagcctgcggccacctccacctcttctctccttc

SEQ ID NO: 140479 - DNA, 122 bp, Homo sapiens
gtactgggtccccactaaattgatttgggggattactatgtgatagatacaaaaaacagccgctgccttgagagagctcctagtctaaaaagggacgcagacaagttcacggggatgcagtg

SEQ ID NO: 140480 - DNA, 122 bp, Homo sapiens
aggccccgctgggcaggcagggcactggtgggtggccctgcataggtgcccgatgccttccgggactctgggcgagaggctgagagggcaaagtccaagagatcggaggagtcatccgaatc

SEQ ID NO: 140481 - DNA, 122 bp, Homo sapiens
gcatctggagggaccaccgttgccgcgtcttcggcttccacgatctgcgttcgggctacgcggccacggcggcagccactgcgactcccactgtgcctggctctgtccatattagttcccag

SEQ ID NO: 140482 - DNA, 122 bp, Homo sapiens
tccctcgtgccaaccggtccccccaagggcaccgccgccctgacttccaacacatcgattcgtctgcccggtcctgtagtttatgtaaatggcatcaggagatagcaaaccctttgccctac

SEQ ID NO: 140483 - DNA, 122 bp, Homo sapiens
acgaaggctggggaggtcccagcggggtgccgggaggctgcaggtgaccagatccgcgtgcgcagccggcagacagcttggagtcggtgggctgaatcttcaccactgtcctgccgggttcc

SEQ ID NO: 140484 - DNA, 122 bp, Homo sapiens
ttcctattcactcatcagttcaccaactctacaaatctcgtgagactttcatgagcctgacgctgtgctaagccacttcctcagcctcctgccccctactgatgctgtcgctcttttcccaa

SEQ ID NO: 140485 - DNA, 122 bp, Homo sapiens
ccctttcgcagctcgggcgccgggtgcgccgcgctgccacctggtggccgcagtggccggcgccaggggccctggttttacttgttttagatgttaccctgttttacagttacaaccttact

SEQ ID NO: 140486 - DNA, 122 bp, Homo sapiens
aggccaactatttcagaaaataaactactttttaaaaatttccaggaagttaaacatgagcgattgaacacactatttatctgcagagagaagataacacctatggaggaaaagagaacagg

SEQ ID NO: 140487 - DNA, 122 bp, Homo sapiens
gctgtcctcattctgcggcctcagcaaaaagccacaaggtctgagcggcccgggtcctgccgggctgaccatctccggatcctgggacactctgcctgaccatctgtgtagctggtgtggga

SEQ ID NO: 140488 - DNA, 122 bp, Homo sapiens
agatcattttaacccttgccattcttcaagccaacaattctcccaacaatttatttcttccgctcccaccactccagtgctcagtcagtgagtgattctgggaagagtggtctggctgggtt

SEQ ID NO: 140489 - DNA, 122 bp, Homo sapiens
caccttgtcgggtagcttatcagactgatgttgactgttgaatctcatggcaacaccagtcgatgggctgtctgacattttggtatctttcatctgaccatccatatccaatgttctcattt

SEQ ID NO: 140490 - DNA, 122 bp, Homo sapiens
ctgccgcatcgctgggacaaactcggcagcggaggcaaagttatttcccctcccaggcagcgggattccgactggcaagatggtgcccagctctccgcgcgcgctcttccttctgctcctga

SEQ ID NO: 140491 - DNA, 122 bp, Homo sapiens
gctggccttacctggtggccgggggtcagcgggcctgggcgtggtcctcctcgccggccacggttgggctccaaggccctgggctgccctgccgtggcagtgtctgcttcctcttctccggg

SEQ ID NO: 140492 - DNA, 122 bp, Homo sapiens
ggagcaaggtcttccacaggaactgcgacttggaaagtattcaccaagggctgtgccatgcgaaaccctctttaaaggaaccgcatcgctacgcctaacgggcatttcttttttaatgtaat

SEQ ID NO: 140493 - DNA, 122 bp, Homo sapiens
gcctcgagtggggtgaccctcggacacttgccttgcctagtgtgggatctcatctccgaacgccaggccagggtagattgcggtgaatggaatagcaaatcagtactctcaaaaggactact

SEQ ID NO: 140494 - DNA, 122 bp, Homo sapiens
gcagagtggcggggagtgcagccaatagggtgtctaggcaggcagtacgtctggtgtgggcgggagtgagccaaagtgtgctaaaggaaaccaacagcggcctaggggtgaaaggacagcca

SEQ ID NO: 140495 - DNA, 122 bp, Homo sapiens
gcggccccgcccctggaggccccaggcctcgccgcgccgcccgccgggacgtggagtccgcgcagccccggcctcggtgcccgcgccctgcccgagactacaactcccgagcccccgcgccc

SEQ ID NO: 140496 - DNA, 122 bp, Homo sapiens
catccaggtctggcacccatgcactgtgggacagggtgggggcagtagggcagctgctctcggtcctggcagcaccaggaggacccagaccagctggggagagacgcccccggctcccccaa

SEQ ID NO: 140497 - DNA, 122 bp, Homo sapiens
tgtctttgttttcctgtagagtgcttaattatgagtcaaactacatgcaggtggtctatccgaatgagttagcatcagaatgacctgttaaaaagagttctaatatgttgcccagctggaca

SEQ ID NO: 140498 - DNA, 122 bp, Homo sapiens
aggcagggctttccctaaaccacctagaacaaagggttcccatggatgttctctctgtggcgtcatctcacaaatgagaagacctcacccactctctgatctataaaagcagcctttttatt

SEQ ID NO: 140499 - DNA, 122 bp, Homo sapiens
tgtgacgtgcggggttatctgcatggatgattcagaaaggggacaggccttcgccagacacggcaattaaaggtgggcgtgaggattgatcccacggctgtctgattctccttttcctactc

SEQ ID NO: 140500 - DNA, 122 bp, Homo sapiens
cccactgattcatgaggaaaacaaatacagtaagatatatgcacccccacccgcagcaggcgcgttgattttcctcacaggcttaagtgaacttgaaaagaagacaaaggatgtgcttagtt

SEQ ID NO: 140501 - DNA, 122 bp, Homo sapiens
ctcgtcggagcgcctggccacagaaggggatgctcggccagggccacggccacgcttggccggacttcagttagaacaacctggagggtctgatggaagacgtaaactccttccagaacaat

SEQ ID NO: 140502 - DNA, 122 bp, Homo sapiens
ggatcccagcattgaactgggtctcaagtggaatgtctcccactttctgcctaacctgcacgtccatcagcacctcatcaatgagaaacgactcctccggggagaatttccccctgcctggt

SEQ ID NO: 140503 - DNA, 122 bp, Homo sapiens
ctccgagcctggacgccgacccccgaggcgcaggacccggccctgctgctgcgctcgccgcggactcccgctagggcctctgcaggcaccgcttttataccgcagggtcgggcgcctcccac

SEQ ID NO: 140504 - DNA, 122 bp, Homo sapiens
aggacatggtcctccataacactgtccttacttcagacatcagctgcaagttcaaggttacgtaagctacctatacttctaaacagctggctaccatatttaggaatccccactaacccttc

SEQ ID NO: 140505 - DNA, 122 bp, Homo sapiens
acagacacggaaaggtcgctggggtggtggagctgaggtccagaccctccgtccaaactccgagcttatattagatactgacctggtagttgagaagaaaagtcaagaaggggcgaggaggg

SEQ ID NO: 140506 - DNA, 122 bp, Homo sapiens
gggcggggaggggcagggggagggcgggacccgcgcagccaataggcgaggacgcagtcccgcgtggccttgtgggagctgtagtacgctccctgtgcccactttcctgggccggggtagcg

SEQ ID NO: 140507 - DNA, 122 bp, Homo sapiens
tatgcgcatgcgcgcgtgagcaaaagtaacggtatgcccacccttgcgcagacggcaccgcgccagacacccgctcacagagcgggcttctagaaacttccgggcctcggcttccttaccca

SEQ ID NO: 140508 - DNA, 122 bp, Homo sapiens
gggaactgtagttgagtgggaaagccgagaggcgggggccgcacacgcgtacaggggccccggtcaacaaagacgcgccgtgcgcgcgcgcgccggagaaaaacacgggaagacgtgcgcgt

SEQ ID NO: 140509 - DNA, 122 bp, Homo sapiens
aactgggcacagccggccagcgccagccaggctatcactgccctgcagaggctgctgccacggccccgccatccccggccacccagacatctgtgcctgcaggcccagatccagtgacgcct

SEQ ID NO: 140510 - DNA, 122 bp, Homo sapiens
aaaaagaaacagattaggcaaagatcagagatgacaaaggggagaagcagggagaagaaacggaacagcaagagccccaatcagggcaggaaagaagtttctgaggactagacatctcttca

SEQ ID NO: 140511 - DNA, 122 bp, Homo sapiens
acatccacatcccagggatgttgcatggattcacgagcagccacagaacccctggggccccgggaaccctgcggccggcggggtcccccgtcgcacgctctccggccctaggaggagcccga

SEQ ID NO: 140512 - DNA, 122 bp, Homo sapiens
tctgtttataaagctcaaggagagaaaaggcacgagaaggggtgagacaactctgaatggcggtggtacctggatgtggaattaccacagtgggccagagacaggatggtatataaccctct

SEQ ID NO: 140513 - DNA, 122 bp, Homo sapiens
gcccgcgccctgcgcctcgaaggtggagctgcggctcagctgccggcacctgctggaccgcgacccgctcaccaagtccgaccccagcgtggcgttgctgcagcaggcgcagggccagtggg

SEQ ID NO: 140514 - DNA, 122 bp, Homo sapiens
agcggggccggccggggaggtgcaggagacgtgggagccaatgggcacgctcgggggagccgggctggcggcggcggtggcggccggctgggcgcgcactctcgggatggagggcgagcgcc

SEQ ID NO: 140515 - DNA, 122 bp, Homo sapiens
ccgccgcgcccggcctcctcctccctcctgcccactgcgcggggcggacgccggcccggccggcctcggcggctcaggaggcttctgaaatgactctaattacagagttattaattttaaga

SEQ ID NO: 140516 - DNA, 122 bp, Homo sapiens
atgcttctctgagccccttccacgcgtgtggtcaccacagtctcccttttccaacctgtccggatgcccctgctgtaggctgtagacagactgtccaccttgctacagactgtagatgctga

SEQ ID NO: 140517 - DNA, 122 bp, Homo sapiens
ctttcaggcgagggcactgtgccaggcactggggtgccacagagaccctgttaaaagtcccgcaggtagtacagggcatttcaaatcatggaggtagaagaacgaggcttttggggaaaccg

SEQ ID NO: 140518 - DNA, 122 bp, Homo sapiens
catgaggtccctggtcctcttagctaatgaggtcgtgtccacaaaccagggcacccgacacgccctgagagcccatgactcatgccagggtggaagggactctcagaggcttgatggggaac

SEQ ID NO: 140519 - DNA, 122 bp, Homo sapiens
caaggctctggcagtctcaaggctgcaattcctgagaccggggactctgtgctgccatctcgtggcagatctcagacacagcaagctggctgccggaatcctgtttgaacttggcttgcggc

SEQ ID NO: 140520 - DNA, 122 bp, Homo sapiens
tgatgacatcaaaccagagggcccatgtaacaggcagtacaggcaggccgtgggctgctccgctgctaaggagtcaattctaactacagctcagcgactttatagcccaaagggagggcaag

SEQ ID NO: 140521 - DNA, 122 bp, Homo sapiens
attggcaagacggaactaacttatttggaaaagtttgatttctgccatacccggctggcgcgtgtagatttctttgcctgcagatgtttgaccactggttgggctgggaacaagcggggctc

SEQ ID NO: 140522 - DNA, 122 bp, Homo sapiens
ggtcctcccatggaggtaaatgccttcccaacagcccctgcggtgggccctggggatcctcgtatcgctggtttgcacacacagtgaatgtcacgcgtgggcaggtagcacaaaacggcaag

SEQ ID NO: 140523 - DNA, 122 bp, Homo sapiens
cactgacttctatcatactcagagtcggagtgtctcagaactttgcctcaaaagaccaaacgtgctgtcttcctccagaagtttcttcctgcaggtgtgttcccccaccccccagctaagac

SEQ ID NO: 140524 - DNA, 122 bp, Homo sapiens
gtctcatatacccagcttgtgagatgcagtcagggtgtgtgcttcagtggcttgtgtcttcgtactgctgggtagcatcctgttgtatgaatatccgctctacaatttgctgaaccattttt

SEQ ID NO: 140525 - DNA, 122 bp, Homo sapiens
gctaacacctgaaataggatgggatagtgcacactctgaaggtgaagctttaggtgacgtcgaagcatccagccatatctgtcagtttatataaggggtggcggctgctcagcgaggcctca

SEQ ID NO: 140526 - DNA, 122 bp, Homo sapiens
caggtcagcagctgccctctccacagtgaggagcacttgccgagggacagacgtgagggacggacgtgagggtcgtctccaggctaaggcggggcttccttagccggaggcttcctggctca

SEQ ID NO: 140527 - DNA, 122 bp, Homo sapiens
cttgagtaggcagatctcccggagggcggaactcggcacaccctgcatatgtgagggggccggtgggcagcagtcagatcccacccagcccaggccctcaaacccctccccaggccgtatcc

SEQ ID NO: 140528 - DNA, 122 bp, Homo sapiens
gtggcagtggcatgagctctttttggagatttataaggattctgctgtagcatcttcctccgtggatgggatctatttctatgtcctttgatagcagcactagcttggacattcagagggag

SEQ ID NO: 140529 - DNA, 122 bp, Homo sapiens
gggggcacctctgccctccctccagggaaatggcggcagggcacgcacgggagggtgacccgcccgacttcggcggctgctgtagcggaggtggccggggcgggggcgggggcgggggcggc

SEQ ID NO: 140530 - DNA, 122 bp, Homo sapiens
tgtagtagtttaaagcagaactacttaaatcccagctcaatgacttactagctgtgtaatcgtagagaagttacttatcctctgtgtcattttaaaaatagagataataaactgtatccact

SEQ ID NO: 140531 - DNA, 122 bp, Homo sapiens
agcggcggcgccgatgctcgagctgtagctgccaggcgaggatgtgtggagcgcaggcggcgcggggtaaatgagaggtctcgggccccaggacccccggggcccgggatgagttagcgagg

SEQ ID NO: 140532 - DNA, 122 bp, Homo sapiens
taaccctactcctgatcctcatcaagaatatctggaccctaggattaccattgccttattcgaaattggatcacattccccttcctcctggggctctctccctttcctaaagaatagcagcc

SEQ ID NO: 140533 - DNA, 122 bp, Homo sapiens
cttggcccgggtcccggggctcctgcgaggatcacacaggaactcacttgaagtgtccggcgcagtgcactccgacggggagccctgcccggtccccgcggcgaaccagtctcttcctcggg

SEQ ID NO: 140534 - DNA, 122 bp, Homo sapiens
gagaccctctgggcaccccggcatctcaagccagagctgagggcccggaaagtgaggggccgcgcctcagtactggaggcctagagtccatctccgcgaactgggggctctcagggcccgca

SEQ ID NO: 140535 - DNA, 122 bp, Homo sapiens
cagaacaatgtataatcctccttatttttccttaaaaaagctttgtcttctctcacctcccggaatgcacacatagcttaccatggcacatgtattcccattgcaatgcaattcctagataa

SEQ ID NO: 140536 - DNA, 122 bp, Homo sapiens
agtcagctggtggaggccgtgaaggggtccgcgttaagcgctatacccccatctgttctacgacaatggaattaaatggtttctaaagggagcttagttcttctggaaacaggtaaatctaa

SEQ ID NO: 140537 - DNA, 122 bp, Homo sapiens
gatttttttaatgtttaattttctatggaagtgttagtttaaatacatccaacagcccagcgtggtggcaagcgcctgtagtcccagcttctaggcaggttgaggtagggggattccttgag

SEQ ID NO: 140538 - DNA, 122 bp, Homo sapiens
cgcgccctctagcagcagccctgagtgaccgcagcgcacgagcgcgggaaaatgaggctgcgcgggctgaagagcgcaccgagaggagccgcccccgcggtaccgcgcagcctcgcgtcccg

SEQ ID NO: 140539 - DNA, 122 bp, Homo sapiens
tggatgtgtctgactcaactacagagaagcgccctccccatctctgctccgtgtaaattccgtactgttggtgcctccctggagcctaaaaaacattagccagtttcctcagtctccttcac

SEQ ID NO: 140540 - DNA, 122 bp, Homo sapiens
gccgatgcggggcgcgcagcctttgctggtcccgggagactcagcgaactcaggggaggacgctgggctccgggcaaagtgctctgcggccgctgcctcgctaagtctcccagccacccgcg

SEQ ID NO: 140541 - DNA, 122 bp, Homo sapiens
ataaaaacctctcccccaaatcatagtcaattaaatgtgtttggtctttaaccatggccccgtatctcagtactcatttcggtgagattaaatggctttgttcttaatcagggtgtgccaga

SEQ ID NO: 140542 - DNA, 122 bp, Homo sapiens
ccttctccttctttcaattctactattactactactactttttatggagtcactttcctacgataacatgactgttgttcctatttattctttctattttgttctccagctcatcacattac

SEQ ID NO: 140543 - DNA, 122 bp, Homo sapiens
ggtgatctgcccaccttggcctcccaaagtgctgggattacaggcgtgagccaccgcgcccggcaacacaatctcttatctagaataaatcggtcacctcaccggaggttttccctgcctcc

SEQ ID NO: 140544 - DNA, 122 bp, Homo sapiens
gcttctaaagctctccccagattaggcaggagcttggcaggcattcagcaatcaggcaggcgctgggcgggcaggaacctggccaggcagggtgaccttcccctcagcatgcctggcagggc

SEQ ID NO: 140545 - DNA, 122 bp, Homo sapiens
ggcggcaaggaaaaaggatagtacctgttagggaaagcagagttcagattcttttagtttcgaagaaataatagagtttgtggtatgccaattggagtgatgccatagagtacaaagctgat

SEQ ID NO: 140546 - DNA, 122 bp, Homo sapiens
tctctcggtcgaatctcccggtcccacccccaaaaactgacgtcacccatctgatcctcccgggtctaccccaaatcctcccagcagttgcagcacaactgctctcccggctgctttgagaa

SEQ ID NO: 140547 - DNA, 122 bp, Homo sapiens
ttccccaggtgcgctggactctgtccctccatggctcatggacaatgattgacctgaagccgctccaggaagtctactcgggagtcctcactgcctgctcccctatggccctaagggactca

SEQ ID NO: 140548 - DNA, 122 bp, Homo sapiens
tcacatcctcccctgaagcagccccccatgcccagtggtgtgtggtgggaggggaggtgtcgcaggcgcactgagggtgcatgaagcctggtgtgctgtttgctctttccttcctccctccc

SEQ ID NO: 140549 - DNA, 122 bp, Homo sapiens
aagaaagtggcagagtcaaattgccacagatgattcctcatctgagggagacagtaagaccgggagaggcagatcgctcttctttcttatcctccatgtgcagtagttccctctccccactc

SEQ ID NO: 140550 - DNA, 122 bp, Homo sapiens
ggtgggagccactgcgctcccggagacgccgcccgtgccgtgtcaggttgtccccgagtgcgcttgccgtgagtttctgccgcgtgactcacccgtgtccctcgctctcagccatcggaaca

SEQ ID NO: 140551 - DNA, 122 bp, Homo sapiens
cgacagcgcctggtggaaacccacgccacccgcgtcatcgcccttatcaacgaccagcgccgggctgccttggagggcttcctggcagccctgcaggcagatccgcctcaggtgcggggacc

SEQ ID NO: 140552 - DNA, 122 bp, Homo sapiens
aagaggggattctctgcggggcaggcatcctccggggagagaatcctgctgggaggacatcgtcgggaagacatccttcctaggtacccggctcatcttccggggagaccgtcctctggggg

SEQ ID NO: 140553 - DNA, 122 bp, Homo sapiens
gcaagatgtccctcaaacctgatcccttttgaatgctccttttatcatgaatggagctaccgccaacccacgggtgccgggattctggagacaattcccgtcaatcaccaagtcctgcaatt

SEQ ID NO: 140554 - DNA, 122 bp, Homo sapiens
gagtgccttctcctggctgcaatgtcctgtgatcgctatgtggctatctgtcacccgctgcgctatccgattcttatgaaggagtatgccagcgctctcatggctggaggctcctggctcat

SEQ ID NO: 140555 - DNA, 122 bp, Homo sapiens
tgagtttgctttgatgatgctttgcatgttggcctttggacgacagttttatagtatggtcgattataatgccagtgctatttaggctggtgcaaaagtaattgcagtggcaaaaaccacaa

SEQ ID NO: 140556 - DNA, 122 bp, Homo sapiens
catctttctgccctgcagcccatgcaggaacagacggcttgtcagaagctcagagggtggcgagacatttggttttccaggggcttttcaacttggatatgtgagcacatgaaaagttagag

SEQ ID NO: 140557 - DNA, 122 bp, Homo sapiens
ggcggccggcagcgaggacggacgggaggacggagagtggaggcgaccacgacttccacacgagcaggcctccgcccagaccccccaacggctccttcgggtcccagagcaacacgggcgga

SEQ ID NO: 140558 - DNA, 122 bp, Homo sapiens
tctgggcagccacagccccggaggccttacaggagcgacctggcaattcccgccgccggccgccagaggaagctgctttgctgctgtcgttgcccagcaactcgtagcccggaagcagtacc

SEQ ID NO: 140559 - DNA, 122 bp, Homo sapiens
cccagaggggcctctggaaaagggcaatgagggtggatttaaaaccacagtattggaattcgataactttagtcttgctttgtatgtctagggcttgctgaagagtagttataatacggaca

SEQ ID NO: 140560 - DNA, 122 bp, Homo sapiens
gactgcccaatggcctcccctcgcttttaaggggtcagtgatgaaccggaaagctccacacgtcggtcatctgcaactccacggagctcacgagctgggattcccggaggctcttcctaaaa

SEQ ID NO: 140561 - DNA, 122 bp, Homo sapiens
ccacgtgaccaccagaaccccgcaccctccccggcccggccccgccccgcccgccggccgcggcaaagccgcatcctcccggagcagaaccgctccccgccggctgtccgcaacctccgcca

SEQ ID NO: 140562 - DNA, 122 bp, Homo sapiens
attcctttcacttcctttttcttttgcccagctccacagttcccagcccttcccagctcacgactcagacaatagctcagtccttacccagtacccaaacaggccagtgggggtggatttag

SEQ ID NO: 140563 - DNA, 122 bp, Homo sapiens
gtgcctgcaggaccaagtgactttccctcccgccggaagcagcccggggaccttgtgcagcgttaaactgagccaaggcccttgccaatgcagctccagctcgaggctccccgccggtagga

SEQ ID NO: 140564 - DNA, 122 bp, Homo sapiens
cccccagctcccgtggccggaagtgggaggccgcgcgcgcgcgcgcaggcctactctgggcgtggcctgccgctgcgtgtttttttcacggtttctcattctcggtcgctaggctttgaggg

SEQ ID NO: 140565 - DNA, 122 bp, Homo sapiens
tgctagagtaacccccatcaaagacacctgcttctgaactgtttacttggcccttgggaccgtccgcatcccagcaacagggactcaggctgttccacttccccgagaagacgagagtgcca

SEQ ID NO: 140566 - DNA, 122 bp, Homo sapiens
cccggcgcccgagtagctcccgggatgcagaagttgccacaaacttcccaggcccctcttcgccgatgcttacaatcagccgcgcaggcagggagcggagggaggcggagatggaccgggaa

SEQ ID NO: 140567 - DNA, 122 bp, Homo sapiens
acatcacactgaaagtttctctgctttgggccagcaggaaattccagttgcttcattcaccggagccagttaagctgctgaaatgaaatggatcaccggagagatcactatatcaggacata

SEQ ID NO: 140568 - DNA, 122 bp, Homo sapiens
cggctcgggtgggagttgagagccggcccatcccaggctcagcagcagggggcttacctgcgaacggacaaagaggcagcaccacaccatggggcgctctgacctcatccacccggactcac

SEQ ID NO: 140569 - DNA, 122 bp, Homo sapiens
cccgcctccccgacccctgcttgggcgggagccgctgttaaccggggttttcgggggaggcgtttggggcctggacggcggcgcggggagggggcagctaggggcgcggcctgccagtgcct

SEQ ID NO: 140570 - DNA, 122 bp, Homo sapiens
ggacagggacaagcatatctaagaggctgaacatgaatccacagatcaggtacctctgcacgctttgtccgccaggcccctcctgccacttcctgccaggcggtcctgctgggcctcagccc

SEQ ID NO: 140571 - DNA, 122 bp, Homo sapiens
cgggcggagcgctttcgcgtgcagccaccactccaggtaggagcggagcgggcattcctgcgcctacgggcccgcaccctcggaaacgccttgggcaccgagcccgggcggttttagagggg

SEQ ID NO: 140572 - DNA, 122 bp, Homo sapiens
acccgtcctactccacaaccaagatcactgcccaagctcccagccgagcccatcctacgccgcaaccaagatcactgcccaagctcccagccgagcccccgtcctactccacaaccaagatc

SEQ ID NO: 140573 - DNA, 122 bp, Homo sapiens
acaggtgtgagccaccccacccagacttgttgatgctctgtaagcactgaaatgaggaaacgaacaataggtgtgtcttgtctttcaaagtagtggttttgaagtgttctgacctcctagaa

SEQ ID NO: 140574 - DNA, 122 bp, Homo sapiens
tgggccagtggctgcggagggtgggctgggtcccccagcagtgctggtccacctgcactgcgctcgatttctcaccgggccttagctgccttcccgcggggcagggctcgggatctgcagcc

SEQ ID NO: 140575 - DNA, 122 bp, Homo sapiens
accttggttcccatcccactcatatactgccgccgtacatgtcaatcagatgaacctgtgcgtatctcttaacgacaattgacccacctttttaactgaagtgaaggggggttctgctccgc

SEQ ID NO: 140576 - DNA, 122 bp, Homo sapiens
gagctttggtgcctacgtgcgtcacacagacagtttaacacataattcattatcagcaagcggtgactgcccaggttttgcctgtggggaaacagaaaggttttgactccagtctctgtctt

SEQ ID NO: 140577 - DNA, 122 bp, Homo sapiens
gaccacctgcttgccctacagctcatggaggcgattcagaagcaggaggagatcaacttccgcctgcaggactacatcgacaggatcatcgtggccatcatggagaccaacccgtccatcct

SEQ ID NO: 140578 - DNA, 122 bp, Homo sapiens
attttatctcttcaagggtatcttctgtttaattgggagctaagccttgaatcaaagaaacggatccgtcattgcagaatgtcttacttagtagatggcatgaagggagagcgtctggtgcc

SEQ ID NO: 140579 - DNA, 122 bp, Homo sapiens
gctggttctcctgcctcagcctactgagtagccaggattacaggtgtgcgccaccacgtccggctgatttttgtgattttagtagagatgggttttcactgtgttgcccaggctggtcttga

SEQ ID NO: 140580 - DNA, 122 bp, Homo sapiens
gcggtgaggggggaaagccccggatgttcgttggggattcaacatggcggcgggagtgtccgcggtggtggcggtgcaagagagctgagggaggcgcgagggcgcggagttccaggtcgagc

SEQ ID NO: 140581 - DNA, 122 bp, Homo sapiens
agccttcacaggccctgctctctgaattttaagaaataccacctcgtggcccatcctgctcgctgagcccttatggggaatgctcgctgtccccttgctgccccctctcaaaggccactcca

SEQ ID NO: 140582 - DNA, 122 bp, Homo sapiens
ttatactgagcccgtctactcctgcacactcctggggtgggattgtgggtcacagggagacgtacgtgcatactgccgaagagctcccaagtggctggctgcaccagttaacactcccctga

SEQ ID NO: 140583 - DNA, 122 bp, Homo sapiens
tgaggcagtgggatgacggcagcctccacctttgccatcttggaagacaggtgccacgtacggaaacccagggtggactcgggatgataaaagtccacacaaagagccccctttatggcctt

SEQ ID NO: 140584 - DNA, 122 bp, Homo sapiens
attgctgaatgtctccttggctagtagttgaacgatcattatttagtcccacatctctctcgtcattttgtttgcaaactgtctaaaagccttatttcctcatctctttgacagatgaccaa

SEQ ID NO: 140585 - DNA, 122 bp, Homo sapiens
aggagtatctgagaccgtctcagtcagtgtagaaagtttattttgccgaggttgaggacacgcccgtgacacagcctcaggaggccctgacgacaggtgcccgaggtggtcggggcgcggct

SEQ ID NO: 140586 - DNA, 122 bp, Homo sapiens
acaactgccatttcctggtttcatcagccaggatcatagggtcaaacgtgacaatctgcacgtacgaaatcactcatggtcacctccctcagcatagcaccacgggcagggtaggcacagag

SEQ ID NO: 140587 - DNA, 122 bp, Homo sapiens
caggccccacggacccaggagaggccggcgcggagcctggggcggactaacagcagagggcgccatagagcaggccgcgcccggcaggtgcggcccccgcgcccgggtgaagtccgctggcc

SEQ ID NO: 140588 - DNA, 122 bp, Homo sapiens
cagatccaagccttcctgagagtaacctccccaggtttcatggatgaggaaactgaaggtcgtcctgactcaggctcatggctccgaccccggcttctgtggttggagggcagcaccttact

SEQ ID NO: 140589 - DNA, 122 bp, Homo sapiens
catgctgctggaattagtacaacaaagctctcaaccagttttatttttcctcacaatgaacggaagaaaaaggcagaaataaatggtagggtcatttgctagtagaaaagaaagctgggatt

SEQ ID NO: 140590 - DNA, 122 bp, Homo sapiens
cgcgaaggagcggtgggccacgaaccctcagagcggtcggcgcagctcacacccgacggccgcgggccaggaacacagaaaggccgagcacacgccacttccggtcccagtcaactaagggc

SEQ ID NO: 140591 - DNA, 122 bp, Homo sapiens
tccagacaccccacctttaagaactgtaacactgaccgtgagggtccgcggcttcattctcgaagtcggtgagaccaggaacccaccgactctggacacactattgtctgaacactgtaatt

SEQ ID NO: 140592 - DNA, 122 bp, Homo sapiens
tttccgggagccattgaagtctgggtactttgcatttatcctgtggctaaaatgtctattcgctttgcagctctgggttggttttgctttagaactccgtgctgggtctgaccatcctatac

SEQ ID NO: 140593 - DNA, 122 bp, Homo sapiens
ctcccccatgggccccgttaacggatacagggaggaaggcatttcctgcctagatgtctccgcccccactgccatggagaccagcttggaagcttaggggagctgctgtggcccagggctca

SEQ ID NO: 140594 - DNA, 122 bp, Homo sapiens
gagagaaagcgcgtactaccttcggtctaggcagcggaggcagccgcgaccccaggaaaccgaggaaatgaagacgcgaaggactacccgccttcagcagcagcactcagagcagcctccgc

SEQ ID NO: 140595 - DNA, 122 bp, Homo sapiens
cggggtgcgaagtttcggggacaggcgcggacccggtactgcgcacgcgcgcggtcgcaccgattcacgcccccttccggcgcctagagcaccgctgccgccatgttgagggggggaccgcg

SEQ ID NO: 140596 - DNA, 122 bp, Homo sapiens
agtcaggtgtctggatggagaatgctggtgccccaactcctcctcctgtctgtgcccacacgcagtgctgggccggacacttgtctgtcctgaggggaatgtgcagcctctgggcctccctg

SEQ ID NO: 140597 - DNA, 122 bp, Homo sapiens
ggggatgagggctaggctgtatggaaggcacaggatcattgggctggttcttttgtaattcgaccccagatctgcctaatttacatgtctctagccctgcaaaaaaatggctttagtacctg

SEQ ID NO: 140598 - DNA, 122 bp, Homo sapiens
atttccggtagcgttccgcttcctccggaagtcggaaggagtcgctctgtccgtcccgctcgttggtggcgctgttacatagcccgtagtcagaggcctttcagcccaggggccggcgcacg

SEQ ID NO: 140599 - DNA, 122 bp, Homo sapiens
gatttcccccactgagcctagaagattgacttaacactgactagtgtgctgtgtgcttcacgcggtgggtgcttaataaatattttaaaacagtattaaaatgttgaataaatttgacagca

SEQ ID NO: 140600 - DNA, 122 bp, Homo sapiens
acttcttataagcctttttcctactccctcagattatgtaatttatttgtaagcctgaatcgcagcccaaacagggcagcaatgttgaagtgaccataaagtggtcacttccaccgtgaagc

SEQ ID NO: 140601 - DNA, 122 bp, Homo sapiens
catggtgaacgccttcatggtgggctgcatgttcgtcaagatctcgcagcccaacaagcgcgcagccacgctcgtcttctcctcgcacgccgtggtgtcgctgcgcgacgggcgcctctgcc

SEQ ID NO: 140602 - DNA, 122 bp, Homo sapiens
ttggagagcggcacccaggaattccaagccagtctcctgggactctggcagcctgctccccggcgctggaccctaagggaccaggcgtgatgccttctggttctagcctctgagtgcccccc

SEQ ID NO: 140603 - DNA, 122 bp, Homo sapiens
gcgcaagtttgccatccctaagtcggggaccgggccgggcgcagggtaggtagctgcagccgcgcggagggccgaggctcccgctctcccgggcggcgggtgcagaaaaggcgccgcggagc

SEQ ID NO: 140604 - DNA, 122 bp, Homo sapiens
aatctctgttttagcaagacttctaggtggttttggcacatgctcaggtttgaagcctttcgttctaacttgtcttcattcagcctttccctttcagcattttaatgtattatttcctgcac

SEQ ID NO: 140605 - DNA, 122 bp, Homo sapiens
ccatgaatttcctcttccttttctgaatataaggcattgttgattcattaacattgaactcgtggccaacaacactataattcatgggtgaacaatgcttatctaacaccagtattttctcc

SEQ ID NO: 140606 - DNA, 122 bp, Homo sapiens
cagtcccctcccggtccttgtgcggccgtgcctctcacccctcacctttccggtccaccacggctgcccgcagcgcatcaaccagctcctcccgactgaggttttttggcagcagccccgcg

SEQ ID NO: 140607 - DNA, 122 bp, Homo sapiens
atctcactatgagatcagcgaaaatcaagactgtggcatttacggagcagcaggaacctacgagtttgtgacaacatttcattctgctgacaagaacatgcttagttgtgtgtcttagacac

SEQ ID NO: 140608 - DNA, 122 bp, Homo sapiens
gtggtgcgcgcctataatcccagctactccagaggctgaggcaggagaattgttggatcccgggaggaagaggtttcattgagctgagatctcattactgtacactccagcctgggtgacag

SEQ ID NO: 140609 - DNA, 122 bp, Homo sapiens
cgggcgcaccacctatctaatctgcggctggatctcgaaccggggcagcagcctcgaaaccgaaagcaaagaggaagcgggatctgctacagccccaagtccggtcgcccagtcttcccctc

SEQ ID NO: 140610 - DNA, 122 bp, Homo sapiens
gtgaccttggtagcgcgtcctcctagcttctgttagcgggccttctgggggatgctacatcgccacctgctgtctggaggatcttctccgcttcccacccatttctatggattcttaggttt

SEQ ID NO: 140611 - DNA, 122 bp, Homo sapiens
acaaaggcaggcatggcctggggcaggcaggtaggccagctcacagcagctgcctgcaggcgagctcatctccagcgactctgggataccagaggatagaacacgttgagcacgagggccac

SEQ ID NO: 140612 - DNA, 122 bp, Homo sapiens
ctttctcatgacatggaacagtgcttgttacagtttttattatactagtatttaagaatacgttctaatcaggatgtaggacttggatctccagaaggtcagtggtttactgtatcatgaaa

SEQ ID NO: 140613 - DNA, 122 bp, Homo sapiens
cccaggcacattagtcctgtcctgctgaagccatgtggtcttcggggactcatgcagttccgtttcaatgtaaactgtcaaggctttcttcaggaaacaggcatgaagatgctgtgtaactg

SEQ ID NO: 140614 - DNA, 122 bp, Homo sapiens
gggacagccctgtgcccagccccagggccaggcgggtggccgaggtttcctgatcagggacgaggatgctcccagggccagcaaggccacgggggcacaagcaaacgcactttcctcatttc

SEQ ID NO: 140615 - DNA, 122 bp, Homo sapiens
ccacttaattctgcccagtttaacatctgagttttaaaggataaacagatatttgtacaacgtacagaaaacagaggggcattccagggagaaataaaacatgtgaggagacaaaaggatga

SEQ ID NO: 140616 - DNA, 122 bp, Homo sapiens
ccgctcccgccctcagagccgtggcggcggggacaaaaatcctcggcggcgggggcaaaacgccgcggcggcgaaaaagtcgctgcggcagggggacaaaaagccgtgacagcggggcgcaa

SEQ ID NO: 140617 - DNA, 122 bp, Homo sapiens
ggactggggaaccaccctgagaagtacttagccacccagcagcttctggggctttgcacacgctgtttcctctgccttaaaagctttcttccccatcttgtctccaacattatctgacaact

SEQ ID NO: 140618 - DNA, 122 bp, Homo sapiens
tatgaattaaacctttgctttctcttcagctgatccagtgtctctttgggccacttcaggcggggccgagcaatgcaggaggcaagagaaagctgtgagtgagaaagccaagaaggcccaca

SEQ ID NO: 140619 - DNA, 122 bp, Homo sapiens
cagccacactgtgccaggaagttgcaaaaacttgttgcaggtgggaggcggggtgtgcagcgggcagcccactcacagaggctggagtgaaggatgtgtggtcaacaacacggatgatcaga

SEQ ID NO: 140620 - DNA, 122 bp, Homo sapiens
ggtccctcgggaatgagccttcccagacttttcctttctcaggggctccccttgcctactcgtgtcttgctattttagcaatttcttcactttgattgaaagagaaatgaaatacctacctt

SEQ ID NO: 140621 - DNA, 122 bp, Homo sapiens
ctgtgcacaaaactttttccacatttcagataatttccttttctgatattatttttaagccgctttattcatactgctattgtttcaatgtgtatgtctgccttcaatatgtttctcttatc

SEQ ID NO: 140622 - DNA, 122 bp, Homo sapiens
tgggtagagcttcggggcatttaattttgatgcgtttcagatccccaaaacatatgctagcgagtcccctgtcccccgtacttctctccccttcactcttagtgcctacttgacattcgagc

SEQ ID NO: 140623 - DNA, 122 bp, Homo sapiens
gtgtgtgcaagaaaagcaacctgacagcggctcctgctaaccagggctggttcggggctgcggccgggcggctcccgcactgcgactaagggccagccggctggcaggcggggctggggctc

SEQ ID NO: 140624 - DNA, 122 bp, Homo sapiens
atgaagattcaggaaacggggatgtcagttccagttccactttctttttatttaaataaccgaagcaacagccgtggcacagcagagggaagctgggttggggcgtgtgagaggtggcagca

SEQ ID NO: 140625 - DNA, 122 bp, Homo sapiens
atcccacttctgggattttttgctcagctgctcgtggacactcccacggggatgttcggccgacgccaccatagaggaagtcgtagaggtgttgtccttcaggatccccttgaggggccgtt

SEQ ID NO: 140626 - DNA, 122 bp, Homo sapiens
ccccctttctgctttctcctccttttcctttctctttctaaaagagctagggatgggaagcgccttttcttgagtctaaaatgagtacagggactctgggctgtacctgaccctttttgaat

SEQ ID NO: 140627 - DNA, 122 bp, Homo sapiens
atagctggcgtttgatcacctcttagattcctccgcattcctctccatgcagtggaggaacgggcaagctggctccattccacccctttggggacctggggtgcatgtgtgtggatagggca

SEQ ID NO: 140628 - DNA, 122 bp, Homo sapiens
gcagatggcatgtcattttaatgctgtttctaattgacaggggcctcggtggctgtggcacgtgcggctgcatgccgggtgtagggtggggaatggaattagatactgctacctgctccttc

SEQ ID NO: 140629 - DNA, 122 bp, Homo sapiens
ttccccacctgcctcctgccccctcccccaaggacatggtttttgaagaccacagggctccgcagagccccttacctaggctgtgtctgagatgctgtgaatcttgaggctgagccttgctg

SEQ ID NO: 140630 - DNA, 122 bp, Homo sapiens
atgtgccggtggcccttgaattgcacccattggtccaagttcctggagcttaagcaaagacgatgcaaataatatccactgaccatttgccactgctgcctgagggaccagactgtgatgaa

SEQ ID NO: 140631 - DNA, 122 bp, Homo sapiens
tgaagagaattggtgactcctacctttccagacagagcctgcatccagacaagccctggccgtgcaatctcttttacagaaattagcaagggccaatcaggttctcttggtcctccccgctc

SEQ ID NO: 140632 - DNA, 122 bp, Homo sapiens
gcgatggcagagacgtcctcctcccccttctcctcctctttggtgcctccagccaggaggcgggagcgatccacagcagctgacccagctcaggcactgcctctctcacagccctcaagaca

SEQ ID NO: 140633 - DNA, 122 bp, Homo sapiens
atgataggcatctgaagtggggagccatcttgtgggactgaacccttaatctgtgggatccgagtctaacttcaggtaggtagtgtcagaattgaattgagttggaggacccccagttggtg

SEQ ID NO: 140634 - DNA, 122 bp, Homo sapiens
agggtggcagaggaggtctgcaggggcgagaatctcggacagagccgaggcacaggtgagcggtgcccggcacagcagcctggtagatgggatcggggcggacagcgggggagagcggagag

SEQ ID NO: 140635 - DNA, 122 bp, Homo sapiens
acagcgggtcctcagcccgggtgtcggctgcgacgttctggctgacgttgtacaggaggtcggccagcagtctctgcctctgtgggggcctgctcatcacacagtagctgccgggcggcctg

SEQ ID NO: 140636 - DNA, 122 bp, Homo sapiens
aggaatggatgcaagagatgtgtcaaaactgaaaaggacttgcttctacccaggaatgagcgacagagtagttccaatgtcaaaatgcctgacaccgccatgaacagaaacaggaggcgctg

SEQ ID NO: 140637 - DNA, 122 bp, Homo sapiens
tggtcaagaggtggatccatgtgaacgccactgggaaatgagagacctcgttcccaatcacggtcagtgcaactcgaaagcctaaaatcagtttaaaacaaaggtatctacctttatcttat

SEQ ID NO: 140638 - DNA, 122 bp, Homo sapiens
ctggaatctgcatgctgataagagaaggctgatgtacttacagtgacagagggcaggctgcgggagaaaagctgtttgtgttagcctgcgagttacccagggctgcagtgagagcagaaggg

SEQ ID NO: 140639 - DNA, 122 bp, Homo sapiens
cgcgcttcacccgggcaggctggagatgggagtcctcagctctcagctctgcatgcagcccggacctcgccttcctacggcctgacgtcaggccagcgcttggggctccttttgggcaaagg

SEQ ID NO: 140640 - DNA, 122 bp, Homo sapiens
gccccctccttcggcgggatctggaactgcagctggcggagggcccggagcccaggtctgcgtggggccgcggcttcctgcgctgttaaccagcggagccccggggactgctgatgagggca

SEQ ID NO: 140641 - DNA, 122 bp, Homo sapiens
attaattcattcccaagccaggttcgcctgaccacacctcgagcgccggcccagtgcttgcgatcttcgtgacggcacctggggtgtaagtactgcttgtgggagagccccacaggaaatcc

SEQ ID NO: 140642 - DNA, 122 bp, Homo sapiens
tagtccgcgtgcgtgacacgagatagtgcagccctggcatggggcttggcatctggcggccgcgagataaccagggcccgtgcgatgggaaacgtgccgttggcagcccgccacccctccat

SEQ ID NO: 140643 - DNA, 122 bp, Homo sapiens
ttgggcgccggcggcgagagcagggattgtcagcaactcgggctgcagaagcagcagcaacggcggcggcggcagtggtagccgcctccagggcaccggaaccctgatcccggagctgctga

SEQ ID NO: 140644 - DNA, 122 bp, Homo sapiens
agacaaatcacaaggtcctctctcttccagaggcgaagacgagatgaaattaaatctaagcggcaggctacagggtaagctccccctaccccccatttaactttcaggctgttcttccattt

SEQ ID NO: 140645 - DNA, 122 bp, Homo sapiens
attttttggtggagacggggtttcgctgtgttggcagggctggcttccagctccttaccgcgagtgatccgccagcctcggcctccggaggtgccaggattgcagacggtgtctggttcact

SEQ ID NO: 140646 - DNA, 122 bp, Homo sapiens
cgaactcttgggctcaagagatcctcccaccttagcctgcgaagtagcagggaccccaggcgagggccacgatccccgcttatcctcgtgtttatttaaaaatttaaaaaacaaacaaaccg

SEQ ID NO: 140647 - DNA, 122 bp, Homo sapiens
aagagaaagccccgcctgaaactgcctggaggccccccggctgtcactctcgccacattccgtggagtatgtggttgcaacttctgtcactcaaggtctgatggcggggagattggagccgt

SEQ ID NO: 140648 - DNA, 122 bp, Homo sapiens
catgtatgggcacaatggacaccactgtgtacatgagcagtgggcacacatgcgtatttgcgcaccactgtgtacacgagcagtgggcacacacacatacgtgcgcaccactgtgtacatca

SEQ ID NO: 140649 - DNA, 122 bp, Homo sapiens
ttaaggctcaaagtttacatttttatgagtatcctcttttatgatgaaaacttagtaatgcggtttaattttaattaaaaacaaattgtcactagtgttcataataatggcagtaatttaca

SEQ ID NO: 140650 - DNA, 122 bp, Homo sapiens
acatcactgcgaggggaggaggcactgcacgccttgggggcgggggccccaaaacaacgccgtggccgtggcggaagtgccctccctgtgggtccctgactcatggaaagtccgaagcacag

SEQ ID NO: 140651 - DNA, 122 bp, Homo sapiens
tacagtatactttataaaaccacaaacatgttcctaagtcctatgggatgtcatgtcacacggaacatatataattaatcttctattgtgacatttaccacctttctcctcaggcaggcctc

SEQ ID NO: 140652 - DNA, 122 bp, Homo sapiens
ctcggcacccgtgtagaagtagcggtgcaggtcataggaggcggccagcagctgcatgcgcgtgtcaatgagctccaggaggtctgcccacatctcgttcagcccgtccttccactcggcga

SEQ ID NO: 140653 - DNA, 122 bp, Homo sapiens
caacctgaggtgggagccagtctgcctcctgggctaaggctgggcggtggctgtggggcccgcgggctgcaaggccagtgctctgcaggcagggccaggctgcctcttgcccacacctggcc

SEQ ID NO: 140654 - DNA, 122 bp, Homo sapiens
tgttgtgtgaggctgctttgcgcacaccctcctgtcatgcctcaggtgaattcagcctcacgtccttgaggggagaggacccacttccacaggcgttagaatgactctgagacagacgcggc

SEQ ID NO: 140655 - DNA, 122 bp, Homo sapiens
ggagtgtcagagtgtgagcggggtacgggaattccaaatttgagggcctcccggctctggcgccggggagggagagctcaggccgccatgcgggacaggacccacgagctgagacaggtgag

SEQ ID NO: 140656 - DNA, 122 bp, Homo sapiens
gacccgggcggcctcctctcaggagaggtccccgtgggggccccggcctccgtcaggccgcgcaccccacctgggagccccacacattccaggtgggaagggagaatctgtccctgttctct

SEQ ID NO: 140657 - DNA, 122 bp, Homo sapiens
ctcttaggagccggttacctcctgccctatttgtcctcaccatggcaaatgcacctgacacggaagtaggaacggactcagggtgccatccccctggcccctctgctattctcacctccctg

SEQ ID NO: 140658 - DNA, 122 bp, Homo sapiens
gagtcaagaaattgagaaagtctagtcctagttaggaaatcctattcatttctattaccccggctttaagggaatctcagacccagagaggttgagaaacgaatgaagatcgtacagctaat

SEQ ID NO: 140659 - DNA, 122 bp, Homo sapiens
gctcctcgggcggccttgagcagtgcctaacgttgagcgtgaggctcgtgctccgggtctcgcgggcggccgcctcgggcgtcgagtcccggagattggacagacaccagagcctggggacc

SEQ ID NO: 140660 - DNA, 122 bp, Homo sapiens
cctcgcgaagctccacggccgccaccgccccgccccgtcgcgtgccattggttcggcccgcgaccagcgcgacgccgcctagccgcaattggctacataacctgcccgtcagcaacgcgcct

SEQ ID NO: 140661 - DNA, 122 bp, Homo sapiens
aagcctttcccagtggagggcgtggccctggctgcaggtgagcgctgttgccacatcagccgggtaagccctgccctgtcccctcccccagctctggagagaggccctagaggccccagagg

SEQ ID NO: 140662 - DNA, 122 bp, Homo sapiens
ccgccccgtccctcccagctcttgtcccctgggatgcgccccatatgtgagtcaccatctcggccgctgtccttggcatcagctctgcaaggtcagtcccgtacttggtgagggtttacaaa

SEQ ID NO: 140663 - DNA, 122 bp, Homo sapiens
ggtctgagcaaacaagtcacccaaactctctggaccttgatctctcatctgcatctttaccgttcccccaacataccaaggaaattcctgcctcaatgccttcggccttgctgttccctttg

SEQ ID NO: 140664 - DNA, 122 bp, Homo sapiens
ctgccccggcgcccagcagcggaggcaacagcggcggcaagcagcgcctcctcctccctccgccgctcccgcccacaccccagtcagcagggagcagcctcctgggcgcgggggccggccga

SEQ ID NO: 140665 - DNA, 122 bp, Homo sapiens
cagactctccccagaagcatcgtgggtgcagcagaaatgacgtctcaggagcagtgagcgcgcctggggctcaggtcgtcctttctaagcaccatgctccacaaactaaccagggctcccgg

SEQ ID NO: 140666 - DNA, 122 bp, Homo sapiens
agcagtagttagttgtaataagttgagtctgggactagaaatcctaatttgactccaaaacgctctcctgttacagggcagggatggccggggtgggggaggggagggcgggcgcgcggggg

SEQ ID NO: 140667 - DNA, 122 bp, Homo sapiens
cagcagccattccccagccgcccgcgctctccggcgccagggggcgccagcccgcggccacgtgaccccgcccggcccagcgcagagcccggctgctgagtccacacctgtggaatggggac

SEQ ID NO: 140668 - DNA, 122 bp, Homo sapiens
agatcaacgcctgcctcagggaacagttgttcccgtgctattttttacccccgtgggctgcgagttctggaacgttccaaacgacagtgacaacggtgacggtggtgggggcagggagggtg

SEQ ID NO: 140669 - DNA, 122 bp, Homo sapiens
ggacactccaatctcaggaggctctgggcagacactggacacctccgtcttggggggctccgggtggaggctggacacctgcatcttggggggctctgggcggagactgtacacccgacgag

SEQ ID NO: 140670 - DNA, 122 bp, Homo sapiens
agtgctcctgggaaatgaagttctccagcaggcgacgcgctgcgacctcttttccagggtcgcagaagcgcagggcggcctctgtccgtcccctgccccggcagcctagatcgcccgtggtt

SEQ ID NO: 140671 - DNA, 122 bp, Homo sapiens
cacctgcagatggcctcctcaggcccttcgggtggcactggggagcccagggcctcccagcgaagtggccagattcaggaacccttcgcacagcgggcactaggaccctgcgcggcgccgcg

SEQ ID NO: 140672 - DNA, 122 bp, Homo sapiens
tgtcagggaacctggcctgagacccctgcatttccaagcttctttcctggtcagaggaaacgtgaaccaaaggtagttcagctaaacagaccacctcgagccgggttcgaggcatctgtctc

SEQ ID NO: 140673 - DNA, 122 bp, Homo sapiens
gctggaagtgatagagctgggctgcaggggggtggaggatgggggaggtaggagagcagacgtctattgatttggtgttttagctaatcgacctatggtttgggactcaggatgtggtcaag

SEQ ID NO: 140674 - DNA, 122 bp, Homo sapiens
ctgagcagcaggacgcctgccgccgcagggggcgaagttgggaaaacttggagtgctgctcgccttacttttgctttctcgctccttccaggccgcgccgggagcccccgcttctcccgccc

SEQ ID NO: 140675 - DNA, 122 bp, Homo sapiens
aagcaaggctcaaggctgcaccccagcctggtggtgtcaactcagagatgctaaggaagacgtgtgttctcctctgcctcccctagaaatcaccctgcaaacccactgaaggccaatgatga

SEQ ID NO: 140676 - DNA, 122 bp, Homo sapiens
gtaaaacctgagtcccacccagccagctcggaatggaaggcttccaaggcccgggaggcgcgctctgtcaagttgctgattcgggagatagcagtgaatcggggttccaccacgcccccaga

SEQ ID NO: 140677 - DNA, 122 bp, Homo sapiens
ggaatgtgtctgttaacatgactcagatgtgcagtcaatttggggacccactgatagcatcgaccttacagtttatgggatgattctttctgttttgctgatgaaaaaactgaggcacagag

SEQ ID NO: 140678 - DNA, 122 bp, Homo sapiens
cacgcgtgctaagaaggagactcatgaaatgtgtaattcgctggcgacagcttccgcggccgtggagtgagcctctgggaagtaacgactctcttaggtgcggctgggacacagtctcacag

SEQ ID NO: 140679 - DNA, 122 bp, Homo sapiens
ccagagaagccaagttggggggagctggtgcctggagtgggccctgtgcacctcacctggcggaggctggggggggctctgtcagcaggaccctagaggagactctcattcgattttaaaga

SEQ ID NO: 140680 - DNA, 122 bp, Homo sapiens
aagggcatcaggaagtgagtcttcatctgccagggcttgaaggtgggttcctgagggacacggtatggtcagaggcggctgtgctgccatgcaccgcccacggcactgggactggacccact

SEQ ID NO: 140681 - DNA, 122 bp, Homo sapiens
gcgcttctcccagcctccctccaggagtgcctaggtcctggccaatgagacaggagcaggcgcctgccaggaggggcttcctttccccaaaccaaacctccccagagcctgaagcttttcag

SEQ ID NO: 140682 - DNA, 122 bp, Homo sapiens
agccagcggaggatctgggcgcagtttcctctctaagttccgccccgagagcgccggccccgcccccgccgttcgcgctctgaccagcccgcagagccagcccccgaccccgggccacctgg

SEQ ID NO: 140683 - DNA, 122 bp, Homo sapiens
gtataggagatgttagaagctctcaaggcactttcaaccttttttgttgaaaatagtctgcggactcgaagaaatttacgtggagatattgaacgtaaaagtttagccatcaatgaagaatt

SEQ ID NO: 140684 - DNA, 122 bp, Homo sapiens
aatgcatattaaagaaaaaataagttcttcattttaaaatttgataatataaagtgttagcgtgaatgagggcaatgcagataggcaattctcatgcgtttgttggaattgtaaattgttgc

SEQ ID NO: 140685 - DNA, 122 bp, Homo sapiens
ggctgcggcccctttcttggctctgcgagagggtcccggtccgggcagaaggtaacggcccgggtcgccgtcgcttcgggccagggcggggcggggccgccgcctccctcctcggccctccc

SEQ ID NO: 140686 - DNA, 122 bp, Homo sapiens
gctcaggtgttccttcctttggttccagtggaaagttcaaacaacacaaggcccagactgcgtaagaactattattatagccccacccttaaccacaataaaagccaaaccagtatcttttc

SEQ ID NO: 140687 - DNA, 122 bp, Homo sapiens
agagctgcagaggagagagcggagtgagagctctgccatgggccccacagtgaccctgttcgtgaaaagagcacagctttcccactgccccattttctcaactaaatcagaaacaaacgaac

SEQ ID NO: 140688 - DNA, 122 bp, Homo sapiens
ggagctgaattatagggtaacttttgggtccactgccaagactgatgttggtgggctgaccggcctttgtggggcacttgggtgtgtaattcctccaggaccccttggcaggtggttttggt

SEQ ID NO: 140689 - DNA, 122 bp, Homo sapiens
attacgctcacagcactgctgtcaactcctacaaataaatttgtgcagaatggcgggacacggtgtctcatacctgtaatcccagcactttgggaggccgaggtggggggatcacctgaggt

SEQ ID NO: 140690 - DNA, 122 bp, Homo sapiens
aagttaggtgacacatcttcagtccctctccggggcctccactggctggggcagtgacgccggtaacggggagcactttaatgctggtcattatcgctgagaacgccttcctccccaggaac

SEQ ID NO: 140691 - DNA, 122 bp, Homo sapiens
gaggcgaaaggccgcctgtgatggtcctcttcttatgaaacgcccagaacagaaaaaccacggacgcggacagcagacctggtgccaggtctggggagggagggtgtggcggtcgtgggctg

SEQ ID NO: 140692 - DNA, 122 bp, Homo sapiens
cacccaacgccatcagcggccccgtccaactccatcagtcacctcacccaatgccatcagcggcctcatccaactccatcaacggcctcgtccaacgccatcagcggccccgtccaactcca

SEQ ID NO: 140693 - DNA, 122 bp, Homo sapiens
agggcgccgatgtacagacagcaaactcacccagtctagtgcatgccttcttaaacatcacgagactctaagaaaaggaaactgaaaacgggaaagtccctctctctaacctggcactgcgt

SEQ ID NO: 140694 - DNA, 122 bp, Homo sapiens
ccttcgagaaacaaggtaactttcgggttctggttgtctccaaagtcatccgaccaatctcgcaccgcccagagcgggcccttcctgtcaattacctactgaagggcaggcggccagcatcg

SEQ ID NO: 140695 - DNA, 122 bp, Homo sapiens
aaaaagaatcacacttttaaaaaccctgaaaaataaagaaaagagactgagctaccagaacggcagtgactttgggtggctctcacttatgccaggcacagggtgaattcagggctctgggc

SEQ ID NO: 140696 - DNA, 122 bp, Homo sapiens
gtctgtagacgctgaggaaactgactgtcagggcggctcctagaggggcctagagcagggcgagcgcgcgtcctgactcatcccctagagcactcgctcgttcttttgttttgttttttgag

SEQ ID NO: 140697 - DNA, 122 bp, Homo sapiens
gcccgctcgcagaggccctgactcacattcccagcattcccgaggagccgctaggggggacggggctggggcccgggcgcctccgctgggggcagcagaaagcgcccggcatgggcgggggt

SEQ ID NO: 140698 - DNA, 122 bp, Homo sapiens
tttctagatcttggcttctttttgaataatgagcagtagcaattgctatttcctcttcttcgccattccaagcttccctctacaacatcctctctttccagctgtgtagcaggcgcagctct

SEQ ID NO: 140699 - DNA, 122 bp, Homo sapiens
agcggaggaagctgtattattggctgatggtgctggggcgctgtaagcctgtgagggcatcggggtactgcaggatgagctggtaggcgtcaggatttccatggcatccatggaatcctcat

SEQ ID NO: 140700 - DNA, 122 bp, Homo sapiens
cagtgtagggtgcggtgcccccaccccacttcgggcctggaccgagaccgcgagtgtgaccgtatatcccttcaggtggatttttcaacatgtgaacttggttaaaagcttctagaacgtta

SEQ ID NO: 140701 - DNA, 122 bp, Homo sapiens
taaaaaccaaaatgcttttgagctccaggtctggtgtcaagcagatctgggttcaaatcccgcctctgccactgaccagcttggtgacatccttgggcatgctacctaacctctttgagctt

SEQ ID NO: 140702 - DNA, 122 bp, Homo sapiens
cctagctaactttggtatttttgtagagacagggtctcttcatattgcccaggctggtctcgagctcctgggctcaagccttctgcccgcctcaggctcccaaactgctggcattggaggtg

SEQ ID NO: 140703 - DNA, 122 bp, Homo sapiens
aatataataccctttacctggtgtcccctgcaggccatcttctttatttatttacttttgcgccagcgtcttcctctgaagcccaggctgggtgcgtagcgcgatcatggctcactgcagcc

SEQ ID NO: 140704 - DNA, 122 bp, Homo sapiens
gtgactgaggcacctagagagactaggttctgccactagcaagaggctgctagcaagagccggatttgaactccagcctgtgagggcagaggccaagctccaccttgcatggttctgttttc

SEQ ID NO: 140705 - DNA, 122 bp, Homo sapiens
gtattctccgtattctatactgtgatacctccaacactcaatccagtcatttatagcttacggaatgattccatgaaggcagcactgaggaagatgctgtcaaaggaagagcttcctcagag

SEQ ID NO: 140706 - DNA, 122 bp, Homo sapiens
cataaaagtcttatctacagtgaaaaaaatgaatcatataagagacggcttcagaatgtacgtaaggtgtgctttgactagccaggaaaagaacctctccctgtgtgcaaacagaatctttt

SEQ ID NO: 140707 - DNA, 122 bp, Homo sapiens
cgccgctccagacaagtccccgcgactgcgacagtgtctcgggcagttcagctccccagacgggagacagaccctcgcgacctggttcaggccttgccctgggggacactgcagtccaaggc

SEQ ID NO: 140708 - DNA, 122 bp, Homo sapiens
aacacacccaaagccaggtcattcctttctgggcctaggtcattcctttctgggcctctccgcccggcctccagaggacacctgggctgtgatgccaagagcccaagaaggcgctggtgtgg

SEQ ID NO: 140709 - DNA, 122 bp, Homo sapiens
gtgctcaccatatttcccattggtttggcctgtgctagaagttggtatgattgcaccatgcgtagagactctcttatttccagattaagttccatcagtttgtagttggcttctgacatgtc

SEQ ID NO: 140710 - DNA, 122 bp, Homo sapiens
ctccttaccccagctgcctggctgccctcagcttcccaaagctcaaataagaggggccggcggcgcggggaagaggaggagccaggaggctcggccgctccattcactcagcagcccaagcc

SEQ ID NO: 140711 - DNA, 122 bp, Homo sapiens
gtgcagccacgtcagccaaatgacttcatttctgatgtgaaaacgcttaggccatgatgtcgttcattttctgtaattgctgccttttctcattctgttaatagtcccggcaaccagatttc

SEQ ID NO: 140712 - DNA, 122 bp, Homo sapiens
actttgcaccagatacagaaaccacgggttatgtccaaaccctggttttggtgtgaccaccgccttccgtgtactgcctgcggctcgcttcgggcccacacgggacaccgaggcatgatgag

SEQ ID NO: 140713 - DNA, 122 bp, Homo sapiens
tttctcgctatacttaggtttgcctatcgcaggacttcatatacacgaaaccatacagtacgtgcttttatggttagcttcttatgctaagcataatgtttttgagattcattcttgttgct

SEQ ID NO: 140714 - DNA, 122 bp, Homo sapiens
cacatgtgagtggaggcctggccttagatattgataagagtaataatacccagagcgctccgggtgcctgagctcctttcgtcggtacaactgctctctgaggctgcttttgtttgcctcgt

SEQ ID NO: 140715 - DNA, 122 bp, Homo sapiens
gggcctcggattcccacaaatgtgacaagaggtatagggagtgagtcacagcgctttgctcgtgaccctgggatcagagcacccatcaggcttccattactgtgggctccctaagaagacca

SEQ ID NO: 140716 - DNA, 122 bp, Homo sapiens
gcagaactgttcccgctgctagggcacggctgagcgcgggcaccgcgtctctcctcgactcgcaccgcctatgcgccccagcctagccaggaatactgccctccccggactacagccctgct

SEQ ID NO: 140717 - DNA, 122 bp, Homo sapiens
gacatgtgtcaagtctgtaccatcctgcaagcagcagcccagtctggcatttgtgtaaggcggtttcagtggagagatgtgtggaagggtgcaccccacgatgctcacctggtgcttcctcg

SEQ ID NO: 140718 - DNA, 122 bp, Homo sapiens
aaatgatatgacaattactgcacaacagagatttttacctctgctgttccttaagtaacacgacccctattctccaaataaaaacttaccaacaagttgagcagtctcaaattagaatacta

SEQ ID NO: 140719 - DNA, 122 bp, Homo sapiens
cttatgtgtttcacattatacagtcacccttctgtaaccgtgggttctgcatctgtggatcgacaatattcgggggggtaaaaaaaaaaaaactgtatctgtactaaacactgtacagactt

SEQ ID NO: 140720 - DNA, 122 bp, Homo sapiens
ctggcttctccctgggtacacacgtatcctttttactttccccaactcagttctgtggtgcgtgggaggcgctgcaacagagtctcggtccggactggagccccggcgagggccgaccccgt

SEQ ID NO: 140721 - DNA, 122 bp, Homo sapiens
aaaagaagctgtccccaaacatgggcagagcatcctcacatctggtcagctacacatggacgaggacctgtggctctcaggtctgatgatccccagctctggggagggctggagcacagggg

SEQ ID NO: 140722 - DNA, 122 bp, Homo sapiens
ggaaccacggtcagaaaggttaggactgatcatttggctcttgccggaaatcgttccgcccggtgaggtttcggcgtgagacccgaggagggcggggaagaggcgtgacggagattcctgag

SEQ ID NO: 140723 - DNA, 122 bp, Homo sapiens
ctttcccggtctgctaagtagcaggtgttttcccctgacacttacgctaccgctagacttcggtctgcctggcaacgggtatcttcccagaagctggcgttaccgctagaccaaggagccct

SEQ ID NO: 140724 - DNA, 122 bp, Homo sapiens
taacaaaaaagaaaagaaaaaggagaaagagaagaaaactaggagccattcacataaccccgttttcagtacagcactccagtggcctactacgcctagtgtctgccaggccagagaccctc

SEQ ID NO: 140725 - DNA, 122 bp, Homo sapiens
aacagaagtgcccggcacgcggtggacacatccggagacccgtgtttctgtatggaagcacgtggcgcaagggcagggaaatacttctaagacggcacaagagcggagcaatacttctaaga

SEQ ID NO: 140726 - DNA, 122 bp, Homo sapiens
agaatttaaacccagtgagttcacgtgttctgcggctaaacttacgatgtaactttctaccggaaggagcaaagttgaacctatctgttaataccaggagggtaaccagagtactatataga

SEQ ID NO: 140727 - DNA, 122 bp, Homo sapiens
agggatttttgtgtcctgttgctttttattgtttaaagtgaccctccaagcctgagggaccgtaggagctgccctgcagagcccagtgagacactagttaatgcagaaaaaacagattttac

SEQ ID NO: 140728 - DNA, 122 bp, Homo sapiens
ccaggtgttgaaagggcaaaaagagatgtacccagctggactgtgcaggtgctggctgcccgttgttttgagccatgctctgatttgttcctctgtgcctgctctggggacttggccactct

SEQ ID NO: 140729 - DNA, 122 bp, Homo sapiens
ggttgcctgcaaacaccagaagctaggaaggatcctcctctacaagtttcagaggcagcacggccctggcaacaccttgattttgcacctctagcctccagaactccttctgctctttttct

SEQ ID NO: 140730 - DNA, 122 bp, Homo sapiens
ctgcagcatcttccgcttttgttgtctgagcgcggccgcgggacaagggatgctggcgggcggcaggggcgagcgccgcgggcgagaggcggctcccgacgcgagtgcgcagcgcccggccc

SEQ ID NO: 140731 - DNA, 122 bp, Homo sapiens
cctgcccgtgaggcgtgtgtgtgcacacgtgcgtgtgcgtgtgtcctccagggcgggctccgggaagggggtgtgcactcacggtaaccttcagtcactgaggaacaaacacagggccctcc

SEQ ID NO: 140732 - DNA, 122 bp, Homo sapiens
gccccgtccgactggtcctcatcagacctgggccggctcccaggacccgggagtcaggctcgcccgcttcggcctcctctcccccatcgctccgcgccccacgccccatccctccctcgctg

SEQ ID NO: 140733 - DNA, 122 bp, Homo sapiens
caaaactcccctgggcagtccctggtagggcagggcccctggaggagggctccccataaccgtcagggtcgaggacctgaggctgtaggtggcagaacttccagttcctgcccgcagagttg

SEQ ID NO: 140734 - DNA, 122 bp, Homo sapiens
agcgagcggggtggcttatgggggaaggggggctggactccgggcaacccccttccggtccgcttccccactgcacagcggagtaccccccccaactttggggaggggaaggggctcgtggg

SEQ ID NO: 140735 - DNA, 122 bp, Homo sapiens
ttgtgctgccctccttctcctgcgtggtcgtgaccttggacctgaggcttctgggctgcacgtttgtctttgctaaccgggggaggtctgcagaaggcgaactccttctggacgcccatcag

SEQ ID NO: 140736 - DNA, 122 bp, Homo sapiens
ggccctggcctattggctgtctgtccaccaatccaaagagacgcacagtccgcaaggtcgcgaggctggcgtcacaacactactggcgccgcgggctcgcccccgacgcccaccgggctcgt

SEQ ID NO: 140737 - DNA, 122 bp, Homo sapiens
gacaccctcaagggaggagtgcaggcactcaaagatttgagtcacaggcaatgtggttcacgtactatatgaataagcacaatgaaggtatggagtactctgtaatcaaggggaggggtttt

SEQ ID NO: 140738 - DNA, 122 bp, Homo sapiens
cagggcgtctctcagcgagcgactgagtctagagctgagcgcaggggcgtgaagacgccgcgggctctttgaacctggcaccctactgccagccgtgcgcctgattgacagttctcacgacc

SEQ ID NO: 140739 - DNA, 122 bp, Homo sapiens
ttgctggaggcaggatcggattcctcttggctgttactgacaagtgcccatcaaagagcccggaggacgggagaactgctgcaggacagtctcgccacacaccacgtgccgtggagcctggc

SEQ ID NO: 140740 - DNA, 122 bp, Homo sapiens
cctgggaactgctgacctgcccgcccaccttcccacccagaccccgccttcccgggccagcgggacatgacagacctgtgagtcactcaagcctggggcaaggaggggctggtgcctgagtg

SEQ ID NO: 140741 - DNA, 122 bp, Homo sapiens
cccccacggcagtgtaccgcccggaagacccttaacttccggggaggggctgccgcagaacgcgcctggcttgctctccgccggctgccaaaggcgcatgcgcagcttcctccctctggcca

SEQ ID NO: 140742 - DNA, 122 bp, Homo sapiens
agcctggccaacatggtgaaaccccatggtgaaaatacaaaaattacctggacttggtagcgcaccactgtagtcccacctactaggtgtagcatgaggcaggtggatcgcttgaacctgac

SEQ ID NO: 140743 - DNA, 122 bp, Homo sapiens
tgcggcttttggttggataggataccaaacgggatcaggtgagactgcgtggcctcagcccgccagtgagcgatgggggtagtaacacaagagccggccccggctccccgctcaggatcccc

SEQ ID NO: 140744 - DNA, 122 bp, Homo sapiens
attccgcaaggccgaaaataggcccccggcgctgcggggagggccttgaacttcgtgggccggatttaaatggtttaggattcccggctatcagcctttgagttgttagtggcggggagaaa

SEQ ID NO: 140745 - DNA, 122 bp, Homo sapiens
tgcaccctcgggctgcgcccgcccccgccccatcctcgtccgcgcggtgccgcgcctctccgccccactccggggactgcagctacccggaccttgcaagccacccttccgagcgcccccaa

SEQ ID NO: 140746 - DNA, 122 bp, Homo sapiens
tctgctgcccggttgctctttgggacctcagggatctagctccggaaagccattttgtgccgcactttgatcacgtcaaatgagcatctttgacgatgagccaagcgcctggccactcctct

SEQ ID NO: 140747 - DNA, 122 bp, Homo sapiens
gtgaatacaaagatgagtaaggcactgtccttgcccttaaggaatttaaagtctggtagacgagagccatagacacggacaatgataatacaacctgctaagtgctaggacacttagcaggt

SEQ ID NO: 140748 - DNA, 122 bp, Homo sapiens
gctgatgcttacaaatgtgtcccacgatttagatgcattgaatccactcattagggccatcgttcccacattgaggccgagacccaggagaccagggtctgctctctacctcgccaccccct

SEQ ID NO: 140749 - DNA, 122 bp, Homo sapiens
tttcactcctgaggccagcgagaccacaaacccacgtgaaggaatgaacaattccagccacgctgcgtttaagagctgtaacatttaccgtgaaggtctgcaacttcactccttaagtcagc

SEQ ID NO: 140750 - DNA, 122 bp, Homo sapiens
caacttttctcctcttccaccaaagctctagaatttttctgagtcctggaaataatggatcgaagttgttgttctttaaaataaaataaataataagctctttcttttttagataagtggcc

SEQ ID NO: 140751 - DNA, 122 bp, Homo sapiens
gcaaaggcagggggatggccatggaagggttgaggggccccgtcggacagagggcccagccgtgatccagcgacgggtttggggctccgggaggggtgggggggcagcgggcggcggcagca

SEQ ID NO: 140752 - DNA, 122 bp, Homo sapiens
ggctcttttgctttctatttcttctcctgcagccagggtgcacacgtatttgaaacagaccgaatttcctcctcgatgtggcgtcaggttgacttttcgagactagcgggtatttcttttta

SEQ ID NO: 140753 - DNA, 122 bp, Homo sapiens
agtaacccacccgcctcggcctcccaaagtgctgggattacagacgtgagccatggcgcccggccaatgaagcagctctttaaagaaataagacatgaaaataggtctgtcctggtatacta

SEQ ID NO: 140754 - DNA, 122 bp, Homo sapiens
gcaccgtatctccccctatcaccgccaccttcctcaccccacacccccagcctcgctgcgcgggcagagattgagtgtggattacagttctcagtcgaattggaagaggcaccctggcctcc

SEQ ID NO: 140755 - DNA, 122 bp, Homo sapiens
aacagttcccaccatgaagagagagtaggtgaccggaaaggagtgcgtcttaagcgcgttcgctgaatttgcaccacccaatccagccccgccgcccggcgccgctccttagacctggaccc

SEQ ID NO: 140756 - DNA, 122 bp, Homo sapiens
agcactgagaggcattgccggcctgatactgtcccactgactcactgtgacatcttaggccggtttctcttccataggtctcatctctcatatcacgagattagaacacatgaactattgtg

SEQ ID NO: 140757 - DNA, 122 bp, Homo sapiens
aagaggacaaaaagcaacgggcggacgcacctggcgaggaccttcggcagccggatcctgcgttagtgcagcgctcgtcggactctcccagcattcgccgccgcccctcctccccggccagg

SEQ ID NO: 140758 - DNA, 122 bp, Homo sapiens
caggaaactgagtcagagcctgtttatcacgcgtgtgacggagggcgaagacctgcatcacgggagaaccccacgcacacggagctcatggcctgtgccagggtgggcgggagaccttcacc

SEQ ID NO: 140759 - DNA, 122 bp, Homo sapiens
gagcctggggtggcctcggcggtgcctgaagaactggcggatctgaccacggagcctgaccgcctgagggactcacgcacgcactaggaaaccgccgccgggaacttctgagcttgcgtgct

SEQ ID NO: 140760 - DNA, 122 bp, Homo sapiens
atttgggagaggagggagcagatgaaacaaaaataagcttccagcacatccagccttaaacgttaagttaacttgctgtctgtcctgcttcctcataattgttcactaggtatggccccaca

SEQ ID NO: 140761 - DNA, 122 bp, Homo sapiens
cactcaggaggcatagcaaagatgccagtgcagctgcagtggatgagctcagggagatcacgggaatccagaccacatagacttggtcctactggaggacaaggattttgctgaaggtatct

SEQ ID NO: 140762 - DNA, 122 bp, Homo sapiens
acgccgaaatcccccaaagcagtccaaagaacacaacgagagtcctaacatcccaggtggcggcgcgctggctccctggagcggggcgggacgcggccgcgcggactcacgtgcacaaccgc

SEQ ID NO: 140763 - DNA, 122 bp, Homo sapiens
ggctctgtgagggtttcaggcgagagccggtgccagggctgccaggacttccgtgcttgtcgtcgtggggcagggatggatgcctgatttcagacggaagaacgccactctcatcagcagtg

SEQ ID NO: 140764 - DNA, 122 bp, Homo sapiens
cccctcattcattcgttcagaaaatggttattttttaagcatccagcttccgctgcgtaccgttctaggcgctgagaatcagctctgaacatgacagacaaggctcctgttctcatggagct

SEQ ID NO: 140765 - DNA, 122 bp, Homo sapiens
tctcttcattttcctctaggttggcctcacgtgtagggaggtccccttcaagtggcagttcgttgttgttgttgttgttgttgttgttgagacggaatcttgctctgtggcccaggctggag

SEQ ID NO: 140766 - DNA, 122 bp, Homo sapiens
tttcttagacattcctaacccagcagttcttcactcaatttctacagtaacacatttggtcgttgagtccttctttatcacacatattcatgaacaactctttcatatgggccactcactca

SEQ ID NO: 140767 - DNA, 122 bp, Homo sapiens
cccaagacctcccactacgtatgagctttggaaggcagggcctcgcctctctgcatgtcacggggcctttgtgggggaagtcagtggagtagaggacctgccatggtgctgctgatagcagc

SEQ ID NO: 140768 - DNA, 122 bp, Homo sapiens
gctgccttgcctattagatgaagtacaaataaagggagaggcagcagtggtggagggaggcgagctcagagacctgcgtgtgacttctggctgtaccactcactcaccagctgggactctgg

SEQ ID NO: 140769 - DNA, 122 bp, Homo sapiens
gcactttacaaaaagatctgttctcagttcacattctcttaattccctgtcatttctccccggtcttccaaatatgttttttaaattatgattccatgtataaacacaagatcgtattttgc

SEQ ID NO: 140770 - DNA, 122 bp, Homo sapiens
cagctcgcatagtggtgagtccgcgggtggtggaggcctcggagggagggcgcgccggggcgccccaagccttcgcgtgcgtgccaaggtttgggaatgtagtgcacgaccgggatctgtct

SEQ ID NO: 140771 - DNA, 122 bp, Homo sapiens
catcaagttctcggagaagttccagcgctacagcgccttctctctgggctacgagttccacgccggccacgagtactactacatctgtgagtgacggcggccgggcgggcgggtctgaacgc

SEQ ID NO: 140772 - DNA, 122 bp, Homo sapiens
aaaaaaaaaaagttcagtgatgggagaatacagtgtgagaataagacaatattaaactggcgatataagtaagtgatcatcacaaggctttgtaggacatagtagggagtttaagacttttt

SEQ ID NO: 140773 - DNA, 122 bp, Homo sapiens
cccccagcggctcaggccagtcccggggcggcgcagacctcccctcccgcgcctcgcccacgccccaccagcgccgcccggagcccgccagttctgcccgagctgggcccctgcgccaagtc

SEQ ID NO: 140774 - DNA, 122 bp, Homo sapiens
agacatttggaagagtcgctgctgcggttttgttctgtcttgaaatcatcctctgtgggccgggatgccgaggtggggactctggggttgtctttcgagaagagcctgattgcaggagttgt

SEQ ID NO: 140775 - DNA, 122 bp, Homo sapiens
ctgagttctgagaacacacacagggctgctcaagcaagaatgaaatgagcctacaagagacgcttctcctttgtctgaggcacacagagagaactgcatttgctcacccagggccagcccca

SEQ ID NO: 140776 - DNA, 122 bp, Homo sapiens
cagaacattttgaaatgacgttacagaaatgagtggtcagtggcggccaggtaaccccggcgcgaggggaggggcggggctgtgaacgcacaggtgcggaccggcctccccggcacggatgt

SEQ ID NO: 140777 - DNA, 122 bp, Homo sapiens
acaggaggggagtctggcgctggacatggattctggccctagtgacaacatgaagcagggcgtctggccccagaactgcaggcgggcaggttgtgcggcctcttacactcctctgccagtct

SEQ ID NO: 140778 - DNA, 122 bp, Homo sapiens
tatcttcttctaattgcttgggatgttttgaggctcaaatgagggcaagacaagagtgttcgataaagtccaaggtctgccaaagtataagatcacgtggtttcttctgcttaaagacctct

SEQ ID NO: 140779 - DNA, 122 bp, Homo sapiens
ttaagaaatctctgtttgatttctcaacttccctctctccctccctcaggagttagaagccgctcttcacagagatgacgtggagtttatcagtgacctgattgcctgcctgcttcagggct

SEQ ID NO: 140780 - DNA, 122 bp, Homo sapiens
agtcccgggcggggtcatcgctccctccacgctgtcgcgggcttctgccaggcggtgatccgtgcccaatgccaccaaagggaagcttgtacccaagagtggggggaaatgcatccttcacg

SEQ ID NO: 140781 - DNA, 122 bp, Homo sapiens
tccatctgtggctaagtggtctttctgcactggggtctttttgttttcataatcactttgcgcttatttaaatattgccctttcagtcgtgaattttaaagggaggaagctttggtgtgtga

SEQ ID NO: 140782 - DNA, 122 bp, Homo sapiens
actgtttccctaaatctcggaaatattctctgcccgcctcccattccacctctccaaccccggccaagtctgggtaacttgcctccttagcatcctgtgtttatctcatcgtagcacctagt

SEQ ID NO: 140783 - DNA, 122 bp, Homo sapiens
cgcaggctgcacagtggcgtgaatgaagggcagggctgaactccagggcctacggacaatcgctgcacagccgggccagtggctgaccctgcttcctcgctgtccactgggggtagtggcgt

SEQ ID NO: 140784 - DNA, 122 bp, Homo sapiens
gcaattttatgagatgtttaagaatgtgttgacttccttctttatctagaaaaaacagcccgtgaaggtactagattaagcaatgccattcattttccacaaagctttcaaaggaaacccag

SEQ ID NO: 140785 - DNA, 122 bp, Homo sapiens
agccccagctccaggcccggcggcgtcccttctctcgggtcccggcctcgcccggcggagcggcctccccaaggtcatgagggaggctggggccggcagcctgcacccccggcgcccggcgt

SEQ ID NO: 140786 - DNA, 122 bp, Homo sapiens
cgagaacttctgagcaggccccgctgtcagtccctgaggacagcatgcaagggaggttgacgtccctggacgaagaaagtgctggagaaactggcgaccgtcccaccttccctaaggcgaag

SEQ ID NO: 140787 - DNA, 122 bp, Homo sapiens
agtcctgggattgcgggagtgagccaatgtgacaggaccagatgctggatttttaagtagcgttaacattgtcctgaattttgctcttcactatcttgcaaattaaggcaagtaggaagggg

SEQ ID NO: 140788 - DNA, 122 bp, Homo sapiens
tcacggcttccagcccttcgacgaactctcaggtgtgtggccttctggccaggcttctgccgcgtcacgttgttgaagcattcgttgtatccctggggttgcagctctctgtaagtttgctg

SEQ ID NO: 140789 - DNA, 122 bp, Homo sapiens
gggggtggacgggcgggctgggactggtgctggccattggctgcctcaaggctcccaccccgcctgcctccctagcctgcggctggcggcccctgcctctccagctgcctctgaactccctg

SEQ ID NO: 140790 - DNA, 122 bp, Homo sapiens
acgaccccagccagagagaacccaacctgagtgccagcgagagcctgtccttggtcgctccgacccctcgccaggggatgtccggtaggaatagcactgagctgatgtgacggcgcggaggc

SEQ ID NO: 140791 - DNA, 122 bp, Homo sapiens
ggcgcccagggatcctggagacaactttgccgtgtgacgcgccgggaggactgcagggcccgcggccgagggctcggcgccgcctgtgagcgggcccgcgcggccggctctcccgggcacca

SEQ ID NO: 140792 - DNA, 122 bp, Homo sapiens
atgaggtatgtaaaccgaaaggcagcaacagttatcagataagaaaagcatgtaagctaacgtcagatgagtcattagtagaaagtttacatccttatagtatggactatgtgtttatatcc

SEQ ID NO: 140793 - DNA, 122 bp, Homo sapiens
cgggcctgcgcctggcaccgccgctacctggattcgcgggcccctcacacactcacctgccggtaaggatagctggccatggtgattctgacgtcacactcaggcaaggggtggggctttcc

SEQ ID NO: 140794 - DNA, 122 bp, Homo sapiens
ccacgccgggccacacgggaggaaccccctggagccccttttgctgaaaatacagctgagcgcttcccaccttcttacacctcctacctgccccccgagcccagccggcccaccgaccagga

SEQ ID NO: 140795 - DNA, 122 bp, Homo sapiens
gaggaggccttcattaccctgcgaccttcttgccttctttgcagttaggccagtggcctacgtggtattattaaatgactttaactgtcctcatttctacctttcctccctttactccttcc

SEQ ID NO: 140796 - DNA, 122 bp, Homo sapiens
gaccaggatgcagctggcttgtagaagagctcaggagtgagcctggcactccagagggcgcggcgggtggggaggcagcaggcaccagtccaggagagcttcgtggacgtggctcctgcgcg

SEQ ID NO: 140797 - DNA, 122 bp, Homo sapiens
tcaggctgcagaggaaacctgggggcgggggtcgaggaagccgagccccgaggctcccagcgccgccccaggaggaatcttgcgggccactagaagctgtgcgcgcggccgggctcggcccc

SEQ ID NO: 140798 - DNA, 122 bp, Homo sapiens
tcatggtgagtgcagcttctcccatcaaatataccactatttctgaatttctggtacgaacgatgaggatttagctcttgaaaaacccctacgttctattctctccttccttctcctgatga

SEQ ID NO: 140799 - DNA, 122 bp, Homo sapiens
acctgggtctgttgggtagatgcagtcctttttagagaggcatagtattctcagacctgtcgccacaaattgctccccactcattctttccctatactttgtgtctttgaaacctctttatc

SEQ ID NO: 140800 - DNA, 122 bp, Homo sapiens
agcaagacagtggatctgagctccatccccgcagtctgcactggccccttcatggcacagcgacagctttgccatcagccggcaagcatgcggggtgtggacgacacagccggagagagcag

SEQ ID NO: 140801 - DNA, 122 bp, Homo sapiens
attaccattggaggtccttcagggcaagggctgcatcttcaatattgcgactttccctcccggcatatttgacagtctttgcacacagtggtaaatcagtaagtgctgtcatctgtctggtg

SEQ ID NO: 140802 - DNA, 122 bp, Homo sapiens
caggctccttcctgccccacatgccaggatgctggtttgaaggggagagtaggccagctacggcccctggcccgcatcactgctaaggacatggggtccccccatccctggctgtggtcccc

SEQ ID NO: 140803 - DNA, 122 bp, Homo sapiens
cgccactgcccggtgcgggctgcacccgaggcttcctgcgctcgccggggagccaagcaccgctgtgctcctgctccttcagcggggctggcttcccgcttgcacacactgcctctccctcc

SEQ ID NO: 140804 - DNA, 122 bp, Homo sapiens
taggaaatcagagaaacgaaccttgaaaagagggccacagaaaagactgaaacaaataaacgctgtcaaagtggctgttgaccttttaaaaggttcagcaaggtggaatgtgttctttagtg

SEQ ID NO: 140805 - DNA, 122 bp, Homo sapiens
gaaaaagctgcaactttccctggagcggggaggagctggactcttaaaggggccgcacagcgccccgggctccttagcagggggccactcagcccaaaagggagctctgggacccaaagcct

SEQ ID NO: 140806 - DNA, 122 bp, Homo sapiens
aaaagtaaggaccctagacagacaagagatccatcctttcctttagcataagaaacaccccgcgccgcgccagccgaacgctgctcgcacaaggctatccgcccttcttggccgggacgcac

SEQ ID NO: 140807 - DNA, 122 bp, Homo sapiens
ggcagaggggcttagcacccgggccagcggctgcggaaggtgtgctgggtcccccagcagcgccggcccactggcgctgcgctcaatcgatttctcgccaggccttagctgcctccccgcgg

SEQ ID NO: 140808 - DNA, 122 bp, Homo sapiens
gcgcaaaggccgcgggcaggcggctgacataggctgaaaggacacgagacgccatggctacgccaacccaggatgcactgcgccgccgcctccggaccagggttcctttccggcggcgcgca

SEQ ID NO: 140809 - DNA, 122 bp, Homo sapiens
ttgcaaacaaagggtccacctccaagtcaccccactgtctcttccctccggccttcagtacgtacagagggggaagtgtccaatgtccagctcacacgaacgggatgaacaaggcagactaa

SEQ ID NO: 140810 - DNA, 122 bp, Homo sapiens
ccccaggccttggtgcctcttgtatccctagtgctccatagtttggcatttgcacggtttcgaagtcattaaactggttagacgtgtctcaaccttttcccttttttggtttgcctcttcag

SEQ ID NO: 140811 - DNA, 122 bp, Homo sapiens
ctgcccaagtgcagttattatccttgttttgtatttgatgaaactgaggcagagagaggtcgagtaacttgcccaagatcacagttacaaagtgacgtgggtaggattcaaacccagcaggc

SEQ ID NO: 140812 - DNA, 122 bp, Homo sapiens
tgcagcatggatgctgcagggactctagaggctgcagagggatgctagcatgccgtgactcgtttgaaagtcacaatagtgctgatatttttatttccaactgcctagcttgtctgcctctc

SEQ ID NO: 140813 - DNA, 122 bp, Homo sapiens
agttacactgaaaaaaataaattaggatatgtgtgagttggcagaagaagagggaggatacgcagctaagcagcttctaccctgggcatcagtggactgactatgtatcacattatgccaat

SEQ ID NO: 140814 - DNA, 122 bp, Homo sapiens
gggacctggaggaatgagtaaggcgcgagccgggacaaacacctggagaggttaggtaaccgctgagtgaggcagtggaggatggagagccaaccggagtgtccgcgcagggttgcagagaa

SEQ ID NO: 140815 - DNA, 122 bp, Homo sapiens
ttgaggcaggctgcggagactcaaggaggtttccaagggcgaagggccacgggcagaagacgagtggagctgcactgagcaggtcctggcagggaggactggggctggaataggtgggcctg

SEQ ID NO: 140816 - DNA, 122 bp, Homo sapiens
tggcgtccgggccggcgtccgggcccaggcgaccggggcctccgagctcagaggcagtgccgaggaccgaaggaggggaagggattccccaaaggcatccctgactcccgaattccagcaag

SEQ ID NO: 140817 - DNA, 122 bp, Homo sapiens
ccaggcggtgacacttcccacgatgaggcttctcatgaaggcagaaacctgttttctaatcgctccgactgcggatgaaccggcccccccttccccccatctgccatgggttctgctatttg

SEQ ID NO: 140818 - DNA, 122 bp, Homo sapiens
gtttcaagcgagtcaagattccagatcgcgccccaggctggactcggaattactgccccgcgggtctgcattttcacagcggcaggtgtgagttccccgccgctggagaccagaagcctgaa

SEQ ID NO: 140819 - DNA, 122 bp, Homo sapiens
cacccgccttcggccccgccttggcccctcctccaccccccttcctccgctccgttcggccggttctcccgggaagctattaatagcattacgtcagcctgggactggcaacacggagtaaa

SEQ ID NO: 140820 - DNA, 122 bp, Homo sapiens
gggaccccccaaggcccaggctaggtccaatcacggcaatcacctgaagccggacaggggcgccctgccttcccggggtatgcggaaggaaaaccccagtgacggggacccggcgacgccta

SEQ ID NO: 140821 - DNA, 122 bp, Homo sapiens
cccctccgttcacctggggcctctcctcctccctcgctctgctgcctcctgagctcaggtcggtcgtgcccatcctggcatcaccccacagccggttctgccgcatcccgtcatgttcctcg

SEQ ID NO: 140822 - DNA, 122 bp, Homo sapiens
gggtgtgaccctcatctccccatttgttgggcgcatccttgattggcatgtggcaaacaccgacaagaaatcctatgagcccctggaagaccctggtgagggtccctctgtggtaatggggt

SEQ ID NO: 140823 - DNA, 122 bp, Homo sapiens
cccagccgcccacccccccgacaggccccgccccattccccgccccccgtctgttcgtcacgcccggctctgccgctccgtcccgcaggccccgccctcatcccgcctcccggcccggcgcg

SEQ ID NO: 140824 - DNA, 122 bp, Homo sapiens
gtccaatcacagaggcaggaagggccgtggtgggaggtgaaaggtcatagtcctgtttggcggccatttctcttgaaactgcggctcgggacctgcggtacctgctgtagtcacgagggacg

SEQ ID NO: 140825 - DNA, 122 bp, Homo sapiens
acgggctactaggggaggcgcgctgtctgcggcgaaatgccaggtctttgttgtttggtccgaaatgtctcttcagtcccttagtttaatgtcgagggaacacttgcttgagggttgacttc

SEQ ID NO: 140826 - DNA, 122 bp, Homo sapiens
tctccctctctctctttgccagcaagcagtattgagttgtcatgtagctctaataggcagcgcggggaatcgttagtccacctcaacgccctgactgatgggcacttcacttcaatcatctg

SEQ ID NO: 140827 - DNA, 122 bp, Homo sapiens
gggcctccttgggcaagggagcctggcatcgcggccctgagcccaggagccagtcggcctcgcctctcaccaggtccttcacggtgtccaagtaatcgtcccactcgggcgatccaaactgg

SEQ ID NO: 140828 - DNA, 122 bp, Homo sapiens
agtggattagaaatagtcaatgttagtcttaagaattgatctgctgttacctgtcaacaccgtccacatcagatcaaacattagagccccaggcctgcgatttaaaacctccacctgaacag

SEQ ID NO: 140829 - DNA, 122 bp, Homo sapiens
ccaggcaatctggctttagagaccatacccttaactgtgctaaagcattatcccaacatacgttgatatatttgtgactttatttcttcagcgattatctcccctcgccaatgcacaggtct

SEQ ID NO: 140830 - DNA, 122 bp, Homo sapiens
cagtgtgtcctggacccacctgtagcctccaagctcccccacctctgcgtccttcctaggcgcttctgagcctgcagagcctacgacccccaacaggctgctccgaagtgcctctccctaca

SEQ ID NO: 140831 - DNA, 122 bp, Homo sapiens
ccgcgagccccgggggctcatcgggggatcgagagcagtgaaatgaaagacagggctgtgcgtgggtctggcccgggcagtcccgacagggctgaaagctgacactgtcacagtttgctcct

SEQ ID NO: 140832 - DNA, 122 bp, Homo sapiens
gcagaagcggtcccccagggagcctttgggcgccagcaccaggatggcgtagtggtaggccgtgtacatgcagtagaagtccgcaaagtagaggttggtgctgggattgaagaggcgctgag

SEQ ID NO: 140833 - DNA, 122 bp, Homo sapiens
gcctggctgcgccacttaagctgccaagaaagtaatccgggactcttaagggttttcgtgcgggagtctcatttgcaagtttgatttggaatgtgctcttgacaaaggcggttccaccctgt

SEQ ID NO: 140834 - DNA, 122 bp, Homo sapiens
gaagtaggaggcttggatgcacgctagagcaggctctggttccgggaggggtggcggcgacgcccacagcagtcttctttccggcttcccacagagagcaagaccgtgggagataccaagtg

SEQ ID NO: 140835 - DNA, 122 bp, Homo sapiens
acctgtatgaccttaggtaacatatttaatcatggagttctagttttctcaccagtaaaacgggggcaataataatgacacttatttagaaggtcaacctagataattcatgtgaagtgcct

SEQ ID NO: 140836 - DNA, 122 bp, Homo sapiens
tccccagtcctggagaccataaagagccctcatggggcccagcagtcagcctatgctccccgcatctgagaaaatgtggtccagctccttatcagtctgtacccaagtgcagcaacaaaatc

SEQ ID NO: 140837 - DNA, 122 bp, Homo sapiens
gatgcatgaggatccagcttctctgcctctcgccagcactgggtgtctcggttttcattccgttctgatggcaccgtgctttaacacaggctccctgaaggctggcgaggagcatcttttcg

SEQ ID NO: 140838 - DNA, 122 bp, Homo sapiens
tagggctagaccctacatctggtactccaatgtgcctttctccctcgctgtgtgaagttgcgctttgagccggggactcagcggaggaatttcgacgacagattcctgaggattgcggtcat

SEQ ID NO: 140839 - DNA, 122 bp, Homo sapiens
gtttaaattagattttttaaaacacagagcaagcgccagaggcgtcggcatcccaggtgtcgccgcttcctgctgcacagggctcggcgtacaggtccctccctcctcaagccccctcccct

SEQ ID NO: 140840 - DNA, 122 bp, Homo sapiens
tctgctgccaccctgagcgcctctaacatcccgggagccccgcggccgttccgggcgggccgccaccgcacctgctcatttgcataccgcgctcccattggccggccgggagccccggcaga

SEQ ID NO: 140841 - DNA, 122 bp, Homo sapiens
gaaaaaaaacgcagcatctttgaagctcaactaagcatggaggtgccgtaaagcgaggtacgcctgcacatgagtgccgtaaagcaaggtacgcccgcatcacaggagtgccgtaaagcgag

SEQ ID NO: 140842 - DNA, 122 bp, Homo sapiens
gcacaggcgggaacccgggctgcgcactgtgcttgcgggccagctagagttccgggtgggcgcgggcttggcgccccagactcggagcagctggccggccccgccagcccccggcagtaagg

SEQ ID NO: 140843 - DNA, 122 bp, Homo sapiens
ggcacagaataaacttggatggcagagtcaatgatgagattagctgtggaaatgggaaaccgttttttggaggcagtagtaatgctgcgaacttatgaaaacaaccaagtattcagtagcaa

SEQ ID NO: 140844 - DNA, 122 bp, Homo sapiens
tgagttgtggcgctttttacctaacccggaccttagcgttctttattgtagtcttagcttcgtttctgtttctccttttctagtcagatccttcctttccacctcggcttttctccacccta

SEQ ID NO: 140845 - DNA, 122 bp, Homo sapiens
aatctggcaaagttcttcagacgacttgggagcaaaatggctgcttgagctactctgtgtcgttaatttgttgtttgcacataggttccactttgggcactgtctttttaagagaccaaggc

SEQ ID NO: 140846 - DNA, 122 bp, Homo sapiens
ggtaccagtggctcgccggcatgggaatcagcagcctgggggcaccagtgacagcagaaccggggcttaccttgttggaggccatctcactgacggagtgcctggtctgtagggtctctagc

SEQ ID NO: 140847 - DNA, 122 bp, Homo sapiens
gtggcagatactagcgtttcattggtaaaactcccactggtagcagatataacattagtacggagctagcctcaatagaccacaagcatctaaattaaattctgttgggtactgagactttc

SEQ ID NO: 140848 - DNA, 122 bp, Homo sapiens
tcttgtaaatgtggttaagttccttacagatgctggatattagacctttgtcagatgcatcgtttgcaaaaatgttctcccattcggtaggttgtgtgtttactgtgttgagagtttctttt

SEQ ID NO: 140849 - DNA, 122 bp, Homo sapiens
ggacgtctgacctgtggaaaacccagcatctgcagtgcccagccgcacagggaacgtgggcggcgtggttccaagcacagtgaagacgccaggctcggatctgtgctcagagccgggatccc

SEQ ID NO: 140850 - DNA, 122 bp, Homo sapiens
gcgtcccgcacccccaccctggccgccgaggggcggggcgcggcgggtccggggcggccgcggctccatggggctcctggggctcctgagcctgctgcactcggccttcttcggggaccagg

SEQ ID NO: 140851 - DNA, 122 bp, Homo sapiens
ggaatgcttaaaaatttcctgaatctgccttcctgagttgataaaataggaaacaatacacgttctgagggggtactgaaagcagagtaaagccaggaagatcttttttttctgttattcta

SEQ ID NO: 140852 - DNA, 122 bp, Homo sapiens
atatatgtgaccagtgaaatgcttctactaggtttatctctgtgaaaagatcacttttcccggagtgatcttgtggactgaggattaagtgggtaagcttgagccaagcttagcatttagca

SEQ ID NO: 140853 - DNA, 122 bp, Homo sapiens
ctcttctgcaggtacataaacccctgagacatgttatgcacaccccacaatcaagtgtgtcggcactgaagcaggcagaccagggtttcagttgtagctgtgtggtcttatcaaacgaccaa

SEQ ID NO: 140854 - DNA, 122 bp, Homo sapiens
agcgtccccagctgtgccaccagcccggcccccagccgacccgagtgtggggacatcccccgcggagaatgaagaaccaacgtaccccaaagcttggcggctctgcccgagctgcagcggca

SEQ ID NO: 140855 - DNA, 122 bp, Homo sapiens
ctggcatacctacaatgttttaggccctaaactacattttctaccgtcactgtcacgtggcgagccacatattgtgcaatatgctttagcaggcatgttgctagtaaactgaagaagcactt

SEQ ID NO: 140856 - DNA, 122 bp, Homo sapiens
gtcctcctctttcctgtatctcaccccggtaccccgcacccttctccccgctcggccccgcgcactctgctcagactttacaagcactttctcggggcacccaggactcgacgcctcctccg

SEQ ID NO: 140857 - DNA, 122 bp, Homo sapiens
ggcgatcaaggagagagcaacagccacacacatgagggcccgggctgtttccagggcaggcgggagagccaacaaggagctatagaacttgcattgcaaccggaccctggcttgtcggatgc

SEQ ID NO: 140858 - DNA, 122 bp, Homo sapiens
gaactgattggttctcccactcaccaatttgtcaggactgcccctactgggcagagctttcgcaccagcggcctccgccctcccccattcacactagcctataaagtggctgcctgagatcc

SEQ ID NO: 140859 - DNA, 122 bp, Homo sapiens
gttgtccaagtacatctatgtcagtctgctcagtcctcaagcctcctttgtgttctgagacgattgtaggttctagttttctagacgattctaggtttctagttttctcttcctgcagtttc

SEQ ID NO: 140860 - DNA, 122 bp, Homo sapiens
cagcctgtacctggagggggaaagagagaggagcacaagtcaaaaggaagaaaaaacttacgttaagagccaggagttggggtttaatcccctatgtcagtgagaacattgttctctttcca

SEQ ID NO: 140861 - DNA, 122 bp, Homo sapiens
agcttgtgatccgcccacctcggcctcccatagtgctgggattacaggcctgagccactgcgcccggctgggggcctacatttgaccccacgtggtggtttgggctcatagtccatgtgctt

SEQ ID NO: 140862 - DNA, 122 bp, Homo sapiens
tcggtcctgaacacacattttgtttgtttgtttgtttgtttacaaaacccctggagaacccgcgtattctaacctgggctggtttttgtatttttgcaaaataacaccccacacattctcgt

SEQ ID NO: 140863 - DNA, 122 bp, Homo sapiens
gaggcccccggaggtgctggggtccctgcagggccgggccacctgccgtggagctcaggccgcgccagaatcggatccgggaagctgcgcgccatgagcagctccctgcggccgggccccag

SEQ ID NO: 140864 - DNA, 122 bp, Homo sapiens
cttcccgcagcagctcgtgagggtgagtgcagacccctcccgcgggcacgggggtctcggcgttagcagtaggctcttctcccgacatcccaaagccaggggcgggttccgcgtttggtgtc

SEQ ID NO: 140865 - DNA, 122 bp, Homo sapiens
aggggatcaggactgccagtacccagcgcacaaggaggactcaaggaggcgggacaatggcgccggacgagggaaaactacaattgtctgaaagaactaccacctagttttcctgcgctaac

SEQ ID NO: 140866 - DNA, 122 bp, Homo sapiens
caggctgtggcgctcacgccggcattcttgtttcctccctaggaaagctgcattaccaggcgacctcttcttggctttgagagacgtccaaatgggaactattaacaaaggcacgctcccat

SEQ ID NO: 140867 - DNA, 122 bp, Homo sapiens
cagtgcagtgcgtgggccattccaggagccacggcaagtctaattggcttgatactgttgcggtcttgccagtgcaccttaatatagcagtttctccttgtctgaactagtcccggggttct

SEQ ID NO: 140868 - DNA, 122 bp, Homo sapiens
ctccttcccctgtgaatatcagaacaggaccaagtggccagtctctggctcctcctcctccgccttaccgccagcctcctggggtccccaatggaccctctagccccactaatgagtcagcc

SEQ ID NO: 140869 - DNA, 122 bp, Homo sapiens
acccggggaagagcagactccagtgtgcaaaacgtttcggggtttccgggccagcggttccgggcgcgcctcgcgggcggcggcgcagaactacaacccccaggctccctggcgtggcggca

SEQ ID NO: 140870 - DNA, 122 bp, Homo sapiens
ggtcctgggagagctgctgcggacgttcctgtcaagcagtgaatcactaagggcaagcctcgttctggagacatgtgcatcccacgggggaattagaccttaacccaaaggaatgtggctgt

SEQ ID NO: 140871 - DNA, 122 bp, Homo sapiens
ctccggaagccccgctcgcactcaagggggccacaggcacctgctgcccacaggaagacgcgtgtgggaaccagacgctccggcaagggcagactgcactcagcacagagcggccccggccc

SEQ ID NO: 140872 - DNA, 122 bp, Homo sapiens
catcgttctctggaagccctgcccagtcaagccaggggaacgcagggcgtcttcaccctgcgcctttcatccactccggatctccaaacaccaactggttcatcaccctaatgacgctgacc

SEQ ID NO: 140873 - DNA, 122 bp, Homo sapiens
aagttctcctagcaacatgcacacccccgctgctggctggtgtaatccaagcaccaaacacgtgcagctggggcagtgcgtgttgctaggagaacaatgactctcttgcttccagagctggt

SEQ ID NO: 140874 - DNA, 122 bp, Homo sapiens
ctcacacaagcaccacaccactgcaggttagctgagccatatgggaggaatgcatgcacacgcactgggacacacgtgacagagagggacacaggacatcgaggtcctgtgtgaggggcagc

SEQ ID NO: 140875 - DNA, 122 bp, Homo sapiens
ctccatttctctaaactttgcttccccgcccagtttgcaaacgagtcagggtttcctcaccggcgcggtaggctcgccgaaagccaagcgggagccccaggctgcgcagggcgggggaataa

SEQ ID NO: 140876 - DNA, 122 bp, Homo sapiens
aaataggttcagagcctagtgagtgaaaacttaaaagtccccgcgaggagctctagttcccgggcggcgcggccccgactttctcgtcggtagcgctctggccttgggcgcccgccgctttg

SEQ ID NO: 140877 - DNA, 122 bp, Homo sapiens
tggcggcggaaatgatgaggcgctggccattttccgagcccgggtttcctgcctgagccccgctcgagcgagccgcgagcgaggagccggcgggcgggagaggacgcgcccagggcgggggc

SEQ ID NO: 140878 - DNA, 122 bp, Homo sapiens
cagagaaatatagagtagagaaatattctttacagttactattttaaactgagaggtcaacgctaattcaggcagtatgcaaatgactcttacactaagtatattctgcgtctgttggttgg

SEQ ID NO: 140879 - DNA, 122 bp, Homo sapiens
tgcacaatgatacacagcaaacgtacacagagttcagtacacacaaagagctcacgcccacgtgcacacacccctcagttgggacagagttgaccaccaccacctttctcccaaacacatgg

SEQ ID NO: 140880 - DNA, 122 bp, Homo sapiens
catgaaaaggctggaaaagttgtgggtaggactctggatgaaagtcagcctaggcgcccccggactcattagggggtggaggcggcggcggaccgtgtggggcggggtgcgcagtgtgagcc

SEQ ID NO: 140881 - DNA, 122 bp, Homo sapiens
atctcctcggaaaggcttgctctggcctgcagctgatactggtgccacggtttgggcagccgagttccactctcacctttcagtccaaatgaggaaaacagaaccatttgaagtgtctatgg

SEQ ID NO: 140882 - DNA, 122 bp, Homo sapiens
cagggaggtgggcacaccagggagcgggaagagagagacactctgttgccgtctagaccccgaccccttacccgtgacacggagcccaccacatgtctgagagcagacctctgcagcgtgcg

SEQ ID NO: 140883 - DNA, 122 bp, Homo sapiens
cagcttcaggagtctcgaatcccacaggtatacggcttcaggagtctcgaatcccacgggcgtacggcttcaggagtctcgaatcccacgggcgtacggcttcaggagtctcgaatcccacg

SEQ ID NO: 140884 - DNA, 122 bp, Homo sapiens
tagtgggaacctattatattccaaaagactaagatgttagtctttttgatactaacaccccgaataagctgagggctctttgggactacgtcttcttcacctcaaactccagcttgaggagg

SEQ ID NO: 140885 - DNA, 122 bp, Homo sapiens
gggggtagagtggggagagaggttgtgggtcttacaaccaaccaaccccaacacgttttacgtgttaggcaggcattgtgctgaacacctcattggcaagccatttaatcccttccttacaa

SEQ ID NO: 140886 - DNA, 122 bp, Homo sapiens
gccaggtgaactgggcccccacgcaggcctggagatcacagaggagtcagaggatgtggacgcgctgctggcagaggctgccgtgggcaggaagcgcaagtggtcctcgccgtcacgcagcc

SEQ ID NO: 140887 - DNA, 122 bp, Homo sapiens
gagacaggcgcgcgctaccctaagacacgtgccgggccgcggaaccgcttcctcgtctcgcgagaacagcgcagcacctccgactcgcgagaagtaaacaccgcgcccgcaggctcggctta

SEQ ID NO: 140888 - DNA, 122 bp, Homo sapiens
gcgctggggctgcgtgggtgtatttaaatgggacatgcttctttgcttgtgcgtggatggcggctgcattggctgttataatgagacacatcaactcctccactcagcagggggagggtggg

SEQ ID NO: 140889 - DNA, 122 bp, Homo sapiens
ctccatctctgctgtcctgtgaaggtggatctttgtgtggttccgttttcatccctttcacggggtcctcagtggctctttctgtctggaaatgcctgagcttcggctccaggaaatgttct

SEQ ID NO: 140890 - DNA, 122 bp, Homo sapiens
ctctcacactcattggttgagaggttgcggcgcaatggaaggtcttaaaccgagagtatccgggattatttttccccgccgtgcggtgcgtgtcccggaagtgacgcatggccaaggccggg

SEQ ID NO: 140891 - DNA, 122 bp, Homo sapiens
cccgccatttccttgggctggaggctcctcctccagaataacagaattttcctgccggcacgttagcgcaaggacgcctgcgcactcttccctcccggttcgcggtcgggaggctcctcccc

SEQ ID NO: 140892 - DNA, 122 bp, Homo sapiens
aattctctgcaggcctttgcccgggcactgattaaggctgcgaagagacgcaccgggctgcgggcttagtagcttcaggcttctgaagtcagagggagggctgagagcttacacttctggag

SEQ ID NO: 140893 - DNA, 122 bp, Homo sapiens
cgtagcctggcagccaggcgcctggagcactgcctgactaaaacccagatgccgagtggccgccggccccttagccctgcccctcgctcctggctaacatggccgaaaggtcgtattctccg

SEQ ID NO: 140894 - DNA, 122 bp, Homo sapiens
tccaggcatattgcaaagattatgtctcatttcaaagagcaacctctgcagcctggaagccggtttagggcaggcagggcagggccaaggctgctagtgtgagtaatcagcccccaggctgg

SEQ ID NO: 140895 - DNA, 122 bp, Homo sapiens
ccgacgcacaggtcaaaacgtggttccagaaccgacgcaccaagtggcggtgaggcgcggcgcgggcgagggcggactggggttcccgagcagggcctggtgagaagcgacgcggcgggcgc

SEQ ID NO: 140896 - DNA, 122 bp, Homo sapiens
tccaggctgcccggagtccggagcccagagaggagagagacagctggggagcctggtcaccgcgggcatctcccctgcgctgcagtcgcccgcctggcctgccttcccgttcctccgcctct

SEQ ID NO: 140897 - DNA, 122 bp, Homo sapiens
gagaggtgtcaaaatgtaggtgtgcgtacaggatcgtgtcaagcccaaaacaccacgttgcgtggtatctccttgtttgagaatctctgccccaggtttcaaatctaagctcctcaggcagc

SEQ ID NO: 140898 - DNA, 122 bp, Homo sapiens
gccccaactctgcagtcattggaggagcttgaagttaaagactcctgctaaaaaccagtacgtttcattttgcagttactgggagggggcttgctgtggccctgtcaggaagagtagagctc

SEQ ID NO: 140899 - DNA, 122 bp, Homo sapiens
aggagacagcgccgcagcactgagggtttgggcttgcaggcgctgcaggagacgcccaggcggagtcttgtctcgcagccagctctgagcgggaggcctgagcgggaagcattggcgtccga

SEQ ID NO: 140900 - DNA, 122 bp, Homo sapiens
tgtacatggcagctttttagggccagggtcaccgggatttgtctttacacctccccagcccgggaaccaccacctctaccagccccgtccacacagttgaatctcatcttaagttctctgga

SEQ ID NO: 140901 - DNA, 122 bp, Homo sapiens
ttttgtacccttagatgaattaaaaagtaattatactgagtgttttatcttgcctgtatacggatgtataagattccaggtttctagttgatgttactgttaaaaacagaagatgttcaaac

SEQ ID NO: 140902 - DNA, 122 bp, Homo sapiens
ccaaggtgggtgctggcagtagggggtctagacagcatggtctgagatgcgagggaggctcgggacctggaatgatttcacagctcccaaggtttcgggtttctccagggtggcctcttcca

SEQ ID NO: 140903 - DNA, 122 bp, Homo sapiens
taattagggcttgctgaatgcagtggcgaaatcagtttaccttctcggtcagagaaacaacgtgtcggggaaggtttggaaacggctgggcatttcagaccctccgcggataacccagggca

SEQ ID NO: 140904 - DNA, 122 bp, Homo sapiens
cagagaagactagaggaaggagtatcctttcagtgctgccttgccacttgtccaggcaaacgaagatggaaacttgatttatgttggtgtctgtagaggcggaggagaagaggtggttttaa

SEQ ID NO: 140905 - DNA, 122 bp, Homo sapiens
tgcccccatgtcacatcacagagccccattcctgataagagtgtcctttgttattcatagcgagcccctgttaaccatacctaagtttgttctaatgtggtaactcactgtaggcacctggg

SEQ ID NO: 140906 - DNA, 122 bp, Homo sapiens
gggctcgggacctgcagcccgccatgcctgagttcccctgcagtgggctcccacgccgcccgaggttccccaacagctgccgccccccgctccacggcacccagtctcatcaacagcccaag

SEQ ID NO: 140907 - DNA, 122 bp, Homo sapiens
caaccagccacgttcccaggcccggccggctaccgccccttccgcatgcgcgtgagaacgcgccccgcccacttccgccatgctgacggcagccgccaggccccaatcccggtcccgccccc

SEQ ID NO: 140908 - DNA, 122 bp, Homo sapiens
ttgttcagcacagacaccacggagtcggcgggatgggacacgacagcgcagaagacgccacgaaggtgatgcccagctgcttggccttggtgcactggctctggggcttgggcacggcatac

SEQ ID NO: 140909 - DNA, 122 bp, Homo sapiens
gcaggaactttggactcgggaggccgcagtgaggcgacagctagctgggcgaggagagtccgctgtgaggcagaggctgggcctgtgcaggccttcgggaggcaggaggctgggactttcgg

SEQ ID NO: 140910 - DNA, 122 bp, Homo sapiens
gcccttcttcactgtgtatttcctggaacatggaatccaagggtccaataacgggcggcacgagccactttgctctctctaaagacctcggaggcgacacagtgaataacaaggttgtctta

SEQ ID NO: 140911 - DNA, 122 bp, Homo sapiens
tccttttgcagctggaggagccgcgcagcggccggttccgcggccacccccaccccccaccgacaaccccagccctcgccccaacccctgggcccttgcgtgtgggggcgctgccctgggcg

SEQ ID NO: 140912 - DNA, 122 bp, Homo sapiens
ctgtgcgcctctagtaccgtaccccgctcccttcagccccctgctccccgcattctcttgcgctccgcgaccccgcgcacacacccatccgccccactggtgcccaagccgtccagccgcgc

SEQ ID NO: 140913 - DNA, 122 bp, Homo sapiens
cttggggcagcctgattttttacttcccttttcccaaacccaagcccgccatggaaaacgcggggaggtcagggaagcctccagagaacagagaagaaaaagcctgagacgttctaagattc

SEQ ID NO: 140914 - DNA, 122 bp, Homo sapiens
gtgtcgggttccaggccacgctcgggcattttaagaggctgaggtgcgccttccgctgcccgcctgcgtcccgccacggagagctcgcctttatctagccctctgggcgagagaagaaggct

SEQ ID NO: 140915 - DNA, 122 bp, Homo sapiens
tcattcattcattcagtcattcattcacccacttactgaaagctgcctaagtgccaggctcggtgctaggagattgaaagcaccattcacaattgccaaggcagtcttttttccttgcattt

SEQ ID NO: 140916 - DNA, 122 bp, Homo sapiens
caagcgtccccagccgaggaagggaaggggcagccgtcttggctcgcgagggaaggagggcggaagcgggcgcccgctcgcaagcttattgcatcctaccgcctgtagagctggcctcctcc

SEQ ID NO: 140917 - DNA, 122 bp, Homo sapiens
gtcccctcccagccccgggaggccgccactggagccctgcctcttcctggcagggagcatcgagtacagctgtccggcctccaacgagtgtgagatcaccaagcggagacgcaaggcctgcc

SEQ ID NO: 140918 - DNA, 122 bp, Homo sapiens
tgatacgtggggttctgtgctcttcccaactagaagcaggctgggacctgggaccctccccgagaaggggggtgactcagcttcagtggcctgaggagacctgggtgactcgttaggactgt

SEQ ID NO: 140919 - DNA, 122 bp, Homo sapiens
acatctgctgcatttctagggcgtggtggccacacacagtggggcacaggcacaggaccgcgtgcactgcaggacgctctgctgacggcgctggcccaggcactgggaggaccctgtgagga

SEQ ID NO: 140920 - DNA, 122 bp, Homo sapiens
gaagtggggtggctgtagcgaggacatcgagtttggtgggatggtgtctcgggagttcgccgacgcccgggagaaccggccagatgcccgctcagccatgaaccgccacaacaacgaggctg

SEQ ID NO: 140921 - DNA, 122 bp, Homo sapiens
aggatgaagaccccagcgcaaggacctaaaaaacactccgcgcagggagcggtgagggggcggggccgggggggtgctgagctctttcctctgttacttctggtttggggtctgaccccttc

SEQ ID NO: 140922 - DNA, 122 bp, Homo sapiens
ctgtcccggcggccccgttcacggagcacccactgcacactgcggcagcccctgtcccggcggcccggttcacggagcactcactgcacactgcggcatcccctgtccccgcggccccgttc

SEQ ID NO: 140923 - DNA, 122 bp, Homo sapiens
ctcccgccccttggttgctgtcctcagctgagaacagagcacgggaacccccagtcacctcggtctgtttattttctatttttcgcagcggctgtgatatgtgtgttgaaggtgagtcctcc

SEQ ID NO: 140924 - DNA, 122 bp, Homo sapiens
gcctcgtgatccgcccgcctcggcctcacaaagtgctgggattacaggcgtgagccaccgcgcccggccccaaatggttatctttgagagctcctgtgagatctcattttcttcatcttgtt

SEQ ID NO: 140925 - DNA, 122 bp, Homo sapiens
ccgagcaaatgtcaaggcgaagtgtatttaacccagaaccagatgcatgggtgataactgcgagtttgtctaagaacacacagatcacccttcagataaataagtaaatgcaacctgcacgg

SEQ ID NO: 140926 - DNA, 122 bp, Homo sapiens
tgacaatcttgccacccttttaaagccttttactttatgggttcctagaaaaccactcatcgtcattattaacattcattagatgtttctcttaaatcctagacggtattcctaaatcagga

SEQ ID NO: 140927 - DNA, 122 bp, Homo sapiens
agcctcgggcgcggcctcgcctcccgggcccggcgcctgcctcagcacagcggacagcgccgcgccccttgcctggacccagccgcccgcccgcccccggcccacctgagcccgggcccgcg

SEQ ID NO: 140928 - DNA, 122 bp, Homo sapiens
tcacttcagaaagtatctacccccgtgtccccagcagcacatttcatccacaccacgaagcgaacagaaagagacctaaagcttggtctatgtgcttctgccactcacgtctgaggtgagta

SEQ ID NO: 140929 - DNA, 122 bp, Homo sapiens
aacagtggtctttggcaaatcacagggacctaaagactgaagtaaatgccaggcacataacggatatgcaaatatctactgaaaaatgacctgcacaatgttccaaaaacagtatcatcacc

SEQ ID NO: 140930 - DNA, 122 bp, Homo sapiens
atgtgccggaactgttctagatgccgagaatactaccatgaatgaaatagacagaaatcccggctgtcattgggctttgtctgagggccattggggaaggcctctcaaaggaagtgatagct

SEQ ID NO: 140931 - DNA, 122 bp, Homo sapiens
agcgattgtgcctgtgtgtgtcccgtgcagtgtgcagcaccccagaggagccgtctctaccgtgccacggctcacgggtccatctgatcccatcttctcagagtcctgggggacaggccatg

SEQ ID NO: 140932 - DNA, 122 bp, Homo sapiens
ggaggaaggaggcggggcggggcggggcgtccaaccgggcctggggctgagggctgggcgcgagtgggactctggcgctccggacggaccctgccgtccccacccctagccgaggcccaggc

SEQ ID NO: 140933 - DNA, 122 bp, Homo sapiens
gtcatttctcacatgaccaaactcccagctccctaatcatcttgttgtcttcatttatttcgcagtggattccatatttttattaatacaacatcagggtgcattagtgtttacgttggcca

SEQ ID NO: 140934 - DNA, 122 bp, Homo sapiens
tgacttagtgaaaggactaagaaagacccgaggcgaggccggaacaggccgatttctagccgccaagtggagaacaggttggagcggtgcgccgggcttagcggcggttgctggaggaacgg

SEQ ID NO: 140935 - DNA, 122 bp, Homo sapiens
acaacccccttctctttccccatttccatttccggactcttctcctgcccgcagggcagacgcacgcgcagagagattgccagccctggctgccagagacccggaagcatcgatcggctctg

SEQ ID NO: 140936 - DNA, 122 bp, Homo sapiens
gaaataatccatggccccgactaagtgtaagcactcaataaactctagctagcttctgtacgtggtgccttccccgctagtattgtgttttcttcttgactgcatagttcgagtacaagaca

SEQ ID NO: 140937 - DNA, 122 bp, Homo sapiens
tggatgtgtaaagaatgatatatatattaaataggtcaatcagactatgacagctatgtacgaccatttgtatgtgtatctatgtcagaaagaatctttattaaaatattttgatcaaacat

SEQ ID NO: 140938 - DNA, 122 bp, Homo sapiens
tcagaatatattggaattcaaagcagtgagactggacaatatcacaaagagtttgtgatgcggagccatgctacttggtactaccacttattagctgagtgattttgggaaagtcacttagc

SEQ ID NO: 140939 - DNA, 122 bp, Homo sapiens
aaaatacaaaaagtagccatgcatgatggcatgcccctgtagtggcagctacacaggaggcggagatgggaggattgactgagctgagttggaggctgcagtgagttatgatccagcctggg

SEQ ID NO: 140940 - DNA, 122 bp, Homo sapiens
acaggactgtatcattgttgaaatgtctgtctcaggtgtgaatccgctagcgataagcctcggggttggaggttcttggggagcccgtgggagataaagcaacttgcaaactctgctgagga

SEQ ID NO: 140941 - DNA, 122 bp, Homo sapiens
caggccatggatgccctcgacctcccgggatgtttccgaacaaggagtcacagctaccttcgagccattcaagccggctactcccaagatgacgaatgtattcccatgatgacaccctctga

SEQ ID NO: 140942 - DNA, 122 bp, Homo sapiens
acacccccggtcgggtggtgccccttttccttctatctctgactctcccctcagacgccacgtggtttccctcaggactcctgccaccacctctctgctgtgttccctaggttatggctgca

SEQ ID NO: 140943 - DNA, 122 bp, Homo sapiens
agccgcatgcgctgttttcctctggcttctcccacccggcacaatggccttgacattcaccgcacttccgcgtccgcagctcactcatccctggtgcggttgagtcatgtctcatggtctga

SEQ ID NO: 140944 - DNA, 122 bp, Homo sapiens
gcaaagtaagggtgtccagttctcctcaggacagtgtgggtctgtgctagcagctgtccacgggcaaagggtgtgctggaccagggagctgaggctcactcagaggacacaggcagtgggga

SEQ ID NO: 140945 - DNA, 122 bp, Homo sapiens
ggttccggattgctgagattttcatgcggtgagactgctctgtgtcccttccctgctcctcgcttctccctgcccgggccctgctggatgcccgacccctggaaagatgttggtgggaggta

SEQ ID NO: 140946 - DNA, 122 bp, Homo sapiens
agatttgcagattgaagacagaacgttggattaggcctttggatgagtagccctggaagacgcacatcagccctgggcacgaggagttcacaaggtgggcctgggagggtagacggggatag

SEQ ID NO: 140947 - DNA, 122 bp, Homo sapiens
aaccaccctggctttctcaaacgctgacagctccaagtccccgcccttcccagtgctttccggcccacagtgggccacctccagcagggtgggcctgacagacacaccctggcaatgacctg

SEQ ID NO: 140948 - DNA, 122 bp, Homo sapiens
atgcaaatcaaaaccacaatgaaatatcacttcacacctgttaaaatgactattatcaaccgggtaagagataacaagtgttggtgaggatgtggagaaaagggaatccttgtgcaccattg

SEQ ID NO: 140949 - DNA, 122 bp, Homo sapiens
ctagccgcgtgacgctatgacccgcttgacgctatgacagcgggaaacggggggcgcgcccgtacatagggaggctttaaaaccttgaggtgattcatcttccaggctctccttccatcaag

SEQ ID NO: 140950 - DNA, 122 bp, Homo sapiens
cggcccaggcgagcagctctgcggcgcggtgcaggaagatcaggagcagggtgtgcacgtcgccctcggctgagtgggctgcgcttggctctgcccggaagtagcggtggaagaggctgccg

SEQ ID NO: 140951 - DNA, 122 bp, Homo sapiens
ttacatggagaagacattcattgatttgtttctccttccaaattttcacatgtcagacctcgatgtatgttatcccttagattatttttgttcagtcatatatctagtacactattatagta

SEQ ID NO: 140952 - DNA, 122 bp, Homo sapiens
agctccaagatttgctctttggtgtggatttctggccttagccactgatgacagagttctcggagccggctcagagcttctcggggaccaggagtctcttggtaacaaaactgcctaaaaag

SEQ ID NO: 140953 - DNA, 122 bp, Homo sapiens
cccagccggcccctcgcgcagcgggcacggccagcgctgccacaggtgacttgatttctgcgacggtagcttagccacccggggccaatctcgaaacattcttattttcaagtcctttggac

SEQ ID NO: 140954 - DNA, 122 bp, Homo sapiens
cgtcactgacgcgctctgtgcatggccttgggcttctccggagctcattcttgcttcgggcgttcaccctctatagagctcagacgtaaagtgaacggggtccgtgcggggtccagtcagag

SEQ ID NO: 140955 - DNA, 122 bp, Homo sapiens
atgcagtggtgacagcagggttctttggcaggaaggcaatggagcttcaacaccccttctcgtgcaaacagctgaggctggcttccctgtgaggcctgagaaccccccaagagggcagaggt

SEQ ID NO: 140956 - DNA, 122 bp, Homo sapiens
gctgcacccctttcactgtctccctagcatacccaacacaacgtaggtgctcaacaaaaacgtgacaaccccagaaagaatgcctgtgacgtgctttgctggccccagcagcacagcggtga

SEQ ID NO: 140957 - DNA, 122 bp, Homo sapiens
gtgacagggtcagtactgtctgctgctattgctacattcccggcaccttctccaaacccgcgtctcccagcactagcccagaaggaacttctgcaggacacgcccccctcccaactcggagc

SEQ ID NO: 140958 - DNA, 122 bp, Homo sapiens
ggaaaacaaaaggtggggtgaagaggggggaagaggaaaggtgtactgctccctgtcaagcgacttaagcccataacaaatacaaaatgtagccctgactaagtgctggtgagaaaaacagc

SEQ ID NO: 140959 - DNA, 122 bp, Homo sapiens
gcactcccatgtatgtacacaagcctgctcacctgatgattcaggtagagaggtacagatcgacctgtcagaactagaaatatgctctccagtctctacctcctctgggtagttgcttaggt

SEQ ID NO: 140960 - DNA, 122 bp, Homo sapiens
ccctggtaagatgccaacgcctgttgaatgaattaagcacgttttagtgggatttaagtccggcctcgcagaagttgattgattgcattattttctaggagctggtcttgtggggcagccct

SEQ ID NO: 140961 - DNA, 122 bp, Homo sapiens
cgatctcctgacctcgtgatctgcccgcctcggcgtcccaaagtgctgggattacaggcacgaaccaccgcaccgagcccctggccacctttctatacaaactgtgccagcctttagggccc

SEQ ID NO: 140962 - DNA, 122 bp, Homo sapiens
ctgtcggccttccgagtctcgatctcctcatccccccgttctttacccccgtggctggcacgagaaacggcttctgattgtgggacacccaggattctgggcgagcgcacctgccttttggc

SEQ ID NO: 140963 - DNA, 122 bp, Homo sapiens
ctggctctgcgtagttccagtggagccaccgaacactgatactactttgttgctcagccccgcaaggaaccggccacttgccaccatggaaacgccggcggagttgctgcgttctagactcg

SEQ ID NO: 140964 - DNA, 122 bp, Homo sapiens
gaagattcgttcacagtcctcactgagggactgctccacctggggagaaactgcaggggtcgggtgagggtgggttggatctgtataatgctgatggattgctgagctggaaacctgagtct

SEQ ID NO: 140965 - DNA, 122 bp, Homo sapiens
tttgtttacactgcagggctcgacactgcacaactggcacaatcttcccaaaagtcaacccgttttctaaaacttccgcagaaccaccctgaccgtaaagacgatttcaacaacgagatagg

SEQ ID NO: 140966 - DNA, 122 bp, Homo sapiens
tacttctggatttagccccactgaagcttcagaatgtctgaactacatgaattcaccttccgggacgcgcacctgggactagcgagaccggcagggctttgcgcggtccttaagacccggaa

SEQ ID NO: 140967 - DNA, 122 bp, Homo sapiens
acggagcccccggagcagagggcacggccatcgccttctcccagcgtgggggctgtgaggcgagttgtgcggttgcagatcaccagaggaggaaaagcgcgcccagaggcgggagccctcca

SEQ ID NO: 140968 - DNA, 122 bp, Homo sapiens
tgcactcaggcggttccacggtgacagccggagcagggagccagaacggcattgtgtccacgggggaggggcatcgagcttctgagtgccagcattgtaatcaggggcttgggacaccgctt

SEQ ID NO: 140969 - DNA, 122 bp, Homo sapiens
gcactgccccgcgccgcagcgcagccgcgccaaccaccacccgcggccaccatggccggacgggctccctaagcccaacttttcaagaatagtcagtacaataagatataaatagaaacaac

SEQ ID NO: 140970 - DNA, 122 bp, Homo sapiens
ggccccaaacccccacggattaggttgaaggtcagacaaaaaatcccggacccatacgtccggttccttaaggccttgcccacacgcagcggctggccccgcggtgggagtggggacggggc

SEQ ID NO: 140971 - DNA, 122 bp, Homo sapiens
gccgccacaccttgggactctacctccctaaataggccacttaaaagccagtagtgcaaccgggatcccgcggcgataaagaatcactgtgcagaaccctggagctgggagtcggcccgccc

SEQ ID NO: 140972 - DNA, 122 bp, Homo sapiens
ccgagcgaaggaagcggacccgtgcgtcttcgcacggggtctgggaattctggcccgggccgccccagtcctactacccggggctgtccgtccccggctctccccggagtttcccagggcct

SEQ ID NO: 140973 - DNA, 122 bp, Homo sapiens
gccggctctgggcctgggttcagttccgccttcttctcttggcgccaggggaaacagagccggggcagcaggaggcccagaactacacaatgttttattgaaaaagtcaggcctcagctcag

SEQ ID NO: 140974 - DNA, 122 bp, Homo sapiens
agtcgtctgccctggagcagagtctgccctggaatggagtcctctgccctggagtggagtcgtctgccctggagtggagtcatctgccctggagcagagtctgccctggagtggagtcatct

SEQ ID NO: 140975 - DNA, 122 bp, Homo sapiens
ttgtgtgtgttccctgaacatttctaaatggggattctgggcttgggggcacttctcagccggtagaccttatcttctccagcgctccggcagtcccctccttaggacccacctccctcaga

SEQ ID NO: 140976 - DNA, 122 bp, Homo sapiens
tggccgctgctggcggctgtttccgggcttagagggctggagtggccgccgagttggaggcggtggtggcagcagtaggagtgtgtagagtgcgggattggggcccaggccctgcggagggc

SEQ ID NO: 140977 - DNA, 122 bp, Homo sapiens
cagggaggcggagggaatccgcttaatacccagggatcaatgccaagcgggggagcgggacgccgatcagacatgtgactcgggaggcatgatgagcacgtgcagacccagaacgtgtgaag

SEQ ID NO: 140978 - DNA, 122 bp, Homo sapiens
atttattgttgttggatgctgcaaagtgttagtaggtatgaggtgtttgctgctctgccacgtagagagccagcaaagggatcatgaccaactcaacattccattggaggctatatgatcaa

SEQ ID NO: 140979 - DNA, 122 bp, Homo sapiens
tcctgggggctgtgcacatttgacaaggtaagttttcacaagttctcatgagtgctggggcgggtagcagaggtggatgaggaatgagtcagtgcccgtcacgggaatgagggaaagacgcc

SEQ ID NO: 140980 - DNA, 122 bp, Homo sapiens
tgtaaggagagggttggggctttgagatgtcagcctgacccgggctaagggagaggggctcgaaatgaagtcccgtgagctgtgatccgatcaaccacgcctacataatgaaacccagtaag

SEQ ID NO: 140981 - DNA, 122 bp, Homo sapiens
tcgacggattgccatggcgccgctgctggagtacgagcgacagctggtgctggaactgctcgacactgacgggctagtagtgtgcgcccgcgggctcggcgcggaccggctcctctaccact

SEQ ID NO: 140982 - DNA, 122 bp, Homo sapiens
gctgggcgacagagtgagaccctgtctcagacaaacaaaaaccaaggggctgccaggtgccgaggcgtgcaggtgctgagccggcggccggggagggctcgcgggactcctcagatttgtcg

SEQ ID NO: 140983 - DNA, 122 bp, Homo sapiens
cacccgggaccatccacgctacctctgcccgcttgggccgaccccacagggcatcctccccggctgcagcctctcctgcctggaaaggcacggctggcctgccccctgcttgccgcccaggc

SEQ ID NO: 140984 - DNA, 122 bp, Homo sapiens
gcctccgggcaaaagagatatgaacatgctgcactgctcctagctacgggacttggggcacgctcttctccaagcctcagctactggatctgtgaaatgaggtgatttccacctccctggat

SEQ ID NO: 140985 - DNA, 122 bp, Homo sapiens
aggcattataccaggtaacaatctcaagactcagcagggaaggatccacttgcaagcccacgtgcttgctggtaggactcagttccttatggcccagtggattgaaggcttcctttcctgcc

SEQ ID NO: 140986 - DNA, 122 bp, Homo sapiens
ttgatgctgacactggcagtacggaagctgcggctggttaccaggcctgagacgccattgcgggcctccacggtgaaggtgtagttcatgtggggctccaggtcgctcactgtcacactggt

SEQ ID NO: 140987 - DNA, 122 bp, Homo sapiens
cgcatcacgtgtctgcactcgctttcctcggattcccggatgtgggtgagttcatttgctcgcgtgcaggggaagtctggagaaggcattgtttcaattattaaaagtgtgggggcagtggg

SEQ ID NO: 140988 - DNA, 122 bp, Homo sapiens
cccggcgcgttggtgccaagtttcctgtaccccgccttcctacccacctctcgggaggcccggatactgagcccctcactgcactggtgaactagaacaggcctctggactcagcatctcta

SEQ ID NO: 140989 - DNA, 122 bp, Homo sapiens
agcaccctagagacaggctggctcagagttgggcagacagccccaaatgacagccttcggcgtcccctcgaggccctctgggaaagccaaacacctgtgcggagtggatacgccacgggtcg

SEQ ID NO: 140990 - DNA, 122 bp, Homo sapiens
acagcatcgccaacaggatcgtattttcccgaaggtggttaaccagccataccggaaccacgaaacacacagggtcctgggcaacacggaggactaacagtaacaccgccacgccggcagca

SEQ ID NO: 140991 - DNA, 122 bp, Homo sapiens
gagctgtatttaatgcaaaagttgctcccccatcctgatttcttagctcactgggccaatcggcggaaggacaggtggggctcaaattaggagaaaaaaaccacacttcccgtcatgcctct

SEQ ID NO: 140992 - DNA, 122 bp, Homo sapiens
aggtgagccaggtaggggtgccggccaggaaggagagaagcgtgaaaggcagagaagcctcgaggcgtccagccggccctcatttccccgcgtagagttgacctgtctctgtgtcccccgac

SEQ ID NO: 140993 - DNA, 122 bp, Homo sapiens
atgttcactcactctgtcctgacttgtgtcctttctctaggttatacttaacactcttctcgccttatatagcaaggtctggtcgttaatgttaacagaaatctaacaacagggaaggctgc

SEQ ID NO: 140994 - DNA, 122 bp, Homo sapiens
tgctgaagagtatctggcccaacggtaatggtcagccgccaagtttctgagaaggctgctcggagtacgttgatatttcattgaagacctgccacaaccttatgacagttgtactatccttt

SEQ ID NO: 140995 - DNA, 122 bp, Homo sapiens
ctgacaagccttgaagtgcctttgagcatccctttggcagcagtaaaaaaaatggattagcgaggggcaagataggagacaagaggacccattagaaagctgttgaagtaattcagccatga

SEQ ID NO: 140996 - DNA, 122 bp, Homo sapiens
cagaagaaatgagggatacacttgacctgaagtaagcaaagcagaacccagtctctgaggcgaggaggcccacctggtagggagctcaaatgcgccattgtcctgcttgtctttataaaggg

SEQ ID NO: 140997 - DNA, 122 bp, Homo sapiens
acatggatgagcagggctgtgaacacacctcccggactgaggacccgtttatccagcccacggacttcggtccctcagagccgccactgagtgtcccgcagcccttcctccctgtcttcacc

SEQ ID NO: 140998 - DNA, 122 bp, Homo sapiens
tcgccttaggtcgagtcctggttccccactaataatcgagacatttcctttgttccgagacgcaagaaatggtgggtagtcgcgcacatctactcctgaataaaggaaagggcagaaagttt

SEQ ID NO: 140999 - DNA, 122 bp, Homo sapiens
ttttttgtatttttttgtagatacagggtttcactatgtagccaaggctagtcttgaattcgtgagctcaagtgaatcaccggccttggcctctcaagtctaggattacaggtgagccacca

SEQ ID NO: 141000 - DNA, 122 bp, Homo sapiens
ttgggtgcactgtctagagaatctctcttggggttatgggtttgtgcttgtggggacagacgaaggctctagatttattttcatgtcggttaagctcttagcattttgcgggaagcactttc

SEQ ID NO: 141001 - DNA, 122 bp, Homo sapiens
cggagctggtttagtctcagagttagggtcagaactagaattattccctttatagcaggccgtcccattgggaattggtccacacctagttacctcttgattgttatctacagggaatctcc

SEQ ID NO: 141002 - DNA, 122 bp, Homo sapiens
ctgggcggagcgggaggcggaggcgccgcgtaggcccgggaggccgggccggccgggctgcgagcgcctgccccatgcgccgccgcctctccgcacgatgttcccctcgcggaggaaagcgg

SEQ ID NO: 141003 - DNA, 122 bp, Homo sapiens
gcggggcgtggggcggagggacgagccgagccgagccaagcggagctgggccactgtgcacgcccggagggtcctggcggcgcccccgctcctgcgcgcactctcggcgccggacacgagca

SEQ ID NO: 141004 - DNA, 122 bp, Homo sapiens
ggtgatgcagatcgtgctggggatcttgagtgcagtcctaggaggatttttctacatccgcgactacaccctcctcgtcacctcgggagctgccatctggacaggggctgtggtgagtagag

SEQ ID NO: 141005 - DNA, 122 bp, Homo sapiens
ggagccctgtccacgggagaagcagcggctggtgcggatgcatgccatctgccccagagacgacagcgactgcagcctcgtcagctccacagaggtacggccgctcctcccgcctccctcac

SEQ ID NO: 141006 - DNA, 122 bp, Homo sapiens
cccgcggcccgcacctgggccccaggcgagaccaccgccggttccccgcctcactctgatcgcccccaggctccatcccacacccggctcgctcgccaccccagagcttcccaggcttaccc

SEQ ID NO: 141007 - DNA, 122 bp, Homo sapiens
caaaagagttagaatagcacacataaaacctatttcttaggaattctcaaaatccctgtgcgagccacaaaaggagtctctgggagatttgggatgatttcttcaacatcattcctatatca

SEQ ID NO: 141008 - DNA, 122 bp, Homo sapiens
gctcatcagaatgaagccaggctctgtgagggcgcacagacagacaggctgaggcctctgcgcctgccttttccacctgggcaaagcgtgatttcttgtccaggacgcgcgtgtttcccatg

SEQ ID NO: 141009 - DNA, 122 bp, Homo sapiens
caggagaaccatgctgtgagtcagcatttgacacattgaaaatctgagccctaagttatacgaaataaacaagcaaaagcgccaataacaacttttatcattttagtaaagaaaaaaaattg

SEQ ID NO: 141010 - DNA, 122 bp, Homo sapiens
tgggctccaggtaattgcaggtatgaacaaattaggcattctcttttacatacagcccggcggccagcatcctggcgttgggcaaatccattcatcatcctgacgttctccagttgatccgt

SEQ ID NO: 141011 - DNA, 122 bp, Homo sapiens
gaacgtccggccaccctgcgcggaagcacgcctggcagagctgctgagccaggctcaggtcgcggagtagcggcgctccggaccggcggaacacggcgtcctcggctcagcttcggaagcgc

SEQ ID NO: 141012 - DNA, 122 bp, Homo sapiens
gcaccactgagtacttctagtgtgagtctaaccaatattcagtcagaaacctgccggtcacgtggagggggagaggtttgtgctccgtccctgtgtgctgtctctccctccatgctcacccg

SEQ ID NO: 141013 - DNA, 122 bp, Homo sapiens
agaggtacagtggcagttgctaagatgtccccggcggaggatgagatgcgtctgtccacccgcggtaggtgtatttatgggtcagtgcagaccaccgctggcgccggcgtttagaccacaca

SEQ ID NO: 141014 - DNA, 122 bp, Homo sapiens
gggattccaagccagtgggttttagcttgtggagttccctgggagcgtggccgcttggatcgctggctcagccccctccccacgagagtagacagatctcctgcctcatgagagttcccaga

SEQ ID NO: 141015 - DNA, 122 bp, Homo sapiens
agctcagcaaataccagctgcagtctatccaagtaagaaggtctcaacttttactaccatcgagagtgactcaaggtactgatgtgccagcacagagggcagcactggaacccagtgttccc

SEQ ID NO: 141016 - DNA, 122 bp, Homo sapiens
ggcctggccccggattcggaaacgctcctgagtgctccctggccttcgttcgggattggccgaggacctcgcgctcgctgtctttcttagcctctcattggctcccgacaagaactttttct

SEQ ID NO: 141017 - DNA, 122 bp, Homo sapiens
caagagctgccaaggccctatggctcaaaaggattctccacctggctgggcacatagaggcgatggtacccagagcaggatctccaagtctgagtctgcattcagaggtttgcctcctcaaa

SEQ ID NO: 141018 - DNA, 122 bp, Homo sapiens
tgccatccattcaggggcaacgccacagtttcgtgtgatagcagcagcgggtatatgatacggggccctgtatgcgggccagacagtgcggtaaagccaagggagattatccagacccccag

SEQ ID NO: 141019 - DNA, 122 bp, Homo sapiens
agctatatgggaaaggcagatgcagaggcagacacttacaaaccagtgttttcagggctacggttcagagtgagtatgaacacagagaaacacgcagctcaagctcatgagattagaaaggt

SEQ ID NO: 141020 - DNA, 122 bp, Homo sapiens
aacactacctttctctcctaagctgtttgcttggccagtaaattaaacatgcccttaaagcgctgattttcctccagcgggtcaggggttttgggaagtagaattcaaacagaaaaaagcca

SEQ ID NO: 141021 - DNA, 122 bp, Homo sapiens
ttttgggttcacgctgctgggggacttcatctactggactgactggcagcgccgcagcatcgagcgggtgcacaaggtcaaggccagccgggacgtcatcattgaccagctgcccgacctga

SEQ ID NO: 141022 - DNA, 122 bp, Homo sapiens
ataaatagcctccctgtttccaagaggaggtaaggaagtgtttatcttctaaaaaccagacgtttcctgatgctctgagcgttactcagtgctacagaggagatgcacacgtccccactatg

SEQ ID NO: 141023 - DNA, 122 bp, Homo sapiens
taaaatattttaaaatgcagttgtactttttctttgctacttccatcttgtacattaatccgtttttggtccttaggactgtgtttctttccttttgtggaaaatggtcattctgaatcttc

SEQ ID NO: 141024 - DNA, 122 bp, Homo sapiens
ggtggaaaccagcagggctctggaggggctcggagaccaggggagctgtcaaggctgcggcggggaccagagaggagcctggcgggggtggctgggtggctgggggaatccccccaacttcc

SEQ ID NO: 141025 - DNA, 122 bp, Homo sapiens
cattccataatcctcacagaaaacatttgcatatttttgcgtgtgggcaccgaggaggctcggtcccagcagtcggcccctgttgggtttggggtaggcgggagtgacaatccccggcttgt

SEQ ID NO: 141026 - DNA, 122 bp, Homo sapiens
gctgttaactgtagctagtaacttctctggtttacactgacagtttcccaggtagccagccgttgtgttctctgtaaacttccattgctgttactgtcatctgtcttaacccttcaggtttt

SEQ ID NO: 141027 - DNA, 122 bp, Homo sapiens
aagcaagcagtcaaagcggccactgccttgcctgctggaaattctcgaaaatttttctcccgcagttgaccagatggagagggagaagtctgttcccgctgactgacagcagatccggccag

SEQ ID NO: 141028 - DNA, 122 bp, Homo sapiens
ttgattttatggaaggggcccggggtgataatgagttgccagagaggatattaatctccccgcgccctgaggcagaggagtggctgcgctcgccccgcggtaatcacccaaatgaaacgcca

SEQ ID NO: 141029 - DNA, 122 bp, Homo sapiens
ggcaagagccaccgcgctcagcctcaggcctttgatttttcatcagaggaagttaaaccacgtgactgtgtacttaggctactttccaactgtggctttctgggactcttgatatttgatgt

SEQ ID NO: 141030 - DNA, 122 bp, Homo sapiens
tcttcccacccctctgtggggacgggctcctggtatgtggctgggaccctaggacagcaacgaggcaagggccagacgcggatcaagccgatggcctctggagaatgttgaagctgcggtgg

SEQ ID NO: 141031 - DNA, 122 bp, Homo sapiens
tggagggtggaattgactggggaaggttttgagactccgtctctaaaaaaaatagaaaaacgggtggagtcaggaccggggcccaggtctctgactacagcatcgtgctactcagagttgtg

SEQ ID NO: 141032 - DNA, 122 bp, Homo sapiens
agttggtgcatgggaaagcctttcttggccttatcagcagctcagcctgggaggttggcccgggggctgaccaagcacaaaatagaaaagccactaataagatccagctggaacaaatagcc

SEQ ID NO: 141033 - DNA, 122 bp, Homo sapiens
gatgggcggccaggcagagacgctcgtcacttcccagatgggatggcggccgggaagaggcgctcctcacttcccaggctgggcggcagggcagaggggctcctcgcatcccagatgatggg

SEQ ID NO: 141034 - DNA, 122 bp, Homo sapiens
ttattgccattcagaagacatgcagcaccaacaagtgtgtgtctagtatagtctatagcacgacactcttttggagttttatgagctatgcaaagaaaaatccattgttcagctgctgtcat

SEQ ID NO: 141035 - DNA, 122 bp, Homo sapiens
cacctctactactgccagctggaggccagtgcctgctacgtcttcaccgagcagctgggccgctttgccctggtgggagaggccctcagcgtggctgccgccaagcgcctcaagctgcttct

SEQ ID NO: 141036 - DNA, 122 bp, Homo sapiens
tgaacccagccacactgagcggcggcattgacgtgctggtggtgaagcaggtggacggctcgttccggtgctcacccttccacgtgcgttttggcaagctgggcgtcctgcggtcgcgggag

SEQ ID NO: 141037 - DNA, 122 bp, Homo sapiens
tcagcgccctgcttcccggcgccgggaatcacgagcccgccagcaccgcgggacttgcagcgccctccgcccttcgcaggcggcccagacagccccgtcccgccctagcgttaggagacgcg

SEQ ID NO: 141038 - DNA, 122 bp, Homo sapiens
gtggcaagagcgagatacagtcctggctccagaaggtcaaatcaaagcatctggtgtctacgtctggtcagcagataggggttggggtcaggaagctgaaaactggatgacatcaggaagtc

SEQ ID NO: 141039 - DNA, 122 bp, Homo sapiens
tgtggcattttgcttcagggagatgtatgaccatgtacaatataattgcctttccagctccgggaagcagtttgttcgctatataaacatgttgataaacgacacgacgtttttgctcgatg

SEQ ID NO: 141040 - DNA, 122 bp, Homo sapiens
gcaggacccagaacgttgggtcgcaagcccacagccaccccatgcaaatgaggctgggagcgcgcacactatgctaggaggcgaggcctgggcggcctcggggcggagcctccccgccggcc

SEQ ID NO: 141041 - DNA, 122 bp, Homo sapiens
gaaaaaagaatgagattgctatttgccaagcctggaaggatggaatttgctatttgtttacggaagtcattggtgctactgccttacctgctacccactgccctacgcaaccactttctcat

SEQ ID NO: 141042 - DNA, 122 bp, Homo sapiens
aggtgggaggatggcttgagccccggaggtggaggctgcagtgagcctgtactcacagcacggtaatccagcctgggcaacagagcaagaccctgtctcaaaaacaaaacacacaaaaatca

SEQ ID NO: 141043 - DNA, 122 bp, Homo sapiens
atccaatgtacactcttttgtcaaagggtaagttttgagttttcatagggccaccacgcccggctaatttttgtatttttagtaaagatgggatttcaccatgttggccaggctggtctcga

SEQ ID NO: 141044 - DNA, 122 bp, Homo sapiens
agtgggtaaagcagcggcctagagggggcatggctgtcccacgccaaacagcgtattagccgcaaaaccaggtactggctgaacctcagtttgcgtcttcgctccgccgccttctggagtcc

SEQ ID NO: 141045 - DNA, 122 bp, Homo sapiens
tttgtgctgtgtctcgttctgcacacctttgctccagggtgtgccccagaagcagaactgcgggttgtaaggtacgcacatcttctcctttacagactgttttccacattggtcacgctgct

SEQ ID NO: 141046 - DNA, 122 bp, Homo sapiens
gcctcctggagaccctgagggagaaattccctttaaggctgaatgcttgggcaagtgacacgtggttttcctactgtcgccccaaccttaaaagaacgaatccaggcggggcattaggtatt

SEQ ID NO: 141047 - DNA, 122 bp, Homo sapiens
ggcagacagggggaaccgagtggggaagcgcgtgttatactccggccgaaagctgtggggcgctcagtcctgcgtccagtggttaaattggtaaatgagttgggaagacgacccatccaaag

SEQ ID NO: 141048 - DNA, 122 bp, Homo sapiens
gtgaccacaactggacggggctgcccagggagtatgtgcccagatgataggcctggcccacgccgccgcccccgctgagtgacgcaatcgcaccacggggctgcgctccccactctgatgct

SEQ ID NO: 141049 - DNA, 122 bp, Homo sapiens
atgggcctcactctcctggcctccactgggtccaggagtggcgatctgtgagccaatggccgtggctgggggcagcctggggtgttgagaggccctgggcagccaccttgcctctctgagtt

SEQ ID NO: 141050 - DNA, 122 bp, Homo sapiens
accagtttcgccttcagcgctccacttggcttcagctgacttgggcgtggacacagaggtcggggtccccgcgcgggccgcgcctgtgcgctcgcaagagtggaagagaaagtgcggaggga

SEQ ID NO: 141051 - DNA, 122 bp, Homo sapiens
ggtgaaagtgggcgctggggaagggctgttattcacataggctgtgggggcatcgggccacggagaacactaaggacagaaacagaaataaattagtgatatgcttttaaaatatgtggaag

SEQ ID NO: 141052 - DNA, 122 bp, Homo sapiens
tgtatgagggccggagtgcaaaggggcttgagcagctccagtgatcagaggaacacagaacgtgtagctgacaaattgaggtcagcttctaaagagatagtagctagcagagtaaatgtgga

SEQ ID NO: 141053 - DNA, 122 bp, Homo sapiens
tggaggcagcccacaccctgggccttggctgggggaaaggttccagaaacgtcatcacaacgatgcatttcatcagaactgagcacatgaatggggaggggcaggacttcctgaatgtccca

SEQ ID NO: 141054 - DNA, 122 bp, Homo sapiens
ccgtgcgtacgactcgctgacacctcccatttcaccttcctggcatggaaattgcgagagcgagagattcttgctcccggtgtcgctttttatcagacctcttgatggtttctctgatgtac

SEQ ID NO: 141055 - DNA, 122 bp, Homo sapiens
gtctgttagaagccgttcctctgtagcctctgttttctaaactacttgcaagccctcaggcgatcacttgaggcacaagctcgacgaattgcgtaggggtctgtaattattcacaaacgaca

SEQ ID NO: 141056 - DNA, 122 bp, Homo sapiens
ttcccaaaggggttgctgggggaaccgcgtgttccgccccggtcaaggccacaaagctggcgtcagcggggctcacaaaacacctggcagcgccactcccctcaggctgcccgtaacctaga

SEQ ID NO: 141057 - DNA, 122 bp, Homo sapiens
gtgcagatagctgcattttagccgctggtgctgtctcgcttggaggaatgctgtctgccacgcgaccaccaggtggcgcacaacacctcgcggcgactggaccgggcacggctgcctcttat

SEQ ID NO: 141058 - DNA, 122 bp, Homo sapiens
ttaccccggacccaaacgcgcaatactaaccgggagtgtaaggaggccacgccctcctcgcgtatttgtgcccaaatgagctgcctccccagcgtgcaccaaattcctgagccacctgctcc

SEQ ID NO: 141059 - DNA, 122 bp, Homo sapiens
ccatgggcttcagcttcatgcagctgattcccctttgcagggattttgtgcaaaagcacccgagaaattccaggtttgaccccaccctctgcccagaggccggccagatgcttcccggggcg

SEQ ID NO: 141060 - DNA, 122 bp, Homo sapiens
ctgccagatatggaagcaagcgccattgctagaacagacaagacacctgcgtgaacacatcgtggttcccatgaagggcagcccatcccagggaccatgaaagccagtgcagggagaggccg

SEQ ID NO: 141061 - DNA, 122 bp, Homo sapiens
ccacgaaagacctggagtccgcctccccatttctccggtcggtgagtggcaggaggaaatcgccaaacatgttttcccgctttgcctccccaactcggaaacttgcaacttgccgtgtcctg

SEQ ID NO: 141062 - DNA, 122 bp, Homo sapiens
ctgctaacgttcagccctgacgccatgtccaataggaacggcccttcactctcagaaacgcgggccggagaaaccgtggaggtcttttgcaccttgccgtttgcctcccaggttcaacatga

SEQ ID NO: 141063 - DNA, 122 bp, Homo sapiens
aagtggcgaatctgacaactgaaaatgcgagtcgggcctcgatgagtcgtcccggtcgaacgctggcgcaggctgcggcgttgcagaggacgcgtgtcccggagcgccctgcggggccagcc

SEQ ID NO: 141064 - DNA, 122 bp, Homo sapiens
gtttagaaggcgcgggtgaaggcgggcaacaagggcagagcccttctcccgagccttgggcgaaggtacctcctgcaaaagatacactctgcttcccacgcattccaaaaacatcccggtcc

SEQ ID NO: 141065 - DNA, 122 bp, Homo sapiens
attggaaccatctggatatccaaagtagagaaaagtttttactaatggttgtcatgtacacgttacaaaaataacattatacagctttctaactggacaggaaaaggcagaactatcaaaaa

SEQ ID NO: 141066 - DNA, 122 bp, Homo sapiens
tcccctccccctcccgttaattaaataaacgctggaagcgtgtgtttaccgcacacgactcggccctcggggaactctttttctacgtctctcctactcttaaactcctcaactcacagagg

SEQ ID NO: 141067 - DNA, 122 bp, Homo sapiens
gctttcctccccactcctctcaagctctttttgtttcccaagtccatgtaacagtagatacggttacggacaccttcctagattttcatattacagattcaaccactgaagagagacactaa

SEQ ID NO: 141068 - DNA, 122 bp, Homo sapiens
tcagcacagtgactgcccagggctctgacccagatgccaacagcctgggcagtggcacctcggccaagaaaggaggaaccagtgctgcaggggccaggtggcggctgtggcaggcatgtctg

SEQ ID NO: 141069 - DNA, 122 bp, Homo sapiens
taggtaagggtgtctttcaaaacaggttagtacagctaagtctagcttagccaatggaatcgggcagggcttttgcctgaatgcaacttctagatcacgtgtttactttgtgcaaatttgtt

SEQ ID NO: 141070 - DNA, 122 bp, Homo sapiens
tcccattcacagacaaactgctaaaagcaaaaccaaaactttccaaataagccaggctttcgtcagttcctcagaactagttctggtttgactcactctcatgttacggcaaaccttaagct

SEQ ID NO: 141071 - DNA, 122 bp, Homo sapiens
cttcatcccggaccaggacatcggctacttcgagggcttcctggagggcgtgggcatccgcgagggcggcatcctcactgacagcttcggccgcatcaagcgcagcatgagctccacgtcgg

SEQ ID NO: 141072 - DNA, 122 bp, Homo sapiens
ggtttggacaggtggaggccatatcggtataacgctctcacaagccctcagctttccatacggaaaagtggtggcggaattccgcgagtatctcagctcccaatgcaggtgcttccaatcga

SEQ ID NO: 141073 - DNA, 122 bp, Homo sapiens
tctttctcccctacgtttggtgaatgagattgtaaaactgccccactctgcctaaggaaacgtagaaactttcccgattcggatggggaggggtagggcggagagtcccagagaccagctct

SEQ ID NO: 141074 - DNA, 122 bp, Homo sapiens
tttttttgcatactgtgaggcaacaaatggaaagaataggcctatggcggagggatcactcgcttattctctgtgtactttaacctaatgggggtcgcccgggagtcggaagggggagggga

SEQ ID NO: 141075 - DNA, 122 bp, Homo sapiens
atactttctcatttgaatctagtgaaatactccaggtaacatccatccatccccttctgccgaccctctctacccgccatgtcccctgctgtaactgcccattaatcagccctgagcttgcc

SEQ ID NO: 141076 - DNA, 122 bp, Homo sapiens
cccaagcactccttcgtgaaccactacatgagcgaccccacctactacaactcatggaagcgcagggcccagggccgcgcacctgcgccgcacaggtacgaggcggtggcgggctccgaggc

SEQ ID NO: 141077 - DNA, 122 bp, Homo sapiens
aaatcccgctcctccagcatcttcccctccctaccaaaagaaggctgctttaaatattcccggcctggagcagcagcagctaaggacctggaaagaggcccgaaaaggccagggcagggcga

SEQ ID NO: 141078 - DNA, 122 bp, Homo sapiens
tttctgaatctcagtgacttcctctataaaataaaatgcaaaacaatgatatctcacctgcgtcagaaagttggtcacatggtctcatgaagtctctttcaaggctaagatctctatgattt

SEQ ID NO: 141079 - DNA, 122 bp, Homo sapiens
gcaagccgggacccggtcccactgctgattggcccccagatcccgtgggatctcacctctcgcagaggcttaaagccttgtacttgctgtgcagtgcttggctctgcgtgcccgctgtccag

SEQ ID NO: 141080 - DNA, 122 bp, Homo sapiens
gtcacctgttagtgaaggctgccaggttcttgatggcccattctgcaaggtagcgggcagcgtcccatgtgaccaggcctgtggtaccgtgggagatgatggctgtgctcggagagtgtgac

SEQ ID NO: 141081 - DNA, 122 bp, Homo sapiens
tgtccaatgggagaaagtacggatgtgtttcagacacggaacagttcccgaccccaagaacgcagatcacctgggaccagaggaaagaaactaaggtgctaaaaggttaaataatttacaag

SEQ ID NO: 141082 - DNA, 122 bp, Homo sapiens
gcccgtagctgttcgccatagaggagcaggccgcggcttctaagatggcgtctttttcctcgtttcagattcttcgctgctgctgccttaccgccgagaaccaccacccgccaggcgtcttg

SEQ ID NO: 141083 - DNA, 122 bp, Homo sapiens
gagaagccactaaaacattttaggcaggggagtgacaggatcaggtgtgtattttcctatcgtgttttaaaagtttacttctggctgcgacatgaagaagagggtgttacaagaagcaagat

SEQ ID NO: 141084 - DNA, 122 bp, Homo sapiens
acctcaggtgagctgcctgcctcggcctcccaaagtgctgcgattacaggtgtgagccaccgcgcctggctggctattcttatacttgagagttggccgactaattagtacctgagtcctaa

SEQ ID NO: 141085 - DNA, 122 bp, Homo sapiens
cgggtggccacctggttcccgcttgcccgctcgccggaagtcggcccaccgggaccggcgcgggaccagcgcggcaccgcccctcactgccccgccctacgacggcttccctgccccattgg

SEQ ID NO: 141086 - DNA, 122 bp, Homo sapiens
tacttagccaagactagaatcgttagggaccacctgaaatgttccccaatcctctcatttcgtattgttcccagagagtgatggggggggtcttaatttatttgggctcacacacttctgag

SEQ ID NO: 141087 - DNA, 122 bp, Homo sapiens
gattgcgatgcaagctcaagtttgggaagtataaactaaagggaaggaattccacctgaacgcagaacaatgggattcaagtcactggaacatcaattgacagagaattattctgagataag

SEQ ID NO: 141088 - DNA, 122 bp, Homo sapiens
gggttggagggtgggaggccaggggcgttctcacagctgtgtgtcctctttcccatcctgcgcagaatgaccatgtgtagcggagcgaggctggccctgctggtctatgggataatcatgca

SEQ ID NO: 141089 - DNA, 122 bp, Homo sapiens
ttggtcctggtagggggtcccgcccccggccctgtcctcctccccaggccgggacctccgcgcctcccacacacagtacaactctaacacgaaactgggccaggactgcaggtaggtcccgt

SEQ ID NO: 141090 - DNA, 122 bp, Homo sapiens
gaagcgcgggacgctacgggaatcgagggaacggagcgcaccggggaccccgcggcgggccgaagacggcagtacccctaggctgcagcctgacgctcaggccccaaggcccccagcgccct

SEQ ID NO: 141091 - DNA, 122 bp, Homo sapiens
agaatgttccagaacgtgacagaggtggtgcctacacaactttctggatgtactaaatgccgctgattgttcactttcaagtgattgatttttaggttatttgaatttcatctcaattaaaa

SEQ ID NO: 141092 - DNA, 122 bp, Homo sapiens
tatagattatctgctccacgttttgtacttagctgcctgtaatcttcttttgagtttgcccgagccccttgctggaaaactcaggagggagagatttgtcctttgacgctgtacacgctagt

SEQ ID NO: 141093 - DNA, 122 bp, Homo sapiens
gtgcttccggcgcggagatgaacttccacatgccccggcgcttgttgatgacgtaacttccggttgctgtgctgagtcggaagtgggaacccttcggccgctgagattctgtcgtgtcgtcg

SEQ ID NO: 141094 - DNA, 122 bp, Homo sapiens
ccggggcctgggacgtgggtggagccggggcgggggcggggcccttcgcggtgccgtgaacgctgaggccacctcgctgcgcaggcgcggtcgtgagctcctcagacggggcggggcgatcc

SEQ ID NO: 141095 - DNA, 122 bp, Homo sapiens
tattgggccacgagaaatagagtgatcctcactttggtccgagaacagtatgacatattacgtcacattatgacatccgggactatgtcataatttctttcttagcaagtgttttctgaaaa

SEQ ID NO: 141096 - DNA, 122 bp, Homo sapiens
gcctccaaaaatgacttccatcattgaatctgacttctgtctgtcatggtgttcctcaatcggctctgcaagtatggcacacctgaatagcagcctgtgaactctctttttttttttttttt

SEQ ID NO: 141097 - DNA, 122 bp, Homo sapiens
ttccgaggagactttcctgggcctgactcccggtcctgtccccagcgccccgcggcctctcgagccccttcagtgaccaagatgcagagatcaggatgcctttgcaccaccccaggtgccca

SEQ ID NO: 141098 - DNA, 122 bp, Homo sapiens
atagtcctgtctgtctcatgcctgtaaaacagctagctgacctagatccgggtccacggccgggctagcgctcacaggaatgctccaaaatcattcaggtttatttggcaactgagcaacga

SEQ ID NO: 141099 - DNA, 122 bp, Homo sapiens
tggtgtgacatcagtgggtcctttgtttcagaacaagcgcgttctccttactctctggcacggcctcggtgtttaggggtttcctctctctgggaagctgttccttctcgagaacacagtgt

SEQ ID NO: 141100 - DNA, 122 bp, Homo sapiens
aaataagaatggtaggttattttagttacaatctcacaaaaatgatgttgtagtatgtgacgtgaaatatagtaggttttgagagttttgactatgtacatgacgttgaatgtagtcaaaag

SEQ ID NO: 141101 - DNA, 122 bp, Homo sapiens
tggtggtgcacacctgtagtcccagctacccaggaggctgaggcaggagaatcacttgaacgcgagagacagaggctgcagtgagctcagatgtcatcactgcactccagcctgggtggcag

SEQ ID NO: 141102 - DNA, 122 bp, Homo sapiens
cagaaaataagcagagaatgaactggaaaatgagggggattaaaagtgaaggcctccagtcgccacggcgacagcaaaaggctttgtgcccagctggaaaagacaggtgcaaaggccccgga

SEQ ID NO: 141103 - DNA, 122 bp, Homo sapiens
gccttgtgaaggcaggctgctggactcactggtatttccccaggctggaagtgcgtcttccgtttacagggcagccacagctgtgctgggtacagagtgttctagaaatgggtttggagttg

SEQ ID NO: 141104 - DNA, 122 bp, Homo sapiens
gccagtttaagaccaatgtaatgcagcattttcccttcacacatgaaacagtgagttactcgagcacaaagcatcaaatgcttattccccccacaaggccattcttatctttcaccaagtgt

SEQ ID NO: 141105 - DNA, 122 bp, Homo sapiens
gagacaggcgaggctgtgaggccgggtgggaggcagcgcttcccgagcaggtgcggggtgcgtcttcactctgcccctcccgacacttggttttggaggggtctgacccagtggccgggctc

SEQ ID NO: 141106 - DNA, 122 bp, Homo sapiens
acggagccctcatgtcatcagcctcctatctggcggcgtcctcggcagaggcggtgaaggcgcggttccccctggcggctcccaggagccacaagtgggcgcagcgggcgcggtcccaagcc

SEQ ID NO: 141107 - DNA, 122 bp, Homo sapiens
ctgcccaccacacacacctagtgcagatgctggcacacccccagaaggaggctcacagctcgcaggggagacctgggctggacaaaacccaggggaggggagggtgtgtggggaccaggccc

SEQ ID NO: 141108 - DNA, 122 bp, Homo sapiens
gccctcctgttgtccttttgcctctcagccgggggccctgaccctgcacaacctgagtcacgagtgggctccctgctgcagtgctgtcattgttcacagacagtccctctgccagtgtgggg

SEQ ID NO: 141109 - DNA, 122 bp, Homo sapiens
ttttctggtcccttgaataagcaacatggcttgtttgctcttaagctgtgcgtgcgtgcacgtgtccacaagcatgagtatgtaagtgcacacacagaccatactgggaatagaagtaattt

SEQ ID NO: 141110 - DNA, 122 bp, Homo sapiens
ttggtatctcgcgcccgacgaagctagcagattccgcaatggagagcactgggcagggtgcgtccccactccccgcacccccggagccccgagcatactgtgcgtgcttagtcctctcttcg

SEQ ID NO: 141111 - DNA, 122 bp, Homo sapiens
cctgccagtcgggactcagcgccgagcttaagcagggccctgggggtaccgggagggacacgtcgtcgccttagggcctctcggcggggctgcgaggtacagcaggaggtcggcggcacccg

SEQ ID NO: 141112 - DNA, 122 bp, Homo sapiens
gctttgcggggactcaatgagataaccaacgtaaatatgtcgactgacactcagaaaccccgcaaggcatgatcaagcaatactactgtcaacacagggtctaccaactatgagcaggcagg

SEQ ID NO: 141113 - DNA, 122 bp, Homo sapiens
ccgccgcctcggcggctcggggcacttacagcccggagggacgccaagcccaccagtcgccgcggaagcgccttcctcattgctgccatcttggcccagaatcccccgcggcagtccagctg

SEQ ID NO: 141114 - DNA, 122 bp, Homo sapiens
ggggtgcagtagggcagctcctcacatacgtgcgcggtgggaggcgctcccttgggcccccggggaggaggtgccacagcaactctggactcctgtgtgcagaactggccgcggagaggtgc

SEQ ID NO: 141115 - DNA, 122 bp, Homo sapiens
gctcacaccctttctgccgcccgtggctacgtggacatgctgggcgtgagggtccggggccgtttgagctgcctcgcctctgcttctgcgggttctcacctgggcctggagagggtcagggc

SEQ ID NO: 141116 - DNA, 122 bp, Homo sapiens
gccgggagacagctgctcggcggcagcggtggcggcgggcccaggagggccggggttgagcgtttgcagcagcccagaagcgcaggaaggcgcggcggccgggtggtgcgggtggtgatgcg

SEQ ID NO: 141117 - DNA, 122 bp, Homo sapiens
ccagccctctgcgcccttcacttcctttactgagcaggtggtgagggggttggacggcaacgggaattgcacctggccagcggtcagtgtttgcaaatggccttgcgaggagtcccgcttgc

SEQ ID NO: 141118 - DNA, 122 bp, Homo sapiens
gaatgctgcgcagcgtgcgccggtcccagtcatcggtcactctgcctccgtaattgcattcgccagtcatgtaccgcagagcctcatacggcagttcctaaaatagtgcgtgtcagtcaacc

SEQ ID NO: 141119 - DNA, 122 bp, Homo sapiens
aaagttttctacattaccaaaatagtacctaataatcacgttagttttacaatcagaaaacggtggcagcaagcaatgacattaaactgaacatttttattccaattattcaagtttttgct

SEQ ID NO: 141120 - DNA, 122 bp, Homo sapiens
tatgcaggcatctccgaaggggtggcgagttcttatttccgtgcccctcgacatggtggacgtttgcagctcctagcccagctgggaagtacaacactccctcagcgttccacatacttaaa

SEQ ID NO: 141121 - DNA, 122 bp, Homo sapiens
acgagctgtagacacagctgtccagggctgggcagagtggggcagtggctggggatatgccggccctgcccaggccgccccacgggggtgtcgttccaccttcctgtagtctccttggcgcg

SEQ ID NO: 141122 - DNA, 122 bp, Homo sapiens
taaatccacatattaacaagcaaacacacccatttctctatcctgcagggaaaacacaggcggccgggaggtgaggtcgcacaccaggggcccccttatctcgagggtagtggtgggggggt

SEQ ID NO: 141123 - DNA, 122 bp, Homo sapiens
ttgcagtcctgatgatcctaacctgcagcacggtggttttacaatgttccagagcaggaacgccaggttgacaagctatggtaggattaggaaagtttgctgaagaggatctttgacgccac

SEQ ID NO: 141124 - DNA, 122 bp, Homo sapiens
ctggcctctctggctgggtgcagtgaatggccagcgggtttcttttctgctgggccaaggcgctttgggggtggagggggtggtgctggtgctgcactgggctgactgcggcgctgacgcag

SEQ ID NO: 141125 - DNA, 122 bp, Homo sapiens
taagatgtggtaaacatcagctcaaagcttactggagagagatccacatgtgttgatatacgtgttgaaacagtctgaaaggaatgtgttttaagaaagacttccaaaaacacctaagcctg

SEQ ID NO: 141126 - DNA, 122 bp, Homo sapiens
acaacgtttgcttatccacttccttgttggccgaccctgggctgtgtgccgtgtttggctcgggtacattcctgagtcccgcattctcttgggtaaatattggggtacagagttgccgtgtc

SEQ ID NO: 141127 - DNA, 122 bp, Homo sapiens
tcacaatgatgggtatggtgttagctcgggagaggatctgtttgaccagccggtacctgtcgtatagtggcttcatcacctgccgttcgttctttgttacctgaaaagcaagaatgagagct

SEQ ID NO: 141128 - DNA, 122 bp, Homo sapiens
ccgggaacccaggctgctgggaggagaagtgaaaccaccccggccgagcctgggcgccagcgaggcagcagcatgcatcaggtttccagcgcgcctctagctgcttcacacgctgcactctg

SEQ ID NO: 141129 - DNA, 122 bp, Homo sapiens
agggctttggagctctggctgtggacatttttgtctgctgtggacattgagaaagttggccgtgaggcctgccgggcgggggattgaaacagtaaccaagctccctggcgagagccccgacg

SEQ ID NO: 141130 - DNA, 122 bp, Homo sapiens
ttggccgagatgaaggaaatgaaggaatctggcatggcctggaagtggtgcaggttttggcggaagataaattcagctatgtacatatcaagtgtgaggcgttagagtgcaatatgagtgga

SEQ ID NO: 141131 - DNA, 122 bp, Homo sapiens
tacgtgaatggccttttattttctctctctttcctgggttttatgtaaggtgaaatgccacgaggtaaaggtctttgggaagtcactgaattggtgaggtgatggagagactgagaaagaag

SEQ ID NO: 141132 - DNA, 122 bp, Homo sapiens
agcacaggcagcctttggtgggccagtgccgcctggggaagccgaggaccctggccaggacgccagcccagtcgagggcctcccttgctccttttctccccgccctcagtgaacagcatcca

SEQ ID NO: 141133 - DNA, 122 bp, Homo sapiens
gaggcatagggaacttaagtatcttgcttatttaaatgcagatagcctggctccagagtccgtactcttaactcctgtctgtatgactctttagtgacagatgagttccctgccttcaggca

SEQ ID NO: 141134 - DNA, 122 bp, Homo sapiens
gagccccggaaccaggataagttggatggctgccgcggcgaagcggggggcggggtggaccgtgcccggtattttctatacgggttccggggcccggtagaggcgcgccaagaggaaaggaa

SEQ ID NO: 141135 - DNA, 122 bp, Homo sapiens
ctaggactctaggacttttcagagcatttctgaaaagccactggactggtcttcaaagttcgtctcgttaagattctgtgagactgaagggctgccccacactcagagtttgtgtctgctcc

SEQ ID NO: 141136 - DNA, 122 bp, Homo sapiens
agacaatgactcaggcatctctttgttgcctgctctctaattagcaagttctaaagacatcgcactcagaaaagaggaaaagtagccttgattttgttcaaaacttcactcatatcgtcccc

SEQ ID NO: 141137 - DNA, 122 bp, Homo sapiens
agagcccaattaagaacttccagagtttagaaatgacttgggttgattatgtgtgcatgacgtgacctcactagacccagcacgaaagggaagcaggcctgggagccctcccccttgccctc

SEQ ID NO: 141138 - DNA, 122 bp, Homo sapiens
acctttggcagccaccagttcctggagattccgacaccaagtgcagccactgtgcggggccgggtgtggagtggccccacaccgaccagctcacgccagctggcagagccactgggccccct

SEQ ID NO: 141139 - DNA, 122 bp, Homo sapiens
cttccaggtcataggtagataagacacaaatggttgcattgagttgctgattagcctctccggaaggaggcaatcagatatgcatttatctcagtgagcagagaggtgactttgaatagaag

SEQ ID NO: 141140 - DNA, 122 bp, Homo sapiens
ccctatcactgttctccacgtcactcaatcccctcctcaggccctccacttgtctccatccgtcactgatcacatagacccgcagcactcagccaggcccctcaccccggctctgctctcaa

SEQ ID NO: 141141 - DNA, 122 bp, Homo sapiens
ttcccgaaggatgcggcgcgtggaaggagatgcgctgacttgttccaacccataacctttcgctcgggtccccatgtgcgggcagaagaagtcagagcggaacagcctagtgcactggcagg

SEQ ID NO: 141142 - DNA, 122 bp, Homo sapiens
aggaaatctctcaaaggagcttcatgctctctgtgactcagggtagcagtatatggccttcggcacccactgtgggctgggctatggcagactttgcttgccctcattgctctctttgcttt

SEQ ID NO: 141143 - DNA, 122 bp, Homo sapiens
ctggtgctgagcacattgccgagaaggagcaggtgctccgtgccctggtgctgagctcatcgccgagaaggagcaggtgctccgtgccctggtgctgagcgcatcgccgagaaggagcgggt

SEQ ID NO: 141144 - DNA, 122 bp, Homo sapiens
ggcgacgcccaaagtggtggacaagattgctgaatacaaacgacagaacccgactatgttcgcctgggagattcgagaccggctcctggccgagggcatctgtgacaatgacacagtgccca

SEQ ID NO: 141145 - DNA, 122 bp, Homo sapiens
ggactggcccgcacctctggccgccgcctcccgccgagaaccgagttctagttggggaaacgtctgacatctggacatcaaggtaagaccctgatggagatattttagtcggagcagttttc

SEQ ID NO: 141146 - DNA, 122 bp, Homo sapiens
gtgccccttcatgcagcagaaatggattcctcttccacagtttcagcagctgtatccttccgtggaaaaggattagcagccataagcccgggggagggcagctaaacaccagagggcaggag

SEQ ID NO: 141147 - DNA, 122 bp, Homo sapiens
tgagggccagcccctagccggttcctctcctaaggcccctgggcacatcactccagggaccgtctttcttgatgccctcagagtggtacactgatgtgctctgcctcttgcctctggtcccc

SEQ ID NO: 141148 - DNA, 122 bp, Homo sapiens
atctgcctgcctcagcctcccaaaatgctgggattacaggcgtgagccaccacgcctggccggccatccagttttataagtgagcaacctacagctctgggaggttaactctgagtcacaca

SEQ ID NO: 141149 - DNA, 122 bp, Homo sapiens
gctttaccctaatagcacagagatgcagtgctgttgaagggttttaagtgggagtgcaggcgagtaaggagtacagaagcaagatgttatcacactcctgtgttcaaaagccccctttggcc

SEQ ID NO: 141150 - DNA, 122 bp, Homo sapiens
tccaaatgttaactgctaaataaatacttcatgatgacttaaattgtcttcttcaattgacgtttgtcttaagtattaatatacacagcagcgatgttagcaggaagatctgaagttggctc

SEQ ID NO: 141151 - DNA, 122 bp, Homo sapiens
atgctgaagcctgttctggaggctgagatatcggtgcagaacacgactgttcatgggtctcggagtctagtggggacacaggtgagtggaagagtgggggtgaagcgtgcatggtggggaaa

SEQ ID NO: 141152 - DNA, 122 bp, Homo sapiens
taaaaggggaaaaactcattaaatgttgaacactgccactttaagtaccatttttgtcttcgggtgaatgtacataagactaaatcatgatccaacaatagttttctatttggtttcactag

SEQ ID NO: 141153 - DNA, 122 bp, Homo sapiens
gttcccatgatcctggagggaagaggatgatattactttcaatatcacagaaggtggacacgcccccactgatactgtttctaattgcagcatgggagaggaggatatgacacgcgatatcc

SEQ ID NO: 141154 - DNA, 122 bp, Homo sapiens
ctcgtgctcttttcgatctctcccccgacccccagtgacatttagcaggcattttcctttcgtggccttctccactaagacccttggaagtcctatgtcagcgaagtgagcgttgggagggg

SEQ ID NO: 141155 - DNA, 122 bp, Homo sapiens
ccgcctcagcaccatcctgctacacgcatgctctccccacctcggcaccatcctgctacacgcgtgctctccccgcctcggcaccatcctgctacacgcgtgctccgttttccgtgcctcag

SEQ ID NO: 141156 - DNA, 122 bp, Homo sapiens
ctaggaaagtctccttcaggaccggtggtcggggcacagtgctggcacgtttgtcactaacgcacgttttactgcctcatgtgcctctgtgtgtctgtcgacgtctcagcattcttgtgcac

SEQ ID NO: 141157 - DNA, 122 bp, Homo sapiens
cgcagggaggagagtgcagcggtgggtggccgcgcgtcgggaacaggaacgtgctgtccacgggtgagcgtgccgttgggagaggaataagttccgggacctgatgcacagtttggtggccc

SEQ ID NO: 141158 - DNA, 122 bp, Homo sapiens
gggggacctacattaatgaggcttccaagaagcggggtctggggaagcctcattcctctccgtgtccctaggactctcttgcctcctgcccggcctcccctctccaccacctaccctatctg

SEQ ID NO: 141159 - DNA, 122 bp, Homo sapiens
ggaaggcagtccatctttctagacagtgagtatctaatacaagtcaagacacagtaattacgctacagacaaagggagggaggataaaaaggaaggtcactctgattgaagaggagatggtt

SEQ ID NO: 141160 - DNA, 122 bp, Homo sapiens
cagctcccggcgccgccggctgccccccaggaaggaccccaggaagaggaaggctcggggcggcgcctggggcaaggagctcattctgaagatcgtgcagcagaagaacaggcgccaccggc

SEQ ID NO: 141161 - DNA, 122 bp, Homo sapiens
cggcctgtgtcagggtggatgactacgatggagcgccgcaggtggttctcccgctgctcccgcttgacggccacggagcccaggcgcttctgcagctcgtcgatctcgaggtctttgtcctt

SEQ ID NO: 141162 - DNA, 122 bp, Homo sapiens
gctgggtgatccaggccggaggggagacagtgaggctagggaggtagatggggcggcatccgaagacatgccagccatctcatagcagggatggccatgccaaaaatggctgtggggaaatt

SEQ ID NO: 141163 - DNA, 122 bp, Homo sapiens
ctgggctgtccctcggctcctgggcggggccttctgccgcgccactcccccgggaaccctcgcctgttcgcgggtcaagccggccctattgggcagtctcttcttgattcctcccccggaga

SEQ ID NO: 141164 - DNA, 122 bp, Homo sapiens
atctgtcctatggcgtgttattagccgcaaggctgcctgcatgggagtggcctggaccatcgccccagggcccagtgctccaacaggaccctcggtttattgctgtgctatcaccacgatga

SEQ ID NO: 141165 - DNA, 122 bp, Homo sapiens
aggtacgtgcagttgacgctgactcaggctacaacgcgtggctttcgtatgagttgcaaccggtggcggccggtgcgagcatcccgttccgcgtggggctgtacactggtgagatcagcacg

SEQ ID NO: 141166 - DNA, 122 bp, Homo sapiens
catctctgagtctgagaccagcaaggaaagccatgttctccattcagggcctggggcaggcgcggcacagcccccaccgctgctgggttagtcacattttctgggcagggtcactggcttca

SEQ ID NO: 141167 - DNA, 122 bp, Homo sapiens
cctgggcgggcttgtgcccatcctcaaagggcggcgcatcagcaagctgcggccagagttcgtcatcatggacccgcggacagatagcaaaccaggtgggcccctcacccgagggactggga

SEQ ID NO: 141168 - DNA, 122 bp, Homo sapiens
cgccgcgcggtgggggatggggtcgaggcaatgatcctcgaggcttttgtgtgccctctgcgcacggaactccgaccgccgcctccgagcgcggggctggttgcatccccgggcatctcgtt

SEQ ID NO: 141169 - DNA, 122 bp, Homo sapiens
tacggcgcggctaaacgtgtgccactaactgcgtggatagacgagatgcaccacggtagacgtgagggtttgactttctccatccataactgggaagttaaagttgacagtttggtaagaag

SEQ ID NO: 141170 - DNA, 122 bp, Homo sapiens
atgtctcctggaggggattcagggaatctccagcagtgaaaggtgccaacagacctgtggcgattgagggacagagcctgtgtcgtctgaactcagaaaacgtgagcatcaggccagctgag

SEQ ID NO: 141171 - DNA, 122 bp, Homo sapiens
tgttcacactggccaatcaagagccaggaagcctcctggagggccggaaactttccaaggcgcccgccgactggctgtattggggagggcggggccggggccccgggagagggaatgagtgt

SEQ ID NO: 141172 - DNA, 122 bp, Homo sapiens
tttctgtcagaaaggcagagctggtcactattttcccattatctgtttgggtagggagtccgggaaatggggagggctatgcaatatatagtttagaaaagctctctccctctgcacacact

SEQ ID NO: 141173 - DNA, 122 bp, Homo sapiens
gggttctgacaggcagggggaccaccccaagctggtttctggctgcatccgctggggtgacgtttccagcagggcaggagctatatgccccgggccggccttcagaatcccagaaacaagtg

SEQ ID NO: 141174 - DNA, 122 bp, Homo sapiens
cctccccgcgctgagggagctgagtgatggagaggcggcataggtcctccgaggaggccccgtgagccccatggctgtttcccaacgccagcggaagagggaggttagaggctccctctgct

SEQ ID NO: 141175 - DNA, 122 bp, Homo sapiens
cccaccccctcccctagctcattaagatgctcaacactcaaatcggggtattgatctccacggaagccccaaaccctcgccatcgagagacccccatggcccggggtgatggctgtggggct

SEQ ID NO: 141176 - DNA, 122 bp, Homo sapiens
aacctggaaggagcggggcgtgtgtaggacagagcccaggagaacgggcagccgggtggccgggccaggaagcagggcctttctggccctttccgcagagggctggataattgcctctcctt

SEQ ID NO: 141177 - DNA, 122 bp, Homo sapiens
ccggcgctcagggaattggtggcagcgtctatttcagagtttatggtaagaggctggagccggcacacacagacaacacaccccaccctttaaggaagtggggaggagagcagcaggggtgt

SEQ ID NO: 141178 - DNA, 122 bp, Homo sapiens
tcggggcgcgcacgcctaggaggttgggagcgggactccccagatggagggtggcccctgcgccctccttagagctaggacgtacgcaccttagccatcaattaccactccccgccttgccc

SEQ ID NO: 141179 - DNA, 122 bp, Homo sapiens
gcaggggcacggacgcgggcagtgctgggcacggcagggtgtagctcgggggtgggggcccggcgggcgagctcacgacagcgccctgggcagctcgcgctgccgctcggctccagtccgac

SEQ ID NO: 141180 - DNA, 122 bp, Homo sapiens
aagaagcaagtttctgagtaacagctgaaaatggccttgttgcctgtgtagagcaagttacggtggtactgccactctgcaggtggagcgggtgactctgggggaccattaagacctccaga

SEQ ID NO: 141181 - DNA, 122 bp, Homo sapiens
ctgtcctcgcccaggccgcagccagcctgggactcaccgctctgcggccgctcccgcagtcggggtgggtcctctgccgccagcccgtacctgagtgtccagcatcttcactccggtgcggt

SEQ ID NO: 141182 - DNA, 122 bp, Homo sapiens
cacgctgccggcgcaggggccggggtatgactcattctgtgacccccgcactcaggcctccgggcgccaaaggcctcaatcaatatttgcccgtttgaaccgagacacccacttccttctcc

SEQ ID NO: 141183 - DNA, 122 bp, Homo sapiens
gtcctgttctctatttaggactttaatacataaacttctctcaagcaactgttccaagctcgttcatgtcaccttttagctctggtctttccagatctcatttttggcccatcttctgggca

SEQ ID NO: 141184 - DNA, 122 bp, Homo sapiens
ggtgtatcttttggaattggcaattgttaggtgtcagatggtgcaagatattagaaggagcgtgggctttagactgagacttgaatgtgattcctgccctgctaccagtgacaacgtggtca

SEQ ID NO: 141185 - DNA, 122 bp, Homo sapiens
gtggccggaggcctgggtctcttccactgcattccactggtctgctcatgaaacgggaggcggttcagccgcctgtgggagataaacacgccaagccttcagaacaactgcagaaatgccca

SEQ ID NO: 141186 - DNA, 122 bp, Homo sapiens
cttttcatcactgtctgattctcatattacgcaaccaaatctgctgtcatcactcttggccgccgtcgctggtagcgggtaggagtgctggtctcccagccaccagcctgatccagttctga

SEQ ID NO: 141187 - DNA, 122 bp, Homo sapiens
acctttgcagcgagcgttacagctcttaaaggtagcgtatcccgagtttttcgttcctcccggtgggttcgtgggctggttactctagccgacttcagaagtaaacccacagacctctgcag

SEQ ID NO: 141188 - DNA, 122 bp, Homo sapiens
gccccgcgccccatccaggagcaggcctgcgcctgacacctgtgcccgagaagcctagtccggctaagaagggagagggaacctctgtcctcacccagatgccctggctggtgtccgcacat

SEQ ID NO: 141189 - DNA, 122 bp, Homo sapiens
ctactattattttcaaacaaacaacaaagtttttctgaataaccaaattacaatactacacgttgaatatcccttatccaaaatgcttgggatcagaagtttcaaattttagattttagaat

SEQ ID NO: 141190 - DNA, 122 bp, Homo sapiens
acatatgctcagtcatgactgtgactctttaaaacaaagtctgttcatctttcatcttcccgcattgcttgatgattttttttttttttttgctcacctactctgacccatcactttagccc

SEQ ID NO: 141191 - DNA, 122 bp, Homo sapiens
cttccaaatcggtccttacaggaagaacctctgaatgctatacgcatatatggacggctgcgtgtccctacaaagtcagcctgttacttccactggagaaacaaaactcttgagaatcgctg

SEQ ID NO: 141192 - DNA, 122 bp, Homo sapiens
actcccaccacatgcagactgtaccaatgtatgtcggcaaacccgtgccaggcagcccctcgcagagctgcggagcctgtgtgcggtcctggctcctctggattgggcacccagaagggctc

SEQ ID NO: 141193 - DNA, 122 bp, Homo sapiens
gagagtggcctggggcagctggaggcagccacctccaggcctccttactgcgggggctcccgcctgttcgcaggtggcaggaaagggaatacactgagatcctctttccagcaaaatggagg

SEQ ID NO: 141194 - DNA, 122 bp, Homo sapiens
ctccggagcccggcatggcgctgctcgagggcgcgggcccgctggacgtgggcggccacgcgctcgccgagcccctgcagcgccgccaggctcgttgccccagcccagccctcgtcggccgg

SEQ ID NO: 141195 - DNA, 122 bp, Homo sapiens
cccatattcgcaggattaggaaaaccgccacagctcctgcggccgcagctagaacgagaacgcacaccatgcagagaaacggcgcatgcgtccaacttccggggaccagccgctgtcaaagt

SEQ ID NO: 141196 - DNA, 122 bp, Homo sapiens
agcaaatgggtctaatcaggggaatccaaaaagaaataaataaagaagcccatgacaaatcggttggtatctttgtgggttccatcagcttcttgacctctctcaaaaggctagcaataggg

SEQ ID NO: 141197 - DNA, 122 bp, Homo sapiens
gcacgctgcgatgagctgggaacaccatctcatctctgcacagagccgccgtttcaaagacgcaagagctgggaatctcagcaaatcaaattgcacaacatgaagcgctgtctctatcgcgc

SEQ ID NO: 141198 - DNA, 122 bp, Homo sapiens
ttagagaagcatcctggagtggttgttgttagtaatactgtctgtggagcacagtagcgtcgcagtagaagttagaccaatcccacctaagtagtcagagaatcttaaaaagtaaagcccag

SEQ ID NO: 141199 - DNA, 122 bp, Homo sapiens
cctcctgtcagctcctgggttgtacccttgggatgtgcaaagctgcaaatctgacctggacgttaggtcattggcccagaggactcagagttgtgttctttggtcctctgggatccagtagg

SEQ ID NO: 141200 - DNA, 122 bp, Homo sapiens
ctctgacaaggacgagcccgacctcgatggggatgtgtccagcgactgccccaccatccgcgtcccactgacatccctcaagagccaccagggcgtggtcatcgcctccgactggctggttg

SEQ ID NO: 141201 - DNA, 122 bp, Homo sapiens
tatgtgcttatgtaacacatgttttcattattaaaatataactagtttaccctcccaaaacgaaatagaagtgtcttaaaatggaaacaggtatctttggaggccagagttatttagcgtta

SEQ ID NO: 141202 - DNA, 122 bp, Homo sapiens
caacacatctgaaaactcccgccacccgtgttggcccgggactggccaatcccgcgccgccggatcaatgacacgctgaggcaccgccccttccgggcactgcgaaacatgattggccttgc

SEQ ID NO: 141203 - DNA, 122 bp, Homo sapiens
tccacagggcatcttggagggtgtttctctgcacctcctctcagaggcgtgggggaatcccgtgtccggtgactgagtttcgtctatgataatttgcactcatttctgcccctgcattgccc

SEQ ID NO: 141204 - DNA, 122 bp, Homo sapiens
cgcatgcgcagttcacagtagggttcatgctcctatgagacgctaatgccgctgctgacccgacaggaagcggagctcaggcggtaatgcgagaggggagtggctgtaaaaacagatgaagc

SEQ ID NO: 141205 - DNA, 122 bp, Homo sapiens
tacaggccgacaggaaacggctcagagaaaaccaacgccaccagacggccacctacaggccgacaggaaacggctcagagaaaaccaccgccaccagacagccacctacaggccgacgggaa

SEQ ID NO: 141206 - DNA, 122 bp, Homo sapiens
cttgagcggtggatgggactgggcgccctggagcagggggcggcgctcgtcccagaggctcgcgcaacgcaggagcccaccggcgggggtggggaggctcaggcatggcggactgcaggtcc

SEQ ID NO: 141207 - DNA, 122 bp, Homo sapiens
tggttgcaggaggggaacaatcagagactgaagcaaagttacagttacaccctatgcaaacgactaattggttgcagaaagtgatgaatcagaggctgaagtgaagttacaaagttatactc

SEQ ID NO: 141208 - DNA, 122 bp, Homo sapiens
cgcgtgggggaggtggggggtgagggaaaggctggcgatagcctgacccccgccccggggcgaacaggagagtcctccgagaaactgcctcaaatagcaagcagctcatcctaacgtggata

SEQ ID NO: 141209 - DNA, 122 bp, Homo sapiens
tgacgtgcggcgcggggcacgcacctgttttggttttctcgtgggcaccaggggcccggacgagcagggagctgcccatgtgccccacaatcctgccacaatcttccgtattctccaggctg

SEQ ID NO: 141210 - DNA, 122 bp, Homo sapiens
atttcaaatgagcccctcaacccaggtgacgcaggcggtgtggggaccgcatccggagggcgacctggagccgactgacttcacaaaggcctcctgccgcaaaccttcagcggccaccaaag

SEQ ID NO: 141211 - DNA, 122 bp, Homo sapiens
tagtagccacatgagcacacgcggtgaaatgagtggaaattgagagatgcttggaagccccgtggggacttactgtacctgtgtccacatccttcacctgttgcctggctagagttgtctgg

SEQ ID NO: 141212 - DNA, 122 bp, Homo sapiens
gccctctgtaaatggggacgtctgcacacacactgtcctcggcactgccctctgtggggacgtctgcactcacagaatgtcctcggcactgcccgtccatggggacgtctgcactcacagtg

SEQ ID NO: 141213 - DNA, 122 bp, Homo sapiens
ggaggggcgaggcggcgctgcgggcgacacaggccctctcaagggtcacgcggcggccgacgactccagcccacccagggtcctcagagctcgtgtctcccccgggggctgctgcatcgcgg

SEQ ID NO: 141214 - DNA, 122 bp, Homo sapiens
agccccagcccacccgcctgggccgtcgcggcccctaggtacctgcggcggtcacgggctcgccctcgctctgctccccggaatccgaatccatgctgcgggctgctggctgggcgtccacg

SEQ ID NO: 141215 - DNA, 122 bp, Homo sapiens
tttagtggaaagtcatattcagaagccagtattcaggtgctaggagtgctccaggctatgcggggctggctgctccaggccccccagtgactgtggggactagacacacacacatttccatc

SEQ ID NO: 141216 - DNA, 122 bp, Homo sapiens
tgactaacttgacaggacatgaggaatctcttcaagaggaatcagattttcttcaggatacgtcatccagagacaagagccaagggatgtagaaacccagggaagcctcgcgtccccacaaa

SEQ ID NO: 141217 - DNA, 122 bp, Homo sapiens
ctccagcgcagctgcccagcctggagccgcgcctgaagtgggcccgcagtccaggaaaggcgttcaccaaaccctaggccaagggctgggagccagtccccccaccccaacccaggggaggc

SEQ ID NO: 141218 - DNA, 122 bp, Homo sapiens
ctccgttacagtaaggaattacaaatcctgtgtttgtactccaggaagtctgcattatcacgaggagcttggaaaggaggtaacacactcaaggcaaatttcaagtaactcatcctggaggc

SEQ ID NO: 141219 - DNA, 122 bp, Homo sapiens
cgagaagctgcttaatacaaagagctccaggctcctggcggttcaccaggtctaaacagccgggctttatttgtgggggcgattgaaaaaattgagggtcaagattggggtgctgtgcaaat

SEQ ID NO: 141220 - DNA, 122 bp, Homo sapiens
tccccggcccctcgctccgctgccctgtgtgcccccgccatgaggtgacagcctgtggggcgactcgttgagatgggctttgcagacgggactgcaggtgcaggaaaacaaatgcggctatc

SEQ ID NO: 141221 - DNA, 122 bp, Homo sapiens
cacagttcatactcaccttagcctgagtttttttggggttaggccaaagttctcagtgcccgccaagccccccagctcccagccccttccttactgattcagctatgcgaagcacggcatgc

SEQ ID NO: 141222 - DNA, 122 bp, Homo sapiens
gaggaagttcgtgggtggagctggttgtttggcgcctgcgtcttgcggcgagcgggctggcgtgcggcgccgttgcgggcgggagcggctgcaacgccggtgcctgaggagcgatgccgagg

SEQ ID NO: 141223 - DNA, 122 bp, Homo sapiens
gagcttcagccatggaaattaacctcttccggttggggccggaagtccctccgagaggggcggctccgcgtcatgtgactggagtccgcgtaggaggggtcggaggtcttacccaacagatt

SEQ ID NO: 141224 - DNA, 122 bp, Homo sapiens
aagtatggttggaagacagccaagaccattaatttacatattgcctaaggctgtttttgacgtccaaacgcagtggaggagtagcagttgagaccatctgacccacaagcctaaaacactta

SEQ ID NO: 141225 - DNA, 122 bp, Homo sapiens
ggtgtcacttttaacactgcgcgttaacaccactggctgactgtctgcgcaaggaggccccggcagagccgcgtgcagccacaccccacatgtggagttgttaatccggcagttgttcagca

SEQ ID NO: 141226 - DNA, 122 bp, Homo sapiens
ggcggcgctgggcgtcttgggggtgcgcgccgggagcctgcagcgggaccagcgtgggaacgcggctggcaggctgtggacctcgtcctcaccaccatggtcgggctccttttgtttttttt

SEQ ID NO: 141227 - DNA, 122 bp, Homo sapiens
cgtgcccgcggtgccctcctccgcccgcgcggctggtggcagggcctccccgtgtgggaccgggcagccacctgctgcccacagccacagccgcacaatgggcccttgtgagccggcgggca

SEQ ID NO: 141228 - DNA, 122 bp, Homo sapiens
gccgtggatccgcctaaaagcttttctgccagtgacgcccttggtctctggatgtgttcacgcctcagtgattttactctctggtttcttgtgtgtgcttgagattcttgagagaaagcgtg

SEQ ID NO: 141229 - DNA, 122 bp, Homo sapiens
ggtgtgcacgcccaagctcaccggcagagggcgccaggcctccgcttggtgctcgagcctcgaggcccagaaaaggtaacctggtccccagaggtctgaaatcgctgattgtgtttattcaa

SEQ ID NO: 141230 - DNA, 122 bp, Homo sapiens
tcagatgcaatgatggatcgtctgggatttgcttttagagagaaacaggcggcggggctccgctggaggtgtaagagaacctggactggcttcttcgttacatccggtctgcttttgaatgt

SEQ ID NO: 141231 - DNA, 122 bp, Homo sapiens
gaagtgaaactaatttgcatacagggcctaccaacttggatttggaccctagaaaatctccgtgtgtggacctgggtcttgacccaaggcccaaggatcttgatgaagaatggagataaaat

SEQ ID NO: 141232 - DNA, 122 bp, Homo sapiens
ccggccgggcctggccgcgggacaacgctaggcgtgcagggcgagggcggcgcgggcctccgggaggatgaatgtcttatggaatcaggtggtttgacactcgaggaatccgcccagttccc

SEQ ID NO: 141233 - DNA, 122 bp, Homo sapiens
aatgctgcagcggcgcggcgggggctcgcggaccggctccctcagcgactacagccgctccgacgccagcagccccaccatcagcccggccagctcgccctgagcccgccacagccatgagc

SEQ ID NO: 141234 - DNA, 122 bp, Homo sapiens
gacggtccattcccgggctcgatgccggaaaaacaccttggcccgccggaagggcaggcacgtggccataggtgagcagaagggtacagccaatgcccgaatgccagagaaggtcacatgga

SEQ ID NO: 141235 - DNA, 122 bp, Homo sapiens
cgcttcacgtatacccagtgtttctgtggcatgatgctagggggtgtgtaggtgggtctccggagcccagccccaggaaccactgcccccctcccatccccaccatcatcgcacagctcatc

SEQ ID NO: 141236 - DNA, 122 bp, Homo sapiens
gctcggttggtcctgttccggtgcctagctcaggcgggcgctgcaagaggaagtgaaaatcgtccagtaattaattttcctgctgccggggggtggtggttttgacacatccgaggcagtgt

SEQ ID NO: 141237 - DNA, 122 bp, Homo sapiens
actaaagaaaaatgatttcatatagtaaacttcaatcctaagaacccaaggtacctaaagcgtcaggttccctccttctaggacccaaaccaaaaagcaatataccccatgctgggcagctg

SEQ ID NO: 141238 - DNA, 122 bp, Homo sapiens
gtctgcagaatccacagcaaccagcaccatgcccatgacactggggtactggaacatccgcggggtgagccagggtccgctgggcggtgggacgggggtgcgtgggggcggggaagtgtgga

SEQ ID NO: 141239 - DNA, 122 bp, Homo sapiens
ccgccgcccggagaggccatcagctgcttcccgtcacatggcggtgggcgcgggcggagacgcgcgggggcggggcgcaggggaaacggagggggggtgcggacgggataaaaacggtgggg

SEQ ID NO: 141240 - DNA, 122 bp, Homo sapiens
atatacaaaacattatcaatatttatttaaaatgtagttttgtattaccactgatggcatcgtattcttgctgcctggtggaataagaactcggagatctggtttacggttattcattccta

SEQ ID NO: 141241 - DNA, 122 bp, Homo sapiens
ctgccgccgcgcgtctcgccccggctgggcccgccgcgcagccccccgcacacttccagccgggaaagtacttcccgtcgccgttgcccatggcttcgcacacaggtcagtgctcggccggg

SEQ ID NO: 141242 - DNA, 122 bp, Homo sapiens
taggcaccggttcaattgccgacccctccccccaacttctcggggactgtgggcgatgtgcgctctgcccactgacgggcaccggagcctcacgcatgctcttctccacctcagtgatgacg

SEQ ID NO: 141243 - DNA, 122 bp, Homo sapiens
cttgggaggctgaggcaggacaatcgcttgaatccgggagccgcctctgttgcggtgagccgagatcgtgccagcgcactccagcctggacaagagtgaaacgtcatctcaaaaaaaaaaaa

SEQ ID NO: 141244 - DNA, 122 bp, Homo sapiens
gggaggtggagagggatgaaggagaataggaggtggagcttggactctggccgggggcggcggggtgagggggggcagcagctcgccactctgattggtcacctctgctccaaaactggctt

SEQ ID NO: 141245 - DNA, 122 bp, Homo sapiens
aagaccagcagagaccggaaggatcacatggtgaggatgcacctgtaccccgcggacttccggtttgataagccaaagaaaagcagaaggtagggagccgccaggctcagcacgtgtctgct

SEQ ID NO: 141246 - DNA, 122 bp, Homo sapiens
tagttggcaatgccctgcgcattttccgcactccgatacactttacactgaacaccaattcggaagttgtgtggaccgtgctccagattggaaggcctgccactgtgctggtgtcatttctc

SEQ ID NO: 141247 - DNA, 122 bp, Homo sapiens
agggaacaggacgccaggcttgaaaggggactttgaggtagtccggggaaaaacttcccacggaggacagtgttttccccgtagcccctgcgccagacccgggagagccatgcagcccatgg

SEQ ID NO: 141248 - DNA, 122 bp, Homo sapiens
aacagaaaggaatgggcggttcagagggcttttaacatttagctgtagtttgtgccattccggcatgcaagaacaaaatggcgtccagtcgacttagcagtgcttcctcctccgggggaggc

SEQ ID NO: 141249 - DNA, 122 bp, Homo sapiens
atatttttttctgctgctgaatcactaagcaaaactctaccgctggggaaacttttgtatcgcagcacacaagcagcccagtatgatggtaaagaccaacctccattgtgtggtcttaccat

SEQ ID NO: 141250 - DNA, 122 bp, Homo sapiens
ccccctcgctcggccagttctttctctgctgtttgccctgtcaaaacactgcctaggtcacgtgtcccaacaacagccaacccaccccggtcgtcacttcctccccggcggcctccgcggcc

SEQ ID NO: 141251 - DNA, 122 bp, Homo sapiens
cctgcgacgggtgctggattagccgaggagtgatacaatggcacatacggtcctgagtgccgggtgcggcccagggccccttactcagtgccatcgggattagagctaatgagttggaagaa

SEQ ID NO: 141252 - DNA, 122 bp, Homo sapiens
ggaaaccacagcttccacttccgctgtgggggcagaaagcacgggacaatctaaccctttcgtgcctggaaagtaacaaggaggactctgcccttaccaggttcccaaggtcctgtaccagc

SEQ ID NO: 141253 - DNA, 122 bp, Homo sapiens
gcctggtacaacaggcctctgcccagcctacctcacagatgtggaggctgaggccgggagcggtcaaggtgcctgcctgggccacaccatgagcaggtgacaagcagagctgcccctgtcca

SEQ ID NO: 141254 - DNA, 122 bp, Homo sapiens
gagggggaagtaggggggctgtctctgtttcacgggtttgttttttaagccgaactgcaacgtctgcactcctttttccttccttttgtgggcagctgagggccgaggcactccgtgctgtc

SEQ ID NO: 141255 - DNA, 122 bp, Homo sapiens
gcccccaggacagaactaaccactgcccctgccaccttgttaaactgtgtgacagtagctcggacagatgggcagaggtgagaatgtcctggccggtctctgtgaccccacaggcctcccag

SEQ ID NO: 141256 - DNA, 122 bp, Homo sapiens
agagtcttttatgtgccgttgctgttccagtcacggggaagagcagggaacaacatgtcacgccctcagaagccgacactctaggggaacagacaccgtaaacacacagctttactgaacat

SEQ ID NO: 141257 - DNA, 122 bp, Homo sapiens
gcaaagcggccgcagggcgtctgggctaaacgcaaccaggaacacattggcaaacttttgcgcctgcgcccaccgggcgtgcacctgtaggctgaagtcgcgcatgcgctagatgggaacgt

SEQ ID NO: 141258 - DNA, 122 bp, Homo sapiens
cttggtatacaaattgcctgaaatttcagagttggacttcatcacttgtctgtgagccgacgcaggcaggcgtattctatatcaacgacagactctcctctgccatttcctttcctgaatct

SEQ ID NO: 141259 - DNA, 122 bp, Homo sapiens
cctgcgcctgcgcgctggaggagcggccggctggctgcaggctggaggggcgcgagggtccgcactggcacatgagggccgtcttccaccgcgttgcgctggaacgtgggcccagcagatct

SEQ ID NO: 141260 - DNA, 122 bp, Homo sapiens
cggccctgcccgcagccgccacctgagcttgggcgcggctcctatctcccacccgcgcgtcggccagtgaagggctccgtgcttaaacatcattcgttacagaagtattgcggccatcacac

SEQ ID NO: 141261 - DNA, 122 bp, Homo sapiens
ccacgggggttttgtggataaaagaagatgggtgttatttttccacaggatagtcagaaacgtgttttgccagtcaccctggctcagttagcaaattctgatccattaacctctgaaaagtg

SEQ ID NO: 141262 - DNA, 122 bp, Homo sapiens
ctctgtgcgtctcaggctgagatgcagatttctgttttctaaaactggaagcgaccttgacgtgtattgaaggtgtgtgtgccaaatgcttccgacggaggtgctggccttggttggtttct

SEQ ID NO: 141263 - DNA, 122 bp, Homo sapiens
tttcgtttccgcaaacaaagcatgctccgcgctttcaggaccggtggctcccgtggagaccgcagcggaacccagtccgccttcgcacgcgtccgggggagaagcggccccaggactaaggg

SEQ ID NO: 141264 - DNA, 122 bp, Homo sapiens
ggaaacctgagctctagtctaaatctagccctaaacaaactgtgcaactgtagctaagttcgttgaccacttggggtctcagcagagaaaacaaaaattttggaatcagaattgaagcagga

SEQ ID NO: 141265 - DNA, 122 bp, Homo sapiens
gggatggggtggtagacaggtgaggcccaggcccacagaggaccttgatgggctgggacccgagctgggtgggcacagcaggttaccttgtcgctgcgcagccacctcacaggacacgctgg

SEQ ID NO: 141266 - DNA, 122 bp, Homo sapiens
aaagaaaaaaaaaaagcatcaacaaacccctgatctgtctagcctgaaagtcaggaaaggcgcaggctaaaaagacagaaaattgtaggtcataacctctctgtaacagccaaataccacag

SEQ ID NO: 141267 - DNA, 122 bp, Homo sapiens
ccttcctggtcccctcaaatcacatcaaatggtaattccatctattgcaatggaacataacgctctggtcctgcatctggcccgtagttaaggtaccagtgatgtaaattactttcctctta

SEQ ID NO: 141268 - DNA, 122 bp, Homo sapiens
agaactgctgtgaggcactcctcctagtaacagaccacagggaaggccacgcccaggatgcgcctgcaggccttgcagaggccaccactgaccagagagactggcaactttgatcaaagaac

SEQ ID NO: 141269 - DNA, 122 bp, Homo sapiens
tagccatggagacagggcccccgggccagccaggcccgggctggtcagtgaatgaataaacgtggcccatttttctgcttttgtccggagcctccctggggcttcctgctgtcagccccagc

SEQ ID NO: 141270 - DNA, 122 bp, Homo sapiens
gccggccctggcccccaagcagaggaggctgcacctccctcgcgtctgtgcctgcctcaacgcgggttaaactttgaccaaggaaatgattgctaaactcgattccataagtgtcaccggtc

SEQ ID NO: 141271 - DNA, 122 bp, Homo sapiens
gggattccagcccagcccaccccacccagggaaaacccacacccacccgaggaaagcccacgccccccctgggcgaccccacgcccaccccagaaagggccaacccccgcccccaagaaaac

SEQ ID NO: 141272 - DNA, 122 bp, Homo sapiens
gccgatgttccataagtacgggtggcgttggtgacctacctcatccgattcatccgataacgtctgcagtaggatgggaaagaggctgtccgtgtgccggaacatctggagggcagagaagc

SEQ ID NO: 141273 - DNA, 122 bp, Homo sapiens
tgagggtctctcaccgagtctctccttcagaagcacatcaaggagcaccacgaggaggtccgggagcggccctgcccccaccctggctgcaacaaggttttcatgatcgaccgctacctgca

SEQ ID NO: 141274 - DNA, 122 bp, Homo sapiens
agcgttaaactgacaccatcacttccgggttatccccacggctgccccctccttagcaaccgcgtggggttgctaagcggaagtgccttcaaagcaacccacccccatttcttctgggacta

SEQ ID NO: 141275 - DNA, 122 bp, Homo sapiens
agactgttaagctccttgacaacagggtattgacggcacatgccttcgtttctcagaatacggccttgcacaggcaagtcaaaactcaagtaatagatttcccacaagtatgtgcaaaagat

SEQ ID NO: 141276 - DNA, 122 bp, Homo sapiens
agaaatgctcgccaggctgggggtgggggccgagccggacccccactgccaagcaagggtcggggctcccacagggccgcctccctcccgccggtgtccggggctgcctggggttccttgag

SEQ ID NO: 141277 - DNA, 122 bp, Homo sapiens
caataggagaaagtttctgaccctaccaagttgggcaaatgcagaaattcactgagcaggcgggcttctccttgtggtgaacagggggtatgcgagcccccactgtcactgtggtcaggagt

SEQ ID NO: 141278 - DNA, 122 bp, Homo sapiens
aagtcgaatgttgtaaagatgtgctgatttcccagcgctgtctctggggagctccggcagcgcaagagggcaaagcacagctggaagctcagagctgcagtcccaggtcctggggtgagtgg

SEQ ID NO: 141279 - DNA, 122 bp, Homo sapiens
actcgggaagcgcaagaggtcagggagttccctttcctaatcaaagaaaggggtgacggacggcacctggaaaatcgggaaaatccggtcactccaacccgaatactacgcttttccgacgg

SEQ ID NO: 141280 - DNA, 122 bp, Homo sapiens
cccacagagaagaggtgtgcagagaacatcgcagggggctgtacaagaacccgagggcgccgccgctgtgaggcctgggagtttcttggccaagcgaggagctgctcacttccggaaagctc

SEQ ID NO: 141281 - DNA, 122 bp, Homo sapiens
agaaagcactgacttaacgtgtgtgaaagattgtagacagagacgggataaagagccccgcgctggaaaaagagcaggctttggaaccagcagggtcacgggcagtttccttacgtgtaaac

SEQ ID NO: 141282 - DNA, 122 bp, Homo sapiens
ttttccgatgcccgtggccccgccggtgacgatggccacttggccctgcagcaaaccaggcgccaggtagctcctgcccttagcccaggaggccatccctgcagcggggtgccagagcagct

SEQ ID NO: 141283 - DNA, 122 bp, Homo sapiens
gcgcaatccgcctgtcgccttcccctccagtctcatttctaaagtaaggacaactaaggacgaggtcgttacttttcccatcaccctcatcggcatccaggttctctttggagttgaggtcc

SEQ ID NO: 141284 - DNA, 122 bp, Homo sapiens
atccgtagccagaatcattcattcagtagtgatccagcctttactaggtgccagcagcaccgcgtagtgttgaaagctatgggttgtgaagtcacgtggtttgggttcaaatcctggcgctg

SEQ ID NO: 141285 - DNA, 122 bp, Homo sapiens
gccaggcccccggtttggcagccgagctgagcgagggtggattgcgaggggcactggggccgccgcggagctctgcgtgtcggctgccagtgaattggccgatttccccagtctgagggtca

SEQ ID NO: 141286 - DNA, 122 bp, Homo sapiens
cttcccacaagaccgaatgctgccaaagattgagagacagtgacataaatgtcagggaaacgcctcggcagtgtcaagcctaattagacgcttgcacttgggggacaactacagataccata

SEQ ID NO: 141287 - DNA, 122 bp, Homo sapiens
tttggtagagatacagttttgctctgttgcccaggctggtcttaaactcctgggctcaagcgatccctgtgcctgggcctcatagagtgctgagaataggtgtggaccactgcgcccagcag

SEQ ID NO: 141288 - DNA, 122 bp, Homo sapiens
gttctgtttccgccgcaggcccgggttcacttgcggccgctggcacgcactgtacagctgcgtcagctgctcgcaggacacgtcccgtcccgcagctggtccaagtctgtgccgcggtaggt

SEQ ID NO: 141289 - DNA, 122 bp, Homo sapiens
cggaagagcaaccgagatgaaggtgaagatgctgagccggaatccggacaattatgtccgcgaaaccaagttggacttacagagaggtaagataagttggtagggagaaagggacggtttcc

SEQ ID NO: 141290 - DNA, 122 bp, Homo sapiens
cgtgggcgcacgtgaccaatgcacgagtgcctgatgccccagcggtgcacacaactaatgcgcatgcgcctgacgtgccaacaatgcatgtgactaatgcgcagtcgcctgtcgccccagca

SEQ ID NO: 141291 - DNA, 122 bp, Homo sapiens
tcacgtcatgcggttgacatcatggatgggggatgtctctggcccggacctgcagggacacgagtggttgggaaagacctctagggtagccgtccctaaccattttggcactgggggacggg

SEQ ID NO: 141292 - DNA, 122 bp, Homo sapiens
tatcctccaatcacagcttgaagtgagattgatgtgtcttttcaccaatcaccgccaaggcgcgagggggttgtcgggatgggggcgggagccaacatagagccctcagtgggatgagggtg

SEQ ID NO: 141293 - DNA, 122 bp, Homo sapiens
ggacagagtccactttacgctggcaggaggtgagtcacaccacctcacacttctggggaccgttccctcacctctagtccagagacctcacaggcaggcagcccagtcaaagcctcctctct

SEQ ID NO: 141294 - DNA, 122 bp, Homo sapiens
tcccagtgttaggtgacgaggatgaatgcaaggtcagcctcaggccacgtgcaagctgaccgtccacgctcatctcggtgcctagtgtattgtcggggttccatttctccgtagacctcgag

SEQ ID NO: 141295 - DNA, 122 bp, Homo sapiens
agaatgacgggctccttttggactcccaggactacagtcccttatgcaccttgggatctgcggctagcccctgcgtaaagagggacgcgtagtcttttccctgccccgccctgccggggcgc

SEQ ID NO: 141296 - DNA, 122 bp, Homo sapiens
tctctttccccgggacgggacagggagtggagttcctagccccttgggtgggaaaagccccgcgcacgtcaccgggtcccgtctgctcactgcttctgcatattttaagcctggacacagcc

SEQ ID NO: 141297 - DNA, 122 bp, Homo sapiens
tccctttccctctccattttacctgataaatttttgatgatgtttcaatttaaagcgtagcggatcatctttgacaactaagctaacttctcttgttatgggtttctttagagtctagtatt

SEQ ID NO: 141298 - DNA, 122 bp, Homo sapiens
ggtcaatagtgaagaactgtggccattcccaggttccactctgctccagaagggatgctgcggacacaagacagggcacacccaagatgtggtagacttgaacccaagaggcacctgaacaa

SEQ ID NO: 141299 - DNA, 122 bp, Homo sapiens
tgttggtccttaggagtccttgtcagatttttgtttcatgtccttttccccctaatttctcgggcattctaatgatgttgttccctccccaccccttaaaaaggataaaaagaagggctttg

SEQ ID NO: 141300 - DNA, 122 bp, Homo sapiens
aacactgaatccagcttattggaagctggctatacaccagatccagtggaaggcagtttccgttactcaagactcaataatttaacatatataatgggaacattctactggcatggctgtta

SEQ ID NO: 141301 - DNA, 122 bp, Homo sapiens
ccacacacagatgccggcacacacagatgcccacacacagatgccggcacacacacatgccggcacacacagatgcccacacacagatgcccacgcacagatgccggcacacacagatgccc

SEQ ID NO: 141302 - DNA, 122 bp, Homo sapiens
ggaacggctctcccagcgggggaaggtgacctgcatcaggtggttatcttcgaatccacccgatacgatacccacgccgcttcccagacgctgaaaagccagtgagatgcttcatcctttct

SEQ ID NO: 141303 - DNA, 122 bp, Homo sapiens
aggcagaagtttggtggtggtggtgttggggtatggtttagtaatatccaccagaccttccgatccagcagtttggtgcccagagaggcatcatggtggcttccctgcgcccaggaagccat

SEQ ID NO: 141304 - DNA, 122 bp, Homo sapiens
aacttaaatagtgctgagctgcaacttgttttccgcggcttgtagtcgaggaggagcccacgaggctttagctgctgcaagatccaagcgcgctcccgcccagcggtggccccgggctcagg

SEQ ID NO: 141305 - DNA, 122 bp, Homo sapiens
gggaagccgtcacgccctcgctccgtaccctgattgtgggaagcctcccctcagcactcacgatgcgcagtctctgcctcagtgtcacaaggcggaccccactcccctacccgcgtagggag

SEQ ID NO: 141306 - DNA, 122 bp, Homo sapiens
cagtgagcatagcctcgttccaataaaactttatttacaaaacagggagcagtggaccagcgagtccccaaggacaagggccaggttaccagagaatttccaggcacatccgttggaggcag

SEQ ID NO: 141307 - DNA, 122 bp, Homo sapiens
agagaccccacctcgccccctcctgtcccacgctctgcagcccctcaggagacctccggccgcccccatcacagccccaccctggccaaagccctcagctatgcccctgcactggagcggaa

SEQ ID NO: 141308 - DNA, 122 bp, Homo sapiens
tgtgagccacacaaggtcagaaagcagatatgattcctgtatcagagttcctgcctgttacgcattgaacgctgtcttagtccatttgggctgctataacagggtggcttataaacaacaga

SEQ ID NO: 141309 - DNA, 122 bp, Homo sapiens
ttgtccaaagcttgctcgctggtcgggagaccggtgggtgggaggacagcccacctcctccgcacacatatccctcagccacccaccccctgatccgcccagggccgcctccgccccgcttt

SEQ ID NO: 141310 - DNA, 122 bp, Homo sapiens
gctccatcttcccagtgactcagtaatctgcttccgttcgtgtggactcacagatagttacgttatccgctgtgttattagtcccatactgccaccattggtgttggtgctaaagcgccggc

SEQ ID NO: 141311 - DNA, 122 bp, Homo sapiens
gtatttgttgtagagatgtggtttcgccatgttatcctggctggtctcaagcgatccgcccgtctcggcctcccgaagtgctgggattacgggcgggcgccacctctgcataagtcttaggc

SEQ ID NO: 141312 - DNA, 122 bp, Homo sapiens
tcttcgacgatttccgggcgacgcaggaagtggctccagggcgcacgcgcgttgtttccgcggtagtcagggcagtttctaccgcaggcttaaggaggcttcgggctcctgggatttctgtc

SEQ ID NO: 141313 - DNA, 122 bp, Homo sapiens
ggggagcgaagagaggagcctcagaggctgaaattcaggggccaagcaccgggaagccagcggggccgcagcaccgcactggcatgggtggggcgcgtgtccgactctgcgtagggatggcc

SEQ ID NO: 141314 - DNA, 122 bp, Homo sapiens
tgggccggactgcaaagggaggtggggccaggttcaaggaaaatgaacgccgagtgggaccgtgtcttgctcatgttcaggctggaagatgtttgtgcctgtcaggaagggaaacctgaact

SEQ ID NO: 141315 - DNA, 122 bp, Homo sapiens
gatgaagtcagaatagtcaatgaggactttgaatcccagaggttaacacttcctcctctccgtctggcaaaacgctgcagtgctgacttcagaacagaacccagctagatgctcagttttct

SEQ ID NO: 141316 - DNA, 122 bp, Homo sapiens
acccttgaaaaaacctctaatataaaaggcatttatatccaaaagttcccattcatctcccgctctgggaaccgggagcgccccctgtccaatcagctttcaaatcccctgcgtcagcgagt

SEQ ID NO: 141317 - DNA, 122 bp, Homo sapiens
ggcgtgctggtgcccctgttgcgtgatccaggcctcaacctgaaggtggtgcagcttttccgcgacccgagggcggtgcacaactcgcgcctcaagtctaggcagggactgctgcgcgagag

SEQ ID NO: 141318 - DNA, 122 bp, Homo sapiens
cgccccaggtctcatctgagcgctgtctttcaccagagctctgtaggactgaggcagtagcgctggcccgcctgcgagagcccgaccgtggacgatgcgtcgcgcccttcccatcgcggcct

SEQ ID NO: 141319 - DNA, 122 bp, Homo sapiens
tcttaggatgaggaattcaatccagcaggagatcccgcaggcctctcatgccccgagaatcgcacaggtgtgtttgggcggcgtactctccacgtgtactgggggaggggcattgtttttct

SEQ ID NO: 141320 - DNA, 122 bp, Homo sapiens
gctctggccctgccctcccaacctcccccccaccggctggctggaggccctgtgctcgcccgcccgccaggctgcggctgccctgcaggagctgggactgactctaattgtgatttgatccc

SEQ ID NO: 141321 - DNA, 122 bp, Homo sapiens
gggctcctcagtttctgctgtgttgtgaccccacgaggcgctcagcacccagggaaggcgcgtgtgtccccgatgctggctcctccctgagccccgacggctctcgaggttctgagcctgtg

SEQ ID NO: 141322 - DNA, 122 bp, Homo sapiens
cggtccctggccttgcctgtctgtgcccccctccccgcccgcgtatcctctctccccgagcggctcaccagcttaggctgtggtggccccctctgggaccaaacccggctccgccttgtgtg

SEQ ID NO: 141323 - DNA, 122 bp, Homo sapiens
gcaagggacgtggcgcctccacggccggcgccttcctacggaagccgatggggcccaaaacgaactctccgggaagccccgcctccatctggctaagaaccgcccctcgctgaagactgcaa

SEQ ID NO: 141324 - DNA, 122 bp, Homo sapiens
agcagcctgactctagagaggccagaatgttgggaatgccgtagatttaataatcaatgacgcgtggcaactccacctggtctgtgaggagccccactgtcaccctggccgtcctgccatcc

SEQ ID NO: 141325 - DNA, 122 bp, Homo sapiens
gagccgtacgtgacagaaatggctcagggaactggtggaggcgtgttcatcacgacggcacgttccatgtctaacggcaagaagctctctgccagtgacctgaccaatggtgtggatgagat

SEQ ID NO: 141326 - DNA, 122 bp, Homo sapiens
cccagcaaacgtgctcagacgcctctgggcttgttgtggtctcgccagtctgcggacaagcgctccaaactcaatggacaatggagctcacccccgtcaacgcgaactacaaagctcaggag

SEQ ID NO: 141327 - DNA, 122 bp, Homo sapiens
tggtggtgtctgatttctgcgggatgccgttgtcctgggccatgatggtcagcgtgtaggcgacctggttctcatagtccagctccatcatggtgtacatggtgccactgtcggggtcaatg

SEQ ID NO: 141328 - DNA, 122 bp, Homo sapiens
atgggtctggagtgtggcccattgggattttttaaagaccctcttcccaggtgatgccgtcgtgcagacaagcatgggaaccactggcctggaagccccagggagaggcctctggggcccgg

SEQ ID NO: 141329 - DNA, 122 bp, Homo sapiens
gatatggacaagcagcagcgttatagcgctctgggtttcgggacataggcctgggccatgcggcccccttggccccttggcgcgacccccaggaacgttcggaaagctggtcctcgtggctg

SEQ ID NO: 141330 - DNA, 122 bp, Homo sapiens
aagacggagccgggaacattgaggcttggggctgggactcagcagctcttctgcccttgccgagaactctgtctatatctgtattacaacacttaccatagtgtattcattttacaaggtat

SEQ ID NO: 141331 - DNA, 122 bp, Homo sapiens
ctggggtcggtggaggctccacactaacaagacggatcccgggttcaaagctggggtcggcggaggctccacactaacaagatggatccagggttcaaagctggggtcagcggaggctctac

SEQ ID NO: 141332 - DNA, 122 bp, Homo sapiens
gggggtcctggaggcttgggaaaagtattggtgtgaagtaatcatcttcgaaagtaggaacgtcaactcaccagggaaatgtggtatattgcagggtattcctcaagatctacttgagatgt

SEQ ID NO: 141333 - DNA, 122 bp, Homo sapiens
gttaaaatgaaaccagagtgtggaagcccagcaatcgctggaaccctttgaccccctctccgcacctgaagaccggctgtgcccactgcccctgcggacgctccccagtgttcgcccttgga

SEQ ID NO: 141334 - DNA, 122 bp, Homo sapiens
aaaggctctttgggggttgagtgggatttcttttcctgtcaaatgtcctctgcttcttgccgtccttgatttcagctagcagaaaagtactgaatctgtcaaactaataatttttttcagat

SEQ ID NO: 141335 - DNA, 122 bp, Homo sapiens
gagcatggtggtcatagtcctggtaagcctcgacgcactgcctgcaagtggtcatctcgccgccttccttgagcaccacatccagactgcagttcaaagtgttgggactggacaaccccgag

SEQ ID NO: 141336 - DNA, 122 bp, Homo sapiens
cttccagcacgtacacctccagatgcttgggttggcctgacccaaaacagtctactctcccggccaagccaattgcccctgggattttctgctcctccaagatcccgtgcatagccctggtg

SEQ ID NO: 141337 - DNA, 122 bp, Homo sapiens
ttgtgcatagatatatatatgcccacacacactgggccatgcttgccaaggaacagcccacgtggacatgccagtcggatcatgagttcacctgatggcattcggagtgagctggtggagcc

SEQ ID NO: 141338 - DNA, 122 bp, Homo sapiens
ccagaggttctgatgataggcttataggcggtagtttcctcagtgtccgtgggtcgcccccggtcccgggttggatgccccgcggtccagcaccgaacctttcggggtgcagagttgcagag

SEQ ID NO: 141339 - DNA, 122 bp, Homo sapiens
aggctctggagccgtacgtgacagaaatggctcagggaactggtggaggcgtgttcatcacgacggcacgttccatgtctaacggcaagaagctctctgccagtgacctgaccaatggtgtg

SEQ ID NO: 141340 - DNA, 122 bp, Homo sapiens
aagtcatttatcggcttcaaataaaggtttctggaacaaatacagatattgacctttaatcgtatcttttgcaacaaatacatcctcttctttgtattcaccttgtaaagttgacttcaatt

SEQ ID NO: 141341 - DNA, 122 bp, Homo sapiens
gggcaaacagtgattgcatcagctttggtttctcatgggtgggcagccttggctgtctgccggaacgtaaagagcatggagcaaggacatgggaatccgaatcccgctgaggtcccaggacc

SEQ ID NO: 141342 - DNA, 122 bp, Homo sapiens
cagccacgactggagatggagcgcttgacacttttactgggtcaggtaaagcctttagctcgtgtgtccttacgtacacatgggggtgcatccacatcctcctcctcgggaataagcaacat

SEQ ID NO: 141343 - DNA, 122 bp, Homo sapiens
gaaggtccgtccgcgtgtggaacgtctgtcagcgtgtggaaggtctgtccgcgtgtggaacgtctgtcagcgtgtatgagttctgggcactgctttggctgtgagatcccagtctgcatcag

SEQ ID NO: 141344 - DNA, 122 bp, Homo sapiens
ggcggggaagggcgcggaggcggagcactgggcgggtacccgctggcggctctcgcgcggcggcgctgctccaccttaagcgactgtacccccttaagggcgggcgctcaagcagcgagccc

SEQ ID NO: 141345 - DNA, 122 bp, Homo sapiens
ggagaaaccgtctccgccgcctctaccgccgcggccgcttctctgttacccgggaaatcccgcccactcccccgaccccgccccgcagagggaagactcagcttcgttccaatacaggacgc

SEQ ID NO: 141346 - DNA, 122 bp, Homo sapiens
cctcaggtgatccacccgccttggcctcccaaagtgctgggattacaggtgtgagccacgcgccctgccacgagtgtagtttttcttgtagctttaggaatctgggaagttgccgtgccggc

SEQ ID NO: 141347 - DNA, 122 bp, Homo sapiens
ctgagctgggtggagaggaaggcatatgtcacactgaggcatcagagacacatccattcacgtcggggctgtgtccgcgccgggtccacactcagtcatcgcccgtccgcgccgggtccaca

SEQ ID NO: 141348 - DNA, 122 bp, Homo sapiens
cctactgatctgctgtctcaggaggttaggcattcttagtcagaggatgagataggaggtcggcacaagatacagtcacgaaggccttcctcataaaagaggatgcggcaaaggagccagcc

SEQ ID NO: 141349 - DNA, 122 bp, Homo sapiens
ggctgtagtggggagctaggagtcccattggaaggggcctgcagcgacaggctgtggatgcgcacaggctggcccatgcggcccgtgcagcaggcgccacataagccagatgtcagcggccg

SEQ ID NO: 141350 - DNA, 122 bp, Homo sapiens
agctcagcaatgcatatggataaagattaggaaagatataatttgggtactgtgtctgaacgacaggaccctgagtataaacagttataaagttgtttaacaatacgtaactttaattatac

SEQ ID NO: 141351 - DNA, 122 bp, Homo sapiens
cggagctgcctggactcagggacttggaagccgagtcttcccctcccctcaggcagaagccgacgccaaccccgaaacccagcagtgcacgcgagctagcggtgacgaccaccccgagcaac

SEQ ID NO: 141352 - DNA, 122 bp, Homo sapiens
gcctccacgctcggcctggccccaagctcttccttcctggggcaccctgcctccgcactccgccctggtcccgagccccgccccgcctccacagtcccgagcccgcctccaaccctgccctg

SEQ ID NO: 141353 - DNA, 122 bp, Homo sapiens
cggtcttcaccaccttgcccgacttgctcttcatctttgagtttgtgagtggctcctggccggggaagggacggggtgggctgagccgtgcgctctctcgggcgcccagcacagctgtcgga

SEQ ID NO: 141354 - DNA, 122 bp, Homo sapiens
tgccaggacggcctcgtgctggcctgttcagaccctggctctgcggctttctggctgtgtcgccttgcactttttcccctcttggggcggcagaccataaatgggttttcatctgtaacatg

SEQ ID NO: 141355 - DNA, 122 bp, Homo sapiens
cagatgtcttcagggtcaccacgtgagattggaaggcagtcttgaaatcttaatttcatgcgggaggagagactacatgacggctacatctgtagttggaacagtatatttatggagcactg

SEQ ID NO: 141356 - DNA, 122 bp, Homo sapiens
ctacccaccgcaggaggagacgggagcgggcccttcaggaaaactcactcctcacttgcccgccgagcgctaaatggattctgagaggtttccttaagcagcagcaacccagactagaaacg

SEQ ID NO: 141357 - DNA, 122 bp, Homo sapiens
cgtacctccatgagcctccgttttcttatctgttcaatggacacgttctcccctcccttacgtagaagttaggcatgtgccacaacacaggacagtaggctcttcgtgactgaagaaccact

SEQ ID NO: 141358 - DNA, 122 bp, Homo sapiens
tcctcagtttgttcgtctgcttgaaagttggccaaaaaatcctgctgctcaccgacttcccgtggtcagctgctgtcaagcgttcactttctcttctgtcattcctcatggaatgagggtgg

SEQ ID NO: 141359 - DNA, 122 bp, Homo sapiens
cggtgcttgggcggggcatcctggccaggtacaagtaagcccaggagtaagggcggagtccgccgcccggtgagggtgaggggactccgctagttctggagtgagaggccctggggagggca

SEQ ID NO: 141360 - DNA, 122 bp, Homo sapiens
gtggcccacacgcgtctccgtttcagtggcggggctggcaaacgtcattccctagccccgcggccctttaaagcccggacaggtgcagctcggtgccgcctctggttggctggcgtggggtg

SEQ ID NO: 141361 - DNA, 122 bp, Homo sapiens
tctccatgtaattctccaagggaagtcacggtcgagaggactggtggcctccattcttcccgtcaacccatttgtgtcacatcctccacctgagcaacagagtgatttttgctcaaaggcaa

SEQ ID NO: 141362 - DNA, 122 bp, Homo sapiens
taccttttctatgtctagatacacaaacaccactgttacaactacctccagtattcagtgcggtcacacaacgcccaggtttgcagcccaggagcaatactccgccatgtagcctgggtgtg

SEQ ID NO: 141363 - DNA, 122 bp, Homo sapiens
tgaaggtgattagcagtgtgcctggtacactgtcattgatggtatcactgtatcctccctcgggaacagggactactcttttgctttctactcccactcacttctgagcatttgcagttccc

SEQ ID NO: 141364 - DNA, 122 bp, Homo sapiens
aggctcagccgatgaggcaagaggcgggtccaggaaaccacgtgttctgccttctgcgcacgcgccagccaaaacaaaagggaggtctgccaagccccaccccccacgtgaccggcgtccag

SEQ ID NO: 141365 - DNA, 122 bp, Homo sapiens
ctggccccaaatgtcttttataagcaagtggtgcattcctggatgttgagcgcttgcgcccggttcaggaccgggtccaaatgaggttggcgtgcgccgtgcaggtgaggagtgcgggtcac

SEQ ID NO: 141366 - DNA, 122 bp, Homo sapiens
ataacacatgaaataacccggaggattgaaatgttaggtgaggcgactccggctcatagacgcgcctctccatctggggcgtctggcacttagtggaaccactcaataaacacgtttacccc

SEQ ID NO: 141367 - DNA, 122 bp, Homo sapiens
gtatttttagtggagacggggtttcaatatgttggccaggctggtctcgagtgatctgcccgccgcggcctcccatatggggttattttttggagtgatgaaaacattttgaaattagatag

SEQ ID NO: 141368 - DNA, 122 bp, Homo sapiens
ctcagcgcccacgcccctccgcttcagctccggggagccccagggtgggctgctggaaggcgcgactgcaacttgactttgcctcactgttgttgctggcagaatacgtacaccaatgcgga

SEQ ID NO: 141369 - DNA, 122 bp, Homo sapiens
tctggatgtatgcttggatctcccgggcacttttattctgtataaatttctcatagttatcgggggtgtacagccgcagtctgtccttgggagagtattttctttctgtaacaagattcagg

SEQ ID NO: 141370 - DNA, 122 bp, Homo sapiens
cccgcaggccccgcccgaggacgctcgcggggcgagcccccagcccagctcgagccgccccggcgcctgccactccctactcagagcccctccgtgagcgcgccgctgcccaccgcctccaa

SEQ ID NO: 141371 - DNA, 122 bp, Homo sapiens
tgagagggcggggcctggagctttacccaatcagtggcgtcggagtggaaatcctccaatcgggagtagccggagagcaggggcggcttccgggatttggcggtggcctttgttggctgcag

SEQ ID NO: 141372 - DNA, 122 bp, Homo sapiens
cgctcccctccctcctcccgtgagcgtccggccttgtgcatcctgaggccccgcgctgggcgggcctggagggtcgggcccgccaggaactctatttccaaactcctgttgggaggccgcgc

SEQ ID NO: 141373 - DNA, 122 bp, Homo sapiens
gagccaagggaggaagtggtgagtgaccaggtctcagagattaaggggaggacatggggacggtggagagatcaccaggctgagaatgtcccataaaggttttggacttgacaccatagaca

SEQ ID NO: 141374 - DNA, 122 bp, Homo sapiens
tagacccttgtggaaggactttttctacactggaaatctaggagtggaatagccgggccccggagacacaggaacacactagaaatctaggagtggaatatttgggccccggagccacagga

SEQ ID NO: 141375 - DNA, 122 bp, Homo sapiens
ctgccgccatgtaagtagtaccgttcgccttccgccatgattgtgaggcctctccagccacgcagaactgtgagtccaatcagcctcgttcttttgtaaattgcccagtgtcgcgtatgtct

SEQ ID NO: 141376 - DNA, 122 bp, Homo sapiens
gcggggcctggcgggggcggggcctggcgggtcaggtgactgcgcggcgggctgtggctgcggaggttgaggggcgtccgaggcgcggaggggctggctgggcaggaggggttggcggggca

SEQ ID NO: 141377 - DNA, 122 bp, Homo sapiens
gaacattatttaatttcccgccagcgggcagtgaaagccggagctccccctcccgctggacgtatttatttaatcctttttggaaatagtgtctggggatggatctgaaggccagccctggg

SEQ ID NO: 141378 - DNA, 122 bp, Homo sapiens
ggagcacgaggtggagctggagctgctgcgcgaggacaacgagcagctgctcacccagtacgagcgtgagaaggcgctgcgcaggcaggcggaggaggtgcgtgggccgcgggacccgcccg

SEQ ID NO: 141379 - DNA, 122 bp, Homo sapiens
acgaaatggaggaagccagcggaaggttttgtggaagagtgggtattagaactcctagttcgtgacctatacttgcttggggtctcagaaatcatgctggctcttaaattagaaatacagtc

SEQ ID NO: 141380 - DNA, 122 bp, Homo sapiens
gaaggagggatttcgaggataagccctctaagaggggcctgcatccaaacggggatgcagcgtggacgacttaccggggaggagggatggacaagccaatggcagctggtttgcaggagagg

SEQ ID NO: 141381 - DNA, 122 bp, Homo sapiens
ctctgagggggcacaggtagaggcccttcgcgaagggattagcatagtcccaccccccggcgcgagcctcgggccgggcgctgattgggcaggcagcggccgacgcggcggcgccgggcgca

SEQ ID NO: 141382 - DNA, 122 bp, Homo sapiens
ctgtaacacttgccatctttaagagctgtaacacttgccatctttaagagctgtaacactcgctgcgaagaatgaagaacgccgcgcgcaccacctttaagagctgtaacactcactgcgaa

SEQ ID NO: 141383 - DNA, 122 bp, Homo sapiens
tgaatatctgccgaggcaggcaacccctccctgacacaatcttcactaacaggaaaagggcggtaacctctggcagctaaggaatccctattagagcttcacctgcagataagaaaaggcct

SEQ ID NO: 141384 - DNA, 122 bp, Homo sapiens
ttctggccttggggttccccactttcccagccgtgaagcagagactgggctggctggagccggctcacagccccaagtgggcctgggacccagtggtagcagatacaccctgggtatccaag

SEQ ID NO: 141385 - DNA, 122 bp, Homo sapiens
accacacggtcattgtctattcggagcagctccacgaggatgggcaggcctttctcttttcggacagcggctcggatatatactgaccactgcaaaaacagggaaggcgaagggcgttagaa

SEQ ID NO: 141386 - DNA, 122 bp, Homo sapiens
gggctgggacagcaggaggatagtcttgaggaggagcgtggggtgctagatgtgtaactacgtcccgaactggttcctgtgtttttctagggcatgtggactagggatgggtacttgagtag

SEQ ID NO: 141387 - DNA, 122 bp, Homo sapiens
cctcacaaggggctccaactgtggggggtctgtttccgcagaccgctgactttcctcacacggggcaccaattgaggtattgctcctcacaagagggcgttagctgcgggggtctgcccaca

SEQ ID NO: 141388 - DNA, 122 bp, Homo sapiens
atcctggcccggggtgcacggttgtgcgggggacacacttgtcccgtcctgcccgagctgcgacctgggccagagaagggagcggagctggcatagccccagccccagctcactggggcgcc

SEQ ID NO: 141389 - DNA, 122 bp, Homo sapiens
gaacgttagtaagcataatgacaggtggcgcctgcgggggagccggtttataaatattcacgagcagaccagactgtcccgccctcaccggaaacaagttggctccggggtcttcatccgct

SEQ ID NO: 141390 - DNA, 122 bp, Homo sapiens
ctcctctcagtggctggcgaggcgcagcctggtgcgggcgccacggggtcgggctgtgatcgcctgtggcctccctgcagggctgtgactccctgacgcagatccagtgcggccagctgcag

SEQ ID NO: 141391 - DNA, 122 bp, Homo sapiens
taccgcgatgcgcgcgtggaactctgagggaagagttagccccggttcccagccgcgggtcgccagttgcccaagatcaggggtccggctgtccttctgtcctgctgcagactaaaggtctg

SEQ ID NO: 141392 - DNA, 122 bp, Homo sapiens
tcatgggctgcacactccaccagctctcctgagactagactagctctatccattgctcaccgatgcaccctctgtgcatgtgactggggcctgtccccagcccctgctccctgcccatcgga

SEQ ID NO: 141393 - DNA, 122 bp, Homo sapiens
taagggcatctttccacagcgaggagggaggcggcccggcgcaggaggaggggtcgcttccgcggctgaggagactagaggctgcggcagcccggctcccaaccactcccttcctctccctt

SEQ ID NO: 141394 - DNA, 122 bp, Homo sapiens
tctggatccaagtcaaattttcagtgatggaagaatcacacatcaccttgtggatttgaacggctcctcttcagttgtctcccacagactgccataatttgccccagaatagagtccctgag

SEQ ID NO: 141395 - DNA, 122 bp, Homo sapiens
taaatagagattaaaaaaaaaaaaaaggctagatggctttttgtgttgtattttccaagtcgttaactgcaaacgctagttttaaagagaactggacactcaatcaaaatactcctgtctca

SEQ ID NO: 141396 - DNA, 122 bp, Homo sapiens
gccagctccaaatgtttttctccctgtcttcagcttacattctcctacttcttatatcaacgtcgtatcaagcattgagaaatgcttccatttgagccagtctggctgcttgctactcagga

SEQ ID NO: 141397 - DNA, 122 bp, Homo sapiens
cctagagctgtgctgcctctggtctgactggatcaatgaggaccaccccagcagtggcagcgacgacggtgaccgagaaacatttgatggggtctgcggggcccctgaggacatcgagtgca

SEQ ID NO: 141398 - DNA, 122 bp, Homo sapiens
cgctctgcctggctgcggccgctgtggccaacacctccccggagctcctggagagcgaggcgaagaaagactcagccggcacaaggcaaaggttcagcgggttgagggttcaaggacacgga

SEQ ID NO: 141399 - DNA, 122 bp, Homo sapiens
gtcaggtcaggcgaggggccagtgtggggccaccgcagtgccgcaggtcagagcagcagccgcagaggccgtgggaggggtgctgcctgcttaatggagcttcacaatgcacatttgtatct

SEQ ID NO: 141400 - DNA, 122 bp, Homo sapiens
gctgaaagtgaggagcatcgcggacgagcgccgccgcctcgcgagccgccgaggggttcccgcccccagggtaaccaacgctccctcttaaaggcgccggccccggttttagaccgggaggt

SEQ ID NO: 141401 - DNA, 122 bp, Homo sapiens
tttgtctcctgccagactaagtccagcctgggggtggactccggtggggacccagcttggcgccttgcctgagactgggcaccccccggcaggcggggaagcatatgggccgagcgggcgcc

SEQ ID NO: 141402 - DNA, 122 bp, Homo sapiens
gcttggagtgggtcggtgagctcatgctcaggtgagagttgatgacgtacactgtagccacggaggtgtcgtatagggccgtggcggcaaacttgatctggtagtgggacagctccaggggt

SEQ ID NO: 141403 - DNA, 122 bp, Homo sapiens
ccgtcaaggagcgagcgacgtgggaaaccctgagataggacattggcccggcgctgggctcgggtaacgatgcggggcggggagcgcgggcggccggggagggcggcggcccctttaagagc

SEQ ID NO: 141404 - DNA, 122 bp, Homo sapiens
tgtctttccaaggacgtttcagaggatgaaagcgcctcacttcttgtcccactaggacaccgaggtgatcgtctccgcagtgtcataaggaacagtgaggcctcgtgggcttgtgcccctca

SEQ ID NO: 141405 - DNA, 122 bp, Homo sapiens
gcttccgggtttggcgcggcctttgtctctcgctgcatctggagctctaggtcgcctcttcgctactctgtgtcctctgctcctagaggcccaccctctgtggccctgtgtcctgtaggtat

SEQ ID NO: 141406 - DNA, 122 bp, Homo sapiens
gcgtcgctctcctccgagttgtcctccaagtagcggtaaccgcgcaccttgtgctggggccgcgggatgcggggctgaggcggggccacgccccgccgcagcttctgctccatccgcaggta

SEQ ID NO: 141407 - DNA, 122 bp, Homo sapiens
ctgttgtcaccgagcgccccgcccaccgcgttctccgacccgcggccggcagggggctcgcggcctccgccaggcgtccttcggctccgtcagttcccacagggccttgtgcgacatgggct

SEQ ID NO: 141408 - DNA, 122 bp, Homo sapiens
tcatatattttaccgtaatttgcccactgttaacacgttgttaggcaattgaaggcctttcgcctttctgccacatcccttcaaatgaagctttgcccacatttcagaatatttccttgaga

SEQ ID NO: 141409 - DNA, 122 bp, Homo sapiens
gttccgagcccttcttgccacctgccctccctcatggctcccgctcctcctcactctggtcgtctcgggaggccttctctggatggagacctggctaggtccccgtaacttgacctcagcag

SEQ ID NO: 141410 - DNA, 122 bp, Homo sapiens
ttaactcatctcaaaatacacactctagaagtcccttgattctaaaagcataggaagccccggtaaatgccagtttccagcacctgtctgctatggagaagagcaaacatgacacaggagct

SEQ ID NO: 141411 - DNA, 122 bp, Homo sapiens
ccgccatgcgggaccctgccgcggacctcagaccacggcgcgcggtcctgagctgagcgccgtgccttccgggttccgccctcctgggtccgcccacaacagcaggaatgcccaatccgaat

SEQ ID NO: 141412 - DNA, 122 bp, Homo sapiens
tacttgggaggctgaggcaagagaatggcatgaacccaggaggcagagcttgcagtgagccgagattgattgcaccactgcctgggcgagagtgagactctgtctcaaaacaaaacaaaaac

SEQ ID NO: 141413 - DNA, 122 bp, Homo sapiens
cgcggggcgcatgcgcacgcggcgggggcggggccacgtggcgcccccggtctccagggccgctttcccggccttggggctggaggtatccacacaccaacgcttttgcttaccgagcctta

SEQ ID NO: 141414 - DNA, 122 bp, Homo sapiens
tttgaacactgcaccagctacggactgccctctgagaatgggggcctccagcacaggctccggaaggatgcaggcccccgccacaacgtccaccccacacaggtaaagtgctctaaggggag

SEQ ID NO: 141415 - DNA, 122 bp, Homo sapiens
aatcaaaatctagtattacttctctccacaatcttggccccctcaagtcctcagtgccttcgtagctctcccatgcctttaaacagatttcttaaatgcttaatccagcttttaaagttatc

SEQ ID NO: 141416 - DNA, 122 bp, Homo sapiens
cgcttagcttccagtccagaccttccccgcaaatgagtgtgtgctgtgagtgagaccccgcgtgtctgcccttgcagtccgccctgaggccgtgaacatgtccttgggcctgaccctggcag

SEQ ID NO: 141417 - DNA, 122 bp, Homo sapiens
tttgtgtcctcattgtggtgctgtttgccagccaggcaggcagggaggttcggggagagccggaagccacggatgccccagcgagtcatgctgtcaattctgtgcctcagtcccgtctaacc

SEQ ID NO: 141418 - DNA, 122 bp, Homo sapiens
attctggcgccacaagctccgcgccagcggccgcagcgcgcgcgcccagaatccctccgccgtctgtcccgcccacgccaccaccgtagaacagcaggctcgaaactctcctcccatttgta

SEQ ID NO: 141419 - DNA, 122 bp, Homo sapiens
gggatcccacttcggggaggatgggcttatcccggcgggcgcgccaggtgggatctctagcgcctcaggggcccgcgcggcaacagccggcaccctcgggcccgcggacaaagggttaacgc

SEQ ID NO: 141420 - DNA, 122 bp, Homo sapiens
ctctgcgcccggccccctcccctgagtagaaaagcagccgcaggctgtggcgctccaccacgccgtccgggtgggcctagcagtcgctccatttatcgcttgagatctccagccttaccgcg

SEQ ID NO: 141421 - DNA, 122 bp, Homo sapiens
ttccttttgatttggtttgtagtagaagtaatatctttcttcctgggaatacgtctctgacggacattttgaggtcattttcttaaatccaagatcctaaagatctgtagtcgaacagagaa

SEQ ID NO: 141422 - DNA, 122 bp, Homo sapiens
aaaagctgtttggttcagcctagaaaggctagtaaacaactctgggtggtgcagggcctacggaaccaccctcacttcccctagcctgaatttgcacgtaaatccagcaggagacaaagtta

SEQ ID NO: 141423 - DNA, 122 bp, Homo sapiens
atcttccactaatgtatcagcaactcccctggaaaccgagtgtgaggctgaccagcgttccgacccggcactctgctacacgtgtgcagcagcagatgctctggagggcgccggctgcccca

SEQ ID NO: 141424 - DNA, 122 bp, Homo sapiens
tttacaatgtgtgatatgataacacatgttctggatcagcggcaggggaatgtttggagccgtaattctgtccgtctccccattagcaggaagccatgctaaactcacagctggagaagtgc

SEQ ID NO: 141425 - DNA, 122 bp, Homo sapiens
acgcatttcgcactactcctctgggaatggggaacgtctcccgagaactgtgtgttagcacggggacagatgggcaaactgagctacatgagggttggtaaccgggtccctcagcggcagga

SEQ ID NO: 141426 - DNA, 122 bp, Homo sapiens
ttaactagggcagactgggataggccagttcttaaggctggtcgtaggccagcactggggcgggcaaaaacagtttgagtcagaggaagaacaggcaacaacacgtcccagcagagtcttcg

SEQ ID NO: 141427 - DNA, 122 bp, Homo sapiens
tccagggtttgtgactcatcctgaatggaaacacttgtacagcaccacgtggctcctttccgcccctggccgggcggcagtgacccaaccagctctgcactttctttcttcccttttaatgt

SEQ ID NO: 141428 - DNA, 122 bp, Homo sapiens
aaatgcttgtaaggataagctttggaaatggttttcatgtgtctgcaccacagctcaaagcgagtgctgcgggggctcagcccaggctctgggaccgcagcacgtcccgggcccgacacacc

SEQ ID NO: 141429 - DNA, 122 bp, Homo sapiens
accggggtggcggggacgctacgcaccttcaggggccaggtttccttccatttcaaaccacggcgttttgttttcattcagagtcgaccctctggactgactgctcggacccgacagatgct

SEQ ID NO: 141430 - DNA, 122 bp, Homo sapiens
cggggccgctcggcggcgctgcgattggccgcgttcgggtaacctctatgcaaatgaggccgcgccgcctccgcgccgccggagacccggcgagttggcgggcgaggaaggggcatttgcac

SEQ ID NO: 141431 - DNA, 122 bp, Homo sapiens
caacctgaggtgtgaccttgagcgtacaagagtctcctgcgaatcaacgatgccacccctcgcagaacaaggcccggtcagaggcctgagtctcaccgttctgtctgaggcccctgatgctg

SEQ ID NO: 141432 - DNA, 122 bp, Homo sapiens
cttccccacttgaaaggcatcttttgcccaagaatcagccaaaggagtttccggttcattcggaatccaggtcttcagcacaacatggctttttgctttttaaattttttttccctacctgt

SEQ ID NO: 141433 - DNA, 122 bp, Homo sapiens
cccggctctgggatttgggaggagctcggaggccgctcgggcacctcgctggacactatccgtttgcgccccggtggcgcgggagggtccggagcggagcgctcgtctctcctcagcggttt

SEQ ID NO: 141434 - DNA, 122 bp, Homo sapiens
ctaggagacgccagggaacataccgcaggcaagtcgccgcagagctggctgcaagacaggcggccttacaaattgctctgttaaacctaaaagctccagcaatcccagggattacgaggcgc

SEQ ID NO: 141435 - DNA, 122 bp, Homo sapiens
ggtgcggtcccgggtgagcagcgcgtggctggtgggcggggcagagccattgttcgcaggcgtaccgagtcccccgcgctcgcccgggagggaggcggggcttcccgcgtcccccaagctcc

SEQ ID NO: 141436 - DNA, 122 bp, Homo sapiens
atgttgttggggtctgtgtctatctgaaagccaccaactaatgtggttaaatctttggagcgaaagtcagtaagcagcaatccctgcaccattttcaagtacctttgtaatgtaccgacgta

SEQ ID NO: 141437 - DNA, 122 bp, Homo sapiens
aatttggaaaaccagcccgcaagtgatgcagaggcttttgaactgcaaaagagctctgggcgtacaggacagtgagtcacacggtgcctggtccgggcccaaccctggacaccaacaccact

SEQ ID NO: 141438 - DNA, 122 bp, Homo sapiens
tttgtaacttcacttcagcctctggttggctgctttctgcaaccaatcagactgattgcgcgttacttcatttacatgaggtgagcattaggtggccaataggaagcttctagagggtattt

SEQ ID NO: 141439 - DNA, 122 bp, Homo sapiens
ttttctgcttctccttttcagggtccagtctgtcccttcctctggaatggcagtttacaccggcagtttacacaggatggcagtatctctgggtgtaagaaacctcagaactttcccctgct

SEQ ID NO: 141440 - DNA, 122 bp, Homo sapiens
atctcagtgttttagcatgaaggcctttcataatctgatcgtatcttccctttctatgatcgtcctccctagtctcttctctaaatatccaaatattacttcgtcattccagaagcagctct

SEQ ID NO: 141441 - DNA, 122 bp, Homo sapiens
caagcatggagttaataatgcagactttcaaaaaccgaggctggcagagggaggcgagggcgggaatgaaagggccggtgtggctgtaattgggaccatgtgaacttcctcggaggaggatt

SEQ ID NO: 141442 - DNA, 122 bp, Homo sapiens
agagcaagatgacaatatttgtacagcggggtttggagaggagcccccgtgagagcccagcgtctgagagagccagtcctttgaactgtcccaccctttgttatgacaagagacttgataag

SEQ ID NO: 141443 - DNA, 122 bp, Homo sapiens
cacacacaccctttcattccctgtgttgtgtctctgtatatccccagttgtcagcagacccggacaatgctgtgagagaagcattggggcacaaatagagcctccgggctcccactgccccc

SEQ ID NO: 141444 - DNA, 122 bp, Homo sapiens
gtgctgttgactggcccagctgtaggccaggcacacactgccccattgtactgtgctttccgacgcagcccttgtcatagcctctaatccttgggctgcttctctcccagcccctcagagcc

SEQ ID NO: 141445 - DNA, 122 bp, Homo sapiens
ggctgtcagcgttttgctcaccactggattctcagggctccgcactcaggaaaggttcagcgaggtttgtgttcagggaactggggagggcggggccgtagcgaggagcagctgggcccggc

SEQ ID NO: 141446 - DNA, 122 bp, Homo sapiens
aactgaatggtatgtaattcagttgcaagtcttccagtttatgaatcaaaccacattaagcggagtagtataggttcttgcttccctctcttcttcctgccacactgcctccccacactgcc

SEQ ID NO: 141447 - DNA, 122 bp, Homo sapiens
aaaagtgttaaaaaagaccaagcccaggagcttaagacaaaatctggcagttccctcccgcggccgccaggggtcagtgcgcacctgaggagggggaggcccgggatcggcgagcgcctgag

SEQ ID NO: 141448 - DNA, 122 bp, Homo sapiens
cttgcctgaactcctgccatagtcttaactggtctccttgcttcctgtcttatcctccaccgtctttcttttatactgacacaagaatggtctttctgaattgcacatgtgagcatgtcact

SEQ ID NO: 141449 - DNA, 122 bp, Homo sapiens
aaagggggctgcctgcgcggatccttttcccacaagatgcaagtaaaaaagcaccgctgacgccctgggagggtcacagagagacaggcggggcggttgaccagctgaacggactcacttct

SEQ ID NO: 141450 - DNA, 122 bp, Homo sapiens
acagcctgcccgtctgcccttcttctcggcttcccttaagacacaaggtgacgacacggacggtttcaagtgagtgcaatctggaaataatctcagtgcaggggaggggttgaggccaaaga

SEQ ID NO: 141451 - DNA, 122 bp, Homo sapiens
cccagcctcttgttttaagcgaatacgagctccccatctggagggacctgctgataacctcgtgagaagacctatagatccgctggggtggaggagccatctgcacttcatcttcttaaagg

SEQ ID NO: 141452 - DNA, 122 bp, Homo sapiens
gccgcgcgtacctggggtgggggaaggggagaaaggcggccagttcggatctgagccactcgcagggtcacgtgacatcctgcctcgccccgccccgcgaacaaacctaggcggggagggat

SEQ ID NO: 141453 - DNA, 122 bp, Homo sapiens
gggtgtttttcaggggtcaagacagattggcgacacagcaggaggcgcccaaggacatgacgttgagcctctcagggtcccccttggccgggccagggagcagcgccccacgctccatcacc

SEQ ID NO: 141454 - DNA, 122 bp, Homo sapiens
cttaggcctgcagaggccgccgggaggctggagctgggcctggagaggccgacttcagcacgatttaggcctgcagaggtcgccgggaggcccaagctgggcctagaggagcccaccgaccg

SEQ ID NO: 141455 - DNA, 122 bp, Homo sapiens
gatacttaggaagcaattgaatcctacagcttggggatccagatggggattaatgtgagacgggataaaactatactaggagaggctggacacggtggttcacacatgtgatccaggcactt

SEQ ID NO: 141456 - DNA, 122 bp, Homo sapiens
tgcactcagatccttcgactatgagcagtttcatgagctacagatgcaggtgacagccagcgacagcggggatcctccactcagcagcaacgtgtcgttgagcctgtttgtgctggaccaga

SEQ ID NO: 141457 - DNA, 122 bp, Homo sapiens
actattttatttttaaaataagcacttggcgtgccctcgcagatgtctgagctgagaggtcggggcgatggtagaagagcagtcagtgtccattcttattcatattaagtagccaagtctgt

SEQ ID NO: 141458 - DNA, 122 bp, Homo sapiens
tcaacacaggggcactgttcccgcctattaatgacgcaatgaacccgggaagacgaatctcgaccactgtttcgcaaataccgcgtgtgatttattaaatgccgtctctccgagtcccaagc

SEQ ID NO: 141459 - DNA, 122 bp, Homo sapiens
gtactacaccccggacaggcaggtgagccacaggcttgtcacagaccacatacacacacacgcacacacacgcgcacacacacacacacacacacaaagagtgcaattgagagccttgggcc

SEQ ID NO: 141460 - DNA, 122 bp, Homo sapiens
cgcccttacttttcctccgaaattgtgagaaggtgccttcatggctggagtttggtttcacgcgcctgggagaagagcagggcacgggtgataaagaaggcgcagtgtcggtctgtcggtgt

SEQ ID NO: 141461 - DNA, 122 bp, Homo sapiens
ttggctcacctgttaggaggatgctccttggagccaggccttgtgggtattcttgggcagcgcttgacttctgaggacatgggcacatgttttcaagagaccaggcaaattatagttgtctg

SEQ ID NO: 141462 - DNA, 122 bp, Homo sapiens
aatttttctggcaaagacccagtgtttataaataaatcaatgcactctaattagtgaacacgggctagggtcagggtcaggaggtgggccattctgccatacaccagcaggctcagctgcag

SEQ ID NO: 141463 - DNA, 122 bp, Homo sapiens
gctgccggggcggcatggcacagcgaggcgcgctcgggaccagccggctcagcgagtacgcgcagctggtgttcggcggccgggcgatttctgcccagttaccttctctacctcgtaaaact

SEQ ID NO: 141464 - DNA, 122 bp, Homo sapiens
agactaagggccaaagctgaactcaggagcagccagcatggagccggagtggggaagccgcggccagaagcagtggagtttagacggacaatgtaagaagctgactctagcctggatagcgc

SEQ ID NO: 141465 - DNA, 122 bp, Homo sapiens
atcctctcgcttgttcactggggcatgtacagtgggcacgggaagctggaattcgtatgacggagtcttatctgaactacacttactgaacagcttgaaggccttttgagttctgctggaca

SEQ ID NO: 141466 - DNA, 122 bp, Homo sapiens
agcagcgcctagggctggaaggcggctgcggctcaggaagtcacccgagcaagcctccttcggggccggccgcacccgccgcggcgcgctccatgggggcgcgctccccccgggcggcccgc

SEQ ID NO: 141467 - DNA, 122 bp, Homo sapiens
atgtgctgtaccaaacccttgctgtgcaagaccctaggggagatgactaatgccagatggcgtggtggtgaagagagaacctctgattctgcatcttccattcagatgagcgagagagagag

SEQ ID NO: 141468 - DNA, 122 bp, Homo sapiens
gcccaggaaggaacacatgacccttctgtctgtgactgttgctgagtctctgtctcatgtcgtagaattgtggataattgtctagtgaccctctcatcactgtaaccatcgcgcctggccta

SEQ ID NO: 141469 - DNA, 122 bp, Homo sapiens
attgtcttaattaagcatgttgaacaaatgactaaatacatgttttgaaaagtggcaactcgcttgataatgccaaaacctttaaagaaccctactgggggcaggatttaagaccatttttg

SEQ ID NO: 141470 - DNA, 122 bp, Homo sapiens
cgggacggagcgggaaagtcctgcctaccttggccttcccagccaatcgcagcatctatgcgtcagcctccggttcggttgcgctgcgcgtagtggtctgggcgacctgagggcggggccgg

SEQ ID NO: 141471 - DNA, 122 bp, Homo sapiens
gagccggcacccagtttccacccctccctcaaggcggcggtcctcttctatccgcagtcccggacctggagcgggtcagaccccgacttccgcccctgactccccaggcggtcacatgaccg

SEQ ID NO: 141472 - DNA, 122 bp, Homo sapiens
accagaggatggctgacacgaaggggcacccgagacagcgcctgggctttttcccgcccgcggttccaccgctctgaaaccgatttctaacagagaggtaattggggccctgcggttgtggt

SEQ ID NO: 141473 - DNA, 122 bp, Homo sapiens
accccgtagcaggagaggcagggaacgccacgtcgctggtacaaatggaacaaactccaacgcccgtctagagttgaagcttctgggcagaagggagctttatgatccacgcccaacccata

SEQ ID NO: 141474 - DNA, 122 bp, Homo sapiens
gcttcacaaacaaaacccggatgtgacttggaaacggaaaaaaaaaaaggagcgggggtgcgcggagaacacaaagtaaaacttctgctgttcccagtcctgcagccccagcccagccgtcc

SEQ ID NO: 141475 - DNA, 122 bp, Homo sapiens
ccgatttgctaggtctggtgtcttaataaggagacaaggacacagacatgtacagagggacggccccgtgaggacacagggagaggacaccatctgcaagcccagaagagaggcctcggaag

SEQ ID NO: 141476 - DNA, 122 bp, Homo sapiens
ggtctgaacttgtgattgctgcttggctggggatctctgccatacaccaacagggagccccgagagcacagctgctgctggaggaagtcagcatggggaccaccagtggcaggctgttgaaa

SEQ ID NO: 141477 - DNA, 122 bp, Homo sapiens
ctccaaaacctacactcagtcctgggagcgattagcgccaacagctcagagaaaacgtgacgaaaaccagtctgtaaaacccgagcctgggagaggggcttcggtgcgcggggggaatttgc

SEQ ID NO: 141478 - DNA, 122 bp, Homo sapiens
gtttcatattagtatatttagagcagcgtcattctttttaatggctacatagcagtttagcgtgtaggtggatcataatttatgtagtcatttggacatctcagcaatattaatgctttaaa

SEQ ID NO: 141479 - DNA, 122 bp, Homo sapiens
aattctgtaccctgcaccccatgcatccccatcaaaagctgggttgatgattggattcctcgagctggcgtgggagtgggagagctggaacaagggagcagggagaggaagggaaccagggc

SEQ ID NO: 141480 - DNA, 122 bp, Homo sapiens
ggtaagggaatgagcttcgctgggctgagtcttcacatccaggcctcacagtgctcagcccggggcctgggtctcccccagtcccactctactgcttgttccccactccatcaaggtcccag

SEQ ID NO: 141481 - DNA, 122 bp, Homo sapiens
tagaaccctacaggatcctacaatcctttgcagcctggcctcttccacatgtcgagttagcggtttctccctgtctttttgtggcctgtaactcatttcttccacgggcttctagacaggct

SEQ ID NO: 141482 - DNA, 122 bp, Homo sapiens
cgactgctttgggagatcccagagggggcattctgaagtcctgcagaagagatgctgtgccgtgaggggtgaggggtcgctggaggccagaccagggctcccaggagtcctgcattgagaag

SEQ ID NO: 141483 - DNA, 122 bp, Homo sapiens
caggcgcggacctggccctcgcacgggtcggggcgtccaacttggcccgcagccgcgacccggcccctgatttatcagcttcgggcggccgcgtcctccaatgactctccaaggcggcgcgg

SEQ ID NO: 141484 - DNA, 122 bp, Homo sapiens
tccatgccgttggccagcagcagccgcaaggagccatcggccccgatgtagtagctgttccggacttggtctgcaggagaggacaagcacagactgctcagaaggaacgaaggtggagggag

SEQ ID NO: 141485 - DNA, 122 bp, Homo sapiens
agaggcttgagcgtctgcagattgtgctatctgagtggagatcctgaaaccaatcacccacgaatagtgagggatgactgtatataatttttatttctcaattttaaatataaaacataaaa

SEQ ID NO: 141486 - DNA, 122 bp, Homo sapiens
tcctgctctaaaccgcctgatctcatttcttcttctctcctcccagataaaagtttccttcgcccgggagtcggttgttcccggctgatcccgggaagccccgcctgagccccggtccgggg

SEQ ID NO: 141487 - DNA, 122 bp, Homo sapiens
tggggcgacgccaaaatatgcacgaagaaaaatgctattaggtcaccagcccttgagaggcgggaagtcgggaggttgggagggtgctgggggtgagaggggggcgggggaggattgtgact

SEQ ID NO: 141488 - DNA, 122 bp, Homo sapiens
gactcacccatctgagtagggaataaatataggataaattgttggcagaaagctttcgatcggatgaattttctctgagcgaaaagccaagctttctctaagtcatttttacccacatagtc

SEQ ID NO: 141489 - DNA, 122 bp, Homo sapiens
gctgccgcgccatgtcctacttggtctgctgaagggcggcctccagctcggacagcttagcgttggcatccttaatgaccagctccctgcgctgctccgcatctgcgatgccggcctccagg

SEQ ID NO: 141490 - DNA, 122 bp, Homo sapiens
ctgacccccgatgatggagggagcaggccaagtggccattctaaactcattgagatggtccgaagacaggataacgtggccaggccagctggctgggaactcttcctgggtcaccctcccaa

SEQ ID NO: 141491 - DNA, 122 bp, Homo sapiens
tacctgggggagttctgttcctttccctcccggcaccttggatgcgctgggactggtcctcgtggttgctgagcatgctgctctgaacggttgtattttatttgatgaaaaataggaggccg

SEQ ID NO: 141492 - DNA, 122 bp, Homo sapiens
tcattccagctccgcgaatagttggtgccgccgctgctcagccgagaccccggggctctgcggctcattaccttccccgacacgacatggccaagcgccgccgcccgaaccggccgccgccg

SEQ ID NO: 141493 - DNA, 122 bp, Homo sapiens
gaaccatttcctagtgccttgctagacaaacataaaggggcagggttgtggggaggggaacgtttttggtggtgtgtgcagttcctactggatgagtgtgtgtttcttaatgtctcatttca

SEQ ID NO: 141494 - DNA, 122 bp, Homo sapiens
atggcgcgcgatgatgacgtcaaacgcaatggctcccgcgggttgtggtcggagcgctggcgggggcgggatcgtgacgttaagggcggtgcccagtcagcgaggtaggtcgggaaggcagc

SEQ ID NO: 141495 - DNA, 122 bp, Homo sapiens
gaattgctgggggcccagcatgcactggctttgagagttaaagactgtggggcccagagccgccacactttcatgaattttacttccaggagtctcaccagtgtctcacaaaaatcctactt

SEQ ID NO: 141496 - DNA, 122 bp, Homo sapiens
ttccgaagaccagacccgcccccaaaccttccccaggaccagacccacccccaaattcgacggggctccgaatcccatcccccacagaaaggtcaaccccggccccctcctcccagtgtggt

SEQ ID NO: 141497 - DNA, 122 bp, Homo sapiens
aacaacagtgcctgagaatcccacggctctggggaagtgagccccgaggatgaggctgctcgcctggctgattttcctggctaactggggaggtgccagggctgaaccaggtacagcactgg

SEQ ID NO: 141498 - DNA, 122 bp, Homo sapiens
gtcgtggtctttgctggtgggaagcagccgtccaaactggtagctgagcctctgcctacacgtttatgagttttatacactgggttgcccgcatgctttcccgtcatcaatttcctcaaccc

SEQ ID NO: 141499 - DNA, 122 bp, Homo sapiens
cttggtctcctgacctcgtgatccacctgcctcggcctcccaaagtgctgggattacaggcgtgaggcaccatccctgcccttgtcttttgattcgtaaaaggtgtttgctgaaataaatgg

SEQ ID NO: 141500 - DNA, 122 bp, Homo sapiens
tttgagtccttccctctcctggcttgtgctggagccaagcaggctatggctaccaatcagcgctcagaaaagacgcatgcgtcttcgaacgaacgcgacgtacggttaactttgacccaaag

SEQ ID NO: 141501 - DNA, 122 bp, Homo sapiens
aaccagtggatttattacacatttcttgagctttgctgtccgatgtccaggtccccacagcgccatcttgctgcaagtctcaagtggagtttgtaaaaacagaagatgtgcaggggtaggag

SEQ ID NO: 141502 - DNA, 122 bp, Homo sapiens
agagcatcccttgtgtggcactgcctgtggtgacgacaatggtggcagtggctgggaaggcggccgcggtggtgtgggtgggggtggctccagtgctggccatgatcctggctctggctcct

SEQ ID NO: 141503 - DNA, 122 bp, Homo sapiens
caggcagtcctctagactgcatccgccatgggcctggacgctgctcccgggggcagcccccggccagggccaggcacacccgattcctggagcgtcctaggttcctctaaacccgcggccag

SEQ ID NO: 141504 - DNA, 122 bp, Homo sapiens
cagcaggccccaaatagccccagcacagcagtgttctgggtgtccagttcccacatttcccgagcagcctgacgcatgccaggtcctatgcaccagggatattaaagtgactcaaggaggca

SEQ ID NO: 141505 - DNA, 122 bp, Homo sapiens
aggagaggagacgccgaggaggagtttgaaggtccctctttcccaatgccttctaactgacgtctcccgcgagcgactgctctgcccccacttgggaagtccagggaggcgcaaggcggcca

SEQ ID NO: 141506 - DNA, 122 bp, Homo sapiens
acaagaagccaagatgtgactgatgcacttggcactgcttatggcaagtccaggaaaccacgatattcacccacagaaaacacaccaggggaatcagtgtctcaggaggtgaatgtactgac

SEQ ID NO: 141507 - DNA, 122 bp, Homo sapiens
gtgagggcgtggcctagagcgtgaggccgcgtcctggggcggggtgaggggcgagcggggcgggcccacggcatgctgcgagcccagcctcccgccaagcaccgtcccccatccagccccct

SEQ ID NO: 141508 - DNA, 122 bp, Homo sapiens
agccacagccaaggccctgaccacttctgtgccagttgtctaagcagagcgcctcagggacgctggaaatgccttaaggatagaggctgggcatcacatcaaatgggactgtggtgtttggt

SEQ ID NO: 141509 - DNA, 122 bp, Homo sapiens
aaagacatgcctagggcaagatatggggaaggggcatggcgcttccatgccttccctggacgtgccaccctccaagaagctccatgcatgtgttcaggtatacagaagctcccaggtacagt

SEQ ID NO: 141510 - DNA, 122 bp, Homo sapiens
gatgaaagagcccggcgctggagatgttaagggcccggcgctggagatgtaagggcccggcgctggagatgaaagggcccggcgctggagatgttaagggcccggcgctggagatgaaaggg

SEQ ID NO: 141511 - DNA, 122 bp, Homo sapiens
ggagattcttacataattgcaaaggctcttcgggacactcctgtctcaggaattacctggcgattaaaacaaaataaataatgggatttaaaagtactccagatttctgatttcaaatgttt

SEQ ID NO: 141512 - DNA, 122 bp, Homo sapiens
agggcacccggacaagccgcggttggccctagctttgactcgagcgctcgcaagcagcagcgtgcgggctgcctcggccaaccccgtcttctcaatattggtggcctccattaaagcacaga

SEQ ID NO: 141513 - DNA, 122 bp, Homo sapiens
tgcacatgacagggtctcatctttaaaagccctttgtttctttgaaaacatgtattcagtcgaacaataatctccccatttctgaatactatgtgacagactacagagtcacttgcagttaa

SEQ ID NO: 141514 - DNA, 122 bp, Homo sapiens
agctttatgaagactccacaccactcatacagctagataaccaaagataacaaccaaccccgcctcctggctgctgtcgccgcctcttccacgcagcctcccggccgccgccgccgccagca

SEQ ID NO: 141515 - DNA, 122 bp, Homo sapiens
gggctgcagagcctgagcaccccggaccgcgcccggcgagggcggcctccctgcgctgagcgcgacctgcgtgtcctgctctcggctttcgtgccggttcagaagaacaaggccggaaggtt

SEQ ID NO: 141516 - DNA, 122 bp, Homo sapiens
ggctgacggcccggagcgagggcggcagtcaccgcacagcctcctcataccttctacaaccgcctcacaatagcacccatccgctaggagccgcgtctgcactgcttccgcggcccgccgcc

SEQ ID NO: 141517 - DNA, 122 bp, Homo sapiens
ggaaaccgtcggcgcccccacccgcctcggcccccgcctccgccccaggctcggggctcgcgttacagttctcctggtccaggaggctccgggccggctcctggaactcatagaaatcctgc

SEQ ID NO: 141518 - DNA, 122 bp, Homo sapiens
gcgggctttcccgttagggttcctcagtgcttccccagttgctgttggccactcagggcccggggacaccctgccacccggtctggagccggcctcgtctgccagcgaacagccaactttag

SEQ ID NO: 141519 - DNA, 122 bp, Homo sapiens
aagttctacctggctttcgagaactcgcagcacctggattatatcaccgagaagctctggcgcaacgcgttgctcgctggggcggtgccggtggtgctgggcccagaccgtgccaactacga

SEQ ID NO: 141520 - DNA, 122 bp, Homo sapiens
gggtgccccacccttagtgagaccagacccagaagggtgtggcctgatagccttggtttccgttgcagggagtcctgaggtcctgagtaccaggagctcagggcagtgcggatgacttggga

SEQ ID NO: 141521 - DNA, 122 bp, Homo sapiens
actccctgcagaaaagaagagtcggggacctcctagccagttacattccagaggatgaggcgctgatgcttcgggatggacggtaagagcaaggagtggctcaagcctgagggttctgcggt

SEQ ID NO: 141522 - DNA, 122 bp, Homo sapiens
acttgcccaacgagcctggccatcctgccagcctgtgaggaagctgcgtgtcacagggcccggcccagtgcctggggcttgacaccaccctcttgtgggaggggttgctcagagagagccct

SEQ ID NO: 141523 - DNA, 122 bp, Homo sapiens
cgtcagggaggggcccagggggcgctttcccaacactggtcgcagtcattgttggtataacggctagagacgcccagtgagttagcatggagggcagtgggaccggaaaaagacgtggaaaa

SEQ ID NO: 141524 - DNA, 122 bp, Homo sapiens
tgaagaatagtctgtgggctgctttttttttttccttttactggagctgtacagtggagtcggtgattgctgctgatcataatcaagtattttaggagcttatttagacatgtatctgatag

SEQ ID NO: 141525 - DNA, 122 bp, Homo sapiens
ttcccgcgttgagacgtgcggtccgcttgtgcttttagaactaaagactgctgcagagtccggaggaagaagtcacctagaaaaatctgggacagggcagtaagcttccttcttaatgtttg

SEQ ID NO: 141526 - DNA, 122 bp, Homo sapiens
ctgcggtccccaagtcacgtctcgcagctggccggtgcccaggtgagcgacctgacgggtcgctgcccgcctcaacctcgctccttcgactagctcctagaagccgccgtcgacaagcttct

SEQ ID NO: 141527 - DNA, 122 bp, Homo sapiens
taccaggctccacaaagtggtagtgaaggtgagtaccaggttccacaaagtggagaggtacgagctttttcctcaggagcatacaatcttggaggcagcatgcttttacatacatcacagtt

SEQ ID NO: 141528 - DNA, 122 bp, Homo sapiens
ttctgaacgggcgagtctcagtgaagggaacatggtgacaaaggctctaacttcacctgtcgctctgtgcatccatctccgaggctgcacaatgacctcaacagccctcagcaaagcggctg

SEQ ID NO: 141529 - DNA, 122 bp, Homo sapiens
caggccgcgcccgcccctgccctcggcgagcggctcagattcagctggggggcggggacgcgtttctgtcctctgccagctctggcaaggctccgtgttggagccccctcaggagaccactt

SEQ ID NO: 141530 - DNA, 122 bp, Homo sapiens
ccggagcttgccgagacgtggccggggtgagctcagcaaactctatttatgccccataaccgatttgcatgttttgagctcttccatcgtgtcgtgagataccagttaatcagcctattcca

SEQ ID NO: 141531 - DNA, 122 bp, Homo sapiens
gtcgcgtcacttccggagcacgctgggaactacggcaggctagggcgcaaagagagcagccgggcggccccctggtgccacctgctggcctcccgtgtgtggcaagcactgccgctttcccg

SEQ ID NO: 141532 - DNA, 122 bp, Homo sapiens
acttgggaagcttaacaaataacgtgggtttgtggtagctccttgacaggtgtgcttatccgtgtcgcctgtcttggcttccgatgcaaagccagcttgggaacccctggcctcatctcctt

SEQ ID NO: 141533 - DNA, 122 bp, Homo sapiens
agcacctcctcagcccgcggggtccaccaaggagaccctcacaaacaatagcatctgcggcgaaggaaccacccccgcaaagggcagaagcgccagatcctaccagccaattacccagacgc

SEQ ID NO: 141534 - DNA, 122 bp, Homo sapiens
gtggcgggctgggggcgggcggccctgggtcccagcctcctgctgcccaccgctgcccaccgcagggctggcacactgccgccacctgtccacggtgcggacccacctgtcggcgctggtgc

SEQ ID NO: 141535 - DNA, 122 bp, Homo sapiens
acgtgagtgcctgctgtgccacatggccatcactgtggcatcggctgggcctgagcacaccgtgcttgccagccacgtatcgtgtggcttttcacctgctggtgcctacaccatcttctctc

SEQ ID NO: 141536 - DNA, 122 bp, Homo sapiens
gcactcatgactataggcactatacactgttcattgtaagtcacagttttgcagaaaaaacgaagtcaggaaccactgtctagagttacatagaggcatcatggagtgaggaagataagaac

SEQ ID NO: 141537 - DNA, 122 bp, Homo sapiens
gcttgacagctggatgcagcctgccctggaggcttgtaagcctctgagggtggcactgggcgttcttgccatcactagacagcagcacacccagggctgggcagcggcgggaaggtgctgag

SEQ ID NO: 141538 - DNA, 122 bp, Homo sapiens
attaaggcctaactggttggcctttttgaagacacccacctgtgtgctatccatgccaaacgtgtaacaattatgccaaaagacatccagctagcatgccgcacacatgctagcacatggag

SEQ ID NO: 141539 - DNA, 122 bp, Homo sapiens
agcagggcagcaaacgttatccaatcaggactgctgggctgggaaccgtccaatcaggcacgcagctggagcggacaggacggcttccgggatttggcggggcctttgtctctggctgcagc

SEQ ID NO: 141540 - DNA, 122 bp, Homo sapiens
gagactccgtctcaaaaaaaaaaaaaaaaaaaaatttacacattacctttggtgcagccacggctacaacactcctactaatagatgagcatcatccagggtagaactaggtaggagtggga

SEQ ID NO: 141541 - DNA, 122 bp, Homo sapiens
tgtccttattcttcataaaccttggcacatttttattttacatttatttctgtgatgattcgctggatgtttgtctcctccactgaactaaccgtccccgcccctctccccatggggtcaag

SEQ ID NO: 141542 - DNA, 122 bp, Homo sapiens
ctgcatccccctccagatgggtttcctggaatctagatttcccaggttccaaaggacacccgagtctcatgcctggaactcagtgagactaattcacctctcctctgccctaatcttcatct

SEQ ID NO: 141543 - DNA, 122 bp, Homo sapiens
cccgtggctcttattacagattcagggtgatgatctgagtgtccaccttgctgattactacggtacccccgcgtgtggcacagggtgtggcacacacagaagacaaggagatatgttaaagc

SEQ ID NO: 141544 - DNA, 122 bp, Homo sapiens
tgggaagaggaggcgtgggtagggatgcttagcccgagatccgacagcagggaaccggagcgctccgggggaggggcttaatgctggggaagggatgtcttaaaagaggagaagctttaaat

SEQ ID NO: 141545 - DNA, 122 bp, Homo sapiens
ccagagatctctatcaaccagggtcatctgccggcaatgccatagaggcggtcccgggggcgggccttcttgggtcacgtggacggcctcgccccgcccccgtcgaggcgccgcgcacgtct

SEQ ID NO: 141546 - DNA, 122 bp, Homo sapiens
atccaaagcgtgccatgggaccacaattgcacacgatcaatgagtctcacaaactgaccacggcttatctgaggcagtttagggttgtgcaagagcccagcttttaagggactgtgggttgg

SEQ ID NO: 141547 - DNA, 122 bp, Homo sapiens
aatagttgtgggagaacagctgtactgatcagatgcagattttaaaagtggatgaaatagcggtattgtgtcatcaaatcttccagccctgggagcaaatgataagacatgctctttttttt

SEQ ID NO: 141548 - DNA, 122 bp, Homo sapiens
gagggcatgcaggtggctgagggcctggtgcaccctgaccttccccgagttcagggactccgtgggggtggtgcccccacctgtctgaagaagaatccatcacacaggtggtacgggcatct

SEQ ID NO: 141549 - DNA, 122 bp, Homo sapiens
ccctatgcatttttaacacggaaatcccttgggacaccaaagtgacttccacttaggcttcgcctataatcagtgtaccaaaataatatgagcatttccctgttaattaaaactgggctgga

SEQ ID NO: 141550 - DNA, 122 bp, Homo sapiens
aagcagagggggagccacaggtgatgggagccacaggtgaccagggtggcccgaggaggccgccaccacccgacgatcaggtttccgcagcgcgccccgcagcggggccccgcgcaggggac

SEQ ID NO: 141551 - DNA, 122 bp, Homo sapiens
aagggaatgcttacctgtgcttgaaccgcaccatggctgcctccgcgctctccggtccggcgtgcaaaccggatgtgaattctgtccgctgccaatgggaagcttgcttccgcagcctttca

SEQ ID NO: 141552 - DNA, 122 bp, Homo sapiens
cttcttaatgtgctggcacctcagaataaaactacagcccagccatttcagcagtcattccgtgtgtgcttgtggcctacaggcagacagcccatgcagagtttagaaattaaacgtcttgt

SEQ ID NO: 141553 - DNA, 122 bp, Homo sapiens
cctccaagcgctcttcacaagcctctcgactttccagaaaataggccagactgaagtccccgctgggtcgcccgtgcccctaaagcaaacccccggcgccggccaagacgggatggcggcga

SEQ ID NO: 141554 - DNA, 122 bp, Homo sapiens
gccggaaggtaggaaacctgagcgtttgaaagcgcgccaaggcggccatgggcgtgtttccggggcggagcgcgctgcgggcccgcccgcgggaaggcctgccggcttctgggagcgcgagc

SEQ ID NO: 141555 - DNA, 122 bp, Homo sapiens
tcctagctttcgttcagaagttgacgtcagcttcggagacagaaattacacactctacggcgaggggtcgggttcaaacttagtgaaaagccgcggagaggtgggctaagggtgggtgagcc

SEQ ID NO: 141556 - DNA, 122 bp, Homo sapiens
catttctcatatacttttcttagcttcctaacatttagggagctccttgagggcaaggatcgtgccttactgtgctttgtatttgcagcaccctgctttttctggcataattttgaattgcc

SEQ ID NO: 141557 - DNA, 122 bp, Homo sapiens
ttttaaattttgctgatttagtgggtgtggaatggcatgtccttgttttagtttacatttcgttgataataaatgaagttggacatcttttcacacatttaatgggcctcctggttgctctc

SEQ ID NO: 141558 - DNA, 122 bp, Homo sapiens
tgcagcctcgacctcccggggccaagtgatcttcttgcctcagcccccaagtagctgagacgacaggcgagcgccaccacgcccggctaatttttgtattttttgtagatacaggatttcga

SEQ ID NO: 141559 - DNA, 122 bp, Homo sapiens
aggctgctccaggggcagaggcctgggcagggcagaggcgggacaactggaaacacttaccgtgagattggcaataatggctttggggtcatctgttcaaagagaggagaaagatttcaaaa

SEQ ID NO: 141560 - DNA, 122 bp, Homo sapiens
tgcgtaactccaaggacttttcggagacttttgtaagtataatgctcagctttgtttgcccgggatttataagtggaaccgagagctgactcctgggtgacctcagataatcgggactcgga

SEQ ID NO: 141561 - DNA, 122 bp, Homo sapiens
gggccctgggctattgttactcaccgcggatgaaggtcggcgagtaggtcgggaaggagtcgaagatgctgttcgatgccatgccccgctctgaagaaggcgagaattttcagcccttcagg

SEQ ID NO: 141562 - DNA, 122 bp, Homo sapiens
tcgcggctctcgggtgggaaagcgaactgcgaccgggaagcgccggctgggcgggaggcgcgggcccggggctgcccagcgcacagtgctcgcccgcggcagcggccaggccaggcgaggcg

SEQ ID NO: 141563 - DNA, 122 bp, Homo sapiens
ctgctggctgtggtggtgccggccgtgcccacggtggcctggctttgccgctcccagcggcgccagggccagcccatctacaacatcagctccctgctgcggggctgctgcactgtggcctt

SEQ ID NO: 141564 - DNA, 122 bp, Homo sapiens
agcacatgatctccgccatgaagagcaaataagaggcgtacacaaccctccataagaccgcggtggctgatctgccacaaaccctcctacgagaggaccaggacggcaaggccggagcccgg

SEQ ID NO: 141565 - DNA, 122 bp, Homo sapiens
ccatgttggagggagagccccctgacctcggctgcctccactctgggggcactttacagacgctggggccgatgcaacccgcaggatgcgtgtcctacctgcgctagctgctggctctgctg

SEQ ID NO: 141566 - DNA, 122 bp, Homo sapiens
agatctcgaactccaaacctcgtgatccacctaccttggcctctgaaagtgctgggataccgtggcctctgaaagtgctgggattacaggcatgagccaccgcgcccggccccgttgtttcc

SEQ ID NO: 141567 - DNA, 122 bp, Homo sapiens
tgccccgttaggcagcacggagccgcgccaggggatcccggacgcccgaagagactcccgcgccccttgggccgaaatctggctctgcaggcgcaccgttccctgccccggccgggaacggc

SEQ ID NO: 141568 - DNA, 122 bp, Homo sapiens
cacattccccggctccggggctgccaccctgcgcttcgatccgggcttctcgggccggggcgaccgctgcctcgcaattggtcgaattcagcaggctccgcctccttgagtcgccagctgcc

SEQ ID NO: 141569 - DNA, 122 bp, Homo sapiens
ttgtgcatttgatttctgtaggggaagtaaaacagctagagttaaatcaatgctgtgtgacgagagaccagagagctagaagtgatctactaacatttggtgctgtcttgataaaagccaac

SEQ ID NO: 141570 - DNA, 122 bp, Homo sapiens
tcactcctcgccaaacctttagctcaagtcttaatgaatgtcctctctgtggttctaatccgagctccagccccacgggttcctgcaggggcgggaccacctggcccaacctctgccttggt

SEQ ID NO: 141571 - DNA, 122 bp, Homo sapiens
cctcttccaggacctgcactgtcttcctcccgggggcagactgtgccactgtgtgcaccccggagcccaaggagtggccaaggacaactgtcttcagggaagatatggatagagcgagggtg

SEQ ID NO: 141572 - DNA, 122 bp, Homo sapiens
aacgtgcggttgccgtgactaaacgcattcattcaccctacaagatttaggaaaatgtaacgttgcaagggaagcaaggtctctgtgtaaacctcgtaatcgccaccaaaagtcggtagctg

SEQ ID NO: 141573 - DNA, 122 bp, Homo sapiens
aggagctttgggggggccaggtgccgaaagagcccgacgggcttgcggggaccctcacatcgagcgtttctctgggcttcctgtctatgtgtagctggaccatccccacagttgtgtagggg

SEQ ID NO: 141574 - DNA, 122 bp, Homo sapiens
aaatggcttagcttccaaggtgcacagaggctcacagaagccactttatatactggcagccggcagcttggtcccgaaaggcattaaggtgcctggggcccaggccagccgccttggcagga

SEQ ID NO: 141575 - DNA, 122 bp, Homo sapiens
cagcgcgactggagagactggggaggtcgagctgtgcgcgtggacacagcgcgcagagcgcgcggtcttttgcgcgtttgtgcgggccgcagccgcacgttggcaccgatggaactggggtc

SEQ ID NO: 141576 - DNA, 122 bp, Homo sapiens
ttaagtctgactgccaccttcccttctttctgtgctgcctggataggactgtcagctggtcgcgtttcccattggtcaccgtttccggaagcccgcccccacgtttccgggagcccggcgga

SEQ ID NO: 141577 - DNA, 122 bp, Homo sapiens
atccatgaggcaccacccactgaaatcaggcatctccatccaggatcgcatgggacagcacgtttctgacccagcctgtggctctgctccttccacaagcacttggggccaggcccatccac

SEQ ID NO: 141578 - DNA, 122 bp, Homo sapiens
ccaaattggaggcgtgcccagagcgagcgggtggacatcttagcgagcgtccctgtggcacggccacgtctccacccccaggtggctgctctcccagattccaggatgggaaggactgggac

SEQ ID NO: 141579 - DNA, 122 bp, Homo sapiens
aggcgggcgggcgggcgcgggtggggggcgggggcggcactccagagccggaaatggcggcgacccccgggccggggctgcgcgggcgctcggggccggagctgctgcgacgccgcggcctg

SEQ ID NO: 141580 - DNA, 122 bp, Homo sapiens
gagtgtgcaggtgggagacgccgccgagtcacttgttggaacgtggcccgaaacaaactgcgggttttgctgggccctccctgttgctactggaagagtcctgtcacatggataagcacccc

SEQ ID NO: 141581 - DNA, 122 bp, Homo sapiens
ttttctcggtgctttttacctggtgtgcgaggggagacggccgcttgcccctcttctcatcgcggacgggaaagagagacttgaggagctttggcatttgcggcacgaaggatttgacagga

SEQ ID NO: 141582 - DNA, 122 bp, Homo sapiens
ggcagtccccgggacaggatggccagccacagctggggccagtgtagccgggaaagcacacgcaacgaccacggacacagcgaccctgatcattgcagtcatctgggcaggaccccgaggct

SEQ ID NO: 141583 - DNA, 122 bp, Homo sapiens
catcttcctgacgagcctctgttgactctggatcttccactgagtcacttgtggctaaaacgtgaagtggcgatccagacgctgatacctgtggcgcatcacattttcctggatatggaaaa

SEQ ID NO: 141584 - DNA, 122 bp, Homo sapiens
atgcggtctggggcgccacgcgcgggctttttgaaaacttgactgttggggttgggggcccggatctacccgccgcctctccgcttgtccgctacacctggcgtccccgccccacctcccgc

SEQ ID NO: 141585 - DNA, 122 bp, Homo sapiens
ggggctggggacagaaacgggaatccaggttgtcggagggcaggggctgcagaaggaacacgctggaaggaggggtgctggggaaatgggagagctggcacggaggcgggccaggcggtaag

SEQ ID NO: 141586 - DNA, 122 bp, Homo sapiens
atgggacttcttgtccccttggggaataattttgatctcctgactctcccttctcttagtcgactcttcaactaacctctgtctgtccttctcccatctcaccttcatccctcactgatcac

SEQ ID NO: 141587 - DNA, 122 bp, Homo sapiens
agagccccccgagcgccgcggccgctgccagcgctacctcctggaggcggccaacgacagcgcctccgccactagcgctctcagctgcgcggacccactcgccgccttccccaaccgctcgg

SEQ ID NO: 141588 - DNA, 122 bp, Homo sapiens
gagcggttccggtgaaaatgtcgattccgattggactctcgatgatttaaaggcatctggcgtttctgaggcaggtagggtgtgatcttccgggttgcgccttaaccttaagaaagatggct

SEQ ID NO: 141589 - DNA, 122 bp, Homo sapiens
tccctgatgctgcaggagaactggccactcacaggtggacctgatggccagagctactagcggggaccaggggtaacatgggtccccctccccgagccatgaagagctgcctgcggccatct

SEQ ID NO: 141590 - DNA, 122 bp, Homo sapiens
tcagtgacaaaacccagtgtaagctggcctaatatattaatagtaatatgcgagtcctcccggggtggcgggcactgacgtaagtgctttacttgggtcttctcatttcatcctcccagcaa

SEQ ID NO: 141591 - DNA, 122 bp, Homo sapiens
aggtgctctgtgccacttcctaatcgctgcttgctctccagtgcatgaatgctacagcagcgggggctgcaagacagcaacaatggcagctggcctcttcctctgggagctccgacccaggg

SEQ ID NO: 141592 - DNA, 122 bp, Homo sapiens
ggcttgccacatcaccaccttctgtgctgaaggtcagatgacacacagtcaccagttttccgagaagcacagggaggggtgcatgtcaggcccagccctgcctgctgataccacctcacaga

SEQ ID NO: 141593 - DNA, 122 bp, Homo sapiens
agagcgtggagggcggagactcccaggcgagggggcgaggcagggtctgattggccagcacgcggagactggggactccagggcctggcgcgacctcggatacggcgacgcgaaagaggggc

SEQ ID NO: 141594 - DNA, 122 bp, Homo sapiens
aatctgactccagtagctggtattacccacagagggccagggctcgtgggaaacaagagacggagctgggagcaagaactttgttagacaggagttcaattacagttggcccaattcctggt

SEQ ID NO: 141595 - DNA, 122 bp, Homo sapiens
atcatctccacacctataagggtctaaagttgttttcagtggttaatgtttgttctgtctcgcaggaaggtgggcaaggtactttttgtctttgtaaatctatgtcctgctctttggcaaat

SEQ ID NO: 141596 - DNA, 122 bp, Homo sapiens
gcatgtgttctcagggtgctgtggtccccagcagtccctgctgctcttcctgacctgctgcgttcatttgcatgtatttgtccagtccttttgacaccaggttttgggacctctgctctaat

SEQ ID NO: 141597 - DNA, 122 bp, Homo sapiens
tactgcatcctgtctgttcaacaagatcaccagttctgtgccagccattgggctgtgagccgaagtcattcaaaggaatggccacaattgcctgcatgtctaaatttgcaatcttggttgaa

SEQ ID NO: 141598 - DNA, 122 bp, Homo sapiens
agtgaagataggaatgggaaagcatgaatgacaagtttcatttacttctcagttttacctcggatagcttagtgctactaaaaatcatgaggcatgcctttttgctatgtattttattcatt

SEQ ID NO: 141599 - DNA, 122 bp, Homo sapiens
cgcccctcgtgcgcggggatcccgggtcagcccgggtgagggccagggcccccctggcgccgcccattgtggtccaacaggttgagctggtgtcccgagaagccacctgctggaaagggagg

SEQ ID NO: 141600 - DNA, 122 bp, Homo sapiens
aatctgggggacagaaggaacaagctcagagaaggccaagtttatgcctttggtatgtggcggagttgtcaaagtaaaataggagaggaggcccagcagggctccctcccaggcagccagca

SEQ ID NO: 141601 - DNA, 122 bp, Homo sapiens
ttgatagtccgattcatccgctccacctttccggaactctgaggctggtacgcggcatgccgtttccatgtgatgcccgataccttcgccgtcttctgtaccaagtcagccacaaacgcagg

SEQ ID NO: 141602 - DNA, 122 bp, Homo sapiens
gccccaccctggctcaacctgttacccgccctgccggcaagccggggtcactgcagtccccgtggcgaagcagggtcagctcagctcaccgcaccccactccatccagccctgcccatctct

SEQ ID NO: 141603 - DNA, 122 bp, Homo sapiens
ccaattaaaatggatgaacaagcaaaatgaaaacatacctatggaccaacccaaggttaccgtcaggtggtgaaggacttcagaatcacttacctgaagcattgtgtttctcagcagcaaag

SEQ ID NO: 141604 - DNA, 122 bp, Homo sapiens
agtagtgtccaaatgataaggctggaatatatatttttagaaagggctggacactcgatccggtgggagggaacatctggaacattagacagggtaagccacctttgcaactcctttccccc

SEQ ID NO: 141605 - DNA, 122 bp, Homo sapiens
ttgtgaggttttaggggtatcacctgcagaaagacatgtgtgaccaaaagaccataatgtcggactgctgtgaccagtgccccttgggggcactatgattggagaaaagaaacccatgtcgg

SEQ ID NO: 141606 - DNA, 122 bp, Homo sapiens
aacccatgtgttccgcgcgctctcctcccatcccatcctttccacaagatgaaggcccgacgcttcccatgtggaggcctccctgctcgcactcaccagccttcaactctgccacagtcgcc

SEQ ID NO: 141607 - DNA, 122 bp, Homo sapiens
aggtttaaacgttcttcaaactcccttccccctcggcccctgccagatcgatgagttctacgtgggcccggtgcctccgaagcaggtgacatttgccaagctgaatgataacatccgtgaaa

SEQ ID NO: 141608 - DNA, 122 bp, Homo sapiens
ctccagtccccggaagcttcgagaccaaagcctcacttcccctactccagatatttccagcgtgaaccaccacgcgggtccctaagcctcgcggacagccgagaaccgtggggctgggggcg

SEQ ID NO: 141609 - DNA, 122 bp, Homo sapiens
tcgccgcccgcgtgctcctgagccaggtggcgcctgagctgggccggttctgggaaggtgcgggggcaggcggcgcagcgcagcgggggctggggcccgtggccgcgcaggtggcgggaaag

SEQ ID NO: 141610 - DNA, 122 bp, Homo sapiens
agccaggggctggggagcaatctgagaccattgcggctgggctgtggggctccccagtcccggcaggtcctggcgccgctgtacatagaaaccgttgccacggcgggaggatgccgtttctt

SEQ ID NO: 141611 - DNA, 122 bp, Homo sapiens
ctgtgtcctaagtgcagacggccagccacggaaaggtgcgcatgcaggagggcctgtggacggggtcctatctctgtgggaatcacacacgtgtgtcctactacacatggacacatacaagt

SEQ ID NO: 141612 - DNA, 122 bp, Homo sapiens
ccctggtccgaggagccgggcagcgccgcgcagccgtctcgcgtgggacccacccgcgggcggagccaggcggcagggctgccccaccgagcttcaccccagcaacccctttaactttctta

SEQ ID NO: 141613 - DNA, 122 bp, Homo sapiens
tccagggactccgagctacggggcaatcgcttggcgaggcggcctgacaggcagctcagacgaccagtagtatccaggcaaaacggaccacgccggacgactcgagagccaatcgatgaagc

SEQ ID NO: 141614 - DNA, 122 bp, Homo sapiens
aggtaggggaggagggcccagatgagcccagaaagaactcagaggctgagatcacatggccgacagagcagggttcaccacgccttttagtcagaatttagggagatgtgtgttcctgtctg

SEQ ID NO: 141615 - DNA, 122 bp, Homo sapiens
ccaccgtccgcagcgctcacatctggccaccgtctgctgcactcacatctggccaccgtccgcagagctcacatctggccaccatccgcagagctcacatctggccaccgtccgcagcgctc

SEQ ID NO: 141616 - DNA, 122 bp, Homo sapiens
ggatttgcttgtatttaaactctcctgcgttctcaaagagattcggcaaattgggggtgacgttcaagatgtacttgatgccgaattcctccaacacgtccaagttggtggagtctttggca

SEQ ID NO: 141617 - DNA, 122 bp, Homo sapiens
aaatgagcgattgatgtagggcctgtcctgtctcagggagccccacgaaggcctgcgcgccggccagagcctgcctgcctgccagggtactgggacgtcactctcaaagcggcgggacccag

SEQ ID NO: 141618 - DNA, 122 bp, Homo sapiens
ggatcccgtgggttcccggtgggggatcccgtgggttcctggtgggggatccagaggccccgtggccgggaggggacaggctccttggcaggcactcagcacccgcacccggtgtgtcccca

SEQ ID NO: 141619 - DNA, 122 bp, Homo sapiens
ctgggcaggaggagctgggctgctgctgggagccagggctggggctttcccagagctgcacgggttatttaagcagtttcctgggcatctgcttcctccccaatgagtgatgggaaaactcc

SEQ ID NO: 141620 - DNA, 122 bp, Homo sapiens
tttttgtatttttagtagagtcggggtttcaccatgtcggccaggctggtgtcgaactcccggtctcaagtgatccacctgccttggccttccaaagtacatttatatttttgaaagtctga

SEQ ID NO: 141621 - DNA, 122 bp, Homo sapiens
ggggtgatggttatctgggggtgactgggttatacgggatgggttatctgaggggtgcctcggttatctaggagatgactggtttatctggttacctgaagggtgacttggttatttgggga

SEQ ID NO: 141622 - DNA, 122 bp, Homo sapiens
gcagccgtcagcggcaaaacaccctctttggagtcagccatcttgctccttttcccaggccggcgcgctgcttgctgggaaatttagtttgggttcagatcgctaggggccggccaaagtgc

SEQ ID NO: 141623 - DNA, 122 bp, Homo sapiens
gagctcctcagaggtggtgagggtgagcgctgctcgctggaagggctggtgcaaaagcagcgtgggagggtgtggtgtggcccagggactccagccttctgctctgagaaaggagttgaggt

SEQ ID NO: 141624 - DNA, 122 bp, Homo sapiens
gctggcggctgctgggagttctctttgttcactcactttaattctcagtcgagctctacacgcggtgctccctccccacccccagcccgggcggagtcatcagatgtcgtttccacgaatag

SEQ ID NO: 141625 - DNA, 122 bp, Homo sapiens
ctgctggactgagaacctcagttctcactgcctgttggccagaggccgcctttatgtcctcgccatgtgggcctctccaacatggcagctgacttcatcagagcatccatgccaagaaggca

SEQ ID NO: 141626 - DNA, 122 bp, Homo sapiens
agctgagcgaggcgcgggaggctgtggctgggagcggcgctgagagctctgtgcgcgcggcgtgcgggtctggagcctctcctcaacccacgcccttcccggcccagccttgcccaagcctt

SEQ ID NO: 141627 - DNA, 122 bp, Homo sapiens
ggcctgaacaggtttggcgtaaaaacggcagtgaggtgaggctggtgagaggggaagtggcgacagttcagtcaactccctcaaaaccagtctggccttcaccaggcggagatgggtggggc

SEQ ID NO: 141628 - DNA, 122 bp, Homo sapiens
cgccacgccctctgccctcggcgtctcaggagcgctctctgccggcccgctctccccgtgcgtatgcacgtgccgccgcgtcttcgcttcgctttttgtttgtccctgaccgtgcgccgtcc

SEQ ID NO: 141629 - DNA, 122 bp, Homo sapiens
tcagagcccagagggggaaatggagaaacctgggctgctgaggaaagccacgggtgttggcgtgaactgatgatgtctcatcccacgcccactatggccacattacctaacctctccatatc

SEQ ID NO: 141630 - DNA, 122 bp, Homo sapiens
tacggtttcctcagtggggacctgtgaagccgctggcaagtcaccagagcccaaggactacgacagcacctgcgtgttctgccggatcgcggggcggcaggacccgggcaccgaactcctgc

SEQ ID NO: 141631 - DNA, 122 bp, Homo sapiens
ctagagataaggtcccggaatcctggaaaaattcagtctggcctccctacttcagcaagtcgcctcctgcttctgtcagccccctccccacacacacctggagggagaggcggtggccacag

SEQ ID NO: 141632 - DNA, 122 bp, Homo sapiens
ccttctccccgcagcagctgttgctggttcagcttagcacttccagccacgtaggctccccgtggccatgtccacgtccactgggcaggctccttgcctggtgtgtcagagccctaccttct

SEQ ID NO: 141633 - DNA, 122 bp, Homo sapiens
aggagctgtgcgggcggagcgtggagtgcagcatccacctggaggtgatcgtggacaggccgctgcaggttttccatgtggacgtggaagtgaaggacattaacgacaacccgcccaggttc

SEQ ID NO: 141634 - DNA, 122 bp, Homo sapiens
ccaccccagtgtgcaggccggttggagtttttctggggatccgctcccacctggctgtctcgcatgctttttttctttttcctttttttttttagtgaaagttcatactctggctaaatgta

SEQ ID NO: 141635 - DNA, 122 bp, Homo sapiens
tcccggcgagggcgcaccttcagagggtcctgtcctccaaagaggtaggcgtggggcggccgagaccggggaagatggtccacggggaagcgcgcgggctgggcggcggggaggaaggagtt

SEQ ID NO: 141636 - DNA, 122 bp, Homo sapiens
tgagttacaaaacgggagatggaggccggatacacggcagatcttggtgacatagagtcccggacctgcccgaggcgggtttatttcctcacttagcactcagagctaagaggaagggtggc

SEQ ID NO: 141637 - DNA, 122 bp, Homo sapiens
ggttccagacgtctagcctccagaattggaagagaatacatctctgttgtttgaagccaccggtctgtggtacttccttgcggcagccagggggaatcacacatccctctgcgctggtgcac

SEQ ID NO: 141638 - DNA, 122 bp, Homo sapiens
cgcaggcgcaccacaccccgccccctcccgggcaggcgcaccacacccgaccccctgccgcgcaggggcacccacaccccgcccccgcacgcaggcacaaacccccacaacacgcacacccc

SEQ ID NO: 141639 - DNA, 122 bp, Homo sapiens
tcgacgcctcgctcaccaagctcttcgagtgcatgactttggcctacaggtagggacccccgcgaccccctgaggccccggccggaggcccttgtttgacaaaacaagcgtggagggaaggg

SEQ ID NO: 141640 - DNA, 122 bp, Homo sapiens
gacgaagcccgcaggcttacatggaaagggagttgacggtcaaatccgggcaacgtgccccgctgtgctgacgccaacgttcttcttggtttccacgtgtctgttctaaaatcccctcagca

SEQ ID NO: 141641 - DNA, 122 bp, Homo sapiens
ctggcaggggcctcactgtgccaggctggtggcagcccacagtgcactggccacatggagcgcactgggtcacggagctctggattcaggtgggattatgccccccaccgccaaagccatcc

SEQ ID NO: 141642 - DNA, 122 bp, Homo sapiens
tttcagaagttcacacacactcacacacagatcagaacaaggcggggccgccgaggggagcggggagcggggacttgggaggtccatagcctggattcccttctgcccggctgcccaggggc

SEQ ID NO: 141643 - DNA, 122 bp, Homo sapiens
cctttccacagggcgttggtaggtgggactgttgacgccatccctgggagagaagaaagtcggctgtggcagggactggtcccagagtgagcctaggcactgcatcagtttgagtggctggt

SEQ ID NO: 141644 - DNA, 122 bp, Homo sapiens
ccagggacccctgctaggaagggacggcgcctcctcgcgcgcatccccaagggacccgcgcgcccctcgtggccctggtaccttggggccctgtccccgcatcccgccctggggccgagcgg

SEQ ID NO: 141645 - DNA, 122 bp, Homo sapiens
aagaaaagcaatacggattggcaagatcacctgaggaagtttcaaggcattctctcaggtcggggcaggtaagagcattcttggctttagcaggatacccaaataggcaagttgcttacact

SEQ ID NO: 141646 - DNA, 122 bp, Homo sapiens
ggtggtgacgtgagcagtgacatagaggacaaaagcgatgctcaattccatttccgggcgcgacacagctccggcagggggcgctgggctctggagccctggggacccctgcttctcacacc

SEQ ID NO: 141647 - DNA, 122 bp, Homo sapiens
tgcgtgaaacattttccactgtggcttcccaaacgtgtctccttaggagactacacagcccgaggcaggtgaattttcccgaatgacaagaggattattcccgaaccccgtggtggcgtctg

SEQ ID NO: 141648 - DNA, 122 bp, Homo sapiens
cgcgatcctaagccctgccgcgtttcccgagcccagctcactgcccttcctcctctaccccgcctctgccccacatccagccgagttcctgtcaactccagacagggaacagagggctccgc

SEQ ID NO: 141649 - DNA, 122 bp, Homo sapiens
gtggtaggcaaaattctaagatgatacccaatggtccttgcccgcataaaatctcccctacgtatattaaaacatcatgttgtacactaaatatatacaattttgtccatttcaccttaata

SEQ ID NO: 141650 - DNA, 122 bp, Homo sapiens
cctctccttccctctgaggtgtggtgagcacacagacatgttcaggcacagggagaggagcggggtcatggatgtggtggacagtgtaattagtcacgtgctatggctatgggaagaggaga

SEQ ID NO: 141651 - DNA, 122 bp, Homo sapiens
gaggtggcagtagctgggcttcaagctggtatttctctggaagtggtacctgaacacatgcgtttgaggaagaagatcgtggagacgtagggaggaggtttgggacttttttgtggggaccg

SEQ ID NO: 141652 - DNA, 122 bp, Homo sapiens
ggagactccagggagaagaggcctttccatcttttccagcatcttgaatttcactttgcgcgtttctttctactttttggtttgatctgcctgccttgggggcttggaacctcagagggaaa

SEQ ID NO: 141653 - DNA, 122 bp, Homo sapiens
aactgggcgtgcacacaacagggagcgcagagctcagggccgacagcactcttgccactgcgagctttgtagggcgcaacatcaatctggttacatcccctcagaagttgactggaagtgtc

SEQ ID NO: 141654 - DNA, 122 bp, Homo sapiens
tcaagtctgtgtttggccacttactagtcctgtgacctggggtgagccacaggagccgaccgcaccccggtttcccagcctgtccagtagggatagcgggaccaagtcggagcagtgactta

SEQ ID NO: 141655 - DNA, 122 bp, Homo sapiens
gggtgacggatggcacctggaaaatcgggtcactcccaccctaatactgcgcttttccgacgggcttgggaaacggcgcaacaggagattatatcccacacctgactcggagggtcctacgc

SEQ ID NO: 141656 - DNA, 122 bp, Homo sapiens
ccacgacggctccccacagccagcgggagcgcccacacctaccgtacacgggcgtcttgccgggcaggatgaccaccaccagctgcaggcccgcatacgtgttcttcaggtgccggaacatg

SEQ ID NO: 141657 - DNA, 122 bp, Homo sapiens
acaccggccagccaaggctgatacgcgcacgcgccagcaacagcgggcataaagcgcatgcgcgcctgcctgcagccgcgattgaccttcccagtcaagccggtgacgtcttgcgtcgcagt

SEQ ID NO: 141658 - DNA, 122 bp, Homo sapiens
tcagcctgcagctggcacacaggtgcgtgtagatggacagccaggaaggcagcgcagggtcgaggggagagcgcggggcaagcgagacttcagtggctctgcactttacgcagctcagggac

SEQ ID NO: 141659 - DNA, 122 bp, Homo sapiens
aaatgacatggctgatcacaaaattcagcccccttcatcctcctcaagagtatcctgtcccgaaaaaagagtttcaactgtgtcatttcagtggcacaatcatttgatgaatcctcctgtct

SEQ ID NO: 141660 - DNA, 122 bp, Homo sapiens
agtccccagaactctgcccggcaaggtgggtccgtgtgctggcgctcactgtccacccaccgtgtccccagggcggtcaggccccaggacctggacacgtgtgacccaaggcagctggacgt

SEQ ID NO: 141661 - DNA, 122 bp, Homo sapiens
gtgtgtggagaggtgattagggggtttgggccaccagatctacaccttcctccatccattcgcctccagcagccccagccccaggtctgggaatgcaggggatgggattcccagatcctctg

SEQ ID NO: 141662 - DNA, 122 bp, Homo sapiens
tggaagccccaacgggaaaggaaacgccccgggcaaagggtcttttgcagcttttgcagacgggcaagaagctgcttctgcccacaccgcagggacaagccctggagaaatgggagcttggg

SEQ ID NO: 141663 - DNA, 122 bp, Homo sapiens
agagacggcttccttcagcctacggacatgaaggagtcaactctaccttccactcgttgccggctttcgccgagaaccccgagaaacggactaccggagtccctatcttgcagcccgatccc

SEQ ID NO: 141664 - DNA, 122 bp, Homo sapiens
gaggcggagtttctgcagaagctgcttccaggatactacttgaacctcagccagaaccctcggactttgctgcctaaattctttggactgtactgtgtgcagacaggtggcaagaacattcg

SEQ ID NO: 141665 - DNA, 122 bp, Homo sapiens
tcccgtgtcccagcaccgggccctgcccacggcgtgcctcctgagagggcccactcagcacggccacggcagcctgaactcccagccttggtatccacgcagcccgcagctctctgcaatga

SEQ ID NO: 141666 - DNA, 122 bp, Homo sapiens
ttcctcttcttgattggcactttaatgagggcagaaggggctgaccccctgccaggggaccggttcatgccccgtttatctcacagcccgagtcagactaaaacaacatcgcaggccgagcg

SEQ ID NO: 141667 - DNA, 122 bp, Homo sapiens
aaagcctctgatccagcaagaagagtttaaagcaattgctgagttttatagcactcgtgacgtcaggtccaaatgagaaattgactggcactccgggccaatgggaggcggcgagagcggcc

SEQ ID NO: 141668 - DNA, 122 bp, Homo sapiens
acccctctcggcccgggggaccctacgcggcgcgcattcggccccggcgcgcggggggcacgggctgcaccccccaaaaaagttttgcagcaacttcctgcggccggtcctcgcgcccgggc

SEQ ID NO: 141669 - DNA, 122 bp, Homo sapiens
ggcgggagagtgggggtaacctcaagcccacttgaaaccagtcagtgccaactgggcggccgcgcagcccccttccggcgcccagtttgcggtccgactccgccgcgcctttccgctggagc

SEQ ID NO: 141670 - DNA, 122 bp, Homo sapiens
acaaatgatgaacttggtgtagaagcctagctacttctgcaagaggatttctgaccaggtcgccctctagcaatgtggatctggtccagacactggattactcagatttgttctgagcagct

SEQ ID NO: 141671 - DNA, 122 bp, Homo sapiens
agcgtcacagtggcgtactccaggccagaccgaatcagagtgggcgaaagctccgtgttccgccccttcccacttgatcgacgtcaaagcccaccagtgagcgggcgtctagagtcgccgtg

SEQ ID NO: 141672 - DNA, 122 bp, Homo sapiens
ccgattggccagagcggcctatgtaaaacaggcactgcgagccaatggccggtggcggggcgcgcggccaatgagggcgccgcagccggacgcgttgccgagaggaagcgcagcgcgcgggg

SEQ ID NO: 141673 - DNA, 122 bp, Homo sapiens
gacaagccattagtgcagtttcctgagaaaacctctgagcgtcgctgttggtcaaaagaacgaagagaagcgtttgggagcctcttagaggggaacttcctgcacaaaccaaccacacagag

SEQ ID NO: 141674 - DNA, 122 bp, Homo sapiens
gcatgctcagatgggactacctgtggatcccaagaagggcaaatattcgggagcgggggccgcagttaagttccaggtgggcagagtttcaatgagttgaggcattttggcattcggctgtc

SEQ ID NO: 141675 - DNA, 122 bp, Homo sapiens
tgcatttacattgcttgtaattgtcaaatggaagacagctgcaaacagttaagatgcaggcgtgggaaacaaatattgggagtagaaaggaagggcctgtagcctctgtttagtcactctat

SEQ ID NO: 141676 - DNA, 122 bp, Homo sapiens
ccacggagcacgtgccagaatttcctccctgtctgaggttggccactgtccccgtgcatgcgtggaccacatttggtttttccattcatcatcagcagacacctgggcggtgtccacagtct

SEQ ID NO: 141677 - DNA, 122 bp, Homo sapiens
ccatgacggcggaagtaatggcggaagtggcaccgttgccaggcagccgttgcctggcgtcgcggggcgtactctgcgctgggcgcgcggaggcctaggcgggaagctcgagcggcggcgcc

SEQ ID NO: 141678 - DNA, 122 bp, Homo sapiens
tataaatcaaagaaaagcatatgtttgtggtaacaacatttagggctgcttaatcacagacgtgggctgaatacagaggccctagctgaggaagtagaacagatagttggagctatcacatg

SEQ ID NO: 141679 - DNA, 122 bp, Homo sapiens
tgtcatttctcggtcttcaaaaatgacggacactgctggtcgctgtggcttcctcctacgcgttcggtcactcctgcacatgtccgcagtagtggtgctctcggggaccccctcgccacccc

SEQ ID NO: 141680 - DNA, 122 bp, Homo sapiens
ctcagtcatcagcctcaggctgcccaaaatgcctctgacaccagatttatatcttctgggcggcttctttaaatccagcccttcacccgccccctagagaagcagtgaaaccccttggctag

SEQ ID NO: 141681 - DNA, 122 bp, Homo sapiens
tccggggatggcggagggcggggacagagagcgcggcagtcggctgcggcctgggcctggcgcgccccctcgcgggcaggtgcggcgtggcagccgctccgaccgccgctgccgagtctcgg

SEQ ID NO: 141682 - DNA, 122 bp, Homo sapiens
tggtgacttcactcattcactcttcctggaaacacagcagggttgatcaccacccatttccgttccccttcttcctgcccctccctccttgaagtcgggcatgtcctccaccgtcgatggat

SEQ ID NO: 141683 - DNA, 122 bp, Homo sapiens
ggaggtggacgcctggggtcaggagcccttcgtttttgctattgttcaaagcactggccccggagaatcgaagtgcttgaggaaggaaggccttgtagatatttgctgaatgaatgataaaa

SEQ ID NO: 141684 - DNA, 122 bp, Homo sapiens
gtcggggttttagagacggagctttgagtgcggattccgccagatgggggtcgggaactccgggccaggccctgacgtggattgtgtttgccgcctcctttaaccttgccctcatagactgg

SEQ ID NO: 141685 - DNA, 122 bp, Homo sapiens
ctgtataatctttctttttattactactgacatgcatttatgaaaagaaaatggaagttacggagtgtaatgaagagataaattcaggctatctctgaaagtctatgtaacacccagaattt

SEQ ID NO: 141686 - DNA, 122 bp, Homo sapiens
cctgcacggctagggctgggcctcaggccccgtttctaactctgactggggtttggaccccgtttccgcagcctgacagggctggaagctctaggccgacccagttcccccttccagcagga

SEQ ID NO: 141687 - DNA, 122 bp, Homo sapiens
cgtggacgtgagtggagcggggcggtccccagcacactagaggaagtcgtgctacccccgcggagttgtcgtgtgttctggattcattccggcaccaccatgtaagtgtttgcttaccgact

SEQ ID NO: 141688 - DNA, 122 bp, Homo sapiens
tgcagagtggtaaaacaccactgctttgttttcttaactgatacctgtaatatatttccacggtccctcaggctgggctagtaattattttgcaaccttggttctcttaccctattggcttg

SEQ ID NO: 141689 - DNA, 122 bp, Homo sapiens
gtctcagagcccagaagcaccagggcatgtgcctgcagcccccaggagattaaacggtcccgatgccagccagcctggaccctgactcagccttgctgggacagcccaggcatccagcccca

SEQ ID NO: 141690 - DNA, 122 bp, Homo sapiens
ggctggcgtgcagtggtgagatcatagcccactgtagcctccagctccaactggttcaagcgatccttctgactcagcctcccaaagtgctgggattacaagcataagccaccatgcccagc

SEQ ID NO: 141691 - DNA, 122 bp, Homo sapiens
aatgtacaagcacaaaaaggagtctcttagcttctgactcctaggacataaaccaagacacgctttactatcacatactcatttccctaaagggaagaagccaaaaaatgcatactatagta

SEQ ID NO: 141692 - DNA, 122 bp, Homo sapiens
gttcggtgcatcgcaggatcccaatctttcttgcatcttcagctctaaaagtcggcacctcggggtatgccaggatcctcgagaaaacagatataaacacatatttacccacaaaacagaga

SEQ ID NO: 141693 - DNA, 122 bp, Homo sapiens
gcggaggagaagtggccttcccacggctcgggccggctcactgcacagcagccggggaaacggatgtcacgggggaaccaaccagctccagccccgggtgaaaatccgcgtgcagtcaggca

SEQ ID NO: 141694 - DNA, 122 bp, Homo sapiens
ttctagctctgtgaccctgggcacgtggcttaacccttccgagcctgcctgtttcctcgccgtaaaatagaaactcagctcacagggctgactcagaggctcagtgagcgaatgcctgccta

SEQ ID NO: 141695 - DNA, 122 bp, Homo sapiens
tctgggacgcaggtgaggggcggtctctccttcccctggcaggggcagcgtaagggtggccggcggctgggactgtcccacgagggggcgcgtctcgggccctaggacccgccctcgaggcg

SEQ ID NO: 141696 - DNA, 122 bp, Homo sapiens
tttcagtcattccctcctaatagacagcctgtcccaggtgatactcacattcggagtatccgctgactgggatcattggttcaggtcacaccagcagtgtctgcatcagcaaggcgtctttt

SEQ ID NO: 141697 - DNA, 122 bp, Homo sapiens
aaggcgctggtgtcatttaaaaacagcggcgcatcatccttccttagcatagatttgaggcgcttccacgcgccagagccggccatggcagaggctgagcggccgcggtgcggaacggcttg

SEQ ID NO: 141698 - DNA, 122 bp, Homo sapiens
ggccccatattttgtctgctctacagatcccacccgcgggccacaccctcccttcactcccgtctctgggtcccacccataataacccgtaatgacagatcctccgtgtccccacctctttg

SEQ ID NO: 141699 - DNA, 122 bp, Homo sapiens
cctttcaaagtgctgggattacaggcgtgagctactgcacccggcatttgctgattgtatcgtgaattcttaaacttcagtgtgtatatgaattacctggggatcttattaaaatgcagatt

SEQ ID NO: 141700 - DNA, 122 bp, Homo sapiens
tcatctacccttgattttaaacccaattttaaacagaatgcttctctccatctcaggctgcgtctccagccataggatacatcacttttagattattacagacctttagaggagccatctca

SEQ ID NO: 141701 - DNA, 122 bp, Homo sapiens
ttgcctcctaaaatcctgaaccgatcttgtcacgaagaagcccaaactcagcatggaagccgagatccatacctcctgatctggccaggccccttccagccccgcctcccatctcttaggta

SEQ ID NO: 141702 - DNA, 122 bp, Homo sapiens
acaaacaaaagaacaagaactcccccataattccacttctcagaaatcacatcacattgacgtttttgtctgcgtatccagatcattttgggggtgctcatgattttttaaacaaaagaact

SEQ ID NO: 141703 - DNA, 122 bp, Homo sapiens
gcgctccctcccatgtcttcattatctgatttggtaaaatatctacaagacgggggagtccgggctgctttctttgacactggtcatcactccacacctagacgctatgtccatgtctggaa

SEQ ID NO: 141704 - DNA, 122 bp, Homo sapiens
gatacagggcttccttaacaaatcccctgagcctaatgctcctcatctctaaagtggggacgataatgcctgctttaggattcttacataaaacattataaaacaaggattgggatgtggta

SEQ ID NO: 141705 - DNA, 122 bp, Homo sapiens
gtgggagagagtagagctaagccaggagctcccagggaagccccctccttaggaagaggacgtggctacctgggtgctcagacctccagcctccccctccatcatggggatgatgagagccc

SEQ ID NO: 141706 - DNA, 122 bp, Homo sapiens
catcctcctctgaaagaagtggccagcctttggggctcttgcttgtaagggagcagggaccggacctataggaggagctgttttcctccatggagcattgcctgcttgccggggctggctat

SEQ ID NO: 141707 - DNA, 122 bp, Homo sapiens
attttctgacatccttgttccacccacagttgttataaatttgctgcagctgcttcttaacgcctccagatggcgtgctggtgctcgttcgcgcctcccagcgaccggccagttgccagctg

SEQ ID NO: 141708 - DNA, 122 bp, Homo sapiens
tgtttcgttctgcacttggacgtccagggactgcagccactcatggagatgcccttcctccgctcagcgtcctcgtccctttgccagccaccacccggctgtgcacctgtggcgtgcttctg

SEQ ID NO: 141709 - DNA, 122 bp, Homo sapiens
cgtgggagtgacggggcgtgggagtgactgggcgcggagaggccggagccggaggcgaggcgaggcgtgagagtgaatgagggaggagggctgtgaggggctggagcgcccctgggtgtcct

SEQ ID NO: 141710 - DNA, 122 bp, Homo sapiens
ggctaaagaagcagggaaggatggtcgcggcgcaggagcagtttgccaagggccgagggccgcgcccgccctgccctgcgcgctcccccggctctagcaagtctggcgccccgcggcttccc

SEQ ID NO: 141711 - DNA, 122 bp, Homo sapiens
ctccgcccggcccgggctggggcggagggatggggcgggggcctggggtgccccgagccccgcgcgccccccgagccccgggtctcaagcgttccctctgccccgacacagccgaggggaaa

SEQ ID NO: 141712 - DNA, 122 bp, Homo sapiens
ctttggtgctagagggggctggctcaattgggcaataggtcaaaatactatagccttcctcgctaaaagtggaaactcagtaggaaacaaaaaaagaaagaagacttgtagcttttccagct

SEQ ID NO: 141713 - DNA, 122 bp, Homo sapiens
ctgagaggtacactagctatcaaggagggaagacaagttgggagaccagagttaagtatccgaactgcccacccccgttacaacagcagtgtgtaaaaatcacgccccgggcctctgctcct

SEQ ID NO: 141714 - DNA, 122 bp, Homo sapiens
tccatgtgccaaagtgtcccttgggtcacacagctaaagccgaggtgaccagttgtaccccgagtgccaggcttgtgagatgagaccaagagggaggaggggaaggactccatgggccatcg

SEQ ID NO: 141715 - DNA, 122 bp, Homo sapiens
gaagttaactggacattaaatagcctgtcataaaagtactgaacattacagccttctgcccgatcctcttgcagtaacacaataaaaattaggaagtcctgctgattctgattgctttagtc

SEQ ID NO: 141716 - DNA, 122 bp, Homo sapiens
ttatcagaattattatttaataagggggatagctctagaatttattccagccacagagctcggggaagtggaaaaacatgtctggacatgatgattatggagaactccctttaagggaaaaa

SEQ ID NO: 141717 - DNA, 122 bp, Homo sapiens
gaccttttaaacagatgatagctgcccaagtcatttttatgaaacttctttatatcaaaacgtaagtctaaaaagagaaaagtgttgaccttgatacaggctgtgttaggcagagatttcaa

SEQ ID NO: 141718 - DNA, 122 bp, Homo sapiens
ccggagtccgcagggcagggagcgccgggtgcggcccagtccccgcgcccagcgcgttggcgcgcacaccccgtttctgcagactcaggttttctggccccgcctctttcgggcccagctga

SEQ ID NO: 141719 - DNA, 122 bp, Homo sapiens
gagtctcgtttggttttagtctgcaaagctcgtctgcatcagacaggaattttccccagacgcgggtgcacgtgaattaattcatcagaaggcggttcacggcctgagtgagggggacgagg

SEQ ID NO: 141720 - DNA, 122 bp, Homo sapiens
acagcccgggaagatttgcaaacctgattctccctccagctgctgtgacaacttcggggccgtctgtttacttctctgggtccccggggactctttcctgcatcgcagccccttgtgccact

SEQ ID NO: 141721 - DNA, 122 bp, Homo sapiens
gacaaagtacaagctaattaacctctaagagcctctgattctcttctttctctggaacagcgataagcctgtcaaccttgcaaaagtactgtgaccattcaatgtgaagcactcataagtgc

SEQ ID NO: 141722 - DNA, 122 bp, Homo sapiens
tcctacataacaagcaccatactcggcactcagaatgtaataatgaagccacaacttgaacgcagagctctctgatttcaaacttatgctcatacccaaagaagtgggaacaattgttctca

SEQ ID NO: 141723 - DNA, 122 bp, Homo sapiens
cattgtacaaaagcattgtagaatttggtgtatttctctctctctccctctctccacacacgtatcacagacatttttttttattctgaatcatttgggaataagttcacgacatcatgacc

SEQ ID NO: 141724 - DNA, 122 bp, Homo sapiens
gctctttcgaagtcttctggtcaatactgggtgtggtttgtcttttcagtctttgtcaatcgaaaaatggtgttttatcattgtcttcaaaagagagaagattagaagtaagttacccagag

SEQ ID NO: 141725 - DNA, 122 bp, Homo sapiens
tgggaaaggtcctgggtgaggtagtgatggagtggagtggcagtgaggcgtgggggctcacggatagatctcaggttcggagagggtatcaggaggggccatttaaagttgggatgagtgtc

SEQ ID NO: 141726 - DNA, 122 bp, Homo sapiens
gctcaggttctgtgaactgagtcattctggcactgagaatattccgtgactcagcaggcccgaaaaggaggatgtcagaatccacataatttcgagtcttttaaaggcaagccgaggaacac

SEQ ID NO: 141727 - DNA, 122 bp, Homo sapiens
ttccccatgactttgattttgtttacatttttccctttaagttagtatacactacgcatacggtaataaaatacaataatataaaaaaaagaactatgaaagatacactaaaaataaaaagt

SEQ ID NO: 141728 - DNA, 122 bp, Homo sapiens
agtcagagggaggggcccggccggtctgagctggcggggagcccctatgggaggctggggcgcccgaaagggtcctagaattgggcgtgggaaggagggtataggggaagctaaggacaagc

SEQ ID NO: 141729 - DNA, 122 bp, Homo sapiens
ccttgcctgccttcgcccaaggctgggctgcctgaggtgtgccccaccacaggtacctcacggctctccggcccgctcggctgctgttcctcagtccaccccactccttgccaccttcttcc

SEQ ID NO: 141730 - DNA, 122 bp, Homo sapiens
gccggcgctcacagtgtcctcggtggcgcatgaagctgtctcgccacatgaacttcttggcgcagactccgcactcgtagggcttgagacctgtgtgcgtcttcatgtgctcagtcagatgg

SEQ ID NO: 141731 - DNA, 122 bp, Homo sapiens
gagaaccttatattatcctgaagagaggtgatgacttaaaaatcatgctcaataggattacgctgaggcccagcctaggtgagaatttggaagaggatgctgggatcccaaagtcccagtag

SEQ ID NO: 141732 - DNA, 122 bp, Homo sapiens
gtagacgttgaactcggaggccggggcatagggcacgcggatggcgatggtcaggaaatccggctcctggctgaggctgaacgccggggtcagcatcgcggcaccagacgcaggggccagcg

SEQ ID NO: 141733 - DNA, 122 bp, Homo sapiens
tactctgtcacgctgatcgtaaaggcacagtgtgggaaagtcccctactgggatggccgtcgcttggaagcagggcaggctaaggggcccgcagctgcccaaggctggtgtagacgtcctct

SEQ ID NO: 141734 - DNA, 122 bp, Homo sapiens
cccggccccacccgccctggccccggagccctgcgaccggcctgggcccgcggtcccccacgtccctgcccgccccgtcaccgaggccgccccccgcacaccctcgccggcgcccgcccctc

SEQ ID NO: 141735 - DNA, 122 bp, Homo sapiens
agaaacagctcccggagcaaactgtacaaaaacctcgccaagagtgtcgggaggcaggaccgttattcctgcagagcaggttagaactgatctctttcggccactccaggaaacacaaacct

SEQ ID NO: 141736 - DNA, 122 bp, Homo sapiens
tgaatgggccgcggacaaaggcgtcccctcccaagtacctgtaattggagcgtccatgtgcgcgggcgctgctgaaatgcaatggacaaaagggagaggaatggccgcatcttccggctgcc

SEQ ID NO: 141737 - DNA, 122 bp, Homo sapiens
tctccgcccgtgtggagtggtgggggcctgggtgggaatgggcgtgtgccagcgcacgcgcgctccctggaaggagaagtctcagctagaacgagcggccctaggttttcggaagggaggat

SEQ ID NO: 141738 - DNA, 122 bp, Homo sapiens
tgccagcctcccagtggctcttctccctgtgggctctccatgaccaggcgactgaccagccgcttgtgtctacttccgcggatgcgctcctcacgatgtccagctacctctgtgtctgccag

SEQ ID NO: 141739 - DNA, 122 bp, Homo sapiens
ctggacccaagcatcttacccgcttgtttacgacgaagctttgatctgtcgagagctggccgggtgggggcatttcggtgtgccgggagcccagctggggggtccgggccagtctgtccaag

SEQ ID NO: 141740 - DNA, 122 bp, Homo sapiens
ccaaggagatgatggcccttcatttcatcctcttacatccctaagaagcagcaggaaatccgctatgatgcctgttctgcagatgagacagaggctcagagagctcaaacaacctgcccaag

SEQ ID NO: 141741 - DNA, 122 bp, Homo sapiens
ttaaattcctccggtacttcatagtcattccatcttggggctccaaattctgataaagaccggcagcgcagctgtgaaggggcagggtggatgttgtggaaggatttgtggatgccccagag

SEQ ID NO: 141742 - DNA, 122 bp, Homo sapiens
acctcaggtgatctgcctgccttggcatcccaaagtgctgggattacgggcgtgagccaccgtgcccagccgggagcatcttttcatatgcttatttgccatctgtgtatcttctttggtga

SEQ ID NO: 141743 - DNA, 122 bp, Homo sapiens
ggtagagaactgggggtcccaggacagttctctgcgtgtgcacggtgagccccaggaagacgatgcacctggctttggccccacagtgagagtaggttgtgcccactcggcttgtggtatag

SEQ ID NO: 141744 - DNA, 122 bp, Homo sapiens
ccaaatgaaaacatgattaatagtttccaataattgaagagtcgctcctgcttatgcaggcgtttgagcccagaaggcatgagtgtgtgtgtgtgtgtgtgtgcacgcatgcactcccatgt

SEQ ID NO: 141745 - DNA, 122 bp, Homo sapiens
cgggcaaactcgttctgcatctttggttttaatgcactaaactggcagctaagcagggagcgagcaaaaggggggtgggaagcccccccccccacatacacgggcgcacacaccggcacagg

SEQ ID NO: 141746 - DNA, 122 bp, Homo sapiens
agctggggcccagggtcctgatttggggtgagaggtgacgccatccccgagtcagaaagacggccaggggaggggaggaggtggggaaagcagacagacggggaggcggggggagcccaggg

SEQ ID NO: 141747 - DNA, 122 bp, Homo sapiens
tctcacaatattgacttgctaatctctttaagtagtacttggctttttccttggtcccatcgatccctagtatctctcaactagctctcacacagaaaaacagtatgatagatgaattcttg

SEQ ID NO: 141748 - DNA, 122 bp, Homo sapiens
ccggttcgttttgaatcgcagtttacacgcgcgagtcggttttcgcatgcctcccccatccgttctagcagtttcttgcagacccttcgggtgcaccaggacctagccccggggcgccctcg

SEQ ID NO: 141749 - DNA, 122 bp, Homo sapiens
ttaccaggagccacacgaaggctgaaccagcaaagtggaggaccagctgtttaattgactcgggtctggtgacaggccaacatggagagagacagcccagcttcaagaacagcaaggcagcc

SEQ ID NO: 141750 - DNA, 122 bp, Homo sapiens
cgctgtgcatagaaacgcaaaagcaagattcgctccaggagtttcatgccacaggatggtcgacggctggaaacaggggttttattttcccaccaccacatcccgatcggagcatccctgcg

SEQ ID NO: 141751 - DNA, 122 bp, Homo sapiens
tgcataaaagactgagtcactgttcctgccctctgggcatttgaatacagtaagggcaaccgaggagcacataaataactataatctgaaagagtgtctcttagatatgggaggtgtatgta

SEQ ID NO: 141752 - DNA, 122 bp, Homo sapiens
ctcagggaaacttttcggttctgcgacgcatgcgttcagcctccaagaaagtggcaaatacggctgcgcgaattggcggcccggccctccttggtcacgtgttgggagacagcggcgtggcg

SEQ ID NO: 141753 - DNA, 122 bp, Homo sapiens
agaaaggtttgttcccggcccgactgcataaagggcaagagagaagtgagaggttcctggcgcaaggctccttgcaaaggacagttctgagctgctaggtgcggccaatcagatggcagggg

SEQ ID NO: 141754 - DNA, 122 bp, Homo sapiens
ctgggaatccctgaagtctgggcaacgggcggtgggtcaccctagacataaccctggaagcgaggcaggctccgctgagctgggacttggggcccctccatgagccaggccctgaacgccgg

SEQ ID NO: 141755 - DNA, 122 bp, Homo sapiens
ggccctcgactgggttcccaggagccggtgagtctctcgcgctatctccagacccaagcgcgaatgccagggccgcggccgccgccccacccacagccccacagccccacagccccacagcg

SEQ ID NO: 141756 - DNA, 122 bp, Homo sapiens
ctacgctgcgccctcccggcctcagcccctcagcggcggaaacgccagtcttcgctgtcccgccttttccgggagggaaatggaaacaaaaatctagtcggtttggatgcaggagtgatggg

SEQ ID NO: 141757 - DNA, 122 bp, Homo sapiens
ttcttccctgactcttcccttggagtgggctgtgcacatgcgcagtgctctgccagcgctcgggagaggagcatgcgcagtgtgtttactggagttgtgcgcatgcttgcttgaggcatttt

SEQ ID NO: 141758 - DNA, 122 bp, Homo sapiens
gggtttcctcagggagctgaccccaattcccatcagggagggatggtttctccaggagggcggcttccttgggaatcttacctgaggaggatgccttccctgaagatctgcaggaatgacaa

SEQ ID NO: 141759 - DNA, 122 bp, Homo sapiens
acactcttcacggttcaacgctccacccgccctccactgactcatctagaggtcgagtctcgaggtttctttaaaacacgtaagtgtctttcggttactctagagaaagcccgctctgactg

SEQ ID NO: 141760 - DNA, 122 bp, Homo sapiens
ccctctctgtcttgcggccctctgcctccccgcccagctctggaggcagccccggggagccggcatggtcagggtcatgctgttttcagttgtggacgagtgcttagctttgcagacctgat

SEQ ID NO: 141761 - DNA, 122 bp, Homo sapiens
gcgtgagctgcgcgggtcgggcctggtaccgagctttcctgggggctagcaggtcgtggacgccggctcctggaggagagccggtaggagggagtgtgaaggtgtccgcggcgtcgtcgacg

SEQ ID NO: 141762 - DNA, 122 bp, Homo sapiens
ctggagccttgcggtgtatagagcggcggctgccagggggactctgtgcctcaggcctgtcggttctcgtagaagagtgtcaggaaggcgcgggttctgcaggcccgccctgggcaccctcc

SEQ ID NO: 141763 - DNA, 122 bp, Homo sapiens
gcctagggcgcggagggcggaccgggaatggcgcgccgtgcgccgccggcgtaactgcggcgcttgcgtgcccgcggcggggaaccggacggggtcggggaggcgggccctgtgggacgccc

SEQ ID NO: 141764 - DNA, 122 bp, Homo sapiens
aatatgttgctaaaagtttccttttcttcaaataaagcaataactgccatttatgaagcacgtattaggtgccaggtacttcactggccttaactctttgtaactcatgttttcaccgtcac

SEQ ID NO: 141765 - DNA, 122 bp, Homo sapiens
tttctctcactctccagggcgtttgcgccgcttatccttcctccaccgcccccctcccgccgcccccactttaataaaacccttggattggggctgcacagttggcgatttctttacacctg

SEQ ID NO: 141766 - DNA, 122 bp, Homo sapiens
catcttccgcgccgagacctgcagcagtggggaaggagagggcgctcgtgagtgggggtgcgggggttcctgtgcccactgacaagggcccgaggcccttgagaagcagcgttccaccctgc

SEQ ID NO: 141767 - DNA, 122 bp, Homo sapiens
acttcaggtgatctgccctccttggcctcccaaagtgctgggattacaggcgtgagccaccgtgccaggcttgggtcaacaattttccaagagaagggcctatccatattcataaacgccaa

SEQ ID NO: 141768 - DNA, 122 bp, Homo sapiens
gccggggattcagccaaccaaccctcaacagccggcggcggctcagtctctggcccggcgcggtgctgagcaccactgagccctcatcttagggcaccgaggcccggactcctgcagccgca

SEQ ID NO: 141769 - DNA, 122 bp, Homo sapiens
cgatttgacttcttcgaaacctagtttccaattccagtgctggtcaaacaacaccctggccgtccctgtttgagcaggctgtttgcgcttgccgcggcttgtttgtccctggcgccccgctg

SEQ ID NO: 141770 - DNA, 122 bp, Homo sapiens
gtggcgggctccgttctccctcgaagcactccccccagctccatgaatggaaatcggctccgcaggtgagtcagagtagctgggccaggtaggggatgtcacccagctactgtcctctgagc

SEQ ID NO: 141771 - DNA, 122 bp, Homo sapiens
gccaagacgcggctgtgtaggaagttccttataaggatttcctactctttgtgggccacccgttcatgcggtgaccaacctcatttgcgttcccaagtctgtgccgagcttcctgtgggcag

SEQ ID NO: 141772 - DNA, 122 bp, Homo sapiens
tgctgccagcagccggatcgcaggcaccgcctggcagatctgaaggttcgtgctgtgcaacgtgccttcctgtttgtgagttcacctgaccgacaccaggaggggctggactcctcgcctgc

SEQ ID NO: 141773 - DNA, 122 bp, Homo sapiens
cctccctgacccctgtcaagcccagcggctggagctaacccgcgggcctgggctttcgagcgctttgtccaggcgttgggggtcacttcgtttactaatgatgggaaggtgaaaggtggggg

SEQ ID NO: 141774 - DNA, 122 bp, Homo sapiens
cactgaccgtgtccctgcctctagggtgaccctggacctagtcatatactgactcctattcgagttgcatactgatcccgaatcctggccagatttccctgatgctggtcaatgggctggcc

SEQ ID NO: 141775 - DNA, 122 bp, Homo sapiens
gattccatccatcttgaatttgacgtcatcccacaccagggatgaggtcatcgcaggcatcgctcgtcacgtgcgcggcactctgattgggcgccgggcgccggagggcggggcgggggggg

SEQ ID NO: 141776 - DNA, 122 bp, Homo sapiens
caacatggcgaaatcccgtctcgtctctaatttttgtatctctaagatatcaaaattagccggacgtggaggcgcgcgcctgtaatcccaagtactcgggagactgaggcaggagaatctct

SEQ ID NO: 141777 - DNA, 122 bp, Homo sapiens
gcgggtcattcatctcagcctagggaagagaccaccttgcctgaacgtagccaaacgcatcgcacgtgggagccaagtgggagatgaaataatccaatgcgtccccctcaccaccaccaccc

SEQ ID NO: 141778 - DNA, 122 bp, Homo sapiens
cttatgacgagattcacctggaccttccggtcagtgagctcagaacacctcacaccacagcgtcactcaactcaagtccctcctcacatcagagggctcctcgaagggaggccccaggacgg

SEQ ID NO: 141779 - DNA, 122 bp, Homo sapiens
tccctgcccgatttctcccagccccgcgcagcccctgtccccgcccccgcccaggtaccccggcagagcttcccagggttgcctgtccctgaaccttgccccccgggtaggcccggccttac

SEQ ID NO: 141780 - DNA, 122 bp, Homo sapiens
aattcaaaacagggtcgcagtctttgaaactagctgaggcaacagatcccctccacacttcgcgggccccacgatcgccccatcaaacaccattatccctcttcccatcacactcccgtccg

SEQ ID NO: 141781 - DNA, 122 bp, Homo sapiens
gaagtcctcgcccacgggccggaggttggtgatgttctccagcgtggctttgagttgcagcgcgattttctgagggggagggccagagcgactgcgtcagccgtgcctgcgcagccccacgc

SEQ ID NO: 141782 - DNA, 122 bp, Homo sapiens
gggttcttagacccgtcagcaagtgaacggaggagcgcgcctggtgtgtggccagccttgcgatgctgttgtgtttgcgtgggcgcggagtctgggcccagctgcactggcggcctgcacgc

SEQ ID NO: 141783 - DNA, 122 bp, Homo sapiens
aagttttcaagtgaagacggagtcgccgcggaggccggggcggcggggtcttagagccgacggattcctgcgctcctcgccccgattggcgccgactcctctcagctgccgggtgattggct

SEQ ID NO: 141784 - DNA, 122 bp, Homo sapiens
tgaagtggaactggaccctgcagaagtttccaaaagctgccctgcgggtgacaggctgtccgggccccacatacctctgtctgtccgagggtgagtagcacaggacagcactcttccatctg

SEQ ID NO: 141785 - DNA, 122 bp, Homo sapiens
gtcaggaggaatctcatcaacagcccgtgaattaattgtccttgcagttgggaaataacccggtacctcggcgtagcccgagggagtccaggaggctctccaaggagccttcccccgggtcg

SEQ ID NO: 141786 - DNA, 122 bp, Homo sapiens
ctgctgctgaggaggccaacttgcggttttccattttcacggtgaaccgcattgtctcagcgttcgctggtattcacaaaatcagaaagaaaggaaggtggtggtgggagggcgcacttttc

SEQ ID NO: 141787 - DNA, 122 bp, Homo sapiens
tgaatccagaccctgtcaccaaggactagggagaactcaggctctcttcaactcactgctcggtttctgcatcagtcaagtggggaggatattaactattatagggattaaaagagataaac

SEQ ID NO: 141788 - DNA, 122 bp, Homo sapiens
atggctgtgtggtgaggtgcggaggtgcggccacacccctaatggcggtgtggtaaggcgcggaggtgcggccgcaacatcctcatgtgtcctttggtttgcgtgtgccatgcagccctgca

SEQ ID NO: 141789 - DNA, 122 bp, Homo sapiens
cccagacagcaccatgggcctgagaacgtcctcccaggccatagcctggaagcgggatgccggagattcctgctgaggaaggggcagaagcctggactccagagggccgcccacaggtggga

SEQ ID NO: 141790 - DNA, 122 bp, Homo sapiens
gaaagaaagaaaaagagcccaatcatgtatagatcttcagggcatgtgttggaaattccccggctggttatgtagggtatatatatatatagtacatcagcgctggttcaaatggttttaga

SEQ ID NO: 141791 - DNA, 122 bp, Homo sapiens
cagctgtcttccatatcagctagaggaatcccagacagtcaatcggatcaggggcacgaacgcctgtctgtggagccgccatgcctatgtggctttgcttttctctttggagcacgagctgg

SEQ ID NO: 141792 - DNA, 122 bp, Homo sapiens
cctaaagaaatctcagataattcacttcggagtagaaacctccttcagccgcgctcactacggcgcccggcttcgcggcaccggccactagagggcagtggccgccgcaaagccgacgcggg

SEQ ID NO: 141793 - DNA, 122 bp, Homo sapiens
ccacgatgcacgttcatgtggcggttgaggttgctgctgtggttgaactgcttgccacagcgagggcacatgaagatgaagtgctgcgcccgcatgtggaagaccagcttctccacgccctg

SEQ ID NO: 141794 - DNA, 122 bp, Homo sapiens
tccagcggctctggcgccttggtaggcatgcactctttggcgcctcgtacgtccactgtgcggagccgctcctgtctggactttcccctgggaacagaaagggagctcacttcccgccagct

SEQ ID NO: 141795 - DNA, 122 bp, Homo sapiens
catagagtatttcttttctgaggggggtcgtctagagtgtccgtgaagggaacaggcacgcgaggctggtggaaaaagcgggtgctttgactcttagctggaagcgtcaacgggaagctact

SEQ ID NO: 141796 - DNA, 122 bp, Homo sapiens
ggatggagccgcctcaggaaaacatctcccactgatttcgccgcaactgcaggatggaaacggaggtgaacatctggcgggagctcggaaaaacgccagtttctgacactatcttcgacaag

SEQ ID NO: 141797 - DNA, 122 bp, Homo sapiens
ggctttggggcttcagagccggagccgcttgggcaaaaccagcagaacagcgagagggaacgggctggtctagccctgccctgagcatttctactgagacccccggtcctgcttcttccagc

SEQ ID NO: 141798 - DNA, 122 bp, Homo sapiens
agggcccgggagagaggtggcgttggtcagaacctgagaaacagccgagaggttttccaccgaggcccgcgcttgagggatctgaagaggttcctagaagagggtgttccctctttcggggg

SEQ ID NO: 141799 - DNA, 122 bp, Homo sapiens
atgttttggttcaggaaagggttccccctgcaaatggaaatgtgacccccagcactagcccgctccaggaagtcctgcgaattcgaaatcgactgttgcagagaaagaagactgctggtggg

SEQ ID NO: 141800 - DNA, 122 bp, Homo sapiens
ccaacggctcgctgagcgactgcgttacgttgttttatgtcaagttagaaaacaaatgaccgaaggctctaaccctgccctcccgctaaagagactttaaaatgcgcctgcttgatactgcg

SEQ ID NO: 141801 - DNA, 122 bp, Homo sapiens
gtgaagaactcatcaaccagagccaggttgaacaggtagagaagcagggcctggcccaggcgcccgccgctgcggatgaacattgccagggccgccacgttggctggcagccccaggcccag

SEQ ID NO: 141802 - DNA, 122 bp, Homo sapiens
acagatatgataccattcactcctcacaacaacctccaggggaggggccactgctatccccgttttacacttggggaaactgagggttatcaagatacctaagtagacacaggtcctaagtg

SEQ ID NO: 141803 - DNA, 122 bp, Homo sapiens
gcggtgctgattggccggaggaggccagccgggggaaacttccgggaatgtccgcactcccgcgttccacggggcagcatccggcggcagcggagcctgtggctccccctgcgggctgctca

SEQ ID NO: 141804 - DNA, 122 bp, Homo sapiens
gggcgtagctggggcaggcactgagggggcgtggccagccgccgggatggaggggcctggcgctcaccttcacaggacacgcggtcagctcggagcctgaagccaggtcggcatgtgcatag

SEQ ID NO: 141805 - DNA, 122 bp, Homo sapiens
gatattccatggccttcctggcagctattcctgaccatgctgtggatagcagttaataatcggggactagaataaactgttctctcagtgtggtgagaactgggaaccaagcatagatgaga

SEQ ID NO: 141806 - DNA, 122 bp, Homo sapiens
gcagcagagatgagccccagggtcaggttttctgttgtcccatcccaggtggttcagggacgccggcagtcaactcaggaaaaccaccaggggactgagtcgcttcctcccttcgctttggg

SEQ ID NO: 141807 - DNA, 122 bp, Homo sapiens
atttgccttggagactgaatgtcagcatggggcttgggatagaaagcggagtcaaatgaccggtctgtttaagaaagagttaagcctccagcattagctgtaaatatccagctaagagagaa

SEQ ID NO: 141808 - DNA, 122 bp, Homo sapiens
gctccgggggctcttgatccgcgctgacgaagctggcgcatcctccgggcaggctcggctcggctcactggctccagctcccaaaactggggaggcacagcctattttaaactgcccccaaa

SEQ ID NO: 141809 - DNA, 122 bp, Homo sapiens
caaacatgatgtcatgcagaaaattcagttctgttacttacacgtttacatttttgctctcgatgctgttttccatatgcatttgtttattgtttctacaggctacatgcatgttgtaccat

SEQ ID NO: 141810 - DNA, 122 bp, Homo sapiens
gggctgcggtctccccgggaagaatcctcagttgcaggtattgcttggggtattgagccccgacccagccagttggctcctatttaataaggaacctccctggaggcggagtttgcctggta

SEQ ID NO: 141811 - DNA, 122 bp, Homo sapiens
cgcacggcaattagtgtgggggcagagccagagcttccgtcatccatgcgtgatcctgcccgatcatttggaaaatcggtttttagccgtgagcccgactgcataactgggcggaggtgtgc

SEQ ID NO: 141812 - DNA, 122 bp, Homo sapiens
tggcgaggcggggtggggtggagtggggtgtgcctccggcgggcggtcagcaagtcagtccgtccgagcgccggcgtcccggtctccagcgcccgcccgcgacagcgaccgggactggcgcc

SEQ ID NO: 141813 - DNA, 122 bp, Homo sapiens
tttacctacagggggaagcagagagcacggagcgcccgggagcactgcgttccagccacccgggcggagatccctcagctgttaataacctagccgagacccggccctggcagctggttctc

SEQ ID NO: 141814 - DNA, 122 bp, Homo sapiens
ccacgcctggcttattatgcacgaggcaggcaatttgccttcctccccggggacccatctcggagacaagaaggtagtttgttctctgtaatggcttctgctggagtgcggcggggcccagg

SEQ ID NO: 141815 - DNA, 122 bp, Homo sapiens
accatatgaatgtaaagattgtgggaaatccttcactgtttcttcaagcctgactgagcacgcgagaatccataccggagagaaaccctacgaatgtaagcagtgtggcaaagccttcacag

SEQ ID NO: 141816 - DNA, 122 bp, Homo sapiens
tgatgcgtgtcctcaactcacagaatagaacatttcgtttgacagagcagcttggaaacacgctttttgtagaatctgcaattggatatttggatagctttgtggatttctttggaaacggg

SEQ ID NO: 141817 - DNA, 122 bp, Homo sapiens
gcttcgagcgcgggtcccaggacgcagtggggcgcagtgcctgcggcaggcggcaggaggcgagcgtggcccaggaactcccgcgggagggtcgggacggggcggggcttgggggcggggcg

SEQ ID NO: 141818 - DNA, 122 bp, Homo sapiens
gctcctggatggcggcttggaaaagccacctgcggccaaactccggggcagtggtgcggccgccgggtgtgtgcgcgctcggggctgccccggcggcttccggctccactgaggtgcagccc

SEQ ID NO: 141819 - DNA, 122 bp, Homo sapiens
tttcctggctcatgcggtttctagagaacactgtgtcggaatatcaatgtagagagtcagcgaaggtcatctagcagcagatgaccagccccaggccagtgaggatcacccagagtgcccgt

SEQ ID NO: 141820 - DNA, 122 bp, Homo sapiens
caggaagagggctggttctttggctccctggtctcccgcggtctagcccaagctggccagcggttgacctggctcccctggccccggccaggcctcgtggacccctcatatgccacacggga

SEQ ID NO: 141821 - DNA, 122 bp, Homo sapiens
caagaccacacccttcacttaccccaaggcctagaatcagaagcatcaatttttgatgtccggtacctgtgtcatctgctccttcagtgtgtggggacccagctggactcccgtgattatgt

SEQ ID NO: 141822 - DNA, 122 bp, Homo sapiens
acacaaggaaacagaaaacatcaggtaacccgggtcagtgacgcccatgatagttaagaacgactgttctaaatctgcctccatctgtcatccaaccctggccacacctggggagaatcacc

SEQ ID NO: 141823 - DNA, 122 bp, Homo sapiens
cgcggctatggcagcggaagccggaagcggcgagcggggtcgttctgggcctaggggaggcgggccgagggcgtctgagctgaggcccgcgtcgatcctgggttggaggaggtggcggccgc

SEQ ID NO: 141824 - DNA, 122 bp, Homo sapiens
atatatctcacttttcttatatgcattcatttctgggaagacagctcaaacattttacatcgcatccagataccttttattttcactatgttactgctgaaatgtgtggaaaagcaatctga

SEQ ID NO: 141825 - DNA, 122 bp, Homo sapiens
tggtagaagggtgaacgggcgtgagccatcctctccggcacggctagtcttccctgacaccgtaacgctagtgaggaatcgctaggatgactaaagacttcaaatctacatgaaggaaactt

SEQ ID NO: 141826 - DNA, 122 bp, Homo sapiens
acagaacctggcggcgaaggggagcgggccgaagactctgggcagcggcccagacgatggcgccccccacccttctacctacggcggtttgtgcgaggcccccggccccccaaccagcagca

SEQ ID NO: 141827 - DNA, 122 bp, Homo sapiens
ggggagggggcgggaccgccgagacaggcctggaaactgctggaaatgccgcagtgccgccgccgcgccttccgccgcatgtcggcaaagagtccccgccagccccggccggcgccctcccc

SEQ ID NO: 141828 - DNA, 122 bp, Homo sapiens
gagctggaaattactacttcctagctgctctgaagtgaacctggctgtccagctcacagacgtcaaggcattcctgtaagagaactagactgttctccattcttcattctaattgtctctct

SEQ ID NO: 141829 - DNA, 122 bp, Homo sapiens
cctctttgccttagagcacatcctggactttcataatttatagccctaagtacccttgagcggagttgaactgctcacttacctagctcaccagaggaacaagtagggtagagacagaaaca

SEQ ID NO: 141830 - DNA, 122 bp, Homo sapiens
ctactacatgctaggcgtggttgtaggtacttaggatgcagcagtgaacaagggacaaatcgttgccatcgtggagctgccattctatggggatacagacaataaatgtaataaatgaatta

SEQ ID NO: 141831 - DNA, 122 bp, Homo sapiens
ggctacaaattttaaatcctttctactgtgtaaacagcaatatcttagagccttgcatctcgaagatcataacttaaacttccctagtcattcccaaaatcactagatgggtggggtgggag

SEQ ID NO: 141832 - DNA, 122 bp, Homo sapiens
gggagaaaacctttgagtccacagagctgctcacagataccactgcctgtgtgtaactgccgtagaacactgaggcaggccagagagcggataggtgctaagcaccagtgacattctgaggt

SEQ ID NO: 141833 - DNA, 122 bp, Homo sapiens
ctcgccgcgcggctgcagaaatgtacaagtgctccgagccttacgaaacgcacgggttatcggagcgtcttcctcggctccctccctcccttcctccctccctcctcccctccctcgtcgcg

SEQ ID NO: 141834 - DNA, 122 bp, Homo sapiens
attgcaaggttctagattcagacctagatttctgcagagtgtttaagcggtgttctttcccggactggaagctcctgaaagcagggaccacgtctggtttgcctcagtttcctcagcgccct

SEQ ID NO: 141835 - DNA, 122 bp, Homo sapiens
accagtcctggggtggggggtgggcgcaggctactcccatctcatttctgctcacccccacgcgctcgctctcactgtggcagtttctggacctgatcattttgcccaagcaacttcaggga

SEQ ID NO: 141836 - DNA, 122 bp, Homo sapiens
cagagccgaaacaagaagtgggctcaggtcagcgggctttgtgttcttggcttcccacagcgtagccggcaagtggcgcgactcaggaaggcccctacgtaaagtgctgtctgaggacgtag

SEQ ID NO: 141837 - DNA, 122 bp, Homo sapiens
taagaaccaatgaggatgtggtatgcaaataagcaagtggaggccgccagccgacttcctcgcactgtgcagctgctccagtgagggcgcagactgtactggcctgtgcggagcaaggcggt

SEQ ID NO: 141838 - DNA, 122 bp, Homo sapiens
ccaggttcatctcactagggagtgccagacagcgggcacaggacagcgggtgcagcataccgtgcgcgagctgaagcagggcgaggcattacctcactcgggaagtgcaaggggtcagggag

SEQ ID NO: 141839 - DNA, 122 bp, Homo sapiens
ctcctagctaaaagcggaaaacagaggctcggaaccgctgcgtggttcttgctcttcactcggccgttttaaagggtgactctttcctgtcccggcctgcgtggtgtgggcttgtgggtctt

SEQ ID NO: 141840 - DNA, 122 bp, Homo sapiens
gcacgcggccctgctgggtggtgctgcccacggaaagcgtgtggatgctgttggtgtagccgtcgcagttgcagttgtcgtagtgcaggccgccgttgcccgaggcccagatgaagagcgtg

SEQ ID NO: 141841 - DNA, 122 bp, Homo sapiens
cagaataggcaaatccatagaaacagaaggtagattagtggtcgtctagggctggaggggcggggatggggagaaatagggagtaactgctaatggatacagagtgtttttttgggtgataa

SEQ ID NO: 141842 - DNA, 122 bp, Homo sapiens
gcccagaagagtcaacgttcttaaggaaacacaattagaaagtgcagtctgggctgggcacggtggctcaggcctataatctcagcactttgagaggtcgaggcgggtggatcacttgagct

SEQ ID NO: 141843 - DNA, 122 bp, Homo sapiens
cctgaggggctcccaagttctcagggccttgttgaaatgacagtctggagcgtgatcaaccgtaacatgttcctatgtaaataaaatataaacgtaataatacgcatggctaaggcaatgga

SEQ ID NO: 141844 - DNA, 122 bp, Homo sapiens
gagcctctcccggcccctctcggacgagctatttttaggtctgtaacggatgggggaaggcgggaatgccacgtttaatccgttagtaaaatccaggatccaagtgaatggcttcctggcct

SEQ ID NO: 141845 - DNA, 122 bp, Homo sapiens
gtctccaagatcttctctctctcatccaatcttgcctatgcagcattctattttcagagtcgtctttgctaatttggggaagtcacttattcaaacaagaaagtggttgacaaatgtttagc

SEQ ID NO: 141846 - DNA, 122 bp, Homo sapiens
cagacattgagaagtgcagtagcaatcgtgcaacaccctaacaggcactctttgagttgtcgaaggttcttttgagatacatgtgcagactcgtggattttgtagtgttttggctatctcat

SEQ ID NO: 141847 - DNA, 122 bp, Homo sapiens
taggataacatctacgttcaaatagttggatattcaagagtcgatatatgtctatggttccgaagggcaaagccaggcagtgtaggtcctgcagaactccaattaatcagggctgcccagta

SEQ ID NO: 141848 - DNA, 122 bp, Homo sapiens
taaaatcatctcatttgtcccaggatgtcagaatgacacagtgtggccgcagggctgaaacgaatttcacgggaaacaagcgcacgtgaggaagcccggagcaggcccatcaggattctatt

SEQ ID NO: 141849 - DNA, 122 bp, Homo sapiens
catcatctagtgaaaacagacgatgtggtattttttcagctatctcatatagttaggccccgagttataatttgaggtaagttgattcctaaacagaatgagctttacagaatgtgaccaat

SEQ ID NO: 141850 - DNA, 122 bp, Homo sapiens
taggtcttatggacacttttgagctctgggaaatcactgaagaatgataggatcatattgcgttttaaaacatctttctggctcctgggtggaggatggattggagaggtacgagggtagtt

SEQ ID NO: 141851 - DNA, 122 bp, Homo sapiens
ctgaacacacatggtcctttgtccgagagtgggatggggagccttctgcctttgggcagtcgtggaaaatgaaggatccctggtgagctggctggagggagactgtcttccctcctgttaaa

SEQ ID NO: 141852 - DNA, 122 bp, Homo sapiens
gcgcgggctttattctcagggggtgtggcgcctcgcccccaaacccagcagcccagcccccgctgcacagaccctttgtcatttcattaggaagggaaagggggacaaatcataacgctcag

SEQ ID NO: 141853 - DNA, 122 bp, Homo sapiens
tcacgtcattaaactcccacctgggtgacagagtgaggagctgtctccccacccccatcccgcaaaaaaagaaggtaactgggcaaagaagttattcttagtagagactggctttcatcata

SEQ ID NO: 141854 - DNA, 122 bp, Homo sapiens
gttttctccatcttctgctactctgcagccccatcttagcctgtcctcctcttaatggtacggccccctgtactcccccaaaccctttcctttctagcccggcgtagagtctccctctgtgc

SEQ ID NO: 141855 - DNA, 122 bp, Homo sapiens
agggttaacaattactgagtagagtccagggatgcgtttaacctcctacaacacacaggacggcctccaacaacaaagaattactcagcaatggtaccaggtttgagaaaccctggtctagc

SEQ ID NO: 141856 - DNA, 122 bp, Homo sapiens
agtagatgccactagccctcctctcccagtgacaaccaaaagtcttcagacattgtcaaacgttcccctgggttcacagatctttctgcctttggcttttggctccaccctctttagctgtt

SEQ ID NO: 141857 - DNA, 122 bp, Homo sapiens
aatccactaaaactgtactgacctccttgccttttgccttctccatacttgtagaagaagcggagcctcgcaacatgcttccaaaatggcccctgccccaagattgctatttgcaaagtctc

SEQ ID NO: 141858 - DNA, 122 bp, Homo sapiens
ggaaaagaccccttatcttggtgtttcttgcttttcctcgcagccccgccctttttgcttcgaaggacgagtttttcctgaattcacaatacttttgcattgaagatgtccggtccctttaa

SEQ ID NO: 141859 - DNA, 122 bp, Homo sapiens
actgtaagggtggataatccagaagcctgcagttttaaccctttcctgctccttttccaccgccttctggctcccaaacatgcggagggagaatttgttgaccccgggctgcagcatggagg

SEQ ID NO: 141860 - DNA, 122 bp, Homo sapiens
gaaagttcccgcggcccccacgcctcttcacagctgcagcgcctcccctgcttttggctccgcaagtgcccacttgagtcgggagaggtcctcgggccgccccaactgcccgccccacctgg

SEQ ID NO: 141861 - DNA, 122 bp, Homo sapiens
ccctaaccacccttaattcaagagcacattttaaaaaatgatctcattattgagtctcttcgaagtacttacttggttgtcacagaaaggttcttttacactggttccataatttatgtaat

SEQ ID NO: 141862 - DNA, 122 bp, Homo sapiens
atttctgaaaagtcggtcgagctgcggtgcatccgggatttttcggccgggttgtaacttcggtctggggtagtatttttggagggtgggagtgcgtgggcatggctcagctttttgtttgc

SEQ ID NO: 141863 - DNA, 122 bp, Homo sapiens
ctcaccgcgttggaacaggatgcgagggcaaagctcggactgcggccactctgaagggcccgcggcgctgctactgctgccagcgcccgtccgcccggccctgcccgcgcctccgcctgtcc

SEQ ID NO: 141864 - DNA, 122 bp, Homo sapiens
cttggtgacatactcaacacagtgcagggataagatacactaggcaaggttaagtgaagccggccagcacactcaccccagggaagtcagagtaagcctgtttccaccgcagcacagcagtg

SEQ ID NO: 141865 - DNA, 122 bp, Homo sapiens
tgaatgtagccgtgtgcttcctcagtagaaatattaatagtcactgtactctgcgctgaccgcactgcattgggaataatttgtttggttctgagcacattcaggagaggctttgacaaagc

SEQ ID NO: 141866 - DNA, 122 bp, Homo sapiens
aactaacacgtaaacccctcctccttcctacggctctgacatttcctctgcgtaggatttcgttgctccaaacccaccaggcctaagccatgtaatccgacgcgatccgtcggcttgatgac

SEQ ID NO: 141867 - DNA, 122 bp, Homo sapiens
cagtgccggtccccgccttagacgctctcctcccgggctcccctcccccgccggccccgccgtatggtgtgtgtgtcactggcagctgttgtcaaaagaaggcacctctttgtctccagggg

SEQ ID NO: 141868 - DNA, 122 bp, Homo sapiens
ttgaactaggaggaaggaaagcctgcacttcacacaagctgtgtcagctgtcaagcaaagcggccaaatgtcctggatagggaaattcataaaagttttcagaaatggctcgaattacctta

SEQ ID NO: 141869 - DNA, 122 bp, Homo sapiens
aggtgaggaaggaggctgagaaaaaactggcaaagttgtaggaagaaaactggtagcaatcgaaaagataaaagccgaagaagtaggagactagcaaagagaagcctgtgctgcacataatt

SEQ ID NO: 141870 - DNA, 122 bp, Homo sapiens
gaggtggggagatggaagaacgcgctgcaggtgtgcggattctgcctaaaattgcggctacgaactggaccttgaacactcctccgtcagctgacttgactgcctgtgtacagtctcaattt

SEQ ID NO: 141871 - DNA, 122 bp, Homo sapiens
acatttctcaaaataggttctagaaaatcccagtctcctgagatgctccatgaaaacaagcgatccacgatcaaacatgtttgggaaacgtctatattctatcctcgcctcttttggagatt

SEQ ID NO: 141872 - DNA, 122 bp, Homo sapiens
gacctctccaagcctcagtctccccatctgtaaaaggggaagggggcaagaggttaggcacggttctttctaatgactctgctgaggtggatggttccttccctagggaacgggcctttgag

SEQ ID NO: 141873 - DNA, 122 bp, Homo sapiens
ccctcgccttatttcaaaaaaactagcaaggggtggattcgacatttttcctacttcctacgtatcaggctctcaggagctttatgcacattgttttattgaatcctcagaacttctcaggc

SEQ ID NO: 141874 - DNA, 122 bp, Homo sapiens
gcaattccgctgttctggctccagaatctcctaacgcgcaggcgtccaacgtgaccggcgcgactcaccgctctaatctctctggttttccaaggccttgctcggtggtcctgccgggcggg

SEQ ID NO: 141875 - DNA, 122 bp, Homo sapiens
gatgtgggctcacagtgtgtggggcggtttccaggcgctcacaaggaccgctgtttcctccggccgcctgccccctgccccctgccccctgccccctgccccctgccccctgccccctgccc

SEQ ID NO: 141876 - DNA, 122 bp, Homo sapiens
tcctcacggtacctggggcttctagaaccttccccttgggacccaagtaaccaatgatagcgcagcaaatgaggaaccaaccgtcaccccacagtggaaaggctcttagatgatcattttga

SEQ ID NO: 141877 - DNA, 122 bp, Homo sapiens
tttgagcttagatctaaagaacaaggctgagtaaaagctaaccaagaagcaggtgggtggcggggggagcatcccagatcctgagaagagcttgcacaagggtgaaccccacccccactccc

SEQ ID NO: 141878 - DNA, 122 bp, Homo sapiens
cggctccctcctcctctcccctccctctttccccgcccggccgcgggagcctcgtggctgcgtcaccgccgcccccccagacaagatggacaccgcggaggaaggtaagtcggcgacgcgcg

SEQ ID NO: 141879 - DNA, 122 bp, Homo sapiens
tgcaaaacatctggcacctgtgcggctcgtggggaatgggcgcgaagccctcggcgcagacgcagaggtagctagtttggttcaggggctggcactggtactcgcagttggctctgaagcac

SEQ ID NO: 141880 - DNA, 122 bp, Homo sapiens
ggaggcccgggccccgccgactcagccttagggcgctgcggttgcctaccagctccctggcggccccatcccaggccaccccagctagaaatcgcccctgctgctggagctgcggctgcggc

SEQ ID NO: 141881 - DNA, 122 bp, Homo sapiens
gagatgcggccggactggatgccacattccaccacccaggccggctcacctctgcgcggccgcgttccaaatcattgttcacacagaatttggctgcagcgggtgtccttgagtctctcaca

SEQ ID NO: 141882 - DNA, 122 bp, Homo sapiens
aatgttgcagtgaggatcgtgcaactggtggaacacttctgccagggctggttcccggcccgcttcccccagcaaactcaaagtaatcactaattttatgtcccctaggagtgcctttccct

SEQ ID NO: 141883 - DNA, 122 bp, Homo sapiens
atacaagcataggaccattcatcagtgagtgtcttactccataaatgaaaacaggctgggcgcagtggctcacacctataatcccagcactttgggaggccgaggtggatggattacctgag

SEQ ID NO: 141884 - DNA, 122 bp, Homo sapiens
tccaatcggaggcacccttcgcgggagcggccaatcgggagctccggcaggcggggaggccgggccagttagatttggaggttcaacttcaacatggccgaagcaagtagcgccaatctagg

SEQ ID NO: 141885 - DNA, 122 bp, Homo sapiens
ctcgccgggactcatggaggggaccctgacggggcagtcagggctgaggtttcctaatcccgtgtgtttctttctccccgacgcccggcagaggcgccctcgcccccgccgcccgcagaggc

SEQ ID NO: 141886 - DNA, 122 bp, Homo sapiens
cggagccccggcggagagcggagcgcagcggctgcggactcaccccgccgcccggccccgcggcagcagctgccgctgccgctgccgcctccgcctcccggctctcccgctcgcggctcacc

SEQ ID NO: 141887 - DNA, 122 bp, Homo sapiens
ctccatctgtcaagagaggcacctgttaaaagttccacagtgtttccgtcctcaaatatccgacatataattacaatcaagttccagacaagcaggccagctttcttcaattcaacaaattt

SEQ ID NO: 141888 - DNA, 122 bp, Homo sapiens
ctgaacatttaggaagcaagatgtctagcaggctgggccttgagagaacagtaactgtttcgcaactgaaagtcgctactcgagccttgccaactggggagactatgcccatgatatccgcg

SEQ ID NO: 141889 - DNA, 122 bp, Homo sapiens
ctgcaatcccagcgtggctcaagcctgcaatcccagcgtggcccacgtctccaatcccagcgtggctcaagcctgcaatcccagcgtggcccacatctccaatcccagcgtggcccacgtct

SEQ ID NO: 141890 - DNA, 122 bp, Homo sapiens
gctgacctgggcgaccttggggcttctggtggctggactcgggggtcatgacgacctgcacgacgatctgcaagaggacttccatggccacagccacaggcactcacatgaagatttccacc

SEQ ID NO: 141891 - DNA, 122 bp, Homo sapiens
atcttcctcttttcagctttccccaactcggctcaggccgctctcctccctagatgctctcggtgcttaccacggcctctaagactaattccaaagcccttggcccgagtcccgtggtccac

SEQ ID NO: 141892 - DNA, 122 bp, Homo sapiens
tccgcccccaccaggtgccctcggggttggagaatcatcagcccaccctcatctcagaggcgaggggaggtgggcggcgccagcgggggggtccttctgctgtgccgcgtgcctccttcagt

SEQ ID NO: 141893 - DNA, 122 bp, Homo sapiens
ccagggagccacggactcagtttccctggctgtagcatggggacaatcccctcagacttccggaactgctgtaaggataaaatgaggtccttgatggcaatgcgtgtgacctttggcacaaa

SEQ ID NO: 141894 - DNA, 122 bp, Homo sapiens
gagggagcaaccattcatcccttctagtggctactcctgtgaccaccactagcccagctccgcagcacttaaggcacctttcccaggtctcaaccgctggaggaggtgggcaggctcgctcc

SEQ ID NO: 141895 - DNA, 122 bp, Homo sapiens
atcttcctctggctgtgtgatcccagcagctgctagtgcaggcttctttgtgccgccgaccgtcccagaggctgaggtgggagtgtgatgggcgtttgccccacagtacgttgagttttctc

SEQ ID NO: 141896 - DNA, 122 bp, Homo sapiens
cataatgtatttctttagtaaattacccccatgccaccaccatgactccgattccatcaacgactcaagtgacctgacaagaaactgccttggcctctgaggtgtgcaccacaggcctgtta

SEQ ID NO: 141897 - DNA, 122 bp, Homo sapiens
cggctgggccgtcccactgatatgtgggctctgctgcctgagcacagctttcttgtcggacggttccatcatccacctgctccccaaactctgcagcctccctgcaccccccacccgctaaa

SEQ ID NO: 141898 - DNA, 122 bp, Homo sapiens
ggtgcctcttctccctcctggagagcccaacatgcttgaagttaacctgaggccgcctctcgggcccggcgaaacagagcgcgggcccgacgaaacagagcgcgggcccgacgaaacagagc

SEQ ID NO: 141899 - DNA, 122 bp, Homo sapiens
ccaggcccgcgttccgggtcctctcccgccgaggccgaggtcagaagtccacaggggccccgatcaataattatcctgggtttgcccccgggagggcgtctcagccagggctcctgccgcct

SEQ ID NO: 141900 - DNA, 122 bp, Homo sapiens
cggggccgccgccccgtgagggaggcgaggatgtcctgcctggtggcctccggggcccctcggccctgcccatgcctctgggaacatctgtctgccgatgttcatgtcaatggcttcctgct

SEQ ID NO: 141901 - DNA, 122 bp, Homo sapiens
taaaatttagttaggccgggcacagtggttcatgcatgtaatcctatcactttgggaggccgagacaggcagatcactggaggtcaggagtttgagaccagcctggccaacatggtgaaacc

SEQ ID NO: 141902 - DNA, 122 bp, Homo sapiens
gcagtggagcgggacgaatttatctgccagcaattccctggaaacaggattccttgcaggcgctgtgccagcgcgggcccttaagcaactgaaagttaaacgcccacgtgaatagctctgag

SEQ ID NO: 141903 - DNA, 122 bp, Homo sapiens
ccagttgctggcgtgcattgtcactcttctgggcggcgctgcgctcggctgctagctcggcgttcagtgtgtccacctagagaggagagaggagtttagtcacttgtgcctgaggggtggca

SEQ ID NO: 141904 - DNA, 122 bp, Homo sapiens
cagtaggctcctaaatctgaactcaggcactatgctacactctgtaagttaatacagcatcgggacatatttaaatcattagggttccccctacttggaaatcattaactccactaatttat

SEQ ID NO: 141905 - DNA, 122 bp, Homo sapiens
tttctttacaaaaacatgtcatgggctggatttgcccacagggctgttgcttgttgatcccgtctctatatataatctaatagatctttctaagcccaaatttcacgaagctgcctttgtaa

SEQ ID NO: 141906 - DNA, 122 bp, Homo sapiens
gctccgcagggccgggcggccgcactgggcatgctcagtagccggggcaggttttttggtcgcaagtaggaagctttctgcactacaccggagaggggagccgcgatccggccgcgccgccc

SEQ ID NO: 141907 - DNA, 122 bp, Homo sapiens
gggaagctggcactgcggggatcttgcccggtgtcctggtcctcttgcttccgtcgcggccgcatgtgcgtgtgtccaagcaggtcctgggcgcctcaactgctgcccctggttgaatgttc

SEQ ID NO: 141908 - DNA, 122 bp, Homo sapiens
acacacacacaaacagctgttggaaaaaccaatatcaacatcagttaaaataaatctaaacgcttttcaaagcagagcacaatgttccctcggcccggaatgcccttcacctccactcctct

SEQ ID NO: 141909 - DNA, 122 bp, Homo sapiens
tagagggaaactgttgacaggtagggaaagtaggatgccccatggataaagtgtcaactccgtctttatgacaggccaactcagcgggtgcccaccacgcttggctccaattcaaagagcca

SEQ ID NO: 141910 - DNA, 122 bp, Homo sapiens
acgcaagctcaggccgcagctaccaagggaacctgcctaagcgggcggcacagaagggagcgccggggacgctctggttttcagatcccctttcggaaggtgagattgtttttcataacagg

SEQ ID NO: 141911 - DNA, 122 bp, Homo sapiens
cggcgccgagctcggctctgctgggaggcgcggacagcccggggctgccacctgccccaccgggtcctggcgcacaaagctacacgcctctctgcagccctctgccctgcttcgcgttccgg

SEQ ID NO: 141912 - DNA, 122 bp, Homo sapiens
tgcactggggctggagactcctgatgtgcatggggttttggtgaggttgagctgtgtgtccgccaagctccctgagcctgtgcctcgaggagataaggtgaaggtggcctgctcttccaccc

SEQ ID NO: 141913 - DNA, 122 bp, Homo sapiens
gctgaaagtccaccgccgagacgagacaaaccacactaggtcttatttcttctatctaaccgtaaatttatacccattaatccaaatggcccttttactatatgccacccatcgccagacac

SEQ ID NO: 141914 - DNA, 122 bp, Homo sapiens
tccatgttggctctctggggcgcagcgccctccgcccggagcacctgagccaccatatcgcggtctgcaatagatactacaaactgaggaccaaagtgagacttgaagatttttccatattc

SEQ ID NO: 141915 - DNA, 122 bp, Homo sapiens
agatgacactgaatttggaggtgctacagaaagtcaatgaggacagagagatgatacaaacgggatctgaagagtcagtgaggaacgcaagaaacaacacaggagtcggcctcgaaaaaatg

SEQ ID NO: 141916 - DNA, 122 bp, Homo sapiens
ttgcaggagctggcctggaacataggtacatgtgtgctggtttggtgactggagtcatggcggctgacctggagctggggttcttgggttccaacctggcacaggagtcggcctggaggcta

SEQ ID NO: 141917 - DNA, 122 bp, Homo sapiens
cgggtccggcgtggcgtcagcaggctgcgggcacgcaggggctggcacacggctaggcagcgctcggcgctcaggcctgccacgctcagcaccgtggcgtaggcgcacagctcgtgcacgaa

SEQ ID NO: 141918 - DNA, 122 bp, Homo sapiens
aaacaggcttgctgaaaataaaatcaggactcctaacctgctccagtcagcctgcttccacgaggcctgtcagtcagtgccccacttgtgactgagtgtgcagtgcccagcatgtaccaggt

SEQ ID NO: 141919 - DNA, 122 bp, Homo sapiens
aaacagactgcagcagaaaaaaaggctagttcaaaacctgagccaaattctgaggctgaccgtctgaatcacttaagatgcctgttaaaaatgcagatttctggcctccaacccagacctac

SEQ ID NO: 141920 - DNA, 122 bp, Homo sapiens
aacagctccatttattgagaatgtcccacgtgccagcactgtgctaagtatgtctattatcgcaattaatttctattcatcctcacaacaaccatatctggctgtctgcagtaacattccca

SEQ ID NO: 141921 - DNA, 122 bp, Homo sapiens
aaggtgcagcaagtttcgatcttcaaaaacccgcagctactcacagtgtaagatgcctgtcggggtggggctctgggcctggaaaaactagagcagtctggatgctgcgaggcggcgagcag

SEQ ID NO: 141922 - DNA, 122 bp, Homo sapiens
tgtcagccagcagggggcagtgtgaaaatacacacaccaggcccttttttcaaagggtctcggcttccctgagggtgtctatctgtgcctctatgaagcatggcttgggtcattcctccagt

SEQ ID NO: 141923 - DNA, 122 bp, Homo sapiens
cagtaatactgcagctgttctaatccactcctaccaacagttttgaagagatgttgatagcgaatcaagctttataaccatgtgatcccatcttatggtttcaatccatgcacaggaggaaa

SEQ ID NO: 141924 - DNA, 122 bp, Homo sapiens
ccttgggcccagggatctgcattttaagctgcattccaagtggctctgatgcgcctccaacgcttgggaaacacaggatgctgtccaggctcccctgagtcagtctagtagtcacagcgatg

SEQ ID NO: 141925 - DNA, 122 bp, Homo sapiens
tctcatcagccaggcagccagggggtcctgttcaaacccaaagcagctcatgtccctccccgctcagcagctgccacactcccactgcactcagggtaaaacccaaggtcttacaagcccct

SEQ ID NO: 141926 - DNA, 122 bp, Homo sapiens
tctcagtttaaaataatttccaccaggaagcttttcttagtttcttataccatctcagttcggtcggcctattatgctatcctatagtacattatatttctatttcctaagttagcaaactt

SEQ ID NO: 141927 - DNA, 122 bp, Homo sapiens
cctcgggccgcgaggccagagtcgcccaggccccggttcgggttttaagagacacggccacggcccagaggcaaacgagccggccccccacgagcgacccgagtcacccccccgacccaggt

SEQ ID NO: 141928 - DNA, 122 bp, Homo sapiens
catttgcaaaatggcaacaatatcactcacctcacagaataattgtgagaaccaaagagacgaggcgtaccgtaaaacacattaaaatgcaccatataataactagttactataggttattc

SEQ ID NO: 141929 - DNA, 122 bp, Homo sapiens
ctcactgacttcaaacatgaagccgtggaccctcgcggtgagtgttcccattcttaaaagcggtgtgtccggagtttcttccttgtgatgttcagacgtgttcggaatttcttccttctggt

SEQ ID NO: 141930 - DNA, 122 bp, Homo sapiens
tgctgagagcagtaagatgtatagtgcagcgaaaaataatgtagaacttttgaattagaacgtctgccctttcagttccattgaagggtccttgatctagggcaagttgttttaatctatct

SEQ ID NO: 141931 - DNA, 122 bp, Homo sapiens
tgtatatcgttgtgtttccatccatctgtttttctctgccaaaagggagattcttgctcccggcagctgaccttgctgttctgtaattgccaggcaatttagagatgacttgaaatatataa

SEQ ID NO: 141932 - DNA, 122 bp, Homo sapiens
tgcagccctgccagccaagacttcctcactgcccgttcagcccctactgccgtgtacccccggtgggtccctgctctgcggcaggcatgctccaagtggcagggctcccacctgtcatcagg

SEQ ID NO: 141933 - DNA, 122 bp, Homo sapiens
ggcagggggcgcctccctacatgctcccacccgccgccgcccggcttgccggctctcctccgcaccaacgtttgccgacacccccctgggtcccctcggcccgcacggagctaccctggcgg

SEQ ID NO: 141934 - DNA, 122 bp, Homo sapiens
attgagaatcactacattagatattactaacccatttcccagaaaggcgagaatcaacaccgtagaaggtgactggctctgagcatttgattacactgcttgatctcaacttcttataaagg

SEQ ID NO: 141935 - DNA, 122 bp, Homo sapiens
agaaaagactcgggatgggtgtggggtctggcctgtgcaaggggagtggtcctaaaaccccgtgtgtgcatgggtacacgcgcgtttccagtgcacatctgcctgggcaggacacggtttcc

SEQ ID NO: 141936 - DNA, 122 bp, Homo sapiens
ctcagtcacccaggctggagtgcagtggtgtgatctcggctcactgcaacctctgcctcccgagttcacgtgattcttgtgcctcagcccgcagagtaaccgggaccacaggcacctgccac

SEQ ID NO: 141937 - DNA, 122 bp, Homo sapiens
gcttttctctaaacagatctgatattgctgctcctgtggttttctcaaaattaactttgccgtggtttttaaaaaggaatcaaaatgcattgttgcattaagctttttcaataaaggaaaat

SEQ ID NO: 141938 - DNA, 122 bp, Homo sapiens
tttccaaatggcagcttctggctgccagcgtaagtgtggagcctgctgtgtttggaggaacgctaaccaaaagtagccaaaaccctgacccttcttcactcacaagcttcaaataatgcagg

SEQ ID NO: 141939 - DNA, 122 bp, Homo sapiens
acatgttgattttagcccagtgggatctctatttggcttctgacctctagaactataagacgacaaagccccagggaaatgcagatgcagagactactggatcccaggacgtgatgtattct

SEQ ID NO: 141940 - DNA, 122 bp, Homo sapiens
gcgcgcgctcccgggaggcggcagcggctgcagcgttggtagcatcagcatcagcatcagcggcagcggcagcggcctcgggcggggccggccggacggacaggcggacagaaggcgccagg

SEQ ID NO: 141941 - DNA, 122 bp, Homo sapiens
tcttcccatcttggtaaaagtagatcagatccaccaggagctcattgcagacagtgcatacgaagcacggcgggtgccagcaaacgccgtggccagcgcgtgacgcaaacacagcgatgtct

SEQ ID NO: 141942 - DNA, 122 bp, Homo sapiens
tagttaaaccctggtgttcctgacacaaacttcaggaaaggattttgcacttgtgcagaccgggcgagcagagtaagaagcaggtacgtgggtttttccaagttctgtgtttcagtcctgtt

SEQ ID NO: 141943 - DNA, 122 bp, Homo sapiens
gtcactcttttccccattttcgctggtgatttccaggcggataaattttggaggacgccccggccgtcgacctggaccgaatcgcctcttgcctcgtccccttcctctgcctcttgttctgg

SEQ ID NO: 141944 - DNA, 122 bp, Homo sapiens
tatcctagtgctaagaggttgttgaataggagcctgcttcttgttggtctgctttgccagcgggttgaattttgacatatttcagtcatctacatggttgagatgctttgttgcacgagtgg

SEQ ID NO: 141945 - DNA, 122 bp, Homo sapiens
caagcagtagcaagatttattgcaagaagcgaaacaacaaaccttccacaacgtggaagacgaccacagggagtaaccccgctggctcgggcagccggcatttattctcttatctggcccca

SEQ ID NO: 141946 - DNA, 122 bp, Homo sapiens
cgacccgcgaagcaccctcacagctcacggccctccctccaggccggaaacgtctccgcccgcttccgcttcccgatgcagccgccactgcccgaagcaaagatggcgccaagtgcgcggcg

SEQ ID NO: 141947 - DNA, 122 bp, Homo sapiens
gcccccaccgcaggctccgtggcactgcctcctggtcactgctcctggggcccccatcaccgcagattcggctgcctgtaatgagtcgcagcaacacgagccgaagcatttgtgtctggttt

SEQ ID NO: 141948 - DNA, 122 bp, Homo sapiens
gaaatctgtatctgtaagcatttaatcagccattgagtccttgtgaaacctcctggcccccgtcagtgaaagcacagctagatagatttgaacctgacactgacatgagacaggcaatgtgc

SEQ ID NO: 141949 - DNA, 122 bp, Homo sapiens
gagtgagtaacacctcattctggccgagagtagggcagctgcctccagactctggggagacgggcgctagatttggggctcagaaggccctgctctctcccatccaagtgaccagatgccct

SEQ ID NO: 141950 - DNA, 122 bp, Homo sapiens
tactggatatagagggttgaaaataaatctgcacttaaaaaaacactcctcctataaaggcgtgggtttgcattctttctcctgaaactgggcaggtgttttcactatatttcccaacagtg

SEQ ID NO: 141951 - DNA, 122 bp, Homo sapiens
gaacagcaatgtcatcctcttctgtgacatgtgcaacctggccgtgcaccaggagtgctacggtgtcccctatatccctgagggccagtggctgtgccgccgttgcctgcagtcaccctctc

SEQ ID NO: 141952 - DNA, 122 bp, Homo sapiens
ggaaaatgtctgagcaaacagattgcagtttctcgcagttccagcccaggagaggcagcacggcgatcacaatggctatggtccacatcaggcaaaacgccaccacggccttgggcctggtg

SEQ ID NO: 141953 - DNA, 122 bp, Homo sapiens
ctcatctgggatgcagaggtgggcacagtccctcggttctgagcaggccagggatgtgctcgtagctgtgtgcctcccacttcctctctgcctgaagaaactgcacctgctcacttcaggga

SEQ ID NO: 141954 - DNA, 122 bp, Homo sapiens
tccagggaggcctgtggttccaaaatgaggtccttcccgcacccactcaaatgaagatgccgtttccccagctcagagagagcaagggaggggctaaggacacacagtgatggatctgaggc

SEQ ID NO: 141955 - DNA, 122 bp, Homo sapiens
atgctgggtaaagtttctttctggcctttggcatttaagaagaatttctcttcttcatgtcgatggagtgctggcatttttgtagcagttgtaaatgcaacgatggaaatctaaaagcagac

SEQ ID NO: 141956 - DNA, 122 bp, Homo sapiens
cctagatgtaaaagctctgtgttcacaaatcttcccggggacccacattaacttccgagtcgggaaggaatcatctgcatgaaatcgggggtttcacggtgctcccgcatcttggcgaagat

SEQ ID NO: 141957 - DNA, 122 bp, Homo sapiens
cgccacctccccaggagggcgtccggggcgtcccctctgggggcgcaggaggcccgggggcgctgcccggtggccgcggcgcccggaggccgcactgccggcggcggcggcggcgcggctcc

SEQ ID NO: 141958 - DNA, 122 bp, Homo sapiens
caaacatcacaaagtcgtttccgagaatgcttctgtttagtttttatgtgaagatgatcccgtttccaatgaaattttcaaagaggtccacatatccccttacagattccaaagaaagaggg

SEQ ID NO: 141959 - DNA, 122 bp, Homo sapiens
gcaccaggggccaacctcaggctcctaaagagacattttccgcccactcctgggacactccgtctgctccaatgactgagcagcatccaccccaccccatctttgctgccagctctcaggac

SEQ ID NO: 141960 - DNA, 122 bp, Homo sapiens
cccttaaagcgttaaagggttgatttaggtaaacagcgattggtgaaatgggaagcctgccgccgtggtttgtggtttagggtcctctggagcagcgatttcaaaatcccagggctcagctt

SEQ ID NO: 141961 - DNA, 122 bp, Homo sapiens
ttggtttttagcagctttttcacttcgttcaagtcacttttcggcagtgtgggggccatccgctccacacactctgccacagagagcacagcagcagcatccagtgcctcgctgctctcctt

SEQ ID NO: 141962 - DNA, 122 bp, Homo sapiens
cctcttatattgcaggcaaaaatctgaggttcacagattagtagggcaagtagctgattccgaagtgtgtacttgcctttatgatactggatacacactggtgttaacaaggagaacgatgt

SEQ ID NO: 141963 - DNA, 122 bp, Homo sapiens
ggttaccattctacttttcttgtttgggatctctcagacagatgcagccatcatctaagacgacttttctcccatgcctggcacatgggcagaggtggctggcaggctgggtcttccctctc

SEQ ID NO: 141964 - DNA, 122 bp, Homo sapiens
gggctccgacccacctacctgaggatcagtccgggagccagcgtctggacagagcggggtcgcgccctggaacacagggcaggagaggaaggagaaaagcccagctgacagcgcaggggcga

SEQ ID NO: 141965 - DNA, 122 bp, Homo sapiens
ctacctgtgctaattaagaacagtggataattagcattttaagttgcttttctcccttagcgagaatgataaaatagacgttgcttgatcttctgaattcatgaatcataatctgtgttcat

SEQ ID NO: 141966 - DNA, 122 bp, Homo sapiens
actacagcgcccctggaggcccggagggagaacggcccggtcccagttgtgcagggtagccggatccatccatcttgctggaagggaggggggagagcagctccaagaaaggcttctctgct

SEQ ID NO: 141967 - DNA, 122 bp, Homo sapiens
ctggaaatctggactctggggaggtctcagctgagcccgccccttcccccaatcgcagaccggcaccctagtttgctactttgtttctactgggctctgagtgacagtccatgagcaactaa

SEQ ID NO: 141968 - DNA, 122 bp, Homo sapiens
ccattcactcatgcattcatttgtgtgttcattcatgcttgtgctttgtgcctgggcacacgcctgccactgggatacagaagttaaccaacagatatgggccacgactgcacagaagttag

SEQ ID NO: 141969 - DNA, 122 bp, Homo sapiens
tctgccagagagagcagctcttgtcccggaacatgaggtaggtggtggggcttggggacacgcggctggactggccggagaagtcctcctggccggaggggagccaagtgttcctgttccag

SEQ ID NO: 141970 - DNA, 122 bp, Homo sapiens
aactgactggtcagtgagagatgaagagagtccatgtaatcagtgactctcagtggagttcggcagaagctgtactttatgttcaagtgctaaagagctggaaacaagcctggatctttaaa

SEQ ID NO: 141971 - DNA, 122 bp, Homo sapiens
ttaacccttgggtggaagcatttcaacaaaataaaatgagatttgcctgcaaagcgagaacgcacgggtgggaatgaaggatcctgcctgtgccaggctgctgcctcagcagtgtccaagca

SEQ ID NO: 141972 - DNA, 122 bp, Homo sapiens
gggtccctgctgctggtgtctgccctctccctccacctagtggcctgtggtgctctcctccgcccaccctccctggctgaggaccctgctgtgggtggtcccagggcccaactcacctctct

SEQ ID NO: 141973 - DNA, 122 bp, Homo sapiens
ccgtgcctcctcacctcacctctcttctctcccgctctctcctcctccacagatgccacacgctggcagctctgaccagccccacccctccatacaacaaggtttgcacgtaccacacccca

SEQ ID NO: 141974 - DNA, 122 bp, Homo sapiens
aggggctcgggctggtgctgttcagggtgcctcagtgctgaatctcccgatctaggccagcgagccgtctgcagcctcggggctccctggccaattatgtaaggaacgatgttctaggacag

SEQ ID NO: 141975 - DNA, 122 bp, Homo sapiens
gctcggggaggaagttatttggggcacggcgctgacgtcagagacagagtggggccgggccgtggggtcgggggcgccggacctgtttccccgccggcgccgggggtcggtactcgcgggcg

SEQ ID NO: 141976 - DNA, 122 bp, Homo sapiens
tgttgaaattgttgatgtcaatattgctatgattggcactcctgggaagcagccccaggacgccctccctactgggcctggtggaggattgggtgggccttcactcctgctccacgcccccg

SEQ ID NO: 141977 - DNA, 122 bp, Homo sapiens
aagaagccgccccaactcccccgcggcgttctttcttggaacaaaactagcgcggagccacggaactccgcagtttgcgtagacttgaatttcctattcctcggacgatccatgtggaatcc

SEQ ID NO: 141978 - DNA, 122 bp, Homo sapiens
cggagttggggcgtttgggggtgcaggctctgcagaggcctgggggctgcagggcccccgcgtgaccttggggtgggttggggagcggccgtcgccacgcgggacggccccagcctccagga

SEQ ID NO: 141979 - DNA, 122 bp, Homo sapiens
gccgcggagacctcacctgctgttcctgagagcgaccggtgaccgatgaccgcggggtggcgcccggatcgccttcgcgcccgcgcccgcgccaggcgcctcggggattctgtcggcgtccg

SEQ ID NO: 141980 - DNA, 122 bp, Homo sapiens
tgcaagcgggaacgtttgcttttttttcccccttgccctttcctgggtcactgcaggtcacgtgatgactgtcacgtgactcggtcaaaggatcttttcctcttacagccttgcaaaaaaaa

SEQ ID NO: 141981 - DNA, 122 bp, Homo sapiens
atctcggcgtggagacacccgttcaatttccaggggtctaccttcccctacccgggttcccgccgctcctcagcgcccagacgcacctcctagtcccgcccccatgcttcttccagccttcc

SEQ ID NO: 141982 - DNA, 122 bp, Homo sapiens
tttcagagaggtcctgtcccactgctctgaaacagtgttttagctcatagctgatatacacgtagcagaagtgcagtatgtgctcaaacattacatcaaacttgctcagaagttacagtaaa

SEQ ID NO: 141983 - DNA, 122 bp, Homo sapiens
ggggctctcgcctctgccagagcaggcagcttccgaggtggcaagggctttggggagcagcgggaggcctgggggtgccgagtgttccggaaatattgctggttcttctggggcagtcctgg

SEQ ID NO: 141984 - DNA, 122 bp, Homo sapiens
ccatggactgtataagcacaatatccacatattggattctgcaaaccatgaagaattcaccgtgttatttgtgtgtgcacagaggaaaacataaacaaagagtcaattaatgacattaaaaa

SEQ ID NO: 141985 - DNA, 122 bp, Homo sapiens
ccagtcactgtggccagagggagggggtactgggccccacctgggtccagtgggggcatgcgtcccaggaagaaaaccctctgggcccaggtcctactctgtacacaactcccgcctcggtc

SEQ ID NO: 141986 - DNA, 122 bp, Homo sapiens
cactctgcgggctgcaccgggtggctctggttgggggcgaagctgtgttgactgggagagcgttggaaattgagacatggagagatgacgggagtgcgtttctctgggtttgatctccatcc

SEQ ID NO: 141987 - DNA, 122 bp, Homo sapiens
tgctcactgtcgggccctccctcacctcttcgaagagctccaggctgtaggtgttgtcgtcgtcggcgaagtagaccacgccaggctggctggagttgcgcgggaaggtctcgcgcagccag

SEQ ID NO: 141988 - DNA, 122 bp, Homo sapiens
ggtgataatgctatagggataaattagagataggaggaattttataggaatgcagggaaacggtctatctattgctttggtttaaaacaatggcaaataaggacttttggcctgcctaagga

SEQ ID NO: 141989 - DNA, 122 bp, Homo sapiens
acgtcttagaacctaagtgcattctccctagccaagttaaggaaaactgggggccctgtgcgccttctagtggtggatttttccccctacagagccaactatctccaaggttcctttaatac

SEQ ID NO: 141990 - DNA, 122 bp, Homo sapiens
gctgctttccccgggaaattccgatttcatcccccgttgcgggccatcgccctaacttggcgaaagatatttcttaaacgacaaaaccaaatgcccagctcccaggtttccaggggaaccag

SEQ ID NO: 141991 - DNA, 122 bp, Homo sapiens
ggcagaggcaggcagccccagccgccctcctcccacgctgggcctgtctgcccgatcccgcgaagaatctcccaagagttcacgcacccgcctccccgctggcctcatctgggggagccact

SEQ ID NO: 141992 - DNA, 122 bp, Homo sapiens
ccacccaccagatgaacacccggcagccctcaccctgtcagccccatgaagttcgtgtgacgtcagcaaagctgcacaccagaggtgggaaaacaggtggaggagcacctaagcgcctcagc

SEQ ID NO: 141993 - DNA, 122 bp, Homo sapiens
ctccctccctccgtcttaggtcactgttttcaacctcgaataaaaactgcagccaacttccgaggcagcctcattgcccagcggaccccagcctctgccaggttcggtccgccatcctcgtc

SEQ ID NO: 141994 - DNA, 122 bp, Homo sapiens
aggaggcctaaagcggggttcgcgggctccctggctcttcacatatggaggacatgcctccgcagaagcgggaggcatgcaagcaaagtgtgagcggacaaagaggaaagtgacgcaggggg

SEQ ID NO: 141995 - DNA, 122 bp, Homo sapiens
ggccatcaagagtttttatgacaatgtgtatgaagctgcctttgagtagggtggctgcatcgcacacctccagggggcagcattgtctttgtcctctatataaatggttcccctggaggaaa

SEQ ID NO: 141996 - DNA, 122 bp, Homo sapiens
ggggtaaattggcagctgctgaaccctaaagtcgtggggcagggctccgacaggcctttgcgcctcctttccccatcagcgtttagagctaatgggaaaggaattgtttattttcttttgtt

SEQ ID NO: 141997 - DNA, 122 bp, Homo sapiens
acaaggtgtagtgaagaagctggcagacaccagaaaccagcagatgggaacgaaagcaaccgctagttgccctcactgctcactaacatagacactccccctggcaccatggtagtttacaa

SEQ ID NO: 141998 - DNA, 122 bp, Homo sapiens
cactgccctagcagcagggtccatgaggagtcccataggggagcagtctctccactgtaccgctgtactgtaatgccacccccatactgctggctgggggcttaacccagcctcagcaagaa

SEQ ID NO: 141999 - DNA, 122 bp, Homo sapiens
gccagaatatcaaaagaatcatctatatgtgttttgaaatcttatgaattaaggcagtatcgaagagaatgacagtatgcaaagagctcaaatggttgagtgggaattacctggaccttagt

SEQ ID NO: 142000 - DNA, 122 bp, Homo sapiens
agctgggttgaggaaggcgcggaggacaggaaccccagcgccggcagctaagcctccagacggagcccgcccctccggccggttcctgcctccaattggcccgcgagcccgtccgtctccac

SEQ ID NO: 142001 - DNA, 122 bp, Homo sapiens
gtccagacgttgtgttgcattttattcttctgtgcccatggtcatttcagaaggaacttacggttccttgaagcagaaagtaaatttgcatttcatagtgagttggagatgagagcaagctg

SEQ ID NO: 142002 - DNA, 122 bp, Homo sapiens
acacataccacgagcccgattactatagaaccgaagagacctttccagctgtttacacttcggatgtaaaatggcaatttgacatagactaacagtgtgatgtgagcatctgcgtaaaaagg

SEQ ID NO: 142003 - DNA, 122 bp, Homo sapiens
gcgctttctcccacacccgccacgcctgtgggcctgtgcatgtccctccacgcatccccacgcggctaaatctcccacacccgccacgcatgtgggcctgtgcatgtccctccacgcatctc

SEQ ID NO: 142004 - DNA, 122 bp, Homo sapiens
acaacaagctccttcctccacctaagtttagttagaccccagttccactaaaaggataagcgaaccatcatactttcagtccaaagcagttattaaaattatgtgatttttattgccaccta

SEQ ID NO: 142005 - DNA, 122 bp, Homo sapiens
tctgaccaagactgagaggaccatcattgtgtccatgtgggccaagatctccacgcaggccgacaccatcggcaccgagactctggagaggtgagtgtcagacgggactgccagagggactg

SEQ ID NO: 142006 - DNA, 122 bp, Homo sapiens
ggaacaaaagaggcgaggtccgggagacccatacagggcggtttccacagagaccccagacgcagtcttggctccaccctcaccgcggcccagggctaatactggacttctttccttatcgc

SEQ ID NO: 142007 - DNA, 122 bp, Homo sapiens
gcgggggtggggatggggtgcggggtgagtgagggaggactgcaagtgacaaacaggattcgtcaaaagagaggtgtattaaagtgccgatcaaatgtaatttaacagctaaactttccctc

SEQ ID NO: 142008 - DNA, 122 bp, Homo sapiens
acgctcatgctccccttgggtggtgccacattattcattagacaccttctccgggctctccgtcagtgtaggctgcagggaatggtaagctattaacttccagtgacaagaagcttaaatta

SEQ ID NO: 142009 - DNA, 122 bp, Homo sapiens
tacttcaacgatgtgtttacagtcacgccaatacattttgcaaacgcacaacacgcagagcgcagcctcacagctgacgccagatgacatgcagcagtttaacgcttccaggtcggaacagc

SEQ ID NO: 142010 - DNA, 122 bp, Homo sapiens
ggctcactgtgccgcctcctcacacctgcgggaacctgagacctcctccctgagctctggcgcccacggccctcctatagctcaggcctgggtgggccagagtgccccgttttcttggcttc

SEQ ID NO: 142011 - DNA, 122 bp, Homo sapiens
gcgggcaaagagagagaggatcagggtgggcagaaagatcagggtaggcagagctagggacgcccctgacagacattgagatcacgactcccagaaccagcagtcatcccctccccaaagaa

SEQ ID NO: 142012 - DNA, 122 bp, Homo sapiens
agcggaagacgccgggggacggcggcccggccctgggctcctgccccctgccccctccggcgccccaacaggtagctcacagcgggccgcgcgccctggctctgcctccctcgctctcgaga

SEQ ID NO: 142013 - DNA, 122 bp, Homo sapiens
cctttgtagccaatcagatgcagaattctggcactttctccacttgaccaagttatttaacgtctttgagcctcatataataaggaaaacataagttaacaactaacactgttgaacacata

SEQ ID NO: 142014 - DNA, 122 bp, Homo sapiens
aaacattccattttatttgtgctaagagtttaatcctatgtttacatgatagaaaccatccgaggataaagtggatttattaggggatactgatcagtgttctctaccagtctatttattta

SEQ ID NO: 142015 - DNA, 122 bp, Homo sapiens
ccaaatgcagggtctcattctgtagtttatattcttctcctacttcaactaaccagtccacgaggatagctctcatactgttagtgatgtctggctgtttcttcatgtaacccactttaggt

SEQ ID NO: 142016 - DNA, 122 bp, Homo sapiens
agtttttgtttactcaggttcattacagaagcattcaccgaggctgggtgcaatggctcacgcctgtaatcccaacactttggaaggcccaaggcgggcagatcacttgaggtcaggatttg

SEQ ID NO: 142017 - DNA, 122 bp, Homo sapiens
tgagtttgcgccctgcctgagcacagcttggcagctgttgcagaagggcagggagcctgccgtctcagatgagggcctcggctccaagttccattgttatcaaacagaagacttcagaagag

SEQ ID NO: 142018 - DNA, 122 bp, Homo sapiens
gcagctggacacggcagagatcgccttccaggtgaaggagcagctgctgaaacacaacatcgggcagcgggtgtttgggcattacgtgctggggctgtcgcagggctcggtcagcgagatcc

SEQ ID NO: 142019 - DNA, 122 bp, Homo sapiens
gcccccacgacgggaaggaacgtgggccactcctgggcagaggcatgaggaacaggtgagcgatgcctggcctgccttctgcttcttgatgatggctggaggccacgcattgagtttgttga

SEQ ID NO: 142020 - DNA, 122 bp, Homo sapiens
acagtgactgctggccacacctcataatctcaggattatgcctctctctagacaagaattcgcagtgtactgcatgagcctcctcctttattagattgtcaattccttgaggctagggatcg

SEQ ID NO: 142021 - DNA, 122 bp, Homo sapiens
tctacactgagcagcgtggtcacctggtccttttcacctgtgcacaggtaacctcagactcgagtcagtgacactgctcaacgcacccatctcagctttcatcatcagtcctccacccccgc

SEQ ID NO: 142022 - DNA, 122 bp, Homo sapiens
agatgaggaggaggaggacccagaagaagacagcgatgacgccggtaccgacaaggatcacgatctccatgctgcccttatcctcggagcctgcgtgggcagaaaggggccggcgtgtgtgt

SEQ ID NO: 142023 - DNA, 122 bp, Homo sapiens
tgtgacgttgtcttcctgtgacgttgtctgtagccagcaggagacacgacggcacggtggcgtgcccggcttcgggctgggtgtcctgggcgtccaggcaagtgaaggctcttttcttctgg

SEQ ID NO: 142024 - DNA, 122 bp, Homo sapiens
ctgtcctacctggtctttggggctcctccttgtgagaccggtttttgccgagcttcatggcggagaacacgctcctcccggctctgtgaggggggccaccagaatgaggtgcagggagaggg

SEQ ID NO: 142025 - DNA, 122 bp, Homo sapiens
ggtcggcccggcacagccatgatcaaggcgatcctaatcttcaacaaccacgggaagccgcggctctccaagttctaccagccctacgtgagtatccagccgccgctgatccgggcgagggg

SEQ ID NO: 142026 - DNA, 122 bp, Homo sapiens
tggaagctgcttgcagtaagcctggtctagccgcagcctcacagggagccggcacccgtgcgggcacctggagctgccccaccccccgacccccagccggcatgcctggctgtgcgcagtgg

SEQ ID NO: 142027 - DNA, 122 bp, Homo sapiens
aaccagggggcgggggtggcatgggaaatgaaagaaagagatatgggaaactaaatctgccgggggaaagagagttaccggagttttagcaaaacagctagcagatgcaaacggggaggcag

SEQ ID NO: 142028 - DNA, 122 bp, Homo sapiens
ttagcgtttcattttgagagcgggattcacaagggaattgcggaaacagcagcgaggccccgcgacccctcggcccacgtgcgcgctgtccctcgggtcgccccgcgcccgccgggggcgga

SEQ ID NO: 142029 - DNA, 122 bp, Homo sapiens
ggttaccaggggagggcgctgattttctctgaagcccgaggctgcctggctcctcggctgcgtcgtattactaatgttgggcaggtgaatctgtgacctttgtttcttcagcagttgagaaa

SEQ ID NO: 142030 - DNA, 122 bp, Homo sapiens
acttctgggcgactgttgttttatttccggtctatgggacccggctgcgatttgctgctgcggacagcagctaccatcactgctgccgccatcatgtcagacacggacagcgacgaagattc

SEQ ID NO: 142031 - DNA, 122 bp, Homo sapiens
attccttacctcacctttgtccctgcgcgggctgcggctgggatccggtctttccagccccgagagggacctggttcctctgcccaggcttctgtcactctgtcacctacgctatgccctgc

SEQ ID NO: 142032 - DNA, 122 bp, Homo sapiens
ctggcccgtgtgaatgccctcggcagcaatgaaaagctccgtccgcttcttaaaccagtacgggtcgcggaagaccaccttggggaggggcgcgctgtgacccgagttgtggatgatgggtg

SEQ ID NO: 142033 - DNA, 122 bp, Homo sapiens
tcggcgctagcccgcagccggctccaccccaccgaggaccagatgctgctctcggcgcggcgcttccgctcgggtcggaacaccgaaggccccaacacccctggagcccggagcccacaagg

SEQ ID NO: 142034 - DNA, 122 bp, Homo sapiens
aacagggagtacccctgggtgcctgactgtggaacaaaagactttaggaaattatattatcggggtaatttcatagtgttgttgaagaaagcaaacacctgcattcttttaataagtcccct

SEQ ID NO: 142035 - DNA, 122 bp, Homo sapiens
gggttgaggtgttgcgcagaagtggaaaagggaaggaactttcttcccctgttccttccccgctccctccagaaaggtatttctggaactctccagttggtctgggatctgggcaactgctg

SEQ ID NO: 142036 - DNA, 122 bp, Homo sapiens
cggtgagtcttacagctcttcaggtggcgcatctggagtttgttctttctgatgttccgacgtgttcagagtttcttccttctggtgggttcgtggtctcgctggctcaggagtgaagctgc

SEQ ID NO: 142037 - DNA, 122 bp, Homo sapiens
acccagccaggagctccactttccagcgcacgcaagattccaaaaacctctaccctctaacgaaaagcgcacggatggaaacccagccttgctgttctttgtcctgcgggacgctgcctgcc

SEQ ID NO: 142038 - DNA, 122 bp, Homo sapiens
tatttactgtgaaaattaagcggctccaattccatttcgatgtgtaggctataggtgttacggcaagagctgcctggtacatctgaaggccgctacgcccaccttcagtgccagtttcctta

SEQ ID NO: 142039 - DNA, 122 bp, Homo sapiens
attacactgtaatatataataaaataattatagaactcaccataatgtagaattagtgggcgtgttaagcttgttttcctgcaactgaatggtcccacctgagcgtgatgggagaaagtgac

SEQ ID NO: 142040 - DNA, 122 bp, Homo sapiens
gggcgctgaaccacctctgtcagagacggtgcatcccccaccggatgtgaccccgggatgcggagcctggggtcagatctgcgagccagataacagcggcactcacttctcgggtcttcgtg

SEQ ID NO: 142041 - DNA, 122 bp, Homo sapiens
ttagatcacgcgagccatgctcaggggcttagagctgagcctgaaaccagaggacaaccacggaatgattcgaatcagaggagggacataatccatttcagcaagatggctcaggcacaagt

SEQ ID NO: 142042 - DNA, 122 bp, Homo sapiens
gcgggagggcgggcaaatacaactcagtgcccacgtgcgaatgaatgaacaaactagttccgggcggagccagaggcgcgcgccggcgcggaccgaggcccggccctatccgccccgccccc

SEQ ID NO: 142043 - DNA, 122 bp, Homo sapiens
cgaggggtgtgcaagtggggacaggacgggtgtgcaaacgggcgacaggatgggtgcgcacgcaggtacaggaggatgtgcccatagggacaggaggatgtgcgagcagggacgggagagtg

SEQ ID NO: 142044 - DNA, 122 bp, Homo sapiens
gttctccatctgggggcctgcttgtctgcggcgactctttagttcacaggaggggacggccggcgctgacagcttcccctttgctttccccacgaagctcctccctggcagcccctgacctt

SEQ ID NO: 142045 - DNA, 122 bp, Homo sapiens
tctccctgcctcatggtatgtcatacatattgttccttctgtgtttactgcctccctacccgtacctttctctaagataactctcactcacgtatactttatttctcagttaaacctccctt

SEQ ID NO: 142046 - DNA, 122 bp, Homo sapiens
gaaaggcatacaggaaggaattaggaacacatattgtatccctagggtgagcccaaccaccgaacttcctgtgtcagtaaagtgtaaatatctttctgccttttcacaagattatattatac

SEQ ID NO: 142047 - DNA, 122 bp, Homo sapiens
cgccgctggaggcctcgagttcgtgtcctctcggcgcctgcctggctccccttccgaggccgcagcgccctgccatgctggcctccccgcgctctccctgagacccaagccgactcccaggc

SEQ ID NO: 142048 - DNA, 122 bp, Homo sapiens
ccagcacctggcccggcgccggcccgtccgccccgcagccccggcgacgcgaggggccggcgctgtcagacccgctcccagcctcgccgcgaacgtgtccgtcagccctaactgttccagac

SEQ ID NO: 142049 - DNA, 122 bp, Homo sapiens
ggggagaaggatcaagctagctcttcattggtcccttcccctcggtgttggccacgaatccgcccctctctccaagttccgttagctcgcggcttcgctcctctcccagactctcgccccca

SEQ ID NO: 142050 - DNA, 122 bp, Homo sapiens
atctcttccaatggggtaaccataaaagacaatacagaaaggttcctaaagcttctttatcggaagtctctcctattctaaagtcctgctgtggcttacaattactgagctttgtatattgg

SEQ ID NO: 142051 - DNA, 122 bp, Homo sapiens
aatcagactgcagaattccccgcagccaccatgagggtcaggagcaggccggggacccagcgtggaggaaggtggcccagaagcgtttgtctgatgtgcacagctacaccctgcctggccac

SEQ ID NO: 142052 - DNA, 122 bp, Homo sapiens
tgctttaagcccactgtttttatacaagtaaaaaagtcttcgtgtgtgtgtggaaaaactcgattgcagatgagcagaaaggaagaaatattcatagtctctctgctagtaaacttcggtgt

SEQ ID NO: 142053 - DNA, 122 bp, Homo sapiens
gccaataatcaggacagttctgtaaaccatcttctatgaagtggcagatttatatttgaacgctgaatcctttagtatagacaataacagaggagctaaaatgccatcgagaattatggctt

SEQ ID NO: 142054 - DNA, 122 bp, Homo sapiens
cgaagcccagagtcaccagggtcctgagcacctgtctcttgtgaccatgcggcacccgcccggcttttagctgtcgcagcagagacccgaaggctgtggctctagcatcagggggtcgcctg

SEQ ID NO: 142055 - DNA, 122 bp, Homo sapiens
cgggtaaccactcttacccagtggataataagtgttgcctcctgggtaactaccattaaccggtggataataagtgttgcctcgtgggtaaccactgttacacggtggataatagttgttgc

SEQ ID NO: 142056 - DNA, 122 bp, Homo sapiens
gcagtgctagtgggagatgctggggccttgcctcagaggggctccagaggtcagaggtgacgtctgtccaggaaccagggggcggatgaggtgaaacacagaggcagggccagggctgggct

SEQ ID NO: 142057 - DNA, 122 bp, Homo sapiens
cacatttcccgcacaagtccccaagccttggacccccctcatcaggacctccggcacaggcgcccgtttcccgccactgccttccagtggtttggtccccgagcaggacccaaggcggggca

SEQ ID NO: 142058 - DNA, 122 bp, Homo sapiens
tgtctgtcacttggctccagctgacttactctgacgtgcctggagaataagtgtccggcacgtgcagagccaagggagaaggaaacccagaccctgccctcagagctcccaggctgttggag

SEQ ID NO: 142059 - DNA, 122 bp, Homo sapiens
aggaaagggaagagtttcctaaagtgcattaagatagactgactagtaacaggatgcaaacggccctgacacatacagtagctccataagcagggcaggaggggtggcacgacagaaacctc

SEQ ID NO: 142060 - DNA, 122 bp, Homo sapiens
ggagtagccaccgaggcatgtaaggctggccacacagggtgcactgcgtcagcctgtgcccgacaggaagggaagagaaatacgtcagttactctaacaagaagaattgacttccttctctg

SEQ ID NO: 142061 - DNA, 122 bp, Homo sapiens
gagagtcagcagtgaacaaaataaacacaaatccatgcccctgtagagcttatgtgccagcggctggaggcagacactaagcaaataaagaagcaaaatataaagggtgtcagagaagaaat

SEQ ID NO: 142062 - DNA, 122 bp, Homo sapiens
cagaacacttttgtagcaatcagatacccgattctaacatgactctggtatagcaacacacgacagagagcaggccctaaaggaaatcaaagtattttaccccaaaataaattttctttgac

SEQ ID NO: 142063 - DNA, 122 bp, Homo sapiens
gactccaagatcagagagctactcacctgtctccatagcgacagcagcggccataacaaacgaagacaccaaaacgccaccagcctgacagagcaaaagcccagagacgcgggcgaagttcc

SEQ ID NO: 142064 - DNA, 122 bp, Homo sapiens
tcttggtctctcaggagaccaaggcagtcaggacgctacagggcacgggtgtaagcgcgacgttcgcggccagccctctgccttgccccactgtaattgcgggttttgattaagaaggagga

SEQ ID NO: 142065 - DNA, 122 bp, Homo sapiens
ccccaagctccaaatttgagcggccgaagtatcgcgagacctaagtatggctccggcgaccgtagcccaatctcgcgcaatgattgcgccacagatattcccatcccccattcagtgaggcg

SEQ ID NO: 142066 - DNA, 122 bp, Homo sapiens
tgcgggaaagaccgaggggaggggcagcgctatgcaaatgaatccaaacagggatcgcgacgctcaaaagtcccagctccagcacttttggccccctggggggctgctttgccctcctctct

SEQ ID NO: 142067 - DNA, 122 bp, Homo sapiens
aatttgtcaaagtgtctaaaatgggatgtttctgctcctgcagcccctgcttccgacccccgttaccaccaccactcagctgctgacctccctgcccacatcctgctcaagccttactagca

SEQ ID NO: 142068 - DNA, 122 bp, Homo sapiens
tgagcgggactgcagccagccccctggggcgccagctttggaggttctcgtttggggaagcgggggtgggctgcgagtgggtggagggggctgggcgcggagccggccggaggcagcggcgc

SEQ ID NO: 142069 - DNA, 122 bp, Homo sapiens
ttgtatgcggttttgcagtgaccctgactgcgaagggcaccgctgcgagaatggtgtctacgacccacagcaggatgatggggacgagagtgcagatgaggacagctgctctgagcacagct

SEQ ID NO: 142070 - DNA, 122 bp, Homo sapiens
gaaccgtggaacaccacgtggggactacggccatgtccgctgactgtgcagatgcggaagcggtagtcaccctcggagggcacacagtcgcccggcacctccacggctccggctttctcgat

SEQ ID NO: 142071 - DNA, 122 bp, Homo sapiens
accagcctgggcaacagggcgaaaactcatctctacaaaagacacaaaaattgctgggcgcggtggctcatgcctgtaatcccagcactttgggaggccgaggtgggcggatcacaaggtca

SEQ ID NO: 142072 - DNA, 122 bp, Homo sapiens
aaagattagtacctgtagttttcccaaggtcatatcactaataaggacacagccagatttcgaccaggacctgcccgactctgtgcatcatccaaccgttaagttttactgcctctccactc

SEQ ID NO: 142073 - DNA, 122 bp, Homo sapiens
atttcctgacaatagtaagaacacgaccacgaagggactcgaaccctcaatcttctgatccggaatcagacgccttatccattaggccacgcggccgcacgcgggtgctaatttgcacacat

SEQ ID NO: 142074 - DNA, 122 bp, Homo sapiens
tggcttcccgattccctctccaccccctgtcgctgcccctcaccccacgcccgccaaacccgttccccagtctcgggtgccgatggcccgtctggcgcccaaccaaacaccccgcagaaatg

SEQ ID NO: 142075 - DNA, 122 bp, Homo sapiens
aaaaaacccgtttttccacagagagcctatctctggcagaagtagccaacgagctggacacggagaccctgcggaggctgaagcgggagtgtgggggcctgcagacgctgctccggaacagc

SEQ ID NO: 142076 - DNA, 122 bp, Homo sapiens
cgcggcccttccctcccttcccgggctgggtggcaggtcttggctcttctgcgagtaccccgcggctgcggtctcccggcacccgctgagcagcctcgcccgccttcctctcccacccgccc

SEQ ID NO: 142077 - DNA, 122 bp, Homo sapiens
ctaccacaaggtcctcttcacttacacacacactgaggactactgcttcgtcacgctttccgaagcagctgagtggggctatgtaagtgaccttgcagatgaagtcgccacctgcaagaact

SEQ ID NO: 142078 - DNA, 122 bp, Homo sapiens
aaaaattggatacattttgaataaagcgattcggttccttatccggggactgggttgctccgtgtgattggccggaggagtcacatggtgaaagtaactttacagggtcgctagctagtagg

SEQ ID NO: 142079 - DNA, 122 bp, Homo sapiens
cacagcactagagtgagaacaccctggatgtgacttggggactcctcctcggtgtgcttgcgtggagagtggagaggtgcgtcgtttgtgccccgctttgccatgaccggggtggtcctggc

SEQ ID NO: 142080 - DNA, 122 bp, Homo sapiens
tgtagctcatgagggtgacatcatcaataatttcctcaagtatcactgaatttcatggctcgtgactgagagtcttttctgacatcttacaggctaattatcctcaaggatcttcttggttc

SEQ ID NO: 142081 - DNA, 122 bp, Homo sapiens
cgaaaatcagcggaggctcaatcttgttaaattcctggagcaatcgcccatcctagggtgcggaggggaggatagtggtttctctgtggggcccacctcagctgcccacccaggaaccccaa

SEQ ID NO: 142082 - DNA, 122 bp, Homo sapiens
ggagtagttttgttcaaaagcaatatttatttttcatgaagataagaggcatattacattcgctatagaaaatgctatgagaggaaaaagctgcatgttaccgatatgacaaaaaacataaa

SEQ ID NO: 142083 - DNA, 122 bp, Homo sapiens
ggctgtgggggcaggactcggtttaaggaaccaaccgcctcggttcgagggcctcctgtccggaggttgctcctgaccactgggtttattttgcttttgcagaggaggcagatgttgacctc

SEQ ID NO: 142084 - DNA, 122 bp, Homo sapiens
tcaaaaaaaagtttggataaataaaccagcacctacatgttagatttcttgtagtttttccgtgagtttttaaagacagactatctgtcctcttctccccattgtttagtccgtatgtgctc

SEQ ID NO: 142085 - DNA, 122 bp, Homo sapiens
ggggaactgaaggaggcatcacagagcttacagtaatcattctccgtggccaggatcactcggcctcctggcttaaaggagcccatctgacatcaaagacacaagaagaaacaaagttaaaa

SEQ ID NO: 142086 - DNA, 122 bp, Homo sapiens
ccagcaacacccaaggacacctgcacttcccaaggttgagcacgctcagcttgttaaacacgaggacacacagaactaagtataaacccaccagggttcctttgggatatttccatgcacca

SEQ ID NO: 142087 - DNA, 122 bp, Homo sapiens
ctgagaggcaaagttcccctccccaagatgtacccagccactattcctgtgtgtgtgtggcggggtggatagcacccttggagctgggcatctggatggtggttggggtgttagggggatgt

SEQ ID NO: 142088 - DNA, 122 bp, Homo sapiens
atcaaacaggaaagactttacatttctgcctgactgcagcaggtaatctttgagctggaacgctccggcgggacctagttgcccagcaatgtccttttcccgaatgacttgcactaagtcta

SEQ ID NO: 142089 - DNA, 122 bp, Homo sapiens
tgccctctcattcacctagcattttacacactcttccttgctgtttttaacattctgactcgagggtgaatctataatgctgagcacttgaaacttttaactcgcctacctctctctataat

SEQ ID NO: 142090 - DNA, 122 bp, Homo sapiens
ccgtgttttggttacactattggggctactttgaaaggcgtcctccacccaccttcaccccgaaacagtaggtagaggtatcttgtcttcgtgtgaattagatgaataattgctgaagattc

SEQ ID NO: 142091 - DNA, 122 bp, Homo sapiens
tagggtgtatgaagaaagggcttcagcagaaacagaggctgaagcctgcgtgctgggggccgagaggccagaggagaatgtgatgagacatagaattggtagtgcaggaagttggaagatca

SEQ ID NO: 142092 - DNA, 122 bp, Homo sapiens
agccagtcaggcggcgtcggcccttcccggccgcctcgcccccgcccgcgccccgccgcccgccctcaggcccggctataccatcccgccacgaccgcagcagcttggcaattgctggcagc

SEQ ID NO: 142093 - DNA, 122 bp, Homo sapiens
tggggcagctgcgccatgtgcaccacccttttcctgctcagcaccctggccatgctctggcgccgccgatttgccaaccgagtccaaccgtgagaaactgaccgggctatggctggcggttg

SEQ ID NO: 142094 - DNA, 122 bp, Homo sapiens
tcctggaaggatggaggaaaagcagtcagtcctgagtcatagagagagctacttgctgcacgtccaccccctcaggggtgagtcagctcagcctgcacgactccagccctctctctcggcct

SEQ ID NO: 142095 - DNA, 122 bp, Homo sapiens
agctgacgcagattgttgcgagatcattgcggagaggcaggcctgcagcgtgacctgctgcgggtccggcccctctcccttttccagagccctggtcagcatcccagagcttcgtaacccct

SEQ ID NO: 142096 - DNA, 122 bp, Homo sapiens
acggcccacatggactcagcatgttctcgggctgcatccattttggctgctgtgaacttgcgtgcacccgttcctgaggctgtgccacacaccaggagtggacctgccggggaaggggcggc

SEQ ID NO: 142097 - DNA, 122 bp, Homo sapiens
acggccccgctcggcctagatccgccttcttcccaggtgagcgtcgctgtcctccgggatcgctcctcgccccagaccaggagcagggtgtcgggacttgtaattgccccgtagccccgagg

SEQ ID NO: 142098 - DNA, 122 bp, Homo sapiens
atgctgggcctggccgggaagctggatgggccagcctcacctctggaggggctttcctcccgtttccagggtccagtgagggtccagtgagatgacgcatgattacgtgtaatttacaaaac

SEQ ID NO: 142099 - DNA, 122 bp, Homo sapiens
gggcccggggcccgcagcccgccccggctcccgccctcgctccctcccttcctccgcggccggggagtccctcacctcagagcgcccaggcgccgcaggccagccccatggggaagcgcaga

SEQ ID NO: 142100 - DNA, 122 bp, Homo sapiens
attagcaactcagattaaacacattgagcgcttattttctaggaacttatttaaaacaaccggcttcttcacaaacagcaaataaatatacacacacagaatacttccaagacttaatgata

SEQ ID NO: 142101 - DNA, 122 bp, Homo sapiens
gctggaggagcggctgcagctgcaattcgaggcggaaatggcgcgcctgcaggaggagcacggtgaccagctgctgagcatccggtgtcaacaccaggagcaggtcagtctgcagtgcggct

SEQ ID NO: 142102 - DNA, 122 bp, Homo sapiens
agtggcacgcggcctgcctcaagtgtgccgagtgcagccagtacctggacgagacgtgcacgtgcttcgtgagagacgggaagacctactgcaagcgggactatgtcaggtgaggccggcgg

SEQ ID NO: 142103 - DNA, 122 bp, Homo sapiens
agagcctcctgtgagcacagggctcgcagtaagtgggggtgacggtggtcgcgccggcagcgccgccttgggcctgcgggaggcgcccgagaggcaggggcgaccacggcggctgcgcagag

SEQ ID NO: 142104 - DNA, 122 bp, Homo sapiens
aggggcccccacagcgcagcggcgggatgaggggctcctggagcgtggccagagcaacaccgaggcctaggagacgccgagagcgagcgagggctactagcacgttgtcacctctcagtttg

SEQ ID NO: 142105 - DNA, 122 bp, Homo sapiens
tctttttctaccaacgttgtctacaccaccccgggcactcgcgtcaacaggtacatcagccgcctcttagaagcccgccagacagagctggagatggcagacctgaacttctttaccctgaa

SEQ ID NO: 142106 - DNA, 122 bp, Homo sapiens
ctggtggctgatggtgtcaggcatctctccatgtgcgttggagaagcccactcagatacacggcctctgctttaatggggttgtctggctttttgttgttgagttgtgcgtgctctgtgtat

SEQ ID NO: 142107 - DNA, 122 bp, Homo sapiens
tcagatagaatgtgtgggatggtgccctcagaaatgtgcaatggaaaagccataccaaatcggaatgcaaacacgggatgaaagggaatgtgaatcaacacaaaatatgtgtgtatacagac

SEQ ID NO: 142108 - DNA, 122 bp, Homo sapiens
tctgtcgctggccaagcaggtccctggctaaggcactgctagggacagctcgcggcggttcgggggttaattctcggcagccctccgtcacccggtgccccacccccgccctgcgcctgcgc

SEQ ID NO: 142109 - DNA, 122 bp, Homo sapiens
gggaaagagggcaaggccgaaaaatggacagaaaaagaatgcggacggccgggcccgcggcgctccgagaatcggaggcatcctcaggcacggtccctccaggagaccgggaaagcggggct

SEQ ID NO: 142110 - DNA, 122 bp, Homo sapiens
taggttgcttgtagcctgctggttgcactgtttatgaaacagctgtgaggacaggtgggccgtaatctctgggtagctaaagcccagcagcagcccgaggatcatgtgtcaaccctgtaata

SEQ ID NO: 142111 - DNA, 122 bp, Homo sapiens
gtcctcccttgcgcccttccttcacagacaaagctggcattccagtcctattgtcaatgccgctaggtctattctggcctttgtgcataaggtgggtcacaccagccccgaatgccgcccag

SEQ ID NO: 142112 - DNA, 122 bp, Homo sapiens
ttccaagtgcagcttgcccctcccacgtgataggtttctggcatcgcccctccttgctggcgattctggggaagattttaacgctccctggagccgtccccagtgacgtcacgggcgcggct

SEQ ID NO: 142113 - DNA, 122 bp, Homo sapiens
ctctaattcctgacctgaagtgatcctcccaccttggccacccaaagtgttgggattacacgcttgagccacctcacccggccaggaacaggttgtgcagggtcataaactctgtgccaaaa

SEQ ID NO: 142114 - DNA, 122 bp, Homo sapiens
tcgcccggggggacccgcgcagtgaaaccaaagacgtggatctcctccctctgccacatgcgcccggctctgagtccctcttgaactccatccctgtctgaggactcaagacgtccttgaga

SEQ ID NO: 142115 - DNA, 122 bp, Homo sapiens
ttctgaaatcaaagagcagtaagtccaggatctcattgcctggttccagtcctcctaggacgcaagtcccattttgtcaagaaaataaagggggtgagcgtggtggctcacgcctgtaatcc

SEQ ID NO: 142116 - DNA, 122 bp, Homo sapiens
taggagccgccggggacgagctgcgggtctccagcagctgggccctgggcaggctggggccgctcagcgctgacggccagtcccggcctccccgccctgcaggcctgcggaacccgctgcag

SEQ ID NO: 142117 - DNA, 122 bp, Homo sapiens
ttttctacagaccacatgcaagtacaaactgtgagagtttctgatcttgacaagcaacttcgaattgaaaacatgaatgttctgcatgcgtgtgttgaggattccttaaagatttttacatt

SEQ ID NO: 142118 - DNA, 122 bp, Homo sapiens
tcatctattgcctgagatcacagcgggagggacaatgatcgggatataaacacaggcattcgagccagcaacgctaccctctttgggtcccctccctttgtatgggagctctgtcttcactc

SEQ ID NO: 142119 - DNA, 122 bp, Homo sapiens
cgcgaacgggtaggtacaccagtcggtacggctcttgcagcaggccacagtgcaagccaccgccagcacgaaggccacaggcagcaccagggcgcggtaggcggcgataaggcgcgtgcagt

SEQ ID NO: 142120 - DNA, 122 bp, Homo sapiens
ttgatgattttctgttgctgagtcatttttcttgcatttctttctgcttttcctgtttatcgttggtttgatagctgagccgtaggatcgatgcctttcagcgagtgtgagggagagagctg

SEQ ID NO: 142121 - DNA, 122 bp, Homo sapiens
tcaaggagatgaggattgggtctgcattcttgccttcgaaccactcttctgcctccagcgcggcctctggccccgctgtgtcaggatacaggtcatcttggaaaaggtcagactacaagaga

SEQ ID NO: 142122 - DNA, 122 bp, Homo sapiens
tacctctcattgtaggctccaaggtaacactgttacagagttcttgctcatcttcaactacggatgaaaatcaggaacttgacagaaaccacaagatagtgggtccctctgctgctgttgtc

SEQ ID NO: 142123 - DNA, 122 bp, Homo sapiens
tgggactacaggcaagcaccactgcgcctggctgatttttctattttttttttgtagagacgaggtttcacgatgtctagcccaggctagtcttgagctcctgggctcaaatgatctgcctg

SEQ ID NO: 142124 - DNA, 122 bp, Homo sapiens
caagacggtgagccgtgcagcctcatcgtttccaggtttcaatatggctccccgcgtcaccgaaaaggttaatctcagaaactaacttgaactcgcgcggaagtgacgcaacagaagttgtc

SEQ ID NO: 142125 - DNA, 122 bp, Homo sapiens
actcactggccatgtttggcaattgttaccgcactgtttagctcaaaggagaagctccaccgggcgtgtgggctggtgtgtgccgtgcaccttactcagagcccactgggccctgtgggcgt

SEQ ID NO: 142126 - DNA, 122 bp, Homo sapiens
tgtgtctggtcacaaaataaggaagcctgcagtgggagcaaacttcaccttcattgataacgagcaaaggaagctcaggtcaaagggagccaccatggggctgccttaaaagggatcctacc

SEQ ID NO: 142127 - DNA, 122 bp, Homo sapiens
cccgctgcagggcagggacgtcctcggggaaggtgggcggccccatgtcgcgggccagggcggcctgggcccgcagctcctgcagctcctgctccagcaggttcaccttctcccgcagcagc

SEQ ID NO: 142128 - DNA, 122 bp, Homo sapiens
tttgacatttccccactcaagccacaactttttctcttatgtgcttaaaaaaaattcctgcgtagtctctcttggaatgtcttattccttgctccctccacttcaccctttttttttttttt

SEQ ID NO: 142129 - DNA, 122 bp, Homo sapiens
ccaaagtgctgggattacgggcgtgagccactgcacctggcctctaaggtgtggtttttacggtaaatgttctgaagagctcagagaaagggaagacagatgagctggaattgtcagtggaa

SEQ ID NO: 142130 - DNA, 122 bp, Homo sapiens
tcagggcaatgctgcgtctgccttagttgcagaggaggaggacgaagggttttctgggtccggagtggtgctagccagatccactgcacgcttggggtttccgctcccaccctggccagggc

SEQ ID NO: 142131 - DNA, 122 bp, Homo sapiens
cggaaagccccaggcctgggtccagagcgcccgcggtgggcgggcagcgctcctgggctccgggagccacccctgtgccaccttcaagacactggcgcctaggccccgccgcgcccacgccc

SEQ ID NO: 142132 - DNA, 122 bp, Homo sapiens
cttcctcttcagcacgcccagcacgcggccccgaagccgcccctcgggcgccttgtctcccgaaaggagctgcaccagcacctcatccccggcgaaggccatcccacagtccaggcggcccc

SEQ ID NO: 142133 - DNA, 122 bp, Homo sapiens
cacccagggaggccccagaagagttgacactgacaatgcccacccacttgatggtggagacgggattgaccacctctgcttggggttcaggagcattctgtcttagcacttatcccaccatc

SEQ ID NO: 142134 - DNA, 122 bp, Homo sapiens
attttccttagaaaaaaaaatccaacaggacctagccccgggctgcctgtcagacctcggcgagcacgccaggctctgcacaccgtctctcggagcagtcccgaagaggccgttcccaccag

SEQ ID NO: 142135 - DNA, 122 bp, Homo sapiens
tctggaggaactagccctccggagcagccaaggcaggccaggccccggggatgtgcaccacggcgtggggaccaaaccaagctgaacggcctgctccaagttccccccttttcctagagccc

SEQ ID NO: 142136 - DNA, 122 bp, Homo sapiens
cttgagcacgcatggaagactcaaagggacagggctccagttctgagatccttttctctgcgccacccgggacagttccttgttggcaacaacccccagctcttacctgctgtgctttttgt

SEQ ID NO: 142137 - DNA, 122 bp, Homo sapiens
tctcagaatgagaggacttggttttttcggtcacctcattgcattttgtgcctctcctcacgttgcttatctcatgctgttatagatactgattttcgtagtctttttcctccatacagtcc

SEQ ID NO: 142138 - DNA, 122 bp, Homo sapiens
acaagtgagctattattttacagataattaacggccgtacattttgatgtctgacttccacggcacctggcccacatcccggtctgcctccgccctcccctgcacaggtccatctaccatgc

SEQ ID NO: 142139 - DNA, 122 bp, Homo sapiens
tcatggctgacagtgagactttaaaggcatcagaataggtgcacctctccttgtcctccgcgcatgctctcccccacctctgctccagccagtactgtggcaaccagctccatagaggtcta

SEQ ID NO: 142140 - DNA, 122 bp, Homo sapiens
ttacaattaatcataattattcaacctcacagcatagccccacacagcatccagaggattcgcaaatgtgtggctttcttattcattctgcctattataagaacagaaagaaaattcagaca

SEQ ID NO: 142141 - DNA, 122 bp, Homo sapiens
aaaataaaactttattgcctcccttggatttagaatgtccaatctgcttgcaaaggacttcgaattgtattccacaggaagtagggatttctttgtggagctcttactttatacatttttct

SEQ ID NO: 142142 - DNA, 122 bp, Homo sapiens
atgtgttggtaatttagtacatatttaacaccacataatttcacaacacccttggctagccgcttatgggggacccaaaaagcacaatatgcagctcctaccctcaagaagcccacagtcta

SEQ ID NO: 142143 - DNA, 122 bp, Homo sapiens
aggatgaacctgctgaggcagacaaaggatctttctgtcatgcagggaagagcaccagcacgtgagagccctgcctctctggccctttctggcttgtcttgctagagttctccatgatttgt

SEQ ID NO: 142144 - DNA, 122 bp, Homo sapiens
ccctcggcccctgggcagcccgcacctggctcggtcgccgcccgcgctgccgtcggaacgcgcgctcccacgcctgcagccgctcccgcacgtcccgcagccgctccatggcgcgcgcgccc

SEQ ID NO: 142145 - DNA, 122 bp, Homo sapiens
ctccctccccgggccaggtgtgtcctggagggcagggaagcgtcttggcacgcgggtgcgcgccgccccctcggcctcctgggctccctgaacctcgcaggaccccggcaacttcgagcccc

SEQ ID NO: 142146 - DNA, 122 bp, Homo sapiens
gatcagccctagaatgaaagcaaaaccgagatgatggacggcgcaggctccttggagatccgtgttcatgacacctgcaaggactgtgggcaagctgccaaccagacatgaaattagcaatt

SEQ ID NO: 142147 - DNA, 122 bp, Homo sapiens
cttcccattcaaacggttcaccggtgcatgaatcttgaatttgaccatctggggaaggggcgtggcctctcctgacaggaaggctctggggcccaggcagggagaatgaagtctcagaatga

SEQ ID NO: 142148 - DNA, 122 bp, Homo sapiens
tgaacccttcccatcaggaagacatgggacccagggcttgcaggcaggtgagggggagggcgtgatgcttcccgaagccactgcccaatggaggcacagcctgtgccgaccgccctttccga

SEQ ID NO: 142149 - DNA, 122 bp, Homo sapiens
agtaaaccagattccaagcagtgacattgaaagaatccatcacgtgaaagaagtgcactgcgtctatttgatactcattaaaatgagtttcccaccctccaacaaacgtgctttgggatgct

SEQ ID NO: 142150 - DNA, 122 bp, Homo sapiens
ggacctagcgcgcacgccagtgtggaggggcgggctggctggccagtctgcgggcccctgcggccaccccggggacccccccaagccccgccccgcagtgttcctattggcctcggactccc

SEQ ID NO: 142151 - DNA, 122 bp, Homo sapiens
ctctctcttcacagactgaggtaccttgggcggccgaattttgcagatgccggttttctccgccaaaggccggatgcggccgataaagctgagcggatctgtgaactcctcccaactcggct

SEQ ID NO: 142152 - DNA, 122 bp, Homo sapiens
ctgcaatccggtttagaatgtcatcgttgctgctgcctcccttcctttcaggagcacattcgcctgcgtgcgcactcacacacacgttcaaaaagagtccattcgattctggcagtaggctg

SEQ ID NO: 142153 - DNA, 122 bp, Homo sapiens
gtcagacgtcagatcatgacaggccttgtacatcagtgttgtttccatcttacactgaggcgatgggctggtagagaatatcatagagagagggaatggtgtattggagatagtggatgagg

SEQ ID NO: 142154 - DNA, 122 bp, Homo sapiens
ttacaaactggcagaatttcttaaacaaagaatctagagattgtttttacaccataatctcggtattttataaatttcttgaaattatttttatttacactgctttgcagaattttaactgg

SEQ ID NO: 142155 - DNA, 122 bp, Homo sapiens
gaggaggccaggccgggcagggcgtcccggccacgccccgtccccaacgcgctgatggatcggcttgtcaggagagctctgtgcgcggagcccatcagaaagcacttacctcgctaaactga

SEQ ID NO: 142156 - DNA, 122 bp, Homo sapiens
taagattttgagcaccatgcttggcacatagaatgcattcttattcatgatagctgtcaccgtctttattttttaaatggcctgtacactaaaagaacaaacttgagaaggaatctttagcc

SEQ ID NO: 142157 - DNA, 122 bp, Homo sapiens
ttttatatatgtttggtttcagaggcatcctttgggaaaagcgatcaccttctccagatccgcattcaggtgatctttgccaatctctgactgagcctggtggcacatcacttctatctggc

SEQ ID NO: 142158 - DNA, 122 bp, Homo sapiens
aggagccttggtggcctcctatctaaagtggggatggcacacaaatccatgtccttgtgacggtcccatgagagaagcagacagaccctgtgcacacaagggcctgcagggagaagcgctct

SEQ ID NO: 142159 - DNA, 122 bp, Homo sapiens
ggtgcataaacccaacagggccaagcacagaggggcgcacgtgtgacttccttgggctggcgggcccgtctgctggaatacagcgcgactttgcgggaactccattaggcgggtgcttctgt

SEQ ID NO: 142160 - DNA, 122 bp, Homo sapiens
tggtactccgaggttggcagggggcagcaccagatctggctctgcaccccctaacgtagacgccagccgtgggtcccctttgtgtggaaaaagggactttgacctgaggcgacctctggtct

SEQ ID NO: 142161 - DNA, 122 bp, Homo sapiens
aaaaatgtctcctagaaaaagaacaatacactgtcccctgctatagccacaatagggattcgtggaggctacactatctactctgaactatgatattcagagaatgggctgaagagggaggc

SEQ ID NO: 142162 - DNA, 122 bp, Homo sapiens
caaagtaaatcaatcaatcatggctcaactatattgaccaaggggctcagctgtgctgatcgatcagaactaagctgtaattcattcatttgcataaacggatctgcttgggaacctgggca

SEQ ID NO: 142163 - DNA, 122 bp, Homo sapiens
accagagggctccttggtctagcggtgacgccagcgtctgggaagatgcccgtcgccaagcggaccgtagtctagtggtaacgtcagtgcaaaggaaaagcacctgctacttagcagactgg

SEQ ID NO: 142164 - DNA, 122 bp, Homo sapiens
gtccagggcgcattcctcaccacctcatccacgtagcggcagtgctggactgcgtcatagcgctcattctcgttcatcaccgtgaagcctttgaagttgtgtgtgagctcatcactgcaaac

SEQ ID NO: 142165 - DNA, 122 bp, Homo sapiens
tacactgctggagttagaatctcaactcttaacatttataagctgtgtgactcttaacttcgccaaaccttagcatactcatctgttaaaatgaaaataacaatggtatgtacatcattggc

SEQ ID NO: 142166 - DNA, 122 bp, Homo sapiens
ggcagggctacacccgagagtcgcatcctgcagttaatctggaagcagcagatgtacctgcgtcaacaggaaggattttggaaacatgcagggggcatgagaagagaggctgctgagggtct

SEQ ID NO: 142167 - DNA, 122 bp, Homo sapiens
ggtgttaagtcctcctctagcggggtgaggcttggagttgggagatgtgcgttcagccagcgcttatcttgtccctgactgaccttgggcaagttatttaaacttttcagcctctgcatttc

SEQ ID NO: 142168 - DNA, 122 bp, Homo sapiens
gtctccagagtcgggtgtgcgcgttggggacgcttcgtcctgcagttgaacgccctgaagcgggagaatcagcggcctccccgaccctgactgcgctgtagggtctatgagctcctctgcag

SEQ ID NO: 142169 - DNA, 122 bp, Homo sapiens
ggggcgggagctggggctgcagctgtggtgttcccagaggcccaggtgccctctcccacacgcctgggccctctgggttgtgggaaccagccagctcctgctctgtcccctcaggtgtcctg

SEQ ID NO: 142170 - DNA, 122 bp, Homo sapiens
taaaattttataagtaaagggcttatataaaccctcagctgatggaggtctgcctataaacgactttggtctcttacaacagtttccttgggaacagtagttatgtaaatgtctttgttgtg

SEQ ID NO: 142171 - DNA, 122 bp, Homo sapiens
cctcctgcctctcgcctcccgcctggggccgctgcaccgcggaagtgctcttgtcgcccgcgcccaattagcttcttcttggataagagtcctgctgggtttgaagaagggggatcactaag

SEQ ID NO: 142172 - DNA, 122 bp, Homo sapiens
gagtttccaagggggatgtaaaaaaccaacccaaccctgccagcgtgcccggcccaccagcgatgtcacaacacacagtgctgagtgcccgatgtggggcccacgaggagccagcctggcgc

SEQ ID NO: 142173 - DNA, 122 bp, Homo sapiens
ggcactagtgtcatcagtgggaacttatcgcaggctccctgcaacctcacctggacagcgcggcgctgtgtgaacagccagcaggaggccttttcgcttctgcctcctgctttccttcccgg

SEQ ID NO: 142174 - DNA, 122 bp, Homo sapiens
aaggcgctaagatggcgctgggcctggcctgtcgccagggctggtggcgcagttgctcggcgggcgccatctttctcgcggcgcgggcggcgccctccgaggacatctcgatgaccagggcg

SEQ ID NO: 142175 - DNA, 122 bp, Homo sapiens
gaagttgtggtgagtggatgtattcccagacggatgcgggcggtccccgggcagggaccccgaatccggggtcgcagggtggtagagccggaagattggattccatctccgcaaggattgag

SEQ ID NO: 142176 - DNA, 122 bp, Homo sapiens
cggcggcagtggcggcccggcctgcaggagcccgacggggtctctgccatgggggagtgacgcgcctgcacccgctgttccgcggcagcggcgagacatgaggagaccccgcgacaggggca

SEQ ID NO: 142177 - DNA, 122 bp, Homo sapiens
ggcttcagggtggatttacctttccagcctcatctgtttggcacttggtattgcaccagacgcatggctgttctcaggccatcatcccttctttagagggtctccttcactgcttactgtgt

SEQ ID NO: 142178 - DNA, 122 bp, Homo sapiens
aagtggctctcccagctagagaccttcagtggcttgtaacaagcaagagcagagccaaatcgcagcacaagattgtaacttgttcaaggctgagagcacgctgcccaggcaaccctctgtga

SEQ ID NO: 142179 - DNA, 122 bp, Homo sapiens
taatagagagggagcgcgtcgcctctcacccatgagggctcggccagaccccaggcgcagcggcagagctgcatgaaaaggttcttgctaggtcctcgctccagccgcctggtggtgcgttc

SEQ ID NO: 142180 - DNA, 122 bp, Homo sapiens
gccacaagagggcgccctgaaccctctcactgaaccacctgttagccaaacctggaaggacgaggtgacccagagtgggggtaaaaatgcctgtggtaaaaatactggggtccagctgcagc

SEQ ID NO: 142181 - DNA, 122 bp, Homo sapiens
tggcaggatactgtgaagctaattcaggcatcagaaagtggactggataaaatttaggatcgcttccaagcttgaaatcctggaacgctatgaaacacaagccctgggagctgagatatgtc

SEQ ID NO: 142182 - DNA, 122 bp, Homo sapiens
tcatgccttaaaacagcccttgagatagggctttatttcctatcattatttcctttatcacgttatttcaattttgtgatcaggaaagggaaggcagaggtcaattccccaaaggttgcaga

SEQ ID NO: 142183 - DNA, 122 bp, Homo sapiens
ggatgtggggactgcctggcaggagttcagagagcctgctggcttctgacctcgcacctacgagggtcataggaggccacctgctcagcagccagtgggggtgctccaggtgacaggtctat

SEQ ID NO: 142184 - DNA, 122 bp, Homo sapiens
actgtagtgtctcacattctgaggatatgattaacccagcagctgagataagccagacaccgcagcatctgtttaactcactacctcctttggggaactcaatttgttgtgaacataaatct

SEQ ID NO: 142185 - DNA, 122 bp, Homo sapiens
gaggtagctgtcaaagggtggctgctgtccactaaccacaagcatggatcagcccccagccggaccccctgaggctacaaaccgtgatgccactgactcaaagctcaggggtctgggagccc

SEQ ID NO: 142186 - DNA, 122 bp, Homo sapiens
taaatttcagtcacccggcctctcttcctcctcccacaggcagtcagtccctgaggtagccgggcctgccttcatgccaaaatttccctgggcaaaggccacagggatggggcccgaggaaa

SEQ ID NO: 142187 - DNA, 122 bp, Homo sapiens
taagtggattgggaagcgtgaggaatactgccctaggtacaaagggaaggcggcaggtagcggtggacgaattaaagagcttcatgagcttgtgagtctccactgccctaaactggagggga

SEQ ID NO: 142188 - DNA, 122 bp, Homo sapiens
gaactgcttccaaccctggacacgaaggcccccaccggccggagaacgaaaccctggggtcgtctgaagaggagggccaggagtccccagggccagacagcgaagccccagagctgctgcgg

SEQ ID NO: 142189 - DNA, 122 bp, Homo sapiens
tccagcccgttccgatgtgcttctcttgtatttctaggccgtagggacactcacatgcaacgagccaatgagagctccaccccgactcccttttttttttttttttttttcttttctgaaac

SEQ ID NO: 142190 - DNA, 122 bp, Homo sapiens
cacgcgggcacatatgctgtaagcacatgtgttcattgtgcgtatgtgtgtgcatgtgtgcgcgtattacgcttgctaaaatttgttctgaaacatcagggaatctactattcagaaaaatt

SEQ ID NO: 142191 - DNA, 122 bp, Homo sapiens
ggcaccagagagaacagggcggtcccttgggggcgccggctgcagaggccccaggctggacggagcttcctgtcctgggtctgcacagcagccacttggcagtgccgggctagggtggcagg

SEQ ID NO: 142192 - DNA, 122 bp, Homo sapiens
tatatgacttcaagttactctccagtgttctcttctttcaacttccatgactcccattagcgttttttgtaggacagttctagtggtaaggaactccctcagctttacctgggaatgttgta

SEQ ID NO: 142193 - DNA, 122 bp, Homo sapiens
ccccccgcgacgcacggcgcacacctagcacccggcgcgccccggggccccggccctccgcggctacccaacgccccgaacccagcttccttccaagagaggaggaaatcttaggagtctca

SEQ ID NO: 142194 - DNA, 122 bp, Homo sapiens
accaggccacacccataccccagcacatggcggcttaccctccatgaggactgtggcacccgcgatgagcagcactgggccccagcaccacttcatgctgccccgggccactctgccacctg

SEQ ID NO: 142195 - DNA, 122 bp, Homo sapiens
cccgccccggcccggaaaccgccgggaaggggaccccggagcccaccgctctggagtccccgttcgtgcagcagtgctcacgtacctcgtcccttccgcacacctgctggatctggaaggaa

SEQ ID NO: 142196 - DNA, 122 bp, Homo sapiens
ttccttctccacacttctgctgatgctgaggtggcctttaaagtgccagcaaggaggagccgggaggggtttgcacatgtgttgctgggcatggatggggtggtgtgtgtgccaggatggga

SEQ ID NO: 142197 - DNA, 122 bp, Homo sapiens
ttcaggacctctgtaccgaaaactgtagaatattgcaagggaaaccaaggccggcctgagcggtagctgagctctgccgtgtgtgtggaggggaacacacgacattgtacagacagcccttc

SEQ ID NO: 142198 - DNA, 122 bp, Homo sapiens
agcagccgtgcctggcagtgggacccacacacagctggcagcagacctggcgcgctcaggcgccctgcttgtggcatcagtggacctgcagtgacccctagtgctccagaggtggcagctca

SEQ ID NO: 142199 - DNA, 122 bp, Homo sapiens
gcccaaagatcctttttccaaatagagtccccttcacaggtttcagttaaacatatccttcgagggtccagcattcaatctggaaggagccttcagagaaatttgaaagtggcataaaccaa

SEQ ID NO: 142200 - DNA, 122 bp, Homo sapiens
cttaattcacttttatcttttgcagatgcccagaaatagttctaggcattttgaaatcatcgctaatagaataacaatacatacaagtaatatggtgctggattttgaatggctgttagtaa

SEQ ID NO: 142201 - DNA, 122 bp, Homo sapiens
aagctgaggctgcttaggaatccacagccccacaggcctctcagaaccttgcatcagagtcgcccttgacctcaaccctgcccgagaaggaagtgctggtgcaaccccagcccagctgcagg

SEQ ID NO: 142202 - DNA, 122 bp, Homo sapiens
ctactaaacacataccatgtaatataccactaaacacacactatgtaatacactactaaacgacaactgtgaacactaaaaagctcaagacatcttctcattatcaagccactgccaacaaa

SEQ ID NO: 142203 - DNA, 122 bp, Homo sapiens
ttcggaggccggggtcgggctagggatcgggctgggggtcgcggtgttgggtctccgggccgccgccgcgcgcgacacctggcgggctccctccctccagtccacgccggacgcctgggctt

SEQ ID NO: 142204 - DNA, 122 bp, Homo sapiens
acgtgacccagggacaggcccttccccaggaaggctaagcacgaagtcccacccttcttgcgatcgaggccagcaacattggtgttcatgatgtcagccaaggatggaagctccaaatcgct

SEQ ID NO: 142205 - DNA, 122 bp, Homo sapiens
gcaaactcacagtcccctgcttgccccatcaggattgctcttagcatcctgagttttcaccgtgtggttgcaggtaggtttccaccgtcagatcttggctccttgagggaagaaatcttaat

SEQ ID NO: 142206 - DNA, 122 bp, Homo sapiens
cgccgccgctagccgagcagcacacatggcgcaattgtccaagaagccagcggagcgccccgaacaagcactgtaaggggaggccagcaggcgcctccttttaactggccggcggcgggtca

SEQ ID NO: 142207 - DNA, 122 bp, Homo sapiens
agagaaccacctttaaaatccccaccacattttccttgggaattgacagtcggaatgtagcgtttacagggaaaagcaaaggctcgggactggcccagcccccctggaggcagcgtgggggt

SEQ ID NO: 142208 - DNA, 122 bp, Homo sapiens
ccgcagggtctgcagcgccggggcccgcacctcctgctccgcggcccgccgccgccagcccggggctgacctctcagagcagggcggaggattttcacagcacagcttcccgagagagcggg

SEQ ID NO: 142209 - DNA, 122 bp, Homo sapiens
agaacccccgactgcgggggctggagctcggaagcaggtacaagcgccactctccgcctgcgccgtggaatgcgcgccgggaccactccgcagcccttcccccagcgccgccggccgctgct

SEQ ID NO: 142210 - DNA, 122 bp, Homo sapiens
gtggaagtcggagagctcgggaggagtgaaatgcgggtgccgggagccagtctcaaggaacgcggctaacaaaaggctcacattgcctgtcgcggctaacaaaaggctcacattgcctgtag

SEQ ID NO: 142211 - DNA, 122 bp, Homo sapiens
ccgactcgagctaaggcgctctcggccgggcctagctcggagagggcaacttggtttgtacggggtcgggaaatcctaggcaagtccaggccccgcacatccagtccgcaggcccggccact

SEQ ID NO: 142212 - DNA, 122 bp, Homo sapiens
ggcggcggcagcagcagcggcttcctcggggggttgtgattcgctcacaggagccattgacgggagaagaggaggctttcttggtggaatttacctcaggcaagatcgagccgcaggaataa

SEQ ID NO: 142213 - DNA, 122 bp, Homo sapiens
taataataatagtcatgaatcagtacatagattttacaaacctctctagattttgacccacggtttaaaaaatatcacctgaaagggttaagggtgataacacatggaaagggtttggtccc

SEQ ID NO: 142214 - DNA, 122 bp, Homo sapiens
cagtgaccaatatatggtagtttctctcccatagtcagaaaatataggtctaggaacaaacgggtggaaggagaagtggctttcttcattgttatctattatccacacacaaaatgtgtgct

SEQ ID NO: 142215 - DNA, 122 bp, Homo sapiens
acgcactgatacaggtgttccatgctgataaaaaatgatgatggcatctcatgaaggaaacgttggttcaggaatattatattctggtgttacctgtatggatatggatatttctctctctc

SEQ ID NO: 142216 - DNA, 122 bp, Homo sapiens
cctcctctggcgggacgagaagagtccttgtccgcccttgctgacgagaagactgaggcccgaaaaggaaaagtctgttgggccccccactgcgcgggccgggtgtggctggaggccgagag

SEQ ID NO: 142217 - DNA, 122 bp, Homo sapiens
agtcagttctgctatagcacaacatgcattcctaaaaaattactgcacaatgcaaaattacgcaacaaaaaccacatgaggcttattgggaaaacagggttatggcacaacactcaaagacc

SEQ ID NO: 142218 - DNA, 122 bp, Homo sapiens
gtgcacacagaggaggtggtgcatccaatgcgttccccacctatgttaactcacagatctcgcctgctcactgcactcatccaaggtcttgggcaaggacccacagaaaaatagtgaaacag

SEQ ID NO: 142219 - DNA, 122 bp, Homo sapiens
cctgtagggcagttagctaccagatttctgggtatcttggtcctttgtgattgatccgaccgcttgctgtaactatcttggcatctttccttgtgccctccatgtgtccttccttaactttt

SEQ ID NO: 142220 - DNA, 122 bp, Homo sapiens
acggggatcctggctctgtgtccctctgcctgggcaggtggcacggccaacgacctgctccgcgccaggtcctaagcccagtctgaggccgccgcagctctgtggcaacaggaccatggctg

SEQ ID NO: 142221 - DNA, 122 bp, Homo sapiens
agaacccatgaaacggaacagggcccaggcagcccaggagcctggaagggggcagtggggcgagatgcagcccaccagggttcgcggcagcccagcccttcgcccccgggaggggctggccg

SEQ ID NO: 142222 - DNA, 122 bp, Homo sapiens
acgccagccacccgacagggcggggccacggccggaagtggcggagagtgctaagaatcgcgcggctggcaggtgcggccaccgggacgcgctcgcaggctagccagggacgtgcgcacctt

SEQ ID NO: 142223 - DNA, 122 bp, Homo sapiens
tctagtccctcctgcaggccctgggatggctcctcatggagaaaccaggttcccagtccccggctgggcacagatggtaccgggatggctgaggccatgaccctacccctgtgaggggcaca

SEQ ID NO: 142224 - DNA, 122 bp, Homo sapiens
tggctcagcgggtcccatgcccatgcagccttgctcactgctagcgcagcagctggagatcgacctgcaaggctgcagcctggcggggggaggggcgtctgccattgctggggcttgagtag

SEQ ID NO: 142225 - DNA, 122 bp, Homo sapiens
acataatagataaaagtacaggaaaataaaagagctgattgaaatgcagcacattcagaccggcagtttccagaaggatttccagaatggcattatcattttgatgtttcagtgaaaaaatc

SEQ ID NO: 142226 - DNA, 122 bp, Homo sapiens
gacctagagctaccggcgagatactttacttcattccctgtggtgaaccgtggggactttcgctccaaattttcatgttaagcctcagcgtatgcatgagacacaacgagtttggaaaatct

SEQ ID NO: 142227 - DNA, 122 bp, Homo sapiens
tttggggtttatcggtgcaggagccaagaactatattcacctgaacagacccagaaacatcgccaaatcaccgttccgcacagaagtgagtttagatctctttttaagagttgaggatctct

SEQ ID NO: 142228 - DNA, 122 bp, Homo sapiens
gagattaagtgttaatgattctaggacaaagagttgaaatgtctggtaagcaaccaacaacgtggcatggaaaatgaagaaatagctttaaaaatctacgacgttaaaggatacaattaagt

SEQ ID NO: 142229 - DNA, 122 bp, Homo sapiens
gggcgggcggggtcggtactggcctcgcgatccgcagctcccttcgggctgctccggcagcggcggatccacttcccgaacaaacagccggaactgacagaaacacctccctccgctccccc

SEQ ID NO: 142230 - DNA, 122 bp, Homo sapiens
gcttttctggaccatgattggtggactggacatcataatgctggaaggcctgtcagattacgaaactgaagaaacgaaacaaaaccatgaggatggtgaaaaggtcaggaagaatgaactat

SEQ ID NO: 142231 - DNA, 122 bp, Homo sapiens
ccccaggaaatgtggccggtctgtattctacacagttgaggtcgtccgtggaggtgtgagcgccccagcccttcacaagaagggggccagagcggctgtcgcagctgggctgtcttcccagc

SEQ ID NO: 142232 - DNA, 122 bp, Homo sapiens
ggcagcggggggcggagagaggagcccagactggcccccacctcccgcttcctgcccggccgccgcccattggccggaggaatccccaggaatgcgagcgcccctttaaaagcgcgcggctc

SEQ ID NO: 142233 - DNA, 122 bp, Homo sapiens
actggagaaatcctggaagccaaagttctgggcgatgctctggcactcggtgcccttgcccgagcaggggggtctgaggatgaccgcgcgcaggagtttggaagccactgccttcgcgagga

SEQ ID NO: 142234 - DNA, 122 bp, Homo sapiens
gggcccggccccaccctgcctgccacgctggctgagaccatggcttctgcagccactccccgtgggtgccaaggccatgcctgcctcacctgagcaacctcatgccagccgtggcccccagg

SEQ ID NO: 142235 - DNA, 122 bp, Homo sapiens
acaatgacttgggggccatgaaatagtgaaatcatcaacaaaaacacaacaatgcaaaaacgtggcacaaaataggctactgaaaggactcttgtttacattataagagctgaagcaagaaa

SEQ ID NO: 142236 - DNA, 122 bp, Homo sapiens
gacatctagcgtctcacacctgtaacacactaatgggtgccagcacagagccacgcatgccggccttcaggcaccatcgttgaccgcacgtcatgcttttcctggtgtcgtatgtttgtgcc

SEQ ID NO: 142237 - DNA, 122 bp, Homo sapiens
cctaagcagcgctgggaacgtttccgttcctttcaggagagagagaaggagcagggtttgcgcttctccgggccagacggtgttttctcggcagctcttcccagaccgtgtgcaagcaggag

SEQ ID NO: 142238 - DNA, 122 bp, Homo sapiens
tgggaactaatgcctccagtaacctgcaatgagattcctcatccatgtgtccatattccacgtgggtgctgtgagacctgaatgagtctcttgggttttgggggtagttaccaggttctaca

SEQ ID NO: 142239 - DNA, 122 bp, Homo sapiens
ggagctcgctctccgcccgggctccggctccgctccagccgtccggggggcgccgcggcgcgcagagcgcagcaccccgactccagccaggagcccccgcccccccggagcgcaggaggacc

SEQ ID NO: 142240 - DNA, 122 bp, Homo sapiens
ccagagattctgcttcagttcttctgaggcgtggcccaagccaaagctccccagtgactccgaagtgcagccgcggctgagaagcactgttagagttggacggcagctcttgactcctccca

SEQ ID NO: 142241 - DNA, 122 bp, Homo sapiens
cctcggtccctaagacaacgccttgcaagcatcacgcccctcgatgttgcttacgggagacgtgtgcgtgggcgcgggagggtgcccaagctggtgctgtgcacgccaatggcaatcccatc

SEQ ID NO: 142242 - DNA, 122 bp, Homo sapiens
ccctcacggcagtgcccgcagaaacagcgggagcagcaggcaagggtcttcgttggcttccgcccaaatctcacacagtgcgtctgattcgctgagccttaacgccctcggacccctgaccg

SEQ ID NO: 142243 - DNA, 122 bp, Homo sapiens
tcttgaggttgtagcccaggatggacttggtgcccagcggctgccagggctgcatggcctcgtcctggatggcggcggcgtccacggcgtggcccccgtcgatgcagatggtccgcatgcgc

SEQ ID NO: 142244 - DNA, 122 bp, Homo sapiens
cattttttttttcatatacttattgtgaatgtaagtaccaacttcagagtttctcaacctcgatactgtggatgtttttggtcacataattcttcgtcgtggggagctgttctatatgttat

SEQ ID NO: 142245 - DNA, 122 bp, Homo sapiens
cccgactctccatcgggcctggaggtccctgaccgcggggccgctaagggttggggctgccggcagccggcttctcaccaactgccggttccagcgcacctgcttgggccgaaggagtgtag

SEQ ID NO: 142246 - DNA, 122 bp, Homo sapiens
cggctttgtgtgcgtgtgaaatgtgcggcacattgcagacgaaccctaagcccggcgagtcgagtctattgttccccgcgaggatctgccggggcggtgtggagccaggcgcagtgccgcgg

SEQ ID NO: 142247 - DNA, 122 bp, Homo sapiens
agagctgaatgttcctattaagaattatgaatctcccagcagtgagtgagaacttgcatacgcgccacccaaatcctttttcagaatgcaaacccctaggtcaaaaataataagaaataaac

SEQ ID NO: 142248 - DNA, 122 bp, Homo sapiens
catgggtccccctccccgagccatgaagagctgcctgcggccatcttggccctcgcaccccgtctctgtcaccccaggcccctgtaacttgcttaacgcttcctgaggggtggtttgggttt

SEQ ID NO: 142249 - DNA, 122 bp, Homo sapiens
gaagtgagggctgagcagggaggtgctcaaagcgggctcctcacactggctgtctggagtcgctgtgggaagggcccaggggaagaagggttgctggggcctctgaatccccccccgatgga

SEQ ID NO: 142250 - DNA, 122 bp, Homo sapiens
ggaaggggcgcgggactgctgtgggggttttccctccccaggcaggggcaggacctgttccgggcgactgcagggttaagggtatcgtcttaaagagccggatcctcccggctggagcgagg

SEQ ID NO: 142251 - DNA, 122 bp, Homo sapiens
aggtagaaataggaatgggagatgaaagcaggtcccttcatacctttaaaacacagacagcgagaggcctgaggtcatgcattttgcaggtgagagagagactgaacttaaggacaaacctt

SEQ ID NO: 142252 - DNA, 122 bp, Homo sapiens
tcctcagcccttgggcagtcgatgggactgggtgctgtggagcagcgggcagagccctgccggggaggctagggctgcccgggagcccacggggaaggggggaaggggacgagggggggagg

SEQ ID NO: 142253 - DNA, 122 bp, Homo sapiens
ggaaggccagagaagtgtggagacggaacgcgagggcgaaagccaaggccaatgccagggcgaggaggaccaggagggcaaggccgagagccaaggagccgccgtgtgccagagccaaggag

SEQ ID NO: 142254 - DNA, 122 bp, Homo sapiens
aaaaaaggccccaagcaacaagcagtgtgtgtggggctgataggagtgaggaaaggaggtcggacagttatgccagcccctatcgagagtcccagcaatacaaagaacagggccagggtttg

SEQ ID NO: 142255 - DNA, 122 bp, Homo sapiens
aatgagcgcctccccacaccaaggtgtccaggagtgagtgcgggaaggaactcggccgcccggagttgtggcctcatcgtgcttcccgccaaaaacgccttggtactgtcgggacgcggcta

SEQ ID NO: 142256 - DNA, 122 bp, Homo sapiens
ttctttgactcggaaagggaactccctgaccccttgtgcttcccaagtgaggcattgcctcgccctgctttggctcacgcatggtacgcgcacccactgacctgtgcccactgtctggcact

SEQ ID NO: 142257 - DNA, 122 bp, Homo sapiens
gctccagacacacagacactgccatcctgcctacaaagaaaggaatgcagacacagccaacgtcagcattcggggtgggaccacagtggaacgcatacatcctttcacagctgccaaggcct

SEQ ID NO: 142258 - DNA, 122 bp, Homo sapiens
atgcagatttttctctgtgtctttctggcccagctttggagtagacgcgtttactgaacacggatgttgcacgcggatgttctggctggctgtgagcaggctctgggcaggaaagatggaag

SEQ ID NO: 142259 - DNA, 122 bp, Homo sapiens
gggaggaaggatgggtgcgggtaactttttgaccgccttggaagtaccagtagccgcgctcgcaggggctgcctccgaccgccgggcgagctgcgagcgagtgagcccgccaccgcccctcc

SEQ ID NO: 142260 - DNA, 122 bp, Homo sapiens
cccctggctctggaaagaagctgtcctcacagcaaccgcgctctcatctgcgctctggcgcggggagctcagcatggaaccctcacgtgaacccattttgtggttgagaaactgaggccgag

SEQ ID NO: 142261 - DNA, 122 bp, Homo sapiens
ggaggaggcagcggtggtggtggcaccgggtagaaggcggtggcactgggtagaaggcaccgccgccgcccgccgcgggaggcttccgcggagactcagggctgcagagccagcggaggctg

SEQ ID NO: 142262 - DNA, 122 bp, Homo sapiens
gcgattcgaggaaggcagggcactgagggtcggaggcgcatgcccggccacagcaggtgccggggcgggggcgcgccgccgccgccgcggcggcctcccggcctcccctttaagagccgcca

SEQ ID NO: 142263 - DNA, 122 bp, Homo sapiens
gcgagggagacacaggttcaggggcatgaacggctcctcccgtggaaaggactgtgtggccggctccccaggccacgggggccactgtcctccatgccacgtcccatgccgcttccaccgca

SEQ ID NO: 142264 - DNA, 122 bp, Homo sapiens
ggattgaggtagctctcctgctccaggacctctggggcctcagcctcctcccccaagccacgtaggcaaggaatagaaaacgaagcctcatatttgatcccacctccaggaagacactttga

SEQ ID NO: 142265 - DNA, 122 bp, Homo sapiens
ggtggaagtcgtcccaagagagtccagggatcaagtgggcatgcccttttagccttggcacgaaatggagcagaaaaagagccggatgcggattactgtggtgccctaggctcagattctgc

SEQ ID NO: 142266 - DNA, 122 bp, Homo sapiens
aaactgagttaatgcctgcacacctataatgaatggttttgcatgaggaccacttcaccacgttacttctggcaatattttagagaaactctgcagtttcctcactcataacctgaaccaaa

SEQ ID NO: 142267 - DNA, 122 bp, Homo sapiens
gttgaaagtgattgttccggggaagaagaaatgaagaaaaggtggagggttgtagtttttcgtgacctatcttggaaaacaatgtaaccctttaagtgtaggaataactatgaaaaatatat

SEQ ID NO: 142268 - DNA, 122 bp, Homo sapiens
ggatgccatggttgaaaacatggctggggcagcgagaagttaagatgaagtcccaagagtcgcaagaacatgcagttccaggacgtgattctctgcagggacaaagagagacagcagctaca

SEQ ID NO: 142269 - DNA, 122 bp, Homo sapiens
accgcgcccagcctactatctttatcttacagaaagaaaagaatggaggaaaccgaggctcggagacagtaggtaatttccccaaggttccacagctaatgagtggagcggcgatttgtgga

SEQ ID NO: 142270 - DNA, 122 bp, Homo sapiens
actgttcagaataaagttggagagaacataagtgaacagatgaaccatgaaaatcataaacgtatgaagacagtgctctgagagcagataaggactctgttggggaagggttcacatacctg

SEQ ID NO: 142271 - DNA, 122 bp, Homo sapiens
tcccattccttaattttcctagccgactggacccttccccagccctggcctccttcctggcgcgcaaagatggcagtgtgaacttcccaccaagtgccagagacagatgctcctgcttagca

SEQ ID NO: 142272 - DNA, 122 bp, Homo sapiens
cagttctgaaacacttagacaaaagttcacatcgctaagtggatggccaggacgcccttccggttcaatttggagaccggagatctttaacctaacctaacattccttaaggcatcggtgcc

SEQ ID NO: 142273 - DNA, 122 bp, Homo sapiens
cgcccgtgccagagcctctagctccatggcctgggcctctagcctcatcttctgctgcagcgaggtctcccgcaggagccggacctcctcctccagccgccgcagctcttgcagctgccgaa

SEQ ID NO: 142274 - DNA, 122 bp, Homo sapiens
tgaaatctgactcccagcacttcagttctgggtgcaccaaaatgccaagtcacttcagatcggatttcttctgactctctgagtactccactctgtgcctctcccacttgctgagaaaaatc

SEQ ID NO: 142275 - DNA, 122 bp, Homo sapiens
tgccacctgctccgcctccttcggcctgcaatggttcattctgtgtcagcttggccaggccgcaggactctgatgttggtcaaacagcagtccagaagtttcagtgaaggtatttttcgaag

SEQ ID NO: 142276 - DNA, 122 bp, Homo sapiens
aagaattggaagaaacagcaggaaaaggcttctaatgaaactgttgtggctgccacagatcgggggtgttttcagcagtgtttacaccacaccagtgagtacacacctctgctacatctcat

SEQ ID NO: 142277 - DNA, 122 bp, Homo sapiens
tgggaacttactggtagtaaacgccactccatagaagcggtgaccggttaccatagagaccgcgtcggggtgggcggagcgtcgcttctgagctgtgccacggccacatcagctcggccaga

SEQ ID NO: 142278 - DNA, 122 bp, Homo sapiens
cctccatcccggcagcagtcttggccggatctccccagggcctcgcgctcttggagccgccgcttccctgcgctgccaggaggccaccgctgctcagccccggggctgctgctgcggccgct

SEQ ID NO: 142279 - DNA, 122 bp, Homo sapiens
atgttcattttatagatgagggaattttggcctacagaaatcaagtaacttgcccaggatcgtagacagaagtgacagaacaaaacctcaaaccaaggtggtcacattctagtggttaatgt

SEQ ID NO: 142280 - DNA, 122 bp, Homo sapiens
aatatcacatggagcactcgatctatcgtctttgattctgaatactgccgctaccactgccggatgtattctccaataccaccatcgctcccaccaccagcaccacaaccgccactctatta

SEQ ID NO: 142281 - DNA, 122 bp, Homo sapiens
tcctcagcctgggtttgcaggaccccctcggctgcagggcgcctgccacaaagccgaccccggcaggagccactctctctgctagttcgctgcctcggccctgctctccctcagcctctctt

SEQ ID NO: 142282 - DNA, 122 bp, Homo sapiens
ggtgagttttcgaggtgactgtgctgtgctcggtgaggggacgcccagagagccctgacccggggtcactccgtcgccgttctcctcttgtctacgtgctggacccggtgcgtatccatcac

SEQ ID NO: 142283 - DNA, 122 bp, Homo sapiens
gttgtggcgatttgctcaaacatgcagcagaattgaggtcatttctctgctcactgctaacgacttcccatcccctacaattgatgcaggcccagagtgtgcgcccagccggccacaggtgc

SEQ ID NO: 142284 - DNA, 122 bp, Homo sapiens
actggacaagaagggagcataataaaggctctgaagcagcagacatccaaggagcatccacggggaaccagcaccatgctgaagatcaacactcatgctgactctgcagaccaagtacccct

SEQ ID NO: 142285 - DNA, 122 bp, Homo sapiens
cttgtgacccaggcttagggaggcgtgcgggagggggcggggtcaggagccgagacggggcggagctaatgccctaaggttgtagagattatcgctgaaagaacgtgggagcacatctgagg

SEQ ID NO: 142286 - DNA, 122 bp, Homo sapiens
tactgaggagacacggctccagttttgacccgactacggttgttttcttcgtgtgtaccgcgaaatgctgatgacgtccggttccgcgcagtttttttcctatttcgtttccaaccacagtt

SEQ ID NO: 142287 - DNA, 122 bp, Homo sapiens
cccagccgtccggccctgagcccctggccggcggcggcctctccagcgaagactgcggctcgaagactgcagctcggaccccgggtgcttcggatccctagctcccacctccagctccctca

SEQ ID NO: 142288 - DNA, 122 bp, Homo sapiens
cctctgggccgcgcgccttccggcaccgtggcccccccacacccccgcgggatggctccacgagacacccagtcaggcaccctggttccctgactacgcgccgcgcccgccgttcgccacgt

SEQ ID NO: 142289 - DNA, 122 bp, Homo sapiens
ggcacaccggctatggtagagcgggccatttcgggtgccactgggggcgctggctccctgcgaggctgcagctggaccaggtgcaccatgagcaggttccatggctggcacgggggaatgca

SEQ ID NO: 142290 - DNA, 122 bp, Homo sapiens
cccactttcccctggaactgcaaagccctcttctggagtttcttgatgtgctttttcaaacgctcctcttttttggacagaactctggctttcttgtttggtttgtttttattttgcactgg

SEQ ID NO: 142291 - DNA, 122 bp, Homo sapiens
tcccctccttcctggatcgagcgcccgcactcccggccctgcagccacccgagtcccgctcgctgtcgcctgcacgcgagtcccccctggcacgcgctcccacatcccgggatcgtcccaac

SEQ ID NO: 142292 - DNA, 122 bp, Homo sapiens
gacccagccttgcggggcgagaaggaccccaagagcggcttcgacataaaagtaccacgccgcgccgtgggaccctccagcactcaggttctcgtcccttgagccccgcctgcaccctctcc

SEQ ID NO: 142293 - DNA, 122 bp, Homo sapiens
cctccgggtgttgctctggagttgcgggggccacgggcgggccaccgaggagctggcgcgcggtattgatccgtcccgccgccccaagcctctcctgaggcctccctctggcgtcccccggg

SEQ ID NO: 142294 - DNA, 122 bp, Homo sapiens
agaccggagggcctggcccggcccaggtcgcacagtgcagggcagtcccaagggtgacagcggccagtgcgcgggcgcgccctctacccacatgccccgacccgccgggtccctgcgtccgc

SEQ ID NO: 142295 - DNA, 122 bp, Homo sapiens
tcccttcgcaggggagggtgcagaggctgaggctggcgtcaccttccgttgctaaggtaacgtgctctggccattttatctgataaaggaagtccagtggactgtatgcattattcatcact

SEQ ID NO: 142296 - DNA, 122 bp, Homo sapiens
catgtgctgcacccaggcggcctcttctggcatctctcagtgggatgtgctgcacccaggcggcctcttccggcatctctcggtgggatgtgctgcacccaggcggcctcttcccgcatctc

SEQ ID NO: 142297 - DNA, 122 bp, Homo sapiens
atttaaccaagcattgttgagttttaaaagtgatcatgggtcttaaatggtcagacaaaacgatatgcttttattgtttaacatttggtagaacaaaggtcattctctttttcacaatatat

SEQ ID NO: 142298 - DNA, 122 bp, Homo sapiens
atccttagcaaatctatcaccatggaaactgccaatcatccatgcttttcatagcttaaccgaacatctgccaggagacagcaagtcatacaaaccattcgtcctgcctattgtgtttacaa

SEQ ID NO: 142299 - DNA, 122 bp, Homo sapiens
gggagggcaggagggcgtgagcctggctagccccacctccaggcacagaggccctcccgccgcccgcagctccagccgcactgccccgatggctccctacccctgtggctgccacatcctgc

SEQ ID NO: 142300 - DNA, 122 bp, Homo sapiens
tttctgggtggtacaaacttgcctgattcacttctatcaatggtgtcaggatcccagatgcgaatgtcaggcactcctgctccaaatgggtcactatggaaatgagctttgaattaagagag

SEQ ID NO: 142301 - DNA, 122 bp, Homo sapiens
atcctgaggcttaaatggctgctgctgtcggtcagcattaggggtgtcgtgtcaagctgccggtgacccacaagggctggcccctgaatgcagcagagcctgcagttttcctgggaagtgca

SEQ ID NO: 142302 - DNA, 122 bp, Homo sapiens
tgtggctgctgtggctgggctgggggctgcaggtttgagggatgacagcacttttagcaccggtggttctggaagagggggcggaggcggcggcgacccaggaggtgtggtgctgacagccg

SEQ ID NO: 142303 - DNA, 122 bp, Homo sapiens
caccactgcacaccactctagctttcctatgcatggggcacagctgaaaagctgtcaaaacggaatgatgccctggaactctggaactctgctgacacactcagagaaacagatgacaagat

SEQ ID NO: 142304 - DNA, 122 bp, Homo sapiens
acacggtcccgggagaacgcccggcgccggggtacccctgaacctgaagaagctgggcggcggggtgggaagaggccaaagccaccccctggagtggcctctgcatcggcccgagggccgcc

SEQ ID NO: 142305 - DNA, 122 bp, Homo sapiens
cgccggcggcccggccccgcgcgggtcacgtggctgcgggtcacgcggcgccgcgtgcgccgcccgccgggctgactcagcttggccgcagctacccggaccgactctcccaggtggaggag

SEQ ID NO: 142306 - DNA, 122 bp, Homo sapiens
atttcttggctttttatcattttgaactttatggaatacatcggcagccaaaacgcctcccggggaaggcgccagcgaagaagtaagtgcagggttttttacgcgtttgctccctcccgccg

SEQ ID NO: 142307 - DNA, 122 bp, Homo sapiens
ggaggcgaactgagcctttctgtttggatttccctcctcgctatagcaaccagcagcatccggacaaaaatgcgccctccctggacaatggcccggcctcctgcttctcgccctcgtcttcc

SEQ ID NO: 142308 - DNA, 122 bp, Homo sapiens
ggggtgcgggaaccttctccagagaagctgcgagttggggaaactccgccaccgatccatcgtggcgccgggaaaggggatgcggggctcggaagggctagatttcgcaatcctgggatcga

SEQ ID NO: 142309 - DNA, 122 bp, Homo sapiens
ggctgcactggggggataagccaggctattttcatcacttccttccgcccgctcccgcagcggccacctcagctgtatcccatagagttgccacccaggcctcagccaggacctttcaggcc

SEQ ID NO: 142310 - DNA, 122 bp, Homo sapiens
tgttttcactctttgcaagacacagtggggatcccggctggagcctgacctggcccctcccgcagggagtgcacagcctgttggagagcaagacaggtaaccccattccaggtcagggtgtc

SEQ ID NO: 142311 - DNA, 122 bp, Homo sapiens
catatctgataaaggatttttctccagaatgtataaagaactcaaaactcaaaaacagcccggccaagttctcacgcaagtataaaggcctcaggaaaacatctttaaacatacaaaaatcc

SEQ ID NO: 142312 - DNA, 122 bp, Homo sapiens
gtggctgtaaagtccaggcactgtcacttaactgacacactaaacaggattggagaaaagcgtggctgcctcccaaggagttctgtgggccgtggggcttttcgtgccgatgccgatgctgc

SEQ ID NO: 142313 - DNA, 122 bp, Homo sapiens
cttgacacaatgctaccccactccagaaggtcattaattcaagaaatattccttgagtgtcggctctgtcccttgctttagccgttgtatggaggaaaaccataccaatccttagactcacg

SEQ ID NO: 142314 - DNA, 122 bp, Homo sapiens
gattctcccagaaagtcttcctgagggggctgaggagcacctgttcccctggggacagctcggccggcagccccagcgtttccttccccatccccgccccgcagattcatgctgatcctggc

SEQ ID NO: 142315 - DNA, 122 bp, Homo sapiens
gagatgccactgggcactgccctgccagtagtggccttcagggggctccttccggggctccggcctgttttccagagagagtggcagtagccccatggggcccggagctgctgtggcctcca

SEQ ID NO: 142316 - DNA, 122 bp, Homo sapiens
gaaaattattattattattattattattgtttgagacagagtctcactctgtgccaggtccgacccgcagaccctggctgaatgacagatcaaagaatgcactcagacacaggtatccagtg

SEQ ID NO: 142317 - DNA, 122 bp, Homo sapiens
tgccactggagggcagcatcgcccactgttttgcacgtcggtcattgtttccatctctaacggggtgcgttcgctacagggtcctcttggaacatatttgtttatttgacaagaggtgaaaa

SEQ ID NO: 142318 - DNA, 122 bp, Homo sapiens
gcccgccccccatcccctcccctcccccgccggccccagcccggcacccggcggcccctccgcccagtcctcgccgcccaactttgatttaggaggtcgcctggtcccgccccctgccctac

SEQ ID NO: 142319 - DNA, 122 bp, Homo sapiens
tagagacgagtctcactgttttgctcaggctggtctccaactcctgagcttccgatgattcgactgccttggtctcccaaagtgctcggattacagatgtgagccactgtgcctggccccta

SEQ ID NO: 142320 - DNA, 122 bp, Homo sapiens
agttgcacttcctgtgtggttgcacataacaaaaccccatgacaagaaggatccagcctccgagtgtccacaccctgtgcgtctctctgtcctgccagcactgagggctcatccatccgcag

SEQ ID NO: 142321 - DNA, 122 bp, Homo sapiens
tagaagcaggtgcgtgttttacagtagcttagctgcggagtccacccagcccctggcatccgcagctcggctcgctcaggctctagaccgaagctgcaggcgaaggaacgtgcttggtgagg

SEQ ID NO: 142322 - DNA, 122 bp, Homo sapiens
tttcccggacggggttgaaggggagaaagggagaggtcgggcttggggggctgcctcccgcggctcagcagttcctctgaccatccgaggaccatgcggccgacgggtcatcacgtcgcgca

SEQ ID NO: 142323 - DNA, 122 bp, Homo sapiens
ccatggctgggtctctgggggcgcagccagggaccacagtgcagctggccgcaggtggcgcggaggctgctgtgactcagaatagaaggtgtcctgaaggcttctcccaaaaaggctccgtg

SEQ ID NO: 142324 - DNA, 122 bp, Homo sapiens
ccaccccggcgccttccctcctgcgtacctttctttgggcaatgggcagaggccccggagcgggcgggattcctgtgaggtgacgccagccggagtgtccagccgggtgcagccagcccagt

SEQ ID NO: 142325 - DNA, 122 bp, Homo sapiens
tctgttcatttcctgacccagccatgaatacactggaataactcatgcaaaatgccagctcgctggccccccgtttccccacccaacaaatgaaggggctcttacaggttcctttttgtcct

SEQ ID NO: 142326 - DNA, 122 bp, Homo sapiens
gggagaccgaagcactccacacaggaaacagtaagcgcgggaccaacccataagggataccggggaaactgccatgaaattcatcaggtgaaaaatcgagtccttctccagttgccatcaga

SEQ ID NO: 142327 - DNA, 122 bp, Homo sapiens
caccagccacacttcaagtgctccagagccccggtggctactgccccagaaagggcgagacgagcatctccccagcaccgcgggaagctctgtcgcacagcagggctctggaaggtcaccct

SEQ ID NO: 142328 - DNA, 122 bp, Homo sapiens
tccccagttttcctggcgcacttgacacgcgcttacagcagaggctgccgtttcaagctgcggggactgggcatccccaggtgtccagggctcccgctgcccaggctctaaatcgagcgcgc

SEQ ID NO: 142329 - DNA, 122 bp, Homo sapiens
gagatggcacgttggtgccgctgagaccccagcacaggccccagctgagccgtgaccaggcgtctgaccacagagcaggcgagatggcacgttggtgccgctgagaccccagcacaggcccc

SEQ ID NO: 142330 - DNA, 122 bp, Homo sapiens
acatatatacacacatacgcagtatctgggggcgcatatacaatcacgcacatacacatacgatcacgagtacatcagagaaaactctttcaagatttgggcaaaatagttcactaaaacgg

SEQ ID NO: 142331 - DNA, 122 bp, Homo sapiens
cggtgagccggcgtcgtggccacagccttcacactcccagccgctgcaggtccccgtttccgtacgtcacccagcgccacgcttctgcacccacgcagagccacgccccacctgtgcgttca

SEQ ID NO: 142332 - DNA, 122 bp, Homo sapiens
gtttattggtcactgattggccgacatgtgcgatcaacccgcctctgacttttagaagggcgggagaaacttaaggctgaactttgataggctcaaccactcttgatactttgaccgcggcc

SEQ ID NO: 142333 - DNA, 122 bp, Homo sapiens
gcatcatatcccacagattgggggcttagtccccaagactactccacatcagacaccaatcgcagaagttcccaccacccactctgggcttcactaatttgctggagtagctcacagaattc

SEQ ID NO: 142334 - DNA, 122 bp, Homo sapiens
gagcacttgctaagtactgggatctgaagattactcagccactgtctccacggagatcatcgttaacgggagagaaagccacgtaaaacaccacgttagatggagaagcacagaggacacca

SEQ ID NO: 142335 - DNA, 122 bp, Homo sapiens
gaggcctggaccagagccgccagagtccccacgagcctccagggtaatggagcatcagaacgattccgctcttaccacaagtgaggcacgaaaaagtacttcacagaaaaaagacaaaaccc

SEQ ID NO: 142336 - DNA, 122 bp, Homo sapiens
agtgggaggcaaggctgaggcggagggacacggagtcgggatcctggagaactgaaatggcgcgttggttactcttgagggagtaaatcagctcactgagtcatcattccaccacaaaaacc

SEQ ID NO: 142337 - DNA, 122 bp, Homo sapiens
gcaggctctctttgatctgcgccttgggggccagggagatggccccacagaggtaggtgccgctgtcattgcgccgggccctgaccacgctcatgtggaagtcacgcccgttgggcagttgt

SEQ ID NO: 142338 - DNA, 122 bp, Homo sapiens
aagtctccgtacgaccccaacggatccacatgcccggaagcccaggcgacactaagccagcgctggggaactgacgtactcctgcagtcgcagggcgctccatgcctctctgtcctcttctt

SEQ ID NO: 142339 - DNA, 122 bp, Homo sapiens
cctgcgccgccggctctacatcatcatgcgtggcgaggagggcctggactatgggggcatcgccaggtgagcttgagtgccccggaaggctgccctgtaccccgcttccccaggctacagca

SEQ ID NO: 142340 - DNA, 122 bp, Homo sapiens
gtgtactggaccgactcgggccgagatgtgattgaggtggcgcagatgaagggcgagaaccgcaagacgctcatctcgggcatgattgacgagccccacgccattgtggtggacccactgag

SEQ ID NO: 142341 - DNA, 122 bp, Homo sapiens
cccatgcagcatccctcttcgtgcccccccttcacggccaggggtgcgcatgctggatggcgaggtgacagatgcagtggaggcacgctcgctgggcctgaaccccaaccacatccacatct

SEQ ID NO: 142342 - DNA, 122 bp, Homo sapiens
acctggatggtgtaaatcaccctgacagtaaacacttcaggccaggacgcaggctgcaggcggggtggggtggcatcctcccacccagctggggtccataaaccaggcactggccctgcgct

SEQ ID NO: 142343 - DNA, 122 bp, Homo sapiens
gacttagtgtcccccagtctcaattgcctgatggctgatgccggcccggcaaataggcaccgcactttactcttgggactcggggacttggcttccttcctggcaaggaccaggcagtgggg

SEQ ID NO: 142344 - DNA, 122 bp, Homo sapiens
agcaccttcccttctgccttttaacttccccacaaaccctgacagggtctctcactgtgtcgcccaggctggagtgcagtggcatgatcatgcagtcttgacgtccctgggctcaggtgatc

SEQ ID NO: 142345 - DNA, 122 bp, Homo sapiens
attgccaactggtagcttattcacaattagaatccttctggattttttcacttgtttctgcgattttattcctactgtttttctacagttttatcaagactttgttgcctataatctactga

SEQ ID NO: 142346 - DNA, 122 bp, Homo sapiens
agagctggtgggacctacagccctctccccactccctccctaggtgttcagcgacatcggcgccatccagagcctgaaacgcctggtttcctactctaccaatggcactaagtcggcgctgg

SEQ ID NO: 142347 - DNA, 122 bp, Homo sapiens
gagacaccctctggtataaaagcccctggcaggcagctctcactccagatctgagctgtccgcagaagcagctggaggccaggggagaaactccagaaggagaggtgagttcaatcttatgg

SEQ ID NO: 142348 - DNA, 122 bp, Homo sapiens
ttttagtgtttgtgaaaattaagcttaaactggacagaataaatatttctcagacaatggcgatgctactgattacaagtgagataggtggagctcgccccttggggagaattttttagggg

SEQ ID NO: 142349 - DNA, 122 bp, Homo sapiens
ccggcgggtgggcgggaggaaccgagctcagtctcccgctacctctacgccagccccgaccgggctgctcctgcccaagcctccccaacttcccgcgaggttaaggtgcaggcaagctccca

SEQ ID NO: 142350 - DNA, 122 bp, Homo sapiens
cactagcgatatcacatctcagggagataccacagagtaggagagttggagaaatgtttacgtgagacgcagaagtagtcaagaaatatcactcgggtctcaaggaaggcgggagatgaagc

SEQ ID NO: 142351 - DNA, 122 bp, Homo sapiens
ttccgtatctattattagaatttatactacatatatttgttttccagaaagatcttagcacgctttactaaccctatttttacgttacaaaattttatttatttttatatttttatttattt

SEQ ID NO: 142352 - DNA, 122 bp, Homo sapiens
tctctgcccatgccctgggaactctcaagatagtaaggtggggcaactgcagacctcatccgttctctcagggatcaccgtccttccttgttaatgacaagtgccttgaaaaccattgtcta

SEQ ID NO: 142353 - DNA, 122 bp, Homo sapiens
tgattccttgattggacaggaggtgttaggggtggggagagagctgatggtgggggatcccgctccctcccgcgtcagtctggccggctccgtcctcccgtaggctccgctgtagctagcaa

SEQ ID NO: 142354 - DNA, 122 bp, Homo sapiens
ccggatatgggccctcggccgctcaccccccagccacccacccacgtccctcaatccccacgagcagctgactgggacctgaaagtgccaccagacgccctcacaagtctgctttctttgct

SEQ ID NO: 142355 - DNA, 122 bp, Homo sapiens
ggtccagctggggtctccgcggtggggtccagaaacgatattccgggttggattcttcctcggttggggaagcacagctggcggagaattcccacggctctcagtggattcgcttttccaga

SEQ ID NO: 142356 - DNA, 122 bp, Homo sapiens
taggctcggccgggagaagggcgccgactcggggcgcgctttggaggggcggccggtcttcgggcagctagcgggctctaattacccgcttgtccggctcttaacctagattgcactcagct

SEQ ID NO: 142357 - DNA, 122 bp, Homo sapiens
caggcgcacacacgggcacagacacgcacaggtgcacacacgggcacagacacgcacaggcgcacacacatgaacacaggcacagacacgcacaggcggacacacaggcacagacacgcaca

SEQ ID NO: 142358 - DNA, 122 bp, Homo sapiens
gaggcccgttattttgatctttcctgaattcttaagtcccttccatacccaggacatgagcgcgtttaccaggaaccgcagagaggtgtaaagacttcttgcagctgctcacccttcctctc

SEQ ID NO: 142359 - DNA, 122 bp, Homo sapiens
ggccaggcagctgcgctgcggtggagaggacagccccagcaaaaacctggagaggtcctgcggtccgtgaagacggccgtgacgttcggggcccacagctcggctcctgcaccacggtttcc

SEQ ID NO: 142360 - DNA, 122 bp, Homo sapiens
agttcgcaaatttcttgaatatttaacaatcagcttttgcaagtgcatacatgctcacaacgtttgcttttttgtactttgttttgagggaggcaggaaatggaaacttgcaatggtattga

SEQ ID NO: 142361 - DNA, 122 bp, Homo sapiens
ccgctcggagctccacatcttcccggcctcacccggggcctcactcgggggtcccgagggcgcccaccctgcagccgcccctgctgggtgcgtccccagccccagcgccctggcgccaggtg

SEQ ID NO: 142362 - DNA, 122 bp, Homo sapiens
ttcttccttctggtgggttcgtgggctccttggcctcaggagtgaagctgcagaccttcgcggtgagtgttacaattcataaaggtggcgcatccagagatgctcgtccctcccagtgggtt

SEQ ID NO: 142363 - DNA, 122 bp, Homo sapiens
gactaatgaaatctactaatgaataattattacttcataaaataaaggggaggggagacccgtttgcaagagcagaatgttaatttggccaaggagggctggacaggcaagaataaaaaaaa

SEQ ID NO: 142364 - DNA, 122 bp, Homo sapiens
cagcacggatgtagccaaaataatgtccaaccaaagattagtggggataatcgatgtctccgtgggtgctgggtgcgtaggtgacatccaggatcggaggccctaccccatggcatgataga

SEQ ID NO: 142365 - DNA, 122 bp, Homo sapiens
cgcttggaagatgggcagactccggcgctgcagctccacagcttcagggtagggactggccgagggctgggccaggggcggctgctgcctccggcctcctcctcctcctctgccgccgctgc

SEQ ID NO: 142366 - DNA, 122 bp, Homo sapiens
gtttgagatcatgctgaaggccaagcaggcccggaactcccagtttgactttctgcgcttcgaccactacctcaacccctactataagttcatccagaaagccatgaaagagggacgctaca

SEQ ID NO: 142367 - DNA, 122 bp, Homo sapiens
gccaacagggtgaaaccccgtctctactaaaatacaaaacattagctgggagtggtggcgcgtgcctgtagtcccagctactcaggaggctgaggcaggggaatcgcttgaacctgggaggc

SEQ ID NO: 142368 - DNA, 122 bp, Homo sapiens
gttagggcttgtgtgcatgaagtgggacctcagctactccaggtgtttctggacatcccccggggtgcctcatatgtgctcccacccagttctcacagtcattcactccagccctctcacag

SEQ ID NO: 142369 - DNA, 122 bp, Homo sapiens
gcctccgggtagaggaacttctgtctgtaaaggatgaaggcgaccttgctcaggctgcagcgggatggagaaacgtgacccagcggaggggctttcggctgcgaggtgcgagaggcgacccg

SEQ ID NO: 142370 - DNA, 122 bp, Homo sapiens
agagcacgaacagcaaagaggtcagacatggggaatccgggcacccaggctccgggaagacggcgcacggaaacgcaggggagcctgcaccggctgacggcggcggaaaagggcgaacgaag

SEQ ID NO: 142371 - DNA, 122 bp, Homo sapiens
gccgcaccccgtgaacttggccccatgggagctgcagtcccagctccgggctcccgggggcgcactccgccttccgccgttcccttctcagcctagacggagctgaccccgagagggttcgc

SEQ ID NO: 142372 - DNA, 122 bp, Homo sapiens
tgggtagaagggggaaaaacacatatatgcacaaactttgaaatgaaaaataaaccaaagcgtaatctttgttgaattgtgatgggctcagccacagataatgctttgcagagtttctctcc

SEQ ID NO: 142373 - DNA, 122 bp, Homo sapiens
ttttgtgctgaccatttctttgaagcatgtgtaacaggatgtaaaaatgggatccttcaccgctcagttttggctgagcaacaagtgccagttactcctatatcataaagtaaggttcaaga

SEQ ID NO: 142374 - DNA, 122 bp, Homo sapiens
acttcaggctcatctccctcaaaatgtagttctgaaaagaagccaccggctctgtgacaccgaaggggttaactcagaaccctgcagctggctgcagtgagcttcctcagttctgattttca

SEQ ID NO: 142375 - DNA, 122 bp, Homo sapiens
ctgcgcgccttgtgctcccctatcccgcagatacgcaggcttctggagaccctgggtggacgccggaggcaagaaagaagaggagacgccgaaccacgccgcggaggcggtgagtgagccac

SEQ ID NO: 142376 - DNA, 122 bp, Homo sapiens
cttaagaggaaagtggttgctgggagcatggctgaataaaagtgggctgggaaaggtgaacgagtttattctgagctctgggtcacaagccgctggaaacaggccagggaaagtgaaaggtg

SEQ ID NO: 142377 - DNA, 122 bp, Homo sapiens
gagatgctcttaaaaagacatcatgtgttagctcccatttatcacacatttactggtacacgcctattttacttgtgttacaggtgaggaatttggtgaagaccagtgcagaattattctca

SEQ ID NO: 142378 - DNA, 122 bp, Homo sapiens
ggagggacaggccccgtcaggcagtgttcagggaaggcctgcccgccgaggcagtgttgccggagaaccctgggtagggagacgtgtcctggcctttggtcctcccagacgacgtgggcagc

SEQ ID NO: 142379 - DNA, 122 bp, Homo sapiens
aagaatttgatatcttaaaaagaaatactcagtatttaccactgatttgcagcatgacctcggggaactccctggcttaaaagcacaatgactcatgagttctccgtgatctgtgacatatt

SEQ ID NO: 142380 - DNA, 122 bp, Homo sapiens
ccctggctgctccatgcccaggcggtcgtcgcccagggggtgcaagcacggtttccctcccgacttcgggccagggcttcctccgggagggctctgcctctaactgctctgcaaactgtgtc

SEQ ID NO: 142381 - DNA, 122 bp, Homo sapiens
aacgccttctctttatgtgactctctgttccccagcaaagttgccagggtccccaacaatcgtagtttctccttcacgggaggttcccctgacgtcctctagagggcgcgcgcgcacggcca

SEQ ID NO: 142382 - DNA, 122 bp, Homo sapiens
gtgactacttactcaggtcaccagaagaatgtttcttcactgccaaaaggagatgtccagcgatcttactaatcatttaaggttgcagtttcctttacaatttcattaccaccatttccttt

SEQ ID NO: 142383 - DNA, 122 bp, Homo sapiens
acggccgtacattttgatgtctgacttccacggcacctggcccacatcccggtctgcctccgccctcccctgcacaggtccatctaccatgcagcccccacggctcgccgtctgcagtgttt

SEQ ID NO: 142384 - DNA, 122 bp, Homo sapiens
aatctgggctctagcagctgcctgtcacagagcacgccggcctcaatccgggcctgtgggcggagtggaggggagggtgtcccagctgatagccaaagccaaagcacatggtggaggcagtg

SEQ ID NO: 142385 - DNA, 122 bp, Homo sapiens
agacgcggcgttcgtgcaggccacagtaatggtggtgcaggtggcaggagtaggtgccctcgtcggcgacctccagcggctcgatacgcagtgagaagtcaccgcgctcaaaggcatccgcg

SEQ ID NO: 142386 - DNA, 122 bp, Homo sapiens
gctcagctcactagcgggacacttgtcctgggtgagcaggaccgccactactgcagacaccggaccgagtaggtgggggccaacttcaaagaaagtgtgagcgcccaggcgcgcgagtggaa

SEQ ID NO: 142387 - DNA, 122 bp, Homo sapiens
actccgctgaaaatggccaggaggcttggcggggtgggcagcggtgagtggggtcagcttcgtggggttctccaacttaggggtgcaggcccccagcccaccctagccagggtgcgaggcgc

SEQ ID NO: 142388 - DNA, 122 bp, Homo sapiens
actggctacgcttacggtttgtcaagagtcatccccagcatgttttgctgcatagttcctcgagcggctgcatgatgagccagcagcaagcatgcatccctggagcgctgtgaaaacgcggg

SEQ ID NO: 142389 - DNA, 122 bp, Homo sapiens
acgcaggggctcccactgccccagccgcttctgccacccgggcagcccaagtccgccgggcggcctctgcagcccctgcctccggggccagacgcaagatccatctcagaccccccagcccc

SEQ ID NO: 142390 - DNA, 122 bp, Homo sapiens
taagacggagagcccttcattccttccgcttgaaaggagtagcttcggcatccgagctcccgggctaccttggggttttgttgctctgtaggagctcgctggagtcactttcccgggagtgg

SEQ ID NO: 142391 - DNA, 122 bp, Homo sapiens
gaactttgctttcctatttgttttaaccctgattaacagcgcagagctatgggttaggtccggccagccactgagagtccatctttgtgttttcaaaagccaggcctggttactgtcagaaa

SEQ ID NO: 142392 - DNA, 122 bp, Homo sapiens
gattctgccccgaagtgacacattaatcctgttcaagtcatatggctacacctgaggtcacgagggcaggaatgtatgatccccctgcagagagaaacatcaagtaaaggtaaatacagcct

SEQ ID NO: 142393 - DNA, 122 bp, Homo sapiens
gggctcgggacctgcagcccgccatgcctgagcctcccaccccctccgtgggctcctgtgcggccccagcctccccactgagcgctgacccccgctccatggcgcccagtcccatcgaccac

SEQ ID NO: 142394 - DNA, 122 bp, Homo sapiens
aattgttatggaggcctgcgttagtgagacctggcctgccacactctcacatctgtggggcgggtacaggagccccaggggccgaagaggcacacgtcgggcctctgggtgcacctcagcct

SEQ ID NO: 142395 - DNA, 122 bp, Homo sapiens
cgccttggagtgccctggagaaggcgcggctctgcatggagcctcgccgcctgcccctggcgcttgtcactgaagaatcagtttttgctaccgggctgtttgactttaggaagcctttacct

SEQ ID NO: 142396 - DNA, 122 bp, Homo sapiens
tgggtagggggcgggtctggcactttccattccccttggctttcatcacccacaggctagcgccaactcccagccaggtccctcctctcatccgcctcatcatgtctgtcatattttactgg

SEQ ID NO: 142397 - DNA, 122 bp, Homo sapiens
ccccagatccctgggcaggtggattccatcagaacacaggtgccggccggaggggagccgcgagggtgctctgagcccttttgtatccgccctctgctgccagcttcaaaagggctcagagc

SEQ ID NO: 142398 - DNA, 122 bp, Homo sapiens
aggaaagcaacctcgggacatcttcagaaatgaggaaaagacaggaaaggacttctactgcggggtgtggaagaagctgatgacaggggaccacagaggcacaattcagatgagaaacaaaa

SEQ ID NO: 142399 - DNA, 122 bp, Homo sapiens
ggttctggggcccaagaacgtctcgcagaaagacgccgagtttgagcgcacctacgtggacgaggtcaacagcgagctggtcaacatctacaccttcaaccatactgtgacccgcaacaggg

SEQ ID NO: 142400 - DNA, 122 bp, Homo sapiens
gccgagcgcggtggcctgtgggctcctgctgcttctcctccagggtcactatgaggctcccgcggaggggtgacagggaccgggctcagatctgccaaatgctgcggaggcagaacctgaca

SEQ ID NO: 142401 - DNA, 122 bp, Homo sapiens
ttacgtgaaagaagtcataaaagaccaaatatcatacaattccttccggggaccctgcagcgggggagggcataagaggacggggttgacggggggaagccaggcaggagagtcctggaggg

SEQ ID NO: 142402 - DNA, 122 bp, Homo sapiens
ggtgtgttccaggttccagggaattgtgtaacccaatactcactgctcccctcttcattacgtattctgtgcattgcccatagaccaggcagatggagaaacaggaattctgggggcaagac

SEQ ID NO: 142403 - DNA, 122 bp, Homo sapiens
tggggctgccctcgggatctggcctctgggacccctgacgggttctattgcgtctgatggcgccgcgttcccccagttttcccccagcacagaggggttcttaggacctcaccccttcctga

SEQ ID NO: 142404 - DNA, 122 bp, Homo sapiens
cctgtcccctatcgatcctgtcccgccaggtggaggacctggaacgcgtggagggcataacggggaaacagatggagtccttcctgaaggtgaagtcacggccctgcccctcctctgcctgt

SEQ ID NO: 142405 - DNA, 122 bp, Homo sapiens
ccttgtctgcatggccggaagtcttacatgtcttgggagtttgtggggagggggtgaaatcgggacttcttctagctgccacggtagggcctgggagcactgggagccaaaagggggctgga

SEQ ID NO: 142406 - DNA, 122 bp, Homo sapiens
gtggtgactcatacagctatattcagctaagataggatttctcaagcttggcactagattcggggctggataattgtttgttgttgcgtcctgtgcattgcaggctgttgagcagcatctct

SEQ ID NO: 142407 - DNA, 122 bp, Homo sapiens
ggtgaaactggaggagaagggtttggtgggtccacagtgagtcagagcctcaccctgaagcggctttaaggttggggagcttcagctgggacccttcgagcagccctagagagagagcttat

SEQ ID NO: 142408 - DNA, 122 bp, Homo sapiens
ggcctcaggtctttctcccaaatagcagagaactcaaatgaagagtcatttcattcccagcggtttgggcagctcatgggatgacaggcaactttttcctttttttaaaaaaagaggcccag

SEQ ID NO: 142409 - DNA, 122 bp, Homo sapiens
ctaactctggaagggaaggtgtttgggagagaggataattgaccgggagatgatgcagaacgactagggccctgagggctgttgcccacattctgctcgccggagcaccctggtgcactttc

SEQ ID NO: 142410 - DNA, 122 bp, Homo sapiens
cctcctgggcggctgcacaccagctcatggccgctctggggtctgtgagggcccggcgcccgttctccccagggagccgcgtgactctccttgatccggcctcccctcgagcgacaggcctc

SEQ ID NO: 142411 - DNA, 122 bp, Homo sapiens
gggtgtgataatagacagtagtggccactccacagaggcttgaggacaaatgcgttaatccgcagacagcgctgagaccagttcttggcgccgcgggtgcaccctggggtgtgtgctgtggc

SEQ ID NO: 142412 - DNA, 122 bp, Homo sapiens
ggattaggccttttacagcaagcgctgccagcagggaactggtggatgtactcttgaccacgctcggctggactctggggagcccaagacgggtaagactaggtccccggccccagcagctg

SEQ ID NO: 142413 - DNA, 122 bp, Homo sapiens
gagcaaatacaggcctatctaaaagcatacctcacagtaaagatggttaaaaaccaaaaccggaggaggcagagtactcttggtggggctggtagtggggggaatggatgattttccaaaag

SEQ ID NO: 142414 - DNA, 122 bp, Homo sapiens
tggcttctctagaggaggaagcctgcagccttaaggtaggtggctgccacgctttgcaatcggtgaagccccttccacatggcttgagaggttggggatgggaattttggtggaaggagact

SEQ ID NO: 142415 - DNA, 122 bp, Homo sapiens
ctacctgtcccacaaatgatggcatcccagggctccctccttagctcccttatagttccacgatttacattcttcatgataatcatctacttttttgttttaaatacgagcggtggttctct

SEQ ID NO: 142416 - DNA, 122 bp, Homo sapiens
ctctggactgaggctcgcgagcaggccctatgcggccccggcctgcgcaaaaccaagtaccgcagcttccgccggcggctgctcaagttcatccccggactcaaccgctccctggaggagga

SEQ ID NO: 142417 - DNA, 122 bp, Homo sapiens
tcctctttgaagcagttccaagtgccttccagaatgcctcattctcctggtgtctttccccgtctcctgaccaggcttgctccaactccttggctgcttttccttcatctccaaagtcctct

SEQ ID NO: 142418 - DNA, 122 bp, Homo sapiens
tgtcacctctcagcttgggtgctgcaacaggcaaagcagcagcctgggtttctccagccccgtcactcgaacccacgggctcatcaccgcacggtgcggccagacgccctttctcctacgtt

SEQ ID NO: 142419 - DNA, 122 bp, Homo sapiens
cggtctgccccgcttccgccaggcccgggccctccaatcactgcgcgggtctgggtccgccggccaatccctcacggtagggcgggccctgaggttggcttcgtaaacaattggagcctagg

SEQ ID NO: 142420 - DNA, 122 bp, Homo sapiens
tctcgcccctggcctgggtgagctagaggggagaagcaaggacatctaggtccctatcaccgcttgcctagacaacttcacaggaaggcccccgggaatctgagatggagcaggtgaaccct

SEQ ID NO: 142421 - DNA, 122 bp, Homo sapiens
tctaggtgctatttaaaattgttttttctggtccttttcttttgggttataagggttcttcgtaaccaagaagattacctatggttacgctgaatgcactctcccagggtgcataggcgctg

SEQ ID NO: 142422 - DNA, 122 bp, Homo sapiens
ggtgggtgctggtacgggtcccctcttcctggggagttgggggctttggctggggagtctcggggcggctgcgagatgttttcccctccttcctcatcaggttggtcccaagggttcatcca

SEQ ID NO: 142423 - DNA, 122 bp, Homo sapiens
catcgttgggccccggcaatagccaatgagacaggagccacgagaacacggaccaatcggcggcggcgacagtgtggaacgcggttgccaggaggcgggacgcggcggcgtgccagcctagc

SEQ ID NO: 142424 - DNA, 122 bp, Homo sapiens
ctgactcctgctgccttcatcacggtgctgttgttcataaaaggagtcaggcagctctgccgggtccctggctcagcactgtggaaacagcgacggggggaagacgttacagccccgagata

SEQ ID NO: 142425 - DNA, 122 bp, Homo sapiens
agccgagctgcgccggcggagactcaaatcctggtccctgcagcggaccgcgagaaggcccgggtccccccagagctcgttccaaccacaggtctaccccccaggacagtctttccgcacac

SEQ ID NO: 142426 - DNA, 122 bp, Homo sapiens
cctatggcatgaccctcttttgctgccctcctggcacttacattgtagaatttcagcatccgggctcacttggtcagtggcctactcacccaagcagaatgtaccacagaaaccttgcctgg

SEQ ID NO: 142427 - DNA, 122 bp, Homo sapiens
actggaacggtgaggggtgcctgaatccaggcttgaggttctttgcaaccaggggtgggccgagggactaaactggcgcggcctccccccaagccagcctggagcctcgggcggccgggtga

SEQ ID NO: 142428 - DNA, 122 bp, Homo sapiens
catttctatatcggtggtgaccttctgtaagctagactgaagtcccaagctccagacccacgtctccagctgcccactgttcaatgccctttggatgtcccatgcaaattggagctcactgt

SEQ ID NO: 142429 - DNA, 122 bp, Homo sapiens
ggcaggcgcgttctcggccgtcctgaaggggcaggatcttcagcctgtgggcggtgctctcgccgtgagcggggccaacgggccgtgttctccctgaaggggcggggtctgatcgctgcggg

SEQ ID NO: 142430 - DNA, 122 bp, Homo sapiens
tgacgggcgcagcaccctaggcccagtgtctggctccagccccgcatccggcgccggccccgcatccagctctggccctgcgacaatagagtccggaagtgcaggcaaagcggctcccggga

SEQ ID NO: 142431 - DNA, 122 bp, Homo sapiens
ttttaagtagagacaggctttcaccatattggccaggctggtctcgaactcctgagccaccgcacctgccccaaaggcatgaatttcttaccagttcgttattatgctaacagaaaggcatg

SEQ ID NO: 142432 - DNA, 122 bp, Homo sapiens
gagatattttacctattcctgtgataacagtatctcagttttcctttgtggaaccacccacgtctcacgctccattcatgcagttccatgaggctgacctcacccatgggctccaggagtgg

SEQ ID NO: 142433 - DNA, 122 bp, Homo sapiens
cccccgccgccgtcctgcctacgctaggaaaccggaccctccctcccggctccggtttcccgaaaactcctgacttgcagatgctaagaatggcttcctagaccctgtccctcccctccctg

SEQ ID NO: 142434 - DNA, 122 bp, Homo sapiens
gaggcgccagattgtgtgggcggcatcgcctggggacagtgggatggggcttccacccggcggagggcagaagcgtcttcttggctggctagagaagctccgccggagtggcctcctcccct

SEQ ID NO: 142435 - DNA, 122 bp, Homo sapiens
cgttcctgcagccccctgggcagaccagctttgtgtgttccagggaaggccctctgacagcgccgtctcccccaggaccccacccctgctggcccctggcctggccctgaccagcttgtcgg

SEQ ID NO: 142436 - DNA, 122 bp, Homo sapiens
atttagcatcatctctcttctttttcctgaatcatttgggagctaactgcatatttaatacgtcactgcccccttaatgctgcatttggtataatactgccatgtaatccacagattccttt

SEQ ID NO: 142437 - DNA, 122 bp, Homo sapiens
tctcaaaacttcccagtcggaggctggcgggaacccgagaggcgtgtctcgccagccacgcggaggggcgtggcctcattggcccgccccaccaactccagccaaactctaaaccccaggcg

SEQ ID NO: 142438 - DNA, 122 bp, Homo sapiens
tctaccccaaaacaccctggcgcatcagccacaatttctggataaactgcagagtcctctcggcaaccattctgcactccaacaaccactagtgtaaaacccagcgtgtccccttttacaaa

SEQ ID NO: 142439 - DNA, 122 bp, Homo sapiens
cttccctggcggtcccggctcctttaagccccaccaagtggggagccgagctgggcgcgccgcttcccactcgcgggccccacccgccccaacccgccaggcgccgacccgtcctggcccgg

SEQ ID NO: 142440 - DNA, 122 bp, Homo sapiens
ctcagatcttgccactgggaacctttcagcgccagcgacatcaaagaggggcggcggcggcgggggcggccggcggatgcttctcttaaagggccacgccacttttaattcaaagcagatcc

SEQ ID NO: 142441 - DNA, 122 bp, Homo sapiens
tggtgcatccagccacattggtggaccttccctttgcttgtcccgctgtgtcattggccgcggtgggtcagggccctggatgctgccgcccctcactcacccctccactctgttgcagaacc

SEQ ID NO: 142442 - DNA, 122 bp, Homo sapiens
agctcgcgcctcaggcgacggcagccaacgggttgccggctggaggccccgccgacgccccgccccttgcgtgcccacccgcgccccgcagccccgcccccagcgccgaccctaagtttcgg

SEQ ID NO: 142443 - DNA, 122 bp, Homo sapiens
gcaagagattatgtgccattctgagtttgatgatcgaatccggggcaacggtatggagcccgacagcttagacgaggaggaaagccctcgatggggaagcctgcacgagatggaagaggaag

SEQ ID NO: 142444 - DNA, 122 bp, Homo sapiens
tataaatcaaggaaaatgacttaaaagcctacaagtaatctgaaaaatgttttcttctcccgtgagtatgctcagtggaaaatctctgtgctgttctttatccccatataacaacagaacag

SEQ ID NO: 142445 - DNA, 122 bp, Homo sapiens
aaataaacaaatgagatggtttgggcggggtcataactgcctacatggttagcgcccattcgatacatattttcttttttgcaccatagtttggttttatccccaaaatatcttcttatgcc

SEQ ID NO: 142446 - DNA, 122 bp, Homo sapiens
acccaactcctccagccagaagcacagccgtggctccaaagaggcatccaaagaggacgccgactgcccctttgacagctgcgggaaggcagggctcagggccaggcagtggctcaacgaca

SEQ ID NO: 142447 - DNA, 122 bp, Homo sapiens
cttgatggtgtagcagggtaaaaacctaattggaattgattcaagagaaaaggagagacacgtagagatagcaaatatatacaacttataaacagttttgcacttaaaggaagaaataggac

SEQ ID NO: 142448 - DNA, 122 bp, Homo sapiens
caccccgcccagggagctccgccctagcccgcagctcttccgccttaggcagccgctaggcgggagggacaatcccccaccaccaaccactgccaccccgaggggactaggggctgaggccc

SEQ ID NO: 142449 - DNA, 122 bp, Homo sapiens
ggcaaaacagctgtggcctcccccaggcagggaaagtggtgggtgtagggctggacttgccggctgagcttgcaggacaatctggttattcatctgcttgaagtcagggcaactctttgagt

SEQ ID NO: 142450 - DNA, 122 bp, Homo sapiens
gggcggagcctttggggtttatgggcggaattgcacagggtttggcggggatctctgctccgccttggcactactcggctccgctcgcctccgcgcggctccctgggctttcactcggctct

SEQ ID NO: 142451 - DNA, 122 bp, Homo sapiens
cccgaggccaggaccgaggaaggcgaccgggcggacccccaaccactcccgctgtctgcacgcgcagcagcagcgcccagctcaccccgccattggtgttccccgcgcctgcagcgcgccgc

SEQ ID NO: 142452 - DNA, 122 bp, Homo sapiens
ggtcttgtttcccggtccttgtagctaagaatgtcgtggaaggataaaatcttgttaattcgtgatgtcacaattcaagtgtgcttcctgtcacttatgtgtagtttaaaatgttctttaat

SEQ ID NO: 142453 - DNA, 122 bp, Homo sapiens
ttaagtcaccgaaagctacagggcagggtcacaaacactctcccgccttctctgcagaaccgtgcggctgacaggagagcgttgcgcagaaaattcgaggccgggcgctggaggagtctccg

SEQ ID NO: 142454 - DNA, 122 bp, Homo sapiens
gccaaaccaccagcagcagcggcagcaaggtttacaatcctaaaccatgcaggcttccggcgtaatctctcctgtacttcgccaccactacagcctcaccgctggacagctcggccgcacac

SEQ ID NO: 142455 - DNA, 122 bp, Homo sapiens
ctcaggtgacccatccgcctcggcctcccaaagtgctgggattacaggtgtgagccactgcgcgcggcctcctggcctcttattaatggtggcttttgaagtgcaaaaattttaaattttga

SEQ ID NO: 142456 - DNA, 122 bp, Homo sapiens
ctgactgaagtgacaaaaaaactggatccgtatgagaggcactccctgcagaggaaccagcgcaaaagcactgaggcagagcactttgtggtcagtgtacagggaggcccagggcaaggata

SEQ ID NO: 142457 - DNA, 122 bp, Homo sapiens
ctgtctggttcctgactgtagaggagagacagtgattttgctttttgacactgagcgatacgtctgcttctatccttagtgatttgatgtaattcagatgcattagatgcagggtaatattt

SEQ ID NO: 142458 - DNA, 122 bp, Homo sapiens
tataaagttacaaggaagcctgccttgccactgagagacaacactacttaaagaacaattcggatcactcattcaggaagaaacagttaagatattaacacaatttatcattctgaaagaac

SEQ ID NO: 142459 - DNA, 122 bp, Homo sapiens
gggccgtggacgagcctgtgctttcactggggtccacggtgctggctgcacccaggcctgcgcctgggcgcggggactgtggctgccactgaagacccatggtgtgagcggcagcagacagg

SEQ ID NO: 142460 - DNA, 122 bp, Homo sapiens
cctttttcttatactgtatctttttttttttttttgccagatgccaaatgcaaaaaggagcggaagaagaaaaagaaagtgaccaacataatctcatttgatgatgaggaagatgagcagaa

SEQ ID NO: 142461 - DNA, 122 bp, Homo sapiens
caccacccgcaccccacccccacccaccacacccatgcctacgccactcctgggtgacagcgagccagggcccgggactctagtcccagctctgctgcttacttgtgtgacttcagcctctc

SEQ ID NO: 142462 - DNA, 122 bp, Homo sapiens
agccagttcctaccgaacatgttgccgcattttcttccctccaccccgcccccctcttttcgtgattaagctgacatcacagaaacctgggcagacgtcgcagccaatgggagcccgagtta

SEQ ID NO: 142463 - DNA, 122 bp, Homo sapiens
cactcccagcatccagcacccccacctctcagctgggttaggaggcaggcggaggcttttcgcgggggctgtgcctggtgggcggttttcccagagcagggagcaaacaggactgagttggc

SEQ ID NO: 142464 - DNA, 122 bp, Homo sapiens
gagccggctctgggcctgagcgcagactgaagggaaggggggcctcgtggggggcgcaggcgcctgaccagctcctccagctcggggctcaagccccaggccctccagctgtctacttggaa

SEQ ID NO: 142465 - DNA, 122 bp, Homo sapiens
acccccagccctaccatgccaaattctgtgaactcttagtgctatcttttaaaatctcatcgctttcacctaccactgtcttgaattctggtttgaatcctcaacacaaggggcggctgaag

SEQ ID NO: 142466 - DNA, 122 bp, Homo sapiens
catccccagtgtcgcgtttcctgcggaccctcccttccaggccagccaccaatcgtcaggcggcaacctgagaagtagaccaaagcatcctcccaggtggggctgagatgtccagctgtcct

SEQ ID NO: 142467 - DNA, 122 bp, Homo sapiens
agccgaaccggaaccactagcgcggccccgccctcgtcccggagtcgcagagtaccctggcgggcctaataggacaaactttgggcaggcagcgttaaactgacaccatcacttccgggtta

SEQ ID NO: 142468 - DNA, 122 bp, Homo sapiens
aacttgttaagaaaatccgagcccaaatcctgtggcagttagggagggttgagtactagtcgcgaacgacttggtaagcgtgggaaagcaaaaatggaacgtgtctttttgcatgaaatgcc

SEQ ID NO: 142469 - DNA, 122 bp, Homo sapiens
cttccaggaagcagggcgaggctcaagcacccagaaaaacctgtggctgccgaggtcccccgccagcagcgggcagcggagcgcaggggcggggctggggactggcgaactccgcctctctg

SEQ ID NO: 142470 - DNA, 122 bp, Homo sapiens
gccgcagccagcctggccggggtcgccgatggggtcgccgatgggggtcgccatgggggtcgccacgggggccccgccggccactcacacgtaggcgtggtagatgaacgcccagccgcgcg

SEQ ID NO: 142471 - DNA, 122 bp, Homo sapiens
tccaaagcagtatatatgaagtacaacgtgtcagtgaacttcttctcatatacatcagggcgccgtggctcacgtctgtaatcccagcactttgggaggccaaggcaggtggatcaagaggt

SEQ ID NO: 142472 - DNA, 122 bp, Homo sapiens
ccttgggaaaattacctaacctctatctgcaaaatggaggtaagagtacctactttaaaacgttgttgtgacatttaataagtcactcagtaggataagccattattaggaatgcatatttt

SEQ ID NO: 142473 - DNA, 122 bp, Homo sapiens
cagaactcattgaaattcccagtgcacaggcccaggctggtggcggcttccctctgtgaccgatccccaggtgcccactgggctgtgccggctggctggcccctcctcacgcttctccagtg

SEQ ID NO: 142474 - DNA, 122 bp, Homo sapiens
caaggacccctggcttccacattgtctgagtcacgttccagttggaaaggccatcttgggcgagggacgtgttgcccgactggtctaaataaggaaagaaagtggagtaccaaagaatcaag

SEQ ID NO: 142475 - DNA, 122 bp, Homo sapiens
ccggaggcccgctctccccttggtccgctctttagttcattcccagcactccctctttagcgggtcaagttgccgcagaaaccgcccgtagtcttcctgtttgatacaagggtttcagcggc

SEQ ID NO: 142476 - DNA, 122 bp, Homo sapiens
actccagagtgaccctgccaggccttctggtgagaaacacgccccttgctatggtgaggccggccacagcctgacactgcctctgctggggatgagagcatggggaagcaacagcattccag

SEQ ID NO: 142477 - DNA, 122 bp, Homo sapiens
tgtttatcgggcatcggcgctgttgaaccatggatttccccaaacattaagagagtcatacggctgtgctaggacaaattgctgctctgaattccaggccaccaaatgggcggccttcattc

SEQ ID NO: 142478 - DNA, 122 bp, Homo sapiens
gtgttactttgttgcccaagctggtgttgaactcctggcttcaattgatcctgccacttccgcctcccaaagtactgggcctacaggtacacaccactgcgcctggtcatctgtttctttca

SEQ ID NO: 142479 - DNA, 122 bp, Homo sapiens
tcattatccacaaggggaggcaagacagtgggctggagggagaaaaataggcctttcccacgggcatgattccagcagggtttgcatttttacatcagtagatctcagggactttcattttc

SEQ ID NO: 142480 - DNA, 122 bp, Homo sapiens
ctgccgctttgcacaccccgcagacagcaccatgatcgacacaagtgacaacaccgtaaccgtttgtatggattacataaaggggcgttgcatgagggagaaatgcaaatattttcaccctc

SEQ ID NO: 142481 - DNA, 122 bp, Homo sapiens
agtgttaccctttttcatgctttttctaccttgtctaaattctgctttgtgatatcttctcgttttattttacatcttctttccctcattaatagatgtgcttatttgattgcagaagaaaa

SEQ ID NO: 142482 - DNA, 122 bp, Homo sapiens
ctggaaagggaggcaacagccctcttggcaggcgggcaaagtaagtgtccaggctaagtccgggataaaggctccgcggctccccagaccccactgcaccccgagctcccgggtcccaggtc

SEQ ID NO: 142483 - DNA, 122 bp, Homo sapiens
tctgtcaaacattggaaggaaatttcagttcagagatgtctgaagtggggtaagttatatcgtagaactcatccacagttaaaattaaggccccaggagttgagccatttgcactgacatgg

SEQ ID NO: 142484 - DNA, 122 bp, Homo sapiens
aatagaatcttctgggagattggttgtgtggtatgagagaaagtgagaattcaagaatgacgcttgggttttagcctaggcagttagacagaaggagttgcccttgagtgggttgaggaagc

SEQ ID NO: 142485 - DNA, 122 bp, Homo sapiens
ttttcctccacttcggccttaagatttcaagtctctccgaattgaatgattgttaatttccgtgggaacagtgccgctttctttaaaagactaggcattggaaagccaataacctagggaca

SEQ ID NO: 142486 - DNA, 122 bp, Homo sapiens
ctggctgaaggcgacatcgccattttaggtacgggcaaattctggacgctccaaaatccacgccaagccctcggcaggccacaccccctgcaccgggcctcggtcactcacccggaccctca

SEQ ID NO: 142487 - DNA, 122 bp, Homo sapiens
gtgtgatgaggtctcccaggctggctgcaatgggcgtggcaatgttgtctgggttgaccccgagctttcgagcaccaatcactatacagaccatcagcacccctgcagagagagagaggaga

SEQ ID NO: 142488 - DNA, 122 bp, Homo sapiens
tctaagctgactgggtgcagacgaagggccgcttcctgcctggccctctgcatgggtggtcgggcttaaaaatgaaatatccaggctgacaaatgcttttacaaaggccagattataaactg

SEQ ID NO: 142489 - DNA, 122 bp, Homo sapiens
aggcaaaacaaggctggagtcaaacaaaggcgccgttgcatcgcagattgcaacctgaagcggctcccggctccctggagagtaacccggagagacggacaggggtggcagccaggaggaga

SEQ ID NO: 142490 - DNA, 122 bp, Homo sapiens
attttggtggcccatatagggaaagtgctgcatgctctgggtgaatctgtgcctgacagccggcttttgctaccgggcaaggttttgttggggtcacctgtgagcaccagctgctcatggct

SEQ ID NO: 142491 - DNA, 122 bp, Homo sapiens
ctgcgcgggtggggggctgagcccctgtggcttcaggtttaaaggcgcgagcgccacccacgcaggcacaagggctcctagtcgttttatttttagcgtaaggttttcctctttaacaagga

SEQ ID NO: 142492 - DNA, 122 bp, Homo sapiens
attaaaccccaaacatgcatgtgtttcggttcctagaatctggtcaagctttcaaccacccgagggcctttgtactcttggttccatggctaccacccctcacttccccctgcacttcttca

SEQ ID NO: 142493 - DNA, 122 bp, Homo sapiens
cagtagaaaagccagaaacagacctatttgtctatgggattgttgcaaagttggtgttgccgacattggtgaaaagatgattgttatgggctgaatgtctgtgtcttctaaaccaaaaaata

SEQ ID NO: 142494 - DNA, 122 bp, Homo sapiens
agtgggtgttttgctatatgacagaattagaaggtaaatcctgggccgagatgtgaaggacgagcagagctttgttgccctctcccagcataaggaggaatacacacagagatttggagtat

SEQ ID NO: 142495 - DNA, 122 bp, Homo sapiens
tggcctcaagggtgaggtcctttgccaggcaggctgaggccagctcaggggcaaccacaccgtggttggtcctggagggggccccaccccaacccccgctcagcctctgcccatgccagggc

SEQ ID NO: 142496 - DNA, 122 bp, Homo sapiens
ctgagaggacacagttccttctgaaagcagcccatgtgttccatatgagaaattcaaattcgtctcattaatagaacttggactcatttttctgtcactaatatccttttcatttcaacaga

SEQ ID NO: 142497 - DNA, 122 bp, Homo sapiens
tgacgcagagagacctgcaggtaagtgactggctgggagtgcgctgaagacctgggcagacgcggggtgatcatttacctgttcagttactggggggcgggcaaaggggaaacttacgatga

SEQ ID NO: 142498 - DNA, 122 bp, Homo sapiens
ctattctccaggagaatgtttgatttataggtagctagaaatgacccgggacagaggagtcgtgagacggtggccaaagcatctcataaacttggaactaagggagcgaagccagctgctga

SEQ ID NO: 142499 - DNA, 122 bp, Homo sapiens
agcagcggtagtcgggggaccactggctgccgtaggagttggagaaggtcacgctgctgccggaagtgatggcaccgtcctcatagtcatcctggtcgtagtcgtagtcgccgtctggggag

SEQ ID NO: 142500 - DNA, 122 bp, Homo sapiens
gttaacccactaggcctcgaattccagccagtagctaaaattattttcctatgagaaaaacgctcttgaagcgttagaggtttcttatctgcagggtctctgggaaggtttccaaatttgtt

SEQ ID NO: 142501 - DNA, 122 bp, Homo sapiens
ttccagggtgggggctgtttgccaggtacgtgggggtggggcacgcttcccagtgttctgcgtctgtcctcacaatggccctcaaggtcaggcagcactgaccgcattctaccattgaggaa

SEQ ID NO: 142502 - DNA, 122 bp, Homo sapiens
cagtggtctgaagttcagggggagaagtcaaggtctgagctatcatttttttggtgtcatcggtatacaaatatagagattgcatgaaaccatcaaagactatatagagaaaagaatttgta

SEQ ID NO: 142503 - DNA, 122 bp, Homo sapiens
tcatctgaaggtaagtaaattttctctggcgatcaaaagcctggtcggcaacaaagaccgcgcccgctttttccaccgtcctggtgtggcgagttgcggaatttcaataactgtgacaaggg

SEQ ID NO: 142504 - DNA, 122 bp, Homo sapiens
tcccaagaaggcgatgccaggagcagtcgcgccccctgccctctgtgagcccgcaggtttcgggcaagtttggctcagtccttgtcgatgctccaggctcggcttccctggcctccccttcc

SEQ ID NO: 142505 - DNA, 122 bp, Homo sapiens
cgctacgcgaaggggaggagctggtcatggacgaggaggcctatgtgctctaccaccgagcgcagactggtagggctgagtccggactccagggtcctgaggtggctgatcccgagccttta

SEQ ID NO: 142506 - DNA, 122 bp, Homo sapiens
tgacagtcaggggcacggagaatggtgcccaggccaagggcagggcttgggccaagtgtgcgcagcgtggggtgtgtgtgctccagcggctcctgctgcggagggcggcatgaggcttgttt

SEQ ID NO: 142507 - DNA, 122 bp, Homo sapiens
ccttgatccccgtcccccacaccaccattcaatacatcattcatgattcaacacatgtatcgagcacccactaggcgccaacacccaacaccactgctccatgcagcttcttactttccaag

SEQ ID NO: 142508 - DNA, 122 bp, Homo sapiens
gggcagcatcccgggccagggcccacgtctcccgcagccgggcctggaggtcctcgcgggcgcggtcctgctccagcaggcagctctccaccacggcgcgcagctcctgctcctgacacacc

SEQ ID NO: 142509 - DNA, 122 bp, Homo sapiens
tctattatcttagcatttttcaagaatacaacccattgttattatctatagtcaccatgtcgtgcaatagatttcatgaatgtttcctcctatctaactgaaattttgtatcctttgaccaa

SEQ ID NO: 142510 - DNA, 122 bp, Homo sapiens
cacggctccagcgtgaagagtggttcattgtgaggttctccggctggctgcatgccgttccgctcaccaccttccctcctgagacgttgcctggtgttgcctacctgcccagggcccagaca

SEQ ID NO: 142511 - DNA, 122 bp, Homo sapiens
acgccgccatcgctcaaaggtgctgctgtccaacctggacggtgacctctgccctttgcccgaccccgtaaccagagacgccactcctgccctccctaacgacgcgggcctttcagacgcct

SEQ ID NO: 142512 - DNA, 122 bp, Homo sapiens
cgcacccaccatggcctcccgcagcgcgggcaccctactgaccgagttcaatgccgcctacgtgccccctggactcatgcccgggtaaggccgagggagcgcctcctcccctcccccttcca

SEQ ID NO: 142513 - DNA, 122 bp, Homo sapiens
cctccccggtgcatgttcggccctcccagtgcttgttccctgcccctaaccgtgcatgttcggccccccgcccccatgcatatttgcctggtttcttctaggggctcaactgcagcttcgtc

SEQ ID NO: 142514 - DNA, 122 bp, Homo sapiens
ggtggggaggagagggagggaaggtgaggggctgtcagagttgactccacatgattgcagcggaaatactaaattatgagggtcccaaaccaactgaaggagaagcctgttaatcaaaatgg

SEQ ID NO: 142515 - DNA, 122 bp, Homo sapiens
cctgtctcataagtgggtattaaatggggcgtgagactaaccatgtgctggcacgtaggacgtgctctataaataagaatgttgttggtattattagtgagtcctattccttcccgtattta

SEQ ID NO: 142516 - DNA, 122 bp, Homo sapiens
ctccccagggacgctgcgcgcggagccctgtcagagcagcgcgtcagtgacagcggcagccgagccaggaagttatcaggcagcctcgaccaccaccagatttgactccgcgagctcttttg

SEQ ID NO: 142517 - DNA, 122 bp, Homo sapiens
cttctcagcattttcaaagcactttattgagttcctgcgccatcctggcgcggagctggccgcactgggggaatgggacacaatcttgccttccatgccccagccactctctcactgcggaa

SEQ ID NO: 142518 - DNA, 122 bp, Homo sapiens
tcgttagaggacacagtgacaggtcttgcccgcaccccagctctggaaacagccagcgaacgtacatagccgtgggaggctgtaataggtcccgttaattatgctgccatttgaaggaacgt

SEQ ID NO: 142519 - DNA, 122 bp, Homo sapiens
gcagtggtttgcccaatgacctcaattctctgaaagagctaagaagaggtgttaatttttcggtttgctcagctttctacttgttgctagaatggagcgccaatagtgcctcctatagtgac

SEQ ID NO: 142520 - DNA, 122 bp, Homo sapiens
accatccttatccttgtactggaccacgaaggagtcgaattcgccctcagggaccgtccacgagaggcccacggagtcaggggtcgcatctgtcacagtcagctcccccaggcggggagacg

SEQ ID NO: 142521 - DNA, 122 bp, Homo sapiens
gcgggaggtgtgtggtgcaggcccacaaatacggacgcgtggcggaacccacacctagggcgctggctccgccccgcaagccgctcgccgtgaaggggcggggcccagagtgggtgggtccg

SEQ ID NO: 142522 - DNA, 122 bp, Homo sapiens
ccccaacaaattctattcactagagccaaggtgggctctagagtcctcagcagtaagaaccgcatcttcccaactagcctggcttcctggaggacttcaacagctggcttcctttttctgta

SEQ ID NO: 142523 - DNA, 122 bp, Homo sapiens
ggccaaggctgccaggaggcgctcccgcaccccaggtgcgctcctccaaggaggcccacccgcctccgctggcccagttttcgctgttttctcggcgcaccacggcgcctgcagttagtagg

SEQ ID NO: 142524 - DNA, 122 bp, Homo sapiens
cttgggtgccagagatatctgtacttagccatgatagactaaagacactcctaactcctgcgctagagtatttataatgccatgagacatgtcagatcatgaataccttggtttctgcttaa

SEQ ID NO: 142525 - DNA, 122 bp, Homo sapiens
ctgcggcggtggcggaagtggagtggggaagagggggtggttgttagtgtttggcgccggcggagggagtcattcctgcagctgcacttccggtcggcattttgttctgagagggagagacg

SEQ ID NO: 142526 - DNA, 122 bp, Homo sapiens
caccataatccagttttagaatatttccatcatccccgtgagatctcttgtgctttcttacgagttaatccctttttccacctccagccttagacaaccacaaatctactttttgtctctat

SEQ ID NO: 142527 - DNA, 122 bp, Homo sapiens
gcgcactggcacacgccggggcgcgcggcgcggggtgacggagccgggggctgcgagggccgggccgctgggctcctgcagagttttgatatgaaagtaattattttccggtggctgctgcg

SEQ ID NO: 142528 - DNA, 122 bp, Homo sapiens
gagtaaacttaggctgctctaataaccaagaaaatatccaaccagctgaatgcatcacatcgtaacttagaaagttaggtacagtacggtcaaaaaagggtgaacataacatttaaaccctg

SEQ ID NO: 142529 - DNA, 122 bp, Homo sapiens
gaggagcgcctcttccccgccgccttcccatctaggaagtgaggagcgtctctgcccggccgcccatcgtctgagatgtggggagcacctctgacccgccgccctgtctgggatgtgaggag

SEQ ID NO: 142530 - DNA, 122 bp, Homo sapiens
attcatagggaaaaaggatatactaaaaaccaatggcaccatcaagtttatcccaaaccacgttaacacatagacaaaacaatacatgggccatatgttttgccaaatgcatctaatagatt

SEQ ID NO: 142531 - DNA, 122 bp, Homo sapiens
cccccagcccctctcggccccctcaggccgggctgataggagggagggggcgcacctggccggaccccaagcctcccgcacctggactcaccttccgcgcccgcggccagcgccagggcccc

SEQ ID NO: 142532 - DNA, 122 bp, Homo sapiens
cgccgggacctttgctcggtccgggcgccccagagccgcgggactggccgccggaggctgcgggaggggcccgggccagacctcccagaagccccagagagagccgcttcccctccttcgtg

SEQ ID NO: 142533 - DNA, 122 bp, Homo sapiens
aaagccgagggggaggagcggcgcggccgtgagcgagggcagccaagtttggctacagcacgcgcggcttcgctcctgcctctggggaggagagaggggacagtcccctcccgagctaggct

SEQ ID NO: 142534 - DNA, 122 bp, Homo sapiens
gacccagcagctctgtctgaaatcataatggcggaaccaaggcccctctacgtccaggtccgttgggaggcggggcatggagttccactgcaggaatctccaggaaccctgaggtcctccct

SEQ ID NO: 142535 - DNA, 122 bp, Homo sapiens
tatgtagcaagtccccatgtcttcactgggtcagaaccagtaaaatttccctgttcccttcgcggctcctgacctccctctgagccacggtcggagtcggtgggagggagggagggagggct

SEQ ID NO: 142536 - DNA, 122 bp, Homo sapiens
taaaatcgccttgtagcgccagtcttgccaagctccacactttaattgggtaaatgactgcgtgaacggatgctggctacgccaaggccctgggaataaagaaatgataaagaagcagtccc

SEQ ID NO: 142537 - DNA, 122 bp, Homo sapiens
atctcctctaccacaactttctgttctcaccgtgctctcaccacagcaccgtcatccccacggagggttttcgagcaccaaaagagccacccatgcaaacaaactcccctcccagagataaa

SEQ ID NO: 142538 - DNA, 122 bp, Homo sapiens
gtattcctcatctttaatgaagtggcatgagggagggcagcaaaagcagtggaactggttcgtcccagcagtggtggctgatgagtttttcaatctgttcctgttttcagcattcccagagt

SEQ ID NO: 142539 - DNA, 122 bp, Homo sapiens
aaggcgacggaatgtgctgccggctgagagggggaggcagcctcgatctgagggccccggcgctgcggccacgcccatcgcctccagcccggctcgcccattggctaaccaggctccggtgc

SEQ ID NO: 142540 - DNA, 122 bp, Homo sapiens
ggatctcgggagagccgcgcaaactcgcggcggacgcagccagcacccgcagccagcacccgcacactcccacccataccccggcagcccgccaagactctctggcccgcacctctatggta

SEQ ID NO: 142541 - DNA, 122 bp, Homo sapiens
ttttgtctctggaatgaattttcttccttccgattccattccttcttcctgtacctaagacggaaatgcaggtgcagtgaacaaacacccaggtagtgcagaggtaagatagatacggtttc

SEQ ID NO: 142542 - DNA, 122 bp, Homo sapiens
ccgaggcgcggtacaaaggcatggtggactgcctggtgcggattcctcgcgagcagggtgcgtcaaggcaggccgccccgacagcctctcccggcgccctcgtcagcttcccagagaagagg

SEQ ID NO: 142543 - DNA, 122 bp, Homo sapiens
agctcatgaggcgaagagcagtatgtatggaattgtattagcatgaggcacacactgactcgggagaaaaagggatgcttagctggtgaaaaccatcacatccccgtatagaaggctttttg

SEQ ID NO: 142544 - DNA, 122 bp, Homo sapiens
aacaaacttccccgagcaggaagcccgtgccccagcctcctctcggcaaggaccagcccgcggaacaccccggcccctcggcgcctgccctgtccttctggctacgggtccaggagggctgg

SEQ ID NO: 142545 - DNA, 122 bp, Homo sapiens
gcacagagcctcacgcaatgtgcaggcaggtggtgctctcgctccaccacggcacctctgcggtctctgcagccgtttgcatttcctgaaaccggatcttagtgtcagagccgcccccagcc

SEQ ID NO: 142546 - DNA, 122 bp, Homo sapiens
ccacccgccttgtcctccaggatcggagtcaccctgaggtgcgtgtgggctgagggcctgcggctggcaccaggtggggagggtcctggtctcacagcaccccatgtcctgtgaccccccgc

SEQ ID NO: 142547 - DNA, 122 bp, Homo sapiens
acaggtacggggcctccgcctctggcaccggcagggctgccttagtctcccctccggacacgtgggtctgtggtcattctctgtggctgaggccgagtctcacggtgtctccctttcaaact

SEQ ID NO: 142548 - DNA, 122 bp, Homo sapiens
gtttaactggcgcctcctgacgctggttcagtttgctcatcattggtgcgcgctgtgtcccgtgagcctgcgctccgccctcgggcccttccgggccgcttgcttttcatcttccctgtggg

SEQ ID NO: 142549 - DNA, 122 bp, Homo sapiens
cgcggatcagtagaatgaggcgcaactgttgaggaccaaagctgcaacttcggatccctgcgctgggttgtctcagtgcctcacatcagcgccaggtcctgccctgacccattacttagcag

SEQ ID NO: 142550 - DNA, 122 bp, Homo sapiens
cattccctggctaattgctgcaatagagaagtgaaagcctaatcttggtaaagatcttgacgtcattgagaaagagggctttactttggccaggattgcagtgaatagaaaagcaaaactcg

SEQ ID NO: 142551 - DNA, 122 bp, Homo sapiens
cctcatcaaattcatgggtgaactggcccgaggcgccgtaagactggtagaaggcgggtccgtaggagcccatgtggtcagctgtgtttggcgagttcagggtcaaggagagagaaaaaaat

SEQ ID NO: 142552 - DNA, 122 bp, Homo sapiens
ggccggcccttccctgacagccatcccttcccgagcctattgccatccctgtgccctcttcggtcaaacgtctgttgcggctcttgccaattttctaactggaatgtttgttttcttgcggt

SEQ ID NO: 142553 - DNA, 122 bp, Homo sapiens
taagcatttcctggtgggtggaatacgccatgaactaggtgcggcctcaagctggttactcgccctgcctactccctctcgtgtcctcccagtacccccttagacccaccagctctgaggga

SEQ ID NO: 142554 - DNA, 122 bp, Homo sapiens
aatattatagtatgcataagcacattacagttacaagttcaaaaacatttttatttgtgccgatgtattatcagaaacagagaccggtgccacagtggttaagtctgacggacctatggtca

SEQ ID NO: 142555 - DNA, 122 bp, Homo sapiens
cggccctaggcctcggcccgcccgaggcggagcccgggaggtcggggcggggtcccgggccggtcacccacctgggttgccagtcattccagctccgcggatacttggtgccgccgccgccg

SEQ ID NO: 142556 - DNA, 122 bp, Homo sapiens
cgcaggagccgagcatggagtaccaggtatcaggcgggccagcgggccagcgggcctgggcgcgacgacacgtgggcctgcgctgagccgcagaacatccgggctccgctagccgagagggt

SEQ ID NO: 142557 - DNA, 122 bp, Homo sapiens
ctccagagcaggtgcctctgagccctggcccagcaggtacagacgctgaagcccaatagccggtcttccgggaggtggtctggggaaggggatccaggtggagagtccccctcagtgcctgc

SEQ ID NO: 142558 - DNA, 122 bp, Homo sapiens
ttccaggtcccagaccctgaagacttaaaggacagtatgggaagtggccttttagcatcacggagcagagagctcgccaggctggaggaaggcagcagcgaaagggtcggggccgggaggaa

SEQ ID NO: 142559 - DNA, 122 bp, Homo sapiens
tgtagcttagatgtcggaggggttggctgcgggcgtggataggcagggaacgaacagactcgctgccatcccatgggtgccaggggcttaacttcatttaacttcattgaatcctaacgcca

SEQ ID NO: 142560 - DNA, 122 bp, Homo sapiens
aaaggggttatgtacgcctagcctgccttttaatgataaggtgttattatacaaatgaaacgccagtgtgtgcacagctataccagatgctttaagaaaacacattctagagtcagggtgct

SEQ ID NO: 142561 - DNA, 122 bp, Homo sapiens
aaaacagttccccatctctcttcacctccaattaccaatctttacaaggcagtcagtttccgttcttttagttatttgttctgatatttgtcttcatttttctaagtcagttattctgcttt

SEQ ID NO: 142562 - DNA, 122 bp, Homo sapiens
ggaattctaatgtaaaagatccacacaccaaagatccacgcactaaactttgagagacaccgtcttagagggtgaaaaaactgaggccttccactatggctaccttcatctggaatactgag

SEQ ID NO: 142563 - DNA, 122 bp, Homo sapiens
cacacggacacagaacacggcggcatccagagtgttccgcaggtccgctctatcgcaggccgggcacgctttgctcagaggcccacactgcagaagtccagtctcagcagactgtcaccacc

SEQ ID NO: 142564 - DNA, 122 bp, Homo sapiens
aatagaatagaaaatagcagagtgtacaatatatagaaaggattgagtattgttttgtgacgcttttgtgtcagttttctctgtatgtgtgtggaaatgtgcttagtggattgtgatgcaca

SEQ ID NO: 142565 - DNA, 122 bp, Homo sapiens
catctgcgaaggagccggctttggccaaggtgccttcctggacgggtgtggttcccagagcgtcgcggcccggggttgactggctcggaatcccggggccttgggcgcctcgcgtctcctgg

SEQ ID NO: 142566 - DNA, 122 bp, Homo sapiens
cagagagagagaggtagggaaatttggtccatttgcagattcacggaagttcaaatgtggcgcatagctgcgcacagcttcccctcctccttgggtaccatgttgccaagacgggcggttag

SEQ ID NO: 142567 - DNA, 122 bp, Homo sapiens
ctgcagagcactgggtggggcatccctgggtctcaggcccctccctgggggccacagggtcggcttccggcagcgtctgcctcccctgcagagctacgagctgatcctccaagaggggacct

SEQ ID NO: 142568 - DNA, 122 bp, Homo sapiens
ggcttcttccactgctcctagaacttactgactggctgggaggtcctcacagccttctcacgtcccctggggcttccaggagccgtagagtttctgggcgaagcgtccgggacggaggcccc

SEQ ID NO: 142569 - DNA, 122 bp, Homo sapiens
ctggagctctcagccgccggcggctcttccggggcgaggcagagggcgcctcgggcttctcgctccagcaccatctcggggacagctcccgcgccgcaccgggtccctatcgggtcagcact

SEQ ID NO: 142570 - DNA, 122 bp, Homo sapiens
gcctcagcccggagccttggctggagagcggggcggtgcgagcgccggaagtgaacccgacgaggtcagtgacgtcacgccggcgcagttccggccgcgcagctctcgcggagaggggcgct

SEQ ID NO: 142571 - DNA, 122 bp, Homo sapiens
gaccccgagtgccgtagggctggggcagcgctccgcgctccggcccgcgaggaaggtccccgccagccctgctacccacttacacggacgcctcccgcggcggctgcagcgactgcgccggc

SEQ ID NO: 142572 - DNA, 122 bp, Homo sapiens
ccagaaaggctgatgtcttgcagttcctacagagaactggggcgtgggacgagagccacacgctaaggccccgtattccgaggtgggctcagggccatggccagggctgcgtattcagatgt

SEQ ID NO: 142573 - DNA, 122 bp, Homo sapiens
gtcacgacaacgtgagtgctccacagccaggggaggtgctgcagctgcagaggatgggcacgcggcactgacccctgccgagggggcacccaagcggcctcgtccttcccgcaacccaagga

SEQ ID NO: 142574 - DNA, 122 bp, Homo sapiens
agatggcagtcaccttcattggcaatagcacagccatccaggagctcttcaagcgcatctcggagcagttcactgccatgttccgccggaaggccttcctccactggtacacaggcgagggc

SEQ ID NO: 142575 - DNA, 122 bp, Homo sapiens
cgtcggccccgggcgggggtctcaccggacgggccggttggcggcgtcggggtcccgcgccgtcaccacgccgaccagggagcccacctgcgcgtcctcctgcacctccaggaggccggagg

SEQ ID NO: 142576 - DNA, 122 bp, Homo sapiens
ctgggcttcataattgatatcagttactcaatgagtgctttttcatttgttcttgttatccgtgataattgcgaagttcagcctctcggaattgggccggcctggtgcctccagcgccgggc

SEQ ID NO: 142577 - DNA, 122 bp, Homo sapiens
gcggccgggtcccctcatgcatatgcagcagattgtgatccttactccgtgagcgctgggcgggccgggttgtgttcatgttggtgaacccgcttcgttcttgcccgcgtggatggtccgtg

SEQ ID NO: 142578 - DNA, 122 bp, Homo sapiens
gtcaacttaccagctggaaactgggaccagtatcaatttcttactgtgacattcagccctcgtttcacctcttgacccctttcatgcctgcatcaaccagtagttctgttgggctcagagct

SEQ ID NO: 142579 - DNA, 122 bp, Homo sapiens
agtgttatattgaagaaacactgccatcagactccagcaatgtggttccaatgtcatcaacgcatctatcaatgtcaccttggccaatgaactccaagtccacttcttcatagtaactttaa

SEQ ID NO: 142580 - DNA, 122 bp, Homo sapiens
ctttgaaactcttcgggagcgcccccctcccacacgcctccttcaggctccacccagtgccgggcatttgattctgctgcttcgtgcacaccagaccggcactgggcaccgggccgtcatct

SEQ ID NO: 142581 - DNA, 122 bp, Homo sapiens
gggcgcgccgcggcccgggtcgtggatgatgtcctgtgggcagaggcggcgtgagtgcggcgttccggccgggcgtcccttcccctcccgccccggccagcgttccgcaccttgacgatgcc

SEQ ID NO: 142582 - DNA, 122 bp, Homo sapiens
ctaatccctcctagggaccccaaatggctgttcctcatcactcagtacccagtttgctgacgtctacaatattccgcctctcatcatcaaagaagatcatctgggagaaaggaattccagtc

SEQ ID NO: 142583 - DNA, 122 bp, Homo sapiens
agagtagagattgcaactttgcagagccctctccccagtactcacatatgaacgcacacacgcaagctcatgtacacatgcacacacactcgccagcatcatcaatgcatacacaccagcag

SEQ ID NO: 142584 - DNA, 122 bp, Homo sapiens
ttttttttttttcagtttcattctattatttaaaggaacacttctactttttgtgagtttcgtttcttacagtaatgagtgccagttgcctaatatttggggcagatgtcaaatttacttaa

SEQ ID NO: 142585 - DNA, 122 bp, Homo sapiens
tcgcgactggcttctttcactcggcgtcatgttttcagggagtgtccgtggtgtggtgggcgtcagtgcctctttccttttgatggctgagaaatattccgttgtacagacagaccctattt

SEQ ID NO: 142586 - DNA, 122 bp, Homo sapiens
ggcagggtggatgtggccatacccgtggtgttccagctgggggccgagcggtctgggggccggtagatgaagcgtcgcagggagctgacggcatgggagcccaccagtgtgtagcgaccgaa

SEQ ID NO: 142587 - DNA, 122 bp, Homo sapiens
tgaccacaagccctgaggcggggggaggctgggtgggccgcctgcactgacggcgccatccgcctcctgccttgcagtgacctgaccaacggtgcagatgggatgctggccacaagctccaa

SEQ ID NO: 142588 - DNA, 122 bp, Homo sapiens
aaaaacaaagagctttcttcaaattattttatttcctgaaaaagagctctttctggagtccgaagtggctcctgagttggtggtgcaattgttctatcagcagtgggtgtggccctcaggac

SEQ ID NO: 142589 - DNA, 122 bp, Homo sapiens
taattcaagggcaaatatatcgtctcgaaagggcttaggctgccgaagcaattggtggcacgtttccttctccgcagcactttgtgtgaaagtttcctttcaatgccaagactttcagagtc

SEQ ID NO: 142590 - DNA, 122 bp, Homo sapiens
gccctccaattgctcaagatggacagcaacgagctgaccttcatcccccgcgacgccttccgcagcctccgtgctctgcgctcgctgcaactcaaccacaaccgcttgcacacattggccga

SEQ ID NO: 142591 - DNA, 122 bp, Homo sapiens
tccccaatactcctagcacggcctcctcagggttgtctgaggctgatcttggaggcggtgcgctggtagaggcaccgcacacaggcatcgtttcacacaactgttacttaggttttccaata

SEQ ID NO: 142592 - DNA, 122 bp, Homo sapiens
tcgtcgcagctccaaatgccagccccagctcgaaccctctccttccagggccacagatgtcgtgctcctggccccgttttgccagcccaagactaggagccacggcacctgtcctcccacag

SEQ ID NO: 142593 - DNA, 122 bp, Homo sapiens
ctccaccttcaccaccttaggaaggccaagttcatgtccaggggaattacagctgaccttcgaacacacagatttgaacacacaggtccacttacatgtcgatgtttttttgtttgtttgtt

SEQ ID NO: 142594 - DNA, 122 bp, Homo sapiens
cgccagagtccgcccagccggcaacagctccccttaggcagggggagggggcagcacacgcgaaagaagcggcacaagtgtgacaacccccgccccgggacccacctgctcagctctgtagc

SEQ ID NO: 142595 - DNA, 122 bp, Homo sapiens
gaaagaaaaaacctagaacactgaccatcagtacagtttaccaggaatttagattcatgccgcttagcctagaaagaacctgtgaatgaagcacagtctgctgttatgcgttccacctctga

SEQ ID NO: 142596 - DNA, 122 bp, Homo sapiens
ttgtctcttccttcccaacccctttggcttcggccagcggactgtgaaaatatcacactacgtgaggcaggcgccgcctccccataaaaaacccagaagggtgactggcaggagggagggga

SEQ ID NO: 142597 - DNA, 122 bp, Homo sapiens
cagcccagccagggcagggcagcttccagcaactcttgcagacattttggaggccaaggccgctagcgccccagcagccattccgagccgactggcctggggcccaaatgaagccagccagc

SEQ ID NO: 142598 - DNA, 122 bp, Homo sapiens
ggcctgttctacacggccggggtttcaacaaggtactgatgtcttctgcccttgcctcttcgacaggcaagtaataagacttaagtgaagagaattctttaggcacacaaattcacatttga

SEQ ID NO: 142599 - DNA, 122 bp, Homo sapiens
accggcctgcacatcaggactgacccccggcgtctcctccaggcccgcgcaagcagaagacggactgacggggacaggatcaggactgacccccagtgtctcctccaggcccgcgcaagcag

SEQ ID NO: 142600 - DNA, 122 bp, Homo sapiens
cttctcgcctccactgtgttgattgcggttgccagggcagcggcgcattgctccccgcctcgtcctggtgacgtcacagagcaatgtccaatgggaaagcagctcggtgtcacgcacctcct

SEQ ID NO: 142601 - DNA, 122 bp, Homo sapiens
aatgctggcatgtgggcagcacagcacagcagttaggagccccatcctggcttcgattcccggacccactacttcttagcgatgtgacgccggagaaagcattcgggccacggcaacctctg

SEQ ID NO: 142602 - DNA, 122 bp, Homo sapiens
gaaatgaatgcgtactctccgtgcttccggacaagagacactaccaccaataacaaagaccggagtcattcacgcatttatgaaagaaaagacacagaaatataccgtgggaggctagatca

SEQ ID NO: 142603 - DNA, 122 bp, Homo sapiens
agactggcatcagagtgtggctcagggaccagcttcagaggccaggcaagaggctagatacggacccactgccccctcatcagggacccagcaaagaccccacctcccagaagctgtgccag

SEQ ID NO: 142604 - DNA, 122 bp, Homo sapiens
ctacaaggtctcctctgtaagagcataaaccatgtacacctacctggaacattactgtaacgctggctttgcataaagatgggtcttgtcccattccttcaccagtaagctcttgtgggctg

SEQ ID NO: 142605 - DNA, 122 bp, Homo sapiens
ggcctcctcgcccgcccacctggattttccctggcatttgttcccagctcagagaaatggcgcagggagatgctgacggagcaaatccggggtcctcctctgagatagttcgtagatatggt

SEQ ID NO: 142606 - DNA, 122 bp, Homo sapiens
ctcaattaaccctcacaaaaaccctgcaagatgttttacgaggagagaaccaaggttcagcgaggtggagtgacttgtcctaaggcacactagtggagactgcagggaccgaccccaggtct

SEQ ID NO: 142607 - DNA, 122 bp, Homo sapiens
tgaaaccgagtataaattatacgggttcaagcatgctgatggtccggggtgcgcagcgcccggctccccggggccggggtacttcctttctcttggctgtcaaacaggaagcctttaaaagt

SEQ ID NO: 142608 - DNA, 122 bp, Homo sapiens
ccaactccttccagcttacctggaccaggcctggatcccacttccaacaggtcctcattccggctcacaccccgatgaaccttgagccgagccaactcagccttgagcctcgcctggtgccg

SEQ ID NO: 142609 - DNA, 122 bp, Homo sapiens
ccggagcgagagcagtcccaggactcggcaagcctggcagtggccctgaggagcaagagacgtgctgctacccagccgctgcaaaagtttcctcgcagctacctgggcgctgggcgagggcg

SEQ ID NO: 142610 - DNA, 122 bp, Homo sapiens
cgacactcggaacctctaaggaggaggctgtgcatctcaggctctgccgctgacaggcgacgctggcacaggcttatggaacacctccctgtcagcctacccagcctgagggggcatcaggg

SEQ ID NO: 142611 - DNA, 122 bp, Homo sapiens
tgaacccaggaggcggaggttgcagtgagccaaggttgcgccattgcactccagcctggacgacaggagtgaaactgcattgcaaaaacagcaacaaaaaaaatccattcatctagtttgtc

SEQ ID NO: 142612 - DNA, 122 bp, Homo sapiens
ccggcctccttcccaccccagcctccctcacccactcgccgacctcgcaggcctctgccccgtcctcaacacgccacgctcgttcccacctcggggacttcacaccggctgcttctgtgccc

SEQ ID NO: 142613 - DNA, 122 bp, Homo sapiens
acagcaacagagagtgggggactcaccaaagctgggtgcgcggaccccccgctcctcccgcgccccgatcacactgaagttcgaggcatagttaggccttggctgtgtgcaggctttggggg

SEQ ID NO: 142614 - DNA, 122 bp, Homo sapiens
cgtgggtcgaggccggggatgttgctaaacatcctgcaatgcacgggacagtccccgcagcgaagaatcatccggcccccagtgtcagttttgccgaggctgagaaaccttgagctgtgccc

SEQ ID NO: 142615 - DNA, 122 bp, Homo sapiens
ggtaatccgcctgcctcggcttcccaaagtgctggtattacaggcgtgagccactgcgcccggtagaaggccagtttctaaaggcgtgttgcagagtccatgtcagttctaggaagaatcaa

SEQ ID NO: 142616 - DNA, 122 bp, Homo sapiens
aacaacttcaactttccatgagtgctagccagccctgggaggctccgctgccagaaggaacgtcaagggcaagtcctggggcgggagacccttccggaggaggagcaagaaagctgcttctg

SEQ ID NO: 142617 - DNA, 122 bp, Homo sapiens
ccccaaatctttttgtctgctcagttgtggcctagtagccagagtggctcgtgcattaaacgaagaggaacctatgtttcttctcttttcagcattttggctgaattttgaatttttatctg

SEQ ID NO: 142618 - DNA, 122 bp, Homo sapiens
atttcaactgcttgggcatcagtgttctcatcatttgaggacactgtctcattagatggtcgaatagggacttttccagctatagccttctgagattcctcaaggacacatcgagtttgtat

SEQ ID NO: 142619 - DNA, 122 bp, Homo sapiens
tgcgtcctgaccccacccctaaaacttaataaaacctggtctcttcctggctcattcagccgtttcacactgcttgagaggcctgccctgtctcccaagacttcaaataggtaagcaacaga

SEQ ID NO: 142620 - DNA, 122 bp, Homo sapiens
ccagaggcggggctcaggcgggactgagttgatctatgggggcggagccaggtcaggaggcgggactccaaagggactgagggctgtgggggcggggcccggtccagaggcggggacagcag

SEQ ID NO: 142621 - DNA, 122 bp, Homo sapiens
ctgggaaagccgctggggctcagtgtcgcaattccgggccgtgctgggacctttgctccacgaggtgcctatggaggggagggaacacgattctggaggctgctgggattggggtgggggtt

SEQ ID NO: 142622 - DNA, 122 bp, Homo sapiens
gtgtttcttcttgaagacggaattttgaaaagcttctgattcttctgttgcatcatcctccgtgacacctcataatgcagatggccaccacgcccagccagggcatggacaggcaaccacct

SEQ ID NO: 142623 - DNA, 122 bp, Homo sapiens
ggaaatgtcactaacctactttgagacgcccagatccagggccaaaggaggctgggctatcgctagaattttacagctctccttcccgaggatgtggctaaaagcaattagggcttggcctg

SEQ ID NO: 142624 - DNA, 122 bp, Homo sapiens
cttgcaggccagtgcaagttcagggtgagtgtgggctcagcgggctgcactcagagcgcccggccagccctgccggcccgggcaatgaggagcttagcacccaggccagtggctgcagaggg

SEQ ID NO: 142625 - DNA, 122 bp, Homo sapiens
ggcattgttaaatagtgcatctgtgtgagttagacttctctgatgaaagcataaggcagacgcgctgtgaagcaaaagacagcctctgctctaactgcattttagatagacttgaggaagac

SEQ ID NO: 142626 - DNA, 122 bp, Homo sapiens
actgcttccacactgacccataagaccttaaggaggttctttaagaacaaaaatgccctgcgcaaggcttcagcacttctgacatgtggacggccttcgctttagtgtgagagctgcttcac

SEQ ID NO: 142627 - DNA, 122 bp, Homo sapiens
tgctaagtccctcattgcctggggccggcagggccagcctgctgctccgagtgcggggcccgccaagcccacccggaactccagctggcccacaagcgtggcgcgcagccccggttcccgct

SEQ ID NO: 142628 - DNA, 122 bp, Homo sapiens
tcagaggcctgtaataaactagtatgttgtatatactgagatgcagtaacaatcaagacacggtataggctgatgtacctcaggctggtgtggagggccacagagctctgcaggttggccct

SEQ ID NO: 142629 - DNA, 122 bp, Homo sapiens
cctctcccctcccacttcggggagctgctgagggttgcgggtcgggcgggggcgggaagtcgttattcgaggcccggcgccgcggccccaagaaggtgtccaggttggggcggcaggggagg

SEQ ID NO: 142630 - DNA, 122 bp, Homo sapiens
tgcgttttcctgttgaagtcggccagagtcctcggaactcaccacggtctgcatgatccacgctgctgttgtcactctgtgaccgcggagcatgagaaccccctggaaatgagggcgtgcag

SEQ ID NO: 142631 - DNA, 122 bp, Homo sapiens
ttggcaatgagacactggtgatgggtgcattgccaccttaatatacttaccaccgaccaccgaattgtacaccttcaaggggagaattttatggcatgtgaattatatctccacaaagccca

SEQ ID NO: 142632 - DNA, 122 bp, Homo sapiens
gaggagctgggcttcagccggggctggcgtgtgaatcctctgggtcctggcagtcctgagcgcctgagctgaatacagagggaagaggctgggagcaaggccgggtgctggggccggcaggc

SEQ ID NO: 142633 - DNA, 122 bp, Homo sapiens
agcgacacagaactgccagctcagcagccggttacatctcgcccggcaacccataggcagcgtccgctcatgcgcgctcctggaagacccagcagccccgccatgagttccgattggctccg

SEQ ID NO: 142634 - DNA, 122 bp, Homo sapiens
ctgcattgcggcggccgaggcggctgccacgatttcacttccggttttccagtcagcaaacgcctacgagaaggcttcgtccaccaatcagaaaactggaactcggccctcccaccaacttc

SEQ ID NO: 142635 - DNA, 122 bp, Homo sapiens
gccctccctgggggtgggagcctcctaagccagcagagagacagatgccctgcagatccccgccccggtcaagagcaggcttccatcagttctggttcccagactctcctctcctcaggctt

SEQ ID NO: 142636 - DNA, 122 bp, Homo sapiens
cagaacaaagacgccgtgcggaggacgctggagcagatggacgtggtccaccgcatgtgccggatgtacccggagaccttcctgtatgtcaccagcagtgcaggtggggtcctgacctgggt

SEQ ID NO: 142637 - DNA, 122 bp, Homo sapiens
aaaagcacccaatttgggattgtatgtttgaaaaatcattttctttttaaaaagtgtgaacgttttgctctgttgtgaatgattaattgtatgttttctttagagtctaaagtttagacccc

SEQ ID NO: 142638 - DNA, 122 bp, Homo sapiens
agcattcctcccacctaagtctcccaaagtgttgggattacaggcatgagccaccgtgcccggcctaattgttaactctgactgagaacttttgtagattgagaaagtggctggtagtatat

SEQ ID NO: 142639 - DNA, 122 bp, Homo sapiens
agagttcctgggccggctgctccacagcctgctcctccacaggctgcatggcctcctgcacgtagacgatgaactccgaggcctccccgccctgcgtgtagacagtcaccgtctcaatgccc

SEQ ID NO: 142640 - DNA, 122 bp, Homo sapiens
aaatgcccaagattaaaggaaagaagatacaaaccacgcggatttgactccatttcaatacggctgggagtcctggctctgtgtccctccgcctggctccgcaccaggtctgaagcccagtc

SEQ ID NO: 142641 - DNA, 122 bp, Homo sapiens
aggcgtggggcggccgagaccggggaagatggtccacggggaagcgcgcgggctgggcggcggggaggaaggagttaaagatcctggattggctcttctgtcactgagtctgggaggggaag

SEQ ID NO: 142642 - DNA, 122 bp, Homo sapiens
gcggaggaggcggtggcgctgcagcccccgccccgtggggtttactgggtagccatttggcgcctctcggagggagaggagccgccggggctggaaaaggaggaggagcggggccgggcgca

SEQ ID NO: 142643 - DNA, 122 bp, Homo sapiens
tgcagcccagggagcggggagtgttcggagagggtgtctgtccatcgcacacgcttggcgcgcgtgcgccggatgcgcaccgggaacggctgcccgacgtgtgcccagggcccgcggcccgc

SEQ ID NO: 142644 - DNA, 122 bp, Homo sapiens
cgaccccaccccgccaagcgcccgagcaaggccaacctcctgttctctgctaggtctctccgaggtcgccttctttgcgcactttggttattgatcctgctgaaccggccggagcgcagcgg

SEQ ID NO: 142645 - DNA, 122 bp, Homo sapiens
ctccctggagctcctgggtggagggtggccggcctgcagtcccggaacaccgtgggctcccgtgctcctgcagccccgtcaggcacccgggggcccaaggatagaaagccccgaggaaggcc

SEQ ID NO: 142646 - DNA, 122 bp, Homo sapiens
acacagccgcggggcctggcatgaagggccccagggagggcctagcaagcgcccggggtccgagcagcctcctgcggcgtcctccgcccccggtcggcccgaccccgcctccgggagtgggt

SEQ ID NO: 142647 - DNA, 122 bp, Homo sapiens
ccactgagtaacgcagacatcttgaattgggatgcctgattctaaaccatttgccatatgcgaatgctatgactgggcaagtcaatggatttctctaagcctcactttctcacctcaaaata

SEQ ID NO: 142648 - DNA, 122 bp, Homo sapiens
gcagcggcgggcggactgagcccgcggagcacgttcactgacggaccagggaggggtccgcgccgagacccgcctccgaaccaggccccacctcctgagccaggcccccgcccccgattctg

SEQ ID NO: 142649 - DNA, 122 bp, Homo sapiens
atcaccttggagaggtctcggccatcttgaaggaaatgctcagaaggggcacctgcttcacggtgttaacaagaatgggcagcacctgcttcggcgccacggggtcagcatccgcgcgggcc

SEQ ID NO: 142650 - DNA, 122 bp, Homo sapiens
gagagtgaggccatctatgaagagatgaagtacccgctgccggaagaggctggggaaggccgggccaatggccctccaccattgacggcaacatccccgccacaacagcctcacgcccttcc

SEQ ID NO: 142651 - DNA, 122 bp, Homo sapiens
gttaataggtaactagcctccccgagatcagcatgcaaggtgtcaaatataaagcatcagcgcagaaaacaatttaaatcgaggttctaccatctttataacaggaatctggcaaatgtatc

SEQ ID NO: 142652 - DNA, 122 bp, Homo sapiens
agcacagctgctgagcgcgagtgctggtggtctaggctggcggccggcggcggtgtgctccgagcctgtccagctgagccctgtccagctgagccctgtccagctgagccgtctcccgcttg

SEQ ID NO: 142653 - DNA, 122 bp, Homo sapiens
ggaaggataaattaattaccagtggcttccccttccgctcaaggcattgccccatgtccacggtccaggtctgcctcaggcacagccagctccaatgccattgagagaagagatctcagact

SEQ ID NO: 142654 - DNA, 122 bp, Homo sapiens
gcggaggcagcgcgcgggatgggggagggaagggaggaggcggacctccgcgcagagccacgagggaaccgctagccagtcctgggtgaaactgacgctgccaggcaagtggcgcgcgggga

SEQ ID NO: 142655 - DNA, 122 bp, Homo sapiens
cagctttcgcgaggtgtggagcctgtagctaacctaggagtctccgtccgccagcaatgccgcaggactaaaaagatcccctcaaaaatctcttcattgagcccccacctcctcgagtcccg

SEQ ID NO: 142656 - DNA, 122 bp, Homo sapiens
tctggctctgcccagggaagcacagggcggaaggagccctttcgccggcgcgcagacgcgcgaccagcccagccaatcagcgcgctccctctgccggcccgaccggcgctctggtgacgcgc

SEQ ID NO: 142657 - DNA, 122 bp, Homo sapiens
tctgggaggcagtggtggctcctcttggcagttctcttgagacacgtgtccctgatccaccgccttgcccagctccctggcccgttcttccttgacaccatcccctccccttcccacacctc

SEQ ID NO: 142658 - DNA, 122 bp, Homo sapiens
aagttgggagggaaaggtgtactcacctttgtgcatgcctgtgaacctgtccttcagaaccgtaagctcgtagattttgccaaactcctcgaagaggggcttgaggtccttctcatccaggt

SEQ ID NO: 142659 - DNA, 122 bp, Homo sapiens
ccacgtggcctgagaggcctttacctgggactggagtccataggactcatgctgaggacccgtgtcactgcgggtggcccgggagcagcctccatgaccctgcacccctgccctgcagcccg

SEQ ID NO: 142660 - DNA, 122 bp, Homo sapiens
caccaagggtgtggcagcacctgtgtattggcacggaggagggtctgcttgccgagtggccgttagagggggcgcgtctggatgcccacgttagggccctgccatagaaatcagttttgatt

SEQ ID NO: 142661 - DNA, 122 bp, Homo sapiens
ttcctcctttagccttcagtctcctctctaaactgggttgggcctcagttcttctcataccgggtctccccttcctgctgtcctgggttgtatcttccgcttcctagatttaaggtctttat

SEQ ID NO: 142662 - DNA, 122 bp, Homo sapiens
gcgtggactgctctgctgtgtgagggcgggggccaatggctcagagacacagcaaggccgcggaggagcccagatgagctgtgccctggccggcggtgggtggtggagacgcaaccagcaga

SEQ ID NO: 142663 - DNA, 122 bp, Homo sapiens
ggagcagaagcccttcaaggcgcagtacatgctggtggtgcacatgcggcgacacacgggcgagaagccccacaagtgcacggtgagtggccttctccccacccccgccgcagcatcaagac

SEQ ID NO: 142664 - DNA, 122 bp, Homo sapiens
gtgagccaccacgaccggccacctcccgggatctctggcctgcccgacccctgcccatcccgggactctatccctcagtacctttgaagtgcaatacgaagccctggcccaggcctggattt

SEQ ID NO: 142665 - DNA, 122 bp, Homo sapiens
aagtgctggggaaatgcttatagactaaggaatgggcataagtcagttaacgtccaactgcgttttgtctgagagccgatgggagtaagagtgtctgcagcttgtcgatgtgtacgcggttt

SEQ ID NO: 142666 - DNA, 122 bp, Homo sapiens
accatgacggtgataaatctaccccacaaactggctgtcagaaattaagtacaaccaggccgtcataattttttactcccactctgatggcacacgaaaaaggaaatctttggaagtcaggc

SEQ ID NO: 142667 - DNA, 122 bp, Homo sapiens
ttgtatatggagggatggggccgtgacccgagttggcctggactgaaggacagtaggacacgctgctgctcccttttccgtagtgtttcttaaaggcctggttttgtttagattgaggacgg

SEQ ID NO: 142668 - DNA, 122 bp, Homo sapiens
atgcctatcccaatgctccacacttataggtgtttgataaaaagtgttgtgttgaaatagcgttcctgaaattggacctaacccaacagcttgtaaaaacttctgtgggaaaaataacattt

SEQ ID NO: 142669 - DNA, 122 bp, Homo sapiens
gacgacagctgagggtctctccgttaaggctgtcgctgctgtaggggccctcgcccgctgcgtgtttgtgccacccagcgtactgggtgctttttcaaaattttatcatggacgtctcaaaa

SEQ ID NO: 142670 - DNA, 122 bp, Homo sapiens
acgatcgtcagaaatacaggcaggcccgggtctcaggacgtcgaggatggaaggagcatccgagctgatcctgcccaacctcgaacctgcagggtagaaacagagcccgggaggccaagggg

SEQ ID NO: 142671 - DNA, 122 bp, Homo sapiens
gctccgtttctctcctgctctgaagcagaaagctcgagcccgagaggcagtggccgaggacgaaataagcagtccaggaggagggcgaccgcggagccgggggagaggggaaaccgagtcag

SEQ ID NO: 142672 - DNA, 122 bp, Homo sapiens
gctatgatagccacctaggcaacagcatgacatcctgtctcaaaaactaaataaataggccgagtgcagtggctcacacctgtaatcccagcactctgagaggccaaggtgggtggatcacc

SEQ ID NO: 142673 - DNA, 122 bp, Homo sapiens
ctggccgcagtgcccgtctgagttccgagggcagcgtgctggcggtgggggagcacctgccgggttcccagctgggcggtggatgccagccggagttgagtcggtttggctcttacaaacta

SEQ ID NO: 142674 - DNA, 122 bp, Homo sapiens
ggcttcagttccccacttatgaaatgagagagtagatttaatcatttattaagatgtgttcgaactgtaacatgagaggtttacagcggttaatattttggtctctctctaggaaaggatca

SEQ ID NO: 142675 - DNA, 122 bp, Homo sapiens
cgcggggccgcccaggctgcgatggaagccgttggcgcagggcggggagccaagctggggcgactgggggggcctgggggagctagcggggcgggacccgagcggggcggagagtggcagga

SEQ ID NO: 142676 - DNA, 122 bp, Homo sapiens
agggggcgtgcctgacccaaggttgggtcctggagcatgcgcagtcttcacagaaggtgacggggagaaaaatgcggaggcagcgattgcgtaggagcaggttctgattggctactgttcgc

SEQ ID NO: 142677 - DNA, 122 bp, Homo sapiens
tttgcgggccagctggagttccgggtgggcgtgggcttggccggtccgcactcggagcagcgggctggccctgccgccctgggcaatgaggggcttagcacctggtccagcggctgcggagg

SEQ ID NO: 142678 - DNA, 122 bp, Homo sapiens
gccccacggaagcaccctggcgcatacatttctccacgcttaagttttctccgacggcctcgccgcggctggtaacttctctggttgagatctctccccacgcgcctccccgcagccaaagt

SEQ ID NO: 142679 - DNA, 122 bp, Homo sapiens
agcttctctttgacatctcgcacaatctcccgctcagcagtggtggtgaagttatagcctcgctctgtcaggatcttcatgaggtaatcagtcaggtctctccctgccagatccaggcgtag

SEQ ID NO: 142680 - DNA, 122 bp, Homo sapiens
acctgcggcaggtgctgttctgtgtgacgccagcctgggggcctgcagctgaggttgcaccggagactcccagagcgttgaaacggccgtgggaggagctcagtgcaccacatggcagggtc

SEQ ID NO: 142681 - DNA, 122 bp, Homo sapiens
gtctgcagcggtggagccagggctaagccttctccggtcataatgagagaacccgggcaccgccccccgggaccaagccttccgcgaaatctgcttatagcccccgagggatggagccgggg

SEQ ID NO: 142682 - DNA, 122 bp, Homo sapiens
actgaccaataagaaactctaggagggcgtgatcttggaatgaattacataaccagggaccgaatcctctgacttaacagtttcagaaactggattttagttgtttccagtgaccccaaact

SEQ ID NO: 142683 - DNA, 122 bp, Homo sapiens
tccaaagaagcaaatgggatgccacctccgcggggctcgctcctcgcgaggtgctcaccccgtatctgccatgcaaaacgagggagcgttaggaaggaatccgtcttgtaaagccattggtc

SEQ ID NO: 142684 - DNA, 122 bp, Homo sapiens
atatataaatatataaaaatatataaatatataaaaatatataaatatatatatatagaacgcaataaaatgaggtgtgggtgaaaagaaaactgaggtttgcagacatcatacagctagct

SEQ ID NO: 142685 - DNA, 122 bp, Homo sapiens
tgccctcagtaagacattctggataagacagggccacgggacgaaagtccatcagcacggcgggctgcggcgggggcggggcctggcggcagagggtccggtgctgcggggaaggaaagtgc

SEQ ID NO: 142686 - DNA, 122 bp, Homo sapiens
ctaatttcctgtggatttcagatcatcttttatttccaattatgctgctgttcacattatcgatttggaggatacaaatgttgaatgacaagagagggagaagaaggaggggggaggagaat

SEQ ID NO: 142687 - DNA, 122 bp, Homo sapiens
tatatgataacattacacccccagatttacaccaaaccccattttcttttggacggagctcgccgcagcacgtgaccgcccacatgaccgcctccgccaatctcagcagtcctcacaggtgg

SEQ ID NO: 142688 - DNA, 122 bp, Homo sapiens
tagtgcctcgttaaagatctggtttagagttcggtgcctgtaagccttgcccccaaaacccgggctgaggacagtccaacttgtgaagcccacaacctctttggaaacaggttctctgggac

SEQ ID NO: 142689 - DNA, 122 bp, Homo sapiens
gggccgcactgcccaagggggcaatccccgcggccgtccgcaacgggtccccgcgcctgtcggggccagaatcagatcatctccgttgtaaacatttgtccaagtcaatggaagaggaggag

SEQ ID NO: 142690 - DNA, 122 bp, Homo sapiens
acacacaggccgctcccacccaggctttgttcagggagggctcaaaccccccaccgcgcgcgcctttcccatgcacacctccacccgccccgggcccggccggtcctgaccccagagagcag

SEQ ID NO: 142691 - DNA, 122 bp, Homo sapiens
gtcaagtgaagccaagaaaatccagactcacttaaaggtccaaatggaaacgagaagtctcggaagcctcctctgtggatatgcatcttaccaatagacggactcctaggtttgaccctgag

SEQ ID NO: 142692 - DNA, 122 bp, Homo sapiens
gaatatataggggggtcgtgttttttccagggggccacctagtcttgcgccatgtctggccgttaccacagcttgcaggacctgtgtcccaacgcgggaaagacagcccgagccccgcccct

SEQ ID NO: 142693 - DNA, 122 bp, Homo sapiens
ttgcaggaattaatatcgatttcagtctcctgctccttcaaagtttctctttgacgatggcgagacttatattctaagtcagaagaaaataaaaccttgcctattctgggcccatgattgca

SEQ ID NO: 142694 - DNA, 122 bp, Homo sapiens
gtccggagcatggctcctgctctgtcagaaaaggctgttaggacacggctagccagttcccgggagatctggcttcaggccttgaatcttgttgggaacaggccccccaaaatctggctgta

SEQ ID NO: 142695 - DNA, 122 bp, Homo sapiens
gtttttatatatttttgtagtgtgttgagaagagcaaaagctttataaatatacctgatgcgctgtagaatgaaaatgtaaaagataacctgtatgtgttccgagctttaattttttgttta

SEQ ID NO: 142696 - DNA, 122 bp, Homo sapiens
caagaattatgcaaactttagccaccatttactctgtctcaggtatgatgcaatgcctttcgtaatttatcatctcatttagttctcacaacgaagtaatatgatatgtttcctgccaacat

SEQ ID NO: 142697 - DNA, 122 bp, Homo sapiens
attatcgccacaagatggcgatagcgcttctcaactcgcctgcgggacggaggcagggtgcggcccggagaactcctccctgttccaacagcagctctccagcccgcagcgcttcctgacgt

SEQ ID NO: 142698 - DNA, 122 bp, Homo sapiens
ggcattaatccaatcaacaaaggcagagccctcgtgacctaatcacctcttaatacttaacgaaattaaatttcaacatgaattctggagaagacaaacattcaaatcttagcagtaattaa

SEQ ID NO: 142699 - DNA, 122 bp, Homo sapiens
cgctgagcactgaacacctgcaactcttttttctcctcttcactcaaagactggcaataccgtaccttcacagaaagcaaaacagaaacaccacactgagtgcacagtctttctcaccagtt

SEQ ID NO: 142700 - DNA, 122 bp, Homo sapiens
cggcttcgttaccctatttttgcccccaaatacagctgtgaaaggatggcagcctcggaccgcccgcaaggttcttgctaggcatgaactgcaggagctgagtgaccggcggggacgtttgg

SEQ ID NO: 142701 - DNA, 122 bp, Homo sapiens
ctgggctgacgtgacgtgaggctgggctgcggggcgccggaggcggaggcgggggcggggcgccgggaccgactagggcggggcgcggggtcggggggcggggcgcggggtcggggggcggg

SEQ ID NO: 142702 - DNA, 122 bp, Homo sapiens
gcatcacctgctctcggaccccggccccgctctccgcccgagggctgctgttccgccgagcgcagcccccgcctctcagcgcacgtctcccactactggcggcggctctgcggggcggggcg

SEQ ID NO: 142703 - DNA, 122 bp, Homo sapiens
acagcttgggaagcacataggcatcgaagacgctcgcttcagaaatgtccctgactgctgcggcctccactatgtttcgaatgacgaatttcttaatggcgttgtccttgggcacgcatcgg

SEQ ID NO: 142704 - DNA, 122 bp, Homo sapiens
gatcacacatttttgtctcacctcccttcagaaagcctgttaaaatgaaggcagagaaatcgtaaaaaggaataagctaatgttcagtttgtttgcactgctgtaacaaagtacctgagagt

SEQ ID NO: 142705 - DNA, 122 bp, Homo sapiens
gtggaagttgccccctcggaaacagctattaggtcgtattcaggttcctggccttttttccggtttttccacttgattctagactcttgagtccacagattctggcgctcccgtcttcagtc

SEQ ID NO: 142706 - DNA, 122 bp, Homo sapiens
ggtcattagaagaaactggggtcctgcatgaataaaaattacagtgctctgtgtgatctccgttggctctgcctacggccactgcttgggcgtgcagattgtgccgtcataatggaagctga

SEQ ID NO: 142707 - DNA, 122 bp, Homo sapiens
catgtgaggaaactgaggcccacagaggctgggtggcttgtccaggggaggcaacggagacggggcagcaaccccacgtcccacacggccacaccattacagcgctatgtgcttcctctatc

SEQ ID NO: 142708 - DNA, 122 bp, Homo sapiens
gagtgtcagtccacccctggccttcggtcttcactcacctgtgccccaaacttaccatcccgaagacacgaaggggcttatcaccctcgctgcccaccactgactcacccaaccgtttcctg

SEQ ID NO: 142709 - DNA, 122 bp, Homo sapiens
agtaggagcgcgcagcggcttcgcagggggactgttaacgtcaatgggaagggccctccccgggaagtcccataggacacaatattcatctggtgttgttgcctagagtttgtcccagcgga

SEQ ID NO: 142710 - DNA, 122 bp, Homo sapiens
attgcctctggtggaattaattactcttttattagcacaaaataacagcaacctagcagccgcacggcccgagaataagttaaggcacagagcaggcgacgggcggctttcccagggccagg

SEQ ID NO: 142711 - DNA, 122 bp, Homo sapiens
gctgaggcttcgaggtccaccatcacctcgttttctgccgggcagggactcctgggttggcgctctctaaagccgcttctgtttctaaagttctttgactcatttcttaagcattgcatctg

SEQ ID NO: 142712 - DNA, 122 bp, Homo sapiens
cccgggggtcgctgcagtgttagtgttcgccgtggaggcgtgagcaggtgggcggggccccggggtcgctgcagtgttagtgctcgccgtggaggcgtgagcaggtgggcggggcccggggg

SEQ ID NO: 142713 - DNA, 122 bp, Homo sapiens
agggaagagggagggacgcgggcgctggcgtggaggttgggggagcctgagaggctcgggcgctgggtgcgcgggagggagcgtgcgtgcttggcgcgaaggctcctggcgcaggcgacccg

SEQ ID NO: 142714 - DNA, 122 bp, Homo sapiens
gtggtgtgagaatgtcattcttgatcttcagccttcgtttgcaaggagagttccagttgacgtggtgtttggttccatggcggggtaccctagggattcatctgttttcttcacttcccttt

SEQ ID NO: 142715 - DNA, 122 bp, Homo sapiens
catatggagactgagaacatgggctttgctctcagccaaacctgggttcaagttctagaacggatacttactagcccatgacgttgcgctagtcatgtaattactgagacctctgcttttta

SEQ ID NO: 142716 - DNA, 122 bp, Homo sapiens
aacgcgccaccaagtcctgttatttaatgaactagtaaataagtccaagtattactaaatcgtaactttggatttttaagaaatattttgggccgggtgcagtggctcatgccaggccgagg

SEQ ID NO: 142717 - DNA, 122 bp, Homo sapiens
cccccggagcgcacgcgcagcctggctctgcgctcaggccggctgaaaacgcggggcgcccggactcaccccgttcaaggaacgtgccgctgagatccaggacttcgagcgtgaccaggggc

SEQ ID NO: 142718 - DNA, 122 bp, Homo sapiens
ttttatgccaagtacaatgggggccattgcaaagttttcagcagaggagtgacatgatatcgtctacattttaacagggtgtctctgggcagggtgcgatggctcccacctgtaatactagc

SEQ ID NO: 142719 - DNA, 122 bp, Homo sapiens
ctgatctcaaacagacatacagcgaggagctgacgacacaattctaacaaatacagaagacgcaaagaacaggtaggtcacagtgccgtctgcctcccgcaaagaagcaggaagtcttccgg

SEQ ID NO: 142720 - DNA, 122 bp, Homo sapiens
cgggccggccgggaaaggtcggggaaggcgggcgcggggaactgcctggctccggagctgcgctccccgcccgcccagagcggcccgccgaggcccggcctctcctctcccggcttcgggac

SEQ ID NO: 142721 - DNA, 122 bp, Homo sapiens
acaggctatcagaggcaaaagtgaaaaaggcattgtccctgctccttcagccccagctcacgtgttctatcaaacaacatttggtgaatctgagcttggagcagagtgaagtactgtagggg

SEQ ID NO: 142722 - DNA, 122 bp, Homo sapiens
cacccggactgggactgcgccgggccccgctttccctcaggccctccacccccagcggcccggcggcatttgtgaacagccatctgggactcccacgcctaggcttttcggcttcacagacc

SEQ ID NO: 142723 - DNA, 122 bp, Homo sapiens
ctcagacgcagcctgcaggccggcattgagcttggtgaccagatcttcctcggagaccaccgtggagaagtccatgctggccaagtgctgcagcagggtgggcacacggtccaccagcgtgt

SEQ ID NO: 142724 - DNA, 122 bp, Homo sapiens
gctacagctttcacggtagttgataactaaagcatgacatgatgccatctgtgtgaaactcgtgatgtgtgtggtcattggctccctggaacatccagaccctgatcgtgcgtatcgtgttt

SEQ ID NO: 142725 - DNA, 122 bp, Homo sapiens
gaatagtctctgatttaccaaagaaccagatctacctgcctgggccccatcactgtgctgcgcccagcacaggctagggggtggtgagcaggtgcctctgcgcagacagcagcgtgctgcca

SEQ ID NO: 142726 - DNA, 122 bp, Homo sapiens
ccgcccactcttcctcactgacgggcaggagcctgtgtttgttcctcacatcagcccgagcggcagagactttccctttcgctgagtcagctttggaacccaaagtctgtgatactggggtg

SEQ ID NO: 142727 - DNA, 122 bp, Homo sapiens
ctgtctcggaaatactcctcatccatctagtttctcccaggacaactaggcccaaccccacgggaatatacagagaggcctcgggtcacagacttaaagctgtaaaagggaggaggcgacgg

SEQ ID NO: 142728 - DNA, 122 bp, Homo sapiens
gattctaacgacacctcagcacttgccagcacaggccctgcgtgtgagaacatctcctgccgctcccacttcctcatcgcgggtgtaacagcgctgcacgccggtgcccctcagaacaggaa

SEQ ID NO: 142729 - DNA, 122 bp, Homo sapiens
gcgccgtgcccgtccccaaggcggctcgtcaccgctgcgaggccaatgggctgggccgcgcggccgcgcgcactcgcacccgctgcccccgaggccctcctgcactctccccggcgccgctc

SEQ ID NO: 142730 - DNA, 122 bp, Homo sapiens
gaaatatcccaaatgctgggaacatcctgtgtcacggtgtctcccgggcccaggtacccacgaccttttgtttgcagcctgagggaggaggagactgataaagtgcgggggctggggggagg

SEQ ID NO: 142731 - DNA, 122 bp, Homo sapiens
ccagccccatccacaacctccaaggaggcaaaccgtggggccacgtggcccgggttgtcacggtaatgggatgcgccagagatggccagggaagtccgaagacctcgtcttccaaggccaaa

SEQ ID NO: 142732 - DNA, 122 bp, Homo sapiens
cgcctccccgcagaggtgccggggccctgggagcaggtggccttggccgcgggctgctggcgcgccggcaccgcggcacctgctcttccccagaggcctggccgcccccacaacctgtggct

SEQ ID NO: 142733 - DNA, 122 bp, Homo sapiens
gcagcgtggcctcggcctggcttgtgtacagctgatccagcacgcccctgtgcacttcgccgccctgcagggcacagcagggggctcagggctgcgtccagctcttgtccccacacggggtt

SEQ ID NO: 142734 - DNA, 122 bp, Homo sapiens
aagaaggcctggccccagccccgagcttcaaggctttctatttatatgcgaaattgcttgcgttttcctagttagtggcagatctgcctgtttgatgttaatgagtttgtgaacccaacaaa

SEQ ID NO: 142735 - DNA, 122 bp, Homo sapiens
ggggcaggacaccactgtaaatgaaatttgactcttccctctattttgtattactctccacgcagaagcatttaataggcagagactctgtcatgtgtctctgccccacctgccagggacag

SEQ ID NO: 142736 - DNA, 122 bp, Homo sapiens
gagccactgtgcccggcccctatggctttctaggagtgctgggatggctaagcaatgccacgtagctgaggcaaaggaaggcattggtttcccatgctacctcctctttctgctgtcttgcc

SEQ ID NO: 142737 - DNA, 122 bp, Homo sapiens
tcagctttgatattatttgacctcaactgcattactatgctgtccactcccttcttgcttcgtctcaaaaataaaaaaagaaaaaaagaaagaaagaaatacatttttctgatttttaccat

SEQ ID NO: 142738 - DNA, 122 bp, Homo sapiens
cgagcagaaccgtttccccaaaaagacacgttcaactcctaacaccagcacagtgaatgccgccttctggacatagggtctctgtggatggagttagtaaagatgaggcccttatccagtac

SEQ ID NO: 142739 - DNA, 122 bp, Homo sapiens
tgcagcttggtcagtctcaaccgcagccgctgctcccgccgcttgcaggcctgcagctggcgctgggccttgtcaagggcatcaagggctgcctcggctcgccgcttccagagtaaggcgct

SEQ ID NO: 142740 - DNA, 122 bp, Homo sapiens
cgtgcacgtccctgatggtagcagccctcctcctgcacgagcacagaatgtctagccggccgtgaacacccccaccgccccccccttcccgtgcatgcgcggtgcgggctggggggaaggcg

SEQ ID NO: 142741 - DNA, 122 bp, Homo sapiens
ggctagtgctttccagagtgtactggaggacgggaaacaagccccatttaagcagtgcctcgggatttgagttgcctgtgaaacgcagcagccttctgccgaggacgcagaaacccccgcct

SEQ ID NO: 142742 - DNA, 122 bp, Homo sapiens
tctgtgtctgtgtctgcgtctgcgtctgtctgcgtctgcgtctgtctgcgtctgcatctgcgtctgcatctaggtctgggtctgtgtctgtgtctgtctgtgtctgtgtctgcgtctgtatc

SEQ ID NO: 142743 - DNA, 122 bp, Homo sapiens
tggccaacatggtgaaatcccatctctactaaaaatacaaaaattagcgaggcatggtgacgcacacctgtaatcccagctactgaagaggctgaggcacgaaaatcactctacctgggagg

SEQ ID NO: 142744 - DNA, 122 bp, Homo sapiens
ccacgcgccttcaatctgataagcggaagaggacacgccccacagaaagtcatcccgaaacgtcccgtggtagaacaaatctctttcgaacttgggttggctggagaacttttcccaaacga

SEQ ID NO: 142745 - DNA, 122 bp, Homo sapiens
gcataatacctagcaagatcccagatgtaaacgggagaactcaaatgttcctttggattccgtgatggctgagaagcatccaggcctgctaactcactgaagaagaatccagcagaagggga

SEQ ID NO: 142746 - DNA, 122 bp, Homo sapiens
gtctcaaatcccaggaaactcctcagacccggacaaagtgcagtgattggtcactctgggcgagcacgggcagcatctggagctcacacgttgggacagtggccatgcgagatagtgtggcc

SEQ ID NO: 142747 - DNA, 122 bp, Homo sapiens
tttaaaaaatttacaaagctgaattccaataagcatccgataaacatgaaaagcctttcacgaacacccagcagccgcgccacccgccagcccgagcccgctcacctcagtcctccgcaccg

SEQ ID NO: 142748 - DNA, 122 bp, Homo sapiens
attataaatgtaccaagcagctttcctcttacctgccactacatttaactccttcagaaccgctctttccgaatccctcagcattgcaactttcaataaaaaagaaacaacacttaaactgt

SEQ ID NO: 142749 - DNA, 122 bp, Homo sapiens
aaaaaaaagcaaaagcccagcaagctgagacatcagagtccttcagaaggaatgatttgccgtcttctcttcaggacatcccctctttaggaggacaaattttttctccagggaaaggggcg

SEQ ID NO: 142750 - DNA, 122 bp, Homo sapiens
cagactggtcagcctccacacctccctcgactgagccctggcagccggagtgcagggagccgccgtgccgtcctgcagcatctgtggatccaaacacagttttctccacgcacccacaggcc

SEQ ID NO: 142751 - DNA, 122 bp, Homo sapiens
ctcctgctggcgtgccgtgctaggcggttggaacaaagcctctgctctcgtggaggaacacggagccaaatgcatttaaaaagatcataattatgaagagaattaggaatgcaagggtcagg

SEQ ID NO: 142752 - DNA, 122 bp, Homo sapiens
cttttcccactcttgttgcggctgagaggtgtccttttctccaattgtattgactggtggcgtctccatatggatgcttagtcccttccacggtgagtgaacagttttggtcagaaagggat

SEQ ID NO: 142753 - DNA, 122 bp, Homo sapiens
gctctcaccgcgactttaatatggatgagagtgggacggtgacggcgggggcgaaagcaacggtaacgcttcttgacctttgggctaagatcaagtctagtaactgttcttatcagtttaat

SEQ ID NO: 142754 - DNA, 122 bp, Homo sapiens
ctgctgggggcccctctgtgggtgggctctgggtgggctctggctgtggggtgtctgtaacgtgtggccgctcagtcgcttctgctcctctctgcaggtcagctggccgccggcacctgtga

SEQ ID NO: 142755 - DNA, 122 bp, Homo sapiens
actccctaactcggttatacactcaaggaatggcctgggttttgcaatttctcactgcaacgtcttggtgataacaggcacttgagaaataagtttttaaagagttgattggattggtgatg

SEQ ID NO: 142756 - DNA, 122 bp, Homo sapiens
ctgggtgggggttcggcggagtcgggagacctgggctgtcgtcagggcttgtcatggacgcgccggagaccctgagaaagcattctcctcccccgggcctcagtttccctcctgttgccttc

SEQ ID NO: 142757 - DNA, 122 bp, Homo sapiens
gtaaacatccttgcaatgagagtctgtaacacaggacagtcattgcttactcacaagacacgcagaagcacaagagactcatgaagaatagtctcccagcaaagactgctgggaattgaggg

SEQ ID NO: 142758 - DNA, 122 bp, Homo sapiens
gaaaaggaggagggagggggaaaaggaggtggggatacgaaggagcggggaggcggcgggcggggcctgcggcgcgcagccccagtagatctccggaaattttccactaacgctccgagcgc

SEQ ID NO: 142759 - DNA, 122 bp, Homo sapiens
ccacagaaaccagagaatggatttccaaacgtccagaaaaaagaagtcaggggagtgaaacgcagagaccaggagctcatccgactgccccatcgtgcttgactcttccccagcagaggggt

SEQ ID NO: 142760 - DNA, 122 bp, Homo sapiens
aaccttccctttaagatgtggaggtttttttgacagcctgtgaaaagaaccaacaacgtccgcttctgctttgcagccttttattaagcaatgttatgtcgctgagtaatttggcatgagga

SEQ ID NO: 142761 - DNA, 122 bp, Homo sapiens
agccgagctgaacaacctcaggcagagagattctggtttactccccagtggctacggagacgccttggaggccttggagtctgctcaccttgagggatggaggccaaaaggggcccagagca

SEQ ID NO: 142762 - DNA, 122 bp, Homo sapiens
gcgcttcccaacctcaagggccccaggagctttcctgaaaaaccctcctgtgaagtgtggcggtcagccaggtgtaagtggcaccccttcgagctgggaggccggagaaatggggaaacagg

SEQ ID NO: 142763 - DNA, 122 bp, Homo sapiens
ccaccgccacaaacagccaggccactcatcagagtccgggagccactggcagagagggcacggccccacactgccccagagacatataggagccaggcaaacaccagggcgagtgagctcgg

SEQ ID NO: 142764 - DNA, 122 bp, Homo sapiens
tgcagcctgtcactggggcacgctggccgccttcttctgcctgcagtacttgggcgttagcgtcctcctgtgcttccagcacaagctgtgggtgctgctgctgctgctgggccgctggcgcg

SEQ ID NO: 142765 - DNA, 122 bp, Homo sapiens
taggaacggggtgtcactgcgcggctcgcaggcacctctctttgacctatttataatctgcgccttattctccgcccccaaaggctgctggcaaccaattctcggtggcgaagtcgtgacgt

SEQ ID NO: 142766 - DNA, 122 bp, Homo sapiens
gcatccttgtactggaccatgaatgagtcgaaggggccctgggccactgtccatgagagacgcaaggagtctggggtcacgccggtcactgtcagttcccccaggaggggctgctccaggaa

SEQ ID NO: 142767 - DNA, 122 bp, Homo sapiens
cataaaatctcacaaacaacctccataaatcacaccatgacatctactgggcttgtccaacgctaaacataagtggactcttaagtcgagtcttaagttgtaggcagcaccatcacccttca

SEQ ID NO: 142768 - DNA, 122 bp, Homo sapiens
tctggatactcggtggcattaacccttccctaccgccggggaagacagcagtttctctggcgaggaagtaggccgggctcaggcgccttagccagagggcgggcctgcgccaccctcggaaa

SEQ ID NO: 142769 - DNA, 122 bp, Homo sapiens
agagccaggcagagtcccaaagggtgagtcattgatgtgccgtgggccagagccgttgcccggcgggctgtcaccgggcggcacgcgtcccttcagcgcattgcctgccgaagctggtcttc

SEQ ID NO: 142770 - DNA, 122 bp, Homo sapiens
ggggtccagccaccgtcctcagaggggcttccatgctggcgcccagctgcacggagctgacggccgcacatgagggtaagctgtctcattatacctgatcagttttacagatgcaaagttga

SEQ ID NO: 142771 - DNA, 122 bp, Homo sapiens
atagagattgtagaccatgttggagcgaggaaggacccgatttacctggcgagaatacgacgatgatctcgtcactgggcgtaagtggtaatgtctgtggtacacacacaaagcacacgcta

SEQ ID NO: 142772 - DNA, 122 bp, Homo sapiens
caaggattcaggtttgtagctcaatggggaagttggggctgaagataacgaccttaagagcgatcagcacagaaatatgagctgagcctataggcatgggtgggatcattaaggaaacatct

SEQ ID NO: 142773 - DNA, 122 bp, Homo sapiens
ggccgggcccccgtgggcttggccttcgcctccttatgatgctgctgctgaaggctctgccggaccttgtcctggggaccggagacggggaggacacaggcacagagtgagaagtggcaggc

SEQ ID NO: 142774 - DNA, 122 bp, Homo sapiens
atggaaaaatacactaagtgacacttaatcgtccttcccagcaaagcacttgcgagctgtcgggataaaggatggaagggagaggcaggtttgagttgagaactcagttttgccaagaaaac

SEQ ID NO: 142775 - DNA, 122 bp, Homo sapiens
gtatcgctccctgagtcgtggtgtcgggcaccgtccgcctccactcccatcctggcaatgcggtggctaaatacaaggcacaaaagatacctttagtggcgctccctcttgcttcccggtga

SEQ ID NO: 142776 - DNA, 122 bp, Homo sapiens
cctcccaggccgaagcgcatttcttcgctaacgcgcgaggagtaggctgcatagacccggcgcaggaggtgttcattttcggatccagccctgtagtcactttagctaaacccggttccaaa

SEQ ID NO: 142777 - DNA, 122 bp, Homo sapiens
actgcttgggccaaaggaaaacacacaggaaatcccagggttggaacaagtctacagccacgtcaaatgcatagattcctgggctgggcaaaaagctgtgataacagctggaagaaatagtt

SEQ ID NO: 142778 - DNA, 122 bp, Homo sapiens
agttaggggaagaggacgcctgcgcagtgatatgtactcgccgtctcctgcaactccatccgtaccgaacactgccgcgccccgccccctcacacagcccggcgcccgcctacccccgcaac

SEQ ID NO: 142779 - DNA, 122 bp, Homo sapiens
ggaagtggatgagctgcacagagaagcacctattgacaaaaagggaaatttcaattacatcgagttcacaagcatcctgaaacatggagtaaaagacaaagatgactgaaaagaactttagc

SEQ ID NO: 142780 - DNA, 122 bp, Homo sapiens
caaacagcatcatgcaatactgacttgtcaagtacaactggaggtgagaaaacagagcagcgtatggcaaaatagtctaagaacaagtagtaaaagcatcagcatcaaaaactccaggctat

SEQ ID NO: 142781 - DNA, 122 bp, Homo sapiens
ctcatatcgtttctgttgctcatttgctcccctaaggcattagtcagcctgaaaacaggacgtttaaggtattttcctttaacagttactgatttcctttgacagttttctccctctaccac

SEQ ID NO: 142782 - DNA, 122 bp, Homo sapiens
cttcactcctgagccagcgagaccacgaacccaccagaaggaagaaactccgaacatatccgaacatcagaaagaacaaactccagacacgcagcctgtaagaactgtaacactcaccggga

SEQ ID NO: 142783 - DNA, 122 bp, Homo sapiens
ggtgcacatgtccctcaattccttgcgacggcctctaaaccagaaggggatgccaaggggcgggcacacatacccaaaagggcgcccccggaaagaaaagcctggggcggggcctcaaaggg

SEQ ID NO: 142784 - DNA, 122 bp, Homo sapiens
gtgtgtgtgtgtgtgtgattgcaagccatgataaggactgtagtgaaaactttaacatgccgtgggcacatataacaagagttgttttgagcatatgttctcaggatctcctgagggctgtg

SEQ ID NO: 142785 - DNA, 122 bp, Homo sapiens
ccccgattccgggagaggacacctgtcggggaagggcggggctgggggactgcggggccgcggcgaggctcagccgggaactacgcttcccagcctgctccgctgcagccgcgcgccccggc

SEQ ID NO: 142786 - DNA, 122 bp, Homo sapiens
tcaggcacgtggtcagaattaatggccctaaaaataccgcccttcttgtttttctccctccggcatggcggcaggggcttatttttggaaggcagatgaaggctgctgacatgaaaccaaag

SEQ ID NO: 142787 - DNA, 122 bp, Homo sapiens
cctcccccgcggagccgccggccgctcggggcccagattccgtcggcccccggggctctgcggcaccggtcgcttctagccgctctcagcccgtccggccccgccaggctccgcgagccgcc

SEQ ID NO: 142788 - DNA, 122 bp, Homo sapiens
cttgccttatgggtttgcctggtgagaggctgctgtggccctgggcattctgtgatggctcgtctcccgtggcccaggtgcccgggctggctccatggcttcaaggatccaagctttctgtt

SEQ ID NO: 142789 - DNA, 122 bp, Homo sapiens
ttggccataggcgatgccacttccgacagcccagcagggtctggccctgggtcccagaggcgcagcccctgcggggtttggatgggttcctgcggcctccgatccgctggtgaattgggtgt

SEQ ID NO: 142790 - DNA, 122 bp, Homo sapiens
aaggatctaaaaggtgatagggacagccataccttggttctcttgcctgaacattaatgacgggagacaggacagggagggctggggagcaaacgaaggcatcccgagcttcaccgtgcacc

SEQ ID NO: 142791 - DNA, 122 bp, Homo sapiens
tagagttagccaggcatagctctgggagcccatgctatttattggtaatagcaagtagaacgaattaatccgacacaggatttagtagagacaggatttcaccgtgttagccagaaaggtct

SEQ ID NO: 142792 - DNA, 122 bp, Homo sapiens
ctcggcccgcctgaaaataaagtctctgaaatggaacctggggctgaggatgaagccccccgcaggtggatctgctgttggccagagcagagaaggtgccgtggaggcctcggcgaggctcc

SEQ ID NO: 142793 - DNA, 122 bp, Homo sapiens
ggaatatcttccgttgtatgactgacaggctcaggcttctaccagatttcacccaaagaacgcagcccttgaaaaccgccccaggcagagtggagttctgctcctgggctcctactggcatc

SEQ ID NO: 142794 - DNA, 122 bp, Homo sapiens
tggcgttggtgattattgaaatcagtgatccgtcatccaaactgtgatggaaggaaaccccgtgctcacgagggactgtgcgtgaatatcaaaggcctcactcaaccacattctgaacaaac

SEQ ID NO: 142795 - DNA, 122 bp, Homo sapiens
ctaccagatcaagacagaactttatcagtaccccagaaagtactttttaaaataattacacgaaggagccatgtagaccagtggcagcctgtctagtttacaccagctctgtggacttgcac

SEQ ID NO: 142796 - DNA, 122 bp, Homo sapiens
aaatggctatgacagatctcaccccataggatggtcaagaagattgaataaagtaatacacgtaacagcgcctaaacaggtgtcgggcacatagtgctcagaaaatgttggctcctattaaa

SEQ ID NO: 142797 - DNA, 122 bp, Homo sapiens
gtacttacaggttaacctcagtccaaagccttaaatgcttggttagtgattcacaaacaacgtccaggtttttccctcagaatcaatattttctgattgtcactgaggagggagcttctaag

SEQ ID NO: 142798 - DNA, 122 bp, Homo sapiens
tcccacaagccacgatgccaatttgccttgtcacacagctctagccacacaaatgaacatcgactccagctcagcagtagcattaagatggcctaagctttggatttcctagcgtatgaagg

SEQ ID NO: 142799 - DNA, 122 bp, Homo sapiens
cgctggcactgccccgccgtgtgtgccgggccgaagggaggaaggaagggaggaaagagccgcccaagttgagaagaatgatccgattgaaaacttaggcaccggttaattcttcccggtgc

SEQ ID NO: 142800 - DNA, 122 bp, Homo sapiens
ggcccgagcgcttccgggtcaggaggtggtgcgcctcgcgcggcagattcgaagctagggcggggcccgcgggctgaggcagcggctgtggcggcgacgctgggcgtgaggtggcggcggcc

SEQ ID NO: 142801 - DNA, 122 bp, Homo sapiens
gcaagattgagagacaaaacttaacaaagcgctgtgcaaactgaaatcccaggcttagctcgcttgtgtcttgaacacggaagtcacctagtcacccacaagatgtatgagtacagctaacc

SEQ ID NO: 142802 - DNA, 122 bp, Homo sapiens
tggcccctcccaccgcctctcccaccacgtgatctctgcacaggccgctcccctccccatcggccacgagtgaagcttcctggggcctcaccagatgcagatgctggtgccacgcttcctgt

SEQ ID NO: 142803 - DNA, 122 bp, Homo sapiens
atttagacggtgggaagaccgcaaggaaatggtcagcggatgacgtaatgtttggggtggcgtcccattctgtaacttctgtacggcatcagtgacacgggtttagcttgaaacagcgcaaa

SEQ ID NO: 142804 - DNA, 122 bp, Homo sapiens
gggcgcaggggctgtggccggggcggtgggcgggcggtgccgccaggtgagactggctgccgtggcgcggagctgcgaactggtcggcggcgcaaggcgcggactccggtgagttgtgtgga

SEQ ID NO: 142805 - DNA, 122 bp, Homo sapiens
tctgcagaagtgagctgagcgtgtgcgcggtacggggctctcctgccttctgggctccaacgcagctctgtggctgaactgggtgctcatcacgggaactgctggggtatggaatacagatg

SEQ ID NO: 142806 - DNA, 122 bp, Homo sapiens
cacatggctcttgacagagaggatctgggaccgcagcttctggatgcgcacattgagatccgcgatctcgctgcggctgctctggaggctgctcccatactcggccgagcgggcggcctgct

SEQ ID NO: 142807 - DNA, 122 bp, Homo sapiens
gtggtcgatgggactgggcgccttggagcagggggcggtgctcgtaggcgaggctccagccgcacaggagcccacggggttgggggaggctcaggcatggcgagctgcaggtcccgagccct

SEQ ID NO: 142808 - DNA, 122 bp, Homo sapiens
ctgtagccattgttcctaccgcctctgtgactaccgcctctgtgaccgacgctggtactacgactgtagccattgttcctgccgcctctgtgactaccgcctctatgactgatatttctcct

SEQ ID NO: 142809 - DNA, 122 bp, Homo sapiens
tcacatgtaatgtagcctctctcacttcatgcaacaagcttctgaggagtggagggaaaacgagatcacatcacagctgatatgccctaattgacttgcttctaaaacatgttaatttttga

SEQ ID NO: 142810 - DNA, 122 bp, Homo sapiens
agaggcggccgctcacaactgcgagtgacatcagctgcgaacaatgaggggtttgacaggcgcggagcccggccggcccggagcccggctccgcgccccccccccaccccccggcccgcccg

SEQ ID NO: 142811 - DNA, 122 bp, Homo sapiens
cgtggctgctgctggcaatctgggtgagactgtggggcagggatccgggccgggccagcacgtgtgtcccgcgtgcccttctgcgctctctgctccagccctctgcggaacgtgcggggagc

SEQ ID NO: 142812 - DNA, 122 bp, Homo sapiens
ctttctgcctcttttccttcagacaataagtatgtgcaagactattccatcataaagatgcgataacattcttctctacccaccactctatgaccctttcccaattcttaaccaaatttctt

SEQ ID NO: 142813 - DNA, 122 bp, Homo sapiens
ggcctgcgacctgagaggttgtggtggggaaccggctgctgagggccctggtcagggcagcgacttggtttctagggttggagagaggaggaactagctggaggaggacaggactcagtaca

SEQ ID NO: 142814 - DNA, 122 bp, Homo sapiens
gcagctctcccacccccacccgaaggggcaggtacgcacagctccctccgtgtgagtaaacggaaagaaattaccccactcccgcccagggcagaaggccacagccccgcggggcagtggcg

SEQ ID NO: 142815 - DNA, 122 bp, Homo sapiens
aagggcacataccgtcggccttggatttgcaaggagaggggcaagaaaggagcttgccggcgcctacctgagatcaaagacagacagatgtgggaggtcacttaaaggtctgggagaatgaa

SEQ ID NO: 142816 - DNA, 122 bp, Homo sapiens
gcgcgcgtgcccgtgttcagtttgtattgacacacgcgccctctctttcatttcctcctccgcccctcgaccgtttccctcaaacgccagccagacaggccgactcccctcctcctcctttc

SEQ ID NO: 142817 - DNA, 122 bp, Homo sapiens
gccccgggaggcagcctttgccgtcggcggtcccaccttcatcagctctctgtccccgtccgaagagtcctcctggctgtaatgaagcagcatctcactgagcagtctcacgttgttgttaa

SEQ ID NO: 142818 - DNA, 122 bp, Homo sapiens
ccgcctttccgatgatgccctcgggacgcgttggcaggaggaatccctgggcgcaaggcgcggctgggccagccccttacaaagccctacgagctgcggggacccaggccggggcagcgggg

SEQ ID NO: 142819 - DNA, 122 bp, Homo sapiens
ttttcacaaaggcccgaagttcattcgctttgtgggggtccgtggtccggaggcggtcggcgaagctgaggggctgcagcccggttccaggctctggctccgcgtgaccgcgcagaaacggg

SEQ ID NO: 142820 - DNA, 122 bp, Homo sapiens
gagtcaatgatgatggaactgtgatctccaggtatcatcgctctggagcccttcaagttccggcagtggtatctacgatcactgaaccatttccgcacctctctggtactgaggcccgtcac

SEQ ID NO: 142821 - DNA, 122 bp, Homo sapiens
aggaagctcagggtgaccagcagctgcaccgcggccgctaccccctgcccagcgcctgcccggcggaccccttggctcatgctgacctctacccacaccgcggccagccggacccctcgggg

SEQ ID NO: 142822 - DNA, 122 bp, Homo sapiens
gtgcctgagtgtgcaggtgtcagcctctttcatggctgtagaaaaagcaccattacactccgtctgtattcttcccccgacaatgcaggatcgcccccccgcccccccgcgcgtttgtttct

SEQ ID NO: 142823 - DNA, 122 bp, Homo sapiens
gagcaagactccgtctcaaaaatagacacaacagaagtcccagttctgcccctggttgtgcggtccgcacttaactaagaggctggcatctctgggaacagcctccgggacccgcgcgctgg

SEQ ID NO: 142824 - DNA, 122 bp, Homo sapiens
cgcgcggccccgcccccgcgcgtctcgcgccggctcctccagggctgggagagcaggccccggggagggcagcctcagaacaactttgctcccgcgccgctgcccagctagggcagggttca

SEQ ID NO: 142825 - DNA, 122 bp, Homo sapiens
ggtcctgctgccccctttatctctgctcaccaagcagagaaaaaccacagtaatgtgtgtcgcccagagacactggcaccctgacaactacagcaacgggttctttgtgcacattgtaaaaa

SEQ ID NO: 142826 - DNA, 122 bp, Homo sapiens
aaaaacaccagctgtaaaacccactgcttccttccccgccaagtctgcagtggcaggaggcggcggcagcagacagcagggccccctgtgctctgagtcaggcctccctctcagtggctccc

SEQ ID NO: 142827 - DNA, 122 bp, Homo sapiens
ggcccaccgtaaacgctcagtacgtgttagctaccggtagtagctatctttatttcttcacgttcctccaggcagggagagtatctgatggacacgagtgtccccaagcccagggttccgca

SEQ ID NO: 142828 - DNA, 122 bp, Homo sapiens
cagggtgcaagtgggtctcgccgcacggctctctgggattcgtagtcttgcagtgtcattcgggagttgtagttcctttcccacaatcggctgggcgaggcggcgccagcgatcagagcagc

SEQ ID NO: 142829 - DNA, 122 bp, Homo sapiens
gtaacgtggccgggcggtgtcaacacaaacgcccccaccctcccctggacgcgcgtaacccgctccccgcaccagccccctgcccacaactgcgcaggcccagcaagcccccacaattaaaa

SEQ ID NO: 142830 - DNA, 122 bp, Homo sapiens
tatctccactttcagtaccactatccaatccagccaaccaagctagatccaggagtcatccgtgcttgttcactctcccttatcctttatctctaattctctaatgatacaatatatgctcc

SEQ ID NO: 142831 - DNA, 122 bp, Homo sapiens
cgccggtgtcacatttaaggcgggcaggcaggctaggggcgacgctgggggcggcggcggcgcgacccccgggcagggctggggagctggccggcccctgggcagccgcggcggcggcgggg

SEQ ID NO: 142832 - DNA, 122 bp, Homo sapiens
aattaccggaccacatgttgccaggagccttggctgggagaggcaagcgaggctccaagccggcgagcgggcggcggcgcagatggaaactcgatcacccccggctcagcagactgtttgat

SEQ ID NO: 142833 - DNA, 122 bp, Homo sapiens
gctgtgaggggagagtcccgggccgtgagaggagggtcctgggctgtgaggggagggtcccgggccatgaagggagggtcccgggtgaagagcaagctcatgaccctcatttactgggaatc

SEQ ID NO: 142834 - DNA, 122 bp, Homo sapiens
gatgccagctgtacatttctcttcacaggtgagtacattccttggcgctttaagtgatcacgtgccttccgaatgccaggtgcggcgcccgctctgcgctgctcgctgcaactgctcccacc

SEQ ID NO: 142835 - DNA, 122 bp, Homo sapiens
gtccagctatggatccatccatacctcattgttcctacagaaccaggatatctgcagctacggctgtacttgttaaaaatcacctcaggccgggcgcggtggctcagatccgcaatcccagc

SEQ ID NO: 142836 - DNA, 122 bp, Homo sapiens
caagtggagggacatgaggtggacccttgagtggggacaatcataaagccttacagaaatcgctactattgggccaggcacagtggttcatgcctgtaatcccagcactttgggaggccaag

SEQ ID NO: 142837 - DNA, 122 bp, Homo sapiens
gaagaggattaccaatgtacatttctactagcagtgttagagagtgatattgttcccttccgacaaccagattggagctactaagcaattagtcgcataccaacataaatgagatttaccat

SEQ ID NO: 142838 - DNA, 122 bp, Homo sapiens
cgcccaaccaactaggacagcgcctgcgcagcaaatctcaagcactttcattaaagatggcgcccaggtgggtggggcttgaacaaaccactaggtccaatgccaccctgtcacttcagcct

SEQ ID NO: 142839 - DNA, 122 bp, Homo sapiens
acaaattttagtcacagttttgaataacgtactctggctcagccattgcaggtctcaagccgttaggtttcattttcctcctcccaacgattttaaattagtttcactttccagtttcctct

SEQ ID NO: 142840 - DNA, 122 bp, Homo sapiens
ttgccagacgaggaggacgtagactttatcaacgagtacgtgaacctccacaatgagctgcggggcgacgtcattccccgagggtctaacttgcgcttcatggtgaggccggaaggcggttt

SEQ ID NO: 142841 - DNA, 122 bp, Homo sapiens
tcagcctgttagtaaccccaattccatctgcaaattccttagaattctgctccgtaccagcggtcaggcccagctcggctcttcctgccccacaacagccactgcttagcaagagctgagct

SEQ ID NO: 142842 - DNA, 122 bp, Homo sapiens
gtgattaacgagtgtttacaagactctattagtaatgacacagacaccaatggttggagacgtcgaggcgcagcgcgcactctacgcacaacccctcgaaacataatttgcattttaaaaga

SEQ ID NO: 142843 - DNA, 122 bp, Homo sapiens
ccagcacctgggggcctggttctgtcccagacactgccatccttcacactctcgtcctaccgcactcccagaggacatgggccgcctgggaacccctcctatctgtgtatttccttctttga

SEQ ID NO: 142844 - DNA, 122 bp, Homo sapiens
cttagtcatgtagggaaatgacatctcctggctggatactggtgactttgggaatgcgctcgtcattcatgagctttcaaaacagcagtgtctgggaacttgcctgaaagctgtcctcgtgg

SEQ ID NO: 142845 - DNA, 122 bp, Homo sapiens
gagtgcagccccaagtggggggcaggggcggcaccagcatcttaattgtttggacccagccggtaaggaggacgccgcgccgcaccgcgccgcgccctccgcagtgcaggagcccagaggcg

SEQ ID NO: 142846 - DNA, 122 bp, Homo sapiens
caagatctgaaggaccctcggactttagagcaccacctcggacgcctggcacccctgccgcgcgggcacggcgacctcctcagctgccaggccagcctctgatccccgagagggtcccgtag

SEQ ID NO: 142847 - DNA, 122 bp, Homo sapiens
tccgcgggcccggggctgagcgctgcggagccagaggacgggcggggcggggggctcgggcgccctcagctcggcctcagctccagcctgggtcgtccctgctgccgccgcgcccggctcgc

SEQ ID NO: 142848 - DNA, 122 bp, Homo sapiens
actcatttactgagcatctactaagtgcctgatgctggaatacaacagagaacaggcagacggttccggttctcccactgggagctcagcacggtgttgggagcccactgggtactcactaa

SEQ ID NO: 142849 - DNA, 122 bp, Homo sapiens
tttcttctggatcggaatctgaaggagacatttttactagccctaagagaatttcaggcccggagtgtactactcccaaagcttccacttccgcgaacaatttcacaaagtcaggatccact

SEQ ID NO: 142850 - DNA, 122 bp, Homo sapiens
tggggccagtacacgccgtgcgccaggcccgggcttggcggcacgtgccgccgcaggctccgccagtggtgcagcagcttgcccactgcctgccgctgcctcagcagctgccgcagccgttc

SEQ ID NO: 142851 - DNA, 122 bp, Homo sapiens
gggggatgtcaactggggagtgatccccagaaaatcaacttcattgtgaaatcagaagtacgagcatctttctttcaactggaattcattgagcatctactgagctgctatttcagcacgct

SEQ ID NO: 142852 - DNA, 122 bp, Homo sapiens
atcagtcagcccgtccaggaattatgcaaatatatgcagcctctactctgaacactgggacgtagtaggggacaaagctgccgccagccgtcctcgtccttgcgaggtgtcagtgtttgcgc

SEQ ID NO: 142853 - DNA, 122 bp, Homo sapiens
cttgctgggcaggccccgggagatcggcctttgagcctgcggcctctgagccaggcagggcgtccggcacccgcatcactgcaggagctggcgttgccacggtggcccttgaggcaagagtc

SEQ ID NO: 142854 - DNA, 122 bp, Homo sapiens
gccaaaataagagatcactttcctcttggccaagaagttcaccagggtctggggcacaaccgtggaggagtagcagaaatccaagaaggagaggctcttcaggagggagtacatgggtgtgt

SEQ ID NO: 142855 - DNA, 122 bp, Homo sapiens
cccggtgctagggcgtcagtctcccattcggaaggactgggccggggcactctattcaatcgcctttagtgaacatacttgaagctataggtgcagggatgagaaaaaacaggcccataaag

SEQ ID NO: 142856 - DNA, 122 bp, Homo sapiens
ccaaacctaagctaggcacaaggagaaattaccttaggcaggcagtgaagctctactcatcgctattctgggaggattggggtagcaatcttaattcttgtttagaaaaatgtaatatacct

SEQ ID NO: 142857 - DNA, 122 bp, Homo sapiens
tccaaccacttttcaccacctctgcttccaccatcttgctcctagtcactggtggccactcgcactgctgcagtggcctcctatctgaaaacactgcttccactctgctcctagaatctatc

SEQ ID NO: 142858 - DNA, 122 bp, Homo sapiens
tttaatccacaaccctacagatagttccattgattaatattattcctacataatagcccgcgctgctcagcagactgggaggcccggcgtccccgggcgaacggaggctacaggttggggca

SEQ ID NO: 142859 - DNA, 122 bp, Homo sapiens
cgcacgcgcggttgagtcctcgagtagttcgggtctcgcgggcctcttgttttggtctcgcgggctagtagggcgcacttggcggggaggcgcttgggcgcgagactaggcgtgaagagcag

SEQ ID NO: 142860 - DNA, 122 bp, Homo sapiens
gagtggaagaatatctgtgaaagattctttagtgcccaggattctcccactcatcatgaacgctgctgggattttcatctgtgctgtccttaactttcaggaactgaggaggtacctcacat

SEQ ID NO: 142861 - DNA, 122 bp, Homo sapiens
gccccaacaaaggttactgggactttttttctcacatggttgcatgactctaaaatgtcgcgttgaatctcagcatgatgggacatctgttgaggaagtcttcctgggtatctggccaagtc

SEQ ID NO: 142862 - DNA, 122 bp, Homo sapiens
ctgggcggcggcgacggcagtacccaaacgcccttcgctcagtcccggcgcctttaaagtcgccttccagaaaattcactccccagccacctcccgagcctcgggttgggcaagcggccgcc

SEQ ID NO: 142863 - DNA, 122 bp, Homo sapiens
tgacgtctcaagcagcattgttttaatgctttgatgaagctcagcacgctgccgaaatctcggcagtattttttcttttctttttgcatgtgagagaaaggacaacaaattgcagttttatc

SEQ ID NO: 142864 - DNA, 122 bp, Homo sapiens
gtgcccgggacgagcagggctttggcggcgccttccctgcaaggtccttcagcaccgggtcggacctgggccactgggtgacgactcccccagatatccccggcagccgcaacctgcactgg

SEQ ID NO: 142865 - DNA, 122 bp, Homo sapiens
agaaaaaggccctagagggagaactgctttaaaattttgccgagagttaacgctgcccagcgctgggtgaggtactataagggtgcacgcacagtgccagcaaggccccttacattctactt

SEQ ID NO: 142866 - DNA, 122 bp, Homo sapiens
caaacttctggcctcaagcgatcctcccagctcagcctcccaaactgctgggatcataggcgtgagcttccaatcccagtctaaacccttaacatgctcagtgggaaagaagcatctccttg

SEQ ID NO: 142867 - DNA, 122 bp, Homo sapiens
actggaaagaagttgtgtgctcagcagcatggtggggtgagggggttgcagggcatcccacgccataacccacgaggtagcctctatgggctgatgggggatcagtgcagggtggtaagggc

SEQ ID NO: 142868 - DNA, 122 bp, Homo sapiens
gtgatccacctgcctcagcctcccaaactgctggaattacaggtatgagccaccgtgccccgctgtgagtcataccttaattgaacagtgtgtatcaggcactgtgctatcactgagaagaa

SEQ ID NO: 142869 - DNA, 122 bp, Homo sapiens
ctgaaaaaccattttcccttctacccaccgggcccaggcagagaatcggcaccaagacagcgaggagcatccacccagggccagacactcatgttcgcggctcgcacttgctgacttgcatc

SEQ ID NO: 142870 - DNA, 122 bp, Homo sapiens
gacgcctgggccatggggcggcgggtccagaacgaacctaacgattcccacttccctgcacggaccaacgcccgccgcagctcggacttcgccccatcgcaagagccgttttctccagtccg

SEQ ID NO: 142871 - DNA, 122 bp, Homo sapiens
gcgaggccccgaggcgcccaccacttcacgacaccggagcgaaccgggcgccagaggctgcgacccccctgccccgaatcctgccggtgggagtggctgcatttgaaccaaacggccttcgc

SEQ ID NO: 142872 - DNA, 122 bp, Homo sapiens
agcggccttcctcacacagaaagtgcttctcccggaagtgctcacgcaggtaggcatagtcgctggcaggagatggggtgtcggtaggagggctgcagcccggttagccccacgccctcggg

SEQ ID NO: 142873 - DNA, 122 bp, Homo sapiens
tccgcgtgtcccgctcctctcacccgctccaaaatagaagccccttcccacccactgccgcggccgctcttccaaacactgctcgcccccacgctggctcccgacaagccccggcccccgga

SEQ ID NO: 142874 - DNA, 122 bp, Homo sapiens
ccggcgtgcgagcggcaggtcagccggggtgctaggtctggcgtgcggggtcctgggtgccgggtccggggtgcggggtgccgggggtccggggctggtggccgggcggcgtggggccgtcg

SEQ ID NO: 142875 - DNA, 122 bp, Homo sapiens
aggaggaggagcagcagggaggcggcggcgacgaaggccgggctgcgaatgagtgggcgccgggcgagcacaggggagcgccgagctgagcgcctggcaccagggcgcagactcggagcggc

SEQ ID NO: 142876 - DNA, 122 bp, Homo sapiens
ctgcgacctggcagcacagagatgcgtgcgccagacagagtggcccgtcggtggctccatcgccatctgccggcacctcggtggaagtttggccaggagcgtggggctggccccagtttgat

SEQ ID NO: 142877 - DNA, 122 bp, Homo sapiens
tcctgctatgacaaccaaaaacgtctttaaatgttgccaaatgtacccggtgagcaaaaacgtgcctagtagagaaccactgctctaatgtgaccaagctgtcctcactcctgatttgtagg

SEQ ID NO: 142878 - DNA, 122 bp, Homo sapiens
agcccttcggccaggccggaaggtcagggaaggctgtccagaggacgccatgtatgagctcgctcttgtagacaagtaggaactagccaagcaaaactgagaagtgtgttcaaaggaagggc

SEQ ID NO: 142879 - DNA, 122 bp, Homo sapiens
aggtgaaggctgcccagggtctgggtgtcgtcgcctagcagctgcccttggtagatgagtcgcacctgctgttcccggccgggaaactgggtcctgaggagagagggacctgggtaagagag

SEQ ID NO: 142880 - DNA, 122 bp, Homo sapiens
cctctggatctagggaagcgccgccgcgtgccaccctggagctctgaaacgcaccgcgggcgccaggcgactgggagaaatttggagacctgtcagagtggtcagacacccgcggtgactta

SEQ ID NO: 142881 - DNA, 122 bp, Homo sapiens
tgacctcgtgatctacccgtctcggcctcccaaagtgctgggattacaggcgtgagcgaccgcgcctggtcgaaatgatttctaatgtctttgcaatagaaacattttgtacaaccatctac

SEQ ID NO: 142882 - DNA, 122 bp, Homo sapiens
aataaacttttcagttaactgtatgtgagagatgacgtagtgcatgtgtttcacaatgcacgctgacctgaattcctttgagcataaatgttgtctgtacatttgtttctccatttgtgttt

SEQ ID NO: 142883 - DNA, 122 bp, Homo sapiens
agccaggctcccgcgcgtgcatccaccgcgatctcaggccccggcgtttgtggcagctctcggttaccatgggaaccgcactccgcagcctccctgggccccatctaatctgcgtgtgtgcg

SEQ ID NO: 142884 - DNA, 122 bp, Homo sapiens
cctgccttggcctcacctgctgccccccctgctgccggtgggaggccctggccacccacacgctctgacactgcgtctcctgggtgtccaggctcatggcacaggcctccaggccccgcagg

SEQ ID NO: 142885 - DNA, 122 bp, Homo sapiens
ttgagtgcaaaatgatcccactctctatcccgacacaactctaactccattttcctttcacgtgccctaaaaagccctcaaggcccccagccttggtgaatccaggccctctctcggggtgg

SEQ ID NO: 142886 - DNA, 122 bp, Homo sapiens
ggctgaggcctcctcgctggctgcactaccgataatatgcacgaggtggcagcaacgtcacggccgccagcccggggcctccacgggcgactgaggctgcgcagttgacttcctcatcacca

SEQ ID NO: 142887 - DNA, 122 bp, Homo sapiens
aaggtgaggaaggcgcggaaggcagggaaggcaggccagcgggacagcacagcgatggcacgccggctgcgcacagctctgccccccagtgcccgaccccgctccacggcgctcagcaggcc

SEQ ID NO: 142888 - DNA, 122 bp, Homo sapiens
gagacgcggggcgaaaagtagagctgggcctcgcgtcaggcaacggtccccggtgccaggcgccgggccaggggagaaggagggcgtggaggcggcgcgcggcccagggaagcagaggcgcg

SEQ ID NO: 142889 - DNA, 122 bp, Homo sapiens
cctgcccttccctgccgcccacggtggggagaccccagccagattccagggcgacttgtgcgaccgctggcttctgtgccaggtgctgggcaaagccactgcagaccacctaataattagaa

SEQ ID NO: 142890 - DNA, 122 bp, Homo sapiens
gaggtggcacacatgttgtccgcaaactttcaccaatcccagacctccacctccccttttcggggatgtaaacctgggaaacttgaagaccttgtggtccaatcctaggcgagtggggacag

SEQ ID NO: 142891 - DNA, 122 bp, Homo sapiens
gatgttagaaatgagaggggagggaggtaacagggaatgaacccccacaaggatgaaaaacgtaagatgattgaagttaaaaggacatcaggggtcacctgcccagccctcgcagctgaagc

SEQ ID NO: 142892 - DNA, 122 bp, Homo sapiens
cactaaccctgaagtcacacacagctcaagacacacagagggggcctctaagctgagagacgtttattcaaagacttctctgatctatcagaactggtgatctaggagctttttgtaaagct

SEQ ID NO: 142893 - DNA, 122 bp, Homo sapiens
caacacagtaatcaatgtacagccacccggtgatatcgctcctaatattcacggaagaagcgtatgatattactcccaatatcgcagggagtgtacacctcttctgtgatgttcttcctagt

SEQ ID NO: 142894 - DNA, 122 bp, Homo sapiens
ctatattcacacagttgtgactgtggacacgcaaaatgcctgaggccctgcgtccaatcccggaagcacagttcctgggaggagtcacttctataatagccgtatcttccctcctcgaggct

SEQ ID NO: 142895 - DNA, 122 bp, Homo sapiens
gggcgattcctatgcagaggaggcagctcaggggctgctgcttcgccaggaaagatttctcgtgctgtgggagctagtccaggacttccggttggacgtgatagtcccagctgtgtgtcagg

SEQ ID NO: 142896 - DNA, 122 bp, Homo sapiens
ctgaggagctggacgtggggatcctggtgtgtgtccctgcccgccatcctcagctctgcgcggcgggagctgtcccaaccccacctcctgcctcgggtccctcccaggcgagtgtccctgga

SEQ ID NO: 142897 - DNA, 122 bp, Homo sapiens
gggcatggactctggagtttgaaggctgggtcaggtcatgctctggattctttactcactcgcatggcatgtccttagtttcacttccctcactctcagtggagccgttgcagcgggcagtg

SEQ ID NO: 142898 - DNA, 122 bp, Homo sapiens
agctctccatgctagaaaaccattcaaagcaatgacatggaaattagcacacgagtgtcccgctttgcagcccagtcccttgatttctgtgatttgacaggaagatgatatcaaagactgca

SEQ ID NO: 142899 - DNA, 122 bp, Homo sapiens
cgatgcatcctttggtctctgcagggccctgtgtgaggacgtggcctcactccagagcttcgactcgctcacgggttgtggggaggtgttcgcagatgagagctcggtgccatctctggagc

SEQ ID NO: 142900 - DNA, 122 bp, Homo sapiens
gccctcactctctcagccaaaatgattaactgccacttctttatggattacaggtttatccgtgttctagtctcccctccctacgggtaagatttcttgagataactaatcacaaaattaac

SEQ ID NO: 142901 - DNA, 122 bp, Homo sapiens
agtgtgatccccacccggccctggctgcgcccagcctgccggaagccggcccagcacaaccgcccaccgactcgctcccccagctcttagggactgccctgaagccgacccctgctccgcgt

SEQ ID NO: 142902 - DNA, 122 bp, Homo sapiens
tcagaacggtcgccctttaccccactgagctgagaagggattaacctcaagtacctggcccggattgtcagagccttgcccatctttgtctcactggttgctgcagagggaggccaggcccc

SEQ ID NO: 142903 - DNA, 122 bp, Homo sapiens
acctgtgcctgcagcagctctacaaatagttaagtagctgggcttggctggtggtgggcccgcggtccccaccgcgccggcctcggacgcggctccctcggcccctcaaactgctctctttt

SEQ ID NO: 142904 - DNA, 122 bp, Homo sapiens
cgggaaagcccgcagccgctggacgcgggaggacatggaggtaggcgggaacactcaccccgcgatttcgtgtggtccgcgaagctttttctcttcaggacaacactgcacaatggcatcca

SEQ ID NO: 142905 - DNA, 122 bp, Homo sapiens
ggacgactacgactatcccgaagaggagcagctcagtggtgccggctacagagtatcagccgctcttgaagaagccgacaagatgtttctgagaacaagagaaccagccctggatggcgggt

SEQ ID NO: 142906 - DNA, 122 bp, Homo sapiens
ggaagtggtggggaggctcagggtgtgtcagatccagcctccccacctctgctgagctggcggctggactcaaggcctgccacgtcttcctgctctgcagtgcactagctgtgtgaccttct

SEQ ID NO: 142907 - DNA, 122 bp, Homo sapiens
ataaaataccgccctgtgtggtggctcattgtgatggcacaggtatcccatgcaggtttccgtagtgtagtggttatcacgttcgcctcacacgcgaaaggtccccggttcgaaaccgggcg

SEQ ID NO: 142908 - DNA, 122 bp, Homo sapiens
gtggtaggtgacggatggggtccccagctgccaaaggtcgcacggcgggaaggagctggccgaagcactgacttggaagtcagacctcatttccagggtcacatcgccagtcgtggccttgc

SEQ ID NO: 142909 - DNA, 122 bp, Homo sapiens
tcctcaggcagcatgtaaggcaaacgcgcaggtggtaaaaggagagacagcagtagctaccgagaaaaaaatgtttcctcataactagcagagctaggcaaaagaaaactgggtgaagtcct

SEQ ID NO: 142910 - DNA, 122 bp, Homo sapiens
ctcgcagtgagtgttacagttcataaacgtggcgggtccagagttgctcttcctcccagtcggttggcagtcttgctgacttcacgagtgaagctgcagaccttcgtggtgagcgtcttaca

SEQ ID NO: 142911 - DNA, 122 bp, Homo sapiens
gctggagggcgtggctggctggggacatgctgagggaccccgggcgggaccctggcttaccggcccaaggtccgctccgctagtccttcagtctaaggcttgtttagcacaagacaagggat

SEQ ID NO: 142912 - DNA, 122 bp, Homo sapiens
tcctttggctggagcttctgttaaacctgggcattagggttcatttgcatgtaaagagaacggctatcaccacctgtttcatagagataatgtgttggaaaggagatgtaaagttgcagaga

SEQ ID NO: 142913 - DNA, 122 bp, Homo sapiens
ggtcccgctgtgccactgccaggctctggagctccttcaccaggaggctctgcttctctgcgagagggagagggaggtcctgcccatccccaagtgcccctccctgcagcccgaagccggga

SEQ ID NO: 142914 - DNA, 122 bp, Homo sapiens
cagccatggcacctctgcagcctgggtaccctgcttggtgcatggccccttatagctgggcggggcgtgggggctctgtaggagtggcagcgacctcagtgtttgtctttgctctgaagagc

SEQ ID NO: 142915 - DNA, 122 bp, Homo sapiens
tgacgtctgtgcggggctcggaagatggctgcggagccgagcaccgggcagtggctgcggcggcggcggcggcggcgggccgggagcgcggcgggcgggggctccgccttgcgcgtggggcg

SEQ ID NO: 142916 - DNA, 122 bp, Homo sapiens
gggccaggccgcccacagagcgctttaacagagcgcttcaagggcccacaaggccggctacgcaaaccctttcaagctggctgggaagaggccggcgcagccccacccccgcaagtcacatg

SEQ ID NO: 142917 - DNA, 122 bp, Homo sapiens
cccggcagacggggcgggcggggcctaggggcggggcttgggggccggggcggggccttacggggagggcggggcttgggggcagaggcgggggccttacggggagggcggggcttaggggc

SEQ ID NO: 142918 - DNA, 122 bp, Homo sapiens
gccgcctttatgagctgtaacacacaccacgaaagtctgcagcttcactcctgaggccagcgagaccacgaacccaccagaaggaacaaacaactccagacacgccgcctttaagagctgta

SEQ ID NO: 142919 - DNA, 122 bp, Homo sapiens
gcgagccactcacgcatccggaggaaaatacctgggtgcatccccggcgagggcggctggcggagggcagaggtggaacacgctcccaccgagataacccgtcctgctatccttttcttaaa

SEQ ID NO: 142920 - DNA, 122 bp, Homo sapiens
tccagctccaactcccggggccctagtgataggaagctggagcccagagctccctcagggcgcgcagaaaagccaggggtgggggtgggggagcttcaaaaccgttagctcgcgttttttcc

SEQ ID NO: 142921 - DNA, 122 bp, Homo sapiens
aaaggatggatttgttgtcccaggcccagggtcttactggcatttggtgctgggacagagcgggcaggatgcacaatgtcccgcaccaaacaggctacataatgagtcatctccaaaaaatg

SEQ ID NO: 142922 - DNA, 122 bp, Homo sapiens
ggtggagggggcgggggtaagcagcctgtagtgttagcggtggctgggaccgaatgcgcgcgcgcggtgctcgaggcggaggggaggaggcggggaaggcgaaaggaggggttcggaggaga

SEQ ID NO: 142923 - DNA, 122 bp, Homo sapiens
cggctcctgtcactagggttgctcagtcaaaatggcggcccttgcccgtgacgttgcgaccgccccttcctatgagagccagtgggagtgaggtagatagggcaatgacgtaacgatctacc

SEQ ID NO: 142924 - DNA, 122 bp, Homo sapiens
gtgagttggaggctctgtgcatgcagtggagccagcagagcccacacagactggcgagcccgtggacttcagacatgtatgtggaccagctgatttgcttcagggaaaggggccctgggtac

SEQ ID NO: 142925 - DNA, 122 bp, Homo sapiens
tcctcttcccccgaacctgcccctgcctcccccgcccgcccattggccccacgcccgacgcgtcagtggaggcccaggaccaatccacagcgacctgcacgttcagagcccgccccaccctc

SEQ ID NO: 142926 - DNA, 122 bp, Homo sapiens
tttaaaggggcggagcgaggcggggctctggccatataaacagagggacgcacgcccatgcggctgtagacgccatgatggatgtgtctggtgtgggtttcccaagcaaggttccttggaag

SEQ ID NO: 142927 - DNA, 122 bp, Homo sapiens
aggaattctcacctcctagagcctggcagacagcagtcatgtggcgcgttagccaattaccgggaaagcttcctgtgcccggacggaatctgcttccaggagctgggggagaggaggctgca

SEQ ID NO: 142928 - DNA, 122 bp, Homo sapiens
tcccaaggcctaaaataggcaggcactggctcaaggccacacagtcaaggccccagggttcgtccgcctcgggctcctgtcaccctcgggtagaaggtggcccaaggctgaagaccgaggtc

SEQ ID NO: 142929 - DNA, 122 bp, Homo sapiens
ccagctggcttcacgtagtggatcctgcactggggtcgcaggcggagctgcccgctagtccggcaccttgcgcccgcacttctcagccattgggcagttaatgggaccggcgccgcggagca

SEQ ID NO: 142930 - DNA, 122 bp, Homo sapiens
ggaagtcggccccacctcctcctgatgtcacggaaatgaagggcttcgcagaggatgtcccgcccgctcccttcagacgggcgtagctggcaccttcctgagatatgcctgcttgcccccga

SEQ ID NO: 142931 - DNA, 122 bp, Homo sapiens
caaggaggcaggctcctgcatgggggctacaggaagagcccagagctggggtctggcttccgccctgcccctgccctctgtggggccttacacttctgctctgggtctcagtttccccagct

SEQ ID NO: 142932 - DNA, 122 bp, Homo sapiens
cgcagtggcgtcggctcttctcccttgctctactgcggctggtggagggggcgggactgtcgacctgattcatccaagacacaatttgaggatgctggtgctgcgccggccggacgcactcc

SEQ ID NO: 142933 - DNA, 122 bp, Homo sapiens
tcgttccatcctataatgcttggtagtaaagaaatagcagaatactggagcatttgtccacggaagtgaatatttcagttagataaccttaaaagaactttggtttttttcttcattttatt

SEQ ID NO: 142934 - DNA, 122 bp, Homo sapiens
caccacttcagggacctgtaagcatggcagcagctctgagtgagggtcagtgattccagccgaggtgcagagactttttaatagcattccctaaagtgtagttacactgaaaaattgttccc

SEQ ID NO: 142935 - DNA, 122 bp, Homo sapiens
gaccccgcccctagccacttgggcgccgcttcctcgggcaggttcgcagttcatctcccacgggtctacagcttgaaacttggcattcattataatgtttcgtggctgctgataacctacag

SEQ ID NO: 142936 - DNA, 122 bp, Homo sapiens
ttctgagggaggcttcaggggattacagacggtctcaagagggaggcccagccagtcccgcggcccctgacaccccatcaggccgctcaggcccagcagctccatggaggacgccggcgagg

SEQ ID NO: 142937 - DNA, 122 bp, Homo sapiens
aagttttttgaccaatgtcaccttttcctagttttttcctcagcatctttggcccatgtgcgctatcctcagccatagagtaccactctaggtttttcaaatggggcattcttattctctct

SEQ ID NO: 142938 - DNA, 122 bp, Homo sapiens
cccccatccccaaaataaaactgccaaacgaagaaagcccaacagccccggcgcacccagcgcaccttcctccggggcacgctctgcgccacctaccggatgatgctgaggaactgggtcat

SEQ ID NO: 142939 - DNA, 122 bp, Homo sapiens
ctgcggcgatgggcgggctaggggcggggcgcgggtgggctctaaaagtcggtgcccactcgctccgcgctgccgcggcaaccagcacaccccggcacctcctctgcggcagctgcgcctcg

SEQ ID NO: 142940 - DNA, 122 bp, Homo sapiens
agaccacctaccatgagccttggccttcaagttgaacactttctgttgtgcaaacatgtccgctgcctcccctctatccaggccatgcccaagcagctcctttatcctggtgctgtgatttc

SEQ ID NO: 142941 - DNA, 122 bp, Homo sapiens
aacaatctggaattaacgataacacccggcacacaaacggcaatatgtacacccacccagcggtgtgcggccggtgactctaccaggtaacgaactcaccgctccctggtttcaaaggcgta

SEQ ID NO: 142942 - DNA, 122 bp, Homo sapiens
caaaagaaggtctccgcgctggttctcaagggcgaggagacgcatcccttcttgacagtgcgcctccagactggcattaaggagaggactagggaatgggatcacctatcgtcaagtcactt

SEQ ID NO: 142943 - DNA, 122 bp, Homo sapiens
ggtggggccctgtagctgaaggagagaaaggggagtcggggaagagaacatgagctacagcgaggtgggtgtccccctgtcacaggaaaagaaaaatatccaggtatctgttaagaaacctc

SEQ ID NO: 142944 - DNA, 122 bp, Homo sapiens
ctcggtagttctcaggagagacgtgcgagaccgacagttgacgcccgggaaataaaaacacggggggagggggcgtggaccctgcgccagggttcgctggcgcacaggtgtgttcaatgact

SEQ ID NO: 142945 - DNA, 122 bp, Homo sapiens
gacagatgcgcagggagctggggaaagagaaggcctcgctcagtgcgccccgggcccacacgcagcccctgacttggagaaaggcggctccgcccagcgcttttctgaggatactggagttt

SEQ ID NO: 142946 - DNA, 122 bp, Homo sapiens
cgcccccccacctccccccacgaccccccccacctccgagcgggttctgtgcccaggtggcgctggagaaaggaacagcggaccccgcccaagtcattactaatgtagcaatcgtctgcata

SEQ ID NO: 142947 - DNA, 122 bp, Homo sapiens
ctgggctctagccctgcccctcatctggatcccgtttctctgagagcacacgcactcccccgtgtgaaacggatcacgacgcagccttctggggtcaggcttccctggtcttgtatctgcta

SEQ ID NO: 142948 - DNA, 122 bp, Homo sapiens
cgcagccaatccctggaaaggagggcgtggctatatcggccccgtggatccctccgcccgcgcttgttgtgctgaggccgagggagtcgccattttggatggtgaaccctgaagtcggtgtc

SEQ ID NO: 142949 - DNA, 122 bp, Homo sapiens
cagtggtgcaatcatatctcactacatccttgatctcctgggctcaagcgatcttcccaccgcagcctcccaagtagccaagagtacaggttcatgccatcacaccccgctcattttgtatt

SEQ ID NO: 142950 - DNA, 122 bp, Homo sapiens
tcccgcagtcctctctttactttcagttaatctgactgggctctggcctctagatggcctcggaaacagccagaggaggtggtgccagtctgaaatgtcccagactgttatgggtttggccc

SEQ ID NO: 142951 - DNA, 122 bp, Homo sapiens
ttcagcagggaacaagtgttttggacgagggtgtctctgaaatcccttccacctgcaccccgcccccactgcctcctcccagctcgggcctccgggtctccagttgggccctcatgttgctc

SEQ ID NO: 142952 - DNA, 122 bp, Homo sapiens
cgcccctcagcacacactccgcacccggccctgcaggaagctcgcgctgattgacagctgcgttgtcccaaaaaggctcagcgaagatgctgatctgcgggtgggtctagacgcgcggcagg

SEQ ID NO: 142953 - DNA, 122 bp, Homo sapiens
agcaagctcttcaagcagcccagccacctgcagacgcacctgctgacgcaccagggcacccggccccacaagtgccaggtatgccacaaggccttcacgcagaccagccacctcaagcgcca

SEQ ID NO: 142954 - DNA, 122 bp, Homo sapiens
gaaggacgtcgtgtgggtcgtccttaccctgaatttaatgaagtcaggggctgaaaacggcggtgtaatcattaaactgtaagacctaggagctgcttccctccctgatttctattcctcag

SEQ ID NO: 142955 - DNA, 122 bp, Homo sapiens
cccagagctgcacgtctgactcacttgatgatcttgccaccttgctcatgagccaaatgccgtctttatcataagaaaaaatgggctgtctgtagttaagaaaaacagtagttaggaaaaca

SEQ ID NO: 142956 - DNA, 122 bp, Homo sapiens
ccaattgtattgaattttaatctcccctcaactcttcaatggaagttgctgcaggataaccgaggcatgtggctattgtcaaggcttcgcgacaatgactgggagagggagacttccattgc

SEQ ID NO: 142957 - DNA, 122 bp, Homo sapiens
ggcaggggacagcagccggacgcctgggtcacgggcagtggcgtgcgcttgctcctctcccggctgccaaggaggctgcttccatgccccgcagccagctcctgtctggctgtgcagcgcgt

SEQ ID NO: 142958 - DNA, 122 bp, Homo sapiens
tacacagctgcgacctggacccggaccggagcctcttcgcgcggggatgaacataccctacgatggcgccagttacctcgtcctaaaccaggaactgctctcttggaccgcagcggaaaagg

SEQ ID NO: 142959 - DNA, 122 bp, Homo sapiens
ctgcctgcagaaactacagcgatatctgaaatccggggtggccatcaggagaacaggtaccgaccctggccaggggctctactgttcccgcaattctgctagagttgcctcgcctcccagct

SEQ ID NO: 142960 - DNA, 122 bp, Homo sapiens
gccttcaccaactttccaccctcaagctgaagggattccagctcagacacacggagctgacgggcagcagatagcacatcctgggcttcttcttgagatacttccatttctgaggtatacaa

SEQ ID NO: 142961 - DNA, 122 bp, Homo sapiens
ctagaggggaagggcggtgcgggaccacgtgactggggttgcggcatttctggcccaatccgagacggtttcgtagagcgccctgtagagcaattcgggttgcccgggtcctttccgagtct

SEQ ID NO: 142962 - DNA, 122 bp, Homo sapiens
gggctgctttcgccatccctcccacagggacggggtgtgcatggtgcggggaggtggtgccgaataccttgcacaaacgacacctgttcctcgacgctaaagtttcctgaggcctcccctgt

SEQ ID NO: 142963 - DNA, 122 bp, Homo sapiens
agctccccccacggccccctgctcaggggcagcgagaaggcgggggcttcgcgccacgtgcgccccactcctcgggaaaccagccctgatctgccaccaaagggcagcccgaggtggagggg

SEQ ID NO: 142964 - DNA, 122 bp, Homo sapiens
tcctaaccccgcatgcttacgcctgagtcgcgatgtctagcgcccttctcagagtccctccggatgggctcgcacatggcttgccacaagaagggagagaacttgtcagtcagccctaggag

SEQ ID NO: 142965 - DNA, 122 bp, Homo sapiens
cccatctggtccgccgagcaggtaagacaccagcgcccaaggttagacggcaggaagacccgactttgggggtttgcgattcttacgaggcggggggctcgtaagagctacagctgccagac

SEQ ID NO: 142966 - DNA, 122 bp, Homo sapiens
cggtggggcaaaaagccgcggcggcgggtgggtggcagaaagccgcggcgggcaaaaagccgcgggggcagggtggaaaaagccaaggcggtgataaagccgcggcggcggggggggggggg

SEQ ID NO: 142967 - DNA, 122 bp, Homo sapiens
ctgcttatacttccccaggagttgacagcccagcttcttcttctggaagacatccttacccgaggtgtcagggccgtaggtcacgtccacatggcccacgtggtacttgctgcacaggcggc

SEQ ID NO: 142968 - DNA, 122 bp, Homo sapiens
acccacacctagaggggggcgcccgggcagccgcgggcgagcttctcgctcgcgcagcgtcgcctacaggcctttatcctgaccgttagagaagaacccaaacctctgccgacaaaaagcaa

SEQ ID NO: 142969 - DNA, 122 bp, Homo sapiens
ggaatggaaagcaagccaagacttttcagggtggctcttgttgttgtcttaaacctttcccgtaataactagctaccctgtcctttgaaagcctacatgccccacggtttaactttcactga

SEQ ID NO: 142970 - DNA, 122 bp, Homo sapiens
tacacggtaggcgcgggccgcgggcggacagggccccgcgagccaggcctgcggctgctgcgcccaggaaacacccttggccgccgccgccttggcgcagggggtcccctcgttttctctcc

SEQ ID NO: 142971 - DNA, 122 bp, Homo sapiens
tttatagacaaaagggaaatggcataccgaaatcggaagtgaggtacagaaacaactcagcgtttgccttgtttgaacacagtttgaacatttggcagtgcctgagttgttgaagtttggcc

SEQ ID NO: 142972 - DNA, 122 bp, Homo sapiens
cggcagctgtggagagcttcgtgaccaagcaactggacctgctggagcttgagagagacgcggaggtggaggagcgcaggtacgggaggccgccggcgccgctccctcgcggtcggtcccgc

SEQ ID NO: 142973 - DNA, 122 bp, Homo sapiens
acattgcattcctggtctgtgactggccacctccgaggccagatgggttccagggggaaacgaatgcgtgccaaattctccatgtttcttaaactcacctcccatctcccaaccccccgttt

SEQ ID NO: 142974 - DNA, 122 bp, Homo sapiens
gcatgaggacgtggcacgcaagatgttccgacagctctcctccgccgtcaagtactgccacgacctggacatcgtccaccgggacctcaagtgcgagaaccttctcctcgacaaggacttca

SEQ ID NO: 142975 - DNA, 122 bp, Homo sapiens
ccggcgcagctcctacaggcgtctaggagttggtgggagaggcgctgctctggcacctcgcggtctcaggagtggggctcagcgcagagcgggcggcagtgaggagctcagggcccgagttc

SEQ ID NO: 142976 - DNA, 122 bp, Homo sapiens
aaaaaagaaaacccagcctactgaagagctatcagcataattagcatctgcctaagctgccgattttctgcaggatgagctgccagctcaccacagtgcggcactgagcaccagagagttcc

SEQ ID NO: 142977 - DNA, 122 bp, Homo sapiens
attgctgggcctgaatgcaaagcagataaagtcccctctgtgcatgtgcatgtgtggggacgtgtcacatgcatgcgtgcatatacattttgctgtaatgtgttcttcacatctggggatat

SEQ ID NO: 142978 - DNA, 122 bp, Homo sapiens
gtgtgagtgaagattagagggtcacatataactggctgttttctgttcttgtttatccagcgtaggaagaaggaaaagaaaatctttgctcctctgccccattcactatttaccaattggga

SEQ ID NO: 142979 - DNA, 122 bp, Homo sapiens
ctgggaactccagggactgagggagcactgcagctgtgggaccggcgcatagctaaaagccggcgggccatagggccccgcggaggaggccccagcaggcggaccaggaggccgaagcctcc

SEQ ID NO: 142980 - DNA, 122 bp, Homo sapiens
ggatgccagcagcaaatcccctgcaggtgcatcaactgaaaatacctccagatattgatccggggaaacaaaatcagctctagtgtggaatgcctgacttggaataatgactggtcacctca

SEQ ID NO: 142981 - DNA, 122 bp, Homo sapiens
ttatcaaaaacgagctcatggtcattaatttgtgaagtgcaaaaatactaatttttctcgcgttgtcgttttttctgggcttgccgaggcccctccccctcctgcctcgcttcccatccccc

SEQ ID NO: 142982 - DNA, 122 bp, Homo sapiens
gttagaggcatgcctatggacattaattacacttaactggacactaataaattaagtttacgctcagcttaagccaggtgtaacattcaactaaagcaaaagatctcagaagttgagagggg

SEQ ID NO: 142983 - DNA, 122 bp, Homo sapiens
cgcagcgacaggctgggccacaggcttggccgagcccactaagaaagcagcagctgcaagcgaacagggaggggtcaccgcctgcgcgccggggtccccagaaggcaggtccaggacgcgcc

SEQ ID NO: 142984 - DNA, 122 bp, Homo sapiens
gatgcgttctgttttgaggttagtgatgatgatggagagcggctcccgaggacgagagctcgtgatggagagtgcctctttatgcccgatgtgaatgtggctactcagctttctctctctct

SEQ ID NO: 142985 - DNA, 122 bp, Homo sapiens
ctctacccaagcagtaccaagccaactctgcagagcaagccctctgtggacagtctgtaacgagcctctaaaactgactcccagcaagaaaatgaaggaaaagacatctggattggaaatga

SEQ ID NO: 142986 - DNA, 122 bp, Homo sapiens
atcctccattccccaccctcccgttttcccgtcccgcagacggagccggtccccagccgccgccagtctccggcctcggatgttgacacaaacccgaggcggtttacactgagcgggtctgg

SEQ ID NO: 142987 - DNA, 122 bp, Homo sapiens
gacgggaggtgcagcagacaaggctccgggcgggtgctggggtgtctggaggggtccccgcgggggggtcgggttgggtggggagtctaggtgagtcgggggtccccgggggcgctgggttc

SEQ ID NO: 142988 - DNA, 122 bp, Homo sapiens
tgaactcttgttatcagttggccactccacaccacctgtccagccacctgttggagggaacgctaggtcctccctttggctgtcacttgtccatctgcagcaggcgaggactgtggccttgg

SEQ ID NO: 142989 - DNA, 122 bp, Homo sapiens
aaaaattggaaacctagtcattcatcgatagaggaaagacaagatatactatggtacattcgcattttgaaatactgtgcagctcttgagcaagataaatctgcgtgaaaagatcaagataa

SEQ ID NO: 142990 - DNA, 122 bp, Homo sapiens
cagcccagggccggcctcgtcaggggccttgcctcagacggcagcggggcctgctatgctcgctgtcttctgcgtggtatgtatttggaggagcacacggtttataaccgtgcagtgcggtg

SEQ ID NO: 142991 - DNA, 122 bp, Homo sapiens
cgtctgtgcctctgcccgggcggctctgcactttcctacctcccgcctgagagggagctccgcccctggggcagtctctgccctccagtgccggctgctcttcccgagaatggagtgggcgc

SEQ ID NO: 142992 - DNA, 122 bp, Homo sapiens
tccacccgcgggctgcggtgcgagcaggtggccccgttcccctcctcccgcgcccgcccccgcctctgtgattgggtggaagatggtgctggccggatgtaaatcctaatgacagtctccaa

SEQ ID NO: 142993 - DNA, 122 bp, Homo sapiens
caacgaagcggaacacgtgacaccaccctatccacttccggcttggagggcatgccctcccgtcaccagcatgcactttcgacaaaaccgtggaatctagtattttcctctgacacctttat

SEQ ID NO: 142994 - DNA, 122 bp, Homo sapiens
cgcctacattctgcggggagatgatgattccctctccgacaagcatggctgcccggcttacgtaagcccagagatcttgaacaccagtggcagctactcgggcaaagcagccgacgtgtgga

SEQ ID NO: 142995 - DNA, 122 bp, Homo sapiens
gacggttctgttcctttgcaagggtggcccctaggcctggacaaggctgaggtgagagtccggctggggctcagcagaagcctgtgaatgactccggttgtgctctcacaccaagacaaaga

SEQ ID NO: 142996 - DNA, 122 bp, Homo sapiens
ccatctcgggtcagtttctttccctgcacaaaatctttcttggtgaaggctcacaggctgcgtcctcggaaggacacagaacggaagcttcatgaacctccgtggatctacggggacggatg

SEQ ID NO: 142997 - DNA, 122 bp, Homo sapiens
aagcacaaaaggaaatatgccaaaatgttaaaaatgattacttgaatttatgtgttcattcgacatttactgagcaacaattatgtgctggcctctgtgctaagtgttggggatacagtaat

SEQ ID NO: 142998 - DNA, 122 bp, Homo sapiens
tctctgaccattaatccagcagaggaaagtgatctaacacagcaccatgacatgaagggacggaccctgagagcctgtctctctatgatgactgttcttgtgcatccaggcagcctattgaa

SEQ ID NO: 142999 - DNA, 122 bp, Homo sapiens
gattacaggcgtgagccaccgcgcccagccagaacactgacacttctcataacaaatgaacgcgatttatgtatatctaagccagggcacattggacgtcggtatcctggacatcagcatcc

SEQ ID NO: 143000 - DNA, 122 bp, Homo sapiens
gtcaaggggcagaacttgggtgatggcgctgacttgaagcagcaatagtttaataactgacgttctcacgcacttatctctgcaaataccccacaaaagccctgaacccagaatgaaactta

SEQ ID NO: 143001 - DNA, 122 bp, Homo sapiens
gggggcggcggagagcgtggcgtgggccatggggctcagcagacgcgtcgggaagctgtgcgagaagcgggagagctggcggggaggtgcctgcgacccgggctgtgtggctccccaagatc

SEQ ID NO: 143002 - DNA, 122 bp, Homo sapiens
gcgtctgagggcagggaacaaatttattcatcgtaatcgagcccagcactttgtctcgcacgcagctgacagcagaattttaagataaagtattaaataaatgacagacctctcaaggcttc

SEQ ID NO: 143003 - DNA, 122 bp, Homo sapiens
ctcccttcctcagggaccccctccacactcagtagtcctcgccagcctcagagaggtttccgccacgcctgccacccgcctgggccgtgttacccacgtgttttgtcttcataacgtgggtg

SEQ ID NO: 143004 - DNA, 122 bp, Homo sapiens
ccctgctttgtgccgggttgtggggctagagcaatgacccaaccagacatctctactctccggacttacctcctggtggtcctggtagtactcagttgtacagcctccatccaccaccccag

SEQ ID NO: 143005 - DNA, 122 bp, Homo sapiens
aataaaatataggaatagctcttggcgaaaatgtttgccgtgcgagcaggaagccgtgagcgccctagttggaggctgctctgcgccgactaagaggcctctactcccaggcctggcctcta

SEQ ID NO: 143006 - DNA, 122 bp, Homo sapiens
tgagcactgcccgggcaataaagccataggagagaaggatgagagccaggggcaccaacacgaagaaggccaccagcacagccagtatggtgtcattcacagcggtgtcagcacacgacagc

SEQ ID NO: 143007 - DNA, 122 bp, Homo sapiens
ctccccggccggcactaacccccatggccgcgcttcagtctcaggctggctcgaaggcggcggccgagcccatccatggcccctggagtgcccggctcccgctcccagctccgcgctggccc

SEQ ID NO: 143008 - DNA, 122 bp, Homo sapiens
tgatgagccaattagttgagcttaactttgtttagcctccttgcccttcagtgttccacccgttcagaacctgtgcaccaggagctccccatccggttcccgctccctcctcctcagttctt

SEQ ID NO: 143009 - DNA, 122 bp, Homo sapiens
cggggcccggcttattcccgaacacatgtggggacctgaaaggggcgtcggggactaacccgcccaaaccgtggcaaacactctgggaggccgacttgggcttggcctgtggcccgacacac

SEQ ID NO: 143010 - DNA, 122 bp, Homo sapiens
gttgtccttccggctagcttctcttgacttcctggcagcccaaggctgcccagaccgggacggaaactccgaggcaactcctcacttgtcggaggtcctgcgtatgcgacccatttccgcac

SEQ ID NO: 143011 - DNA, 122 bp, Homo sapiens
aaccaccttccagaggcaacacaactgcgtataatgccggagttgcctgtggtagagtgacggatgtcttgggtgacttggcagcagcaggccggtgggcgcggccgtcacagacatggtct

SEQ ID NO: 143012 - DNA, 122 bp, Homo sapiens
tgcgtggccggggctgtctgagatttccccaggtcggtggttatgaccgcaggatggaatcgtagaggtcgggtgatttggtcagtagagaggaacatttgcgaggttctctctgaattaca

SEQ ID NO: 143013 - DNA, 122 bp, Homo sapiens
gtgagtcttccgatgcccaagcctcaccccagaccgatgaaatcagaatctctggagacccgacccagacattggtgggttttagggctcctggctgattccagtgggcaaccgggctacca

SEQ ID NO: 143014 - DNA, 122 bp, Homo sapiens
acacctacttgtggggctgaggctgcagctggccagcagcagggcaacagccagagggagcgtgccgcggtccatgctgtccacgtgggggcctgtgcgctgggccttatcctgtgtccagt

SEQ ID NO: 143015 - DNA, 122 bp, Homo sapiens
gctgcgccgttctaaaaggcactcgcttttctgtctcgcatccgcggcaggcacatttcacgggggaagaactctgcctatgaatctctctggaaagccaaagcaacgccttctccactgta

SEQ ID NO: 143016 - DNA, 122 bp, Homo sapiens
gcagctgaagacggtcaacaactacttcctcttaagcctggcctgtgccgatctgattatcggggtcatttcaatgaatctgtttacgacctacatcatcatgaatcgatgggccttaggga

SEQ ID NO: 143017 - DNA, 122 bp, Homo sapiens
gcactccaccctgggtgacagatgacaccctgtctcagaaacaaaaacagaaaaaccacacggctggatgggaggagagatgaaggagccataaactgaattctgttaatcacccagaaagg

SEQ ID NO: 143018 - DNA, 122 bp, Homo sapiens
ttccagagctccggcagtcactagtacgcacctctgtggaagcacctctgttttgttccccggtttatccccagttccaagcgcaatgcctggtgcatatcagggcagtgttggttcaactg

SEQ ID NO: 143019 - DNA, 122 bp, Homo sapiens
cggggcacgcaaacgagcgacattggcgtgtccagccggcaggtcagaggatagcagagacgtagggaggtcagctgagtagggggcgagaggatggtctccggagccagcctggctttttt

SEQ ID NO: 143020 - DNA, 122 bp, Homo sapiens
gcgacttcggccgcactggggccgacacagcaatcggtgccgcctccgccgccaccgcctcggtcacctctactgccgccgccgccgccgccgctccgccagctctcacctcgtctcgcgat

SEQ ID NO: 143021 - DNA, 122 bp, Homo sapiens
cccggggccaagtccctgcctgcctcccggcagcccgcgtgcagcccagttcctccctcacggtggcctgttgatgcccaacgcatgcctctgacaccctgtccagaggcatgagtccctgc

SEQ ID NO: 143022 - DNA, 122 bp, Homo sapiens
cccagctctgcagcccccatcctgtccttagcctttgggatggctctgggtgaggatgtacgacagagggcagcctcacagctcctgtgcaggggactgcagagtcagcaaggagaaacgcc

SEQ ID NO: 143023 - DNA, 122 bp, Homo sapiens
cctgtggtgatcgaggaggagctgtctggcctcctctaacacgggctgaaccaagcctgacgaggcctgaaggactgtcacagggagggctgccggatggggctttcacaacctggacacct

SEQ ID NO: 143024 - DNA, 122 bp, Homo sapiens
ctcccagacggggtggcggtcggtcagagacactcctcagttcccagacggggtcgaggccgggcagaggcgctcctcacatcccagacggggcggcggggcagaggcactccccacatctc

SEQ ID NO: 143025 - DNA, 122 bp, Homo sapiens
acaaggatcaggcctgggaggcccagggttttcagacctaggggatctggtcccagggggcgggccaggttggcaggggagcccaggtgcccaggttctaggggcggagcctaaagactggg

SEQ ID NO: 143026 - DNA, 122 bp, Homo sapiens
tctgcagggaggggaggggagacgtgagcggggcgggtggcaaaccaaaccctacagtcccgggttcaaacccaagctgggagcagagctggggacacccgggaacctgagactgcgctcca

SEQ ID NO: 143027 - DNA, 122 bp, Homo sapiens
ccactgttcatctcctgctgtgcagcccatttcctaactggccacaaaccaatagtggtccgtggcctggggattgggcgcccctgctcttggggatccctggtagcagggaagaaacagag

SEQ ID NO: 143028 - DNA, 122 bp, Homo sapiens
taaacccccggctcagatggagctatgccagatgctgccttaagccgtatgaggtcgccacggaacagtaggtgagggccctctcgaattccgtagctttcacggtggagctacaaactgga

SEQ ID NO: 143029 - DNA, 122 bp, Homo sapiens
acaaatcaattattctcgaccttgataaataattcatttaagcctgtttttgttttgttccgacgcctaaaatgactcaagagctcaaaaggctgatcgcacagcttgtgttgggcggttcg

SEQ ID NO: 143030 - DNA, 122 bp, Homo sapiens
aatccaaacccacctggagcagatgctcctcttctacaaacgccgaggctgcaatgagagcgcatgcgcctttcccaggactcattcacgtgactggaagtggctgggttctgatttgctcg

SEQ ID NO: 143031 - DNA, 122 bp, Homo sapiens
taattctggtacagggaaaagagtgtgacagtgtcttagggagtggggtggactgagaaacgtagaaaggtagtttgctaataatatgtctgtcccatcaagaacaaactctctactcccat

SEQ ID NO: 143032 - DNA, 122 bp, Homo sapiens
gtcctggggccgcggggctgcgctgggctcgggcggggacagcatgcaatggaggctctgcgagggccgcagccgtcggcttccggggttgggggtcggggggcagcagcctggggctggcg

SEQ ID NO: 143033 - DNA, 122 bp, Homo sapiens
gagggttagacctttgccaggtagcgctcaaaatccgctaagactactcccaccgaaactcggtagcgcagttgtctttccgcagctgcttcagccagccccagcaagcccgagcgcccggc

SEQ ID NO: 143034 - DNA, 122 bp, Homo sapiens
ctttaggcggtcaggtgttaggaccggagtacaagccgccagccgcgcgggagcaggccccgaggcagcccagccgcggggcagtaacctttagccacacttggcctccggccgccgccaga

SEQ ID NO: 143035 - DNA, 122 bp, Homo sapiens
gagtgcagtggtgcaatctcggctcactgcaacctccgcctcccgggttcaagtaattctcgtgccttacccttcggagtagctaggagtacaggcacgtgccaccacgccctgctaatttt

SEQ ID NO: 143036 - DNA, 122 bp, Homo sapiens
aaagcgaggatgcatatactcggaagctttttaaaactctgtgatagcatcacccctcttcgtagaaacctctacggtggcagagtatacttagaaaagttaactatggaaggctgtagagt

SEQ ID NO: 143037 - DNA, 122 bp, Homo sapiens
gatgccaccccttatgcagagatgttttttgttctgcgatggggagctaaacacccctctcgcctgttcttcacatcctcctacaacccgaggcttcctagtgcagcttcatgctgtccatg

SEQ ID NO: 143038 - DNA, 122 bp, Homo sapiens
atacctacaaaggaacagtgcttggaaaggaattccaaatgctgctttttccttagttcacgcacattgctaacacctgggatggaagctgctactcccggttcctggggttcatgacaaaa

SEQ ID NO: 143039 - DNA, 122 bp, Homo sapiens
gtgctctaaccattgtctgtgttcaactcccaagctacagacgggccccctccttgggagcgccagggatgttggcgccctggagccccagacagggagagactcagagggccctcaccctg

SEQ ID NO: 143040 - DNA, 122 bp, Homo sapiens
tttcctggctctgggtccttctccctttttcttatagacacacctctctatagggtgtgtcgtgttggcattggtaacagggcagagcttcagcactcagaagctgcctgagaaatggggag

SEQ ID NO: 143041 - DNA, 122 bp, Homo sapiens
accaatttaaaccttttactgttgtttgaaagtgaaatggaaacccaagctcttctggcacgaagattggcatccagtgtgactgtcctctgggcaatgcaaaacatttgctccctgcatca

SEQ ID NO: 143042 - DNA, 122 bp, Homo sapiens
agggaggggtccagcaactctcaccacagggccacccctcccccaaccagccgggagccccgagggcagaagtgtgccctgtgaccacaggcagagatgtgcagccagcaccaaagctctga

SEQ ID NO: 143043 - DNA, 122 bp, Homo sapiens
taaaatagctgaagtagtcacagctgttggtggattcagggccggaggtcgcatgcatcacggttgctcccacctctcccctgggatccggaagagccacaaagcatctcacggtgtctttt

SEQ ID NO: 143044 - DNA, 122 bp, Homo sapiens
gtcccagggcaggctcatgacaggaagtgacccgttaaggaagcagcacatcgctgcattcggctggttttcagggtcttgttcccaatcagtttccagccaacaccagggtgtcctagtcc

SEQ ID NO: 143045 - DNA, 122 bp, Homo sapiens
gagacaggaggcctatgaggtgggagcagaggaggagtcaacttgaaaataatctgtcctcgttgatcttagtgggaaagtcagctgaagatgcctaaaaccgagaactcatgaaacacaag

SEQ ID NO: 143046 - DNA, 122 bp, Homo sapiens
aggagatgaggtctccgtcttgcacgctgctagatccctaggacctggggcagcccagttcgcagtgggcatctggtccctgagcatctgctggtcaggtgctgatgatgtaacagcaaaca

SEQ ID NO: 143047 - DNA, 122 bp, Homo sapiens
ataagcggaaggtgagtggtcagtggtcccgctgctccgcacggacacctgcatcttccccgactccagcttaggggagggcagcttggtggcgtggaatccttccatctcttgattttcat

SEQ ID NO: 143048 - DNA, 122 bp, Homo sapiens
tttcaaaaccatttcctctgttctctaggctgtcacaaattctctgcaccccaggagtgccgcttggacccccgggctcgctgcgtggtccatatctaggtcgggcctctcacggagacttt

SEQ ID NO: 143049 - DNA, 122 bp, Homo sapiens
ccgctccgcgcgtccccgcgccgctcgctcccgcgcgtccccgcgccgctcgctcccgcgcgccgcctcagcatcctcaggcccggcggcagcccccgcagtcgctgaagcggccgcgcccg

SEQ ID NO: 143050 - DNA, 122 bp, Homo sapiens
ggtggggtgtggccagtgctctgtgggggtggggctgaggctgggggcgtggcaggcacacgtgggggctgggccaggcccaccaacacctgctgacccttgactctgcgcagcttcccgag

SEQ ID NO: 143051 - DNA, 122 bp, Homo sapiens
tggaaggcaacaactcttcacagcgcttcccacatggtaccaaggagcccaaccctcacccggaaacctaaggcatgctgtagagcaacttcctgctgcaggcgctacggcaagtgaagagg

SEQ ID NO: 143052 - DNA, 122 bp, Homo sapiens
gcctggccgcccgccttggcgaacccaggtagggccgggcccctgccgctgccatcctcacgctggagagccgggcagggccgctactccagccagcagctgcccagctctgacccgcgcgc

SEQ ID NO: 143053 - DNA, 122 bp, Homo sapiens
gccttctgggagcagtagcccctccaggggaacagctcccaggttgcagacctgagcagtcgggccatagccaggcactggccagagggtgtgagcactgggtggcagggtgaccagtcagc

SEQ ID NO: 143054 - DNA, 122 bp, Homo sapiens
ccaccaccgtgttcggaagaaagttcgaatattttgttcgctttggttccggcaagccatcgcacaagccagaatctgtaactccaaacagtagcgctctcgagcaccgtcccgaacattca

SEQ ID NO: 143055 - DNA, 122 bp, Homo sapiens
catgctaaccaatgaatagagagtcctcaaatatgttcattttccaaactgcctggaaatcgtaaatactaacagacatatggcaaattatttataaaatgtgttgaaattaagtgacactg

SEQ ID NO: 143056 - DNA, 122 bp, Homo sapiens
acagggaaagctgtccacagaaacagcccctgacttcccagcttcttccccacacataaccgccaaactgactcctggtcctgatacagggtatcaggggaacaaacaaaaaggaaacaggg

SEQ ID NO: 143057 - DNA, 122 bp, Homo sapiens
acgtgccagttgcacagggaaaggtgaacacatcctgacctggtcctcgtcctcatggagcgtggaatccagtggatccagtggaggagaaagaaacaagaaaacaaaataaaacacatccc

SEQ ID NO: 143058 - DNA, 122 bp, Homo sapiens
gtgggaccttgggcgagtcgtcaaggctctctgaatattagtttcatcctttaaaaacctcggattatcacacctacttgataggctgacgtgagtgccacatgaggtcattcccacatagg

SEQ ID NO: 143059 - DNA, 122 bp, Homo sapiens
ggctgcccccggcccgggacacccaaacagaccaaagaggatccggagtggagcccggagcggatcccgcagcccgcgcccgccgcgcacttacccgcgcgcccgctgctgggtccccggca

SEQ ID NO: 143060 - DNA, 122 bp, Homo sapiens
agatagtggaatccactaccatgaggagtgtcaggaaaagatttacagaagaggcaacaccggtttgtgttggaagcaaagataagattcaacagggagagaagtaggccctgctccaaaca

SEQ ID NO: 143061 - DNA, 122 bp, Homo sapiens
cgggggagggcgcgtccggtttttctcaggggacgttgaaattatttttgtaacgggagtcgggagaggacggggcgtgccccgacgtgcgcgcgcgtcgtcctccccggcgctcctccaca

SEQ ID NO: 143062 - DNA, 122 bp, Homo sapiens
ggcttttcccggcccgcgggcctgggcgctccgggggagggagctccaagggcagggtggcgggggagccgcagctcctccacgttatggaagaaaggggaatgctagccccctgcgcctcc

SEQ ID NO: 143063 - DNA, 122 bp, Homo sapiens
tgaacttttccagagaagaatgtgtttaggtacagcatgtagtattagcaacagtacagacgttttcttatttaaccagtggttactaaaggatttcttagagtaggttccgttaggttacc

SEQ ID NO: 143064 - DNA, 122 bp, Homo sapiens
agtacagggcccagcactgcaggtgcctaattggtccctaccccttagcagaggccaggccgacctgaggagttgtctgtacattcaatcagcctagtccctactctgtaaatctcatatag

SEQ ID NO: 143065 - DNA, 122 bp, Homo sapiens
tgcgcccatgtgcgggacgaggaaggtgcaggtgaggctgccgtccccgaaggggcgtcacgccggcctcatgtcgtcctcgaaggggcgtcacgctggcctcatgttatccccgaaggggc

SEQ ID NO: 143066 - DNA, 122 bp, Homo sapiens
tccatgtggtgtttcttcctcatagcacagctgcttcagggtagtggatttttctcatggcgccatggagttgcaagaatgactattctaattaacaaagtggaaactatactgcctttcat

SEQ ID NO: 143067 - DNA, 122 bp, Homo sapiens
cctgccggcacccagcctctcacgtgcatgtgtggctgggatggccaggatgtctgcatgcgaccgggacaggccacctcccttggcatcaggcccaagagtgagaggcactgcccctcatg

SEQ ID NO: 143068 - DNA, 122 bp, Homo sapiens
tgcggcttgacacagggttggtacgtagcgtctgtcctgggcgttggtccaccgggattgcgtttatctggcgaccccatggagttcacaggctcggaaaaaccaatctaacgttgggctga

SEQ ID NO: 143069 - DNA, 122 bp, Homo sapiens
gagtgcctctgcccggccgccaccccatctgagaagtggggagcccctccgcccggccgccgccccctctggaaggtggggggcacccccgcccggcagccgccccatctgggaagtggggg

SEQ ID NO: 143070 - DNA, 122 bp, Homo sapiens
aaggagcatttaccagcagaagtgtggcatgctcggaagaggcatacccccttcctttcccgccaaacataaaatggacagtttggtagaggggaatttgttctttttaacaggacaatagc

SEQ ID NO: 143071 - DNA, 122 bp, Homo sapiens
ctggagaggcactgaagtgttgcaatagcatggctggccttaagtcccgaagtcagaacccgacttcctgaaatgagtccttggtttcatcaggttcaagtgctttgtttttagataaaaac

SEQ ID NO: 143072 - DNA, 122 bp, Homo sapiens
ggctgagttctacattgatgtgattgaagtccctccgcagggttcctctggggcccttcacgataactgtgcgtcccttcagagtaatgtcgactagaagagagaacacactcgtcaggcca

SEQ ID NO: 143073 - DNA, 122 bp, Homo sapiens
gagctagaatcgatcaatagatagatatcaggctggagggtagcagtctggtctgaaagccggtccgctagcattcataatctcagcgttcaacctgggcgtgcctctcatctctcccgtta

SEQ ID NO: 143074 - DNA, 122 bp, Homo sapiens
ggaagggctgccaccctcatggaaccagcaggcacctggagacccaggcgaggcagcacccggggacactcacccaccaccctggtgttgtagtagtcgggcagcatgcgctcgcacagggc

SEQ ID NO: 143075 - DNA, 122 bp, Homo sapiens
cttgtgtgaaaggcctgcacacttcaggtggatgtagaacaagccctcccgctggaggcgcgatcattcactgccccctagtggaccagatgtgcatgagccaggatccgtgcttccgcttt

SEQ ID NO: 143076 - DNA, 122 bp, Homo sapiens
cagagccgccaggcgtcccgccccactccgcccacacgcacggcccagcccagggttccccgggaccaccccagaccagccccggcccccccgggtcctccacactctgcaccccagaccaa

SEQ ID NO: 143077 - DNA, 122 bp, Homo sapiens
gttttaatgcactttagaaatgtaacctttaaataccagtcatgttcagagtatttctcccggaaaaatacatcatttctttaatggagtggcacttcccaaaatgacatgccatttaataa

SEQ ID NO: 143078 - DNA, 122 bp, Homo sapiens
taagagatgcatctcttcctgtgtcctcgggactaccattctgtaatgaaaaaacccactcgggcaccaagtcaggctcaaagctccctgggaggatttcacctcaggccagattgaaacct

SEQ ID NO: 143079 - DNA, 122 bp, Homo sapiens
ctagacgaaccctgggggtcggggcaccaagaggcattttctcagttgcttaattccccacgaactgcatggatgctcggcgatgccaagaggaggccagagtgggggcagaggcaggcatc

SEQ ID NO: 143080 - DNA, 122 bp, Homo sapiens
gattgacatatttggagattctcttgccaaatccaattggcagcttcataattatggaaacgtccatgttatttccactcaaccagggttagggctgctggtatctgattcaatgtttactt

SEQ ID NO: 143081 - DNA, 122 bp, Homo sapiens
caggacccagagcctgaagtcgtaatcaagagcagaacttcgccccagaactgaaggcctcggccctagatttagattccgccccagggttcaaggccgggttcctagacccagagtccatt

SEQ ID NO: 143082 - DNA, 122 bp, Homo sapiens
ccaaacctggcctatcttgtacacttaaaaacttactgaggggctgggtgcagtggctcacgcctgtaatcccagcactttgggaggctgaggtgggcggatcacttgaggtcaggagttcg

SEQ ID NO: 143083 - DNA, 122 bp, Homo sapiens
gatctaaggttgggacctacagcatcgcgtggggctgagcaggaagcggccagcccctcccgtgaggggctctctccaaaaccccaaacagccccttgaaggatccagcactactcagcctg

SEQ ID NO: 143084 - DNA, 122 bp, Homo sapiens
atccagtcagagaacacagccactacacagtcaccatgacaaacacacagaggaaaccttcgggcacacacacatacctgtgagccaacccagagacataagacatgccacccagaggcatg

SEQ ID NO: 143085 - DNA, 122 bp, Homo sapiens
gagaaaaggaaaaaatgccgtcgcgggcggggcagacccacgagcctgcacgcagccccgcgccgccccgccccgtccgcgcaaacacgcgacctcctcagctcccattggtttctgccagc

SEQ ID NO: 143086 - DNA, 122 bp, Homo sapiens
acgggaggcgtcccagagctctcccgggagaaaaacccagggagaagtggtggtaggaggcgcccggtcccgcaactcaccttctgctgcctccgggccatgtcggtgggctgcttggcgtt

SEQ ID NO: 143087 - DNA, 122 bp, Homo sapiens
gagaaaagcctgggaacaaacggggcgcctccgtctccaagagctctcccttgaacccggcggaacagcctattaaaggcttacttaattactttaatgactctggacaggctttaaaacgc

SEQ ID NO: 143088 - DNA, 122 bp, Homo sapiens
cgtgccaatggcccgctatgaggaggtgagcgtgtccggcttcgaggagttccaccgggccgtggaacagcacaatggcaagaccattttcgcctactttacgggttctaaggacgccgggg

SEQ ID NO: 143089 - DNA, 122 bp, Homo sapiens
aaactcttagtttgtaagtgagtgtgcctctgacctaacttggccagaaggcacctctcacgtttgttttctctaaataaatctgtcctgactggcgagccatcttttcatgtttcttacct

SEQ ID NO: 143090 - DNA, 122 bp, Homo sapiens
tctcttgggtttttcagaatacccagaaatccaggttccactctttctggttttcttgttcgtctacacagtcactgtagtggggaacttgggcatgataataatcatcagactcaattcaa

SEQ ID NO: 143091 - DNA, 122 bp, Homo sapiens
ccgcagtgcaatgctgccccctgccggcaaccgcgggaacgggccccaggcgctgccgcgcgagccgccccaggagggaggacctgtcccaaggataaccgcacctctacgtggtccggaag

SEQ ID NO: 143092 - DNA, 122 bp, Homo sapiens
ctggcgggcggcgcctctcaggcgggcgggcactgcggcccggcccaggatggggcgtcgcggtctctgcagatggaatcggtctcggagggaaaaaaccaataataggccccgagactgct

SEQ ID NO: 143093 - DNA, 122 bp, Homo sapiens
cgagcctcacagccccacttccggccaactgcccgctacttccgcctgctgcgcgagtgacggatgcggccgaggctcaaaagactctgtcagcgtttcccaaggacattttccactggagg

SEQ ID NO: 143094 - DNA, 122 bp, Homo sapiens
ccttcgctttctcaagcgtaaatcgggcggcgggggctgcagagccttcatctcttcctccgtcccgggatgtcggagagacggcagcccagcctccgccaccgcaaagctgcttaacgggc

SEQ ID NO: 143095 - DNA, 122 bp, Homo sapiens
cacggccacttggagtctctcctgaagctgctgccaggccccatcccgcgtggatcggtgcgcagaacagactggatcttggtgaaagcccgaggacacttctgagtcttgccccagccgcc

SEQ ID NO: 143096 - DNA, 122 bp, Homo sapiens
aacaagcgaaagttcgattatttgttcaataattttccgttgatcccttagtcttgtagtcgctactttataaccggtccctagaagggggcggttctttccggaaattatgactgcagctg

SEQ ID NO: 143097 - DNA, 122 bp, Homo sapiens
acaggagaccaggtggggagatgagggaggtggtctggaagggccatgagacacccctcacgctccctgagaccccctccacgctatagagatgggactggagaggacgatgatcatttgtg

SEQ ID NO: 143098 - DNA, 122 bp, Homo sapiens
caggagctggctggagcatgaggtggattctgtgctggagcctcaccctctgcctgatggcgcagacggccttgggtaagacccccaccccttcccgagagtgtcaggcaagacgggcacaa

SEQ ID NO: 143099 - DNA, 122 bp, Homo sapiens
ttagccactgtaagcactgctggggacacactgcagtcaagcgaagcgcaaagctggaaccgagagattgagatgagaccaagatgcagaagacgccaactgcagggtggtgagaagagcga

SEQ ID NO: 143100 - DNA, 122 bp, Homo sapiens
accgagctatgggcgaaaatgatccccgcggaccctggtccagaatgtacaggtcctgggcggtgtaagtggctgtgggtctgtggaggacattgggtaggaaaacgcttgcgtagttgagg

SEQ ID NO: 143101 - DNA, 122 bp, Homo sapiens
agccccggcgcgggagccggagcctgcaccgcccagagggggcgcagcgagcggccgggacggaggggaggggccctatccctgagctttgcttgcacctggtggcgccccagcctgctgcc

SEQ ID NO: 143102 - DNA, 122 bp, Homo sapiens
ttattccccagcatcttttctcagaagctgtcaccaccacttgcggaaccgcagcctcatcgtgagccattagcccagttgtttcccgtttcgcttttctttcctcagtttctccatgcaat

SEQ ID NO: 143103 - DNA, 122 bp, Homo sapiens
tgcgcggtcggtgtaccccgggcagctctgattcgcaaacgtgtgcaaaactagcaatggcgatcaacgagacttgctttgcacctaacgggactaaagagacggagacacctctttcatca

SEQ ID NO: 143104 - DNA, 122 bp, Homo sapiens
aaccagcctttccttttcctgggcgttggtactcagctctgttaggagggtatatattgccggggtgtggggggtgggggtgtggaagacacctgttgcttttttcttttggaagtggtgcg

SEQ ID NO: 143105 - DNA, 122 bp, Homo sapiens
cattcatacgagatagttgctcaatcagtgttggttgcctggatggcgctgatgggtgatcgcctgttctatagggtcatttctgaccaggtgaggaagacgtaccaaagcgaagatgtttt

SEQ ID NO: 143106 - DNA, 122 bp, Homo sapiens
cacagcccacgccattgctcccttacaggcaagtatgtgcagcttggagaggtgcagtgacgtgcctgaggtctacggccccaaatggcagatgaggggctcaattccaggcttgtctgtgg

SEQ ID NO: 143107 - DNA, 122 bp, Homo sapiens
aagctaaaaactgagccctcactcataacctgatatgtaatttcgaggagtatagatgaccgaccctggaggctctgttctgttgttttacgcaaatcttcattttctagaccaagccccac

SEQ ID NO: 143108 - DNA, 122 bp, Homo sapiens
cgaactcctgacctcaagtgatccaccagtcttggcctcccaaagtgctgggattacaggcgtgagccactgcacccagctgctaatttttgtgttttttatagagacggggtttcaccatg

SEQ ID NO: 143109 - DNA, 122 bp, Homo sapiens
ggatcccgagaggaagctggaggacgcttgggctcgttgtgaggcccgggagaagacaaccgaggtacccaccgagtctggtaaatatccctgtggggaatcctgcccgcggcctcccgaga

SEQ ID NO: 143110 - DNA, 122 bp, Homo sapiens
gggtatgcactggatccatttttaaactgagagaaggtgaaaggggtgactggttgatttcggataatacttttagagccacggggaactgtgaaagacaagaaaatgtaaaaaaagcacat

SEQ ID NO: 143111 - DNA, 122 bp, Homo sapiens
cagctagtgtcctcccacttgcttcctttccctgatccctcaccttggccagaggcaggacgatgaaggcacccccgcctccagcctccacaataatggccaggaatttggggttgacggca

SEQ ID NO: 143112 - DNA, 122 bp, Homo sapiens
aggagtccggccgcggtgtggcccgaccctaggggtagatcaccttcccactttatcccccgcttctggctcccgatgcatcctgctgagagacacttccgccactcagtaaaacctcctat

SEQ ID NO: 143113 - DNA, 122 bp, Homo sapiens
tgagaaggaacactggatgttgtgggaagtggttagcataggctgtatggttttgtggaacgtgccctggaatatgtaccaataggtgtttttatggtgataatgatagaggatctcaagtg

SEQ ID NO: 143114 - DNA, 122 bp, Homo sapiens
caagccatggtttagagtaggttttcccggttttgacattttaaaactcctcttggttgacgaatactctctacatgtaatacaggcacattactaaaagctctaaccactaaattttaaaa

SEQ ID NO: 143115 - DNA, 122 bp, Homo sapiens
ctcccagtgctggggaaattagcttcttggaggaagggggagctgtattttctgagtggccgcacttcctggcctagacgtgtgtgtcttgctgtaattttggcgactggtgttggtggtgc

SEQ ID NO: 143116 - DNA, 122 bp, Homo sapiens
ggacatgcttctgtcttcagagaacacctgagagagcaaagcacagctgggctgggagggcggacgggggatttgctttagatttgacagcaacattggtgatacaggtggcattccaggca

SEQ ID NO: 143117 - DNA, 122 bp, Homo sapiens
gtccaggcaggggcttgcgaatgggtggcagccgtcagaggcaggcctggctccccagagcgagggacactattgtcctctggacatccctaaaacctggtgacctccctgataggggtccc

SEQ ID NO: 143118 - DNA, 122 bp, Homo sapiens
caacaggaccccagccggttgtgcaagttctgaatgtccagtcttatccctcaggagtgtcgtaggactgaattacagttgtaacagctggaatgtgggtatatgccacatgtggattccag

SEQ ID NO: 143119 - DNA, 122 bp, Homo sapiens
cttgtggtatactcatctcactgatttttagttgggtttcctgtctttttggtattccagcgtcactgtctaccttgacctccattcctattttgtctttctctaaatcagtgccttttcct

SEQ ID NO: 143120 - DNA, 122 bp, Homo sapiens
ggctcactgcaatctttacctcccaggttgaagcgattctcgtgccatgcctcagcctcccgagtagctggggttacaggtgctgggattatagccaccacacccggctaatttttgtattt

SEQ ID NO: 143121 - DNA, 122 bp, Homo sapiens
tttgttagacgctgccaaatcctcttccatgaggctgcaatattctgcattccacagtgacgtatgagagtccttgtatcccacagcttcataaacaaagcatgacggcacatctgcacgtt

SEQ ID NO: 143122 - DNA, 122 bp, Homo sapiens
tgattagaagtcacagcttaagaggatattgggcaataaacggaagctctctgtggctgacggctggcgatgcgtctggagtttgcacgcctctctgaaagctcgtcagtgacggaagcact

SEQ ID NO: 143123 - DNA, 122 bp, Homo sapiens
tttggtctgtttatggcaacccattcatcctgcagaaagaaggtgaacccggagctgtgacgtggagctaaacagcagcccgggccagctgtggaagccagtcagccccgcgctgaccattc

SEQ ID NO: 143124 - DNA, 122 bp, Homo sapiens
cggggtggggcctagttacacacagagataatgcagactcaggcagtgcgcaggcaaggccggagtgccgagtatggtacaggaaacgcagtgtgcgcagctgcgctgcaccgtggtccaca

SEQ ID NO: 143125 - DNA, 122 bp, Homo sapiens
ccaacattcaaaacctcgtcactactaaacatacaaaaattagccaggcatggtggcgggcgcctgtaatcccagctactcgggaggctgagacaggagaatctcttgaacctgggaggcag

SEQ ID NO: 143126 - DNA, 122 bp, Homo sapiens
tttttttttttatgttgagtttgtttttgagcttgttgattgcacggtggaatattctaacgtggaatttggctttgggaagacttggtgttcaggagttgtcggatatgccctgctgttgt

SEQ ID NO: 143127 - DNA, 122 bp, Homo sapiens
aggcgttcagagggcttgggcttttttacgatcatcatcattattttattttacctgtggcgcagaagggctccccagctcctattccctgaatcctcctcctcctcccctcctctttctct

SEQ ID NO: 143128 - DNA, 122 bp, Homo sapiens
agccgccggctccgtccgggaggctgagctccttgagagcccgcacgtagcggcacaccgcgactgctaattagcccggaagctgaatagcggcgggtacataccgcaagcggagtacggaa

SEQ ID NO: 143129 - DNA, 122 bp, Homo sapiens
ttatctcatttaatcctcacagcaattcctactatcatccccatttataggggagaataccgtagctcagaggtcatgcagctagtaagaggcagaactagtaatagaattcagccctgcct

SEQ ID NO: 143130 - DNA, 122 bp, Homo sapiens
tcaaggccatgagccacatgctgtgcattgggtatggccggcaggcgcccgagagcatgacggacatctggctgaccatgctcagcatgattgtgagtgacacctgctacgccatgttcatc

SEQ ID NO: 143131 - DNA, 122 bp, Homo sapiens
gggctggtgggcggggcctgcagcggggtgggagcccggtcgcccggcccctccccaccccgccccgcccatctccgctggttcccggaagccgccgcggacaagctctcccgggcgcgggc

SEQ ID NO: 143132 - DNA, 122 bp, Homo sapiens
cttcgatgcctaactgcatatggaaaagctggcctcaccacatcctcttcctgcagagggcgaggactcgcaggacaaaacttggtttccttccattctctgctcctcgggagggcctgggc

SEQ ID NO: 143133 - DNA, 122 bp, Homo sapiens
ctcatagcagctccagggcagttattccaagggtcagggattccaagaagttttgcagagcgggaggaagacagagcatgaggacatcctggaaactgcttgccctttgtgatctagaggag

SEQ ID NO: 143134 - DNA, 122 bp, Homo sapiens
agcacagcagctgctggcccaggtgctaagctcctcactgcccggggcttgctgtcaggccggccgctccgagtgcggggcccgccgatcccacgcccaccgggaactcgctctggcccgca

SEQ ID NO: 143135 - DNA, 122 bp, Homo sapiens
ggccagaacttggggcctttatttctcagttcgggacttctactatggtacttccttctccgtagccaccccattgaacacatttctgttccttgaaggtggcatgaggatgttctcaacta

SEQ ID NO: 143136 - DNA, 122 bp, Homo sapiens
cagccttcctcggcttcctccttcccaggggaaagataggggttttgattatttaaagtgcgtgttgatctgcaatggcaccattctgctcagtcaaaaccaaaaccctttcaaggatctgt

SEQ ID NO: 143137 - DNA, 122 bp, Homo sapiens
gtgatccatagaatacctcctaccttaaccttcagaacatcatcaggacctcttgcatctcgttttatttttgagtttttatttgtaactatttttaaagatatttgatgtcttttattatt

SEQ ID NO: 143138 - DNA, 122 bp, Homo sapiens
aagcagtgattcttagaaaacatagatggcaccagagaccatgtaaagaaaaatcgatttcgctctatggagaggctcagcatcaatcattctgaataatgtgacaggatgttttggagcaa

SEQ ID NO: 143139 - DNA, 122 bp, Homo sapiens
ccagggaaacatctgtctttggtcctggattcctcccacctcagccttcctggggagtcacgccacaagttaactctgccagctggctctgaagtttctctcaaaccacgagcatttgggct

SEQ ID NO: 143140 - DNA, 122 bp, Homo sapiens
gcgggtgtaaacggagccctccaggcgggcagggacaagtagaaaacgacaaagctaggtcgcgagtgtaacgacacggaacatggcagcagtggggtgagggaccctaggcctcctgggaa

SEQ ID NO: 143141 - DNA, 122 bp, Homo sapiens
accacattcatggagctgggccacatgcaagagcacaattaatattccactcagtctccccgagccctgctgcctaccgggagaagatggaaaccagatttgcagccgcacgcgctggcatg

SEQ ID NO: 143142 - DNA, 122 bp, Homo sapiens
aggcggtgagtggccccttcccctcagctccatggaggcccgacggacccccggccaccgcggcactcagcgcagctgggaaagcctgtgttgcgggtctcctggccccacgattgtgcgag

SEQ ID NO: 143143 - DNA, 122 bp, Homo sapiens
tgcagaaaggtcaagagtcacatgccccaacccgttctctaaaagcatctcagaaagacccggtggaaaggtcatcttaagacagtgacagggcacagcttgttgggggaagagaggagagg

SEQ ID NO: 143144 - DNA, 122 bp, Homo sapiens
gacaattgcaattggagcagagcctgcgcgtttgccgtcggctgctgcatgcctggtacgcggaccccggacccactggccagacctccctcgggccctcagagtcccgccccgagcgccca

SEQ ID NO: 143145 - DNA, 122 bp, Homo sapiens
gctttctgaaactctcatgcatcttccgaatgtcacctgctgccatgaggtcagcatggacgagggtcagcgtggatctccagttctactaggctgccaaagtagcagagacaagcttcaat

SEQ ID NO: 143146 - DNA, 122 bp, Homo sapiens
tttctccaccgccttactcctgccgtgacagcccaggaaatgctgtaaaatctagttatccgtggggtcgttggaatctgaggacacatcttttcttgtgatggcgtttgcctacagagctg

SEQ ID NO: 143147 - DNA, 122 bp, Homo sapiens
tctgacagctgggagctatcagccagccacagccccagtgtctggggagtaagtccttcacgcctgatggggatctgatgagcacataacagtgtcctcaacatcattcttaatttttcttt

SEQ ID NO: 143148 - DNA, 122 bp, Homo sapiens
aatagcaacagtatattagcttattttacaatgaacacagtacacaaactccaaaactcccgcaatcctcacaacaatcttacaatgtaaatatgtactaaaatgcatatgttttgcaaatg

SEQ ID NO: 143149 - DNA, 122 bp, Homo sapiens
tcaatagttaatgcctgaaaaaggaaaaccaaaaagcagcaaataagccagttatttagacgtagggaagtaaacactcaaacaatccacaaaaattgttggaagaggttgctccagaggag

SEQ ID NO: 143150 - DNA, 122 bp, Homo sapiens
ccatggcgcccgaaaggggacccttcgccctacccgcctgctccgcgccggggctctccgcgccctttccgcacgggccaggttcgcattcgcgcctctcgcagcccctcccagtcccctgc

SEQ ID NO: 143151 - DNA, 122 bp, Homo sapiens
cttctatcctctacacttccttcaaatgcctctcagagcatgtttcttcaacaatagcatcgtctgcttgtctgtaatctttagaaaagagtaggaatcttgggggtcgtgattgtgtctta

SEQ ID NO: 143152 - DNA, 122 bp, Homo sapiens
gtaccacaagccacatccatataagagcacgaacttaagtgcaattgttttggagtaccacgagccatgtccatgtaagaacatgaacttaactgatgaatgctgagtgtgttctgacttct

SEQ ID NO: 143153 - DNA, 122 bp, Homo sapiens
tgcagccatttgatcaggagaagcctttgtcttaacccccaagcccctcctgctagtcctcgctgggtcagtagcgctgggagtaattaatattacgaacattagcctttccttcacctccg

SEQ ID NO: 143154 - DNA, 122 bp, Homo sapiens
agatgccccgtggtgtgggcactgccaggccctggcccccgagtacagcaaggcagctgccgtgctcgcggccgagtcaatggtggtcacgctggccaaggtggatgggcccgcgcagcgcg

SEQ ID NO: 143155 - DNA, 122 bp, Homo sapiens
ggcaccctccgttttcttcatctgtgaaacgaaaacaacagcagctttttcactggggttcgctaaatgaatgtaactgggctgagttgagaatagtaaatgagaccgtctacgtaaggaga

SEQ ID NO: 143156 - DNA, 122 bp, Homo sapiens
tggacaggtgggtgtgcctttgagtgcgacctttctctgccgctggacagttctgcaaaccgaaacgagggaccctggcaggcggaacgtgaacggctcggggctccgcggccaggcccgcg

SEQ ID NO: 143157 - DNA, 122 bp, Homo sapiens
ctccctagtcattcaacttactctacttagccagctgtgtgccagatgctgtactaagcgcggtggatgcattattttatttaattctcactaccttataaaatgggtgctgttaccatccc

SEQ ID NO: 143158 - DNA, 122 bp, Homo sapiens
cccaagaccgggtagcgcagcccctccgcgcacgcgtaacacgaggagacaccgcccacacgccagacgcgctgtgattggccccagctaccctcggaccgagattcctattggtcccaggt

SEQ ID NO: 143159 - DNA, 122 bp, Homo sapiens
cctgcctccctggcgtatttgcgccattggtggatattccggaccgtgatggtggcgctgcgcgtgcgcactcgctccgagccctgctcccgggagagggagctctcgggtcggggctaggg

SEQ ID NO: 143160 - DNA, 122 bp, Homo sapiens
ccacggacggagttacctcgttgaggggacaaactgattttgggggtcggtgtttccaaccgaagctttaccggggcctcagtttgaaaactccagatctctaagctgccaggcccacagcc

SEQ ID NO: 143161 - DNA, 122 bp, Homo sapiens
cagctctcgttctccttttttgcggattccgccgggggtccgccgagtcctggctgcccgcgggcagccactttgaaacccaaaggtttctgcacggccaagcagaggtcggagggagagag

SEQ ID NO: 143162 - DNA, 122 bp, Homo sapiens
cccctttgtttctcggcagttgtaattgtagtctggtttgtaggtggagctgtgcgcaggcgcacctagaaccaggtgaccttgcacatgcgctgtatgtaacactgaagccaaaagcgaaa

SEQ ID NO: 143163 - DNA, 122 bp, Homo sapiens
tcacataagtcgagtcttgccgtatctgtcctttcgtgtctggcttctttcactcagcgtcgtcctcaaggttcctccacgccggagcatgtgtcagaatttcttccttttcacggattaat

SEQ ID NO: 143164 - DNA, 122 bp, Homo sapiens
cttaacatgtgaggttccaacccagtggggcccactaacatgtgctgttctgctttggaccgtggggagctggggtgctggacccatctcccaccttctacagcctggagtgtgctcccaga

SEQ ID NO: 143165 - DNA, 122 bp, Homo sapiens
acagcgcaggagactgaggggtccctccaccaggatccgctcacctgcttccaggtgtgtcgcctaagagcggctcctgttcactttcgttccgcaggccggccatagttacactccctaca

SEQ ID NO: 143166 - DNA, 122 bp, Homo sapiens
agaccctgggccagatgcgaggttcaaagagcaaggccattcccccacctccaggggctccgctcagacgggcaggcaccgtcccaccgtcactaggacagagaatgtggagaggccgggaa

SEQ ID NO: 143167 - DNA, 122 bp, Homo sapiens
tgccgtgtttcattccaccacgtttcatgccgccacattttatgctgccacgtttcatgccgccacgtttcatgccgccatctcatgccgctgtgtctcaggccacatttcatgccgtgttt

SEQ ID NO: 143168 - DNA, 122 bp, Homo sapiens
acaattctccatcagggcctgctgccctgggaagtcagcttctctgctgattttacctttcgtggttattcttgatatttattttaataaaataccacaatgatagagatgccagaaggaaa

SEQ ID NO: 143169 - DNA, 122 bp, Homo sapiens
agaagctctgacgccgccttggaagtaagtcgttgctgcctgacctttgggcgtctgggacggatgcctatacctgcacccagcagcactggaaggggcccaggcccttcgcagcacagcct

SEQ ID NO: 143170 - DNA, 122 bp, Homo sapiens
aaaaggcatttttgaaaaagctgaatatgaactaggtgttttatgatattaaggaagtatcgttaattttgttaggtgtggtaatgataccgagattatgaaagaaaatatcagctgggtgt

SEQ ID NO: 143171 - DNA, 122 bp, Homo sapiens
accggagtccctgtcagccgtggcggcacctcccctggcccgcccccaaaggggaagctgcgcattttgattcctctgtatattggtcaatctaaaggattcttactattattggacaaaag

SEQ ID NO: 143172 - DNA, 122 bp, Homo sapiens
gaggctgaggcagaagaatcgcttgaacgcaggaggcgaggtttcagtgagctgagatcccgccaccacactccagcctgggtgacaaagcaagagtccatctcaaaaacaaacaaacaaac

SEQ ID NO: 143173 - DNA, 122 bp, Homo sapiens
atggcagacaagaatgtgcccaaccttcatgtcacgaaggccatgcagtctctcaagccccgaggctgcctgaaggaacagtttgcctagagacatttctttctttcttcctttctttcttt

SEQ ID NO: 143174 - DNA, 122 bp, Homo sapiens
tccctcgccaccaccccggaagcgctcgccgccgaccaggaagaagaacccgcctcgcagcgtcctcttctggcaccccagggtggccttgttgtctgtttcccggccgagtttgtgttttg

SEQ ID NO: 143175 - DNA, 122 bp, Homo sapiens
gcttgcccaacgagggggcaaacaccacgctcaggtggcgtggacaggtcgctgccgcctcggactacaccagagatctcagctatgagcctggacgcccgccccgccctcccgaggccccg

SEQ ID NO: 143176 - DNA, 122 bp, Homo sapiens
accgtgctgggagagcagagcaggcatccttccagttctctgcaatagtaattaaggacccgagtccaggagggggagtagaaacaggaaaagccacctgaataatcgtgcaggaaattaaa

SEQ ID NO: 143177 - DNA, 122 bp, Homo sapiens
aatctccccaagtgcaggggagaattacatttccccacctcctacccaacctgccccggccgagttatggacatcgccgcctcattctagacttgaaggcactctgcggccaccaagagacc

SEQ ID NO: 143178 - DNA, 122 bp, Homo sapiens
gtgaagcacagagcttgcccaggcccaaggaaggcacaactgtgctctgtgccccttcctcgctcagatgttggagggaccattcctgtaagtgctgaccacttccccagagtggcagcctg

SEQ ID NO: 143179 - DNA, 122 bp, Homo sapiens
cgggtcttctcgacagggcccggcggcctttgcaggacgcgagttggggggctccgaaggcggccggcgcgcccccccgcgcctcccacaatccccggcgcccggccccgcgcccctgaccc

SEQ ID NO: 143180 - DNA, 122 bp, Homo sapiens
tttgtgacccggaggagcttttggggtgcgtcaagcccctggcctgaggcagcggtgaggcgtgtgcgtgagcacggccggttgggccgggccagacttcctggcgggaggcgggaggcggg

SEQ ID NO: 143181 - DNA, 122 bp, Homo sapiens
gctgctcccaggaggaaccctggctccagcaaaacccaccgactgagggtgaatcatggacgggcagggcagccgaggcccccgggcccaaccttggggactcagtcattccaaagccactg

SEQ ID NO: 143182 - DNA, 122 bp, Homo sapiens
actgacccacgaattaaaatttcagtgtcccggttggctcttctttccttccttagacttcgcttttccagcggccggctcctgcccccccttctcccccaagctctgtctccacagcgatg

SEQ ID NO: 143183 - DNA, 122 bp, Homo sapiens
ttctgttagcgtatcatcccgggtgctcctggacgcaggactctccacacgtctggttggcggtcagctcatttatgattgagcctgaccttatgacaggccacctcgttaacgattggatg

SEQ ID NO: 143184 - DNA, 122 bp, Homo sapiens
tagcgcagcgtggagtttggagactctgcctgcagcacacgtgccaggtaggcaatgaggcgagaggaaagcgggtcggccaggctcggagctgggtgttcccaaagctggggggagggggg

SEQ ID NO: 143185 - DNA, 122 bp, Homo sapiens
tccagaagagctgcaaggcagagcgttcaaatcgtggctggccctgggctgccgccctcacgctgcttcggctgcttctaagatcccattggaagtcccaaagggctggagagccccaaggc

SEQ ID NO: 143186 - DNA, 122 bp, Homo sapiens
caaatggaatgtttccaaagggacctaaggtgactgtggacagggcgcagcgccaggaagcgccaccagggggcagcacaggcctccccagcaatcccagacaccctgaggcctctgcactg

SEQ ID NO: 143187 - DNA, 122 bp, Homo sapiens
aggtcatggccctgtcattccagaggaggctggagcagctcttcaggaaatgtggatgtgcgaagaggacaagcctggctgagcctaaaaggggctcttcagactcttctggagacctgcac

SEQ ID NO: 143188 - DNA, 122 bp, Homo sapiens
ggattgaacattttccaattatctggtcttttcctgttgtgcaaaaatgactcattgctccgaatgtcaaaaacaaatgcgacaaacaatggcacttcatcatttaaagtaatgttgccaag

SEQ ID NO: 143189 - DNA, 122 bp, Homo sapiens
atgggtggatggttcaggaactgctggttgatggcttgaggatgctggtgagccaggagccggctaacggcaatctgttggtttatcagatgggccatggctatttgttgccttacaagttg

SEQ ID NO: 143190 - DNA, 122 bp, Homo sapiens
gctacacaactccatatctgcttccatcatcacatggctgtctccttctgtctctgttttcgcttctttcaagaacagtcacactggattacagcccacactaatgacctcatcttaacttg

SEQ ID NO: 143191 - DNA, 122 bp, Homo sapiens
ctgatgattaatgagctgcccggcattgtaaatggcaacagtaaaggccattgtctcccccgatttgtgagcaccaacatctggctggcgtcccaagggctaccaccactctcccagggctt

SEQ ID NO: 143192 - DNA, 122 bp, Homo sapiens
ctctgccggggagcgccagactcagatgaaaggtattatgacattcgagatgaataatgacgtaagaaggacttactctattgtatatcacggtgcagtatcaaaacattttgtcccatgag

SEQ ID NO: 143193 - DNA, 122 bp, Homo sapiens
cttaccgagaaaggtgacaccggctgctcgcccagatccccgaattcggccctgtctcggcggaaatatttgctaagtgattgaaaggctgcaggtgcctgttgcctttgttcaaattatgg

SEQ ID NO: 143194 - DNA, 122 bp, Homo sapiens
ggtcagaaaagggggacggtcagcgggaagagccaagagactgcaactctacaaagagcacgcagattaattctaatgattgttccctgagcttttcacaccaaaataatggtaactggcta

SEQ ID NO: 143195 - DNA, 122 bp, Homo sapiens
aggcacgctggcggtgaagggcggggacccacaacccagcggccgctcacctgttccagccgccgcagcctcggcggtcacacgccacccgcccgcccagacctcccctcctctgtccccag

SEQ ID NO: 143196 - DNA, 122 bp, Homo sapiens
cggccgaaggagaagaaaacccctcttcatctagcactttgcctcccccaaagacagcaccgccgcctacctgtcaccctgctgtctccggcttcctaccgccgccgcctcccgcagcagcc

SEQ ID NO: 143197 - DNA, 122 bp, Homo sapiens
gctctgaacttccctcttgcctgctctttcttgggaaaccgggctagtcgggagaatgaacggtctgtgtgagagtgtcaccgaattcaacgggaagccagcaggtctccctctccagcgcg

SEQ ID NO: 143198 - DNA, 122 bp, Homo sapiens
cgtctggagttcgttccttctgatattcggatgtgttcagtttcttccttttggtgggttcgtggtctcgttggctcaggagtgaagctgcagaccttcgcggtgttacagctcttaaggcg

SEQ ID NO: 143199 - DNA, 122 bp, Homo sapiens
acctcacgattggacatgcggaggtgactcaggcccaagtcagggttacagctagcctcccggtaaacaactgacccatccttcctgagctcttctccccaggatttcaacagcaccacaga

SEQ ID NO: 143200 - DNA, 122 bp, Homo sapiens
gaccctgcgagtaggccctgccgtgtggggcgtgtccgctccagcggtgccctctctcttcgcagctcccggagccagtcggcagcggtcaccccgtcatccaccacctcttccacccgtgc

SEQ ID NO: 143201 - DNA, 122 bp, Homo sapiens
agggagaaggtgcgggtttagccgctgcctcagctggattcttggagaagcgctcgacctcggagcactctggagaccctaccagaaatctagtgctgggggctcctctccgcgcctgccac

SEQ ID NO: 143202 - DNA, 122 bp, Homo sapiens
tccagcctcacgggctccatcaggcccccctggctgcagaggtgttggccaaggccagtgcgggcgtcgatatacctcgccccttcctgggctcatacctggcgccgctctgtgccctttcg

SEQ ID NO: 143203 - DNA, 122 bp, Homo sapiens
gtggctctgaaaagagcctttgttaagactgcttccttaaaaagccaatataagagttctcgttttacttgcccttggccttgtggtgactctcagtcttcttggggagcagtacagcctgg

SEQ ID NO: 143204 - DNA, 122 bp, Homo sapiens
catgagctgtttcaggtgctggggaaaggctctgcgttagaacccacaccttccgtctcccgggccaggtctctttgtaggccaccacggagagagaaaagcatcttgagaatcctaatggg

SEQ ID NO: 143205 - DNA, 122 bp, Homo sapiens
gaggagccgcgtgtcctctcccaggataaacgctggtccctgcacacgtgaggagctgtgcgtcccttcccgggataaacgctggtccctgcacacacgaggagccgcgcgtcccctcccgg

SEQ ID NO: 143206 - DNA, 122 bp, Homo sapiens
cctctttgtcgtcccctccccgcgcccggagcgggactcgcgggagccgcccactcccggcgcccacttggttcctcccagctgccgtgtgaatgggccgtcctccggattccgcggagggg

SEQ ID NO: 143207 - DNA, 122 bp, Homo sapiens
atctgcccggtcctggcaggaaataggttaaccatggccagggaaggaccaaggccgccccgatgggcatcaccccacctgcctggaggcagtcgccacccgcagctctgcccccaccctcc

SEQ ID NO: 143208 - DNA, 122 bp, Homo sapiens
gggtggggaaagagcaattcttgatcctgagcttctgccacgtggagaactaggcccttccggcctgtttcctgggttcctgaggcacagagccgtgggcctggttcaggtcgtgttgctca

SEQ ID NO: 143209 - DNA, 122 bp, Homo sapiens
ttctaaaatgtttattctggctgggaatgcctgctctaaaatgtctattctgactgagtgcggtggctcacacctgtaatcccaacatttcaggaggccaagatgggaggatcacttgagcc

SEQ ID NO: 143210 - DNA, 122 bp, Homo sapiens
gtcctggggtaggtcaggaactcctgggagggtttatttatagagggtgccttgccaaaacgctacacgcatcattacagttccatttggtgagaaaatagatttgctgtcagaattacagc

SEQ ID NO: 143211 - DNA, 122 bp, Homo sapiens
cagcggccatgaggcaggtgggaagcaggcacagtgatgagccggctgaggctgtgggatcgtttattggggctctgtccagccaggctgcagcacccgcctgggcctggcccggtgccacc

SEQ ID NO: 143212 - DNA, 122 bp, Homo sapiens
agcttgggagaaaccgatttcctcgctgtcttggacttctcatgctgcaacaggttttctcgcaaggatttcacaaggtcttcgttcagccacgggtttggacaatgcggattatccacttc

SEQ ID NO: 143213 - DNA, 122 bp, Homo sapiens
tctattcatctatccatggacactgggttgcttccaccttttggctgttgtgaataaagccgctgtgaacattggtgtacaaatgttcgttcaagtccctactttcacttcttttggataga

SEQ ID NO: 143214 - DNA, 122 bp, Homo sapiens
tggcctctgtgcctggctgtaacttgctgtttgactctccttcagctcctgaacacccaccgccgagatgtcctgccagcagagccagcagcagtgccagccccctcccaagtgcaccccca

SEQ ID NO: 143215 - DNA, 122 bp, Homo sapiens
gcccgctgtcgagttacgtttcggtgcacgcggagagcggcaaggtgtacgcgctgcagccgctggaccacgaggaagtggagctgctgcagttccaggtgagcgcgcgcgacgcgggcgtg

SEQ ID NO: 143216 - DNA, 122 bp, Homo sapiens
ccgcttgcagaggcggccccttagcagctgcgcatccgggtggatagcggcgcttctgcccgcccagtgcctacccgcctctccgagagaaaaacagcccctggttttctctctgcaattcc

SEQ ID NO: 143217 - DNA, 122 bp, Homo sapiens
acaatgtcttacagacccagtggatcttggtgtgactaaggcagtgtgaatacattctcccgtggtgcatggactggataagttaatgccacatgcatgattttggggggctgaaaaaggat

SEQ ID NO: 143218 - DNA, 122 bp, Homo sapiens
atccaagtgattaaggtcactgctatttgaaaacccctgactcagcagtgacctgaagcacgagtcaggacacttggattctaaacatcattcagttctttttcttacctgggactccatct

SEQ ID NO: 143219 - DNA, 122 bp, Homo sapiens
ccagccctccccctcgccctgcgaaaactcctgagttctccgggtggactgctccactaccgcaaatcaggggagactcagcactgcgcgcggaaccggatcccagctctccctcctctgag

SEQ ID NO: 143220 - DNA, 122 bp, Homo sapiens
ttttgcatttctcttcatgctccgtcttcgaggtctggcatgcacccggcactcacagcacgtctcagtgggaccagcccggcttccaaggctcagcagccactggagacagcacaggtcta

SEQ ID NO: 143221 - DNA, 122 bp, Homo sapiens
cgcccgctgcgctcgggctcccagcagccgctggatgcgctgccgacccgcccggctcggcggagctgggctctggcaccaacccccgcgctccaactagctcccgacccggcgctcggaga

SEQ ID NO: 143222 - DNA, 122 bp, Homo sapiens
gatcagttctatagtgggttaccacaggcactgtatgattgccacagtagggggaaccatcgtcaagggcagatccttatggaattggaatattgcaatataggggtatttgtgtatgtgtg

SEQ ID NO: 143223 - DNA, 122 bp, Homo sapiens
tccacccccgctacctcttgcctccgctcctgcggccccagctctgggacagacgcggcacgaacgtacccacgaggccggcagcgccccccacccgcgcccttcacaactcctctcggttt

SEQ ID NO: 143224 - DNA, 122 bp, Homo sapiens
aagggggcccgagggtacgctgtgctgcggagcatgcccaccaggtggcgatgccagcggcgggcgggcctggccggattggccgcgccgctcttgccgtgggtgccgacggcggcgccggg

SEQ ID NO: 143225 - DNA, 122 bp, Homo sapiens
gctgcactacaacagctcaagaactcccagccaaagttttagtttttctaggaacataaacgagccaatagtgtggaaatcggtgattaaaaacaaacctcgcacattttaagacagaatta

SEQ ID NO: 143226 - DNA, 122 bp, Homo sapiens
attgacgccgtcaaaccgtattgcagagacggagaagacatctggaaagcctcacgcttccggataatcatcaccacatgcagcagctcagggctgttttaccaaataggagtgaggtgagc

SEQ ID NO: 143227 - DNA, 122 bp, Homo sapiens
tgagatgaggtcggccttggctcatcacctggagagagtggatctgggaggcccgggcagcgctacgcagggcccagcctgggtggagcccccgaggcggggacggtggagcctcgcggacc

SEQ ID NO: 143228 - DNA, 122 bp, Homo sapiens
ggatttaccactgttaggcagaacaaacaaaggttcaggagaggccaatgcctgtgagaccgtggtaccaggatcttccagtaacaacttggagcctgccaggctatcctttgatcaagggc

SEQ ID NO: 143229 - DNA, 122 bp, Homo sapiens
aattcctctttctcagtcacgaacgttgtttaattatcaccctcagtaaattaaatgcatcggtctgaattgattaattgtcccagaaatcttctgaagaagtagatgggcttcataatcat

SEQ ID NO: 143230 - DNA, 122 bp, Homo sapiens
cggcgctcgggagtgtctctcccttatttactctgggaccgggtggcgactgccagccagcggcgacctgctcggagccagcgggaggcgcggccagaaaacccgggagcgccgctgggcac

SEQ ID NO: 143231 - DNA, 122 bp, Homo sapiens
aaaccaatgcttctatgcccaagtttcccctggccttgggcccttggacaggggggcaaacgcaagggctctgagggtgagaggaaaagccacagctagaaccatcagagatgaggcccaga

SEQ ID NO: 143232 - DNA, 122 bp, Homo sapiens
ctgtcttaaaaaaagaaaaccaaaccaaacaaaaccgtagtgtcagcttgtcctcggtgccgcagctccccatgctggtcgttcctctgatagccccggggtccaagaagctcctaggttct

SEQ ID NO: 143233 - DNA, 122 bp, Homo sapiens
ggaggcggggcttgcacacgctggtcacgcggtcagctattgacacttcctggtgggatccgagtgaggcgacggggtaggggttggcgctcaggcggcgaccatggcgtatcacggcctca

SEQ ID NO: 143234 - DNA, 122 bp, Homo sapiens
cgtgcagaggcggggagagtggacagaggcttgccctgagctccgtgggggaggggagagcgcggagcccccacactcgaaggcaggactgggatcagatgccacccctaggacgcctggaa

SEQ ID NO: 143235 - DNA, 122 bp, Homo sapiens
tccggggaggtcggggccgcggtgaactccagttcaccaggacaggaagtgacagcggaacgccggaaaccgcagatccacggaggtcagggccgcggagagctgtagttccccggaaccgg

SEQ ID NO: 143236 - DNA, 122 bp, Homo sapiens
atgtgactcccgttctgggccagaaagatggtcacaaatacttaggactctggcctttcccgccgcatggctactgaccccaccccctgggcttggagggctctaggacccagcaacctgcg

SEQ ID NO: 143237 - DNA, 122 bp, Homo sapiens
gtgagggggccaggcacaccgtgagggggcccagccacttccatacgccctccggtcggccggcacccaccacccacccctcgccaccaagctgggtgcagagaacagggcaggcgcacgga

SEQ ID NO: 143238 - DNA, 122 bp, Homo sapiens
tactgattggcccattttacagagagctgcttggtccactttacccagagctcattggtccgttttgacagattgctgattgctgcgtttacaaacctttagctagacagaaaagttctcca

SEQ ID NO: 143239 - DNA, 122 bp, Homo sapiens
cggcgggcggagcgttctccgtgcgggacgccgtccacccacacgcgccggggcctggtccgagcctcgaacccaggaagatcttggttttcctcgtcagcacggagctcgcgccccaggga

SEQ ID NO: 143240 - DNA, 122 bp, Homo sapiens
taaagccatcgtctcctttacttctcacaatcactgtgcagacaaacaggaggaagcagacgatagggatgtcaaatattcgcccaagctcacagcctccaaagcagtagtctctgtcttag

SEQ ID NO: 143241 - DNA, 122 bp, Homo sapiens
cggaggttgcggtgagccgagatcggaccactgcactccagtccgggcgagagagtgagacgctgtctcaaaaaacaaaaaactgtaatctgaattcaatttttctacaacacacccccaga

SEQ ID NO: 143242 - DNA, 122 bp, Homo sapiens
gtttcattgtctgagcttgcaagtgcttactgtgtaaactacttgctaaacatttgttggcgatgagaagcaaaaccacttggggactgggcatttgctgcctcttgtcagcatcccctctt

SEQ ID NO: 143243 - DNA, 122 bp, Homo sapiens
ctaaggccgtgaggtctgaggtcagagatccagccatctgctcccccagggtagggaggtcgggcctccccggggtgagtcacgtagcccacctctccccaccaggcgaggcttctcggtct

SEQ ID NO: 143244 - DNA, 122 bp, Homo sapiens
gagaggtcacatgttacactattcaacttacgtaacagtctcaaaatgacaaaataacagcgatggagaacaggtcagtgattgtgggggttaggtttggaggagggtgactgtgcagggca

SEQ ID NO: 143245 - DNA, 122 bp, Homo sapiens
cttctacggggccttctactgtgacagggagatcagcatctgcatggagcacatggatggcggctccctggaccaggggctgaaagaggccaagaggattcccgaggacatcctggggaaag

SEQ ID NO: 143246 - DNA, 122 bp, Homo sapiens
ctcgctgaccgagcagctgagaccgcctttcaggggtcggcagtgtggactggctggtcccgatcgtggggaccagggacttattccctcgagggtcgactgttggaagtaatgtaggtttt

SEQ ID NO: 143247 - DNA, 122 bp, Homo sapiens
gcaggtccactggccagtggagtccctggccccagtgcagggtggggacaggctgtggtgcgcgtgagcgggccggctcaggcctgagggcggcaccgcaggggacacacagcccgggcgcc

SEQ ID NO: 143248 - DNA, 122 bp, Homo sapiens
tatccagtctgtgcacttcacctccctggctcccgctctcccctgagcttacagtggacgcggggttcttccgaacccctcttgggaatactgaatggaaaagggggagcgtgcgcaagtgc

SEQ ID NO: 143249 - DNA, 122 bp, Homo sapiens
cctagccattaggatacagtgacgaaaaagtctctcgttatctagaagggcagacaaacacgcagacttttaaaataccagatggcaggccgggcgtgatggctcacgcctgtaatcccaag

SEQ ID NO: 143250 - DNA, 122 bp, Homo sapiens
tctactcatttagaaggacatagctgttaactgctcccagaagctgagttggaccttccccgtcacccctagctgcttccaatgggctgctttgtgtcccccaaaattcctagggtgaaaaa

SEQ ID NO: 143251 - DNA, 122 bp, Homo sapiens
taccctctgaatgtgtgctagatcaggtgccccactgtgtttcctgaaatccttgggagccggatctccccatctcccctactcactcttcccttttcttctctcagtgttgtctgaataaa

SEQ ID NO: 143252 - DNA, 122 bp, Homo sapiens
ctttcacagatgaatgaaagtgcacaactccagagcaggatgcctttcctgtctcaatcccgcccgcgctccgggagcggagctcgtggttacgatccccttcgctcacacctcttccctca

SEQ ID NO: 143253 - DNA, 122 bp, Homo sapiens
agcgccagcggggactggctgggagcagggcaacaatgggcggagttttccgctcctccccgcccttggcttgagcgctccagctcgctagtggcccgggcgaactggagttgccgtgtgac

SEQ ID NO: 143254 - DNA, 122 bp, Homo sapiens
tgaggtccgcactcggcgcagactgaagtgctccagaactaaccacctccgcagacgcaacggagccaggaggggcctcaggggcctccaaccgcatggctcttcccagctttcccggacac

SEQ ID NO: 143255 - DNA, 122 bp, Homo sapiens
ccgccatgttgctgtacggaaaaacgtttccagggcgagttgagcgttcagggcactcctcggcgctcaagctgcccacaggtcttccgacctaactttaggggtcgtgccagtcttcgtag

SEQ ID NO: 143256 - DNA, 122 bp, Homo sapiens
ctgagccgaacacgacacgacgatgggaaggtcctcgtcaccccggagccgaacacgacacgacgatgggaagctcctcgtcacccctgagccgaacacgacacgacgatgggaaggtcctc

SEQ ID NO: 143257 - DNA, 122 bp, Homo sapiens
ggacgcacccgagcctcagcgggtttctagttgcagccccgggcagcagaagcgcctgggcgcggcctccgagctcctcagccccaggcaagggggacttcgccgcctggagctcaccccca

SEQ ID NO: 143258 - DNA, 122 bp, Homo sapiens
gacaaaggatgcaggtgctggacttagaaatcctgcagtgtggccaggtgcggtggtgcacgcctgaatcccagcactttgcggggccagcgggagatcacgtgagctactagctttgaatc

SEQ ID NO: 143259 - DNA, 122 bp, Homo sapiens
cgccctccctcccgcggcaccgtcaccagtgggtagtcacagcctcccggagcccatagccggttctccaacctttagtcttcagtggctttggggtgccctctcagtggagactgtggttg

SEQ ID NO: 143260 - DNA, 122 bp, Homo sapiens
gagatgtggggagcgcctctgccccgccgccccgtctgggaggtgaggagcgtctctgcccggccgccccttctgagaagtgaggagaccctccgccaggcaaccgccccgtctgagaagtg

SEQ ID NO: 143261 - DNA, 122 bp, Homo sapiens
ggatagaaaagggcagctagagctggaacctgatagggaattgggggcccaaggagatttcggagcaggaaaatgagaaccagaaaggatttgaaggccaccagccatggagaacagactgc

SEQ ID NO: 143262 - DNA, 122 bp, Homo sapiens
tttctaggtagctgtttgtgactggaaagtctgtgcttgttattgctggcaaattcttgacgtgggcaggactgcatattctggcacttaggactttaatgatttccatgaatcttttcatg

SEQ ID NO: 143263 - DNA, 122 bp, Homo sapiens
caggtggtgggtgcagacgctgagtcctggggtgtagggatcaaaggagctgcccaaggtcgcagagcgggcagtaggggtgccatggacatggtggtggtgggggagggtgtttcagccct

SEQ ID NO: 143264 - DNA, 122 bp, Homo sapiens
tgaggcggggtgggaggttcaggttcccggggcgccttccccaacccgccccgctttccccgtccctccacgcgcaccctgcctgtggtttccgtgcgcccccggcctgagggctctgggcg

SEQ ID NO: 143265 - DNA, 122 bp, Homo sapiens
gcgaggcggcctcgggagggagcgggggctgcgccgggcggggacccgcccccgtctcagcgccccgtcccgtcctgtccccagcggcctcacccaggagcccggcagcgtggggcagctgg

SEQ ID NO: 143266 - DNA, 122 bp, Homo sapiens
gattacaggcatgagccaccgcttccggccaaaagagggctttagggcacccccagaacgcgagatctccctcatctgtcatctttaaagaggaggaagtggactcccagtccagccatagt

SEQ ID NO: 143267 - DNA, 122 bp, Homo sapiens
aattctctcacctgattaattcttaactatgaacataattacactctccagaaggtaaatcggtcttataaatcagtcgtcgctgacagttcactatgcgcagcgcgatcgcccggggttgg

SEQ ID NO: 143268 - DNA, 122 bp, Homo sapiens
ctcgtgtgtgggaccccaggtcaccgtgtggcgtcccggtagtgtgtgggaccccagaggcgtccggggcctccccgctgtgtggtgtcccaccctgggagaaccccgggtgcgtggcgtgg

SEQ ID NO: 143269 - DNA, 122 bp, Homo sapiens
tctgggcagttatccaaggaaatctaaagtctgcgatgcaattcaaagtcacgcttctgacggacaggtaaggccacggggacatccgtggtgcactgcttgctttgaaatggtcaacccga

SEQ ID NO: 143270 - DNA, 122 bp, Homo sapiens
caacaggcggcgagtggcctccgagggcagagcccgcgagggcgggggtcgggggcgggtcgagagcggcgcagcggcggccggccacgtcgggtcagtgccccactcccaccgcaggacac

SEQ ID NO: 143271 - DNA, 122 bp, Homo sapiens
ctcataatggtgatttttaaatgccttctgcatattttttgtaaccagaattactaattacgactgatcatttgggcaaagaaactcatcaaagcatcgtctattaggaaaattaattaggc

SEQ ID NO: 143272 - DNA, 122 bp, Homo sapiens
cgcgccttccccatccccaaagaggacacccctccttccgcccggcccgctccccacccccgccgcggcaccgcctccccagccgcccgcccttgcccagcgcctcccaggcagccagcgag

SEQ ID NO: 143273 - DNA, 122 bp, Homo sapiens
accagttgacctgaagataggatattattttagataatctgggtggccctaatcaaatgacgtagtcttctaaaacaaacttgtcttagctagcagcagcagaagtcagagatacaaagcac

SEQ ID NO: 143274 - DNA, 122 bp, Homo sapiens
ggtcttccacagcgactcactgctggacccggccatctttgcagaagtcagcaaactggacggtgcggtgcaggatctgcgtgtggcgcggggaaacggaagccagatccagtaccagcagg

SEQ ID NO: 143275 - DNA, 122 bp, Homo sapiens
gaaggttaaaaaaaatgactcccacagggtccatggcatggacaggtagaaagaggagtccgaaggcagagagaccgcaatgggctgaatggttgcccgaaataattcatgtccacccagca

SEQ ID NO: 143276 - DNA, 122 bp, Homo sapiens
actgtgggaacgcaagtggacagccggtccctgccgtgggcgctaggggccagtgctcagcgcgggaatattcccaccgccacgtgcgcgcggacagcgggtactctgaggaggggcctgca

SEQ ID NO: 143277 - DNA, 122 bp, Homo sapiens
ccctcaggggggttgggggtagcccagggaggtcggggtcgggggctggcctctgtagggcgctcagaggccgagtccccccgagcgccgcgtgggtgaggcttggcggtctggtcggggac

SEQ ID NO: 143278 - DNA, 122 bp, Homo sapiens
agcaggcactcctcccttttcactgctgtattttaaatgttcaatttttgcccatttttacgtattccaatttttatggggcttgactcaggatgaaatgcacagatgcggagagttgctcc

SEQ ID NO: 143279 - DNA, 122 bp, Homo sapiens
gcggcggggggggaaccgggggctgcgcgcgcggtgtttgagggccagcgtgagtgtgggcgtgggcttggcgggtcccacactcggagtcggcccagggcagtgaggggcttagcacccgg

SEQ ID NO: 143280 - DNA, 122 bp, Homo sapiens
cgccggcctcctccgctcataccctgggtctcctcctttctttttcttttctttttgagacgaagtctcgctctgtcgcccagggtggagtgcagtggcgcgatctcggctcactacaacct

SEQ ID NO: 143281 - DNA, 122 bp, Homo sapiens
ttggggaggggaggtgctcagagatagggccgaggatggagctcccaggtgggttggaggcgggggtggctgggctcgaggacgctgttggagtccggggtctggaagaggcgatccccggg

SEQ ID NO: 143282 - DNA, 122 bp, Homo sapiens
aaagacagcgacgcaggtcttcatctgggcagggcgggcgcgcagggctctgtgacagcccgggacagcttcttgttccccacttgcagcccctgggctgcgccagtgtgaatgcagctacc

SEQ ID NO: 143283 - DNA, 122 bp, Homo sapiens
ccgccaggctgtagggaggcagctcctgatgaaggaggagctggtcgtcttcgtagcggccggtgatggcagggtctttgacattcttgtcagaggccaagctggttgctgataacaaatgg

SEQ ID NO: 143284 - DNA, 122 bp, Homo sapiens
gtggatgataaatatgactggctgcctcctcccaaatagtgccctcagccttgtaagttacgtggtctagagtcctgtgtccttgagccaacctgagttgtccagcttgggttaggagtaat

SEQ ID NO: 143285 - DNA, 122 bp, Homo sapiens
gtcacggaaccccagcgtgggctccagtcgcagcatcgtgacaccgtccccattctcccccggcccccacatagggccagactcaccccctggggacccccctgtcaatcagcactttcccc

SEQ ID NO: 143286 - DNA, 122 bp, Homo sapiens
agtgaaggagtctcccaccagcgtgggcttcttcaacctgaggcattactgaagccccggcgccaccagctgcgcggtcttactccccttccctgcctatggtgtcgcttggctaagtgact

SEQ ID NO: 143287 - DNA, 122 bp, Homo sapiens
tgtagtaacaccatttacctctagaatggctgtaaatcgagtaaggcttatttaatacagcgtctggcatacaccaggcattcagtatggcgccagtcattaacaataggtggttactaact

SEQ ID NO: 143288 - DNA, 122 bp, Homo sapiens
aagaacttctccagggcgctggcacagcggcagtactcgctgtccggggggttgtactcgcgacagttggcgatgacccgctgcaggtcggccacaaagagcttccgggtcacgtagtagcg

SEQ ID NO: 143289 - DNA, 122 bp, Homo sapiens
ggttctgagggccttctgtgtacttgacaccacagagtgtgggacctggagttcgtcctccgggatagaccacaccgtttaagctccatcggctagagagtaataataacaaccaacacaaa

SEQ ID NO: 143290 - DNA, 122 bp, Homo sapiens
gtgcgctctgcctgctgctggggcctgacttcttcacagacgtcatcaccatcgaaacggcggatcatgccaggctgcaactgcagctggcctacaactggtaaaaatggggacagggcatg

SEQ ID NO: 143291 - DNA, 122 bp, Homo sapiens
gcgactgacgcagaggtcgcaataccgctgggggctgcctggtgccatgcggttgggccgcgggcccaagggaaagagagacacctggcctgacttctgcaggcctctccccgccagcgagc

SEQ ID NO: 143292 - DNA, 122 bp, Homo sapiens
tactcttccctgcctgagcaggttgatggctggacagacctgcagaagcagttggacaatcgggaatttgctttgagccgggcattcaccatcatcttcatcttgctcgcctctttcatctt

SEQ ID NO: 143293 - DNA, 122 bp, Homo sapiens
agggcatgctggatgcggtcctccgtgcatgtcgtggcccctggctgcatcctgggtcatcgcctgcatgggggacagacgccggtcagcttgtcgagctcctttcccagagagcacctggt

SEQ ID NO: 143294 - DNA, 122 bp, Homo sapiens
ttcaatctatctggcgacaacatgtttgcagaatatggcaaataaatgcttccacagagacgcaaggtaacgtgagaacaaatccaggaacaaagatttctgaccagggaaatcaggaatca

SEQ ID NO: 143295 - DNA, 122 bp, Homo sapiens
ctttctcaccctcttctctcaccccggctttcaccacagacaggttcacagtgaaggctccgtgctaccgggagcccgacctgagccagaagccccggttcctggtgggcctgcggtcccac

SEQ ID NO: 143296 - DNA, 122 bp, Homo sapiens
gcgcctatcgtgaaagcgcgagaacacaggggattatcgcgaggttccgtgctcctctcccgctccctcttccccagctccctctggcgcgggttccgctccacccccggagccccgccccc

SEQ ID NO: 143297 - DNA, 122 bp, Homo sapiens
gttgctttcatcttcggtagtggcggtgaaagaggcatgacactaaatcgacccttaggacgctcccctccgtccccacccctcacccccttcccacacacaccctcattcctgcaccccct

SEQ ID NO: 143298 - DNA, 122 bp, Homo sapiens
cgcgggtggagaaagcggctcccgcagcgtccggggcgctgagacgctcgagggcgcaggcgccctagagcagccgggtgcagtctttggccagggctgcccctggaacaccccggtgtggc

SEQ ID NO: 143299 - DNA, 122 bp, Homo sapiens
tctcctcactgaggtccagaactgcccacagagcaacccagacttacccaaatagaacaccgcgacccatcctcatgcctgttcctcccgagtcttcgcatctcagtacgtggtaccactgt

SEQ ID NO: 143300 - DNA, 122 bp, Homo sapiens
ctctgcccggcccggggagtgcctggtggggaccccgttcctcctcgtaggcggcggggacgcgggaggccgggggcccggagccagcccgtccggggtcgcagcgcgccctgggtggggtc

SEQ ID NO: 143301 - DNA, 122 bp, Homo sapiens
ttacaatggcttacacacaagcctagtaagttgtcaggggctgtcagctgggcaatcagtcggggctattgctggggcctcccatcttgtccatacaggcttttccatggtactgcctttac

SEQ ID NO: 143302 - DNA, 122 bp, Homo sapiens
tggttttagcaaagtctttatgtttgtctttccggagttctgtttggtcagtgtcttgctcgtgcatggtctgaatactctcagtagaatggaattctctgcacaggcatttgaatggaatg

SEQ ID NO: 143303 - DNA, 122 bp, Homo sapiens
gggggtggagaggagagcgctgcgcatgcgcatgagcgagtgtctgggctctgggtttagcgccggacccggcctggaccgtgtggttaaaggggaacaaccaccatgccttgccccgcccc

SEQ ID NO: 143304 - DNA, 122 bp, Homo sapiens
ttccgtgggtcttggcacaagcccacggccctagtaggtgtgaacgccaaaaaccttgcgcgggcgggatgggggcggggaggaaacaagggaaagtttggggaggaccaggttttgggggc

SEQ ID NO: 143305 - DNA, 122 bp, Homo sapiens
tctagaaaagccagtgcctgcacctgagctctgagggaccccctgttacttagtggagagcgagcagagcagatggaaccccgggaaaggctgtctcatcctttggagcatgagaggagaag

SEQ ID NO: 143306 - DNA, 122 bp, Homo sapiens
acgcgtgtttgacaactgctcccctgaataaatgcgaggataaatgtttgattctttccccgagcaaatattgtccctggagccgagtgcagccagcgcagagtgagcggagcctgggctcc

SEQ ID NO: 143307 - DNA, 122 bp, Homo sapiens
ttttttttttgagacggagtctcgctcttttgcccaggcctgagtgcattggcgctatctcggctcactgcaagctccgcctcccgggttcacgccgttctgctgcctgagcctcccgagta

SEQ ID NO: 143308 - DNA, 122 bp, Homo sapiens
ggccttcagacaacgcctggacttcgccgcggctcagtaggcctgcgcctagggtccaggcgccctggctgtgccctggggtctatacgagccccaaccccacagtgggcctagagcgcaaa

SEQ ID NO: 143309 - DNA, 122 bp, Homo sapiens
ggccccgccctctgacgctgcttcagcatcctctggtagcgtccgggaggcagctagccccgccccctgctggccagctctcctggcatccaaggccacctggcacgggaggcaccgggtga

SEQ ID NO: 143310 - DNA, 122 bp, Homo sapiens
acagattgcagtacgtattttaggacctgccacccattttgatttgaaagattatgttgtcggaatttcagacactgcaggtaaagatctaattttactaattaacaaggatttacaaatct

SEQ ID NO: 143311 - DNA, 122 bp, Homo sapiens
caaactcctggcctcaggtgatctgcccaccttggcctcccaaagtgttgggattacaggcgtgagccacggcggcttaattctttaaaattttttgtagagacagggtctccttgtgttat

SEQ ID NO: 143312 - DNA, 122 bp, Homo sapiens
catttgcctcagctgcacaaaggccaggccagatggaagagaccagccttcaccgaaggccgcagggagcccggacacccggagctgagcattccggtcacgcctcaaccccaaggggcctg

SEQ ID NO: 143313 - DNA, 122 bp, Homo sapiens
ccacgaacgcccttacgcttgcccagtggagtcctgtgatcgccgcttctcccgctccgacgagctcacccgccacatccgcatccacacaggccagaagcccttccagtgccgcatctgca

SEQ ID NO: 143314 - DNA, 122 bp, Homo sapiens
gtgggcggggcagggctactggagctgtgacagccttgagggccagggtgactcacgcagcggctctctgcttcctctgggtgtgtcacaccctgggctcctggtccccagtggcacaggtg

SEQ ID NO: 143315 - DNA, 122 bp, Homo sapiens
tttcggctttgctgtgcattggaaagtttcataaaaaatcatgggaaatggtctaggcgccgtggctcactggtgaatattgtcaatttcatgtggttcccctcaatttatgttttatttgg

SEQ ID NO: 143316 - DNA, 122 bp, Homo sapiens
tcgtttggcccaagttggactgagtgcaggggtcaaccagggggctcaggtcacaggcaccgaggcacagggcagaagggactggagagcggctcatgggtgccgtgggggtaggggcaggg

SEQ ID NO: 143317 - DNA, 122 bp, Homo sapiens
gcgcccgttaccccgaatcgaagcccgtcatccccgcggggcacctctccatgcccggtgcgcacggcgcgcagacacccagctctccagagacctggcccggaccccccggagcccgccca

SEQ ID NO: 143318 - DNA, 122 bp, Homo sapiens
gctcagagctccagcttcaagagcttggggcaaatccaccccggggaggagcgtccgaggcggccctcgggcgggagcctgaagacagcccgtgcctctgtgacccagccaccgtcggatcc

SEQ ID NO: 143319 - DNA, 122 bp, Homo sapiens
gttattctacctagagatgctgtagtggactgtgttggttggcatccagcctggaggtagcgtttacaaaagggcaccagctgcagtagtagcagtgggattcgagcttgtcctgtgttgcc

SEQ ID NO: 143320 - DNA, 122 bp, Homo sapiens
gcgagcagcccagcagctgtgggaaacaccagcccctacaaccttccttgaaagctctgccggggccggctgctgtagtggggacttcagtctggtgaatcaatattacgttgcgtggaacg

SEQ ID NO: 143321 - DNA, 122 bp, Homo sapiens
ccccacctcctcccttcccagccccaaagaacttggtggcaagggccttggtggcgttcacgcagatcgtcttttattagcggtctgtaaagcacctcccagggtcccccgaccccagattg

SEQ ID NO: 143322 - DNA, 122 bp, Homo sapiens
cctgcgcatccggacacgatgaggagcaggtgcgcggggccggggtgtgttcgagggggtcgtgcgcgcctgggctgcctccccgcggacggcggactgggccggggcggcgcttcctggca

SEQ ID NO: 143323 - DNA, 122 bp, Homo sapiens
aaaacctcatgtgctccactttgctctcttcccatctcttctgtattgaggctgatccaccgtttctgaaatgggctgggcccaagtagttggaaagagctacaggttgacaggcactggga

SEQ ID NO: 143324 - DNA, 122 bp, Homo sapiens
tgatctctgcctggaggaaacttcattcattcaaactgtatttgccaagagctgcccatgcgcccaggactatggatgctgtggtgaatagactgaggcccaaggggcaggaggcccttgcc

SEQ ID NO: 143325 - DNA, 122 bp, Homo sapiens
tgtgccctctctagtgtgcctcccaggtcactcagctgatggaaaatggaatcctactaacgtgcagggctctagaaattcagcagcgtttcatacatggcatctgccatcaaggaagtcac

SEQ ID NO: 143326 - DNA, 122 bp, Homo sapiens
cgggattcacggagggtcttccaagaggaagaaaccgcgggcggaaggccgaagaagcagcgcgggatccctgcctcaggcctgcacggacggtgtgccagtgagtctcttcaaaaaaggag

SEQ ID NO: 143327 - DNA, 122 bp, Homo sapiens
gagacagtgcttccctagcaacatgaaaatagattcgtgcaaacttgagcacctccctctcgttccctgggcctcagtctcctctgcacggagaccctgaagtcccttccagctcagacatc

SEQ ID NO: 143328 - DNA, 122 bp, Homo sapiens
tagccagaagggacttgcgattcttgtgcccactccactctacggtcccgttccctctttcgtttttcagaggaagaaactagtgttcagaaaggtaggggaaggatctgaaactggagcta

SEQ ID NO: 143329 - DNA, 122 bp, Homo sapiens
ttcttaaaaaatgtggagtttttttggatcatttgatcatttcctataaaccatgtattccggtctctatattactgagagtgatgttagattcttggtctactgttgaagataccaaacac

SEQ ID NO: 143330 - DNA, 122 bp, Homo sapiens
ctgatgttaccttccctgttataaggaagaaaacagagaatgcagcgtttgctaactgtccgagcccacagcgtccatgatggggtgagaaccgaagccagcagctccccactctggaagta

SEQ ID NO: 143331 - DNA, 122 bp, Homo sapiens
aactagagtgaagtacatttgcacattttctgattgacagttagtgaactggcaaaggctcgattcagtctcatgtctgctaggcccattctcttttcacttcatcatggcccccggtgaga

SEQ ID NO: 143332 - DNA, 122 bp, Homo sapiens
ctgcagtccgggcgcccctggtgagcacaccggcttgggtcgccctgtagcgggaggtggcgcagggtgcagatgacaggaaggaccctcagcccagggcacctggcagccggcggtgggga

SEQ ID NO: 143333 - DNA, 122 bp, Homo sapiens
ggctgtgtttagacctgagggagccagctgtgaggctggagcagttgctgcatggcggggcgggggctccacagggctgttcacctgctgctctgtgcagagacagcctcaagtccagctgc

SEQ ID NO: 143334 - DNA, 122 bp, Homo sapiens
tgtgcaaatagcggagggttacgcatttgctgcaggtggtacttaagctccaagaacttacggcacacctgcttgagtggatcatgggtgagctggagaacctgaagtagcaaaggcaagaa

SEQ ID NO: 143335 - DNA, 122 bp, Homo sapiens
cgaagagagccagctagagtctgggatgcagaacatgagtattcatatgaagaccaccagcggttttgcaggtggtctgagctcggcctatgggggcctcacaagccccggcctcagctacg

SEQ ID NO: 143336 - DNA, 122 bp, Homo sapiens
ggaatatgcatcaatattcaggaagacaactgacttaataaccaaaatttatcttcaaatcgctccaggttcaatgatgatttaatatacaatcatattatatttttatttattaaagaaac

SEQ ID NO: 143337 - DNA, 122 bp, Homo sapiens
aggccaagtggtcgccggcggatgcgccctgccccacatcgccagggggggtaggcaaagcgggcacaagcttagttaagggatggaaagcctcctggacgtgttctttcaaaggggagatt

SEQ ID NO: 143338 - DNA, 122 bp, Homo sapiens
gacaacccaagcgtccttcagtggacacacgaatggccacaccacggaacgctactcagccgtgaaaacaaacagaccagctgcacacagcaacttggaccatctccagagaattctgccga

SEQ ID NO: 143339 - DNA, 122 bp, Homo sapiens
gtggtcgctgttgtgcatgggcaggactgagcaggaaatggcaggaagcaggaagggcttcggggatgtggtaacatgtactttgatacgggtttgggttacacaggtctatgcgtttgccc

SEQ ID NO: 143340 - DNA, 122 bp, Homo sapiens
ggggcgcctcccacgccctccctcacctgcggccttcggggcaactcgaccgcgcctgggcgcgccccacccgcccgatttccccacggcactccgcgcccccccagccagagccggtgtcc

SEQ ID NO: 143341 - DNA, 122 bp, Homo sapiens
ttccctagtctcagtggagctttaaccctcccaggcacaggaccgctggagaggtcgccacgggccggtttcccagccggccgcgagggggcgacagagtgcaatggacccaggtgagtcgg

SEQ ID NO: 143342 - DNA, 122 bp, Homo sapiens
gagcccgcggctgcttatgccagcgtctgctgagggggtggatgctgcagatagagcccgcggctgcttatgccagcgtctgctgagggggtggagagggagcccggcccctgggtgtgctc

SEQ ID NO: 143343 - DNA, 122 bp, Homo sapiens
atggtcagcatcacatgttgcagtaatggctcgacatgccacaaaggcacagtataaaaacggtgggaatcagagcacttcagctccaattgctctatgtttagaattgcctctttttcaag

SEQ ID NO: 143344 - DNA, 122 bp, Homo sapiens
ctcattgtctgagtgggatggaaagagtctcacttgcagttgcttcagtcacaacccaggcgtctgccttaatagcatcacctgtgccgtctgcgtttctagcgtcacctgtgccgtctgcg

SEQ ID NO: 143345 - DNA, 122 bp, Homo sapiens
ttaccttcccattcatctttgatgtgatctctgacattgagatttatggtaacatctgcacgaactcgggttggccagttttcacctatgttgggtttggccacttcaacgacagtgaaagc

SEQ ID NO: 143346 - DNA, 122 bp, Homo sapiens
ttatacaccattcaatttcaacttggcagtcagagcagcacacacaatgtcaacgcaaatcgaaagaggcctcataacatacaaagttgattctctcttatgattctagctaagtagaataa

SEQ ID NO: 143347 - DNA, 122 bp, Homo sapiens
caaaaggtagctctgcggtcaatcaggtccgacggggtcccttgctggatttccatctttcgtgcagttcagtgattgatgtaaaatgtcctcaactcaaactgtcacggctccagcagaga

SEQ ID NO: 143348 - DNA, 122 bp, Homo sapiens
cagtgaggaagtcttgaagaatagagccataaagaaagcaaagcgcagaaatgttggattcgaatctgacactggaggagcctttaaaggttttaaaggtttggtggtaccttctggaggag

SEQ ID NO: 143349 - DNA, 122 bp, Homo sapiens
gtgttgtggtcgggccgcagagcaggccccttgacggggggatccggagccgcctggtgccggcacagcctcagggagcagcccctaagctgccccgtgacagtcaatcgcccgctttcccc

SEQ ID NO: 143350 - DNA, 122 bp, Homo sapiens
gggacgcagctcggggtccaggctcgagctttgctcactcagggcgcttcgtgcagggaacgccaggcccccggacgcgacccacgcggccgctgccagcggggaccgaggggagccggggc

SEQ ID NO: 143351 - DNA, 122 bp, Homo sapiens
tgctgtcaacgtatgtcacatcccatgagatttcatggcaggtctttttaaaattttacccggtaaaggagtaacagcaaggattaagtggctaagctggatgcaagacacagagcctggtg

SEQ ID NO: 143352 - DNA, 122 bp, Homo sapiens
cattgtcgggagggtgccggcaaaggcggtctggtcctggagggaaagcaggcagccccacggagccctgccacccgctgctgcgggtcctctcgggttcccgcatcctttccaatgcgcaa

SEQ ID NO: 143353 - DNA, 122 bp, Homo sapiens
ggctttgtcttgggccacccggacacggacgcgtccagctggcgtccctgggcgcgcggccggctctctctgggaatcagtcccttctactgtcatcgagtttggagaagcccggctgtaca

SEQ ID NO: 143354 - DNA, 122 bp, Homo sapiens
cacaagtcagaatggaacaataatttccctccggttgcactgccactactgaggagcaatcgcctaattccacacagagtttgctgattctgtgggcctaacagagaactccagatgggcaa

SEQ ID NO: 143355 - DNA, 122 bp, Homo sapiens
ttcaccgggtgtcttgtcttcctgccagatctgcgtggtgattgctgccgtgttcgggatcgtcatttaccgggtggtgactgtcagcactttcgctgcctttaagtgggcgttaatcagga

SEQ ID NO: 143356 - DNA, 122 bp, Homo sapiens
atttacattttccactcctgagttccatttcagctgtgtgtatagtaagaaataagcaaccgagatttttctaggacatttccatttgctgagttacttttgaagagtacactgtttcaaat

SEQ ID NO: 143357 - DNA, 122 bp, Homo sapiens
ctggaccttgtgagtaattcccgatgcccggtaggcagctggcgaggctgtaattgccctcggccacttcagagcaaccatgtgggtgcattgaagacgttgtttgtggagagcagcaggtc

SEQ ID NO: 143358 - DNA, 122 bp, Homo sapiens
tttcctctgcgctgctaccagccctgtcacaggtcccggcgctctacctagcgcacctgtcgcgaccaagctgctaacacctactgctcctgcggccccgccccggaccccgcccaccgccg

SEQ ID NO: 143359 - DNA, 122 bp, Homo sapiens
gctctgctgaaacttttaaacgctccagctgggtcgccgttaaagtcacaaaaccagaaccggagccccattactaacccctacgcaggatcccgctaggctagggggatccctggggaagc

SEQ ID NO: 143360 - DNA, 122 bp, Homo sapiens
tgtcccccgaatatcaagaggcctggagggacagtgatggctgtgcacccagatgccgcccgcagtagaaaatgtatggctttgatgccccaccccttgttcacattgcctcccaagaaatc

SEQ ID NO: 143361 - DNA, 122 bp, Homo sapiens
ccgcagacgtgaggaaagcggccgcggcttcaaactccgtagtgcgcaggcgccacacaacgcgcaggcgccgcctagaagtgacttctccaaaaagtgtgttagttcccggtcacctgagc

SEQ ID NO: 143362 - DNA, 122 bp, Homo sapiens
ccaaatccaatttagttattataccatgagtatctcttggggctagacttacaccagtcacgtgtaactgacatacaaaccaggaacactaagtctctcgtttatatctgtgggttgtgacc

SEQ ID NO: 143363 - DNA, 122 bp, Homo sapiens
ctggaagacagatctggtgagacagctggtgttcacgccggctcctgtgtttcctcttgtcgtgatggggacagccttttataacacatcctccgtgagagtgctgtcaccacagctggcca

SEQ ID NO: 143364 - DNA, 122 bp, Homo sapiens
cgagatgcccgcggcgctgggagggcgacgcagcgcggtctagttcagggtctagggcggcgcgtcacttccggtagcgcggagcttgtaaaacaccctggagagaaaatggcggcggcagc

SEQ ID NO: 143365 - DNA, 122 bp, Homo sapiens
acataaggccgattcacacttcagctataacagaaaataccctctccatagggcataatccgtaaatgactttgtaactttacctcatcctctccatttacacaaggcataaccgaagtaac

SEQ ID NO: 143366 - DNA, 122 bp, Homo sapiens
attttttaatgatcacaatctattgacttttaaaacaccaacaacactgtttaaaaagcacggtctatttaaaaagatgcttttgatttgcctccatggctccaaaatgataatctactttg

SEQ ID NO: 143367 - DNA, 122 bp, Homo sapiens
ggctgaggcaggatgaagtcggcacacgcgatgttctctgtttctcaaactgggggacggcgggatgaaagcggcacccaggaaggctcagcctggcacgagtgtgcgagctgaacggaatg

SEQ ID NO: 143368 - DNA, 122 bp, Homo sapiens
tttcgggatcgccctcctcctcctcctcctcctccttcctcctctcccgccgcctgcagccggagaggaggagatgagaagccttgtagttttaaattcaatgtgacagtttcggaaaagcg

SEQ ID NO: 143369 - DNA, 122 bp, Homo sapiens
gcgagaggaggttttgaggtatgtgacccgggtcagggctggagaggacccaggcgagtccgcactcctgctaccactgcggccccccgtggcgtctcagccttgctgccagccggcttctt

SEQ ID NO: 143370 - DNA, 122 bp, Homo sapiens
agcctggctctcctcttacgcggggggctgcgggcaattggggccgacaacttgcggtcccgccttgggacgcatgcttgctcgagagctggggctgcagggtgcagtgggacagtaggacc

SEQ ID NO: 143371 - DNA, 122 bp, Homo sapiens
ctcccgggtcgggcgcggagaggcgagtccccgagtgggtggggccggatgtgcaggccccgcccggcgccaggttccgggctcgggtcaccgcagcacgtccaggccgccgcgggtgccgc

SEQ ID NO: 143372 - DNA, 122 bp, Homo sapiens
taactggatcatgtgatatttcacgtacttcaaatctgtgggtgcaaatacgttttaaggcgtaaatttcagatgggagagagaactttctaggcaaccagagattgacaagcttctttcct

SEQ ID NO: 143373 - DNA, 122 bp, Homo sapiens
gacacaaaagccagcttccttggctaagatgcccttaaaaacattggggctgattttgtgcgtctacagaaagtaacagcccaggagagaatgtacacagaggcgagctttctaactccatc

SEQ ID NO: 143374 - DNA, 122 bp, Homo sapiens
aagatcatctggggtcttcagtggcctcgtggagcctcatggccatggtggggagtgatgcgcagcctggtgctcgggccaggaccagacctcccatggacagtgggcacgtgccttagcat

SEQ ID NO: 143375 - DNA, 122 bp, Homo sapiens
tgaggatgacagagaaggtgaaatgcaggcagctgtggtgaaagatctggtgtgagggagcgttctccaccacccacacatccttacccagtgtgggctgatttccggctggctgcttttcc

SEQ ID NO: 143376 - DNA, 122 bp, Homo sapiens
gggagtttctttcatagaaatggccaagtttgtctatcaatggagcacacgcgagccgggcggaagagcacgccaatggccgctccatcaactctggcagttgtgtacattacgccttttga

SEQ ID NO: 143377 - DNA, 122 bp, Homo sapiens
ctccagaagtatagctcttccctccactggtccttttcaggaactgaagtctaatcagcgcgccagccagaggccagtttgtcatgggatttcctggggagcttaaatggaagtggatcaga

SEQ ID NO: 143378 - DNA, 122 bp, Homo sapiens
agtgtgacgcccattttaccagcgggcaaactgtggcttagggatgctgggtgatttgcccgaggacgcacacagagggaagggccaagccgggattccaactcgggactccccgcttctgg

SEQ ID NO: 143379 - DNA, 122 bp, Homo sapiens
tctcgctctgtctcatgaagtggatgttgttggcgctgtctgacagttctgggtactgctcgacagagatcacgaaaaagccgtcgtagccttgcacccgccctgtgctcagcacctgctgc

SEQ ID NO: 143380 - DNA, 122 bp, Homo sapiens
ctttcttgggcgggacatccttgcccggcttgggggctgtctccatctcgcccacccgaacggcgatccacgtgcaaaactcctctcagctgccacacagtcggcttgaaaactcccggaag

SEQ ID NO: 143381 - DNA, 122 bp, Homo sapiens
cttctgatgatgtggctggtgtgggtgaaccagccgcgagaaggcacaggacgatactcccgcgtggagggcgccacgaggtcaaggtcctgaggccggaacaccaaggagctctgggaggg

SEQ ID NO: 143382 - DNA, 122 bp, Homo sapiens
ccggggagcccctcggggtgggggtggggccgctggagggagggagggggcgggcgggggcggggggcgcgtttgtctctaataagaaaagacaaagacatcccggcggccgcggctgttcc

SEQ ID NO: 143383 - DNA, 122 bp, Homo sapiens
cttctgagagcgctataaaggcagcggaagggtagtccgcggggcattccgggcggggcgcgagcagagacaggtgagttcgccctgaagatgcccacaccgcccggcccgggctccactcc

SEQ ID NO: 143384 - DNA, 122 bp, Homo sapiens
ttcaatcatctcctcctctccaaagtctttcctacccttccctcacctgaagtatcgatccgtcagccccggttggtgctctcacagtactcatttacaattgcacttaaaatgctgagtag

SEQ ID NO: 143385 - DNA, 122 bp, Homo sapiens
tcatttccatcaagtgtgcagcatgggtctctctgtagcaggccatggcatgctggtggccgctcctgctagagctgtggacagtcatgcccacctgggctggggacgagctgctcaacatc

SEQ ID NO: 143386 - DNA, 122 bp, Homo sapiens
gtttctgcatagatgggattgggtagagaaaaaccaatgccctgagatacagatgccggacgtcagctgggctcattcatgcagcaattggtttgctcttgcgcaccagccttaggtagcac

SEQ ID NO: 143387 - DNA, 122 bp, Homo sapiens
gcagacgagagcgaccggcgagcactgacgtttccttgaaggagccgccgtgactcaggccgggcaagatttcctgccccgagtcccaaaacaaacaaatggcccttgtgcacggtcgggtc

SEQ ID NO: 143388 - DNA, 122 bp, Homo sapiens
gggggactggattaatgattcttagcctaaagggacagagagaaaggagagcagctacagcgaatcccaggcaggagccatctcagggcaaactgacaggaagctatcctgcaggtttcttg

SEQ ID NO: 143389 - DNA, 122 bp, Homo sapiens
tgcagtgagatttagacctgtggctgttcctcttatggcctgagattgaatttaaatcatcgctgtgggactgcttgatgtatgcaatggtttagagcaagagaaagtttacaaagaaagca

SEQ ID NO: 143390 - DNA, 122 bp, Homo sapiens
cccgcaggtggagccgacgcccaggaaagcagctgggagagcccctggggctggaagctgcgccctgggccgggaggaaggcgctggaggccgcggcctgaggtgatgccagccgccgtcta

SEQ ID NO: 143391 - DNA, 122 bp, Homo sapiens
tctcaatatggcaggaagtgtacacccccgtgtgagatggtccttaataatattccaaggcggagggggagatattactcccaatatcgcagaaagtgtacccccccagggatattgttctc

SEQ ID NO: 143392 - DNA, 122 bp, Homo sapiens
tctctttttcctaagtcagcttcctatgtgttttacatacatgtaaaatcacagaccctgcgcatgtggtgggagcacatcttttcacattttacagaagagacaactgaggctcagagagg

SEQ ID NO: 143393 - DNA, 122 bp, Homo sapiens
ggcttcgtcctcggaggcgcggagctccaagcaagggctgagcagcagctgggagtctcccggaggccagaacattactggccccgtgtgcacatgcgccttcttggagtcccaaaaggcag

SEQ ID NO: 143394 - DNA, 122 bp, Homo sapiens
gaggaagagggttgaggaagaggaaattgggatgaggccctggaacacgttttaatgcagcgccctgacaggcaggagccaggcaatactgcttgggaatgtgaagccccatgggcaccagc

SEQ ID NO: 143395 - DNA, 122 bp, Homo sapiens
gtgacgcagacgcggcgggcctcgatgtgtctgcggtggatggcatgcttccactggtgccgtgccgccccggtgaggaccagcagggagcgggcgggtaaggggatggccacctccacctc

SEQ ID NO: 143396 - DNA, 122 bp, Homo sapiens
acctgaacaaaatcatgcagtcaggggaattaaaatgcacttggagaataggaagtaggccgcaaataggtatgtctctgcatccaggaacattagaaacaaggccagagaaacagacaaat

SEQ ID NO: 143397 - DNA, 122 bp, Homo sapiens
ctggcactcacagcaggccggtgctaaggagtgtggcgcgggctcgactcccactgctgccggcctcccgagtgactctgttttccactgctgcaggcgagaagaggcacgcgcggcacagg

SEQ ID NO: 143398 - DNA, 122 bp, Homo sapiens
atgggttggattggatagcaagaggagcattaggatatcctgaggagcagtggttttgaacggggggcgatgttgcaccccctcactgcggagaggcattttgacagcacctggagatatct

SEQ ID NO: 143399 - DNA, 122 bp, Homo sapiens
ctgggggggcagcaggaccccgcatagcaaatctactctgcactcggaacgctaggcattcgttgtcaagcctggctggaacaggcgaggtttaataaagccgcaagggcgatgcagtttaa

SEQ ID NO: 143400 - DNA, 122 bp, Homo sapiens
ccttctctcctctctgacttttgagggtattgagggcgcccttagtcatagtctcgactccgccattgccttctcctcggcgtcctcacaactcttaattgggcctagtgaaaatgggggca

SEQ ID NO: 143401 - DNA, 122 bp, Homo sapiens
aactgtccgacccagcgggtgggaggggtgggtctgggaacgttgcggcggctgtcgccgcggccccagcacccagagctgttctctggccaagcctgcgcctgtagtccttctttgcctcc

SEQ ID NO: 143402 - DNA, 122 bp, Homo sapiens
acagttttgcacagtgatcttccccattgtccactcaagtcgtggcctggggaacacagacggagctgtccccagtgtcctccgtccctcagcccctggcctggctgagtttggcagggcct

SEQ ID NO: 143403 - DNA, 122 bp, Homo sapiens
atataaacagtacttacaaaggaacaagcaaagacgatgccccacagaagaacaggtgaacgcactgccgctaagcaacctccattcagcactgatggaaccgcctcacgtgccctgcgtgg

SEQ ID NO: 143404 - DNA, 122 bp, Homo sapiens
gggccgtggcggggatgtcttcggggacacgtccttcctcagcaaccacggtggcagctccgggagcacccatcgctcaccccgcagcttcctggccaagaagctgcagctggtgcggaggg

SEQ ID NO: 143405 - DNA, 122 bp, Homo sapiens
aggctgggaaggagatcctcaagcaagcgggctctcaaagccgaggggaccccaggcaggcgcggagctcagcgaagccagaaggagcgcgccgggggcagcccaagcccggggtctccccg

SEQ ID NO: 143406 - DNA, 122 bp, Homo sapiens
caccacaggaccgctaacccaggatctttgttgactttgctcccaggccactgccccacacgcaggctctgaactcctgggagaggtagggagccagcccgaggcgtgagtcaagagtgtaa

SEQ ID NO: 143407 - DNA, 122 bp, Homo sapiens
tttttctccagtagtactcagctcccaacaaagaattgagtatggcatcaagccaggatgcggggatagctctagttgaagagctagattcagagaaaatggaagaatccaagctcagaagt

SEQ ID NO: 143408 - DNA, 122 bp, Homo sapiens
ccatggggcaggcttgttaccgtcaggacggggctgctttgggtgctgagtcctggaagccgctcggacccatccatgacttcttatgtgtgctgtcggcagctgaccagcggccacgctat

SEQ ID NO: 143409 - DNA, 122 bp, Homo sapiens
tttgaggtgacaggcacgtgaaccgccctgatctgactatcccacatcatacacgggcgtcgaaacaccaccctgtattccagaaacaggtgcaattattgtgtgccaattaaaaaaaggag

SEQ ID NO: 143410 - DNA, 122 bp, Homo sapiens
cgccgcggctcttttgtttctccgttggggccgagcccgggccctagttggagccggagtcggagtcggagtcggatccggattcggattagcagcccgggaagagtgccgtggcacaggcg

SEQ ID NO: 143411 - DNA, 122 bp, Homo sapiens
tggactgggcgtgagttaattggctggggggcggggcaccacgggttggctccgcccaggcgctcgcgcggatcccgggtggaatgacgggagggagtcccggcagctcctacctcccagcg

SEQ ID NO: 143412 - DNA, 122 bp, Homo sapiens
ttccagctgctccgtcaccccaggaaggcagcgccggcctctgggcggttctggtggaaacgggctccgccgcccgcaggaaaactcacaactaagggaccaggaaaaagcctctcagggtc

SEQ ID NO: 143413 - DNA, 122 bp, Homo sapiens
gacgcctcgagcaccgactccacagccacggccaccgctcctcggctcccgtgacaccggcgcgcctgctgcttcgagcaggggaggctttgcactcccatcgcacttttctcgtccgaaga

SEQ ID NO: 143414 - DNA, 122 bp, Homo sapiens
gcagcccgcctcggccgctggcctggcgtccctggagctcgactcgtcgctggaccagtacgtgcagattcgcatcttcaaaataatcgtgattggggactccaacgtgggcaagacctgcc

SEQ ID NO: 143415 - DNA, 122 bp, Homo sapiens
gcgggagcgctccttgaagcagtagactgtctcctcgccgtcccagatggtcttgggcagcgggaacttcttgcgcagtcgatacttgtccactgcgccaagcgcgcggccgcgggcccgct

SEQ ID NO: 143416 - DNA, 122 bp, Homo sapiens
accctgaatattgactgggtagagatttaaacagcatgcatgcaatagaattggcctcatcgccccatctgtagaacacaagcctgtgaaatccagtgtgtctgtgtgacatgcaattagct

SEQ ID NO: 143417 - DNA, 122 bp, Homo sapiens
aacaaaatgaccgtgaataatgtattcccaggcactgcttcctgggcagcactgccaaggcgttctgtggcggctgcatctgtcatcggggaacacaaaacacacagggaagtcacccccac

SEQ ID NO: 143418 - DNA, 122 bp, Homo sapiens
gagatttttaaagcagttctctttgtaacatcaacattacaatctatatcctgaaaactacgaagttttatattcctccttcccctcactaggcctcccctggcctgcttgtgtatttgctt

SEQ ID NO: 143419 - DNA, 122 bp, Homo sapiens
acaggtcccgtgcagaaagggcgctatgccttacagaaaagttccttgcctcccaaatgacgcccagccttcctgccccgttccaccgctttcccacggccccgcccctctacagagttggt

SEQ ID NO: 143420 - DNA, 122 bp, Homo sapiens
gagttgggggcggaattctgggccggtgagggctggggcgggaccagcaggggaggcctccgcgagctaggggaggagctctgcattgtctggggcggggcttcgagtagcggtagcgaggt

SEQ ID NO: 143421 - DNA, 122 bp, Homo sapiens
tctttccgcctttttggccctgtctgaaatcgggggtccccagggctggcaggccaggctcgctgggctcctaatcttttttttaatttccaatttttgattgggccgtgggtccccgctga

SEQ ID NO: 143422 - DNA, 122 bp, Homo sapiens
ccctcagcaggaaggctcagtaggggtttagaaagcagattgtccacactgtcctgatttcgggaaagaaaagctctttctattgaacaaataaccttttggatgagaaagaaaagaaatac

SEQ ID NO: 143423 - DNA, 122 bp, Homo sapiens
gctataataatgatgataatgaagaaaaacaaaagcatccattcgtcacttagtggcaagcgtttttccaactactttccgagtagtaactgcttgccagagtttccccagcttgggccgga

SEQ ID NO: 143424 - DNA, 122 bp, Homo sapiens
atagcttattgtttaggtaagaacaacagaacagagaggcagagggattcccgaggtttgcggagcggatcggtaagggtgagccccgaacctgtcttcgctcagttccatagtcgacagcc

SEQ ID NO: 143425 - DNA, 122 bp, Homo sapiens
tctacagctctatcctcagtacagcaccaagcttacagtggatgctcagtgaagatttgccgatttgccgaatgaatgctttcacccctgcaactgtttactgcctgctaggagctcagagc

SEQ ID NO: 143426 - DNA, 122 bp, Homo sapiens
atacagtaaatgtctaagttctttaaaagaccttagtcataactaggatcaccaccataacggatttactatttatgctacatttaaacagacagaatccaaacttttaaatcaaaatcatc

SEQ ID NO: 143427 - DNA, 122 bp, Homo sapiens
gggacatggcagggcctcaggctcagctctttggaaactgaagcccattcaccaggtgggcgggggaggagctgggcagaggttgagacacaagacctgagagcagagcaaagtttctcatt

SEQ ID NO: 143428 - DNA, 122 bp, Homo sapiens
caaagtaagttttccagagaaataaactgagtcctaaatactgagaaggagttagccaggcgaagatgaggtctttattccaagtagagaccagtgcaaaggtcagaggtgaaagcaaggca

SEQ ID NO: 143429 - DNA, 122 bp, Homo sapiens
gattccttatgttctgctttcttcacactctacaaagaaattctagaagtgacccttctgcggatatgtactcacttctaagtctagaaaaaggcagaggagcgatacgggagtaggggatc

SEQ ID NO: 143430 - DNA, 122 bp, Homo sapiens
acacactccagccacctccgccccgaacgcgtacgtgccctctccgtgcctaaccatttacggggtgtcacacacacaaggccaggtcactggcagcacgttttgaagaacagcagtagtag

SEQ ID NO: 143431 - DNA, 122 bp, Homo sapiens
ctgccagctacacctccgttgcccaggccctgggatcaaaccctgcccaccagctcccctcgtccaaccagctgccacgtcctgtaaccaaaagtgaccgggatgaatgcctggctccccct

SEQ ID NO: 143432 - DNA, 122 bp, Homo sapiens
gcttttcttcccgacgctgcttatttatctatcggtagcatgacgggtaattgacgccctcggatggctttgaggtcgccatttttggttggtgcctttgtcttggtgtcaggactgggata

SEQ ID NO: 143433 - DNA, 122 bp, Homo sapiens
ccgcagccgccagccttcgatcgactttcctacccgccgtggaccctccttgggttatttcgagctgtggggacccactgggaaccccagagtggatgtgaaggttattttaaactgaaggc

SEQ ID NO: 143434 - DNA, 122 bp, Homo sapiens
ggccccaccagggtgttggtgccaacccacgagctccctgctgacctgcagtggtgccgccgcaccatccagctgaactcccgcttacagtcgaggcagtggtttgcctctgtgtctccgag

SEQ ID NO: 143435 - DNA, 122 bp, Homo sapiens
cgccatgccgagaagggggtcggaggaggcgcgggagagaaaagcccagggctgtacactcgcatccctctgctgccggcccttcgggtacattcaaatactgggcatgagtcccgcagaca

SEQ ID NO: 143436 - DNA, 122 bp, Homo sapiens
cattgcctcgccggagcagctccaggccgcctacgaagcaggctatgagcagtgtgacgccggctggctgcgggaccagaccgtcaggtgaagccatgctcctcgcccagcccaaacccaat

SEQ ID NO: 143437 - DNA, 122 bp, Homo sapiens
agttaaaagagagcccaacagctttcagtaatagtcttaaccattcctttttttccttgccgtaagtatgggtcagtgttccagaaagattatggaggcactaaagaaaaacttggccattg

SEQ ID NO: 143438 - DNA, 122 bp, Homo sapiens
cacgatctagtcagctgcgtgggtcgcgttcactggcttttttccccggcaagtgagatccggtgaaatatttcctgcccactggacattttaccatctcggcagatacccataatgccctt

SEQ ID NO: 143439 - DNA, 122 bp, Homo sapiens
ggcgagcggcagaaggctggagggctgcatggcggcggcggccgggtcggagagggtcgccgaggccgtgcgcttatagccgggatgacgccgcagttgggccggatcagctgacccgcgtg

SEQ ID NO: 143440 - DNA, 122 bp, Homo sapiens
atctcagctctgtcctggaggtcagctaagatcatgggtaagtgctttgccaagaccactcgctacaatgtgtctctggaacaacatccccttattgccgcagtgcagttccaagctcctgc

SEQ ID NO: 143441 - DNA, 122 bp, Homo sapiens
cagtaaatcctcccgagctgtctggtgatcagtgttgccttttgtgttgcttatccacaccgcaaaacgctcccacgtgcgtttcctgcctgcctcacaattaccccacaagacgggtgcac

SEQ ID NO: 143442 - DNA, 122 bp, Homo sapiens
gggctgaggcacagttgaaggggcggggcctcagctacggaccggaagcaatgggcaggccgtcggggaacggattggaagaggcgggcgggccctggtctgggcgaaggcgggggcggggc

SEQ ID NO: 143443 - DNA, 122 bp, Homo sapiens
gaagacacggggaagacgaactccgcacactgcatttgattaatgatttattttgattaacgccgtcacagtgacgccttagagcagtccctgttcacccgggtcccagcctcgaccccgca

SEQ ID NO: 143444 - DNA, 122 bp, Homo sapiens
gggcgctgtaggagatgcctggtttgggcacagcagaaatcagggcaggcaaaccgcaaacgcagaatctgagatgcaattcaattccgtttcctaatcccggggcttctccatgctgtcag

SEQ ID NO: 143445 - DNA, 122 bp, Homo sapiens
agaccaggcggcgcggaggcaggtgacccgcgtctccagtcccgggcgcagcccagggtacgttgtcagcatcgcggagcgcggccctgggcctctgcagccatcttcagggagggaggcgc

SEQ ID NO: 143446 - DNA, 122 bp, Homo sapiens
tacagttgagtgcttttaattataaaatgcactctcctgcccctgcgagtccagcaggctcggctgtccaaatgtggcaggtgagaaaatgggggaggtgttcattgtgattgtggcagact

SEQ ID NO: 143447 - DNA, 122 bp, Homo sapiens
ccaggcgtcccgctctgttccctcgtccctaaggatgtggtgggcactgcgacctccaggcgtcccgctctgttccctcgtccctaagggcgtggtgggcgctgggacctccagacccaggc

SEQ ID NO: 143448 - DNA, 122 bp, Homo sapiens
gggaaacttgtctccctgaccaccctggagcaaaatttgccattttaagataacacagtccgtctgagagaaagtcctgcaccatgcctttccccttttcccatatttcccagcatgctatg

SEQ ID NO: 143449 - DNA, 122 bp, Homo sapiens
caggttgcatacggtcataggcttttgatgccctacatctgtgctgtccaacagttgccacgaaccacgtgtggctcgaaatgcggctggcctgaatggagacatgccctacgtgcgaccca

SEQ ID NO: 143450 - DNA, 122 bp, Homo sapiens
catcaaaactaaacccaaattaattggctaaattgggactcaacaccaccaggagccacgcggaagacagccctaccacactttaaagtagcttacctcatcatgtttgaggaaagcaaaac

SEQ ID NO: 143451 - DNA, 122 bp, Homo sapiens
caagtaactgggtataactttccactcgggacataagagcaggaggcgtgcctgtctcctcgtccaggcctgacatggtggtgccacccactctgggtcctggaccactgctcacctttcac

SEQ ID NO: 143452 - DNA, 122 bp, Homo sapiens
tgaatggctgctgtgtgctgggtgtcgtggggtcctgggatacagtcgggggcaagacaccggggggttcctgctccggtgacttgcatcttccgggggagaaagacgctaactgataacag

SEQ ID NO: 143453 - DNA, 122 bp, Homo sapiens
catactggtaagtgactaaagtaaactcacctgagatgcagagcgaagatccaagctacacgttcggaaaccgagccacatattaagatgctcttttggtttagtttgaggaattttccccc

SEQ ID NO: 143454 - DNA, 122 bp, Homo sapiens
taaacttaattgtattcaaaacaagtcataagattattatctctaatggaaaactagtatcgcatgctgcacaggatagctctgaaagtaaaaacaatgagaatcaatgttattaaattctt

SEQ ID NO: 143455 - DNA, 122 bp, Homo sapiens
tcgggaggtttcggcaaaccctgctttagccctagtgaaagtggcaaggcacgcccttcccgcttcttattggaagagggtctacagtctccaccggtctctactctttattggttaaaatt

SEQ ID NO: 143456 - DNA, 122 bp, Homo sapiens
agcatccgcctcggtcacattgaacagagccagcacttctgcattggaactatttatccccgagtgctagaacagacacaggagaacaatataacggccaaccaggaaggtcttagcattgt

SEQ ID NO: 143457 - DNA, 122 bp, Homo sapiens
cgactgtttccttaataacccaaagcagggccagacgtacgggggtggaggcctgaaagccgagatggtcagctccaacatccggcactcgccacccggggagcggagcttcagctttacca

SEQ ID NO: 143458 - DNA, 122 bp, Homo sapiens
tcctgcggatgggggctgcccccggggcctgagcccgcctgcccgcccaccgccccgccccgcccctgccacccctgccgcccggttcccattagcctgtccgcctctgcgggaccatggag

SEQ ID NO: 143459 - DNA, 122 bp, Homo sapiens
caggcagcatctaaacactaccatggattaactcttggtcctcacaacactgggaggtgacgattatgaccctcgtgtatggatgaagaagctgagatggcacacagccagagtcacaggtc

SEQ ID NO: 143460 - DNA, 122 bp, Homo sapiens
cctgacctcgtgatccgcccgcctcggcctcccaaagtgttgggattaggcgtgagccaccgcccagctaaagatattgtttaaagcttgaaaagacaagccatagactggaagaaggtatc

SEQ ID NO: 143461 - DNA, 122 bp, Homo sapiens
gctattgaacaaagccttgaatgtgtttcagatattagcttatttaattcctcacagcaacgctgtgatggatagctgctcagagattgagtgacaggtggttagtgacagaatggaggttg

SEQ ID NO: 143462 - DNA, 122 bp, Homo sapiens
taattacttgccacttgaatgtgttttgtgtaatgttttaacagtgctagtaaataaatacgggtttaccctggttttaattgtaataggtgcattttacacagcatggtttcataatttaa

SEQ ID NO: 143463 - DNA, 122 bp, Homo sapiens
aaatggttcttttatgtatattttgtagagatagaatgtcttattttctctctgctaacacgtggatggtatagagcagagggttgcaaactataaggggccagatagtgaatacttaggct

SEQ ID NO: 143464 - DNA, 122 bp, Homo sapiens
ctgcctaggccccagcaggaccccagcctgggcctgcctgcagacaagatgggcagccagcgtaggcctctgtgcctcccatgagtagaaaaaggcctacagcacacagatgcgcctgccct

SEQ ID NO: 143465 - DNA, 122 bp, Homo sapiens
aagaaaaaataaagccctcctggggacttggaatcagtcggcagtcatgctgggtctccacgtggtgtgtttcgtgggaacaactgggcctgggatggggcttcactgctgtgacttcctcc

SEQ ID NO: 143466 - DNA, 122 bp, Homo sapiens
ttctgcagttattttcttcccctacctctcttccttcttcctggtaaacaacaagaggcacgtgcaactgtggctttgtgcacactcaaaactacatcctctgccatcagcacaggtgccca

SEQ ID NO: 143467 - DNA, 122 bp, Homo sapiens
aggcgccgaaagcagagtgctgtgcctgcctcgtccaggtccctcctgaaactcagaactcgtctttgttttgcgggcgcaaagagggcggagatcatccacagtgcaagctctcttaggac

SEQ ID NO: 143468 - DNA, 122 bp, Homo sapiens
ttcgccctccagcacctcctgcgggctgtggtccgcttccggcctcactcgagcagaccccgccctcccagaggccgtttgtccaagtcacgtgatcgtcgaatctgttgacctggcgccac

SEQ ID NO: 143469 - DNA, 122 bp, Homo sapiens
ggaatgggcacgctgggctgctcagaccccgcggggttctggcgccttctcctctgggaccggaataaatcaggcggctcagcacctcccactggccgtgcgctccgcccaagctggccaga

SEQ ID NO: 143470 - DNA, 122 bp, Homo sapiens
actaatacttcaggagctggggtcttgagtcttgtaatctcaggtggtcagggataaagtcgccagtattttggcctgcacagagctggccaccactgagactgggggagaaggcggagtat

SEQ ID NO: 143471 - DNA, 122 bp, Homo sapiens
ctgggagggacagggaggggagggggtagcggagctgcaagggcagagtctaggagggcccgcaagccaggatcccaagtatcagacacgcggcatttcgctaccctcaggacaacagctaa

SEQ ID NO: 143472 - DNA, 122 bp, Homo sapiens
ccccggtcgcgtgcgtgcgtgtacgcgtgtcagtgtgcgcgtgcgcccgggccagagccgcgccgcaaccgttaagactgaaacgtagatcgccgggatctagctcttgtctcattggggca

SEQ ID NO: 143473 - DNA, 122 bp, Homo sapiens
aagctctggcccctgtccttcctcgggagcaaactctccacgtgcgaacagctccggcaccggctggagcacctcacgctaatcttcagtacacggaaggcggagaaccctgcccagctgat

SEQ ID NO: 143474 - DNA, 122 bp, Homo sapiens
gagtttttattggggtttcattacatggacacaattgcttgaatgggctgcatcattggccgtgaagctgaaccccatctccatccccctctcctccatggaggtcgggctgatatcatgtg

SEQ ID NO: 143475 - DNA, 122 bp, Homo sapiens
tatgtaaaataattaaaaataaaagtgacttttcaaaactctacagtctgtgatcaaatgcgtgaggtggccaggatgtcactttcactcagtgacagcccctactcttcaagagccaacag

SEQ ID NO: 143476 - DNA, 122 bp, Homo sapiens
acacgggctttcctggttgtcgagggggcggagagagcaggccgacaggacagtgaggctcgccctccaagctccctcataggcctctgaggagtgcagagttggagggccatttccaacgg

SEQ ID NO: 143477 - DNA, 122 bp, Homo sapiens
gtgggggcgggagtgaagggagcagatggggctgtgccgacaggcatgagctctgggggccgggaggggtggtagggcctgcaggacgaggacacgcagggcatccagggacggccacctgt

SEQ ID NO: 143478 - DNA, 122 bp, Homo sapiens
ccttcttgccgacaggtatcatttctgtgagaagtgtttcaatgagatccaaggggagagcgtttctttgggggatgacccttcccagcctcaaacgtaagtaactgcattattttgaaaag

SEQ ID NO: 143479 - DNA, 122 bp, Homo sapiens
ataagtttctgaatggaagcacttccagaacttcacctccatatcagaagtgccaataatcgtcataggcttctgcacgttggatcaactaatgttgtttacaatatagatgacattttaaa

SEQ ID NO: 143480 - DNA, 122 bp, Homo sapiens
tgcagctgtatccaagaaagccagcccagaggctgccagcactcccagggaccctattgacgttgacctggtgagatgggtttgaggtctgaaggggtggtggtggggcccagcaggtcagg

SEQ ID NO: 143481 - DNA, 122 bp, Homo sapiens
ttgcaggtgccccaaccacatcaccctctattgcctaaaataacaatcctggaagtgtcccgggaaaccccaaagaaggcgctgccttgaccttaggcatccacaggatggatgccaggacc

SEQ ID NO: 143482 - DNA, 122 bp, Homo sapiens
catttaatttattatttacaaatatggaagacacataagggacaaccattcaggtggtgacgtccagcttcaacagagctaagctcagagcccctttgcagtgagtaataggcaggacccaa

SEQ ID NO: 143483 - DNA, 122 bp, Homo sapiens
agctaagaggacactggttctggattcaatgtctgcttccatcctcacaagagctgcgtgcgcttgggagtttacccaacctcactgagtcgcaaattcctcagctgcaaaagggggtcact

SEQ ID NO: 143484 - DNA, 122 bp, Homo sapiens
gttactgctgctcctgcccgggctgcagccgcgcctgcgggcagccgaggcgaggcgctccggtagcgtggggaggtttcctagcaactctctgccctgagtgcacccggctacccgcaggt

SEQ ID NO: 143485 - DNA, 122 bp, Homo sapiens
ctggcacactgctgtgactgagaggcaggtgcttatgagcccgtattagggccgtaggggcgctgccgcaaggtgccatgtgctgcatggcctgcctatgagatggcaggtccggaggccag

SEQ ID NO: 143486 - DNA, 122 bp, Homo sapiens
gaaaaaaagaaagacgtccagcagtttggcctttgtggtttttttgttccttggtctaaacgcggccaggttgttaagaaaagtcgaagcgcgtggagcagcggtggatggtggtctgtgtg

SEQ ID NO: 143487 - DNA, 122 bp, Homo sapiens
gaacggaaggggcgtggagagcgcgcgccaaagcacaggaggcggggccggtggaaggggcggggctgagggcggggtgtgagacaggtggagaagtgatggtaaatttccactcgaactgt

SEQ ID NO: 143488 - DNA, 122 bp, Homo sapiens
gagaagctacaagagagcaggcgtgcaagggctccgacggcggctccctgcccgggctgccgctttaaatagccctcgcatcacatgaggagacgtggcccacgcccccggctcccgaaata

SEQ ID NO: 143489 - DNA, 122 bp, Homo sapiens
ggctgacttacctgcccgcagcagtcgctgcctctgtgttgtccgaatgtccctgcgcaccgcaaccagcaaaggcaattcggctttgctaactttggcctcgcacctccagagaagaggcg

SEQ ID NO: 143490 - DNA, 122 bp, Homo sapiens
gtgagcagcatcccctggccaatgagacggcggcgcttcatttgaatgattgcatccggccgccaatcgctatctgcggaggaggtgagaacggtagcggaatcctggccaccgtctaaaac

SEQ ID NO: 143491 - DNA, 122 bp, Homo sapiens
gcctccaagagtccatggcctctactttcagggaagtaggttgactattattgttactagcgttaccacttgctaataatgcaagtacacaggccagttacaatgggtatttgtacaagaac

SEQ ID NO: 143492 - DNA, 122 bp, Homo sapiens
acgtgatggtgaccctggagggccggggcatcacgtgtgctgttgatgattgcaggtgagcgaggcggagatcaatgggcaattcgagtccgtgtgcgagtccgtcttcagtgaagttgaat

SEQ ID NO: 143493 - DNA, 122 bp, Homo sapiens
tcgcaaccgaagccgatggaatcaacaagacaaagatgctcctgacccactggctagaatcgtgaagaaaacgctaatccatgtcaaatgcacataaggaaatttttccatgcagagaccag

SEQ ID NO: 143494 - DNA, 122 bp, Homo sapiens
gagagctgggtgatccccggccctgtgtggcctccatagctcagctcccagctgcacagccggcttctcagaattgggccttgaccaagaatctggggaaccgcccactgtggttattaaac

SEQ ID NO: 143495 - DNA, 122 bp, Homo sapiens
gcaaacgactatctccgagcccaggtcacctctggggccaaggagttgggggctggggctcgggtggctccttcttcgggccaagtttgcccgcgcgtgggagcgagggggcgagccagggc

SEQ ID NO: 143496 - DNA, 122 bp, Homo sapiens
aacaattgcattcccgggctggatgccggttgttaagcgcgctgttgctttgtaaaaatgcgtgtgttctggtgttttggctggggcagggaggggacaccccacgaggtctggggctgttg

SEQ ID NO: 143497 - DNA, 122 bp, Homo sapiens
aagtgctgctccctggtgctcagaggcggctgctccagctccaactctcattcatttcgccggttaacatgagagatcatggccgccttcgggcttctcagctatgagcagagaccgctgaa

SEQ ID NO: 143498 - DNA, 122 bp, Homo sapiens
ggtgatagaataggattcaaacccaagtggcttcattccagagtctgcacttaacgctaccgctatcctgtgcgactcaaatgcagataagggttgcaaaagcctggcacactgggggtaag

SEQ ID NO: 143499 - DNA, 122 bp, Homo sapiens
cgtctgtggtcgcttttaggtgcaactggagaaggcactgaagccctacgagattcacaccgtcttcggtctcctggggtcggcgccgagtgggaggatggcggaagtaagtatgaaggtgc

SEQ ID NO: 143500 - DNA, 122 bp, Homo sapiens
gtgtggcaagtgaggatggcaagggttttgctaaacaaatcctctgcccgctccccgccccgggctcactccatgtgaggccccagtcggggcagccacctgccgtgcctgttggaagttgc

SEQ ID NO: 143501 - DNA, 122 bp, Homo sapiens
gtggggggaaaaagaaacgcaatagataaagcggggcgcatgcgctcccggcacaggcttcgattgtgaggaaggccggctagtctccgagctcatcccgccttgcgcatgcggagaaggta

SEQ ID NO: 143502 - DNA, 122 bp, Homo sapiens
catccatcatcttcgttgacctctcttttccttgtgttttcagaaacgtgtcaagaataacgaaacagcgggttgcagtggctcaggcctgtaatcccagcactttggggggccaaggtaag

SEQ ID NO: 143503 - DNA, 122 bp, Homo sapiens
ggactccacttcccagcagccctgctgactccggaaactggggacttggctccaccctctcggctactccctgagaggtgcaagctgggaagagtagttctaaattagccctgagactacga

SEQ ID NO: 143504 - DNA, 122 bp, Homo sapiens
agacaatggacgcggcggtaggaggggcggcggctgtgggaacagccgggaggcggcacccgggagctcgcgctcccccgccccctgcaccccccaccctcatcccctccccctccgccccc

SEQ ID NO: 143505 - DNA, 122 bp, Homo sapiens
tttcaggatgagaagcgtcagctggcttaccaggtaaggctttcttccctcagtcctgtccggtggctctggtggccctcatgtggaagtactgtacttttgtctgttggccaggtgctgga

SEQ ID NO: 143506 - DNA, 122 bp, Homo sapiens
gacggcgtctcgtatgaatcctggaggagacgcccgtgtcgagggcaattagaatccaggcgtgagccccggctggctgcgtccactggagccgcctgacctcacccgagggtgggaggccg

SEQ ID NO: 143507 - DNA, 122 bp, Homo sapiens
gaaaccgtgagtcctctgagcatccttggtgtcctgtgttgctgaccttctgtgatctgacgccacggctcagtgcttcccaagagctcctgagaacgcagcgctcaggcctcccagctggg

SEQ ID NO: 143508 - DNA, 122 bp, Homo sapiens
ctgcactgcgcggcgccatggacgacctgcgggtgctgtggatgcgcgaccgcgtgtatgcggctttcggcatcaccgacccccagcttttcgaggacctgctcaaccgcgacgacggccag

SEQ ID NO: 143509 - DNA, 122 bp, Homo sapiens
tgcagggggcagccttgactgccagcctctctcagacctccctctcctgcggccccaaagcgcgggctacacacctgcgtacctgagcaacccacacatctgtgcaccccacacacctgcgc

SEQ ID NO: 143510 - DNA, 122 bp, Homo sapiens
gggcgccgcgggttagccgcgctgattcgcccgcttgccggagtgggtgggggtggcgggcgccccagtgctgccccagtctggttcctagtctctgccgaggcccccgagctggaagccga

SEQ ID NO: 143511 - DNA, 122 bp, Homo sapiens
ttgggggcttgcccatgccaggttgtaaactcttggaggtgtttaatttgctcactcttgcgccccagcactcttgtattaatatgcttaatacatatttgaattttttaaattgtcgtgtg

SEQ ID NO: 143512 - DNA, 122 bp, Homo sapiens
cagagtgtcccaatttcggacaattgaaaacactaaggccagctaacaaaccatcaaggccgagctgtggtttcacgtgcttatctcaccattccccacgcaccccgaggccggcaagccgt

SEQ ID NO: 143513 - DNA, 122 bp, Homo sapiens
cagcaagggcgaggtggaggagtacttctggtccattggcatccccatgaccagtgtccgcgtggcggcctactttgaaaactttctcgcggcgtggcggcccgtgaaagcctctgatggag

SEQ ID NO: 143514 - DNA, 122 bp, Homo sapiens
cttaaacaacggaaacctattttctcacatttctggagcctggatgtgtgagatcaaggtcggcgtggttggtttctctccttggcttgcagatggccgtcttctccccgtgtcctcacgtg

SEQ ID NO: 143515 - DNA, 122 bp, Homo sapiens
tgaaagcctgaggatagattagttagaataactacaaaatatattgcacatttaactctccgtaataagcgagtgtaatctatcaagagatagtattgaataatggagatgtccaaaatatc

SEQ ID NO: 143516 - DNA, 122 bp, Homo sapiens
gagaatggaggaaatgtgacataaaatatagatttctacttctgctaaaccttgggcccacggtattggctgcagctatgttgctgctgccccttcactggtacagaggctctctgtttgcc

SEQ ID NO: 143517 - DNA, 122 bp, Homo sapiens
cttccttggtagtatttatcacctgacagcagttgtgttatttccccaattctttgtcttcgtgcacttagaaaataggattacctcctattttcctccagggcctttcttctcttttcctc

SEQ ID NO: 143518 - DNA, 122 bp, Homo sapiens
ttcttctggagcagaaacaagagctgctagataagggtggtttctttgccctcctagaatcgtctgcgtcacacttgtcccgggacccaataagggatcgggaccgtcctatccactcccat

SEQ ID NO: 143519 - DNA, 122 bp, Homo sapiens
ttgatctctttggttcagggatcagagagttcctgaaggtgctcattacatacataatgccgtatttaaaattacataaataaatgaaaggcaagatatttttcaagatgactggattttat

SEQ ID NO: 143520 - DNA, 122 bp, Homo sapiens
atttacctgacaagtaagcaggctctgggctccagtctactgaactgggggactggttagcgagcaacacagagaactagtaagatgatgattgtgtatctgcaggcagataaaagcgttac

SEQ ID NO: 143521 - DNA, 122 bp, Homo sapiens
cagggctagcggggccggccgggcgctccgagtgcgaggccagccgagcccaggcccacccggaactcgcgctggcccgcaagcaccacgcacagccccggttcccgcctgcgcctctccct

SEQ ID NO: 143522 - DNA, 122 bp, Homo sapiens
aacgaatgctttaaatgggtcctgttaccaaacaccttcccaaggctgtgagtagatgcacgctccaatattgtctcattttcccgcggcttcgtcaccccactctatgcactctgcaccgg

SEQ ID NO: 143523 - DNA, 122 bp, Homo sapiens
cggcggcggcggcggcgcgacgatgaggatgatgaatacattgcaaagtttttttggccccggcgaggggtgtcagattgagtgctctgtgcgcatgtgcgaaggtgtccaaactgacaatg

SEQ ID NO: 143524 - DNA, 122 bp, Homo sapiens
aaaatgaaacccagtgctttttgttaaactgagtggcaagttccagctattggtcagcaccgttgccctgcgtttctccaagggagtgctttagccctaggcaatccctggcccagctttga

SEQ ID NO: 143525 - DNA, 122 bp, Homo sapiens
agcagcccattcccagccctgaggcccaccccagaggctggacagagggaggattcaagtcgggaaggaaacccacaaaccaaagatactgtaggattggttctggcccatgcagcacctct

SEQ ID NO: 143526 - DNA, 122 bp, Homo sapiens
ggagagggttctcccaagcagatggtgctgttgtctgcgggacaggtgaaatgtgcgtgccgctgtccgctgcccacttagagaagcagggtctaccgctctgtgcctgacaatgacgaggt

SEQ ID NO: 143527 - DNA, 122 bp, Homo sapiens
caggtggccccgaggcccctctgtctctaatgccgctctcgtgtacagcagcccgtgtgccgaccttgtgcgtacgaatgtgttcgtgaccctgtaaatcctaggccggcatcctgtgctac

SEQ ID NO: 143528 - DNA, 122 bp, Homo sapiens
agggaggaaagacaagctgtcgatatccagggagaaatgctaataaccctggtgacaaatcgtcctctggattctctaagggttaagaaaaagcacctcttagacctgggagctcaggggta

SEQ ID NO: 143529 - DNA, 122 bp, Homo sapiens
ctccagggccgcgcagaaggcgcgcctgggctgagtcccagctgcagaattcctggggggcgggggacgaggcgtctccgctcttaatagctgagcgcccgcaaacgcccggcctgggctcg

SEQ ID NO: 143530 - DNA, 122 bp, Homo sapiens
tgccttcccagacactccctcttcccctggtccaggttctctggcctaatgtgcttccatcgcagcagcttgagtggaaaggatggggtctctgggtttttctaccactgcatcttctgtcc

SEQ ID NO: 143531 - DNA, 122 bp, Homo sapiens
ggcggtcggcgggtcagggcagcccggggcctgacgccatgtcccggaacctgcgcaccgcgctcattttcggcggcttcatctccctgatcggcgccgccttctatcccatctacttccgg

SEQ ID NO: 143532 - DNA, 122 bp, Homo sapiens
cccccacatggactttaggtctagaggaggagaaatagcccaagagccaaagtccccatgcgatgggaaaagaactggctggaagaggacagcaaggctgagatgcacccagggacgtggcc

SEQ ID NO: 143533 - DNA, 122 bp, Homo sapiens
gggacaaccatgacttttatcccagactccagccaccacgggatgaagtcacagatgctgcggcacagcccacatctgataacaatagacaagctgaccgagacacacaggctgggaatctc

SEQ ID NO: 143534 - DNA, 122 bp, Homo sapiens
caaaacacttagaccggaacgagcgaggccagaggagacaacaactcccagcaggcgtcgcggcagcgggaagtcacgcacgcgcaacccaggccacaggagtaaaatctctctgcccgtct

SEQ ID NO: 143535 - DNA, 122 bp, Homo sapiens
cgcagttgaaattagcttctcccccatgccttccctttcacgcttccgtcctgacgcaaacgtggggccgccttccgcactgcgggcttgtccttggccctgccctactcagtttcctgaag

SEQ ID NO: 143536 - DNA, 122 bp, Homo sapiens
tttaaaaatatccagtgagatttgcttcatttttcccccctagagaattattaattataccgttttatttccattaaatggaactcttgagagaaaaagaatagaatgaagagagagatcac

SEQ ID NO: 143537 - DNA, 122 bp, Homo sapiens
tgtcctggactgggcggcgcgctcatttcaaggcagtgcggccatctgggctgggcctggcgctggcggggcctgctgtgtgccgggcgggcagatcgtcctggggctgacctggaagctgt

SEQ ID NO: 143538 - DNA, 122 bp, Homo sapiens
ctggaggtggaagatctacgcttagcacgggcctggctcctctctcattgactggccttacgccgaccacaaataattccccttacccagagtctttgagggtgaaatgaggcgatgggggg

SEQ ID NO: 143539 - DNA, 122 bp, Homo sapiens
aatagggcaggaagtgagatcagtggagaaaaatgtgatacagctgaggtaagctgctgccggcctcacctgcacttcattgctggtgaagttcttagtgattaggatactgctgtaagcta

SEQ ID NO: 143540 - DNA, 122 bp, Homo sapiens
ccacagagaaggccagggaggcagttggggggccggggaccccagccctggagccatgggcgcaggagaaccatctgccgggggcctaagggactgagtagcacccactgggagtcatcacc

SEQ ID NO: 143541 - DNA, 122 bp, Homo sapiens
ggccgtgagtgccgcagtcggccagccatggagcggagcttgctggcggcgaggccgcggcgacaaggtagccacccccgcagcatgcctcgaccgcggtccgcagctgcaccgcctctccc

SEQ ID NO: 143542 - DNA, 122 bp, Homo sapiens
agctaccaaatccccaaagcccaagggggccgctgaggtcagtatgacattgcacggccacgttacatagaaaacgtgattggtaatgaacaggtacctcaaagcatgccctcagattttac

SEQ ID NO: 143543 - DNA, 122 bp, Homo sapiens
acagactggcttggggaagagacgagaacgagaaaatctgggacgaagacgaggagtctacggacacctcagagattggggttgagactgtgaaaggagctaaaactaacgctggggcaggg

SEQ ID NO: 143544 - DNA, 122 bp, Homo sapiens
ccccggaggactaggcagcagccggctgcagtctccagtcccggaacaataagcagcaggcggtcggcggagactctccctcattgtctgccgcggacctgcccccgtcccgccccttctgc

SEQ ID NO: 143545 - DNA, 122 bp, Homo sapiens
gggcacgaggagccccatgccacgggcgaacagtcttggtcctgattgtggcggcaatgacgtgcaaagtgactcactcaactgtgctcttaaagtgggtgaattctcttgcttataaattg

SEQ ID NO: 143546 - DNA, 122 bp, Homo sapiens
tcccgttccttttctttctctccccagtaagtcgttgaacgtctttcttctgaggctgagcgtggagctctcttctcgctggcgagctttctgaatggcactttctgtacaaacaggaagag

SEQ ID NO: 143547 - DNA, 122 bp, Homo sapiens
gtggtctgagtgggtctggaggagtctctctgcttgtcttctggtgtccggctgatctgacgggttcttatatacctcccaaccctgggagctgcccttggagcccattaacctttgaccac

SEQ ID NO: 143548 - DNA, 122 bp, Homo sapiens
gcccccaccctggcctgcaggtccaggtgccgtgtggcagtgccccgtgggggcgggagccgagtggcagtcgggggaaaggagttccacaaaggactgcaatcgagggcctgacggggctc

SEQ ID NO: 143549 - DNA, 122 bp, Homo sapiens
agtggtcacatctgtgggccagactggtgcgcgatctttggaggcgcagcagcaaggccgcgccagggctgagcccagaccgcccacgaggaggcccgccaggcccggagcagcggcgcgtg

SEQ ID NO: 143550 - DNA, 122 bp, Homo sapiens
cgacgttggcagttccggattcgcttatggtctccagggtcaaaggaaagggcgaaccaacgtttgaaggcagcagcagcttttttccagttgcccaaatggttactcaaaatgcaagggga

SEQ ID NO: 143551 - DNA, 122 bp, Homo sapiens
tccaaagatacagagctttggtctttacccataaaaaaggattttgaagtcaccccaccccgttctgttcccccacagtttagacaagatcctcatgctccactggccacacgagtgccctc

SEQ ID NO: 143552 - DNA, 122 bp, Homo sapiens
tggtaggaggctatagaatctctcacaagaggcgacgggattttcaaacctaagccagcccgtgtgcagcggggagccggcagggcgaggacccatctaccgggtggtgacagagagctcca

SEQ ID NO: 143553 - DNA, 122 bp, Homo sapiens
aagtcccatgtgttaccttctttctttctttctatttttttagatggagccttactctgtcgcccagactggagtgcagtggggcggtctcggctcactgcaacctctgcctcccggtttca

SEQ ID NO: 143554 - DNA, 122 bp, Homo sapiens
gggtgaagggaaggacgtctctgttgtgctcagggtcctatagatcttacctcacagatgcgcttctgctgttctagagtctctttgggcagcttcttcctttctgtctccacggacaaacc

SEQ ID NO: 143555 - DNA, 122 bp, Homo sapiens
tggccctagatgttgagtacttgggagagcaggtaacccatcagccgccggcagctccagcgagcctgaaaccaaattctgagagccgggcagttacttggtggctcgcgtgatcccagaga

SEQ ID NO: 143556 - DNA, 122 bp, Homo sapiens
gactaggccagaaattgctgaaagaatacagttatagtgtatgcttgtgaagataagcttcgtacttttggagaagtttaagaactcattctttaagaaactaggcaattcatgttagaagc

SEQ ID NO: 143557 - DNA, 122 bp, Homo sapiens
gtgacgtgcgtgtggacccggggtggacgggcggtgacgtgcgtgtggacccggcgtggacgggcggtgacgtgcgtgtggacccggcgtggacgcagccccgacgtgaatggatgtggttc

SEQ ID NO: 143558 - DNA, 122 bp, Homo sapiens
ggagaacaaaaccgagaaggccccagggattagagagttttgacagctgtccaagaggagcgcggagatacgggccaagtacggaggcaggacagagacaaacgagggacaagagagtgacg

SEQ ID NO: 143559 - DNA, 122 bp, Homo sapiens
tgactggagatcacggtagccctcctgacactctcctctggggctcccattagctgtgtccgtctcaccaccaaggacttggtggaggccatgggagcccccaccttgagcccacaggtctc

SEQ ID NO: 143560 - DNA, 122 bp, Homo sapiens
aagaaacaatacttctctgcagagtctctgcagagtctctgcagaggtcaggactggccacgctgctagcacacagcatcttgatgtacttggccaaaaggtgccttctctggactatgcag

SEQ ID NO: 143561 - DNA, 122 bp, Homo sapiens
agtcagatcaggggtgatctctggagatggggaaggagtggtatcttggaagcaggacatcgaggggtgaggacaaggtttcattcatgaccctgcatcaggcttatacaagggaatgcttt

SEQ ID NO: 143562 - DNA, 122 bp, Homo sapiens
cagcaaagttgtgttgaaaacaatgctatctattggccataaattactgatacacactcacggcaaaaattatttttacatatttaacattattcttggctctagatacaggatatagggga

SEQ ID NO: 143563 - DNA, 122 bp, Homo sapiens
aaacacctgcatggcaatgaggccaaccttctccgcttgatccgtttcaggctctggctccgctactgcatcgtgtgcttctgtccaagaggcagagagactgaaactatctgctgccgcct

SEQ ID NO: 143564 - DNA, 122 bp, Homo sapiens
agctctgcagctctcctataggaggtgtgatgcaaaagatgaggaagaaacaaaggaagccgaagtggtagctccagtgagacaggctgagactcaagtgaatgtgccatcctggaagccaa

SEQ ID NO: 143565 - DNA, 122 bp, Homo sapiens
ggagtttgtagccagcagcctgtaaactggaaacactggtctcagccaacctcctcagggcgccctggcttctccccaaggagatgaggagcggtgatgccagcaccgggatgcgcagagca

SEQ ID NO: 143566 - DNA, 122 bp, Homo sapiens
gcgaggtctgggaggctggggaactgggggcgcctgcagggcgcagagaggcgacggcaccggtgtcagggagaacgcatccgttaccgcccgcctcccgcaggtctgcgtcaaactagatc

SEQ ID NO: 143567 - DNA, 122 bp, Homo sapiens
acttttcaaagattcctttatagtcattattttaattgcttcatgatcctgtaaactagtcgtagcaactattactatccccattttacagttgggacaaaacacagagataaaaattactt

SEQ ID NO: 143568 - DNA, 122 bp, Homo sapiens
ccctcagaaaaggaactagatgctgcagttccttgtcagaagtaaacttggagcgaaacacgcctttaggaggggtaaccaggctgctttcctctatttttaaagctgtagtatgaagccaa

SEQ ID NO: 143569 - DNA, 122 bp, Homo sapiens
aatctaatactttgtaataaagaccatccagctaaaaacagatcattaaaacaacaatagcgatttgactctgtattttatttcaatgagcacacttcattcattgtctgcaggaaaactag

SEQ ID NO: 143570 - DNA, 122 bp, Homo sapiens
cttccgacgttcctgatagctgtggggggtggcggggctgcctttccctggcgccgcgtgcgaccagtgatatctctagagagtctgcttcacgaacacctgagcatcacctcgcagccacc

SEQ ID NO: 143571 - DNA, 122 bp, Homo sapiens
agactccaccatgcacaccagcctgggcaatagagtgagactccgtctctctcaaacaaacgaacaaataagcctctttcagcaaatgagaagacattaaatgaataaagtagacaactact

SEQ ID NO: 143572 - DNA, 122 bp, Homo sapiens
aagagaatttctcaagtcaaacaattctactgcattttctgtgccagaaagtgaacgagacgcagaatagctggagataattaaagttgaggcaaaaccgcaaagccagaggtttggaagtt

SEQ ID NO: 143573 - DNA, 122 bp, Homo sapiens
aattgtctgcagatcggccgacagctgagacgttcaagctctgaattacggagaaagggccggagataaagccgagcacatgtatcccatcaaagtaatgaaagccgcctgccgccaggacg

SEQ ID NO: 143574 - DNA, 122 bp, Homo sapiens
tctgcacccttctctccttaaaccacatcaaactctacagtttctccatctcctacactgcgcagatatttctgtgggttattcttcttgatggcagtctgatgtataaatagatcttcttt

SEQ ID NO: 143575 - DNA, 122 bp, Homo sapiens
aaaagcattattgtgcctcggagcaatcaataattattagtagagaggtgaaaatggacacgttggatttgtatttttgtagttgttttgttttaatttaaaagaacaatgagaaagccttt

SEQ ID NO: 143576 - DNA, 122 bp, Homo sapiens
aactttggtattacaattttattaattgtaattgcctgtccatcttaaaggaatctccaacgtcgaccatttggtttttcaactggtaggattgaagtgttacaaggattgcttcgtggaat

SEQ ID NO: 143577 - DNA, 122 bp, Homo sapiens
tctggagcaccaattaagcttttccgcgctcaggttgccttagaaactttagagcgcgtccgccccagccccgcccccggcctcgccccgagcttcgccccaagtccatctcgctcttcatc

SEQ ID NO: 143578 - DNA, 122 bp, Homo sapiens
ccgaacacgcctctttgaagtccacaaatattcctgactcagagacacactcctcttccccgttctactctttcaacagataacttgcctctcaccttcgctgtaaaaaagcaaacagctca

SEQ ID NO: 143579 - DNA, 122 bp, Homo sapiens
gtgctttgtaagccacggtgcccgctggacaatgttttcacaattatcctgcactgctgccgggatcagactgagagactgctgaggagtcttaggaagagggtgtacagagcagaggtttc

SEQ ID NO: 143580 - DNA, 122 bp, Homo sapiens
attcagcgtttctgattaataagagacgtccctcaaataggaagatattgccgctgatggcgctgcagggcgccaggtttgggcttgggggagtaaggacttctttgggcacaatgatttgc

SEQ ID NO: 143581 - DNA, 122 bp, Homo sapiens
gctacaaagcctgatttgtagcattttctgatttccctggtataaatcttctaccatggccgatttcaagctacccacatgacgacactgaaggcagcattgggaagagatgaccacgagtg

SEQ ID NO: 143582 - DNA, 122 bp, Homo sapiens
gccatccacacactggccagctggggcctgcttcggggtgaacggcccacccgaatcccccggctactaccacgcagccagcgccagctagggccccctgcctcccgccagccactgccagg

SEQ ID NO: 143583 - DNA, 122 bp, Homo sapiens
gagcaggtcgttatcaggggtgagggtccatcctgggggtcccctccaggcggccgtcttcgagggagacccccaggggcagcctggcaccgcgcgggctcggcctggtcagggccgtggcc

SEQ ID NO: 143584 - DNA, 122 bp, Homo sapiens
tggatgattttaaataaaattattaagttataaagtggccaccctgaaggttcccgaaggcgacttcatgtctgtgactggaaaggcctagaggagagggtcctcccgctgggctcgtttaa

SEQ ID NO: 143585 - DNA, 122 bp, Homo sapiens
gatgggagcagagcgcggctggccaggagggaagaaacggacccacgagtatggaactcgcgccccgccccgctccctctgctgggccgccgagcacccagtctccagaacggttgtgctgc

SEQ ID NO: 143586 - DNA, 122 bp, Homo sapiens
acttggcaacggatgaaaacctcggcgagcatccccagacaaccccgctgcgcgtcagagcgctgctcccgcgtcctcctgccggcagaagcccctgcagtgcgccccgcgaccaccagctg

SEQ ID NO: 143587 - DNA, 122 bp, Homo sapiens
agatcggccggttggaagtgacgaccttgaagatcggcgggcgcagcggggccgagggggcgggtctggcgctaggtccagcccctgcgtgccgggaaccccagaggaggtcgcagttcagc

SEQ ID NO: 143588 - DNA, 122 bp, Homo sapiens
acagggcacttggactgtggcaaatgaaagaagcggaggggcaggaacagggacaccttgcgaagaagacaggccttagccttgtgccacccctatgaggtccctaagccgtcctctctctc

SEQ ID NO: 143589 - DNA, 122 bp, Homo sapiens
cagtgtgcccaggacctgcccgctccgagtggacccgacagcacgggggtggcctgacgccggctgagatgcagaatcaggcctctgagctactgagctggaatctgccttttggccggacc

SEQ ID NO: 143590 - DNA, 122 bp, Homo sapiens
cttgccatttgagatatcggatgagcaaagaaggaaaggtcactgctctggaaaagctttcgtagagaatggggtagaggaaataacaaacgagtatcaaaataataaagagtgccatgagt

SEQ ID NO: 143591 - DNA, 122 bp, Homo sapiens
acacttatacactgttgatgggagtgtgaattagttcaaccattgtaaaaagcagtatggcgacacctagaagagctaaaagtagaactactatttgactgagcaatcccattacctagtat

SEQ ID NO: 143592 - DNA, 122 bp, Homo sapiens
gtcctttcctcatctataggaggcagacagatagttgtattgctggtactgaaccattcacgtatatttgcttactcagtaccatccgtgtcaatttgcaagctttagccagatgtaattgg

SEQ ID NO: 143593 - DNA, 122 bp, Homo sapiens
cggggatccaggctgggtccggagcaccggagcctttgccagtgtagggtcgctgtccagcggggccccacactcctcggggccggcacagctgtcttgagggagggaggttttgccaccag

SEQ ID NO: 143594 - DNA, 122 bp, Homo sapiens
atgtgctcttatgttttattttcacagcaaaatgcttgcccagattttaataaacatgtccgcagtagtaatatacatttcgcatgctttccacatttcataatctctttagtccttttgtt

SEQ ID NO: 143595 - DNA, 122 bp, Homo sapiens
gcccagcactgtcatttgaatagcatcaatactttattaagagaagtaatgcggggggggcggggattgtcctgactagtgattttattgagggagatggtatttgagaaacagaccctcac

SEQ ID NO: 143596 - DNA, 122 bp, Homo sapiens
ccggcttcccaagagctctgtgggaaatgtagttctctggcgcgccctgcgctcgggccccgcaggtccctagggcgcggggacctcaagccgtcccgtttggactggtaatccggagactc

SEQ ID NO: 143597 - DNA, 122 bp, Homo sapiens
tctggaaaagactcagctcacagctgaagagaatctgatggcacgggcagcattgcgtggcgtagagagtacgtgttcggaaaccagagagatctgagcagaaatcccacacgggaccaaga

SEQ ID NO: 143598 - DNA, 122 bp, Homo sapiens
ctcttaataccaaagaacaaataagcaggagatttacatgtggctctactggaaaactgccggctcctgtgatttgcttgggattgttctgaatctcagaacctgcccaaaatgaaaaagac

SEQ ID NO: 143599 - DNA, 122 bp, Homo sapiens
gcacccctccccacgtgggaccctccccacgtgggaccctccgccctgctctaaccctgccggcggcgccgccctccacgtctgagattctgtcatttccgctgtgctctgtgagtggcatc

SEQ ID NO: 143600 - DNA, 122 bp, Homo sapiens
tggaactttgagagaatcatcttcttcctgatatttgtatggccctgctctccagccacacgcagctaaggaaattaagtcagagcctggtgctctactgaggaggtggcctgtggattttg

SEQ ID NO: 143601 - DNA, 122 bp, Homo sapiens
caagtagcctctgtgttcaggattgccatcttcaccaccttcttcccagcccttggccttcgaaagtgtgctacctctttgacagggttaactccctaaaatgctcctaattaaggcgcctt

SEQ ID NO: 143602 - DNA, 122 bp, Homo sapiens
agatcagtctcttctttaacagacaatattttgcgatgtttggaggggaagggtctacagcgttcaccacgttctcaaaatgcgccatggccaccaaagaggtttaaaaaaaattactaaaa

SEQ ID NO: 143603 - DNA, 122 bp, Homo sapiens
aacaacatggcacttagtgtttttaaactgaccaagggacaagcctggagcagcctcttccggggcctcgattaaccaggaggaggtggctgctgtgccccaacccaggtgacagattcggg

SEQ ID NO: 143604 - DNA, 122 bp, Homo sapiens
ctaacgcagtacccgccgccacagctgtgcagcaccttccggaattgggcgcccaggcggcggatgtgatgcaagctctgcgcacgcgcgctagtctccctcggccatctaggatcaggagg

SEQ ID NO: 143605 - DNA, 122 bp, Homo sapiens
accgacggaggacataatttccagccgacctaaacgaagggaaccggaaatgcgtcatagcgcgcgtctgtttggatgtggaagccgagacctaaagttggggggtgatctctgaggagatg

SEQ ID NO: 143606 - DNA, 122 bp, Homo sapiens
ggccaatcttcacactccacgaagaatagccgtagggggcgtatgggacggtgcgtagagcgatgcccacgccggccaaccggatgtcggggcttgcgcgggagggcgggacttggcgccgg

SEQ ID NO: 143607 - DNA, 122 bp, Homo sapiens
catgaggctcgggtgttccagcgggggccggagtttggagggcgcggctcgggagcatcccggggcccagccgggtcggctcgcgcccctccggcgcctgcgcagtgcaccccgcccggggg

SEQ ID NO: 143608 - DNA, 122 bp, Homo sapiens
aaaagccaaaaccctagaggacacacaccaaaccactaagagtggttacctctgagagaccgttttactctcattatttctgtatggttgggattcatttataatgagcatgtacgactttt

SEQ ID NO: 143609 - DNA, 122 bp, Homo sapiens
tcgtggggcctggagcattcagcaggcggtaacccagtgggcgttccctgcacggtgccacgccccctctgccgcgcaggccacgccctcatctattaggctggaccccgcggcgcctggcg

SEQ ID NO: 143610 - DNA, 122 bp, Homo sapiens
ccccagcccgaggggcaacttaaaacatggcgccccgggcgggggatttgtgcaaattggcggagaagggacgcggggaccgagtcgccccttcggccagggatcccagggaggcccccagg

SEQ ID NO: 143611 - DNA, 122 bp, Homo sapiens
taactagaggaggatggcaaacccctccccggacccacccccttccccgaaggcggccgccgcagcaggcccggcctccggcctcttttgttgtaattcgagagcggccactcccagggcca

SEQ ID NO: 143612 - DNA, 122 bp, Homo sapiens
taatttgtcttgctctagatgacagaggaacttttagaaaactggtgggataaggatggacggatgcccctcagcagtctctggcctcgtgcccggctgccagcagaggaggacacgaggcc

SEQ ID NO: 143613 - DNA, 122 bp, Homo sapiens
ggagccggcgcgaggcgctacagtgtaattcttggccccttttcctcataatggtttggccgcatttttacctcttgatttccctggtcccaggctgcaacttcagctcgctccgccatggg

SEQ ID NO: 143614 - DNA, 122 bp, Homo sapiens
cgaatgctcagaccgtgctaggcagcttcgcagcccggctggctggtggggctgcctgcacgagagcagcccgctccccagcaccgccgatggcaagcccgactccagtcagaggcctagca

SEQ ID NO: 143615 - DNA, 122 bp, Homo sapiens
ctgctgggcctcagcgtgccctctgtacttgccttctgctaccagtgaacgtgagtgggacgtgtgtgtagacagcagacgggtcttgtgcagctgtgtgacgtgtgtgttgtgtggtgaac

SEQ ID NO: 143616 - DNA, 122 bp, Homo sapiens
gataatattcactccctcaatgttatgaaataaaagcctataggctagtgtggtaatacacgcaatgcataagaatttcaagaacattatttcaggactcttaccagaaaaagaaaacaaaa

SEQ ID NO: 143617 - DNA, 122 bp, Homo sapiens
gcgccaccgtgcgctctggaacctcggctgccagcgccactgcgcctctccagggcgccccgggcagtgtgccttcaggcaccaggccacacagcccctgcagattgaagtgtggagacagg

SEQ ID NO: 143618 - DNA, 122 bp, Homo sapiens
agagtgccacgtggcttcgcggaccacggatgcttcaggtgcagagggggctctgtgtgtcgggagcacctgcgcccaggcacaaaccagccgcctggcagagtgccacgtggcttcgcgga

SEQ ID NO: 143619 - DNA, 122 bp, Homo sapiens
ggctgcgccatggcgttggcgttggcggcgctggcggcggtcgagccggcctgcggcagccggtaccagcaggtaagcggcgcccgactccagccccgaactccggtccctggctctgccct

SEQ ID NO: 143620 - DNA, 122 bp, Homo sapiens
ttcgtgtgttttatctggcaatgctgagaggacagctagatgtcgaggacagccagatttcgaggacagccagacgtcaagggggaaagcaacttgctggctcacacagccagccaggtcta

SEQ ID NO: 143621 - DNA, 122 bp, Homo sapiens
gctcttcctctcctcccctccgtcctgcctgggtgttcacagcagcttaagagggaagaacgtggccctggcctacccaccaatgttctagaacattctggaacattctgttctcagcccgg

SEQ ID NO: 143622 - DNA, 122 bp, Homo sapiens
aaactcgaaaaggggactgtgtagccagggagacctcagagacagatgtcacggagttcacggagctgggaaaggttgtttctgggtgtatgcgtgtgtgtgcgtgtgtgtgtgtgtgcgcg

SEQ ID NO: 143623 - DNA, 122 bp, Homo sapiens
acgaaaatgacgtgcagacggtgtcgcacaagtgcctggtggtgggcctggagcagtatgcgcagatgctgaagaccaagaagtaccaggacagcgagggcctgtactacctcgcgggcacc

SEQ ID NO: 143624 - DNA, 122 bp, Homo sapiens
caccgcggctgcctcgccacatccctgggcctcccggtgctctgctgctccggccaaccccgttagcaggcactacccaggctcgaaatcccaagctggcaccttccccttcccgtccctcc

SEQ ID NO: 143625 - DNA, 122 bp, Homo sapiens
tacaaaggacatgaactcatcaaagatgtttttaatctctcctgaccaccctcattaattcgccaaacaccaagagcctggtgggtgccagacctgtgctaggcccagaaacgcaaaggtga

SEQ ID NO: 143626 - DNA, 122 bp, Homo sapiens
atgttgcatgcttaataacaaaatgttatgcatttggagttttgaactgttaggtcaaagcgtggatttttttgaaggcataactggatttaaaatctatttgactattaactggagaactt

SEQ ID NO: 143627 - DNA, 122 bp, Homo sapiens
cacggtaccctcgtgtctgatattcactgccctggaagttcctccgtctgtgcctgtcaccgccggggaccgagcgtggagctgccatccaaatgggcagggccttgtccgctttgttcact

SEQ ID NO: 143628 - DNA, 122 bp, Homo sapiens
tctgggcgtctcggatcctctgagccactttgcagacaatgcaaggcagcggccaacagacgagtcccgcagcagctgcgcaggcggcgagtacatgtgagaagtttgtgaaaggcgaccag

SEQ ID NO: 143629 - DNA, 122 bp, Homo sapiens
tggtaaatgtaggaagagatctaaatgctcactctgcctttcctcatcaaactgtaccaccgggtaatgaaatggtagatgaggggaagtctcccttcatagactacttcagctaatacatg

SEQ ID NO: 143630 - DNA, 122 bp, Homo sapiens
taaaacatgaggctttgagactgtagtacacagtttgctggagatgtgtttgggtgattgcgctactggggaaaatgcactgaaaataggtcatcaagaaaagattgatatagacttttttg

SEQ ID NO: 143631 - DNA, 122 bp, Homo sapiens
cacccaatttcagcagcagctctgcgttgtaaggatgtcatgcataacgaggtataccagcgaaatagcaagcccatgcttgacattgagcagcatagggtgttgtttgtgtgtgtgtgtcc

SEQ ID NO: 143632 - DNA, 122 bp, Homo sapiens
ggcgacccaggcatctggggagccacagaagtcgtactcccttaaaccgtgagtttccgacggtttgttccatggcgcgggattgtgagggattaggaacgaattctggatcgtgacttcgg

SEQ ID NO: 143633 - DNA, 122 bp, Homo sapiens
ggacctgaaacacaatatgaattgctctttactgtaaaacaaaaggaaagctgaccatgacgagattttactcaaatggcccaggggttaggtataattcaattaaaaagggaatttgtcct

SEQ ID NO: 143634 - DNA, 122 bp, Homo sapiens
gacgtgcctgggtgggaggtgggcccttggagatcagaccctgcttctctccaggagaaccgggaatggaaaacagggaggcagcacagaggcaggaaactcaggtgtcatagcttggctca

SEQ ID NO: 143635 - DNA, 122 bp, Homo sapiens
agctgggcagctccttgtgcagaagttccttcatttcccccttactcagcttgaacttgtcgccctcttggcaggagtacttgtggaaggtagtgaccagcacagccagcgcctgctccaga

SEQ ID NO: 143636 - DNA, 122 bp, Homo sapiens
ggtgcgcgagacagaggcggcgctgagccgggagcagcagcgcagctcccaggagcagggcgagttgcagggccggctggcagagagggtatggcctccccagatgcagcagcaccactgag

SEQ ID NO: 143637 - DNA, 122 bp, Homo sapiens
cttccactaccgcagccagttgcagaaccacatgctcaagcaccagaacgtgcgacccttcgtgtgcactgaatgcggcatggagttcagccagattcaccacctcaagcagcactccctca

SEQ ID NO: 143638 - DNA, 122 bp, Homo sapiens
cggctccagccatcattcctcatcccaccaccccgcgcagcgtcttgcctccttttatgccggtgtacgtgttgtgttaagagctgggctttgccatttttgacaggctaatgcatttcacc

SEQ ID NO: 143639 - DNA, 122 bp, Homo sapiens
ctggcagaaaggtcagatcctcgatagaatgtggggggcgccaagggccacaggcactggcgtcgggacagctgcggctcttagacaccttcggagggggtgtcttggggtcccggctctcc

SEQ ID NO: 143640 - DNA, 122 bp, Homo sapiens
ggcaagaagctaattagatgattctttaacaaggtaaaaatctggactacaaactgatgccgcctggtcctgattctctttctactctactcccacagtgctaaggctgaagaagcaggagg

SEQ ID NO: 143641 - DNA, 122 bp, Homo sapiens
gacaggggtgtgcgggcactcaatgttccacgcgcggccgggagctcgcagtgtggtccacgccagtgcgcctggaagcccaggggatctgtccggcactccactggaggcttggcccgcgg

SEQ ID NO: 143642 - DNA, 122 bp, Homo sapiens
ggccatctttactgtgggctgaagcctgtgcgcttactcgcgcatgtgcaagccttccctcgctttcctcttccaagtagccttgcctagagcggagcctcccgcgccatttctgtgcgcct

SEQ ID NO: 143643 - DNA, 122 bp, Homo sapiens
ccaggtctgggaatcagcgctcgggggtggctggggacaaccgagaacgagcttcttccccggcacgcgggcggaatggctgagcccagcctggaagcccccgtcaggtccttgggggcggg

SEQ ID NO: 143644 - DNA, 122 bp, Homo sapiens
tgttcatcctcctcccggcaggctcacctgagtgcaggttaggcaggtgaagtgtctccccggaaaccaagctagagtgccccacctgctcggccctgccttctcggatcggatccagcaca

SEQ ID NO: 143645 - DNA, 122 bp, Homo sapiens
ccctgtgggttctccccagcctctctccgcgccagctcttttaagcatggtgagcctctgcgattgattggctgatctctaagccactcagctgagctctgtcggtgggactcagatgggtg

SEQ ID NO: 143646 - DNA, 122 bp, Homo sapiens
ccaggcccgaggtgatggcggctgttcctgccgttctggggcctgtgccccagagctggccgcgtttctcggggcgggagccagctctgctcgcctggcttaacccagacgagcccaggacg

SEQ ID NO: 143647 - DNA, 122 bp, Homo sapiens
cgcaacccgagccagaccctggaggcagggctcacacaacccagtcgccccatcagcacccgggaacacttggggtcaaggccaacaaggagaagaaaggtcccccgggttgctgcgctgcc

SEQ ID NO: 143648 - DNA, 122 bp, Homo sapiens
tcctttttgagaatttattcctgattacagtggacccttcaacaatgcgagggttagtagcgctgaccacctgtgcagtcaaaaatctgcacataatttttgactcctccaaaactttacta

SEQ ID NO: 143649 - DNA, 122 bp, Homo sapiens
cgcccggcgagccgccaacttttaaatctcgcgcacaagtgggctgggctgcgcggtccccgccgcgcgtcacctcgccgcctgccgcccccggcctacctcgcctcaccccgccccgctgc

SEQ ID NO: 143650 - DNA, 122 bp, Homo sapiens
cagcccccaggcagaaggtcaaccatgtcagggtggggctgaggaggcagcaagagtccccgatcacccagggagatgcagaaatgctgacatagctggaggctggaaaaggcgtgaggtta

SEQ ID NO: 143651 - DNA, 122 bp, Homo sapiens
tatgtgtgttgagtctttctggccacaagggcaccatttagtaaattacttcctccaaaacgctgaccagtgccctcttggcctgaaagagttagtgtagttgcaagaggtgagtcattgaa

SEQ ID NO: 143652 - DNA, 122 bp, Homo sapiens
ttctcagcttctcaaagcaaatttttctttgttcaccggtatagaatcatcattggaagccgcctttgctacccaaggtaccaagttcggagctctgtctggtttcacttcacattatgtga

SEQ ID NO: 143653 - DNA, 122 bp, Homo sapiens
acgcccactaaccttggcgcgtcccagtctccaccccaaacctaactcaggtgaaaatggcgccacgcgcgggggcggggctagaggtacaaagagagtgtctattggttgggagcggcacg

SEQ ID NO: 143654 - DNA, 122 bp, Homo sapiens
acaggaacctgggggagggcccgcgtttatccctgaacctctcctgaaccccggggtagacgctcagcaccagggagcacatgcgtgctggctccatctccagggtgactccatcccaggca

SEQ ID NO: 143655 - DNA, 122 bp, Homo sapiens
ccggtgccaggagggaacctgcgccgaggcgtgggcgcggggacgaagcagcacagccatcggggacccagtgatggccccgcatgtcagatctggtcccctgaggacccttgcctccacca

SEQ ID NO: 143656 - DNA, 122 bp, Homo sapiens
aaggtcagtcggccgagaggagtccgtggagccaccgtttcatagcctcagggaaaggatcgggcgtgctcacgagccctctaacccatggcttaaacacccgcttcctaagcctgggtaag

SEQ ID NO: 143657 - DNA, 122 bp, Homo sapiens
aacccggcttgagggggatccctgctgtccagctgcggtccccgcagtgaccaggcgaggcgctggcatcctggcactatctccaggcgtccaggctgaacgcgcggtcaccctcggccgcc

SEQ ID NO: 143658 - DNA, 122 bp, Homo sapiens
actccggttcgctcccacggcctgcctgccttggggttttgcagggcagacgcatggtctcgccgctggctgccgtgtgcccactgctcagggtggccggagacgcacagccccgggagggg

SEQ ID NO: 143659 - DNA, 122 bp, Homo sapiens
agaatactcaagtatctgaaacatttctctaaaactttatttcaaagttattcacctcaccgttaataaggtgtatgattaatgctctgtgccagtatttgcaggcctgcccattgccggca

SEQ ID NO: 143660 - DNA, 122 bp, Homo sapiens
acacgtcctgtttacaggagactataaaacccctgccccatcctcatttggtgctgacgccgttttaggcctcagcctgtctgcacccaggcgctcattaaaacagcgtgttgctccacacc

SEQ ID NO: 143661 - DNA, 122 bp, Homo sapiens
actgtgtgccaagcattgtattgctgagaaccacaggtgatagaaacaggtcacagttaccgacgagctctctataaccccttgaaaaaggatggtggttttagcggtaactacttcatggc

SEQ ID NO: 143662 - DNA, 122 bp, Homo sapiens
aaagggcacggatccgcgggtcagcaagcccgacgaatttacaccaatgacccgccgtgtcgccagtctcagaccagggcacaacacgccaaccctgcagaccacccccacctccccagcca

SEQ ID NO: 143663 - DNA, 122 bp, Homo sapiens
gggccggtaggagccgggtggagctaggtagggcccgaagccagcttgctccctaggatccggccacagttgcccaggcagctcgctgtgcgctggccgctggccgcgctggcgatcgtctg

SEQ ID NO: 143664 - DNA, 122 bp, Homo sapiens
cgcatgcacacaacgcacgtggtctccgcgccatggcagtgatggagatgggtccctggccgccctcggggcacaggtggcccgcagggcccggcgggctcagcagagcacgggcacgccgt

SEQ ID NO: 143665 - DNA, 122 bp, Homo sapiens
gaaacaggttagggcccctgggtcagtcaatagctattgaagttggattgtaggagttagcgtgtgtgggagagacagagatgagagagacagagagaaagaaacagagacagaaatagagg

SEQ ID NO: 143666 - DNA, 122 bp, Homo sapiens
ctcagttaatccaccagccttggcctcccaaagtgctgggattacaggcttgagccacctcgcctagctatttatgtaaattaaactttaattgtggtcgtatggttggcctcacaattcgc

SEQ ID NO: 143667 - DNA, 122 bp, Homo sapiens
agttttccctccccctgcgtgtccccagcgagctcgctaagggagacgtggcgagcgcaacggtggaactcggcgaggtctcgcccttagccccgccctaacgtcaaagccctcccccaacc

SEQ ID NO: 143668 - DNA, 122 bp, Homo sapiens
gtctggctgtcactgctatgaagtctcgaccctaagcccagggtctggccttgaaagctccgcagaaatgattccaaaacccagggagcaaccactggccctaccgtgggacttactccctc

SEQ ID NO: 143669 - DNA, 122 bp, Homo sapiens
aggcccagaccttgcactggagggtggggaacataaggctggggccgctggggcaggaggcggctactgagatgctcgctcgcctttctcaaacagcgacagaggcttaagcagatccactc

SEQ ID NO: 143670 - DNA, 122 bp, Homo sapiens
agcctggaaagggacagtcaccatctgtgttcctggctggaaggctgcacagtgtgcatgcgtgtgtgtgtgtgtgtgtgtgtgtgcgtgcatgtgtgtgtgtgtgtgtgtgtatgtggcag

SEQ ID NO: 143671 - DNA, 122 bp, Homo sapiens
tggttgacccagaataatcccgcctggttcaagacaggcattagagttctaggtcactctcgtccccccggggggaaaaaaggtccgcggaggtccgggcaagcaggggctcaccccatcgc

SEQ ID NO: 143672 - DNA, 122 bp, Homo sapiens
ctgccccgcctgcagaaggcgagtacgcgcggaggagactacaggccccagaatcctccgcggttccccttgcctggggtcagtctcctaggcaaccccgctaaacaagatggcgacctccg

SEQ ID NO: 143673 - DNA, 122 bp, Homo sapiens
gtggcacaagccgaaaaggtcaccctcgtttgtcttaagtcaagccgaaaaggtcaccctcgtttgtcttaagtgaccaaaaccagcaatggtaacaatgaaaacattactcacacctggtt

SEQ ID NO: 143674 - DNA, 122 bp, Homo sapiens
tccagacctgcagttccagtttcagccacgagatggcaatgttgctcttcgccggtagcccggcgggcgcgtgggctgagctgcagcagaactggggtgcggggacggaccgggagcaatcc

SEQ ID NO: 143675 - DNA, 122 bp, Homo sapiens
aggtgagaagagtgaaaaagtggaattaatcatggaggcgggtaagaaaggaagaagaggcgtcaggtttggagaggtaaattaatcaaactatccatggctcatttttgttatcggtcaat

SEQ ID NO: 143676 - DNA, 122 bp, Homo sapiens
gctcacagtgaggtctcaaaagatccccacctcagttttctcatctggaaagtggggcctcgtaatcctgtccgacccggcgcgggacagtaggtgtcagggattttggtgaccccacgctc

SEQ ID NO: 143677 - DNA, 122 bp, Homo sapiens
acacatattctgcaacaacagataaaaaccccaaacggcaaaaatgtcaggaaactcattcgtatggagggtgcacatccatcatcctctgctgttctgatacgacagagccaacttttatc

SEQ ID NO: 143678 - DNA, 122 bp, Homo sapiens
ctccccagaaggccaatatttagtctaggcttaagagaggagacccaaagtacctccacccgggttccaaaccaaatgaaggtttgatgggctggagactgagcattctcaggcatttacct

SEQ ID NO: 143679 - DNA, 122 bp, Homo sapiens
caaataacaatagcagcagcaactaccatttattgagtgcctattatgtgtcaaattttccggtaaaaggtttttgtttttgtttttaaatttgttgatttaaaagtaaagaaatttactca

SEQ ID NO: 143680 - DNA, 122 bp, Homo sapiens
ctacctcgcggctgctcctgaagtgtgcgttcggaaggacagaacgacgcaggaatggaccgatggacgcgggagaccaggcggctccgcagctccgctccctgccggctcccgggtgggac

SEQ ID NO: 143681 - DNA, 122 bp, Homo sapiens
ccccgggcgccctgtcactgtgcctcggttgccaggcaacggggcgggcgggaagctgggcggggggcgcagctgcgccaggcgtgggtgacacccggcgggcgcagcgcgcgctgctgcag

SEQ ID NO: 143682 - DNA, 122 bp, Homo sapiens
gcaccaagcggtggggtcgcaggatccacggccttttacttctctcccgcagacccactccggggtgcagggatgcagctcagtacccccgtcagcccaagtttctctgccacttctcgggc

SEQ ID NO: 143683 - DNA, 122 bp, Homo sapiens
gagcagctggaactctcggcgctcctggctcagtcctcgccgccctgaacccgtctgcaccgcagggcccgagtgggaggcagaggccacatttctggatatgagcaaaagctccgacattt

SEQ ID NO: 143684 - DNA, 122 bp, Homo sapiens
gacaagtacccaatgtcttctagtccattcccatcttgtagcttaaaatcatcctttacacggggtcggtaggtgtatttttggactttcttacacaggacagatcatagtcactgagaaaa

SEQ ID NO: 143685 - DNA, 122 bp, Homo sapiens
ttgggaagaaaacaggattggccaggcccatcccgagaggtccacgtcaggcaggggccccgcccaccgcgggaccaagcggctacgccttccaagttttcattcggggccgcgccagcgct

SEQ ID NO: 143686 - DNA, 122 bp, Homo sapiens
tcggcatttttgaaccaagagacagcacttgggatccggaatgtctggacttgggcacggcgctgtggagctggcgccgttgggagccatgcgagttctgggtcggtaggtcacctcagagg

SEQ ID NO: 143687 - DNA, 122 bp, Homo sapiens
ctccacgtacacgaggcgcctggaggcgcaagattcacggagacaaagtagcagggtgggcgccgggggctgggagtggggcacggggagctcgtgttgaacggggaccgagtttccgtttg

SEQ ID NO: 143688 - DNA, 122 bp, Homo sapiens
gcaaagagagggcctggggctcgtccggcagtaacagcagcacagtacaaggcacggatgcggaaccggctcccaaaccccgtgcctcactgtccctggtgtagtgacaaggtgtcagagat

SEQ ID NO: 143689 - DNA, 122 bp, Homo sapiens
gacgcccactggggacagaaggagaacacttcctgttcaccataggccatggcatggactcgggtcctcaatcttttgagcacagtaatgggttctggatcttgggtaacaccacttttttt

SEQ ID NO: 143690 - DNA, 122 bp, Homo sapiens
ttctctatactttctttcctttctctgactgaatgctgaggtgttgagccctgaggatgtcgaagccaccaccagccataccaccccacgacaaacaatactgttctactgtgttcagtcac

SEQ ID NO: 143691 - DNA, 122 bp, Homo sapiens
cctccgtgcgcccggctccgcggagcagctgcaggtggggccggtggccgtgcgggtggccgccagccagatccacatgccaggccacgtggaggccctcaagctgtggtcgctgaaccccg

SEQ ID NO: 143692 - DNA, 122 bp, Homo sapiens
aagacttgggaatccaccatcggagagggaaggagctaggactgttttcccatccgttgacgcttttgtgaccatcacccactagtctggcttctgggcccttgactcttagaatgatttga

SEQ ID NO: 143693 - DNA, 122 bp, Homo sapiens
tgaataatggttcccagatggtgccagtgacgcagtggggaggctgacagcttctgggtgcgaatggccccacaatgcggccggggaccaccctgctcacggccggtcagagagcctgagga

SEQ ID NO: 143694 - DNA, 122 bp, Homo sapiens
tccatgagttggctgtatgtgtgttgggggtgctaggagatttctgggtattctgtatgacgagggggttgatttggtttagctttgtaggtgatgacccatccgtcagaacattttgctcc

SEQ ID NO: 143695 - DNA, 122 bp, Homo sapiens
cgtggaaccagccgcatcattactgccagtaacgacggtaatgacccctgccactccgcgcgctttctgctcgtcaatggcttcccagagtttctcttgggaaaacctttctccattaccct

SEQ ID NO: 143696 - DNA, 122 bp, Homo sapiens
gcattcatccgtttagttctcaattcagcaaatgtttattgagtcttccactctgtgccccgcactgctctggtccctggggacctggtaggggtcactgtaatgaggctttgctctcacag

SEQ ID NO: 143697 - DNA, 122 bp, Homo sapiens
ttattccatggggatattctgtgaaagtcctacttctcctttttaataattgagtggcctcgagcaagtcactcaatctctctaggtctctaagatgattatgatcactaagcatcactctt

SEQ ID NO: 143698 - DNA, 122 bp, Homo sapiens
ccagccgctcacctcaggtgcagctccagctgcgtgtagaggaagtgcaggaacgcccgccgggccacgacctccgcgtggcagtcattcaccaccagcccctggtcactgaggtgctcgcc

SEQ ID NO: 143699 - DNA, 122 bp, Homo sapiens
ttgcgggccagctggagttccgggtgggcgtgggtttggcggccccgcactcggagtggccggccggccctgctggccccaggcagtgaggggcttagcacccgggccagtggctgccgagg

SEQ ID NO: 143700 - DNA, 122 bp, Homo sapiens
ggcctggctgtgcgtttgtagttgtgacctcgccaacctcaccgcacccaccacgtgggccgttactacccccacaaggaccaggggacactgaggcttggagaggcgacccaggtgcacat

SEQ ID NO: 143701 - DNA, 122 bp, Homo sapiens
cgagtgggaggaggacgaggagcgcatgtccttcctgttctccgctttcaagaggagtcgcgaggtgaacagcaccgactgggacagcaagatgggcttctgggcgccgttggtgctgagcc

SEQ ID NO: 143702 - DNA, 122 bp, Homo sapiens
gccacttacctcaaacatttcagagaaaaaaagtcatatatatacacacacacctaattacgtctttataaaatcacatataggtatataggtgagatcagctggggcaacatagtgagacc

SEQ ID NO: 143703 - DNA, 122 bp, Homo sapiens
cagggtgggtattctgctccctccttctctccttggcagggctccttccaggggatcccacggactgttccaccgcaccgcagacagagtgagtctgtgtctctcactcctatcctgctctg

SEQ ID NO: 143704 - DNA, 122 bp, Homo sapiens
agtagccgaggcccgagaggtcgagtggggcctgagcgggcgctggagctctagctgggacgcggcggctagggcggagccggagggcgcctaggcgtgtcgaggcaagccgaggcgagccg

SEQ ID NO: 143705 - DNA, 122 bp, Homo sapiens
aaccccgcgtagctgaaagaattcgctccctcaaaggagtcagtgagcttcggcagtctgcgttccacccgtttcgcttcgcgcggcggggcgattgtgtaaagcgggcccgggtctcggcg

SEQ ID NO: 143706 - DNA, 122 bp, Homo sapiens
ggatccagagaccctgaagcttcagggttattgggcaagaaacctgagtgcaccaatccccgagtcttcagctaccgacggcaggttccctcgggtgccggggatgctccctcttctctaag

SEQ ID NO: 143707 - DNA, 122 bp, Homo sapiens
tgcagggcatcctccagcccttccagcttgttcttagcatccttgagggccatctccccacgctgctcagcatcagcaatggcggcctgtaggttggcacactaggagggcaaaggaagaga

SEQ ID NO: 143708 - DNA, 122 bp, Homo sapiens
agcttcttgttcatgctttatcgccaaggcctagaaaagtgaatgcaaacagttaagaaccggccctacattcttgctgtctctgcctccgagactcaggagccacttttcaagagccgaga

SEQ ID NO: 143709 - DNA, 122 bp, Homo sapiens
ctggtgcctcgggctgcaaggaagcaccagtaaatttggggggttctgtagtgactcattcggaaagacccgctccctgaagtctcccgcgacgggggtctgaaggtttggcaaccgcgccc

SEQ ID NO: 143710 - DNA, 122 bp, Homo sapiens
ggaaatagccctcgttgtcagactctgaagaggaggagcaggtggaacaccaatcatactcggcgaagtagggtccccagcggtccccaaaggcattctgcaaagccaggtccgacacagtc

SEQ ID NO: 143711 - DNA, 122 bp, Homo sapiens
gaatcatctaaaggtggtggttgatgtccgctgttggctaggggcctcagctcctctgcacgtgggcttctttgagtgatcgctccacgtgggccagtttgggcttcctcagcacaggacta

SEQ ID NO: 143712 - DNA, 122 bp, Homo sapiens
ggaggctgaggcaggagaattgcttgaatccgggaggcggaggtttcagtgagcctagatcgcgccactacactccagcctgagcgacaagagcaagattccatctcaaaaacaaacaaact

SEQ ID NO: 143713 - DNA, 122 bp, Homo sapiens
gtcccgctgctttccccccatggctcagtctccggagtgattggagccctggagacctggcgtctcacctgctgcccgccccgccctcccacacgtcacagccccacccccgcctgtggtcc

SEQ ID NO: 143714 - DNA, 122 bp, Homo sapiens
tgcctgtccccagccccaaccccactcatgccccgtcgtcctcccagacaaatgaaaccacgctgcgcttccgatgcccccgcttgccgtgtaatggttcagctaatcccatggcgagatgg

SEQ ID NO: 143715 - DNA, 122 bp, Homo sapiens
acggtgggagtgggcggagagggtgctgattcctggcgcgtctgcacccaggatggagttcgtgtccgaggtgcagaggaaggtgcacgaggcccgagccggggttctggcggagcgcaagg

SEQ ID NO: 143716 - DNA, 122 bp, Homo sapiens
ccccgggaagaagatggaggcttggtgccaaggagcctgctggtgggcactgacccctcccgtggggttcgtaggagcgcttcagcgaatcgaccgccatggggccctccaggcgtccccca

SEQ ID NO: 143717 - DNA, 122 bp, Homo sapiens
gactcgcccgcatagtggagattccggcatgaggcggcggcagtcaccgcctggctgccccgcggaggcccgggagagccgctgcggtctcgggaggccgggctttgggacttgctggcccg

SEQ ID NO: 143718 - DNA, 122 bp, Homo sapiens
aggaaagatatgtgggggttacaagaggagcgtgtttcattcattcctcacgttgctgagcgttcactaagtgacagcccacgatccagtaggggagccaaggcacgggggcaagagaggag

SEQ ID NO: 143719 - DNA, 122 bp, Homo sapiens
atgttctcagcttgatgacaaggaacctgtatagtgatccagggatgaacaccccctgtgcggtttactgtgggagacagcccaccttgaaggggaaggagatggggaaggccccttgcagc

SEQ ID NO: 143720 - DNA, 122 bp, Homo sapiens
gccaaacccactcctctggcctctggccagtaccgccagggagggactcaggagagcaagcggtttggagtctgggggtcaagagaggggacctcagagaacacagaattacttgagggcga

SEQ ID NO: 143721 - DNA, 122 bp, Homo sapiens
agaggatatatagtagcttcacagtcatcgtgaagtcaggttcctgctaccttaatctttcgccatcctagtgtgaggcttccattcttaaggttgccctatgacccaagatggctgctgga

SEQ ID NO: 143722 - DNA, 122 bp, Homo sapiens
acaaagcaaaaccacacacaggacggcagcgcggagtccgggccctgccctctgcagcagcgcagcccggggactctggggctctccctgctgcctgtggaatttccaggccagcgcatctg

SEQ ID NO: 143723 - DNA, 122 bp, Homo sapiens
cgcgggctggtgtgggttccaggtgagcacgggctgggcaagcgccgcagtcttcacggccggctagctccttctgggcttgatcggaggctgaatcccatgcttggaccgctgttccctat

SEQ ID NO: 143724 - DNA, 122 bp, Homo sapiens
aagggtggagggccattcccagcccaaggggcgccatgtcctagacaggtgtttgaggtccggcaacacttcatagagccagcaagagatgactgcccagcctcttccacccaggcctgtcc

SEQ ID NO: 143725 - DNA, 122 bp, Homo sapiens
cctgtctgcaatgctgctgccaaaagccactatcgtggacttaaagagtgccttattcatcgctgtggtattctacacagtgttacttctgatgaagaatttcaattttaaagcaatgagat

SEQ ID NO: 143726 - DNA, 122 bp, Homo sapiens
gagagacagcatgtgggtcaaccagggacaggactgacacagaacccagttgtcctgccccgaagcccaggacccttccttcctggttggcctggtggcaggatgatgcttcctgctcagcc

SEQ ID NO: 143727 - DNA, 122 bp, Homo sapiens
cagagtcccagagaggcagacagaattacaacaggcaaaagagacagtgacagagaaggacggaccccttgctgagctgcacgctgggaatgagacgagctactcagggcttctttcagctg

SEQ ID NO: 143728 - DNA, 122 bp, Homo sapiens
aggcgggagtggcggtgccagcggagggcaccggcccggcgtggcagcggcggcggagcgcggccccgggcacaccatggccgagctgctgcggagcctgcaggattcccagctcgtcgccc

SEQ ID NO: 143729 - DNA, 122 bp, Homo sapiens
gctgtgccgggcggagagaactcagcgaggattctgaggtgagtcgagcggttttgaagccggactacctcaagtctctttcctcacttctttctcttcacttaaaacaatttttttggagg

SEQ ID NO: 143730 - DNA, 122 bp, Homo sapiens
aggagctcttgaaggcctggaagcccagcacccccggccgctctcgtccttggggctatgcgcccgccagacgctcatgatcacagcacgaggacgacttgctttttgaaaggagacctcaa

SEQ ID NO: 143731 - DNA, 122 bp, Homo sapiens
tacttgctgatcagcggaagaaagcctcttcccatgtgtcagagtggctcatgcccatgccgccttgctgctgggctctgagctctcggcgacaagtgctgccctgtggtgcttgccaagaa

SEQ ID NO: 143732 - DNA, 122 bp, Homo sapiens
tgcgagcctagaccggctcagtggacgcgccgcgctgtgcacgcgggtctggggagacggcggttcttgaatgatccctcacactgcagggtatctgggagcggtggattgagggggcacaa

SEQ ID NO: 143733 - DNA, 122 bp, Homo sapiens
tttaggaagttgagtccagggaagctccaggagcaggctggttttatgtaaagacaatcccgtcttctttgtcaaagacaggtataagaaaggcttgtaacttaactcagtccaaggagaca

SEQ ID NO: 143734 - DNA, 122 bp, Homo sapiens
caggagcgccgggggagtgagagacgcctcctggcgggagctggcggctgtggaccccagcgggggcggaggggaagaggggagcaggggcggggagcaaggagccgggaggagggcggcgg

SEQ ID NO: 143735 - DNA, 122 bp, Homo sapiens
gttggtaatgggaaatgaccactagggggcgcgctgtgtcaataaatgctcagccagggccggtgtctgcgagctccgcggccgggcatcctggcaatcaatggaccgcaggttctgggggt

SEQ ID NO: 143736 - DNA, 122 bp, Homo sapiens
tcgagttttcgcaacacctcttccaccgggatagcctgcttctcctcttgagggactgcgcgctgtcttataccaaagtccaccattttgcgtgggtaggaccctccaccctggcctgtggg

SEQ ID NO: 143737 - DNA, 122 bp, Homo sapiens
gagcctcatgtccggaggtccagcccggcctcctggctgagccttcccaccctgacaccccgagaccgtcccagcctggctggggtcagtttgtgctgttatcacctggcatctgctcgaca

SEQ ID NO: 143738 - DNA, 122 bp, Homo sapiens
gaatcaggaccgtggtaactggtccaaaaaatcggattatcttctatctatgattggatacgcagtgggattaggaaatgtgtggagatttccatatctgacctacagcaatggtggaggta

SEQ ID NO: 143739 - DNA, 122 bp, Homo sapiens
gaggagtcttccgctccgtatctgcctagagtctgaatccgactttctttcctttgggcacgcgctcgccagtggagcacttcttgttctggccccgggctgatctgcacgcggacttgagc

SEQ ID NO: 143740 - DNA, 122 bp, Homo sapiens
tgatggagatggaatgagagatgttaaagccagatattgggcacacccagcaaagcctcccgcccagctcacccttgagcctgcgctgctttactcacattaagagatccgctggtgcagag

SEQ ID NO: 143741 - DNA, 122 bp, Homo sapiens
aggggctcctaggcactcgcggtttcctggagatccaccgtctccctgggtagctcaggccggtgctccaaggccattgcctgctgacgcagccgactctgcggtctcctacagcatgcgcc

SEQ ID NO: 143742 - DNA, 122 bp, Homo sapiens
agtaaagcctaatgaagtttagaaatccatttttaactgttgcttcttgccacatgtcaccgtgtcactggtgctgccttgtgccagcccgaggatgagatgagccatccggggatcctcac

SEQ ID NO: 143743 - DNA, 122 bp, Homo sapiens
catgtccagttctaccccagcagtctgtgacactccaagccacacagccttcttcgaggacgtccagtcctcccagaacaaggaggcacgaaagtgtggaattcaacatctccaagcacagc

SEQ ID NO: 143744 - DNA, 122 bp, Homo sapiens
ggaaaaagtgacaacatggcttcctctaaatcatttcacctttcagtccccacccgcacccgtcccctagagccatagtactgtgttctgaaagccatttagaatttctttgtgagcatgta

SEQ ID NO: 143745 - DNA, 122 bp, Homo sapiens
ggacgccgggcatcaggggctggatggagccgggccggcagtctgggtactcagagatgtcgcccaggtgcccgccgaccgctcggcttactgcggcgcttcccttgcagggccgcgcgggg

SEQ ID NO: 143746 - DNA, 122 bp, Homo sapiens
cttgtgttgggcccaatggccctcggccagtgtccgtctgccaggtgccagcccccggtgcgctgaagctcaggccattcctgatgccctggcctcctgcactgagctgtggtgagcccatc

SEQ ID NO: 143747 - DNA, 122 bp, Homo sapiens
actcaaggtggacctccccgcggaatagtccaagacgcaagtcggtgcgcacgtggacttcgttaccctgagggtgaaacctccaactagcaggtcactgtccaccctacctccgccgtgca

SEQ ID NO: 143748 - DNA, 122 bp, Homo sapiens
cgagagaggggggccgtcttctcttccggcgccaggcacacatccgggagcggcctgcgccgcaaggcactgtggggtatgtaggccagagtcatttctcctgaggcgactctccgcgtcgg

SEQ ID NO: 143749 - DNA, 122 bp, Homo sapiens
ctttgctgccggggttcgggagtgacctgcgcctagagcaggtcgggcgcactgcagtcccgcactcggggctcttcttccggtcacctgtagagcccggccgaggaatggaataacaggcg

SEQ ID NO: 143750 - DNA, 122 bp, Homo sapiens
aattttttttttttttttgagacggagtctcggtctgtggcccaggctgaagttcaatctcggctcactggaagctccgcctctcaggttcacgccattctcctgcctcagcctcccgagta

SEQ ID NO: 143751 - DNA, 122 bp, Homo sapiens
actgagttgttgatattgtacagcaagactgacttgagtaagtgttcaacggtagtaatgcgatccaggttaaatagcagttccactgatggaaggattcctaagaagaaaaaaaatctacc

SEQ ID NO: 143752 - DNA, 122 bp, Homo sapiens
agggctgagcagctgccgggctgtgagaaggcggatacgaatcccagcagggcaagcgggcgtctccttggccctcgctccaagaggcgcacaagaaatgaagccgctggcagcagaaggtg

SEQ ID NO: 143753 - DNA, 122 bp, Homo sapiens
tggcggggtgggtcccttttgctgggctggactgtacatatgttaatagcgcaaacccgacgccacatttttataattgtgattaaactttattgtacaaaagtgtttggtcggtgtatttg

SEQ ID NO: 143754 - DNA, 122 bp, Homo sapiens
gcgccaggtccttcccgccgccgccgccgccgccgccgcctgctcccctggcacgcgccccgccgccctcggcagccgcagctccgtgtcccctgagaaccagccgtcccgcgccatgggca

SEQ ID NO: 143755 - DNA, 122 bp, Homo sapiens
tatgattagattgtgatggtttttagtgcagctcttcctcatgttagcagatagcccacacgtgtgggaaagctgagtcgtcttattgaatctgacagtaaccgtttttgtccctttctttt

SEQ ID NO: 143756 - DNA, 122 bp, Homo sapiens
atgccgtcctgccctcctccacctgaggaattgccgctcacaccacagggttcagctccgcggcatctcggcgaagcctcctgacatcccgacccccgccgagacctcccctctgagctcct

SEQ ID NO: 143757 - DNA, 122 bp, Homo sapiens
ctcgcctcctggggcctgaggcgggaacccgggtcgcgctgctccgaggcctcggcggaccgcgaaaggatggctcaccacccggccagggccagcccctgcaacaagctcagccccgcccg

SEQ ID NO: 143758 - DNA, 122 bp, Homo sapiens
aatagaatgaacacttttgaactcaccaccaatataagactataatagaaagttatcggccgggtgcagtggctcactcctgtaatcctagcactttgggagcctgaggcaggcgcatcacg

SEQ ID NO: 143759 - DNA, 122 bp, Homo sapiens
ctcggagggtcgcgcggcgccgcttggcaggcacaccggctgaacgtaaggcgacaggagcgcgcagctgccgtccgcatcctcctgaaggcgcaacagagctaacccgggcggagaggagc

SEQ ID NO: 143760 - DNA, 122 bp, Homo sapiens
tggaaggttggcgggatgcaggtcctgctgtctgaggctctcacaggcatctccccaccccggttctctgagaaccagggtcgccactggcattcattagacacccccgccagcttccaaga

SEQ ID NO: 143761 - DNA, 122 bp, Homo sapiens
agccactgcgcctggctgagttttagcaaagaactcttctaagtcagtttaccccaccctcgatatccaattaggttacttattctctctgccctgcaggtggtgtctaagcaccctggcct

SEQ ID NO: 143762 - DNA, 122 bp, Homo sapiens
tacttgggaggctgaggcgggagaatctcttgaacccgggaggcggaggttgcagtgagccgagatcacgccactgcactccagcatgggcgacaagggcaaaactccgtctcaaaattaaa

SEQ ID NO: 143763 - DNA, 122 bp, Homo sapiens
gctgccttctcctgggcccacaatgacaggacttatttctttaaggaccagctgtactggcgctacgatgaccacacgaggcacatggaccccggctaccccgcccagagccccctgtggag

SEQ ID NO: 143764 - DNA, 122 bp, Homo sapiens
cggcccctttcgcccagctcacgcgccccctcttccctgccctctgcccccagttcgaggcgccggacatgctgaagcccggagaccccggcggttcggccttcctcaaagtggacccagcc

SEQ ID NO: 143765 - DNA, 122 bp, Homo sapiens
aacttctccgaaagtcaatgtagaaaaaaagtcactatgctactttgtccaaactgaactcgtttggatcattacacctccatctgctgctggcactgtatagaacctgacctctgggagct

SEQ ID NO: 143766 - DNA, 122 bp, Homo sapiens
cttttctttctttcttttttgcagaaccgtcaagttcaaaacatgttttcctttcacttacgtatttaccactgcttaagtatttattaagcacctactacttgccccacgtgcttctaagt

SEQ ID NO: 143767 - DNA, 122 bp, Homo sapiens
acttctaccgcgtaggtcccgccaggagttcgcgcatgcgcaggagcgacaataagatggcggtgataatcgccgcactttttttcaaattagtggatcccagaaatcattgcgcgcatttg

SEQ ID NO: 143768 - DNA, 122 bp, Homo sapiens
accagctctgcctaagtctgtaaccactggtggtggtagtactgagacaccatacaccttcgtggcatggtagaacagatgagaaagttcgatcttaaaagatgtccgctcaatggctcaaa

SEQ ID NO: 143769 - DNA, 122 bp, Homo sapiens
gcagggctgccgggccagcctctttcagctggaaaaaaccacaagcgctcactaacctgccgtgctcaccatgaacttccacttgaccacataggcatccccctcatggaactgcccgatgc

SEQ ID NO: 143770 - DNA, 122 bp, Homo sapiens
tttgcaaaggggtcagcaaggagcacctctggagtaggctgatagcacctggcacagaatcggcctctgtgaagtcttctgaaggatcaaacactgggggcagtgggggtggtggttgctga

SEQ ID NO: 143771 - DNA, 122 bp, Homo sapiens
ttaaaggtgaagagcccggcgctgaaggccacagacatcacggcggatttcacagagggccgcgttccgggagcgggtggccaggcggtggcggacgccccacctgtccatcctcctacccc

SEQ ID NO: 143772 - DNA, 122 bp, Homo sapiens
gctctggggctgccactcagccccacatggcccagggctgatttatagacaaccgaactgcgatgatccagaaactgaggaagcagctctggtggctatagactacatcaatcaaaaccttc

SEQ ID NO: 143773 - DNA, 122 bp, Homo sapiens
ggctgcggtgtccccagccggatccccacatctcatgtctgctctgccgcccacagatcccggagttgaagcaggacatcagcatccccgactactgcagcctgggcgatggggaggaggag

SEQ ID NO: 143774 - DNA, 122 bp, Homo sapiens
ctgcagttttccggcagagcagtaagaggcgcctcctctctcctttttattcaccagcagcgcggcgcagaccccggactcgcgctcgcccgctggcgccctcggcttctctccgcgcctgg

SEQ ID NO: 143775 - DNA, 122 bp, Homo sapiens
ccctaagtctccagccgcctttgctctcgcaggctctaggcggctagagaggctccagagcgccctgcagatgggttgcttttcgcgtgccccttgtgatgggaggattaggtcgcaggctc

SEQ ID NO: 143776 - DNA, 122 bp, Homo sapiens
ccgggaggggcgggatccttctgccaggacgatgggtggacacgccagttttgccgttagcggggaaccaaagagcagcccattgtgagaagtagggagaggccatgccgggggtaggttgg

SEQ ID NO: 143777 - DNA, 122 bp, Homo sapiens
acaggttagacattggagaaacgacgaatacctgttagccctcgatcaagtgcagggggtcgatattcaccactcagatgccccagggagtaccgtcctagccaatgtccctcttttctttc

SEQ ID NO: 143778 - DNA, 122 bp, Homo sapiens
gtaatagcaattgtacattttgtctcatccgaagaattgaagaccttacctacctgacctcgcttgattgctaacttcctcatgacctgtcttaccattagaaagtgagctctcttaaggag

SEQ ID NO: 143779 - DNA, 122 bp, Homo sapiens
ctgttactatagcactgtctgaattcctgtaattattagtccagaattatcttgcagcctcggaaaaaaagcaagtcaaccaacgatttgagttgagtggtcttttacaattttaatactgc

SEQ ID NO: 143780 - DNA, 122 bp, Homo sapiens
gtgccctgggaggaagaatatgatgtgcgaattgatgcacattttctctgccatactatacgaagttttaagtaaattatgtgttccagctacatgatttctatttggtatgggccttctgg

SEQ ID NO: 143781 - DNA, 122 bp, Homo sapiens
tgcgaagagctacggagaggcttcctcagggctatactgggtccacctcccctcatggaccgcgggcgcgctctggcggccgggccgctccaggctgaagccgccggaccacgtgtgtagtc

SEQ ID NO: 143782 - DNA, 122 bp, Homo sapiens
acaggcagctgggtttttgctcctcttacagcgcctctctctcattaaacagtagctgatcgatcggcaacttgctcaaaatccacaagaactattcatcacttgtgacacagacctgtttt

SEQ ID NO: 143783 - DNA, 122 bp, Homo sapiens
cccgggcaggtgggtcacggttgtgtgaccttgggcttctgtgatagacatggctgtttccgctgtctccggacatcagtgtacgctgtggacaaatgcagccggtctacgtgaggtccgct

SEQ ID NO: 143784 - DNA, 122 bp, Homo sapiens
ccttccccttgcagaagtccctgctggtgtagtatttatggctgtcactgaagtgctctgcgttcctttccctggtaccctctgtggccttggcccaagagaaaattctgatcctggagagg

SEQ ID NO: 143785 - DNA, 122 bp, Homo sapiens
tcttgaagaaaaacactaattcatcaactcccattgctacaatataatttgtgtgctaaacgcagatgtgtagcatctgagtgttggaccctgagccttgtgtaaacagcctgctttgaaat

SEQ ID NO: 143786 - DNA, 122 bp, Homo sapiens
tccccttttcaaaatgaagaccctaagatctccttcgaggagatgagcagaaagcccagccgcagagctgcggacgctaacgccagcgccaagcgggtgccgacactccctgtgctgttccg

SEQ ID NO: 143787 - DNA, 122 bp, Homo sapiens
aatgctaggattctaagactggaagcatcagtgttacttagatgctaggagtgtaactgtcgatgatgctaaggttgtatgtaggtctagaagaatgaatggtgttgagattttaggaacgg

SEQ ID NO: 143788 - DNA, 122 bp, Homo sapiens
tttccacctggggagaagacgaagcaaagaagcagggacctgcctgcgtttgggtagaggcgagtaaaaaaattaaagcgtgtacatttcggcccgatgcaggagaaaggggtaaagtgcaa

SEQ ID NO: 143789 - DNA, 122 bp, Homo sapiens
tcaaaagcaagagacttccattgacagggtttatttttccccagctccaactacaggcaccgaaaggtattttaccttctgtcaaaggttcaaagaaggaaaacataaccatatacaggcgt

SEQ ID NO: 143790 - DNA, 122 bp, Homo sapiens
cactgaccgcactctgtgagtgatccgcagcctgtggggttgacgtcagggcggtggagacgtgtggggctgagagtgaggggagttcagaggcacagaagccacccaagcgacctggagcc

SEQ ID NO: 143791 - DNA, 122 bp, Homo sapiens
gctcacccgaattcgctaagattttcctgaaccacgagcttgtgagatttcttctagattcggtttctttacccatcccaccatcataacagcaacccttcctgcgaaatttatattccctg

SEQ ID NO: 143792 - DNA, 122 bp, Homo sapiens
tgctctgtggggcagaacagcagccaactcaacttcctgtaaaagctcatgctggtagctcggaactgccaagggacctaggaggctccagacttgacccagctggtgaacggtcgacttgg

SEQ ID NO: 143793 - DNA, 122 bp, Homo sapiens
gggtgtttctgggtgggccgtcaggcatgggcctgtgcaacacagagcccgttcctcaggcgagtggtgctgaggtgctctgtggtgatgggaacggcagaggctggcaggtgactgaactt

SEQ ID NO: 143794 - DNA, 122 bp, Homo sapiens
tgcaaagaaaacaaacaagggcctaagagaggaaaaaggcaggggatgcaggtggacccacgttggtcaggggaggcctctaggaggtgaccatcgagctgatagaagatgagaaggctggc

SEQ ID NO: 143795 - DNA, 122 bp, Homo sapiens
ttcctgtattagtcaaggttttccagagaaacagaatcaatatatattggggcaggggggcggtggttattataaggaattggctcacgtgattatggaggcggttaaatcccaagatctgc

SEQ ID NO: 143796 - DNA, 122 bp, Homo sapiens
cccgggcgcgcaggaaccgcagcaggaaggagtcggtgagcggcagcggcgcgagcgggacgccagcttcccgggcccggcgccgcagcgccgccaggcccggctgcagcaacggagagtgg

SEQ ID NO: 143797 - DNA, 122 bp, Homo sapiens
agtctgacctgctccttctgggcctctgccttgccagttattattgggtctgttttctcccggaaagatcagagctctataaattgttaactttcagcaggttgagtaacacattcagcaaa

SEQ ID NO: 143798 - DNA, 122 bp, Homo sapiens
gacacatggcgggcgggtcaccgggagccccacttgagggaatttcctagaatgacaatgcgcaggaacaatgggtgagtcaggtctttaattgccagaaattatcttgatttcatggcaat

SEQ ID NO: 143799 - DNA, 122 bp, Homo sapiens
caaggaagcctgtgatatcgatttgcctccaagtttaaaacacaccgcaaaccttcccctcggccgaccgaagaaacggcatttttttcctactcctttggggcagtcccctgagcacgtgc

SEQ ID NO: 143800 - DNA, 122 bp, Homo sapiens
gggctgcccggggctgagatgctgctgtgcccgggggggcttccagggacttcactctgccgtctgcaccccctgtaggacttgggggtgggataacccgttgtggcctaggggcaggcagc

SEQ ID NO: 143801 - DNA, 122 bp, Homo sapiens
tttctttttcattatttgatagacatatttattttctattgcttcatttttgtttctccccgtaagagaagattattaggagccagattagaaactgtctaccacaaaacagattcctgggc

SEQ ID NO: 143802 - DNA, 122 bp, Homo sapiens
tcaagcccgcacatgctccctggggcccctgcgggattacgagggggtgggaacagggcccgagtctcccgccatcttgggccctagcggtatttttccagctctgggaagagcggcctgac

SEQ ID NO: 143803 - DNA, 122 bp, Homo sapiens
caattattgtgagggccgtcgtttgagtaattcccagagagacaccagggccggcgctcacgaagcctggtgcacagcgccctaatgaagcaattaaggcagggatcctccgactttgatct

SEQ ID NO: 143804 - DNA, 122 bp, Homo sapiens
cagggcgaccgcggaggcggcgggcagggcgcgtgcgcactgcaggggcgccagatttggcgggagggggagtgtccaaagctctttgtttgatggcatctctgtttacagagtttacactt

SEQ ID NO: 143805 - DNA, 122 bp, Homo sapiens
actcttaaacctatagccactctacaaggggtgcactattgtaactcccattttacaaaccgcaaaactgaggtacacagcggctgagtaccttgcttgccaaggtcaccaactagaaagtg

SEQ ID NO: 143806 - DNA, 122 bp, Homo sapiens
atgcccttaaggcctgagaatattcgagacaaccatctggtcttttcccaagccaagcaccgcccttccttgactcactcccatggacccaggtatctccaggcagccacctcctgccctta

SEQ ID NO: 143807 - DNA, 122 bp, Homo sapiens
ggaaagcatagcttgttttaaaacttagttttctttccttttgcatcataatctcttccccggtctatttatttctcgtggttttgtcagtccattacaaacggttgcaaaattgtggtact

SEQ ID NO: 143808 - DNA, 122 bp, Homo sapiens
tacgtcacagcgcgctggcgctacacgcccgctaaaagaaggttgatttctaattggccccggtcggccaatagaaaaaagataatctggagcgttttcattggtccgctaaagataatgac

SEQ ID NO: 143809 - DNA, 122 bp, Homo sapiens
accgggcctcccagagccgaggtgacagcctgggcctcggggaagcccgtgtctcatgggcggttgtccagctgctcaggcctgcacaggggcgggtcccctcctaatcttatcctcacaca

SEQ ID NO: 143810 - DNA, 122 bp, Homo sapiens
gctatttcctgggggcactacggaccacagtgaacgacctggcatgctctgataagaaaacgctttataatctcgccaactaccttaactgccgtacactcccaacacgctcccgccaaaga

SEQ ID NO: 143811 - DNA, 122 bp, Homo sapiens
cacactaaaggcaaataaagctttaaaattacctcatgcgtcatctggctgcacagactccgggctcatagtgggaacctccggcttggtcctcccagcatacaaaggcaactcagtgaatg

SEQ ID NO: 143812 - DNA, 122 bp, Homo sapiens
caaaaggttctcctaagggtttattttctgcctcctctgagatttgccccaaagcatcaacggtgtcgttcctcccttcctcctcccttctctcccgggagtctttctactgacacaaatta

SEQ ID NO: 143813 - DNA, 122 bp, Homo sapiens
gtaggggcaccacatcatgagcaagaggatcctgtagtgaccccagcggccagaagggggcgtgccgcgactacactgcaagcaagacgacccagcactgtccgtagctgccagcaggggag

SEQ ID NO: 143814 - DNA, 122 bp, Homo sapiens
gttgccgggcaggacttcggtgctccggaagggtgcggggcagcaacctggccagggcagcgcctcggtttccttccaattcattctcgattcccagatactcagatgagaaatccgcactc

SEQ ID NO: 143815 - DNA, 122 bp, Homo sapiens
aacaatcctgaggccctgaaggtcgacgcgttaatcctcacaacagacccatgagatgagcgtggttctcgcttttacagaagagcaaatggaagatcagagaagctcaataactcacacca

SEQ ID NO: 143816 - DNA, 122 bp, Homo sapiens
gctgggctgcgacagggacatcacggttctcctcctcagggagatggtgctcgtcgtgcacggcttcccgtcctccgtggccgcccttcgggtaaggaaggagaccgggcagcggcggccgg

SEQ ID NO: 143817 - DNA, 122 bp, Homo sapiens
gttgctgtgcgcatgagccccccacagctggactctgcgccaaacatcaatagaaaacggcgacagtaacgtgacccccggcagagctgtcactgaggcggcagccaaagcccggtcccaaa

SEQ ID NO: 143818 - DNA, 122 bp, Homo sapiens
acacacccctgacgtggcctcgaccacacatccacatggacgcatggcagggtgtgtgtgcggttgctgctctgggctgatctggtgaggatggggtgggccggaagagggacacaatacct

SEQ ID NO: 143819 - DNA, 122 bp, Homo sapiens
gtagcaataggtttggcttggactcccttaggtggagaaatcatgttcgtggaggcgagtcgaatggatggcgagggccagttaactctgaccggccagctcggggacgtgatgaaggagtc

SEQ ID NO: 143820 - DNA, 122 bp, Homo sapiens
tggtgctcggggcaagtgaccgtgcgtgtaaagggtgaggcgtatggagctgtggcggggcggaagttcacatgtgtggtatgtagagcacatgttatggttatcaaagtggtttactgtaa

SEQ ID NO: 143821 - DNA, 122 bp, Homo sapiens
tccctggcggacgcccgtggggaggtgatgcagcttgtggctctagggactcctttaggtcgaagagttctggtgctcttggtagcctgttcctcaaacctctgaccctcagaggctctgta

SEQ ID NO: 143822 - DNA, 122 bp, Homo sapiens
tagaaactgatatgctgaatggatatataaaaaagggaacagatcaccacttccaatacacgacaatgcctgttcttaagcaggacagactgtaacagaagtatctcgcattgcattttatc

SEQ ID NO: 143823 - DNA, 122 bp, Homo sapiens
tcatgttcaaaaatacctacgtccactccgttcccatttagatctctctaaagtccattccggcttatcagcaccgtaatttcacgagcagagctaagatttctgccatttaggccccaggc

SEQ ID NO: 143824 - DNA, 122 bp, Homo sapiens
ttgacagcattttcctttgccgtctgctggtggattcctattcccagtcggtaatcgccccgcagtgttgatctaagaaggtaaagaaaactaggtttccctgcaaagagcctcccccaaat

SEQ ID NO: 143825 - DNA, 122 bp, Homo sapiens
gcacacaacaggacactttctctgccagctttcaagatgtgatgcagaggccaagtctgacgaattgaagtttcaattaaaatttaatatgtttccattcctcatcgcccaccccacccccg

SEQ ID NO: 143826 - DNA, 122 bp, Homo sapiens
aaaacacagaatgagtgacagggaatgggctgcccagcccgggggtgagtctcgagcggccggtgccaagaaggttgcacaatggctgggcgccggggagaggtgtggagaaaggggctgag

SEQ ID NO: 143827 - DNA, 122 bp, Homo sapiens
ctggcatgagatgcatcagcccagagcatggggcactacattctaatgcccaccaaggcacgacatggtctgggggaggccctgccctcagcctccacatccagcactcctctagtaccaga

SEQ ID NO: 143828 - DNA, 122 bp, Homo sapiens
gagggatcttggggtagaagagcggtcctacagagctgccgcttcgaaagagcccccaatcgaccgctgatggggaatggaggattttgctgttttattgcagcccgcccccggagaaaggc

SEQ ID NO: 143829 - DNA, 122 bp, Homo sapiens
gggcggggcctgagccagctgtgtgcggatggggcggggctttggaggccgcgtgaccagcggcgggtcacgtgacgcggtgcctggcgccgagcctcccaagatggcggtgtgcatcgcgg

SEQ ID NO: 143830 - DNA, 122 bp, Homo sapiens
cctaaagcccactgtgattttcaggaccactcgtttaaaacctgcccgggctcagccgggcgcggtggctcacgcctgtaatcccagcactttgggaggccaaggtgggcagatcacaaggt

SEQ ID NO: 143831 - DNA, 122 bp, Homo sapiens
gaggtggcggagacaggcaggcctgggcagccgctggggcggagggacggctcttggaaacggaatccgtactttaattaaagtttatgcagttttccaggagcgtcctgtacctcatttcg

SEQ ID NO: 143832 - DNA, 122 bp, Homo sapiens
gctgagtgtgggggtgggggttgcgggggatggtggagtaggacctgtgagtgtcagacccgattagaagttagaagaaaacatgctcgcaagggtaatgtcagcattgtgcagaattctct

SEQ ID NO: 143833 - DNA, 122 bp, Homo sapiens
tcatcacttgagcatttctgcagcaatgtatgacaattcatcccaagaaaggcaacaagacgatgatgagcttgcattaattcaggccaagtcaggttttgccaccaaatgaattatgaaaa

SEQ ID NO: 143834 - DNA, 122 bp, Homo sapiens
aatgcctcctgggagttgtagtttagaagggagagcggaacttagaacccgggttcccctcgggtgatcccgccccctcgactccccagccaatcagcaacattagtctggttagacgctct

SEQ ID NO: 143835 - DNA, 122 bp, Homo sapiens
atgaatctgcagagtggaacagcttttccctcctccttccttgtttttaaaaaaatgttccgccatgctacttgtggaagcatgaagtggaggggcaggaagccgcctgcccaccatggagc

SEQ ID NO: 143836 - DNA, 122 bp, Homo sapiens
gtaaaaactggttcttggaaaggggctgcagaagacctcccgaggtggatgttactgagccgcccggcgagcaccagccgtgacaggtccgggcccggccgcgcggagccgcgggagaactg

SEQ ID NO: 143837 - DNA, 122 bp, Homo sapiens
ccattccagtctgggtccctgaagcgacctggttcatctcggcagctccccagtaatctccgcattctgcagaatcctatctcatctggttttaatcctgaaggcatatatgtatgacatta

SEQ ID NO: 143838 - DNA, 122 bp, Homo sapiens
ctgggcccctatgggtctgggggctgccccctctctctggacctctgttgggtctggatgcgtgaggttgggggaacctcccagggcctcctagctgctcccatcaccaaaaactgacgtca

SEQ ID NO: 143839 - DNA, 122 bp, Homo sapiens
catgaatcagaggagactcggaggcaggaggaactggctatcctaaaggtgattttaaaccggggtagctagagcccaaagaagggcgaaaccaggactaactgccccatagcatgaggggc

SEQ ID NO: 143840 - DNA, 122 bp, Homo sapiens
attcaaaaatgttaccagaggtggtaattgtatttatattggacatgggtaagacatcagcgtgagatgaagccacatttttgctgcttttgtgactcaattcttgggcttccaacacctca

SEQ ID NO: 143841 - DNA, 122 bp, Homo sapiens
cagtaaattgcccaaggtcctacagcagagctgagattcagtgtcagctgggattccaatcgttgaaaccctatttggctttcaagtccactctctttctgctggccacactatagtatcaa

SEQ ID NO: 143842 - DNA, 122 bp, Homo sapiens
ctcttgcccagggatctgggcagagcgtgggagggcctgtggggcctggggttctctctgcgcacgaaatccggggcgggcactatgtgattcgagcccgctgcgccctgggctcctcgtgt

SEQ ID NO: 143843 - DNA, 122 bp, Homo sapiens
gatgcagacccatgtcagaatgcactgcttgattagaggggcatgggccggatctgagctcggatccactttctcagtcagatgcctttgcacgggcacagcctgctccaaacatatgatca

SEQ ID NO: 143844 - DNA, 122 bp, Homo sapiens
ggccgaggctctcacccggctgcgccgaatccccaaacccccggcactcgctcccaacgccgcgccgagctcgttttcttgtgcacctttcggaacctcagattttccttctttcctttctg

SEQ ID NO: 143845 - DNA, 122 bp, Homo sapiens
tataggatagctctcacgccaatcttggcttcagtgagccaatgagaatgggacgcccctcgtgaggttgccgcccataaacaaaatgcactcttccttctcccctccgcccccccgtcccc

SEQ ID NO: 143846 - DNA, 122 bp, Homo sapiens
ggtgttttaaaggtgattcaccaccatttgtgaaaggaccaacgtgctgataaacaggaccgatccgagtgctacatgactgtgcgtttgctatttcaatgggcctgaacgactacaaagcc

SEQ ID NO: 143847 - DNA, 122 bp, Homo sapiens
ctggaggtgatggtcgagcgcttgttgtaatgcgccaggcgggaagcctcgcccgcgatgcgctcaaatatgtcgttaacgaaagaattcatgatgcccatggccttggaagagatgccagt

SEQ ID NO: 143848 - DNA, 122 bp, Homo sapiens
ctgtaggagcgtaaggagcctccatcctcagccacgtgcagctgacgtggctttcctgatcggagggcttttcttttatgggtggcccagcttcttcaagaccttcactgctctgcctcagt

SEQ ID NO: 143849 - DNA, 122 bp, Homo sapiens
agccacccggatgcagagcctttgagtggcagctgccgtggccggccggaagcatggcggcggcagggaggcccctagggtgtggcagggcgggtctacggaggcctctttaggccacagag

SEQ ID NO: 143850 - DNA, 122 bp, Homo sapiens
ctgttgcttttaagaccaccgactgatgctgctgcctggatatccacttgcaagcattcccgagcctcagaacgtgaactcgcaaacgctcaggcaccagctgtcttaagcctaaatctgct

SEQ ID NO: 143851 - DNA, 122 bp, Homo sapiens
caaagcaaaataacatctcaaagactcactattttttgaatactatggatgagtaccaagcgaaacaaaaacaaacaaacaaaaaacagaaaagaccaactccaaaactctgagtatataaa

SEQ ID NO: 143852 - DNA, 122 bp, Homo sapiens
cccgcgcgcctacactcccgtgccgcctcagctactagtccgcaacttctagccccaaaacgctggagctcagaacccagctcaggtgcgctcgtcggtttcccagggagactggggctgat

SEQ ID NO: 143853 - DNA, 122 bp, Homo sapiens
gacccattctcttcccctggggcccaggcccgactgtgggttcagctcatgcgggagctccgccgcggagtgaagctgaagaaggtgcaagagcaggagttcaaccccctccccaccgagtt

SEQ ID NO: 143854 - DNA, 122 bp, Homo sapiens
cacaaacacgggcgcgtcgagctggcgcagcaggcgctgcgtgcgcgcgcgcggccctcccgggcccagctccagcgtgaccacgtccagcagccgccaactcacgtggctggcgtcggcga

SEQ ID NO: 143855 - DNA, 122 bp, Homo sapiens
gggggctgggagatggaaatgaggggagaggacctggaccctgcatgggagaagggccagcgtggtcatgaggtcagtgatacccccacttggggccctggccaggaagtccacgctgaagg

SEQ ID NO: 143856 - DNA, 122 bp, Homo sapiens
cgcagtgaggatgagcgtcctggcagagacgcagttgtctctgggcgcttgccagagccacgaaccccagacctgtttgtatcatccgggctccttccgggcagaaacaactgaaaatgcac

SEQ ID NO: 143857 - DNA, 122 bp, Homo sapiens
gcgcgcggccggcgcggccacaacccggtctgcggcgccatctagcgggcgcgccgggaccgtcgcccactaggcccttttccggaggagaagctgatgccaatcaaaacgccatctctact

SEQ ID NO: 143858 - DNA, 122 bp, Homo sapiens
aatattaatggaataatagttggagtgggaaatgacagctaggggctgggggcaggggcccgagcacctcctgagggagtctgcaagcccactccactctggggctgggggagagggactcc

SEQ ID NO: 143859 - DNA, 122 bp, Homo sapiens
aatcgttaatagctaagcatatgtaatagttgtgtgagcatgcttgtttttgtgtgagtgcgtgcagaagctttatgtagcagagtgggatacagtcaaacaaaaatgaggttgccatggca

SEQ ID NO: 143860 - DNA, 122 bp, Homo sapiens
gtgtgtcatgtgtgcctcgtgccctgtgctgggcgagagtgggcacagctgcgcagacaacgcccttggcgaggctggagcctggacccctgcctggcagcagctgggtgaactggtgtctt

SEQ ID NO: 143861 - DNA, 122 bp, Homo sapiens
ctgaaactagcaggtgacgaaccatacagccccaactctgctgccccgcccacagtgccccgcagacagtggcagcaacgccccgccccgcagcactgcagctgcacccccaggacgccccc

SEQ ID NO: 143862 - DNA, 122 bp, Homo sapiens
gcagggctgccccaggccctttgtccccactgtgcagtcacacagtcctggcttctgctgcggaaccctcgttctgggcaggaagacgggctgctgcgtgtgttcaggcccatttttaccag

SEQ ID NO: 143863 - DNA, 122 bp, Homo sapiens
ggatatcacctttactggtcaacccattttgtttcgcgagtgcccagtgagtgtttggcacgtaatagagcctccataaatagttgtagaaattagcgtcattttacagtatggaaactgag

SEQ ID NO: 143864 - DNA, 122 bp, Homo sapiens
caaaacagatgttcatcttgtttctccatcggctgtttgatgagaaatttattgctcttccgctgggcaggaggcccctctcggctgtggagtctattaggcaagccagcagctggcgggaa

SEQ ID NO: 143865 - DNA, 122 bp, Homo sapiens
cagatggttttctaaaccctctgaacctcatgaatgtagagaaccagctgaaagaaatctcgcaagagcacaacggtccttggcatgtttggccacttcactcaaaaatctggccagaaaaa

SEQ ID NO: 143866 - DNA, 122 bp, Homo sapiens
tggcttgcttcattgatttacattaacctgcctggcgctgtggacacttcagtttgcatccgccttctatgcatcttgtatatctctctaagttctacctttttcttttgcttttctgatcc

SEQ ID NO: 143867 - DNA, 122 bp, Homo sapiens
cctggaaataccagctctcctccctcccatgcttctccccaaagcaacaggacacggtgccgacccctcatttacaacgatgagctgtgaacaccaggagagtctctaaaagtgcacccttg

SEQ ID NO: 143868 - DNA, 122 bp, Homo sapiens
agcactctctgtccccctcgctggtgatttcagtcttacattcataggaaggcccctgcccggggcagggcagccatcggctctttgccccagtaaaagtttctccttagtgagactagaaa

SEQ ID NO: 143869 - DNA, 122 bp, Homo sapiens
ctttctcactgctatagtacgcgggtggctggacctacatgcttcctgctgtggctgtctcggaacccgtggtcctccgcttcatgtgagtgacgtcgtggcgggtcactcactcggggatc

SEQ ID NO: 143870 - DNA, 122 bp, Homo sapiens
gagaggctggtgcagggagagggcttggccctggggttctcacccccagggtcccatcaccggacagatggggtgggtgaaaggacctcggaaggagtcatcccatttcacaggtgaggaaa

SEQ ID NO: 143871 - DNA, 122 bp, Homo sapiens
tcaggtaaccctggcaatgggtcttcctgccagtagtaaagatggcgctgagagcacgagcgcactttcgcacacccccattacccacaatgcagcgggaataagggaggctcagtttctgc

SEQ ID NO: 143872 - DNA, 122 bp, Homo sapiens
ggggcgggcgtgctactttctctctcgaccccactgcaaaaggatatggctttgttcatgcgtatcactactcgaagccgggactcgttggtgggcggggctagtctggctccggccgctgc

SEQ ID NO: 143873 - DNA, 122 bp, Homo sapiens
ctgtgccagccaggcctgtaggggcagctggaacaccactgccaaccaggtgcatctgctcgagctgggacactctgacgtgacaggttctgcctttcccgctggggcccctggggtccatc

SEQ ID NO: 143874 - DNA, 122 bp, Homo sapiens
gttttatctcggcgcggcggtgaataattcatggccccgggtctgctttgcagtcaaacgcgctgcgttctgtccggcgccgccgccgccgcccgccggccgctgtgatttattatttacca

SEQ ID NO: 143875 - DNA, 122 bp, Homo sapiens
gtcagggctggtttgaggtttttgcagaacaaacggcgtccttgtggtgcgggccggcgccgcctattggcgacgaggggcactacatctccgggcaccccgaagtccccacccccaccaca

SEQ ID NO: 143876 - DNA, 122 bp, Homo sapiens
gagagtcggcattagagacacaatgcggcctttgtgaaacatgacaacatccctggggaccgaggcttctgagtgttgctgaactgaggagagtaataacagggtccagggtttgccagaga

SEQ ID NO: 143877 - DNA, 122 bp, Homo sapiens
ggtggtggctgtgctcatgaagcacctggacgacagcaacaaggaggcgcaggaggacgccgagatggatgccgagctcgagctggagatggcccatggcctgggccctggcccgaggctgc

SEQ ID NO: 143878 - DNA, 122 bp, Homo sapiens
tctgctccgtggccgccagtgtgggcttcccgggctagctctgcggcgaggtgggggagccgagtacgagccggcagaggtggggccggctgagggcggaagcggcggcgacgcgattacga

SEQ ID NO: 143879 - DNA, 122 bp, Homo sapiens
tcaggtcagctgtgcggacagcgctacctgccacaggccacaccagctgcagtgcggtgacgggtggtgttctatgcctgggatagtgtcaccctgccaaatgagagtgaaagtctccacat

SEQ ID NO: 143880 - DNA, 122 bp, Homo sapiens
ataagatgacaaacttaactgataaatgttaagtgtgttctgacagctccactggaaaaccgttcccttgtctttgtccctcccctggggcctctctactccctgagacacaacactattga

SEQ ID NO: 143881 - DNA, 122 bp, Homo sapiens
tgtttcaggtggacacccaccacttcccactacttcctaccccccacaccacaagaccatcgtgaggcaaatcccatgaggcagatgctactgtggaggctgcacctgcagctccaggaaag

SEQ ID NO: 143882 - DNA, 122 bp, Homo sapiens
ccttgtgtgtgcagctccccttttgctgtaaggacaagctccactaactgacatgtgcagcgtggcagcaccctcccccaccagcctttggtgatgccagcagtttctcactctgcagtgga

SEQ ID NO: 143883 - DNA, 122 bp, Homo sapiens
tgtccatcaacagatgatggataaagaaaatgtggtgaatatatacacagtgggatactacgaagccataaaaaagaacacaaaaccatgtcttttgcagcaatgtggatggaactggaggc

SEQ ID NO: 143884 - DNA, 122 bp, Homo sapiens
gccacgcactgtctggtggtagctcctccgtccgcagtcgttggtgcttgatgtctgaatcgacagattcatggagcaaaatggtgattttccagtgcgtggtggcttcgtcatgaattcac

SEQ ID NO: 143885 - DNA, 122 bp, Homo sapiens
ttcccagagggagcggtgccctggaggccacaggcctcctcatgtgtgtctgcgtccgctcgagcttactgagacactaaatctgttggtttctgctgtgccacctacccaccctgttggtg

SEQ ID NO: 143886 - DNA, 122 bp, Homo sapiens
aggagccagttgcggagcggaaggatgtctgagtcacacctccagggattgtcatacagccgcagctcacacagtttccccaggtgatcgaagatgccgaggggcaagttctccagctggtt

SEQ ID NO: 143887 - DNA, 122 bp, Homo sapiens
cagctttaactccttagcattttccccctgactcatttcctgattcatgagcgcaagacacggtaggcaattaattttcattttattcagagagagctcacctgataggtctgatgaatcct

SEQ ID NO: 143888 - DNA, 122 bp, Homo sapiens
gaacagaacactagtataggaaatgaagactacatggaagggctggctacttggaggtgacggagttaaagatttcatgaaccatcaaaagaccaggtcatttatacactagattatcaaac

SEQ ID NO: 143889 - DNA, 122 bp, Homo sapiens
accagtcgccatttaaaacgcatcgcatttcacttttcattattaagtcggattttaaatcgtgagaaaatttctctgaaatgtattgtccgtttttaggctgtaatcggcattactgtcag

SEQ ID NO: 143890 - DNA, 122 bp, Homo sapiens
agccagtgaaaataaatcttcactaagttttatggaattatacacatgccacaaaacacacgtttcttgacctcttatactgtgacaaaacattagtgctattaccccacttttcatatgct

SEQ ID NO: 143891 - DNA, 122 bp, Homo sapiens
agccatcaaccccacccaccatggccggcgcagcaggccagggacaagccccgctccttccgaagctagagacagagaaactgaggagctgaacgcagcaatttcctcgccccgacccccac

SEQ ID NO: 143892 - DNA, 122 bp, Homo sapiens
gaatatagtgttaagtcaaacaaaagatcataacgtgaaggtcacatttaaaaagtcctacggcccttagtaaaaggaaaaaaagtcctcagtgactgactggtcatggtggaaaaatccaa

SEQ ID NO: 143893 - DNA, 122 bp, Homo sapiens
cactttctggcctctggctgctgacccaggcccgggggtattttcagaggaagggaattgcggaccccggaggaacccgaaatttgcccctcaagagtgtagaagtgggtagcggaagatgt

SEQ ID NO: 143894 - DNA, 122 bp, Homo sapiens
tcaaaatgagggcttttatagcgcctgccttatagggtggtcaagaggattcactggcaacgcagtgaagctcttagcacaggggctggcacacagtaagcgcctggtgtgggcagggcagg

SEQ ID NO: 143895 - DNA, 122 bp, Homo sapiens
aagaccctgattggtttgtgggacggtctcaacgtcctgtcctaaccaatccagatgcgccgggggtggggcctggctctcactggccggtgcagcctttgcgcgcgggtttcgttgacccg

SEQ ID NO: 143896 - DNA, 122 bp, Homo sapiens
tacaaccttcttcccgggcctggcgctgggggtggaagggtggctcctgatttaggctcccgggcagaggatgtgagctcagccggccgccccagcacaccccatttcctctggccaaagaa

SEQ ID NO: 143897 - DNA, 122 bp, Homo sapiens
agtggatgaaaacgaacaaggcataaacggcaccagtaccaacagcacagaggcagaaaacggcaacggcagcagcggaggagacaatggagaagaaggggaagaagaaagtgtcactggag

SEQ ID NO: 143898 - DNA, 122 bp, Homo sapiens
gaggtttttcaaatcttaaattttacttaaatcttagcatagaattatactttgggatgtcgctcctctacaaggagcactcgaaattttgccgtgggccgcctgcggagctggagagctga

SEQ ID NO: 143899 - DNA, 122 bp, Homo sapiens
cccacccccacctgagaccttagtggctagaagggggaggggtgggggtggagcctgattcgcagcagggtgtgtccagatggtcagtctctggtggctagcctgtcctgacaggggagagt

SEQ ID NO: 143900 - DNA, 122 bp, Homo sapiens
cagagcccactgcagtcccctgctcttgtctaagtctgcctttacagccccacaggcacgcgaccatggtgacatcgggcagcttttatgatcctcatgtctcctcggatccccttcccaca

SEQ ID NO: 143901 - DNA, 122 bp, Homo sapiens
gagcccgtgtagtcgtggaaccatcaattagaatggttgctttctgatcccaaagtcactcgttctgaaaacaatatttttcataaatttgaaagtgagaagttttgatcttgccattccca

SEQ ID NO: 143902 - DNA, 122 bp, Homo sapiens
tccatccccgcgctccgcaaacttttctaaccgggtaacaaagtgagcagcggtggccgccgcgattcctttaacttcgcattccggaggctcgagggggctctgggaccgagcggcctcgc

SEQ ID NO: 143903 - DNA, 122 bp, Homo sapiens
agcgtgtgcctctccacagtgctttcctctctcgccctagaagggttactgcagcagtggcggctgacgtagagatggcgggctcgcgagtgctgttcgtgccttgcgtccgccccaacccc

SEQ ID NO: 143904 - DNA, 122 bp, Homo sapiens
ctcccctaccctggggagactgtccccaaccctaacttctttttttttaagacacagtctcgctcagtcacccaggctggagtgcagtggcacgatctcagctcactgcacctccgcctcct

SEQ ID NO: 143905 - DNA, 122 bp, Homo sapiens
tgcaagcatctggatcctgatgagaaaccaccttaactaatatccttgggaatgaaaccacgtttataatagattcagtactccactaacatcttaaagtacacttatctgtagtgaagtga

SEQ ID NO: 143906 - DNA, 122 bp, Homo sapiens
cctgaacgcccttcagtgccagagccaatggacgtccagactgtagagcttttaaaaccccgtatgcctgggccccgaaccccacttcagggctgacggcgttttgggggccgagccgccgt

SEQ ID NO: 143907 - DNA, 122 bp, Homo sapiens
agtacagtcacatgcggaggtgccaagggctgggacctctggggagacacactcagcccacggcagcagcagaggctgacgctcccaccaccctgccttctgctccagccctggctcctggg

SEQ ID NO: 143908 - DNA, 122 bp, Homo sapiens
ggagggtgctgcggctcgggatcccagggaggcgagggagagcgaggcagaccggagccgcgaagaaccctccaggggcgccccactgccctcctaggaaagctcccacctcggggcgctgg

SEQ ID NO: 143909 - DNA, 122 bp, Homo sapiens
agagcacattgcctcaccttcctaaagaaaacaatccccctggccgggggcggtggctcacgcctgtaatcccagcacttcgggaggccaaggcaggtggaccacctgaggtcaggagttcg

SEQ ID NO: 143910 - DNA, 122 bp, Homo sapiens
acaaagcaagttagcgttaagagctgagactagaattcagggtcctcactcccaggccaccgaaccatgcagccccttctttgggggaagagacctgtgtcagtcttggttaattgttccag

SEQ ID NO: 143911 - DNA, 122 bp, Homo sapiens
agccccaccccaaacctactgaatcagcagttttgctggtggttctcaatctctctttaacgtgccctctgggtgctgcggatgcacgctgaaggtagaagatcgctgcaggagatttccgc

SEQ ID NO: 143912 - DNA, 122 bp, Homo sapiens
ttgagaagcaaaggaaactaggtcaggtatcgggggtcagtcactcaccccttccagtgtcgggtgtggggtggttgggagtaatgagagctctgagcagggaaccccacagtcttccccca

SEQ ID NO: 143913 - DNA, 122 bp, Homo sapiens
ttactaagatggggagtgcagagggattgcagggggtggtggtggtgaatatcaggagttcgcttttggctgtgttgagtggagatgctgagaaggcagtaggatataaaagagacaccaaa

SEQ ID NO: 143914 - DNA, 122 bp, Homo sapiens
ggcaacggcttcgcgggctgcacgctgtttccccacatctccccctgcgagatgtgcgtgcgcatgctcctgtactcttccaagaggaagatcttcatgggcttcatcccctacgaccagag

SEQ ID NO: 143915 - DNA, 122 bp, Homo sapiens
gtttatttacaggaaaagcctgcgaagagttccagttaggaatctggctgagatcctgatcgcttacaagctgaggcttttataataaagtttctgttggggaggggttggggaagtgctgg

SEQ ID NO: 143916 - DNA, 122 bp, Homo sapiens
tctcagctcttcacttctccctgacatttgtggctgcctcctcctggtttcttctttaagcgattattgtgttttagatgatcagaattcactttttagagacttggaccttgtctttcaaa

SEQ ID NO: 143917 - DNA, 122 bp, Homo sapiens
cattaatcctaacattcacaacaatactgtaaaatagatattgttacccttatttaacaccgatgatattctagggctcaaagaggtggtatgacttgcccggcaagatcttggacttgaaa

SEQ ID NO: 143918 - DNA, 122 bp, Homo sapiens
aatcttcgcagtgggttcagtggtttgcagctaaaatgacatagtcatcaagaatagtctcgtgcaggatacctagggtcttccggagacccagccagggtgtccatggccaggaatacgca

SEQ ID NO: 143919 - DNA, 122 bp, Homo sapiens
tatctgaggcgccggcaccagacacggcagggtctgagtgctccctgacaagcgatgatgcgcaggcttggagccatgccagtgacacgcctaggaaagttcacgcaccgcccagcacgcct

SEQ ID NO: 143920 - DNA, 122 bp, Homo sapiens
gctcgggggcagaccaagacgccctggggtccccgaaacagagatgtacagagtcggacacggaaagggagagaccagctcacggttaagaaaggagggagaccagcccaggatcaagaaag

SEQ ID NO: 143921 - DNA, 122 bp, Homo sapiens
aggaatagtgaggcagaacacagacagaatgagagttgtcacctgagccactctgggatccgagcaagccaggcccacgaaaagcataaagtcacagtaaaactggtcaatgtggttggggc

SEQ ID NO: 143922 - DNA, 122 bp, Homo sapiens
cctgaaagacagggaagccctgctgcctgctgcccctgcaggaaggcccagagctctctgcgtctcttgggctgtttccttcacctaaaggctctgctgctgcctgccccgactcctgaggg

SEQ ID NO: 143923 - DNA, 122 bp, Homo sapiens
gggagccaaatgccctcgaaggggaacagcggcgccaacagtgacagtagtgaatggacccgaaagggagacaagccaactctttcgtggggggcccaactggcgcgtcccagttagctaac

SEQ ID NO: 143924 - DNA, 122 bp, Homo sapiens
catatgttgaggaaaactacaggtttcaacctaacatctaaatcttaaaaagtagcacttcggcaacaaacaagcgcagagagctcacctgaaaagtgaaataacatgactattgctcagat

SEQ ID NO: 143925 - DNA, 122 bp, Homo sapiens
gcgcgatgactccggagcgctggggccatctagggcccggagggaggagggccagcgtagcgctcctgcctctggctagcgtggagctcggcaagtgacagcccctcttcacctctgctctc

SEQ ID NO: 143926 - DNA, 122 bp, Homo sapiens
cagctggaaaagtgcttgctctcagcagctgtggccgctggccctgacctgtggtgatgccggtgctgctcctcgggctgacctacgtccgctcgtgatgaaacagacccaccgggagctgg

SEQ ID NO: 143927 - DNA, 122 bp, Homo sapiens
gaagacgcgctgggtgaggggtgggagggaggggcaggggaggggcgtgtgggggaggaacggaaacgacggcctttgtttatcgctcagggacccagctgatcccatctaggggatcgcta

SEQ ID NO: 143928 - DNA, 122 bp, Homo sapiens
aaatggactgccactggcaaacaaacatttgccctctgtaagtgtatatgcttctccagccgtgcactcctgcactccgcctgtgctgtaggattacttaatgcaaatattacaggcctttc

SEQ ID NO: 143929 - DNA, 122 bp, Homo sapiens
ccacgttgaccttgcagcagcattctgcattcctgcccatgactggattccaccctgtggcggtggctggctccgggcagcggtggtgagtatgtttttctctttcctggcaccaggatcat

SEQ ID NO: 143930 - DNA, 122 bp, Homo sapiens
atgaaagcacctctggccaggagactgtagtcctagggggtctttggcttgatggaaggacgcttttgcccctgggcttgtgccttgggctagctttagctcaatgggcacttcttgggctt

SEQ ID NO: 143931 - DNA, 122 bp, Homo sapiens
cgccgaccgctgagctcccggcccgtggtcgccccgccccggtcccgggctccgccccctcgccttctcggccgcccccggggccacgcctcccccggaggctgtaactttgcctcgcttcg

SEQ ID NO: 143932 - DNA, 122 bp, Homo sapiens
ctgctctccttccccgcgcagttccgcggtggaacctggctgcgctgggttttgaacgtgcgctttgcccctgttctctgtgggtgggtggcagcccaaaggcgaccccaggaccaccagcc

SEQ ID NO: 143933 - DNA, 122 bp, Homo sapiens
tagactagggatcccagttccagcacccatgcccagggccctttcttcctttaaaatagacggctgactctggcccttcttcactgatgggcgatggcttcctgcactgctttgttttcttc

SEQ ID NO: 143934 - DNA, 122 bp, Homo sapiens
cagtaaatgccactgaagaccctcactgggaagaggctgcagaaccgtgtctgccatgctcgtgttttaaatgctggccaagctgaatcaaaactccttttcctttttcaaatttccttttt

SEQ ID NO: 143935 - DNA, 122 bp, Homo sapiens
ccccgagtgggctgggtctggagctccgaggccgcacctccggtgggcgcgtcctccgcccgggctcacctcggacccgagctgcccggtccgcgtcctgagatcttccccgggccgggcgg

SEQ ID NO: 143936 - DNA, 122 bp, Homo sapiens
atatggtggcagtgggcagtggcctcatggtcagtgccgggcctctactgtgggtagacccgctgacctcccactttcattgcagcaggatggagctggagtgaggtggaggggccgcaagc

SEQ ID NO: 143937 - DNA, 122 bp, Homo sapiens
gcagcgcacgcgggcaccggcctgactctcccaccccgaagcctgctcccaacctaagtccgccctgactctcccagcctgaagcctgctcgccctcgggtgtccgggctgggcacaggcgc

SEQ ID NO: 143938 - DNA, 122 bp, Homo sapiens
aaaaccaaggagtaacccagggaaggctgattcttgaagaatgagtaggaatttatgcagcgcataccaagcagtgagaatagcaaatgcaaaggcacgaagtttgtgatggctacagcatg

SEQ ID NO: 143939 - DNA, 122 bp, Homo sapiens
ggcggcctcggggccttatatagggtagggcgcgctgtgattggtgcatcacctaggcaccgcccccgccccttggaggaggagtatttgtgtttgttttacccggaaaagttgagtataac

SEQ ID NO: 143940 - DNA, 122 bp, Homo sapiens
gagaggaaagaaccctgggaacgggaggcgaagggataatgagctggggatgggagcagtcgcaggaagaatcctctgcctggagccggcaggctccaacccctcagcttgagagtcaggag

SEQ ID NO: 143941 - DNA, 122 bp, Homo sapiens
catcagtgatttttcttctgtgattttttctgctgctttcctcatttaaaaatgcccattcggtattgtcttttcaccttctgaatcctgtgtaaaactgactcaatgttcccaactggatt

SEQ ID NO: 143942 - DNA, 122 bp, Homo sapiens
gtggagagcgggaggcgggaatgagggcgcgggaccgggcgggcggagcgtgcgagactgcgagcgcgagcgccagcagggcggagggcggggcgtgggcggcgcccggccttcccgctccc

SEQ ID NO: 143943 - DNA, 122 bp, Homo sapiens
tggactctagaaacaactgtggtgctgtggacccgtggccacaagaaaggtaaagagaaacgggcaggtgtaaaattgcaaacaccatctaactgcaactgtgcaaaacacaggtaggaaag

SEQ ID NO: 143944 - DNA, 122 bp, Homo sapiens
atatctatctatctatctatctatctatctatctatctataatgcacactcacacatatgcgcatactgtgtgtgtttttatactaggccatggctgaaatgtatctttttttttttttgag

SEQ ID NO: 143945 - DNA, 122 bp, Homo sapiens
gccgctgacacccggcgctccagccaggcccagcacacgggcaggtggccccagctcgtccgggtctgggtttcttctagaaggaaggcacagctgcctgccctgagctccctctctgcagt

SEQ ID NO: 143946 - DNA, 122 bp, Homo sapiens
ggtgtccagcgaagaggggtctgcacagaatccgggtgcagggctcaaatggctctgcaacgcaacatgcgccgccagggaaggggcaaatcagacaaccccggccggtctccgagccattt

SEQ ID NO: 143947 - DNA, 122 bp, Homo sapiens
cgatgccgcagtaacagccatagtcgttgtactgcagggcggacttgcctgtcatcttctcgatcatcaccccaaactgaaccaggttcccggtgaccagagccactgcagagagggagagg

SEQ ID NO: 143948 - DNA, 122 bp, Homo sapiens
aatctgcccttgccaaatgctcttccaaattggctccgtgaaaccagaaccgtgaaatcccgtcaggatagctggaggtaagcacagcggtggaaggatttagaccacgtcgaaacggctca

SEQ ID NO: 143949 - DNA, 122 bp, Homo sapiens
agcattgaaaggtaaaataagaggctatagaaagtattaagagcaaggactttggagttacgcaggacttagatctgaatttcagctgtcatttatctactgtatgactccagccaagtcac

SEQ ID NO: 143950 - DNA, 122 bp, Homo sapiens
agacatcctctctccaggacaatggtggagattccctgtgaatctagccctcttggtctccgtttccttttgttgcatgccaacatacccctgcttgataaaccctctttcttttgtggtaa

SEQ ID NO: 143951 - DNA, 122 bp, Homo sapiens
caaagctgagggcgttgggcgtgctgaggctgcgaccgccgacccgggcagtgaaggggacgtcgtcctctcgcggacggggctcctcctcgctgggtgaggccatcaggcagacataggtg

SEQ ID NO: 143952 - DNA, 122 bp, Homo sapiens
tcgtagagggaggatgacacgggtccgtacgcccagtcggtgaacttcctggacaggctccggagccgcttctccttgatctcacgactgaggatgtacttcaggatctgggacaggaggag

SEQ ID NO: 143953 - DNA, 122 bp, Homo sapiens
cgctgcaacctccctgcctgattctcctgcctcagcctgccgagtgcctgggattgcaggcgtgcgccaccacgcctgactggtttttgtatttttggtggagacagggtttggccgtgttg

SEQ ID NO: 143954 - DNA, 122 bp, Homo sapiens
ctgaacaaatttggtcatttcgtactcgtgatgtccttggtcaagggctctcctctgggccggtggtggttgcagagagaagcccccgccgccgtcgctcctcgggaaaggaagtcgcgggt

SEQ ID NO: 143955 - DNA, 122 bp, Homo sapiens
gccactgagccccggtctctctccagagtctcagaagctgctgccgacgtgggtctcacacgggcctcaccagctgcccgcaatcccgtcctgaggcggccccccatcttggaggactacgt

SEQ ID NO: 143956 - DNA, 122 bp, Homo sapiens
agcctcaactaaactttaccggggtccccctggccctggctcacctcgacaccgttaattcgctcgtctcctttaggaaacctttccagactgccccccggcgggaccgcagccatcccatt

SEQ ID NO: 143957 - DNA, 122 bp, Homo sapiens
gtgttgtcttcctgccctcagcccaaggtggctgtaatgagtgtttcctaacccgttttgcgcagggtgcttagtaccctatatgccattcattacagatgctctcctgcagttactgccct

SEQ ID NO: 143958 - DNA, 122 bp, Homo sapiens
ttgcccattggggtacacagggttcagcccatgcgaaagcaccccacagaggggtcctgacgtctgtggaacacactggaaggctggtcccatccaggaaaatcatccaagtgcttgcagtg

SEQ ID NO: 143959 - DNA, 122 bp, Homo sapiens
gtttctttgtgccttataatagtcataaaggtctggttagatctccactccctccaggagcgctccaggagctcacggttgggcctttcatagcacgtagggaaagatccttgctattttgc

SEQ ID NO: 143960 - DNA, 122 bp, Homo sapiens
ccttgaggtcaaagtgaggcatgcaagtttggtcctgagccctccccctcactgtgtccccgcagtctgtcccagaacaacatcactgacctgggtgcctacaaactcgccgaggccctgcc

SEQ ID NO: 143961 - DNA, 122 bp, Homo sapiens
cctacgagttcttccattcaatggctctgccgtcgtgagcctggcattcttaacccattgcgtgcttctggacctctttgtgtgatagtattttaaaatccttcaattgtcattaaaaaata

SEQ ID NO: 143962 - DNA, 122 bp, Homo sapiens
ctacttggcaatgtcattgccagtaccagttgtggcaaagatgttttgggcaatgtctcccgctggactgtactggataaagtagtggaatattttggttcccatgttgtagttgtaggacc

SEQ ID NO: 143963 - DNA, 122 bp, Homo sapiens
ccaggatgactcagtccttccccggccggtggtgccagcagcaggacgccagccagagcccgttccgggtcacaccccaggcccagggcaaggcacggcacctctcctgcctcagtttcctc

SEQ ID NO: 143964 - DNA, 122 bp, Homo sapiens
agaatttgaaataccaccatatcaacagtggtactttttctcctttggtatctcccgaaccgcccacagaggcagctccagaagaagccttagctttgaattgaggaatgggcaagggaagt

SEQ ID NO: 143965 - DNA, 122 bp, Homo sapiens
agagatttactttaaaaattagagtgcttatttcttgcaaagtacaccatggaaaaccctcgggggaaaattgttgccaaatgtatccattaactgtatttaaaatttctgattgccttttt

SEQ ID NO: 143966 - DNA, 122 bp, Homo sapiens
acttagcataatgtccttgaggtttatttttgtggcagcctgtgcttcttttgaagtctgcgagattctccattgtatgtatataccacattttctttatccagtcattggtcaatgaacat

SEQ ID NO: 143967 - DNA, 122 bp, Homo sapiens
ctgaccttgtgatctgcccaccttggcctcccaaagtgctgggattacaggcatgagccacggggcccagccaacatggtctttctttggtagtagagagtctattaagatattctagagtt

SEQ ID NO: 143968 - DNA, 122 bp, Homo sapiens
agcaggcgcccgcgagcagcggggctggtgcccagaacctagcgcagtgggagttcccagcgtggttgtcccaagcaccaaagccggtgtcctgaagcaaacagggcagctctttcggggca

SEQ ID NO: 143969 - DNA, 122 bp, Homo sapiens
cgtgaacacaggcgatgtgactgcaagtgccccactttgtgctgcagtggaaggaccctccgtctccgccatggggtctgaaaggcagaaagctgggtgtgtatgaggaccattgacacatg

SEQ ID NO: 143970 - DNA, 122 bp, Homo sapiens
actgaagactcctggtcctggactctgctgtaatctagaaatccactaaggtaacgttggcgtgtcgcccggctagctcagtcggtagagcatgagactcttaatctcagggtcgtgggttc

SEQ ID NO: 143971 - DNA, 122 bp, Homo sapiens
gcctggcggggactgtggctggcttgaggggcgaaggctgctcggagcagagcctggttccgagggggcgcggcgcgtccgggcgaggactgcaggtgcgctggctggcttgtgcgccccgg

SEQ ID NO: 143972 - DNA, 122 bp, Homo sapiens
gccgggcttgttggcatgtgcctttaatcccagctacttgggaggctgaggtaggagaatcgctttaacctaggtggcagaggttgcagtgggccgagatagtgccactgcactccagcctg

SEQ ID NO: 143973 - DNA, 122 bp, Homo sapiens
gaaatttaaaaattcacccatgtgtctttgtatgaagatacaccataacttgttattttacggggttcctgactacataatagtttgactgtgacagtaacaccattttagcatcaggacgg

SEQ ID NO: 143974 - DNA, 122 bp, Homo sapiens
ccttggcgcccttaagcagcagcgcctctgcaaaggctctgcctatgccctgagccgcgccggtcaccagcgccactttgccgttcacgtgcatggtgcagccactgctggggcgggcggtg

SEQ ID NO: 143975 - DNA, 122 bp, Homo sapiens
gccgcgtgggcctgagcacatttccttggcacattgtcctcggtggaagttttttcttctcgatttggtgagtcagagctggctcacacacaaacaccaagcagcagcctcagggactaaag

SEQ ID NO: 143976 - DNA, 122 bp, Homo sapiens
aagctttacatggatgtgtaaaatctgtgtggcaggtggcgctgttgagctggaagggaccgtgggatgaatctggagaaacctgttaccagaggctcttaagggataacccacagtccctg

SEQ ID NO: 143977 - DNA, 122 bp, Homo sapiens
acccgcccccggccccggccctcccccggcggcatggaggggccccgctcctgacggccgcgccgccgcctcggcccgtgctccacctcgcggcccctcccgcccgcccccgctcgcatgtc

SEQ ID NO: 143978 - DNA, 122 bp, Homo sapiens
cagcttctccaagggcgggcgggtgggatgatttgttgatttgcttgttttccaccaaaccgcagggcacctccaggagctccgggacaacttacaaatgaagacacagagcccccgtccct

SEQ ID NO: 143979 - DNA, 122 bp, Homo sapiens
ccggcaaaccccacccacgctgcgcggaggctgcgggaattgggctggcctgcaccgccccgggctcccattggctggtagggccgccagtcattctattccggcacctcccttaggcgcca

SEQ ID NO: 143980 - DNA, 122 bp, Homo sapiens
gcgctgccgcaggctccggggtccccgccgcccaggactgggtccctggtccccgatccccgctccccgctccccagcgctgtggcctcgtggggctgccccgcccccccggcgtcgccgca

SEQ ID NO: 143981 - DNA, 122 bp, Homo sapiens
cccccgctgaggtttgagccctgtgcatattctagcacttgccacactctgtcttgttagcgcctgtggctgtctgctctgcatctgtgagcacagtccttgctggtctgattcatcaggtg

SEQ ID NO: 143982 - DNA, 122 bp, Homo sapiens
aaaggttaaaggcctcaccctcaaggtcccaccaaagaatcgaagctggtgccagctctccgactcctacccagcaacccgccccaggtggccagcagctgcctctgagaatgcagaaggcc

SEQ ID NO: 143983 - DNA, 122 bp, Homo sapiens
gcgtgtggtgcgtccaggtgtgtggagcccaccactgcagctgggctccctccctgactgcggagcctcccacaagcctgggtgccaggctgggtttggagtggaaaagcttctagccattg

SEQ ID NO: 143984 - DNA, 122 bp, Homo sapiens
ggctcaactactcaatagcagagtgactttaagcaagttctgagtcttattttcctaacccgtacaagcagttattattaccctatgggctgctgtgtggatcaacttacataatgaactca

SEQ ID NO: 143985 - DNA, 122 bp, Homo sapiens
agatgtaaagatgaaggtgaatgcttttagtgaaagcattgtagcattcattctcccagtcgaggatgcatagcagtctctgtcctgagagaaaaggagctagatgccaagctttcacccag

SEQ ID NO: 143986 - DNA, 122 bp, Homo sapiens
gctccggcgtcgcagcgtccggagctttgggttccggcctacgaactaacgcgttacactcggacgttccctgcagcgcaggctgaggtcagaacattgaaatcatcccgcaaagatgcagt

SEQ ID NO: 143987 - DNA, 122 bp, Homo sapiens
ttacttgagcttaacttccctgacctacagagagtcaagaaaaactggcatataaagctccgttgtgttttggtctgacctgtgggtcctttaaatgaagccaggatatacagtgtgggggt

SEQ ID NO: 143988 - DNA, 122 bp, Homo sapiens
gaccaggaattgtacagttcttggtatagaagaagacaggcaaaagtgtttttgaactaacgttaaatgtgcaatatgttagaattcatgcaatgcacaggactgcaggattctgatatctt

SEQ ID NO: 143989 - DNA, 122 bp, Homo sapiens
taatgcaaagtaattgcaatgctgtaccatgaaatgcattttgttcttgaaaactgaattcgagtttgatgtcttttgacagccttgatgcatttttaattcacacagagcctcccttctct

SEQ ID NO: 143990 - DNA, 122 bp, Homo sapiens
gaagggcaagcaaggtgcagcttccagaggcacctgggatgatgcccctctagcggtaggcgaactggggagtgtgggcggcgggggaaggcgaggccctggaggacctgttgtttttcctg

SEQ ID NO: 143991 - DNA, 122 bp, Homo sapiens
ctgcggccgcctcggtgcctccccagccacctccgcccctgcctgcttctgattcaacagcgccgaccctacaaaaacagggcccgcccatctccgaggatggcaaagtcaacagtgcgggc

SEQ ID NO: 143992 - DNA, 122 bp, Homo sapiens
ccactcctaaccgggcaggttccttggtgacaaagccatgagcatggccagcagcccttgcggcaccccagactgactttacattcatgtgggcaaataaaacttcaagtcagcaaaccaaa

SEQ ID NO: 143993 - DNA, 122 bp, Homo sapiens
cgggttttggccttggcgcgagccttgccgccctgcttgccacgtccagacatggtaaaacgacctgtggcctaagtcagaaagtgagtgaaaggaacctacagggacgcgcattttatagc

SEQ ID NO: 143994 - DNA, 122 bp, Homo sapiens
gcgggatagcggcgaggcggggcggggaggagggggcgcgccgctctggccccggcactgcgcgctctcgccgccctgtgtatgccacggcccgcctcctccagggaggctgcccaaattca

SEQ ID NO: 143995 - DNA, 122 bp, Homo sapiens
atttctgattaaaaggtagtgagcgagtgaaggaaaccattttcccaacgactgctcatccgccgagtcctctcacagctgtgcaccgcttcgagtaaccgcaaacgcggtctgtttcatta

SEQ ID NO: 143996 - DNA, 122 bp, Homo sapiens
attcagttctgtatacctcattaaaaaaaaaaaaaaaagataaaaccagagaagtccttacgggcaatcaggattgtgagggaacagatgtttgacccaggtacatgtgtgttatcttacat

SEQ ID NO: 143997 - DNA, 122 bp, Homo sapiens
cttcaggtgagccccccaagggcctgctggtgccggggacaatcagagacagcgatgtgacggcactggtcctttctggcaggaggactggtttaggagcagctgctgaaaacactcaacag

SEQ ID NO: 143998 - DNA, 122 bp, Homo sapiens
agccttgaaactcaactcctgggtgggccaggaaggttgtccgagttgggcagcgccggccggggcccccctcagagccgagctgctcgcctccctcgagacccagcgcagcctggaggaga

SEQ ID NO: 143999 - DNA, 122 bp, Homo sapiens
caacgccacccgcacaggcagagaccaagtcaggtctcaggtgtgccggcgtggcctgggcgcggaccggcggccggagcccgggccaccctcgtcgatctctccgcacgtcccgggagccg

SEQ ID NO: 144000 - DNA, 122 bp, Homo sapiens
aaacagccaggtagaagtttattgcatacattccctctgtcttccatcgacttatctcaacgcttttttttttctatctcctctttgtattcactgtaacatctttcctgatttttttgttt

SEQ ID NO: 144001 - DNA, 122 bp, Homo sapiens
tgcatgacaaaagcactctacaaacaacaacaaattgccagcttgtcgggggccgcagggcgcgcgcgacaactggcgcgttcctctgggcggcgctgggctccgagacccgcgggaggggc

SEQ ID NO: 144002 - DNA, 122 bp, Homo sapiens
aatctgctcccaaactgccagctaaatgtgcactaattaaagttgccattgaagtgaagacgcaattccatgcgtcgaggtccctgccactgtggcctataaggtgcatcccaatcagggac

SEQ ID NO: 144003 - DNA, 122 bp, Homo sapiens
tgagatacaattttgggttgaaagatctgaaatggtgtcttctctccactgaccacaagccgggctttgaaattagagtcgtaacctttcccttgcaaatccctggaaggtgtgctttcaac

SEQ ID NO: 144004 - DNA, 122 bp, Homo sapiens
aattaggttttaatttgttcattatttcttcttggaacacttttgttccctatacatatgcgttactttggctttataatagaaaataacaagcaacatctgagctcttttgtttgtttttt

SEQ ID NO: 144005 - DNA, 122 bp, Homo sapiens
gtcagatgtgaggggtgtgaccgtcggatcagacagtcctagagcccgcagcgtcagctgcgcgcccgcctgtcctccactgcgggctctggaggtaatggaagggtctgccgccagtgctg

SEQ ID NO: 144006 - DNA, 122 bp, Homo sapiens
cccggcgggtgcggggaggtgctggtgggaagcaaggtgcacctggcggcctgggatgtccggtcgcccccggagccggtgcatccggcctctcccggcgcgccccgacgtgcccgcgggct

SEQ ID NO: 144007 - DNA, 122 bp, Homo sapiens
tatttctcaaaggtctgatgatcttgaggaatctgtcaaaggctatgagccctaacagcacgatgcccacatacatggtctcataaaatatcaccgaagaaaaacgacacacaaaagctctg

SEQ ID NO: 144008 - DNA, 122 bp, Homo sapiens
ctgggtgggttgggggagccctctgagtgctgcctggtcctggccctggcccacctgcaccgtctacccacagagtgcatgctgaggctggtagactgtgccatggggactgcccaagactt

SEQ ID NO: 144009 - DNA, 122 bp, Homo sapiens
tgttcagatatttattgagtgctccctgcatgtgggccctgtgttagtggttttctcttgcggcaggaagtgggcaggactaacgtgcacgaaagcgttggagctcacggtgtgcacgtagg

SEQ ID NO: 144010 - DNA, 122 bp, Homo sapiens
agttgtagtcctcccgaatactctgattggtcaggatgcagtacgagggcggggtgtgagcgattcagcatattatcattgggtgaatcagggggcgtggtggggaatttcccgcagggcgg

SEQ ID NO: 144011 - DNA, 122 bp, Homo sapiens
ggaggtagcacagggcgggaggtgggcggaccagagggcggctccacctatccgagagctcgggaggcgggccagaagggacccgtcactcccgggttagagtgagaccactccgccctcgc

SEQ ID NO: 144012 - DNA, 122 bp, Homo sapiens
tgcataatttgttcatattaaagcaggcttgatccgggctgccgtggttccgatcgactccgaataggacaccacacagtcgtgccaagaaggcgcctaagtgtctttccacacggccatcc

SEQ ID NO: 144013 - DNA, 122 bp, Homo sapiens
ggaggaaaaagataattgggcaagacttcctggtttagtaagatgtttgatttgactcaccgaaaaaaatggcctgggaagagggaagccttgcctttccataacagcagtctctgaagctg

SEQ ID NO: 144014 - DNA, 122 bp, Homo sapiens
tcccttcatcccaatgcagccactgtgggatctgtcggtcacagataatggtttttaacccgtcagaagacctgtgcgttgcggcttctctgagggtttcgattacggaaaaagtccgggtg

SEQ ID NO: 144015 - DNA, 122 bp, Homo sapiens
tgatagagtgaatgggggacacttcccatgggagtaagagacaatgtcctcctccaagctcgtttcccaggatttggggataggagctttgcctggtagaaccatatgaaggttgtgggctg

SEQ ID NO: 144016 - DNA, 122 bp, Homo sapiens
tgattcattttagtcctgtaattggaaaaaccacccaggctttttaaactctggcctccacgcattctaggggcgggggtgtctttttttttttttttttttttgagggagggtggcaggct

SEQ ID NO: 144017 - DNA, 122 bp, Homo sapiens
gcggcagctcaaccctcctcctcgtgtgtgtgagcggatctcctcccacccaaccacctccgacggcctcacagccaaccccacccccggcgcggattgacccctcgccgccacccgtacct

SEQ ID NO: 144018 - DNA, 122 bp, Homo sapiens
tgtgacatgtgacaagcgacttacacgattggcatgtgtccaacacgtgactgacccgatcgacacatgatcgacatgtaatcaacgtgtgacacgtggccgacgcatgaccagtgacacgt

SEQ ID NO: 144019 - DNA, 122 bp, Homo sapiens
gtcccactccacgaacgagtccagttccttggcagaggccctagggcccaccttggccagcgccgcctccaggtccttgtaggagagggggcgctgcagccccgggaggcccgccccggccg

SEQ ID NO: 144020 - DNA, 122 bp, Homo sapiens
catccatcacatagtaacatggattaatgtcacctattactcttattctagttattgccacgttctcccactggctttccaaatttataatatctgtgaaggtcaatgaaactaatgaggcc

SEQ ID NO: 144021 - DNA, 122 bp, Homo sapiens
ccggtctctgtgtctcttgaactcactagggcgcatccaggtggggtgagctgggaatcacgtgctgaatgctaagggcctggatgatcacggcctcagagggagcaaatagtaaaggcagc

SEQ ID NO: 144022 - DNA, 122 bp, Homo sapiens
ttaatttttaaaaagtccaaagcaaaaccttaaagtactctgacatatacaatttagagtcgatgtcaagattattaagccaaaaattaattttaaattggaaaacaattcactccagtaat

SEQ ID NO: 144023 - DNA, 122 bp, Homo sapiens
catcccacagcctctaccacactggctcaggaagtaggcaatttcctgccttggctgagccggatattaagacctctttgttcccttatctctgagaaataacacccctctgaaatactcca

SEQ ID NO: 144024 - DNA, 122 bp, Homo sapiens
cccaggcaaggcgctcctgagaaaagatccccacggcggacgtggggcaacaaaacccgccgggagcgggcatctcatgagacccagagaggccctgccccaggagacaagggcagagcctg

SEQ ID NO: 144025 - DNA, 122 bp, Homo sapiens
tcacggggatgacagaatgaacaattcctctctgccgcagatgccactttgagggaagaccgagtacccctgccactagaaaattgggctgggggcagattcatggatagggcaggctatca

SEQ ID NO: 144026 - DNA, 122 bp, Homo sapiens
gataaagaaaaaggcatgggggaaaaggatgaaaacctagaaaccagtggagatgagcaacgagaagctcagcacttaggtggaggcataaacaggagaccaatctggtctgaggagatggc

SEQ ID NO: 144027 - DNA, 122 bp, Homo sapiens
tgggtcagcgggtagaaggggttcttcagtctcacacgccggttcgtgctgtttccccggcggggacccccaggctcatggattccttcacccaaggatccattctgggccagcgcccggcc

SEQ ID NO: 144028 - DNA, 122 bp, Homo sapiens
tttgtcatgaaaaagctgcctgttgccttatttgcaatgtgacttgaacaatgattatttcgccattcatatgctgtaaggatggttacaatgttcccactagggctaatattcatcaaact

SEQ ID NO: 144029 - DNA, 122 bp, Homo sapiens
agagcggccgtgggaagtgaacttgggcaggggaaaaatgattgctggagaaggtgcgtgcggaggagcccaagactctgtctcgctgtccaatgagggaaggcggaaaggctttttttttt

SEQ ID NO: 144030 - DNA, 122 bp, Homo sapiens
tccttgatctaccagagaactgatcactaattaacaaagcccagcatcagattctcttcacgctgccaaagcacaagcaaaaacttaaaaattccctctgtcatccacatgggactgtccaa

SEQ ID NO: 144031 - DNA, 122 bp, Homo sapiens
ggcgggccagactcactgcgttctttcgtcgctttgtccatccattcattcattcaggatcgttttcactgtcggtccgggacttcgaccagaaccagggagaggtggtgaaacattacaag

SEQ ID NO: 144032 - DNA, 122 bp, Homo sapiens
atggagaccaggccggcgcccggcgtccggggagacaatgaccccccggcctcagggcgccgggacccgcccgcgcccacctcccgcagttccgactcttggcaaactcggcgcgggcggct

SEQ ID NO: 144033 - DNA, 122 bp, Homo sapiens
gaccatgtgtagcggagcgaggctggccctgctggtctatgggataatcatgcacagcagcgtctacagctcacctgccgccgccggactccggttccccgggatcaggtaggtgctggctg

SEQ ID NO: 144034 - DNA, 122 bp, Homo sapiens
gttttctctttttattacataattccttaccataaacagctgttgtaaatgcgcaaaatgcggcatttgttgacagtacctagagccactcattcattcgttcaacagtgtttattgagcag

SEQ ID NO: 144035 - DNA, 122 bp, Homo sapiens
aaggtctcccagcggtcttgcgcggaaggcgttatcagccccgcttattagatgaggcggcgcctgcagtagagggggccgtctccgcagggtctgcagcgccggggcccgcacctcctgct

SEQ ID NO: 144036 - DNA, 122 bp, Homo sapiens
cgtggtcaaaatcagtgttcccttccgagggcccagtaaagactcaaaccctcaggcttccgtccccacgtcctaagtggcactggaccccagcctgggctctacgtgtcccccgcccgcgc

SEQ ID NO: 144037 - DNA, 122 bp, Homo sapiens
agccaggaacaaaaacagactgtctattaggctgtagcttggtgccagtgttgttctcttcgccacccctcttttccactggtgattaggagagtagagctgggggaagatgagcatactct

SEQ ID NO: 144038 - DNA, 122 bp, Homo sapiens
gctccggcggcgtcgccatggatgtggaacggagtcgcttcccctactgcgtggtgtggacgcccatcccggtgctcacgtgagtctcttccggcatccgcctggggacgaggagggcccag

SEQ ID NO: 144039 - DNA, 122 bp, Homo sapiens
tgtcatttcgaagggtaagttcatcttgaaagaatagagcaaatatttttgagtgcttgccgtacacaagacattgggctgaatattgtggaaaatacaaagatgtgagaaataggaagcaa

SEQ ID NO: 144040 - DNA, 122 bp, Homo sapiens
gagcgagggctttccaggagccaatgagtctttaactccaagaggaagccctgcattctccgcaaatggaaaccaggaatcgggagcgcgtcagctatcgtagggtagacttaaggcccgca

SEQ ID NO: 144041 - DNA, 122 bp, Homo sapiens
ggggcaacagtttctctagttgagcggaccctcactgcctaaatcaatcagactgagtgccgggcgctgaatttacctactctcattcctctccagggtcccggtactttggagcttgtctc

SEQ ID NO: 144042 - DNA, 122 bp, Homo sapiens
acacacataagctgtttgccatattgaatcaacacctggggcattgatctgaaagctaaacgcaggctgttcacctggattgccaagtataacagaagcaactggctcactgacatcagaga

SEQ ID NO: 144043 - DNA, 122 bp, Homo sapiens
attttgtccatctcatagcaggcacaaactcatccatccccagttgattggaagaaacaacgatgactcctgggaagacctcattggtggtgagtcctgcactaacgtgcgatgctcttgct

SEQ ID NO: 144044 - DNA, 122 bp, Homo sapiens
aggaagacacacacataaatgccaggactgggggttaaccaagcctatgcccactgtacacgtcattcagccgcttccaccaggcaaacacttggaagtgtctatacatcacgtcacaactc

SEQ ID NO: 144045 - DNA, 122 bp, Homo sapiens
aaggatgccccttcaagttgcactttctccttaaagggtctgcctcaccctgaacctcctcgtagatgcctgctcatggctgtgtaacaggagtgggacccgcatcacaacctttcccttga

SEQ ID NO: 144046 - DNA, 122 bp, Homo sapiens
ttaaaaaaaaaaaaagaaaattggaaatgactgcagccaggtgtgtgtgattgggccccgcgacctttttcttaggcaaacagggctttgtggatgcagaaagacttctttggttgtgtagt

SEQ ID NO: 144047 - DNA, 122 bp, Homo sapiens
ggaggcggacttccggtgcactcctgcgcgtgtgcacctctccctgcgtgcgtgttcgcgcgtgcgtgcttgcacatgcgcgccacctccgcactgccctggcttcctgcgcctcttcaggt

SEQ ID NO: 144048 - DNA, 122 bp, Homo sapiens
aagagaggtggtgttggaatggatgttgaatgaattcatctataggatataccacaacgtcgggaataagtggcagatgttacaatcgaaatgggctgattataagtggggataagtggctc

SEQ ID NO: 144049 - DNA, 122 bp, Homo sapiens
cgccccggacccagccttggccctgcctgccccacccccgccagactccggcctttgctccgcacctggccccggccccgccccgcccctcgaaactcacctttgagtcgcatcgagtccca

SEQ ID NO: 144050 - DNA, 122 bp, Homo sapiens
aaggggacaggcagttcttctgacccttctgcttggcagataaagccgaggctcctagtgcgcccgtgtgggctgtgactcccagatttggccaaggcctccccaaccacgggagagcggga

SEQ ID NO: 144051 - DNA, 122 bp, Homo sapiens
gggtgggttccgcgcaggctctgggcgcgcactcccgatcccgcgcagccccacggtggacgtcgcgccagactcgagacggcacccgcgccccaggcccgccatccctttttttttttctt

SEQ ID NO: 144052 - DNA, 122 bp, Homo sapiens
atttaaatgatttggtagctctgccaagcctgtagcttcaaagaaaaggaaaaagtgtctcggttcattcctagagtacagaagacagatcagacagaggcaaagagagacaaacagatgtc

SEQ ID NO: 144053 - DNA, 122 bp, Homo sapiens
caggtgacagaaatggactcttccagttccctttgtcccaaatttctcaatctcctggggcgttgggagttctggccgttttgccttccccaaagccagtttaccaaagagtctctggggag

SEQ ID NO: 144054 - DNA, 122 bp, Homo sapiens
gccctcccgacgcgcagagccatggcctcccacctgcgcccgccgtccccgctcctcgtgcgggtgtacaagtccggcccccgagtacgaaggaagctggagagctacttccagagctctaa

SEQ ID NO: 144055 - DNA, 122 bp, Homo sapiens
gggggcgaccgcggctcgcgtcggccactacttgggggtctcgggtttccgccccgccctcgccttgcaacccctccggccccggactccgctttccaggccgggctcttccctccggaccc

SEQ ID NO: 144056 - DNA, 122 bp, Homo sapiens
gttatccgtggcagcgccttgtctcattggatggccctaggcctagtgtggccgcgactccgaactgaaagcccaagcgcggcggcgtccagccgggcagccattttccgaagctgctctct

SEQ ID NO: 144057 - DNA, 122 bp, Homo sapiens
atcactacaagaggtagggtccgttgcaggcccctgagcccactgcccacgggaactgctcgtgcagccgccacggacgccatcttatggcagtctgcgcttgcgccggagcagctgtcccc

SEQ ID NO: 144058 - DNA, 122 bp, Homo sapiens
gaaggtctaggaaaaagtggagttaaggccctagtgggcggagtccagagacgtggggggcgtggcctcgggaagggaaaaatgtgtaaattccttagggattggggtcagagccggagcgt

SEQ ID NO: 144059 - DNA, 122 bp, Homo sapiens
gccatccctgctgctaaaagcagctgcgtgacccccacattcacaacctgctgttgcatccgcgtcgtcaggcaaccgctccgatgtggggaccgcagcaaccctccccacagcctgctgca

SEQ ID NO: 144060 - DNA, 122 bp, Homo sapiens
caggggcgctgggtagcaaggggggtgcgcaggggcgcggggcgcggggcgggctaatcccgtatgtaaatggcagccaatggagggtggtgttgcgcggggctgggattagggccggggcg

SEQ ID NO: 144061 - DNA, 122 bp, Homo sapiens
catctatgacgcagaggtcccgcatgtagcacttgttggtgtagagcagctcagtgtacacgacgcaggccggcttgcagtggaagaggacagacgacgggtggatggccactggctggtgg

SEQ ID NO: 144062 - DNA, 122 bp, Homo sapiens
aggagcctctgatcaaattggctacaatcttggagctgcttggacggattccttggcagccgggttagcatgtgtgactttcaggctactgttcttgacaatcatctccaatggaaagcttt

SEQ ID NO: 144063 - DNA, 122 bp, Homo sapiens
aaagaagaaaaattcacagccgcccttcacagtgtgctcagagtaagttgctggctcaggcgtcaggacccatggcctctgtttctccaggaggttctctgctcacagtgtgctcagagtcg

SEQ ID NO: 144064 - DNA, 122 bp, Homo sapiens
aatagattgcatttgaccttgttggtttgatggacgggagtggagtccggccgcggacggcgtcccttccagggccggccgccagagggcgagcgcgccttcccgggcggggcggggacggg

SEQ ID NO: 144065 - DNA, 122 bp, Homo sapiens
tttgaattgttggcctcctgtctgcatgctcagagaagcagggccgcgtggagtgcccagcggaacctgctcatgctgatttgctgcgtcaccttgggaaaacgttggctttgctcctccgc

SEQ ID NO: 144066 - DNA, 122 bp, Homo sapiens
tacttactgatttcaaacatttggaactaaactggaacgtatttttctttccgatttctgcgtttttgaggtgtgtgtaaacccaccagcgcagcagctgggagggcccttcaaaggtgggc

SEQ ID NO: 144067 - DNA, 122 bp, Homo sapiens
aaggcggccgcgcccagggaagccttgacagggagctatctggggcgggggctggggtcgcgtggccagtacctgggagaaccgccattcaggagaaccccccgccaggctcttggttccgc

SEQ ID NO: 144068 - DNA, 122 bp, Homo sapiens
ccaagcccttcttctttgcccttcttcctgagaacctaaggtgttcaggccctgcaggggcgggtaaggggaggctgagaaggtgcctcccaggggcctgaagagtcggccctgggcgggtc

SEQ ID NO: 144069 - DNA, 122 bp, Homo sapiens
agacgctgcggtggagccaccggggccactggagaagcggagaccggaacccaaacgcagcggacacgaaacaggaagaccccgcggagttgttgaacattgcccctgtcccccttgcagag

SEQ ID NO: 144070 - DNA, 122 bp, Homo sapiens
gggcggccgcgggtaccgggttattcattaccctggcgtggacttgcctcggggcggacgcgcaggcatttactttctcctatggtctcctctgatttttaacccgatgctatcattctttt

SEQ ID NO: 144071 - DNA, 122 bp, Homo sapiens
ccaggcgaacggggacagagccctgtggatccagggcaaagctagtgggtggagatacaccgaacacccggggcccagagctggcgagggcagcgtagacgcctttggtgctggtggtcccg

SEQ ID NO: 144072 - DNA, 122 bp, Homo sapiens
taaatacaggggaaggaaaaagtcgtaagctgagcctggtcacattgccccttgtgatatcgttttatttttaacttcgcaacacttggactatttctgttgaagttttctctcctttccct

SEQ ID NO: 144073 - DNA, 122 bp, Homo sapiens
agaaatggagcacagcagctgctggcccaggtgctaagcccctcactgcccagggccggccggccgctcctaatgcggggcccaccaagcccacacccacctggaactcgcgctagcccaca

SEQ ID NO: 144074 - DNA, 122 bp, Homo sapiens
acctcgtgatccgcccgcctcggcctcccaaagtgctgggattacaggcgtgagccaccgcgccgggcacaatttcccacatgatgtttttctggtagctctggaaggtctgaattccagct

SEQ ID NO: 144075 - DNA, 122 bp, Homo sapiens
caaagcagggcaaggcattgcctcacttgggaagtgcaaggggtcagggagttccctttccgagtgaaagaaaggggtgactgacgcacctggaaaatcgggtcactcccacccgaatactg

SEQ ID NO: 144076 - DNA, 122 bp, Homo sapiens
cagggtttggcggggatctctgctccgccttggcactactcggctccgctcgcctccgcgcggctccctgggctttcactcggctctgttcggctcctgctcgggaagggtgcgcgggggcg

SEQ ID NO: 144077 - DNA, 122 bp, Homo sapiens
catggtcgacctcatgggaaattttgcaaacttgatcctgtgtcaaatgagttcccgtgacgcgtgtcagtgcgtgtggatcttgctgtttgggggagggcagaaactctgcagaccccatg

SEQ ID NO: 144078 - DNA, 122 bp, Homo sapiens
tgactgtggcaaagctgagaaacccaggtttctcctcagcaagaaggaaaatccctgcaacgttgatgcacctctacaggagccccaggctgacaataaccttcctcatctggtttcaaccc

SEQ ID NO: 144079 - DNA, 122 bp, Homo sapiens
gctcaccggatgcatggggggcggcggcggcccccagctctcaggcctggagggcgtccccgggaatatgcaccctgacactgagcgcctactgtgtgggctgggggacagccacagccatc

SEQ ID NO: 144080 - DNA, 122 bp, Homo sapiens
ggtgattcaggcagccctacatcctgctggggtggtgggcttcgagcgcgggtcccaggacgcagtggggcgcagtgcctgcggcaggcggcaggaggcgagcgtggcccaggaactcccgc

SEQ ID NO: 144081 - DNA, 122 bp, Homo sapiens
gggccccctgagtgagaaactgcctcccacctcactggggcttccccagtcccacccccacgtccatcttgggccacttcctcagcaccagacggttttgagatgaagcgtgggagggctca

SEQ ID NO: 144082 - DNA, 122 bp, Homo sapiens
ttttttttttttttttttgagacggagtctcgctccattgcccaggctggagtgcagtggcgcgatctcgcgatctcggctcactgcaaacttcacctccagggttcaagcaattctcctgt

SEQ ID NO: 144083 - DNA, 122 bp, Homo sapiens
gcagggagtgaggagaggccaggagctgcaggccagccctgggggcaggcgctgtagggccgatgtcccggtaaagggcggaattgccggggcctggactggacgcgtgccggggagtgtgc

SEQ ID NO: 144084 - DNA, 122 bp, Homo sapiens
gagggcctggaaatcagggcgatggacgtggctgatcggggtggggcctggtctgagccccgcctcggtccgcccaccaagtttaaaggggcggagcgaggcggggctctggccatataaac

SEQ ID NO: 144085 - DNA, 122 bp, Homo sapiens
gcaactggcagggcctctggtgggctttctgccgggtggagctgcgggggctcagctgggcgggggtcggttcctggggccgtagggtgggagcgggggaagggaaaagcaaaagctgggaa

SEQ ID NO: 144086 - DNA, 122 bp, Homo sapiens
cctcttgctgtggatttgttccttaaagggtcactacatctggcaactgaggctggaattcgccgcgcacacttttgtccccgcgttcagaaacagctgcgacaggatgccagagtccatcg

SEQ ID NO: 144087 - DNA, 122 bp, Homo sapiens
gggaccagccgctgtcaaagttcacaactacgggtgccgaagcgactcaaacgcggaggacgcacgtcttggtgggctggtctttcctgagctgggaggagtggaggcgacggagaagctga

SEQ ID NO: 144088 - DNA, 122 bp, Homo sapiens
ccgctcttggacagaaatgtgtcaagctctcctcccttccagcctgcataaaccctttcgcgcacattcgcgcgacttctaagggatccaagccagcggactgggtccagcagcgcgcggcg

SEQ ID NO: 144089 - DNA, 122 bp, Homo sapiens
tgctgggattacaggcatgagccactgcacccagccaagtcctcctgttcgtaattacttcgtgacctcagccgtgcccacctctccggggctcagtttctcctgtgaaatggaaactgacc

SEQ ID NO: 144090 - DNA, 122 bp, Homo sapiens
ccgcggcctcctgccacccgggagcccagccccctctctcttgcacgccccttggctctccgcctcctactgggagccaggagtactctcccggaggtggctggtatggatttagttggttt

SEQ ID NO: 144091 - DNA, 122 bp, Homo sapiens
tggagctgatcagcggctacatccagaagatcaaggcaggagagaaggactttgagtctccggcctcacaattcagcgactgcagctcggccaaggccaggggagacctgggtgccttcagc

SEQ ID NO: 144092 - DNA, 122 bp, Homo sapiens
ccacactggcccgtcagctgggtgatgtatgtagttgtattggcaacgaagcaaaaaaaacgaggctacaggcctggtctgacctctgtgtggcaccagtagagacagcacatgaactacta

SEQ ID NO: 144093 - DNA, 122 bp, Homo sapiens
cacactccacagggcctgcgatcatctcagatgttccggttccacgtgcagaaaccccgccggtccgaggccccggttctaaaacggccctaagagtcaaggcttccacagctcgcctctga

SEQ ID NO: 144094 - DNA, 122 bp, Homo sapiens
taataaccttcgggaaatgtggccaggacctagggagggacaccctgggtgcctgaattacgtggttcaaggcagagctttgcaggggggcgcgggcctggctcgctgcgttccctgggctc

SEQ ID NO: 144095 - DNA, 122 bp, Homo sapiens
aagcatttgttatagtattttgaagcttgctctgtgacatacatataagaagttagtacccgtttcacctataagattctgaacttctcaaagtagagtatcttcatctttgtgtccccaga

SEQ ID NO: 144096 - DNA, 122 bp, Homo sapiens
tgttaatgtttctaaccatttgtttccgactattatctgatgtttcaggtactaccagttcgtccccttctgttaaaataaaaatacaaacgataatgatgttctttaaactgttaaaatgc

SEQ ID NO: 144097 - DNA, 122 bp, Homo sapiens
aaggcttcctggaagaggtggcatcctcacaggcctgagcccgggaaggctgtgagagggcgaacggtcttgcatggggggttttaggtgccccccatccccgtgactccatttaccagcgg

SEQ ID NO: 144098 - DNA, 122 bp, Homo sapiens
ctctgatgggggagtgcttggggatgcaggtccttgcgataaggggccgataccacctcccgggctccttccgcactctgctgggtaaggaccctctagcacccaacccccagctccctcag

SEQ ID NO: 144099 - DNA, 122 bp, Homo sapiens
tgatgtgcacttgtgctgtgacctgggcagagactgggtcccagcatctgttgtgcctgccgcagggtgagaaagtcccagccccaagaggctgggctgggaaggagctggctgagtcttgc

SEQ ID NO: 144100 - DNA, 122 bp, Homo sapiens
ttaaacaaacgtcagaagagcagccccaactgtacataaacttcgggcggaaaagcaagacgcaggcgcagtagcacatattgttaccctatttgcccactccctgctcctcctcgcctcaa

SEQ ID NO: 144101 - DNA, 122 bp, Homo sapiens
ctttactcccacaaagtgtccagggtgagatttacacaatgtaggggattcctaattacacgtagcagccaaggtcagaaccgccaaaagtactaaggtggatggtgaagggaagcatcctt

SEQ ID NO: 144102 - DNA, 122 bp, Homo sapiens
ccagaggcgcggcagggcctgtgggggcgcagggctcaggcgagcaggtggggctctcaccgagagcgctcaggtggccgtaggtctcccgcatcacgtcccggtacagggccctctgcgct

SEQ ID NO: 144103 - DNA, 122 bp, Homo sapiens
atagggggctgggagttctcctggcttgaacccctctctcaccctcagccccaaagcagccgctcaagtgctttcctcaagccctgggccagcacataaagggctgcctcactcttaggtgt

SEQ ID NO: 144104 - DNA, 122 bp, Homo sapiens
aacctgcctgggagggatacatcagctggaagggagcatgctgggtctggagagctgacccgcctctcctctggctgggtcctggacttgaaccacatctgggccccacccccaacctaggc

SEQ ID NO: 144105 - DNA, 122 bp, Homo sapiens
gaaaggttaaataacttgccccaggttacccagctgggaagactgaccttgtcaggatttcggccccctgggttccagacccttccttacaccttcccattactctgtaaaaagatcctctt

SEQ ID NO: 144106 - DNA, 122 bp, Homo sapiens
tcttggggtccatactacttttgtgaattacagcactcaccacgaaagcttgcgagaccacgagcctaccgggaggaacgaacaactcccgacgcgctgccttaagagctgtaacagtgacc

SEQ ID NO: 144107 - DNA, 122 bp, Homo sapiens
cgttgttttgactcactctttgtgacgtaggtctttctcaccagtcaagaaaatacaatccgaaagcaacctctgggctggctttagctcagcggttacttcgcgtgtcatcaaaccacctc

SEQ ID NO: 144108 - DNA, 122 bp, Homo sapiens
gcgtggccaggcaagggatccttaggcagaatgagcagcgctggaggtggatattccgttcggtcatctacgagccctacctggccatgttcggccaggtgcccagtgacgtggatggtaag

SEQ ID NO: 144109 - DNA, 122 bp, Homo sapiens
ccagctcctatttctctattaaagggcccgccatccttcttgctgaagtctgcctcctcacgttccctcactccccctggtgaaatactcactaagccagtcatcctgggaagtcccttttg

SEQ ID NO: 144110 - DNA, 122 bp, Homo sapiens
tgtgggggaaaaaaaatctccgatacggtttatgacttttattacatgcttcacactgttcgagaaatggagttttaagcaacatacaattaaatctatattgctctttggaaaagggccaa

SEQ ID NO: 144111 - DNA, 122 bp, Homo sapiens
tagggcaaagctctgtcacggagggggggccctgttgtgttccgcggggtggtggtgtgacgtcgcggcagctgtgaaattccccagccaaacccagacacccacaggacagtgtcagatgg

SEQ ID NO: 144112 - DNA, 122 bp, Homo sapiens
ctcctgctggccgcgcaccgggcgcctcacaccagccacaacggccttgaccctgggccccggcactctgtctggcagatgaggccaacatctggtcacatcccgcccgcacagggtggagg

SEQ ID NO: 144113 - DNA, 122 bp, Homo sapiens
ctggagttgtttgctctttccgtccagagctgttcgtccctcccggtgggttcgtggtctcgcgggcttcaggagtgaagctacagaccttctcggtgagcgttacagctcataaaggcagc

SEQ ID NO: 144114 - DNA, 122 bp, Homo sapiens
attctttacctccgtttccacttttactttctctaggcaaaggtcgtttggtgctttaaccgaggtgattagggtaatgacgcctgaagaacaccgggcttccccctcttttcacttgatta

SEQ ID NO: 144115 - DNA, 122 bp, Homo sapiens
gtggagggtgcctgtaatcccagctactcgggaggctgaggcaggagaattgcttgaacccgggaagcggaggttgcaatgagtggagatcgcacaattgcactccagcctgagcaacagtg

SEQ ID NO: 144116 - DNA, 122 bp, Homo sapiens
tccccagggacaagactgcaggcatccattcaaaagtatgcattatctcaaaatgtttgacgcctaaacaaaccatttttgtggtgtacttgcatttttttggacacttgagttccagttca

SEQ ID NO: 144117 - DNA, 122 bp, Homo sapiens
cgcacacgcggctggtccacacgcccatccatccatctccggcggcccccagggaggctacgcgctgagccaggatgagtgctgggaccagggctccaagctcccagccctttcctggggcc

SEQ ID NO: 144118 - DNA, 122 bp, Homo sapiens
agtttctgtatgacctatctaaaatccctccatgctaactgggatggatggagggctatacgaagacgtcaatcatccctctctcctacaaattcctctgctacaccttgaggatcattcac

SEQ ID NO: 144119 - DNA, 122 bp, Homo sapiens
tataggccatacattttctattgcagccattcaactttgccatcatagcagaaaagcaaccgtggacaatgttaataaaggaatgagcacggctgtgttccaataaaactttatatatataa

SEQ ID NO: 144120 - DNA, 122 bp, Homo sapiens
ggcaagagctgagaggcagcaggacatgtacagaggggcagaacgtcctggcgggggaagcggggtacctgcggcattgtccatgttctcacacaggtcggccagcagctccagggccccct

SEQ ID NO: 144121 - DNA, 122 bp, Homo sapiens
ccaggatggctcctaccccaaatcggaaaataacaagtgttcgtggggatgtggcgaggccggaacccttgcgcaccattggtaggagtgtaaaatggagcagctgctgtggaaaacagtct

SEQ ID NO: 144122 - DNA, 122 bp, Homo sapiens
tttcatggatcccttttccatgcagtttcctgtagtaaaacatgaccttccccctagaggcgatgaaattaagatatgcctatttaacacttattattttaattaaaaattcaaataatttt

SEQ ID NO: 144123 - DNA, 122 bp, Homo sapiens
tgcagaccaaaaccacaagcagaacaagcaggcgtgagacactcacaggttgggtttgatcgcatgcgtgtcggagaggagagagcagagagagacacaggaacaagaacagcaaagggtag

SEQ ID NO: 144124 - DNA, 122 bp, Homo sapiens
tggcgaccgtggtggtggaagccaccgagccggagccgtccggcagcatcgccaacccggcggcgtccacctcgcctagcctgtcgcaccgcttccttgacagcaagttctacttgctggtg

SEQ ID NO: 144125 - DNA, 122 bp, Homo sapiens
aggcagagaattatgtgaggagggtgttgaattacatctaggaatagaatagtctgctggcgctgcagctacagggaaatgcctcactgaatatcagcaggcactttagatctattgcatct

SEQ ID NO: 144126 - DNA, 122 bp, Homo sapiens
gctctaccagcaggctttcatgggagcggaggtgcccacgtttccattgtgcggtaaccgcgcttcatcacagccacctccaatcgaggccgcacggtgtccccagaaccacgctcggtaca

SEQ ID NO: 144127 - DNA, 122 bp, Homo sapiens
atttgatggtttatggagggcaaagttgagaggaaggagggagggaaggagcaggggccccgggtgcttactcccaggtcttcactgcagcctggggctgccctctgaagtacacagtccct

SEQ ID NO: 144128 - DNA, 122 bp, Homo sapiens
gggtcatcaggtgggacagcctggcatgagagcaaatctctgcagaaccctcagattacacggaggacatcagcttcaggcacctgctgacttcctcaccacccccaaactctgaggcagga

SEQ ID NO: 144129 - DNA, 122 bp, Homo sapiens
atgccctcctcccccagggtgcctggacatgctgagcctccagggccagttcaccttcaccgccgaccggccgcagctgcactgcgcagccttcttcatcagcgagcccgaggagttcatta

SEQ ID NO: 144130 - DNA, 122 bp, Homo sapiens
tgtaatcccagcactttgagaggccgagtcggtagatcgccagacctcagggcaacatggcgagaccccatctcttaaaaaaaaaaaaaaaaaaagagacagagaaagaaagaaagaaaaag

SEQ ID NO: 144131 - DNA, 122 bp, Homo sapiens
tttttaatttttgaacaagaggtcccacatttttattttgcatgggtctctgaaaaattacgtagctaatctttttgtgagcattgggagagatagatttggagttaagctttcttttcctt

SEQ ID NO: 144132 - DNA, 122 bp, Homo sapiens
gttcaacttttttcttgggttgcaaaactgcatctggctgcaagtctaacccaaaatattcgcagcgtatcagctgagaggatgccggcaactgttgaactacatcacagttcaaagtccca

SEQ ID NO: 144133 - DNA, 122 bp, Homo sapiens
tccagacggggacgccctgagggagcgtttgtgtcagtaatgggaaatctgcaagctagacggaaatgacctgctagtgattgcgctgtaaagaagccggaatccacctcttgaaggcatga

SEQ ID NO: 144134 - DNA, 122 bp, Homo sapiens
cgggaatagagccgggtgttttatagcggggtttgcgtcacgcggctgggcgggcgtctgcgcccccggctcggaaaggcttccctgaggcggggcggggcggggcggggcgggagggtggg

SEQ ID NO: 144135 - DNA, 122 bp, Homo sapiens
actgataagtccgctcataaaaccagggccttatccagggccacgcttacagaactcccacggacacaccatgataaggacgctgctgctgtccactttggtggctggaggtaagtcctgtt

SEQ ID NO: 144136 - DNA, 122 bp, Homo sapiens
gagtgtcgctggatgactcggcgtttcctttctttcttagggcatggatttcattggtcgcgacgccctcctgcagcagaagcagaatggagtgtataaacgcctcaccatgttcatcctgg

SEQ ID NO: 144137 - DNA, 122 bp, Homo sapiens
ttcctcacttcctctccagctctaagccatgcccacacacagcaggtggttagtaaaccccggctgatggctaggggtatggaacaggtgggctggagacaggcaaggaaggacgcagaggg

SEQ ID NO: 144138 - DNA, 122 bp, Homo sapiens
gtgtgtatgttgtatactcatgagtgtttaaggagagatagaactgtttcatctcaaaggcgcatatagtttttgataagggaagtatgttgagcacacataatataaacatttaaatattc

SEQ ID NO: 144139 - DNA, 122 bp, Homo sapiens
gatggtgccgcactcctaaacagctctcaggtgagcgagagttagcaagggggaaggtgccgcaatcgtaaacagctctcaggtgagcaagaactcaactcacgtgtcaccaagggcatggg

SEQ ID NO: 144140 - DNA, 122 bp, Homo sapiens
gttagggaagttcatctaaaccatgagacagtgtccggttggcagtttctacctcggatgcgaaacgccgactacagttggggaagggtggggcgtctgctgccctaacccgcgaagcgctt

SEQ ID NO: 144141 - DNA, 122 bp, Homo sapiens
gtgctgaaaaccaatccttctgtttcactcatcgtgccatatggctccataaaaaaggagcgaaccaaaagtgtagctcatacgccttgtcaatctgggcttagactaattatttgatatta

SEQ ID NO: 144142 - DNA, 122 bp, Homo sapiens
gcgggtgaggcggggccttcaatagacaggctcagggccacggggaggctgagcaggtttcgggcctgcgtgcgagagcctgctcttcaagtcatggggaaatcctttctgaaggaagaacc

SEQ ID NO: 144143 - DNA, 122 bp, Homo sapiens
tccgtaggccgcggcgtaactggtgattggtggagaaagcggcagctgtcccagcggaagcgacgaagggacgggacccgggagcctggacgagtccgagcgcgtcacctcctcacgctgcg

SEQ ID NO: 144144 - DNA, 122 bp, Homo sapiens
ggcaagaacgggctgttccacagaactccgcgaagagcattgtacaggcaccgtcccactcgccagcacatgaggctccagagcccctggactgtggctcccatggcttgagaacaaaagcc

SEQ ID NO: 144145 - DNA, 122 bp, Homo sapiens
accagtggaagaggagaatgagaaagaacattgtatttcttagggttttttggttacaagcgacagaaaacagttcctaccaatttaagtaaaaagcacgtctttataggaatgatatggaa

SEQ ID NO: 144146 - DNA, 122 bp, Homo sapiens
cgtgccaggagcgattggcaggttcgagcagcacagtcattccgcacacagatgtccctgcgttcactcttctgatatgaattctgtcagctccgaatccgagagagacaagcagacagcta

SEQ ID NO: 144147 - DNA, 122 bp, Homo sapiens
gcttgcccactgcgcaggcgtgccccgaaagaccagcttgaacaatgaagaggacctcggcgttaggtgggaccgcaaccaacaaggactacagttcccagcgggcagagcgccaactccaa

SEQ ID NO: 144148 - DNA, 122 bp, Homo sapiens
attgcagtgctgtatctgcaagccaagaaatgccgagggctgctggcagccaccagaggtcgaaggaggcaaagaaggcttctccccaccccaggcttcagagggctctgctgatgccttcg

SEQ ID NO: 144149 - DNA, 122 bp, Homo sapiens
ggggccagcgccgggcgcgggggctgcacgggggacctggctgggtgctcccggaggacccgctcctgtccatgctccctccagcggaaggtcctgttctcgcggtttaggaggaatctggg

SEQ ID NO: 144150 - DNA, 122 bp, Homo sapiens
tgggggctgctcagacaaacctcctcatcagacatcaagaggctgttgcaccaggagggccggtaccgtgtctagaggtggtcggcatggggttggagttgtattacataaaccctactcca

SEQ ID NO: 144151 - DNA, 122 bp, Homo sapiens
cgatctcctgacctcgtgatccacccgcctcagcctcccaaagtgttgggatcacaggcacgaacgactgcgccgggccaccctcttgcacttctgaaacaaccagcaaaccaaccaaccga

SEQ ID NO: 144152 - DNA, 122 bp, Homo sapiens
ggatggaggacgccggcgagggtgggtgggactttttcccgccccccatcagcttccgggcgcctagttcagtttctcccgggtctgtctgcccctagagttgggggcacccaacttggctt

SEQ ID NO: 144153 - DNA, 122 bp, Homo sapiens
gactctggtgcaattgtttcccaggtggttcacacaccaatattttgaaaactacttgtccggtggagagagaaagtgtcaatcatgctgttagacctgatcggtgagcttgaggcatgcac

SEQ ID NO: 144154 - DNA, 122 bp, Homo sapiens
ctggtctcctttttattaaacaaatagatcatttagttggaatttatgatgtcaaaagtgcgaaggtggcaccagagccagacctgccatccttggagagtgagcataccggtttggcacca

SEQ ID NO: 144155 - DNA, 122 bp, Homo sapiens
aaggcaggaaactttattgaataatcttttctttggggtagagaagttgagaaaccaaagcgtatccaggtcagagaggagagagatccgaccggaagagaagagcacagagggcccaccat

SEQ ID NO: 144156 - DNA, 122 bp, Homo sapiens
gtttagggtcatatccctagtgcatgcaggtgaatgagaggcatctagaccccctaatggcgcttcggccttaaaaaaggtttagaaattcttggcagtggacgcaaagttgctagactaga

SEQ ID NO: 144157 - DNA, 122 bp, Homo sapiens
ctgcagagctgctggtacgcggagtggagcaggaggatgcgggtgactacacgtgtgacacgggccacacgcagagcatggccagcctctctgtccgtggtgagctgctcaccagcccctgc

SEQ ID NO: 144158 - DNA, 122 bp, Homo sapiens
ggggtcttctcacctccggcttctcactaccgactccacctttcctagaaggaatgcttccggtggctttgggaaggaatgatggaacatagtacacttcatggagaatttaaaaacctctt

SEQ ID NO: 144159 - DNA, 122 bp, Homo sapiens
tgtggtgcttactttttaaactgaataaaacgttatcttaatgactcaggatcacaatttcgaatagtgtttaaagttttgtagcattaaatagaatgctcccaggagccactgaagtggat

SEQ ID NO: 144160 - DNA, 122 bp, Homo sapiens
attgagactagagaggtaagtaatgatttgtagactatgtcaaggattttggaaactgtccggagagcattggggagccataaaaaacttttgaagtagaggagtgccatgaccatatttgt

SEQ ID NO: 144161 - DNA, 122 bp, Homo sapiens
actatatggctagaatcctggctctaccacttactagctgtgagatcttgctcaggttaccgaagcctcctgttttctcttctgtaaaaagggataatcgttcctacgattatgtggagact

SEQ ID NO: 144162 - DNA, 122 bp, Homo sapiens
ttgaagctcacccagcgtgacgcaaaaagtggccaacccctgcggagcctgagaccatggcgaccaatccgcactggtgggagaccgtctcccgccccatcacggtctccccagctcgcccg

SEQ ID NO: 144163 - DNA, 122 bp, Homo sapiens
ttccactcagtttgggtgctgagtgatatgtgggtcatgatgccaacgccgacgtccctgcggggccacagtgggtgggtgctgctggtgagggccactgggggacgggtggtggcaggtga

SEQ ID NO: 144164 - DNA, 122 bp, Homo sapiens
cgggggccgcccgggaggggcgcactcacgctggcgagctggggactgggcattgaagtccggcggtggcgggagcgaggaggcgcctctctcctcagtcacctcggcggcggcggcggcgg

SEQ ID NO: 144165 - DNA, 122 bp, Homo sapiens
cctgatgctctcattaaaatctatgcagccaagctcagcactttgtcacagccggccttgcgaagcctcctcagctcggggggccggggacccagtgagctgggaggccctctgggctccac

SEQ ID NO: 144166 - DNA, 122 bp, Homo sapiens
tcgaagcgcttggggccgtcagggggcgcgggcgtccctggtggggccagttgtacgctgcggcggtcggcggagatgagcaggcggcggtgtgcggtcccagggtccagggtcaggtcggc

SEQ ID NO: 144167 - DNA, 122 bp, Homo sapiens
aggattctgctggggaacatggttggtacaggacttggcatacagaaggtgctagtgtgtcgctgctgctgctgttgtgcaggaggggtggggcggggaagctccccaccagtcggagctac

SEQ ID NO: 144168 - DNA, 122 bp, Homo sapiens
tcaggtggtcagcacggggaggcagtgcttcagttagaccctaaaggaccagtgaggctccggttatggaggaaagagggcacatcagtgtgagagaatgggcccgagccacagtaccaacg

SEQ ID NO: 144169 - DNA, 122 bp, Homo sapiens
ctctccgcacgcactgcgagagcgccgagacgtggttgagcgcgtaggacaccgggagggcgctcagcgacagcgccgcgatcttgccggccagcggcgggatgtccatagcggcggctgct

SEQ ID NO: 144170 - DNA, 122 bp, Homo sapiens
cggcctcatttgcataggccgccggagtccgctggagcccggccaatcggcgcggccctccgctaatggccatgcattattcaccagcctaattgctcagccccatgcgcggcccgcgcagc

SEQ ID NO: 144171 - DNA, 122 bp, Homo sapiens
tgcggaggctggagaggcgcaagtggcggccggagctgcagacggctggtgctgcagtgccggggaggggaggggagaggagtggagggagcgagggcgggcgggaggcgggcgcggcggga

SEQ ID NO: 144172 - DNA, 122 bp, Homo sapiens
ctcagacttttctggttgtaaagttccacatcctgggatatctctcagtcccacagaagtcggaacaactgcccaacctacaaaggaatagaaagaagactacaaacgttgcctaagcacaa

SEQ ID NO: 144173 - DNA, 122 bp, Homo sapiens
gccgcttcgtgaaagaccgcttcacaggtgagcagagctggcgaccaggctccaggcctccgccctctcggggccagaggcgccgcgccctgtgcgctccactcccggaaaccatttcagag

SEQ ID NO: 144174 - DNA, 122 bp, Homo sapiens
ctccccacccatgtcacaggcatgcccttccctctcatcaggcttgtgcccagcggggtccgcctcctccaggaagccttcctcctggcacagagacccttccggtctcaccaggagtgcaa

SEQ ID NO: 144175 - DNA, 122 bp, Homo sapiens
cgcacccccggctctgaggtcagggctggcaggagtaatccaccctttccaggtgtgtggcgcaaacacggacgcaaagatctcccctagggtctgtaacaatttccaggctgaaaggtgat

SEQ ID NO: 144176 - DNA, 122 bp, Homo sapiens
ccaggggctgcattttgtagcttgtggcttggccgcgagcccacttggtcatgtggtcatcgggagggctagagggggggcaggaagagggagagggagcgagcctcccgcaccgcccccct

SEQ ID NO: 144177 - DNA, 122 bp, Homo sapiens
atccccgcctggccctgggttctgggagctgagagccggccagggtcctgctcgtacctccgggcgcccagcctcgggtctgctccccgcggacgccccaacctccccggccgaatggatgg

SEQ ID NO: 144178 - DNA, 122 bp, Homo sapiens
gaaaataaagccccgagggttcactcggggttcgctgggagccgcgctgagctgttgcagcgtcttggcccggccgaggaggaagtttaaaggggcctctgtctagagctctgaaggcaggc

SEQ ID NO: 144179 - DNA, 122 bp, Homo sapiens
ccccccgcggatttccagtggtacaaggatgacagactgtgaggacagcactgagggggccgtgggagcgggaaggggaggtctttagtcccttcgattgtgaggcagggggacggagcggg

SEQ ID NO: 144180 - DNA, 122 bp, Homo sapiens
ccggctcggcccttcccattcacgtgctgctgaatcacttgaaaacaatgcaccagaccccgggaggatttgctgagaacagtgcggctttgtggagggaagtgcagctctgcattttctcc

SEQ ID NO: 144181 - DNA, 122 bp, Homo sapiens
agcctcatgagcacagggacatgtctgctttcctcgctgttgaatttcctgggcctggaacgtgctgggaggagagcaggtgctcaataaatgaagaatgaatggacacatatgtgaatgaa

SEQ ID NO: 144182 - DNA, 122 bp, Homo sapiens
cacctgtcttgtggagtgccccagctaccagccaccttgtttcccctgtttggaggccatcgatcccacctccctccttcccgtgccctccctgcctggcagcaaggccctcaggcttctgc

SEQ ID NO: 144183 - DNA, 122 bp, Homo sapiens
ccgcccaggggcaacagggtccggagcccgccaacaacgcggcgcctttgtgcgggcgcacgccacctttactcagccacacgggcccctctccggggggctttttcttaaaggggcaaccg

SEQ ID NO: 144184 - DNA, 122 bp, Homo sapiens
aggcggcggcgggtgtgggccgagccggtatttatagctccgtgacagcagcagcggcagcgacgccgccggcccgtctcgccgcgcttcccagcgaggccgccggcgcgccgagggctgtg

SEQ ID NO: 144185 - DNA, 122 bp, Homo sapiens
agccggacgcgaagcaagagagagctggctgcccgagggcccggttgcaatgatgggacgcgcactttaatactgagtctttcctctgattataaaaatgctatctgttcgttaagcaacat

SEQ ID NO: 144186 - DNA, 122 bp, Homo sapiens
aatgcgtatatgtgggatgtatgggtttcttattaacagatctgtgagttaaactcagggcgttgcatcagaagaaagtcaagatgacgaagaaaataaagagtgcattcaacgtatattaa

SEQ ID NO: 144187 - DNA, 122 bp, Homo sapiens
ccattaatgtatcagttatcccaaagccttcaggtggaggggtttaccaccttcctaggtcgttcaaccaggttttgtgaggaatgcattcaaagtggctttataaaagaagattttcttta

SEQ ID NO: 144188 - DNA, 122 bp, Homo sapiens
aacctattccagggcgcccttcattttcatttcttgaaacaacagccttgcaggccgagccgctgttcccgagaactcggcagccacagggagcaggttgcatggacccaggagcgcgagag

SEQ ID NO: 144189 - DNA, 122 bp, Homo sapiens
gcagctctgtgaagggtcccctccctctgcgggacgtcctcgctgccgaggtcagaggtgcggagaacatgagacccgaggtgcgttccagcatgttcctgcagccctccactcccgcggtt

SEQ ID NO: 144190 - DNA, 122 bp, Homo sapiens
cacagctggcagcagagcaaggcagtcttctggttccagtgtcctcccagactggttattcgccatttactgtattcctccctcaccatgtcactctgcttttcccatctttggctctcact

SEQ ID NO: 144191 - DNA, 122 bp, Homo sapiens
actttacttttgtagtttagacttgggaactgctgacaaaacagctatgggcaacacagacgcagttttgaaaacccgactcccctgctgtctaatacctgcatctgagggcaacacggtga

SEQ ID NO: 144192 - DNA, 122 bp, Homo sapiens
gaggcagctcggccctccccagcccaaagtgccgttattccgtttctgtatcagtaaacacgtttcattttccgtagaccagggaagggtgatgggtgatcccagtcctcgcagtgaattcc

SEQ ID NO: 144193 - DNA, 122 bp, Homo sapiens
tgccaccccgcttcaggcttcctgtggtttgagtgcaaggaagtgtggattgagggcctgcgcagttacctcctggactggtggaacttcctggatatggtcgtcctgtccctgtacctggc

SEQ ID NO: 144194 - DNA, 122 bp, Homo sapiens
catcacactacaccgtttctccaagaataattaatggttgtatttgttgggtaaatcaagcggatggcccaaatgagtctctcccaccagcaagtttttgaaatgaaagatagttttctatt

SEQ ID NO: 144195 - DNA, 122 bp, Homo sapiens
acagctggatgtgactgaggccaacaaggagttcatggaacagagtgaggagctgtatgacgctctgatggactgtcactggcagcccctggacacagtgtcttcagagatccctgccatga

SEQ ID NO: 144196 - DNA, 122 bp, Homo sapiens
agccggtccacactatttgctatcctaggtctgaatagtgaagagaaaatgaaaggagagcgccaagggtaagagaaagaaattagctattccacctcctggttggctactgtcttcctgcc

SEQ ID NO: 144197 - DNA, 122 bp, Homo sapiens
cggtgctgcggctccagccctcgagttggggtttgagattccaggcagtgaggcttgggccgctggacccaggtgtgtaatctctcacagcccagggctgagtctggtccccctcaccccca

SEQ ID NO: 144198 - DNA, 122 bp, Homo sapiens
tttaccaagatgccaacgtctttgtccttcagggcttctcgaattggaaggtagatctcacgaccgctgctgaagtccgcaactataatatcagtttccactttgtacgtgtcggctatgtc

SEQ ID NO: 144199 - DNA, 122 bp, Homo sapiens
tctccccccatcactgccagggatctgttctctaatcatctgacctccagcatccccactcgctttacccacttcctcatctttcatctctcctctcccacctacaggtgtgttcaggcgtt

SEQ ID NO: 144200 - DNA, 122 bp, Homo sapiens
tttgtcagtttccacaacggtgaattggttcccgacaatctcccaagtatatttgtacatcgctgatgaaacacattggtgggtctcagtcgatcaccattagtgccctttccaagcatcgg

SEQ ID NO: 144201 - DNA, 122 bp, Homo sapiens
aagtgcaaagtgctcagtgtcatggcaacattgccagcgggcatccctggccttgcttcacgctgtagtgcaacactgacatctagtggccagattatagggctacttcttcatcaagtaag

SEQ ID NO: 144202 - DNA, 122 bp, Homo sapiens
tttttttttttaaagaatttttttttggccgcgcgtggtggctcaacgcctgtaatctcccgggttcaagtgattctcctgcctcagcctcccaagtagctgggaactacaggcgcgtgcca

SEQ ID NO: 144203 - DNA, 122 bp, Homo sapiens
tcccgtgcccacccacacgccccatccagggtgcccgagacgagcccatctcggactgcacggcctcctgactgatggcagctcaaggacacccgggtcctttatgccagagctggacattc

SEQ ID NO: 144204 - DNA, 122 bp, Homo sapiens
tggtcgtgagaggggaacccacagcctaccaggacacggggccctgcccaacccccaggacgccctcgtgttgaattaagtccgtggctttgagcctcagaaacggtgcaaaatgcagtcca

SEQ ID NO: 144205 - DNA, 122 bp, Homo sapiens
aatctcttgggccgagacagttcctccacgcggcgggacaccgctatgcaaaatgggaaacggagtcagtgaaccccagtgtcaacaccctgcagttcccaggggcttctgcatgcggaatt

SEQ ID NO: 144206 - DNA, 122 bp, Homo sapiens
tctggttgcattgtttacgctatcccctgcgtgaggccaggcagggaggtggccaggacacgcagaagacaccgggctgctccctgtgatgaccagcactcgggtgctgtgcctcgcgttta

SEQ ID NO: 144207 - DNA, 122 bp, Homo sapiens
aggggctaactcgcttcctcggcaaagatcggcgagggaggcttcgctggcttacagcggcgcgggtgcggggcggagggaaagaccaaaggcgaggtctggcttgcgagagtcctcccctg

SEQ ID NO: 144208 - DNA, 122 bp, Homo sapiens
ccagactgccccttctgaggaagccatctctagggtctcacttgagcagtgagagtggctcggggtcatcacgtgacccacaggagctaattgcatggggtaactgactacctatggggtga

SEQ ID NO: 144209 - DNA, 122 bp, Homo sapiens
cgcacccctacccacgccgccaccaccctgcacccggccccaagaggcgtctctccaacacgcacactagccccggactcacctgcgaaggagataagggaaattcctaggccgagtgtcgg

SEQ ID NO: 144210 - DNA, 122 bp, Homo sapiens
gaagggcggtatggaaggcaggctgtactggttgagtgaatggaaagttggggagtagaacgtgtgagaagttggccttcaaggggctcaggttaataatagagagctatggagtcaaggca

SEQ ID NO: 144211 - DNA, 122 bp, Homo sapiens
gtctcacacatgtacattcctgggaaacccaaggaaacaatgatagtgacgcagggcaggcgagcctcaaaactggtttgtagcctgagaaatgtctcccagactgtagtttccttggcttt

SEQ ID NO: 144212 - DNA, 122 bp, Homo sapiens
ataaggcgcactttgtacagagacccgggcgtgactagggcgcctctggcgctggggttccggccctgggtcccaccgaggctccctgaagctggaaggtgagagtattagggtgaagcggt

SEQ ID NO: 144213 - DNA, 122 bp, Homo sapiens
acgacctgattcaagcgcagaaggagatctccgcccataaccagcagctgcgggagcagtcggagcagctggagcaggacaaccgcgcgctccgcggccagagcttgcagctggtgggtgcc

SEQ ID NO: 144214 - DNA, 122 bp, Homo sapiens
gcttgcttggccttgatgttctctggcccatgctcttcctacttgcaaagcaccaagcaccgaccagcacaaaattgggacccaataaaagctgacttgtttgactgttttttatattatta

SEQ ID NO: 144215 - DNA, 122 bp, Homo sapiens
cactcacctgcttcacctgctgccaggactcctcccactgccggatcttcctcttggcctcgtccagctgccgcctgacccgggccagctcagctccgtttggacttgcactcgaagaggat

SEQ ID NO: 144216 - DNA, 122 bp, Homo sapiens
ctttcttccccacgtgtgattccaacaatcagcgcactctagggctgatcctcggcctcgcgtgtgaacattttctagggcacaccccagtaggcgctaccaccccctgtgtatttcgctta

SEQ ID NO: 144217 - DNA, 122 bp, Homo sapiens
tcccagaggccatgtggtcccactggtacagcacgccacacctgggctggagctcagactcgcccaccttcctgagcaggaggctgtgagctcttcaagggcagggctgtgcctgagccatc

SEQ ID NO: 144218 - DNA, 122 bp, Homo sapiens
cgaatttctttcaaagccatctgtttgcatccttgtgttttgctgtggtttttaaaggagcgcccacgaagtgtagtggctgacgatttcaacctcacacagcagtttgtaaccgcaagcat

SEQ ID NO: 144219 - DNA, 122 bp, Homo sapiens
tccgtgtggggcgcccgcgtggccttctcctcgtaggactccccaaactcgttcactctgcgtttatccacaggataaagcctgcaatgacacaaatgagcacatcagcaaaccccactgca

SEQ ID NO: 144220 - DNA, 122 bp, Homo sapiens
ctcgccccgcctcctcccgctgggttccgtctctccttccgcttctttgtctttctctgccgctgtcggtgtctgtctgtctgctcttagctgtctccattgcctcggccttctttgctttt

SEQ ID NO: 144221 - DNA, 122 bp, Homo sapiens
cattaggacgctgaaaccgggacacagatgcgtagagcagaatcatgagcaaggcgtgtccgggacaggatctagtgccgaacccagtgaggctccctcttgccagctatgtgtctctagga

SEQ ID NO: 144222 - DNA, 122 bp, Homo sapiens
agggcccgtgattgacggaccagtccccggcattgagccttgtgtctttccagttacaggcgatgctgccggaaacgtgtgttttcctatctaggagtcagtctgtcgcagaccgattcctg

SEQ ID NO: 144223 - DNA, 122 bp, Homo sapiens
accagtaatggccctctggaatttgactgctcggcgggttcttttcttttgaatttcttccgactgcccctttttgtgcttccttctgtagaggacagtccagtttatctgccgaggattcc

SEQ ID NO: 144224 - DNA, 122 bp, Homo sapiens
ggggcccggaagttaatgatccgggtggaaagacggtcaacgctgctgccactgtggaagcgagacctgccggggccgggactgaagcctccagggcgctgcagctgtcttcccggccacgg

SEQ ID NO: 144225 - DNA, 122 bp, Homo sapiens
caaatgttgaaaaccccataaacacaatgaaggctggggacatcaccccaaaaggctgcccggtgagtccaccacagatgggtcccgaggaatcccatcccacctcccgacagaaggcctgg

SEQ ID NO: 144226 - DNA, 122 bp, Homo sapiens
ctcagccacaactcgtttctctagggtcacttccggattcaaccagtctccaggaagtgacgtaagcccgcctctctgcccggaagaggcggttgggaggcggagcccggcgcgttaaccct

SEQ ID NO: 144227 - DNA, 122 bp, Homo sapiens
agctgagaggagcccagccaagatgggaacccgcttctgcctgacccaacgcccatctcacgcgttgaggaaatgagacttcctgcaaggcatggcagagaaaacatgtactgttctctgct

SEQ ID NO: 144228 - DNA, 122 bp, Homo sapiens
cggttcccagcggccgagcgactccagggtcagaggtctgcactccagtccggaggcaggcgactctttccccaacacccggcagctgcgagtgaggcaggaaaggcgagcgcccccacttc

SEQ ID NO: 144229 - DNA, 122 bp, Homo sapiens
aaggatgcgccctgagggggcgttgcccggagtgctcgggccgccaagggggcgggctggcggtttgtgcgcatgcgccgggcttctgcgcatgcccagagcgtcgcgcttgcgagtctttt

SEQ ID NO: 144230 - DNA, 122 bp, Homo sapiens
tgtgtccctgagagtgtgtgtgcccatgtgcgagcttgtgtgtccgagagagcgtgagcccgtgtgagtgagcctgtacatccctgagagagcgtgtgtgcccgtgtgcgtgtgagcctgtg

SEQ ID NO: 144231 - DNA, 122 bp, Homo sapiens
agtggcaaatctggaactagaatactggtctcagcaacaggaatgtattccacaagccttcgtagaacctcttctaggtactcttctagaaaataagctaggtgtggtggtgcatgccagta

SEQ ID NO: 144232 - DNA, 122 bp, Homo sapiens
cttcctctcctcccatccagctcttaaatgaggagtcctggagtagagctgtttgggagccgagggtgtgcatggtatgtcaagcagagccgtcaccagcctggctcacttcctctctgact

SEQ ID NO: 144233 - DNA, 122 bp, Homo sapiens
gcgtgacccccagagtactggcccacttcttgcattttcacttctatgtaagttcctcatcgggttttcacctgtgcctgcaaacccacaactgccaaacttgaggcagcaaaccaggggag

SEQ ID NO: 144234 - DNA, 122 bp, Homo sapiens
ttgttgcgagggagcctccgagccccgcttcctgcgggcaggggttagcttgagagggagcgcggggcgcgggacccgagggaactttgggcgggcctgggctagggcgggtgccgcgcggg

SEQ ID NO: 144235 - DNA, 122 bp, Homo sapiens
caacatcaacgttcggggtgagaggcttgtacgcaggggtcctggcggagggcgcagggtcggaagcttggggaactcaagatcggttgggttgaggaggggatcctagagcaggacatcag

SEQ ID NO: 144236 - DNA, 122 bp, Homo sapiens
ttagacaggctgcccatatttctctggacattgtcacatagttacttctgcacccctacccgttcatttgaaacctttccttaaagtttcagctcaagccctgcttctccaataaactttcc

SEQ ID NO: 144237 - DNA, 122 bp, Homo sapiens
agaaaggatggaaacttctttaaaaaaggcgccaccctctgactgcttttttgcgccctgcgcagcctcgctttggtgcagcttcctctgacgttctttccctgtatcctaaaaaacacttg

SEQ ID NO: 144238 - DNA, 122 bp, Homo sapiens
ccaggagagagccggggggtggggcctgagggtaaggctgtaaccttctcccctcaccctcggggcctcagagtcactgagcaccagacttgccccttgggggctacggtgagtcccgggtc

SEQ ID NO: 144239 - DNA, 122 bp, Homo sapiens
acctcagttgatccatccgcctcagcctcccaaagtgctgggattacaggcgtgagccaccgtgccctgccctaataatgtttaatgtggcaggtttggaacatcatgtattctttcttttt

SEQ ID NO: 144240 - DNA, 122 bp, Homo sapiens
tgaggacccctttgtgggtgagtccccccacactcaggtgactccaggcgggcacaggcccgcccaaccgctcgtcatcacggggggcgactcgtccagggccccagccgctgctccgccaa

SEQ ID NO: 144241 - DNA, 122 bp, Homo sapiens
gggtacctggttggcgctgtctctcatttagaggcgtcgccaagccagtactgctatttgcgcctcccagttgatcttgccattgcggaagactggctgttctgcacttggtaggggggcgc

SEQ ID NO: 144242 - DNA, 122 bp, Homo sapiens
gcgcctccgtgataccctcgggcacctcctggtcggcctccggcatcttcgggaggctctcgcaggtctcagaggtgcctttgatggtggtctcacctgcggagccgcactctttagccccg

SEQ ID NO: 144243 - DNA, 122 bp, Homo sapiens
gcttgaagacactacaccgtcaaatctcttccaatcactgtgacgtgaatatcaaaatggcgcaagccttcgggaaaggaagtcccaagatagcccggaaaggccaagtccaagccgcaaag

SEQ ID NO: 144244 - DNA, 122 bp, Homo sapiens
gcttttcctctccgcagccttcctgggccgcctcacgcgcgctcagccctgcgcgagctgcgcctctccagctctcaacgtctcaactgctgttcatcgccagggctctaagacagcgagcc

SEQ ID NO: 144245 - DNA, 122 bp, Homo sapiens
gagcagaaggggaagcaggagcgggccaggcacagcgtctggagaggagggaagagaaggcgctctcaaggggaggctcttgcgtgtcaatttctgccaagtgccattttatgtctgtgggg

SEQ ID NO: 144246 - DNA, 122 bp, Homo sapiens
ggcgtgagggccatactcgggtggtgggggagggggtggggggtgcccatactggggggccgtagcgacttgggccccgacagtgacccccgactggtggacccatccttctcccttcgtag

SEQ ID NO: 144247 - DNA, 122 bp, Homo sapiens
tcacagctgggctggcctggacagtggccaagggcaggagggggagggaggttgcctccccgtaggtgaacacctgacacactgtgtgcttattggcatttcttgctgcacctgtttattta

SEQ ID NO: 144248 - DNA, 122 bp, Homo sapiens
caccaggagagggaggaatggctggcaaacgaaggtcaaacatatgaacattctagtgtacggcttaaaatcatgacgtgatcccaaaacacaaagatcctgaggagagacttcagtaaaca

SEQ ID NO: 144249 - DNA, 122 bp, Homo sapiens
gcatcatggcggtaattgtgggaaatgtagtcccgggcgggctccgctagtgggctcgggcgcgctcgccgaccacgatccccggcaagccccgcgccttcggcggcgcctcacgcagtctg

SEQ ID NO: 144250 - DNA, 122 bp, Homo sapiens
caatttggaatgaacaggtcacagctgtgcctggagggaatgcccagggaaatgtgccttcgccttgctgttctatccaggcccacccagctgaggatgggggacctgccaccactctcctg

SEQ ID NO: 144251 - DNA, 122 bp, Homo sapiens
gccggccccgaacgccaagtgagtgtgtgccgtgcgcgcgcgggtagctgccgaccgcaacgacataaacttgaaagtgaccgctgtcccggagctccctgctcccaagggacccgtcgcgt

SEQ ID NO: 144252 - DNA, 122 bp, Homo sapiens
tttctcccaccccgcgccgggaggacttccctcccagggacttcggtccctgctcctctccgggaacaacggcttcctgactctagatttggaaagaaactggtctctaaaatcggggcgga

SEQ ID NO: 144253 - DNA, 122 bp, Homo sapiens
aattataggttataaaattaaatgtccgtcttagtcgatggttgcccatattttgatgaacgagtcattcctagcctatctttgttcaaatgatttgcatacattatgcaaataggtagaac

SEQ ID NO: 144254 - DNA, 122 bp, Homo sapiens
ggacctgtgtgaagagcatagactgtagtttggtggaaagagcaaagactttgaagttctcggattctgtgtgtattctgctcctagcagagtgacctcaggcaaatgactttataggcatc

SEQ ID NO: 144255 - DNA, 122 bp, Homo sapiens
gtcaggttcagcccgccaggaagggttttcagtaagttatggaaaaagataaatcccacacgtgtgacaagagttaggactgcatacaaatgaaaaaagccaaacttcactttttccacttt

SEQ ID NO: 144256 - DNA, 122 bp, Homo sapiens
caagagccctttgtgagtcagaggtggtggctgttgctgtctttcccactgtttaccaggcgccccccacccaatttcccgtgagcatctagtgaccccatgctacccccttgtggccaaaa

SEQ ID NO: 144257 - DNA, 122 bp, Homo sapiens
gctgtgaagggattgcagttgctgctgactgaagagcgctttgtatactggtgtcagatacgctccttctctctcagcacaagtcatttgctattccttttgcttctcgtttctagaccaga

SEQ ID NO: 144258 - DNA, 122 bp, Homo sapiens
taagtttcactgtcctttctcctccaattttaggtgttcaggcgcttcgtggaggttggccgggtggcctatgtctcctttggacctcatgccggaaaattggtcgcgattgtagatgttat

SEQ ID NO: 144259 - DNA, 122 bp, Homo sapiens
ctgcggcacgcgtggaaccccgaggaccgctcgctcaacgtcttcgtcaaggacgacgaccggctcaccttccaccggcaccccgtggcccagagcaccgacggcatccgcggcaaggtggg

SEQ ID NO: 144260 - DNA, 122 bp, Homo sapiens
gggccccttcaatgccttcagagataaaggggcagaagaaaggtgacagagggtgacagtcgctggtcataggatcctgaatcattaggtcatttacattcaaaaagccccctgcgctgcct

SEQ ID NO: 144261 - DNA, 122 bp, Homo sapiens
gttgagtagttggtaatttttttaaaactgcaatttgaaagctttctcccccgtcaggctcggaggctccagcaatggttgaacaactggacactgctgtgattaccccggccatgctagaa

SEQ ID NO: 144262 - DNA, 122 bp, Homo sapiens
gaatcagcctctgcctaatccggacctggggtcaatacgagcccaaacaatggtgagctccgaaggccactgcgtagcgctggccgcaaactttgtgttcaattcaattttctaaagcggtg

SEQ ID NO: 144263 - DNA, 122 bp, Homo sapiens
tttcttacattcaagagacttccctcagacatgtctagaagacctgagagggacaggtcccggccacaagttcaaactttcctcagtgtctatcatgtctttctcaccaaaagtgaagccaa

SEQ ID NO: 144264 - DNA, 122 bp, Homo sapiens
ctggacgcaaaaactcggagtggctgcgtgatgcagagtgaactgggtcctctggggacgcgtggggaacgtggcagtccggagtgccggctttgttgcccttcggagctccagtccgttca

SEQ ID NO: 144265 - DNA, 122 bp, Homo sapiens
ctagatccacgcaagtgaaggcctgcagggggcagggccggcccaaagatccagaaggggcgggactaaaggaggtattggccccaggacacaaggaacaccctgggtctgactggcgctcc

SEQ ID NO: 144266 - DNA, 122 bp, Homo sapiens
ccccaagccggggctcctgggtggcttctcaggaagccaagctccctcaccctgtggcgacgccgcgggcggaatgcgcatgcgcgccacgagccacaatcgtagggttgggcgcgccctgc

SEQ ID NO: 144267 - DNA, 122 bp, Homo sapiens
gtgtctatggaatcggtgtcagcggacatcccgttcatggtgggatatgcccgtaggtgtcgggcagatgggggagtttcaataccggctcctttagggggtctcagtttggaggaaaaaag

SEQ ID NO: 144268 - DNA, 122 bp, Homo sapiens
gggagccagtgttctttctctcctgtgactttggtgaagtctctcaccactcagtgttgtcgtgagcatgctaggcagagtgcaagaaaggagcaagaactcactaatggctaggccttccc

SEQ ID NO: 144269 - DNA, 122 bp, Homo sapiens
atcatggtgacactgggcccagagcacctggagcaagacaaggaggacccaggtcagtcccgttagagtttccaaactgctgcacccattcatcaatcggccacagcccccctatacgcatg

SEQ ID NO: 144270 - DNA, 122 bp, Homo sapiens
acaccagctccgaaatcaccaccgaggacttaaaggagaagaaggaagttgtggaagaggcggaaaatggaagagacgcccctgctaacaggaatgctaatgaggaaaatggggagccggag

SEQ ID NO: 144271 - DNA, 122 bp, Homo sapiens
gcactttttctaagttgagggttctatcagtgtcaaaaaatatatatatatataaaacaacgcaaaaatcttgggggatacatagatgcaagcaattgctccacattcgttatttctacatt

SEQ ID NO: 144272 - DNA, 122 bp, Homo sapiens
tagcgccgccccggcccggcccagggggaggcccgcccccccttcccggcctgccccgggcgcccctcacccaccgcccctgcgcgccgctccagggccagccccacccacgtcccgaaccc

SEQ ID NO: 144273 - DNA, 122 bp, Homo sapiens
cccatgtgggaggggaaacttttctcctacatactttcgagtccttctcgggccgggaagcgcggagatgacggcgcccgccctcccgccgccgccctaaggtatccgggggtgcctgcccg

SEQ ID NO: 144274 - DNA, 122 bp, Homo sapiens
cgctcagaccaactgccgatggacaggagagtttggtatcaccatcttctccaccgttcacgccatccaagaacagcacaccagaacctcactggagcagtatcggacccgagaggcatgca

SEQ ID NO: 144275 - DNA, 122 bp, Homo sapiens
agccgcttctccacagacgcgcgtcggttaggagagctccacttgaaccttcctttagcccgcccgaagcagaccagccaatccctgactcgctctcaccgtctccgtccagaagaaccaat

SEQ ID NO: 144276 - DNA, 122 bp, Homo sapiens
aaccacaaactaactgaagaacttcaggcacctaagattaaacactgtctcccagtattacgaggtgctggggccgatccccagagccacttgagtttacagaaaatagcagctggtcatac

SEQ ID NO: 144277 - DNA, 122 bp, Homo sapiens
ggtgaatctcccaagctggcacccccactccactccaagtgccaagtggttggcttgtcccgcccggtcctccctggctccagctttgtttatctgtatttttcattgcaaattgacaaatt

SEQ ID NO: 144278 - DNA, 122 bp, Homo sapiens
cgccctgcttccggggtcatccgcctcctccgccctgtttccggggtcatctgcctcctccgccctgcttccggggtcatcgcctcctgcttccggggtcatcgcctcctccgccctgcttc

SEQ ID NO: 144279 - DNA, 122 bp, Homo sapiens
tttgcagcaggggaggtccccatgctatgacttagccacgtgacagacagcagagcacgtcgtaatcacacggagggcagcccggtctgcttttctgcagtgtgaaaattgtacaggagaag

SEQ ID NO: 144280 - DNA, 122 bp, Homo sapiens
tggcgggcgagctccaggcagaaactccagccccccttcctagaggagccctgaactgtacgcctcccagttccgggatctgaatccccacctcccgagaccccagacctctccatgtctct

SEQ ID NO: 144281 - DNA, 122 bp, Homo sapiens
cactgagctgaaacctattttacctcagcgagtttggatccaggagcctttccaacctatcgttcgggaaggcgttgtgggaaaagtgggcggaggtgccaatcgatcctccagtctcggct

SEQ ID NO: 144282 - DNA, 122 bp, Homo sapiens
agctgacagatgggtcccgagcacgtcctttccccaagcagtatcctgggaagaaagggacgcaaaagagggctcagcctcaggcctgcgtgtgcttcagagagctctcagaatgtgctttg

SEQ ID NO: 144283 - DNA, 122 bp, Homo sapiens
cgccacgcctgactggtttttgtattttttcggtggagacggggtttcgccgtgttggcccgactggtctccagctcctgaccgcgagtgatctgcctgcctcggcctcccgaggtgccggg

SEQ ID NO: 144284 - DNA, 122 bp, Homo sapiens
ccgaagccgctcacagccttgtgatctggatgcccgcaaaactggggtcaagcggcgccacgaggaagacccccggcgtctgcggccttcgttggactttgacaagatgaatcaggtgggac

SEQ ID NO: 144285 - DNA, 122 bp, Homo sapiens
ctttggtggccgaggcagccccaggaacaccccacccccaaattggattaaacatggtgtcgctgattgcaggtatttaattggcatcacgctgattgccctcaccttaggtgttacatact

SEQ ID NO: 144286 - DNA, 122 bp, Homo sapiens
agctcacaggaagtcacagctcccaaacccagcctggcctctgtcgcctgaggcatgccacgctggggaacacccccaagtcaggcgtctaggcaccaactttagtcccttcaagaacccaa

SEQ ID NO: 144287 - DNA, 122 bp, Homo sapiens
ccgcaaatctcataaccagcaaacgccatgggtgagagcaacctagcggacggaaatcaacggggtcaggggtcaccaggaagtgactacaagactctagctcagaggtcactaatacgtca

SEQ ID NO: 144288 - DNA, 122 bp, Homo sapiens
ggcagctgagtacatttattcattaatttaacagaagatcattgagctcataccacatgccggtccacgagtcaggtactaggcatgcaatgattaaaacactctcacctcaaagagctccg

SEQ ID NO: 144289 - DNA, 122 bp, Homo sapiens
aaagcatgtttcaagtcagtagtcagagcatgcatcagcccccggcgccaccagcttctacgagagtggaaaagccagcagacctccgagcagatgaaatcattaggaggcattcagcaggg

SEQ ID NO: 144290 - DNA, 122 bp, Homo sapiens
ccacagcctggtgcatgagacacctcgctcaatcaataggcattgaatgaatgaataagacgctgctgcacttttaagagtaagtgtgactttcaggtgacttttttttttttttttgagac

SEQ ID NO: 144291 - DNA, 122 bp, Homo sapiens
aaggtgtcagagcagcactatttataatagtggaaatttaaaacaatctatacccttaaacgtgagtatattatggtaaattgatataaatgctgtctaattatcaaagtaatgctttggaa

SEQ ID NO: 144292 - DNA, 122 bp, Homo sapiens
agccttcagatccgccaacaccttgatcctgggcttgcggctgccagacctgtgagaaagcgatgcccattgtttaagcccctggtctttgatctgttaccgcagcgcgagctgaccacgca

SEQ ID NO: 144293 - DNA, 122 bp, Homo sapiens
ttaagagttttgtattacataaatcctggctggggacctctgcccctatcttgtctagcacgagggaggaggcctgatgttttcccaccatcctatttgtagaattcttagatatctgcatg

SEQ ID NO: 144294 - DNA, 122 bp, Homo sapiens
acactatgaaataaattttcacagcctttttggaggaattctcttaatgggaaccgcaggcgtttctccttcacacccagggctttcccaagttcccgtccttgtttgtaacgtatgccctc

SEQ ID NO: 144295 - DNA, 122 bp, Homo sapiens
tatacatctgtttggctgctaaatgaaagataaaatttttggaggcttattgtggcaagacgtttattactaacacaagggagaaataaccagctatggttccgcattcaaacagaaattca

SEQ ID NO: 144296 - DNA, 122 bp, Homo sapiens
accggacacgcgctccccattccgggctctcccacgtctgcacactccagcccagccacgcggagtggcttccagaacctgccctgcggccccgctttgccaacaccccacccaccccgtgg

SEQ ID NO: 144297 - DNA, 122 bp, Homo sapiens
atgcagttcagaatgatgagggcaaaggagaaaaggcgaaactgcatctgggcggtcgggcgggggagagacgcctctcaaagtctaggaactggagggttcgcccaaagagccggcgccgg

SEQ ID NO: 144298 - DNA, 122 bp, Homo sapiens
agaacaaaccagaagcgcacaaacctttgtgtattttagaatatatttgtcttcattctgcggagctcttgtgttgtaaaggtgcagaactacgtaaaaatagtgttgggcagacttacata

SEQ ID NO: 144299 - DNA, 122 bp, Homo sapiens
aacgtgactggccctgctataccgaaacggcttaatttctttctggcaaatccacatttacggcagtaagatactaaacactttctttcactttaaaaatatttcgtttgtcactgctgcag

SEQ ID NO: 144300 - DNA, 122 bp, Homo sapiens
ctcctcagccttctgcacggtattttcccatcagcctccctagtgcactatcaggcttggcggctgggaggacggcaaattggggtgtcttccttcagggccccaattactccttgggtgta

SEQ ID NO: 144301 - DNA, 122 bp, Homo sapiens
gcagcagccttcccccttacaggggtgtgggcccccaccctgatacaggtgattgtccctcgccaccccgggaagctgctgatcctcaggcccaccctctgagctttggctcttacgttcac

SEQ ID NO: 144302 - DNA, 122 bp, Homo sapiens
tcctaggttagtgaccatggagcgcctcgggcccaagtgggccaaaaggaaaaaaaataccggcacagtagagctggggtcttggcccctggccccaaccacgctgcccctgccacgcatgc

SEQ ID NO: 144303 - DNA, 122 bp, Homo sapiens
caggtcgtcccgatggatcttgtgtaggtcacagtaggtgagggcccgcacatccccgttcgacttgccaggccttgcatacaggttcagaggctccccaaagatgtcattcttccctggag

SEQ ID NO: 144304 - DNA, 122 bp, Homo sapiens
ctcaatttatatcgtgtaacctcagaagtcctcagaagcaagagtagacaggtgatggtgcgactaaaagcaggaagaatggttgaaaacacatttaagaaagcagctaattctcagattcc

SEQ ID NO: 144305 - DNA, 122 bp, Homo sapiens
ttatttacagggagatgttaaatatttgggaacatctgctcaggctgccaggttattttccgtttgaaagcatgccgatttgacatttgcaagttggtttatgttgcttcctttttgtttca

SEQ ID NO: 144306 - DNA, 122 bp, Homo sapiens
tctcatgctttccaagctccttcaaatgcaagtaataataatcaaaggaaaacgaagccccgtatgtttaggaacagtgccatgctttgctgactggcgaagctctgtatctttaggggcgg

SEQ ID NO: 144307 - DNA, 122 bp, Homo sapiens
cctctgcacactggaggcctcgtctgggccagaggggtgcttgccccaaggctggcctctcgagtggagggcccagggcagagacctgcacggctcaggtaggggccaggcctcttccagaa

SEQ ID NO: 144308 - DNA, 122 bp, Homo sapiens
acacccatactacaggtggatatgaggccccaggtgaatacctatgcttcagatgtgcatcggtccccaggtgaatataagccacagatagacatcaggcctcaggtgcacatctggctcca

SEQ ID NO: 144309 - DNA, 122 bp, Homo sapiens
ctatggaaagttctcgggaaggctgcgggggccctcttctttaagacaggggaaactctccgcttctccaactggactaggactggagcgcatgcagtcacctattcaggccaggcgtggca

SEQ ID NO: 144310 - DNA, 122 bp, Homo sapiens
atgaggaagtgagacagagaaagggaggcagctggtaaaagtactatagggcagctttcacgatttgcaaccagactcagccccaccagggaacttgaaaaatggtgcagaaaacagggctt

SEQ ID NO: 144311 - DNA, 122 bp, Homo sapiens
ccaagaggagtccaggcgagaggaatggtcctgtgtaggcagagacgccccaggcagtgccggagctgagcttcccaggcagaccctgttgccctggatctcaccccgggtctagccctgct

SEQ ID NO: 144312 - DNA, 122 bp, Homo sapiens
cgagggccgaggagcagcgaggtgcaggggctgcgagggccgagccgggcgctgagggtccggcagggggcgtggagggggcggggcccggagggggcggggccgtaggaaacttgagcgcc

SEQ ID NO: 144313 - DNA, 122 bp, Homo sapiens
aggaggagaagagctgtgaatctcaagaagacgtgagcctctcgtcccggctgctgggtccgtggcggtttgtccgcaggcgcaggtgttctggaaatgacgtcgttaccaccgctgggtct

SEQ ID NO: 144314 - DNA, 122 bp, Homo sapiens
ggagacgagcctcgtcctgcagaccctcggatacacgtgcacctgtcgaggaataatcaacgtgaaaggaaagggggacctgaagacgtactttgtaaacacagaaatgtcaaggtcccttt

SEQ ID NO: 144315 - DNA, 122 bp, Homo sapiens
ggcgtggcctttttcctccgcttttcaaactttcgaaactttattggccactcggagaaacgcgcagtcggccacgcccacgcccctactgccagagtccggggcctggggttacagagcgc

SEQ ID NO: 144316 - DNA, 122 bp, Homo sapiens
cctccggggctgcacgggccgcagcgcctctgcgggctgcgcgctgctatctccctgcagcgctggctccaagcgctctgagcgcccggcccgggacctgcgctcaaatagcagccgccgcc

SEQ ID NO: 144317 - DNA, 122 bp, Homo sapiens
cccttttatttggcaatcatcacagcagtacggtgttgctggctggggttcgcaagtttgcgaccactgtccctgcaatcacggactgacacatctgccagggacaccccgcagtagccccg

SEQ ID NO: 144318 - DNA, 122 bp, Homo sapiens
cggggccggggcgggttgttgtgaggcgactgcgctactgccggagcggggcggttatggcggctccatattaacagcctcctcctcctccgccgccgccgccgtctcctcctcctcctcct

SEQ ID NO: 144319 - DNA, 122 bp, Homo sapiens
atggcttcctgggcgttaggtcctcctacctactgtgagggattcaaagagggaaaataccgatccttcctgcagaaacagacaaagcagtgtggatgtggtcgtggggggcccttccaggt

SEQ ID NO: 144320 - DNA, 122 bp, Homo sapiens
gaccagcgctcagcaggtgtccggcgggagggcgggcaaatacaactcagtgcccacgtgcgaatgaatgaacaaactagttccgggcggagccagaggcgcgcgccggcgcggaccgaggc

SEQ ID NO: 144321 - DNA, 122 bp, Homo sapiens
gggattctgcttcctggggagccagacagcaccccatgttgccctgcattgcagcccctgcgcattgctatcatgtgggttataactgtcatcgggattagaccgtgagctccctaagggca

SEQ ID NO: 144322 - DNA, 122 bp, Homo sapiens
cccggctgtgctgtggaggggaaacggagccaggattctctgaaggttcaccgaccccgccgtcctccctgaagaccccaaaacctgagctgtgtactgtcgcgcaggaggcagagtttgag

SEQ ID NO: 144323 - DNA, 122 bp, Homo sapiens
aggagagttgccagcagcatcaagtctctgtggcccttatgggaaggccagccatgggcccggaggatgttttctcacatcaggttatgcatttttggcaagaatgccacagaaataacgtg

SEQ ID NO: 144324 - DNA, 122 bp, Homo sapiens
attttagaagtaaggaaagccagccagtacgatgaaaacgtagattaaccctggtgcggccggccggttactggtttgttttgctatcatcagccatgtgttgcaatccgtccccactcagg

SEQ ID NO: 144325 - DNA, 122 bp, Homo sapiens
gaaacccgcagggcagtctgtcggaaacccccgctttactcagcaggaatttagtctccgcgctccccctaaaacccgggcgtcctctcctctgtaccctcgctcctgaggccctcacacgc

SEQ ID NO: 144326 - DNA, 122 bp, Homo sapiens
tggacttaagagttcagggggtctgtaccctgggggtccccaaggctcctggggtgtccacgtgcggggggtgaccaggccctgccacgcagcccctttgcacgctgggcgcgcccagcaga

SEQ ID NO: 144327 - DNA, 122 bp, Homo sapiens
ctcagagggtgtcctggaaccaatcccccttggatactgagggacgactatatatagttccgtgtgtgtgtgtgtgttatttatttatttttgagatggagccttgctctgtcgcccaggct

SEQ ID NO: 144328 - DNA, 122 bp, Homo sapiens
actcactccatctgtccctcatatgcccagttaccttcttttcaggctccaagaaatcagcgacctgagaatgaaaagagatgaatagggcccacagcctggacccttcaaggtgatcatcg

SEQ ID NO: 144329 - DNA, 122 bp, Homo sapiens
atattaaaaggcaaatgtcttttcttcctgttgagcttttaataccctgggccagagtttcgtattttcatgtgcacacactgcaagcatctttcagctccttttctttcttgagcctaacc

SEQ ID NO: 144330 - DNA, 122 bp, Homo sapiens
cctacttgtcacccagtggacgcacacccggggatggacacggaacaggggccacatggccgtccagggtgcaggatgcctggtagtgaggacagctgttggcgagggcttctatggcggca

SEQ ID NO: 144331 - DNA, 122 bp, Homo sapiens
cccaatcttcctgcatgcaatcatatttaagaaaacgctttccactacgcgttttttaagcgtatatatcttggtttccctaagagactgcaaactcattgaggacaggaagatcaaatttc

SEQ ID NO: 144332 - DNA, 122 bp, Homo sapiens
accccacgcccagggcctcacccacccccaaacggcaggagttcataggacccgcggccacgactgcccgcgagcgcctaccgtgggccacgccccccaacgacccagcagggcaagtgtag

SEQ ID NO: 144333 - DNA, 122 bp, Homo sapiens
ccctcacgattctcacttggagcagcctgcggtggcccagctgcagcggcacagtcccggcgccttctgattggctcagctacagcccctcgcgtattcgcttccgggtgagaggtgcccgg

SEQ ID NO: 144334 - DNA, 122 bp, Homo sapiens
tgagtgggtgagtgatttgaccatggaaacataggagagttgctcagcagcaccaaaggtcggcttaatgtttatgatcattaaaatgagtaatgttagcatcctcgtttgtttttttccag

SEQ ID NO: 144335 - DNA, 122 bp, Homo sapiens
ctatttcaatgactcgcagcgccaggccaccaaggacgcgggggccatcgcggggctcaacgtgttgcggatcatcaatgagcccacggcagctgccatcgcctatgggctggaccggcggg

SEQ ID NO: 144336 - DNA, 122 bp, Homo sapiens
gggatttgtagtctccgtgggcatatacccaccgcgcttgcgcaccggtgaggcgcgcaccgccccgctccacgcccctatcaggattcgggtcctcgtgaggagcagtccaggcgacagcg

SEQ ID NO: 144337 - DNA, 122 bp, Homo sapiens
gttcagaggtctgagcggccacttcccgcttccagacctcggatgcgacgctcatctgcacggtgtgggcagagataacatcctccccagaacagcatggaaatgtttcagcagggtgctcg

SEQ ID NO: 144338 - DNA, 122 bp, Homo sapiens
ttccccggagcacacctaagtgagagggtcacccatttactggccatctgaaaacaccaacgttcctacaccacttggctagttctacgttaagcctataaaatgaacaacatctaagcggg

SEQ ID NO: 144339 - DNA, 122 bp, Homo sapiens
taaaggtttacaacaagggcacatcatgaacatgtaaattcgaaagcaggggtctgtttccgtaataactttagggaaaccatcaggattcagggcataaggcaaaactcatcatgatggtc

SEQ ID NO: 144340 - DNA, 122 bp, Homo sapiens
gatactggtttgtggggagacgggatcccctggtggttcaccactcactaaacccacacacgtttcattcaagccatttgtagcggcttccactcggaggagctgggagggaacaagggcgg

SEQ ID NO: 144341 - DNA, 122 bp, Homo sapiens
gggagcagggagccacgggatgctgagagaggaggcccgagaggacaccccaccctccagcgtggcctttgatccagacttagggacgaggctgtcactggtgggcaccctctgttcctgtt

SEQ ID NO: 144342 - DNA, 122 bp, Homo sapiens
cagagtttgagcattatagataaatggaggagagtagcaggatatgaaatcagagagatacgtaagggccagaacttctcagcacaatgaaaggcctttagagatatttttgcaggggcacg

SEQ ID NO: 144343 - DNA, 122 bp, Homo sapiens
cactgtctttggatgccatacctaactcagccatgatatctcgtctcagcttcacttcctcgtggatgccttccttgaactcctagctgggatggtttattttgtttttgtttgtttgcttt

SEQ ID NO: 144344 - DNA, 122 bp, Homo sapiens
gcagttactcaccggggcagcgacgtacctcacaaaggtgaagatgagggtgcttccttccgtcaaggtgctggggtcactctagattgctcaagaccttgattctctaaggtttgaaggcc

SEQ ID NO: 144345 - DNA, 122 bp, Homo sapiens
taaaaaattaaaatctaattttccctccctctccaaagcagcaagggaaaattggatccacggccacgtaggagcccctcacggcaccaaacccggtgtctccagggacgggcggagaccag

SEQ ID NO: 144346 - DNA, 122 bp, Homo sapiens
aagaaagaaaaaaaaaacgaaacccgaaaaaacaacagcgagcaggctcccgagttctagcgttcacagtgaagccgttaaacgcagcaggaaagtaggcgtgtgttttcttcctcttcccg

SEQ ID NO: 144347 - DNA, 122 bp, Homo sapiens
tgcaaagctcagaaagaatgttccctgatttaactaccaaaaaagctaagacttgtcctgcgtggaggaaggcagttcaggatgaagggtcctgctaccagagcaaacatttccttctcact

SEQ ID NO: 144348 - DNA, 122 bp, Homo sapiens
gcaggcgaagaaattattagtcttaaaaaggacagaaagactcccgcaaaagcagcagcgcgtgccgaacaccttaggcctcacagaccttctatttgaggaatgtgctcccccaatcccag

SEQ ID NO: 144349 - DNA, 122 bp, Homo sapiens
aataataatttataattattataaccatataaaggatctttaggccagggcggtgcctcacgcctgtaatcccagcactttgggaggacaaggcaggcggatcacctgaggtcaggagttgg

SEQ ID NO: 144350 - DNA, 122 bp, Homo sapiens
agggcattgcctgcatcaccccagtgtttgcggaattccagttatttgctgtatccttaacgccgccccgtcctttctctactcctcctcctcactctcacctcgccccatcttcacacata

SEQ ID NO: 144351 - DNA, 122 bp, Homo sapiens
aggcggaggttgcagtgagccgatatcatgccaaaaccacaatatcagagatgataaattcgctggatgggattaacagcagattagatgttgcagaagaaatgatcagggaacatggaatc

SEQ ID NO: 144352 - DNA, 122 bp, Homo sapiens
gaggaatctcgtaaatgaccgtcctggtcttgcagacagcggggacagcttcctctgcaacggcgggggcacagtgagcggggaccggcctctgcgaccacggccccaccccagggctgagg

SEQ ID NO: 144353 - DNA, 122 bp, Homo sapiens
gggagagagccggccaaggcggggccctcccgcgcgcgcgtcctccgcgcgcccccaccccgtgcggcgccgagctctccacgcccagaccctgctactccactggggtccgaccccggccc

SEQ ID NO: 144354 - DNA, 122 bp, Homo sapiens
cccacctcgcacccgtgccccatcatgctctgcgtgctcgttaggtgccccatcatttcccgctcgctctcgttacgtacccagcctccggcccctgtaagtgccccatcgtgctctctgtc

SEQ ID NO: 144355 - DNA, 122 bp, Homo sapiens
tccacagagctaggtgacaaacgctcagtccaggatctctgcaggttcctacacgggagccggagagcgcctgcgcgtcggagcctctttgttgctggggcgctggggtccagctgcgcgtg

SEQ ID NO: 144356 - DNA, 122 bp, Homo sapiens
ggaaacgggcaaacgtggacgcgcgcagctaaggcaggcgcggtgggcagggggctgggccgggcagggactgtgccgcccccgcttctgggtgggagcggcctgtctcctctccgagggtc

SEQ ID NO: 144357 - DNA, 122 bp, Homo sapiens
ccctgagccccagccctgcagggcaggcaccccatgcggtggttgcaggcacccggcagtcgctccatcctggttttcggcctttagtgcacagaagcgtgaagaagcggtggtcactggca

SEQ ID NO: 144358 - DNA, 122 bp, Homo sapiens
gcaaacggataatactgtccacttcagggaaaggatcagcaagggacacaatgttttattcgcttgtattggttttcagccaatttatgattttaaccaatttgagcaattcagttggatgg

SEQ ID NO: 144359 - DNA, 122 bp, Homo sapiens
gcactcctcagcccttgggtgttcgatgggactgggcgctgtggagcagggggtggcgctcgtcgaagagcctcgggccgcacagaagctcacggagggggtgggaggctcaggcatggcgg

SEQ ID NO: 144360 - DNA, 122 bp, Homo sapiens
tcaagaccagcctggccaacgtgacgaaatcctgtttctactaaaaatacaaatattagccgggtgtggtggcgggcgcctgtagtcccagctactcgggaggctgaagcacgagaatcatt

SEQ ID NO: 144361 - DNA, 122 bp, Homo sapiens
ttgttcctcggctcgagctcatgggtgtacattatcatgctcttcttttgtagagcagcccgacggccatggaggctgaagagacgatggaatgccttcaggagttccctgaacatcataaa

SEQ ID NO: 144362 - DNA, 122 bp, Homo sapiens
cgcagactcctcctcccagctccgggtgggcattggacagagaagccggcctgctagagccggggaaggggaacggcgaccggaggcctactgcgcaggcgtagcactcgctgccgcattgc

SEQ ID NO: 144363 - DNA, 122 bp, Homo sapiens
gtggctctcagtgtataatgtgtgtcagtgtgtgcgtgtgtgtgtgtgtgtgtgcgcgcgcgcgtgcacaggtagctcctagcgtgttgtgtggtgtgatgtacaggtctcagggtgtgtgg

SEQ ID NO: 144364 - DNA, 122 bp, Homo sapiens
caggccttggggaaacttagggcggcgcgcgctcccaggtcggctaagaccggagcgaaccgacttgcaaaaccacaagggcaactgatgggataaaaagagacacccaaagccatagcctc

SEQ ID NO: 144365 - DNA, 122 bp, Homo sapiens
cttctaacgcctcagtcctaccccacggaggagcagggcagactcccacgaagcacaggccggcgttagtcactgccttgaccatacacatcggcgctcacccgatgagataccacgtactg

SEQ ID NO: 144366 - DNA, 122 bp, Homo sapiens
gctcctcctgaagccgggaaagctctgagaggaggagccgctgtcacaggcctccagctccggccgccgtggaagtccggggtttttatttgcttagaccgctctgcctccttccggccttc

SEQ ID NO: 144367 - DNA, 122 bp, Homo sapiens
agcttggggaatgagagtgattttttttcctaaataaaatttcgagttttaaatatttaccgggtttcatagccacactgatgtgtgcatgccatttgcacatgctcaaactcatttctttc

SEQ ID NO: 144368 - DNA, 122 bp, Homo sapiens
aataatacaaggagtcagggaaagatacggatgaaacaggattggctaggatttgatcatcgttgcagctgggtgttgaagatctattttacccttcggtctgcctttgtgtacgtttgaaa

SEQ ID NO: 144369 - DNA, 122 bp, Homo sapiens
tctgcccccgagagagcagttcctccaagcagtgggtgctgccctgggcgacagcaccaccgtccaacagcacctctggcctcccatcctcttggagactcaacaccaggaacaccccgcag

SEQ ID NO: 144370 - DNA, 122 bp, Homo sapiens
gtggcgacgacgacgacgttgctcagtcttggggtgggctccgcggtgcaggccgagctgcgcggagggctcggcgatcagcggcggcggcggcagtggggaggccgcagcgccatgggggg

SEQ ID NO: 144371 - DNA, 122 bp, Homo sapiens
gaagttcaagcgcaagaaggacgtgaagcggcacgtgctgcaggtgcatgagggcggcggcgagcggcaccgctgcggccagtgcggcaagggcctgagttccaagacagcgctgcggctgc

SEQ ID NO: 144372 - DNA, 122 bp, Homo sapiens
tgatgacttgaggtcacatacaggcagggtcagagcaggactgaacctagatctgcctggcgccaacaatggcatcatcatctccactgtcttctctcccccacagttttcaggaggcctcc

SEQ ID NO: 144373 - DNA, 122 bp, Homo sapiens
gtgttgaagacagagatgttgcatatttaattttaactccttgattttcagaggagaaaacggagatcatttcacaattgccttgtaaatagctataagaatacagcaaaggtattcttagt

SEQ ID NO: 144374 - DNA, 122 bp, Homo sapiens
aatatccttggagaattagccaaaaaacatagcattgtatactgcaggcaggagtggcttcgtgtagctgttttgttcttcagagttgggtgggacactcagctgttcccagttatttgaac

SEQ ID NO: 144375 - DNA, 122 bp, Homo sapiens
ctgcgctccgactcaggctcagccggcaggttctggggcaatgggggaagggagaggggccgggcccttgtgggtcccgcacgcacacagtactcaggggccagccaggtgccatcccaggt

SEQ ID NO: 144376 - DNA, 122 bp, Homo sapiens
ccagcgcccgaggctgtcacgagttagtcacttcgcataacttggttaatccgggactggcgggcggaggggcagacactctgcctgtccggagctctgctctgctttttaagtcttgctgc

SEQ ID NO: 144377 - DNA, 122 bp, Homo sapiens
aaacagaagaacgtgctgtgtggggacagctggtgacagtggtccccagtgcccagcacccgcacggtactcaccccagctccacagcttcccttccgtggtgatgaggaggctgtgtgcag

SEQ ID NO: 144378 - DNA, 122 bp, Homo sapiens
ctagcggaggagtcggctgaggccattcagccgctgattttcgtcctggaacggacttcgcgtaaacacaccgagccattcagagctctctccaagtcacattctgaggctccggccccgga

SEQ ID NO: 144379 - DNA, 122 bp, Homo sapiens
caaggcacaggttttcaaatctttacctctgtgtacaagaacgtacatgaactttaaaaacgtgtgtttcctcgtctgtgtttaacaccctaacgatgatcagtttgggggagacgtacccc

SEQ ID NO: 144380 - DNA, 122 bp, Homo sapiens
tcgcggcgcagctgaaggtacaggtcgcgcccgaaggccggcaggtgcagcagcagggcgcgctctccgggccgggcgcgcggggcggctgggggcgtgcgggggcgtcgccgccgtcgggg

SEQ ID NO: 144381 - DNA, 122 bp, Homo sapiens
tccggcctgcccgacccccgccctccccgggaccccggcatgcccccaccccagtccgcccgccccattcccacgccctgttgattcaaccgcagacccgggtcgccgccccctcccccgcc

SEQ ID NO: 144382 - DNA, 122 bp, Homo sapiens
caccctcctgggtgctcatcccaggaaagcaaagacttaggctcacacgaaatgcctgggcgccgacgctcatttacctgtaatagctaaaaactggaagtgacccaggtgccattcagtgg

SEQ ID NO: 144383 - DNA, 122 bp, Homo sapiens
tttctggtatcagcaaatctaaaccattagagtctctgtggcgccatcggttagtgccttcggctgtttgaaccgaaaggctggtggttcaagcccacccagagatggtaccttttacttag

SEQ ID NO: 144384 - DNA, 122 bp, Homo sapiens
gttcactaggccatctactccatctgctgttaatctgtgggaactacaattgaggttgagcgacaggacggatctgtgcattttggggctggcaatttgaggtggctcaatggggacggaga

SEQ ID NO: 144385 - DNA, 122 bp, Homo sapiens
ggctgacgtcctgggtgaccgcagacctgctgtgtgtggccggccggccggaccttagcacgtcatcactgggctcacggtcctgcccctgagcacatctgaccggccgtggtcagggtcca

SEQ ID NO: 144386 - DNA, 122 bp, Homo sapiens
gcagatctgggctgcggtggccagggccgtgagtcccgtggcagagccttctgggcgctgcgggaacaggagatcctctgtcgcccctgtgagctgagctggttaggaaccacagactgtga

SEQ ID NO: 144387 - DNA, 122 bp, Homo sapiens
cggcacactcaattcttgtgtgtcaggaaagagcagactcagacttgcttagctattgcacgtagctaagcagtgcactgtcgtatgagctgagaggagcctcactcaggtctgcaattcca

SEQ ID NO: 144388 - DNA, 122 bp, Homo sapiens
ggaaagtaattagggcagaaccccttaatccaacacagttaatatttctgcagtgaaacacgaacattcacactgattgggataaataaaagctatgaatagcttcatgtcaattcagggca

SEQ ID NO: 144389 - DNA, 122 bp, Homo sapiens
ccccatcccaaaggcaagagttccaggagcccgcagggcccttcagtggccagccaggctcggcagcgcgcggggaactacggggtcccgcgcgcccccgcggccctggacagccaaacacc

SEQ ID NO: 144390 - DNA, 122 bp, Homo sapiens
acagttctctggggttagctgctcccccgtggggcatgtgggctgcggcctggaacgccccgtttcagtgtctgtttccgccttcgttttccagtaggaacagagggaccctggctcctaga

SEQ ID NO: 144391 - DNA, 122 bp, Homo sapiens
gcccaaggaacggccctcaacagctgggaagtcaggcgccccaggagcatggtctgtgggcggcggccacaggtcccaggggagctggaacacaagtgcccgttcaggtcaggcggcagcgc

SEQ ID NO: 144392 - DNA, 122 bp, Homo sapiens
atagaaaatagcatttgaaagttcctagaaaatcacttcaagagtcctaatgcagtgatccgagaggatgagtcagttatttctggctcacaattctatgatgttggtgaaatagattgatt

SEQ ID NO: 144393 - DNA, 122 bp, Homo sapiens
ctgtggggccggcgtgaacccgggaacccatccaccaaccaaccagcaaaactgaagggtcgtgtccccatataacctcctgcaaacgacggtaattgggtcaacattgaacgattacgcag

SEQ ID NO: 144394 - DNA, 122 bp, Homo sapiens
gggtgtttcgcctggagccgcaagtgactcagcgcggggcgtgtgcaggcagcgcccggccggggcggggcttttgcactcgtcccggctctttctagctataaacactgcttgccgcgctg

SEQ ID NO: 144395 - DNA, 122 bp, Homo sapiens
gggggacgcctgtgggagtcctaagtatccagcgcagctgggaggcccacgttgggaagtcggagaccgaccccgcctcccgactgcgccgactgcaagagagcgcttccggcggcgcttgg

SEQ ID NO: 144396 - DNA, 122 bp, Homo sapiens
caatttcctagccacttgtccaccaagaagaacttttcctgggtcaagaatatttccaagcgattgtgtcccggtcatatgagatgtgtagattgcacgcgcatttctagcctttcccctca

SEQ ID NO: 144397 - DNA, 122 bp, Homo sapiens
gggcccgtcctctcggtggtctgaccaccggctggtggagtgggctctggggccgccaggcgaccagggcgcaggcgggggcggacagctcattgggaggggcgccggggcacagtgcgggg

SEQ ID NO: 144398 - DNA, 122 bp, Homo sapiens
gaagggcaagccagcccgaggccgccggggaggagatgagaggaggggacttacctgccacgaagactgcttgcaggaggcagaggtagttcttcccgtacttctcggcaatcctcacgcgc

SEQ ID NO: 144399 - DNA, 122 bp, Homo sapiens
aaaatataagtaaatattgagaatttaagtaatgcttgtaatatgactcattttgaattacgatagatattttacttggtgaacatgatatatttgtttaatcctggctccttgtagagcac

SEQ ID NO: 144400 - DNA, 122 bp, Homo sapiens
aatcccagcggtgtcatccaggagtgagcgggagagctccccgccccctgtggcgaagcccgggcaggcacagggccattcattacccaaggactaatgagactagactaatgacctttggc

SEQ ID NO: 144401 - DNA, 122 bp, Homo sapiens
gcatttcagataagggatacttaatctgtagtaaccttgtgtgtatgagtttgaccatagcgcttccaaagaccatgtatgtttacaatttctccactttaaattaattacatttaatcagt

SEQ ID NO: 144402 - DNA, 122 bp, Homo sapiens
agaaaaacagaagattttaaaaatcacctataagtccaccactagggtaattactgttatcgtttttaggtatattcttgcaaaactgaatatttagtattaaacacacacatacacagaca

SEQ ID NO: 144403 - DNA, 122 bp, Homo sapiens
catgctttcattccatttatatcattcttcagctgggttgcgtgatcatcagctgtgccccgccccccaaccctccattgcccgattctgtagtaaagtcttttgggactggccttggactt

SEQ ID NO: 144404 - DNA, 122 bp, Homo sapiens
cgggtgggcataggcattgcccctattgcagatgccctgcgccgtgacaggtcaccagtgcgcagggccattgcccctactccaggcactctgagcggttacaggtcacgggcacgcacggc

SEQ ID NO: 144405 - DNA, 122 bp, Homo sapiens
cagatgcccgtccatgggtcgacgatgaaacaagctgtggtccgtccaaaccatgggatgcgactcagccatcaaaagcaaggagcaacccgggaggctctccggagagctctgccaagtga

SEQ ID NO: 144406 - DNA, 122 bp, Homo sapiens
cttaaatagaaaagatatcctccccctcctgtctcttaacagctattgtaaatgaccaaacgctgtatcatctgtcagttcataggaatcactggggcagtttttaaaacagctgacccagg

SEQ ID NO: 144407 - DNA, 122 bp, Homo sapiens
gaaaccacagccactgcctatgtggaggacgccatattggaggcatggaatgcggcctgccgtaaagacagaggcgggttgttaagtatactctctactttacggcgtacccgagaacgccc

SEQ ID NO: 144408 - DNA, 122 bp, Homo sapiens
atagaaatcttgcctaggggtaattcaggtggttttttccccactgctgtatatttgccacgtgatcttagttaagatttttattttcagccaatgtttcccatttctttattgttgacaga

SEQ ID NO: 144409 - DNA, 122 bp, Homo sapiens
aaggacattgggtcagttgctttacctgcataaatacatcatttgaacatataaatatatcggtgtaaaaatgggcaaagtacaagaataagcaaagagtgaataaatacaaatatcaaata

SEQ ID NO: 144410 - DNA, 122 bp, Homo sapiens
ctgcgctttcctttctcccccacaagcttctgattcttggaaccaggctcggtgacctcacgcgagtgacttcatatccgggactttctgggaattctcagcagcactttttcgtaagaaac

SEQ ID NO: 144411 - DNA, 122 bp, Homo sapiens
cggcccggatccgaaatacccccaggataatcatgaacaccaggaagctgacgcacaccacgatcacaactgtcgcagtgctggggacgactgtgggagaatgagggggcgggatgcgaggt

SEQ ID NO: 144412 - DNA, 122 bp, Homo sapiens
ttcggtgaggacctgctcccggtgttgtgttccgtgaggacctgctccccgtgttgtgttcggtgaggacctgctccccatgttgtgttcggtgaggacctgctcccggtgttgtgttcggt

SEQ ID NO: 144413 - DNA, 122 bp, Homo sapiens
tgcccccactttaggctttgcaggtcttagtacagttctggtacccaggaacatctttcccgaaccagaaaattgcactgtggctgtgggagtgtagtaggtacttttatttgggcaaatgg

SEQ ID NO: 144414 - DNA, 122 bp, Homo sapiens
gggggactcccggggccttccctctcttccacccaccacgctttcctgggcgggtcgaggcgaatcactgccctcagatcccactagcaggccactttaggacttcacaaaaactcagggtg

SEQ ID NO: 144415 - DNA, 122 bp, Homo sapiens
taagtctgtttcttcatgaaacccaaagtggaagtgcctgagctgtgaatgcggccacagcgttcatgccagcttgttcccaagcctaggagaagcaagcagccccgtgacgggcacaggcc

SEQ ID NO: 144416 - DNA, 122 bp, Homo sapiens
tggcttggtatttgagggactttacacatcgtattaagggtttgagcttcaacttggggtcgtcgggagccattgaaggttttttgttgtttgttttttgagacggggttttgctcttgttg

SEQ ID NO: 144417 - DNA, 122 bp, Homo sapiens
cctgtagcattttctatgaacaagttagctgccatctctggagatactgaagtaaatagccgtttctgcaggaacactgttagatgaaattcagtggaggaagagcaattttcttaaagccg

SEQ ID NO: 144418 - DNA, 122 bp, Homo sapiens
ctgcacctgttcgcttatatgcagcttttgtccaaccaaacagaaggagaaacccaccaccgatgtggaggtctgacttctataggcggtttccacagggcaaatgagaggacttaagtctg

SEQ ID NO: 144419 - DNA, 122 bp, Homo sapiens
ccagggaacctatctcatggtgtcttgtgtatgtatcttctcagagactgacatcttctccgagactggtaggatttgtctcagtctcagacttccggaggcgaattaccatcttaataacc

SEQ ID NO: 144420 - DNA, 122 bp, Homo sapiens
ctttccgccacatcacagcttctgcagttgggaagactgaacagtgatcttcagtttgttcgtcaaagggccaagaaatctgtgtcctcaccttctctgcttcaattctggtgctgcttaag

SEQ ID NO: 144421 - DNA, 122 bp, Homo sapiens
tgcattcgagcctgtgtgcggtgcatgggccaagggcgcccacacccacgccaccctttccgaaggaaccgagccccagcccctcatgggccaagggcacccacagccacgccaccctttcc

SEQ ID NO: 144422 - DNA, 122 bp, Homo sapiens
gggccgaggcctgggacagctaccgcagcatgagcgaaagctacacgctggaggtgcgctcgcgggcggaggggcgcttccggcctagttggcgtgaaccggtgccttccgagccgcgtcgc

SEQ ID NO: 144423 - DNA, 122 bp, Homo sapiens
tgcccacactgccccgtccgagcctccgtgcaatgcacacgatgctgcagtacgcagccccggctgcccttgggtacacatctgagggtaatgcgatcatgagcaagctcaatttgattaac

SEQ ID NO: 144424 - DNA, 122 bp, Homo sapiens
cccatcatagcagtcacggtggcaggatttttattacatccactaacactgctgctacaacggcaggcaggagctcctcacttccccagccccctgcccttggcctcaggttccctctgctg

SEQ ID NO: 144425 - DNA, 122 bp, Homo sapiens
tataaatagctaagaacaaagctctcatatctttgcttttatgacagtgtttggcattatcgatggtcagtctcatgccaagtccttggtcaagaaaaaagagctaaattacagagttcctc

SEQ ID NO: 144426 - DNA, 122 bp, Homo sapiens
acactcatgtagctaatgccattccctagattcatgagggcttttttctgctgaaactctcgaggaatgaagcgtttctgggacatgagcagggagaatgcatataaccctcagagctgaga

SEQ ID NO: 144427 - DNA, 122 bp, Homo sapiens
aaaatctcatctccttaacatagcatgcaaaaatattcctcatctggcccttatttatatcgctattgtaccacttgtaattccttcttattgttgggaggcatgacactcttcaagcttct

SEQ ID NO: 144428 - DNA, 122 bp, Homo sapiens
attaagcttgtccattctgtttggtaattgtaagagacacgaataactgtccagtggtcacgtcagcagttcctggccctcctagggagcagcatggtaagcctctggtctcaagggttccg

SEQ ID NO: 144429 - DNA, 122 bp, Homo sapiens
ttattgttgctacagtattaatattaactgcagtaacaacactgctgcttcccagacaggcggtagaaagcagctgtaggccaacaggagccagactgaagagatccagggaggtgcctcca

SEQ ID NO: 144430 - DNA, 122 bp, Homo sapiens
aaaggccctaagagcaagtgcaaatttacaaaatggtctttaaatggaaggcctaagcctcggcaatttccctttcttatggtacatgcctttggtaaattaaaaatgatattctgaaattt

SEQ ID NO: 144431 - DNA, 122 bp, Homo sapiens
cgctggcagtaggaagggtcgccagtgtggacctgagggtggaggtgttgccacccggggcggcctgcgctccattcaggcttgagcggtgactgggagaccccgggaatggaaatggcgct

SEQ ID NO: 144432 - DNA, 122 bp, Homo sapiens
tgtgttttgctctctgggtactctttctgtagtcggctaacagaggatgaccaagcccctcgcgggggcgggggcgggtcactcccggacagggcccccatgaagtttccctggggactgtg

SEQ ID NO: 144433 - DNA, 122 bp, Homo sapiens
ggatcctccggttccccaactgggatccctgtgcgggtcacacgcgctcttacacacacccgcatccttaaactttgggaccaactttttaggacacgggaaactacaggcaagagagagaa

SEQ ID NO: 144434 - DNA, 122 bp, Homo sapiens
tcctgcaggtaccttacaggtgaccagctgcggagcgagtcgtccccagaagcttacatccgctgcctgcgcatgggctgtcgctgcattgaacgtgagtagctccttcttggtggaggtca

SEQ ID NO: 144435 - DNA, 122 bp, Homo sapiens
tcactgttgacacaggggtgatgtcactgccggccaatggggagaccctcgggggccctacgtgtgcctctctgtgctcccagggcccccgccacgcacgccgcctgctctgaatgctgcct

SEQ ID NO: 144436 - DNA, 122 bp, Homo sapiens
cgccttagtctttttaggtttcccttcctccttgctgggctcctccccagtggtagggtccgcgctcttggcccgggccgtggtgacttcggcagctttgggggcctcgccgccattagcag

SEQ ID NO: 144437 - DNA, 122 bp, Homo sapiens
ccagcacgcccatcaccgcagggcccagccccgaggcttcaggaggctgggcagccggcgcgcccaggtgggcgagtccagtcggaactgcagccccgagtttgctccagttccttgtcccg

SEQ ID NO: 144438 - DNA, 122 bp, Homo sapiens
gccctggagtgccctcccagcggaagaaaagccgccagcggccctccgtgcccggccaagcggtcactcccggtgagtgggagcatgcccacagcagggtcagcccagggcccgcggcatcc

SEQ ID NO: 144439 - DNA, 122 bp, Homo sapiens
ttgccttctcatatggaaatgaccctgttttggaggggtgtgctgagtagctcgtgtgcacgtctgtgaggtgaaaatgatttaataccttgttgcttcagtgccatgtagctctagaagaa

SEQ ID NO: 144440 - DNA, 122 bp, Homo sapiens
ctctgcagaatgggcaggcccaggacagctggcccatcagaccattagaaacagcgagtccggagttccaggggcttgtccacggccacacagcagcccgtggccccaggaagccaaagctc

SEQ ID NO: 144441 - DNA, 122 bp, Homo sapiens
gtgaaactcagcgcaggggaggtccgtcggtgtcttaggcggtccttattgttactcctccgcctttatagttgtggaaactgaggctcagaagtgccaagtgacctgcctagatcagactg

SEQ ID NO: 144442 - DNA, 122 bp, Homo sapiens
gcccccaggacacacccatccaggaggggctgtcatcgtctaggtctctgcaggaggaggcggctccggacgccccctggggggcgggaggcgctcggcccgtcgccccaggagcccgcttt

SEQ ID NO: 144443 - DNA, 122 bp, Homo sapiens
cggtgacctgggctctcctccaaccgtcccagccaaactccacgtcgttctgctggccgacggcctcccagcgtgctggcatctgttgctgtgctcttctgcctgcgtgctcccctttgtca

SEQ ID NO: 144444 - DNA, 122 bp, Homo sapiens
ccatcaccgaccaaggtaggggctcagaggctgggcgtgtggatgtgcagcgtctgcccccgcactctcgcggaggtcccagtatctgcagcctcagggacactgtctttcccaccacctga

SEQ ID NO: 144445 - DNA, 122 bp, Homo sapiens
actccgagctctgggggcgagagggggctctcgcatcagcacgtggcagtccctcaatgtcgaacccagaagagtgaagaaaaaccaagagacaacagccggcctcggtcctgagcccgacc

SEQ ID NO: 144446 - DNA, 122 bp, Homo sapiens
aaaactttttactcgggcttccgcactctggaaatctcccgggagagaacctctaaacggcgaggtttagagaacctctaaacggcgagaggggcacggcaatgtccaaacgagaagaaaga

SEQ ID NO: 144447 - DNA, 122 bp, Homo sapiens
ccggttgaggttgctggtggacctgctctggtggtcttggatgaggccccatgagcgcggcgcccctggtgggctacagcagcagcggctccgaggatgagtccgaggacgggatgcggacc

SEQ ID NO: 144448 - DNA, 122 bp, Homo sapiens
gaagccaggagaatgcagagctcaaatgagaaccgagataaagcaattacctgatcaatacgggtgaaattgagtaatctagcagatcaataccatgggcaggaggctggggggtgggtgct

SEQ ID NO: 144449 - DNA, 122 bp, Homo sapiens
accacagccatcatgcctcggggtcagaagagtaagctccgtgcccgtgagaaacgccagcggacccgtggtcagacccaggatctcaaggttggtcagcctactgcagcagagaaagaaga

SEQ ID NO: 144450 - DNA, 122 bp, Homo sapiens
cgttgtccaggcgcgcgatctggggcagccggtaagtgctgaccaggaggtcgagcggcacggccaccgagctccacttcacatccttgaggctgcagcccagcgagggcgccgggtccatc

SEQ ID NO: 144451 - DNA, 122 bp, Homo sapiens
atagtaaatttgggaagaatctttaaatcagcttctaagaaattggttgagccaaatgtacgggtagcattcagtacaggttgatttctgctgctacttttactggcaaacaatggccaact

SEQ ID NO: 144452 - DNA, 122 bp, Homo sapiens
agtgctgggattacaggtagagacaggattttaccatgttggcaaaggctggtctccacccgccttggcctcccaaagtgctgggattacaggtgtgagccaccgcgcccagccaccccaag

SEQ ID NO: 144453 - DNA, 122 bp, Homo sapiens
tcacctcgtgatccgcccgcctcggcctcctcaagtgctgggattacaggcgtgagccaccgtgcccagccctaacgagcatatattaatgttgtaattatatgtgtctgtgtgtgtgtggt

SEQ ID NO: 144454 - DNA, 122 bp, Homo sapiens
ttccacgccctccgcgacaccgcgagccccaccctaggctcttcaggccctaccgtcggccggcaggccgttcgccccgcccacagatcgctcccgctacttctaggtcctccgccggattt

SEQ ID NO: 144455 - DNA, 122 bp, Homo sapiens
gagggaggggctgtgggtgtggccaggcgggggcggggttagggcgcggcctgggtgggccgtgacggtgagcgtgagctggggtatgcgtagggcacggcctaggggtgagcacgacacag

SEQ ID NO: 144456 - DNA, 122 bp, Homo sapiens
aggccaagggccctctggcgctgctgcccccacacggactggcgccctctgcaggtcccgcggctcccggcccgctcagcgcctccggaggtctcacccaagccctatcagctgggtcccta

SEQ ID NO: 144457 - DNA, 122 bp, Homo sapiens
caggcatatgtttaattgattgttttagcagacagatgtctggtttaacattcctctgctcggaggagaggctcagagacagtgagcccatgttacttttgatagtgactgaagcctttgcc

SEQ ID NO: 144458 - DNA, 122 bp, Homo sapiens
gatgcaggggaattgaagaaaaccctgtgctcagaactgcttgcctaagagggctgggaacgaaaggggaaagacaaaatctcaacagatttgtctgcttccatcgctgcagtggtggtttg

SEQ ID NO: 144459 - DNA, 122 bp, Homo sapiens
cacccagaccctaacaaggaacttgagtgagctagactgcccatgtgggtcacagaaattcgattcaggaacattgggctaggctgcagaggaccactgtgcccaaaggcatgccctgctcc

SEQ ID NO: 144460 - DNA, 122 bp, Homo sapiens
cctcgggtggctgggacaatgacaccctcgcacgtccgggagccgcagccctgaaggggccgggcctcagcccagtgagaggacaaatcctgctgtccaagaacatctttattccccagtat

SEQ ID NO: 144461 - DNA, 122 bp, Homo sapiens
tgattatttaattttactccttaatcagctgttcaaacacttgaattctctcaagaccctcgttctctttctcacccccatcttccctgcccccagggccaatcaataatcactacagtatg

SEQ ID NO: 144462 - DNA, 122 bp, Homo sapiens
tctaagtaggtagtcgctgctcagtgtctgcagacaaaagccaaggttagggctgcctggcgcccactcaccggttcttgtcgccgccctcggcctcatccacctcgtctgcactgcaggta

SEQ ID NO: 144463 - DNA, 122 bp, Homo sapiens
ctcgtcttggccagggacatccccccggctgtcacggggcagtggaagctgtctgacctccggcgctacggggccgtgccaagcggattcatctttgaaggcgggaccaggtgtgggtactg

SEQ ID NO: 144464 - DNA, 122 bp, Homo sapiens
cgccccgccccgccccgccccgccccaagacccgggttccccctggaggccgccaccgcccgtccctgcccgtcgccggcaaggcctgagcctctgtctcaagatcggacggcctttgcagc

SEQ ID NO: 144465 - DNA, 122 bp, Homo sapiens
ctatgacctggttggagagctgaatgggttggaatgtgactgcacagagtaagtacatgacggcatgtttgtctcttgtttgggctgaaaagaagagattgaacattgtcatctgacataac

SEQ ID NO: 144466 - DNA, 122 bp, Homo sapiens
tcccttctgtattccctttcatggtccttaagtgactacatcatctagtccagaccaacacgctgtgccctgagcaaggtagaagatttggggacaagcctgtgcccatggttccttcttca

SEQ ID NO: 144467 - DNA, 122 bp, Homo sapiens
gcgccccgcctcctgggctcccattggctgcttttgacgttgtgctccaccctttctgggcggggcggaaaaaatacttcccgtctctccttttcgcctattagctccgtcaaaggtcgagt

SEQ ID NO: 144468 - DNA, 122 bp, Homo sapiens
tgcatgtcggtaccactgcagagggctgcgaattgcttttggtggcctgcgcctgctgagcgacctgtcacaaacatgcaaagctatcaaaatgaacacggttgacagggtcattttaagac

SEQ ID NO: 144469 - DNA, 122 bp, Homo sapiens
gtggggggaaaggggtgacggacaggcgtgggggccaatgggaggcacctgtgggggtggcggggcggagccggggctggggcggtcccgaggacgcggccccgcccctcgcttccccaggg

SEQ ID NO: 144470 - DNA, 122 bp, Homo sapiens
aggggcagtctggaacttggggcccctgggctctagttttagcctcagggcaacaactaacgtggggatggggaacaaagccagctaggtcgaggtcctgtacagcaaggtcgggaagccca

SEQ ID NO: 144471 - DNA, 122 bp, Homo sapiens
ctccggaaaactgaagcgtctcctctgacccccaaggtcagaaagatttattacttccttcgagagggcgcagccacagacccactagagagggcgggcagggtgtcggaagccagagaacg

SEQ ID NO: 144472 - DNA, 122 bp, Homo sapiens
ggtggccccttccatttcctggccctgctctgcttcctgtctacctcatactagaatgatcgtgactacccgggcagacattttactgtgtttctcagaccaagtgtctactgatggcccaa

SEQ ID NO: 144473 - DNA, 122 bp, Homo sapiens
accttctccaacttttgcaggctccacccaggatgtgcgcctcgctccacccaggatgtgcgcctctctccacccctaggcgaaggcactagaatttcccaaattaagaacgaagaggaagt

SEQ ID NO: 144474 - DNA, 122 bp, Homo sapiens
gtgaagtctggtggtaacagtacccagacagggaagtgaacaaccctatagtatagtgaccggatttagcagggccggatcgccaccatctttaggaaagtcaggttaaaggaacataggag

SEQ ID NO: 144475 - DNA, 122 bp, Homo sapiens
attcctgggctccagtgatcctcctgccccagcctcccagtggtgttaggattacagacacgagccactgtgcctggcctgggctccacctcttaatgggggaatggtacccttctagaagg

SEQ ID NO: 144476 - DNA, 122 bp, Homo sapiens
cgagatcccgtcggtccgccccgctgccctcccagctgccgaaaagaggggcctccgagccgccggcgccctctgccggcaacctccggaagcacactaggaggttccagccgatctggtcg

SEQ ID NO: 144477 - DNA, 122 bp, Homo sapiens
gtagagcagaacctcccaacctcagaagttgctgggctgtgtgtttctgtgggagtgttgcgagtgttggatgtctgcgtgtgtgtgtgtgtgtcggtgtgggtgtgtgtgtgtttctgtgg

SEQ ID NO: 144478 - DNA, 122 bp, Homo sapiens
cctgaggccagcggggaaggacgtcatgggcgaggtcaggcgggagggcgcggctggctccgcccctggggctcccatggccccccgcgccccgcggccagatgctgacgtgtcctttcctt

SEQ ID NO: 144479 - DNA, 122 bp, Homo sapiens
acatgcggaaggaggcagagacacaggcagctcagggacacccaggggaccctcctccagcgtgcccccttcatggctgcggcaaaagtccccctggctccctggggaagctccacggccca

SEQ ID NO: 144480 - DNA, 122 bp, Homo sapiens
agagcctttctggcgcgcccgtgactctccctccatgctgtgggtgtcctggaggtccagcggcctcactgctcacaggtccttccgagctgcttgtctgctccctcactctgagcgcccac

SEQ ID NO: 144481 - DNA, 122 bp, Homo sapiens
ttggtccttaaagaacttctgttcactgtgattggcccgggcctggacttaaagggacagcgcccaccccgccccgccagggtcaggagggagggaagtgacctgcggagtttgtagcagag

SEQ ID NO: 144482 - DNA, 122 bp, Homo sapiens
tcgagccgagactaccgcgaaccccggggttttgccccctcgcccggagagtacacccaccgcgattacggccactccagtgtccgggacgactgtcccttgagaggctacagcgaccgaga

SEQ ID NO: 144483 - DNA, 122 bp, Homo sapiens
ttggaggctccccaaatattttgcgatctgaggatccagctcaagtgaggtgccataggacgtgttcctgagtttgcattgcacggagaccttcctggaatttttcatttgcaagtcggctt

SEQ ID NO: 144484 - DNA, 122 bp, Homo sapiens
agctacacaaaaagcctggatcactcatcgaaccacccctgaagccagtgaaggctctctcgcctcgccctctagcgttcgtctggagtagcgccaccccggcttcctggggacacagggtt

SEQ ID NO: 144485 - DNA, 122 bp, Homo sapiens
tctgggcacagtgctgccccttgcaagccataacgtgcccccagagtgtagggggccttgcggaagccatagggggctgcacgggatgcgtgggaggcagaaacctatctcagggagggaag

SEQ ID NO: 144486 - DNA, 122 bp, Homo sapiens
caatccactctactccctccaacccaccaaacagctccctctagggcttcccaatgacttcggtgccacaaaatctaagggacatttgtcttcatcttgcttgacctttgacttctctcaaa

SEQ ID NO: 144487 - DNA, 122 bp, Homo sapiens
gtgctatagagcgccttcgtaagtgtatctcacttactcctcgcacgaccaggaacagatcgggtaggagagtgagtaaagccagtgacccgaagtcactcaactcctaagcgactgcctcc

SEQ ID NO: 144488 - DNA, 122 bp, Homo sapiens
gtaaataccatggtcagctatattcatatagaattgtacattttttttttttttttggtgcgtgtagaaatgtatctggaatgtttactaaattaagtggctatctttagtaggatttaaag

SEQ ID NO: 144489 - DNA, 122 bp, Homo sapiens
ataataaaaagctataaaggaagaaagagatcgtcctggcacagcatctggtggttagaccgggcaaccacacaattgatcatccaaaccaggccacttggagacagaaaggggccgctgtg

SEQ ID NO: 144490 - DNA, 122 bp, Homo sapiens
ctccctgtgacttccggaagtgtccacatgacttactcatgctatgcattgtgccacagccgtgagcttctgttcctgtttcatctctgatctgtgggcttccgaccacctggatccaggct

SEQ ID NO: 144491 - DNA, 122 bp, Homo sapiens
caccccgccaaaccggcaaggccgtgctcaagaggggccagtgatccgcgtcagggacagcgcgggccagcccggctgcgccacagcggcccctggcggcccggagccgtccgcgcccggcg

SEQ ID NO: 144492 - DNA, 122 bp, Homo sapiens
ctcctggggtcccgtcactgtgtggagtggcctcctggggtcctgtcacccagagtgtcccgacacccgcgcggagtggcctcctggggccccgtcacccacgcggagtggcctcctggggt

SEQ ID NO: 144493 - DNA, 122 bp, Homo sapiens
agtggctgtataaattcaagaaaagaacgatgaaaatgtcctaaagctcacttacgtatccgtcaagaaaaagtggctgtgagtcacgatgggtttatatcacagtgggtaaagagtcaggc

SEQ ID NO: 144494 - DNA, 122 bp, Homo sapiens
tcggggccatttctcatcaattaggccttggcagcgcttgaatggggcccagctagggtgcgtcccggctcctccccgcgccgccccctgtctccccccaccagagccgcgctcgcagatgg

SEQ ID NO: 144495 - DNA, 122 bp, Homo sapiens
ccggaggcatttggcctagcttgggagccgtagagcccttcctcaaccatcatctcagggcggcttcacgtcccctccacccacgcggaccgagctgcgcttcccttccccctgctcgggcc

SEQ ID NO: 144496 - DNA, 122 bp, Homo sapiens
gggcggggacatggggtgcgcatgcgtgcgggggggtacgcgtgcgtgcaagtgcgcgtgcgcgcgcaggaccgctgaggcgggagccccgaatgcggttctcgcttgctgcgtggcggtaa

SEQ ID NO: 144497 - DNA, 122 bp, Homo sapiens
cagagcagcggaggagtgctcgggttcagaccgagtcagggtcagcctgctggtcctcaacgccgttccgggttagttcaggttgattttcctctctgagggcaaggccacctctaaagttg

SEQ ID NO: 144498 - DNA, 122 bp, Homo sapiens
aaaagggggcgcctgcccgagcccacgcgcgccgccgcatctgcagcggtcggcgccccacgctccctgaacgccccccaggcggcaccagtgccgggcagagtcccctcggcggccgcggg

SEQ ID NO: 144499 - DNA, 122 bp, Homo sapiens
ccttctgtttgtgcttgtgaaggctaatggcaacacctcttctgtggccccaggtctagccgggcgtggcagaggtcagagggaaagaagccaaagggtacatgacctagggatcccacaca

SEQ ID NO: 144500 - DNA, 122 bp, Homo sapiens
cgggaaagaggtatttctctggaacaactggtttgtttctgtgttatgggcaccgagaagcgtgtggctcatcatgttttcctttggctttggttactaagcacctgagagctagatttgtg

SEQ ID NO: 144501 - DNA, 122 bp, Homo sapiens
ccttggccccgtgttgacctgcctcggtcccagacactgggaaccgggaaggtctaccctcgctctgcaaggtggattcctccatgcaagtgtagacagttctacactttgcagagtgtgtc

SEQ ID NO: 144502 - DNA, 122 bp, Homo sapiens
caagacagacattgaaaagtgaaaaacaatgtgtccaggtacttaggtgggtaagtgtgtcgcttcctgtggctgctataacaaacgaacacaaactgggtgctgtaaaacagcaaaagttt

SEQ ID NO: 144503 - DNA, 122 bp, Homo sapiens
tgccctggtgtctggggcaccccacgatggaggggaagacggcccagggggcatcgtcgtcggtgaagctggccttgcacatgccagaggtgttgtctatgacaagcaaggtgatattatca

SEQ ID NO: 144504 - DNA, 122 bp, Homo sapiens
gtatcagctatataacaactactttccattccctgggcatacagcagtaaaaaggacagacgtagtccatcccttcacagagcttgctatctggtagtggctgagccttttctataaatagg

SEQ ID NO: 144505 - DNA, 122 bp, Homo sapiens
ccaggctttgtagcccttccatagatagtattaggtcttatacagtgttttgtttatactcgtgttcaagttcttgtgttaaacctttctcacaagttacagaaacctaaaatctcagatgg

SEQ ID NO: 144506 - DNA, 122 bp, Homo sapiens
ggcggcctgcgggtcaggcggcggcgccgagggctgaggaggcggcggaggctgaagctgcggatcaggctagcagaagaccgcagctccaggaaccgaccacttagcaaaccgcaccgacc

SEQ ID NO: 144507 - DNA, 122 bp, Homo sapiens
tatttaagccacgaactgagaccacgatgccacatgctgatcaggacactcacagtcatgcgtcacttaacgatggagatccgttctgagaaatggagaaatgtccccttaggcaatttctt

SEQ ID NO: 144508 - DNA, 122 bp, Homo sapiens
tgcttagaaattctaatgaccaaatgttgaaccaaaccaggcaccctctggaactcctcccgaccaggagaatgcatagagacaatggtcagtttacaacctagttctggccagatggtgcc

SEQ ID NO: 144509 - DNA, 122 bp, Homo sapiens
actttgtatcctatcaggcgaggagagggtgatgtcacctgcgagttagtaacctacgagcggctgtgaaggaaactgtttaaccggatcccattgtacccagagtgcagagccgcctttcc

SEQ ID NO: 144510 - DNA, 122 bp, Homo sapiens
aatggttccagagtatcccacaacagccaacacaccgaaatgcacatacaatgagtcatccgacaagctctcactgagcactcagcttcatttaggtaaatatctttataaggatttctgaa

SEQ ID NO: 144511 - DNA, 122 bp, Homo sapiens
atgccccaactgcattttcttgcccacttattcagatctggcacaactatgaagaggcctcgggatgagccccagccgagttccccttgcgtccctcaggcaaacacccagtgtccaggagt

SEQ ID NO: 144512 - DNA, 122 bp, Homo sapiens
ccctcgcccagcaccaaccccctggtggacctggagctggagagcttcaagaaggacccccgccagtcgctcacgcccacccacgtcacggctgcatgcgctgtgagccgcgggcaccggcg

SEQ ID NO: 144513 - DNA, 122 bp, Homo sapiens
acgtgaccgtgtttccctcgtgagaagcacaggtcagccagcaccagctgtcattgctcacgcctgtcaccctcatggcaggaacaaccagccccacactttaccttcagggctgccatgtc

SEQ ID NO: 144514 - DNA, 122 bp, Homo sapiens
acaccattctcctgcctcagcctcctgagtagctgggactacaggtgcctgccaccatgccggactaattttttgtatatttagtagagacggggtttcaccgtgtttgccaggatggtctc

SEQ ID NO: 144515 - DNA, 122 bp, Homo sapiens
ccttccaaggctgttaaactttgaagagagttgggaaaagacaagaacatcttgccttcccgattgggtattcaggcttcactcagtaaagctgtcatgaagtagcgcaaagggtcagagac

SEQ ID NO: 144516 - DNA, 122 bp, Homo sapiens
attttattttaggaatgttaggaaagcttttgtagccttttgtaggctgtggcaatgggtcggaaagcttcttactcccagaacagtagagccatgaaattacagaattagaggttccatta

SEQ ID NO: 144517 - DNA, 122 bp, Homo sapiens
cgcgtggcccaggctgagcagtgcactcggctgcctaggtggtgtgaggttctgtgagcccgggcccagctgccgtggtgaatataaccgggagggagtgcccgcctctgcccacctgcctg

SEQ ID NO: 144518 - DNA, 122 bp, Homo sapiens
ctcccagagccgcccacgtggcctgtggcgcacttgctcagtggcgggtcctgaggtggacgaggactggccctgtcctgaggaggctgccggtcctttgcacgcgcagtgaacccgctcac

SEQ ID NO: 144519 - DNA, 122 bp, Homo sapiens
acacacagacacaggcccattcggtcataagtttaatgaagtctgaaaggtaagcgccatcgtggtcagagatacggaggcccggtcagactctccctctgcacctcaatggaaacgatgtg

SEQ ID NO: 144520 - DNA, 122 bp, Homo sapiens
tctgccaatactgtgggctcctccaaatttactctgctgacacccccagctcatcttacacgcagtccaccatggatcatgatctccatgatgctctgtagaaaaatgaaatggtgaaatgc

SEQ ID NO: 144521 - DNA, 122 bp, Homo sapiens
gagctgcgcactcataggtccaacttgccagaagaggtggagacagcccccggcgaggcgcgcacacccgcgcagcgcgcacagccccctggtgcagctcctgccattcagacccccagccc

SEQ ID NO: 144522 - DNA, 122 bp, Homo sapiens
aaccacacacggcacttacctgtgttctggcggcaaacccgttgcgaaaaagaacgttcacggcgactactgcacttatatacggttctcccccaccctcgggaaaaaggcggagccagtac

SEQ ID NO: 144523 - DNA, 122 bp, Homo sapiens
tcggcccacaccccctgccccggtttgggagtcggcttcctgcgaagcgctgactgaaggcgtcagaccgaggccccgggaggaaacagacttcgggaacaaggctagcaccagaggctgcg

SEQ ID NO: 144524 - DNA, 122 bp, Homo sapiens
ggcggggccgggttcggacagcaccagcagcatgctgtcggactgcagcaggtggtaccccgagcccctcggcgccagccggtcccaccaccagtcctcggccgagcggggccgcggcgctg

SEQ ID NO: 144525 - DNA, 122 bp, Homo sapiens
tccctcgggtctctctccttctgatgataaaccccccagagcgggggtacagctctttaccgcttcctttgcaagtctacgtggcatttacgagtcaacccagtcataaagcaagtaagtct

SEQ ID NO: 144526 - DNA, 122 bp, Homo sapiens
atggagaaggcggtaccttctgcctggaactctgaaacttttaacagaaaactgatccctcggtcccgaagagagaggcgcggcaaagcaacagccagttctctccctcatccccttccaga

SEQ ID NO: 144527 - DNA, 122 bp, Homo sapiens
ctcccgggagcccctgtgagccgcttctaccagtgcccggatgtgtttgttgggattctgcgccctttgagtgtctcggggctctcctcgaggtgctgccgggcactgccggggcatgattt

SEQ ID NO: 144528 - DNA, 122 bp, Homo sapiens
gtatactttccagagcacttccaaattgcacatgattcctccatagctcagtcaagtagccgggacagatcttatctccacttttcactaacaaaaacgagggccaaggagattatgtgact

SEQ ID NO: 144529 - DNA, 122 bp, Homo sapiens
atcgctggcgggccgctgctccctgccgccctcccgggttgtggctgagcccacgggaggcgcgtatttcccacgccatcgctggctgcgcttgctcctgtgggtcctgatgtctcctgagt

SEQ ID NO: 144530 - DNA, 122 bp, Homo sapiens
tataccttttagtacttacgtaacattctcatcctttactgacagtgccctgtatgcttccgtccatcattctgagattcaccagaataattactttgaggcatctccgttaagaatttgat

SEQ ID NO: 144531 - DNA, 122 bp, Homo sapiens
ctcacctccctctagcggccgccaaggacatcacacacgccgagcggaagccctgctgggcggtgctgccggctccaaccccggaaaggccacgtccgagagagctcacctactttctcctg

SEQ ID NO: 144532 - DNA, 122 bp, Homo sapiens
gacctggggcttgggtctagatgaagagcacagcatcaggaggccaggcttctaatgcggcgcagtctacagcgctgtggactcggcaactcccatcacctgccgctgcacaaacaccctgc

SEQ ID NO: 144533 - DNA, 122 bp, Homo sapiens
tgtctttgtgaatgctgattactcattcaaatgcagaatattctgctttttgctaggagccgagaagtaatagatttacagacctcttattcttggtcacccttgagggtggaaatagcttt

SEQ ID NO: 144534 - DNA, 122 bp, Homo sapiens
cccgcccctgcctggcctgcccacgcccccggcccgctcctgtcccgcctgggccaccggcgctggttccaggttttgccagctactagggacgcgtaaagccttcgcgctcctcccaccac

SEQ ID NO: 144535 - DNA, 122 bp, Homo sapiens
agacacatggtagatgctcaataagtatatttcagatttaatgaatggattcagaatgctcgaaagaggaaggttaataaataagtagacttctaatttattagcttatggtgagagctatg

SEQ ID NO: 144536 - DNA, 122 bp, Homo sapiens
ggttcgccgggtgtgaggcttcacagcggtccggtgaccaagtcgaggtaagggtgatgtcggctcgcggatagcagaggagttccgggtgatcttgcctaacgagcaggaaactgtgcatg

SEQ ID NO: 144537 - DNA, 122 bp, Homo sapiens
atggctgtttctaggtcgtgccaatggcaccagctttgtgtttggtgtatagtagtgtatcgctacgaagatctcaggcttccccacacacaccagcagcagagactaggaagcccgggtgc

SEQ ID NO: 144538 - DNA, 122 bp, Homo sapiens
tttataaatggggaaggtcagacaagttagtagcagagctgggtctagaacccaggagttcgaatacaatccgaggctcatatcgagactttaagttgtccgattccgaagtttatttgctt

SEQ ID NO: 144539 - DNA, 122 bp, Homo sapiens
tgcaggaagctggggtggttcctggcctggcctgaatctgattctggagtcaggtggggacgccaggttcgctgcaggtcccaggcgcattcaggacccggggttttaggcccctgcgacct

SEQ ID NO: 144540 - DNA, 122 bp, Homo sapiens
gccaggaagcttctcacccctaaggagaggacacgcagtcagtccgactggcaaagtggccggatcagcgcctggctgtgccaccccacatggagtgccacacgcggtcacaacagccccat

SEQ ID NO: 144541 - DNA, 122 bp, Homo sapiens
ctgtgcgggccgccggtggccaactggagccggtcactctggccctttggacggcttcctcgaggcttgctgcaatcttaaaggccggtcaatgtcttcctgatgctgcgtaaacatttgga

SEQ ID NO: 144542 - DNA, 122 bp, Homo sapiens
gctggactagtgctcagtgacaatgacagaagcctgttggaacgctggactcgaatggcccggcccgcagccccagccctcacctctgtgccggcccctgccccagcgccaacgccaacccc

SEQ ID NO: 144543 - DNA, 122 bp, Homo sapiens
ggctcctcccctctctgcagcccctctaaccatcgcccttttgcctgcccttaacagtatcggcctttgtcttagtcaagctttcgaggagcaactcagcaattctgttaccgataatcacc

SEQ ID NO: 144544 - DNA, 122 bp, Homo sapiens
agctcttcatggatgcatctggtttcccatggctgcggtaacaagtgaccacaaggttggcggctggaaacagcttaagtatcccatcttacggttctggaggtcagaagtctgagatcggc

SEQ ID NO: 144545 - DNA, 122 bp, Homo sapiens
ggtagagaaacctctctggtgatgggatcatcttaagtctatgagtgaagactataacaacgggactggagagaagagaatagattctgaattatttagagctaagagcagcagagcttttc

SEQ ID NO: 144546 - DNA, 122 bp, Homo sapiens
ttccggcggaaaagcgggctgtctcggaaactcagagccgggttcctcccgggtttctgccgggtttctccctgcggctcctgggttgttgagactcttgtgaagatggcttgcgctgccgc

SEQ ID NO: 144547 - DNA, 122 bp, Homo sapiens
tgtaggacaggcccggggacccctgccgcggccggctgagcggtgtccaggttctggagccggacttgtccaccgcagccgagtccgcaggtcctgtaatggcctagcatagttcacccacg

SEQ ID NO: 144548 - DNA, 122 bp, Homo sapiens
ccttgagttccttttcgttagttaactggaattcactgtctccttgcccattgcagtccacggccttcaggcaccgttggactggtattcagcaccctcgatcgaccctttccgtgtcatct

SEQ ID NO: 144549 - DNA, 122 bp, Homo sapiens
gatctcctttgcccatgtttagttatttttcttcagcgaggcacagagtcgcccagtgcccgtacggctctcacttgccccggcgctgtctctatggagctcaatgtactgcagtggctaac

SEQ ID NO: 144550 - DNA, 122 bp, Homo sapiens
gcatctagcacctgcttgtaaatgttctgttaacagcctggacccaactttctgggggctcgtggagctggcagggagtgaggaggacgaaggctgcagccctcaccacaacccaacttact

SEQ ID NO: 144551 - DNA, 122 bp, Homo sapiens
aagcgaattcttcccgggcgtaggcattgctcaagtaccgatgcactccccggaaggcctcggggatggtgaatccccggtacttcttacacaccacctgaggatggggagaggagagggac

SEQ ID NO: 144552 - DNA, 122 bp, Homo sapiens
tcataagattgttgtgagattgaatcaatatatgtaaagttctttgaacagtgccaggcacgttgcaagcgtttgctttcattattatctttctttgctcacttaaccatgtctgaacatgg

SEQ ID NO: 144553 - DNA, 122 bp, Homo sapiens
ttagttgtgttcctggaaggtgggcaagcagcctgatgggttaacattgggatttgccgtcgttatagcggtcaaggggcctgtagcggctgcagggtcggtgagggttcccagccggccgg

SEQ ID NO: 144554 - DNA, 122 bp, Homo sapiens
cttctcggcatcagcttttattagtggatcggggcgggggaggggggagatcggcagacacggacagcctctgaccctctggagttggtatgtgataagcagccctagcagtgccatgtatt

SEQ ID NO: 144555 - DNA, 122 bp, Homo sapiens
ctcccaggggcactcagcctatattcttcatctttagcatggggtcctgtcccagcaattcgtggagctcatcaacaagtgcaattcaatgcagtccgaataccgggagaagaacgtggagc

SEQ ID NO: 144556 - DNA, 122 bp, Homo sapiens
cggtggggtcgctctcgtaggcttccatgatggcctgcacctcctctacattgacctcatcgccggcaaagagctggtgcaggatgcggatcagatcagccagggtccgtggcttcagcact

SEQ ID NO: 144557 - DNA, 122 bp, Homo sapiens
actggcggcggagttgactgccaaccccggggccagaaccatcaagcctgggctctgctccgcccaaggaactgcctgctgccgaggtcagctggagcaaggggcctcaccccgggacacct

SEQ ID NO: 144558 - DNA, 122 bp, Homo sapiens
ccttccttcctttcttgggacggaagcctagctgggtggggggcgccaggctggagccttcgcaggggagcgggctcagtcatcaccctgctccccagagtgactcagcccccacgtcccca

SEQ ID NO: 144559 - DNA, 122 bp, Homo sapiens
ctaactcgcccaactcgcagaagctcagagggctggttcctgctctgccctcgagggcaccggatccccaccctcgggttaacagatccgccctcccggctgtccagcaacagagctcccgg

SEQ ID NO: 144560 - DNA, 122 bp, Homo sapiens
tgggataaaatttagctttcttctttgtagtgacccctactggcctataggaggctgaatcgtaagtggttaaaaagtaatggttttaattaaggagcagatttattttatgctaaaataac

SEQ ID NO: 144561 - DNA, 122 bp, Homo sapiens
gcagcagaggttttccaggttccggatgccaggggccggatggtgaactcctccctgcagcgaatcctcaaaagccactgctttgccagagagaagaaaggggatcaaagccagcgccaccg

SEQ ID NO: 144562 - DNA, 122 bp, Homo sapiens
acgtcttctagcaggtatgagggagacaactacaaacgccagaggctcagccgaaggcgtcgtcatcccagccgttcctgtagcaggggccgatctggatcccagcggcagatctcccttca

SEQ ID NO: 144563 - DNA, 122 bp, Homo sapiens
cagcttgtggccctgccacccacaaaggatcaggtacacagcaggcagccgtgtcacccccggccccttcaatgcaggtgaccaaggtgggtctctgggcctctgagggtggcatggggccg

SEQ ID NO: 144564 - DNA, 122 bp, Homo sapiens
gattaagtggtctagagtgaggcacagtccccatttttggagctccccagacgagtcaaacgtgctgccagggttgaagctcactctgcctagcaaaggatggtgcgtaacatttgctctga

SEQ ID NO: 144565 - DNA, 122 bp, Homo sapiens
ggccagcgcgcaggccttcctctggaattcctcccagcccaccgaacaggaacagggcggcgggctcacagccggtcctctgggcacctaacgccctgggtaccgactgctgtccacgctga

SEQ ID NO: 144566 - DNA, 122 bp, Homo sapiens
agtgtgacagcctctgcctggtcacaggtccttacctggtccagaccacatggttaactacgccttctctgatagccttaacccaattgtctctcattctccttcaacactcgttttataaa

SEQ ID NO: 144567 - DNA, 122 bp, Homo sapiens
ggtgggggagctgctgctgggggcctggtcggatggcgagagggggttggggatgggcagcggctagacttgtcaagctggagagaatctaccagaaactggagaggagaggctggcagggc

SEQ ID NO: 144568 - DNA, 122 bp, Homo sapiens
gttcagtgaatgaacgtgaggagcttagcagcagctgtgcgtggtgctggccttgtcacccggaagtccttgtcggtgaggactgagcatgtagaggtaagggttcctggagtgttggccct

SEQ ID NO: 144569 - DNA, 122 bp, Homo sapiens
ttccgggtccacagtgcagcctgaatgatcaacaggggaacgtgcgttcgccagggtccccgggggcagaggcacctctccctgggcggggccggggagattacgcaacacgggtcttagtt

SEQ ID NO: 144570 - DNA, 122 bp, Homo sapiens
tgactaccacagcggtgccctgggggtcctacttggggagccaaagctgagggcgttgggcgtgctgaggctgcgaccgccgacccgggcagtgaaggggacgtcgtcctctcgcggacggg

SEQ ID NO: 144571 - DNA, 122 bp, Homo sapiens
aaagtaccatttaataccgaagcgaaaacaagtactcagtaagaaaagcacagatgcaaacgcaaaattcatattttaaatatagttcgcaaactggttcccaactaactcttctcccaaaa

SEQ ID NO: 144572 - DNA, 122 bp, Homo sapiens
ggatgttataggacggcgcctgtgctgtgtgctggagagggccacaggcagtactgataacgccaaggttgcagtcagctaacatccattctcctatcagccaagggtctggcaatagccgg

SEQ ID NO: 144573 - DNA, 122 bp, Homo sapiens
actcctctcccaccctcaagtgcctcgtgaacccctctctccaggaggagggcatcatgacgcactagacctggctgcaggtggtgagtgaatgtagctgcgccctgagcagaggggagagg

SEQ ID NO: 144574 - DNA, 122 bp, Homo sapiens
atcacttgcttcctctaggtgtatgaaaaataatttcaagtttaacaaacacaaggaaaccgcagggtccatgtcaaagctgatgagctatttctgaaactcgtgcagaattgtggtttgtg

SEQ ID NO: 144575 - DNA, 122 bp, Homo sapiens
agctagcacaagtgtgccccaaagaaggaaacttgacttttgagagcaatttggcaaaatcggttaaggttgaagatgtgcatgtcctataactcagtcatttcacatctagagacacaaga

SEQ ID NO: 144576 - DNA, 122 bp, Homo sapiens
gcaacttacctaacaatcaatttgctaggtcaacaaccagcactgactctctcaattaaacgaaaacaacttagtctgtttgtcaaggcactccaggatatggcctcctcctgcctttccat

SEQ ID NO: 144577 - DNA, 122 bp, Homo sapiens
gagggagtttgacagagaggagaacaaatcgctgacaaagaaccttttacgtttcatcagcgttgttaggacgacaagcaggaatgtctcagataataactcccacttcaaagatttctcag

SEQ ID NO: 144578 - DNA, 122 bp, Homo sapiens
gacactaggcccagatcactagaaaaacagggctgcagatgagacactcagcccggcccccggaaagggaatctgactgagcagtggagggaaattcacacagattatcccggcccaacggc

SEQ ID NO: 144579 - DNA, 122 bp, Homo sapiens
cgcttggataacgttcttggtgggtaggggtcgcggggaatctctgcgggcccgggactgcggggacttggtccccggctccaccccatcatgtggctagccccggctccgcctctgtccca

SEQ ID NO: 144580 - DNA, 122 bp, Homo sapiens
acaactcacccggcgctggcggctgcgctggcagctggatcgacggactggctgggggtgcgaggcgaggccgccgggctgttttgaagctctgggctgggactgcgcgccctccctccacc

SEQ ID NO: 144581 - DNA, 122 bp, Homo sapiens
ctgatgggggctccccaagagcagaaatggggcagttaaagcacgacagccaccaaagcacgaaaggggctctgcacatcgggcaccacgagctcaactgcgtgagccgggctctgtgaagg

SEQ ID NO: 144582 - DNA, 122 bp, Homo sapiens
taagtgacatctttcaggtgctaaaaatgcagcctctggctgagtgcagtggctcatgcccgtaatctcagcactttgggaggccaagctgggcggatcacctgaggtcaggagttcgagac

SEQ ID NO: 144583 - DNA, 122 bp, Homo sapiens
ctcggtgcagctggaaaaaccgaagccgggggccggacgcgccgcccaccagccgttcctcggctagcactgcccattttgcccagggaattaacttggaagttttcacttcacttttcgca

SEQ ID NO: 144584 - DNA, 122 bp, Homo sapiens
tcaattaatgtggcattaaattcctcaggttttattgtaatcttattcattccccacagtcgatcttttctgagaaaattaaaaaaaaaatacattacaattgcacattggttctgatgtga

SEQ ID NO: 144585 - DNA, 122 bp, Homo sapiens
gcactctgagaacttactcttcatcctacagagatggctggaacaaaaaaacttcagaggcggtgcatgttggaaacatctgaagagaagtatgacaaagagaggacttttaagataagtga

SEQ ID NO: 144586 - DNA, 122 bp, Homo sapiens
ccgcgtgcttccctgtaatgagctcccagggcccgaggtgagcttcctcggctgctcacacggcagccgcgtggcagcaaagaacacggggacttttttcttccgtgcctgacagctcatta

SEQ ID NO: 144587 - DNA, 122 bp, Homo sapiens
agatccagaggaccgctccccaagcaaggacaacggcctcccaggcgctcattgtccacccgcaggagggtgcccgctgaccttcaagaggatggttctcacgcctctcgccctctccctca

SEQ ID NO: 144588 - DNA, 122 bp, Homo sapiens
gtccgctgcgctcacatctggtcaccgtccgcagcgctcacatctggtcaccgtccgctgcgctcacatctggccactgtccacagagctcacatctggccaccgtccccagcgctgtcaga

SEQ ID NO: 144589 - DNA, 122 bp, Homo sapiens
gaaaactgctgggctctggctttggacaagaagcccctgggtgactctgctccccttccccgcagccgagtgcggttccggaggctctggctctggggaggacggtgactgtgagcaggagc

SEQ ID NO: 144590 - DNA, 122 bp, Homo sapiens
caagtaatgttattgagtttacaactgaagttctgtaaaattgtttctagatcgacaccccgaggagcaaccctgcattattatatcaaccttttcccctcccctaaaccgtccccaaacct

SEQ ID NO: 144591 - DNA, 122 bp, Homo sapiens
gccacatggcctctgaggaatgtcagcagcaaggtcacgtgggcctctgctgcacccacccgcgagctgggacgtggcttccctgagcatacaggcaccttgccacctgggcacccccttgg

SEQ ID NO: 144592 - DNA, 122 bp, Homo sapiens
gctggcctcggggctgctcccaccacacgtcagcatcccggcctgagccaggagggactccgaggccgcctggtctccctgggccgggctccccacatggggctgcacccccatcccacagg

SEQ ID NO: 144593 - DNA, 122 bp, Homo sapiens
ctcccgcggtggcggaggttccagctgctgaggaggcctatctccagggcctctgatccccgggtttaatgtcctctccttcccgctgctgtgtgctctttcttctcccttctgtgctctca

SEQ ID NO: 144594 - DNA, 122 bp, Homo sapiens
aagggtgtatgggggggtggacctgctgccacttttgagtccaaaggtcaaggcctcccacgataggctgggcacagctctcccaggtctcttaataataatgtcatttctttgtgcctact

SEQ ID NO: 144595 - DNA, 122 bp, Homo sapiens
tcgggggaggcagggagccccactttccctcgcgctgcctcagtgcccggcctgcgtgcgcgcgccagcctggggtaggaaggtacctctgacatttcgctcctgcgacgcgcaggcaactt

SEQ ID NO: 144596 - DNA, 122 bp, Homo sapiens
cgccagtgggaagcggggagcagccgcgcggccggagtccggaggcgaggggaggtcggccgcaacttccccggtccaccttaagaggacgatgtagccagctcgcagcgctgaccttagaa

SEQ ID NO: 144597 - DNA, 122 bp, Homo sapiens
tattgatatgatgtcaccggctccttatgaaattaggtcagctcttgacattcaggtgcacggttaacatgtccataggtcagccctgatttctttattgagcagtttcagatgccatctaa

SEQ ID NO: 144598 - DNA, 122 bp, Homo sapiens
gggagcaaggctagcagaggagggtcggcatcgcctgtggttccgaagcccgttagtcatcgttgtagcgttatcaactgtggagacctcaaacttgattcttcccccacccctggacaaaa

SEQ ID NO: 144599 - DNA, 122 bp, Homo sapiens
cttacttaactattctggacatctgtctgtccctggaacagcctgatgtgggcagatggtcgtggaggctgaaaacccgggtgttggccttggcgtcaaagtttgctggttgagtgacctac

SEQ ID NO: 144600 - DNA, 122 bp, Homo sapiens
cactgaatgtcacttgaccttgataagaggccgcctgcacacagagcccagttaattctccgcacctcggttgtgtgcttccgaatgggctcactcccgtggtggtgtttgagagccaacaa

SEQ ID NO: 144601 - DNA, 122 bp, Homo sapiens
ggcctggagaccaggtggttcagactccataaactctgcccattctccagtgaggtggaccgaggcaacccctcaagtcctgtccctccccatagtgacggctctgtagccgctgctggcca

SEQ ID NO: 144602 - DNA, 122 bp, Homo sapiens
aaatactgtgcatttttctgagtttggatactggacaggctgtgccttacattagctgatcgagaataaataattgcagtttcaggaccactgatagcgccagttgtctcatacccggcaac

SEQ ID NO: 144603 - DNA, 122 bp, Homo sapiens
cagtctctagatccttgtcacatacattaccctaactttgttctataataagcacttatacgccccctttttttgtttgttttttgagacggattttcgctcttgttgcccaggctggagtg

SEQ ID NO: 144604 - DNA, 122 bp, Homo sapiens
ccctggcggcgctcacccacgcacgagcgccccccggcgcccacgtgcaggcggtagccgcggttgcagtggcaattgtaggagccgccggtgttcatgcagatgcccctccccgggccaca

SEQ ID NO: 144605 - DNA, 122 bp, Homo sapiens
ggaggcgcaacgtcggcggtcgctgagtatccagcccgcagcagtgacggccggcaggagcgtgctcttccccgcggctcgtgctctccaggagtccggagcatggtcctgggtcaccgttg

SEQ ID NO: 144606 - DNA, 122 bp, Homo sapiens
tctttacccctgaggttcatagattacacccttttctgtctgcccagaacatcccctccacgattctgaattccaactttgtcggaagattgctcccaaatatatcttctccacactcaggc

SEQ ID NO: 144607 - DNA, 122 bp, Homo sapiens
ttgaagctaggttaagtgcccaaggattcacagtgaggaagtagaaggctaacataagaacgaagtaattggccttcagaggctgcttggtaataagggaatattctaaggctgcatgttca

SEQ ID NO: 144608 - DNA, 122 bp, Homo sapiens
tccttacattaaatgccctctgtcaaacacagatctgttactgttctcctgattgagtagcgtccaaggcaagctggtaggaatttcagcatgtgtgtgcaacatcagcagatgcagtgcac

SEQ ID NO: 144609 - DNA, 122 bp, Homo sapiens
gacagagacaagagcaacaggcaaaggatccctgtgcaaaatgtgggaccgaatcccttccgcatccctacagagcacaccaccaggctccggtcccccgcgctggccgccaggcggaggtg

SEQ ID NO: 144610 - DNA, 122 bp, Homo sapiens
accactgaaaatgtccctactggagttaactctgcagtcctagtagacatatagtgtagccgttagtggaaactgacataaaccgccctagatttcaaaccggtctctgctttgtaggtagc

SEQ ID NO: 144611 - DNA, 122 bp, Homo sapiens
cctcccagcacgccccaccaccgccaacacacatggaggggtttgaacttttccaccttccggacctctgcagtccgtcgcaggacgcccaaaccacaggccggacacagatgaagccagac

SEQ ID NO: 144612 - DNA, 122 bp, Homo sapiens
tacgtcttgttctccctcaccggtgttgctcagtggcacagcttccaggggaagacaacacgtgtttttcaagaaaagttaagtggccattaccgagcagagtcctaaccctgtgaaacccg

SEQ ID NO: 144613 - DNA, 122 bp, Homo sapiens
gctgcctctcaagccatgctgggcccgataggctcagctagtcgtgtatttacccatatccgggctagagaggaaaagagaaaagtttcatttaaacctgaactaaaaactttcaccatgaa

SEQ ID NO: 144614 - DNA, 122 bp, Homo sapiens
aattttatactgttcattctttcccactttgggataatctattatagttggatccaggcacgcactaaaggctgatacttccatgaagaatgtgcaatttgtactgttaagtttgtgatgag

SEQ ID NO: 144615 - DNA, 122 bp, Homo sapiens
ctcttcctttcctgtgcaccccaccctgtaacagcaccaaccaccaggattggacatcaccgaggaacagcgggattgcctccccgaatgcctccctgggaggcacactgattgcccacccc

SEQ ID NO: 144616 - DNA, 122 bp, Homo sapiens
cgcggcctcagggggcctggggctcgggctggcgctgggcgcggggggcggtggcggcagcggtagtggcagcggcggtggctccagccccgcgttcccgggcaccttctgcctgcctagcc

SEQ ID NO: 144617 - DNA, 122 bp, Homo sapiens
ctgggcagggctcgcgaggccacggctcggagcccagaccggggcccaggaggcgagcgccgttttggagaggagcctgcctgctctgcctgccagcgtgaccccacgaggcctcgggcggg

SEQ ID NO: 144618 - DNA, 122 bp, Homo sapiens
ggtggtgctggaggagaagctgaccctcaaacagcagtatgatgaactggaggctgagtacgacagcctcaaacaggagctggagcagctcaaagaggtgagttgcctgtcacctctccctt

SEQ ID NO: 144619 - DNA, 122 bp, Homo sapiens
agtacttccccggtggccacgaggacgccaagccggagatgaggctgggaagggggacgacggggccgcctagagcgaccaagactagggaactagggacatcctggccccctcctctagcc

SEQ ID NO: 144620 - DNA, 122 bp, Homo sapiens
cactgaggggaatgaatgcagaccgctgcagccagagggaggcgggacggtgcccaggggcggagacgaccaagcgcccatactggggctcggagtgcagcctccagtccctccctgtgcac

SEQ ID NO: 144621 - DNA, 122 bp, Homo sapiens
acccgcccgccgccgtctggtgaccacgggcgggctgggaacgcgcaggcactgcgggtgcgggaaagccaaggactgcccccgcaccaccagctcgccagccacacgtgttccaagggagg

SEQ ID NO: 144622 - DNA, 122 bp, Homo sapiens
tgcggccgccgcggcattcggggaatctgcagggcaggtaggtggggccgccgaggctgacgtccggggagccgagccgcctccttgccttctccgcgggccgctcttttagcctgcgcggc

SEQ ID NO: 144623 - DNA, 122 bp, Homo sapiens
agccagcaagttggcagcgacccgtggggtgggagccatgaggcaaggagggaccagccacgtgcactgtgcgaggagagccgcaagtgagccagcccttccagtctaacgtgtgagccaca

SEQ ID NO: 144624 - DNA, 122 bp, Homo sapiens
gggaagtcctttgttaaaaagtcaaggatggatagaagagccttggcatcagaaaggagacgggagtggagtaagaacactgcaaacacggtaaactgtgctgatcctcttcattaccatgg

SEQ ID NO: 144625 - DNA, 122 bp, Homo sapiens
tgtgggactgtaacccatagagtttcttagatgctattggagagataaaaggattggcaccgaggattcaagagaacaatggaatcaacactgaatgggaatcaaataatctgtgaagtcct

SEQ ID NO: 144626 - DNA, 122 bp, Homo sapiens
gctgagtgcggctgctaccacaaacacttcattagtcagaaagtgcctccgtaggatcaccggtaggatcagaaatgaactcaaagcaccaaaagaaaatatttttcgtgtaatatatttgg

SEQ ID NO: 144627 - DNA, 122 bp, Homo sapiens
cttcttaagaaggtgattgtctgttcatagactaggagtcctgccctggggttcacccagcgttggagcttttctccatgaagttaaggacattaataagatttttctctaccaaagcagaa

SEQ ID NO: 144628 - DNA, 122 bp, Homo sapiens
ctgaggccgggatctcataggccccgcccctatttcccaatctagactccgcccactactcggagccccgcccagcggcacatcacagagaggctttaatgtcagacattaaaatgagtttg

SEQ ID NO: 144629 - DNA, 122 bp, Homo sapiens
tgacatgtagcttaggaaagcctggccagcatatttcttagaccacctctccccagtatccgttgaatctgctgagcttgggcaaggattaaactgtgctcacttgagtcagttctcagaga

SEQ ID NO: 144630 - DNA, 122 bp, Homo sapiens
agaaaaaaaaagttcgtttttaaagtgcttatcacagtcaggttataaatggctaaagggcggtcacttgacagtgtccaagaggaaacctggaatgatgttaatagaaatagtggttgaac

SEQ ID NO: 144631 - DNA, 122 bp, Homo sapiens
cagaatgtggcagcggagagtacctgaccgacctacaaggccccagtggctgcaagaggccgcggtccaccgctccctttccgcccaccgggaggctgcaaaggaagggccaaggccagcga

SEQ ID NO: 144632 - DNA, 122 bp, Homo sapiens
ccctctcgccccccggcccgacccgaccggccccgggccccgcggctccacgcccagccccgtatgcaaatgacctggtccctcagccaatggccggcctagccgggcccgccctaccgcaa

SEQ ID NO: 144633 - DNA, 122 bp, Homo sapiens
gctcgggttaatatatgtcgtcagaggctcctcacgccaatcccggggcggcaggggcggcgcctcgagctctcggcaataaaactttttgatgttcacgttgctaattgccgaggtcctct

SEQ ID NO: 144634 - DNA, 122 bp, Homo sapiens
cccaggccgagggcgatggtttctggtgggaaggcccaggccgagggcgatggtttctgccgggacggccgaggccgagggcggtggtttctgccgggacggcccagacggaagggatgcgg

SEQ ID NO: 144635 - DNA, 122 bp, Homo sapiens
accattaacatgcagcctacatttccaggctaaagatgtattccccaattcaatctgggccgccacaaagacagacagaaagcgcagggatttctttcttttgcatcctagtgcaaaccaaa

SEQ ID NO: 144636 - DNA, 122 bp, Homo sapiens
cagatagtggtgtaggctgtgcactgcacaaaagcaccacatctagaggggcatgattaacgtcacagacatcagatttattgtgacaatattccagtagatggcagtgtactaagggaggg

SEQ ID NO: 144637 - DNA, 122 bp, Homo sapiens
cccgggagcctggcctcgaagctcaggcccgtgaacagactccaactacaacagcaccggcgacttccaaagagcagttcagcattttgagatgagcttccggaagccgacaggcggcggaa

SEQ ID NO: 144638 - DNA, 122 bp, Homo sapiens
acgaagtcgtcgtccacccacagcacgtacttggtggttacttgagacacggccaggttccggcctgcgaaccagccctggcagaaaggtgtgtgtggttggggaggctgcagaaataggac

SEQ ID NO: 144639 - DNA, 122 bp, Homo sapiens
cccgccccttgaaccacgactgctcctcgaggtgatgacagctggagctggctgacaaaacggagcatggctaatctgcctcaagccaggcacaagaaagacatcttggtagaaatttgatg

SEQ ID NO: 144640 - DNA, 122 bp, Homo sapiens
tcccatattcacactttctaactcgtaagctccgacagcgcctgcattttctttgggagccgcttggaggttcattaatatcattagcatttaaccccctccctcttcccatcccctccccg

SEQ ID NO: 144641 - DNA, 122 bp, Homo sapiens
cgagatgtcattcatcaaaaagtagcgcccgctcgtcattaaggtacgaatgacgctgttcgaataatcatttattgtaacaggtttataagcaaataaatacaccctcctgtcagtgggta

SEQ ID NO: 144642 - DNA, 122 bp, Homo sapiens
actgctttcatgagctgtaacactcacgatgatggtctgcagcttcgctcctgaagccagcgagaccacaaacccactgggaggaacgagcaagtctagacgcgccaccttaagagctgtaa

SEQ ID NO: 144643 - DNA, 122 bp, Homo sapiens
agttcccgccccctcgtctagttggaaaccgaggaggcggtctcctccggcctgttagcccgcctcgcccaccctcccctcaaatcacctccacactcgcgcatgcgtgtcagtgcaggatg

SEQ ID NO: 144644 - DNA, 122 bp, Homo sapiens
tgtagtttgttcttccccttctctaataccttgtttgagatggagatactgattaggacacgccacagtgcctggccgatggtgtttcttctgagtactgagcattttcacaaattaaaatt

SEQ ID NO: 144645 - DNA, 122 bp, Homo sapiens
gtccctgcctcgctcgctagtctccaccttttattttgaccggtccgatggcgacaggctcgcactaggacccaggcgccagagtgcctccgtctgtcctgtaggttcattcaatctcccat

SEQ ID NO: 144646 - DNA, 122 bp, Homo sapiens
gcctgggctctactacctgcacctgccgccccacccctgcatcccgctccgcacttcccgcgcataggtttggccaggccctccctattgaggcacctgttctccaagacagagccgctgtg

SEQ ID NO: 144647 - DNA, 122 bp, Homo sapiens
catttgttgaatgattcatctccacaatatcaacgcaattaagagaaatctggcctttcacgtgaatttatgatacaagcaaaataagcacaacaaattttaaagctctttagtcctctgtc

SEQ ID NO: 144648 - DNA, 122 bp, Homo sapiens
ccttttcatctgagatgtccatgactggctcaagtgaaccacagtgtcaggagaggggcacggaagctgcaccctaaattccccgggacctgtggcaggccttcctggtgacctctgccttc

SEQ ID NO: 144649 - DNA, 122 bp, Homo sapiens
gtgctgggggaagctgccgctggcctcagcttccccatctgtgagatcgggctccatgcccgtcttgttggactcatcaagagacccatggggaggaaagagcttgcaaggagagcagctaa

SEQ ID NO: 144650 - DNA, 122 bp, Homo sapiens
ccgtctcagggatgctccctgcctggccggccgtctgtgttactgtcccagcaacccagccgtcaaagagccctttcatgcccgcctgggcgcccgtggcttcctctgggctgtccaagagc

SEQ ID NO: 144651 - DNA, 122 bp, Homo sapiens
aatgtgtgctccacgccggctcctgccgatgttaacatttttcaggcactgagcgggaatcgtctgtatctgagagattgggaagacctccgttgtgagcccggccctgcttgttggcttgt

SEQ ID NO: 144652 - DNA, 122 bp, Homo sapiens
gggaggtgaggagcatctctgcctggctgtcccgtctgggaagtgaggagtgcctctgcccgctgccccgactgggaagagaggagcgcctttgcccgacctcgaccccatctgggaactga

SEQ ID NO: 144653 - DNA, 122 bp, Homo sapiens
gggccggtacgtgacgcggggcatgcacgtggcctgggagtgtgcttttcgggacaggtgcgggggccgccgcgcgcgcaaaggcgcagacgcacgcgtgcgggcaccgggcaccgtcggcc

SEQ ID NO: 144654 - DNA, 122 bp, Homo sapiens
atttttgccaagtgtggattttggtatctccttccttttgctttgcctaactccctgttccggtgtcccattctttcccccaactctaccttcatcatcacagatctcccctctgccttatg

SEQ ID NO: 144655 - DNA, 122 bp, Homo sapiens
taggggtaaggcatgctcaaatttgagaaccactgctctaactacttatgtgggtcttaacgcttgatatctggagtttgaatgtcttaggatgttttcagatgcaagtggcaggaaaccaa

SEQ ID NO: 144656 - DNA, 122 bp, Homo sapiens
tcgtgctcgccaagtcacggcctgaggaatcaaagcaacaaatcacagggtgagcatcttcgcggccagccgctcatgtccacagctccctggacgcttctgcacatttgtcacgtttggac

SEQ ID NO: 144657 - DNA, 122 bp, Homo sapiens
ccgtcttgttgagggagacgctgggtgcaaaggtgtaccgcggagggtccgcggcgggggcggaggcctgggcagagacacagccgggcagggcgggcgggcagggtaaggtgggggcctgg

SEQ ID NO: 144658 - DNA, 122 bp, Homo sapiens
agaaggctcctctggtctctccctcctctgagcgcgggacctcggcggacaccctaatcccgaaacactcctctctgggactgcgcacttgccagcacgacagccaactccgcctcagagga

SEQ ID NO: 144659 - DNA, 122 bp, Homo sapiens
gagcctcgcgcttggtcgcgtggggcggtgcgtgagtgcttagctcacaggctccgggaccgcgctcgggggcgggtctatagtgggaaggggacgcgcgccctgcggcccggcctctagtc

SEQ ID NO: 144660 - DNA, 122 bp, Homo sapiens
ttttcttcctaagatttgcagaacagatgcctctgagacagcagcagggcactctgacctcggaaagcagcccgcggggccgcacataatttcaggcaccggcaggtgagtgggaggcgggg

SEQ ID NO: 144661 - DNA, 122 bp, Homo sapiens
gccgcaccttgattcagagctgagtagggcactatgcgttggaaggggtagaaaagatcacgccataggctctgaagcaagcctttaatcccttgctattcaaactgtagtctgtggaccag

SEQ ID NO: 144662 - DNA, 122 bp, Homo sapiens
atcatgccccctgctcctcccactactgctttgcgcctgcgcggaggctcggggagtcggcgccatgaccccatcgaggcttccctggttgcttagctgggtctcggccacggcgtggagag

SEQ ID NO: 144663 - DNA, 122 bp, Homo sapiens
tcacttccccaatcctcctgccctcctctcccagtctccccaccttctgtcccctcaacccgcactggacactcctcccaggacacttcccgtgtatgtgcctgagtgttcgcacacgtagg

SEQ ID NO: 144664 - DNA, 122 bp, Homo sapiens
cgggagagcggcgcgggtgagtgggagcggcgggtgtgcgcgagtgcgagtgtgcgagcgcgccggtggcgctgcccctgcccgctccctcccgctcgtgcagctccggcatcagtttcggg

SEQ ID NO: 144665 - DNA, 122 bp, Homo sapiens
cttgagaagtcaaggggctgcaggccggggtgggatacacacaccctggagctctgtgcccggtcgatgtccgctttgggggcggaggccctccaggggtagccgtgaaatgcccagggtgg

SEQ ID NO: 144666 - DNA, 122 bp, Homo sapiens
tcggctaccccgagtggagcgccggggcggcaggcgtgggatggctgcgggtggcggggccggcggagagggagctgcaccgggcggggcactgggactgtggcgggcacccgcgccggggg

SEQ ID NO: 144667 - DNA, 122 bp, Homo sapiens
gttttctaggaagaaaggggttggaccctcccctctttaagctgggtggggtccgaatcccgtgcttctttcacttcctgagccgggctggctgggtgggaacaggctccttgccgcctccc

SEQ ID NO: 144668 - DNA, 122 bp, Homo sapiens
tctgttgttacgcatgtctgttgctacacgtgtctgttgttgcgcatgcgccttgctgcccgccttctgtccacacacagctctgcaaggagagtgtcttcattctttccgccatcttgatt

SEQ ID NO: 144669 - DNA, 122 bp, Homo sapiens
aggctctgcttcaaattaggacttaactgtcagatacttgctcctgggtgagcttcttgtcgctctgtaccaggatgaacatgtagtggcagatcatatctgagaagaagcagatgataaac

SEQ ID NO: 144670 - DNA, 122 bp, Homo sapiens
ggctggggccaccgtctcatctgaggcctcacgggacaggatcctcccaggctccctccacgctgcaagggcctccccacgggctgctggcatccttagcacagggagctggtggtcagaga

SEQ ID NO: 144671 - DNA, 122 bp, Homo sapiens
caaacaacaaacaaaaacactgattaaaccgtgaaagagaacaaaatgacttcttcaaatcgtgcttgtttgttggtctgaggcgccttttacatgtatttcagggttttttgctgtattcc

SEQ ID NO: 144672 - DNA, 122 bp, Homo sapiens
ctcaccgcggagggggaaggaaccactatggaggctgcactccaacgtcctcccgaattccgcagcttctgggcttgtcttggtctagaatcctcagaaaaccatgactcaaggccaaatcc

SEQ ID NO: 144673 - DNA, 122 bp, Homo sapiens
tccacatgtaaattatattatctcattggccagtggtgtgtggtctgaaggggtaaaacccggaggcttatggtttaggatcttctaggataatgtgccttcagaaaatcgaagattaatat

SEQ ID NO: 144674 - DNA, 122 bp, Homo sapiens
ccgaggctctaggccgcgaggggcgggtgcaatggcggaggaacaggtgaaccgcagcgccggcctggcccccgactgtgaggcctcggcgactgcagaaactacggtttcctcagtgggga

SEQ ID NO: 144675 - DNA, 122 bp, Homo sapiens
tacctttttattggctactcgatgacttttacagcctgtcactgatacaggaagagacagcggagagcctgggagaactacattattaattaatggagcaacccctcgtgaagattcagaag

SEQ ID NO: 144676 - DNA, 122 bp, Homo sapiens
aacagaaggggcacctgcttgccaggtggaggcctgggcactggcagggttctgccctcccgactgagcaggggctcccgaggtgactaagcaggctctctgggtagtgctcccgccctcac

SEQ ID NO: 144677 - DNA, 122 bp, Homo sapiens
tggatggagacacagccaaatcatatcaagtgagatcagcgtgggtatgaatctctactccgatttatcgctaactatgtaacccttggcagataacaccaactctaacaatctgttttatc

SEQ ID NO: 144678 - DNA, 122 bp, Homo sapiens
acagagatgtccaccttcatcccttgcaactattggaagccaaagaatgggagcaaaccacgcgatgggcgttgggaagcaccgtaattacagggttgggaggcaggatgcctgcgctgagg

SEQ ID NO: 144679 - DNA, 122 bp, Homo sapiens
cacacccactccggtaatgattccatcttcaggctccatctcaacaggatctttcccacacggatggatcaatcataagtcaatctgtcttctttaaagaaaatccttaacccaacctcacc

SEQ ID NO: 144680 - DNA, 122 bp, Homo sapiens
ctaagcaagggaagatttggttcattcctcctttcctctgcttcccgacaagggcgagaacgtgatccaggaggcagtatctgtgctgcagattccagcttgccctggaataggctgttcat

SEQ ID NO: 144681 - DNA, 122 bp, Homo sapiens
ccttccttgcgcagcaggagtcggaggtagcgggagacgtcgcggccggcaatgtccacccgcatgatggagtgaggcatggcaaagccctcatagatgggcacagcatgagtgaccccgtc

SEQ ID NO: 144682 - DNA, 122 bp, Homo sapiens
ctgcccggagctcgccctcggggaaggacggacgcctcgcgacggccgcggacgcaccagcgcaagtggttccttggaatctccccatgtaattccacatgagattaaatttttaaagcgcc

SEQ ID NO: 144683 - DNA, 122 bp, Homo sapiens
tcttggtaggggggtgcattcttctgcctcccataggggtattgtctgcttcaactgactcggctttccccaattctgctgggcagctggctttcttttcttttttcttttttttggaacgg

SEQ ID NO: 144684 - DNA, 122 bp, Homo sapiens
gcgacatgcgagtgctgaggaggaaccctggacgccaccatttcacatggaagaggcaggcgacatgcaagtgctggagaggaaccccggacgccaccattacacatggaagaggcaggcga

SEQ ID NO: 144685 - DNA, 122 bp, Homo sapiens
gaaccacagttgtgttgtttaaagctcacatttctttctgtcaccacagagattggcctacggtttctgttttgagggtgctgttcaataaagctgtgtacactaaatgtctttcctctctg

SEQ ID NO: 144686 - DNA, 122 bp, Homo sapiens
tagaagtctggggacaccaggtaatacgaccttcctatacttttgtattactttaatttccgcaaatcacaagaagaaacttttgaacaccttttttaagtctgtacaggatgctgccatgt

SEQ ID NO: 144687 - DNA, 122 bp, Homo sapiens
gaggtggcgggtggtctcactggactgaattcctgccacctcccacctattcagaaagcccgtccacaccctggccaaacgcgtaccagcgtcagcctgacgggtggcccagtcctcgccgg

SEQ ID NO: 144688 - DNA, 122 bp, Homo sapiens
acactctcggctcccaaaccgctctttccctccctctgccggccacgcctcttataggcccggaagtttaccccaccctgcaccgtgattcaccggaagcgctctagggaaccctggagctt

SEQ ID NO: 144689 - DNA, 122 bp, Homo sapiens
tccagcctgggcaagattgagcactgagtgagagagactccgctggcaatcccggcacctcgagaggcccaggcgggcagatcactcgcagtcaggagctggagaccagccaggccaacacg

SEQ ID NO: 144690 - DNA, 122 bp, Homo sapiens
gaagctaattgaggatgatgaaaactcccagtgtaaaattactattgttggaactggtgccgtaggcatggcttgtgctattagtatcttactgaaggtgagtgagaagcccatcctgtggc

SEQ ID NO: 144691 - DNA, 122 bp, Homo sapiens
cggccacccgctcccagcctgacggatggcccgagccatccatctacattatgtcatgggcggtgagcctcctcctccgtccagtccgtctggccgtccaggaccagccatggccttggccg

SEQ ID NO: 144692 - DNA, 122 bp, Homo sapiens
gcaacagcaatgcaccgcggggccgcccgcctctctcggcccccacacccgccaccggcccgggagcagctgtccagccctcctgatgcagggcctccaaagggatcctaccacaccatcca

SEQ ID NO: 144693 - DNA, 122 bp, Homo sapiens
tgcgtgcctggatgcgctgtgcctgaggaggagcctggagccatcggggctcaccctgggcggcggctgctgcgttcctgggcagcagccactgtctagtcttgtgcaggaacaggcctggg

SEQ ID NO: 144694 - DNA, 122 bp, Homo sapiens
acatttaaggttattattgcatatcattgtgacttatttccttgagtatgtgttaatctgcgagaagacagagggcctaaattgtgtatgttttccttcagtatgatttgagttcgttgctt

SEQ ID NO: 144695 - DNA, 122 bp, Homo sapiens
cccaggttcaagcgattctctttgccttagtctcccaagtagctggttttataccacgcccggctattttttttttttttttttgcgacggagtctctgtcacccaagctggagtacggtgg

SEQ ID NO: 144696 - DNA, 122 bp, Homo sapiens
acagttatagattatataggaaaacccagctaatcagtttcctctcacccaatctttacacgtaatatttcacccatataaaagtgcactctgaaacaatagttttgtaaaagaaaaggtta

SEQ ID NO: 144697 - DNA, 122 bp, Homo sapiens
tctggatcccgtgcgtgaacatgtcggccgtgtacaggtgcttgctgtgcgggtcctgtccgtcctcgccgtctgccgcggggggcccgtccgccgccgccgccgccgcctcctgggcccgg

SEQ ID NO: 144698 - DNA, 122 bp, Homo sapiens
ctgggtgccgtggagcaaggggtggcgctcgtggaggaggctcgggggcacaggagcccacggaggggttgggaggctcaggcatggcgggctgcaggtcccgagccctgccccacgggaag

SEQ ID NO: 144699 - DNA, 122 bp, Homo sapiens
aggaatgacctatctattccaagcttttgaaaacacagaacctgcagatctgaatgcctgcgggctgtggtgcacggcagtcatcccggcccctgtgctcccctcagactcgagtctcgcag

SEQ ID NO: 144700 - DNA, 122 bp, Homo sapiens
aagcaatgccatcttcaggaacaaaactcctgcataacgaagcccaggtttctgtgttttcgtgggtgttcccgggcaccttcgggcaggtggccccaggcgatgttgtgtgtctctcctgg

SEQ ID NO: 144701 - DNA, 122 bp, Homo sapiens
accacgagctcaccgggaggaatgaacaactccagacgcgctgccttaagagctactcaccgcaaacgtctgcagcttcactcctgagccagcgagaccacaaacccaccagaaggaagaaa

SEQ ID NO: 144702 - DNA, 122 bp, Homo sapiens
ccgaagccgtcgttagcgcccgggcggcggcggccactcgaaccccgtttccgccaagcgcgctgcaacctgcggggcgagttcgttttgttttgccaaaatcatttggggacttctttgtc

SEQ ID NO: 144703 - DNA, 122 bp, Homo sapiens
ttttaacaaaatatgtaactataatacaaggcaaagtgaaattcattctaatgacattctcggagaggagctacaggaggacagagatttgagatccttaaaatttagtgtatcacatggaa

SEQ ID NO: 144704 - DNA, 122 bp, Homo sapiens
acctttgccaatgccttatctaccactgtcttttaaatctactccatgtaaaatggggaacgattcaaaacctcttttatattgttgtgcctcagaaaaaaatggaatctttggaatgtgct

SEQ ID NO: 144705 - DNA, 122 bp, Homo sapiens
caaacctaaggcccgttggccttttggtttttggtgcattttcccgccctcgcgtctgggcgttctgtcctggagacaggctccagcacccgggcggtgtgctgcagaggctggcggcgtga

SEQ ID NO: 144706 - DNA, 122 bp, Homo sapiens
aagtggcaagaagaggaagaacaatgctttttatgaatcttccaagggcttgtatccagccgagtgaggagtgggtttgctctgagaatggcatggacggcagcaggctgggaaatgagccc

SEQ ID NO: 144707 - DNA, 122 bp, Homo sapiens
cacatctggatcagatgtgcaggcatttcaacatggcagtctccatccagccacggtctgcggacagcgttcaggctccagccttgaccctgggcaccttgaccctcacggggtacgtggcc

SEQ ID NO: 144708 - DNA, 122 bp, Homo sapiens
tagctttcctctaaattgctcctttgcttttaaagaaatggtagtcctcagtggagccaacgctgctcttttcatactaattgttattgtcactctaaggaacttgtactccacagtgatgt

SEQ ID NO: 144709 - DNA, 122 bp, Homo sapiens
cccctttcaggcgcagtatgaacccttccggtgccagcggccgcgctacattcacaggcgcgctcggggcgcacaaagggtctccgcgcttcaccgccatctggccacaaatctcatcagcg

SEQ ID NO: 144710 - DNA, 122 bp, Homo sapiens
gccatgctgtctcatttcagcctgtgtgccagcaccctgacggtgtcctcggggagcagccgcgggtccctagcctccagccgtgggtctctggcctccagccggggctccctgagctcggt

SEQ ID NO: 144711 - DNA, 122 bp, Homo sapiens
aggggtcccagagctccgagaagacatggctgggcaccgttttcggcccggcggaatcagcgacggccgcctgcagcctctctgactggctttcctggacaggaggcgatttctgagccgaa

SEQ ID NO: 144712 - DNA, 122 bp, Homo sapiens
cacaacacaaaattgtacttctatttttttttctgtctatagaattaaaataaaaagcagcgaataatatagttgccgcaaaatatggtttcagaaatgcaaaaccaaccttctcgatgagc

SEQ ID NO: 144713 - DNA, 122 bp, Homo sapiens
gagagcccgcgggtggccacacccccggcccgccccagcgcgcgccccgggaaccgcgcccggcccccgccaccgcttaggcccgcccgcgctcaccatggacaggtaaacgtaggaggcgt

SEQ ID NO: 144714 - DNA, 122 bp, Homo sapiens
ggggcctgagcttacccggccaggcccccaaacaggaacttgacggacttaggggaggtacggggcttcccgtctatcccgccggccccggcactcgccgtcgccgccatcgccactcaatg

SEQ ID NO: 144715 - DNA, 122 bp, Homo sapiens
gtggcgagagaatgaagaaaccaatcgcccgggagaagcatgaggtggcagtgtggcactcggtttagagggcttcggccggcggtggccccatggacagccctgctggcactgggcctgcc

SEQ ID NO: 144716 - DNA, 122 bp, Homo sapiens
ggtgtagacgcggcaggtctattccgccgcttgggcaaacaggcgggttagtgcactccacgcagtccaggctccagggatctgtgagtcctggggagctttttgtttgcgcaaactcttgc

SEQ ID NO: 144717 - DNA, 122 bp, Homo sapiens
agcccagggagggacccgtccacggcggagaggctgcccgaggaccggaataaaccctgccgcctggactccgcctgtgtccgtctgtctcactcccgttctccgaaggcgggacgccaccg

SEQ ID NO: 144718 - DNA, 122 bp, Homo sapiens
actggggggcagggaggcatagcccccatagccaggccactccactctgccacccaccctcgacccagctgactgtcagagcttggcaggcccaaaatgatattgattccagagcttttggt

SEQ ID NO: 144719 - DNA, 122 bp, Homo sapiens
gccgacgggattctggggccacgggggtctgggatgcagtcaagcggggtccccactctccggcctcgccgccgggccctccccggccctgagaggagggggcgggccacgggacctgggac

SEQ ID NO: 144720 - DNA, 122 bp, Homo sapiens
gacaggagcatgggctggaggctagggctgttgatgttgatttggaaggttggatgcagccgaagctttgtgaatgcatctgctgtcagagggaaggagtagaggaagaaagggaagggtga

SEQ ID NO: 144721 - DNA, 122 bp, Homo sapiens
ctgcagacccagagcaatgcccgagcagagaagggagatgaagaacagcgggacagaagacggcaggctcgcccccggccttgcccagtgctaaggtgcctggggcaaatggctttcccctt

SEQ ID NO: 144722 - DNA, 122 bp, Homo sapiens
cgcgcttttgcagggtgtgtgttcgttctcacctgcagaaggaggcggggactgcacggacgctcatgtccctcccagagctggagcttatgggagcctccagcaggattcaggccacagcc

SEQ ID NO: 144723 - DNA, 122 bp, Homo sapiens
ataccctatgtgtatgttataactaatacatgggtgccccatacacagggcttacaatgtcggagtgataagagtaacaagaaattgtttagacctcataaaaactaagtgtgattgggcgg

SEQ ID NO: 144724 - DNA, 122 bp, Homo sapiens
tctcctgaccacgcccctcatggccccgccctatgcctcgcccctggccctcgcgccccgcggctccctccgccgagtccaggcccgacgcgcctgcgccctctgaacacgcccctccccgc

SEQ ID NO: 144725 - DNA, 122 bp, Homo sapiens
cacccagcctcctgtgaacaaagcatcacaacagtcagcatcacaaacccccatcagccccgtgcagttgcagttgtgctggaccagagcccatcagcctggccttcgggctctcctccaca

SEQ ID NO: 144726 - DNA, 122 bp, Homo sapiens
ttcctgagccgacggctaaaaagctccatcaaacgaacgaagtcacaacccaaacttgaccggaccagcagctttcgccagatcctgcctcgcttccgaagtgctgaccatgaccggtacag

SEQ ID NO: 144727 - DNA, 122 bp, Homo sapiens
gcggtcggtcggcgcctgttctcgggctgtttggcgggtgagtgtctcgccggtgtaccccgcacaagttgtgggccggccctcccgaggagctgcgggggacgcgccgctcgtcccatact

SEQ ID NO: 144728 - DNA, 122 bp, Homo sapiens
cggctctcggttcgccccaagcccccccacaccattacccgtgatcagttacgcatcccccggggccatgcaagagcaatcacatgatccagagagatttgggagcgagggggtggagaact

SEQ ID NO: 144729 - DNA, 122 bp, Homo sapiens
cctgccccaggatttcaaaacggggtatccctgaggagccagcccagctcaggagggcggcgtgttaggcagagccagcttaccacactcgtgcacactgtgggtgaggcagctggtggaaa

SEQ ID NO: 144730 - DNA, 122 bp, Homo sapiens
gcccaacctaatcacaagaaaacattggaaaagggaggaaaagagtggatcagaccgatgcgatgtgatgatttgacccactgttgctgtctttgaagatggtggcaaggccttggagctaa

SEQ ID NO: 144731 - DNA, 122 bp, Homo sapiens
cctctgcaggccagatctgactcccgcacccctgcctgtttttctaaataaagacttacacgggagagatagctcaattccagcactttgggaggctgaggcaggcagatcacgaggtcagg

SEQ ID NO: 144732 - DNA, 122 bp, Homo sapiens
cgattcattctcccgaagagaataaacggagccatttccaggctggcagcaggctgggggcgcagcgcacgccggagagctggaggaggggacccgatcccacctccctcagccccttcccg

SEQ ID NO: 144733 - DNA, 122 bp, Homo sapiens
ccagttttcccgcgaaaacgctgccgcgcagggggtcagaccatctggaccaaggggggccgagcgaggcctacttctggtttacgcacgggcgctgaaagaagcggcactgtccccccctg

SEQ ID NO: 144734 - DNA, 122 bp, Homo sapiens
gcttccagaaggctgcaaatgggaattccagacaaacccacttgggtgaatcccagcacgcgggctgcggcgtagggggagagctcctcacgcggctcagagtgtagcccaggcccgcagag

SEQ ID NO: 144735 - DNA, 122 bp, Homo sapiens
gagtcaagtgagcacacagcggcacagctcctttaaagacacgctgggaatctgtccctacgttgaaatgtacaaccagcacctctctaggcacacaccccagggaaactccctgagtgcag

SEQ ID NO: 144736 - DNA, 122 bp, Homo sapiens
actggtcaaactttttcgtgaatgggctgacactggggggccagaaatatactgtggtcccggactcactgctgcaggatggggaattgaccgcggatcttcatgtgaagagcatcggtgga

SEQ ID NO: 144737 - DNA, 122 bp, Homo sapiens
gatgatgacctggctatcaggcagcttgtagctcttctccagggaggagctggaggcccccgtggccatctcctgctcgaagtccagggcgatgtaacacggcttctccttgatgtcatgca

SEQ ID NO: 144738 - DNA, 122 bp, Homo sapiens
ggggggcagggagagagaggggagggcccctcgggttcctcgtcctcttcttttccagcccgaccctcctccgtgtcttcactggacgttgtcgttggtcaaagtggctttaatttgggata

SEQ ID NO: 144739 - DNA, 122 bp, Homo sapiens
cgggtcactcaaggggtctgtcttgctgtgtctccacgcccgcaggaatctctccttcaacgctctggagtctctctcctggaaaactgtgcagggcctctccttacaggaactgtgagtgg

SEQ ID NO: 144740 - DNA, 122 bp, Homo sapiens
tcgttctggaggtgatgggacgacactgtgggtacgtacctgcggtgggtccggtggacgcggttcaggtgggggaccctcagcatcatctccctgaggctgcaccccacatcctgaatgct

SEQ ID NO: 144741 - DNA, 122 bp, Homo sapiens
tcagaaggcagaggtgggaggatagcttgagcccaggctacagtgagctgttttccccaccgtactccagcctgggtgaaaagtgagaccctgtctcaaaaagaaacaaatatataaataaa

SEQ ID NO: 144742 - DNA, 122 bp, Homo sapiens
gacggagccaggggaggcctggccacgcatcacttagtgacgggaatacgtcctgagaaacgcgttgttaggcgactccatcattgtgccagcctcacagagtgtcctgtacacccacgcgg

SEQ ID NO: 144743 - DNA, 122 bp, Homo sapiens
tgctaaatagagtaacagttaaatgtatgtgtacactcttcccaaatgccaagagtgcagcggtggggtgagattcagatattcatttatttctaagtctgtagttaacatttatgttccct

SEQ ID NO: 144744 - DNA, 122 bp, Homo sapiens
tccccagtgttctccttgcccagtagccccataggagttccagctaatggggtgattcctcgaatttgtgcctctgacctggaagtaatagctaggcacatgacctggagttgtttccattg

SEQ ID NO: 144745 - DNA, 122 bp, Homo sapiens
aagggctccgccggcccctacagacgcgaacttggtgccgtagtctcgagtgccctctgccgtaacttgggaaaccagcgcttctttagggagccagccatgtctcctgcaaggaaggaaaa

SEQ ID NO: 144746 - DNA, 122 bp, Homo sapiens
ttagaagcaaaaggacatttttactttctcagttgtatttcaaacacatgtcactttagccgttaaatttgtattaattcatcaggtgttgcagtaactttcttctctgcatgtgttgaaat

SEQ ID NO: 144747 - DNA, 122 bp, Homo sapiens
atgctttccaccgggtctccctgtgtatgtaatgtgtccccctccccagtctccatggcacgccgtagctattcacaccacacgccaagtacctggtggcactaggagaatgtgactcaagg

SEQ ID NO: 144748 - DNA, 122 bp, Homo sapiens
cctgaatgagaatctagggaccagcaactccaaaacagtgaagtctcatagagttccacccgtgttgtcagccatcagaccccaggaagctgtgaacagataaggctcttcctcacttcctt

SEQ ID NO: 144749 - DNA, 122 bp, Homo sapiens
tgattaaatatcaatcagtaactaacagcaaatctgaaaccataatgactaaaagatcatcgcacgtccaaatttgtatgtttgttttcagtccgtcgtggttggctttttcttatatttct

SEQ ID NO: 144750 - DNA, 122 bp, Homo sapiens
tagaccccttttcagagcgctcatattaggtggtgacggctgcagttcccggtgccgcctcggtgcctgatgggggagactgagcccattcccagaccgacagccagagaccaagaggccaa

SEQ ID NO: 144751 - DNA, 122 bp, Homo sapiens
ggacactcccatttccacctaaggaagaggaatgttcctggaaacagagggggcaaagctcggccaggactctctgagccacttcaaacctccaacagagcccagggtgggtcccacagatc

SEQ ID NO: 144752 - DNA, 122 bp, Homo sapiens
ttatttaggtgagaatgattaattaaagcctttgtggactggctcgagcgacttttaaaacgatcggccaatgacttctaaaaggaaacgagggggacagggggacagactgagctgcgaga

SEQ ID NO: 144753 - DNA, 122 bp, Homo sapiens
aaacattaactgactcaaatcatcccaagtgtccagatgccatatataaggtagggagtgcgaagagagacagtaggagggggtgaggaggagaggaaaaacagagaaaccaaaatctgagt

SEQ ID NO: 144754 - DNA, 122 bp, Homo sapiens
ccattacctagtgggaggtggccaaggcatctgccactgctgctgactgccactaccagccggagccagggcctggtcgagacaactatttttgaggtatctgaggctaccccacagcactc

SEQ ID NO: 144755 - DNA, 122 bp, Homo sapiens
acccgggagggaaatccgggctggggccgcttcccggctgggggtgtctgcctcctgtttcggttcagggtctccagccgcccgggggagggaataggcggctttcccgcggggaatcccgc

SEQ ID NO: 144756 - DNA, 122 bp, Homo sapiens
gcttgagtctccgacacgaggtcctgagagccgtcacgttcatacagatggaaggtagaacggtgggcgccagggtgggcagagggcggggagtcggggggagtgagtgatggggaaacagt

SEQ ID NO: 144757 - DNA, 122 bp, Homo sapiens
gcggcggggacgcttctctggagggtgtggcggaaacttgaggcttggagtccgcgggaccggaaggggctccgtagctcggggcagggtgggcgcgagagagcctagaagcccatgtagcc

SEQ ID NO: 144758 - DNA, 122 bp, Homo sapiens
aagctgcgggccaggcgcagccataccttgtgacaatagtgcacagcagagacgatctgccggaagaagtgccgggtctccctctcactgaggcgtcgccgctcactgatgtaatcgtacag

SEQ ID NO: 144759 - DNA, 122 bp, Homo sapiens
tgtgggtgggtgtgggtttgggtgtgtgtagtggagggagggggagtgagacagggaggtcggtgatgtgaaatagacctagagttggttactttcagaggcgcaatttgtttttcacaaat

SEQ ID NO: 144760 - DNA, 122 bp, Homo sapiens
gcaagttcctaggcactgtgggccctggggggctgggggtgagggcaggcagctcaagaccggcgtccctgaggcctgtgcccaggaaagctcccagaagcaccatctgctcccccgacccg

SEQ ID NO: 144761 - DNA, 122 bp, Homo sapiens
tagcagagtaaaaaccaagaggccggtgctgcagtacatcagagtccacctgctgggaaccgaaacgacaggcagctcacctcaaaagcaggagagtgacccacgacacaccacgagccagt

SEQ ID NO: 144762 - DNA, 122 bp, Homo sapiens
cacctcccgaagacctgaccccgactctctcttccagggtcgagttctgtggacctgaaccggaatcaaccagaaaatgaaagatgcatttccggtggctttgtgacagctacgcccagcta

SEQ ID NO: 144763 - DNA, 122 bp, Homo sapiens
gcagggccagccaattgccgggcatttaataacaggcccggcggtggggccggagccggccgagagaatggggcttgggggacccaaatcctatgccctggccccgaccctacctcaagcct

SEQ ID NO: 144764 - DNA, 122 bp, Homo sapiens
agtgatccgcctgcctcagcctgccaaagtgctgggattacaggcgtgagccaccgcacccggcctggggctcatgaacttaaagatcatggcccagtgccaggcacacgggaattcagaat

SEQ ID NO: 144765 - DNA, 122 bp, Homo sapiens
ggatattagagaaaagtctacaagacaaactcttaaaacctcttggatttcaacaaacttcgcccaagtgataagtttcagctgtttttccaagttaaaatccaattctcaccctttaaatt

SEQ ID NO: 144766 - DNA, 122 bp, Homo sapiens
cgccgaactacccccggagggaggagccagtccgaacccaaggcgccaccgccgcagaagcggagcgaggcagcattcgcctccatggcccactcgccggtggctgtccaagtgcctgggat

SEQ ID NO: 144767 - DNA, 122 bp, Homo sapiens
agaaccgccgggctcttgggcgctcgcccagggcgcacgcgcagtcgcgaggccgcgccgcggactgcatctcccagcaggccccgcgcagcaggccacgcggcgccactgactgggcgggc

SEQ ID NO: 144768 - DNA, 122 bp, Homo sapiens
ctgcacacactctccatgcccctgctacacaaatcacacaaccccaatgtgccaggcattcgaggctccacactgcagtccatgcagcttcctcggcctggtgtcttcctgctcatccctgt

SEQ ID NO: 144769 - DNA, 122 bp, Homo sapiens
ctctttgtaataagtcttgctgctgctgctcatctttgggtcctggccgcctttatgggccgtatcaccgtgaaggtctgcagcttcactcctgaggccagcaagaccgtgagcccaccaga

SEQ ID NO: 144770 - DNA, 122 bp, Homo sapiens
gggtcccccaaacaggggaccttccttctgccccgcccccgccccacaggtccccagcagcggcacctttctgcgtgtgtgtgaccgattcgttcacgtcgactcctcccctggacagaggc

SEQ ID NO: 144771 - DNA, 122 bp, Homo sapiens
caacgcgcgccagtactgcagtgtgcggcgcatggctgcgagggcctgccgaggggcgggcgcgagtcggaaagacaccgaccagggaatgggcgacgaggcttgccttaattcggaggaaa

SEQ ID NO: 144772 - DNA, 122 bp, Homo sapiens
gagctcggtggaccagggctggtgctcaccgcctgcaggaagtcggtcagttccttcctccggttcctgcacttggccgcagccagcttgttccgctcgcgccttactcggcggcgctcctc

SEQ ID NO: 144773 - DNA, 122 bp, Homo sapiens
ccccctcgctgggctcctcctacaaagcctgggcccgtgggggacgcacatggtcctgttcgtactccaggatggcggcgtaaagggcccgctgctcccgttcctccggggtcagggcgact

SEQ ID NO: 144774 - DNA, 122 bp, Homo sapiens
atgtcggcccggacgccattgccgacggtgaacgagcgggacacggaaaatgtgagtaaccggagcctccctcgggagcagtgggggcgagaccctcctctgatccccacttcacccgcgct

SEQ ID NO: 144775 - DNA, 122 bp, Homo sapiens
caagtaatcctcccacctcggcctaacaaagtgttgggactacaggcgtaagccaccgtgcgtggccctcattagggttttgggactagagctacaaagccactgaagtaaggtggcatgac

SEQ ID NO: 144776 - DNA, 122 bp, Homo sapiens
cccggctttctggttcagatgtcttgtctcaacagacggcagattcgcagggaagcaggccgagcctgatcttttctccgctagaactgctcaacaggtgaagaatctttttccagcactcc

SEQ ID NO: 144777 - DNA, 122 bp, Homo sapiens
aatttgtatacagaaagggcttaagaaggatagtgtggttacagggagtgcttattgatgcgcttttatggcactttatatttgagaaaataagtatcctcatcaatgaagtggggattatt

SEQ ID NO: 144778 - DNA, 122 bp, Homo sapiens
gcaccacagaatccaccatgggaggtggaaagaatgtttcatcataaccaaattacactacgttgaccattttctcaagagaataagaggataacattttgaaatttctcccctctggagtt

SEQ ID NO: 144779 - DNA, 122 bp, Homo sapiens
agatactgctccagcaacccggtcaatgtgtgggagggaagcgggcggtgggctctgcaccgtccatggctggctccgggcgacttccagcagagccagctaagtgaggcagcctgaggcat

SEQ ID NO: 144780 - DNA, 122 bp, Homo sapiens
agtatccgctgactgggatcattggttcaggtcacaccagcagtgtctgcatcagcaaggcgtcttttttatgttcacataagatcacctgttcctgagtagattacatgtttacatgtcat

SEQ ID NO: 144781 - DNA, 122 bp, Homo sapiens
ttagggcaaaaatatgccaggcacagtgccctgctgaagatctcttcatctatgacaagtcgtcttataggtgctcataaatatgaccaaataaatgaagggatggatggttcctggagttc

SEQ ID NO: 144782 - DNA, 122 bp, Homo sapiens
gaaaactcaagtttctcaaatttaacacttaccttcatggcacaaactactccctgacagcgggcttgtttctttttcaacagcataatgttgcgagcacttacagcaccagtactagaaaa

SEQ ID NO: 144783 - DNA, 122 bp, Homo sapiens
gaccctgcaccacccgaaggaagtgatgtcatggtctccttctccgagaagcctttgacacggagggcgggggcggggggataggaatgagtgccagggtgggacagacagcccttgttccg

SEQ ID NO: 144784 - DNA, 122 bp, Homo sapiens
gaggtacggtccgctcccacctggggcgagtgcgcgcacggccaggttgggtaccgggtgcgcccaggaacccgcgcgaggcgaagtcgctgagactctgcctgcttctcacccagctgcct

SEQ ID NO: 144785 - DNA, 122 bp, Homo sapiens
ggcccggtatcgatggagaagcacagagggctttgaggtcgcaacgtcccggttgctgagcggagtcaggagtcaggttccaaagggacagcgctcagggttgtaatcaccacccggcccac

SEQ ID NO: 144786 - DNA, 122 bp, Homo sapiens
gtcaccgggaagcatctggctgggcggccgggattggccaatctgcgggaccgtctggagcggaagggcggtggtagctggccctgcttctccctccccaggatctctgcactggccttacg

SEQ ID NO: 144787 - DNA, 122 bp, Homo sapiens
ggtgagtgttacagcgcttaaggtggcgcgtctggagttgttcattcctgccggtgggctcgtggtctcgctggcttcaggagtgaagctgcagactttcgcagtgagtgttacagctcata

SEQ ID NO: 144788 - DNA, 122 bp, Homo sapiens
aattcttacctgtgcttcagcccagcatacagactgctgacaggtaccaagtggaatcaacgcccgctcatagtgtgctgtttgtcaacatgttcgctgcccatggttctcagctcttcgtt

SEQ ID NO: 144789 - DNA, 122 bp, Homo sapiens
gtgggtgttcattgaaagagtccaggtccccgacagccctgctccaaggacagacaacctcgtcttgcaggatcatttaccttttatattatgacctagccacttctcatggctctaccaca

SEQ ID NO: 144790 - DNA, 122 bp, Homo sapiens
ccgaaaggagagtttggagagcttttgaattggtgaataagaacatagccacataccccacggggccaaaggctcctgggttcatgacccttacaaacctcacatatgcatagcttcatctg

SEQ ID NO: 144791 - DNA, 122 bp, Homo sapiens
tttgccacaaattatctctgaacttccctacagctctgagctgttggcctcacagtgcagcgatgtttgcaagagtctgagggcccctggctgtaggctgggctacctctcccttcctcctc

SEQ ID NO: 144792 - DNA, 122 bp, Homo sapiens
gacagcccccgccgcgcgccaccgccgcaccccaggcaccgggcccccacgcagggacggcgtggaccaccctacccccgaaccccgaggctctggccaacactgaggccccctgtgcctcg

SEQ ID NO: 144793 - DNA, 122 bp, Homo sapiens
caagggtgtgagtactgacagaaggaagaagagaacccagcactgagtcctggggtgctccggccattaaagatcaagtgaagcacagatacactcatgatctccatctttcctgaccaagc

SEQ ID NO: 144794 - DNA, 122 bp, Homo sapiens
cggccggcaaggtgagagcggcggctgcgcgctgggaggagcagcaggtgcaggggcggccggcggcgcgggcagggggcaccgggagccgcgcccgtacctgggacccgacgccgcccggt

SEQ ID NO: 144795 - DNA, 122 bp, Homo sapiens
gaaaggggagggaaggcggcgtggggggacgccgggggctccgcgcgggcctcctctccccgctcagggctcctgtgtgcccgggttctggtcctgaccccgggctcaccctccaccttccc

SEQ ID NO: 144796 - DNA, 122 bp, Homo sapiens
aggtcagtgggtgcgtgcaccgtgcgcgaagcagggcgaggcactgcctcacttgggaagcgcaaggggtcagggagttccctttccgagtcaaagaaaggggtgacggacgcacctggaaa

SEQ ID NO: 144797 - DNA, 122 bp, Homo sapiens
tagaaatggcaagccgctggctcccagaaatgttttggttccccctcagctctgggaagccgggctccaatgcgtgactgcccagtcccctcagataactctggacagagggtacaagctga

SEQ ID NO: 144798 - DNA, 122 bp, Homo sapiens
gctgtcctaagaagatatgcaaatggccaataagctcatgaaaagatgctcaatatcattcgccatcagggaaatgcaaaccaaaatcacaatgagatgccacattacccctactaggatgg

SEQ ID NO: 144799 - DNA, 122 bp, Homo sapiens
ctgacttggcatgacagatcactgcacaatgtacaaaataatcaaggggatatggcactccgtacattcattaagttgagctacttctttattcagtttatattttattttatttacttatt

SEQ ID NO: 144800 - DNA, 122 bp, Homo sapiens
ttccacatgccagaaaggcaaaacccgccactcttctccttgtcaacctcttttcttgctcgcaagaattgaaactggatcaaaaatgtgggtgcatgatggtttagacagaggtatggtcc

SEQ ID NO: 144801 - DNA, 122 bp, Homo sapiens
gattgttaaaggcgttcgggccctgctgctttagtgaatagttcacacccgttttcgcagcggagatgtcggccactgggaagaatcaaggaccaagtttctgattgggattagcagtgaca

SEQ ID NO: 144802 - DNA, 122 bp, Homo sapiens
gaagccaaaaactcttctaggcactggggaaactaaagtgtaccaagtaaacaattcctgcgttcatggaatttatattgtggaatgcaggagacaaattttgtatttctcagcatatttat

SEQ ID NO: 144803 - DNA, 122 bp, Homo sapiens
caagaggcatcgatgttttcattattgtgattgagacagatgcacgctccgtcagggaaacggtggagaggagaggagcctctctccgtggcaagtctgccctcatgtggggccacgctcga

SEQ ID NO: 144804 - DNA, 122 bp, Homo sapiens
gggaaatctggggtgggggtggagtctggagcgtgtattctgtctctgggattcacccctcgagagtccaaaaataatcctataccactccccgatgggcttttgtccccgaacttcagcac

SEQ ID NO: 144805 - DNA, 122 bp, Homo sapiens
ctttagccatggacaggtcagtactgatggtggcagctgagcccgaagtcttgcccgtctcgcctgttggcgaaacgaaataggtgaaactagactcccagaagaagccaaggaggtcccgg

SEQ ID NO: 144806 - DNA, 122 bp, Homo sapiens
agtctctccagcctctctcgttcttgtctttcttgcctctcccgatccaggcgttcctgccgctccaggcgttcctgccgctccaggcgttcctgccgctccaggcgttcctgccgttcccg

SEQ ID NO: 144807 - DNA, 122 bp, Homo sapiens
tttctcttccagcatggagatatggaccaaaaggaacgagacgtgattatgagggagtttcgttctggctctagcagagttttgattaccactgacctgctggtgagtagagggaactgata

SEQ ID NO: 144808 - DNA, 122 bp, Homo sapiens
gcaaagggtgggacttctgcagtttctgtttccttgactggcagctcagcggggccctcccgcttggatgttccgggaaagtgatgtgggtaggacaggcggggcgagccgcaggtgccaga

SEQ ID NO: 144809 - DNA, 122 bp, Homo sapiens
tgtccgtaaacgttcgtttttatgagcccagggcctgccgtgtggtaggtgttcactagacgatgtacactcttaaaagcacccactgagctgggaccagcagtagaaagtcagctgaatca

SEQ ID NO: 144810 - DNA, 122 bp, Homo sapiens
ctgcccactctggcgcaggtcctcggggagacagagcggttcctgagccaggtgctaggccgggtgctgcagctgctgccgccagggcaggtgcaggtccacaagatgaaggccgtgtacct

SEQ ID NO: 144811 - DNA, 122 bp, Homo sapiens
gcgggcgcgtgggtcaccaaggagcagttctccgggacccgttgcgtcagagggactgggcggggctgggcggggcaggacgggggcggcgctcaggaaccctggaacccgctggccctgag

SEQ ID NO: 144812 - DNA, 122 bp, Homo sapiens
tgccaaggtcgggccactacaggtgggagactgcgagccccgagcgaaagcttggcttcacgcccgcccggggcagccgccgcggctcgtcccctccaggcctgggcaccgccgtgggccgt

SEQ ID NO: 144813 - DNA, 122 bp, Homo sapiens
tctgcctccccgcgctctcccagatgggggcccaatcctcgggcaagatcctgctctgcccgctctgccaagaggaggagcaggcagagactcccatggcccctgtgcccctgggcccgctg

SEQ ID NO: 144814 - DNA, 122 bp, Homo sapiens
gagcactcatggagcttcctgtatgctgggccctgggcttctgagagggccaccgggtggcgactgagtcacgaggtggagggccagtcccagggactccaggtgacctcgtgtcggcacca

SEQ ID NO: 144815 - DNA, 122 bp, Homo sapiens
gaggggcgcgggaaaagctgggactttggggactctttgatagcgagtgtgtgggaaacccgaaggaatgtggctgttcggaccgccgcggcggggccaggcgccgggaggagggtccgcac

SEQ ID NO: 144816 - DNA, 122 bp, Homo sapiens
gaccgcccttccttggagccccgccgcccgccgctcactctgcacacgcagcagaagggacgtggtgttccccaggctctggccccccaggacctgcgcggatctggcccagggcgcctcgc

SEQ ID NO: 144817 - DNA, 122 bp, Homo sapiens
aggcagagtccaaagaaagtgaactctgatcttaaaactagtaaaacaaaataggagaaacgaagtgatgagaagactgtgtctcttagcaaaatggctaaaagaagaaaagaaaaggaaca

SEQ ID NO: 144818 - DNA, 122 bp, Homo sapiens
gctggggccggtggggggccgtttgggacgcgcggagaggtcctgagcgcggtggctctgcgtctcctagctctgatctccaggctacccctgtgattccgcgcagaggtacctctcggagg

SEQ ID NO: 144819 - DNA, 122 bp, Homo sapiens
cccaccgcacagacacagaccggagccgcccgcacacctaggccacacggcacggcccaccgcgcagaaacagaccagagcccccgcacacctaggccacatggcacggcccaccgctccca

SEQ ID NO: 144820 - DNA, 122 bp, Homo sapiens
ttgttcaagcctctaatttgtgctgctttgtgatggcagccccaggaaactgaaacaattcgctagcaggcaatgaaaagggcaggccccccagcccaggccagcttcaaagtgagtcatct

SEQ ID NO: 144821 - DNA, 122 bp, Homo sapiens
agctctactgagcctgcctgtgctaatttgggccgagctggcgcctcacggccatgtttgcgccacctacagcctcggagggtgagcgtcatggcggcttcttgccctctcccggtgacccc

SEQ ID NO: 144822 - DNA, 122 bp, Homo sapiens
ggccatcagggggcagcctgagacagcatcattctctgttgctttccttttccttcctcccgccgtctgctgacccagaaagtaccctgctggtaactcagccccagccatggctctgggtg

SEQ ID NO: 144823 - DNA, 122 bp, Homo sapiens
ggttgggctccattttgactctggtggagaacgatcacctggctgcaaaaccaacctccccgcccagtacaagcatctcctcttcccccttgggccacgagggtgggggacttgaggcagga

SEQ ID NO: 144824 - DNA, 122 bp, Homo sapiens
tgtccgtgcctcgttactgcggggaccgtgcagtgtccgggtgtccgcgcctcgttgctgcgggactgtgtggtgttgaggactccttgccacacggggtccatggtaaggggagctcctgc

SEQ ID NO: 144825 - DNA, 122 bp, Homo sapiens
tgctgacctgcctgccccacgtagcagtggggaccatgtgccaggggcagagctgggggccgggcactgggcactcaggtctccaaaacctcaggggctgctctgacagttttccgcacagg

SEQ ID NO: 144826 - DNA, 122 bp, Homo sapiens
ccattaaatcaaaaattgtctcagatgacggcaatgattggaactttttgctaaggagggcgagaatgaaggggtgtaggacagtctcagcgtctctttacaccgtgctggccctatagtgc

SEQ ID NO: 144827 - DNA, 122 bp, Homo sapiens
tgcatgagactatggccccaggggcagggagacgccggtgggtttgagagacagctggggcggtgttgaaggacacagtgagggatcagccagcctatggccagtgacaggggtaaaaggag

SEQ ID NO: 144828 - DNA, 122 bp, Homo sapiens
acaccctctttattcactttcaaagggttaaacagcctatttactgggctgtcaacaatccgaggcccaaatcgtgaagaaagccccgtccagttttgtgcggccagaggccttgtcttttc

SEQ ID NO: 144829 - DNA, 122 bp, Homo sapiens
gggatggggattatgatagcaggaaaggagacccccgaagcggaggagcagggaagaacccgtgataggctcatgggaaacgaggcctcatcagatctcacctgtgggcgtgtgtctgaaac

SEQ ID NO: 144830 - DNA, 122 bp, Homo sapiens
tgcatcttcagcattcactccaggcccctggccaggtggaaactgggcacaatttagttacgtaagccacagtgccctaaacaaggctgttgttttcttcccaggctcagcattgccctgct

SEQ ID NO: 144831 - DNA, 122 bp, Homo sapiens
tttgtggggaggattctgtgagctaaaatacatggcacgtttagaacacctggcacctggcggtccttaaatgctgtcttttgctattaatcacatacctccctatctctgcttttaaaaaa

SEQ ID NO: 144832 - DNA, 122 bp, Homo sapiens
ctgatggtgccacctggtggcacaaagggtcctgctcaccctgggaacttcgctctcgagcgggagaggaacggcttctgtggcccagcccagcgtggtgacgtcacgacagagtgcccttt

SEQ ID NO: 144833 - DNA, 122 bp, Homo sapiens
actgggcaatcaagacgactgtaaaacgttaaacaccttctcgggccgggcagctctgcacgagaaaaccccaaatcccacatacttccaccactcccagaagccctgtggtggttaactgg

SEQ ID NO: 144834 - DNA, 122 bp, Homo sapiens
cacccgcaccccttgcccacgggtcggtaggccacacagccatcaggctggcttggggtacgtgcggggctggctgcgggtgggggtgcgagggggtccgccggcggcccccccgcggggag

SEQ ID NO: 144835 - DNA, 122 bp, Homo sapiens
ctgtagccacatcgggccgccaggcgcgggcaagggcgcgagggcggccgccgggcccgccgcccagcccaccggcccggccgcccgtgcctcactgcccggcccagaccgcggcgcccacc

SEQ ID NO: 144836 - DNA, 122 bp, Homo sapiens
ctccagatttctctcaacagggccgccttaagtccatgagtagaagggcgctgcggcggacgctggcagccacaggttgaatgacaaagagcccccgtcagcaccactcccaggagtctgcg

SEQ ID NO: 144837 - DNA, 122 bp, Homo sapiens
ccaagtctgtcactaacctgtaaaaaactctcaccaagccgactgggcactttgtctgagcgcctgcctttgccaccactgtgtgcgggaatgcctggggcacgactgggccatcccagtgt

SEQ ID NO: 144838 - DNA, 122 bp, Homo sapiens
aaaagcaaaccagaacccaagtggagaaaagttagctttcataagaggactcatcttttacgttcacaaacttaggctccctgacttttatcggtaatcagtactgaggacaatgcgttcca

SEQ ID NO: 144839 - DNA, 122 bp, Homo sapiens
ttatccgccggggatcgctgggagcggagataaattcaatccccagggcaatcttggccccgcccgccccaccccatcctgtgcttaaatagagcctttcttgaagctgcgaacatttccag

SEQ ID NO: 144840 - DNA, 122 bp, Homo sapiens
ccccctcgctgccgcggctttttgcccctccgccaccgccgctgctttttgccccaccgccgccgtggctttttgcccgccgcagctttttgccatcgcggctttttactcgccacggcctt

SEQ ID NO: 144841 - DNA, 122 bp, Homo sapiens
tcaaatcctacccatctttcaaggttcagtttaatggatctctccttctcaatccctgaacgtcttattggatctgatgattagatagaatcccatattctcctaaatttctctattactta

SEQ ID NO: 144842 - DNA, 122 bp, Homo sapiens
gaagattctgtgtgctctttcagaccaggaggaggatgaggaggaggaaagtttatatgacgtaaattcatttgaccgtaagatatgtatttaaacatcgtggaggatcttgggggtctgat

SEQ ID NO: 144843 - DNA, 122 bp, Homo sapiens
cccgccccgctccgaggtgtcctttgccccttgatctggtgcctccttctctccttagcacgtgggcggcagccgctcagccgctcagaggcctgtggggcagccatggcccgggccctggg

SEQ ID NO: 144844 - DNA, 122 bp, Homo sapiens
ttcaacatatctttgagggggacacattgcaacccatacagtattcttggaactgtaaatcgcgtttttgtactagaaattcactgcccctttaggcactatgtattcctctaatcttattt

SEQ ID NO: 144845 - DNA, 122 bp, Homo sapiens
ttctcagagggtttactaagaggggcttacaatggtgcgtccttctctgtcccttcgagacgtctgtgttctctgcaacccaggggtgcctctccaggaccggagtcctctgaaacgccacc

SEQ ID NO: 144846 - DNA, 122 bp, Homo sapiens
ttaaactagcaaatacatggtttttccttgttttcccctaccaagttcagtacattttatcgacaaaggtttttactcattgccccaaattgaatcagctgtctgacagcgaagctgctggt

SEQ ID NO: 144847 - DNA, 122 bp, Homo sapiens
catcctcagcccagctggctgagggtccgacctcagagagggtctccgggagcccagaggcgggaaagtccccagaggcgcaggccctgccccacagctttcctagggcaggcagcagcgac

SEQ ID NO: 144848 - DNA, 122 bp, Homo sapiens
ctcagccgacgaccataggctccgtgtccacccagcagtttgcaagtggctgcgccaaggcggcagaagaggcacccgaggaggcgccggaggatgcggcccgggcggcggacgaggctcag

SEQ ID NO: 144849 - DNA, 122 bp, Homo sapiens
gccctttgatcctgggttcaggtttgggctccatctctctggcattctctcctttctcctcgactgttgctgtccttgctggcccgtcacaccctcactctgcagcgaccagaaaaaaagag

SEQ ID NO: 144850 - DNA, 122 bp, Homo sapiens
gcgagaaatcgagcacagcagctgctggcccaggtgctaagcccctcactgcccgctggccgctccgagtgtggggccgctgagcccacgcccacccagaacttgctctggcccgcaagcag

SEQ ID NO: 144851 - DNA, 122 bp, Homo sapiens
gaccagggacgcaaaggggtttgcgtccgtgcgtgggagcggcccaagggcagtgcccagcgcggcggcctggcctgtgagtgtagcggcgggtgaggggaagggaaaaatcgcttaggaag

SEQ ID NO: 144852 - DNA, 122 bp, Homo sapiens
acaagtttgtcagtcattttcagataaggtgcaaatcaagggatggctttgtccccacttcggcgcaggtgggacagacttggggaagacgcagctgaagagacaaattctcagggtgcgtc

SEQ ID NO: 144853 - DNA, 122 bp, Homo sapiens
gtaaagaccgtgaagagggcggggccaagaatacacccccggaatgcgcagtcgggagaacggaatgggcggaactcagggtggggcaacttcctatttcgagtctaaagtaatcttggtct

SEQ ID NO: 144854 - DNA, 122 bp, Homo sapiens
gggtcgcgctccccccgctcagcctcccgggcgggtccgatgcgaagccctcgcttcccgcgggtcccggggccaggtcatttgcatacactttgcattcatttgcatatcgtgcgtttcat

SEQ ID NO: 144855 - DNA, 122 bp, Homo sapiens
ctgtctcagagagatagtctgtcctaaatatcccatgtagcccaggccactgaattaaaacggagcgtattcgttctctgccccaccccgcaactcctgaaagcggcgcaactcaattactt

SEQ ID NO: 144856 - DNA, 122 bp, Homo sapiens
gccctctctggattttgggcactgacgagcatgggctgtgacaccctctttggggctctgcggttcctggcatctccaatcttctgggcgctactgcgttccctggtgccagccatggaagc

SEQ ID NO: 144857 - DNA, 122 bp, Homo sapiens
agaataaaaaagaagcttcctctctgccactcaggtagccttatccctaatctcagcctccgtcagggactccctgaggccagttggctgaaagctgcccagggagttctaaggatttcagt

SEQ ID NO: 144858 - DNA, 122 bp, Homo sapiens
tccgcccgcctcggcctcccaaagtgctgggattacaggcgtgagccaccgcgcccggcccgggacttcctatttgtaacagggccactcacgttaactttagccatcaaaactgggggcgg

SEQ ID NO: 144859 - DNA, 122 bp, Homo sapiens
cgggcgcaaaaagccgcggcgtcgggggctaaaagccgcaaaaagccgcggaggggggagcgaaaagcagtgggagctggggcaaaaaaccacaaaaagccgaggcagcggcggcagaaaac

SEQ ID NO: 144860 - DNA, 122 bp, Homo sapiens
ggggcctgtgcacggactgtccggcccgcgggccacagctggccacgccgcgggaacgcgcggccttttcggggccactctgccaagggcttcccgccgagctcgtcctcgtctcgaccaga

SEQ ID NO: 144861 - DNA, 122 bp, Homo sapiens
ccatcctggagaaccgcaagcggcagctcggtcccccagccggatttatgctccagtttacggtctgtggtttgcagtaagaaaacaccagggtcttcaaaataagaaaactgattcccagt

SEQ ID NO: 144862 - DNA, 122 bp, Homo sapiens
gccgcccctgccacgcgggcatccaggattgcatttaccggggctggagccgccccgccacgcgggcatccaggattgcatttaccggggctggagccgccccctgccacgcgggcatccag

SEQ ID NO: 144863 - DNA, 122 bp, Homo sapiens
tggggagaacagaccagcagcagatgggactcctcctccaggaacctgctaccagctaggcgtggtggtgcaagcctatacttctggcactttgggaggctgtggcaggaggatcacttgag

SEQ ID NO: 144864 - DNA, 122 bp, Homo sapiens
actgctccttcctccaaggaagagcattaggaggtctggcctctttgccagtcccggtggcggtgggccaaagctgtttggcctcattatcctcccggtctctgtccttgccttcacgccca

SEQ ID NO: 144865 - DNA, 122 bp, Homo sapiens
cggcccagccaccacgtgacccttctgcgcaggcgtcgcctcacgtgattcttacaggtccgctcctctagccccgcctcccgtctgagaggttcttaaagggctcgcagcccagccaggca

SEQ ID NO: 144866 - DNA, 122 bp, Homo sapiens
acctctcccagcaaccacctcagctggcgcgcggaaaacccggaaagtggatttcgcccccgctccctcccggaaactcctcctggtgcctgcgaccgttctcactgagcatgtgcagacgg

SEQ ID NO: 144867 - DNA, 122 bp, Homo sapiens
ccatccctgcccggtccggggctggcggggcagagtgctgtgggcgctgagtgcgactgccgcttcccggagggcacccaccggtctgtgcgcgcccggcccccgcccccggctccgcggcc

SEQ ID NO: 144868 - DNA, 122 bp, Homo sapiens
aggggcacccctcaactgtcactttatggactgtctgtgcaattacgtccaccaaagacccgtgttgggggtactgaaggagaggccctgggggaccctctgaagcatttctgcctcacttt

SEQ ID NO: 144869 - DNA, 122 bp, Homo sapiens
cttcggctcttctggctcctcctcaccaggagaaagggcgggattaccaactgcgctaggcgattggctgttttgacccagagaagggaccggtggccaatggaaaaggaaaaagggtgaga

SEQ ID NO: 144870 - DNA, 122 bp, Homo sapiens
tgcacaacgcatgtctgaaagaacaggctcttgaccctaccccaacggacgggggcattgcgcatgtatgaaagggcgggaccgccccatagggaccccacccatagggacgggctgcattg

SEQ ID NO: 144871 - DNA, 122 bp, Homo sapiens
tacagttgacttttgtgccctggtaattctgtatcctgtttaccgtttacctacttcccacgtcatcatgatttcttttgagggagaactgaatgaaattcccttaagggcctgacttcagc

SEQ ID NO: 144872 - DNA, 122 bp, Homo sapiens
cgggtgctgctgcccctcgcccacttcttcctgagccacggtgagcccagggtggggtggcgctgactcggggctctgcttctgcctttagttttaggatggaatttcttcttccctttttt

SEQ ID NO: 144873 - DNA, 122 bp, Homo sapiens
gcgcactgcgggagcgcgcggtggcgaggatagggcgggccggggttcgcggggcgaaggcgcgcggtgcccgggggagggcgggccggggcgcgcgggccggggcgggggcgcgcgggccg

SEQ ID NO: 144874 - DNA, 122 bp, Homo sapiens
ccccaccctcagaccctcccgtgccccaccttaccatggccagccctgactctgccatctcgcccaagctgctgaccaggacttcctaatggaaaccaggcggtcacctcctggagcctctg

SEQ ID NO: 144875 - DNA, 122 bp, Homo sapiens
ctgcacacgctgcttctctgggctctgcctcacggttctcacgctgcagctccggtctcgcgcctccttttacgttgtttaggtttctttctgacatgactgagggaagtgcggttcacagg

SEQ ID NO: 144876 - DNA, 122 bp, Homo sapiens
ccagggtggggcttggggtcagggggcctggaactgtcctgaacacagccacttcctggccgtgtgagcttcgtcgtgtcactaaacctctctgaacctctgtttgtactcagggcaaatgg

SEQ ID NO: 144877 - DNA, 122 bp, Homo sapiens
ccggaagtgaggcggggcctgccacggccgtctccggggacagtcggtggaaatgtggggcgcggggagggcgcggggagggcgcgggcccgcccgctccaaccatcccggccgttgcgcaa

SEQ ID NO: 144878 - DNA, 122 bp, Homo sapiens
gtttcggctgcaggagccgggatctgcgcgggtttctctcgctcgttactgacaagaaaccggaattggaattctgcccggagccgtctgggatgaggctgcacgtgtttctttccgtctgc

SEQ ID NO: 144879 - DNA, 122 bp, Homo sapiens
ccccacccccggtcccgccggcggttccgcgcggggctaggcgccgtctgcatgcacccccggagcccaagctcgtagcttctagcccggatctcagagacgattcccccgacctcgtgccc

SEQ ID NO: 144880 - DNA, 122 bp, Homo sapiens
acctcactggataagactgacaggatggtcttggatgaaactccagaagaggccacctaacgggccgggaagatctggctgacttgggggtgggatctactccagaatgctgacaaccaaac

SEQ ID NO: 144881 - DNA, 122 bp, Homo sapiens
gccctgccgccgctctcgcgggttcgggatgttctatgccgtgaggaggggcggcaagtccgcggtctttctgaccgggaatgagtgcaaagcacaggtggaccggtttcctgctgccagat

SEQ ID NO: 144882 - DNA, 122 bp, Homo sapiens
agccgagggtaggaaagtgggtgaatgaaagcggagggggttgctggactctgggggaagcggagagccgggtttctttttaccgggtatttttgaggctcgagatttattaagcactgact

SEQ ID NO: 144883 - DNA, 122 bp, Homo sapiens
ctctgcactgtggccccatggtgtccggcttcacttggacagaaaccctggatctgtaaccgcagcctcaccctcagcactgctgccagccgagaagggtctccggctcggcccctctgtgc

SEQ ID NO: 144884 - DNA, 122 bp, Homo sapiens
cacttcccagactgggccgcggggcagaggggctccttacatcccagacggggtggcagccgggcagaggctgcaatcttggcactttgggaggccaaggcaggcggctgggaggtggaggt

SEQ ID NO: 144885 - DNA, 122 bp, Homo sapiens
tgcgcgagtcccggggcggcgagtcccggcgctgtccgcgtctgtgtcggtcccggcgaccgcgcctcttaaaggcccccgacccgacccgccccgccccgcctctggccccgcgcccggcc

SEQ ID NO: 144886 - DNA, 122 bp, Homo sapiens
ctgccccgcccccatacgtactcatgccgtcagcacaatgcagacaatcgggacggtccacgccaggtggactgctgtgccccagaggttgattaggttaatttcagcctcgacacacccca

SEQ ID NO: 144887 - DNA, 122 bp, Homo sapiens
gaaaagggcaggccacctttgaagtatggggtgataaagagaggaaagatggagcaaatacgtgagacactagcgatctttaggaacagcgctgagttgtcttttaagaaaataaaagacct

SEQ ID NO: 144888 - DNA, 122 bp, Homo sapiens
ctcgatctcctgacctcgtgatccacccgactcggcctcccaaagtgctgggattacaggcgtgcgccactgcacctggcctcccccatttgtaaacgctgatttgttcagattttgagaca

SEQ ID NO: 144889 - DNA, 122 bp, Homo sapiens
agaaccccaggaagggcccaagttcaggcaagcctcagcccgagcctgagcacatgggagcgctggcatgtatgtgtcccctgggagttaggtggacatgaggcggggcagctggctgtcag

SEQ ID NO: 144890 - DNA, 122 bp, Homo sapiens
caataaggtacacattgctggaaaaggaggtagtagtcaaacttttagcccagccgtaagcgaacaaagccaatgaatattacataaaacattgttagaaatagggaaaaacactaaagttc

SEQ ID NO: 144891 - DNA, 122 bp, Homo sapiens
tgtgagaagcccctctgcctggctgcccagtctggaaagtgaggagcgtctctgcccggccgccataccatctaggaagtcacgagcgcctcttccaggctgccatcccatctaggaagtga

SEQ ID NO: 144892 - DNA, 122 bp, Homo sapiens
ctcacctcgctggcccagtcaggaacctgaaccagatggtctcttgagagttgaccagttcgggtgtttaccaatctgagactggcctcccctgaggttaccctcccgacccctgggggttt

SEQ ID NO: 144893 - DNA, 122 bp, Homo sapiens
ggcacagctcaatcctcatttccctccatcgcagattaggggctgagccagcagccaaaacgctacgtcttgttttgtccctaaactcgaatttctccccagctcagatcccttcctgggca

SEQ ID NO: 144894 - DNA, 122 bp, Homo sapiens
tggtaaaaccccagcgtggtgcctgcctctttgcttcctgggctggccgtgagccagggacgcgtgtcctggtgccctagaaccagggcagggtggcaggcttggcggatgtgggaggccgc

SEQ ID NO: 144895 - DNA, 122 bp, Homo sapiens
ctccagatggcccgtgtgttgttttcgggccggggctatttctcatttatttcgcacccccggttcttagtgccctgtaggtgctaaatcagcatttgtttcatgagtgctttttctggggg

SEQ ID NO: 144896 - DNA, 122 bp, Homo sapiens
ctgacacctcagtctttcttacgtctatttatacatcatacctgacttctatcaactctgcgaaacttatacccttgatcttcagttatcatataaactttttttttaagagacaggatctc

SEQ ID NO: 144897 - DNA, 122 bp, Homo sapiens
tctcatgatgactttagagcagaggttctttgagaatgtcgtccgcagaccagtagcatccgtatcaggaactggttaggaatgcatttcctgggtacctcccctgatctatggaatcagaa

SEQ ID NO: 144898 - DNA, 122 bp, Homo sapiens
tgcctccgccctcctagtacctcctgggctaccgcaaagccacgtggcgaaatcgagaagcgcaaaaacagccgtgcgcggtggctcacgcctgtaatcccagcactttaggaggccgaggt

SEQ ID NO: 144899 - DNA, 122 bp, Homo sapiens
gtggaggggagaggagaggatgcactccacagccttcacctccctgggctgaagtttgcccggagcagtgtccctggaagtgggagaggttggcggtgatccataggtgctcgccgggccgg

SEQ ID NO: 144900 - DNA, 122 bp, Homo sapiens
tagtaaagcgacctcgcgactctcttgcccgcttggcattctgactcttccctagttgctcgtgtatcatggctgcctgcctcatatctgaatatatcaccagccctagggttctagcccct

SEQ ID NO: 144901 - DNA, 122 bp, Homo sapiens
tgctttgcaggtggcgctttctatttattgattgtaaggtgaaacctaggccagagccagcgtgcgcgcgccgtcggggtcccgcggctgctctggggctcagggtgcgaaccccaagggcc

SEQ ID NO: 144902 - DNA, 122 bp, Homo sapiens
ccatgagaggcatacagtggacaaaattaccatgagaggcatacagtggacaaaattgcacgaagaattgtttaatcacttctttggcaaatgttagcaagcggcgtaaaagagggaacctg

SEQ ID NO: 144903 - DNA, 122 bp, Homo sapiens
ccctgcccctgccccaggagcccagggggacagccccctcctggctttagggctgcagggcggggcaggctcctccggcctccctcccgcccactgcctgccccacaccccctcaccgactg

SEQ ID NO: 144904 - DNA, 122 bp, Homo sapiens
caagcccatcggaaaagcgcagtattcgggtgggagtgactcgattttccaggtgtcgtccgtcacccctttctttgactcggaaagggaactccctgaccccttgtgcttcccaagggagg

SEQ ID NO: 144905 - DNA, 122 bp, Homo sapiens
gcctcaagtgatccgcctgtctcggcctcccaaagtgctgggattgcaggcgtgagccaccgcgcccagctggcacagggatatttaaaagtatcctatgcccccatgccagtgattctaat

SEQ ID NO: 144906 - DNA, 122 bp, Homo sapiens
atcgggcgagaagaaagggacgcgccctcggccactaaaaggagcctgaggcctccgaaccggagccatcgctccctgggccccgtccacgtcacagccaggccactcaagcatggggacag

SEQ ID NO: 144907 - DNA, 122 bp, Homo sapiens
aaggcaggagcctcctgcccttcggggtggggccgagccccggcccacagctgtttctctcgcccccaggagacaggtactgggtgttcaaggacaataacgtagaggaaggatacccgcgc

SEQ ID NO: 144908 - DNA, 122 bp, Homo sapiens
aacaaagatttgttaaagggatggataagtggataaaagcaaacctgtatccctaactggcgtgtgagaaatgaaaaaagcaatagccccacaccaaaggcacagtggaagggcttagaatg

SEQ ID NO: 144909 - DNA, 122 bp, Homo sapiens
agtactgaaatcaaatagattttaatcatgtctctataaccagagcaagctaatcccctgcgcaccatcaactccactctcctggaacatcctcacgctgggccctcaggttttcacagaaa

SEQ ID NO: 144910 - DNA, 122 bp, Homo sapiens
ttctccattctctgcatttgatccccggtatattccagcctccaggccaacaaacttctccgcgtccgccgggagcaggtcagggaagggacgcgaggcggcgctgtcaccgcattctgagc

SEQ ID NO: 144911 - DNA, 122 bp, Homo sapiens
gtcgctctagacgcctctggttgattggttaatagtgctgtcggtccccaatgttccaagcgcttattggtgaaggctgccgtcgctcgggcggtggcgggctccgggattggcggttgctt

SEQ ID NO: 144912 - DNA, 122 bp, Homo sapiens
cagcgaagcacagggggccaaagggagagacacacggagcgccccggggtcccccagcctcggcggcccccgaaccccccagccagcctagagctgcccttctgggcctcttttctgccaag

SEQ ID NO: 144913 - DNA, 122 bp, Homo sapiens
cagctgaccaatcagagggcgcaaagtgagtcggatggggcgggcccagtttggcgctgacgacgaatcacctgcctcagacagcaggggcggaagcggaaaagagctgaaagtcttggttt

SEQ ID NO: 144914 - DNA, 122 bp, Homo sapiens
gcaggcgaacatcttacactcttcgggactgcgcggctggagatattgggtgacaggcgacgtgggctcctctcccgcttcctctctgcggaggaaaagaggcttaaggtcaagtgccctcc

SEQ ID NO: 144915 - DNA, 122 bp, Homo sapiens
ggcggggcatggcggggctaactaggcagagcagggctgtaggtgggctatagctgtgggcggggccatgggcggggccgactaagcagagcagggctgtaggtggactatagctgtgggcg

SEQ ID NO: 144916 - DNA, 122 bp, Homo sapiens
ttttccattgttcttctctgaagtctggaaagggcctgcggggctatagctctcagcggccggagcctgcgcttggcaggggacggcctggaggacggcctagtgtggctggtgggttcgcg

SEQ ID NO: 144917 - DNA, 122 bp, Homo sapiens
gccctatccctgcccgtcggcgccggcctgcccgactccttgtgccccgcatggtggggacgccaacccaagaccaacaccctgcccaaagaggaccctttgtcgcaggggagcggcccctc

SEQ ID NO: 144918 - DNA, 122 bp, Homo sapiens
tgaaaagatctttgcatggagacgtgtttccgtttctcccgggtaaatacaggcgcatctcgtttcagtgtgcctcgctttctcctactgcgtggaatcgcttttgtttgtttgtttgtttg

SEQ ID NO: 144919 - DNA, 122 bp, Homo sapiens
gccgctcactccttggtcgccttgcttgccagcagttgctcccttagtccttggctcgctcgcacaccccctcccgctacagggagcagttttgggtggcgtgggctccgtcctcttcttgg

SEQ ID NO: 144920 - DNA, 122 bp, Homo sapiens
tgcactgccacaagcgcgtcttctccctggctgggtggcgaacccaccgagcacaggcaccggggctacactttttgtcagaccccctcaaagccagcccagcccaggcaaggcaaacgtgc

SEQ ID NO: 144921 - DNA, 122 bp, Homo sapiens
ggcgggctgggggcggggtctgtcgggggcgtgaccaagctggttacgccccagaggaggcgcccagccctgttcagaggatgtggggccggaaggactgtggaagttgtttttctctttca

SEQ ID NO: 144922 - DNA, 122 bp, Homo sapiens
cagcatttgccagggtcttgcattcagccccgtggctggagctgggtccgtgtaaccatgcgtgtgaggcggccctgtcaacagctggccatgcccccacatggggtgcagtgggaagcccc

SEQ ID NO: 144923 - DNA, 122 bp, Homo sapiens
acatcagcccccgcgaggctgcagctcccaccttccttcggctgtagcttccgagttcctcggttacaacgtgcaacgggtcaggtggccaatgtccttgatctccgcacagtagagcactg

SEQ ID NO: 144924 - DNA, 122 bp, Homo sapiens
gagggacctgcttgcaatcaccttacaggttcaaggtttggggagagctgcttgctggtgcgccctgactgtatgatctgggaaagaggggttttgggtctgtttaagatggatcttcagat

SEQ ID NO: 144925 - DNA, 122 bp, Homo sapiens
actcactgtcagaatattcttatacatacaatgagtctccacgcctgtacaatgagtgtacgtgcaacataattggagtaatggcctctaaaattttacaagtaaactttattgtggccaca

SEQ ID NO: 144926 - DNA, 122 bp, Homo sapiens
aactcgcctccttctttccccctcccccctcagcttactaaccccgcgcacagagctcgccgccggcgggccccttccacccagtgtatcataatgcccaacgctctcctcctccccctctc

SEQ ID NO: 144927 - DNA, 122 bp, Homo sapiens
ccaacgcccggggtttcctagcaactaaagcacacaaggcgccctgcacagcaggcctttcgtggggaacacagacgcatgttaatctgtttgcagattcatgtttaatagaacgcccttct

SEQ ID NO: 144928 - DNA, 122 bp, Homo sapiens
gctgcgcaggatgtgcggggagaactggtgcttgaggctgcagaggaagctccagagctccgcgtccgagctcatgaactccgtgctgcggggcatgaagagcttgaaggcgtcgcccagcg

SEQ ID NO: 144929 - DNA, 122 bp, Homo sapiens
ttgctcacaaggcagaaaatatcagaagcaacaatattttgaagtttgctttctttccttcggttcaaataacaagagttaacctgagagagagaaagaaaaagtaggaaatttagaatttg

SEQ ID NO: 144930 - DNA, 122 bp, Homo sapiens
gggggattggtccgtgtggtgatgtgtctcatcttacaatgtcctatgcagccttcaaagcgtttttagatcctggcaaggaaacagacattcatgtgcgtagggtttgcaaggcctctgca

SEQ ID NO: 144931 - DNA, 122 bp, Homo sapiens
ccacttccaatctcaccggccgtcactgcctcctccccgagcactgaagccgccgaaacccgaccaaagactggaagcggccacgtcacctacacgtaaccccacccccagtgacgaggggg

SEQ ID NO: 144932 - DNA, 122 bp, Homo sapiens
agaaattagccgggtgtggtggtgcgtgcctgtagtccagctacttgggaggctgagatgcgataatcacctgagcctggggaggttgagtctgcggtgagccatgatcatgccactgcact

SEQ ID NO: 144933 - DNA, 122 bp, Homo sapiens
tcccccacaggctcggaaatgcctgctcctgctacctggcctgtatctgttcttggcgcccgctccgatttcggagaaaagttgaggccgagtccgggtgctgtggtaacctggccgggtat

SEQ ID NO: 144934 - DNA, 122 bp, Homo sapiens
ccgacggtggaaacacacgtgtgcacgcagagaaaaaccctcccggggcaggcaccaacacgcaggctgtgctcattctgggtgtgagatgacgggtggattttattttcttctctaactgg

SEQ ID NO: 144935 - DNA, 122 bp, Homo sapiens
cgagctctcacctcatcagagggagtttaactgaggggcgtgaggcggagtgaaagagaccgaggcctctttgagcgcaggagtgcaggtctcccagatggtaccagagcagaaagacgagg

SEQ ID NO: 144936 - DNA, 122 bp, Homo sapiens
tctcaccccagagttcaagcaccaaccgaaaagattgagagtagctcagggtacggtaaacggaggaagctttgaaaaaggcggggaaagcctgggatggcgagggggtgctcgctgaggag

SEQ ID NO: 144937 - DNA, 122 bp, Homo sapiens
gaatcaaaccaacaccatggccagatgagggcagtgagagaagggaaggggaggggagcccggagaagccttgcagtaaaaagtgagatggagcagccgactggccctgcccagactccctg

SEQ ID NO: 144938 - DNA, 122 bp, Homo sapiens
cccgaggagagtcttggcaagggggctgcacaggagaatggggcccctgagtgttccccccggaatccgctggagccctttgccagccttgagcagaaccgggaggaggcccaccgggtgag

SEQ ID NO: 144939 - DNA, 122 bp, Homo sapiens
ggagtcgactcacctgcagcaggcactcggcacaactccgcaggaccggctcacctgcaccgggcactcagcacagcctccagcatgcagcgcctccccgctgccacccgggccaccctgat

SEQ ID NO: 144940 - DNA, 122 bp, Homo sapiens
caatgtggctgggaagtgccctgtgacttggttcaagaagcatatgaaccatagagctaacgaggcctaacattcagggtcctgactcacatgagctccttcttaaggtcctagcaggggcc

SEQ ID NO: 144941 - DNA, 122 bp, Homo sapiens
aagataactaaaaatcaggcagtcttgggttttgaaaccagatctaactctcagttttcacgtttattaaaaaaaaaaaaactagcaatgggtacatgagttgtaagagccattctacctct

SEQ ID NO: 144942 - DNA, 122 bp, Homo sapiens
aggctggagcaggaggatcacttgagcccaggaggctgaggccgcagtgagccatgatcacgctgccgcactccagcctgggcgacagggtgagatcatctcaggaaacaaagctttatgga

SEQ ID NO: 144943 - DNA, 122 bp, Homo sapiens
cagctgggggcaggtgtcagaggcctgtgcctgatgcagtgacaccctttagggggtgcccgctgcttcccgttctgtaacgatcgctcgctaggggcggggcgcgtccgttctcttcttcc

SEQ ID NO: 144944 - DNA, 122 bp, Homo sapiens
tgtctttgctgctagaatcttaattccagaaggcactgatgtgcagtcccttcagattctcgaacacacacagggatgagggttccacacagggtcaacatgcagttcccacgtgaggtggg

SEQ ID NO: 144945 - DNA, 122 bp, Homo sapiens
ccagctcctcccaggagcctgggccttaaatagccagagcagaggcctctagccagaacccgtggtcgcggtcataagcacaactgtccttgagcctgagaggaatcctaggaattttccca

SEQ ID NO: 144946 - DNA, 122 bp, Homo sapiens
agagaggaaccggaaccagatgtgcagtgagggacagcagctgggggccatcccccaccccgcctgccgcccgcgctccctcctgcccgtccccgcctgccgcccagcccggtccagcccct

SEQ ID NO: 144947 - DNA, 122 bp, Homo sapiens
ggcggcgacagagttgaaggcgtttggagtccccgtggctggcggtgatggagttgaaggcgttccgaatccccgtggccggtggtgacggagttgaaggcgttccgagtccctgtagctgg

SEQ ID NO: 144948 - DNA, 122 bp, Homo sapiens
agtatcttctacaactcaagagtgtctttctcaaggacctgaaagccattccttgaatgtcgtcatcctgaaggataaggcctctttgtgggaggacagaatcctaactttgataattgcca

SEQ ID NO: 144949 - DNA, 122 bp, Homo sapiens
cagacacgacttatcacccagagtgctctgcacagagctccccactataacagttgctgccgccggaagtacaggtatgggacgggaaagccagaggtaggaaggctcagaaggagacagat

SEQ ID NO: 144950 - DNA, 122 bp, Homo sapiens
ggactcctctgccagatgggagagaatggagggaagagagaaaggggctgtcctttgcaacgctgccagttatgcaaagggcaaatgtgcacctcagccctaatccaacaattgcagatttt

SEQ ID NO: 144951 - DNA, 122 bp, Homo sapiens
cagacccagccacctgcttcttgaccacagaattcgagatttactcatgagctctcttgacgcactgactttgggatgcaaaccattatgactaggggcacttcccgtggcctggacttcca

SEQ ID NO: 144952 - DNA, 122 bp, Homo sapiens
gcccagactgggaagaagtatctctaaaaagcctataccccaattttgggatgccaagcccgcatcctccaccatgattattttcttgaaagtgaggagaagactgggaagaggtagctcta

SEQ ID NO: 144953 - DNA, 122 bp, Homo sapiens
acgggctacaagttatccactgcctggaggtggtaaggggctatgaagtttactaagccacgctgttcacagtaaggccttctgcaataaaaacatcactgtatggaaaatacagtaagcat

SEQ ID NO: 144954 - DNA, 122 bp, Homo sapiens
tccagtttagaacctaattcccaattcccggaccgggcccagccctgggctcttactgtccgcttttgctgggacctgttccacaaatgggcgtcttctgccttgggccgtgggggttgggc

SEQ ID NO: 144955 - DNA, 122 bp, Homo sapiens
ctggagtgtaaaatggtacaaccactttggaaaagtttggcagttcttaagttaaacatacgcctactataatccagccactctacttttaggaatttacccaaacgaaacaacagcatatg

SEQ ID NO: 144956 - DNA, 122 bp, Homo sapiens
tacccccaaatcctgctcctggcacaggaaagctcaggataaatgcctgagatgctgtttcggggacattttgtcccctggctttaggtgaggattggcaaacatgagtggtgtccaatggg

SEQ ID NO: 144957 - DNA, 122 bp, Homo sapiens
gggctggggagcagctggggagggagcggaagtgccaccccctgcagtcaagggtggtgacgtcacccctgcagccagcctgtagcgggggtgtctgtacatcacatgacccggcccccctc

SEQ ID NO: 144958 - DNA, 122 bp, Homo sapiens
cacagagccgtcaggctggcagcggcacacactaacagtcactgtggcagtgctgctcagcgccggctgcccccagtcccacagttctatgggaaccaagtagggggcatggcggggtggag

SEQ ID NO: 144959 - DNA, 122 bp, Homo sapiens
atcaaagaaccttcggaaggtgaattcgtaaaatgcgtgctcaggatgcttgttattgggcgaggtgagtgtgtcccaggccttggtgctaccttcgctggcatcgttccaagggctttctt

SEQ ID NO: 144960 - DNA, 122 bp, Homo sapiens
gcgctccacacagtccacggtcttcatgttggagaagtgcagttccttgagcttgaccggcggctcgaggctggcgacagcggggccactgggttgggacggctcggccggcccctgcccgg

SEQ ID NO: 144961 - DNA, 122 bp, Homo sapiens
tctctccgcttaggctgcaggctgggcatcctttttcaaactcttttagcacagcgaagtcgagggcactgggtggagggtgcttgcttgccctcagggtgagtcacagtgacctcagagga

SEQ ID NO: 144962 - DNA, 122 bp, Homo sapiens
acctagaagaagagaagagagtggggctcatttatattctgagatttaaatgagatgtggcgggaggactcttcatcccatctgattaaacctacacaagagttcatgtgggggcacacaaa

SEQ ID NO: 144963 - DNA, 122 bp, Homo sapiens
tatctgcttcttcaaagcatgggtgacttaagaggacttttaaggaaaattctgactatgcgattgtttctttatgtgatacctctagaatctaattgcctcttaaagttactctctactgg

SEQ ID NO: 144964 - DNA, 122 bp, Homo sapiens
aggaccatgaggcgagagtgaatacgattcgttccgctgcttctgactcatccggcagatcggaacacctgcatttctggatgtgtcattcccgtatgtcgaggcgcctccagaacccgaaa

SEQ ID NO: 144965 - DNA, 122 bp, Homo sapiens
gagcagcgcactccactgagtcctgttgcatctcttccgacatgtccgtatttttgatcacggccttttggtcgcacttggttaccacggagaactgcaagggtctcctggggaaggtgcta

SEQ ID NO: 144966 - DNA, 122 bp, Homo sapiens
cactccctaagcgtgtaacaaaaatatggtgcctagcctcggatctacaaaggcctttcacgcaaaacctgctcagatactcactgcccgttcccgtcgccatcttggccccgaagtctcca

SEQ ID NO: 144967 - DNA, 122 bp, Homo sapiens
gaatttctggtcatttgtaaaaagaggattatgagcagagggattttcctagcaccctgccggagaagcagggacacccagtctctgaagtttgccgctgggtcagatcatgatgcttcaga

SEQ ID NO: 144968 - DNA, 122 bp, Homo sapiens
gccccggcgggtagttctttgggcgccgtcttttgagaaagtcagcagcgagcagaaaggcgacagtgcccagtaggagagtccgaggatggaccactgcccagagggcagccgccagagag

SEQ ID NO: 144969 - DNA, 122 bp, Homo sapiens
ctgcgtatagatgaatgggtcaggatatctggaacaaaatatggaggtgaagggtgagatcgggaaacaaagggtatggccccctagttcccaaagggagcagggagatgggaatagaattg

SEQ ID NO: 144970 - DNA, 122 bp, Homo sapiens
ggagacccgtagggagagtgaactggggtgggaaacgtggtttagggcccactgtaaccccggtcctatgtgtggggccctgaggacatacagggactagaggcctggctgtggggccgggg

SEQ ID NO: 144971 - DNA, 122 bp, Homo sapiens
cgctggtgatgatcttgtggaacacctgtgccaggagggacagaggcaccgtggggtccccgctgcctccagactcagccaagaggacaccacccctgcacctcctgggcccggccgcacga

SEQ ID NO: 144972 - DNA, 122 bp, Homo sapiens
gcgactcggcttgcaaccacccaaggggttcaccttgcccgctgcctagacagagcctatcgagatgggggaattgcaatagagaaagagtaatttacacagagctggctgtgcaggagact

SEQ ID NO: 144973 - DNA, 122 bp, Homo sapiens
gcgtggccgagggtgtggcctgagggagtgagctaaccgggggcgtggcctgatatggggcggggggaagagccgggctgggggcgtggcctggtggggagcggggctggggcgtggcttgg

SEQ ID NO: 144974 - DNA, 122 bp, Homo sapiens
gcccatgtggacacgtctgcagccacacatgctttcacggggcacatgggaacgtacacgcgaagggtaatgcgtgcacacctgtgcagccaggtgtgcatgagcgtttctgcacaggccag

SEQ ID NO: 144975 - DNA, 122 bp, Homo sapiens
ctgggaagtagaaaccaggacaaattctctcacacaagtcctttgaaaaaggcctactcacgcctgtggagacatctgaccacagggccaagtcttatcccagacaacctctacattctcca

SEQ ID NO: 144976 - DNA, 122 bp, Homo sapiens
ttaagagcctgccactggaatggaaggctgtgggaaggtgaggggacggtggacatcaaccgggaagagctgaaagatggcgttaccaggtatctaccctgctaccctgcatagaattccca

SEQ ID NO: 144977 - DNA, 122 bp, Homo sapiens
ttggcacgcggcgggccgggctgacgcgtggcagcgccctgcggcagatgaggcacgcgccggcctcatttcaatgtgaatggatcgaatggagcagccatgtggcagcaacagtttgcaaa

SEQ ID NO: 144978 - DNA, 122 bp, Homo sapiens
ctgctaaagactattccgtataggattcgctgagaggtttggctaagtagtgttctaaaacgagtgagttctgtccgtatgtccccataaaacggaatcttccagttttgtagatgtctaag

SEQ ID NO: 144979 - DNA, 122 bp, Homo sapiens
gctggagagggaggaggaccctccgcggctccaggcctcccagctggaggggctcacgcccgggactccccatcagacctttgagggggagcttctcaaaaagccctaaactcctcgaggat

SEQ ID NO: 144980 - DNA, 122 bp, Homo sapiens
agcttcccgcagaagctccggatagggtccatgctgagcacagcggggaaggactccaggcgtacgcagaccccaccgctcagctcacagcctcccgccactagtttgaatctcggcgccgg

SEQ ID NO: 144981 - DNA, 122 bp, Homo sapiens
ggtcattgagctgaagaactgtcagagtcaccacctccacagtcaagtggcaatggaatccgaagacagggtcagctcggtacaccacgagccgagatccacgggacggacggtgtgcaggc

SEQ ID NO: 144982 - DNA, 122 bp, Homo sapiens
gcagcagctttactgcttgtatggtgacaactatcttgtcatgtgactttagggcagtgacgaatgtcacaggtagactagtggtgggtctacggtgttggaatcacatgatgaagatggaa

SEQ ID NO: 144983 - DNA, 122 bp, Homo sapiens
ccgctggagccggaatcctgccggctcgggttgatttgtaaacaatgggtgacgtcgcgccgggccctaccaccgcaccggggcgggggtgacgcgcgagcaggcacgggggcaaagggcgg

SEQ ID NO: 144984 - DNA, 122 bp, Homo sapiens
gccctccaaatgtttttgccaatggcatcctctttcaattatttagctgtttcttttggtcgccatcttcatagcactaaataattatgttgcccttttcactacttaaacacttacacatt

SEQ ID NO: 144985 - DNA, 122 bp, Homo sapiens
agatgtttctttccatattatttcctacctccagaacaaaggctatctgtgtctcacattcggaggcttggatgtgaagccctgtctgttcatttttctctccagttttttcacaggctggg

SEQ ID NO: 144986 - DNA, 122 bp, Homo sapiens
cagcccaagaccatggattctccacccgagccccgctccaacccgggacggcccccaccccgcccctgtgccacccttagagtgcatgtcacctgacctgcaaacaggctgggccaagagtg

SEQ ID NO: 144987 - DNA, 122 bp, Homo sapiens
ccagaagtggagcaagctttgtgagtttagagagcagcaagaagccagtatccctgggaccggggagctgatgtgggatttgtgtacccacaaacacgttctaggtgctaaccagaaaccct

SEQ ID NO: 144988 - DNA, 122 bp, Homo sapiens
ctgcaaaatcccccaagggggtgttaaacaaggacttttgtagcagtagaaagtcttgttcgattttccagatgaattttttaatttgaagtctgtaggttgtgcttttgatcttctttact

SEQ ID NO: 144989 - DNA, 122 bp, Homo sapiens
agaaagtcggttccttgacaacagggccatgagtgttattcatctgtatattcccagtgccggacacgctgcagggacttgataaatgtgtgtggagtaagagggtgaatgagtgagtgagt

SEQ ID NO: 144990 - DNA, 122 bp, Homo sapiens
tttttgataatctcgtcaataaattacagaacaattgttcctttcaagatttattcaaaacgtgtcaactctgcttaattaagcactttgatgatttaagaaatcttggtgagtagcttagt

SEQ ID NO: 144991 - DNA, 122 bp, Homo sapiens
ctcgttgccccagcctcgcgggccgcctaactgccccgttccaagggtgccaccggaccccgctggagaggaacttctccgttggctggatttcatcaccacccattcccgattccacgttt

SEQ ID NO: 144992 - DNA, 122 bp, Homo sapiens
gccctgaacatttcgcaagcggcgaaggctggcgcgtgttatcctgggcacccaccggaccgaatcgctgggcagggctgcaaggtgacttgctaacgcaatcagaccagaaaggagcgcgc

SEQ ID NO: 144993 - DNA, 122 bp, Homo sapiens
tggggaatgtggtcagaggggtagggggccaaggtggtgtagggttactaaagccaaggccggaaagacttttaagatgctttatattgtaaagggccctggaatatttgaataaatgggaa

SEQ ID NO: 144994 - DNA, 122 bp, Homo sapiens
agccgccggcagcgtgcgccgagccacagtgactgtggcgggaggaggcgcctgagccttcgcgccagaggcggcagtgctgctccgattcctgcttgtccctagcgagccagcgagccaca

SEQ ID NO: 144995 - DNA, 122 bp, Homo sapiens
gcggcggggccgcgggaggggcgcgggggcagacaaagccgcggtaatgaatggagcgtccgcccgcgccgccgtcgtccgcagccggccgggagccgccccagaggccgggccgaggtgag

SEQ ID NO: 144996 - DNA, 122 bp, Homo sapiens
ggtctccgctgtgcagagactgaggcggcccctgctggcggcggtcagtactgcaggaggcgccgagggcccgggagcccccaaagccgggaggggcgccccagagggaggtgagcggcgcc

SEQ ID NO: 144997 - DNA, 122 bp, Homo sapiens
gggtgttctgctgccgcatgcagcagtggacggagacccgcatctacatgaccaacctggcggtggccgacctctgcctgctgtgcaccttgcccttcgtgctgcactccctgcgagacacc

SEQ ID NO: 144998 - DNA, 122 bp, Homo sapiens
agggggcagcggcagagaccctgagaggtgggagggaggcaggttgggaagggccggtctcggcacaaattgctcttcagtgtggtccctccaaggcctcctcttgagtacctcagagagga

SEQ ID NO: 144999 - DNA, 122 bp, Homo sapiens
gaaattttcccccagaagaatctctggggacccagttgtcacacaccgctggattcactgcggtgttgattctgcctcctgatgaagttcttcccgagtctgacttcgagcccgcctgcttt

SEQ ID NO: 145000 - DNA, 122 bp, Homo sapiens
tcttggcttgtagatgaccggggccttctctctgtgtcctcacagggtcttccctcagtgcgtgtccgtgtcctcacctcctcttgtaagactccagtcctatgagattaggacccactgtc

SEQ ID NO: 145001 - DNA, 122 bp, Homo sapiens
agggccatgctcagctcaagcaggagccgcagccagtagatcccgggggtgcagggcatgcgggggacacagtcccgggagggcttgtgcgtcaggaaactgaaggaacacttcatttctct

SEQ ID NO: 145002 - DNA, 122 bp, Homo sapiens
cccctctgcgctgggattggcttagtgctgggattcccacccacccacagcccgccatggcgtctcagctccagaaccgactccgctccgcactggccttggtcacaggttgagggggttct

SEQ ID NO: 145003 - DNA, 122 bp, Homo sapiens
gggcatccgtttgtgggactctattaagtccaatttaacaacgcttaacttttgcagccacgttccatgacaaatatcaagcatttggccaacaaaaccatggtcattagttgtgtagtaga

SEQ ID NO: 145004 - DNA, 122 bp, Homo sapiens
agcaaagcaagacagttacagaaagacgccgtaaataaaagacacaattcccagcacatccgaattgccttgtttttcgaaccaaagcacgctgcgttgcgaccgtcaccacatttgaaagc

SEQ ID NO: 145005 - DNA, 122 bp, Homo sapiens
tgccaagggagcacgggagcggggagagaaggggagctcctcagattccagcatcagcctcgacaccactcctctggcctcagccccagttgctgtgcctgagcaactccccactcacctct

SEQ ID NO: 145006 - DNA, 122 bp, Homo sapiens
aacgctcaacttcactttcacagaaatgcaccaaaggcagcctcgctctgtggtctgcagcgattactgcaccaggagaaggcacccctgtacctgcagcacttctgggccagggctttggg

SEQ ID NO: 145007 - DNA, 122 bp, Homo sapiens
atccgtttatgtctgaatgactaacacgtctgccagcctcctgtccgagagcatctacagcgcacgtcggctaccccgggagggacgcgggcctgagtaccgtcttggccgcgccgcggcgt

SEQ ID NO: 145008 - DNA, 122 bp, Homo sapiens
ctgtgtggcgtggagcggcggcccgtggttcaggtggtgaaccggggggatcggccgcggcgcgtgagggtctccgtacatggaagcgggaacccctactccgtccatcccgccgtaatggg

SEQ ID NO: 145009 - DNA, 122 bp, Homo sapiens
taggggaattgctttgagaaactccactcaaccataaagacgggtttaacttttctagagcggtgacattggagaaatagcttcagtttgtggagacgttctcagctccctgtggtggggga

SEQ ID NO: 145010 - DNA, 122 bp, Homo sapiens
tcaggagcacgagcacttgccaggggacgcctggggcgcccctcctcccagaagctcccgcggaagactggagcaggccacctggctgcggataatgggaaccacagagtgagagaactcca

SEQ ID NO: 145011 - DNA, 122 bp, Homo sapiens
acacctcgtggggtctctggaaggcttaacacagtgctaggttcctgtgctttctggatccgccctcttggctagccagatccagtctcttcaactctctcctcctgaactttctctttcca

SEQ ID NO: 145012 - DNA, 122 bp, Homo sapiens
tattttctttaaaaaaaaatcaaaggtccttctgagatagtattgggatataaagataaacgtgacaaaaacatttgtgcttcaaaggggaaccagtataaagccataaagcccactttctt

SEQ ID NO: 145013 - DNA, 122 bp, Homo sapiens
cctcgaaacttacgatctagtcgttaatggatgactcaaaagagaatgcctgggcaagcacggtggctcacacctgttatcccgacactttgggaggctgaggcaggtggatcacctgaggt

SEQ ID NO: 145014 - DNA, 122 bp, Homo sapiens
acccagtggacatgaaacacggcccgtatctctgtgattgtctctgtgttcacgtcagaacgcacgtggtagggtatttgcgtgaaatcgcgcgtggtagggtgttcgcgtgaaatggctca

SEQ ID NO: 145015 - DNA, 122 bp, Homo sapiens
ctgtgctaaaaataacaatttcttgtgtcaagaataactttctcaagttcctggaggaggcgagctgactggtggcaacgcagaccactaaagcttcagtgagcccagaaagtgtgcgctca

SEQ ID NO: 145016 - DNA, 122 bp, Homo sapiens
cggatccactggtcctccttgtccctcacatcgaagtacccactgccatccaggatgtagcggatctcatcgtccaagtgcaaatgctcctcgtagaacatcttaatctagtgcagaaggaa

SEQ ID NO: 145017 - DNA, 122 bp, Homo sapiens
acatcttcacacgtccaagagtactcacactctggattcttacctaagctgtctactacacgcccttctgcccacaaactgcttcaaagctgaagttgagctggagcagtgaagttgtaccc

SEQ ID NO: 145018 - DNA, 122 bp, Homo sapiens
ccccgcgaccccgcgaccccgcgaccccggccggactgccgagcgcggggggagtcactgcgctggccccgcggcccagcccgaggactcggttattgaaagggtccccctcatgggacccg

SEQ ID NO: 145019 - DNA, 122 bp, Homo sapiens
aggatgcccccaggaacaaagccagccatccctgagagaaaccctgggtggggctggggccggcacctgcccagccagctttggaagcagacttggctgagcacatcatggacttcagggtc

SEQ ID NO: 145020 - DNA, 122 bp, Homo sapiens
ttcctgcggaagcgcctgcgcccaggtgagagcccaggtgtgtgcgtcttaaaggggaggcggccaggtgagcagcgctgtcggccaacttgaagatggctgcggggccgggagaggtactg

SEQ ID NO: 145021 - DNA, 122 bp, Homo sapiens
tgtgtagaagcagggagggggacgcctgggccggagagggtcctagggccagtccctgcgcgccttgatccgggcggcggctaagggagagccgagcacagatggcgccgaggcggaggtct

SEQ ID NO: 145022 - DNA, 122 bp, Homo sapiens
ggtgggggctgggcgtcccccaaacctattgctttgtttcctttagtttagaagtgaacacggccgtggcgttcgtaagaagcaaaaccttccagagaggagaggaaaggacgcggacagag

SEQ ID NO: 145023 - DNA, 122 bp, Homo sapiens
ggacccaaacgctgtgctcgccgggcacatggagcgacagcctagaccgagctgccgcttcgatcactgccccctgcacccgccgtggccatcccggagccccggtggaagcaacgccgcgg

SEQ ID NO: 145024 - DNA, 122 bp, Homo sapiens
ctcggaggaggcgggactgggaggagaggacggggcttttcagtgccacgaaaagggtggcgtagagaaagagagagagccttccaggctacctgcagaaggagagtcgcgatcgcctttgg

SEQ ID NO: 145025 - DNA, 122 bp, Homo sapiens
caatcccctcagcggctactgcccgccattaacaggacagcgcaagaggaggcgtaggcacgccggaagtgaacccggagcctctggcggcaggaagtagaggggcggtggcctgccagacc

SEQ ID NO: 145026 - DNA, 122 bp, Homo sapiens
tcagtaattgtttaattcctgctgaaacccacggccactgtgcctttggaagctgggatgcgccagaggcctccaggctgcacagtgccccctggggctggcaccgtgccaaggccaggcaa

SEQ ID NO: 145027 - DNA, 122 bp, Homo sapiens
actcctggttgaaggcaaaggcgctgacggcagcccaaggctcagggaggcgtggcgtggcgatggtgaggggcggggttaggggcgggattaggattcttgtcccttagcgaaactgcgtg

SEQ ID NO: 145028 - DNA, 122 bp, Homo sapiens
agtgaaattattttaaagggcaactttgctactgtaaatggaaaaaaccgtgtttcttggcgtaagtagaagctaattataaaatataaagacagactccaaagaaaaagaagatatgtgta

SEQ ID NO: 145029 - DNA, 122 bp, Homo sapiens
gaagtgtaaggcgaaactacctgggcaacctcaagcaatgctttacactcggctgccaaacggaaaggaccacttccgcccagctctcccgctacggggagccaagtgccacagcatccgga

SEQ ID NO: 145030 - DNA, 122 bp, Homo sapiens
ccctcgggcgccagcccggcccctcgcccgcggcccgcccgggctgtgacacatcagcaccgccctcgcggctggggccccgtattgtcctccgccgcctcccaccgcatgcccagcctcgc

SEQ ID NO: 145031 - DNA, 122 bp, Homo sapiens
cttggagtgctcgcagcagggaagaaggagcgagcagggaggagctgaggagggtcggagcggaatggacacccagagactgagatgagagaggggctataagaagagaaaccagtcgcagg

SEQ ID NO: 145032 - DNA, 122 bp, Homo sapiens
cacattctattaaggccacagcctcggttttgccaactggggcaactgaaaacatcctaccgactctctacagctagcaaaccatctcggctaaaatcctggcacatataaacagccacttt

SEQ ID NO: 145033 - DNA, 122 bp, Homo sapiens
gcgacagagcgagactccgtctcaaaaaaaaaaaaaaaaaaaaaagaacattacgtccagcggactgaaactccagaacggctacgatcttcgctgaaactactacttacagatacgagaac

SEQ ID NO: 145034 - DNA, 122 bp, Homo sapiens
atgcgagaaccttttggctctcgtatgtgcgcatgcgtctggatccggagccaggtgacccgctcagacgtggaccatgtgcgggggaggggggaaaggagccgcgaagggggtggtagacg

SEQ ID NO: 145035 - DNA, 122 bp, Homo sapiens
cgctgatcttccaacttgattttctttcagactctagttgcagtgacacataaactatggcgcaggcttaactcatgtctgccctctacttatcctccccgccccactgctgggctcactgt

SEQ ID NO: 145036 - DNA, 122 bp, Homo sapiens
cccgccccagtgcctgggccaggtgcggttcgggtgttcaggaatgttcccgagctctgacgttcccaggaatccgctgagatgagggctggctccctccctagcaggcattattgtgcctt

SEQ ID NO: 145037 - DNA, 122 bp, Homo sapiens
aaggcacccaatgagtattgctgagttacctttgttaaaaacctatctaggagccgggcgcggtggctcacgcctgtaatcccagcactttgggaggccgaggcgggcggatcacttgaggt

SEQ ID NO: 145038 - DNA, 122 bp, Homo sapiens
acccgcccgtggtccgttcagcccaggccctgctctccccattttgttctttgttctgtgcggggctctggaaagccctgcacgtgtttgctgcagccccgcaggccagccgtgggatcccc

SEQ ID NO: 145039 - DNA, 122 bp, Homo sapiens
gttcattaaatgagctctgaacaagcctatccggaagaagttccttggtaagtcccaacacgaacagccaggaagcctctagaaggagaagccgggcgcgggccaggcctgcgggaatgcag

SEQ ID NO: 145040 - DNA, 122 bp, Homo sapiens
acaacaaaactgccagttacagcaggtttcctctatgcaggagggccttcagaaaagtgacgaatccttctctcctgtattgaccaaagctgtaaacagccggacaacgtttgggcccttta

SEQ ID NO: 145041 - DNA, 122 bp, Homo sapiens
actgtgcacaaaactcttactacaaacaaggcacttagaggccttctcacccatgtggagcgcaggtgctgcaacagggtggagccaaggctgagactcttgccgcagtcccctcagcggta

SEQ ID NO: 145042 - DNA, 122 bp, Homo sapiens
ctggaaggagggctgtaccgcggtgtcgtccgggaagctggtgcccagcgggttgatgaccggaggggcgccggaacggaagtgcctggagacgggagagcagcaccgggttcaggcacagg

SEQ ID NO: 145043 - DNA, 122 bp, Homo sapiens
aatgtagaggtcatttatgcttccaaagagagtgcttcagggctaatggcttcaagagctcgaggtaggagtaggatctgcagcagtcagggatcagaaaacaggaatttgttcattagtgc

SEQ ID NO: 145044 - DNA, 122 bp, Homo sapiens
ctcagtgtcagtcgggcccatctgtctttgtcatggcatgtgggtggacatcccgtgtgccggcaccgccacgggcacttcagaggcagctacggttacaagtggcattcaagtcatccgag

SEQ ID NO: 145045 - DNA, 122 bp, Homo sapiens
gcccggccgccccgcccgggccgcgaggccacctcacccgcagcggaatggaaaccggttcgacaggtaacaaataggtgggttgtcaccgttatttcccaacgcatgcgccgtcgctcccc

SEQ ID NO: 145046 - DNA, 122 bp, Homo sapiens
tatcctcaggagggcaaagaaagccacttctctaagcacgccgggggcatactggctgcccgcccaacagatgtctggatcagtctgaatcctgggcacccgggagaggaaatgaattccct

SEQ ID NO: 145047 - DNA, 122 bp, Homo sapiens
aaggatgtttatttttcatgattatacttaccataacagtctagcatcagcagtaagccccgcaattgagataccaatatggttgtcaacatggagaatttttttctgatgagctgcaagct

SEQ ID NO: 145048 - DNA, 122 bp, Homo sapiens
tgatttggtggttaagagtctgaaaatcggtcatccttaaggtctggagctcagaaagcacgccgcccccccttgcctgccccctgccccaggacgccggatgcgggtcgcctgcccagtcc

SEQ ID NO: 145049 - DNA, 122 bp, Homo sapiens
gtgaggccgatacggagatccaggtggtgctggtggagaatgggcccgagacaggcggagcggggcggctggcccgggccctcctggcggacgtcgccgagaacggtaaccgcgcccgcccc

SEQ ID NO: 145050 - DNA, 122 bp, Homo sapiens
gtggctaatactctgttggcccggcattctgtctactacggtttgacgttaacttctagccgctctgtgtaactagacgggcgctccccagtcctgtttgtgtgtatgagccctgcctcctg

SEQ ID NO: 145051 - DNA, 122 bp, Homo sapiens
cctttcagaaaaataaatggccttgccaaaaagtaaagccgcgccaacttgggggacagacgggcaagaccttgcctttgcaactcaaccccgtgagtacccagccaggtccggccacgcac

SEQ ID NO: 145052 - DNA, 122 bp, Homo sapiens
gatatgcatagtactcccagaactcattaagttggtagtactgtgcatatcatctatgagcgaataggctcagacagagtgagttcctgaggtttgaagaaccagttggaaccttggcagtc

SEQ ID NO: 145053 - DNA, 122 bp, Homo sapiens
ccctgagcaatacccacctctgtcccatagatggcagcatttcacaaacaacgccgccaccgggacgcattgagaactcagctccagtaatctgttgacaggattaaggacccctgttgttt

SEQ ID NO: 145054 - DNA, 122 bp, Homo sapiens
cagcctaagcagaagagaactttgttagcagcaagggcttataaactttcaagaaagtgtcgcgattcactccaaactttgctagttttttcactagaagcggagagtcggggtgatggggg

SEQ ID NO: 145055 - DNA, 122 bp, Homo sapiens
tctatgattggttcagcctcccctaactggtggcaattacgttgtatgagtacacgttaccgttagccagtcagaacaaccacccctcaaacacaacatatataccacacacactgttgttc

SEQ ID NO: 145056 - DNA, 122 bp, Homo sapiens
actgtgatgacgcccagatcataccagtccccagaggtcaagttatctcaacctacaggtcgttccagatgataacccagtaattttgcaacaaaggcaagccagctcctatgttctgctta

SEQ ID NO: 145057 - DNA, 122 bp, Homo sapiens
cttatgtgccagcgaactgagaaggtccagggtaccttcacctgcactgccacagtcacccggtctcgccccaggtaatcaacctttactgattttcaacggccctggttccctatactcag

SEQ ID NO: 145058 - DNA, 122 bp, Homo sapiens
tctctagtgtggaaactccccaaaccagacaggtctactgcgcagaatagggtggaggatcgagtccagtcactgagccctagcacttgccatgtgaaccataaggccctgaacactggaaa

SEQ ID NO: 145059 - DNA, 122 bp, Homo sapiens
ccgcccttcacgcaggagtggaggagcggagcgcgcacccctgaccccggcctcagcttccgttctccctgcaggtcgcccgtatgcagcgccaccatcccggccgctcttccaatctcgcc

SEQ ID NO: 145060 - DNA, 122 bp, Homo sapiens
tccgattaactctagatttgattacttttcttagtctaggaaaactgtgttacagtgatgcgaggatctgtagaatgacgtggatgttacccctgagatcaaagttactattaatatcaatt

SEQ ID NO: 145061 - DNA, 122 bp, Homo sapiens
attaggtctgagctgcagccatgtgaactggcaggccctcacaccagaccccacaggcaccgggccatgtctctgtcccgaactgccctgggggccatgagacactttggctcctcttctgc

SEQ ID NO: 145062 - DNA, 122 bp, Homo sapiens
gactgggtcttagaggggcaaggctgggctgggtgggggaagcccaggagggcagcccaacgcgccccgactgtcgaggcccgggaccctgacagtgaaccccacacgcccagcacggacga

SEQ ID NO: 145063 - DNA, 122 bp, Homo sapiens
attttaaaaacagcacatgaaatacactaccgcacacccacagggttacttcttgaaagacgcccaagaaactggtaactgactgcctctggcaaagggcattaggggtttagaacagtacg

SEQ ID NO: 145064 - DNA, 122 bp, Homo sapiens
ttgggcccttatggtgcctgcctggccagggggtgcaaattcagaagtctgcccgggaagcggaccctggcacccaagtagacccctcaggggcctcaaaggacaggagggaaggcttgggg

SEQ ID NO: 145065 - DNA, 122 bp, Homo sapiens
tagatttggtcggtaatggtctggttgttgtagttgaagtcctccaggcgcacaccagaacggccgcctcctccagatgtcttgttcagggccagtgccaaggcccagatggcatcataggc

SEQ ID NO: 145066 - DNA, 122 bp, Homo sapiens
acctgagacaagaagccttgttgctatgggtgacttttagtgacctataaattttgcaggcgcgccacggcactctattattgctttctttctctgagtcactaattagatcctgatgattt

SEQ ID NO: 145067 - DNA, 122 bp, Homo sapiens
ggggtggccccaccaaatgcatccttatgggaacctgctccctgggagccatgaaaagagcgtggacttcgaggtggggccacaggaagtggtcaggtccatctcaggggacctgctgccca

SEQ ID NO: 145068 - DNA, 122 bp, Homo sapiens
atggaggacctgtggcgacaatggcaagagtggtcagccccgggccgggctgggatggcccggctcgcgtcggcccctcagtgtgtccgacggtccggcccagaggccgcgccccccacggc

SEQ ID NO: 145069 - DNA, 122 bp, Homo sapiens
gcattccactggtctgctcatgaaacgggaggcggttcagccgcctgtgggagataaacacgccaagccttcagaacaactgcagaaatgcccagagacactgagctagggtaatgggcaga

SEQ ID NO: 145070 - DNA, 122 bp, Homo sapiens
ggaccatcattaagtaaattaagggtgacgtggacacaaacactgtgatactgtgacagtcgatctgataacagagagggcaaataaagtgactcaggggcagggagtgtcaacagtgtgga

SEQ ID NO: 145071 - DNA, 122 bp, Homo sapiens
atcgctgtccaaaggccccaacttcaaataccatcacattggggattacctttcagcttccggagggcataaatctttattagtctatagcattgtatgaaaactctttccctccgtgtgga

SEQ ID NO: 145072 - DNA, 122 bp, Homo sapiens
ttctgaaagtttttcatttttgtttgataaattggcatcactggtattacctctgttacacggttgttgcttagtaaggtaatgcctaagagcataagtcaataggacaggcaggccatata

SEQ ID NO: 145073 - DNA, 122 bp, Homo sapiens
gggacaaggacgaagtggcctctcagagatgcgggagtgctggctctcctccaccctccccgccttctccaagcccgggttcccgcccacccctcactcctgcttgaggacagggcagacat

SEQ ID NO: 145074 - DNA, 122 bp, Homo sapiens
catgaacgcggtcatgatgcacggccgttcctactccctggccagcggggccgggggcggcggcagcaagggcaacagcctcaagaggtccaagtccatccgtccaccccagagcccccccc

SEQ ID NO: 145075 - DNA, 122 bp, Homo sapiens
gccgtgcggcgggggcggagatgctaccagctggggtgtcatccagcccgggaggtgacacgcgccccctcgcccgggcggtcgcctggccgcccactccccgccagcacgcccggcgacgc

SEQ ID NO: 145076 - DNA, 122 bp, Homo sapiens
ttctcggcggtgattggggcaaacggccacggactacacttacttacatgccgcgcgaggcgcctccgccgccggggcaaacggccacgaactacacttcccgacacgccgcgtgaggcgct

SEQ ID NO: 145077 - DNA, 122 bp, Homo sapiens
gcgagggaatcctggagactgccggggcggggggcgggggcggcggtcgcaggagggacccggcgcgggcgggaccgcggcggtcgggggacaccagctgcgtcggagcgcccagaacgccc

SEQ ID NO: 145078 - DNA, 122 bp, Homo sapiens
agaattgctggaacccgggaggcggaagttgcggtgagccgagttcgtgccattgcaccccggcctgggcaacagcaaaactccgtctcaaaaaaagaaaagacagttgtttaaacattttt

SEQ ID NO: 145079 - DNA, 122 bp, Homo sapiens
agtcctgaggcagaacctggtggctggaggcattcccagaggtggggaagagagcctgcccggccggagaacatctgccttgctgcacctgaggcccagcagagccgttcctgggactgtca

SEQ ID NO: 145080 - DNA, 122 bp, Homo sapiens
cgagatttacggcgggggagtcctggagcaggaagtgcgcatgcgtagatggagcaaaaccgcctctccacccgtctcccttcaccatcgacccttgggtccagcaaggaagccctaagtga

SEQ ID NO: 145081 - DNA, 122 bp, Homo sapiens
aggggcagaggggcaaccctcccccaaacctccttgacctggcttgggagaggccatctccgaagtccaggaatatggggaggaacatggaagatccaaaggcatggaagctgaggaaggtg

SEQ ID NO: 145082 - DNA, 122 bp, Homo sapiens
aatcaactgatcaaggattttgcttttgcattcagcctgtaaaagcctctgctcacactgcgagggtagagcttgcagaacctcttccagttctgagtgctgcctgattcataagttgttct

SEQ ID NO: 145083 - DNA, 122 bp, Homo sapiens
gccagccggggagggcggaccattgtgctgcgcaggctgaagctggcccattccgttgcgcgcggagcccccaagggccctgggcccgtgtcgggggccaaaaccgagtgtgcgatcgggta

SEQ ID NO: 145084 - DNA, 122 bp, Homo sapiens
tctggagaccaccactagaggaatctacatgacaaacttcactaactagccttcagctaccgtatgtagtaatgctccccataatgatgcttggtcaacacttatataatggtgatcccata

SEQ ID NO: 145085 - DNA, 122 bp, Homo sapiens
gctgatcctcataattcctgacgtggctttttcttctctcacgtgggttggctgcttgtgcgcaaacacccaactgtcaaagagaagggcagtacgctagacttgtctgacctagaagccga

SEQ ID NO: 145086 - DNA, 122 bp, Homo sapiens
agaaacaagccctgcctagtccactcctccacccccctccacccgccatgatttgtccaacggctggctccatttggcagtatgccccgaggatctggatgctgaggatgacttaggttcca

SEQ ID NO: 145087 - DNA, 122 bp, Homo sapiens
tgggaatgactgacagccttgactcaagggaggtttggccaggaaagtgtgtgtttgtaacgctggggtagaattgtgcagagagagagccccaggggatcaaggaatcagggcactgaggt

SEQ ID NO: 145088 - DNA, 122 bp, Homo sapiens
tgagcatataccatatcctgctggacaagagtaagaagagtaagacagacttcgcttctacggcaaagaatcaagatctctgtcagccaagcaacgtgtcaagattttccttctcaaagatc

SEQ ID NO: 145089 - DNA, 122 bp, Homo sapiens
gctcagcccttcgcggctcaggcctgactgaaagcacccgtggtccctgagcctcgtgtgcgcttgtcagcagagcctgttttgtcctcagtctgtctggtctgagctggcgtggacatttg

SEQ ID NO: 145090 - DNA, 122 bp, Homo sapiens
gcaatgtctactgaactaaaattaagtttgttctcactaaaaataatgttgttggccaggcgtggtggctcacgcctgtaatcccagcactttgggaggctgaggtgggtggatcacgaggt

SEQ ID NO: 145091 - DNA, 122 bp, Homo sapiens
cctttccataagtcaaggaccgtccttcctgagttgctatgctcaggctgggttgcatatcgggttagaccctcagcttttgtttatgattttatcattgcttttcaaagagttttttatcc

SEQ ID NO: 145092 - DNA, 122 bp, Homo sapiens
gatttctggacacacatcctggttgggctttctggagctttatgaatttgtagatttatacgtttcaccaagtttagaaaacatcccgttcatcccgttacgtcttacttcaaagctgtgag

SEQ ID NO: 145093 - DNA, 122 bp, Homo sapiens
gctctgaccgtgtgggtggtgatccttgtcaggatgtacagtccttgctcccaccccatccgggatggccgcctgtccctgactattgagtcctgttgttgtaagccaggcatggagggctc

SEQ ID NO: 145094 - DNA, 122 bp, Homo sapiens
cgaactcctgacctcaggtgatctccccacttctgcctccctaagtactggcattacaggcgtcagccaccacgtccagccactttctttcatttctgtttctgaggtccattgctccattc

SEQ ID NO: 145095 - DNA, 122 bp, Homo sapiens
agtctcaatcagaggggaaggcactcactcagcattcccattccagagcagcctctgcaacgtctaccaaaaccctttccggcaaattgaacaggctgggtatttgatgatattaaggaatt

SEQ ID NO: 145096 - DNA, 122 bp, Homo sapiens
caagctccccagctgtgtgtgtgactttggcaggctgacctctgagcctcagactcttcacgtgtagaatggaaataataagacccacctgtaggattgttgtgggataaaatttaacgaat

SEQ ID NO: 145097 - DNA, 122 bp, Homo sapiens
gcaggtcctgctaaagttacccactgagccactcccctctgacctctgcgcagcactcctcgcaaccactgaaaacgaacataatgctcgagatgcaacccgcttgctatgccggccctagg

SEQ ID NO: 145098 - DNA, 122 bp, Homo sapiens
cagtagacagactcatgagctggtgcccactgatctcccccagggtgcccagggacaggtcgacgggctcagtgtagatgatctccaggatgaggtcctgggcgtggcggaagaccagctcc

SEQ ID NO: 145099 - DNA, 122 bp, Homo sapiens
ctgtgagttttggccccatggggctttggtcactgatatcctcgggagttgaaattgaaccggggcctggggaaaatgaggaacaaaggtgtcccagtccttagggcaggaaagtgagccta

SEQ ID NO: 145100 - DNA, 122 bp, Homo sapiens
gctgggggatgccggtacttacttggctatgaaaatcaccaccaatcctgcacggtttcccggcgggcagccccgtaatcgcggtgcggcagctggtgccgcggctgagcccagccagcgtg

SEQ ID NO: 145101 - DNA, 122 bp, Homo sapiens
gaagtaggaacgagaagccggagggggcggccgcggagcactggttggagcgccgcgaagcgcccgagcctcttgccttcgcgggcggcgccctggccgccggcagccttgtggccggtgcc

SEQ ID NO: 145102 - DNA, 122 bp, Homo sapiens
tactgccaattctttaagtgttccctcacctcaaatctttgatgcacgaggtccagcagtcgtcactactaagtcaacactgagacatgtaaatgtttgtgaaatgagtaataaccaggatg

SEQ ID NO: 145103 - DNA, 122 bp, Homo sapiens
agaggggaagtggccccaacccgagtcactttttgctgacgtggacccttttcctccatccgatctctgacactgagtcaggagagcagcagatgggccctcctgtccctggccaggcccgt

SEQ ID NO: 145104 - DNA, 122 bp, Homo sapiens
taaaatccagctttgtggcacctctggaaaagtcatatgggaccaggcccagagtcctgacgggcaaccctcgcttggacctgcaagagatcaacaactgggtgcaggcgcagatgaaaggg

SEQ ID NO: 145105 - DNA, 122 bp, Homo sapiens
gagatgtggggagcgcctctgccctgccgccccgtctgggaggtgaggagcatctctgcccggccaacccgtctgagaagtgaggagaccctctgccccacaaccaccccgactgagaagtg

SEQ ID NO: 145106 - DNA, 122 bp, Homo sapiens
cccctcaggggaatctcacgattcctgaaacttgagctcctggcccggagaagtgctggccgcggtcggggtggcgcacacgcagagactctggagctgacagcctgtcgtgcccacaggcg

SEQ ID NO: 145107 - DNA, 122 bp, Homo sapiens
tctgccctcatcacagatgtcaaaagccattggccccacgtgacccgctctgctcttccccgcatgggctctctaaggtgctggcagccctgggaagatgccgtccttggctctgccctggg

SEQ ID NO: 145108 - DNA, 122 bp, Homo sapiens
gcaactccatgattccaaggtaatttaaacaggcaatttcagagtgcttcaagatgaaggcgcaaagcagcctctcagcctgcagtgatgctacgacaccggcagatggcgctgcaaagctt

SEQ ID NO: 145109 - DNA, 122 bp, Homo sapiens
ccaatctcttctctattcttcaccccacacagaaaagtttacctaaagcacagttatgatcgtgtcatgctcttactccagaacagtcaatggcttcctattgcctgcggaatgaagtccca

SEQ ID NO: 145110 - DNA, 122 bp, Homo sapiens
gctcacgtgaactttgcgcatccaggggtagacgacgggctctttgcacgcggagtgggacgggctggggtgcagggggttctgggcgcagggaggcggcggggggctgctgctgaccgcct

SEQ ID NO: 145111 - DNA, 122 bp, Homo sapiens
attcccgtggctctttgataataatggttggagtcctgaacccgaccctttgtatcggaccgtgtttgtcatctccagtgctttatgaaggccttgaaagcaaggttcagccgtctgtattg

SEQ ID NO: 145112 - DNA, 122 bp, Homo sapiens
tttctttgaaccacacactcgctcgctcacgtttgtcccgactaagttgcccccggcccccgcagctgtcatgaagatagatggagaggtagctgcgagagcccagcctcggcgggtggtgc

SEQ ID NO: 145113 - DNA, 122 bp, Homo sapiens
gcacctgaaatcccgcctgcaaaggtcggccacctcacgtgtcctgcgctgtgcacctgacgtccctgcctgcaagggtcagccgcctcacgtgtcttgtgctgtgcacctgacgtccctgc

SEQ ID NO: 145114 - DNA, 122 bp, Homo sapiens
cttcaaaattcaccggggtcagcctgcctcagcctccccaggggcatgtagaaatttctgcggaccgaaagcccctcctgcgtcctcttcggaactataactgtttatatctaattgctatt

SEQ ID NO: 145115 - DNA, 122 bp, Homo sapiens
gcctggtacagcgagcaggcgtcactggagatgagggaggcagctgccacagagatccgccgagccatcacaggttgcatcccagaaagcttaagaaattgtgtgaacaaggaattctttgt

SEQ ID NO: 145116 - DNA, 122 bp, Homo sapiens
ttctgcaaactcggaaggaagacctactgtctgtccagctcagctgggctgggggcagggcgagccagacactccccaggcagccttcctctcctggactgggacgcccccacagagccaca

SEQ ID NO: 145117 - DNA, 122 bp, Homo sapiens
ccagaatgaccccagagaggatctgggggcaaagggaggaagggggagtgaacgcccgggcgccctgcgtcctgcaacccccaggcccctccgccccacgtgtggccgagaggatcattcct

SEQ ID NO: 145118 - DNA, 122 bp, Homo sapiens
agctactggggaggctgaggcaggagaacctggaaagcggaggttgcagtgagctgagatcgtaccactgcccactgcactcctacctggttgacagagtgggactccgtctcaaaaaaaag

SEQ ID NO: 145119 - DNA, 122 bp, Homo sapiens
tgagccacaccacggaagccacccaagtgtccctccccagaggagcggatgaacgtgatgcggcctctacgcatacaatgggatattactccgccttaaaaaggaagggaattctgacacac

SEQ ID NO: 145120 - DNA, 122 bp, Homo sapiens
cttgagagaaatgaccaaaatgcccatcaatagtgggatggggaaatcagctgtgatatgcgcatgctatggagtagtatacagcaggtcaataaaacaaggaagctgtttacaaactgata

SEQ ID NO: 145121 - DNA, 122 bp, Homo sapiens
ggtgcgttcggctgaaaggcggggcctggtaaaaaaaaaaaaacagaactgctgctgaggcggaggagaggacttaaggactatgggtttatcctctggccggaccaaagagaagatattta

SEQ ID NO: 145122 - DNA, 122 bp, Homo sapiens
gaaaagacttccggtaggggcatttctatttccattgggtcctgtcttctccaccttctacgtttcaaccggaaatagtcgtacccatttaaagccacgtcggtactggcctcggtcccgcc

SEQ ID NO: 145123 - DNA, 122 bp, Homo sapiens
gtctgttcatttttctctccagttttttcacaggctgggtaactacctgcctgctagcaacgatgtgttcgttctccctggattcctgattgaggtgggcagagaggactctgagacaggag

SEQ ID NO: 145124 - DNA, 122 bp, Homo sapiens
atagcctcagcgtttcaggttcccttaattgatatctaatgttgacaaattaactcagcccgagttgaaagctccatatacacacacatggtttcaagaagggcgatcgcgcttatcctcca

SEQ ID NO: 145125 - DNA, 122 bp, Homo sapiens
tcatgtgtgcatgtatgtgtgtatgacacacacacacacacacacacacacacacacacacgagggacttagcaagtggatggatgcatccaagggacctctgtgtcttgctaatgccccaa

SEQ ID NO: 145126 - DNA, 122 bp, Homo sapiens
ttactccaaatgatagccaagtccttcttacggcatctttatgcatttactaaattatgccgaagctctgtgtgtgtgtgtgtgtgcacgtgtgcatatatgtttaagattcaaaaagaatt

SEQ ID NO: 145127 - DNA, 122 bp, Homo sapiens
gtgtccagcccgattcctgtgttccttccacatctcatgtggtgcatctcctggcaaaaccgggcacatctgcacaccagctgcaagggatcccggagcgtggcattatggcctccagcttc

SEQ ID NO: 145128 - DNA, 122 bp, Homo sapiens
tggaaatctcaacctgagtcactagagagaatcgcgcctttttctaaaaagcccaggggccgtcctctccggggagggggacgcggcgggccgcgaagggcgctcgttcgggtgggggccgg

SEQ ID NO: 145129 - DNA, 122 bp, Homo sapiens
agaccaaatcaggcccagaccgcctctctggaaggtgttgtaggccattcaaaacgcctccggagtgtcgcaaaccaagtgcggaggggccctgaggttgtactgtaaacatcatagtgact

SEQ ID NO: 145130 - DNA, 122 bp, Homo sapiens
ctcactggcacgtgtgcgcttgctctgtctttctcggaccctcttgtctctgtgtctctccgtgtggtttctgtctctccctgcctaagttctctctgcattactctgcctctctctccatt

SEQ ID NO: 145131 - DNA, 122 bp, Homo sapiens
tgtgctgtgagtgtagcagctgggggtacggcaaaaaccgaagacccggtggcaggtttgcgggtctacgtgtccccagagctgaccagtcagacctcccaaggtctggatcggaggaacag

SEQ ID NO: 145132 - DNA, 122 bp, Homo sapiens
gcggcggcgcgggccgcgggcggcgatgggcgaggagcagagcacggtgagcggcggcggcgggccccaggagtcgcagaccctggccagtggcactgcgggccaccctgagcccccgaggc

SEQ ID NO: 145133 - DNA, 122 bp, Homo sapiens
cacctctaggcaaagaagcaaaagcttttctgtgtgttgaatgcatcattaggtgaaaagcgggtaggctaaaaatcaatatgactacttaccttggttccagttttagacatttttggtgc

SEQ ID NO: 145134 - DNA, 122 bp, Homo sapiens
attcctgtcccttccttctcacacatcttgaaggtcatctgctacttaggaatttgctgacgcaggccagtggaggactgagaagttccaggaaaagggcagggtctgacattgtccaaaaa

SEQ ID NO: 145135 - DNA, 122 bp, Homo sapiens
ggccacgtttctgccggcatcagcgcccctgagctgctttccaaagcgcggcgtcaggaacgtcactcttcactgttgaattcaacgtgggcacctttaatggctcagtcatttttttaaaa

SEQ ID NO: 145136 - DNA, 122 bp, Homo sapiens
aaactgcacagggagccgcaagcaggcctgctctaggcaacgagggcgctggccccgggacggatgctggagcatcctcaggacaaagtggatggagagtctgtagtaccagctgggacacg

SEQ ID NO: 145137 - DNA, 122 bp, Homo sapiens
accaatgaaaaacggggattcgctcagcccgcctcccgagcttcaaccccgaagagatcgcgcacagttttataaaaggtacaaattagaaagcagttctgcggctggattagagacattgt

SEQ ID NO: 145138 - DNA, 122 bp, Homo sapiens
agtgtccgcgccgtgccgggtgcggggtccgggagatgcagccgcccccgcggagctctgcgcccctggcctcggggaaggccattgtgttctcctgtgtggcaatgaagggggctatggac

SEQ ID NO: 145139 - DNA, 122 bp, Homo sapiens
ccgacccccgcggtcccaccgcccctcactcccctccggttctccctccaggctctcgggcgggaacacgctgcgcagagactcttcccggacaaacttccagagcccctggaggacggtga

SEQ ID NO: 145140 - DNA, 122 bp, Homo sapiens
ggacttccccccaccctccgaatcagtctgttcctcctggggccattcagctgacagctgcggaaaggacagcgcctgctgaaaaagggtccataatttccctctggcaagagacggcagcc

SEQ ID NO: 145141 - DNA, 122 bp, Homo sapiens
cctaccggcctggtccagcggacagcggctgcagcgggggcgccggctgggaggtgagtgcgcggcccgtaggcctggctccggcccctcgccgcccgccgccgcctctttgtccgcgcgcc

SEQ ID NO: 145142 - DNA, 122 bp, Homo sapiens
caagcactttctctgactccacgctgcgtcaaagcattctgatctttttaatgcacatcccgctatggttggccaagtttgaccttcacagctcattatgatcattgatccttatatgatga

SEQ ID NO: 145143 - DNA, 122 bp, Homo sapiens
cgagagtgatttgtagctgcaattgcacaagagaacgattccattcacatgaaacccgcgcgccgagttttacccccgtgcacttacacaccgtctcccaaatgtacgcgcgcacacacaca

SEQ ID NO: 145144 - DNA, 122 bp, Homo sapiens
caccagcttcctcttacctcaagcaaaagggcattcaggtcctgatggcttcgcaggaggcgcacagctgattcctttaatttctgtgccctttcaggattatatttttccctcttgaccct

SEQ ID NO: 145145 - DNA, 122 bp, Homo sapiens
ctgaaaggctgagctcctgcaaggcctccaaaggctcacgggagagtaggagagattccacggagactgtgcagaagctgcacgccacagcttcatccagccctggcttcttccaccagagg

SEQ ID NO: 145146 - DNA, 122 bp, Homo sapiens
gtttagcacctggcttctcctgtcacacacacatggtatcccagtgctggttggggccggcgagagcactgatgtgtcacatgacccctactcttggagacttcaccttgtcagacaaatga

SEQ ID NO: 145147 - DNA, 122 bp, Homo sapiens
tttctctctggaagattgttgttttcatcatagcctgaaaattcactggagggatctcatcgggagatattcctccttttccaggcagtatcaatgatggcatgaatttcttcagcacatta

SEQ ID NO: 145148 - DNA, 122 bp, Homo sapiens
gcagctggcaggaacatggcagacgggcagggagctggatctgggagctctgtctgaggacgatggccaggcctctgcttgcacacctccaacactggggaactcactgttcctcagccatg

SEQ ID NO: 145149 - DNA, 122 bp, Homo sapiens
acgtcgtctcctttcatgggtacgtgtctcctgggctatggacggggctgcagccactcccgagcccaagatggagcaccccagtggcctgcatgcccacacatttgcctaccaaacgtctg

SEQ ID NO: 145150 - DNA, 122 bp, Homo sapiens
ggtcccggcccggccggatgttgacagcgtcgcctagcaacgggaaatggcggaaccgggcggcgcggcgggccggtaagccgggccgaggggcagcgggtcttggagtcgccaggccgcgc

SEQ ID NO: 145151 - DNA, 122 bp, Homo sapiens
tccagattatctctgaaagcccctctctcagcttgaaaaggaagtcacccactctccttgcgtatatgtgtgtgtgcctgatgggagagcccacagcacatcaacagctctctccaaacact

SEQ ID NO: 145152 - DNA, 122 bp, Homo sapiens
tgtcaccaagttgactttggggtcccccattcttccttagttctctattttacctcagcgcgttgtctagctgctgcctggccacggtacttagcacacagcgtgacttaatactggataaa

SEQ ID NO: 145153 - DNA, 122 bp, Homo sapiens
gggtcctcagcagcactgaagtacccccggcagttcttcacttgctgttggggaaaagaacgagttcaggtcatggccatttactcagggggctccagtgtggtgcctggaaaattccagcc

SEQ ID NO: 145154 - DNA, 122 bp, Homo sapiens
agtggcagtgtgtcttcctgctctcctcctgccctcgaaggaggactgggaagatttccacgctgagattcccaggcgcaaactgcagctgatgcgttcctcgaggttctctttgagatgga

SEQ ID NO: 145155 - DNA, 122 bp, Homo sapiens
accgtgggcgctgaggccctgcgctgcccagcccccaagttcgcattgggggcttcatcccgttatatcctaaagcggccccagagccctgcctcgaacccactcacctgccgcctctgaaa

SEQ ID NO: 145156 - DNA, 122 bp, Homo sapiens
accaccacactcggctaattttttgtatttttagtggagacggggtttcaccgtgttagccgggatgatctcaatctcctgaactcgtgatctgcctgcatcggcctcccaaagtgctggga

SEQ ID NO: 145157 - DNA, 122 bp, Homo sapiens
ccaaaatgcgcacgccaggcccacggaggccgattgccgaccagcgtagccggcccgcagcgccagagaagccgctcactccggcggagtctctgcaagagaatctgaggctggggaataaa

SEQ ID NO: 145158 - DNA, 122 bp, Homo sapiens
gtctgttctccgggtctctgggcctggaggcgggagtgtttcaaagcacttcacgctccgcggccccaccggctggctgcgctgcccgctgcggccggcaggggtagtccacggacaggcct

SEQ ID NO: 145159 - DNA, 122 bp, Homo sapiens
tatattcgttcggcaaatgcttgttgagctctgcaaccacggatagagttacagagcttccgaatcccacccctgtagctgtgcagttgttgaaaaggaagaaatagaggtgtttttccccc

SEQ ID NO: 145160 - DNA, 122 bp, Homo sapiens
gtggctcgccgacccgacagtgacgcgccgggcgacctcctgcgcccccgccggagcctgcgacggagacagttgtcacctcgaggccgccgccgccacagtcagctgacagccgccgcgcc

SEQ ID NO: 145161 - DNA, 122 bp, Homo sapiens
tgactgtgtgacactcagcagtgagactgcaccacattggcctcacagccagctccagtccgtctgtcatgctgatgaggtcctgtgtctggatctgctaggacaacctcctcttgctcctc

SEQ ID NO: 145162 - DNA, 122 bp, Homo sapiens
ggtttctcccctcctagccccagatccaggtcacaagtgttaacaagtgtcagatgcctccgcttgggtcccctcaacatgtgtctctcccacaaacgccagggtctaagggtccgcctgtc

SEQ ID NO: 145163 - DNA, 122 bp, Homo sapiens
accaaagcgtcagaaaggagcgggtgaaggggcgcggccgttgccagggcatcttcttagcgtcgggcagggctggtgagtcaactagtgacagtggcgaggaagtgggggcgcggagcaag

SEQ ID NO: 145164 - DNA, 122 bp, Homo sapiens
agcacggattgctcatccgatccgtgccgccgcagggagtgtgtcaagttacagaggcgccggaatcggcccctgcgctcctcgccagccgccacgacccacctctgcccatggggccctcc

SEQ ID NO: 145165 - DNA, 122 bp, Homo sapiens
gagggcagagcagaggcttgcccgggtggggctggggccgatgggtggggatctgtaccccgtccccacagtgagggtttgggaagagaattacggagtcccagggacccaggcccagactg

SEQ ID NO: 145166 - DNA, 122 bp, Homo sapiens
ccagggttcagaaacactgatcctcttgcctggtcactaggcacttgtgtaaactgaggccgggggtggggaaaaatgacttgctaatagtcacagagcagctgaggggcagaactggggac

SEQ ID NO: 145167 - DNA, 122 bp, Homo sapiens
ttactattctcctgataataataaaagaaatacctaccatcattgaacacctccaatatacgaggcatggtgctagttgcttttcatgcattttcatgtaatcctcatttaatacatttttc

SEQ ID NO: 145168 - DNA, 122 bp, Homo sapiens
agctcgggagcggggaccggtagccgactgcctctgggacagcggtggcgtctctgtgcccgtttagtggagttggagggaagctgcgaggaggcgcaggaagtccacctcagaaccccccc

SEQ ID NO: 145169 - DNA, 122 bp, Homo sapiens
ggaacagggttatttacattctagcatgatgcccgagaatataaattcacatgaaattagcgtaagcaaagcaaattaagatggaagctctactacaagataaaattacataagaggtccca

SEQ ID NO: 145170 - DNA, 122 bp, Homo sapiens
cctcagacagggactgtccggcagaaggtacacacgtcgtagggtgtgaggccttcagctcgggaaggctccctggggctcagctgttcactctgcctctctggagccctcagcttcctcat

SEQ ID NO: 145171 - DNA, 122 bp, Homo sapiens
cccacacttaccttccagtgggttgctgatgagagaacctgaaaaaacctaaacctcggccgggtgcagtggctcacgcctgtaatcccagcactttgggaggctgaggcgggcggatcaca

SEQ ID NO: 145172 - DNA, 122 bp, Homo sapiens
ttttccctggacgtgcaaagtggggccgatgggattaagtacccagagctggtgctggaacgcgctctagatcgcgaggaagaggcggttcaccacctcgttctcacggccttcgatggagg

SEQ ID NO: 145173 - DNA, 122 bp, Homo sapiens
cgagagggagacgtgtggtctcctggggcatggacaacctctcccacctcagcagctaggcgctgggatcggggtcggctctcggctcggctcgcgggctgtaaggtctccgcggaccccac

SEQ ID NO: 145174 - DNA, 122 bp, Homo sapiens
accctcattcactgctggtggaaatgcaaaatgctgcagtcctttggaaaacagtctggccgttcctcaattattagcatttaattagaaataatgaattaacaggattttaaaaaacattt

SEQ ID NO: 145175 - DNA, 122 bp, Homo sapiens
cccgcccaacaggtcaggggcaagagttcgcaatcctggggtcgcgcggggcagcaagggcgcgctggaggcggcggccaagactcccgccgccgccgccgccaacagggcgagggctgccg

SEQ ID NO: 145176 - DNA, 122 bp, Homo sapiens
aggtggcttgggatgcggaccagcttctggttggagcagtccacaatcgtgccctcacagcgacacttctcggggcacacgaggtccatgaagcactcgctgctgaacctgctgcggtaatc

SEQ ID NO: 145177 - DNA, 122 bp, Homo sapiens
atccacgcacaagggtgggggactttcccgtgggtccaggtgctgccttctgcactcttccgggatgtgtgtcaagtgtgtataatctccgcgaaaggcacatctggggcctgtgcagcctt

SEQ ID NO: 145178 - DNA, 122 bp, Homo sapiens
cctccgcggacaggacgggactagccactgcctgcatctcttcccccacgccctgagccccgcagtgtcccagcagcctagttctggcctgcgggagaccctgtcggacaaggaggaaaagc

SEQ ID NO: 145179 - DNA, 122 bp, Homo sapiens
gggagccggcaggcccgagagtgaccggagtcacggcgggcgccggcggagctgcggcgtcggacccgcctcctggaggagctcagccccgaccaggcccggccccattcccgccccgcgcc

SEQ ID NO: 145180 - DNA, 122 bp, Homo sapiens
ggcattaatagcagcctccctcaggcccctgacgcgtctgggcagctgctcagcacgtcccgcgtccctcggccccaaggccagcccactctggctcagccaggcacactaaacttagtggc

SEQ ID NO: 145181 - DNA, 122 bp, Homo sapiens
gtagaagctttagtaatataagcctagcattctacagcagcagaggaataacaaaaattccgttgcaactgaggctgaagaatgaagcatacatcaagtgaactctagaagaaatagcctgt

SEQ ID NO: 145182 - DNA, 122 bp, Homo sapiens
aggcctgggtaggccagactcagagtcacagattcagatgggccacatggcatctataggcggaccaggagcacaggcccagaccagctgacgctgcagcaggtacaggcccatactaaaca

SEQ ID NO: 145183 - DNA, 122 bp, Homo sapiens
cagctgctggcatcacgcaattggcttggctgcagagtgagcccacggaagagggctctccgcaccgactctgtgactcaggcttctactaccaggctcatccgaggacggaggctgtcgtt

SEQ ID NO: 145184 - DNA, 122 bp, Homo sapiens
agcggataggggcccctgtctttggccgtgctctgcaagggctatgcgcgtgggacgatccgtttttccatgtctgaaggagcctcaggcccgcagaggtgtcggggcctttgccatccctg

SEQ ID NO: 145185 - DNA, 122 bp, Homo sapiens
aagggtaagaattggattgaggatgagaataaaccacacggattgatgtagtttctagggcggtccacattgcggtagctggattcgttttggaggtgtttttcatttcttcattaactatc

SEQ ID NO: 145186 - DNA, 122 bp, Homo sapiens
tcccgccggaggaggccgtttacactgctctccgggcccagcctcacccttcgctctccccgagatgggaagaggctctgaacagtccttggtacccagcggctccttccacctgatctcca

SEQ ID NO: 145187 - DNA, 122 bp, Homo sapiens
ggaagggctgtggcatctggaagatgcgtcctcagctcaggcatttgatgccagagctgccgcctggcgtcggcagtgtccccggtgcagctgctgggcaaggtactcggtgccgccctcga

SEQ ID NO: 145188 - DNA, 122 bp, Homo sapiens
aggggcggggcatccgtcgccggaagcctgtaccgtatttcatggactcctaggcgccatcgattttaagacgcgctcgcattccacgcaccactgagcagaacgttcgaaccggacaaaag

SEQ ID NO: 145189 - DNA, 122 bp, Homo sapiens
catgcctgcctatcggaacaccatgcatcacacacactcccaggacctgacatgcataggcgtataacccagagcatatattcaccttctctaaccggactatacttcgcatctatcctgag

SEQ ID NO: 145190 - DNA, 122 bp, Homo sapiens
agggttagtcatttccccctaaatctcactgtcaagttatcaagaaaacagatctcaggacggattctgctgcccatacgaatgtctataaaacaaacatttattagctagtagccacaaaa

SEQ ID NO: 145191 - DNA, 122 bp, Homo sapiens
ctcagggtgactgtctcctgtatttttgctcttatgactcagtgcaatttaaaatatccccgggtttaatacaaactttctcagaagccgatttccaatggacagtaatccccttcaaatac

SEQ ID NO: 145192 - DNA, 122 bp, Homo sapiens
aagaggtcagtggaagcaaggagccaaatgcccattgattggtatctgaagacatcagcacggaccagcactccactgtgggtccaaggatgagctccaaagagcccagtcctaaagccacc

SEQ ID NO: 145193 - DNA, 122 bp, Homo sapiens
atgttcgggtaacgctcacatttcatttaaccctccaatgacaaaagacgggcaaacagacggggcatcagggtgggcctcagcatcaaaaaactggagggagctggctgggtgcggtggct

SEQ ID NO: 145194 - DNA, 122 bp, Homo sapiens
gggggagcaggtgatctcatagcggcaaacactcctcgggttggcttggggtgggatgtgcgaaagggcaggattcggaaggaggtagggggctggtcctcggctcccagccgcgctggggc

SEQ ID NO: 145195 - DNA, 122 bp, Homo sapiens
acttcagaaaactcagcgagacacagcgctgcacgtgtggtaggtaccctcattaattcgcgtccattagcccctcttccatgccctggcgcagccctggcgcctcgcgggctgggacgcgg

SEQ ID NO: 145196 - DNA, 122 bp, Homo sapiens
tcacacctagcagaccagaaaatcaccaatgaaatcttagtttaattattttcctgatagcgacttggaatcgatacatcaactaaatatcttctgccaagacttaatcgccatcacatttg

SEQ ID NO: 145197 - DNA, 122 bp, Homo sapiens
gcaaaagccgaaggaaacccgggctaccgctgcaccttgctgcatgcctctttgggactccgtttctcctttaaaaggaggcggggtcggggaggggcgacggacggttgccctggaaattt

SEQ ID NO: 145198 - DNA, 122 bp, Homo sapiens
tggccacctttgtggatgaaacgggcagaatacacattgaaaatgagttacagctgggcgcggtggctcacagctgtaatcccagcactttgggaggccaaggtgggtggatcaactaaggt

SEQ ID NO: 145199 - DNA, 122 bp, Homo sapiens
gcgtcattaggatcctggtgggcggtgggacttgggttcaaagaagaccaagcaggcagacgtgttcgggggcccgcgggttccgagactggagactggacctttggctgtccccacgtgca

SEQ ID NO: 145200 - DNA, 122 bp, Homo sapiens
aaacaaaccgggacttccggacccgaggaaggaggagcacggctccaccaacagggcatgcgcacatctgaggtcgcttagggctcggattaccgcagcccagattttaaagacccgaaggg

SEQ ID NO: 145201 - DNA, 122 bp, Homo sapiens
actgcaggaaggcccagagcgtggcgttggcgtcctgcgtgacgcggctgcggtcccgctcggtccacacctccaggccggtcagcgccacctgaatgtccagagtcctgagaagctgaggg

SEQ ID NO: 145202 - DNA, 122 bp, Homo sapiens
gagcattctggtgactgtgggggggggggcactgttgtcagtatctgctgccggagcccacgcagcacttagagatgagtcacacaaagcactgcacctccccaggaagggcggccacctcg

SEQ ID NO: 145203 - DNA, 122 bp, Homo sapiens
cacggccttgaagatggcaatgatgccagtaggccagaagcaacagatggtggtcagcaccgcgatgggcatgtagtcgtgtggcgggcgcctcggctccagtagggccagccctgggccct

SEQ ID NO: 145204 - DNA, 122 bp, Homo sapiens
gaattccctccctctgcagcccagctgcacccactagcacacactagtcttgccttctcccggctttggaagaatccccaccacattctttagctctcagaaaggagagggcagtcaggtca

SEQ ID NO: 145205 - DNA, 122 bp, Homo sapiens
acacagctctgcttctgtatatgtctgaggagcatgctgataaaatccagcgggcagggccggcttcaccatcccctccacatcatgcctgctgctgagctggcatcccggagccccacccc

SEQ ID NO: 145206 - DNA, 122 bp, Homo sapiens
tgaagtcccacccactttctatgacgtcccgcgtcccggcttctgattgcccgcctgagacgtcaatcgcagggcgtgtgtcttgctgggacacagtggaggtctaacctttggtttgcgga

SEQ ID NO: 145207 - DNA, 122 bp, Homo sapiens
tctcccatctgccactccacaaagcccccatacaggctccggcaggcgctgcctgagccccggcgagccacttctgagaggtcactctccacgccgtagacacgggccagggtgtaggctgc

SEQ ID NO: 145208 - DNA, 122 bp, Homo sapiens
cagcggttacagtctcggaaaggcctggcttcttcgtggctttgtggagatcccttacagcggccatttgattagcacccgaagagattcaaaggaagcagttgttccgtccccaacatatt

SEQ ID NO: 145209 - DNA, 122 bp, Homo sapiens
actgtctgccagatctctgcccacaccattggcaccttgtccacaaagcactcctgtgaccgcccagtgccttcctcaagccatgcacctgggctcatggggaccactcatgcccaggggat

SEQ ID NO: 145210 - DNA, 122 bp, Homo sapiens
acaggtatctctgggggtgaggaagggaccccgtggagtgttaattttcccacccacccccgccaggtgtcaatgtcgatgacattaaggttcatgctgttggggctcaggtggatccaagg

SEQ ID NO: 145211 - DNA, 122 bp, Homo sapiens
cagggatcagtctacaaatggggccagcccaggctcttggaggtgcggggggcacctgggcgggcacctctaaatgctggcacctggacactcaccggcctcaccctgtcctggccctgctg

SEQ ID NO: 145212 - DNA, 122 bp, Homo sapiens
tggggcggggtttgtgggggtcttggtggcaagtgagggtcccgcgcaggcgctacgtcccggcctgacttgctccctggaacggtggcagctcctgggaacgcagacccggccccagctgg

SEQ ID NO: 145213 - DNA, 122 bp, Homo sapiens
agtaccagctgcccaggtgactgagccgccctgccgctcaggccatgtgaccacaggtcacggccttcccagcaggaagcatgtgacggagacagcctatcagagcactccatcaccccagc

SEQ ID NO: 145214 - DNA, 122 bp, Homo sapiens
atgggattgtgtttctgatttggctctgaccttgaaggttgctggtgtatagaaatgctccgggtttttgtacattaattttgtatccggaaactttcctgaagtagtttatgagatcaagg

SEQ ID NO: 145215 - DNA, 122 bp, Homo sapiens
aagaggtacagaggcagcgaagacacgttgagggggaggacgagaccaactgcgagacgccgagtcccgggctctcaggacgctctcccgtacctgcgccctcgtcagcccatcaccgaaag

SEQ ID NO: 145216 - DNA, 122 bp, Homo sapiens
cggggttgtagttcgcttgctcctgtcacatcatttctctcacctgtccgctttgggatacgaagagaggcttctgcgtcaagcctatatttcgtgttaaggatctaggggaggtcttctag

SEQ ID NO: 145217 - DNA, 122 bp, Homo sapiens
tcatggggctggtaagagtgtcttttagcatgctaatatattataattagtgtataatgacgagtgagaacgacagaggtcactctcgtctccatcttggctttggtgggttttagctggct

SEQ ID NO: 145218 - DNA, 122 bp, Homo sapiens
tgtcttcaaccagtccttgtaccgggcgcgcgtcctggaggatgcaccctccggcacgcgcgtggtacaagtccttgcaacggatctggatgaaggccccaacggtgaaattatttactcct

SEQ ID NO: 145219 - DNA, 122 bp, Homo sapiens
cccccaagaaggtacatccatgttataattcctggaacttgtgaatgtcattttatttggcgaaggggtctttgcaggcataactatattaaggattttgagatgaagagatcatctcggat

SEQ ID NO: 145220 - DNA, 122 bp, Homo sapiens
ggggacacaaggagaggaacacggatgccgcagttttccaagtgcagcttgcccctcccacgtgataggtttctggcatcgcccctccttgctggcgattctggggaagattttaacgctcc

SEQ ID NO: 145221 - DNA, 122 bp, Homo sapiens
gccactgaaaggagaaggcagcatggtcagctcgggagtgaccagcagcacagcccacgacgtcgccaaattagcttctagattagtgcaacgcaaagcaaagttccagcaggcattttaaa

SEQ ID NO: 145222 - DNA, 122 bp, Homo sapiens
aggcatgagccaccgcacccaggctgggaacaaaatattgagataagagtgagatgggtccgaagcaggaggatagaggcccctttaaggaaccctgagagaatggcttcatggaccctacc

SEQ ID NO: 145223 - DNA, 122 bp, Homo sapiens
gcgccgtccgccatcatcggagtcgggaccggaggcggtggtggctctccgcatacattgcgcaggcgtcggcgcggcctccgcttgggtcgtggccgggctgccggtgggcggggcggggc

SEQ ID NO: 145224 - DNA, 122 bp, Homo sapiens
tgcaggcaaacgccacattcccggtgttggtgcaaaaagaaatcatcctactcctcccctcgcttaaactttcccacaggccttgtcaaacaacccctggagccggcctgcaggttttcaat

SEQ ID NO: 145225 - DNA, 122 bp, Homo sapiens
ttaaatcgtaattacgattaaaaatatttttcactaaatagtaagatttttagatgtctgcgtgtgtgttgcgggaggacatcccagtccgctgttttctgcggcccctgtctgggcctcag

SEQ ID NO: 145226 - DNA, 122 bp, Homo sapiens
gaagtcagggcccagcttttccacaccagcttctgcagagacatgcagctgggctggcctcgaactcatgctcctgccaaggctgcggggaaaagacccaggggagccatcagctcccaaaa

SEQ ID NO: 145227 - DNA, 122 bp, Homo sapiens
ggcacttgcgggccgtgccacttggctggccatactccagaaaagcaaaacacgcacatccgaagagaatgatttaggcagcaagaggcttgcttcaaaaaccacatggccatctccaaatt

SEQ ID NO: 145228 - DNA, 122 bp, Homo sapiens
gcgcacagggcggtgctggaggcgctcaggtactgcagggccacaggcagcgaggatgtgcgggaaccccaggggtccgtggcaggcccgccccacaccccctctctctgggtccaccggat

SEQ ID NO: 145229 - DNA, 122 bp, Homo sapiens
cagcaagctcaatctggcttgggccggaactgcttttcttcctaaagctggacggatggccgcgggcttagcttaacgggatgagccatctggggactgcagtgtccacgatcagatcaggg

SEQ ID NO: 145230 - DNA, 122 bp, Homo sapiens
gcaactttacaacctggcctgggaagaaggaccggcgcccactcccaggaggaaaagcagcggcagcgcacggcaagatggatcctgacactcagagctggggaaagagccacacgtcctcc

SEQ ID NO: 145231 - DNA, 122 bp, Homo sapiens
tcaggctcccctccctgccctagaaaagaggacgcggagctctccatagtatttgtttttcgctagctagaaagggatgaagactgaggtgggagaatgacttgatttcaagagttcgaggc

SEQ ID NO: 145232 - DNA, 122 bp, Homo sapiens
ccttctttcaaactatcccattcagaaaagcgttctggattgcccgttcgaattcctccccgtcctccgtctacccacccttaaagggttccgctcccaacggatcctcctcaggccccgcc

SEQ ID NO: 145233 - DNA, 122 bp, Homo sapiens
aaggacaactcagagtcaccctgggacggcagtcgctgcactggtaatgagcacaacacacgcaatgcaaaacgaaagggtccctcttccaacttgtggagataccccaaagcagttgatgt

SEQ ID NO: 145234 - DNA, 122 bp, Homo sapiens
aaccctacatttaagtggtgagaatgacctcctaactctgggcaaatcttgtccacttgacggcgactatccccaccgcaaagcagctccgtgcgcatggctcctcgcagccacacgggggc

SEQ ID NO: 145235 - DNA, 122 bp, Homo sapiens
accgaaacaaagaaacaaatttaccgtgggcctaatctgttttaaactttttcctcaatacgtagcaatggattatcaactgctcgatgcaggattttgtcactttatttcttttgtgaaag

SEQ ID NO: 145236 - DNA, 122 bp, Homo sapiens
ggaaagcaaagagagacagttactaggacccggccccaggctgagaccagctgccctcagcgcgtgcccttgggaaacctccatgagcggaaggcagaggcgctccacagtgcacagggctg

SEQ ID NO: 145237 - DNA, 122 bp, Homo sapiens
ctcttactgcctgcttgatctcaagcaagaccgctttgttcatgggcgaaaggagcgccccgggccatgaggattaaatggagagcacagggccagatccatctaaattctcagtaagtgtt

SEQ ID NO: 145238 - DNA, 122 bp, Homo sapiens
gactaaggaggtagtgggcaaaaggggggcaggaagaagccatggggcagatgaaagaggcgtcctgtctgccccctgcctgttgccatcacactgggtcgttttccacattgctgatcact

SEQ ID NO: 145239 - DNA, 122 bp, Homo sapiens
gacgagagaaaagttgtccggagctagacgtgcctaaggagcctggtgttcccaaggctgcgaggtgaacaggggtgggggcggtgggggggacaaaactttgggtgctgccccggggccag

SEQ ID NO: 145240 - DNA, 122 bp, Homo sapiens
ctgccgtgagcgtcctccagaacgagtgggctgaggccctcggctgacgtcctgggtgaccgcagacctgctgtgtgtggccggccggccggaccttagcacgtcatcactgggctcacggt

SEQ ID NO: 145241 - DNA, 122 bp, Homo sapiens
ctggcctccgagtccaggtggaagacagccaggtggtcctgggtatcccgggcagtgccccggcacagggtgctgtggggggagggtggtcagcaggtggggcagccccgggcgtgccctta

SEQ ID NO: 145242 - DNA, 122 bp, Homo sapiens
ggcatcttttctgctctgaacagcccagggttcctactaaatggctctgtgccatctgcccgcagaggatcccacagactatcttcctcctccccggtgcactgtcgcccaaatttactggc

SEQ ID NO: 145243 - DNA, 122 bp, Homo sapiens
gaagtatgattaactggaactaaatcaaattaacgatgtcgctcctcagtcaccaagccacgttttaggcactcagcaggcacatggggctggtggctgccgccccatgagtgcagacgaag

SEQ ID NO: 145244 - DNA, 122 bp, Homo sapiens
ctttccaccgaggccccggatgtagattccctcccccgttcagtggtcgtggcctcacagcgactctaagacttggggctctctcattggctgtaactcttccactggattggtagcaaaaa

SEQ ID NO: 145245 - DNA, 122 bp, Homo sapiens
ggcggctcaagccgcgccagcctagcaccgctgagcaatgcccccagaccccagagccagcggggggcggagtctcaccgctcaccatcatccatgggaaccaatcactaggcaccgccgcg

SEQ ID NO: 145246 - DNA, 122 bp, Homo sapiens
ccccgcggtatcctgcggcaacaaacctagaactcaattcgacacctggaatttaaacggcgtgcgggagcagatgtctcatgttagtgctacttgcctctgtccccaccccgccacgtgcg

SEQ ID NO: 145247 - DNA, 122 bp, Homo sapiens
gtaaggtgatgaaatctcactctgtccagctcgagacacgagccccgtccggcacgttcgcgccgagcatgctcccgcccactcacctgtgctgtcttgatcgtcagctcaagtgtcgtggg

SEQ ID NO: 145248 - DNA, 122 bp, Homo sapiens
tgtcttaaagttctcgaaattccctcttagagaaggagaaagttagagaactggaggctgcgtaccctgattacgcagaagggaagcagcctcgcattccccggggcaggcccccgcccgcg

SEQ ID NO: 145249 - DNA, 122 bp, Homo sapiens
gcctttccccacacccacttttcccactgcagcgcacccacacaatccagacagttttggcgcatgtgaagggcgcgatggtcccttcattatctggaaggacacccagagtggcaaatgcc

SEQ ID NO: 145250 - DNA, 122 bp, Homo sapiens
cgcaccgcccccttgaaggtcggggccctatctccgggaatggtgacaacgttcgctgtacggacagcctgtgcccctgaatgtgaatgtccacacttgctatttggggggtcgcggcatct

SEQ ID NO: 145251 - DNA, 122 bp, Homo sapiens
acgcagagttcctggcctctcaccggggaaagctctgccccgttcctccggagcccagtgcgcccctggccaagttctcccagcgtccactctagggcctgctagcaccctctcgggcggcg

SEQ ID NO: 145252 - DNA, 122 bp, Homo sapiens
ggcagggagcgatcccagctgccactccagtctcctctttttccctctgcccgtctggcacgggcctcatcagcgcgcaaagctgttaatgtctggtctcacagctccccctttagtcttgc

SEQ ID NO: 145253 - DNA, 122 bp, Homo sapiens
ggaggaaagagagaagggtttcgctgtgggcaacgtggtcgcgaaccttggtttggatctcggtagcctctcagcccgcaggttccgggtggtgtctggagctagccgaagattctttgagg

SEQ ID NO: 145254 - DNA, 122 bp, Homo sapiens
caggacagtctaggctatgctgcagtaacaggcaacccccaaatcctggaggcttaaaatcggaaaggtttatttctcactcatgccgattgtctactacagtcagctggggagtttgctgc

SEQ ID NO: 145255 - DNA, 122 bp, Homo sapiens
tgctgcccaacaaatagaagcaggagccccagatcccatgccaggggggcaaggatgctgcggtcctgcagggcagccagccatccctggcgggcatctacaggaagttgagggaaaaagag

SEQ ID NO: 145256 - DNA, 122 bp, Homo sapiens
aatcaccaaaaataattccagagaaaaatggagagtaaaatccaagatggcggcgcgggccgcagcaccgctcgctccctccgctgacgggaaaaatgagtccccgcagcgtccgagccccc

SEQ ID NO: 145257 - DNA, 122 bp, Homo sapiens
cccgagcaccttccgtctctaggtcggagtctgaatcggccttgggaccctgcttggcttcggggacccctgcaagacgtccacaggccgccgtcgcctcttcctcctgctttttatcctcc

SEQ ID NO: 145258 - DNA, 122 bp, Homo sapiens
tctgactacctagccaaggcagattcttcttctgtggaatgtcaacctatatctgcctcccgaccaactggacaggcacctgcaaccttagtcttcctatgtcccaacattaacattgcccc

SEQ ID NO: 145259 - DNA, 122 bp, Homo sapiens
cctgcaggcacccaaagaccgcctggtctcctgcaccaccgttctccagagccctctccacgggcgccagtgctcacacaaggtcacggccacctcaaaaaaccgtatggccaaaaagtttt

SEQ ID NO: 145260 - DNA, 122 bp, Homo sapiens
aaaagaccacctcgtctgggtgcagtcgctcatgcctgtaatcccagtactttgggaggccgaagtgagaggactgcttatgcccaggaatttgagactggcctgggcaatgtggtgaaacc

SEQ ID NO: 145261 - DNA, 122 bp, Homo sapiens
acttggacctcccagggataaggggaaggagcagcggagacgcaccgagctcgccacattcgcgctgcccaacacaaaagccgcgccaggtcccggaagctgctccctcctttcgcggcgcg

SEQ ID NO: 145262 - DNA, 122 bp, Homo sapiens
atctctgtttgagtgcctgttacgtgctggccatggtcccaggcctgcgggatgcagaggcgaggacagtgtttgagtttctagcgtgctcactgtgtgtgggtaggatgaccctgccggtc

SEQ ID NO: 145263 - DNA, 122 bp, Homo sapiens
aaactgggagtgggggatggtttcaggatgattcaagcacatcgaatcactctgcaggcccgggggtcacaggcttggcagctgcggctctgctgtcccgagccactcatggtgagctgcct

SEQ ID NO: 145264 - DNA, 122 bp, Homo sapiens
ctctgacttgtttctgctccatctctctagggggtctttcatggtttgggcacaaggattcgtcgccagaatagaactgaaagctcggaaatagacccgagaatacaagtatgccagaaaaa

SEQ ID NO: 145265 - DNA, 122 bp, Homo sapiens
caatctccctgtactatctagtgaataagaaggagctgcaggacataagcccagaggaaacggccactgatcacccatttatgagctttcaaggcaactgaatagctaaaggtaagaagata

SEQ ID NO: 145266 - DNA, 122 bp, Homo sapiens
tttcggtgacgtttttttcttggcgcatttataagcgacccggggccggattccaggagtcggccccactcctgtgttcctgaaggagcttctgactcaatcacacaggcgttaactttagt

SEQ ID NO: 145267 - DNA, 122 bp, Homo sapiens
ccctagccagagccccgagctcccacccagtcccatccccagcccgatccgccccgcgtgcgatcccgcctgccgccgcgagcctgtgctcctttctgagatttctgcttcttccccagctc

SEQ ID NO: 145268 - DNA, 122 bp, Homo sapiens
tttgctgctcattcactcactcattctgtctttgctccttcattccttcctcattttgcccgctgggcccagatggaggtgaaggtggtcatggcaaagctgctgcagaggctggagttccg

SEQ ID NO: 145269 - DNA, 122 bp, Homo sapiens
tgctgatggcgcctcggggaaaggcactgcaggcgggtggcgagcacagtgcacggctcacggcccactggaagaggtcggacaggttgcggcgccaaggcagataggcatcaaacacgtcc

SEQ ID NO: 145270 - DNA, 122 bp, Homo sapiens
aaacggcactcacggggcgacagacctgctagctgactgcccgcgtctactgccttcccacggtgttccagcagaacggcacaactaacccacagccaaacacacacacacacacacacaca

SEQ ID NO: 145271 - DNA, 122 bp, Homo sapiens
tggtgagagtatggaggacaggtcgatgcaaattcattagctgacatgaaaaatcattagcgtcatttttggatggagctagtgtaatcccagagattaattcctctacttcagctatacca

SEQ ID NO: 145272 - DNA, 122 bp, Homo sapiens
aaatttttaaattcaagtagaaacaaaaatatgaaaagatgtgaaggagttaggaacaagcgttagggataatgaacctcagtggatttaagggcataatctgaaatcaggagcactgggta

SEQ ID NO: 145273 - DNA, 122 bp, Homo sapiens
gacaccagtatctaaagttaggccttcccacagaccatccaagcatacatgctgggtgcacgcctgtcggggagggtagactccacagcgtggtcctttgggtaagagcgcccctttctacc

SEQ ID NO: 145274 - DNA, 122 bp, Homo sapiens
ggggccaggcctctgtggggcggggccgctgcgaggctggagtcgaaggtgctgagtcgtcgcctcccactgaagcctgggagcaaatgggccccagtgtgcctatgggcctgaggtggcag

SEQ ID NO: 145275 - DNA, 122 bp, Homo sapiens
ggggcactgaagggatcccagatggcttctctctggccattcgacaggggcctgatcagccgcacttctgatcatccagccagaaccacctgctttgaaggagggcatttaacttctgctgg

SEQ ID NO: 145276 - DNA, 122 bp, Homo sapiens
acagtgtttccaaatcctcagggtagacgtgtgagcttagtaaatgagaggaatagcggacgaacctctccgtgtgtttgtgtctcgagtgccctcatctcaggagcaattttaataactta

SEQ ID NO: 145277 - DNA, 122 bp, Homo sapiens
tgtagataaaacaaagaggtattaaatgttaggtagtattgttaaaaagcaaatgatttgcgttatacttttgtgcagcaggtttcaattccaagaacagtgggatgggagggggaatttgt

SEQ ID NO: 145278 - DNA, 122 bp, Homo sapiens
gcacatccctccctgcaggtccgcaatccgcgtggaggcccggcgctctcacctgagctgcgaaccctctgcaccagcaaacactaacagggagaagccggaaagtggggttgactgcacat

SEQ ID NO: 145279 - DNA, 122 bp, Homo sapiens
tccgcggcggagtgagcaacttgctgggtgcgctccacggtttttgttgccggcggctctcgaagacttacacaggctttgcctggccgtaaatatcaaagtgcaaagcagttgtggttttt

SEQ ID NO: 145280 - DNA, 122 bp, Homo sapiens
ggcaagtcattccggtggtcgtcccggctcctgcaccaccagcgcacgcacacaggcgagcggccctacaagtgcccagactgccccaaggctttcaaaggctcctcggccctgctctacca

SEQ ID NO: 145281 - DNA, 122 bp, Homo sapiens
gcaaccaaatcaaccagaaaacttgagccatgatgacattttcagtgaccccaaagcaatcgcctttatggttcaagcaatgtgtaatgttggtgtttaaccctattgagaatgttggtcac

SEQ ID NO: 145282 - DNA, 122 bp, Homo sapiens
ggtagagtctaagttgtttccggtctgagccttcaagttgctgggctgtccttggcgtggcgagtcccaggagaaccagtgagacaagactggtggttctcaaagactcatatgtcccttac

SEQ ID NO: 145283 - DNA, 122 bp, Homo sapiens
ctggttaagtggtgactgggtaaggaaaccacttggggtagcagttcaacaattcacttacgaatgtttataagctttccatttcctaggtaattttttaaaagccagtcaaaacaaaaact

SEQ ID NO: 145284 - DNA, 122 bp, Homo sapiens
ttcctgaccgacttgttcctcggcgagagcgaacagcggtgagtcaggagcaggagcgtgcggaccaaaaatcctcagcccttacgaccgcgtcttcctcaaaaagaaaggggtgggacttg

SEQ ID NO: 145285 - DNA, 122 bp, Homo sapiens
tgaactcctgacctcaggtgagccacccgcctcggcctcccaaagtgttgggattacaggcgtgagccactgcccccagccccagcttgatcttgaacctcctgtgtgtgggcagagagaca

SEQ ID NO: 145286 - DNA, 122 bp, Homo sapiens
gggaaagggcccagccatctcatgacccccaccgcagagaagagaccacccacacatcttcgcatggtatcaccacctggggccttcccaacacggtggtgctttcttggggggtcgtggga

SEQ ID NO: 145287 - DNA, 122 bp, Homo sapiens
aaccctggtggtggtggtgatgctggaccatgggagatgagagatttccagagtaaacagcgggagcgcactgggggtacccaccacttacgtctgcttcctgatttaacgcgtaggggctg

SEQ ID NO: 145288 - DNA, 122 bp, Homo sapiens
gcgcacccaaaaaatttcagcattaccattctgagggtcaggagtctcctcccttccatccgccaacacttgaatcaggactataaagtaggtgtttccaagtctcaggcaggtaaatggat

SEQ ID NO: 145289 - DNA, 122 bp, Homo sapiens
ttctaacccccagcctctcgccgtttctacccagcttgggaagcgcaggaacaggacatacggtggtcgcgccccttccgcgaggccggggtgaaacccgcttggccctcccgccagggggc

SEQ ID NO: 145290 - DNA, 122 bp, Homo sapiens
cttttgaggtaggttctcatctccattttacaggtgaggaaaattgaggctgaaatggctcgagaaaggatttaggttggttaggcttatagtcatggtgctctcctctacttttgaattac

SEQ ID NO: 145291 - DNA, 122 bp, Homo sapiens
acaggatttcggagatcgtggcatatgtgtcaagtgcagagggcacaggatttcggagatcgtggcaatatgtgtcaagtgcaaacttacgaggagaaaccaatgcacattctccagaagaa

SEQ ID NO: 145292 - DNA, 122 bp, Homo sapiens
cgggggaagcagggccgcagaaggcccaatcggagccttctgacacccgccccggcccgccgccctcccggagcttccgtccccgccgcctggctccttactgacacgcgcgccgcccccgg

SEQ ID NO: 145293 - DNA, 122 bp, Homo sapiens
tcttacttgtttctctacctagacttgtgtccactcacataccagaaagaactctgaacacgtgacagtaacaccactatgcttcacaactttcaatgtctctccattgccaagaacaatat

SEQ ID NO: 145294 - DNA, 122 bp, Homo sapiens
gtaatccagtgattttaaaagaagttagcggccgccttgcaggatgccctggagcaggaacggccatgttggggtagaagagctgtcacggcaagagcggacaggtccccacaggtgctgct

SEQ ID NO: 145295 - DNA, 122 bp, Homo sapiens
agagagagagagagagagagagagagagagagagagcgagagagagagagagagagagagcgagagagagagagagagccccacacctctcgcgagagcgtcggctctttgcatcgctctct

SEQ ID NO: 145296 - DNA, 122 bp, Homo sapiens
aagagctgcgtgtgcagtgggctgagctcagcaccatgtgcggtgggctgagctcggcgccgtgtgctgtgggctgagatcggcgccgtatgccaagtgggctgagatcgacgctgctgagc

SEQ ID NO: 145297 - DNA, 122 bp, Homo sapiens
ccagctgcctgcagcacggctcttggcttttcctcatttgtagagttgggatagtggcttcggccctgcctaaccctagggacatccaaggaggggcgactgaagtcctgcctggaaagggc

SEQ ID NO: 145298 - DNA, 122 bp, Homo sapiens
ccctctctaagcaatgcacaaattctaagcaagacacaaatccagttcacctctgtggcccggtctgcagataagaatgctaatacctccctcccagggtggctgtgggtaccaaatgagat

SEQ ID NO: 145299 - DNA, 122 bp, Homo sapiens
ccgtcctcaggccaggggttcccagggagcctggctccacaggccagggtgtggaaggaccgcctggccacacctcagccatgtggaggctgcacctgcacacccaagctcgcctgtccggc

SEQ ID NO: 145300 - DNA, 122 bp, Homo sapiens
tccggaagccctggacccaggccctgagttttctttgggtggaacacttgccactcagaccggggcccctggggcaggcctgggcccacacatcctccacgcggaggcccagtgtgtgctgt

SEQ ID NO: 145301 - DNA, 122 bp, Homo sapiens
ctccacgtgctgcgtccggcatgccacgtcccctcgtccagccctctgctgccccctccacgcgctgcgtcctctgtgctgtgtcctcttgtccagccctctgctgccccctccacgtgctg

SEQ ID NO: 145302 - DNA, 122 bp, Homo sapiens
cagatgaggctgaagctgctggtccgggcaccacccttagaaaacctccagtgtagagtgcggaaatggggtccacatctggcttgggacgcccaaacatcgattatgtgcgaccagaggat

SEQ ID NO: 145303 - DNA, 122 bp, Homo sapiens
ggtgaagaaagaaactccccgcaaatcaacccatgagatgccgtagcttactgatatcaacgagggatgacagacatgggggctctctagactgcattagctttaagaacatttcccatgta

SEQ ID NO: 145304 - DNA, 122 bp, Homo sapiens
gactcagcaggctagaagggaggtgagacctggggctttggaagaggctctttttccaaacgaaattaaaatgtataaacaaggctttcatgtttactgcaatcaaatggagaattccattt

SEQ ID NO: 145305 - DNA, 122 bp, Homo sapiens
actgataacaagtcctgctgtgttttaccaacataaaaaattagactggagaccgaggagcggcaggtggcttttggcaccaagaaataatcacacttgatgtggaaagtaaagtaaaagga

SEQ ID NO: 145306 - DNA, 122 bp, Homo sapiens
tacttaaaatctatatctgccttgcagaatgcctacatcattttgagtggatcatcttaccgtcaggataacatacacacagaaggcacaatcacataatgaagaaagaaaggattcacttt

SEQ ID NO: 145307 - DNA, 122 bp, Homo sapiens
agcccaaactactctggcgtggaaatgctttattcctaggatgagagtagagggaaaagacggaggggttcccaggtggtgtaagtgcttcctaaggactgccctctggggtcttggggtat

SEQ ID NO: 145308 - DNA, 122 bp, Homo sapiens
cggaggtcgacacggaagtctggaccgccgaggcgtgtggctcgtctaccggcaggtgagcgtgcaccgcgggcgtgggatgctgtggggacagtgcgggggacgtgtggggtcttcggatg

SEQ ID NO: 145309 - DNA, 122 bp, Homo sapiens
gagacgcgaggagttcggtccgagtgcggtgcggctgggcgctcttcttgcctggaagatcgcagtttctgggtcatcactttacgctactttcccctcccccccatctttcaaagagggat

SEQ ID NO: 145310 - DNA, 122 bp, Homo sapiens
cctccgcttccggcccccaaccgcggcgcctgcgcgctgggccccggagcgccgccctgccggcttccgagcttacctcttgctgagccagcagcaccctccgctcacgctccttctcctcc

SEQ ID NO: 145311 - DNA, 122 bp, Homo sapiens
cgccccctctccctgcccgcccccgtcacacggagccctggaggatcccccgctgctgcccgccctccctacgccacccccacgatggacaggaactacgcgacctcgggcttcaccgagcc

SEQ ID NO: 145312 - DNA, 122 bp, Homo sapiens
ctcgcggtctcctcggctcccccctccccctctctcccctctcccctctcccggcgctggcggccaccgcactgcagcgcggcaccagcagtctatgacaaaaacattatccttctgctgct

SEQ ID NO: 145313 - DNA, 122 bp, Homo sapiens
tcaacttcgaacaatacaaagtgtgctaggagaagacaagatggcgcccagcaggaggagcggagaaaggcaggggtgtaaatctggcttccaaactggaagcgtcaacaaaggcgtgggag

SEQ ID NO: 145314 - DNA, 122 bp, Homo sapiens
aagtgcctccttccaagcctgtggccacaagccccagggataatggtcagcacattgtggcgttggatttttctgctacttaaatttatgatgatgcagggcatgcaggtaatcaattatgc

SEQ ID NO: 145315 - DNA, 122 bp, Homo sapiens
tttagaaatgaggcaggtctccccaagaatcctgcagctgctcttcccaggcatctcccacgatggccaaggccacgccctggacctccaggcacggcatcggctgaagcccgaggagaagt

SEQ ID NO: 145316 - DNA, 122 bp, Homo sapiens
caagcccagatttttctgattcctaactgtgttcttctagaatcacccctgattctagaacgcgactgtttgcctgggctgtgagcagagagggggaagagaaaagattaattaagaaagag

SEQ ID NO: 145317 - DNA, 122 bp, Homo sapiens
ctgcagccagccccagccagcgacctgaacctggaggcttccgaggcaatgtaagtgctccgcccgggccgccccgagtctcccggggaggaggagaggatgcccgggctttgttagtgtcg

SEQ ID NO: 145318 - DNA, 122 bp, Homo sapiens
gttgccccagaacaccggcaactttaagaaagggtgttttgtgccttatccaaaaggaggcgctgtgggggcaattttctgcaggaagggagggaaggcagacctctccccatctctgccat

SEQ ID NO: 145319 - DNA, 122 bp, Homo sapiens
tctcatctcatttacttcagagtttataaattctgtgaggagacactgatgactgggaaccgggaagctgtgtgtggcggtcagcgggtcagccgtcctggctccaccccagtgtgtaccgt

SEQ ID NO: 145320 - DNA, 122 bp, Homo sapiens
gccagacagctggaagtttttgtttccttttgctttccttctttttcctacgaagattcacgctctttcttccttctttcaacaacccgtggtttcactttctttactataagaaaatgctg

SEQ ID NO: 145321 - DNA, 122 bp, Homo sapiens
tcatcctgccatctccatttggagacagctcagtgcttgtccccagccaaaactaacagccggacttcttttgcaatgtttagaaggcactcttttatttagtgctgagaaatcctctctaa

SEQ ID NO: 145322 - DNA, 122 bp, Homo sapiens
tggccggcgccgcggtgtcgtcagagcccgggtgggattccccggcgcgcgccgcggccccgcccctgccggccctctctgggccccgccccgccaccgcctccggccgaggcgcgcacccg

SEQ ID NO: 145323 - DNA, 122 bp, Homo sapiens
ggatggtggtgggcagagagagcccatacttttcacccagcccgcttcacctgccccctccgatgccctaggactggctgactcgctatggttacctgccgccaccccaccctgcccaggcc

SEQ ID NO: 145324 - DNA, 122 bp, Homo sapiens
gcagtaaattgtgcggcggggtctggatggaaaggcggggcccgctgaaagaaggcgatccgagttctgctacttcctagtaagggacgtctctggagagattctgaggtgtttgaggtcag

SEQ ID NO: 145325 - DNA, 122 bp, Homo sapiens
ctgctctaggcaggtgagtctgttcacagtctaccaaatatagctctgcgtctccacctccgccattcctcttgctgggtgttctctctctcccaccaccaatccaaactctacccatcttt

SEQ ID NO: 145326 - DNA, 122 bp, Homo sapiens
tcaagttacaaattggtaattatccaggaagctcaaagtagcaaaggattccatattgctcgcttagggagctaagggtgggaacacagtgctgcctagcgagggcacacctccttggactt

SEQ ID NO: 145327 - DNA, 122 bp, Homo sapiens
ggcaaattgaatttgcaaagctttctagtttctccgaggaggtaaagagaaccaagaagccggattgaagatgatgactgcgccaaggcgttgcctagccaccatcctgtaggctttgatga

SEQ ID NO: 145328 - DNA, 122 bp, Homo sapiens
taatactagcttgtaaaatctgttagatgaaaagcacatgtatctgtaaatattttaacccgaacaaaaggctaccaatgaaaggtccaggctgtgacaactaacctagtagatcctcttct

SEQ ID NO: 145329 - DNA, 122 bp, Homo sapiens
ataggaaactcagcatcagcgaaagttcagatgggcttttaaggaagagtaggccaggcgcgtggagtggaacagcctccgcaaagacctgagaagctgggatgtgggaaatggctagaggg

SEQ ID NO: 145330 - DNA, 122 bp, Homo sapiens
cagctagacctgtgcaaagactctccctatgaattgaagaaaggtatgtccgacatttaacgcgggctgcgtcggtcccggacttttctaatttattaaaaacatggccttggcagttattt

SEQ ID NO: 145331 - DNA, 122 bp, Homo sapiens
tcaaatgaaatcttgtccaaaagacagagaaatgattttctagattgtgatggtttcatccgctatggagttacacagctgtagttgcaagagccaagagcatttcgaaggaaaagtagaag

SEQ ID NO: 145332 - DNA, 122 bp, Homo sapiens
ggttaacctcggaaggctttctccaaggagttgcactgcggaccttctcgtactttcctccgtcgccaccctgcccactcgtcctgtgctctccggctgccctgacactcagttcctggagc

SEQ ID NO: 145333 - DNA, 122 bp, Homo sapiens
ggaacttattagaaatgcaaattaccaggctccaccccaggctgctgagtcagaggctgccgtggagcccagccagctgtgtttcaacatgccctgcaggtgcttccgatgaggcccaaggt

SEQ ID NO: 145334 - DNA, 122 bp, Homo sapiens
caaagggccgggctgtcaatctgggcagccccagggtaggaatgcaccatgcctgcagagcgagtgtgggtgcaggtgggtgcccggcagatgtggacaatcggaaggccactctcatggtg

SEQ ID NO: 145335 - DNA, 122 bp, Homo sapiens
taggctttaaattgtcctcattcttcaaaagtgtttaacttgaccttgggaaaatcaggtcgattctctaggctaatatgtggtagagcgtgcatttgaaccaaggttcgtaaataccaaag

SEQ ID NO: 145336 - DNA, 122 bp, Homo sapiens
tgctcctctgtaggaccgcagtgcagcaggtctgtctacgccagcatcaccacagacttgcgagtacggtgttgcacacaaccatggtaggtcatagaaccttttcagctccattataatct

SEQ ID NO: 145337 - DNA, 122 bp, Homo sapiens
tggctgactacctggctcctttcacacatccttcctctggtgtctggactgaaagggacacgggtgggtgggggagtagagaaggaaagcgaggtctgggttggcggaggggttttgtctgc

SEQ ID NO: 145338 - DNA, 122 bp, Homo sapiens
gcggtggctaccgcctgaaccacctcggttcctggggcttctggccgcagcccctcggtgcgctcttacccagagacttgagcatttaaggatgccttcctagtccaagaatttaactattt

SEQ ID NO: 145339 - DNA, 122 bp, Homo sapiens
cctccagagactgagccccagggatgggggtctggctagggggaggtggctgggagggagcgccaccctaggccccctggcaggccgcccagcaggggccctttaaggctggccatgaggca

SEQ ID NO: 145340 - DNA, 122 bp, Homo sapiens
tccagctgtcaccgccccagtagctctacaggggcctgtgtctccctgctttagccattccgcctggtgtcccggaagccagagcgcccagcccagaagctggccccaccctaccccacagc

SEQ ID NO: 145341 - DNA, 122 bp, Homo sapiens
ggcccttccagattgggggccctggggtccccactccctgtccatccccagttggggctgcgaccgccagattctcccttaaggaattgacttcagcaggggtgggaggctcccagacccag

SEQ ID NO: 145342 - DNA, 122 bp, Homo sapiens
caacagtcactccaaacacacaggaagcagccctcttgaaaaacaaacagacttctccagcgacttgagagcttcaaatatgctcattacactcaaccccgggccacctgcccaaacctatt

SEQ ID NO: 145343 - DNA, 122 bp, Homo sapiens
gcgggcagcgaagtcctttttgaggtaacaggtgtcggtgctaggcgaggcgggttggggcggaaggggcgaaggaccgcgcggcgcggggagagtcctgggagctccaggggcgcctcccg

SEQ ID NO: 145344 - DNA, 122 bp, Homo sapiens
cgatggccttccggtagcgggtcaccgcctgctggatgaggctgaaaactttcatgtggccgtccccgcacggcacgaccacccgggtccgtccgaagcacacggtcactttcatgccgccg

SEQ ID NO: 145345 - DNA, 122 bp, Homo sapiens
gctgcactgttccttccccacgcagattgtggatggcaagctgtggttccagctggactgcggcagcggccctggaatcttgggcatctcgggccgtgctgtcaacgacgggagctggcact

SEQ ID NO: 145346 - DNA, 122 bp, Homo sapiens
tgagccactgcacccggccagggttggttttaatcttgtggactttgtgagtctcaaaaccggcagatttccctctttgttttgactgatacgaagctcagaatcctgtttgcagtccacct

SEQ ID NO: 145347 - DNA, 122 bp, Homo sapiens
cgcgccttggaggttgcgggagctgtcgggagccgaggaatgggagatggagagcggcagcgggtgcaccaacctgaacaacaacagcagtggcaccactgcgtggagggccgcgagcgcag

SEQ ID NO: 145348 - DNA, 122 bp, Homo sapiens
ggggccttgcggctactcagccaggaggggcgcgaagatctaacagaagcgggagagggacgcacgcctgcccgtcttccgcagacccacaccctcgggagcctcagttttcccatttgtac

SEQ ID NO: 145349 - DNA, 122 bp, Homo sapiens
ccaataaatggtgctgggaaaaccagatagctatatgcagaataaaaccagaccccgggccgggcacagtggctcacgcctgtaatcccagcactttgggaggccgaggcgggcggatcatg

SEQ ID NO: 145350 - DNA, 122 bp, Homo sapiens
cccgggtgaccgagcctccgccactgaggatccacaagagctgcttcccgcgcttcggctcgctcaccacactgcgcctgcgccgacccgcccacgcccagcgcaggtcccgacagaggtcg

SEQ ID NO: 145351 - DNA, 122 bp, Homo sapiens
aaattaccaaacatgtctgagtcttttatttatgaaatagtgaaatagtatgcatcttaccgcattgatgattctatcaagaactaacaatgagagttgaggaggtgctgaactaagcaact

SEQ ID NO: 145352 - DNA, 122 bp, Homo sapiens
cccacctgtccagcgccgtcctgagctcacacaaagacccttccagcctcaccgaggccgcgagcccaagccaagatcttacagatgtcaggaagtctggtttaaaacccattggttaagaa

SEQ ID NO: 145353 - DNA, 122 bp, Homo sapiens
ttgagttactgcaactgaaactgagcaagatattctgggtgtggaataaagtcaagcatccgaattagactactgaatttgaggtttggcctccaccagtaaccacctgtgttgccctaaac

SEQ ID NO: 145354 - DNA, 122 bp, Homo sapiens
tccgtcacgaataagccgtgtgtgaagaacgccaggtcccggcagaagatcgctgcccggcgtgcgaactcccccacggtgcaccagggccgccgccctgcatcctccaacctcagctcccc

SEQ ID NO: 145355 - DNA, 122 bp, Homo sapiens
tgagtggcgtgaggatggcctccggctttgggtctttggattgagtgtccccaaagaggccgctgagcttggtgacgctgctcatggagccccggcgcgagtgggtgagctccttctccttg

SEQ ID NO: 145356 - DNA, 122 bp, Homo sapiens
tggctgcggtcttgaaacgggctctgggagcttcctctgcgcggtcggccctggctgaggcgtcccgggctgcgcgcggggctcggcgctgcgcagtgtccggtgtcctctcggtccggagc

SEQ ID NO: 145357 - DNA, 122 bp, Homo sapiens
gcgtgtcccttctgtaaattgctgtgacctgggctgcatgctccacagtcagactcgcttcgccctcttactggtcttcattaattcgtggtccctggagtggagcgggaaatacagatatc

SEQ ID NO: 145358 - DNA, 122 bp, Homo sapiens
gttacactttaccaaggaaaccaagatagagagcagttaattagcttgctccaagtcacacggctagaaaggggcagggatttatgaccaggtggcctgcaccagctctgggccaggaccct

SEQ ID NO: 145359 - DNA, 122 bp, Homo sapiens
gaaggactgattattcctcttctccttcctgttaggcagaggaaacaaggaatgccctaacgacaaaccataggtggtggagacaccactggcaggcaaactactggcagggtctagggttt

SEQ ID NO: 145360 - DNA, 122 bp, Homo sapiens
tgagagataactggaaagcctagtgtcctttgtgtttcttggcaacctgctcctggactacgagctgtcctggagaggaacattttctggattcattttgtcacagtggccatcagtagcgt

SEQ ID NO: 145361 - DNA, 122 bp, Homo sapiens
tgcaactcaggcggagaataaacaaaccgcactccgggcgacgggcagtggctggatgcacgtttttcctgcaccgacctggcagagcctgagaccgggcctctgcatctccagcggggaaa

SEQ ID NO: 145362 - DNA, 122 bp, Homo sapiens
ctgcctttatgagctgtaacactcaccgcgaaaggtctgcagcttcactcctgaagccagcgagcccacgagcccacagggaggaatgaacaactccagatgcaccgccttaagagctgtaa

SEQ ID NO: 145363 - DNA, 122 bp, Homo sapiens
cttcagtgttggtgaattattatgcttctttgcacattgacttctatggtgcctacaacacgtcagcttttggaattgagctgcttcctcgaaaaggtccctcgctgtggatggcacttatc

SEQ ID NO: 145364 - DNA, 122 bp, Homo sapiens
agggattcagattactggttcagtctgagaaacactcatgctctagaagttggtttctttcgtggtagatcttcatgcttcagagcaacagctgtggtgctggtgggcccaggatggaaccc

SEQ ID NO: 145365 - DNA, 122 bp, Homo sapiens
attctaggaaggaggagccgctgagccaaggacagagcggcgggctcccagctcagctggcggataacgcgcgcggccgggaaggcggcaggcgggcggcaggcgggcggcaggcgggcggc

SEQ ID NO: 145366 - DNA, 122 bp, Homo sapiens
gccctacgatgtgggcggtgtccaaggctgcgtagtggagcttgcaggctggagctccggcgcttcctttccctgagctaaaacgactgggtcctgggatctggcctctagctcgcctgccg

SEQ ID NO: 145367 - DNA, 122 bp, Homo sapiens
cgtctcaaaaaaaaaaaagacagctgaattatcatatccacttctgcactcaatctcttgcgctatttggttgaagtatctaaagaaatagcagccccacatgcatatgtagtaggaaaaag

SEQ ID NO: 145368 - DNA, 122 bp, Homo sapiens
tccatgaaaaatgtgtcttccattgtgacagccacggaatctaggaaacgtgaggccaagcgctgtggctctctggacgcactgttgttgccgcgttcccatggtctcccagccacacaggt

SEQ ID NO: 145369 - DNA, 122 bp, Homo sapiens
cggcggcatgaaggaactgatggagcacctgaaagcccagctgcaagccctgtttgaggacgtgagggccatgaggggggccctggacgagcaggcctcgcacatccaggtgctctcggacg

SEQ ID NO: 145370 - DNA, 122 bp, Homo sapiens
ggcccccttggactatggacatccagcagaaaagaggatgcttttctgcttaccatggcccggatatatcagtctcactggcgtgattgatcatgacttggatcatgtgcttctcccgctgg

SEQ ID NO: 145371 - DNA, 122 bp, Homo sapiens
ctggagttaacttgggaggtgaggagggaactttcatcttgaacttgaccccagaagcagcgtcgtccgtacaggttacaaggtaaatggaagctgagtcttaacgtgggttggaccgcaaa

SEQ ID NO: 145372 - DNA, 122 bp, Homo sapiens
atggttcagaaagtactagctgtgtggtgtttggcaaacagcctaacctctgtgagcctccgtttctcatactgaagtagagtatctcaaggcatagttttgaaaacaaggggtgatgatac

SEQ ID NO: 145373 - DNA, 122 bp, Homo sapiens
gagactggcggtcaccagacccaaaaaccatgcactcgggggtgggcggggccgcgagggcgcgcattaggaccgcgcggccgcggtccgccctctcttccggagggcgggcttcacagccg

SEQ ID NO: 145374 - DNA, 122 bp, Homo sapiens
atggattcgattcctactttatgaagagcactcggcgcacggtgaggccctgcccaggcacgcgaagccagctcggggcggagttgaggctgcagagggctccgcgtggctccagcccgtgc

SEQ ID NO: 145375 - DNA, 122 bp, Homo sapiens
cagtgcgccctgaggtgcgctgggaggccctgacataggaggctcctgtgtgggggagcccgcggctggaactgctccgcttctggggaagacagagggtccaagagactgaaagcctgccc

SEQ ID NO: 145376 - DNA, 122 bp, Homo sapiens
agaaccaataagtggccacttggtaattacaagtttgccaagacagttttgctttagtctcggagaaagttgtatatgtttatcgtccttttgctcttttttattaattttttggtattgtg

SEQ ID NO: 145377 - DNA, 122 bp, Homo sapiens
tggagtggacgagggaggacactgaggggctgggtgtggcccggagagtcgggtgcgctgcgaggaatcccggaggggtgtttcctcaccctccagggtctggctgcgcattcctgagctct

SEQ ID NO: 145378 - DNA, 122 bp, Homo sapiens
agtcacagtggattcttttaaatatttgcttgcatttattgaatgacacaggaacaaccacggtctatcagtccccagtaatccaggactgggatatagattcaaaacgactgtgcgagata

SEQ ID NO: 145379 - DNA, 122 bp, Homo sapiens
gtgggtggctggaagagcggagagccagcgaccgccgatctgttagctcgtgcgacccagcggcgggggtcctccactgttcatttctctacaactgaaggaaaatactgtgtgttgagcac

SEQ ID NO: 145380 - DNA, 122 bp, Homo sapiens
taacaggataccagtgagaagaggctgagaaaaatacactcttgctggaagagtcaagaacgagctcttcgtgggaaactatgggagacgattgaaaaaggacaagaagaaaggagaattgt

SEQ ID NO: 145381 - DNA, 122 bp, Homo sapiens
ggtaacagagcactgtgagagcccgcagaaagctcctaacccatctgggatgagacctagcgcttccaggacgagccgatgttgagctgagacctcgaaggacaggttagtcattcaccttc

SEQ ID NO: 145382 - DNA, 122 bp, Homo sapiens
ctggccacaggtacttgggttgtaacgaaccctcaaaagttgatgttttgggggccaaatcgagggtccgctggatgaggtcagtatattttctctctttgaaaaagataatcagcaggatt

SEQ ID NO: 145383 - DNA, 122 bp, Homo sapiens
taactgggagagaaagaaaaaaggaacagggctcgtccgggatttgaacccgggacctctcgcaccctaagcgagaatcatacccctagaccaacgagccacctatgaatttcggttgggtt

SEQ ID NO: 145384 - DNA, 122 bp, Homo sapiens
tggtggctcctgacccaccgggccctggcgctgctcctgcccaccgtgacctgggcatcccggacatcccagggccacactaccatggcccgcagagtgcaggcaacatccaggctggacta

SEQ ID NO: 145385 - DNA, 122 bp, Homo sapiens
gctgcgggcggagcggcgtcggccgctgaggaggtgcgagcccctgccgggtcccccctgcgccggaccatgtattcggcccacaggcccctgatgcccgcgtccagcgcggcctcccgtgg

SEQ ID NO: 145386 - DNA, 122 bp, Homo sapiens
agagaaaggcagatgctggccgaggacccctgagcgatgagcgtgattcctggacacaggcggtgcccaaagctggaagccgtaggaggtgtcctccccagagcctcggagcagcacttgat

SEQ ID NO: 145387 - DNA, 122 bp, Homo sapiens
cacagttccagaggctgggaatcctgcactgcaggtgatgtctcgagaggaccttcttgccgcgtcctcacatggcagaaagggaaagggcacacaggcaccgagctcattcctcgcccttt

SEQ ID NO: 145388 - DNA, 122 bp, Homo sapiens
agaacgccccgggtctgacaccttctcttcggttctccgcaggggacgtcgtcgtgcaggcgcccacccaggtgcccggcttcttgggcgactccgtgacgctgccctgctacctacaggtg

SEQ ID NO: 145389 - DNA, 122 bp, Homo sapiens
ggcggcccagaagtgcccgctcagctgcggggctggggtcgagcgggacgggcgaggggacggtttccccctttcacaggtaggtgtcacacttgtcctgaatttcaagcctgcactttgca

SEQ ID NO: 145390 - DNA, 122 bp, Homo sapiens
ctgcacacagggctcactggagacacactgacatctcgattccttttcccacccactgcccgcgtggggctgtgggccaggctggtccctgtccactatttgtaagccttcccagccctttc

SEQ ID NO: 145391 - DNA, 122 bp, Homo sapiens
gaatataatcgcaacgaaaaggccaacgactagaggctttgcgaggctgaggctgggcttcgggaggggattgccctgagaggtccgggaggacttgctgtggaattcaagcgaccgtgggc

SEQ ID NO: 145392 - DNA, 122 bp, Homo sapiens
cgccccgtcatgcctgtctctcaccgtcctcccggctcgctctcctctcaccaggcttaacggccacacttcctggggcacttctgtgaccccagggcccggctggtgcccttccacggtgg

SEQ ID NO: 145393 - DNA, 122 bp, Homo sapiens
tattcacttattggttgatgggcactcaggctcattccacacctttgccattgtgaattgcgctgcaataaatatatgagtgcaggtgtctctttgatgtaatgacttctatttctttgaca

SEQ ID NO: 145394 - DNA, 122 bp, Homo sapiens
ctgtcagggcaaggtcttttcgggtaggccctactccaatgactggcatctttacaaaaacgggaacccaacggcagcagacacacgcagagaaaagacggtgtgaacacgagaagacgagc

SEQ ID NO: 145395 - DNA, 122 bp, Homo sapiens
cgacggccctcccttctgccttgggagcagtgtggaccgagccctcaccttggaggccagcgacctgttgatcttcccgacgagccaggtaaaagtgcggctgtacacagccttggcgaggg

SEQ ID NO: 145396 - DNA, 122 bp, Homo sapiens
cgctggaaggtgcttcggcgattctctgtgaccactatgagggacttcgggatgggaaagcggagtgtggaggagcggattcaggaggaggctcagtgtctgatagaggagcttcggaaatc

SEQ ID NO: 145397 - DNA, 122 bp, Homo sapiens
gcgtcctgacacctgttcctggccaactcccaggcctccaaagaacagatacaggaacagcgcctgtcgggtcctctggcctacagagaggtggccggcagcccacccaaagtgggccccac

SEQ ID NO: 145398 - DNA, 122 bp, Homo sapiens
ggcaagtcccttatcccctcggaggacctgtttcttccttctgtaggatgacgtggagctcgctggaggttcccctgacatgatgcagcacacttcctgagtgctcagcagggcagagctca

SEQ ID NO: 145399 - DNA, 122 bp, Homo sapiens
agttgggaggctgcagtctacctgggacactcgaggaggcacacgaggcggaaaagtggacgggtgccccgcgccaccgcctctcccgagggcgcgtactgaccaggatgtcagacaagctc

SEQ ID NO: 145400 - DNA, 122 bp, Homo sapiens
gtttgcaggatcctcgtctttgctgtcggcatcgtgtgagctgcggcagtgcacggcagccgaggaacccaaagaaggggccagatgtggctgcgggtcccactctgcctccctctaacccc

SEQ ID NO: 145401 - DNA, 122 bp, Homo sapiens
agctgacaggacacgccaaaacttacaggaacgatgctgggaggagtgctgacggggcatcgagagacagtgtgcagagagacatctctagatctggggtctgatggctactcaaggacgag

SEQ ID NO: 145402 - DNA, 122 bp, Homo sapiens
aataagatgcgacctaaaacactgcatattgtcactgggattaactaagatgacatatgtcgagcagggcccagcacatagcaagttgttcattgttgtaaccctggtacctggcacataat

SEQ ID NO: 145403 - DNA, 122 bp, Homo sapiens
gcagtgagccgagatcacgccactgcagtccagcatgggcaacaagagcgagactctggccgggcgcggtggctcacgcctgtaatcccagtactttggaaggccgaggagggcggatcaca

SEQ ID NO: 145404 - DNA, 122 bp, Homo sapiens
gagacccgcccacgggccctgcgtccgcccctcctgtcacacgccttccagccaatggcgcggccgcctgtccttctcatgccacccctggagggcaagcaaggagggaggttggctgggaa

SEQ ID NO: 145405 - DNA, 122 bp, Homo sapiens
atatgactaaacagaagaatcatagttctggtgaaaaaaatgtctttttatgaacaattccggccaagatgggtcctcaatatgtatgagaaatagccagaagttaaggaaaggagatattt

SEQ ID NO: 145406 - DNA, 122 bp, Homo sapiens
tttacccaagcaagcaggagaagcgcctttgtgtcagtggtgaagcctccgtgccagtcccggcaccactgccttatagccccttcctcatccaggagctggggccggacctggagggctct

SEQ ID NO: 145407 - DNA, 122 bp, Homo sapiens
tgaatcatggaatattaaatatactctgccaccaaatatgttggagaatcctgtttctgacgtttccctttcagaaggtcacgatggacattagcatataaaaatcctcataaggtctgtag

SEQ ID NO: 145408 - DNA, 122 bp, Homo sapiens
ccgcacccctcccaaagcccacagcccgcggcccgccccaccctaccagctgcaaggccccgccccctagctgtcaagaccccgcccccagctggaaggccccgccccgccagctggctgcg

SEQ ID NO: 145409 - DNA, 122 bp, Homo sapiens
gtctcccctctccaggccgaggcccctccgccctgacccctcctgctgccttcccacccccgttcttgggtatgttcaataaaaggattgttttcctagagtccgggctgtgtaggagtgcg

SEQ ID NO: 145410 - DNA, 122 bp, Homo sapiens
gttctagaatccatgcagcgagcagtaccccacaccgggagcgctccagaatccacgcagcgtctggcacatctttatcagagcgctccagagtccatgcagccacagtcctccaacggacc

SEQ ID NO: 145411 - DNA, 122 bp, Homo sapiens
tgtgtcaccagagatgacaccatgtaaggggcctgggatgatgtaggcacacagtaggcacggccttattatgggatacagaggcaccactctcccagatatctcctgcaccatgagatgcc

SEQ ID NO: 145412 - DNA, 122 bp, Homo sapiens
ctacccacagatcatcaacacttttcatatcgcttcatccctcgggaaaccatttacagccgatcaggctttcccaaatacctcagcattagcaggagttggtcctgtgttgcacagtttcc

SEQ ID NO: 145413 - DNA, 122 bp, Homo sapiens
ttcctggcgctccgccttccctgaagcctataaaagcgcaggtccccgcctcggcagccacgggacacctgcatctgccaacaagactggaagcaggtgaggcacacagagggggaggcccg

SEQ ID NO: 145414 - DNA, 122 bp, Homo sapiens
agggccaagagtgggcggcggactcgggaactctaagccccaacagggagtcatttggcacggggcggggagaccgcgcatcccaggacgactcttggctttgccattcattagttttgtga

SEQ ID NO: 145415 - DNA, 122 bp, Homo sapiens
gtgactaagggagggctctaaacagctctggccaaaggaacttcatgctgggatggccaccgtctatattcacactgtctcattagtagccatgctgtctgctcggcacttgaaatgtggct

SEQ ID NO: 145416 - DNA, 122 bp, Homo sapiens
caaaaggaaggcagttctgacccatgctataaaatggatggacctggaggacatgatgctcggtgaaacaagccagtcacacatgcgcaaataccgtctgatgccaccacaggaggtaccga

SEQ ID NO: 145417 - DNA, 122 bp, Homo sapiens
acgtggagaggcgcggaacgtccctttttagggtgacctgagattgaggatacgtgaagtcgggccgcaggaagtcccccaaatcagaacaagcttcggcttccaaactccctttcacagct

SEQ ID NO: 145418 - DNA, 122 bp, Homo sapiens
aaattgagagtgtggcgctgccagcaaccactgaaatgatatgtcttttagccatggagacgttcctgaaatatttttgtcagctcccatgaaccctgactacgactggccaggcctccctc

SEQ ID NO: 145419 - DNA, 122 bp, Homo sapiens
gaagtgcgagggggcagagtcttggaaacaggtcctgggccaactgcaacagaatatacccgccgcgtgtaggggaaggcggcgccagggagagggcgcagtctctgaatctttccacgggg

SEQ ID NO: 145420 - DNA, 122 bp, Homo sapiens
ttttagtgtgtgtccaaaaaactcaacaattcttacttagcattcagagaagcaacggagcgtagcgtggtggtgaagacaggcagtccggagccgccctgctgaatgcccgctccattcct

SEQ ID NO: 145421 - DNA, 122 bp, Homo sapiens
agttgaagatggaattttcaggaaagggaaaatactagataattctagaattctagtcttcgtgttagatgtttatagcccagcatcttgggacctttccagttactaggtttggacagctt

SEQ ID NO: 145422 - DNA, 122 bp, Homo sapiens
gggaggtagatgagagggtgctcctgactcctccccatgctggccccaagcacaggaccccgccctgccctccagtctgcactctgagtgaggccaccgggccactgtgcctggggctgccc

SEQ ID NO: 145423 - DNA, 122 bp, Homo sapiens
actggctatttttccacagagacctcctagggacacaattaatgccaggagtgcccctcacgttgggactgcaggcccaggggagctcggctgcctccctgtatctccagctgcacaagctg

SEQ ID NO: 145424 - DNA, 122 bp, Homo sapiens
ccccagaggacacaaaatatgctgggctgaggcctcttcctccctggccccttctctgttcgccgtctcccctatgggcctctcaggctcctctctgccatgctttccccactgggtccatc

SEQ ID NO: 145425 - DNA, 122 bp, Homo sapiens
ctggctcctgattgccaaggtcagtctggaacccgcttgcaggtgacacagatcactgatcgcaaatgattattgcttgaggcaacagggccctaaacctgagggtttcctagcactgggga

SEQ ID NO: 145426 - DNA, 122 bp, Homo sapiens
aacaactaagggacacagaacaaaatgacaaacacttggaagcaagaatgatgccagggccgaagaaaattaaacatggccaacatggctagaaaacaaactggacaaacaggaagtggctg

SEQ ID NO: 145427 - DNA, 122 bp, Homo sapiens
gatctcggcttggttattcttggaggagctgccttgcaaatgattccactctgagctcgccggccacagtagcgtgaaatggatggcagtcagtttcctcttcctaagactgggtgtggttt

SEQ ID NO: 145428 - DNA, 122 bp, Homo sapiens
tcctcttcccgctgcagtttcaccgaggtcccactgatgtcaactccagaggactatgaccgtgtcagccgtaaaatatgtcggttcgggaagaggacaagttcattttcattattccctgg

SEQ ID NO: 145429 - DNA, 122 bp, Homo sapiens
aggaaaccaggtggatttttttccaaattaaaaatccctgaacccttcctagaggggtcacgggtagccggcagccgcgcgtccagatgtgtacgtctgggaaactttgccactgcctgtgt

SEQ ID NO: 145430 - DNA, 122 bp, Homo sapiens
tgcaatgataattgagtttctcaattttttttccctcctggtgggggtagactgtttcaacgctaagcagttaattttctttgcaaaactcactgtggtttatcatcatgtttcgaagggca

SEQ ID NO: 145431 - DNA, 122 bp, Homo sapiens
gacacaggtgctttttaaagatgagtagcaattagcctgggagagaggaagagcatcccccgcagggggaagaacgtaagcagacactcagggaaatgaaacacagggcatgtgccggcaag

SEQ ID NO: 145432 - DNA, 122 bp, Homo sapiens
catgcccagcctataagtcttgaagtcaggttcattctcccaaatgtattcttctgcttccgtatcctgttagctaatctaagtcttttgtctgtctgaactttataatcagtttgtcaaca

SEQ ID NO: 145433 - DNA, 122 bp, Homo sapiens
gcttctgctgctctcgggggccctggtcctgacccagacctgggcaggtgagtgcggggtcgggagggaaacggcgtctgtggggagtagctaggggcctgcccggcgggggcgcaggaacc

SEQ ID NO: 145434 - DNA, 122 bp, Homo sapiens
aatatgccaacctccttctcatactaatgtattttgtacatttctgcctggaatttttctcgatccttaggcttttcttgtttaattcctaccatccttcatagctcagctgaaattatact

SEQ ID NO: 145435 - DNA, 122 bp, Homo sapiens
atccgcctgcctcggcctcccaaaatcctggcactacaggtgtgagccaccacgcctggccgaaacagttgttttaaaattatgtttcttttacataggacttgggcttctgttagaggtta

SEQ ID NO: 145436 - DNA, 122 bp, Homo sapiens
cgagactccgtgggtataggaccctccgagccaggtgcgggacacaatctcgtggtgcgccgttttttaagcccgtcggaaaagcgcagtattcaggtgggagtgaccagattttccaggtg

SEQ ID NO: 145437 - DNA, 122 bp, Homo sapiens
cactcacccgggtgtagggaccggacgattgtggaatttaaaccgctcctgggaccgacacgggcctgaattttcagtttgcttcgggagttggcaacttcaggtacacccttgtggctcac

SEQ ID NO: 145438 - DNA, 122 bp, Homo sapiens
cagccacacacctgtgactcccatgggccccacccaatacacatgtgggtcttcaagtgccgtgaggggaagttcctgcctgtgtcacatgcatccatcccacccaccacactgcaggttac

SEQ ID NO: 145439 - DNA, 122 bp, Homo sapiens
ccgctgagctgctggtgggcactggctggcggggaacctgcagccgctcttgtcctctcccgccgcttctcgggatcctgccccccggacccgggcccgcccgctcttctccggccgggtgg

SEQ ID NO: 145440 - DNA, 122 bp, Homo sapiens
ggactgaggggaggggagggggaggttgggagggagccgccgccgcgcgcgtgcggccggcgccgccgccgttgccgctccgctcactccagcctgtttgggggcactttgtttgtgtccca

SEQ ID NO: 145441 - DNA, 122 bp, Homo sapiens
ccaccttctgactaatatgaacatgggtgtacacatttatatccactcttgcctcccctccgtagtccttccttctccacactgcatctagagtaacccctttacactctcaagtatggaca

SEQ ID NO: 145442 - DNA, 122 bp, Homo sapiens
aggaacagcgcgctggggctgcggagagcgcagctgcgggccgggcagtgattgacaggtcgggaacagggcctcccgcccctcctccgtctgggtggggggcgcttggctgcccactgcgc

SEQ ID NO: 145443 - DNA, 122 bp, Homo sapiens
ggaggaaaggtgctaggtgggatacagacagaaataaaaaggaagcaatatgaggtcaaccgcaatggggcaggaggactaattatgcaggagaaaaaaatcatttctacattgaaatcagt

SEQ ID NO: 145444 - DNA, 122 bp, Homo sapiens
ctcgcatcagacagggcccttgtgagagctgcctcaaatgtgacatttccaccagagccccggcccccgtgcccgccttgccagcctcggcctgtgggggctgccactctccacaggtcctc

SEQ ID NO: 145445 - DNA, 122 bp, Homo sapiens
tgctcggctcagggagtgcttggggcatcaggagtgctgggttcagggagtgctgcgtcccggggagtgctggactcagggagtgcttgggcacagggagtgctgggtgccgggagtgctgg

SEQ ID NO: 145446 - DNA, 122 bp, Homo sapiens
ctcttaggccagggcgaacacgtccacgggggtatattcaacttgtgaccccagtctctgcgagagcctgcagtagcatgggggggagagacctcgcgttctctaaggatggaggacaaagg

SEQ ID NO: 145447 - DNA, 122 bp, Homo sapiens
ttctaagcactggacaaacaaattaaaatgctgggggtctgcaaagcatttccttcccatcggtggtctcctgttttactccatttcttcacccttaacaactatagggcacaggctgggaa

SEQ ID NO: 145448 - DNA, 122 bp, Homo sapiens
atgagcgagttgccaccgtgggcagctgagctcagtcccactagggacactgagttgtcacgctgaggaatagagaaaccggggtaaaaacctgtcagtcactgggagagagctacccctca

SEQ ID NO: 145449 - DNA, 122 bp, Homo sapiens
ccaatcagcggccgcctcttgcgcgcgccccaccgaccaaaatggcggctgccgttggtgcggggtgcggtttgtagtgctgttgccctactcatccctttgcaaaatgtgaaagaagaagc

SEQ ID NO: 145450 - DNA, 122 bp, Homo sapiens
cacccccaccccaggccccggcttccagcccttcttcgcaaccccagcaccgcctcctcccggcagccagcgggagtttcctgagctcagccccaggtcgctgggtccctgcacgcctcccg

SEQ ID NO: 145451 - DNA, 122 bp, Homo sapiens
cacatcaagcctttgcacgcaggattggtgtcaaccaccaaaaccatccatccacactcccgccgtccatccacacgcccgcctgcccgtccacacgcccgcccgcccgtccacacgcccgc

SEQ ID NO: 145452 - DNA, 122 bp, Homo sapiens
tgggagggaacagactgcacagtgaaacaggataatcctctttctcgtctcttcactggccgaaaccaatcaggaacaaagggcaaggatttaattggtccaggtggacctgggcatcggag

SEQ ID NO: 145453 - DNA, 122 bp, Homo sapiens
cgccgaccccagggacaggagcgaggggcggggggaggcggggatgggggggaagcagggcggccccgcagaggggaagctgcgcctccgcaaacgctcagaagcagcttcgccagacagcc

SEQ ID NO: 145454 - DNA, 122 bp, Homo sapiens
agaacccgagcccgattctgctcactgaacactcatctgctcccttgcctctgcctgccccggcagcgagggcctggccagtgggttcgtatcaactcccacgtcacctcccgtgtcatctg

SEQ ID NO: 145455 - DNA, 122 bp, Homo sapiens
tttctcgaaatcatgttactttctggccaagtatgccggcgaagccactgagacacgctccgcacatctttagaacataaaggccctggcagtagcttgcggcgctctttggaaaactgctt

SEQ ID NO: 145456 - DNA, 122 bp, Homo sapiens
gcacaggctcggggctgactcgggaaatgacaattttgtgtcaagactgggggaggccgtcgcccggcttcagagcagggcctgcgctgcttggtttcttccggtggattatttttttttgt

SEQ ID NO: 145457 - DNA, 122 bp, Homo sapiens
tgcaggttttccatgtggacgtggaggtgagggacattaacgacaacccgcccttgttcccggtagaggaacaaagagtgctgatttacgaatctaggctgccagattctgtgtttccactg

SEQ ID NO: 145458 - DNA, 122 bp, Homo sapiens
attaggctgaaaaccttgagggcaggaaattgtgtcccatttatttctgtctccaagacccggaacaaggcctagaacagagtagttgctcagtataagacgtcttttgaaaaaagtgaaag

SEQ ID NO: 145459 - DNA, 122 bp, Homo sapiens
ggagccggaaacccaaagaaaagcctgagtctctgtgcccttcctcacctcccccgactccgggcatggaagggggtctgccctgcaccaggcaaccaagacaacatctatctgtgactgcg

SEQ ID NO: 145460 - DNA, 122 bp, Homo sapiens
tgtccactgtcttgggactaagtctctttcatatttaaacaaaactctttcgagagggctcgctggtttggagaaccctcacaaacgctgccaccgagggccaggggcccaggacagtggct

SEQ ID NO: 145461 - DNA, 122 bp, Homo sapiens
agcgggtacgagtcggtgctctgtgtcaagcctgacgtccacgtctaccgcatccctccgcgggctaccaaccgtggctacaggtgactacccaccgccagaccaggctagctccaatttaa

SEQ ID NO: 145462 - DNA, 122 bp, Homo sapiens
ggcggcgagctcgggggccgcaggtgcgagcgggcctggagagtctcccggggcggggagcgggctaggatacagtgggccccgcgggccggcgggccgggtcccggggagcggcgcctgcg

SEQ ID NO: 145463 - DNA, 122 bp, Homo sapiens
aaagtcacacacataatttcccaatatgctgtagctaatgcagcttagtcctgttcaatgcgtgaagggactgtacaagagtgggagtactagaaggtggctgccacagtattttatccatt

SEQ ID NO: 145464 - DNA, 122 bp, Homo sapiens
ctgggcctcctgggactgacctgggcgtgaaggggggccctggccagcctaccttggctgcgatggtggcaggggacatccggggtcgcggtgcctcttccccgctggggcccagggtgccc

SEQ ID NO: 145465 - DNA, 122 bp, Homo sapiens
cacttactgtggggacctcctacctcccaccccggtcctcctcaggctcacttgtcatggcgcatgcgcacagaaagcactggcttggtgaaggtgaactccagcaccagcttctccttgga

SEQ ID NO: 145466 - DNA, 122 bp, Homo sapiens
ggacggcaaacaaagctttctttgggtgaggcagggccgtcctgcccaaagcccctcctccggtgggagggtggctggatcagctccctcctagcctgtccgcagccccagcaggtgtacag

SEQ ID NO: 145467 - DNA, 122 bp, Homo sapiens
ctgataaagagtccagaaaaaggaggagggagagaaaaagaaagaattagtttagtgtagcgaatggtagctatttgcagctcacccacgtgtgctccgaaggtcaaaaccctacatcagca

SEQ ID NO: 145468 - DNA, 122 bp, Homo sapiens
cccgacgccagccctgcggtaggggccgggatggcagctgggaaaccagagagggctccccggggaccctcggcggcccctcccggcgccgcctccccgccggccaggcctcctcggcaggg

SEQ ID NO: 145469 - DNA, 122 bp, Homo sapiens
gcgaggaaacccccaaaggccacaggcacctgcaccaaaccctgagtgccgcaggaagctcgcgaggcttccaaagcgcatgcgcaggtcacggtacgggcacgtgcggcgcgccagcaaaa

SEQ ID NO: 145470 - DNA, 122 bp, Homo sapiens
gcacagatgcagcacgtcccacgatggcccgaggggcgctggatggcgtgctggagacggcgagggccttgggctctcacgtggtctggtgtgtcagtgcactgggctcaggcctgtggtcc

SEQ ID NO: 145471 - DNA, 122 bp, Homo sapiens
attttccttcgtgctcccacctccagtgtcttcccttcccagcgctgccaatggcgagggcggcactgagatttttgtcctgggcggcagacgaccttgtgttgcacttcctcccccgcctt

SEQ ID NO: 145472 - DNA, 122 bp, Homo sapiens
tggctggcgagcaatcatcaggggctaggttgaagctagtcttgcccacctggaagttgccggcctccattacaggagcaaggacaaacagcagtgtagcactgcagcggatccaattctgc

SEQ ID NO: 145473 - DNA, 122 bp, Homo sapiens
caagaaagtaaagccaaaagtcagctgaagataatggccatggagatgtctgtggagagccgtaaaagccaatcatggctgagatgcctgcagaatctctgcccatgagaactctgaggcct

SEQ ID NO: 145474 - DNA, 122 bp, Homo sapiens
acctggctccaggaagagggaccgagctcgcgtgctgggcctcactcccactgggggcgtcggccactcgatcgcaaccgggtcgtaggcattttgggggctcattttaacagaagaaacgc

SEQ ID NO: 145475 - DNA, 122 bp, Homo sapiens
aagcgagccgaggtggacaaggtgtgcagacacaagtacgagctgatggagccactcatccggcagcgccgaggtgagggctgtgaaccagggctcctggggcagccgtgggggccgggccc

SEQ ID NO: 145476 - DNA, 122 bp, Homo sapiens
gccgctctctccaccccacaggatgaacccaaaggcgcgcagaggcgccctcccacggcgcgtgacaccagagaagggggataaattggcgagctggcattcctcccgtcctcactgacgga

SEQ ID NO: 145477 - DNA, 122 bp, Homo sapiens
ccctctctcgggatgtcggacccgacattctcaccatttctaggtttccgggggacctggcgtcttagctatggatcgccaatacctgcaggtcagagggccatagaggctgggcctctaga

SEQ ID NO: 145478 - DNA, 122 bp, Homo sapiens
tgggagatgtagtataaccgtcctcagccataagcctgtcccatcgagacgtcgggacaccgaaaactaccattcccgccggcaaagcggctccggcctctcagcacacttccctccccatg

SEQ ID NO: 145479 - DNA, 122 bp, Homo sapiens
cacaaggtccgagttgggatcctagtgctcctgtctggtcagggcctatctttatgtgttcgttaaacttttaacaatgagaattaattctgtctcttgacattgtcatttgcatgctcccc

SEQ ID NO: 145480 - DNA, 122 bp, Homo sapiens
ttaagagctgtaacgctcaccgcaaaggtctgcagcttcactcctgatctagcgagaccacgaacccaccagaaggaagaaagtccgaacacatccaaacgtcagaaggaacaaactccgga

SEQ ID NO: 145481 - DNA, 122 bp, Homo sapiens
ggaggaggtggtgcaggaggccgccggcgagtggcaggccctcacccacgtcttctgatgcgagttggaagtacacctttaagaatgtttctgaagttacgttttgtgaagagcaaagcact

SEQ ID NO: 145482 - DNA, 122 bp, Homo sapiens
agccttgttgcgtcaccctgagcaagttactttctttttgggcctcagtgtccccctttacgagtaggtttgatccctgaagcgccttgccttttgcatgctgcagctgtcggagaagacgt

SEQ ID NO: 145483 - DNA, 122 bp, Homo sapiens
gctgagcactcaccccaaatgtgcgctccggggctgagcattcaccccaaatgtgcgctccggggctgagcattcaccccaaatgtccgctctggtgcaaaagccactctgttttctcccac

SEQ ID NO: 145484 - DNA, 122 bp, Homo sapiens
gaatcttcatgaatattccaccccttggttaaataaatatttaaaggtagctccaaaccccgctgggcgtgatgctctgtggtatgcctgcacttttctttcttcagtacgtacttattccc

SEQ ID NO: 145485 - DNA, 122 bp, Homo sapiens
caggccagcacttgctgacattgatgtgattatcaggtgggctgggtaagcccatgcagacgctgttgcaggtggaaggctacctagaacctccagggctcctgatcttacagcagccggcc

SEQ ID NO: 145486 - DNA, 122 bp, Homo sapiens
gcgtagttaggtgacgggcgcaaaagacctgccccagccccgggcctagggaaaaaaaagcgcgaaatgaagcctccgttgtgcaatgtgaataaagaaaggacttttcttaaaatgaggag

SEQ ID NO: 145487 - DNA, 122 bp, Homo sapiens
gagccctggggagagactgggcctctatggggggctgcgactcagaggaaggctttgacccggctgcgggaagcgaggacgtaagcggtggtggcggtggcggcagaattgcccagaacatc

SEQ ID NO: 145488 - DNA, 122 bp, Homo sapiens
tgagacggagtttcgctgttgttgctcaggctggtgtgcgatggcgccctctcggctcaccgcaacctacgcctcctgggttcaagcgattctcctgccttagcctcctgagtagctgggat

SEQ ID NO: 145489 - DNA, 122 bp, Homo sapiens
cagtgacggcagcgctgaaaacggtaatgatcaccctgtacgttcattccacactccaggcgaacgcgctttccttccttaatctggccaaattaccaaatcacacagctggtgaggctgcc

SEQ ID NO: 145490 - DNA, 122 bp, Homo sapiens
tatttaaaacaaatttccctaaatcctgagactgagacggagctacaaattctcagatggcgaccgtgtaaatggtattagcggctgaagaaaaaaaatttttcaagacctctgttttttaa

SEQ ID NO: 145491 - DNA, 122 bp, Homo sapiens
gctgggggctcgtggtgcaggttggagacctgggtgggagctctcagtgcaggctggaggcgtgggtcggggggtcgcggtgcaggctggaggcttggagtgcagagttggggatgcagact

SEQ ID NO: 145492 - DNA, 122 bp, Homo sapiens
gattcaagatgacaggattagtaaagagattgatggagtgtgtggcaatgaacactaaaacgcagagactagacaggaggcttatacaggacatcagaaatacaattctgcttcagggatac

SEQ ID NO: 145493 - DNA, 122 bp, Homo sapiens
ggcgtgggttggcgatgggggtggaaggctcccgggtctgtggatctgcggcaggaggggcggctggtagcaggagtccctgcatcacccccacccccaggggcgttccggggtgggtgggg

SEQ ID NO: 145494 - DNA, 122 bp, Homo sapiens
catctgataatgacatcttcccacggcatcccccacgcccgtgggtcccggggccgcgtccgccctgctgctctgggatgggagtcgttttacccatggggctccctggggtgcccgccctg

SEQ ID NO: 145495 - DNA, 122 bp, Homo sapiens
ctctctgaggctggagccaatctccccttccgtcaagggatccggggagaccgccaagcccggtgctcccctgagagtctctgagaggccccgacaccgcccccgctccaggtccccgggat

SEQ ID NO: 145496 - DNA, 122 bp, Homo sapiens
atgaagaggaagaacgcctagatcaaacgggcccggaagacctcgggctggcccctagtccgcctcccttaatcttaaagctacagcaatgtggcaagtggtattagctgttgtggtttttc

SEQ ID NO: 145497 - DNA, 122 bp, Homo sapiens
gtgcgtgcgtgcgtgcgtccgtcctcgtgctcgcgcatcgtaggagggcgggacttccggcgtcctcttgccgtggttgatttgattttctctggtgttttcactagttccggcctttggcg

SEQ ID NO: 145498 - DNA, 122 bp, Homo sapiens
ctcctttctgcctgctcagaaaacatcagtatctgagcagcctctctacagaagcttaaacgcctcgccctttgtttgccattgttctctaaccactcacttccctctccttgtactgaggc

SEQ ID NO: 145499 - DNA, 122 bp, Homo sapiens
cagcagctgaggcttcatggccaggctcacctcttcctctcacctcttgccttttttcctcgctcaatctatgctcttgcagcgctgagcataccacactgcttcacccctccctgccttgg

SEQ ID NO: 145500 - DNA, 122 bp, Homo sapiens
tcctaagagcagtagactccctctagatcaggtcagggcatgccaaggggcttaaaaaaccgcgaaacaggctagcgcctacttcccacatcccccagcgaaacaagccctccctcctcctc

SEQ ID NO: 145501 - DNA, 122 bp, Homo sapiens
cttgggttatgggtgaatcaaaatctcagaaaccatcactaaagaacttacacatgtaaccgaaaaccacctgttccccaaaactattgaaataaaataaaataaaataaaaatagcagata

SEQ ID NO: 145502 - DNA, 122 bp, Homo sapiens
taccatagtgataaatatgaccaaaagccataaatgactgtgagatgtatgagaatgacacgtcacattagtaagaagagaaaaattttggccatgtttatgatttgaaatatgttttcctc

SEQ ID NO: 145503 - DNA, 122 bp, Homo sapiens
aaaccacgatgcaaaaagaacaatacaaccgctgtcccgttgtgaactcctgaagagcaccgtgcccacaccttacacggtggcctgaaccccgcagacccattctccctaacgcaggaacg

SEQ ID NO: 145504 - DNA, 122 bp, Homo sapiens
gtcagttcatgccgagatgaaataaatcacgcagaaagtgccagtcctcctgatgtgccccgagtgcttttctctttctccacagcgagcgtcagatgcggctttttctcctgtgaatcagg

SEQ ID NO: 145505 - DNA, 122 bp, Homo sapiens
tacggcctccgaggctgggtagtgagtgtgtcgctggccttagccagactccacaggccacgctggctgcgaatggagccgaggactcgcgcggaggcgagatgctaccagccggcgagatc

SEQ ID NO: 145506 - DNA, 122 bp, Homo sapiens
ttactttcactacaaatctgtgtctatgagcattggctgtatccattgacgtctgcattacggatcagacctcacagctgtgtctatacatcatttagagtttgcaaagtgattttctttac

SEQ ID NO: 145507 - DNA, 122 bp, Homo sapiens
gacgaccagccgaggatggctggcggaggcgtggggcaggccgcaggaccctcgaaggatcgtgtgagaccccgggcagcctcttgggaggccatttcgaggagaaaaccttgatttctgcc

SEQ ID NO: 145508 - DNA, 122 bp, Homo sapiens
gggtgggggcggcagggggggtgggggctgggactgcaccttcacggaagggagtagcggcgtagggggctgcaccttctgcagctgctgcaggtacagctgcatctgcatggaggtgaggg

SEQ ID NO: 145509 - DNA, 122 bp, Homo sapiens
ggaatcctttatttttccctctcatctgggttgtaacaatcactgttccttgtagtcatacgaccctgacatattatacgtttatatgcttattggacattcatccctctctaaaatgtgag

SEQ ID NO: 145510 - DNA, 122 bp, Homo sapiens
agtactccaaggtctgtggcacgaaactgctatggcagtcaccagcatcgtctatcttcacgtttaattcttttcctgttttaatttaatttttagagagggggtctcactatgttgcccag

SEQ ID NO: 145511 - DNA, 122 bp, Homo sapiens
ctctgggctgtgtccttgtcaacgacttcagctcccatttagcttccccagggccaggcccgggtgacaacaccccagatgtgtgggacttgtgaccagtgtggacccgagagaactgggag

SEQ ID NO: 145512 - DNA, 122 bp, Homo sapiens
tgtccctaccaggaactttctggtttatctgtccttctcctgcaagtgactgagtcccatcgctgcctctgctcccattcacccctagcttggcacagtccaagagaaggggcccaatccag

SEQ ID NO: 145513 - DNA, 122 bp, Homo sapiens
ggcgccgaggagcgcagagcggcgcgcagcccgcccgccccagacggccgtctggcctcgcgcctgcctgttccctccagcccggacccccctgaaatatgttcaggggcgcttggatgtgg

SEQ ID NO: 145514 - DNA, 122 bp, Homo sapiens
ggataaagaacaaaagatagtcctccgaggttacaggcttggaagggcagagaggagctacgaaccttggaagaaaaacaaggtgctcaggaattcatcgcctaacatttcacttccccacc

SEQ ID NO: 145515 - DNA, 122 bp, Homo sapiens
agccccccaaaataaacctaacaggttttgacattcgaagccagggggaccacgggcctgcggatgcaagcgagtcctacggactcctgcgcgcgagctcgcgggcgccgctgcgggccttc

SEQ ID NO: 145516 - DNA, 122 bp, Homo sapiens
gagtacagtggaggtgacactgccagttgccaccttgaatagagctgacggcttctgcctcgctttcttggagccctaagctgccacgtagaaattccaacgacttcactggagggaccact

SEQ ID NO: 145517 - DNA, 122 bp, Homo sapiens
cggctgacagcccaggccccgccccaccgccgccgccagagccgccgcgcacgcgcgcttcgacgccacgttcacagccccagaagagagaactaaggcgcatgctcggcaaggaaacgaga

SEQ ID NO: 145518 - DNA, 122 bp, Homo sapiens
tacaatcactgctcttttagcatttgccgtccgtggatggctaggtgttaactagctcagcggagggtcagggtgacagccttttacactctgccctcttggtacccgagttcttgtcaggc

SEQ ID NO: 145519 - DNA, 122 bp, Homo sapiens
gcactggctcgcgggacggggcggggtcgggtgagggggaggagacagccccacgctttgcgactcgcggtgacccctacgcggaactctctcgcggtaattcgaagtaccgcgcctgcgtg

SEQ ID NO: 145520 - DNA, 122 bp, Homo sapiens
actgaaatgacgtgtctgagatcaggcattccccacttggttaccaccctgggctatgatcgctctttggaggttccaaaaatcaagcccagtctcataggaataagaaagtaactaattgt

SEQ ID NO: 145521 - DNA, 122 bp, Homo sapiens
agtgcggggggataaagaacgccaagagaactggacagcacacagaagagatcgtggacgcggaataacagagtcagttccaggtcattctccttggcatcaaatgcttagtaaatctaact

SEQ ID NO: 145522 - DNA, 122 bp, Homo sapiens
tgttgaaaactcacagcctttgagctaaccacctctctcttaccccaaaggcaggagttacggctgcctctggtgctgaacggtggacactgtgaatcaagaccaaattcgtgacaaactca

SEQ ID NO: 145523 - DNA, 122 bp, Homo sapiens
tccagaggccaaggtcgcccagtcctctcggctgtctcgagctgaatggctggcagtctgcggctcccccgcctccggcccggcagccacaggtcggaggcgcccggcgtcggcgctcgagg

SEQ ID NO: 145524 - DNA, 122 bp, Homo sapiens
aaactcgccttttgtgactgtgttagcgtgaacttgtgagccgagtttgcactgagagcgcgataaacaggtctaattttttaaaagtatttttgctgttaacgttggatcttggtataaat

SEQ ID NO: 145525 - DNA, 122 bp, Homo sapiens
ggaaacgcggcggccggggaaggaggcaccggcaggggccccgtgccgcgcggccccgggcgccctggagaatctggcctcctgggctgcctgccggaacgcctagagaaagatgctttgaa

SEQ ID NO: 145526 - DNA, 122 bp, Homo sapiens
ctcttgaggaatttggttgcagagaaatacatattacaattttgcagaaatgaaacaaagcgaaacccaaagccaacctccatatatgtatgtgtgtatatgtgtgtaacagcacggggaaa

SEQ ID NO: 145527 - DNA, 122 bp, Homo sapiens
ctaatctggacgcccctaatctacagcttttattgcgcccagttaaaagtcgagggaattcgctgtccctccgcgctcggataattacccctaaatggccacggcagccccttgtgtttcct

SEQ ID NO: 145528 - DNA, 122 bp, Homo sapiens
gaacaacccaccctgcctctcccagagacggcgcctcctcagtgctccccttccacaggacgtagggtcttctagagatcaaaacagggaggaggaaagaaatcctaccgcaggcccctgcc

SEQ ID NO: 145529 - DNA, 122 bp, Homo sapiens
tccggggagtctcaggggtcccggcaggtcttggcaggtctcgggggagtctcagggtcccggcaggtatgggcgggtgtcgggggtctcgggtgcgcagcagcctcccccgggccccgggg

SEQ ID NO: 145530 - DNA, 122 bp, Homo sapiens
ctgggcgcggagggcggaacagtttctggaccagagcacccgcgagaagcagggagcggccgcacagcagccagaagagggcgccagcaccccggggccggggctacagggctggctctgcc

SEQ ID NO: 145531 - DNA, 122 bp, Homo sapiens
gcctcgtgggtcttggcctcctcctccagggtcttcttcaggatgttcacctcctgctcacgttttgacctggacagagaaatcccctcagagtggaggccggggatgctggagcgaggctg

SEQ ID NO: 145532 - DNA, 122 bp, Homo sapiens
ttcttctcaactgccttcagctcaaaataatccttgtgcccaagtggcatattttagggccgtgtattcggctacccttcatagggtggggcaagaccatgcagaacattgaaagctaggat

SEQ ID NO: 145533 - DNA, 122 bp, Homo sapiens
gctgtctccggagcagcccctgggtggcgccagaggtccagcaggcccggaggccgagtccgtgggcaacttggggagcgttgagtcatcgcctgtgattaagcatttctctccctccccct

SEQ ID NO: 145534 - DNA, 122 bp, Homo sapiens
tggcctcagagtttggccctagcagaggttcaagtagcaccaaagattgtcagcctgccccgatgcttccttgcctggcagggatgcttgccaacagaggtatcctacccttctcgggattc

SEQ ID NO: 145535 - DNA, 122 bp, Homo sapiens
tgtagtcatacttgggaaaaaacatataaaaaatatttttaaaatggttactatattgcccgaaataaatgcccagtaagggatgagatttttgaaatgtggcctgatcttagccctgtgtt

SEQ ID NO: 145536 - DNA, 122 bp, Homo sapiens
ggtgcgaaacccggccaacttaaacatggcggctaaacccgaacagcaaaacgttgctgacgccaatgaagtcatgctcgaaatggagcgaggcggcggagctggggaggcggtaatctcgc

SEQ ID NO: 145537 - DNA, 122 bp, Homo sapiens
cccagagccgtggtgcttgccaagggctgtgcggagctggtgctgcctgaaaccccagaccgagaagttgatgctcggcccacgccgttagctcgtgtgcgtgtagtctgtgcgtgagactc

SEQ ID NO: 145538 - DNA, 122 bp, Homo sapiens
taagtgactcaaccaaggccttttttccttgttatctttgcagatacttcattttcttagcgtttctggagattacaacatcctgcggttccgtttctgggaactttactgatttatctccc

SEQ ID NO: 145539 - DNA, 122 bp, Homo sapiens
ggaggttgaggcttcaatgaaccaagatcacaccactgccctctagcctgggggacagagcgacatcctgtatccaaacaaacagacaaacagaaggcattacaggaatacatagagtatta

SEQ ID NO: 145540 - DNA, 122 bp, Homo sapiens
ggtttgatgggttactttggtggaaaatacaggagaagtaacactggcttaatatgctgtcgtcttatatcccctgggggcatttgcatttccactggtttcttttggagactgaaaaggct

SEQ ID NO: 145541 - DNA, 122 bp, Homo sapiens
taaaatgtggagtttgcttctgtctatagaagaatgtttggggtccaccaaagcttccagcgtcttgaggatcagtggctggaaaaggctaagtttcccctgaagggtgttgatccagtatt

SEQ ID NO: 145542 - DNA, 122 bp, Homo sapiens
ggtttcagattcacagagccaactgcctacaaaagcacttcatatccaacaaagtgtggccggaatgaacttttgattccccatacccatgatctttcaccctaaaatgtgttcctctctta

SEQ ID NO: 145543 - DNA, 122 bp, Homo sapiens
acttgggctccgggcccttgggggcggcgtgtgggggggactttggcgacccgggtcagccggccgccccctgggctgctggtgggcgtcgggcggcggctcctcccccgggcacgggcgcg

SEQ ID NO: 145544 - DNA, 122 bp, Homo sapiens
ctatctggctacaataataaagataatgtcacagcttgctcacaccctgtggctggaccccgtatcttcttcccacccacctaccaaaagactgaggcccattttccgttggctctcattca

SEQ ID NO: 145545 - DNA, 122 bp, Homo sapiens
cacctgagtgggaagtaagagggtggagtcacaggcactcagctgggatttacctggcctcgtcactagactaatgggattgtggcacaggtgaacatcccgtcattggagaagaaaggctg

SEQ ID NO: 145546 - DNA, 122 bp, Homo sapiens
aatctgcagaatggcattttgtttgtgaattctcggatagaccgcgaggaactgtgcgggcggagcgcggagtgcagcatccacctggaggtgatcgtggacaggccgctgcaggttttcca

SEQ ID NO: 145547 - DNA, 122 bp, Homo sapiens
catggttcaatggctgcaaatggatctgatggagagcgtgtggctttgggaggagcgtgccgccttccacagtgagcagcgaggctgggacctgcagggatgaggtcccgggaggggatgcg

SEQ ID NO: 145548 - DNA, 122 bp, Homo sapiens
ttcattccttaaataaaagttcatgaaccgatcctttcttcatctgtttttatgcctgcccgatcccccaaagcgctacaactccatccatcccaagccatctcattcttccaagcagaaag

SEQ ID NO: 145549 - DNA, 122 bp, Homo sapiens
tgtctcttttctctgtcgctgtttcagattaatgctcacagcttcttgggtgctttctcacgggtaaagccatggcatccgtaccttccattggttgccttctagccagaaatcagtattat

SEQ ID NO: 145550 - DNA, 122 bp, Homo sapiens
tcactccacggtgaccggcactgatggggccctgcgagcatctctgtgaagccacatgaacgggcacctcactccacggtgaccggcattgatggggccctgcgagcatctctgtgaagtca

SEQ ID NO: 145551 - DNA, 122 bp, Homo sapiens
gcggcccgctcagagcaggggacagagcacgcccgcgggaggcggcggggggcaggtgcccggcgaggagtggcgccctcctgtgttcaaagaggggaagcgagcgattctgcggctgcagc

SEQ ID NO: 145552 - DNA, 122 bp, Homo sapiens
acaggtgggaggggggacgcagctctcggctcggtccgcccacggtccccgcccccggaccgcaggaatcctctctggggaccccccgcccgcgccccccagaccagcccggctcctgggtc

SEQ ID NO: 145553 - DNA, 122 bp, Homo sapiens
ctgtgcccagccaggagccctgatctccaaggggaaaagcggtgctcagaaaggccggagcgtggtaaacagtgccttccagtgagtcctgggagctgcagagcacgccaccggcgggcagg

SEQ ID NO: 145554 - DNA, 122 bp, Homo sapiens
ggagacattatgtccttctcatatctacacaaagcacatgcttttatgattggacacacacgttttctagtgccccatagagagccctatatagactaactatatgctatgctagtcttaag

SEQ ID NO: 145555 - DNA, 122 bp, Homo sapiens
cctgcttcggctctcagggcggtcacctgggatgggggcatccaggagtccagcgtcagccgtcaaggctcatgatctaaccgcctctgcaggaagggccgtccgggatgcctgggaaggca

SEQ ID NO: 145556 - DNA, 122 bp, Homo sapiens
tacaacaggatggattgtgcgggccccgagtggcattttccaacctcggccaggggcttccgctagaggcgcctgcgatctgcagactccgtgtctgcccaccgcctacgcatggttggggc

SEQ ID NO: 145557 - DNA, 122 bp, Homo sapiens
gaatgaggcttattgcagggatccatgcatgagttaagggctgaactcaagagtggacaacgagggaccttatgaagaaaacagtcatgaaatgtggtgacaaattatatatggttacccag

SEQ ID NO: 145558 - DNA, 122 bp, Homo sapiens
aggggaagtcacagtggctgcctcctgacttccagaagcttccatgaccattcccggaagcgctgaggtggccatggaatccccgcatgactgtccgagtggagagcaaggctggagagctg

SEQ ID NO: 145559 - DNA, 122 bp, Homo sapiens
gccccgcagagattaactgaaaataggtaaattatgaaattgtgagggggaagggaggttcgaaattaaagtcatcatcaacggggctggcagccccagcagaggaaagaatagcatagcct

SEQ ID NO: 145560 - DNA, 122 bp, Homo sapiens
cctattttagaattttccggagtagtttatttgcagtctgttgattatgtgcagtagacccgggacactgcgttttaccgatcaccttgaatgtggtgcctggatgtgcctttttttttttt

SEQ ID NO: 145561 - DNA, 122 bp, Homo sapiens
tggctgattgcttaaaaacctaccctatgttcagaatcaatttggcttttattagcaggtcgagaaagatgtctactctactctattctgccttcaagtagcctttgccacactcccctccc

SEQ ID NO: 145562 - DNA, 122 bp, Homo sapiens
ctgccggcctgaggaggtgagcgctgcctgcaacgccctacaccacagccagcccaggaccgactgatcgctcagctcccgccaactttaataagtatagccaccgcctgggtgtagactcc

SEQ ID NO: 145563 - DNA, 122 bp, Homo sapiens
gaccttgagcaggagggccaggggcctggggattggtggctgttctgccctttccgccaccgttggcggctgaacactcctccccggggtctggggtcagggacccagcctgtgggatacca

SEQ ID NO: 145564 - DNA, 122 bp, Homo sapiens
aggcaaaaaagaatggctttggagctgacaggcaaaataccaataaccagcacagacttccggttccattcctcagtacatccaccaattccaccctgcaggccaagctcatccaacccacc

SEQ ID NO: 145565 - DNA, 122 bp, Homo sapiens
aggccacctcttcctggccggtgtgggggccccgtctcaggtctgagttgttaccccaagcgccctggcccccacatggtgatgttgacatcactggcatggtggttgggacccagtggcag

SEQ ID NO: 145566 - DNA, 122 bp, Homo sapiens
gagcactttgcgatagaaagaacactgcactggaaatgatgagacctgaggttctagacccgactctccacacaacaaatgaccttggcttgaggttgacctctcagaatctcatttcctta

SEQ ID NO: 145567 - DNA, 122 bp, Homo sapiens
gctcagctggcggaagaaggccggccgggcgaggtctggccctggccagcggcgcagccccgagcccccgggagcccctagtgtccagggcagagtcccctctgggcgctcgcggcgctgcc

SEQ ID NO: 145568 - DNA, 122 bp, Homo sapiens
gcaatgccaaaagtgggccaaatgtgctatgggacaacattaggtccctagtctcagtatcggtttcataaaccagcccttactatctttacaaaacagaggggggaaacatctattaaaaa

SEQ ID NO: 145569 - DNA, 122 bp, Homo sapiens
gtccggccctgaggctaggagcggggcgaaggctgcagaacgaacccaaagccaagcaggcgctccagctggagttgaagggaagtgactcgaggggtgtcacctcgtatgtcacaaactcc

SEQ ID NO: 145570 - DNA, 122 bp, Homo sapiens
atgccccagcccgctccgcggagcccctcacagccacccccgccccgaccgcgccccgcgcggctcgaagcaccttcccaaggggctggtccttgcgccatagtcgcgccggagcctctgga

SEQ ID NO: 145571 - DNA, 122 bp, Homo sapiens
ccctagagagggccaaacacccagggcaggtgaaaggcaggctgcccatcattcacccagcgagaacctctgtgggtcccctgcagaggcccaggagacgcctcctctctggtccatctcta

SEQ ID NO: 145572 - DNA, 122 bp, Homo sapiens
cggcagaggctcctttaagacggtctacaaaggtctggacactgaaaccaccgtggaagtcgcctggtgtgaactgcaggtaaagccccacctactttatttgacggtcctttggatcccaa

SEQ ID NO: 145573 - DNA, 122 bp, Homo sapiens
ctatgccactgttggggttaaagccctaggcacgcaggtcttgcctcaactgcgcctgcgcgagtcaggacgagcgcttgccccagatcttgacgtttcaggcggcccctcctaatccggaa

SEQ ID NO: 145574 - DNA, 122 bp, Homo sapiens
ggcggaaagtcgcttccggcttacgtcacgtccggcgcctgcggcccacccctccctttccggtcccccaatccacagccgcaagtttccccaacactgcgttacgctacgccacgcccccg

SEQ ID NO: 145575 - DNA, 122 bp, Homo sapiens
gattttaaaacaagcttaaggaatcactctagctctggccacaacctaatctctgcaacccggcttcattgcattggctggaaactggttcacttcatccaagggcctagttcgagggcatt

SEQ ID NO: 145576 - DNA, 122 bp, Homo sapiens
gctcgctgtgaagcctggggacgcaggagggtggtcgactttgcccaaacgcttcagccccgggcaagcctgcccccaggatgacacaaacatgaaccctgacttgggcttgcggtcgcagg

SEQ ID NO: 145577 - DNA, 122 bp, Homo sapiens
aaacgttgcgcttccaggccgctgacatccagggaatgaagtcttgcgtcacaaggggagcgacggccttgtgcacgcgctctgtgcggcctgagtaatctgtcggccctgagtaccaccag

SEQ ID NO: 145578 - DNA, 122 bp, Homo sapiens
ccagaaagacggatgcatcgcccgcaggtagagacgggctcaccaatcccactcaaaacccgctgccggcttacagctcgcaagccgcccacagtgccagccccatgccaagcatcactagg

SEQ ID NO: 145579 - DNA, 122 bp, Homo sapiens
cgccaccagcagcaccgacaccgcagaggccgccgccatgtccctggagcccggccactccgtgactccccagtacagaggcagctgcgtcccacacgccaaacccgttcctccactacgaa

SEQ ID NO: 145580 - DNA, 122 bp, Homo sapiens
cagtctcctcggccgcaaggtggggttgtgccagcagccgggaccttgggcgtcctgtcccgtccctgcctggtgactgcggtcccggagccctctgtgggcagctccgcccccgcaacctc

SEQ ID NO: 145581 - DNA, 122 bp, Homo sapiens
tttccttctttcatcaaactgcccatcccctctgcagccagtgcaggagtcgcggagtgccgccttggctctggccgcctgaaggcctgccgtgctggagagcgggtccaggggttgacatc

SEQ ID NO: 145582 - DNA, 122 bp, Homo sapiens
gaactataccaaggatgtgaacccaaaagctgtggcctccccatgtccactctgtgctaacgtctgcttctctcatgccccctaggctggcctcactgcctgacagctggtccccagctgtg

SEQ ID NO: 145583 - DNA, 122 bp, Homo sapiens
ccatgactcctaaccgggtggacaggggggccgggcagccgcggcgcacacgctgggcgtcgtccctagcagcagaggagaccagaaggtgagagtccccatgccgcagccggagggccggg

SEQ ID NO: 145584 - DNA, 122 bp, Homo sapiens
tccgaacctcagaaggaacaaactctggacacactgactttaagaactgttaacacaccgcgagtgtctgcggcttcgttcttgatgtcagtgagaccaaaaccccaccaattccaggcaca

SEQ ID NO: 145585 - DNA, 122 bp, Homo sapiens
ccctggatctcgcgcttccagccttcctgcatggaatggaaggagtcccgcggcatttcccgtaggacctgtgcctccagcgcctccaactgctgcaggatggaggcgaagtcgggcctgcg

SEQ ID NO: 145586 - DNA, 122 bp, Homo sapiens
ccagctgttcagcagctgtccagccctgggggctgtaacccaacctcatctctcccaacccgcccccccaccacacacaggcaggctgtcagtcaccctgaaacaataaggcttttcaaaag

SEQ ID NO: 145587 - DNA, 122 bp, Homo sapiens
ctacatggcaccctttctctcatctggggaggcaattacgcgataattaagcgactcacacggctctttttatcttgtccgcggtgtggagtggggcgatcaaagtaaaggctgtccaagtt

SEQ ID NO: 145588 - DNA, 122 bp, Homo sapiens
agcgacaagacggtaagggctggggatagcctggctgttggtaaggagctcaggccacagcgccctcgctggccccgctgctccgtccatccaggggggcggcctggaggaaggggcagcgt

SEQ ID NO: 145589 - DNA, 122 bp, Homo sapiens
gagaaccccacggtcctggagtaggaactccctcgcttgttcttcccggccgatagggtgcggccaggagcccgcacagccttgcaggtgttgtagtaattctctggcacagccaccacgcg

SEQ ID NO: 145590 - DNA, 122 bp, Homo sapiens
tccatactgttcctaaactgctaaacccatattcttcttgcccctggccaccttgagtcccgctagcctgggcgaaagtacgtggggaggttcagacccacgattataattcctccctagca

SEQ ID NO: 145591 - DNA, 122 bp, Homo sapiens
gttagtgtccaatttaccacatatgatgagggttgtggatgccattcttccaccaattgccgtctacatgtttttccatttatgaaagagctgtgaaaaaccatcaggctcagaatgacgat

SEQ ID NO: 145592 - DNA, 122 bp, Homo sapiens
accacatggatggaaagcaggaagggccaacctgttactcccactgctaaacaacagtaacgattgtgggaataactgactggcaggaaccctggcaggaggacactcttaatatgttctga

SEQ ID NO: 145593 - DNA, 122 bp, Homo sapiens
gagagttgctcttcacctttcttcaggtacttctttggcgctgctgcttgcctgtgctaacgtcaaaacgcagcaaaacacaaaactccacaaaactcaaggccttccacagaccgtgcacc

SEQ ID NO: 145594 - DNA, 122 bp, Homo sapiens
aatataaactccatgaaggtaggaaccttggctctctggttctccaatgtacatcgaaggcgtggcataatgccaggtccacagtagaagcccatacatgcttactgcaggaattaatgaag

SEQ ID NO: 145595 - DNA, 122 bp, Homo sapiens
gccgacctgaccgatcccggcaccgcgagagcgcgacgaggtccctggagcccgcggcctcgtcaagggccccaccgcgccccgacccccgggtcccgcgcccacctctcgggtctgcgctc

SEQ ID NO: 145596 - DNA, 122 bp, Homo sapiens
ggataaatgcccgtgtactttgctggatactgtcaaacgctcctctgctcccaccactcacgtctgagagccctgtttcctgacagccttgccaacaaggtgagtgagtgtcagggagagct

SEQ ID NO: 145597 - DNA, 122 bp, Homo sapiens
gggggacagaccgggtctgaatcttcagtggatgcgcccctagctcccggatacctcaagcgcctttggaggactccagcacgcccctcgggagggaagcccggcctcggttccgtctgtgg

SEQ ID NO: 145598 - DNA, 122 bp, Homo sapiens
cgcgatccgcggcttatccttcgcacttaccaaggcatctctcggagcgttcttgggaggcgccatcttgcccgactccatgttatccagccactcgtcatccgcggagacagaggagagag

SEQ ID NO: 145599 - DNA, 122 bp, Homo sapiens
gtcgtcgcggcctggggttcacttggggggcgccttggggaggttctagcccctgagcaccggagctgcggcccgggtggagcggagcagtcccgggccggcccgcggcgtctcctggggtc

SEQ ID NO: 145600 - DNA, 122 bp, Homo sapiens
tggtctctttacaaattcaagcttatcaattcatgagtctcctgaaagattgacgagctccgtgatccaggcaaaacattattttctgcctaaatctgcattagtttttgattcttgccaga

SEQ ID NO: 145601 - DNA, 122 bp, Homo sapiens
gatcatgtggaggaggtggcgtgtggacgtcgtgatgtggccatcccgccacaagcacagcgagaaccgctctgtacacgatcatgtggaggagctggcatgtggacgtcgtgatgtggcca

SEQ ID NO: 145602 - DNA, 122 bp, Homo sapiens
ttcgacggggacgtcttccgcttccccggcctctgcgactacaacttcgcctccgactgccgaggctcctacaaggaatttgctgtgcacctgaagcggggtccgggccaggctgaggcccc

SEQ ID NO: 145603 - DNA, 122 bp, Homo sapiens
tccctggtgcggggccgccggggtgagcggcctgactacaagggagaggaggaactgcggcgcctggaggctgccctggtgaagcggcctaatcctgacatcctggaccacgagcgcaagcg

SEQ ID NO: 145604 - DNA, 122 bp, Homo sapiens
tctccaacctggagtaaaaaaacccaccagccttttagaatcgttgtgaggagcagagaccgtttacaccaagcgccaactcagtgcctggcacacagtcagcaatgatgtttatcgatcca

SEQ ID NO: 145605 - DNA, 122 bp, Homo sapiens
cgccgggggcgtcggcgcctagggcgaagtgagccagggtgcagtcgggaagctccaggacgaagcggcgcggcggagccatggccccagcgcagaccccgcgccgcccgagcagcggcccc

SEQ ID NO: 145606 - DNA, 122 bp, Homo sapiens
ccctccactttgctttatgaggcagatagcagccccaaaccatggataggttggggcctgcgcagacctcaattattacggtattttacagtttataagacaaagagcttccccacacatta

SEQ ID NO: 145607 - DNA, 122 bp, Homo sapiens
gccccaaactggccgcgccccgaggaccatctgcaaaagatgagggcagggaaaaaggatcgaatccttccagccggatagacttcaaacatcgaatagcaagaaaagcagcaagccacaga

SEQ ID NO: 145608 - DNA, 122 bp, Homo sapiens
tgccctccatgatggatgtgggcatcctcctggaaggctaggcctgcctccacttacccacggagatgtgccgggaagtgccaaacaggaagtagatgaagacagggtagaaggagctatag

SEQ ID NO: 145609 - DNA, 122 bp, Homo sapiens
taatgatagtatctaccgcgcagtgtggtcgtgaagcgtaaatgaaactcagattaaatacgtagaacagtgcctggcacatagagcgtgttcagtaggtatcagctattgttcttttcatt

SEQ ID NO: 145610 - DNA, 122 bp, Homo sapiens
taaaacacatgttgaattacatttttatccacttacatacattctcttgctggtacccgacgataaagactcatcgcataaatacttatgtgatcacataagcacactggtgctggtatgga

SEQ ID NO: 145611 - DNA, 122 bp, Homo sapiens
gctctgtcgcccaggctggagtatagcagcaccatcttgctcacaggaacttctacctctcgaatttaagagattctcctgcctcagcctcccaagtagctgggattagaggcatgtgccaa

SEQ ID NO: 145612 - DNA, 122 bp, Homo sapiens
acagacccagaagacagaaacacagagacacacttaccatagaacccagcagaacttccccgcaggccgggacgctgagttctggcccagggagaggctctgtgcctatcacaaagcccttg

SEQ ID NO: 145613 - DNA, 122 bp, Homo sapiens
caccttccctgcctgtgactggcacagacattagccaatgggtgcttggatagggtgcgccggcgccccgccccccttagcgccccgccgccccgaggcaccctctggcagactcggcggcg

SEQ ID NO: 145614 - DNA, 122 bp, Homo sapiens
gcgatctcagctcactgcaatctccacctcagcaggagagcaggaatcttcagtgatccacgggcagatctgccaccattgtgggcacctgttcctcccgcaacctttgtgcccgcctctct

SEQ ID NO: 145615 - DNA, 122 bp, Homo sapiens
gggctgtctcagtttgggggcaccgccggcgtctgtcgcctggaaaactgcggggacatccgcactccacccagacatgacagccgcccgccgggcactttgcagagtgccacccacagccc

SEQ ID NO: 145616 - DNA, 122 bp, Homo sapiens
ctatgagtttagcacctccattatattcacttttgtatatattttacctggcataaaactcgaaataaaattaggttgtaactaaatgcttgacgaatgaatgaataaattagtggttatga

SEQ ID NO: 145617 - DNA, 122 bp, Homo sapiens
cgagccgctgccgcgagccgggccgggtggggggcggacacctcgagattcaagcccccgcgccgcaccttccctgagccacatgaaggagcagaggcgccgctcggaccccgacgtgcgcc

SEQ ID NO: 145618 - DNA, 122 bp, Homo sapiens
ggagggagccaagagcctgaacatgtggtcgccagcttggaatgttactgacatatgtggcgagggcttagccagaaatatttaaagatgtagtattccggcctgtgagttgtctgggcagg

SEQ ID NO: 145619 - DNA, 122 bp, Homo sapiens
ggggggaggggtggtgtgggaaggggaggccggctccaggctgtgagctcagtcggctggcgggggtagagctggctgcaggcccggcccctctcagctgctgccctctccaggtccgctct

SEQ ID NO: 145620 - DNA, 122 bp, Homo sapiens
atgggttctgccaccttatcgcggtgggtcccaggagaccgggcgcaactggagcaggggcgccctctgctgctgggtgtcagctcttcctcccacggctgcccaggggatttgcaaggggc

SEQ ID NO: 145621 - DNA, 122 bp, Homo sapiens
agaaatattgtaaacttatcttcaaaataatactaatgcattacttttctttatagttcccgaaggcttttaaattcattatctcattttggaacctcttggctattgaacaggatgactga

SEQ ID NO: 145622 - DNA, 122 bp, Homo sapiens
agactcaagggggcagcattcacattgtgatctctatgaatggtgcttctggagttgtgccgtgcacagcctgcacagctgcatccagtaaccctgacgtgttctgggcgtgtctccttaat

SEQ ID NO: 145623 - DNA, 122 bp, Homo sapiens
gtgcagagtggcataatgacaggcatcaatgtggttgattcagagatgccccagtgttaccggatcaaacccagggtcgggctgcttattctcaaggcccagtaatgagatgcagatgaact

SEQ ID NO: 145624 - DNA, 122 bp, Homo sapiens
tccgccgcccgcaggaaaactcacaactaagggaccaggaaaaagcctctcagggtcgcgcgccttcagtgaggatcctaatttacaccccgagtgtggccccgtcaaagactagagcgaag

SEQ ID NO: 145625 - DNA, 122 bp, Homo sapiens
tacgagtttgagagtccaaggtcttcaccaacacctccaagctgtcaggctcctccacagcggtactggtactatcattaggctccatggccgacaggtctctaaagaagaacgaaggaagg

SEQ ID NO: 145626 - DNA, 122 bp, Homo sapiens
taccatccagctacctgtctgatgctgcggtagccagcctgccagccatcttgacccaaacgtgaaatgttgccttctccctctctctttttatttatttatttatctaatttattttattt

SEQ ID NO: 145627 - DNA, 122 bp, Homo sapiens
tgtttctatcctatttttttccattatgtaaccatgagatatgagtggtcacaggtttagcggaacaatatagttctacaggcccactaagtttctagacggcagagagttactcaaaaatg

SEQ ID NO: 145628 - DNA, 122 bp, Homo sapiens
ccgcccctccccacccatttcccgccctgggccgggcccccggccccaccgccccctccccggccccgccccggcccccggaagcctcaccccgcccccggccccgcccccccgaagtttct

SEQ ID NO: 145629 - DNA, 122 bp, Homo sapiens
ataacctttttaatgctggcccttgtttcacagggaaaaggcaaaaatgcaaaaataagccgtgtgtctcctggattctctcatcgattgttcatggtctgagatgttccctccatttccag

SEQ ID NO: 145630 - DNA, 122 bp, Homo sapiens
gtagcctgaagacccgccggagccgcccgccccacgatgggcccgcccctccgggattggcgccctgctagtggccattgcctgtgacgtcacaggatcgcgcccgcttttctctcgggtga

SEQ ID NO: 145631 - DNA, 122 bp, Homo sapiens
attgtgtgcatgtgtatgtatgtgtgtgcatgcgtatgcacacacaaacaaatgcacacacgtgaacagtcacacacaggcacacctcgtgtgtcacaaaatcagagttggaaaggacccca

SEQ ID NO: 145632 - DNA, 122 bp, Homo sapiens
acactttcaagaaccatccaaagcgaacaacaaagagccgaggcagaagcgcagtagtgccgtttcctgcctccacggtcttgcggagcctcccggcgtgcgcccccacaatgtgcggccga

SEQ ID NO: 145633 - DNA, 122 bp, Homo sapiens
acatgaccacatcatcaaggaatggtaccccacattcatcgacgcccggggggacctgggcggctccgccttctccacgtgcttcctcttttccaccttcccccggactgacaagtgccatg

SEQ ID NO: 145634 - DNA, 122 bp, Homo sapiens
aatgttggcctgcttcctgcagccacctggagccaggaagtgatgctggcagggaaaccacgaatggtggtgtatcgagattgaaggagctcctgccactgtggagcaccaccccaaaccta

SEQ ID NO: 145635 - DNA, 122 bp, Homo sapiens
gggatgacaggcgtttctggactccctgtgatctcttccaggttcttggtcttcctcgctcgcctccctcccaccctccctagctgtccccccacctcagctcccttaccacggccctgcct

SEQ ID NO: 145636 - DNA, 122 bp, Homo sapiens
gtaggagggcagagtatatcacagggaatgggcttgatgactttgctgaaaattgcccttcgagtatgtgctgtcggtagggtctgggtgccagacattatttgcctctctggactttgact

SEQ ID NO: 145637 - DNA, 122 bp, Homo sapiens
gtttactcctcctggaggtgactgggcgagagggtctcactggactctggagccacatgccgaacaccggcttctttccccgcagggaggccgagtttcctgttcctcgaactctaaatctc

SEQ ID NO: 145638 - DNA, 122 bp, Homo sapiens
atctccaagtgtaagacattagtcaaaggcccggcgtggagcccacaggtccttagcgttcggaagacgattgccttcccagcccactccaaggaagaatcagtgctgtctggcagcagcct

SEQ ID NO: 145639 - DNA, 122 bp, Homo sapiens
ggctcagctctagatcatctgctcctggcacaggcagggtgactgaggtactcaaaggggcggccggcagagcctgagctcccacgttctcaaggctgaggcagacagcgcgagcggccagc

SEQ ID NO: 145640 - DNA, 122 bp, Homo sapiens
atttgagatttctattttatgttgaacttgctgctttttttcatattgaaaagatgacatcgccccaagagccaaaaataaatgggaattgaaaaaagctgcgagatgtgtgcttatttagg

SEQ ID NO: 145641 - DNA, 122 bp, Homo sapiens
cagccgcaggcagcgtctagaagaagcaaagcagcagcgcaaggcccggcaccgctcccacgggcccctgctacccaccatcgaggactcctcagaggaggaggagctgcgggaggaagagg

SEQ ID NO: 145642 - DNA, 122 bp, Homo sapiens
cctgttcgtgggaggagtgcctttttctggggtgcagtggcttcctctccatgctcacctcgcacactcccggctctgcctctgccctcgggccaccggtcccccagtcgtgccacgtccct

SEQ ID NO: 145643 - DNA, 122 bp, Homo sapiens
aggtctttggaaaaactcaaaggccagaagctctgtgcctacagggctgagtggacaaaccgcccctgctccggccctaagaaattacagagtaaggaagaggcaagggaggacactggaga

SEQ ID NO: 145644 - DNA, 122 bp, Homo sapiens
tttgtggaattatctgggcattgataactaaaagtcaagcgctccatgatgagagccacgcgggaaaaagaaaagatagtggaaccagaattttcaatccagggcagaacgcttctgagccg

SEQ ID NO: 145645 - DNA, 122 bp, Homo sapiens
tggttttaattttttctcttttttgctaggtgatatctaaattgttttacaaagtgaattcgcactgcttttttaatggggaaaaacttatttaaataagaagcagtgatgctaagcttggg

SEQ ID NO: 145646 - DNA, 122 bp, Homo sapiens
aagccctcagtcgccggccgggaggcgagccgatgccgagctgctccacgtccaccatgccgggcatgatctgcaagaacccagacctcgagtttgactcgctacagccctgcttctacccg

SEQ ID NO: 145647 - DNA, 122 bp, Homo sapiens
ggaagtaaggggatatgaccaggcctccctaacccaccagtttcttcccaggttgacaggcgctgccctcgatgtggtcatgaaggaatggcataccacaccagacagatgcgttcagccga

SEQ ID NO: 145648 - DNA, 122 bp, Homo sapiens
actgggaatttccagatagcaggagagctcgttttccatttcaatggcatgttgtcaccacggtactacaataacagtaaagagcgtttccataacagactaccaactaagacttccattcc

SEQ ID NO: 145649 - DNA, 122 bp, Homo sapiens
catcctcacctcccttctctcacctgccctgcagagatgggacgaggagctggccgccttcgccaaggcctacgcacggcagtgcgtgtggggccacaacaaggagcgcgggcgccgcggcg

SEQ ID NO: 145650 - DNA, 122 bp, Homo sapiens
tgaggtcacaactgggcctggtgcttgggtttgctaacttctggttcttcatgtgtatcacggcaaaactgatgctgtgtgcaggagtcggctcctgaggctttaaaggaaggagaaggatt

SEQ ID NO: 145651 - DNA, 122 bp, Homo sapiens
tgagcagagttcctgggggtgtttgtgctacctcagctctctgttcccactgcttggagccggagaggaggcagggatagaagtcatggattaaaggtctggagacagggcaggaagaacgg

SEQ ID NO: 145652 - DNA, 122 bp, Homo sapiens
tattttattcactgtcacatccccagcacctagcttatatcctactgggatataaaacctcgcatagtgcctggtacatagaagatactcaaaaaaatataagttgcatgagggaaggggta

SEQ ID NO: 145653 - DNA, 122 bp, Homo sapiens
atgggactgttttccttggtatgtttgtgttctcagagacacctgctcctcggctgggcacgacagccttagctcaccacctggcctttaaggttcaggcagtggacatatacccttaagta

SEQ ID NO: 145654 - DNA, 122 bp, Homo sapiens
gtgctcctgagagtcgcccatgccccctcacaaaccccagaaagccagatctggcagagccggcagcactatggaatatgtctgactccgaaagcctgaaactctccctgtctggggttgtt

SEQ ID NO: 145655 - DNA, 122 bp, Homo sapiens
ttcttccccatttccctcctgggagccaagaggtcaggagtcatggaactgtgggctgaccgtgggaagctgaggaggcctggcaccaccagggctggacttgactttgcttgcctagactg

SEQ ID NO: 145656 - DNA, 122 bp, Homo sapiens
gctctctgatagtgaccgacccgtcagcttcggttccacatcatcctcggcctcttcccgcgacagccatggttccttcggcagcagaatgaccttagtttcaaatagccacatgggcttgt

SEQ ID NO: 145657 - DNA, 122 bp, Homo sapiens
tctgttagcgggccttctgggggatgctacatcgccacctgctgtctggaggatcttctccgcttcccacccatttctatggattcttaggtttctggggggaggtctggaccgctcacctg

SEQ ID NO: 145658 - DNA, 122 bp, Homo sapiens
ggagctgttggcctatctgtgtctgtctgtctgtctgtctgtcatctgcacctgtctctccgagggaaagaaggcaggccccagggtctttccccaggatggccttgggtgagctcctgctg

SEQ ID NO: 145659 - DNA, 122 bp, Homo sapiens
gaggttgcagtgaaccaagatcccgccactgcactccaacgtggtgacagagcaagattccgtctcaaaaaaaaaaaattacactatcttaaaggttttagaagattaattttttaaaaaag

SEQ ID NO: 145660 - DNA, 122 bp, Homo sapiens
ccgggcagctccgtgtgtggcacagggagacctggcacagggagaccaggtacagggagacgaggcgcacggagcctcaaaacttctagagtgggccgggcgcggtggcgcatgcctgcaat

SEQ ID NO: 145661 - DNA, 122 bp, Homo sapiens
aatgaaacaaacaactaaacagcttgccgggcccctccaaggcccaccgaaccagcccctcgaggcagccaccgggaattttcataagctcttctgatgagcgggaggataagtcagtcagg

SEQ ID NO: 145662 - DNA, 122 bp, Homo sapiens
agacacatctcgcccagtgagcttagaacatctggaactccgaggtccaagctgaatgaccggtatttaggctctttcggctttttatagccattggggcccaaggatgctgtgataaccta

SEQ ID NO: 145663 - DNA, 122 bp, Homo sapiens
cagagtggacagtaagtgctctaagggaaggtggtcagatcccaagaaggacttcctgcccgcaacaggtaaggaaggagaaagaagcttgtgtgtaccgctcagtatcaggattcctccac

SEQ ID NO: 145664 - DNA, 122 bp, Homo sapiens
gcatagtgcggcgccaaccggtctgctgcgcgcccgccttgcgcccgcctgtcgcccgggcgccccgcaccgcacccagagccgcagcttctcgccgccgcctcccgcagggctggagcgcg

SEQ ID NO: 145665 - DNA, 122 bp, Homo sapiens
gcgtctctctcctagggctgcggctgctgctgcctggcgggcacaagccgggcggcggtgcgcggggggtgcgcttacataaccgctcgccgcgtcctgctttctcgagcgctcctgcaccg

SEQ ID NO: 145666 - DNA, 122 bp, Homo sapiens
tgcccgtcacctgcgtccccgtgcgtcacggcgttgccgcacaccattaacacatcaaaacggaaaaggaaatgtaagcagtgtttgccgtccaaagttcacatcaacaattccttattagg

SEQ ID NO: 145667 - DNA, 122 bp, Homo sapiens
agcccaccctgatgggctccaagaactcaggacaacggttccaggcagcagccaccaccccgccacacgatgaggaccagaggcccgcgtgccaggcaccatgaggtacagctagagggtgc

SEQ ID NO: 145668 - DNA, 122 bp, Homo sapiens
ggcctcgggccctcctgggcgctggcgggctcgctcctccataaataaaatacagggcgtcgactttcgcaagtgaccccgaggagcctttctaagcggactccacgtcagcccgacgaccg

SEQ ID NO: 145669 - DNA, 122 bp, Homo sapiens
caacaagtcctggttgggatagcttcacatccgcactgacatgagaaataatttatgccacggcctgaggatacaatgcctttttccggaggtcaggaatagttactagatgtccccacagg

SEQ ID NO: 145670 - DNA, 122 bp, Homo sapiens
taatacctgtgaaaactgactaatcagctgccaataatatctaatatttttcatcatgcacgaattaataatcatcatactctagaatcttgtctgtcactcactacatgaataagcaaata

SEQ ID NO: 145671 - DNA, 122 bp, Homo sapiens
tcctgcgactaaaataagcggcattagtgggagagagtgggacgtgtcgtcgggagtcggcggagtttccaaacccagggtcgcccagagttggggttttgacagggtgaagcggggggcat

SEQ ID NO: 145672 - DNA, 122 bp, Homo sapiens
ggtggccttggagatgctctttactggtgagcccatttctgcccaggaggccctgctccacgggctgcttagcaaggtggtgccagaggcggagctgcaggaggagaccatgcggatcgcta

SEQ ID NO: 145673 - DNA, 122 bp, Homo sapiens
tggctaaacaagcaaattcctaaacctcactgagtctcagcttcctcaagggcctaataacgcctaactcattgggctatcgagacaattgaattaattaacacaggcagagcacttaagac

SEQ ID NO: 145674 - DNA, 122 bp, Homo sapiens
attacaaacatttcagaggccattggtttgcttttcatttcccttttggtattcccctgacggtttaaagaagaatgctataaaaggcatcttttaaaacacatttttcctttccaattggc

SEQ ID NO: 145675 - DNA, 122 bp, Homo sapiens
gccccgcacaccggacctcaggattccatcctcccagaaccatggccacagaataaggtccgccaagatggataccgaacgcgcctcaaacacctggggggcggacgtgtgaggagctggcc

SEQ ID NO: 145676 - DNA, 122 bp, Homo sapiens
ccggccacccttgctaatcagcctgccccaagatttccgccaggtttcctcagtcatagacgtggacctactgcctgagacccaccgacgggtgcggctgcacaagcatggttcagaccgcc

SEQ ID NO: 145677 - DNA, 122 bp, Homo sapiens
gtgctctctctgtccctgccacacctgttttcctgtctctgccctgacccctagctgctgcgcacttctgaggatgtagccaagatgcaggaggacctggagagtatgcaccccctgctgga

SEQ ID NO: 145678 - DNA, 122 bp, Homo sapiens
aaaagtttctacgaggcgacgtctctcagtgtgggaggtgtgcggcactgacttggggatcggtcagagctgctttcagacaaatggcccgtccaggacaaacctcccgcatctctagctgt

SEQ ID NO: 145679 - DNA, 122 bp, Homo sapiens
gcggcgcagttgcgaaactgagtaagtattaactttacttagcggcggcgatccgggctgcgccggggaccccgcccgtcccgcctgcagcctcggagctgccctccgcccggttgcccctc

SEQ ID NO: 145680 - DNA, 122 bp, Homo sapiens
tgattcccagcctgggaaactcttctccctgcacccccttaaccacatgccacatcatcccgactgagggataagtctcttggctccacatcagctgagtcattcttggtgttttctcaaga

SEQ ID NO: 145681 - DNA, 122 bp, Homo sapiens
taaaaatggttggctccgggttccaccactggagtcactttctgcccaacttcaaaatggcgcccactagcttcaccaaaaggatcgaacttcccagcaccctctctggcccgtaacgtcag

SEQ ID NO: 145682 - DNA, 122 bp, Homo sapiens
ctagaggaaagtcaggaacctaagttctgcaaccccaactctgccactcaccagctgtttcgtgactttgaataaatcctttctttctggccctaagtgtttccatctttaaaaggagaaga

SEQ ID NO: 145683 - DNA, 122 bp, Homo sapiens
tagcttgggaagacaggcttattaaacaaatttcttgggttgcaaatcattagaagcaatcgcatgtcatgttcatttgcttaacccgaaaggtatccatttggatgtttaaagaaactatg

SEQ ID NO: 145684 - DNA, 122 bp, Homo sapiens
ggactgcagggtttcaggtgctcacatcagggctacagaatcatcctcctttctgttaaccgcgcacagggagtcgagtgctcctttgtgccatcacctcttctcgaagctccaggcgcaga

SEQ ID NO: 145685 - DNA, 122 bp, Homo sapiens
ggagcactgagccgttatttggtgggatgcccttcaacgtgggagcactgagccgttattcggtgggatacccttcaacgtgggagcactaagccgttattcagtgggatgcccttcaacgt

SEQ ID NO: 145686 - DNA, 122 bp, Homo sapiens
caaccagtttctgtctctgcttgttctgcagcccgctgaactacatttcccaggaggcgtcggggctgcgccgtacaacttccggctgtaaagatggcggcttcctagtgagtcggcggctg

SEQ ID NO: 145687 - DNA, 122 bp, Homo sapiens
ccggcctcgggacggttccgtggaagcggccgctttgcgggtagtgggactgtggccttgcgctatgccctgtgcttccgtgggacgtgtctaggaacgggtgggctttctgcgggaggcgg

SEQ ID NO: 145688 - DNA, 122 bp, Homo sapiens
atagtacctctgagacgcctgcctccggtgctccctcccgccgtgcctccctccctcgctcggtcctccgtagctcctactggcggaaatctcagcaggccctttgttttctgttccccaca

SEQ ID NO: 145689 - DNA, 122 bp, Homo sapiens
tgaaaaaccgtcacaggaatcatcctcagggccttcgaggtcacaagcgtgacggggacgcgcaggtgctgatgtgagatggactctgtatgtgaatgaggctaaaagactcactttcctaa

SEQ ID NO: 145690 - DNA, 122 bp, Homo sapiens
ccgtgcagaaaggggccacggacagtggctgtccacccaggatgggcccaagaaaggagtcgatgtcctgaaacagtccctgcccctttcctgagtgttgggggatggtgggaacgacgacc

SEQ ID NO: 145691 - DNA, 122 bp, Homo sapiens
tttattacctgttccttaacaaacattgaattcaacatgaaaatgattatgggaaacattcgggtatacagtccctgactcttaaggactcaggtaaatacttagggtatttcatggcccta

SEQ ID NO: 145692 - DNA, 122 bp, Homo sapiens
tatagaagaaatgttatgagaagggaaaataagagatgctccacttatcaccattcatctcggggcaggtccctttgtacaaggtcatcctcaggccataccacatacaaaagagttatacc

SEQ ID NO: 145693 - DNA, 122 bp, Homo sapiens
atactcactttccttagctctctgtaataatgaaacagggctgctaaagaaaacacagagcggtggtgaagagaaaaccccagtcaaccaggccactgcctgctgaccatgagtcagcaggt

SEQ ID NO: 145694 - DNA, 122 bp, Homo sapiens
tttcataaggggtgcctcctgttccaaacacaggacccaaacccctgattttgggaattccggctctttatatttctcatgctgctttttaaaatttgtaaccaaagtttccaaatgaacct

SEQ ID NO: 145695 - DNA, 122 bp, Homo sapiens
gacaaatattgtcacaggaggtcccttagcagagccaaagtcatggggactggacggagacgggtggcagccagaggctggggcgggcaatgggctgtttcacggggacagagcttcagttc

SEQ ID NO: 145696 - DNA, 122 bp, Homo sapiens
cctgctttgggatggtgactcacccagcaggccctgggagaggcaatttatcagccccaacgaagacaggccaggcctcgggctccagaaggggcagaggaggttcttctgatgcagtggcc

SEQ ID NO: 145697 - DNA, 122 bp, Homo sapiens
ccgacttatgaaatggacatatatggtatctcatttgaaacacaaaaataacttgcatttcgacttacagcaaactagggataatctagggaatcccagctctcaaggaccaaagcccaggt

SEQ ID NO: 145698 - DNA, 122 bp, Homo sapiens
tggccgtcaggagagccttctgggcagtggctctaacagaaccatgtccaggacttcatccgtgggacaaaaagagtgaatcttcagtaagtctgtgtgcagagaagcctgagatgatttac

SEQ ID NO: 145699 - DNA, 122 bp, Homo sapiens
ttatcccttcccgaacaaaatttctgttatttgggcaaatccttaaaccatggtttaaaccgtaatggttacaaaccacaaatgcatccatccaaagactgtgaaaccattttcatccggtc

SEQ ID NO: 145700 - DNA, 122 bp, Homo sapiens
ggcgtggggtctgagcctccatccgccgactgacaggggccccgcgctctccctctctcacgcacacctggccacacacatcgctcaggcggcttgtcgttattttttctttctttcgccaa

SEQ ID NO: 145701 - DNA, 122 bp, Homo sapiens
tttaagtctcaggaggtctcaataaacttggtatataaatgttcatgatttgaatgtttgcgacagtcctggaacccgtggatggtctcatctgcatgtacaggtgagaaaaaggcctggag

SEQ ID NO: 145702 - DNA, 122 bp, Homo sapiens
cagctcgcggcctttcgggggttctcctggcttgggccatccaggcttggctaggattgccggcctggggttgaggcgctcgcagtggtctcttccgggccggggtggatccgggcctctcc

SEQ ID NO: 145703 - DNA, 122 bp, Homo sapiens
gcgggcgagaaccagccgcgcatagtgctgaagagctctagcttggtgcccagctgggaccggccggtgctgcccggagcgccgggctgcgagctggcgggcggcgtggcgcgggcgcaccc

SEQ ID NO: 145704 - DNA, 122 bp, Homo sapiens
cttgaatgctattaacttaaatagccattgaggagttagaagatgaattgttcatgaagtcggtgttacataaaagtaggtgatatgtaagttttctgataacaaggttctaatagtgttta

SEQ ID NO: 145705 - DNA, 122 bp, Homo sapiens
ctcacatggcaagaaaatgaaagtatcctctgaccagtggcaagaaagaacggcagccctcgctctagaggcctttgaggaactgaattctgccaagagccacacgagttaacttagaagca

SEQ ID NO: 145706 - DNA, 122 bp, Homo sapiens
agtcaactagcaccaccttatggatgatttggggacattgctgcttccctgctaggctttcgtaaaatgtagtcaactgatttaaaataatgggaatgttgatggtgatgacaatattaatg

SEQ ID NO: 145707 - DNA, 122 bp, Homo sapiens
agcgccccctggtggttctgagctcccccttgtgtcctgagtgccacctcatgtcctgagcgacgtctggtgattctgagcagctcctgatgtcctgagcgccccctggtggttgctgagca

SEQ ID NO: 145708 - DNA, 122 bp, Homo sapiens
gcattccagggcaagtgctgcagctgcatccctcacattcctgtacccacctaggggctccgggtggaaggaaacctgggtccccttgtacctacaatggggggatgtcccccagactgtgg

SEQ ID NO: 145709 - DNA, 122 bp, Homo sapiens
tatgttgttttgaatcttcactaccaaaaattcccagagaggatagtgcttgcacaaacacgttcactgtaaaatgtacttttcatagcaaacacctgaaagtaactgaaaggtctcagtgc

SEQ ID NO: 145710 - DNA, 122 bp, Homo sapiens
tcatgaggaccgaaacgctccttgtgcgctgtagctctgaggtggctgtcatggcccggacggcgggggaggcgaggatggttgtggggaggcgaggatggttgtggggaggagaggggagc

SEQ ID NO: 145711 - DNA, 122 bp, Homo sapiens
ccagctgcaggcacctcgcccaacacctccacctcgcgcccacgcaagtccacagcggtccggcggtctgtcacccagccactgactgcatcgcacacagccagctcaccccgacgactcgc

SEQ ID NO: 145712 - DNA, 122 bp, Homo sapiens
ggagcaatcctctggggttaggagtcaattattaggtgcctacaaaacactctgttatttcgactaaacatgccttgctgtcaaggagaagaaagaactgtgcactgaaaaccagaacagcc

SEQ ID NO: 145713 - DNA, 122 bp, Homo sapiens
aatcatgtttttcactgtggggcttttacacatttcctgccggacagctctagagtcagacggcaccctttaccagattaattgatcagattagtaccaacgccatgctttgttttgtgtcc

SEQ ID NO: 145714 - DNA, 122 bp, Homo sapiens
acacctgttgggatcttttccttccatgtcgcagctatctcttggcaagccccctggctccgtgttacttctttatcccacttggtgattaggaaagtttgagattgcctgtaacccaaagc

SEQ ID NO: 145715 - DNA, 122 bp, Homo sapiens
ctcagtcgccgttcgtgccctggtgtttgtcttgcagacagaggctccgtggtgaaggcgcgcgtgctgacctgtgtggaggggatgaacctgcccttgttggaacaagccatccgggagca

SEQ ID NO: 145716 - DNA, 122 bp, Homo sapiens
cactggcattcctgagggaggggccgagcgcagctgcccgcctggccggaggctcgcttgcgccctctggtgtccaagtacgagaggccacgtggacttgcgcaccagcagccggtctgttc

SEQ ID NO: 145717 - DNA, 122 bp, Homo sapiens
ccaccccacactcacgaagcgggaaagccgtggttcctgtggtgaggctgttgagagccacgccatacggggggacgctctggttcaggtacaacagcgagttgacggcaaacaccaccacc

SEQ ID NO: 145718 - DNA, 122 bp, Homo sapiens
agggtgcggatccccttcctgagcctgagctatcatacgtcccaccaggggtattgtgaacgtagcctcctccacgaacctgcttacagactccaagagtctgcaactggtactcgagccca

SEQ ID NO: 145719 - DNA, 122 bp, Homo sapiens
cttgaaatgaagaagcaagacatgcagatatctgggaaaagagcattccaggaagaggaacgcaaaggcccaaacagaacacatgaaacagggaaactggctgggaagctactgcaatagtc

SEQ ID NO: 145720 - DNA, 122 bp, Homo sapiens
ccccagtttcggccctggcacctggggggaactcaggtgagaggggtcctggggtggagacggaggcagattggggcgtctgcctgtacattcactctccaatattctccaggcaatccgat

SEQ ID NO: 145721 - DNA, 122 bp, Homo sapiens
cagccgcaaaagcaggagtgagcaccgaaccccgcgcttctacctaacaggtgcatgcgccgatctggtgagtggacccagctcacaaggtatgtctggattcatccagccaggtgccttcc

SEQ ID NO: 145722 - DNA, 122 bp, Homo sapiens
gggaataagatagtacctatttcatagtataattgcaaagatatgttaacattcagaaaacgcttagaagagtgccaaacatgataaacgcttaatacatgttattttttttaatgtgttga

SEQ ID NO: 145723 - DNA, 122 bp, Homo sapiens
ggtcgaaataattattcttgacttacgaaatcattctttttattcctgaaggctaatgtgcgagcagcgccgggccgggctgtgctaatggcggacagcgtgggcctgcggagggcgcgcag

SEQ ID NO: 145724 - DNA, 122 bp, Homo sapiens
gtcagtgcaggatggattcgtcgctaccggagtgccgccatattggtaaaggcattagggcgaaggtggaacggaacttcctgttctcgcgggatctaaaggcgggactgccacgtccaagc

SEQ ID NO: 145725 - DNA, 122 bp, Homo sapiens
cctgcttagaggggcaatagccattttgcaaacacgaggaagaaattcacaagccaaggacggcagaaagaacccaagaatccatggcatcagagacctgcttcttactggaaaaaaataaa

SEQ ID NO: 145726 - DNA, 122 bp, Homo sapiens
gtcccttctgtgtgtgggtcctagagctcgcggtctggtctggtctggtccccagactgacgcctggtcggtccccctcttgtcttacagcggcttctacgctccggcactctgagttcatc

SEQ ID NO: 145727 - DNA, 122 bp, Homo sapiens
ggtggaagctgggccctgttccctgctcagggctgagtctggtagccagtgggcctctcccgggcttctcctgccccctgggctgccatgtggcccagacctggcagccacagcttttgcac

SEQ ID NO: 145728 - DNA, 122 bp, Homo sapiens
gcccaggatagctctaaagccccgttcttctaacatgaaaaaaatatccttcttttcaggcggctgggagtggactctgggctatttataatctgctgctgccgagctaaggcatttctgca

SEQ ID NO: 145729 - DNA, 122 bp, Homo sapiens
ggaagaaatattaagccatcgttcttgatagagaggaagagagagacagaaacacagagacggagagatacaaagccgaggaaagagacaaaaagggggagagaaagaaatttagagaaaaa

SEQ ID NO: 145730 - DNA, 122 bp, Homo sapiens
ccctccccgtgcgcgttttctccttccccatcctgctgtgaggtcagaatcctgtgcttacgacacctcggtctgttgccatggaaacaggggcggattaaggctggagcgtggagcgcagg

SEQ ID NO: 145731 - DNA, 122 bp, Homo sapiens
ccaacgcatcctatgcctcagctggatggacaacgccgcggaggagccggttgactattacgccaccgcgctcaagagccgtgcctacagtgtggaagacttccaacctgagaacctggagt

SEQ ID NO: 145732 - DNA, 122 bp, Homo sapiens
gaggagcaaagacacataagaccccttgctcagcacctgatgggtatctcagtttgctgtcgtactgggaccacaagcagtaaataggagaacaggattggtgattattgtgaggcaggtgc

SEQ ID NO: 145733 - DNA, 122 bp, Homo sapiens
tacccagagtaaaagctgaagtccttacaatgacctttagaactctacaggatctgaagccgggcatggtggatcacctgtaaccccagcactttgggaggctgaggcgggcggattgcttg

SEQ ID NO: 145734 - DNA, 122 bp, Homo sapiens
caagtgcccaggtgatccttatcgtgggcaagtttggaaccgcaggtaccccgagaatcccgcgctgggcgctcaggcgagagggctccgggctcccgtccacgcccacccggggcgttcta

SEQ ID NO: 145735 - DNA, 122 bp, Homo sapiens
atgctttatctgagtctgagagcgggccaagggggaggggagggagggggcaggcgctcgcggccctgggacacaccaccccggcagacactgcaccgcgcggcgcacaggcgggccgcaga

SEQ ID NO: 145736 - DNA, 122 bp, Homo sapiens
catgccagaggcataaggcacctcagatgccatgggactcttgattccagatgctgaggacgaggtacaggaagggaccgcgggatcaacggagaaaaaccgaccgaagacaacggcccgga

SEQ ID NO: 145737 - DNA, 122 bp, Homo sapiens
gttacggctcacgcttccttccacagaaacttcaattcccagaggcaggggcggtagttacgcagtggaggctacggcggttgcgtcttacgtcatcgaactgcggccatttcgaacccgca

SEQ ID NO: 145738 - DNA, 122 bp, Homo sapiens
gaaaagcacattcttatgttaattggttgatattatataatatgtggtagtacataaaagcggataaaattccttgaagggggtactggatttagaccatcatctaaattattgagttatta

SEQ ID NO: 145739 - DNA, 122 bp, Homo sapiens
gggggtggcgctggtggcttggcacaaagagggctttctgctcttccgcttgcgcgtgcccggggagtagcctgtggaggacagggtgtcctgctggctggaccaggacatggcatcctcct

SEQ ID NO: 145740 - DNA, 122 bp, Homo sapiens
tcagaagaatgcagctctgggaaacagggtcccacagggtaactattttttggttatagtcgagctccaacaaattttatttaggaagcctttatagatgccacacaaacacacccattttt

SEQ ID NO: 145741 - DNA, 122 bp, Homo sapiens
ggctccagcaggagaatggagggtggacggccggccgcaaaggcggtggaggtgttggcccgccccttccctcctgataacaccgacgtgcgtgtggggtccacggaacgccccaccaagcc

SEQ ID NO: 145742 - DNA, 122 bp, Homo sapiens
aggagagaggaagacagggcttaagatcgaaagccagagcgtagagaagtgttaagtctccgttctctgcctcagccgggagggaaggatgaagcctgaggctctgggaaacaggaaatcac

SEQ ID NO: 145743 - DNA, 122 bp, Homo sapiens
cgaatgcccatagtaagggtaaaagcactgtcttgtggaaatccttaacgttgagtcacacgcaagttcatttatttgttgtgaaatgtatttcctactggaggtggaggatcaccagcaaa

SEQ ID NO: 145744 - DNA, 122 bp, Homo sapiens
cctcagggacctccggcttggggaagttcctggtcttgagctccaaggagattcctaagtcgtttttctatcctcctttcttgtctcctggggaatgcagttactggtataaacccttcgtc

SEQ ID NO: 145745 - DNA, 122 bp, Homo sapiens
tgcgtcctggcgctggccaccgccgccgggtgggcgtagggggctgcgagcaggaggaggcgcggcgctcagctgccggcaacttgtgggcacggccgcgcgccggctgtcctggcgcagct

SEQ ID NO: 145746 - DNA, 122 bp, Homo sapiens
cccctttctgttcattcatttattggataggagttggcaagcttattctgtgctaggcaccgcttaggcattggaggtggtgtttgctaatcaggacaggcaagatcctagccttagtgggg

SEQ ID NO: 145747 - DNA, 122 bp, Homo sapiens
tctcgccaggccttagctgcctccccgcggggcagggctcaggacctgcagcccgccatgcgtgagcctcccctgccccacgctgtcggctcctgcaaggcccgagcctccccgacgagcgt

SEQ ID NO: 145748 - DNA, 122 bp, Homo sapiens
gaatgtcagagttgagaaactaacactaaaaagttgctttgggcccggtgtggtggctcacgcctttaatcccagcactttggaaggctgaggcaggtgaatcacctgaggtcaggagttcg

SEQ ID NO: 145749 - DNA, 122 bp, Homo sapiens
cctggcgatccgtggtgtgccgctactgccggtgcagccgccaaaccggtgcctcggtgacgaccgtgtccctgccgtcttcctcgagctccccggggcttgacccccggggccctcggcag

SEQ ID NO: 145750 - DNA, 122 bp, Homo sapiens
gtgtccccgcctgcatcctcagcctccttccaaaccagaccagttctctaggggcgtcgacgtgtgaaactgattttaaagaaaacaggcagtggcctttctctcggccccacgtggcccag

SEQ ID NO: 145751 - DNA, 122 bp, Homo sapiens
gtgactatcttggcaaaaagtgtgccacatatatcttgaagcaggcctgcaaaaacaaaacgaaacaccccccaaaatttctattttcctttcattgtttcggcttccctgggagctaggta

SEQ ID NO: 145752 - DNA, 122 bp, Homo sapiens
ccgccgagccgcgccggccccgccgccccggccgcgctccgcgcacgccgcccgcccgaacgcccggcccgagggcccaaaacacgttcaaaatttttttaattaaaaaaaaaatttttttt

SEQ ID NO: 145753 - DNA, 122 bp, Homo sapiens
attctaatgcccagacacaaaattaacccacaattctatagaagtgttaggtattatgttcgacacaccaagtgatattcattgtctacctgagctagaatacaagtagttggcgtcttcag

SEQ ID NO: 145754 - DNA, 122 bp, Homo sapiens
aggagagggagacttggcccaaataaagtgactcaggcaccctcaggaactctcggcgcccggggccccttcgggcagccttcgacccccatgcgtctttcgggtccccagggacgcgggta

SEQ ID NO: 145755 - DNA, 122 bp, Homo sapiens
tatgattaatgaaatgaaatttccttaacagaaaatgaaattaatatgaagtccaaataacgattgcataaatgactaattatgggtgaaaagcaagaaacaatggtgacaatgtctcaaat

SEQ ID NO: 145756 - DNA, 122 bp, Homo sapiens
acacacacacaccccaagccccacacacatgcacacacacacacacacccgaagcagccacgggagggacggccccacactcctgactcccttgtccacgtgcaagggcacctgtgagtgca

SEQ ID NO: 145757 - DNA, 122 bp, Homo sapiens
tcacgtgtcccaatcccgcagttccaaagcccttggggaccctactgtcagggtcgtgcacgaggaggtgaaggtcaggtgagccaatcgcctcgaagggtcttgcctcattcgggacagac

SEQ ID NO: 145758 - DNA, 122 bp, Homo sapiens
cctacaaagccctgccctagactggcggcaaattcaacgcccagaggcaggaacaggtgtcggccaatcagaagccggaacaggtgtcggccaatcagaagccaggcttgaaccgctcgccc

SEQ ID NO: 145759 - DNA, 122 bp, Homo sapiens
ggccgccgcgagccgggccgggaggtgggcaggcggggatccagtggcagcggggaggcgcggggggagcggggggagcgggggcggcacccgctgctggcgcagccagccgggcccgggcg

SEQ ID NO: 145760 - DNA, 122 bp, Homo sapiens
aactgggttcccttcattcaaggaactgaccacctagttgggaagtcaggaacagatatgcgtggacataacaccaccaaaaagcaggcatccatgtcaggcccaaggagatgcattaaaat

SEQ ID NO: 145761 - DNA, 122 bp, Homo sapiens
tgggggagataatggagaataaattccagcaaaatggggggttttattgggcacttctttcgatctatgtgtttcagagtctcttaatgaccatgaagtgaagttacatgccccttctgact

SEQ ID NO: 145762 - DNA, 122 bp, Homo sapiens
cgccaagtgcagttgactgtctgggtttacaaaataaacccagaagcagcctgacgtctccgctcgtttctagggaggaggtcgcggggagggaagtcgggaacgtttcctctccacaggga

SEQ ID NO: 145763 - DNA, 122 bp, Homo sapiens
ctataattgaaaagaaagtttcggagtgtttcgctgtgaccccagctctgtggccctgggcgggctgccgtactgctgcctccgcttcctcactccgaaggcaagaaaggggagtggcgacg

SEQ ID NO: 145764 - DNA, 122 bp, Homo sapiens
cccatcactgtcccctggggagacgggcccccccatcagtgtcccctggggagacgggcacgcctcatcactgtcccctggggtgacgggccccctcatcactgtcccctggggagatgggc

SEQ ID NO: 145765 - DNA, 122 bp, Homo sapiens
acattaattctcggtctgaggctgattttcaaaccgtttgcaaagcgcggctccattgttcgccaggcgcgcagaccccgccccctgctttgtgtgcggcgcgcggattggccgacgcgcgc

SEQ ID NO: 145766 - DNA, 122 bp, Homo sapiens
gggcgcactcacatttgcctttggggtcccggcacagcatctcctcattgctggtgaactcgatcacctccaggatctccccgcgccggatcccgaggtgcttgccacccccgcgacgtgtc

SEQ ID NO: 145767 - DNA, 122 bp, Homo sapiens
cagctccgcgccccgggcctcacctctggcctcctttcgcctccctgcacctggccttttcgcttgaccgttcagaaccttcggcttcgttccctgcagccggtattctccgagcccccctg

SEQ ID NO: 145768 - DNA, 122 bp, Homo sapiens
gcacagaaggccgcggcacggctgcaggtaaggtgggcacatggagatggggccggaggccgcccacaggcacagaaggccgtgccacggctgcacgtaagctgggcacatggagatggggc

SEQ ID NO: 145769 - DNA, 122 bp, Homo sapiens
ggctgtgacggctgagcggtggcaggagctgagagcgagtgagctagttagcggtctgcacgcccgggagtcagcactgggatatgacagcatgtaaattaccctagaggggacggcggaga

SEQ ID NO: 145770 - DNA, 122 bp, Homo sapiens
gtttgtgaacacagagaaacactaagagatcaaccgctcaggaacagagagaaggaaaaccgcagaaacagaactagctagacatgcaagacagagaggtgagggggcacaggcacagccca

SEQ ID NO: 145771 - DNA, 122 bp, Homo sapiens
caaactcctggcctcaggcgatcttcccgtctcagcttccccaagtgctgggattacaggcgtgagctaccacgcccggccacttttgcaattttactgcaatgtgtttcgaacgaatgggg

SEQ ID NO: 145772 - DNA, 122 bp, Homo sapiens
gtaaaaaaaaaaatacggaaatttgcacaaatcatgtacacagcttgaaaggaaagtgtgcgtgttcccacaacccagatcaacaaatagaacattaggagtgcaaaaggcttattggaata

SEQ ID NO: 145773 - DNA, 122 bp, Homo sapiens
ggcaggagtccatgggccatgggggtgaggagagagcggctcgctgccttgagaagctcccgcttctgcagtaaggtggcttttaagccagagattaccacgcgctgccgcggagggagagg

SEQ ID NO: 145774 - DNA, 122 bp, Homo sapiens
ggtatctaatttagggacacagcctcgtgacgtaaaccctgcagaagcacagaggcgtggcgcacgtgagaattcagggcagcgggctgcggcagagcgggggaggaggctggaagcgtccc

SEQ ID NO: 145775 - DNA, 122 bp, Homo sapiens
ggaagcaaagaacaccctgggcgcccggctcgccccgggaccctcggatgaccccaggtgcgacccccagctggagggagctggccctccgcccctagccatagcctcccagccccgtgcag

SEQ ID NO: 145776 - DNA, 122 bp, Homo sapiens
gcactgtcgcctaggctcactgcaacctctgcctcctgggttcaagtgattctcctgcctcggctacccaagtatctggcattacaggtgccctccaccatgcccagctaatctttgtattt

SEQ ID NO: 145777 - DNA, 122 bp, Homo sapiens
catggcacatgcaaacagcccaccccaagagaagaatcagggtagaaggcacacaacacccgggaagtatgccaacgcataaaacccgaagtcaaaggtcaaacagtgcacttgatctcgca

SEQ ID NO: 145778 - DNA, 122 bp, Homo sapiens
tcaaatttcctacatacggtttggcgcagttgcagattcatggagaacaccatcttacctcgccactgttggacaaaagaagattaaagtggatgcaccgtcttcctgcccctaagtagcta

SEQ ID NO: 145779 - DNA, 122 bp, Homo sapiens
ttttgttgtgatgcagcggggggagggggctgggcggggggggcgcagggttcctggctgcgtggggaccccctccagctcatgctccccataggatcccccagagaagccagcgagctggg

SEQ ID NO: 145780 - DNA, 122 bp, Homo sapiens
tctggtactctgaactacaaagttcatgcttatagcttactggctattttcaatccatttcggggtgggaaaccttggctatacaatgaagataaagccctattaacaatgccaacctggat

SEQ ID NO: 145781 - DNA, 122 bp, Homo sapiens
cgctcttccgaggatatttgggctgcctccggagtcgcagtgtcttgggctgccagaaggcgggtgacgcgcggatctttttttgggggggctgttgtgtggatctttttttgtgtgtgtgt

SEQ ID NO: 145782 - DNA, 122 bp, Homo sapiens
cgggtgggcctctgacgcagagaaagacccagatccagctacctcgggggcctcctgctgcgcctcgcctttggggcaggcctgagggcaacgcttactgcggagcaactgtgttctacagt

SEQ ID NO: 145783 - DNA, 122 bp, Homo sapiens
ggctgcggtcctgcgggtttgtggcctgagacgtctagcccactccctggaggggccggccgcccagcctctttcgctctcttcctctaccccggctcgcgctccaggcgcttagtgaggcg

SEQ ID NO: 145784 - DNA, 122 bp, Homo sapiens
cgctcgctctggcgtgacgcctttgcactgacctctgcagcttcctcttcccaagcacaccgcagtcacatgggcaccccggctcggtgccacggccgctaagctctccccacggccagccg

SEQ ID NO: 145785 - DNA, 122 bp, Homo sapiens
tggggctccttggaatgttctatgtgaaatttatgcagagggagcaggaatatatcagtacggcaaacacctgagtacatggaaactctcatgtctctctgtatagtaaggctcctgtggaa

SEQ ID NO: 145786 - DNA, 122 bp, Homo sapiens
tgttagcctgattctggtttcttcacaggtgaaatctgttttgttgttctcctttgaaaacgtgtaagatcatttcttgatcccttatcaaaaaaaacaacaatgcgtctcgacatgggtgt

SEQ ID NO: 145787 - DNA, 122 bp, Homo sapiens
gtgatctgtgcagggatgcctttctgaccagaacctttgggaaaactgcacagtgagagacggaagaattgccaggatcagccttaccatgctttacaatctgtgtccaggagtggcactgc

SEQ ID NO: 145788 - DNA, 122 bp, Homo sapiens
atgcggaccagctggagttccgggtaggcgtgggcttggcgggacccgcactcggagtggcgggctggccctgccggcccgggcaatgaggagcttagcacccgggccagcggctgcggagg

SEQ ID NO: 145789 - DNA, 122 bp, Homo sapiens
tgttcctctggcctgcagtgccagatggggttgtttgtgtgctgaggccctgagggtcttcggggtcctcctgtggtcatcgagagagctactgtgaagacctctcagagtgtgtccagggc

SEQ ID NO: 145790 - DNA, 122 bp, Homo sapiens
cggagagaaaacttaaaatgtttccacattatcaagcccccttcagaagtactgtggtctcggcccctcctttgaacagatgtccgctcgccacagtccaatcaggtttaaagcaagagtat

SEQ ID NO: 145791 - DNA, 122 bp, Homo sapiens
ggaacagccagggccacaaaattccctgttcaaatccagcaaaagagagcaccttttggccgggcacagtggctcacacctgtaatccccaacactttgggaggccaaggtggatggatcgc

SEQ ID NO: 145792 - DNA, 122 bp, Homo sapiens
accgaggagaacattgtatgcccagggttttgctcaggaaagctagcagcccgaaagcggcgcgttttcttcagcagcgggtcccgcacgcgagagtgctgccagcacgctttctgcctcct

SEQ ID NO: 145793 - DNA, 122 bp, Homo sapiens
gtgtggggatggggtccccctctttgtgagggctggagcatggcacggcatggattaacacggcagaggaacaaaggtgtgctctgagcttcttcatatttcaccttcaccctcacctgtgt

SEQ ID NO: 145794 - DNA, 122 bp, Homo sapiens
gccaggggctcctttcttccacctgcccccaagcatagaatagaggctatatctcaggcccggcaggctgggaacatggagccccagctcatttgtaggaaggaggctccacactgggagag

SEQ ID NO: 145795 - DNA, 122 bp, Homo sapiens
gcctcagcgcggccgccgccatcccgagtacgcggggaaagcactgccgggagcggcgggcgccgttacggggcctaagatctgcctctgtgcagcaagaaggactcttcaccttctgggtt

SEQ ID NO: 145796 - DNA, 122 bp, Homo sapiens
aggggcggcccgaggcccgcgaggccagctgccgcctccggccccggtcgcgtggtctcccggcccccacgggcgcgcgaacccaccttcttgtagtgcttgcccagccagacccgcaccga

SEQ ID NO: 145797 - DNA, 122 bp, Homo sapiens
gaggagacggatccgggcatagacccgccaggctgctgtgggttcatccactggaggagacggatccgggcatagacccgccaggctgctgtgggttcagccactggaggagacggatccgg

SEQ ID NO: 145798 - DNA, 122 bp, Homo sapiens
cagctgaggcccggtgatgagcagctgggtgactgtaaggtacgcgagggctctcagcctcggtttccccatgtggagaggcccagggcagtgccccacagccaccgccacccctcctagaa

SEQ ID NO: 145799 - DNA, 122 bp, Homo sapiens
aacctcaggtaagattgatagtccattttagggtgctgcttgcctcctcttccatctctccgcctttggagagcagatacctgtccatgcttcttcaaagggtggaatgagatcccatccat

SEQ ID NO: 145800 - DNA, 122 bp, Homo sapiens
ccacgataactgaaaacactttcctgagcgtctcggggctgaggaagagggaggattacacgcagcccactggctttgcaacctcgtctgtagtggtggagtgagtgcaggtccagaaacaa

SEQ ID NO: 145801 - DNA, 122 bp, Homo sapiens
gatttgtagcagttcctcgcgtattttagtagttttatttgtggcaaagatctcctcccccgggtggcctctgccctccggcgctgggaagtccgggcggcgaggcagcctctcccggggcg

SEQ ID NO: 145802 - DNA, 122 bp, Homo sapiens
gagttctgactaggggaagtggggggctgtgcaatgtgtgtgcggaacaccgccgtgccgcgcactgaaatgggaagtcatgtgttatgcgggtttcacccccatttaaaaatcttcagaag

SEQ ID NO: 145803 - DNA, 122 bp, Homo sapiens
tggggtctggcctcttgatgcaccccggctcctgatgcaccccagcctcctgatgcaccccggctcctgattcaccccaggtcctgacacacccagctcctgacacacccagcctcctaatg

SEQ ID NO: 145804 - DNA, 122 bp, Homo sapiens
actgccctgatctcaaggataggggactcatgacattggtttcagctgtagcgagaaagacggaagtacatacagctttcaggaacagctgacctcgggggaaaccaccttactggtcagta

SEQ ID NO: 145805 - DNA, 122 bp, Homo sapiens
gcggccagggtctggacctgggcggcggccccgggcggcggggctaaagggtgtgggcaccggcagagcttcgcaggctgcatccggctcggtgctgctgccgtcgccgcccctgccgccgc

SEQ ID NO: 145806 - DNA, 122 bp, Homo sapiens
gcaaagtccaggcccgcggcgcgcaggtcagggccgctgctccgggcggacggggacgcgcggtcacaggcaactcctgtcctaagggcaagtgagacaggatcagggctggtatgaaggca

SEQ ID NO: 145807 - DNA, 122 bp, Homo sapiens
gtagcagtcagagggctgagggtaggttcccaagaaccatggcttagaggtgggagcttacgcttcatgtgaagatgaattgggggatcaaatgaacccccctccacccaaggcttaacccg

SEQ ID NO: 145808 - DNA, 122 bp, Homo sapiens
acatccacaccctgctagcgtccgtgctgataaggaaccaggatgaagcagcatgaaccacgaggcaagcccgtgcaccacagtcaaacacacacacacacaagcaaaccatttgaggctgg

SEQ ID NO: 145809 - DNA, 122 bp, Homo sapiens
acagatacagcaaaatgtcacagaaacaaatctttcaagagaatccgagatgctggaatgcgtatttcaccagaatttactccgagagcattaaaaaaaaaaagttaaggctcagatactga

SEQ ID NO: 145810 - DNA, 122 bp, Homo sapiens
gagcaggacccgtcgccatgggcctcatggtctgtggacagcggaagggcgccggggctgcgtttcccgcgcaggtgaagcaccgtcagggcacagcgcgcctgcgcgctgtggactgcccc

SEQ ID NO: 145811 - DNA, 122 bp, Homo sapiens
cagatcttccttcgagatggatgttatctcctttttaggaaggaggaaacagagagacctcgtaacttggcatggccacacagtgagtcacacagttagtaaagatggaattcatacccagg

SEQ ID NO: 145812 - DNA, 122 bp, Homo sapiens
gtgtgctgggaccatcctcgggccgggcgagggagccccactgtacctgcacagcacagacgccaccctcaagcccggtgccggtgccgaatgggatgatgggcacaccttggcgatagcac

SEQ ID NO: 145813 - DNA, 122 bp, Homo sapiens
cacaccgccagtctgtgcgctgagtcggagccagaggccgcggggacaccgggccatgcacgcccccaactgaagctgcatctcaaagccgaagattccagcagcccaggggatttcaaaga

SEQ ID NO: 145814 - DNA, 122 bp, Homo sapiens
gaccctggttttcggctcctcccgccagctactgaggagtgcatgtttgaccactaaaaacgtagtgcttgcaaattggggaaaactaaaaagtgaaatgggtaccgctccagagttctatt

SEQ ID NO: 145815 - DNA, 122 bp, Homo sapiens
aatgagtcctccaaggccttgcagtgcagcttttaagaggtgcagtcagccttttagaaacgctgagccccaggccagccatggcggtggcagagctgcatgggaagcatccctggaccgat

SEQ ID NO: 145816 - DNA, 122 bp, Homo sapiens
gtgacccccgcctgccgcaccccggctaggggcttattagcgccacggagctgagctggacgtgtccaggatctggggagggagcagcccagagagggcagggcctggccaggcctccccag

SEQ ID NO: 145817 - DNA, 122 bp, Homo sapiens
ccaggggtgttttcaagcagcggcttgtggccaccgtcagggctggggagtggtgtttgccggaagtcctcggaatgccagcgcaaggacgaagggtggcccagcctctcccctcctcgttt

SEQ ID NO: 145818 - DNA, 122 bp, Homo sapiens
gtgaggaaagataatggtgctttgtgttgggaaaaaaacatttgtgaaggattagaaaaccgtaacacttaacaaggatagtcacagaaccgacgctgcattggctcttaggttctagattt

SEQ ID NO: 145819 - DNA, 122 bp, Homo sapiens
acgatcatcgaggaaggcactgcgtttcgggtgagtccctccaagggcaccctgtgcatccgcggcggcagccacttctctgggcacctggactgcaaagcccccagactgggggtggtgcc

SEQ ID NO: 145820 - DNA, 122 bp, Homo sapiens
tgtctgcctactgaggccccggctggggctctcctgggggtatttgaagggttaaggctccggaatctgcagaggaggcctgagctactggggttacagcaagaggagagtatgtgtactgg

SEQ ID NO: 145821 - DNA, 122 bp, Homo sapiens
aggcgggtggaatcctagtcctggggcaggagggcctgggatcctgaaagcgtttctgcccggcttagacactaaccacttcaagagaacgggagagcaccggaaaaaggctttccagccgc

SEQ ID NO: 145822 - DNA, 122 bp, Homo sapiens
cggtctctctgctccctcgcctttagtttgacctttccctccagtgtgtctgagggagagcggctgtgcgcgcgcgtgtacatgtctctgtgtgtgtgtgcgcgcgcgcgtggggaaggggc

SEQ ID NO: 145823 - DNA, 122 bp, Homo sapiens
tcgagaaccacagaaaattctgagtgtaggaaaactgatcagagaaggaaatattcatctcgaaagaggtccagcctcggagacgcaagacctgtccgctatagagctgtgttgactcgggc

SEQ ID NO: 145824 - DNA, 122 bp, Homo sapiens
cggggaagcaaagcgccctttgactccagtgacaggcgagctcacagtggagctgccaggcggaccggcgcgagaccgattttggggtgtcggcgcggggtgggaacacacctggcagtcgt

SEQ ID NO: 145825 - DNA, 122 bp, Homo sapiens
cactggggaggaaggggtggattcttgccattcttgggatgaggcagaggcccccctcaccgtgctgggacccccacctccagcatgaagaggcccccatgaggtcaaatagagcttttatg

SEQ ID NO: 145826 - DNA, 122 bp, Homo sapiens
ttatgtcccaaaaggattgggactagatgggaccaacccaggcatgcttggccacatcaccgaatgaattatttaacaagcattgagtagactgatttggatgaaagttatctacataaatt

SEQ ID NO: 145827 - DNA, 122 bp, Homo sapiens
aatggatggatagatgaatggatgagtcaagaatgagtgaaattgtctcttcctggaatgcgtaggtgaatgaaaaaaggaaagaatgcctctacattgaatgggtaaatgaatgaataaat

SEQ ID NO: 145828 - DNA, 122 bp, Homo sapiens
cctgcaccgagctggtgccctgggcggccgagccgggctacctggtgaccaaggtggtggcggtggacggtgactcgggccagaacgcctggctgtcgtaccagctgctcaaggccacggag

SEQ ID NO: 145829 - DNA, 122 bp, Homo sapiens
ggcgtgggggctgccaagcctgcctgcctctcgagagacccagggggaggctctggagcccgagcctcagatcacagccccggccagcaaatcctgcatctggaaccttcctcacacatcac

SEQ ID NO: 145830 - DNA, 122 bp, Homo sapiens
gtaggcgctgatgacctaaactgccttccatcttcctttttattccaccctagaagttgtcgttttgtttgtttcccagctggcagcgtggaattataattatagatagctgtaatatataa

SEQ ID NO: 145831 - DNA, 122 bp, Homo sapiens
aaggaaatgaaatggaacccttctcttcaccgaggaggaccaaagaccttcttagagtgtcggtcggtcctccctcccccaccccctgactccggccgctccacggaccgcagggactgtcc

SEQ ID NO: 145832 - DNA, 122 bp, Homo sapiens
tttcctccaaagatcgcttgtctcagcatcaggatctggatcagcagcagcccccagaaccgtggcagcagccagagcccccgccttgctgaccactgcccctgtcacaggagttggacctc

SEQ ID NO: 145833 - DNA, 122 bp, Homo sapiens
gtggaagtgcacaccaccactggtgaagtgtttttgtaaaagttttaaatttaaatctgacgcagcatctcaatcaatttctgggaaatatagggaacttgccaagtgagcattgaagtgag

SEQ ID NO: 145834 - DNA, 122 bp, Homo sapiens
tttcacgtcgcccttacttcacctgcccagtgcaggagtgtagacagcgctttagctcctcgaaggttgcccatcacttttggggcagaagcagcagctgatcaggactgacggaaggtggc

SEQ ID NO: 145835 - DNA, 122 bp, Homo sapiens
gcgcagggagcccagctgcagtgcgggtgctgctgagagctggagaacgctggggagacacgcggcccgggcttcccgggcctggctggctgcactgccccccacacccgggggtctgactt

SEQ ID NO: 145836 - DNA, 122 bp, Homo sapiens
atggcttctttccttacatgaccctgatgagtggtcatattttataaacaaaaatcctcccggcactttgggaggccaaggtgggaggatcccttgagcccaggagtttgagaccagcctgg

SEQ ID NO: 145837 - DNA, 122 bp, Homo sapiens
aggctcactgtgccgtttccctgccttaagcccatcaggctggctgccccccccaccccccgggaggcaggactcactcaggaatggtatactcggcagccttgatcttgcggaagagctcc

SEQ ID NO: 145838 - DNA, 122 bp, Homo sapiens
agatacggggctgtgtgtcgtggctctggatggaaatccctctttcctcccttcctgactcggtctttctaacagacggcgctggccctcctgctgtgttatctcagtggcactgtttgttc

SEQ ID NO: 145839 - DNA, 122 bp, Homo sapiens
tctcaggccccctgcgacagctgaagagtgtgcgggggaggggactaggggtccgggcggcgctggtcacaccctcgttgctctcactcagggcccccactcccagcccctccccccccaag

SEQ ID NO: 145840 - DNA, 122 bp, Homo sapiens
cgccgggctttgtagttcgccagtccgagctaccccaccaagaccgcgagcccgaggagtcgctgaactacaattcccatgatgcaccgcgagcctggcgctcccgcgcccctccccgtccc

SEQ ID NO: 145841 - DNA, 122 bp, Homo sapiens
tgttgggaacgtggactttcccaacaattgtgtatgcgctcgatctcactcagtgggagccgccgccctggagggaatttcacaatagcctggtcagggcggttattttccagagcagttta

SEQ ID NO: 145842 - DNA, 122 bp, Homo sapiens
gcatgtggagggtgcacggggtggcgaggccaccaccagggggcgatttcagggccgcagcgcctagaggtggggggtcgcccgatggccgaaggctgtgtgtgagcctcgccctcaaaccg

SEQ ID NO: 145843 - DNA, 122 bp, Homo sapiens
ccgccgcggccgctcgagccataaaaggcaactttcggaacggcgcacgctgattggccccgcgccgctcactcaccggcttcgccgcacagtgcagcatttttttaccccctctcccctcc

SEQ ID NO: 145844 - DNA, 122 bp, Homo sapiens
acaaagttcaaaggagtaccaaaaagctcagcaatggtaggccaggtgcagtggctcacccggcactttgggaggcccaggaaggaggatcacttgaggccaggagctggagaccagcctgg

SEQ ID NO: 145845 - DNA, 122 bp, Homo sapiens
ccgtgcgtggaggcaggccagctgcccaatgtcgttgctgatcatgtgcagcaggctcttcgccatgtcttctttggagaactctgaggaagggaaggaaaaggcactcatctccaagtaca

SEQ ID NO: 145846 - DNA, 122 bp, Homo sapiens
gcctcgaggctcagcagttccaggcctcagcctgggtggtccaggtgttcagggtggtctcgaagtgcatatttccttcaggtttcctcccttctctgccctcctccccatccccgcttagg

SEQ ID NO: 145847 - DNA, 122 bp, Homo sapiens
atgatgctgatgggttttctttttttttcccccatctaggaagaaatgttggctatttggcgatgagaggtggtgaacagtgaccatactggtatacaacactatgggacctggcatttttg

SEQ ID NO: 145848 - DNA, 122 bp, Homo sapiens
cgtccgtggtgatcttgtcggtgatctcttttacccccggagggtaagcgatcttcccgtcggcactcacgacgccacagagggcagtggcaggcttgggctgcgcggtgaagtccatcctg

SEQ ID NO: 145849 - DNA, 122 bp, Homo sapiens
aaaatagttacaacactcttgatatgtctcagcatctatagacattaacatcaggaaaagcgggggtgtggggggaaggaatttgtcagggagggccctttggacaaatgtcacgtttctca

SEQ ID NO: 145850 - DNA, 122 bp, Homo sapiens
gagcacgaagaaagcgcggctgagggtggcagcgcgcccacacccgcccggacgagggcccggcccgcacccaccttgcctccagcagcagcggggtctcgggccacttcgcggccaagtgg

SEQ ID NO: 145851 - DNA, 122 bp, Homo sapiens
ccaatcatctcaaacttggctactctttggaaccacctggggagctttaaaaattatggacgccctgatagcaccgcagaggttctgatctaattgatctgggatgcggcctgggtatcgcg

SEQ ID NO: 145852 - DNA, 122 bp, Homo sapiens
ttttaagttctatgtgttctccccggccctcaaagtgaacagcaagacaatgcaaaaccccggaggcatccctccaggtctctgtctgtgacctactcatctggcatctgacaacacaatag

SEQ ID NO: 145853 - DNA, 122 bp, Homo sapiens
tgggccgccccgccgattctagcctgccttggcggtggcggggttgggggggtcggggggcggggggaagctggcggagacccaaccagtctggtggctgctggggcagctggaggggaagg

SEQ ID NO: 145854 - DNA, 122 bp, Homo sapiens
cctcgaactgacaccggaaccggaaatagcttgggctcgacttcttcctcctgggccagccgccgccgccgcttcagtggccgcagtggccgcaaggacccggacctcagggaggcctccgc

SEQ ID NO: 145855 - DNA, 122 bp, Homo sapiens
cccagcggccgctagagggtctctgcatcctcgaggtctaggagggcgggaggaggtggacgcctggggtcaggagcccttcgtttttgctattgttcaaagcactggccccggagaatcga

SEQ ID NO: 145856 - DNA, 122 bp, Homo sapiens
agggcggatggtgaactgacgagcttcagcaccagctgggagccaggcgaggtttgtttacgtccgggcggagggcgactttataggcgccgcggccccgcccccgcgcctcgcccctccca

SEQ ID NO: 145857 - DNA, 122 bp, Homo sapiens
ctccggctctggcctctccgctccgccgccgccgccgtgagcgagcacgtacgcacggaccgacgtcctgcgtcgcttcccagctaccccctgggctccgcccccaggaccgcgcgcgccac

SEQ ID NO: 145858 - DNA, 122 bp, Homo sapiens
ctctgcttaactgctctggcatgcttgaaggcctagcttagcgtagcaggccgttgcagccgttctcgctctgtggcattgctctttgccttcttggtccagctgcctccagctcccttgga

SEQ ID NO: 145859 - DNA, 122 bp, Homo sapiens
gcccagccccactccaccactggtatctctagtgtccctgactgctagtgcctcagccaccgccgccactgcgatttggaagtcttttaatgcagttaaattatcttagttttttctctccc

SEQ ID NO: 145860 - DNA, 122 bp, Homo sapiens
tggttcgattttcattctgcccccttcaccctcccatctgttgtacagaaggctgctttccgtcagctggtggcagaccatgccttgctcattcctgggccctcacaggaaatcctggtggg

SEQ ID NO: 145861 - DNA, 122 bp, Homo sapiens
agggaatcctccccctaccttgcaatgagaagagggacaggaaaaagcccagcacccagacgctgtgcagccagtaggtcctcatgtctccgctgcgctcgatgctccctcgcgcgctcctg

SEQ ID NO: 145862 - DNA, 122 bp, Homo sapiens
tgctccttgatctccgtgaagagccacggcttgagcagggcgccactgtgggacgggtgacgatcagtgggcccagccaccagcctgcctgggatcgtgtggcctctgcttccatggcctgg

SEQ ID NO: 145863 - DNA, 122 bp, Homo sapiens
ggagtgaaaaagaaaaagctctattacttgaagcttttcaccaggggcagagagaatggccggaagtgagaaacgtgtgtgtggatgcttacaccgatgccgtctcctaatattggaacatg

SEQ ID NO: 145864 - DNA, 122 bp, Homo sapiens
tcacttcccaggtgcaagcgatcctcccgtctcagcctcctgagaagctgggaccacagacgtgcagcattacacccggctaattttttgtatttttgtagacacggtgtttcctcatgttg

SEQ ID NO: 145865 - DNA, 122 bp, Homo sapiens
tccgtctcctccaggcatgaggctcagagactggagcaggaagcccgcggccggcttgagcggcagaagatcctggaccagtcagaagccgagaaagctcgcaaggaacttttggagctgga

SEQ ID NO: 145866 - DNA, 122 bp, Homo sapiens
gaaacaagttgctacctggggtggtttttccaaagcaagacctccaaaggggagagcgcacgtgtaaagaaaaggtgcactttgcatgagggtggggcctttggttaaaagattccagctgg

SEQ ID NO: 145867 - DNA, 122 bp, Homo sapiens
acctcctcatccacaaaatgtataggtttgcataaaataaggtggaaaattagacagcagcgagatcatgaagggtgttgaatgacaccgagtaaatacactttaacctatagaattttaag

SEQ ID NO: 145868 - DNA, 122 bp, Homo sapiens
cccgaggttagctaccaaggcgcttcctgaaatgtgacgctgatgcccgtcagcccagttcgtgcctaaccacaggcccaagcagacccaccccaacaccaaagtgtcgctgcctctgtcta

SEQ ID NO: 145869 - DNA, 122 bp, Homo sapiens
atcgcaggtgtgcagcgcctctgtgagattcttcgtaatatccctgcggggaagagatgacgttacttttaataatatcgtaaggggtgtaccccctctgcgagattcttcgtaatatccca

SEQ ID NO: 145870 - DNA, 122 bp, Homo sapiens
gcaaccacaggaacagttacgataacttaaaaagaaatgctttccacactgaactgacagcgctgcagaccacgcctgagtggggacggcagccccaagcccaggggcaagcgcccacaggc

SEQ ID NO: 145871 - DNA, 122 bp, Homo sapiens
gcccctttctgtcataattgaggtgtccacaaccagccaatcaggaacgcgagagtatcccgcgtttgctttcgctcgccgaggcgcgtatcagtcggaattttggggagccaaccgcgccg

SEQ ID NO: 145872 - DNA, 122 bp, Homo sapiens
aatggctgagggctgggcctgctggctacaagactctccaagtgggctctttcctgctggcgtggaggtgggcgaggctgctgctgctgctgctgctgctgctgccacgaattcagtcccct

SEQ ID NO: 145873 - DNA, 122 bp, Homo sapiens
ccgcgcccaggagcagcgcggccatgctggacaccacggtggcttcactgggccgcgcgccgctgggtcatgaagtgccgcagcagggaagcctcctagtcagtggcacatgggcgtttcag

SEQ ID NO: 145874 - DNA, 122 bp, Homo sapiens
aaattcttagactctaaatttcacatggtttttcctatcagtacaggttaaggataatggcgtgttgtaggtttttccagtgcaatacaaggaagttggttctagatcctttagtacagtta

SEQ ID NO: 145875 - DNA, 122 bp, Homo sapiens
acagttaagctagagggtgccaggactcagggtcttggctgagtctgggggtccccatgccggcgggctctgcccccgtggctgtcctgcggtgaggctggccgtttaaggcagtccgaggg

SEQ ID NO: 145876 - DNA, 122 bp, Homo sapiens
agagcctcggccagaattccgaactccgaagctgacccagctcccgtccctcacacttcccggctgagatttatggcacaaaaccagggatcgtggattctggcattgcattttggtgcttt

SEQ ID NO: 145877 - DNA, 122 bp, Homo sapiens
tggtaagcagatgacttactggtcagtcacgctgtcgcagaaacgacgtgggcttgggaccggtgacagaaggcctgggtcagaacttccacgttccccacgactgcgggaccttgccaagc

SEQ ID NO: 145878 - DNA, 122 bp, Homo sapiens
gtggggacaagtctgcaataacctatgacccctaggccgccgcagcctttggcggttctgcgtcccttggcctgtcccggtcatcgctagccacggccaggtccctgcagcagaaggagagt

SEQ ID NO: 145879 - DNA, 122 bp, Homo sapiens
gtccatcccataaacttaggcgacaaacctggcgcagggtgacctgagacaaaggcttcccggcccctgtctccaagtcgtccatccctggggcgtaggcacgttttagtgagccctgtccg

SEQ ID NO: 145880 - DNA, 122 bp, Homo sapiens
atggcttagagcatctcaacctcgacttccggctggcaggcacgggactttgtagtgacccggaggaaccgcaggaaccagctgctatcatcgtcaacctgctgcgcaaatacatgctgcct

SEQ ID NO: 145881 - DNA, 122 bp, Homo sapiens
caagaaaggagttaatctgcaggatgctcaattctttctatgacaaatcgcttcactccccgctcggcaggtcagagctaggggtgaccgagttacgccgcgggcgctgcctgagcaacgct

SEQ ID NO: 145882 - DNA, 122 bp, Homo sapiens
ccacgagagcagaagattatgatctctgatgctgccttagggctgaagacactcccaactcggcgacgcttagcaatcatcgacttcctcctcctcttggctgcctcggagatcctgttccg

SEQ ID NO: 145883 - DNA, 122 bp, Homo sapiens
tactttttgttacctatgttttttccttattttccccaaattccaggttcacaatctaaacgtgctttgcccgtttatacgtctcacagttatttgattttctctgcctgcagtgacttctc

SEQ ID NO: 145884 - DNA, 122 bp, Homo sapiens
ggtgtgagagcccaagttaaattcctcgtcctgatgagatggcaacttaaatcagaaggacgtttacttttaaacaccaaaagaatgtatataaattgcattattgttcccaattttcctct

SEQ ID NO: 145885 - DNA, 122 bp, Homo sapiens
aaaggcagggagccgggagggagcgtcagcgtggcccggcgggcgcggagggagggcgcacggccccagggctggactcgtaaccccagcgccctgctgcagccgccgttgcttttccctct

SEQ ID NO: 145886 - DNA, 122 bp, Homo sapiens
tgcaggacctgggccatcttcttttctacagatgctccttggaagtcacttgagggactgcgagtcagactgcctgcagcaccggctgaggcttacctggggaaagagaaccacggcgccgg

SEQ ID NO: 145887 - DNA, 122 bp, Homo sapiens
tcctcgccccgagaggaaaccctgcagtcagctgtctcggcgtctcccgctggccttttccgtctccgaggttggcctgttctggacgttccctgtatatgggatcccacgtggtgtggact

SEQ ID NO: 145888 - DNA, 122 bp, Homo sapiens
gaccccttcagaccgcaggcagtctgggaggaggtccggccgggggaggtgcaggatccccgccgtgtctctttgacgacttggggactgtcacggttctctcccggcgcccctgggttctt

SEQ ID NO: 145889 - DNA, 122 bp, Homo sapiens
gggagaattagcctgcaccccagggctcgcaggttctgggggtggccgggcggttgccgacgctgctctgccgccccacaggacgtggcccagtggaacatcgggagcctccggaccatcct

SEQ ID NO: 145890 - DNA, 122 bp, Homo sapiens
tcatgttcctagagcatatacctaacaagccaaaatattcaggtttaaaattcaacttcccgctatgctttggatggactgtgatctcagtggtctttttctttgtggaccagctgctgatt

SEQ ID NO: 145891 - DNA, 122 bp, Homo sapiens
agcctgtgaggggcacaagcaaggatctctaacagcccagccccactgacaaggaccacacgcagtggaatgccagtggcttcactctaatcctgttttacagtctccttggtttccaaccc

SEQ ID NO: 145892 - DNA, 122 bp, Homo sapiens
tccaggcagtcctgaggccgcatcctgcactgcgctgcgggatcctggctgctctcttcccgcctggaagactttgcacagccacgcatccctaccactacccagggatcccgggaagcgag

SEQ ID NO: 145893 - DNA, 122 bp, Homo sapiens
gggagccgccgccatgggggcctgcctgggagcctgctccctgctcagctgcgtgagtcccgaccccggcgcccgcccgcgcgcgccgcccgttcctgctgcgggccctcactttcttctgt

SEQ ID NO: 145894 - DNA, 122 bp, Homo sapiens
tgcccctgtgtacacaccacttatgccaggagccttgggtgcgtcatttaaggaggcactcgctcttggattcatgtaagtttagggttagcagttgcataattcagaaagcgagtgcttcc

SEQ ID NO: 145895 - DNA, 122 bp, Homo sapiens
acctagtgattcgcccgcctcggcctcccaaagtgctgggattacaagcgtgagccaccgcgcccagccatagacctaaatatttctaactgctgtttcatattgagatgctcctgcaagtg

SEQ ID NO: 145896 - DNA, 122 bp, Homo sapiens
caatgccccgcgagtaagggaaactattaaactcctggggcaggagcgttggcaaactttcgtgggcagaattttgaggctacaatgagcgcggacaacaaaaggattctcttgaggcgtgc

SEQ ID NO: 145897 - DNA, 122 bp, Homo sapiens
atattaatggtgttctttaagatacaaggattggctgaaatattttaaagatactattcccgcatgcataattaatgtataagaatttagttctcttagagatggggcccaaagctttaatc

SEQ ID NO: 145898 - DNA, 122 bp, Homo sapiens
ccataatatctcccaactaagacacacactccctttagcatctatcccattccagggaggcgtccattctctgtcccactgtgcagcagaattcctcctgacatttatacatattcagcatc

SEQ ID NO: 145899 - DNA, 122 bp, Homo sapiens
cgagcaatggcgacggtctgtctgggacaattcggcacaggatggaggtgcggggtgagccggagtgcccatggctcttgctggaaggggctccatgccctggccgcctctataaaggcctg

SEQ ID NO: 145900 - DNA, 122 bp, Homo sapiens
accagatccgagccagagtggagcgtaacgcagtggtgagagccgggctggggagggcctcgtggcggtcagctcccctgctgtcaggaaggaattccatgttccacaagttcctggctggg

SEQ ID NO: 145901 - DNA, 122 bp, Homo sapiens
acgatgcagcactagcttagcaggagcctgaagcttgcagcaagcgcagtgcagcctgagcggtgctaaggtggagaggggagcgagcggggaaaaaaaaaagctagattcattagtctttt

SEQ ID NO: 145902 - DNA, 122 bp, Homo sapiens
gccgagaggccgtgggggtgaaaggccgggattcgtggagccgggcattcgagcccatcgcgctagggcagacacgggcccgcagccgggatcccgggccgatcggccaaccgtgccaggat

SEQ ID NO: 145903 - DNA, 122 bp, Homo sapiens
acccaggccccgcggtatttagcaccttttcttatgtgtattagccatttaaatatcttccgctgcacagtgcactttcaaatcttttgcccattaaaaaatgaactttctgtcttgttctt

SEQ ID NO: 145904 - DNA, 122 bp, Homo sapiens
gctgttttcattcctctaaaagagacagttttctaagatgtttttgaaaatgagaaaatacgtaatagatctgcttaagaagtttcaaacttaatctgtgcttattacatgaatatgctaat

SEQ ID NO: 145905 - DNA, 122 bp, Homo sapiens
ctcactttaatcaagaataggaatgttaagggcttgacgcagggaagaagcatagattagcggttagcataatagcatgaaagccaggaaatgtgaaatctattctgggccaagtggtctta

SEQ ID NO: 145906 - DNA, 122 bp, Homo sapiens
caggctgggggattgcagctgcggatcaggcagctggagtctgtctaggccacctccagccggggaggacagggcatggggatatcaccaactgcacaagagcctccctcctgcgctggctt

SEQ ID NO: 145907 - DNA, 122 bp, Homo sapiens
aaaagagaaagcttcagatcggggtattggtcagatcattcttactagcgatgacctcttcgcctttggcacctcgcggctcttcgcatgcctccaagaattcccgggtcttgaaacctacg

SEQ ID NO: 145908 - DNA, 122 bp, Homo sapiens
gctaattacaagaacgtctttataatttggagggaaactcttggaactgtgagtgctccccgtccagtgttaccatcccctaccatccaattaaaatgtttccaacccacctccaaaaaaaa

SEQ ID NO: 145909 - DNA, 122 bp, Homo sapiens
ctccacggtccggggcctgggccgtggtgtggactagcgaggcccctcgtggccggctggcggtgggcaggcctggtgggtagtgcaggccgggcttttactcttctctgtcctcttctctt

SEQ ID NO: 145910 - DNA, 122 bp, Homo sapiens
gtttgacaaatgaacttctaaaataactcgtcaggagaagacttgcgctaacaagctgtgcgggggagggtgggaggccatgcagtcactgcgaggccccaccctcggccactctcccagcc

SEQ ID NO: 145911 - DNA, 122 bp, Homo sapiens
aaagcagcatcactgccaagacacatccggagtccacacacaaatacaggaggctgccggcgaaactctcccgcagccacaagagtcccggggcccgcgcgcagactgcgatccagctccgg

SEQ ID NO: 145912 - DNA, 122 bp, Homo sapiens
tatacgtagcgtatatatagtgcacgtgctgtagtgtatatatcgtgcatatgtagtgtacgtgtagtgaatatacagcgcatatatagtacatatgtggtgcacatatagtgtgcatatat

SEQ ID NO: 145913 - DNA, 122 bp, Homo sapiens
accatctgggccacctggatggtgataaaggcctccacatgctctgtgatgagagagcatcgcatcgcttgctcactgctgctcctctggaggtcactgtacaggagctctgggatggagag

SEQ ID NO: 145914 - DNA, 122 bp, Homo sapiens
cggagcgagagtaggatgggctcctgcctccgggtgaacacgcttggatttcagaactcacgcaggccttcggtcacagtgctcacggcttcctcaccccggctggccctgttggttccttc

SEQ ID NO: 145915 - DNA, 122 bp, Homo sapiens
tctgtactcagtggccattaagccagcattctgcctctgctgcatcaccatgagcgtctccgaagcagtgaggaagcagggccaccactagcccttcctttctatccagtgctccatccagt

SEQ ID NO: 145916 - DNA, 122 bp, Homo sapiens
cctggccttgtgcagggctgaagacatgtgagacttccctgccccaccccacatgacatccgaggatctgagatttccgtgtttggctgaacctgggagaccagctgggcctccaagtagga

SEQ ID NO: 145917 - DNA, 122 bp, Homo sapiens
tctctgaaagctctggtaaatgaatcgaacacttcttttatctcatcgtccaggacatggcgctgtaatgctgaacatatgtgcagagtttgtgtgttcttgatcgggaacgggaggcccag

SEQ ID NO: 145918 - DNA, 122 bp, Homo sapiens
gcaatctcttcacataaaaggtctacgggtttccgctcggccctcacagcggcagcggatcgaaccaggaaagcaattcccgctcggctcccctcgggtcccaggcccaggaaggccgggcc

SEQ ID NO: 145919 - DNA, 122 bp, Homo sapiens
aaatttctctcttaaacatcatcagctacttcctaagggtcaaaccatctggtggtttctcggatctcatcccactgttgctctcagagatactaaaccccacataaattttccttctcaaa

SEQ ID NO: 145920 - DNA, 122 bp, Homo sapiens
ggagagctgcctgggcttgaccgcgcgccggtctcaaagtcctggctttggcccctcctccgttttcccctgtggaccattccgcttcgcagcgttttcaaaaactggagcgaaagtgatgt

SEQ ID NO: 145921 - DNA, 122 bp, Homo sapiens
gagtttggaagatctctctaacacctctcggccaagtgagtgtccctcctcctaacgacccgggcagagaagagctcctttaagtcgaactagcgtggagtcagaacctgcttggctcccgg

SEQ ID NO: 145922 - DNA, 122 bp, Homo sapiens
gctcatctcctatggctgttgccttttgggcagcccctcttcgcggcggtggggctgtcccgccggcctgtcacgttgcccttccctgggcttgtgaggattggctccgcttggacctttgc

SEQ ID NO: 145923 - DNA, 122 bp, Homo sapiens
gagaaacgactggttattttgagatactggtatggtgtttccatctctataaaaacataccggtaacccatatagatgcataatcccagacactgaagtttgattaaggtgtgtttctgtct

SEQ ID NO: 145924 - DNA, 122 bp, Homo sapiens
tactcacagcctcccacacactcctactcacacaccttcgcacggactcacacagccacacgcacacacactgcaatactaagagacgcagagacacctcccaggtgcccacacagacttct

SEQ ID NO: 145925 - DNA, 122 bp, Homo sapiens
gtttggcttccaagtctgtgttctcacccattatgccataaagaaacatgggactcccaacggagctctgtaaaagcttatgggttttctataaagcctttagtcttagtcctttctgaaat

SEQ ID NO: 145926 - DNA, 122 bp, Homo sapiens
aaaaacagtggagtcaaacggcggtaaggactgacaaggctggcggggacattgagcaaacggcggcttctgagttggcaccagtccttcaccacgttgtgtgggaagtgtggggagtcagg

SEQ ID NO: 145927 - DNA, 122 bp, Homo sapiens
ctctgatgtctgtattagatcctacatggcagtaggctccatggtgccaaaagacctgagcgtctttctccttaaaggtgactgcagctgtgcctccaggaacacaaacatgctcaggagaa

SEQ ID NO: 145928 - DNA, 122 bp, Homo sapiens
catttcattaccatgttttcttttcttcattgcattttttacaatataatcattttaggccgggcgcggtggctcacgtctgtaatcccagcactttgggaggcggaggcgggcggatcacc

SEQ ID NO: 145929 - DNA, 122 bp, Homo sapiens
cctctcccaggaaggtccctcccaaaactgtgctcagtgtcagcatcagtcaggatgcagcgcggacaggaatgggaacttccggaagcatcactgtccatgtgtcagtgtctcagaagtgc

SEQ ID NO: 145930 - DNA, 122 bp, Homo sapiens
gcagaggtctccacaggccccttaggaggcttggatgagtttggtcccctggaaagtttgcgtttctggcgccctaactctcaagcctccgttgcagtaattgccacggcagcaacgatatt

SEQ ID NO: 145931 - DNA, 122 bp, Homo sapiens
ttgctccaaactgctcttggaccccacctgtgagccgcgtggctgggctgggctgggctgcgcgggacctgtcagcggcccccgccactctgctcgcaggcgctcaccggctgcctcctggg

SEQ ID NO: 145932 - DNA, 122 bp, Homo sapiens
ggaagcagcatgcaggttgaacatgaagcacacaggatgagtcagtgttttctggccaatcgctcacctgctcacctcaattaccttgcctggaaactgagaatcctggcttttcctcttca

SEQ ID NO: 145933 - DNA, 122 bp, Homo sapiens
aataatccccaagccagggagaggggaaggaagcctttgctggatgcaaaggcccagctacgtaacctccaaatgagcatgaaaaaaatcacatataagaagagaggctttaaagacacatg

SEQ ID NO: 145934 - DNA, 122 bp, Homo sapiens
agggcccgggcgggcggcgcagggcctgtggctcgcactcgaaggcggtcagggcgaaggcgtcgggcagcagcgaggccgaggcggagcgggggccgggcccggggcggcggcgcgggctg

SEQ ID NO: 145935 - DNA, 122 bp, Homo sapiens
gtgagccactagaaggagagaacagggccatcagcccacaacccattgctcctggtaacacgttatgtttgcagagtccagtggaggggacggggaatcaatacatcaccccacattcacac

SEQ ID NO: 145936 - DNA, 122 bp, Homo sapiens
tgcgcaggaatcaaacgcaaactggtgaaccaactagagggccgcgggggcagaagtgtccggcggggatccggacagcgcatccggaagcgccatgggccaacgctcgcaggaacctgaac

SEQ ID NO: 145937 - DNA, 122 bp, Homo sapiens
gtactgctcagatgctcactgcgctgctttccagtgggtctgggggctcctgagggtgaccgtggcctctcccccatgtccttcctgtcctcatccagggagcgggcacacagggctgactg

SEQ ID NO: 145938 - DNA, 122 bp, Homo sapiens
aagaaaacggcagccacacgctcacactggtagcataatgccatcggttgcccagcattacggggcaacatatacggcatacaacttctccacacatggagctggaatcccccaggccctaa

SEQ ID NO: 145939 - DNA, 122 bp, Homo sapiens
gcggccacgcccgccccttcccgccacccaatcctagcgcttgtctctgcggccgggccccgcccccacccgccccccgcccaatcctcgcgcggactcatgtttgcccgctcggccgccgt

SEQ ID NO: 145940 - DNA, 122 bp, Homo sapiens
acatgaaaatagcggggtcaacaggcagaggagcatcaaaaacctacgtttatatgcctgcgtgcgtgtaggagagaaggtagcaatgctagagggggaagggaagaaagaagagaggagaa

SEQ ID NO: 145941 - DNA, 122 bp, Homo sapiens
gagttccacctcaatacagtgaatatccttaaaccccgtctcaggcccgcagttagaactcgatcaacgtggagatgcacgcagtgccatgcggggcccacagtgagccccgcacaaacatc

SEQ ID NO: 145942 - DNA, 122 bp, Homo sapiens
gttttcagggcaaggctgtgtaagtatttccagcagactagtgtgaggcatgctaggaagcgagctgatgtggagccgagctaatcctgtctgatgtggccacctacaggcatcaacaggcc

SEQ ID NO: 145943 - DNA, 122 bp, Homo sapiens
gtcagcaattagtgccctactagagggatggagagagagtccccagtcagggagtggacacggccctgctaaacaggtcccagaacaactgccaacacgacagaagcccgtggaattgtaga

SEQ ID NO: 145944 - DNA, 122 bp, Homo sapiens
taaagtgtagaaattgttttctgtgtagcaaaaagcaaaatttctgcttcagcatattatcgtggggtataaaattcagtacttgcattttctatgggaagagatctgtagatgtgccataa

SEQ ID NO: 145945 - DNA, 122 bp, Homo sapiens
ggtggccacgccacgaccctgcctggaccccagactccagccgggagctgtgacctcggacgcccttcctactcacgttgcggttgaagctgttgcccggcagcagaggcagggccatggcg

SEQ ID NO: 145946 - DNA, 122 bp, Homo sapiens
cttctcagccagagccagatgaaccagaggaggaaatggcccagacttggcaggctggtgcgtcctctgcccctgtaggggtttatttctaaagtggtttcatcccagcaccacatctgtga

SEQ ID NO: 145947 - DNA, 122 bp, Homo sapiens
gagcgccctttctcctgccctcagtgtggcattgacttcaacggccactcggccctgatccgccaccagatgatccacacaggcgagcgtccttacccctgcactgactgcagtaagagctt

SEQ ID NO: 145948 - DNA, 122 bp, Homo sapiens
gctcccgaacaggagggatggggagtggcttttcctgccaatccgcgggctgcacagtggcgtacggcatggatccaccaatctcagggtctggttcctgacgaacttcaatctcccagaat

SEQ ID NO: 145949 - DNA, 122 bp, Homo sapiens
ttgtcaaggcttctaatcagatcagcagactacaactgattgacacgtaaaatcagtcaccgttttttccctacgattacaaaactgccagtcctatatggagtctgatcacaagactgcag

SEQ ID NO: 145950 - DNA, 122 bp, Homo sapiens
tcctgtcgttggcgccacgtgctgcagaaagaggacccctccccctgcgggccgccgctgcgcccgtgcatccgtcacaggtacaattcgcaccggaacttgcggcccggcttcattacgtg

SEQ ID NO: 145951 - DNA, 122 bp, Homo sapiens
ggaagggggcggggagaatccctggcacatgccagggtcgccgtaggtggcagcggccggcgcatgcgcgccctctcccagaagccaggaacgccgaggggcgcgctcccccattcgcgcgc

SEQ ID NO: 145952 - DNA, 122 bp, Homo sapiens
aacacctgtataacatctgtttattcattcaacaaatatttatcaagtgcattctccatgcgaggctctggggataccaagggaaaaaaccacacaccctgtagcatcagctcttgtgaaac

SEQ ID NO: 145953 - DNA, 122 bp, Homo sapiens
ccaggcgaccctcctcctccttcatagtcactgctgaagctgggacaaagctctgtgcgccgtcactgtccccactgccccgacgtggaggtacgcatgcggcctgtccccgagagcagtgg

SEQ ID NO: 145954 - DNA, 122 bp, Homo sapiens
cgcttcctcgggagcctcagcccctccagccgcccagcgccctgccaggcctcttcccggcgctcccgccgccaggcccgcattattcaccatctgggcagcacccaaggcctggagggggc

SEQ ID NO: 145955 - DNA, 122 bp, Homo sapiens
tttctcgtgtacacacacacacacacacacacacacacacacacgctgggacgtaaaagacgtttcagtaggtgtcattcccaagctgtccacaagatggtgcagaaaccctgctcacagtc

SEQ ID NO: 145956 - DNA, 122 bp, Homo sapiens
gcgaaagcctgacgctctagccggctctatctcgctgccccgccgcgggcgcagagctggcgctctagcccacggagttggttaactcctctcaccggcccctggaaagggttccaagtcct

SEQ ID NO: 145957 - DNA, 122 bp, Homo sapiens
ttcctcaaagcgtggccgaatgcctaggcttccgggtatcagtggccccgcctcttaatccgaccggagccgtccctcgtgattcctgggtattgtagtcagtttcctgggaaagagtcgct

SEQ ID NO: 145958 - DNA, 122 bp, Homo sapiens
ctgccccgccccttccctgctgtgatcgaggatgcgccaaattcattacagatcatctcccgagggatgggtggctgggggtgcagagagggcctttgtttaccctgacccccagcccctga

SEQ ID NO: 145959 - DNA, 122 bp, Homo sapiens
gttagcatcacctggggacttcttagaaatacaaattcccaggcccccgatcagacccaccgagccgagggcccagccatctttagaacaagccctccagtttcagaaccacagtgctgcac

SEQ ID NO: 145960 - DNA, 122 bp, Homo sapiens
ggcggaggacgcccacccggattggccagggttcgctgacgctcagtgttttggcccggacggtcacatgtttcctttgttgtgagctgcggcagagactggtggctggaggagacgccggc

SEQ ID NO: 145961 - DNA, 122 bp, Homo sapiens
gtggttggtgatctcccagcaggagagcaggcgcagcgtgtgcgtgctgtggccctggcgcgccgtgaagtaggccagcgccgtgtccgtcacgtggtaggcctgcaggctcagctccgcca

SEQ ID NO: 145962 - DNA, 122 bp, Homo sapiens
gggtctcgcttatatactggagaggctaggagcgaataatcatacagtcatacagataatcggagggcacgttcccataggtgaagcccgacaggagacataagactttgctggtatgtgtg

SEQ ID NO: 145963 - DNA, 122 bp, Homo sapiens
ggggcccatcttggccctgggaaagggctctcctctctgattggtccctaggccacgggccggcccccagacaccattcaccgacccactgcaggctgtcctccaaccatggggtggccact

SEQ ID NO: 145964 - DNA, 122 bp, Homo sapiens
gtgggggcctgctgaaagacagggtcggggcctgcctcctgcatccccggcccaaaagcccgggccaagaaggacacaggcttcaatggctgtcatgtgttgcagacaacatggtgttgaga

SEQ ID NO: 145965 - DNA, 122 bp, Homo sapiens
cgcacagttctagccggcactcaggttgcattgtgcggcatcgcctgggtaaccgatagccggcctcagaaatggaatagggtgggagccgggcaacaattcccatcaccccgcctcctcct

SEQ ID NO: 145966 - DNA, 122 bp, Homo sapiens
atacacacacaggtagcgaggaggccggggtgttaatacacacacaggtagcgaggaggccggggtgttaatacacacacaggtagtgaggaggccggggcattaatacacacacaggtagt

SEQ ID NO: 145967 - DNA, 122 bp, Homo sapiens
cccccttccttactcccgagccctggccgttccgtcctgttcgggggcctttcccagggccgcccagagaccctctccgaaagtggccctgccctagcggaccgagctcctatcttgccacc

SEQ ID NO: 145968 - DNA, 122 bp, Homo sapiens
cagcgggcgcggaagcctcggcgccccgagccgccagccctcggagctgcgctgcggctccgcctccccattggccccgccccgatcccctccaagaggggcggggtcccccggccttaggc

SEQ ID NO: 145969 - DNA, 122 bp, Homo sapiens
ttttgtggtataatcataaaatagaattctacccaggaataaaaagaatgaactgcaatgcggatgagtctcacaaagatgatactgagcaaaaagagccagacattaaaggggatacgttc

SEQ ID NO: 145970 - DNA, 122 bp, Homo sapiens
ataatttaaagggatgacattcagggctttgggaagcaattttttttttttttttcaaaacgccgctatacctactaattggatatccatcaggggatggatacttacaacagctctgcatg

SEQ ID NO: 145971 - DNA, 122 bp, Homo sapiens
agtagcctgaatcaaggctagccattttggtagataaagtccttgttagtcatctcacgtcgtgagagtgtggtgtctgtttatgccgggtccgctgttaattcggagttgagtcattcggg

SEQ ID NO: 145972 - DNA, 122 bp, Homo sapiens
ggggtcgatcctgggaggctgtgcctggcttcccaactgagagggcccggcacagccccgcggagaggacggggtatcagatgcccccgaattgccggccccatcctacttggttccttcac

SEQ ID NO: 145973 - DNA, 122 bp, Homo sapiens
tggggccccaggtcacagaaatgggtgcagggatcctgggacctgggctggatgggcacccgctttgggatttcctctgcttcagcctgtgtatggtccagggaacagtgtaggaaggggcg

SEQ ID NO: 145974 - DNA, 122 bp, Homo sapiens
tgggtaattggctatgccaagagaaggagagcagggctgcctatgtggcagtgttcctggcgctttggagttgggagaaccctcttaaaactcaaaatactcacaggcccctgccttgggaa

SEQ ID NO: 145975 - DNA, 122 bp, Homo sapiens
tcatccgttttacggcacagttttaaacatggccgccccaggtaggagtcaagtgggcgtcgccatcatacctccaattacagctttgagaaacccagaatcctgttcactggaaggttgcc

SEQ ID NO: 145976 - DNA, 122 bp, Homo sapiens
gcccccctgcaggggctggcaatcccgcgacgagtagatcagcacgaaggcaactgtggccgtgacggcggccaccagcacggcctcaatcacctgcaggcagggccggtggatgtacctgg

SEQ ID NO: 145977 - DNA, 122 bp, Homo sapiens
agtaccaaaatgacagcgccaatgtggcagccatctttgtacagacgggaagtctcggcgcgagttcccgccccctcgtctagttggaaaccgaggaggcggtctcctccggcctgttagcc

SEQ ID NO: 145978 - DNA, 122 bp, Homo sapiens
tgctcaaacccgctcccctcccctacgtcctgcactttctcggaccagtccccccactcccgacccgaccccagccccacctgagggtgagcaactcctgtactgtaggggaagaagtggga

SEQ ID NO: 145979 - DNA, 122 bp, Homo sapiens
cccccgccgagaagttccgcgggagacggcggctcccaaagttactttgggccgcgggagcgcgggaccggggctgcgggcgccgagagcgcgtcgtctgccgcctccgtgcgccgccgccg

SEQ ID NO: 145980 - DNA, 122 bp, Homo sapiens
ccggcgctccgcggggccccagctggtagcctgagtgcgactgcgggaacccgcggccggcggctgggccttgtcccagacaaaggctaggccactcccatgtccaattaagccaccctcct

SEQ ID NO: 145981 - DNA, 122 bp, Homo sapiens
ccgggcgggggaagtgggcggagcgaggccagggtagggtgagcggcctccgaagcggagcggggctctgaggagacactttttttttcctccctccttccctcctctcctcctcccttccc

SEQ ID NO: 145982 - DNA, 122 bp, Homo sapiens
ccgctgggactaggatcaggatgtggacacccccaatctggaccgtctagccggggagggcgtcaaggccaggtacctcatgccaccctttgtcacgatgacctcccggtcccgcttcaccg

SEQ ID NO: 145983 - DNA, 122 bp, Homo sapiens
ccgaggtgaacgtaaagccggcgagatctccgtgctccgggtacccacagatactgtccgcgccgcccgcgccgacttcctgcctagctaaggcgagccccacccacttcccgcctccgggg

SEQ ID NO: 145984 - DNA, 122 bp, Homo sapiens
ttagtgatcattagtgtgaaagcaggttctacctataatttactcatttccacctgctctcggaaacctcatgcctatcttcctgcagaaatcacaaaacctgttgaactgcagctattgac

SEQ ID NO: 145985 - DNA, 122 bp, Homo sapiens
cttttccattccaggatcctgtccggagtacatcaccatgtcttccaggctcctctggaccgtgaccgtttctcaaactttccttgtttttgataaccttaatagttttgaagcgacttatt

SEQ ID NO: 145986 - DNA, 122 bp, Homo sapiens
gtgatcccgaggctttgtaggcgccgcagccctggccctctagaggccgacggaggagtgcgggggaagttagcttgcgcctgtctcgtcagccgtgcacgagaaaaaaaaggaccttcgag

SEQ ID NO: 145987 - DNA, 122 bp, Homo sapiens
tcaaagcccttgcaaaaagcatatctattcaaagggcatttagtccatttctttcttggccggtaaacctattcatcaattgttctgccttgtagatcgcattctaatgctaatctagcgtg

SEQ ID NO: 145988 - DNA, 122 bp, Homo sapiens
agggcggggcgcgtagagtgtggggacgggggcggggcgcaggatccaggcgggacctggcgagggacgaagctggaagcgtagttaagcagtacagtatgctgccaggtggcgttggccga

SEQ ID NO: 145989 - DNA, 122 bp, Homo sapiens
gggggaggaggcgctggcgtccagcaggagctgctcatgctgggccaagtactgggcgggcgtctgcttggccaggcgtgcacagtgcaggagctcccgctgcagcaagggcaggtttgcct

SEQ ID NO: 145990 - DNA, 122 bp, Homo sapiens
ggggtcagggaccagtttggggggacggcaagggacggtcagcaggttggggatgttacgcgtgtccgtataagaggtcacctgagcaggcttagtgtgagccacaaggctgtttactcact

SEQ ID NO: 145991 - DNA, 122 bp, Homo sapiens
aacagaaactccttctccagctccagtgtctggtgcttcgtgtaggggcagcgcttcttccgaccactctttgccgtgagccagttggctgcgttttcacctttggaattgcctggcatgta

SEQ ID NO: 145992 - DNA, 122 bp, Homo sapiens
cctaactgaatgaattctgtaaagaccccttttccaatcaaggccgcatttacagattcccgacacgtcactgggaagccaccatttggtcctcaacatcccgtctcctccgcccccagatg

SEQ ID NO: 145993 - DNA, 122 bp, Homo sapiens
gcgtgtcggagcccggctggccattggtctggggggtcagagggccgaatccattgaccccgatgggcgccggaagacctgggagggtgccagggccgctgccaggcggggagttggctgct

SEQ ID NO: 145994 - DNA, 122 bp, Homo sapiens
tcacagtgctgatcatgccacttgcccactacacagcctacaatggatgctcttcatccacgcctacaaaataaggcccaatctcttcattctggtactccaggcccttcagaatctggccc

SEQ ID NO: 145995 - DNA, 122 bp, Homo sapiens
agtggtgttatgacaataattacgagagctcagtaatagaaactatgtttaactttacctcgctagcagccaggagtctagcacattataggtactaaacaatgttgtttagtacctataat

SEQ ID NO: 145996 - DNA, 122 bp, Homo sapiens
gggcctcggcgcatttccagggcgaatgagtccagggccctcggcctgcaggctaagcagcgaggacagcggcaggggggctccgtggcacggcctggggggtcaccgcgcacgcctaggcc

SEQ ID NO: 145997 - DNA, 122 bp, Homo sapiens
cttgatgtctggggaatcctttcggggaagatcacttcaaactcaataatgaggtccccacgtttctcgggtgttttggggagggggaggccttctccaggaacttttcgccgcatgccagg

SEQ ID NO: 145998 - DNA, 122 bp, Homo sapiens
tcctgttgcaaaatcaaggataatgtctaaaagttggccagagaaagtggggagcagtagcgatgtataacaatgattgaggagaaaaatcctgaacaaaatagctaaaagagttggaaaca

SEQ ID NO: 145999 - DNA, 122 bp, Homo sapiens
aaccctctctagggctactgtcgctctatatgcaccactgaccagtcacatgaccgtgaacgtcccaaagcctccttttcaccatctgtgaaatgaaggttatgacagtacctgcctcactt

SEQ ID NO: 146000 - DNA, 122 bp, Homo sapiens
tcagacaatccaaacatccaatggccaatatcacctggatggccaaccacactggatggtcggatttcatcctgttgggactcttcagacaatccaaacatccagcactactttgtgtggtc

SEQ ID NO: 146001 - DNA, 122 bp, Homo sapiens
taacaaagcgcctgagttaaagttcgagatttggtataaaaatgatagccacccttaccacgtgccaggtactagcccatgcattgcacataataacacattagcaaacatcaactcattta

SEQ ID NO: 146002 - DNA, 122 bp, Homo sapiens
agtgagggtgactggggaagctgccgttcatgagctcttgtcaccaacttgggaagctgccgttcatatgctcgtcaccaaagtcaagaataccttcttctgcaccacattctcggagattt

SEQ ID NO: 146003 - DNA, 122 bp, Homo sapiens
acatcggtagagattagtgtaactcaacaacaggcagaaaacatacaagaaagtttaagacggatgtctagcagtgcctgaactgttaagaagcaaacgtgagtaaatgccttagtttcaat

SEQ ID NO: 146004 - DNA, 122 bp, Homo sapiens
tcctcctctctgcactgtggcctagaaactttctccaggcagtatgctagggcactcatacgactcatcttgtgctggacacggtggctcacacctgtaatcccagcactttgggaggccga

SEQ ID NO: 146005 - DNA, 122 bp, Homo sapiens
tcttgggaagtgactttcagaggaatccccatgtcgtcgaaacgggcgctatgaccccgtcgggtgagagtctctctgagcaacccaaacagaaggtactgctgtgggtcccccacttggca

SEQ ID NO: 146006 - DNA, 122 bp, Homo sapiens
cctgcttccagcaagctaatgacgagatactggagagttattctgctttcccgacacagacggtggtgtttccaaatgcctgtcaatcagaggaaaaggtttgttactcacattatttctga

SEQ ID NO: 146007 - DNA, 122 bp, Homo sapiens
aggggaaggtgtgaagccccgggcctccgtctgccccgtgagtccgggaacgcgcgcccccgtggatgccacctggcccctgagctgtgtccagtcacagctcacatagctctgggcactgg

SEQ ID NO: 146008 - DNA, 122 bp, Homo sapiens
aatgttgaaataataacatttagtgtgcactcacgaggtgccaggctctgagttttatctcgtctagttctcgctgaaatcctgtaagatcagtaccatattctctcatttttcatagatga

SEQ ID NO: 146009 - DNA, 122 bp, Homo sapiens
gaaaattatggtgtaattcctcatgtcaatacataatttattttgtaataaataactacccgcatatttatggagcgcctctcccctcgtgtttatgatgctctcaggcactgtctctccag

SEQ ID NO: 146010 - DNA, 122 bp, Homo sapiens
ggtggtcaccaccagcacgctgcggaacttgtcaaacagcatgagcagctgggagcgccgcgtgttctcgttgtacataatctcctccaggtggtggcggccgcggaagtagtgaaggagcc

SEQ ID NO: 146011 - DNA, 122 bp, Homo sapiens
gagctggagagacacatccctttcgaatagaggcagagttatcaataactaaagagatttcggaggatagtagaaaacagctaatggctggtaggagcggggaaaaccttccctcctcctcc

SEQ ID NO: 146012 - DNA, 122 bp, Homo sapiens
cggtcccccaggagcggagacgaggcggccctttcctcactgtccccctgcaggacccgtcgcagcctccgctttgcaaaatctgtcctctccgcccagcaggagcagtccgtggcaccgca

SEQ ID NO: 146013 - DNA, 122 bp, Homo sapiens
tcgagtgtcgcatggagctcgcctgacccctgccggctgcccgcggggttgggttgcaaacgcgcggagccagcctatatggcctttgcctggggttcaaggcccccagtttgggatttcag

SEQ ID NO: 146014 - DNA, 122 bp, Homo sapiens
gccgcaggtcgggcctgaactgcaacagccgcgcctgcgcggacgaggcagcggcttcctcgttctgggcctgaggctgtggtagcagcaacacctgctctggcttcacctgcagcagccgc

SEQ ID NO: 146015 - DNA, 122 bp, Homo sapiens
cccacttcgcgggacgctcgctcaccatgacgcgtgcgagaacgcggtgcactcacccaccggcctagggctccgggcactctgcggaaactcgaccaattagagcccgactctggtctgac

SEQ ID NO: 146016 - DNA, 122 bp, Homo sapiens
cagatcacactctgttggcccacgcgtgagtgtagggatccctggttggatttgcactggcgctgggaataaaactagcacctgctgagggtcaggtgttccccacgaccccatagtcacag

SEQ ID NO: 146017 - DNA, 122 bp, Homo sapiens
gtacggcggttcgtcttagagcattttggaaatgtgggaatgcagagagacaagcaaacccgggaagcttcatggaaacggcagcctggattggcttgtaaagcaatcataatgccggatta

SEQ ID NO: 146018 - DNA, 122 bp, Homo sapiens
ggacgccaaggacccactcgtactgtgcgatcccattgaaaggacatgtccagaacaggccgatccacagagcagcccggccgccagcagcctaggggcaggtgatgaacgcgggtgactgc

SEQ ID NO: 146019 - DNA, 122 bp, Homo sapiens
ttatttatttggaggacattaattctcggtctgaggctgattttcaaaccgtttgcaaagcgcggctccattgttcgccaggcgcgcagaccccgccccctgctttgtgtgcggcgcgcgga

SEQ ID NO: 146020 - DNA, 122 bp, Homo sapiens
cttctacttgtcagcgttgtactacactctgagcaggcacccctgtgctactcacggaagcgggaccattaggtcggccattcctcctcaccccacgacacgcacccactgggtcgggccgc

SEQ ID NO: 146021 - DNA, 122 bp, Homo sapiens
cgcgtgcctcctcacgcacaccaggccaccctcggggtttccggatgtcgctgaggcccgcgtggatgtctccggacggctctgtgccctgaggccctgccccatggggcacatggagtcaa

SEQ ID NO: 146022 - DNA, 122 bp, Homo sapiens
cacttttataatctccaatgcggagtgtttctcatgactagcaaagggagggcttagggacgatgattcagaaattggcctgagccaaatgtgggtgtcagtctctggtgatatttgatgcg

SEQ ID NO: 146023 - DNA, 122 bp, Homo sapiens
ggcgagaaagggcaagccaggcagcagacgctggggggcgcgtggccaggctacccggatcgtccagcgcgacatggagtctgtgtgtcctcaccagtgctgcgtgacaggagccgggcacc

SEQ ID NO: 146024 - DNA, 122 bp, Homo sapiens
gcccctccctctctgccctttcattagcttaattacaccgtgcctatgacaacagagcaacggaaactgatacctcgggcctctggggcttgaattattcaaactctgtaaagcagcacaca

SEQ ID NO: 146025 - DNA, 122 bp, Homo sapiens
cgtgatccgcccgcctcggcctcccaaagtgctgggattacaggcgtgagccaccgcgcccggccttaagtaaattcttgtgtctaaccactttataatcggagccgttgtgcggggagggg

SEQ ID NO: 146026 - DNA, 122 bp, Homo sapiens
gctgccccaagctccaaatttgagcggccgaagtatcgcgagacctaagtatggctccggcgaccgtagcccaatctcgcgcaatgattgcgccacagatattcccatcccccattcagtga

SEQ ID NO: 146027 - DNA, 122 bp, Homo sapiens
gcatcaggacgtcacctgcagggagctggggcggggtacatgtgccggtccctgctttcacgtcctctggggacaccgggggtagggaccgctagaagagcagctcgtgtaatgtcctgtgt

SEQ ID NO: 146028 - DNA, 122 bp, Homo sapiens
ctcgagacgcccggatggacgagcgcgagcgcgagcgcggagtgggccggtcccagttggcgaaagggccgggtgtagctgtagtttttttattaactgtctgtgaaaaaagtatttaattt

SEQ ID NO: 146029 - DNA, 122 bp, Homo sapiens
gagaattggtagaaagtgaagcgccttttcctcgcgctgagggcaaagccagtgtgcagccgcctgtgggtgaggagcttttatgacaatgaatcccgtgttttatgggagggcagtgtgga

SEQ ID NO: 146030 - DNA, 122 bp, Homo sapiens
agctaatttttttgtatttttagtagagacggggtttcaccgtgttagccaggatggtctcgatctcctgacgtcgtaatctgccggaattgacctcccacagtgctgggattacaggcgtg

SEQ ID NO: 146031 - DNA, 122 bp, Homo sapiens
ggcaactgcactgtgtgtgctgccagacacagcccccagcttggcggactccagctgcttcgtccttttgctgctctgataatgcgcactgatgcccatttctttcctaaagggcctcatct

SEQ ID NO: 146032 - DNA, 122 bp, Homo sapiens
atcgaaaagaagaccccacaaaccccaaccccgaaaatgctccccaggtagagaccctcccgcagcagaggctcggctcaccctgccgctggcccaggccactgcgagcagcgccgcgagcg

SEQ ID NO: 146033 - DNA, 122 bp, Homo sapiens
tgagggctctctacttggcttgtagactgattagactgatgctttctctctgttctcatacggcatgcacgtgcacgcacacacacgcgcgtgcacacacacacagagacatgaagagacag

SEQ ID NO: 146034 - DNA, 122 bp, Homo sapiens
aaaaggcagtgacgaccgtgctctggggtgagtggggactcaggctccttcccagagacacgccccacctccggtgcgcggcagcttggggcgcaggtgagcccctcctttgggaacgaatg

SEQ ID NO: 146035 - DNA, 122 bp, Homo sapiens
aagctgccttgaaaagctaaactccatgcctaacttctgtctaaccacactttgttgccacgttaaactctggtatgggtctgccctagattgggcagaagggcctgtggttgggctattta

SEQ ID NO: 146036 - DNA, 122 bp, Homo sapiens
ccatcctgccccttctcagaaccagtcccctgctgacctcaagttctcctccttgatcaccgtggccagagcatctcgtgtggaccatctaggctccttgggcttcaagcaggacctgagcc

SEQ ID NO: 146037 - DNA, 122 bp, Homo sapiens
ctcggtgtcagcaagtggcctctcctcctgcttcctgtccatcttgctcgtgtgagctgccgtcctccagctccaccgcctcctcctgccaggaagggaagctgttggtgccgcaggctttc

SEQ ID NO: 146038 - DNA, 122 bp, Homo sapiens
gcctgcggtcagcgacgacccggcactcggcagctccctggaacgggaggggcaagcatacggcccgctcctctgctcgcgccccagcctgccgcgcgagacctccacgtggccggtttgcg

SEQ ID NO: 146039 - DNA, 122 bp, Homo sapiens
acaaattaaatgtaaattattaggccccgagttgatggaaagagttccccggggaggggccgctgggctccttctttgcagaaatgagtgcgtcgccctttaactaggcgcggaggctgcga

SEQ ID NO: 146040 - DNA, 122 bp, Homo sapiens
acacagtaaatacccgctgaatggatcaacaacggtgaagggaacgattctctgaatgaacgtccatcctgctggctctcgtgcccggccagggaacactagagggcgcgcttgacctgccg

SEQ ID NO: 146041 - DNA, 122 bp, Homo sapiens
ggtcgaagtgttacctactgatagctagcacagagtaggtgctgaggtcacagaatgtgacgagaatttcaagaaggagcggtgctcagtgttgcagagattaaggagtatgagattgaaaa

SEQ ID NO: 146042 - DNA, 122 bp, Homo sapiens
ccaaactatatagaaattcattccagatatatttaacagataatattaacaaagcgaaaacgaattaaaagaggtttactaccatggaaaatcacagtcaattaaaagtaaatacctgaact

SEQ ID NO: 146043 - DNA, 122 bp, Homo sapiens
ccaacttcgacaacaacgagctcgagaacaaccaggtggtggccaagctgggccacctggcgctgggccgcgccccgggcccaccgccagccgacgccgcggccgccgccattccgtgcggg

SEQ ID NO: 146044 - DNA, 122 bp, Homo sapiens
ggggaacgtggcgaaacccagtctccaccaaaaaatacaacaatcagctgggcgtggtggcgcgcgcctgtgaagtgggaggatcgtttgagcccggatggtcgagactacagtgagccgag

SEQ ID NO: 146045 - DNA, 122 bp, Homo sapiens
gctggtgaataggtctgtcctcacagtgggacagagagggggcggttctatatcagctggcgaatgggtccgtccttacagtgggagaggggcacagctctgtaccagccggcgaatgggtg

SEQ ID NO: 146046 - DNA, 122 bp, Homo sapiens
accagagaaaaatgaatgctctccataaatggaggccctgttaacccacggccttaaccccgctgtgtcccagcacaagaagtggtactgcattgctgactttgggcaggttccttaacctc

SEQ ID NO: 146047 - DNA, 122 bp, Homo sapiens
gccgccagcggaggttggtgttccaggccatgctgcaggggtgcctggccgggctggcagcgggcggttcggacgctcggaggccggcggggcttttgagacccgggcaggggggcggggcg

SEQ ID NO: 146048 - DNA, 122 bp, Homo sapiens
cccgcccacgcgcctctctccgggaaagttcctttcctagagttgaacaaatcaccggtccgggtccccagccaggcactgaccgtcgccttcctggagctcatggaacacgaagcccaggc

SEQ ID NO: 146049 - DNA, 122 bp, Homo sapiens
ggcgctttggacctcaggtgggaggccgggacagagcggccccctcgaggctggtacagccgggcccccgtgaccgcccggctaatcccctagagagaggcaaggcagcccagatcggcggg

SEQ ID NO: 146050 - DNA, 122 bp, Homo sapiens
aattaagcaatgccacatttggatcatgaacatggatataggatagagaaaaactgacaacggagaggtaaaagagatatcattacttcatcaagtcatgaatgagagaggccagtaggatt

SEQ ID NO: 146051 - DNA, 122 bp, Homo sapiens
tattaacttcaacatccaaacctgtggactacagaacctcatctctgtttgtgtagctctcggtaactatagaaaccacagggaatctgccctgatctccacatgaatgaagaagccagtac

SEQ ID NO: 146052 - DNA, 122 bp, Homo sapiens
ctgccacccacagcttgtgattggtttctttcttaaatccagtctcagggctgggcatggcggctcatgccagtaatcctagcactttgggaggctaagacaaggcggattgcttgagccca

SEQ ID NO: 146053 - DNA, 122 bp, Homo sapiens
ttctgggggtcagggctatgtccgtcccgcagccaagcccctcacagctgcatactctcccgccggctgcaggcgccgcctgcagctgaaccccacgcaggccttcttcctgctggtgaacc

SEQ ID NO: 146054 - DNA, 122 bp, Homo sapiens
gcgtctcacacaccgcgactgcgtgtctacaggtgccgcctcttgacgcctctgctgcaccgccagtgccccgctcggcaaagcacagcccctccccagcactgcagcaaatgggcaggaga

SEQ ID NO: 146055 - DNA, 122 bp, Homo sapiens
gccctgggagggaaagcagtcagcctgactctttggctctctctggagacgggggccctccgcttgggctgctggaacgtgctctgcttacagctggctctcagatgtgagcacaaattgac

SEQ ID NO: 146056 - DNA, 122 bp, Homo sapiens
gggccaggttccaggcccgagagcacccgaattgctagcgggaaagggctagggacacggcggacttcccagagatcggacacttgttacttgttgaaaaggcgccaccttccctgacaaag

SEQ ID NO: 146057 - DNA, 122 bp, Homo sapiens
ggcccattcttcaccagcgaagacgaagatgtgagtgtggggggcacctgggcagccgcgcgtctgcctccctgcctgcctgcccgcccgcctgttctgtgctgcgcatccacctctttacc

SEQ ID NO: 146058 - DNA, 122 bp, Homo sapiens
ccacctaccatagctgtgcaaggttctcagacacctcccacctgtcttaccccatgacaccgtgggggcctgtgtcattcccaaggacagctggtttacgcatatgcagaggaggcagctac

SEQ ID NO: 146059 - DNA, 122 bp, Homo sapiens
ccaaagcagtttcttgtcaatacacggggttcagtatgacacagaatcatggacttaacccgtcatgttctggtttgagatttagtgacaaatagaggtgggaagcttataatctaatttta

SEQ ID NO: 146060 - DNA, 122 bp, Homo sapiens
tattaccatatttatttctttactcccaataacaaccacatgaaggaaatagcatggccacggccgcctggctagttagcagctgtgctatgattggaacccatgtgcgtctgtctcaagag

SEQ ID NO: 146061 - DNA, 122 bp, Homo sapiens
tgtggagtcattctatttccaattaagcagtggggggattcaattacaagctgtgggaagcgaagagtttgtgtcaataaaccagcagtggtattaagggtggttgtctggtttgcaaacat

SEQ ID NO: 146062 - DNA, 122 bp, Homo sapiens
tttaaaatagggcattcatgggcttttgggggtaagtgacacctaatcttcaggggtctgcggataatttctaaatggggctcacagtttattcctccctcatagggaggctgcaattacct

SEQ ID NO: 146063 - DNA, 122 bp, Homo sapiens
agttcccctctggtggcagagcgcctactagcaacagtaagccctaggaaagaaagaaatcggagcaggtggggaataacatcttggggcaaagacacactggcaaaatctaccaggtaacc

SEQ ID NO: 146064 - DNA, 122 bp, Homo sapiens
gaaccactgcgtctggccgatatattacaatttatttacccattcacctgttgatggacacgtgggttgtttccagtttatagcattgtgaaacaaagccagtatgaacatttgtacatgtc

SEQ ID NO: 146065 - DNA, 122 bp, Homo sapiens
cggtgcaccgcaaggagcaaaacagacacagttcttggtcctagggctcacgtcccggggcgaagaggatcctccataaacgatcaggtaaacacatgggtgtcagggaaggctcgccgctg

SEQ ID NO: 146066 - DNA, 122 bp, Homo sapiens
gtagccccccttacagacacttccttgggaatggggtctgagagcatctggtcatttcctcgcctaccaggtccgaaggccaggaagatgccccgcatgtccatgagctcgttgtcgtagcc

SEQ ID NO: 146067 - DNA, 122 bp, Homo sapiens
tgattcccaatctcctgtcccgcgacagcgaaatggagaaagccccacctttctgaatggcgtggaatgcaattagggatctgattatgatgcagaacttttagaatgagtctatttctttg

SEQ ID NO: 146068 - DNA, 122 bp, Homo sapiens
aggacatttcggggagcccaggtcctcagagcgtgggggtgttagctgccctgtgcaaggcggtcctttattggaaatcgcctcagagagcattgctgagtgtggcttcttgcaactacacc

SEQ ID NO: 146069 - DNA, 122 bp, Homo sapiens
gggggggcggcggggaacattggctaagccgacagtggaggcttaggcaccggtggcgggcggctgcggttcctggtgctgctcggcgcgcggccagctttcggaacggaacgctcggcgtc

SEQ ID NO: 146070 - DNA, 122 bp, Homo sapiens
ttcaaagccacttcagcttataaactccatattagaccatccaggcccagaagacgccaccggcctacaggcagagtcagcggaaccagcctgggctggatctccccctgcgaggcccccag

SEQ ID NO: 146071 - DNA, 122 bp, Homo sapiens
gtccccgtgtgcttcgtaacacttgccaccgttgatagaattgaatgatcgcttgggtaacgtcttccccgactggcctgggaggtctgggagtacataaaccatgcatgcatttgtccatt

SEQ ID NO: 146072 - DNA, 122 bp, Homo sapiens
ggggtggaggaaatgcctctttaaaatgacgtcattataggagacttaaaaaccactgcacgtctgtacaagtggacagaatcacacagctacctaaagtgggttcacctgtcatacagttt

SEQ ID NO: 146073 - DNA, 122 bp, Homo sapiens
acagagttagaaaacaggaaggatttcagacaaaatccacgagtaaagtccgtgtggaggcggctgagaaaggctttgtattgcaacagaggagcagaatttagaggcagggaagtgctgct

SEQ ID NO: 146074 - DNA, 122 bp, Homo sapiens
ggggtgctgggaggctcccagagggccgctttaacagagtggcaaagacagaggagtgggcgggtaaccagcaagcagaagcagcacacagagagtactcttataagtcagtgagaaagggc

SEQ ID NO: 146075 - DNA, 122 bp, Homo sapiens
ttaaagccaattctttccacaatgggatcaaacacagggggatgaagtgccctcagggcccgagttgtgctgagaggagcttgggagcatcccggaccaccaccccaacccctttcctggtg

SEQ ID NO: 146076 - DNA, 122 bp, Homo sapiens
caggcctgggactggggaatgggctaagggtcccatctgtggagcagctgtgaggcccctcgccagcccgtgtggacgctggaacaccgtgtgcagaggctgctgagcagaggggcttcctg

SEQ ID NO: 146077 - DNA, 122 bp, Homo sapiens
cctcagatgaattcctttatttcacacaaaggttcaccattctttagagagttgcattagcggatattcatgctaatggtggtgtgacaattactcaggtgctacctggagcagctcttcta

SEQ ID NO: 146078 - DNA, 122 bp, Homo sapiens
caacatggtgaaatcccatctctaccaaaaataccaaaattagccgggagtggtggcgtgcgcttgtaatcgcacctactcgggaggctgaggcaggagaatcgcttgaaccgagtagacgc

SEQ ID NO: 146079 - DNA, 122 bp, Homo sapiens
aaacaagtagcagcatctgaattaaagtgacagtatgatggatgactactgaaaaggaatcggagccgtttgcagcattttgggctagatgtgggaattctgcctcagaggcaaggagcttg

SEQ ID NO: 146080 - DNA, 122 bp, Homo sapiens
acacttgaatgcaccggggcagtggttttccaagaagccttttgaaccgtgaaccaaggccgggcagtacaaaccacaccctctggtttgctgtgggcgcatttgtgcctctagtttttctc

SEQ ID NO: 146081 - DNA, 122 bp, Homo sapiens
ataatcacagtttattaggaaactgaatttcacaaaagagagagcataaagatgggctttcgtgaatgggcaagatttgattaacccgatgaggaaaggggcattcaaggaagaagccatgg

SEQ ID NO: 146082 - DNA, 122 bp, Homo sapiens
gtgctggttctcctgcacagcgtctagcatgttcaccagcttgtccaggagcgtgagcaccgtgactgcgttcacctgtgagttgtcccggatggcctcctctgtgttccctaggttcaggc

SEQ ID NO: 146083 - DNA, 122 bp, Homo sapiens
ccccaaggccaccagtagaccttaggaacatgatgtacgctgaagttcattcaaataacacggtaaagagactggccaccatgttttatgtatcttaaattaggaataaggggaacttcttg

SEQ ID NO: 146084 - DNA, 122 bp, Homo sapiens
tgcacaggtggggcgtcaccgtggcctaatcaaataacttctccccaatttgaggtggggcgggggagagaactatttttgtgggaaagcggtttagtaaataaggtatattggggctctag

SEQ ID NO: 146085 - DNA, 122 bp, Homo sapiens
ctgggtaaaagatgatgagaatggcctgcagttgtccgtgaggtcgttcagaagaccagacgaatcccaggactaataattctcaaaattaattaaaccctccttcccaattataagagaat

SEQ ID NO: 146086 - DNA, 122 bp, Homo sapiens
gattaaaagatacagtaggaaaatgactatagccatatttcagacatttcaagatatcagcgtgtcttgagacgcatgcttggtgaaggttcttaaacccatacctgtgctgggtggacaag

SEQ ID NO: 146087 - DNA, 122 bp, Homo sapiens
tttttgttgtcttatttttgcttttgctattagaaaaaaacactggttcccaactcctcacgtgaaattttccagattagtgatttttacttgggatcaagctgaatgcagagtctgcttca

SEQ ID NO: 146088 - DNA, 122 bp, Homo sapiens
ccgctgccagcccattagctctccctgcttcccatggtctgccgcatctggggtatccagcgtcctcctgcagccgagggggaattctgaatgttttgctagaaaccgtctcatcaacattc

SEQ ID NO: 146089 - DNA, 122 bp, Homo sapiens
tatactgaaacatgcactgccagagtttgaaccaagttctgctgaagacctgtgtgaccgcggtaagtcatgtaaatatgaaccgttccccaatttgtaaaacgtattcttttcatgtcccc

SEQ ID NO: 146090 - DNA, 122 bp, Homo sapiens
tgctcgagtggagggaggcggttttcctgtggagacaggtggctgagccccaagccggtccgccatgcccctcagccccattattccagtcaggaacgcgacgaatcatggcataatggtta

SEQ ID NO: 146091 - DNA, 122 bp, Homo sapiens
tacctgaagagcagggctgcaggagatccatgaccactgagtcggcccccttggtgtagacgttgatctcatcggtaagcgggtgccggatcaccactgacatcctcttgcggacggaatcg

SEQ ID NO: 146092 - DNA, 122 bp, Homo sapiens
gggctaaagcggacgggctgggcggcaagggcgagccgggcggcgggccgggggagctggcgcccgtcgggccggacgagaaggagaagggcgccggcgccgggggggaggagaagaagggg

SEQ ID NO: 146093 - DNA, 122 bp, Homo sapiens
caagtcttcagttctcaaagatcaccttttaagcttcattcggaacatgacacagccacacgagtcctagccctgaatctcacgaagacctcagtacacctggaaaaggcagcacacccagt

SEQ ID NO: 146094 - DNA, 122 bp, Homo sapiens
ctcgatctcctgacctcgtgatcctcccgcctcagccttccgaagtgctgggattacaggcgtgaaccaccacgcccagccatatatcaggaacttgagcatccatggagtttggtgtccaa

SEQ ID NO: 146095 - DNA, 122 bp, Homo sapiens
gcctcgagggtggggccgagcggagcacggccgagcaggatgggggccaggcctcagggacgcggtcacggccgaagggcggggcctcgcagagcctcgcagaacaggccgggatagaagac

SEQ ID NO: 146096 - DNA, 122 bp, Homo sapiens
ctcccacagatgctgccaggtttgttttgtacaaactgaaagttaacttaattgtgagaacggagacctcatcactagctgcatgttttggatttgggggcatttacatttgtgttaattat

SEQ ID NO: 146097 - DNA, 122 bp, Homo sapiens
agatttcacataggcaactgcattttcccgagcatcccgagttgtaaactgtggtccaggcgacttgtagacattgtgaagacttacggtgtcttctgagaggtgatgctggcgtcccctcg

SEQ ID NO: 146098 - DNA, 122 bp, Homo sapiens
agaacccaggcccgccctgctccgaaattcttcagacctgatgaagaggtgtcccagaagcgggtggtgctccaggcccgcctcaccagctccagggaggtcaaggttggagagagacaatt

SEQ ID NO: 146099 - DNA, 122 bp, Homo sapiens
atattcgaagcctttgggccatttgcaaacagcacattagccacacccaggtggcgcagacgcccggtggacacctacagacctgcttcaaatgcacggagccccgacgtgagcagctcacc

SEQ ID NO: 146100 - DNA, 122 bp, Homo sapiens
tgggagaggacaaagtcagacaagcagagatgggcaggaaatcaagacagcacccaaggccggcgaacctggcgatcgggttagcaaagggggtatcatccatattcacaggctgaggaagg

SEQ ID NO: 146101 - DNA, 122 bp, Homo sapiens
acatcacagtgaccgccactgaccggggaaccccgcccctatccacggaaactcatatctcgctgaacgtggcagacaccaacgacaacccgccggtcttccctcaggcctcctattccgct

SEQ ID NO: 146102 - DNA, 122 bp, Homo sapiens
tgaggaccctcccgtgtcagcctaccccggggccgaggggcggtccaccgcccaatgatgcgccgagcttctcccgagagtcccgcccccagcgcgccgctggccaatgaggaccgagcgcg

SEQ ID NO: 146103 - DNA, 122 bp, Homo sapiens
gcaccctccagccgccacaatgcaaagccacatgctgctggccaaggggcccgagggggtcgctgaggtgcaggcatggggagtgcagccggggatgccgtcctgagcccagcgccggccag

SEQ ID NO: 146104 - DNA, 122 bp, Homo sapiens
tccttgaatgttaaaaggctaaaaactccactagtcggaagtgacgtgccagcttagccccgcaggtccgccacgtaattggccgccgccacagctagccaccctctccccagactggcccg

SEQ ID NO: 146105 - DNA, 122 bp, Homo sapiens
cggggacctttttcccgtggcgggggcgcagggtgggggacccctaagaagtgcacagtgcgcggggccctctttccggcccttggagggaacggggtaccggggatgcagggggtagggct

SEQ ID NO: 146106 - DNA, 122 bp, Homo sapiens
gcggcgctcacgctgccagagcccgggcggagtgcagtcgcctccaaagccttagagcggcgccccagtcactgcagctcttcaccctagagctgtgccctgggaccacagagaccaagagc

SEQ ID NO: 146107 - DNA, 122 bp, Homo sapiens
ccaggcagggccgatcgcgtttcagtgccggaaaggcgggcgggactcccagttttctggcgaccggatgggcgagtcttcgtcgggcctgcttagaccctgagggccgtttagattacagt

SEQ ID NO: 146108 - DNA, 122 bp, Homo sapiens
gtcccttgcaggcgctccacccgccctcgggtcaggagccagggctgcgcccacactcaccgcgttccgcacccccagctcggccccatagagcagcagtagcttcatggctttgtagctgc

SEQ ID NO: 146109 - DNA, 122 bp, Homo sapiens
caaatccctattgcctcggttcttacccaatgccctgtcccaggatcccacccatggccccgcatgacacttgctcgcatctccgtaggctctgcctggctggggccgtttctcagacgttc

SEQ ID NO: 146110 - DNA, 122 bp, Homo sapiens
cacttcacaattcagtcccatcacccaatactgactccagagagaactctggaagtatgccggaatgacacattcagtcatagcaccaagcaggccagatgggacccagcactaacagaagt

SEQ ID NO: 146111 - DNA, 122 bp, Homo sapiens
tcagcttccacggaatccatgcccacatcttcataatcctccagagctgccagatcctcgcgggcctcggagaattcccccactgccatgccctcccccacgtaccagtgcactaaggcgca

SEQ ID NO: 146112 - DNA, 122 bp, Homo sapiens
tgccgctccggtgacagtctctgcggaaagtcacgtttgtgatttcgggagagcacagaacgggacgacggcgctcttgctgggtcatctgggccaggtgacgaagaaacagtttcctggtg

SEQ ID NO: 146113 - DNA, 122 bp, Homo sapiens
cggccctcccaaaacttccgtcttccctaggtccaacggggtggacccaaggcccaggggcgtccccggaagtgacgtaggacgcgccctccattttgtggagcgccagagctgctaagtgc

SEQ ID NO: 146114 - DNA, 122 bp, Homo sapiens
gctcaccccggttcccgccgccccggagcacgctcctaaattgcggcgccgtcgctatggcgtcactgccctcgcggccaatccaagggctgcgcgcgtgtcccttacgcatttccgtcgcc

SEQ ID NO: 146115 - DNA, 122 bp, Homo sapiens
cagctgtggcagaaggttgtggcagcgggttgccttctgtctcgggggtcttgaggctgtcggtccggacgatgcaggtgaggcagtgtcagttctgcatcaggaacccctcgcgctgtaat

SEQ ID NO: 146116 - DNA, 122 bp, Homo sapiens
gggaaaggcagacaggtactgacttattctcttctccttgaagcttcgtgactgccccgacgacatccttctcctctggtgcgtgcagctcagagaccgatctccaggagtttaatccagtc

SEQ ID NO: 146117 - DNA, 122 bp, Homo sapiens
tgccttgttggtgacagagagaccctgctcagctctacatttccttgctgcacgaggccccggtgccctcagaggtggtccctgagagtgccagagaggtggaggtggtgacaggtggtaag

SEQ ID NO: 146118 - DNA, 122 bp, Homo sapiens
catagtcaggtttggaaacttatgatttagtctctgccagttctttccaaggggctggtgcgtctgtaaggaagtgttcaccagtctacgtgaaatacatgtgtatttctcatgcatctgag

SEQ ID NO: 146119 - DNA, 122 bp, Homo sapiens
aacctgggcttccttccaatcggagcaatttcaaatcttcatgctcgttcattcctataccggctaattctggtttggcagggaaaaaaaatgcagtcacctcacatgcacactcttgtggc

SEQ ID NO: 146120 - DNA, 122 bp, Homo sapiens
gtttcgtggaaaacagacatgaatgcttttcaatataatttcatctcctaggcaatggagcgcacgtgactgacaaggctgcctgatagctggagagctttctcagaacagtgagcctagag

SEQ ID NO: 146121 - DNA, 122 bp, Homo sapiens
aaacgctaccatatgctgccccacgcccgccaggagatgcagacgccccgaacccggccgcgcctctctgcaggtatgaaggggcacgccccgaacctcccaagaagcagtgtcttgggctc

SEQ ID NO: 146122 - DNA, 122 bp, Homo sapiens
tctgtcagctctcactttgagagacccttcatttaccactcatgaaattagctctgcaatcgcaggaggctctctgatggggaattagtcactgttgcaaaaaagtttagactttactttca

SEQ ID NO: 146123 - DNA, 122 bp, Homo sapiens
cccaaaggcaccgatggagtgcagggtagccgccgccctcaggatttatcaaccgcgaggcgctgtcagcaactcgtgcccggaagccaccccgccccggcacacacatactccagcgcccc

SEQ ID NO: 146124 - DNA, 122 bp, Homo sapiens
ccactggccctacacccattttttttcttctccagctacacccctttgatggagtcccatcgtgctttccatcattgaggtcataactgtggacctccctggaaggtctttaagctataggg

SEQ ID NO: 146125 - DNA, 122 bp, Homo sapiens
caagcggcaggcgcaaggtcacatcgcagcaagtggcagtgaatgaacgatctaagggagcgactgagggcgcgtgacgggcccgccgggcactggttcgtggagcgtggcggttacgggcg

SEQ ID NO: 146126 - DNA, 122 bp, Homo sapiens
gtggaagagaaaagcagcggaatgggcgggctgtcgaacaaaaggcggcgagggaggtaccgtgcagagcctgctgggccttctgtcccatggccccgcacaccggactcacccagcctcca

SEQ ID NO: 146127 - DNA, 122 bp, Homo sapiens
ggcgcctctcggccaggtacgcggccggctgggataggggtcgcgggcgggctttggtcgcgcagcagccggtcctccccggaggtaggcgggcgcgggccctgttgggtctttgggacgcg

SEQ ID NO: 146128 - DNA, 122 bp, Homo sapiens
tggccaacatggtgaaaccccgtctctactaaaaatacaaaaattagttgggtgtagtggcgggcgcctgaaatcccagctacgagaggctggggcaccagaattgcttcaacctgggaggt

SEQ ID NO: 146129 - DNA, 122 bp, Homo sapiens
cccctgccccggcccggggagagctcgctgcagccggccctcgggttccgcggagggcgtcgcttgtcacctttccgccaggtttagaactcggccgtcaggtgtaggacgcgccggggagg

SEQ ID NO: 146130 - DNA, 122 bp, Homo sapiens
cggccgccgccgccagcgactgcggcagcagagaggcacggagggcagagtaggacgcggcggccgcggccgcggcagaggtggccacagcgggaggccccgccagcctcccgggaggcaca

SEQ ID NO: 146131 - DNA, 122 bp, Homo sapiens
tagctaagaaataaatacatctcatctaacacacacgacaaagagaagctgtgcgtgccccggggtgggtatctagctctgagatgaactcagttataggagaaaacctccatgctggactc

SEQ ID NO: 146132 - DNA, 122 bp, Homo sapiens
cccagagtcctcatttgcatcttactttgctctcccgccctttgccttttctaagtggagcgtcctgatccatgatcaggagacgtatttttaaaaaggatcgtttgattaaatgggtactc

SEQ ID NO: 146133 - DNA, 122 bp, Homo sapiens
gagctgcggcgcgagccggcgctgaatcgtcgccgtgccctcccgtccacttaggaaagccggggcggcttggcaatgggcatcctcggccctcaatccaaggtccgcaccttcccgtacgc

SEQ ID NO: 146134 - DNA, 122 bp, Homo sapiens
attcactgggacctactggttccctttcccaagcctcgcccctctcagccctgcaagttgcgtggttgtgtttacaaattctgccacaattgcaaaggaaataggggtggggggagcggtcg

SEQ ID NO: 146135 - DNA, 122 bp, Homo sapiens
gaagcttagaactgaaagggaatttaaagatcattcatcccagtgcttttcaaactgtaacgtcttataaatctcctggggatcctgttaagctacagattcctgattcactgggcctggga

SEQ ID NO: 146136 - DNA, 122 bp, Homo sapiens
gggtgaggcagtgcccttgtgaatgcctcctgagagttgctctggttcaaaggaaggttacgggcggaaggatgagggtgggggtgcaggaatctctctagtggcagaaggggtatttccta

SEQ ID NO: 146137 - DNA, 122 bp, Homo sapiens
cgctggcgccgcgggctacgttcagtggttgccagagagacacgtgaccggcagcgggggcggggcctgcagggagccacgccccgcacagttaacagacgggcgctcagggagctagggag

SEQ ID NO: 146138 - DNA, 122 bp, Homo sapiens
gacatcagcatatagatcggcctttcatgactacactcgggaaaacatctgcgtctaccccggcctggcctgtgtgttttctccgcagcacggctctccacgcgtgatgtgacatgagggca

SEQ ID NO: 146139 - DNA, 122 bp, Homo sapiens
acaagagatagccttgaccctgtatcagaaggctggcaaatgaactgatatttatgcactcgataattcaagaaaaatgttttcagatttgtgtgtatcatttttaatgactcctctttaaa

SEQ ID NO: 146140 - DNA, 122 bp, Homo sapiens
ccactctggcagaggcctgggggctgaggcccccactgctgcctggcaagaggctgtgggcgtgacttccagcctcgcaaaaccctcacataaatcacctcctctctctgggattcgatctc

SEQ ID NO: 146141 - DNA, 122 bp, Homo sapiens
aatttaaatatattagcatatcctaagaaacccaggtatttgaatgttcctaagacagctcgaagcctttcctaaacaagcatgattaaattacttggagcacattgaaacagcacacatgg

SEQ ID NO: 146142 - DNA, 122 bp, Homo sapiens
cagcagctaaagcagtaacagcaggtctccttcagcagcttgccacagggaagagggtcccgcgtgaaccgaactcaacttccacctgcgcagaggtagctaccatttgcgtagaggtagct

SEQ ID NO: 146143 - DNA, 122 bp, Homo sapiens
aggctccagggaggatgccgcctctccgaggctgatggagagattggccccaaagccaggcgaggacaatgagtgaagaagctcaactttgccaaagcaaatcagcctctgaaaaggcaggg

SEQ ID NO: 146144 - DNA, 122 bp, Homo sapiens
tcggggagcaggtctctgatctcaacatcccccctcttctgcagcagaagctgactccagcggcctggcttttgcctccaactctctgcagcggcgcaagaaagggctcttgctgcggccag

SEQ ID NO: 146145 - DNA, 122 bp, Homo sapiens
ctcaagcgatctgcacgcctcggcctcccaaagtgctgggattataggcgtgagccaccacgtctggcctggaataattttaaatttataaaaaagttgcagagatagctcaatgagctccc

SEQ ID NO: 146146 - DNA, 122 bp, Homo sapiens
gggagaatgaaggaggcccaccgagcccccgacaaagctgcaaaacccaggagacgcgcacgcgggaccatcacactgtcaagcagaccggggtgcacaatagagggaaactctggggttga

SEQ ID NO: 146147 - DNA, 122 bp, Homo sapiens
taatcagccgggcgtggtgcgggcgccgggaagactgggcggggcgaaggcatcacctttcgatggggccggcgctgtgcgtcctccagtcgaggtggggcgctgtggaagagcggcagctt

SEQ ID NO: 146148 - DNA, 122 bp, Homo sapiens
ctggcagggcagggagggcgctcaggtggtttaactcagcgccgggatcccgctcagctgcgggggccgcgaaccccgccgctgggccgacgattgggcccctccggagcgcggcgcccaac

SEQ ID NO: 146149 - DNA, 122 bp, Homo sapiens
ctgtcgttccaggaggctcgtgctccaggaggctgtcacgcacactgtgctcctggcaggcgcaaaggccctgagggtggacgctggcaatgaccctgccgccagccaggtatggtgagcct

SEQ ID NO: 146150 - DNA, 122 bp, Homo sapiens
tcggcgccctgcagtacttgggcatggctatccagcccccgctgagttttgccgggtcagcggctgcactttggttctcgcggagcgccgcctaaccccgccccacccgcgctcgccgcctg

SEQ ID NO: 146151 - DNA, 122 bp, Homo sapiens
aggttcatgtcatacgggtccgcaggttatgcactgcacaaggcctgggagcgccatttacgtagacgttcacgtgaaccgtgcccccttaagttgtgcgaaatagtggccactcatctaaa

SEQ ID NO: 146152 - DNA, 122 bp, Homo sapiens
tatggaaataaggagccttctgtttctgtttttttatgttcacaagcattgtcatggactcgaggttttctgcagaggaacacaacataaggagcatcagtttgctcattcacatctgggag

SEQ ID NO: 146153 - DNA, 122 bp, Homo sapiens
ccacatgatgtccataggcattaaagtcagaaaccaggaaggtgaagggggaaatgtctccggagagctttataagtgagacactctcatatcattcaagctcagtcctgcttggggatagg

SEQ ID NO: 146154 - DNA, 122 bp, Homo sapiens
tttcccggtcagtccctggcccgggaaccgaagctgactgactgctggatgtgctgggtgcgatgcgagtgtgagtgtgttttcgcactccagtggtggggcatcgacaagctcgacccatg

SEQ ID NO: 146155 - DNA, 122 bp, Homo sapiens
ccgaacccctggcggccgcgaccccggctcccgccccggccccggcccgacccgccatgacggggctggaggaccaggagttcgacttcgagttcctcttcgagtttaaccagcgcgacgag

SEQ ID NO: 146156 - DNA, 122 bp, Homo sapiens
gaaagccccgcctgactccgggctgcaggagggggcgtgggacgggggcggagccgttggcgatgacaacagccccacgtgaccggccaacactgagtgttgtctcgctctggcgtcagagc

SEQ ID NO: 146157 - DNA, 122 bp, Homo sapiens
ttcgcttgcccccacgactgcagagtagagcacctgccacctctccccaggaaaggcaaccgaatgccaccaactgaaggcacccactgaaggcactaaccgaaggccggttgccctgccaa

SEQ ID NO: 146158 - DNA, 122 bp, Homo sapiens
ggagaggcggggtggggatggggatggccgcagggaccatacctgtttgtaccttttgaacgccgcagcgggtggtgagggtttacggagcgggggaggggaagctgactccacgagcccag

SEQ ID NO: 146159 - DNA, 122 bp, Homo sapiens
gcttccaaggtgtcccctccggagttgcggggaaggcagctgccttcccggggatctgggcggcccaccctgctcattttgcgggcgaggacaccgaggcgtcggaagtggagggactgcct

SEQ ID NO: 146160 - DNA, 122 bp, Homo sapiens
ggaagagaaaactgccactgcagaggggctggctgaggggctgggatggggtccccggggcgcggagctgcacaccagcccctcgcacctaggcagaaggtccattgccctctgccccgcag

SEQ ID NO: 146161 - DNA, 122 bp, Homo sapiens
aagcaacactttgtgtctcacgacctgagggcccagcaggtgtggccggcagccaaatcccgacatctgcacttcctccaggctcctgcccctccccacggtgtgcccagcagtctcctttc

SEQ ID NO: 146162 - DNA, 122 bp, Homo sapiens
gctgctgtttggcatttatagacattttaggttctgatttgcctgaaagccatgagactacgttcttgaagctctcaccagcatagaacttcagctgattgctatgggagtgaagagaaaaa

SEQ ID NO: 146163 - DNA, 122 bp, Homo sapiens
agataataagtgatctcatactttctgtatctcaatcactagtgtcttcagggaagatgacgtaatgagaaagagactgttcttgctcctcttgggcaatacttgtctgtgtctgccctcta

SEQ ID NO: 146164 - DNA, 122 bp, Homo sapiens
ggcgagtggtccctctgcacacggtatctgggccgagtctggattcattagagtccccggcgcccagcactgagtggcatgcataagtattggtgtcacgaacaacggtcagcccccggctt

SEQ ID NO: 146165 - DNA, 122 bp, Homo sapiens
gaaaaccaaagcccaggatcacttacatgaaattttctgggtattcactcagggccatgtcgatgatgttcagagcgtcatggtaatgcttctgtgctgacagcaggagggcaaggaggtgc

SEQ ID NO: 146166 - DNA, 122 bp, Homo sapiens
ggatctggtgcttttttctccagtgtataactttatatgccctctgactacagacatgggcgcaaagctgcatgggtgatgaactgtaacgggctggactccagcacatcccgcaggaatgt

SEQ ID NO: 146167 - DNA, 122 bp, Homo sapiens
agtgtgtgacacagcgtgcagcaggagcaatgcatggaacacacattcacttagagataccggtttcccagttgggggaaggtgttttttcataaaatgttttatggcaacactctcacact

SEQ ID NO: 146168 - DNA, 122 bp, Homo sapiens
gggcgcctgggaggtcccaggccggcggggcgcgccctgctgtaggcacccaccgaagctcggtctccaggcgcagctggacgcggaccccgccctactccagtcttcatccggtcgcccgc

SEQ ID NO: 146169 - DNA, 122 bp, Homo sapiens
cttccctaagtcctttggtccttcatctttatcaaggactcacagtctctcttgggtatccgataagagtttgtacggtcagtttcgtacatcttgcctaatctatttttgtccaatatgat

SEQ ID NO: 146170 - DNA, 122 bp, Homo sapiens
tcctggccaaaccagaggaaaaatgtttcatgatgggaaaaacaagacaccagccccgggcgcgtccaggtctccactggctctcccgagcctggcgtggctgagctgcagcggggggcctg

SEQ ID NO: 146171 - DNA, 122 bp, Homo sapiens
gcaccccaccaagaggaaggcgtgcctagtggggaggcggggctccaggggccgggcacacgcagacacactcctgctctctctacgcacgttctcacactctcattcacaccgcactcacc

SEQ ID NO: 146172 - DNA, 122 bp, Homo sapiens
tctctctctctttctctgtctctctctctttctctgtctctcataaggaactaaatcctgcgttttctcaccagagggctaatgacacactgcttagtcacccaaaacctgtttcctaagga

SEQ ID NO: 146173 - DNA, 122 bp, Homo sapiens
aagacggcctgcgccagcctataggaaggcggtagacagcctataggcgctgtctgcgggcgggggggcggagaccgcgctcgcgaagagcccgcggattggcaaggccgagggaggctgcg

SEQ ID NO: 146174 - DNA, 122 bp, Homo sapiens
gtgaaaatccctatcctgttttgttccggtctaattactggtgcatgcagcctccactcacgtaccccctgcttgctcaatcgatcacgaccctctcacgtacacccccttagagttgtgag

SEQ ID NO: 146175 - DNA, 122 bp, Homo sapiens
gtcttacaaatactcttatgccagcagggggtggggtaagcaagtaggggagtaggtgaccggtagagtctggagtcagcaggccttgttctgtttgtgttgtgctgcagtgggggatgcat

SEQ ID NO: 146176 - DNA, 122 bp, Homo sapiens
tgacttgacaaacagtgggtcgagggtcaaggccctgttctccctggagaacttgctgtgcgggaggatcccctctccgtccctcccgggctcactttcacttccctctcctcagcttctgt

SEQ ID NO: 146177 - DNA, 122 bp, Homo sapiens
tcctctctttcttccgcgccgctcccgccctagtcctcttagacccgcgaccggaggctccggaagaccccgagccccgcccgctccgtgaccccgcccccacccgtcccgcccctgaaagc

SEQ ID NO: 146178 - DNA, 122 bp, Homo sapiens
gacccggcggtccccttctgcacgcctgaaagcctcgcgtgttaaaggaggaagtggctgcggagaccctcgagtctgcacgggcaagaggcacaaacagctgctacccggccccttcagtt

SEQ ID NO: 146179 - DNA, 122 bp, Homo sapiens
ggctttacgagtcgtgtgtgtgtgtgtgtgtgtgtgtgtgtgtgcacgcgcacgcgtgcgcgtcctgagaactcggcacaggtgtgggcgcctacagccgaaagcaaaacggcccgcacttc

SEQ ID NO: 146180 - DNA, 122 bp, Homo sapiens
ctataaaaccggcgaggagggtgctgctgaccagggcaggggacaggcgtcggggaagcccggggccgccagccgcagggccaagcccttttctcctgcaacgtctctggcgccctctaccg

SEQ ID NO: 146181 - DNA, 122 bp, Homo sapiens
cccggtccgtgcattctggttgtgaaggctgagttctagagatcgggtcggctttctacgcggctctcgtggaacctagcaaagaaagacagtgaagactgcaggaccttccttcgcgcttt

SEQ ID NO: 146182 - DNA, 122 bp, Homo sapiens
tgggtgtgcacaacctttcacaggctctaattgagtcgagggtgatttataacacggcagcgcccctgcccgcgtgggctgcccctcctgctacaaccctggccagtctttgaccaacccct

SEQ ID NO: 146183 - DNA, 122 bp, Homo sapiens
agggctcttcagttcttggggtcttttggttttgtcatcatgaggcacttccttcatttccgtgttagctcatacctgacattctgatggaatcaacttttccattcggtgtgtaaccaaca

SEQ ID NO: 146184 - DNA, 122 bp, Homo sapiens
aggttgaccttaaagctggtctggttgctcaccggaggagcgacaacgacccctaacagacgtaaggaatcgggaattaaacttggaatattggttagtacattcaaatgcgcttccttaac

SEQ ID NO: 146185 - DNA, 122 bp, Homo sapiens
agccgggccctgtgttctgcacctgcctgtgacatcatcccacaagatgaaatcatcccccgggctcactgcaggctcctgtgcagtcaacagccctttgaggtggtggagaaggcctgccg

SEQ ID NO: 146186 - DNA, 122 bp, Homo sapiens
gcaaatcagaaggagacctttaattccaaacatgtgcatattgtctcacggattcaggaacgttgacaacaagtaaaggaggttcattcagaacaggttgctcatcttggaccccagctttg

SEQ ID NO: 146187 - DNA, 122 bp, Homo sapiens
gcgggggcgcacgtgtctgcctgtagccacagcctaggatcattgccctgcacagttggacggcttccacgcctcgtctagttctcactgcattcttatagcaggacaagttctctggattt

SEQ ID NO: 146188 - DNA, 122 bp, Homo sapiens
tcggaaagaaaccatgcactgcccaagggctcccagtgggcagcaagccagggtgagacccgggctgcacgcgcggcgccgcggaaagcactcgcagggacatccgcctggcgcccagcagc

SEQ ID NO: 146189 - DNA, 122 bp, Homo sapiens
aaatccatatccgtattattcacgaggcactaactagaaagctgtttatcctgaagcctacgtggtcaactttagaaatgtgccttcgtgtaagctggtttttataaaataaataaaaagcc

SEQ ID NO: 146190 - DNA, 122 bp, Homo sapiens
ccctcctccctcgctccctccctcctcgctcgctcgctcgcgcctccgccgggcctcgctcgctcacctttcaccgagcgcggcttcgcctgcttccgcctggacatgtccggggctccggg

SEQ ID NO: 146191 - DNA, 122 bp, Homo sapiens
cgtggggctggcggcgcggatgccctggggcgctgcagaccccgagaggccgcttgcccgcggggacgtcagccgcttttgctgttaaaatctgaaatgttcagcaagttagaaacttgaaa

SEQ ID NO: 146192 - DNA, 122 bp, Homo sapiens
ctgaggagcgccgtcgctttcgtccctccaggtccccactgccactctggccgggaagggcgtccactgttatgcctaccaggagaggcgtccccagtgtcaccttggccaggagggacgcc

SEQ ID NO: 146193 - DNA, 122 bp, Homo sapiens
aaatatgccccatgctaagtggtggacaggtaggctgactcctgagtccaagcttttaaacgccatatttatgcagccttaacatgcaatagactttacctctgattcagagtcatatcttt

SEQ ID NO: 146194 - DNA, 122 bp, Homo sapiens
ttaggtcaaaggagcctgagtacaaagttccccgtgagcctggggatgtctgggctctgtcggagtcccctcgggcagcacgtgccgttagccagccatgtgctcccacagaaatacccgga

SEQ ID NO: 146195 - DNA, 122 bp, Homo sapiens
agtccggcccgtagctcgctgccctctgccctaggtggatcaggggttcccggggcaccccgtcccactctcgcaacgctatccttccccgggcagcaggtggcccgaccggcggcccaggc

SEQ ID NO: 146196 - DNA, 122 bp, Homo sapiens
gatctgccatcaggccacattttcccattgggtgactcctgcaaaggccctacactttgacgtcctccccatctccggcagctccttaaactaagaactcattttaatttctgaattctccc

SEQ ID NO: 146197 - DNA, 122 bp, Homo sapiens
accttctctctcaggccagcccctcgcctccccccgagcctcccattgtgttgcccgggacgcagtcctcacggctccaccctggtgacccgggtgtggtgaagcagtcgctccaacagaaa

SEQ ID NO: 146198 - DNA, 122 bp, Homo sapiens
caaaaagctgcagcggtaaaaagccgtagcggcgggggcaaaaagccgcaaaaacagcggcggcggtaacaaccaccgcgacagcaaaaagcctcagcggtgggggcgaaaagccacaagaa

SEQ ID NO: 146199 - DNA, 122 bp, Homo sapiens
gcatccgcgtcctgagagagatggttcccgaggcctggaggtgctttcccaacaggctgccgctgctgagcaacatcaggcctgatttctctgaggctcgcctggcctacatgaagcggtgg

SEQ ID NO: 146200 - DNA, 122 bp, Homo sapiens
ttctcatctccccgtctccaaccaggcccccttcctcaagcccaccatgatttcagcaggcgccctttaccttgtagacattgatagggatgtcaatgacgatgtgcagcaggtctcccaga

SEQ ID NO: 146201 - DNA, 122 bp, Homo sapiens
aagcagagggcgcgggtgcaggtagaatcgggctgctttcgcgctgggtgggtcccggtccgtcccggcctgcttccctggcgtttcctggtgcatctactcctgggatctcggcgggattg

SEQ ID NO: 146202 - DNA, 122 bp, Homo sapiens
gagggcgccgcgagacccagggcagggtgcacagaccaggtaggcgaggggcttggggaccgaggttggagactggagaagccaggggcgcgcggtaaggtgggggagaggggattaggccc

SEQ ID NO: 146203 - DNA, 122 bp, Homo sapiens
ggactccgagccggggcgtctcaggggcagagcgcacggcacagcggggcgggcgtggggcgtgcggagcgagggctcggttctgggacccctctcgccttctctcagacggctggggagga

SEQ ID NO: 146204 - DNA, 122 bp, Homo sapiens
ttagcgccaggttccccacgaacttccattgcgtgacgggcaagggggcagctgcctttgcggccagaccccgtttcccaggactaggggcactccgcactggaccctagtcctggcgcggg

SEQ ID NO: 146205 - DNA, 122 bp, Homo sapiens
tactccaacaaaatgactcagagtttcatcatttcttattgcacaatttaatgaccatatcgccacctctggtctggtagcttcattaaacagggcagatgacctcctctttgaaagtgggc

SEQ ID NO: 146206 - DNA, 122 bp, Homo sapiens
tcacttcctgctgacccccgtgtacctcccgctcatccccgccacaccctccacgcacctcgtgctcaaccccgcgcacctcctgctgctctgacttttgcttgctggacacagcctttccc

SEQ ID NO: 146207 - DNA, 122 bp, Homo sapiens
cctcagagagagaagaacctggggtggatcattctgtcgtttccaaaggaacctacaaaacgtggatggacttagaagtggccagaggagccagcaccagcttcacatcagtcactagatgg

SEQ ID NO: 146208 - DNA, 122 bp, Homo sapiens
gtggaggcaagaacagccggtgtccaagggctccgagtccactcaccgccagccccatcccgaattcctgccttgccacaaagagtcacctttaagtgttgatcctaaggaaacagagtaaa

SEQ ID NO: 146209 - DNA, 122 bp, Homo sapiens
attttcttgtgtcttgctttgcagatttaagcagctccagggtgagatacatacggctctcgtgccctcccctctctgaacctagcttgcaccttgctcaaagcagcactcaggaaacgttt

SEQ ID NO: 146210 - DNA, 122 bp, Homo sapiens
gatgggggagataggtgcaatgaagggggctgccagtgccagctgccttccagctgtcaacgcctgagcttatacaggtttacacagctttataagcgacggtccaggctgggttgtggcca

SEQ ID NO: 146211 - DNA, 122 bp, Homo sapiens
ggaggggtcagagctgtgtggagtcaaccagcctgctcttcccatggcctgtgcttcccccgccccagcccctccagccaggtcacccctcccagccagaggatgggcacctgagtacagct

SEQ ID NO: 146212 - DNA, 122 bp, Homo sapiens
ggctcatggaggggcgtctggggaccctggagcagtgaaggtcggctctcccagccgtgccgctccggtccggagagcctggcctcaacacctgtcccagccgtgctgctctggtccggaga

SEQ ID NO: 146213 - DNA, 122 bp, Homo sapiens
gttaagagcatgggccgtggaaacagacccggggaaagcctcagctcggccactctttgccgcgtgaccctgggtggcaccttctaagggtgattctgggattctatgaattaatgcatgga

SEQ ID NO: 146214 - DNA, 122 bp, Homo sapiens
ggcctatcgatacccccgtccccagaggtttggaagtagaggctggatggacaaccatgacggatgctgtaatagggcctttgaaaggagggtgggactattctatccccatgtccttctct

SEQ ID NO: 146215 - DNA, 122 bp, Homo sapiens
agcacagagcaggccaagtcccttgctgcatgcaatttgggagagctgtggccacaaagccgtgtagtgggatattctggatcctcaaacttctagtgggcattgcccactcctcaacacag

SEQ ID NO: 146216 - DNA, 122 bp, Homo sapiens
cccgcctactgtccggtcccggtccggcccggcgcggggcgctgtgggacttgtagttcgcgtcactctccgcagccgctccggagcagccaggggaactacagggcccaggaggcagcgca

SEQ ID NO: 146217 - DNA, 122 bp, Homo sapiens
cctttggcatggcagaactgctctggactcgggaaggtgtggattggagggcgggagctacgcctggcatactgggacttgtcatctttgattagcttccagttttttaattgcagggcgac

SEQ ID NO: 146218 - DNA, 122 bp, Homo sapiens
atgggatgtgggaatcagggtccaggccttggtgttctaagcagcctctccaaggagctgcgttgtcaggagagtgggaagcagaagcaggagccttgggccttacagttctgggagtgtgc

SEQ ID NO: 146219 - DNA, 122 bp, Homo sapiens
gcataattcaaccagtgacaccagctaacaatgacagggcagggtttcaatccagcagcccggccccagccttttagtctccaccttacactgccttattcgtgtttggttgaaccacatgc

SEQ ID NO: 146220 - DNA, 122 bp, Homo sapiens
ctagcgttcctgcggctcctggcgcactggccgggcccccagccgcctccagcctggagccgccatccctgcacccgcaggcgggggacgcggaccgaataaatacttttagtgtactgcga

SEQ ID NO: 146221 - DNA, 122 bp, Homo sapiens
tggctttgtcttaaagagacagagacactccccttttcagcacagagactggggggctgccgaggacagttgcaaaaaggactccacccaaaactggaaacagcccatatgtccctcgacaa

SEQ ID NO: 146222 - DNA, 122 bp, Homo sapiens
ttggaaagtccctctactcagtaatttcaaggatcttagcctctaatgtaccctaaatgacgctcaatttctttctaccagactaacttctcaaagtactgattgacatcaatgcagtatct

SEQ ID NO: 146223 - DNA, 122 bp, Homo sapiens
gtcctccccttaccagttagaatctttcagctgtaagtccaaaaagccctaagtcaaacacgaacaggaccagggtgagctgagtgaggcacctggggtgtacatttaaggagatgctcact

SEQ ID NO: 146224 - DNA, 122 bp, Homo sapiens
ggaatgagaaatacagaaagtgtgcggggcatgctctgtacctcaggccatggggacgaccgctccctgtcatgcagacccctcagaggggccgcccccggcccggcccagctctggccagg

SEQ ID NO: 146225 - DNA, 122 bp, Homo sapiens
gacagaacctgcccttagactgggtgttagcggtttgataaaccagaaatacatggtcgccgcagttccgtctccccgaccctggaagtgagcgacactgggggcctccaagcggctcgcgg

SEQ ID NO: 146226 - DNA, 122 bp, Homo sapiens
cctcccgcgcccctccccaactttccacgtttcactcctctcccttttcctcctcagctccggctccgccgccacgattggccagccgaccacccggcctcggccaataagcgccgccctct

SEQ ID NO: 146227 - DNA, 122 bp, Homo sapiens
tgttggcatcagctccatactccagcaagagagccacagcatctggatttcctccacttgcggcttcaagtaagatggaagaagaatcagaggcctgaccatgagcattagctcctaagagg

SEQ ID NO: 146228 - DNA, 122 bp, Homo sapiens
cctgcagagaacaaacagctgtgggcacctggaaagaagcacgatgcaggtacactgtcacgggtgagggcactcaccccaggggtctgtgggccagtctcccaggctctttcactctgggc

SEQ ID NO: 146229 - DNA, 122 bp, Homo sapiens
cccattgacaccttaaatccaatatgattagagggctgggcgccatggctcacgcctgtacgcctgtaatcccagcactttgggaggctgaggcgggtggatcgtttgaggccaggagttcg

SEQ ID NO: 146230 - DNA, 122 bp, Homo sapiens
cagcgccttctccttctaccctccggagctgcaacttcggttcctgcggaatgggctggccgctggcaccggccagggtgacttcggccccaacagtgacggatccttccacgcctcgtcgt

SEQ ID NO: 146231 - DNA, 122 bp, Homo sapiens
gggcgaggggccgtgaccgtcccggcccatgcaggatcaatgtgggcaaggggccgtgaccgtcccggcccgttcaggacagtggcctataacctctgacatggggtcacaggagaatgcgg

SEQ ID NO: 146232 - DNA, 122 bp, Homo sapiens
gctgttggactccgggctatttcagccgctgctttgggtacacagtggccggggagcagccggggagcccttactctagaaaggattgcacaaatcgcaagcttaggtgatctgttaagcag

SEQ ID NO: 146233 - DNA, 122 bp, Homo sapiens
ccggcccagagcgacccgcgataggaacccgggttcctggcctcagcccctctccagagtcggctccaaccccgctcgttttggtactcaccgtgtggagacgccaccgcagctccgtcagt

SEQ ID NO: 146234 - DNA, 122 bp, Homo sapiens
tgtgggagggacgacctgctccccgttagaagctcggggggccacgggccacccgccggccgccccgcccctagcactgaccttccgcagggccgagaccaacagtccccgccatttcggac

SEQ ID NO: 146235 - DNA, 122 bp, Homo sapiens
ctcacgtcccagacgatgggcggccaggcagagacgttcctcacttcccagaaggggtggcggctgggcagaggctgcaatctcagcactttgggaggccaaggcaggcggctgggaggtgg

SEQ ID NO: 146236 - DNA, 122 bp, Homo sapiens
gagcctgggctggggccttataaggcctggagtttctcggtttcatgcgttatccatccccgaccactgagagctgagtaggatcctgtggttagtgcccttgagctggtctttgtgacctt

SEQ ID NO: 146237 - DNA, 122 bp, Homo sapiens
attcccaggcgccggcctcgcgggtgaactgtcacacgtacccagagcttggaggaggcgcgccgggggagtgttgtgctggggattcccaggccggctcctgcttctcgcctgatgaatgt

SEQ ID NO: 146238 - DNA, 122 bp, Homo sapiens
tccgggtccacctcaggtcacattcccacctcggggcaccctggcaggcatgagtggaaccgtgagatccctggtagccaaaagaagccttggaaaattttggggggagcgccctgggccag

SEQ ID NO: 146239 - DNA, 122 bp, Homo sapiens
gtccccggccacgtctgtgctctgtccttgtgtaatggaatgcaaaaaagccaagccctccgcctagaggtcccctcacgtgaccagccccgtgtagccccgggctgacccagtgtgtgctc

SEQ ID NO: 146240 - DNA, 122 bp, Homo sapiens
cgcggcggatcccgaactgcgcgttctgcagccccccggagctgctcacccgccgctcgtcgctcaccacgttccccaggcactcgcccgagttcatgcggaagaagccgccgttctgggcg

SEQ ID NO: 146241 - DNA, 122 bp, Homo sapiens
aaaacagctggtttctttaacaaccaaccacgtgctaatatggttggcataggcattccccggctgcagcctaaatgtatgaatgcagagttagaggtgggtgggtatttctgagagaggaa

SEQ ID NO: 146242 - DNA, 122 bp, Homo sapiens
tactaaccggagggaagaaaatggcactttaaaacagtgttttctcacactagggcctgtcgcatggtggggagcaaggggagggagagctttacaacaaatacctaatgcacgtggggctt

SEQ ID NO: 146243 - DNA, 122 bp, Homo sapiens
agttggggggagagggttacttcctcctgccctgaatctccgctcggggttcaactggctcgccggcgggcgagggcggggcaggccggcctctctggccctgctggggggtggggggcggg

SEQ ID NO: 146244 - DNA, 122 bp, Homo sapiens
aggcttgagcgccggtggcgacgaaggcagtggcggcccagcgggctcagtgtgtgggtccgtggcggctcggggtccacccgcgggctgcggtgcgagcaggtggccccgttcccctcctc

SEQ ID NO: 146245 - DNA, 122 bp, Homo sapiens
ctccaaggagggtctgaccatgtcccacggcacacagtcctggatgtcaggtcccaagtccggatctcccgtcagccccacacctgtgcctcttgcccctggcacgaagccatcttggctgt

SEQ ID NO: 146246 - DNA, 122 bp, Homo sapiens
tgggtccctctgtcctccccgcggtggcagtggctgatctctgctcaggcgtgaggggtgcggccgtgcgctgggcttgagcctgcccggcccagcccctcctcacttccctggactcctca

SEQ ID NO: 146247 - DNA, 122 bp, Homo sapiens
cgcaggctcaggcacctgacggagggacggtttggggcctggagtcagaagccccagggccgcgtcagggcttgcggctgggctgccgctgttctccccggtgttcatccagggatgctcgg

SEQ ID NO: 146248 - DNA, 122 bp, Homo sapiens
ctcaacctctaagcggcgagttcggtaacacatcttatgaatatttcaggaacgacctcacgggctcacttgcttcagatcaagtttaatgaatatgttgtcagcctttctgctctgcacag

SEQ ID NO: 146249 - DNA, 122 bp, Homo sapiens
cccgcagcaccacagcctgtgcacggcgcatccacgccctgttacaaatgttccattcaacgccttctagcacattcacagatcgtccgcccgcacctctagttccagaacattccatcacc

SEQ ID NO: 146250 - DNA, 122 bp, Homo sapiens
gaggacccaacaactccggaaagatcctgccgggagatgtgctcgctttccccggggcagcgggggaaagcccagcaaaggcacattgaaaattaaaaagaaaaaaaaaattacgccgagtg

SEQ ID NO: 146251 - DNA, 122 bp, Homo sapiens
cccagcgcctcaaagtgcccaaggagcgcctggctcttctccacaaagacacgtaggtaccgcgcgcccccggccggccgccccctcgggccccggcccccgggcgggaacaaagagcgcgc

SEQ ID NO: 146252 - DNA, 122 bp, Homo sapiens
gggtgaaaaggaagaaaagggggaaacaaggactctcaccaggacagagtccctgctacacggcttcccacctggccttttcaaatctgtttccatacaggaagaggagaggccagtctcct

SEQ ID NO: 146253 - DNA, 122 bp, Homo sapiens
gatggtgcttatggggcaggttccctaacagtcaggattccggttgcagtttttctcccccgccccaaagatacgtggttgcagacgtaagtaacaggaatccatctttctttgaaagtcct

SEQ ID NO: 146254 - DNA, 122 bp, Homo sapiens
ccggctccgccagcccaatctgtcagagaagttgtgtacaaactgcgcggccgccctgcgcgcgaagctcgtggcccgagaggggtgcggtcgggccgacggaggcggggccctggctgcct

SEQ ID NO: 146255 - DNA, 122 bp, Homo sapiens
cttggacaaatcgagggcctctggctgggaagggaggctcccagggcaggcagccccagccgggacctcaatggcggggaggcccagccctgccaagaacacaaccccggctttgtgaaggg

SEQ ID NO: 146256 - DNA, 122 bp, Homo sapiens
tcattcagccgcggaagcccctgggagaccccgccccgccccgtcccgcggtgccccccgcgcactcaccctcgctcacccacgcggccttcctggcgggagagcgcttccggcgtcctcgc

SEQ ID NO: 146257 - DNA, 122 bp, Homo sapiens
gacctccgtggtcttccttctttatttctcccgaatgtgtactatttcctgatttcagaacgatcaggacgaagaggggagggatgggcgtctgcgctcactcattccttcttccattcctc

SEQ ID NO: 146258 - DNA, 122 bp, Homo sapiens
ttgactttaaatgttgacatcaaattgaggctttggtaaaattgacaggattggcggtagcgggggggaacctttaaaacttgttagtctttcagagtcttcagttttgaatgagttggtca

SEQ ID NO: 146259 - DNA, 122 bp, Homo sapiens
cccaaaaggggaccaaaaagacatggagtggaatgcaacacacacacataacacacacaacgcatcccacctcgccgcccactcccgccctcctccccagtccaggaaaccgcgggcctcgc

SEQ ID NO: 146260 - DNA, 122 bp, Homo sapiens
gggggtcttggtgcactccagggcgctgggctgccgcgcccccaacctaatcatctcgggcgtctgtccctggcacgcgggctccagctcctgggtcctgccgctcgcagaggaaggcgcgt

SEQ ID NO: 146261 - DNA, 122 bp, Homo sapiens
aatgggcgcagggcgcggtgtatgcccgctcctcctcctgttttcttcgaattcgttcttcgaggtcagccctacgcccaaggatgatgtaaaaccgcagcctcagccttcctagggtgagt

SEQ ID NO: 146262 - DNA, 122 bp, Homo sapiens
ttggagccaaagaaacaagccaaataccttgctcaggcttccacagagaacaaaagctcccggaggttcagtaccaagccagtctgcttccagagctagaactcttgcttaacccttgcctt

SEQ ID NO: 146263 - DNA, 122 bp, Homo sapiens
gaaggaggggccgggtgtctgtggccaaggcaaggggcacgcaccttgtcataccagcaccggatgctgagctggccgcacaggcagttggagctagagcagtcgtccacacacgtgcagtg

SEQ ID NO: 146264 - DNA, 122 bp, Homo sapiens
gtaaaatataagaattaatgtacattctcaaggtcagattcagtgacaaaatgcactacccgaatctagtaacacatttactccttgctgcatataagtggcgtgtaagaaatacagggtat

SEQ ID NO: 146265 - DNA, 122 bp, Homo sapiens
agggacgacagagacagtttctagttagagccttggctccatttttggatgatttagccccgagttcctgagtctattttatgccccttacgtactttgatagaactaaggaaatagtggtt

SEQ ID NO: 146266 - DNA, 122 bp, Homo sapiens
tggatagtttctctttctccagtgatcatcagttcagcaacttggacatttggttctccccgtcccgcgtctgcctgaagcttccacgccgccctgctgcctgcacacggggctttttacac

SEQ ID NO: 146267 - DNA, 122 bp, Homo sapiens
aggcaccagccgggtgggctttgcctcctgctgctgctgctctgccagttcatggaggaccgcagtgcccagggtaagcgagtggggatgcgctggggaggcttggctgaggacaggggggt

SEQ ID NO: 146268 - DNA, 122 bp, Homo sapiens
tccctggccacacgcctgttcccagcaagtgctgaaactcactagaccgtctgcctgtttcgaaatggggaaagccgtgcgtgcgcgttatttatttaagtgcgcctgtgtgcgcgggtgtg

SEQ ID NO: 146269 - DNA, 122 bp, Homo sapiens
cattattatgaaccttttggacctgatgaatgtacaatgtacctctcccatgagcgaggacgcaagggcagtcatcaccgctttatcacagagaaacgagtctttaagaactgggcacggac

SEQ ID NO: 146270 - DNA, 122 bp, Homo sapiens
aagattctgtggctctgagccatttttgggctgctgaaggaagtatctgggccttatgctcgctgcattgcccctctttccaagtgaatcacttcattaaaatgaaaggtttactaaaacag

SEQ ID NO: 146271 - DNA, 122 bp, Homo sapiens
atgtccccagccccaagcactaatctgctttctgttatgaaaaattagttgttttcctgccgaagaatctcatacaaatgaaatcatataacatgtactctgatgtgtgaagcttttttgac

SEQ ID NO: 146272 - DNA, 122 bp, Homo sapiens
ccagtgcgaatggggatcttgcaatcatgattatgagggggaacaaagaccctttccttccgacgacacaagacacaatttgggaggtggacccgcggaccttctcggtccaccaggttagc

SEQ ID NO: 146273 - DNA, 122 bp, Homo sapiens
ggtgcgatgagaggcccaccaaccagccctcgagtggatcgaccttcccgtgtgtgtcctcggtgacaggcatttgcaaagcacacacgtgatctcatccactcctccggtggcctgtgagg

SEQ ID NO: 146274 - DNA, 122 bp, Homo sapiens
ttgaacccagccctatctaactgcagaaccctctccatagggcagtttctgtctacgtcccggcaatgtctgttcctcggattccctacacccctcctagcattatcaacctgagatcattg

SEQ ID NO: 146275 - DNA, 122 bp, Homo sapiens
aaccgggaaggggggaaaaatgtttgccagcatcacagccaaatacctctgagtcactcccggaggccctgagatcatcccacctcagaagctcacccttgccactaatctggacattgcaa

SEQ ID NO: 146276 - DNA, 122 bp, Homo sapiens
gggtaacaggatgaacccgcccctgggctggttttctctgaaccctaactcctgccgttacgccccaccagctctaggccaggaactctatgtgccccggccacgctagagcccgtacctag

SEQ ID NO: 146277 - DNA, 122 bp, Homo sapiens
aattcatcctaaagttcctttgaggaactccttaaaaggagacggaaagcggaaagcaaccgcctgtaaccaagtgtagacatcagtcaatcaaagttcgctgaactgagagcaagtgcctc

SEQ ID NO: 146278 - DNA, 122 bp, Homo sapiens
cggaagtaggcggtggaggtggtagcggagctgacggcagctgccagggaaaccgaggcgcgggacgcaaggccagcagacaggccggccagagggtcatctgcgtccggcacccaggaggc

SEQ ID NO: 146279 - DNA, 122 bp, Homo sapiens
ggattggagaagaagttggagtgctactgtcctccatttaaggatgcttatgttgaaaggcgaagaatttagaatggtacaatattttcgttggcgattccaattaaacgtgtttgtaaatg

SEQ ID NO: 146280 - DNA, 122 bp, Homo sapiens
tgattgggggctggggagcgacctggcgcgatgtgggggaggaggagcgccgggccgggacgctgtcccggtgggatgggggagaaagagttctagtgaaccccctttctgaagatcccagc

SEQ ID NO: 146281 - DNA, 122 bp, Homo sapiens
ccagcagggccgcgtggacggcgcggcgcccccggaaggaggccatgtgctcagtgccggcgccaactacgcacgcggcgccctccggcccgctagatccgaagcccatccccactgcggcc

SEQ ID NO: 146282 - DNA, 122 bp, Homo sapiens
ggctcgggagtcgccagtctgggctggtggctgaccttggacggcttccttaacccctctcggtttccttctctgtaaacatggggagattaacgatggggttgttgtgaagatttcttgaa

SEQ ID NO: 146283 - DNA, 122 bp, Homo sapiens
tccaacgcacagctctgaagtgcggaggcccaggatgtagctggccaggaaaggggccgacgcttccgtgtagaggagatctcagttagccagccggggacactgcagtctcgggctcctaa

SEQ ID NO: 146284 - DNA, 122 bp, Homo sapiens
actgaaaccccacccacaggaaattaatgtactaaacatgcctactgtgcaaatatttcccgctctactgagttgtcatactgctgaagtatttggtggcctcagaaaatatagatttgcga

SEQ ID NO: 146285 - DNA, 122 bp, Homo sapiens
actcagccggtgggcggggcagcgtctgacacttttcctgggagtcggcaccgggtgttccgcagctctgcctggtggtgcgagagggtgtgtgtgactctgtgggtgagaatggagatggg

SEQ ID NO: 146286 - DNA, 122 bp, Homo sapiens
ctggagaggctgaggactgggctggatatgctgaccatcagccaagccccatccagggcccgcgggcagttctgcgcgggggtcaggccgctggcccatttcgcagaggcggggagaggcac

SEQ ID NO: 146287 - DNA, 122 bp, Homo sapiens
ttacctggaacatctccatccttggtgtgtcccctgcctcgtgtacctggctttaaacctcggggttgtgggggcggcaaggccaccaggaggttgtaggatgctggagtgagctcgacact

SEQ ID NO: 146288 - DNA, 122 bp, Homo sapiens
ctttagggcgcgattcctgcagctggctgccggcccgaggttctggggtgtctgaggtctcgggcggggcgaggacgtttctccggctcagcccccccacctcctgccctgccgccccccac

SEQ ID NO: 146289 - DNA, 122 bp, Homo sapiens
tttctccctcggttcccatcaaaccgggatttgagaatgtttatttgctaaaagcgattacgtacagccgcttcctttgagcctctgcttttattttctgtgtgatttcgccgtcattccac

SEQ ID NO: 146290 - DNA, 122 bp, Homo sapiens
cccaggtctcccgctgcggtgactcggaaccactaccccgcctgtgtccaggaggcgccgcggctcccacctccagcagcacctggggctgtgagtggcgccccccacccacccccccaaaa

SEQ ID NO: 146291 - DNA, 122 bp, Homo sapiens
agccccgcctgagccctcggccgtcatacacctggcactgctgttccatctgcgtgacgccgaagcacccagggtgcacaggagcattccagacctgcaggctgagctgaaatcaggcaagc

SEQ ID NO: 146292 - DNA, 122 bp, Homo sapiens
tgcactgaaaacatgtcccacctcttcttttttccctctggagaaagctctttctggcatcgagtggggacagctaaggtctccaggctgctgatgaagtgagggaaagtggaggagagtcg

SEQ ID NO: 146293 - DNA, 122 bp, Homo sapiens
gccaccctgcgcttcgatccgggcttctcgggccggggcgaccgctgcctcgcaattggtcgaattcagcaggctccgcctccttgagtcgccagctgcctgccacacgccaggcgccacgc

SEQ ID NO: 146294 - DNA, 122 bp, Homo sapiens
tacaaccagaggtctcatctctgaactttcttgcgtactgattacatgagtctttggagtcggggatggaggaggttctgcccctgtgaggtgttatacatgaccatcaaagtcctacgtca

SEQ ID NO: 146295 - DNA, 122 bp, Homo sapiens
tgtgacaaacaaaacaaaacccaatcttacttttactgcatcttgacgaatttgattgatcgtctttggtccattgtcaagaaaagccttgcgaggaacccaatggtgttctcgcaactcta

SEQ ID NO: 146296 - DNA, 122 bp, Homo sapiens
tctccctggcgttggtttcttctcttcttggaatgcttttggcagatcctccgcgttttccgggtctcttgggagtctgaacatgcattttcctttatttcagacaggattccgagtgttaa

SEQ ID NO: 146297 - DNA, 122 bp, Homo sapiens
catttaatttttctataaagtacagatcgtagatgtgggatgctgtgagcacctcccgaacgataaatgagtgtgtgtttgctgtggtggcagccctgaagttcgcaatgcccgggaagcgt

SEQ ID NO: 146298 - DNA, 122 bp, Homo sapiens
aaaaaaaaaaaaaaaaaaagggaagtgagactctggctatggcagtgggtctcaaagtctcgaagtgtggttcctagactagcagcatcaacaacatcacctgtcacttgtcagaaatgcaa

SEQ ID NO: 146299 - DNA, 122 bp, Homo sapiens
aaagaggattttcaactcaaatcttgtttcctgctggcctggtctgcccacgagctagagcggggaaatgttgagctcaaatgggtaaattgagaccagaaaattattttttcaacctagag

SEQ ID NO: 146300 - DNA, 122 bp, Homo sapiens
tcgtgccgcaccgtagggggcggtgtcggagttctgtctgggcctattcgggtccgagttcggaatttcggttcaaggcccagttcctcggattgttcctgcgcaacttcagtttcccttcc

SEQ ID NO: 146301 - DNA, 122 bp, Homo sapiens
tgataagttaaagatgaatcctgaaggggtaggggaaaggagatcttgagttctccagcacggagactctttacaattatttctccgcgggatccgctgacagccaacgtctttcttacttc

SEQ ID NO: 146302 - DNA, 122 bp, Homo sapiens
tcaattctgtctttggtctgtcttcctgggtaatgtcacatggagacccaggggatctgccgtcagctgtgtgcagtgggttaacaagacgacggggaacttcagagtgcaggcagtcctca

SEQ ID NO: 146303 - DNA, 122 bp, Homo sapiens
cccgtgccccagacgcttctgcgcctgcgacctgtgcggagatgcgctgtgagttcggtgcgcggtgcgtggaggagtctggctcagcccactgtgtctgcccgatgctcacctgtccagag

SEQ ID NO: 146304 - DNA, 122 bp, Homo sapiens
ggcgccctcgagagagaaatgccgaggacctgcgaaggggcgaggaagccgatctctctgcggcccggagcctccaggctccagaatgtctttgtctttccaggctggactggagcaccctg

SEQ ID NO: 146305 - DNA, 122 bp, Homo sapiens
tgcaaactgcactctttcttcctaactacctgaccttgaggaaaactggtcaatctagaacgctgacaagtttctttttctctctgtcgcccaggctggagcgcagtggtgtgatcttggct

SEQ ID NO: 146306 - DNA, 122 bp, Homo sapiens
ttgggaggccgaggtgggcggatcagttgatgtcatgagtttgccaacatggcaaaaccccgtgtctactaaaattcaaaaattagccgggtgtggtggcgtgcacctgtaatcctaggtat

SEQ ID NO: 146307 - DNA, 122 bp, Homo sapiens
ccctagcccttttgtctctttttcagacggatgttttcagtctcaagtggttttattttccgcacaaaaccctgagatcaagggcagatcacagactgtaccggaggctcgggtttccctgg

SEQ ID NO: 146308 - DNA, 122 bp, Homo sapiens
aacctaaaaagaaggggcttccggactcccagtagaacatctccatttgctctgagtgaacgaagaaaggggagaacttccaggtctagggggaccccacatcccatgtacagaagtgccgg

SEQ ID NO: 146309 - DNA, 122 bp, Homo sapiens
tccgagtccgcgcactcgttacctgaacaggcgttacaggccctttggcgcctgcgtattcgtgaagtgtgaaaaaagcgcgcctctgttgggacgggaaatcagcctttctattggtcagg

SEQ ID NO: 146310 - DNA, 122 bp, Homo sapiens
cccgttagccttgtccctgagtaataatttaatacacttattagggtttcaggagaggtccggggtatgccagacaaccacagggaaagtcattccaaatcatttacgggacactgactcga

SEQ ID NO: 146311 - DNA, 122 bp, Homo sapiens
ttagtcatttcacaggagttgctacagcagtacataaagttttattaatattctgattctcgtgtcatagcttttatggcaggaaaggatgaggacatgccccacctgtaacgtagagcaag

SEQ ID NO: 146312 - DNA, 122 bp, Homo sapiens
acagcctgacctaccgccaggagcgcacgcccgatggccagtacatctacaggctggagccgtgagtcccccagtgcctggggtgtgctccagggtcatgctccccggctgtgctccatgtt

SEQ ID NO: 146313 - DNA, 122 bp, Homo sapiens
ttgaatccaggaggtgaaggttgcagtgagccaggtggaggttgcagtgagccaagattgcgcctctgcacttcagtatgcgcgacaggagtgagactatctcaaaacaacaacaacaataa

SEQ ID NO: 146314 - DNA, 122 bp, Homo sapiens
ggggagcccaccatcacccaagctgaagacattcccattcccaaccacactggccagggacgagaaaggcatcaactggggtgactttgcaaggccaccatgagcatgggctttggcatgga

SEQ ID NO: 146315 - DNA, 122 bp, Homo sapiens
tcactgagcagccaagactgttgcccgaggcctcactgtatggtgccctctccaaagggtcgggagggtagctctccaggccagagcttgtgtccttcaacagagaggccagcggcaactgg

SEQ ID NO: 146316 - DNA, 122 bp, Homo sapiens
caggcttccccctcaaggaccccaggttgggaaagagttttcctggttatgaagatctcccgacccagtgctcctgcctcaagggtttaggcctttgcatggggacacattggaggacccct

SEQ ID NO: 146317 - DNA, 122 bp, Homo sapiens
tttgtttaataattaggagatgagatcattgaacttggaagcctgatagcaatgggaagccgactctggactgcagatgtagaagatccactgggtgggatttgtccatgtgcatagtgtgc

SEQ ID NO: 146318 - DNA, 122 bp, Homo sapiens
ccaccccattcccctttccccacaccacccccagaaggccagtacctgtgctttagccaccgcctcagttcacaagcaagtgggctaaaccccgcccaccatcccggtcccaccccatcatc

SEQ ID NO: 146319 - DNA, 122 bp, Homo sapiens
ggaatacagcaagacctttggatgaggacctccaaaggtcctcagtatccttaggacactcggtgcagaactagagggactgagaggaggagcttttgcaggttaaatgactagtgaatggc

SEQ ID NO: 146320 - DNA, 122 bp, Homo sapiens
ggcttcaagttgggcggcgggcagcgaacttgacagaacctcgaaactctgcagatccgccgcccaacccagccgccagctccccgtgacttccgctttcggtctcaactcctctccctgag

SEQ ID NO: 146321 - DNA, 122 bp, Homo sapiens
gtcggaccttccacatcaccagctgcaggcaggcgcttgcgtcctcgctggagttgtggccgtcctggctgtcctggatgatctgtgccaggtagtcggccgcgagattcctgagggagcgc

SEQ ID NO: 146322 - DNA, 122 bp, Homo sapiens
cagcgctggaatccgaggaatgccgggctgcaggagctccttctgcaggcccggagaagtcgcacacttttaatggggtagttttggaaaatgttttaaaaggtgggggccgaggacggagg

SEQ ID NO: 146323 - DNA, 122 bp, Homo sapiens
ttcttggtagagatggggtttcaccatgttggccaggctggtcttgaactcctgacctcacgtgatccacccgcatcagcctcccaagatgctatgataataggcatgagccaccatgcctg

SEQ ID NO: 146324 - DNA, 122 bp, Homo sapiens
ccaccgcttgctgcttctcaaatgaaagagattgcctttattgtctatccctatagctttcgagtatgacaagcaatattctggctctcttacatttgttcaatgtttaaaacctatccctt

SEQ ID NO: 146325 - DNA, 122 bp, Homo sapiens
actgtccaggagaggctgagggagtcggaggtgatgtctctcactgtcatctgccctaggcgcagctttgcaagaggagcatcaggggactcctcttcgggggctaggaagagatagaaaca

SEQ ID NO: 146326 - DNA, 122 bp, Homo sapiens
ccccttaagtagtatcatgcatgcacgaattaaacatctaaaatgtccctcatgtgtacacggatttcccctagtttaaaacctcattgactccttcacagattattagagtagttattcag

SEQ ID NO: 146327 - DNA, 122 bp, Homo sapiens
cgcctccacggggcggggccctggcccgggaccagcgccgcggctataaatgggctgcggcgaggccggcagaacgctgtgacagccacacgccccaaggcctccaagatgagctacacgtt

SEQ ID NO: 146328 - DNA, 122 bp, Homo sapiens
gcctcctcccggccttttcctcctagcccacagctcagttacatctgagagagacaagaccgagaaggagctgagggggcccccggcttaccttctgctgtagtacccagaacaacggcagc

SEQ ID NO: 146329 - DNA, 122 bp, Homo sapiens
caaacccgctcgccttaatcaattagttcgtgatttgctgcagacccctgtctctccgcgcgctggcccaataagccggccgcggggctggctctgcgcgccgcgccgcccgacactgggtt

SEQ ID NO: 146330 - DNA, 122 bp, Homo sapiens
ctatgtttattttaattgtctagtcaaagtactgacaaggaggagtgaacttcctgaaaacggagaacaagatgtgatgccttttagtaaatgtttaccaaaagacacaggattccatttcc

SEQ ID NO: 146331 - DNA, 122 bp, Homo sapiens
cattaaggtcagttttatcccagctagataatgactgcatagcagcttctgtagcatctacgacagtatagtccagttactatctcatagaatgttttaatgaatcttgattatttaagtga

SEQ ID NO: 146332 - DNA, 122 bp, Homo sapiens
aggaagccggaaacagagaacacgcggagcactccatttccagcagccccccattatctgcggctcacgctccacggtgtcagttacccgtggtcagccacagtctgaaaagattaaatgga

SEQ ID NO: 146333 - DNA, 122 bp, Homo sapiens
ttccttcatgtggttgggaaccaagctctggtctccagagctgtgtggggctgggaatggcgcctggacctgcagggctccccaagcaacagtgcagggggactggaatcctgctctcaggg

SEQ ID NO: 146334 - DNA, 122 bp, Homo sapiens
actgtctcctgcatgacgggtggcgcctcccgcagcttcccttctctctccagtgctgcccgctgtgtctagcagcctctaggatcttgtcagagctgcacctctctgtgaactggccattc

SEQ ID NO: 146335 - DNA, 122 bp, Homo sapiens
gtgacctgggccgtggttgccggctctgctcggacagagagtctttttatttgtcgcctccgccttctcaccactgaggccgcaggacagcctcgctgcccggggccgagttcggtggacaa

SEQ ID NO: 146336 - DNA, 122 bp, Homo sapiens
acgtccgtctgtgaacgggggcgcacggccctgggacacagagcccaggacagcagtggtcgtgtacgtgtgaacgggggcacagggccctgggacacagagcccaggacagcagcagtcgc

SEQ ID NO: 146337 - DNA, 122 bp, Homo sapiens
aggcggtgagagctccgccgagctgccccagggataactgagctgggcttggtgcggctgcggccagtacgctggtcctgcccctcttgttggtcaaatctcaagcagacttgtcccaggac

SEQ ID NO: 146338 - DNA, 122 bp, Homo sapiens
ggaggcactgacacggacagatttaaggaggctgcacttggggcccagctaggagtgaggcggcccaggcaggaaggagcaggaggctgctgggatcctaatccccacttgaattcctatgt

SEQ ID NO: 146339 - DNA, 122 bp, Homo sapiens
gcacaactggcctctactcgcgcacctggcctctactggtgcccggcctctactcgtgcccggcctctatttgcacatctagcctctactcgtgtccggcctctacctgcacacccggcctc

SEQ ID NO: 146340 - DNA, 122 bp, Homo sapiens
actgttgcaaaagcaaaacaagcacgcaggcgcgtcggtcaggttgtcactacaaacatacgtaccttctcatccaatgtaaggaagaggatctctgcgagctctgctgcctttttgtttgg

SEQ ID NO: 146341 - DNA, 122 bp, Homo sapiens
ccacgcccgtggtgcagtggtgaggggctctgttcccagggggtgaagaagtccattctgcgttttctttcagaaagaccccagttaaggagacaaacgccattgaacctgtgctggaggcc

SEQ ID NO: 146342 - DNA, 122 bp, Homo sapiens
agcctcccccgcggaccccagggaggaagcagccagccgctcacccgctcctccttcttgcgcatccagctgtacttcttgttgggcttcagctcccgcgggagccgcaggttcttgagtgg

SEQ ID NO: 146343 - DNA, 122 bp, Homo sapiens
tggtagaagatgcaaccttgaacaaatgacttgacatttctgagcctcgccttcctcatccgtgaaaaatgattattgtgcagatgaaatgagatgatgcatgtaaggggctcaggttgata

SEQ ID NO: 146344 - DNA, 122 bp, Homo sapiens
ccagcccgtcccccgaggggccccgatgaacgaggacctcggggtgccccctccccagcacgtttgtgcgatttctgtgatctagtccttaaggaaggtggccgttttctttttccccccta

SEQ ID NO: 146345 - DNA, 122 bp, Homo sapiens
cgcgcaaggcggggctgtagccgccccgggaccgccctgctcaggcgccgtggggttcggcgcggctacgtgcagaatccgtctagctaaaatgtaatttcagattggacaagtactgtaag

SEQ ID NO: 146346 - DNA, 122 bp, Homo sapiens
aaaggaaactcttgctttgctttcattgcagtcagccctttaataggaaattatcaggctcgctgctgttgatcagagaagctggccttgctattgtgacagcttaactaatagagagcaaa

SEQ ID NO: 146347 - DNA, 122 bp, Homo sapiens
caccctcctcctcacagcccggccccggggccgcctggtccagagcctgagcaaggccgacgccctatttgagctgtccggcttctccatggagcaggcccaggcatacgtgatgcgctact

SEQ ID NO: 146348 - DNA, 122 bp, Homo sapiens
ccggatggggctcagggtcaccgcgaggagggacacaggcctgggtgcagaggccccagccgcgggcctcattcactgcggaaaccagggactatgagggttcggcggggccaccacccccg

SEQ ID NO: 146349 - DNA, 122 bp, Homo sapiens
ctgggaagcctatttttttagagggtggaggaagcgccgcaagatttttccatagacctacggaaatcagtttttccagtttctggagctcatttcaggacatgccagaaaggcggtgtttc

SEQ ID NO: 146350 - DNA, 122 bp, Homo sapiens
tggactggaggggtgagcgaggggactgggcgctccagggaaactgaagaccacagaagccgaccctctgtgcccgaaatcacagcgcggcaaggaggccccgcagccttgccctgctcagt

SEQ ID NO: 146351 - DNA, 122 bp, Homo sapiens
gtgacggcggcctcaccgcggcatcctgggaggcgtagttctcactcctatgacagaaaacgagggtgtggccagcaaaggacttcaaggcccatgatcccttaggagggggccggctgcat

SEQ ID NO: 146352 - DNA, 122 bp, Homo sapiens
agaaaactgaggtggtcccatggccagagctaagaaaggcagtgctgattcctgggcccccgctgctcacagcgtccttcagcatcccagtaggccgagggcatctcactcttaggtgacca

SEQ ID NO: 146353 - DNA, 122 bp, Homo sapiens
ggtgggtaagtaccccaacttccttgacttttagatagaagaactctaagccatgttttccgaagagtcttagaggagtcagagccctggctgcccatagtggtacctgctcattaacccat

SEQ ID NO: 146354 - DNA, 122 bp, Homo sapiens
cctcccccggcctcgacccgttcaactacccggccccacagccggagggctgccgcggcgcgccaaccccagaacgccatgttccgcgcagtccaaggagtcctccggactcgccccgcccc

SEQ ID NO: 146355 - DNA, 122 bp, Homo sapiens
tatgctagcgacgggttgtgacacccaagtgcagccaccgtgagcacccggcactgggagcgcgtgaacaataatgggggattcgccgtgctgcgccgtgcagggcgcggggcctgcgcgct

SEQ ID NO: 146356 - DNA, 122 bp, Homo sapiens
cccgcgtccccagtgccaggcagagtctctcagctagaccctagcagtctcagcacacaccgcacggggcgacagcttccgggggcggagcctggtctcgctccacgtctaccgcgcctgct

SEQ ID NO: 146357 - DNA, 122 bp, Homo sapiens
gagagcgatctgtgatgctgagcttctgtaatcactcatcccatcagaatgcaataaaagcggaagtcacagtttgtttcctggaaactttgacaagctttattaagttgagagagagagag

SEQ ID NO: 146358 - DNA, 122 bp, Homo sapiens
agtcagagggagaggcacaagcgggaggcgaggccagagcgcggagcaggagttggagaccgcggcggggcgaggccagagagcgctgtgggcggggccagtgtgcggggcggggcgtctga

SEQ ID NO: 146359 - DNA, 122 bp, Homo sapiens
tgcatatgtttaaaagcatgaaacataaagtcatgttgcccttcaaaaagattatatcaacgtatatttccagaacatcaatcattcttgtgatctcagagctgaggagtgattttagttta

SEQ ID NO: 146360 - DNA, 122 bp, Homo sapiens
ctcccggatgtgacgtagcgtgacgcctgcaggattgatgctgaaatgacgaggtggcagcgccggttcctgtagctgaggggtgtgagttcgaggtctgattgtcctcgttttctacttcc

SEQ ID NO: 146361 - DNA, 122 bp, Homo sapiens
tcgggcttcccggtcgagtgcgttcccatggcaacgggcgcgcgcgggggtaagagggtgcgccctcattcccgcggctgcgaggagccaccagcgcccccctggaggcggccgcccggagc

SEQ ID NO: 146362 - DNA, 122 bp, Homo sapiens
cgccgagggacctgcctccactcgtggtgcagcgggaatcggcggaggaggcctggggcacggaggaggccccggcgcccgcccccgcgcgctcgctcctgcaacttcggctggcggagagc

SEQ ID NO: 146363 - DNA, 122 bp, Homo sapiens
ctcaggctcctgagcccccaaagcacaagattgcaccccttcctctgacaagagaggaagcgtgaagcccagatctggagtcaggcagacctggctttacattctggccctggtactcacta

SEQ ID NO: 146364 - DNA, 122 bp, Homo sapiens
agagtctggcaaaaatagaaaaaaaaaaaaaaaaaaaaagaagctgtagtgacgtcgaaccgcacaatgtaagcattgagcatgtgcaaattttcaaatcaaaagaaggaaatcatccctct

SEQ ID NO: 146365 - DNA, 122 bp, Homo sapiens
taggaattcttagttcaacaggttgtgcaaaaccgcaatgcatggtgtgccttaaagcaacgttcccatcatctgctgcacctgcgtccaccatacattgctgcagatgatttatgtgtcca

SEQ ID NO: 146366 - DNA, 122 bp, Homo sapiens
ccgctggacctcatgatgtgcttccgcctcctgcagtccgtggtcatctaggccctactccgccaccggatctgctctgaccgcacttgaaggctggggcccaggcacctgtgccggccatt

SEQ ID NO: 146367 - DNA, 122 bp, Homo sapiens
cctcccacctcccgggcacgcagtcgacggccatcacagtcacctcccacctcccaggcacgcagtcgatggcctctgagaccacagcagcatcacagaggcctcatgctggtgacccggcc

SEQ ID NO: 146368 - DNA, 122 bp, Homo sapiens
gctttctgatgaactgacttaaatattagctctttttgtaacattaggaccagctgaaaccgattaaccattacttaagttgttacagcgaggcagagccaaaatctcccgggcgtgtgcaa

SEQ ID NO: 146369 - DNA, 122 bp, Homo sapiens
cagcgcctcggggttcagctgctgcgggtagccggtcatccagtagtagtcttccaggtgcgccttctgctcgctgcccgagcccgggctgggcgccgagaagctgggggaagggggcaccg

SEQ ID NO: 146370 - DNA, 122 bp, Homo sapiens
gaactgggcttttatctgagcagatgtcctcctgagagtgcagactgactgggtcacagccgtccatgggaatattgagaatcatagaaatacggagaggccaggtgcagtggctcagaccc

SEQ ID NO: 146371 - DNA, 122 bp, Homo sapiens
aactcgctgctgctccctggggctggtggtcgtgccagttgctgcgtcagagcagttgggcgcccacaggctgaggacgccggggccagggtgagggtgaggctccacctcagggctccaga

SEQ ID NO: 146372 - DNA, 122 bp, Homo sapiens
attaaaagctactcttagtgatcaagtctcataaatagaaaataatttggtggaggtggccgcataaggggtgatttgtggtgactttggtagtgcacaaacacaaagcacccctatgagct

SEQ ID NO: 146373 - DNA, 122 bp, Homo sapiens
tctgcccctgctcatggctgtcccctgcaatcagccccttcactgtgggacggccacccacgcagggtctgaagagcctctctctgaggtagtagctgattgctgtgcctggcttctcccaa

SEQ ID NO: 146374 - DNA, 122 bp, Homo sapiens
ctgctcactagataacgcctacttccaaaagtggcctgcccagactattttggtagcaagcgtggaaatcagatctgagaatctcgggagcagccctggtgcccaattttctccatcacgca

SEQ ID NO: 146375 - DNA, 122 bp, Homo sapiens
ggaagggaggagtcacagaaactacgacttccgtcatgcaaggcgcgcgattccgagttccgggttggaatttaaatccccctacacagcttgagtgtaagaggaactaagcaaaagagaaa

SEQ ID NO: 146376 - DNA, 122 bp, Homo sapiens
cacagggagtaggagtcatattttgtgacctgtagttaactttccgtgctgcaggcaaagcgctgattcttgtacactgactttggaacaaatgccacaggccctaattgcaggctccaagg

SEQ ID NO: 146377 - DNA, 122 bp, Homo sapiens
tccaacagctcccgagggaggagggagccacgggcttgccccacccgtggcctcggcatccggccatcccggccccaccggccccggcccggccccaccctcgtggaactcagcatcgcgac

SEQ ID NO: 146378 - DNA, 122 bp, Homo sapiens
ggcccctcaatacctgaatcggggcctgttccatgttgatgtgaacatccacagcagagccgtcactctggggaaagggtaagggaagttgttctgggagaagccaacactaaggcctccac

SEQ ID NO: 146379 - DNA, 122 bp, Homo sapiens
ttcgggctagtgcgggcgggagcattcagggatgccaaggggaagactttcccaagtcaccgtcttcttctctgccccttcaaatttgcgcattgatctcttctttggatttgattaaatta

SEQ ID NO: 146380 - DNA, 122 bp, Homo sapiens
cagccatggtgtcttcagaattgtagcgcatttctgaatctagcaaatcctccttttacccgttgaatgttttgaatgccctgactctaccagcgcccataaatgatctctagaaggactgt

SEQ ID NO: 146381 - DNA, 122 bp, Homo sapiens
cttaccccatgctatacagagtatgggctccaagccacagctggcctgtcaagtgtgtgtcgctggtccaccatgggatacatttagaaacttttatagcaatttgacatttttgtgatatc

SEQ ID NO: 146382 - DNA, 122 bp, Homo sapiens
aaaaaaaaaaaaagagttaatctataatctgagaacagaagttgtaaactatatgtgactcgcagtcatatctctctcgaggcttaaagtgttttttgggcttccaatagctcttaaatttt

SEQ ID NO: 146383 - DNA, 122 bp, Homo sapiens
gctttcccggctccaccctcagcgttggagcaattcgggggttcctcgctggttcccacccgtggaaatgcattttgcttctgtaaatcacagcctagtcctgctatattttaacccccgtt

SEQ ID NO: 146384 - DNA, 122 bp, Homo sapiens
ggctcctgtcagttgttctcaggtgtttgggcttgttgttccgtatactcagtgggttcgcggccgccggcccagtgaggctgggttcgaggagctggagcgggaaactggagcttaaattc

SEQ ID NO: 146385 - DNA, 122 bp, Homo sapiens
cgtttacgccagcagccataagcacagggacacaggcagataccaccagcccgggaaggacgggtgcggtggctcacgtgccacctgccttcttgccgcagcaggcctgtggccactctctg

SEQ ID NO: 146386 - DNA, 122 bp, Homo sapiens
gtgtgcctgagtcctggacaaggatctgtctgtggaaaccagggagagaccccaaggctgcgcccagccccttccccttcacttctcctcctggaatccccgtccctgaactggactccctg

SEQ ID NO: 146387 - DNA, 122 bp, Homo sapiens
gcctcctaaagtgctgggattacacccagccccaatactttaaaaaatacagagtaaaatcgtattttaacctatatacatgtattacatataattactttttttttttttggagacacagt

SEQ ID NO: 146388 - DNA, 122 bp, Homo sapiens
cactgaagaggcgaattcacggcttcccctcggccagcggctttggcgtggatttggagccgggccaggttcatggaaccctcctgcagaagcagactggggcttcctggagaggggggaca

SEQ ID NO: 146389 - DNA, 122 bp, Homo sapiens
tcggtggcacccagagctgccataaaggctgcaggagctcccagccctcattatcgcggccgcgctaagagggtctccactcagactcatgcctgaggatgtgcacacagaaccaaaggctg

SEQ ID NO: 146390 - DNA, 122 bp, Homo sapiens
cagcgattgcagcttccttcgtcgttgtgtgtacgcccgtggtcacctgtctttgcaccccgctctgcagcctccagggggcagcaattgcggcttccttcgttgttgtgtgtacgccggcg

SEQ ID NO: 146391 - DNA, 122 bp, Homo sapiens
cgctcagacctgccagaaccgacccggaaaccaaagcgtgacagccaggggttgctagagcggccggcgcggcgcagcgaaccatcgagtttagccaggcgcggctagaagggcagggaggc

SEQ ID NO: 146392 - DNA, 122 bp, Homo sapiens
atccacccgcctcggcctcccaaagtgctgggattacaggcatgagccactgcgcccggccgtagtcaacagtttagagtcaacagccccagctgtcactcacaagtgtcattctgggtgtg

SEQ ID NO: 146393 - DNA, 122 bp, Homo sapiens
gcgagtgtggattgggtgaaagacacagtaacgaaatgtggtgaaaatgctcctgggaaccgagctgatccgcagggcctgtgccttcgcctataacagtccctcggcctgtgggggacccc

SEQ ID NO: 146394 - DNA, 122 bp, Homo sapiens
ctggacagtctccaggggagatgctcttccacagcagcgtctgtcctggcgcccggcgcccggcaagccacacacggcagcctgctcagcttccagcctgggtgccatgtggcgtttaccaa

SEQ ID NO: 146395 - DNA, 122 bp, Homo sapiens
acaagcacaccgaccaccccacagcccagattcggccccagacacacactcacaagggcacgtgatcacgtgcgtggtcacatggaccggcccactcagaacacactcacaaagtcacacca

SEQ ID NO: 146396 - DNA, 122 bp, Homo sapiens
ttaccttctgatcacccttggctttatttttaggtaacaccaagaaggacgccatgagagcgaaggccattgggtaaccaccctttgctctcgcgctgcgcgtctccctgccatcaaccgcc

SEQ ID NO: 146397 - DNA, 122 bp, Homo sapiens
tcgccctcccaccctgccaggctgaggagctgcggacgcgctgattggctccaggggaagcgggaggcgagaacaatggccccctccccccgttaaaagggagcggctgccgggcccgggga

SEQ ID NO: 146398 - DNA, 122 bp, Homo sapiens
aactgtagtcttcaagtgtattttgtagctttctattccctatttgagtttttcatcttgcgtagctgtaatatatttaaaagtagttctaactggacatctttccatagtgacatccacct

SEQ ID NO: 146399 - DNA, 122 bp, Homo sapiens
gttccgtagagctgggccttggtgaggctgtccttgcggctcagccccgagccaccagtccgcggaaaggcctgctgggggctgaggcgggcggcaggatgcatttccggggaggcctccat

SEQ ID NO: 146400 - DNA, 122 bp, Homo sapiens
ttcgcccctgactccaggtctcactgcgctgactccaagtgagctcaccctttgagaacacgccccaacttcccaggcctttttgcttttggaggttccgcaagtcaggaaaatgcttcact

SEQ ID NO: 146401 - DNA, 122 bp, Homo sapiens
agaaatagtatcatagtatcacactgcattaccttttgtgtacagtcactagtagtaccacgaaagaacaaagctaaacaaataccaccccatcattaagtgaaggggaaaaagtcagagaa

SEQ ID NO: 146402 - DNA, 122 bp, Homo sapiens
gaggccagccaccatgagggcaggaaagcagcccaggctgaaggcgtgcatacaggagcacgctgcgtgagcctgtgcaggaccccagcagtgctgctgaccatgagccaccaggtaaaggg

SEQ ID NO: 146403 - DNA, 122 bp, Homo sapiens
tctgttcctttgccagccgtgggggcggggtgggggccgtggcgggcgggcaacaatccgcggcaggtaggaggagagaatgtaccaggcctttgagtgctgtttctgttttaattttttct

SEQ ID NO: 146404 - DNA, 122 bp, Homo sapiens
tggacgggggacctcgatggcaggttttaaaccccagggctgcagggcaggggggtgttccgtagccacccacgggagaagctgctgccacaggcgaacagtgcagtgtgttaaaaggggaa

SEQ ID NO: 146405 - DNA, 122 bp, Homo sapiens
atgtacagttcacagctaatccccgagcgtgcggtttgccatccatctagctttgcctggcggtgtctgggatgttgacctagccagttactaccctgcgcttaatgccactcggctgtggg

SEQ ID NO: 146406 - DNA, 122 bp, Homo sapiens
ggccggagcagcaaaggggctggggccggggagactaagggcctgtgcgagacgcccctacgtctttccccagatcaagaacatgtgggcggccttcccccccgacgtgggcggcaacgtcg

SEQ ID NO: 146407 - DNA, 122 bp, Homo sapiens
tgccggtccccgctctcctggaccatccagcagggtacctcggaagtctcgaccctcagccgcagccccagtcccatctcagctcacgcctaagccccgccgattcgccccaccccgtattc

SEQ ID NO: 146408 - DNA, 122 bp, Homo sapiens
tctgaaggattcaaacaatctacttgtgtgcctttggtggggtggggcaggggcggggggcggttctaaacaaatcagtttttttggtgtctttgcagggaatgaaagaagataatgagcag

SEQ ID NO: 146409 - DNA, 122 bp, Homo sapiens
tggtcgggggcggggggtcctccatgagatgctaatgctatcggtaatctctggggagtccgtttaaggctttccttggtatttggcacccaagccccccatctcctattcctgagtcccca

SEQ ID NO: 146410 - DNA, 122 bp, Homo sapiens
cgcgcgcaacgtgacctggaagctgtgcagtcgcctgtagggacccagctcagtgagtttcgctgatgacttcgtgcgcagcagcaagcagcactacaactgcgagcactccaagatcaatt

SEQ ID NO: 146411 - DNA, 122 bp, Homo sapiens
tgaaaacgagagtcccctgattcaaaatgtatttaaaatgtcaagacagtggcagcagagcgtaaaacccagacctgggaccagccctacctccacctgcccttcagggtcactgtaaagga

SEQ ID NO: 146412 - DNA, 122 bp, Homo sapiens
gtgaataaagccagaaagtcgaattcccaggagagtgtgcatttccttgagccgccgtcacggggcagcacggaaaacccgttgctgctccataaacagcacgtggctcccattaccctttg

SEQ ID NO: 146413 - DNA, 122 bp, Homo sapiens
agatgcacagccacacttccatctcaccctagtaaaacccagacctttggattcctctcccgtggaatgcccaaatccacaactttggggtgcattctcactcccagatcccaaatccaaag

SEQ ID NO: 146414 - DNA, 122 bp, Homo sapiens
ctgggatgagacgctgctgatgcgtgacgtgtgcgggccctcaggtcggtctggtggccgcgtggccatacgctggcggcacagctcctgcaggacagggggaggaagagcagggggttagt

SEQ ID NO: 146415 - DNA, 122 bp, Homo sapiens
agtgccaggattacagcctaggctgctccaactatgagcccttcctcggaccctgggactcggctacttggggtttgggggtcttccacaccacagaggcacaaagctgactttaatcactt

SEQ ID NO: 146416 - DNA, 122 bp, Homo sapiens
gcctggagaggctggctggaaacacttctgggcctggagaggatggccagaggcgagagccgggcccgtggaggctgcccacaggcagaacacgagcctggcctgaggcggccatgctgagg

SEQ ID NO: 146417 - DNA, 122 bp, Homo sapiens
cccaccccagccgcacaccgaccgggctggctctgcctctccctccctgacccggcaccacgtgcctggcgtccttgaacgcttcagatttttatcagtgttgccttttcgtttgctcttcc

SEQ ID NO: 146418 - DNA, 122 bp, Homo sapiens
gaatctgggataagacactgggggcgctgccgtgggaaaggccaagggacaccgtctggacgggttccccgagaccacgtgctctaagccccgagtctgatcccaggcagggtgccccgcct

SEQ ID NO: 146419 - DNA, 122 bp, Homo sapiens
gcctagatggtggccggtgtttcctggttgcttactggtctttctgagttctggttcactcgcagtgaatcaacttcctttcacaagctctgccactcacgggccattgaggaagacccttg

SEQ ID NO: 146420 - DNA, 122 bp, Homo sapiens
tgtctattcagaaaacaagtatgttctctattctcactgtgtattagtctgttctcatgccgctaataaagatatacctgagactgcgtaatttacaaagaaaaagaggtttaacaaactca

SEQ ID NO: 146421 - DNA, 122 bp, Homo sapiens
ttttgaccccccggccgccgcggctttttccccactgcggttttttgccccgcgccgccgcgactttttgcccgccgcggctttttgcacccccactgccgcggctttttgccccccgacgt

SEQ ID NO: 146422 - DNA, 122 bp, Homo sapiens
cgctgctgctgtacactgcgctgcggtgctcagcactgcccactgagggcgggtgccgggcgggcaagcccactctggtgtgctccagtgcggtggggagctggtcatactcgcaacaacag

SEQ ID NO: 146423 - DNA, 122 bp, Homo sapiens
cgtattttccaggagagctcccttgcccactgtctctcccaagcccacatttgggatgggcgacagggaagatgcaacttctgggaagcagctctctactggatggggtagtggggacctga

SEQ ID NO: 146424 - DNA, 122 bp, Homo sapiens
aggacaaagttatagtgaaggaagaacatttgtgtaaggcatcctgggaatgtgatttcgcgagcccctagccaaaagatactgagtgctttaggcacaccagctgtggacaagatgaggtc

SEQ ID NO: 146425 - DNA, 122 bp, Homo sapiens
ccatggtggtgggtgcctccacacagtctgccgtgagaggaggcctctctccatgtctgtcgctggccttgcccggcccgcccggggatcttgcattgctgcgaccagggatcctctctcca

SEQ ID NO: 146426 - DNA, 122 bp, Homo sapiens
aacacgcgtcgcaaggtcacacgtaactttgcggcgaagcaaacagaacgtgcgcaagcgcggtgagatctagggcgggcccttgagagggcttcatgaatgttctccttgaccaatcccgt

SEQ ID NO: 146427 - DNA, 122 bp, Homo sapiens
gagtgaagcaggaaggagacaacacttggagactgcccagcactcccacaacaaagaaggcgatgacggcaagagaaagctttgggtccccctcactgaaagcggggagaagaccaactcat

SEQ ID NO: 146428 - DNA, 122 bp, Homo sapiens
ccctttgcagccctagtctgggctccagggggcgggggtgacttggcttctcccagccttcgctgcccgggctgagagggggccggacctccagggcgacatcgaggtgtgtctgggaagtc

SEQ ID NO: 146429 - DNA, 122 bp, Homo sapiens
gccaaacaaccgatggttggcaccatccggtgttcaacttggccttgccgatgcagcacccgtccagtggtaaaccgaccgacccttagacacagttcagtcaggatgccctgcgagagggc

SEQ ID NO: 146430 - DNA, 122 bp, Homo sapiens
cgcgcggccttaccaagcggcaggcccttgttgagcaagtgcgagctgcccatcgagaggcgcgagcggccgcgggccccgaccactccggcgcgctgcgccgccgcgagcccggcgcgtgg

SEQ ID NO: 146431 - DNA, 122 bp, Homo sapiens
ctcacgatcttgcccacaggagcctccggggctgggacgaagatgtggttctcctgggctcgggccgttcctccgggcctgggggctggcgatgcgggccgggccggagatttctctggccg

SEQ ID NO: 146432 - DNA, 122 bp, Homo sapiens
cctacccccaccccaatccagccgtcttgaatgtgaagccaatgctgactccaagaagcacggctttcagaaaagctacctccagcccactgcacccagcctgagggcctctggtgattcac

SEQ ID NO: 146433 - DNA, 122 bp, Homo sapiens
aagagagacagttgttaaaaagagcctggcaacttcctaagctctctgttcctctcttaccgtgtgatctctgcacataccagctcccctttgccttctgccatgagtgggagcagcctgag

SEQ ID NO: 146434 - DNA, 122 bp, Homo sapiens
cctggggctgaaggaagtgagtgcagccacaggccaacacttccttggctgaccagacgacggaaaatgtgtctggctgcgttcaggtgtttttccaagtttgaaaccctggaaagtttttc

SEQ ID NO: 146435 - DNA, 122 bp, Homo sapiens
ctttgccctgcaggctgatcttgggaacttcaaaaggaataagcactatggaaaatacttcgagccagaggcttacttcccatcttgggtaagcactgttttcaaattcgaaagagtgtttt

SEQ ID NO: 146436 - DNA, 122 bp, Homo sapiens
gccaagcccagtcctgccttttcctccagccaagccttggcttctgctgcgtcaccccggcgtctaatcaacgatgcttgctttccgtgcaattatttgaacttgcttttcaaaagacccag

SEQ ID NO: 146437 - DNA, 122 bp, Homo sapiens
agtcattgttctgattcactgaactaagcgaacacgccggggcactctccggcgcacccccgcccgccagcgcctagtccagccctcccgtcccagggccccgcagcacgctgggaattgta

SEQ ID NO: 146438 - DNA, 122 bp, Homo sapiens
gcgaagtgcacccaccgtcgttgccttattctggtagtcacagggtgacagccgagggagcggtaacctgtaatcagccggcggtgcgcagcccacacagcacgtggtccgcatcacaggct

SEQ ID NO: 146439 - DNA, 122 bp, Homo sapiens
acgtgaaaactctattctgagtgacttagaatctcccgctttgaggttttaatcttgatccgccggtcctgcccaaagttcagagcagctgtccgaaaggtccccgcatttgctgtccctag

SEQ ID NO: 146440 - DNA, 122 bp, Homo sapiens
gcacctgtaatcccagctactcagaaggctgagataggagaattgcctgaatccaggagacggaggttgcagtgagcggagatcgcatcactgccctccaagctgggcaacagagtgagatc

SEQ ID NO: 146441 - DNA, 122 bp, Homo sapiens
cctgccgcgggcaggtagacagctacctggtaaccgggtccggcccaggaggcttgggcgcgcgcagccatcccgggcctcgccggggacctagggacgcaggcaacgcctgcgcccgctca

SEQ ID NO: 146442 - DNA, 122 bp, Homo sapiens
ccggggctccaggggggcgagagcggcgcgaatcccgcggggcccactgcgctaggcccccgctgcctgtccgcggttcccactccggccccgatctccgcccccggccccgccgcggcctt

SEQ ID NO: 146443 - DNA, 122 bp, Homo sapiens
tgcctcactcaccctacacgtgacagggacacctggggaccgcgcctcactcaccctgcacgtgacagggacacccggggacagtgcctcactcaccctatacctgggagggacacccaggg

SEQ ID NO: 146444 - DNA, 122 bp, Homo sapiens
ggaaggggcgggagcctcggcggggcgatccccctccgaccccagccggcccgcggtagccgccttgggaacttctgcgctatgattatccgcccccgcgttggggactttgcctctcttcc

SEQ ID NO: 146445 - DNA, 122 bp, Homo sapiens
gcctagcctaatctttttagtcaaaattttaccccaaatcactgttatctttttggtcaccgcgggttttcattgtggaatttcttatttcttgttagtatcttcctttgaagcaaatccca

SEQ ID NO: 146446 - DNA, 122 bp, Homo sapiens
cgagagatgtacaaatacaccagccaagggatacaatagacacaatgtagccacctcctccgggcttggggctatgagcctgtgcggtaggggcttggagaggcctgggagctgtagtccgg

SEQ ID NO: 146447 - DNA, 122 bp, Homo sapiens
ctaccgtctctatggttcggggaatctccaggtcggggcttgaccggtccgacttttgcgcgtgcgcgagtcctggcgcgtgcccgccctcaagcaactgtccgacccagcgggtgggaggg

SEQ ID NO: 146448 - DNA, 122 bp, Homo sapiens
cggcaccctatgaagtcggtgagcgcgcagacatagctttggctggcaaacggtgtccgccgagggacaaaagaccttgacatgcgcagaaaatactaaattatagcgttactgggccaatt

SEQ ID NO: 146449 - DNA, 122 bp, Homo sapiens
tgtacctgactgaatgacggtgtccagctttatggcggacgggtaacacacacaagactgcggaaaatttttcacatttggcatggaaaaagagaaagactacacatgcagtcaaaattcat

SEQ ID NO: 146450 - DNA, 122 bp, Homo sapiens
cacacatgaggagtggagggaaggagccacttccagcagagcaaagtgccgagaagtagccgagcagattaaacttaggacccagtgccagggtgggcatgggcagcgaaggtgacacttgc

SEQ ID NO: 146451 - DNA, 122 bp, Homo sapiens
attctgctcaaattattttattgaaacctcatctaagaacctggggctagagagtcgcggcgatgcctgcagagtcacttggccgtcctcgtttcctgcatcttcgtgactcccggccatca

SEQ ID NO: 146452 - DNA, 122 bp, Homo sapiens
gcggtgcaccaggcggcagggtggggcgggcgacccacgtggagcgccttccatgggaggcgcttccctgccccctggtggccggaggagggatttgtcatgaggctccgctcagagcgaac

SEQ ID NO: 146453 - DNA, 122 bp, Homo sapiens
tgcccttgggggataggtggtgcaaattttgagataaagtggttatctcgagtataagaccgttgtgcattgttactgcgcacgcgaccttgttgctaatagcaatagtgtgatagctttaa

SEQ ID NO: 146454 - DNA, 122 bp, Homo sapiens
tcctgaggtggcagataacaactgaggcaaaccaaaggcaaaggtgggaaataaaatgtccgtgggggctttgaaaagctttgacattttcccaggaatctagaaagacacatgaatgtaca

SEQ ID NO: 146455 - DNA, 122 bp, Homo sapiens
tttggctgtcactgtgggacctgcagtgagtggtcgtgcacaggtgtacctctttcagagcgggctttctgagtcacaggtgcatgcacattcagcgtgacgacctgctgacctgctgacaa

SEQ ID NO: 146456 - DNA, 122 bp, Homo sapiens
tgggagatgcatgctccttctccatcttccttgaccaccttcctgagggcactcagcccacgctgtaagtgttccttggttctgtgatatcttcctacctgatttatgtttaatcgatttgt

SEQ ID NO: 146457 - DNA, 122 bp, Homo sapiens
atcctgtcccttggggctgctggcagggttggcgtgtatgggtgtggacaggcagaccctcgcgggcagcctgctcctggggccctggcactgcctggctggggctcacaggcacgctgccc

SEQ ID NO: 146458 - DNA, 122 bp, Homo sapiens
acacaattttcttccttttgaggagtgattctcccactcattcagcagaaatgtgttgatcgcctcgtaggtttggtgctgtcctggggacacagctggggatcaggcgtggtcactgctct

SEQ ID NO: 146459 - DNA, 122 bp, Homo sapiens
acattggacatttgtctaagacattcaaagtattttaggctgtgggcttactttttacaacgatgcttagcacgtactagaataaccatatttcctgagcaatctataggaaaggaagaggt

SEQ ID NO: 146460 - DNA, 122 bp, Homo sapiens
tcccggttgggccctgctgcgcggttagaaccgggaaatggagggctcagacgccccgcgcgagcaggcccagccgcgcttccccacctgccgccaccgccgctgagccggcccgtgggcgc

SEQ ID NO: 146461 - DNA, 122 bp, Homo sapiens
ccagtgacatagaggggcagattccagcacagcggcccatgccgcgcaggtcgggagcttcgctttcccaggtgaaatcaatgccgccgcaagacagggagccccgggctgcggctggtggc

SEQ ID NO: 146462 - DNA, 122 bp, Homo sapiens
cggttatttccggattgactcggctcgttccgtaaagcgccggaggattggctggggcgtcgggagagaggaggctcgaaactacatttcccatgacgcagtgagaatttaaaaccaaaaca

SEQ ID NO: 146463 - DNA, 122 bp, Homo sapiens
tttctgaccccgaaggctgtggtgttcacctggacagcagtagcttcccagtaaggcacacgccacgacgcgcaatattatgcggccctttaggaggacgttgccgaatggtgtgtatcgac

SEQ ID NO: 146464 - DNA, 122 bp, Homo sapiens
acagtaggaaaaaaatgcttgtcaccacacaatggaccataagtaatgttaaaaacaggacggagaggttagggtcctcagcactccttgctaattacccatcttttttccactctacattc

SEQ ID NO: 146465 - DNA, 122 bp, Homo sapiens
agccttaacaaggcattgagagagctggattgattgattagactcttgccaactgctgtgcggaatacagaaaatgcagctccagctctcaaagggctgaaaatctaattgaggtgaaaaag

SEQ ID NO: 146466 - DNA, 122 bp, Homo sapiens
agttcccggccgaataaagctccttccttctttaacctggtgactgaggagttttgcctgcggctcgtcctgctacactgctatgcctcagcccttgacctctgggtgcccgctgctccatg

SEQ ID NO: 146467 - DNA, 122 bp, Homo sapiens
taacgttggtgccagtcaagcaaagagtattatgatggaaaagaccagtccaagccccatcgctccggagtgggagccagtgttcttgctaattgtttctttctgcactaaccactcagatg

SEQ ID NO: 146468 - DNA, 122 bp, Homo sapiens
ctcggttttgtgcgaggggaggtctctgaggatggcggacagttccaggggtgataaacgcggacacctggcagagaaccacgccctgcagctcgcgaggctctttcacgcacagcactgag

SEQ ID NO: 146469 - DNA, 122 bp, Homo sapiens
cagggggcgctgagcagaggtgctcctaacttcccacacgcggtggcagctgcgcagaggcgcttctcacctcccagatgggcggcggccgggcaaaggtgctcctgcttcccagacggggc

SEQ ID NO: 146470 - DNA, 122 bp, Homo sapiens
ataataagcactctatataatttgtaccatttaattcttcaaccctaaatgatactattacgaaccacattgtatgagatgaggaaactgagattttcatcaaaaccatggaaagccaacgt

SEQ ID NO: 146471 - DNA, 122 bp, Homo sapiens
tccctcgccggaagtggtcctcttcttacccatccctctcaggaagtgggcacaaactctcgcccgacaccacgaaagttccgggtcagggagctgcgttggcagaggccaggaggggcccg

SEQ ID NO: 146472 - DNA, 122 bp, Homo sapiens
aagaatcaccaggactcagaaccatgggggtagtctgcaaggggtcttggtgtcattcagcgctctcccagcttttcttggggagaactcggagagagggaaggaaaagccaagataacaat

SEQ ID NO: 146473 - DNA, 122 bp, Homo sapiens
actggatgggaagcgtcacaggctgataacgtgacctttgcgcgcagctcaattattgcgcgggctgggggcggggcctgcggggaagggacagagccaagcccagccttgagccatcctcg

SEQ ID NO: 146474 - DNA, 122 bp, Homo sapiens
acatgcgcttatcaagagcatgcccctgttgaaatggtttgctaacaactataaaaaagtcggagctacattggaaattgtcacatataaatcacaagaagggtctcagtttgtgaaaggat

SEQ ID NO: 146475 - DNA, 122 bp, Homo sapiens
ctctccctcctgctcctgtccacctgtgtggctctgttgctgtagccactgctgggtgcccggggagccccgttggagccattgtacccaggggacaataccacaccggagcagatggccca

SEQ ID NO: 146476 - DNA, 122 bp, Homo sapiens
ggccttcctgacccggcaggcctggccgctgggccaggcgggctgcaaggcggtgtactacgtgtgcgcgctcagcatgtacgccagcgtgctgctcaccggcctgctcagcctgcagcgct

SEQ ID NO: 146477 - DNA, 122 bp, Homo sapiens
cacgataggccactcgacgagttctgccgctagtgacagggagagaggccagttccgccccgatcaaccacgctggcctacaccacttccgccctgatcaaccacgctggccgaggccagtt

SEQ ID NO: 146478 - DNA, 122 bp, Homo sapiens
tagccccatttcttcagcagtggagcctaggatgtagagctgcatactaccattaggaggcgcaccctcaggcctcggctccgcgttctttatgtctctggaccgctctctctcgcagctca

SEQ ID NO: 146479 - DNA, 122 bp, Homo sapiens
aaataactccttacaatatattaaaaatacttacaaacaattcttagaatcaaacacttacgtaaatacttttttaaaaaaataggtccaaaagactcagcccagatcggctttgaagttat

SEQ ID NO: 146480 - DNA, 122 bp, Homo sapiens
tgggtggggtgaaggactcaggccccgccctcccggccctgcaggggaccctcgggcccccgccttacattggcctggggtattcatctccttgggcccaggggagcccgaggcccacgtgg

SEQ ID NO: 146481 - DNA, 122 bp, Homo sapiens
taagtttgtttgccagtacccagatgattctgatgtttcaaatcagttgcctcttgccctcgtttatgctaagtttaacttcagggaagcaaattttttaagtttcaaggcaagaattcttt

SEQ ID NO: 146482 - DNA, 122 bp, Homo sapiens
tgcttatcactgttctgaagtagcacaaacacagctattctctgcataatgaaacgtggccgttcctaccaagtatttatttgacaagtaggctcttaagcacttgaacagaagtgaaaagc

SEQ ID NO: 146483 - DNA, 122 bp, Homo sapiens
aaatgcaactgaggagcagcagcccctccagggcctggagctgagcttctggtggaacggcgaggcccccttctgggcagaggcacacagtgcgcccagagggctgtgcaaagctgccctgt

SEQ ID NO: 146484 - DNA, 122 bp, Homo sapiens
tttaaaacttaaattagtacatgtaaagaactggcacaaacagatgaaggttcactttcacggcagcagtagcatctgcacaacatacccccttagccactgccctcagcccttcccccctc

SEQ ID NO: 146485 - DNA, 122 bp, Homo sapiens
ctgaggcccttccagtgtcttttgtttcaaagcactcagcacgtcaaggtgccacaatttcgggtattgtgttttgagccctgtcagaggcagtatgtctcttttagccaacttttagtttt

SEQ ID NO: 146486 - DNA, 122 bp, Homo sapiens
cttgctcagagtcacactaccagactgcaaactcaggtgctttttattatgcagaatacccgctgcagacctaatcctgccccaggctctggggccagctttgttcgcagggagattttaag

SEQ ID NO: 146487 - DNA, 122 bp, Homo sapiens
acaggccaggcaagccacaacacctgtcctgcaaacacatttttagagagaggactccaccgtggagccagtgtgtgggcagaactacctgctgtcagtattgatgacatggcaggcacact

SEQ ID NO: 146488 - DNA, 122 bp, Homo sapiens
ggttctccgtggccaagcatccttggccttggagcccaggggctgcgttccccttggggccggggcgggagagaggacctcggtggtactcgcccgtgcgctgggcgcagccgcttggccct

SEQ ID NO: 146489 - DNA, 122 bp, Homo sapiens
gaaaaaaaaaggaaaagagcaaaacttaccacagaacacttagcagaaagatggaaaagacgaacatgtagaccaagtataaaaccatggattaaaatgaaacaatcacctttgtaaagaaa

SEQ ID NO: 146490 - DNA, 122 bp, Homo sapiens
ggcaggaggagggtgacgggggagagcgagagggggaggctgggagggtgcggggaggcgcggggaggggaagggggttgatttacctgagaccagccactggcctccattgttggagaatt

SEQ ID NO: 146491 - DNA, 122 bp, Homo sapiens
gtgcgggccgtctcccgtgtctggcagggatacagagctgcggcagcgcaggcagctgttcgaggctggcctccactcctccgcacgctatggcagccacgatggcagcagcacggtggcgg

SEQ ID NO: 146492 - DNA, 122 bp, Homo sapiens
agttggagtcggagccggagccgggggttgcccgttagtggcgctcttgggctggcacaccggtgctgctgcgggaacggccactgaggagtcagggtgggggacaaagaagaagagagttt

SEQ ID NO: 146493 - DNA, 122 bp, Homo sapiens
ccctgcttgtctcagtgcttcccaaccgccccttgagtctctggtcccccatttcctgcccgcctgtgcccccaccgcggcccgggaccttcccgtcagggtctgtcctggcagcccggggg

SEQ ID NO: 146494 - DNA, 122 bp, Homo sapiens
agccctcaagatagtccaagaaatttctcccccagtgcctcagcccatttttcatttgcacggaggtaaggactttttgtgagtggaggcataaggtcttatagagagaatcccattttcct

SEQ ID NO: 146495 - DNA, 122 bp, Homo sapiens
ccgtcgggaacaaaccgggagaaagaggaagagccggcgccaaaggtatcccgcccaccgcggtccccccagaactcttcctgcgcttgcaagcgccacgctgcccacaggactgcgccagc

SEQ ID NO: 146496 - DNA, 122 bp, Homo sapiens
aaaacatcacagtaacctctaaaatcgttgcaaggggatccaggttgcagggtgatggttcgaccactgaagtgcctactccactgcacagaccctgtactggcacaagttgatgggtccac

SEQ ID NO: 146497 - DNA, 122 bp, Homo sapiens
ggaggcaggaggagatggccactgcatccagcgtcgcctcctggtgctgcgggcccctgacggacagaggacgctcgacccctgcccgccaccgcccagggagtcagcccgactcccaggca

SEQ ID NO: 146498 - DNA, 122 bp, Homo sapiens
cgaaccaggtggagacctgggtgagggtcatcttggtgatgatggctagcatgatcttctcgcccttggtggggtaggggttcttgcggtgctcgttgagccaggccttgagagtggccgtg

SEQ ID NO: 146499 - DNA, 122 bp, Homo sapiens
gcacttctcagcccttgggcgatccatgggaccgggggctgtggagcagggggctgcactcgtccgggaggctcaggcatggcaggctgcaggtccggagccctgccctgcggggaggcagc

SEQ ID NO: 146500 - DNA, 122 bp, Homo sapiens
acggttaactttgacccaaagacaacctcttctctcccgcttctctcgctgtgaagatggcgctctccagggtgtgctgggctcggtcggctgtgtggggctcggcagtcacccctggacat

SEQ ID NO: 146501 - DNA, 122 bp, Homo sapiens
tccatttccaagccactatttcctgcagtgatagacactaatcaatttggctccctgtcccggtagaagaggggtctatgtaggaggtgtgtgtatgatggtgtgtgtgcccaggtcacaag

SEQ ID NO: 146502 - DNA, 122 bp, Homo sapiens
ttattctttactgttggcctctgtgtgttgtaccagcttagaaagggctccctagtcgagcgtgcaattcagtttcaaacacttgggcctttaacccagggattatcagggccgactttctg

SEQ ID NO: 146503 - DNA, 122 bp, Homo sapiens
cactgacctggcccactgagagccagcagggctaggtaacctgtcttgggagtgtgagaccgccccgccctgccacgcccctcaccgccctgcccggaggcgccagccgcactccttggctt

SEQ ID NO: 146504 - DNA, 122 bp, Homo sapiens
gctctccagcttgggtgacagagcaagactccgtctcaaaaaaaaaaaaaaaaaaaaaagcggtctcacagagctgaagtcctctgagtgtgcaatgaagtaagcttcaggaagtgggaaaa

SEQ ID NO: 146505 - DNA, 122 bp, Homo sapiens
gtccccgcgaggggaaggggcgggggcggggggcggtgcacggaaaacccggggagcaaacgtgcccaatgctcaccaactcctcgtagctcctgttgtgctcgttgccctcccagtccaat

SEQ ID NO: 146506 - DNA, 122 bp, Homo sapiens
ccagctctttttctggatgtcagcactaaccccctcccggagcttggtaaacacagcgcgcgcatttttctgcctcagattggcatgttgacgactctgcttgaaggaatgtgacaataaag

SEQ ID NO: 146507 - DNA, 122 bp, Homo sapiens
ggaaagcatggaggaaagaccacccatttgtaaggagggcttcatttctgtgtgcagtgccgcggacaggctccctcggctgaaaccgcgccctccctactgggagggagctggtcgcgtgc

SEQ ID NO: 146508 - DNA, 122 bp, Homo sapiens
ttagcagagtcacctgtaagaaccccactgccgagcagcaaagatagatcacgtcagcagcgaccaggtggaggatgtataccatgtagggattcgtggccccacagcaaagcagccagaag

SEQ ID NO: 146509 - DNA, 122 bp, Homo sapiens
cggccgaatagcgctgctttctttgtttttcatgcaacataattccatggccagtccaggcgctgcagccccctcccctgccggccccggcgcccgcgcaggaccgcagaggggctgggggt

SEQ ID NO: 146510 - DNA, 122 bp, Homo sapiens
gaaaaaacccacagcctgcccaccccaaggccctccctcccggcctcgtgaccctaatggcggcttccagcgcctcaaacatgagcactgagctcacagcagcccctggccaggaacacccg

SEQ ID NO: 146511 - DNA, 122 bp, Homo sapiens
cactcaggaaagcaactgtgcgtgggactccggtgccgcacggcctggcacttcgtcttccgtgactcgcctgtttcacgagtgggatcccaagcccaatacgacagccagggcattgtcct

SEQ ID NO: 146512 - DNA, 122 bp, Homo sapiens
aacatcttgatgtaactaagacacacttccacaagagccactaggataaccccactgaagcgcttatggagtaaagtgatgtaagcgaccagcaagcagtccactgctcctatagattgggt

SEQ ID NO: 146513 - DNA, 122 bp, Homo sapiens
cacgccctgtgctgagcggcaaggcacagccgcgggaaggtaaacgcagagccgaggggccggccagcacctggccctgaccgcccccaggccacgcattccttgttacttcacctcctggc

SEQ ID NO: 146514 - DNA, 122 bp, Homo sapiens
tggttggctgccctggcacaaaggaggcatccaggctgtgaggattggctagtccagccccgcccagcctcctgaagtgtttcctagatctggggccaggagcaaaaacctcctggcaaagg

SEQ ID NO: 146515 - DNA, 122 bp, Homo sapiens
acctcaggtgatccacctgccttggcctcccaaagtgctgggattacaggtaagagccaccgcgccccacctggatgaatgttcactttcttatgtgcacagtcagggtttgtcccccaatt

SEQ ID NO: 146516 - DNA, 122 bp, Homo sapiens
gtgtcctgcgctgtgcacctgacgtcccgcctgcaaaggtcggccacctcacgtgtcctgcgctgtgcacctgacgtcccgcctgcgagggtcggccacctcacgtgtcctgcgctgtgcac

SEQ ID NO: 146517 - DNA, 122 bp, Homo sapiens
gccaggaacccaccagctgagaggtgctggctctgcagaacacactgcatcaggcaaagccgatcaccactggccacaccaatctgcttcgggtgtaatccaagctgctgattgccatctag

SEQ ID NO: 146518 - DNA, 122 bp, Homo sapiens
agatatttgcccaagtaaaatgacttacgtccacacaaaaacctgcatgtgagtatttaccgcagctgtattcatgatcaacaaaaactggaaacaacccagaggcccttcaaaaggagaca

SEQ ID NO: 146519 - DNA, 122 bp, Homo sapiens
aggtcatacaagggtctgaaagagttagcaccttagaagcaaacctctccatagggtccacgtttccagaccttcctattcccaacatgaaattaccttcatgcacatctttgggtctctcc

SEQ ID NO: 146520 - DNA, 122 bp, Homo sapiens
tgacagcaggtggaacgtgcacgtgcggaccgggatcaccgaggagatgcctgtggggaccgcctgggagcatgtgccaggtaggagcctgcagacagggcctgtggtgccggccagccggg

SEQ ID NO: 146521 - DNA, 122 bp, Homo sapiens
ttcagcttgccttccaagttctttctgttcttggggcagcggcagtgcaggatggtgggccgcatgggagagtggtgggagttcatagtctttttgtggcgctttggtggtggactagtgtt

SEQ ID NO: 146522 - DNA, 122 bp, Homo sapiens
tgaggctgtcgcggacgctggctgccaaggtggagctggtggacattcaacgcgagggggcgctgcgcttcatggtggccgacgacgcggccgcgggctccgggggctcggctcagtggcag

SEQ ID NO: 146523 - DNA, 122 bp, Homo sapiens
ttgggagagggcagtcccacagcaggctcacatcctgcacttcagagtttcagcagccaacgcagctgccagaacctggtcctgccaggaagcttctgattagggccctgaaccaccttcct

SEQ ID NO: 146524 - DNA, 122 bp, Homo sapiens
ctgttcagtgtgacaacgctgacccagatattttccgttccgacccggggctccggcgcccgggctggctgtttatgtaactactgcacaatattatatgccatgattcattgactattttt

SEQ ID NO: 146525 - DNA, 122 bp, Homo sapiens
gaaggtcggagcaccctgggccgttacattgtctatttttagcgcctttttctaatgccacgactgtagagagtctaaatgcttttttccctgtggtagaacgaaggggaaaagttagaacc

SEQ ID NO: 146526 - DNA, 122 bp, Homo sapiens
ggcttgagcccaagaggcagaggttctggggagccgagatcgtgctactgcactccagcccggtgacacagccaggcccagtttcaaaaagaaaaaaaaaagatatgaaagctttctgaaat

SEQ ID NO: 146527 - DNA, 122 bp, Homo sapiens
aaaagcagaaatgtgtattctctttttttgtttcgatgaccttgttcctgacttgttactcgtgacttgagagatcagagggctagaggactagaatttatagaggtgttttttttgtttgt

SEQ ID NO: 146528 - DNA, 122 bp, Homo sapiens
tttgtttattagctttgagatggtcactggtatcttgggttatattaatagcgtacaattcgaattgtgcacttcagaaatctgaagttcatttgaagaaatatagaaaaacggcaatggta

SEQ ID NO: 146529 - DNA, 122 bp, Homo sapiens
tccctcacatctgagctgcccaacccaagatgaaactgaccttccccacaacacaatgagcgtttttcaaatcctttcacaatcatcccttaagctttaacagcccaaatctacctgaagga

SEQ ID NO: 146530 - DNA, 122 bp, Homo sapiens
taaagcccaagtgcaatttgaagaggtaaatatggaacttcctccttcccatcctacatccggattgggtgggcaatcacatcaaataccaagtgccccttccttggcccatgcccatcctc

SEQ ID NO: 146531 - DNA, 122 bp, Homo sapiens
aaaattggatacaccatgtaattaaacacccaaatcaagactcaggatatcggccaggtgcggtgtctcacacctgtaatcccagcactttgggaggctgaggtgggcagatcacttgaggt

SEQ ID NO: 146532 - DNA, 122 bp, Homo sapiens
aggcggcggctgcagcgggtgggactggcttgggcgcgggcgcgagctacgggtctgcagcggaccgggaccgggacccggacccggaccgcgccgggcggaggctgcgggttctctctggc

SEQ ID NO: 146533 - DNA, 122 bp, Homo sapiens
atcagtactctatggcagcagaaaaggactcgggcaggtccgacgtgtcagacattgggtcggacaactgttcactagccgatgaagagcagacaccccgggactgcctaggccaccggtcc

SEQ ID NO: 146534 - DNA, 122 bp, Homo sapiens
tcaggcctcccccgggcccagccccactcccgccgggccccactaaaccgttgccgcccgcgccaccgtcgatgggctcagacagcagcggggaacgctctccatctgccgccatggccgcc

SEQ ID NO: 146535 - DNA, 122 bp, Homo sapiens
agagtcgtgggactaaaggtagaccttaggtagtcgatgtcaaagataagcgcagctggacgttaaagcggtgaaaacattcagttaactactgacaggaaagagctgagctctatttcgat

SEQ ID NO: 146536 - DNA, 122 bp, Homo sapiens
tgattaatctcctgagtcaaaggccaagaggcagagacacagagagagggggtgaacctacgtggctgacctgacccagaggatcagcctaacctgggagatcttagcccctagagggcagg

SEQ ID NO: 146537 - DNA, 122 bp, Homo sapiens
ccaccccctagcagagaggcacccaggggtaccctaaccattgcagaggagaagggcgaccgcctcccagtcccggacgcctgcacatccgttaggcccagagtggctgctcttcctgctgt

SEQ ID NO: 146538 - DNA, 122 bp, Homo sapiens
ccgcgtttccatggagagcggaatgcggccttccggcttttcctcaggaggagacgcgtccgcgccggcgtcgcctcgccgctctgggggcggccatctttgagtacgtgacgtacagaagg

SEQ ID NO: 146539 - DNA, 122 bp, Homo sapiens
cacctgtgcctgcgcccacctgtacctgcgcccacctgtgcctgcgcccacctgtgcctgcgcccacctgtgcctgtgcccacctgtacctgcgcctgtccttctgcagttcacttatttaa

SEQ ID NO: 146540 - DNA, 122 bp, Homo sapiens
gagaccactttacttgtacggaagggggctgcctgcgtgggatgcaatctccagagcacacgggacaaaggaagggagcttctgttcctctgtcctttccctgttggctggggttggacgcc

SEQ ID NO: 146541 - DNA, 122 bp, Homo sapiens
gccacggcctcacctgtgcggggcccgggtcggtccgcctcgggcagcagcagctcggcgcgggcagcctccccaggcatggcctggccgtgcgcccgcccgtccctcagtccttccgaccc

SEQ ID NO: 146542 - DNA, 122 bp, Homo sapiens
cttcacccacatctgccagctgtaggcctcgttgatggaaaatttcaatgttgctgctgccgccactgctactgttgtgggatggaggtgagctgccttcctcccctcctcagcttccttgt

SEQ ID NO: 146543 - DNA, 122 bp, Homo sapiens
ggcttctccccagcaccgttctctgtcacggccgccgcctgaccatcaccccgcgcctcgcgtgggcatgtctcgcttcagaaatcccaagtcgtcttaggttccctggtccttcccctggg

SEQ ID NO: 146544 - DNA, 122 bp, Homo sapiens
gagctggattctggagaggattctgattaattggacccatccttgccctcccaattccaacgttcttctcaaatagaatgaaacatcgagggaggggccagccattgaaacatggagttctg

SEQ ID NO: 146545 - DNA, 122 bp, Homo sapiens
agaggaagagaaggaaaatgctcctagcgcttagcagggccctgcacaacggctgcgcagcggccaggaaagcggcccgagaggtgggatgcggccaaagctgctggggcggtggcggagag

SEQ ID NO: 146546 - DNA, 122 bp, Homo sapiens
tatgtaaggtccttcgggacctgactctatttcaggtcctccctcacccacatacaaatacgcactggccaccccttctttactgatgatttggctggttcttttgtcagcaaaaccagctt

SEQ ID NO: 146547 - DNA, 122 bp, Homo sapiens
gaactatgcaatcttgagttagctaccgggtctaagttaggcttctagattccaaatccacgctccactgcgcggtaactacataatcttgggctagtttaccagctctaagacttaatttt

SEQ ID NO: 146548 - DNA, 122 bp, Homo sapiens
aattaaatccatgtttcaggatgcttaatccaaactgaaacattccagaagtgtacttaccgaaaataatatattgtgaccatttaaacccctggtgctttaaatcagctacactatagtgg

SEQ ID NO: 146549 - DNA, 122 bp, Homo sapiens
agagctcacgtaggccttcttctgggaaacagcggctcaggaccagagctcggagaactgcgcgtccaggagcgcgggcgcggccggggaaaagggaggaggcggcaggagggggcaggagg

SEQ ID NO: 146550 - DNA, 122 bp, Homo sapiens
tctcccactagagtaggcagagtgtatttctctgctccatggatgttgggcttggctatacgacatgctttggccattggagtgtgggcagagtgacagtatgtcagttccaaagagtgtca

SEQ ID NO: 146551 - DNA, 122 bp, Homo sapiens
cgagcggtttggtgcgtgtgaagcgcgacatggcgaggaagcggacaagcccgggtggcccggcgtgtagagggaagggggcggggctagacgcggcctggacaactactagagcgcctcgg

SEQ ID NO: 146552 - DNA, 122 bp, Homo sapiens
tctgtgcacgtactcaccatatccctccttctttccgtgtggatgcatgctgcttttgagcgagagtttggcatttttcataaggtcggttgatgtccctgcacctagcaatacccaatcct

SEQ ID NO: 146553 - DNA, 122 bp, Homo sapiens
gaattttaaacaactcctttaatatgaagttattttattttgaattggattttccagagtcgtgtttactgccttggataaacagggcctcagacatgtaataaataggtgagtaaaataaa

SEQ ID NO: 146554 - DNA, 122 bp, Homo sapiens
ggactctgtcttttctccagtttgagcgggggtgtcgggagcaggcggagagctttcctgcgaggctgtggaagcagtgaacactcttctcagcggctcgcctcccagcagtgctatttttt

SEQ ID NO: 146555 - DNA, 122 bp, Homo sapiens
caaggacaccctcccatctcaacgcagcagcccgagtcctgggtcccatgcagagtggatcgcttactttttgtccacaaacatctcctcagcctggtttccctgatgttttgacagtcccc

SEQ ID NO: 146556 - DNA, 122 bp, Homo sapiens
attcttaggattctgatccaaatgcaagaatacagctgagggcacaacgtcctcagtcggcgggcgcggtgcagagggggcctgcggctcggcctgcgggcacccgcgggaaagaggtgcca

SEQ ID NO: 146557 - DNA, 122 bp, Homo sapiens
caaaaaaataaaaataatagctgagtggtgtggtggtatgtgtctgtagtcccagctactcgagaggctaaagtgggaggatcacttgtttccaggaatttgaggttgcagtgaggtatgat

SEQ ID NO: 146558 - DNA, 122 bp, Homo sapiens
aggtatccacacaccacacacatacatgcacacgtgtgagtgcacacatgtgcccacaaacgacagaggcacccttggccctgttctctgctccagctgcagaagcccctgcccccgctttg

SEQ ID NO: 146559 - DNA, 122 bp, Homo sapiens
agacaagggtccggcatcaagaacgctggccaggtaagcatcggtcctcataggacggaccgcactggatctctccacatctgagcagactggcctcgccttcaggaccggatacctcatga

SEQ ID NO: 146560 - DNA, 122 bp, Homo sapiens
agacgtggctcttctcccgcttctccaccggctggagctgcgggctgcacgccgactggacggagctcaccaactgcgtgccggccatcatggagaagaaggactgtccccgcaaccacagc

SEQ ID NO: 146561 - DNA, 122 bp, Homo sapiens
cccctggcccttccctccatttttaatcaataaacccagccgccccgggctgactgtccccgcacccagctgccttggagacaggagtgtcgtataagcccgtaggtaagagcacggtgctt

SEQ ID NO: 146562 - DNA, 122 bp, Homo sapiens
agggttgtgctgctgccagaccaaagcagactaatgctgcaccagacagccagagcctggcgaacccagagagcctggcatgagactgcctgtgctggcgcctaccaaagcaaggcctgctc

SEQ ID NO: 146563 - DNA, 122 bp, Homo sapiens
gcggctttaactttacaatgcaatgaagcaaaatatgctggctttgagacccggagggcacgaaaacagggagctggggttctggaaggacgccagctcggcctgcgaggggctgaaaaata

SEQ ID NO: 146564 - DNA, 122 bp, Homo sapiens
aggatggccttcacaaaatacaaccgacctgaattgcaaacatttattttctcacagttccggaggctggaagtccaagatggagctgctgtgagggttggtttccggtgaggcctttcttc

SEQ ID NO: 146565 - DNA, 122 bp, Homo sapiens
cagattaactgtaatgtgtaggattagaataaaagcataagggattaggtaaaagggcgacgctccagacataacgcccgagcgcatctcgactgagtcagcctagggagactgcgaaggcg

SEQ ID NO: 146566 - DNA, 122 bp, Homo sapiens
gttttgaaaagtgattgaactgccagtcacctcccaaatagagtgagtcgtcttccatgtcgcccgcaacaaggatcacaaggtttttctgctgggaccgcaggttgcagcaagacgctatc

SEQ ID NO: 146567 - DNA, 122 bp, Homo sapiens
tgtcagcaccaccctttagccccgccccaagcctgttagccccgcctcctcaccgccctccgagtcagagtcccggtccagctgcccagcgctgctcacgatgttggccaagtgcacggccg

SEQ ID NO: 146568 - DNA, 122 bp, Homo sapiens
ctcggctcagctaagcagctctgcacgtcccttcccacttgctcagccaatcgctgggctcggccccgcccctttgggcttggtccttctcacgccaccaatccgcgcctcttgtcccgccc

SEQ ID NO: 146569 - DNA, 122 bp, Homo sapiens
tgccatctaatcagagtggtctcaaaaaaaaaaattctggttacggcatttgctaactaacgtttttaaatggctcccaatatctgcaggagaaaacctaaacccctgtttacataatgttt

SEQ ID NO: 146570 - DNA, 122 bp, Homo sapiens
ccggggtccgggtgggcgtggggaatggacccatagacccgggacgagcggcgcggagcccgcagctggccagcttcagccaccttgggagacgcagtgcagctgccgctgctgacagacaa

SEQ ID NO: 146571 - DNA, 122 bp, Homo sapiens
aaataatttcttaataactcctataacatcataatttccttaggtataattttgcaaaggcggtttcaaaagctctttggggtcctcagtaatttttaagagtgtaaaaggattttaacaac

SEQ ID NO: 146572 - DNA, 122 bp, Homo sapiens
ttaagggctggattagtgcccctacaaatgttgggtccctcaagatcatggttaggctcacggccaagaaagaaaaataagttcacagaggtggggtctctagacaggagtaaggcacacgg

SEQ ID NO: 146573 - DNA, 122 bp, Homo sapiens
tgtttttaacgttctcaggtcctataatttacccaaataaagtgggaccgtatttgcaggcgctgagaaactttctcaacagtaagaaccaatcaggcgcagtgcgcaggcgccttcagtgg

SEQ ID NO: 146574 - DNA, 122 bp, Homo sapiens
ggtcacaggcccttacgaggtggggcaggcaggcgcggccgcagtgccttccagtcagcgcggaggcggtattgagttcagccgctccccacagccccggagcccctgggcggtggcggtgg

SEQ ID NO: 146575 - DNA, 122 bp, Homo sapiens
gcacctcgcccgcgtgggctgccacatcggggacctctatgtggacctccgggacggcttcgtgctcacgcggctcctggaagtgctgtctggggagcagctggtgagggggcctgaagggc

SEQ ID NO: 146576 - DNA, 122 bp, Homo sapiens
gagactcaaggcctaaagacattaaatggccccggagtgcagtccaccaccccccactaccggcactggggctgtgtctcagaacgccaggtcccattctgaatccgccgggcccggccgca

SEQ ID NO: 146577 - DNA, 122 bp, Homo sapiens
cccatccccgcagcgcgtctgcaccggagactctgcggggattgtagccggagggcgggccgggctccgaggcgctgctcaggcattggggtttgtcctcatgagctccacgtcggcgtgca

SEQ ID NO: 146578 - DNA, 122 bp, Homo sapiens
tttgagtaaagtgagttgccgttcttgaagcccgtctcctaaggattctcccggtgtccgcgtagggatctcatgctatataggagggccctgccaggcaccgtctcctctctccggtccgt

SEQ ID NO: 146579 - DNA, 122 bp, Homo sapiens
atcccggcgcagtgccgatttaggttgaaaacgctcccagtcatgggcctgcacgtggagcgccggggctgggggaggcattcgcggggctcctttcccgccccgctcgggagctcacgttt

SEQ ID NO: 146580 - DNA, 122 bp, Homo sapiens
attcccaagaaaccctttttaagagtgtggaatgactggacttggtgcagggcagtgcaccgcctggaagccgggaagaaccaccttgcccttgcgatgcaaatccccctgcgtgcccatgt

SEQ ID NO: 146581 - DNA, 122 bp, Homo sapiens
tgagcgtcatttccatatgtaaggggccagctcttacaaaagcgcggctctcgggggccgcgggctgcagcgcgcatcctccccgcccccgccggcccgcccccgcccgcgcagcccgcgcc

SEQ ID NO: 146582 - DNA, 122 bp, Homo sapiens
gttatagccaggagcccatgcgtatctctctcaagagtggaagctgggctgctatttttgcgaacctgtacttctctaaacctcaaagaagatgtaagcccatgatggttagacttgaatcc

SEQ ID NO: 146583 - DNA, 122 bp, Homo sapiens
cgggcctctccagcgagtgggcggcgtgcagcctcgtctgggcttctgggaccagccctacgcggctcgggccccttggccactgggtcccggggcgccgtccgcgagcggcctggactgcc

SEQ ID NO: 146584 - DNA, 122 bp, Homo sapiens
gcggacccccatctcatgtaggaatgccgtgtccccagggtgagccctcaggtgagcctccgcggccgcgtggaaggggcgagaagggcgctgcccgggtgctgtcggcgaccagcccggct

SEQ ID NO: 146585 - DNA, 122 bp, Homo sapiens
ggcttggggaagagggttctgatctctctgccacctgcactgggtggcaacgccacgccgcgctccctactctggccccagctgtggctcgccagctctgcactctagcctcagccctgctc

SEQ ID NO: 146586 - DNA, 122 bp, Homo sapiens
tctggacgtgcttcccagaggagacgtaggtgccatagaagaactcccaagtatgagggtcgacaggcattaaacaagtaatactgagggtgaatcggggtgggcgtcctggaggaagggct

SEQ ID NO: 146587 - DNA, 122 bp, Homo sapiens
aagggccaggacagcaccttctttctcttcttaacttctacagccaagaaaacaaggcaacgagaaaaattagactacagtgttaagaagcaaagatccaggtaagaaaatgggtatcgttg

SEQ ID NO: 146588 - DNA, 122 bp, Homo sapiens
tttgtgtggctttggcaagcctctgagtgttgatgtgtggttttcattcctggtgcctctcgcctttccatcttccttccttacctattaagggcttaagggcattctgcagctctggggta

SEQ ID NO: 146589 - DNA, 122 bp, Homo sapiens
ttcatggctttgtgtttaccgttttcgggtgcccttttttctggctgtatgctacacgcacgggtgcttttccgttgtccaactgtgtaatgtgtttttgtgtttgttcttttgtgagtcgg

SEQ ID NO: 146590 - DNA, 122 bp, Homo sapiens
tttgctggctgcctcgggagaccctgttgccaggatacttggcgttcccgacccgacccccgttccccattggctgtcagggcaaaagccgccatctaatgaggagcgaggtgcggtgcccc

SEQ ID NO: 146591 - DNA, 122 bp, Homo sapiens
agatgaccttggtccaggaccaggctctccatcggcgcagccgctcctgggcaacccccgcggggcttgaccgcgcccacccagggtctaccagtctggggattggatgtgggaacaaagcc

SEQ ID NO: 146592 - DNA, 122 bp, Homo sapiens
cgctggcgcttgtccactgtgcagtctttgttgtcccggcaagagtatgtaaggtctttgcggatggtgcgtttgaagaagcccttgcaaccctcacagctgtaaaccccgtagtgtttgcc

SEQ ID NO: 146593 - DNA, 122 bp, Homo sapiens
gtgagactggaccagtgaatgtgtgtgtgcaccagggtccagcacagagtaggccaggaccgatggtgataccagcaaaacagaatcacatggtggcagcccgcggttcctcctggtctccc

SEQ ID NO: 146594 - DNA, 122 bp, Homo sapiens
gccctccctattatcgagaaaagttcttgcgcttcgcatgcaccgagcggggaacaaaagcggcaggggaggtgtcagagaaagatctgagccgggtttataaatgatatgctggcagtcag

SEQ ID NO: 146595 - DNA, 122 bp, Homo sapiens
cgaaatctgaaacacttttgttcccaagcatttcagataagggatactcaaccagcagtacgtgcctcatggggttgtgggggaggattaaatgaggtaacaatgtaaaatgcttagagtaa

SEQ ID NO: 146596 - DNA, 122 bp, Homo sapiens
gagaaagctcgcgcgcggagcagtgggagcgggcgggactgaatattttctttgaccaaccgctttccacatatccatcctcctgatcccgtagcgtcgaatcaaaagccgttagtaaagta

SEQ ID NO: 146597 - DNA, 122 bp, Homo sapiens
tccgccccggggtgcccattgcgcagagcgtggcctggagacccgcgagccggggaaggtcgccgtggagtcccgaccagaggccggggttggggtcggtgcagaccgagggctggtttcct

SEQ ID NO: 146598 - DNA, 122 bp, Homo sapiens
tagccccgccgccccgctccctgctttgctacacaaataaacatttttccaggactgctgcggacgctggggcgaccggggtctcggagaggagcacgggacacgcaggatcgggggaggtt

SEQ ID NO: 146599 - DNA, 122 bp, Homo sapiens
ggaaacgacaagaatccctaagagaaaaagaggaaaaagctgtgtgctgctgaggcggggcgtgggaagacaaccacagtcaattggaaggagcccgagtcagggagcaattgctaggactt

SEQ ID NO: 146600 - DNA, 122 bp, Homo sapiens
aacacggaggcgagagggagcaggcgatggcgacgccgacggtaactggagaccgaggcgcgctgcgtacttgctgcgttttctgtttcatcctcacagccgtagaagaaaccgaggcacag

SEQ ID NO: 146601 - DNA, 122 bp, Homo sapiens
gtgagaatcgtgaaaaagtttgaaacagcgtgagaattaccaacatgtgacgtggagacacgaagtgagctcatggtgcgagaattaccaacatgtgacccagagacgccaaagtgagctca

SEQ ID NO: 146602 - DNA, 122 bp, Homo sapiens
gatcacgggcgcaaggtttggagttacaactgtttatttagtccttattctcacagggggcgggagctgcgcgggaatggggggctgcaggcagcgatttcgaagcaaacacatgggagggg

SEQ ID NO: 146603 - DNA, 122 bp, Homo sapiens
cggggaggagcccagggcaggccagcccgtccccgcgctgcctcacctcccggccatggtcgccttcccggaagaggagctcgtacttgatgatactctcctgccgcggggggctccaggac

SEQ ID NO: 146604 - DNA, 122 bp, Homo sapiens
aaacatgtagaagggtgaattatttcagcaaagttctactcatccagatgccctaggctacgggcttctgtaggctgctctaatgtgttacaaaaccctcttgggtgaactgggtgtggacg

SEQ ID NO: 146605 - DNA, 122 bp, Homo sapiens
ctctgaccttgaagctaatgctgattgtggcccagaaagatgggactaggaaataaatcccggagaaaatcctgttgcccacctggtttgctggccaaacctgacccccaaaccagaggaca

SEQ ID NO: 146606 - DNA, 122 bp, Homo sapiens
gacagagacgggcatgctgagccgatgcgcgcggcggcagaggtactccgagccgccgcgcgccactactcaccgtctcctggggagatggtttccacctgcactcccatggcggcggcgga

SEQ ID NO: 146607 - DNA, 122 bp, Homo sapiens
gcactgcttttctgaatcgtgtggttctctctctggcccggcaggccagcttttccgagccggcgggagacccaggcccagggctcagatcctcaaagacctgaaagggttttggagcaggt

SEQ ID NO: 146608 - DNA, 122 bp, Homo sapiens
atacgattctttcattccatagaagacccaaggaccaagtttgtttaagaagactgtttccgtctcaggttcagcatcaaaggatctgaaccttcaggatggaaggcaaacccatatgcagc

SEQ ID NO: 146609 - DNA, 122 bp, Homo sapiens
ggccagaaagaaccctccggcgatcatctccatgcaggaacaccaaatagaactactatacgtacaagaaagcatcttcgtaagagccaaaaatcaagtgagcaataatagtacctgatttt

SEQ ID NO: 146610 - DNA, 122 bp, Homo sapiens
aaactttctttttatcaacatcaacggtacatacaacacttacaaacaaggaatgttggacggtgttacaaacactatgtgtcccttttgtcaggattttctgatgtgtaatacttgtgccc

SEQ ID NO: 146611 - DNA, 122 bp, Homo sapiens
ggcggggcctgggaggaaggcgtggcctttggggactggggctcggactgggggcggagccggggctggttggggaccggccgggttccgctcctgctggagcccggtgcgtggaattccac

SEQ ID NO: 146612 - DNA, 122 bp, Homo sapiens
cgcgggcgctccggggccagaggcgccttcggctcgggccatggcgcccggcgccgggggcgcgaggagcggctcatctagtcagaccccccaccccgccaccgccaccagacaccaccatc

SEQ ID NO: 146613 - DNA, 122 bp, Homo sapiens
catcgcgacacacggaggcagaaagcagcggtctcctaagaagttagacacgaggaatctcgggcagcgaggtgcctgcaagcccgggggcgggcgggagcagcctgcacgcgtggggaagg

SEQ ID NO: 146614 - DNA, 122 bp, Homo sapiens
agatcgtccctgggtgcgggcgaccagacggaggctggggagatcgtccctgggtgcgggcgaccagacggaggctggggagatttacccaaagcccccgttgttatgcggtgcaacactca

SEQ ID NO: 146615 - DNA, 122 bp, Homo sapiens
ccttgggattctgagagactgtggggtggctcctggggcttgtggggcctgtcaacaccacggggagtttgcaggagtgtccccacagatttgggggtgtccctggtgtttgtggggacgcg

SEQ ID NO: 146616 - DNA, 122 bp, Homo sapiens
ggccgcactgccgccggtgtaaacactcactctggccctctcgccggaaaccggaaattccgcgctgcattctgggagttgcagttcccgctgtggccccccgcccccttataaacagccag

SEQ ID NO: 146617 - DNA, 122 bp, Homo sapiens
tctaattcattaacctattgatccattaatctatgaaggaattaatctatccatgagggccgagccctcctgattcaatcaccccataaaggtcccatcttttaatactcccctttggggat

SEQ ID NO: 146618 - DNA, 122 bp, Homo sapiens
ggcccgggtgggcggtgccctgagcggggctcctagtgggcggggctctggggtggcggccgttgccgggctacgggagagcgcggagccctgcgctgggaggtgcacggtgtgcacgctgg

SEQ ID NO: 146619 - DNA, 122 bp, Homo sapiens
cacaaagaactacttcttcccgaccaagtacaaagcaaaacagttttcatcaaacatccccgagccctcatagctaagagggttttgaattttgaacgaggcatctcattctacaaatgtct

SEQ ID NO: 146620 - DNA, 122 bp, Homo sapiens
tgacattggcacccgcggtgatgaggaaatccacgatagagtagttggcgccgcagatggcgttgtgcaaggcagtgatgccctcctcgttgggctggctcgggtcgttcatctgagtgcac

SEQ ID NO: 146621 - DNA, 122 bp, Homo sapiens
tccctgagcctccacttcttccactataaaacagaaaaacagaattgtaaaagcactagccgcagagatttgcaggatgagggtggcctcattaatccaacactctagttaactctcatatc

SEQ ID NO: 146622 - DNA, 122 bp, Homo sapiens
ccgccagctgggccaaagggtgacttgactcacgacgctgccaccagcccacggcttgcccgaggcgtataaaggctgccagggccgcaggctgccaagccctgccctgcccaaggcgcata

SEQ ID NO: 146623 - DNA, 122 bp, Homo sapiens
tgtgtggtattatgtaatatcacataatagatatgttacttaattatctgtctcactcaacggattgtaaatgtaaagatatatgtatgttggccaggtacagtggctcacgcctgtaatcc

SEQ ID NO: 146624 - DNA, 122 bp, Homo sapiens
caagggggcggggcgaaagcgacttgccctcaaaggggcggaaccccgagggccggcgtgcgcctacgggaccgggccagggtgacgatcctcaagttcccaagtagaggagaggaagcggc

SEQ ID NO: 146625 - DNA, 122 bp, Homo sapiens
cagaggatggagtcaggccacgttgtgcgccactctccccgcttaggtgggtgaggagaccgaggtgtgttgggcccccgctaaacaccagcaccgacctgagccccgcccagacccctcca

SEQ ID NO: 146626 - DNA, 122 bp, Homo sapiens
ttaaatttctgcaggccccacttatctgccgatgaaagttgggttctccagtgcagcttacgtgagtaaaatgaagggcattttgatttctattggcttgattccttagcttaggtctcagt

SEQ ID NO: 146627 - DNA, 122 bp, Homo sapiens
aatcctttgcggtggttctttccccaggctcaggcaggttccccttacgcacgtactgatcggttctcggctgaacactcgtgggaaccttctgcagacctccggctccctctgtgcagcgc

SEQ ID NO: 146628 - DNA, 122 bp, Homo sapiens
tgaccgcccaagttcaagcgatcctccctcctcagcctcctgaatagctgggactacagacgtgcaccacaaacgcccagctaattgttgtattttttgcagagatggggttttgccatgtt

SEQ ID NO: 146629 - DNA, 122 bp, Homo sapiens
tctccacgccagaatctggcattccttcgctcagcccctccgaggcccgccgtcggctctcgctcgaccccaagaaacgcggaacctgaagggcaaaactgcccacctccctgcaccctggc

SEQ ID NO: 146630 - DNA, 122 bp, Homo sapiens
aatagggctggacttcctgttgcttgcaattatcaagcaacagaatgcttcctaactggccgaccttctttcttctgggaatctaactctcctttaaggtcaaccagatgatccagacactc

SEQ ID NO: 146631 - DNA, 122 bp, Homo sapiens
ggaggtgcacggtaggtggccttgtggtggaaacaggtttaattagagcccggggggaggcgtacagataatcctgttaaaatctgttattttatgtatgaggaggctgaatctcccaggac

SEQ ID NO: 146632 - DNA, 122 bp, Homo sapiens
tttctgccactcccaagttgttgaggtccgagcctctcctggcagcatggggcgggggcacgtgggcagcagcttctgcaggggccaccttctgcccaggcttcctcatatttgcctggggt

SEQ ID NO: 146633 - DNA, 122 bp, Homo sapiens
agataggacagcatatttttcctaaaaggtgttgccttcttgtgtttgaggtggtttccccgggagaacttcatttcttctgggcataggggaattcgtctttttgtggtcgaggttcagag

SEQ ID NO: 146634 - DNA, 122 bp, Homo sapiens
aggagcgctggctgcagtcggggcctgagaagcctgcccggcacacacacacgccctgcacgcagcgcccacggccttggcagtccccgggacaggatggccagccacagctggggccagtg

SEQ ID NO: 146635 - DNA, 122 bp, Homo sapiens
tctgagatgccggttttcagccacaggcccttcagcgcttaaacagttagagacagggtacgtttctggccgaaacccgggagccgagtcctcaggaagccgcagggggcctcgagggagcg

SEQ ID NO: 146636 - DNA, 122 bp, Homo sapiens
ttccagtagccgagctcgggcctggtgtggaattccagatccgaatccgactgtggggggcgggctgggaggtgggagccgcgtctcaggcccggccgttatcaaggcccctccgcccccga

SEQ ID NO: 146637 - DNA, 122 bp, Homo sapiens
ctgactcctaccagggtgaccggctgtcacctggaaggtcggggctgcagggctgcggcgcggtcagtcctcaggaaaggctccggcaactactccagtggaaaataacaaaaacaaaacgt

SEQ ID NO: 146638 - DNA, 122 bp, Homo sapiens
cagaaaggccacccctactccctggtttaaagatagggctcccctcggcttgccacaatccgcaccctggaaaggaagagctcggagcaggtacgagagataggagcgcacaggccactcgg

SEQ ID NO: 146639 - DNA, 122 bp, Homo sapiens
ccagaatttaatgatgtagatgtttttctcattgcagattacaactatatcttatttgtacgctactagttcaacagtcattttgatgttttatatttgtaacatagtagaatattagtggt

SEQ ID NO: 146640 - DNA, 122 bp, Homo sapiens
cattacctttaccacatttttgtttttcccataattacattagataaggcaatggctagacgtggtcttttactaacttgttctattgggagcggacgagaaaaaaaaaaaagacaaaccct

SEQ ID NO: 146641 - DNA, 122 bp, Homo sapiens
gggctttctgggctctgttcaggtgccccccggcctggtgcagttgggcggccaatgtggcgcgtgggctggggccccaggcggggacgccgctgcccgccacactccaggggcctttgtcc

SEQ ID NO: 146642 - DNA, 122 bp, Homo sapiens
caagcctgagatcttggatcacacacattgtgcatggtgtttaacggaagcaccttgcaccggcatgcaggtagcaggctccaaactgcaccccaaatccctagtcattccaagttgcgctc

SEQ ID NO: 146643 - DNA, 122 bp, Homo sapiens
ccaactgatctcttgaccttgtgacattcttcttctggacgagtctcaggagttccccaccgagcaccttgtgacccccggccctgccagcaaaagataaccacctttaactttccactacc

SEQ ID NO: 146644 - DNA, 122 bp, Homo sapiens
ccctgcagctccgtcgggtgatatcacaggtgtgctgccagacctcacccctgccgttgccgtggaggcatcagggagacaggggcagcttgcgtggccggtcgccctgcatgggtgatggt

SEQ ID NO: 146645 - DNA, 122 bp, Homo sapiens
cacattccgggcctgctgctggcacgaggcgggggtgttgcagctgctgcccgccgtgtgcgataccaccacatagcgtaagggcaggctcaggtgctgggcgcactctgatgccagggcct

SEQ ID NO: 146646 - DNA, 122 bp, Homo sapiens
aattcccagggcctcacttgggcaggaggggcctcccaaatctgtccaccttctccccagcgtggccatcacttggctgctggagaaaagcagaggtttgcgctcagtaccatcatcaggtc

SEQ ID NO: 146647 - DNA, 122 bp, Homo sapiens
tgctagggagggagcaggggtgaggtctgggggcttaggctgggctttggtgggagccaccgctgtgatggcccctggcaccaggctgattcctaccagactgggcatgtgaggagcccctt

SEQ ID NO: 146648 - DNA, 122 bp, Homo sapiens
ggttggggtgacgtcaccgggcagggcgcgcccacctgcgggcggaggaggggccggcggcgccggagagggaccttgagaggtcaccgccggtcgcctctacccctacctcctccccgggt

SEQ ID NO: 146649 - DNA, 122 bp, Homo sapiens
gcctgtctccgaacgcgagcgccgagcacttggagctacgctggttccgaaagaaggtttcgccggccgtgctggtgcatagggacgggcgcgagcaggaagccgagcagatgcccgagtac

SEQ ID NO: 146650 - DNA, 122 bp, Homo sapiens
gggtcgctactcggtgcccgagggtccctttccagggcatctggtggatgtgagcggcaccgggaccctatcccagagctaccagtacaaggtgtgtctgacgggaggctcagaaacaaatg

SEQ ID NO: 146651 - DNA, 122 bp, Homo sapiens
acacagctccccgccagtcccaccggtgacagccacacaaaggcagggtcacaagcacaccgaccaccccacagcccagattcggccccagacacacactcacaagggcacgtgatcacgtg

SEQ ID NO: 146652 - DNA, 122 bp, Homo sapiens
cccgtgcctgtgcccggcgcgacgcgatctccctgctagtcgggctccgcgtgctccccgcgcttcccgcagcctccgcgcagcccgcagcgccctccagccccgcctcgcggccgcgggaa

SEQ ID NO: 146653 - DNA, 122 bp, Homo sapiens
ctccacccccccccccccccccactgggttccggaaaggctcagggttgctcccgcgtttcggttcagtgacgtcgtaaattggaatgaggcatccagtttagcaacagcagagatgacgac

SEQ ID NO: 146654 - DNA, 122 bp, Homo sapiens
ccgggcctccagcatcttccccatccttagcgccatcctgctgctgctcgggggtgtgtgcgtggcggcctcccgcgtctacaagtccaagaggaacatcattctgggcgcagggatcctgt

SEQ ID NO: 146655 - DNA, 122 bp, Homo sapiens
ggggcagttagcaaaataggctgcgcgttcgcttctgctagagggcggggccggaggtttcgattagttgtctctgccgctggggaaggtaaagcggcgacggcgtcctcaggagctgtggg

SEQ ID NO: 146656 - DNA, 122 bp, Homo sapiens
tttacaggaaacatatgcagcttcttcttgatgtctgttcagtcagcactgtcaattccacggtctactcgggatacttgagctagttccctaggatggacacgtcatttccagaactttga

SEQ ID NO: 146657 - DNA, 122 bp, Homo sapiens
ggccgcttgccgcccgcgactcgggttcggcttctttagtgattgcttctgcttctcccgcgccagctgtccccagctctggggcaacgctgccaggtgcccagtccccgcgctcgagagag

SEQ ID NO: 146658 - DNA, 122 bp, Homo sapiens
aagcggatgagggaagggcggccgtggccctgggggcggcgggagctgctttgcctccaccgatctccctgtgcggccctcatgtgctgtgctcgctgacacccgaagtccgcggctttccg

SEQ ID NO: 146659 - DNA, 122 bp, Homo sapiens
gtttagattctccgccggagtcccagagctcggtgttcaggatgatgagaaggcgtggaacgaggacttcaaatcccagagtgcagttctgcctgaggcttctgcatgctgggaactgaagt

SEQ ID NO: 146660 - DNA, 122 bp, Homo sapiens
ccacagcagcgcgtggggaggtcggcctgcagtcctggagggaatctgggtggctaatcacgcaaccactagattaggtacagatgcaggctggtccgagacaggattctcttgcgactgct

SEQ ID NO: 146661 - DNA, 122 bp, Homo sapiens
ttagtccggagtgcacagtaacatgcaaagaacattgcagtaaataaggagcatatggaccggtattcagcttctcagcacagcgcaagccccacacacacgatcctgggcatgtgctacta

SEQ ID NO: 146662 - DNA, 122 bp, Homo sapiens
ggcacgtccacctccccggtggccatctccatggtgcactgcttggctgtctttgcgccccgcgggaaccggttcaggtccagctcgatggcccctgtggcaacctcagtgtcagctcagag

SEQ ID NO: 146663 - DNA, 122 bp, Homo sapiens
ccatccccccaccgccgcacgggaagcggaagtgggtgcgggaccgcggcgcgcccagcccggccagctcccgcgcccagcccggcccttgaattcatctttttatggctgcatagtattcc

SEQ ID NO: 146664 - DNA, 122 bp, Homo sapiens
aaaagaaatcctttaaatctcgtgaaggaattctctggaataaccacattttcagaaatccgtgacatgatcgaggtggtccactgtcacgcccacaagagggcattttctcatcaactact

SEQ ID NO: 146665 - DNA, 122 bp, Homo sapiens
ctcagggattgtggaagtcttgctattcagaattaaagctgaattaacggtcataaacaacgctacacagttaaacattaaggatatggcaacattattagaaataaaattataactaaact

SEQ ID NO: 146666 - DNA, 122 bp, Homo sapiens
cataccgagacccccattgccacagaaaataaaataaaaaggaaattctgactgatgctacgacatagatgaaccttaaagacattgtatttaatgaaatgaaccattcaaaaaagacaaat

SEQ ID NO: 146667 - DNA, 122 bp, Homo sapiens
taactgccttctgttgtctgtagccatctccatttacttcccagcttttacagaagaagtcgcatacattcctctcccgactgatccaggctctctaatcttcactgaattgcccagaaaag

SEQ ID NO: 146668 - DNA, 122 bp, Homo sapiens
taaaagttccaagaactggtgccgcccgtgccatttgggcgctgggaaggtgctcggcggcggggttcccggtcccaccatgtgcaccaacatagtttacgagtggctcaaagcgctgcagc

SEQ ID NO: 146669 - DNA, 122 bp, Homo sapiens
taagcagagcgctgagcctcgcagctcgcattcggagggaagctgacatccacaccaagtcgagacttccagggatgtggccggggagcagtcacatgctgtagctttcatgagcacaggca

SEQ ID NO: 146670 - DNA, 122 bp, Homo sapiens
taaaggactaagaattgggaggactcaggacatccaatcagagtgcctaagggggttcagcgtgattattttcttggttgatgagtttttgggctctatccttgagtttttttatgttgtca

SEQ ID NO: 146671 - DNA, 122 bp, Homo sapiens
aaggtggttttacagcacatgccaagggcttggggagatccaaacagggcacctccgagacggaggaaagcaggggcagccagggcttcccagaagtgtgacacagcacgtcttcgctgttc

SEQ ID NO: 146672 - DNA, 122 bp, Homo sapiens
actgcccaatagagagccaccagccacagtggcaactgaacacttgcagtgtggcctgtccgaatgacacagtgctttaagtgtgaaatactagattttgaagatttggtgggggaaaaatg

SEQ ID NO: 146673 - DNA, 122 bp, Homo sapiens
gatgcttagacacctcactatgactattgactatcacacactgattgccaactatatgtccgggtttctctccttattaaccacagccaatgcgagaacgaagtttcacgttctgaaaatgc

SEQ ID NO: 146674 - DNA, 122 bp, Homo sapiens
gtgaaacagcctattctgggagctggtggcctccgggtcgcaggtggcgctgcggcgggtcggggcttttcggaggccccagcgtgtgtggggtgccaggcacctgctgctccaccttgtca

SEQ ID NO: 146675 - DNA, 122 bp, Homo sapiens
ggtagcacggaaagtcagtgacaacactgatttacaaatgagcaggcagaacgtgagagacgcgatgttcaaagatcctgcagaaaagccgggggccttgcccttctagttaccaaaatata

SEQ ID NO: 146676 - DNA, 122 bp, Homo sapiens
aggcaagacaaaggtttcccctgtttaccaagggccggggccaggagactgcgcgctgcccgtggtgtaaaatctgttttctttatcttcgcccggggcttgttgcgatggttttcctggca

SEQ ID NO: 146677 - DNA, 122 bp, Homo sapiens
aaccaaattcagcggtagggttgtgaacgtgtgcagcggtaagcacaggaatattccaaccgcagggtgaagatggacaccaaacggccgtgcatcagttcacattgcatttttctgtcaaa

SEQ ID NO: 146678 - DNA, 122 bp, Homo sapiens
acacaggccttcccatgcaaccaaggccctgcggtgtcactgggattcacggtagatctacgtagccgcctgtggctcgtggctgccaggtccggggcctatccccgtcggcccgccaaggt

SEQ ID NO: 146679 - DNA, 122 bp, Homo sapiens
gttacatatccatgcattcgcgtgaacatcccgtagtatactggggcatcactggggccccgagctaggagtccacccctccttggaggtgatacccaggctggggcctgtggggaaggctg

SEQ ID NO: 146680 - DNA, 122 bp, Homo sapiens
ctttgaggcggggcgaacgcgaacgcggcgttcccattggtggcctgcggcttattcgcccgtccgttgagtgacgcacttccggttctccgtttgcgccattgccctggtggttccgcctc

SEQ ID NO: 146681 - DNA, 122 bp, Homo sapiens
atccacatctgttggagtttgtggagagttagttgagcagtctgagctttgtttctgaggcgtctccctgagctcactctcctgccagagctgtgtcctgcccatggccataatggctattg

SEQ ID NO: 146682 - DNA, 122 bp, Homo sapiens
gcgctgctccgggggcggccgcgccacaggtgagcggaacacggttcgaggaaggtgggccgggcacagggcggcccgtggttgcaggtaccagagcttgctggagctggctgggctttgag

SEQ ID NO: 146683 - DNA, 122 bp, Homo sapiens
ttgagacagagtctcactctgtcactctgtcgcctaggctggagggcagtggcgtgatctcggctcactgcaacctccacctccggggttcaagtgattctcccgcctcagcctcccaagta

SEQ ID NO: 146684 - DNA, 122 bp, Homo sapiens
ttccccactcccggtgaattgctgttggagcagcctctcctttctgggtagtggcctggccgagctccccggggagggcttgacccagacctgtcctgcctccagtccagtcccagctacat

SEQ ID NO: 146685 - DNA, 122 bp, Homo sapiens
tctgtatgtgtccctaaatacagcaatgaggcacagtgagcactgagactgaagtttcctcgtctcctagtgcagccccattactggatgagtgctggcacactgtaggcactcaatagata

SEQ ID NO: 146686 - DNA, 122 bp, Homo sapiens
attaacaaggtggggtttgggtgaaattaggtgctgttagagctcaaagctaacaggttgcggtgtcagtgagttttagtcaaatgctcccagtctatttagcactggctcatacaaaggaa

SEQ ID NO: 146687 - DNA, 122 bp, Homo sapiens
cctccagaggctccagcgggggcgatggatcccgggacaggggcagcaactccgtggagccgtgcagggaaggggcatgccggggacgtctctagggaagggggcagggaagaggctggggg

SEQ ID NO: 146688 - DNA, 122 bp, Homo sapiens
gagagccgtctgtggagtcccggcccgtggggtcctggtgttgggtctgtctgctgccgccgtgcgcgctgtgaggagagcactctcttctgaggagaatgggatggggaaccacacacaac

SEQ ID NO: 146689 - DNA, 122 bp, Homo sapiens
tttataaggtacatgaggagacaaaccagataaatgcttgattggttgcagagatgcagtcgccttatttggacttgccagcccgaaataattcaaaggttcagatttcagtttgaagagtt

SEQ ID NO: 146690 - DNA, 122 bp, Homo sapiens
ggcgattggtccgtttccacggccggctgggtgacgttatcgccgggtcctggggctgcacgtgtggtgaggcctacagaagcggccttcagctggaccttggtctccccgccggacttcga

SEQ ID NO: 146691 - DNA, 122 bp, Homo sapiens
aactggctggtgccagtggcctctccagattgtcccacgctgtgtggccttgggtacacacgggttccctggggagcttccctaccacctgggtctcaccctcagagactgaggtttaattg

SEQ ID NO: 146692 - DNA, 122 bp, Homo sapiens
catatgaggaagagaagaccaagccctgggactttggctgaattcctccgtggggctggacggcagtgatctcctgttccctatgtgtaaacaaagattccagggcgtggttttgcactcct

SEQ ID NO: 146693 - DNA, 122 bp, Homo sapiens
aggaggtccggggtgccagggtgggaggagggcctggcttgtcgctgaaagccggccaggcgcactgtcggcgctcagagctggtggccgcctcctgcgcttcctgattcccagccgcgctc

SEQ ID NO: 146694 - DNA, 122 bp, Homo sapiens
aaggccaggccgtggactattattacatcgtttgttctttcgtgcacacaaaggaaaccacgcctttaccacttttttaggaggggtggagtcacacattgagcatttgcgtgcttttatgg

SEQ ID NO: 146695 - DNA, 122 bp, Homo sapiens
ttgagagaaaaatgccctagttgagcaccccgcaccatggccataagcatccaccgggctcgaagtgcatggcccgcagctgaccactagggggcagccctccacgcagaggctcgagcgac

SEQ ID NO: 146696 - DNA, 122 bp, Homo sapiens
gtagggagaaggacgaagaggggccccctcggcggggacgcgggccggtggcaggaagggcgtggagggcggtgcagcgtgcgagcccccgccgagggccatccccgcctccgctcggccgc

SEQ ID NO: 146697 - DNA, 122 bp, Homo sapiens
ggtaatatttactttagaccagctctactactaaatacaacaaatgaaatgtaaacaaaacgttaggttttctgctaccttctccccaaaactcttcaaattcaagactgggaatctaaaga

SEQ ID NO: 146698 - DNA, 122 bp, Homo sapiens
gcggcctccgtgcccatataaggccggcttgggctccacgccggcctcccgcccgcagcccgcctgcctggcagggcctttgcattcctcccgccagctgtctccccgctaggggcgggggt

SEQ ID NO: 146699 - DNA, 122 bp, Homo sapiens
tttcaccatgttggccaggctggtcttgaagtctggagacctccagtgagccacccacctcggccttccaaagtgctgagattacaggcatgagccaccatgcccagccattttatggcttt

SEQ ID NO: 146700 - DNA, 122 bp, Homo sapiens
ccctcaggcgactcgtcctgcgcatgcgctgagggctggagctcgagaactgaatgcgctcgccgggctgagcgtgcgtggatggaggcggtcggcttcagcacgcatgcgggttccggagc

SEQ ID NO: 146701 - DNA, 122 bp, Homo sapiens
gatggtgaactgcctaactctaccacatcccgatggtgaactgctaactctgccgtatcccgatggtgaactgccaaactttacctcgtcccgatggtgaactgcctaactctacctcgtcc

SEQ ID NO: 146702 - DNA, 122 bp, Homo sapiens
cgtgacactccgccgccaatggccgccccgcgcagacctggtggggcgagaagcgcagcgcggtgagggctccgcgcaaatccatcttactctcaatagctaagtgacatgaaagccataaa

SEQ ID NO: 146703 - DNA, 122 bp, Homo sapiens
ctctgagttcccaccaaattctcatcttgaattgtcatgcaaattgtaatccctatgtatcgggggagggacctcctgggaggtgattggatcacgggtatggtacccccatgctgctctta

SEQ ID NO: 146704 - DNA, 122 bp, Homo sapiens
aacatgtgtagctctggcctcaaagatgatgaaagtaaggccagtataactggttagaaacgatgcagggctgactgcacacagcagagtcttgcacgcagtgtgtacaaggacatggctgt

SEQ ID NO: 146705 - DNA, 122 bp, Homo sapiens
gggggaggacccccccaatgaggctcaggaatttggggtgcaaggcccgctgcggggaggcgcggggggcggggctgcggccgggcctggagcctctcgcgctctcccccctccccggctcc

SEQ ID NO: 146706 - DNA, 122 bp, Homo sapiens
ctctcccctttgctgccccagtgctgcagccactctggccttttgatcctcaaacacactcggtcacgtgttaaactgccaatctgcccgggtgaccaaccaggttaaacccctcaatggct

SEQ ID NO: 146707 - DNA, 122 bp, Homo sapiens
gctagggcagttctggtctctctgcctcattaactttaggccactgttggatccaagttccggttaggcacccaagcaagctattagaactacgtccagctgcacaaggtaacccatgaaat

SEQ ID NO: 146708 - DNA, 122 bp, Homo sapiens
acgtgaagtccgagaaccaggcctgcacaaccccccagtatataaggtatgctaagggggcgtcgcgctgttgcaggctatcgtgtgttaacctgtacttctgccgcagagtttggagaaag

SEQ ID NO: 146709 - DNA, 122 bp, Homo sapiens
ccagggcagaaccagtccgtcagcatttagccttccacgggcctgagggtgcgagccctgcgggggccacagggtcattgtccaaagtcatccccgtttgcactgtggcagcaccgaacccg

SEQ ID NO: 146710 - DNA, 122 bp, Homo sapiens
agggtgaagaggcgaagctgcaccagcagtggaggtcacgggcgagggtgccaggtggggcggcggcagcagtgagccccaggtactgcccacctgcagcagggacctcacatacctgtggc

SEQ ID NO: 146711 - DNA, 122 bp, Homo sapiens
gacgttagaaattttaatggaagatcaggtggtgtgctgtgtatggggcagctgctgatccggcagcctctgagtgcttattcaggctgagttatagctttagagtcctgtttgtgccttgg

SEQ ID NO: 146712 - DNA, 122 bp, Homo sapiens
atgaactaaaaaatctgctgaaagaggcacaaaaagcacaattcctagatgctgcattctcgagataaactctcacctacaagaaaacgtgtgtaaatgcaaattttcactagtgtttctac

SEQ ID NO: 146713 - DNA, 122 bp, Homo sapiens
tcataatggtggggccttaacccagtaggcccattgtctttataagaagagaaagaccagcgatctctccgcatgcacacagaggaagggccctgtgaggacattttgagaaggtgactgtc

SEQ ID NO: 146714 - DNA, 122 bp, Homo sapiens
acccaaaggtgcaaaaactgccatcaaagagcacagttggagctcctcctccctccactgcgagctactgactgagggctgctggccctggctgatgcttataacccacaaagcttcctatg

SEQ ID NO: 146715 - DNA, 122 bp, Homo sapiens
ggcgcatccgctctggccagagggcgacaccttaaggccggcgggagcgagtctcgtggccgcagaacatgcgcgagtctcttttgttctggaacgggccgagccccaggaagtggagctgc

SEQ ID NO: 146716 - DNA, 122 bp, Homo sapiens
cctggggaccccaagcgcgcacacttgcccggagccacgcacccccgggccatacatagacgcacaataacaggctgtgaaatgaacacttctccaacgaggcaccaagtcgctcgcgctct

SEQ ID NO: 146717 - DNA, 122 bp, Homo sapiens
ctctgcaaagtccctaaaacctcggactatgcactactgatgaggctcaaagaaggctcccgtggtcatttccccacagctccgagcccaggtcacctcgttctcccaccttctccacctaa

SEQ ID NO: 146718 - DNA, 122 bp, Homo sapiens
ggtccttttaggggtttatattctggattccagaaaacatgcaaacaggaccaataaatgcgtgcttatttttgtgtctgttttaacctggtcaaggaaaattccaacaaaaaatccacgat

SEQ ID NO: 146719 - DNA, 122 bp, Homo sapiens
ggtggcgctcgcctcttgccggaggctcgagctgggcgttgtcacctgtcgagtgaccgtcgctaggccggtctctaaagtccttggttgatctggggagtcgtgaccttgacagaattcaa

SEQ ID NO: 146720 - DNA, 122 bp, Homo sapiens
tccccagatcccctccacactctgcaggatttggggtgctgggtggtgtcatctcaggttcgagtctgcgcgaaacctccgggcttctggagacccaaagggacctgagaggaaagcccagg

SEQ ID NO: 146721 - DNA, 122 bp, Homo sapiens
cttctgtgaatcctgctgctgtggacatttgcgtagtcctcgtgtggatgctgctgtggacgtctgcgtcgtcctcgtgtggatgctgctgtggacgtctgcgtcgtcctcgtgtggatgct

SEQ ID NO: 146722 - DNA, 122 bp, Homo sapiens
acccctcctaacgggaagggaacatgggtacgcgaggctccggtactgaccgcggctgggcgacagcaggctacttggataggggacgctcactctcctcagctcatccagcttctcctgta

SEQ ID NO: 146723 - DNA, 122 bp, Homo sapiens
atcacatgcaaggcttccattcttacactcagtgctggaattaggacaacctcttcattccgtggggttgattctaagatttcagcctcgcttcagtcctgcggtggggagattgtgggtag

SEQ ID NO: 146724 - DNA, 122 bp, Homo sapiens
ttgggagcggaacgagaaggtacttgggtcagggaggtgatgcccgggcctggaacgtggcggggattggagcaggcgcgcaggtacccgatccgaggcggggagagcacccgggatggaag

SEQ ID NO: 146725 - DNA, 122 bp, Homo sapiens
cgcccatggggtaggcgggccccaggcacctccagctgagatgtggctccaggggctggccgggtacatgaaggcggcgttctggatctggtcattgatgtcctcatcctcgttgaaaggga

SEQ ID NO: 146726 - DNA, 122 bp, Homo sapiens
gggtcacaaatggcccgaggtctcatctcacaggaggtgtgggaggaagaaggggtcaaacgaactccggccctgacccctgacccctgtgccctgcagagacagcctgtccttcaggcaag

SEQ ID NO: 146727 - DNA, 122 bp, Homo sapiens
atgggtctggttgccctagaataagaggcagagctcatgcgagcgctcaccttctggctgcgatggaaacattgcccactgcgtacagctctagtgactccttgatgtgtaagcatgtgtga

SEQ ID NO: 146728 - DNA, 122 bp, Homo sapiens
gtgttaatctgcaaaacctctcagtctagcctgatagggcggcaggcaacgtgaggggcgcgcaggagccagagacccaaggagggaagcccctggggtgaatgtggaggagctgctggcag

SEQ ID NO: 146729 - DNA, 122 bp, Homo sapiens
gcagggaagaccccgccctggcccaacttctgatgccctggctgatgtggagggaggagccgagtcaggcctcatccttggcctctgcctgggactttgccaaacaggcaggaagccctcct

SEQ ID NO: 146730 - DNA, 122 bp, Homo sapiens
gacctggggctggagctggcggagctggtgccgcgcctgttccagttggattccaaaggccgcggggaccttctggaggtaaatctgcagaatggcattttgtttgtgaattctcggatcga

SEQ ID NO: 146731 - DNA, 122 bp, Homo sapiens
cggagcccgtacgccccaggggccctgcccgctgctctgcctggggaaactgaggcccggcgaccgtgcagacaggactgtacagcgaccaggaaataaaagacgtcctggggccgggcgcg

SEQ ID NO: 146732 - DNA, 122 bp, Homo sapiens
ctggggttcgctaaatgaatgtaactgggctgagttgagaatagtaaatgagaccgtctacgtaaggagatgatcatgtctcttgccatataaagtgcacttaataaatggcagctgtagta

SEQ ID NO: 146733 - DNA, 122 bp, Homo sapiens
tgattcaatttgagatttgatggggacacattcaaaccatatcaccagtcatgggtgccccgtctggcttctgtgcttgcagtaatggaagtggggaaaggagaccttggggagtgggagcc

SEQ ID NO: 146734 - DNA, 122 bp, Homo sapiens
ctgtagtcccactgtccacgcgtggggaggggagggtgaagttacaggggacgtctccctcgcatcccaggggaagggcctttcttggctatagggctcggctgatgcttagggcccgggta

SEQ ID NO: 146735 - DNA, 122 bp, Homo sapiens
ctgctcgggatccccggcggccgtcgtggccccgaacccgggttcgagcctcggccccaccgctccctggctgtgcctgaccttgggcaggtgcctccgcctggcctgcgagcctcagtttc

SEQ ID NO: 146736 - DNA, 122 bp, Homo sapiens
agaggggaatggggcttgtccaggaaggagctggtgactcggccttcccaaaagatcaaccgaccctgtggctctccatcttccttctgcaccctctgccctcaggatctggcagcagctgg

SEQ ID NO: 146737 - DNA, 122 bp, Homo sapiens
gctggctgcagtcattcgggcactgcctcacaccgcaatcctcgccagagtagccgtcctcgcacacacaccgcccatctaggcactggccgcggcctcggcagcccccggggcagctgcgc

SEQ ID NO: 146738 - DNA, 122 bp, Homo sapiens
ttactcttaaaaggaacaagaatgactgcctctggatggaggaattggatagcaatgggccgtgggataggagacctataaaccttcatgctatattattttgtgcctttttaaattttgaa

SEQ ID NO: 146739 - DNA, 122 bp, Homo sapiens
caaaggcttactcaaagaggcacgtgaatctttcgcatggaatacttttggaacccagaccgaagtgcccaggggttaatcacggcgccggtcttacagcaccctcagcggcttcagccctg

SEQ ID NO: 146740 - DNA, 122 bp, Homo sapiens
ttcttctgttggggcttatgggtgtggagggctcactccatgccagacccccacagtttacgagggctcagtggtttgccatccagcacatcagtctgaacccccctcgatgcaccattgca

SEQ ID NO: 146741 - DNA, 122 bp, Homo sapiens
cccagttaccggggccccgccccctcgcccgggatttgcgcctgaccacgccccctcgctcggggccgcctcacttctcgctgctaccgctctcaaggccctcctgccccttaaaaaattcc

SEQ ID NO: 146742 - DNA, 122 bp, Homo sapiens
gcggcgcgggcttgctccagcgcggacaccacagcgtgtgcggagatgcattcccgttgccgcatttccactgctttcaagatcagggcactgagctgggacccagaaaagacatatcatgg

SEQ ID NO: 146743 - DNA, 122 bp, Homo sapiens
tctcggtgtttaaggggagcagtcattgctgggtgatggtcgcagttcggatcctgggcacggggttatgtctttgctttctgaagatgactgcattagttgcagctctcactaatggaaag

SEQ ID NO: 146744 - DNA, 122 bp, Homo sapiens
acgtgacttataggtaccttcgaaatggagcgatgatgccctgtgaggacagagagggcccgagtcctcagaatcaccagagtttggccagctaaggccctggggtcaggtgttcgtaagtg

SEQ ID NO: 146745 - DNA, 122 bp, Homo sapiens
ccgcctctggactgcgaagcctggacctgctgggacaggagccttgcagagaccccgatccgctctcacggcgagctgcacccatgctggctgatgggagctttaatctgctttcatgttgg

SEQ ID NO: 146746 - DNA, 122 bp, Homo sapiens
gaaatgcgaaaaatgtagtgttaacggaagagtttaggtcctgcctcactgtccgggaaacgcgtgccctcgggggagcctttgccaagccggtttttcccgaaggtgaccagatgctcctg

SEQ ID NO: 146747 - DNA, 122 bp, Homo sapiens
atttctcagactttatgggctattagacatttctcacatttccatagataataactcatccgttttgcaacctgattctcaatattaagagattaaaactaatgtatatgactctcagttga

SEQ ID NO: 146748 - DNA, 122 bp, Homo sapiens
aatctcaaatctttatgtcctttcaccagcgcagaaaaggagagccagccgctgcaggggcggcgagcacgcagcaggcacttaccgttgctgtacaataactggagtttatagtggatgcc

SEQ ID NO: 146749 - DNA, 122 bp, Homo sapiens
ccctacccccaccaccacccagggcggccagggcgcgcgtctggaaagaaggaagggaaacgcaagagccaggcttagtctaacttagtctggtctgaggacgcttatttcccttctctggt

SEQ ID NO: 146750 - DNA, 122 bp, Homo sapiens
tatgatctggaagcccccagggccggcaaaggggtgcagggtgctggggctgaggtagtccggggagctggccccgctgggatgtgctgggcctgagacagtcacagcttcccctgggctcc

SEQ ID NO: 146751 - DNA, 122 bp, Homo sapiens
agggggcggaccagacccttccccttcttcccgggtgaaggtctagggggatcactcacccgcgggggccgcggtggctgcagcggtaccggaggtgcccgagggagccccaaaattgaagg

SEQ ID NO: 146752 - DNA, 122 bp, Homo sapiens
ctggatgtggttccagcctggtaggggtgagtctgggggccagcccatgatggagggaaacgtggcctgagaagccagtcttcaccaagctggagccaccgtcccacatgggtgcaaatgcg

SEQ ID NO: 146753 - DNA, 122 bp, Homo sapiens
gagcacggactcatccacacacaacatgaccgcagcgtcctaatagccctcggaacagcacggcctcatccacacatgacatgaccgcagcgtcctaacaaccctcggaacagcacagattc

SEQ ID NO: 146754 - DNA, 122 bp, Homo sapiens
tcattattcagtacttgggggggcactcactgagggttggacgtagagccggggtgaggacggcagagaggagtgagacccgtccctgctcttaaggggctccatgttgggtgggggcagag

SEQ ID NO: 146755 - DNA, 122 bp, Homo sapiens
aaaacaacaatgacaaattcagttttgcccaaggccaccctgccttcataagagagactccgtggtgacagtgtccaagatttccttgtatccactgaagtgcttaacagtacatttatcag

SEQ ID NO: 146756 - DNA, 122 bp, Homo sapiens
ggcccgaggccgcacccgcctgcctgccaagaagaaaccaccaccaccaccaccgcaggacgggcctggttcacggacgactccagacaaagcccccaagaagacctggggccaggatgcag

SEQ ID NO: 146757 - DNA, 122 bp, Homo sapiens
ccagcagcctgcccgcccgcccgctggccgggctgtcaccgtctcatctgcataggcgcccgcccattgggccgcccacccgcgccttatctgcatggccacgcccccggcgaccgagcaac

SEQ ID NO: 146758 - DNA, 122 bp, Homo sapiens
gggcatgcgcggtgtacgtagcggctcccgctcggcctcgtgactcccgcggagacctctcggctgtctccggtcgattccattcgtttcctgtggggggcagtaccagcctctctagcaaa

SEQ ID NO: 146759 - DNA, 122 bp, Homo sapiens
actaaggaagcccccatgctccaattcagatgttctgatggtgggataatggggagatgccgaccaggtaagggttattttgggacataaaggtgtataaaatacaaccatatgttccaaaa

SEQ ID NO: 146760 - DNA, 122 bp, Homo sapiens
actgctgaggaaactgaaggcgtccttgccaaagaccagacagctaatgaattgcgaagccgggcttaacggcccagatctaactgccaggtcctttctctttgtgttacgtctctataatc

SEQ ID NO: 146761 - DNA, 122 bp, Homo sapiens
ctcgccggaagcctgcgtcgggcggcctcgctgcctccagctcagcccctgcgaggcaagcggttttgagccgattcttccagtctacgggaagcctgaaatccacctcctcctccacaggt

SEQ ID NO: 146762 - DNA, 122 bp, Homo sapiens
ccgcctgctcctctcctccagcctagtggaggccctggacgtctgggcgggagtgttcagcgcggccgctggagagggccaggagcggcgctcccccaccaccacggcgctctgcctcttca

SEQ ID NO: 146763 - DNA, 122 bp, Homo sapiens
gtcggcagtgagcttgaagaccaggacaggctgggcctgcggaacctcggcaaagactgacggaggtgccatatcgagagactaggaatcaagagatttcaccccacgcccggagctggcag

SEQ ID NO: 146764 - DNA, 122 bp, Homo sapiens
ccacacacaatcaaagaaaatgctacgatttcacactggagtcagatccgtgcacataaccgagggatccgcactgcagcgaggctgagtgagcgctcacggaacaagaaacactttattat

SEQ ID NO: 146765 - DNA, 122 bp, Homo sapiens
tgcaaagttggcgtttgccgtctttcttatctcctgttcttcaggtaggtgcagggagcgcggcgcggtggggctgctcctgcggccgcggcggccgctgctgggggccgcggctggtgttg

SEQ ID NO: 146766 - DNA, 122 bp, Homo sapiens
acctcatgatccacccgcctcagcctcccaaagtgctgggattacaggcgtgaaccaccacgcccagcctgttaataactttttgttcatcatgggatgtaggttgtgatggtgatgggcag

SEQ ID NO: 146767 - DNA, 122 bp, Homo sapiens
ggccagagtttacaaaatttgtaactaattgctcccatagataacatcactattgcagaacgtgagattagtcttttgagatgtttttcattcttttgcattctggcaactggctgacctca

SEQ ID NO: 146768 - DNA, 122 bp, Homo sapiens
cagagtacagagggttaaattgcaggaggtgaggaagtagagaccatggataaggctactcgcaggaagcctggctaagaacagggagtgagctaacaggaaatactggatcaaattgtatt

SEQ ID NO: 146769 - DNA, 122 bp, Homo sapiens
gacaacatgaacttgtcttgtttcttatctcttcttgctatggctgtcattgggacagtccgagatgcggcaagagctgaaaaaggagagctgctcagagctgaaaaaacctgctcagtgac

SEQ ID NO: 146770 - DNA, 122 bp, Homo sapiens
tgaggccaactccgcggagtaagccgatccgtaacgtggactgcggtttggtctgtaccgcgtttgggatctcggacttgcgtcccctttccgagcatgcgcagtcgtcacactgccaaaac

SEQ ID NO: 146771 - DNA, 122 bp, Homo sapiens
cttccaaacgcagggcctgcttgctgccctctttgctctgtggggcccagatggcagccccggaggcgctggtgggaggctgtgtcctggggtccaccactgctccccggtaagccaagccc

SEQ ID NO: 146772 - DNA, 122 bp, Homo sapiens
atggactttagtttgttcattagataaatagttaatggatcacccgcagtgggcccggcccgcgccagggagatgggttcaatctaggtgatgtgaccatggacagctcagttggccattct

SEQ ID NO: 146773 - DNA, 122 bp, Homo sapiens
ctgcagcctggagcgaacggggctaggtcctgcgtcctgctccgccggtgtccagtcgcccgtgaggaggcctcaccctgcctcaagggcgactcctgcacctgaggagctgcacaggctcc

SEQ ID NO: 146774 - DNA, 122 bp, Homo sapiens
catgataacaattaaaaactttgaacagcatgacaaagctaatggcaacctcttgaaccccgttttaaagctagttctacttccaaataaaactttaaagcggtttagccagcatcagctta

SEQ ID NO: 146775 - DNA, 122 bp, Homo sapiens
gaaggggcgggcgcagagttaccagggcaggccaccggacccctgagcttgcttaataaccggaggatttgagaaaggcgcgcggcgggcgaaggtaccgagaggggaggagggaggagagg

SEQ ID NO: 146776 - DNA, 122 bp, Homo sapiens
cctgcattctccagtgttcctccttcctcccatctcttcctgtcccagggaagttctccccggattgctgactggagaaacagcatgacgtggtttctaagtaaggggaaggggggtggggg

SEQ ID NO: 146777 - DNA, 122 bp, Homo sapiens
gccatcaaggcttcatgacctgctgtcctggggctgttcacagtgatagctggcacttgccgggaacagcagcacctttgttgtgtgacagatgcttttctgagcgtgctttagtgagaccg

SEQ ID NO: 146778 - DNA, 122 bp, Homo sapiens
ttccatgtagccaactgattctcagagaatgcttttgttaattttcccaactttcatgtccgtaagcaaaccactgttacaactgacagatgaatatagttccaacgtgaatgttggttgat

SEQ ID NO: 146779 - DNA, 122 bp, Homo sapiens
tcccaggacaccaacatcccctctatctgggcttcaggatcctgagggccggaatcccagcgggtgagggcctggggcacactccacttacctgcgccgggcccatcagcaacgctggcaac

SEQ ID NO: 146780 - DNA, 122 bp, Homo sapiens
tggcagagcaggcacagcagcacgacgagatgctgcacatgcaccacgcgctgaaggaggcgctcagcatcatcggtgacatcaacaggaccactgttaccatgcccccgcccgtggacgac

SEQ ID NO: 146781 - DNA, 122 bp, Homo sapiens
tgcggggggcggggcgtccgggatctcagcgtgcggggggcggggcgtgcgggatctcagcgtgcagggccagctgttccagcaggaaagagccttgctcctctgggaagcacagtgtggcc

SEQ ID NO: 146782 - DNA, 122 bp, Homo sapiens
agtgggtatctcacatgtcacacccacagagggcatcctgtttgaaagcaaataggagagcgattccccctaaattatgaacccctagatggcaggaattgggtcccattgatctgtgtctc

SEQ ID NO: 146783 - DNA, 122 bp, Homo sapiens
gaaagtgtaaaaatggccttgctgaggaaattaaatttatgttcaagtactatttctttacggcaccggggaacaagcatttcaaacacgtacttgctgcagactctgccctctggaatggc

SEQ ID NO: 146784 - DNA, 122 bp, Homo sapiens
ggcccagggtccacggagaagacgcaaatcgacagcgcgggagcgcggaccttctggaggcgcgcggcgcttaccgctgtccgtcctcgaagccccgccccggggctccgcctccgccggcg

SEQ ID NO: 146785 - DNA, 122 bp, Homo sapiens
atctcaaaaaaaaaaaaaaaaaaaaaaatctgaagttattagtttaaatcctggctcgaccgcttaacagctgtgtgaccctgggcaagttgcatcatacctctagacctcactttcctcat

SEQ ID NO: 146786 - DNA, 122 bp, Homo sapiens
gccattgtgcagccttgccccctccccccgcatcagggtccggtcctggccgctgtaccgcgatcacctgtggccctcctgtgttctttacctggactcttgcctttgctgatggcgacctg

SEQ ID NO: 146787 - DNA, 122 bp, Homo sapiens
atgttgggataggtgccaccactactaaactgtctgtacgcaggaggtccaaacctcagccgctagcggccccgagaacctgagcccctcagcgaccgcgtagccgccagcaccgtagccgc

SEQ ID NO: 146788 - DNA, 122 bp, Homo sapiens
caaacccagtagggcctcactcccccccacccacctggttctgtcctcctagggcccccccggctcccagccgtccccccacaaccccaacgcccccatgatggggcctcacggtcaggtaa

SEQ ID NO: 146789 - DNA, 122 bp, Homo sapiens
ctcacgttttctcacgagtagggagttgcgcatcattggagggatgtcacggaagtgctgcgcctcagtgcaccctatcgggggaacgtgttgtctgttagcctcattactggtgacgttaa

SEQ ID NO: 146790 - DNA, 122 bp, Homo sapiens
gtactcgagcacccaaaatggcccgaactggtctgggaaacattagggagatgtgtttaccgtcctggctgacactgaaggccaagcattcttgccaccaggcgtggcttgactcgcagaac

SEQ ID NO: 146791 - DNA, 122 bp, Homo sapiens
ctcttgacttacccagtgtgcaatgttatgaccttgggcaggcccctttacactgtgcaacgtgggattcaaatgcgatggtggatggaaccttgtcctgaacctaattccatgggaagcat

SEQ ID NO: 146792 - DNA, 122 bp, Homo sapiens
gggctgagtccgccggccccccgggggtgctcatgggtgcccgggtgtctgcaagctgcccgcagctgggtggtctctgggcacggatgctctaggccctctgggctccaaggaggctgggt

SEQ ID NO: 146793 - DNA, 122 bp, Homo sapiens
gactccttttcctgggaggaagagggctcggatccccggtatggggaggcacagtgacctcgagctcctatctaagcacatgaaagaatctgatggatgtctgaggagctttgggaacccta

SEQ ID NO: 146794 - DNA, 122 bp, Homo sapiens
gacgcccctggggctggatgatgggggctggggagttcggctctcgctgcgcgccagtggcggggctgggcactggtaggccacacccacatggccccgggacaccaggtggccttgtctgt

SEQ ID NO: 146795 - DNA, 122 bp, Homo sapiens
tcccgcccacgtggtgctccttgatagggctaaaggctttcaatttgtccaatcagcggccgcgccccaacgttgccccgcctttgtctccagcggactggaaagaacccaccattgtgaag

SEQ ID NO: 146796 - DNA, 122 bp, Homo sapiens
gggcttctaagggctccgcttcccagccttgggtccctactactaccttccccctagactcggtgagcccaggctgatggaccgtgcagtccagtttgagccagcccagcagccctcaatcg

SEQ ID NO: 146797 - DNA, 122 bp, Homo sapiens
gggaacaatgctctaattcctgtgagtcactcgttagaggagttcaaagaaaccaggtggcgggagggtgtctgggatttcaggtttcagggtgattcgctcattctgctctgattactaat

SEQ ID NO: 146798 - DNA, 122 bp, Homo sapiens
gcaccctgggcatcaatccattgttttccagggagactggagaactggatcagttgagatcgatattgagtagtgtctgttacacgattctgttaaagaaaggacataagacaccacattca

SEQ ID NO: 146799 - DNA, 122 bp, Homo sapiens
agtcctcaaagctgggacaggaccccttacacgctctttccacagcttgtatttttcacacgtttggccagatctccccccacctccaaaccagaaactctatgagagcaggaccatgacct

SEQ ID NO: 146800 - DNA, 122 bp, Homo sapiens
gcattcttgttgatggtggtccgcacataggaggtggcaggcttccgctggctggatctccgcttcatgaccaccacacctctgctgtcggctgcaggctccacgcccacagtcttgcggtg

SEQ ID NO: 146801 - DNA, 122 bp, Homo sapiens
cccggagggtgtgatctgcgaagatacggagtgtgcaggtctgggctgcctccggatccccgcctcagccacccttctagcctcatgccttgcctgccatgtgctctgtgtctcattttctc

SEQ ID NO: 146802 - DNA, 122 bp, Homo sapiens
ctcctcgaaggatgaaggagtaacgctcccattggctgccagacagccccaaccccaacccgcgctcgccctaactttgggtccgcccggccctcatatttgcatacggggccttctaggcc

SEQ ID NO: 146803 - DNA, 122 bp, Homo sapiens
ctccttctccccaacctccgggctgcggcagggtctggggtcggggttgcgatcccggagcgggcaggcaggctgcatcttagcctgtgaatagagctgggaacagcctggaggggcgcggg

SEQ ID NO: 146804 - DNA, 122 bp, Homo sapiens
ccctgtcaataatatcctgtcaaccctgtcccttctgttctccagtcccctgccccacttcgggctgaaaggctcagaataagagtgcccagagtcaatgtttttttcctgccatgactctc

SEQ ID NO: 146805 - DNA, 122 bp, Homo sapiens
tccaaagcccgaaaaatagagtcgctgggagcgaggctgagagacgcacaggtcccgccccggccccgccctctgccggttctaaagggcaaggtctctccgcctggggccccgcctctacc

SEQ ID NO: 146806 - DNA, 122 bp, Homo sapiens
gtttccttttgctagttgtgtgaagctgctgcctggaattgtttatttccctgcaaccaccgtgtattattcctgcctaatttgactgcccgcagagatttttattctttatttttaagggt

SEQ ID NO: 146807 - DNA, 122 bp, Homo sapiens
cccagatatacatcacaagatctttgtttaccatgacagagtgtctccttagactattctcgctctttaccttttaaaatctactttggtgagagaatttggaatttggaattcaccacatg

SEQ ID NO: 146808 - DNA, 122 bp, Homo sapiens
agcgattcgcggttcagatagcgaccttcgcccgcaggttcctgctctgccttcagacttcggcttcagtggcacctgctcagcgaggcctcgtctaaccaagccatccgaattaactaccc

SEQ ID NO: 146809 - DNA, 122 bp, Homo sapiens
ccttttctcttccaagcaaatctaagtcttttccagtgactgtccctctctatgctcccccgacacccagttatcctaatttgcggaataaggccaaggtgtggggcctgggggcagaatgg

SEQ ID NO: 146810 - DNA, 122 bp, Homo sapiens
acgatggaaagtgatctcagatgtcatgaggatgcatgattgtttgccctgatcactaaacggcccattgttgtgctggcatactgggcagtttcaagtttgggagttttctccctcactgc

SEQ ID NO: 146811 - DNA, 122 bp, Homo sapiens
gcaagtcctctggagtctcttcttatgagggcactaatcccattatgagggtcccttgggcgcttctctcatgacctcatctaattctaattgcctcccaaaggccccatctccaaatacca

SEQ ID NO: 146812 - DNA, 122 bp, Homo sapiens
cctttcccgggccagaggctgggcggatctgccccagggaagaccccacatctgctgcggcggctgcagtccggctccttgaggctggtttcctgtcccctccttcccactacgtccccttc

SEQ ID NO: 146813 - DNA, 122 bp, Homo sapiens
agttggacattttttaaaggttcttgcgctcggcaaggggagcagatagatgctcaggagcgaaagacgcagagaattggatctggcgcctcctaacgcagcccgcacaggagcgaagggta

SEQ ID NO: 146814 - DNA, 122 bp, Homo sapiens
acacaaatgctacatgattccacttgcctgaagaatctaaaataattaaacttggccaggcgtggcggctcacacctgtcattccagcactttgggaggctggggagggtggattgcttgag

SEQ ID NO: 146815 - DNA, 122 bp, Homo sapiens
gcgactcctggctgccagggcgcagaggaccttgcaggcgggcgttttggtgctcaatcccgaggagggggaggagcgggaggaggagcgggagcaaaaggaggggacggaggaggccgggc

SEQ ID NO: 146816 - DNA, 122 bp, Homo sapiens
atagactgggtgagctttaggtgctgcacctgtccttcaaaatgaaactgaacggaggcccgcagagtctccccgggaaatagggactgaggatgcgttccatctgggttatgctttcatcc

SEQ ID NO: 146817 - DNA, 122 bp, Homo sapiens
gatcccctttggcgccgttgaggaaggaggcgtcgctgtacccgcccagggccggacgctcgtagggagaatccaagaccccagagtacttctctgcatagcgctttaggaggttggaggca

SEQ ID NO: 146818 - DNA, 122 bp, Homo sapiens
atcacacaatgtgagaaactctccgtttgcaaagtgctgtgaaagcacaaagtactgcttcgtcctgctaaaagctttcaggaagtggagatatccaaacattcataattttaaatataaat

SEQ ID NO: 146819 - DNA, 122 bp, Homo sapiens
ctctgcgccctggaggccgggccggggtggcctctggcggagacggcagccgtccgggctcgccctgcagctcctccgacgcagcctcggggaaactcaggcccggagctagagcttcctct

SEQ ID NO: 146820 - DNA, 122 bp, Homo sapiens
gccacagttcgcgtccggggcgcacaggagcgaggcagcgcctggcgcccgggtgcccaacgggtggacagggtctctacctgcggcagtctggcctctgtcacgctcgacccggcctcctc

SEQ ID NO: 146821 - DNA, 122 bp, Homo sapiens
acgctgccccctgcgcctcctggcggacactcgagggtgctggtttgtttgcttcgaggacgaaggagaaatttttgtttaaatgtatatatgtacatatatacacacatataatatgtata

SEQ ID NO: 146822 - DNA, 122 bp, Homo sapiens
aaatacatcctccaatcttcacttggtggacctggcatcaaaaaataatcatattaagtgcgtttattagtacacttttctggcttatctgcctttccaagtttctatttgagttcttgcct

SEQ ID NO: 146823 - DNA, 122 bp, Homo sapiens
aaggatgtgaagtgaataagaaaataggtacgtttctttttctttttttcccctttctaccgactaggaagagatccagtccaggttttgcctttgactcggcctgtgaatttcggctgtgc

SEQ ID NO: 146824 - DNA, 122 bp, Homo sapiens
tcttgggctgcgcagagccccagccatgtgtgtgctgagtgcagtgtgaccgcgtccgcccgtctccccggacacgcctgttggagccccggccgtgtgtgtgtgtgtgctgtgagtgcagt

SEQ ID NO: 146825 - DNA, 122 bp, Homo sapiens
tgactaacgtctctctcctgcctctccctcctgtctgtccgtgtctagctctacctggtgcgcaccatggccgagtccttgggctctgccgagctgctcaggcagctcaagtctctgggcat

SEQ ID NO: 146826 - DNA, 122 bp, Homo sapiens
cgacagagcgagactctgtctcaaaaacaaacaaacaaacaaaaaacaaataagactcgccgacccatgccatagattgacgacccttgaaggtggctcgtgtacccaggttaagccacgtg

SEQ ID NO: 146827 - DNA, 122 bp, Homo sapiens
gctggcagacgtcagcaaggactggaggcagagcatcaacaccattgagagcctcaaggacgtcaaagacgccgtggtgcagcacagccagctcgccgcagccgtggagaacctcaagaaca

SEQ ID NO: 146828 - DNA, 122 bp, Homo sapiens
cgggccaggggcaccgcgagggcggagctgcgttctgctcagcacagaccagggggacaacgtgaaggcagagcagcgttctcctcagcacggaccttgggggcactgcctcgctttgggac

SEQ ID NO: 146829 - DNA, 122 bp, Homo sapiens
gccctgctttgcctctcccttgcattctccacgcatcaaagggacacgtgtaaggcgaaacgggaacacctaaaaagcaactctccctccaccaggtgatccctccatctgaactacaatgg

SEQ ID NO: 146830 - DNA, 122 bp, Homo sapiens
aggatgacaggtgcaggagactgtggctgtgggcagatgtggtttccagccccaggtccccgcggcccctggcttcccagcgcgctgtcctgtgagcaagaagatgaaaaaagccacccgat

SEQ ID NO: 146831 - DNA, 122 bp, Homo sapiens
acatgaagaagaaaaagtctttctgcgaaacatggacggagcctggaacatgcagggccacgcgtgagggacgggccgaagtcagggatgtggggccaggagccgccgtgtggggtggaccc

SEQ ID NO: 146832 - DNA, 122 bp, Homo sapiens
tcctggctcaagtgatgcatttgcctcccgaagtgttgagattatagatttgagccagcgcgcctggcccatggttggatatattcttcaaagtgaaattgcagggtaaaaacatttgcata

SEQ ID NO: 146833 - DNA, 122 bp, Homo sapiens
aggcgccctccatcacacccaattacgcgtgacctcaacagctctcacatcccgcagaaccgggtttcagttccactgtgcctgagcgttcagctcagcagaggtagggactaaggcgcttg

SEQ ID NO: 146834 - DNA, 122 bp, Homo sapiens
ccaacccgcggcggggacccccaaccccgcgccggcgccagatgagcgcacaggtgcgcccggggtgtcacaatcccgccccgcccgcagccccggccccacgcccccgatggcgcccgcgc

SEQ ID NO: 146835 - DNA, 122 bp, Homo sapiens
accactccactcggccccgccttctgacccggcagaccccactgctcgggggagttctcccgcagcgcctgcgcagtgctgagtgcccgcctgagtcctaccaggccacagtgtcacaccca

SEQ ID NO: 146836 - DNA, 122 bp, Homo sapiens
gccgagagactcgggaagttaccacagttgtccaggcatgaagcaaaaagggaaattttacggtatccatggcaactgaaggggaaaaatatgaaaattattttgaaggcagaaacaacgaa

SEQ ID NO: 146837 - DNA, 122 bp, Homo sapiens
tttaggagcacatgtcccactgcagcaacatgggtcacgtgtccgagagagattgtcacccgtggctctgacacagctttgctgggcggcatcctgtccggtgtgctgagcgatgtctccag

SEQ ID NO: 146838 - DNA, 122 bp, Homo sapiens
cagcctctcaacattttctgcctgactgatatgcagctgatttgtgggatctgtgctactcgtggggagcacaccaaacatgtcttctgttctattgaagatgcctatgctcaggaaaggga

SEQ ID NO: 146839 - DNA, 122 bp, Homo sapiens
ttcgttatggctgcccaagaaaactaatatgacgccccacagacgtctgtgaggggtgtccgcccactcgcaggggtgacagctgaagatggccagctgtgtaggaagagggggcgtctgtg

SEQ ID NO: 146840 - DNA, 122 bp, Homo sapiens
caagaaggggtgtggactccagaaaccgcccagtgaggccccggtagggggagctgtgggcggtgggctctgcgcttgctgctccccggcctggtctgcagaccatcatccaccccttcacc

SEQ ID NO: 146841 - DNA, 122 bp, Homo sapiens
catccggaatacacccgcaatcccacagcatccagaatgcacctgcaatccaacagcatccggaatgcaccggcaatcccacagcatccggaatgcacccgcagccccacagcatccggaat

SEQ ID NO: 146842 - DNA, 122 bp, Homo sapiens
atgtcaaagtctgattgcgccggccactcagttagcccaggcccgtcacccacctctccgcggctgccaggttaccagccacacttcccacccacccagccgggttgggccctcctccggaa

SEQ ID NO: 146843 - DNA, 122 bp, Homo sapiens
ctgtctcttccatgccaggcgttgggtgtggcccagggtgccggactctctgtgagctcacgcacaggctgcggcagagacagtcagtccagacgtcgcaggtgatgcatgaagtcagaggg

SEQ ID NO: 146844 - DNA, 122 bp, Homo sapiens
acagcaggcgctgcagcgggaccggcagaaggaggtccagaggctgcaggagcgcattgccgacctcagccagcaactgggcgccagtgagcaggcgcagcggctgatggaggagaagctgc

SEQ ID NO: 146845 - DNA, 122 bp, Homo sapiens
aggaaattgtcaagtaggagacaaggagcaaagtcctatcacagcgggaggggacgccagcgcctgcagaggctgagcagggaaaaagccagtgccccagcggaagcacagctcagagctgg

SEQ ID NO: 146846 - DNA, 122 bp, Homo sapiens
cctggccccggacccatatgtcccatatgctgtcccatagcatacttgcggctatgctgccggacctgctccagttcaaacaccgtgtaggggcggatggaatggtgcccaggtaggcctgg

SEQ ID NO: 146847 - DNA, 122 bp, Homo sapiens
gcctcattgtctctgccccactgggctctgcagatgcattgctctgtgcacctttgctagcgtcagattaattagacatttcagaagagatcgacttttaaagcaatagcttcattagcatg

SEQ ID NO: 146848 - DNA, 122 bp, Homo sapiens
tggaaggcggggccacagaaggccacgcctccacatagcaacaaatagagtggacggagccgagataacttgtcactcagcgccctgcctccgcgctccacctcccggagaggggcggggcc

SEQ ID NO: 146849 - DNA, 122 bp, Homo sapiens
atattagactaccaaagtcatccttggataattgggagcatagtctaacaagaaaatgagcggtaacactaatagctgatatcctctaagcatttactgaatcctaggcactgagctaagat

SEQ ID NO: 146850 - DNA, 122 bp, Homo sapiens
aattagctctgcttttcaaggagcagtaccattcagtaaaagattactgtctagtattaccggctcacccttgaattctttcctgggcaaagccaagaaccttcccagggtaagccccaatt

SEQ ID NO: 146851 - DNA, 122 bp, Homo sapiens
actgcgctccagcctgggtgggtgacaggcaagattctgtctcaaaaagaatgcagtagccgagctggttatgcacacatcctggaatctttgagaaggcagttctcattgctcttcagctt

SEQ ID NO: 146852 - DNA, 122 bp, Homo sapiens
tttcccgctctggtctcagtggttccagtcagcgagcaggacagaggagcccggaagaggcgccgtgcacttccgggtcgaagagcgcacggcggcggcagaggcggcggcggccgggccta

SEQ ID NO: 146853 - DNA, 122 bp, Homo sapiens
cacgtctttccgcataggtaggacgctcaagtcttaccgggaggctctcctagagagcagcgcgaagccatggcttttgggcccggggacggaccgtagcgcgtagccggaagcggaggcgt

SEQ ID NO: 146854 - DNA, 122 bp, Homo sapiens
cctcctcgccctggtcctccaggaactccagcagctcaggggcactcagcacgcggtcctcgcccgagtactgatggaagatctcctccagctccggccgcttcagcagccgccgcaggaac

SEQ ID NO: 146855 - DNA, 122 bp, Homo sapiens
ggatggggcagagcgagggcaagggctgagcgttgggtgtgttgggggaggggtacaattcgtgttctgcacgcacctgatccacagagctctgctcccgtgcccaccgccactgggctcta

SEQ ID NO: 146856 - DNA, 122 bp, Homo sapiens
acgggcgggaccgcaacttcggagcactttggcagcgtggggagggggctcctacccggacgccccccaggggtcgcagaggtgggggctgcgccgcgcgggcccactcctcgggggtccag

SEQ ID NO: 146857 - DNA, 122 bp, Homo sapiens
agagaagtccccagaccggactgggccttgcatttggccaggctctgttgggtgtttgggcgaatacagcccagtgctactctgagcaggccatcagcatgacggcatccacatctctacta

SEQ ID NO: 146858 - DNA, 122 bp, Homo sapiens
gcggggaaaaggcgcagtctcggtgggattgcgtgcaggagggtcgtggtctggctgtggcggaggagcataagaaggtaacgcgacctggcgcggcagacagggctcgaagacctcatctt

SEQ ID NO: 146859 - DNA, 122 bp, Homo sapiens
ccagtcccgcttctttgcctcccagggctgcgcccagagtccattccaggtgagtagggccggccgcggcggcccgggctggggggggacgcccgcccgcacccgcggcccactcggcgcct

SEQ ID NO: 146860 - DNA, 122 bp, Homo sapiens
ctgtgctgtgttagttctgttactcaaattccctatttcttagcagcattgtgggtcaaacgaggactatgtaatccttgggctccaaagacatagcagagatgaaggtgctttgcaagggt

SEQ ID NO: 146861 - DNA, 122 bp, Homo sapiens
tgtggctcgcggcgccccttcgccgtggccgggatggagcctgtgacgcgcgctgtgcttcgggttcataaacttgcaggctgccagctgggaggggaaagtcagtatcacaaagttcggga

SEQ ID NO: 146862 - DNA, 122 bp, Homo sapiens
acagccacgtacggcctaatcaaagagattgaaggaagaaaaaaaaccaaaaacataaagcgagggaaatgcctaggccccagaatttggcaccacctagaaacccgcacacattccgagcg

SEQ ID NO: 146863 - DNA, 122 bp, Homo sapiens
tgtgttgctttgagaggctgagaggaggacgcgtggcccccaccccttcccatgtggcttcgtgctgtgagccacaaacggccgtggatcccagagccagactccgggcccgcccagcccag

SEQ ID NO: 146864 - DNA, 122 bp, Homo sapiens
aaaacgtataaaataacaatagaaaaagtaatacttctgggagaggcgccgctgcggctccgcggagctttcgttctttttttaatgcagtttcccttccgccacgtgagtaccgccttttg

SEQ ID NO: 146865 - DNA, 122 bp, Homo sapiens
gcctatgaccgttatgttgctatatgcaaacctctccactacatgacagtcatgagccgtcgtgtatgtgttgtgctcgtcctcatttcatggtttgtgggcttcatccatactaccagcca

SEQ ID NO: 146866 - DNA, 122 bp, Homo sapiens
atacaagactgctgtccatgaaaagaggcccttggtgctcagcagagggtctcctgcgaacgccagggctggcttgggaagctggaggctcaggcagccagtgaacatcctgagggtggggc

SEQ ID NO: 146867 - DNA, 122 bp, Homo sapiens
cttcctcaatgggagattcctcaccaagcgtgagaacataggatccctgttacctgataacgtaggttaaaaagtgttgctccctccacctggaatgcgtttctcgttcttgtttgccaggt

SEQ ID NO: 146868 - DNA, 122 bp, Homo sapiens
tgatgctggagaagtgaaaagctggttcccttcatttactcacagatgaaaagattaacacgtcagcaaatcaaaatcagagaattcctaaggcactctgtgcaacaggagcgggtggacgt

SEQ ID NO: 146869 - DNA, 122 bp, Homo sapiens
cacctgccacgctgcggctgccggacacctggtcacagggagccacggggctggcgggtgcgccccgtggcgtgcggggttctccggggcacccgtgcacccacatgtctgcgtgccccagg

SEQ ID NO: 146870 - DNA, 122 bp, Homo sapiens
aggtagtccagggcaatctggacattctgcagcttgtggaaacgcatcctccccttctcccggggctgtggggaggcacagtcagcacccacagtgcagctgcagctcccgggccccaccct

SEQ ID NO: 146871 - DNA, 122 bp, Homo sapiens
aataataactctcatacctagatccagaaagtagaaataattgacactcatagccagtctcgtggccatgggtaaagtcctcagtttttcacttgtataaagttcatgaagggttaagagtg

SEQ ID NO: 146872 - DNA, 122 bp, Homo sapiens
cccagacatttctgggagttcaaggcactgggtgacgaaccccttgtgtgttgtgtgccccgggggttaagcagctctccctgtgagttcttctctggggtttgttgtgagcttccacaccc

SEQ ID NO: 146873 - DNA, 122 bp, Homo sapiens
ggagtcaggacgagaagcattgggtgggagcagggcgaggggctcgagttgggtctgcagcgggcacaggacctagttttgtacagttaacggtggggttgagtaaagaggggggcggtggg

SEQ ID NO: 146874 - DNA, 122 bp, Homo sapiens
tgcccaagccccctgcaaggtggaggcatgactcctccatcccttccccttgaattcaaacgtgaggatggtatctgcgaggctaaagcggggctcagatggcccaaacttcagaccactct

SEQ ID NO: 146875 - DNA, 122 bp, Homo sapiens
cattattctttttccattctatttgaactattttcttttttcgcgagtggggggatacatcgctttattcattttcccccttttccacacagacctttattgtcaacacagccaaacacagt

SEQ ID NO: 146876 - DNA, 122 bp, Homo sapiens
gtgcaggatataatctcatggttcaccgttttttaagcccgtcggaaaagcgcagtattccggtgggagtgacccgattttccaggtgccgtccgtcacccctttctgtgactcggaaaggg

SEQ ID NO: 146877 - DNA, 122 bp, Homo sapiens
aaactggctgtgccgaattgtgcacgtcaatcaacatctttgtggagcctgcgatcggcgcgttgtggggaaggggctccctccttcagggagatgattctgtctcctggaggcaagtgtgg

SEQ ID NO: 146878 - DNA, 122 bp, Homo sapiens
gagcagagcagtcctggggctttgctggaaccattggcgtgggaatgctgtctcttccctcgcccgagagacgccagattcccagcgggcagcggactcggttctaaccttcctcgccccag

SEQ ID NO: 146879 - DNA, 122 bp, Homo sapiens
cggcttgcttcaaaggttaatcccctcgctggggagcggctccccgctccccctctcccccgccccccggctttttacgctccagttaattaaatgtggctgcctattgtcagaagacaaag

SEQ ID NO: 146880 - DNA, 122 bp, Homo sapiens
ggctccacggctccacaggctcccggggctgagtctaaatcactcatcattggttaaagccgagctcacagcagaataagccaccatgaggctgtcggtgtgtctcctgctgctcacgctgg

SEQ ID NO: 146881 - DNA, 122 bp, Homo sapiens
caagtaagcacttaagtaaatatcaaggggagtttgggcaactgagtttttgtagatcctcgtgtcattgtgttatactggagccaatagtaagctgacatttggaaaaggaataactctga

SEQ ID NO: 146882 - DNA, 122 bp, Homo sapiens
agggacggatcccttccttcctcccgcagcctctggtggagactcggagaatgcagggcccgccgggcaggagccgcgcagcgccaagccgcaggcggccgccggcccggacccccgcagcc

SEQ ID NO: 146883 - DNA, 122 bp, Homo sapiens
acttttcccacaaaagaagttttcacacacagaactgaagaggaattcaacagcaaaagacgaacaaaacattaaaatgagtgccattaggtacctctaacaggtggtgctacttcttttct

SEQ ID NO: 146884 - DNA, 122 bp, Homo sapiens
aggcatggagtgaatcccttgtctctcagcaacgactgggaaggaagcattctacaggaccgatgggtttggaagcctgggaatcctgggctccaacaccagctctgcctggtcagctctca

SEQ ID NO: 146885 - DNA, 122 bp, Homo sapiens
gtagtctcattttagagattaggaaaataagaggctaccccacagtaagtgcaccagttgcgtttaaagaaaaaaaatgtatattaacaggaggtagccactgatttggggccactagtcca

SEQ ID NO: 146886 - DNA, 122 bp, Homo sapiens
tcagtttgcaagaggcatggccaagactcaaacataaggaggagtctggcttaggagccacgctttgtttgaatctctactctgtatctgatatatcaatctcctacagtgcagagtctgac

SEQ ID NO: 146887 - DNA, 122 bp, Homo sapiens
cccttaacatgtgatttttgcctttttgtgatttttgtcttatgctgcaaaatacgcttgcgttattactagctaggaaatccaagcaggtatcacaccgtgccgtcatatgagtgataact

SEQ ID NO: 146888 - DNA, 122 bp, Homo sapiens
gcgttttgacattttaaaaagaagtttagattcgcttcccggagccgggatggcagcctgcgctatggttggggaccaacgtggtgcacgggcaggggccggggagagaggcggccgcagcg

SEQ ID NO: 146889 - DNA, 122 bp, Homo sapiens
gaggagcgtgagagcccggcagcccagcccctgctggaacaccagtactgagctacctggcgcccactggaccacctcctaggattcagtaacggacctgctctgctgcctctctgctggac

SEQ ID NO: 146890 - DNA, 122 bp, Homo sapiens
cccttctggaaccctattctgtattcaaatagaaatactgaatatcatattctctcaagccggcaagcctcatattgttcctcctgcctaaaccacccaatctcctattccctacttatctt

SEQ ID NO: 146891 - DNA, 122 bp, Homo sapiens
gcgcgccgcgccagggggcggggccaggccggggtaccgggagcgccccaaaggcttgcgcgcaggcgcggccgcaggcctttgtccccctgaccggctttttgtccgctgtaggggaggga

SEQ ID NO: 146892 - DNA, 122 bp, Homo sapiens
ggaaggatcttcgttgactcctccggcttcagggggctccaggcgtcccttggttctaaccgctgcctctgtggtcttgtggccgccttccctgggtcctcagatcccccccttgcatataa

SEQ ID NO: 146893 - DNA, 122 bp, Homo sapiens
ctttcgccccaaccggcagctggcgggcctggtggagagcgtgcggcggctggggttgggcgcggggcccggggcgcggcgatgcgcgcggcacggcgaggacctgagccgcttctgcgagg

SEQ ID NO: 146894 - DNA, 122 bp, Homo sapiens
ggggtcttcgctggtctgcgcgggtcacgcgtccccagtcctcgggcggggtgagcttggcggagggtgtgtgtgagagaagtccgagaccaaacccctcggcctgcttaaacttttcattc

SEQ ID NO: 146895 - DNA, 122 bp, Homo sapiens
ctaactcagagggtcccacaggaccccacagaggaaactaggaaggaagggttgaaactccgcagccactcagagcctgcactcttaaaatgttcgagaacttaaggccgatggttgtaaaa

SEQ ID NO: 146896 - DNA, 122 bp, Homo sapiens
tttcccctccaccttgaggacagttctgcttgtggctgggacatcccctgcctcaatgcacgataattttgcctttggagatgggactttcctaggctgtgggtgagaagggagactagaaa

SEQ ID NO: 146897 - DNA, 122 bp, Homo sapiens
gaaatcttttaatgggaacactgttttgtttttcacaaagaaatagagcttttatgaagtcggtagagcgtctgctcattcccgcatgcaggaacagcatctgggagctttacccaaacccc

SEQ ID NO: 146898 - DNA, 122 bp, Homo sapiens
tcatctgggccagatgtgattttggaatctcttttttcagattttgaggaaaaatacttacgctctaatatgtgggttctggggtaacaacccatgtcggatatgaataggtgtataaggaa

SEQ ID NO: 146899 - DNA, 122 bp, Homo sapiens
tcgcggtcacttcatcttaagttgtatatatgtgcagagcgcggcgcgggtggtcacctccgctgctgccgccacccgcccggcctgcctttgaccctatgggtcacagacaaggcagggtg

SEQ ID NO: 146900 - DNA, 122 bp, Homo sapiens
ttgtcaacctagtcctgctatgtcgtggggactgagcaggccgactcctcccccatcgcacgtccaggatgaagagcgctgtttaggtttgaaacctgcagactcagtcccaaccgaactgg

SEQ ID NO: 146901 - DNA, 122 bp, Homo sapiens
atcccaccacaggggccaccctttggccagggttctcactgatggcacactggcactgcccggagcccaggcatacccgagtcccccagagggtcacagggtccaccatgggtgctactcac

SEQ ID NO: 146902 - DNA, 122 bp, Homo sapiens
ctgggccggtggtgtgtggtgcgatgctcccctgcgatgctcgcagaggcagtgagccgccgctcccagatcgccaccagccatacaaccatgaggggaacgacccatctccatagtgtgct

SEQ ID NO: 146903 - DNA, 122 bp, Homo sapiens
gagagacagggtcgtgcacgaggctctgtctgtgtgcttgtcagtcggcatgcaggagcccgagtgtatgtgagcgtcagggtgtgcgagagagagaaccaagtcttcagctggccaagagg

SEQ ID NO: 146904 - DNA, 122 bp, Homo sapiens
agaccgaggcagacgctcagtaaagagtcctggtgcctgctgattgctgtccccgcagcacgtgttctgtgaggagtgcctctgcctgtggctggaccgtgagcgcacctgcccgctctgcc

SEQ ID NO: 146905 - DNA, 122 bp, Homo sapiens
gtcgccatggcaacccagtactggggctcttgctggagaagcaaaggaggagagagccttcgctgcagctcaggcaggaaagagagagagagagagagaaaaaaaaacccataacagtgtct

SEQ ID NO: 146906 - DNA, 122 bp, Homo sapiens
aggtctccagcgaaagctgagtaactgagccgggggaacaccaggagagagaacggggtgcgggaatggagtcatactgaggacccagagtacaagaaaagagatccagagtgacaggagag

SEQ ID NO: 146907 - DNA, 122 bp, Homo sapiens
tgtgtctggggtgggtgcgggggagaggcagacataccacgaaactggtttcatccgtgacgaccttgagcacgtcggtgacagaaatgtagcccaagcgcttggctatggccagaggtgtg

SEQ ID NO: 146908 - DNA, 122 bp, Homo sapiens
cctagagattcaaagacaccctgcccctgtgagatgcagaaactcttaattggagctgtgcgtgcatccagcaccaatcactccatgatgtgcctttctgaggcagcacagaaggcagccct

SEQ ID NO: 146909 - DNA, 122 bp, Homo sapiens
gaatatttcagttactcccccaaaaccccggcctccatcccatccccagcctccatccgacgtcacccctgttaggtcacaggcccactctgagagtgggtctcgggcctcaagtcccctag

SEQ ID NO: 146910 - DNA, 122 bp, Homo sapiens
ggaaaccaagcagtggttacgtactggttactgcagtctgaaccagaggctgactctctccgcttggattctgagcatagacactaaccacatactccactgtgggctgcaagccttcaata

SEQ ID NO: 146911 - DNA, 122 bp, Homo sapiens
ggtgagaattaaatgttagagagtcttaaatttactatatttgcctatacttttcaaagtcgaagacagatggatttctgcttgcactgcttaattggtattatctacgacagctctgtgat

SEQ ID NO: 146912 - DNA, 122 bp, Homo sapiens
ccagaatcccaaaagccatgactttcagcacacattccagagagaagagggaggtgaagacgatgttgaacacccgcagggcattttcataagcaacagaagccccatagaactaggggaaa

SEQ ID NO: 146913 - DNA, 122 bp, Homo sapiens
caacaatatatatttattttattacattctcaccatctggctgagaggagccgctaccagcgtgcatgctgcaacctgttggctgaggacccagtatggacaggcctccagttctactacag

SEQ ID NO: 146914 - DNA, 122 bp, Homo sapiens
gggcacacacccggctgacgcgctttcctgcggcccggtccgccctccctaccgggaaaccgggtgcctgagcccaggggcaccaatgtcctgcaggcgcctctgtgtctggacagcaaata

SEQ ID NO: 146915 - DNA, 122 bp, Homo sapiens
ctcgccacgccggcgagcacctgcggagcggctgtcgctgagggttagggtccctggagccggagagagggttgagagcgagcaggggaccctgaggatccagcctaaccgagcggcggaga

SEQ ID NO: 146916 - DNA, 122 bp, Homo sapiens
tccctcggctcggggcccgcccggctcgtcccaacagctgccccgcggccgtaggccccgcgctctgtgcaccagggaaaagcagctcccgagtttgtgccggacgctcctgcgccccgcca

SEQ ID NO: 146917 - DNA, 122 bp, Homo sapiens
ttgactccaagacccctaatcattcgctttaccaaataactgcgtggcatggggtttttgcgagagcgcccgttatccttaggaaaacttcagagggaaccagctactagatggttggatta

SEQ ID NO: 146918 - DNA, 122 bp, Homo sapiens
tttggagccttcaagatggagaaaacagtgaagagaagagtagctgagagctgcttctaacgcctgcagcctgctgctgacagctagccatatgtgcagagaacaactgtaaacatccttag

SEQ ID NO: 146919 - DNA, 122 bp, Homo sapiens
ttacctttgcactgtgaagtgcacacgcccttggggcagcaggaaacagagcaggtgggacgccctgagcccctgcatcctccacggctgccccaggaggtggcttcagccccagcacgagc

SEQ ID NO: 146920 - DNA, 122 bp, Homo sapiens
ttaaaatcctctctcctgaagttgtgtggtccagccgtttgctgaaggaggaagcaaagccggtagtaactcactacatatttgggcagtggaatgaaccctggaagctgacaaagtcgaag

SEQ ID NO: 146921 - DNA, 122 bp, Homo sapiens
tttcgctccccgggagccagccccactgcgctccggaggcagctcggcaaacaaacccagcgacagattgtgccgcggctcattccggggaaggacgccaaaccccaccctgctacccccaa

SEQ ID NO: 146922 - DNA, 122 bp, Homo sapiens
tgtcctcgcgcctttcttcctcagtacattaagagattctgatgtgcctgcagcaacatccgccagtggtggctgactgtagagatgccagccagacttccctgcggaggagcccggccatg

SEQ ID NO: 146923 - DNA, 122 bp, Homo sapiens
cggcccgccgctcgttctatctggggcagcgtagcctctctagatggcgggaggccggggcgactctgtggttcagccccagacctggtcccactagccctgaggccagagacccttctgtt

SEQ ID NO: 146924 - DNA, 122 bp, Homo sapiens
gggaaccccgtgtcaagccctccccaggccagtgatgagcccaaaagctcctctggaaaacgttgatctttgcacggcgcccatgcaggcttccaggccaccagggcatgggcaggactcag

SEQ ID NO: 146925 - DNA, 122 bp, Homo sapiens
gggggtcattatgtggacccactacaacccacgggtgggaagctctagatcttggcaccccgtcctcttggctctggctgagccactcagctcttgaatcagaggcttcagcaggaggagag

SEQ ID NO: 146926 - DNA, 122 bp, Homo sapiens
gccctgttgcggggctgagcgtggtggcgtggcagcgagtggaccaaaacccactgcgcacgagaacgcgcggcttggcgcctgtttcccgcctgctctcaggagcgaccgccagggggcgc

SEQ ID NO: 146927 - DNA, 122 bp, Homo sapiens
tgtggtcccagggccagccccacaagcatcacttagaagctttttagagatgcaaattctcgacccacggattcagaaactttgagggagggctccagcatctgtgttttaaaaacccctgt

SEQ ID NO: 146928 - DNA, 122 bp, Homo sapiens
ggtactctgcaagtacagagctggttgagggaaccttctgggggatggaagtgttccgcacgctgatctgggcacaccggtgtatgtgtctgtacaaatgtgtgcaactgtatacctaagat

SEQ ID NO: 146929 - DNA, 122 bp, Homo sapiens
gcaaggctgggcactcccccgggagtgagggttgctgggcctgatgacgtggcttggcaacgtccctaccgccgctgcttcccgggaacctggcgccgccggaactgatcgcggcctagtcc

SEQ ID NO: 146930 - DNA, 122 bp, Homo sapiens
gccggggtcttaagactgggattcccgttgagggaggtgaacagctgtgggagctcaggccgagccgggactctctctgcctggccagacttccagcaaagggagagaccgcgggtcagggg

SEQ ID NO: 146931 - DNA, 122 bp, Homo sapiens
caaactggcctcctggtagacatcatctttttcaaaaaggcagcggtactgcccgtcgtccgaaggtctggcactgagtatctgcagggtcagtctgccctcgtcaatggcgtcactcacca

SEQ ID NO: 146932 - DNA, 122 bp, Homo sapiens
ttattgttgttgcagtttaactgactagcctgattattttttagcaaatgaaaaaaaaaacgtgtttccacctgacacaaagctatgttgtgtcgattagctgcattctccaaaccgggaag

SEQ ID NO: 146933 - DNA, 122 bp, Homo sapiens
tactggatcagatcagcagaaacttaggactcaaagtttaacaagcttatacatcacccacgttttattttgcctactgcaagaacactgtaacctcacaactgtcaatgataaaattagtt

SEQ ID NO: 146934 - DNA, 122 bp, Homo sapiens
ctctctgtccgcccccgggatcctgcagtctgctccgtcactgcttcaggtctttgctcccgtgttaccttctcagtgagactttccccaagcgctgaacactgtacatcctgcagccccaa

SEQ ID NO: 146935 - DNA, 122 bp, Homo sapiens
cccttgcttcccccagcctcgggtgtgggtgtctaggccggggttctggggcaggcctgccgcgctcacccgtctgtctgcttgtctccctctacagcctggtccgacccccagtggcacta

SEQ ID NO: 146936 - DNA, 122 bp, Homo sapiens
cccctgcggcccgggccgtggccgatggggcggggaggccgctggggatagctgggaccccggggagggcgagggaggccaagggtgagggaagagagcccgggaggggggatgggggcggg

SEQ ID NO: 146937 - DNA, 122 bp, Homo sapiens
cagcctcagacagcaggtgggataccaagttcccacttcatctgccgcagggctgggccgcgccaggaccacgtggccagtgcgcgcagggcgatgggcggcagtgcgcaggcgcgcacctg

SEQ ID NO: 146938 - DNA, 122 bp, Homo sapiens
gcctgcctatcccccactgcccagagctggaggcctgatcaggaggcctggcacttgtggcgccctgagggctgccggtgcctctcgtcctcctccctccagggcccgtgctttgtctgcac

SEQ ID NO: 146939 - DNA, 122 bp, Homo sapiens
gagcggggaggggcaggtgggggaatggaggctgcaggactggctagaccaggtccctgccggtccaccaggcggaggtgggacaaaggtcctaacaggagtcactggctcaggaccccagg

SEQ ID NO: 146940 - DNA, 122 bp, Homo sapiens
cagaggccgcggcggccgttagcgctgtcgctccgggggccgcggcgggcggggctccggcggggcccggcctagtccccaccccagcccggctcccagccgcccgccctccctccctctcc

SEQ ID NO: 146941 - DNA, 122 bp, Homo sapiens
tgggtcaccccagcccatccacctgctatggacattataacccttcaaactggtaactcacgtgaccagagcagaaggcaccaccagaccatcaacaagctccccaagtttcccccgaactg

SEQ ID NO: 146942 - DNA, 122 bp, Homo sapiens
gctgagctaatgagctcttgcccgagtccacaactaataagcatgtaaaaggcggcagagcgccgtggcaaaggagcacaagagagcccacaggagaggatgggatcacagcacgtaatgat

SEQ ID NO: 146943 - DNA, 122 bp, Homo sapiens
cacgaaaactgagccaaaagctaatgtttttaaaatgggagaagtataccaaatggatgccgagagctgtattgaaaaaactgagggatcagctgtcattttaggaatggaaaaagcttata

SEQ ID NO: 146944 - DNA, 122 bp, Homo sapiens
ttgaggaagagggcagaacttcagtaaggagacctgtctgggcaacggtttcaggacacgcggtggggaaagcgactagcctccggcggggcagggcgggctgtccttacctgcagaaccac

SEQ ID NO: 146945 - DNA, 122 bp, Homo sapiens
caaaataaatatgctatgatacgactaagtctcaaagtgtattgagagtattagaacactcgctgcttgcagcatacagcctcttcattctctgaccttgctaacttcccttccaagccttc

SEQ ID NO: 146946 - DNA, 122 bp, Homo sapiens
gaatcaagtttctgaaacgtaagaccatgaaaggggatgttaaaataaattgagagaaaacggaaaaagatcagaggagagaagagtcttattgcaccaggtttgcaatttgtctgctttct

SEQ ID NO: 146947 - DNA, 122 bp, Homo sapiens
tctgccggggtgccgcaggctctgagccagctgccaagtatggctgaggctgagtcgtgccggacgctgccctgtctctccctgtgtgcctgcctcctctcccagccccagccccagccccg

SEQ ID NO: 146948 - DNA, 122 bp, Homo sapiens
gggcccaaaggcaggcgacagcatcctgacggttgatgtggcctgaaagcacttagcgggcgcgctgggatgtcacagagttggagtcattgttgggggaccgtggggagagctttgcctgt

SEQ ID NO: 146949 - DNA, 122 bp, Homo sapiens
tgccgggcgccacccaggagggggcagcagcgccattcgcaaagccggcccgctccgctccgctctcaggctcagggctgcggagacaggaatcgcagcttcccctggaaggggcgtcccag

SEQ ID NO: 146950 - DNA, 122 bp, Homo sapiens
catcccgaaacacagctatcttctcctgttccacctcttcaccgtggatagtcccttttgcggaatcccagagggccaggaactcgtggtgactgtcactgctcggtgcctggcgctgtctc

SEQ ID NO: 146951 - DNA, 122 bp, Homo sapiens
agcacgacctgaattctgggagtaagtggttttctagttcatgggggaggaaaacagatacgtgcaagatctccagaggagaacagaaccatggtactcagtgagtcaccaaagggctttgg

SEQ ID NO: 146952 - DNA, 122 bp, Homo sapiens
gcctccgggtgggcggggcatcggcctaaggccaagggcggagccaatgagaagcagcgccgcgttcccgctgccccccgcccccgtggggcgcgcgccggagccacgggcagccgttaggg

SEQ ID NO: 146953 - DNA, 122 bp, Homo sapiens
ttcttggttagcgcttgcgcagacaggcgagaaaggtaagttttgacccagcttagcagccgtagtcagccgggagtgctgtcgtgggggattgtgggaaaagatggcggctgccgcacaat

SEQ ID NO: 146954 - DNA, 122 bp, Homo sapiens
cccaaaaggactcagacgcagcctggcaatgggaaccagggaagctgagtttcagggctgcgaggggcgacagaggctaggggcaccaaagactcaattctaaacagaactggacaatcttt

SEQ ID NO: 146955 - DNA, 122 bp, Homo sapiens
cttctaggacttctagcattacactggctcctccaaacccgcccacgggccgggctgccacgccccccacgcttattggcttaggggcgccgacccatgccccgtgccgcgtgcagccgccg

SEQ ID NO: 146956 - DNA, 122 bp, Homo sapiens
taaacaaactgaaggtctgaatgcatctttttctccccctgtagcatgaagagcagttcgcggtatccggtagataggaagcacaaataggtaatgaaacggggatttgaaagcgccacctt

SEQ ID NO: 146957 - DNA, 122 bp, Homo sapiens
gataaggggccgtggagcccgaaggtcactggtcaagacaaaagtctgtgtcctcgcagacgctcaccccacaggcgtgtatctgttgcccagatacacaactttcctgtaacttcacctaa

SEQ ID NO: 146958 - DNA, 122 bp, Homo sapiens
cctgggggcgggctatggcaggacaggatgcagcacagtcttggcaggagcaggtcgccacgtcgtcaccttgggactcattgcaacgtgcaaccccctcattcagaggctgaatcccactc

SEQ ID NO: 146959 - DNA, 122 bp, Homo sapiens
gggtaccaagactacttcgagctcccgactgccagggcatgcagagaagaacaaatcagacgcagctcctgtcctcgtgggactcacagtctagacgcattcagatcagagcacaagcaaac

SEQ ID NO: 146960 - DNA, 122 bp, Homo sapiens
gccttgcgtggagggttttggcggatgtttttgaacgaaggaatgtcatcggggctctctcgagcccctcaccccgccagctactctgggggtggcgtggcatagtgagaggagcgctaagt

SEQ ID NO: 146961 - DNA, 122 bp, Homo sapiens
cagactctgactccaaagccggggtaaagctttctgggtgacgatgtttaaaacagaacgcgatgtttgtcatgtctttgtaattctgcaagtgaaaatgatgaagatattctttttactgg

SEQ ID NO: 146962 - DNA, 122 bp, Homo sapiens
aaagagggaaaaaaatattcgttggcgatttcttttcgttattggtcctccgctcccttgcgccctggcccccttccctcctcatgaataaaagaaaagtccgaacctatcagatcgcgctc

SEQ ID NO: 146963 - DNA, 122 bp, Homo sapiens
gactggagagcgcggtgcggccggcgcggttacctttgccattgttttccttaagctgagcggcgccgaggcccccgggggagcgaagcgcggagcagcccacctccacgtcgctgctcatg

SEQ ID NO: 146964 - DNA, 122 bp, Homo sapiens
gccagaaagagcagccgcagcaggtggagcgcatgggcagaggggcggtggtgggacacgcgactgtttgggattgagcgaggccacctaagcagattgcggtgagtgagcgcggaatgacg

SEQ ID NO: 146965 - DNA, 122 bp, Homo sapiens
ttctctctcgctgctcccttcctccctgtaactgaacagtgaaaattcacattgtggatccgctaacaggcacagatgtcatgtgaaaacgcacatgctctgccatccacaccgcctttctt

SEQ ID NO: 146966 - DNA, 122 bp, Homo sapiens
cagacagcccccagtaggtcgcctcgtagaaattcctctcggctaagcctgcatgtcggtcgccaatgcctttgaatgggtcaatgtgcataatcaacccattgagggaaaatatgaaggga

SEQ ID NO: 146967 - DNA, 122 bp, Homo sapiens
cagcgcactagggcctggcagagcagaaacggcacgagaagcacaggcaagttcgacttccgcgccatccctgaccaccgaagagaccagcgcgagaaaagtcccggcagccagcgatcgcc

SEQ ID NO: 146968 - DNA, 122 bp, Homo sapiens
cgccccctcacagacttggcaccgcccagagcccagccccttccctctccccggcatcctcgttgcttcactgagtctttcagctgccagctccatagttcccctaggagaggtgggcggcg

SEQ ID NO: 146969 - DNA, 122 bp, Homo sapiens
tgcaccctgcctggggagccacccgccccagagatgggttttctgcctgcctgtaggcggcgctgccgagacacgcggcgctgcaggaccgcgccccgcctgctgcgttccctatgctgtcg

SEQ ID NO: 146970 - DNA, 122 bp, Homo sapiens
gatcgtacggtcatagggtgcccatagcgccatgtctaggaaaccccgattgggttcgtgcggtcatagggtgcccatagtgccgtgtctgggaaaccccaattgagatcgtacggtcatag

SEQ ID NO: 146971 - DNA, 122 bp, Homo sapiens
cggcccaagggcacttagctgagaggctggcgcctgcggaacctggtgccttccgtctcccgcgcccctggcccgcattttggagcctcgggaccccccggagccggacgggccacggagat

SEQ ID NO: 146972 - DNA, 122 bp, Homo sapiens
ttaattctactccagcttccctgaaaaataggacttgagcccaattccttgcaggcttcacggccagcagagcacagtggtgtatcaccctgctggaagctatagttgatgactttatggct

SEQ ID NO: 146973 - DNA, 122 bp, Homo sapiens
ggtgagaaagagaagggccaattgtcaccagccgctatgagtctgaggttgtgtgttatgcgtgagcctgaggttgcgtgttatgcgtgagcctgaggctgcgtgttatgcgtgagcctgag

SEQ ID NO: 146974 - DNA, 122 bp, Homo sapiens
ggagagatgcggagagccaagcggagatgctagggtggcccggggggtggggtggcccggcggaaagagggggtgacggaatgaattcagggaataacctgggagccaggatgtggatccct

SEQ ID NO: 146975 - DNA, 122 bp, Homo sapiens
cactgaagtaacgcggattaaatttggaaaagagacaggggtggttgtaaagttgactttcgatgtttaaaaagtgggctagaaatttttcagcaagacaagtgtactattccaattaaagg

SEQ ID NO: 146976 - DNA, 122 bp, Homo sapiens
gctccagtctctgtccctcggggcaggctgaagacgccttggggaacacagggtctgtcccggggctgtcgccagccttatatagtgccaggacagctccgactgacgtcagcgaagaacat

SEQ ID NO: 146977 - DNA, 122 bp, Homo sapiens
aacccttcctggccccctccatcctaacaaagcctgagtcgaacacgaaaggaagatggtcgctgaagcgaaggggagtcatttgtgtccgttccataaatcaagactgtcgcctttcgaaa

SEQ ID NO: 146978 - DNA, 122 bp, Homo sapiens
aagcgcccaggtggaaatgcatgtacccgcggcagcttctcggcagcgggcttcctgggacggaagacacaggctcgcccgagggagacggaagcaggggatctgctagaactcagctcgcc

SEQ ID NO: 146979 - DNA, 122 bp, Homo sapiens
atcaaatgatgtcggaatggactccaccttgaatgtcgatggccgaggtaagggcgcctgcgcccctcccctccccctaggcctctgcccagggatctcctgcactgggaaggggaggggtg

SEQ ID NO: 146980 - DNA, 122 bp, Homo sapiens
atcagccactgtgggtgcgtatccgagtgtggggatgcccgtgtaacatttatatggagacgtcaaggaggaggaaataaacagatcagaggtcaaatgtgattgccattccgtcatcactg

SEQ ID NO: 146981 - DNA, 122 bp, Homo sapiens
agaacatacaggcaaagaaattatcttcagaaggttggtaggaaaaataaacactctgcacggctggtgtaggcacagcaatatgcaggtttttggttgccttgacaaggctatattaaaga

SEQ ID NO: 146982 - DNA, 122 bp, Homo sapiens
ggggaatgggtgctgggcaggtgagaatgcagatgtgcactgggcatttgactttagacccgcaatgagatttagaagactaaggctgatcatctggatatcacttttcttaaaagtttgat

SEQ ID NO: 146983 - DNA, 122 bp, Homo sapiens
tagaaactaacgacttgagaattctgtagaacagcagcaacaaaaatctctttgcagcagcgttgaccacgtgaattgtcttggacgcagcagcagcgttgggcgttgaattcactttgccg

SEQ ID NO: 146984 - DNA, 122 bp, Homo sapiens
ggggccgttggaggcggactggccgcggtgctgcttcccgtgctgcctgcaaggccccggcggattcccaggggtgctcgtgacccagtccctccaggcctagcaggcgcacggggctgtga

SEQ ID NO: 146985 - DNA, 122 bp, Homo sapiens
tatccactcattggttgatgggcatttaggttggttccatatttttgcagttgtgaattgcgaattgctgctataaacgtgtgtacatgtgtctttttcatatgattagttgttttcctttg

SEQ ID NO: 146986 - DNA, 122 bp, Homo sapiens
gaggccgaaaacggaagagaaagcttgggatcctgagcgcatggggaaggaaccccagtgcggggctaaggcaagagcggccgagccctgccctccagctcctggtcaccagcccgcgggtc

SEQ ID NO: 146987 - DNA, 122 bp, Homo sapiens
tgtcttatgggattatgggaacaagacttggggtgcagcttaggaggctgagagagtttccgtttgggagagtgctgggcccatgacaggagaaggccacttactgttctttttgtggagag

SEQ ID NO: 146988 - DNA, 122 bp, Homo sapiens
gtttcagaacagaaggaagaagggaaatgaattcaaaggctttcctccaatttccagctccgtaaagcaggacaaataaagcaaaagtaaaggcagccaaaataacatccatttaacaagta

SEQ ID NO: 146989 - DNA, 122 bp, Homo sapiens
caagtaagaataaaagaggtttttcatgaccagcttttcccattctctattatccctcagcggcagcttttggtgtctctggtacgaggcaaggtgtcgaggggggccatattaaccccctg

SEQ ID NO: 146990 - DNA, 122 bp, Homo sapiens
cctgcctgaagcctcagagcgatcccacctgggggatcttgctctttgaggtgcggtcctcggagagcagctcctgctgctttctgcttctttctgtccaaaaagctacccacagcccaggc

SEQ ID NO: 146991 - DNA, 122 bp, Homo sapiens
cctcgcgagcttaggatgcgcctgccagggcctgtgcgggggggccactcggtagagccgcgggacctcggcccggaaaccgcgccaccggcgtccgcacacgctaggccggggagcccaga

SEQ ID NO: 146992 - DNA, 122 bp, Homo sapiens
ccaggccccggctgctggttctgcgtctgctcagccaccaggctcgggcaaagccgaaaacgtcaaggaccaacagacaggccatcagccctcgtctcctctcttttccatgtctcttttac

SEQ ID NO: 146993 - DNA, 122 bp, Homo sapiens
cgaaatcgctgatgctgaaaggcaagcttgcttaggagaacctcactgtgggaaagctgccgtgatgccctgtgggggctgtggctgcggttaacaggccccctctgactaccacaaacttt

SEQ ID NO: 146994 - DNA, 122 bp, Homo sapiens
catgggcggctactgtggctacctggccaacatgggggggctcgcggccggagctgatgccgcatacattttcgaagagcccttcgacatcagggatctgcaggtatgtgacggggctggcc

SEQ ID NO: 146995 - DNA, 122 bp, Homo sapiens
cgtccagctccgggtgaccacagagtgccgcgggcgggcagaggggccggaaacccaggccgcttcgtccctgtttccggcagcgccgcgctgctccgggagccgctgtggcagcgtatgct

SEQ ID NO: 146996 - DNA, 122 bp, Homo sapiens
acctgcggcagcggggaggtgtgcgccgtggaggacggctaccagggctgcttccccaagcgggagaccgtgtgcctgctcagccagaaccaggtgctgcacacctttgacggcgcctccta

SEQ ID NO: 146997 - DNA, 122 bp, Homo sapiens
ccccgcccccctcccctgctcagggccgtgcaagtcccaaccagcagggagccgccccatcgacccttggccctgccagctggccgagtgcatcgggtgctcagccacaggggtgtctgcaa

SEQ ID NO: 146998 - DNA, 122 bp, Homo sapiens
gtgagcaagccggctggggtgcgccgtggcgggggcggggcggggggcgatccttgtctccggagggatttcaccctccaggcatggagcctgggctggtttcttcagacccaccagccagg

SEQ ID NO: 146999 - DNA, 122 bp, Homo sapiens
gccaacagataaagaaggatatttatttttgtttgtaatgtcgacgtcttctttcgggctcgatcaaacaatcaggagatctgtgtaggccacagcgtcattgcacgccggggtccttgccc

SEQ ID NO: 147000 - DNA, 122 bp, Homo sapiens
gtcattctcctttctcaccttcctcttgacccctgctctattccgtcccaggcttggtatcgttctctcacctgcctgtagttggcagactgtcaggtcaactgccccacccctcctcagac

SEQ ID NO: 147001 - DNA, 122 bp, Homo sapiens
cgtctaagggattgatggatgtggcctgccagggctttgcctaccacacagctcagagcacgggttccctgtcgctaacaaccgttgcgaagggaatcccatccacacatctcccagacagc

SEQ ID NO: 147002 - DNA, 122 bp, Homo sapiens
caagctccaggcaaaatgtcagcttcccacaaatccaagagggcagcagggaagtaccagcgtttgtaccattttgccagcacctcactcaaaagggctgactgacacacaatgggctccca

SEQ ID NO: 147003 - DNA, 122 bp, Homo sapiens
ggggctcagcaccaggcccaggccctgccttctgtgtggctgtgtcattcattcagtgtgcgggtggggcgggggtgcatgtggtgtgatgtgtgtggcgcatgtggtgtgatgtgttgtgg

SEQ ID NO: 147004 - DNA, 122 bp, Homo sapiens
cctggactgactgatactatggcgcctcgctgcctggggcccagaagagctagcagaatccgcagacttttctatgtctctaaagaagatgatgtctggaaatatgttgaaagcccttaaac

SEQ ID NO: 147005 - DNA, 122 bp, Homo sapiens
gaaccggcacggcaagcggcggccagaacgcaaatccatggaggtgctcagcgtgacggacggcggctccccggtgcctgcgcggcgggccattgagatggcccagcacggccagaggtgtg

SEQ ID NO: 147006 - DNA, 122 bp, Homo sapiens
ggggaagcgctgaggcggtggggcccacagccatggcggagcctgtgcaggaggagctctcggtcctggccgcgattttctgcaggccccacgagtgggaggtgctgagccgctcaggtgac

SEQ ID NO: 147007 - DNA, 122 bp, Homo sapiens
gccctccggtattctcacctcggtgagtcctgtctggatagcagaggtgatgggagatagcgtcaaggccaggggtagatgcctcctcctcaccccacacaacaaaaggcagatttctcttt

SEQ ID NO: 147008 - DNA, 122 bp, Homo sapiens
ttcctcattgctgccctggcttcagtgatggctggcctctgctatgccgaatttggggcccgtgttcccaagacggggtctgcatatttgtacacctacgtgactgtcggagagctgtgggc

SEQ ID NO: 147009 - DNA, 122 bp, Homo sapiens
cagcctccatgtggaggtgggcccttcgcggctggggagggccatgacctggatcattggcggcaatttaaagaaaattaaacagagtaaatgaaaccacaccagagggcggtgaacgtaga

SEQ ID NO: 147010 - DNA, 122 bp, Homo sapiens
gtggaactgtccaatggtgaaaaaagaagtagaaatcatggcccacctccctcctggggtcgtcgccctcaagatgattatcgtaggagtagtcctccacctcgtcgcagatctccaagaag

SEQ ID NO: 147011 - DNA, 122 bp, Homo sapiens
tccctgagagcctatgggggtcactccagctgtgagaaggcaaagccacaaagcagttcccggaagcacaaaggtcaaggcagtctggcattggcagcattgcggtatagaccaggacagtt

SEQ ID NO: 147012 - DNA, 122 bp, Homo sapiens
gggttttctctgagggctgtgagaggctaggcccggggagaggaggcagaggttatgctccggtctctgcagacttccacagtgtctatcgagatcacacatgccagcattgccccctccca

SEQ ID NO: 147013 - DNA, 122 bp, Homo sapiens
gctcggccgacaggggcgggggccgcgcagccggggactttcaggaactgcaggagcgtgcggcgcgggagtagccgagcgcccagcggctgggcctgagcgtcgagactcggggccgaggc

SEQ ID NO: 147014 - DNA, 122 bp, Homo sapiens
ataagggagagacggcaccagccagcccctcaccaccccccgggaagacatgacgaaaatcgactggatggtagattttctcacgaaactttcactaggcggccagggctctggtgggtaca

SEQ ID NO: 147015 - DNA, 122 bp, Homo sapiens
ggttggctgagcttctgcgcatgcccagattctgcccagcccagggacctcgactttcaacgggagaaattcagagacacattcagggctcagccggtagatgtgctgagaatcttcggtag

SEQ ID NO: 147016 - DNA, 122 bp, Homo sapiens
tagaagaatcatctctctgctcaggcaccgggagcaaggggcatctgtcgctctgcagaacggaggggaccaggcctgatgaacaccatcctgggcccagaaacctgggagggtaaagagaa

SEQ ID NO: 147017 - DNA, 122 bp, Homo sapiens
tcttgttgcccaggccggagtgcagtggcgcgatctcggctcactacaagctccgcctcccgggttctcgccattctcctgccgcagcctcccgagtaactgggactacaggtgccggccac

SEQ ID NO: 147018 - DNA, 122 bp, Homo sapiens
cttagagtgattcttggcagggtatttgcaatgtatagaagagtatttgaactgagatcccgagggagaacactgtgtgaaattattttagtcatttgatatcaattgctcttgctatgaaa

SEQ ID NO: 147019 - DNA, 122 bp, Homo sapiens
gtggggaatgggagcagcgcgggagggtggtggggccgccaggatcgggcgtggtaatgccgggacctgctgcttgctctgcttggcctgcacagtgtctggcccggagagcacaggtgagc

SEQ ID NO: 147020 - DNA, 122 bp, Homo sapiens
ttgcaaaaagctgggaggggtgcgttttcaacactggagcttcgcggccgctctcccactcgctccccgcccggcgctagaggagcgagttcggactcggaccccaaggcctcgagtcccgc

SEQ ID NO: 147021 - DNA, 122 bp, Homo sapiens
tgaggacatggagcctcctggggtttaaaaactctgttggggcccctgctctgcagggcccggacaatcattccagcagatctggggacccgtcccagtgcacccaggtgggcagactgcca

SEQ ID NO: 147022 - DNA, 122 bp, Homo sapiens
tgggagaggcggtgctgagtgcggagctgacagaggtgatgcaggcacatctcatctcctcgcaggtggagcaggggtgttgggggtgcttcttccctactggaggagaggaggtgggaggc

SEQ ID NO: 147023 - DNA, 122 bp, Homo sapiens
cttcccagacagtcattaaggtgtagaggtagaagacctctactgaggggcatgctacttcggtcatgtgtagggaaggccctactgatggtgttctattgacttggacagtctccatgtgg

SEQ ID NO: 147024 - DNA, 122 bp, Homo sapiens
gattaaagagctgttataactctctgtttattttaggaaagattaatggttccccctcctcgtttctcagggacagactttaatctgtctagagtgagtcatgaaatatatcagctcaaccg

SEQ ID NO: 147025 - DNA, 122 bp, Homo sapiens
cacttctgagcaggaattacatcagaagatcatctatttcctcctgggcttagcacacaccgttctctctaaagtgcagacccatcagcatcctgtttttctatccttttcttggcttctca

SEQ ID NO: 147026 - DNA, 122 bp, Homo sapiens
cagttaccagctgtatcaccttggatcagtcaggtaacctcccgcgaatctggttgcttccggggcaggggatccgcgggctgcaggtttgagcctggttgccggcagggtggagcagctgg

SEQ ID NO: 147027 - DNA, 122 bp, Homo sapiens
ggaaacctccacgccattggctgccgaaagaggtccctgtcgcccattgggccggccaggcgaggatctcagccagtgggtgctgaggcacgagaacttcttcgcagccttgggcctgactt

SEQ ID NO: 147028 - DNA, 122 bp, Homo sapiens
gtaataaatgtcatgagaaaaataggtataaagtattatgactgataagaagagagagggcgtcacccctgtgttgatggatgagtcaaggaagacttcataaaagaaacaggttttcagtt

SEQ ID NO: 147029 - DNA, 122 bp, Homo sapiens
tgttacagagtagagtccttggctccagatagggctggtggccaagacagagcatgtggtcggttcacagcatgggagcatctgtgctataccaagattactcataggataaaattagacct

SEQ ID NO: 147030 - DNA, 122 bp, Homo sapiens
acctccggcgtctgtgccgctgctccgctgctcccctccccggcccctgggaaactttaccgggttccttagagaaaagcggacgccactgctgtccagtccagagacagccgtcagcgacc

SEQ ID NO: 147031 - DNA, 122 bp, Homo sapiens
ccctgccatctgggtcatgagagccaggggcggcgagggcgtggcttttactccccacaccgcagggagtgcctcacccccctgccatgtgcgtcttgagagccagggggggcgagggggtg

SEQ ID NO: 147032 - DNA, 122 bp, Homo sapiens
atcagcagcctctgtgtacagactctggcgtccctgccccgctttagcagttcctacagacgcttgacctgccaggaaaggaaagaaacctgagcctctgctgaaaggtgatggatttaagg

SEQ ID NO: 147033 - DNA, 122 bp, Homo sapiens
tccacgtgggggcctagaaatctgtatctgaaactctccccagatgcccatggtgatggacgagtgtgggaggcgccgatggagaggtgtgtgtgcaggaaggcagacagaaacggaaaaag

SEQ ID NO: 147034 - DNA, 122 bp, Homo sapiens
actctcgcctcttgtagatttcctgggtgtggcctggaagcggcctgaaacggcgggagccgccgcgtgtcttttcccttggcctcgcgcgccctgtggcctgtggcggtgctatgctgctg

SEQ ID NO: 147035 - DNA, 122 bp, Homo sapiens
acgaggagtcaggattctaccagatggaagtgcaagcaatggataatgcaggatattctgcgcgagccaaagtcctgatcactgttctggacgtgaacgacaatgccccagaagtggtcctc

SEQ ID NO: 147036 - DNA, 122 bp, Homo sapiens
ttcccagcccacccatgtacccacccctgtagagctgggctgggagtgtcagtagctgcccgaggtgcttcttcaggaactgcatagatggcctcagaccattttccgtgtgctcctcaccc

SEQ ID NO: 147037 - DNA, 122 bp, Homo sapiens
tccctggcagaactcctctcagctcctaaagcacaactgtgtgcagatgtgataagtccccgagggcgaaggccattgggtttggggccatggtggagggcacttcaggtccgtgggccgta

SEQ ID NO: 147038 - DNA, 122 bp, Homo sapiens
gatgctaagtaacttgcctatgatcacctggcaaaaagtggtatgagagggctgattctacgtttcaacttgggtcactcctgttatatatgaactgctcagtgcaacaggtcttggttgaa

SEQ ID NO: 147039 - DNA, 122 bp, Homo sapiens
ccctttgcctgtgaagtgtgtggcaaggcctttgccatctccatgcgcctggcagaacatcgccgcatccacacaggcgaacgaccctactcctgccctgactgtggcaagagctaccgctc

SEQ ID NO: 147040 - DNA, 122 bp, Homo sapiens
gtctcgtagaacagcataatgatcaaagagacacaatagaaatgcatttgcttctgcagtcggtgtattcccccagctcgtgggctgtgctgacggacagcccgggagctggcagcttttgt

SEQ ID NO: 147041 - DNA, 122 bp, Homo sapiens
gctctgcgacccgggggcaggaacagagccttgcaggcggcagcgcgtcacaaaggcggccggagcttggcatttagcttgggccagagcaaggcgcagacccggggcgcccatggagttgg

SEQ ID NO: 147042 - DNA, 122 bp, Homo sapiens
gcagggcaaacgccagcaagcagagccgggcggcgcctgcgccccctggcatggtggcggcggcccttagcgctcggcgctcacacgccctcagccatacctgcccactgcccggcggtgga

SEQ ID NO: 147043 - DNA, 122 bp, Homo sapiens
tgcagaatggaggcataagccaagggctttgggtccttagtgttgggagtgagtggaccacgtaagggaaaggaaaaaaatctcgggacctccccaaattcttatgcaaaaggaaaggtgaa

SEQ ID NO: 147044 - DNA, 122 bp, Homo sapiens
ccactagcctaatggataggttttccccgtacttcgaggtaatgttctacatcacagctccggcctggactagaacccaggactcagtcaaggcagcctggttctgtccaccgcagctggca

SEQ ID NO: 147045 - DNA, 122 bp, Homo sapiens
catatttatttcgtggaagagcgtgtatccctcggctgtccttccagctctcccttggtgcgtgtgcaggacgcacagaagggtggagtgtgggttgcgattatttttacacagaaggtgtc

SEQ ID NO: 147046 - DNA, 122 bp, Homo sapiens
gggctgtgcgtgatgccttcagagctgtgtatgacaccgagagagtcaggggcggtgacccgcgtctggaggtggaaggggaagtgagtgagggatggatgtgaggtttaggaatgtgttgg

SEQ ID NO: 147047 - DNA, 122 bp, Homo sapiens
ctcccatttaagaggcgtgattatgtagtccaaggtcatgtagccagcaagaagtcaggccgcgttagaaccatgtccgaagggctccaaacccttgttctacatccatagtctacagcgac

SEQ ID NO: 147048 - DNA, 122 bp, Homo sapiens
acctcatgatccacctgccttggcctcccaaagtgctaggattacaggcgtgagccaccgcggcccgcctaaattaatacttttaaatggccttattgttatatggctgattcaaagaattt

SEQ ID NO: 147049 - DNA, 122 bp, Homo sapiens
ctacttcatctttctggtcctcagtttccccgtctgtaatagagtgatgtcagtacccaccgtgtatggcactggggaggcagtaaaggtttgggtcaacctgagtgggtctgatcccgatc

SEQ ID NO: 147050 - DNA, 122 bp, Homo sapiens
tgtcaggggaatttcttgcaggctgatggggtgaaccaaataaattcacagcatctcagccgcaggctcggggttacaatgcggattcctcctgggcggcgggccccagtaggctttcactt

SEQ ID NO: 147051 - DNA, 122 bp, Homo sapiens
aagttcgggttagtcagaggccacgcccaccgcaggcccgaaaacaccagcctgcactggcgcgccggattgtgcgcaggctccacctgccacgcacgcacgccttgccccgccccttccgg

SEQ ID NO: 147052 - DNA, 122 bp, Homo sapiens
tcagacccagggcctcggggcccggctcggacggccatccacaaacaagcatgctgtggacggagcagcagatgcacccgtgtcctgtgccgccagagccgcagctcccgtcagcacccggg

SEQ ID NO: 147053 - DNA, 122 bp, Homo sapiens
tcagacgctcatggtaaggctccgggacgcggcccttccctgccctgccctctccgcgcccgctccattaaagttctccatccagtggagagccctggctggctggccctctggcagagcgg

SEQ ID NO: 147054 - DNA, 122 bp, Homo sapiens
ttttgtgtacaggtaatataatatgttcatcaagatggtaagctccttgaagaaaagcaccgtggtttatcattctatctgttttgctgagaccacttagcactgggatgagtatggaatag

SEQ ID NO: 147055 - DNA, 122 bp, Homo sapiens
ccgcggcgcctctgagcaacctgcagccatgctgcttgtcaaggttcccacggcgcgcgccgttgacgcaagcacaatcccatgtccccggcgctcgttttacgccatccaccaacgaccac

SEQ ID NO: 147056 - DNA, 122 bp, Homo sapiens
gcaccacaagtccagtcaccctcggcgcccggagatgacgtcacgagaccccacgtggtccgaactccgccctccgtgttctgcctaacccagcaaggaggcccgagtcgctcttgagcatg

SEQ ID NO: 147057 - DNA, 122 bp, Homo sapiens
cttggtgagtgaggctgagaaaggcaggtttatagagagctacagacagagaaatggagacgggtggccctgccaaaggactgtcagagacccaggcatagaaaaatagagatcgacagata

SEQ ID NO: 147058 - DNA, 122 bp, Homo sapiens
caccacttatggcaccaaaacaggtattttttggcaacaccagcactattcgctaggtgccggcgcttgctgagtcccagcgccgccagtttctctttcggtcgttaagtagctcagagccc

SEQ ID NO: 147059 - DNA, 122 bp, Homo sapiens
acgtagcatttcattctaaagagtgctaaacagctatgaaaagcggccagtttgtctgcacgttgggcctttcaatgattttacatcatccttgcgagagccctgcggtggtgtcacgccct

SEQ ID NO: 147060 - DNA, 122 bp, Homo sapiens
ttggggcggatcacgcggtatcagccagtggcctccctggtggatagaaggatcgctctgcgccgggggcgggccagtaatcgtaggcggggcgcgggtccagagctccgattggccagagt

SEQ ID NO: 147061 - DNA, 122 bp, Homo sapiens
gggatcctgtgggaaggcggtgcggtggttgagtgtccgcaggggagcctgttggaaggccgcgtggtggtgagtgtccgcaggggagcctgttctggttgcttgggctgctgtcacaagaa

SEQ ID NO: 147062 - DNA, 122 bp, Homo sapiens
catcccgctcaggaaagtggccatgttccggcattcgcacccggcctgttggggtggcttcgggcacctgctggcgggggaacgggcgcggcgtgaggcaccccccgccagcccggggcccg

SEQ ID NO: 147063 - DNA, 122 bp, Homo sapiens
ctgccacccccttcctccgagatccacaagactgttacagaacattcatttatttttcttcggtgcttgggctgaaaactctgatgactaagccattgaattttaatacgctactgtgctcc

SEQ ID NO: 147064 - DNA, 122 bp, Homo sapiens
cgcagggcgggtgctgacgagccgggagcgggctccctgcctgcggcagccgggatggcccgctggggacaccggagaaagcctgttttaaatttaatccgaacttgacggtgtggattgaa

SEQ ID NO: 147065 - DNA, 122 bp, Homo sapiens
gcagaaggtagtgggcccccagcggcgctgggagtatctatgcaaaagacacccacctaccgccccgcccggcaattgcacaccctctgccattccagtctgcccaggtctcccacagaact

SEQ ID NO: 147066 - DNA, 122 bp, Homo sapiens
cgcctccccggatggcaaacactataaagtggcggcgaataaggttcctcctgctgctctcggtttagtccaagatcagcgatatcacgcgtcccccggagcatcgcgtgcaggagccatgg

SEQ ID NO: 147067 - DNA, 122 bp, Homo sapiens
gaagcatggagactgtggtgattgttgccataggtgtgctggccaccatctttctggcttcgtttgcagccttggtgctggtttgcaggcagcgctactgccggccgcgagacctgctgcag

SEQ ID NO: 147068 - DNA, 122 bp, Homo sapiens
gagaaatgaaacttatgttcatacaaaaacctgaacatgaatgttcatagtagctttattcgtaatagccaaaaactggaagcagcttggatgttcttcaacccatggtaaacggttaaaca

SEQ ID NO: 147069 - DNA, 122 bp, Homo sapiens
ccccaaagccaccaaccaatccaagtgaaaacacgtctcagggctcccttggttttccctcgtgggcggccctgcccccctgttctagcccggcccaggcacgctccaccctaccctggcca

SEQ ID NO: 147070 - DNA, 122 bp, Homo sapiens
tatatgacattccagtgtgccggcatgtggccgcacgtcattccacgttatatgacattccggcgtgccggcatgtggccgcacatcattccacgttatatgacattccggtgtgccggcgt

SEQ ID NO: 147071 - DNA, 122 bp, Homo sapiens
actctactagattcatatgttaatgaacagctgtgatgtttcccagacacattactaaagcgaagacaattcccaggtttccgtataatctaaaacttttatgaaaactcaaactaagagtt

SEQ ID NO: 147072 - DNA, 122 bp, Homo sapiens
tgaactttgtgatgggattcggtcttccttactcttcagagtttagtataaccatctcttcgtttgtttatagcagtataatggctgggaaggggatatttagaatcaaagcatagttttgc

SEQ ID NO: 147073 - DNA, 122 bp, Homo sapiens
ccctccgaggcgccggagagcgattcccaaggggcctgccggagcgtggcgtcacaggagcgtcgcgtcacgtgaggctgccatccaatcgcggcgcgcgctctgccctgcgggcagcgggt

SEQ ID NO: 147074 - DNA, 122 bp, Homo sapiens
caaggcaccgcagggcaagctgcccatggccctggggctctggccgctgtgggttcaagacgaggaccagcctgacactggaagtgcgggcgcagaattagaggaggcacaattagaggctg

SEQ ID NO: 147075 - DNA, 122 bp, Homo sapiens
tggccgggtccgggtgctctggctgtgatgttgcgtgccccgcctgtgtgtgtgcgtgagcgtgggtggacttccaagtgtgtgcagagtcacatgcgggtgatcctaggcgtgcatccgcc

SEQ ID NO: 147076 - DNA, 122 bp, Homo sapiens
taagcatagaaacttgttagttcagcgcctggaacatactaagtgttcaacatagctgagcgctcttaatctgctgacaaaggcagtggtgcccttgtaggaatagatggcaaaccatatgg

SEQ ID NO: 147077 - DNA, 122 bp, Homo sapiens
aaaaccacttaaagttggacagacgtctactgcaaccaactctcaaaaagtttagaacagcgcactacgccccgcccattggcgagaaacggaaatacccgctttcgagaaaaccggaagtg

SEQ ID NO: 147078 - DNA, 122 bp, Homo sapiens
gctgtgagcccttcgttagagagggtcacggtgaccagcgaagcacagtcctgctcaccgcgtccagcatggcgctgggcacgccaccaacagcgacagccctatggagggcgctgtttcat

SEQ ID NO: 147079 - DNA, 122 bp, Homo sapiens
ccccctttcctgcaggccccgctccccgggtccctcctagacgtctctgtcccaaggagtcgcgtgcacctctcgagaagctcctcacagcgtcgctcccggccctcttttcgtcggactcc

SEQ ID NO: 147080 - DNA, 122 bp, Homo sapiens
agaatgggccagccgggggtttgttccccttggcctcccccagaatgcctgccctgctgccgggtcctaagtggccactcaataaatgttgggcccttgatgaatcaccttccccctcgata

SEQ ID NO: 147081 - DNA, 122 bp, Homo sapiens
tcgtctaaaaaaaaaaaaagtgccctcttccatgcaagctccagttttaggcgagcgagccgggctctcctaaatagaaggttccaaccaatctcaccaggccaaaggggattttcacgtac

SEQ ID NO: 147082 - DNA, 122 bp, Homo sapiens
attactgcttttcccaaacaacagttagaacatgagcttttgagtttcttacattctttacgttttaaaattaaaagccaaattcctttaacctcatatatcctaagccactctgatttaaa

SEQ ID NO: 147083 - DNA, 122 bp, Homo sapiens
atttatagcatttccataaataatcccattctggctgattccctgatttctggccactcacgatatccctggatgtggcatgaggaggagtggaccgtggcaagcccccgcaccggcaggtg

SEQ ID NO: 147084 - DNA, 122 bp, Homo sapiens
caggcccaggcaatcactgacccgctctgtcactgcagatttgtgcagtctcgtccagagcgttagggaggtggaatcaggcaggaggagctccttcgcgtctggccgcctttgctcagccc

SEQ ID NO: 147085 - DNA, 122 bp, Homo sapiens
gtccagctggtactggagcggcgacaattttggctagtctaagaagggcattcgagtgaccgttgacaacgggtgggacagcgtcagagctggagggagagccagcactgtatgcttccagg

SEQ ID NO: 147086 - DNA, 122 bp, Homo sapiens
ggacgagggtgcgctgtggacacagcagtccgcggaattccgttctgggaagccaatggtcgccggcaccccttgcttcctccctctgttgtctgcctgtgtgacacacatcaatggcaata

SEQ ID NO: 147087 - DNA, 122 bp, Homo sapiens
agccggtggggcgggggagtcccacgagggctgctagggaggggttgctgattgccccaccgcccctgattcccccagccaagcctctcaatgtccctcgggctgcagatggtgggcgttgc

SEQ ID NO: 147088 - DNA, 122 bp, Homo sapiens
attcaatccccggggcctcattgatgcccgccgcgtgctggagagcctctgagggtcagtcggcgacgggcaccgtctggaggggtctcgccgctaacccggggtggctctgtctttcggga

SEQ ID NO: 147089 - DNA, 122 bp, Homo sapiens
aatcaacctccacctaccttcccaccctctcacctctgatgcccaagaccctgaatccagcgaagctcacagaacacacaagaagtccaaggaagagccgagggtccagtggggcctctgag

SEQ ID NO: 147090 - DNA, 122 bp, Homo sapiens
cttgggccgggcacggagtaggcacctggcgggctccccaggtggcagacgctgtcgctgcgcacacctggcctctgtgccgcctgctccctgctcgtcctcccctccccaccctcacccac

SEQ ID NO: 147091 - DNA, 122 bp, Homo sapiens
agcacccacatctcccaagatgcaaacactgggtcccgaaaggcatctgtcctgccccggcgcagatcccctgcagcctcctttcctactgcacaaatcgactagcgcagggaccgggctct

SEQ ID NO: 147092 - DNA, 122 bp, Homo sapiens
aatcttcatcttcaaagtcgaatggatattttaattttacagcacatctcacagactaaccgtgtttcaaggactctgtagtgacctgactagtgggctaccttatgcatagtgcagatttg

SEQ ID NO: 147093 - DNA, 122 bp, Homo sapiens
gtccctcccctcccccatcccaggagctgaggtcttggtgaggccacagggccaggtccacgcaaggactgtccgtgtcctgtcctgtggtctctggccccacgtgacacccacacgtgtgg

SEQ ID NO: 147094 - DNA, 122 bp, Homo sapiens
tcggcgagcgcgtgcacttgaaccccacgcgcggcttctggtgcctcaaccgcgagcaaccgcgtggccgccgctgctccaactaccacgtgcgcttccgctgcccactaggtgagggcggg

SEQ ID NO: 147095 - DNA, 122 bp, Homo sapiens
gtaagagggatgggtattgggagagcccacacctgctgaggagtgcctttagactttgagcggtggtgtttctctccctcccagaaatagatctctttggggagacaggccatacaagacgt

SEQ ID NO: 147096 - DNA, 122 bp, Homo sapiens
ccagcacaaccctgcggtcacacacagaactcgctaagtgccggaaagcagtgactaagccggcgctgggaaacagtgggccctgcggcatcctgcagatgcgttctgttctctctcacgcg

SEQ ID NO: 147097 - DNA, 122 bp, Homo sapiens
tttagcgggcgcggcgggcgcgaggagcctatttatagatcaaacaatccgcgctccctgcgtcaatggaaccccgcgtgcgtcacgcgcgcagacattccaggccccccctcctcgccccg

SEQ ID NO: 147098 - DNA, 122 bp, Homo sapiens
tcattcctttggtgcctctatacctatcttcatctccgaatagctccagtagattcatcccgtgaaagtagctgtggttccttgctgtggctttgctagttcatgctgagctacttcctggt

SEQ ID NO: 147099 - DNA, 122 bp, Homo sapiens
gtgcctgcatggctcccagccttgcaggaacagggagacctgctcaagggtgtgtctttccgcgtttgcccatgaggaagcaggcctctgccactgggagaaggtagggtcagaaagacctg

SEQ ID NO: 147100 - DNA, 122 bp, Homo sapiens
tcttttcaagagtggttgcagaatgccagggctacaaagagagggccgcacattaagcatcgtattatgtgggtacagagtattagggttctcgatgaccagaaggagaatgagtgcagttt

SEQ ID NO: 147101 - DNA, 122 bp, Homo sapiens
tattgatgttaggcaaaataatgaagtcagggaaggaagccagcagtacgtgtggctcttcggtgtacggaaagtttaggattcagtctgccagagcttagttgggattccactcttgacta

SEQ ID NO: 147102 - DNA, 122 bp, Homo sapiens
gcagggcccacaccacgtcgggccggccagaccgagcggccggcggactagccccccaaacgcctgagattggggggaccaaattaaaagcagctgtttaacataccttccgagccaggcga

SEQ ID NO: 147103 - DNA, 122 bp, Homo sapiens
aaatcggttgtaaaaaccaattgtcctccacctttcatttcccatcagaccacaagggggcgccgtgcgaggcgaacacagccttagatctgcaaaatgctggtcgctgcgtgaggggcttc

SEQ ID NO: 147104 - DNA, 122 bp, Homo sapiens
cagtatgcgggtgttaattggctgccggaggtgcccttcacaatctcccggctgccgcagcgcgcggagagcgtgacaggactccacggagtctgcgcggaagggcgggactaactgtggcg

SEQ ID NO: 147105 - DNA, 122 bp, Homo sapiens
ggcgcccgccttacctgtggatgcagtttccatggcaacgggcgactgccgggcggggcccgagccggcttcccgcgacgccgcttcccgggccctggcgcccaaccccgggctgggctccc

SEQ ID NO: 147106 - DNA, 122 bp, Homo sapiens
gaactcatcagacacacttcacatcttgcctcctccacctctggctaagaaccgtcgccccgattacgggaagtatttgttccccagttctctgataattctgtcaggagcctgcgtaaggc

SEQ ID NO: 147107 - DNA, 122 bp, Homo sapiens
tccctgattgctctccgggagtgagcacatacacaaacatggcattgcaaggcaagtctccgggctcgcccggcacgctcgctctaccttgggctgctgtctgcacatgctcgtaacgacac

SEQ ID NO: 147108 - DNA, 122 bp, Homo sapiens
tccaaaggcccggaggtgtgagcacccagggcctgtgtgaactacactgtggctggagcacgggggatggggcaaaacaggagccagcgagcggggagcagccagattccgcaggcctgggc

SEQ ID NO: 147109 - DNA, 122 bp, Homo sapiens
ggccaagcgctgccccacttcttcccgccccgcggcccgagtccctggctcgcagtcccccggcttgtttcgcttacctagagcgagaaaacctctcacaccccaaccggcttccgatccct

SEQ ID NO: 147110 - DNA, 122 bp, Homo sapiens
aaaacaaaattagggagtcaaacgtggacctgaaagtcagctctggaccccctccctcaccgcacaactctctttcaccacgcgcctcctcctcctcgctcccttgctagctcgttctcggc

SEQ ID NO: 147111 - DNA, 122 bp, Homo sapiens
tctcagtggtgcaactgtgcagtagacatttccatgcaaaagcaaaaccttggtagcacccgatctgtgaatgtgaaaaatatttaagagtgaaattaataagcaactagctacactttcat

SEQ ID NO: 147112 - DNA, 122 bp, Homo sapiens
ccagtgtggggccagagggtgcccgagccccggtgcgcggccagcctgctgcatccctgccggctgacgtctggagtgaccgtcattccagtgaccacccccatagccacagacggcacgtc

SEQ ID NO: 147113 - DNA, 122 bp, Homo sapiens
tgagacaagctaccactgtgtcccacgtgactttggcaagaccttcctgcacggagaccgcgttgctcacacctggaaagggtgactgggtccgctcagcgtccagcaagtggctgtgatgg

SEQ ID NO: 147114 - DNA, 122 bp, Homo sapiens
gttcacacacactttgcaggagctcagggctcgacagccattggcgcgagggcagatccgcgaacaggggctggggaaatgatccagatctggcattgccgcggagacccccatacgtagct

SEQ ID NO: 147115 - DNA, 122 bp, Homo sapiens
gaggccagattgtcatccatctggccagtgacaggtgatcagcgcagtgctaggggcactcgggtgatggcatgattgctgtggtcagctcagagtcctgaggggaagcaagcgggctctca

SEQ ID NO: 147116 - DNA, 122 bp, Homo sapiens
ttcagcgctgatctgcacgttcttccctccgtgtaatttcaatttgaactctccccagagcggccttttccctcttgttgcctgccaagtcgtttgaaggctaagcaaacattcttcctccc

SEQ ID NO: 147117 - DNA, 122 bp, Homo sapiens
tccccaaagggctcttgcaggagttgtagcagaattacctccacccagcagatgaaaaaacggaggcagagaaagcttcaataacttgcttatggtagtgtggggtgaagaggggcttgtca

SEQ ID NO: 147118 - DNA, 122 bp, Homo sapiens
gggggccaccagtccaggggtgggagcactacagggggtgggagtgggtggtggctggtgcgaatggcctggcacagatccctaggattcttgacacctggatttcaccagggaccttctgt

SEQ ID NO: 147119 - DNA, 122 bp, Homo sapiens
cccgcatggctcccagcgagacgatcccgtccgggatcccatccggctcccatccggaggcgatcccgtgaaaggatcgcgtccaaaataaaagggcccgagacctatgcttatgtaattcc

SEQ ID NO: 147120 - DNA, 122 bp, Homo sapiens
cggaatcaacccaagtacaggggcttcaaatggtcagccggccttggggcaccactgtcccggtggccgcggcaggaaccagtcctgcagtcctgcggcggcacctgcgcgagatgcagggc

SEQ ID NO: 147121 - DNA, 122 bp, Homo sapiens
ccgcgagcgcacacacgcacacacaaatgccccgcacactaacagctctgcaacaagactcggtctttcagctggctactggcaggccacccagaaaatgtgtactccagtttcgacccttc

SEQ ID NO: 147122 - DNA, 122 bp, Homo sapiens
aggcatggcacagccaatgggaagggccggggcaccaaagccaatgggaagggccgggagcgcgcggcgcgggagatttaaaggctgctggagtgaggggtcgcccgtgcaccctgtcccag

SEQ ID NO: 147123 - DNA, 122 bp, Homo sapiens
cccgggctggaccgacgggccctctcccaagcaccgcccgcagccaggcggctcctcgagcgcagcaactttgggactttgttccggctttttccaaatcgaatctggtcgagggggcgggg

SEQ ID NO: 147124 - DNA, 122 bp, Homo sapiens
cttcaaatgcgaaagcgactgccttcttgggtgagtgcattagctgggtagggtctgtcccggacctaactggatagtgtgggaagcagtggatcgttgtttcaaaaaccatttctttttgg

SEQ ID NO: 147125 - DNA, 122 bp, Homo sapiens
gcgtccaatctaatctcaaggtttgagtagctgtggacagcccaacaggcacaggcctcccgttagtacatccatacgagaagttaagaatgagtgaaaatagtttttttttttttaattta

SEQ ID NO: 147126 - DNA, 122 bp, Homo sapiens
ttgggagataagtgatcaaaggctagccaggggacaagggtgtcaggaatgtccagcacccgctgtgttggtcacactgacactgtcctattcacagcctggaacaactctctattgttgaa

SEQ ID NO: 147127 - DNA, 122 bp, Homo sapiens
ttaaacctcggctggggcagtgggaggaccaggtgacccccatgtaggcctcatcggtcccggtttctcatgcagagacctcactcgaggtgggatgggctccgttcccaaaaaccagaggc

SEQ ID NO: 147128 - DNA, 122 bp, Homo sapiens
ctctgagtgggaatccagcactctctccctcttcttccccaccaccttcaccctccttaacggaaaaacaaaaggcatctgcacctgcagccctgctgaggcccctgctgctcacacttgca

SEQ ID NO: 147129 - DNA, 122 bp, Homo sapiens
cccctgtttaatatttcagtgctgggtggtgtgagcgccagtcgccggccttcagcgtggcggctgctgggcggcggcagggtggcggacggagcgggggaccggggagcggcggccgccgg

SEQ ID NO: 147130 - DNA, 122 bp, Homo sapiens
cctacaccgcctgcgacctggcgccccgcgccggcaccaccgacgccgcgcacccggggccgtccgtggtccccgcgttgcttcctctgctggcagggaccttgctgctgctggggacggcc

SEQ ID NO: 147131 - DNA, 122 bp, Homo sapiens
attccttctctctctatgcactgttcttacagttgaagcaatacacttggggagccttatcgctgcccagggctacatctttccaatctcagaccatgttctcaccatgaaggatgatggca

SEQ ID NO: 147132 - DNA, 122 bp, Homo sapiens
caagagctccatttttattaaacttccttaaacattcaaaatagccagtgtgctctatgacgcttccttttgtttgtttgtttgagatagtgtcttgctgtgttgcccaggctgggatgtag

SEQ ID NO: 147133 - DNA, 122 bp, Homo sapiens
agtaatatacgttgagactcaagaaaactcctaccaatattagggaagaacggttctgatcgctgacgaatcatggcttgcatctgtctttgctgctgctgttcttgcctttcttgatccaa

SEQ ID NO: 147134 - DNA, 122 bp, Homo sapiens
ctcctacgacagacagctttcggccttctggggagctggaagcatgaccatcaggagcctcgtgcttaaaaaaaaaaaaaaaaaatccccggacccccacccccacccccgcctgccgcggc

SEQ ID NO: 147135 - DNA, 122 bp, Homo sapiens
acttgcaaaacctgctagggacaccacagctcacatctggagggggttcccctttgcaaacggaaaaggcaatatgattttttttttcattttaggatttgtgtgaacctaagttcggtacc

SEQ ID NO: 147136 - DNA, 122 bp, Homo sapiens
tttccactgggagagtctgcccccggccagcagcccgcgcacactgctcacacaggcacacgcatgcacgcacacactctgccggggaacatctgttttgacaaacacattattcaagtcag

SEQ ID NO: 147137 - DNA, 122 bp, Homo sapiens
cacactcgtgagcataaagggcctccaaacacacacacatcccgagacacgcatgagcaacgcaccacgagggacccagtgcatggcctcactcgccaagcacaaccgcaagagagagaagg

SEQ ID NO: 147138 - DNA, 122 bp, Homo sapiens
cgatcccctgttcccagaccagtggccggcacggggcagctcccgagggcaggagagtgccgtgcttttcagtctgatctgagctgagagtggcggcctgaggcgtccccaacaccggtcca

SEQ ID NO: 147139 - DNA, 122 bp, Homo sapiens
gcaccctacatttcccacctccaagattttaagtatagttcgcttgaaatccctggaatgcgctttcttctggctcctacccggagatccggagtccggacaaaccggggcaggaagggtcc

SEQ ID NO: 147140 - DNA, 122 bp, Homo sapiens
atcttgccaactccttccaagccaaaagaagcctctgggaaggtgtgccaatggtgaaaacgtacagagggtcagggtgaagcagtgatctctattggctgaaaaactgatcaggtcatatg

SEQ ID NO: 147141 - DNA, 122 bp, Homo sapiens
agcggacgcccttcaaagtccgtgtggccgcatttggaagcctgggcggcgtggagacggcgccttcagcttgagatagtaagttgcccaatgcctgcacctgtggagactcccagcacctg

SEQ ID NO: 147142 - DNA, 122 bp, Homo sapiens
ttacttgtcaggaaaaggagctacagagaagaggggctgtgacaggggaaggcaaacatccgcaccgttcaataattcagcgcagagccggtcttggctgctaagttaccaccacaaggagc

SEQ ID NO: 147143 - DNA, 122 bp, Homo sapiens
tcatctccagggggtggcgtatgaagttactcccaagatagcactgggtgtgcatccacccggtgatattcctcctaatattcacggaagaagagaatgctattactcccagtatcgcagga

SEQ ID NO: 147144 - DNA, 122 bp, Homo sapiens
acagaaattcttcccgtagatggcgatctgagggaggtggaaaggtcagagttaccaaggcgagctgcctggaccaggatgggggtgtctagaccaaagggcaccagaacaaagggttgctt

SEQ ID NO: 147145 - DNA, 122 bp, Homo sapiens
cgctgctggaacgcgaggcggtcccggagcctcttccgttcgctgcacagcctcgccctgcgcccgccaccgccctgcggatcggtcctctcgcccgccacctccagttgacccggatctgt

SEQ ID NO: 147146 - DNA, 122 bp, Homo sapiens
ctctgcaggatgggaacaatcactgctgttctgtctacccagtggggctgttgagagaatcgggttaaaaatgagtaggtcgtgcagacccatggactgtacaatgccaagagtgaacccta

SEQ ID NO: 147147 - DNA, 122 bp, Homo sapiens
tcagtcctccccgtacaaatactggttacgcaacctgctgccccgcctaccagggagaggcggcttgcctgctgctgcaatgccctcgtttctcaacttagagcaaagcccttcaaacgagg

SEQ ID NO: 147148 - DNA, 122 bp, Homo sapiens
gggatcttctctccacctatttgggcggactcctccgggtttcctcgtcagtctccttttcgcaaaacaactttgggcctctactaggggtttccgattctaagaactaacattttgttttg

SEQ ID NO: 147149 - DNA, 122 bp, Homo sapiens
taactcgggtcggtacttcgggtcaggcagtgcgctggatgcctaagtcacacactccttcggtggtccccgcccttcgcttgcgccgaccagtctggaaggtccccgggaggccgtacctc

SEQ ID NO: 147150 - DNA, 122 bp, Homo sapiens
cactgccgcaggcgggctcggtggtggtggtgacgcggcccggcagcccgggaacgcaggcgggctgcaccctctggaagccagcccgggtctccgcgctgtctttcccaacatcaaaaatg

SEQ ID NO: 147151 - DNA, 122 bp, Homo sapiens
ttaacctctcgagaagttgctgaaagccggaaaggttttacgcaacaggaactcaagccccgtacactttgcattcttttccagcataactcagccagtgtttcggatcgagattggagaag

SEQ ID NO: 147152 - DNA, 122 bp, Homo sapiens
cccctcctcccatgtgaggttcgcctgcctttccccgcaagcctgagggccacgccttggcggtgaggtcggagctccgcagtctccaatcagagctcagacccctcctctccacccaggcc

SEQ ID NO: 147153 - DNA, 122 bp, Homo sapiens
tggtttggggtgtgccaggctcaggggcagggccctttttccacacgcttagggaagatacgagactggctaactcagtattcaccgtgaattcttttgtgggaaatagaacacagcgttgg

SEQ ID NO: 147154 - DNA, 122 bp, Homo sapiens
agggttgctcttgggggccgtgcctgccaagtatcgcgggacttgcgcacatcgcagaagcgccagctccagaagcagctggagcgcgctcggtgcgcaccgccccagcccggggaggagcg

SEQ ID NO: 147155 - DNA, 122 bp, Homo sapiens
tctgcatttgttctccttactgtaatgactgttgaaaaagctttcctgagatattagcagcgattaatcccctgggtcaaactgcatttgcagagtagctgctcagtcatctgtctgggctc

SEQ ID NO: 147156 - DNA, 122 bp, Homo sapiens
gctgggtggcccctcacctgcttacagaagcgcaggaacccgatggagtaggtcatgccccggaggcagcaggtgccgtacaagcagctggacctgcgggggacgtccctgagccggtgcgg

SEQ ID NO: 147157 - DNA, 122 bp, Homo sapiens
cacggccactcactccagaagcccgtccaatccgcaaccactcactctttccaaggccagcgctccgatgatgctgtagcctcagtcccggcctctgtcaaaggccctccagcccctgacgc

SEQ ID NO: 147158 - DNA, 122 bp, Homo sapiens
ttgcagcctggagctcagctccattggaatgctccgggcgctgtccaaggtgctggaatgcgccgcgcccgggggcagagctgcgggccgggggattatcgctgcccacggcttcgggctga

SEQ ID NO: 147159 - DNA, 122 bp, Homo sapiens
acacgaatagacttcagattagctgcttctctggaaacgcatgtgtgtgtgcaccagttccgcaagctgttgacattgttactgtattttgtttgggggtaccctctaccaaaaaaaaatta

SEQ ID NO: 147160 - DNA, 122 bp, Homo sapiens
cgaccgcgagcccagctcacctcgagctctcagctcgctccaaggatgcaacaccggatccgcctcggggactgggaaagttccctccacggctcccacaggcgccccgcctcctgggctcc

SEQ ID NO: 147161 - DNA, 122 bp, Homo sapiens
ctcagacactctgcaagagtcaaaggacccctatgggtcactagataacacttggaacaccgccgccctaaactagccacgagtggtttcaacgtacattctattgtaacacatcattttct

SEQ ID NO: 147162 - DNA, 122 bp, Homo sapiens
tgaaattctttctccagctccagggtctggtagcgggtgtaggtctggcggcctcgtttgcggtcagttcctgcacacagtattcagaggaaaatcagtgagtaaagaaaacgccggccggg

SEQ ID NO: 147163 - DNA, 122 bp, Homo sapiens
gcgacattttaggattctcccactgacaacactaaactgaagcgctaagaccaacccttacgaccacttaccgtcgcaggccacggtggtgacttccttttccgctcccctacacacgcttt

SEQ ID NO: 147164 - DNA, 122 bp, Homo sapiens
ggcctatgtagacatttgtcccttaaaattatcttaaacttgagaccatcctggccaacacggtgaaactccacctctactaaaaataaaaaaattagctgggcgtggtggcatgcacctgt

SEQ ID NO: 147165 - DNA, 122 bp, Homo sapiens
tcaatttaagattttaggagcattaatgtggtatcacaaaaagggcacaataatggaaatcgaaagacctaacttagacattaatgaatggattctacccactctggcaattcagtttctgt

SEQ ID NO: 147166 - DNA, 122 bp, Homo sapiens
gctaaggttcacttttagcatcttgtacttgaaccagccttctgcaaaacaaataatccccggtgggctttggtgcttcctgtctcccccatgacacctttctcccccacattagagccccc

SEQ ID NO: 147167 - DNA, 122 bp, Homo sapiens
ctggggggctgctccctttgtaaccgactccacccacaggaggcgcggctcctgtcaagccgcagcttcaaagggcaacataaccactgcccccactaccgcctgggaaagggctgccccta

SEQ ID NO: 147168 - DNA, 122 bp, Homo sapiens
acacgttttcagtagcgattactgtgttgacaccacttccactctgtctccccagatcagcgcttctgacgagcccatttgcacggggactcggccctctcttttcctggcgaggcttttga

SEQ ID NO: 147169 - DNA, 122 bp, Homo sapiens
tgttgctcttcctccaacttcgcttgcttggtggcggcatccggcccctgggcagctcgccgcttgttcacgtgtgtcccatcctcctgtggagtgggcacgccttcctgtcccgtcgctca

SEQ ID NO: 147170 - DNA, 122 bp, Homo sapiens
ttttgattatcccatttaaacctagaaaactctcttgctgctttgggagcaaaaagcctgcgctctggaatctaagaaacgtgaattcaaatctgtcccctgccattgcctttggtaaatcg

SEQ ID NO: 147171 - DNA, 122 bp, Homo sapiens
tcctccgcgcccacttctacctcaacccccgggccgcccgcccggcaggcctggcccgcgcgccgccctcgccttcggctcagccccgccaggccagggctggcccatcccgggcgggccgc

SEQ ID NO: 147172 - DNA, 122 bp, Homo sapiens
gcgcgacgtgaacctaggcaaattgacacaactcctgcacttttttgcccaaggtcacggcggtgtgaggtaggctggagaagggagggcgctgacctgtcagatacttgttcctgggtgag

SEQ ID NO: 147173 - DNA, 122 bp, Homo sapiens
gcagtttctgctgctagctcttcttctcccaggtggtgacaatgcagacggtaagaacatcgctgtcagctgcaaggttacatgtatctgggtagagtgtgctgggctttcccgagatggat

SEQ ID NO: 147174 - DNA, 122 bp, Homo sapiens
ctgggattacagttgtgacccaccattcccagctgggttaatatatatttataattgttgcgtcttcctagtgaattgactcttttatcattatattatgtccttctttgtctcctatgata

SEQ ID NO: 147175 - DNA, 122 bp, Homo sapiens
cgaggaggagactgggagtcgtgaagtctctgtctccggccggctgactgctggctgaggcgcagcacagccttggttaaatccttaattgcgcgcttacgcacagcggggtggatctggtt

SEQ ID NO: 147176 - DNA, 122 bp, Homo sapiens
gacacaccgtaggtactgagtacaaatagcttgatttggctaggcttggctgcagggggacgtgcctaaaagacattccgggcatttgcacttgggaaacttgcctcaccttcaggcttgtg

SEQ ID NO: 147177 - DNA, 122 bp, Homo sapiens
tccagacctatctaccgattgctcgtggtgggacccctgccttcctcttctgcttgaccccgggtgtccacgaatggtgtcctgaccatcttgggatgctgagtgcctggagttgtctcgtg

SEQ ID NO: 147178 - DNA, 122 bp, Homo sapiens
ccccggcatggtcttctcctcccgccggggccggtgaggctctgggggctttgcccccgccgcggcagctggtagacaagagacgtgttttacctcctcgacgtctggaccagtctggaagg

SEQ ID NO: 147179 - DNA, 122 bp, Homo sapiens
atggacggggccaaactgagacccatccaggagaggcacagacgccccagacaggccggccgagagacgctttctccagcacaggattctcacagccgccgccgagccccagcaccaacctc

SEQ ID NO: 147180 - DNA, 122 bp, Homo sapiens
gcagctgtgatgtgaggccaaccaggagcgaatttgggggaggctgtgtctcctatagaacggatggctgggtgggagcgcgtgttagcgccagatgacggcagggccctgtagggagagga

SEQ ID NO: 147181 - DNA, 122 bp, Homo sapiens
ccagccggtctccaagacgacggcgtgcaggctggttgccttggtgacggtggttgggctcggggtgtcccggtgtgccctgcgccgaagaagagcgggcgacaaaggtgcgggatggcatg

SEQ ID NO: 147182 - DNA, 122 bp, Homo sapiens
ctgacagttgcccagtatttagcccccgaattctaaggaaaaataggacagaatagaaagcgaaaggagtccagtggtactcaactcttggcaataggcgatggactcaccgcttggcgata

SEQ ID NO: 147183 - DNA, 122 bp, Homo sapiens
tcacaacacacagtgctgagtgcccgatgtggggcccacgaggagccagcctggcgctgacgcttcgcgttaggatggacgagctgaggattcgttctcagggcagcggatgcctctgcctg

SEQ ID NO: 147184 - DNA, 122 bp, Homo sapiens
tattaaggagaggcgggggcgggcgtgagcctgtagatccgcccctgactggtgattggtcggtgggcgggcaggggcgggcctgagggacagggcctccccctacctctgctccgtaccct

SEQ ID NO: 147185 - DNA, 122 bp, Homo sapiens
tccagtcttgactctagactgataacatgtatgttctttacagaccacgtgcaagaacagcgaacctgctagaacacacgacatgaaattaggaacgacagtaaggctagaatctgtatcac

SEQ ID NO: 147186 - DNA, 122 bp, Homo sapiens
actttttagctctattataattttatgggaccactgtcttatgtgaaggtcactgttgaccgaaactgcataatgcagtgcatgactgcatgctagtaaaggactgtgacatgaatttcaaa

SEQ ID NO: 147187 - DNA, 122 bp, Homo sapiens
ttatcatccaccaaatgcccatagatctctaggacagggtaggttttgatgaaaaagcagcgcatgaatattataatgggggtcttagacaagatgatgatggtgaggaactgaggagtaaa

SEQ ID NO: 147188 - DNA, 122 bp, Homo sapiens
ctcggggtagcgctctctctgcatgcccatgacctcctgcagtgcgctgccgaacatggacgggctgaacacggcgttcttggcatgccggatctcctccacgttgggcttcttcagcccct

SEQ ID NO: 147189 - DNA, 122 bp, Homo sapiens
tgtgaccctgtgcggactccaccgcggcagcctgggagccaagccgatggctgtgctggccgaagggaacaccgccatggtgctctgctctctgcagccctgggtctggttggaagttgcat

SEQ ID NO: 147190 - DNA, 122 bp, Homo sapiens
gccccgcccccctctcgccccgccccctctcgccccgcccccggccccttctggaccaggcgcctccccgctactggccccagaccttccccgcatggccccgcccaccactctagccccgc

SEQ ID NO: 147191 - DNA, 122 bp, Homo sapiens
tcatctcgcacttcaccttcagcccacagtggctctgggcgggcaggggatgcgggctcccggccacctcctcgcctgtgtggggagctgctatggtgtttaagcaggcttccctccctgac

SEQ ID NO: 147192 - DNA, 122 bp, Homo sapiens
acacaaagagaaggacaaagacagagtggccgaggaagaaatagagagaaagaatgggaacgacagaaaaagaaaggaaaaggaagaaaacaagaaaagagagcgaaggagatggaaacgaa

SEQ ID NO: 147193 - DNA, 122 bp, Homo sapiens
cactgactttctaaatattccagaactatttccctgaacgtgaaggtcagatgtctgctgcgggcgagttgcgctgtgtgtggggttggtctttggaagtgatgaagatgaatcgctcttgg

SEQ ID NO: 147194 - DNA, 122 bp, Homo sapiens
gccttggccaggcccctcaccgccacccccacggccggatgagaagtgggagacggggagcgttttgacaccctcggagacccggtgtagcaggaagagcccattgatggggaaggtggggg

SEQ ID NO: 147195 - DNA, 122 bp, Homo sapiens
aaaggagaggctgtgcccggcacacggaggccgcctcgccagcctgtgctcccgaccctgcgcctgccgccccggactcacctggcccggggccctgcgggtccttcagctgagccttgaac

SEQ ID NO: 147196 - DNA, 122 bp, Homo sapiens
gctggaggaccgcgctctaatttctgagagtggcgggcttggggggccaccgggcgcctccggactcccttccccagggccggctccggacggagaaggtggaagcgaagcggtgaggcccc

SEQ ID NO: 147197 - DNA, 122 bp, Homo sapiens
ctcaaagagcttgctgtgctcatgaagcagcaggtaatggtcctgctggagtgagggctacgtgggggttgggggaggggcctggtagtgctgaagcggaaggggttcgggggaaagggtcc

SEQ ID NO: 147198 - DNA, 122 bp, Homo sapiens
ggggcagacacctcctggactgcaccctgaaatgaatgtctgaagcctagccctgccctccggaaagaacagccagctgtcccacagtggccttactgacactgccctgcgccttctgttgg

SEQ ID NO: 147199 - DNA, 122 bp, Homo sapiens
caaggaccagaattcagtgacctgtccagggcaggaacatccctctttgctgcaatgttacggaaccggagaacaatgtggatacagagaaaaacagcaatggcatcgtagcagtcagctag

SEQ ID NO: 147200 - DNA, 122 bp, Homo sapiens
ggcacttaacacctagtcacagccccacggacgttagtggttattattattggggtagagcgggggaatagtcctgctccaatgatcctctccaagcacaaggatggttcattcaaatgcaa

SEQ ID NO: 147201 - DNA, 122 bp, Homo sapiens
gggcggctgggcccgaggagcaggaggcagaacgaggcacccacagggtgggtgctctatcggcctagtttccagtgactgccagcctggtgttcagagagccagcagccgggagtagtgcc

SEQ ID NO: 147202 - DNA, 122 bp, Homo sapiens
cgccctcccggctggagccgccgccctggccgggcagagtccggagccagtgccagccgccgccccgcccgccggacctggcccttcgcagctccaccagcgcccccgctgcgcccgcggcc

SEQ ID NO: 147203 - DNA, 122 bp, Homo sapiens
gactcctaaaagagcctatactccttccttctcctgtccagacagcaacatttgttccttcgacctctaaattccattccaagtttttccactttactgctgtgagtgaaattagtgtcatc

SEQ ID NO: 147204 - DNA, 122 bp, Homo sapiens
gggggagcttcacccggatagaagccggcactccccacgtcccggcgccctgtccggcagcgcaacggaaccagggatggggctgtaggatgataccagcacttcgggaaccatggtaagga

SEQ ID NO: 147205 - DNA, 122 bp, Homo sapiens
ctatggggacctggaacgtgaacggaggaaagcagttccggagcaacgtgctcaggacggcggagctgacagactggctgctcgactcgccccagctctcgggagctaccgactcccagggt

SEQ ID NO: 147206 - DNA, 122 bp, Homo sapiens
gctccgtcccgcacgtggcttgggagcctgggacccttaaggctgggccgcaggcgcagccgttcaccccgggctcctcaggcggggggcttctgccgagcgggtggggagcaggtgggggt

SEQ ID NO: 147207 - DNA, 122 bp, Homo sapiens
cacagtaaacagcaagtgaatgacaagcagttggcagtggccggagctccgtcgctggggcgtggagagggccgccccggcccgcagttcccgccctgacactgggataacttcccccgcgg

SEQ ID NO: 147208 - DNA, 122 bp, Homo sapiens
gaaacacgagctgctaggaaacaacccaacactgacatcagggactcaggatgagcacaacgaaaatgagatgcgttctccccgtttcttcagcatatggcacctcactgccaaaatagaag

SEQ ID NO: 147209 - DNA, 122 bp, Homo sapiens
ctcgctcctaaagtcggactgggcactccagagccacccaccagccagcagggccagtgacggctcagggcatccatgctggctgcaagggtaaatgagtcctgtggggctgtgaccctgta

SEQ ID NO: 147210 - DNA, 122 bp, Homo sapiens
gctgttctgtattcagagccgcacaatcaaggaaaaacacgatcggaggcgggccctggacgggaacaagaagggtgggcttgactgggcggcccgcggtcttggttcccctttcttccttc

SEQ ID NO: 147211 - DNA, 122 bp, Homo sapiens
atggactggatgctctgggaagcgggttgggtggtgagcttctctcttcccctctgaagacgtcactggagtctgggggtggagctgcctggtctataaatcctggggccatcaggctaggg

SEQ ID NO: 147212 - DNA, 122 bp, Homo sapiens
gctgcggaccggccgggggagggggtgactccagtagggaagacccacccacgccccgcccgccgccgcggaggccccgcccaccccgcctgcccacccctaccgcacccgcacgccccccc

SEQ ID NO: 147213 - DNA, 122 bp, Homo sapiens
gcacggcgcttctcagttctgtgagtagttctgccacattgctgaacttgagggtgtgggcgcccctggtttgtagacaggcgttcagaaatgaagacgggtgtccagaggcagggactggc

SEQ ID NO: 147214 - DNA, 122 bp, Homo sapiens
cgctccaccctgccctctgcagcccgttggcccctccaccctcctgtggtgccttttccgcgctctttaaaaaccctcctggtctgcagtgcaagctgcagccgcaggaagcggacccagcg

SEQ ID NO: 147215 - DNA, 122 bp, Homo sapiens
acgggctcccaacactgctgcctgaagaccattcacaggcaccacctccccaacagggagcgggtctccaggtgaagcccttagctctgccccaaaagcaaggctcacggcaccagggtggg

SEQ ID NO: 147216 - DNA, 122 bp, Homo sapiens
ccacaagaagcggaagtatgagttggggcgcccagctgccaacaccaaggtgggtgcgagcgtgggcctgtccgcctgggaggtcgccttcccccgctctccagcgtgctcgggtctttccg

SEQ ID NO: 147217 - DNA, 122 bp, Homo sapiens
ccgcaacccgcctctccctacgggtcccgactgggcaccacttccggtccgacacggccacgtgttacatctaaatggcaccgtcccccgagtgcgccgaccttgtgctacagccagaacag

SEQ ID NO: 147218 - DNA, 122 bp, Homo sapiens
ggaggattaattaacggaagctgggggtgcgggacaccaggcggcaaagccatagaagcgcgtgtgccatctcagcccacccgtgcgccacgggctgaacggaaaccaaaggccaccaccca

SEQ ID NO: 147219 - DNA, 122 bp, Homo sapiens
gaagtttgttaaattgaccaaaattaggcaaatgaataggggtctgtaggcgccccctctcgcaggtgacgttgcataatgcttgcctgggccagctgcattcccccttttcttctcggccc

SEQ ID NO: 147220 - DNA, 122 bp, Homo sapiens
ccagtgcgcatgcgcaccagttgttccagccaaggatccgcatcccagggttcagtgaaccggtacctacagtctcaatccttattcccttttggcatggtgttaaagactatgtcgtagct

SEQ ID NO: 147221 - DNA, 122 bp, Homo sapiens
ctgcagacggaagcaggccgctccggattggatggcgagacctcgattttcctaaaattgcgtcatttagaacccaattgggtccagatgttatgggcatcgacgagttaccgtctcggaaa

SEQ ID NO: 147222 - DNA, 122 bp, Homo sapiens
gcgggcgcgggcagccggagcgcgcagagggcgcagagcgcctcgcagggccaggggccgcggccctgcctaatggagcaaaagacagatcagcagaagcaaggcaggtggggcgggagcgg

SEQ ID NO: 147223 - DNA, 122 bp, Homo sapiens
ctgccatcccccacacttggctccggggctggtcggtgttgggcgtcccagcactgcgggcggcacggacgcccggggctgctccctactgggtgtagcgcaccccgccccccaccccgccc

SEQ ID NO: 147224 - DNA, 122 bp, Homo sapiens
ctgtccgatgttagattcagcagggagctccctgtccctgcaaaagcgccatgtggatcgcgggtttgctctgtggtgttcgacatccggagttatgatgtggcactttcctctcttgcaga

SEQ ID NO: 147225 - DNA, 122 bp, Homo sapiens
cactgctgggatgccgtgttctgtgaatgaccctgggtgtcatggaggaaggagcaggcgcgagctctcctgggatgctgtgttctgtgaatgaccctgggtgtcatggaggaaggagcagg

SEQ ID NO: 147226 - DNA, 122 bp, Homo sapiens
atgttagcacctaaaaataagggctggccaggcacggtgggaggccgcactttgggaggccgaggcggatggatcatttgaggtcaggacttcaagaccagcttgaccaacgtggtgaaacc

SEQ ID NO: 147227 - DNA, 122 bp, Homo sapiens
ttaggagggaatcacgaagatgaggttcatgacgcggcgggctggggtgaccctgcggaacggcgcaggggacgcgtgggggcctaccttggtctgttcgctcagcttctcacttctcaggt

SEQ ID NO: 147228 - DNA, 122 bp, Homo sapiens
aggaggtggagcttgcagtgagctgagatcacgccacagcactctagcctgacaagaggacgagagtccgtctcaaaagaaaaagaagaaaagaaagaaaagaaaaggaaattaattaatct

SEQ ID NO: 147229 - DNA, 122 bp, Homo sapiens
gtcactgaaagaatccatctaaatggcgctgtttcaccaaattttccgaagagtccgcaccggccaatgaggcagccactcggggggcctcctagagcctccggggcctctgaccagcctgc

SEQ ID NO: 147230 - DNA, 122 bp, Homo sapiens
gttgggggaagcccttggtggccaatcggggcttccctatctattgcgtcacacctcccccgtgtgtgacgtcaaaggcaatcccagcccagacacgtgggttggagcagcgtcgcgtttct

SEQ ID NO: 147231 - DNA, 122 bp, Homo sapiens
acaagaggcatgtgcacaaattgaaaagtcagtccaccttactctttctgcgagtgggaacgcttaggtccagagggcaagagaacagaactgggatcacaggggcctggagcaggtgtctc

SEQ ID NO: 147232 - DNA, 122 bp, Homo sapiens
cccaaagcccaccacccagggaaggggggatgatgaccacatggccagaggctcccagaccgccttgcacaccaccacgcaccgcgtcgaggtagaaggtgctggagcccacgaaggagacg

SEQ ID NO: 147233 - DNA, 122 bp, Homo sapiens
agtcatcggccttttgtggctgggaacgcggtagagtgatccttccacatgcagtcactgcgacacctgagaccctcccagactgattcagttgcgttgagagcagcttctccggttttcag

SEQ ID NO: 147234 - DNA, 122 bp, Homo sapiens
acacccccactttccttgctattggtcttatcaggtgttgatcaataggattcctcattccgatacgcaaaactacctgtccttcaccgcttccctcatttcaattcgctctctcctcagag

SEQ ID NO: 147235 - DNA, 122 bp, Homo sapiens
tgacaccccttttggttgtcactcacaggggacctcaaagtcaacctgccccaaactggccgagtcttcatgccccagtgtggagacatctcccatcactttctgtctcagatgatagcacc

SEQ ID NO: 147236 - DNA, 122 bp, Homo sapiens
gggaagcttgtgttttgcctcagaaccagtttttgaaccccagaaaagaagatccacccccgttaggagagctaggcctggttctgccccatggcacatcagctctatccctcccttatcca

SEQ ID NO: 147237 - DNA, 122 bp, Homo sapiens
aggtgggtccagacattcacggcctcgttgtgctgctggaacagcgtgcggaaatagaagcgccaggtctgatgcagcggccggtagcccgcatagatgtacggcttccagaagagcggcgg

SEQ ID NO: 147238 - DNA, 122 bp, Homo sapiens
atgaatggctctctagagacatcagggtgcgcagagcatgatgaacaatgggtgtcctcccgggcccagtgagcgcaggcagggagggactgggatgggggaaacctacaccctaggccgct

SEQ ID NO: 147239 - DNA, 122 bp, Homo sapiens
agccttgactggctgtgtctctgggtctcacagctttgagaaacccctgggaccccagaacggaggacgctgcgggtctgaggcaggagggaggtaggaactgggactcgtggggctgaagt

SEQ ID NO: 147240 - DNA, 122 bp, Homo sapiens
gcgggctaagcttccctttcccactttgttctgggaggcagtcgaggggctccccgtgatcggcgtggcccagggggccccgggaccggcggtctgggcggtcggtcctctcccggggcgtg

SEQ ID NO: 147241 - DNA, 122 bp, Homo sapiens
cctccggctctagtgacagctgggagagactcacacgaagcagtttctgacctatcctgtcgtacacaagtcctcggcgtgctcggccggaccatcccctggaaagaaaggggcgtgtgacc

SEQ ID NO: 147242 - DNA, 122 bp, Homo sapiens
tacccatcattcagtgtcaacagcagtcagctcacggccgatcttgggttcatttctacccgcaaacattccccgccaccctcatcctgtttattttgaagcaaattccaggtatatcattt

SEQ ID NO: 147243 - DNA, 122 bp, Homo sapiens
ttgcgcagggcagactctaccaaggtgtgggttggagttgggagtcggggtgaggttccccgctggctccaggctgctccaatggggcgggggccgcccgcagggccgggcggggctgtgct

SEQ ID NO: 147244 - DNA, 122 bp, Homo sapiens
tgtgcaatgccctgggaatccaaaggattggattacaatatacgatacaaagaacttatacgaaggactggctagaaactggatcatttacattgctggagcatgggggtgggtacatgcaa

SEQ ID NO: 147245 - DNA, 122 bp, Homo sapiens
gggaagttgggttgtggggtcatacctgtctgtctgctcccagctttcttgggtttcttccgacggcgtggggcctcgctaaggaattcccggcccctcagggccacggctttagcggtgtc

SEQ ID NO: 147246 - DNA, 122 bp, Homo sapiens
ggggctgctggatggagtggctgctgctggacacgccccatgcccacccactaggctcctcgccacctgctcggctgatcagacgtgcaagatctggaggacgtccaacttctccctgatga

SEQ ID NO: 147247 - DNA, 122 bp, Homo sapiens
aagcaccgtgactcccaggaaaactagcggagtgagcgcggctgaggaaattactgacaccggaagtcacgtgagcggctgcccctaaggtcgctatctcgacagtcgactattcagccttg

SEQ ID NO: 147248 - DNA, 122 bp, Homo sapiens
ggggatgctcacggccccactacagctagaaaattttgtgggtctggtcctgtcaatcctcgggatagctccacgtgaggtattctcactcacttcaaagacagggcagcttcagaagccct

SEQ ID NO: 147249 - DNA, 122 bp, Homo sapiens
cgggggtggtcagtgggcagaggccactgaggaatatgggtacctgggcatggaccctagcgctgcagtccacagacccctgggtctccggccagggggaaatgagctcttagtggcgggtc

SEQ ID NO: 147250 - DNA, 122 bp, Homo sapiens
gctcatgccgtcccgggtgctagcgcgctgcgtggtgggcgttggcaatgtccgcagttccgggggaccggcgctccatgcagggccccaccaaccccaggccctggttcccaggcggcggt

SEQ ID NO: 147251 - DNA, 122 bp, Homo sapiens
tatgaagtgctgtctcactaaataaagcagagtggatggtggctgcatccctggatctgccggtgtgaagtaaaaccaggtcagctggcctgacacccactgtccatatcactgaaggtcct

SEQ ID NO: 147252 - DNA, 122 bp, Homo sapiens
ctgagacaactcttaccataacgtcttgtaactgctggaaaacttttttccacactgggccgtggccatctcaagaacagaaatggaatttaattcatccctctgtccccaattctaacaca

SEQ ID NO: 147253 - DNA, 122 bp, Homo sapiens
cgggcctgaagggggctgggtctgtctgcggtgcggaggattgggtgggcctgtgtgagccgaggtggccgctggctggagattggtttgcacttcttggctgggttcccccgtgctccatg

SEQ ID NO: 147254 - DNA, 122 bp, Homo sapiens
catcggggcgcgggcaaaagaggacacccaggcggctacggcgcgcggtcggaggcagcacgttcagctcatagagctggtccaagagatggctgtagagccctggccggctgcggcccacc

SEQ ID NO: 147255 - DNA, 122 bp, Homo sapiens
tgacctcgtgttctgcctgcctcggcctcccaaagtgttgggattacaggcgtgagccaccgcacctggcctgcacttggccattcttaagataacaactttgccattatccatcgattcct

SEQ ID NO: 147256 - DNA, 122 bp, Homo sapiens
ggcagaacgctgtgacagccacacgccccaaggcctccaagatgagctacacgttggactcgctgggcaacccgtccgcctaccggcgggtaaccgagacccgctcgagcttcagccgcgtc

SEQ ID NO: 147257 - DNA, 122 bp, Homo sapiens
ttcttgattcgaactgaacttttctggaattctggcatcatctcgatgatcttggtcttccgccccgtcttcctcttcaaggtgaatatgtactgagccagcaccacccccgccaccagggc

SEQ ID NO: 147258 - DNA, 122 bp, Homo sapiens
gccccctcaacccaggaacatggtgcagctgcaccgcagcatgaagccagccggctgggacgctgctgaggctgcggaccgagaggctggggctacggcgacatggcccctattgctggagc

SEQ ID NO: 147259 - DNA, 122 bp, Homo sapiens
agctgcagcctcataatgccgatttcccggcacctcctcagtcccggagtggggcccaggcggctccactgaggttcccaggtaattcggaggcacactgaagattcactgccacactctaa

SEQ ID NO: 147260 - DNA, 122 bp, Homo sapiens
aatgaaggaagatgggagccaccgagatccccgagacccacacacacactctaatactgacgcgagagtgagcttcctgccaccaccgctgtgggacccgaaaatgttctctgtgtgatgtg

SEQ ID NO: 147261 - DNA, 122 bp, Homo sapiens
gtcaaatccagcagctgcggctgctgcgccgatgcccggggctgcggcgagcgcggaggccgcagctacaacttggctgagggctaaagtcggctctgcagccgaagcgacagccggggctg

SEQ ID NO: 147262 - DNA, 122 bp, Homo sapiens
acgggagacggacatgggaaggctatgacgtcacgggccctgtgacgttatggcaggatacggggaagggaagcaaagcgaggtaacgggcagcggactatagcaagaatatggaatgcatc

SEQ ID NO: 147263 - DNA, 122 bp, Homo sapiens
tcctctgcctctgcctctgcctctccctcccctttgcacggtcctcgtctcacctttgcacggtctccctctgatgccgagcgaggctggactgtactgccgccatctcggctcactgcagc

SEQ ID NO: 147264 - DNA, 122 bp, Homo sapiens
cagccagccctagttaaaggtcataatgaagggacactttccccaatggacctccttcttcgaccaccttttccttttcctttttttgtcaggaagactttaatcgagtctccttggggaaa

SEQ ID NO: 147265 - DNA, 122 bp, Homo sapiens
ggggcgaggcctgcgtgtgactgatggcgcgggggcggggcggcgtgtgtgtgactgacccgaccgcgcagaggcggggtggcacaagatttgcgtttccttgatgacttctaaattatgat

SEQ ID NO: 147266 - DNA, 122 bp, Homo sapiens
tcctaagagaacgcagaggccgaataaaggaactaaccctcacctgcagctcagattctacgccggcgcccggagctgtgtcctgttgcctagcgacggcgcatgcgcactgactagcgcag

SEQ ID NO: 147267 - DNA, 122 bp, Homo sapiens
agggcatcccgtcaacatcacagtcccaaccttcccacatggagaagctcatgggacccccgatggaccaggacagtgccagcactaagacgtgccctgaaactcacaggaagagcggacca

SEQ ID NO: 147268 - DNA, 122 bp, Homo sapiens
ggtggaggatgaggaggcggcctgggaccccgagtcagatctttggggtgagcacgaggacgtggtgtagggaagaggacgagtgagcagcgcctggctgtagggtcagagggcgcctggtc

SEQ ID NO: 147269 - DNA, 122 bp, Homo sapiens
tttagtttctaagttcactgcattgtggaccaggtgatctctgtgtttgcagtcaaagggcggctcacacatggtcaagtattataaatgtcctgtgtatctgacaatggaatctattctac

SEQ ID NO: 147270 - DNA, 122 bp, Homo sapiens
acgcgttcctgcctgggatcgtccccaggtgggtggtcggccggccccgagagggaaaagcgcccactaaaggaccgctagtacccacaagcctcacggagccatacctcggagctccgtat

SEQ ID NO: 147271 - DNA, 122 bp, Homo sapiens
agccactgcgcccagcttttttaaacttttagattcatttaataggtaaattgcatgtcacgggtttgtagcttattctttcagaaactcttgcattatctgtagacgtggacgtaaatatc

SEQ ID NO: 147272 - DNA, 122 bp, Homo sapiens
aatccgcatggcaccggtggtctgggggagaggctgggcctggcgcgggacgaggcgaagcgccggtggccgacggcttctgaggaattatcttttacttggcgccacacggggcggggcct

SEQ ID NO: 147273 - DNA, 122 bp, Homo sapiens
gcgccgaggcgtgggcgcggggacgaagcagcacagccatcggggacccagtgatggccccgcatgtcagatctggtcccctgaggacccttgcctccaccaccccctggccctgcactgaa

SEQ ID NO: 147274 - DNA, 122 bp, Homo sapiens
tccttacttacgttaaatatctggtttctaggtcacctccctgacggggacggtagggaccgtcttctcgttcatcagtagggaagtagctatggcagtgcctgatacaaaataaactccaa

SEQ ID NO: 147275 - DNA, 122 bp, Homo sapiens
agccacatgtggccagcacggctgcagaacgtctctgccatggcaggaaggtgtgcaggacggcgctgctctggagtctcccctgaaactgctgcatgataccatctgaccagccccaagtc

SEQ ID NO: 147276 - DNA, 122 bp, Homo sapiens
caagatttcctctggagagggcctcttggcaaggaactgatgtctctggccagcagccagcgaggacctaagatctgtcaacagccatgtgagtgagctctgaagcagattccccagagtca

SEQ ID NO: 147277 - DNA, 122 bp, Homo sapiens
gaaggggacatgaagcctccatgccctctccaggcaccatcctccaggaacctccactgtcgtgaagccctctgaaccctgctttgttgtgtttgtatagaagctcattacataggcatgat

SEQ ID NO: 147278 - DNA, 122 bp, Homo sapiens
cacacctgcgccgaagggaaactgctcggggctaggcaggcagaactcacccagagagagcggactcgggaagccagccagaaagtgaaattgcacccgaacctaccgacctgccgggcggg

SEQ ID NO: 147279 - DNA, 122 bp, Homo sapiens
tccctcggtcgcttcttcaactgtgccccgacaccggaaaggagcactattttccccctccgctccgcccacttccgcccagcagaaggcaccggaagtagagctgcccctagttgcggaag

SEQ ID NO: 147280 - DNA, 122 bp, Homo sapiens
ttagagtagcacactacggacattcatgccaaacccggccgcgtctgctctctcgtgatgcgcctgagctgtttgaagggaacgagattgattaacaatttaagctcggggtgaggattctt

SEQ ID NO: 147281 - DNA, 122 bp, Homo sapiens
ctctgctctgacctggcgggaggctgggtgtccaccctttcccctgcagtcctgaaagtccggtccgagcgcggacggggcggggaggggctgggcgggccaggccagctccattggcgcca

SEQ ID NO: 147282 - DNA, 122 bp, Homo sapiens
tttagtacataaaattcaggtgagatcatagagatcaagcttcctcacagataactatcccgaaaaattgaaggtttggggtatctggcttgtttacagatgtataattaaggatatatctc

SEQ ID NO: 147283 - DNA, 122 bp, Homo sapiens
gccttccagacacggcggggagcagcgatttccaggggaatctggtttctctgctgggctcgcacccgtttcctctgtgtttggcttggcagcgcctgggcctggcctgttttgagcctcac

SEQ ID NO: 147284 - DNA, 122 bp, Homo sapiens
gcttcacttcctgccacctgtcttcctcacctcttacatttcaaataggccaaaagtctacggctcccctgctccaggctgtcccacctctgagaggctgcacctgccctccttcctccctg

SEQ ID NO: 147285 - DNA, 122 bp, Homo sapiens
tgacctcgtgatccacccgccttggccccccaaagtgctgggattacaggtgtgagccaccgtgcctggccaatattggctttttaaaaaggacagtcatcttggtttgctaatacaagaat

SEQ ID NO: 147286 - DNA, 122 bp, Homo sapiens
gctgctgctcctgctccctggctgggaggaggccctcgctgtgccaagtcattttcctgccgcaccctaccctgagcatcaccggcacccactcgccaggggcccagctctgcccggatgca

SEQ ID NO: 147287 - DNA, 122 bp, Homo sapiens
tagtgagtgacgccgtccacggcagctttgacctttgtgggctgcgcacccagagccacgcgggtcctggtggctccgagtcacacagaccccttgaagtctcctccatgattctgtccaca

SEQ ID NO: 147288 - DNA, 122 bp, Homo sapiens
caaaccttgtgtttgccctcacagaaatgacagtggcttttctagcatcctggccgctcccgtccgtggagctccccagtgccagcgggggatggctcagacctgcctagggtcaccctggg

SEQ ID NO: 147289 - DNA, 122 bp, Homo sapiens
ctgggatgttggggcttcgtcagggagggagggagggagggagtccaagaggtgggtgggcgtctggaatgtgctagggctgtggccacctgggcccctgctggagctgcagctgtggatgt

SEQ ID NO: 147290 - DNA, 122 bp, Homo sapiens
ctagggaagcggagttctgggagttctcgtaggattggcgcaaagtgagcccgctccgcccgccggtctacgcatgccggggagccggtgttcggacgaccgtctcccgctcctgcaccccc

SEQ ID NO: 147291 - DNA, 122 bp, Homo sapiens
ggggttgggcgctgagctcctctgaaccggttgccaggcaacagaatggaaattcacgggcggctaaatggagctccgccacaaatgttctgtggcaaacccggacccagtcacatcgccct

SEQ ID NO: 147292 - DNA, 122 bp, Homo sapiens
gttaattagaatactttagtatctgggtttgtatatgtgctggcaagcacaaccttgcagcggccatcacacccaagagcatcttgaagaatattcacatggtcacatggccttcctcttcc

SEQ ID NO: 147293 - DNA, 122 bp, Homo sapiens
agcaggcgggcaggcagggacttctgtgtgtattaattgagccatgagctcacttacacacgcccagtcgctagaagagtggcacacgcaaccccacgcggaacacgggaagatggaaagaa

SEQ ID NO: 147294 - DNA, 122 bp, Homo sapiens
gcacctgtgcctggacctgccagcgttgcatgggtttgcccctgtgcctggaccttctggcgttgtgtaggtttgcacctgtacccagcgtcacgtgggtttgcacctgtgcctggacctgc

SEQ ID NO: 147295 - DNA, 122 bp, Homo sapiens
cagctggctcccgccggttaggaggcctgtgtgaaaacctcattatgcagcagcataactcgatagcacccccgggttcaggcttccctggccacgacgagccctgccgccccagggtccac

SEQ ID NO: 147296 - DNA, 122 bp, Homo sapiens
tctctttgcagggctggccattctaatgcctgacctcaggtgcagaccagtgttccgttgcgcgggactcctgacctcgaggaggtttagagaaaacaatggtgttctctgtgtacccttcc

SEQ ID NO: 147297 - DNA, 122 bp, Homo sapiens
gtgcaccggttcgtggtccgcgagtacctggcgcgggcgctgaggccacgggagcggttccggggcatggagcgcatgcatggctcccagaagatgagcctggatgcccaggccatcagcga

SEQ ID NO: 147298 - DNA, 122 bp, Homo sapiens
cactgaggcacgagggacagcctgtgacctggtcaccgtgctcaggatgaagtggttacccgcgggcctgagggcgctgactttttagaatgggcgagggcagctgtgtcccagtgaccaga

SEQ ID NO: 147299 - DNA, 122 bp, Homo sapiens
agacttcaccaagagcatctcccgcctcggtgcagtaatggacttggaaacgatttactccggcacttggttcctgtctccataaatgcggctgctttaaagggaatgtaaaaagggctgta

SEQ ID NO: 147300 - DNA, 122 bp, Homo sapiens
atgtggaggacggtccaaaggattcggagctccttaaaatgctactcaaactttatttagcgcgctggagaatccctgagaaggagtattatacccagttttccgggacttacctccagtga

SEQ ID NO: 147301 - DNA, 122 bp, Homo sapiens
aagacaaactctcggagcgcctgggaggcctgtactccaggctaggtctggtggacactccggccactgtgcttccgagggagccaaccacggtgccaccagggctggcagctcaggctctg

SEQ ID NO: 147302 - DNA, 122 bp, Homo sapiens
agaacgcttccctgggcactgtcattgctctcatcacggtgtcggatcgcgactctggtacgaatggacatgtcacctgctccctgacgccccacgtccctttcaagctggtgtccaccttc

SEQ ID NO: 147303 - DNA, 122 bp, Homo sapiens
ggagtcagtccctgccctggtgctgctgctacacttagctcagctggagcgagcggcaatcgcaagcccagcagcagcagggggtggagagaccgtagcacaatgaatgcagtggggctttt

SEQ ID NO: 147304 - DNA, 122 bp, Homo sapiens
tttaaatgaatgaaattgaaaatgtgtttcctcagtgacacatgccacattgcaagtacccggtagtgcacaggtggtggtggcttctgcagtggacagcccggggctagaaagtaaacttt

SEQ ID NO: 147305 - DNA, 122 bp, Homo sapiens
ttcttatactgtgtcactttgtgaggctgatgcttgccacacttcttacagaaggttcttcgggttttaggtacgttgaccatctttgcagcagggctgttttgtctatatgatgaaaactg

SEQ ID NO: 147306 - DNA, 122 bp, Homo sapiens
gggtgggagggagtaaggcttacgagggcggcctgacccccaggacgccacgggtcgagtcgaggagttaatgcaggatgttgctgaccagcaagaacttgcagaggagattttaacaacga

SEQ ID NO: 147307 - DNA, 122 bp, Homo sapiens
ataggtatgcagtactttcctttttgttttactttgcagttctctaatgacaaatgatatcgaacatcttctcatatcctatttgccctctgcatatcttctttggtgaggtgttggtcagg

SEQ ID NO: 147308 - DNA, 122 bp, Homo sapiens
ttctgtgacctgccagcaaatgctggtttaatcttcaggtcctagtaccctgccagcttgcgctgaccaaggggagtgtttatagcttttttgacctgttggtagcttaaagtgatttagcc

SEQ ID NO: 147309 - DNA, 122 bp, Homo sapiens
agagggaagaggcgttaggagcgttcacagcggtccgcggcaggtgcaagggagggaaggcgagggggtctggtggagcctgtctacactgggacctcagcggtctcccaacttggaggctt

SEQ ID NO: 147310 - DNA, 122 bp, Homo sapiens
gtgggggctggagggtccctggaagccgcagggagcgcgggcccgggtgggtcctggtaccgggtggggagagcggaaccctcccaaaacttggggcgcggggcggggccgtcgggcggtga

SEQ ID NO: 147311 - DNA, 122 bp, Homo sapiens
aagattattataaaaattcaatgagttatttcatgcagagaagttgaacaaattccagcacgttgaggaagttcaaagaaggttagctatgagcatgctcactaagaagatagatccaaaac

SEQ ID NO: 147312 - DNA, 122 bp, Homo sapiens
agcacaagtccctctctctggtcccgcccaccttgcccttcacctttcccacgctttgcccggagctcaccctgccccagctgtgctgggccctcgctatttccccaagcgtccgctcgccg

SEQ ID NO: 147313 - DNA, 122 bp, Homo sapiens
gcccctggggtccggaaggcgcgggagcggacgcgggggttctgtgaacttggaacctggcggtgcgaggttctcgccggggatgcggcggcggcagctgcttcctggtttgaagctcgccg

SEQ ID NO: 147314 - DNA, 122 bp, Homo sapiens
ttggccctcaggctttggagatgggcacttgtcatcatgggtgtttggaaagcaactctacgttctagcctgtgctccatcgttccttctacatacaagtgatgcaaacatcaaaatatgtt

SEQ ID NO: 147315 - DNA, 122 bp, Homo sapiens
attaaaacttaaccaaactattcacttttacaagatacacgttagattcaagaacaataacgtgatcttttttgcctttcaggattaaagaatcgggttagtcagtcttggtggtgcatgcc

SEQ ID NO: 147316 - DNA, 122 bp, Homo sapiens
tggcccccacgaaagggagggcgagggagaagacgcggcccccgcccaggcgccccaggccgcaggagaggaggctcagggcctagctgtccagggtcgtcctcactgctcgcgtccgcttc

SEQ ID NO: 147317 - DNA, 122 bp, Homo sapiens
ttattctatacctaaaagtacacaaaactcgttttaggtctcttttcccctctgctttaccggtaagatacattcttctattccatctggctcaacaaaacgttttatttcacagtgccacg

SEQ ID NO: 147318 - DNA, 122 bp, Homo sapiens
actggtacatattatttacggtatatgttttctattagtattgtgttttaaaatgacctccgtctgcttagaattaaaatggagatgactaagggaacggtagaaaatttactgagcactaa

SEQ ID NO: 147319 - DNA, 122 bp, Homo sapiens
tgacgcgttgtgctggccctacgcccggcggaggggctggggacggggactgggtgcctccgtgcctccgcggatggagcgcgcagccaggacccccagccgcaccccggggggctggaaag

SEQ ID NO: 147320 - DNA, 122 bp, Homo sapiens
ctccggcagcgcggggccgagcggggctgtgggcagggctaaggccgtggggccggcgggcgggcggggcgaagcccgcgagtagcccaaccgcggggagccagtccgagcgcggccgctag

SEQ ID NO: 147321 - DNA, 122 bp, Homo sapiens
ggatccagttggccacataccagatgtgggtgcctatgcccttcagctgattaacctctgcggccctcagtttccccatctgtaaaatggggatgatagttcctagcttatagggatgtgag

SEQ ID NO: 147322 - DNA, 122 bp, Homo sapiens
gggagaactgctagtgtcacccaggatccacaaggcccatggggacctctggtccagaaacggcaacttgctatccagagttcaggaagtagcttgcagcttctgttgcccaggctggagca

SEQ ID NO: 147323 - DNA, 122 bp, Homo sapiens
aagggggcaggggacccgccgcgaggtgagggggaaagaaggggactcgcgtcccggccccggccggacctaccctgcagtaggcggatctgccgccgtaatatctccttttcctccatctc

SEQ ID NO: 147324 - DNA, 122 bp, Homo sapiens
gggagaagggggagatagggccagcaggaaattccaaggagattagaagggagttgcccccgggcagtgtttcttctgtgggcagctcgacaatcggtccacttcactcagccccactggcc

SEQ ID NO: 147325 - DNA, 122 bp, Homo sapiens
gcgcatataagtgggcgcgtccgcgcgtgcgcaccccgcgcgcgcctctctgtcgtggcgcggcttcccgcggtcttctctgcaaatgggctccgtggcctagcgcccccgtccccgccacc

SEQ ID NO: 147326 - DNA, 122 bp, Homo sapiens
ccctacaactaacatcatacctgacggtaaaaaattcaaagctttctcactaaccaggaacgaagcaaggatgtccctttgaaccactcctttttagtattgtactggaagtcctatctaat

SEQ ID NO: 147327 - DNA, 122 bp, Homo sapiens
attctgtgttcatgattcagtcatacccctgaacaaagttacttttttctttttttgagacggggtctcactgtcgcccaggttagagtgtggttgcgtgatcttggcttgctgcaacctcc

SEQ ID NO: 147328 - DNA, 122 bp, Homo sapiens
ccaagcttgggagagtctggggggacaaggggctgttctgggccctcagcacagggcagccgcctcacagaaaagttaatggactgtcctccacacaggtcctggtcctcacttcacctcac

SEQ ID NO: 147329 - DNA, 122 bp, Homo sapiens
atccgaacatcagaaggaacaaactccggacacaccgcctttaagaactgcaacactcaccgcgaggatccacggcttcgttccttgaagtcagtgagaccaagaacccaccaattccggac

SEQ ID NO: 147330 - DNA, 122 bp, Homo sapiens
gatatgctgaggacgcgtcaggcaggcactggagcagctcacctgtggcccctgcgaagacgtcgccctgggccggactctctgatatgacagcagtggcctctaccgtggacgctcggtca

SEQ ID NO: 147331 - DNA, 122 bp, Homo sapiens
gcctgtgcagctcgggcctgccccccgaccttgctagggaggggtggagggtgaagctcccgggagctcattggcactagaggttctggccacgccctctccgcgagtccagtcccacgcgg

SEQ ID NO: 147332 - DNA, 122 bp, Homo sapiens
cacccccgaatcccataccccaggctgcaaagcacagatctaatgccttccttctctggccggatttggagggacattgaggggcatgggtggcgccccaggctcgcagggttcgtggtccg

SEQ ID NO: 147333 - DNA, 122 bp, Homo sapiens
ggggggctcagctgctgggcatcaagtttgcaaagagcaggtggtctgcccccccaacctcgctatttgtggcacttacatcccggccgccgcctccctctcccgggatcaactgagccctg

SEQ ID NO: 147334 - DNA, 122 bp, Homo sapiens
ttctaaaagaatttggtcaaaacaccaattacatgggttaaaaaatatcccaacccatttcgtaatttcttttggatagagaactggtatctttataccactgagtcttctcatccagacat

SEQ ID NO: 147335 - DNA, 122 bp, Homo sapiens
ctacttcttaaattccgtttgtggaccctcagactcttagtcccctactcccagatacagcggccctaccgtggctcctggcaaggtggcatccacttttgtagtgtaaggctgggggcggg

SEQ ID NO: 147336 - DNA, 122 bp, Homo sapiens
caggagcagctatggctcggctcacacgcagggccctgggttcaagaaggcagacatcgacgagctgagtgctccccaggaggcgaccaggacagcagagggcatcacaggagccatccagc

SEQ ID NO: 147337 - DNA, 122 bp, Homo sapiens
gagaggagctgtccccgagtgccctgagttcctgacccacaggacacaggaacacaggaacgctgctgttggacagcactgaagctgggcggtttgctacacacccagagacagctgagcag

SEQ ID NO: 147338 - DNA, 122 bp, Homo sapiens
ctgcattaccgtttgacaggtgtactatcccaaactccccacctggcactgtcctcgggacgggtcaacacccggccggcgtgcagctgggcacttggcgccagaagggagggcccctaggg

SEQ ID NO: 147339 - DNA, 122 bp, Homo sapiens
cctcacctcccagacggggtggcggtcgggcagagacactcctcagataccacacggggtcgtggctgggcagaggcgctcctcacatcccagacagggcggcggggcagaggcgctcccca

SEQ ID NO: 147340 - DNA, 122 bp, Homo sapiens
ggaagagggtttttccctctcttttttagcacttcagagaagaggccagaaaactttatgcgggtgagggaggaggtatccccaagacctctggttagcctgaggtctgcttagtgagcccc

SEQ ID NO: 147341 - DNA, 122 bp, Homo sapiens
cacagaacctgggctggccagcaggcacctgctgagtcctgtggggcggaggcaggtggccggccacacccgcggccccaggctcagcctgcgcttcctgggcagttaccggacgctggtct

SEQ ID NO: 147342 - DNA, 122 bp, Homo sapiens
tctcccgccagccggcgcagcttgggtacgcagcggcagtggctatttgtcctcaggagccgcagcgctgtgagccacgcagccccttcctgggctcaggctccttggttgattctaggctc

SEQ ID NO: 147343 - DNA, 122 bp, Homo sapiens
tgagctttctaaacaccgagtcgcggtcaggctttccagcactgtcctcaagcctgagtgcgtccggagtgcaaactacaagccccagaaggcaatgcgccagcagtgatgggagtgggcgc

SEQ ID NO: 147344 - DNA, 122 bp, Homo sapiens
catcacttaaacacgcaggtgctcaaacaaacaccaaccgaccaggctggcaatccctttcgcagcctctaggattctccaaggcactgggcaccagaaccgacagcagctcccgcctggtc

SEQ ID NO: 147345 - DNA, 122 bp, Homo sapiens
gcctcttccggtcgtggggccgagcggttccggtgaaaatgtcgattccgattggactctcgatgatttaaaggcatctggcgtttctgaggcaggtagggtgtgatcttccgggttgcgcc

SEQ ID NO: 147346 - DNA, 122 bp, Homo sapiens
accacttcaccacctgtctcacattaaaagatggaggtggggaggaagagtgggaatcagcgatgatggcaagatagatttctgaaaaacatgttattccaccctctgcaggattcaagtac

SEQ ID NO: 147347 - DNA, 122 bp, Homo sapiens
ggggcagcaaacatttggtggactacggtgccaatctgtttctcaacatgcttgccccagcgcccctacttcccaacttcccctccccaggaccaaaacttcctgcatccaaacctcttagg

SEQ ID NO: 147348 - DNA, 122 bp, Homo sapiens
taggaagtgagatggtagtaaaaataaggtaggtgaagttatacccacaaaatagaatatcggggtgccagatcaatatttaataaatggttgaaaacttcaaacatttaaagattattttg

SEQ ID NO: 147349 - DNA, 122 bp, Homo sapiens
gccttccggctctgctggctccggctgcgccgtcggtggatgcccagggctgtctgtggccgtgcgctgcgctctgcgcttgtctccgcgctctctccacagcctccctccgcccgccctgg

SEQ ID NO: 147350 - DNA, 122 bp, Homo sapiens
cctcccagagcaagtgggcaaggcaaaaacagattagaaacaataaaaaaagtagaaatacggtgcaagccaaacaaaaagtactatgtaagccaaaccaaaagtcctcttgttctcggacc

SEQ ID NO: 147351 - DNA, 122 bp, Homo sapiens
gccttcttggagaccccagcagcagccaaccaacacccactcctcagccagtcacagccccgtggagccccactccaagcttggggacagcagcagcagctgaatggcagcctccttctcag

SEQ ID NO: 147352 - DNA, 122 bp, Homo sapiens
caagaaaataggctctctagggagactcccagcctcactgccagaaaacggtgcagaagccggccagccagccagaaaaaatgccagccctaatgaatctttccctggttatgaccagaatc

SEQ ID NO: 147353 - DNA, 122 bp, Homo sapiens
cgttccccctgctagctaaataaattaatacaaataatggagctaggtcagcattaccggcgttacccggaggtgggcgcgatatgaacgacagtctcggcggggcaacgtcctaagtacct

SEQ ID NO: 147354 - DNA, 122 bp, Homo sapiens
cgcccacatcgctcccacccctgcccggcccctcccgaccagcaaacctctcctgccccgcggctgtgtttttaattatttttacatataaatgtgctgcacgcctcatctgcctcgaattt

SEQ ID NO: 147355 - DNA, 122 bp, Homo sapiens
ccaaggctacacagcagaagaggcagaagtgggattcgaacctgagactctatgatattacgtccatgccgcaagacagagctggcacctacgggaataacaaggaggtggtggcagggtag

SEQ ID NO: 147356 - DNA, 122 bp, Homo sapiens
gcctgcggggcggatcaagggtgtggggggctagaactgcgtgggagcctggtgggtacccgagatggggtcctgggactagtggggagtctgagccacgatttatcaaagccccgtggggt

SEQ ID NO: 147357 - DNA, 122 bp, Homo sapiens
aaagacatgcaaaaccccagacaagcaaaagagaacagcgctactcaccagcaaacaatccgaattcacttccgatttgggatcccgcagcaggttgtccattttttcaaatcgagtctcaa

SEQ ID NO: 147358 - DNA, 122 bp, Homo sapiens
gatatagatgtatcaggtggggattccctagatgttaactccacacatcccacttcccaccgcaaagtatatgtacaatgcacataagcagactctactccaaatcaatatccagttctctt

SEQ ID NO: 147359 - DNA, 122 bp, Homo sapiens
agcatagcccaagaaagactctttggagagagtcctggcaacaccctccacagaaagcagcggcccctgagagaaacgacgtgtcccgctcagacagaaaccgcaggctgccaggactcccc

SEQ ID NO: 147360 - DNA, 122 bp, Homo sapiens
cgaaggcccaggcccctgtgaccttgcacccggcccactccctgacctgcctccttaatgcgttatcttgtctgttgaagctgctgtttctcctcagtggtcccatttacaattccagactg

SEQ ID NO: 147361 - DNA, 122 bp, Homo sapiens
catctgcatcgacaggtacattgtggttactgatcccctggtctatgctaccaagttcaccgtgtctgtgtcgggaatttgcatcagcgtgtcctggattctgcctctcacgtacagcggtg

SEQ ID NO: 147362 - DNA, 122 bp, Homo sapiens
caattttttgcacataaatgcagctttattccttcgcatgacaagcacattcagactgcccggactaagtaaatttcaagtattaatgaataggtatgagtctcttgtaattagcatctcaa

SEQ ID NO: 147363 - DNA, 122 bp, Homo sapiens
gttcaggtttcagcagctgccactccaccctcgtcctgtcagggacacctcgggccaaggcgctgtctggattttagccagcaatggggagtcccgctctgccctggccaccgcccactgtc

SEQ ID NO: 147364 - DNA, 122 bp, Homo sapiens
cagcagccaggaatgtttccaagggtgacattacaaggatatctccagcagcctggctctcggtgaggaagatagagcagggcgcccgaggggcacacgttggacggcaagggcgtgtggct

SEQ ID NO: 147365 - DNA, 122 bp, Homo sapiens
tgaaattccaagtggtggtaactagccggatgcagaagaaccctaagatccccgttagcccggcatcgcctgccttttacccccccccgcgccctggttactgctcactcaagtgctgccac

SEQ ID NO: 147366 - DNA, 122 bp, Homo sapiens
ccaactcagaggctgggaccaaacaaaagccgagtgtacaaaggggtaaaacagagcaggcgcagaatacacggggattagctcctacattaaaataatcataagtgaaagttaacatctct

SEQ ID NO: 147367 - DNA, 122 bp, Homo sapiens
gtttgaaagctataaggaacaagtgagaaaaataggggaagaagcgcggcgttaccagggcgagcacaaagacgatgctccgacttgtggaatctgtcataaaacaaagtttgctgatgggt

SEQ ID NO: 147368 - DNA, 122 bp, Homo sapiens
gagcctcggcggtgctgattggccggcctggcgggggggacgggcggagggacggccgcccgcgcgtccgcttcgtctccgcgggggcgcgcccgcggcacgcggccgggcggggccgggcg

SEQ ID NO: 147369 - DNA, 122 bp, Homo sapiens
ctcgggtcgcgcagggcgggtgttgaacaccccagcagacgcactgcgggggactggggtcgcagagtcccttaccttggcgagctgcggaagtcctgcgcgaggcggcccgcggtgcacgg

SEQ ID NO: 147370 - DNA, 122 bp, Homo sapiens
gcctcccagccggacgcggacgtgcctgcgcggctctggcggccgcgtctgccgccccggcgcccgcccgggtcccaggccgactaattaggcccggctacctcccgcgccgcccactgccc

SEQ ID NO: 147371 - DNA, 122 bp, Homo sapiens
accgcctacgcaggccggagcggcttccccttccctcacgtgctctccgtccgcggcctgcgcacacacccatcctggggcccgcgccccgggcctgccctggagcgccccgcgcttcagac

SEQ ID NO: 147372 - DNA, 122 bp, Homo sapiens
cacgtttctgaaacatccatcaggaatgtcccaagggcagcctgggtccatatcttccctcgtgtactcagagaagacaggagcaatgaactcagatctctgcccatttggactagaaaaac

SEQ ID NO: 147373 - DNA, 122 bp, Homo sapiens
agctgagctcaaggggaagacagagggtgccaagctcggggatgaaggggaagctgcaatcgctggggttcatgcctcactacactccgggctctgccccaaattcctccctggagccccac

SEQ ID NO: 147374 - DNA, 122 bp, Homo sapiens
acacaatggagcagaatttgttgcccttatcacaaagagcttggtgtatgatatgcatgacgcagtgtctcataatccctatgccacatggtaattaaatataaattactgcagttattaca

SEQ ID NO: 147375 - DNA, 122 bp, Homo sapiens
caggagagaagacagctgtgttagcctgggggctgggtaggcacccgtgggacacgggggcgtgagctggggctcccccagccctgctgtcaccaaacccagcgccgctgcccagcgctggg

SEQ ID NO: 147376 - DNA, 122 bp, Homo sapiens
gcaagagtttactttttcctcctttcagttgggaatcaacttcctcacggtcccccttttcgtgtccggccagtctgtccttcattccccacggacccaggagacagggctgcttctttcca

SEQ ID NO: 147377 - DNA, 122 bp, Homo sapiens
gggcgcctacaggccgtcttccaaaggccatggtgtccacatgcataacgcatggggctgcgcggagcccggcgcttcccacactcatgacgcatagggatgagctggtcccggggtttccc

SEQ ID NO: 147378 - DNA, 122 bp, Homo sapiens
cgggcggccccacctgaggcgggcggggcagacgggggcggggccgcagggccggaggggcgtggcgtacccacctgaggcggcctggtgagcggggcccggccggggtgggcggggaggag

SEQ ID NO: 147379 - DNA, 122 bp, Homo sapiens
agtagttggacaattgcaagtaataggtggaagtagaaggctgagaaagttgacacttagcgttctctgttgaaaactatgctattagcagtgttgggtcagcaaatggcttattttggttg

SEQ ID NO: 147380 - DNA, 122 bp, Homo sapiens
gccacgggcagcaaaagcacccaaatgccccttggccgggccgtgaaaggcgagttttcccgaccaatgtcatcaagaatctggaaaagggggcccaggagcatcaggtgctttcagcaaga

SEQ ID NO: 147381 - DNA, 122 bp, Homo sapiens
gggagggggcgcggggcaggggcgcaggggccgccgggttcgggctggaggtgtccgggccgcgggagggagggagggaaggagggagggaggacggcgagggagggaggcaggggcgggcg

SEQ ID NO: 147382 - DNA, 122 bp, Homo sapiens
agttcattcagagccctagggccctcagggttgggtcgccatgagccccgggttcctgaacgttcggctcaggaccacctggatggagaagcagacacgcgagggtcctggtcactcaccga

SEQ ID NO: 147383 - DNA, 122 bp, Homo sapiens
agggatgcgagggtccctgggctcctcctgcaggggtggctggagactcaggtccttgcccgccagccctctctgggactttcgagtcggttggtgcacttgcgggggcccagcaggggtac

SEQ ID NO: 147384 - DNA, 122 bp, Homo sapiens
tgtgcctatggggctctggagtcagcgcatctgcgtccacgactgactccactacttccccgtccctttgctgccccgtgaccgattctccatgtttgaaagtggaggcatcaagatctccc

SEQ ID NO: 147385 - DNA, 122 bp, Homo sapiens
ttaagagggacagctgggggcatttgtattgcaccgctagaggtgaaattcttggaccggcgcagtttggaccagagtgaaagcatttgccaagaatgttttcattaatcaagaatgaaagt

SEQ ID NO: 147386 - DNA, 122 bp, Homo sapiens
tctttaagggcaaggaccaaattacgtctgtgaaaccctagagtttgatctaccacttcacgtggaggcatgggacagaggttttgttaatgagtgaatgtatccatttaataagttccttc

SEQ ID NO: 147387 - DNA, 122 bp, Homo sapiens
taggaccctccgacccaggtgcgttatataatctcgtggtgcccccttttttaagcctgtcggaaaagcgcagtattcgggtgggagtgactcgattttccaggtgccgtccgtcacccctt

SEQ ID NO: 147388 - DNA, 122 bp, Homo sapiens
catgtcaccctcctgcagctctctatgtcaatccaagtcaaagcatgagtccttagggggcggcctaacgactgccctggcccctcctcctccacctcttccccggccacactggcctcctg

SEQ ID NO: 147389 - DNA, 122 bp, Homo sapiens
cgaaaaggacagagtaggccacccccagacacaaactcaggtacaaaggtaagtgcatgacggtatagagcaaaaagagcacttcgatgcacatggagaagctccccacttgagataagcaa

SEQ ID NO: 147390 - DNA, 122 bp, Homo sapiens
ggggtccgttcgggtcccggcccacctagcaggctcgggctgagtggaagctctaggtcccggggcttccggcccttctgcggctgggagatctcagggctggaagccgcatggccgcccgc

SEQ ID NO: 147391 - DNA, 122 bp, Homo sapiens
aagtgtccccatggcgctgtttacccccaaataactaaaccccgccaaatgttgagattccggacgtgaggggtgcttggatggggaacccccgaaagaatggacatcacgtccaccagagg

SEQ ID NO: 147392 - DNA, 122 bp, Homo sapiens
gcatgcgcggcgcgggccgtagtcgagcctggtgggcggctggctggcaggggacgtggtcggcggcagcggggcccaggggcggcggggctgcagcagcggcggccccagcttcgccgagc

SEQ ID NO: 147393 - DNA, 122 bp, Homo sapiens
cagagggcggggcgggatctgtgagtctctcagcctcggcgtgtttttgggttttggagacgagacctgccaggaaagctgaggcatgattcaaaagccctggaactgtctggaaggggaat

SEQ ID NO: 147394 - DNA, 122 bp, Homo sapiens
ttcaccgcagctgcggaagctcatgctcccctctgcagcctgcggctttgattcctggaacgcagtaccgcagacgccacaggcatttttatggggaaaccgctctttctgtccttgcctgc

SEQ ID NO: 147395 - DNA, 122 bp, Homo sapiens
tcactcacccgagacttttaaactgagactccctcaaaagctactaagacgatcaccagccgggcgcagtggctcacgcctgtaatcgcagcactttgagaggctgaggcggatggatcact

SEQ ID NO: 147396 - DNA, 122 bp, Homo sapiens
ccgcgccccgagacttctagggcgagtttgaaggtgtaggctcggcagtccctcctctcccggcgcgggcggcagcgaggctgggcagagggcagcgcagcgggcagactaggggcatgtct

SEQ ID NO: 147397 - DNA, 122 bp, Homo sapiens
aggggctgtccacacccactcggtgcacagctttccaaacctgcccactcgttttggaagcgagcttttaattaaacaccacctccccggatctggatctgttgaggcaaactggggctggg

SEQ ID NO: 147398 - DNA, 122 bp, Homo sapiens
gggttaaatgttccagcccccgccactcctcggctgccacctgctcggctccgcgcggggcgccaggcctagccaagagccaggcaaagcgaaaccaagccctggaagcagatccggtgcgg

SEQ ID NO: 147399 - DNA, 122 bp, Homo sapiens
gagccaaggacgcagggttgaattctgtcactttccctgccatcgttttaggagcggctccgggcacttgcccggagtgctcagaagcacggtcaggaggctgcagcgggggcagatggggt

SEQ ID NO: 147400 - DNA, 122 bp, Homo sapiens
cgcggcgccctgtggagaggtgggcaggagacatgaggctgctggtgtgctcatccttggcgggcaggtatcccagggcagaggtgagaattcagaaagcacttcggagtgcctgtcatgca

SEQ ID NO: 147401 - DNA, 122 bp, Homo sapiens
ttatggctaggttggctgtatgaccaaattgtggccaatggcatataaatgggagctgtacgtgcagctgccatgaaatgtcttaaaggagtggtaggcccttcttgttcccttggtttgca

SEQ ID NO: 147402 - DNA, 122 bp, Homo sapiens
gtaaaagcattcactgcatactatatgccagcactatacttaggacatataggacatatacgactgtatatgtgagcgcttatctcacttctcttgtagaatggttattattaaacttattt

SEQ ID NO: 147403 - DNA, 122 bp, Homo sapiens
atgcccagtgatctgaagatcagaagtatactttggaatatcattgccaagagagcccctcgaaatagcttataaatactatcgaaatagcttataaatactacctctccatgtgtgccaac

SEQ ID NO: 147404 - DNA, 122 bp, Homo sapiens
aggtttctaagtaaaagctcaaacacctacaaacacatttgctaagactaaagtggctttcggattctgatgcctcacgtagttttaaaaacacttccttcccttccagcccctccttagtt

SEQ ID NO: 147405 - DNA, 122 bp, Homo sapiens
ctcgggccctaccagggtcctaggtactggaatggaacttcgccgaggtcaccgctcaaacggccacaacgagggagccgatttagatcctctgggcctgttccttccttttctttaaacgt

SEQ ID NO: 147406 - DNA, 122 bp, Homo sapiens
tgcttttgctgaacggtcatatcttctctaaacccagggggtgcagagggtcctcccagacgaagaaaccgaggacagagaggtcaaaggacttgcccagagtccctaactggttaatggaa

SEQ ID NO: 147407 - DNA, 122 bp, Homo sapiens
caggcaaacaaacgagttctttccagcctctgtaaccggatcgctagagcgaaataaactcgcacaagtgtccagagatcgtagccagacagccagcctgcgcttgaagcaacttttaagtg

SEQ ID NO: 147408 - DNA, 122 bp, Homo sapiens
acacagaaggattagtgggagcgaggcgagggacgcctcaacgctacaggggcggggcagcgactaagaagcgagccttccgcagctaccccaaaatggagacctcttggccgcgcggcgga

SEQ ID NO: 147409 - DNA, 122 bp, Homo sapiens
ctgggacagtggattgtaaacttggtggcggcagggtggggactgacccctgtgagaatccgaggaaatgaacaaatgatccccctaaatgtgcgcataattttttttttcttggctcgggg

SEQ ID NO: 147410 - DNA, 122 bp, Homo sapiens
cggaggtagaaggagtctcagcgcggcgggggccggggggcggggaagcccccccacccacgagaaaggtcttacatcagccgccccacgtgcaatcggagagagggaggaagtcgctcctc

SEQ ID NO: 147411 - DNA, 122 bp, Homo sapiens
gttgtaggtcagctgcagttattgggaaagccgttccggctccaatgtgggccggcctcccgctcccctgtcaatgtgggccggcctcccgctcccctgtgctgcgagctccacggcccgct

SEQ ID NO: 147412 - DNA, 122 bp, Homo sapiens
gacaggggcggtgcgtcagggcctggccccgcccatccctaggaaatgccctcttcagggcgtcttctgccctttaaagcgacttggctcgtctccagatctaaaggtgggcgagtctgctg

SEQ ID NO: 147413 - DNA, 122 bp, Homo sapiens
cgctgaagcgctcagcgacgttactggggaagcccaggaaggaacttggtcactggagctcgggagggggccggcgggggggcgcaggccccgcaggagaggctagcgggccggagcccgtc

SEQ ID NO: 147414 - DNA, 122 bp, Homo sapiens
tggctgcttcctccatcctggtattttttggagcttccatcctggttcttccaaagtgcccggacccaaaacaggaagtaagtgcgatggaaccttcaggttccaaccgccgccagggccgc

SEQ ID NO: 147415 - DNA, 122 bp, Homo sapiens
tggcgggaatcattcttgagagagctgcgggtgccacggggccagccacgctccttcccccgagaccgcctgcccaggcccctgctcggccagacccgcacacaaaggagcagcggccggag

SEQ ID NO: 147416 - DNA, 122 bp, Homo sapiens
gggcaacgctccccgaggtccagcgctaggcgcgggcgctagactggcggaggggtggtgcgaggggcgggggagggtcggcttcccacgtgggggctgacgccggctgctcagcaacgctt

SEQ ID NO: 147417 - DNA, 122 bp, Homo sapiens
caggtaaggaaatgaaggctcagaaccagcccgaggtcacacagcttagatggagggggacgggaatttgtgtcccgatgtctctaaaactggttataattcagaaatcttagcataaaata

SEQ ID NO: 147418 - DNA, 122 bp, Homo sapiens
ttgccttaccccagctttgcccctccctgggcctccgggtgggtgagccatgggggatcccggagggcttttgctgaccatccatattctctctcgctctggcctcttcacaggtgtggcca

SEQ ID NO: 147419 - DNA, 122 bp, Homo sapiens
ggaactcaagccacaccaacccctgtgcccctgtgtttggacctggctgcagctgctgcccgtgggggaaggggaccttgccacttgccctcctgcatcaagggttttttctccttggcctg

SEQ ID NO: 147420 - DNA, 122 bp, Homo sapiens
aggcaggggcgggggaagacttacggacatcctggccctgacaccgaaggacagcggcgacgagcagcgtcagcagcaccagcgtctggggagccccgaggcgaatcatggctcaccgcggg

SEQ ID NO: 147421 - DNA, 122 bp, Homo sapiens
ctgggctaaattttaagcatgcaaaaataccaaggaagaacttctcttcgatgataatgtcgagtggaaatcatgcttaatctgaagattaaagtaaaaagtatccaatatttttactcaaa

SEQ ID NO: 147422 - DNA, 122 bp, Homo sapiens
ttggaagggattccgagcttggatccctcaggctaggctattcttggaagccgagcaacacgcctgccacagggaaatgagtcatgcagaggctgaaggcttgatggatttctccacggcag

SEQ ID NO: 147423 - DNA, 122 bp, Homo sapiens
actggttatagcctttattctggttgattaaaaatttacatataaggctttcccaaaagacgtgtgttgtaatagaataaattacagtcatttgtaattgagtagatatatctgtatttggt

SEQ ID NO: 147424 - DNA, 122 bp, Homo sapiens
tggggtggccccctctcggttctaggctcggcgagggtgaggttctccagccgggctccgcgagccttctttagaaagaagagaaactaaaagcgatcttggggctctggccggtgttttat

SEQ ID NO: 147425 - DNA, 122 bp, Homo sapiens
gtcggcgcgcgcttgggcgcctggcgaagaccgagagaggctggcgggatctcagcggcgcggccgcggaacctgaggcggtctggggcggcggcgctccggctctgaagggctccagccaa

SEQ ID NO: 147426 - DNA, 122 bp, Homo sapiens
tgggagggccgggtgcgtttgaaaactggggtgggcggcggggcggggtctgcgcctgcgcgagggctacgcgcgctccggccggggcgcgggcgcgctctcaggcgggctccggcggcagc

SEQ ID NO: 147427 - DNA, 122 bp, Homo sapiens
ctgcgccctcccattgcccacccacctgtgaactgagcttcctgggctgcaccccaaggacgccccgtcgatgattcggaggggtcttcagtgggttgcttagcaggagtcttcagtggggg

SEQ ID NO: 147428 - DNA, 122 bp, Homo sapiens
gtcggctgcccggggcgagggcgggagacttcctgctcagaaccagtccgaccagcttggcgctgggacgcctccccgcgctgtgccgcggcccggggtgccgaggagctgggctgggggcg

SEQ ID NO: 147429 - DNA, 122 bp, Homo sapiens
agggtggctgagacaggccaacaacaccaatgccagcaggttctcaaatagagcttcaaacgacccctccccatgactccgcccattattattactgtgttgttattatcttctcttatatt

SEQ ID NO: 147430 - DNA, 122 bp, Homo sapiens
gtcacccttctccacttgaccaggctggtgagttggactctccttttgccacctattccccgtccgctctccagccccttcccctggtcccagattgcccacggcaggaaaagttaaaaagt

SEQ ID NO: 147431 - DNA, 122 bp, Homo sapiens
tccgggcctagccacagcagcaacggcagaggccagcgggcgaggtcaagatggtggctccgcgggcgggggaggcagtggagggaggaggagtcagaccttagccagccggaaacaccgaa

SEQ ID NO: 147432 - DNA, 122 bp, Homo sapiens
ggcaaccacaggtccacccgtccaagacgcaaggcgaggctgggccattccctgcaagtgcgtgttggtcccttagggcttgcccaggggcgcccccgcgctctggcatctctgtaccagga

SEQ ID NO: 147433 - DNA, 122 bp, Homo sapiens
tggagaacgaggagtagaggagccgcaggccagagcctgtgagcaggtaaacccccggaccgggcgcagcgagatgagagacgaggcccagtctcctcttcctccggctcgggagattctga

SEQ ID NO: 147434 - DNA, 122 bp, Homo sapiens
cttcccaggcactgactcactggccctgccatgcccacgccactgctcccgctgctgcttcgattgctgctgtcctgcctgctgctgcctgctgcccgcctggcccgccaatacctcctgcc

SEQ ID NO: 147435 - DNA, 122 bp, Homo sapiens
tcaggatctggcacaggcagcgaagttgctgagcttcctctgttcacaattgagcaggagcgggtgtgatgtgggaagccgtcctccacccccggagaaacgcgcacgcggaggccagggac

SEQ ID NO: 147436 - DNA, 122 bp, Homo sapiens
gccgggccgaggcctccttctccgtagccaaaagtcgccctcccgggcgggtggcgccgccgctgccggcccccaagccggcccccccacagtagaggttgagtccgattaccgcgtttctt

SEQ ID NO: 147437 - DNA, 122 bp, Homo sapiens
caaccaaggctccacggtgctgctgtatccttccgcctgggcaggattctgacttagaggcgttcagtcacaatccaacagaccgtagcttcaccccattggctcctcaaccaagcacatgt

SEQ ID NO: 147438 - DNA, 122 bp, Homo sapiens
gcgggccgggccggctcctcttcagggatgattgacgtagggggtctggcccgggccaaccgccggggagggcgcgccgcccgggattaactgctcagggcctagagttgggaagctgcggg

SEQ ID NO: 147439 - DNA, 122 bp, Homo sapiens
tcttgtgtctgttattggagtctggccagggttgacttgagctgagacaccagatgctcacggagatgctggacacataaagcaagttacagccacagctcccagagccatctttcctgcct

SEQ ID NO: 147440 - DNA, 122 bp, Homo sapiens
agagaacaagacagagacttcctaataatttcatcaccgaatttagacagtaaatagtaacgaaaacagctaacatgcgatggagttcactatgcctaccacaattctataacgtaccccta

SEQ ID NO: 147441 - DNA, 122 bp, Homo sapiens
cgcctctcagcgcgcagtcaggcggaggcaagctcagagcgcacggacagagcggtagcgcgcgcccgcgcgcgttcttagtactctccccggtgacgtgcctgaccgaggccgcgccaggg

SEQ ID NO: 147442 - DNA, 122 bp, Homo sapiens
cgtttaggggccaggaggaggttccaggagtcaaggacattgaggacatccaggcccaaacgggatgggccaactacgcgcagcagaacctttctctaccgggcccgcgtgtgcccgccggt

SEQ ID NO: 147443 - DNA, 122 bp, Homo sapiens
ggcgcgaggcgtgccacacacggctgcagagactcggaaaccttagagctgaggggatagcgtgtgggccgggccggggctctggctccggtcccagcaacagtgctgcaggagagaaaggg

SEQ ID NO: 147444 - DNA, 122 bp, Homo sapiens
gcctccgcgacatggcggcgcagaacccgcctccccccgcctctcattgggggagggacacgcccgtcacccgccgcccccacccgatagggggagccactggtcccgccgcggggggaggg

SEQ ID NO: 147445 - DNA, 122 bp, Homo sapiens
caatggcgtctcctcatgggatggtgataaaggcaagaatctcaaaatgggacccgtagccgcagcctctgctgaacaagtcccaccccggcgcttctgtctctacctggcctcacctcccc

SEQ ID NO: 147446 - DNA, 122 bp, Homo sapiens
ggcagaaacgcacacagatacacacatactcagggaagaggaacaacaggccagaggggccgtcaaaccctctcgggggtttgaactccacctacggcgtgtttcagtcttaaaatgtccat

SEQ ID NO: 147447 - DNA, 122 bp, Homo sapiens
cactcgtagggcccctccttgatgtggttgcgctggtggatgatgaggttgatcttcaggcggaagctcttgccgcactccatgcatgtgaagggccgctcgccgcgccggttccgctgctg

SEQ ID NO: 147448 - DNA, 122 bp, Homo sapiens
atcggacgcagccagtcagcatcctattacccagtctgtcactcaaaactagatctggagcgctcctccagccaactaggttcccctgatgtgtcgcatttaatcagaagacctatcagtgt

SEQ ID NO: 147449 - DNA, 122 bp, Homo sapiens
ggctgagccccggcagtggctgcggcggcggcggcggcgggcggcagcggaggcagctgccgcctctgtcctcggatccgctccgctctgctccctggtgtgttgattcttcccccagctgc

SEQ ID NO: 147450 - DNA, 122 bp, Homo sapiens
tcgccctccggaaagacgcgggggaattctgggagtgcgcggccttggagcgcgcacatgcgcggcagctcccgctgctgaatagctgagaggcgcacccgggcggccagctgggctcggag

SEQ ID NO: 147451 - DNA, 122 bp, Homo sapiens
cccgcaattatgtgaccttttcaagaaaaaggactgtctaatttatcactgaatacccaacgttgcatacatagtaggctctcaataaaagcttgtagaatgattggagtgatcagattagt

SEQ ID NO: 147452 - DNA, 122 bp, Homo sapiens
tgtatctttgcagcaggcgcaattcagtttggattcacccaaaacaaaaatggtctccgtcggagtcaacgccctttcctgtgcggaccaatcagaatctcaaacacagggcacggggccca

SEQ ID NO: 147453 - DNA, 122 bp, Homo sapiens
gtcccaggtactcgggaggctgaggcaggagaattgcttgaacccaggagacagaggctgcggtgagccgagatcatgccactacgctccagcctggccggcaaagcaagactccatctcaa

SEQ ID NO: 147454 - DNA, 122 bp, Homo sapiens
tactcgtacaaagagctaaaaagttacaaaatacaggcctccctaacaccttcccccctccgtgaataaagctagactccctcattgatagactcccaacactactggagaacatcagcaaa

SEQ ID NO: 147455 - DNA, 122 bp, Homo sapiens
aacgcttttcaaaacaacgctctttgatgagccaccgacagacttgctcgcctccggggacgaagagctcactcctcacaaaccccaccccggaaaggtagcacctgagcatcccgggctgc

SEQ ID NO: 147456 - DNA, 122 bp, Homo sapiens
tttaaagataacacactaaactatcagtggataaaatgacacactctctggaattcatgtcggataccgagggcacagcgggaggtggcgaaggttgtggctgtaacaggattggtgtcgcg

SEQ ID NO: 147457 - DNA, 122 bp, Homo sapiens
cagcctggacccagaaccagaggccaccaggggctgtgacagtccacctctccagctgggcggggatgggagaaatcagcctgggacagcagcagagggtggtgccactggctctgcctgac

SEQ ID NO: 147458 - DNA, 122 bp, Homo sapiens
acgtgcaaaaggcctgggagccacaacagggaagaaagggccctgcccgcccgcagctggcggtcactggggagaacagacaagagaaagcgtggaggatggcatagctcagagtagggatt

SEQ ID NO: 147459 - DNA, 122 bp, Homo sapiens
catatggcatgcctgtcaatcttcagcgccagctgagaatgcacacctctcctcccactgcgtgaaatctgtggcctgcagcccaggccctccaccccagcctctgcagcctgctatgactc

SEQ ID NO: 147460 - DNA, 122 bp, Homo sapiens
cctttggcaccagaggtgagcagcgccactcctgcccccttaactgcagactgggacccacgcaccgccccctgcccatctccgccccgcaggcgcgcacccgccttccctgagcgcgcccg

SEQ ID NO: 147461 - DNA, 122 bp, Homo sapiens
ccagagaatgctctcctgaagcaaacagcacctgcatttccgtgagcctggtgttttggccgacaatcagaacacatctatgccaatgcctcccacgatacctgtgggcatatcatttcata

SEQ ID NO: 147462 - DNA, 122 bp, Homo sapiens
gcggctttctagtgtgtgagggcgacgccctagaagctccccttcaaagttggccccacgcgctgaatgtggaaagttgactgggacccagtagtttcccatcccaaacctgctttccgaga

SEQ ID NO: 147463 - DNA, 122 bp, Homo sapiens
taatcaacatgactatggggaagataccagggtggcatgctctcacagccacaaagtcaacgcagttcattcaaatatagaaacctcagagatctaagcctattttatccccacctacattg

SEQ ID NO: 147464 - DNA, 122 bp, Homo sapiens
ggatggttgtggagactgtgtgaggatatagatgccgagcccagtagcacagggtgcagccgttcaaaccaactgacatttactgagggctgctttgtcaggtccctctctacagtatactc

SEQ ID NO: 147465 - DNA, 122 bp, Homo sapiens
acatctccagccccaagtgccggaaacctagtaggcctcattatatgtcctgaatgaggacgagggaagttcaaatggaaagctgtagcttccacaaggatgaagaaggaaaacaggaacat

SEQ ID NO: 147466 - DNA, 122 bp, Homo sapiens
caagagtcagagagcacaggctcaagagtcacctggatctccgctcagttcccacaccagcgcttagtcgctgtgtgctcttggataggacgcttggttttccagggtctcagttttcccgg

SEQ ID NO: 147467 - DNA, 122 bp, Homo sapiens
caggtggctgcaccctaggccaggcgcagaggcctggcaggcaggcttggcatggttggccggggcgggacgtacactgggtcgccgctagctgcaccttcgcacagatgcctccgagcagc

SEQ ID NO: 147468 - DNA, 122 bp, Homo sapiens
ggccgcggcgtcgtcctccgggtcgcgctcagagccactgctttatgttcaaaactgaaacgcatagatcatacacattgcgttgataccctctgacaagctcgtttgcatacatgtttata

SEQ ID NO: 147469 - DNA, 122 bp, Homo sapiens
tttcttggttccaactccgaataagcagtttctattgaaataaatgcaaagcagtagcttcgacattccttcagaagaacctggcttcattctatggagttgagatagacaccgttatttga

SEQ ID NO: 147470 - DNA, 122 bp, Homo sapiens
tattttcaacttcacaaataatgaggtgagattctgaaacagaagttccctaatctcactcgcaggcacgcgatgggggtgtggctcatttctttggtgctccgctgcgcatacccctaggg

SEQ ID NO: 147471 - DNA, 122 bp, Homo sapiens
actttggggaacgctacggactcagattatatacttttaaaaggagttacaatgcttcctcgtgtctggcaaacggccttacagcctcactgcccttgtgtaactatttatctcctgctgcc

SEQ ID NO: 147472 - DNA, 122 bp, Homo sapiens
gaatcctgttgtatgtagtcacaaaataggacaaaagagatgataaagatatgcgttgttcgagtttattgagcatgtatggtgtgctaggcacttctaagtgcttgacatatattcattca

SEQ ID NO: 147473 - DNA, 122 bp, Homo sapiens
agcggcgccgctggagccgaggggggcgccgagcgcagatctggagcagcagagccacggcgcagctggggcccttcgaggcgctcggggcgcacatctgggacctcgagcgggggccgtgc

SEQ ID NO: 147474 - DNA, 122 bp, Homo sapiens
caactcgcaggcagaacggggccaagtccacctgggcctcgcgctgcagggggtggtgcacgaagagagggtgtgtgtgtgtgtgtgtgtgtgtgtgtgtgtgtgtgtgtgtgtgtgtgtgt

SEQ ID NO: 147475 - DNA, 122 bp, Homo sapiens
acctctggaggaaaccgtagctcctcggcgtcgcttcctcccccagcgctttacctggagcgttccctcccgagcccagccaacagcaggaacctgtacggaagacgggaagggcccggtac

SEQ ID NO: 147476 - DNA, 122 bp, Homo sapiens
cttctttaaccaaagcacgatgattttcatttggcctaaacctcttctatcataagtaggcgaagtgacaggaattttccaaggtcaccactctggggtacaatagagtaagaaactaggta

SEQ ID NO: 147477 - DNA, 122 bp, Homo sapiens
ggctgcagcctcttgcagacagtggaggctcaggctaagccagcaagaccaagaggagcacggagagctggcaagacgctggcccgatgatatcgcctgagccgtgaatcctcctggccaac

SEQ ID NO: 147478 - DNA, 122 bp, Homo sapiens
agtcggcaggccccacgtatctcaccacgcccgttttgtgggcgcccacggtgacgaactcgccctctcggagccactccgggacctcgtcagcttcctcggaatcagaggccagggcctgt

SEQ ID NO: 147479 - DNA, 122 bp, Homo sapiens
tggcgtgaataaaagcacccctctcttaccctcagaaactgtgggtagcaaggtataaaacggagtctgggaccggtaagtcccaaggtgagcccgtatacagctctgccatctctgagggg

SEQ ID NO: 147480 - DNA, 122 bp, Homo sapiens
ggcccctgaagggagggaggcggtttccaaggcaaccgggcccgggagcggttggctccccggctcctccccctccccgcggtagcccagggtaccgccggacagcgtcctcccgtgctccg

SEQ ID NO: 147481 - DNA, 122 bp, Homo sapiens
agagggaaagacgccacgcggacggccctgagcggggcggctggaggagcacagcccacgcgtagccagcaagaccaaggcccgcagggagtgacagctccaagcaacgaggtgcactcacc

SEQ ID NO: 147482 - DNA, 122 bp, Homo sapiens
ctcccaggagggtggtgcgtggcccctccctacagcccatgggacgaccgcacgggaagccgctggagagccgccactgagcaacgtgttttccgtgaaataaaactaaaaggctcctggtc

SEQ ID NO: 147483 - DNA, 122 bp, Homo sapiens
gttatattctacttaccttcaaaacatcagtgcaaatttatattctgcagaaagccctcccggacacccccatacaaccaggttccctgatgggcattctcacgttctttgtgcttaatgaa

SEQ ID NO: 147484 - DNA, 122 bp, Homo sapiens
ctggctcagctgtgaccaatcggcctctccctgaggccgctcttcctgcctgcgcctccccggtcaactgcagtcacggaagtgaaagtgccggaaaacccctgcccagcgcccaggcaggt

SEQ ID NO: 147485 - DNA, 122 bp, Homo sapiens
gctacctgcagaggggtccatacggcgttgttctgggtgagttccgtgtagcgtccctggcgccttccagggctagaaaaatgagcttttcctgctcaaatgaagggtgagaagactagtga

SEQ ID NO: 147486 - DNA, 122 bp, Homo sapiens
ccgtcgcctgccccaccccccacccaccccatttccccttccgccagcaggccccggcggcggggcgggcccaaaggccccccgcccactttagttttcccgcgactgcccaatcaacgcca

SEQ ID NO: 147487 - DNA, 122 bp, Homo sapiens
acacagaagcccgccgccgaggggtttcggaggtggatactctcgtcagccggttgctaccgtaggcgaagtacagaaaaatgtcctcatccgggcccgggacgtccctgcagcccaagttc

SEQ ID NO: 147488 - DNA, 122 bp, Homo sapiens
gaactagcgctttcagcaatgatgtaatttgatctcttcgggccaccgtcgctgagcatgcgcaaataaacgtggcgggacgtatgtgtcatggcgctctccatctaaagtctgtgcagctt

SEQ ID NO: 147489 - DNA, 122 bp, Homo sapiens
tttaaaagaaatcactagccctcatttcttctgtctcacctttccatgagctgcatatggcgaagaagttggtgaggcagttttgacgacgcaaataagggtggcatcctagggtgtagggg

SEQ ID NO: 147490 - DNA, 122 bp, Homo sapiens
gccatggagagcaggactgagggtgggagacagaagggaagggaaagtgggcgtggacgtcgagataaaggcaggcccctggctcggggacacacggggatttaataaccactttattccat

SEQ ID NO: 147491 - DNA, 122 bp, Homo sapiens
ggggccgcgggaggggcggggccgcgggatcggttctaggagattttaggggcagtcactcgattcctctgcggtccaggccaggccctcccctcgccaggagggtggagcaagacaccaca

SEQ ID NO: 147492 - DNA, 122 bp, Homo sapiens
tgtgcatcagccgcacagtcaaccgcgtgttgcccctcaccctgcccagctcagagctggcggcgtgtccactgtgagcaaatgatgacctctcgtgtttcacttagacgagtactgaacgt

SEQ ID NO: 147493 - DNA, 122 bp, Homo sapiens
tttctgagacgataaatatctcaaagaaggcaaagaccgtcactctgagcctttgtgtggcgggactgtggatttttcacagctaatgtcattcagaactgtggacagctcccgttaaggca

SEQ ID NO: 147494 - DNA, 122 bp, Homo sapiens
ggcccctcgcgcacccgcggagccgggaaagcgatccccgaaggccccagtctctcctggcgcctggagaacccaatcaggctgtgtttttggctttggttttggtgacagatcactgtgtg

SEQ ID NO: 147495 - DNA, 122 bp, Homo sapiens
cgggaggcccgaggccaggcaggcagggatcccgcagcgaggggctggttactgccaggacggagcgcattgcctcgagccgaccccggggtccgcgagggctcctggggacgaggagtgtg

SEQ ID NO: 147496 - DNA, 122 bp, Homo sapiens
aatctgggggtggggaggagctggtgatacacaggcagatgtggagacagcggactcccccgacacgaaggcgctgtgaggaccctggctttgggcaccagctggggccgagtcctcctctg

SEQ ID NO: 147497 - DNA, 122 bp, Homo sapiens
tgcaaagaaaagatgaagtaaacatgccctacagtgttatcatttgagatctcttaaaagcggctatgcagccgggcgtggtggctcacgttgtaatcccagcactttgggaggctgaggcg

SEQ ID NO: 147498 - DNA, 122 bp, Homo sapiens
agtaaggatagtgcagtgaggactcacggctgatgaggtcccggtagataatcatgatggcgactgaagggagacgacgacggcgctagcttagcacgagcctgaaactcggagcgagcgcg

SEQ ID NO: 147499 - DNA, 122 bp, Homo sapiens
cccttcacctcgctgggctctggtttcctcattccaaggatggctctgctatctgcgtgtcggctatcggtgctgaggctggcccgcctctgcgtgggcaggatcttggcattccttttgct

SEQ ID NO: 147500 - DNA, 122 bp, Homo sapiens
cggagggagcgcggcgaggacagtgtacccgcgcgggattctggatcgcgggatgctgggcgggggaggggagccctgccttagatgatattctcgtcctgacagtggaacgcggtggggca

SEQ ID NO: 147501 - DNA, 122 bp, Homo sapiens
cctcaggaaactaatagtctggagggatgagacagacattaatcaagtaatcacccaaagcggtattaattatgataagtgctgggaggaaaatgcccatggtgatctgagatattccagat

SEQ ID NO: 147502 - DNA, 122 bp, Homo sapiens
gcctcttggtttctagtttggccacaaggcttgctttggtcatcgtgatgttaagagttacgatgtgagtagagccttgaaagacgctttcatgtttgggcttaccttttttcactcctgct

SEQ ID NO: 147503 - DNA, 122 bp, Homo sapiens
tcccagaggggtgctgactggaaatatgcatgaaggtggggtccctaaagggccacagaacgaggccctatgcaggtgtcggtacagactgtcccaaaacccccctgagcagttggccctag

SEQ ID NO: 147504 - DNA, 122 bp, Homo sapiens
gaaggaagtggcccataaagcttctctgcaaccgaaagaggcctgaagctccaggagggccgagaggagcctcgttgagcgaacccagccctctgcctggctggccctggtcaacaggctcg

SEQ ID NO: 147505 - DNA, 122 bp, Homo sapiens
taaggccacttcctttctccagcctctcgcgcccagttgactcccggcaacacctcccgccgccacaaggagacgcccgaggacttccctccgacaaagccaaaaacggtattgccacgtga

SEQ ID NO: 147506 - DNA, 122 bp, Homo sapiens
atgctaacctaaggtagaagattagcagcctgtttgcatgcagccggatgctgcccctgacgtgaagcatgttctgggaggttgacccaacctcctttggctgtggcctcattcaccccgtc

SEQ ID NO: 147507 - DNA, 122 bp, Homo sapiens
gctggcagggcggccggcactaatgtctttcccacatggccccgaattccccgctcggcacgatcacacgggcaagacgctcccgcggccacccccgccccagctgcctccttcccacagag

SEQ ID NO: 147508 - DNA, 122 bp, Homo sapiens
ctattatgcttcttttgatttatcataagggaagatataagaagactgtgctaactaatacgttacagaatgttcaggaaagagaaccctagggaaaaactatgaattacatcagctgatgt

SEQ ID NO: 147509 - DNA, 122 bp, Homo sapiens
ccccttttggctcagggtggctccttggcctcactagcaaagaccgctcagagctgaatacggtgtgccctggagagctgcacaaggattaaggaaaaagctgagtgtaactaaagctcttt

SEQ ID NO: 147510 - DNA, 122 bp, Homo sapiens
ctgtgacgtgacaagctgaatgttcatggggcggcctgcggcaaagaatacgagaaggcacgttctattgagaggctctgaaacccacccagctggcgccacaccctggtctccatgcaaac

SEQ ID NO: 147511 - DNA, 122 bp, Homo sapiens
catccttggaagtttcttcttatttttgcccaagcatatcatgaatacttaccatccttccgaagacagcagctcctactgcacttctggccagtgctttcagaataatacttcaagaactg

SEQ ID NO: 147512 - DNA, 122 bp, Homo sapiens
agattgattagataaagtggagataatctcatccttaaatgtcaaaatattaagtttgaacgtgtcctgacaagcaaactacaatcagtgtataatcaaggggaagtgaactccaactgata

SEQ ID NO: 147513 - DNA, 122 bp, Homo sapiens
acaatgcttatatgagacaaggaagtgtcctggccccaaatgtcaatgctgcattgcccacgttgagaaaccctgtgctagacaattaggccaaacctttttaaagtaggatcctgtgtggt

SEQ ID NO: 147514 - DNA, 122 bp, Homo sapiens
aaaaaacaaatacagatactatttacatccacatggctgatgccaaatgggaatatgagccgtctatggccagataccccagttttcccagagacgccagaaatttgaataattattattat

SEQ ID NO: 147515 - DNA, 122 bp, Homo sapiens
cacggtgccctcagggtcccaggaaaggttcgcgagtcctacccacgggaaaccagaggccgctgtcccgcaggtgggcgttgagggctttgcgggtgacacctggctccaccaccacagag

SEQ ID NO: 147516 - DNA, 122 bp, Homo sapiens
ctgacacgccctgaaaagtgggagccacacgcgggatccggagaccgcgctaaagtcccacgcacgacggcgcccgccggcgagtccacgcccgcacgtcggcgcatgcgcgcggccaagcc

SEQ ID NO: 147517 - DNA, 122 bp, Homo sapiens
gccggcggaggaccactgtgacgaacttgtgtcctgcgtcaacagtgtgtggaacgttggcgacttcggcgctcgagctgcactcggctgggctcttggcagcaccctgtgctctgagggtg

SEQ ID NO: 147518 - DNA, 122 bp, Homo sapiens
gccctgcgctcctggggggctactctcccaaggcaggggcaggtgggggtccggggacctcgggctctcccagctgtcccagggactgtcttcagcggaaacctttttgtgttttgtgccag

SEQ ID NO: 147519 - DNA, 122 bp, Homo sapiens
aagttttagggtcagaagcaagggaaggtttgggtacaaaggtgcacctggcaccaaaggcggagcaacctcagcggcttggatgaccgttcctgttgggcatagtttccttctggataaaa

SEQ ID NO: 147520 - DNA, 122 bp, Homo sapiens
ctcctccctctgcctccctgtggacaccttgaggagactgtcagaaggcaataactaagtcgggggggagggatgggagaggcagatttacaggaaagcattcacctgggaagatatccaga

SEQ ID NO: 147521 - DNA, 122 bp, Homo sapiens
gctccagcggggagccggcgacaactaatggagacatttccaggcggagcacctggcgagcggagcgcgccggcgtccccaggcgccgcggtcgtcagccgagcccgcaccggcgtgacgtg

SEQ ID NO: 147522 - DNA, 122 bp, Homo sapiens
aaggtcgagcaggccgggggtgtccgggaggtctttgggcatcgcggtctggggttgggacgtgtaagcgcctgggagagcctagaccaggctccgggctgccaataaagaagtgaaatgcg

SEQ ID NO: 147523 - DNA, 122 bp, Homo sapiens
ttatacactaagtttagggaacagataggtggggactaccaggagagatccaaggctcctcgttaggaggcactgctgattgagatgagagttctcaagtttggagaaaatgaaaaggatta

SEQ ID NO: 147524 - DNA, 122 bp, Homo sapiens
acagtgaaaggaacaaagctctggaattcagcaaaggcaggggattttccctgcagcttccggagggagcagagggagagtggccctgtccataccttggttctggcccagtgaaactgatt

SEQ ID NO: 147525 - DNA, 122 bp, Homo sapiens
atcagtaacattactattaagaatattaagtcattttctagaatatataaattcctaccccgcacctgtttcctacttgtctcataaagtttgtatatggtgtttttctgtatggaaattaa

SEQ ID NO: 147526 - DNA, 122 bp, Homo sapiens
tctgagcgcttcctccagacagtgccggagaaggggcctggctgctccttgccccggctgcgggccagcgtccagtctgctatgtctctagcatgtgcccctctgagatcagtgagagcccc

SEQ ID NO: 147527 - DNA, 122 bp, Homo sapiens
ggtcaggggcaggttgtgggtcggccttcttcctgctcacctctgcaagtttcttcttggcgatggcgccagctcccaccccgcggcggtgcatccccaccctgggcccgcgggccgcccgg

SEQ ID NO: 147528 - DNA, 122 bp, Homo sapiens
ggggcaaacatacagaccctgcaaagattagctgggccatctgacaacacccatgcctcccgccggcctccatgcgctaccctgcatttatctcccgccttcctcataccaaatcccctccg

SEQ ID NO: 147529 - DNA, 122 bp, Homo sapiens
attctcttgcaccttccctcagcctggcagtctctgtgtactcttcaacccataattgagcgaggctgtaccagccccaatgccatgtagcactttatttcaaattagaaaggcatgaaata

SEQ ID NO: 147530 - DNA, 122 bp, Homo sapiens
ccatgtggccccaacccctcactcccaatgtggataagtctgatcagtcattttccactgcgcccctgacccttaaggcaaggcaagaagtttttacaaatattaaagccagcagctaagag

SEQ ID NO: 147531 - DNA, 122 bp, Homo sapiens
ggcgaaaaactgctgcagtcgccatcctcccagcacccctagccaaactgctgagtggcgcgtcccaggagccctcctccgcgccccggggctccagcgaagcctcctggctccccggcgcc

SEQ ID NO: 147532 - DNA, 122 bp, Homo sapiens
tgcagttgccccccagcggtcccggaaaaagcgctgtccctataccaagtaccagatccgcgaactggaacgcgagtttttctttaacgtgtacataaacaaagagaaaagacttcaactct

SEQ ID NO: 147533 - DNA, 122 bp, Homo sapiens
cgatgtgcgactagaggccactgaggagatctacctgaccccagtgcagaggcccccagacgctgcagagcccacctccgccttcctgccgcccactgagagccggatgtcagtcagctccg

SEQ ID NO: 147534 - DNA, 122 bp, Homo sapiens
acagaaatgaaaggagaaagatgaaaaaaaaaacctctaaaaaaatagtaaggcccagggcggggctatgatgcactttccactttaccaatatgctggccagggaaagaaaaatgttaaac

SEQ ID NO: 147535 - DNA, 122 bp, Homo sapiens
gacatttgaaatgtacccacttagttattttgaaagatacattattattgactatagtcacgctgctgtgctatagatttcaaaacatataatccagcaacccaacttctggatatagacca

SEQ ID NO: 147536 - DNA, 122 bp, Homo sapiens
atgtggctgatggtggtgccgtccgacatggtgtactggttggtgcggtggctgccatcccgcacgatgggctcatcgtcgagggcccaggtgaccgtggggggcggggcgcccttggccgc

SEQ ID NO: 147537 - DNA, 122 bp, Homo sapiens
cacctggagtaaaacgcgatcccaggtcaagctctatggactcgactccggaagagctcgcgaatccatttgcttgtgcctgcgccttctgccacctcactagttcattcaggccctccctg

SEQ ID NO: 147538 - DNA, 122 bp, Homo sapiens
cctgcagggatgatagcagggcacctctgatgatgcactgtcatgggataaatgcccctccggactcagtggtcactcagggattgtgctggcaagtgatgcaataggtatatgtcatagct

SEQ ID NO: 147539 - DNA, 122 bp, Homo sapiens
atctgtgaaggagctgatgaagccggatgatgacgaaacctttgcccaattttaccgcaacgtggattgtaatatgctgagaagtcctgtggagctggacgaggacttcgatgtcattttcg

SEQ ID NO: 147540 - DNA, 122 bp, Homo sapiens
tcaccaccacgagaagctcctggagatctctatcagcaccctggagaagattgtcgagggcgacctggacgaggacctgcctaacgacctgcgcgcggtaggcggggcgggctgctcggagc

SEQ ID NO: 147541 - DNA, 122 bp, Homo sapiens
actggggaccccattctgcctgccccgcacgcgaaggtccgcctcggaaaccacacgggccggggctgggcacccaaaggccaccctgataccatttaggtacacaggggctgtgagggtgc

SEQ ID NO: 147542 - DNA, 122 bp, Homo sapiens
ggtgtttctggaacaaaagccttggcctgccccagtgaacattcacgctgaacacactgtcgcgatgctgcttggccagccagcagggggcaggagagagcagcaggtgccagcgtggagtt

SEQ ID NO: 147543 - DNA, 122 bp, Homo sapiens
ttctattcttaagtgcccagcctagtcattattgaatgatctcagtagagattttcctgtcgattactcctaaattatagatatttaccctcttcccaattctaaaattaaaatttcactct

SEQ ID NO: 147544 - DNA, 122 bp, Homo sapiens
ggcagacaagaggcgaaacccattgcctcgctcagggattgcttcccgcggtgcctcccgcggctgcacggaaggccacgaaccgacaacttgcacagcagccatcttttctacgggcgggg

SEQ ID NO: 147545 - DNA, 122 bp, Homo sapiens
actattaaaatagtttggttattaaattatgcaataattgggtattaaataattcaaaatcgaagagctgcgattgaacaaacctgtaggcataggtaagtgctgaggtgaaagtgccaacc

SEQ ID NO: 147546 - DNA, 122 bp, Homo sapiens
acagcaatcccgcctcacagactcaaatgccatcagcgggaacaatcggaggaagtgtggcgctttctccgctcagggagcgaaacggggaccctgcttatcaaaatgacaagatttattca

SEQ ID NO: 147547 - DNA, 122 bp, Homo sapiens
caccgaccccagaccctcgcgcggcgggcctcaccgtcagcgccagctggtggatgcgcccggagcagccacccagcagcagcaccagaagtagccgctgcccccactccgcggggctcccg

SEQ ID NO: 147548 - DNA, 122 bp, Homo sapiens
caaacagatagtacattttaactcaagagcaggcacaggccacagcgacacagtctcaagcggccgagaagctcacccaggaagcggaacatgctgctgtgcacgggtgctctggcggccgg

SEQ ID NO: 147549 - DNA, 122 bp, Homo sapiens
gttcctttgtctcaagttcgcacctgggaacacctgccccagagatctgcataatgcagccgggcaggagcaccaggcagtgtctgcctcgggttagaccctcaaataagtgtgtgggaaat

SEQ ID NO: 147550 - DNA, 122 bp, Homo sapiens
cccggtctgggcctggatgtgctctcctaaaccctgtatcctccaagttagcactgttgccgggggcgacccagcttcccttgtccagggagcaactcagacacagtctcgcttcattttta

SEQ ID NO: 147551 - DNA, 122 bp, Homo sapiens
ccctcccacgctggcttacgcaaagtgctctggtcaccaggagcccttcctgaccagtcccggcacctccttggccttcgccccacctggcctcccctggagccctgacctgggtgacgggc

SEQ ID NO: 147552 - DNA, 122 bp, Homo sapiens
gaggcctgtgccagtgatatggctcttcctacatgtgagccaggcagcctccttctgtggcgcagtgacaaactgctatccccatcattcctccccgcaagtctttgtactttgggtcataa

SEQ ID NO: 147553 - DNA, 122 bp, Homo sapiens
actcctgtgctcctgcagggcctctgccacctccacgcaggctgggggctgagcctgcgacgcagtacctgaggcatgctctctggaggaccctcgtgggctgcaggagggtcccagaaaag

SEQ ID NO: 147554 - DNA, 122 bp, Homo sapiens
aggtcagagcagtattccaaaatgcggagtatgttgtctccagaacctgaagtctcctttcgggcattgtgcttccttcttggtggtagcatgtaccaggtgaaataatttgatctttacat

SEQ ID NO: 147555 - DNA, 122 bp, Homo sapiens
gcccttaacaagttttcacggactgaatgcgtgagctatgtaagccctgccgcatcgcgacgttagaggtttcccaagttacgcccccgcaggcgctctgatgctgacatattaaaagaagc

SEQ ID NO: 147556 - DNA, 122 bp, Homo sapiens
gggaatgtgtgcacggtgcctcattcacaggaggcttttcatacatgtgcactagtgaaacgagaactccacagggccctacaaacacctagcagtgaaattaggataaaattccatgtctc

SEQ ID NO: 147557 - DNA, 122 bp, Homo sapiens
cccaggctgtggggaaattgggcccctgaaggagacagactgtgaaacagctgcctttagcggggttcagatgaaatctgaggaaaggagacaaaatgtgggctgtgtctgcgctctcctat

SEQ ID NO: 147558 - DNA, 122 bp, Homo sapiens
gcccggccggtacaaattttcgggcactactttcgactacagacggtcctataatgagcccgagaacttaatcgctactggaccaaccaacgagacactgattgtggaggtaaagtccagcc

SEQ ID NO: 147559 - DNA, 122 bp, Homo sapiens
aagtgagacagaggagttacatttctggctttatgtaattttaattggaagagccagctgcggttagtggctaccatattggccagcagaggtctccactatctaattacctatcatggaag

SEQ ID NO: 147560 - DNA, 122 bp, Homo sapiens
gcggcctggccacagccaagcaccgcgactcaaagtgtggtccacggaccggtgccagtccgcaagctgcttgctaccagcccgtgacgagataagggcagaaattaagaagcagcatttgg

SEQ ID NO: 147561 - DNA, 122 bp, Homo sapiens
gttttggacagaagaggcttccgttgaggggcgtggcgacgcagccgcggtctgagagaccggttcacgtgcaggcagcggcggatcatattccttcatctaccatggctcagccgggaact

SEQ ID NO: 147562 - DNA, 122 bp, Homo sapiens
gtttcatccccacttgctagctgtgtcattttaagtaagataagttgcctcttcagttctcggttcctcaccttgaaaattgggataatgatcataatgaatggataggttattgtgaaaat

SEQ ID NO: 147563 - DNA, 122 bp, Homo sapiens
gccctccactcgtgaacgcccttaaagatcaccattctagcccgggaggatttgctagaccggtatttattgagagaaatctcttatttgaaccaaaagattccacctatccaaatattgcc

SEQ ID NO: 147564 - DNA, 122 bp, Homo sapiens
gaggatgacaaggcctctggggtgatgagagtgcctggcagacagctgtgcccccagcaccggcccaaggccaagctcgcatccaagcagcagccgggctgccataacgccaccacacctac

SEQ ID NO: 147565 - DNA, 122 bp, Homo sapiens
gccaatgcctacaagtcttcaaggttgcattcgtttcctggaaggcttccttaggaaaatcgcacgcaacaccccacctatgtctttaaagctttctcttcactgcacgtgagctgtggact

SEQ ID NO: 147566 - DNA, 122 bp, Homo sapiens
gcgcgggcctgccgagctgcagtttgcggcaccccagagggtacggggggctccctgggccgggactggagcgcaaacggttgggagactgtcggtgtctgcccgcccgtctgtgcgtctgt

SEQ ID NO: 147567 - DNA, 122 bp, Homo sapiens
ttgagaaagagacacttggcctccagatttcatggactagtgatggggaacagacattcacgattagtgtgaattaccctcttgtagaatccttcagtactactcactacttgtgacaatag

SEQ ID NO: 147568 - DNA, 122 bp, Homo sapiens
ttctatcagtgccaaacgttgcccacattaacctgctggatttgaattttaactcggaggcgataatcacattaatttacatttctcagtttatttttccctaaaaatcccatgtagacccc

SEQ ID NO: 147569 - DNA, 122 bp, Homo sapiens
cacccttgggcaagggacctaacgtctctgaacccaccctccttgtgcaaaacgggggcacgaatgccccaaagagtgcttaaaaggtgcaccaggattaataagtacatggagacagcacc

SEQ ID NO: 147570 - DNA, 122 bp, Homo sapiens
gttcctgaatcctaaccaagactgaggcactggccgtccccgggagtctttccgcaggcgcggcctctgacactcggtcttcgattggcccgcctggccccgcaggagtcggggtgacgccg

SEQ ID NO: 147571 - DNA, 122 bp, Homo sapiens
tggcgggtaaggggcgtggccgagcctctgacagaaatctgcctttcttactccaatctccgaacttgtggtctgcggcgattttctacagtcaaggagaaaaaaagttcaaagaaatgatt

SEQ ID NO: 147572 - DNA, 122 bp, Homo sapiens
aaaataacagtctcacagagggccttcaagaatatgacccatgggaaaaaaataaaatcccgaatagcctacaactaaggcttctgtgaggtatgagcattctgaaatatatacacagacga

SEQ ID NO: 147573 - DNA, 122 bp, Homo sapiens
gactagaggacacccaagcatggccaagaagaaggagtaagatagatgttgtcaacagaccggtactgagacctggcaacttaattctccactcctggacagctaaaagccaagcttttgtt

SEQ ID NO: 147574 - DNA, 122 bp, Homo sapiens
ggcagtggtggaggcaaagcaccttaagagtattttttagcccctctgagaagggacatccgggcgggaggcgggcggatcccgggcttccccgccggctgccgactctggctcctggctgg

SEQ ID NO: 147575 - DNA, 122 bp, Homo sapiens
cgggtcggaggagcgccctctggtgctcaagaagggaaagacgcagggaggcgttgacagcgcttcgctgaaggacgaataaaaaccttgaaaagggacttaactgcgaggttaaatcgtgg

SEQ ID NO: 147576 - DNA, 122 bp, Homo sapiens
tgacaagagactcctcttcaagagcaggccacatatcctttatttcccagggggtggaaacgggcaacctcacagaggaattgaatcataatgaattgaagaaagaaaaatctcctgaagtt

SEQ ID NO: 147577 - DNA, 122 bp, Homo sapiens
aggaaacgagcgtcggcggcgaatctgctgctaccaatgtaaaggtcaggccgaggccggcgcggagaatctgctgtcgcctgcagctgctcgcctgtctccgtcggaagggagcccaagct

SEQ ID NO: 147578 - DNA, 122 bp, Homo sapiens
cacttcctatttttcggatgtgtcatcaatctgttcctcaccagcgaccaatggcagcggcgctggcttgtgcgcatggccacttgggctcacatccgggctctcagcgcggggactcctgg

SEQ ID NO: 147579 - DNA, 122 bp, Homo sapiens
aaatagcacaccacagcccacagctctaccaaatggaggcataaagtgaggcagagaagtcggacagcttgagaacacgcatggccacaatgaatgacacaaaggaaaaggcaaaggcagca

SEQ ID NO: 147580 - DNA, 122 bp, Homo sapiens
gtgttttcctgaccgtggagtagagccgtcccaggcagactctctgggccctgctcaggacggtcatgaaaccccatgctcttgttatgtgaatattgaaagcaacgccagggtctgggagg

SEQ ID NO: 147581 - DNA, 122 bp, Homo sapiens
attttgtggtgaacacgctggagccgcggaggtgtggtatcgccctactctctcaagagtcggaaataagtatcctggtcctgtcggtgctggaacccggcccctcccctctttgacagctt

SEQ ID NO: 147582 - DNA, 122 bp, Homo sapiens
ggagccgctccagctgcatccgctcctcccggcacccccatctaaaaatgtgttcgcgcccgcactttcagcactcccagatgacaaaacgctgtgtttgtgtataagtgaaagccactcgc

SEQ ID NO: 147583 - DNA, 122 bp, Homo sapiens
gcggggcggcggcggcggcggcggcggcggctgtggaggccgcagtccgggtcctggcttcggcctcagccccaccatggtgacgcttgctgaactgctggtgcttctggccgctctcctgg

SEQ ID NO: 147584 - DNA, 122 bp, Homo sapiens
tcgccggcgtgggcgatgccggcgctggggcgggagccgcgagggtgggaggccctggggcgtttccgggacgtggagttagcagggttctgacttgaaaaacgacggcaaagcgtgttctt

SEQ ID NO: 147585 - DNA, 122 bp, Homo sapiens
tcaagctcagcaccgcgtcctgccctgggggcccccatgaacatgtgccgaatgaacgagcggaggaatgggggttggggcatttttattagttttccattcgcccaatcatttctaatgtg

SEQ ID NO: 147586 - DNA, 122 bp, Homo sapiens
taaagtagaagtcaggagtcttagattctagacctgtttttgctgttctgaaaggcttcacgttctgcatcagataaaattttaaggttattgaggtagaatagtgtctaaggtgctgttta

SEQ ID NO: 147587 - DNA, 122 bp, Homo sapiens
cagcgaggacacaaaccgcgcctgggctgctgtgttctgacctgagcgggcgtgggcggtcgggcggggcgggaggaggtagcctcgctctgctcctctcccgctcgcggcgccccacgcca

SEQ ID NO: 147588 - DNA, 122 bp, Homo sapiens
ctttttaatgttgtcatttattttttatttatttttccttccctttaaaattacatgtatcgtagaattcagtaaaatgatgtaatagatatagcacacttgtacaggatctgggggtaatg

SEQ ID NO: 147589 - DNA, 122 bp, Homo sapiens
atgcggccacggcttgggcgggactaaggctgggaacgagccaccgattggtcagagctacgcggcgaatggcggagacgctgaggcgggtgctaaccaggggcggtgcggcctggtccggg

SEQ ID NO: 147590 - DNA, 122 bp, Homo sapiens
ctctgtgacaactctaccaaaaaccaacaagccattcaagcttttacaagaatgaaagagcggagacggtagtttagtatttgagccacgagtttatgtgcacaagtgttttgggttgtgga

SEQ ID NO: 147591 - DNA, 122 bp, Homo sapiens
tagcgtctctgcctgtgaggagagcacagcctacaggagctcccaagtttcagaggcgggcggcttgttggaaacagaaatgccagggtcccagtgcctcagtcctgattgatagaattctc

SEQ ID NO: 147592 - DNA, 122 bp, Homo sapiens
tagtgcttctccttgacacgcacagggatgaatgcattttcctaacaggcagctcaggggcggccagagggcctttgttcctctgtctccttccatgcagcctctcaaaatctcatctctcc

SEQ ID NO: 147593 - DNA, 122 bp, Homo sapiens
agccgcgtggagggacgaaaagatcaaccacccgatcgacgaggataggtttgatcttttcgattacctcagtgtgccagtgtatattcccggctgggcctagcgccctaagaaacttcgga

SEQ ID NO: 147594 - DNA, 122 bp, Homo sapiens
cgcgcaggacagcacgcctgggagggcggtgccaggaggcgggcctcggattgggcctcacgtagtgggctggacagaggatggagcctcttggcgtaagcgcggttgggcggggcattcct

SEQ ID NO: 147595 - DNA, 122 bp, Homo sapiens
tgtagaggcctgggggctcccggctggggacagtgccagcaggagtggccgggacgatgacgaggtgaggtgtctgctcccaggctgtgtgtggcttggatgccaaagcgccttttgctgta

SEQ ID NO: 147596 - DNA, 122 bp, Homo sapiens
tgacaacttgggggcctccagtttgcttgtgaaatggagctcgtccaccccagcggtcctcggaggggtggtggcctgctctgtgtacagcgttgagcttggtgcttggcacaaaacttgta

SEQ ID NO: 147597 - DNA, 122 bp, Homo sapiens
tcttaattgattactgtctggttacaaactggcaaactgactaaaatgggaagctgccaccgtgcctgactcatgtagctgatgaccgaaggctcatcctttcttttctatttgacagacat

SEQ ID NO: 147598 - DNA, 122 bp, Homo sapiens
tgagcgctgttcgggctgccttcctcctccagtggggcaggatcgaggcactgatggaaccgtcctgaggacgcgggtctcagccgcacaccacctcttcgcgaacaagggtcctaaaaatt

SEQ ID NO: 147599 - DNA, 122 bp, Homo sapiens
tatccaggagtgctttgagtcttctgctctcagatctataagatattgtgttgcttccctcggcttactccttccagatgctggtgccacatggacttagctatagggaatttgtccccaat

SEQ ID NO: 147600 - DNA, 122 bp, Homo sapiens
tacctcagttgtttgggaactaagcctctctgggctaaatttttggcttggcaacactctcgcatatataattttacacctgcaaaagcttgcagccagccctgtgcagacagctacctgca

SEQ ID NO: 147601 - DNA, 122 bp, Homo sapiens
agacgccgaggcccgatgccgtatcctgccgcccgttttacccgcgggaaagccgaggcccggtgctgtattctgccgcccattttacccgcggggaagctgaggcccagtgctgtttaata

SEQ ID NO: 147602 - DNA, 122 bp, Homo sapiens
tgggaagccgagaaccagtgtcttcttccagggcagaagtcacctgttgggaacggcccccgggtccccctgctgggctttccggctcttctaggcggcctgatttctcctcagccctccac

SEQ ID NO: 147603 - DNA, 122 bp, Homo sapiens
agtaagtggcccacgtaggggccagcgcccggcgaaggtgggcgcctgggcctcgcgggacgatactgaccagctccttcaccgggacctcattcaggtcgctgaggctcaggtccagttcg

SEQ ID NO: 147604 - DNA, 122 bp, Homo sapiens
tgataacacaattcccattcagtaatcggtggccgtccccgcaccgtgtctcactgcggtcgtctattggacttagaaaaatagatccactcgcttcagacaacctcaggatctccaaactg

SEQ ID NO: 147605 - DNA, 122 bp, Homo sapiens
gatatttgcctttcctctgtggttaccaatgcttagcagagaaagtctgtttggttgagtcgaataatgtaaaccttaaaattataccggaattgcgatctcctgggctttctgaggatggg

SEQ ID NO: 147606 - DNA, 122 bp, Homo sapiens
tgcccctaatgccttgcctgagatcgaatcatgaataatcagtgttgtaaagtacctttacgcggattgactgatttaattttcacggcgactgcaaggtaaaatggcattacagcggccct

SEQ ID NO: 147607 - DNA, 122 bp, Homo sapiens
gcaatggcccagagagatgaaaaaatgtgagaaaaccaaagcttggaggtaggaactttccgattcttttggagtagactaaggtgacttaagtaggaaaagaacgcatagccagtaactct

SEQ ID NO: 147608 - DNA, 122 bp, Homo sapiens
cccgccaggatgccagcccggagggggtggcacggccgggcgagttcgccccctctgggacgggacccctccccggcccgccctccgtgcccccaggtggagaaagcccggcatgcgggcgg

SEQ ID NO: 147609 - DNA, 122 bp, Homo sapiens
gtaggtcattataataaggctgtgactgaaatgaggtgccagtggaagaccgtgagcagacgagtgatataatatgtcatgctgctgctgtgttgagagaagattatagaggggggtaaaga

SEQ ID NO: 147610 - DNA, 122 bp, Homo sapiens
acggaagagtgactagcggggaaaataaccccagcgggccgcctaggggtgggtgacccgcgatctccacgcccaggtcccgccctcgcggcccctgcccccgccccgccccccgcagaggg

SEQ ID NO: 147611 - DNA, 122 bp, Homo sapiens
ttgtttaaccacacccttgactttctgttcagaacacactttcctaagaatgaatcttctcgttttagcttcttttgcaaaatgaataggcagagaatttcccaaatcatgaaatcctggtt

SEQ ID NO: 147612 - DNA, 122 bp, Homo sapiens
ccccggtgggcgagaagccgaagcccacgtagcctgcagtgcgcacctggaggcggaaggcgatctggctgccccgctggctccagcccagccagtacttgccctccgagtccaggagggtc

SEQ ID NO: 147613 - DNA, 122 bp, Homo sapiens
gagcctgcggtagtggccagatcccagacatccgagtagatcccgtgaaaaggtctcccacgtgggctgtggacagggcccaagggtagcagagctagcagaggcagtgacggactgtgtgg

SEQ ID NO: 147614 - DNA, 122 bp, Homo sapiens
ttcttcctttttttttttgagacggagtctcactgtgttgcccaggctggagtgcagtggcgcatttgtggctataaagttccctgtgagtactgttttggtgtgctgtgttttcattttca

SEQ ID NO: 147615 - DNA, 122 bp, Homo sapiens
tcaggggaccgtcacgggctgctccagagcaggggtaggagacgtcctggtgggctgagacgctgagcagccgcaggaaggtgagctggaccacacccactggggagccctctgagtccacg

SEQ ID NO: 147616 - DNA, 122 bp, Homo sapiens
aaaatactagcaaactaaatccaacatgcttattacagtgagctaggagaaaccttaaaacgtatttccctgtctttagaatgcatttatctgactagccacctatctagtcctctatcatg

SEQ ID NO: 147617 - DNA, 122 bp, Homo sapiens
tctggttcctcctcgtatcaaaggaaggtggttcccagagtagctgaatgagaagtgaggcgtgactctcgctgtgcctgcagccgtctcataaatggccaatggtgtagttttaggtgctt

SEQ ID NO: 147618 - DNA, 122 bp, Homo sapiens
gctgatatgtccaccttccacaaataaccagaaagcaaacacatattatgtatgcaactacgagccatgtgtcatttgtctggattttcattttttaataagctctcttatcattaagcctc

SEQ ID NO: 147619 - DNA, 122 bp, Homo sapiens
cccagggagaaggcagcgcgttgtacccgaggtaaggcttcttggagtcagagcaggagccggaactgtgggcccagtaggaagagtggggcccgacggcggaggccgcgcggccagggttc

SEQ ID NO: 147620 - DNA, 122 bp, Homo sapiens
caccccatccctctctgcagccgcaggaggtggcccccgcctgtccccaccttctctccccgctcctctcgccactctgtcgcagaggggtccggctagccacgaggccccggcccccggca

SEQ ID NO: 147621 - DNA, 122 bp, Homo sapiens
cccctttctcaagattcaggctggaggaaaaagatgtctattcttccctgtgtgcatggacgagcctggaaacagatcttgggtgggctgagaagcagagctcatgtgatgaagagtgcctg

SEQ ID NO: 147622 - DNA, 122 bp, Homo sapiens
cccttccccacagccctggaggccctagctcaatgcatgttgcaggaggaacttctcattcgggttcttctcattccagtccacccctcactgtaggatggtgcctccagcccaaaaacctc

SEQ ID NO: 147623 - DNA, 122 bp, Homo sapiens
cctcccgcccggggttgcgctccccccgccgccgccgccagcgccgctgcagtgattcctcgtctccatctagcgaggctattgtgtattgggcgcttaattatttattcaccctggaggcc

SEQ ID NO: 147624 - DNA, 122 bp, Homo sapiens
acgcgcggacagagaggaccgtgccctctttcgcatgttacggggcgagggggctgttggcgtcaggagcgccctgggaggaacttcgtagcggattcgagagacagagggaattcagcaaa

SEQ ID NO: 147625 - DNA, 122 bp, Homo sapiens
ggtggtgacctttcccgggaccctccctctgggtgcccacgcctcacggaccctggagcacgcaccctgggagggcacggttcactgcgtttttatagatacataaacacataaataggaca

SEQ ID NO: 147626 - DNA, 122 bp, Homo sapiens
cttggcgaccctcacccgcggtggcgctgcaggagagcccctccctcccctctcctgttgcgtgatctgggggcttcagagccccggaatttatgttttaagtgttgtattgagcgactacg

SEQ ID NO: 147627 - DNA, 122 bp, Homo sapiens
ggaggctggagctgcagatgcagtgaagtcacaggttccgtgatgtcacaggtgggcaggcgcactggtctgtaacggattggcttggccttacccacgaggctttgcggtggctgttggct

SEQ ID NO: 147628 - DNA, 122 bp, Homo sapiens
gttggctatacagattctacaacttcccagacgagtggccctgagacttggggctgaacgcgcgagcacggaaagaaatcccaccgtaggacggaacccagtctcttcagctccatcctaaa

SEQ ID NO: 147629 - DNA, 122 bp, Homo sapiens
atggtatcatatcatgaatggactttactagtggggcaatgactttcctagacaataacccgagggactccagatacataccccgaaggtctaggaaatacgttaagggcagattacagtca

SEQ ID NO: 147630 - DNA, 122 bp, Homo sapiens
gccgctgctgctgcccgcccgcccgcctgcctttccgaaggcctggcgcggggctccgctcgccttgttttgcagctacagcgcagggttggcctgggagccacaacaatgccatgatgttt

SEQ ID NO: 147631 - DNA, 122 bp, Homo sapiens
aaaatgcagtcctaggcagaccctcagtgcaaatacaacagcaaatcaagccaaagagcacgcttgatcattactagtcattgccacaagagggaccagtacctttttattatccacaactt

SEQ ID NO: 147632 - DNA, 122 bp, Homo sapiens
ttgggctcttgcagtttgctggagagctgcatagacttcctactacttagccatggtggccgctctcctggcctaggcgagccgatgtctcccaccctttctgttcagagctagggcctcag

SEQ ID NO: 147633 - DNA, 122 bp, Homo sapiens
gaggggctgtagtgggggctgggcagttctaggagcctccactgccctgggccacccctccgccgccagagccacgatccctgcagccgcctgtggcaggtcgtcattggtgccctggtgga

SEQ ID NO: 147634 - DNA, 122 bp, Homo sapiens
gcccctcacgctccacccccggaggcagggatcagcatcccttgggctggggggtctgggcggccctggcacggcctcgcgtgcccctacctgcgccgttgcggttctcagggtgactctgg

SEQ ID NO: 147635 - DNA, 122 bp, Homo sapiens
gcggcggctggaggagccgctgggcttcatcaaagttctccagtgggtgagtcgctgccccggccccgggctatttcgggagcctgggctgtgacgctgacctgaagcaatggagccagggt

SEQ ID NO: 147636 - DNA, 122 bp, Homo sapiens
cggagcctgcgaggagaggtccgtacttgctcgctaagtgtcagcttggcagcttggccccgtcacgagggtgtgggtgtgtttctgattagtgacctcccctcggaattcatttggtgggc

SEQ ID NO: 147637 - DNA, 122 bp, Homo sapiens
caagatgtcagtctccatgaggtcacactccatgctactgtggtattcaaatttccgagtcgtcaggctcccctcttcgccggcaacgcgtacactcgcgcatgcgcgacttccccggaact

SEQ ID NO: 147638 - DNA, 122 bp, Homo sapiens
caattgtgccatcaactttcagagctatcatgagccaacctcaccccacagggcctcagtcgccaccatgtgggcctctccagtgcaaaccaccgagcattccaccatgaccggtcacagct

SEQ ID NO: 147639 - DNA, 122 bp, Homo sapiens
atgaataggttcagttatgaactagttgtcacttgcctgcaagttaggtgagatctagggcgagactattcaacctgcaaccatcattactaactgaatgtcctgttacctaaaaaaagata

SEQ ID NO: 147640 - DNA, 122 bp, Homo sapiens
ggaggcagatcaggtcccagctggttgatggcacccactgggtgcgtggtgaggggtgcccggcggagcggggtggtggctgcgggcgaggctgtgctggtgaggggcgtgggcctggctgt

SEQ ID NO: 147641 - DNA, 122 bp, Homo sapiens
cagtgtggactcacattcctggcaaagcagatatcagctacgttgttaggctttgggagccgttacgggttcatatacgatttccgtagagcttcttgacatactttggaacagtatgtctt

SEQ ID NO: 147642 - DNA, 122 bp, Homo sapiens
acgaacttcaatctcccagaatgcttagtctatctgaagaacgccgttgagagactacaccgcccatgaaaccctgcagtataaccttgaagtaccatcacggagagaaacagtgccatctc

SEQ ID NO: 147643 - DNA, 122 bp, Homo sapiens
ggcgcgcctggcctcgaccgccgtaggaaggcgctgcatgggcctgaggcaccgacacagcggtttcctatcatgggggtgatcgccggggagttgaaaaatacctgtggccagaccccagc

SEQ ID NO: 147644 - DNA, 122 bp, Homo sapiens
cttctgtggtccccaagacttggggctcctctgctctcttgtgagtgttggagtctgaggcggggcccgtggacaaggcagtttctgcgtctcttggccacagctgcttggggaagtgtttt

SEQ ID NO: 147645 - DNA, 122 bp, Homo sapiens
catggagtggcaggccccggtcctccgctcttcgggtcacaggtggcccagcaggctctgcgcacagcatttcggcagcacagcaatgcctaacttaatactcactccgggaacaagccagc

SEQ ID NO: 147646 - DNA, 122 bp, Homo sapiens
agggcgaggtgggcggaccagcccgggaggactgacgttggagggtgagaagtgagtgtccggcaccgctctctgacctttatccgtgcagcaaatgtctagtgcgtagggtcgcaaagtgg

SEQ ID NO: 147647 - DNA, 122 bp, Homo sapiens
agacaccagatcctgagatgggcgatttttcgagaataatttttaccctaagtggattttcgtgccacgcatggacttggaactacacacacgtagtccaaaacgtgaaagtcaaaatgcag

SEQ ID NO: 147648 - DNA, 122 bp, Homo sapiens
ttagtgttattcctaagctaaaaaggaagtcaccccttgcaaaggctagggcagatggggcggaacagggcacctctctggccggtgcccgggagtgtgcaaagtcacaggaagtgtgcccc

SEQ ID NO: 147649 - DNA, 122 bp, Homo sapiens
aggagaacaaccaaagcagcttacagacgcctgaacggagaatgaagtgtttcaagtaagcgagtctgcaagttctcagaagcagacagatatccaatctggactgcagccagggaagtcct

SEQ ID NO: 147650 - DNA, 122 bp, Homo sapiens
agccttcccggcgctgcagtatctcgagtcggtggacgtggagggtgtggcctggagggccgggctgcgcacgggagacttcctcatcgaggtgaggtcgttctggccggtgctgcccagtg

SEQ ID NO: 147651 - DNA, 122 bp, Homo sapiens
cagcagcttcccggtgaggctgctggttcacgaggggcgggagctcctagtcctgctccccgacggcatagctgcgaccggcaccacatgggactcgtgtgcaccagcacccacatccccgc

SEQ ID NO: 147652 - DNA, 122 bp, Homo sapiens
tcacctcaagggctgcttgaacgtcagatgaagccgcgtgaggccaggaagcacacggtgcgtggtaaacagctcttgtcctaccacttgggaaacttgcaagcaacactgagtggaaagga

SEQ ID NO: 147653 - DNA, 122 bp, Homo sapiens
tttcctcacctccacaatggagatgctgattctcactccacaggcagcagatgtgccttacgggagatagtgcacagtgagcgctcagtgaatatgaactattactcactcccagcgcggca

SEQ ID NO: 147654 - DNA, 122 bp, Homo sapiens
gctggagagctcttaatagtagttacaaaattaaataacacattacagttgcaggcagcccggcagcgggagcagtgcttgctgtaccaccacggagctgtgggcgggagaggcaaggtggt

SEQ ID NO: 147655 - DNA, 122 bp, Homo sapiens
tgcagcctcaactcctgggctcaagcaccagactccttttatcacattctatctcacacgcgtgtggttccaatcctgcctctgccacttctcagttgtatgccccaacccaacctgtctgg

SEQ ID NO: 147656 - DNA, 122 bp, Homo sapiens
agaaaaacaatgagagccgtactctgtttattaagcgatgaatgacgacacatgggtgagcgtgtctggcatgccctatttaagactttaaacatagtacattagtacgctaacagcaagct

SEQ ID NO: 147657 - DNA, 122 bp, Homo sapiens
tgaatggggcgcagcaaggctcggccgggctttgtgcagcgagcccgcgggcacccctcccgctccagcctcgccccgccccgcagcccacgacccctgctgccggggaggggagaaccggc

SEQ ID NO: 147658 - DNA, 122 bp, Homo sapiens
ttttattagtgagtcggggggtggggtggggtgaagaaaacatcagagacacctgtgctgcgagttaaatacatttccagcatctcacgcatcacaagctgcatcaggaaagggcacagcat

SEQ ID NO: 147659 - DNA, 122 bp, Homo sapiens
tcccttgcaaattggtggtccttctcctcttcagggatcccaaactctggcttcagaaatcgtatattttgttgctattgtatggaacaaacccttaaactggacaagcttttccgagtgat

SEQ ID NO: 147660 - DNA, 122 bp, Homo sapiens
tctgggcttcaggccccgagggcggtgcctgggatgggccggctcagctttggggtttcccgagctccgctctctctcttccacctttcccaacctgtgtcaggtccttttacctggatact

SEQ ID NO: 147661 - DNA, 122 bp, Homo sapiens
cgaactcctgagctcaggcaatccacccgcctcagcctcccaaagtgctagaattacgggcgtgagccaccctgcagcgggccaacagtgcatgtttctacctggcttttacctccgccaat

SEQ ID NO: 147662 - DNA, 122 bp, Homo sapiens
caaactaaggatttttgtaaatttccaaaagtaactttaccaaatcatatccctctgtcacggtgatctgcacgagtctgcctgctgatggcacttgctccatatcaccaactgggaaaagt

SEQ ID NO: 147663 - DNA, 122 bp, Homo sapiens
gttcctagccattaaccacctccaggcagttaatcatttcagtttagaagaacccacgttcgcttcaagagcaagtatattctgttggaaacctactatgttgggctctttcgaaagctagt

SEQ ID NO: 147664 - DNA, 122 bp, Homo sapiens
gccagacaatattctcctaacaaagaaaggggaagagttaacagagggttaaaccaaagacggtttggctagagagacagcatagttgaaccttctcatcagttgtggctgtaacaagaatt

SEQ ID NO: 147665 - DNA, 122 bp, Homo sapiens
tggagacacaagggcaggaagaaacggcataaaatttctcacctgaagaaaatggggggtcggtggttccgttcagacaatgtcttggtggcaccgtttagacgacgtctggagggagacaa

SEQ ID NO: 147666 - DNA, 122 bp, Homo sapiens
ttcgctctcagtgctcattctctgtcaaaacagcaagtccatgacagccaatttgcaaagcgctgtcctatttagaaaaactacgtacacacctttaactcgcccgctgctgctcctgcgag

SEQ ID NO: 147667 - DNA, 122 bp, Homo sapiens
aggagggtcctcacctctcccatcacagcgatcggcgtctctccggtggcctccgcgacgcggtgctccaccaggtagaacatgtactcgtcgtagagcaggcggatgaggtggaaggagcc

SEQ ID NO: 147668 - DNA, 122 bp, Homo sapiens
agtgcgggcccctgcattgccaaggccttataggcacgggctgggcgggggtgggcagtccgccagccagcggcattctgcagggctctgtgcaagcgtcagcccaggacgggcacctgccc

SEQ ID NO: 147669 - DNA, 122 bp, Homo sapiens
agcacgcatcaccgcgggtgcaaacatgagtgaactcttccatcggctcagaactccaagcgggcctagcgcagactcccaaatctcagcagctcacgctctcaccaagacgagtacgtcct

SEQ ID NO: 147670 - DNA, 122 bp, Homo sapiens
tgtgagtacccacgtccggtagcccgccgcccccgcgctctgctcctgcagcttttttttcgtttagttctgatttgggctcctgtggctgttgtttttatgattatacctaaagacaccac

SEQ ID NO: 147671 - DNA, 122 bp, Homo sapiens
gccgtctggcctcccgcggaaaggcgggcgcgaggcatcctgggagtcgcagtcggcggtcgactcacccgccctcacagaggaggtggggacgccatgaagaactacagctcccagggagc

SEQ ID NO: 147672 - DNA, 122 bp, Homo sapiens
caggtcacaggcagtaagaaagggatttcagggactaaatcaatttatcactaggtaaaccgaacaagaacagtttgatcttatcgtgaatcactggagggcacggaacaagtcttacttct

SEQ ID NO: 147673 - DNA, 122 bp, Homo sapiens
ctgacggtggccagccatctggatggcagcttttatatcccctcacccaggcatgagggacgggatgttttctttgttattatttatgcaagtttccataagaccggctcattaactggctg

SEQ ID NO: 147674 - DNA, 122 bp, Homo sapiens
agttcttatattgccctcttcgtgggtgcgcgggaagtggatgctgtccggtgccccgagcggttcgcactgcatgcctggtcctcaccggctgcctccagaaccttggccaccagccaaaa

SEQ ID NO: 147675 - DNA, 122 bp, Homo sapiens
tcctggcccagcacgcaggggccggggtcaaagcgctctgggctgtccggcagggcctgccgtaggtccccccgctgcacgctccgcctgtcttcagacaggatcagctcagggttggcggt

SEQ ID NO: 147676 - DNA, 122 bp, Homo sapiens
gtacaattgtgaaaaaaaatgcttgcaggataagattaaatcagataacagtcaacacaacgtgggtgtaacaactcaagagaataggaaatagtattatccaagaaaaccagacatttcct

SEQ ID NO: 147677 - DNA, 122 bp, Homo sapiens
ttcaggccatggggctgtgtgtgtgcaggcgcatatgggttgtatgctgtggcagggtaccgcttttcgggactcagaggtggtgttgcttgagctaagcctggaaagacaggtcagttttc

SEQ ID NO: 147678 - DNA, 122 bp, Homo sapiens
tgtgaggattaaacgaagtacgaaatataaagcacttggagtggggcacatagtgtgtaccgtgtgactcaaggggctgtcctctttatggtgacgatgacaagggcatcaggacagcagcc

SEQ ID NO: 147679 - DNA, 122 bp, Homo sapiens
ctgttgcccaggctggggagcagtggcatgatctcggctcacctcaacctccacatcccacgttcaagcaattctcctgcctcagcctcccaagtagctggaattgcaggtgcccaccacca

SEQ ID NO: 147680 - DNA, 122 bp, Homo sapiens
tctttgtctaatgggacccaaattaataacacattcttctgaacttgaagatatctatagcgtcaagagcatgagaccaaattggccaactgactccctcgtgtaaaatgaggcagttggcc

SEQ ID NO: 147681 - DNA, 122 bp, Homo sapiens
catgctttcctacggtttgagtgctttatatgagagccatcagaggactgtgtgtgagggcgatgtctacagaatgcaggcaggagctgctggctttgaaccggctgaatgtgcaatgcaga

SEQ ID NO: 147682 - DNA, 122 bp, Homo sapiens
ccagcgcctcccagacgcacagtggggtcggcggtggcctgaaggtggctgggcttcctgcggcgcctctccactctcccgcggagccccttgccgcccgccagacatcaaggttgcaggtg

SEQ ID NO: 147683 - DNA, 122 bp, Homo sapiens
gcgcccaggagcggaggccgagcgcgccggtgcccgcaggaagcctcgcccagcgcggaccgcaccctcccgcgacgcccctggagaagccgccagtctctgggccgccagcagcgcgcgcc

SEQ ID NO: 147684 - DNA, 122 bp, Homo sapiens
agaaatgatagacaaatccaaattgtggggtgtgatcctgtctcctgacattaccatccacgtatactgccctcctacactgaaaagggctgatctgtacaatcaattggatattctggagt

SEQ ID NO: 147685 - DNA, 122 bp, Homo sapiens
gggttgggttggggctggagtagccgaggccggcctgggtccgggcagtcaggcctgacgcggccccgcgcccttccccggcagagaagcccgggacggccatgtgcgtgggctgcgggagt

SEQ ID NO: 147686 - DNA, 122 bp, Homo sapiens
cgataggaaggagctttccctctgtcccccagcctttggactgtcaccaaacaagccatccgttcaccaaatacttatgaagctcctaccatgtgtctggcaagggagatgtaacagtgaga

SEQ ID NO: 147687 - DNA, 122 bp, Homo sapiens
aaagcaaagaaggtgcccctctggacaaattagaaatgataagagtccccgttggagggacgtgatgctgagggtgtgcagcttggcaagggctggcgctagtccacctccctgctcagcac

SEQ ID NO: 147688 - DNA, 122 bp, Homo sapiens
tcctacgatcgctggggtatcggacagtcagtgcccgctgtcaatgcggagggaacgggccgagactgcgggcaacacgtggcagagccggcctgagtccggtgggtctgatcccagagcct

SEQ ID NO: 147689 - DNA, 122 bp, Homo sapiens
gacgcgaagagccaagagctctgacagctggcgccggggaaaaggccccgaggcggggtccgcatccctggaagggcggcgtccacactcctgcgaggcacggggcgcccggggctcggaag

SEQ ID NO: 147690 - DNA, 122 bp, Homo sapiens
actgcggggctgtgggactgcgatgttgcctggctgcggggctgcagggctgcgggactgcggggctgtgggactgcgatgttgccgggctgcggggctgcgggactgcggggctgtgggac

SEQ ID NO: 147691 - DNA, 122 bp, Homo sapiens
caggtgacacctgaataataatccgtggaaggaccaggtgatcgtaatagccctgccctgcgtggcaggcactatgctagcagctctccctgcccttccctatgatcctgacaatggctctt

SEQ ID NO: 147692 - DNA, 122 bp, Homo sapiens
tctccttgggctccagagcattagacaccggagggggcacctgggaccaacttcgcgaagcgggaagcccggcgggggggtggggggagctaaagacctgcggcctcagcccctccaaagaa

SEQ ID NO: 147693 - DNA, 122 bp, Homo sapiens
cctgtcagcaatcactgttctgatttttatctctttagatgtgttttgattgttcttgaacgttatataaatgaaatcctactgcatgtactcttctgtgtctgacttcttttacttaacag

SEQ ID NO: 147694 - DNA, 122 bp, Homo sapiens
gacagaggccctttgtcagtttaggaagttattttctatgcctagcatattgagagttttcgtcatgaaagagtattgaattgtaccacataatttttgtgtgtcttttgagatgatcacat

SEQ ID NO: 147695 - DNA, 122 bp, Homo sapiens
ttaacaaaacacaaaaaaacagacgccacgcaggttcctggaaggctgagtcaccattcccggtggggctggcgggcattgggtttcagatgccctcgtgccggccacagcaggccggtcag

SEQ ID NO: 147696 - DNA, 122 bp, Homo sapiens
cgggctgggacggggaggacgggggaggggggaggtctcagcggcgatgccgtcaattggcgagatttcctgtccatttcggccagggaaaagggggcggacccctccagctgttgattggc

SEQ ID NO: 147697 - DNA, 122 bp, Homo sapiens
ttatctaagccaattcgtaagggcagtccaaacctaggaataaggtctcagggaagcacacgggttacttcgtaggccttttcagtttcgtgttggataagctcagaggggtcataacacac

SEQ ID NO: 147698 - DNA, 122 bp, Homo sapiens
ccttttcaaacccctgccagctctgcctagtactggaaaggccccagcaagagtgtttgacgttaggggaagtttggggaaaaatctctaagcatataaacattgagaattgaaagtctgat

SEQ ID NO: 147699 - DNA, 122 bp, Homo sapiens
ctcacatttttatctgaggcctgaccttatgtccccttcgtttcctatgaaaaggcccttcgaacaggcagttctccaattgaactttaaaacaatccagttaatatagtttcattactcta

SEQ ID NO: 147700 - DNA, 122 bp, Homo sapiens
ccttttagttgggcagagatatgcctgggtttgggaatgaacaacggtgatctagaagcccgctgtccctgggtagcagggagtgattaggcaggcacgggcatggcaagacaatagctagc

SEQ ID NO: 147701 - DNA, 122 bp, Homo sapiens
aagtcattgagaattttcttctcttatccaaactgttaatttagctgcatttcatggagtcggcagtttctaaagctataaaggaattgtctggcaattgaatttgtccccttagttcaaat

SEQ ID NO: 147702 - DNA, 122 bp, Homo sapiens
tgtagagactcaaagaactctgtccatggggtctgggagacaagcagagactagcagagccgggcgccaaacggcggcatcatcttcccaaagttccttcctactgtcgctttccccaccca

SEQ ID NO: 147703 - DNA, 122 bp, Homo sapiens
ggtagctaggcactttattgggcacctaggatgcatatttgattaagtcatgggaccttgcgtcacagatctctttcagtttattggacaagagagaagaggattaattgctcatcaccatt

SEQ ID NO: 147704 - DNA, 122 bp, Homo sapiens
cgggagcggggactgaaggacccagcctcggcagcaggggggacatgggcatggacgagtcgggggaggcggagggcggagggggactggacgggagggagcacgggaaggaggggacacgg

SEQ ID NO: 147705 - DNA, 122 bp, Homo sapiens
caccacctccaattccgaacccaaacagggatgtgcagttgtctgtgcttggttccaagccgctcatagaaaccctctgagattctgccctggagcctttcattcatgtaatggagactttc

SEQ ID NO: 147706 - DNA, 122 bp, Homo sapiens
tcatctgcccgcggctgcgtgaggacagcaggggtttttcttcagagtctattttttcagcgacaaggacccaggtcttcctgctgctgccagggagagcagggacagtgccgcgtgcgaga

SEQ ID NO: 147707 - DNA, 122 bp, Homo sapiens
gatccaggtagcgcccggaggaaagcgccaaaggaggccgccatctttcatacagcagcccggaattttgcgcatgcgcctctgattgtctgtccgcaatgaagctcttcggccttctcggc

SEQ ID NO: 147708 - DNA, 122 bp, Homo sapiens
cgaaaagcctgcacgcatcgagaacccagagcgcccctgccgccgtacaccagcacccggcgcgcctcgcctgcagccgccgccgccgccatcctgctcctgccagcccggctcccgcagct

SEQ ID NO: 147709 - DNA, 122 bp, Homo sapiens
acgccggccccgccccgaggcggtgcgcttggccacgccccttcgttggaggcctagtcacgcccctaaaggaagctccaccccatacccgtggccactaaaaaactgcgggaagcaggaaa

SEQ ID NO: 147710 - DNA, 122 bp, Homo sapiens
tccttttcagagctgtatccgggtcgctgctttccctattgtctgaggcagccgccctcgcgctgtgcaatttctggtctttcgttgcttctggtccaggctaataaagtttttctttcttt

SEQ ID NO: 147711 - DNA, 122 bp, Homo sapiens
tgatactccaaaaactctttgagataggcacattatttattttataaacaaggaagtttacggaaaataacatatattggctctagccatggctgcgggggtgaactttctgaaacattaat

SEQ ID NO: 147712 - DNA, 122 bp, Homo sapiens
ttctccgtctccttgctggcggtcagcaggacctggtctccaccgttcaggctgccatctcgcacggccccacagcactcttccctggcctctgactcttcttctgcttttaaagggctggc

SEQ ID NO: 147713 - DNA, 122 bp, Homo sapiens
tcaaaatccccagtattctattcactttgcctataaagttacacacttatcagctgggcacggtggctcaagcctgtaatcccagcactttgggaggccgagttgggccaatcctttgaggt

SEQ ID NO: 147714 - DNA, 122 bp, Homo sapiens
cagcactgactccggagctctgtgtttgcagactgccggctgcacatctgcctgtactaccgggaaatcctcgtgaaggagctgaccacgtccagccccgagggctgccggatctcccatgg

SEQ ID NO: 147715 - DNA, 122 bp, Homo sapiens
aagccctgaagagtttagggagctaatggacaaatggccagctccctcactctttaggaacgtcaactctgagtgtgatctgcactgtcccctagagcccccagcaggagtgagccctcatt

SEQ ID NO: 147716 - DNA, 122 bp, Homo sapiens
tggcgggagccaggcccgtgttttgtggtcttaacacgagtcaccaggaactggccttcccgggactcgctggcatctagctcacactcaaactggtgtcctcgaagcagggagggaaacac

SEQ ID NO: 147717 - DNA, 122 bp, Homo sapiens
ggtgcgggatataatgtcgtggtgcgctgttttttaagccagtccgaaaagcgcaatattcgggtgggagtgacccggttttccaggtgcgtccgtcacccctttctttgacttggaaaggg

SEQ ID NO: 147718 - DNA, 122 bp, Homo sapiens
tccagctgctctggctccatagctcagcctggcagcggccactgggtgccctgatttggtcggccccgccccaccgggccttacttccgggatgcttctggcgggagcaagaaacatggtta

SEQ ID NO: 147719 - DNA, 122 bp, Homo sapiens
ctaggagaaggggatatgtgcgtctgtgcgtgtttctgtgtgttgagagttttccactctcgtgtacggtgagaagaatctctgaccaaagggaaagcttccaggggggaaggctgtacttt

SEQ ID NO: 147720 - DNA, 122 bp, Homo sapiens
tgccagaggacttgggagtgttgacctagaattcacattactttcacaactccaagattacgtgttaacaaaactaaaaggtgtcaattacctgctactctaatatgaaatgtttaatatac

SEQ ID NO: 147721 - DNA, 122 bp, Homo sapiens
tccttctcttgcttttcataaatactacaacttggaaatctctgcaagtcaatttttgaacgtgggtagaacctgtgaatacgatgatacattactcctatgaacacgttacaaagggagat

SEQ ID NO: 147722 - DNA, 122 bp, Homo sapiens
ctggcgcggtccagacacagtgcagacatctgcgctgtccctgcagagagccacatctaccgcgaggtgggcaggggttcggagcataaacctgtcgaatggggcggggcctgcgggagggg

SEQ ID NO: 147723 - DNA, 122 bp, Homo sapiens
ggagggggaggggatgtacatagcaagtcttatgagttcctagagctaaatcacagccttcgttccaggcttccccatcttataatctcaaaaaatcattcactttcccttgttctaccaca

SEQ ID NO: 147724 - DNA, 122 bp, Homo sapiens
acgaaagattgatggagaggacagcaatagtgcttgtttgttttttggtgacgtgctgagcggaagccatcttcacactgtgagatgtaacaaagaaatccaaagtgattatgcaggttcat

SEQ ID NO: 147725 - DNA, 122 bp, Homo sapiens
cagagagaaccacgggtcagacgcgcggtggcggcggggacgcagagcagggttgggggtcgctgggaacaggggtgctggaactcaccactttgccgcggggcccggtcttccctggggag

SEQ ID NO: 147726 - DNA, 122 bp, Homo sapiens
caccccgcccttgaagcaggtcgttacaggtcaccccctctctgggaccctggccgcttccgtttcctcagatacctactcctcacacagtggccgccggtcagcgcgctagaccggagcag

SEQ ID NO: 147727 - DNA, 122 bp, Homo sapiens
catgccttttccaatatcctgacaccgcctgaatcgcagccataaccattttccacccatcggatttttagcaaggcttccagaccctggagaaagaaaagtccagcgccgagaacccacct

SEQ ID NO: 147728 - DNA, 122 bp, Homo sapiens
ggcaacaagaacaaaactccaccacaaaacaaaacaccaggaaggattatggaatgtcaacgaggtgctttccagtaagtacacagaggaaatgagccattcccaaagactaaccaaatgca

SEQ ID NO: 147729 - DNA, 122 bp, Homo sapiens
attggatttttctattcaaatactggataattccaagttggaactgttctgacttttcagcgtattattataaatgctgattaggttttaaggttctcttgctgttatagatcagccacatt

SEQ ID NO: 147730 - DNA, 122 bp, Homo sapiens
cctcctgcattcaaaatgacatcagaatcctgcggctgaagcgcgtccccagcattcatacgttgcatgatgagttctcatcagcttacacagctactggaaggtgatgctcttgctggttc

SEQ ID NO: 147731 - DNA, 122 bp, Homo sapiens
gggaaaacaggcccaggaggagggcggccttgccaaccgagatctggggccaagccgggccggaacccagcactccagacttcagtgggctggattctggctgtttgggggcattcgggggt

SEQ ID NO: 147732 - DNA, 122 bp, Homo sapiens
aagtgctaggattacaggcgtgagccattgcacccggccttttattaaacttccaagaatcggccgggcgcggtggctcatgcctgtaatcccagcactttgggaggccaaggcgggtggat

SEQ ID NO: 147733 - DNA, 122 bp, Homo sapiens
ttaacagatctctagtccctgtccagcctcttaattcctggatcatttgggagaatctctcgcatcatctctctgtagtctgaacctcagttcctttatttgtgtgtaactgtttatgtctc

SEQ ID NO: 147734 - DNA, 122 bp, Homo sapiens
gctcttattcgtgttgccgcttcttggccgtccttgctctttgacacaaaagtgtagtttcggcacaaatttacaaattaaactccacagacttccgcagggaagtgagatacccccaggtc

SEQ ID NO: 147735 - DNA, 122 bp, Homo sapiens
gaatttgggggctaaataccgggcacctgtcagccagttaaaagcgactagcgtggccgccggactaaagacaagagtatcaggctttctgggaaagggctctctgacaacacccgactctt

SEQ ID NO: 147736 - DNA, 122 bp, Homo sapiens
gtaagtgaaacagtgccgggaagaattcgggccggggatgtggaactgtgtgtggctctgcgggctcagaggccctccccgcgccccgccaccgtgtgcgttccggggcggggcggggcggg

SEQ ID NO: 147737 - DNA, 122 bp, Homo sapiens
aaatcatgttttacagagaatttgatgatgtggaaaacgctcatggtgtgaagtgaaaaacgcaagacacgaaactgtacttatgggtatggttccaattttatcaatatatatccatagga

SEQ ID NO: 147738 - DNA, 122 bp, Homo sapiens
aatagccttttatagtatctggctcatagcaagaatgcctatcagtgccaccacctcctccgcctcctcctcctccaccacctcctcctcctcctctttgtcattgtcatcatcacattaaa

SEQ ID NO: 147739 - DNA, 122 bp, Homo sapiens
gcaacgtgcggccgcagagcagggagacccgtgcgcctacaggggaccctacaggggacccgcaccgcccgcgcgccctgtcccgggcaccaccaggccccgcacacgaggctcacccagag

SEQ ID NO: 147740 - DNA, 122 bp, Homo sapiens
gaggcgggatgggttgtggcatcggctggcacagctgtgtggctcccagggctgggtgatcgatggcccggcacagccgcctctgtcgccggagcgcccacacccatttgtcatccacatgg

SEQ ID NO: 147741 - DNA, 122 bp, Homo sapiens
gaacaagccagagaaacttaggagacccgtttccctcaggcgcaggctccctgggctcaccgccttttaggaccaggggcacaggcgaccatggcaggccgggagcgggtggggcgggtgca

SEQ ID NO: 147742 - DNA, 122 bp, Homo sapiens
gtagagcttcctctccatagggatgggggtaataagaaaaggagagagtgggcccggcgccgtggctcaggcctgtaatcccaacaattttggagtccgaagtaggcagatgacttgagatc

SEQ ID NO: 147743 - DNA, 122 bp, Homo sapiens
cagcagcggccagcagttgtgtgcagcactacccagggggccccgagtctgtctgtggctcgtcgagaagcttcctggtggggtttgtgggcaggactgtgataggagagggccttgcctgt

SEQ ID NO: 147744 - DNA, 122 bp, Homo sapiens
catgccttcttggatcggggctgtgattcttcccctcttggggctgctgctctccctccccgccggggcggatgtgaaggctcggagctgcggagaggtccgccaggcgtacggtgccaagg

SEQ ID NO: 147745 - DNA, 122 bp, Homo sapiens
ccggctagcgaggcgtggccctatgaaggggcaggctgggcgtggaggcggtgactatgccgcggatggggtgggcccagatctggggggccgcgcgcccgggctggaacaaaggcagaggc

SEQ ID NO: 147746 - DNA, 122 bp, Homo sapiens
acaaacacatttaaacttccctgtacaaaaatacctgctgttgctttagaaatcgttttccgttatgaatagtcaggtcttgcagtacaaatccaggtgcagtgccagcaagtatttcaaat

SEQ ID NO: 147747 - DNA, 122 bp, Homo sapiens
aagggctccttggtctagcggtaacgccagcgtctgggaagacgcccgttgccgagcggacggtggtctagcagaagcctcagtgtcaagaaaaaacaccggctgcttagcagaccggaaaa

SEQ ID NO: 147748 - DNA, 122 bp, Homo sapiens
gtctggcattcgagccctccatgacaggttcccagctttcctgcaaggccatgctcctcacggcctatgactgcctcctgttctgcgcctgtcaggtcttccacctcacccctcttctcagc

SEQ ID NO: 147749 - DNA, 122 bp, Homo sapiens
aaggaggctgcacgcggatttgcatgaaacacagactgggagcgggcgggagcgggagcgcggcgcacgccccgggccggcccagccagcgagcgagcgagcggcgagccgggaggaggagg

SEQ ID NO: 147750 - DNA, 122 bp, Homo sapiens
aaaagctgtcttttggtatccaaagagaacctatgtgaggaactaagtatactgggttgacgtccatagcagaggtgcactgatgatgtatcagtggactcttagcagctgttcacattcta

SEQ ID NO: 147751 - DNA, 122 bp, Homo sapiens
aggcagagccacatcccaaagcccaacaaggcaagggaagatgcaggacaatactgtgcccgttctgggaaattcacccaaatcaccctggctccctgggcagggcctgaacctctgcaggt

SEQ ID NO: 147752 - DNA, 122 bp, Homo sapiens
gctgggggactcaccggccgaggacaagtccagcttcaagccctactccaagggctccggcggcggcgactcccgcaaagacagcggctcctcctcggtgtcttccacctcctcctcgtcct

SEQ ID NO: 147753 - DNA, 122 bp, Homo sapiens
ctgaggattgtcgagcttgcaggttctgaacgtgaggactacaactcccgacgtgcaaagcgagggccagtgggtgggaagagcccccaagagctctgtgcgggattctaggctcccctgtg

SEQ ID NO: 147754 - DNA, 122 bp, Homo sapiens
ccccatgccaagcaggtggtcttaactgcagtttagttcagggtggagaacagctaccaacgtccattgggctgacgtggtcagaattttcaccatagctattccaaataaaataaaaccca

SEQ ID NO: 147755 - DNA, 122 bp, Homo sapiens
cgggttcaagcggttctcctgcctcagtctcccaagtagctgggtgcccgccaccatgcccggctatctcataaagttaacatgggaaggctatggacaactgcaggtattcgcgtttattt

SEQ ID NO: 147756 - DNA, 122 bp, Homo sapiens
ggaaaccggcatgagggccctcctttccggttttgattctatcgggtctctgaggccttccgggcttttgggctattttacaacattgtagctgattgcaatgcaaaaatagcccggcccct

SEQ ID NO: 147757 - DNA, 122 bp, Homo sapiens
gcctaacatcaaaagttccagtcccaattccacccctatggagagcttcacccttgtcagcgagcctctttagccctcaggtttatgaaatgaggccactaatcccagcctggcctacgtca

SEQ ID NO: 147758 - DNA, 122 bp, Homo sapiens
ccctctcaccttttgcccccttgaggttgccccaaggatgtcttgggttgcggtgagacccgctgcatgtggggtctctgtgcaggagctgataccccacgtgggctttgccctgttggctg

SEQ ID NO: 147759 - DNA, 122 bp, Homo sapiens
ctgccgctgccgctgcatctgcacctccacggacaccgagtgtcgcccgctctgcgtcgccggccgtgcgttcggctggaagaggaaaatacaagcacatcgttaaccagaaagttctgtac

SEQ ID NO: 147760 - DNA, 122 bp, Homo sapiens
agcaagaggggcagagcgaggctggcatgacaaagagtgagccaccccatgaaatgggcccggcaaggtcacacggcaccagctggcccaaggctggtcaagaatccgagttttctgcagag

SEQ ID NO: 147761 - DNA, 122 bp, Homo sapiens
tcccgcctcccgccgaccccgccgcgccgccggcagccctccccagcccccgcgagcccgcgcccttgcccgcaccgccaggtgtccctcggccgcgcaccactcaccggctcccggcgcgc

SEQ ID NO: 147762 - DNA, 122 bp, Homo sapiens
gcccgggtgctaagcccctcactgcccggggccggcagtgccagctggctgctcggagtgcggggcttgcagagcccgcccccacttggaactcgtgctggcctgtgagtgccgcgcgcagc

SEQ ID NO: 147763 - DNA, 122 bp, Homo sapiens
caagataacagtcatatcattcgtcattgcagaacatctacggggcttgccaagaaaatacggttcttttatcctgggcttcttacaagtccttgtgttgtggcgattgtttctcatcaacg

SEQ ID NO: 147764 - DNA, 122 bp, Homo sapiens
ggctggcggatcactcacggttaggagctggagaccagcccggccaacacagcgaaaccccgtctccaccaaaaaagtacgaaaacccatcaggtgtggcggcgcacgcctgcaatcgcagg

SEQ ID NO: 147765 - DNA, 122 bp, Homo sapiens
tccacagccatctttgttgccttctttcattcacactaccaatcttcctgtccctctctccgtcaactgtacttgcttggttaaagcccaactcaggatagacacaacttttggtctgttcc

SEQ ID NO: 147766 - DNA, 122 bp, Homo sapiens
cagagatcaaaggaaagaaaacacttcattctaggagcctgagagccacgcacgtccaagcgctcttatccacactctcctcatagctctgctgcagataccactgagtaaaccagtccctg

SEQ ID NO: 147767 - DNA, 122 bp, Homo sapiens
acagaagacacctttgtcaaggacctgaaagtcattcctttgaaatgtaatcatcagaaacgataggatttttgtcttcctgtccctttgggagggcagaagccccaattccataaatgcca

SEQ ID NO: 147768 - DNA, 122 bp, Homo sapiens
aattgatgtttgtgacccagagcagattctggagccttttgtacgcctgggacggcccagcgtggaggggacagtgtggtgcctttttgttcaggcttcgctcaggtcagcctcaccctttc

SEQ ID NO: 147769 - DNA, 122 bp, Homo sapiens
ctgctcggcccaagaaaaggctccaggcctgcgggtgtgaatgagcagcagccaagagagcggtgctgccggcgctcaagctaggccgggtcaccgcctcctgcccaggtccaggcagcccc

SEQ ID NO: 147770 - DNA, 122 bp, Homo sapiens
cggcccgcagtcggcgatggcggggagagtaaatccagtacctcccatccgtgaactggacggggcgggccgggtgggccggaggaggaaggaaaacagaggacagcggatgaggcggccac

SEQ ID NO: 147771 - DNA, 122 bp, Homo sapiens
cgctggtggccaagtcctccatcctgctggacttcaagccttgggacgatgagacggacacggcccacctggaggcctgtgtgcgcttcatccagccggacgggctggtgcggggggcctcc

SEQ ID NO: 147772 - DNA, 122 bp, Homo sapiens
tttggagaacagggtcctacgagctcaaaattgaattatactgccttattagatcccacacgactgaaaccacagtcacattagtcataactggaactaggaatactttatgtacacaaata

SEQ ID NO: 147773 - DNA, 122 bp, Homo sapiens
aggcagaagtggctggtggataactgggacccaagagttatctcagcgtcgggcaggcatcgacagctccaggagccctttccctgcaggcgggctggcgggtgagcgattccctcccttcc

SEQ ID NO: 147774 - DNA, 122 bp, Homo sapiens
ctgcaggctggggctggaggtctgcagactacgcttcccaggctgccgtgcctgggctgccggcaggctctgcctgtagggggtgccagagggcacctggccggcctgcggggcgaggaggg

SEQ ID NO: 147775 - DNA, 122 bp, Homo sapiens
catctactgcgcctacaaggggtctcagagccagaggttaactacgctcagggattcactcgggccttcctgaacctcctaaaaagtgagcagtccccgggaactggggcaccttgggtgga

SEQ ID NO: 147776 - DNA, 122 bp, Homo sapiens
ctgggatccagagatagagggtatttactcagtgccagacacgattttaatcagttcagacgaatcatctcatttaatcctcacaacagccctttgaagtcagcaataagatggtctcattt

SEQ ID NO: 147777 - DNA, 122 bp, Homo sapiens
tccgaacgctgctccatgcacaggaaaagggcattttgtacaatggggacttcccgggaacgcttgctcttaagtaccagaagccggcggagctctggctttcgtgtttttggttttctcct

SEQ ID NO: 147778 - DNA, 122 bp, Homo sapiens
gctgcagcaagtgatcagattttcaccactcatctttgtgagatgggtctcagagggccccgtccctgctgacaccaaccattcttaccggtagcctgccaacacacaagcagttcacagta

SEQ ID NO: 147779 - DNA, 122 bp, Homo sapiens
aaaacttacatctgtgtgtttgctggccaggctagtcatttatgactttcttcgagtaagcgaaaatccttggagtctggcaattcttccttgtagggaatcttcaagaagactttagctcc

SEQ ID NO: 147780 - DNA, 122 bp, Homo sapiens
gaaaagcacatttcttcttctgaagctgtcaggatagacagacattcagccccattcaaccgaggagggtgggtaaactgcttctccccgcgccccgtcccgcgcgagcgctcacaatgggc

SEQ ID NO: 147781 - DNA, 122 bp, Homo sapiens
tgttcttcaggagagaagtcctgagtgaggaggcccagctgttctccagatccaactcctcgggggtttccacagagagctggtatcaaggcagctgtcaggggcggcgtgcctggtgatgc

SEQ ID NO: 147782 - DNA, 122 bp, Homo sapiens
gtgtggagagggactggagggtgtcgaaggctcctggggatacggtggtgatctggttgtcgtagagcgagaggagccggacgttgcgcaggcccgtgaagctgtcgttgtggatgcagctg

SEQ ID NO: 147783 - DNA, 122 bp, Homo sapiens
agtttgtgcatctgatgacaggtgtctggggtaaccctcgaacattaggaaagaccccaccggaggaaagggactcacaagttaatgattacagtgaaagcagaagtaacaacaaaaatgag

SEQ ID NO: 147784 - DNA, 122 bp, Homo sapiens
gccgggccggggcggcgggaggcggcttgggatgccggggtggcgggcggcgggcggcagcgctggcagccacccgggccacggcatgcgaggagccgtggcgcggcggcgggcgcgggact

SEQ ID NO: 147785 - DNA, 122 bp, Homo sapiens
aggaaggtgaagaaacttaacaggaatatacagtggcggcggtgaccccgtcaccgcctgcgccagcgacacaccccctccctccgcctgcgtcgcggagtccccgaccctctctgtccagc

SEQ ID NO: 147786 - DNA, 122 bp, Homo sapiens
aacactaaaggcagagattttcatttggctgtctttgtattcccacaaccaagcatggtacgtggttcaagaaatggctgtttaatcacagcagtaactcccagtaggaaagattctcaaag

SEQ ID NO: 147787 - DNA, 122 bp, Homo sapiens
gaggatttacagcgaggttgggcggggctgatgttacataagaaagcagccactgagccacgcacactgccagatgccaggtcagccaggagctcagggatccaaggcccctctcagactcc

SEQ ID NO: 147788 - DNA, 122 bp, Homo sapiens
cccgtgcgcatcgcactcaggaacgaacagccccggaggaatgggtcgctgtgggtctgtcgcccccgctgccccgagaatgtgttctcgctcgtgctggcaccgggttttctccacctcta

SEQ ID NO: 147789 - DNA, 122 bp, Homo sapiens
ctggggctcgcttggcaagcctacctccccagccagatctaaagtcgggaaattcagagccgggttcaaatcccagtttgcactgatgtccagtcttgggtaggccattgtggtttctgagg

SEQ ID NO: 147790 - DNA, 122 bp, Homo sapiens
gctgagtgccccaggcgcccatttcccagaccagatgctgagtggggtctgggggccggacggagcccccaaagaaacatctgcacattccagacgcgtgtggtcagcggcgggcgtgtgcc

SEQ ID NO: 147791 - DNA, 122 bp, Homo sapiens
gagactcctccagccgagctccagaaactcgcaggtttaaatggccaatctggaaccaaccggggcagctgtcatctgaaactcaggaaagctgagaccagccaactccacagaacaaggaa

SEQ ID NO: 147792 - DNA, 122 bp, Homo sapiens
gcctcacgtgacaaaggtgtgtcttgcgcacgcgcgttcgcaatctggttaccatgacgacgaggccctcgccggttcctgaggacgcgcgcggagcagtcttggcagtagctgtggactgg

SEQ ID NO: 147793 - DNA, 122 bp, Homo sapiens
agctcttcttcccagcactatgctttccttctttgggatagagaatgttccagacattctcgcttccctgaaagactgaagaaagtgtagtgcatgggacccacgaaactgccctggctcca

SEQ ID NO: 147794 - DNA, 122 bp, Homo sapiens
gtctggggaaggagtgagctcagcgtgtgtcgtgtcttgggggggggaccgtgagcccggcgttgtgtcgtgtctgggggggggatcgtgagcccggcgtgtgtcgtgtctggggggggacc

SEQ ID NO: 147795 - DNA, 122 bp, Homo sapiens
cagggagggagaagaaggcggcgcggggcggggcgggcgcagggctggggacggcacgggcgcgcggcacgggcgctggcgcgtgcggggggggcggcgcggcctccggaagcgagggggcg

SEQ ID NO: 147796 - DNA, 122 bp, Homo sapiens
agtttccttgtgccggggatcctgtcccctactcgccagcgccaggctcctcccccccggcgcggatgacactagaacctccttaagttgcgtcgcgccacagctgtctgcgaacactgagc

SEQ ID NO: 147797 - DNA, 122 bp, Homo sapiens
cagtgccccggcggcggctgcggcaggcggtcctggaatgtgcgaggggcgtgatgacagcggccagcctctttgcgcaacaccttcgccatatatacccggggcgctgcgctccacctggc

SEQ ID NO: 147798 - DNA, 122 bp, Homo sapiens
aagagggaggggagggggaacagagagagagagagagagagatgtcacggtgtgaatgcacgcaaaaatgttataaaaatgagcactcccagcagcctgggcaacatagtgagacgccagat

SEQ ID NO: 147799 - DNA, 122 bp, Homo sapiens
ccttgcccgccgaccccatcttgcaggcggccaagttcctgcagcagcagcagcaacaggcggtggcactgggcggcgagggggcggaggacgcacagctcggcccgggcggctgctgcgcc

SEQ ID NO: 147800 - DNA, 122 bp, Homo sapiens
gaataatgtttttctcaaaaggtagtcttgtgttagcttgacttattttctcccagtattcgtgaagaagggattattctgcagtctctggcttcctctgatgcagttgagaagtcagctgc

SEQ ID NO: 147801 - DNA, 122 bp, Homo sapiens
gaggaggctcacgcttttctctgtgtttggcaggtgaagggctggatgcacagtgggagccggaggcggggggctgcagggagcacaccagcgaccggccctccaaccctccagccactcag

SEQ ID NO: 147802 - DNA, 122 bp, Homo sapiens
aggcatggggagagcacataaaagtgttttctctgtcatggagaataaatagctgtgagtcgttgcattcttatcaactggagacaattgacagtggatatgtgccactagagttatggtca

SEQ ID NO: 147803 - DNA, 122 bp, Homo sapiens
atgaaatcacctctgtgctgaaaggctggcttatatactgttagttactggggaatgtaccggggaatgagtcacctcgattctgaaaagccagattttaatgctactgggcgtagtcactg

SEQ ID NO: 147804 - DNA, 122 bp, Homo sapiens
tatcacaggctgcaagcaccgcagcccccagtgacctgtgcagcggaacaaaggattccacgccgactgagccaaaggcatcccttccagacatggatgaggtgcgggtcatttcaagtttc

SEQ ID NO: 147805 - DNA, 122 bp, Homo sapiens
gaaggcgaccacagcagggaagggcgccgcccggggaagcccaggggagagcaggctccacgcttgggttggtcgagtccttactgtctccagagggtgggtcctggccacgagcgacagcc

SEQ ID NO: 147806 - DNA, 122 bp, Homo sapiens
tggcctgaaaataagatcatggatttttcctggcagagagtttagtttactttcaaaccccgctagcctttgctactcaaagcctggttcataaaaccagggctttgacttcacttagatgc

SEQ ID NO: 147807 - DNA, 122 bp, Homo sapiens
gcacacacctgctctgtctacccgagggcaccagagggcacgagaaggctggctccctggcgctgacacgtcaggcaactgaggcacaaggctggcatttctgaaccttgcccctctgcaaa

SEQ ID NO: 147808 - DNA, 122 bp, Homo sapiens
cgggagcacttaaaacaatacctattatgttgtaagtgctcagctaatatttgttgaacacgtgaatgaatgaaagattcctggcacaaagtgctaatcttcaataaatattgtttgaactg

SEQ ID NO: 147809 - DNA, 122 bp, Homo sapiens
acctcaggtgatccgcctgcctcggtttcccaaagtgctgggattacaggcgtgagccaccgcgccctgccggctttaagtgtttttagttacccagggtctaccacagtctgaaaataggt

SEQ ID NO: 147810 - DNA, 122 bp, Homo sapiens
gacagtttaccgagggtattgcaggagtccgcctggcctttctcaagcgccagaggccgacgttttccagcccgggcggtccccagcatctttgccaaggttgtctgccgcagtcgcagcga

SEQ ID NO: 147811 - DNA, 122 bp, Homo sapiens
atcgtcctcctgcctcagcctcccaaagtgctgggatgacaggcgtgagccaccgcgccccgccgtttttaagggtatagttgcaacccttgcttatgggaagagaagcaccttcagcctct

SEQ ID NO: 147812 - DNA, 122 bp, Homo sapiens
gcctttgaacataaggaatgcgtgcgtagcactcccagcgctgctccgggtctcctggcccgatgactctcggctccttcatctcgacgcacccgtgaggaaggtgactgagggttgccgct

SEQ ID NO: 147813 - DNA, 122 bp, Homo sapiens
gtaacttaccattctttttcactaaagctaatagtcatttgtagtggaattatccttgctcggttttttgtgaccagaagctgatccccaacctctttacgtgcacctgattgcttccgtta

SEQ ID NO: 147814 - DNA, 122 bp, Homo sapiens
acacttgaaatgcccacactgccccatcagccttgggaggtggtaggaaaatgccttttgcggggatggaaggatcaaagcccattctcaagccctggtatattcactcaggtggacttcag

SEQ ID NO: 147815 - DNA, 122 bp, Homo sapiens
ttggctaaatttaagctgtcaatacagggcaaaagggtactttgattccattacacattgcgttaccagtctccagagtccatggggttaggtactccatgttttaatatgtttcaataact

SEQ ID NO: 147816 - DNA, 122 bp, Homo sapiens
gtgcatgagcctgcagcattagaaaaactgcttttcagctttggatggtagccttactggcgctcggcatgcatgtctgaaagtacagttgggtcatattctagttatggtccacagcaagt

SEQ ID NO: 147817 - DNA, 122 bp, Homo sapiens
gtagggctgaacacaatgccagggacacagcaagaatttaatatatacttgttaaacgaacgaatgaatgcatgtatacataaaatgttacggaatgtttaacgtattccggggataatgaa

SEQ ID NO: 147818 - DNA, 122 bp, Homo sapiens
tgcttgggaggggtaaatacctagaaatgcgcgaagtgtggctgggcgttgccaggagagcggccggcaccccacgggggcagggagcagacctgactcagtggcgtcagtgctacttcaaa

SEQ ID NO: 147819 - DNA, 122 bp, Homo sapiens
taaaggaatgtgaattcctttgccagttctttgaaggaaatggtagagtctgacctacctcgaaggagtattaagagaaacaacctggttatattgctggaggcttagagtctttaaatagt

SEQ ID NO: 147820 - DNA, 122 bp, Homo sapiens
agagaaccctgtcctgatcttcctaggtgggataaatatcggggtgacagtggtaggccgcggggaaccctcagtctgcccaccctccgccccctcgcggcgagatgcctcgttccccgggc

SEQ ID NO: 147821 - DNA, 122 bp, Homo sapiens
gccttggatttctggctgcgcagttcgcgtccccgcggctccccgccggccgcgcgtttccgagccatgttgcttgtctgggcaaattccacttcgcgagtgacgcacccggccgcgatgcg

SEQ ID NO: 147822 - DNA, 122 bp, Homo sapiens
ataagaagagtagttgatttgagagggcttgttaatatttattccatttccatttctgtccgatatttgtgcgcgcgcatgtgtgtgtgtgtaaataagttacctattttcttaaaaattat

SEQ ID NO: 147823 - DNA, 122 bp, Homo sapiens
gggctaccctataagggcagggctcagatacaatccgagagcaggactaaagcatgagggcggccaaggcggaagggagtagggaaggaagcgccgcgcgtttccaagatacgcaggcgggc

SEQ ID NO: 147824 - DNA, 122 bp, Homo sapiens
gatgcccggagaggacccagacacggggaggatccgctcagaggacatcacgtggtgcagcgccgagaaggaagtgctccggaaagagcatccttgggcagcaacacagcagagagcaaggg

SEQ ID NO: 147825 - DNA, 122 bp, Homo sapiens
ctccacattttgctccccttacattaacttccagggcccctgggaccaggggctctgtgccggcagccaggtgtgcaccttatatctgtgtacccccagccatattcaggcaaggtagggga

SEQ ID NO: 147826 - DNA, 122 bp, Homo sapiens
gccgggtgtggtgatgcccacctgtgatcccagctacttgggaggctgaggtgggaggatcgcttgggctgcaatgagctgtgattgtgagctgtgattgtgccactgcactccagcttgag

SEQ ID NO: 147827 - DNA, 122 bp, Homo sapiens
agggaggacacgaaggatccctcagccccactgagcacagacaccaggtttccagagggccgcttctggcaggccagctttgagggcaacaaagagaatgagagggagcctgagacctgctg

SEQ ID NO: 147828 - DNA, 122 bp, Homo sapiens
ttacctctaatggacagcccagaccccatgcttccctgggactcagagacccctatgtaccgtgtaggactgcttctgagttttcaaatcccagccaaggtccacaggatccagcacttccc

SEQ ID NO: 147829 - DNA, 122 bp, Homo sapiens
gcgctgcctgtctgctcctcagtgtgccccttgcagcttggctggcgagtgccgaaggggcggaggaagctggtgcccggcaggagatgcagcccaggaggacccccgggcctggctcgtcg

SEQ ID NO: 147830 - DNA, 122 bp, Homo sapiens
gggcggcagcggagcatcgagaggaggccagaggtcccggaggggactgagctccccagacgcgcctgttctggcggcagcaagctgctcgggccggcatcgcatttcctcgcgcgctgcct

SEQ ID NO: 147831 - DNA, 122 bp, Homo sapiens
atctgcctctaaggcacccttagagcactggctctggggttctgctgtttcgcagccccgcgcactcccagatgtctaagccttcccaacctgttcatctcgcggcctgtgttctaaacaga

SEQ ID NO: 147832 - DNA, 122 bp, Homo sapiens
attttaaaaatgagaatgatccatgtgttaatgggtgattaaaaagtaatggaagaaaaccgaatttattgactaaagcatcctctctgaaggtactaactctgctgtcccacactcccacg

SEQ ID NO: 147833 - DNA, 122 bp, Homo sapiens
tgctgtgctcaggattcctctctcctttttgctttttgccaactagctgtttctccacagcggagatctgagacgagtatgtggctgattcgggcaaaacaaaacaaaataaaaccaaacga

SEQ ID NO: 147834 - DNA, 122 bp, Homo sapiens
ctgtcgtgcttgaagaccatgacggtcaaaaataaaaccgtttcctggccccgtcccatccgacctcactaaacatctgcaccagtttagctgctcccaaactccgggcaagggagaggcag

SEQ ID NO: 147835 - DNA, 122 bp, Homo sapiens
ctttcagatacacttcttgtaccagtactccctccagtttttcctggacatttatcacaacgtcctatacgagaacccgaacctgaagggtgtcaccgaccacacacagcgcctgtccatta

SEQ ID NO: 147836 - DNA, 122 bp, Homo sapiens
atgacgaggatacaagaaatgcatgcgaaaatgcatgcaccagatgaatgctcgaaaccccgccgcaaaaggcacgcgcccgctgcatcacccctgcacctaatgctgcacaaagtgcatgc

SEQ ID NO: 147837 - DNA, 122 bp, Homo sapiens
ttgtggaagctaccagcgatcggtggggccccactggcagcccgtccgtgtagccttggccgggcccccaagcttcttagaatgccatctaagaaggcagagggggatgagcggcggcgggg

SEQ ID NO: 147838 - DNA, 122 bp, Homo sapiens
ctgtggcctgacccaagcactttgcagtgggctagggaagctcgatttccctccagcggccgaactgtggtttcagtgggtttgggagccaagttcgggactgtggagactgcgcacagaga

SEQ ID NO: 147839 - DNA, 122 bp, Homo sapiens
tgacgcccagcaagtgggactgccttgtgtagcacaataatgagagcaccagaggctagacggctgctttgtctttctcaatccattcgttggtccctggctattctaaaacaaatacactc

SEQ ID NO: 147840 - DNA, 122 bp, Homo sapiens
gtcccgcctccgcgccccgcccccgcctccttgccgacgcctccggcgcgcccaggtagacgtagaggcgagtagaggaagttccctagtctggtgtctcatctctcgccccggaggtcaaa

SEQ ID NO: 147841 - DNA, 122 bp, Homo sapiens
gattgtcccccaccccacctccacaaccataaaaccttcagagcattcacatcacaggaccggagaacgaaatgcaatagtttcaagtacccgcattcaaggggcaatttcatccatgtcta

SEQ ID NO: 147842 - DNA, 122 bp, Homo sapiens
aagtgcctctgctctcatgaacttcttcatgtggacaaaagcaggaagcctttagggccacgcatctcttgttttcctgtgacttacacagccctcacctttgtgcttagatggactgtggc

SEQ ID NO: 147843 - DNA, 122 bp, Homo sapiens
gcttcagaaatgtaaataagctgaattaagtctgaaaaagcatacaagttctcacagaggcggggtgttctgaaaccaattcacattaatcagtatttgtagatgctccctgcaaatacctt

SEQ ID NO: 147844 - DNA, 122 bp, Homo sapiens
acagagctcctaaaacccttggattttcctgagggacagagtgtcttttgttattcataacgagcttgtttccatcatacctgagttcatgctgaggtgactcaaggcagggcccctagata

SEQ ID NO: 147845 - DNA, 122 bp, Homo sapiens
aatccgcagattcaatgaatgctactcaattccagccgactggctgagccccgctggcagcgcacgaagcgacgcggctccgagataaaagcgagtgcagcgccgcgtgctggggaaaaagc

SEQ ID NO: 147846 - DNA, 122 bp, Homo sapiens
gatccccattttccacgtcgagctcgccatcggccagcggctgcggaagggcagcgtcggcgtgtggacggccatctccccgtacctcagtggagtaggtaggccaccgtcctcgcttgccc

SEQ ID NO: 147847 - DNA, 122 bp, Homo sapiens
ggaatagcaacgaaatcaaaaagtgccataaactgctgggctgtggccgagggtgaaccccggcccagggagagcacggcagggaagtcataggaaaacacagccggccctgcccgggtgga

SEQ ID NO: 147848 - DNA, 122 bp, Homo sapiens
ctgtcaggagaaagggtttacggtcagttaggaaccgcgagctcctgcccgtggaactgccgctggaattttaatgctctgtctccctgtgtctgggcacttccttccctcctggccccgct

SEQ ID NO: 147849 - DNA, 122 bp, Homo sapiens
gttgacctcatctcttctatccctgtggattacatcttcctagtggtggagctggagccacggttggacgctgaggtctacaaaacggcacgggccctacgcatcgttcgcttcaccaagat

SEQ ID NO: 147850 - DNA, 122 bp, Homo sapiens
cggggaagtctctgcagagggaataactgtgaactgttaccagccaaacctcacagcagccggtgggcagggatggagggttgcaccagaccagtaaaggggatttggctgggcactaatag

SEQ ID NO: 147851 - DNA, 122 bp, Homo sapiens
tggtccttttaaaattagagttatattctcatgagccaggcgcccagaagcccatcagcccgcctcccgctaggccagaatacggcgccagcgcgcatggggcgccccccgccccccccccc

SEQ ID NO: 147852 - DNA, 122 bp, Homo sapiens
tctccctcctcctctcgcccggtgtccatgtgcagccctgctcgcaggacgtgagtgtcacggtggtcccagcccagccgcccccaggccgctcccggggacctccctgacttggccctcgc

SEQ ID NO: 147853 - DNA, 122 bp, Homo sapiens
tttctgcgctcgcgtggtcatggaggcgctgccgctgctagccgcgacaactccggaccacggccgccaccgaaggctgcttctgctgccgctactgctgttcctgctgccggctggagctg

SEQ ID NO: 147854 - DNA, 122 bp, Homo sapiens
cctaaggtgagggtggacgaggctacaacggcctgctcccgagcgtcccgggactgcgggcgcaaaacagctgggcctctctggccacagccgctcgccggacgcccgaatccattgagccg

SEQ ID NO: 147855 - DNA, 122 bp, Homo sapiens
agatggtctttaaactaattgcctaattagcatatctacttggatgcctaatagacaactcgaatttgtccaaatatgtccaaaacataggttgtaaatatcctacctgatcttcaccccta

SEQ ID NO: 147856 - DNA, 122 bp, Homo sapiens
gtgaatcggcagctgcagggccacctgggcgagatccgcgagctcaagcagctcaaccggcgtctgcaggcagagaaccgtgagctgcgcgacctctgctgcttcctggactcggagcgcca

SEQ ID NO: 147857 - DNA, 122 bp, Homo sapiens
cgttccccggaaagtgaggggcgggaccctcgcggctttctatccaatcctgttccccggcgaatgcggggcgggaccctagcggccttcagtccaattcccgcacctttgaggcccaaggg

SEQ ID NO: 147858 - DNA, 122 bp, Homo sapiens
tcttttttctcctggcttaatggacaaattggtcaagggctgggcctcggaaagtttcctcgaacttctccaaagggtcggagaaaagaaggagagagctggcccggcaggagggaggagga

SEQ ID NO: 147859 - DNA, 122 bp, Homo sapiens
cacacacacacacaccttttagcacaagcatgttctcaaaagagagtgcagcagtcaaaccgagaatgagtaagtccactccagaatgctaacatcagctcaaaacccaagtaagccagcag

SEQ ID NO: 147860 - DNA, 122 bp, Homo sapiens
tcaggggtgagccctggcagcgctcctacctgggacctacattggcttagtaagatgggccggcgcccaccccagccctcgcgcatgcgcataaaagcccactcccgggggcggggcctgag

SEQ ID NO: 147861 - DNA, 122 bp, Homo sapiens
ccgcccgttttggacacccagtgctggtggagtggctgctccacgagggccactcggccacgctagagacccgggagggagcccggccgctgcaccacgctgccgtcagtggggacctgacc

SEQ ID NO: 147862 - DNA, 122 bp, Homo sapiens
ctggattgggggggtgggggggggcggggaaggaggggaaacacctgatgaaacggcgctcgcgttgtcactgacacccgcaagaagcaagaccccggcaccgtactgcgtgcgcgctggga

SEQ ID NO: 147863 - DNA, 122 bp, Homo sapiens
gtggagtttaaaaagaaacaagtgacataattaccactcacggagccagatggcagtgcccgggttttgaatctgctggttatcaccaggattctgtggagagaaagctcgtgtggtcacag

SEQ ID NO: 147864 - DNA, 122 bp, Homo sapiens
ttcctttaataagtcatccagtaccaatttcggaaaaccatatggcatggtgaaaagagccgaggtttcaggaatcggccctggtttgaagctcagacttgccacttattctgcacaacctt

SEQ ID NO: 147865 - DNA, 122 bp, Homo sapiens
gggttttgtgagctactagtgccaagggttttctttccaccagaccaccgctgtaaatctcgagggtcttactcattagaagttagaattcacatttgacgtttaaaggaagaatttcctta

SEQ ID NO: 147866 - DNA, 122 bp, Homo sapiens
tacaattttggaagaggagcttgttcaaacccttatataatagacgagtagaccaaggcccggaagggtgatgtggcttgttcaaacccctccgccagccgaggcagagccagggctgctga

SEQ ID NO: 147867 - DNA, 122 bp, Homo sapiens
ttgacacagaagaaagcacctggcccatagcagattttcagcccatgtcagcaccttctgcgtctagctgctctctctgcatctccctgacagtctctctggtttctgtctcatgcctcccc

SEQ ID NO: 147868 - DNA, 122 bp, Homo sapiens
cctgctgcccaaactcaggatttgctgtgggtctggggatcaataaagtgacaggggatccgtaagtggagaggcccctcctcaggaaatgcgcccgtggaatgctctaccctcttccgcag

SEQ ID NO: 147869 - DNA, 122 bp, Homo sapiens
acacagctctgttctctacgggacagacgcagggaggttccagcaggaagcagcagtgcccggctgtaacctggcccctgcccggaacccacccctccaggctaggctaatagggccccagc

SEQ ID NO: 147870 - DNA, 122 bp, Homo sapiens
taataatttatgccttggaggtgagagtatcaaaagcaaccattatgtttccaggagtctcggctccggtaagcatctcttcctgtcgacttcatttgtgagcaaataatacccagtattaa

SEQ ID NO: 147871 - DNA, 122 bp, Homo sapiens
aatgaagataaactatgaagccatggaaatgaaagataaaaataaaagccagcacgctgccggtgacggagcaagcccaccctgaacagactcagggacgtgtgggaactccttaggtaaaa

SEQ ID NO: 147872 - DNA, 122 bp, Homo sapiens
ggctcggcccgcagcccccatggagggagccgtgcagctgctgagccgcgagggccacagcgtggcccacaactccaagcggcactaccacgatgccttcgtggccatgagccgcatgcgcc

SEQ ID NO: 147873 - DNA, 122 bp, Homo sapiens
agaccagtctgggctacatggcgagaccctgtctctaccaaaaaaaaagggcaaaaaaaccgaactttctctaggtgctgaggtattctgctgagaatctacaaaacttcaaagcccctagt

SEQ ID NO: 147874 - DNA, 122 bp, Homo sapiens
ggcccgtccctggcctctcctgcccgtgcgccggcccgtccctggcctctcctgcccttgcgcgtgcccttggcgtgcttccccttgggcaggagcgacacgccaccttccagtgcagaaat

SEQ ID NO: 147875 - DNA, 122 bp, Homo sapiens
gctcacagaccagcagcccggaggtcccagcccagctccaccacatccagggcagtacctcgcagctctcagtagatcggatcttgtctcccggcttagcgccggggaactcaccgcgcact

SEQ ID NO: 147876 - DNA, 122 bp, Homo sapiens
caaacaccagggcagccccatttaaggtttttgatacactgaggatcattcagaaaacttcggattcctagttatagagttgaatccaaccaccaacacactccagaagtcctgacattagg

SEQ ID NO: 147877 - DNA, 122 bp, Homo sapiens
tctgggcgaaggcactgacgacgcccacctgtaagccagggctcgtggtgagcaggggttcgcagggagagcctgttccgctgcgctccttgcaggggtgtgtgggctcagggacaacacag

SEQ ID NO: 147878 - DNA, 122 bp, Homo sapiens
aatcgagctgcgtctgccgagaagcgtctcgtgtcgaatttggcccccgcgccgagccggcgaaagagatcgtggacgtccatctttacccagaaagcgccacagttctacggcgcctgcgc

SEQ ID NO: 147879 - DNA, 122 bp, Homo sapiens
acaggagaagctaatgtccagtttgcaggctggtcagtgcctcagcttttatgtgtgagccgactcctcccagcccgggctccaccctaccccccacccctctccctgctgaccactccccc

SEQ ID NO: 147880 - DNA, 122 bp, Homo sapiens
ggcggcgtgcttcttggcaaacatctccttgaggatgccgctgcagcacttgagctgctccgagaccttgctgctcttctctggtgctgggtgctgctgagagtcgggcacgtccttctttg

SEQ ID NO: 147881 - DNA, 122 bp, Homo sapiens
tcaatattacattcatcctgaatacacttgcagaattactgcatttgattcccgtttccccggatctgtgcttttgtaaatgctccagagcaaaatttccaactggatcagtgtgctaaact

SEQ ID NO: 147882 - DNA, 122 bp, Homo sapiens
cgcagcctgcactacgcgccccaagaggctgtgcgtggcgagcaggtcacgtgacgggagcgcgggctttggaaggcggctgaacgtcaggccacccgccgctaagctgagaagggagagcg

SEQ ID NO: 147883 - DNA, 122 bp, Homo sapiens
gcgtgatggaaggacatctccgtggacagggacagtccatgcgtggatggaggacaactccgtggacggggacagcccgtgtgtgatggaaggacatctccgtggacggggacagcttgtgc

SEQ ID NO: 147884 - DNA, 122 bp, Homo sapiens
cttccgctgggcggagagcgctgcgcgcgcatcctgaatctgaggcgcccgcgcaggcgccgctgacttcctgacggcccctgggcttcgcctgcctgggaactccgtttcccagatgcctc

SEQ ID NO: 147885 - DNA, 122 bp, Homo sapiens
tgaggccagcctcagagccgcggggaagccaggtctgtctgatcgcttcccagcacttcccgtgccatcccacgcggctgtaaatggacacacgttagccacagctgctgcttcacaggcag

SEQ ID NO: 147886 - DNA, 122 bp, Homo sapiens
tataagccatttctgattacagatattctcatatagccaaatacaaatccttcaaatactcgctctggtagtattcaatcaaatccagctggagataaactgcagcaaaatttcacccccag

SEQ ID NO: 147887 - DNA, 122 bp, Homo sapiens
gcaaaagacgcgagacagagcaggcaattaggcagtttggaaagtctaagagattggcttcgaaaaaatacttctagtgcaaagggggaaactagtgtgagatgttgccaatttagatgaag

SEQ ID NO: 147888 - DNA, 122 bp, Homo sapiens
ttaagctgagaggctagctttgtgtattaggcttagttttgttgaaaggtaggaccagaccgaactagctaattttagtctgaactattccatttagtgccccatgtgatccagaataaatc

SEQ ID NO: 147889 - DNA, 122 bp, Homo sapiens
ctgcggccgtgaagccccgcgccagagcataggccagctggccggccccgatgaagcccacgctcatggtccgcggttcacgcctcctgggagccgcacgaaccccctcagcgagggaccgg

SEQ ID NO: 147890 - DNA, 122 bp, Homo sapiens
ggttctgggtgtcctgaggggcggggctgggggaagggtcgctcccccaactcagggccacgcgtccgctaggggccgctgccgcttccactgccactcccgctgcccgcagcgtccaggat

SEQ ID NO: 147891 - DNA, 122 bp, Homo sapiens
aggcagcctggcccctgctctccaggtggccacagaggcagtgggctcaggacagacagacggacccctgcagagtggccaagtgtgtgctgactggtgttgagaaaagagatgccccagag

SEQ ID NO: 147892 - DNA, 122 bp, Homo sapiens
accatcatttacctacggttcagtttgatttcacggggattgatgacctcgagaacaagtcgaaagactcacttgtaggtaagctcgtgtatgagaaggaagagcagggatgactagctttc

SEQ ID NO: 147893 - DNA, 122 bp, Homo sapiens
tttggtagtaaggagactgggcttccatcttgcaaggtggcaagcggccaccacagggggcgaatgtgctctcaggatcccaagtcccaacctggaatgcatttcttacggcaacaacataa

SEQ ID NO: 147894 - DNA, 122 bp, Homo sapiens
cattagtggctaggaccctgctgccacgccggggtgtgataagggtcagatcacactcagcgatgcttaaagatgcttgtgaacattgctaactattgcgatataaacgtaaagtggaatta

SEQ ID NO: 147895 - DNA, 122 bp, Homo sapiens
cagggttatatcggttgtcgggaagaggcctccacttttaaagccactggcacacgcgagcgctctgaatgcagctgacccacactccgtgctgtattttttattagtgaactgtttactgt

SEQ ID NO: 147896 - DNA, 122 bp, Homo sapiens
gaaggcagaatagcctgcagagaccactgtggcgttgaaaagaggtgtcgtcgcgaccttcggcgccggagaggcgaaacaagagggggtcttcgggccctcaggtatggctcagccgccca

SEQ ID NO: 147897 - DNA, 122 bp, Homo sapiens
cccctgtcgcggggcgcctgtcagggagagggacctggcaaggccggcctgggtcgcctccggagctgaaggctaagtggtctcatccaggggacctgctgtgaacacattgaatagcatag

SEQ ID NO: 147898 - DNA, 122 bp, Homo sapiens
ctgcgcgtacatcatgaggaagcagtaatcgaggttctgtttggtcctccacctgtgggccggggcggggcctcagaagttcagacccctccacctccattgtggctccgcagagaagccgc

SEQ ID NO: 147899 - DNA, 122 bp, Homo sapiens
cagtttaaaacaaaggtatctacctttatcttatgttcatatcctaggcttttaataatacgtatttttcacatgtttacagaaagcagtcaactgagctattcatggaaaggtttgtgggt

SEQ ID NO: 147900 - DNA, 122 bp, Homo sapiens
cttacccaaactcatggctttaagtatccaactatgtttctgactcccaaattcctacctcgagctgaaatcgctcccctcaactccagattcctgtttctacctgcctactcaacacttct

SEQ ID NO: 147901 - DNA, 122 bp, Homo sapiens
tgctttgagaagtgacaggaatctgagtggctcctcatgagaaccttccgacggaagtgacgtcgttacgacgcgcgacccctgtagactcgtccctccggaaggctcagtgcataagtggg

SEQ ID NO: 147902 - DNA, 122 bp, Homo sapiens
acaaataaggaaatagactttaagatggctgccagtaagtggcagtgctgggacttaactcgggtctcatcattaatccagggcttctggaattccgggaatatggcactgtctgccataat

SEQ ID NO: 147903 - DNA, 122 bp, Homo sapiens
cggctacgcccccagggcgctagcccgcagccaatgagcaacgagagcccgactgggagtcgcgccggccaatcgcaggggccgaggaagccttgaatctccgggcaagttaagtttatctc

SEQ ID NO: 147904 - DNA, 122 bp, Homo sapiens
aacctcaccgtggtgtctgcgtggctgggtgtcagcagaagcaccgtggccccgctctcccgcctccccgtgcgcctgggcctccgtgtgctggtgctctcgcacacagctgtgccgccttc

SEQ ID NO: 147905 - DNA, 122 bp, Homo sapiens
gggaagcaggccagggcagaggcccagggaagatctcagcaggggcagtgtgagcatgagcgagtgtgtgcacctgtgacagtgcagacagcccaagatcagagatacaatgtgcagggggg

SEQ ID NO: 147906 - DNA, 122 bp, Homo sapiens
agtctacctgtgaaactggaccctagggaaggtgaggagagtccttaaagaagagaaaaacgagaagagctttccaggcagaggtgaccttcatggaagaggcatggtctgttatgttaaga

SEQ ID NO: 147907 - DNA, 122 bp, Homo sapiens
ggcggctggcggtgtgaatttatggctgcacccccttcctggctgaggcaggacaggggccgggatacctctcaggcaggaacctccagtccactccactgggctgttgtggggccatgggg

SEQ ID NO: 147908 - DNA, 122 bp, Homo sapiens
gcaagtgtgcagcccttcacctccatgctgggttctcaacccaggagcgggcagagcttacggagagttcccgatgggaaagactccccagggtttccgcacccagaagacgtagtaaggcc

SEQ ID NO: 147909 - DNA, 122 bp, Homo sapiens
acacagccccctccctccaggtctcccgacttcacctcctcccgttccccacgcggccaccggagggcacccaccctgctacagctccagcctccggcgtgccggcgcctcccaggttcccc

SEQ ID NO: 147910 - DNA, 122 bp, Homo sapiens
gaggcgacagagccgatgatgaagagctgcggtgtcatttgctgcctccgtgctgagcggcggtcacatcctagtttcccagggtgggtgcccgcatcttccacggcatctctgccttcccc

SEQ ID NO: 147911 - DNA, 122 bp, Homo sapiens
gcacccccaaactccggcccccacacggttcagggccccccacgcaagactcacctccagcggccacccccactcctgtcgcgctgtgatctcggctggggccccaccccccgaggacagag

SEQ ID NO: 147912 - DNA, 122 bp, Homo sapiens
gcaggtcactgcggtttcaaaaggatttaaatgcggaggctgcgatcagtacttccatcacgttctaatagactgacatgagcgtttgtgtctgaaagacaggggaaaaactgatgcagatt

SEQ ID NO: 147913 - DNA, 122 bp, Homo sapiens
accgaacgtggctgtccccacacacagaaggaaaggctgggcggggtgagaagccacacgcgatgtcagcagaagtggtgctgtagatcagaccaggtctcaggagctctctgagtgatctt

SEQ ID NO: 147914 - DNA, 122 bp, Homo sapiens
actgtcacagaattctaccatacagaagcattctgtcaaataatataacaggagacaggtcggtaaaaacctatactaagaatgtcagctaatctttccagaggctaggaaacaaaaccttg

SEQ ID NO: 147915 - DNA, 122 bp, Homo sapiens
cgtagcttcaccaacaacgggcctgaattgagcttcaccaacaacatgcctgaaagcctccgtcactgacaggcacttgcggatggaaaacaaccctttgacaaaagaccctatcggccaaa

SEQ ID NO: 147916 - DNA, 122 bp, Homo sapiens
cggtgggttcagtcgctccttcgacttcgtccagaagctgtttgctggaatcgaacagctcggggagccgcggcggcggcaggaactcgtcttcagcagctgccatcttgggaaggctgatg

SEQ ID NO: 147917 - DNA, 122 bp, Homo sapiens
agggggcgagaccagcgacatagggacggggccatgcggtgggcgggtggaacacggcgccggtagtgagtggccgagtccgcgctgagagcaaaggggaggagcgggccgggggtgagcag

SEQ ID NO: 147918 - DNA, 122 bp, Homo sapiens
ctggctcccgttctgcggcaggtccctatgctgtgctcacgaaggacaccatgccgcagacgtacaaaaggaagcgttcatggtcgcgcgctgtgttctccaacctgcagaggaaaggcctg

SEQ ID NO: 147919 - DNA, 122 bp, Homo sapiens
gcgggagtcacaggtacactgcaaaagtgaaacttagaagctttgtgagtcctgttgtaacgcttttgggcacatttatacatcatggggccaaagtcacattttttaccgattagattcct

SEQ ID NO: 147920 - DNA, 122 bp, Homo sapiens
tccgcagaccaaaagagcagatcctggaggtcagagggcatggtggttccaggaactaggcggtactgcctgcccacccctgccctacgtagggaggcataacaaagtcgctttccattaga

SEQ ID NO: 147921 - DNA, 122 bp, Homo sapiens
cccgagccccgcgccccgcgccccgcgccccgcgccccgcgccccgcgccccgcgccccgcgccccaggccgcctacccagcagcctttgctcccggccacgcccccgaccccgcaggcccc

SEQ ID NO: 147922 - DNA, 122 bp, Homo sapiens
ggccctggaagggatctcccccgagttgggtcccaccttggacacactgcagctggacgtcgccgactttgccaccaccatctggcagcaggtgagccttgttgggcagggtggccaaggtc

SEQ ID NO: 147923 - DNA, 122 bp, Homo sapiens
agccttgcccccagccccattcttagccccgccccggccattctctaaaccgcacactcccgtcccgctccccgccccaccgacccttgggaacccagccgcagccccgcctctgcccgctg

SEQ ID NO: 147924 - DNA, 122 bp, Homo sapiens
gacttccggggtctgcgcgccgcccgccctccctcccagccggagacggtcccgccctggcgtcgcagccccgcctagtgcagcctgggtggagcctgacctttccctgagatttctgcgag

SEQ ID NO: 147925 - DNA, 122 bp, Homo sapiens
gcgaagcagtaggatcggggaggtggagcagtttcccccacccctccctctccccgcacgcgttctttctcagatggcagcgttatttggcgaaagccatctgaggctggtacttggtactg

SEQ ID NO: 147926 - DNA, 122 bp, Homo sapiens
gtgtctcagcatgtcccaaggtggacgtgtgggaccagatgtcctgagcatcataggatgcgaggagcatccctggcctcttcccactggagctgccggtaataccactccccacacgcact

SEQ ID NO: 147927 - DNA, 122 bp, Homo sapiens
taatgcgccaagacaaatcagtttcaaaagataaagcttataatgttgactttatttcaccgtggaaattttgtgctcaaaggtaagaaaccatcttatataaaacaatcaaataaatacat

SEQ ID NO: 147928 - DNA, 122 bp, Homo sapiens
tgtcaggccagcagagtgagagagtctaacggggtccctcttccaagggcgcgggccaggcgagttatagaggaaggttgttttgctttgtttttgttttctaatctggtggagaagagaca

SEQ ID NO: 147929 - DNA, 122 bp, Homo sapiens
cccggggccggcagggccgccggctgctccgagtgcggggccgccaagcccacgcccacccggaactccagctggcccgcaagcgccaggcgcagcccagattgccatttgcacctctccct

SEQ ID NO: 147930 - DNA, 122 bp, Homo sapiens
cccttagctagcctggctgtccttatgtgtccaaagagcacaggacccctctgctagcctcgtctggagggtgtaaagaggaatgagatatcaggtgtgaaagcgctttatgactagaaagc

SEQ ID NO: 147931 - DNA, 122 bp, Homo sapiens
taccaacgatccattttgcccttgcgccgcgctcccgctgctctgcctttccccaaaacgcgccccaccaatccgcagcggcttcgtcacggcgctcttcgtcgcactccaacccgccgcgt

SEQ ID NO: 147932 - DNA, 122 bp, Homo sapiens
agtcccgctcaagcaaaagcagcctggtctggattacttctatccccagctgcagctgggcgtgacggaggccgtggtcataacccaagtgtgccatccccaccgcattcactgccagctcc

SEQ ID NO: 147933 - DNA, 122 bp, Homo sapiens
ttgggtgggagccgggcgctgtgggtgcaggttccacctcggagctgggtgctgtgggtgcgggtgccgtattgggtgggagccgggcgctgtgggtgcaggtgccatctcggagctgggtg

SEQ ID NO: 147934 - DNA, 122 bp, Homo sapiens
tatcggattttcatttcctttcctccttttcccaaccccttcacaaccaaacagcgagaccgcggtcggcacatgctttaactcctcccggacccccgaggaccgctccatgccccccactt

SEQ ID NO: 147935 - DNA, 122 bp, Homo sapiens
attccaaagctgtgcaggttccgttcatgggagtctcatggccccagtgtgagtgagtgtcggtgctggtggtgaccctgccacgggacggcgtctgtccaggctggtgtcagccttgtacc

SEQ ID NO: 147936 - DNA, 122 bp, Homo sapiens
cccgagccctttgctctggccctttggtctggtggtagaacactggggaaggctgaatggcggggagggatgtcagtgtcaggcccccatgctccctccatgtcccttcaagcctggggaca

SEQ ID NO: 147937 - DNA, 122 bp, Homo sapiens
ctgcctctccctcccccagagtgaagagaagagccgtcagctggccgagtggttggacgacgccaagcagaagctgcagcagacgctgcagaaagcggagaccttgcccgagatagaggcgc

SEQ ID NO: 147938 - DNA, 122 bp, Homo sapiens
cttgggtgtgttgcaaccagacgcccgcaggccttggatggatggaattctccaggcatccgtggtggggggaccggctcctgcccccttggccgagagggctgagctcactcagcgtctcc

SEQ ID NO: 147939 - DNA, 122 bp, Homo sapiens
atcttcatcctgggctacctcacaggctactatgtgcacaagtgcaaataaatgctgccccgcatgcacgcggggggctggccgcacacgtgagagcacaggcctggagacacaccccttgt

SEQ ID NO: 147940 - DNA, 122 bp, Homo sapiens
cacctttgcggtcccgagtgaagctactcaaccttttaaaaaaaacatccacggacgggacgcgatggctcacgcctcaaatcccagcactttgggaggccgaggtgggaggatcgcttgaa

SEQ ID NO: 147941 - DNA, 122 bp, Homo sapiens
tgagcagtgcccctaacatttccgtacgttgctcggggtcaggctagactctgctgcccccgtgtgttccagcgcagaactgcataaagaaagaggagcgctcggccatgccgcacaggtcc

SEQ ID NO: 147942 - DNA, 122 bp, Homo sapiens
gtaaaaataacattaattgggcaggaagcatccaaagtgtagctggattcctgtagcatgcgtgtactttatgggcaggggccaggagttgggaaagaacaccaggatattacatctgatac

SEQ ID NO: 147943 - DNA, 122 bp, Homo sapiens
ccgaggagccagggagcccggacgcgcggagcaccgcgccgcccgccaccagcccgcggtcggcacgccagctccgggtttgttggagcacttttatatctctgctcccaccaggctgctag

SEQ ID NO: 147944 - DNA, 122 bp, Homo sapiens
ctctctgcatccctccaggtcactgggtgttgagtcaggggaagcagggatacacacgggcgggaaactcaggtctcctaaatgtcagagcctcaggacttcggctactcagaagtagctcc

SEQ ID NO: 147945 - DNA, 122 bp, Homo sapiens
aacaggaaacttattttacacccaactctctgccaatacacttaataaatcaagctactacgaacaaggctgtaaaccacatttcctagaagaccagggagcagaaggacggggatctccct

SEQ ID NO: 147946 - DNA, 122 bp, Homo sapiens
ggacgcgtggtcgcatgcccaggatcacatagacaggagaacaaacgggctgtcatcacacggaagggagcagtgaagggcggtggccgagggacacggagggagggagcagctgcgcgttg

SEQ ID NO: 147947 - DNA, 122 bp, Homo sapiens
cccgctccgtggggcagcccggctggaaggagctgggagcatacatgcccaccccatctccgccttctcggcaccctccgcggaggccaaggggccagacagatgccatccattgagatcag

SEQ ID NO: 147948 - DNA, 122 bp, Homo sapiens
gtgagccggggagaccctagggaatgtgtgtgcatgttgtctatgcatgcgggtagaatccgcaaacggtgtggagactcgggctcttgggtacctctgaaggcccctgaagtccccatggg

SEQ ID NO: 147949 - DNA, 122 bp, Homo sapiens
tgggggctgcagggcggggactggtcggcctgggctcgacagcttggcgagggcctggtgcgggctgggcaggctggactgaggggcaaagaggtctgggcggggcggggccgctctgggcg

SEQ ID NO: 147950 - DNA, 122 bp, Homo sapiens
tgcggggagctcgcagtcttggggagccggtgccccgcgcgctataaagggccggcggcgcgctctcccgcgcctctgcccgcccccggcgcccgcccccgccgctcctcccgactccccgc

SEQ ID NO: 147951 - DNA, 122 bp, Homo sapiens
cgtggggcgtggcctgagcacctggcgtgtcatgctgggccccaaaagcgacgccaggggcgtgtttctggtgtttccgaactgggggctttattgaggtaactgcagattcacacgcacct

SEQ ID NO: 147952 - DNA, 122 bp, Homo sapiens
cagtgacagacaggtgacacggagtgcctgcgtcccaggtgcaaatcagtaagaaacacccgagacagtgacagacaggtgacagcaagtgcctgcgtcccgggtgcaaatcagtaagaacc

SEQ ID NO: 147953 - DNA, 122 bp, Homo sapiens
gccgggccgcccagtccgggagccgggcgctgggatgggcgggaggcgggatctccgggccgcgccgcttcctggctccccaccctgcgccggcggccgccctggccacgtcaccgcccggc

SEQ ID NO: 147954 - DNA, 122 bp, Homo sapiens
agttagaatagttgtgaggtctttagctaacttctgaatttgccggctgagttcctggctcgtggccttgctctgctcaacttcttttattttgtcttggatctaaaaaaatcagtaagaac

SEQ ID NO: 147955 - DNA, 122 bp, Homo sapiens
aagccgaggcaacacagattcaggtagagggtgctgaacaccgaccagatcaagtggtctcgaggcggggggtgcggggcccccagtgtgagggctgtgtgggcaccggccttgctgggcgt

SEQ ID NO: 147956 - DNA, 122 bp, Homo sapiens
gcagaatggagactcaggtggcgaccgtttcgccaccccgggcgtgtgacagcagaggcccgcagtgagggtgggaagagctagaaccgcccacccactggctctgcagggcgcgcactccc

SEQ ID NO: 147957 - DNA, 122 bp, Homo sapiens
ctcaagcaatctgtccaccgtggcctcccaaagcgctgggactataggagtgagccactacgctcggctattgcacattttctttgtagtttttttcaaatgaccttaaaaatgtaaaaacc

SEQ ID NO: 147958 - DNA, 122 bp, Homo sapiens
ggaggagggactgctctgccgggtggttcattctccagaattcaacctgtttcttgactccgtggtgtttgaaagcaacttcatccaggtattcttgggtggcgcagaatagcactctttga

SEQ ID NO: 147959 - DNA, 122 bp, Homo sapiens
ttatgacaaacaatatgttctcccacttaagaactaagcctggttggctgcgcatgtgcgcgcgcgtgcttgtgtgtgggtgtgtggtggggtatgtgtgtgtccggggctgccgattcaac

SEQ ID NO: 147960 - DNA, 122 bp, Homo sapiens
tgcatgactaaatgccattgctggcttccaagagcagcttcctcaggatctgtctcagatcgcaaggatgggggaggaggcaggactacttccaggctgtcccaacatgagcagggatcaga

SEQ ID NO: 147961 - DNA, 122 bp, Homo sapiens
agtgaccatgctgggccgccaggtgcagggggatgtggccctcatcagacgggatgttcacggccgagcccgccttcagcaccagcttcatgggctccttccggccctgccaggccgcatag

SEQ ID NO: 147962 - DNA, 122 bp, Homo sapiens
cgtctcgaatcgcccagcccacaaagtgagccccgcccccgccacccaatttgggagcttcgaatgcccgcccgagccttgaaggcgaaccacctgagggttacctgtgtctccgatgatga

SEQ ID NO: 147963 - DNA, 122 bp, Homo sapiens
agaactcaccaaactgctcagagccctcccatgaggtgctggtttctagcctaggagaagcgcccaggctccagcagattgtggtagggctgttgtgattgacatttgcgaataccagagga

SEQ ID NO: 147964 - DNA, 122 bp, Homo sapiens
ggcctcaagcagtcctcccatgttggcctcacagagtgctgagattgcaggtgtgagccacggctctcagccctaaatccactttagttggttaggaattggtggcaatgcaggagtgactc

SEQ ID NO: 147965 - DNA, 122 bp, Homo sapiens
gttaagttttcttatcccacccatgcacacaaaaaggtgactattctgtgaggtaataaacgtgttaattgacttcattcatgccactctgcatccacaagtaagggtttcataacaatgac

SEQ ID NO: 147966 - DNA, 122 bp, Homo sapiens
tccagtcacttacaggagctggctgcgccgtgctcccttcacgcggctttccacccaaagcgcatcacggccgccagcccctgacgctagccccttcgccacctcccagaaccttctctccc

SEQ ID NO: 147967 - DNA, 122 bp, Homo sapiens
aaactggggtggggatccccatgcccggtactgtctgccatgccaagtaaggctcagggtcggggcggggggatctggaggggaacaggctcacacccaaaggaggctctgggaccacctca

SEQ ID NO: 147968 - DNA, 122 bp, Homo sapiens
caggacactgtgttactggcccgctgggtggccagagacgagctttactctactagaagacgcagttagtccctctggggtcctatcttcgtagtaaatccctgatatggcttttaataata

SEQ ID NO: 147969 - DNA, 122 bp, Homo sapiens
cccaaggtacggccactcacgttcatgtctgagcccgccgggaagcaccggctgctgggccgctgcttgatggtcgccaccctcggttccacagccatgttctcagcagcgcgggagggctt

SEQ ID NO: 147970 - DNA, 122 bp, Homo sapiens
gggggcggctttctgagaccaggctggggctgggactccgccaccttcagctaagggtaccgaggtcagtccgggagtcgcgtcaccgggactcgaacccgcctcttcgtcttccgaggcct

SEQ ID NO: 147971 - DNA, 122 bp, Homo sapiens
ccgcccctagaccccagttgtcgggaatccaagttccacaccctcagcgggtgacccggacgggcccctcattcagaacggaaagtggacttcggtcccgatcccccttcacgggccccgac

SEQ ID NO: 147972 - DNA, 122 bp, Homo sapiens
gtgtctcctacaatcctattactcatcaactggcatcttgttcctccagtgactttggtacgttctgattcctgatgtcctgtcctggaataactgaaaatctgggctaaaaatgctaaaat

SEQ ID NO: 147973 - DNA, 122 bp, Homo sapiens
tgtgtgtgtgtgtgtgtataaagtgaactgcagaggaagaaaacaaagaaggtgcaacagcgaaagactgcaggggcaagcaaggcttctggagggaacttgggcctcactgccactctctt

SEQ ID NO: 147974 - DNA, 122 bp, Homo sapiens
ctcaagagatcctcccacgttaacctacctagtagctgagaccacaggcatgcaccaatacgcccacctaattattattattttttttatagatatgtgggtctcactatgttgcagagaca

SEQ ID NO: 147975 - DNA, 122 bp, Homo sapiens
cacatagggaggcggcatctgccaatctgcaacacagcaagagcctgccaggcccagactcgtgtgaacagcggctatgcttccttggggtctggggacagtggggtctgggtccccatcta

SEQ ID NO: 147976 - DNA, 122 bp, Homo sapiens
ttacggagtcctcattccaccccccttgtttccgcattcatcctgagtggctggtgggaacgtgaaaagggagaggaaaaggcgcaagaagccagagagaggggtgtgggaaaagcgaaaac

SEQ ID NO: 147977 - DNA, 122 bp, Homo sapiens
ttctggcagaacctcactagcagcccagagtgtgagggacttgggaaacgtttactcccacgcgcaaaaaacccagatcgccagcgaggttccggatttcgcacggatcctgtggggcccgg

SEQ ID NO: 147978 - DNA, 122 bp, Homo sapiens
ttctataaggtcaaacagaatattatgcatctacatatttttggtagctgtcttgtaaatcgtactcttttcagagtaatagtactgattgaatgggtaggcgagtgaatgtgtttttgggg

SEQ ID NO: 147979 - DNA, 122 bp, Homo sapiens
ttccgtgcgcgctgtgtacactagctcatatgtgccattcttgtggtccaccactggcaccggaaggcgcgtgccgtccgggccggtgatctctgcacgcagctcagcgctgcctgtgcgca

SEQ ID NO: 147980 - DNA, 122 bp, Homo sapiens
cagaaagacaagaccctgaccgtggggaatttaaaggccggccagcgtgcttccgaaggccgggggtggaggcattaccgcctctccgtgccctcttctcttaacctgccctgggccaaggg

SEQ ID NO: 147981 - DNA, 122 bp, Homo sapiens
gccccccaacaaccgcgtggtcggcttggaaaggcgaactataattcccagggtgcctcgcgaggccacaaagaactacgattcccagagccccccgcggtggggcggggttgagtcggaac

SEQ ID NO: 147982 - DNA, 122 bp, Homo sapiens
ctcgccctgccgggcgcggagtgcaattaggctttggggtggtttggctctccggctttccgtagcctctggccccgccccctagcaacgcgctggcttgtgttaacaaccggcccgggatc

SEQ ID NO: 147983 - DNA, 122 bp, Homo sapiens
agggaaccttgctcccgggccggctccaacggctcatccccaggtcccccagtagctcctcggggccctgacttcctaggtccccccaacccacttaggcgccccttgcccggcccgggggt

SEQ ID NO: 147984 - DNA, 122 bp, Homo sapiens
ggacgaagggatgcaaggcacgaaggagctaaccaataaggggtggcaggtgggcgtgagcgtcgggaccgggagccaaagccatctggggctgaaaggcgggacttcctgcttcgcttacc

SEQ ID NO: 147985 - DNA, 122 bp, Homo sapiens
gctcactgaatgtggagtctctctgactcaccctgcacagcccaggaagccagattagggcggaaaaaggtattcagagtttgctgaggctagtggtggtcaggctgtgtgggaactctgga

SEQ ID NO: 147986 - DNA, 122 bp, Homo sapiens
aaaggctgccccctccagtgggaccccactgtatatgctctctctcattttctggcctttcgattctctcttggggcctcccttccatggcctgcaggggctcccagaatgggggctgaagc

SEQ ID NO: 147987 - DNA, 122 bp, Homo sapiens
accggccggcaggaaatgacgaaggcagagggcgtccaggtccgctcggtaaccgtttcccgcgcgcccggccccgactccggggtaaagagccccggagcggagcagcgctggccgcgtgc

SEQ ID NO: 147988 - DNA, 122 bp, Homo sapiens
tacccaatcagtggcgtcggagtggaaatcctccaatcgggagtagccggagagcaggggcggcttccgggatttggcggtggcctttgttggctgcagtaagagctcagtctcttcaccag

SEQ ID NO: 147989 - DNA, 122 bp, Homo sapiens
gcgcagggagtggggtgctggagctgtctaggggaggcttgtgatccacacatctttcaccgccccacacaaaacagaatgcaatattcaaatcaggctgaggtcctggagggagagagagg

SEQ ID NO: 147990 - DNA, 122 bp, Homo sapiens
gggtggcctttgtgattcctccggtggtggcagcacccccgtccctacgggtgccgcggccgccacccctgtacagccacagaatgaggatcttgaggcagggcctgagagagcacgctgcg

SEQ ID NO: 147991 - DNA, 122 bp, Homo sapiens
tttaggctaaaagcatgccaaaccagattttgtctttagttatttgtgcatgaactggaccggaagcaaatattcttaaagcctacgtgggtttcttagggaattttactgcccaggaaact

SEQ ID NO: 147992 - DNA, 122 bp, Homo sapiens
ttggtgccgagggtggctcctgacatcggaagaccccaggatgctgggtcagcggctaggcgggtggagggtggggttgtccccggcacacggcggtgctgctctgccactctgcactgctg

SEQ ID NO: 147993 - DNA, 122 bp, Homo sapiens
agccccggcgtgattaggccctttgtaattatcgctccaagagattccactccagccgcccgcctccctcgtggattagcaagcgagtcggaaaaatacacaggatttaattagaggcaaat

SEQ ID NO: 147994 - DNA, 122 bp, Homo sapiens
tttgccaaagcaggtagcagaccactatgataactttcggatatataaggctctggaggccgtgtccagctgtgtccggcaaactaatggttttgtccaaaggcatgcaccatggaagctga

SEQ ID NO: 147995 - DNA, 122 bp, Homo sapiens
gacccgcgcttggccgcagccaacactcactggagcagattagggacatggcgccgtcaccgtgctccgaggcgccacacgccgggctccgggactagcttctgagcctccgcgagccactt

SEQ ID NO: 147996 - DNA, 122 bp, Homo sapiens
agggtcgcgtttcaaggctcagggacccatgcacacctgaacagatgggccaccaggtgccgcagggtgttgtagttagagtcaggcagctgtaccaagagggtcttcagcgagcggataac

SEQ ID NO: 147997 - DNA, 122 bp, Homo sapiens
ccctgcccacacccagcaagctggtgtccctgtttcctgtaccgtggtggggtagctgtgcgacatgggcaggttgcttagcctctctgtgcgtcctttcctccgatctgaaatggaggtgc

SEQ ID NO: 147998 - DNA, 122 bp, Homo sapiens
cggcggtgccggggtcatccggatggtgcggacgcagtgtctgctgggactgcgcacgttcgtggccttcgctgccaagctctggagcttcttcatttaccttttgcgggggcagatccgca

SEQ ID NO: 147999 - DNA, 122 bp, Homo sapiens
gactggcgtcccacaggaggcctggggcctggcgatgatgcttgccggagcctgagggcccgtcccctgcggggctggggcccaggcccctctctgcagagctggagtcttcctgctcactc

SEQ ID NO: 148000 - DNA, 122 bp, Homo sapiens
aagaaacctggggggactcggcctccaggcatcccatccttgggggaatgttgccaagcacggggcttggggcagctgctccactataatcatgaaaggcttttgcttcacttgaatgttca

SEQ ID NO: 148001 - DNA, 122 bp, Homo sapiens
gctgtggggctgcgggactgcggggctgtgggactgcgatgttgcctggctgcggggctgcgggactgcggggctgtgggactgcgatgttgcctggctgcggggctgtgggactgcggggc

SEQ ID NO: 148002 - DNA, 122 bp, Homo sapiens
agccgcttcgtccattgccttcggggtgcatgaccttacagaccccgacgcgactgatcccgcctccttcctgtgggaaccatcccccgctggagtcatctctggtcataaccacagccttg

SEQ ID NO: 148003 - DNA, 122 bp, Homo sapiens
ggagctgcaggggggccgcgagcgccagcggggactggctgggagcagggcaacaatgggcggagttttccgctcctccccgcccttggcttgagcgctccagctcgctagtggcccgggcg

SEQ ID NO: 148004 - DNA, 122 bp, Homo sapiens
agcaatcaccccccactccccctccctggcccccggtaacggggtcggcttcctgtgctgcggctctaccagttccggtcgtttcccctgcggtgaatggaaccaacactctgcggccttcg

SEQ ID NO: 148005 - DNA, 122 bp, Homo sapiens
aaacgctttgaccgttggctaaagcaagtatcagacgtcagcccctccaggtggcaagcacgcctggccaagcctcagtttccacatctctcaaatgggagcgatggcaacactatctaccc

SEQ ID NO: 148006 - DNA, 122 bp, Homo sapiens
aattgacttttcgacactgatgaagaccatgagcctgtggaattacaaaattcattacctcgcagtgcttattttttctaaggcctgcattttctgtgtctgtgcaattctgtatttggaat

SEQ ID NO: 148007 - DNA, 122 bp, Homo sapiens
acatcctgggacacaatgtgttatcctagattttattcctgaatcctggatccatctccccggacccattagacatcgctaactaaatatcccttaaaaccaacttgtccaacttagacaag

SEQ ID NO: 148008 - DNA, 122 bp, Homo sapiens
cgcggggaacgggaacccgggccgcgccctcccggccgccgtccccgctcaggctggggccggcgccaaaaatgtctcagggcgcagacacggaagcacccccagggctagtgcgcctgcgc

SEQ ID NO: 148009 - DNA, 122 bp, Homo sapiens
tgttgcagctgtggcagaagatccttcgcggcccaggccccgacggtaccactgcacagccgagagctcttcacattccccggctccggggctgccaccctgcgcttcgatccgggcttctc

SEQ ID NO: 148010 - DNA, 122 bp, Homo sapiens
gggctcgcggacccggcccagagggcggcggtggcggcagctacttttctggtcagggctcggacaccggcgcgtctctcaagctcgcctcttcggagctggaacgcctgattgtccccaac

SEQ ID NO: 148011 - DNA, 122 bp, Homo sapiens
gtgcatacctgtctacactcaggccagtggcgagtggacggtggccatcacctgggagaccgagcatcttgtccagcacacagccacagggtcatctggcctcagccactgctggtttcggt

SEQ ID NO: 148012 - DNA, 122 bp, Homo sapiens
caccaggaagaaaacgggtttggcggcgcggagaaagcgccggaaaacacagcagcgctccgtgacgtcacttccgcctccagcctcaaacctggaggagcgctcgggaactgcaacctcag

SEQ ID NO: 148013 - DNA, 122 bp, Homo sapiens
gttggttttgagtcaaactgaagttatttgaagacagaaggaggaaatgggcctaagtttcgcccctggcattcctgtggccatatcaaatatttatatagtgcttagagtgggccaggcat

SEQ ID NO: 148014 - DNA, 122 bp, Homo sapiens
acagcagagtctcttctgtctgcattaaccaagggctctccctcatccgctggtccagaacgacctacaacagggaaagggagaatgatgtttattagcttgatttaatcacgccacaattt

SEQ ID NO: 148015 - DNA, 122 bp, Homo sapiens
ccccgcgcgctctcccacatgaaaccttccatcacgctcagaaagaatgtgctacaacctcggcgctgccgcggccgccaccactgcgcccgcgcccgagcccgagtcggagccggagccgc

SEQ ID NO: 148016 - DNA, 122 bp, Homo sapiens
aggcaagttgccagtgattcaaactcagcaggtttgtgggtgattttttccttactgttacgtttgtggagtaggaaaaactagaaaggaaaaaaaaatcccaaaggttgaaaaactgtatc

SEQ ID NO: 148017 - DNA, 122 bp, Homo sapiens
ggaggacggggaaggaggctcctgtgtcccctcttctcgcccctgcacacactcgcgccacggcgacccatgttgatcaccggagtttgggaagtcagaggggagccctctgctttcaggcc

SEQ ID NO: 148018 - DNA, 122 bp, Homo sapiens
tgcaaaaaacagctcatttagagaccagagagattcctctgagccactgaaacagaacaacggtaaacatctgcttctactcttctggaaacattgtggtttggatgctctgtctgtcactc

SEQ ID NO: 148019 - DNA, 122 bp, Homo sapiens
gctcgttccctaacattaaagagaaaatgctgctatccgtgacttccaggcccgggatttcgacttttggctacaatagaaacaacaagaaggtagggaaaagcgcttttttggtatctagc

SEQ ID NO: 148020 - DNA, 122 bp, Homo sapiens
gccccagcgagagtgcagggcgcgggccgggcctgccctacaccgggccgcctctgatcacgttttcagggccactgcccgccagcgcagacaatgctgggggagcctttgaagtccgaaag

SEQ ID NO: 148021 - DNA, 122 bp, Homo sapiens
taagggaccaggtgcaataggcaaagagttggctgtcttcccaacccagctttgcatactcgtagagctaggggtcacagaaatgcagaatttagagtacaaagccaagtcaagaattattt

SEQ ID NO: 148022 - DNA, 122 bp, Homo sapiens
ctcagacatgcgtgaggacacaaggcctgggatgccaaccccagcctgtctaaattctcccgggctcccgtgcacagctgacatttccaagggaacgtccgcggctgggctgaccctcacag

SEQ ID NO: 148023 - DNA, 122 bp, Homo sapiens
atgcatagccaactttttaaatgttttgcatagaagaagtcttgctacgttgcctaggctcgtctccaactcccgggctcaagcaatccgctcacctcggtctcccaaagtgctgaaaggcc

SEQ ID NO: 148024 - DNA, 122 bp, Homo sapiens
gatcaacgccggtggcaagaaggggccgcaagggtttccgcagacacccacacatgcaggcgttcccacagagggtaccagggatttcccagacccccaccagccctcaggaatagcgtaga

SEQ ID NO: 148025 - DNA, 122 bp, Homo sapiens
gagggaggacaagacagcaggggcccaggtccacatacaccagggagtgccacgccagcccggattgaccatctctggactttctgaatgtgcaaagatatccctaaagagcataattattt

SEQ ID NO: 148026 - DNA, 122 bp, Homo sapiens
gggggggccccccacgccccaccgtagcatttttgccccccatgcactgcccaaccgcaacggcagcctgtcctatgacagcctgctcaatcctggctcgcctggtggccacgcctgccctg

SEQ ID NO: 148027 - DNA, 122 bp, Homo sapiens
ggctttctgctgccggcggggcaccgcggcggccgcagcctctgagagcacgaacagcagcgcccccgcgtcccagccagccagccagccagactggactccggcccaccgacggccgctcg

SEQ ID NO: 148028 - DNA, 122 bp, Homo sapiens
gcgcgccgcgcgagccgggggactcggcgacggggcggggacgggacgacgcaccctctccgtgtcccgctctgcgcccttctgcgcgccccgctccctgtaccggagcagcgatccgggag

SEQ ID NO: 148029 - DNA, 122 bp, Homo sapiens
ctgtagagagtacggtgcggccttgtaatattttaatttctaggcaaagcttgtatcctccggatacaagaacagccgcccaggaggagcggaaactgacacacacccgtcaccccttgggc

SEQ ID NO: 148030 - DNA, 122 bp, Homo sapiens
gcgtgtccagagggccgctctgctggtcaggcacagtccaacagtgcaggagttatgatgcgggcccccagggccccagtctggctgcatctgtttgcagtccagcattgggtgccctggga

SEQ ID NO: 148031 - DNA, 122 bp, Homo sapiens
cgcgggtggtggggtggcagtcgctggctgcgccaggatggggcggccctcagggcagtgcggagcccacgtgccggggagcaccggccatgcccggcccagccaggcgtcggcgccctcgg

SEQ ID NO: 148032 - DNA, 122 bp, Homo sapiens
ggagaagagaagacgtgcagccagacacctgccgccttgtcaggcctgtgtcgccgcctccgcagcccgaaatcatcctgccctccaaggcaccgccctgatgctccaggtgaaggctgaag

SEQ ID NO: 148033 - DNA, 122 bp, Homo sapiens
ttcccagcggtcttgacgcttatcccctctgcctacctcaatgtcacgctgagtttctggcgaccgcccacaccaccttgcggtcccgttttcacttgtgggattcttctgacagaggcaca

SEQ ID NO: 148034 - DNA, 122 bp, Homo sapiens
ggggcatcctccggagttacgggccgggaaggaggggtcatttagggcgtgaggattccccgtagagagggatttcagcagaagcttctctggcaaaggaacaacagtaatcatgatttact

SEQ ID NO: 148035 - DNA, 122 bp, Homo sapiens
aacagtggaacaagtgaggcttgtattacatggccaaattgatattaatgatggtggcctcgagaacggattccatcccaagacatctgatctgcagacagttgagcattcacagcagtttt

SEQ ID NO: 148036 - DNA, 122 bp, Homo sapiens
cttaaccatttttaagtgtacaggccaatagcattaagtacattcacactgtcatccaaccgtcaccaccactacccgtctctagaacttctttcatcttgcaaaactgaaactctgcaccc

SEQ ID NO: 148037 - DNA, 122 bp, Homo sapiens
gggagcggtggggagaggcttacccagggtggtgagcgcagcctcagtggcagaaatccccgtgcgccccctcctgccgcagaggaagacagacccctacggagcctccagggcgcagtctc

SEQ ID NO: 148038 - DNA, 122 bp, Homo sapiens
ctcttgctcatttccacatccactgccttattcaggctgtcatcccccacctagctgacccgcagcctcctggctggtcctcatgtcaggtagaaagcatccaatctgcctcctgagtgata

SEQ ID NO: 148039 - DNA, 122 bp, Homo sapiens
gcctcacgaatgatcttgaaggctcgagcagtggcatagggtatgtctgtaacagggtcccggtatagggctggacgatgggtcactggacagacctcacgaacagggacttttgggggccg

SEQ ID NO: 148040 - DNA, 122 bp, Homo sapiens
caatttctgtgacccccagtggtttcacactatcttttcagcaagccacattggatttcacgcatttactgactcttctacccgttctttttggtgtccagctgtactctccaacaggcgag

SEQ ID NO: 148041 - DNA, 122 bp, Homo sapiens
gaccctgggccgtgggaacccagtttaggaacccaggaagatgccggaaccttcctcaaacgaggccactctaggaaattgggaatttcacatatcgttagcactcagtcgacgtttattgg

SEQ ID NO: 148042 - DNA, 122 bp, Homo sapiens
ggcgaggggcggggggctgcctgaggacggggcctgggccggccgcgggctgggacgtggcgggcggggcggggcggggcggggcggggcggggcgaggagacgaggaaaaacgcctcggga

SEQ ID NO: 148043 - DNA, 122 bp, Homo sapiens
acagtggatgtgggaggacgggacagttacccggcccagggatcctgcacagacgcctcccggcccaaagaggcgagttttggaaacagaggtgatatttgcctttcaaggcagcagccccg

SEQ ID NO: 148044 - DNA, 122 bp, Homo sapiens
acgaggagaagccaaacgtaaagacaccaggagtttctcgggcccagctgtggctgctgccggggagccccaagccttggcgggtccttgcggcgaataggagtctggtcaggcgtcaggct

SEQ ID NO: 148045 - DNA, 122 bp, Homo sapiens
ggccagcatcacctccgcgcacagcccgggaagcctgcgtttcccaggtcgcgcagacggcgcaaagggggaaactccacctcgctcggctccgcgcctcccaaatgcacgcaaagggctgc

SEQ ID NO: 148046 - DNA, 122 bp, Homo sapiens
tctggccctcgcgcgcggggcgggaagtcttttctttgcagtccgtttgcttggggtgggcgttgggagggacgcttcttaggggtttgaagcgtcaggtgagggtggaaaacgcccattct

SEQ ID NO: 148047 - DNA, 122 bp, Homo sapiens
tgacaactagagcctaaataaatacctggacaagggtaaatatgacctcaaatttataaccgccctgaacgcagaacatcaaccgcgacagctgtggcatcagcggcgacagtaattttctc

SEQ ID NO: 148048 - DNA, 122 bp, Homo sapiens
cttatttttttataccccagcttttagcttgaaaatatacagattagccgggcatagcggcgggcgctataatcccagctacttgggtggctgaggcagaagaatcgcttgaacctgggagg

SEQ ID NO: 148049 - DNA, 122 bp, Homo sapiens
tgcagccagcctacttgacttagggatttacaaatgcattcgactccgacatgtgaaacacgacgtggcttctcccacacgccgctccgctgaaacatggcgcactcgtgggcggaagggca

SEQ ID NO: 148050 - DNA, 122 bp, Homo sapiens
cgagaaggaggtgcaggagctagactccgaggggaggctgcgagccgcaagcgcaggagccgggtgggagagagaccccttcttctgcaaatgaggaggccgagcagaagaaagacggcgac

SEQ ID NO: 148051 - DNA, 122 bp, Homo sapiens
ccgcctcctgcaggtggaggagaaccgccagtaccgcatgcacagcctgcagcacaaggccgccagctccatctacatcaactcacgcagcgtcttcctgcgcaccgaccagcccgagggcc

SEQ ID NO: 148052 - DNA, 122 bp, Homo sapiens
gcccgcgcagagccccacaccaccgtgaggatgggcttggagttcctcttggacccggggcgcggtcgctaagccagaagcggagtcgcgggcgcggggcggggcctggacccgggcctgga

SEQ ID NO: 148053 - DNA, 122 bp, Homo sapiens
taggaccgtctgagccaggtgcgggatagaatctcctggtgcgccgtttcctaagcccgtcggaaaagcgcagtattcgggtgggagtggcccgattttccaggtgctgtctgtcacccctt

SEQ ID NO: 148054 - DNA, 122 bp, Homo sapiens
atgtcccacgtcttgaaactctaggcttcttcccagacacctgggcttctggccttaatacgctagggtccaggacgggagaaacccaggctgagcgggtccggagaagatggggccttggg

SEQ ID NO: 148055 - DNA, 122 bp, Homo sapiens
catcctatatgcctagttcctggctgagtccaaagctcagtgtccagtttgattgacaggcgagaggctgtgcaggaccagatacgatgagccacactccagactagcaggaattttcctca

SEQ ID NO: 148056 - DNA, 122 bp, Homo sapiens
agcggaagtcactccctgaggcagtggcgacagcggcggcgagaggatgaacaacaagttcgacgcgtgagtggctcgtggccgcccccggggccccttccccgaacagttcccccgcgccc

SEQ ID NO: 148057 - DNA, 122 bp, Homo sapiens
gtggcttactgtgtccttttccctgcccaggtgctggttgccgaggagaacgtggacttccgcatccacgtggagaaccagacgcgggctcgggacgatgtgagccgtaagcagctgcggct

SEQ ID NO: 148058 - DNA, 122 bp, Homo sapiens
tcagggtagtgttcagactagcccacgctccggttctgagccgcgacggcggtctccgcacgcaacgaaatcaggcaggaccgaaccttgcgtcctccagtgcagcgagttcggaagcgacc

SEQ ID NO: 148059 - DNA, 122 bp, Homo sapiens
cgaactctcgatctcagatgatccgcctgcctcggcctcccaaagtgttgggattacaggcgtgagccaccgcacctggccaggggaacagatttctgtgtattttcccagactagaggtag

SEQ ID NO: 148060 - DNA, 122 bp, Homo sapiens
ccccttcctgcacccagccgccacttgccggttgctaagcagttatcattgtttctgtggcgattgcagaggctgttgctaattggagaagccccactaagcagcggcagcttcctgcttcg

SEQ ID NO: 148061 - DNA, 122 bp, Homo sapiens
cgccccgccctcccggcccccgcctgcgcccgcgccctgggctggtgcccgccaccccagcgatctcatactggcccctgggcgcacggtgaccctgcggctgcccggcccctgcctccgcc

SEQ ID NO: 148062 - DNA, 122 bp, Homo sapiens
aaaatcaatgggccgcaggaatgcaatctgtttaccggggtgtagctgctgtttctgctccgccacaagtccgaggcggttgtctggggcaggcaccgaagttgcgtcgcctccctccctgg

SEQ ID NO: 148063 - DNA, 122 bp, Homo sapiens
tccgtgtctgcagagttatgtccccaccgtgtttgagaactacactgcgagctttgagatcgacaagcgccgcattgagctcaacatgtgggacacttcaggtagccaagtccctgggggtc

SEQ ID NO: 148064 - DNA, 122 bp, Homo sapiens
gcggtccatgggtctggcctgtgagtctccccttgcagcctggtcactaggcatcacccccgctttggttcttcagatgctcttggggttcataggggcaggtcctagtcgggcagggcccc

SEQ ID NO: 148065 - DNA, 122 bp, Homo sapiens
ctgcaggccgcagaggctcagcggcgggcaggaggcggccgaggcgcaggcggagaggcgcgtcctgcaggagcagacggcggcgctgcgcaccgagcgggcgcgtctgcagggggagctcg

SEQ ID NO: 148066 - DNA, 122 bp, Homo sapiens
tgtggtttcccggttgcttattgggtggtcccgagagccttccttttttccttcctgaggcgtgccaagtcccctctcctcttctctgggtggtgctgacgccttcttcccaggctgcacct

SEQ ID NO: 148067 - DNA, 122 bp, Homo sapiens
ttttgggccagggctaaccagggtaaagtctgaatcaccccatgtggaatccgtctcctacggggtgtggactgtggggcatgaattccaattgcgctttccttacataactttgctcttca

SEQ ID NO: 148068 - DNA, 122 bp, Homo sapiens
ctgcaggttccagaagcagctctttatgccctcactgctgatcaaactattttttaaaaacgctcctatcatacaccacgctgcctaaagacaaggtacaggcctgggatttttgaaagaaa

SEQ ID NO: 148069 - DNA, 122 bp, Homo sapiens
cggcgggctgggggcggggagggctgcggggcagcagggacgggggcgcacctgggtgaccgggctttgcaggaggccggcgccgggcagcgcgtagagccagccgcgtgtgcagggccggg

SEQ ID NO: 148070 - DNA, 122 bp, Homo sapiens
ggcccacctcctcccatgacccacctgagacggctaggaattccctagctttaacagccgcgcgtttgacttacgaacgattcattctatgaattaatgcgccatgtctgacaagagagact

SEQ ID NO: 148071 - DNA, 122 bp, Homo sapiens
cactaacttatcccggaggtagggtcagctagggaggtggctgacacaccctggagggctcgccttggaggagctggggtgcacataattcaccctggactgggactggaacccaggacttc

SEQ ID NO: 148072 - DNA, 122 bp, Homo sapiens
cttggcttggcctctctcttagttattcacagctcagcccgataggcacctccggggcggcgacggcaaagagggtgcccttattaagtgcagctccacggggactggcctctctgcacggc

SEQ ID NO: 148073 - DNA, 122 bp, Homo sapiens
ttaaaaacaggtggcaccggcctgtagtcccagctactcaggagaaagaggcgggaggatcgcttgagcccaggaggctgggtagagcctgcagagagctatgattacactactgcactcca

SEQ ID NO: 148074 - DNA, 122 bp, Homo sapiens
attgagagggctaatagtgtccatactatctgtagttcagaagaatggacctcctcccaacgttcacacttgtgaaagagatggctgtgtgctgtgctctgcccaggtctgagagccctgcc

SEQ ID NO: 148075 - DNA, 122 bp, Homo sapiens
ccgctgtttcttccgcgagcttcctcccccgatttccatctcaggcagcggcagcggcagcgacagcctgcctaccccaggactccagcctcacctggcttctgcctcaactccgctcctct

SEQ ID NO: 148076 - DNA, 122 bp, Homo sapiens
ccacctagatcttgcccttcctttactctgcaccacttcagctgcatcctcagggtcaatcggtatgacattcagtcgcagagccttctgggtctcaggatgggctcagtaaatatttactg

SEQ ID NO: 148077 - DNA, 122 bp, Homo sapiens
ttgcagaacctgttgctatatcctttccaattatacagaaagcaacctatctcctttctgcgtcagattcatgaatcggctttaggaattttcaggcaccataaaactctgctaaatcactt

SEQ ID NO: 148078 - DNA, 122 bp, Homo sapiens
ggacctcaccaagcaccggcgcacgcacacgggcgagaagccctaccgctgcgaactgtgcggcaagcggttcacgtgcgtgtccaatctcaacgtgcatcggcgcaaccatgccggccaca

SEQ ID NO: 148079 - DNA, 122 bp, Homo sapiens
gactgctgcttctgcggtgagaaacgcgagaggtgggggatgctggggggatcttaaacccgagcccagtgagggcctcagcctgggccggtgccccccccaacacccacgggcagccccca

SEQ ID NO: 148080 - DNA, 122 bp, Homo sapiens
ctcgccgccgcggccaccacagacactgccgccgccggctcctctcagccacggaagctgcgggcccgcccaccacgcccgcctcccgtcctgaagactgtccgctggagaagtgacggcgg

SEQ ID NO: 148081 - DNA, 122 bp, Homo sapiens
cataccacccgacggcatttgctctgtgactgcctacgggttggggtacgttccctcccccgccctgccacttcgtggcaggcttcgtgtctctcaaagccacgcagggacattgcccaggt

SEQ ID NO: 148082 - DNA, 122 bp, Homo sapiens
ttcaagcagttctcctgcctcagcttcccaagtagctgggattacaggcacccaccaccacgcccggctaaatgttttttgtatttttagtagggaagaggtttcaccatgttggccaggct

SEQ ID NO: 148083 - DNA, 122 bp, Homo sapiens
ttgaagagctacttgcagacaacttgccagattgagcatgggggaaatgaggaggttgggcgaatgttgagtatttgctactcttttggacttgacatgaaaggaaagcaaagcaaaatgaa

SEQ ID NO: 148084 - DNA, 122 bp, Homo sapiens
ctttgaagttgatgtggtgtggtctttgagctggtggtgctaattactcttggttgttttcgtggcctccagtgacttcatcctgcttttgctattgtaaagtgttgtaatttatgctcctg

SEQ ID NO: 148085 - DNA, 122 bp, Homo sapiens
ttagtcaggggctctattaaactattgtttgtcggtgttgtccatgagaaatgagatgaccgttgaaagtgtaccatgccatcacactgataaggactgttatctgaaggtcaaggacagcc

SEQ ID NO: 148086 - DNA, 122 bp, Homo sapiens
tactcagaaaacgtcagtcggatcctggacaacttgcttgaaggctatgacaatcggctgcggccgggatttggaggtaagaagctgcatctttgctacacaaacacctgtagtttccttcc

SEQ ID NO: 148087 - DNA, 122 bp, Homo sapiens
gtcctgattctctcaccccagaacacaagaaatactcactgtctacactgtctgctgttgcggctggggatcaaccctgatttagatttgggtcttcctgatgcctctaccatttactggct

SEQ ID NO: 148088 - DNA, 122 bp, Homo sapiens
ctgcaagcgacgtcaggaccgcacatgtgcccccagggctcccgccgcgaactcagagggcgcccgaggcccggcccgcggcccctgagcctcagagaacccaagcccctccctgaaccgcg

SEQ ID NO: 148089 - DNA, 122 bp, Homo sapiens
aaggacctgtccctagactatataaagaactcttacaactcagcaataaaaagacaataacgcaattttataatgagcaaaaatctgaactgatatttcttctaaaaagatataaaaatata

SEQ ID NO: 148090 - DNA, 122 bp, Homo sapiens
gcaactacctacattgtttgatcctcatgaaagcagcactggctgagacgccagtccagccgacctccttccctgtctgtccctcccgggctcttaagcccctctctttctctaacagaaaa

SEQ ID NO: 148091 - DNA, 122 bp, Homo sapiens
atataccgtattctggccgtcttacattactgcaatattgcttccagatgggcaaacgcgcgctcggagcctggccctgcagacacgatggcccagcacgccgctcactgccgcgcctttgt

SEQ ID NO: 148092 - DNA, 122 bp, Homo sapiens
ggacagtactctgtggtcatggacttagtagaattatcttgttcacctggaggtgaaacccgtaactttggcctttacactctatgttttaactttcaattactatctggtgagaaatgggc

SEQ ID NO: 148093 - DNA, 122 bp, Homo sapiens
tttagatatcgtaattgctgtgacttgaaggacttatctagaaaaagccttaaaaaactacggtcagcactgggtgaatgggttgagggaacccacataaaatccccaagacacctgggagt

SEQ ID NO: 148094 - DNA, 122 bp, Homo sapiens
tcccgttttatcaaaagtgtcagcaaacacttccggtacaggccaaccaatgggaactgacgggcagggaaggggtctttgtcccccttgctaggagtgtcgagcgaccgggttgggggtaa

SEQ ID NO: 148095 - DNA, 122 bp, Homo sapiens
cattggctctgcgctttggcccgctcccttctgagccgagcagattggtggaaggtctgccgctctcggccaatgggtgagcggcaagccaagcgaggggcgggccccttgctgttcaaagt

SEQ ID NO: 148096 - DNA, 122 bp, Homo sapiens
aacagcctcctgtccatcctcttctcacatctgacgctgtgcccaaagcgagcactgagccgggccccaggagggaccaggaaacatttggagggctcaccaggtcccatcccaggggctga

SEQ ID NO: 148097 - DNA, 122 bp, Homo sapiens
gtgggcgtgcgggtgctctacgaccgtgaagggctccgactgtacctgcaagtggaccagcgatgggtggaggataccgtgggcctctgcggcaccttcaatggcaacacgcaggatgactt

SEQ ID NO: 148098 - DNA, 122 bp, Homo sapiens
tgggagagtgacaggatgagagcagagtggccccactggttgctgcttgggtagtgctggcgctgagaaataagggatgctgattgaggtggaggtgtgtttttgtgtagtatgactgaggg

SEQ ID NO: 148099 - DNA, 122 bp, Homo sapiens
gaggtaaggactaatcagtttacgtgatggggctgaacctctttgctcagtgtcagtcagcgtgagtccttgtccagaacggaggggcatatgaagaagcgtgtcaggagacagtagacctc

SEQ ID NO: 148100 - DNA, 122 bp, Homo sapiens
tgttaaaaacacgaagctaggccaggcgtggtagcttacacctgcttgagcccaggagttcgagaccagcctgggcagcgtaatgagacctcgtctctactacaaataaaaaaaaattagcc

SEQ ID NO: 148101 - DNA, 122 bp, Homo sapiens
tgattgttccctgttgcgggacattctgcgcctgaatgagcgggggctgctgtgtcgacgcggatttgccatatggttgcgcggagccaggaagaatgggcccctgtgtgtgcgaccgggac

SEQ ID NO: 148102 - DNA, 122 bp, Homo sapiens
tccgcacgcctgcccgccgccgctccagcccgcagccgagtggaagctccaccgggcgggcggggaggcgggttgcataatgccgggcactgccccctcattggcctcttgccgacggagcc

SEQ ID NO: 148103 - DNA, 122 bp, Homo sapiens
gtgtcccagcgtttggccatcattcctttcttcagatatatgtatttctcccctccaaaacgcacatttgaaacaggcacaccaaagcacggtgtcttctcacaagcccccaacctcaccag

SEQ ID NO: 148104 - DNA, 122 bp, Homo sapiens
ttaaggactgacagtctcccaccccatctgctcccatctgtccctaatttcatgcgcctccgcctgagttcctgcacgcatttcctgaataaacacacccctgtgccagtcagaacccgcgg

SEQ ID NO: 148105 - DNA, 122 bp, Homo sapiens
gagggtgggaaggaaggaaatggaggccgctcatcaaagcgcccgaaatcagcgcacccgcgtgtgtcctgcgtcgccccccaggccaccccaggactaagccctgccctctcaccggcgcg

SEQ ID NO: 148106 - DNA, 122 bp, Homo sapiens
atagaacatcagtttatgtcctgaaatatgttttcagaaaatagaaagccaagtatatttcgtaagtgtgctgaatgatttttgtttataattaagatttttgtatatgaatgtgaatacga

SEQ ID NO: 148107 - DNA, 122 bp, Homo sapiens
gcacagctacagcgagtcaggtgccagcggctcctcttttgaggagctggacttggagggcgaggggcccttaggggagtcacggctggaccctgggactgagcccctggggactaccaagt

SEQ ID NO: 148108 - DNA, 122 bp, Homo sapiens
gacccaattcaggttctaggctctaggccatcgggggccaggcccaaggcacagactcagcgccccacttctttctcttcccttgttgggtgttcctgagaatgagagggatctaatgatga

SEQ ID NO: 148109 - DNA, 122 bp, Homo sapiens
aaatctcaggattctgttatctgccgtcttagccaatgtgcagagtcaactccaggaaaccgggggaggctcaggattgaagttttaatctttgctgctgttttctaagcctgtttttatct

SEQ ID NO: 148110 - DNA, 122 bp, Homo sapiens
ggaataaactgcatgcaggtgtcagccagtctcctgtgacagggacactcggtcccgggtcggacacctcggccttaggccgtccaccaggacaaagaagggccgacctctggaaccccagg

SEQ ID NO: 148111 - DNA, 122 bp, Homo sapiens
gcacctcagtgtcacagcgaggaccacctgcctggtgctccaccaggacccggggtggaacgaagcagggtcaaagcaagccctgacaaggggaaggctgtcccccttagcctttggggcag

SEQ ID NO: 148112 - DNA, 122 bp, Homo sapiens
ttcttcagctggcaccttgaaactccgtgccaggtgagcaggcctgtggctgcaggttcccggaatctgtcgtgggttctgggttgtcccttccagtgcaggcggtggtcaccgcgccacca

SEQ ID NO: 148113 - DNA, 122 bp, Homo sapiens
agaaaggcatcgggcttcctaaggatatccgcggccagttgaaaggagcacaagaggctccgagataagacgaccagggccagaaagttcaatgcatcatttcaagattcgatgtcttggaa

SEQ ID NO: 148114 - DNA, 122 bp, Homo sapiens
ctcaaggaagagcaggctgatccctgaaccctgactcaggacttggacgccatagtggcccgggaccgagaccttcagcagttgaggctggggctagtggtcccagcagcccagcccccacc

SEQ ID NO: 148115 - DNA, 122 bp, Homo sapiens
tttctcagactgtgttttgggttatggttcttccacacttttgtgtgtggggaatgcgctcgttctttcctgtcatgttctccccagtctgagttctggctcctgcagccaatgctacttcc

SEQ ID NO: 148116 - DNA, 122 bp, Homo sapiens
ccaggccttagtgtagtccgactggccggtgggtgggggctgagggggctcaccctgagccggtggggccgcaggggccggtgcggggccggggacggggcccgggggctgctggtagtagt

SEQ ID NO: 148117 - DNA, 122 bp, Homo sapiens
ctgggcgccgtggaaccaggggtggcgctcgttggggaggctcgggtgcacaggagcccacggaggaggggaggctcaggcatggcgggctgcaggtcccgagccctgcccctcggggaggc

SEQ ID NO: 148118 - DNA, 122 bp, Homo sapiens
gtcaagaatttatcaagtgctttttctcttaaccaaaagattattcaagtagatttgtgccgcataccacagttaacaatgttctattttcctcacataaaaaagaaacaaattcattctat

SEQ ID NO: 148119 - DNA, 122 bp, Homo sapiens
ccgcccgccccctgcgcttgcctaccctctttttctccaacccagcagctgagctctgggcgcagcctggagcgcgtgagcacgcagcccggccccccgcacgagcacacacacacacacac

SEQ ID NO: 148120 - DNA, 122 bp, Homo sapiens
ttggcttttttgttcttggcagtacttgcgtggtgtgttgttgttaatcaataaataaaacgtgcagattgaagtattcatataactggacagtgtaacataaaatggtattacaggcatat

SEQ ID NO: 148121 - DNA, 122 bp, Homo sapiens
ttgggagttaatgtctccctaatgcagggctttatttttctttttaattggtagctgtatcggtgagtctttcagcacctgaattgaaaaccagcacatacgtaggaacatctagtttttag

SEQ ID NO: 148122 - DNA, 122 bp, Homo sapiens
atgcaaatctggagccaagggtggagactgagctttgcccaagccttcatgatgaatcagcgcattagctcaagaccggggcaggaagtgaaccagggtctgtgtgtctcagacagtcctga

SEQ ID NO: 148123 - DNA, 122 bp, Homo sapiens
caatttctggggcctttgactttctgcaaacaacctagtttggaactttttctgaggagtcgctgcggtttggtgttgccactcattgtagaatgcgtccgaccctgagatgtctgagatct

SEQ ID NO: 148124 - DNA, 122 bp, Homo sapiens
cctgccctctcccctaacccagagggaaagaggcgtggggagggggctgagggattaccacgcttggctggctggctttccatgtgcagagtattgaggccgcctaattgacagatagtaaa

SEQ ID NO: 148125 - DNA, 122 bp, Homo sapiens
aataaccatgcccgctagaaatcggttccccatagcctcacttaagcggggctaaaatagcggttttatactacggccattaagtatggtggaagcaggcagggattccctgttatgtctct

SEQ ID NO: 148126 - DNA, 122 bp, Homo sapiens
aagagagcagagggaatgagttggaggactggagggaaagggagaaggggagagagacagcgagacagaaacagacagaatgattctggaaagattaagaaggatgtggagcccccacagcc

SEQ ID NO: 148127 - DNA, 122 bp, Homo sapiens
gacctcaagatcaaatgacctgtgaggaatatgttgccttcatcctagctgctggggaagcggggagaggggtcagggaggctaatggttgctttgctgaatgtttctggggtaccaatacg

SEQ ID NO: 148128 - DNA, 122 bp, Homo sapiens
aggagctgcgggtgacgggaggaattgccgaatgcgaaaccccctcagtgcgttgagtcccggggagacggttctgtgggctgaagggagcgcttccgtcatcggagcccttaccagcctgg

SEQ ID NO: 148129 - DNA, 122 bp, Homo sapiens
agggtgcgggcggggcgcggggcaggctcagctgccctcagagtctgggctggggagagccggggcccacgaggcgtggcaaggcggggagagagaagctagacctccctgctgcgcttctg

SEQ ID NO: 148130 - DNA, 122 bp, Homo sapiens
tcagcacacaggcctcaaccggggctgtggatttcaacccagaagcccaaacttctcagccggcttaaggccccttccaactgccagtctgtaccacgacagcagtgctgtgggcacaatgc

SEQ ID NO: 148131 - DNA, 122 bp, Homo sapiens
tcctcatgtaggactggaggcagcaggactgacaatttctgcaatagaggtagggctgttcgttctttttgcaagaggccctacaaattccactgttacccatgcatcgaaggatgtggcgt

SEQ ID NO: 148132 - DNA, 122 bp, Homo sapiens
tggggagccacagaagtcgtactcccttaaaccgtgagtttccgacggtttgttccatggcgcgggattgtgagggattaggaacgaattctggatcgtgacttcggttttctcgccgtgca

SEQ ID NO: 148133 - DNA, 122 bp, Homo sapiens
ctctcggtgactggtgaccaggaggccgcaatctcttcacataaaaggtctacgggtttccgctcggccctcacagcggcagcggatcgaaccaggaaagcaattcccgctcggctcccctc

SEQ ID NO: 148134 - DNA, 122 bp, Homo sapiens
cttggctcattggcccagaaagccccacccagcaagggagagaggaacaaaagctgcctccgggaggtcctgaggcaaacagacaagcccaaggacaaggaagcagctactggacccaagaa

SEQ ID NO: 148135 - DNA, 122 bp, Homo sapiens
gaaggaggaggaagcccatagacccccaagccccactgaggcccctactgaggccagccccgagccagccccagacccagccccggtggctgaagaggctgccccctcagctgtcgaggagg

SEQ ID NO: 148136 - DNA, 122 bp, Homo sapiens
ttccagattaacttgtttctgggtgatcccagaatagaacctgtttctcttatcttttgtcgtgtgtttgggacacttcttacaaatgcatgcttgatgataaagatataattctacaccgg

SEQ ID NO: 148137 - DNA, 122 bp, Homo sapiens
gcgagacccccggaatctggataccgcctcggccagctacgtgaggtggacactgctgctcgcggatccggcgccagccaggcgggaggaggctgagggggggtaaagggaggcgggaaggg

SEQ ID NO: 148138 - DNA, 122 bp, Homo sapiens
ctcacaaacaccgcacactgctgggggcaagctgctggcttctcctgcctcacacagggtcgcttaggcctggtcctaccaggtcatcatccttctgggcagccatctccagagtgccttgc

SEQ ID NO: 148139 - DNA, 122 bp, Homo sapiens
ccgaccaggaaccccttgcgcccgcgccagctcgagccctgttgcacctgtcgtggtcaccgcaagcctctctgggagaaggcaggtgggaatgggagccttttttgtaatgggaatagaag

SEQ ID NO: 148140 - DNA, 122 bp, Homo sapiens
tggccatggcagggaccgggccggggaaggcaggggagggtgagaaggagaaagtgctggcggaaccggagaaggtggtgaccgagcctccagttgtcaccctgttggacaagaaggagggt

SEQ ID NO: 148141 - DNA, 122 bp, Homo sapiens
gcttgcggttacatcactccaatctccgcctccatgagcacactgcttcctccttttctgcgcgtcgtcttctctgtaatgggtctacttgtcccttacaaagacacttgtcacttgatttt

SEQ ID NO: 148142 - DNA, 122 bp, Homo sapiens
tctctgtgtccctccctcctggagtccctggttccttcctaaacggattagagcctttaccggaaggagccggccgctgtctggggcagccggggggccagggctagatggctgtctggtgc

SEQ ID NO: 148143 - DNA, 122 bp, Homo sapiens
tgggggcggggccgcgcagggccgttcccgccgccggccgcccgcgccccgcccccgtgccgcagctcacaggccccgcctcggtccgcccctccgctcgctccccaagccgccgcggcgcc

SEQ ID NO: 148144 - DNA, 122 bp, Homo sapiens
caaactcctggactcaagcagtctatccgccttggcctcccaaagtgctgagattacaggcgtgagccacttcaactagccaaggttgtaagtgttaatggagaaaagtaaaacagagaaga

SEQ ID NO: 148145 - DNA, 122 bp, Homo sapiens
ggagacaaagcttggagcctacatttacaaactgtcatgagccagccccacctagaagcacgctaagcttgttttagtcatctcatttctctctagcccatgggccaaccttattcctgctt

SEQ ID NO: 148146 - DNA, 122 bp, Homo sapiens
ggcaaatctacattaaactaagttgaatacaaagtcttagtgaagaaggcctggtggtctcgtttacaaaaatggccagtgtcatatttgggcttaaaatttcaagaagggcacttcaaatg

SEQ ID NO: 148147 - DNA, 122 bp, Homo sapiens
gacgctgacccttgagtgtgtgggtggggagctctgagacgcctcctgtcccacgctctccggtgtccgtgtctacacaggggtccccatgatacccaccggccccagcagggcagaccgga

SEQ ID NO: 148148 - DNA, 122 bp, Homo sapiens
agggcaggacggagggacagcgggggcggaccgcgacccgaccccgaccccggcccgcagcgccgctcttagccccggcccggcccggccagggatacccccaacatgtcaggaggcgcgat

SEQ ID NO: 148149 - DNA, 122 bp, Homo sapiens
cgctctctgcgcagggtgagctgtctaggaggcggaagctgtggccggggtggcagggcccggggtggccccccatgagccgggcacggagccgggcatagatggtacggaggccctgcagc

SEQ ID NO: 148150 - DNA, 122 bp, Homo sapiens
tggcccagcgggtccagcgccgcatgaggcactggctgggtgtgaggtggcgcgagccgccgccctccctgcccccacccgtcgtccctgagcaccaccgggggccggggccagcgccagcc

SEQ ID NO: 148151 - DNA, 122 bp, Homo sapiens
tcgcctcgcgccccgggtgcttcttacgggccagggcggggctagccgggggcgggggctcgggctcgccgggaggtctgccccaccccggccgcctcaggcctcagtttccccgtctgcag

SEQ ID NO: 148152 - DNA, 122 bp, Homo sapiens
cctgcacatggcaggggatggggggcggagctcatgtcacaaggcccatggggtgggctccgcagaggctgtagtgttccaggagaggggtgccatgaaagcgcggttagtagcctgcaaag

SEQ ID NO: 148153 - DNA, 122 bp, Homo sapiens
gggactccaggcccacaccactgtacccacctcctgccccttattaaagctgtgttctctcgtgcaaattacgtcgtctccttgagccccactgtccttgtctgtaaaatgggaataatgaa

SEQ ID NO: 148154 - DNA, 122 bp, Homo sapiens
gaccttcgggacttccacaagtacatgaggagccacaaggcagagtccagtgagctggtgcggaacagccaccatacctggctctaccagggtgagggtgcccaccacatcatgcgtgccat

SEQ ID NO: 148155 - DNA, 122 bp, Homo sapiens
ggctggctgtcaagcaatgggaggagtcgtgagaacctggatgacagcgggctgagccaccggcttggcgcggcggccaaactggtgggacagtgtctccaggtagtgaggcccaacctctt

SEQ ID NO: 148156 - DNA, 122 bp, Homo sapiens
gtcagccccaccccttaaccccgaggtcgctctccgccggtgtcccgtcgaacatcgcggcgcccagcctacatccactgaggacccactagccgcgtacgagcaaccaagtgggaggcggc

SEQ ID NO: 148157 - DNA, 122 bp, Homo sapiens
gcacgcacttccgaaagcgacatatctccctgcaggatcagtgacagggagacagctggccggcctcagaacgagctccgccccataaggactgcacggctgtcctgttagaaaagcaacgg

SEQ ID NO: 148158 - DNA, 122 bp, Homo sapiens
ccagccgtcccaggggctgcaccgccacctgctgagcagcccgggcagtcaggggtcctgcgccgcggggcccacgcacgggaccaggggcacggccggcggcgagtgggaatgagggacgc

SEQ ID NO: 148159 - DNA, 122 bp, Homo sapiens
ggcggccgggagggcagttggtggcggcgtggcctctttgtccccgtcagcccgaggcggcgctggtgcccacccggcctccccgtggcccagccccgcgcctccgccccgggcagcgcgca

SEQ ID NO: 148160 - DNA, 122 bp, Homo sapiens
gctggttggtcggccgagtggcagagggtggggcggaagagcagatggggacgggaaaggcgctgtcggtgacatcacagatagggcgattcctatgcagaggaggcagctcaggggctgct

SEQ ID NO: 148161 - DNA, 122 bp, Homo sapiens
accccctccaaggtctaggcccccatggtggggcttcaggggtgtttaaattcccaggagcggaaaccctggacttcacctgcctttcgccggctgcccttctcacccttcacgtgagggag

SEQ ID NO: 148162 - DNA, 122 bp, Homo sapiens
tggctggtttggaagcgggaagtgtcaacaaaagtgaagagtctcacaaagccagtagctcgggagaccccaagagcgggccagaaacgacctttccgttggaaaacgggcccctctcccac

SEQ ID NO: 148163 - DNA, 122 bp, Homo sapiens
cttcggcttctcagggcgctgacgacgacggcagtcgtaggaagccccgcctggctgcatcgttgcagatcagcccccagccccgcccctggcgaccgctacccgcccaggcccaaagtgcc

SEQ ID NO: 148164 - DNA, 122 bp, Homo sapiens
atctgcccacctcggcctcccaaagtgctgggattacaggcgtgagccaccgtgcctggccgcccaggcctgtgtttttgaatatccagcagaacattagaaaatgttgcaggtcagttcac

SEQ ID NO: 148165 - DNA, 122 bp, Homo sapiens
caggttggctgtgatgacagcacagagctcaggaacgctgcctgaggaccctggggcctacgaggaggagaagagggcaggagctggtggggtgcttgcagagaccctgggctcctatcctg

SEQ ID NO: 148166 - DNA, 122 bp, Homo sapiens
cggagcccacgccagtgggagaagcggccccgccccgcgcgcgagtccccggaggacggccgcgacctcttaccgtccatggccacaatgacaggagcagcactcggagagggagaagggac

SEQ ID NO: 148167 - DNA, 122 bp, Homo sapiens
gctcccagctgtcctcctcctcgggctcatcctcctcatccgtggcgcccgctgccggcacgtgggtcctgcaggcctcccagtgctccttgaccaaggcctgccgccagccacccattgtc

SEQ ID NO: 148168 - DNA, 122 bp, Homo sapiens
ggtgaagctcgtatccaaggccagcgctgaggacgcagcatccgggtttcttcctggtaccgtccccaccaggtcctgtctttttccaacactgaacgctatcacatgcttgagtttttcta

SEQ ID NO: 148169 - DNA, 122 bp, Homo sapiens
gaagcagcagtcggaccgggcgcctgcggctggcgcgaaggaggctgggcgggggatgaacgcgcccagagggcagaggcggcgcggcacagggaaacccggaccccacgcgccccgaggcc

SEQ ID NO: 148170 - DNA, 122 bp, Homo sapiens
ggggcggctgggtggtggccattgggcgacggcgcagggtcaagggccgggctctgggatcgtggggagaccgggggtcccggagccccccagccccgcaggccactgcctcgccgcccgac

SEQ ID NO: 148171 - DNA, 122 bp, Homo sapiens
cctcctaccttccgtggtaagtaacaccaccaaagagatctgatgttggggaggttcccacgtacttctaggtgatacaaaatagttatttccattcccggaaatcctcctgcaaggatttc

SEQ ID NO: 148172 - DNA, 122 bp, Homo sapiens
gccagtcaccatttgcttgttaaccccttctgaagaagagctgacagcaaccttttagtgcgagggccattcgtcctgctgcatcccagaaaactaatctgttactacttcagaattgctgg

SEQ ID NO: 148173 - DNA, 122 bp, Homo sapiens
tagagacagggtctcactatgttgactaggttggtctagaactcctgggcacaagctgtccgcccgcttctgcctcccaaagtgctgggattgcaggcgtgaaccaccgcccctggctacag

SEQ ID NO: 148174 - DNA, 122 bp, Homo sapiens
tgcttgaaagctcccaccttttcctattaaaacaaaattcaggccaggtgcagtggctcacgcctgcaatcccagcactttgggaggccaaggcgggcggatcacttgaggtcaggagttcg

SEQ ID NO: 148175 - DNA, 122 bp, Homo sapiens
cattctcctttccctcgctccctccaagccccccgccccaaccctccagctccgggcctccgagttcctgagttttctcactttgaggtgccaccgaacacaaagaaccataatgggctcct

SEQ ID NO: 148176 - DNA, 122 bp, Homo sapiens
gggagcagcgcctgccgagcagccgtgcccggagcccgccccatgcaggagcagagggagcgctgccgtaaacagcttcggcaacaatgagataaaggaagaggaaaatgggatgggggtgg

SEQ ID NO: 148177 - DNA, 122 bp, Homo sapiens
tgcggtgacttggggtggcgggcggggggcggcgggaggcgcggagtcgaggagttcccgcgtcgcgagcatgcttgagagccgccggctcagctccgggctgtaaggttggttcctggcaa

SEQ ID NO: 148178 - DNA, 122 bp, Homo sapiens
atggcaggaggtagagcgcagggggaaggccgggggcatgccggaggatgaggctgagcccgagcccagaagagaccctgagttgatcagattctgcccacacaccatttatttgttttgag

SEQ ID NO: 148179 - DNA, 122 bp, Homo sapiens
tgccccttcccagtctcctttgctggtctccctacatctccccagtcccaccgctggaggcgcagggctcagaccttgaatctcgtggctcctagcctcattcattcactcgaagagcacag

SEQ ID NO: 148180 - DNA, 122 bp, Homo sapiens
ctcggaaatttctggagcaacgacctgactcgttgttttctccctttcaggttttgaagccgcttctctggccgagttaggtttcgcccagcgcaatttctttctctatgtactttgcgaat

SEQ ID NO: 148181 - DNA, 122 bp, Homo sapiens
agatcttgcccattcatgatccacactcctctgtttctccgtgggcaaagaaagcaatctcgctattctctgcccccttctcccatcacccaatcatgtgtcccgccttcccagtcctcaaa

SEQ ID NO: 148182 - DNA, 122 bp, Homo sapiens
cctgtgcgagatgtgggtacaagccttttcatgtctaccactgagtcccgtgtgccgtttcgtgagaggctgaggcaccgcttcattccaccgctgagccccgcgtgccgtttcgtgagagg

SEQ ID NO: 148183 - DNA, 122 bp, Homo sapiens
tccctcgtccattgcatcactgcttacggagagcaacctacagaccagctcctgttagctcgtggtcctcaaggactcagaaaccaggctcgaggcctatcccagcaagtgctgctctgctc

SEQ ID NO: 148184 - DNA, 122 bp, Homo sapiens
tggcttctgtgttcagagtggaattggcaagcagctgctatgttcggagctgactgtgttcgtcagaccagggccagatggacgcgtgaaggcgtgtgtctgacagatgaccgggtctttta

SEQ ID NO: 148185 - DNA, 122 bp, Homo sapiens
ggaggctaaacccgagtggagaaggagacctggcaggatgccttggacacccggtcgctacgcagcagaagccaagtgcataggcgtcctgcacagaagagtttcctcccatggccttagca

SEQ ID NO: 148186 - DNA, 122 bp, Homo sapiens
tctccccggtgtgctggcgcacgtgggcgatgagggagctggcctgggtgaaggccttaccgcacatcacacactggcatggcttctcacctggggaccgggcagaaggtgttggtgcctgc

SEQ ID NO: 148187 - DNA, 122 bp, Homo sapiens
tttccctccatctttcaagtatctttggctccctaaaagcttgtcccctcccaactctgccgtggcaaagcccccctccaccaggcacttcgggcccgcctcctccccgttgccctagggac

SEQ ID NO: 148188 - DNA, 122 bp, Homo sapiens
ggggggattcactgatggactggccgagaggacacttagcttccacagctgcacgtcccccggctgccagaaccccgcatctgcctgcccaggaaacttccacaggctgatggctccagggg

SEQ ID NO: 148189 - DNA, 122 bp, Homo sapiens
acgggcctgcagctctgagtagagctcctcctgccgggcccgagcagccttttctgagagcggcagcaggctcagcccggtcagctggtcgggccggcaccgctgctggagctcgccgtagg

SEQ ID NO: 148190 - DNA, 122 bp, Homo sapiens
ggttctacaagcctggcttttcctatagagaaccctcttataagcaaaaagtaaagctctcgtgaagagcccggatagctcagtcggtagagcatcagacttttaatctgagggtccagggt

SEQ ID NO: 148191 - DNA, 122 bp, Homo sapiens
gcctgtcagccccgctgtcagaggcctaatctttttttcttcgcggctgaaaaggcccagcgccacatcaggcgacacacggctgcctattctccttccccgcagaacccaatcactggaca

SEQ ID NO: 148192 - DNA, 122 bp, Homo sapiens
atgaaatccccacagttctttactagcacaggacagccaccagttagcaagggattcctccgacccaggtgccatcctaagtgctctatgtgggccaactcatgacaatactgtaaggtatg

SEQ ID NO: 148193 - DNA, 122 bp, Homo sapiens
ttggggagagaaggagactttgagagacaggctcaaggttgacaactctgggaagaccctcggccccctgtgcagaggctgttggtagggaggaggctggttcagtggagttgggtccccag

SEQ ID NO: 148194 - DNA, 122 bp, Homo sapiens
ccgctggtagcctttgatataattggtccatttgaagagccagccctctcgagccgagcccgaacccccagcgcccgagccgcccgagcccccagtcggcggcgcaggggccgggccagccg

SEQ ID NO: 148195 - DNA, 122 bp, Homo sapiens
gactccaacactgttgcatggtggaagaagatttatggacagaaaaaggacagtgatgtacggaaaacagaagtgagatataaaaacagcttgattggttgagtgtattatttgaacagttg

SEQ ID NO: 148196 - DNA, 122 bp, Homo sapiens
cccttcagctccccgaggtgtcatagcacaagcccatttccctcgccgtctccccagacacggtgccctcgtacctcactgcctgagagaagtagaaggttggacatcgctgccttcctcct

SEQ ID NO: 148197 - DNA, 122 bp, Homo sapiens
cgtggcagaggaacccgcgggcacgtacgtgctgggctcggaaatgaaccgatttccgggcgctcttgtggtggggctcaaggtctcaggagttctgtccttcccagattgcccacaaggag

SEQ ID NO: 148198 - DNA, 122 bp, Homo sapiens
gtctgctcaccttcacaaaggtgttgacggccataatggccatgtcaggctgactcttggcgtaattcatcaagtagaggtatactagcttcttcagctccaggttgtccgtctgcatgcag

SEQ ID NO: 148199 - DNA, 122 bp, Homo sapiens
ttaaagccaaccctttgaacttgagccaaagccagcttctttggaattttggattctgagcgaccaaaggctgcctagactgccccccatcacttccctagctcctgttgctgcagaatccc

SEQ ID NO: 148200 - DNA, 122 bp, Homo sapiens
gagaaggagtctatgtgcccagcattgttctagagcacttgcaattagtggtgaacaacacggtctctactccaaggggctcacattcttgtgcagaaaacagaaatgaacaaataaacaca

SEQ ID NO: 148201 - DNA, 122 bp, Homo sapiens
gaaaaatgcagaactggggagacgtgccaggaggctaccttagctgttcaggtgagaagacgctgtcctagaaaagggtgtcgggaacaagaaagggaagagggtagagtggaggcgagttt

SEQ ID NO: 148202 - DNA, 122 bp, Homo sapiens
gggcagaaaaaaactgtagtagttgaaaaacaccactggctaaagatagtcatctcttttcggtttcctgttatgtcacagcacttagatatctgatgtttcagcagattaaaggaggtgta

SEQ ID NO: 148203 - DNA, 122 bp, Homo sapiens
atgggaaggaagagagagtggtttggtgaaggaaccttggttctgacactagctctctgccgaccttggactggtcatgtgaaaaactcttcagacttcaataccccccgagtgtggaaaag

SEQ ID NO: 148204 - DNA, 122 bp, Homo sapiens
acctcccaacagcacacctagcacaccgaggcacagagcagcaccatgccatccttgtctcgtctttctatcgaacccacatgcagagtgcctgcaagtcaagctggctttcccttcagaac

SEQ ID NO: 148205 - DNA, 122 bp, Homo sapiens
cttggagctctagctccgactgcagactctgtggttctcacaaccacccgtttcctctgacggcatcacagaccgtcgaggagccaccttccccaagttcctgtttctaggggagcagctgc

SEQ ID NO: 148206 - DNA, 122 bp, Homo sapiens
ctttgcccccaaaccggcctcccggctctctgtagtgggctgctgtgtctttgcattcctcgtggggctgttgttcgtccagcgctccggaaactactttgtcaccatgttcgatgactact

SEQ ID NO: 148207 - DNA, 122 bp, Homo sapiens
tttggctactatctgttcaacagaaagtgctcactaaaaactttctgcatgtccaatgaacgtttcatttaaccatctcacaaactagaaacacaatggagagagcctaatctttccctgtt

SEQ ID NO: 148208 - DNA, 122 bp, Homo sapiens
cagctttctgatgaattccctgaagctcacgccacacctcgggcagaaagacagctgcagcgggaaaacatggacgaggcaatttgttcaacaactccgggggaagaaaatgcagacttcta

SEQ ID NO: 148209 - DNA, 122 bp, Homo sapiens
aaggtggacaaattggaacgcttgtgcactgttggtgggaatgtaaaatggtgcagcctccgtggaaaacagtgtggttaatatcactaaactgtagacctaaagtgattacgatgatcaat

SEQ ID NO: 148210 - DNA, 122 bp, Homo sapiens
cctcccctcagctccgccctggcccagtgcgcctgcgcacctcttccctccgtttccccacgtgcaggtgaggggagcctgcttctttactccacacacgagaacagttggtcagtaaagat

SEQ ID NO: 148211 - DNA, 122 bp, Homo sapiens
attgatctttgatagaagaatggaattttgctcagttttatcaagagggaagagcagacacggtagttttgaatatttggtggaaggcagatctctgatctcacttaccaaatatttattca

SEQ ID NO: 148212 - DNA, 122 bp, Homo sapiens
aatgacaactccatgaccttacatgctgccaaacattgattaagtagaaacatgagaaaacggccccctgttcaatcaatcttactggagtttttcgaatgatcacctagggctgtttttac

SEQ ID NO: 148213 - DNA, 122 bp, Homo sapiens
ggctcctgtgcggaggaccttactgagcccagggctttccagctccaggaaactgggaggcgggaggaaaaggccggtcaccatcgctgtgcttggggtaggggtcagagaaaggcaagagg

SEQ ID NO: 148214 - DNA, 122 bp, Homo sapiens
aagcaaattctcccagacacgagaactgggtagagcagggggttccaaatggctgcatagcggtcatatgccatcatggccaacaggaagcactcagtccccaggaaggagccaaagaagta

SEQ ID NO: 148215 - DNA, 122 bp, Homo sapiens
ggcctcaccaccttccgggagaggctatctgtggccagggcagcctatctcggccgcaggcgctaatcaagctggcttcctcctccgccctcccacccggcttcctgccccggccatccccc

SEQ ID NO: 148216 - DNA, 122 bp, Homo sapiens
gggctcagcacctggccttgcagccctctcctggcctcccgcaggggcctccctgccctccggctggaacaggtcaggactctcaagccaaagcctagagagctactgctcctccctctcct

SEQ ID NO: 148217 - DNA, 122 bp, Homo sapiens
ggctctacggatggaattattgatgttgtagcaacattttccttctcctactgtgggtctcgggaaatagcccacttcttctgtgacttcccctccctactaatcctctcatgcagtgacac

SEQ ID NO: 148218 - DNA, 122 bp, Homo sapiens
gacttcacgtggacgttcttctccgtagggcccggtgccgttctccatcgctgctgtattcggcagccctggagactgccactcgaaaaaccgggctctagagagcacccgggcggagcgga

SEQ ID NO: 148219 - DNA, 122 bp, Homo sapiens
gggcctccgccggccccctcccccaggcggccccgcgcgcccttggccgggccccgtgcgcgcccgctcgcctggcgcctgcctgccggcctctcccagccgggccccttcccgccgccgcg

SEQ ID NO: 148220 - DNA, 122 bp, Homo sapiens
gtggtctttcggactctgggtctatctgtgcaccctttccatgctgttgtggagggtctgcgtcaggggcgggggcagccgacttcgatgggggtccagccccacggtgatcggtggcctcc

SEQ ID NO: 148221 - DNA, 122 bp, Homo sapiens
aggagctgcaggagggccgcatgcggaggctggctgggcaagaagtggagggcctcactccgcctctcctggagtctccaggctggcagggctagagcctctctgcatccgcccctgatcag

SEQ ID NO: 148222 - DNA, 122 bp, Homo sapiens
gtcgcctgctgtcaccggccggggatctcggggtctcccgagccaggctggggagcctcacgatctgagggaggaggcagaggtctgatgctgcggcttcccccacgccccctccctttggc

SEQ ID NO: 148223 - DNA, 122 bp, Homo sapiens
ccagccactgctccaggactttgcggctggctctgtgtcctcaccctgcgtgaggacagccggcagagacagaaatgatgcttggacgctatggtggccaaagcccagcgcggcaggtcctt

SEQ ID NO: 148224 - DNA, 122 bp, Homo sapiens
caggagccagcatacttcctgaacatggagagtgttgttcgccgctgcccattcttatcccgagtcccccaggcctttctgcagaaagcaggcaaatctctgttgttctatgcccaaaactg

SEQ ID NO: 148225 - DNA, 122 bp, Homo sapiens
gcgtggctagtccgggggcggggcctatggtttgttcgaatgacgtcacacttgccgcagcgtataaggcgctacgcagttctggagtgaaataggttcgaatcccaccactgtcaattcca

SEQ ID NO: 148226 - DNA, 122 bp, Homo sapiens
ccgaggccggcaggaaatccctttcccacccctcgggaacggaaccgctctcattcgcgccggtggtcaccgagaggttggaaagagacttagagggcatgatctcctttccagcagagtcc

SEQ ID NO: 148227 - DNA, 122 bp, Homo sapiens
ctctggcatctcgggagacgcggtccttaaactccgtgtcctgggggcgggcccgggtggcgtggcttggctggacagggagggtaggggcggtagtggggtttgtggcactccagcgtagc

SEQ ID NO: 148228 - DNA, 122 bp, Homo sapiens
gtcggctgggaggcctaggggctgtgcagagcagcaggcagtggaagccacgaaccaccccgctcgcccacactagtccctgacaagtcattagaattcacgtctgcgcaggccctgaggct

SEQ ID NO: 148229 - DNA, 122 bp, Homo sapiens
tcggacctgggggagccggggtgtgaggggactggaccagcttggactgagacctgagaccgggccggtgggcgcccatttgggactgcgccacccccaggcttgttcttgttttactgtat

SEQ ID NO: 148230 - DNA, 122 bp, Homo sapiens
aagaaaaatggtagagtaaattacagggcttggactggagggcggggggcaagtaggggacggtaggactcaaactattccgagattggctagggactctacctttcgctaagggatagggc

SEQ ID NO: 148231 - DNA, 122 bp, Homo sapiens
gcccccgaggtgccactcggccccgacacgaggcagcaccatgctcaatgcagtcagcctcgcaggtgtcgagagaggaaattgcaaaggaaaatgagaattcgatgccttttctgtaactg

SEQ ID NO: 148232 - DNA, 122 bp, Homo sapiens
tggtacatggttaaggagggaggggaaacaaaagcagtgtgctccaccaggctcctgcctcggctctaaggaaacagaggaaagcaaacgggaatactctggtttagtatactgcccgcttc

SEQ ID NO: 148233 - DNA, 122 bp, Homo sapiens
cgggcgtcgtgggagcgcgtgacaatgacttcattgagcttcacagcagtgtgcatgcgccgcacattggattggtccctacacgtagtgtagccagtcacaggtcgccatgagccatcctg

SEQ ID NO: 148234 - DNA, 122 bp, Homo sapiens
cgcctcgctggatcaggagcacagcagacaccctgctggatctggagggttggaagtcagcggcaggtctgccacggtagcaaacggcagtggtggacggggagcgaaagctcagctcgagc

SEQ ID NO: 148235 - DNA, 122 bp, Homo sapiens
ctgaaaaatccacccctcaagaacccactccacacaacctttccttttcagtacccaccacgctctgactagcatctctgtgatgcctaaggcaaatttttgaggatctgattggtttagtt

SEQ ID NO: 148236 - DNA, 122 bp, Homo sapiens
aggaagtcagcaggaatctgccttaagttccctacctccagaccctgttctcctgcctgacgtggacacggaccaggcgagagcccgcaaagacccaggtggcccggcgccccgcgtgggcg

SEQ ID NO: 148237 - DNA, 122 bp, Homo sapiens
tgcccagtaatctaaggaaatttgacaaaacctctgaggagtccttgagatcaaggtggacgatacagaagccccgtgtctccaaggaactccctggtatacctcgtccttgccaggcagct

SEQ ID NO: 148238 - DNA, 122 bp, Homo sapiens
tcctaaccagctgctggggaaggtgtggggaaagcgaagccccctccccttgcgccttcccggagggccctcctgttcacgatcaggctgtgatgggcattgcgcccagatgtgctgagctg

SEQ ID NO: 148239 - DNA, 122 bp, Homo sapiens
cacagagcatggtgaaaaaggcaagtttattagaagctattccattacagagtagggtgtcgtcagaaagcaagcagacaaacacaccatctttgttttaagtttttaggggtcttgtctac

SEQ ID NO: 148240 - DNA, 122 bp, Homo sapiens
cctctcacccccgagctggtttgcggagaaagtccttgagaaacagtgctgggcaaggagcggagcttcggtgaaccgcagagctcctgatcagcaccatggagagcgtcgtcgcctgcagc

SEQ ID NO: 148241 - DNA, 122 bp, Homo sapiens
caaagacggcagccagagctgatagggggagatgtctttagaactgcagactcctggagccggggagaaccttggagagcatctaaaatagaaagcagcacttcagcatgcaggagaggtct

SEQ ID NO: 148242 - DNA, 122 bp, Homo sapiens
cgtaacaattcaaaccatgaagaggtaacagagcccttcgcgcgtctcaacacgtggtgacgcagctaataacctgtgatgcatacatgggaacaaatgcatagaaaaacttgtcaatgaca

SEQ ID NO: 148243 - DNA, 122 bp, Homo sapiens
cccagaaggcgcaggtccgggcacattcagcgatgcggtccagatggggtgcgggtggggcgcaggccgccgccgccgccgccgccgagtccgttagctcgcgacgtgcgtgaaaaggcggc

SEQ ID NO: 148244 - DNA, 122 bp, Homo sapiens
cccgccccgagtgcaggtgtgtgtgaggtgcccgggacaggtcattgcagagaggagacccgggcaagtgttcctgaaccttccacgtctccgcctggctttccatcggcagcacggaagtc

SEQ ID NO: 148245 - DNA, 122 bp, Homo sapiens
gccttcacgccttggaggcagtgcccaggcagtgggggctggcactggagcaccatctgccgtctgcaccctcgcggctcccggctcggtctcctttctgccttcctgcgggtctctccatc

SEQ ID NO: 148246 - DNA, 122 bp, Homo sapiens
ttgtgaggttctgccaggcgcacacctatgccggcggcctccaagacgtggagatcactgcggcgctttctcgccccgccccggcccctgcaggccccgcccttggtcatgaatatttaaag

SEQ ID NO: 148247 - DNA, 122 bp, Homo sapiens
atcggggagcccacggtggggcagcctgtgctgctcagcgtggggcatgcactgggtccccgaggccctctcggcctctttaggcctgagccccgtggggcgtcaccaccgggaccccaggt

SEQ ID NO: 148248 - DNA, 122 bp, Homo sapiens
ttttgatcagaatcagttacgttttcttgagattgggattggtacaacacttaaagagtacggactctggatgcaggcagcctgtgttcagcatcatggctgtgcttttaattaatggcatg

SEQ ID NO: 148249 - DNA, 122 bp, Homo sapiens
tagcatctgccttacagtagatctaagtattggcttatttaagtatattactggatagcacgtggtaggtagcctttttgtccaaggcaaacatacagcgaaccttaaagtaaaacctcaga

SEQ ID NO: 148250 - DNA, 122 bp, Homo sapiens
agccctgactctcccctctccttcagactttttgcccctggaggttacccaggatccttccgtgggcgaaaatctcagagcggcgccagccccaagttcagcctcagcccaagtcttaactt

SEQ ID NO: 148251 - DNA, 122 bp, Homo sapiens
gtccaaaattctctgtatttcattgcatgtgagcatgcttcattgcaacccataatgaaacgctcaaatttacaggcactactaagtgtttcagtcaagcagcacaatctttaaaaaataac

SEQ ID NO: 148252 - DNA, 122 bp, Homo sapiens
cacgcacctccccctgggcccgccggctcatgttctgtggctgggcgctggtgacggccacgcaggacttgcttcggctccacagccagtggctggcctcctcggcccgcggacactcggcc

SEQ ID NO: 148253 - DNA, 122 bp, Homo sapiens
acacaacggggaggccagggcttctccagtggccgcagcgaggcccgcgggccagctctgcgtctgtcttcctggcagaggcccaggcacacagcagcgtcccggcgctgcctcctgtcttt

SEQ ID NO: 148254 - DNA, 122 bp, Homo sapiens
cctcgtcctgctcttcgtcgccgcggacccacgagagcgcgtcggtggagcgcatggagacgctggtgcatctggtgctttcccaggaccacacaattcgccagcaggtgcagcggctccac

SEQ ID NO: 148255 - DNA, 122 bp, Homo sapiens
ccagggcggtcgcgactataacaaatggccgctcttgtggggatgctgagcccaggggtgcgggggaaccctctgtaatttatgttctattttgctgtgaacctaaagctaatataaaaaat

SEQ ID NO: 148256 - DNA, 122 bp, Homo sapiens
agaacacaaccacttcaacaggtggccttaataggtcctgtctgaagggcagaagctagccgactccccagctcatggagcagccaaggggtattgggatacacagtctcctatggtgaccc

SEQ ID NO: 148257 - DNA, 122 bp, Homo sapiens
cctaaggcgtcgaggtccaggagcgcaggccagggacggaggtggtgggggcggagacctcgtgcgctgaggcccggacccacggacacaggcgacagaagccaagacatcaggcggccggg

SEQ ID NO: 148258 - DNA, 122 bp, Homo sapiens
tttatccaccaagctatgctctattagggcgccaggcgggcgaagcaaaggcagggatggcgggcggggcggcggcggaggtggaatgggcgcttttttcttccatctggctttatttattt

SEQ ID NO: 148259 - DNA, 122 bp, Homo sapiens
ctttttaacgtaattcaactccccacccccagcgccaagtcttaatatcagagttttagtcgacgggacagcctccttcgcccaggacgggtgaaggctcctgaccatgcctcgcagctaac

SEQ ID NO: 148260 - DNA, 122 bp, Homo sapiens
atgatctttccctccagagtattactctggattggatgggagcaaaactggagaaaggaccgttaggaggctgttgcagcaatccagctatgaaacatgtaagaggtagttaacaagtgaga

SEQ ID NO: 148261 - DNA, 122 bp, Homo sapiens
cggtggtggtgagatcagcccaggggtttgggagctttcagcggggcttgcctgctccctcgtcccttcttttttgaggggtacttttcattattaaaaaaggcagaggaggagaaacctaa

SEQ ID NO: 148262 - DNA, 122 bp, Homo sapiens
tgtgcagaccttcccgtccttgaacacccgcatgaattctctttgggaacattgagtctacgtctgtcttccaaactcagtttttaaagtgagggtgttcattgtgtgtgttcacagctccc

SEQ ID NO: 148263 - DNA, 122 bp, Homo sapiens
agttctgaagtttgacatgcccagaagctactgaatgccatgtggggcccccatacactgcgtacctcagttttcatcatctggtgagcctgcagcaggatttccaggcactggagtcgaca

SEQ ID NO: 148264 - DNA, 122 bp, Homo sapiens
aaccaccgatgagctcgctgctgttctcaagcctgaagagcctgactttctcagcccttacgtgagaccctctgggcactcccacagccgatcactcctcattgcacactgtgcctgcttca

SEQ ID NO: 148265 - DNA, 122 bp, Homo sapiens
tccagccccaaatgattttatatgaacactttgaggaaattaaagagaaaaaataggtatcgagagaaaagcacatcctatcacacagtcaggcacagttcagttgagttccacgggctttc

SEQ ID NO: 148266 - DNA, 122 bp, Homo sapiens
ggccgcccaggacgtgcggtcactggagagcccccagccacgcccctagatgctgctgggcggcctgcaggagtaccaacattgcagacagaacagcgacctatcccgccgtaagccaaagt

SEQ ID NO: 148267 - DNA, 122 bp, Homo sapiens
tttatctagccccgcatagctcctagaagcattttcctaaggaaagcaatcactcgctgacgggtttagttttgttgtttttgttttaaagcattcaccaaaaaaaaatctctatggaagaa

SEQ ID NO: 148268 - DNA, 122 bp, Homo sapiens
gtggcagggatgagggttcatttaaaccccggaggggagggcactgcctgctgaccctggcgtccaggttccacctggcatcacccgtgttatcactcccggttcaaggctgaactaccaac

SEQ ID NO: 148269 - DNA, 122 bp, Homo sapiens
cacttttctcattgttacacatccatctctctagagtgtcttcacatagatattccctgacgtgagtttttttttttttttttttttttttttgagatggagtctcgctctgtcgcccaggc

SEQ ID NO: 148270 - DNA, 122 bp, Homo sapiens
gcaacgtggtgggtgaagccggtgtcagagaggcggggcctacagggcccacgtgtcaggcggttggaatagcttcagtccaggtctaggagctggtcctgacaggatgttaagaccagccg

SEQ ID NO: 148271 - DNA, 122 bp, Homo sapiens
gccgtctcagagaacgaggctgagctggctcccaatgccagcaaccacatggctgtcacccggagccggaaggagggcttggccagtgccaccaaggactgcagccacagggaggagaaggt

SEQ ID NO: 148272 - DNA, 122 bp, Homo sapiens
ctgtaggcttgctgcacacggtctctggcttttcccatctgtaaaatgggtgaatgcatccgtacctcagctacctccgtgaggtgcttctccagttcgggcttaattcctcatcgtcaaga

SEQ ID NO: 148273 - DNA, 122 bp, Homo sapiens
tgcccttaaaaataaaagaaaaaagcaaaacaaaacaaacagccaataaacaaaaccagccgaaagaccacagaatgaggcatgacattctaaacggaatatgaccaagcactaaaatgtac

SEQ ID NO: 148274 - DNA, 122 bp, Homo sapiens
aatccattcggagctctggctcctcctcctctgtccaaagcctgtgtttcagacattgggcgagggggtagaggatcagggaggaagaaggcaaggacacaagaggaggggaatctggtgac

SEQ ID NO: 148275 - DNA, 122 bp, Homo sapiens
ggactgagcaggagtccgaggagggccgagacctgggtctgcagtcagcagagaaaccggcgtaggaagagggaaaagtaggcccccagcgccccgccgcccacatctggcccgccaagttc

SEQ ID NO: 148276 - DNA, 122 bp, Homo sapiens
tttgtgtgagtatctgacccaaattagtggcaattaccttctctgggctacaccacactacgattgttaacattgcaatatggcagaaatttcagaataccaaatgttcagctaacagccac

SEQ ID NO: 148277 - DNA, 122 bp, Homo sapiens
gggctcctcacttcccagtaggggcggctggccaggcggggggctgattccaccacctcccgcccggatggggcggctggccgggcggggggctgacccccccacctccctcccggacgggg

SEQ ID NO: 148278 - DNA, 122 bp, Homo sapiens
atgtcaagagggaagccctcgtcataccacttggacatccagacactcggggtgttcttccgtcccctctcctccagagggcggcgttcttgtaagagccatttcccacccagggtcaaccc

SEQ ID NO: 148279 - DNA, 122 bp, Homo sapiens
gcgggaggatgactctgaggctctcggattggctgggaagcctctctctggctgagcgaacggtgggtgctgcgcatgctcatctacagaaacgccgcttggcctttggactacaccatctg

SEQ ID NO: 148280 - DNA, 122 bp, Homo sapiens
caaccgcaaggtcttaaagtcatcttcctgaaagtatcttggtgagagctgaaatcacaccgccatacgcaaagccgaatgtatataattggctaataaacttcacagttatttttatattg

SEQ ID NO: 148281 - DNA, 122 bp, Homo sapiens
acaacaatgttatcgtcactagggactttaaatagcgcgacaatttaagattatttgctccgggaacatgtaggtgaggtagaaattccaggcatacagttaacctactagttcttgccctg

SEQ ID NO: 148282 - DNA, 122 bp, Homo sapiens
acagaagggcaagaaatgcagcaagaccaagaaatcccccgaaccagtcaggtttacttacgctggatgtttgagtgtgaagaaataccggcccaagtactgcggttcctgcgtggacggcc

SEQ ID NO: 148283 - DNA, 122 bp, Homo sapiens
cagcccgaggcccaagccaaggtgagcgccgcggggtctagaaagggcccactggggaggcgtggctggagcggccgggggcatccccgacccgccccccaggctcccacgcgagtcggggg

SEQ ID NO: 148284 - DNA, 122 bp, Homo sapiens
gaaggtaaaaaccagatgtatatgcaaattgttttctctatatattatccaattaggtctcggatggtacaaggtagataagagatctactgaattacaactcaggtggcctgagaattgct

SEQ ID NO: 148285 - DNA, 122 bp, Homo sapiens
tcctcctcgcccagatcaccaccagcacgtagaccacacacaggcagcccacggtggtcacgaccacagggttgtcctcaaaggtggcaaagagctcagcagtctggtggatgttgatggca

SEQ ID NO: 148286 - DNA, 122 bp, Homo sapiens
aaacgtgaccacgctgttcctggtgtgtaggtatggatttagaaatcggtccactcagaacgcaggggctttcaaaagtttcctctaggaagcatctgtcagtataccctcttaatgtttga

SEQ ID NO: 148287 - DNA, 122 bp, Homo sapiens
gttaaaacaggagttagagacaggtaaggaagaggagttggacaataagaagtaggtggtcggttaggaaaacagggagggctaaggaagcaattatgataaatatggagtctgatatctta

SEQ ID NO: 148288 - DNA, 122 bp, Homo sapiens
gacgaacaaagtcactcggatccagagcatgaattatggcaccattaagtggttcttccacgtgatcatcttttcctacgtttggtaagtgggatctggggaggacccagatctctgcagtg

SEQ ID NO: 148289 - DNA, 122 bp, Homo sapiens
ggatttaccctcctgcctgaaacaaacaaaaaaactcagacaaaatatatgaaacagggccgggcacagtggctcatgcctgtaatcccagcactttgggaggctgaggcgggaagatcact

SEQ ID NO: 148290 - DNA, 122 bp, Homo sapiens
agtgctcacgagaatgtggagaaatcagagcccctgcggtgggtcgtgccgcagggcagccgctgcggacagcaccctggcagctcccccgcgggttaaagaggcactacaggctgccgcaa

SEQ ID NO: 148291 - DNA, 122 bp, Homo sapiens
gcaggggtcagcatccggctgcctccgcagactgagctctttacgaggcaggcagggagtcgttttgcttggtggtagcagtgttcagagtgatttttatcgccatgcacggggatatatgg

SEQ ID NO: 148292 - DNA, 122 bp, Homo sapiens
cgaagacgctcgcttcagacatgtccctgactgctgcggcctccactatgtttcgaatgacgaatttcttgatggccttgtccttgggcacgcatcgggcacagttagtgcagcgaataggc

SEQ ID NO: 148293 - DNA, 122 bp, Homo sapiens
ttgggggaaacattaaaaagagaatataaactttcaagtaagattcagggcccatgcaagcgtcagtttctatagatttacagcagatccacgtctactgcagaaatacaatcaggtttctg

SEQ ID NO: 148294 - DNA, 122 bp, Homo sapiens
gcatggcgactcaggcagtcagtgtgtgagtgagtttgtgaaaacagttccagctgtgttcgttgctgaatgctggtttttctgcatattggaaggaatctagcagacccccaaacgtgctg

SEQ ID NO: 148295 - DNA, 122 bp, Homo sapiens
cccccgccccccgccccgcgccgctcgtccccgtcagccccgccccggcgctcttctcgccgaccaatcaggaggcgcgaccggcctcccagccccgaggcctcgcccccagccggcgcatc

SEQ ID NO: 148296 - DNA, 122 bp, Homo sapiens
agggaaaggagggggggtccgggccagaggagacggggtcacgcgctttgggggcgcggacggcggggactggggtgctctctccgccccctcccgcgggtcggagccggacggccgtccgg

SEQ ID NO: 148297 - DNA, 122 bp, Homo sapiens
ttgtacttgcgcccaggctccaggcccctcacagtgaccttgctctcctggcccccaacacgcaccgcctggggccgcccgtccctgtccttgtactgcacggtgaaggagtcaaagcggcc

SEQ ID NO: 148298 - DNA, 122 bp, Homo sapiens
gtgttgccgttcgggcctttttgctccctttccaaatggaagcaggccaatgattcagggcgagtagacgagagcccctctgctcactttaccagggtcctcccgagtgtttaggtcccgat

SEQ ID NO: 148299 - DNA, 122 bp, Homo sapiens
cctgttagttctgtccctcgagggaaccctccacacacctgtgtcacactgtcttcattacgatcatttttcagtaaatcctggaatcaagtagtgtgactcctcctgcatctttattcttc

SEQ ID NO: 148300 - DNA, 122 bp, Homo sapiens
cccggcctgggctgtgcgcaggagatgggccaagtgcaaggtcccttgagcgcagctgggcgcacaccgcaggacggcccctttcgcaccggctcgcgagggaggcgctgtgccccccgtgt

SEQ ID NO: 148301 - DNA, 122 bp, Homo sapiens
cacccccaggagcctgctcccaaccggggcccaaaagaaaacaagccagcgagggcactgcggaatgcagggttttggcgacagagctacaggagtgtgccttggcccccacaagggccaca

SEQ ID NO: 148302 - DNA, 122 bp, Homo sapiens
gacccctgccccgcccgaccccgccccgccacgggagcgcgccactcgcccgcgcagcaacggcctcaatagcgccaggcccgcgtctacaagaagcccgaccaaggccggcgtgggcgagg

SEQ ID NO: 148303 - DNA, 122 bp, Homo sapiens
tccgtgcgttcccggagcgcaggaggggtgcgacatgcgtgtggggggcgcgtcatgcagcgcatgcgtgtaggtgcaggcaccctggcggccggggggaaaagggggagccggacttggaa

SEQ ID NO: 148304 - DNA, 122 bp, Homo sapiens
aagtgatccacccacctcagcctcccaaagtgctgggattacaagtgtgagccatcatgccggccaatagtgtattttcatagcggttacattatattagatattataagtaatcaagagat

SEQ ID NO: 148305 - DNA, 122 bp, Homo sapiens
ctcgaactcctggactcacagaatctgcacccccccgggcctcccaaagtgctgggattacgggcgtgagccacttcccctggtgaggctgcctttttgtcatatgcatcgaccaaaacaac

SEQ ID NO: 148306 - DNA, 122 bp, Homo sapiens
ggcgcggtccaggagggagtttggattttcagtggtgctcgccagagcccaggcggctcgcggatcgacgcaaacaaaagccctgtcctcctggggctccggcggcctcgcatcgccaccgc

SEQ ID NO: 148307 - DNA, 122 bp, Homo sapiens
ttccgcaagcgcaatggaaagcccagctaggtagacggaggagcgagtggcagatgaagccggaagtgctctataagatgatcattggtcggcgactggaagcggacacccgaagaacagtt

SEQ ID NO: 148308 - DNA, 122 bp, Homo sapiens
cagtgtgcagaagttagaagggtctggcgggggcagtgccttacacatgcttgattcccacgctaccccctgccttgggaggtgtgtggaataaattatttttgttaaggcaagcattggtg

SEQ ID NO: 148309 - DNA, 122 bp, Homo sapiens
cgtctcagacgaggggctgccgggcagagacgttcctcacttcctagacaggatggcggccgggcagagacgctcctcacttcccagactgggcggccgggcagaggggctcctcacatccc

SEQ ID NO: 148310 - DNA, 122 bp, Homo sapiens
tggatggtcctcagggcagtcttgctacacaagcccagttcccacccacctggtggaccccggaaagctggcctctaggaaggtaggctgcaggatccagaagccccttcccctccagttcc

SEQ ID NO: 148311 - DNA, 122 bp, Homo sapiens
cgtgcgtcggcgtcggctgtgatggggagcccggagcagccaggcggcgagcagtagcggcggcggctgcagctcggagcagacaggagagccggcgctcctccccgcaggctgcgctgtga

SEQ ID NO: 148312 - DNA, 122 bp, Homo sapiens
gagataggggcagggtggcatatggcaacccagtgtcttcccaagtgggaaagcaaggagcgtgatgggtgtggaatgcccaggagaccgtctctctatcctggttctggcagatcccagcc

SEQ ID NO: 148313 - DNA, 122 bp, Homo sapiens
cggaattataaagtattcactgtgtagtatttctttctcacacttcctgtttttgagatacgcccaggtcactgcatcaatagtctgtttcttttaattcctgcgtagtccaaggtatgaat

SEQ ID NO: 148314 - DNA, 122 bp, Homo sapiens
aaaacatacacacacacacacacaacaactttgtttctgtaaaaatgaccatcctctcgccgcgcgcggtggctcacgcctgtaatcccagcactttgggaggccaaggcgggcggatcacg

SEQ ID NO: 148315 - DNA, 122 bp, Homo sapiens
ggcgaccctggggctggagctggacagggccctgctcccagctagtgggctgggatggctcgtagactatgggaaactccccccggcccctgcccccctggctccctatgaggtccttgggg

SEQ ID NO: 148316 - DNA, 122 bp, Homo sapiens
cttgcggggaatggagggagcagggcggcaggaggtaggcagtgaaggcctggctgagagcggtggctggcgaaacgtctgcctgacccgactgaaaagaggatccctgcctttgagcagaa

SEQ ID NO: 148317 - DNA, 122 bp, Homo sapiens
gccacgcccagggcgggccgcgggcccatcccccgccgcggaggagggcaggttggggaacgtggacactgccctcggggactcggttccttctgcagggccagcctttccacttctgtggc

SEQ ID NO: 148318 - DNA, 122 bp, Homo sapiens
tccctaggcaatcctaatcatctagcttgaaaggtcagttttcagtcacttgccttaagtcgcttttacagtttacctgttctgtttttttaattatcctgttcccatcaattaaaaatgtt

SEQ ID NO: 148319 - DNA, 122 bp, Homo sapiens
attttatagacggggaagccggggccaaaggaagttgccctgggtcatgcacctaggaagcggcacaatcaggagttggggtgattttaatcggtcatcctccggcctaattcccctctagg

SEQ ID NO: 148320 - DNA, 122 bp, Homo sapiens
atgtacacggagatgaagcccacacagactggacagacctagacagcttagacactgggccgggaccgtacccagtttttccctactgtgtaagtacagcaactggcacatcatacgtgttt

SEQ ID NO: 148321 - DNA, 122 bp, Homo sapiens
gctgaccgtaggggatgccgctgaccccacttccgtagcgccaggaggcaccatgatcatcgctgaggagacagaagactccgtcccgctccagcgtcccatggccacacacgatgaggcgg

SEQ ID NO: 148322 - DNA, 122 bp, Homo sapiens
agccgacggtcccagtcatctgtgatgtggccgccatacatgatttcaccaaaaaggtagcggagatcgtcccagggcacctgaggaaggatgacagcgggtaggggaaagtgcccctgtgc

SEQ ID NO: 148323 - DNA, 122 bp, Homo sapiens
atttcgtcgaatcccggctgggcggcttggtcgcagtgtgcctgtgctgggcccggagcgcgttcatcgcccacagccgctccagttcttgcgagtggttgttcctgcacgccaggagccgt

SEQ ID NO: 148324 - DNA, 122 bp, Homo sapiens
gaggaaatcaaggctcagggagattaagtgggtgaccagggtcacacagctggtaagtgacgcagtcctcaaagaccaccgtgcaggaccacagccacagatgttaggacactggactcaac

SEQ ID NO: 148325 - DNA, 122 bp, Homo sapiens
ggtctcacacacgtgtgccacctgtctgacccctgggaaacagagtttgcaaggttttcccgttgactactcgactttagcaccaaagagaagcaggagtgcagaagacagggcaaaatcgc

SEQ ID NO: 148326 - DNA, 122 bp, Homo sapiens
ggccatgaacgtcaggaatttcttgaaggaagatgccatgaagaccaagacacactatcacgctatgcatgcagactgcctgcaggaactacggcgatatctagaatccggcgtagtcctga

SEQ ID NO: 148327 - DNA, 122 bp, Homo sapiens
ctctgagcgcacgcgttgtgtgtagtggccctggcacctccacgccccgtcccgagtccccgtgcctctgggctctgagcgcactcgttgtgtgtagtggccctggcacctccacgccccgt

SEQ ID NO: 148328 - DNA, 122 bp, Homo sapiens
cttctctcactctgtctctcccctgcagccgacaaggaggctgacgagtattacatgagacggcggcacctgcccgacctggctgcccgcggcaccctccccctcaatgtcatccagatgtc

SEQ ID NO: 148329 - DNA, 122 bp, Homo sapiens
ctcgaactcctgacctcaggcgatccgcccgcctcggcctcccaaagtgctgggattacacgcgtgacccaccgcgccgggccaaagtctggctagtttttaaattttttgtagagacaaga

SEQ ID NO: 148330 - DNA, 122 bp, Homo sapiens
tgaaagagatgctgatctgcaggtaggggtgggatggggagcagtgggaggtgaggaaaacggagacagaaactgtttccaataggtttgatttcagcatgtttaaatgctgatgggaaggc

SEQ ID NO: 148331 - DNA, 122 bp, Homo sapiens
tgaccaggttctccaaacagctctgcgtttggaatacactgtcttcccactgcttccagtcggcacgcagggcctgcatctccgtgtgcatgagctcacacccactggcagttgtgttctgt

SEQ ID NO: 148332 - DNA, 122 bp, Homo sapiens
ggccacgtgctgggagctgccctctctgagcccttccttgcccagaggggcccggttctccgtcttggcctcgtccctgtgcaccttgtcgacgtgcttggccaggctgctgggccgcttcg

SEQ ID NO: 148333 - DNA, 122 bp, Homo sapiens
attctccactcgctgggggcccgagcccacaccaccttcctagcaaagcaagcagcgggacgccaaggccagcaggccgcattaagaacgctggactgagccaaaagcctacacagaccaag

SEQ ID NO: 148334 - DNA, 122 bp, Homo sapiens
ttttcttcattttccatagccaatcaccaaatcccattgtcttctttcttttatttcttccgccattgttctggtccaaactaccattatgtttctcctaaacataaagtgcatcctatttc

SEQ ID NO: 148335 - DNA, 122 bp, Homo sapiens
ttcatggggagcctcacagcagccacgcagcaggctctgggtggggctgccgttaaggcacgttctttccttactggtgctgataacaacagggaaccgtgcagtgtgcattttaagacctg

SEQ ID NO: 148336 - DNA, 122 bp, Homo sapiens
cattttccatcccacacgcaaagcatctgtggtcctggtcgaagccagcgtacagcagcccgttgcggtgatggttacatggcaggaggttcatggcgccgccctgctgggtcgccgttcct

SEQ ID NO: 148337 - DNA, 122 bp, Homo sapiens
aaagcaagaaaggaatgaaggattttattgaaaatgaaagtacactccacagtgtgggagcgagcatgagcataggggctcaaaggccctgttacattttgtgagtttaaataccctctact

SEQ ID NO: 148338 - DNA, 122 bp, Homo sapiens
accaatgactcggggacaatcactacttatttctatcaatagaaagtgttgtgtcaataacgcagccaagatctcgccaatcgttaacttccaagaggagaaggtaaactagataattgctc

SEQ ID NO: 148339 - DNA, 122 bp, Homo sapiens
agcctcagcgcccaaatcgtcggaggcgctggttaaaaacgcaggctctaaggcctccaccgagacctactgaatgataatctcctcggtggggcctgggatccgcctttttagccagcatg

SEQ ID NO: 148340 - DNA, 122 bp, Homo sapiens
gtaagtgtgcatgctctgggatatgcaccagtacactagttttgaggcaacagatctacccgaggaggcatcctgtaggttgaagctgagcctgagctgtgctcatattctgagtcagacct

SEQ ID NO: 148341 - DNA, 122 bp, Homo sapiens
ttgacaccgtccctctcacaggggctgtatgagtatctgcggccctcagggacccctgcccggctgtcctgcctctccaagaacctgaactatgacacctttggcctcgctgttccctcaac

SEQ ID NO: 148342 - DNA, 122 bp, Homo sapiens
acacacattcttactcccccaaagcacagggctttcttccagattgctttttgaaggaggcgtttaaaccagaagggcaaagatgctgacacagagtttggtttttattgttatgtgtttgg

SEQ ID NO: 148343 - DNA, 122 bp, Homo sapiens
tgaaataattggctcaaggtcactgaaccaggaaatgatggcgctgggattcttagcttccgcttcctccccgcttccagagtttcacaaggtttttttttttgtttgtttgttttttgttt

SEQ ID NO: 148344 - DNA, 122 bp, Homo sapiens
cctggaggagggggcccggaagctccctggctgcaagagtggattcctgagcaaaagctccgcgggtggagaaagagagtatggcgggggccacgggggtccgagtcccgacacgcggctgc

SEQ ID NO: 148345 - DNA, 122 bp, Homo sapiens
gccagccgcaggtgttgcgagtgaggacccctgtccggtcttggagatgcgcggggccctcggagccttggcctgggaggcgctcccgggggcggggaggcgggggtagcgggtgattggtg

SEQ ID NO: 148346 - DNA, 122 bp, Homo sapiens
aaactggaccaactctccaacagagtttatcaaaatatgaagagctgcctgtgggccttgcggcacttctctaagtcaatattacacattataattctctaccaaatcttaaaatggtttca

SEQ ID NO: 148347 - DNA, 122 bp, Homo sapiens
tgagaataggaatccatttcttaccctctgtattaccaataaatgggcccatcttaggtgcgcaataaatgtgggtaccctgggagtcagaaaagactaagttcaggctgctgggcaacact

SEQ ID NO: 148348 - DNA, 122 bp, Homo sapiens
ggcccccgccgccctcccaggcccgggtcggcccggatctggcccgcgggccctgcggtccgggctggacagagccccagagctgctgttgccgctgcctcggcctgaaagggggagggcgt

SEQ ID NO: 148349 - DNA, 122 bp, Homo sapiens
aacaatgtcgacattgaatatgttgccaggagtgcttagcggaaggttgatacagcacctcgggtctgaacgttctctcccagtgcttatgagctgaaaatctcagaattgaggcaggcaat

SEQ ID NO: 148350 - DNA, 122 bp, Homo sapiens
agttcggcaggcgcctcccccagggtctaggatacctgctggaaagctcgcagcagggcccgctcccggtcctgggcaggcccaggcgcgtcaagacgccgcggctacctctgcggagcgcg

SEQ ID NO: 148351 - DNA, 122 bp, Homo sapiens
tccttggctctgctcagctcagcctgaccgggctgcggtcatttgaatccccagtgctgccgcccaccggtcaccctgtcctgtcaccaggtggtgactggcccagtgacccccaagacaac

SEQ ID NO: 148352 - DNA, 122 bp, Homo sapiens
gcggcggagacaagggtgcaccgccaggtggggaggggcccccgtcctgatgggcgtggccgctggctcctggtgagttggcattgggcttaaaagacatggtctgtgcccccgcctgtccc

SEQ ID NO: 148353 - DNA, 122 bp, Homo sapiens
ggttaacaaagaatccccatttcccagaagaagaaacagagggccagagatggagcaggacgtggccacggtcacacagcactgccacccagtgcctccctctcagagtggcaggaaactcc

SEQ ID NO: 148354 - DNA, 122 bp, Homo sapiens
cacagagtctgggcctctaggagcagaggacaaacagcagtgaagacgagaccggagctccggctgcagcaagagacaaaggccgcgccaaacccggaagccgccctgtccggtccagctgc

SEQ ID NO: 148355 - DNA, 122 bp, Homo sapiens
gacttaggctggcaaagctcagccgaggcccggctcttctccctccggctctggacttgccgctggttttgtatgggtcttagcaaagtggagaaactctcggaaaagtagttgctgcgctg

SEQ ID NO: 148356 - DNA, 122 bp, Homo sapiens
ccttaccgtggcgggggcgctgaggtccctcggggcaaccagaggacggaggcttggtgccgcagggcagtcgggaaggcttcctggaggctgggcttgagccgaaggtgggtgggatttcg

SEQ ID NO: 148357 - DNA, 122 bp, Homo sapiens
catcaggaggggaagaagagaaaagaggagagaagggggttgaggtctgggggccagactcgggcagaatgaggaaggcccaccagctcccttggtaggaagctcacctggtgtgtgtaggg

SEQ ID NO: 148358 - DNA, 122 bp, Homo sapiens
tctacttaataaaaaaaggtacctgtaaacagcctcaggcaggtccttcaggcaggtccacggagaagaaggcgccgttatcacaggagatgaggctgcatgcgggtggttgcccctgaggg

SEQ ID NO: 148359 - DNA, 122 bp, Homo sapiens
gaggggactcgaatctcgcgtagtcttgatcataccacagctggtagaagtaggtcttcccgtcgtccccctccagcagggactcgggatccatgcctcccttgggagataagaatgcgtgt

SEQ ID NO: 148360 - DNA, 122 bp, Homo sapiens
aacggcgtctcggaggggcctgctgcggggagggtggggtagggcgggctcgccagggctcgaactcacagtcccgggcccgcggcggcggtttccacccagcagcctcagcggcccggcgc

SEQ ID NO: 148361 - DNA, 122 bp, Homo sapiens
tccccaggtagctctgatcgcctgggcatcctggggaagcagtgagtgatgagggcctcacggccgacctccccttaccccactccaggttgcgacgccggccaccagttcacgtgcaagaa

SEQ ID NO: 148362 - DNA, 122 bp, Homo sapiens
caggcccgggtgtgtccagtggacccgcacccagacagcccccaaccctccaacgcgctgcgtttccctgtcctgaagcctgcaacccggtgaccctcacaggatttggattacatcctaat

SEQ ID NO: 148363 - DNA, 122 bp, Homo sapiens
cgcgcatgctctatggggtagagacgctaggccggcactgcctaggtgggccgggcggtgcgagggtcgcctttcagcctttacctctacccactgaaatggagtaggtcggtgagcgccga

SEQ ID NO: 148364 - DNA, 122 bp, Homo sapiens
gccagccccggacccaggggtgtgggcgtcagctccaccagccctggacccgctaggtttcgggatcagagaactgctgcttctccagacttcagaacaatgggcaggacccggagagcagc

SEQ ID NO: 148365 - DNA, 122 bp, Homo sapiens
aggaaagaaacaaattctgaaccatccatacttggctcaggaccctaaaatttgcaaatccggacaggatgggccctgctcagaggtggccagcttcctggagcccaggcccgcttgaagtc

SEQ ID NO: 148366 - DNA, 122 bp, Homo sapiens
tctccacttcccttcgtgctggaaatacaaaggagaccaaaacccccaggaatacattcacgtgcaacctccatagtccttgaatttaacagagttgctgcctgtcacattgagaaagagga

SEQ ID NO: 148367 - DNA, 122 bp, Homo sapiens
gtttcattctggcttcttcaatttggtgtgaattgacaacaaagaaaactcaggagggcgcgaatgagttcctgtggatcccgagccctctcaggcctcctcggtgcagaagggcaaatcct

SEQ ID NO: 148368 - DNA, 122 bp, Homo sapiens
cctaacaatgcagcgcgcctccaggcgcccttcaccggggtcccccgccctgccgaggtgcgccctgggacctcccttcgctggccgcagagaggacctggaattatcagacccattgagca

SEQ ID NO: 148369 - DNA, 122 bp, Homo sapiens
cggtcctggaaaggttgagccacgctgtcttcctcggtgccctcaccacggtcctggaaacgttaagccacgctgtcttcctcggtgccctcaccaccgttctctgtaaaggtgctcagatg

SEQ ID NO: 148370 - DNA, 122 bp, Homo sapiens
gctaaagctcacctcttcgaacagcttctcattctccagcttgtagcatttcttgccgcccgaactactgcttcctctggccccatgaggctcagaggagctaggggcttctgccccaggtg

SEQ ID NO: 148371 - DNA, 122 bp, Homo sapiens
ttcttcagggatcaaggcaaaggtgtcaggaggcactaaaccgtacaacgcgagccttcccgtgggtagaggggccagccatagagctgtgtgatggggaacttttatgttgttcagcattc

SEQ ID NO: 148372 - DNA, 122 bp, Homo sapiens
tgcataacgtcatctttccgcccaccgcagccaatcgcggcccgggagccggctcgctggcggcgccaggccacgctctctcattaacatcccgctcccggtggcgcaggggagccggccaa

SEQ ID NO: 148373 - DNA, 122 bp, Homo sapiens
tctggcatgcttggcgcccccatgcccgaggtcatgtgctcctgccataatttaaacaaacgcctgaacagcaaaatgaaattggaataggcagctggacgtggtctggagcgcaagaggaa

SEQ ID NO: 148374 - DNA, 122 bp, Homo sapiens
gcagccgctggcccgggtgctaagcccctcattgcccagggtcggcagggccggctgctccgagtgcggggcccaccaagcccacacccacccggaactcgtcctggcccgcaagcaccacg

SEQ ID NO: 148375 - DNA, 122 bp, Homo sapiens
atctggaggccggctccgcggcggcctgggagcgtttccatcagctgggcccgaggaatgcggagctatttaacctgagcatccccaggtgtacggaggcgcctggctgtctggggcccgca

SEQ ID NO: 148376 - DNA, 122 bp, Homo sapiens
aaaagagacttgcctatagggacttacagatgccagacgctgaggggtctggggtaactccgcgctgatttccatcctctcagtacctccagcctcctcgtccgccatcttgagggaaactg

SEQ ID NO: 148377 - DNA, 122 bp, Homo sapiens
tccttctaactgcactgccagagctcaggggctgcggagaggcggctgctgcttttcccccgacccactgggtcctaagtgccgggaaaggccgcagggcagatgctggggaggcgctctcc

SEQ ID NO: 148378 - DNA, 122 bp, Homo sapiens
gagcgcaccctccagccccggcgagtcccccggactggctgggggccttccctggaacgccgagggctcctctggaagaccactctgtatccccagaacacacagcactctggggcctgggc

SEQ ID NO: 148379 - DNA, 122 bp, Homo sapiens
cgaggcgggggcgaagtgtgagcggggaaactgaggcctggatggggtcaaggggcagctcggctcctagggatggtctgggagcctagtgggaactctataaatatttgtgcatcaaactg

SEQ ID NO: 148380 - DNA, 122 bp, Homo sapiens
acacggacctcccagagccaccgccctcgctgaccgtgcagaggtgggtgccgggaggtgcgggtgggcttcctggcacagggcagctgtccagccgtctccagggcccctcttggctgggc

SEQ ID NO: 148381 - DNA, 122 bp, Homo sapiens
ggcgttcctgtgacaggtttgtgatcctgtccgtggtgctcttcggcctggtctataacccgcacgaggcctgctccctgaacctggtggaccacggccgcggctacctgggcatcctgctg

SEQ ID NO: 148382 - DNA, 122 bp, Homo sapiens
cctgcgtgacttacattggagaaacatgtcttctgtctcttgttacccattacccagcgtcggaagccctaggatacgggctgtgtgccggacttttgtgggggctcttagggcacagataa

SEQ ID NO: 148383 - DNA, 122 bp, Homo sapiens
cagtgcccctagaaggggcagcgggtcgcccacgcgaatgaacgggagcgcgcaccaaaacgcctgctgttggtagtttcttgtgcctctgccttgtttctgcctgtgatatagtcagaaag

SEQ ID NO: 148384 - DNA, 122 bp, Homo sapiens
catatcttctgtcactcagggcctgaaggggcgggcccttaaaccgtatccaatcagacacgcagaactgggaaccgtccaattaggcacacatttggagcggcgaggacggcttccgggat

SEQ ID NO: 148385 - DNA, 122 bp, Homo sapiens
tcccaggaatgtgagtttcagaaatatgctgagctgatcctagaaaggtttcaaagtcctcggcagctcaatgcttttgggacaagtttgtttgttttaataaaagttaaaataaataattt

SEQ ID NO: 148386 - DNA, 122 bp, Homo sapiens
taaagctttgcttcctgctgggggcgccttttgttggcttgcctagcaagatgccaatagcggggctgtgtgtatacctttattctggaacagcctcaggtcattcagcaccacctctggga

SEQ ID NO: 148387 - DNA, 122 bp, Homo sapiens
cggggcgtgggggcccgcagggcggaagtagctcggagagacgggctggggcagggcgtgcgttcgtgcggtcaaaatccactggtggcgtttggggtgttcccgtggacgcggcctcccgg

SEQ ID NO: 148388 - DNA, 122 bp, Homo sapiens
ccattgttttaatacggcaggcagcttcacctgcggctgcccccatgacctagtgctaggcgtggacgggcgcacctgcatggaggggtccccagagcccccaaccagtgccagcatactca

SEQ ID NO: 148389 - DNA, 122 bp, Homo sapiens
aggagacgcgaagccccgcccaccccaccggaaacgcatttgcgtcacgtccgccccgcccgctgccacttgtggctctgccgctctagcccccggcggagccagctgctgctcttcggtgc

SEQ ID NO: 148390 - DNA, 122 bp, Homo sapiens
taacctttgaaggagactcagaatgggaattatcaggaaggagcaggtggagattgacaacggggtttctgtatgctggaaatgttctatattttgatcatagagatgtgcatttaccacat

SEQ ID NO: 148391 - DNA, 122 bp, Homo sapiens
caccactgccggcgggcgccgcggtggccaaacaggatctgggcctgctttatcaggactcggctttctttggaaaatcctgcaggcagcggccccattatcacccattcccagcggggggc

SEQ ID NO: 148392 - DNA, 122 bp, Homo sapiens
ctggtgtgctgggaaggggctagcccggcagtctattgtttgcataaatggacatttaagcgattcctgaagaaaacaacaagttattgactggttttatagccttatcttcctggacaaga

SEQ ID NO: 148393 - DNA, 122 bp, Homo sapiens
gcattttatttccctacccatgtccactgcatcattctctatagtacaaagagcttgtctcgccaggcgcatctataatcttagcactttggggcgccaaggcgggtggatcacttgagccc

SEQ ID NO: 148394 - DNA, 122 bp, Homo sapiens
agtcctggccacctagcccagagggcatgatgggcccagcgagaaaccctggggcccccgcgcggggactgctcgaagtccgcccgggggccttgggagctgggtgcaccccttagaggagc

SEQ ID NO: 148395 - DNA, 122 bp, Homo sapiens
ggcctcgtgcgccgcgctttgaggtgagcctctctgagaaatttgtgaggagggtccagccgcgggtcggaaggaaggacgtggggagcgaggctcgagcgagcgacagcgagtgcgaaggt

SEQ ID NO: 148396 - DNA, 122 bp, Homo sapiens
cccctgagagcgcagggatgcccaggtgcggagccaccgttgagaggctgcagctgcatgcgagggcgtgggctgccatcccaccaactcggtagggcgtggggcttctgctgggatcgtct

SEQ ID NO: 148397 - DNA, 122 bp, Homo sapiens
cacctctcctcctcttctccgcgaccccactttgctacacaaacgcaccgagactccgaccgtccccagcctccggtccctcagggatggaaggtgaggtatgtcaggaaagagaggggggc

SEQ ID NO: 148398 - DNA, 122 bp, Homo sapiens
gaagcaccccaggccttgagaacaccagacgggggcccccacgccaattcatggagtccccgcacttatagtgcctcccattgctaaggcaggcaggacaacatgaagaggacctgttgcta

SEQ ID NO: 148399 - DNA, 122 bp, Homo sapiens
atgctgcgagaagcccacgggcgcgatgccatagatgcacacggctaggatggtgacgagcgagtgcacgaaggtaagccagtaggtgaagaagggcctgcggggtggagcgtcagcggggg

SEQ ID NO: 148400 - DNA, 122 bp, Homo sapiens
ccgactgtcttacttcctacagcaaagcgccccccaggtcgctgtcaatgggtgagtgtccgccccagggcagggcaagggggtcaaggaggggtgcgtcccgggggctcccgatgctgact

SEQ ID NO: 148401 - DNA, 122 bp, Homo sapiens
gtatatggaaaaaattataattactcattattccactatgtagagtcaccagagttgcctcgagacccttcttccgtgtgttcatttcatgtgttcctatttttaagagaaacatacatgca

SEQ ID NO: 148402 - DNA, 122 bp, Homo sapiens
cgcgagctgggagagctgggaggcggcgatcgcagctgggccgggacttccttcctccaccgcacggcaacaaaacaaccctgcggcaggcactgagtgcttcgcagctgtctgggcgagag

SEQ ID NO: 148403 - DNA, 122 bp, Homo sapiens
cgccttcagtgccctgctcatcaagggtctgggtgaggccccaggtcataaggaagccctcgctcgactgccccggggcccatcgcagcccccaaccagccccgagcggtctgatggtgccc

SEQ ID NO: 148404 - DNA, 122 bp, Homo sapiens
tccactagaagccaaagcctgggaacgagagcaagcgatgacctgaagaggcacaggaagcgagggcagtgcggaggtggcgcgcatgtgcgaacacgcacgcagggagaggtgcacaagcg

SEQ ID NO: 148405 - DNA, 122 bp, Homo sapiens
acatggaagtcacaagcctggcaccggattcggggcatggccgggagccagggcagagctcgtcgttgccaaactcagagtcagcccatcccccgccacccagagcgcgtcggcgctaggac

SEQ ID NO: 148406 - DNA, 122 bp, Homo sapiens
ttattgccctcccccagattggcacctgctgaggactaattagggcagtcctaatttggacggccaaatcctgattacagtgaggggaaaaacaggaaatgttctagttttgctgccagcaa

SEQ ID NO: 148407 - DNA, 122 bp, Homo sapiens
gcccctggcacgcaccttcacagcagtcctgccacacccggaggtctaccctggggatctcgtcacagctgccgtagccgtgagggaactccgccaccctgaacacgtcgctctgcacccgg

SEQ ID NO: 148408 - DNA, 122 bp, Homo sapiens
gcttcccctctgacaaaagctgctgtcgggaggggctgtaaagcagcagagaagaccaggcgagggatctgcaccagaggaagggaggcaggcctttcctgtatttatctctgcaggagccg

SEQ ID NO: 148409 - DNA, 122 bp, Homo sapiens
gacatcgtggcccctgagagcacgtgatgagaagagcgctccacctctgccgtgttcttccgcaaacgcacagttccagtgtaatcagagagaacatcacacacacaccaattgaggggcat

SEQ ID NO: 148410 - DNA, 122 bp, Homo sapiens
gttattccaggaaaaagaaataaaaaatgttgcagaggcggcggccacagggctgggagccggttatctctgggccaccttccagctctgataaccgtaggccgggctcgccgggtggggcg

SEQ ID NO: 148411 - DNA, 122 bp, Homo sapiens
gcagaatgagctcctgggtggccgggtgccttgtcatgcttcagaggcgttttgggcactcggtcctttatctcaggacaatgaacccgcaaggagaggaagagccagtaattctatagaga

SEQ ID NO: 148412 - DNA, 122 bp, Homo sapiens
cctgcaccttcccactcccaaaccaagggaggagttcacagtagtgacacagattgccctcgctgtgtgaggcacccctcagggggctcccttagacagacgtgtgcctgagtaacagagcg

SEQ ID NO: 148413 - DNA, 122 bp, Homo sapiens
ctctggccagccatacctgtgttggccctgacagaagctgggtagctgactgcccggccccgctccgctgtgacagtcaccacatattctacgcctggcatcaggtcagtcagcagcgtccc

SEQ ID NO: 148414 - DNA, 122 bp, Homo sapiens
gcagcaaccaccagcccttggcaagtgatggtttggctgaaagaggaagggggaagggagcgaggcaagcatctgtttgggggctaatgccagtaaatgtgcttctccttggcagccagcag

SEQ ID NO: 148415 - DNA, 122 bp, Homo sapiens
aatccgcggagctcttcctccccgggagcccgatggaaatccggtaccctgaaaacgagccggagagacttgattgggccattcacgcctcaggatgaggactggccagtctgcgcctggag

SEQ ID NO: 148416 - DNA, 122 bp, Homo sapiens
gatttggggtaaatgtcttaacccatataacgacctccactggaggcccattcaggtgtgcgcatccatctttgttaacaccggtagaatgaaaagtcaagcaacagcttataggattagtt

SEQ ID NO: 148417 - DNA, 122 bp, Homo sapiens
ggtggacgccttacttgcctccttcttgtgagggaaaaccaaggacccctgctggcagatcgcctccccggggtgaggatggtatgagggatggcacagacagaggacgtgtggctcccaca

SEQ ID NO: 148418 - DNA, 122 bp, Homo sapiens
ccacatgacctgcctgggaacagagcgtgtctttgttaatccagcgcctgtcagtcggcccgagcccaggcataagcccaggcataagccacttagcacggcctcacccctgtcccgcctgg

SEQ ID NO: 148419 - DNA, 122 bp, Homo sapiens
gccgcctgcgaacaggaggttccaaagggagcagccccaggtggcaggggcgcaggccgccgcgccctgggaggccccccgagcacaccagccactctgtcgcctgcgggcacggggcgaga

SEQ ID NO: 148420 - DNA, 122 bp, Homo sapiens
ttaaaattgaacctgagcctggggcagaatagaaattgcaatctctgacatcactgtctccgtgatgcttgtgagcaaactacctctttctctgcatgtggctcctctgagatccaggcttc

SEQ ID NO: 148421 - DNA, 122 bp, Homo sapiens
ggccgcgcggtggccaaagcacagcgcgggagagtctgcgatgtcagagaacggctccttcgccaactgctgcgaggcgggcgggtgggcagtgcgcccgggctggtcgggggctggcagcg

SEQ ID NO: 148422 - DNA, 122 bp, Homo sapiens
acctactaaaaggaactgaaccttttctacatatggttatgcatagtacagataggtatacgtggaggggactaagagcttaaagacaacaggaagtggagcccacgacatttctgttcagc

SEQ ID NO: 148423 - DNA, 122 bp, Homo sapiens
accagcatcaccgacttcaccatggggactaaaaggagcactccatgctttagattcacacggaaggtgtttgtgtttctcctcccccttacttgcatgtaaatcacaaaaactgtgtgact

SEQ ID NO: 148424 - DNA, 122 bp, Homo sapiens
ggggaagcgtccccgctaggggtggggtcttgggactccctggggcttccggagctgacccgtggggggtctgctgccctcagttcctgctgaccaaagtcctgccggatctggcgcctacg

SEQ ID NO: 148425 - DNA, 122 bp, Homo sapiens
actaacactgtggggacccttgtgctaaacgtgtcaagtggcacaacaaggataggaacacgggtcctttggactccacagcttctgctccttccagattaagccacactgctttctccaag

SEQ ID NO: 148426 - DNA, 122 bp, Homo sapiens
tcctccatcttcagcgaggagcagggttagcccgggacagctggtcaaaccccgagaaaccgatccggtggagcccgagcacatctcccccgccggccgggctcgcgcagacgcccgcgggc

SEQ ID NO: 148427 - DNA, 122 bp, Homo sapiens
caggcgctggctgggtgagctctgtgcagctttcaaacagggcacctcttgtgtgattaacgacttactccagcaagcagcttgtcaccttgcacaaaactgatatgaaaagacaccagcaa

SEQ ID NO: 148428 - DNA, 122 bp, Homo sapiens
gcagaggctggggagggtgccaagggcattttacagtaaacctgaaacactcgttcaggccgagatggaaaggggggatggatgcctcattataccctcctccctttggaattcaggcacag

SEQ ID NO: 148429 - DNA, 122 bp, Homo sapiens
gggcacacctgtctcggagcttcgggagagggggcgggagtcgggtgacaaagctattgccgagaggtttcaggaactgtcagtcctaatccaacgttcctattggtcagttcccaagcggt

SEQ ID NO: 148430 - DNA, 122 bp, Homo sapiens
agaactggggcaagaaaatagctgtatggcataaagtctacttgagggaaaagaacaacccggcacggttacgttcaatcagacactaaacagagtgcacgcccacccaggggacactgagg

SEQ ID NO: 148431 - DNA, 122 bp, Homo sapiens
ttccattttctcacacaaaacccttcttaagtttgccatgtttaaaatttctcccttaaccggtttcatcccagtcttccccatccttataaatggcatccagtcccttgtcactctcctct

SEQ ID NO: 148432 - DNA, 122 bp, Homo sapiens
ccgcggtgttcccagttcattccgttcccttctaacactcagtgttaaaaaggagggtcacgttgtggggctaatgtgcagcctctttccatagaaatgagagatggatgggccagcccggc

SEQ ID NO: 148433 - DNA, 122 bp, Homo sapiens
cggtgaagtttgattggggttccagggacccgtattccccgctcagtctgtgaagaccgccggctctccccacagcactagcggtctttacagttatctgtggaaggtttcttaggaaaccg

SEQ ID NO: 148434 - DNA, 122 bp, Homo sapiens
aaaatcatccccgtagcaacttccacacactcaacgaaagagcagagattaagaaatggccgtaagaacttactgcaacaacagagctctcttcggttccaacgtgcgcgtaaatcctgcag

SEQ ID NO: 148435 - DNA, 122 bp, Homo sapiens
ttcttgcactggggccgggggagggttcctgggaagcaggtgctctctggcttcttggtacgtgaggctctcggagctgcctctcctctgaccctcaggtcctcaccgagtttgctccagga

SEQ ID NO: 148436 - DNA, 122 bp, Homo sapiens
ttcacccccgacgtgcacttcaacttttaaaatgcttgctctggtggtccacagtactttcgcgttcactgggcggtaccatatctctcaatagatttgatccaaaaccccaagtgcgggag

SEQ ID NO: 148437 - DNA, 122 bp, Homo sapiens
aaaccctaaaaactagtttaaaaaagtacttgacagtgtccttttaatacccatggatgacgcgaccactgtgcagtgacaaccagaaactttgcaggtgaacacccagtggccttccctgg

SEQ ID NO: 148438 - DNA, 122 bp, Homo sapiens
aggccccgcggcattttgcggccgagggcacccctcggggctggcgggccctgggaactgcgccccgggcgggtcctcgcaccgcccccgcctcgatggccccgccccgtccccctcccgct

SEQ ID NO: 148439 - DNA, 122 bp, Homo sapiens
acccgcctttgctcggcggagacagcaggcagagaggtgagcttagccctgccccacgcgcggccaggccccagccccagcccctggagaacccccgcgctctgcccgcatcctcagcccgg

SEQ ID NO: 148440 - DNA, 122 bp, Homo sapiens
cctccccagaggagcggatgaacgtgatgcggcctctacgcatacaatgggatattactccgccttaaaaaggaagggaattctgacacacgcctcaacacggatgaaccctgaagcattac

SEQ ID NO: 148441 - DNA, 122 bp, Homo sapiens
tcctgcagttgaggccgccacaaaaaagcacgaggccattgagacagacattgccgcatacgaggagcgtgtgcaggctgtggtagccgtggccagggagctcgaggccgagaattaccacg

SEQ ID NO: 148442 - DNA, 122 bp, Homo sapiens
cagcccccctgggacccataaaccaggcctctagacgtgttcagcctggcaaggccaacccggagaggagggcaaatgatagcgactcccagggaaaggcatgaagtggggctgggaaactg

SEQ ID NO: 148443 - DNA, 122 bp, Homo sapiens
ggtgatctgcccgcctcggcttcccaaagtgctgggattacaggcatgagccaccgcgcccggcctggcctgtatttttttaaatagtcagtgtcaacagagaagcggacaccttgtgttgt

SEQ ID NO: 148444 - DNA, 122 bp, Homo sapiens
gggaaggccgtctgcacgctgagttcgatcttggttcctgcatcgtctctcgcatgggcccggtgctcacccatgtgtcaacagaggactggccacgggccatgctgcaggtaccagctcac

SEQ ID NO: 148445 - DNA, 122 bp, Homo sapiens
agctctcctgcggctgggttaaatcagcctcaatgggctgaatgtggttcaaaacctaagcggaccctccccccagcccccacccccaccctgctttatcccgcgtggcgttcattacaaac

SEQ ID NO: 148446 - DNA, 122 bp, Homo sapiens
tctgggaattcctcagttactcgagatttggcacccagcgtaaaatgcacccaggcttcccgatgaagtcatctgagcatgcagagcagccacatcagcgtttcttcccgggtgctgccatg

SEQ ID NO: 148447 - DNA, 122 bp, Homo sapiens
gtattgttaccacgtttaatacattaaagtaaatcccactgcaccatgcgtgtggactgccgtgcacactgactgtgctctttttgttcagtatggctccgcttttaaagctgtggtctgtg

SEQ ID NO: 148448 - DNA, 122 bp, Homo sapiens
tcctttcccatgtgatcccacttggcagccaacccagcctaaggccgtcttatccaaggccggcccctcagcggctccgcccatcttagtcccagcaggcctgatctaggaacctgtattca

SEQ ID NO: 148449 - DNA, 122 bp, Homo sapiens
ggctgtcctggcctgaccctgggagactccgctggggccgcctgttatggtgctagctgccgtcccggtgcgtactttcccaaggtgaatttgaccttctttgcgacagctaggccctgact

SEQ ID NO: 148450 - DNA, 122 bp, Homo sapiens
aaatacaagtgcaagtgcaaggagcccatgaacagaaagaagaagaaggggacggggaagcgcctcttgactgctcgccataaaaataattgagctgaaattaaatctgggggctttggtag

SEQ ID NO: 148451 - DNA, 122 bp, Homo sapiens
gaatatgcacctcagaggctgggcagtctgctccatccctgatgacatttcccaagtgcccgtggagctggggtttactagtcatcaggacttctctcatcgaatgatttctctctttctcc

SEQ ID NO: 148452 - DNA, 122 bp, Homo sapiens
aagaagagggaaggaagaggggtcaaggcgcagaaggcagtacccaggcctgggaaatcacgaagagacacagtcgggaaagtgggcctccagaacagagaacatactcacttttccaggcc

SEQ ID NO: 148453 - DNA, 122 bp, Homo sapiens
gtaaggtgaaggtgcccagcaggctgaggcttgtgtgcaacccagaagagagctcgctaacgccagcaagaaggttcagaacagcctggctttggaaaggaatttcatcctgcccacacact

SEQ ID NO: 148454 - DNA, 122 bp, Homo sapiens
caccatgcccggccatgtttttaaaataatcagtccctcccttcaaaaatagaattggggcggggtgccatggctcatgcctgtgagtcagaggttgtagtgagccgagatcgcgccactgc

SEQ ID NO: 148455 - DNA, 122 bp, Homo sapiens
agcccccgggacgcgaggtggccccgcccgcttccgggagccggaggcaagtgggagccgcgccctgtgctctgcgtccggcactacccacctcaagtctccaaggcttcgttttctgggct

SEQ ID NO: 148456 - DNA, 122 bp, Homo sapiens
tgaaaccgggatggactgatcatctaaccaagtgcagactgaggattctacttagtcctccgactgggtacaacaacagcctaggttctagggagggtggcagtgaccgggatgccacaatg

SEQ ID NO: 148457 - DNA, 122 bp, Homo sapiens
tgctgcctccagcttctgtacaggctcaccgagacatcattcgcacaaactctgccaggacgaagccaaggttttgggtctgttctctggactgcgctaggagtgaggatcatctgcaggcc

SEQ ID NO: 148458 - DNA, 122 bp, Homo sapiens
tcaatcgaagaggctggttctatgtttatgtacagacaagggagcctctgaaactgttgacggtaagttcaagtttacaaggctagaaagcaaaaaaccttctttccaaggctgattatact

SEQ ID NO: 148459 - DNA, 122 bp, Homo sapiens
gaactttcaagttgaagatatatttcacaggaatattcacccaaagcttgagagctagagcgaggagagacttgcagtcggtaactgagtagatgaaatgcataatttttcactaggtgata

SEQ ID NO: 148460 - DNA, 122 bp, Homo sapiens
cggcgggaggcgctgagaactcactgcgcacgcgccggtcggctggccgcacccacgcggcgcagctcccaaagttgcagacagcccggcgaaccgcgcaatgcgcttcttctgcctgcagc

SEQ ID NO: 148461 - DNA, 122 bp, Homo sapiens
tctcccgggggctaatcccggggcaggacggggaggcttgggccaatcagcgcgctggggcggggcctaagtggcgcgcgccgggcggggagagactggagaaggaggatttaaccgcttcc

SEQ ID NO: 148462 - DNA, 122 bp, Homo sapiens
gcttggcttcctcgcgtatttgaggacagcccatctcccttcaagaaccctacggagagtcggactgcatctccgcagcgagctcttggagcgccgccggccgggaggcgaaggatgcaggc

SEQ ID NO: 148463 - DNA, 122 bp, Homo sapiens
gaggcttcttcctgccgtgcctgttttctttggctgggctgtgttcccttctgcctgttccgccctctgcccctctcctcttctgcggacagtccggcacctgtgatgctctgaccttgaac

SEQ ID NO: 148464 - DNA, 122 bp, Homo sapiens
atcctcacctgctttggggacagatagtgcccgtgaagtatgcaccctctacctggtgcacgttagggcctccggatgtggtggccattgtcatcgctacctggtgcttggggtgccagccc

SEQ ID NO: 148465 - DNA, 122 bp, Homo sapiens
ttatttttaatgggataaagagggggaactcttacaaagtttggacactagcagggagaccgctcttcaggaggcaccaggccttgtggtgatgtgttgcaccctgcctctcgagggatgct

SEQ ID NO: 148466 - DNA, 122 bp, Homo sapiens
cttggtgcacagaagtccagcacccagcccaccaccaaatatgcctgccttcctatccatcgcagcacagacaggtcattccatctgaaacaggcaccaagggaaggccctctgatgtgctc

SEQ ID NO: 148467 - DNA, 122 bp, Homo sapiens
gtttcctgcagcccaggatctgatagccggccatggtatcatcacatattttttcaacaacgatgggacatggtctgcctcatctcccggggacaccaggagcgctttccagactccgggtg

SEQ ID NO: 148468 - DNA, 122 bp, Homo sapiens
cggaaagggaactccctgaccccttgtgcttcccaagtgaggcaatgcctcgccctgcttcggctggcacatggtgcgctcacccactgacctgcgcccactgtctggcactccctagtgag

SEQ ID NO: 148469 - DNA, 122 bp, Homo sapiens
agcctgcacaaggatgtttcttaaaaggcaacgtctgaatatgacaaatgacattagccccgtgtttggcagggtcacagccaaagccaagactgatatttacagtatactttataaaacca

SEQ ID NO: 148470 - DNA, 122 bp, Homo sapiens
aaagaagtggctggaagtaaacagcctgcttactcacagcaactgaaaattttgtttcgacgattctggttccaggggcaggagctgaagattaatgcctggagtctgccccattctgagag

SEQ ID NO: 148471 - DNA, 122 bp, Homo sapiens
agcactgccagcccctgctgcccggctgcagggtggacagctgctggaaacaagcctccacgtcctgtgcaagctcatcgattgtgagtgcacacctgttgtgtcctttgctcacagcctgt

SEQ ID NO: 148472 - DNA, 122 bp, Homo sapiens
gaggagcgatgagctggtttgcccatctgagtgtgaggtgcctgtggaatatggaatatccgggtgaatatatcaggaagacagttagacaggggcttctaggagacttggtgtggagttac

SEQ ID NO: 148473 - DNA, 122 bp, Homo sapiens
ggctacttcttcccgggccttgtccctccctcccatcctgcttctgttcccactcattctcgcaggcctctgcctgggcaccagcacctctcaccctggccactgccttcgtcggaggggcc

SEQ ID NO: 148474 - DNA, 122 bp, Homo sapiens
ccagggagaaaatgtgcaatttagccatgggcagatttggatatgcagctttgtgatcatcgcactggtcttttttatatgttgatgcttgcttttgcttcttttgtgtaaccccccagtta

SEQ ID NO: 148475 - DNA, 122 bp, Homo sapiens
gaaacaagcaatctgggtctgagttacaggtccttcacccataatgtattcatttaggctcggttgtctcctttgaaaaatgaggcgataggaggcagtggactaaaagggtttttgtactg

SEQ ID NO: 148476 - DNA, 122 bp, Homo sapiens
cgaacagaagaaatggatttcctgctattggtagtccgcaaactcttaagaacaaattcacgttttgtgaaggtaaatttgatttcatgagtaacagacatatttaggattaagattcattg

SEQ ID NO: 148477 - DNA, 122 bp, Homo sapiens
gaagtgccagtgcggagggcgggggtggttaccgaaagatgtaatcccaggaggggccgccgccttcgctgtcccctacctgtaccctctctttatcctaccctccattccccgaccctttt

SEQ ID NO: 148478 - DNA, 122 bp, Homo sapiens
ggaagctaaatgtggcggacttgcaggatgaactgatgcacagtaagagctccttgtggtcgacccttctgacttccatcccgtttccctgtgctggaagacgcacgccaggtggggtcgca

SEQ ID NO: 148479 - DNA, 122 bp, Homo sapiens
tgtctccttgacaaacagcttcctctttggaaatggcttcactcaggtcctgcaggtcatcgagcaggacagagagggaccctgggaaggaagacagcagatgagcaccagacaagggaagg

SEQ ID NO: 148480 - DNA, 122 bp, Homo sapiens
acttctcatatgtaagatcttctaagggcagaaacgcaattgtctttgtattcacttccccgcccacccacaccccttccatggagagcctgcagccaagctcaagctttcaaaaaggcgtg

SEQ ID NO: 148481 - DNA, 122 bp, Homo sapiens
ttgagaatgtttaagttggaattaaaacctccaagctggtctgtgagtgagcctggtttccgtgttctatctcgtagccatgcacgtgggtgagaagctccttgagtccttgttcaacaagg

SEQ ID NO: 148482 - DNA, 122 bp, Homo sapiens
gacctcatcatttacctcccacttacaagtgagaacatgtggcatttggctttctgttcccgtgttagtttgctaaggatgatgacctctagctccatccatgttcctgcaaaggacatgat

SEQ ID NO: 148483 - DNA, 122 bp, Homo sapiens
gttaagaggctcttccctggaaacgtttgcagaatgtggcgaattatctcctggccactccggggaaagttttaggacttactgaaggtcagagtggaagatcagcccagagggaccgctgc

SEQ ID NO: 148484 - DNA, 122 bp, Homo sapiens
tccttagcacacagccaggaacttagtaagtgttcagtttatgagtttctctgtaactggcggctgatgaaaagaagcatttcctgttggtcttcgactaaaggagatgctggcttgtacct

SEQ ID NO: 148485 - DNA, 122 bp, Homo sapiens
ttcaagcttttcgtagcaactggccggttagctcagttggttagagcgtggtgctaataacgccaaggtcgcgggttcgatccccgtacgggccaggattgaaacttttcgaaagtacgatt

SEQ ID NO: 148486 - DNA, 122 bp, Homo sapiens
tggaggacgtggtgccacagctgtaagcccatcacaggtgtgaggcactcacggctgtgtcggcagtgcctggcatggatgagaccttgaagagcatgaatgaagtcacctgtcccggtagc

SEQ ID NO: 148487 - DNA, 122 bp, Homo sapiens
taaaacaagaaaccagtttctttctgtaagtaggtagatctcatctactggatgggagaccggctgtctttgggacattctcttgaagttcagcactcactctgtcaccgaggctggagtgc

SEQ ID NO: 148488 - DNA, 122 bp, Homo sapiens
ttggttaaactttaggcaccacttgggaggaagacacctttaagcgttgaaaacggcccccgcgcctcggtgggagccgggctgggccgcatgcagagcggggtgggcgcaggcagcctcag

SEQ ID NO: 148489 - DNA, 122 bp, Homo sapiens
cagtctgcactccggctctcctcttagtcggaaccaaagtcgaagaggctagggctgccgcgtcgcgaggaatgtctggaccagagcactcttccggcgtcgcccaggagatcaggggtgtg

SEQ ID NO: 148490 - DNA, 122 bp, Homo sapiens
gtacaaggtcctggcggccttaattgggcgcagaaggggaggaggtctcggctgattgctcgcctcccagcagctaatcctcttagcagctgcatttccgcgctacacagttagcagaatga

SEQ ID NO: 148491 - DNA, 122 bp, Homo sapiens
agcaatcgcctgctgaaatctgcaagctcatcacagcgcttggaaagctcaccggggacgcgcagcacaggacacatcctgctctgcagagataagaggcagttcccaggttctcaccgccg

SEQ ID NO: 148492 - DNA, 122 bp, Homo sapiens
ggtgtctccgagtcagggcgcagcacggaagtaactctggggtagaaggcgagggcggggcgggggaaataaactccacagagacaataacctgctgctgccccccaacaccgactcaaaac

SEQ ID NO: 148493 - DNA, 122 bp, Homo sapiens
aatatctactataatattatggtgagagcaaaatttgagggggatgtacacctgcattttcgaagaatatatacatttcggagaccgaattcaaaatgaaaaaccgggctgctgtcccgcac

SEQ ID NO: 148494 - DNA, 122 bp, Homo sapiens
agagtttgagattagcctgggaaacaaagtgagacctcgtccctacaaaaataaaaaaaacgtagccagatatggtgatacatacctatagtcccagctgggactcactacaacatccaact

SEQ ID NO: 148495 - DNA, 122 bp, Homo sapiens
acatacacatattcacacataccacactcacatacacactcgtattcatacacactcatgcgcacacaacacaatgcactcacacacaccatatacacacacacaccacacatacgcatgca

SEQ ID NO: 148496 - DNA, 122 bp, Homo sapiens
ttaaccttttctcttcctcagtcggccggaagagttttcagttgcttagaagcccactgccgatgctgagggcactgaccagccccggccctgggccctctgtgtggctcactcagcaggtg

SEQ ID NO: 148497 - DNA, 122 bp, Homo sapiens
cgcctgggactggctctgtgggctggccgtccctctggctggggacacggggaggccgagcgtgtccgcaaagacacgcgagctgtccacctttctgggctgcaggggtctgcagaacctcg

SEQ ID NO: 148498 - DNA, 122 bp, Homo sapiens
gtccccgttaagaggaggcagctgcgccgcactggctctccaccctccatccggccctggcgcccagtcgtcaggtgttcgagaggttcgtagcgtcacaagcgctctccctagaaagtgag

SEQ ID NO: 148499 - DNA, 122 bp, Homo sapiens
gagctcactctatctgccttctccctgcggctcacactggctggcggcaccctccatcggcgccctcactctctgcgtgtggtctgtccgtgtcactcatctgcccctgtcactttggctta

SEQ ID NO: 148500 - DNA, 122 bp, Homo sapiens
gcacagaccttcccagtctctactcttgctcctgcatccattctccagcagcagctgcagcgatcatgttagaatgaaaaggagatcacatctctcccatgctcagcatcctctcaagagat

SEQ ID NO: 148501 - DNA, 122 bp, Homo sapiens
ttatttcttaacatctgctccatcaatttcgagacagtagttcgagcactgtcttgaccccgccttgtccctcaagccctgatgtttctgggaatttaactatttccaagaaatcttttttc

SEQ ID NO: 148502 - DNA, 122 bp, Homo sapiens
acaatcatgtgacacaaggcagccagagttctccccagaattttgctgccctagtgttagcgaagacagctttccatcctctgagatccccagttctaagggtgttgtaagctggagtcact

SEQ ID NO: 148503 - DNA, 122 bp, Homo sapiens
gacccgagctgcccgcggagccgcacgcgtgtgtgcaaataatggccagcctgtgacaaacgtgccaacgcagagttggccagcgagcccttatatagacaaaaaaatcccgaagcggccgc

SEQ ID NO: 148504 - DNA, 122 bp, Homo sapiens
aaaacggacgctggagctccagcctcctggcggccccctcatttcactctcctgagaagccgggaaccttcctcgctcagagccctcatgtgtcagagaagtctgaggctccctgtgttcgt

SEQ ID NO: 148505 - DNA, 122 bp, Homo sapiens
gctgttgaggactgttgtctcctacaatgtacaacttgtggcttacttggggctctggagcgaatggcttttactttgaccggagaaagtgttgtagttcattgcgagttcgttctttcaac

SEQ ID NO: 148506 - DNA, 122 bp, Homo sapiens
ggagggcagggtcagatatgagtgtcagaaagttactgtatgaaaagggataggttggagcgggtaagagtggaagccccaagccagggaaagagtccaggacagggcacagatgggagagg

SEQ ID NO: 148507 - DNA, 122 bp, Homo sapiens
gcaagtgcgcctcccgcgtcctgaagcccttctcggccctggcctctcaccccgcagccccggacagtaacagaagggctattttaccgcccagttcctgccaggagggccaatcagagcct

SEQ ID NO: 148508 - DNA, 122 bp, Homo sapiens
gagggtgccaagggtgccgggctgggtggaggaggccgaaaagaggtcgcctcgggccagcgagtcttgcagaccttcgagcaggaacctgataggagggacgagacttggctaaaggtcac

SEQ ID NO: 148509 - DNA, 122 bp, Homo sapiens
gtcatgcagctggaggctacaagtttccgaccctccccaaattggtcccgagaataatatcgctattgtaagacctaaaattagtacttgagatattttgtagaccctgcacttgatggatc

SEQ ID NO: 148510 - DNA, 122 bp, Homo sapiens
tatcactgggataggagctgagccacctgaattttggagccacctgacttgtgctcttctcgttggatagcaagactttccttttcttacaaatactcatttaggtacattgaaactgttgg

SEQ ID NO: 148511 - DNA, 122 bp, Homo sapiens
gcaccccccgaccttcttcacccatctgagcctctacaccctcctgagcccctgcacccacgtgagcctttgcatccacctgagcctctgcacacccctgagcctctgcaccctccctgtga

SEQ ID NO: 148512 - DNA, 122 bp, Homo sapiens
ctgttctcctcctcagcttcctgcgtgggttcctggtaagtgagtcgaacccgccggatgcgcgcgcgcctgcgcctccgcccaaaaggatcagtttccggctgtggactacatttcccaga

SEQ ID NO: 148513 - DNA, 122 bp, Homo sapiens
ctcgatctcctgacctcatgatccatccacctcagcctcccaaagtgctgggattacaggcgtcagccaccgtgaccagcctgaaacaggagcaagttctaaactcaggctctagagtcaga

SEQ ID NO: 148514 - DNA, 122 bp, Homo sapiens
ggagaaactgccgcccgcggccgagccggccgagcgcgccttgcgggggcgggatcccggcgccctaagaccccacgaccccgcgcaccggccgctgctgcgagaccccggcccgcgtcggt

SEQ ID NO: 148515 - DNA, 122 bp, Homo sapiens
ccttttgtggggaaaggaggcttagaggctcaagctataggctgtcctagagcaactaggcgagaacctggccccaaactccctccttacgccctggcacaggttcccggcgactggtgttc

SEQ ID NO: 148516 - DNA, 122 bp, Homo sapiens
gacggcgcgtccctgtgcttacggtccccgatgaggggtgacagtgggtccctgtgtgttcggtccccgcttaggggtgacggcgtgtccccgtgcttacggtccccgctgaggcgtaacag

SEQ ID NO: 148517 - DNA, 122 bp, Homo sapiens
cgatagccagcagatcctggggcttgctggccccaagtgagttgtcagggtttcagaggacgccagtcatggcaaccccagctccatggctgccacacaggcctgggcttcccaggactgcc

SEQ ID NO: 148518 - DNA, 122 bp, Homo sapiens
gtctcccacgcagctcctgctcctgcctctgacctgcatctgtccctctcctgtctcccccgctgccccttgcagctcctgctccaggcctctgacctgcatcgtatcatctgtctacacat

SEQ ID NO: 148519 - DNA, 122 bp, Homo sapiens
tgggcaggaagccggcgatgatgggcaccggccagatgagggcggccacgctccacaccacgatgaccagggtcatgaagcaggccaccagcgtggactcaatgggcttacggttcagccgc

SEQ ID NO: 148520 - DNA, 122 bp, Homo sapiens
ggagctgctttcagactaacttggattgaggaggtcctcactttgcttctcgtagagttccgtgaggatgcactgagaggggcagtaaaacctcacgctcacgggcatggagcaagcactct

SEQ ID NO: 148521 - DNA, 122 bp, Homo sapiens
atggactgaaattcctgccctaggtaggctgattgccttcctgaagctctatttatagatcgcagaggaaatctagggggctttatctcacttcccaccccacataataaaactggttcagg

SEQ ID NO: 148522 - DNA, 122 bp, Homo sapiens
ggcaccagctttagggcacttgaggacaggccccagctaattcctcttctgcagctcccacgcacacctagcacccatgggtgttcagtaacagctaagtggtaaagaaaagcagacaaccc

SEQ ID NO: 148523 - DNA, 122 bp, Homo sapiens
ggtccgagaaccgtaagaaaagggggctcccacctcccgctctggggtcgccacttgcctcgcaggcaggaggaggctcccagagtagatacaacttgcccgtcacccggatgggttggtag

SEQ ID NO: 148524 - DNA, 122 bp, Homo sapiens
catggctggatcgcctgggaccaccgagaggggcaacacagatcacacgtgagtgggcttcgcgcggacccaaagtagaacagtcgggaagcttttaccatttgctttgccatgttgagttc

SEQ ID NO: 148525 - DNA, 122 bp, Homo sapiens
gatactgtcgcatccactctcatgcagacaaacacacccacaggtaaccacagcctgccccgagtcccctcacccaggagggaaacgcccatggcacataggccaggaagctgggggatgct

SEQ ID NO: 148526 - DNA, 122 bp, Homo sapiens
gatgaaaaataatagttcgttgggacaagtagacaccagggagcctgcttctgaacagaacgcagaggtctgcccccctcccccaagtggtgcgcgggaagaagaggggagaaacataaacg

SEQ ID NO: 148527 - DNA, 122 bp, Homo sapiens
ccctccaggatacatccagcggcggctgatcaagtccatggagtcagtgatggtgaagtacgacgcgactgtgcggaactccatcaaccaggtggtgcagctgcgctacggcgaagacggcc

SEQ ID NO: 148528 - DNA, 122 bp, Homo sapiens
ggcgcgggggtccgggggtgccgggggcgcgggggtgccggggacgcggggtagggacggcgggaggctccgtggccggccccgggttgaagttggtaactgagcggcaactccggcgggcg

SEQ ID NO: 148529 - DNA, 122 bp, Homo sapiens
taccgctcccatatgcgcatcaggcctggcatcttgttctctgcaatgtccagggccttgcgtccccaggctgcgactttgtagggcagtttgtcagacatgctggtggcgctcgtgatggg

SEQ ID NO: 148530 - DNA, 122 bp, Homo sapiens
atgacttggttctcagaggtccactgtgaagtgactaattctcccttaaaattaacgggccgctcctggggagagccgtggactgcaccttgtcagacacccccggcgctggtgcgcgtgca

SEQ ID NO: 148531 - DNA, 122 bp, Homo sapiens
caatggtgttctctgtgtacccttccgcgagggctggggagtataccgccgcgcagaagacgcaggccaggggagaattcgcgccgggcggcaggcggggtggcgggcagcccctgggcggg

SEQ ID NO: 148532 - DNA, 122 bp, Homo sapiens
cagcaccagctgaagaaaccccgggtggtgctggctccggaggagaaggaggcgctgaaacgagcgtatcagcaaaagccatacccgtcaccaaaaaccatcgaagacctcgccacccagct

SEQ ID NO: 148533 - DNA, 122 bp, Homo sapiens
ccacgtcagctcatgagccacatacacaaggaaacagaccttcttcctctctgtcaagtccgaagatgccagctgagacgttcttcatccagtttaggggtggacctgatgtccctgagtgt

SEQ ID NO: 148534 - DNA, 122 bp, Homo sapiens
agagagccaattcagtcaagcaataaattggttagcaaaggacttgactctaatcacacacggtacatagcagatattagtagggccttagtagggcaatggggttaaactctcctagccat

SEQ ID NO: 148535 - DNA, 122 bp, Homo sapiens
tgttagtgttcctttaattctcccgtagtgttcctttaattctcccatgtgtattcggtacgattgcctgtacgttccaggcatagtcaggtgactcagcttgagtctgagctcaaacgtgc

SEQ ID NO: 148536 - DNA, 122 bp, Homo sapiens
gaggagactaaaacaggtatggacatggttctgtttctatggaaataaatatttttatcacgttatctcagtgcaaggctgttatgggttgtatgcaaaagtcatttaagagactatttaac

SEQ ID NO: 148537 - DNA, 122 bp, Homo sapiens
gaggcctcttaattattactggcttgctcatagtgcatgttctttgtgggctaactctagcgtcaataaaaatgttaagactgagttgcagccgggcatggtggctcatgcctgtaatccca

SEQ ID NO: 148538 - DNA, 122 bp, Homo sapiens
gcccagacaaattgtgtccatgagttcaatgggacaagcagggtctttacacagaattcccgggtgaacgggacggagatgaaacagaagttacacttgccaacagccccatctctcatctc

SEQ ID NO: 148539 - DNA, 122 bp, Homo sapiens
tgcccccaccaaaatgaaggctgctattaaacccgcagccactaaaaataaatatttaaacgccacatttgtgcagctgagccaggctgggcgcgccttacaggcatgccatttcctcgggt

SEQ ID NO: 148540 - DNA, 122 bp, Homo sapiens
tttccgtgagacttcagaatcagaatacaaatctatttcccttgccagtaccatgactctcgggtgaaggagagaaatgaagttattagtcagccatcagcttaatgggtcctcaccgtccc

SEQ ID NO: 148541 - DNA, 122 bp, Homo sapiens
cctgtcccaagtcctcccgggcccgccagcccgcggccccttaccttggcctggcatttccgatgacaggagaagctgcagactgcaagagggcgagacacagaaagaaagttttagccgcg

SEQ ID NO: 148542 - DNA, 122 bp, Homo sapiens
cggttctgggagtcggaggtccgaatggggtcactgggtcacagtgaacggcgtcggccgcgctctgcctggaggctcccggggagaatcctctcctggctcctggccacgccctccatcct

SEQ ID NO: 148543 - DNA, 122 bp, Homo sapiens
ggaggggccaggcaaacttttctttctcttttgccccctccagaggtaaagtcccgaacgcggactttccggcggggacgcgatcggggggcatctgagagggaccccgggctgcgagacga

SEQ ID NO: 148544 - DNA, 122 bp, Homo sapiens
agcgacacagaagccaggcctggaaggcagagcgggagagcagagagacatgctccacgccgcaggcccagctcaccctccgactgaggcaggagtgctggagctctcggcggccggtgggg

SEQ ID NO: 148545 - DNA, 122 bp, Homo sapiens
cccgcagaagggaactcaaaccctgtctctttccccaggtctcggaggaggctttggatacgtggtcggcggaatccactgggataaaacgggcttcgggagggccctggggggacagctcc

SEQ ID NO: 148546 - DNA, 122 bp, Homo sapiens
cttacgtcacgtccggcgcctgcggcccacccctccctttccggtcccccaatccacagccgcaagtttccccaacactgcgttacgctacgccacgcccccggaggttcctaaccctgcgt

SEQ ID NO: 148547 - DNA, 122 bp, Homo sapiens
caggcctgggttcccatcgcttcggcgtccctgggcccgggacacggaacacacttgctgcgtgctgtgtacaagaatgaacgaatcggcctgcctagcaccccttggccggctccaggcct

SEQ ID NO: 148548 - DNA, 122 bp, Homo sapiens
gacatgcctgggggagggttctctgtgcagagaccgagctcctggctctcccctgtaagccgggtgcttagtgagggcccctgtggagaagcccccgggggtcccgcctgctcctggctctc

SEQ ID NO: 148549 - DNA, 122 bp, Homo sapiens
tggtgagcggcgcggtgctggtgtacttcgtggtcaggacggtcaggtgaggcaaagcctcggtggggcacccccgtgggcctgagatacgcaggccggtgatctccagcaaggctgacttc

SEQ ID NO: 148550 - DNA, 122 bp, Homo sapiens
agagtgcactgcatttttagcaaggcagccagaacttccaacaggaatatgccattcaaccggcaaatgcagcagagctcttacatcatctcgaattttcccaagaagctgacattttcaaa

SEQ ID NO: 148551 - DNA, 122 bp, Homo sapiens
ggagatgcttcatgccccagccgctagcatcctagaagtaattccctcctccttggaaaacgcccactacaatccttaaagctcccggagtgagcccttttaaaaatgaattgtatctggcc

SEQ ID NO: 148552 - DNA, 122 bp, Homo sapiens
agtaactaacacaggcaggacacttttacactaccttcaagcactaccatattcagatgtcgccgcatggggaaactgaggctggagaaggtgaagtgacttgcccaaggacaggaggctag

SEQ ID NO: 148553 - DNA, 122 bp, Homo sapiens
gctagattttagtcaggtactagtgcaccaactagtataacaccagactgttcaggagttcgagaccagcgtgggcaacatagctagactccatctttaccaaaaaattagccgggcattgg

SEQ ID NO: 148554 - DNA, 122 bp, Homo sapiens
agcccccagctttgctttctgatccgctgctgactcagagagcagatgcctctccctctacgggaggtattggcgttgactgcatcctgcaaacctcccgagtcttctgccttgtgggactc

SEQ ID NO: 148555 - DNA, 122 bp, Homo sapiens
caacttctgagcgacgcaagcatgaaatggctgtccgatacaaacagaccccttcagatacggaatgcagcaaacccctaattttccttgaaggggccacggaaagccaaacggattcgtaa

SEQ ID NO: 148556 - DNA, 122 bp, Homo sapiens
gtccagactctggcctgaaacctcctgggtgtaaggccatgaatctgctcgacttgctcacgggcgggaaggaaacaaggaaacaacgaaaagtttcctgcgaagtgaccaacatcccctat

SEQ ID NO: 148557 - DNA, 122 bp, Homo sapiens
cggtggccccagcctacagatcgcacacaagcccccgccccatccctcattggctccgctcggccagacccaccgcccgcccacttgaaaagtgatacaaccagggcgcttcagcccctcct

SEQ ID NO: 148558 - DNA, 122 bp, Homo sapiens
ggtcggaggtcagaggctgaggtcaccaccgtacccgtcaggccgtggctagagaggggtcggggctcgccgggactcaccgacagctcgctggaaacgaggcatgtggaaattgggcctcg

SEQ ID NO: 148559 - DNA, 122 bp, Homo sapiens
cgcgaggaagccagggcccgggaatttctttttccggtcccgccaggtcagctgagtcgacgatcacgtgacttggactaacggcctctggcggggcgggacctgctcgagtgaggccggga

SEQ ID NO: 148560 - DNA, 122 bp, Homo sapiens
cccgggccaagatggctgcgcggtgctccacacgctggttgctggtggttgtggggaccccgcggctgccggctatatcgggtagaggggcccggccgcccagggagggcgtggtgggggca

SEQ ID NO: 148561 - DNA, 122 bp, Homo sapiens
aaatctgccttcctttttattattctgacttataaactgcagtgacctctgagtcaacttcgccatctcttggccctgtgccaacattgtgttctgtgaaaagagagtcctgccaagggcta

SEQ ID NO: 148562 - DNA, 122 bp, Homo sapiens
ttgcaccagggagaagtgactttttcccctcaatgaccatagactagacagacaccctgccgagtcttgctctgcacccgatcttgtgcttgcttctgccagccaccactaacacctttgtc

SEQ ID NO: 148563 - DNA, 122 bp, Homo sapiens
cgaggagtatgtagagaagccattgaagctggtcctcaaagtaggagggaacgaagtcaccgaactctccatgggcagctcgaggcacgactccagcctcttcgaagacaaaaacgatcatg

SEQ ID NO: 148564 - DNA, 122 bp, Homo sapiens
gaacacgtccccggctgcctcccgtccacagacatggtgggcgactccgcgccggccctccggtccttcttgtggaccctggagtgcaagaccagctggtggtaggttctgaaagctttgcc

SEQ ID NO: 148565 - DNA, 122 bp, Homo sapiens
tattcaccattattgttttagataacggaagattatggggtcctggattcccagggacctcggacttctaaaatccagacgtcctgcaatctgtcttaggcccaggcgtggcagccccaccg

SEQ ID NO: 148566 - DNA, 122 bp, Homo sapiens
cgtgagccttcggcctggtgcgccccgctgcccttcctggctgtgactctggtggggttccgaaggcccctttatgcccggcagacccctaccgacggcggcattacattctggggccacga

SEQ ID NO: 148567 - DNA, 122 bp, Homo sapiens
gagtgtaattaggcgcaattaaaatgaaaataccttcatcttaaaatcggtttccctctgcggctctctcctccccggcccactgtgccgccgccccccactctctccaaccccagccgcaa

SEQ ID NO: 148568 - DNA, 122 bp, Homo sapiens
gcggtgcctgctcctgacctgggctccactcccaccccgtgcgccaagcgcagccaccgccgcccacaaaaggatttttcaaatgtttttttcgcggggaaagaagtttgaagactactgca

SEQ ID NO: 148569 - DNA, 122 bp, Homo sapiens
agaaaagaccactgacttcacagcacagtcctcaaagaccagtttcagtccactgactggcggaaactagttgccaagcattgagaagtgagtgggtggagaggaggtgggggaagagagtg

SEQ ID NO: 148570 - DNA, 122 bp, Homo sapiens
gtcaggaagactgacagaggcgggcccagcggcagcgctaagtccagtctgggccgcatacgccgcccgcggccaggagtcagcaggtcatcacgttacagctgcaggggagagaccaagag

SEQ ID NO: 148571 - DNA, 122 bp, Homo sapiens
cgaaggaagcatttcgagcacgactgacgctccccttattatttgctaagccgctgcgctcgggtctggctacgatttgctttcagaataacgggaaggtgcaacaagatcgcttccctaga

SEQ ID NO: 148572 - DNA, 122 bp, Homo sapiens
aacatggagaaaccctgtctctaataaaactacaaaaaaaattagccaggagtgggggcacgtgcctgtaatcccagctgctcgggagactgaggcaggagaattgcttgaacccaggaggc

SEQ ID NO: 148573 - DNA, 122 bp, Homo sapiens
cctctaactgggaggtggggaggtggggctgggatctctagcctgctgctgtggagcccacggctctccagcctccattagtcttcccagcagggtcaggaaggccaccctccagggtggac

SEQ ID NO: 148574 - DNA, 122 bp, Homo sapiens
cacccaagctgagaatttaatttaggcatatcccaggctggttttgtgcccctgagcacccggtagaaacaaatacaagtcatctctggaaaagaagcttcattttacacctcaacaaattg

SEQ ID NO: 148575 - DNA, 122 bp, Homo sapiens
accaaaagagggaagtctggagagggacaggatggagcaggacgggggcagtgtagaaaccgcaggcaagtctaagcagagcacgtttgggagttccttctgctattcttgcaacttctcta

SEQ ID NO: 148576 - DNA, 122 bp, Homo sapiens
ggcctgggtatggagttcagatacatcttttgagtagttgtttattcaaaaatatgcctacgtctttagcaaattactcacagggtcagcgactgttgaccctgtgtgtttgttagactttg

SEQ ID NO: 148577 - DNA, 122 bp, Homo sapiens
tccagcttctttgtgcgctcacagcaggcactgcactgtccgtggttacccttagggtggcgctgtttattggcgcctttttgcttggcacattctggttcctctgcatggagtctcctttc

SEQ ID NO: 148578 - DNA, 122 bp, Homo sapiens
gctctgacacctcggtgttttaattagagtaagcaaaggacagacgcgcgtacgtcccaccgcgtcagccctgtgaacatccagaggttccagccagagtacgtccggccggaggcggggcg

SEQ ID NO: 148579 - DNA, 122 bp, Homo sapiens
ctgcagaatccgctgctgcagggcttgctggatgttgggggtgctgtctgcccccagccccggctgccccatctggccaagctgtcccatctgagccgccatctggcccatggagctgccct

SEQ ID NO: 148580 - DNA, 122 bp, Homo sapiens
gaggcagcctctgcaaactccggcgcgcagcgccgccgccccggcacagcccggcagcagcggcaagtgcaggaccaggcgccgccgctctgcaccagtcgccttggctcagctgtgccggg

SEQ ID NO: 148581 - DNA, 122 bp, Homo sapiens
gacgtcactggcatgttgaactacaaagtccatgatgcagtgcgggatcgcagaatgccgcgagtgcgccctggttaggttggagtcccttggccatcaaccttttcacccggtagagctgg

SEQ ID NO: 148582 - DNA, 122 bp, Homo sapiens
agggctggttccttctgagacagtgcgggaggatctgtccctgcctctctcccaggttcccggagctctggcattccttggcttatagacggctgtcttctctctgtcttctcatcatctgt

SEQ ID NO: 148583 - DNA, 122 bp, Homo sapiens
aaggccaggggtggtaggttggcccggtccccagggcaggggcggtggggggagctccttcgtgcatccaaactccgggcttgggaacctgtcgaagtgcctgcctgctgtctgtaagaact

SEQ ID NO: 148584 - DNA, 122 bp, Homo sapiens
gcgtgtgacccgctgagtgaggcacagaggcctcaccgccctgtctctctttaccttccccgtttacaggcgccttaaatgattcctctacatgaaggagaaccctgtcagatggtattagt

SEQ ID NO: 148585 - DNA, 122 bp, Homo sapiens
cctgccaccccaagtacccctttgaatgagaagttggcagtgacatgaaggatgttgggccgtttgtctgttagattcatttgactccaccctgggatcaaggaagaaaggttgatttggcc

SEQ ID NO: 148586 - DNA, 122 bp, Homo sapiens
agggtaccagctactgccttgtgtgtcttcgtaagtatgcttcagccccgaaccctaccacgcttgatatggtgacagagcctggcaattaaagggtcctttctaggcctgcagctaagcat

SEQ ID NO: 148587 - DNA, 122 bp, Homo sapiens
tgttcagggcatccatgatcacggcagagccagccacaggggggtacccagccggggagccgtggtcctggggtgccacgtgagatgagggctgcggcgaggggctccgggagcgctggggt

SEQ ID NO: 148588 - DNA, 122 bp, Homo sapiens
atcccagaggtgcgggataaaccaggcgttccagctgctcacacgctgtttggtaccccgcgtctatgaagcacaaagcaggagcggattggaggttttacaaactgaccaaccccgccgcc

SEQ ID NO: 148589 - DNA, 122 bp, Homo sapiens
ggtgagggggccttggccagccgctctgggctttggaggagcctgggggttcttggcctccgcgctgctcttgccccagcctccatctctccggcggagaaacccactccccccgggctcca

SEQ ID NO: 148590 - DNA, 122 bp, Homo sapiens
agcttgagcctaggatggatgaaatctgtaatccacttgaaaatgtgcactgtcagaatacgattaggcaagattgatgaatattctacttacttacttggaaaccaattctctacctttgt

SEQ ID NO: 148591 - DNA, 122 bp, Homo sapiens
cctggtatgttcagggtacagtgggagccatgccacatgtgatcctcttcactgacaagccgctcagtctatatgtgttatatacagcagaggaataaaacctcatctggaaccacgaacct

SEQ ID NO: 148592 - DNA, 122 bp, Homo sapiens
gccccccgggcctccaggtttcggcccgccccctggcaggcagcacaggtggctgagcaccgctacagcggcctctcaccggccgcttggtccagctcccggcgctgcccactgggtacgga

SEQ ID NO: 148593 - DNA, 122 bp, Homo sapiens
gcctggacagggtggggtttttcggaggagttgctctgagaggtgcagccggtttactcccgccctgaagttcccaagggcttccggctctttaacgttctaaatacctgtctgtgaatatt

SEQ ID NO: 148594 - DNA, 122 bp, Homo sapiens
agggagaggcagagcatgttaaatgtctcattaggccttctgtctgattctcattagattcgctgactgcttctcattaggcccattgcctcaacttctttcaggccctgaatatgtaggcc

SEQ ID NO: 148595 - DNA, 122 bp, Homo sapiens
acacctgctggccgcccccacgcccatcctagctctaccccaggccggggcgcctgacggcggggaccccagcttcattcagccccagaggaagctcagacatctgagcaccctcctcgcat

SEQ ID NO: 148596 - DNA, 122 bp, Homo sapiens
tagttgagaaagtggtcaagaggtggatccatgtgaacgccactgggaaatgagagacctcgttcccaatcacggtcagtgcaactcgaaagcctaaaatcagtttaaaacaaaggtatcta

SEQ ID NO: 148597 - DNA, 122 bp, Homo sapiens
ctgggcttctcaccttcacagtctcagagaagtgactttcacaaaacaggcaggtacagccgcaccacattaataccctcgcatagccaatcctccgcagtgcccacctcagcctatgtata

SEQ ID NO: 148598 - DNA, 122 bp, Homo sapiens
ggtggccggcggtcgagaggctgcggcgggcgaacgccgctggagtcgcccagactgcctcggatttcataatgaatctgaggaaggacaaagggtacattggaccgcctcagctcagaggc

SEQ ID NO: 148599 - DNA, 122 bp, Homo sapiens
ggctggagaggggtctgggatgccctctgccgaggtggagtccgccctgcaaggccctggcgggaagggccagacggatggagaggggcacacctcccgtctgtcagtctttctttcagcat

SEQ ID NO: 148600 - DNA, 122 bp, Homo sapiens
ctggctgtcctgctctagtccctgggattcggcttgagggctaccgcagtctggcccggccggccctgactgatacgggctctgaggtttccaggtctgggcaggacaaggtccctggtgac

SEQ ID NO: 148601 - DNA, 122 bp, Homo sapiens
gcctaaccccgcacactcaccatttcccagcttccaggatgtccgggcatcttagctgtgcgtctcccaggacttgcagatcacagggtaacggaggctgcgacaaagtcaccggggattcc

SEQ ID NO: 148602 - DNA, 122 bp, Homo sapiens
tataaatcagttagtgccccactgaggcagctccggacccgattgctttccacatctggccgtccctgtatgttttggatatttgctttactggttgctcaggctgagctatcctattataa

SEQ ID NO: 148603 - DNA, 122 bp, Homo sapiens
ttatgccaggtcctatgaaggtgaatgccagctcaggggtgtgtgtggagccggtgcgcccgcggtccaccgtggtggctgctggtgcagtagcatctgtgttggcttctgtggccatgcag

SEQ ID NO: 148604 - DNA, 122 bp, Homo sapiens
tccctgctggtgctctgcggctgcctggtcctcatagtcaagctgctcaactctgtgctgcgcggccgcgtggcccaggtcgtgaggacagtcatcaatgcgggtgagggcgtgggaggagg

SEQ ID NO: 148605 - DNA, 122 bp, Homo sapiens
ccaaaaagtagtgaaagataatcaccaaaataatttcattgctatgacagagccttatggcgacaacctccattctttaccaacattttctctatccctaactttcctcttgcagtccccta

SEQ ID NO: 148606 - DNA, 122 bp, Homo sapiens
gcaggcggaccgggggcaaaggaggtggcatgtcggtcaggcacagcagggtcctgtgtccgcgctgagccgcgctctccctgctccagcaaggaccatgagggcgctggaggggccaggcc

SEQ ID NO: 148607 - DNA, 122 bp, Homo sapiens
accctctccgatctggcactgtccttgtcagtgtgactgtcttcgatgcaaatgacaacgcgccggtcttcaccttgccagaataccgagtgagtgttcctgagaatttgcctgtgggcact

SEQ ID NO: 148608 - DNA, 122 bp, Homo sapiens
tggccctgtcatgtgatgtgtgcccagggactactcagccctcacttttagaacggtttccggaagtgatgggagggattgggcagggcagctaaatatagtcctggggccatggctcagtc

SEQ ID NO: 148609 - DNA, 122 bp, Homo sapiens
atctgcattcaattccatatcagcctgagttaaaaactttagaatggggaatccacctctcgctttataaccacctacttcctgtcactcgtcattttctaaataaatgagaagttcccttc

SEQ ID NO: 148610 - DNA, 122 bp, Homo sapiens
ttctccccatggcgaagggagagagttgatctgtgagtagctcttcaactagtcagttagcgtagcttgttcaaagttaatctttcctgtaggcatggtaatttaaatgaattgctgtagtt

SEQ ID NO: 148611 - DNA, 122 bp, Homo sapiens
ctgccagagcgacggagcgcgcgagcagcgcggcatcaacaggcagaaggtgccacggggcggacgggacccactgcccgggtccagactttccatccgagaaagcaaaagctttcagtatc

SEQ ID NO: 148612 - DNA, 122 bp, Homo sapiens
acttgaaatatggacgaaaccaaatatagcatttagacaagggggatttctttacccagccggaattaatacaataaaaaatatttttgtctttattattaacagtgctaattaagccaaaa

SEQ ID NO: 148613 - DNA, 122 bp, Homo sapiens
ccaggccgcctgtgctaaaatgaggggttttcccttgggtggaccagaccgcaggctccgcgtggattttgccaaagcagaggagactcggtacccccagcagtaccagccctcgccactcc

SEQ ID NO: 148614 - DNA, 122 bp, Homo sapiens
cccagaccagtgcggtcctagccagagagaaaggacatttgccaacaatgagacacgaagcgcccatgcaggtgggtccataaagaaagagtggcctcgggaggaattgaaagagatgcttt

SEQ ID NO: 148615 - DNA, 122 bp, Homo sapiens
tctgctccccacaacccatggtagtctgttgaggagaaattgccttgggctaaaatgccccgcttttggggccacaggttaggaggcttcccattaggtttgattgtgaaagaaaacaaaac

SEQ ID NO: 148616 - DNA, 122 bp, Homo sapiens
ggttttaagtttttgcagcatagacttctttggcatcgtgaagcttataaatcccccacccggtgtctgttgttgttgttgttttgagatggagtctcgctctgtcgcccaggctggagtgc

SEQ ID NO: 148617 - DNA, 122 bp, Homo sapiens
catttcacatggagcttagaggacagggcgagggtccacactctccttactgcgctctgccgcggtcctgccccgctgtgccctcgcggcccccttagagccactgccggcgcacgcggtct

SEQ ID NO: 148618 - DNA, 122 bp, Homo sapiens
cctctcacccttctttcttctcttccttccttccctcctaccttcctcccttccatcccccgattttaaaaaccacagtgattgaaactaaagagctggcctacgcacctcagggctgagga

SEQ ID NO: 148619 - DNA, 122 bp, Homo sapiens
tgcctctggcttccacggcgacagctcgccgtttgatggcaccggtggctttctggcccacgcctatttccctggccccggcctaggcggggacacccattttgacgcagatgagccctgga

SEQ ID NO: 148620 - DNA, 122 bp, Homo sapiens
gcttccagcccgtttcccccgcctggaaactgaggacggcaacccccaccctcgcagggccggtgggaagacacaaagtgatgtgggcaagtgccaggcccacatggtaagtacccaactaa

SEQ ID NO: 148621 - DNA, 122 bp, Homo sapiens
caggcccgcgggtccgggagccactgcccccgtgccgcgaccctggggattttgtccctgcgctcagagactacagccgccgctattatggccactccagtgtcccggactaccgtcccttg

SEQ ID NO: 148622 - DNA, 122 bp, Homo sapiens
ggtgggcgcttcccccagcgcccggcacagcccggaccccggtgtaaagtcgggcatctgcgcagtaaacatctggcctcggagctgtcctccgcgccttggctgccccagccaggggaagg

SEQ ID NO: 148623 - DNA, 122 bp, Homo sapiens
ccgccgctgcgccctccggcccctgctcctcgcgccggcccgcgtgggtcccggcgggcgcgaacccaccatgcagctgcagttccggagctggatgctggccgcgctcacgctgctcgtgg

SEQ ID NO: 148624 - DNA, 122 bp, Homo sapiens
gggctgggctaggcggccgctctccccgcccccccgcggcaccccgggtggtgagcgccgcgcgagcccggagcccagacggaccccagccccacaagcccaggaacaggagcggcggcccg

SEQ ID NO: 148625 - DNA, 122 bp, Homo sapiens
ccacatgcagctcagctcagctcagctcagccctctcgctgctcccagaggtccttcacacgaagacacgccgcatgccaagcccaagggcacatgcaccatctggagctcacgccgccagc

SEQ ID NO: 148626 - DNA, 122 bp, Homo sapiens
tctgcatttcttccatgtgggagaggaggggctcagtaagtgctttgtaaaatacacagccgaagtgatgcacgtgctaacaaaggagtgtgacaggacttaagtgcccttctagacacttc

SEQ ID NO: 148627 - DNA, 122 bp, Homo sapiens
gcctgtgagggtctaggggctctcagggtctcggggtggaagggcctggagcctgattcccgtccctgacatccctgctgggtggtcctctaatctttgctggtgtctctgcagggatgaga

SEQ ID NO: 148628 - DNA, 122 bp, Homo sapiens
tgccacggaaacaacaaccgggctgagctgagacctgagacacgaggtccccttgctccacgagcacctggggacccgcccctgcacaccccagtgctcctgggctggaagccgcatctctc

SEQ ID NO: 148629 - DNA, 122 bp, Homo sapiens
ggactttcctgaagtatggacattccacagacagatcatttccggtgccacagaaagcttcggaatttaagaagtctgaaggagggtgcagtagggtgggaaacagagcatgggccacagcc

SEQ ID NO: 148630 - DNA, 122 bp, Homo sapiens
atgtacagtggggaatggaagagtcctgtactctcctcctcaatgcctgtgtctctcccacggctgcaggtcagaggattcccagctcccaaccccgcagctagccaacccagagccaggag

SEQ ID NO: 148631 - DNA, 122 bp, Homo sapiens
cggctccggcagtggcagcggaggcctgtgtttgcggccttcggcaagcgactgagatggcgagcgcaactgcacctgcagccgcagtccccaccctggcttcgcctttggagcagctccgg

SEQ ID NO: 148632 - DNA, 122 bp, Homo sapiens
tctgtatatattatttggattatgtagaaattacccgtaagaaaccaagacttttcaacacgaacctcatgacttccacattctatttttgataccttaacctaaagtaatttcacactctc

SEQ ID NO: 148633 - DNA, 122 bp, Homo sapiens
aggacccacctggaggactgcgggtgttaggtgtccaagtagaaagttcaaatcttccgacggcaggtaccttacgtgggattactgagagccagtccctcttcccccccctggctctgagg

SEQ ID NO: 148634 - DNA, 122 bp, Homo sapiens
cacacacacgagagacacaggcaagttgctaacttttgtcagattatttcttgggagctgcgacgcctcacggggttggggcggattcagagtttcgagttgccactaacacgactccggcc

SEQ ID NO: 148635 - DNA, 122 bp, Homo sapiens
gagtgttccatttgctcccttcccagcggaaaggccctcatctgctcccgctggactgggcgctgctctggttcctagcctgtggcttagtaagtgctcaggagaagtcagttgaatgagtg

SEQ ID NO: 148636 - DNA, 122 bp, Homo sapiens
accccaggacgccagaggaggaaagggaggggcgtgtgggcagcgaggtccctacgcttccgggaggagccttaaggagtccccacccaggggttctagtttccagccgtcagatgtgccgc

SEQ ID NO: 148637 - DNA, 122 bp, Homo sapiens
cctaggtggatgctggtgtcaggatcctgaacccaagtccctgatttcataaaaagcatccggaatcctgctttcctgccactgttatcccacaggggacagggcaggagttggcagctcag

SEQ ID NO: 148638 - DNA, 122 bp, Homo sapiens
gcaggcaactgcaaacccaggcgacctcgcagcttcgcatcagcgtttcccctcattcatcgaagatttctaaactgatatgtgcagaatattagtgatctctgcagactagctgccgaaac

SEQ ID NO: 148639 - DNA, 122 bp, Homo sapiens
gtccaaccttccgcggcgagcagcgccggcccctcaccgagctgtctgacccggggtctccgtgacttttaaaagtttgttcccagcctcccacagggcactggcatggccatttgtcagca

SEQ ID NO: 148640 - DNA, 122 bp, Homo sapiens
cctgtctgggccaaagggtcagctcagccctgggacggggatatgtcaggaataactggccggtggacccaggactcaccttatccatgctgggccaggccgtgtttgtgtttgcaggacag

SEQ ID NO: 148641 - DNA, 122 bp, Homo sapiens
tgctctgagtttaatctttcctactggcaaaatgggtacagtcagtacacagagacttcccgtgaagattaaattcaatccaatatgtgaagtacctgatgtaacagatatttgattaatat

SEQ ID NO: 148642 - DNA, 122 bp, Homo sapiens
ggctgctcccaagcaaagactgagcacagtgggatataggaattcctggaagacaattgacggccagctttgactcagggtttcctcaacggccttaaagaactactgtctcctgcataggt

SEQ ID NO: 148643 - DNA, 122 bp, Homo sapiens
ggggagggcccaggcagccaagccggcaggcccactggttatccgaccttgtgctctggccgtgggtggagaccttacatccagctcagagcgcctcctcccatcccctgtgtcctctaggc

SEQ ID NO: 148644 - DNA, 122 bp, Homo sapiens
ttccacatacactcccacaaactggggcctcttggataccaggtttcgtgttgggggttccggtcggggagggggcacctacacacagatctggtccccgccctagaggtgtgggaggacac

SEQ ID NO: 148645 - DNA, 122 bp, Homo sapiens
gtgaggctgtaggtgtgacaaagcacacgtatatcaccctaggtatgaggcgtgcatccacgtgagccagagggtcacagaatgtaggcagggaggggtgtgtggggggagagacagacagg

SEQ ID NO: 148646 - DNA, 122 bp, Homo sapiens
ttgtgtgtctgctcactattgtgctgtagcctctggaagttgcttaggagcttgggatttcgtggagaggtgggagttagttgcttctgtccaaagaggtcggccaatgggggccattctga

SEQ ID NO: 148647 - DNA, 122 bp, Homo sapiens
aaagaacagagatccaggtgaagagaaggttaatgtccaggtgtgaccagtggggagccacgtggagacaaattccaggcagagaacctctggctgcctatcttttcattttccaaagctta

SEQ ID NO: 148648 - DNA, 122 bp, Homo sapiens
actgcataagtagcaaaaagacaaggtgatgtactatcctaataattttcccaggtcaagcgtatttgataaaaactttgaaattctattatataaattatattctgacataaatggatcag

SEQ ID NO: 148649 - DNA, 122 bp, Homo sapiens
ggggaggtgtagggaggtggtggcagtttcctttgccctcagcctagtcctgaaacatcccgaggtggaagggtccgcttcaccagcatggcttctcttgcagcctttaaacggcactcgcc

SEQ ID NO: 148650 - DNA, 122 bp, Homo sapiens
cagcccagccacgcaaggcgactccatagccgtgcccagggccaccccttgccacggttgcgggctctgccctaaggcccccctctaggggcacagcgatatccctcctctctccaacttgg

SEQ ID NO: 148651 - DNA, 122 bp, Homo sapiens
acaagcgaaaagccttgaggtaggtggatgctcccaggaaactcagacgtccgaagttcacgaggagttgggtcgtgagaggggccagacctcgatccgcggggcgacagctgcagtgtcgc

SEQ ID NO: 148652 - DNA, 122 bp, Homo sapiens
agaggggatgtgcgcagaagcccctggcatggtctagagggctttgggagaggggatgtccgcagaagcccctggcatgacccccttctagtgggtcagtcagcacaaccatcaagttccaa

SEQ ID NO: 148653 - DNA, 122 bp, Homo sapiens
cccttcgggcgggagctacagggcacaaggttgtgctccccactcagaagaagcgggcaccgagtcggggccgcgacgggaacacccaggagggccggggcggctgagtccagagcgcgcag

SEQ ID NO: 148654 - DNA, 122 bp, Homo sapiens
gggagtgctttaacgtggaccaattagacaaaatcctcatcaagtgggtgagagaggaagcgccactggcggctctgggcagctttcctctggaaagtgacactggtaaattagggcgtgat

SEQ ID NO: 148655 - DNA, 122 bp, Homo sapiens
tgacaacgaggccctctatgatatctgcttccgcactctgaagctgaccacaccaacctacggggatctgaaccaccttgtctcagccaccatgagtggtgtcaccacctgcctccgtttcc

SEQ ID NO: 148656 - DNA, 122 bp, Homo sapiens
agtcacagagccgggcctcaacctggcctttaaaaagacgctacccgtttacattctcagcgtgagtagaagaaactgcccatgtcccttcacctttcccagtattcaatattatattttta

SEQ ID NO: 148657 - DNA, 122 bp, Homo sapiens
gtcaaggccgagtccgagagctgcaaaaacttgggagaggagttcagatgttgctgtgtacgttggagaaaatcattaaaggtttcagatttgcagtgagatttagatctgtctgggcacgc

SEQ ID NO: 148658 - DNA, 122 bp, Homo sapiens
tcctgctccacgacgtgaccatggccgggctgcaggagctgcgattccctgaggagaagccgctgctccggggccaggacgccaccgagctggtgagttggagtcgcgcctttgaggtctta

SEQ ID NO: 148659 - DNA, 122 bp, Homo sapiens
cggctccgggcgctggctgagggcgggggctgcgtcctgcagccgagttctacggggcagcgccctcctgtcgggccccagcattgctggatgggagctggacgctgcgatcggggaggcag

SEQ ID NO: 148660 - DNA, 122 bp, Homo sapiens
gctggggcatacttcacctttgcgcttactcataggctgtgtagcccgtgctggggagaccgtcaatcccaggctgaggttttctgtggtctcgcctggaagccacgggtgtttaccaacac

SEQ ID NO: 148661 - DNA, 122 bp, Homo sapiens
gcagctcccgccgcctgggcctcactcaccagctcatggtcccgaacctgcgtctgccgccggggtcctcagccacaactcgtttctctagggtcacttccggattcaaccagtctccagga

SEQ ID NO: 148662 - DNA, 122 bp, Homo sapiens
agccggcagtctctgaacagcccgagtccaggggaaaccgagatggaccttctggtgactcgggagcgaccccggcgtggaatccgcaacagcggatacgatgtgagtctctggtgggctgg

SEQ ID NO: 148663 - DNA, 122 bp, Homo sapiens
ttcttttcagttgagatttggttgcattcagggttgtaggttggccttgcttgctaaccccgccggttttaccgtgctttcattcctgaactttgtttatgcctttgtttggtttcttcgaa

SEQ ID NO: 148664 - DNA, 122 bp, Homo sapiens
gccgtcctccaggagccctcgcactcctagccttgggctagtccgtcaccctccaggccccgggacacatctctgaccagctccaccggggaaaccatcaggaaggacgctgcatacacagc

SEQ ID NO: 148665 - DNA, 122 bp, Homo sapiens
acacggaacgcgggcgggctgtgttctcagtcacaatcagctcggatgagctggggggcgcgggcgcaagcgggcatcggcacctggcagaaagcgccgcgccccccgcgggtgcgcacacc

SEQ ID NO: 148666 - DNA, 122 bp, Homo sapiens
tatgcctgtccaggaaccggcaaggccaggatcctcggccaaggtggggaccagcctcctcgcaggacaccgagaccgaaccttagattgcaggatggcgccgatggcagacggatgaaatt

SEQ ID NO: 148667 - DNA, 122 bp, Homo sapiens
gctgtttgggattcccccgccctggtgagggtgtacccttcctgttcagagggtccggatcgggcctcacgtaccagcaggaaagtgttcgtattagacgggcgaaagtgatccaggagcat

SEQ ID NO: 148668 - DNA, 122 bp, Homo sapiens
acgcacccgttcccattacccatcatttaggtgttgtccatcagagctgtttgcatctggcgctgacaccgtgcaaaattcattcatggaaactttcagtcacacttgagaagtttggcaga

SEQ ID NO: 148669 - DNA, 122 bp, Homo sapiens
agcctagtcacggccagtggactgaaacatagagctcgtgggtgggaagctgagcagggccgaggcaagcccttagcgcggtgggaaaccatcaaggtgtgaagtagggggcgctgacagaa

SEQ ID NO: 148670 - DNA, 122 bp, Homo sapiens
ttaacttgtctgcgtccaagtttcctgatctgcaaagtggaggtgttaatagttactacccgcctcacacagtgattgtgaagattttgttcgttacactaatatggatcacttagaaggat

SEQ ID NO: 148671 - DNA, 122 bp, Homo sapiens
ggggccgcgtgagacgattggctatgggcttgtgtcactctcgagagctcaatggagtcccgtttcaaggtaagttgtgcggggaggtacactcttaacactggcggcgaagggaaatgcaa

SEQ ID NO: 148672 - DNA, 122 bp, Homo sapiens
ctctcagactccttgaaaaatagctggtgacgggtcagtgcccagagctcacctgcctttcgccaaactctaaacacccctgtgtgtttcccctactataccctgttccctgggggcaggtc

SEQ ID NO: 148673 - DNA, 122 bp, Homo sapiens
gcaactgcgctgtaccgtaaatatttgctgaatcgatttgacttttacttgttccaatttcgcttttttgttgttttgtttttttgtctttttacgaacaagaggtttagagaaccacatgg

SEQ ID NO: 148674 - DNA, 122 bp, Homo sapiens
tgttcacgcaagctgctgtggacctggtctcctgtgtccagcccagccttgggcctgcctcgcagctgtgaggatggctccaattcctgcctcctggcgggagactgaggctcaggggaatg

SEQ ID NO: 148675 - DNA, 122 bp, Homo sapiens
ggtccgggcgatgatttttagtatagtgaagtgttgttaccaaaccatgcaaacagagagcgagaaccgaaactcctaaacaagtgtgtcgctaaattcagaccacacaggctcaggcaagt

SEQ ID NO: 148676 - DNA, 122 bp, Homo sapiens
tcgggcaagggaacatgaaagccgatctgcaggctgcagcgactgccaagccaggaaagtcgcagcagtgatgacgggcaagggatgcctcccggtcaccagccacgtctcatttgccagct

SEQ ID NO: 148677 - DNA, 122 bp, Homo sapiens
aataaaagtcatgttgacagcagtctggttcgtcttcccagcctgtccccaccagctccacgtggatttaactatttcttgcacatggcctgtgctcttccagtagggcagagcctgcattt

SEQ ID NO: 148678 - DNA, 122 bp, Homo sapiens
ctgcaccgtccagtacagaaccactgggcacatatggacatttaattaaaactagctggccgggcgcggtggctcacgcctgtaatcccagcactttgggaggccgaggcaggcggatcatg

SEQ ID NO: 148679 - DNA, 122 bp, Homo sapiens
tggctacattcaaacaaatcatatgtgtgtacggaacaggctcatacacacatgccagcacgcgtaatgcccagtggtcagaaaatgctcttcaaaccggggactgagacgcccgcagagcg

SEQ ID NO: 148680 - DNA, 122 bp, Homo sapiens
gagaaaaaggagagtgatgtccctcagagacttcattggtgcgtggcttgaggccctgctcggtggctcccccgtgctccccgcggatctgggatctccggctttcactggaggccgacccc

SEQ ID NO: 148681 - DNA, 122 bp, Homo sapiens
ccatgaactctccccttcaaggtacattcacagcctaaataccagaagtaattttctttacgaacaaatttactgattgacaaataagcatccacacaggaagaagaatgttagggtggctg

SEQ ID NO: 148682 - DNA, 122 bp, Homo sapiens
cggtggtttgtgcgtgtaatcccagaagtaatatgtataaaggcatttggaggctgggcacggcgcctgatgtgtataatcccagaagtaatatgtataaaggcaattggcggctgggtaca

SEQ ID NO: 148683 - DNA, 122 bp, Homo sapiens
caccttcctgccccgcccccagcctccccacccctcaccggccagtcccctcccctatcccgctccgcccctcagccgccccgcccctcagccggcctgcctaatgtccccgtccccagcat

SEQ ID NO: 148684 - DNA, 122 bp, Homo sapiens
tcccgacctcggtcgcctgagcgcgcagggattggggatccgtagggcactaggacccggcggggcggagggggcagcccatgtgctgcgattcgctccctcccaccccactgctcccgctc

SEQ ID NO: 148685 - DNA, 122 bp, Homo sapiens
cactggcgggcgaggctgttccagggtggaggcggggagggttggaccacaggcactgagcggggacagaggagctgcctgagggtcccagctctgccatggagaaaacgctatctcgctga

SEQ ID NO: 148686 - DNA, 122 bp, Homo sapiens
gcgcgccagggcagggactgaggagcaattccctttctcaaggcctgcggggtctttctgcgggaccctctttggctgtgagtgatggggaggaaacttgtgagactcggcctctccctcag

SEQ ID NO: 148687 - DNA, 122 bp, Homo sapiens
aaaaaaaaatccttgaaaatgaaatataggaaaaaaaaaatgtacatacccctttacatccgtaagtgtggctgtgtacaatgctgggattctaagttttatccagaattgaaaccccagcc

SEQ ID NO: 148688 - DNA, 122 bp, Homo sapiens
ccgttcaggagtgtgcagcaaactcagctgagagagaaaattggaacaaaagcaggtgctcgcgggtacctgggcctagcctcttagtgcggccagccaggccaatcacggcccccggctga

SEQ ID NO: 148689 - DNA, 122 bp, Homo sapiens
gtcacctcgactcgccaggcttaactcaataaccacaacaccggaaaaggaagcaaaggtcgaagttcatccgcggccctgaggcctgtgggaaacgtagtccaacaacgaaagagccctga

SEQ ID NO: 148690 - DNA, 122 bp, Homo sapiens
cccggggccaccctagcctccctgctttgtgactcataatcatcctgaatggtcagtttccgatgagaggccactagcaagggatacccatcaccaccagggagcagaatccgttccaggga

SEQ ID NO: 148691 - DNA, 122 bp, Homo sapiens
tggggtgggagtgacgtcagccctccacaacctagtaaatgtttatgggccggggggcctcggctttggggttccctggagcccagcaagagaccaccccctcgtgttccattctggggggc

SEQ ID NO: 148692 - DNA, 122 bp, Homo sapiens
ctgccatgctgggccctgctgtcctgggcctcagcctctgggctctcctgcaccctgggacgggggccccattgtgcctgtcacagcaacttaggatgaagggggactacgtgctggggggg

SEQ ID NO: 148693 - DNA, 122 bp, Homo sapiens
tgctatgtgtgagtttgtgtatgtgagtttgtgcacctgtgtgtgtgtgatgtttatgttcgtatggagaaggtgtctgcctggtgacagagcagctgagggtatcaagagtcttcctcagt

SEQ ID NO: 148694 - DNA, 122 bp, Homo sapiens
cagagacaacaaggatggcagctgcagtgctgagtacattcctttcgcaccgggggattacgatgttaatatcacatatggaggagcccacatccccggtgagctattcctcagagaggacc

SEQ ID NO: 148695 - DNA, 122 bp, Homo sapiens
cctagcccttccccgcatggccccgcccccctctcgccccgccccctctcgccccgcccccggccccttctggaccaggcgcctccccgctactggccccagaccttccccgcatggccccg

SEQ ID NO: 148696 - DNA, 122 bp, Homo sapiens
aactgatgttgttcaagagtcaactgtactgagctttgtatctgattgtgagagtgaagtcgatgatgttgataagaggaaataagtatctccagaatggtaatgaggaactctggtaactt

SEQ ID NO: 148697 - DNA, 122 bp, Homo sapiens
gttcggggagggtagggctataggggtgttgaggctggcgttctggggctggtcctcgggcgttagggtgttggaggcagggagaggcagggctccgggactttctgcagactggggtggtg

SEQ ID NO: 148698 - DNA, 122 bp, Homo sapiens
tacaaatggggcttttccttctgtctcctatttattgagctcctcttagaagccagccaccgtgttacactgaggacataacaatgggcaaaaacagcatcctttaacttcacagagctgta

SEQ ID NO: 148699 - DNA, 122 bp, Homo sapiens
cgctccagcggggcgctccagtccctcagacgtgggctgagcttgggacgagctgcgttccgccccaggccactgtagggaacggcggtggcgcctccccagcaaaccggaccgactgggta

SEQ ID NO: 148700 - DNA, 122 bp, Homo sapiens
ccttatgccggaattctcgggccacttttcggtccatggctgggccaggtccagctgcgtcgttgcacgacccgttccttcgggtgcccggctgccaggagctggaaagagccgcgaccgcg

SEQ ID NO: 148701 - DNA, 122 bp, Homo sapiens
ccgggctagtgtgaagactgccaggagtgtggatgcagccgccgggagtgtgggtgcagccgccgggagtgtgggtgcagtccctcgcagcccgctttggtcgctgagtccggacccgccac

SEQ ID NO: 148702 - DNA, 122 bp, Homo sapiens
ccgggaggcaggtgcagatcgggcaccgtgcggtgggacccttgcgggtgttgggccccacgctccaggctggggacctcagtcagattgtaactcgaggctctgtctagtgctggccctgt

SEQ ID NO: 148703 - DNA, 122 bp, Homo sapiens
ggactggatagaataccaaaaatttattacatcacagaaagggtctggtatccttagtaacggcataacaaaagacaatatatagaattggcccattaaaaacatgtttaagaacaagggac

SEQ ID NO: 148704 - DNA, 122 bp, Homo sapiens
tccaataaattgatgaccaatcgtaccctcaatctccgcactttacagggtcttccgaggcgtcccaggtgtttgtctcagactgagcttgtggagatcttactacaaacaggcttgttcta

SEQ ID NO: 148705 - DNA, 122 bp, Homo sapiens
tgggccgtagtcagtggagctttgggggctgggccgtaggggctggcctcaccctctgtacgctccctgcgccgttgccggccgagacgtccacctcgtagcggatgtgagacgtcatgggt

SEQ ID NO: 148706 - DNA, 122 bp, Homo sapiens
tcacatgcaaagaaaaaaaaaaaaaagtcagtcttcccatcctgtgcttccagacagaaacgtgctaagcaggcagcatgcttttgttgtgaggtcattagccattgtcttagagatactca

SEQ ID NO: 148707 - DNA, 122 bp, Homo sapiens
ggcctccatggagcaaacggagccacctcgggaaagagtttaatggaatatttttgtacccgatgtttacagatgctgttgggaagttatcaataaaaagacaccattactaaaaagggaaa

SEQ ID NO: 148708 - DNA, 122 bp, Homo sapiens
caagactgataagttagccaatccagattcgagggtgaatcaggtcctcagcatgcccatcgccccacccgcatccaatcagagagccggctactttgggcggacttttcaaaacagcgaaa

SEQ ID NO: 148709 - DNA, 122 bp, Homo sapiens
atgacacatggtttcaacgttatttattgtaagttgcttcagatcctgtgtggaagtaaacgaagactgaataataagtgaactaattgaagggtaacagggagtagtgaaaaaaaaatgaa

SEQ ID NO: 148710 - DNA, 122 bp, Homo sapiens
aaggcctcgcagcctcaccaagcagcagccctggggtggagctgcgtttccagggttaagcggaccaggcaggagtagcggttactcaagagcaggtcacaggcttgggttgtgagggtcag

SEQ ID NO: 148711 - DNA, 122 bp, Homo sapiens
tggtcgggtccagccactgcccctcacagaccagggagccgagggagaggggggcggggccggcctgacgacgcacagacctcagcaccgcccgtggggctgcatcttgcaggctcagggca

SEQ ID NO: 148712 - DNA, 122 bp, Homo sapiens
ttctgagtcaagattcctccttctgaacatgggactttccagaaggaccacagctcctcccgtgcatccactcggcctgggaggttctggattttggctgtcgagggagtttgcctgcctct

SEQ ID NO: 148713 - DNA, 122 bp, Homo sapiens
caccgcagtccgcccgcacggcactgccagctgctgggaccgagcccgagggtgcccgcgcggagcacggtcttggctgccccttgccagcatgcagcaccagcacagcccggcgttggcgg

SEQ ID NO: 148714 - DNA, 122 bp, Homo sapiens
tggcatggaggacactgaattttttcccaattatatggctacctgttgtattcttccccccgtttaaatcccttctccttgtatataattaaacttgctattccttcttaaaaacagctaat

SEQ ID NO: 148715 - DNA, 122 bp, Homo sapiens
ggaaggaaggaatggagtacccaaagcttccaatgtgccagggattattcctacaagaaccgtgtggagcaggcactattctaatccccacttcagaggcgatgaaactggatgcagagagg

SEQ ID NO: 148716 - DNA, 122 bp, Homo sapiens
tcgtgtggtgtgggaccttccggtttccagacaaagggttttggagtaccgtggtgtagtcgccgcatcgttctttgcatttcgagctctgtgccatgttctgtgttcggcatttaccgtgg

SEQ ID NO: 148717 - DNA, 122 bp, Homo sapiens
gcctctttgctccaggctatggtgtcagccatttacctctgtgaagcatataaaaagacacgcgactcaagaggcaacgcacacgctgagacagaaagcaagagcacaacgaaaaatacaac

SEQ ID NO: 148718 - DNA, 122 bp, Homo sapiens
ccccttaaagttttagaaacactattataatattatactgcagtgcaggggtgggaggtacgaaatatgccaacatgccagtcatgttctagataagagccagagaagttagaggatagaac

SEQ ID NO: 148719 - DNA, 122 bp, Homo sapiens
aacccaaacaccgaaagtttctggtcgcaaactctactcatcttgccgtgtccagagacccggcactgggaacggcactggcttttgttccagggtcccccagctggcgaggtaaacgccac

SEQ ID NO: 148720 - DNA, 122 bp, Homo sapiens
caggggtcttagtacacagtgagcgtgtgtatgaccgctggtatctggccatgtgtttgtcgagatgctacagcctcagctgagtgtctgcgtgaatgtgtccagctgtatgtcatttggtt

SEQ ID NO: 148721 - DNA, 122 bp, Homo sapiens
gtgttcgctaatctcgaggagcccggagcagccccgaaaaccgactgttcccccgaatcccgaagagagaactgacactagattgctttcttcggggcaacagtttctctagttgagcggac

SEQ ID NO: 148722 - DNA, 122 bp, Homo sapiens
taagaagcagcggcggcagtagcagcggccttggcctcggaggctttagcacttccggttcgttgcgatccgctttccgactggcgaaggcgcagccgggccaagaagggcgccgctgtctg

SEQ ID NO: 148723 - DNA, 122 bp, Homo sapiens
tgaaactatgcatgagctacattccccaactcactgattcctgtttaacaagtatgcatacgcttagactgaagtctttcactggggaaagaccctaatcttgaaacacttgtaaaatttaa

SEQ ID NO: 148724 - DNA, 122 bp, Homo sapiens
gaggctgctcctgcgcctccgggcttcccaaaaatccagacgcaaactgcgcggcctctgcgttcgcttcccggttcaagttacccagtaaagaggaacctcaaacgctctgccctcggggc

SEQ ID NO: 148725 - DNA, 122 bp, Homo sapiens
agtaaacggcctgtgcacgtgcacgccggagcctcccgattggccaacactccctgatcacgcacggccttcctgcgcccacccacgcgtgggagcgccaatgaaatgactcagtgaccatc

SEQ ID NO: 148726 - DNA, 122 bp, Homo sapiens
actgagagaactgaactatgagttctttctctgccccactgttatagttaacaataattccgagaggtggtctcacacaccaaagggaatgtgtgcagaagtagcaaatgattcagcagttt

SEQ ID NO: 148727 - DNA, 122 bp, Homo sapiens
agctcaggcagctggggcttccctttgccgctgggcgggatgagaggtgcgctcccactgcgggtgggaggcaggactcagtcatcccgggcaaagggttgtggggcagtgggaagcgccca

SEQ ID NO: 148728 - DNA, 122 bp, Homo sapiens
aagtatctgcccaagaaacacctatggcttcttatcagcttttgggcaggctacagatgtcggccaggaatacttgcaagtgtgtttctgatagagcaagtatatgttatggtcccagatac

SEQ ID NO: 148729 - DNA, 122 bp, Homo sapiens
aatggggagcccgggatcgcaccctcagtgcgcgatcagctgacccacgcgggccaagcgcgccctaaactccggccaattaaatccaccattcggcctgcgcacgcgcagccgtagacggc

SEQ ID NO: 148730 - DNA, 122 bp, Homo sapiens
agaggagctgcgggggccttagtccggaggagcaggcacggcctcaggctggcatcgggacgtgggtcctggagcacagccccggggccatcctgccaggagtacggaaggttctggaattt

SEQ ID NO: 148731 - DNA, 122 bp, Homo sapiens
atgggagtaagccagcgagcagccttccctggggcagcaatgacggcaggagccccaggccggccagccgtgcaaaataggctgcaatcttcataacaaaaaagccacccttgacaacatat

SEQ ID NO: 148732 - DNA, 122 bp, Homo sapiens
ccctggagtgtgctgaatgcagaacttagcagcggcgatgacttcgagacacaggacgatcgcccctgcaccctcgcttccacggggaccaacacgaacgaactccttgcctacaccaattc

SEQ ID NO: 148733 - DNA, 122 bp, Homo sapiens
aatggcagtttagggcctagggggccacgtgaccctcccccaggaatgtggtgacgtcatcggaggcgtggtcgtccccaaaattagggaggaagaggaaaaaaaaaagccagaaaaagttt

SEQ ID NO: 148734 - DNA, 122 bp, Homo sapiens
gcacacccaggccaaaggccacgccacacagcacattctccagcagatctgagggcagtgcgttccggggtactggaggaaatgagtggctcagcctggggacctagttagggagcctccca

SEQ ID NO: 148735 - DNA, 122 bp, Homo sapiens
gggactctgtcagtggcagggtaggggtacccagagccatggcaggaaccaccccctgcccgcccccgactagaggctcagcttccctgcgtgcacctagctcaggaagccttcctttctag

SEQ ID NO: 148736 - DNA, 122 bp, Homo sapiens
tgcggaagcagaggctgcgggggtagagatccaactccacggagtgagagagcagctttgcgctaatggggccgggtgcaggaagctggtgcagagaggaaagaaggaagggagtctgggcg

SEQ ID NO: 148737 - DNA, 122 bp, Homo sapiens
attaggtcctcagttgcagaaatcacagacatctgaaggccagcactttaatttggccaccgtcttaagatttctctgctcttcctttgctcctcctcataatgcacagtttgaactgatgc

SEQ ID NO: 148738 - DNA, 122 bp, Homo sapiens
ttgatgtcagtctcattgggcctgccgttgctcttcttgggacagaagatctctttgatccggccaattcggtagggctcaggggcatccaggttgctgcctttgatgtagtcggagtattt

SEQ ID NO: 148739 - DNA, 122 bp, Homo sapiens
aactgagtcagcttaggatgttcaagaagttttggtccagaatcagtcttcacctaaaaacgtttcctaagttgaagcatgagaagtagtagcccaggctgttttccattgttaaaaatggc

SEQ ID NO: 148740 - DNA, 122 bp, Homo sapiens
cgtgatccacctgcctcggcctcccaaagtgctggaattacaggcgtgagccaccgcacccggccccaaagaatattttttaaaggaacaaaatgagcatgaattaactcttcaatataagc

SEQ ID NO: 148741 - DNA, 122 bp, Homo sapiens
ttagtcaggccatgtcttcagctctgggggacgggaggtcactggaggtgtggggctgcccgtcctggcgtccctctgtgtaagcagcacctgctcccggaggcacagccctggtcggggcc

SEQ ID NO: 148742 - DNA, 122 bp, Homo sapiens
caggtactggtccgtggcctgtcaggaactgggccgcacagcctcccgtcggatcggcggcggcattcgatctcataggagcatgaaccctgtcgtgagctgtgcgtgtgagagggatccag

SEQ ID NO: 148743 - DNA, 122 bp, Homo sapiens
gctcacagatgccttggaacgcaacgcacggctttcctcacgctcccgctgtaggcccggcgtcttgcgtctggcgtcatcgacctcgttagccaatggattgttggcagtttttacatttc

SEQ ID NO: 148744 - DNA, 122 bp, Homo sapiens
gagaggcagagagagggacgtggccggcagctctgtgcgtggccttgtcccaagcacttgcgcccgcccccgagcgccgcccccggggagcgggaagccagcactcgcactttggccagggg

SEQ ID NO: 148745 - DNA, 122 bp, Homo sapiens
aaggtagatgatctctgaaggcagagggtcagggtgcccactttcttgagcaaggtttctcgggttttttctgggggatagactgttgcactctttgtgctaatatcttctcttcagattca

SEQ ID NO: 148746 - DNA, 122 bp, Homo sapiens
ttgggtctggaaggcgacaagagatcacaggctttctaggtctaccgcgcaccccgatgacgtcacgcggcgacgttctctgacgtcagagtttcctgcccaccatctttgtccctggcaaa

SEQ ID NO: 148747 - DNA, 122 bp, Homo sapiens
aggctgtgtcggactgggagtaggcttgaccacctttcaattttcaacccagtggtacgacgctggcggcaggcagaggccccacctcctctgcagagcgctctcgggttctcccggattcc

SEQ ID NO: 148748 - DNA, 122 bp, Homo sapiens
aagccctactatgtttttaaatagcaagtgtaagctcagtgctagagtggatatacacaccgcatgttttcatatgtggcacttttatgtatcatgttgggttattgttctagactggactg

SEQ ID NO: 148749 - DNA, 122 bp, Homo sapiens
aggtctagtctgttcagatggctctgctccctctagctggggctagggatgaggggtcatcggggcttgatggctgcctgtggccaggctaacctcctcgatgttgtgggagacggagaaaa

SEQ ID NO: 148750 - DNA, 122 bp, Homo sapiens
attttcttctatgagtatagtaaccacctccgagctttacggatctgcgggtcctttcctcgcgcacgcgcacttgttagggagggcgggcctgtttccgggaggcgcgtggggcttgaggc

SEQ ID NO: 148751 - DNA, 122 bp, Homo sapiens
ctgtcgggcggggtgtggcttcgggtggcggagaacgctgcgattggccctcggctgtggcgacagcgacgattggtccctgcgtgcagagcgcggtgagagtgggtggtggccgttggaat

SEQ ID NO: 148752 - DNA, 122 bp, Homo sapiens
ctgggagagcatgctcaatgccaccacccgcaggatgctttcccacaggtgggtccgggccgcagcctttctccatgcagagcgcccaccccatggctctgctcgcctgcctcagcgttcgg

SEQ ID NO: 148753 - DNA, 122 bp, Homo sapiens
ccggcattaggaaagtctctacgatcgctgaggtatcgggcagtcagtgcccgttgccaacgcggagggaacgggcggagactgcgggcaacacgtggcagagccggcgtgagtccggtggg

SEQ ID NO: 148754 - DNA, 122 bp, Homo sapiens
tggacaccgcgagggacagcacctccagcagcagggctgcactgaagaccgccagggcggcgggcgggggaggcacggtggccgcctcgtacttcaggaagcaggtggtggacagcgtcaga

SEQ ID NO: 148755 - DNA, 122 bp, Homo sapiens
tggtgcgggagccggggcctgcgcctcctccccgacccccagcctcctgggacttgccttcgaggcacttgtcactttgtaacttaccagtttgtgatcctctctagtgtgagcctccgccg

SEQ ID NO: 148756 - DNA, 122 bp, Homo sapiens
aagattctgagaggattctgcagcaaaacaacaatggccgctccacagagtcgccccagacgcggcgagctgatcctgctgtgcgcgctgctgggaacgctgtgggaaatcgggaggggaca

SEQ ID NO: 148757 - DNA, 122 bp, Homo sapiens
tctaggtggaggcttctgagtctgggagcacctgagcctgaatcctcttcagttactgctcgtagcccaggaagccgtggcatcctggggatgtggtgggaggagtggggagacctggcgag

SEQ ID NO: 148758 - DNA, 122 bp, Homo sapiens
ggccgcgcgcggcgtgggcggagcctcactttgaacccagttggcgggagtggctgctcgcggaggggcagtgtctgcggggccgctgtatgctgtccagcgatggatcccaccgcgggaag

SEQ ID NO: 148759 - DNA, 122 bp, Homo sapiens
gtaattatacactattattttgacagtacaaaacttctggtatgtgacaggataaataaacggttagggctgctttgaaacttaaccaccatgtataacattgtctctgtgaggaagagtat

SEQ ID NO: 148760 - DNA, 122 bp, Homo sapiens
aaacggccgccattacaacacataccatcacgccatcaaatcccgccggtagaggccggtcggccttacgggtccgctatataaagccaaatctggccccgccccttccggcgtgcgagcgc

SEQ ID NO: 148761 - DNA, 122 bp, Homo sapiens
cacccctggccgggccccgacggctcaggctgcgcggggatggggcagggggccagggcgcggccgaggccgcaatcccctctgctggcccgggcccaaggcccagcattgtggcttccggg

SEQ ID NO: 148762 - DNA, 122 bp, Homo sapiens
aagggctgtaaattggtattgattgccggtggtcttgaagaaccccaactgaggattgaccgttccttggagtgaaggctccgcattcagacgcctttcgccttacgtcatcataattgaga

SEQ ID NO: 148763 - DNA, 122 bp, Homo sapiens
gcccagagtcaaaaaaacagcaaaacacgggtggaagggtgcgcggcacacggggcccctcgcaccgcggcggggagtgagacgcggcagccggggcgggagacgggggggggcaggtccca

SEQ ID NO: 148764 - DNA, 122 bp, Homo sapiens
ctgcagtttctctgtctttttcagactggagacaccagccggagtcagagttatggccgtcgaagcactgtctggcctctgctccgccttcatttacgacccatggttgctatgcctggtag

SEQ ID NO: 148765 - DNA, 122 bp, Homo sapiens
ggaacaatgtgcaagtgtggaaagctcccgtagtttattcgttcggtgctcaaagggtctcggtgctgcccagcaaccctggagactgcaccctgctccagtcccggctggtccagccctga

SEQ ID NO: 148766 - DNA, 122 bp, Homo sapiens
ccaccgaccatgaaggctcaggccaccaggagaatggtgagactgtcacctcagagagaacgagttgtcagtcgctcattaggtcaattagtagccgcgtggattagtggaacaggtgacag

SEQ ID NO: 148767 - DNA, 122 bp, Homo sapiens
gtgttaatcctatttaggaaggcaaatatgtaggaggaaatgtgatttcctaaattaaatcgttaaaaagcaggcctttagaagcactagcttgcttttgcagcaggggtacttaattcagc

SEQ ID NO: 148768 - DNA, 122 bp, Homo sapiens
tccttaaattcgattcttaacaggagagctttctattatttcagatggagtgaggttgcacgactgggatggaagaaaggaatcccttaaatttgggggaatttctgttctctgttctaaga

SEQ ID NO: 148769 - DNA, 122 bp, Homo sapiens
aagaagcaggaaagacaaagctttatgcaaatgtggcttccctggcctccgctcctcctccgcccgggcccctttctccctgggcccctcgatctcgcgccgcagactgcgagcctcttttt

SEQ ID NO: 148770 - DNA, 122 bp, Homo sapiens
gggcggccatctttgagtacgtgacgtacagaaggcacagcggccgggagacgcggtggacggaggcctcttaaactgtccgatttccagacacctcagccctggcagaaaatggagagctt

SEQ ID NO: 148771 - DNA, 122 bp, Homo sapiens
aaagacaagcgagagcacactattctcattgccaacgttaaaccttatttaaaagccaaacgtgccctgagccctctcctccaagaggtcccctcagcatcaagcagcccaaccaaggcgtg

SEQ ID NO: 148772 - DNA, 122 bp, Homo sapiens
cagagtttccttgaaagagctgcgggtcacccacgactgtgttgcctggtcctcaagcaccgacggctgtcctgcgggtggaaggcagggccaggtgtgcagcggccgagagccctcccaag

SEQ ID NO: 148773 - DNA, 122 bp, Homo sapiens
agggccctgactgccgctgcacaaagaggcaggtgccggcggggacgctgcctgagctcccgtggctgtcctccctgggggccctgcccacttcagagctggtgttcgacctgcatggccat

SEQ ID NO: 148774 - DNA, 122 bp, Homo sapiens
tttgggcctcgcgatttcctgaggaaatccaggcaaattagcaaagtgtcgcttgggccgcgactttagaaaggcggttgccccagccgccggggccgcgggggaggtcatctttttcccgc

SEQ ID NO: 148775 - DNA, 122 bp, Homo sapiens
acagcgggttctctcccgccgccatctcctccggcttggtgaacttgcccgcagccgggtcgtgtctgcgcgctgacagccctgagctcacagtcctggcaccctccaggctccgctcccac

SEQ ID NO: 148776 - DNA, 122 bp, Homo sapiens
ccgccgccccgcggctcggccctctcttcaggaaccccgacgtgtcagggaaggaggaggcgttcttacctccgggagaccctggccctccggccccctgggcaaccccatgatccgaccgg

SEQ ID NO: 148777 - DNA, 122 bp, Homo sapiens
tctctgccacttgccttcatatctgatgggtcactcagtccagtcctttctctccatcctcgctttcactccatccccaaagtcatatctcaccttgaacattttctgctcagactgacaag

SEQ ID NO: 148778 - DNA, 122 bp, Homo sapiens
ctttctaaacaccgagtcgcggtcaggctttccagcactgtcctcaagcctgagtgcgtccggagtgcaaactacaagccccagaaggcaatgcgccagcagtgatgggagtgggcgcggag

SEQ ID NO: 148779 - DNA, 122 bp, Homo sapiens
tccgggccgaacgaggggcacacgccggagcagctccagcctgggagcattgggcgtgaacgtgggggaaagtagggaccagattacaggatcaaggctttccccggctcagaactggattg

SEQ ID NO: 148780 - DNA, 122 bp, Homo sapiens
gctcagtgtcaggcagggaccacctcttcatacgaaggatgaggccagccgcccaaagcacgtgtaaatatgggggaaatggcccgtggcgctcagtgtcatgcagggaaaacaaaacaaaa

SEQ ID NO: 148781 - DNA, 122 bp, Homo sapiens
gtccgcaaagcgtgtaaacagacgcccagaagctgggaagcttgcagccctcatagacgccggtatcgccacgccctctgccctcggcgtctcaggagcgctctctgccggcccgctctccc

SEQ ID NO: 148782 - DNA, 122 bp, Homo sapiens
tcatgcagagaactatgtatttgtggaggacttccagcttgcaatccccataggctcagccgggtctgcacaggactgaatgaggctctacctccttcactcactacgccctgctttcatca

SEQ ID NO: 148783 - DNA, 122 bp, Homo sapiens
tctcggagattaaactaactttaaaaattgaggccgggcacagtggatcacgcttgtaatcgtaagcactgggaggccgaggcgggcagatcacaaggtcaggagtttgagagcagcctgac

SEQ ID NO: 148784 - DNA, 122 bp, Homo sapiens
tgttttccggacggccacaactatcctagccttcttccctatgggctgcaaaggtggcctcgggttccggtgggagccccaactctggaccgcgattcgcgagcctccccggcgccgggccg

SEQ ID NO: 148785 - DNA, 122 bp, Homo sapiens
gacactattaagtgtcaatgaatgggacgaagagagccctactactactactacacgtttcgatcactccccaaggccgccagcatttgcttccggatggtctacagaacttggagagttgg

SEQ ID NO: 148786 - DNA, 122 bp, Homo sapiens
tgcacacttctaagaagagcggcgtggggggctcggcgaccttcgcttcagtcgctcccccgtgcagtcccctgtgcccaagacacagcctgatgcttgtgctccggtgggcggagcttgga

SEQ ID NO: 148787 - DNA, 122 bp, Homo sapiens
agaggggctgctcctggaggagctgcacgtgtttgaggtgaggcctcacccccagtcgcccgggacccccccaccccactaagccctgaccccgtcgcccctcctccctctcaggactcggc

SEQ ID NO: 148788 - DNA, 122 bp, Homo sapiens
tacaccgacaaggctctcgatcccagcgtggccccagggctacgtcccgcccaggtctcccggcacctgatttcccagtggtcaattaggtgtctcagcctgcagcattgaagcagtggagg

SEQ ID NO: 148789 - DNA, 122 bp, Homo sapiens
aagaaggcaaggaggttcggtacgagcgatctcgaatggaagaagaaggcagtccgtctgcgggagccaggccgcagcgccatccaccttctgtccatgtcttctttagtaatacatttatc

SEQ ID NO: 148790 - DNA, 122 bp, Homo sapiens
tctgccggtgataatcctaaaacgcccccaggtttcagagattttacaaagcaacataaacgtgggagtgggggcaggtgggagaattcagcagcgaaccaccctgaagtcagtcgggttgt

SEQ ID NO: 148791 - DNA, 122 bp, Homo sapiens
gcatgcccgggcagctgcgcgagtgaggggtggaaagaggtggctttttactccggggaacggtggcgagtgggggcttttgcctctcaaaatacgagcccctcacaactacccatgcacct

SEQ ID NO: 148792 - DNA, 122 bp, Homo sapiens
caagtggggacaggagccctcgcagggctgcagtaaggagttactgtctccataccataccgtgctcattacatcaacagaggctgcagctgctggggaaatgggtccttcctgagttagga

SEQ ID NO: 148793 - DNA, 122 bp, Homo sapiens
actagaggacggaagggtctggaaggtgagcgcagccctgcgccacccagggctgggggtcgatccgcccggcccccgacgccgccgccgcggacttctcggaagccgaggctctccccgcc

SEQ ID NO: 148794 - DNA, 122 bp, Homo sapiens
ctaggcattctgagattttccctagccctgcagctgccctccatggatggacttgtatctcggggctaaagaggcaggaaggggacacgagcatcctccctctcctggaaaggactgatgcc

SEQ ID NO: 148795 - DNA, 122 bp, Homo sapiens
agtaatggcagagagttttggtccgctactggcctctgccagctcagcgtgtggcctcctcgatacccacggtggcaggtggcactagcagggtgctcactgggctctctggctggccctcc

SEQ ID NO: 148796 - DNA, 122 bp, Homo sapiens
gatgtcctttcaagtctgctcaccaacagctctgttctgttctccaagtagttgctaactcgcaccttgctactatcccccttccagaaaaaaaattttattattgttagaatggaaattgg

SEQ ID NO: 148797 - DNA, 122 bp, Homo sapiens
ctgacaatgcacatttgtctactggaacagatcctgtgcaaacaactgtctctaacttggcgtcaaagcaagttcttaatttatctctgtactgtttaacatcaacagcattttcttcttgg

SEQ ID NO: 148798 - DNA, 122 bp, Homo sapiens
gaaaactctagttttacagatatgaaccatagcgctagctcttactgtctttcttcaacacgtcctcccatccttccctcctttctccactctgcatttgaccccggtgtattccagcctcc

SEQ ID NO: 148799 - DNA, 122 bp, Homo sapiens
cgccccgccccctccccgcccccgccccgcccggcgccggcagcaccacggacagcgccgcgtgcccgccaggctgcctggagcccagcccctgcgctcacagcagctggctgggagcccgg

SEQ ID NO: 148800 - DNA, 122 bp, Homo sapiens
gcgtttgcgcatttacagcctagctgaagtggcttcgaagaattatggatggaaaatacccgttttgtggtttccggtcataagattctagccctcccttttgcatggtctctggggtcctt

SEQ ID NO: 148801 - DNA, 122 bp, Homo sapiens
gtggcggaagtgggagcgggcctggagtcttggccataaagcctgaggcggcggcagcggcggagttggcggcttggagagctcgggagagttccctggaaccagaacttggaccttctcgc

SEQ ID NO: 148802 - DNA, 122 bp, Homo sapiens
ggttgtacgcagggcgcaggaggaggagggccgggggccgggaaccgaccggtgggcaggcgcggccgtcagccccgtttgtttctcccacagaacacagatgcgtggagtccgcgaagatt

SEQ ID NO: 148803 - DNA, 122 bp, Homo sapiens
ataagcggtattatcctggaggcaaggctgcttactggctctggcttggtcgcctgcgtccggaacctgaaatccacaaaggtgcacacagatgtgggtcgctgccttcccaacaggctcct

SEQ ID NO: 148804 - DNA, 122 bp, Homo sapiens
gaggcaggctgggtgggctgaggaccttggacagaggcgggctgggcgggctgaggacctcggggggtcatggtggcaaagatgctgcccaaactgagaccttcagtaagttaacatggctg

SEQ ID NO: 148805 - DNA, 122 bp, Homo sapiens
agggtcactcccgagcttacaagcagcaagtgtttttttaaactggagccactgctaacacgaaagattttctttgcttcatattggcaaacatgtaacacgttcctatgtggtatgaacgt

SEQ ID NO: 148806 - DNA, 122 bp, Homo sapiens
gaggcccgcccccccttcccggcctgccccgggcgcccctcacccaccgcccctgcgcgccgctccagggccagccccacccacgtcccgaaccctcacctgccccgtccgtaacctcggcg

SEQ ID NO: 148807 - DNA, 122 bp, Homo sapiens
gttcctgatcagcagggaggtggaccagcagctgaatgacctaggacatcttcacccacccgtctggcagtggggaggctgctggccagagagacaggtgtctgggttagctgggctgcctc

SEQ ID NO: 148808 - DNA, 122 bp, Homo sapiens
gttcagatttgtaatctcatagaatacatgagaataattacctggattattcccagtaatcgtttcatagaggggaagcccaagatactgaactttggtataattatttgcagtacttagtc

SEQ ID NO: 148809 - DNA, 122 bp, Homo sapiens
taaaaggggtaactttggagaggtaaacaggaactggatcgtgaaaggacttgtaggacacgtcagagaaaatgagctttaaaagtaaagcttttagacatgaagctttactttcatgcata

SEQ ID NO: 148810 - DNA, 122 bp, Homo sapiens
ccccttctctataggccccttcccctttcctctgtgttctctggagggaacggctctgcccgcagtttataacagagagatgagcctccaccctgagtcccaccacagagggagaacctgat

SEQ ID NO: 148811 - DNA, 122 bp, Homo sapiens
tcccctacgcgctacacaagtggagctccttttcctccacctaccttcccgagtaagtgccgggccttgagctcgtgctgccccacccttccgcgtcagcacggttgggccaggggtgcaat

SEQ ID NO: 148812 - DNA, 122 bp, Homo sapiens
ttccctcgaccccccattttgtactgcaataatactgtattatacgcttgcactatttcccgaccctggccagcggaagcatgcacgaaaaactcaaaaccacacacacgctcacacgcaca

SEQ ID NO: 148813 - DNA, 122 bp, Homo sapiens
caatgagtgtcatttttaaccagtttgaacattttactacttcctaacatcagaagcacccgggctagagagcccgcttcttgtcctcaataaagtgattaagctgaatgggtgttggggag

SEQ ID NO: 148814 - DNA, 122 bp, Homo sapiens
ctaatctgatgagctgcatgcacaaatgagctcaccctccatttagcaaaatgccagagccgtgcctgggccagcagttctcaaactgtagggtacatgaggctcactggggaaggctgata

SEQ ID NO: 148815 - DNA, 122 bp, Homo sapiens
cggcacctgctcaacggccatgatggccttgtcctctgcgcgctcaggggcctggtatagcgtggtgcacagacgcagccgggtggaggccatctggatcctgtcccggtagaggcccaggc

SEQ ID NO: 148816 - DNA, 122 bp, Homo sapiens
ttgtccctgctgttccctcacctgaacgcccttccctgccctgacggcctccatcccacacgcctctccgggcgctgccgcccccccgttggtgctcatctgtccttctgcccactatcccc

SEQ ID NO: 148817 - DNA, 122 bp, Homo sapiens
agtagaaggtagtgtctaccatgccattcccattacactaacttggggatcaggtgcttccgtgtgtgcccctcccgttctgcatggagcactgtgcttaccagttggtgagggtactgctg

SEQ ID NO: 148818 - DNA, 122 bp, Homo sapiens
cggccgccgccctgagcgcgggactgtccggctggactcatttgccggggttcctggcttcggggtggggggccgcaggctcatgggcccccttggccctgcattcctggggccctgagccc

SEQ ID NO: 148819 - DNA, 122 bp, Homo sapiens
ctctttgttaagtagccccccagtcagcagtccacggccccacccacccgacggctcggccgtcaaagacctcctggcccctgccccaaccccaagggaggatctaggggttgcacggggca

SEQ ID NO: 148820 - DNA, 122 bp, Homo sapiens
gtagtcccagctacgtcgggggctgagacaagagactcgcttaagcccaggaggttgaggcggcaatgagctgaaatcgcgcccctgcactgcagcctgggcgacagagccagactcttgtc

SEQ ID NO: 148821 - DNA, 122 bp, Homo sapiens
gcatatttccagatcaacacaaagaggtgaatggcccaccacccacatttgctggaatgccgctgtgtaaaacagcagcatcattcatccaacaggtgagaaacagcaggggcaaatgaatc

SEQ ID NO: 148822 - DNA, 122 bp, Homo sapiens
cagacccgggaaccggctcaacacggatctcattaatgcagcccggtagactagcaatctcgggaaggaagcgcggtcagcggagctgccggggctgcggggccagatcaaagcggaagacg

SEQ ID NO: 148823 - DNA, 122 bp, Homo sapiens
ccccggcccgcccccgggcccgcccccggcccggcccctgcctgcccccgccggtctccccgcccaccttctggcccagccctgggcccaagcctctagttccctgctggccctccctcagg

SEQ ID NO: 148824 - DNA, 122 bp, Homo sapiens
tcgccgtgtaccgctgcagcgccagcacccggctctggtacgagtgcgccacgtaccggacgccttacccggatgccttccagtgcgccgtggtggacaacctcatctactgcgtgggacgc

SEQ ID NO: 148825 - DNA, 122 bp, Homo sapiens
tgtgtcaggtaccatgacagatgctagatggataaaggtgaatgggcaataagcatttaacgagttgggtaatacatgatttaataatactaacaataataaaagttgaagactggagctca

SEQ ID NO: 148826 - DNA, 122 bp, Homo sapiens
gaatacacatcatattctaaatatactttatacatctgtctccccagtgagtctggagttcggaggacaagggccatggcttcccccacatcccaaggccagcacatggcctgccatggagt

SEQ ID NO: 148827 - DNA, 122 bp, Homo sapiens
taagacgtggctccaccaccgggagtccgagtgctgccaagaggaggtctctactcggaacgcaggtgccgtctttacagtggagccccaggaagccgtgcaggtttgaggctcacctgaga

SEQ ID NO: 148828 - DNA, 122 bp, Homo sapiens
gtgctccgggaataaagtgggtctgctctgcgtggcccccgcacactggataaaatgatgcgtgttgacggaatcctggcacttggaggggggcgtgcatgcaggtcctggagaggcagggg

SEQ ID NO: 148829 - DNA, 122 bp, Homo sapiens
gctgttagatttatctcactagctcatgcctaataaatccagtgtgggagacagtggagtcggagaggctgggagggagacgactctagtaaccaaagcgtgaagtaaaaagagcccgactg

SEQ ID NO: 148830 - DNA, 122 bp, Homo sapiens
gagggggccgggctctgcaggcacagggctgaggggcgtcgtgtggatggacggccagcccgttgggtgccctggctgggtccctgtccctgcacaccgggtcagccggctcctgggtgcac

SEQ ID NO: 148831 - DNA, 122 bp, Homo sapiens
tgcacgcagccccggttcctgcccatgcctctccctccacacctccccgcaagaggaagccggctccagcctcggccagcccagagaagggctcccacagtgcagcggccggctgaagggct

SEQ ID NO: 148832 - DNA, 122 bp, Homo sapiens
gcgggaccgcacgccggcttgcgcgagaccacgctccctcaccgcgcgggcaataagtcccgccccgcacaggccacgccctccgcgcacagcccaagctcgcggccacacccccaccgcgc

SEQ ID NO: 148833 - DNA, 122 bp, Homo sapiens
gcattccagctgggcccacagccacccttcacccctctcccagttcctagaacaggaacacgctgttgtggttccctgcagcaagtcaggtgccaggtgcatgggccccactgctccgggtc

SEQ ID NO: 148834 - DNA, 122 bp, Homo sapiens
tggtggtgcaatccactcctgggactcgtgggctctgggccaaggctgcagcccatgtcccgctgggggtcaccccttcattgtgggcgagtggcagtaatggcctcctgagttgggaaggc

SEQ ID NO: 148835 - DNA, 122 bp, Homo sapiens
tgtcgtctctacctccctagaggacaagcagcaggtaaaggaactggggagtggctggggcggaaagtgatatcctcaggccaataattgtccatacagggtagtatgaggtcaaagactag

SEQ ID NO: 148836 - DNA, 122 bp, Homo sapiens
gtcaaagaaaggggtgacagacggcacctggaaaatcgggtcactcccacccgaatactgcgcttttccaacaggcttaaaaaatggtgcgctaggagattatatcctgcacctggctcgca

SEQ ID NO: 148837 - DNA, 122 bp, Homo sapiens
ggcccggcgcctgctccacattccccaggaagccagctgggaacacagccgccctgctcccggaccctctgagagttcattaccagccagggtaccccagcccgtcagccaaggtgcgggcc

SEQ ID NO: 148838 - DNA, 122 bp, Homo sapiens
tttcctggatcatctcctgttggacaggagtcctggccagggcagtaagtcaactggtaacggccaaagcactcaagtttgtaggttgtactgtacatcttagtaggtctgtgtctttatga

SEQ ID NO: 148839 - DNA, 122 bp, Homo sapiens
gactcgggcggaactaagctacaaatccttcttcaaaccacaccaaaaacctattgcaaacgtaaatgctgccccattgggtatgtgactgagtttaatgtatggttagaagtatactttcc

SEQ ID NO: 148840 - DNA, 122 bp, Homo sapiens
atggaggtctggctatgttgcccaggctggccttgaactcctggcctcaagctatcctcccgcctcggcatcccctgtttataatcctcaacgttctgcatcctggtatggtcgggtaccct

SEQ ID NO: 148841 - DNA, 122 bp, Homo sapiens
ccttggagacagtggggccaccccttaagggcaggcagcaggaaggaacggagctagttgcgcacctctgcatccttttattacggaattggaattgggtttacttggccgaccgtgcggag

SEQ ID NO: 148842 - DNA, 122 bp, Homo sapiens
accacgggagcgcaggccgagggggctgcaaggaaggtgccgactgccccccagggagggcggtgggcgaggggcagacacggctaggcgctccagcccccttcccacaccacatacccgat

SEQ ID NO: 148843 - DNA, 122 bp, Homo sapiens
gtagtgcaaaaagtaatggttaacactcatcgaatgctttcaatatgccagtgctttccacgtattatctcaagtaatacaatcgtcctattttctaggtactagtattatgtttcacactt

SEQ ID NO: 148844 - DNA, 122 bp, Homo sapiens
cctggttcttctgttcctggcgtctgagatttgtcagcagggcctggttttcagggaccacggctaccgcctccttctgcccgcggggcggctcctgcacctctggcgggcaccggttccag

SEQ ID NO: 148845 - DNA, 122 bp, Homo sapiens
ttataggataagcccctgcacaggcaaacctagataaggaacatctgggttgcttggcaacggtcatatgcaatcctgtctttgtcctgcctctggatccctcctttcatgccactgtaagc

SEQ ID NO: 148846 - DNA, 122 bp, Homo sapiens
tacaagcaacttggatcatgtcattctcttgttcaatcacctttgacaggtccccaccttcgtcatgaaggacagttcctgaacctggcattcattctgcccctgcctgcttcctgggcttt

SEQ ID NO: 148847 - DNA, 122 bp, Homo sapiens
ccgtagcagagttcttgtaaggactcgttcaggggagactgataagggtctcatctccatcgggggacctcaccagggcatggagtgggtcagagtgggctgggaggggatagactgtcatc

SEQ ID NO: 148848 - DNA, 122 bp, Homo sapiens
ccaggtacgtctccctccggcgctagtggcgctcggacaccgttgcctaagaacgtcatgcgtggagcagtcacagactcacatgcctcaggactctggaaagtagtgtgacccttcagatg

SEQ ID NO: 148849 - DNA, 122 bp, Homo sapiens
tttttgacctggcatcttttagtgcaaatactaacttaataaatatttaataataaccatcgtgactcactgggagtgcagcctgtagggctcaggaggtctgttgctaatcccaaccagca

SEQ ID NO: 148850 - DNA, 122 bp, Homo sapiens
cccaggcaggcccgcccccaccgcttgcccgctctgcgattggctgcgccagccgctgggcggggccttccggcttgctgactcctggcatgtggagcagctcagtccccttgcctcagtgg

SEQ ID NO: 148851 - DNA, 122 bp, Homo sapiens
cgaaagcccgatgtaaacggctacgagctgcagcgacggcgaggggagcctggaggatggcgggcccagtcctcagaaatggaaaaacagaagccaaaggcgcgctgaagcgtggatgtgcg

SEQ ID NO: 148852 - DNA, 122 bp, Homo sapiens
gagagcgcggattggtcaggcacggagcaggaggcggggctgatagcccagcagcagcagcggcggcggcggctgcggagcgggtgtgaggcggctggaccgcgctgcaggcatccgcaggg

SEQ ID NO: 148853 - DNA, 122 bp, Homo sapiens
ccttccccaggcttcccctaccccagatttggggggcagagttggccagtggcagaagaacgctccccttccctccttccctccctgtatctcagcttccccagtcccctcccaccctccct

SEQ ID NO: 148854 - DNA, 122 bp, Homo sapiens
gaggaggcaccggcagctcctctaggtactgcctgagatgcgaactgcagctgctctcgccgccagtccgtataaaataaagttcttggagcagttgcggaggcttctgcaatggggtctgg

SEQ ID NO: 148855 - DNA, 122 bp, Homo sapiens
cctgcctggaatgcagacggcctccctgtaccactgccacccgctctcctgcagccaacccggctcacccccaggagctggtgatagagaccccgggagccatcccggccctcccacccaca

SEQ ID NO: 148856 - DNA, 122 bp, Homo sapiens
tttgggagctcgacgctcgacatcactacctgcgggtggccaccagcggcggaagtcgggcgtttacaggcagaagtaacagagtgtcgagagactcccagtcccaccctctaaaccctctt

SEQ ID NO: 148857 - DNA, 122 bp, Homo sapiens
cgggcaccgggttgcggggcctcgcaggggttgaatccggagtcttgccagtccctgggccgcgcggttcccggctctccaagctgggcgggccccacgcccgctcgccccacgggaaccgg

SEQ ID NO: 148858 - DNA, 122 bp, Homo sapiens
cacggcctctacatccagtccacccaagctgatttttgtaactcatataaagaatgggcccgggtgggtggtcagtgaagactggggtgagcaagcgcccacgtcgccgagcgccggggagg

SEQ ID NO: 148859 - DNA, 122 bp, Homo sapiens
cctgggccggtctgggaaagttccccagctgcacttctgggaaatgcagaggctgcctgccgctttctttcgcagttttgcggcccaaggcttgggcgaatcagttcacatcaacaccccta

SEQ ID NO: 148860 - DNA, 122 bp, Homo sapiens
tggagctgcctatttggtatggcgagtaggcagctggacgtagaaggaggctggagtttgcgagagaaacttgggagtggttggcatatagatgatatttaaagtcagaaacgtgtactatt

SEQ ID NO: 148861 - DNA, 122 bp, Homo sapiens
aaaccaccgcaccgccctgggtggaagaaaccgcttcggcagcagaggaaacagcagcttcgcagagcagcctggcccgagtggctacaccgggtctgtctggtctcagctctggcctctga

SEQ ID NO: 148862 - DNA, 122 bp, Homo sapiens
gcgcgaatggggaagggtaaagcgggcacttcttttcgtggggctgttggtgaagagccccgtctcccatccctaaagttgcgcttgcaaactttttctagcttctggagggagtgagagag

SEQ ID NO: 148863 - DNA, 122 bp, Homo sapiens
cccgtgcctgaccagctgctgctgtcatgggcccagcaatcgtaagtgaccagcaggacacgctcctgtgacgaacagccccacccggtgagtttgtttcccacccgaaatctccttcctcc

SEQ ID NO: 148864 - DNA, 122 bp, Homo sapiens
ccggctgccgctcagacagaagcccatttcaagcttgcttgcaggggcgagtgatgggctcgctccattgtgctcgtatttgcatggatgtgatcgcggccttgattggccggcgctgagac

SEQ ID NO: 148865 - DNA, 122 bp, Homo sapiens
tggatgggattgaaggggaagagcggagtaagatcagacggcagtaggacttcagctccccgccatcgctgtgtcctgtggttgaaacgatggaggtcgccccatccctgtcctaagggagg

SEQ ID NO: 148866 - DNA, 122 bp, Homo sapiens
ctccctgcctgctgcagggggatgcaggtggtccaacaccatcctgggcctggtcagccccggtgccagcctcagcacagtagcgaggagtcccccaggagagccaggaacctccatgggag

SEQ ID NO: 148867 - DNA, 122 bp, Homo sapiens
gctgtggtggacgaaggagatggtgagtgcgtcctcttccgtcctcctgggcgtgcaggccgtgcagggaggaagcacgtcttgagggaggagtgcttgcagcagtgatgaagcaggccagg

SEQ ID NO: 148868 - DNA, 122 bp, Homo sapiens
cagggaaacacaggctgggaccatgacccaatatttctccgtacctattagaacagctaacgcaaaatataataacaagaccaaatgctggcagagattcggagaaacggtatgacattcac

SEQ ID NO: 148869 - DNA, 122 bp, Homo sapiens
aagacgcgctgctggagcctggcgccggggtgctgtccatctactacctggtgagcaccccgcctccctcgtcccatcgcggctcgggcaggaaggggaaactgaggcctggagttcccttg

SEQ ID NO: 148870 - DNA, 122 bp, Homo sapiens
cccagcctgcccagcccgctgcagccgccagcgcgccccgtcggtgagtgctcccagcaccgcagctgtcgcctcccgacccccgcccaagcctgccctggttcctcatgcctgacccctgc

SEQ ID NO: 148871 - DNA, 122 bp, Homo sapiens
aggcgcggcggcgcgcccgggggtgggtggctgaggcggcggcgggcccaaggcgtgaggcgccgcccgggtgtccccgcggcgcaggaggcggtggagcgcagagcgggcgagcgcggtga

SEQ ID NO: 148872 - DNA, 122 bp, Homo sapiens
cggctgttgcagcctctgaaattgctctcacgatcccttccccgctttcaaggtgagagccgccttcaagcacaaaaccaaggtctggtcgctcacgagcagctctgcccgcacctccaacg

SEQ ID NO: 148873 - DNA, 122 bp, Homo sapiens
aggcactttggtttggatgaatgtttcagcgtttgctctttagaatgcccaagtgccccacgtcttgccccgtcacggggagatatgatgggcatctatgaaatcttgcttcttggaaactt

SEQ ID NO: 148874 - DNA, 122 bp, Homo sapiens
gcgctccctggcggccgtcctggtcccggcgctccccgcgcaaacggaccccggccgcagcgccctccgccccaccctggcggccccagcagcccctgcacccccgaactcgcgcgccggct

SEQ ID NO: 148875 - DNA, 122 bp, Homo sapiens
ctggcccggcctgtacccaggcgggggcgggggatcagaggtcgtctgtctccgtcggggcgcccggaagggatgggggcgcgaagctggcggggagggcgagcgcagggagctgcgggtct

SEQ ID NO: 148876 - DNA, 122 bp, Homo sapiens
acatcctgctgcggcgcatggcctcgctgatcaggtaggcggggctcagctccggctcctcggtcatgatggcaatgttctgccactcgcccgtctggctggacctcttgatggtgtccacc

SEQ ID NO: 148877 - DNA, 122 bp, Homo sapiens
ccagctagagggtcccggccgaggctgtgtgaagtggcctccaggcctgggctggctggtcgggaggagcctgggggcatcctcgggttggaggcggcggaaagttgggctgcccccgggct

SEQ ID NO: 148878 - DNA, 122 bp, Homo sapiens
atctctccccactggcctctctcccagcactgctgcagcatttttagagaattctccagccgacactcccctctggaggagctcacccctttctcacctgcatgcctctgcaccggcaggtc

SEQ ID NO: 148879 - DNA, 122 bp, Homo sapiens
cccgacatcacgcaaacaggagggaatcgcagccccggccccgcgccccggcctcttcggcgggctgggccagccccataggtccagcggccgcaggcacactcagggccaccgggccgggc

SEQ ID NO: 148880 - DNA, 122 bp, Homo sapiens
gtctctgctacctgtagctgagggcgctgttgatgggcagcgcggcgcgctgggaaggctcgttctcgcgagagttcagctcccttcttagccgtggctgcctcagcacctcgaggatcgac

SEQ ID NO: 148881 - DNA, 122 bp, Homo sapiens
aatacggtttacaattcctcatgaatggcaaagagcaaaaaaaaagacgtttacatctttcgacaatgatcccgggcattaaggccaacaatgttagcaacgaagagactgggtaaaaagag

SEQ ID NO: 148882 - DNA, 122 bp, Homo sapiens
aaaggaatgcccctcgggagtttcccgggatagcgcgcggccccacgggcttcctactgccggctcaccaacgggaaatatgcgcaggggagactcccaaacggacacaaaaaagattcctc

SEQ ID NO: 148883 - DNA, 122 bp, Homo sapiens
gcagcggctcaccggcctcccctccttcccccactcgaaaggctgaggctggcgaagccccggcttctctcgcgcttcgggctgctggcttggtggcaccacgctcacactcgctggcccgc

SEQ ID NO: 148884 - DNA, 122 bp, Homo sapiens
catttaaagtctcatgaaatgagagaagggttgttctgttccttatttactgtacttgaacggagtcactgaaaaccttgatgggatgtctctatgactgctcattcctagttgtctgcagc

SEQ ID NO: 148885 - DNA, 122 bp, Homo sapiens
ccaggggtaatttagcttggggcttctcttgagcttgtgcaacccaaattgatggggaggcggggcctggggaattgccctttgcaacaaggtgcatgttgcatctgtctggagcccttgca

SEQ ID NO: 148886 - DNA, 122 bp, Homo sapiens
cagccaccaggggctgggtcccaggtgggttcccttccccaagcgtcttcagtgctctggcgcggcccttcctgtgtctcagtggggccatggccagcgcctcagggtctgagaagcctgcc

SEQ ID NO: 148887 - DNA, 122 bp, Homo sapiens
ataagattgtctagtaatgaaccaatcagtctggtcactcttcagccaatgattttatcgcgcgggacttttgaaatattacaggaccaatcagaatgtttctcactatatttaaaggccac

SEQ ID NO: 148888 - DNA, 122 bp, Homo sapiens
gcgcatttctggcctcatctatgaggagacccgcggagtgttgaaggtgttcctggagaacgtgatccgggacgccgtgacctacacggagcacgccaagcgcaagacggtcaccgccatgg

SEQ ID NO: 148889 - DNA, 122 bp, Homo sapiens
ctcactgccttagtgcgagcccttatctcttgccaagattatgcagtagcttttcagttccgtccatgctctaccctgctgccagagttctttctaaaacacgtgatattgtcacaccctta

SEQ ID NO: 148890 - DNA, 122 bp, Homo sapiens
gccccggctcgggctcgggcttggcggcggcggcgcgcagacaggggatcgcgggagctgcgctcagcactccggctgccggctttatatgggacgcaggctggagatcaggtggtccccta

SEQ ID NO: 148891 - DNA, 122 bp, Homo sapiens
ttgaaaactgaaacagaccatgagacactagatctgtatcatatgtctccagggctataccgtaagtcaaagcattacaactgttgggagaaaagctggacattccaaaaaaactacttatt

SEQ ID NO: 148892 - DNA, 122 bp, Homo sapiens
gttgaccaaaggattcttaaagaaacatgtggctggggtgaggagaccccaatgcctgaacgagaccccagagtggaaggaaaaacaacccagaaatgcaaatccgaagtccctgcccacgg

SEQ ID NO: 148893 - DNA, 122 bp, Homo sapiens
caggagcaagctctcaccgcccatagtcactcccaggaccctggtcttccgcggagttgccgagtctgtgttgggcagggtgatctctgcagctggttcctcttacccacgccgcgactgca

SEQ ID NO: 148894 - DNA, 122 bp, Homo sapiens
agcccatgtttctgattcagaggggccaggggagctccttaaatcacctcatatggtccccgccgcccacttcctattcacctcagtctgctgggaccaaacacagccccaagcaaagacag

SEQ ID NO: 148895 - DNA, 122 bp, Homo sapiens
ctcatccctctcttcagagagcgcatcctctctggaaagctggtgcgcagagctgagaagcggcttaaagaggtggtgctccaggtggaggaggagcggagggtggctgaccagctccggga

SEQ ID NO: 148896 - DNA, 122 bp, Homo sapiens
attcagatttccatttaattgtgttcttatttaaaatgtctgctgcacctgcagccaactcgatcactattagctatttgcctggtgttatgtacatctatgaacaataaaaactttagaaa

SEQ ID NO: 148897 - DNA, 122 bp, Homo sapiens
gagccgttggggccgatgatgcaggtgaacctccggaaggggccaatgacctggcggccccgccacgacttgaaattttccacaagcagcagctccaggtgggccatggcgccgccctccac

SEQ ID NO: 148898 - DNA, 122 bp, Homo sapiens
ttgccttggaaatcaagcaggatatccacgctatttgttactcatgcaaaaaaccataaacgggctgggtgaggtggctcacacctataatcccagtgctttgagaggttcaggcaggagga

SEQ ID NO: 148899 - DNA, 122 bp, Homo sapiens
gatccgggaccgggctgggctggcttggtgaggagctttgtctccaggcttgaaaccagccggtagcgactcgcttagggttttgtgatcttccgcggcgcccacggcacgcccttttctcg

SEQ ID NO: 148900 - DNA, 122 bp, Homo sapiens
aataggtcatgggggaggagccctcataaactggattagtgcccttgtaaaagaagcccgcgagagatccctcaccccttctaccacgtgaggacacagtgagaagatgccatctatgaacc

SEQ ID NO: 148901 - DNA, 122 bp, Homo sapiens
tttgcgcctgggttagcgatctagcttgctttgttgcccgcctagtttaagattgggagtcgcatttccaatgcgcagtaccctgggatttgtggtctccctagattaaacagccagagaca

SEQ ID NO: 148902 - DNA, 122 bp, Homo sapiens
catgacttactagtgttgatgttttctgcataaattgaggtgtaggaagcagaaaatccccggtaagaattggcataatctgtagacaacacgacagtcagagagtttgatgacgattcgaa

SEQ ID NO: 148903 - DNA, 122 bp, Homo sapiens
accttcctcaaaagtaggggtgggaggggcataagccggtcaagtatttcccgggccttccggagcaatcttgcctaagcgttcatatttaacgcattggactgggaaacatttggagatca

SEQ ID NO: 148904 - DNA, 122 bp, Homo sapiens
cgaggagttagttaagtctccagaggggcccggttcggcccgagcaagtccaggggcgaacggcgtcatggagcccataggggcgcggctaagtttggaggcgccgggaccagcgcccttcc

SEQ ID NO: 148905 - DNA, 122 bp, Homo sapiens
cctctggcctcagcctgctcagtagctgggacaacaggtgtgcaccaccatgcccagcttcggcatgcctcctttactatggaagtaagttcctgcaaaaacaatttgttcattctgccctg

SEQ ID NO: 148906 - DNA, 122 bp, Homo sapiens
gatcaacctcaaattcatgcacaatcaggtaggtgcgagcggcagcacgaggctccctgtcgttccatctgtaagaaggaccaatgtccaagcccccagtacttccccagcaagcatgagag

SEQ ID NO: 148907 - DNA, 122 bp, Homo sapiens
ttccatatccctttctctcttgtccaatggggcttggagcaccgaggccagcgaagccatcgcgctccttgcggaggtgaagaggaccctgagtccccacctgcggctcccctgtgtagagc

SEQ ID NO: 148908 - DNA, 122 bp, Homo sapiens
gaatcttgaactgcagtgaaacaggtaggtgcctcacctggacagggtgggccttttctccgtggtggcagcagtcccccaagagcagagggctgccttctaggaggctgggtctgggagct

SEQ ID NO: 148909 - DNA, 122 bp, Homo sapiens
gtcggccctttcagtccctcagaagcacttgggtttaaagtctccatgtcattaaaacaacgagcaggtagacgaggcggccggagcgtgtccgccgcagtctgggctgtgaacgggcccct

SEQ ID NO: 148910 - DNA, 122 bp, Homo sapiens
tcgccagcccagctgccggcacgccggccagccagccgctgccgcttaccagtggcgcctcgctgactccccgggggcagctcttcaacggttcccgcagtcagagcaccaccccgcggtgg

SEQ ID NO: 148911 - DNA, 122 bp, Homo sapiens
atgctgaatgtaccggggcctcccctcatactgcaggctggtacatgtgcctggcagatgcggttttggggagcagccggttagtgctgagaacaagcaagctgggactgttttttcattca

SEQ ID NO: 148912 - DNA, 122 bp, Homo sapiens
gggcccttggggggctcagaaagtgggatcagagcatggtggagagtccacagggatggccgtggaaagaagtagggaaacaccagctgagtccctggggggccgagcacctgagtctcccg

SEQ ID NO: 148913 - DNA, 122 bp, Homo sapiens
tattagaggacttggggctgttgctatggtactggggccaacagcaggttcatcaaaagccgggtcttttgccttttgaaaaaaaaacccagccctgcagaagcgaattggccacaaagatt

SEQ ID NO: 148914 - DNA, 122 bp, Homo sapiens
gattaagtgtggtccactctgcctgggttatgatgatcaggacagagttgagttgctccacgttgagtcatgtccctcatggttgggttaaactggaatcctgtggaatgggctggttggtg

SEQ ID NO: 148915 - DNA, 122 bp, Homo sapiens
ttcctagatgggatggcggccgggaagaggcgctcctcatttcctagacgggatggcggccgggcagagacgctcctcactttccagactgggcagccaggcagaggggctcctcacatccc

SEQ ID NO: 148916 - DNA, 122 bp, Homo sapiens
gtcctttaagttggctcatctgcctctttcttttcttttcttttcttttctttttggagacggagtcttgctctgtcgcccaggctggagtgcagtggcgcgatttcggctcactgcaacct

SEQ ID NO: 148917 - DNA, 122 bp, Homo sapiens
gtaccgagaccaggcggttcaaaacacagaggaggagaggacacggtaggctgcccttcccggggggtcactttgggtgtttagctttctctgcttggggcctgccactccgtcgccaatgc

SEQ ID NO: 148918 - DNA, 122 bp, Homo sapiens
caaaaacccgtagaatgaacaccgtgcacacgcacacacacacacacacacacgtgcgcgcgcggcaaaaagaaacagctcatttcggagctgaggacaaggcgtgggaagaagacgcgttt

SEQ ID NO: 148919 - DNA, 122 bp, Homo sapiens
atatacgtgaatatatacatgtgtatatgattttgtgtagtgtgtgttggtatgtgtgtacgttttttctgtatttgtatgtgcatatttgtgtgtgcaatgtgtgtgtgtgtgtgtgtgtg

SEQ ID NO: 148920 - DNA, 122 bp, Homo sapiens
caagttgtcctcccgcttcagcctcccacagtactgggactgcagcctgaggcacgaccccggccagcagtgtctccatatctaagaacctcagtcacggccgggcacagtggctcacgcat

SEQ ID NO: 148921 - DNA, 122 bp, Homo sapiens
gctgagggcgggctgtgtgattacacctctcgggaaatccaagtatggcacctgagaggacgtctcggaatcccaggcttccaccttctgcccgacctccttagtcaccgttttacatattt

SEQ ID NO: 148922 - DNA, 122 bp, Homo sapiens
ctctgccggcctgagctagggtgggtagggccgggacccacggcggaggtggggccgggccgagcagcctcgggggatccccgaagctacagcgccttgcctccctgcacgctccgcgcccc

SEQ ID NO: 148923 - DNA, 122 bp, Homo sapiens
agtccgcgtagatctctcctgagtggggaggccacgtagacctctcctgagtggggaggccgcgtagacgcctcctgagtggggaggccgcgtagacctctcctgagtgagggaggccgcgt

SEQ ID NO: 148924 - DNA, 122 bp, Homo sapiens
ggcggcgaccgtgacgagaagcccacggccaggtaatgagtaaggggcgagtccgccagccgggcccgcacctctcgcgcgcccctcagcctagccggccgctcctcccccgccgcgccccc

SEQ ID NO: 148925 - DNA, 122 bp, Homo sapiens
ccatgtactgagcccaaacctgtctgtctgcttgccatttccagtctttcactccacttccgcccccacaaaacatacagaccgagagacatacgagagactctggtcacttttttctggat

SEQ ID NO: 148926 - DNA, 122 bp, Homo sapiens
catctagcccaggccgaggagccgtaaaggggctctagttggcttccccaggcgagggttcgtacctggccacgtgtagcccaggccaaggggctgtaaaggggctccacttggcttcccca

SEQ ID NO: 148927 - DNA, 122 bp, Homo sapiens
aggtttgttctcagaatttaaaaggaagggagcacaaagggagaacgcccttggcacacacggactcgggtggttcttttctaccgtttgctgttgctacttgggttaggctgagaagcggt

SEQ ID NO: 148928 - DNA, 122 bp, Homo sapiens
tagaaataatgttgttggcacaactagagcattcctcagtcattcaggagcactccctgccggtgcgtccacatgtcccaaccccgatagatgaggcgctgttcgcccgtggaggggtcagg

SEQ ID NO: 148929 - DNA, 122 bp, Homo sapiens
ctgatttttttataaatgatgtgaaatcttctggagatgaggcgtggttttccggatattcggtgtcctgatgaaaatccaaagccatgtgctatctgagaagaaatccagagagtgtgcac

SEQ ID NO: 148930 - DNA, 122 bp, Homo sapiens
ctgtggctttctgggtccacaaaagagaactctggccaggattttgctggactgtcaaaacgtttgtgatcactgtcacagaattacaaaacaaactggggacttagagcttcttagtccca

SEQ ID NO: 148931 - DNA, 122 bp, Homo sapiens
catgtgtgcgcgggaggatgcacagacccaggcaggtctatgcgccttcctgggtctgtgcgccagggggacgcggccgggtgggggaatcaagggatgagtgggtggtcgcgtttcagatc

SEQ ID NO: 148932 - DNA, 122 bp, Homo sapiens
tgcacacccagagaacactagagggcacccccgccccggagacggcctctgaggccagggcgtagctgcagcctgggatgggagcggtacaggctttatatctcgaactgtcctgggggttg

SEQ ID NO: 148933 - DNA, 122 bp, Homo sapiens
tcacccacacgcgcacacacacagagcacactctggcgcatgcatggacacagtcaggcccgtgctctctgaggtccgatggagggcatcgttctgggagcttccctgacccctgggtgtcc

SEQ ID NO: 148934 - DNA, 122 bp, Homo sapiens
aaaggggtgtgaccccgaggggaggcgacgcgctcccgcgccctagtccacaggcatgcacgaccccacccagcacagggcctagggcatggggactggccctcttggctgaaacgactccg

SEQ ID NO: 148935 - DNA, 122 bp, Homo sapiens
cacggagatctgcagctgtgtgtctttgcttgctggcttcaggcattatgcagaagcctacgagactgtgaatttcagagaggggccccaaggagtcgaggggtggattgacggctacagcc

SEQ ID NO: 148936 - DNA, 122 bp, Homo sapiens
aattacaataaaataagagaaaccacttggagagcaagagggcttgtggacttgggggagcggttgtgagaaatgtctcagaacttaatttacaaataacattggtagattgacatgttgtc

SEQ ID NO: 148937 - DNA, 122 bp, Homo sapiens
agaacccaaaacaataggctgaaagtcctgctgatgcactgccaggaaagacgcagagtacgagaccagtctagctgaggcctgcgcaccgccgggaaagacgcggtgtccgagtccagcct

SEQ ID NO: 148938 - DNA, 122 bp, Homo sapiens
aatgtatcaattttccccttgaagaaaatcagctgcaaatctcttcgtcaatgcatgggccgcctctcatctgccccctgcaggcctagcccttccttttcccgtccctgctctggtctatg

SEQ ID NO: 148939 - DNA, 122 bp, Homo sapiens
cacgccgcccctcatggggcagcggaaagagccccggatcccccaggctggctcgggggtcgcggggagccgccgggcgcccgctccagcccggctgctcctgcccggtttccctgctcacc

SEQ ID NO: 148940 - DNA, 122 bp, Homo sapiens
cacccgggggcgcggagaaggggaaggagtcgcccggtggcctcggccctcggcagccggcggggctctccgaatttgttcatctccgtccccccggggactctcggctctccaggacccct

SEQ ID NO: 148941 - DNA, 122 bp, Homo sapiens
ggccgggaaactgaggcctgggcggggcgcgccgaggcaggcgtaggggcggggccaaagcgcagccaatggccgaggccgagtccctgggcgaccgcgagcggcgggacgggggcggggct

SEQ ID NO: 148942 - DNA, 122 bp, Homo sapiens
gtaaaatgacttggcaccagagctcctgccgcctcccccttatgcagctgccctcgccgacgccagggactgtaaaatcagatgggacagggcctagccgttcagccaacactttgagcttc

SEQ ID NO: 148943 - DNA, 122 bp, Homo sapiens
accgccacccagcaccggcatgtttcacagtgttccgcagccaccaccgccgcccagcaccggcatgtttcacagtgttccgcagccaccaccgccacccagcaccggaatgtttcacagtg

SEQ ID NO: 148944 - DNA, 122 bp, Homo sapiens
tgcatgggtctcgcagttgggacctggtcagcaggggtctaccagttggggcctggttggcggaatcaggcagttgggacctggttgtcgggggtccaacagttggggcctggtcaaagggg

SEQ ID NO: 148945 - DNA, 122 bp, Homo sapiens
gctgctagggtgtaactgtcctcggtccgggaccgagtctgctcctccagggtatcttgccgcccaggttgctgttgcccgtggacccctgctgttctccggtgctctgtccgagggacagt

SEQ ID NO: 148946 - DNA, 122 bp, Homo sapiens
aggcatcagccctacataaaacctcaagtccttcttagtttgtttctgaacatgcacctacgtggactgtgtttgcccttttatgtatccccaaataaccaatggcttttgaattgcttact

SEQ ID NO: 148947 - DNA, 122 bp, Homo sapiens
ttttgcctttggacaaaggtgaatggcaactgcgttggtcagtttttgttttctgttctgcggatgggttcgccgacgcagtaatcaaaattagagccactcttttggaagagcaaatcgtt

SEQ ID NO: 148948 - DNA, 122 bp, Homo sapiens
ccctggggccagagccggccaggtggacgcacatgactgtgaggcgctgggctggggctccgaggcagccggcttccaggagtcccgaggcaccgtcaaacgtaagtccaattgttttcctg

SEQ ID NO: 148949 - DNA, 122 bp, Homo sapiens
ccaactgaccggccccctcacgccattagcgtaatcgctttggaatcaatttgtgggctacgcaggcgacgtagcaaagacggttggcttttgctcatcgaaaattactctaaacctattcc

SEQ ID NO: 148950 - DNA, 122 bp, Homo sapiens
ttgcagtggtgagcaacctacttgcagaaagcgggcccattgttaccccaacctgactgccgatcaccttacctgagcctggaggtggaggctgctaggatcacaccaatgcactccagcct

SEQ ID NO: 148951 - DNA, 122 bp, Homo sapiens
aaatatcaatcaaatacatgtaagatgtacattgatttggttcatgtcaggcctctgagccgaagctcacccattgtaacctctgtgacctgcacatgtacatccagatggcctgcaggagc

SEQ ID NO: 148952 - DNA, 122 bp, Homo sapiens
gaaacccgcggtgggccgttgggtgcgcgccgagccgctgccaactgccaagccacgggacgaaaccaaggcgcccgcgccccgcccagccagagcgcctaagcccttcccgtcgcccgcca

SEQ ID NO: 148953 - DNA, 122 bp, Homo sapiens
accctggtgccgggctaaggcctccgcttccctcctgaggtctcattaggaaaccctcaccgctattttcaacatttcctcaatcaagtgcctttaaatagagctgcacaaacagattggcg

SEQ ID NO: 148954 - DNA, 122 bp, Homo sapiens
gcgccccagcgcgaggctgtccccaccccaaccccgcggcccgggggccccgactcagcgcggtcctggcctcacctggtgctgctgaccgcccacgcccgccgcccgcctttcatctcccc

SEQ ID NO: 148955 - DNA, 122 bp, Homo sapiens
tcagcacgcggagcagcttcgggtatttccggaaactgccgaaagcccccttgaagtgggcggggaaaggccggtgggcgtggctggatggccgtggacgggggcggggggtaggcacccgg

SEQ ID NO: 148956 - DNA, 122 bp, Homo sapiens
gaagaagcaggggcgatgagctctagctgaaagcatcccctgctagaagccgactgcccacggcgctcctgtaggcagtgttgaaaaggtagttaagacctccaactcccggtggcagggac

SEQ ID NO: 148957 - DNA, 122 bp, Homo sapiens
ctgcggctcccgaggtgcggggagcagctgggggtttgcgagctccagtccagcaaggtgcgactccggggagcgaggcggcagcttcggccgcggcctgagcgcagggcgctgcggggcgg

SEQ ID NO: 148958 - DNA, 122 bp, Homo sapiens
gttccaggcacgacccttggcaaggcgggcttcctcccaacggagtgacctgacccctcccgaagtgacgtttgcattttagaatttcctgattgtattcagtgggttcttcctgctttttc

SEQ ID NO: 148959 - DNA, 122 bp, Homo sapiens
tgtgaaatatcagctgtttcacaaattctgaggtaaaagaaaaaaaaaaaaagaaggggtcgacccccacaggtggaaacagcaagtcctaacgtcctgggctgaagcctggggtgcgggcg

SEQ ID NO: 148960 - DNA, 122 bp, Homo sapiens
gtagggtcggacatcttggtagcagaggctgaaagtgattggagcctccagagccttcctcggggtggggcgtttaacatcccttcagaaccccaccctcggaggccttactgtcgtttcct

SEQ ID NO: 148961 - DNA, 122 bp, Homo sapiens
ccaggaatgcaaatggctttgttttgaaccatccacagatttgcccaagcgcccattgaccggggcccagtgactggcagccgagagcatctgggcagccgttgtgttgggggcagggttct

SEQ ID NO: 148962 - DNA, 122 bp, Homo sapiens
gccgagggggactgagcaactttttcaggtttgaaaagcctcaacatcaacgcgcgacggcgctctttcaacatcagcctccagaactggggctgcagccaggagggaactacaacgcccag

SEQ ID NO: 148963 - DNA, 122 bp, Homo sapiens
gcctcccccgggcagccagagcttcacatctacctccagccgggacccgcccccgagccgcggggcccacgcccagagccctccgccgtccccagcgcagtgcagcagagcgcgatccagtc

SEQ ID NO: 148964 - DNA, 122 bp, Homo sapiens
aggagaggtttggattgactgcccaggccagctcagaagaggaaattctgaaaggggatccgtctttgtcatattccctgaatcaagtgtttctggctgcagctgcctagccaggtgttttg

SEQ ID NO: 148965 - DNA, 122 bp, Homo sapiens
gtaaagggcgagggcaacagtggacggggtgtctccagacatccccctcattaccgtggccgcggaagccgactcggcagttgccgccgcggctgtggtgactaccagacgggccataggcg

SEQ ID NO: 148966 - DNA, 122 bp, Homo sapiens
tcgaatccaaccacccactccacagatgggaaagcaaagtcctagggagatgtccttgcccgtttctcattgttcccacctgactgctctctaactttgcaggtggtgggggtgggtgaaga

SEQ ID NO: 148967 - DNA, 122 bp, Homo sapiens
tgctggcgcggcccggagaggctcgcggatgcctggccgcgcgcctccgcgggacgtcagcgcccgcggcacgatctgctgctgtcactatcagtatccggcaggagcccgcccgccccggc

SEQ ID NO: 148968 - DNA, 122 bp, Homo sapiens
ctcttgtgcgtcctgtcttagtcacatctgttggactgggggcgtgctctgcgtctcggtcgcgtccgtcggactggggaggtgctctgcgtgtctcggtcgcgtccgtcggactggggagg

SEQ ID NO: 148969 - DNA, 122 bp, Homo sapiens
tgtgtaatggggcctacacctgcttgcccacctgcttactccttgtcgcccccccacccacgtgtctttcagcccggccgcaccacctgggtctccgccatgaacgggcctgccctgcagcc

SEQ ID NO: 148970 - DNA, 122 bp, Homo sapiens
cttcctgtcttctccacattaagttcaccctctttgtacttttacctgagtgcttccccccgttctcctccaccccaccccacttcaggcaattctgagtggtacagaggtgtcacatccat

SEQ ID NO: 148971 - DNA, 122 bp, Homo sapiens
agagtcgacctgggctgcgtgatgggggaccccaggctgggcggcttaaaccgtggaggtcgccctctcacagctctggacgatggagggccgagacccaggtgtgggcagggctggttctt

SEQ ID NO: 148972 - DNA, 122 bp, Homo sapiens
tccagagcaacctggcctggcgaccataccactgaaccatcaagggctatggttaatgcccggcgtgttttgaatctctgacttcacgtgctttgatgtgtccccacgaccgtttacttttc

SEQ ID NO: 148973 - DNA, 122 bp, Homo sapiens
ctggaggcccggaccccttacctacggggcggcgtatggatgtgtggatgatgtggcctgcggggtcacccatgtgcaaagcaactttttcctgcaaggttctgggtgggtgctctcataca

SEQ ID NO: 148974 - DNA, 122 bp, Homo sapiens
gccagccccttcgctcctgcactccacgggcagagaggcccttggggccggtgcaggagccgtctccctcgggctctcccagggaacgcacacccaataaatacagcacctaaacaatgaaa

SEQ ID NO: 148975 - DNA, 122 bp, Homo sapiens
gccggaagtgacgttaggctccgactcttaacggagacgcatttttatttctgttgtttacgattcgctatagattccttgtttctcacttcgtagcacgagccactctgaccatcaagatc

SEQ ID NO: 148976 - DNA, 122 bp, Homo sapiens
tcgcggtgcggtccgggactgcgcccctgcgcaccgctcgaggacgaatgtgaggcgccgcgtgagtcctgcgttcgaccccaccccgtcccagccggggaccccggcccctcctgagcgtc

SEQ ID NO: 148977 - DNA, 122 bp, Homo sapiens
gagaaaaatggagaggacaaacctccaggtagtatttattccggattccaaactctcctgcggcctaaacagtatttagtctattggaaacattcagcaaggtctttacaaaaatgactgca

SEQ ID NO: 148978 - DNA, 122 bp, Homo sapiens
gcggtcgctgggagagactgagggcccggcgcctagaggccgcttatctgctcccaagcacgtgacccgatccctgggaccaatcgccgggcctcgagccccagggcgcgaccaaccagcgc

SEQ ID NO: 148979 - DNA, 122 bp, Homo sapiens
aaagtttcagtcaaggagcatatcagagcacagacaaggagaccccagcctggtgcccgccggcccgtcccggctgcccaggcgtatttggtagcgcatgggttgagagccactgggacaat

SEQ ID NO: 148980 - DNA, 122 bp, Homo sapiens
tgcaaaatggggccaatagtatcagatccattgatgggttggttggttcattcattctggcgctttactaggttctggtgctgcagatggatagacgaacttgcccatgaggggttcactat

SEQ ID NO: 148981 - DNA, 122 bp, Homo sapiens
gttcacaatattactgaccttgagtatctttcctgacaggagcagagtcctcctggccttcgaggcggccaacttcactctccattaaagaaaaaaagaaatgcttcccccaacaaagactg

SEQ ID NO: 148982 - DNA, 122 bp, Homo sapiens
aggccattgggtcggacagcaccctggagcccagtatgcagagcacagaggccgtggggtcggatggcacccgggacaaggtgcggagcctggccacaccctcaaggccacggggagccagg

SEQ ID NO: 148983 - DNA, 122 bp, Homo sapiens
ggagggaccggagcgggcgcgggcacccctgggctctgaggggcgcgctctgaagggcggcggacttcagggccatgctggctgtccccagaaagcaggagcccgaaaccgcggggccaacg

SEQ ID NO: 148984 - DNA, 122 bp, Homo sapiens
cgttgtccccgcagctctcctcgtcccgccccggcctgccgcgcgctggagagcctgggacgtgcagctggaacccctggcgctcgcacactcagctcgctatccccgtctccgcccccggc

SEQ ID NO: 148985 - DNA, 122 bp, Homo sapiens
gacctagagaggaagtggtgggtgaagaaatgagaacctcccctcccactggctcccctgcgtgtgtctcccccaccgcctgccgccagcacctccgctggccccttgaggctccttcgccc

SEQ ID NO: 148986 - DNA, 122 bp, Homo sapiens
cttttgcttggttctcattttctctcatctgttgccatgtaagatgtgccttttgccttccgccaagactgagaggcctccccagccatgtggaactgtgagtccattcaacttctttttat

SEQ ID NO: 148987 - DNA, 122 bp, Homo sapiens
agacactgtgtggaccagcttaggatagggagtgagaagaaattaaccaaaaggtaatttcgttacttttcagctggaaaaaagatcagattatacttgtgctttcataattaagtagctgc

SEQ ID NO: 148988 - DNA, 122 bp, Homo sapiens
ggccgccgagccccgggcagcgggccccgtccgcggccggcgcgctccgtggtcctccctcgctcgtctcctatgctcatatttggactcggctgcccgtgcccaggaatttcccgtcatgc

SEQ ID NO: 148989 - DNA, 122 bp, Homo sapiens
tctgtgccataatctcttcacttgctctatcctgaggattattgcactttagtatacaaacgtatatcattttccctaaaattaagcaatgttttctgatatagatagagttctgttttgtg

SEQ ID NO: 148990 - DNA, 122 bp, Homo sapiens
gctccccagggacccttcctgccgtcgtccgcctgtgtgtcctcggatggggtagagagacgatgagtgccctgtgcatgctgtcaggggtccggagcggttgtcttttatttatgtactgt

SEQ ID NO: 148991 - DNA, 122 bp, Homo sapiens
tcttggtcatgaaatagaaatttggtgtttaattttggttgccatgcaagtcttttgattcgtgagggctaggaaattgctctgtttagcataatcccagagaccactgtgagggattgtat

SEQ ID NO: 148992 - DNA, 122 bp, Homo sapiens
cgtggatgcggggctggggcaggtccgcggtggaggcgccgccagtgagcacccggggaccgctcctagcccccagtgtgggacacagactccctgaggacctcgtatgcgttgggtctgtg

SEQ ID NO: 148993 - DNA, 122 bp, Homo sapiens
tgtacttcgatgtcatgggatgtcatatgggtcacactcagggggatgatgtccccaaagcgctgcacctcgtgaatcacggcagtggtgtagggcatgtgagcctggtcacccatctctgg

SEQ ID NO: 148994 - DNA, 122 bp, Homo sapiens
cttgggcattagcatcctgattttccttgggcaacagattccgccctctccatccatctccgaggtttggaggattggggatttggttccaccccttgcctctaaaaataggcatgtgacca

SEQ ID NO: 148995 - DNA, 122 bp, Homo sapiens
attttgagcaaataatgttttatcttttttttccttatttttccctattccagtcatacacgtggacctaactgcaccagtagcttttctgagaatacttgctgaaaaggaagttttctgga

SEQ ID NO: 148996 - DNA, 122 bp, Homo sapiens
agtcacgtgtcaggtgtcacgtgtcaggcgtcacgtggctggaggccgttggagcgcctgcgcagcttttccgcacgcgcctcgccggcgcgcggctctctcagcgtcccaagagccacttt

SEQ ID NO: 148997 - DNA, 122 bp, Homo sapiens
ttctgaaacaaggaatgggaatatgtgtccagtttcttacccggtgttcggccaggaactcgggtgtcagcgtccagggcgcattcctcaccacctcatccacgtagcggcagtgctggact

SEQ ID NO: 148998 - DNA, 122 bp, Homo sapiens
gctacacgttaaaaacactaaggggagcgcgcgaagctgaacttggcgctcgatgggggccgttagccgccctagagcgcgcggagccgcagaggcgtagctggactacaacgcagtgcatc

SEQ ID NO: 148999 - DNA, 122 bp, Homo sapiens
gaaataatagtaaacatttggggatatttataaaactgaacggctgggcgcggtggctcacgcctgtaatcccagcactttgggaggccgaggagggcagatcacgaggtcaagagttcgag

SEQ ID NO: 149000 - DNA, 122 bp, Homo sapiens
aattaaaagattcacttaaaatgcagcagagacaagcgaggcagcggagaagggcccgggcgtgcataatgcctattgtctgcgtctgcgtttgctttttaatgccagcgcccagcgaggga

SEQ ID NO: 149001 - DNA, 122 bp, Homo sapiens
ggccaagccctaggagctcccctccaagatccctagctccgcttcctgccccactccggacggcaactgcccggtcctctgagcgcgccggagcaccctctccgcaacccagctccgggctg

SEQ ID NO: 149002 - DNA, 122 bp, Homo sapiens
caacctcctgggctcaagcaaacctcctacctcggcctcccaaattgctgagattacaggcgtgagtgagccgccatgcccagccacgaagtaactctgtatttgaggctctttctgtgtct

SEQ ID NO: 149003 - DNA, 122 bp, Homo sapiens
cgcaatagagacgtatagttttggaaatacaaaggcagtgtggcattctgttgaacgattcggcagctgactgtgatgaagttgaaattttaagtaagagaggggaaagatgggaaccagaa

SEQ ID NO: 149004 - DNA, 122 bp, Homo sapiens
gcctcagttatggccttcaaaaagccactttactgtttctcctcatttcagtccagactccgggctgccaaccgtctctttttaaaacatgggaatgtaccatcattctaaccatccttgat

SEQ ID NO: 149005 - DNA, 122 bp, Homo sapiens
aatttattacctgcatatgcacaggagcctcacaaaatacagtactccaagaaatgataccggtgggctaggggaggtacccaaatgccattaggatgttgatcccagccagtgtccaggcc

SEQ ID NO: 149006 - DNA, 122 bp, Homo sapiens
attgtggccagtcagatgcccttactctcatcgctacagcctgcattatccttggccgctcgtgttccgtggccccaaagtatcctggcgtcagagacaagttctgtcggaacccagtaagg

SEQ ID NO: 149007 - DNA, 122 bp, Homo sapiens
agagccgcctcttggggttttctctgtgtcttcctaattctgccaatcgagcatgtgtttcgtcatctcctagttgatagatcaataacccagctgcaccctgtcattcctggggaagaaac

SEQ ID NO: 149008 - DNA, 122 bp, Homo sapiens
aaggaggagaatgctatttatttcagcaccaaatatccggacagcgcctctcgggaggtccgagaagagaaccgcgatctgtttcagcaccggggctcaggacagttcccagcgggctccgt

SEQ ID NO: 149009 - DNA, 122 bp, Homo sapiens
gtctagtaagtagtttaaagagcgccgttcctgtaggccgaaatgcgggaccagggaacacgtggggaagcacccttctcttctgtcagtttatagagctcagatgggcagtaggtgctcaa

SEQ ID NO: 149010 - DNA, 122 bp, Homo sapiens
ctctcggtagcaggagtgttttcctcagctaggtcgaggagacacaaacagacctcgtcacgcacacatctcagcacacaggcatatagtctcaaacacacggttttagatttgatggtgtg

SEQ ID NO: 149011 - DNA, 122 bp, Homo sapiens
ggattcccgccgcccacgcagaggcccgctgcagcgaccaacaggactcacgtgttttgtcggaaaagaagaacgagacctactgggaagcagcttttatagcacgccaagcgccgcgagat

SEQ ID NO: 149012 - DNA, 122 bp, Homo sapiens
ctcggcccattcgatttttaaaaccttaaatgaccctgcatcttctgctgcctactttttcgagggcttttggtactttggattattaagttgtgtgagtgaacatggtaatgaccttgcca

SEQ ID NO: 149013 - DNA, 122 bp, Homo sapiens
gccctctgatgccgcagagaaaggcccgggcctgccagacgtgtgtcacaactcaggccccgccaggaggaaagctaccgccagcactcccaggccgtgggaacaagcaaacgcaccggctg

SEQ ID NO: 149014 - DNA, 122 bp, Homo sapiens
gtggacggcggccagcatgtaaatgaaacggaatggaggcaggaggaggaaacacccgcacgtgctgctagcacaggaagaactgttctgtggaacttttattttggtctcctataaaatcc

SEQ ID NO: 149015 - DNA, 122 bp, Homo sapiens
actcaagtatttatcgagaacttgcagtgggctaggcacagttcaggtagatcaacaaaccgaaagaccctgccctaggggagctttcgctccaatgcggggagagggtggatgattgcagt

SEQ ID NO: 149016 - DNA, 122 bp, Homo sapiens
aaataggattgctagcatttggcatctcatttgcctctatgacaacaaaactctagaagacgtagtttataatacattatggtttcagctgaatgacatttggttctaaggtctttgaaagt

SEQ ID NO: 149017 - DNA, 122 bp, Homo sapiens
caccggcatcttagcgttcactctgcgtccagggaaagcagcttcctcctggagcgctggcgcggagagtgcttctgggtttgcctgggaggtcatggcctcaaaagcggacagcagatcgt

SEQ ID NO: 149018 - DNA, 122 bp, Homo sapiens
agccagggctgcgcgcggcgcttgccggccagctggagttctgggtgggcgtgagcttggcggccccgcactcgaagcagctggtccgccctgcaggccctgggcaataaggggcttagcat

SEQ ID NO: 149019 - DNA, 122 bp, Homo sapiens
aggaagaggaaaaaaggaacgcatgtatgaaatgagtctgtccagggtatccaaagatcacgaggggccaatgtttgccattggaggggctgttgcttcctctccgcctccacgcttccctg

SEQ ID NO: 149020 - DNA, 122 bp, Homo sapiens
cagaggcataggcctcccgcccttcgtccttctcctagaggtcatccatcctctgtaagtcgctggcctctccgatcttgaacctactccccatgtagttgtctttgtcatcctctctctct

SEQ ID NO: 149021 - DNA, 122 bp, Homo sapiens
cctgctcctctgcgcggtccccagccctctacccggcgggcagaggctcgggcccagcgccgccttccgctgggatctgttcccaggcccagggacgccggccccaccccagttgcctaggt

SEQ ID NO: 149022 - DNA, 122 bp, Homo sapiens
cctggcggggtccatggctccgtcctgctcccttggcgtcccccctggatgtgccgcctccgagctcgggccctcttacctgagcccaggatgagtaacctcgccccaggcaaccccagcct

SEQ ID NO: 149023 - DNA, 122 bp, Homo sapiens
ccatcacttttagcttcacactcaccccaaaatcttttttaaatgcctacagaaataaatcgaagcaagtctgtggaaaacagaaggagacatcaacaggccagaaacttgcactcctttct

SEQ ID NO: 149024 - DNA, 122 bp, Homo sapiens
aggaatttcttcctgtttcttattcctttaggggattatgcatgagagcaaacccttcttcgctgtgcagttccacccagaggtcaccccggggccaatagacactgaggtacgtcaaaaag

SEQ ID NO: 149025 - DNA, 122 bp, Homo sapiens
tctgggaagctctgtgaccaggctgtttatcgtttcactgcagtgcctgaatataaaactcgggcaccagaccctggctgtctgggcaatttgggtatgagaccgcagatctcacaaacttc

SEQ ID NO: 149026 - DNA, 122 bp, Homo sapiens
tggaagacgcacatcagccctgggcacgaggagttcacaaggtgggcctgggagggtagacggggatagagtaggctcaggcatcgggggcctcagtatggagcctgggcgtcccattccca

SEQ ID NO: 149027 - DNA, 122 bp, Homo sapiens
ctcctcttcggtcgccgccgccgccgccaccgcctcccccccagccgccggccccgcgctcggctccgcaggcaaggtagccatgttttgcaactttgggaagttcctccctccctctcttc

SEQ ID NO: 149028 - DNA, 122 bp, Homo sapiens
ccgtgttagccaggatggtctctatctcctgacctcgtgatccgcccgcctcggccaccgcgcccggccgaaaatctgaatattttaatggaaaactgggagtgagattcgggaattacttg

SEQ ID NO: 149029 - DNA, 122 bp, Homo sapiens
gatctggtcatttaaaagtgtgtagcacctccccctatctctcttgctcctgctctgccacgtagaagtgcctgcttccgcattgccttctgccatgatcataagtttcctgaggcctctcc

SEQ ID NO: 149030 - DNA, 122 bp, Homo sapiens
ggaaccagagatcaaagttcgaaaaccgcccgggcgcctgtgggaaatgtagtccaaggccggaaacgcccggatgtggagaaggcgcgcgtagccggtggacagcaggaacgcgccgcgga

SEQ ID NO: 149031 - DNA, 122 bp, Homo sapiens
ttcaaaagaaaacttgatcacattgctagataatacaggtatcctaaccaagtgcgtgagcgcccagaggctttctgctgctgccagaagtacatatttttttgattggtaagaactgccag

SEQ ID NO: 149032 - DNA, 122 bp, Homo sapiens
ggcctctggtccgaccaccaggccctagtctcggtcagggagtctgctctgcctcccaggcgggatcgctggtttctctcgacctcgcagagctcctgacaaaggcggcttctgcgtcgtca

SEQ ID NO: 149033 - DNA, 122 bp, Homo sapiens
gagacccagcccttcgccgcgcctgcgcagaacggccgaagtgtgcacgcccctctttggcggcctcagggcctagaacaatgaatgagtcaacgcgcctgcgcgccacgagagcctaccca

SEQ ID NO: 149034 - DNA, 122 bp, Homo sapiens
cctggggctgcctgcagggttctgcacccccgcagggagctctgtggcttttccaggcaacgctaagggagctgtctggacaaaaggtgtcttgatcgtaggagggagggcttggggggaga

SEQ ID NO: 149035 - DNA, 122 bp, Homo sapiens
atctggccaccttattaggaaaccggtctctggtatttggaacacacacaagcgtggtcccgcctccacttccctaatgccctgtttaaatccctacatgaaagacaacgtgaaaggcagca

SEQ ID NO: 149036 - DNA, 122 bp, Homo sapiens
tgtcccagtctacataggactcagtgcagggtttgaaggtttccccaaactaagtgagcccgtttccttgggagaccacacctagaacacttgaggcctgagttcctggctgctttctcccc

SEQ ID NO: 149037 - DNA, 122 bp, Homo sapiens
gggagtcagggaagcaggggaggggagggagcagctgggcaaggaagtggcttcagaggacgtccagcctcagctggccccacggagagctccaggcagagcccacagtaccacagtgtgcc

SEQ ID NO: 149038 - DNA, 122 bp, Homo sapiens
ggtgcccggagtggggcagacaggacgagccccgtgaagacagttggggcaacaggggagcggcggtccaacctatctgggtgtctccggtgcatggtctggcaggctggccctctggcagc

SEQ ID NO: 149039 - DNA, 122 bp, Homo sapiens
gagggtaatactgcaagccagccctgttcaaagcagtctttgattaccattttaaagcctcgaaatctaaagaaaatctttaattggcttttcagcagcatttctcctttgtatatgcagtt

SEQ ID NO: 149040 - DNA, 122 bp, Homo sapiens
actcgtgaggtttttccaccctgagatgacctacacggcagcggtggacagcacctgcctcgtcttctcctctttgaaaaaaagagagagagagagtcccctttcctttcactttctccctc

SEQ ID NO: 149041 - DNA, 122 bp, Homo sapiens
gtaaagttgtcttttcaggaagtggatgatttgggcagtcaaaactgcttttcagagtttcgatgtggtttacaatggtatggacagctggtatgatttgttagttttctacttgtggtgtc

SEQ ID NO: 149042 - DNA, 122 bp, Homo sapiens
aggaaaagaaaagggaaggagagggacacttcttccaaatagagaattgtgaggagcctgcgaaaattgaggatggattccactcctaggccagagagtgcctgttttgtcgattgaaacta

SEQ ID NO: 149043 - DNA, 122 bp, Homo sapiens
gcaacccctgtacacagaagaaagagtgcaaaatggaggaaatccttcttcaggcataatcgaagctaagtcaaagaggaggagagagaccaaccaaaatgagccaaacaataggagactta

SEQ ID NO: 149044 - DNA, 122 bp, Homo sapiens
ctacgtggacggtgactgcggccctttagtggtaggcgaactgcggctccacctgggctccggagccgccccagtcaccagcctcttgcttctcttctgcagctttgggtgggcggctggat

SEQ ID NO: 149045 - DNA, 122 bp, Homo sapiens
cgtgtttgtggtgatgtgctgctccatgctggtgctgctctactatttctacgatctcctcggtgcgcggccccgggcgggtgggccgcggcgtggagatgcagcccgccccgtgcggaggg

SEQ ID NO: 149046 - DNA, 122 bp, Homo sapiens
gatgttgggaattctttcatgtttggaccaggatggtacttccatcagagcagagtattccgccaagctaggaggatctcttcatcctctagacagaaaagacagctgacctcagcccaaca

SEQ ID NO: 149047 - DNA, 122 bp, Homo sapiens
gacctgcacccgctcagggatgccctgcccgagctgctggggctcgaggctggcagccggcgccaaacccgcagcagggagagcaacaagccccggccctcagagctcagccggatgagcgc

SEQ ID NO: 149048 - DNA, 122 bp, Homo sapiens
aggcagagcttgggaagagaggaaaggtgcccagaaggttggctgggaggaagacagcctcgtcctccccggaaggactcaggaaagacacaagagggaacccagcccgactggcagggcgg

SEQ ID NO: 149049 - DNA, 122 bp, Homo sapiens
agagaaaactcctcatccgggttcccgccgctgaggcctcagcctgccccatgtttcagacgtgaacgaatgtgcctcccagccctgtcagaatggtgggacctgtactcacggcatcaaca

SEQ ID NO: 149050 - DNA, 122 bp, Homo sapiens
acctgatcgccctctctcttctccgaatatgaaaactctgtacctccttggaggccaccacgcacaagctgccacttccttacccacacagccgatggtcaccaccccatccttgtagcgct

SEQ ID NO: 149051 - DNA, 122 bp, Homo sapiens
ccagcacccctcggaggtggggagcaccggcccctaggcacactcgctgtagagtttccgcgggttttggccccagtcctgagggttgtgtgtgttaggggacccacctcacgttcgccgag

SEQ ID NO: 149052 - DNA, 122 bp, Homo sapiens
tctctcgccacatgactcctgagcagtcagattataaaaacgatgcgtaggttttagcagcgtccaggcccctcccataatcctaatctcacggcctttcgttagttttacaaaggtggttt

SEQ ID NO: 149053 - DNA, 122 bp, Homo sapiens
gggacaggcattgacaagctatggcctgtgggccagatctgacagcttgcccgtatgtctcgtgggctaagaatggttttcacattcctgaatggttggaaataaatcaaaagaagatcagt

SEQ ID NO: 149054 - DNA, 122 bp, Homo sapiens
aagctgctgactcttaaagctccagccgttataagcaaaacgcagctagacacttttccacgccttctctgttgcttctgtagccctcttcttagaacatgattttaaaagccttttgctct

SEQ ID NO: 149055 - DNA, 122 bp, Homo sapiens
gactttcttgatgaggaatttgtgctggtaaaggggctttcgtttatttaggggatggaccgagaggcttcctgaggagaaaatctattttaaggcaagaccatgaaggaggagtttgggct

SEQ ID NO: 149056 - DNA, 122 bp, Homo sapiens
caggcgagtgttccgcgagctccaatcggataacaaccagtgacacactcatagggcaggcgctggccggcgcgggccccggcgggctcaggcgaggctggaaggcgagccgagaggccgag

SEQ ID NO: 149057 - DNA, 122 bp, Homo sapiens
aggggacaggaagcggcacctagccgagtccgccggaaactccttcccccgcggcgcggccggctcagtagactcagcccggccctacccggccctgcatggcccagacgggcggaaagagc

SEQ ID NO: 149058 - DNA, 122 bp, Homo sapiens
ctggttcatggtgactagcgccaggaacttggcaggcaggaggccacacatgtagaggggcgcgtagagcgacagaagcaccatgcgcaggcagccccgcagccaggccgcgaaggccgcct

SEQ ID NO: 149059 - DNA, 122 bp, Homo sapiens
gctgtccccttccaggggccagaaggaggctcagatttacaatccagagatgaaacaggccgcaactcttccactgcttgtctctcgagcctcacagcctggcatacggcatgctctcagca

SEQ ID NO: 149060 - DNA, 122 bp, Homo sapiens
cctggagctccaggtgcagtgagagacaaaggccccgccaaactcggaagtcgacctgttcgctccagctgggtgtctgattggacggtttccagcccagtgtccctgattggataatgctt

SEQ ID NO: 149061 - DNA, 122 bp, Homo sapiens
ctcccagtcgccggctttataccgccgccgccgcctcgggcccgaaggcccggcccggcccgttgctccccaatcccgcagctcgccgcacccgctaacccggacgctccacgtcagccgcg

SEQ ID NO: 149062 - DNA, 122 bp, Homo sapiens
tgaccaacatggtgaaaccccacctttactaaaatacaaaaattagctggtgtgatggcacgcgcctgtaatcccagctactcgggaggctgaggcaggagaattgcttgaaactaggaggt

SEQ ID NO: 149063 - DNA, 122 bp, Homo sapiens
ggccacagccggcgcgccgttgggggagggaaaaccgctgagtgccgcgcacagcgcctgcgccgccccgccccgcaacggcaaccccacccctgcgccagccccgccccctccgttacccg

SEQ ID NO: 149064 - DNA, 122 bp, Homo sapiens
ccgcttccctccgcagagcgtcttccctgacggtgaaaccgcgcgggacacaacccaccgcggctcatcacccacttacaaatagctgtcgctaggattcccgccactcctctcagaccggc

SEQ ID NO: 149065 - DNA, 122 bp, Homo sapiens
tggtgttgtgcacggcctccagcccggactgaagttggcctgacccgagaagcccaggatcgctgaggaagctccccactgttgtcgcctctcagccccacgcccactcatccacaggcagc

SEQ ID NO: 149066 - DNA, 122 bp, Homo sapiens
cgtctcctcctcgctggatgagggcgagggcccgtcaagcacagctctgcagctgctgtacggcgtccacaaagcaaagaccctgctccgcggacctggcctgtcttctcctcagggttccc

SEQ ID NO: 149067 - DNA, 122 bp, Homo sapiens
aaggtctcggctggagggagccctgccaggtgggtttggctgggggtgagagcgcgcgcgcgggtgggaaacaaccctggccagccctgggaaccctcagaaggccacatgaaggggcaggg

SEQ ID NO: 149068 - DNA, 122 bp, Homo sapiens
ttccagttgccgtccgtcacccctttctttgacttggaaagggaactccctgaccccttgcgcttcccaagtgaggcagtgcctcaccctgcttcggctcgcgcatggtgtgcgcacccact

SEQ ID NO: 149069 - DNA, 122 bp, Homo sapiens
cgggggagggggtgctgggcgctgagcggtggctctggcagggcttggtagggtgggggacggtcgcggggcgatctgtcagggagggggtgggcgtgaggggcgccgtccgcctgaggggc

SEQ ID NO: 149070 - DNA, 122 bp, Homo sapiens
gcgccctaccaacccagtccaagtccttcgcctcgccaagtacggccgccgcgtcgatcccggtgagaccatttgtaccggcctagcctagcctgagaaagagaaaactgagctccagcgac

SEQ ID NO: 149071 - DNA, 122 bp, Homo sapiens
tcaggggagggggaagggagagagggagagaggacacagggaagcttacaacaaaattttcgctgtttatagctttcttggggaagaaaacacaggcgcaaattctgatgttaggaatgttt

SEQ ID NO: 149072 - DNA, 122 bp, Homo sapiens
tggcagtcctacagttaaacttttctctgctgcaaccctgtgtctcattgcattgacttgcgtgcacatcagcaactgacctattatggttacaattttggcactataagcagatcattcac

SEQ ID NO: 149073 - DNA, 122 bp, Homo sapiens
ggacgccgggaggagcagggtaagagcgcgtggtctggcgggtcagggcctgatccggagcgccgaggttcccaggacggcggcagccttgccacagcccgcagcagccgggggcctaggcc

SEQ ID NO: 149074 - DNA, 122 bp, Homo sapiens
ggaatgggagtgggggtagggcttatttttctatgtttccttatttccatgcagtgcccacgttcgatggaggacgtggtgcttgcgggggggggggagaggaaggggagagggtagacagt

SEQ ID NO: 149075 - DNA, 122 bp, Homo sapiens
ttcctagggaaaaaaaaaaaatacacagtcatacactcaaaatgcttcatccagtttcagcgggttaacagaatccccaaatcccatcttggatcttaagtaagaaacctctggagttggct

SEQ ID NO: 149076 - DNA, 122 bp, Homo sapiens
gtctataaatttctgactctgcgccctactcattgtccgagtttccgcgtttttcatgaacgctctcggccgccgggaattctctttgatgggatttcaggtttcagcagcaagtcctgttt

SEQ ID NO: 149077 - DNA, 122 bp, Homo sapiens
agcaagactctgtctcaaaggaaaaaaaaaaaaggaatgtctagatgcagtagctaagtacgcagaagccatttcagtgtgggaggcgaggtgactgaatccagggactccaggtttctggc

SEQ ID NO: 149078 - DNA, 122 bp, Homo sapiens
gggaagtatgggattggagcccccatagagagtccccacttggtcactgcctagtgaagccgtgggaaaggggaacactgtccttcagccccgagaatggtagagacaatggcagcttgcaa

SEQ ID NO: 149079 - DNA, 122 bp, Homo sapiens
ctccttcggtccaggggaactcctccagctcggggagccgcggacagcgcgagaagaggtcggccacttcggggtcctcgggcagcaccgtgttcaccgtgtcccagctgttgtggcggctg

SEQ ID NO: 149080 - DNA, 122 bp, Homo sapiens
aagacagggagacagagaccaagacggacaggcagacaggctggtgacccaggatgaggccggaaagagccatcaaaggaaggagaaggaaggagagagattggagcgggacggcggggcag

SEQ ID NO: 149081 - DNA, 122 bp, Homo sapiens
gaaccccacaggttccttcctcccggggtttcccagcagaccacacacagagatgcgctccggaacttagggaaccatgtaaaggaacttccaacaggactgggccttttatgcgtgtttat

SEQ ID NO: 149082 - DNA, 122 bp, Homo sapiens
tgcatccttggaaaaggacaaaactgtgagtgtctgggtctaaagagggtgagagtcctgcgggaggactcaaaatccacaacgggcggagcccatagccggactcctggctgggcccttca

SEQ ID NO: 149083 - DNA, 122 bp, Homo sapiens
tcaccgccgccgccgccggggctcgggcggaagcgcgggctccggggggaggggctgccgcgcccccgcaaggcccagggatcccggccccgagcggctcccatccgagcagcagcggatcc

SEQ ID NO: 149084 - DNA, 122 bp, Homo sapiens
ctcgggctgcgggcaggcagcaatcagctaattgcctaatcggagtggggagctggtgcccgctcgccgcggtcgcctcgcgggtcacagacaagagagcggcttgttttctctctgtcaca

SEQ ID NO: 149085 - DNA, 122 bp, Homo sapiens
actgggagctggggggacactcactgagggcaccgggagctggggggacactcaccgtgacgggcaccgggagctggggggacactcaccacgggcaccgggagctggggggacactcacca

SEQ ID NO: 149086 - DNA, 122 bp, Homo sapiens
ctgtcacgctctctctcgaggcgcggcggtgagaccgcagggatttcctgagcagcaagtcgtgtgccccttggcacgctttatctgcttcgcccgggccaggagcgtgcctgcccggctgc

SEQ ID NO: 149087 - DNA, 122 bp, Homo sapiens
ctggcccaggtgctaagcccctcactgcctggaccggccggccactccaagtgtggggcgcgccgagcccacgcccacatggaactcacactggcctgccagcgccgcagtgcaggcctggt

SEQ ID NO: 149088 - DNA, 122 bp, Homo sapiens
gccccaccccccaacccctgtcaacccccagcaaaggcaacccagccccctccaagaccccgaggttccagcttcccccgagacaggaccaggaagacaccagcagccccgcgcagggccgg

SEQ ID NO: 149089 - DNA, 122 bp, Homo sapiens
cgtgagcacctgccatgccccaggcacgcagatgggcgcccctatttcatttctctgccccggcagccttgtgaatgagctttggaagagacagccctgtaaacacatccctctgctgaact

SEQ ID NO: 149090 - DNA, 122 bp, Homo sapiens
tttctatgtccgttgttgtaagaagaaaacatcagctgcagagggtccaggtgagaaaagcgggcagtttctggagatggtaaggcccctgtctgggcagtagggtcccctcattgctcctg

SEQ ID NO: 149091 - DNA, 122 bp, Homo sapiens
ttctctttctgtcatttgtttgccacaagtgttgagttacttagtcaaacttttgcctctcgatgtttactaatcaaattctagtgcttaatattgaaactgcaggctcttctgttggtgaa

SEQ ID NO: 149092 - DNA, 122 bp, Homo sapiens
attaaaattgggtgttaaccgtttgccactcagaagaattattagccattggaggaggagcggtttctcttgctaagcggggttaagtgaaacttggctgctctgaattggccagaggagta

SEQ ID NO: 149093 - DNA, 122 bp, Homo sapiens
cgttagtgtctcctccagttgatggttatcgaaatgagtcaggatggaaggcttagtgtacgtgtgagatgttacaaaagtggaccttaaatgtttcttgagtgtttggatcttaagagaaa

SEQ ID NO: 149094 - DNA, 122 bp, Homo sapiens
ccccattccatcggatcctctgttccattgtctgtctgtctcctggacccatcctggcctcgtctttgccctccgtcgcagcctggccttgggcctgcccttcccggggacactcggtctga

SEQ ID NO: 149095 - DNA, 122 bp, Homo sapiens
gtgaagaatgggagaccggaagtgggcgccaaattcggaagtgtggcagcagataggaatcgaagggcactcattcgcttggctctctgtcccgcccactacccggaagtgtggcccgggtc

SEQ ID NO: 149096 - DNA, 122 bp, Homo sapiens
tcttggggcctccgctggtccgaccatctggcagctctcttaaccaccacggccaccccacgaatggaagtttgggacgtgcctgggttgcccttaaggaggacacccccgcccccaccgcc

SEQ ID NO: 149097 - DNA, 122 bp, Homo sapiens
aacacataaaacaacagttggaaaagtaacatgtttgggctgtagcccccagcaggatcccggtcggcccgcagaagaggggaatgggcgcaggtggagggcataggaaagagagtgctcaa

SEQ ID NO: 149098 - DNA, 122 bp, Homo sapiens
cgtccggggaagggtgctaacctcggggggcggcacacagctggggcctggcatgtgccccgggtgggggtcggagctctgggcagagtgggccggggcaggtgcagaggccagctctctcc

SEQ ID NO: 149099 - DNA, 122 bp, Homo sapiens
ctaaaaccctggtacaggaagcctacagttaccagtgttctgcaaggtccttgctcctctcgtcgccccaaaaggacagcattgctctgacattttgatcactagtgccatctagtggtgaa

SEQ ID NO: 149100 - DNA, 122 bp, Homo sapiens
ccgtagctgacagactcctggcagcaccaacctccacgatggcctgggctgtgtgaggagcgcagaggcccaggttcttcctgtgcctttgctttgcttatctcccaccctacacgggcctg

SEQ ID NO: 149101 - DNA, 122 bp, Homo sapiens
cccggccgcccctcccgccccgcatcgaggcagacaagcctgttcctcttccctgggctgcgattgcgacaggccggcctggctcccagcgctccctgtccccgccccgcggccagctcgct

SEQ ID NO: 149102 - DNA, 122 bp, Homo sapiens
ccccctcgccaggtgctcggctccgccgggcgctgccagtgcccgggacttagggcgtctcggccgactcctgcgggaaacgactgtaaatccacattactgttcgagctgccgctcgggcc

SEQ ID NO: 149103 - DNA, 122 bp, Homo sapiens
gccaggccacgcccctcaggtcgaggccttgcgtcgtggccatgttggtcctgggggaggcgcctgcgcgcggtgaggtagtttttgcgtttggctttgccgccgcggtgtagtccgcgggg

SEQ ID NO: 149104 - DNA, 122 bp, Homo sapiens
atctggtctaccagggcataaaaatttcaaaaatcataatcagtacaaaacctctatgtccgttaatattacagaatattgcttgtgttaaaatcatttatgttggccgggcgcagtggctc

SEQ ID NO: 149105 - DNA, 122 bp, Homo sapiens
tccttatatttgggggaaaggagctggtttgaaggaaaggagggattaagtttgtaaaagcgttggctcctccttataactctggtgcctaaagggggtgagatgatagccaaataaaacga

SEQ ID NO: 149106 - DNA, 122 bp, Homo sapiens
ctcctccacttggatgatgctctagcctctgtcagggactgtcccctccaaacttgcttccgtggtctgcctcctagttgaatctcagccctgagtgtccagatctggccaaggtgtctagg

SEQ ID NO: 149107 - DNA, 122 bp, Homo sapiens
aggtgctccaatgagcaggggcctacctgggcgctccttggatggtgaaggccttgtcggcgtgctggtcacccagttttgtcatcacttcatacagtttgtggcaaagctaaggggacaga

SEQ ID NO: 149108 - DNA, 122 bp, Homo sapiens
gctgtggaaaaggctgagtgggcgagtgggcgtcctcatgctgggagcctgggctgctcccggggtcactcccttaggctagaacatgctcctctctccgggttcctagataatcccacacc

SEQ ID NO: 149109 - DNA, 122 bp, Homo sapiens
aaatcttgggtaggcgtggcccgttctagtgtggttcctcgtctgccacgtcgtgctttgcgcccaaagtttggtccaagttggcacagctcccagtgccagacttccaagtctagttctca

SEQ ID NO: 149110 - DNA, 122 bp, Homo sapiens
gaccagaggtgtagctagggaaaaaggggagagggcatcatcctagaggaaagaagaaaacgaggggtcagaggctacctgttcttttacctatatcagcatttctcagcgaagggtaatac

SEQ ID NO: 149111 - DNA, 122 bp, Homo sapiens
aagctgaatataagtagccgcagacaccgtttgcatgacccaggaaccacaaacacggagcgaaggcctgccgggaccacgctgagcttcactactggcagccaactcacttccgggggtgc

SEQ ID NO: 149112 - DNA, 122 bp, Homo sapiens
gactttctcagctgttcctccacggccttcgcagcatcaaagtggctcccggctgcggcccgcagctccaggcccaaggccaggctgctcttcagcacgggcatctccagctcctgcggcac

SEQ ID NO: 149113 - DNA, 122 bp, Homo sapiens
ggaaagaagaatggttttaccacaactgccttggactaattagttttgacctccaggatccgggaaaaaagtcatactccctcaaagcacctggaagaaggtggctacattaaaaaatatag

SEQ ID NO: 149114 - DNA, 122 bp, Homo sapiens
cctcctaggtggattgcgcaggggcggcgatgcacgtgaccggaaaagcaactaacacgccgctcaggaaagcagcaaaggctgccgggaaatcaagcctttgccacgaagcgagatgctcc

SEQ ID NO: 149115 - DNA, 122 bp, Homo sapiens
ctttatcatctcattcatttcttttgtcaaacagccatgtgtcaacttttcatactttaccgatactctttgcaataccacaaagtacatgaaattattcctattttagaggtgaggaagcc

SEQ ID NO: 149116 - DNA, 122 bp, Homo sapiens
gtgggatactgcttcccctaaaatgaaaactcagcagcgggccagcagtgggtgtgcgcgcgtcgatgccagaggatgcgtgcgtggaatccggcggacgcagtgggccgggcaccgccctc

SEQ ID NO: 149117 - DNA, 122 bp, Homo sapiens
agctgcggcttcaaggagaggaggaaatggtttattagatcacacacatggacagatgtacgtgtcccccagccccaggtctcgcatctggaaccccaaggcggcaaaaagttccaaggcgg

SEQ ID NO: 149118 - DNA, 122 bp, Homo sapiens
tgggaaacatagcaagaccccatctccactatatatctgtatatatattttttaaattagcggggtgtggtagtatgcacctgtggtcccagctactcaggaggctgaggcaggaggactgc

SEQ ID NO: 149119 - DNA, 122 bp, Homo sapiens
tcccgtgagaaacgcgtcctgagaaaaaaggggaggggcgagggagaggatttgcgcgtgcgcaaaagtagttgatggaaatcggccgttgggatgctgtctaagcttggatacctgagtaa

SEQ ID NO: 149120 - DNA, 122 bp, Homo sapiens
gcgccgtgcccagccggaaccttgacctcaagatggcgtcccgtagtcgtaagattcagtcggctccaatcaaacatggtgggtcataatttacagttcgggcctttctagtaaccgctaga

SEQ ID NO: 149121 - DNA, 122 bp, Homo sapiens
gcccttcacacaccagagacgccccgatgatgtgccaggcggaaggggtgagaccctgcccggccctggacggcaggatggtctggtgactccaccatcagcccctggagaaatccaggcac

SEQ ID NO: 149122 - DNA, 122 bp, Homo sapiens
gttactccaggaagatgatgggcctcctcttgggtccaaggtaccagggctctgagccgacgctatcaaacagactccacttttgtttccagtgcctgggctggggaaatgagggtttttag

SEQ ID NO: 149123 - DNA, 122 bp, Homo sapiens
tggcagggcgcaccctcgcccagccaggacccaggccaccaccgaggtccgcaccccatgcggcagacagacaccaacggtctcgtgtcgggctgctgctgttctctgagtgtccttaggac

SEQ ID NO: 149124 - DNA, 122 bp, Homo sapiens
cactgtttcctgagaaacttccccagtgcccacccacccgttctccgtgtgcccgagggccggtcctgggctaggctccgcgccccagccccaaaccgggtccccagccccttccagagaga

SEQ ID NO: 149125 - DNA, 122 bp, Homo sapiens
cggttggtacgactcataaacaacctcttcagcacaacctggttgaatgtggagtcggttcgtctggccagaaaactgcacagcttgaccaacagcctcaggtagatatcctggctcttggg

SEQ ID NO: 149126 - DNA, 122 bp, Homo sapiens
cgagggcggggaagtgtgagagagacttgcgagaggctctagggctgctgctcggctctccgtggggagggcgggaggaggggccgaagcaaagaaaactcgccgccccggcagcttgcaag

SEQ ID NO: 149127 - DNA, 122 bp, Homo sapiens
tctatttttacaagaattccttccttattaaaccttggtttgaatttccttggcaatcaacgtttgttaattactggctcagatgttcctactgtttccaagaagagttttgatttccttga

SEQ ID NO: 149128 - DNA, 122 bp, Homo sapiens
gcatccgtttaattatctgaattgaaagactctgttccctgtatttgcatccactgcctgcgtgctttctctctcccccatatttctgacatttggattttccccctactaattgacatgcc

SEQ ID NO: 149129 - DNA, 122 bp, Homo sapiens
actcaataatgtcagttgttcttgatgttgttattatttctacttctaatgctatgattacgcaggctgcaagctgctttagaggcatgtttaggggctggcaaagttaaagcgcttctgca

SEQ ID NO: 149130 - DNA, 122 bp, Homo sapiens
ggccgggcagagatgctccgcacttcctaaatgggatggcatcctagatgggatggcggccgggcagagacgctcctcactttccagactgggcagccaggcagaggggctcctcacatccc

SEQ ID NO: 149131 - DNA, 122 bp, Homo sapiens
catttggacccgactacaagagccatctctaactataccggttgaaatagttgtagcaaccgtagcaatcgaccagcctgctccccttccctgacacacacatacacacacacacacgcaca

SEQ ID NO: 149132 - DNA, 122 bp, Homo sapiens
aacgtcacgtgctttccttcgctctcttagtaatttaaatggtttcttggcagtggctgacggaactctgctcccttccagtcacttttccaagtccagcaaattgtagacgagggaagatt

SEQ ID NO: 149133 - DNA, 122 bp, Homo sapiens
aaatcaaatgaaaacattaaaaaggcgaggaaggcataaaggacttctaaattaaattatcgatcttcatgaaccttcttctgcacgcgggcttctctgtgccaaggaaatgttcccttctc

SEQ ID NO: 149134 - DNA, 122 bp, Homo sapiens
tcccagcagacagtggggtccccaggggaggtcttcaagaatccgggcccctctggtttccgccccctccttgagcccaggacaaaggtagcgggtttgaggagctcggactgttctcaggg

SEQ ID NO: 149135 - DNA, 122 bp, Homo sapiens
ctaaaataataattaacaataatgataccaatggctacaatttaccaagagcttcctctgcgccaggcacagtgccaagcccataatccttacccaatcctaggttcaggaaggtaacccag

SEQ ID NO: 149136 - DNA, 122 bp, Homo sapiens
gcacgggaggacacaggcacaggggggacacacacagcagggactcatgcacaaggggaacgcacgcacagggaggacacaggcacggaggggacacaggcacggggggacgcatgcacggg

SEQ ID NO: 149137 - DNA, 122 bp, Homo sapiens
tgcctacgcccaggtaagggtgggcatcccccggcacgggccgcaggaggctctgttgggcgcaggctcatcctgggttccgcactggcaggttgtgcagtttggggtgagtgagaagctgg

SEQ ID NO: 149138 - DNA, 122 bp, Homo sapiens
caggtgctgctcctagcctttgactcctccacctccctttgtgcccccctctgcctccaccgcttgccagctccagcctccagttaatgaaatgtggggatcggctgcacagagagctgtca

SEQ ID NO: 149139 - DNA, 122 bp, Homo sapiens
cccaaaatactgggattacaggtgtgagccaccgtgcccggcctctctttcgatttcttacgccccttatggccccacttttattgcattcacagggaagtcactggtacgatctatctttc

SEQ ID NO: 149140 - DNA, 122 bp, Homo sapiens
cccatctctcaatactgtcaccttgggtttaagttctaacatgggaattttggagggacacgtacattgaaaccataacaaggtctttactcaaaagttgccttctcattgaggccttccca

SEQ ID NO: 149141 - DNA, 122 bp, Homo sapiens
cctatgccttgctgcccgtgcgcagcctgctggccataggctttgggctcgtggtggctgcgtcgcacttgctggtcacagccaccttggtccccgccaagcgcccacgtctctggaggacg

SEQ ID NO: 149142 - DNA, 122 bp, Homo sapiens
agtggcaataggcacctgttcgcacaggtgaacgagctcactcacgccaaacctgcaacacgaaacatcgacagtcatcgcccctctgcgtggagatgggctctgggtgccccggtggggtg

SEQ ID NO: 149143 - DNA, 122 bp, Homo sapiens
ggtcccacgcagcgcagagctccatttcctcctccggactcgcagggcgcgcggcttcctcgcttcaaatccaggaacgcgctgtccccaccaatcaccgggcttcttcccgccccatgtct

SEQ ID NO: 149144 - DNA, 122 bp, Homo sapiens
ggcggagatgcgcgttcgcttcgattgtaggccattccttttaggagctgagaaaggatccgtttttacagcattctcgacctgtgattcttggtgggggaaactagttatgtggataaaaa

SEQ ID NO: 149145 - DNA, 122 bp, Homo sapiens
atcttcctcagcatccatggtagcttggctgctgcccttgcctttggtcgcagctgtggccgaccctaagcttctttgatatgggtgttctgctctgttcttcctgtacttctgtttcttgt

SEQ ID NO: 149146 - DNA, 122 bp, Homo sapiens
ctgaaagactcaggagcccccatccacagccacatacagggcctctggagggaagtgatccgcccaagtctcctggaggactcttctcacccaagacatctgaagctgtcatgaaacaggca

SEQ ID NO: 149147 - DNA, 122 bp, Homo sapiens
ccccgtccttcttgccaagcccctgtcccacaggtaataaacaagaagccgggcccgtctcgccgcccaggagggcagagcttgcagtgccctgcggctggtaaggctgagggtcgcccgct

SEQ ID NO: 149148 - DNA, 122 bp, Homo sapiens
aactgacagtactgcctgcaggtgtgtgctcatcagaatctattcccaacacagtagaagcggatgtttcaggaggtgcagagtgactagaccacagcatgtgtgtgagaaaactgacactg

SEQ ID NO: 149149 - DNA, 122 bp, Homo sapiens
gagctttgcgggaaagcagcggtaagtcagggccttgcagatgcgaggtttaggcagcttcgcggcctacagaggcctcggcccgcgcctcttgggggagccgcgctgcgcggcttgaccca

SEQ ID NO: 149150 - DNA, 122 bp, Homo sapiens
tgggcttctgcactgacttctacggctgcctcttcctcgcctgcttcgtgctggtgctcacgcagagctccatcttcagccttctggccgtggcagtcgacagatacctggccatctgtgtc

SEQ ID NO: 149151 - DNA, 122 bp, Homo sapiens
cctcctaagttgatctttgactcagcatcgagcctggtcctgctggccaacagcctggagcgtgatcctgtggctaagctctgcaacctgttcccagttatcagggactgtcacccactcta

SEQ ID NO: 149152 - DNA, 122 bp, Homo sapiens
gaaaggaaagatgagaggtattgagaaagcttctgtcttcttagagaatacataaataatcgtgtacagaatgttggtggaaatatggctaataaaggccattctgatgaggtgtctgacag

SEQ ID NO: 149153 - DNA, 122 bp, Homo sapiens
agccgcgcggtagatgcggtgcttttaggagctccgtccgacagaacggttgggccttgccggctgtcggtatgtcgcgacagagcaccctgtacagcttcttccccaagtctccggcgctg

SEQ ID NO: 149154 - DNA, 122 bp, Homo sapiens
agttgggaaagataaagggattattctagcgcgtcacattgacaaacaccgacgttaacacgctcagtccagcctgactcacttgcctcaggtcagagaggtcaccactgacgacgccgggc

SEQ ID NO: 149155 - DNA, 122 bp, Homo sapiens
tcctggctctcgggacctccgggacctgcgcgtggaaacaggttttcccaggtcgtcacacgggaaggcctgggctaaggagctgattaaacccagttacgattgaccgggcgcggtggctc

SEQ ID NO: 149156 - DNA, 122 bp, Homo sapiens
tcgcggggaagcggagggccggcgcttttatggtggccaggcgggagtttccgggaagggcgcgcgccgcctgttcttattattggatgcgaccagcggaaccccgccccggccagcgcgga

SEQ ID NO: 149157 - DNA, 122 bp, Homo sapiens
accaaaggcccctgcgacccccacagctggcaccaaaggcagtgtctgtggggagcgatgcgtgccccagccctgtgagcgtgatgttctctggcctctcccatgcaggtggagcgggagat

SEQ ID NO: 149158 - DNA, 122 bp, Homo sapiens
atgacccagctcctcaccagagggcaggtaccggaaaccagcaaacacgatttgacaggacgcagagcaaacaccgcattaaacagctcctgcgttccaaggccaggtgcttagttcatcta

SEQ ID NO: 149159 - DNA, 122 bp, Homo sapiens
gagaccgtgaggcagtccttttctcataccacgatggaggccgagtcactgtgcgctccacgatgaggctgcaagtcactatgcgttccacgccctccgtgcactctgggctctgccaccct

SEQ ID NO: 149160 - DNA, 122 bp, Homo sapiens
tccgcctcgggtgatctgggggtgcacggcgcaacacgaccacggaggccgaaagcgcagcggaacctcccggctccaggttccggtttccgcatgcgctccgagccgctttgggcggcggc

SEQ ID NO: 149161 - DNA, 122 bp, Homo sapiens
cataaccacccaacccctactccaccgggagggggttgggcatacctggatttccatccgcgcacctagccacagggtccctaagagcagcagctaggcatgggagggctctttcccaggag

SEQ ID NO: 149162 - DNA, 122 bp, Homo sapiens
cgaggacagcatctgcgcggcgccgtggcctaaagaggaggccaggcctctccctaactccgccttcgcgggccctgcaccccagcagcctctgcgtgtttcttcccgcccggcacacccgc

SEQ ID NO: 149163 - DNA, 122 bp, Homo sapiens
ggacccctgagtgagggggtaggggtcaacataaggacccctgagtgaggagatgggggccgccatcaggacccctgagtgagggggtgggggccaccaccaggacccctgaggggatggga

SEQ ID NO: 149164 - DNA, 122 bp, Homo sapiens
cacaacacagcagcctgcatgacacagcccacggcacaccagcctgcacgatacggcccacggcacagcatcctgcacgacgcagcccacggcacagcagcctgcaagacgcggtccacgac

SEQ ID NO: 149165 - DNA, 122 bp, Homo sapiens
actgtatctttggaaagtctcaacttccaatggttacttactttatttacatcagccttacgtctccttgggttacattagcagctctgagaccaagccggtcaaacaggtctggtctagaa

SEQ ID NO: 149166 - DNA, 122 bp, Homo sapiens
catgctgtgcccttgaggaaggtgtgtgtttgccaagacctgtcactctctccttcccagcgcatggatgactactcttctcagccccttgcagttgaccaactaaatgtgagcagaagtca

SEQ ID NO: 149167 - DNA, 122 bp, Homo sapiens
acagaacttaataccagtatgatgtattactatgatgatggtacaggggtacaggtgtatcgtgtggaagaagcattgcttaaagagtgtattaagcgtcaaattgaacattacttcaatgc

SEQ ID NO: 149168 - DNA, 122 bp, Homo sapiens
ttaaacctaaatatcaaatggtttgactgttcatcaacgtgatatattagcatgatggagcggcagtccaagtgatagatccatcttcaacttgttgtgtgaccttgagcatatcacacatc

SEQ ID NO: 149169 - DNA, 122 bp, Homo sapiens
cgttaatatgcccttccatttcttgttttgttttcctattgtttgcgtttataccacttccggtcacacgggcattgttttgccggtatgactttgggggatgaaggtggggatgcggaata

SEQ ID NO: 149170 - DNA, 122 bp, Homo sapiens
gcagctcctgcattccttctttggaagactccccccttcaccgaggttacctaccaaatccgccatagggtgtggtccagggtcgagttatcacagacctgtctccccaaggtccccgcgtc

SEQ ID NO: 149171 - DNA, 122 bp, Homo sapiens
ctggcttttatcatcaataggtaaaaaatagacttctgggtttaatttgaaaatttcagacgataaggaagctgtttacagagggtttggatttcttctgtatatcacctgctcatattcat

SEQ ID NO: 149172 - DNA, 122 bp, Homo sapiens
caaccgtgaaattcaaactagatagtagagaaactggaattggggagaccagttagaaagcggtttggaaacaaagatacacatgagttttaaagctgtgggctaatgtagatgttgatgtg

SEQ ID NO: 149173 - DNA, 122 bp, Homo sapiens
cggaggctaaggcaggagaatagcttgaaccgggaggcagaggttgcagtgagccgagatcgcaccgctgcactccaacctgggcgacagagactctatctaaaataataataataataata

SEQ ID NO: 149174 - DNA, 122 bp, Homo sapiens
ggaatccctctgctctcctgccagcagatgaagatgcagggagagggctgacctgctacacgtacatttctggagcttttcatcactcattggatggggagattatagacaattttaatttt

SEQ ID NO: 149175 - DNA, 122 bp, Homo sapiens
tctatctggctagctgtgttatctaggattgcaccttcttacacggcaggcgcggcatcacgtccagatgggcatctaaggaactgcatttcgggagatgaaactttcatttgggactcaac

SEQ ID NO: 149176 - DNA, 122 bp, Homo sapiens
tcagatacggtgtggagccctacaatgccacactgtctgtgcaccagctggtggagaatacgaatgagacctactgcatcaacaatggggcactctatgacatctgcttccgcaccctcaag

SEQ ID NO: 149177 - DNA, 122 bp, Homo sapiens
gccaagagaaggcaacccacctgtgcaaaggctggaaaaggaggtgagggaagcgggcgccgggcactgctcactaacctgggcactggccttctccgtctgccacgcgtgcacgcgctccg

SEQ ID NO: 149178 - DNA, 122 bp, Homo sapiens
aaccaaacaagcccaaaacccaaactcctgcacttctctcagagaccaccagagggcatgcggagcccagcttctctattaacagggagcgacagacaggacctgcaggacatctgggaaac

SEQ ID NO: 149179 - DNA, 122 bp, Homo sapiens
ttgatctgaaggatatcagaaggcagtcctgaaatttaatatgccctcagcctctccctccgggtctctttgtttgatttttatgagaatctgtatgagggctctatctcattctctttttt

SEQ ID NO: 149180 - DNA, 122 bp, Homo sapiens
ttctcctctttgggcttggtcacctttccactcatagatcccagcttgcttgacaaggttcgctcagaagacggaagtcctcgccgagcgggtcggacttgggagagtgcttagggcggcaa

SEQ ID NO: 149181 - DNA, 122 bp, Homo sapiens
gcagcgtcgtgccgcgcagtggccgcagcgccaagccccccgcccgcgccccgccggccccgccccctccgcgcacgcccccgccagccgcccaagcacgcagtggcccagcgcggccgcgg

SEQ ID NO: 149182 - DNA, 122 bp, Homo sapiens
acgtaaatagcagagcttggattcgagccctcgcagtctgattcctgagcctacctgacccggtgtcataaacatcaaagtccctttgagtcaggtggtgaggctggggaggcccccaggag

SEQ ID NO: 149183 - DNA, 122 bp, Homo sapiens
cctcctgcccggcccaagcgcctgctgctgaagccgcctcccagctcccccgggttgtttcggaattcaggggacatgcagcctaaatgacccacactggaatcccggccggcttcccatcc

SEQ ID NO: 149184 - DNA, 122 bp, Homo sapiens
actccatgtggagattcagtgcgtggggtttctcagttacatgagtccaaggaacgtccccgaacgcgactcgtttgcccggaactgccgctgcctctaaccgaggctgcgggtcctggaga

SEQ ID NO: 149185 - DNA, 122 bp, Homo sapiens
tcccaaagtgcagaagagaattccaggaagcctcgagagtgagtgacggcccgcggcccccggcgaggaggcagcaataccacaggcgaccaccagctgccgccgcagtcaagggcagttgg

SEQ ID NO: 149186 - DNA, 122 bp, Homo sapiens
ctggcgaatggaaggaagccaagtcatcttcccgggctcgaaggctggacccagcatcctcggtaccattctaggcccacgctgggcacagctgggcggggtggctgcagaatgcaggcctc

SEQ ID NO: 149187 - DNA, 122 bp, Homo sapiens
atcacacacacacacacacacacacacacacacacacacggctatgtggaaattaaattacgttgtgtgcctcacgtacccagttcatggtctgacctgtaatatgtattaataaatgataa

SEQ ID NO: 149188 - DNA, 122 bp, Homo sapiens
cccccagtcctgctcattttggtcacgcctctttgaagtcagctgtgcagaaacccgcgacggatgggcgccagacggggctctggaggctttggggagttgtagtctccggccatgccctt

SEQ ID NO: 149189 - DNA, 122 bp, Homo sapiens
ccaagctttcatggtgaggaaactgttttcaagggcttagagcaatcgcagttccacaatcgcagatagaaagtatgatttctctggaaaaaaagtgtcttaacctatgaagctgtgtgtga

SEQ ID NO: 149190 - DNA, 122 bp, Homo sapiens
gactctcaattgtttgcaaatttgcttccaaaactcaggaatgcactactcaactgaggccgcatttgagagcacacactcaatacttcctccaataaaagaaattttcatctcagctgtac

SEQ ID NO: 149191 - DNA, 122 bp, Homo sapiens
gtgaagactggttctgggcgttttgtaaccaagggggcggcctgagggggcgtgcacgcccgcgggagttaaggatgggcgcccgcgggcgtgacggggccgcggggcgtgggcgccgctcc

SEQ ID NO: 149192 - DNA, 122 bp, Homo sapiens
cgccctgcctccctccttcggccttcacctacccgcctccggattggccgctaggaatcccgcccctctaaagccctgcctgctattggtcacggtaggctgcccttcagagaggcgtgccc

SEQ ID NO: 149193 - DNA, 122 bp, Homo sapiens
tgtcacggtcagctcctccaggcgaggcttgatggggggttcaggggtgggaggttctgtcgaggctggggccatttcttcatcctttcctggggctgcatcagaaaatagaatgggtgggc

SEQ ID NO: 149194 - DNA, 122 bp, Homo sapiens
tctattttaggcctttctggtgttgagagcttccgaggcctgattcctttgcctgttgcccgtgctgctcactttgaaaacaagagtgtttcggtggaaggatttgagaacaaaatgctggg

SEQ ID NO: 149195 - DNA, 122 bp, Homo sapiens
gggtggtgataggaaacaccccaccatcaccattggagcagaattggaaggtagggcctccgggagggcgggggagccaagtaacatccactgtgtgcctgcctgcatgttagctaatcatg

SEQ ID NO: 149196 - DNA, 122 bp, Homo sapiens
ctgtcgggcaaccgctcggctatttccgtcgcagctcggccccacccccttttccgagggcgggagaggagtcgggcttaactctgtcctcgctggagccctgcagctcctcctcgcgcccc

SEQ ID NO: 149197 - DNA, 122 bp, Homo sapiens
tggcgagtgcccgagccaggccggcctccccgccccctccctggaaaggaaaggccccggcgacaacagagccagacccgctcatcccgatctcccagaaggcgactgacagctgactgcca

SEQ ID NO: 149198 - DNA, 122 bp, Homo sapiens
ccggatgagcagtgacttcagggcttgggctactctggcttaacgggaccagtagcagagcgccgcccgtcctgcttgctgctgggtccggttgccgaggcggaaaagtcgcaagctccttc

SEQ ID NO: 149199 - DNA, 122 bp, Homo sapiens
tgaaggagctgtgttcctcctagtggttctgatctttttcattgcagctgcaggtacaaacgagggattgaggtgaccacccttcaacctgcagctcttcagtcaacaaaaatcaagtacct

SEQ ID NO: 149200 - DNA, 122 bp, Homo sapiens
gcagaagagtgagactggggagctggggctggatttgggggttcctggagcgagtgtgaacgataagagctttctggtcaaatttgggggctgccccagataaagatcagatggggagcgag

SEQ ID NO: 149201 - DNA, 122 bp, Homo sapiens
cccgtccccacccctgcagcctcacaggctgccgtcagattctcaagcccctattcctctcggtggcctaaatccccaactgctcggggccacttttcaggccaaaatgggcccaaaatggg

SEQ ID NO: 149202 - DNA, 122 bp, Homo sapiens
agggtttccagaaaggaggcggagtccggggcgccacgcagggaagggcgggcttccccgcggcctgaattggacaggggtcccctccagccctgtgcacgagaggatgacaggacccgggt

SEQ ID NO: 149203 - DNA, 122 bp, Homo sapiens
agtgtgacctcaatttaactaatgacatctgctaaaacgctgtttctaaataaggtcatacgctaaggttctgaatggatatcaagttttggggaacgctatccaacccagtacaggtagat

SEQ ID NO: 149204 - DNA, 122 bp, Homo sapiens
gctctgttttgctatatcccctaatttgttggttgtgctaatctttgtagaaagaggtctcgtatttgctgcatcgtaatgacatgagtactgctttagttggtttaagttcaaatgaatga

SEQ ID NO: 149205 - DNA, 122 bp, Homo sapiens
cgcgggagggggcggaaccgagatagactcggcccccagctcatgaatataagacgcaggcgcgccctctgattggcccaggatgtgtagggggcggggcccggcggaagcgtatataaggc

SEQ ID NO: 149206 - DNA, 122 bp, Homo sapiens
gcgctgagataggctgcggagggatgattggcgtcttggcgcccaatgggcgctggcgggcggccttgagtacctgcgctgggcgggcgggaacggcgcgcggcgagctgagggtggcggcg

SEQ ID NO: 149207 - DNA, 122 bp, Homo sapiens
aattgttcgtcagttcaaatctcttggttttaaaaaaatactttccctctgcgcgactggcgcgtcacgtcgcgcgcgaccagtccgcagggctcctcccgcgctgctgataggcccgcaga

SEQ ID NO: 149208 - DNA, 122 bp, Homo sapiens
cccgtgtggggcactgggaaacatttcggagctgtgaactcctcctcgtcctcccaacagcgaagggctgctgcctccacaatgccaagaggtgacacctctcaggagcttctgtctggccc

SEQ ID NO: 149209 - DNA, 122 bp, Homo sapiens
cctcgctgtcccgcgccttggcggaatgggcacctcactagccctggcactagctagcatcgctctaaactcaaggttagaggttttcaaattccgtcctattgttgccagacaccctcttc

SEQ ID NO: 149210 - DNA, 122 bp, Homo sapiens
catgcgcaccgccatccaggccacggaatgaggccagaggttagatgggttgaaccactacgggaaggggaggggaagctttgggaggagtgatggagggtggaaagcggaagaaaaaagca

SEQ ID NO: 149211 - DNA, 122 bp, Homo sapiens
aatgaagggctgaaaatccttctcctgagactgtgatgtgtagatagaacgtggtgcaggcgatcggaaaactgtaggcctaaggaaacgattttaaattttccagcgtctcccacccaact

SEQ ID NO: 149212 - DNA, 122 bp, Homo sapiens
aaaaaaaattaacaacagaaactgaagaccccagggccgcagctcctcctgcgcacacaccgagtcgggattctgccccgatcatccgccgggcatccctgaacaatctgggaaatactcgg

SEQ ID NO: 149213 - DNA, 122 bp, Homo sapiens
tggcccgtgtatccttccacctccttttgaaccctcctaggtctcctcgccccgcccactcgctgggctgcagcttcctaccgttccgtactttccactcaacccggtaaccccaaacgtgc

SEQ ID NO: 149214 - DNA, 122 bp, Homo sapiens
ggagtgccgctcgcaggggctggtggggtcgcgctgggggagtgaactgggccaatcaggcgggtgcgtggcggcgcgggggaggcggtgccccttcactcctccctccactccctccctgc

SEQ ID NO: 149215 - DNA, 122 bp, Homo sapiens
tgtctgtgtctcgggactctgagcgatgggacagcatctggaatgtcactgagccatccgcgacttcgggagcttgtgggatgtggcgtcaggcatggggcggctcctcagggcttctggaa

SEQ ID NO: 149216 - DNA, 122 bp, Homo sapiens
caaaggatggcagcaagcccggacccaagcgacgcggcgaaagcacagcgaccccaccctcgccaggtgcagagccatttccgcctccgagtcctgcgttgcctggcaaccggtctcccagg

SEQ ID NO: 149217 - DNA, 122 bp, Homo sapiens
tggcggaagttacagtgagctgagatcgcgctactgcactccagtctgggcgacagagcgcggccctggcaatcaatcaatcaattgatcaataaaggaaagaaaaacagaaacagttctac

SEQ ID NO: 149218 - DNA, 122 bp, Homo sapiens
aacaaaaaaacaatcatttggatccttagtgtgcagcagtaccaatgctagtggctgaagcggttgaaaaacagcataaagccatattcgctcccatgtgtacacacaggcatctgctataa

SEQ ID NO: 149219 - DNA, 122 bp, Homo sapiens
ccccccgccacatcctcgtaactgatgtacagtccgtcagttcggcttcagttcttttgacggatgaaaatggcatatttgtgcattctctggatgcgttataatgaggacactcagtacgt

SEQ ID NO: 149220 - DNA, 122 bp, Homo sapiens
tggctccaattcaaagagccaccatctttggtccccacctcagtgggttcccttgtggcccgacgtctccctgtgtcttcatacctaaactcggagcggggcgccaggtaaggatgagtatt

SEQ ID NO: 149221 - DNA, 122 bp, Homo sapiens
agttaggggtattgcagtgggggtcctgggctgaggctggggcccaattccgagcactgacgttactgtcttgtccccacagaagccgatcctactgcagggccatgagcggtccattacgc

SEQ ID NO: 149222 - DNA, 122 bp, Homo sapiens
acctgggcgcgggagcaccacgagcagtagagcagcagagtgggacagtccacgactgggcgcctacatggggtctggaaactctacgacagtcccaagtacctagaataagtgagaaagtg

SEQ ID NO: 149223 - DNA, 122 bp, Homo sapiens
gcaattcagctcagacccacaccctacccaaacactgtgtacaaaatgcttctaggggttcggcaaagccacactgagtccttattttaaaggcacatcagtggtcaatttcaggttttggg

SEQ ID NO: 149224 - DNA, 122 bp, Homo sapiens
accctctccctgttggcccacttcccatcctgttcccaccagaggaagtgccttctggggcgacatttctgagccaccgatgctacacatttagtactaacccaagccataaaccgtttgta

SEQ ID NO: 149225 - DNA, 122 bp, Homo sapiens
gtctggcggggtccgcagtttcagcagagccgctgcagccatggccccaatcaaggtgaccgctggcccggccgggcctgacatcccccactacccccatggcaatccccgtcccgctagtc

SEQ ID NO: 149226 - DNA, 122 bp, Homo sapiens
gggtaacattgaaccttctacagtgtgttgctaggaacctccagaagctgatgctggtagcgtcttcgcacagtgagggctgaatctgcactgctgggggccggcagcccttttgaagcatc

SEQ ID NO: 149227 - DNA, 122 bp, Homo sapiens
gccgcagtgtgttctgcgcctgcccagagctgactcctgatttaaccgctggcgtaaccgcgggttgcacgcatgcgtgctgaaaagcctttcaccctcacgtggtttcttttttaaccagt

SEQ ID NO: 149228 - DNA, 122 bp, Homo sapiens
agatcagagcaagctcacagagtcatgggcagccaggagtcagagttgaagctaaacgtccgggagcgatccctaaatcccgccacagaacttgctgaggaaacagcagtggtttctgccac

SEQ ID NO: 149229 - DNA, 122 bp, Homo sapiens
gctccctgggcctgaggcaggcggctgtagggcggaggccttaccctccagctggctggccgcctggtttccacccgctcgctccacgtccctctgctcgcgaggctcgggcggcagcccag

SEQ ID NO: 149230 - DNA, 122 bp, Homo sapiens
tgacagtgcgcatggccaatcagacgcgagtgtggcctcccggcgtcccgcccactccggcgcctgcgtcattttgggcaccatggcaacgaagtaaacaagcgggtaaataatagacccct

SEQ ID NO: 149231 - DNA, 122 bp, Homo sapiens
gttcttcaaaattctgggagctccggggagggctccggggataggggtccaggtgacgtccggcgcccgtctcgcgggtagggaaactgaggccgggccgcagcgttcggcgcccggttccg

SEQ ID NO: 149232 - DNA, 122 bp, Homo sapiens
gaaagaggctccggggagatagcggaccagtgagggctgcccctcttttgaagcggttttcgtctctttccgccagtggcctcccagctcacgcaggggcgggtcccggtagcgcgaggcgg

SEQ ID NO: 149233 - DNA, 122 bp, Homo sapiens
ggcggggctgaccgcgggggcggggccagggtctaacaccctccagataatgtatggctgcgacttggggctggaagggcgcctcctccgcgggtatgaacagcacgccaacgatggcaagg

SEQ ID NO: 149234 - DNA, 122 bp, Homo sapiens
cttggcactttcctttcgaaccatccttctggacaaactttgatggagaatttcacaccacgctggaaaaatgccggttatgaaaggattactggcgccgcaaaacaccttcctggacacca

SEQ ID NO: 149235 - DNA, 122 bp, Homo sapiens
catctttgtttgtgtaagtacactctgtaatgtttgcacaaggataaaatcgcctacggacgaattcctggggatgcgtcatcaagcgaggcatagctgtggtttcttacctgctttctctg

SEQ ID NO: 149236 - DNA, 122 bp, Homo sapiens
tggcacattctggggctctgacccggcatctggaccccagcctgagggctgtatttttcacgagcatcccagggaaccgctgaggtggaatggactagtgacaccagaagcacccaggcagc

SEQ ID NO: 149237 - DNA, 122 bp, Homo sapiens
ccagcccaggattgcagatttccccgtgcactgtgtttgtccttagatcggtgtagtgcgcggtcattacattcaacaaggaaacaatttattccaatgatcatttccctctccctgtattt

SEQ ID NO: 149238 - DNA, 122 bp, Homo sapiens
caggccctgagtgacagaagatgtgatcagatgctgggctgaatgaagaaagagagccagcgtaggctgcaacctttcaggcagggcttcctccctgagctgagccaggcccaccccagagc

SEQ ID NO: 149239 - DNA, 122 bp, Homo sapiens
tcacggcgtcaggcttcccagacagtcgtaaacgccatgtgtttacgcgactggagcaagcggacgccggccccgctccgtcattgcaggccacgcctccactgaaccagggccacgccccc

SEQ ID NO: 149240 - DNA, 122 bp, Homo sapiens
tctgttggtctctcttaacttaatttgtttggggtcaggtccacaccttctaattcagaacgcgatttcagtgactcttgagctgtgatgctcagtgaatggagagtagaaaagctcgagga

SEQ ID NO: 149241 - DNA, 122 bp, Homo sapiens
ggcccgggaaggggctctgggagtctaagggcccctggaaattgggtggtgccaaggctccgagcggcggtttatgtttttgccagcgaatgtccttcctcctgggtacctgttccctgttt

SEQ ID NO: 149242 - DNA, 122 bp, Homo sapiens
tgttgctgctggtgggaccagagtttgagaaccactggtttatgctgccttcttcccatccgctggtccttattttgcacaaaatggagcggactagtcaacgtcagctacaggataactga

SEQ ID NO: 149243 - DNA, 122 bp, Homo sapiens
taaaataagagatcctttagtgcacccagtgactgacattagcagcatctttaacacagccgtgtgttcaaatgtacagtggtccttttcagagttggacttctagactcacctgttctcac

SEQ ID NO: 149244 - DNA, 122 bp, Homo sapiens
gcgcagcccttcccacgtgctccttccggctgatttatttctccaccacgatgccaggcacgggcaccctgtgccaagcctggttaagcgccaggagtccaaaatgcctgccatagtccctg

SEQ ID NO: 149245 - DNA, 122 bp, Homo sapiens
ctgtgccccggcctgggggccagaggggcaggcctgcgcacggggaggctgttgtggcagcggaacagagacgtgcacggtgagaggcctgggggccggctgtccagggctcccgatggctt

SEQ ID NO: 149246 - DNA, 122 bp, Homo sapiens
catcctaggagagatcaatggaggaatctccttgtgcctctttaaccaggatctatctttcgctctctctctcctctcctctcctttctcttctttctctatattccctctccttttgcccc

SEQ ID NO: 149247 - DNA, 122 bp, Homo sapiens
ctctttgaaatgacaccaggcagccgactctgaatcacagctacattttaatccattttccgacactccaaatgctctaagctattttctgtataaccactgccctcacggcgggcagcctg

SEQ ID NO: 149248 - DNA, 122 bp, Homo sapiens
aacgagcaccgcttcgggatcctctccaactgcaaccacaccttctgtctcaagtgcattcgcaagtggaggagtgctaaggaatttgagagcaggatcgtcaagtcctgcccacaatgccg

SEQ ID NO: 149249 - DNA, 122 bp, Homo sapiens
aggctggggcaggagaatcgcttgatcctgggcggtggaggttgcagtgagacgagatcacgccactgcactccagtatggacaacaagagtgaaactctgtctcaaaaaaaataaataaat

SEQ ID NO: 149250 - DNA, 122 bp, Homo sapiens
cccctccttggaaccggagcaagccctccgtggccctgcgcagtccgcgtggcaccgcaccgtcttgtgtttgtctaacttccctgaccccggcgagtgctcgttgccttttttcctcctgt

SEQ ID NO: 149251 - DNA, 122 bp, Homo sapiens
gtacagccgctccgccgcggccaatggctgcgccggggggcggggccgggcggctcctctcggaggggctcagtctccagcccccgggccctccaccctgcccaaagtacggcttctcagtt

SEQ ID NO: 149252 - DNA, 122 bp, Homo sapiens
tatccaccggcttctcgtgaggctggtgtgagggtcccgcattctcgatgtcgttgatgtcggcatttcctgttaaatcagcaagatctttcctcctcttccagaagttcctgcgagtcact

SEQ ID NO: 149253 - DNA, 122 bp, Homo sapiens
tcctctatccagttcccgcacccttccccccaggccccattcttcaaggcttcagagcagcgctcctccggttaaaaggaagtctcagcacagaatcttcaaacctcctcggaggccaccaa

SEQ ID NO: 149254 - DNA, 122 bp, Homo sapiens
cgcctgcccaaagctctggcctgggccttctttccagagtcctgagtgtagcaagccacacgaacaaatctcaaaggaacttaaaaaggatttgttggctggaaatgggggatctggggtag

SEQ ID NO: 149255 - DNA, 122 bp, Homo sapiens
gtgagccgcgtcccagataccacttcgggccctggccgctcaccttggggaggggggttccgggtcgccatgataccgccagcggccaattctggagtggtccccacccgccctcctctccc

SEQ ID NO: 149256 - DNA, 122 bp, Homo sapiens
gagattctctcacctcagcctcctgagtagtttgagattacaggtggccaccatcaagcacggctaattttttgtatttttagtagagatggtgtttcgccatgttggccaggctggtctcg

SEQ ID NO: 149257 - DNA, 122 bp, Homo sapiens
actgggtggacctcaccacctgaaagattaggttttgctttcctctcataaagttgaatgcgtctcttattactttttgggattttagcccagcaggatgtggtggtaggatgtggttaggt

SEQ ID NO: 149258 - DNA, 122 bp, Homo sapiens
tcctctctcgggcacagccattgtcaccattctgatcgatgacatcaatgactcccgccccgagttcctcaaccccatccagacagtgagcgtgctggagtcggctgagccaggcactgtca

SEQ ID NO: 149259 - DNA, 122 bp, Homo sapiens
tgcaacacttggaggaaggaaggggtatatagacaaaagcctccctctgggccagccacccgcttccctcgcagagggggtccatgtcgtcagcttcctgggtgtccttccagatgttttat

SEQ ID NO: 149260 - DNA, 122 bp, Homo sapiens
cggagcccagcctggcgctaagaaccatcttgttttccaggcagatccaagggggcagcacgcttcccgggagcgcccccgcctcctctccggggccgccgcaggctcggtgagcggtttta

SEQ ID NO: 149261 - DNA, 122 bp, Homo sapiens
tcagcatctccttactaacatactaagagcaatcactgaacacttttcgtatgttcaatgcgtcctcgcgggatctgagaagcattgtcctattaaatctcagtcgtctgattttcagcatc

SEQ ID NO: 149262 - DNA, 122 bp, Homo sapiens
gtgagccccattcgcatgctaagtgacacattcaacagagacaggcgctggccctgggtccggcggggtggggcagccgtgcagcaccgtgggacgctggtggcttccctgcagcctctcca

SEQ ID NO: 149263 - DNA, 122 bp, Homo sapiens
gaatgttaagctctttgttcttttcatcctgatacattctgaagcctgcagaccacagttcgatgatcttcggcagcccgctgtaaataccaggggatgtaaccagactgtgtcccagagtt

SEQ ID NO: 149264 - DNA, 122 bp, Homo sapiens
ggaggcgtgagggccagtgcagcctctggggtcctgggcgtgagctgctgagatggcacccgcgtgagtgtcgcagtttccacaccgtgagctgctgagacggcacccgcgtgagtgtcgca

SEQ ID NO: 149265 - DNA, 122 bp, Homo sapiens
ggcggggtggccggagagatgggcaagagaccctccttctcacgtttcttttgcttcattcggcggttctggaaccagatcttcacttgggtctcgttgagctgcagggatgcagcgatctc

SEQ ID NO: 149266 - DNA, 122 bp, Homo sapiens
ccaccttccgggcgcgcggcgcggagccgggcggtgggaatggagcgagcagattgaggccgccactgcagcgccgccagcatgaacttggccgcgagctgaagcggccggcggcgggcggg

SEQ ID NO: 149267 - DNA, 122 bp, Homo sapiens
tgctgccctggccccggagatgtgtgttccccactgccaaggcctgtggtgccagccccacgttgcaagccggattgtggtggtctgcctgtgtttgttgaaattgggctgggagaaagggc

SEQ ID NO: 149268 - DNA, 122 bp, Homo sapiens
ttgaggttcctggttcttgaagccaggcctgacccgactctcagatggggtcagtcccgtcgctttgcagactgaccctggaaatctacaaaatgcagattttcctgatttcctcttctctt

SEQ ID NO: 149269 - DNA, 122 bp, Homo sapiens
accagccctcagcccccattcccagccctccttacccggggtgggtgtggagtgccctggcggaggtccaggctctgccctgtaggcccaggtctgacctgccctgaggccctcctgcttgc

SEQ ID NO: 149270 - DNA, 122 bp, Homo sapiens
ccggagccgcgctgcgcaccggccgcgaagcgctcaagtcccctctcccgggccggctggcgggcgccaccagcacgcggccagttctgagtactttgcccagaacttctcggcgcgcgccg

SEQ ID NO: 149271 - DNA, 122 bp, Homo sapiens
gaggaagcgatgaactaagcctcactcctgtgagactaggtttttcagtgacttatcccccgcgtgcgcaggagggggtatccaaaacgcggatatataccatcaggtaatgaacactcgct

SEQ ID NO: 149272 - DNA, 122 bp, Homo sapiens
ggaccgcacgctgcgccaagctagggcgagatccccaccctgcgccgcgcccctctgcctcgcaaccacccacggccccagccgggaggcgccgcagccccggaacccacctccgcgctcct

SEQ ID NO: 149273 - DNA, 122 bp, Homo sapiens
tacgtgtatctgtgtttcctcgggggaaaacgctcgcatatctgcggtccttgacgatatcgtctgacaggttttagaaggagatggtttcttcttggtcagcaaaccaggatgagatggga

SEQ ID NO: 149274 - DNA, 122 bp, Homo sapiens
ctgtgtctctgaggttagagatgcctcaaagggatgttctccgggggaccttcccaaatccgcgcttagcggtggcgaagggacttcttccacacagacttctcaagggccagccggctggt

SEQ ID NO: 149275 - DNA, 122 bp, Homo sapiens
gtcagggcacagcttggttttagggagacatgagacatcaatcaatatatgtaagaagtacgttgcttccatccagaaagctggggacaactggaagcagggagggggcttccaaggtcaca

SEQ ID NO: 149276 - DNA, 122 bp, Homo sapiens
gagcctctttccttcccaacccagtacactggagtctctggcaagtcctgacagctcttccgtggtaaccagcatgatgctaatgatgctggagatagtgatagaagtggccaggctataag

SEQ ID NO: 149277 - DNA, 122 bp, Homo sapiens
ggggcgttggggggctggagggcaagaggttacgcgccccagctcccaccttgggtccttcgcctgcacccagtctaacctggcacctaaaggtttcgtcacccagccaaccttctagttct

SEQ ID NO: 149278 - DNA, 122 bp, Homo sapiens
gagctgtggccgcacgccctgctgggacttgtagtccactcccgagtcccattcccgatccgcgcagactcacacggcctctatctgcccttcggtcttgctgaagcccagcccagtattca

SEQ ID NO: 149279 - DNA, 122 bp, Homo sapiens
gagggcaagagagcaagcactggactttgaagccagatctgggttctagcttagctctgccgtggagtaactgagcaaccatgggccagtcacttaccagcgctgagtctcagtccacccat

SEQ ID NO: 149280 - DNA, 122 bp, Homo sapiens
aggaaagggcagagaagcacacacccttcctgttcaaggagacttcccagaagtcccactcgattcttcttatatctcattggcaagacctcagtcacatgatgtcatgagcaaaagaggct

SEQ ID NO: 149281 - DNA, 122 bp, Homo sapiens
aagttatttctcttttctatctctgcatttctgccatagcaaccctactgtgagggcaggcgcacacccacatgcacacacagacacacacacacacatacacccgacatctctgctgcctg

SEQ ID NO: 149282 - DNA, 122 bp, Homo sapiens
tccctcagcagcatgtctctgcagtgcagaagtagattaagatcagtcgtggcaggtgctcgttatagctcgttatagcaagcactacagattattttgcacagagcttgctgttgagtgaa

SEQ ID NO: 149283 - DNA, 122 bp, Homo sapiens
ctgtgaaggaacagctatttagatgggctggcctgagggcctcctctttcccagacggcacggacgcagtattctatcagggaatgtggggccagctgggcatctggtagcccagttggttc

SEQ ID NO: 149284 - DNA, 122 bp, Homo sapiens
gcaccccggactttcttaatcgtagctccacccactcgagccgggtgccttcgcgtttcccgtttttaaatgagatagtggcacacccggtggcatcctcccacccgggctcttatcggcgg

SEQ ID NO: 149285 - DNA, 122 bp, Homo sapiens
aaggggtcggccgagtctcttaccttgctctccgctgggagttgggcgggctgggtggcccggggaggggaaaagggtcgggggagggggtggggaaaggggggagcccttgcgaggtgtag

SEQ ID NO: 149286 - DNA, 122 bp, Homo sapiens
tgattcccccactaacttgtatgccgcgggaagattgggactgtctcttactactccctccgcccactatctatctatctgctgtttatagtgtagtgtctacactcagtaacttatttgtt

SEQ ID NO: 149287 - DNA, 122 bp, Homo sapiens
catccgactcacgtgcgacctcatcagagagtccctcctcagtaattctgtgtgaaatagcgcccccatccagctgccccttgtcctgttttattttacttcatagaagttactaccacctt

SEQ ID NO: 149288 - DNA, 122 bp, Homo sapiens
tgaaaagtactcagctcgacaccggagaaaaaagaaacccccataggaactccggttgttcgggtgtgtcctaacagcctcactctggacctcttggacctggtgagtccgtgtccccagtc

SEQ ID NO: 149289 - DNA, 122 bp, Homo sapiens
acagttaggtttttgttgagttgaagaagtagccaaattcttattgtaaaagtagcctttcgtactaagctgactttacctttcgaggagaacttaacaaaatatgtgcttcttccactttt

SEQ ID NO: 149290 - DNA, 122 bp, Homo sapiens
ccatcctttaaaagaggctgctctggtctggcttgggagaattggaaaatctagcaagttcggatcccactttgcaaaaatataaagaaccaggaaaaggggaagggggaaacaggaggaac

SEQ ID NO: 149291 - DNA, 122 bp, Homo sapiens
gacgccccccaaccccaggcatggccgtcagccggcgaggcggtactgaggcagggggcgcgtcctggtcattggagagtttcagcccagtgggtgaaccagacacactgttcaagggggca

SEQ ID NO: 149292 - DNA, 122 bp, Homo sapiens
tgcccagtccctaagagcctgctcaagctcgccaggagtgtgcccaaggtctctaaccagcggcctctttcaccctgaccaaagcgcattctcaaggttgagagaataagaaaaagaggggc

SEQ ID NO: 149293 - DNA, 122 bp, Homo sapiens
tgcgttgcgcccgactctccgcggttacctgtgcctagaggtgatttgaagggcaggggccgagagattcgtagccctgctgcggcgccgtcccggagttccccggcccagaccagacccgc

SEQ ID NO: 149294 - DNA, 122 bp, Homo sapiens
gggcctccgcctcggtctccgggccctgaatgggggctcacctcaagcagctgcccggctcgtggactggagggtgtctctgaccccagaatcagctcccgaatccagggccgtaggaccag

SEQ ID NO: 149295 - DNA, 122 bp, Homo sapiens
ccctgtgtgtgtgcacacgcatccaccccgagcctctgtgtgcagagctccaagcacagacgtgttcatcaaggacaagcgggaagccgggaacagctccatgtccatggaaggggcatggg

SEQ ID NO: 149296 - DNA, 122 bp, Homo sapiens
tgcccgtccaaaggcaaatgaacaattctagaatacaaatggaataccgcagggggtgcgcgccgtgagaaacgggtgcacaccatgagaacggggacgtgcagcatcaacactgagggtga

SEQ ID NO: 149297 - DNA, 122 bp, Homo sapiens
cctccccacgctgggcggggcacagctccaggccgggccgactcaggctgcgccagggtccgctagcctctgggatgcatggggacccctgggacgagggagcactctcctgagcaggaaat

SEQ ID NO: 149298 - DNA, 122 bp, Homo sapiens
gagtccgggggaatagtgtccccaggggcagagggacatactccctctcgccccgagcgccggcccagcctaggttgcctgcatgggcctggagagctgagggtcaccacctggcctcccag

SEQ ID NO: 149299 - DNA, 122 bp, Homo sapiens
gtaggagaaacacctcagggagcccatgagcccgggactgatgcctcgaggccctgctggcggctctgggtttgtgccgggctcatggggggcaaagtccacatctcctctgtctaccccag

SEQ ID NO: 149300 - DNA, 122 bp, Homo sapiens
gggatttgtggacaaacatctttacagaggactacaattcccgagatgctgaagaaccagcggtgaaggcgttgcattcagggaaatgtagttctcttaggtcccctccccccacccagggg

SEQ ID NO: 149301 - DNA, 122 bp, Homo sapiens
ttctggatctctgctacaccaccagctctatccctcagttgctggtcaatctctggggcccggaaaagaccatctcttatgctggttgcatgattcaactttactttgttctcgcactggga

SEQ ID NO: 149302 - DNA, 122 bp, Homo sapiens
tattagcagcaaagtagtttgaagtgtggcctgctcagctcacgctctgtcccctccgcacgcggctaccggctgttgaagatgacctctagccagcacgggcagctgctgatgaactggcg

SEQ ID NO: 149303 - DNA, 122 bp, Homo sapiens
tgaggaagagatgagttattggtcaggagagccttccagccacaggtgaggtagatatgccgctgctgcacaccccaatatcattcctagggcaggggctgctgctctacaacctcagggtt

SEQ ID NO: 149304 - DNA, 122 bp, Homo sapiens
agaacaagaagaagtgtcttctaggtagtcaagggggcatatacaaaccagaaaggcagtcgggagctagaagtgtttgaagaggagtagtgggggctaggggagacagcgtcaacaacata

SEQ ID NO: 149305 - DNA, 122 bp, Homo sapiens
agaggctttgggatcgattgccaggctgtgggcccctgggggtgaggggcctgaacaaaacgtgaaatacggctccactttctgcatcagcagaggggaggctgggcgtgcctgtgccccca

SEQ ID NO: 149306 - DNA, 122 bp, Homo sapiens
ccagggactataattatcagaattgctgtgagcttgcaaaaggttaagaaaatctggatccgggcgctccagctgacactcatgctatttaggaccatcactacagctgcaaacaaatagag

SEQ ID NO: 149307 - DNA, 122 bp, Homo sapiens
ctctgttgcctaggctggagtgcagtggcatgatctcagcttacgataaactctgcctcccgggttcaagggattctcgtgactcaacctccctagtggctaggattacaggtgtgtgctac

SEQ ID NO: 149308 - DNA, 122 bp, Homo sapiens
aatgaactaattcatttcacaaatattcgtggtgccccttctatgtgccaaacactgtgccgggaattcagtggagaacaagacagacacaggccctgccaatggagctttcagcctccagt

SEQ ID NO: 149309 - DNA, 122 bp, Homo sapiens
tggccctgtagccacagccagggctgcaaggagcagcaatgctgtcctcatctctgatgtcgtctgggagcagtgcgggcccctgcattgccaaggccttataggcacgggctgggcggggg

SEQ ID NO: 149310 - DNA, 122 bp, Homo sapiens
ctggatactagaagctgcggttgctcccaggctcgggaactgagacgcagaaccgctgggcgccgcgatttaaagcagctccgcccgcctcagccccggcagccggggagcgccccctggcg

SEQ ID NO: 149311 - DNA, 122 bp, Homo sapiens
atgccaaaaggggggctgtgctctggtagtgtgtgctgtgtgtgctcagcgtgtggttagcgtgtgctcagcgtgtggttaccgtgtgcacagcacgagcttgaactcgctttgtcagaact

SEQ ID NO: 149312 - DNA, 122 bp, Homo sapiens
tttagaatttccctgccatttccatgccgtgctgggaggaacatttgaaatcgggcctggcggggtaccagcaggcagcaatagcaagcggggtggagaggagcagggccaggcccccgagc

SEQ ID NO: 149313 - DNA, 122 bp, Homo sapiens
cagtagtgtgggtggacgaggacagcgggtggaactggtccttctgtgactttgcagccccggcttggtgataatttttgtgcaggcttcttgacatggaaagcagagctccccagcacaga

SEQ ID NO: 149314 - DNA, 122 bp, Homo sapiens
tgctccagcagctgttcgggggtcttcatgaacttgtggcacacatcacactcaaacatccgggtgatgaggtgtatctgcagatgacgctcaaacatgttcttcgtcttgcagacaaagtt

SEQ ID NO: 149315 - DNA, 122 bp, Homo sapiens
catctgggcctggtgtagagaactccatgagctcatggaattcaagcctgatgctgtaaccgaatggaatctttaggttatttttcttgagtagggttgccagattttgtaaattaaaatat

SEQ ID NO: 149316 - DNA, 122 bp, Homo sapiens
ctgaggaaggagagcagacccaggagagccatgaaggtagtactcaggcttcggggttgccgcggggggagggtgcagcccttgggtagagagcccaagttgcagggctggaaagagggcta

SEQ ID NO: 149317 - DNA, 122 bp, Homo sapiens
cttccaaaatgctgggatgagaggcgtgagccaccgcgcccagctgcttttgctttgagtcgcacttccttgccctggggtggcctatgttttagaaaaacagaaaaacagctaatatttat

SEQ ID NO: 149318 - DNA, 122 bp, Homo sapiens
gtcgcagccagggcagggcgatactcgagctagctctcgagatcagcgagaggttacttccggggcggcaccgagaagctgaaacggaagtggcgtacggcatgcgccggtggcgtgatgga

SEQ ID NO: 149319 - DNA, 122 bp, Homo sapiens
ccttcatgtgttaactcattgcttatctcccactattactatgtaggctcattcacagcacgtgctgattatcattgttatctctagcacctgaagttgtaaagcagctgtaaagacgtaaa

SEQ ID NO: 149320 - DNA, 122 bp, Homo sapiens
gcgggcgcccacagcgcggacatggcgggctggtggccggcgttgtcgcgcgcggcccggcgccacccgtggcccaccaacgtgctgctttacggctcgctcgtctcggccggggacgcgct

SEQ ID NO: 149321 - DNA, 122 bp, Homo sapiens
gctcccctcgtgtgggacttttagaatgtagcaaccactgacacacagggaaggattatgcgatcaggtgagaaggtggccgaccctgactggctggaagcagatgcattctggtagttgat

SEQ ID NO: 149322 - DNA, 122 bp, Homo sapiens
agatgcttgctgtccatgacgttttccttgctgcgaggtgcccatctctaagctaggattcggcctcagagcctcggtgttgagcagtttcgccgtgaggccaggagagggcgggctgcccc

SEQ ID NO: 149323 - DNA, 122 bp, Homo sapiens
gcaacctgacaggcaatgacgccgttctttccgccatctttactaagggcagtcgatttccggttgccttacatagagccaggctcagaaatggaccctttgccccagtgggaacctggcca

SEQ ID NO: 149324 - DNA, 122 bp, Homo sapiens
actgtcccaggtgggtgaacgtcgaggagccgggccctctccccacggtgtcacgcaggccgcacttcatccccagcagtgagctgggatgacagcaggaggcactgtcaccagggacactc

SEQ ID NO: 149325 - DNA, 122 bp, Homo sapiens
attttagcctatactaactacagagagggaaaaccatctctactcactttgtcacctatccggcagaggtactcggcctttgccatcattgcatcgcgaatttcgctctctcctagattctt

SEQ ID NO: 149326 - DNA, 122 bp, Homo sapiens
tctccattacctctgcgacctggctagtccacatcctccccgacccgtgctcttcagcaccggtgcctgccccgctcagtgcatgtcctcatccctgcagcctccaccctgggcttcctgac

SEQ ID NO: 149327 - DNA, 122 bp, Homo sapiens
tcagaaagaggagaatgataaaatgcccctcttaattttcctaagcattcagtgagtgcgcgtatgacgcaagaacacacagaggttctgcgtgtcacccatgaaaatgtgacagcacccgg

SEQ ID NO: 149328 - DNA, 122 bp, Homo sapiens
cttctacgggatgccacctccacgaaggagaaaggaaaggaaatacaaaggcatacattccgtttctgtggaatttgctctttattttgggaccagggaaggaccacacacagccctccagc

SEQ ID NO: 149329 - DNA, 122 bp, Homo sapiens
tcaggctccaggtaccaacagctctccacaggagcaggtctgaggccgcatgcagtttgacggggtgttaccttcatacgctctctccaggtcctttcaatgggccaccaaatttacttaga

SEQ ID NO: 149330 - DNA, 122 bp, Homo sapiens
gtcaggtgggcggtgtgtctttccagaaggtcacgtggaaatgtctcgggacttgggtcccggagtgcccgtgaagcgtgtttttgctcctgaggtgcattttctcatcatccttgctttac

SEQ ID NO: 149331 - DNA, 122 bp, Homo sapiens
ggcctccacggccactctgacaacagggctgacgctgaacttcatcacccgcatgttgtgcgcgtgctcgaaggtggtgatggtgcccgtcttcaccaggaactggtccacgcccacgaggc

SEQ ID NO: 149332 - DNA, 122 bp, Homo sapiens
cgttcccggtgggcactgcggtgtgtgtagtcaaggaccaccgcggagtccaacgcttcccgctgaagagtgagattatagacattttcctttggcattggaggaagcggagtccagacaca

SEQ ID NO: 149333 - DNA, 122 bp, Homo sapiens
tcccgctgccctgctctggaagcgcctgggtatctgagagttcagagcaggctggaggggcggagcttggagggacgctggcggcccgcgcctccggtaacctagcaaccgacgccctagca

SEQ ID NO: 149334 - DNA, 122 bp, Homo sapiens
atgttctaacgatcagcaaatgccaattaatctgttaattgtctattaacaattattactcggtaaatgtcaacccagacctacacccaaagtgggcttgagggagggtggacgaagtgtaa

SEQ ID NO: 149335 - DNA, 122 bp, Homo sapiens
gccctcgtggcgttcttggaaatgcgcccattctgccggcttggatatggggtgtcgccgcgccccagtcaccccttctcgtggtctccccaggctgcgtgtggcctgccggccttcctagt

SEQ ID NO: 149336 - DNA, 122 bp, Homo sapiens
atacaaggctctatgcctgcctccactcctgccaagcgctgcaggcacctggacaaaagacgttactctagtgggaggggaaggctaatcctccctgtatttatttctcaaaaaaacttgaa

SEQ ID NO: 149337 - DNA, 122 bp, Homo sapiens
tgcttcatatttctagactaagtgatgttgcagaacaccagtattctgttctatacaatccgttcacatttctaagagcatgagcgttcatttgtcttttcaattgtttcccactttctctg

SEQ ID NO: 149338 - DNA, 122 bp, Homo sapiens
actccaggcccaacaatcctgtcttaagggtctgtaaggagtactgggtactaccaggaacgagccgcccaacagatgatgggatgaagctaactaggaagttgtttctctaaaggtcgaaa

SEQ ID NO: 149339 - DNA, 122 bp, Homo sapiens
ccccttggatcctcggtggcagggtccgggcaagtgtcattgcgagggttcaggaagccccggcctgtgatcgtgagcggtgagtgagggacgtaggtgggtgggggtcacagtcccttccc

SEQ ID NO: 149340 - DNA, 122 bp, Homo sapiens
acagccagggtacccccagctgtggatgccaatgacacgagtagccccagctcttcacctcggcttcttagagtaggtgcctgtcacctgcagccagggctcctgatgcccaagacacacgg

SEQ ID NO: 149341 - DNA, 122 bp, Homo sapiens
tggtaacacgctcagccgctgccacgctatttaaacgcgggctatggatccaggaaccggcgcgaatcaatgagatcaaatgcgagggagatgcaccgtcaattacaaacacttggacaagt

SEQ ID NO: 149342 - DNA, 122 bp, Homo sapiens
gcaccttcaacgcgccccgggccgggcccctggggactgcgtggccgggtccgaggggcacgaaacgctcctcgccgtcctcgtcgtcttcgtcgccgtccaccacctcgacgaccacctcc

SEQ ID NO: 149343 - DNA, 122 bp, Homo sapiens
cggaggctgaggcagaaggatcccttaagattagcagtttgatcagcctgggtgacatagcgagaacctgttattttattttacttttttaaagagtcagggtctcattctgtcatccaggc

SEQ ID NO: 149344 - DNA, 122 bp, Homo sapiens
aaacggcccccggcttggaggacaaggacagggcaccacaaatagggccatcgacgcggacggaatgccgcacgtggggctcagcccaacctcgaagcgctgagaaggcgcttccaaagtga

SEQ ID NO: 149345 - DNA, 122 bp, Homo sapiens
gcgtgccgcgcggccctcacggtgcttaggctgggtgcaacctagaacggaggttcctttcgtaccgtacatccaggtttgcacagcgcgcttatgtccctcctccaatctgatcttgcacc

SEQ ID NO: 149346 - DNA, 122 bp, Homo sapiens
ccttccttctgtctattatgcatttaaagtgaagtcccagatgaatcatcccagctataacggtactacttctagcttttaattaaacaaccctgtctgactaagttcaaagtacatttagt

SEQ ID NO: 149347 - DNA, 122 bp, Homo sapiens
ggaatcagttcctcggagtcccgtcgctggaggtcacagctgggaaaatcaggtgacattcgagtcagatggacaacgactcagatacagtgaagaggaaaatggttgtcctggggctggtt

SEQ ID NO: 149348 - DNA, 122 bp, Homo sapiens
gtcgaccagacacaggaatccaaatctctaagcctagaatgggcaaggctccggggctcacgccggtaatcccagcactttgggaggccgaaacgggaggatcgcttgagcccaggagttcg

SEQ ID NO: 149349 - DNA, 122 bp, Homo sapiens
atgtattagcatcctgctttctgtatgaacatcctgctttctggcacatggctaggccaccgcttaaacaaccggcgccaattcacagtgaaaaaagatctgctcaaagctggtttcagaag

SEQ ID NO: 149350 - DNA, 122 bp, Homo sapiens
agactggagttaaaatctaattttgccataacaaattatgaggtggaaatactagagaaacggatggcttgtaacatcagtagacatttctggtcccatttccatgtgaatataaagcaagg

SEQ ID NO: 149351 - DNA, 122 bp, Homo sapiens
aggggttcccttctctctgggatgcctttccagatccctgactccggggcaggctgaccgcgatgatttgaggcattctgggtagagctctcagctcccacactccttcagcagaagtttga

SEQ ID NO: 149352 - DNA, 122 bp, Homo sapiens
aaaaagccataaatggagcactatgcctcggtgtagagttaaagcattggttccatcctccgctatgctcactgtgactctaatcaagtcacgtaatctctgagcctcatttctgtcgttag

SEQ ID NO: 149353 - DNA, 122 bp, Homo sapiens
cgaacaggtcacagactagccaagtggctgagacgagtgtggggtgcgtgactctgcctgcgcgcgcgccagccccgcagctctcgccagagccttggggtcggttctctcccgcctctccc

SEQ ID NO: 149354 - DNA, 122 bp, Homo sapiens
gggaggtgtggagggagaggcgcgcggcgcttgcaggccggcgcgggttccggatgggcgcgggttcctcaggccccgccctctggccggcaggccacgcctgctggacttgatcaggggag

SEQ ID NO: 149355 - DNA, 122 bp, Homo sapiens
ggctgtttgtgttgacaggggctgacatcgccaacatctgcaatgaggctgcgctgcacgcggcgcgggagggacacacttccgtgcacactctcaacttcgagtacgccgtggagcgcgtc

SEQ ID NO: 149356 - DNA, 122 bp, Homo sapiens
agggagagaatgaaactgagtagcataaggtgaacctagagagtgtgtagtgtcacgggtcgttaaggaacttccaagtcaactgaggaattataaatgttatcctgagataatggggaacc

SEQ ID NO: 149357 - DNA, 122 bp, Homo sapiens
ttccaccacttattgggtttctccagtgtcagcaaaccaaagaattggatcttaccaatgcggctataggaaaacagcctgttgcatggtaagagtgataccatcttgaagtgaaaccacca

SEQ ID NO: 149358 - DNA, 122 bp, Homo sapiens
tctttagctccctgtgtgacccggagcgtgcgtgatccgcacctcgcgtgatccgtacctcgtgcacagttgtgcctagggagaccagttttctgccgaattgcctaggagctgtggggaga

SEQ ID NO: 149359 - DNA, 122 bp, Homo sapiens
ctggtcctttaagtgggcctgtctcgggccgtctgttatggcgcctggctctttctatttcggtaggttttgcgctgtctgtcgcttgtgcgctgtctgtccctctcttccccgtataaacg

SEQ ID NO: 149360 - DNA, 122 bp, Homo sapiens
cactccccatctcctggttggctcagagactacctgggagtggccctggcgcggacacatcgtccaaactttgtttcccccagccccgtcacagccaaacttctgggcctgggactggagat

SEQ ID NO: 149361 - DNA, 122 bp, Homo sapiens
ttgcagtcactttcctggttgaagctgttgcaagttttacaggcacgggttgcttttccacggataagttaaaaaagagaatttttttttaaatgatgagaagccgcaccgggtcggggcag

SEQ ID NO: 149362 - DNA, 122 bp, Homo sapiens
cctcagtcgggtctgttgttgagggacaagagatctcggtcttcatggggacatggggaacggcccctctactgcccttagatctgtccagcgcgcaacactagcgcacagaccacctgacc

SEQ ID NO: 149363 - DNA, 122 bp, Homo sapiens
agtccacctgatttccaacgatgccccaagggagctgccatttttgtcatgccagccttccgccaacagctgcttctgtttctgggcctgtttgccaggaagggtgcagccctttctcctcc

SEQ ID NO: 149364 - DNA, 122 bp, Homo sapiens
agaagcagacgcggccggcgcaggcgtccagggtgactcggaggcgtggctctgcagtcgcggctctgcagtcgccttggagcggctgcccttccgaccccgcctgggctatgactcatctt

SEQ ID NO: 149365 - DNA, 122 bp, Homo sapiens
aggtccgcctgctcctccgccgcagttcggggccatccacgtgcgttgcctcctgacgcccggccacaccgccggccacatgagctacttcctgtgggaggacgattgcccggacccacccg

SEQ ID NO: 149366 - DNA, 122 bp, Homo sapiens
gttccggggatcctcctcgtcctcactctggtgcgggctggagtgtcgtgacagcgagggcgacggtggcaccgaggctggccgtgggtagcggtacccctgggcctgcatacggcgatgtg

SEQ ID NO: 149367 - DNA, 122 bp, Homo sapiens
gttgatgaagatagagctggctttcaatgtagaaagaattttccttttgaatattccaaacgagagctttgcacatgtgcctcaagaactgattgtctggctccgacaggaatgcagcagga

SEQ ID NO: 149368 - DNA, 122 bp, Homo sapiens
ccatgtgaaaccagcttccagaagaagaggatctcaatgaagaaagaagggagattcaatcggaagacccagcctctgccctgaggagaaatatcttcttgtagttctacttgtgatatgac

SEQ ID NO: 149369 - DNA, 122 bp, Homo sapiens
gtactctccggcagtggcacagacccatcccgcaggtaattgaggattgtaccaaagtgacggccgctccggtcaatcagcacccaacctagtggggtggggagaggcagggggaaagatgg

SEQ ID NO: 149370 - DNA, 122 bp, Homo sapiens
aagccttttgtcctgaaaataccagcatttcctcttagggaatcataacactctgctaaccgtgagactctggctatgctagtccgccatgggctggtcattgactgtgatcctggtctcca

SEQ ID NO: 149371 - DNA, 122 bp, Homo sapiens
tggctttctggccagatttcctctggaaggtgaggtgtggccggcactgtgtgtgtggaccgcctgggaggggacacacaccctgccttcagacggcaggacctcagcctggcccgcagcca

SEQ ID NO: 149372 - DNA, 122 bp, Homo sapiens
ggccctcaggtgaaagagcagagctgtgaagaactatcagatttggaattcaatgacactcgagttctggtccaatctgaagccatggattaatctcaaagaatcagtcagtttcatgcaac

SEQ ID NO: 149373 - DNA, 122 bp, Homo sapiens
gagggcaggaaggtgggtcttcttgtgactgaaggtcccccggatctgcccctccagaggcgacttgcatcacggagatgtcggtgatgatggcttgctggaagcagaatgaattccgcgac

SEQ ID NO: 149374 - DNA, 122 bp, Homo sapiens
gaggaagctgtattgtcgcggtacgcaggaaggcaggggcagcacctccctcttcaagaacgagcatctgagcttttgggggaaacctgtagctccccgaatgccatccacagagcccccct

SEQ ID NO: 149375 - DNA, 122 bp, Homo sapiens
cccctgtgcctagcgcgtagtgagcactggataagtatgtgttgaaagaatgggtgtccgcgtgagccaaggagtactaaggaatgtgagtaaccgccccggccaaaaatattcgtttccag

SEQ ID NO: 149376 - DNA, 122 bp, Homo sapiens
tatcaggagaccaggttagaggcttcactttcctacatgccggctgtgagacttcgggcacgtgttctttcctcgttgagcctcactttgatcctctgtaaaatgagacaattgtatctgcc

SEQ ID NO: 149377 - DNA, 122 bp, Homo sapiens
tgcattctgacaggcgtgagacattgtcacccttcccagggagccagtgaggtggctgcacggagcacgcgtgtgaagattcaggagcacgagcatcaggtgacaggagggggcacggaggc

SEQ ID NO: 149378 - DNA, 122 bp, Homo sapiens
gagagaaccaaaagcatgaccagaatggttcctcagaatcaggaggtgaaacctaacattcgtactgagattggaattcagacccaagggccaggagtcagataagataataacaaggaggt

SEQ ID NO: 149379 - DNA, 122 bp, Homo sapiens
gcagagtgtgataaagtcagggaggcagttggacaggctgtttctaagggcccaaacccccgtggaatgcttcactttagccaaggtctgcaaaatggcgggggtcggtgggggttacgaaa

SEQ ID NO: 149380 - DNA, 122 bp, Homo sapiens
gaccgtcctggagatggaggagcaactggtgagccccctgggattacttccccttctagccgctgtcccaccttattccagagccctctctgtgactcctgagctgaagggttcaccctgtg

SEQ ID NO: 149381 - DNA, 122 bp, Homo sapiens
gccacagacgagtcacccacagacgctccgatgccccacacaccgtgacatgcccccacccgctgtcacacccaggcacaacgggggacagtcacacaaagaagtcgcccgacagtcacact

SEQ ID NO: 149382 - DNA, 122 bp, Homo sapiens
actcagcacccccataaataaataagtttattttagtcaatttcagatcacttcttgacgcgtccatgagacaagtaggggccttttgatccaccatattgctgaaatcactctgtaaaagc

SEQ ID NO: 149383 - DNA, 122 bp, Homo sapiens
tgcacactcgggcccctcgtgtgcacgggccctgcccaccaccccgcccgcgttcgccgccgccccactgtcctcatcccgcgggctgaccccaggattggcagaaatcagtggtctaatct

SEQ ID NO: 149384 - DNA, 122 bp, Homo sapiens
gccctttccacagtcccagaaggggcccgggctgctgtctggactcaccaccttctgccacgcctgcatgcctgcgctggatgtggccccggagaaaggtggcattcatgaatgtcttgtca

SEQ ID NO: 149385 - DNA, 122 bp, Homo sapiens
agcacaaaaggatcctggaccactttgacccactttgaggaaggctgtgttaaacctctgcggttggcttttatatctccatatgggctgtccgcagcccacggcgcctagcatagtgtagg

SEQ ID NO: 149386 - DNA, 122 bp, Homo sapiens
ccgcaggacacgtgttccgctgaatcaggaaaacggcacactgagaaggcagccgagggccgggcggtgggggctgctctagctctcgggcctggctttgatttggtcttcagctctaggaa

SEQ ID NO: 149387 - DNA, 122 bp, Homo sapiens
gtaagagtccagtttccttcttctgcctgtgactgagctgcttatcccagcaccatctatcggacagggagtcctttccccgcggcttgttttcgttggtcttgtcaaagaccagacgggtg

SEQ ID NO: 149388 - DNA, 122 bp, Homo sapiens
gggaacacccagtaacgattccttcagtgatcccggttctccaaactcttgcctcaaaggcggcctgccccggtgctgtcagccgtgaatggggactcacttcttgggaaaagaggcttttg

SEQ ID NO: 149389 - DNA, 122 bp, Homo sapiens
aattgggtctagagagtacacttcacatggcattgtttgactttttttctgcatcgctagcgatctgtgcattacaactcaaatcagtcgggtttcctggcatatgtaattgccaatgtttt

SEQ ID NO: 149390 - DNA, 122 bp, Homo sapiens
gccgggccctcaggcgccgttcccgctccagttgttccccgtagtgggcctggtagaaggcgtcaaagttgaacatcgtgcggttggcgccgggggaggcccgagaaccgtcgtgggtccga

SEQ ID NO: 149391 - DNA, 122 bp, Homo sapiens
aacacagccaggcacctgttcaaaagcctctctggtgatggcggtggaccccaaaacccacgggttgtaagagcctttgggaaagcgaattgataccatgattgcagtgcttgaagaaatca

SEQ ID NO: 149392 - DNA, 122 bp, Homo sapiens
gccatgaagcgattctgtctttgacttccaatggcaaacctgggtgatcgggaacaagcacgttgtacccttggctggacatggccaagacacaaggcattccacggcggcaagctgaccgc

SEQ ID NO: 149393 - DNA, 122 bp, Homo sapiens
agagactctagtgaaggtctcgacaagacatggcgtttgtgctggctccagcctcctccgcgagcagcctgtcaggcggcaggaacctgccactcctgggagcaaaaagctgctctcgggaa

SEQ ID NO: 149394 - DNA, 122 bp, Homo sapiens
ttcacttggcatccagcacagacagcagaacttctgcttttgctcccacctcttaatcgccgtgtccttgaacactgaaggacccaggcttagtgctcagcctcctcactccctcgtgatcc

SEQ ID NO: 149395 - DNA, 122 bp, Homo sapiens
aaattggaagatttcatgtgaaaatctagatctctggtatctcctgaaaactcacaggatcgggatctggccaacaccccctgctgcctcaccccggcccacatgccatcttacgttacctg

SEQ ID NO: 149396 - DNA, 122 bp, Homo sapiens
aagggtgggcgagatgggtcccttccagcaacggattccccaagatggacatcgcggtggcgtgctgggagtcaatattgtttggtccactttctcagttcctgtaatcagctgtagccaca

SEQ ID NO: 149397 - DNA, 122 bp, Homo sapiens
gccctgggcctggccctggtctttgtcctcacaaacctatttccccagataccttcgggacggcccggacacgccttacattaggctcatgatgtgaaactttgaattccttcacttccttt

SEQ ID NO: 149398 - DNA, 122 bp, Homo sapiens
caaacggtgtccgccgagggacaaaagaccttgacatgcgcagaaaatactaaattatagcgttactgggccaattggggcagatccccgagtagcgaagaaatagaacctgaggagtttct

SEQ ID NO: 149399 - DNA, 122 bp, Homo sapiens
gctcttcatagggactgaggggccgagtccagcatacgattcccctgcggttaccaaggtcggaactacgagtggccaatgacacaggtcaggtcagcaacagcaggtccgggagccagggc

SEQ ID NO: 149400 - DNA, 122 bp, Homo sapiens
ccacgaaggccaggtccagtcagtttctcaggtgaggaaaccgagctgacgcggggctggcggcccggaggcaggctcgggaggtccgggcctggggactgggcgggcacgctgcgccgcgg

SEQ ID NO: 149401 - DNA, 122 bp, Homo sapiens
agcgctcagaccgcgcagcccaggctgcccgcccgcggaaccacagctcccggcagcccgcggggcactcacacaaagcccagaggctgccgggagctgcagttccccaccccctccatctt

SEQ ID NO: 149402 - DNA, 122 bp, Homo sapiens
tccgtgtttgtgcttgtgcggttcggtgatgacggaggggctgggacgctgagtgtgttgcgctggcctgattttcatgttaactgtacgtttctactaaagcatccttcggtagcttggta

SEQ ID NO: 149403 - DNA, 122 bp, Homo sapiens
gcggggcgcgggccctgggtaggttcctgtggtattaggtggactggagaaagaggcccgcgtgaattaagtgtagttctcttatgcactggcggactctggtcgcccttccttgtgaaggc

SEQ ID NO: 149404 - DNA, 122 bp, Homo sapiens
ctagagagcctcgcggagctgtaaactacagctcccaagagacttcgcggccgaggcctccgcccacttccggatctcactttcattgcttccaagtaccgggaggtgctttgcttcttcaa

SEQ ID NO: 149405 - DNA, 122 bp, Homo sapiens
cccggcgacttccgcgaggtgctccagcagcggctgggggagctggagaggcagcttctgcgcaaggtggcagagctggaggacgagaagtccctgctgcacaatgagacctcggctcaccg

SEQ ID NO: 149406 - DNA, 122 bp, Homo sapiens
tccctgccatccccctcctaggacctagaagcaccattcccaccccgcagcttttgctcccgacagacacacggtcggtcaccagtcctctccgcagcccgcgccccgccgccacccgtaag

SEQ ID NO: 149407 - DNA, 122 bp, Homo sapiens
tagaaacagaaaaccacgaaagctaagagatgagaactgggactaatacagaatgcaaaccgagaggaagaaacaaccggatggctagcatagctaaaacacagggcagcctggcgcggtgg

SEQ ID NO: 149408 - DNA, 122 bp, Homo sapiens
aaagcctctgcaggtgacggtacaggccaataccaggaggtcaagtcgccggtgtcccttcggcccttaagtccagggaaacgcacggcgagggacgaggggcgattcccgcctttctccag

SEQ ID NO: 149409 - DNA, 122 bp, Homo sapiens
cctgcctccagataccatgccacagagctggctacccgtccctagggctctgtgggaaatcgaggtggggggggtgtaggctgggggagccaagaatgtcagcctctaggtctatctccggt

SEQ ID NO: 149410 - DNA, 122 bp, Homo sapiens
ccatctcagcttgggcaggaaactctacgacctcagtaccgccgcacctccgccctgtcgcgggagcccctgcaaatgcgtccgtggctcccgcgcctgcgcccaccaaaccactacgaggc

SEQ ID NO: 149411 - DNA, 122 bp, Homo sapiens
gcgaagttcggattgcaagttgcgccccgcgcctgcaggagtgtggggagggggaggaagcgggtgggctggggatcagcctccaaacaaggggtgtccccagctcttggagagcgggttct

SEQ ID NO: 149412 - DNA, 122 bp, Homo sapiens
cgtgggcagggcttgaggggccaggggactgtgtggggcctgacgggccggtgggtggggcggggcttgaaggaccggagggtgtgtgggcggggcttgataggcaggggcggtgcgggggc

SEQ ID NO: 149413 - DNA, 122 bp, Homo sapiens
ctcgtaacgccattaggtagacctattattactgtacacccattttatgggtaatgaagccgcagtatagaggggttaaataacgtgttcaaggacgcatcgacggggccaagcagacggaa

SEQ ID NO: 149414 - DNA, 122 bp, Homo sapiens
cggagggcgccgtaaacttgtcagcgggcggggcgctccggggattggagcgagcgccagcgggtggcgtttgtctctctgggttctttgtgtcacctccgggccccagcccgccggtccgc

SEQ ID NO: 149415 - DNA, 122 bp, Homo sapiens
aataactacttacttgctatagtttctctgtaatcactcttcctcccttcacttccagctcgcacctgtgccaaacaacagtctctgggtatcttgttctgcctcacactggtgccaggtat

SEQ ID NO: 149416 - DNA, 122 bp, Homo sapiens
ggcgcggtctcgtggggcggggcggagtcttatggggcgagacctcagcgcctgcgcaagcgccgcagcagccgcccgtacttccgctttactcagattttggaccgcggggccgggtatcg

SEQ ID NO: 149417 - DNA, 122 bp, Homo sapiens
ttcatggtttgggcacaaggattcgtcgccagaatagaactgaaagctcggaaatagacccgagaatacaagtatgccagaaaaaaaattgtcattttaattatctgctgccttcaaaagta

SEQ ID NO: 149418 - DNA, 122 bp, Homo sapiens
tgggggcaggatcattgtggggtctgggaggtcccgggcccttcgggaaggtgggggcaccgtccccgcaggaggagctgggggcaggggcggcccgggctgcgggccgagcggagggggag

SEQ ID NO: 149419 - DNA, 122 bp, Homo sapiens
acacaagtatttctacagatgaaccccagcacttcacacacacacacgtgtgcacacacacgtgcatgaacacatctatgtgcacaggccccaacaccagccctccctgctgacgatggtca

SEQ ID NO: 149420 - DNA, 122 bp, Homo sapiens
ggtactaaatgtggttctggggatactatcaccagtgagctgccctggaaagctcattgtcggcagaggaaacaggagaaaacacgcaacaatacagtattccaaacagcagtgggtcactg

SEQ ID NO: 149421 - DNA, 122 bp, Homo sapiens
tactactgccggatggcaaatccgggatctcggctccgagaggctcatctggcaaaagggcgcggaaaccacgggggccctgagactgagtggtccctatcccacttctctctggggcggcg

SEQ ID NO: 149422 - DNA, 122 bp, Homo sapiens
acagaagctcaggtgtggtgggggtgagcctgacgaggtgggcatcctggagagcaggtccggggaagccccgtgcagcctctgcacggcacctgctcacacccgggagacttcacattgac

SEQ ID NO: 149423 - DNA, 122 bp, Homo sapiens
aacaagtctactcaacagtataaccgcctaggaataggaatctggaatctgcgggagaaacgaccatcttcttttcctgcccctgtttgaatgatacacaggagggccagtgggactgtaga

SEQ ID NO: 149424 - DNA, 122 bp, Homo sapiens
ttggggcggttccccgggcctccaaacgcgaagccacgcccccacgcgcgtccgcctccgcgcggttctttctgacctcggcggcccccgtagctccgcccatcggagaagcgaccttacag

SEQ ID NO: 149425 - DNA, 122 bp, Homo sapiens
tgactcaagctggcaggggtctttgagcatcaaacgtgtcctccttccctctacctacttcggctccggtttctctcccgaagcctaaataaagaaggtaacagacaacacctctattggca

SEQ ID NO: 149426 - DNA, 122 bp, Homo sapiens
cttcctcaaatggagagcacctagggctcgcggatgcggctttccacgaggacagtcccgcgggtatccatcatatacaggcatctctcatcgatttgcacccccaaggtctcattcctagg

SEQ ID NO: 149427 - DNA, 122 bp, Homo sapiens
ctgttacccccagggggacggtcattgactggtcattcctgcttcctttctctgttctagcgccgtcttctctagagcagcccgggtctgtctttagctacagttctgcttttcggactcat

SEQ ID NO: 149428 - DNA, 122 bp, Homo sapiens
ctggtgaacacagcgcccagtcagaggcagacacaaggcctgcagtgacacatagcgggccggggccggcaccgtcactcctcggtggggggcggggaggggccggcagccgggggaaggct

SEQ ID NO: 149429 - DNA, 122 bp, Homo sapiens
gagccttttctgtccctccaagcagaaggaaaagaaatccagatccactccccttaccttcgtcctcatcggagacaggagcccttccatggtggcagaatcctcatgccagtttctgtctc

SEQ ID NO: 149430 - DNA, 122 bp, Homo sapiens
ggaaagcaggcataggacaccgtcgaaccaccactcccacgaggctctgcgcaggccgctcgcgttggctcagttaccatagcaacggcagaggtccctcgctcttgccgtcatcaaggctc

SEQ ID NO: 149431 - DNA, 122 bp, Homo sapiens
gatgtgaggaagcatttccccgcagacgtgcgcatttattcagctgcttggtgagctcagcgccggcctcctcctgcatcccgacagcgcaggaagccgggcctccgcgtcagtgcctggga

SEQ ID NO: 149432 - DNA, 122 bp, Homo sapiens
agagacttacatccagagctctgactcccctacattgcccatccaaaccaccaccatcaccgttactcagcctcagggactataacaaagcctcctagcagaggcgtcaagggacttcccta

SEQ ID NO: 149433 - DNA, 122 bp, Homo sapiens
atccatggggaaaggggatagatatgactccccgcatcactgggagtgtccacccctctgcgatgtggctcgtcttatcgggggtgggttggtgatatttctccccgcatcgtgggggtcgc

SEQ ID NO: 149434 - DNA, 122 bp, Homo sapiens
caccaggccggcccctacggccgctcagaaaacgcggcgagcggaacccgcacgcggaagcgccggccgcactgagcatgcccagttgcagagccgaccagaggagttttttcttttctttt

SEQ ID NO: 149435 - DNA, 122 bp, Homo sapiens
gaaagtcaggttatatattcgggtttaagaaacagagataacaaacgcttggaatataggcgacacctgctcagcctgtttcactctaaggcagcagcaccacgaatccccacgctcacttc

SEQ ID NO: 149436 - DNA, 122 bp, Homo sapiens
tagtgcagcccatactggtcagcctcctggggcacagagcagggtggagaatgaatctgacggggcaatggaagatgtttcacacaccgtcctaggtgtgctgctctgttctgacccacagg

SEQ ID NO: 149437 - DNA, 122 bp, Homo sapiens
tgcgcagcccgcggccggaagcgtcccggcagatcgcagacggggtgttgagggaccccgcgcttttgctttcttatgatttgggggctggtacctgggctagagctgaagccggcaggtca

SEQ ID NO: 149438 - DNA, 122 bp, Homo sapiens
ggtgggtaattccagaaagttttcacaggagtgaggcagaagacagaaactgcaacaaaccgccggggggtgggattaacgtccaaagctcacaccggcttcaactgattggcaggaacgaa

SEQ ID NO: 149439 - DNA, 122 bp, Homo sapiens
gggtgtggccccaccagaattctttcggcctctcccagctactattgcataagcaggaaacgtagccagagaccagaaatcctgacaccaaggagattgtttatctttcctatgccaggtaa

SEQ ID NO: 149440 - DNA, 122 bp, Homo sapiens
ataacaaagcattagctggccccaataacaaagcattagccccaataacaaagcattagccggccccaaatggcagtagcggccaggtaaagaaatcctgcatgagactgaggtgacctaat

SEQ ID NO: 149441 - DNA, 122 bp, Homo sapiens
tggccctggacgtcccccggaaccacgcctccaagccagcatccaggccacacctactgacgtaaagcccacggcgcttcagcaactcgcacagcacagacaaatctcaatcttgcagccag

SEQ ID NO: 149442 - DNA, 122 bp, Homo sapiens
tgcggggagggcgaagctggagtcctgagccgggacccaggcacctaagggggcggggcccgggagactgacagtgagggggcgggggcttagggaccaggggctcgaaggaggggccggtg

SEQ ID NO: 149443 - DNA, 122 bp, Homo sapiens
ttcttctccttatttgtaattatttagcactaaagattcacctgtatccatactagcaggcgattgtactcactttcagaattgttctgtttagaggttatggtctggaggcacaaggggga

SEQ ID NO: 149444 - DNA, 122 bp, Homo sapiens
aacttcccgcgtatcacctgatctcattcggcgtccaccaccccctggaagtgggcttatcgggcccatttttagacgaggaaaccagagtgagacgagtcacagatctgaggacctccagc

SEQ ID NO: 149445 - DNA, 122 bp, Homo sapiens
ccttctccctgacttgcaacatcaagaaaggtttggccataaaatagagattctgctattcgagtttcatttggtaaaataagttcatcattttcacaggaccactggattgccagaaagag

SEQ ID NO: 149446 - DNA, 122 bp, Homo sapiens
agttcaggccccgcagctgcggaggtgggggaccctgtgtggcagcctgctgagaggctgcgtgctccgcgcggttggaggggggaacctccagcccacctcctctttttcagccgagaaac

SEQ ID NO: 149447 - DNA, 122 bp, Homo sapiens
tcgtctctctccagtcgcagcaaagagaatttacttgcgtaggaccctaggcatttcctacgggaaaagaagtgaagacacgcccgagctaggctgccccgcccgctctacagaaggggtgg

SEQ ID NO: 149448 - DNA, 122 bp, Homo sapiens
ccaggggtgcaaaccaggccgtgcgggtgggcccgcaggcggcattgtgggtaacgtagccgtggcaccattggctaagccggccgttgggggcgtggcaacacggccgagtgggcgggtcc

SEQ ID NO: 149449 - DNA, 122 bp, Homo sapiens
gggagggggtcgagagggagtcgaggagggattccagctccagtttgggtaaatccagctcgcgttttgtctctcgctcaactgtgcagggtccagcgaaggcagagccccagcttcactcc

SEQ ID NO: 149450 - DNA, 122 bp, Homo sapiens
cagggccgagaaggaactctgaagactccgtagattgctctagaccgcctcagacactctcggcgcagcgtggagaggatttgtgcaaacatttcctctgtggaccaagaggaatgcaagag

SEQ ID NO: 149451 - DNA, 122 bp, Homo sapiens
tgcgcatgcgcagcgagctctcctccgggctgccgggagtcccaggagcgttagggggtgcgcctgcgcgccgctgctccagcgcatccgggctggagctcgcccgccccctcccccgcccg

SEQ ID NO: 149452 - DNA, 122 bp, Homo sapiens
tgcaccctctgtggtcagggagctctaaccaggtgatgccccgatgcctgggaggaggagcgcatccacaggcagttccttgcctgagatgatgtcaggcatcgggatgagggccccccctg

SEQ ID NO: 149453 - DNA, 122 bp, Homo sapiens
ggatctgtggatggaaggggctgtggaaacaggttatggcagagttggggggcggggtgacgcggtgccacccctcctggccgccctcaggtcccgctgacgtctctcttccccaccccctg

SEQ ID NO: 149454 - DNA, 122 bp, Homo sapiens
aaatgttcataacagctttatttataacagccccaaactggaaacaacccaagtgttcatcggtaggtcaatggacaaatctgttcaatgaagtggtactcagcaatgaaaaacacaaaaac

SEQ ID NO: 149455 - DNA, 122 bp, Homo sapiens
tgaggcagtgggtctcaggaagatccctggcttaatggatgcaaacgcacaatgaagtcccggcctggagtggaacctttcaactcccagtcattcttccaggaccgggaactcctggcacg

SEQ ID NO: 149456 - DNA, 122 bp, Homo sapiens
aggttgagatctcctcattcttatcttctgagtcaggcagcacaagatggtataaacactcgttcaaaatgcacttgaatattccatcccttgtccttgcatttacactgttttcttgcagc

SEQ ID NO: 149457 - DNA, 122 bp, Homo sapiens
acaggtctgcagggtgggcaagagtcgtgcaggctcacacccagggctgctggcacccagcgtggccgggacagagctcggcactgctgccacatccccgttagcaaaagggagctgcggat

SEQ ID NO: 149458 - DNA, 122 bp, Homo sapiens
cgcccggcggacccgagctcctggactcagccttgaccgacactgactctgttcccacagcggccgctttgttcgtctcctttgtggacacttagctcagcgcctgtgctgctcggctgtga

SEQ ID NO: 149459 - DNA, 122 bp, Homo sapiens
gctcctgtttcttgaaacctgaagcgggaaactggatcctgggacactactgccccctatcgcctgttggtcttcaaagaaataatcccttcaattttgcaaggcctgtggtgtcattccct

SEQ ID NO: 149460 - DNA, 122 bp, Homo sapiens
tcttttaacccttactccatctccctcacctgcacccatgaaccctcacccctgggtcagcgcaggaacctgcctttgtaccccatacccaagctgctgagcatggagactcacacagctgt

SEQ ID NO: 149461 - DNA, 122 bp, Homo sapiens
tcgatgtttcgcattgcctcagtgtgaagaaagcagtttgtaaaagtcagaaacagataccgtagggagtcagaaatagatactgtcaagggaggaattttgttgggtcctcagaaaagtct

SEQ ID NO: 149462 - DNA, 122 bp, Homo sapiens
ctgcacctgaaccccctctgcaccatgagccggccaggccacctgcctgtcactgccaggcgcccggtgcctgccccgccgcatctggagtccaccagaggcccgaggccccctgccgagtg

SEQ ID NO: 149463 - DNA, 122 bp, Homo sapiens
ctttgttcctgcctaatcgcgctgattaccgcaggggctgctggtggagaaggatgctggcggaaccaggggtctgaacaccaggcctagccgcagcagctcccagactcatggcagttttg

SEQ ID NO: 149464 - DNA, 122 bp, Homo sapiens
agccgacgaaagggaaaaggccagtgcctgtccgggaagagctcagcctagtggggcgggcgacaagttacagttgctgccttacgatggccgtggcccgtggaggcactagaccctcacca

SEQ ID NO: 149465 - DNA, 122 bp, Homo sapiens
gatgccgccctggagctggaggccaaagccgctgagggggtctccacagagcacgacctccgtggtctccgtgtgcacaatctgcccgcccggccccaccgtgctggaggctagcgacactg

SEQ ID NO: 149466 - DNA, 122 bp, Homo sapiens
ggaccctctcctcagcactcagggccaccctgcaccgctcctgatcctctgtggtccctccgctggatgcagggaggctgctgtcacctctggcctgacccacccccccccccaccaccacc

SEQ ID NO: 149467 - DNA, 122 bp, Homo sapiens
ttgacatactctttatttgtatgggcttttgaaaatgttcataagaaagtttaaacaatccgccagtgggactcatgaacagatggaatctgtctctcaaagacatgcagcaaactaaaggc

SEQ ID NO: 149468 - DNA, 122 bp, Homo sapiens
tttaacaaccagttttcaataaaaggctaagaaatgcctgtgggatgtgaattacacggccggcactgagtttatgaaagtgtctcaagactagttgagaaaaagttgcttgttactaaaag

SEQ ID NO: 149469 - DNA, 122 bp, Homo sapiens
gagttggtggatttagattgtattacctgacaggtcagtgtgttgctcacactctgccaccgcgtgtgtattgttctacagcccgtagatcattgtttttatcctcttggactttgtatatt

SEQ ID NO: 149470 - DNA, 122 bp, Homo sapiens
ctgtggggagaatgctctgggcctgacttgagtgtcaggagccctcagaggagacactgccgagctggacactgtccagcctgagcgtggccacgtcgtggtggtgtccaggctgtgcagtt

SEQ ID NO: 149471 - DNA, 122 bp, Homo sapiens
agccgacttgttggaccccggtcctgctagattccttgtctgaatgggaaatgtcgccctcgcggtttcactcagatcctcactccagactatgtccagccagaaccctgcccagggccaag

SEQ ID NO: 149472 - DNA, 122 bp, Homo sapiens
gcacatgtaggtattccccattatttgctgtcatagacagcactgccttctgtaccctgacgtgagcgccattccacagatgtaggaatatgtctatgggacagaattctcagaaaggcagg

SEQ ID NO: 149473 - DNA, 122 bp, Homo sapiens
gagaggattttggggtcctgcagccctgtttcccccatttcctggagaaggactgcagctcgcccacccagatagcatcttgctccgtgtcacgcgccgcctccgcgccgtccccaagatct

SEQ ID NO: 149474 - DNA, 122 bp, Homo sapiens
cgcagggcgaaagcggtgcggtccgaggcctcagaaagggacacgcagcagcggaagtggcgctgactcagcccggcctccctgcagtcccctggcagcggtagcagccacaggggcgggcg

SEQ ID NO: 149475 - DNA, 122 bp, Homo sapiens
tcataaatgaataattatagtataatgtggcaagtccagtgatagagataggggcataggcgatttaaggaactcagagggaagacctcaggataggcttttctggaggagataaatctgga

SEQ ID NO: 149476 - DNA, 122 bp, Homo sapiens
tagccagagaatagaaactcaggcagcgctgaaaggcccatctgtgctagcaaggtctgccgttaggggctgggcaaaaccttaccaaacacaatgaggaaagaatggtacccctatcaata

SEQ ID NO: 149477 - DNA, 122 bp, Homo sapiens
gcctctgcatctctcagcctcgtgtggtggggtgcaggtttctctcgatcctgcgtggatcgattgtaacagcagccagccgttcacagccacctttcccgtcttcggcagacaccactgcg

SEQ ID NO: 149478 - DNA, 122 bp, Homo sapiens
ctggggacacttgatttagatctccaagtgcttggtctccatctccactctagggtggagcggtcgtatcgcggcgcgggtgtggggggaatgggagttacactttttggcactcaccaaag

SEQ ID NO: 149479 - DNA, 122 bp, Homo sapiens
gtggacagggcgtggttggcaagcatgcgcaatgtgggccgggcggggctggcgagcatgcgcagtatggggcggggcggggcagggctggtgagcaagcccgcggggagcgagcgcggagg

SEQ ID NO: 149480 - DNA, 122 bp, Homo sapiens
ccgcacttaactaagaggctggcatctctgggaacagcctccgggacccgcgcgctggtgcgtgctggagggagtagggaggggtggggcggtaggcatcgccctccgccgggcccggctgg

SEQ ID NO: 149481 - DNA, 122 bp, Homo sapiens
ctgtcttcagacttgctcgcttcccagcacagaagcaggccttgtaaagatcacagctgtcgggtcacgctggagttcatatcacagtttatcaaagaggctgggttttctccctcctctcc

SEQ ID NO: 149482 - DNA, 122 bp, Homo sapiens
ttagaagccaggttttgtactttcttaccagtgctgtctccacaagaacacactatttctcgaagagaacaaggaactaagaatcactgctcagaggatgttgctaaggttgagaaatcgca

SEQ ID NO: 149483 - DNA, 122 bp, Homo sapiens
cccttagaacagtcaccaaaaatacgtaaaatattgccagctatgaagaattcttttaggcggcgccgtgacgcgcctcgggaacggtcctcggcgcgcgccgctctcttaccctcgggcct

SEQ ID NO: 149484 - DNA, 122 bp, Homo sapiens
actcctggggaagtcatctgtttctgatttttccctgtatggcacttgttctacagggcacgggtaggggttgcgatgttaaggagagagccaaagagctcagggcaaactggactcaacat

SEQ ID NO: 149485 - DNA, 122 bp, Homo sapiens
gcgctcagaggagaggcctgaggagtccagactgtccgcccgcagccgctcccgctcggccgcccctgccagcccccggagctgctccagctgccgctgcaggctctgctgcttgctgcgca

SEQ ID NO: 149486 - DNA, 122 bp, Homo sapiens
cccggccccagtggcaggggcgggccgacgagcccccacccgagcccagcgcgcagccagcggcctggcgcagcaccgggctagttcgctaggcacaaaaactcagggtggcttcgggggga

SEQ ID NO: 149487 - DNA, 122 bp, Homo sapiens
gttgccggacacgagctccgtgagtcccgggacgaggtctcagaaaatcaggctgcggggcgggctgggtcgaagggacttgagaaggtacccagagcagcacctccggacgctgcaggagg

SEQ ID NO: 149488 - DNA, 122 bp, Homo sapiens
gccgggcctcctgcaggatacccgtgcgggcagctggcacagagatgcgctgctcgcgagcgctggggggctcaggagcccctgggcctggggcaggcgcctctgggcgcgcagagggtcgc

SEQ ID NO: 149489 - DNA, 122 bp, Homo sapiens
ccccctgtcagttcccccagctgctaaatatagctgtctgtggctggctgcgtatgcaaccgcacaccccattctatctgccctatctcggttacagtgtagtcctccccagggtcatccta

SEQ ID NO: 149490 - DNA, 122 bp, Homo sapiens
tcagaaaggttttctatgcaaagtctgcggccacattggtgtccccagtgcagggggcggcgtttatagcaccttgtcccatgggggccccttggagggcgggggtcagccaatcactcctc

SEQ ID NO: 149491 - DNA, 122 bp, Homo sapiens
gaggacattcgagagggcgtggcgaagtgaagaggaacctcacgccactgcctggagctccggtgggtctgggtctggtcattgtctcgctggctcctgtccactctgaccactgtccctgg

SEQ ID NO: 149492 - DNA, 122 bp, Homo sapiens
catgacctgcctgccttggcctcccaaagtgctgggattacaggcatgagccaccgcgcccggcccatgggtgtgaatttctgcctgtgtgtgtctttttagcgtatgtgtgtctccatatc

SEQ ID NO: 149493 - DNA, 122 bp, Homo sapiens
tcctggccagtccgtacgttctgtcaacagcccaagtgtccctgctctggaaaacagctacgcccaaatcagcccagatcaaagtgccatctcagtgccatctctgcagaacatggaaacca

SEQ ID NO: 149494 - DNA, 122 bp, Homo sapiens
ggcccgggtgccctccaaattagccacaaagaagccagtctgtcaatattaattccgccgcggagattacttgttgtgggagaacaaaggtgttctggcttgagctgaacaacttaactcct

SEQ ID NO: 149495 - DNA, 122 bp, Homo sapiens
gaggtggacctgtcggagtgactgtgagggaagctgtgtgaaggtgggaggccgccgtgtcgtcagaggcagctatggcaaagggaggctccacacactgcgcccgtcagcagagcaggagg

SEQ ID NO: 149496 - DNA, 122 bp, Homo sapiens
gctcccgagcccagccccgccgggggtgggatgtctccagagtgagtgttccggagagcacgtgttagggaaggaggaggctgcgggctaacctgccgggagggagggtaagtgtgtgtccc

SEQ ID NO: 149497 - DNA, 122 bp, Homo sapiens
gttccaggtggctgagtccgaatccagtaaccaccacctcgttttggttaatctcaggctcgggtgttgtagcaacattggaaatgggaggggtttacgaagtgaacatgaggtcaggtgcc

SEQ ID NO: 149498 - DNA, 122 bp, Homo sapiens
aggcaaggcagagactgagtcttgaatgatatatttttccatatagcctctcttaaaaaacggatttacacttcagtacatctgctcatcctgcaggatctatttttaatgcataaatatac

SEQ ID NO: 149499 - DNA, 122 bp, Homo sapiens
cggcggcggcgaggacggctcggccggattggaagtgtcggccgtgcagaatgtggcggacgtgtcggtgctgcagaagcacctgcgcaagctggtgccgctgctgctggaggacggcggcg

SEQ ID NO: 149500 - DNA, 122 bp, Homo sapiens
aacaactatctgcacacagaaaaatatcatcacaagaacaaaaaatcaggtgagcaattacggtatgtgtttttaacttcttatagtggaaagagacattgataggcggcaggggagacagt

SEQ ID NO: 149501 - DNA, 122 bp, Homo sapiens
ggcagcagcagagccccagcgtgcagcacttgctctgtgcagtgtccggcgggctggggacgacatctgagaagccctggtgtcctcggttcttctccacgcggttcgccggccatcctctc

SEQ ID NO: 149502 - DNA, 122 bp, Homo sapiens
aaggcctccacggaggagagaaggggagggctcctctccgacccgggctcctctctgacccgggcttctccagcacccaccccaacgggttctcagagggtgaggaggaggtcgggggctgg

SEQ ID NO: 149503 - DNA, 122 bp, Homo sapiens
caatccacagttctaattatagggaaaactgttatttagtaaaaaggaaggaaaaggaaacgaattgtgttgaacaagagaagaggtgctcaatagaggctacgatttgtgtaaggaactgt

SEQ ID NO: 149504 - DNA, 122 bp, Homo sapiens
gccatgttcaacacctgctgccgtcacagccgcctgagtctcctgccccggcccctaccccgtcccagcctggcccgtggcgcaggacaggttctggggacccatcctctggggtaggtagg

SEQ ID NO: 149505 - DNA, 122 bp, Homo sapiens
aaactagttagaatccacgctctctggagacagagttctgcagtaagtggaaccttctgacgatggagcctggagccagcagctgggttctgtcaccctgactggggcggccctgttagtgt

SEQ ID NO: 149506 - DNA, 122 bp, Homo sapiens
ttttttttaattagccacacctgtaactatcagctttttttttcttttaaaagacactagcgaaggaatccgtatgcagattctttataaatacaataataaacccttgccctgggaatctc

SEQ ID NO: 149507 - DNA, 122 bp, Homo sapiens
ttggagtcataatttttgccccttggactgtgcttcttgaagtgcagcgtgcctggagcccgggccgtggggccactcggctacggatgctatgtgatctaaccaggacccaggaaggggcc

SEQ ID NO: 149508 - DNA, 122 bp, Homo sapiens
gccggctcgctccgcccctccccgcccccttgtccccgccccggctcagacgccgctccccggtgcctctcggcaccggctcacgctctccaggcccacctgcccggtctccacacgtgggt

SEQ ID NO: 149509 - DNA, 122 bp, Homo sapiens
aagacactgacagccacagcaggctggcggtcaggcacaggccaggcgagggccacctcccgggaccgagcaaggcgccctggtcagcctgaagacactggcactaggtctaagacggtgtg

SEQ ID NO: 149510 - DNA, 122 bp, Homo sapiens
cttcgaagggctgcagcttcactcctgaagccagcgagaccacgaacccaccaggaggaacgaacaactccagacgcgccgccttaagaggtgtaacactcaccgcgaaggtccgcagcttc

SEQ ID NO: 149511 - DNA, 122 bp, Homo sapiens
cctgcccccttgtcttgtatgcaataaatatcagcgcacctaggcgctcagggccactaccggtctccacgtcttgatggtagtggtcccccggggcccagctgctctttatctcgtgtctt

SEQ ID NO: 149512 - DNA, 122 bp, Homo sapiens
gggcaactggcttatgtgatgcgatgtgacgtgatgaaatataatgcggctattttcaaacgatgacagcacactgctgtcattgacagtgtcaggtctgatagatttaaatgggcatggtg

SEQ ID NO: 149513 - DNA, 122 bp, Homo sapiens
ggggggacaaaacccgtatccagtgcaaattaaaatcttgggagtaggtgggggctgctgcgcgcccttcaccctcagttcccctattaaggattctgagtccccatgcactcctgtcctct

SEQ ID NO: 149514 - DNA, 122 bp, Homo sapiens
ctgggcgcggagtcggggtgggcaaagctcagcctaggagccgcagaggggtgaacggggcgtgatgaaggcagagccatcgccacggtctggagccagggctgtcttttgctttctccttc

SEQ ID NO: 149515 - DNA, 122 bp, Homo sapiens
tcagcccagtattgacgcccacgagtcgcttgtaaagaccgtctgtgacgccggaagtgacgcgctctcgggcactatgtgcttccggtctccaataccgcaggagggcggtcttccccggc

SEQ ID NO: 149516 - DNA, 122 bp, Homo sapiens
cgcacctgccctgcgttggttggtggcacccctagactgcaccagcactgagtcggattccgctgcattttgggttttgtgacatcatgatggagagttagaccagagttgctttgcagtga

SEQ ID NO: 149517 - DNA, 122 bp, Homo sapiens
acagggataatgtacaaagatctgaaaatagtaaaacccgacatctaaggaactgtacttcggagaatcaattttaatcatatcctgaataagcccatactgaatgctaataatattccatt

SEQ ID NO: 149518 - DNA, 122 bp, Homo sapiens
tgaaaggccattggtcgcggcagcaaacatgctaccctgctggataactgaaaacaaacccgtcacatgggttcaggaggcggttgccaggggagcaacttctcagcacttccttttgccgg

SEQ ID NO: 149519 - DNA, 122 bp, Homo sapiens
tggactctccctgtaaaggactcccccaagtaggcagcagaccagagggcatggcttatgcggccccacaatcagccttggctggaggagcccaggctggcatgcttcctgaccttggacag

SEQ ID NO: 149520 - DNA, 122 bp, Homo sapiens
cctggatgaaaaattgccctccattggcatgtgccatcatagaataggtcgtggaaggaccgtttggttctaggaggaagagagaccagtaaaaataagcaccctttctctctctgccctac

SEQ ID NO: 149521 - DNA, 122 bp, Homo sapiens
actctaccagggctcccgggtgggtcccacagattcctgtgccctaaatgctgcctcgcacgttggtacttatgcacaggcaatatactccacctagaacgttagacttttttccacctgcc

SEQ ID NO: 149522 - DNA, 122 bp, Homo sapiens
gctcccgtgctcaccctggtgatggtggtcttgagcagagtccacagtgtctggagggctcgtctgcatctgagattcacgctgcgttgctgtgattcccggtgaagggacagccccggtcc

SEQ ID NO: 149523 - DNA, 122 bp, Homo sapiens
ccgcctatggggacgcggctgggaccgtggcccggctgcgggtttcagtagcgacatttacgcagtgcatttggtggtctttcttgccttatcaaccccggagtctctctcccctacatccc

SEQ ID NO: 149524 - DNA, 122 bp, Homo sapiens
gccaccttgcagaccgatgctacttgctgtcgcctcacccgtgccctggagaagggctcacggtggccatctgcatttagctaatctcagtgttattttctctcggcagttttctggacagc

SEQ ID NO: 149525 - DNA, 122 bp, Homo sapiens
cagcacgcccctcatcctggagcgcaccaaagacgatggtaggtccagggttcgcgccttcgggagccttgctgcctcccaggttggcctttccaatgcaaacaatttggattgttgtcgct

SEQ ID NO: 149526 - DNA, 122 bp, Homo sapiens
ttattcataacaataggctcctgtttcagtatttcctggtgcggcgtaccacacctacagcggtcgagtcacgccaggcactgccaagacgccgaaaagttctcccgcagcaggccggaggt

SEQ ID NO: 149527 - DNA, 122 bp, Homo sapiens
aaaatctccatccatccaattctcagtttgggtttgtttttctttaccattgtattcgtccgttctcacactgctatgaagaaatacctgagactgggtaattataaagaaaagaggtttaa

SEQ ID NO: 149528 - DNA, 122 bp, Homo sapiens
ctcctaattgacctacttaaactcgctattcatcaaccacttgggcatcctgctgtcatccgttatccaatatgtttggctagtgagtggagttgggttacaacagcattattccaaaaatg

SEQ ID NO: 149529 - DNA, 122 bp, Homo sapiens
ttctggaatacacactacccactgcaaacctctggctgcaggggtcggctcagttgctagcgataccgttgctaactactcgcctgaaagtgacacctgtgatctaaccctggctgctagat

SEQ ID NO: 149530 - DNA, 122 bp, Homo sapiens
gagatcttggctgagaaagcaaagcgtgatgaccgtggggaccagagctcggactggtaccggccggaaaggccccgacgaacttaccgtacagggcagcctcccatagtcctgccctcgga

SEQ ID NO: 149531 - DNA, 122 bp, Homo sapiens
tctacatgtggagaggattaacatttggtcgaatgcctccttctgagaaggagcccagttcggcgctcgggagggggaggcaggttcgagacacggatcgcattaaccccacaaagccggcg

SEQ ID NO: 149532 - DNA, 122 bp, Homo sapiens
ctcccgggtcccctctccttgcaccgcccccctccccaccctgaaagaggcgcaccctgacggggcagacacagcgctctcgacacggagcacccttctagcttcttcgtctccaggactga

SEQ ID NO: 149533 - DNA, 122 bp, Homo sapiens
ctctggataaggagtgcgtgcgagtggctcccaggcagacagggtgtctagaaggctacacgctagggaaggtggctccttggatttaaagaggaggaaaggagggggcatctaaactaggc

SEQ ID NO: 149534 - DNA, 122 bp, Homo sapiens
ggtagaagagagggagctgagacttggcatcctaagggacatcctaaacagaaactccatcgaagtacattctctcagccttctcatttgaaagacgaggaaactgtgagatagagatgaga

SEQ ID NO: 149535 - DNA, 122 bp, Homo sapiens
caggcatccagccccacgctgggacacgcggccctgtgggtgtcacataggccgaagggacgctggctcgtactggaggctggggtgggtggcccgtcaccatacagggtctggggtagcac

SEQ ID NO: 149536 - DNA, 122 bp, Homo sapiens
gcctgtgctttgaatggtgaataccctcggcgggaggcaggcacctgatgccactgcccccgccccacctgcccccgccccgtttctcagatcacacaggcaggctgaggagcgcttaacac

SEQ ID NO: 149537 - DNA, 122 bp, Homo sapiens
ctcctatgcatgctctgggttcttatgggttcatgtctgacatctgggaagatttcttcccgtcttcacctacaatcctatttgacttacactgtcatcccaaccgagtgttttaaaaatga

SEQ ID NO: 149538 - DNA, 122 bp, Homo sapiens
gggtgtccctgctgcctcagttcgggggagggcggcgaaggggatagtatgggttttatacgtttccaagtataactttaaattttagttaagcagttactgattaaagtcatttttaattt

SEQ ID NO: 149539 - DNA, 122 bp, Homo sapiens
taatttgtcatgtgagtgagtcattttggaagcagatcctctaccctcagtcaggccttccgatgatttcagcccccagcctttgagtctgccccaaacaccatgagtagagacaagccctt

SEQ ID NO: 149540 - DNA, 122 bp, Homo sapiens
tcaaggtttctctgcatctgagcaggcgtcagcgcttcattccgtctgatgaatgagtcacggtcccctgcacatacctggcattttgtgtatcacgcgtcctctgtggatggacatttggg

SEQ ID NO: 149541 - DNA, 122 bp, Homo sapiens
agactggacgggatcacttccggtggggaaagtcccacctcttcggggcgagccgggtggcgctggagccgcgccctgctgagcgagcgagccggccggggacggtttcgggtcgggactcc

SEQ ID NO: 149542 - DNA, 122 bp, Homo sapiens
aatacttgctatcattaccattccctgcccccactaagactccttccactcagaatattgcggcagaatattaatagctaatattcggccagtgtttcctgtgtaccaccatagtgaatatt

SEQ ID NO: 149543 - DNA, 122 bp, Homo sapiens
cagggagggtggacagtggcccaggctgaggggtgccgggcccgcgcggaaccatagcaacgcggagctgcagcctgggcgcggggcagacactaccaagtgaccgggcgtggggaggccca

SEQ ID NO: 149544 - DNA, 122 bp, Homo sapiens
gctgggtttatggtgggcgctccacaaacatctttgtgcgaagggacttcttttatccctcgtctttgtctctccctgtgttggagtctgcgtgtgtgcacgatgctcacatgtgcatctgt

SEQ ID NO: 149545 - DNA, 122 bp, Homo sapiens
ccccctataagtagcagagggcgtgacggtcacgctctagcggaggcgaagagtcgcgaacgcgcgggacttcctttccctgcccaacgttttactattaaatagatggtttcgtgtgttta

SEQ ID NO: 149546 - DNA, 122 bp, Homo sapiens
gtggccagcccaccagcccaccgtcccggtgcagcagtgcctctccagcgacagctccaccgcgagcctggcgggctcccgaccttgctccccagcacgtcgtctccaagccacggtctcac

SEQ ID NO: 149547 - DNA, 122 bp, Homo sapiens
ggctggtggaggagtcccggtactcacaggggggacgaggggaaacccttccattttgcacgcctgtaacatccagccgggctccgagtcggtcagatcccctgcctcggtgggggccaatg

SEQ ID NO: 149548 - DNA, 122 bp, Homo sapiens
cggcgtgagatccccatcaaccttccccgtgtggggtctgagcgacccgcatccgcgaggcgttttctctgagagtctcagagattccttggcttggagaagtcctggacccgggtccagag

SEQ ID NO: 149549 - DNA, 122 bp, Homo sapiens
cgccggtcccaggccgccttgctatgacacgggtttccagtgaagcccaagcggattccacggccccacatcaccggaggagccaggctgccccgggatggatggggtccgcgcgctccgag

SEQ ID NO: 149550 - DNA, 122 bp, Homo sapiens
ctctacgacaagatcctctcccttagggcacattcttaacagctttgacgtgtataaaaacgcagcgccctgcagaggacacatgccgtgttgccagtgccaccgcaacgtcattcggcggg

SEQ ID NO: 149551 - DNA, 122 bp, Homo sapiens
atgatcttatttttaccttcctgctcctaaactaaacgatataaaaagcttagttctggccgggcgccgtggttcacgcctgtaatcctagcactttggggtaacaccgtgaaaccccgtct

SEQ ID NO: 149552 - DNA, 122 bp, Homo sapiens
ccctccttccccgggctccgggagccgcccgcgcgttcccttagcagccgccccacccgccgctccccgctcccgccccgccgcgcccgctgcaaactttggcctctgcagccccggcatcc

SEQ ID NO: 149553 - DNA, 122 bp, Homo sapiens
ggctgctgggctccaggggagggatttcctgcttaagtgtcgctgtgacggcctgggctccgggaggaggcgcagggatcctcggaaaggcctgtggtgcggtttggtggatttggggcgca

SEQ ID NO: 149554 - DNA, 122 bp, Homo sapiens
ccgacccacagttcctttggaggcagcacagatttcctggcagccagtcccagggtctttcgttgctgccctcctgtgacctctagacattgctctcctgggccacataggatttgtttgtt

SEQ ID NO: 149555 - DNA, 122 bp, Homo sapiens
gacccctcaggcgccgccatcttgcttatcgtatccgtatggtggccgaatccatatgttcgccgggaacatggccgcgctctaatgtggctttcccgagggcgccgccaccttgtcagtag

SEQ ID NO: 149556 - DNA, 122 bp, Homo sapiens
ccccactttgagatggggctgttgcccctggatgatcacatttttgtacaagggaactcccggaggctccttccgtcccggcctcacctggatcccgggaaccgcccgctctgtcccgccaa

SEQ ID NO: 149557 - DNA, 122 bp, Homo sapiens
gtgggagcaacccgagtgtccgctgatgggtggtgggtaagaagctggggcccatccacacggtggaataggattcagcctggaaaaggaaggactttctgacgcacgctgcgacatgcacg

SEQ ID NO: 149558 - DNA, 122 bp, Homo sapiens
ggctgcctgcaggacaggtgccggccaggtgcctaccgtcaggtttcctgtctgaggtgacgtggccggcagccaagtgtgcacacgtctcctccgagccactctctgctgggggtggggaa

SEQ ID NO: 149559 - DNA, 122 bp, Homo sapiens
gaggctgcccatcctggcgtggctgcccagctactccctgcagtggctgaagatggatttcgtcgccggcctctcagttggcctcactgccattccccaggcgctggcctatgctgaagtgg

SEQ ID NO: 149560 - DNA, 122 bp, Homo sapiens
agaccggggggacttggctggactctcgttcctggagatttagggccatcttcccagtcccgctcgctgggcctcggggtgctgggcacccggccgggaaccactccctcagtctgggggac

SEQ ID NO: 149561 - DNA, 122 bp, Homo sapiens
cagcggccacccacggagggcagagcagccccagggcctccaggcctggccagagcttggcgagctccactgcatctggagaaggggctgtggcttgcagtggcccagacttagcccctaac

SEQ ID NO: 149562 - DNA, 122 bp, Homo sapiens
cctgtgggtcttcatggccgcattcttgtggcctctgtctccgagcctagcacggcctcccgggtggcatctgagcgctgtgtggtatctgatggatctctctgatcataggtgtgggccag

SEQ ID NO: 149563 - DNA, 122 bp, Homo sapiens
ttacaggcacgtaaactctctacctacctaaaaagtcactcaagtactgagtatcaagaccgtgaggatgttggaaccccagtttctgtctgttcctcactcattcactcatccatcaaaca

SEQ ID NO: 149564 - DNA, 122 bp, Homo sapiens
tgagaatctaacgccggcactaatctgacctgagtggcgctctggtggtcacgtgagcaacggggaagcggccgtaagaacagatgaagcttcactagctccccagccgctcgtctcctgct

SEQ ID NO: 149565 - DNA, 122 bp, Homo sapiens
cctgcgcggggctggggcccaggagcatggacgagaggcaccagggcgccgctgcttggtcgcacaacgatgcggcgccgtgtcacatggtggcctcagcgcggccgccgggatgtcgcccc

SEQ ID NO: 149566 - DNA, 122 bp, Homo sapiens
cactggctgttctgaccttggatatttctaatgcctccccagaagatgggtggtactcagcgggcaagccaactgccctccacccctgcaaaatccagctgattgagggaagaactgtgtag

SEQ ID NO: 149567 - DNA, 122 bp, Homo sapiens
agaacagaaatttacccagacagtctgcctccagagtctatactcttacccaccttattacgctaacttactgctccttaagaaaatgaaagaaatgcaaaatccatccaagcaatgaagaa

SEQ ID NO: 149568 - DNA, 122 bp, Homo sapiens
cccggctgcggagagcccgccccacagatgtatttattgtacaaaccatgtgagcccggccggcccagccaggccatctcacgtgtacataatcagagccacaataaattctatttcacacc

SEQ ID NO: 149569 - DNA, 122 bp, Homo sapiens
aggacagaaatctcccaccgcccccttctggtatgcaagtccccagcagcggccccgtgacggtctatgagctggggacactgctcttggcagtacacctcatgtctttagagcagaggccc

SEQ ID NO: 149570 - DNA, 122 bp, Homo sapiens
gagatgacatttaagatgtgccttgaaaaacggatataactgaaggactttaaccatcagcgcggggttggtacgggcagggggagctcgccgaagagggaggggagagtgggtttgccgga

SEQ ID NO: 149571 - DNA, 122 bp, Homo sapiens
cgcgtccccgcgcatcctgcggctcgagctcctccgaaggcgggggcgcggggcccctcccgcagtcctggggacgacaaaagtctcctggcactgggggcaagagaccagaaaaaggagtg

SEQ ID NO: 149572 - DNA, 122 bp, Homo sapiens
gtagtgcagggctgtgttgccgttgctgtcggcgatgttgaccacgtagtccagcagccgcgcagacatggcccggaacgtgaccaggtgccgccgcaccagctcggggtgtgcgtcgctgc

SEQ ID NO: 149573 - DNA, 122 bp, Homo sapiens
ccttgcccctcgactgtcccctcatcgctccccgtcctctattccctcccaaatagcccccggcaaataggttacacatcttcacctgtcccagaggtggtgactgctctagtgactgacgc

SEQ ID NO: 149574 - DNA, 122 bp, Homo sapiens
cgtatagacctgcacatgatccggccttacatgaaagtggtcacccacggaggtgagacccgccccccggtgcccccttggggctccagcccggcccactgggcaacagggggttcgtcagt

SEQ ID NO: 149575 - DNA, 122 bp, Homo sapiens
acctcgtgatccacctgcctcagcctcccaacgtgctgggattacaggcgtgggccaccacgctgagccagcagttttcattatttcagaagcagtggcgctggtccctctaatgagaacag

SEQ ID NO: 149576 - DNA, 122 bp, Homo sapiens
ctatgatcgtgaccgggctatggccatcggtgaacgctggtcataagcgatttgtgtcatcgtagtgcctgacgccgggagacaagcttggggaaatgccttttttctgaaacatttcctat

SEQ ID NO: 149577 - DNA, 122 bp, Homo sapiens
ctcccgcccgtaggcagcctgactccaggccaaggggcagcggagagcttcggggctgcgcgcaggagcgcacggccaggtgggctttttatggcgcgggccgaggaggtcattctttttag

SEQ ID NO: 149578 - DNA, 122 bp, Homo sapiens
aaagtcttggaagagactaggcgaaaggagggaaggattgtacatggaagagcaagggtgcgaggtgaagctaaagagaaagtgaaggcttcaggggagccccctgggttcggggaaaaggg

SEQ ID NO: 149579 - DNA, 122 bp, Homo sapiens
ctgaggggacagcgaatctaccattgaaccgtgcacgggggacatggacaaaatgagacgcgacagggacaagagcattttgctctgcttccaggaaacatcaagtgagtccgctcctcagt

SEQ ID NO: 149580 - DNA, 122 bp, Homo sapiens
ttgccacagaattttcacctgcaaacacagatattcttttcttttttaatgacagagtcacgttctgttatccaggctggagtgcagtggcgtgatcttggctcactgcaaactcctcccgg

SEQ ID NO: 149581 - DNA, 122 bp, Homo sapiens
ggcgctgacccccaggagctggggtgccgaggggcgcgggccacagcggtgcgagccagtcgggcgcccgcgcggtggggcgcgcggcgcggggattggcgggcgctccccggtgcccgcag

SEQ ID NO: 149582 - DNA, 122 bp, Homo sapiens
tgacaggaaagacaacagacaaatcagttagttctcttctgctgtcttcattgggggaggcgggaagttgttttgggtttttgtttctttgagtaaatggtttactgcgctacaaatgcaca

SEQ ID NO: 149583 - DNA, 122 bp, Homo sapiens
cccgcgtgcgcaggagggggtatccaaaacgcggatatataccatcaggtaatgaacactcgctcttgccagctctgagctttgacacagatttagaccgtcctaacttccaagactggggg

SEQ ID NO: 149584 - DNA, 122 bp, Homo sapiens
gagggaggcaggaaatttcttttgaaataaagtgctggagctgaattctgcattatttatcgttgctgctgaaaccacctataaaagacttgctggctaatgtgcattgtcatataatgtac

SEQ ID NO: 149585 - DNA, 122 bp, Homo sapiens
tttcctatgactgatgaatggatcatcacctgactcataggctcttttgctatggatcaccgaagtgcagcttttaaaattcagtaatgtggcacccagctgctcagagttttaatatggag

SEQ ID NO: 149586 - DNA, 122 bp, Homo sapiens
tggaacgggccgtcgctgcgggggacagcgttccgaggcagttggtcctctccgggatgccgtaggcatcagctgaccggcccagcccacgtgactacaggggcacttgatgggaatcatgg

SEQ ID NO: 149587 - DNA, 122 bp, Homo sapiens
accaaggggagctgggaccgcctggggctcctgagcccggctccgcgctgcgtaacccggcgacccaccccagcagcccggcccggccatggcggccccccgcccgtctcccgcgatctccg

SEQ ID NO: 149588 - DNA, 122 bp, Homo sapiens
tatcctgccccatcttgggaagccttgggtctctagtggggggcctcccagttccaaccacgcagaattctgacttaaatcctgcctctgccctgtagcagctgccatggactcttagtgag

SEQ ID NO: 149589 - DNA, 122 bp, Homo sapiens
ccctcgtccacacccctgacacaggcacataaccagtttccttttcggtgccgtcacaggcgggccacgtcgcaggataggtttttctacacatttaactgctaaaagggggaaagttccgc

SEQ ID NO: 149590 - DNA, 122 bp, Homo sapiens
gatgatccacctgccaggccctcccaaagtgcaaggattacaggcgtgagccaccgtgcccggccacggatactcttcatggtgtgtatcatgaggccctaggacagataatgaaggcttcc

SEQ ID NO: 149591 - DNA, 122 bp, Homo sapiens
aactcattttgcctcagcatgctgcataatgaaagcatttgttctcattctctcaccacccgccaccctactgcttcagttccaggccattacacccaaagtctctgacagagaaaaaggag

SEQ ID NO: 149592 - DNA, 122 bp, Homo sapiens
tgggggtaaaaggaagcaagtctctggaagcagaaccagcagcactgctgatcattgggacgtggagaaaggcgaaggctcagggtgtcagcaaacttcctagggtgggtgagggttgccag

SEQ ID NO: 149593 - DNA, 122 bp, Homo sapiens
gagactctgtttcaaaacaaaaaaacaagactttttgcaaattatccattgtcaaaactccgccaaatacatctcccagcccgccagggagcagccagcagaggccgcaagctcggccaagc

SEQ ID NO: 149594 - DNA, 122 bp, Homo sapiens
aaggacagtggagtctggcatcttattggtaagtggctgacattcctttgccagtgactgcgttctgtgattgtgcacttcatctcccagccacttaggatttttgacacactctgttctgc

SEQ ID NO: 149595 - DNA, 122 bp, Homo sapiens
ccgcgcgctagatggagaggtcagcggcgaacccagctccatggcctagtctcgtcagaccgagcgcggaccctgccggcctccgttctcttccgcttgtctcaggtaaagcgcagatccct

SEQ ID NO: 149596 - DNA, 122 bp, Homo sapiens
catacaaaggtgtattatctgctgtcggttcccagtcaaaaaagtgaacaacactgtgtccgaaggtaacatccttcccagtgtccagaattggttccttctggtgggttcttagtctcgcc

SEQ ID NO: 149597 - DNA, 122 bp, Homo sapiens
tttaatgtctgcaaatcattatcgtgccgccgatgtattcaggtcatttctgcgagttaccggcttcctgtgagccatcagacacgactctgcggcactcacggagtctcgttgcagactta

SEQ ID NO: 149598 - DNA, 122 bp, Homo sapiens
ccggcctaggcgccggcccagaggctagcccaggggctgaccgaggggaccggaagtgcccgtgatcctaatcctcgggaaccatctggcggcgacttgggtccactgcagggggctcccga

SEQ ID NO: 149599 - DNA, 122 bp, Homo sapiens
gattacacactcctgtatgactccacgagctcccgggtgtttgatcaaaagacagcttaacgggggctgaggaaggagccaagaccggccctgagctgaccagggaaattgtaactgagcta

SEQ ID NO: 149600 - DNA, 122 bp, Homo sapiens
ctcagagaagcccgtgacttaccccagaccacgcagcccgtgtggggagtggtcaggggccggggtctctcccagtgccatgtcaggctgagcagatcccttcgtggccgagggctcgggat

SEQ ID NO: 149601 - DNA, 122 bp, Homo sapiens
cccaggggggcctcctcctaggataataaacaattttgcagaattggactccccctcactcgcagtagagcccgtggaccgtggccaccgcgaagagcgaggtgttggtgtaggagaccgag

SEQ ID NO: 149602 - DNA, 122 bp, Homo sapiens
ggagatgctgaggacactgaaggggccttccacaggggaggtcagcatgcacttggtggccggagacagccccggttctggtcctcacctgcccgcaactgccttcatcattccaggtgagt

SEQ ID NO: 149603 - DNA, 122 bp, Homo sapiens
tgcatggggcaggcaccacccagcagctgtagactgttgccactgggtcccagtgggtcccgatctgatttttctcaacagaagcagaagaaaaaatctggagttttttttttttttttttt

SEQ ID NO: 149604 - DNA, 122 bp, Homo sapiens
agagctgggactgggaccaggtgtgagggcaccaaggtctgtagtctttgcacatcccggcgcagcctcagtgagtaagcagaactcaggctggtccacccatgaagccaggcagcacccgg

SEQ ID NO: 149605 - DNA, 122 bp, Homo sapiens
cacctcattcatggcctcatcaacgtccgtcctcattgaggtgccgagaagccctgtctgcggagggctacctgggctcccagacttggcaccagaacacccgccagagaggggagctggca

SEQ ID NO: 149606 - DNA, 122 bp, Homo sapiens
tttggaggcggtagcgttttcggcgtcgagactggaggctgagtgctaaactgtgtggggcgcggatgggatccagctgttagtcgggtaggcataggtaggaccgctgccctgtggggagt

SEQ ID NO: 149607 - DNA, 122 bp, Homo sapiens
tggtttcactatattggccaggctggtctcaaactcctgacctcggttgatcactcacctcggcttccaaagtgctggggaaattgattttctatagcattatgttactggatatttctgta

SEQ ID NO: 149608 - DNA, 122 bp, Homo sapiens
caggcgctggatgtgagggctctgggcgaggccagcgcggaactacatttcccaggcggccgcggcgggtgcgcctgcgcaatgcgcgcggtgatggagcgctaaccgggggcgcggcggcg

SEQ ID NO: 149609 - DNA, 122 bp, Homo sapiens
acctcaggtgatccacccacctcggcctcccaaagtgctgggattacagacatgagccaccgcgcccggcaatgaagactccttatctcagggtacagagtagttacagtaaaaaaaatgac

SEQ ID NO: 149610 - DNA, 122 bp, Homo sapiens
cagcgctggggctcacccaggggaccggagcccgagggagggacggcggccggacgagggcgccccctgggggagcggacagggacacacaactagcccaggatacagacacacctggaccc

SEQ ID NO: 149611 - DNA, 122 bp, Homo sapiens
agcctgtgtccggaaaggacttcaagatgtcggcgaccatgagcacccaggggtccgagtcgaggctggcgagctggatgatctccattagggcgcccttcatctgcaaaataggatgctgc

SEQ ID NO: 149612 - DNA, 122 bp, Homo sapiens
gtgtggatgaaagagagaggaaggacccgtgctcaggacgggatggtttgcatcccgcctcggacatccgggactctcagggcgtttgatcccacccccacctggcaaagcggcaggttagt

SEQ ID NO: 149613 - DNA, 122 bp, Homo sapiens
gaggcagtgtgcgtgggtgacagcatcgaagccatcaacgaccactccattgtgggctgccgccactacgaggtggccaagatgctccgggagctgcccaagtcccagcccttcaccctgcg

SEQ ID NO: 149614 - DNA, 122 bp, Homo sapiens
tcggattccaggcccaggctgcacatagttcaggatgactgaaggctaggttgctgggggcggggggcggggggggggatggaaaggactagcctatgcagggtctcacaagcctttccaag

SEQ ID NO: 149615 - DNA, 122 bp, Homo sapiens
ggctctgtcccttattggctgggtcagggggcgtggcgcggcttgaccaatcgcgggcggcgcgcttaggcacgtgtgtggacaggcctgagaatcagagaaaccttctctggggctgcaag

SEQ ID NO: 149616 - DNA, 122 bp, Homo sapiens
ggtgtcctggtcttcacccactagtccacacgggctgcttctggatcctgcctggcaaaacggttcaggactggtggttttttctttttctcttcctttccaggccccctcttgcatctctg

SEQ ID NO: 149617 - DNA, 122 bp, Homo sapiens
tcacatgcagacaagcaagaaactcacctttgcagagaggaacaagattacaaatctcaccgcagtgctcagcagttcaggctcccctgtggctcccaccaatgactgggcagacattgcaa

SEQ ID NO: 149618 - DNA, 122 bp, Homo sapiens
atcagaggcgcatcggcttagctgcgaaaagagacacgtttcttctccaggaggcccctccgctgatttctgggtaatgcgtagttttttctcctgtgaaaagtgctgcgggccggaacacc

SEQ ID NO: 149619 - DNA, 122 bp, Homo sapiens
ttcctgccctcttgctggtatttctttcttgttttcctattagaagttgcttgagagcaacgtttgtgccttgattcctttttggtagagtcggtactcaacatggtttttactcagtgagc

SEQ ID NO: 149620 - DNA, 122 bp, Homo sapiens
cacacagaacccacacgctcgccagagtgtgcacacacacagagaacccacacgctcacccgagtgtgcacacacagagaacccacacgctcgccagagtgtgcacacagagaacccacacg

SEQ ID NO: 149621 - DNA, 122 bp, Homo sapiens
atctgatcctcccaggagcccacaaggtaaacaggattattcccatttaacagatgaggacgtggaggctcagagagcttgtgacttgcccagagtcacacgaccaggaacaggcatctgat

SEQ ID NO: 149622 - DNA, 122 bp, Homo sapiens
gccgccgccaccctgccccctcgctggagctgctctcacagccttggctctgggtgagggcgcggcccgggctggatcactcagacgcacgaggtcccgagctagtgacagctgcaggactg

SEQ ID NO: 149623 - DNA, 122 bp, Homo sapiens
gcgttcactccgtacccatcaagaaggcacctaatgcgtgtggggcccgaaggggcctggcgcgctgctgactccccaagcggcccgcgaccttgggcggacgcttccaggcgactccggga

SEQ ID NO: 149624 - DNA, 122 bp, Homo sapiens
acctcaggtgatccgcccgcctcggcctcccaaagtgctgggattacaggcgtgacccaccgtgcccagcccgcagttttatttaagggcagggtttgattttaaacacaaacttaactccc

SEQ ID NO: 149625 - DNA, 122 bp, Homo sapiens
gacaatacccattcagatgaacagaggctcagctgggttaatcatcagttctgggccaggcgcggtggctcacgcctataatcccagcaccttgggaggctgaggcaggcagatcacgaggt

SEQ ID NO: 149626 - DNA, 122 bp, Homo sapiens
ctaggttataggtagatcacttaggatacgtgagacctgggggttaacttaaaactctggcgcatctgtcgcagagaagaggcaaagcgcgcgtccagacaccgccgaggacgccctccagg

SEQ ID NO: 149627 - DNA, 122 bp, Homo sapiens
ggctagggaccttgccagagctggttctgtgtcgcgcgtcagaagcgctagaggtcgttgcgtggcgtgggtggctcggggagtgggtggctgagcggagctggggtccctggccagaggcg

SEQ ID NO: 149628 - DNA, 122 bp, Homo sapiens
ctgtcagtaggacatgagttagcttaacaggggcctgcaacattaaaacattcaataaatcgcaactgctattattttgtcctacaggtttaaggaaaagttgacaactgtcccccatgctg

SEQ ID NO: 149629 - DNA, 122 bp, Homo sapiens
ctaccaaaaaatacaaaagttagctggggacggtggcacgcgcctgaggtctcagctattcgggaggctgaggtgggagaatcgctagagcccaggaagttaagactgcagtgagccgtgat

SEQ ID NO: 149630 - DNA, 122 bp, Homo sapiens
cccacaccctcccagggccggctgcccgtgaagtggatggcgcctgaggccttgtttgaccgagtctacactcaccagagtgacgtgtacgtgtcctgcagagctcaggcttcaggggtgga

SEQ ID NO: 149631 - DNA, 122 bp, Homo sapiens
gctgtggcgtcgttcaggcccggcttagcggtgccggggcgagggattaggggcagtggccgcacctggcggggcggccgcagggctaatgctgtgtgaccgccgcggccccgcccgacaac

SEQ ID NO: 149632 - DNA, 122 bp, Homo sapiens
ctcgatctcctgacctcgtgatccgcccgcctcggcctcccaaagtgttgggattacaggcgtcagccaccgcgcccggcggtgcaggaattttaaaactcaccaaaatacgccctccttca

SEQ ID NO: 149633 - DNA, 122 bp, Homo sapiens
ggggagattaccgtttaaaggcgaatctggcacgtgtacacgcacatttgatgacgtacccgtgcaatgcactacagaggaaggaacgcccaaagcagcctggcaacgtgtaacgcgggagg

SEQ ID NO: 149634 - DNA, 122 bp, Homo sapiens
ggagctgaagccacagacacagcaaggttggggtccgcaccggaagtatccagtggtagacggcggaacccttaagaaacggacgccttcatgcgggcggctggagaagcgggggctgggca

SEQ ID NO: 149635 - DNA, 122 bp, Homo sapiens
ccagttttaagattctctaactttttcaggactctagctttttcttttcattgtggtggacgccattattagagttcaggactttgaataattttgcatttttatcttggtggaaatgtagc

SEQ ID NO: 149636 - DNA, 122 bp, Homo sapiens
gtctgtaaaagtactagaagaaataccttaacaaagtgaaaagtggacccaagagtaagacgtggatgccagcaagtaaatcagtctggtccgttaaaagaaaatcaacctgagagaaatcc

SEQ ID NO: 149637 - DNA, 122 bp, Homo sapiens
ggagcgaagggagggaatttatacaaccagctgggggtggggcagagaaggaggagggcccgggctgtagcccagagtaaactactcagggcagctggccaggatactctcaagtggcctag

SEQ ID NO: 149638 - DNA, 122 bp, Homo sapiens
gtgggggcgcccgggagagaacagcacctcgcagcccagaatttgttttcgctttcggcccgacagcggagaggacggcgggagatgtagtcttggcagccgcaggaagtcggcttgcggcg

SEQ ID NO: 149639 - DNA, 122 bp, Homo sapiens
tcctttccaaaaaacttgtcaaaagagtttttcctgtgtccctctgtccacacctctcatcggctgctcagcctactccaagcacatcactcaaacttctcttgtcaaggacactagtaagt

SEQ ID NO: 149640 - DNA, 122 bp, Homo sapiens
gataaaaacatctctgtatttcatttcttcatccaacaataattatcgagcacctgttaacgcattggtgttacaggcactgggcatccaactgaaacaaaacagataagattcttgctctc

SEQ ID NO: 149641 - DNA, 122 bp, Homo sapiens
cacgtccagccctttatatttggttttccaaaatctggaaatccccctacaacttcagctcgcccacggacgcgaagatgcagtcctcaatctccgcggcccgagccccgcagagcccttgg

SEQ ID NO: 149642 - DNA, 122 bp, Homo sapiens
tgacattttgacatgctaactactcatgttagacaggtcttagagtcatgattaaacattcgccccactttctcactgcagaggctcaaaggtctagcaaactttaaaaaaatccccaatgg

SEQ ID NO: 149643 - DNA, 122 bp, Homo sapiens
acagccgcgccggggaccggagccggcacgggcccgcgagccgtgttggaacaggtaccgcgaccacgacaccggccgtcgcctcagcagcctcagacgagcagctctgactaagggagggc

SEQ ID NO: 149644 - DNA, 122 bp, Homo sapiens
tcgccgtctcgccctggacatggaactacgcatctgagacctgctggacgttttgctggccgttttgcaagactcaggtaatgtccactcgcagagctggagagttgactggcaagggccag

SEQ ID NO: 149645 - DNA, 122 bp, Homo sapiens
cgtgcacgttgggtgctggggggtggagaccggatcttcctcgcttgggtactttcctctcggtgtgtgtttctggccggagccgtttcgcgacggcccgggcgccccgccccaaccttcct

SEQ ID NO: 149646 - DNA, 122 bp, Homo sapiens
cccgactggaggagcataaaagcgcagccgagcccagcgccccgcacttttctgagcagacgtccagagcagagtcagccagcatgaccgagcgccgcgtccccttctcgctcctgcggggc

SEQ ID NO: 149647 - DNA, 122 bp, Homo sapiens
atggccagaccagttccagttcttcctgcaaccccagccataggcttctacgaaggggggcgggggctcccctcggtgaccacgtcctctgccccccccgccacttggctccgtggtacgtc

SEQ ID NO: 149648 - DNA, 122 bp, Homo sapiens
cgtagtgtggacggggtgaggccacaaggacagcatgggcaggcagaggccagcagtgggcgactggtgcacagctgtggtggaggcgagcggtgcggccaggaagacccctgcgctgcgtg

SEQ ID NO: 149649 - DNA, 122 bp, Homo sapiens
gcgtacatgtattggtggcgacatctcccagccaatcaggaggcgggctgggactgtgtgcgcacgtccacttggagctgcagaggctgggttcttccctccccaaccttggcgaaagcaaa

SEQ ID NO: 149650 - DNA, 122 bp, Homo sapiens
ttcgccctgcggggcttggaggtcgccccaaccttcgaaagagaccaagcggatttgcggcggagcagatgtgatgcctatccttagagggcgggttatagcaaaactccgggaccaagact

SEQ ID NO: 149651 - DNA, 122 bp, Homo sapiens
caaagatgagaggtcacccatggccaacaggcagcaaagctgggcaaattttctggtggccggaccctccccagagtggcttcagttggggagcccgtggcagactgccctgcctgctccac

SEQ ID NO: 149652 - DNA, 122 bp, Homo sapiens
taaacgaggaaaggattcgtacgccctggcggggccagaggctcacagcttgggttcccgcgagcacacgagccaggaaccgccaatgcctccagggggcgctctccctcccatcgagccac

SEQ ID NO: 149653 - DNA, 122 bp, Homo sapiens
tgaggcttgctggatccattgcttggcagtgaccaaaccaaactccttccatagtacccccggccacctccatccaccccagggccaagtactcagctgctcagcactcctacttaaggtaa

SEQ ID NO: 149654 - DNA, 122 bp, Homo sapiens
ggagtctcagagaggtaaaatgatttcttttgctcacaaatctagtatttgttttagccccggtcacctccctgtaaacatataaatactgttgttttcagattggtcgtattttcagttat

SEQ ID NO: 149655 - DNA, 122 bp, Homo sapiens
ctgtctctcttctccaattcagctctcaaccctggccctcacattttgaaagtttttttccggggctgtggtgggggagtctaaaaacatatttattgagtaatttgtttaattctcttttt

SEQ ID NO: 149656 - DNA, 122 bp, Homo sapiens
acgaggtcaggagttggagagcagacaggagaattgcttgaatccgggaggtggaggttgcggtgagcagagatcgcgccactcactccgtcctgggtgacagagtgagactccgtttcaaa

SEQ ID NO: 149657 - DNA, 122 bp, Homo sapiens
cgggaggacggctcgtggatgttgagactgctggccttggtgatcttgaacgcattataacggaaaatggatctccacttgtaagtcaccgggccgcggggcacccgggccgcagcgcccgt

SEQ ID NO: 149658 - DNA, 122 bp, Homo sapiens
tctgggtgtccgcaacccaaagtgcagctggtgtcttgacgctaccgtctatgcacaagccggcggcggcggcggagcttggaggaggcagggagattccaaataaatccactaattctggg

SEQ ID NO: 149659 - DNA, 122 bp, Homo sapiens
gcatgcagagctacgagagtctgaacgggccctgtgggtcatgccaggctgatggcttggcgtgctgctgtgttggcacgcctgatgctctgaagggtgtggctgggtgggagtgagagtca

SEQ ID NO: 149660 - DNA, 122 bp, Homo sapiens
gtgggctggcagtgtgcttcctgcacccagcgccagcccgccctggggaggggctgaacccgccctgctcgtgataaggcacaagcaagggctgccctgaaggaagctccaaagagaaagga

SEQ ID NO: 149661 - DNA, 122 bp, Homo sapiens
tgtgtcaatgctaattggacatgcgcattcgagacggctccatacggaacggaatgggaccgtggccccgaagcaacactccctcccagcaccatattacgcaaacaaaatgattcagggga

SEQ ID NO: 149662 - DNA, 122 bp, Homo sapiens
cttccaaggcttggaaatttggagattcggaagtttgttcttggatggccagaaatcctccggaggcagacggtctggggctgaaaccgccacaggccggaaaggtgcgggcgtgaacgtcc

SEQ ID NO: 149663 - DNA, 122 bp, Homo sapiens
cttgatttttaaattgctctctgagtgtagattccttgtttgtttggcaagggttcttgccgctgccgctacagcttgaagccaaacatttaatgaaagagagcgggaggggccgaatagaa

SEQ ID NO: 149664 - DNA, 122 bp, Homo sapiens
gctgtgacagggtgaggatgcatgagaagacacggagacagctgattctgcccacgtggccggcagggctccagagtggagtcgggctttggagatgctcagagtggccatggctggttaga

SEQ ID NO: 149665 - DNA, 122 bp, Homo sapiens
acagcgcccccaacctgtctgacttgcacgtcgtccgccccaagctgcccaaaccccccacggaccccctgggagctgtgttcagcccaccacaggccagccctccccagccgtcccacggc

SEQ ID NO: 149666 - DNA, 122 bp, Homo sapiens
ttagtctctggatgttttctaggtgaccacagcctcttataggcctgtcctggggcagagcggccaccttgaggtccatcagtcagtctgatcatctctgtagaacctcgaacctctcgcct

SEQ ID NO: 149667 - DNA, 122 bp, Homo sapiens
actgttaccccatttaacatgaggaaaagaaaaattaaatgtcttacacaaggtaacagccgaacagcagaatgaagtgagactagaagagacgaagtaggcaacagaaacaactggggaaa

SEQ ID NO: 149668 - DNA, 122 bp, Homo sapiens
tctaccacagtctgacctaagccagtttcaaactcagacccagcctttagtcgggcaagtcgacgatactagaagaaaatcagaacccctacctcaaccaccactttctctcattgctgaaa

SEQ ID NO: 149669 - DNA, 122 bp, Homo sapiens
gtttgttgagtacctactatgtgtcagtcacgttccgaggtcactgtgtgtatgagccaccgaaccctcctgacatgccttatgaagtggctatggtgattaacctcactttacagatgaga

SEQ ID NO: 149670 - DNA, 122 bp, Homo sapiens
tgtttggtggtctctgggctttgccgagggccggggtggcaccattttgttgacttaggtcggacgtggctgcctgagtctgcatcgatcctgcagctggaacagcatctgccctggctggt

SEQ ID NO: 149671 - DNA, 122 bp, Homo sapiens
tcccggctccgtttcctcctctgtgtattttccgcacagagagatgtctgcttcgggacgcgttcaacctaaacagaacccggtctgattggaaaatgtatttatttgaaaaatcgtaactc

SEQ ID NO: 149672 - DNA, 122 bp, Homo sapiens
ggggctcgctcagcctccggagacttttttctttgagcgcagccgcctggtgccggtttccgccgagctggagcgcgcgggccacggcttctctggggacgcagaagcgagaagcggggacc

SEQ ID NO: 149673 - DNA, 122 bp, Homo sapiens
acggcgcggcgcggggaccccgcggggaagcgagtaagggcgcgaaggatccgggctcagcgcgcagcccggcagggcccggctccgaggacgcggagccaccgacggagacgcggattcag

SEQ ID NO: 149674 - DNA, 122 bp, Homo sapiens
ataccgccccacacgcgatgacgcctttggaatagaactgcgcagctctttggagacatacggcgcatatagaggctagaaagggaacagagtaccagagggccttcccgcttcgggagccg

SEQ ID NO: 149675 - DNA, 122 bp, Homo sapiens
ggcttccacccacgagatgccgggagtccctcccaagtcccaagtaaagatgtctccagccgggcgcggtggctcacgcctgtaatcccagcactttgagaggctgaggcgggaagatcacg

SEQ ID NO: 149676 - DNA, 122 bp, Homo sapiens
accgctacagcacccaacgaaaatgggaacaacatgttgagacgctgcagcaacagcaggcgcttcccaccagctacagtcggagatttggagcgcttgtgtctgaggctcaatcccgtcag

SEQ ID NO: 149677 - DNA, 122 bp, Homo sapiens
ccggaagccaccgccctcgcgtcaactgcaatctagagcgcggcgcatcccgtgagcccgcggggaactacgactcccggcatgctccgcggccaccggaattaacccttcagggctggggg

SEQ ID NO: 149678 - DNA, 122 bp, Homo sapiens
agatacagagcaggagtccatggcacctccagaacctgtcagcctgagtatgggcaatggcgttttagtttgcaaaaccagacacatagaggccaggtttcccccgctcaacactaggccac

SEQ ID NO: 149679 - DNA, 122 bp, Homo sapiens
caaactgaaagaatacagatgattaatggcagtgatcttcctaaagtatcaactcagccacgttctaaaaatgaaagcaaagaagataaaagagcaagaaagcaagctataaaagaagagcg

SEQ ID NO: 149680 - DNA, 122 bp, Homo sapiens
gtgatggtggagacttggaagccaattaggaggcagtagtccaggtgagaaataatgccccgaacaagggcaaatggcattaggaatggaggggagcaagctgaactcaagagacccttggg

SEQ ID NO: 149681 - DNA, 122 bp, Homo sapiens
ccggcttcgcggccgctcggagccgggagcatgcgcggtgagccccctcccctgctgctgcggggttcccgcgccccaacccctgccccggacctcaggtcgctggcccctcctgccccgga

SEQ ID NO: 149682 - DNA, 122 bp, Homo sapiens
taggttcatgcttcttgaatcggggggtctacagatcgcgcccgtcttcatccaggatgccggcaactacacctgctatgcggccaacacagagggctccctgaatgcatcggccacgctca

SEQ ID NO: 149683 - DNA, 122 bp, Homo sapiens
tccacttgaacagggaaggccaattccctgtgggcctgtcaacatcaacttcagttctctcgcccttacaggaggcctctgactgtatcactattttagaaatattgctgccatgtaagctt

SEQ ID NO: 149684 - DNA, 122 bp, Homo sapiens
caggaatcttggatttgcgcgctttggtgctgacaggctttttcggccccagcgggctgccgtagcagagaagagcactgattggctgaggcagaaaagtgcccctgcctcggcgctttcgg

SEQ ID NO: 149685 - DNA, 122 bp, Homo sapiens
caggcacagcaagacaggaccgcggcaccatgccattagcatagtgtttcgcgaaggcgccgtcgcagacgagtgacgcaagcctagcgcgaccccttctttcccagtcgcgcgcatggcgc

SEQ ID NO: 149686 - DNA, 122 bp, Homo sapiens
ttggtgctgggcttaaatacagagcccatagggaggggaacttggagggtccatgaccctcgggacctaacccagcagtatctgccaaagcacccaggaaagatgcagtttttacgcacacc

SEQ ID NO: 149687 - DNA, 122 bp, Homo sapiens
ccgcgcattgcagacgcccagcggcgccaagaacccggccaagctgacttggcgactcctcgcagcccctgctctggcacgccacacctcagacgaggctttgaaagtagggcgcagcctga

SEQ ID NO: 149688 - DNA, 122 bp, Homo sapiens
tctagcccaggtacagccagtcaaccctcttcttcagttagagtcctgggctgaggggggcggcttcagggccttgacttgcccttggggagacaccgtgggacaggtgccttgggagatgg

SEQ ID NO: 149689 - DNA, 122 bp, Homo sapiens
agggcagcaggtaaggcagatgcacagagcatgtgagggtgaggacctgagaaagggcatcgtccggagagatgaataatgacagtggcaacaagaactcgttttataaacactcattctgt

SEQ ID NO: 149690 - DNA, 122 bp, Homo sapiens
cgccctttggaagccccgcctccttaggactcagaaaatccgctaacccttcaactcttacgatttggtcctctaggagactctcccagatggataggccctggtctctcataatatatcca

SEQ ID NO: 149691 - DNA, 122 bp, Homo sapiens
ttctagaattccatagtttctggaatgccagagcttctgaaacatagtagagaggggtctcgaacattaggacatctcggacacaaggatattctggagtgctcatggattaacaatattag

SEQ ID NO: 149692 - DNA, 122 bp, Homo sapiens
cgttgaccaccctcagggacttcacgctccagacagaatccgtgtaaactgtttttgcggcgctgagccaaaacctaaaagtgatagctgagctctccccacccccgcgcgctctcccagtt

SEQ ID NO: 149693 - DNA, 122 bp, Homo sapiens
ctccgggacgcgagacaccagaaacctgactctgacttcaggccaggcgaacacactttgcgcatttctctccggagctgtgtaagtcacagcggagatttcctctctgaccggggctgtgt

SEQ ID NO: 149694 - DNA, 122 bp, Homo sapiens
gcagcctcccggtcagacgaatttctcccaatcggatgaagttcaccctgggcctggggtcgcgggcgtggagagtgtcctgggagggggcagcagcggcggcggcaggccctggagcgggc

SEQ ID NO: 149695 - DNA, 122 bp, Homo sapiens
aggctctgggcagatgtcagctaaggtcacggcaggaggctgaaggggaggctcctggcacgtgactctggatcgatgccccccatgtctcccctgacctctgactgttctagatccacaat

SEQ ID NO: 149696 - DNA, 122 bp, Homo sapiens
agacctccctgcccctccggtgcctgctggttgtctggggtcaggtgggatgtggattcccgggaagaaaatagccggcacttggaacagatgacccgagtgcaggtgttaccctggtttac

SEQ ID NO: 149697 - DNA, 122 bp, Homo sapiens
tgccggggaactggggctggaacgcagtcttctgggcgaacttcaaaagttggttcccctcgccaaaaacaggctcccgacacccaagcactcacaggagccaatgggaacccagaggggac

SEQ ID NO: 149698 - DNA, 122 bp, Homo sapiens
gcacggaacctgatgtcggctcggaacccaacggcagcatggaacccaacagtacacaaccggaaccaacagtacggaaccagaactgacagcacagaacctgagggcacagaactcgacgg

SEQ ID NO: 149699 - DNA, 122 bp, Homo sapiens
ggcagtctcagtctattaaaacaattcatgcccaatcgtatcctacaaaccagaggaaggcgtctcacctgccagcggtggcaccatttcttccacggttgagttatgtggtgtgagcaacc

SEQ ID NO: 149700 - DNA, 122 bp, Homo sapiens
aggggggcgctggcaaactgctgtttgagaccgagaagcgtggtgggtggagtcacgtcacgcggcctgtgagcgggaggaagggcagctgcgctggaggggccttctgggaaacgtccttc

SEQ ID NO: 149701 - DNA, 122 bp, Homo sapiens
caggctgggctctgccaggctgctgtagtacgccgaggtgagtcctctgtgaatcgggaacgcccgctccctgtgtctgcccagaaggctgcacttgtcctgggccgctcgcgggaagaggt

SEQ ID NO: 149702 - DNA, 122 bp, Homo sapiens
gaagcagaggtcagggtatccagtgtggtggcagtagtctgggggcatgagctgggatcccgagattggttagggccgcgccgatgtgggggatgggccggacagcccgaggactaggcaga

SEQ ID NO: 149703 - DNA, 122 bp, Homo sapiens
gtgacggtcattttctctttctttctccctcttgagtccttctgagatgatggctctgggcgcagcgggagctacccgggtctttgtcgcgatggtagcggcggctctcggcggccaccctc

SEQ ID NO: 149704 - DNA, 122 bp, Homo sapiens
acttgttctttacctaacttgtgtggcttgcatattgcaatctgtattacaatccagacgcgctctgcagattacagattggatccacagaaagcagtttggatggttgaaattccctccac

SEQ ID NO: 149705 - DNA, 122 bp, Homo sapiens
tatgagttgccaatcttgtcctaaaacataacttaggaatatttagcatctctctttcagcgaagttcttaaatacacttctcttaaaattcacattcatagtctcccctgttcttctgggg

SEQ ID NO: 149706 - DNA, 122 bp, Homo sapiens
cagtgtagatataaggaaatacgtaagtaagtgcaattttatcaaaacatttcatgtagacgtctcacttgtgaagtggaagcctgcctttgggttgagtcacctcatttggggtgttgggg

SEQ ID NO: 149707 - DNA, 122 bp, Homo sapiens
cccaggccctgagcctagcctccttggcttagtatgcacatgtgtgtgatgtgactgatacgtaacacgcatcccatgggcgtcccgtgccaggaattgagggggccacaccctactcaacg

SEQ ID NO: 149708 - DNA, 122 bp, Homo sapiens
cctgccctgggggctgacatctgcctcacggatgccacccactgaaagggcagcccttgtcgccttaactcgttttccatctcagttaccgtcctcggcagggcactgtcacatcctaacgt

SEQ ID NO: 149709 - DNA, 122 bp, Homo sapiens
tgtgttcatgccagtgggcacgcaggccaccatgaagggcatcacgaccgaacagctggacgctctgggttgccgcatctgcctgggcaatacctaccatctgggtctaaggccggtgggtg

SEQ ID NO: 149710 - DNA, 122 bp, Homo sapiens
gggcagcaacaagccctccttcaaggaaggagttcatttgttggtttatccagctgctcccgctttgcttatggaagcgctccgttttctaggggtcttagaagctgtagcagtggtagaaa

SEQ ID NO: 149711 - DNA, 122 bp, Homo sapiens
tggctagtcaaagagaatgacaaagcagccacagccaggaggacactggagaggcctcaacgcacttagtaaaaatgctaaatatttttttagatatttccatatgcaactaaaaacagtta

SEQ ID NO: 149712 - DNA, 122 bp, Homo sapiens
acaccgtcaccggtgtcacacacacacaccgtcaccggcgacacacacacacaccgtcaccggcgtcacacacattccatacccgcctggaggtgccacagcatactcccaaaagccactgc

SEQ ID NO: 149713 - DNA, 122 bp, Homo sapiens
acaccggctggagaccccaaggccaggcgctggctcctcaataggaagttcccggccccacgcagggcgtcagtgcccatgtgtacctcccaccctcgagaccagcaccctggagaggcagg

SEQ ID NO: 149714 - DNA, 122 bp, Homo sapiens
ggaccggccggcgagcggcagcccggtaggctcgcacggctcactcgtcgccctgatttgcgttgactgcggtaaaatgtgtggggcttgtttcccatgttccccattttcaagtgtacagc

SEQ ID NO: 149715 - DNA, 122 bp, Homo sapiens
ggaggggccctcctgaggcccgagacccagggcaggacccagacttggggcagagcgggtcggggagaagccccagggaagaaagtgcttcctgtggggacacaggttgggatggacgtgac

SEQ ID NO: 149716 - DNA, 122 bp, Homo sapiens
gagtcgcccgggcggctgtgcgcacccacggcctgccctgcccgtctccctgctgagcggcgtccactgcacctatgcatggcggctcgttctgtgctcactgatgggggtgtttgcgttgt

SEQ ID NO: 149717 - DNA, 122 bp, Homo sapiens
gcgcccctcgcagtggagcttgcccctttcttcggaaagtcggaagaaagccaccttaagcgctgcccatgtctgggaactacattacccagaatccgccctgcgaaatggtaacgtggctg

SEQ ID NO: 149718 - DNA, 122 bp, Homo sapiens
aagccactgggagtccgatctgggcaggagcccttgggatgaggcagtgggggcaggtggcgagaggtggaggagtggggagaggaccctgcccagcctgcaccctgggggcgccaggagcc

SEQ ID NO: 149719 - DNA, 122 bp, Homo sapiens
tacatagatttagcactgtataaatgcatgctgtaattattgtggcacttgctataatatcgttattgttatagtattttccgttgttgttgtacaagtatcttctatagtattgttgctgt

SEQ ID NO: 149720 - DNA, 122 bp, Homo sapiens
ctccaccccagggtggaaggtcacagactctcagagttggacgatgccttagagatgtcccgttcgaacgctgttttacagaggcgtgtggacggtgtgcccccttgctgaagcctccagcc

SEQ ID NO: 149721 - DNA, 122 bp, Homo sapiens
cgtgctcatgcgttccctgaaggctctcacaaaacaggcctgcacacgggctggcacacacgaggcagcccacacagccccacacctggtgagccatgcgtacttttgcacagcctcaaacc

SEQ ID NO: 149722 - DNA, 122 bp, Homo sapiens
atggttttctgttttgctctggctgttttctcactcttttttcctggcctgagcgaggagcggggctgagaagagtggtagagtttcagaaacccacatccacagagccttggcgaagagac

SEQ ID NO: 149723 - DNA, 122 bp, Homo sapiens
tccgctccggcaggatctcaggaaacggcccccacgtgctgttccgttgtgcagccatctcgttaaggaatccacactggagtacacacagtgatggtcgttcccctggggataatatttgg

SEQ ID NO: 149724 - DNA, 122 bp, Homo sapiens
gttctgtttccaggagctcgtagaattgtcatggtctgcatatgcaaggcaggtggattacggaaggttgatgtacagaggtctgtattttggagcctcttctgtatttacttcagaacact

SEQ ID NO: 149725 - DNA, 122 bp, Homo sapiens
tgtagggcgcccctcagcagggggaggccggcagggagtggggtcctgggaagacgtcctcggaagttgccttcccgtgagggtcattgccatccctgcccgggctgactgacggaagggcc

SEQ ID NO: 149726 - DNA, 122 bp, Homo sapiens
tcaagcctctcattagttatttggtctgtcaatccatttcattcctgcagtcttccgccccgccctcttgagctcgcccctgataggctggcgcgtccgtcacttcaaaaaggtccgcattc

SEQ ID NO: 149727 - DNA, 122 bp, Homo sapiens
ccggtgttttaattggccccgctgtggcagccggccagcacgagggacggcacctcgtgacgcccaggacagaccgggcttgttgctggtctgtggtcctcagtcaggcctcagaccctcta

SEQ ID NO: 149728 - DNA, 122 bp, Homo sapiens
tggtggctgtccaacataacaaaatccatcgaactatatactctaaacgagtgaactttacggtatgtaagttatttttcaataaagtggtttcaaaaaaataaaaaggtgaaccctaccat

SEQ ID NO: 149729 - DNA, 122 bp, Homo sapiens
cttgctgcctaccctgggttggttattccctgaagctgtttactgcccagacatttgcatcgtgggctattctgaggccatcccagatgacacatgggaatgtgtgcacggtgcctcattca

SEQ ID NO: 149730 - DNA, 122 bp, Homo sapiens
ggaggagagatcagtcacagcgaactgctctggctgatctgatttcacttgaagtcaacacgttatgtacttaggcctccgccccccaactgcgtttctccttctcctgcccccctcacccc

SEQ ID NO: 149731 - DNA, 122 bp, Homo sapiens
ctgagcatttttcaccacctctaccattgctatcaccatgatctaatgctaccacagaatcgttacaattgcctcctaaccgctctccctgcatctgcctcaccccacaccccaagagtcta

SEQ ID NO: 149732 - DNA, 122 bp, Homo sapiens
accacttgctgagccttcctcaagaccaggcaccttggcagagatttctgggttgtcaggcggaaccgagcattcaagggtaattcattggtgtccctgaaatccctgatggacgcaccagg

SEQ ID NO: 149733 - DNA, 122 bp, Homo sapiens
tcactccaagagatctgcttccgggtttgcaagaaactgcccgcgcagtaggcaaaggggcgggttgcggtggggaaaggccaggcgttgggagggactgagagcatagggtgggcggggcc

SEQ ID NO: 149734 - DNA, 122 bp, Homo sapiens
ccattcccaccgtcagcgcctccctcctgtcctgatcctcccctggtcttcccctctcagcgcacggcaactctattccttcagcggctcagacccagatattggaggagtccggggtgccc

SEQ ID NO: 149735 - DNA, 122 bp, Homo sapiens
ctgattcgcgtgttgcagatgatatctcccatccccaggttgcctttcactcttgttgatcgtcctttgtggcgcgtacgtttttcagtttgatgcagtcccatttgtctatttttgctttg

SEQ ID NO: 149736 - DNA, 122 bp, Homo sapiens
agtgtcaggtggctgcagcccccatacgctatgcctctgacccgcccacaccccccaccgcggcttctcctccgggctgcagggtgtgcagcccccgcccgcagtcccccctccttcgccct

SEQ ID NO: 149737 - DNA, 122 bp, Homo sapiens
ggaattcggcgtcgcgggagctctctgatccactcaggggtcagggcatcactggtctcgcgtgcgcgtgaccaggcccggtttccggtgccaggacctttccgaagcgtcgagtggcctaa

SEQ ID NO: 149738 - DNA, 122 bp, Homo sapiens
agtgacaagaatttgttcttccactttgagactgttcgattcaaacatgagtccaaggcacgtatccttaagaggagatgctctgctgctgtctcatttgccagattatccttcagttccag

SEQ ID NO: 149739 - DNA, 122 bp, Homo sapiens
cgccgccgccgccgccaccgccaccgcgcgcaccacagcgagcggagcggaggggcggggcgcagccccggacacaccccccggcccgccgccgctcggccaatggctaggcgcgcacggcg

SEQ ID NO: 149740 - DNA, 122 bp, Homo sapiens
gtgcaagcagtcgaggaggggactgtgatggcggccccgctctagccagtctgctctccacgttttcatcctgagagcgcagctggtagatctatttccagggcatcctgcagcgggcgcgt

SEQ ID NO: 149741 - DNA, 122 bp, Homo sapiens
taccagaccctggaactggagaaggaatttcacttcaatcgctacctaacgcggcgccggcgcatcgagatcgccaacgcgctttgcctgaccgagcgacagatcaaaatctggttccagaa

SEQ ID NO: 149742 - DNA, 122 bp, Homo sapiens
cagggggagggagagggaaaagttctctcgcttgcgattccggtctttccgtgtgggccacgggctttccctcccggggaggcaccggcagattgcaagtatcccggtaattgtgggggtgg

SEQ ID NO: 149743 - DNA, 122 bp, Homo sapiens
tctgtgtggagaggggcccctccaggctcatgctggcgggagcggcaactcctctgcccacgcctctggaaacccgatcgctccctgtctgttaggaagagggactcactggcaggtgatta

SEQ ID NO: 149744 - DNA, 122 bp, Homo sapiens
actggggcaaccctcgtcgttggcctgcgccctgcaccccgcgcctcgctcccagacggtcgccccgcccctaatccctggcagtccttttagggtcctggtttcccgctcccacgggcccc

SEQ ID NO: 149745 - DNA, 122 bp, Homo sapiens
ggggatgacgaatcagtcagatacagacaattttcctgactccaaggactcaccaggggacgtccagagaagtaaactctctcctgtcttggacggggtctctgagcttcgtcacagtttcg

SEQ ID NO: 149746 - DNA, 122 bp, Homo sapiens
gcgctggtgtgtgcttagaaagtgcacctgcgaggttggggcgtggcctggccgtccgtccgcggggcccgggctgcccatggcagcaggtgctcagtaagcactcgccccaccagtgcgtg

SEQ ID NO: 149747 - DNA, 122 bp, Homo sapiens
aaaaaaaaaagtcactattcatttggcattctcaacatgagtccagcacaggagctggcacgccacatcattggaacctcagaaccacctggggagaagaggctagtagtttccccattaaa

SEQ ID NO: 149748 - DNA, 122 bp, Homo sapiens
aatgaggataagtggtctctgctctcagtctctggcgagttctccctggggttagaaaatcgtccccgcgctcaccggggcgcccccgccgccgtgatggtggtggtggtgatgcggctgcg

SEQ ID NO: 149749 - DNA, 122 bp, Homo sapiens
ttttaaagacagagctttcaactctgacctgtgaacaagtgtgacatcaaatgtactgttcgttgctattattctgttgctacaaggcagacagttagtttcccagctcccctgcagtcccc

SEQ ID NO: 149750 - DNA, 122 bp, Homo sapiens
ctctcccaccccttaccgctgggggcagctcccagggcgggtcactgccgcgctgccgctcgcagatcagacaggtccggatgcccttgcaaccgcattcccgaaggacttcgggggtctcg

SEQ ID NO: 149751 - DNA, 122 bp, Homo sapiens
ctagcctttgactagagcctgcgcagcatcccagtcccaggctagggcccaccggtgccgcgcagcctcctggaagctgtggggagtagcgttcctccgctccagaactacaactcccagca

SEQ ID NO: 149752 - DNA, 122 bp, Homo sapiens
caagatgctattgctcagggtttcagagcctagtttgtcgaaacccatccccctcgcctccgttttaagacaaaagtaaaaaatgaagcaagagacaagcccgcagtttgcagtagatttgg

SEQ ID NO: 149753 - DNA, 122 bp, Homo sapiens
ctcctgccgagccgggaggggccaagggtgacggcaaggatacgaacccttcaatatgcccgactcccgggcagggcctgctgaagccgtagatgtcgcagccagatggatcgggaagcaag

SEQ ID NO: 149754 - DNA, 122 bp, Homo sapiens
ttcacaggtgtcctgggcaggtggacaccctgcggatgtcttgttgggtgcaagaagttccgcctgttgagggcttcgctcagcgcggcgtctacccctggctgaaggacacacggcccttt

SEQ ID NO: 149755 - DNA, 122 bp, Homo sapiens
atgggcagaaagcgccggcggcgaacccggttgtttgggaaggcgagcagctggaggaggcggagcttgcggggatagggaggctgaggcagtgggagctccaggcctgggtgctcatctct

SEQ ID NO: 149756 - DNA, 122 bp, Homo sapiens
tgggtcatatggtagttctacttttaatttctgtaggaacctccgtactgttttccataacggctgcaccagcctacattcccacctacagtgtacaaggattctcttttctctacaccctt

SEQ ID NO: 149757 - DNA, 122 bp, Homo sapiens
caaagttatgggatttatcagccattgggtgtttcagaggagagagcagggcaaggagaccgagagaacagaagaaaactcaggaaagaatggggttgaaagtaaggcatgcaaaactggaa

SEQ ID NO: 149758 - DNA, 122 bp, Homo sapiens
cgtcctcgcctgcgccgcccagcctgttgagcgatggggaccggctgcggggcccgggcacgtagctcccaatggtcttcgcggccccctcgggcttgctgggcatctgctgcagcagctgg

SEQ ID NO: 149759 - DNA, 122 bp, Homo sapiens
gagccagatattaaatatcaggaactacttgtttttctttttcttaatttgagacagtctcgctctgttgcccaggctggagtgcagtggcgcgatcttggctcactgcaacttccacctcc

SEQ ID NO: 149760 - DNA, 122 bp, Homo sapiens
tcctcggcggaggtcccagcgcgcggggccgcaccacggcacacactcacgccctcgcggcgcgcccccgccaggccttccaggaactccagcagcctccccggaggcggcccgaccttccc

SEQ ID NO: 149761 - DNA, 122 bp, Homo sapiens
ggaactgtcacgactggaagggcgtgaggcctcccagcagtgccgcagcgtttcgaggggcgtgtgctggaccccaccactgtgggttgcaggcccaatgcagaagagtattaagaaagatg

SEQ ID NO: 149762 - DNA, 122 bp, Homo sapiens
gagcctcagtttccctatgtggaaaatgcataatctctaacataatgacggggtcaacctcgtgggggtgttgaaccagggtgaagtgagtgtgcggtgctcagtatgttcctgctcgtggg

SEQ ID NO: 149763 - DNA, 122 bp, Homo sapiens
cgtggtagccggccacgcactgtgcaggcgacagaacgaggggcccttcggctcagccggcgccaggatgcagtgctcccacaccccactgtgagggctgacagggccacatgagctgccct

SEQ ID NO: 149764 - DNA, 122 bp, Homo sapiens
ctggagacattttttaataacaggagcattttgtgcctttcagggtttctacaaagtggccgcattccggccccaaagtcagcaggcctgaaagcgtgcaggcaggcgcgtgggaaggagtt

SEQ ID NO: 149765 - DNA, 122 bp, Homo sapiens
tgcctcgcaactgcagttcacaaatgctctcacacaaatcctgtttcccactggaggctacgatctctccgtacactaccgctcctcccatccttaagatcccgcagtctaaacagagttag

SEQ ID NO: 149766 - DNA, 122 bp, Homo sapiens
tccaagaccctgattgcccccagcacggtcactaccttcctccggccttgagcaagcagccgccactgcacttcacctctcggccaccaggggtcagaacgactgcatccacagccacgtca

SEQ ID NO: 149767 - DNA, 122 bp, Homo sapiens
cggtcaagggtggaaaggggctggcggctgccaggcctggcggagtggagcggggcggggcgcagcggggcggggcgggcctggagctgcacctgcttctgggcggacgcacttggcgcgcg

SEQ ID NO: 149768 - DNA, 122 bp, Homo sapiens
cctgggggtggaggaggaagttcgccccgcgcctgcctcgcaaccgcagccgcctccgtgcgcttcctgcccgcgccgccctccacactgcgctccgtgtctggcagcagcccccgcctcgc

SEQ ID NO: 149769 - DNA, 122 bp, Homo sapiens
ctaaggggcaatgcactttttttgcaaagtctgataattgcacttatgtgagtgcatacacgtgcctgtgtgatgcactcttagctctggaagctggcttcataccacccgacggcatttgc

SEQ ID NO: 149770 - DNA, 122 bp, Homo sapiens
tgttgttctttcttttccacctagacctgctttcactcttcaaaactagccggaggtcggcgagcagctccttttcgggatgtgctttttgtacggccatggaaactggactagcggaaagg

SEQ ID NO: 149771 - DNA, 122 bp, Homo sapiens
cagagacaaaacaagcagcccaggctagtagtctaggcggcggcgcagcggctgcggcagcgcggccccagcggcggccccggcggcggctcctacgcagcccgtgcccgccccgagccgcg

SEQ ID NO: 149772 - DNA, 122 bp, Homo sapiens
tctgtgattcaacacacagctgcatgagccctcttcaaccttcacatcttctgtgccatgcgtccacattgttttaggtatgaggaaatccatctggatgctttcatacgcagaccgtggat

SEQ ID NO: 149773 - DNA, 122 bp, Homo sapiens
ggccctggacacagggctgtggagccacactgatgagttgggcttttgtcctggggaacacgggaagctggtggagggttccctgccagggactgatgtgacctgctttacatttagctgtg

SEQ ID NO: 149774 - DNA, 122 bp, Homo sapiens
caggaagaagagctgggcccggagagaatgcacggagggtgcaagtgggtctggagaggccgacttgaggaggttctgggcccggagaggccgccggaagggaaaaactgggcctggaaagg

SEQ ID NO: 149775 - DNA, 122 bp, Homo sapiens
ggtactgaaagaatatcgagtagtacacagcagcttaagggaagcaagtgtggccagtagcgaggaggcaaatccttgacagttcttcaggagaggccccttttactgctttagccactggc

SEQ ID NO: 149776 - DNA, 122 bp, Homo sapiens
cggcctccggtaggttgcaacccatgtcactcaggatgaatggcttacccattggctatgcgctcgccactcaggtccggcgtgaactgtccattggtcggaatggcagtgattccctcctc

SEQ ID NO: 149777 - DNA, 122 bp, Homo sapiens
gaggggtggagagggagagggcgtgcgcctggggcctcacctgctgggagctggaggaggcgcggagcgaagccggccctgccagccacgcggagaagcagaggcaggtgagcgcgatgcag

SEQ ID NO: 149778 - DNA, 122 bp, Homo sapiens
tgaatgaatgaatgtgcatgaatgagtgaatgggtccccctgtgtatctgcgttgcctcccggtcacctggcaccttcgatgttgctgcctgggacgctctgtggctggctggggcagaggc

SEQ ID NO: 149779 - DNA, 122 bp, Homo sapiens
ggaggctgaggccggagaatcacttgaaccctggaggcagaggttgcagcgagccaagaccgtgccactgcacttcagcccaggtgacagagggagacgccctctcacaaaaaaaaaaaaaa

SEQ ID NO: 149780 - DNA, 122 bp, Homo sapiens
tttattttttgggggacatggtcttgctctgttgcctaggctggaatacagtggcgtgatcgtggctcactgtagcattgaattcttgggctcaggtgatcctcgtgcttcagcctcctgag

SEQ ID NO: 149781 - DNA, 122 bp, Homo sapiens
tttctgtgggacccactcttggaaacatcagacttggtctagagttccagtttattcatacgctgacagcccccctgaaaggcatgtggggctagcgtggcaggaatgaggtgccaggcaag

SEQ ID NO: 149782 - DNA, 122 bp, Homo sapiens
cctgccccgaggtggccctgggcttgcccgcccgcctgcagtgtcggctgaagagggtaacgtgcgtgcgccccggctgctcccggctgctcccggctgctccccggctgctccccgctgct

SEQ ID NO: 149783 - DNA, 122 bp, Homo sapiens
ggcagtagggaggtggtccgtgatggaatatcgatgcccgcggcccctcccctgcctccccggcagtcctaatcttacagctacagtcctgcccgcaggggcttctctgtgatccagctaca

SEQ ID NO: 149784 - DNA, 122 bp, Homo sapiens
gtgagaagtgggacagggtggaagatgaaaaattacttaatgggtgcaatgcatgttattcgggtgctggctaccctaaaagccctggcttgatcacaatgcaattaatgcatgtaacaatt

SEQ ID NO: 149785 - DNA, 122 bp, Homo sapiens
ctcggggccaatacagaaacagacaccatcctgcaaatgctcccgtccaaaccagcccggcgcggccagctattcttagcgcacagggacccaaaattaaaacagaggaagcgccagctccc

SEQ ID NO: 149786 - DNA, 122 bp, Homo sapiens
tttctgtcatagcgacatgttctttacctttgctgttcagcatggtagctactagccacacgtggccgttaagcatttgacctgtaggctagtgcacctgagaaactaaattttaaatttta

SEQ ID NO: 149787 - DNA, 122 bp, Homo sapiens
cgtggccagtcggcgggcgggacgggggtggcgtgcggaacgcgaaggcatcagtttacgcggagccttccgacagcgccggccgcctctggctgggatgctgagagtcgtctgggggagaa

SEQ ID NO: 149788 - DNA, 122 bp, Homo sapiens
accctctccccccacccccggctgctgtagcacatctctccaggccggcagacgggccgccgaggcttctcctgagataagctgggttggtggcttggggcatctcacagggcacccaaaca

SEQ ID NO: 149789 - DNA, 122 bp, Homo sapiens
atggcgttgaatgactctggctatggcatcaggcagtgtgccagtaaactctccacatgacgcgtatagtagcaggcatgaaagttgcccgtacatgacctgttgtagtgatatttctaaaa

SEQ ID NO: 149790 - DNA, 122 bp, Homo sapiens
tctcagaacctcgcatggttccctccgccttccttcccactcccaccgcaggccccactacggaccggaagtcacagagtttccgccttcatgcaactaagcgccgccatattgtcgtacgg

SEQ ID NO: 149791 - DNA, 122 bp, Homo sapiens
actctggccaccccctgccccaaggcagctactttgggttgtgcaaggtaaggtccatggcgataagattcacgttggcaggtccggcagccccgggccctgtaagtgatgcggcgtgtggg

SEQ ID NO: 149792 - DNA, 122 bp, Homo sapiens
ttagtctcaataagttttagttgattgaacaaacaaagtctctcacagccaggactgctgcggctggaattcctgacatactgtcatacctctcactcgtcaatctacactctcctcccatc

SEQ ID NO: 149793 - DNA, 122 bp, Homo sapiens
gaccccagcgtggcgttgctgcagcaggcgcagggccagtgggtgcaggtagggccggggcgtgggaggccgagaggccaccgggccggggctggcgccgagctggggatgcggagaccaga

SEQ ID NO: 149794 - DNA, 122 bp, Homo sapiens
gtgggcgcgtggttagacgccagccacagttgtctttgggttatgtcgtcatgaagccggcgctctacagttgtgtaaccttgaacaaatgggttcagtatcttggaatttcagttttgtca

SEQ ID NO: 149795 - DNA, 122 bp, Homo sapiens
gactgtacttccgacattgcatcactgttatgtctgttgtggtctgtgatcggcggtctccgatcttactgctgtcattgattctgggacgccacacactatgctcctcagacggcaaaagc

SEQ ID NO: 149796 - DNA, 122 bp, Homo sapiens
cccgcggccaaaacgcccagcgccgggtctgggtttgcgaacggctcagcccaggccctgcgccagagcaccgcacccgggggcggacggccctgcagctccccagcctcttcccgcatcaa

SEQ ID NO: 149797 - DNA, 122 bp, Homo sapiens
ggggtcagggagttccctttctgagtcaaagaaaggggtgacagacggcacctggaaaatcgggtcactcccacccaaatactgcgctttcccgacgggcttaaaacacggcgcaccacgag

SEQ ID NO: 149798 - DNA, 122 bp, Homo sapiens
cgccctaaaagcaaaacccttaaccaatcattgcagccgcgtggggcatcacgggaactccggggctataaaagacctggttgctattttgtactcccggagtcactcatcccttaagcaag

SEQ ID NO: 149799 - DNA, 122 bp, Homo sapiens
ctcactgtgaaggtctgcagcttcactcctgaggccagcaagagcacgaacccaccgggacgaatgaacaactctgaacgggaggaacgaacaactctagacgcaccgccttaagagctgta

SEQ ID NO: 149800 - DNA, 122 bp, Homo sapiens
accggaagtctttgcacttccgtcttccgggcggaggccacccggggcggacgcattgcacgccgggagacaaaatgtctcaagaagccttgagaggcgggattttggaacccgggcgctga

SEQ ID NO: 149801 - DNA, 122 bp, Homo sapiens
cttgtgggggaggggagcagtgggcaggggcccaggggatataaatatccgaggagggcgcgcaaggaccgtcaccacccagacttggaacatgacgcacggcgccagggcacccaggcccc

SEQ ID NO: 149802 - DNA, 122 bp, Homo sapiens
gtctgcctcccctgcagagctacgagctgatcctccaagaggggacctttaaggcggtggcgagagggccgggtggggacccaccctacaagatacgctacatggggatcttcctggtcatc

SEQ ID NO: 149803 - DNA, 122 bp, Homo sapiens
cccccttgtgacattcttccttatatcctgggagggagaggaagatactagcggcaatgtcgcaggggctgtacacacccactgtgatattgttcggaatatcccgagggggagaaaatgat

SEQ ID NO: 149804 - DNA, 122 bp, Homo sapiens
aaaaaaaaaaggctctgccttctctctcttcaactgtctaaaccccaacgctgcagaaagcggtgaccccaagtcccagaatgatgatgctactgcagggtaacaaacaggttttctgtcag

SEQ ID NO: 149805 - DNA, 122 bp, Homo sapiens
aaaaaagaaaagaaaagaaagaaagaaaggtggccccgttaatgtttatgccaagacagccggcatgacctggaagtgtcccaagccacagggcatcttgtttccggggaggatgaatgaat

SEQ ID NO: 149806 - DNA, 122 bp, Homo sapiens
ggcgtctgagcgcgtgtggaggtccgggtctctgcgtgtcatcgtgcacgtgtctgtgcacgcccactcgcgtccgggagtgagagtcagcgccctgcagtcggccgccccgtgcccgccag

SEQ ID NO: 149807 - DNA, 122 bp, Homo sapiens
taaaattgggattaaccttgaacaaagatcgtcgacgggcggccctcactggaaacctttcgcttggcctgccggcagcacagcctcaaaatacattttttaacacaaaatatggagaatca

SEQ ID NO: 149808 - DNA, 122 bp, Homo sapiens
cgtgaggaccgtgtgcacacgcatgcaggtggtttatggagaagaatgtgaccaatgagtcgagtattcttgatggccagttggatggatcctctgaaagctgcaatccccattgtgtgtag

SEQ ID NO: 149809 - DNA, 122 bp, Homo sapiens
tataatcagtatagattgtttgaaaatgtgagatgtccatggttggcctctaataacattcgattcacggcaaacatatattcaagtaggagacatggtgatataggcagaaaaatcaaatg

SEQ ID NO: 149810 - DNA, 122 bp, Homo sapiens
ccccgcccctcggcgcgcagcgcgccgccgcccgtaggctccattgaaccgctcacgcgccgctcacgcgcaagtcccgcctcccagcgctgccccgccccccgagcccacgcaggcgctgg

SEQ ID NO: 149811 - DNA, 122 bp, Homo sapiens
gccggctgcaggcttgaagcctgctcggagcttgggattgtattttctttggctttctggcgcgctccttattatttatttcttttccctctgttttatttttattttcaagctgccggcca

SEQ ID NO: 149812 - DNA, 122 bp, Homo sapiens
ctaaagcaagagtcctgggcctgaaggctcctgggaaggtggtggggagggagcatgtgtcggtggcctcagggcagcagctgcctggtgaatgttcatggactggatgctctgggaagcgg

SEQ ID NO: 149813 - DNA, 122 bp, Homo sapiens
tacaatacctctccggggttggctggggggcgcctccagctgcgcaagcgcatagggatgcgccctttgtggactccattgcgcagggtgcattgccctgaagagcgctcctccttccggtg

SEQ ID NO: 149814 - DNA, 122 bp, Homo sapiens
agtaatcctgggggagggcgggagctgcctagactacagaaagcctcattcctggaaggtcggagaggttttagactaatctcaggatttggcaaccctgtgagggcaggtagagaatccag

SEQ ID NO: 149815 - DNA, 122 bp, Homo sapiens
ggctggcttgcttcttgtcagttagcaaggacgtgattagaatcctactcggcctctcgccggctcctcgctcgccgcctgcattacttgcagattcagtttgcgtgtctccagccaagcgg

SEQ ID NO: 149816 - DNA, 122 bp, Homo sapiens
tgccaaggccctagtcccggaacctgggcatccgggccctggccctcagccccagacccacgcctctctggggagccaggagtgttgtctcccggccccccgcatctcgggcttctggagga

SEQ ID NO: 149817 - DNA, 122 bp, Homo sapiens
cagctaatccttgtgcacgtggccgtcttcctggaggcggcgggttttaaaacctttacccggcccacggggaagcgacttacagggtgctcagatccagcgttctttcttactagttgttc

SEQ ID NO: 149818 - DNA, 122 bp, Homo sapiens
ggccacagcgtcttccctccatccccagagccacggagtgtgtcttgcagatccgtgtaacggggctcgggcgtgcaaccttctgggaagaaaaccaaagaggaatgaaggggtcagaggct

SEQ ID NO: 149819 - DNA, 122 bp, Homo sapiens
ggctcctgggcctgtgcgtcccggggctcccgggcccgcgcggccgcggcagcagcagaccgcacacccccgcccaccgtcttggtgcatcccggcgctacggcgtctgagcagggccgtaa

SEQ ID NO: 149820 - DNA, 122 bp, Homo sapiens
atggaggacgggtggggctaatagtatcggcgcgccgagaggggctgaaacagctggacccgggatggggtgggggatgtcacccaactcctctcggaccccccaaccccactccaggccca

SEQ ID NO: 149821 - DNA, 122 bp, Homo sapiens
ctcagtttctccgtttgcaaaaccaggctcaccgggcttagggatcccacctgggatcctcgcggcctctcgggtcgggaacgccgcggatgtggggtcacccggccgcgatcccgctgcgc

SEQ ID NO: 149822 - DNA, 122 bp, Homo sapiens
gtagtagagggacctgaattctgctaagggttagaggtaactgattaccagcggttattccggaggtcacagtgtttgcagcttccccagctcacgattgtccaacctgagattggcctttg

SEQ ID NO: 149823 - DNA, 122 bp, Homo sapiens
ggttcactgcactctcagcacagcccgcagatctaggttcttaccttggggaccttccttcgggcccagggctgcactccactacaccacagggccctttgaaccagctgcgtccaccacca

SEQ ID NO: 149824 - DNA, 122 bp, Homo sapiens
caaggagaagaaatacagaaaacccaagagaggtcagactggctcttgttaccggagccacgggaagaaagcagccggagtcacgcacgtgcagagctgggcatgggagagaaacgggctgg

SEQ ID NO: 149825 - DNA, 122 bp, Homo sapiens
gccaagcgcagagaggggcaggcggtgccggtggaggatgcgcgaggccctcccgccacgcgcatccacgggggccgcagggtactcacagttgaagtcgggcatcttaggcaggatcatgc

SEQ ID NO: 149826 - DNA, 122 bp, Homo sapiens
gtgcgggcctagaggcccacgtgatccgcagggcggccgaggcaggaagctgtgagtgcgcggttgcggggtcgcattgtggctacggctttgcgtccccggcgggcagccccaggctggtc

SEQ ID NO: 149827 - DNA, 122 bp, Homo sapiens
caggaagaggggacctacggagcgcacagcagcactaggggaggctcgcctccttcctgacgcctctacacggaacatggatttgagtcttactaaaactgtgtacagagacaaaaagccca

SEQ ID NO: 149828 - DNA, 122 bp, Homo sapiens
gagaataaagccattaaaacattaaccctgctccgcggggaaataagaactgagcaccaccggatgacggaagactccagtagattgatggatgtctcccagcaagagaaggccaagagagg

SEQ ID NO: 149829 - DNA, 122 bp, Homo sapiens
gaactgggaactggggaccaggcagtcaatggggaccagaggttgctgggccttgtaagccgttatgaggatgttggcacttactccaatggaaagaggaacttttgcagaactttgagcgg

SEQ ID NO: 149830 - DNA, 122 bp, Homo sapiens
cagcaacactgactcttggatggaaagcccgtcccgattcctgtagtggtaggctggaggcgggggccctgaatatggatatccagatggactggcatcttctgcggccggtgaagctttat

SEQ ID NO: 149831 - DNA, 122 bp, Homo sapiens
acgctgggccggatccaggtactgccgcagcacgtgcaagatgggatccttgttccgctccgcggccgccgccaccagcatcgcggcagcaacaactccccgccgcggacgcggcgcgggtc

SEQ ID NO: 149832 - DNA, 122 bp, Homo sapiens
agccatgcacgggagaattcctcccagggagaaacgccgtgaatgtgacttctagggacacgcacagccggtggaaaccgtatgcatgtagtgtgcataggtgagatgtaatggaacactgg

SEQ ID NO: 149833 - DNA, 122 bp, Homo sapiens
tcctccaccttcatgatctggatggagtgggcctgggcgcagtgccgagagtccatgactcggtagcactgggtgaccgcccgccgtggtcaggtcctggtattcccgatacaggttgtggg

SEQ ID NO: 149834 - DNA, 122 bp, Homo sapiens
gttcacctggagcaagctgatttcaccctaggtatttatgggtctagaggcagcaaggggcgctgtggtgagtcttaagaagaatggggtgtatctgttatttctgtataagagctggccat

SEQ ID NO: 149835 - DNA, 122 bp, Homo sapiens
gcctcggggagaagctggataatgccctctgcagataacccgtaggctgcgccacagcagcgccaaggaaagaaagcatctctgctccaggtctcggcggaagagatgcgggaactacgggg

SEQ ID NO: 149836 - DNA, 122 bp, Homo sapiens
gaccccacccagcagggagacggtcaccccaccgccaccacccacctgggaccctgcgcccgccccagttctcagcctggactgcccctcctgcgggaagcccaagccctccttctcaacaa

SEQ ID NO: 149837 - DNA, 122 bp, Homo sapiens
cgcctcggggcgagcggcaagggctggggtgagtgcacctgcacccaggcggtcttttcacgtgtcgccagggtcagaccgcatgtctctccttgcggcgctacacaagagcagagtacgag

SEQ ID NO: 149838 - DNA, 122 bp, Homo sapiens
ccctccttaccctgccccccttgtcttgtatgcaataaatatcagcgcgcccagccgttccgggccactactggtctccgtgtcttgatggtagtggtcccccgggcccagctgttttctct

SEQ ID NO: 149839 - DNA, 122 bp, Homo sapiens
cccgattattatcagcctcagcacttgggctgggaatttagccccaggcccaaacaaacacgacagaccctttcaacgctaatcttctcgggtcaggaggcttgtgatattttgctatcttt

SEQ ID NO: 149840 - DNA, 122 bp, Homo sapiens
gttgccacaataatgctacatagcaaaccacgcctaaacttagtgggttcaaacaacaatcgtttatcatttctcaggggtccatagggtggctgggtaggctcacttgtgcacctgcagtc

SEQ ID NO: 149841 - DNA, 122 bp, Homo sapiens
ggcaaaagttcctgagagtggcaccataataggtgaggcaaatgaggaacaaaggtgttgcgtgacttgctcagagtccacagcagctcttagacagctggtctaagtgactggccttgatt

SEQ ID NO: 149842 - DNA, 122 bp, Homo sapiens
ctattatacggcgggattagctcatctccaggcaggtcaaacccaaagtcacacaacctgcgacgcgggccccgcccccactccccggccgcccctcccctgccccggccccggccccggcc

SEQ ID NO: 149843 - DNA, 122 bp, Homo sapiens
ggagaggcttaagcatgtgttaactgccactgggaagaagtcggcaatcacggaagctaccggagggtaagaaaaaattcattcattcaacagttgagcgcctcccacgcgcccgatcagta

SEQ ID NO: 149844 - DNA, 122 bp, Homo sapiens
ctgtcactgctgtttgttcttgccagcggctaggtgtgtagttgcttggggctcctagcacgaggcctctgtccccaggcacgcagcgccagtctccggctgttgcgccctgggcgccgcct

SEQ ID NO: 149845 - DNA, 122 bp, Homo sapiens
atatttggccccacccctgatcaattacatcagaatctctggaaggaagccccaggcatccgtttttttaaagggtcccctagagagcttaatgtatggctgtgagtcacaggcattgacag

SEQ ID NO: 149846 - DNA, 122 bp, Homo sapiens
caaacaaaaacgctactactgttggagtcggcttgagctgtggcattgttgtttccagcccgtgaccctcacgccgccctgctcgttgggcggaccgggccctggcggcgggtgaggaggaa

SEQ ID NO: 149847 - DNA, 122 bp, Homo sapiens
cgcgcggcgcggccccgggaagatggaggtcgggcgcgctagagagccggcgcctgagggcgcctgggctggggttaggccggggggcggggcgaggctgcagtatcgggggcggggccgcg

SEQ ID NO: 149848 - DNA, 122 bp, Homo sapiens
ccaaatcgtgaacctgagggccaggaagtacggaagaccagacacattggaagtcgggagcgaaaaagaggctggccgaaccaggtttgggaagcgactctgccacttttaaagggcaccct

SEQ ID NO: 149849 - DNA, 122 bp, Homo sapiens
cttcatcttctgctcttattgcctcccggcgcccgggattttgggctttctaacgccctccgcagcctgccaattctctatcacctaaggctgaagaactgcgtttgtgaagagggagtgca

SEQ ID NO: 149850 - DNA, 122 bp, Homo sapiens
gcgttcagcgcaagaggggaacgtgttctctggctggtgtcgccggcccctctcctcgcacgccacgctcaccccccgacttctttgcagggatggtgccgtcgggcctgccgggcagggtg

SEQ ID NO: 149851 - DNA, 122 bp, Homo sapiens
ggctgagggcctgggggtccctcccacctgcagctgtgaccagagccatggtctgtggaacgaacagcttctagctttctagcaccttcctcagaagcacacagccttaaattcttaccttt

SEQ ID NO: 149852 - DNA, 122 bp, Homo sapiens
gatgtcccgcctccagcggctcggaggtcttcacttattggcctccccaaaccaacatggcggccccctacaaacttcaagcgccggtctctcctagccaatcaaaagaaagatatttctga

SEQ ID NO: 149853 - DNA, 122 bp, Homo sapiens
ttaacagatattatacttttatgctttccagagagctcagagaaaacgtaactaaaatgtcgaacaatgagagaagacaaggcacccacccatcctaaatcaatctctttgattttagatcg

SEQ ID NO: 149854 - DNA, 122 bp, Homo sapiens
gcgggccccctcccacaggagggcccctcttcctcaaggtgaacctctgtccccgatacccgctcccaagaccgagaccttgttacggccccaccctccacaggccccttaccccccggatc

SEQ ID NO: 149855 - DNA, 122 bp, Homo sapiens
cagcctttccacccttgccggggtgactcgtggagggaatcgagcctaagtcttacggcacgttgtgcagtttgggccggggcggaggaccagggcccagctgaggctggccttagtgactc

SEQ ID NO: 149856 - DNA, 122 bp, Homo sapiens
cctgtgcaggctctgtgtgaagagcatgtcctcgggcggcactggctcaggagcagagggcgctggaggggccgagggtggctggcaggagctccagtcgatgcccacctccatggtggtcc

SEQ ID NO: 149857 - DNA, 122 bp, Homo sapiens
aaacctatgacctcataaatgctggaaggaacgagccagatttctgcagacgctgtgcaccgaaggggccccttccacgccctgggatacttcaggggcgccaggcccagctgggatctccc

SEQ ID NO: 149858 - DNA, 122 bp, Homo sapiens
cacagtcctggctcctccctgcttgtggccagctgtgtgaccctggacaggcctccaccccgcttgcaagccagtgggaaactgagatcatggagggtgcgccctctgtagccagccaagta

SEQ ID NO: 149859 - DNA, 122 bp, Homo sapiens
tactggcaccccaagcagggatgcactgggatgcgtggcaggggcgggatctcctgggagcgtctcagcccagcagggagtggggaagcaagagggaaggcttaccttcctcggtggctggc

SEQ ID NO: 149860 - DNA, 122 bp, Homo sapiens
gaaacattacacaaagaaagacccaagttgggggaagaagcctagggagaggttgggagtcgcaggcttgctttgaggtgctaggggccccatcatgagtaggcttccctaaactgttgcac

SEQ ID NO: 149861 - DNA, 122 bp, Homo sapiens
ggccctgagctgggggagacagacaaatgcgacaaggacgggaggagcagctggagggaccgacatttgacttaccaagtagctctacaggaaggatgtgggaggagaggaggagagacaga

SEQ ID NO: 149862 - DNA, 122 bp, Homo sapiens
cccaaggctggttttgaggtggcagttaattactagcccggaaagccgaagccccggagccgatgtctgggctgacagggttccctcctcagcctcggggcagtcagacgattcctaacaac

SEQ ID NO: 149863 - DNA, 122 bp, Homo sapiens
atatacagtacttaaataggaaactccgagttaagatgtcataatctacccccatgctcccgggggcagttggagagtcagattgctcagcagaggccagggagagtacggctccattcttc

SEQ ID NO: 149864 - DNA, 122 bp, Homo sapiens
accattatgatgtgtgctgtgagatcttcatacgtgctctctgtcatgcatctgtaccttcgagtgtgacacatgctctgagatcttcatacatgctatcacacatctgtaccattatgacg

SEQ ID NO: 149865 - DNA, 122 bp, Homo sapiens
aaccttggaaagaaaggaccccacagtcttcattgctaggaaccagcaagcgagtgttcacggaaatgcggtcaattaggctggtaggaggggtaaaaatgacgggtctttcatgcgcatga

SEQ ID NO: 149866 - DNA, 122 bp, Homo sapiens
cacccccagccccgcatgcaagaggcgtaatggcccgttcagcatattaggggagctgagcgcgcgtgtgtgtgcacacttggataaaaacacacagagacccgcagcagacacacatacaa

SEQ ID NO: 149867 - DNA, 122 bp, Homo sapiens
ccgcttttcttgcaggctttggggggtattcatgctctccgtttcccagtggacaagtggcggggccaggggggctgtgtgtgcgtgtgtgtaggcacgcgggctgtgagggggctggggac

SEQ ID NO: 149868 - DNA, 122 bp, Homo sapiens
aagcctgtttggtggtctcttcacacggacgcgcatgaaatgtggtgccgtgactcggatcgggggacctcccttgggagatcaatcccccgtcctcctgctctttgctccgtgagaaagat

SEQ ID NO: 149869 - DNA, 122 bp, Homo sapiens
tctcctcccaccctcccacttctctcggcctgcctgtttctccccctcggatgggggcaccgggccatgcagagcctccttcagcatgtcctgcgctgaccagctgagcagcctgcccgccc

SEQ ID NO: 149870 - DNA, 122 bp, Homo sapiens
atctcctcggaaaggcttgctctggcctgcagctgatattggtgccacggtttgggcagccgagttccactctcacctttcagtccaaatgaggaaaacagaaccatttgaagtgtctatgg

SEQ ID NO: 149871 - DNA, 122 bp, Homo sapiens
ccacctttctggggcctaatggtgcagatgtgaggcatgaaggagtccgggccattggaacggcaacagggtggaggggaaacagaccaggagagctggagcatctcactgcccagattgtt

SEQ ID NO: 149872 - DNA, 122 bp, Homo sapiens
ggccagccccagtccacaccccccaggaccccgccccccagccacccctcccggccccttcggaacgccccacccccggcccgctcctaaggttcttgcctgcttggctcccgctcctccgg

SEQ ID NO: 149873 - DNA, 122 bp, Homo sapiens
gggccagagctcctctcccgccgccgcaggtcttcctcaccgctatgcgcgccccgaagccgaccctgcgctacttcacaaccaggcgcttcctgcaccagctgctgatgcgcctggacgac

SEQ ID NO: 149874 - DNA, 122 bp, Homo sapiens
ggggcggggcgcacgcgggcaccgcccacgcgtcacaaagagcgggccggggcggggcctcgacagccgggctctcagggccctaaagtggccagagcccatccagatggtaggaatggcaa

SEQ ID NO: 149875 - DNA, 122 bp, Homo sapiens
taatgcagcaacactgaattaggaaaaccatctagtgtgttgagccggggttggagagtccgacattctgggacaggttttgccattcatttgctatggaccttgcgtctggccttcaacct

SEQ ID NO: 149876 - DNA, 122 bp, Homo sapiens
ctacactagcccttgttttgcaaatggctccacaatccactgaaggaatttccctaggggcgccaagttttaactttgacagaagccagtccttttggccccttatcccaagtctctaccct

SEQ ID NO: 149877 - DNA, 122 bp, Homo sapiens
gcaggtgagcaggcgaggaaggcatggagttccgacaggttccagcacgcatgtccccttcgcaagcgggggaggccctcgcacatccacacacccgaggtagccttgcggcgggacttggg

SEQ ID NO: 149878 - DNA, 122 bp, Homo sapiens
cccgccagctttcatcccctcgtacaacgctcactaccccaagttcctcttgcccccctacggcatgaattgtaatggcctgagcgctgtgagcagcatgaatggcatcaacaactttggcc

SEQ ID NO: 149879 - DNA, 122 bp, Homo sapiens
tgaagtgatgagtggcagccgcggccgacctcttgtggacagcagtagctcttctttcctcgtctgttgcttggacattcctggccgtctgggaaagatccctgtgggctgcgggctcaggc

SEQ ID NO: 149880 - DNA, 122 bp, Homo sapiens
taaaggagaaaaggattacgaagcttaatgattgctgtttaatgccaagcctaagcggcacgttgcactgtgctgtgctcagaatataacattcaagtaattgagaaaagtggtatcatctc

SEQ ID NO: 149881 - DNA, 122 bp, Homo sapiens
acctgcgtgggcttgtgcagggtgagctcctcgaagatcttgaccaggtagtccttgcagcgggagtcggactgcaggatctcgcacttctgcagctgcatctgcaggaagttcggcgtcaa

SEQ ID NO: 149882 - DNA, 122 bp, Homo sapiens
ggcatcagcaaaccataatcacaacagcagggacgtggctgctgctccaaatctgcctaacgaaggcagcacaatctttaatacctgtgcagctttgtaaatggagacaggatactctcttt

SEQ ID NO: 149883 - DNA, 122 bp, Homo sapiens
ccaaattttattattgagacggggtcttgctgctgtgtcactcaggctggcatgcagtggcgcgatcatagcttactaaagctaaaactttgcaggcccaaaccatcctcccacctcagcct

SEQ ID NO: 149884 - DNA, 122 bp, Homo sapiens
acacacacccagcacatgtacccacccagcacacgttcactcgcaccctgcacagcccagcgcgcacacacccagcagacagcacatgctctcacatgctggcatcagccgtcagcctcagc

SEQ ID NO: 149885 - DNA, 122 bp, Homo sapiens
gtggtagatttacctttttgtggtcctaatatctttgacagtttttactgtgatctccctcggctcctcagacttgcctgtaccaacacccaagaactggagttcatggtcactgtcaatag

SEQ ID NO: 149886 - DNA, 122 bp, Homo sapiens
ggaactgagccatgtcctttgtttggtctgtggatttagacgtggaggaggagtcctgaccggctgagcagggctgagttccctcgtgagagccccgggccttcagccccttccaaagccag

SEQ ID NO: 149887 - DNA, 122 bp, Homo sapiens
acttccaccttgaaggtaccctgggctggaaacgggtccggtacaaacgcaatagggctgcgtagtcgtgggcaagtgggtgctgtctctgcgccccgtgggcgtgctaagcacagtagccc

SEQ ID NO: 149888 - DNA, 122 bp, Homo sapiens
aaataatctgatatggatcaactcatataatcttcttggggccatgactattccaagctccgtcttccacaacctattttattgcatggatactaagcaagtttaactgattttgctacttg

SEQ ID NO: 149889 - DNA, 122 bp, Homo sapiens
cccaactccactgggcacctgccacacttttcctcatgtttttgttcactgtggttttgtcgtaagtcctggtgttggcctgaaccaatttctttttgtttgtttttgagacagagttttgc

SEQ ID NO: 149890 - DNA, 122 bp, Homo sapiens
ccacccaagggaagaaggcatggagttcatggtgttagcgcaaaagttctgaatggcatccgtcctaccggaaacctaggaaaaggtatcagaactcagatctataaagcccacttaaaatg

SEQ ID NO: 149891 - DNA, 122 bp, Homo sapiens
actggcctcagcagcgggcgcaccgctgagctgtgaccgtgcacctcaggcacatcgtttcggctaacgttcacacaacccgcagtgtgtgctcctaccgcacccccttacagatgagcaat

SEQ ID NO: 149892 - DNA, 122 bp, Homo sapiens
ctcctgagccgggcctccgtggctgtgagctgccggcagatcacaggaacgcagctaaagcgtgttcgtgcaagctggggccagggccccttccacagcagctgccctcaatcagcacatcc

SEQ ID NO: 149893 - DNA, 122 bp, Homo sapiens
gccggcgccatgttggggcggtttgaaagcgagcgcgggtgtcgagctctgctgtgactgcggaggaagctgcgagtgagccgagcctgaggcggggcggtgtccgggttggggatgctttg

SEQ ID NO: 149894 - DNA, 122 bp, Homo sapiens
gcccgggagaacaccgcgcgcttccctcgctgaggacgcgaggctgggcagatctgtctgcgcgctagttttctgcctgagaagcttgcgaatggcccctttttgccaaagctgctgctctc

SEQ ID NO: 149895 - DNA, 122 bp, Homo sapiens
tcatacattgtgtttggatatgacccccctcttaaaaatgcttgcaatgtttatttttgccggatgtcatcaaaaagaagttgttgatggtgtgtgctggagttggtaaagctgaaactacc

SEQ ID NO: 149896 - DNA, 122 bp, Homo sapiens
gtggggcctgagtgccaggcggcaggtggaacacagctccaggaatagggaaaagggcttcgcgttctagctcactgcacctggacaggtgcctgtgtgacttcggccctgccctgtgacat

SEQ ID NO: 149897 - DNA, 122 bp, Homo sapiens
ccgggacttcgccgagattttctgtagggcgttttaatctgttttcctactgcgtgccggcgtcgcagcgcgtgcggctcagggcttggtgactccggcttagcccggcggtcgcggcgagg

SEQ ID NO: 149898 - DNA, 122 bp, Homo sapiens
acacagcagaaggcttagttttgatcacttttatagagaggtctggtacttccaagaaaacgggacagctggggtcctgttgggggaagaggattaagaagacagggcttgagaaaagagag

SEQ ID NO: 149899 - DNA, 122 bp, Homo sapiens
ctcttgctaaaagaagcatccacttgtcctaacagtattgtataggtctaatttatccaccgatatacattttgccaaggatgatgatctgatctaatgaagtaggcgcctgtcatgataaa

SEQ ID NO: 149900 - DNA, 122 bp, Homo sapiens
ccacgcccctcaggtcgaggccttgcgtcgtggccatgttggtcctgggggaggcgcctgcgcgcggtgaggtagtttttgcgtttggctttgccgccgcggtgtagtccgcgggggcgtct

SEQ ID NO: 149901 - DNA, 122 bp, Homo sapiens
ttaaaggagattaaaattcttttctattactgggtatctcaaataaagatattcctgtaccgtaaagggttatggtttaaaaaaaaaaaactcagacacacttaaagtaacacatttcaaac

SEQ ID NO: 149902 - DNA, 122 bp, Homo sapiens
tgcggcggggccggggtccgagctgtggagggcggcagggcctgggacgccgtgaggggtcggggccgagccgggaggccgagcggggccggtggctgccggccggcggggccgagggatgc

SEQ ID NO: 149903 - DNA, 122 bp, Homo sapiens
tggtgagaacatcagtgaccataatggcccttcctgtcagtgtttgctgcggattgttctcggaaccgcaggggacagacacaggcttatagcctgtagagatttacaaggggtgactgcaa

SEQ ID NO: 149904 - DNA, 122 bp, Homo sapiens
ggctatgcacagtgcttgcaggccagcacgagttccgggtgggtgtggactcggcacgcccggcactcggagcctccggccatccctgccggccctgggcaatgaggggcttagcaccgggg

SEQ ID NO: 149905 - DNA, 122 bp, Homo sapiens
acgtgcacgtcgctgctgagtgggaggaggtgtttgtcatcgcgttcaaaaggggcgtttcggtgtctcccgtcatgcaagcaaatggtatggctctcggccgcctttgaataaacgagtgc

SEQ ID NO: 149906 - DNA, 122 bp, Homo sapiens
gcaggccttgtgcagtggggggactcgaccccctgacatggggctgcctggagcaggccgcgtgacgtggggctgcctggccgcggctctcacatggtggttcctgctgcactgatggccca

SEQ ID NO: 149907 - DNA, 122 bp, Homo sapiens
tcagaaagacagctccctttcagagcaggaatttcccttcaaggtagcaggagatgaacgcgtgctgctccaggattttacagaactgattctgcagcaaagacaaatgttgcctgtatttg

SEQ ID NO: 149908 - DNA, 122 bp, Homo sapiens
gcgaaaccggcaaagatcaatcagaaggaccaacctgacactctccatgtagccgccaggcgcgcggagccgggctcggggcgcccgcgcgggccgggcgtggggtccggcggcctcggcgt

SEQ ID NO: 149909 - DNA, 122 bp, Homo sapiens
gggctctgctcctacccgagggcacccctggaggaaattctcgaggtgacctggacagggcgggctgggcgaggacgctcccggggcctggaggcggagtcgggggcgggcgcgcgcagtca

SEQ ID NO: 149910 - DNA, 122 bp, Homo sapiens
aaactcacagctgctccagaggttcctccagtcaaaccctttctggaaacgacggcggcccggcgggtccaaaccacctaccatccccgctcgcgtttccaggctccctacccccgccgccg

SEQ ID NO: 149911 - DNA, 122 bp, Homo sapiens
gagagggacagggcacagtgactggcggctcccgagtctccgagctgatagcggagatggcggtgggggacgagatgctaagagaggggcgggtaggtgagggcgagccatcgggactcaag

SEQ ID NO: 149912 - DNA, 122 bp, Homo sapiens
gtaattaggctgcaggtgactgtgtctctcacatcctagcctgcttccctggggctcaggcgccgctcggcatttcctgctccagccaggtgtggagtgggggattctcctgccagggctta

SEQ ID NO: 149913 - DNA, 122 bp, Homo sapiens
cttacaattgatagatttttttaattctgtgaccacagagctctttgccagaaatgggggcgggggaaatccattacccagaagcggccccagctcccccttcacagccctcctttcttgtg

SEQ ID NO: 149914 - DNA, 122 bp, Homo sapiens
atgggcttctgcagggaaagctactcacggcggccgtggggagcctctgcgtgcaggccacgggaagccgcagcttccagtccgtctccccatccagctgatccgtccgcaagaagcatgac

SEQ ID NO: 149915 - DNA, 122 bp, Homo sapiens
gggcccagccctcgccccccaccccaccccaccccagtctttgtctttgactcccgaccccgttttgttcctgacacagccctgcccacaatccttagtgcctgctgtgtgtccccgagacc

SEQ ID NO: 149916 - DNA, 122 bp, Homo sapiens
agacgggagggcgtgcctcaagggcagatgggcaaaccaaaccccatcctccctgtgagccgcggcacagcaccaggcgggcacacgcagcacgacacggcgaggagcccaccgcaggggca

SEQ ID NO: 149917 - DNA, 122 bp, Homo sapiens
gcggcttccaaccttgccggaaatgacgaacgagtcaaccggatcggtgactgtggagggcgagctgagccctgtgcgtgagtggggtctggttgtgcagtgttcgtggaccctgggaggct

SEQ ID NO: 149918 - DNA, 122 bp, Homo sapiens
ccctcttttaccttcttcagctctagatccacgggggcggccatcttggtgcactgtaagcgcctgcgcagtgggagttggactgaaatagggtggggaagggcgcgtcttactttgtgcgc

SEQ ID NO: 149919 - DNA, 122 bp, Homo sapiens
cggcaacatttccccattatcaaagattcatgaaactttagctgctgattcaccgctcctcggttccgcctgacggcctccccaaaaacaagtaagtctgaaatctcaaccttctcaaggtc

SEQ ID NO: 149920 - DNA, 122 bp, Homo sapiens
tgggttgtttgttccttcccggtcgatgggactgggcgccgtggagcagggggtggtgctcgtcggggaggctcgggccgcacaggtgcccatggagtgggtgggaggctcaggcatggcgg

SEQ ID NO: 149921 - DNA, 122 bp, Homo sapiens
ctaaatcggccttctccgtccctcttagcctatcacattgcaagctccacctctattccacgtttcagcctatcacggtagaagcactgactattgtagtctgattcggccaaaaacaaaaa

SEQ ID NO: 149922 - DNA, 122 bp, Homo sapiens
cgcggcaccctccacagacggctgctgctccaccctgggggccctgcagggatcaggtgccgggcgctggggcagggacctggcgggggattccaggtgccctcctgccccgtgaagcagcc

SEQ ID NO: 149923 - DNA, 122 bp, Homo sapiens
agccagaaagttgggtctcgacgcgttgctcgtcttcttgtacttgtcaatgaaggtggccggggcccacccttccttatcttcaatctgaatgtaccaccagccactcaagtttttctcga

SEQ ID NO: 149924 - DNA, 122 bp, Homo sapiens
agcccaggcacagagccccgcttgatggcaggtgctggacaataacaatgctgggatccccgcctctgctgccactttcctcaccagcatggatcctgccctctcctttgtgtcactcacta

SEQ ID NO: 149925 - DNA, 122 bp, Homo sapiens
agccgcgggcgggatgggctgtggggcagaggctggcgggcaggaatggtctcgtgggtgcgcacctggcctgtgtggcgctgcggccgtggcttctgcatgccagggtcagcagccatctt

SEQ ID NO: 149926 - DNA, 122 bp, Homo sapiens
gtcttgacacccagctctggccaggaaaagagtggacttcttcaaactcttgtgaacaggcggtgtctctgcgggttggaagggtaagagtccctgagatttaagggaaaggattcacttct

SEQ ID NO: 149927 - DNA, 122 bp, Homo sapiens
cacgtcctcctgggcctccagatcatcgtcaccactgatcagatccaagatgagcacgggcgagacgaccttactgtgccgcgtcatcaggctgcgaaattcggactccagggcctccttcc

SEQ ID NO: 149928 - DNA, 122 bp, Homo sapiens
gggagctgccgtccaaagggaattacaccgggacacaccgtttggaaagaggttttagtgcggccgcagggagcaccacctcagcctcaggcgctagtgaggacacaggccgtcctccggcg

SEQ ID NO: 149929 - DNA, 122 bp, Homo sapiens
acaacaaggttaaaaaaaacacccctgggctgcgtcaggccaagccgggagagaaagccccgcctgaaagggcctggaggccccagcctgtcactcttgccacatcagtggagtgtatggtt

SEQ ID NO: 149930 - DNA, 122 bp, Homo sapiens
gccaggggaggtgggggcgaggtagggtgggcacaacagggagctgcaggctagggctctcgcaggagttgcagagtgcagattgacatacgagggcgagaggctccctagggaggaccagg

SEQ ID NO: 149931 - DNA, 122 bp, Homo sapiens
agcggtgcagctctttgagcaggcagctcctctccgtggagtgcaggctgtagatgaagtcgcgcgcgccctgcgccgtgttcagcgcctccatgggctccttcttggggtgcgtgcccagc

SEQ ID NO: 149932 - DNA, 122 bp, Homo sapiens
acagaggcataaagactgatgaacacgaggccgattccctacgactttgggacccagctccgcctccttggctgcttcccccacatccaatctgttcctggcaccatcatacccaccgctcc

SEQ ID NO: 149933 - DNA, 122 bp, Homo sapiens
acttctgcccagaccgccctcacagactatatagccctcataagtccccgctttgatttacgtctgagacagaagacgatgctatcttttgctcagcgagattaagccagctttctatgatc

SEQ ID NO: 149934 - DNA, 122 bp, Homo sapiens
aggccaggctaggaggagccaagacctcagcctcctttccccaaagagatcctttggagacgactccaatttccactatctcctgaatctttagcaacatctggggacatgaagggaagaag

SEQ ID NO: 149935 - DNA, 122 bp, Homo sapiens
gccgcgccccgcctcattagcatgccgggctgcgcgcgcctcatgaatatacaacgacgacgcctcgctcccgcccgcctgccccacttccgcccggacccgcagcccctaccaatggggga

SEQ ID NO: 149936 - DNA, 122 bp, Homo sapiens
agcacgacggctcaaacactagaacagacgcccgccgcagtgtaactgctgtcgcgcgcgcgccgcgaggccgcctttataagcccccaggacacacctctgcgccctcctgattggctctt

SEQ ID NO: 149937 - DNA, 122 bp, Homo sapiens
gcactcgtcaaaggacagtggcccgtcagtgtgcttgtcacggggcggccgcaggacctgcgtctggaaccgggcgggcgcccgggacggacaatgccgcttggcggtcggtcccgcgggag

SEQ ID NO: 149938 - DNA, 122 bp, Homo sapiens
acgcagctggcctccggctgagagcggaggggaagggttccatactctccgaggatcccgcgggctcgtggcgtgtggaacgcttttcatcgctttcagttcccgtttccttcgccccgact

SEQ ID NO: 149939 - DNA, 122 bp, Homo sapiens
aactcccggcatcctcggctcccggctgggcacgccctccgccgtcctgtttgtagttcccgctgtccccagcgtcctattgttcccccgtagcatcagtggccgcaggactacaactcccg

SEQ ID NO: 149940 - DNA, 122 bp, Homo sapiens
cccagtcctttggttctctccgcggcggaagctgtgcggcgacctagcaaccgtccttgccgaccctcccgccggtgacgtggctgcgacccacccttcttgccatagccctttggaaagcg

SEQ ID NO: 149941 - DNA, 122 bp, Homo sapiens
tgaattggctgcagagtctgatgtgtccacagccattgaccttttcagacaagccggcctcggcaatcatctctctggaagtgagcggttgaccctcctggctcccctgaattctgtattca

SEQ ID NO: 149942 - DNA, 122 bp, Homo sapiens
cttctggggcagttctcgccagtctctctggagggagcctacgggttctgcgacgtttctcgcacttgctccctggcctcgctcccgtttccacccctcccacggaggttttcctttctggt

SEQ ID NO: 149943 - DNA, 122 bp, Homo sapiens
ccccaggtcccaccttggaggagggttcttggcatgaccatccctcgagcacaggtgtcccggaggccacgtgtgtggacccgttgcctgtcctcaggacttgcaggcccaggcacagggca

SEQ ID NO: 149944 - DNA, 122 bp, Homo sapiens
ctgttacatttgcatattttcaaatggaaatttgccgacacaaggtggtgatgttagaaacggggttgcccaggagctaactcacaaggcctctgaatgagacaagaattccgtatcctgct

SEQ ID NO: 149945 - DNA, 122 bp, Homo sapiens
tcgctgataaagtttcaaacgatgggcccagcgagcgataaaggccagcccggaccgcctcgcccacagcccaattccccaggcgcagcgagcgcctgcagcccgaaagctctgcgcgcctc

SEQ ID NO: 149946 - DNA, 122 bp, Homo sapiens
catcttgtcggctcttaggtggaaccatcggagcagaagctcggggttgctgggcggttccgaggtgacggaagcgggagggtgcgggagaagtcgctgttcgctctgcggagtggctcgcc

SEQ ID NO: 149947 - DNA, 122 bp, Homo sapiens
tcccagtgactgagttttgcaagccagtaacactaaagaagaaacatttatattctctttcgcagtagagttatgttgaataaaaggcctcaatgctaacagagaaaatatgtgctttctac

SEQ ID NO: 149948 - DNA, 122 bp, Homo sapiens
tttagagggtctggagatagctgacacccttgactgaagcatcactaagacacatcctggcgtcaggcagcacagtcgccttcttacacatgtatgcttccttttttcctgtagcaagggat

SEQ ID NO: 149949 - DNA, 122 bp, Homo sapiens
ggcagatatgataatgaatttatcatgaagccgcccaggctcctgcgatcacgtggtgcccgtgcagcctcagccgccagggtctgtagcagggtgacccgacctcgttagggccacggaag

SEQ ID NO: 149950 - DNA, 122 bp, Homo sapiens
caaagtccaagatttggcaccagcggagttcctctgaggctctccttggctagtagatgccgtcttctccctgtgtcctcaggtggccttccctctgggcctgtcggcattctgattgcctc

SEQ ID NO: 149951 - DNA, 122 bp, Homo sapiens
cacaggggctgctgggataggacttttgtccgtgagagtatccaggccccccttctccgccgcgctgtttttcttccttccacggctgcctccacctcccctttcaatcctgaccttcactt

SEQ ID NO: 149952 - DNA, 122 bp, Homo sapiens
ttcagggtcagaaacgaagtaggctattgctcaaggttcacatatccccgctccgaacaccggagtagagaaaatgcagtggagcgctagtcattgcttacaaaaatgtttcaaagccttca

SEQ ID NO: 149953 - DNA, 122 bp, Homo sapiens
gccatcttgcgactggacagaaagggtaatccctctttttagtttctgctgtctgtgacccgaaagaataaacctgggacttccggaagccctctgggcacccccccccccaggagggttgc

SEQ ID NO: 149954 - DNA, 122 bp, Homo sapiens
caaagcataggttggtaggaatcaaggcatagaaagggtaacttggggtccccacagcaccgccctttccccgctcccacttcaacactgtcccacctgcctggaagccctgccctccccac

SEQ ID NO: 149955 - DNA, 122 bp, Homo sapiens
gggcagtaatgctgcagctatggccacagggagcgctgcctggatgggggaaagcggcatcggagcagctcacaagccctccgtgggcatgagcaaggcagacccctaagccctccgtgggc

SEQ ID NO: 149956 - DNA, 122 bp, Homo sapiens
gtgtgggtctgggaggtgtggagttgcgttggcggcggttgttttgcacgcagtcgacgccgcttccctggaccaccagccgcctgcagcgggcgtttagacggggacttccgtgccctttc

SEQ ID NO: 149957 - DNA, 122 bp, Homo sapiens
agaaaacatctagattgcagccctgaaacaaagacagaaaatggagaatcttttcagaaccgtgaaggacagcaggagctggtgcaccagaggacaaaccaggagccccgagagcctgggca

SEQ ID NO: 149958 - DNA, 122 bp, Homo sapiens
acagggagttccaccaccagactgccctggatgagcgagaaagccaccggctcatcttcccggctgtcaccctgtgcaacatcaacccactgcgccgctcgcgcctaacgcccaacgacctg

SEQ ID NO: 149959 - DNA, 122 bp, Homo sapiens
ttctgaggtggcctcttgctccctctagtggtttagaaatcactgcaggcgggttaaagacgggtctggtttttctccgaggaggaatccgcattaaccatttagacatctactgcgcagtg

SEQ ID NO: 149960 - DNA, 122 bp, Homo sapiens
gaattaaaaaggatattttaaaggctttctagccctgaaagattctaaaagatgcctgtgcgttcccagctgtggcctggaggcatatccgcctacccctgggatatggcttccagtctgag

SEQ ID NO: 149961 - DNA, 122 bp, Homo sapiens
tcctggagctctgggagccctcccatccctgctctcagcaacagtgatgctgcctttgggcggctgtgcagccaacccacactgagtgatagctgtccctgtcattttcttaaatgtcacca

SEQ ID NO: 149962 - DNA, 122 bp, Homo sapiens
gaggcgggacaccgaggaaggcgactcagtgtcactgtccgtcatgggtgtgtgagcccacggctgaatcatcacaaggtttcacacccgcacttcacctgacaacttttactaggaaaatg

SEQ ID NO: 149963 - DNA, 122 bp, Homo sapiens
acattaagcatttgttaagtagtagccttgttaccattctctctgtctcctttatccctccgcccgatgtggtgggggtggagcagagcaagtacactgtttactcctaggatgctggctat

SEQ ID NO: 149964 - DNA, 122 bp, Homo sapiens
cgggagggaacggagggagaatcaaaaggcatcctcccccacgacgcggaggcggtggtacgattcctcaaacgcccaagcttgagctttttttgtatgcgagatagaagccagggcaacct

SEQ ID NO: 149965 - DNA, 122 bp, Homo sapiens
tggcatgcatcctttactatggcaaataaacctcctaaaatgattgagacttgccttgatcgtgttctttgatttacagagtcaaggtgggggctggttagatcagatctctctcagtcata

SEQ ID NO: 149966 - DNA, 122 bp, Homo sapiens
acttactggtcaagatctaagttcgggatttttacgttttccaaagcacaagtgttttatcgccatatctacactaagccacgtagtagtctggttggtcttgaaagtatccatccacgctc

SEQ ID NO: 149967 - DNA, 122 bp, Homo sapiens
ctgttggctgaaatgagagctaaactattttagtgtgccctccggatatttatcaattttcgtggcatgcaaagaaatgtgatgctgacaagtagatttagtttgtgcttggtctaattact

SEQ ID NO: 149968 - DNA, 122 bp, Homo sapiens
gtgggtgcgtgtggagtgagcgttccaggggccttgccgtgcccgggagagtgagggtaacggacattcccacggggatattcccacgcggagaactgggaccccgatcagggtctggaggg

SEQ ID NO: 149969 - DNA, 122 bp, Homo sapiens
cggcagcccgtgcggttctctgtgggccgcatgtcatagggacacgtcttacaggtgtagcggtccacctggtactggtaccctgtgcaaggctcgcagtgccagcagcaaggcatgccctt

SEQ ID NO: 149970 - DNA, 122 bp, Homo sapiens
cctcttctgcacagcaggaaggccaggccaggccactcttgggcccataggagagcacctcgttcagaagggacccttctccagagccactggtggcctctcatccgggaatgtatgggttt

SEQ ID NO: 149971 - DNA, 122 bp, Homo sapiens
aggtgaaagttttcaacttaagggaataaaaacgaaattgtatgctgaggttgctaaaatcgatggtaagagcaacaaatcttctagttgtgaaattacaaagaagaaaacagaaatttgtg

SEQ ID NO: 149972 - DNA, 122 bp, Homo sapiens
cgggacatcatgacggtgggagccaggctccgaagcaaggcggagagcagcctcctgcgccgcgggccccgagggcgagggcgaaccgagggggacgaggaggcggccgccatcctggagca

SEQ ID NO: 149973 - DNA, 122 bp, Homo sapiens
gcggagctgtgggtgtggggaggagacccctctgcgtcatgctgacggtgtcggcagagtcgccagcttctgcaggagcggtacctgtgggttcttctgtgacttgtttaaccgcatctttt

SEQ ID NO: 149974 - DNA, 122 bp, Homo sapiens
ctggagcagaggagcgacttgagtcgctttcccctcttgggcagggcaatcgtgtctgggcgaggcctgcctagtgggctgggcccctgggccacgtctgtggcctggagagcgggtcccag

SEQ ID NO: 149975 - DNA, 122 bp, Homo sapiens
cgggcaggggggcggggccgggcctgaccacagcggccgagttcagtcctgctctccgcacgccaccttaggcccgcagccgtgccgggtgctcttcagcatgtccttcatcccggtggccg

SEQ ID NO: 149976 - DNA, 122 bp, Homo sapiens
agcactgcctaacattcttgcttgcccagatggggtcactgtgcccacacaccctaaactcgtctgtactatattgaaaccaatgtttacatccacccccaccttactgaggggtcccaaga

SEQ ID NO: 149977 - DNA, 122 bp, Homo sapiens
ggctcagaagtagagggagaagaggaacccagttcccttgacttcccttttgagagcacacgttctgctgggtagctcaattgccagcctctgtcatgagaaggtatagccccatcttgata

SEQ ID NO: 149978 - DNA, 122 bp, Homo sapiens
gaccaagccggctaccaccagaacagtgtccacttaccagggccctttcctgcatgtccccggccccgtactgcccccagacttcggggcccggagcccatcaaggagaagcctcagtcggc

SEQ ID NO: 149979 - DNA, 122 bp, Homo sapiens
gggcggccgcccgccgtaaatacccgaagagcggggcctcagtgtagcccgcagggccagcggcgccgccaccagaggcaggtgaccagaatccttctaaataataggaagctctggtcagg

SEQ ID NO: 149980 - DNA, 122 bp, Homo sapiens
gaagctagtaggtgtccaacaaaccctgccatgaatactggggccaaaaaagaggggacccgtaggacagatgttgatcccactcaaagtcagcacagcgggatgcacttaaagggcactga

SEQ ID NO: 149981 - DNA, 122 bp, Homo sapiens
ggaaaggaaactggctagaagattcatgtacaagaaggtcacaactttaaagctatctgacgctaatgacttgtacaatctggtttgcaaactctgagagacagtatcaaataagcactgtc

SEQ ID NO: 149982 - DNA, 122 bp, Homo sapiens
tctcagacctaaggacagacatctttaaaactactgatggtgtctgtgaaacaagaacatcgttggcctttttggttctgagggattcatcccactgggcagatctaagaagtaattgtctt

SEQ ID NO: 149983 - DNA, 122 bp, Homo sapiens
gtgatgaggccgcccacccctcggtgttagaatccatgagactggcgtgtccttcggtgacgaggccacccacccctcggtgttagaatccatgagactggcgtgtccttcggtgacgaggc

SEQ ID NO: 149984 - DNA, 122 bp, Homo sapiens
tgaaaaactggcaaaggaatggaagaatattttagtcatgagttgttttcagttttcagacgaatgaatgtaataggaaactatggagttaccaatattgccaagtagactcactccttaaa

SEQ ID NO: 149985 - DNA, 122 bp, Homo sapiens
tgagacggagaagcgctgagtgagagagacggatacgtggagagaagagggatgccggagcgggtgttaaaagagacaaatctggccgggtgctgtggctcctaatcccagcactttgggag

SEQ ID NO: 149986 - DNA, 122 bp, Homo sapiens
tatgaaagagaaggggccccggcacagctgaaagccatctgaggcacgagctggtggcggcggtccggacacaggccccaggtggccgtgacggccctgggacgccctctccctcctgccac

SEQ ID NO: 149987 - DNA, 122 bp, Homo sapiens
aagacaaggtcttgttctgtcacccaggctagagtactcgattacagctcactgcatcctcgacctcccagactcgagggatcctcctgtcagaggcatgtgaaccagagcaactccatctt

SEQ ID NO: 149988 - DNA, 122 bp, Homo sapiens
aatcagatgacgatatgtatagtcattatttactttccttcttagcacactacctgatgccgtgagatcctggaacatgcaccatgtgcctatccggttctggcaagacgcttctagctgtt

SEQ ID NO: 149989 - DNA, 122 bp, Homo sapiens
agataagaggctggcatcactttgagggagggcgagtcgttgcagctgctgggctaaggacgtcatctttcacgccagcggagttttaatgacacgggctaaaaaaacgtaagcactttgat

SEQ ID NO: 149990 - DNA, 122 bp, Homo sapiens
ccaaaagaatgtggcagaagtgggcatcatgccagttgacagcttccaattttacctcttcgagctcactcttgggatgctctctctcagaatccagctaccatgttctgagaagcccaagc

SEQ ID NO: 149991 - DNA, 122 bp, Homo sapiens
accgaggaggtggtgggagaccaccacttgcgagcttccaaaggactttcaaacctgaaccgcagagtcagagccctcgcgccgtagaaaagtcaggagcgccccggggcccccatcggaag

SEQ ID NO: 149992 - DNA, 122 bp, Homo sapiens
gcccaggtggggtggagtctgggtgccctggggccctgccaccttccacttggacacgggcgaggaggggtttgccctgagcatcccctgtagaagcccagctccacagcagcgctgtagga

SEQ ID NO: 149993 - DNA, 122 bp, Homo sapiens
tgagtgacaagcgggacaagtacgccgtgggcggggccggcgggtcgtgatgttagttcgcgctgtgtggaggcgggccggcgtggcgctgtgacgcagcgggagaagacgggctgggaggg

SEQ ID NO: 149994 - DNA, 122 bp, Homo sapiens
ggggttccccctcattcttccctcaaagcctcagtccctgaggtcctcctcagcaccccccgcttctggcggcctgtcccccgtgaagtgtaaaggcacggccgaacccaccggccttgccg

SEQ ID NO: 149995 - DNA, 122 bp, Homo sapiens
ctctttatttcatgtctagcatcatctatctaaatttactgcaggcaggcacagtggcttcggcctataatcccaacactttgggaggctgaggcgggcagaccgcctgtggtcaggagttt

SEQ ID NO: 149996 - DNA, 122 bp, Homo sapiens
ttcacagagaggaaagtgacagaagacgtgcggagggagacgcagagacagaggagaggccggcagccacccagtctcgggggagcacttagctcccccgccccggctcccaccctgtccgg

SEQ ID NO: 149997 - DNA, 122 bp, Homo sapiens
tcacctttgttcttcccataactctgtaaaaaggggctgggcaggtatcccatcctctttcgttcagatgcagaaactgagtttcctccacatcttctggctgttcccacagcaatttttcc

SEQ ID NO: 149998 - DNA, 122 bp, Homo sapiens
gtggtcaataaggacacccccgcagcgcaggctggtgccctcaaacagccccacctgccacggctgtgagttacgcccacactcagtgccattgaaaatcttcggtgtggctgcctggctga

SEQ ID NO: 149999 - DNA, 122 bp, Homo sapiens
ccagccgaggccggaaaagtcgatggggctcagttcggcgacgctcggctaggttcggtgcggtctgggcgcggggctcggagggagtcggcggtgttcggagccgagtcggtgctccggcg

SEQ ID NO: 150000 - DNA, 122 bp, Homo sapiens
gagcactctgcaccacatagggctaaacggtggttccattcaagaacagagtgaactacccggactctgggaggcaaacactgtagttacaaggaggtaaggtgcatcccagttttcaagaa

SEQ ID NO: 150001 - DNA, 122 bp, Homo sapiens
cagggcctctgaggagagcaagcccaaatgctcagatcttctctgatgacacacccactccgtctacagtactcatacacacgttcacaagctcccgattcttggtcctaaatgcatcttga

SEQ ID NO: 150002 - DNA, 122 bp, Homo sapiens
ggcaagggcagaaagagacacattcccagatgaggagggcttgtttttaacccagcactgcgagttccaccaaaaactgaaaccctagcaaagggtgccaggtgaaggcctccgagagcgtc

SEQ ID NO: 150003 - DNA, 122 bp, Homo sapiens
gtgggcctgcaggctacactttcccatcggaccctgggagtcccagccctcaggaacccgcgcactgggcttagccagggtgacagagagcagggcctctgcaccttaaacctagttacctg

SEQ ID NO: 150004 - DNA, 122 bp, Homo sapiens
gcttatcagagggagactaacaggagggcgacgaagactcggacgctcttccgtagccctcgtggcccctgcatgtgggccggcttctgaaggggtcagcgtacttccccacgtacccagga

SEQ ID NO: 150005 - DNA, 122 bp, Homo sapiens
acacgcaggaccggccggccgtggacggcgggcagtgtttggaggccagtttctgctcagcgcctcatggtggggctgtttccttggcaccgtgaggggccggtccatgcggccagtggaag

SEQ ID NO: 150006 - DNA, 122 bp, Homo sapiens
aattttatcgcgggtctgaaggaactcctcaggcctccacaaacaagcttattgggggcccgaaggaacttctccaacctccgtgacttagcaggagacaggataagggtaatgacccagca

SEQ ID NO: 150007 - DNA, 122 bp, Homo sapiens
tccactagaatcttgtgggaccatcatacgtgcggctcattgttgaccgaaatgttacgccgcgcgtgactgtacgtacctaagaagcagaagctgtgtcatcaggttggattccaccaagc

SEQ ID NO: 150008 - DNA, 122 bp, Homo sapiens
gtggtcctgttggtcaggccagggcattgctgccaggtggctaggagggtgctctaaccccggggttctgagcccactgtggcactcagatcccatctgctcccctgccctgtcttgtgtgt

SEQ ID NO: 150009 - DNA, 122 bp, Homo sapiens
gcgcggtcaaattataatacataaaagttgtcagggcggagagcaagacattactcttctcggattgccggttcgctcgcgagacttgagcgttgctaggagattcggcaggcgggcggagc

SEQ ID NO: 150010 - DNA, 122 bp, Homo sapiens
cttttgttccctgtggcgcgcaggtcaccctccgttttcttcatggggacgcggtgctggcgcgcagtttcccgcagaaatcctgtggaggggtctgagtggcgctacagcttcagcttgca

SEQ ID NO: 150011 - DNA, 122 bp, Homo sapiens
cgtgaccgttgggcggtggagtggggttagaagttctttcttaaaaaccgtgtatcttcccgcgagaaccggattgagcgttggcgccccgggtcaggctgcgaggccgcaattatagtggg

SEQ ID NO: 150012 - DNA, 122 bp, Homo sapiens
atgacatcatcacgagagaaaacagcagcccgcagcctgaggagtggcagcagctggcaacggctagccttgtgaagctggggcggggtgggaggcagggcagcggcttctattttaagccg

SEQ ID NO: 150013 - DNA, 122 bp, Homo sapiens
agcgggttttgctgattttctgggacacaaacttcgcataaatttcctccatgccgaaagcggccgcagcaggtactgcaaaaagcaagcacagtacgcgcctctcagcaccgcctcttccc

SEQ ID NO: 150014 - DNA, 122 bp, Homo sapiens
tcccacacctgcccagggagagctaggcgcggagccgcaaggggtgtgtgggtgaacgagcgcagggaccggcaacagccatacataccggctgctgcagtggggctggcagctccaggcgc

SEQ ID NO: 150015 - DNA, 122 bp, Homo sapiens
aacctccgagagggaaggattcccagagcagaaataagtttcggtgcttgcttttgtagacgctccctccggatgcgcgtggagcgccccacaggaccgccgccctctgcgcgttggcgcgc

SEQ ID NO: 150016 - DNA, 122 bp, Homo sapiens
cgtatgtgagatcacaccgggaagaagatacctcaccgtggctttgctcacggactgagccgcgctgcccgggcaggcagggactgcctgagacagaaaccccaggtgggggtgggggccag

SEQ ID NO: 150017 - DNA, 122 bp, Homo sapiens
tttgttcaggcgccattccagcttgcttgtctttcacagttttccgctgctttcataggtcgctatttgcggacgtggaaaatggagctaaagcaaaaacttgttcgtcgctaccgggcttg

SEQ ID NO: 150018 - DNA, 122 bp, Homo sapiens
atttgcggctgactaaggctggaaaacgggctgccagaacccaagaggggaggatgaaagcgaaggtgacacaggatgtggcttggcagagaggcgtgcacacagaagtagtgggcagctgg

SEQ ID NO: 150019 - DNA, 122 bp, Homo sapiens
tgttgcgcatgtgcgcgctctccgcctgataggagttgtagttctgcgggtgaagctcggcgttactatcaagcaaccaaactgcaagctttgggagttgttcgctgtccctgccctgctct

SEQ ID NO: 150020 - DNA, 122 bp, Homo sapiens
cgtccccgggtcttgttgcgctcacggtatgtggcctgcttctgctgctgctgtagcactcgttcccggcaagtccgatactcaagcgcaaattcccgcagcgtgtggcagaactgcatgat

SEQ ID NO: 150021 - DNA, 122 bp, Homo sapiens
ggcccgggctctgtgccaatgactaatctccaaagtattcagtgaagcgtctgctccattcgggattttttcagatgggcattttggtttcatcagccctgctttctcccgctccgtgactt

SEQ ID NO: 150022 - DNA, 122 bp, Homo sapiens
ccgagtcggggcagagtcccgctgagtccgagcgctgctgaggcagctggcgagacggcacgtctggaggcgaggcgggcgcactgaaaggaggccggcgcgcccgcggccccggctcgcgt

SEQ ID NO: 150023 - DNA, 122 bp, Homo sapiens
cagagcatcagggcttcaggtggccagctgagttgttcccacaaggctgcaacacgtatccggaacacattgggaactggggctccaggccgagaggcctgagcgccgcctggggatctggt

SEQ ID NO: 150024 - DNA, 122 bp, Homo sapiens
aaattgcaagggtaccttggagagctccttgataatcagaggtgtgtggagcagggagtccggactgggggccaggatgcgggtcctctcgtccgctacatcttggtcctcaggaagcacag

SEQ ID NO: 150025 - DNA, 122 bp, Homo sapiens
tcagtggacgggcaccgccactccacatacccgggacaagtcgtctgtcttccagcacctcgttctaaaacctgactggagagcaacaaaccaccggacatgggaggaaagcctttagcatg

SEQ ID NO: 150026 - DNA, 122 bp, Homo sapiens
cccttccgcgcgcgcccaccgccccttccgcgcgcgcccaccgccccttccgcgtgcgcccgcctgtggttttcatgctttttagtcaagcgcccgcaggcccccagggcctctggggatgc

SEQ ID NO: 150027 - DNA, 122 bp, Homo sapiens
acccgtgcctgtggtcgggctgagggaccccgtcccgggctgatggggctcgggtggccacgttttcctatcatgaagcatggaatgaggatttctggggccagggccacccccaccgttcc

SEQ ID NO: 150028 - DNA, 122 bp, Homo sapiens
ctcaatgcgtggtagctgctctctgtcacatgcatgaggctgcatgaggttacaccatatcggagctgcaggatagcacataaaaatgcaattatttcatattagggtaaccagggcaggat

SEQ ID NO: 150029 - DNA, 122 bp, Homo sapiens
gttccccaggaagcagagcctgaggcaaaagcctaagtgccacgactttattcaggagtgcgatcccaggggagcagaagtgagggaaaatgggccgcgggcagggaaaaagggagagatgg

SEQ ID NO: 150030 - DNA, 122 bp, Homo sapiens
ggaaggagcagtgaggctgggctagaaccgtagggtcgggcggggtgctgtgcgaaggggcgggcggggtgctgtgcgaagggacgggaggggcgggctctgcaggcgggaagacagaaagg

SEQ ID NO: 150031 - DNA, 122 bp, Homo sapiens
gggccttccagaaggccagggcggtctccggcgctcagacctcagcctgcctctccgccccgcccctcttggggggcatcccttctgtgcacgcccacgtgtgagcagagaagcaactctca

SEQ ID NO: 150032 - DNA, 122 bp, Homo sapiens
agatgttcttagtttccatcaaagacagtgttgcctgtgttgtcatccttactgtggagacgataagccatcaataaggctgcatggtgggcaacagctttccaaaactgagtggtgaatca

SEQ ID NO: 150033 - DNA, 122 bp, Homo sapiens
ttcattattgctcctttgctaaaagaataaaatgtggaatttgttatttctcatccaaggcggactatgtcacctgaatgcatcaagcccacccctggctcctatggctttaatgtggcaga

SEQ ID NO: 150034 - DNA, 122 bp, Homo sapiens
gagaagacacatcagggtggggcccagccggctgccaggcaccaggtcctccaccacgagcgccggaaacaggtcgatgttgagtgtcgagccatacaacctaaaaaataaagagaaaactg

SEQ ID NO: 150035 - DNA, 122 bp, Homo sapiens
tattatcagctgcagctcattagtagactttatgatcaagaagggacttcagaggtcctgcgtctgatagtttgcaaatcaaatcatacgtcagcatcagtgtcaccatctaccaggtggga

SEQ ID NO: 150036 - DNA, 122 bp, Homo sapiens
ccacaccaaacagggcccagagcagcgtgtgtgcacgtgtgcagtttcgacgtgcccgcacgcacatagacgtacgatggggaaattcccatggaaacacttttatttctggaagtcagaag

SEQ ID NO: 150037 - DNA, 122 bp, Homo sapiens
aatgaatacaaaaggaaaacattcaacttggtctattaaaaaaaggcaaagggcaaagcacgagaaggaaacctcatcctgatgactcagaagtgcagagagtaactagaagacaattttag

SEQ ID NO: 150038 - DNA, 122 bp, Homo sapiens
ccacccccgggcagacccgggagagctttgattacctggggtcttctgcttcctcccagacgtcagctccgcttcaggaatcgactgagactttggctcagagtttggttccattcttggac

SEQ ID NO: 150039 - DNA, 122 bp, Homo sapiens
gagcacaagctccctttttcctccagactccccccgggttgggaggatccaccgagtggacgaggagtgataattcctttgagccaatcgttggtgcctgaagccccgccttcttccctacc

SEQ ID NO: 150040 - DNA, 122 bp, Homo sapiens
tatttcactttgcctaaggaacggggtgtgctgcggcacccattgcctagggaaaaaacccggatgtaaagtgagtgaaactaaactagagtgaagtagggcagcggcagccaaactccagt

SEQ ID NO: 150041 - DNA, 122 bp, Homo sapiens
agctatgactggggttgtcccaagtagtttcccagtagaaatcctatagtttttttggtacgcttttgtagcactaggcactttctccccttacccgtttttccttttattgtatctaatac

SEQ ID NO: 150042 - DNA, 122 bp, Homo sapiens
gaggccgattaagccaaacctatcaccacgctaactttgtccttctctgggcctgactgtcggccccaccagtatctctcccggacacaccccgtgtggcagaggagccttcgcagcagctg

SEQ ID NO: 150043 - DNA, 122 bp, Homo sapiens
ccgaagggttctccttgcctgctgcctagactgagctgatttctcaagacaggggaattgcgatagaaaaagagtttaatttacacagagctggctgtacaggagaccagaattttattatt

SEQ ID NO: 150044 - DNA, 122 bp, Homo sapiens
gtcttctgtgactttcttgatgggggcagatgagatctttgtactgcattaagtggatagcgctcaggtcctttgggcttggcgctttggcaatctccaggcagctcactttggcctctgtt

SEQ ID NO: 150045 - DNA, 122 bp, Homo sapiens
tcacagctgcgtctgcccgctggccatgtctcacgtcctgaggacgtttcacaggagggccgcccttctgctgcccgcaagacatacaggtgcagagctggggacatggcgtcgggacgtgg

SEQ ID NO: 150046 - DNA, 122 bp, Homo sapiens
tttgttccgcccgtgtcgagcctggagccagaacctgtgaagagcggaagggccaagggacgtcttctccacgccgctccgactccaggggagccgtggcctcctctccgccctagcgctga

SEQ ID NO: 150047 - DNA, 122 bp, Homo sapiens
tgccgtcacctgtcacacagcagcagtcccgcggctcttcccgcgaggcccttcacgtgccgccgaaggccgggctccctagacttcatggtcgtgtttgcatattctgttgctgtgatctg

SEQ ID NO: 150048 - DNA, 122 bp, Homo sapiens
gatacagactttgcctgcagtacttacagacgcattctatctacactggcttcctagcatcgaaagatttttaaaagttcattttgagattcctgatctaaagttccacccaagcaaactta

SEQ ID NO: 150049 - DNA, 122 bp, Homo sapiens
acgtctttgctcggccccagtttcagatttccatccattctccaatgcagtcctcctgcacgtccgctcaacgcaggccggggcgcactgtactgaaatcgatttagattttcccatcgctg

SEQ ID NO: 150050 - DNA, 122 bp, Homo sapiens
ggcttttcctattcagcataatgcccttgagatccacccacgtggcagagtggatcgctgcggagtggcaccccggggcacccacgtggcagagtggatcacgcagtgtggcaccccggggc

SEQ ID NO: 150051 - DNA, 122 bp, Homo sapiens
cggctccagtgcaatagctcggggagcacgcgggctgcgtccggaagggacccaagtctgcgagcggagagcaaacggggcggaaattcgttcttcccacactctgcccgcggggacgcagg

SEQ ID NO: 150052 - DNA, 122 bp, Homo sapiens
ataattattagagtgtttctctccactaggcaaagacctttctagagagaaagcctaggtcgtatctggccctgtattctaccatctgggacatagttggcactcagaaaatgtttcctgaa

SEQ ID NO: 150053 - DNA, 122 bp, Homo sapiens
tgaccagctgcccatcgctggactttcctgctccacaggctaatcactgagctgctcccacgctggatggggcggagctagggggcaccccttgtcctgagagtcgtgggcatcagacttgc

SEQ ID NO: 150054 - DNA, 122 bp, Homo sapiens
aagtgagaagcagaatccgaagttgattggccaaaaggggatttgccccaccccaatcaccgcggcagctggccgcggtgggcgtggtctcccggcaagaaggtttaaagggcgcctccatg

SEQ ID NO: 150055 - DNA, 122 bp, Homo sapiens
tatgtaagaaaagggatggaggagccgccccagcgggagccagaaaggacgcggtgttctcggttgcaatccccaccctcctcacccagcagggcaggaggcacccaacttggaggagaaag

SEQ ID NO: 150056 - DNA, 122 bp, Homo sapiens
gtgccctatcagggcagaacacatggcgcctttccagggtcgcgtccaaggacctggcaccgtaacagtgccaggatcagcgccaggactgtgcgactcccttccccaagtcttggccctac

SEQ ID NO: 150057 - DNA, 122 bp, Homo sapiens
agaactggctgctggttctttacaattgcccagctgctctgcagaggcgagaagcaattgcgggctgagcctcccgggaccttcgcgggagggtggagaggaggaaggcgggggaggcgggg

SEQ ID NO: 150058 - DNA, 122 bp, Homo sapiens
ccccggccccccatgcccggcccctgctgcggcccacctgatctggctggcctcaaacagcgagaatccgctcagaaagactaagaggcccgtcagggcggccggcaccagcatgtaggtgt

SEQ ID NO: 150059 - DNA, 122 bp, Homo sapiens
ggagccctcttgggaggtggcacagagctgatgttgtgggattccaggtgggcctggttccgaatggacaggatcagacagagacggtcctatcccatgaagcagacaggccccagcagcac

SEQ ID NO: 150060 - DNA, 122 bp, Homo sapiens
ggtgtttgagaagttcccctgggggtgaagaacttcggcatctggctgcactatgactcccggagcggcatccacaacatgtactgagaatactgggacctgaacaccgcgggcgctgtcac

SEQ ID NO: 150061 - DNA, 122 bp, Homo sapiens
ccccgattttccaacataggttctcacgcgtgtctagcaggggtttactgcccgctgccccggccgggttgtgagcacaggactccgtcacctcagcccatggggtcgatgtgtcccgtcct

SEQ ID NO: 150062 - DNA, 122 bp, Homo sapiens
gtgaggacctgggggtcacccacacttcagagtgaggcgcacttgcaagagtgttggcatcgtgtgaaggcagacagcgccacacggtgttgtgtcagcatcgctgtgtcagtccattgacg

SEQ ID NO: 150063 - DNA, 122 bp, Homo sapiens
caaatgtcaacaggcgcagatgatgcgggggtgaggccatgggtctaggggtggggcaaacgtcaacggcaggcagtgggcagggtcacaggaagcacaaacagtggtgcgtgggtctatgg

SEQ ID NO: 150064 - DNA, 122 bp, Homo sapiens
ggcgtgaagcttgctggctcttctttttcctatcgctacatgacaagctaacagagagagcggagagtttgtgcttttctttccggttccccctctgagctgctgcccagtggttcggtctt

SEQ ID NO: 150065 - DNA, 122 bp, Homo sapiens
acagtagttgctccctatctgctggtttgatttctgtggttccagatcctcgagtttaaccgtggtctgaaaatattacacagaaagttccaaaaatgaagaatgtacaacttttaaatttc

SEQ ID NO: 150066 - DNA, 122 bp, Homo sapiens
ccgttgggtgtcttaatggactggttcttaagcacaacttggttccagcagcacggcctccgagctttcctctactgctcttcagagtctataagccacccaatattcttttaacaaattcc

SEQ ID NO: 150067 - DNA, 122 bp, Homo sapiens
ggtgattcacccgccttggcctcccaaagtgctgggattataggcatgagccactgggcccggccaataaaaaaattttttaattagttgggtgatggtgcacacctgtagtcctagtactc

SEQ ID NO: 150068 - DNA, 122 bp, Homo sapiens
gagctgacaataaaacctcagggctccaaaacccggtccaagaaacttttcttaaacttgcgtccagcgcctgcttcagcgccttcgccatgagtctgcgcgggcagacagcggagactcta

SEQ ID NO: 150069 - DNA, 122 bp, Homo sapiens
ctggcaatgccccggcctggggtctggctgggtttgagggtttcctgcttctgaggggcccgatccagatgagaagggtggctgcagctgggccgggcgggtggactcagtggcagccgcag

SEQ ID NO: 150070 - DNA, 122 bp, Homo sapiens
cggggggccttggatccagggcgattcagagggccccggtcggagctgtcggagattgagcgcgcgcggtcccgggatctccgacgaggccctggacccccgggcggcgaagctgcggcgcg

SEQ ID NO: 150071 - DNA, 122 bp, Homo sapiens
gagcagcggcggaggtggaaggactgacccgggcgcggttgcgggtgggagggcgctcgccggcagaggatccagcgcggacgctccctgcagcgccaccctgcggccccttcgagtttcgg

SEQ ID NO: 150072 - DNA, 122 bp, Homo sapiens
attaatgtttatttttgttcatttcacaaaaagagcatatcaagtatcagtagcaaagtacgtgtgaatatacttctgcactcgtgttcccagcattgcaaattgtagttttttgattgcct

SEQ ID NO: 150073 - DNA, 122 bp, Homo sapiens
ctctttgaagcaactctcgcagactcctccggccccagaccagcagggctccactctgcacgtccagactaatcaactcccggacacgatgacaggaggcagaaagcccagaagagagccgg

SEQ ID NO: 150074 - DNA, 122 bp, Homo sapiens
ggtagccccataaagaacgcctagctttcctaaggctcttcatgatgaatccagttacatcgtcctatcatagctaagggtgaaagagtcactaccacagtttggctaaagactcttctagg

SEQ ID NO: 150075 - DNA, 122 bp, Homo sapiens
atgcccagctaatttttgtgtttttagtagagacagggtttcacagcctgttacccaggccggtctcgaactccagatcacaggtaataccccaacctcagcgtctcaaaatgctgggatta

SEQ ID NO: 150076 - DNA, 122 bp, Homo sapiens
ttccaagaaaaagtaccacatcagattggaaactggggacagatcattcctgggatgtgacgggcaccagaatgctccctctccaaaggatctaaggaccaaagctgacagtttctttactt

SEQ ID NO: 150077 - DNA, 122 bp, Homo sapiens
acaaacaaaaacgagcctttagtggctctcttagaaataagactgtatataacatatattcgaacagcaactttaaagccaaagaatgccacaggaaaatacataatgtatttgaatctcat

SEQ ID NO: 150078 - DNA, 122 bp, Homo sapiens
ctggagatgagcggcagagcgctcggaccctggtccctgcctgctggcctcccacagccacgaccacttaccccacccggcattctctctgatgcgtggaccaaaagggaagggcatgggaa

SEQ ID NO: 150079 - DNA, 122 bp, Homo sapiens
ggagcccatgaggacgcagctgcacagccgggcgggcctgataaggcctcgtagcctgcgcgggcgagataaagccagcacgcgcctgtcctcaatcccggccgccatcaacatgcagacag

SEQ ID NO: 150080 - DNA, 122 bp, Homo sapiens
atgctgccctgtgaaggttgctatttattttcacaaacctcagggctgcattcagtttcccgtctacctgtgtaggcagccatttcttcagtgtattccctatgttctaattggctcgctgt

SEQ ID NO: 150081 - DNA, 122 bp, Homo sapiens
gctgctccgcgcacaagtggccgcgatcctggcccggaggctccgccgcacgctgcgcgccgggaagagcaccctcgccgacctgctgctgccagtcctcttcgtggccttggccatgggct

SEQ ID NO: 150082 - DNA, 122 bp, Homo sapiens
tgcgcccggggatcagacgggaggtggagttgcgcggggagggcgggcgagtcgggcgcccgctctgagagtcggtttcttttccccctcttgcgtggggcggggtggtgcgttccgagttc

SEQ ID NO: 150083 - DNA, 122 bp, Homo sapiens
gggccggagtggtgcgagccggcggggctgcggagggccagtggactcaggtgaggaggccgcggcggagcggggagctggccctgcgctgcaccgcggcaggtgggggccgcttgcaaccg

SEQ ID NO: 150084 - DNA, 122 bp, Homo sapiens
cagatttcttcttcttatgaggacaccagccatattgattagtgaccaccctaacaaactcgttttaactcgatcacctctgcagtaaccacatctccatgtgaggcctcattctgaggtac

SEQ ID NO: 150085 - DNA, 122 bp, Homo sapiens
aggttgcagtgagccacgatcactccactgcactctagcctgggtggcagagtgagaccccgtctcaaaacaagaaaacttctgtaaaaactcatgtaggccgggtgcggtggctcacgcct

SEQ ID NO: 150086 - DNA, 122 bp, Homo sapiens
tggccagaccgtgaaggttaccttgaccttgtctgcatgataaatacaactggagcggggcggaaggcacaccattcagaaaagcaaactgcttgcatcttctttatttttaatctcactcc

SEQ ID NO: 150087 - DNA, 122 bp, Homo sapiens
ggcagagtcccggctgacatgctgtctcctgccagcagctgcggactcctgttctctacacgatgggaattgagaaacagggctaacgccggtcaatgctatttgtccatctgggcattggt

SEQ ID NO: 150088 - DNA, 122 bp, Homo sapiens
gatgtggaaattaagatggtagttatttcatattatgctaaataattacatttactagaacgcctttgttttttaattttgattctgtcctctggttgagaggcatttgtatgtgttctatt

SEQ ID NO: 150089 - DNA, 122 bp, Homo sapiens
gggttgtcctggggatccagtatgatgaagtgcgccaggggcttggcatggtgcccggcacgcagaaagtgctcaataaatgtttttgtcataacgtgtccgggtggcctgggccaagctgt

SEQ ID NO: 150090 - DNA, 122 bp, Homo sapiens
gccttcaccgaagtcatgggcatgctgtggcggcggctcaatgacagcggcaagaactggcggcacgtgtacaaggctctaacattgctggactacctgctcaagacgggctccgagcgggt

SEQ ID NO: 150091 - DNA, 122 bp, Homo sapiens
gagccactggcagcctttgcgtactgtcatagcaacgggaagggcacctcgaccaatcaccgcccgggaatacggaggggcggggcggaagggacgaggtggagccagtggcagcactctgg

SEQ ID NO: 150092 - DNA, 122 bp, Homo sapiens
ccgtgagcacaaaggtggagaagacgggcacggggtacttggtctgggcaggccagcactcgatagtggcccccatgggcaggcagaagacgggcactgactcgggcagcgggaacgcctca

SEQ ID NO: 150093 - DNA, 122 bp, Homo sapiens
gacaaaaaatatagtacgaggggaatccttaggaaagctgagtgcaaggcttgagttcaacgtggtccgcatccacctcggaacctgtcaccctgctgtcccaacccttttaacatgtcctc

SEQ ID NO: 150094 - DNA, 122 bp, Homo sapiens
tccgcaagctctttactgcggacctaagaacactgcacccctctccaccccatccgagggcgggctgcgagttggagaccctgcaggcccgcgcctgcacagccctcagccccgcccgcttg

SEQ ID NO: 150095 - DNA, 122 bp, Homo sapiens
catcactgccagggaaaagacctcactgaatgggtggatggctgtgacttctaggatggacggaaccatgcacagcaggctgggaaatgtggtttggttcctgacctaggcttgggaagaca

SEQ ID NO: 150096 - DNA, 122 bp, Homo sapiens
aacgcggaacctggtcttgacttttgagtgactgagccctcctggtgcccgcactctggccgggagtgccaagcagcgttctccctcccgccgcacgggggcacaatgggaagcctgcacag

SEQ ID NO: 150097 - DNA, 122 bp, Homo sapiens
gttctcgcatcaccccgggccctggctcaacgcgtgagcagcctgtggttccagataccccgagtggagagtttgaccccagattctgcctgcactgacaggcttggcctggcggttacgag

SEQ ID NO: 150098 - DNA, 122 bp, Homo sapiens
aaccgcaaggggccacaggaggtggggccacagggcccggctgtgccttcgggaggcggccgacggcgccgggcagagggggggctcctcatgaggcccattatctgcatttgcaatgacca

SEQ ID NO: 150099 - DNA, 122 bp, Homo sapiens
ttccacatagctgtgtcaaatctcaaatgattccaattaaagttgcactgtgtaaaaacccgattcccctggcctgagtagctgctgttctttggcgtgtgaagtgctaggaagagccgtga

SEQ ID NO: 150100 - DNA, 122 bp, Homo sapiens
ggcagccaacaatttaaaggaaaatgctccagcccaagccagggggactgtcccaaactccggatgaattccagctgccctgcagagcagggtttacaggcatggggatcactagtggcttc

SEQ ID NO: 150101 - DNA, 122 bp, Homo sapiens
tcccctgacccttccccctcctcccacagattggcctccaggcctgggaggttgggataccggtcaagtggctgggcctctgcaagccagtgtttgtggcacacaaaccgctgcagttcaga

SEQ ID NO: 150102 - DNA, 122 bp, Homo sapiens
caccaccactgcgagcctcaaggcccctggcaccgccacagcaagggaaaaaactttgcgcgtgcagcccctcgatttcgcttcatgacaaccgtgctagagattggcgcccccaattttct

SEQ ID NO: 150103 - DNA, 122 bp, Homo sapiens
agagattcaaagcatgagaagaattccacatgcagttgccggcttggggatggagggcgccgtgtgcaaaggccctaagtgcagcctctagaaactaacagcaatccctggcggcatcagca

SEQ ID NO: 150104 - DNA, 122 bp, Homo sapiens
ggccgagagattttaaagcaggaatgaggctgagttctctgcggccggagcctcagttttcgactcgctacaaagttatgaacacactggcagccaagaagtatttatactcaccccatgcc

SEQ ID NO: 150105 - DNA, 122 bp, Homo sapiens
ctcccagagtgccgggcgacgcctacgaacatggctcaccctgggcggctcctggcgacgcggcccgagtgctctcggctgcccgtcctgcctgggccaacccaaaggccagcctggcgagg

SEQ ID NO: 150106 - DNA, 122 bp, Homo sapiens
catgcccatataaatacacacacaccagcaaacacacgtgcatgcacgtgggcacacacacgaatacacacatgcacacacatatgcacaggcagcaagactgacgcttggccatgtcatgc

SEQ ID NO: 150107 - DNA, 122 bp, Homo sapiens
tgtgcgcttggcctggcagcctgagctcacaatcgtccgaccacgtccactggacgccctcggtgactgctgggcacatacgggggtcatcctatcaaaagttacggtgaagtcagggtggg

SEQ ID NO: 150108 - DNA, 122 bp, Homo sapiens
ggctttgtcttctgggactcgcgagagaggctgggtagggttttgtctggcgcttttgcgcgggttccctggcaataagcgtcattttgttcgtttgttttgtattcacttctattattgtc

SEQ ID NO: 150109 - DNA, 122 bp, Homo sapiens
ttatctcttttagtatccccttcagcctttctcttgggcatggtggcagcgctggcgggacgtaggcgcggggcgtgggatgcagtggggtgcaggctttggttggtctgggggtctttctc

SEQ ID NO: 150110 - DNA, 122 bp, Homo sapiens
ggttttatttgtctagaaatgagagccttgtctgaggagaacatgcattttttaatgaaacgtgacaggatttgccactggtgttaccagcaggcctgggcagaggcctgtgtcaggtttaa

SEQ ID NO: 150111 - DNA, 122 bp, Homo sapiens
gcaggggagatcaattcctacaggaacgatcaaaggaaagataagaacttcggggctccgcggtcaggttccactcacagccagcttctcggaaaggagccctgagcggcgggagccacgcc

SEQ ID NO: 150112 - DNA, 122 bp, Homo sapiens
atacccttctctccctacccacagttggggtcatcttctataagcgggtcatgaaataggcgagctagctctgtgcactcttttcttcctttctggaaaactagttctgaaagcatcttttt

SEQ ID NO: 150113 - DNA, 122 bp, Homo sapiens
gagcccacacttgggccccgtgtgacacagttgcagagctctaagagctcatctaactcacgtggggacagcgggcgtctgtatgtctctctggagactctcgtggttctggaggccaaaag

SEQ ID NO: 150114 - DNA, 122 bp, Homo sapiens
gtggagctggatggttttcctctacataatgtcaggtgagactagagtcaagtgggagatcgattaggctggagcatccaagatggctaaagtctgtgtattaatcaggatctcaggtggag

SEQ ID NO: 150115 - DNA, 122 bp, Homo sapiens
cctcgccccgccctcccgcagccggccccgccctcccgcagccggccccgccctcccgctcgcggccccgcccccaggagcttggccctccgccaaccacaccgtctggccccgcccgggcg

SEQ ID NO: 150116 - DNA, 122 bp, Homo sapiens
tgggagatcagaggagggagccacaaagcggggggggagcagcctaacctgacaatgtttcgcatgagtagcatgaacgcatttttggctgagacacagaaattcttcccgtagatggcgat

SEQ ID NO: 150117 - DNA, 122 bp, Homo sapiens
gcttgtggggcctcaggacgctacccactgctctccggtgagtctggaaccctggggagacgaggaaaggctcagggttcagtttttggctcagcaaagccttagcctggctcctgtcactg

SEQ ID NO: 150118 - DNA, 122 bp, Homo sapiens
ctgccatcttaaagggatgaagactgcctctgattgggcatcagcacaaggcctgccctccgtgcccccagtacaaacaggcagggctaagaggccacattggcccactcagggcaaatggc

SEQ ID NO: 150119 - DNA, 122 bp, Homo sapiens
aggttggccactgggggcctggccaccctcaaggggtggccctctgaggtctcagggctgcgtgcctgtagggagtcccctacccccagcccagggctgcctgctggcaccgtggcaaggcc

SEQ ID NO: 150120 - DNA, 122 bp, Homo sapiens
gtcctactggtgctgagccccacccatcctccgagatcccaacttcatctccgagcccgccggccttcagaggaccgtgctccacggcaaaagggaccttattccgcttgccggatactcca

SEQ ID NO: 150121 - DNA, 122 bp, Homo sapiens
gtctgtgtgtgcagtataatggcaactattcttggggagacttaagtacaaagaagcatacgacctgccagatatgcaggaaagtcaaccaaagcctttgtggggtgtgtttctgataatgc

SEQ ID NO: 150122 - DNA, 122 bp, Homo sapiens
cgtgggagaggcttaaaacaaacgccggaagcaactcccagccccataaagatctgtgaccggcagccccagacctgcctgccttcctgacttctgttccagagcaaaggtcattcagccgc

SEQ ID NO: 150123 - DNA, 122 bp, Homo sapiens
ggcgaaccaggtgggaggaagttcctaccccggcgcggtgtgcggagacgctgtcaacggcgtcctctggaaaacttggtttgctttcctcaggcgttccagccacacctcattctgataca

SEQ ID NO: 150124 - DNA, 122 bp, Homo sapiens
tgaaagtgtgctaattaaatttatgcaatcattatctttaaatagtcatatcttttccagcgatcggccccttccccccgagcctcgccgctccgagcagagtcactctaatccctcgtcca

SEQ ID NO: 150125 - DNA, 122 bp, Homo sapiens
ggctggggaagaaggaacctccgagatgaggcgatagggtctggccttgagctgaggcgacgccccggcttgggtgaggggaagcggtgtagtggtcgagctaaggccgcgggccctgggcg

SEQ ID NO: 150126 - DNA, 122 bp, Homo sapiens
tctaagtacatccacctgtgtaataggaacctgtgaattgtactggatgattaatacaaacgtgattgttgtatttggagtataaattactgattgtatgtgacctgaaaattcactgctat

SEQ ID NO: 150127 - DNA, 122 bp, Homo sapiens
cttcaccaacatcaatgccaccgacaaccacgtgcacagcatgctcaagtacctggatgacgtgcggctctcctgcacgctgggcttccacacccatgccgaggagctctactacctgaaca

SEQ ID NO: 150128 - DNA, 122 bp, Homo sapiens
ggcaactcaccccgtggaggtggaagccctcggcgccgcctgcgggctgctcagcgctgacgcccaggcccatggcagcggctccgctcggcacccaggtccagtcccgctgcgcctacccg

SEQ ID NO: 150129 - DNA, 122 bp, Homo sapiens
ccaagtggcggggggaccggacctcaccatcaggcaggtgcgggtggttgcggtgcagctcgtggcacacgaggcccgggcgctccgcagtgccgggaggacgccgcagctgctccagctcc

SEQ ID NO: 150130 - DNA, 122 bp, Homo sapiens
gtccgctccagctttgtgcctgattggacagttcccagcccagcgtccctgattagataacgtttaaggccccgccttctcaggccctgagtgacagaagatgtgatcagacactgggctga

SEQ ID NO: 150131 - DNA, 122 bp, Homo sapiens
tctggcacctggccgctgtgcttctaggcctctgcctgccggctgccctctgctgggcatcgccactttcaggatgacagccttagagccttctctcggcctggtgggggcccagtggtggc

SEQ ID NO: 150132 - DNA, 122 bp, Homo sapiens
tccccagatgcttcctttgatcacagggaagctcttttctcatatgcaggagccaccacacggggagctggagcctagctgtgccctccgttccagccccaggactggagaggcagagatac

SEQ ID NO: 150133 - DNA, 122 bp, Homo sapiens
agaggtaaacacacatcactcatcaaatgggagccactctgcccgcctcctgcccatcaccggaggagtttggtcattgggcaattagtgtgatgaatgaatggcttctggcagggaggaaa

SEQ ID NO: 150134 - DNA, 122 bp, Homo sapiens
tcgtgggccgtgggtcggcggggccagacaactcagcggcgcgcggcgggggcggggctccgaactttgtctctaagtttccggttctgtgctcagcggctccaccctcggtgcgcatgcgc

SEQ ID NO: 150135 - DNA, 122 bp, Homo sapiens
gctgcgtcttcctgctggccacgcagccactggtgtgggtgagcctggccagcggcttctcgctgccggtgccctggggagtgcaggcggccagctggctcctgtgctgcgccctgtccgcg

SEQ ID NO: 150136 - DNA, 122 bp, Homo sapiens
gaggtgtgcgggtggaggggcgcgccctggagttgggggcgggcgaggcgtttgcgggcgcggggggcgggtttggaggtgtgcgggggaggggcgtgccctggagttgggggcggggcgag

SEQ ID NO: 150137 - DNA, 122 bp, Homo sapiens
cagagctgctgaccctgctgaagatgcctagcgtggcccagtttgtgctcacacccagcacggaggtgtgcagcccccgctatcaccgcgatgccaacacggccctgcccctggccctgcgc

SEQ ID NO: 150138 - DNA, 122 bp, Homo sapiens
cgggtccagcggggtctcgggtctgcagactccggaggcagctgtggggaggcctggggccgccacagccagttccagcccgtttccatcagccccctgcccacctcgggaccccgcccaca

SEQ ID NO: 150139 - DNA, 122 bp, Homo sapiens
tacttttcagccagcaagaggagcagagcataggggaagagattacctgcaatgccacatcgacaggccaaaaggcacaattctgtatctgttataaatatttatgtttagtattgaacact

SEQ ID NO: 150140 - DNA, 122 bp, Homo sapiens
aaaggagacagatgaatgaataagtcaagcaggtctcgtgcatagtatccacagatgttacgcgagcttttggccctcccgacggcagaaagggtttctctgccctgcatgtctccagcatc

SEQ ID NO: 150141 - DNA, 122 bp, Homo sapiens
cacgtgccctcgctcagagacacacgcgcacatttgccacctggggcgagtggaaggtgacgtggaggtgggcacctctgccgggcagatgcgggagcagcagcagcagcagcccctcctgg

SEQ ID NO: 150142 - DNA, 122 bp, Homo sapiens
gacccaggggaaagttggggaagcggggctgatcaacagcaaaaatctgccaaaaaagttcgagagagccgggcgctgtggctcagcctgtaatcccagcactttgggaggccgaggcgggc

SEQ ID NO: 150143 - DNA, 122 bp, Homo sapiens
gatgcactgtggtttttcacaagtgctacttcctccacctttcttacatttgcacagtttcgctgattcccaggtgtctgcaggtattgtagtttgcaacccttttctagttaagaacccag

SEQ ID NO: 150144 - DNA, 122 bp, Homo sapiens
tgaaactttgactgaaaaaactgcgtgcgatgctatccgctgggagcgctggggccttggcgctcaaaaccagccgcggtgctaaccgcagggagctctggtagcagacctccgcgttgtgt

SEQ ID NO: 150145 - DNA, 122 bp, Homo sapiens
tgctggtggagcccccagggttggaggacgttgaggcagcgctaggcatggacaggcgcacggatgcctacagcagggtgagtgtggctcagagcctggaccctgctgacctcggggggctc

SEQ ID NO: 150146 - DNA, 122 bp, Homo sapiens
ccctccgcggtcggattctggagggtgggaggcatcttggcctgcagtaagcggtgctgacggggactctggccacagaggtcaggcctcctgaaaacagcactgccttccgcgctgcccca

SEQ ID NO: 150147 - DNA, 122 bp, Homo sapiens
gaaaggttcttgtatcggttggaatcccgagagctccccaacagctaacacgaagcggtgcgttttaacaagagcctgggtgccggcgggctgaggcgtaaaatggcgtcagcccccaaaat

SEQ ID NO: 150148 - DNA, 122 bp, Homo sapiens
ttcggattcttaactaattacacaactactagtagcaagccattccagtggggttttcttcgtatttctaatatctttgtatacataaacattactatacaaatgaatacaccatatactta

SEQ ID NO: 150149 - DNA, 122 bp, Homo sapiens
ggccggtccctgctgtgtgtggggtgttgtgtttttttcttgtctctccccagcagggcacgggggtgtgaaccagctcgggggggtgtttgtgaacggccggcccctacccgacgtggtga

SEQ ID NO: 150150 - DNA, 122 bp, Homo sapiens
cgggaccgcgctttgggagtactgaggccgcgcccagaccagcctgtcgcgcattaaaaccgtgtctctcccgcagctgtgggtgggccccggggcgccgcttgggggtcctgcagctggag

SEQ ID NO: 150151 - DNA, 122 bp, Homo sapiens
ggtctaaagttccactggagacttgcatgcacatctgcattaaagctaattttaatgattcgatctttaacaggcaccatgttttcaatcttgtctgaggcatgacctgcaactgctgatcc

SEQ ID NO: 150152 - DNA, 122 bp, Homo sapiens
cccataaaagcaccttaaaccctgtaaagaggggcttatttcacttcgcagaaatcattccgctctccctctgagagtatattactgtgcttcaatacactttgccttgagcttgcattttg

SEQ ID NO: 150153 - DNA, 122 bp, Homo sapiens
taaaccttttttctttatgaattaccaaccctcaggtaatttatacacaattttcacacgcgtccatgtgaagagaccaccaaactcactttgtgtgagcaataaagctttttaatcacctg

SEQ ID NO: 150154 - DNA, 122 bp, Homo sapiens
tgtgtcagctatagatgtgaggcgtgttcgtcagctcttcgttttcagaaggcaagaaaacgtggcaagatttctatgccgatcaaaagggagagcgttgacatatttatgcaataaattat

SEQ ID NO: 150155 - DNA, 122 bp, Homo sapiens
gctgaacgaccctaattggttagttggacctcgaaccagactttcatctggaggatcgggcgaggagtgggcgggatttcgaactgagccactcccttcattggtgaaaagaaaacgaacca

SEQ ID NO: 150156 - DNA, 122 bp, Homo sapiens
gctgcgtttcgtgctgacctacatcgcgccctggcagatcacctggggctcggctttccacgcttttgcccagccgtttgccgtgccacgtatccagcctgtgtttgggtgggggtgtgcag

SEQ ID NO: 150157 - DNA, 122 bp, Homo sapiens
ttcgagtcttcatttctgtcttgcctggagcacttgctaagggactggcccagaagtactcggtgagcaatgaagcctgaactgaggccaggagaactgaaggagggatggatctgggaccc

SEQ ID NO: 150158 - DNA, 122 bp, Homo sapiens
aagctcagtttgggagctgaggacacgggatcaggggattgcttacctgggaccagggcccggctcgccaatgatcagggcagagctcgctgctgcaggcccggcggctctcaggccgggcg

SEQ ID NO: 150159 - DNA, 122 bp, Homo sapiens
ggcacgccccatccccacagagaccgtgggagcgaaggctggggaatgaatggtgaagggcgtagcgtggatcctggcatttaataaacttaagtagatgttaccaaggctaatcattgaga

SEQ ID NO: 150160 - DNA, 122 bp, Homo sapiens
ctggcctggcctgggctggggctctgccacttactctcagggtgaccttgggcaacttaacgaactttcgtgagcctcagctcccctcatttttaaactgaaggtagtgacggtgcctaggg

SEQ ID NO: 150161 - DNA, 122 bp, Homo sapiens
tcctatccctatcctagcttttaacctgagccagagctcactacacaggttcctggctatcgagtctgaatctgcactactcaacttataaactgtctgcagacacctgttagggaaattgc

SEQ ID NO: 150162 - DNA, 122 bp, Homo sapiens
tatggcactgcagaccagtcaagtgatttttgcccctttcaagcttaccaagttccagttcgactggccactcagagggcggctttattaacctcttctggtgttagaagactctgcacttc

SEQ ID NO: 150163 - DNA, 122 bp, Homo sapiens
ccgccctcctgcccagaggacccgggactgacagcgcagggtgacggttgggcagcccgccgggtgtcgggaccaagagagccccccggccacccgctcagctgtttcctgctcgtgtttgt

SEQ ID NO: 150164 - DNA, 122 bp, Homo sapiens
tccggcgagacttcccgggagatccggaccgaccgcggaaccgagctccaagaatgcctgcgaggaggctgtgggtcctaccctatcgccgcttacgcagtcccagcctccgcggcgccccc

SEQ ID NO: 150165 - DNA, 122 bp, Homo sapiens
ttctctcctaggcagccatgcttcaggctcctttcctctgtgcactccttggaagactcacgtggcattttaaaaattgccttaaatgaggtagaatttacatacaataaaatgcctaatag

SEQ ID NO: 150166 - DNA, 122 bp, Homo sapiens
aaatacagagaacatcaaaagcaacagagaaaaaaacttaaaaagcagcacttatgggcacgcactgttaatcctggcaaaattctttttaagatagaaagtacagagggagggaaaaagaa

SEQ ID NO: 150167 - DNA, 122 bp, Homo sapiens
agtagtgatccccccattatccatggggatacattccaggatcctcggtttcttcctatacgactgcattgtataggccaggtagcttatacagcatggatacactggacaaagggatgatt

SEQ ID NO: 150168 - DNA, 122 bp, Homo sapiens
agggaggggaaacaaaacgagcttgtgcctcattcccggtggctctccacgcaaagttaacgtttgtttactctaagcatatgcccaggtgaggcctgcacagccacctcgccgcgggtgca

SEQ ID NO: 150169 - DNA, 122 bp, Homo sapiens
gatgattctcctggctcattttcatcagaggcatgatgactggaaagggatcacatgggtcgttggtggtgacacctcactgtttcctaggtttggatagagagatgtatacaagacctttc

SEQ ID NO: 150170 - DNA, 122 bp, Homo sapiens
agatcaggtttgtcttgatggaagaaaggaaagaggaaattactgatggtaatcttgagccgagcacagagaaaggcaagaagggatggctctggtttcaaacaatccatgtctgattcctc

SEQ ID NO: 150171 - DNA, 122 bp, Homo sapiens
ggggtggggaaaatcttcctccttttagtcctaatggtgatggccagtcattcttagctacgtggagataggctggaagggaacagcaaaacagacctacaagttctcagtgacaatgacat

SEQ ID NO: 150172 - DNA, 122 bp, Homo sapiens
tgaagacgtgttctgagaagtgctgccgctgggggcgaggcccgggccggcgtgtttgggcggtgcagggctgccctccttagtgtgtttgcttaattcaggggtgcagttgaacttagtgg

SEQ ID NO: 150173 - DNA, 122 bp, Homo sapiens
gtccgctggccagagctcagtctcgggtcctgcctggcttcccggggtgggagatgaagtcggcctgttgccgcgagggagggagctacgtgcatagggaggtgctcgggctgctctgcagg

SEQ ID NO: 150174 - DNA, 122 bp, Homo sapiens
ttccgtgcctttcacaaagccacatcctgcaccgtctacccttctctgtggatatttttccgcttggcaatttcctttcctgaggcacccacttgggacatctgaatctccatctccatgtt

SEQ ID NO: 150175 - DNA, 122 bp, Homo sapiens
gtgtctctcacggcaacgagcagatgcaccgaaatcgtgcaacaaaatctccataaaccacgataggcaacctcagaccataaatctcctgttacgcctacatggggaggagggggagagtg

SEQ ID NO: 150176 - DNA, 122 bp, Homo sapiens
ttgttacttcacctcctggcggatggcaaccgtcccagcttcgtggactgtcagggtcaccgagagtccagggtggtgggagtcccccacacgagccactggcacactccctgaagcagaag

SEQ ID NO: 150177 - DNA, 122 bp, Homo sapiens
tttggctggcgaataagatgaacagagccactccctggaaaggacttcagatttggcctccgctgaaacaatgagatgagggagagcaagaaagccaggctaggcgtagaatgtgtgttaca

SEQ ID NO: 150178 - DNA, 122 bp, Homo sapiens
ggcttttcctggtctttcaggctccagctcagatgtcttctcctcagaggcctcccctgacgacaatagctcatatggacccctccctgaagtcagtctcacatgacctactttaatgtcct

SEQ ID NO: 150179 - DNA, 122 bp, Homo sapiens
ggcagaggccaggaggggcccgggattggggtctgcgggccgccctgggcgttgccattgcgctgcggtgctgtgcttgtgtgattggtttatttatttatttatttaaacggagtctcgct

SEQ ID NO: 150180 - DNA, 122 bp, Homo sapiens
cacctctaaagtccatgtcgctcagcatccttccccctgactagtggcccaaacacagcacgaagctgaggtgggtggaacgctttccaaaacagcgctctatgatgagccactgacagact

SEQ ID NO: 150181 - DNA, 122 bp, Homo sapiens
ctcgccaggcagaggccgttcgccccgccgaggcccctccccggcctgctcagactcctccgccctcgccctgatccactccgccttgcacaagcaccagctgcaggtccaggtaggaaggg

SEQ ID NO: 150182 - DNA, 122 bp, Homo sapiens
aaaagaattacacactaggaaatagaacataaccaatactttcgagtcctccctgtgtcccgctgtgattctatttcctcccacccactcctcaaatcctgtcattattagccctttgcttt

SEQ ID NO: 150183 - DNA, 122 bp, Homo sapiens
gggtggtggggaggcttggggagattccctcgcagctgagcagaaaacagtgctggacgtcgcactgtgtgggcgcaagggcatcgccttaaagagtgaacactgtccactgtctcggccgc

SEQ ID NO: 150184 - DNA, 122 bp, Homo sapiens
gtgcctgcaggacccaacatactcaatgagcttccagcgcaatgtccgatcgctcggggccgactgccaagggaaaggatggaaagaagtattcctcgctcaacctgtttgatacgtataag

SEQ ID NO: 150185 - DNA, 122 bp, Homo sapiens
gaggcatgcaggggagacgactcagggatcgcgggggcggggaggtggagtggagaggcccgctctcacaccgggtcgggccctgaaactgtaccagttctgaagaccgttttctgccacac

SEQ ID NO: 150186 - DNA, 122 bp, Homo sapiens
gttgtccgagtaagcggtaagcaggtacttccactgtcccattacttagtccgatgaaggcgtgtgaacacacacacacacactcgcacgcacacacacacgctcacacacacacacgctca

SEQ ID NO: 150187 - DNA, 122 bp, Homo sapiens
ttcacttccggcctgcaaacctgaaccgccagcgcagcctgcggaaagggggcctgtgggcgcgggtgaagtttttctccagcgcctaaggcacccccacccccatccgggcgcaaacaccc

SEQ ID NO: 150188 - DNA, 122 bp, Homo sapiens
tcatcacagggcccctgcaaggagaagctgcccgtgtgggagtcgaggaccaggggaccccggaccctctcacgcgccctgctgtccctcagtgacttgtggggggcaggagaggggccttg

SEQ ID NO: 150189 - DNA, 122 bp, Homo sapiens
cccgctcatctttaacatgatacgctcagtgccttagacttaagtctctgacctcgggagcgcctggctgtaatcttttaccatggccttgccctcctctcaggggcgggaccccaaaacct

SEQ ID NO: 150190 - DNA, 122 bp, Homo sapiens
cttggctgactccttcccagatctcctcggcttagcggctgaagactgacgctgcctgatcgcctcagaagccccctggaccatcacgcacaccgagcttcgggtaactcttacggtggagg

SEQ ID NO: 150191 - DNA, 122 bp, Homo sapiens
gcctgtcttttttaagtgtgtgtgtgtgtgtgtgtgtgtgtgtgtgtatgtccagatttccgtgtgcacacccaggcatggagctgctgggtctcagggcacatgtatatttcacttcagca

SEQ ID NO: 150192 - DNA, 122 bp, Homo sapiens
ggccatttggtagtggtgccggagacggacccctttagatttcggggcggctgaggagcgcggcggctgctctgtggctgagtgaggggggtgggcggaatggcgggggaagggaaggtgac

SEQ ID NO: 150193 - DNA, 122 bp, Homo sapiens
cctgcacccagggcctggcacctactgggttgggcttggcgctgcgtgcttgcatttccgcggatagaccgagatggcatctgggctgtgacactggctgcccagcttttcttttctttttt

SEQ ID NO: 150194 - DNA, 122 bp, Homo sapiens
gggtaaaattactacaccaaattatacttctttcattgcttttatacatatgctgtaagccggttggctcaggaaaaaacccacacaatcagtaagtcttaagaaagttgtacctttagccc

SEQ ID NO: 150195 - DNA, 122 bp, Homo sapiens
ggggagactgtgcaaagatgcagaaatagccaatttaatagcaaaaactggaaataaacccgagtcctgacaataagaaaatcgccaagcttattgggatctgttaacacaatgaagaatta

SEQ ID NO: 150196 - DNA, 122 bp, Homo sapiens
agtcacttagagaacagtcactacttgccctgccctcctgagtcccgggaggaaagtgctcgcccattcctgacctgtgacacgctcactgcgaaggcaggttattagaagagtcccatgaa

SEQ ID NO: 150197 - DNA, 122 bp, Homo sapiens
ttgtgggccccatcctgtgtactatagaatgtttaacagcattcctggcatctaccgactcgatgccaggagcagtccacccattgtgccaaccaaatatatctccaggcactgctaagtgt

SEQ ID NO: 150198 - DNA, 122 bp, Homo sapiens
aggagagcacgtgtgtgaggggtgcacgtgtgtgaggggagcacgtgtgtgaggggagcacgtctgtgaggggtgcatgcaatgctcctgtatgcacatctgtgggtgagcacgtgcgtgag

SEQ ID NO: 150199 - DNA, 122 bp, Homo sapiens
acatcttccttcagtcccagtgaaaaatgggcctccctgaatcttgcaagccacctgtcccggggcttgtcatttacaatcagtgcatgacaaatgacgttactgtgcacacgtgggctgaa

SEQ ID NO: 150200 - DNA, 122 bp, Homo sapiens
ttatctgtagctcctaatgaaaaatgccaaattccctcctcctttctgatcaaagcccaccgaataatgaagctggagctgttactgatgcttggctgagtggaatgtaaatgaatgccaaa

SEQ ID NO: 150201 - DNA, 122 bp, Homo sapiens
gaggcaggagacgcctcctggaggatttcactaggccttgaaggatgtgccgaagcccaccgtgtgggcttcctttatagactcaccttcaccaggccttttcgccaactaggtgagggttt

SEQ ID NO: 150202 - DNA, 122 bp, Homo sapiens
cagaactctaggaaatcccaaagggaggcctccttccagggaaagaaacccactgccccccggcagttttctcccatgaggtgtgggccctgcaggcccatctcagccctttggagaagcag

SEQ ID NO: 150203 - DNA, 122 bp, Homo sapiens
gacgaaattttagagccattgggcggactttaaagggaactttcaattcctagagcttttcgctaatgtgggcagcttttaaaggttgtgaactcttagaagtgttttagcagaggctgggg

SEQ ID NO: 150204 - DNA, 122 bp, Homo sapiens
atatcgtgtatagaggtgctgggcagaagttgactaacccctgctttggagctattactgcggtgcacactgaaagcctctctgtcatgcaggcctgcctcagaccttcctgaagccctcaa

SEQ ID NO: 150205 - DNA, 122 bp, Homo sapiens
accatatttgctttgaattacagttgcattaccttaattatttttctttatggaaagaatcgttgggtaaaaggcagggaagattcactatgtagatttaaataaatataagagtgagtatt

SEQ ID NO: 150206 - DNA, 122 bp, Homo sapiens
ggcggcttgcggggtgaacctgcagggagcctggggagagcggtcaggggtcagagcgtccgaggcggaatccccggggaaacgcgcagatgtaagctggtggaggtaagggggtcgcgggc

SEQ ID NO: 150207 - DNA, 122 bp, Homo sapiens
cgagaacacggaccaatcggcggcggcgacagtgtggaacgcggttgccaggaggcgggacgcggcggcgtgccagcctagccactctagcgacggcggggaagagtgtgtacgtggtgggg

SEQ ID NO: 150208 - DNA, 122 bp, Homo sapiens
gcctcccaaggtctcccggcatagaccgttagcggcaccctccccttcagtctgagacagcgacgttgtcccgtcctgacacttaactctcctggtggggtccctgtccggcctccatccca

SEQ ID NO: 150209 - DNA, 122 bp, Homo sapiens
tttattattctttactgttggcctctgtgtgttgtaccagcttagaaagggctccctagtcgagcgtgcaattcagtttcaaacacttgggcctttaacccagggattatcagggccgactt

SEQ ID NO: 150210 - DNA, 122 bp, Homo sapiens
cagggcagacctcaagaaggaggcagttccagggatactgcttattcagctcaccaggctcgcaagggtctcttccctacttccgatccaccttcagttgatcaccctggccttgcctggag

SEQ ID NO: 150211 - DNA, 122 bp, Homo sapiens
aaagtaaagggcctgctgctgtggctcgttggtctaggggtatgattctcgcttaggatgcgagaggtcccgggttcaaatcccggacgagcccctcttcttatttttgagacagagtctcg

SEQ ID NO: 150212 - DNA, 122 bp, Homo sapiens
aacctggcgtgcctgtcgccgcttgccccgctcccagggctcattggctcccagtctcgacgtcagacccgtagcctctcacctattgggccagccaggacctgaggcggagtgcagaagcg

SEQ ID NO: 150213 - DNA, 122 bp, Homo sapiens
tatctccaacctagcctttgtccctgagtttcagccccaaatagccacaagcctcaacatcgtttgacatcacctcacactgtacatttccacaactgaatatatcaccttcatttccattc

SEQ ID NO: 150214 - DNA, 122 bp, Homo sapiens
tgactgtgtctagcccaccaagcctgcctcctggctcagtagcctgagtggaacaggcctcggcacagaggaaggagaacctgcccggaaaaaaagagtgggtggatgtcagtgagggtctg

SEQ ID NO: 150215 - DNA, 122 bp, Homo sapiens
tgctgaaatgtatccctaactacagtttcatgccaggtattttccccgaactttgtttcccgaacttaagaaaaaaatggatattttttcttaagatgacaaccttaatatcacttgatgtt

SEQ ID NO: 150216 - DNA, 122 bp, Homo sapiens
gcgcgctgtgggatgccgagggcgacggtgccggcgctaaggacccgcctggccgcgccgcgcagcaaatgcagtcgcctgcgaggagccccaaagagaggagcgcctgagtccgatttcta

SEQ ID NO: 150217 - DNA, 122 bp, Homo sapiens
aaatgctggacccactctgacagcatccttagcagatatctaccctcagggaaatggacacgaaaacaatgacctttaatgtgcattggctccattagcataaacccagtgtttgcaagcct

SEQ ID NO: 150218 - DNA, 122 bp, Homo sapiens
actttgacatccatattcttgctctgctagtgagtttttggacttctaaagggaataacacgcagccactgaggtacctgaggttactggataatagtaagctgtctgaggcttttttatac

SEQ ID NO: 150219 - DNA, 122 bp, Homo sapiens
aaagttcaaacacacctgtctgaatgactagttgaagatcagctattgtgctgaggaaggcgttttgggatatacaaagaggaaagcatagcctctatttacagtttagtgagacactaata

SEQ ID NO: 150220 - DNA, 122 bp, Homo sapiens
gtaaacaggcagtttcgtttcttcctttgtgatcgacacgccttttctttccttgtcctgcgtactgcagtgcccagcgcttccagcaccatgccggatccgatggttagagcagacgtcct

SEQ ID NO: 150221 - DNA, 122 bp, Homo sapiens
ccggtgcggcctgggtgctgggctccagtccgagaggctccatgctgcttactgcagggacgtacagggcggtgatccagtatctaaattctttgggagaaaatgaatagttcccccgcccc

SEQ ID NO: 150222 - DNA, 122 bp, Homo sapiens
ttaatagctgggtgtctggtggggctgccgcacatttcacatatggttacccatatgcagcggggggcggggatgggggtgtggcgcggggattgtccctctgtcttgccggaatgcaaaaa

SEQ ID NO: 150223 - DNA, 122 bp, Homo sapiens
cttttgcctcagccatctatgtgtttgaacaaaagtacaattttggtagaattatttagacgatttgcctcaattttcagaatcattttgacccttctgatgttttggtagttttagccata

SEQ ID NO: 150224 - DNA, 122 bp, Homo sapiens
gaaccctcagttcaagatccggctggatgagacggatgacccggacgactacggggaccgcgagtcaggctgcagcttcgtgctcgcccttatgcagaagcaccgtcgccgcgagcgccgct

SEQ ID NO: 150225 - DNA, 122 bp, Homo sapiens
tgcggcctttatgcttgcactggctgttataaaccttagggccaaattgtgacccgcttccgatagctgtgcattctggctctatcttgttttctaacatttcatctcgatacctggccttt

SEQ ID NO: 150226 - DNA, 122 bp, Homo sapiens
ctactcctgagttagttgagtttttttggccacctacattctgtggtagtttcattcaagcgcatcccttctcattctcttctcactgtgagtctcagttccccggctgtgggtgctggcca

SEQ ID NO: 150227 - DNA, 122 bp, Homo sapiens
tctttgtgtttccaggaaatcatcggtagtaatactcttactgtggtcataaacattctgcgggaagaatgcatgtcatgtaaacagtattacgtttccagaacgtctgtagcttttctcct

SEQ ID NO: 150228 - DNA, 122 bp, Homo sapiens
caaagtctctccatagattatttatgcactacaaattagatctttacaatggacttatggcggttaccagcttacccaaatgatcaaacttagtttcactaatgcaaggacctgtacttaaa

SEQ ID NO: 150229 - DNA, 122 bp, Homo sapiens
gatttcctgcaggaccagagcagagcccaggaaggagccccgggagctcacgaggccacccgcaccgtcacgtgtgctcaggccacgggctccttagatttggaattcagctcccaccgcca

SEQ ID NO: 150230 - DNA, 122 bp, Homo sapiens
accttgagggcagggtgggcctgggcggtgccaacaggctgccgagggtggctgctgtcccgtttctccagcagccagggccgtgcgcttctagaacattccccgtggctttcctaaaggga

SEQ ID NO: 150231 - DNA, 122 bp, Homo sapiens
gggatcgcgtggtgaaccccacggtgcatgcgcctcaggctctagtttgaggcaggaaagcgcagcttgatgcttctctggagactgatggaggaagcctccttgctgtagttggttttatt

SEQ ID NO: 150232 - DNA, 122 bp, Homo sapiens
accttgacatctgtctatcaccatgcggcacaatgaagatcttcagagaggcatggctaccgtttcacttctgccttgcaaattatgagcaagctcctcgtgagatcaactctaacctaggt

SEQ ID NO: 150233 - DNA, 122 bp, Homo sapiens
agtgccagatgtccaagcttaaatcctccatctgttttttgctggttatgccatatcgcacgaattgctcaatccaaatacacttcagtttcctcatatgtaaaacagggttaagagtgaaa

SEQ ID NO: 150234 - DNA, 122 bp, Homo sapiens
catgtgaatctctctcctaccgggtaccagccaccccctcaccatggcattttagaaaggcgaaatagataaaaaaggctagtctcaaaagaaaatgaggacatcctcttaaaaaatgacct

SEQ ID NO: 150235 - DNA, 122 bp, Homo sapiens
ggcaagtctgcctccttctcctcctcttatctgcagaggagagatcagttcccagctggccggggcagtgtcattgatatagctggtgtcattgttaccttccactaacagatcactcgaca

SEQ ID NO: 150236 - DNA, 122 bp, Homo sapiens
tcggggcggggccagagagagctcggggctgccagaggcgaggtcttgaggaggcggggccgggaggcttcggagcccaagaggcggggccagaggcgtagggggctgcgaggggcggacct

SEQ ID NO: 150237 - DNA, 122 bp, Homo sapiens
gtttataaagtaggcacagaaatagattaacaataataacacaacagaataacaatataccgtaataaaagttatatgcatgtggtctctctctctctcaaactatcttgtactgtacttac

SEQ ID NO: 150238 - DNA, 122 bp, Homo sapiens
agatcactcagacaggatatctacaatgcaaaaagacaaaaagcaaaaacctggggcaatcgagatttacaaagaggtcatagaagagtagctaaagaaataaggacataacaatgagtgac

SEQ ID NO: 150239 - DNA, 122 bp, Homo sapiens
tggtataagcaaaaggctgaaccagaaaaagtgctgactcccctttgttctgttttctcccgtggaacggtgttccagtcgagggtcagcatagacattttggggcatcattttcacagctg

SEQ ID NO: 150240 - DNA, 122 bp, Homo sapiens
cagaaacgcaccgccgcctccggggagccctcccgggccatcggtctggccccgccctcacgtcctgagctgaacccagaatccccggtcttgggcccctactccctgagggaaccgcagcc

SEQ ID NO: 150241 - DNA, 122 bp, Homo sapiens
cctgaggttctccggtgggcactcgagagactcacggctctccctctcctcacagggacgcggagcttgcagtggtgagagagcagcgcaaccgtctgtgtgaccttctgggcgtacccagg

SEQ ID NO: 150242 - DNA, 122 bp, Homo sapiens
tgactttacagatgtcaccaagtgatcttcattcttacagaggacagtcacgccttacttcgcaacccacatgggctattacaaggattccattccttaagagataacgtgtgctttaaaag

SEQ ID NO: 150243 - DNA, 122 bp, Homo sapiens
gggtctcccgggggtctccgagccaggctggggggtcaccaggggcgtcccaaggggctccgggcccggcccgggtcccgaagggtgtccgaggcgccctggccggggtcgcggatggggga

SEQ ID NO: 150244 - DNA, 122 bp, Homo sapiens
tcggccatggcgagcgccggagtctcctcagctgccgcttcacaaaagaggtaccaggtccgcaccaaacgagcacacaagcagcaccaggagcggcagaagaaggaggcggcagcggtgga

SEQ ID NO: 150245 - DNA, 122 bp, Homo sapiens
gcaccagtgcccgcccccgagacgcgcgcattggaccacgctgcgctgacgggcgagcagcgcagccaatgcaagggctcagaagccgccagtccagcggctccacaggcccactccctccc

SEQ ID NO: 150246 - DNA, 122 bp, Homo sapiens
aggacgctttgctacaatacctctccggggttggctggggggcgcctccagctgcgcaagcgcatagggatgcgccctttgtggactccattgcgcagggtgcattgccctgaagagcgctc

SEQ ID NO: 150247 - DNA, 122 bp, Homo sapiens
ctgctttggatgtcgactcctctgttcctccatccggaaacttgcgctgtgcttcaggggcgagcttggtggatgggctccccagttctctggacagagccaaggctcccaatggccttcaa

SEQ ID NO: 150248 - DNA, 122 bp, Homo sapiens
ggcgcagtgatggagaactgacgcgggtgacttgtcttcttcaacatcacacacttctcccgatggctgatgtagtgctcccctgggagcaccctctgctagtccggccagacggttcctta

SEQ ID NO: 150249 - DNA, 122 bp, Homo sapiens
agaggatcccaaactcaggcacgcctcaaggatgcctagcatcttgcagagctgtggcaacgaaacaacagagcagagcacaggcagcctcaggaggccccaagcctttagccacagctcag

SEQ ID NO: 150250 - DNA, 122 bp, Homo sapiens
ttccggcagggatgcaggctcacagcgccctggggctggacaccaccggccggagcatggcggacagcacacacggcccggggcgggaaccttggaaactttacacagatggggagctcagc

SEQ ID NO: 150251 - DNA, 122 bp, Homo sapiens
actaagctactctaaaaaggaaagggaatcatttcatggaaacagcatgagctttggagacgttgggagagtcattggactcttttgaatctgagtttcccttgttagtaaaatgcaaatca

SEQ ID NO: 150252 - DNA, 122 bp, Homo sapiens
tactatgaactatatgttatgtaaaatctcaggttatgtgaggtgtttggacaaattaagcgtcagggtgatatccactattgagacagaaaatgagtctaaagaattaagacctcaaagtc

SEQ ID NO: 150253 - DNA, 122 bp, Homo sapiens
agaggtgattaggccatgagggccctccctcatacaggacttcatgctggttcgcccttccgccttccaccgtgtgaggacgtaacattcctcccctctggaggatgcagcaacaaggcacc

SEQ ID NO: 150254 - DNA, 122 bp, Homo sapiens
tcagtttcctataacacagtggcaatggagtctaaaagtccaaggttgctgtggtgattacgtaagaaaaatatacatgaagcactgggcctgggggctgcaaggagcaggctcctccttcc

SEQ ID NO: 150255 - DNA, 122 bp, Homo sapiens
gagagagcccctgagcccggcccggaccagcgcccgtgctcagggcagctgtgcgctccgcgctgccttctggttctgtgtgatggatgtgatgcttgcatggtgctgtccctgccccgctc

SEQ ID NO: 150256 - DNA, 122 bp, Homo sapiens
gccgtgtagcgtcgccgttactccgaggagataccagtcggtagagggtgagttttgggacgtcttggttcttgtttgggagggtagtgggatttcttggaacaatcagcgaaggaagaggc

SEQ ID NO: 150257 - DNA, 122 bp, Homo sapiens
gccggggcggggcccgaccaggaagtccgagggccgatctccccctctccagccccggcccgcccccagcctcgcccccggcccagtcccgggcttgccacgttcccctcccagtccgctgc

SEQ ID NO: 150258 - DNA, 122 bp, Homo sapiens
ccggagcgggggcggggcgcggggcaggcagcggggtaggctgcgcccaggagagtggggcggggctccgggcgcgggcggggccgggggcggggcgaagagcggctttccagggtgacttc

SEQ ID NO: 150259 - DNA, 122 bp, Homo sapiens
ttagaaagcgggtaaagggtcagactacaattcccggcagaccctgcgaatgagttctcgcgacttgcgagaagacacgtgcgcggaaggagcttgcagtagcgggcggcagagctggagtg

SEQ ID NO: 150260 - DNA, 122 bp, Homo sapiens
gagtgtgttcgtggagcgcgtcctggggacgactcccggcattatcggccaggttgagtccgctcctggcattccgcggaaagatgggtgggtgccgggcagaggtgtggccacctgcgatg

SEQ ID NO: 150261 - DNA, 122 bp, Homo sapiens
gtgaagaacagggcgccgtggggagctgatgggacaggctgagagctagtgccaggagggcgaaaggagccccgcagggcccctccgggttttctgggcctttctgagcagcgttccttgct

SEQ ID NO: 150262 - DNA, 122 bp, Homo sapiens
taacctccaatgtcatcacagggcgggggtggttctgcccaatacctgtgccaactctcccgcccatggcactccctgtagggttttgtgaggtggggagaagggggagatgcggtggggat

SEQ ID NO: 150263 - DNA, 122 bp, Homo sapiens
ccagggtgctaagcccctcattgcccagggccggcagggttggccggctgctctgagtgccgggcctgccaagcccacgcccacccggagctctagctggcccgcaagcgccgcgggcagcc

SEQ ID NO: 150264 - DNA, 122 bp, Homo sapiens
cgcggcggcggagggcaggcctgggccggatgaggccctgctgccgacgggagctgagcacggcccgcgggctccccccctcacctcccaaggcggtctgagaggcctaggccgggcctgag

SEQ ID NO: 150265 - DNA, 122 bp, Homo sapiens
gagaagtaggttgggagcctgcggcgtccagggcctccgcgcgaagaaacaaggcgtctgcgggaaaggagacggagcctggaaccctgggcttttgtacttaaggaagcgaaggtcgggtg

SEQ ID NO: 150266 - DNA, 122 bp, Homo sapiens
ctccagcatcgcttggtcttgtgttgcttagcctactaagcttgtccaggtcactctgcccgacctcaccatgagccctccctactcttgtcccttctgcttaaggagccagagaaaacaac

SEQ ID NO: 150267 - DNA, 122 bp, Homo sapiens
ttatggttttttactccccctgtgtgccatttcagtgttgaaggaaaggaaagtgggggtcgctgcctctgggggccctgttgcccgtgttcccaccagctccatggacacactttccattt

SEQ ID NO: 150268 - DNA, 122 bp, Homo sapiens
gctgtgcttggtcatgagctgctgggaagttgtgactttcactttccctttcgaattcctcggtatatcttggggactggaggacctgtctggttattatacagacgcataactggaggtgg

SEQ ID NO: 150269 - DNA, 122 bp, Homo sapiens
tggttttccagcgtctttgctgcggtcggattgcctgtttttactcctcccacatcgaagcgtggcaagcgtcggtgagaagctgtgtggtgtactgggatgagccgagatctgggaattcg

SEQ ID NO: 150270 - DNA, 122 bp, Homo sapiens
ggggagcccgagggctactattgtcaagaaaatgaccaccaaaatctgtccatgcacattcgttcctagggcgccaggtacagggaggtacctaggagaggtaggagcaccgcttttagaga

SEQ ID NO: 150271 - DNA, 122 bp, Homo sapiens
cttggtggcaaagctgcgctcccagatccctccagctggcaacaacaggtgcagctgccccggacagaacaggtttggggtgctcactgcttccagctctgtccccggaaaccccaggacca

SEQ ID NO: 150272 - DNA, 122 bp, Homo sapiens
atcagccaggtttcattgtcgtggaaaccaattaccgactgtatgcctacacgggtgaggcgggacagagggcccctggaagaggaggttgggggtgagggaatgccagtttatgttcgtgt

SEQ ID NO: 150273 - DNA, 122 bp, Homo sapiens
tggttgttggtctttctatgcagactgatttcttttagactcagcctaatttattgtaggcgacagtcagtggactgacgctaatttgtgtaaacttggaaacacttaatttgatagtggag

SEQ ID NO: 150274 - DNA, 122 bp, Homo sapiens
caaaaaagtgagtttttaatatgaaaattctgcttaggttaaaaattaaaaaaaaaagagcgagttttatacatccgcatgaattgtttcctttagcactagtcaaacagactccataacct

SEQ ID NO: 150275 - DNA, 122 bp, Homo sapiens
acaggctgcgccggtagtgtaggggataggaactttctgagactcaggagaaagccacagcgatgggaagggaagcagaacactggagaccctaaaggcccacaggctgagagaagtggtac

SEQ ID NO: 150276 - DNA, 122 bp, Homo sapiens
gagctggggatctggcctggggggagggcattcacctatgcagagccacataatcagaaccgcaagcggtcacacagccacatgctgttgctttgtggaaagtcacatggtccatggcaagg

SEQ ID NO: 150277 - DNA, 122 bp, Homo sapiens
agcacagctccttccaagggcagctctcaagagcccacgttttcagattcagcagtgaagcggacgcgtctggtacgagactacaagtcgcacaggcggagagggggcccccgggcctctgg

SEQ ID NO: 150278 - DNA, 122 bp, Homo sapiens
cccatgtccttgtctcctagtcctgggaatccacggccactccactctcctgcagtaccgcggacaagaacaccatgtactcttcacaggcaggtgtcttctggtggacccaactctgttgg

SEQ ID NO: 150279 - DNA, 122 bp, Homo sapiens
tgagaggaagcctccacctcatgttttcaaacttaatactggagactggctgagaacttacggacaacatcctttctgtctgaaacaaacagtcacaagcaaaggaagaggctgggggacta

SEQ ID NO: 150280 - DNA, 122 bp, Homo sapiens
accccatcagagacaggctgagcctcaacaatgactgacttccccatcctagctacaggccgaccctctaaccttgaccttgtcagaaaccaacttttaatcacaggaacctaaccctggcc

SEQ ID NO: 150281 - DNA, 122 bp, Homo sapiens
taacatgtactcattagtgagtacacagagtgacaagatgtaaaccagaaaatatacacccgattaatatttcttctgggttttcaaaacccagcaaagctttcaaccattgtcctgaacaa

SEQ ID NO: 150282 - DNA, 122 bp, Homo sapiens
ggtccagcatgggtgcttccttattagagcatagtccaccttgggcacccagagtagagacgatacatgtttctgctaagttaggcaagaaagtgatgaaataccagggtcctggcaggcag

SEQ ID NO: 150283 - DNA, 122 bp, Homo sapiens
cagtgatgccatgttggtagcttgaatcagccaaggtgggagtatttacacgatggaaatcggcatccactacaaaccaggacttcttcccgcagagagctggttgttaaaacatttacacc

SEQ ID NO: 150284 - DNA, 122 bp, Homo sapiens
acatacgaccaggtctgccgagagtgcacgctcctccccaccccgcaaaatgccactggacgtgaaatgaacaaagtcaagttcacagttggcaggcatccgcacccgcctgggaccaggcc

SEQ ID NO: 150285 - DNA, 122 bp, Homo sapiens
tactcattccatctagcacatgggaggtgctcaccaatgttgcataagcacacaagtgagcgtgcctgcaggatggcagacagaaaaatgttttgcaggagatgcagcaacataagcagatc

SEQ ID NO: 150286 - DNA, 122 bp, Homo sapiens
ggctacctcctctgacatgcggtcagataagtcccgtcttgtttgtgagtaccacagaaacgcctgagagtcacttacccggccactgcttggaaggtttccctccggggaatgcctccctg

SEQ ID NO: 150287 - DNA, 122 bp, Homo sapiens
gggtcttccgcggtccaggagccgcacctgccgggtggagacgcggggctggctggggtgcgggagtaggaggtcttcggtccaaccgcctccaacccattcctgcttccgacgttctgttc

SEQ ID NO: 150288 - DNA, 122 bp, Homo sapiens
ccacactttcccgggaaccctacgcccaggaggctcagcgaagctccaaaaccaattttacggactgtactactgatccacctgtcggggagaaagactctacccgcagtttgacgaaaatg

SEQ ID NO: 150289 - DNA, 122 bp, Homo sapiens
tcacaggaacccaggctagcgaagcggtggctcggactagggtgaaagtagcggaggtaacgctgggtgagccgcacccgcgtctcccacgaggtccccccagtgaggttagcgggtgccgc

SEQ ID NO: 150290 - DNA, 122 bp, Homo sapiens
cggaagggcctgctccggagcctggccagggctgcgcagtcatgatcaccgagaccgcggcggagcctacggtccctgcagtgcctgctgctgaggaggccaccgaagctcggggacgcgag

SEQ ID NO: 150291 - DNA, 122 bp, Homo sapiens
ccgccccggcaccccgctcccgccctccgctgcgctccgcgccagccgccccggggcgcacggctcgctcccgagagtcccgctgcctgactgtcgcaactgccacctccctccggccccct

SEQ ID NO: 150292 - DNA, 122 bp, Homo sapiens
cctgcccccgaattgtcagacggcgggcgtctgcctctgaagttagcagtgatttcctttcgggcctggccttatctccggctgcacgttgcctgttggtgactaataacacaataacattg

SEQ ID NO: 150293 - DNA, 122 bp, Homo sapiens
ccctcgcctgtagacctggcattggcagtggagactccctggaggtactctcccccacttcgggcggagggctatttttgcgccccccacccccacgcgaacgcctggctcttccctccttg

SEQ ID NO: 150294 - DNA, 122 bp, Homo sapiens
ttccgtgaccctggtccacgggacaggcgaggaaagggttaaggcaagctgtgtccactgcgcaaccaacatggcccactttcatcctccggctgcagcaggaggaagtccgagagggggcc

SEQ ID NO: 150295 - DNA, 122 bp, Homo sapiens
tcatctcctctatattaccaagtataacactctatacagaccatgagagagcacaatgcacgtacagaatccccgattatttatgcagcacattggatgaagcccgtcttcatttcagggtt

SEQ ID NO: 150296 - DNA, 122 bp, Homo sapiens
tttctgattcgctttctgacctaaacacacattagtttagtccccatgctaaggccaacacggtctccaaatatctgctggctgaagtcagaggctttgcatatcatgtattacatggcagg

SEQ ID NO: 150297 - DNA, 122 bp, Homo sapiens
cagaaggttctcacgagtggggaatcgttcaggacctggtgactgagggtccggaagacacgcaatgcctgcggtccgttccgtagtgtccaccagcaacaacatggatgctgcaggcttct

SEQ ID NO: 150298 - DNA, 122 bp, Homo sapiens
gcgccacgagaagcaacaggtctccagtgcttgaggggtcccccagaactggggatcactcgggctcccccggaccccttcagcccccccaaagtttctccgttcggtttcccggggcaaca

SEQ ID NO: 150299 - DNA, 122 bp, Homo sapiens
tttctcgcacctgctcctgcgccaggcccggagacccccggggcggcttcccagaacctgcggagcacaactggccgaccgacccattcattgggaaccccgtcttttgccagagcccacgt

SEQ ID NO: 150300 - DNA, 122 bp, Homo sapiens
atgtcccctggagggaaaattgatcctggttgagaatcacctcagacaaagctataacaacgcttataatcataagtttttttttggtatttcatccttagttctttgtttttggggaaaat

SEQ ID NO: 150301 - DNA, 122 bp, Homo sapiens
cgccgtatataaatgttattcgagtgactgtacagcattgtttccatgcagaaaagccctcggaactcagagcatctgaccaaacgtgacctttgggaaagtcctcttgctgttcggggggc

SEQ ID NO: 150302 - DNA, 122 bp, Homo sapiens
ggccgcgggccgctggacctggcggccgtgtggatgcagggcagggtagtgatggcggaccgcggcgaggctcggctgagggacccgagcggggacttctcggtccgcggcctggagcgggt

SEQ ID NO: 150303 - DNA, 122 bp, Homo sapiens
tgctgaggtggaggatcagcagacttcataattcggcaatcccactactaaggatctgcccgagagacatgggttctgggggccccgagcagcacacacaaggatgcttgcagcagtggtac

SEQ ID NO: 150304 - DNA, 122 bp, Homo sapiens
aaatgttgtgggaacagcaaacaggccagtgtggcgggagcagagtgaatgaggggagagcgaagtccaagaggaggtgggggacacagagcttgaattcatatcatccagcacctaccagt

SEQ ID NO: 150305 - DNA, 122 bp, Homo sapiens
agggtactcacaccctagcttgggtgccccccaccactgtaccctcccttttgtgttggccgagatagatttcatcaggaaccctagagtctgtctttccatgtctctgcctctgccatcta

SEQ ID NO: 150306 - DNA, 122 bp, Homo sapiens
aagtaacaccagcctgctaaacaaaggtggcgcgatctgatcaaagaacacaagcctcagcgaccagtaagttgtcccaacgccccttgagtacaaaacactaatttcactaactaaaagca

SEQ ID NO: 150307 - DNA, 122 bp, Homo sapiens
ggagtcggagaaaaagttaccctctgggaacacactgggaggcctgggaacatccaagtccggcaaaggttactacagtgtagtctcataaaagggaagataaaaagctgaaacctaatgag

SEQ ID NO: 150308 - DNA, 122 bp, Homo sapiens
gccccgccctaccaggcacggaggagccccagcaggtaattagtgaattcacgggtgagacgaggctcagccgaagcctcctgggacccaaggagaggaacagccaggcgacagcgaacgtt

SEQ ID NO: 150309 - DNA, 122 bp, Homo sapiens
tggcacggaagggagaaggaggccgatgggaacagcactgacaacagcccgtgacagggccggcccttctgtctgcaccagcccagcacgccgggctgcacagcagattctccaacgcgtct

SEQ ID NO: 150310 - DNA, 122 bp, Homo sapiens
cggcgtggccaatctgggtgggggtgtggtggggacactgccttaactgtctcacttgcccgggccgccctcccttctcccgcctgcgcgcaccgctggagggtgcattgacaccgccctgg

SEQ ID NO: 150311 - DNA, 122 bp, Homo sapiens
catgaacccaccagaaggaagaaactctgaacacatcccaacatcagaaggaacaaactccggacgcgccaccttaagagctgtaacactcacctcgagggtccgcggcttcattcttgaag

SEQ ID NO: 150312 - DNA, 122 bp, Homo sapiens
ccatgtggtgttggagacaccgaggagaggggagggcctgcacaggggccagtgtttttacgtcaaaggctcccattgggctcactccctgtgtccttgacactgtggccccaaagctgcat

SEQ ID NO: 150313 - DNA, 122 bp, Homo sapiens
ctaagaggggctgccatgcaagaatatatgctgattttcccatgtaagttgtcagaggatcgcctgggtgacccagagagctgagtctgtttttttggctcccccctttggatgctgacggt

SEQ ID NO: 150314 - DNA, 122 bp, Homo sapiens
aaagttgcgggtaccgctttaaaaatcccagcctgggcaaaactttgatgataaatcaagcggcagatccctccgccgcctgctccgagcgggaggagggaggggaggagggaggggaggag

SEQ ID NO: 150315 - DNA, 122 bp, Homo sapiens
gtatataagcgtttctgctcgttattttttaacatttatatttataaacgttgttttcctcgagtaataaatacaatctcttgagaagacaccgaaactgaacagcgaagccccgtggcccc

SEQ ID NO: 150316 - DNA, 122 bp, Homo sapiens
gaaaaacaaaaactcttcttcttccccatcaggaccattttatcaaagttcgttcatttccgttaaccacataactaataatttaattgttattcttttttagcactacttatttatcttgg

SEQ ID NO: 150317 - DNA, 122 bp, Homo sapiens
aaacaggtcacgttaagtctctatattcttgaagtacctgaatgattgggagagccatggcgaggatcttccaggtcagcccccgtcgtgtgtgatgttccttgggctctgcggatgctcgg

SEQ ID NO: 150318 - DNA, 122 bp, Homo sapiens
gtccttctcttcagaggtattcccagcacctacaacagtgcctggcacatagtagctgcacgatacatattagctactatagtaaagtctacctgactaccctatttaatagaatattcccc

SEQ ID NO: 150319 - DNA, 122 bp, Homo sapiens
aaggcaggcgccacccgcacgacggacgtcggcaccacacgagctgcccttggcaaaacgcgttgtcggctgctgggatggatttcaggttaaagcagagtcaccaggccgaccactgctta

SEQ ID NO: 150320 - DNA, 122 bp, Homo sapiens
aaagtgatgtacagaaaacagaagtgaggtacagaaacaactggattggttatggtttggcgtttaccttgtttgaacacagttcaaacaattgtccacattcgattggccaaaactcggcg

SEQ ID NO: 150321 - DNA, 122 bp, Homo sapiens
ctgcccgccccgccagggctgggggaacaactgtgtcatctccccaccctctctgggggccgagccctccctgccggaagtcactcagggaggaaaccacagggccggtccgcccccttcag

SEQ ID NO: 150322 - DNA, 122 bp, Homo sapiens
accacacgtctagcactggcctccgtcccttggtcactttgcaggtgtaggtaggatccccgcagaactttagagcggcggtctcattccgccccctagcgtccatccatcagaagctgagc

SEQ ID NO: 150323 - DNA, 122 bp, Homo sapiens
ttacctagctttgttgaaacatgcatgttttcacaagcaagtgcattcaccatttttaatcgagctgttgacactggggcttttatcttcctcctttatttaaacctttggtgtgagctcat

SEQ ID NO: 150324 - DNA, 122 bp, Homo sapiens
tgcgacgcgtgagtgctgccgggccagggcctgcggagggcgggagggcaggaggggcggcgccccctgccggcctcgctgagcctcgtgcccctcaggtggagcctgacgcactctgagcg

SEQ ID NO: 150325 - DNA, 122 bp, Homo sapiens
acagattcaggagttcaaagaggccttcaacatgattgatcagaacagagatggcttcatcgacaaggaagatttgcatgatatgcttgcttctctaggtagactttatattctttatttgt

SEQ ID NO: 150326 - DNA, 122 bp, Homo sapiens
cctgccacccgcctgccagctccatcgcagcactgggggcaggagggcagcccaccacgccgccaggtggccagggctgcaggttcctctgtcgctcaagccacatccacactcctggacgg

SEQ ID NO: 150327 - DNA, 122 bp, Homo sapiens
ccgggacgctgctggaggcgccgtcgctccgcggcggaggcgacccagtttcccagctctcgtcctcgccacttcctctgcatgggcttccaggagactcggcctccgtcggcgacgctggc

SEQ ID NO: 150328 - DNA, 122 bp, Homo sapiens
gaaaggcaggctaacttttcattttcctgcaacatgtgcatagtaataaaaaattctggccgagcgcagtggctcacccctgtaatcccagcactttggcaggccaaggtgggcggatcaca

SEQ ID NO: 150329 - DNA, 122 bp, Homo sapiens
gataaatatctagtctcatcactctcccactttacccttcagaggccctctaggggccttcgaatgaggcccaagcccctcagcacagcacaggaagccctgagaccaggccctttggcacc

SEQ ID NO: 150330 - DNA, 122 bp, Homo sapiens
cagggagcactgggctgcagtcctgtatctgggcagggatcgcccaacctgtgttcaggccgtggaggggatgtcgcggtgagaagaggagctgcagagccttcctttcgtcccccactaag

SEQ ID NO: 150331 - DNA, 122 bp, Homo sapiens
ttcagattcaggaaacaaggatggtttctgtttagttcctccatcaaccttcaggtcatgcgattcccatttccctctgtggaccaaacaattcagtggggtttctgtcttttaaatatttc

SEQ ID NO: 150332 - DNA, 122 bp, Homo sapiens
gaggggaacctggggaagccagggttctccaaaggggcacctcaccctccaagagggaaacgaggctggggatgggaaagacgacagggacacgatgggctgacgcatgatggtacctggtg

SEQ ID NO: 150333 - DNA, 122 bp, Homo sapiens
tgcacccggcccaggatcgcgggcggtgcagactcagcaggggcgggtgcaaggacgaggcggggcctctgcgcccggccctcttcccggactataaagagagccgccggcttctgggctcc

SEQ ID NO: 150334 - DNA, 122 bp, Homo sapiens
gcgggcttccgccgctcgccgggaattgcgcagggctggcggggcgggggaccgggagagcggcctgctcccggggcacgaagggggccggatcacagacccttaacccctgacctcatctc

SEQ ID NO: 150335 - DNA, 122 bp, Homo sapiens
cctgactcatgcatgagtcatgttcagtattcaccagtagagggaggaccttctggacttcgctgttaccataaacaattggatttctgatcatgtggatcaccatgaaaagttggacactc

SEQ ID NO: 150336 - DNA, 122 bp, Homo sapiens
gtggtctgagtatgtggatgagtgcctgcgggcacatgtgtatgcgttcatgtctgtgcacgtgtccaatggggctttgtcagtatgtgagaagcgtgtgcaggtgtgtctactgatgcctg

SEQ ID NO: 150337 - DNA, 122 bp, Homo sapiens
ccgtaatcagcagataatccaatagaggagaagggcacttgaggccatgcagcggctgaacgggaagctgtgctcagcgtctctccaagcctctgcattccagtgacaacgtccgcagggcc

SEQ ID NO: 150338 - DNA, 122 bp, Homo sapiens
ggcccgggcctattctcaaaatcataagttccagccagacccccgccaagtgttctggagcgtgtgggggcgtctctgaactcctgggcgctcaggcctctgcttcccgcggcccctccttg

SEQ ID NO: 150339 - DNA, 122 bp, Homo sapiens
catcttggtttaaaatgtcaagtcgctgtaaaacataaaagcatttcataatcctctaatcggcacagtgatctccacattagtaatctgggagttaaaacaaaacaaacaataaaaccttt

SEQ ID NO: 150340 - DNA, 122 bp, Homo sapiens
gggctagcagctccagccacggcactgggacggggagcgctatcgtcccaggagaccgggcgatgagccaaggctgctgtgtatccaacctgacatctgcaggaaacccccccggaacctgc

SEQ ID NO: 150341 - DNA, 122 bp, Homo sapiens
caagcggattccatttggcttcaagcaccggactctgcctcacttcatcaaggatgactacgggcctgagagccgtggctttgtggagaactcctacctagccggcctcacacccactgagt

SEQ ID NO: 150342 - DNA, 122 bp, Homo sapiens
acaaagcaaattagacgggaaagcaggaaagctgtgcagaaattctgacctgaaacgcttcgcatccggtctctgcttgttgaaggaccttcaccgctatttctgagaagagcaaaagtgat

SEQ ID NO: 150343 - DNA, 122 bp, Homo sapiens
gcctgtaggggccccagtgcctccaaaattaaacccgctcatggctccggactctggtggcggcagctactctggctcccaaagcaaatccgtcggtgtctgcagccttgggaagatttcta

SEQ ID NO: 150344 - DNA, 122 bp, Homo sapiens
tgggcctgaagtgtgtcctgtgtgcatgtctctgacccccggagtcatgggacccagtcacgtgctgcgctgacgtggagtccgaagttgtaaagacaaagctgggtgagaccctagtgact

SEQ ID NO: 150345 - DNA, 122 bp, Homo sapiens
ggtggagattgcagtgatccgagattgtgccattgcactccagtagcccgggcaacagtgcgagactccgtctaaaaaaaaaaaaaaagagagaaggtggggctgagggacctttttgtagt

SEQ ID NO: 150346 - DNA, 122 bp, Homo sapiens
aaaggtgtctgtgagagacggagagtgtgtgtgtgggggtggggggtgggggggcggcggcggtggcggggaggacagagaacaaaaggaagaaaggccagttcacatagggctaccaaagc

SEQ ID NO: 150347 - DNA, 122 bp, Homo sapiens
gaccccgtgcaccgcttgggacagtccatacaaggaccccagagagggccagggggccttcgggcagggctgggatatggcctgcagccccccggcacccgcgaccgctccctgggccactg

SEQ ID NO: 150348 - DNA, 122 bp, Homo sapiens
gccgctcccgccctagtcctcttagacccgcgaccggaggctccggaagaccccgagccccgcccgctccgtgaccccgcccccacccgtcccgcccctgaaagcgcccggaacgctgtgcg

SEQ ID NO: 150349 - DNA, 122 bp, Homo sapiens
ctccacctcctgaccttgcgatccacctgcctcggcctcccaaagtgctgggattacaggcgtgagccaccacacccggcctctgtattttcatcttgaccaaaggcatttacctgaagctg

SEQ ID NO: 150350 - DNA, 122 bp, Homo sapiens
attgcagttttcggtgcatctcatcagtttgctgagcatacttttcagatataatggttccgctgggattcagaaagctgcagtggatcagaccggccgtagaccaccaaacagtgaccagg

SEQ ID NO: 150351 - DNA, 122 bp, Homo sapiens
gcctcgggcgccacgcgctgtgccccagggccactcacttccttggtaggtgggggatgccggcctgggcctcccgagacttgagccctgcccctgcccttgcccccagagagacctgtgcc

SEQ ID NO: 150352 - DNA, 122 bp, Homo sapiens
gccgcgggctgcggacagggactcctggggcccagaccgcgccggggagctgggtgggggcggggtgcggccgggtcgcgggtccccgggcggcgtcgcggggcgcccgggagggtgctgag

SEQ ID NO: 150353 - DNA, 122 bp, Homo sapiens
agcgtggcctcgatgggacctacaattctctataattctgaatggagccaacgaagatgccggaagccatcagagctagggatggggagcctctagcagaatgtctagataccagtgtggcc

SEQ ID NO: 150354 - DNA, 122 bp, Homo sapiens
gccgggcctgtctgcagccacgctggcctctctgggtgggacttcctctcggagaggcagcggagacacctccatctccatcgacaccgaggcatccatcagggaaatcaaggtgagatgct

SEQ ID NO: 150355 - DNA, 122 bp, Homo sapiens
ctgggccgattgcgtctgtacaaaggtcttgattagcaggtcggtggcctgcgtgtagagcgacagggcatagcgcaaggattgcaggtccgggctcttctccaggaaggtcttcttgaggc

SEQ ID NO: 150356 - DNA, 122 bp, Homo sapiens
agctcattccggaggtgcagaagcccctgcatgagcagctgtggtaccacggggccatcccgagggcagaggtggctgagctgctggtgcactctggggacttcctggtgcgggagagccag

SEQ ID NO: 150357 - DNA, 122 bp, Homo sapiens
aggtaagagatctgtagaagcgacgtcaaggtgtggttccctctgtaaggcggagctaaacggtgcattcgcccagcggggaagctagaactaaatgaccgctctgccgactggagccaacg

SEQ ID NO: 150358 - DNA, 122 bp, Homo sapiens
ctcggtgtggcgtggagtctcttggaagttttaactcatacttccctgagattgacaagtcgagcatctcttcctggtctagcctctcaggggctcatggacttttcctcaaaggccaggta

SEQ ID NO: 150359 - DNA, 122 bp, Homo sapiens
gtagtgcaccggatttcctctacccgagagtaaaaaaagcacgccgtagtcggcaggattcgaacctgcgcggggagaccccaatggatttcaagtccatcgccttaaccactcggccacga

SEQ ID NO: 150360 - DNA, 122 bp, Homo sapiens
cccgcgcctccctgcagccaaggcggacaaggagagcttcgagaaggcgtaccaggtgggcgccgtgctgggtagcggcggcttcggcacggtctacgcgggtagccgcatcgccgacgggc

SEQ ID NO: 150361 - DNA, 122 bp, Homo sapiens
ggtcacctcgctctcacctcagggaaccgggatcaggtgctcctggcagccagggagttgcgagtgccagaggccgtagagctgtgccagagcttcaagcccaaaacttcagtgggacaggc

SEQ ID NO: 150362 - DNA, 122 bp, Homo sapiens
gggcaggctgcatgcggaagtctgggccacacctggtatggctcacctcaggatcaccaccggtcccgccagtcgccttcctgttggatttattttcaaagagggctggggccacccaggaa

SEQ ID NO: 150363 - DNA, 122 bp, Homo sapiens
atcaggtccctcttccttttatcttctcagtgcagtcagtaccctgagacttctttggagcgattgtaccaaaacttttgtgtgtgtgtgacagagtcttgctttgtgggctaggctagagt

SEQ ID NO: 150364 - DNA, 122 bp, Homo sapiens
ttattcataatggatcagccaattcattccttattaatttaatggagtacaagtaagcagcgtaacagcttgagtttaggagtgtttcacaaatggggctttttgtctgtaatcacttaatc

SEQ ID NO: 150365 - DNA, 122 bp, Homo sapiens
tggacagacgatgggggcgacccatcgggacccgacgggcctctgactccagcaatacagcgaatcagcggctttcgggaatacatttttcggaaaaagacttcttcctcggttttctgctc

SEQ ID NO: 150366 - DNA, 122 bp, Homo sapiens
cagagcagaggtagcctgaaatcagaggaaccatgagtactatgtaccatgtatagtggtcgttaagtgtgcagatcctgggacacactgcttgggttcaaatcctggctctgccccttact

SEQ ID NO: 150367 - DNA, 122 bp, Homo sapiens
agaggagggcggctcggtctcttgcctgctcactggtggaggtgggcccggtcatcagggcgcttgatgtggatcctccgcacgcgctcgatccgctcccgctcctcgtcctcgtccaggtg

SEQ ID NO: 150368 - DNA, 122 bp, Homo sapiens
actagacaaaaatacaaagggctgttttccataggacgtagccctgatcccaatttatttcgtctcctcatcgatcttaagggaaaggggtaccgtcattccgaacttttgggcgacggatc

SEQ ID NO: 150369 - DNA, 122 bp, Homo sapiens
agagagccaaggtacccgccagtcacctgggaggccatgcgtctgtccggtccctacctccggctcccttaagccaacggcctcctcaggaccacctggagcctccctgttcccacagtgaa

SEQ ID NO: 150370 - DNA, 122 bp, Homo sapiens
actgttttccctctttattgttttccatcatttttttttttcagtctgggttttgggccccgtcagttccttttctgttcaacactgagctatgtatccacccctctcaaggttgaaaaaga

SEQ ID NO: 150371 - DNA, 122 bp, Homo sapiens
attgggctgcaattcgtggaggagccgtcgtgtgactgggaagaccccaaggggctctggcgggcctgactgctgggtaggagacacaccagccgtccgtttccttgttcacggattgcgac

SEQ ID NO: 150372 - DNA, 122 bp, Homo sapiens
atccaaaacgaactgcgccagcgagtgctgccgccctccccaacggccctggaagaccaccgccccgggccccaggcgcgtcctgtcccgtgcctacctccgacaccacctccaagagcgcc

SEQ ID NO: 150373 - DNA, 122 bp, Homo sapiens
tctgtggccctcaaagggaaactgaagcctttgaggacatgaagactcgcattaggccaacgaggggtcttggaactccagatcaaagagaataagaaagacctgactctgtgtgtgtgtac

SEQ ID NO: 150374 - DNA, 122 bp, Homo sapiens
gatcaccggtgtgcaggcacagccaggcgaggccacgtccggcccgccggggatccagcccggccaggagcccccggtcacaatgatcttcatgggttaccagaacgtggaggatgaggccg

SEQ ID NO: 150375 - DNA, 122 bp, Homo sapiens
gagggtgagaggggcaggtggcggaagcggaagttacgcaggcagctcgccctcgggctccgcgggagttgtagttctcacgctaggtctcctccgggcgcttccctagcccgttcgccgcc

SEQ ID NO: 150376 - DNA, 122 bp, Homo sapiens
cctgggaagcgggacttgaggtgaagggggtggagcaggtaggagcgggatgcaaaggagcgccaaggctggttccagccgcaagtggatgagaaatcctagtttcttcatgatttggagta

SEQ ID NO: 150377 - DNA, 122 bp, Homo sapiens
cagtggggagggtggagggctctttattgtggtgaccacgggcatcagtaggagggtccccgggatccggcggcagctcctcgccagcccccctgggcgccctcacgtgcccaggagcagcc

SEQ ID NO: 150378 - DNA, 122 bp, Homo sapiens
ccctaggagggaagggtggggtggaactgggcacatgccagcaccacttctagcttccttcgctatcccccaccccctgaccctccagctcctcctggccctctcacgtgcccacttctgct

SEQ ID NO: 150379 - DNA, 122 bp, Homo sapiens
cgtcccctccttcagcgtccaggaggagctggatttcaccctgaagggcaatctcagtttcggctgggtccgcgaggtgtgtgggggcagcggcagagcccctgccccagactcaggcagga

SEQ ID NO: 150380 - DNA, 122 bp, Homo sapiens
gctgagctatgcatgtggccccctgccaacacaccctgtttcgcagagaggatggcgacccgcctaaggctacatggcagagaccaggggagctgaggtttgaaccccagggtcagctccag

SEQ ID NO: 150381 - DNA, 122 bp, Homo sapiens
agcctccggctggggagctaaaccgctggggactccgcggctgctgcctgagtcgctgtccgctgcccgcatcccttccgccctgggcctctgcacggtctgcggttttctgtgcgcacttg

SEQ ID NO: 150382 - DNA, 122 bp, Homo sapiens
atctgcaaacgtgaagtgagtctcagtaagagcccctcgtccgctggccggagcaaaggccggtcactaaacaggtaagctctccagagaaccagatcagccacgggtcgggggcctcctcc

SEQ ID NO: 150383 - DNA, 122 bp, Homo sapiens
tggaaggaccggaacttctatactgcggtgctgctgatggtgccgctgacccccgggaagcggggattttaagggttacacccgagcccttggcatctgtgcatcccagggtgattgaggtt

SEQ ID NO: 150384 - DNA, 122 bp, Homo sapiens
aagcagagtgcggcccaggcgtgggggaggcagcagccgagcgggggcggggtctgtggacgcctgaggcccacacaggtagctgatgatggtttcttagacaaatgacagacaggtacacg

SEQ ID NO: 150385 - DNA, 122 bp, Homo sapiens
ccagccccgagaagtaatttcttttgttttctttttaattaaacaaaaatgttgctgaaacgagctgagtgatataggagcttaaagaattgacaagctctagatttcatttccccaaacct

SEQ ID NO: 150386 - DNA, 122 bp, Homo sapiens
gccgctgttcccagtgtctcgcccacccccgccgggcccgtccgactccgcgggtgagcgcgtggttcccggctgggcaccgccgcctgcctctctgcagaccaccccggacccgacccctc

SEQ ID NO: 150387 - DNA, 122 bp, Homo sapiens
aattcctactgcctagtgatatcatagttgccttaacatcataacacaacacatttctcacgcgtttgtggtgatgctggtacaaacaagctacagcgccgctagtcatatacaaatatagc

SEQ ID NO: 150388 - DNA, 122 bp, Homo sapiens
ccgccctgtcccggccggctttccagtactagtcctctggcgccggctcccagcccctctcgtacccttcaaatcgcgctccgccgctagactctcgtgatagctgagactttccccggaag

SEQ ID NO: 150389 - DNA, 122 bp, Homo sapiens
agatatcagcccgcctcagcctcccaaagtgctgggattacaggcgcgagccactgcacccggcagaagtgtttatgttaaaacacctaaaaaattgccgtttgacacccctgcctatccat

SEQ ID NO: 150390 - DNA, 122 bp, Homo sapiens
ttccaagaaggccagagaactggcttatccatttggattaatccactggtgaatttctttcgggataggccaaaatggatctggactataatctttacatatttagatccttcaaactagac

SEQ ID NO: 150391 - DNA, 122 bp, Homo sapiens
cctccttgatgcgctgcgggggcggggagtcatcagcccttggggctctgccctggtttccggggtcccatggcccaccctcactcccaggcctccggggtgccccgtctccccaggcacct

SEQ ID NO: 150392 - DNA, 122 bp, Homo sapiens
ctcgatctcctgacctcgtgatccgcccgcctcggcctcccaacgtgctgggattacaggcgtgagccaccatgcccggcagaaatatttttatagtctgcaatacaagagttttatggcaa

SEQ ID NO: 150393 - DNA, 122 bp, Homo sapiens
agaaatagacttgggaggtgatgtcatataacagttatttaaagccttgagtctgaatgacgtctccaagggagtgattggctgtagaagagaacaggaacaaggactgaacactaggcctc

SEQ ID NO: 150394 - DNA, 122 bp, Homo sapiens
aatcttgttaccaaacaaacggggcttgttgccctatacgcacagaagccaatattatggcgctgattttttgagaaaagttttcattgtgagtcagctaacaaggagacaggagtatagct

SEQ ID NO: 150395 - DNA, 122 bp, Homo sapiens
ctggcttctcttgagctatactcccccacaggctgaattatagctctcctaccagtcccacggcgctgaatgatgtcatgggatctgcagttcagcgagatgaaagggataaagcagaaccc

SEQ ID NO: 150396 - DNA, 122 bp, Homo sapiens
aacacgccaagaagggtgagcagatggcttgggccgtgcccctcaatggctccaaggaagcgtagcaagtggttcattctcgcatctgtcacggggtctgttttattccatatctttgctga

SEQ ID NO: 150397 - DNA, 122 bp, Homo sapiens
gtacgtgcgcgccagcatgacgctgtcgggctacctgcccccgctgtgcgaccccaaggacgggcacctactcatggatggcggctacatcaacaatctgccaggcaagtggccgcccgcac

SEQ ID NO: 150398 - DNA, 122 bp, Homo sapiens
ccgtctgtgagcttcacctgtgagtggcaggtgcgcgtggagtcagttcccctccatgcccgcctgcattcctacccggagacctccggccgcggtgggaattgccctgctgttttcattac

SEQ ID NO: 150399 - DNA, 122 bp, Homo sapiens
cagcctcaggcgtcggccgcgagggggttgctgggctggctggtcccccaggtctctacgcgaagggggtgctgggctctacccccaggcctctactaccctctggcacacatccatctagt

SEQ ID NO: 150400 - DNA, 122 bp, Homo sapiens
gtttcccgctgcaataacagaactccagggactcagtcagctagtgtgagcctggtccctcgccccattgttcccctcgtcccatcatggagcagcaacctggcatagggtcactgacgtct

SEQ ID NO: 150401 - DNA, 122 bp, Homo sapiens
gagataatggccgcttttgttgcgctcctttattaagtcaggccctcagctgggacttcccgtgcatccatgcgttcattccacagatactgattgaatgcctgcatgtaacaagccatgct

SEQ ID NO: 150402 - DNA, 122 bp, Homo sapiens
gtgacgtttcggagtgtcgctgtcaatgagaatttattgagctcctcctctgaatccagccgtgtgcttgctgctgggaggtgtacagacagataaaacaggagcgtggccaaaagcagccc

SEQ ID NO: 150403 - DNA, 122 bp, Homo sapiens
gcatggcagagggacggggcggcccaggtgcccgggtctcggcctcgtgacctcgttgctcgtcgtggggctgccgtccacttgcactgggacaatccttggtccaaggcgcccaggcgcgg

SEQ ID NO: 150404 - DNA, 122 bp, Homo sapiens
agcaaaccaggacacgcgcgcgcgcacacacacacacacacacacacgatgaaaccaaaccgccattgtgcaatgcacaccctttgtccaaaggtagatgggtacaattcactctgatctgc

SEQ ID NO: 150405 - DNA, 122 bp, Homo sapiens
tgcagcactaggggctctccaaacacaagaacccacgatgtgcccgccacatgaggcacacgcccaagcatgcactcaaacactagaaattagcccagcaaatgatggtattggtaggggaa

SEQ ID NO: 150406 - DNA, 122 bp, Homo sapiens
gtgagccccatctcctggtatccattgccctgtgtattaccctctccttaggtgctggcacgactgtggctcacttctaaccgacaggataaggcaaagataatgggatgttcacttccgtg

SEQ ID NO: 150407 - DNA, 122 bp, Homo sapiens
gaccagacaccctggagttgccggggcagtcccaaacctcttacctcccggtccttgagccgagagactctcaaacagcgaaagagagggtcttccggctctgccggaagttgtgcgcgcgc

SEQ ID NO: 150408 - DNA, 122 bp, Homo sapiens
tgacagacggatttaggccctctacgttaaccctaaattgtctgactagatgatgataggcgtgcctgacagtcagtggctcaagccacattacaccttactcttatactttatttccttct

SEQ ID NO: 150409 - DNA, 122 bp, Homo sapiens
gtgtccctagcccgcggcgtggggcagtgcgggctgtgcgcgcggtccgcggcccgggggcgcgctcgcctgtatataggcaggtgtcaagctggggctcttcttattggacgtgagggccg

SEQ ID NO: 150410 - DNA, 122 bp, Homo sapiens
tttttgcggggacacgaggaggtgcaaggccttgcggcagagcagcttgcgtgtttgtggcggtcggcccgtatggattgcaggacgcccctcttttatctgtgggtgttgacactaagttg

SEQ ID NO: 150411 - DNA, 122 bp, Homo sapiens
cgcctgcgcgttgacggcgattttgcgttctgaggctgcagcgtcggcatcttgagctgccggttcgcgagttcgaggccaggttccgcctgtcgtgggttcgcaccccggacgcgatgcta

SEQ ID NO: 150412 - DNA, 122 bp, Homo sapiens
cttgctcccttggtccggagcgctccccggaatgcccggtgaagctgtgcgggaaccctgcggtctgtgtacaggactgtgtccttgcaaacctgactctcgagcttccttcccagtgcccc

SEQ ID NO: 150413 - DNA, 122 bp, Homo sapiens
ttctttaaaattatctctatcttcctacaaccatttctctctgtctctctctctctctctcggtatctgtaaatttttcataacttatcgggtcaataccttgtgaaggcaaaggctttttt

SEQ ID NO: 150414 - DNA, 122 bp, Homo sapiens
gtcggcctctggagatctgcagctgggttattttacttctgaaacggacgacacctgccccgcgcaccccagcggctcctccacacggagagatggtgtcagtcaaaggccgtctagatgac

SEQ ID NO: 150415 - DNA, 122 bp, Homo sapiens
aggctctggcgcctttcttcctgcgcagccaggtttctaaggaaatgaaccctcaggactcggttgcggagcgggtgtgttcggcgcctcctgggggagcagcctcctaagagccgcaaagc

SEQ ID NO: 150416 - DNA, 122 bp, Homo sapiens
ctcactcacccggtcaggtgggcgtttcctgtgggcgtctccaactccgcaggtgctggacggaagtcagggttctaatcctctgcgcgctctgcgaccttggcaagccctttgcccactct

SEQ ID NO: 150417 - DNA, 122 bp, Homo sapiens
gctactcttcccaaagtcgggaggcaaagcggctgggtcaccagagcctgaccatactgacgctccagggggaagacgcagaggccgggaagagacaccccctcccaaacacataaaacttg

SEQ ID NO: 150418 - DNA, 122 bp, Homo sapiens
acaggtcgccgtccccgcctccccacccgcccacgaggtgcagggcacggctggccttagcggatctgactctgccaaccccggggccacttcagcgttagattccacatgaaactgttgct

SEQ ID NO: 150419 - DNA, 122 bp, Homo sapiens
attcccgccccccccacctagtggaattagaactcttgagctttgctccttaagggttaacgtggaaactaacagctctaatacacttggactttttttttctgattttgctcacggataac

SEQ ID NO: 150420 - DNA, 122 bp, Homo sapiens
tgacactgggacagcagaacaaagcagttcaggttaacccttattgcttccttgtaaattcgcaaagatgtgaagtccagagaagtcagggtgggggccctgatccttgctctggttccact

SEQ ID NO: 150421 - DNA, 122 bp, Homo sapiens
acttgtcattctgccattttctgttggttagaatcaagtcactggtcccacctacacttccgggtgggagtggggcactaaacaagggtgcagactccatgatggagggtcacggggccacc

SEQ ID NO: 150422 - DNA, 122 bp, Homo sapiens
gacgcctttaaatatcttcctcgcacttgcatattcatgacccgctggggcggggcccaacgcgcagggcggagccggaggggatttcgatccctgaaaagaagcctcagaatttcacaagg

SEQ ID NO: 150423 - DNA, 122 bp, Homo sapiens
ccctcagaagcagcgctggggacgccctcctgggccgggcagggggcgggggactggggccggggctgcagccagccagccttccttggggcccaaccccttcgccgaccctgcagggtggg

SEQ ID NO: 150424 - DNA, 122 bp, Homo sapiens
agcccctcttgaggtcctggccgcctggcttctctgcttcctatcagcaagagctccttccgtgcccagcctccacagtgcccttgttagggtgacggacctgggcgccacctgggggcagg

SEQ ID NO: 150425 - DNA, 122 bp, Homo sapiens
ttttttttttttttttttttttttgctaagatgactctaacccctccctgcttcaaatcacgaacttgcattataggcacacaaaggatgctgactccctccagcagcctcgtttgcagtac

SEQ ID NO: 150426 - DNA, 122 bp, Homo sapiens
cttactcgccccctctagaaagcaccttgttcaggcgggggcgtccagacccgcacagaacgctcctcaaaccagcagcagctaagaggatgagactgccggggacacggaacaaagcctcc

SEQ ID NO: 150427 - DNA, 122 bp, Homo sapiens
gtttctggggtcggcagagtgggccaggcaacaacctcacatgcctacctcactgccactcgtccgcctcgtccactcctggcatttgggataaacatcctgtctcagacacacccttctcg

SEQ ID NO: 150428 - DNA, 122 bp, Homo sapiens
gagaaagatttgggcataccgcagcatttcatttcctctttgtctagcttgatgataactcgtcacttttcaaactgtgaagatgaaatcaggagaagagtgtgaaatatcagtataacaat

SEQ ID NO: 150429 - DNA, 122 bp, Homo sapiens
cgtgttccaagaacacagctgttgctcagaggctcaaggcttcggctactcctgtgtcagcgcgcaacataaacccaccacagagaaaacccaagcacgaagcacgaccgtgctctgccatc

SEQ ID NO: 150430 - DNA, 122 bp, Homo sapiens
tttataaacatttgattgttaattcaacattcctgtgaggacagttaacaaacatcttaccggccaggcacggtgacttatgcctataatcccagcactttgggaggctgaggaaggtggat

SEQ ID NO: 150431 - DNA, 122 bp, Homo sapiens
ccgcggcctcgccaagtcggctgccgaaaccacgcgccagcgcccttccactcccccgcccgtcgtgaccacacgactgagccagcctccaggtctagaagctcctgccacccagtctggtg

SEQ ID NO: 150432 - DNA, 122 bp, Homo sapiens
agccgctcattgtgggagtgtccgcagggcggccagacccattaagcccagcaggcgtggcgccagcacccgcggcgctttccacagccctcgaaagtgttttcatttctttcataatcaga

SEQ ID NO: 150433 - DNA, 122 bp, Homo sapiens
tcgtcagtctgtggctttcatcagatccagagagggtagaataactggccggcctaacggcggctgagccaggagtggaatcccagcaggaagaactttggacccttgcagttcccgcagca

SEQ ID NO: 150434 - DNA, 122 bp, Homo sapiens
ggccggaggcgcagacctgtggtgaggacacccgaggcctcctgggagacctgcagaccacgcccacctcatttacatgttcactcccgaccctggaaacccggatttcgcctccggacagc

SEQ ID NO: 150435 - DNA, 122 bp, Homo sapiens
gtgttgtgcggtgtcctcctgggcatgttcccaccttggcagtgctgtctctgcctgggccgccctttgggcagctgctcctgagccctgcctggcttagttggcctgtgcccgccacctgg

SEQ ID NO: 150436 - DNA, 122 bp, Homo sapiens
ttgctgcttgaaatttgtgattcggtgtattctacccagcaactgctgagaaataaggttcgacaccattggctggttcactcacacccggccaatcctgggctctaaaatacttagggaac

SEQ ID NO: 150437 - DNA, 122 bp, Homo sapiens
aacccagaccgtaggtccacgccctggccccggggctttgaacgtgaagaaaatcatcatcggggaatgtcatgatgtgatttcaggtagaattctgccttatttaggccacctttcgccag

SEQ ID NO: 150438 - DNA, 122 bp, Homo sapiens
gcctgattttcaatctgtaaggtatatacccagcagtggggttggggtcataggttgcttcgatgtttcattttttgaggattctcggtcctctcttccatagcagctgcgtcattttacct

SEQ ID NO: 150439 - DNA, 122 bp, Homo sapiens
ccataaactcatagttgtttttctccacggaaatctttagtaaaaggcgaaagatttattcgttatgaagagaaaccagagatctgcctgttagccttttgcctggcttcccagctattgac

SEQ ID NO: 150440 - DNA, 122 bp, Homo sapiens
cccacaacgtcagcatgtccgtggctttggagggaagtctgcgttcattagtgaaacaggcgtgcactcaggtgggccacggtgagctgaagaaaggccgtcgccagctccatgtcctcccc

SEQ ID NO: 150441 - DNA, 122 bp, Homo sapiens
aggcggctctgtgcctcggaaggcagggtgcagaggcgtgcagcgctcaccacggggatgcggccggctcctgggacgggacctggaacgcggatgtggccggatgtttagtgggtgccgtg

SEQ ID NO: 150442 - DNA, 122 bp, Homo sapiens
ctggagaaacatcccagatcactgaaggcttgtagttaaaagtttttgtgtattcagggacgctgtgctttggcagggcccaaggcagagtccatgggtgtccctagtccatgggtgtccct

SEQ ID NO: 150443 - DNA, 122 bp, Homo sapiens
tcggcactggccacttgcaggtaggagcgcggggcccccccgcccactgcgcacgcgcggcggcccgttgctggcccaggtgcccctaggccggatagagtgcgtcccaaccgattcgcggc

SEQ ID NO: 150444 - DNA, 122 bp, Homo sapiens
cctgtgtttagggaaggtgacggtccaattggggcccgttttagctgcactcacctctctcggtggctcctctggtttccttctccagcagcagcgcccccatctcagcgggggcctccccc

SEQ ID NO: 150445 - DNA, 122 bp, Homo sapiens
ccgccggcagcgtgcgccgagccacagtgactgtggcgggaggaggcgcctgagccttcgcgccagaggcggcagtgctgctccgattcctgcttgtccctagcgagccagcgagccacaca

SEQ ID NO: 150446 - DNA, 122 bp, Homo sapiens
cccctcaacccgcactggacactcctcccaggacacttcccgtgtatgtgcctgagtgttcgcacacgtagggggatcagcagggcgggcggacagggcaggctcccaaccgcgcaggtggc

SEQ ID NO: 150447 - DNA, 122 bp, Homo sapiens
caaagccaaatcctgattgctcagcgggctggaaggcgtggcctcagccccgccccgccccgcctcaccacaaagcggttggttgcggcagggactacaccggtgtatcatgggagcggccc

SEQ ID NO: 150448 - DNA, 122 bp, Homo sapiens
ccagggttcttgaagggactccaactgcccaggagtctggcgggtctttttgctgagtggcggggagaagagggaggaaaaagagagaacgcagagcagatcagcagctctctgagctgtct

SEQ ID NO: 150449 - DNA, 122 bp, Homo sapiens
gcaccagcaggagagccgggaaggtggtactcacggtggtgaagggcatgaactgcaggacgctgccacggccaccctgctccaggcagtccacacactcctccatgaaccactgcacgaac

SEQ ID NO: 150450 - DNA, 122 bp, Homo sapiens
tgcagctcgccctgcttcacggacaggtacaactgccgagggtggaaacggagcttcttccgcctgccaagggagcacgggagcggggagagaaggggagctcctcagattccagcatcagc

SEQ ID NO: 150451 - DNA, 122 bp, Homo sapiens
ccatccaggtagacacagacacacacagagaccacagcttcctgtaacatttccgagtgtcgaattccatctcccggtctagaggtttttcttcttggtccttcctgagacctcttggctcc

SEQ ID NO: 150452 - DNA, 122 bp, Homo sapiens
tcccctggcacctgctgggaccctcctgccaggctggacatgttagcccctctcactgggcgggtgcctggctgcatgagcactctgcccagggttccctgcccagtgcgatggcctggtgg

SEQ ID NO: 150453 - DNA, 122 bp, Homo sapiens
gccttcgctcgctggggcctggatgcaggaggggccttcggctttcagggaagggtgtcccgcgggggacagcaccccttcctcaccgttcctcggggctcccgagctgcgggctcggcggg

SEQ ID NO: 150454 - DNA, 122 bp, Homo sapiens
cgggcgcctttacccggtttaatttcagtttaggccaaaatccccgcgggttggtcggggcgggagcggggctcggtgttcggggctgacggcgggggcgaggccatggttctcacaccatc

SEQ ID NO: 150455 - DNA, 122 bp, Homo sapiens
tggcagaatttggccgaggatccaaacccggagcagcctccagagagcgtgtcgttcacgcggccagcatatgctcagagacctcagaggctcagagacctcagggctggtggtgtggtcgg

SEQ ID NO: 150456 - DNA, 122 bp, Homo sapiens
tttagtgagtgctcccccgctgagcctccccgttcccgctgttctgaagacagagacctccgcgagcggagcacgagctcccagcctatcatgaacatcgagcaagacgtggcacgtgaatt

SEQ ID NO: 150457 - DNA, 122 bp, Homo sapiens
tgacggggctagaggggagcaggaacattccagagctccagttaagggtggacggcgcttcggatgcagcgcagggattgttttgggctggtaaacggatccaaaatgttttctgaagtgaa

SEQ ID NO: 150458 - DNA, 122 bp, Homo sapiens
tatttccctgtaggcagcgagggccttgaacccggtaacacctaatgggttgcaagtcttcgtgttctttgatcacattgactgagagttggcgggcgtatgctcattacttgtgtgctcct

SEQ ID NO: 150459 - DNA, 122 bp, Homo sapiens
gcagccgggctgggagtcttcatagcatcttctccaacaggtgcgagggtctgggggctccgctcctccttcaaggtcagcccgcccgctgccgtctcctggtgaccggggaaggaaagggc

SEQ ID NO: 150460 - DNA, 122 bp, Homo sapiens
ggcggacggcgccatcttgcgtggcccagctcagtctctccgagttggcaacagaaccagcgccacctggcggccggaagtgcgggactcgagggctctgcagcagagctccgtgggggcgt

SEQ ID NO: 150461 - DNA, 122 bp, Homo sapiens
agggtgaatcagtgttgaccctataatgatctgcaagggcctggctgtcaggcgtgctcccgggctgcaaatcctacttatgctcttcagggctttcaggatagagtgcacactccttggat

SEQ ID NO: 150462 - DNA, 122 bp, Homo sapiens
atgcaaaatacagcaacgcatgcctggtcttacaaacagatcgcattgtgcctaggaccccgagaaagttcagacgctctctcttaagaaatacggaccctttttcttgcagtgcgatttca

SEQ ID NO: 150463 - DNA, 122 bp, Homo sapiens
ggcgacaacaacatcaacactgaaaacaacagcgaatggacactgaggtcatgtgtgcaccgcggcagctccctccctccctccctgccttccaccctccttccctccctccctccttccct

SEQ ID NO: 150464 - DNA, 122 bp, Homo sapiens
gaagaggatcgggacgaaggacatcagcaccaccaggacgctcaggaaaaagatgcccagcgccttgctggcactcttggcgcagctgagcttcagcaccggggcgatgtcacagaagaagt

SEQ ID NO: 150465 - DNA, 122 bp, Homo sapiens
ctaagttcttcaagagacacagagggagaattatgccaaaggtaactatcaccaccagaacgcggccatccacgtaccaggctctgaaaggcatttaagtgattaggttatatttttttaga

SEQ ID NO: 150466 - DNA, 122 bp, Homo sapiens
gcagtgggcactgaggcctggggactaagggtggggctattgtgccctggatgccctggccgcagccacctggggcactgggactctgaccagggcagccaggcctaccctttccagatctg

SEQ ID NO: 150467 - DNA, 122 bp, Homo sapiens
acaggagagagttcctggaataccaccgccctccaggagctttgcatacctgcgggggcccgggggcattccacctcatcgtgcacctgaaggcgggagatgcagtcaacgtcgtggtgact

SEQ ID NO: 150468 - DNA, 122 bp, Homo sapiens
tgggctgagctctacactcaggagtccagggcaaaggcaggcaacgggtccaagctggggcgtcagggcgccatgccacagccccttggagggctcccggttccgggggagcaagtcaggtg

SEQ ID NO: 150469 - DNA, 122 bp, Homo sapiens
cgcgcgtgcgcacagccgcccgcgccgcgccccgggccgatccggttcttgcccttgggacgtggctgcgcctcaccgccctaccccgggagggaacccccgctgactttttcctctcttca

SEQ ID NO: 150470 - DNA, 122 bp, Homo sapiens
gaacccgtccttaaccaagatctagtcaatttaatttcactttataagtgaacaacacatcggtttaaaaagttaaatactaagacatcatggaaataggtgtatttggggggtgggctgat

SEQ ID NO: 150471 - DNA, 122 bp, Homo sapiens
ccaggccgacaacgtgggcgatccggcaagggaggctggccgccggatggggctgacaagcgcaccgctgtcgagacctgcggaaccttctgaatgacgaggggtcggggagagcgtcgtaa

SEQ ID NO: 150472 - DNA, 122 bp, Homo sapiens
tttgagaatcatttccactacccagaaaaaacattcaaatgagttgtaaataaagtcaagcgcagttgaaaaatcctgtatccacagatgtttcttaggagtgcctatgcgcttagactcga

SEQ ID NO: 150473 - DNA, 122 bp, Homo sapiens
ggtgatccacccacctcggcctcccatagtgctgggattataggcataagccaccacgcccggccttacacatcattctttagatagcacaggcacatgtcacggccagcccaacatgacat

SEQ ID NO: 150474 - DNA, 122 bp, Homo sapiens
ttccactccaaggaaatacagaatccgggaaacaattgttcctagcgattagggaaatctcgcgagattcaggtcctgggagcctggcaagcccacacagcgacggttatttagccgttgaa

SEQ ID NO: 150475 - DNA, 122 bp, Homo sapiens
agcaaggatctcctagatgccgggttcagaatgaaataggagcattggctgaacatctgccggggacctcactgggcacgcacagggcctcacttactcaacgcagacactccctgaagtga

SEQ ID NO: 150476 - DNA, 122 bp, Homo sapiens
gatgggcggccgggcagagacgctccccccctcccagatgtgatggcggccgggaagaggcgctccccacctcctagatgggacggcggccgggcagagacgctccccactctccagactgg

SEQ ID NO: 150477 - DNA, 122 bp, Homo sapiens
ccgggctcgcgggggccacaatcggcccagtgttcgcagcccccaggttggacagggggccgggcacacctgcgcggcgcagatggcgccggggggcggacagcaggcaccaaagtctcctc

SEQ ID NO: 150478 - DNA, 122 bp, Homo sapiens
actcgcgcggtgctcatcaccggtgagtgcgcgggtcgcggagcgcggggactccaggctcgagggcgggactggacactcaacaggactgactccccatgggcacagccaaggcgggctcc

SEQ ID NO: 150479 - DNA, 122 bp, Homo sapiens
gactgtatcttagggctacttgggcagaattaagagtacgcagcaagcgcgggccccacacgctcccggcgggattgcgagcgggacattcccaaccctctggaaggcgctcagccgcctcc

SEQ ID NO: 150480 - DNA, 122 bp, Homo sapiens
cctgggcagggacttgggaacaaagcagctgcttcaggtcagaagtgctctgggtgtttccgaaaagagggcgcttcggagaagccggagcccgctggggatgccgggcgcccccagagttc

SEQ ID NO: 150481 - DNA, 122 bp, Homo sapiens
ccaacagactcctgctgccactctccacctccagctgcgcgggcctctgtgcccaaaaggcgtctttacgtaccatggtgtcatatgtgtctatcaatatgtttaaattatgatatacaact

SEQ ID NO: 150482 - DNA, 122 bp, Homo sapiens
acctatttcaccttgtaattagggacctccacccaggtatacacacccaggaagcagatacggataaagggagagggtaggggctgggtcaaaggcacacatggatatatgtacacacaagc

SEQ ID NO: 150483 - DNA, 122 bp, Homo sapiens
ctgctgtcggccatgaaaatacagattggcctttatctttatcaagatcttcatccagggcgatatgatcatatgcagccactccctccctaaccctaaccctaaccccgcaccctgttagt

SEQ ID NO: 150484 - DNA, 122 bp, Homo sapiens
cgccccccgcccccatctccagtcgcggtccctcctctgccatccctccccccagcctctcgccataaattagccaaataagaaaagaggccccgccgctcgtccgggaaggcttgggcagc

SEQ ID NO: 150485 - DNA, 122 bp, Homo sapiens
agcgcctgggcgtcgtgggcctccgtagcaaacgcggggcgggagcacgactcagggcggcgcaatgtgattggcccaggtccccttcggagctttctattggtcctgggtaccgagcatgg

SEQ ID NO: 150486 - DNA, 122 bp, Homo sapiens
gatttctcttcaacaaattatagctactttgtcccttatgactcattgcaatattttcttcggctttctacaagactctttctcttattttctctgtcccaattgtctcctcactgtagaag

SEQ ID NO: 150487 - DNA, 122 bp, Homo sapiens
gtggcgggagtcgggggggacggcggggtagccgcggcctggtaagtggagctgggattccggcgccgtacgggaggagagagtaggccagcgaggcgatcctctgtccgggcatagcccca

SEQ ID NO: 150488 - DNA, 122 bp, Homo sapiens
gtcactttacattgtttgcaggaaccacaaaaatgagacctcatcttaaccctaaaagggcgatcctgatgaaattccagaaggcaatctagaagagattaaatatactatgactacactgc

SEQ ID NO: 150489 - DNA, 122 bp, Homo sapiens
catcaaacaaacgaccctttgtttttacagtacactcattaaccctattgctttttttatcgtaaaaagttccacgatgaatgttcttaaaaagtgtgtaagtaaatatttaatgaatcata

SEQ ID NO: 150490 - DNA, 122 bp, Homo sapiens
ggccttctgaagctgctcgtttcagttgttaagatatttctgaaggcacttcccgatgcacgaaggcccctcccacgtcccaccaccggactgtcctttgaaaaaggttcgagaacgcgttg

SEQ ID NO: 150491 - DNA, 122 bp, Homo sapiens
tacagatgatttgagaagcatcaaaaaaatcctaaattcccaaaagaattcttattctgacgttagttttacattctatggaacaaaaaatgccacactttcattttacctaaattatctat

SEQ ID NO: 150492 - DNA, 122 bp, Homo sapiens
aagaggagaagatgttaggtggaaagaggtgagcaagatatagatggtgcaggaactcaacgggtgacctcagagagggcaacagaagctatattgagtctggggacgcatgtacatcccac

SEQ ID NO: 150493 - DNA, 122 bp, Homo sapiens
ttggcagctgcctccattttggcagagctgggcgttctggcaggggtcaggaaactggcacgtctcacccaggaagccaggggcacacctgggcaggggaggagaggaaaactcacatcact

SEQ ID NO: 150494 - DNA, 122 bp, Homo sapiens
catgcccagatgttggatggggtaaggcccaaaagtaggtgctaggcaaactgaatagcccgcagcccctggatatgggcagggcacctaggaaagctgaaaaacaagtagttgcatttggc

SEQ ID NO: 150495 - DNA, 122 bp, Homo sapiens
atcctttcaaataaaatctctcctggcagggtgtggtaactcacacctgtaatcttagcacgtcgggaggttgaggtcggaggatcacttgagcccaagagagcaaggctgcagtgagccat

SEQ ID NO: 150496 - DNA, 122 bp, Homo sapiens
caccacaagttgatttgagcaaatccaggcacctctctctgcaagtacaagacgggcctgcgtgtctgcatggaaaatgaagttgtttcaccttccatggcattgttccactcaaagaaaca

SEQ ID NO: 150497 - DNA, 122 bp, Homo sapiens
aatcccacttctcactcccattgggtgccgggtttttagagaagccaatcagcttcgccgcgatcccggcactacgatcccggcactacagtcccggcgcaaccacccgcactcagattctc

SEQ ID NO: 150498 - DNA, 122 bp, Homo sapiens
gcacacgcgcgcactcgcagcctgtctgaagtgcagaggttcaggcggccaagggacccgcgccggtttccgcgggcgacctgcaaatcctgcccggggcccggcaggcgctgcgtcccggc

SEQ ID NO: 150499 - DNA, 122 bp, Homo sapiens
tatgggaagcaggggtgcttgtgaccctaataaattccaagtcctcttccctgccacctccggctcttcttgtgtccaagccctcagacccttccccacctccccctcctttccctttcccg

SEQ ID NO: 150500 - DNA, 122 bp, Homo sapiens
agattcagatgttgtcagcctgttatactcattaaaaaggtccatgacggcgtgggggcacggtggctccacacctgtgatcccaacacttttggggatgctgaggcagaaagatctcttga

SEQ ID NO: 150501 - DNA, 122 bp, Homo sapiens
tgatgtctttaaggaggtggagattccttagattgaatggaaaagcataaaatgcaatgacgaaagagatgagctaaaaatacatgtataagcaatgatatgtcagcatctggacagctacc

SEQ ID NO: 150502 - DNA, 122 bp, Homo sapiens
atttcaaagtcacttcccatttctgagccttttgtttcttcatctgcagcgtaggaacaacggcagttccctcctcagaacagttttggtaagattatgagaaataatgtgagggcacagaa

SEQ ID NO: 150503 - DNA, 122 bp, Homo sapiens
gtggaacggaagtggaatccagggccggttgggggtggggtgtgcctggcacatgcgccgcgggcactgggtggggggcctccgagagtcggaaggaggtggaggagagcgcgacgctccgc

SEQ ID NO: 150504 - DNA, 122 bp, Homo sapiens
gtgaagaatgtgggctgcaggtgaggatgatagagagttctagaggtggatggtagcgctcgttgctcaacagtgtggatgtacttcatgccactgaattgcacacttagaaatggttaata

SEQ ID NO: 150505 - DNA, 122 bp, Homo sapiens
gggtctcacttgcgtggtggcccctggccccatcttgcctgctgcggcctggggagcaggcgctgggtggtggttctgcctgcttgctgctcgttccccgggcatgcgtgggcagcgggggg

SEQ ID NO: 150506 - DNA, 122 bp, Homo sapiens
cgtaggaacacacatcttctggtctggctgtgtttccggaggcatttccagaggacctagcgaggaccaacttccggctgcgacttccgcgtcttccgagtttcgagacctgctgcttccgc

SEQ ID NO: 150507 - DNA, 122 bp, Homo sapiens
ttactactcacagcacagcacagcaggcagcattggtttcatgtttacattgtgatccttcgccctgtaagtttcatggggataatggggagtagttcaaatgggtgtacacgttctctagg

SEQ ID NO: 150508 - DNA, 122 bp, Homo sapiens
tgtatagataatagccaaatgtttgttcaaaaggcattcattctgatgtgctggggggagcggttgggggggcggacctgcaggaatgacttggatgagacggatacatatttacaagccag

SEQ ID NO: 150509 - DNA, 122 bp, Homo sapiens
ctagatgaagctcagagagtgcttgccgggtcagcggccggatgcccagtgcgttgtctacgttgtcagtcagttcagcagtcgccttccttgtcagtcagttcagcgcgtcgccttccttg

SEQ ID NO: 150510 - DNA, 122 bp, Homo sapiens
catgtgaaaaatgggagatggactgagtgaaggaagcctggatgtgtatatgaagtggaacgtgaatgcccacagaaatgaactcatgtctgctcagaggaggtgtctgtgtagttgaatca

SEQ ID NO: 150511 - DNA, 122 bp, Homo sapiens
gccctgtgccaggagcagagcacacggcacattgagagaacaaaagccccatggccagaccgggagagcagggctgcggcgcaagagggccaactgccaggcggccggtgtgtctggctttc

SEQ ID NO: 150512 - DNA, 122 bp, Homo sapiens
gtaagccgggcagtgcacaggcaccgggtatccctgagtcacctcgcacccgacacagctcggctgcacgtgtgttcagtcgcttgtccgcaatggctggccctacacagccggcctcactg

SEQ ID NO: 150513 - DNA, 122 bp, Homo sapiens
tcctgggagccggacttcctctccgcgccccccgactccgagctcctcttaatggagatgcggtgcggaaagttcaatgaaaagccttggctctaaccctgtggacacaccttccgtatctg

SEQ ID NO: 150514 - DNA, 122 bp, Homo sapiens
aaacttgtagcagtttgaagacaaagcaagtaaacactctccttaactgagccagagaggcgacccccacaaccccccactggtgggagtgtctgaagaagtgctgttttctaggaagaaag

SEQ ID NO: 150515 - DNA, 122 bp, Homo sapiens
cggcctgcctgggacctgccgggcactccgccaccctacggtgatgcagcaagagccgcgcggtccctttaagaaacccggctaggcgaggcccttctgtgatcccgtctcctcccttggcc

SEQ ID NO: 150516 - DNA, 122 bp, Homo sapiens
caccagcacccgggccccagagctcagcacagagtgcgccaggggcatcccccggccatgcgggttgatccaggctgttgggcagcccagcttggccagccccagccacatacacagggctg

SEQ ID NO: 150517 - DNA, 122 bp, Homo sapiens
tattggacggcggtccaaccaatcccaaggcatatccgccgcgcgccggagctgaggttgcgcatctttgttcaaagcctttgttttaaacctggagatttttgtgtctgcagcggatctgg

SEQ ID NO: 150518 - DNA, 122 bp, Homo sapiens
actgggagatgaaaagcataggctcgtttgccctgtgtcttccttctcacggcaggggatcggccggccaccttctccctgtgacttcctcccagtcccgtcaccaaacccctgaggccgtc

SEQ ID NO: 150519 - DNA, 122 bp, Homo sapiens
gctggcaaacagaatgtcacttttatactgcaaccccgctctaatcaccctcctcttccccgagcccaacccagagctggaagctagcgccccttgaggcttacctgcagggcaatttcctt

SEQ ID NO: 150520 - DNA, 122 bp, Homo sapiens
cgaggaaaattaaagagtgaaggttcaggaggaatataagattaaaactcttaatgttaacgggcagcatatttaatgtttatgagcatgggatcagaacacctggcctcaacttactattc

SEQ ID NO: 150521 - DNA, 122 bp, Homo sapiens
cgcacctctacaggaactttgccgcggagcagtatgccagtgtgttcgccatctccctgccgtacaccaacccctccaagtgagtggtcgccccaggccctgtgcctcccagccgtggcccc

SEQ ID NO: 150522 - DNA, 122 bp, Homo sapiens
gcctgggtcccggctgcgctccgctcgcccgcgaccccaattcctcgggacttgagaccccgtggtgaagcagcaactgccacgatgacacttgggctggccctgtgttacacgtttcacgt

SEQ ID NO: 150523 - DNA, 122 bp, Homo sapiens
cctaaaggccgattgtgcaatgggaggggcctttcccatatccctgctccctgctctttgcgaaggctacagtgaggagggaaccaccgtgaactaggcacctcccaagtgctgagggcctt

SEQ ID NO: 150524 - DNA, 122 bp, Homo sapiens
aagtctctaggctaggcagtgtttccgagtcccaggtgcctccagaggccgagctcacagcgcggcccacccagcatccgggggcgctgtgaggggcgctcgcccagcagcggaaaggccat

SEQ ID NO: 150525 - DNA, 122 bp, Homo sapiens
attcccatgggttgcaggagggacccggtgggagacaatttgaatcaaggcagtaatatacgccgtactgttctcatgatagtgaataagtctcgtgggatctgatagttttatcaagggtt

SEQ ID NO: 150526 - DNA, 122 bp, Homo sapiens
attgtctttctgtgtctggcttgtttcactcaacacagcgtcctccaggttcaaccatgccgttgcaaatgacaggattttattattttttatggctcaatagtattctattgtaaagacat

SEQ ID NO: 150527 - DNA, 122 bp, Homo sapiens
tgcaagacgcgcatttaaccacagacggcgcaccttcctgcactgcaggggctggggtcccggcctggcagagtaaccagaatgcgagggaaagcccgcctgagaaagaaaccacagaggga

SEQ ID NO: 150528 - DNA, 122 bp, Homo sapiens
tgagtcctcacacgaggcccgccttcctcatagatggcgctttctcactgagtcctcacacgaggcccaccttcctcacagatggcgctttctcactgagtcctcacacgaggcccgccttc

SEQ ID NO: 150529 - DNA, 122 bp, Homo sapiens
gactctggggaaagcctcagcaccttctggaggaggagcgtccttcaacctctccgtcgccgcagagcattctgggaactactcctgtgaggccgacaatggctggggatcccagcgcagtg

SEQ ID NO: 150530 - DNA, 122 bp, Homo sapiens
gctgtggcgacagcgacgattggtccctgcgtgcagagcgcggtgagagtgggtggtggccgttggaattcaaaagtggcgggtgtggcgcggggctggtagcggccggagccgtgcgagtt

SEQ ID NO: 150531 - DNA, 122 bp, Homo sapiens
cttccataggaaaggaagaagaaggaaaccatggctcctttggcactttagaaagaaatccgagcaatccaggggccaaagctcacacaggcaatgagttctcttcacctttgtctggacca

SEQ ID NO: 150532 - DNA, 122 bp, Homo sapiens
acaacgtcttttcctttttcttattttcacaaggggctggggtcaggtttgggctgttgacgcctcgggtcttccctccaggtttggatcctttgagatttttaagtctgcagatgagcaca

SEQ ID NO: 150533 - DNA, 122 bp, Homo sapiens
ggccttgaactgctcggacatgagcggcaacaaagggttggtgaaggtggtggcactgcccgcggggccgcagtctgccgctggggagctcaggacgctactgctcgccgtcgggactgagt

SEQ ID NO: 150534 - DNA, 122 bp, Homo sapiens
caagctgcccgcctggccaaggtgcctcccaggcctgcccggggaggtcgcccaccccctcggaggaaagagtgggtttcagtttgtcctgcactttccacgcaggttgacgggagcctcac

SEQ ID NO: 150535 - DNA, 122 bp, Homo sapiens
agcaatgcagccggcgtggggcatcaggtagagaagcacggagctggcacagggggtccccgctgggtgtggaccccagctgggcctcccagcacgtggttgagctggggaagctgctgggc

SEQ ID NO: 150536 - DNA, 122 bp, Homo sapiens
ttacagcaacagcaaggcccgaattcatctccctctgagctgctggaggcgcgacttcagcgaaggcaggagcgcctcactctctacggatcaggcggctcagagccagcagcggccccggg

SEQ ID NO: 150537 - DNA, 122 bp, Homo sapiens
gaggctcaatcatctctttccctggtcttctgcacacacgggctggcgtgaactcagatgcggcaggcccacaattaggagagagggaggagtagttactcaggcgctcagggccagcaggt

SEQ ID NO: 150538 - DNA, 122 bp, Homo sapiens
gaaaataattatctacacagaaacagcccaaggaattagaatgatagtgatgctcagatccggggaggctgtgtccccctgaaggccctggtcagatcctggtgaagtggatggtgctgcca

SEQ ID NO: 150539 - DNA, 122 bp, Homo sapiens
ttgcgctgaccgccccggctaggcttaaagagcaggcggggcagagacccatacctttggcgctgagtcgaggccaggaaggggcggtcgatgagagggcggccttagcattaggagtgcgt

SEQ ID NO: 150540 - DNA, 122 bp, Homo sapiens
ggctgcctgcgggcgacacagcaaggtccagctgactctggaggcctcctggagcctgctcggcccttccccggcccggcccggcccaaagagaaaaacaacaacagctattgaaacatgaa

SEQ ID NO: 150541 - DNA, 122 bp, Homo sapiens
aacaaagtcgcctttggctgggcctggaaacgccgaccgcagactcctttatccattgtgcgggaatcaatgggcctccgggctccctttcagccgcaggccccgcgctgcggccctgtcag

SEQ ID NO: 150542 - DNA, 122 bp, Homo sapiens
ctgttcccactgccatgcgtttgcccacagtgttcccttggcctgaaatcctttctgctccgcaactgtagttgcctttgggacccacattgcctggttacgcttggccaatgcattgtgtt

SEQ ID NO: 150543 - DNA, 122 bp, Homo sapiens
ctggctgctctggttcctcatctcctctccctagtggtctctgaacagaacagttcagtacgttatgataatgctcagaacatggagggaactgaaaacgttaaaaaagctttgcaatgagc

SEQ ID NO: 150544 - DNA, 122 bp, Homo sapiens
gctggccaagcgctcctaggggaatctccaccctcagaggcttaggaaagggaagtgtgacgagtcagggcccctgggctggtgtcttttccaatactgggctaatgctgggccattccatt

SEQ ID NO: 150545 - DNA, 122 bp, Homo sapiens
tgtgtgtgtgttgggctatgccaaggttgctgattctattctgtgatccagagtgtatgacgaaatcatgttgaacctcatggctcttgaataaaataactacgggaaatttgaagctttta

SEQ ID NO: 150546 - DNA, 122 bp, Homo sapiens
caaagacagcgagttcgccgccattgagaaccttccaggcttcgagctcctgtcagatcgcgagaaggtgctctgcagctctttaaacttgagtccagcccgctacgtgactgtgaagacta

SEQ ID NO: 150547 - DNA, 122 bp, Homo sapiens
caccggtcgttcttggcaaccagtgggtaccgttcaaatccccgccagggcggaaacgtccgcccttatccgttctcttattggtcaggttagacgtccatttctgacgccacagcctatcc

SEQ ID NO: 150548 - DNA, 122 bp, Homo sapiens
cccgaccctgggccccgtaccttcatgctgtcagttctgctcagagtggctgggtgtctgcggccccagactgcaaccgcccagagttatgcgctgggcccccgccagccgccccagccccg

SEQ ID NO: 150549 - DNA, 122 bp, Homo sapiens
gcggagcccagtgaaagtggcgtttccttccggagaggtgggggaacggaagcgcgctcccgggaagcagcccggcaaggcagcatctgaggccagtgcccatgagctacgagagacacagc

SEQ ID NO: 150550 - DNA, 122 bp, Homo sapiens
acctcctcctggtccttaaagaagaattcaggtgcagtattttattacccagctcggcaccgcaggtcctgaggaccccccattcaccccttggtgagatttttggcagcgactgccgccgg

SEQ ID NO: 150551 - DNA, 122 bp, Homo sapiens
gcgagccggagcagacatagtaatgtgcctgcagggcatccccacggcgcaacaggtactcgcccggagcgcagaacgaggtcttgatgtgcagcgatagggcccgcaggcagcccctgctc

SEQ ID NO: 150552 - DNA, 122 bp, Homo sapiens
agacgggctggccccaggatcctctaagtgacaggaacccttggccactgttgattgccccgaggcggggacagggatggtggggctggggctgcctggccctttaagagggcagttctgcc

SEQ ID NO: 150553 - DNA, 122 bp, Homo sapiens
gcactacagcaaagctaggggatcatctttaaattatccaccctttctcttcagccaccccgcagaacaaggggctctgccgctgaaggagctgcaaagacagttcctactggccttgcctt

SEQ ID NO: 150554 - DNA, 122 bp, Homo sapiens
ggcagcccgctgcggccaggtggggtcatggggcagcccactggggtcaggtggaggtcacggggcagcccgctggggtcaggtggggtcacggggcagcccgttggggtcaggtgggtgtc

SEQ ID NO: 150555 - DNA, 122 bp, Homo sapiens
cggagtgcccagaaagcccccggggtggccctgcgcctcctggctctttctggatggaggcgcctccggaaggagccggctgcacgccgtggccttcacctcgcagcctctgctgaccacac

SEQ ID NO: 150556 - DNA, 122 bp, Homo sapiens
gccgcgcccgctcgtagttgagcacgctgaacagtgccttcaccctcgaggtgagacgctcggcctggcggggacagcatgggagacagtcaggaaagtggatccggccaagtgcccacccc

SEQ ID NO: 150557 - DNA, 122 bp, Homo sapiens
ctcgccagtctgaaaggcaggagcagcttcccccaggtccgtcctcctcaccggaatctccggggcagttttcatacgttttgaacagtcctaagtcagaacccgcagggctgggtccagga

SEQ ID NO: 150558 - DNA, 122 bp, Homo sapiens
cctgctgtggctgagttgccacttcttactactcaagtgtcaccaggagaggtcacatgccgtgctctgagttactttctgtgctgtgaggggttttagacttgtggctctaccatgggtct

SEQ ID NO: 150559 - DNA, 122 bp, Homo sapiens
ataagtgcgtggccagcaacgcaacccgggcggacagcgtgtccatccgcctacacgtggcggcactgccccccattatccaccaggagaagctgtagaacatctcgctgcccccggggctc

SEQ ID NO: 150560 - DNA, 122 bp, Homo sapiens
cgtttgagatgggtgtctgtcccttgcagggacggcaggctcagggggctccgagaatggcgtacctgggggactgtgggaatcctgcccaagagcctcctcctccactggggacccaggga

SEQ ID NO: 150561 - DNA, 122 bp, Homo sapiens
acacaggctcacgcacacacattttctctgagctgttgggttatgtctcctgcactttctcgtgtatttttgaccttgctttttccagactcttagatcttcctacgactggcatattcgct

SEQ ID NO: 150562 - DNA, 122 bp, Homo sapiens
cccatcagtaatgtccctctcaggtcccttcccccacccacctggagtagccttaccttgcgagagaagggtagccagtaccaggccagagagaaacgtgctatgttccatctcccagcgga

SEQ ID NO: 150563 - DNA, 122 bp, Homo sapiens
ccgctggaagaaacgcgctgttctccccaaccaccgtttatcattcttattcaccgtctccggaatgtccattcagtttccgctcctgagagacttagtgactgaggccaggcaaagatttc

SEQ ID NO: 150564 - DNA, 122 bp, Homo sapiens
agatgctttgctttgtcctcctgtgccaggctcctccccacatcctctggatcagctccacgtgcctagattcagactccgtgattcaccgtgggggcccttaataggcattcagtctgaaa

SEQ ID NO: 150565 - DNA, 122 bp, Homo sapiens
tctcgccactttcaaacaaacctgggggaagattgagcccgggggggattccagcctgctcgctcggctcgcggtcgccctgcctcggcctttcaccattagctctccctgggccgcgagga

SEQ ID NO: 150566 - DNA, 122 bp, Homo sapiens
gagattgtggaggcctgcactgcccgcctctctggacctcagctggttttatttccatgccgtggcagggggcaagcagacgctgtttttccttccccctcaccgcagctaggactccacat

SEQ ID NO: 150567 - DNA, 122 bp, Homo sapiens
cctcttcaccccctctctgtgatgtcgaatcccatttcacagatggagaaactgaggaatcgagcaagtgaatgccgcttaaacatcttttccaagccagccagggaccagcccctccagtt

SEQ ID NO: 150568 - DNA, 122 bp, Homo sapiens
tctccatctcctgacttcgtgatctgcccaccttggcctcccaaagtgctggattacaggcgtgagccaccagtgcgccgggcctaatttttgtatttttaatagaggcgcggtttcatcat

SEQ ID NO: 150569 - DNA, 122 bp, Homo sapiens
ctcagtacaacatctgcgagcagatgatccagatccgcgaggaccacatgcgcttcatttcggagctggcgcgctacagcaacagcgaggtgcgccccgcgacctggagctgcacaggcacc

SEQ ID NO: 150570 - DNA, 122 bp, Homo sapiens
tgagatttggtggactgagtgaaggtggctgccctccccagcgtgggtgagcttcatccacgggaggctgcttagagaaggaggctgagcaggaaagtcttctttctccgcctgaccgtgct

SEQ ID NO: 150571 - DNA, 122 bp, Homo sapiens
aggcaaatataatattaaagtgtgctaagatttttcctgagacatactttttttccctttcgatgctcttgatataatctgttattttaaaaattgcattttcccaaacacctttatttcaa

SEQ ID NO: 150572 - DNA, 122 bp, Homo sapiens
acggacgttttgtttataaacaaggaagagctcaaacatctggtcctccctttgtggctgcggacactgtgcaggtatgagccctttggcctgcctggtccatgcagcgtaaataccaggag

SEQ ID NO: 150573 - DNA, 122 bp, Homo sapiens
ttctgcgctggggggctgagaaatgcatcccattttcaaaagaagatgtccttgctttctcgtggtttctctcacccacgcagttcaacacacagaaaaccttctctgtggctttcacaggg

SEQ ID NO: 150574 - DNA, 122 bp, Homo sapiens
cggtgaggaccgcgcccgcgccacgcgcgccgaaaggactccgcgagctcctgcaggtaacgggctcggtgcagtccggagcccagaccaggcagttgctgagttatgtccgggcgagatcg

SEQ ID NO: 150575 - DNA, 122 bp, Homo sapiens
ccttcctctgaagatggcaggtgctctgacttacccaagttgggggtgctctgctgtggccgaaggtgccgaagtgtgagcggcttgtgtgagaagtgtgcaaaggtgctcttagccaccag

SEQ ID NO: 150576 - DNA, 122 bp, Homo sapiens
ttgtttttaatcgtcatggtttgcagatttaattagacacaggcgtgcaagcatcatctccggatctgatgacaaaggcacccacctagggatgcccacccaggcctgcttcttcctttagg

SEQ ID NO: 150577 - DNA, 122 bp, Homo sapiens
tcctgttaaaaagaggattctatcttcgaacttgacattctgtcatggtaacctttcttccggcagatgggatttcaaacgtgagcaccttggctagtgctaaatatatggtcctggatgat

SEQ ID NO: 150578 - DNA, 122 bp, Homo sapiens
caagagagaggctgcgtgagaccccgggacctggcagggaccccccgcctggcccctgcccggtccctcaccaggtgatgccgttgatgacagtggactgctcggccaggatgaacttgtaa

SEQ ID NO: 150579 - DNA, 122 bp, Homo sapiens
tagcataatgttatcaaagttcatattacagtatctgttagaacaaagcagttaatttcacgtggtcaaaggaaggtcagggaagttttccttgatgatccttactgcttttaagtaccaga

SEQ ID NO: 150580 - DNA, 122 bp, Homo sapiens
ccaggcattgttggagccttcaaggaagcagcaagaacacagaggtgcaccccagctaagcggacacgaccgcattcagggacaccccagctaagcggacacgaccgcattcagggacaccc

SEQ ID NO: 150581 - DNA, 122 bp, Homo sapiens
tgtatagttaacgagtactagttaagttaccagagagctttgtggaaatggattttccttcgtgacgtctatgctgtagcttcagttgttggcattaataacaaatattttcatgggaagac

SEQ ID NO: 150582 - DNA, 122 bp, Homo sapiens
aaatacgtagggcaaccaggccagaaggcgttgtaactgcctaagattgaccaaccctaacgcgggaggcgggacgacggtcactgatttgccagcgtgacgccggtctgcgactggccagt

SEQ ID NO: 150583 - DNA, 122 bp, Homo sapiens
tgctagtggctgttggcatttcttggcttctctggcttccacgtggctccagtttgtctccgccttatattcacatcaccttctccagtgtgtgtgtatctcaaatctccctctgtttttat

SEQ ID NO: 150584 - DNA, 122 bp, Homo sapiens
cggccagttcacctactgctggcacgatgacatcatgcaaggtacggcctggcgcctacccgctcctgctgccccaggcctcagggcacggctcccatccagtcctgctaccccacgccctg

SEQ ID NO: 150585 - DNA, 122 bp, Homo sapiens
cggcacacgtcggaagttattcacaactggacaggaaacccgcctctcaggctgtggccacgcctccgccgccgtgaggcccaggaagccgagggaacgctgtggctgaaagggacctgggt

SEQ ID NO: 150586 - DNA, 122 bp, Homo sapiens
agtgggccagcagtcgggccagagtccagctcagcaactccgggttacaggcagcccaggcgggcctagccaccggcagctgcactcagaggccactgtgtcctggctgagctcatctgcct

SEQ ID NO: 150587 - DNA, 122 bp, Homo sapiens
attgtgcagtaattggttaggactctgagcgccgctgttcaccaatcggggagagaaaagcggagatcctgctcgccttgcacgcgcctgaagcacaaagcagatagctaggaatgaaccat

SEQ ID NO: 150588 - DNA, 122 bp, Homo sapiens
ttttttacagacttctaccctggcccagctagagaactgtaaacaactctgccctctccacggctcattttgtgggaaagagaacccaggctcaggaactgcatgacctgctaaaagcccca

SEQ ID NO: 150589 - DNA, 122 bp, Homo sapiens
ccggctcctctggaaaacttgtccacacaaaaggcattcctcagcttccaccccgaaaggcgagccctgggtgtagggttaccagcggcgcgcggagcccgccgagaacgtggtgcgccccc

SEQ ID NO: 150590 - DNA, 122 bp, Homo sapiens
tgccgcccaccctgtgtgtgtggagtccctttgtgtgcactgtgccgcggcctcggtctccgctgcccactgctggctctcatgctgctgctatgccaacggttcgaaggtgatggtggccg

SEQ ID NO: 150591 - DNA, 122 bp, Homo sapiens
gctattttcagttttggatagtatgttttgacatacactctgtttcctctttgagacacccgctctagagccctctattccactccaagccgcctggatgctctcttggcctgcttacagat

SEQ ID NO: 150592 - DNA, 122 bp, Homo sapiens
cccatactctgctccattgcccgcgccccaccctacgcccaaagcacccctctgacccgccgctgccaccccgcactctggcccccgccgtaccccggtcctgcagcgccccctcgcgttct

SEQ ID NO: 150593 - DNA, 122 bp, Homo sapiens
tcggcggccacctcccctagctcttgctgctaaccatgcttcccggacacctgctgccttcgtaggtcagggtctcacctcctcgggccaattctgaccaaacagcaccctgtggggttgcc

SEQ ID NO: 150594 - DNA, 122 bp, Homo sapiens
agaggacggtgagggcggcggcggcggccccgcggggcccggctccgcctcagcccccgacgcctgctccccagctgcggcaggcccgagtgaggccatcctccagctgcgcggttgcccac

SEQ ID NO: 150595 - DNA, 122 bp, Homo sapiens
gcagccagcttattgtaagacaccacaggcaaagtgcactttatcagattagactggggccggtatcaaatatacatgagaataaggatgcatttgtgagttagactagacttttcttccct

SEQ ID NO: 150596 - DNA, 122 bp, Homo sapiens
caaatcgcttgagcccaggagttcgagacaactgggcaatatggcaaaaccgcttcactacgaaaaaaatacaaaaattagctgggcatagtgatgtgcgcctgtagtctaagctactggag

SEQ ID NO: 150597 - DNA, 122 bp, Homo sapiens
ccgagcctcccgcccggaccgcgccagcgacaggctcccgggcgccgccgaccctctgcgcgcctcagcagtccccgtcggcgccgcctccgccacccgcttgccagctccgcgcccgcccc

SEQ ID NO: 150598 - DNA, 122 bp, Homo sapiens
agaagggaaccgggatgccatgttctaacgcccgtgtgtttccacacatggccaggagttcgggcagggctgggctgtgagcaggcaggactgccctcccgaagcaggtgcagaacgagcat

SEQ ID NO: 150599 - DNA, 122 bp, Homo sapiens
tacctcctgacaactgcatggagtaaaccacaccgccttgttaaatgccgtcgccgccgccgccgtcttcgtcaccgtcacagtcgccgccgccatctttgttgtgtctccgactcccttcc

SEQ ID NO: 150600 - DNA, 122 bp, Homo sapiens
tgttgctaagttacacctctgacttcgtcttagatacagtggggcatgaattccacccctcgacttcaaaaagacacagacatctgcttcttcatttttctatattttcctgggggatgtct

SEQ ID NO: 150601 - DNA, 122 bp, Homo sapiens
caatcatagtaatgccaaaattcctcacagtttttcaaaatatcccattggtgcacagtacggccctgcatccactgagaacccttctctcctgtgatctgccactgcctcgctgttccaac

SEQ ID NO: 150602 - DNA, 122 bp, Homo sapiens
tgaggccgtgggagtagtgggcaggccagatggggcctcccttagccatgggaggttggtcgtccgcgctctaccctgttgtgtgcgcggtcccgtttgcccccttcctaagctggccactg

SEQ ID NO: 150603 - DNA, 122 bp, Homo sapiens
ggcgggcaccggtgtggccagcagcttgttctgtgtaactggggcctgcaatctgctccccgtggtccccctgggacggcgcttccagctgggggggctgttggctcctcagtgacttctgc

SEQ ID NO: 150604 - DNA, 122 bp, Homo sapiens
gggtctgcacatttacaccttatgcgacgtgtccaaattgaccgggatccaccaagctatcggcagttagaagtctctctcttccagtgagcagttttctgcatgtttgcccaggtctccct

SEQ ID NO: 150605 - DNA, 122 bp, Homo sapiens
cggtgtattgtatcctcacgtttccggagattgacgttgctcttgtgttctcgcgagaggcgggaaagggcgcagggtttgaaacatggcggacgacgtagaccaggtaagtgtattttaag

SEQ ID NO: 150606 - DNA, 122 bp, Homo sapiens
ttttgctgcggaagtcacctcgtggcgtaggggagaggtaacaccgagaagaggcagcggcggtggcgccaagacgattggtgccaaacagggcagaacgcaactcagctctggggtgggtt

SEQ ID NO: 150607 - DNA, 122 bp, Homo sapiens
gggcgtccacgtgtctttgtgccctgcttgaccccgtgctgggaccttctacgagagccacggtgacacgtacagcagatttccgggacacggcagttgtgaaaataaaagaacgaaagaat

SEQ ID NO: 150608 - DNA, 122 bp, Homo sapiens
ctatactatacccatttgagagtcgaggaaactgagtcacaaaggtgacttgaccaaggtcgtggagctaaaaaccgaggaggagaaactgaaacccaaggcgaccaaacaccaaacccaaa

SEQ ID NO: 150609 - DNA, 122 bp, Homo sapiens
ctaatgtatttattttttaaacatgtttgtactttttgcaaaagaatgtagaagtggcttcgtttgatgataagttctacccgttggtgtatctttttaaccttggttcacatgatttctat

SEQ ID NO: 150610 - DNA, 122 bp, Homo sapiens
ctaatgaagtgttactgtactttgacaagtttgcaggcgtctgtcttccaagccagctgacgtaattcagaggagaataagaccctcccacttgcgtttgttaattgactttgatgagctcc

SEQ ID NO: 150611 - DNA, 122 bp, Homo sapiens
gaaacacacacagtcacaactattatttgaaaaatgttacctctcagtgtgcttttttcacgctaccaatacaattccgcaaggtataagtgttgctagggtatgtgaaatggaaatgaaag

SEQ ID NO: 150612 - DNA, 122 bp, Homo sapiens
tcatgatccatcccaaatcccaagagccatcagcactctcatagctagagtatgctggcgcgccacaccaagagagcagggagttctacagaaggctacgttcagcctcaaggctgggaaac

SEQ ID NO: 150613 - DNA, 122 bp, Homo sapiens
ccagaggaggaactgcagttaccactataacaccacagacaaactttggggtggggggagcgggagtcctcaggaagcagaaagctggaatcagggaaagcataaaattaaacctaccagag

SEQ ID NO: 150614 - DNA, 122 bp, Homo sapiens
cctccttacttgctccagggcaagtatcacacgtggacattactgcttccggtactgtttcgtgcattttgtttggtgcattttgtccgtctccctggcacctggtgggtggtgaatcagca

SEQ ID NO: 150615 - DNA, 122 bp, Homo sapiens
gcaggagctcccagaatattgaagctcttctctttgcagcaactgaggtctaagtcctaccgacgttagagggatagacgaattgacctttccaggtcctctgctcgccaccagcctacgga

SEQ ID NO: 150616 - DNA, 122 bp, Homo sapiens
catgtcctcaggctgctccatcgcccaccgcaccccccaccccaaattagtcaatccctgcgcgattcacgcctcctccggagcgactggagccctgggctctcccccaactccagagcctg

SEQ ID NO: 150617 - DNA, 122 bp, Homo sapiens
ctggggtcctgcatgaataaaaattacagtgctctgtgtgatctccgttggctctgcctacggccactgcttgggcgtgcagattgtgccgtcataatggaagctgagctttgaagaagtca

SEQ ID NO: 150618 - DNA, 122 bp, Homo sapiens
ccacccttatcccttcattcctaaaggaaatgcctgggaaatcaacagttgctgttaaaacgaagccaaaagccaaggcacagtgaaagagaattaaattttaaaagtaattagtgaggatg

SEQ ID NO: 150619 - DNA, 122 bp, Homo sapiens
ggggtttgggctgtgttggtggcaattctggagcttccctcggccctgggaagtggctaccggcagctcctgcggacctggagggggctgcggttgcgctttgtcggtgtggcagctcggac

SEQ ID NO: 150620 - DNA, 122 bp, Homo sapiens
tccacctgactcttgtctagttttgtgacgtatatcacttgttctcatgttttctaaatccgcaattcagacctattccaaaatgcgtttcctcatgggtctggtttgttgtctgtttctcc

SEQ ID NO: 150621 - DNA, 122 bp, Homo sapiens
atcgagcacttcatctgtattggcttagttatccacacaacaaccctaaaaagcaggctgcgactttatcatcttcatcatcatccccatggggacagaggcagagtggatggtggcctggt

SEQ ID NO: 150622 - DNA, 122 bp, Homo sapiens
gcaagtttgtctctgccgtagaggtgattgccatcctggcagccagctttggcttgctggcgtgcatcttcttcaacaagatctacatcattctcttcaagccatcccgcaacaccatcgag

SEQ ID NO: 150623 - DNA, 122 bp, Homo sapiens
aaattaaactctgcaattgtaataaattactcttattgtaccctctatcaaacaacctggcgttactagtacatggtattcccagtacttgaacatatgtgactttctgggtgactgagcat

SEQ ID NO: 150624 - DNA, 122 bp, Homo sapiens
gggcctagggcaggagctagagtgtgaaactggacctgacgcccccagatgctcctcccccgccttgcaggctccgcgaccacccacggttaaagaagcagctgctagagcaacccctcacc

SEQ ID NO: 150625 - DNA, 122 bp, Homo sapiens
ggaatggttggcgggaggtggctgggaggtgtctggagggatctctggagccatcggcatcgcgccacctccaggcccagttgggtgatagccggctgagcccggatgtggggcacctggtg

SEQ ID NO: 150626 - DNA, 122 bp, Homo sapiens
cccagttgccaagacgacggcttccgggtgggcggcttgaggtggcttccggccgccaggcgagactccgcgggaaaactccctgctagagagactaggagatttggggctgcggccgtttc

SEQ ID NO: 150627 - DNA, 122 bp, Homo sapiens
cagtaactgggaggaaacatctgtactccaggatttagagacaccgacacgggagcagggcgcccccgtgtgcacagagccctgttctgcagctggaaaccgaacgggaccctgtggaagtc

SEQ ID NO: 150628 - DNA, 122 bp, Homo sapiens
taagaaaatcatttcacgttcaatcccaatgcagaactacagacctgtcattaaaagtgccgcagctgtggactcagaacaattgtgtttgctcctcgcgcccattattagcattccaatcg

SEQ ID NO: 150629 - DNA, 122 bp, Homo sapiens
atctgcaaacactggtattcaaacagacccattcacacgtcaaatacacactgccagactcgcgggcctctacacgcaggcaaacacacaccgacacagaatttcacagtttaggaaacagc

SEQ ID NO: 150630 - DNA, 122 bp, Homo sapiens
acctcgtgatttgcctgccttggcctcccaaagtgctggaattacaggcgtgagccaccgcgtccagccccattgtacctccatgagagcctagtcttgcttttaggcagcaactaaactaa

SEQ ID NO: 150631 - DNA, 122 bp, Homo sapiens
tgttgccttcgttggactttcctaggccaagcccagcattcggtgcttcattaaacccaccgagacactcgagcggtcccttgagatgaacaagcacaagggcaagaggcgggtgcaaaaga

SEQ ID NO: 150632 - DNA, 122 bp, Homo sapiens
ccaggacgcatggctgtgacacacttgggcacccctccgtgtgaggtcctgatggaggtgcgccgaggctgggctggcctcctgtgcaggaatagaggccgttgggccttgtcccagccggt

SEQ ID NO: 150633 - DNA, 122 bp, Homo sapiens
actcccctggggcacagcctgagccttgtggttcaaacatcagggaacccgggcccggcccgtcggattttcttagcgcctcggcctttccccgggggtttggggagcaggggttgggcgtg

SEQ ID NO: 150634 - DNA, 122 bp, Homo sapiens
ggaaatgagaaggaacccagcatgtgtggctcagccccttctgtgttcccctcctgcaagcgattgacccttgaggtgagtctgttcagtgataagcagcttgcccctccctatagtggaag

SEQ ID NO: 150635 - DNA, 122 bp, Homo sapiens
cagctccaggcgccacagcatccagggaggcagctgtgacggcgggcccggtgtggttggcggcacggggtgccgtgctccgtcaggcctcccaggaaagaggctgtggtagggcaacgagg

SEQ ID NO: 150636 - DNA, 122 bp, Homo sapiens
tctcttagcaactaagcccccggctcctccagaagcccctcttcgcacatgcgcaaactgcggacggggaactgggctccctagccctggcgtttttggtgttgctgtcccagccagaatcg

SEQ ID NO: 150637 - DNA, 122 bp, Homo sapiens
gtgtagtctttgagacggtggcaggaggggctggcggcagtgtcgccaaggactgattgtcgcgtgcctcgcctcctcggacacgctcccggggcctggcgcggcggcgaaactgaccccgg

SEQ ID NO: 150638 - DNA, 122 bp, Homo sapiens
cgcggctcctagcgccaccatcttggaccccgcgcctgggccaggcgagaacttccggtgcgctccccgggactgcggtcccccagtccgcgccccgcccagccgtcccccgtcggctccag

SEQ ID NO: 150639 - DNA, 122 bp, Homo sapiens
aggcggagaccaaggcagagacctgctctcccacttctcctccccaccacccccctgcctcggcacagcctgggtcgacactgagcactcacaccacaaaacatgcagccctgggctcaaat

SEQ ID NO: 150640 - DNA, 122 bp, Homo sapiens
cactattcccggccgggtgggtccagcagccgcgggcttcgccccgccgggactcgcggccgcgcctcctctgtaccacagctcccaaggtccccccacggacacacccggccccgagggtc

SEQ ID NO: 150641 - DNA, 122 bp, Homo sapiens
acccaccccaagaagccctgtcccgccatcagtctctctcctcgggatgagcagggagagcgcgcggaggttcccgactccctcgactacaaccaagaaagaataattttcaaagtgttcaa

SEQ ID NO: 150642 - DNA, 122 bp, Homo sapiens
ggggaaggcaggggccggtacgtgacgcggggcatgcacgtggcctgggagtgtgcttttcgggacaggtgcgggggccgccgcgcgcgcaaaggcgcagacgcacgcgtgcgggcaccggg

SEQ ID NO: 150643 - DNA, 122 bp, Homo sapiens
tactggagcccgagatgacagatctgactcaccaggagggttggagtctttcgcaacgtacgtaaccccttccacctcttgttaggcagctccttgtcctgcctgaggctccagccacaagt

SEQ ID NO: 150644 - DNA, 122 bp, Homo sapiens
tgacacgcttgcagccccagctccccgagaggctggcctctccctgggctgaggcatggacgcgcccaaaggcaccccaggtcagtgaccccatgcccaggggctcaccaattccaaggtgc

SEQ ID NO: 150645 - DNA, 122 bp, Homo sapiens
attatttactagttatcaaaatatgcaaactgctgattaaggaaggctgggtagcaggagcgcctgcgaaggcgtagggtagaagtgtgaaaagaaatcccagctctcccagggagactgcg

SEQ ID NO: 150646 - DNA, 122 bp, Homo sapiens
caaaccttcacctatcccaattctcagcctattctcaagagagtaagactgttagtatatcgttaatcagggtgttttaagagatgggctaagacggagaagcgcatttgggacactatagt

SEQ ID NO: 150647 - DNA, 122 bp, Homo sapiens
actagctagctgtcaagactgttaccaagactgttctcaacaagctgacctggttaccagcgtcagtagaactttgtcttattaggaagctcaggtgattatgctctcatttaaaacagaac

SEQ ID NO: 150648 - DNA, 122 bp, Homo sapiens
ctgctaccaagtaggtactggatgcacggcaggccctgccactgcttctcagaaccctctcgggttcctaggcctcttgaaccacaattgataggaatgggacctgccgggagctttctgga

SEQ ID NO: 150649 - DNA, 122 bp, Homo sapiens
aatggagtttttgctctggcaagaatggattagttcccaagatagcaggttgttaaaatacgagagagaggtgcatggccaccggctttcagcccattgtccttgttctttggcttgcaaat

SEQ ID NO: 150650 - DNA, 122 bp, Homo sapiens
caggataggcattcatttctctgttatggaaatgaaatctgagggtacttatttcaggtgcggatgccactgcatggtgtcagagactaaggctcctttggtctggctgctccaccaccctc

SEQ ID NO: 150651 - DNA, 122 bp, Homo sapiens
acctgtcaacaggtgggacccaatagccaagcaaatggtcctgcaaactgtactacccaacgttcacagcaaggattccaacttctcaccagggcatggaaaatttgccttcatgtcaacca

SEQ ID NO: 150652 - DNA, 122 bp, Homo sapiens
tcttgccttgtggagtaaagtatttgttcaataaacaaataggaaggccattttctgctgcgatcaaaaactgttttaagcttctttggagaaatatatatcaggctgtggttgaatcttgg

SEQ ID NO: 150653 - DNA, 122 bp, Homo sapiens
agtggaagagcacagggcgtggagcctggaactggagctgtgtcttggctccatcaccatcgacgtggggtcaggcagatgactaaactaacgtgagcctctgcatgcccaacttcgaaaag

SEQ ID NO: 150654 - DNA, 122 bp, Homo sapiens
aaggctggcgaggaggctgggggcggacgcagggaggaaagaagcaatggggtgctcttgcgttttgacattttaaaaagaagtttagattcgcttcccggagccgggatggcagcctgcgc

SEQ ID NO: 150655 - DNA, 122 bp, Homo sapiens
aactttgctataaactgttttcttctgcccagaacacaacccaggcccaaggaacccagacgcgttccttgtatctcagtttgaaagcctcttcctccaggaagccttctctgacttccacc

SEQ ID NO: 150656 - DNA, 122 bp, Homo sapiens
ctctcggcccggccggaagaagccacctcccccgcacgcgtttagccggcccccgcgattcggcctaatgcgacgattggctatggctccaaatcccgcccttccgattcctgtctctaggt

SEQ ID NO: 150657 - DNA, 122 bp, Homo sapiens
gtgggtggagggagctggatgcaggctcagctctgttcctccgtgggccccctcgtgggtcgaggtcccgtgtggctaagtctccttgtcttttgcatgctcggcgccgcccagaggcagag

SEQ ID NO: 150658 - DNA, 122 bp, Homo sapiens
agcccaactcaggcctccagccgccacccaggccccagcacagcaactccctcgcggcagcgacctggtgagcccggctccgtcagccgctctgtcagccgctccggcacttccggcaggcc

SEQ ID NO: 150659 - DNA, 122 bp, Homo sapiens
cactgtagcgtcactgtgacatcgccgaaggccggcgctattacgtcgccggaaggcccgcgcctgtgacgtcagcggaggcgcgccccttctgtagaaccaatcggaactcgaggcgcggc

SEQ ID NO: 150660 - DNA, 122 bp, Homo sapiens
aacaaagaagatgattataaaagtctgagcagacaagttggaaaacttcctggtagtggacgaaggcagctgaagcttgtttttcagcatattactgaggatttttagtaagaatgcatctt

SEQ ID NO: 150661 - DNA, 122 bp, Homo sapiens
ggctgcaagcaggaagggaaggacggggttaatgtgagccctcccccaggtcctgtcacacgaactcttttctaactgggagaaaccaagtcaccagaatgggaagttcctaagtaggaaca

SEQ ID NO: 150662 - DNA, 122 bp, Homo sapiens
atccagaaatgagcttctggaacaaatcctaaatccttttttgtctgtcttcttctgattcgctctcatccttaagggacctgtttctccttcaaaacctgaaaacatctaacctatagtac

SEQ ID NO: 150663 - DNA, 122 bp, Homo sapiens
tggctcctggcagcggtcgatggggcacctggccacgtttcttcccaaccagatagcgagcgtttggggccttcacctcgcccctccaagccctcagggacaggctccacgctgctccttct

SEQ ID NO: 150664 - DNA, 122 bp, Homo sapiens
gccgcgccgatggggaggcagcgggtctgcggccgccgagatgggaagtgggccctggagcgggcttgccgagcctacgaccggggctgggatgttggaggaagacgcggtcatgagggctg

SEQ ID NO: 150665 - DNA, 122 bp, Homo sapiens
aatcagatcttattcctgtttctccatactaggcataattattttcaaagctatacaatacgaagtttatcagtcttatctgtttgccataacatcattatgaattttctcttttaaaaatg

SEQ ID NO: 150666 - DNA, 122 bp, Homo sapiens
aaaactggaggataaaactccacagctagagagcttggctgaggtctcaaagagacgggccgaaacccaggcaagagaaggatcgtggcctgagcttaggtccgcacgctgcccacgtttct

SEQ ID NO: 150667 - DNA, 122 bp, Homo sapiens
cacatgttgtttggtgactgattttgactctcaggaggaagtggggttgctgttacaccacggaggcaagaggagcagtaatagaacacaggagatctcctgaggcacctcatcactctcat

SEQ ID NO: 150668 - DNA, 122 bp, Homo sapiens
ggacagctggtcccagggactttgcacttgtggtggaggctgaattcgtcattcccaatccggatgctatgcaatcatcgtcaagtactccaatccatctgcatgtctgaatatggatgggg

SEQ ID NO: 150669 - DNA, 122 bp, Homo sapiens
gaacacggcgggcggcagcagagctatccgagtctcgagcccactgcgacaccgagcagacgtgcaatgataataacagcagcatccacagtgtaccgcttactgcatccccggcgttgtgt

SEQ ID NO: 150670 - DNA, 122 bp, Homo sapiens
taagaaacctgtcttgaaaagagcatttttattaaaagctaaaagccttcaagtcctccacgtttttctccactacgaagtattagaatagagagaataagctatcgttcatttattcaaca

SEQ ID NO: 150671 - DNA, 122 bp, Homo sapiens
agccacagttccatcacctgcgtgatgggacgagagactggatcaggtgttctccacagccggttatgaagtgagtaacctgagttcataaatgagcagttgggcgggctcctcttccaggc

SEQ ID NO: 150672 - DNA, 122 bp, Homo sapiens
tggagcgtatcaacgtgtactacaataagtccaggggtgagaccccagtccttccccaaccgccctcctgggaattgcggccctcccctcgctaatgccctcccgtcccactcaggtggcag

SEQ ID NO: 150673 - DNA, 122 bp, Homo sapiens
agacctgcctccaaaagctctgaagcaatggcgatgcgtgtgccgtgtggtctttctgaccgacttgcggcgccatccccctccccttccatctatctgctcatcttctaatagttaattag

SEQ ID NO: 150674 - DNA, 122 bp, Homo sapiens
aggcagtggccggggttgcaggaaggctctgatccttgtcccgtcctgcaggcctgttctcggtggatgactgtggaaagggcagaatgctcctagcttggcgtatcttggcatcaaggaga

SEQ ID NO: 150675 - DNA, 122 bp, Homo sapiens
gaggccctcccaggggcagtgggcaccagcggcctccgcatgtcccagggccacaggcagcgtttcctggtaggacgtcatgttgatgggcgacttcaatgcgggctgcagctatgtgagac

SEQ ID NO: 150676 - DNA, 122 bp, Homo sapiens
ggcttgtacgcaggggtcctggcggagggcgcagggtcggaagcttggggaactcaagatcggttgggttgaggaggggatcctagagcaggacatcaggcggttgtacatttggtctagcg

SEQ ID NO: 150677 - DNA, 122 bp, Homo sapiens
gagtttaatttcagctgtaattacctttcctggtgaagtgagccctgtaacaaatggagccgccgccgcaacaaggagcgctgggaggagaataaaagaggtcgcccccctttgcaggacca

SEQ ID NO: 150678 - DNA, 122 bp, Homo sapiens
cattgtgattttgtaacggctccattgtctggggtatataccctggttctttgtcatggccgagaaaattcacgacacagacacacgtgaggagtgggtttgggagtggaaagtttaataga

SEQ ID NO: 150679 - DNA, 122 bp, Homo sapiens
tgagagacaggaggctcaagctatgtcagcaaattccatccttcaaagcagaaggagggacggccttgtgtgtgtgactctgtgggttgtctctgcaggaccagggaccctgcccatgtgga

SEQ ID NO: 150680 - DNA, 122 bp, Homo sapiens
caagaaaataaaagcataaatgttgctagttatagtagcaccagagggaatgtgtggtcccgcacaaaattgtgcttcctcaattctgaattggcacacttgacttagaataaatgtattca

SEQ ID NO: 150681 - DNA, 122 bp, Homo sapiens
aacctttgaaaacagtgaatttcaggggagtcctcatgggtttgtttttgccccatatatcgtagtgatgggaaagctaggtgataagttgaaacattgacttcttcccttgtgcctacctg

SEQ ID NO: 150682 - DNA, 122 bp, Homo sapiens
cacatccagggcacactggtgcaaggaatgggctcccaaggccttgggcagctccaaccccgtggcgttgcagagttcagcctctgctgctgctctcaagaactgatgttgagtgcctgcag

SEQ ID NO: 150683 - DNA, 122 bp, Homo sapiens
atcaagaactggaggaacctgatcgcggtgctgggtgggtaccactctcccctgtccgaccgcggtgctgggtgggtgccactcttccctgtccgaccgcggtgctgggtgggtgccactct

SEQ ID NO: 150684 - DNA, 122 bp, Homo sapiens
ggctgggtcgaggtcacatcgcatcaggatgtggttctcccacaccagctcgacccccgacgctattcaccttcacctccaggatatggcgctgcctccagcagaattcggccccctccgtg

SEQ ID NO: 150685 - DNA, 122 bp, Homo sapiens
gcgcacacacggcggccgccactgactggggcccccaggcctgggtgggcaggtctctgtcgccgtccccggagccggagagggtgcaggccccagggccacacggtccgcagttccgcggt

SEQ ID NO: 150686 - DNA, 122 bp, Homo sapiens
acaaaagcggaggtttattgaaaacaaaagtatactgcacagggtgggagctggccccagcgagtggctcaagggcctggttatagaattttctatggtttaaatatcctctagaggtttct

SEQ ID NO: 150687 - DNA, 122 bp, Homo sapiens
accatcttctccagctttttggcgatcctcagcagctcctcttcctggcccatgttggcccgcgacgcccggcggggcgaggggcacaggggcagcagtagggcctcgggggcaggaggcgc

SEQ ID NO: 150688 - DNA, 122 bp, Homo sapiens
gaaaatttggtagatttcctgttattgattctggttttgtggcaggccaggtctcactaacgcaggcttccataacaactgtttcagtactgagcggttaagtgaaatattaaagactgaaa

SEQ ID NO: 150689 - DNA, 122 bp, Homo sapiens
tcaaggaaagtgtcgcaaagatgggcatcgcatccagggctgagattgaggactggttcacggcagagaccctgggagtgtctgggtgagagcagcccccaggctgagaggacacgagcatc

SEQ ID NO: 150690 - DNA, 122 bp, Homo sapiens
ttcaggcttggagctcacgccaccggctctcctgggcgcctgccagccgacggccaatctcggtaccctcagcccccgtaaccgggtgagtcaattccttagatgaactttcacagctaagc

SEQ ID NO: 150691 - DNA, 122 bp, Homo sapiens
ttcctgcaccctccccttaagtggcttccagtaagctaccaaaccctggtggcgcctgcacgccccagggcaagccagcctgaccttctcctcagagcctgagtcagggctttccccatctc

SEQ ID NO: 150692 - DNA, 122 bp, Homo sapiens
gcccagatgcatgataaaaattaaagtgatattaatctatttgatgcaatgaatgtctatcgaacacctacccagttcaactgcacagagcttggtgctgtggaaaaaacagagatgaataa

SEQ ID NO: 150693 - DNA, 122 bp, Homo sapiens
ttttcaggacttgaatgagccaggctggcttttgtgcctggagctcggccccatttgtgccgaggggactgcggagaaggtcgcagagggggaagccccggtgcagttagggcgggggcaag

SEQ ID NO: 150694 - DNA, 122 bp, Homo sapiens
ttcccaggctttggcctctagtggatgagaatcaccgagtctgcggggctggacgctgaccgcccgggccagcacctaggcgggcgggagctgtgcggcccagggttcgcgcgggccgggta

SEQ ID NO: 150695 - DNA, 122 bp, Homo sapiens
atggtgagaatatgcagttgttcattgggtagcccatctgtggtatgtattgaggaaatacgagtgcagttgccacttgccatgagggggcaccccaatacagaagaaaaggccgtttggaa

SEQ ID NO: 150696 - DNA, 122 bp, Homo sapiens
ggacgtggggggagcataatttaacctagaaaaagatgcgagggaatttagaaagagtaccggtctgtcaatttccctacaggaaacttgattcttatgcaataaagcctacccacgaccag

SEQ ID NO: 150697 - DNA, 122 bp, Homo sapiens
gtagcaggcacctgtaatcccagctactcgggaggctgaggcaggagaatcgcttgaacccgggcggtggagcctggataacagagcgagactccacctccaaaaaagaagaatttaaataa

SEQ ID NO: 150698 - DNA, 122 bp, Homo sapiens
ctgctggagagcgggcagggctgacagacgtgcagggaacactacccggggagccacgttcgtgccagccagactggcacagtctacactgtgggtctcatgccggggagttgggccctctt

SEQ ID NO: 150699 - DNA, 122 bp, Homo sapiens
tgggtttcctggggcatgaggtgggggggtgggagtgggctttgcaccctgatcccccagcggctctaagacagtccctgtttgcccccaggtaggccttactctgtgcccccctgtgtgga

SEQ ID NO: 150700 - DNA, 122 bp, Homo sapiens
tttcaccattgccgtactcttctctttcacaccctatgcctacgtttaacatgatgttcccggtgcctgggatgaactttgccttcctctttatgtagtgaattccaacttgtcctccaaga

SEQ ID NO: 150701 - DNA, 122 bp, Homo sapiens
agggttgtgagctttgattgtgtaaaatgcctctcctgccgaggtcggaggcaggtcttccgcacggagatgatttattcaggagccttttaaaactgatctagatagaacctttgggaggg

SEQ ID NO: 150702 - DNA, 122 bp, Homo sapiens
aaggaacatgggtcagcaatcctgaacgtcctgtgctcacagcgaggacacaggggaaaccgaggcctgctatgcggggagagctgtagagggacggagggtgggcttggggaaccctgaat

SEQ ID NO: 150703 - DNA, 122 bp, Homo sapiens
tctgaagtcctttattgggccggcaaggccgggagctgccctcggagtggggtcccagtccggagtcttcaggtcagtggcagccctgcccgttctggccggggcaggcggcccctgctgac

SEQ ID NO: 150704 - DNA, 122 bp, Homo sapiens
tctggtaaaaacgccttcctctatcacagacctacaaagcaatttcatctatctgggcaacgacaagaataaagaagctaggagaaatacaaaatgcacctaaccaaccccaagtcacagaa

SEQ ID NO: 150705 - DNA, 122 bp, Homo sapiens
gctttggctcctccccagctgctgcgagcttcccactgcgccgggcgcctgggagcctcccggagttaggtgttcggccccgccctcaggactcttgctaaaactcaaattctacctggcta

SEQ ID NO: 150706 - DNA, 122 bp, Homo sapiens
cagaggaggaagccggcggagttctggtatcgttgctgcagctggtgttgtgaatcaggccgacgagcagcgcatcctcttacccggctatttcacgacaccagggttgcatcatacccatc

SEQ ID NO: 150707 - DNA, 122 bp, Homo sapiens
gtgggtctggataacagtttggagcaaatcaattagtgcttgcggcttttcgctctaggacggggtattgttttcccagttgagaaggtcggcaaaggtgaagggctggtacacaaaaacac

SEQ ID NO: 150708 - DNA, 122 bp, Homo sapiens
cctcctctccaggctctggccagacccggcctcggccccctgggcaggaacaagtggtagcgtcctgggaaaagaacgttctcgctttggtagaaaaccaagtgtcaatgatgcacttgctg

SEQ ID NO: 150709 - DNA, 122 bp, Homo sapiens
tggtgtctgggaacttggctttcaagacagtttccaccaccctgactgctaagggtaactcgtgatgcataaactacatgtgccaacaatacaatttatgctttctccctgaaactctggaa

SEQ ID NO: 150710 - DNA, 122 bp, Homo sapiens
ttcctgctttaatgaccggggtagtttgagccatttctgcgtcttgcaggacattttgaacgaaccccctttgcttgaggctcgcaaccacccgatgatcgatgatcgtctcaggggaaaag

SEQ ID NO: 150711 - DNA, 122 bp, Homo sapiens
caccctcccttcctacacagatttcattattttccatctaagtaaggcaggaacagatgacggagacagactggctcctcaaacacctgttgagtgaatgacaggcggggtcccttgtcaaa

SEQ ID NO: 150712 - DNA, 122 bp, Homo sapiens
taggtgaagcaggcggcactgggagaccaggcttagtgtaggctggaatactcttcacctcgaagaactcctggagctaggtcaggactctaaactttctccagtggcaaagaagagcccag

SEQ ID NO: 150713 - DNA, 122 bp, Homo sapiens
aatgtgtccttgagacagccacccagcccttagggtggtccctgcgtgtcctggggcgggcgacttcctgagggtgcagtgctggaaacagagactgcttcgagcctggccaccttccctcc

SEQ ID NO: 150714 - DNA, 122 bp, Homo sapiens
agtattctgtaaggacagtcctagttgggctggcgaagcactgatcactttttactggttcgaccagggaaccagccagcagagcaggcccaggcccctggccactgggaagcagggcagtg

SEQ ID NO: 150715 - DNA, 122 bp, Homo sapiens
gccagcgcgccggccatggctgtcgccgccgcaaccgcctggtccctgctccgcgcagcgcggggaacagctcttggccagccgggcctcattaacatagccccgcccccacaccataggcc

SEQ ID NO: 150716 - DNA, 122 bp, Homo sapiens
aaggtatttcctctgccatgacagtgacagtgatgttagctgctaagtaacttaaggacccggtttgacacagcttttgccagaccctgcattccatatgtctgccaccattgccaaaaagg

SEQ ID NO: 150717 - DNA, 122 bp, Homo sapiens
tctgccttatgccatatgaggacacagcattcctcccctccagaggatgcagccatgaagcgccatcttggaagcagatacctgaccctcaccagagaccaatcctgccattgccttgatct

SEQ ID NO: 150718 - DNA, 122 bp, Homo sapiens
ccgagcccgggggcccaagctgcggcagcggctcccaacgcctctgctcgaggagagcggcggcctggatgccccagcgccctccctgtccagttccttgaaggcccccaagaggggcgagg

SEQ ID NO: 150719 - DNA, 122 bp, Homo sapiens
cgcaggcaggggccacggaggctgccacggaaggacagctgtcacctcggacatcgcctgcggctccacagactctccttgaagcacaggtcgaggagtcccgagcccagcgaccgcgcttg

SEQ ID NO: 150720 - DNA, 122 bp, Homo sapiens
tgtgtgtaaatggttctaggagtgcactgcactattgtgaaaagttcattcagaagtaaacgggagggaaggtggagaggagccgagggccagctggcggagagagggaagaggcggggtgc

SEQ ID NO: 150721 - DNA, 122 bp, Homo sapiens
ctccagggtggcggagtctcctttcaggcagtgctggaggcagccctaggcgggtccccacgcctcagggggcctgagaaactgtgggcggggcaagggcaaactaggaaccttgtgcaggg

SEQ ID NO: 150722 - DNA, 122 bp, Homo sapiens
gcgccccagcaccacgcgcagccagccctcctgcggagggggccctgagccggctgtgcccggccctcctgaacccatgcaggcccttcccgggtggcagcgtcagcttgtttttacccggc

SEQ ID NO: 150723 - DNA, 122 bp, Homo sapiens
cctatgtctttccatgtgtgatttgcgactgaaaactttctcacattcttcacatttgtacggtttctctgcagtatgaagtttatgatgacatgcaaggtttgcttttgtactaaaaacct

SEQ ID NO: 150724 - DNA, 122 bp, Homo sapiens
cgtcgaagggcgctggcagaggggtcccagggacagagtcccagagagcagctgggacctcggagcttggggtcagtcggcactggggacttcttgggtacctcttccctctccgtccccaa

SEQ ID NO: 150725 - DNA, 122 bp, Homo sapiens
gagggcgaagccagggcggcgtcggcgaggccatcaaaggccgggggtggcggcccgccgcgttgcccatgaccaggccgagggcatgaaaggatctttatcctccagtgacattgccaggc

SEQ ID NO: 150726 - DNA, 122 bp, Homo sapiens
ttgacagtgataccaacagaacatatgatgctttcctcccaggcaacatcctcaaaaatgcgccattacccaaatacacatttcctttaataatgcaccaagcactgaatctgtgaatgtat

SEQ ID NO: 150727 - DNA, 122 bp, Homo sapiens
ggcctcggttttcctgcttgtcaaatggggctgatgccggcgtgggcttcttcaggcggtcgcgagcgttgacccctggagtcagcgaaccagccgcgcacgcactcccgggcggaggtcgg

SEQ ID NO: 150728 - DNA, 122 bp, Homo sapiens
catcatccctctccccagctggattttccaaagaatatgccttggctgtactatccttttcgagcccccctacccccactccttcagcccattgttaccaggggaccatctggggtgagagc

SEQ ID NO: 150729 - DNA, 122 bp, Homo sapiens
ccttccccgggatccctaccaagcaagtgagtctcttgctccagcccctccgagcctccccggctggagtcatggtgccggggctgccccaggaagcccccataaaaaggagggggagacac

SEQ ID NO: 150730 - DNA, 122 bp, Homo sapiens
tatctcacagtagcgggtaaggcaggcccggcagaagttgtggccgcagtcgatagtgaccggctccctcagggtaccctgacagatggggcagttgacttcatctgccaggctggtcacag

SEQ ID NO: 150731 - DNA, 122 bp, Homo sapiens
cgggcgccaggcgtgggtgcggccagggagggtcccggctcccccagccccttcttgggccgcagcagccccgcaggcgaccgcttgcgcaccttgacctcgctctctgagtcggtgtactc

SEQ ID NO: 150732 - DNA, 122 bp, Homo sapiens
ctgacttacctttgcccttaatttcttctgcttagaacccaagtcccttactgtttccctcgcggtcaaccccagcgcgcgagttcaagcctcgtgcggcgcgggggcgagccgaggaaggg

SEQ ID NO: 150733 - DNA, 122 bp, Homo sapiens
attgttgttgttttttccttcacagaattattttcagaaaccttccacaggagattcgtgcgtggagggggtggggtggaaagaagtagggaatggagaagattactaagaaaagtttcctg

SEQ ID NO: 150734 - DNA, 122 bp, Homo sapiens
ggaacctaccttggcagcagattaaagacaacccgccacatttagtctcggccccatgaccgatagtgggttcagttcctccaggggcgggggagcctagtggccccgccccctgactcatg

SEQ ID NO: 150735 - DNA, 122 bp, Homo sapiens
aacactctgtcattggcattaacttcaatttgcaagtcaagatataggagcctagagatgcgaagcaacatgccagggttcagagccactaggtagtgcagccaggcttgaaccaaggactg

SEQ ID NO: 150736 - DNA, 122 bp, Homo sapiens
ctgccctgggcctccaagctgcctgctcgctgagctcagcgctgacactcacaggagctgcgttcgccggatcctctgagaggctctgcaacgatcccgatccaattcagcagcgttttaaa

SEQ ID NO: 150737 - DNA, 122 bp, Homo sapiens
gtatgacttacatatagtaatgtgcactaatcttgaatgtatagctctatgacttttttacgcaggtatacattcatgtaactacctcccacatcaagatatagaaaatttctaggactcca

SEQ ID NO: 150738 - DNA, 122 bp, Homo sapiens
gccgggcgggctggaggctcctgcagctgcgatgcctgcccggtgagggggctgccaagccggggagaggcggggagcgcggagggggcgcgaggccggcttcagctgggttcgacggtggg

SEQ ID NO: 150739 - DNA, 122 bp, Homo sapiens
gcggggtgactgggcatgagtcatcagccgctgaggcctcccacctgccccaagtgagcacggcctctgcaggggccacccagtgaatcggcagccatgggaacttccctagcacctcctcc

SEQ ID NO: 150740 - DNA, 122 bp, Homo sapiens
gcagagagttaagcatatgcattgcatgaagatatagtcgaaatttatcttccctttaagcgggtaaggagtgttctctcaaggtacatgccaataaaaatgtgtccaatccctaatgtcct

SEQ ID NO: 150741 - DNA, 122 bp, Homo sapiens
tgtgtataatgcccccaaacatatacaacatgcatattcatacctatatatgactgcttgcgtcattcttttacaaatcttacagattttactttgcttgagtcgacgtgttatcaagaatc

SEQ ID NO: 150742 - DNA, 122 bp, Homo sapiens
gagccccaccagagcagatgagctggaagtgcagcagagttagagcctgggctggactgtcggtggggtagagtctaagttgtttccggtctgagccttcaagttgctgggctgtccttggc

SEQ ID NO: 150743 - DNA, 122 bp, Homo sapiens
cacggccgcgcacaggaagtcaggctgctacacatttcctgtgagtcaccccagggactccgcacccgggagaggccccagctccagggccagctgcagcctccaagctccaaagccaggtt

SEQ ID NO: 150744 - DNA, 122 bp, Homo sapiens
ggacactttcttcagggtcttgttcccacagtgtgagcagaacactcggctcatgtcagacgttgtcctgggagacacaaaaggagatgatctgtaccaaagccacaggcagcaaacgcctc

SEQ ID NO: 150745 - DNA, 122 bp, Homo sapiens
ggtggccagcagggatgggcccccctacctttctcacctttgcaccctgtgcccggtccccgcagaaagggatgtgagccgcactgacaggaccaacaagttctacgagggtcccgagaacc

SEQ ID NO: 150746 - DNA, 122 bp, Homo sapiens
cagggcgttctgggtccccgcccaccggcaagtcacatgagccaccaaaatggtggtgttcgggtatgaggctgggactaagccaagggattcaggtgtggtgccggtgggaactgaggaag

SEQ ID NO: 150747 - DNA, 122 bp, Homo sapiens
gtggttccttctccatcactggttcattctgcatggtgtgacccaccacggctctggagtcggatttccacccaggtcattcagctgagacctgcgcttcccaggcctacccgtgacatgtg

SEQ ID NO: 150748 - DNA, 122 bp, Homo sapiens
attcctaagatttgggcgcccatagagttaacgcagcaaaacgatcacttgcgtttcctgcggactggcggcaatagaacacgtggctgcctagactcttaatcactgatatctaccacacc

SEQ ID NO: 150749 - DNA, 122 bp, Homo sapiens
tgcaacaatctcatttcctaagaatagctctattttatatataccaaaccatctcgctcccgactgtaactcagcccaaatgagaactcagcccaatgttacatcatgcttagagttatatc

SEQ ID NO: 150750 - DNA, 122 bp, Homo sapiens
gttaggaaggtcaaatgaatgcatggcccaaccatagcaattatagacccaatggatggccgttcaaaggaacttatattttccctgtcctggtagcttcattttatttttaggttttgttt

SEQ ID NO: 150751 - DNA, 122 bp, Homo sapiens
gtggaatctaatcggccttgctgatctcactgtgggaagtttctgcctcttcttctgtgtcgtttttatctcccagacccgtgggagctgaaggctgccgagtgtggattagtgcacactgc

SEQ ID NO: 150752 - DNA, 122 bp, Homo sapiens
tgagacgatgatgaacggtaaggacgccctggaataagctctatcagtcagctctggcagcgctaccattcacccagtaaaatcagattccaatgcctcctccaatcttgtcctgtctcctc

SEQ ID NO: 150753 - DNA, 122 bp, Homo sapiens
aattatctgcctctctggacaagctgcctcgccctgatctgagcctgcgctcactccacacgtcacaaaccacagccctagcagaccccctgccctcaggggcccccagaaacagttgtgcc

SEQ ID NO: 150754 - DNA, 122 bp, Homo sapiens
gctgactccctatccaaagatccgggaagacccctccacccgccaaatatctggggagatcgtggccgccaatgacctggggagacccctcaatgacaccgtagatcttgcgcttcccaaga

SEQ ID NO: 150755 - DNA, 122 bp, Homo sapiens
aaggccagtttcctagaaccactttccagccgagctgacttaggggcttcctcaagcacacggtggcgagggtagaatgtggaccagagactgagagagtccagcaggagagctgctgcctc

SEQ ID NO: 150756 - DNA, 122 bp, Homo sapiens
acccactgactggcctcatagggagttcatagccagcccaggactccccctgctggaatccgcctctctgctgggaccgcccctactcccagctgctttgtcttggggatctccctcgctga

SEQ ID NO: 150757 - DNA, 122 bp, Homo sapiens
atcccagctttgttctttgcttccttcatgcctgcgcggacccaagaaatgtttgtggagcgcctgctccgggctccggccccaggcgctgggggtcagtgggtgcccaagacgcaatctcg

SEQ ID NO: 150758 - DNA, 122 bp, Homo sapiens
tttcatggcaggtaggagtgacacaccatccctgggaggcgacttggttcctcccaaacccggccccagaactctgtccctggggtggttttaccaaacccgaaacccagaaatgtggttgt

SEQ ID NO: 150759 - DNA, 122 bp, Homo sapiens
gagccaggggttaagtcctctcccaagaccatactacagccagcagctcgcgatgccacccgaccccagctcctgcctcgtggccggcttcccgccctgtccgcagagaagcaccctgatgc

SEQ ID NO: 150760 - DNA, 122 bp, Homo sapiens
tcatacctgcacctagcggctgttcaggactcctcgaacctgtctgaagatctgcttacccgtcgggtgacccgcgttcttccatgtcctgctctgcacacggagttagctccgcccgcgtc

SEQ ID NO: 150761 - DNA, 122 bp, Homo sapiens
gttcagattctctctccccgctctgctcatgcactttccaaaaattcaaaacgctgatttcggtagcatctctgtgccctcctagtgtatgtctgcgccggatgcttttccttttagcagtc

SEQ ID NO: 150762 - DNA, 122 bp, Homo sapiens
ggcccttctaagctcagggaacccggggactcgggcacccagcgccccagcactccgccccgaggcccaggcaagtccagcggagtttccaggcgcaccattcctgagctaggtggggagag

SEQ ID NO: 150763 - DNA, 122 bp, Homo sapiens
gacacttcctgaactttgccttcccctccctgggcaacaccagcaggaggtttattagagcgtgtctgggagcaggttaaactttctcctaggtggtgatgtgcctccaggtgagcgcacag

SEQ ID NO: 150764 - DNA, 122 bp, Homo sapiens
ggatgcacaagctaaataacgccttccaggccctgcgtgaagtcatcccccacgtgcgcgcggacaagaagctctccaagatcgagacgctcacgctggccaagaactacatcaaatcgctg

SEQ ID NO: 150765 - DNA, 122 bp, Homo sapiens
cagtcgtgtaacaagtgtgcgattgcgcgtgcgactggtgtgtgcgcgtgggcacttacacgttcccggggaggctgggggcaggagcttcactgttcacacaaagagcgcttagaggagga

SEQ ID NO: 150766 - DNA, 122 bp, Homo sapiens
atccattatttccctcctgggtagaaggaggatctgaggacagcttatctttttggggtacgtggagtagaggtggggactcttatataatacgaaataaaaataagttctttgggctggaa

SEQ ID NO: 150767 - DNA, 122 bp, Homo sapiens
ccccgcccccgcccaaccgcccgcacgcccggccccgccccacgtcggcggatgcttgcgcggagggcccgcccccacggcccagccacgcccccacagctaggccacgcccccagctcagg

SEQ ID NO: 150768 - DNA, 122 bp, Homo sapiens
gaacagagagggaaaagaaaaatgcaattctaaaattaaaaagaaaaccttaatttaaaccgtgatttacagataattcccatgtgtgagagacagtataggaaacactccaaagagcttgc

SEQ ID NO: 150769 - DNA, 122 bp, Homo sapiens
gacgctcggcggagccagggagtccggcgagtcgctgggggaagtcgagcagacacccagcgctgccggaactcggggcgcgcatcccgcaagtcggaacccggcggatcggatcccgcaga

SEQ ID NO: 150770 - DNA, 122 bp, Homo sapiens
tatttttagtagagaaggagtttcaccgtgttagccaggatgctctccatcttccgacctcgtgattcgcccgcctcggcccccaacgtgctgggattacaggcgtgagccactgctcccgg

SEQ ID NO: 150771 - DNA, 122 bp, Homo sapiens
agaatcacgtactgcagccaggggcgtggaagtaattcaaggcacgcaagggccataacccgtaaagaggccaggcccgcgggaaccacacacggcacttacctgtgttctggcggcaaacc

SEQ ID NO: 150772 - DNA, 122 bp, Homo sapiens
gtcaagaaaatacaatccgaaagcaacctctgggctggctttagctcagcggttacttcgcgtgtcatcaaaccacctctctgggttgttcgagacccgcgggcgctctccagccctcttac

SEQ ID NO: 150773 - DNA, 122 bp, Homo sapiens
ctgaccttccctaatcccttcccacccaggtggaaaacgcaggtcctgtttgggcaacttcgagcccagtggcacaccagcaggctttttgtgcaaccgaggaacatccactgcgccccttc

SEQ ID NO: 150774 - DNA, 122 bp, Homo sapiens
gttggagacccagggtggatccagcgccagccacagaaaggaacgcacctccatccaggacgccagagccctcccataaccctctgaactaacacccacccgcctctcagggacgagaggtc

SEQ ID NO: 150775 - DNA, 122 bp, Homo sapiens
gttggaaaggaagttgcctggccaccgatgaggcttcgcgtaactgttccacataaaggtcgtctactgttttttttttctctttcaagttaaacctcttcccctttttagatgacaagtca

SEQ ID NO: 150776 - DNA, 122 bp, Homo sapiens
tgtttgctgcggctcctctgctgcgttgagtccgtctgtgcactcagatggcctgtgcttcgcctttcgcccgcgttcttgggaggccttgccgcgtcccgggcctcccgcccttccaaggt

SEQ ID NO: 150777 - DNA, 122 bp, Homo sapiens
ccaaaacaacaaggagcattcgagtcagcagaatgtaattactgggatggaaatggtggccgggacagtgggctttagtcactcacgtgatcttatgagaagtaccatccgatctttgataa

SEQ ID NO: 150778 - DNA, 122 bp, Homo sapiens
gcgagcggtccatctggcacttgtggctggccagcaccttcttcaccaggtccagcatgccgaagttctgcacgatgttgttgagaagtacagcatcttaaagggtaacgcggacactcagt

SEQ ID NO: 150779 - DNA, 122 bp, Homo sapiens
tactacatcgcttcccggcccaaacggcggcgcggcggtggctccccgggccggcggccccgccctcgcctcgtcacttccagtggcaccgcccgcccgccctctaggtctggccgagccga

SEQ ID NO: 150780 - DNA, 122 bp, Homo sapiens
agtgttcctgctagccaggcaccttgtgtgaaatttgccattaactctctggaaaaaatccgctttgggaggaggccactgcccgtgtggccacctccagccttgagaccagagcagaagga

SEQ ID NO: 150781 - DNA, 122 bp, Homo sapiens
ctatctcgataagtgctcctgccaacagacatccagagcggactgaaagctcaataaatgcgcaggtacacacacgcaagcacacacacacgcgggtgcacgcgcggcatggggcgcaagga

SEQ ID NO: 150782 - DNA, 122 bp, Homo sapiens
ccacggagagaaggaagtgaagaagcccgagtctgatctttatggtttatttgactagagcggcctgagaaaccggctgagcctggttacttacgatactctcgctctgttccaggggctca

SEQ ID NO: 150783 - DNA, 122 bp, Homo sapiens
ttaagaaaagataaaaaagaaacaggaaaattgggacaacggacagcatgatggagccaccgtgcaagccctcaatagtctgcctccaggttgtgtcaaataaagtaaaaagaacaaaatct

SEQ ID NO: 150784 - DNA, 122 bp, Homo sapiens
agagcagactgtgaacctgaagctgagcagccaacagagcagccaaggccaggcaggcagcgctaaggaccgagatgacggccatgccgcgtgagggcagggattccctgagcacccccatc

SEQ ID NO: 150785 - DNA, 122 bp, Homo sapiens
acagtgacagaggtggctgcagcagtagtgatggtggtggtagctgaggcccggccttctcggagtagttcagtgcacttgtccacaatgtgccacatttggagcacagaccccactgtaag

SEQ ID NO: 150786 - DNA, 122 bp, Homo sapiens
ggaggcgcctccgcgactcggccgcgcgcgacccggtgctcagcggagctctccagccgccgccccgcgcccgcccgtcccgcccagcaccgcccagccccgcccagcccggtcccgggccc

SEQ ID NO: 150787 - DNA, 122 bp, Homo sapiens
ggcagcccctaaacggagatggtctgcatctgcaggcgcggggaaaggcatagcaggcagcgccctgaacaaatcagaaaaacagccttcggctctggagcccactccggcacggcctcagg

SEQ ID NO: 150788 - DNA, 122 bp, Homo sapiens
taatataggtataatagcatccaccataaagttgatgtagattgaaatattcgtacaatgcgtaccagagtgcttataccttgcaaatgctcaccacatggctgccatcattattagtagca

SEQ ID NO: 150789 - DNA, 122 bp, Homo sapiens
cctcttctaaccaatgacgtgcacttacggcaaggctacctgatctaaggaactgccatccgtggttatagagggtaaaccgaggctgtaaactcattacctttgggagacctaatgtatcc

SEQ ID NO: 150790 - DNA, 122 bp, Homo sapiens
gagaaagtggctctcagcggccggtcggattaaaagtaaccagactcgtccagaaaactgcgtccaggaaggaagtgacagaagacgaatgggaaaaggagaacagctcacagcgtttgaaa

SEQ ID NO: 150791 - DNA, 122 bp, Homo sapiens
tgcttccaagtttgggcagttatgaagaaagcgacgaaaacatgccgaaaacctggctcacgcactgtgttcatggcgtgtggagggggcgcttcgaccatcaaaggaagtttggaaggagg

SEQ ID NO: 150792 - DNA, 122 bp, Homo sapiens
gctgagctcttttgaattctagcatctgtacttttcataaaagaaggtgatgaaaggtaacgaaggaagatctgaaaaataattgaagtacagatgcaaaaataccaatgggcactgcctca

SEQ ID NO: 150793 - DNA, 122 bp, Homo sapiens
aacaaaatggagccgcagggaggagtacttagaggggcggagctaacaagtggttttccacgtttgctcaaagtgggggctgttgatgtgtgtggtttgtcaccgcaggcttccagagccaa

SEQ ID NO: 150794 - DNA, 122 bp, Homo sapiens
ttctttcctatcagattagccctgagatccagaagctgtttgcctttcagtgggaagatccggagtcaggtgtcactactcagtacacttggaccgggcttccccaagggttcaaggactcc

SEQ ID NO: 150795 - DNA, 122 bp, Homo sapiens
ggtgatctgcccgcctcggcctcccaaagtgctgggattacaggcgtgagccaccacacccgaccttctctgtgttcttgtgtgtgcacatggatgactgtgtatgtgggtttctgcctttc

SEQ ID NO: 150796 - DNA, 122 bp, Homo sapiens
gtgcaaaatgaacaaccagactaaaacgctggactgcctgatggccgcctccatccccgccgtggagatcttcatggtgaagatctttatgctgctggtggtggggatcaccagcgggatgt

SEQ ID NO: 150797 - DNA, 122 bp, Homo sapiens
taaatgttttgtttttggcaaggcccatgtttgcgggccgctgaggatgatttgccttcacgcatccccgctacccgtgggagcaggtcagggactcgcgtgtctgtggcacaccaggcctg

SEQ ID NO: 150798 - DNA, 122 bp, Homo sapiens
tttcgagccccagtgtgagcgaaggcgggacaagtctccatggcagcgactaaaggacagcgatgtgaaccactgacaacagttcgcggcgtttgacggcggcgggggcgtggcggggtttt

SEQ ID NO: 150799 - DNA, 122 bp, Homo sapiens
gccgccgcctcccccgcctcgccggcggccgggattccgccccacccccgccccctcgctcgctccgagtctttgttgcgggctccgccccccgccccgcccccagctcctcttcgggagca

SEQ ID NO: 150800 - DNA, 122 bp, Homo sapiens
gtttacaatatccctgagcggcaggcgtttctcccttttgcagatgctcagtggcttggccggagatacatccaagtggtgggtgtagcctgggggttcaatcctcctgtggcgccccagaa

SEQ ID NO: 150801 - DNA, 122 bp, Homo sapiens
gagtcagaagagctccaaggactaagctgtctgttctgggcaaggcaaagaagacagctgcgtttgggctgcctccccttcttcactcccagcttaaaatcctcaaaaagtcaaatccagat

SEQ ID NO: 150802 - DNA, 122 bp, Homo sapiens
gctgacccaacttggccgggccctatcgatgctttctctccttcctcggcaacatcataccggtcccgacctcctacaccatcgtgacgattaagtgggctaagatgggtgaaggtttgaaa

SEQ ID NO: 150803 - DNA, 122 bp, Homo sapiens
ccctggggcggggacctaccaggaagcggagctgctggaggctgaatcctggggtctggtcgatgtggtccaccaggcggccgggggtggctaccacgatgtcagccaagcagcggtaccca

SEQ ID NO: 150804 - DNA, 122 bp, Homo sapiens
gcccgtgggggaggagcggcagcggcggcggctggagctgctgtggcgaccgacgcgaggcggtggcagaggagacccacccctgtccacatggacagtcgcaaaggcctccgctgatgcat

SEQ ID NO: 150805 - DNA, 122 bp, Homo sapiens
ataagtctaggggtgggcaaacagagcttggacaggtcacccacggacgttttgacaaatcgagagatgggtccgcagctctgctccatgtctacctgcccgggacaccaggaatttgcttt

SEQ ID NO: 150806 - DNA, 122 bp, Homo sapiens
gtatgagagagcggccagaggctcggcctccagctgacatgacctcattgctttaaactacgctttcgtgcgtactatgccaagagcaagaagctaggccttcttctgtaagttcagaagca

SEQ ID NO: 150807 - DNA, 122 bp, Homo sapiens
ggcagggtcagggagggccctgagctgtcaatggtgtcagccaggggatcgcagggcgggcgccggggttccccatgccctcgcatccgggcactgtggaagaaggagctcatgtccaggag

SEQ ID NO: 150808 - DNA, 122 bp, Homo sapiens
tttagaaaaactttgaaaaacatttatgtatgttctttagtaagtgtttgttagaattcacgagtgatatcatgtggcccagggcttttcttcgttactgattcaatctctttactagttat

SEQ ID NO: 150809 - DNA, 122 bp, Homo sapiens
tccacttctgtggccagttctttttaacaagtgcggtgttaaggaaggcgctgggcctctcggagcctcagttttttcatctggaaagagggtgctcctcttactggcctcatcgcggtgct

SEQ ID NO: 150810 - DNA, 122 bp, Homo sapiens
cctacaccttccaggagccctctccccagcacttgagagacggccgatcccgcttgaggtcgggtgtgcttaggtccctggggctcagcgtgccatctggcctagacagcacatgatcgcca

SEQ ID NO: 150811 - DNA, 122 bp, Homo sapiens
tttgaacagttggctacgttggattggccaaaactcggtgactggcacaagtgtaggctacggtctgttgacgtctccacttgctacagttcacaacgtacacagaaacctttaggctgaac

SEQ ID NO: 150812 - DNA, 122 bp, Homo sapiens
ctgctgcaattcctgctttttatttagaggggtggggggagatttcacaactgatgattacgaagaagcggtttatcacctgtgcttttatgattgtagcgactaaggggaaaaagatgtct

SEQ ID NO: 150813 - DNA, 122 bp, Homo sapiens
caaaaagcaacacaatgataatctcatgttgaaatactcagctttgaagctcataacaaacgagaacaaatttcatttccttttgtgtctttcttattttcatttgttgacatgaaaaacct

SEQ ID NO: 150814 - DNA, 122 bp, Homo sapiens
atgtggatgaacctagaggatgttaagtgaaataagccacacacagatagacaaataccacgtgatctcactcttatgtggaatttttttttaaataagttgcttagccgggcatgatggca

SEQ ID NO: 150815 - DNA, 122 bp, Homo sapiens
cctccctccctcggtcacagtcacggggcggcctcgggccagacaggaggagatgacagacgacaaccagacggtaatatccaaggactatttacaggggggactgcttctgaggcatgact

SEQ ID NO: 150816 - DNA, 122 bp, Homo sapiens
taggtgggtgtcccctcggtgcttcccagctgccgtctgcaccagccatggactgctacacggcgaactggaacccactcggggactctgccttttaccggtgagctgccccgccctcccgc

SEQ ID NO: 150817 - DNA, 122 bp, Homo sapiens
aagggaggtctgtgcatacacttgatttactgcatcaactctgaagagtcggggctgggccgggctggtgaccactctgaacaaatcccctttttctatatgtcaggataaaaaggagaaaa

SEQ ID NO: 150818 - DNA, 122 bp, Homo sapiens
ctgcgagcccccaggcagcggttgtttcccttctttgtctaagctgctggccccgaactgcgctcctggtcctcccgccggctttcataccgaataaacaagcctctttgcagcatcccgtg

SEQ ID NO: 150819 - DNA, 122 bp, Homo sapiens
cacacactgagatatgcacacattcatgctggggtacccacgctgtcacacactgagatacgcatgcattcatgctggggtactcacgctctcacacactgagatacgcacgcattcatgct

SEQ ID NO: 150820 - DNA, 122 bp, Homo sapiens
caagaggggcggggtcccccggccttaggcgagtggtcgccgcagccccacccgaacgcccgtggccgagcctgcccatgagagccccgttctgcaccagctgggtcagggtccagcgcagc

SEQ ID NO: 150821 - DNA, 122 bp, Homo sapiens
ggggaggctgccaggggaggggaagcccactgtccctctgtttctctgctggtttccctccgtgctgcagcccctgctgttcttcatggatctgtaaggatggaaagacttttaaagtggtc

SEQ ID NO: 150822 - DNA, 122 bp, Homo sapiens
ttacaggtagaggacctctgtgcaggagccctcaacacccagggaggattaggatataagcgcaaactcaaaggtactgtaatgggcacctagcaatcagaggtgatacaagggtctcttgg

SEQ ID NO: 150823 - DNA, 122 bp, Homo sapiens
cgccatggtggaaggcatctacaagtacaactcggaccgcaagcgcttcacccagatccccgccaagaccatgtccatgagcgtcgatgccttcaccatccagggacacctctggcagggca

SEQ ID NO: 150824 - DNA, 122 bp, Homo sapiens
cctggagagaacaggtgaaggaatgcctggggctctctctgtgccctcctcgggaggaaacgggacccaggcgatcttggacagaagcagggtcccgagcaggggatcactagctgcttccg

SEQ ID NO: 150825 - DNA, 122 bp, Homo sapiens
aggaagaatattccaattttgcgagtgggtggtagtttccaggctcatgggcattttgatcgggggacatatgaggactggcagctgacatggtcggtcctggctagcatcgagtgtttgcc

SEQ ID NO: 150826 - DNA, 122 bp, Homo sapiens
cttcccgcgcacggccacaggcctgggaggccgtccggttaagtacccctcctacggttccgattctaccctggcaggacaaccctagctcctcgtacctggcgtggcccgaccaatcgtct

SEQ ID NO: 150827 - DNA, 122 bp, Homo sapiens
acccaggacgccctggggatctccaggccaccgtggcagccgggcccctgatgcaatccacggctgtctggcagcatgacctgccccggtcagcctggactctgccctgcctgggggcccag

SEQ ID NO: 150828 - DNA, 122 bp, Homo sapiens
acacctgtagttgtagctattccggaggctgaggcaggagaatcacttgaatccaggaggcggaggttgtgtaatggcccaaggggtacaccttgccctttggtttagacagagctgattta

SEQ ID NO: 150829 - DNA, 122 bp, Homo sapiens
ccatggtttcttcatgtctaagactggagcagcttcctcaaattattgggaatgaaattgcgcttataaagtgcccagcacggccgggcgtggtggctcgtgcctgtaatcccagcacttta

SEQ ID NO: 150830 - DNA, 122 bp, Homo sapiens
tatgtaacttgcaagatgtgtgtgtgtgtgtgtatgtgtttgcacacgtatgtgtgtgtacggttggaatcacctagtacctggaaaagaaaactcacaatagcataccatcactatatttt

SEQ ID NO: 150831 - DNA, 122 bp, Homo sapiens
gcttgttgctggagatgctgggagcaggcaggtccaacagaggtaacctggcttcctcctcgcagcgagaacacagcccaaataaagccagaatctgaccacctgacctccggcctgaccag

SEQ ID NO: 150832 - DNA, 122 bp, Homo sapiens
agtaaggtaataagactccacttcttgatgaggaaatgtcaaagtcatattgcggaacagcgtattagataggagatactatggtgatcatctttggaaggtgcaatctgccacatccagtt

SEQ ID NO: 150833 - DNA, 122 bp, Homo sapiens
gggattgagtgaaggactcaatcactttgggaaatcactttggggattgagtgaaggacacgtaaggtttcatgcggctgcagctcgttggccacatcgaggtccttcctgaaatatttggt

SEQ ID NO: 150834 - DNA, 122 bp, Homo sapiens
ggagtttggcgccaaccgtgtttttttttttcccttccaaaggcgggaactagttgtgggcgctgcgacgtgctttgcgtctgatatgattggccgtaggcactcagtcccgcctccatacc

SEQ ID NO: 150835 - DNA, 122 bp, Homo sapiens
gtgcagaagcttatataccatctcaagattacagaaagaatggcggccaaaaacaggttacggtggtaaatcagattatagtctcaagacaggttactggagagaagatcaggcaggcttgg

SEQ ID NO: 150836 - DNA, 122 bp, Homo sapiens
ctgcccccgagcggggagctgcacttctgggtgaaggaggctcgggacctcctgccgctgcgggcaggatccctggacacttacgtacaatggtgaggagtgctggccctccgggcttccca

SEQ ID NO: 150837 - DNA, 122 bp, Homo sapiens
gagggtacgcgcctggccggactgggatgactctgcggcaggcctgggactccctcaggccgacccaggcttcccaagtccctcctggagccaagggcccgggattctcgggcggctcgggc

SEQ ID NO: 150838 - DNA, 122 bp, Homo sapiens
ggggtcctgcacccagacccctagggatccagcaagggtagcagctgttagaggttgtagcggggtttggtaggggagctgcgtggagggagaggttctattttcatggtgtataagaaagc

SEQ ID NO: 150839 - DNA, 122 bp, Homo sapiens
gccatcgtcccgggcttcagaatccactgggcttggttcatcatggtttaaggtgaaattcggggcgaaggaggcaggacaggtaggcaggaggaggcggccggtcccgacaggtgcgtgcg

SEQ ID NO: 150840 - DNA, 122 bp, Homo sapiens
atgccaccaagatcttaatcttcacatctttaatcttatctctttgactcctctttacaccggagaacggctccagctgttctagctctctttcagttctttgaaccttcccaccttagggt

SEQ ID NO: 150841 - DNA, 122 bp, Homo sapiens
tcgtgatccaccctcctagcctcccaaagtgctgacattacaggcgtgagccactgcacccggcctccttagaatgttttaagaatcggccattaactcctgtgcttgctttgctctcttga

SEQ ID NO: 150842 - DNA, 122 bp, Homo sapiens
gaatgggcgcttccactcttggcccagcaggccagtgggcagggccgcgggaaggacgggcgctgcaggggctccgcgcgctcaaggtgctcgcgggctcccgggcccagccgggctgaggt

SEQ ID NO: 150843 - DNA, 122 bp, Homo sapiens
ttgccctcctgctggccctgcttggcctcctggtggccatcacaggtgcccagtgtaccacgtgtgtggaggacgaaggtgccaaggcccgtatcgtgctcaccgcgggggtcatcctcctc

SEQ ID NO: 150844 - DNA, 122 bp, Homo sapiens
tcctctctcgtaaagccgtgcggtctgtgggccgccattcagaaactggatggacagcttcggcggtgggaagggaagggacatgctgcaggccaccctccggctagaaggagggagtactt

SEQ ID NO: 150845 - DNA, 122 bp, Homo sapiens
aatcaatatggctagcacaccactagagtgatcgcataaaccaattctgtcaaaacataccgaatgattacctatggccaccatctatccatggagtatctagaatagacttggacttgttt

SEQ ID NO: 150846 - DNA, 122 bp, Homo sapiens
tctgcaagcttgaggagcaagagagccagtccgagtctcaaaattgaagaactttgaatccgatgtttgagggcagtaagcgtccagcacaggagaaagctgtaggctgagagactaggcca

SEQ ID NO: 150847 - DNA, 122 bp, Homo sapiens
tttaccgcaaattctttcgtaatcagcaaaaggaagtcattccttttcgcactggaaagacgctccactctctttcactctttggatgcacaacaatggccacacatcgagattgaaatgaa

SEQ ID NO: 150848 - DNA, 122 bp, Homo sapiens
ttgtcatttttgtaaagatgtcaacacagaacatttttaaagcagagacgcagcaggacgcgcaactgcagtctcaggccgaccttcctgctttctcggtggcaaattccaaaccccagagg

SEQ ID NO: 150849 - DNA, 122 bp, Homo sapiens
acaggtggggagggggccattgtttctggaattctggctcggctttcccaagagtgcaaccgaggagcctggagaggccggtgtgctggggaggacgtagagaagatgactcggaaaggccc

SEQ ID NO: 150850 - DNA, 122 bp, Homo sapiens
gcgggacctgtgtgtctcacatcctggctcccagcgcctctgtttttcgggtttgggaggcgacagcggccaggaagtatgaggcatgattcaaaagccctggaattttctggaacggggat

SEQ ID NO: 150851 - DNA, 122 bp, Homo sapiens
tgacccctcgacagcgcgggggacacctgttgtctccttcctggctggggctaggggtggcgggcaggggcgctggtgaggcacagaaaggctctagacgcccccgcgagcaaaggctcttg

SEQ ID NO: 150852 - DNA, 122 bp, Homo sapiens
agggtctgccacactggacagagtagaaaacattcccatcattcagaaggttctcttggacgctgcagatctggaaaacaagacttccatattgaaataaatacaacctcaaaacttttatg

SEQ ID NO: 150853 - DNA, 122 bp, Homo sapiens
gcaggagcccccttcttcttgccatgtctctctagcgccctctactgagaagctttgcatcgtgctcactcgaaaaacgctgaaaggaattctgtggtttaatcacagagcatgttttgaag

SEQ ID NO: 150854 - DNA, 122 bp, Homo sapiens
ctagactggaaatactgctgcacaaagttaggctgagttcgaaggacaccagagaggaagcgcaaggagatgcccttctccggagccgggcagagcgccagaactcctagacgggaaacttt

SEQ ID NO: 150855 - DNA, 122 bp, Homo sapiens
aagccattgcagagagggcaaggagctggtgggtggggagtgggaagtctcagagttaagcgctactgctgccagaattccacacccagtggctggttagtgactcaatgttgagggcaatt

SEQ ID NO: 150856 - DNA, 122 bp, Homo sapiens
cctcgggaagctcctggatcccacggtctagggtgggaagcccaggacctctgccagcctcgggaagcgcgcatccacacgcaccggcgggaatccgacccagggggcttactccctggtaa

SEQ ID NO: 150857 - DNA, 122 bp, Homo sapiens
ggcgctcaacggcatggagtaccagtcggacaacccggagatcgacagcagcttcatcgacgtcttcgcggacgaggagccttccggccccagaggtcccagctccggacacccccttaaga

SEQ ID NO: 150858 - DNA, 122 bp, Homo sapiens
caagggacagctgggggtaggtggccacatcccggatggtgcctgtgtgtgagcatcacacgtgctctgagccccccggggtgcagggagcaggcaggacacagggtgcctggctgattccc

SEQ ID NO: 150859 - DNA, 122 bp, Homo sapiens
aggatgtgagagccctggggtggtcaggactgcttcctctttctcctcctcctcctcctccggccaatccctgctagttctgcagccctggcttcctcaaaagcaggtcccctaaagaccag

SEQ ID NO: 150860 - DNA, 122 bp, Homo sapiens
agtgatccacctgcctcagcatcccaaagtgttggcattacaggcatgagccaccacattcggctggagccatgttctaatcccagctctacttctcactagctatgcggttttaggtaaga

SEQ ID NO: 150861 - DNA, 122 bp, Homo sapiens
gcctacgtctcaccttcactctcatgtgtctcaggcatctcaaccttaccatgtccaaaacgaagttcccgattttcttccctgcctccccatctgtcccttagtctgcccctcatccatct

SEQ ID NO: 150862 - DNA, 122 bp, Homo sapiens
agcacgtggccgggtgcagggacgtaccacccccacttccccaggggagctggggtcagacgagtcccaggcactccatcctctgcagcaagtcaggttgtgatttactagggggtggtgaa

SEQ ID NO: 150863 - DNA, 122 bp, Homo sapiens
cctgcagacaggacgctccgagcgaatccgcagtctgcttgagcggcaggcccgtgagatcgaggccttcgatgcggaaagcatgaggctgggcttctccagcatggctctggggggcatcc

SEQ ID NO: 150864 - DNA, 122 bp, Homo sapiens
gagaagagacagttaacaaggggcccaagtcataaagcccatttgaagaacagtggctttcgctataagtgacaaggaaaaccactgaagtttttagcagaaagcagatgtcatctgacgta

SEQ ID NO: 150865 - DNA, 122 bp, Homo sapiens
gtcccagtcaggcgctggtgccttcgggggtcccagtcaggtgctggtgcctcaggccttcgctgcggagtcagcatgacagggaggccttttcacttgcagggcagcactgtggggtcggg

SEQ ID NO: 150866 - DNA, 122 bp, Homo sapiens
ccctgatctcaccaagcactcataagaaagatttggagcagagcaagagtcctgagaaagcgtctttcgtggtgcagcccttgggcaagggaacagcagcagctgctgcaggaacagtaaga

SEQ ID NO: 150867 - DNA, 122 bp, Homo sapiens
ggcaccgcagtaggtgctcctgtaaatagggctccaccgagggccgcagagcaagaggcgcgaccccaggctccacgccctctgcaccgcgcgccgtgcccagcagagggcgctgcctcacc

SEQ ID NO: 150868 - DNA, 122 bp, Homo sapiens
tagacactcatttttttcacttaacctcagattactgggagttatccaaattgactcttccgaatctcattattctgtggtatatagtattccattgtgtaaatgtatcacattgacttagc

SEQ ID NO: 150869 - DNA, 122 bp, Homo sapiens
aaccttttccctgcggccaacctgcgattctcaactccccgccctggttgctaagggaggcgcgcagagcgcttgtgcctgcgcacttccacaccagcccgtgtagtgtgacgctgggcccc

SEQ ID NO: 150870 - DNA, 122 bp, Homo sapiens
ccaagaagcagagtaagccgagtgacacaagagagggcagcctctgccccaggcttcctgcgctgggggccggtcatctgctgccccaggcttccctgcgctggaggccggtcatctgctgc

SEQ ID NO: 150871 - DNA, 122 bp, Homo sapiens
cgcggggtaggggcggcgggaggctccgtggccggccctgggttaaagttggtaattgagcggcaactccggcgggcgcggagtgacagctcgtgacggcctccgagacgccagctgcccct

SEQ ID NO: 150872 - DNA, 122 bp, Homo sapiens
gtatgaggaaaaacaacaacaaactgaagtgcgctttccgtcctttcaaaggacaactgtcgggaagggagagccgagttgcgaggtaggaggggagcactggcagggagagacattcttga

SEQ ID NO: 150873 - DNA, 122 bp, Homo sapiens
gcggctgccgctggctggccaaggagatgacctcgggcccggctggccccaagaagcaagcggtgggaccagctggctttcgtgctgcctccgtgtcccggggcccagggcaggcagggctg

SEQ ID NO: 150874 - DNA, 122 bp, Homo sapiens
ctcctgggctaaacccctaaaggcctcagctccctgggccatcagagaagtgaagatgatcggacaagcagaaaggagtttccagaatccacacccaagtccctgctccacagagctgggct

SEQ ID NO: 150875 - DNA, 122 bp, Homo sapiens
gggagcgccgttttggggagacgggcccgaagaaacattgggggtgctcgcccccgcgttcgtcgccccgccccgcgcgcccgcgcaccccggccccgcccccgcgcgccgtccgtgaggtc

SEQ ID NO: 150876 - DNA, 122 bp, Homo sapiens
gttgcattaaaatgttatttttcttgactgctgaggaattttgcacccctttaaattctgcgcccgcgtcctggttgggagatgtggggaaaatcctgggagcccaggacagggagaggcaa

SEQ ID NO: 150877 - DNA, 122 bp, Homo sapiens
cctggtcccggccctgggccaccggactgggacatgtctgtgaggaccagagttggggagcggctccctgacaccccaggagagagggtgatgctttgacctcagccctggtcaggtggggc

SEQ ID NO: 150878 - DNA, 122 bp, Homo sapiens
tgagccgggcgatggacgacagcggcgagctgggtggtctggagaccatggagaccctcacggagctgggcgacgagctgaccctgggagacatcgacggtgagtggtgggtgggtgggagt

SEQ ID NO: 150879 - DNA, 122 bp, Homo sapiens
cgggaggggacgggcgggacctccgcggacagccccgggtgcggaccagcgggcagcggccggcgagaccctccctggatccgcccagagcttaccggaccctgcgcgcccccgtcccggct

SEQ ID NO: 150880 - DNA, 122 bp, Homo sapiens
ccaccagccaggctgcttctgaggttcgactggctgcccagctgcccgccctccctcactcgccgggtccatgcatctttcccggccccagtccagccatacccggttgatgagctcgccaa

SEQ ID NO: 150881 - DNA, 122 bp, Homo sapiens
tagcccagctgcgtgtctgccgggaggggctgccaagtgccctgcctactggctgcttcccgaatccctgccattccacgcacaaacacatccacacactctctctgcctagttcacacact

SEQ ID NO: 150882 - DNA, 122 bp, Homo sapiens
gaagctattgcttagaaagcattgaatatatctgacatttaaactcctccaatatactgccgtatatgtttcctccaccaggagcctagaggtttgtgttaaaatacagcttgaggtgtaga

SEQ ID NO: 150883 - DNA, 122 bp, Homo sapiens
acaagagaaacaaaactacctatttgtaacggacgtgctgccattgccctccgcattgagcgcctacctattgaaatctttacgtcgggacaatgggagagcggctaaaattaccctcttgg

SEQ ID NO: 150884 - DNA, 122 bp, Homo sapiens
ccggccgcgtcgcgccgggcgctagggacggacgcatttccctacttccagcagctggtacgagccgcccccaactgcgctgcgctgctctattctttgggaaacacttcgcgtgctttgtt

SEQ ID NO: 150885 - DNA, 122 bp, Homo sapiens
actgaacgcaggtttcatgggtgcctgacagaccaagactgctggatctgtcagcctggccgcagctggctgactggctgactggctggctggttgactggctggctgactggctgcctggc

SEQ ID NO: 150886 - DNA, 122 bp, Homo sapiens
ttccgcaaggcacctcaccttctgtgcccagaccattagccaacgcggtgaccttgaccccggcccaggccctgctaatgaagaggaaagcccgtacgcactcggcctgacccacggcgacc

SEQ ID NO: 150887 - DNA, 122 bp, Homo sapiens
gccctccgtgttctgcctaacccagcaaggaggcccgagtcgctcttgagcatgcgccaacggggcagtacgcttgaactcgcgaccaaacctctccaagttcatagcttctaccctcttct

SEQ ID NO: 150888 - DNA, 122 bp, Homo sapiens
tgcagggccttgtgtgactgtgttcacgtcggcccctctcacctctgagctcctccccaccgcgcttgtgagtggagcagcccaggagactgtatgtggggttttccaaccacaaagcatgg

SEQ ID NO: 150889 - DNA, 122 bp, Homo sapiens
gttggtgttgacacacagctctaaacctgcttttgctcccagcttgtaaattgggtgaggcggactctctccccataattgtttcttttaaaagacttacattctcctgcaaagactactta

SEQ ID NO: 150890 - DNA, 122 bp, Homo sapiens
cctactgacctcactccctgatgagaagggtccagcagtgcatgtccacccctcagaccacgagcgcccgtgtctaagacaccaattgttcctgactgcactgctcctgcctgcacgtaact

SEQ ID NO: 150891 - DNA, 122 bp, Homo sapiens
cttcataaagcagtcagagaacaagtcatagatgccacacccctgctgaaaacactctgacgactttttattacctttgaaagaaaatccagagtttttatcatagccggcaatggctttgt

SEQ ID NO: 150892 - DNA, 122 bp, Homo sapiens
ccggctgcaaatgggaaaaggagcctctaccttaaccaatccccgggaacctcaggcccgcggatgggagaaaccagagatgccaacttcctgcttccgaagtagtggctgggtcttaaagc

SEQ ID NO: 150893 - DNA, 122 bp, Homo sapiens
cgggctgccggcttccaggttcttgactccacccggagcgcggggcctggggacacaacacgcacctgttgggcgtcccgcagcgcctcgccacgccctcgggaaccggaggcggagtcccg

SEQ ID NO: 150894 - DNA, 122 bp, Homo sapiens
gtgtgtcaccattccactagatggcagtgttgcttactgagtgtcaatggcttttttccccgtaaatggaatcatgtttttctcccccaaagtacaataaagctgccttgtctgcaccattc

SEQ ID NO: 150895 - DNA, 122 bp, Homo sapiens
aaaggtggggagggagaatgcaggcaggagacgcaatgctcaaggcacctggtgtgtccccgtcggccgtggtctctgagactcgcatgcctcgaagacctctggctactaagcctaggtga

SEQ ID NO: 150896 - DNA, 122 bp, Homo sapiens
catccaaatgactgctaacttgagtttgcaaatctttctgattttttatcttatatggtacggattatacctgcccattctttaagaattgcacatccactgtcagcttgcgtaagacattc

SEQ ID NO: 150897 - DNA, 122 bp, Homo sapiens
gaacccagggctccaaaggaccaatgcatgggaaggtcgggaggctcaggggagtgaccccgcgtctgggccagcgctttgaggcccctgtggacccagtggagagggcccgggtgaggcct

SEQ ID NO: 150898 - DNA, 122 bp, Homo sapiens
attagctgccctgtagtatcacccgggggacttagagttctagggttattagggccgcttcgtgggcccagatcagttaggtcagaatcttttgagggtggggcacaggcatcatttttttt

SEQ ID NO: 150899 - DNA, 122 bp, Homo sapiens
gtagcaaagggttaaaatccttttgattgacgttgtagcctccggtgccctgggctcaggcgcgcgccattggccgccagaccttgtgcctggcggccaatgggggggcgcggtccacgagc

SEQ ID NO: 150900 - DNA, 122 bp, Homo sapiens
ggctgcccggtgagtgagcagggcgccggccctcccgcctaatggcctgcgattcagcgccggtcgcctctgtgattgacgggcctgggctcccagggcacctcctctgcagccctgctcag

SEQ ID NO: 150901 - DNA, 122 bp, Homo sapiens
tagcttctcatttttgttggaggatatgtggaggcatagagcttggtcacattgagctgacgcaagtcactgattcctgcaacctctagtgatgcatttccaaactcaggttaaaatgaagg

SEQ ID NO: 150902 - DNA, 122 bp, Homo sapiens
ccaccttttctgaatccaaagccacctttatcttgttttctgccttctgcaatgtccacacgaagtgaccgatcgcccaacagtgcaccatcgtatgtcaaggcttccttaagggaatccac

SEQ ID NO: 150903 - DNA, 122 bp, Homo sapiens
attttcatcttgatttcattgttaactcaaacatcattcaggagcagattgtttaattttcgtgtatttgtatagctttgagagttccttgtggagttgatttctagtttcatttcactgta

SEQ ID NO: 150904 - DNA, 122 bp, Homo sapiens
gtttccttgcagatgacacagatgaatagataagcagatgtccctgggccatttgaggagcggggcccagcccctcatcagggcagatgtggtccctgttttcatcctacctccagcgtgtt

SEQ ID NO: 150905 - DNA, 122 bp, Homo sapiens
cagaaacggcagcttccgcccggagagcagagatgtggcgtggggctgagtgtggcccaccggtaatccagctgcatgcccccttccctgcctgcacctgggcgccgcctctgcacgatgaa

SEQ ID NO: 150906 - DNA, 122 bp, Homo sapiens
ttctcatgggctcttctcttttttatgctctaccagatgctagcactgtggcatgccattcgctcactagcagcttaaagggtacaggttctaaatctccttagtgctactcacctgttatt

SEQ ID NO: 150907 - DNA, 122 bp, Homo sapiens
ggctgaggtgggaggaacactcaacccccggaaagtcgaggctgccgggacctgagatggcgcccctgccctccacccggtgcgacagagccagaccctgccacattcaaaaacacaataaa

SEQ ID NO: 150908 - DNA, 122 bp, Homo sapiens
aagtacggggggacaatggcaacagccgctgaattgcaaagcccagcagtgcaggggagccgcctgggattccggacccggctgcaccccaaccttccacaaggctcggtcttggactaccc

SEQ ID NO: 150909 - DNA, 122 bp, Homo sapiens
gtgacgccaggactgcatcatcctggtgctcggactcctagtgacagcatcctgagcaggcggtagcccagacaccaccctgcctgatatgcccactgttggtggagacatcaccccagcac

SEQ ID NO: 150910 - DNA, 122 bp, Homo sapiens
ggctgcgcggggctaggtatggtcgggctgttttcccactgtcccttcttcgggcagtgtcgccgtccagcctggttgttgaagcgtccccgtggtcccccggggtccaggcccctttgtgg

SEQ ID NO: 150911 - DNA, 122 bp, Homo sapiens
aggaccagaagggacagtggcagtgccaagggctggcttggagggctttccacttccatccgaccccttcctccggatgagcataaactctaaatgaaatctccatcatgccccccgtgtaa

SEQ ID NO: 150912 - DNA, 122 bp, Homo sapiens
ggaaatttgtacagataatgacctgctgtgaggacgcaaagcttacagttttggggacttcgtacgctatctgagtcgacacgccgcccatgtcgagaatgcccgctgtccttttacggaca

SEQ ID NO: 150913 - DNA, 122 bp, Homo sapiens
tctatatgtattcaaagctttgtgagagtcaactaagtaacaaacaccatttctaaggcccgaagcacattgaaagaacaaaacttgattcccgccaacaactgctttaacagacaattcat

SEQ ID NO: 150914 - DNA, 122 bp, Homo sapiens
aggctgagacaggagaatggcgtgaacgcggcaggcggagcttgcagtgagccaagacagcgccactgcactccagcctgggcgacagagcaagaatccgtctcaaaaaaaaaaaaaaaaaa

SEQ ID NO: 150915 - DNA, 122 bp, Homo sapiens
atggagtgtggtcttcagccgcccaccgcaggtcctgcgagtcccgggcatgcaagggcccgcagaccacccaaggcaggccttacaggtgcagttgaggtcctttcgaccggggacccccg

SEQ ID NO: 150916 - DNA, 122 bp, Homo sapiens
gataccacgtgatgtctaactgtatatttgcttcagaatgtgggcagtccttctctttcccgtggcagttggtatttgtttgtttctttagccacctttgcctaataagatacagttttttc

SEQ ID NO: 150917 - DNA, 122 bp, Homo sapiens
cagctctgggaggaggtgagatgcccgttggccgtgttctgtgcacgtcttggcgtgtgacgaagggtgacttgtctccagagatggaatgagggggttgggtggggctcctcctggactca

SEQ ID NO: 150918 - DNA, 122 bp, Homo sapiens
aagctttgatggatgcgctctgcggggttgcagaagtgtcccgacagctgcaaaagtttgcgcagattagagtgtagacaaagatgagccggtgcatttgggatcagcgactagagacagcg

SEQ ID NO: 150919 - DNA, 122 bp, Homo sapiens
aacgatttctgttatgggataataaaaatcccgacgtcagagctaaggaatgtgaccttccgctgctccagttgtaactccctgctgtcctcctgcttgagccttttagggtaaagttcagc

SEQ ID NO: 150920 - DNA, 122 bp, Homo sapiens
cgaccctcgtcacggcacgtgggttgtgatctgacgtttggctgctgctttggatccacacgacaggctttgaaaagggacagccgataggggcggccttggctgggtgtggaagccaccag

SEQ ID NO: 150921 - DNA, 122 bp, Homo sapiens
gagagcctggagccccccgagcctccacccagcgtgcgccgtgagttcccgctgaaggtgcgcctgtccacgggcaaggacgtgaggctcagcgccagcctgcccgacacagtggggcagct

SEQ ID NO: 150922 - DNA, 122 bp, Homo sapiens
cgtggggctcatctgcctctctctgagcaggaagcccgtaggtccccacaggcgggtgcacggaaggggtgggtcctgggcccaacaggcaccccctgagcaccagcccgtctgagggtggg

SEQ ID NO: 150923 - DNA, 122 bp, Homo sapiens
cttgaacacacatgtgaaacagtcgctttccatataatagccagaatgagattttggaaacgaatctgattgtattttccatttgaaaatcttccagtggcttcctgttccctactagaatt

SEQ ID NO: 150924 - DNA, 122 bp, Homo sapiens
gagcttcccttaattcaaaccccagttccaccccttgggtgcaagctgtagactaagtaccgtcatatcccaacagcatttttttttaacttctggcccagggaccctccactaatcataga

SEQ ID NO: 150925 - DNA, 122 bp, Homo sapiens
ccaaatccaccggattattcttgactgcctcctctgggctcctggttccctcaagcccgacggacgtctgtgttttatgtttccagggctgccgcttcatcacggctttctcggaaaacggg

SEQ ID NO: 150926 - DNA, 122 bp, Homo sapiens
caacgaggtaagactcagtgttggccgatcacgtgtggctgttgtcatcgccagaggctccgcccccgtcccacgccccctcctgcagcccggagtcaggtggtgctttcgggcccgccccc

SEQ ID NO: 150927 - DNA, 122 bp, Homo sapiens
ggcccagtctcccttccccctccaagccctcccctgtgtaactgttccctccactccccccggactgtggactctgtttctaagctgagcctctccacggccaggagaggtgtcctggttcc

SEQ ID NO: 150928 - DNA, 122 bp, Homo sapiens
ccgcgcggacttggtggtggccgtcctgtccgcggcgggaggtgggcggggcaggcctggcgcccttcctcctctttctgccgcccgggagaccagccgaccgctggggagaggtgggaatg

SEQ ID NO: 150929 - DNA, 122 bp, Homo sapiens
attgttctattttacctgaagtcattccttttataatggtacctgtttaacatgttcccccgcttagataatgcagctgccttctactgaggagttttagtgccatgatccatcagtccact

SEQ ID NO: 150930 - DNA, 122 bp, Homo sapiens
actcccactcccgcccagaacaagatagcgacaggccctagcgggccaccgtccacagggcggatccgccagaagctctcctgcgacgcgaagatccactccctgagcccccggcgctccct

SEQ ID NO: 150931 - DNA, 122 bp, Homo sapiens
atcagcccttctcactgcagcagtcggagcatctggcaccgaccatgagaggcgctcgctcgtgcgagacttctcgcttgcctttgtgctgggactgcctctggcgaccctgtcagtctggt

SEQ ID NO: 150932 - DNA, 122 bp, Homo sapiens
caggacgcccgcctgctctgcgcacctctccccggatgctgccccgtgggcgggtgggggcggccctgcttccccacgacccccagacgcacccggagggactcttgagcacagtggagtgg

SEQ ID NO: 150933 - DNA, 122 bp, Homo sapiens
tgaggcctggcagcgaggaccctgacaccccttcgggagaggagtggctgctaggccgctcgcttgctcctggaaagatttggggtttgagagctcttggccaggaggctcgcgctggccga

SEQ ID NO: 150934 - DNA, 122 bp, Homo sapiens
taatagaggaaacagacacagagaagatacagagctaataacgcagaggctggacataaccgaggtcttcaaagcttcactttggtctgtttcatccctctgccgcagctgggccctggtcc

SEQ ID NO: 150935 - DNA, 122 bp, Homo sapiens
gtccgtggtgctgacacgccggccgatggtttctcgagtgctgtctgtggtactgatccacgttcccccacctccccgccccattccaacactcagaccacggtggtggcccttgaagctct

SEQ ID NO: 150936 - DNA, 122 bp, Homo sapiens
cttggaaccgagtgagccggcctgggtgagagcgcctggctcgcagtggggttgcggatgcgttgacgcccccttccccccgcccccgtgaagtgctgctggcgcgacgctgggtttctgag

SEQ ID NO: 150937 - DNA, 122 bp, Homo sapiens
cgacctcatcttgacaagccctgactttgctttgtccacccctgactccagtgtggttcccgcgttgaccccggagccctcacccacgcccttacccaccttgcccaaagagctgacctctg

SEQ ID NO: 150938 - DNA, 122 bp, Homo sapiens
taactacccagaggggagagcagtgctggcagtccaaattgcaaggtgcgctgccttcagcgtgcggcgtcttcgccctggagaagcattacgctggcccgcctgcctccagggccacacgg

SEQ ID NO: 150939 - DNA, 122 bp, Homo sapiens
gtcatctatatgccaagcccacgggtctgagccagtggcaggctgccatggggtggaatgcgctgataagaggtaactgcagtcagggtaccaagtgtaccaggaagccacctcttccatgc

SEQ ID NO: 150940 - DNA, 122 bp, Homo sapiens
acatgggggttgaatgggcctcttccaactagctgggtttcatctgttggctgaaaacaacggtcccagtgtgccagccaaaagcaagcctttcacgcccagactcagcctcagggactgca

SEQ ID NO: 150941 - DNA, 122 bp, Homo sapiens
caagacacttcatttagtagctctttggcgtgtcgtatatttgctacccagcgcctactccgtggggtctgccagggtcttgctgtgagagggcagtggcgtttgtcagagatgtgactcac

SEQ ID NO: 150942 - DNA, 122 bp, Homo sapiens
tttgctaattaccccttcctcctactcctaggaggaacgctattattttgggtggttttacgtggactgctaaggctggtcattttcgtttagctgtgaaaggagcgcgtcgcccttgctgc

SEQ ID NO: 150943 - DNA, 122 bp, Homo sapiens
cgattccgagagccggaacgcagggaaaggcaaggacggggcggccggcggaggggcgggcgccgctcatcagccacgccagtcacgtctggggccaccggctgcctttttcttcctttccc

SEQ ID NO: 150944 - DNA, 122 bp, Homo sapiens
ccagcaaaggtcagtgagggaagaaagcataacaacgaattcctgacgctgcccgctctgcgggcagagctgtctgggaagaaaagcagccaggcctgcgggattccatttactgcacatag

SEQ ID NO: 150945 - DNA, 122 bp, Homo sapiens
tctagcgcctactgtggtggtggtgggagctatctgattcccattcccaggcctggccatcgacgcgaaggcctccagctgatcggaagtcggcgttggccggcgcggagcccggcgcggag

SEQ ID NO: 150946 - DNA, 122 bp, Homo sapiens
gcttcggggccgggggtggagccgggaccggctctgccgcttccggccctgggaggcgcccgggccgccgcgcccctgccccgccctccacagccacccctggagccggagggtcccaccgg

SEQ ID NO: 150947 - DNA, 122 bp, Homo sapiens
cctggggccctgccctccacagcgcctccgctaacgaggggctgggggtggacactgggtcggcccttcctgagcagagcctcctggtggtggatttcctgtgcgtctggctcctgccccaa

SEQ ID NO: 150948 - DNA, 122 bp, Homo sapiens
ccagagccagacagaatagattcatcagcctgaacctgcactagccagaaaaagcgttcccgaaactacattgctgggtgtcatctaagtcggcagatgatttactgctgacagcccttggc

SEQ ID NO: 150949 - DNA, 122 bp, Homo sapiens
cttgggcttcgcaaccttggccttctttgggctcttagccactttcttggttacagtggccgcggccggcttcttcgctttcttcggtgttttcttagcgctcttcttcggagttgcgccgc

SEQ ID NO: 150950 - DNA, 122 bp, Homo sapiens
aacttgccgcaccgcgtcactagggacacggcctttcgcggcttcctgatacccaaggtgcgctaggcctggcaaacgacatcaggcaacctaagaggaggcatcgcaggctcttgcactgg

SEQ ID NO: 150951 - DNA, 122 bp, Homo sapiens
ctgggggaacctgctggaaatggggatccagtacctctcttggggtttatgtttggcaggcggagtggataggctggggcccggagcccggtggtcatcttctgcacaaggctggccaggcc

SEQ ID NO: 150952 - DNA, 122 bp, Homo sapiens
gaggatggcggcccgagagagcagggagccggcggcccgggtccgccgcctgccccgccgcgctgggccaagggcgaaggcctccatccacacgccgccgtcgcctgcccaccgtccgcgcg

SEQ ID NO: 150953 - DNA, 122 bp, Homo sapiens
ggcacgccgggagagaacccggatgagggggctagtgtagtgcgcgaggcacgacgggaacggcgagacccggataaagggatcgcggcaccggttcgagaaccctcggcggcggaggcggc

SEQ ID NO: 150954 - DNA, 122 bp, Homo sapiens
ttactcatcttgcgcagccactgagcaaagcgggtcacgaggtcctcaaccgtgaagtggcgacgtgagacacacgacctcctgtaacccttcagcctccaagagtctgcgattcagtagac

SEQ ID NO: 150955 - DNA, 122 bp, Homo sapiens
agcacacctgttcccaccctgttctgccccaggattgtgctggaagtgctggttgtgctccgaagcatcagcgaacagtgccgccgtgtgtccagccaggtcaccgttgcctcagagctgag

SEQ ID NO: 150956 - DNA, 122 bp, Homo sapiens
caaaactatttttgccagcaggttggacccgatcctgctagggagtctcctgcagctcagcggtctgggaactgcgaattcggtggggggaggggggtccaggaggagcagtgagtgattgg

SEQ ID NO: 150957 - DNA, 122 bp, Homo sapiens
agcacaccttccgcagccgctggcccgggtgctaagcctcattgcctggggccggcagggcgggccgctccgagtgcagggcccgccgagcctacacctacctggaacctgcgctggcctgc

SEQ ID NO: 150958 - DNA, 122 bp, Homo sapiens
gcggctgcgcacagcgcgaggaagcgcggtcacgtgactgctgcgggccagccaagatggcggcctcatgcttggtcctgctggcgctgtgtctgctgctgccgctgctgctgctgggagga

SEQ ID NO: 150959 - DNA, 122 bp, Homo sapiens
gcacaggacccgggaggcggcgacctgcctccgcgcggggacagtggccggcggggcgggcgctaggtggcggctgttcagctcccacgtcacccggcccgccctccgcccagcgcagaagc

SEQ ID NO: 150960 - DNA, 122 bp, Homo sapiens
cagataagccttgaagagaaaggtacctgtcctctcagtgcttcctgccacctatttgtccgttaggcaattcttccagaatgaagttgaggcaggcccctgtaaaagaggtggcagcttca

SEQ ID NO: 150961 - DNA, 122 bp, Homo sapiens
atacttattttctaaaatgtgtcaggtactgtgctagattcattattctcattgaaattacggtctgatgggacagactaagaaacaaaatggtgtagaaaaagattaactgggggagtaga

SEQ ID NO: 150962 - DNA, 122 bp, Homo sapiens
acgcgtctcatggcatcgtaagaagactgggggctggggtgtcgagacacatggccaggccgggtttcgtttaataaattcgctgaagagtttcggctttggatttcctctttgatctgttt

SEQ ID NO: 150963 - DNA, 122 bp, Homo sapiens
gctccagtcacacctggaagctgactggtctatgcacagccaaagcataaggaaactcatcgtgggactcatttttctcaaaatttggacttgttcaataagaacttcagctgattttcccc

SEQ ID NO: 150964 - DNA, 122 bp, Homo sapiens
agggcacctcccctaaacccggcggctcacctggccacccctgcacggactcggggactccgggagtccccagctgtcccgcctccgaggacgccctcagaaaaggatgaggagggaaagag

SEQ ID NO: 150965 - DNA, 122 bp, Homo sapiens
tcctctacccttatgtttctttgtggtctttatgctttgggaaaatacttcacttctacacgttgccactgggggtctctcttgcatgtctagtaaccaagttgccctgcatactgagaagg

SEQ ID NO: 150966 - DNA, 122 bp, Homo sapiens
gccgaatggaccctcaagccaacaggtgcctgaagaggctgagggtggggccggcgcgcgcgcagctggtaactccctcaactccagccccacccgccaggtaacttttgaaagcgccggag

SEQ ID NO: 150967 - DNA, 122 bp, Homo sapiens
gcagtcatctcatcttccaaactcaacctccacagagtctgaggtaagcttttcaactcccgtatctgttcacgtcccttgtacttaaaatgtggtacacatacgccatggaatactatgca

SEQ ID NO: 150968 - DNA, 122 bp, Homo sapiens
gcattttgatccctgtattatacttgtccagcctttggctgtggtgcacatgcatacatacgtgtacacacatgtgcacacatgcatacaaacaggtacacacatgcgtacaaacaggcaac

SEQ ID NO: 150969 - DNA, 122 bp, Homo sapiens
gatttcggagcagcggccacctcccaccccctcagacggctgctgcacccctgacagcttcggaggcgaatcaaggtccgccatcttggtccccattcggcacttccggtcccgcgaggccc

SEQ ID NO: 150970 - DNA, 122 bp, Homo sapiens
aatgcacaaacatgctcaatttgtgcacagtttgggggtgttcctgcactccctggggttcgtgcacatggaagttaagaactctggttcaacattgggggtgcgggggtggcgggggtggt

SEQ ID NO: 150971 - DNA, 122 bp, Homo sapiens
ctcaagtgattcgccttcctcggcctcccaaagtgctgggattacaggcatgagccactgcgtctggcctagagtggagtagtgtttaatccttacctgtaaagatttatggcatttgaagc

SEQ ID NO: 150972 - DNA, 122 bp, Homo sapiens
cgactcgctccgggctgcgcgtgtgtggtggttatttatttattttctgagcacgcctcccggttcttcttttattcttgggggaagggggatggggaggagaagcgcacacacgagcaccc

SEQ ID NO: 150973 - DNA, 122 bp, Homo sapiens
cagggatttgactgggccttctctagctttccccggtttgctgcacttgacgctgcagggcgggcggggtaaagaagggagcgagcccttctcaagcttggaaagtttccagactgctgggc

SEQ ID NO: 150974 - DNA, 122 bp, Homo sapiens
tctaaacaaccagatcccatgagcgctcactatcacgagaccagcaagggggacgtcagccgccatgagccaatcatctcccaccaggtccctccctcaacactgggaattgcaattggaca

SEQ ID NO: 150975 - DNA, 122 bp, Homo sapiens
gttaccccagcagacctaaatggacggtttctgtttttcactggcagctcagaactggaccggaagaagttcccctccacttcccccctcccgacaccagatcattgctgggtttttatttt

SEQ ID NO: 150976 - DNA, 122 bp, Homo sapiens
atcgctgctgccaactagaagggcaaatgcctgctgttccgacgcctccttgaccaactccgaaggatcgtccctggtcccacctaggacacccgggttgggaggctggggttggtaaggaa

SEQ ID NO: 150977 - DNA, 122 bp, Homo sapiens
ccgccagcctgtaggtgtctgttggtgtgccctccacgagcagccgcttgtgtcttcttccgctgatgtgttcctcacgacgtccagctgcttgtgtctgcccgctaaggtctcgggttttt

SEQ ID NO: 150978 - DNA, 122 bp, Homo sapiens
gctccaccagctcctggaagacggggtcacaaaagacgcagcccatgtgctgcgcctcatcgcccgggagtggggacttggccttgttgaagtccacatcaagcaaggcggcctcacagaca

SEQ ID NO: 150979 - DNA, 122 bp, Homo sapiens
ttagctttttgtctccatctcctaaaaaacaattccaaatattctaggtttgattttcagcggaccctcctgatgggtatctggagcacgaggttggttttttttttttttttggagatgga

SEQ ID NO: 150980 - DNA, 122 bp, Homo sapiens
ggaaagtgcattaggtatgaacaacatctcaggactcagcatggtgtcttatgctgtcctcgcttagcaacagcatcaaggaagtattgcatatccgggattcagaatctcctcctcatcta

SEQ ID NO: 150981 - DNA, 122 bp, Homo sapiens
cctcggacacccccctgctcctgcctttctgcctgcaaatgggtgcgcgtcacccctccccgtcagggtgtcgccaggcctccgggaaccgaactcctaaatgttccttgactctgtccttt

SEQ ID NO: 150982 - DNA, 122 bp, Homo sapiens
tgaaaggagagctgcaagacctagggcccaatcagtgaaagggagtagcctagaccgtaccgatgtgttcattaggtagggggaacccttggaaaattatagaccagaggttgacaaagtga

SEQ ID NO: 150983 - DNA, 122 bp, Homo sapiens
acatggaactaagctggaggacacctgagtactcttacgcagtccctgtggtgagtaagacgggtagctcagaagcatcagggtaacaatgggacacgtgtgggctctggttcgttccacct

SEQ ID NO: 150984 - DNA, 122 bp, Homo sapiens
acctcgccagtagaggagcctggggcctgccggtgcagtccttaatgcaccccaaactcacgtggggctggcgaccccggaggctcggcatttcctggcccttcagaagacgatgtcgggac

SEQ ID NO: 150985 - DNA, 122 bp, Homo sapiens
cagcagctgaagaaccccagaaagcagtccacctgggtttgatgttctgagatcaaaggacgtgctaggctaaagcactgaaggacatcctgttttgtgggtgggggaagactggcacagag

SEQ ID NO: 150986 - DNA, 122 bp, Homo sapiens
ttggacagcaaagctgttacttggcaaggtggaactcggccgagagcggctccaaagtcgcgtggccagtgccaggaattcagattttggcaaccgcaccttgtgcgtccccgaaaccgacg

SEQ ID NO: 150987 - DNA, 122 bp, Homo sapiens
tttcttgatgctacatgtcacggattggcaggaaatggtctgggtggtgctgctcttatacgcactcttggtcagacattgtgtgtggtggaaatctgtgtaaggatcttagcaattatggg

SEQ ID NO: 150988 - DNA, 122 bp, Homo sapiens
aaggaaaaacttgccttctgttgttttcagagaagtaaaaaaagcacctcacctttgagtcgccaaaattatgcttcctggaatgaccgcataccatgtagcaggtttattttagtttgttt

SEQ ID NO: 150989 - DNA, 122 bp, Homo sapiens
agcagcgggagagtcagctgatgcgggagcagcgggcacgccacctgtccaacgacagcacgctggccagcttctccgagcctggcagctgctacgaagagctgctgaagtacgtgggccac

SEQ ID NO: 150990 - DNA, 122 bp, Homo sapiens
gagcttgttagcgtatttggaggttttgtgcgccagagtgatcagagtgattgtttcccacgcgtttgcaaaggtgtgcatgtacttgagtgtgatgataaatcatagggatgtgtttagtt

SEQ ID NO: 150991 - DNA, 122 bp, Homo sapiens
accctcaaccttctggtcctcttctatgtctcgtggctgcagcaccagcctaggaattcccgggcccgggggccccgtcgtgcctctgctgccggcccccgtgtcaccgtcctggtgcggga

SEQ ID NO: 150992 - DNA, 122 bp, Homo sapiens
aaaccggcccttgggcagccttaggagaagcgggggccggtgtgcgcaggagagggtggacgccccagaagcagccacggtggccaggttacctgcgagatgccatgggtgggagatgcagg

SEQ ID NO: 150993 - DNA, 122 bp, Homo sapiens
ccccgcctccgcggcccccggcgcctcccgcgcgccccgggcggggtcccggggcgcacgcgggctccacgcctggccctgacctggccctgtcgggcgtgcaccccccacccaccctggga

SEQ ID NO: 150994 - DNA, 122 bp, Homo sapiens
aggggtcagggagttccctttctgagtcaaagaaaggggtgacggacgcacctggaaaatcgggtcactcccacccgaatattgcgcttttcagaccaacttaagaaatggcgcaccacgag

SEQ ID NO: 150995 - DNA, 122 bp, Homo sapiens
ggtggctgctaatgcctcacagctcccctagccttgtcactcccctagccgtgtcctacacggaaacttgttgactcagctaaggttacattcctccctgggaggagcccatttctaatgac

SEQ ID NO: 150996 - DNA, 122 bp, Homo sapiens
tttaaaataattataacacgtttcttataacgagaaccgaagcccgtggagacttggcggcgccgggagccctgctgctacacacgcctgggagagcccagcgagagcccagaaagcgggtt

SEQ ID NO: 150997 - DNA, 122 bp, Homo sapiens
aggattcgggcgcgaaggacggggtcagattcagccaggtgcccactttccccacggtcacgaccctggtccagaactgccctgccccgggcctcagtttccccactaaggagaggaggcgt

SEQ ID NO: 150998 - DNA, 122 bp, Homo sapiens
tgctccacgctctgaacccgcgtgccttcccgcagtgcctggtacagccacgtgttcctccggtacaggttgaggatgtggcagatggtagagtccgctgtctcttccacggctgcagacgg

SEQ ID NO: 150999 - DNA, 122 bp, Homo sapiens
agggggcgtgcggggaaaagtggggagccctggcgaggccctcccgcgcccgggccgcggcgctgaatcaccggccaggtatttgcatccgagagcgactcgtcccctggtgatttgtctgg

SEQ ID NO: 151000 - DNA, 122 bp, Homo sapiens
acagtctcaggccaggtcacacagacccacctgcgggaggggcgtccctccacatcacatcgctggggctactttctcacagcccctgtcaccgactgaggttctcctgtctcttctctgcc

SEQ ID NO: 151001 - DNA, 122 bp, Homo sapiens
gcccgccatttttggagcttcttggagatctaggcaggaacccgccccgggttccttcaccgaggctcctccctaggtctcagggccggcgctttcctctgttcccgcccggctcctgctgc

SEQ ID NO: 151002 - DNA, 122 bp, Homo sapiens
gtcaactctgggaggccgtgggctggactttcaggctgaacccaccccacatttctccctcgggaatctgattaaggtgaagtccttatttgggcaagggtaagagtccttagatttgccga

SEQ ID NO: 151003 - DNA, 122 bp, Homo sapiens
ctcgtggtgcgccgttttttaagccggtctgaaaagctcaatattcgggtgggagtgacccgattttccaggtgcgtccgtcacccctttctttgactcggaaagggaactccctgacccct

SEQ ID NO: 151004 - DNA, 122 bp, Homo sapiens
gacttcgacagcgtcctgcatgttgtcaatggaagacccatggggaagcgctgacactcacggcggcaatggagggcttcttcccatccccggcgggggggtgagtgacgtctgctcccaga

SEQ ID NO: 151005 - DNA, 122 bp, Homo sapiens
agtttaggaaggggaacgttgcatttccggcacagggtggcgagaggctgacggtccacacgggaagtctgtgcccacccccaccccacccctaccgcacctccgtgatcttgcttgtgacc

SEQ ID NO: 151006 - DNA, 122 bp, Homo sapiens
gatttcccagactcagtaactaaaggtgaaatagtttcccgctagtgttctttcctggaacgcttgtccttggaacactgccatcatgccatgaggaattctaaataacagagaaagacctt

SEQ ID NO: 151007 - DNA, 122 bp, Homo sapiens
aggccgtgcaggtcctgactgtgtttggaaaggccgtgcgggtcctgactgtggaaaggccgtgcgcgtcctgactgtgtgtggaaaggccgtgcgggtcctgagtgtgtgtggaaacgccg

SEQ ID NO: 151008 - DNA, 122 bp, Homo sapiens
ggttgctgagccttgggaaggcttacagcagtcaggtccctgtccagaagtgggtgaaatcggagagcgcaagggctcacgtgccctgggaacatccgtctctcatgcgaactttacaaaca

SEQ ID NO: 151009 - DNA, 122 bp, Homo sapiens
ggcgtgcgcggcggcggcggcggcggcggcggcgcaagctgaggcggcggttggcggcggcggaggtcaaactcccacaatgcagccgggtaaacagccatggaggaggaggcggcggcgcc

SEQ ID NO: 151010 - DNA, 122 bp, Homo sapiens
atcccagctactcaggaggctgaggcaggagaattgctggaacccgggaggcggaagttgcggtgagccgagttcgtgccattgcaccccggcctgggcaacagcaaaactccgtctcaaaa

SEQ ID NO: 151011 - DNA, 122 bp, Homo sapiens
atcatctgtgggggaaggaagggactcagatgccgccccctgggcccgcccagcccgcggcgccccgccccccaacccacaagaagcccaacctgagtcacctgggctggtgcccgagaggg

SEQ ID NO: 151012 - DNA, 122 bp, Homo sapiens
ggccaagggcagagaagaactagacctacagaaaggggttttgctgggagtatatcaaaacgataatgttgttttgattataagccatgagtcccaatgtccagtactctggcatcatattt

SEQ ID NO: 151013 - DNA, 122 bp, Homo sapiens
cctcctggaaccaatggaaagccagccttggcgattggcatctcaaccagccagtaggagcgcgcagcggcttcgcagggggactgttaacgtcaatgggaagggccctccccgggaagtcc

SEQ ID NO: 151014 - DNA, 122 bp, Homo sapiens
cttacaaacagcaatttccctttaaaagtgcccccaagggcagatctctaaattatccctcgatatttcttttcaatcatgccatgaccctaccactggtttttaaactcctcctcttgaac

SEQ ID NO: 151015 - DNA, 122 bp, Homo sapiens
ccggagaagagcattttgcttgttttcaaacacaagcatcctctcccgcgcctgggagggcgaggtgcggatcttttcgccttggcagtccctcgctcaaatgtgcgtctctggcaagtcct

SEQ ID NO: 151016 - DNA, 122 bp, Homo sapiens
cacctgtgaccaccacccaacatgtattgaacaagggcttggaggtcctttctctaaggccgcaccgataaacgattaccgactgttgacctcacggccccttcgcttccggccgcaccgcc

SEQ ID NO: 151017 - DNA, 122 bp, Homo sapiens
tcgttttctggcggggggtgggtacagtttccccagcagtggtcagggtagctggccaagcggagcctgcgggcccagtctccttcctgtgcgcctctgcctccctggcccatgccctgcca

SEQ ID NO: 151018 - DNA, 122 bp, Homo sapiens
ggtttcattggtggcagcagcagccatgagtggcccctccccccagtcccaccaaagagccgtgcaagcagacaggtcacactttcagcagatgagcttgaacctcaggagggttgtggcac

SEQ ID NO: 151019 - DNA, 122 bp, Homo sapiens
taatattaaatacttaggagtttgccaaaataaagaatggagttcgttttcttaaggtaccgtacacattaactacagttataacaaactacggaataagcggtagtggtgtaaacggtgtt

SEQ ID NO: 151020 - DNA, 122 bp, Homo sapiens
ctggggaagtcacagaatagatgactaatatttaactggttgtgtcacttactgttcagacgcccttttatttcttcccaagtaaaggacaatttcctgggatctggttccaagtaacttcc

SEQ ID NO: 151021 - DNA, 122 bp, Homo sapiens
cgagaagtacagtcttgccgaggagacctctgggaagcgtagtcagagacgtatcaaggccggacaagatggttcccgatcgtcagaattcctgtccgcgccttgcgtcagccccgccgaaa

SEQ ID NO: 151022 - DNA, 122 bp, Homo sapiens
ctcagctcgacctctctccagcgttagcaataggtggagcgcgggccaatcggaagaggccggaggggcggggcgggcagtggccctgggaaggcgggtccgcggcctcgctccctgacttc

SEQ ID NO: 151023 - DNA, 122 bp, Homo sapiens
cggcggccagcacgctggacgagcagttgtcgtacctaatgtagtcctcaaagtccttctcggagggaaagccgcgcactgcaaagagagagcacgggagctgtggttgcccaatcggccct

SEQ ID NO: 151024 - DNA, 122 bp, Homo sapiens
ggagggcagcctgagccgcttcccgcccccgcggggaccgtcgccagcccgcatctctagcgagaggaggttccacagcgcgcccggcagccccgccaccgtcagcacctgcgcctcgggcg

SEQ ID NO: 151025 - DNA, 122 bp, Homo sapiens
taaagcatgccaagatggcatgagcctcagcctttcagaaagaacagacttgagtgctagcgaatatgttctggaaaacgtttggcatactgatacatccaggagagaaaggacaaggaatt

SEQ ID NO: 151026 - DNA, 122 bp, Homo sapiens
ccgccggctgggggagacgaggacatcccggggttgcggggcccggactggggtgggggtcgccggaccgggggtcaccgacgctgggccactggagggggacggtatcggcccgggcccgc

SEQ ID NO: 151027 - DNA, 122 bp, Homo sapiens
cctccacccagaagagtgccgtcctctccaggctgaagtcgtgctgcggaaagaaggcgacgtaaagcccagggcaaaccaggaccccgggggcacaacactaacccctggcctgggggacc

SEQ ID NO: 151028 - DNA, 122 bp, Homo sapiens
cccgtgccgcctgaagagctgcagccagaacaggtggctgagctgtggggccggggtgaccggatcgaatctctcagcgaccaggtgctgctgctggaggagaggctaggtgcctgtgagtc

SEQ ID NO: 151029 - DNA, 122 bp, Homo sapiens
accccgcgccagcccggcggtcccgtcccgtcccgtcctgtgcggccccgtcccgccgcccgcccgccagccatgagctccacgcagttcaacaagggcccctcgtacgggctgtcggccga

SEQ ID NO: 151030 - DNA, 122 bp, Homo sapiens
ctttacctggggaaaccccaagctctacagtgagaaagttgtaaattagcctttaggagacgctgtttgtcaaagttatcttaaccctggaaaaggggagggaaaaaggcagataagcagtg

SEQ ID NO: 151031 - DNA, 122 bp, Homo sapiens
cggggccggcagtgccggccggctgctccgagtgtggggcccgccaagcccacgcccacccggaactccagctggcccagaagcgccacacgcagccccggttcccgctcccgcctctccct

SEQ ID NO: 151032 - DNA, 122 bp, Homo sapiens
tctaaggctttgtttcagaaagttttgtcctctagtccttcatcatattatttgaagccccgaccagcaacttcgcgtggcccagcgagctgcaggacccactttgatggctctgttctcag

SEQ ID NO: 151033 - DNA, 122 bp, Homo sapiens
gtggaagtagcatataaactttttaaaaggctcaagcccttacctgcagtcacttatatgcgcgtcccacatgctgtgacagctatcttacaagtgcaaaaaatccagaatgtgtgggtatg

SEQ ID NO: 151034 - DNA, 122 bp, Homo sapiens
ccctgccatgtggatcgtcatatccaggaggcgagagcggggtgatatggctccccgcatcgtggggtgctcctcacccccctgcgatgtgcttcgtcatatctaaggcgggtcgtggggag

SEQ ID NO: 151035 - DNA, 122 bp, Homo sapiens
tgtttacccctgttcattcactggcttgctcgtcctgggtgcctctgccaggccttgacacgtggccaagtagcaaggaaggcacagtgcctgccctcagggagctccggccggttttcacc

SEQ ID NO: 151036 - DNA, 122 bp, Homo sapiens
cgcggggaccgacgggcaggcgagctggacgggcggggcaggcgtcctggttgtgacgcacgccaccgcgggcgtgcgcgtccccgcttagcaccggccctcagtgcgcttgcgccactaga

SEQ ID NO: 151037 - DNA, 122 bp, Homo sapiens
tctgactacagccagactgaaagtgacatggcctgcttagtaaccttcaatatcctcttacgggattctctgactcagaactcacagacaggatgtgatctcagctcctcacataccttcca

SEQ ID NO: 151038 - DNA, 122 bp, Homo sapiens
aaggagcgcacggagtccggggtcggagaacagaaggcgcgggcggctggaccgagtcatcggcgccagggtctggcgggacagtaggatggggttgaggaggggtggtgaggggaaggaga

SEQ ID NO: 151039 - DNA, 122 bp, Homo sapiens
ggagaaactaaaaagccactccctccagagtcctgctttcccaggtgcctccctcctgagcggaagctctgggtggtccaaatgtggtaatagagatctgtggatttttttcaagtgtgttt

SEQ ID NO: 151040 - DNA, 122 bp, Homo sapiens
tctcccttatgcttcgcccgggaggggggtctgccgataatctaaccccttctaggggcgcgtccgcagcggcgcggcccgcagcctgggcagggcccttccgcactcctttccgccgctcc

SEQ ID NO: 151041 - DNA, 122 bp, Homo sapiens
gaatggacagaagatgggaggtgatgggcaggcaggagtggcaggaaacagacacccacacgccactccagtagcccaggggtctgtgaagaggataaaggaacctaagtgagcatgtgtgt

SEQ ID NO: 151042 - DNA, 122 bp, Homo sapiens
cgggaggcgacctcgggctcccttgcggggctgcaggagcaggtaggctgcttgaagtgtcggaagctgcggcgccgtgggagaggccggcgcggctgagcgcccttgggtgctcctggcga

SEQ ID NO: 151043 - DNA, 122 bp, Homo sapiens
ccagggcaggtgcacggtggtgaccagctcgtagcgagtgtgcatgatctcaccgtcctgcgtgctgctgctcacggacagcagcaacggcaggttgaaggtgctgacaaccttggtggtgt

SEQ ID NO: 151044 - DNA, 122 bp, Homo sapiens
aagggaggaccggcagagccacccagggctgtggctgaccacagactctgtgcccatcaccgtctcccaaactatggaggggaacttcctcccctcccagggaaataagttaaggagatggg

SEQ ID NO: 151045 - DNA, 122 bp, Homo sapiens
gagctgactttccgccagcatctgaactccatcagtgtgagtgtgtggggccgggccgcccgcgtgcgagcgtccccgtggtctggagagtgcaccttcaggtgccggacgctgctccctta

SEQ ID NO: 151046 - DNA, 122 bp, Homo sapiens
ccgggagtctcgggcccaggtggcgaggaggcgctgcagaggctttccctccgcaagggtcgggccttcgcgcctacctggacaagaacattcacctgggtaggggcagggctgggggaaaa

SEQ ID NO: 151047 - DNA, 122 bp, Homo sapiens
gtccttcaaaatcccagctgaatgtgctgtttctttcctgccaggatcctcattgacacacgaaggagccaattacgttactgaaagatccagaaactgcaatgaaataacctaatctggtt

SEQ ID NO: 151048 - DNA, 122 bp, Homo sapiens
cgactggagagaggttggtcggcagggttctgggaaggcggtgctcggcctccgtgtgaccgcaggctcctcgcccgcgtcctcgagggtcccagggatgcaggacctgccgcagcttccgc

SEQ ID NO: 151049 - DNA, 122 bp, Homo sapiens
gtgtctaagctccatctcatcggaggaaggggaggaataagtcaaaaaggattaggtgcccgctggggattgcagatccatagcaattagacttcatttgggtctcagacatttggttttaa

SEQ ID NO: 151050 - DNA, 122 bp, Homo sapiens
agtgggagcccaggcagaggaggcgccgagagcgagcgagggctgtgaggagggccagcacgctgtcacctctcagcgggatgcagccgtagggccagccacacctctcccacgtgggacgc

SEQ ID NO: 151051 - DNA, 122 bp, Homo sapiens
ccgagctgcgcgtgctgcgccggggatctccagagtcgggcccaggcagctggacttctccgccgttgctgctgctgtccacgtgcccgggcgccgcccgagcgccacgcctgctgtactcg

SEQ ID NO: 151052 - DNA, 122 bp, Homo sapiens
tttatttttgtagagacaggggtctcgccctgttgcccaggctagaaactgagtttcaaacgtttaaaaagaccttgtgaaagtccccactgccagtaacatgttcaaggtggtttagaggt

SEQ ID NO: 151053 - DNA, 122 bp, Homo sapiens
tcccagaaggaggtattcggcagaaatagtattttgtataaacagtttaggcacagtaagcgacttgatcagctagtggtaggaatccttctgaaatctaagtttccagacactagtcaaca

SEQ ID NO: 151054 - DNA, 122 bp, Homo sapiens
agatgggcttctgagcagctcagggccagccagaggtctggcgagaagggcgtaattaaacgaacccgcgccggtttcctcagggccccccggggctccgcttcgccccagcgggcctcggc

SEQ ID NO: 151055 - DNA, 122 bp, Homo sapiens
atcagctggccccggccccagactccgtctacactggcacagacaggtggagtacaaagccggcttcctggatgattcaggccccaaatcgtaggtagaaatgtgcaagtaatggaccttcg

SEQ ID NO: 151056 - DNA, 122 bp, Homo sapiens
gggagacccgttctgcattagaggattttatttcctcccgttgaaggggtgggcaggaggcgtgttagaatttaacagattatagggaattcggactttattctagatgttttgaggaatga

SEQ ID NO: 151057 - DNA, 122 bp, Homo sapiens
tgcaggactcagcgtttttacctgagctcagtagctggggagcccactagtgctggggagcgagccgtggtttccattcctgggtgatggagtcatgggagaaactgcagtgagcaaacaca

SEQ ID NO: 151058 - DNA, 122 bp, Homo sapiens
gtgaggagggcgaaactatctccaagcttcttagcgtgtccgctggaaaccaatccccagcgtctccgacttggatgtcaacggcgggaatggacggagtcacagcgccggcctccttctgg

SEQ ID NO: 151059 - DNA, 122 bp, Homo sapiens
cggctccgcggggaccctccacagttccggactccagcccagcgccggcttcagggcgtgcgaccctgagcttggtttaacgctccgccaccgcggccttgaaattcacaatttgtgaacaa

SEQ ID NO: 151060 - DNA, 122 bp, Homo sapiens
tcacagtccatcagctgggccagaggactctctctaggcagcttgtctaggtaaacttcccggtcgaagtgcgccccgttccgatcagtggggtccagggggtcgggccccgtggggagtcc

SEQ ID NO: 151061 - DNA, 122 bp, Homo sapiens
agatctcatatgtcacccggcagatctcaatgcattgggaggcgcatggattggatggaccgaggcaggtctcgcaatggtctaatgtattttattcatagcatgtggactattgtcagagg

SEQ ID NO: 151062 - DNA, 122 bp, Homo sapiens
gcagagctcaggttgtcgtggggtcccgctgcccacgtcagactggaggtgagggatgggcggggcctgacagcaggcctggaaggaacaggatgtctatgctggagatagagggagaggac

SEQ ID NO: 151063 - DNA, 122 bp, Homo sapiens
gaatgtagaaactaccattcaatcctcaaagactgagtcacacccttctctgctctcatccggagggctgagtccctgagacccagcctcagctctgagacagccccctcggttctgccccc

SEQ ID NO: 151064 - DNA, 122 bp, Homo sapiens
tccggggcctcgattaaccaggaggaggtggctgctgtgccccaacccaggtgacagattcgggtgccggcacctcccctgagtctcagagtccagggagtcacaattctacagggacaaca

SEQ ID NO: 151065 - DNA, 122 bp, Homo sapiens
tcatctcactgggaagcgccagacagtacgtgcaggacagtgggtgcagcgcaccatgtgcgagccaaagcagggcgaggcatcgcctcacccaggaagcacaaggggtcagggaattccct

SEQ ID NO: 151066 - DNA, 122 bp, Homo sapiens
agatttccagagccatgggagccggaagtccaaggaactgtacctccatcatgacgactccggttacgtaaaaacattcaaacagaaaatgctggccaggctcatgcctgtaatcccagcac

SEQ ID NO: 151067 - DNA, 122 bp, Homo sapiens
ctgtagagaagctggggcgggcggtgggcacgtcaggggtagatgcggaaggggtggacgcggcacgaccctgcttcttaccctgattcttcctaggcagtgctgacagcatctgttttatg

SEQ ID NO: 151068 - DNA, 122 bp, Homo sapiens
gagaagggaacttccacatcatcccaaaaccaaatttgcttgatgccctgcatgtgagcccgtataatctgtcttcaattaacgaactcttcctgagctttcctaaggcaacccttccactt

SEQ ID NO: 151069 - DNA, 122 bp, Homo sapiens
aatcatttgcagggatggttacacctgagttcttacaacctgggcttgaggtaggaagtgcgtacatagcctgcagacctttgccacatcctccccatagacagccccaaccctgccccgtc

SEQ ID NO: 151070 - DNA, 122 bp, Homo sapiens
tttcagtcttgaaatcttgttttatgagtcaccttctagaaaagaggtaggaatatttttcggagtagtgtggctattaccatgtttgctgtattgaggaagcggtattctaatggggtttc

SEQ ID NO: 151071 - DNA, 122 bp, Homo sapiens
gtccaatggagcgatgtgctgacctcagagcaggaaggggagcccagatcaggccaggcacgactgcaccaagaaggagaggcagttgtccttcaggggcccggaattagggatgagacatg

SEQ ID NO: 151072 - DNA, 122 bp, Homo sapiens
ggactccaccctggtctgaccctgagcatctctgagcacttggaaggggtccacagcacccgggagtggccggtgctgtggagctgaagttgatgagcttgtgaaatgctgaagcctccctg

SEQ ID NO: 151073 - DNA, 122 bp, Homo sapiens
aaaatggaccacctcgcgcgccagtcgtgttactcactaatatgcactagggagcctaggcgggatgcttgcctggccccagagtagctctctccgggtgctggcacccgagaaaacctctt

SEQ ID NO: 151074 - DNA, 122 bp, Homo sapiens
ctaagagcaaggctggaaggaaagatgagatccttgataaccgcactgtgtggctggggtcgtggacagtgtggttttcccctggaactgggcatctaataacacaagcacgtgctttcacc

SEQ ID NO: 151075 - DNA, 122 bp, Homo sapiens
tggggctccaagggggtctctgccgggtctgcgggagtcgttagtgtgttggggagtccccgagaggtccccggggtttcctgggagggcagctggggagcctctggggtgagggtcttctg

SEQ ID NO: 151076 - DNA, 122 bp, Homo sapiens
ttctcatccccagagagcccagctacacagaattgaagggttttctcattcatcttcctgcgctcaccctgaagactgggcctatgtcatctgctaaccactgtccccccagcactcacagt

SEQ ID NO: 151077 - DNA, 122 bp, Homo sapiens
ctaaacagccttgtcctgcttggcctttggtagtggcctctttccttgattgccaaaggtcgcagctggtccattttcttggcttgacctgtgcctaagggtctctgggagttttgggcctc

SEQ ID NO: 151078 - DNA, 122 bp, Homo sapiens
tcctaggcccccgccttcagctctccagttcatttcccgccttgttcccattgccacctgcgggcttggagggccacctgacattctgtcctttgggtcccctgtgactccagagctccttc

SEQ ID NO: 151079 - DNA, 122 bp, Homo sapiens
tccacttccctgaggcggggtcccgcactaggatctccgtggtggtccctcgaaggagagcgttagagatcccgccgccatgttgtgtccctgtcaccctagcaaccgtcaggccctgaacg

SEQ ID NO: 151080 - DNA, 122 bp, Homo sapiens
ggggtcagggagttccctttcctagtcaaagaaaggggtgatggacagcacctggaaaatcgggtcactctcacccgaatatcgcgcttttgggacggccttaaaaaaacggcgcaccacga

SEQ ID NO: 151081 - DNA, 122 bp, Homo sapiens
cactccagctgtggtgatggctgtctttaaaaaaaaaaaaaaaatcctgaagagacgattcgtttttgaagaatacatttgtgagaagatcccaggcagagtcagagattaacacataaaat

SEQ ID NO: 151082 - DNA, 122 bp, Homo sapiens
ggcggcgggcgcggcgctgccaatcgcagacaaaggccgtcccagtgaatcatgtggtgccgggggaggaagtgcggcttgttttctttcctccagtctcggggctgcaggctgagcgcgat

SEQ ID NO: 151083 - DNA, 122 bp, Homo sapiens
agagggcagtggacgggcagcttggctgtgctgttgagcctgagggctgagaggacaccccggggcagtgtaaaggagactggacttagcaattggtaagaaaagttggataaagagagggt

SEQ ID NO: 151084 - DNA, 122 bp, Homo sapiens
aggctgaggcaggagaatgacgtgaacccggcaggcggagtttgcagtgagcccagatcgcgccactacactccagcctgggcgacagagtgagactccatctcaaaaaaaaaaaaaaaaaa

SEQ ID NO: 151085 - DNA, 122 bp, Homo sapiens
gtcctgcactttttatatgttcctagtagctagcacagttatcctagcttttgtggaagtcgtatctccctgcaatgggaaaattaaattttaaaattgtattgaaaacacactatgtgcca

SEQ ID NO: 151086 - DNA, 122 bp, Homo sapiens
agcgcctgctgccacgtcagcgagtgcatgtactgctccgtgttgatgatgcggatctcacgctccagctcggggatgatggcgcctgtgcgccagccgtgccgcagcatgagatcctggtg

SEQ ID NO: 151087 - DNA, 122 bp, Homo sapiens
tctccctccccatgcccataccccttcctgggcctcaggccctgattgctatggtcaggccggccactaaccaggctgcctccattccagctccacgtcccacacccaagggcccagctggc

SEQ ID NO: 151088 - DNA, 122 bp, Homo sapiens
ccgggatcggtgggatgagggtgggagcatttcagcgtgtccgcgacttgccgccgccgccgccatctagccaggaggaaaaagggacagccaactgggctcccacggagcgggcggccgcg

SEQ ID NO: 151089 - DNA, 122 bp, Homo sapiens
taacctcactctgctttataaatggaaaaaccagaaataccttcaggagcagcctttcaccgcccaagaggcctctgcgtctgcacgtggccgccggggcagggtgccggggcttctggtca

SEQ ID NO: 151090 - DNA, 122 bp, Homo sapiens
tgaacttctaccatttccactggatattgattaacttccctgagcctcagtttcctcattcgtttatgagagtagcccaggaggcatctacccctcccaacccgccaggattgctgagagga

SEQ ID NO: 151091 - DNA, 122 bp, Homo sapiens
ggggcggtagtcgggggtggtgggagaaggaggaggcggcgaatcacttataaatggcgccgaagcaggacccgaagcctaaattccaggagggtgagtgtgcgcctttgggaaaaaggcac

SEQ ID NO: 151092 - DNA, 122 bp, Homo sapiens
ggtgtggagggagaggcccaggcaggaactggggctgcgcgcatggcactcgagggccagcgcgagttccgggtgcgcggggtcttggcggccccgcactccgagcggccggctggcgccgt

SEQ ID NO: 151093 - DNA, 122 bp, Homo sapiens
tctgggcctgaccatccttggcaagcatctctactggatcgaccgccagcagcagatgatcgagcgtgtggagaagaccaccggggacaagcggactcgcatccagggccgtgtcgcccacc

SEQ ID NO: 151094 - DNA, 122 bp, Homo sapiens
ctcggttttaaatagcaggaggaggggaatcaatgtttgattcaggtgtttcgaggaccacgccacaggcaatgagcagaactcttcatgttgaaactgttctgctacagtactagattgct

SEQ ID NO: 151095 - DNA, 122 bp, Homo sapiens
gtctgggactggggtccattttcccactgacatcctcatctcccaccccaccgcagcagccgacccaaggttttggcttcatctctgagccgacccgtacggtgtgaactctctaatttgcg

SEQ ID NO: 151096 - DNA, 122 bp, Homo sapiens
aatgcacaggacaacacaataatgttacaaatgaggctgcaaactacccctgaatggccacgatttcctggagcttggccctggctatagcaggacccacaaccctcgggctttcctcctgg

SEQ ID NO: 151097 - DNA, 122 bp, Homo sapiens
tcatttcttgagacctctccatctgattcttagacgtctacttcacctcattttaagtgccgtacagtgttctgttgtatgaacacaccatggtttacccatctttctgatttatgctgggt

SEQ ID NO: 151098 - DNA, 122 bp, Homo sapiens
agacttgcagaactcgggccccctggaggagacctaaccgccacggtcttggggaggttccggagggcctcggttgtctgcactcccaacaccaagaaacccctgagacgcgaagctgccag

SEQ ID NO: 151099 - DNA, 122 bp, Homo sapiens
gaggcccacctggccccccacctgtgatggtgacagtgaagtaggcacactcatctccagcgacgcactgaaactcgcccccgtctgagggctgggtggcgggcagcaccaggcggcgatgg

SEQ ID NO: 151100 - DNA, 122 bp, Homo sapiens
acgtgtccgggcctggtcctttcggggacctttggggaccgtccaggaataagcccaaagcgcacaacccgtctttcagaaaagcggcgtgacagggaaaacagcgaacagctctaagggga

SEQ ID NO: 151101 - DNA, 122 bp, Homo sapiens
tagagccccccggggcgatgggctggcactgtggttggaggagcctccggttccgtaggacgccttcaccacgaggagtagccccgcatcgtagagggaggcagccacctgggacgaggcca

SEQ ID NO: 151102 - DNA, 122 bp, Homo sapiens
cttctccatctccatgtcaggacgtgcactcgccgatgaagtgtccacccaagatggcgacgggtgagcacgggcacgtgtggcccgggcgaggtctgtgtggtgctgaacgcctcctctgc

SEQ ID NO: 151103 - DNA, 122 bp, Homo sapiens
gattcctaggtgcagctattcccccacattgcccttactggatttagggcccatcataggcgcagagtaaagatttttccatgggattatttgatgtaaacttttagttgcagtgtattcaa

SEQ ID NO: 151104 - DNA, 122 bp, Homo sapiens
tagggcccgcccaggccccaaccaccaccctggaaacagctgtgatggctctgcccagggcgccgaggccgggggaagggatctccagggagaggccctggatggggagaggaggtgatgag

SEQ ID NO: 151105 - DNA, 122 bp, Homo sapiens
gaactcagtctgggacgcatccccggggtgaagaggagacggtggtcttgaggcccaaaccgccaccccgagcctggatgcagtgcgcaggtccctgaggccggccttccttctggtcctct

SEQ ID NO: 151106 - DNA, 122 bp, Homo sapiens
ccagactattattaaacttgcacttcctgagcagatactaatatagcaatagatggggtgcgagggggctccagtatcctgagagggaggggccggaagcacgctgcagaatgtcaacatgc

SEQ ID NO: 151107 - DNA, 122 bp, Homo sapiens
cgggactggcgggggcggggcctggcaggaatcggcaactcgttgggatgggtgagcgggcggggcggggccggagggggcggggcctggtctgcacggggcggaacagagcctcaggatga

SEQ ID NO: 151108 - DNA, 122 bp, Homo sapiens
tgtccctgcgaaatactaagaacacctagggtgtgctcactgtgggggccagtttctcctcggaacatgacaatgaagctcttttagagaaaagacctttgtagattcaacaattatgatag

SEQ ID NO: 151109 - DNA, 122 bp, Homo sapiens
ggaacgtgtccgggcaggttcccagcgcagctgtgggtctgcgcttggccgagcgactgccgggtcacgacttctgcgtcttcttaacccgtctttggcattgcccgggccccgagtcacac

SEQ ID NO: 151110 - DNA, 122 bp, Homo sapiens
ccgcgcgcggctgagtgcggactggagtgggaacccgggtccccgcgcttagagaacacgcgatgaccacgtggagcctccggcggaggccggcccgcacgctgggactcctgctgctggtc

SEQ ID NO: 151111 - DNA, 122 bp, Homo sapiens
agatcaaatgcccactgctatcctgtcacttgtggcctgaataaaaagggtcatgatattcgaaacattccccttttgtctcttctttcagctggagcagcgatcatgacgatcctttaagt

SEQ ID NO: 151112 - DNA, 122 bp, Homo sapiens
cgtcgggtccctcagcacagcgcggccctgtcgctctcctgaccacgcccctcatggccccgccctatgcctcgcccctggccctcgcgccccgcggctccctccgccgagtccaggcccga

SEQ ID NO: 151113 - DNA, 122 bp, Homo sapiens
ctgccgggggtgggggcttcctgcgtctctccaggaccgcgtgcttgaggtcatggagggcggggggtcctgtgtgctcggaattgacttcttactccccttccggtccaggtgggcgcatg

SEQ ID NO: 151114 - DNA, 122 bp, Homo sapiens
tttcaggaagttagccagtttctcttctcggccacctcctgcatagagggtaccattctgcgctgctgcaagttacggaatgaaaaattagaacaacagaaacatggtaagccacttctatt

SEQ ID NO: 151115 - DNA, 122 bp, Homo sapiens
gaattaaaaagaaaaaagctccgctgcgtcatttcggttttgttgggagcggcgaggctccggggctgctgagcacatcgagagcgccccctaggcgctggcacgtggctctgcaggaggaa

SEQ ID NO: 151116 - DNA, 122 bp, Homo sapiens
atgtgggaacgtatacatctcttacaactattaaattcatttttaaaaaataataactcccgagccatcactccttaaagaatgtggtagtggtacaagtttaaagaaagtcttttgagaac

SEQ ID NO: 151117 - DNA, 122 bp, Homo sapiens
caaagggaacagacaataaaaggaatgacttcacatttcacagcaagaattctctggcctcggagaacactagatacctctggaccacacatccctttggcaaaatacttttctcatctaca

SEQ ID NO: 151118 - DNA, 122 bp, Homo sapiens
tcgagggaaggtggtacttcaggttcctcgagggagcggcttcggtgttgtttctctcaccgtcccgccggcgtcaccggtgctgcgtgctgagtgggctgggacgtaggaaggcctggccg

SEQ ID NO: 151119 - DNA, 122 bp, Homo sapiens
gagggggacgcacttcagcgctagcaatgtctttcaggcctcaggactccagctgagcagcgaggcagagtccagatggcaaagggaggctctggagggtttcacaaatgggaccatcctgt

SEQ ID NO: 151120 - DNA, 122 bp, Homo sapiens
gtcacataaactgggtgctgggcttaatgatgtgttgcaatgtcccatgtgggcagtgcccggacaaaagagaatagtcacatcacctaaatggtgggcacagagatatgttacaatgccct

SEQ ID NO: 151121 - DNA, 122 bp, Homo sapiens
ttttaatgttaatgcaggccagccatgcctgaattccaaaagaaggaagatatgatgagacgtgtctgaccacccatttccatcatggcctgaactagtgtttcaggtttacttagaatgcc

SEQ ID NO: 151122 - DNA, 122 bp, Homo sapiens
aactgtaaattacaaccacaaggatataccacattagaaagactgacaatacctaatgtccggaaggctgtggcacaaccataataactcccataccttgctagttggagtgtaaaatggta

SEQ ID NO: 151123 - DNA, 122 bp, Homo sapiens
catcgacctcgctgccttctggcttttctcaaagccttttctccagagccagacagcagacgccccggcgatgccttcgccgcccatttggccgaggtagcccaggcctgcccttgctgcct

SEQ ID NO: 151124 - DNA, 122 bp, Homo sapiens
acatgctgctggccaaggggcccgagggggtcgctgaggtgcaggcatggggagtgcagccggggatgccgtcctgagcccagcgccggccagcgggaggggcagcatggacaagggctggg

SEQ ID NO: 151125 - DNA, 122 bp, Homo sapiens
ggcactgcgggagccatctcctttggcatcgccccttgtctcgggccggtggggagtgggcgagggttatagtcactctcccgactcagggactgcccatcccggcacccagtcctcatccc

SEQ ID NO: 151126 - DNA, 122 bp, Homo sapiens
ggtaaatgttccctctttgcaggtggtcgtagataatttcaattcaccctctgctttcttcgaactgacgaaggtgtagctttgatattttcccctcttcatgttacatgatcatttattct

SEQ ID NO: 151127 - DNA, 122 bp, Homo sapiens
ttacagccacactttgtacatcacactttccagcagatgtctggtggaggggtaagtggacggatggaagatttgagcctgaaaagtggaaaggactcaaaactcaagaaagagttgggaac

SEQ ID NO: 151128 - DNA, 122 bp, Homo sapiens
caagactccaagcttattggagggctatcttgccttacggctccaagccgctttttacggcgtttttcagctcgccattcacttcgctgtgaagatggcgtcgggcagcggggtaggtgttg

SEQ ID NO: 151129 - DNA, 122 bp, Homo sapiens
aagtgacattcttttatcaatcaaccttatgccattagttaccacagagagataacattccgctggcataatggaatttctaaaagatggaccattatttccataataataccattataata

SEQ ID NO: 151130 - DNA, 122 bp, Homo sapiens
acgagacactgctgagctggaagacttcgcgggccacaggcacagccttcctgctgctggcggcgctgctggggctgcctggcaacggcttcgtggtgtggagcttggcgggctggcggcct

SEQ ID NO: 151131 - DNA, 122 bp, Homo sapiens
atcagctatttcaaaggctgttgagaggctgaagacagaaaagatcactgcatttggcaacgtggaggtcactagagcccctgataatgtcagtttcagggacattggtgaatagagatgat

SEQ ID NO: 151132 - DNA, 122 bp, Homo sapiens
gtgcgaatgggagagggcaacatgctctataaaagcattaagaaggagcttgtcgtgcttcggctggccagtctgttgtttaagcggtttctttcactgagagatgagttacccttctctga

SEQ ID NO: 151133 - DNA, 122 bp, Homo sapiens
gtgtgtgtgtgtgtgtgtgtgtgtgtgtgtgtgtgtgtgtgtctgtgtgtctcactctgtcgcccagactagagtgcaatggggcaatctctgctcactgcaacctccacctcccaggttca

SEQ ID NO: 151134 - DNA, 122 bp, Homo sapiens
ctcgcctcctgccgcggccgcggccgccgccgccacagcggccgcggccgccaccgccgccgcctcagccaggcccagctgctttgccgccgagtccgagtcctccatccggactccgccga

SEQ ID NO: 151135 - DNA, 122 bp, Homo sapiens
caacacactttctctgttgccaggtaaccacttctccctcagcctagtctccaagggtcacgagccacttccgcctccccctctcgggcgctccaatcagcgacctgtgtagctgtcacgtg

SEQ ID NO: 151136 - DNA, 122 bp, Homo sapiens
cgtgcatgtctttaagatgtgagaggaaaccaaggtacccaaagaaaactcttgcaggcacgaggagaacctgcaaatacaaacagtggtcccggctagaaatccatttttttctcatcaac

SEQ ID NO: 151137 - DNA, 122 bp, Homo sapiens
ttggggcagaacttggaagtgtggcttagtcttgcacactaagtagactgtggtacgctacgcaagttccaaagcttttgtctaaccagcccgagagcttagcagttggggtgggaaaagga

SEQ ID NO: 151138 - DNA, 122 bp, Homo sapiens
ctggctccgcccccacagggagctgttaaaaatggcctccctctttctgagcctttgtcacgtgcgggctcccatccttcatgactgctttcacagcctgaggcggagctcacacacggacg

SEQ ID NO: 151139 - DNA, 122 bp, Homo sapiens
ccctcactcgatcacatctggaaagtcccttttgatatataagataacatttacaggttccggggattaggatgtatacctctgcggggtgggggcgttattcagcctttcacaggaagcct

SEQ ID NO: 151140 - DNA, 122 bp, Homo sapiens
atactcaggctctgagcgcactttggggtgcgcggattcgggcttcccgggattcgtctgcgcatgctcaagattcaggcggagcgccgggctgcagtgcgcggaggcccgctcccgggact

SEQ ID NO: 151141 - DNA, 122 bp, Homo sapiens
actcggaggagatcgccttctatgggggccatgaggtggggcaggttggggtgccgggcacggagggaagcgtgtggcagggaggcccgggggcaggcagccgtgagcggtggggacagtct

SEQ ID NO: 151142 - DNA, 122 bp, Homo sapiens
atcccggagaagccggcgggagccccggggagagttctcttttctttgtgaagggcagggcgccctggaatgggttcgccccgagagaggggcccgtgccttggaaagcgtcgcggttctgg

SEQ ID NO: 151143 - DNA, 122 bp, Homo sapiens
gggaggtgaggggcgcctctgcccggccccccctactgggaagtgaggagcccctctgcccggccaccaccccgtctgggaggtgagcccaaccgctcattgagaacgggccaggatgacaa

SEQ ID NO: 151144 - DNA, 122 bp, Homo sapiens
tttagttcctcaccatctgggctccgttaatgaaggatgtgattccctttggcggaattccgtttctgatatcatttgttatgtgggttcttgtttcaagcttgatgtgaaggctggtaggg

SEQ ID NO: 151145 - DNA, 122 bp, Homo sapiens
acttcaggttagtttcgctgaacaattgtttctttcacgcaatccctgaggggtgttttgcggggggtgtgggggaggaagagacaaaggaggccgaaagaaaccgatcacactggggcttg

SEQ ID NO: 151146 - DNA, 122 bp, Homo sapiens
tgtgtcccgcctcccacctcggggcttcctgtgagcaacagagcccggaccagggcctcccggggcatctgaggaatgcgaaacctgtgtccaaggccctgcccacctgaggtgcttttctg

SEQ ID NO: 151147 - DNA, 122 bp, Homo sapiens
tttgcttggaaacagtagccttggaaaaagatctggtctcttggtggttcttgcgccccccggcccccgcccccctcctggttcctgacggcgtaggccaagggcagctgtctgtcgaagct

SEQ ID NO: 151148 - DNA, 122 bp, Homo sapiens
ccaggaatcttcgttttcacaaacctccaaacgaatataaagatcgtagattatatagaccgtagggccgatgtatataatctattagggccgcgtcggccttgcaggcgggtctccaagtg

SEQ ID NO: 151149 - DNA, 122 bp, Homo sapiens
ggagagcccttcgagtattctctccgctccacaccgctcggctgcacccagcggccgccgcggcccgaatgtcgtccagggtccccgcccatatgacaaacactttccgccggaaggcgccc

SEQ ID NO: 151150 - DNA, 122 bp, Homo sapiens
actggccctcgcttgtgagtgacggagaaacccgcggcactggcccttgcttgtgagtgacggagaaacccacggcaccggccctcgcttgtgagtgcacggcttgtggtgtcaccgtgtgc

SEQ ID NO: 151151 - DNA, 122 bp, Homo sapiens
cggcagagggaggggccgggggccggggaggttttgagggaggtctttggctttttttggcggagctggggcgccctccggaagcgtttccaactttccagaagtttctcgggacgggcagg

SEQ ID NO: 151152 - DNA, 122 bp, Homo sapiens
ctcatcttgctggggtctctttcctcgcctgccaaaagtgaggccgccatgtagtaagaccgtttctgtgacagttgtctagaatttggctgctctttattctccctagaattcagaagatc

SEQ ID NO: 151153 - DNA, 122 bp, Homo sapiens
cgcagtgatctggggatggggaagagggacgggcgctagcggtggcgctccagctggaaccgatcatgcctatgtggaggtgggggatttgaacttttattttatatgaaattaataaggat

SEQ ID NO: 151154 - DNA, 122 bp, Homo sapiens
tgtgcagactggagctcagggtctgggaggcgtagggctcggccgcgtggaaatccagtccggctgaccgactggagggcagcccaggcccggccagggtgactcgctaagtgtggttgggg

SEQ ID NO: 151155 - DNA, 122 bp, Homo sapiens
taacatttccaggcaagcctgttagtttatgtaatactcttgccttatcacctcctgagacggctattttgcctcttctattctcttctcaaatcctcaacatgcccttctcatcttctatt

SEQ ID NO: 151156 - DNA, 122 bp, Homo sapiens
gcctgcctggagctctctagaatgctcatcactggtgatgtactcaaactcaggtggccacggtgccacaaaatgtaggctgcccagaatcagtcagaagggaggggtgctgggcttcttgg

SEQ ID NO: 151157 - DNA, 122 bp, Homo sapiens
tgctgctgactagttcacgcagttaccaccaaagcgcatggacgggacccagagcatgagcgtgtgcccactatcggggacagaaacctaccgcgttcgagttttgacatatttctcgcagt

SEQ ID NO: 151158 - DNA, 122 bp, Homo sapiens
cagcgtgtcacggggaccaggcggggtttaaggctgagggctcggggcgggcagggcctccggcctcagtcaaagccgtgccagtggctgtgctgcgagtcttattccagcgcggcgcccga

SEQ ID NO: 151159 - DNA, 122 bp, Homo sapiens
tgcagtggcgctgacgtttacaagtggtggacaaaacgccacttgcaacactggaagaagcggaaaaccccacccactctggaacaacagcgatcagccccgaatatagggtccccttgccg

SEQ ID NO: 151160 - DNA, 122 bp, Homo sapiens
ctgacttaggaatgtggtctgagtcatagaacacctcagaaagtgggtaaagcttattatcgaagctgggaagggccacatcctttattggggctcaaggcatttaatcaccaatgattcac

SEQ ID NO: 151161 - DNA, 122 bp, Homo sapiens
atgaatcagctctgtctagacaaaaggcaaggtaaaacccttgggctgttacacaacctccgcctcctgggttcaagcgattctcttgcctcagcctccggagtagctgggactacaagtgc

SEQ ID NO: 151162 - DNA, 122 bp, Homo sapiens
ttttaaacaaactgggagggagggtcaggtgggcgactctttgaatgacacagctcccttcgtatgaacgagctcttcctggtttcgttgctcagtttatttgccaggtagcagactcctag

SEQ ID NO: 151163 - DNA, 122 bp, Homo sapiens
tggggtctcctgggagtgcaggagctcctgggctcccagcagtgctgtttgccctctgctcgtggggattgtgatgcagagatgctgagaggcaaagccaaggccccccactcccatttgcc

SEQ ID NO: 151164 - DNA, 122 bp, Homo sapiens
accctcaggctcagccctggggatgcctccccgacggctcctgtggctccgtgccccgcgcgcccctggatcacctggagttgtccccaccgtgttccctgctgcagtgagtcccatgcagg

SEQ ID NO: 151165 - DNA, 122 bp, Homo sapiens
aagggcaggtggccgggtgggacgcgccccggccggtcccccagcgccccctccgctgcgcgcacccgcgcgcacacacgtgcaggcgcactccccacccgccgccatccctccttacctcg

SEQ ID NO: 151166 - DNA, 122 bp, Homo sapiens
gtgctggcactactttgaggaaaggagttacccagcgagggagaaaggggatggggtgggcgggaagcggccactcaggcgttcctgattagctctacttaatgtgattatctatattttgt

SEQ ID NO: 151167 - DNA, 122 bp, Homo sapiens
gtctggcttgttcccctccctttgctttccggtgggcaacaggggtgggtaactgtgttccggactcgcccgcgggccgggcggagccagctacctccaggcgaccctacccaccccgcgat

SEQ ID NO: 151168 - DNA, 122 bp, Homo sapiens
tgcgccggcggccaagcccggtccgggtataaatagctcggtccgcggtggcggggggcgcgggctatatttggtggggctgctgcagccctccctgtatgggtggcctccccgagggagtg

SEQ ID NO: 151169 - DNA, 122 bp, Homo sapiens
atcttaacccttagaagtgtcacagagcctcatatgagctttcaagtaagctgtggaagtcgcgattcccaggtaagggacgggaaactccggatgtcctgcgagcccacaccccagatggc

SEQ ID NO: 151170 - DNA, 122 bp, Homo sapiens
ctggcgaattttttaattttttgtcaacactgggtgtcactatgtcacccaggctggtctcgaacttctgggctcaagcagtcctcactccttggcctcccaaagtgttgggattacaggca

SEQ ID NO: 151171 - DNA, 122 bp, Homo sapiens
atttacagatgaaatgaaatgatgtctaagagttccttcaaagcaatagagtctggaaaacgagggtggtaatattgattaaacaaggatggctttgaacagctcatggctgaagtcgggta

SEQ ID NO: 151172 - DNA, 122 bp, Homo sapiens
tcccgatcccgctgcagccggcgtgcccgctgctcgtctgtctcctgcatgcgctgcaagcgcttggcttcacggtccctcatgcgcctcacctcccgctcctcgggggtctcattgtcccg

SEQ ID NO: 151173 - DNA, 122 bp, Homo sapiens
atggtgtggtaccggcaaagcctcagtacatcagaaggacacacaaatattcttaggcttcgacaatattgaacaaagtctttagattatttctcttaatgttcttcctcccccactcacaa

SEQ ID NO: 151174 - DNA, 122 bp, Homo sapiens
gtgactgttacccctggggaatggggcaggtaagaatcagagccaagcggggacccagcccggggaggtgaagctgcaggtgcagccacgtgtgggagtcttggaaatggaccagtggatgg

SEQ ID NO: 151175 - DNA, 122 bp, Homo sapiens
gagggcgtgaggaggagcgagggggctgcatggctggagtgagggatcaggggcagggcgcgagatggcctcacacagggaagagagggcccctcctgcagggcctcacctgggccacagga

SEQ ID NO: 151176 - DNA, 122 bp, Homo sapiens
gttcacagcatgttgacaaagtgccccactataaagactaacagggtccacagtgggagacgccttaattctgccttaatgatgctgggcactggtcatcattttctggctcaactgtagga

SEQ ID NO: 151177 - DNA, 122 bp, Homo sapiens
catcacagagcctggtaagaagcagtaggtgacagtgaatggtttttctcaataaatctacgtgcccaagaagggagacatggtcttggcagcatcaccagtcaacatcagagttcgtccaa

SEQ ID NO: 151178 - DNA, 122 bp, Homo sapiens
aggaggtgatacggttgggctgatgctaggccaaagaagaattacagtagtgaacgatttcgcctcagtgcccatctaggcgctgccccttggttcagttcttcatggtttccagggaggca

SEQ ID NO: 151179 - DNA, 122 bp, Homo sapiens
ttgatgatttcttaaagatcgatgaactgctggtttctttttaaagggcattcacaaaagcgaccaaaacttgggctaaagtattgctttcaaatatacttatgtgtagcttgtatttgtga

SEQ ID NO: 151180 - DNA, 122 bp, Homo sapiens
taaccttccatggaattaggctttcacagagcacactgtgggaaacacagctctcatgtgcgatcagcaaaccaacctgtattagggtgtccacggagcactgttttactctgtgcatataa

SEQ ID NO: 151181 - DNA, 122 bp, Homo sapiens
cggcagccagtggtggaggctgtgtgttgatatctgcaggcctggcctgccatctgaccccggtgttgccactccacatggattgcctctcagccagcctcttctcagagaacaaggacatt

SEQ ID NO: 151182 - DNA, 122 bp, Homo sapiens
tattgagagcctactgagtccatggtattgtatccacacagactgcatgcacatgaatgtcgctagttactaatcatatttatttgctaaagtcatctcaacaggatttttttaaaaaaaac

SEQ ID NO: 151183 - DNA, 122 bp, Homo sapiens
aggtgggcggcgagaggctagctatcgccccactctgcttcttatgagcgtgacttggcgcgttagcatccctggaaatgaccataaaaatcagacccagggttcacacctttggctagctc

SEQ ID NO: 151184 - DNA, 122 bp, Homo sapiens
ttcagtggtaccccaggtggtagcttcctatcaagtttcactagcaccctagaagtttcacggccatcctagtggggggcttcctagcaagtcttgccagcactccagcaggcagtttactg

SEQ ID NO: 151185 - DNA, 122 bp, Homo sapiens
actccgtgggctcctgtgccgcgggagcctcccggaggagcgccgccccctgctccacggcgcccagtcccatcaaccacccaaggcctgaggagtggggggcgaacggcgcgggactggca

SEQ ID NO: 151186 - DNA, 122 bp, Homo sapiens
accagctgtgaggttgcatctcgaagtgtaggcagtcatctactttaaccgacagctccgcgatcccagtcagtgggaccacatctgtgatttgaagagctgccactggtgctctgtactgt

SEQ ID NO: 151187 - DNA, 122 bp, Homo sapiens
ctcctccccgtctgtccgtccgtccgtccgtccgcccgcccgcccgcccgcccgcgcttccgtcctgtccagccgccagtcctccagcccgtgtccccgctccgcccgctttgtctctcccc

SEQ ID NO: 151188 - DNA, 122 bp, Homo sapiens
gccagcgccgaaagccgacgccggaagccccgccccacgcagggcccgcccgaacgttcccgttcctgggccgccattggccaagtctgaacggccccacgtcgaggctccttatgggaaat

SEQ ID NO: 151189 - DNA, 122 bp, Homo sapiens
cgctgcccagatcctcccggaccccagaccctccgccgcgggtgagcctcccggccctcacgtgccctaggctgccagccggggactggacccttggaggaccttgagcagcggggttgggg

SEQ ID NO: 151190 - DNA, 122 bp, Homo sapiens
ccagaggtgattgggctcagggaagtagagccgtggcaccacagagaaaaggaaggggagcgcccttggtcccagtggaggtgagtttccaaacttcatccctcaaacaatggggccaccac

SEQ ID NO: 151191 - DNA, 122 bp, Homo sapiens
tccacagctgggagggcgctggactctgctgccccctgctggtggctgcaggaaattcagcgagcaggacagctggccggtcctggagaagagacggggggaaaggcctcgcacagaaagaa

SEQ ID NO: 151192 - DNA, 122 bp, Homo sapiens
ctctacagctcacccgggccctctcataggtctgggcgcctaacagctcagctgcgacctcgcctcaaacgcgtggaactacacttcccagaaagccagcgtcctcccgtggactccatttc

SEQ ID NO: 151193 - DNA, 122 bp, Homo sapiens
atgaggtgaataggaggtgatcacaacaccactccttcctctcccatgggaatctagagccgcctttagtgcctttccttatttctcacttatacctactcttcctgtccttacctcccaaa

SEQ ID NO: 151194 - DNA, 122 bp, Homo sapiens
gtaagaacataaacacaccagttatcaatctcccctttccattcgggattcaagaacctacgtgtggccccaaggaatagtctgtagaagtgcctctgccttccaagctgcccacctaactt

SEQ ID NO: 151195 - DNA, 122 bp, Homo sapiens
ccggccaccccggctctcggtttgggttgattcctctcctttttgctcttggttttccgacgggtacgaggctggcccggcaccctgtcccccgggagcctcactcttccagcaggaccaga

SEQ ID NO: 151196 - DNA, 122 bp, Homo sapiens
aatttttttcaactatttagaaatgtaaacataattcttagcttgcaagtcatacaaaaacgggcatcaggctgcttttggcccactggctgttgtttgccaacccctgatatggagattag

SEQ ID NO: 151197 - DNA, 122 bp, Homo sapiens
gggggactcggtattctcatctgtgaaacggggctttgggttcaagcgctccaggaggtccgctggaactctggcaaacgcgcagctctaagcagaggaagtgcagcgagcggggacccggg

SEQ ID NO: 151198 - DNA, 122 bp, Homo sapiens
cggccctgggcggcccctccctccctccctccctccctccggctccccccgcccccagcccgtcttgttgtgacagttcctgatactgtttattgaggtgcatgtcaggtataattagcaat

SEQ ID NO: 151199 - DNA, 122 bp, Homo sapiens
gtgatctccaaacccaaaagtaatctttcagttcttctgatagtccccagcactttgcttcgacctttgtagcaattctacttcagcctgaaatttcttgtatgtacagcctgtagctccta

SEQ ID NO: 151200 - DNA, 122 bp, Homo sapiens
cccgttacccccatgccccggtctttccggtcaccttgtcccctgcctcgcattggccggcggccccgtcaccctgaccctggtcaccccatcagctgggtcaccccgttacccccatgccc

SEQ ID NO: 151201 - DNA, 122 bp, Homo sapiens
cacagctgtgcggctagagcgtgaaaacagcaggctctgaacgcctctggacgacacagtcggtgcaggagaaaaaacttctgcccacagacacggcagctgtacagctcagcgcccaacag

SEQ ID NO: 151202 - DNA, 122 bp, Homo sapiens
ctcctcccagcagatcctgtaaccactcatccgcttcctgtctctaaggagctgcctgtccggacatttcatgtgaatggactcacacacactgcggcctttggtgtctggctgctttcact

SEQ ID NO: 151203 - DNA, 122 bp, Homo sapiens
acaaaaatggtaagactgtttctggcctggagagggcttttgagaaaactgagactataacgaatgggaaagattcagaaaatgaacttcaagtcttgttcaactgatgacttaattctgta

SEQ ID NO: 151204 - DNA, 122 bp, Homo sapiens
aggtgcggtcgcagagcgtgcagcggaacgggcgctcgccagtgtggatgcgggcgtggccgctaagcaccgaggactgggtgaagcccttgccgcagatgccgcaatggtatggccgctcg

SEQ ID NO: 151205 - DNA, 122 bp, Homo sapiens
aggagacctcaactgtatctgaaacctgctatttcctttaaataagtacacacactcacacgcacatacacagagacacacaaacacatttggatacaaaatattcttaaatgtcaatatga

SEQ ID NO: 151206 - DNA, 122 bp, Homo sapiens
ggacagaggtgtgtcactgtctcgcgtgatgctacgtctctgccggggggagattcggtccgagtaggggccctgcaggtcagcctgggagtggcagctcactcgggagtcgagaagagtca

SEQ ID NO: 151207 - DNA, 122 bp, Homo sapiens
ttttgtggcaagtagaattccactgaacttgaactagagattgccttccaagttcaggtacgaccctttcacagggcagtctcaaaggggtctgggagagaaagacaagggcctcctgagct

SEQ ID NO: 151208 - DNA, 122 bp, Homo sapiens
gcagcgcgcgtcttggcgaccccagcgcagttcgaactactccggagtctggtgtggagccgagagggagccccgcacttttctccccgcggagctgcgctgagtctgaaataggtgtacgc

SEQ ID NO: 151209 - DNA, 122 bp, Homo sapiens
cccgccgggagcccggggcggggggtggaggggattgcggtgatggaagcgggggagaaccgggttcccaaattaccggtttccctttagacagccgccgtctgttgtcgcccgctcctcct

SEQ ID NO: 151210 - DNA, 122 bp, Homo sapiens
caaacaacatcagcctccacaaggagaaaaagacccaaaatctggagtatagccagcatacgcaaagtcctataggcttcctgaagttcctggcagccaaaagatctgtagggaggaggcag

SEQ ID NO: 151211 - DNA, 122 bp, Homo sapiens
gtgcaggagagctccccttgctggggctgccggctctgggcagggagcttccctggacaccgctcccgtcacgtcctcttcgccgctcccgggagagtcaccactctccggggacagacgcc

SEQ ID NO: 151212 - DNA, 122 bp, Homo sapiens
aacaggggtgaagaaactgcctggtaacttgcttgtcacttccaccccattcaatcagcacgaaggaaaggcagttcggcaacgctagactaaaacaatttagacccgtctcctgggacatt

SEQ ID NO: 151213 - DNA, 122 bp, Homo sapiens
cgccgggtgttgctgagtgaggacggggtgacgcctgcgccccctctcccgcgcggggtgcgccgcctcgccgccgaaaagttctcgactttagtttgtagaaatccgctttggtggtcccg

SEQ ID NO: 151214 - DNA, 122 bp, Homo sapiens
ggccgcgtcttcagagcctggcgagggtctcgcgctgctgggaaggcggagacgccggggcgcgcgtgcaccctcgcgcctgcagcgccgcgcacggccgccaggtgccgctgtggcgctca

SEQ ID NO: 151215 - DNA, 122 bp, Homo sapiens
aaaggaaaataatagcctacatttagttcttctaagcttcattccacaagagattgaaatcgaagtattctgggctggcacacgatagctggaacatcatattttattctagaaacacattt

SEQ ID NO: 151216 - DNA, 122 bp, Homo sapiens
cttcccattgtggggtggctcttccatctcatggcctccctgactcgtgctgcggagaaccggcaatcatcctcctgcatcttactctcttccggccagcagattgttttccccaactttat

SEQ ID NO: 151217 - DNA, 122 bp, Homo sapiens
tctctccccgcccctccccgtccctcccgccgaagctccgtcccgcccgcgggccggctccgccctcacctcccggccgcggctgccctctgcccgggttgtccaagatggagggcgctcca

SEQ ID NO: 151218 - DNA, 122 bp, Homo sapiens
aagtgatcaattcaagatatcctgagaaaaacagattgttttcaaaagtcacacatacatcggggaaactatactatgccaacaaattcacatatgtccaacaatagtctgttccaattgtt

SEQ ID NO: 151219 - DNA, 122 bp, Homo sapiens
ccggtttttccacctccttctgctgacattggaggacgggtatcattctttttggggggtcgtcgtgtgcactgcagggtgctgagcggcatgtctggtctggacccactcgatgccagcag

SEQ ID NO: 151220 - DNA, 122 bp, Homo sapiens
agaaacactgattacctgatctcaaacctcctttcccaggcaggattgcagccagggggccgtgaatgttggggtgaggcgtggttgtaggggaacactaactcttccccagggacctggga

SEQ ID NO: 151221 - DNA, 122 bp, Homo sapiens
tttgtatcaacatgaagctaagatacaatggcactctgtagcagcggttagagagaatcccgcaattgctctgttatcaaggaggaacaattgctaagttacagtgctaacaattgggaaaa

SEQ ID NO: 151222 - DNA, 122 bp, Homo sapiens
aaaagcatgtagatgggaatggaacatgtcaacaagtatgtattgagcacctagccagcacgggcatttttctaggtgctagggtacacaaactatttcctctgcctgggcacccttctgcc

SEQ ID NO: 151223 - DNA, 122 bp, Homo sapiens
caccgcaggaccgcaccgctggaccgcaccaccgtcctggcaggtgagcgtggagcctggcgctccctggcgacgaccctggtcagacttccaggagcgcccctgcgggtaaagtcacatgt

SEQ ID NO: 151224 - DNA, 122 bp, Homo sapiens
ttttgctggggcaatcagggaactgcgtctgcggatggctgccctcgggggaccattcgccggggcggcgcgccgctggggactcggcgtgaaccgggcagcgggcgcgcggtctcggagcc

SEQ ID NO: 151225 - DNA, 122 bp, Homo sapiens
gggcgtgtcgggcctgtcatcagcgcacgcgcaacactgccccagacgacgcgaggtgtgcggccgccactagacccggcccagcccgcgcccgccgtccgcagctcccagcgtgccccgcg

SEQ ID NO: 151226 - DNA, 122 bp, Homo sapiens
caaggtgaggggcgttgatattggggttttatggaggtcagacagtggttccagacccctcgaacccatagccaggcagatgagcaattcttactgcaccactgcagctgaagcagaggtga

SEQ ID NO: 151227 - DNA, 122 bp, Homo sapiens
tttctacttcttccctgggcttagaaggcaccttaggaaatgggacctggaggaggccttcgccgagctccagcggtcaggggcttcgcggtggacgagccgccaggcagaccctgactgag

SEQ ID NO: 151228 - DNA, 122 bp, Homo sapiens
ccctgcagggcagggctccggacctgcagcccgccatgcctgaatctctcaccccacccccgcctcctgcgcggcctgagcctccctgacaagcgccacccgtgctacaaggcgcctggtcc

SEQ ID NO: 151229 - DNA, 122 bp, Homo sapiens
ctggggaaggcgggagtcgaggagcgccctctgaggaaccagccaatgggaaggctcagccgccgtgaccgccttgctgattggctaaagccctgactggcgctgcgcggtgcagagcaggc

SEQ ID NO: 151230 - DNA, 122 bp, Homo sapiens
gttaccttcaaccacttgtcaacacacttggtgtggaactcatggttgcaggggaggactcggagcagctgccgcgcctcgaagtcactgaagcagaccacacacctgtggaggggcgcgga

SEQ ID NO: 151231 - DNA, 122 bp, Homo sapiens
acgacttgcacaagaagttgtcatactgttccccggatgtggacagttgttcagagaccacgatcatgtgtctggtgtctcactgtggaatagtggtttctaaagctggctggacagcaaaa

SEQ ID NO: 151232 - DNA, 122 bp, Homo sapiens
ccgctggcgcccccgcagccaccgcccggcggcggaaggagggggcgtctccgccgctcgcgggccccagggcggctccagcactggcaacccccggcctgcccctcctcactggacggaag

SEQ ID NO: 151233 - DNA, 122 bp, Homo sapiens
gggccgctcgctgggagttgcctgggtgggctgcccgcgcactggcaggctgctttcccccgcctctcccaatccgctgcgggccgccaactcgatcaaaataaaaccccgaggaaggcttt

SEQ ID NO: 151234 - DNA, 122 bp, Homo sapiens
ccagagcgggacccttcctttccgcaccctcctgggtatctccggtcttcaggcctccttcggagagccctgctccgagcccattgggcttccaatcttggcctgcctagcgccgagcagcc

SEQ ID NO: 151235 - DNA, 122 bp, Homo sapiens
tcccaccactctggtccatacggggtttgcccgtcctggaagaatgcaggttagagaagtcgctcagcagcagaaagcgaaatgagcagtgactgctgagtacgcgacaggacgcgcagtct

SEQ ID NO: 151236 - DNA, 122 bp, Homo sapiens
ccactcccatggccttgtctaggactcagagaccactcggctctgagcttccaggcgcctcgtctgtgtgcatctcacgcccgacgtggcttctgaaacgtgcattcaacctcaaacttttg

SEQ ID NO: 151237 - DNA, 122 bp, Homo sapiens
gcaggaactatcattatctccattttaccaaggagggaatgaaggcacagagaagttatgcggcccagtcaccagctaggaaatgggggaaccaggattcaaacccaagctgtgtggccaca

SEQ ID NO: 151238 - DNA, 122 bp, Homo sapiens
gtctcacgttgaagagctggcgcagaggtttcctgcagacccgggaggggtacctggggccggttaggagggtcctagggttcacctgaatggttctgaagccctttagccgcaccacagcg

SEQ ID NO: 151239 - DNA, 122 bp, Homo sapiens
ctgccttcatgaagttccaggagaggaaagggatggacaaggacatgggcagtgataatacggtgtgatcagggttgtctgagctgggtacataggaagggcacccagcccaacatgaggac

SEQ ID NO: 151240 - DNA, 122 bp, Homo sapiens
agctcataaagcttcagtccttgtccacttttattcccatgacttaagtggaaacctgaacgtggtttaacaacttaaaaacaccatgtgctatactgatcaaaacttccaccttcctctgt

SEQ ID NO: 151241 - DNA, 122 bp, Homo sapiens
taaattaaaataacgatttcagaaaaagtagttgatgctttcctcaataccacacttgttcgtaactgtaacatctttggtggcaattatcaccaaagtgatcacaggctgagtagcagtca

SEQ ID NO: 151242 - DNA, 122 bp, Homo sapiens
aacactagcacctcctttcataccgaaaggtaccatgcctggctcagatgatcaaatacgcggacaacccagtggaggggaagacgatgaaggaacatgggtcagcaatcctgaacgtcctg

SEQ ID NO: 151243 - DNA, 122 bp, Homo sapiens
ttgcaacaagcaaacatctttgtgatgacacagtgatgttatcgtagctgtataaacaaccgtatggcctttggcctgagattccggaagcttcctgaagagcacaaaatgcaggtcaggcc

SEQ ID NO: 151244 - DNA, 122 bp, Homo sapiens
ccgcggaccctcccagctccccagagcccagtgaccctcgcgcagcaggagaaccccagacggaccccaggccctgcagcctgtcatgaacccgaggggctgaagttcagccccacccccgc

SEQ ID NO: 151245 - DNA, 122 bp, Homo sapiens
gggctgaaccgcgggcggagggcgcattaacacttgctcgccaggttggtggaggcggggcggattctgctggcggccgcggggcggcgagagtgggggctctttaagcgcccaccaacgcg

SEQ ID NO: 151246 - DNA, 122 bp, Homo sapiens
gacgggcgggaccgccacgaggggtggggcatccccggagggcggagcgtgggtgaggggcggggcatccgtcgccggaagcctgtaccgtatttcatggactcctaggcgccatcgatttt

SEQ ID NO: 151247 - DNA, 122 bp, Homo sapiens
gggcccgctcctcggcccctgcgggcagccccaggacggtgctgtgctccagcgtctgcccgcccagctcgccatctaatttcatgctctgtgtaaatttctagggggggagagtcgcaagg

SEQ ID NO: 151248 - DNA, 122 bp, Homo sapiens
gttgtcggggtttctgttttctgtttaaaaacgccccttggatgagctgggggtgctttccgacctcctgggcccgccggggacgtccgggcggcggcggccgcagacgcgggcctgcgagc

SEQ ID NO: 151249 - DNA, 122 bp, Homo sapiens
cggggggatgagtgcggctctcagcgcctctgtggggctgggggtcttgggccgtgaggccggggccaggctgcgtggcaaccctgagtcccaccctcattgtctttgctcggggccccgag

SEQ ID NO: 151250 - DNA, 122 bp, Homo sapiens
tgtcctctcaatcagcccggcagcggcggcccacaatttacgcgtgtgcaaccctaaccccggcccaagcttgacctacaatttgcgcaggcgcagatcctaactttggcgtccctgtgggc

SEQ ID NO: 151251 - DNA, 122 bp, Homo sapiens
catgccaggatgcatgctgctgcatgacctgtaccccaaaggtttgttcccaaaggcctccgaacgtgaacactgaagtcccaggccttgcaaacaaagtggcatccaaatttcctgtgcat

SEQ ID NO: 151252 - DNA, 122 bp, Homo sapiens
cagggctgggggaggcctctccacgcccgccggagtgtccctggtggcagctgacagacccgctcttgtaggtgacatacagcgtttccagcgggactttgtgtcccgcctgtggctcacat

SEQ ID NO: 151253 - DNA, 122 bp, Homo sapiens
aggtctgttctccacggcactgcttccggtacagcatggaagccgctgttattttgaaaacgatggtggccgagagggcacccctgatagaagactgccaatcaatagtggctagaggggcg

SEQ ID NO: 151254 - DNA, 122 bp, Homo sapiens
ggtccaagtaggctcattctcacccagcagtctgcctactgcagggttcatttaagaggccgattatttatccagggctcatttaagaggccaattatttatctgaagcttctcaaattgtg

SEQ ID NO: 151255 - DNA, 122 bp, Homo sapiens
gggccgcgagagtcaggaagttccagaaagttccaaagacatcactggtcctctttggaccggagttctccggagaaaccgcttccggcgctcctgacacactgagatagaaagtttcacag

SEQ ID NO: 151256 - DNA, 122 bp, Homo sapiens
aagcacagccagagggctggtggaaacatatgcatcattcacaccctctgtgtcttcttacgtatgcactgtttaaacgtattaccctacctggactcttaaatggataactcacatacata

SEQ ID NO: 151257 - DNA, 122 bp, Homo sapiens
cggcctcgcccgcgtaggatgccaggaggttggcggcggcggcggctgctgggttggccccggcggccacggcggccaggacgccggaagctgcggccgagttgaggcccaggcccagggag

SEQ ID NO: 151258 - DNA, 122 bp, Homo sapiens
cacgcacgcaacgcacaaaatacataaaacacagatgcacacacacatacacatggaacacgcacacaaaacacacacatgaaatacacacagaacacacacatgaaagacacaggaaacac

SEQ ID NO: 151259 - DNA, 122 bp, Homo sapiens
tcagaaaggcagggcgagagagactgagaggcagagagacaaaaaggaaatgagagacagcgaaagaatgagatacatacagagagacagagagaatgtgagcaacagagagggagaaagaa

SEQ ID NO: 151260 - DNA, 122 bp, Homo sapiens
tcatcctcctgagtcgagtattgagtgcttactgagcgctccctcctcatcctcctgagtcgtgtattgagtgcttactgagcgctccctcctcgtcctcctgagtcgtgtattgagtgctt

SEQ ID NO: 151261 - DNA, 122 bp, Homo sapiens
ctctcttcctattttgtgattaggatgctccatcagtttctgccaccagcttgctggagacgctgcgtgtccctgactcctctcaaagggtgaaaagctcagtcgcacccgagacctgctcc

SEQ ID NO: 151262 - DNA, 122 bp, Homo sapiens
tttccagaaccaggaaaagaagcgctgcacagcaccagttccgtgtacatctgtacacctcggtaggaccactgccgatgacgtgtgtgacacacggcccaggcccaccctacccacctgca

SEQ ID NO: 151263 - DNA, 122 bp, Homo sapiens
caacctccgcctccttgttaaaaggattctcttgcctcagattctcacgcctcagattcccgtgtaggtgggattacaggcatgtgccaccacatccggctgatttttgtatttttagtaga

SEQ ID NO: 151264 - DNA, 122 bp, Homo sapiens
gcccagccccacccaccaccggatggctaggctatctcactaggacaaacccaaacataccgagggctgtgaggcgcttccagggctgggtaccaggccagccggcctccccggcagccagc

SEQ ID NO: 151265 - DNA, 122 bp, Homo sapiens
aggcgtggagggaaaagcagaatgcagggagcaccccagggtctcggggctcattcaccccgacgagggagaagcccccacccagaaacagccgccgccccgctcagcttcacgccgtcttt

SEQ ID NO: 151266 - DNA, 122 bp, Homo sapiens
actgggctctgctctggactccagcttctaaacttcatccacttccacctgaaacctccacgtaacatttatttggggcacaactccatcagaaacctaaattaacaagtgcagcttctctc

SEQ ID NO: 151267 - DNA, 122 bp, Homo sapiens
gctggttatgcagaggctcctaaggaaagcctagtggcacccgctggttatgcagaggctcgtaaggaaagcctagtggcaccggctggttatgcagaggctcgtaaggaaagcctagtggc

SEQ ID NO: 151268 - DNA, 122 bp, Homo sapiens
cccggggagagaatgctggagccagccggggtcctgggggcagggcctgaaggaagtccccgggcacccgggccctgatgaatgcagccgcggttgagaatcgcccgcgtgaatccctattc

SEQ ID NO: 151269 - DNA, 122 bp, Homo sapiens
aacagtcatttgaaacctggaagaagagcgccatcatcacagcaagtcccagctggtaaccgcctcccacaacgaggcactggccaggcattcgacaggtcctgtctcactccatcctcacg

SEQ ID NO: 151270 - DNA, 122 bp, Homo sapiens
caggaacatcacacataccaggagcttgcacgggtctggggtgggggccacatcagcctccggaacctgagcctgcagggcagcgcgtgccccagtcccgggggccacaggagggagcgcgt

SEQ ID NO: 151271 - DNA, 122 bp, Homo sapiens
ccttgctccgctccacgaggaggccgccaaccgcagggccgcgacacggacgggaagcaacggacactctcccagcaagacgcgtctagagaaagaccgcgtttcggtgcggggggaattta

SEQ ID NO: 151272 - DNA, 122 bp, Homo sapiens
actttacagggtgttccacttgtagaggtagtaactctccaccagggggcgcatgtcatgcggtggggtgcatacaggcggtggttggagtactaaactaatctccatttactcccccaata

SEQ ID NO: 151273 - DNA, 122 bp, Homo sapiens
cgagcgtccgcgagcaggtccgtgcagaaccgggcttcaggaccgctgagctccgtagggcgtccttgggggacgccaggtcgccggctcctctgccctcgttgagatggacaacgcctcgt

SEQ ID NO: 151274 - DNA, 122 bp, Homo sapiens
tctccaaagcctccttcttggcatcctcttgtgatgtagcagagcaaggaaccccagacacggaaagttgcttaccaaaaaaaaaaaaaaaaaaaaaaaaaaaaaaaaaaaaaaaaaaaaaa

SEQ ID NO: 151275 - DNA, 122 bp, Homo sapiens
acaaactgaataaatcatctctgcgtgatcttggggcaaataagatcccaataatgccttcgctgctggcctctcccctgggcccccacctttttgagctatacttttaggaagttagaatg

SEQ ID NO: 151276 - DNA, 122 bp, Homo sapiens
aaaaaaaaaaaaaatccagctatgcaagcactcctattatgagcatcattaattggcacacgcacattttttgtttgtttgtttgtttcaagcactggtcttcagagatgccagctgcatca

SEQ ID NO: 151277 - DNA, 122 bp, Homo sapiens
gcagcccggcctcggcctccgccgcttgtcgtcgcgccccgcccgcgagcccgccccgcacgtcccccgccggcggccaccatgagcacaggcctgcggtacaagagcaagctggcgacccc

SEQ ID NO: 151278 - DNA, 122 bp, Homo sapiens
acaaagtcccagtggaaagtcctgttcttagccgtcttttttgcatgtaacaggtgacatcggggacactataaatttaccaggaagaccaggcctgaagggggagcggggcaccactggaa

SEQ ID NO: 151279 - DNA, 122 bp, Homo sapiens
agatcatggggatgcaatcccagggcactgtatttctcacttccttgggtccctggcacgcgactcccagctaacacccaaccacacacatttctacatactgtttcttaattttgttttgg

SEQ ID NO: 151280 - DNA, 122 bp, Homo sapiens
tcgtgccgcgcgcgctccgcggagtttcgctgggttgcgtgggggtcagcgctaaggcgtcgccggaagcgcatgtcgagggtgggggcccgggccgggacgggctgtgggcggagccatgg

SEQ ID NO: 151281 - DNA, 122 bp, Homo sapiens
acaaactgtaatgtggaaatgctacacagcgtctctctgctgcctcccaccagccagggccgggctgggagccaggtctgagaaatagtagcacatgctgccactctttttgtggatggttg

SEQ ID NO: 151282 - DNA, 122 bp, Homo sapiens
tgttgcactgtttgcatgcgcccgaggcagacgtctgtcaggggcttggatttcgtgtgccgctgccacccgcccacccgccttgtgagatggaattgtaataaaccacgccatgaggacac

SEQ ID NO: 151283 - DNA, 122 bp, Homo sapiens
tctcgccctacgcgccttccagctggcagcagttgtcagtggaccagctggcggcagccgcgctccacctcccggcctgggccgcggccggaccgtcggggcggagcctccggggaccgccc

SEQ ID NO: 151284 - DNA, 122 bp, Homo sapiens
ggcgctggcccttgaccgatgagggtcccacgctgaccttggccctgacctcaggagccacgctgtagacattccctctcctggtctctgggtctggcttccaggctctggctgtggatgtc

SEQ ID NO: 151285 - DNA, 122 bp, Homo sapiens
aatatttggtaacgtcccttaagggactcagcatcacttagaacagcagttctcagcctccgggtggcaaccattttcgtggacaccgtctcacaggtctaccttgactattgtaacattcc

SEQ ID NO: 151286 - DNA, 122 bp, Homo sapiens
gcaggggcggactcgggcggggtcggaggtccagggcggggtgcgggaaggcggccccgccgcactcaccgcactttggccgccaccgaggacatggcctcgctcctcagcgccctcctcct

SEQ ID NO: 151287 - DNA, 122 bp, Homo sapiens
acgccgttgttcctcctggaaatccgggatttggagaagcacctggttcctgatggaggccgtgggcctcttggtccccgcttaccaggcagcggcgccagcctagttctcagccccgtccc

SEQ ID NO: 151288 - DNA, 122 bp, Homo sapiens
aactgggcgttaggtgtcccaggggtgcctggtgttcatgctgattgcagtgatgatgcacgtcctcctgggccagtccacggggtgcgcctgtacacactgggcgtgtgcggatacaaggg

SEQ ID NO: 151289 - DNA, 122 bp, Homo sapiens
gactcgtcacctgcccctccccctcccgccgccgtcacccaggaaaccggccgcaatcgccggccgacctgaagctggtttcatggcagcctcaaagaaggcagttttggggccattggtgg

SEQ ID NO: 151290 - DNA, 122 bp, Homo sapiens
caagatttaaaacttcctgtgggtaatctaactgtgagtagataggaatcggccatatgacgaaatgagatcaataggaaatgtgctttttgaggaaattttattttagtaccaaatgttgc

SEQ ID NO: 151291 - DNA, 122 bp, Homo sapiens
caggccaaaatacaaaaaatgaaataaaaatattagaaaaattatagttaactaaagttgcggaacaccaagcagctgctggaacaaccccaaaggaagacaaacattagatggtacatgag

SEQ ID NO: 151292 - DNA, 122 bp, Homo sapiens
cacggggctttaaaaaatgttggtgcccaacatctccccgaaatagggcccgccctatctcggtcggggagcgcgggacctccgtggccacccagcgccaccgtccgcgggtccgctttgcg

SEQ ID NO: 151293 - DNA, 122 bp, Homo sapiens
tggagtcgaggtcgtggtccaggaactggccccactgcatcagcatgtgggtgaactgctcgtcgggtgtgacggtctccgtcccgatcagggtggtggacaccaggcgcggcatgggaagg

SEQ ID NO: 151294 - DNA, 122 bp, Homo sapiens
agcaaaagcccacgcgcgtgccgggccgcagggtgaagcaccagggcgcctctgagccgtcgaggttccagcagaagttctcccgaaggtctctaagcaggcgctccactcagccctagccc

SEQ ID NO: 151295 - DNA, 122 bp, Homo sapiens
catttttatgtgattgaaagtaaatgtaatttccgggtattgacattttcaactacatttcgaatcacaaaaccgaagattatttttcctggtagaaggaattccaggttgagaaacctgag

SEQ ID NO: 151296 - DNA, 122 bp, Homo sapiens
ctgcacacctgtccagtgctcccacgtctccggccgcctgcctaagcacggctgctggcccgatgtccttcctcagtaccggatgcctgctttcaaatgctgtgtggggctcatgagccatg

SEQ ID NO: 151297 - DNA, 122 bp, Homo sapiens
tgccaacaagtaaggaagtatcaaaaacaaacacaatgactaggatgtgtccaagggacacggaaaccaactgaaagagcttccaatggccatatctggaaatgtgagcaagaaaataaaag

SEQ ID NO: 151298 - DNA, 122 bp, Homo sapiens
tcctggccatcactaacttggaatttctgatactgatgatataaggttgagttatgtcttcgtgaaacaggtctctatacagcatataaacaactaccagcatgcacaggggttccgtaggg

SEQ ID NO: 151299 - DNA, 122 bp, Homo sapiens
tgaactgcccgtacacggaggcagcatggggaaaggcattgaagggcgggaccccggagccgacttgctgcagatccaaaaaggcggagctagataaagaggaaggggtggagctagaactg

SEQ ID NO: 151300 - DNA, 122 bp, Homo sapiens
gtggcgggcctctggtggcaccgcgcccagcacttcgggctcttggtggcggccgagctgcgggaccagagatccccccactcggcacccctgctcctgccgagtgaacaggactcctggct

SEQ ID NO: 151301 - DNA, 122 bp, Homo sapiens
ctgcatagcgctgatgtcggcgttctgcttgtcctccagctcctgcagctgcttctccagcgcttcattcatgccccggcatgcttcgatttccagggtcttggccttgagcagacgacggc

SEQ ID NO: 151302 - DNA, 122 bp, Homo sapiens
aactgtatgtgccgggtgactgcacgtggcgcgcggcgggtggcggggatggcagcggtgcgatcccacgcctccaggaccccaccttcctgcggcccccgatcggccccgccccgggggcg

SEQ ID NO: 151303 - DNA, 122 bp, Homo sapiens
cgccctgccggctgtacttctcatagagcctgtgcatgtggacagcgaccatgtcctgggcgctggggcccaacgtggcggccgcgtccccagggtgccgctggagatccctgtccccctgc

SEQ ID NO: 151304 - DNA, 122 bp, Homo sapiens
atggcagggcaaggaactgacaagtcattacgggctgctgaatgaccgatgagatgcagccgggaggctctggccggctccggaatgataatggccggcgggtgctttgtatgcgcgaccag

SEQ ID NO: 151305 - DNA, 122 bp, Homo sapiens
tgaacccgggaggcggaggttgcagtgagccaagatcgcgccattgcactccagcccgggcgacagagtgagacagtgtctcaaaaagaaaagaggcgcgcatgcgcagtgaggtttcacgc

SEQ ID NO: 151306 - DNA, 122 bp, Homo sapiens
ataacgacaaaatcatctaaggatgaagttctcagaatctatttgcatcattaagggatgcgtgacagcatatgaaaaagtatacataatgtctattttgggggttctctgcctcatagtgc

SEQ ID NO: 151307 - DNA, 122 bp, Homo sapiens
cgccgcccagtcggctccgcagagagggcgccgtgccggggctcctgcacccccgccctgcggctcctcggtccttcacatagccctggcccacctccaataagccgacggcgcatcccatt

SEQ ID NO: 151308 - DNA, 122 bp, Homo sapiens
caaagggacgtgcaatggactcaagtgtgggcctcgaggcttaactaggaaggggtgggtcggggacccaccaggtgaaacagggcaggagcccatgcagcttgccaccttcggccaggcct

SEQ ID NO: 151309 - DNA, 122 bp, Homo sapiens
tgaagaagccacaggccggcgtcttcctccctgggcctccagcagtggggagccagggagcgcacctgctgggcctgggccctctcccctgggctgggcggcctctgctggccctggggagg

SEQ ID NO: 151310 - DNA, 122 bp, Homo sapiens
aggaagattgagaggtgagagtgctgaacggggaggggctttggggctaagggaagtgcccgggaccccacctgaccccaacgctcacgggacaggggcagaggagaaaaacgtgggtggac

SEQ ID NO: 151311 - DNA, 122 bp, Homo sapiens
ggtctgtctctgtattggcatgggattgggtgttattaaacagagttcagatagggtgtgcgtgagctggcgtgtttgttttctaggtcagagagtggaatgagacattgaggaggaaattg

SEQ ID NO: 151312 - DNA, 122 bp, Homo sapiens
ggtggtggtccaccccctggtgctgctcagtgtggtggatcatttcaaccggtgagcgagcgccctatagctgggccggcggcgcagccgctgctgagtcacgggcacgctggagatggcgc

SEQ ID NO: 151313 - DNA, 122 bp, Homo sapiens
aagacaggaggtcgggaaggacctgcagcccaggggcttccaagatgaggcccagagactcggtagagttccagcattcggggctttggagatttcccctcgccctctacccccaccatctc

SEQ ID NO: 151314 - DNA, 122 bp, Homo sapiens
ctctaactaggagaaaacattgagaatttaggctgaaaataacgacacagtttatcacctcgttaattcccaaacatcattaccgcgtcctaagccaccccacttgcctctcccctagccgc

SEQ ID NO: 151315 - DNA, 122 bp, Homo sapiens
ggtggttttgatcaccggggctagcaggtgaggcctcctttgggttggcagaggcggcagcggatcaggggtccgagagagcaggggtctgcgaccctccacgaacggaccccggaagcgcc

SEQ ID NO: 151316 - DNA, 122 bp, Homo sapiens
ggtcggcgccgctggtgggtgcctgggcgggcgcggagcgcgggacgccggggcagtgggcgccgggacccggggggccgcacccagggcaggagggcgaggacgaggcggctcgcggcccg

SEQ ID NO: 151317 - DNA, 122 bp, Homo sapiens
ccatccttcctccaggcacttgcagggccaaccggagattctaggcctggcctgagtctgcgcaggtgctagtgggaccagaggcacttcttgggaatggattctggaggtgtcagacactt

SEQ ID NO: 151318 - DNA, 122 bp, Homo sapiens
gtttaggtcttcacctgtaatttttgaaatttttgaaactgtggtgccattacttaccaacgcgagaaatgcactttataaagtgtaactgctcgggttgaggggaccaacaagaggatcag

SEQ ID NO: 151319 - DNA, 122 bp, Homo sapiens
agctccagggagcagcacaggggtctggacattccccaccacaagcccctcacctccatgcggcgggccctaagaatttaggggatttcaattagactttgtaataaaagtaaaagagacca

SEQ ID NO: 151320 - DNA, 122 bp, Homo sapiens
tgtctgcagaatgcaggcatttgagcactgcactattctccttctatggcaaggagaccacgatataggaaagaagttggtgtgttttcaaaaattctgaagatctgtatacatggaacagc

SEQ ID NO: 151321 - DNA, 122 bp, Homo sapiens
ttactgggaaaaaaattagaagacttagaggacagaaagaccgagtggagtcccgccccacgcccaccactgatggaagaattctgccttgatcgtctgtgatcgtcaagaaaacaaattct

SEQ ID NO: 151322 - DNA, 122 bp, Homo sapiens
aacaccttttatttagtgctgcaatacaccgtgtggtttgacggcacgcggaacatatcacgtgccaagccaacaccttaagagggtgggaagctttgaaaccaggaagacatgccgaaaat

SEQ ID NO: 151323 - DNA, 122 bp, Homo sapiens
agcagattcctgggcctcctggggcccggtcgctccgggatgtctgagctctgggaggggcgtgcccggggcgcctccctcgcggggtattgtgggatcacgagtcactggcgacggtgggt

SEQ ID NO: 151324 - DNA, 122 bp, Homo sapiens
ctccatgcagagaactgaggatgtgctgtgcctttgaacttcagttaagtgtgctttggacgtctgaggctgtgggcttattagaatctcagtttttacctatactgagagggcttgccaga

SEQ ID NO: 151325 - DNA, 122 bp, Homo sapiens
atttctcaggcgaccggaattacagcatttcttggtagaggaaactatccctcagccaaccgctagcggtcttagacggtctgtcttttgtccaggagctcaagaagcagagactctacctg

SEQ ID NO: 151326 - DNA, 122 bp, Homo sapiens
ccctcgggttttcgcccggataccctaggcgcctccgggacatctccacatctttgcctacggcgcctagcccagtaccaaccggtgcttggtcttcccgttcgctaaaaatttattataat

SEQ ID NO: 151327 - DNA, 122 bp, Homo sapiens
ctctccccgatgtgcatgggcaccattcaaaccaatggaggcccgaatagaatgaaaggccgaggaagagaggatttgctctctttgcttgcctattttaagctgggacattggtcttgtcc

SEQ ID NO: 151328 - DNA, 122 bp, Homo sapiens
ctgaaccctgcccaccatttaaccaagtaagaatacaattctctctcatttaggttatcacgctataatagagaatggactcattaatatgggattacagaggaaggaatggttaagaaaaa

SEQ ID NO: 151329 - DNA, 122 bp, Homo sapiens
gcgattttcttcaaggaaaggagacaagtccaaagctcgtttgtggattgtgggactgagcgaaggagtacaaatatatccacgtcgctcagagctggggtgctcacggtgggcggtgggca

SEQ ID NO: 151330 - DNA, 122 bp, Homo sapiens
cccaccccatcgagaacgcggcgccttgtttagggacgttcctgggccgtcacggagtgtcgccggctcctcggcccctccctcctccaagcccccacccccgacagcggcctccctgggga

SEQ ID NO: 151331 - DNA, 122 bp, Homo sapiens
gggtcccgggccagccccgccgtcccggccaccccgcgcagcccctcccgcttccccagacggcttcctcgcctcagccgcagcagaaagccccgagggccattgacagcccgggcggggcc

SEQ ID NO: 151332 - DNA, 122 bp, Homo sapiens
ctggcttttgcaaactgggggcccaagagctgcacccagggattttatagccgttcttatcggtcctcaggatcaaggaccaatcaggtccctcaactggtctggtgagccaataagagggc

SEQ ID NO: 151333 - DNA, 122 bp, Homo sapiens
tcggcgctcaaccaatcactgcacacagtcggcgctcaaccaatcacagcacacagtcggcgctcaaccaatccctgcacacagtcggtgctcaacaaatcacagcacacagtcggcgctca

SEQ ID NO: 151334 - DNA, 122 bp, Homo sapiens
cagaaggccgtgaaaggggagcttggtcgctggcacagccgctgctatggcagccagagccgaagaaggtcaccattgatctcacatgcacttaattttcccttccttggcatgggacgggg

SEQ ID NO: 151335 - DNA, 122 bp, Homo sapiens
gcccgcgcgcgcatggaggcgttgccggcagccccctgagggcagcggggagacaagacccggcgacctcgcgcatccctcgagccgccacgcgctctcgccaccgggcggcgacgggccgc

SEQ ID NO: 151336 - DNA, 122 bp, Homo sapiens
aaaaagtaaatacatgcagggctcggggtctggtccctgcatggtcacttaacctgtctgcgcctctgttttctcatccgtgaaatgtaaaggaaaatagtttctactcggggccaccgtgt

SEQ ID NO: 151337 - DNA, 122 bp, Homo sapiens
cacctcagccccagccctacagacagcagccatgtagagggtgtctgcagagccacatcccgggtttgtggttgtggggtaagaaagacagatgtctggctgcctggttggggactacagcc

SEQ ID NO: 151338 - DNA, 122 bp, Homo sapiens
agcagctgttggagagatcagtggcccgaggaacacttactttgaccacggtgactaacccgtcgttgctgtttgggtcggtctggatggcgaaccgtccagtaggatctccgccactgatt

SEQ ID NO: 151339 - DNA, 122 bp, Homo sapiens
tttagtgcccagcgccagataacgccggaagaaccccaagtggagactgcttgcatccttcgggaaaagtctaagtgctaagtaccatgacagtggcaggaaccaagctgttgggtacagct

SEQ ID NO: 151340 - DNA, 122 bp, Homo sapiens
ttctccacaggacgctcgggccacagcctcgtgcaggtgcgacggccgcgcgaccgttagcgcgaggccccgccccgtcctcagcgactccgcccccaccgctcactgactccgcccccacc

SEQ ID NO: 151341 - DNA, 122 bp, Homo sapiens
ccttactctttgggcatctgatttccagggattatgatgctgttaggttggagtttgaatcggctcatagctttggtagtaattgtgattaatattagtaattatgtaattttagtgactca

SEQ ID NO: 151342 - DNA, 122 bp, Homo sapiens
caatgagctcagggtgcctctggcccgtctccatgtggctcagaggaccaggggggacagcgagggattctaggggatctctgtgtatccaggttgttcttaagccacaaaagccttttagg

SEQ ID NO: 151343 - DNA, 122 bp, Homo sapiens
ctcccgtgggaccggaaggattgtgcggtgcccaggacagggcgggactttcacaaagggcgacaggaagagtgaattaccgggccccagctctgccactgtgctgtgtggcctcgggcaga

SEQ ID NO: 151344 - DNA, 122 bp, Homo sapiens
ctactgctcagagattctaggaaacttagtaggtaggctctcgcgatagcttcctggcgccgcgctctcatgggtgctcgcccccggcgatggcgtcatgcgcggtgcgcagacgcagcgtg

SEQ ID NO: 151345 - DNA, 122 bp, Homo sapiens
gccataactcagcctgcggaggagtgcggccgccgcggatcggacgttaccatacattcccggggcgtcggacagggctgctaatgaaaatatcaatcaaaaacttgcctgacttaatggtc

SEQ ID NO: 151346 - DNA, 122 bp, Homo sapiens
ctggcccccggcagtcaggtagcacgggcagtagggctgaggccccagaatggagatctccggacacagccagggggttggacggctccgcagactgcaggagactccggggccggggccgg

SEQ ID NO: 151347 - DNA, 122 bp, Homo sapiens
aacttctgagcgcgtttccggcgccccttcttcacgctgagccagagggggcggggggcacgtaccacatgcttggctttccaatcccgacgggggcccccaggcccatctacactgtcaag

SEQ ID NO: 151348 - DNA, 122 bp, Homo sapiens
cacctcaccggaggccttcctctgcccacccgatccttccccagccattgggcgtgtgaccgtgcaggggtcgtgtgacagctgctggccagctaggaatgatttttacattttcttccttt

SEQ ID NO: 151349 - DNA, 122 bp, Homo sapiens
taaaagtatttttcttcctgggattttttcactaccccaaagttcaggtcatcatatttgcggtgtgcttgctgatgtacctgatcaccttgctgggcaacatttttctgatctccatcacc

SEQ ID NO: 151350 - DNA, 122 bp, Homo sapiens
attgtaaaagcacggtttcttcaaatcaccctcccctagagaaagtgctgacccagggaacgagtttccttctgatttgtgcgttccatatccctgccatgtgccacacggcactaactgat

SEQ ID NO: 151351 - DNA, 122 bp, Homo sapiens
gatgagctggtctcgagccagcctcttcagcatggagaagtcaggcagctcaggggcgtccggccgatggggaaaagccatggcagcggtcacctgcgccgcggggtggaaggacgcccttc

SEQ ID NO: 151352 - DNA, 122 bp, Homo sapiens
ggaccttcttttaagtaaaaatcctctttatttgctacttaaactttatcgtgagtctaacgcggatgttgtttctaaagtcaaatatatttactaatttttggattttggaggaattgttt

SEQ ID NO: 151353 - DNA, 122 bp, Homo sapiens
aaaaccctcaaaaatccaaaggggcactttccctggataaaaataaaacttggaggggcccgcaggaatggaatactttttcttcctgtgtttaaatttctacggaaaatctgaccggcgcg

SEQ ID NO: 151354 - DNA, 122 bp, Homo sapiens
aacacattttctaatagaaacaatccaccaggatgttgagcccacattttaagagttcttcggaatttactgaaaatggaaaactgattacattgggcacataggacatttatatttataga

SEQ ID NO: 151355 - DNA, 122 bp, Homo sapiens
ataattcacctaaagtcatgcccacgagagggaaacccgggatttaaactgaccttcctacgcttaagcctgtcaccctccttccattatgttatgctacctgtggttacaaatataaagaa

SEQ ID NO: 151356 - DNA, 122 bp, Homo sapiens
ctggcgcggggctaggcttgttcaatcggtgttaagagtctggcaggtgggccctcatgtcgcgagggagcgggtgatccctttttcctcactcttaggcttccaacggaggtgcgtgtcct

SEQ ID NO: 151357 - DNA, 122 bp, Homo sapiens
cgctgctagggcacggctgagcgcgggcaccgcgtctctcctcgactcgcaccgcctatgcgccccagcctagccaggaatactgccctccccggactacagccctgctgcgtggacaaggg

SEQ ID NO: 151358 - DNA, 122 bp, Homo sapiens
tttcagaactcagacatatgcgctgagtacgcaccgagtgccacaacaaagtccggctagcggcccttagaatagcaacctagggggcctgggcccctcagaattcaaataggaaattctta

SEQ ID NO: 151359 - DNA, 122 bp, Homo sapiens
tggtgcaggtgactctggctccccttgtcctgcctgggagtgtgtggagagggaggggttcgctgttcaaatagggtggggtgtcagtggccacctcccccgggaaggtcttctcttcaggg

SEQ ID NO: 151360 - DNA, 122 bp, Homo sapiens
cggacggggcggctgccgggaggagacgctcctcacttcccagactgggtggctgtcgggcggagaggctcctcacttctcagacggggcggctgccgggcggaggggctcctcacttctca

SEQ ID NO: 151361 - DNA, 122 bp, Homo sapiens
caagaaaaacccacactggcaatttagtttaaaagctagatctcaaaggtcctttactatcgttatggactgaattgtatcccctccaccaaattcatacattgacattctaacccccagta

SEQ ID NO: 151362 - DNA, 122 bp, Homo sapiens
ataatctggactctgaggcaccctggaaaagttccctacttccaaagtctgcaggagcttcgggacgtcttcccgggagtctcccccagtctcctcgacctccaatccaggcttctgctgct

SEQ ID NO: 151363 - DNA, 122 bp, Homo sapiens
tgcccggctccctgtcactcagcccgcgcggggcccccgattggcggcctagccccgttacgcactcgcctcgcgttcacatacccggggagggcagtagaaaggtgatcaatcttcatcag

SEQ ID NO: 151364 - DNA, 122 bp, Homo sapiens
ctccccaacagctgccctgcctgcttggctctcagcccgggacagcagtgttcaggtccccgcgtcctcgcgcgcaaacccgcgtccctaggaatggggaaccgcgcggggaggcctggacg

SEQ ID NO: 151365 - DNA, 122 bp, Homo sapiens
tgcaggcagtaagtgccaggacccgtgttggcgcccgaggatccctggcatgttcggggacggtgaggtcagtccagcagcggtgaggtcagtctagtagcagtgaggtcagtctagtagcg

SEQ ID NO: 151366 - DNA, 122 bp, Homo sapiens
aactccgagaggagggcaacagagccagcatcttgccagggccccggaggaggggttccccgctacgcctgtgccggaggagttccagtcaccgagcgaggggcgcaagggtgggtgcatcc

SEQ ID NO: 151367 - DNA, 122 bp, Homo sapiens
tgctggcagattccgtgtctggtgtggccacttcctggttcaagatggcatctgtgtcctcgcctgctggaaagggccaggagcctttctctagcctcctttatgagagcagtcatcccatc

SEQ ID NO: 151368 - DNA, 122 bp, Homo sapiens
aatgccaataaaattggagtacagtgtgggagtcatatggtgacacttctggctgtgatgcgtctctggaaaatgcttttcttattgggttacaaagaatacttcattcagagtttaacttg

SEQ ID NO: 151369 - DNA, 122 bp, Homo sapiens
agggaagcgagtcttggtgggcagagagctatgcgtcgttagtgcggggctggtgaaggccggggtggaaaggttgcgggagggtgggattgggtgcaggtctcctggcgcacgtgtctcct

SEQ ID NO: 151370 - DNA, 122 bp, Homo sapiens
cttaaaactcaaaggacctggcggtgcttcacatccctctagaggagcctgttctataatcgataaaccccaattcacctcaccacctcttgctcaacccatataccgccatcttcagcaaa

SEQ ID NO: 151371 - DNA, 122 bp, Homo sapiens
agcacccccagacctttctccgtagtccacccaattaccaagccccatcgcagacagacacggtccctaagtcaagtttgtccaatcagaggccgctctagaaccagaagatccgctcagtc

SEQ ID NO: 151372 - DNA, 122 bp, Homo sapiens
gaacttcccgattctcgcgccttcgttcgtttctgcggaccagcggagactcctccacaccgcccaccgcccaatgatcccactgccgcaaaccgccccaaagccagcgccgaaagccgacg

SEQ ID NO: 151373 - DNA, 122 bp, Homo sapiens
tagatagaagtgtacaccctcaccaaggatttgctgcagagtcctttcttgcatagataacggatctgaaatcctatattgctaaagcgtgggcttcatctgattccaggcactgccagccc

SEQ ID NO: 151374 - DNA, 122 bp, Homo sapiens
tcagcacattgtgacactcaacaaacttcattagtgtttccaccagtctgctgcctgaaccggccaagaggaccacctgcatccctgcgcacagtacagagagctcagagttgaggaaggtg

SEQ ID NO: 151375 - DNA, 122 bp, Homo sapiens
ggactctgccccataatcccatcgcctcccaccagggggcttacatttcaacatgagactcggtgaggacacagatccaaaccacatcaacagtgctttcatgcttttgattatcttttgta

SEQ ID NO: 151376 - DNA, 122 bp, Homo sapiens
acgccgcggactgcaggtgatgctcttcctcttctgcagccgaaattcgtcgcgatgtgtcgcctgccagatttttgctgggcggaagcatgaacagtctctgcagactggcctggacgact

SEQ ID NO: 151377 - DNA, 122 bp, Homo sapiens
tccctcccccacccgacccccaactcatgggaaaaaaataaagactgcagtagtagcatccgcgtgcgctgccagttcccctggggccttaattgttgccttcgccgccatcgtcgtcctgc

SEQ ID NO: 151378 - DNA, 122 bp, Homo sapiens
acgcgctatcatctctagcaaactcccccaggcgcctgcaggatgggttaaggaaggcgacgagcaccagctgccctgctgaggctgtcccgacgtcacatgattctccaatcacatgatcc

SEQ ID NO: 151379 - DNA, 122 bp, Homo sapiens
ctccatctcatggtcgtttctgtctgctttcctctcatctataatcccaaggaactcactcgaagcagcatgcgtggctggctggtgggatcctccttatacatcaccgtctgcctgtacca

SEQ ID NO: 151380 - DNA, 122 bp, Homo sapiens
ggcaagggggaaggcaccaaggacatacctgtgggcacttggcagcgctgtagcaatccccggctgtggcaaaagggacgggatgtccttcgcttgtccttgcaaactgtaagtcagtggct

SEQ ID NO: 151381 - DNA, 122 bp, Homo sapiens
tcccattttgtttctttcatgctccctttcctcaatcacccactgctgtgttgttcccttcgcccagtccaggaaagggccacaggactgactgagacagaagaaaagatgcaaaggcaaaa

SEQ ID NO: 151382 - DNA, 122 bp, Homo sapiens
tgtctccctcccaccccctatcctccaccctccaaaatagaaaaatttgtttttagaggccgggtcttgctctgtgactcaggacctgtggccacatcctgtgctgcctcatacaaccttat

SEQ ID NO: 151383 - DNA, 122 bp, Homo sapiens
aagatcagctgacaatgtaggaatctggaactcgcagagaaactgcctgcccttgggactcgctcagcgccctcgcagccggaatggggcctgggaagggaggagccccagcagaggggcag

SEQ ID NO: 151384 - DNA, 122 bp, Homo sapiens
gatcgtgtcagcctctgagactaaaactgggctcctcaggccttaaggctccagcagacccgggcatctcccccctcccccagttgggttcgagttctggaaacagctgtgcgccgagcatg

SEQ ID NO: 151385 - DNA, 122 bp, Homo sapiens
gtggggcgagggtcaccgcgttcgccggtgggtgcatgtgtgcgcctgcgctccgggaaccgcacctgtcccaaaggcctccccaaccatgtccactctgagcgccctgggcgctcgggaag

SEQ ID NO: 151386 - DNA, 122 bp, Homo sapiens
catcagaaagctgaacccagtatctggcccgggctgtgtgcttccagcctcccctcctctcgacaccagaacagagcctggcccccagctcccaggaaatacagaaaaaaaaaatggtggat

SEQ ID NO: 151387 - DNA, 122 bp, Homo sapiens
acacccagaccgcaggctcctcctctgctccataggctcttggcactaccccgggatgagcgactgtctccactgccactggtcttgccagccattcacttgcccttgccttgtggtacatg

SEQ ID NO: 151388 - DNA, 122 bp, Homo sapiens
cccagggccccagtggtggccatcaccgtgcccagcgcctggcccgcccggcccgacccacggaaattatgaaactgcagatttcatgtaacaacttggtggcaccgggggggaagtacagt

SEQ ID NO: 151389 - DNA, 122 bp, Homo sapiens
gcccgggagagtatctgtggagttgtgccaacggtttctggccgtgatgctttcccttttcgtctctgggttggagggggcgggcgaggtttcagcgaagggtagtgctgttctgggggact

SEQ ID NO: 151390 - DNA, 122 bp, Homo sapiens
catgtccttggacaaattacattatatttctgggcttcagtttcttcattttgttatgcacgaacaaaaaaatgtacccttctcattggttcactgaaagtattaaggcacgttattaatgt

SEQ ID NO: 151391 - DNA, 122 bp, Homo sapiens
tggggcccacagctaaatccagtgagtggaagttacagggagtctgcttccagtgctgctcgaggaaggatcccatccaccagagctgccccacatggaccatggtcaggcagaggaagatg

SEQ ID NO: 151392 - DNA, 122 bp, Homo sapiens
gtagtttagttgggacgcttaaggagagcaagtcgtggcaatttcttctgctgattacagcggagttttggttttcttgttcccggtgtttactgtgtggtggagctggataagggagcacc

SEQ ID NO: 151393 - DNA, 122 bp, Homo sapiens
aaccacagtcttctccgtgtctgctgggcactggagtgtgagctctgggactggcccgggcggggactgagggggtggaaggcgtgctgccaagccacatggaagcccgccgcggcttccgc

SEQ ID NO: 151394 - DNA, 122 bp, Homo sapiens
ctaggctctgaaagctctgaggttagaagatgaaagtgagattcccgacagtgtgcaggacgcaacgacgtttgcggagaatgcttcacacctctcctgctgcttgtcccccgtgtctccag

SEQ ID NO: 151395 - DNA, 122 bp, Homo sapiens
caccccgcttcgcgccagtctgggcatcgcctcacccggggctcgggactccgcagggtccgctccagccacaaacatagacaccagcttgacccggctcagggcattcagagcgattacat

SEQ ID NO: 151396 - DNA, 122 bp, Homo sapiens
cgttgctccttctctagggataggagaggtcgcttcccggccctccgcagggtcacagctcggttcctcccagcccgccctccggggagcttagcaacggttgctacggcccggagcgggcg

SEQ ID NO: 151397 - DNA, 122 bp, Homo sapiens
ggtgccaccaaccaaagttccaagactgctggctgcagatggcatgcgcttggggacagacgccctgagactgtgtccacggcccgcctttggaatcctgggccctgaaacttcctctgaga

SEQ ID NO: 151398 - DNA, 122 bp, Homo sapiens
aagattgcctcatccgttacgttcccatttccgtggaacaacagttttaccagaaggtttcgaaggaaccttaaagtttggaagcgtaagagtttatctggtaactaattttaaacattaca

SEQ ID NO: 151399 - DNA, 122 bp, Homo sapiens
cggagccctggccttggttttgttgtggtcggcgtcgtgtcgccctctcttctgccgccccgcacttcctttgtacgtagttaataagcagtgtcgctccacattcgctgtcttttgcaatc

SEQ ID NO: 151400 - DNA, 122 bp, Homo sapiens
tttttttgttgtttgtttttgagacagcctcgctctgttgcccttgctggaatgcagtggcgcgatctcggctcactgcaacctccgcctcctgggttcaagcaattctcttgcctcagcct

SEQ ID NO: 151401 - DNA, 122 bp, Homo sapiens
taagggtgtgagaattcctgcttcctgaagtgttggaaagttaaggtcaaatgctgggtgcgtttcaagttctgagacaataccagccgatttcaaagctggtgtttgtgtgtgcgtgcata

SEQ ID NO: 151402 - DNA, 122 bp, Homo sapiens
tctgagtgtccgggaggagggtggcgggaggacccccgggtgggggcgccaggctgcccacgcgtgcgttcccggcctcttgggggacccgagcggcggacctccggctccttcccctgtcg

SEQ ID NO: 151403 - DNA, 122 bp, Homo sapiens
tccgcgcctctcctcggctcccattggctagagcagtagtgtggacggaaatctgtcagtcgattggacgctcggcccgtcacatcccgcgctgcccacccagaggtttggttgagactgca

SEQ ID NO: 151404 - DNA, 122 bp, Homo sapiens
tgtctgcttttcctcagtaggttacagacatttcagtctactaacccccagaagaaacagcgtgctgttagatttagttatattatcacaggtcattttaagattttcattcatttaatgta

SEQ ID NO: 151405 - DNA, 122 bp, Homo sapiens
gggagtgttgtgaaagcagagagcccgcgagctctctagggcggagctccgcgggggaagcgccggcgatctcgcggctggcgggggcgggaccgcagtgcgggggatgtcgcggggcgagg

SEQ ID NO: 151406 - DNA, 122 bp, Homo sapiens
gcagctcccggactgcgcccgccccgccgcggtcaccctgaggccaggggcccgggagcgcgacctcctggccgccgtctgggactttgaccttccagaggccatggaggctggcggggagc

SEQ ID NO: 151407 - DNA, 122 bp, Homo sapiens
gatgaaaagagaaagagaaacccagagtgagacagaactaaatgaaactgacatgagtggcgtctatacaacaggctgagcccaacgttgtggcaggggtctggagggaggtgagtgtgaat

SEQ ID NO: 151408 - DNA, 122 bp, Homo sapiens
cgaggggttgggggatgcggcacctggtcagcacgaggccggagcagtccctgtcctcggcgggctggccgatcagcaagatgtcaggcaacaccaggcctggcagggaggcggccacgccc

SEQ ID NO: 151409 - DNA, 122 bp, Homo sapiens
ttttctctctctctgtctctctctttctcgggtttctgttttctctttttggtttttaggcgagtccggctgtgaagttaccgtcggtggcggccccggggccacctccgctgtcacctcct

SEQ ID NO: 151410 - DNA, 122 bp, Homo sapiens
tgatctcaagttgaagccaatgctcgtttcccattctgaaaatcccagggtccttaagaacgatgctaattctactctgcctgtgctctacaaatggaataacaaagcctggatgatagcat

SEQ ID NO: 151411 - DNA, 122 bp, Homo sapiens
gaagctactgttatcctgggctaagccaccctggcttgagcaggaactccctgacatggccgcctgggcatcaaaggacctagcggtctggctccgggcttcagtactgatcaacatcttcc

SEQ ID NO: 151412 - DNA, 122 bp, Homo sapiens
gccaggagaactttgaatactcaaagacaagatgtggttacgtcaagggcccctcctaagcggagaagtgcgcctcacttggtagcatgtgccgcatttgaaatacatgatctttttaattt

SEQ ID NO: 151413 - DNA, 122 bp, Homo sapiens
ccacacacttctgatgcagtttgagtattcaataattgcatattcgcggtcccatttacacgaggagagtcacattgagtaattaaaaatcacaaagcaaagcgacagcagtggagaccatc

SEQ ID NO: 151414 - DNA, 122 bp, Homo sapiens
aagcttgaattaacttatatgaattcatttagccctcacaacgaacctagaggtaaaaaccgtgctaaaagtcgtgatttgagcccagagcaatgtgggtccacagtccctgctcactgttt

SEQ ID NO: 151415 - DNA, 122 bp, Homo sapiens
agaggacctcgccctgtcaggacagcagcggtgagtcgctagcgccccagccggagccgccgcagcccttccgcaatcgaaaatgcaggatcggtctgatcaggcagggagggagaaaggag

SEQ ID NO: 151416 - DNA, 122 bp, Homo sapiens
agagcggcaggactggatggagctgttcattgacacctttaagctggtgcacagggacatcgtgggggaccccgagaccgcgctggccctctgctaaagcccgggcacccgcccagccgggc

SEQ ID NO: 151417 - DNA, 122 bp, Homo sapiens
ccctcaggggctggcgggccaggaaagcgacttcaccgcacctgatgtgtggtaccctggcggcatggtgagcagagtgccctatcccagtcccacttgtgtcaaaagcgaaatgggcccct

SEQ ID NO: 151418 - DNA, 122 bp, Homo sapiens
catcggtgtgagcgtgtgagcgtccgtgtgagtgtgaccatccatgtgagcatgtgtgaccgtccgtgtagcatccatgtgagcgtgtgagcatccgtgtgagtgtgaccacccatgtgagc

SEQ ID NO: 151419 - DNA, 122 bp, Homo sapiens
tacagcagggtggagagggaagcccactttccggtaagcgggcaaaacaggtactacgaccgtgttacttatgctagcaacagttccgacttaccttaattgggtttcttttcctgaaaggt

SEQ ID NO: 151420 - DNA, 122 bp, Homo sapiens
aattggtgataagatttaaaattaaactgcaaaggatctgttcccccagctacaaatagacgtgtgcttgcacattccagaacacaagtgtgcaccaagagatgtgttttgagtcaaggtgg

SEQ ID NO: 151421 - DNA, 122 bp, Homo sapiens
atggaaggcagctttctttatagacactttattaaaactgctacagcctgctccggcgtgcgctgggatgtggtgaacccagccgacgacgctatctttcaatggttactttgtgttttttg

SEQ ID NO: 151422 - DNA, 122 bp, Homo sapiens
ggtagagtcaaggagggtcttcttaagcgttcctcggcgcggtcctgaagagattaaaggcgtcaaatggaccgctccacacctgagctgccgccaagctaactcaatccgagccggcgcat

SEQ ID NO: 151423 - DNA, 122 bp, Homo sapiens
aggagtttttaagattctggtcaaaagctcttggagtgtctcatcagaaaaggcaaatctcgtatacatataaacttgttggggctgtaatacataatagccctctgaggccaatccctgga

SEQ ID NO: 151424 - DNA, 122 bp, Homo sapiens
ctacgtctgcaaatgtggaccgcgtgattgactccagtgggattgttgcctccagggtggcggagtctcctttcaggcagtgctggaggcagccctaggcgggtccccacgcctcagggggc

SEQ ID NO: 151425 - DNA, 122 bp, Homo sapiens
ggccctgtgcgcatgctcagtagctgcgaatgcatcctaggcgcgtcctcctctgatccccgtgtaagactgccctggtgtcggcacttaggaatgtgtaaatggtaaagtctgatgtgcaa

SEQ ID NO: 151426 - DNA, 122 bp, Homo sapiens
acatccgattgtgaaagatgtcacccagaggcgggcagaggggctgtcttttccttttctcgttgctgcccagggaggagacggggtgacctttcccacaggggcagcctgtggcgatgtgg

SEQ ID NO: 151427 - DNA, 122 bp, Homo sapiens
ctgaatagctgggatcacaggcgccacgccccactaatttcttttgtattttagtagagacggggtttcaccgtgttgcccaggctggtctcaaactcctgagctcaggcagtccgcccgcc

SEQ ID NO: 151428 - DNA, 122 bp, Homo sapiens
ctaattttccgcttttccccggcgacctagaaaacttggtttctctggtggaccagccgccgcgctatcgaagggcgacccttgcccaccgtcccctaaagtgagacgctgattcccatgga

SEQ ID NO: 151429 - DNA, 122 bp, Homo sapiens
cagctggggccactcgaccccacactctaatgtgcattgcctatgactcaccaacaaaaacgactgtatgtttcagtctccctgggtagctgattcctagttgtggtgggaaatctcagtcc

SEQ ID NO: 151430 - DNA, 122 bp, Homo sapiens
ttgttggttacctcacttgaaaagaccacaaccaacctgtcagtagtatagttctcatgacgtgggcagtggggaaaggtcacagtattcatgacaaatgtggtgggaaaaacctcagctca

SEQ ID NO: 151431 - DNA, 122 bp, Homo sapiens
tgagttctattggcagtgacgatctaactgtaaaggtcataggaaggcagcagcagtgagcgccttgtacagcataaagggctgggatactctccgtgggcaggggacagaatggcactggg

SEQ ID NO: 151432 - DNA, 122 bp, Homo sapiens
attgtgggtggggaagttgtgtttgctgagtagattgtgacactgctggcttgggtcactcgaggtcagggatgagagactttttttcctagaattggtaagacaggaaatcaatcagaggc

SEQ ID NO: 151433 - DNA, 122 bp, Homo sapiens
agcggtcacctttgtcccggtgtccaaggtgagcgggcaggcagaggtggacgacatcctcgcggcagtccgcccgaccacacgcctcgtgaccatcatgctggccaacaatgagactggca

SEQ ID NO: 151434 - DNA, 122 bp, Homo sapiens
ctgcagaactgcagatgggcgctggtgcccacatctggctgagatgcttctctcagctgacgcccgcggtcgcccgcaggtgctgtgaggtctgctgggtttctccctgccaagcgactctc

SEQ ID NO: 151435 - DNA, 122 bp, Homo sapiens
atatcattataggccaatgactcctacatttctatttccagctaaacatttccacctcatcgtgtctgaaactgaactcctaatcccgtgccactttccccaattcaactcatggcaactca

SEQ ID NO: 151436 - DNA, 122 bp, Homo sapiens
agaaaccaaaaaggtgggccagcaccggaagcgggggcgcgggttcgggtagcggggacgcgcacgcaccttgcgcgtcttcgcccctcctgcggttgccaggcaaccggccccggaagttg

SEQ ID NO: 151437 - DNA, 122 bp, Homo sapiens
ggccaggacagcagcttataaaccaccttataggtaggtaagcaacccacgggattccctcggctgggctggggatggggagggggcagtggacaggaagcgggcagggcctgaggaccctg

SEQ ID NO: 151438 - DNA, 122 bp, Homo sapiens
cagcacccctcccgacgttcttggggagatttacggagccagtctctgcttgtttgcactcgcagaaaacctgggccctcagttccggtgatggctctgagactcgctgcagctctgtttgt

SEQ ID NO: 151439 - DNA, 122 bp, Homo sapiens
atggcctctccaggggcaggtagggcgcctccggagttaccggagcggaactgcgggtaccgcgaagtcgagtactgggatcagcgctaccaaggcgcagccgattctgccccctacgattg

SEQ ID NO: 151440 - DNA, 122 bp, Homo sapiens
ttcagctctataagtaaacactccgcaaggcacaagcatggcctctttctatttttgaggcggtggctgcagcagcgactcggagtggttccggttatctctcagcttggcggcctggcaag

SEQ ID NO: 151441 - DNA, 122 bp, Homo sapiens
attagaccgaaatactgacccctgctcactgccccatctgcggatgccacggctccctcacggttggcctggtaccccctgtgtgtcacctgtgtatccacaggtgacggtgtggcagacac

SEQ ID NO: 151442 - DNA, 122 bp, Homo sapiens
cacttcaggtgagagcgggcatggcactaggaggagccccatgagcccagagtggtggcacgtagaggcctaagggaccatgccagcagaccccaccgcccgtgctccaccaggagcctgac

SEQ ID NO: 151443 - DNA, 122 bp, Homo sapiens
cggtgtccaggcttcaagacctaggctccaatttctcaccgtgaagaagctcgggaaaaccgggcgcttggggaggcgcgcgggcagaggctacccgtccccgcggcctctagacaggggcg

SEQ ID NO: 151444 - DNA, 122 bp, Homo sapiens
acctccgcccccgcggcagcccgggtgaatggagcgaggcggcaggtcatccccgtgcagcgcccgggtatttgcataatttatgctcgcgggaggccgccatcgcccctcccccaacccgg

SEQ ID NO: 151445 - DNA, 122 bp, Homo sapiens
ggggttgggaagtgccaggggcctcaggggcaagacactgggctccagccaggcctgtgacgttcaatccccacctttttcttcccctatctgaacaccagggagtcagaatcaaaaatccc

SEQ ID NO: 151446 - DNA, 122 bp, Homo sapiens
ctgctccgcccctaagtcgggaaggttccttgcggttcgcggcgtgccggacgtgacaaacggaagccgcacgtctcactagtaccctcgcagacggacagcgccagggagcaatggcagcg

SEQ ID NO: 151447 - DNA, 122 bp, Homo sapiens
cgagccacctttgcgttgtggtcacagagctcggccagtggccggccagccagcgcataacgctcagctgtgtccacaaaccagcgcatgccgccgccacctggctccgtctcaaagacact

SEQ ID NO: 151448 - DNA, 122 bp, Homo sapiens
gaactggccactttaaggactaccattctggtggcagttaaatactgtggaaaaatgacccggcaggcagctgtctaccccatgggcagttccagaagactttattccagtaggaactgatc

SEQ ID NO: 151449 - DNA, 122 bp, Homo sapiens
cagccgggccggcggcgggcaccaggccgtcccgatgcccgagccaggccccaggatgaacggcttctcgctgggtgagctgtgctggctcttctgctgcccgccctgcccgagccgcatcg

SEQ ID NO: 151450 - DNA, 122 bp, Homo sapiens
atccgctccaaacccccagccccgtgtgggtaagagccaatgccggcaaggtgaaggctgcgcggggtgggggcgacgcgactgccgcccgcccacccgcaggccacggcggagttgcaccg

SEQ ID NO: 151451 - DNA, 122 bp, Homo sapiens
aaaagatgcttgcagtgcagggcacacggaggagatggctccagcagtggcgagggctggcggctgcctgctgcctagcacagctacttcacgggttcagaacccgaaaccacagcccacga

SEQ ID NO: 151452 - DNA, 122 bp, Homo sapiens
cccccccactagagggcaggcggcccgaatgaatgcctgatgtgcccagaaacactcaaccgtctgggaatatttttctcaaaggcttcggctctcttctcggccgctggtggaggaaaatt

SEQ ID NO: 151453 - DNA, 122 bp, Homo sapiens
cggattcgtgaagcagttgagtgctgcagcggcagtcgtcgcccctgccgccgctgccaccgaaggaagcatcccagacaccgggaaggtaaaggggctcagctaggaagacacagtgtatt

SEQ ID NO: 151454 - DNA, 122 bp, Homo sapiens
gcaaggcttctggggttgcagagtttcagggtctagacgggtggtctccattgcattcaacgcgagcgccctgtatctatggactgtgagcttggaaatgtttgtgctactggaaccgcggc

SEQ ID NO: 151455 - DNA, 122 bp, Homo sapiens
aggcaaaggggaagtctggaaagagagagactggtttaaaaacaacaacaacaacaaaaacgctcagctgtaagtcctgcaaaaattgcaaagtaatgggcctcttcaatcatatttattaa

SEQ ID NO: 151456 - DNA, 122 bp, Homo sapiens
gctgaaatccctttaacttttagggttacccccttgggcatttgcaacgacgcccctgtgcgccggaatgaaacttgcacaggggttgtgtgcccggtcctccccgtccttgcatgctaaat

SEQ ID NO: 151457 - DNA, 122 bp, Homo sapiens
tagataaagatacaggtgtgcttctcagagttcaaagttgggcttcaaaagcaaactacccgcagaaccaggatctcaaagagaactgccttccgtctgtgcccctgctttgttctcttgcc

SEQ ID NO: 151458 - DNA, 122 bp, Homo sapiens
ggctgagatgcacgcatgtgtgtgtttttaaaatttgcagagtttagaacgttctttggacgttctccatggcctggtgcctctccctggcagggcagctgttcctcccctgtgactcaccc

SEQ ID NO: 151459 - DNA, 122 bp, Homo sapiens
tcaccaatgcaggttttcccgtctcagaaaatgtacccctagagtccggcacataaatgccgccgcagggcgcgagacacagtcgtcgtcctgtcggtggcgtcatcgccgtcttggtgcag

SEQ ID NO: 151460 - DNA, 122 bp, Homo sapiens
gattatctcacatcctgtgctggtcgtgctattagcaacctccttaacttgaggaggctccgggcttgtgtgcttagcattctttgcttcctgcatgcccttttctctagctgggctcttca

SEQ ID NO: 151461 - DNA, 122 bp, Homo sapiens
aaatgaagcatttttttctcgatattggctactgatattagcatctaactagacaggaagcgaggaactaagagaagggaatagataattaaggccatcatgcatttttactctgagctctg

SEQ ID NO: 151462 - DNA, 122 bp, Homo sapiens
ggcctaatctcatagatgcttctcttggagaccttccatccacacaacgtaggggaagggcgagaagggatggcttcccctccagactgaaccattatttctcttgctatacctgtctccct

SEQ ID NO: 151463 - DNA, 122 bp, Homo sapiens
cctctctacccctccagtaaaatctctctccagttcctggtgtcttcctccaggaggacacgatgatatacaagcacacatgcagcccactcatctgcaccttgcttctttccacctcatac

SEQ ID NO: 151464 - DNA, 122 bp, Homo sapiens
cagctcttaagggaagatcgaggggtcaaaggtcgggttccggtcaagcccacagagaaccggaagtcccagatccggtcggctcggagcccagggctccagccgggctactcacgctccgg

SEQ ID NO: 151465 - DNA, 122 bp, Homo sapiens
gagagcactctcgaggagcccgcaggcggggctcggccggggaccagcagggcttgtcggcgcccaggctctgccccctacccgaccctgcctgccgcttgccgcctgcctttggctagggc

SEQ ID NO: 151466 - DNA, 122 bp, Homo sapiens
ccgcatcagtttactatcagtcatctcaactgctcttgctttcttcagctttcaaccctccgcagtctgtttgctgctgtatccccagccctcagcacagtgtttgatttagtagatgttca

SEQ ID NO: 151467 - DNA, 122 bp, Homo sapiens
gggagcgcggccccaacccctccccgaggaagtgagcgcgggcccgccccgcccggaccccgcccccggccccccagcccgccgcgggggccagaccccgcccccacctccctttcggccgc

SEQ ID NO: 151468 - DNA, 122 bp, Homo sapiens
tttgtaggtcagaagtctgacgtgggtcttactgagttaaaatcagggtgccagcagggccgcattccttctgcaggctccaggagaaagtctgttcccttgccttttccagcttctagagg

SEQ ID NO: 151469 - DNA, 122 bp, Homo sapiens
gcattgggtaattactatttattagcattacatacaatttagaccagtttcaggaaacaccgtataaattctttcccttgaatctgaccttaaccacaaagtctaatgatctaaccagagca

SEQ ID NO: 151470 - DNA, 122 bp, Homo sapiens
ccgctcccctgtttaatatttcagtgctgggtggtgtgagcgccagtcgccggccttcagcgtggcggctgctgggcggcggcagggtggcggacggagcgggggaccggggagcggcggcc

SEQ ID NO: 151471 - DNA, 122 bp, Homo sapiens
cattccatagatgccccagcctttctcagtttggcaggtgattgagaaagaaccccaaggcgtcctggcctttcccatggaaaggcaggttgagataagaagagggctggactgcacagaca

SEQ ID NO: 151472 - DNA, 122 bp, Homo sapiens
ggatcttaaaatggtttcacttcatcagcggttaggacatgtgaccttttggagaacgtccgtcctcctcactatttttaacttctattgtttttgatgatgtaaattccattcagacaacc

SEQ ID NO: 151473 - DNA, 122 bp, Homo sapiens
caggcaggcagacagctgctgggggaaatcctggggtccttgagacagaggcaggaccctcgtgttcccagctgcctcttgccttgatagtggtgctgtgtccctctcagaccccccacctg

SEQ ID NO: 151474 - DNA, 122 bp, Homo sapiens
aagaatttaagaaaatacttgttatgcaaacaaacatttagcccacttaacattgagctacggtcgtccaaagctgcttagtgtccgcgaggaggccgtccggatgcgcgatgattcaggcc

SEQ ID NO: 151475 - DNA, 122 bp, Homo sapiens
agcaatcctgggagagtgaggacagcgggtggtcagagaaagggcatagaagcaggcagacgccgaggagaaaggaactcggaagagcagaagaggacagaccaagcaagggcggaagagaa

SEQ ID NO: 151476 - DNA, 122 bp, Homo sapiens
tcatcacaccactccacagctgttttccagaggacgcaggcccgaggtcacacaaggtcccgtggtgtggcactggtcaaatcgtggggtgaggagctagacaggccccggcatgaacacca

SEQ ID NO: 151477 - DNA, 122 bp, Homo sapiens
cctctgggggacagtggtggactccacccttctttctccctccatcactaggtcaggaggcgtctcgggcctggctgcggggccacatgcacctgtgctgaagaacttgcaagcagcaagga

SEQ ID NO: 151478 - DNA, 122 bp, Homo sapiens
gttaggtacctgaagtttgttctgctaaagaaagaggtaataggtagagagagtgggaagcgctgagaaggccaaactgtgctacaggagaaaaggctaagagcaaaaaccaagatgagagg

SEQ ID NO: 151479 - DNA, 122 bp, Homo sapiens
gcgcgcttggggccagctgcacgacaagccccagcatgctggggaggcggggctcagtgacggacagggagctctgcgaattggcgcccggcaaggggtgctcaacggcgcgtgcgcagagg

SEQ ID NO: 151480 - DNA, 122 bp, Homo sapiens
atcctgaagggctctgatgcctgtgctgttatggggccctccctggacaccctgcctcagcgaccaacccatgtgctcctgttccttctctttgcttcctttcatctccccgaaccaccagc

SEQ ID NO: 151481 - DNA, 122 bp, Homo sapiens
gcttgaaactgctcgggctgaatagcatttgctgttccgtcctgcggccgcctcccgccgcggctgccgcgctccctgcaaagcagctctcattatcccggaagttgtgctgacacagtctc

SEQ ID NO: 151482 - DNA, 122 bp, Homo sapiens
gcccggagcaccgccctgacggccttgggcagcggcaccttcactccccaggaccgtggtcgttgccacatttgctgggccaggtgctgacagacgtgcccgtctgcctggagggaatgttc

SEQ ID NO: 151483 - DNA, 122 bp, Homo sapiens
atcttggacccctcaccctggctccctctgagttgcagggatgcccagctgggctgccagcggacatggggcctcactatgctgacatctacaaaggcactgatcgccttgggattctgcag

SEQ ID NO: 151484 - DNA, 122 bp, Homo sapiens
ttcctttaaggagggtgcaaagttgttctaacagtttccgttacaagggtacaaactggccgctccccccaatagacggttttgttgagttcgcctctttttttttcttctttttttggccc

SEQ ID NO: 151485 - DNA, 122 bp, Homo sapiens
cgcttctcgcttggatggaggcggggccgcagtctcccaggtcccagctggggctgacgtcgtcctggtgtgtgcccaaaatagccggctccgccctcttctcccggcagcccctgcaggcc

SEQ ID NO: 151486 - DNA, 122 bp, Homo sapiens
ccctggaaatcagaatactaattgtagtttggggcttcataatttggaaaggaactaatacgatagtggtgaataaccttcaagtcttgaaaaactgatttaccctaagaatccaaactgcg

SEQ ID NO: 151487 - DNA, 122 bp, Homo sapiens
ttgggtacagagtttactgcaccggaccacctgaattccctgggctgaggctccatagcacgcgaactaccttgcgtgagcactatgtagattcgacttcgtgttgcctgtgacacacaggc

SEQ ID NO: 151488 - DNA, 122 bp, Homo sapiens
aggcgccaaggcagggaggtgaagctccccggtgcataagaaaggcacacagaacaggagcgcgcaggaagggctcgcagagcaggagcgcacgcgtaggaagagcacgcagagcaagagcg

SEQ ID NO: 151489 - DNA, 122 bp, Homo sapiens
gcactttttgagcccattttcgaatttgctagatgggaataaaacctatttcacgtacttcgcagggctgtttaaggatttaatgatacaatgcgtgtgtgtgtcctactttaaagtattct

SEQ ID NO: 151490 - DNA, 122 bp, Homo sapiens
tgatcagctagaagcatttaactgcatcccagtggacagtgctgtggcagtagagtgtgacgaacaagttctgggagaatttgaagagttctcccgaaggatctatgcactgaatgaaaacg

SEQ ID NO: 151491 - DNA, 122 bp, Homo sapiens
ctatcattcaccctttcggtgctttatttcctaaggcatgggatgggaacaatgagtatccgtccaacctacttcaccagcttgtgaaaaaccagagtgagagaacacatctgaaagcactg

SEQ ID NO: 151492 - DNA, 122 bp, Homo sapiens
aggttgctgaggactaacttagcaggagccaggggggctctgcttggtggggcaggagtccggtgtgagtctctgactcaggctactgacccggtgttgggacagagtgggggcgggtgtga

SEQ ID NO: 151493 - DNA, 122 bp, Homo sapiens
cgtcgttagtccttcctggaatttctgcgatttacacaacgtcgaattgtttggcagaaacgcgtggcaaactccgttatctttaaaaccttccccaattcactggcatagaaattcttaaa

SEQ ID NO: 151494 - DNA, 122 bp, Homo sapiens
aaaataaaggctcatgttgctgcgttagctcatgtctgtaattccagcactttgcaaggccgaggcaagtggattggttgagcccaggagttcaacaccagcctgggcaacaaagcaaaacc

SEQ ID NO: 151495 - DNA, 122 bp, Homo sapiens
cccaccaggcaccttctcagccagggacccaggaccctcttccccggaccctcttctgaccgaggtttcttcattacaggatcagggccactgaaacagcaaaagcctctagtgagctcccg

SEQ ID NO: 151496 - DNA, 122 bp, Homo sapiens
agataatagagcatgtgccctccactccctacacttatttgacacatgttcactttttgccgttgttgttgaagatttttatttttttttatttttgagatggagtcttgctctgtctccca

SEQ ID NO: 151497 - DNA, 122 bp, Homo sapiens
ctcctttagttgtctgccattaatcttaggataaatctgtatttttgacaaaactcacaacgccttcgttatctgaccttcactaaccctcctgcttccctctcccttgtcccacttcaaac

SEQ ID NO: 151498 - DNA, 122 bp, Homo sapiens
tggtggttaaatatcacagtccctccatagtgggtggtaaccagccactcttcttatcctcgatgtgactggatgctcccccttctctcccaggccctgcatcacccggccctcaccaaaat

SEQ ID NO: 151499 - DNA, 122 bp, Homo sapiens
gggagccccagcggtggggtcgccatggggtcggggacttgcatctctcccaggcagctccgggtcacagctgcggctgagaggccgggggatgtctggggaccaccctggacccctagtcc

SEQ ID NO: 151500 - DNA, 122 bp, Homo sapiens
gctgggcctacgaccacggtcaccccactcacgtgcgcgcgccacgtgggcccgcgggctcgccgaggacccttggctgcctaccggggcaccccactagctgctctggcctatcgagcacc

SEQ ID NO: 151501 - DNA, 122 bp, Homo sapiens
gaaatcatttggttcaatgcatctcaaatctggtggctgcaaaactcaaagactaattcccggaccctagcccagacccactatgtcagaatgtccaggggatgaggcccaagaagggatat

SEQ ID NO: 151502 - DNA, 122 bp, Homo sapiens
cagcttgctgtgtgcatctcagacgtcggttggtacgtcctccgctgttcttcaggaaagcgatagcctcacctatttgaaacaagccctgagaggaaacgcagaaaaacctgagtgtaaac

SEQ ID NO: 151503 - DNA, 122 bp, Homo sapiens
ttaggataaactcaaaactccaggttcctcatctaaatcccactttcaagttgtcatctgcgccttgcgtaaaatgttctggtgacgtaagagcctgggcctccctcctcttagggactatc

SEQ ID NO: 151504 - DNA, 122 bp, Homo sapiens
aggcgggaaggtgctcatgcatgcggtgccgaagcttgttttctcattctttctggcaggcgcccatgctggaaagtaaatctgaccttgagcttcccactgcattaaagataactcagttt

SEQ ID NO: 151505 - DNA, 122 bp, Homo sapiens
gacacaggagacaatcactttgggaaccattattattaaaaatgccgtttccactcttctcgttttttttaatgctgaagacagaatgcataagtcactcatctgtttttttttaatgctga

SEQ ID NO: 151506 - DNA, 122 bp, Homo sapiens
ccaccaagtccaaatcgacaaccagatagagcctctgtgctggtttgagctattgctcaacgttctaggctttaatattttaagaaaagtttattatgacaagtcaatgacagcacttttag

SEQ ID NO: 151507 - DNA, 122 bp, Homo sapiens
cagtgccccttgcaagtcatgctcctcctgtcggtcagtgcctccgcatctgtcagtccgcgcactggtcagtgcctccactgttggtcagtgctcccccaccgtcagtccactctgctccc

SEQ ID NO: 151508 - DNA, 122 bp, Homo sapiens
aatagtgtggacagggctggaacctttaccacgcttgttggagtagatgaggaatgggctcgtgattatgctgacattccagcatgaatctggtagacctgtggttaacccgttccctctcc

SEQ ID NO: 151509 - DNA, 122 bp, Homo sapiens
atgcagttctcaagaccaaaggtatccgtgatcaaagggtggggacagatccaagacagacggagcaggtccttttcctgcccagctgggtaaaggcctctgccctgttaatcatggaataa

SEQ ID NO: 151510 - DNA, 122 bp, Homo sapiens
aagacggcggcgaaacgaactcccctctcctctcgggcctattctgcagtctcctctgagcgcctgggaccccccaccccagtgaacatgcacagcgcgccacagttcacgtccgcgaatat

SEQ ID NO: 151511 - DNA, 122 bp, Homo sapiens
ctcgcgcccctccctgcagggctcaggctctccccctcctgtcttctccgcgctgttcctcgtcatggcggccctcagcaagtccatccctcataactgctatgagatcggccacacttggc

SEQ ID NO: 151512 - DNA, 122 bp, Homo sapiens
agtttattgtagctttttattggttagctttcctgaatcattttaaaactactccaggtgcgaagtatggcagttgcccaagctaagagaaaacgaatctacagctgtgttccacacggaat

SEQ ID NO: 151513 - DNA, 122 bp, Homo sapiens
tcacagatgggatgtgttcttcttagtgcattatgttggtaggggggcatgatgctgatacgtactactggtgatgttaaccttgatcacttgggtaagagggtgtctgctaggtttctcca

SEQ ID NO: 151514 - DNA, 122 bp, Homo sapiens
atcaggtcagagcaatgagggaagctgctctgccggtagtgggctttcttcttctcagaccgctgtcgcctcctcctccgactaccccggctgctctgagggtcatgggaggtacaggcccc

SEQ ID NO: 151515 - DNA, 122 bp, Homo sapiens
ttcagttcctggagatccatcatcatcctcttcatcagaagtgtaaaatccagtttcatccgatttactttctttggtgcatatggaatcaccatttggtgctgcttcacatgtctccaaat

SEQ ID NO: 151516 - DNA, 122 bp, Homo sapiens
cctctcttccccgccacccgtttctacgcagatcggtgccccagtccctggaggagcctccgccgcctccgccaactccgcaggaccccgccgggaagtagagcccacccctttaccaatca

SEQ ID NO: 151517 - DNA, 122 bp, Homo sapiens
tcggccacacaggccgcgtccccaccccatcccggggagccgggctgcgcctggatgtgccgcacatctcagagcatctggtctcaacattgtcatccatgaaacggggataatcatctcca

SEQ ID NO: 151518 - DNA, 122 bp, Homo sapiens
taaaaataacaaatactaagccaaacacctgcccaggctctgctgcctcacagagtgtggcgatctgaatactctgttgtctcttgtgggccgggtggttttgcttcgctccctgttctact

SEQ ID NO: 151519 - DNA, 122 bp, Homo sapiens
aattaagtaaatcaaatatgcactgtctgctggcaatggagaccgaggtgcaggtaggcacggcacttcttcctacgctccattttccttggaaaccggcactgtggatggcacatcagtag

SEQ ID NO: 151520 - DNA, 122 bp, Homo sapiens
gtttctccgggctggaccctgcgtgtgtgcggggcagcctctgcgtggctaggggtggcacggcctatccttgaacttggcagggacctcagcccggaaggtgggctttgggccactgcctc

SEQ ID NO: 151521 - DNA, 122 bp, Homo sapiens
aagaagatgatggagtagatggtgggcaggaagattttattgaaattagcattttcttcacggaaacagggttccttcatggagtcatagtcccctgagcccatttcctcggtgtagttatc

SEQ ID NO: 151522 - DNA, 122 bp, Homo sapiens
agcaaaaccttggaagccaggaacaccctcaggctgtggaaaaaggcctattttgacacccgggccaagatagaggcttcggggagggaagatcggtgggagtttgaccggaagcggctgtt

SEQ ID NO: 151523 - DNA, 122 bp, Homo sapiens
acggcgggtcttgcgggccacgggaaggaaggacggggaggagtgcgcagccccactttgcgccaggggaaaaccatgttcgtctgacaggttaggacaccaagattatagtcaacaaaaac

SEQ ID NO: 151524 - DNA, 122 bp, Homo sapiens
ctggtgcacttctccgtgtctgagttgcctagtcgcggctacggcgtcatggaggagatccggcggcagggcaagctgtgcgacgtgaccctcaaggtaccgcggactgggcggcagcgggc

SEQ ID NO: 151525 - DNA, 122 bp, Homo sapiens
attctcctgcctcagccttccgagtagctgagtagctgggattaccggcatgtgccaccacgcccggctaattttgtatttttagtagagatgggattttaccatgttggtcaggctggtct

SEQ ID NO: 151526 - DNA, 122 bp, Homo sapiens
ggtgggcaggacgttctcaccccccgccccctacactcgcaaactcgcaggcacagcctccgtcatcgccccacccgaatctcagaatcggaacttggccgctcactcggcgcccggggccg

SEQ ID NO: 151527 - DNA, 122 bp, Homo sapiens
ctgtcgcgagggaggcactgggtgggagtcccctcagctcagggcctggcgcacctgacccggggctgtgctgacccatttacctggcgctgttctaaatggatgtccataggacaagggca

SEQ ID NO: 151528 - DNA, 122 bp, Homo sapiens
ggcggcgggacaccccgcgcaggccaacaaaaggaggggagccgctcgctcccgcttccgcgttttcattcaacttcctgggcctaaagcgccctccagcagcctgcgggccgccatcggga

SEQ ID NO: 151529 - DNA, 122 bp, Homo sapiens
ggccagagaccctgccttctgggccaggaaggctaaaaaaagcagaagtaggaagagtaacggggccctctggtcaccggcttgagccccaccatgcagaccccagcagatttccccagggt

SEQ ID NO: 151530 - DNA, 122 bp, Homo sapiens
tataagctcacctgtgatctcctcgcagagaccttaacttaaagtgggccaccctatcctcgccaccatgatcacaattgcaaattatcttatttatttacttatttgaatagttatgtcat

SEQ ID NO: 151531 - DNA, 122 bp, Homo sapiens
caggggtcggggccgggggcgggggcggggccgggggtggcctcgaggctcccgtctgaccgtccccgcccaggcctgagcaacatcatcggcgtgatcgtgtacatctccgccaacgcggg

SEQ ID NO: 151532 - DNA, 122 bp, Homo sapiens
ccggccgcctcacgtgacccggtgcagcgcgcgcccgggacgctacccagccgagcatcccgcaccgccccggccccggccccggccgaaaccctgctcttcgggccctacaacccgacttc

SEQ ID NO: 151533 - DNA, 122 bp, Homo sapiens
tggctgcagaggcagggagagacttgggggagatggggctggtacagagggcccagctctcggcggatgttgactttcagcccaggacaggagctacgtctgaagagtgattctgaatacag

SEQ ID NO: 151534 - DNA, 122 bp, Homo sapiens
ccgattgcagtgaagttaaagggcgagatggccgccacgaagccctggggaaggaggcagcggtgagatcaggcccatggcattgggctgccccgcctgctcgcccactgcctcctgcaggt

SEQ ID NO: 151535 - DNA, 122 bp, Homo sapiens
ttgagaaagtctttggacctggtagcctggtgctctttctcatggcttcacccagcctcccgggcagtgactgctcccaaatcattgatcacagtcatgtccccgagtttgaggtggccacc

SEQ ID NO: 151536 - DNA, 122 bp, Homo sapiens
gccccccgggggcctggcggaaccgccggggtccgcagggcctcaggccggccctactgtcgtgcctgggtctgcgacccccatggaaactggaatagcagagactccggaggggcgtcgga

SEQ ID NO: 151537 - DNA, 122 bp, Homo sapiens
caaaacgatcgttgtgaaggaagtaggatttacagaagcaggatgtaatgaaccaccaggcgtgcaccacaggcccctggcgtgtctttctcagctgcagtctctcctttccctgccctccc

SEQ ID NO: 151538 - DNA, 122 bp, Homo sapiens
gattgacagttttcgaagacctagagaaagatgacagcacgaagagagacagggagaatccgaggtaaaactgttaggaaaacttaggagtccagatgctgtccagttatatgctaccctgt

SEQ ID NO: 151539 - DNA, 122 bp, Homo sapiens
tgagaaggctccagaaggttttggagcgctggaagaaggccaggcctggaatttacgcgtcggcctcttggtgtctcctcccgctgaagggagtaaatccaggcaggtctggggctgccggg

SEQ ID NO: 151540 - DNA, 122 bp, Homo sapiens
ctgcgaagaagtgaagacactaaaggggcgcagcgttgtgtttacttggcggcagtggagcgggtccagggcagtcctccttcgccaggttggtttttaaagcacttctttggtttaggatt

SEQ ID NO: 151541 - DNA, 122 bp, Homo sapiens
ttaccaaaagtaattgaatgccatacatggtatgtaacctttgtcccgatggctccaactcgtccttttttattattgcttcatgctaaaaattggtgctcctaagggcaattgtacagatt

SEQ ID NO: 151542 - DNA, 122 bp, Homo sapiens
ggattttgggaaatcctgaaatacaggaagttgtgggtggatgatgcattaaccggttatcgctgttaaatctaatcctgttgggatatcagattgggttagctgaatgccacctacctgta

SEQ ID NO: 151543 - DNA, 122 bp, Homo sapiens
acccacacccactcccctacacatacacaaagagtttctagaagttccctgccgtcgacacgtcggccctacctgtaatcggcaactgtgcctgcaggatggccgcggtgaaaagcgccttc

SEQ ID NO: 151544 - DNA, 122 bp, Homo sapiens
cgaggagccccgcgtccgggcggtggcggcgggaggaggaggaggagcaggcggcggcggcggcgggaaaaaaaaaagagggaaaagttgccacttacgcggttgcttctccggcggcggcg

SEQ ID NO: 151545 - DNA, 122 bp, Homo sapiens
ggaggagaaggggcccgaggtgcgtgagtaccgggagaaggtggagactgagctccagggcgtgtgcgacaccgtgctgggcctgctggacagccacctcatcaaggaggccggggacgccg

SEQ ID NO: 151546 - DNA, 122 bp, Homo sapiens
gtttggcaaacaaaccgacggcccaggaattcccgaggttacatctgcaactggtgaaagcgtcctctgcctgcagctcacgcagacagggaagtaagctctagctgcctctgccgcggcag

SEQ ID NO: 151547 - DNA, 122 bp, Homo sapiens
cctctaactgccccagagttcagtcccgcccagcagatgcccaacgtcggcgctcagagccgagatagggatatcctcactgtcccttggggtcccccaattttgaggcgagaggaccggac

SEQ ID NO: 151548 - DNA, 122 bp, Homo sapiens
acttaggtgtggaaatttggggtttaccttttgatttagttctaggaagtcagcgtgaatcggcgttaggttccctgcctccagaccctattctgcctcaggagacgtagccagaaaatttt

SEQ ID NO: 151549 - DNA, 122 bp, Homo sapiens
tgctaatggagactaaaagaactgaaagacacagcctccccatgggcacgctggttggatcgttctgtcttaccctctgtcccttttagagaattgcatggcattagcataaagacaagtca

SEQ ID NO: 151550 - DNA, 122 bp, Homo sapiens
gacacctggctggaaccgcgggagggaccccaagcaagaaccggcccctcgagcctttcccgaactcttgacccacaaaacagcgacccactaaaaaagatgggtgattctcaaccactgtg

SEQ ID NO: 151551 - DNA, 122 bp, Homo sapiens
ggtaaatacctcgaacccctttccaggcagggcagggaaaatgagtcacacctgctggtccgggtccggccatctcaaggccaggccactgtcagccccccatgtttggcactcattcagct

SEQ ID NO: 151552 - DNA, 122 bp, Homo sapiens
ccctccgcctgcgtctccagccccacggctttcggattggggcgccatcttgacgatgggcggaagacttcaggcaagaggccagagtccgattgaggattggttcagggtggggtctgggc

SEQ ID NO: 151553 - DNA, 122 bp, Homo sapiens
cacccggtgatgatagcagccgacagatgggcgagcatagagctcagacattgccagcagcgtcagatccttatatatccagagcacggctcacacgccaccgccctgctggctctgtcagc

SEQ ID NO: 151554 - DNA, 122 bp, Homo sapiens
cattccaagttacacgatctgacaagacatggagcgacctgagtttgcgtgtttctaacacgttggcttgaatccagcatgtgctggtgctggctgtgtcctgatgtggcagtgagagctgc

SEQ ID NO: 151555 - DNA, 122 bp, Homo sapiens
gtgtgagtggtagcccggcgtccctaagctcttggctgcaattcagattggataaaatggcgtcttggaaaagagctgcttgctaaagatctgccgcacggagcagagacttacccatggct

SEQ ID NO: 151556 - DNA, 122 bp, Homo sapiens
aagagggaggggcaatgcgtagtcagcccagatagagctcaaatgttttaaaatttaatacgttttttattataaggtctaaccaatccctagcaatgacacaatatcactctctcagctct

SEQ ID NO: 151557 - DNA, 122 bp, Homo sapiens
agtcatcatagccgcccccgcttcagagactgaaccagtaatgtatccatagataagatacggttcaaatatcagaaaagctaaatgaggagagggacttggagatgacaccatcaccccac

SEQ ID NO: 151558 - DNA, 122 bp, Homo sapiens
cagccgagctcgttggggtggggggcgtggctgcccttccacatgtggcctgcggccccccggccggaagcaccccacccctctgcctgctgcctgatctttcccctcggacaccccagctg

SEQ ID NO: 151559 - DNA, 122 bp, Homo sapiens
ttcatcacgccgcccgcccgggtcttttttaagaacgtcttggacttgagcatcttgcctcgccgcgcagaatcctaaccccagcagcgctcttccagcaaaaggcgtcaatctagaatacg

SEQ ID NO: 151560 - DNA, 122 bp, Homo sapiens
tgtgacacctggcacagtccagctgcgtttcctgcccttgttctctgtccctggaaagcacggaataatctcagagcacgcagaagagcacctggagaaaaggggcatttggctttcacagc

SEQ ID NO: 151561 - DNA, 122 bp, Homo sapiens
agaaccctccaaaccacagtctctcagcagcagtgggtcctacagtcttcaggcaactaacgaggctgcatttcagagtgcccaggctcagctgctgccctgtgaatcctgtggccgcacat

SEQ ID NO: 151562 - DNA, 122 bp, Homo sapiens
agctgtgtggcctgcgtgtgtgcatgtgtttgtgtgtgtgtgtacacgcatgtgtgtgcacgtgcctgcagcctcagatgtaccagcctgtgcacttcagaattctgcctggagcctccact

SEQ ID NO: 151563 - DNA, 122 bp, Homo sapiens
tcggccccaggttgtcacgaagccgcgaccgcgcctccccggggtcctcaaggaacgcagcgctctgcctcactgcagacaaggcagtccgcaggcggaacacgcatgcgcgccggcaagtc

SEQ ID NO: 151564 - DNA, 122 bp, Homo sapiens
agaggagggagtgacgggaggggaggaggtcagcgacctggggccgtagcggcaggcgaacggtgcctgctacccagctggaagccacaaggtggctggctccaggggcggcttttgttgga

SEQ ID NO: 151565 - DNA, 122 bp, Homo sapiens
gtgcgagctgggcagcccacccctttcagctgctggccggaagcggaagtgggcgtccgtcgcctcgccatctcccatagctgtcgcctgcagctgagaaagggttgctgtcccagcaggcc

SEQ ID NO: 151566 - DNA, 122 bp, Homo sapiens
ctgggacccagtgctcctgtgttggaatctggcttcatcacttaccagctgtgcaatagacggcaagtcacttagcttctttgtgcctcagtttccacatttgagggatggggataaaagtg

SEQ ID NO: 151567 - DNA, 122 bp, Homo sapiens
ccgggacacgacggcccagcggagccgcatgcctcccgccgcgcccgcgcgcagcacagacgggctgtcgctcgccttcctgcagagcctgcgcacgctgttccacatcctgtacgaccggc

SEQ ID NO: 151568 - DNA, 122 bp, Homo sapiens
acgcttgcaaagctctcagcgaaagcctggcacttaataagtgctcaataaagtttcctacggtcacagtaatatttggagttttatgtttgttgtagaacaaatacgcatacaatcgcgat

SEQ ID NO: 151569 - DNA, 122 bp, Homo sapiens
aaggaggaggaagggaaagccagcaggcaggcaggaccgggagagcagccctgcctggcccgggatggaggaaccttggcttttttcttaaccccgggtttctaaccggcaggcgcggccca

SEQ ID NO: 151570 - DNA, 122 bp, Homo sapiens
ttcaacaaagatttgagcgccctcccggtgtccagcactgttagccttttgcggagcccgcggtgactaaggcacatgacactcagtcgctggtggttctggcctcaagtcggcgtcttgta

SEQ ID NO: 151571 - DNA, 122 bp, Homo sapiens
gttgggaagggggtcccacgtgctggagcgccggcagccgcaacccagcacctacaccttcgcctctgcggtcctggcggcgccggcctcccactgcccaccccaagctcctacctgaaggg

SEQ ID NO: 151572 - DNA, 122 bp, Homo sapiens
tgagccccttgaagatcgaggacccagctgggagctcaggtgtcggggccgcaccatagacgcggccgctgatgcagcacttgttgaaggtcaagatgttctgcgtgagcgtgcccgtcttg

SEQ ID NO: 151573 - DNA, 122 bp, Homo sapiens
tcagccaggcgggcaggcagcatgaacaaggcaaccactgggggatggcgcagtgccacacggcctgtggtagggacagacgtgcagaagatgctgagaatgtgatccctgttcttggggga

SEQ ID NO: 151574 - DNA, 122 bp, Homo sapiens
aactcccggctgaaggattgtctcactaccggtctgaaggctgaactccagtctcactaccggtctttcagcctgtctgcattggggagggggtgggagttggggtaccagaggtgatgctg

SEQ ID NO: 151575 - DNA, 122 bp, Homo sapiens
cggcgggtgctcagtttggggatgtggctgcataccaagccatacggagccagcagcatccgtgggacaccgtcagccgaatctctgccgtcctactacaggcaaatacggtgatgctgggg

SEQ ID NO: 151576 - DNA, 122 bp, Homo sapiens
aaaatatttgatgcagaaaattgacattagttctgaaggttctgccctcctccccccacccggctcctggtagcattgagtggctcagccgctgcgcccatcgcctcaaaatagcaaatggg

SEQ ID NO: 151577 - DNA, 122 bp, Homo sapiens
gaacccagagttctgatgttcccaggagaagaaacgtggggaaataaaacccctggttgacgtgcagaagagacaaacagtgagaatctctgtgagtttactcaggtgggctttacaacata

SEQ ID NO: 151578 - DNA, 122 bp, Homo sapiens
attaaagaatttgcttttagctatatgcccagtaaatagccaggtcaggatttgaatccacgtcgtcactctaaagctctttgtattgcacagactttggcatggaagttagaaaattctaa

SEQ ID NO: 151579 - DNA, 122 bp, Homo sapiens
gaaaggacggactcggagtcagagccaacgtgtcccggagcgcagaggcccagggggtcgcgctaaacactgtacctcggggaacaaaaccgtgaaggctaattaggacaagtcggagcagg

SEQ ID NO: 151580 - DNA, 122 bp, Homo sapiens
cgccgccgccgccctgctcctggcctctgcaggcgcctgggctgctccacctgagagctgcgcagggcggtctggcggtggctgctgcccacataatccgacccaaaggcccttggcttcaa

SEQ ID NO: 151581 - DNA, 122 bp, Homo sapiens
aatctaagtcaaggtgttcatacaattttaagatttgtaagcctcattagctctttccaacgaatgattactagggacaggaaagatacagggctgtgtattctaattcaaccattccagac

SEQ ID NO: 151582 - DNA, 122 bp, Homo sapiens
tttgctcttcacaaaaagtgctacgtgagccaaaaacattacttactgtccactaattcccgtgtctggccctgaacatgaagatataatggacgatccctataaagagaaacaaaaaagga

SEQ ID NO: 151583 - DNA, 122 bp, Homo sapiens
tgaggaaatccatctggatgctttcatacgcagaccgtggattggtgggaaccgcgctggcgacagaacggcaaaaccgttgtgtaggtgtcttcttttttttgttttctttttttttttct

SEQ ID NO: 151584 - DNA, 122 bp, Homo sapiens
actgccttatttttggtacctggaaatcttggtacccaatccccaaatggccctgtggttcggttagaactatcaagccttctctgacggcctgacatggcccctgggctggatgctgggat

SEQ ID NO: 151585 - DNA, 122 bp, Homo sapiens
gcagccctcgcccctgccgccggggaagggcagagccccagcggaggagggggcattcgccggggccatttctgctgcactcagatggcttcaggctgtcactccgattccaccgccgcggc

SEQ ID NO: 151586 - DNA, 122 bp, Homo sapiens
actccaggtgctgctccgccagcgagagcgagggctgaggaccttggagaggcagaggggcgcggtcagcacccaccacccctccaggcctcgaggtgtctcggcctgctcccctctttccc

SEQ ID NO: 151587 - DNA, 122 bp, Homo sapiens
ttaggccaattaattagagctatttctatagacgtcacacacaacacgtatataactccacggacaggcagaagaaaacccagcccccacaagatccttcatttgccaatctcctatttgga

SEQ ID NO: 151588 - DNA, 122 bp, Homo sapiens
cctattacaatgttttgattgcacagtcctgaataaagtcttccttaccattttaacaaacgtcagaatttttttttctttaacaatacctcacaaccaatcctaacattcttttatactca

SEQ ID NO: 151589 - DNA, 122 bp, Homo sapiens
taacaatagctgacctttttggagctccagccgagtgctgggcactgggctaagtgtgtccgtggattatctcagtcctgggagtaactccatgaggcagttactgtgactgttctctttat

SEQ ID NO: 151590 - DNA, 122 bp, Homo sapiens
aattctcatcattcaccatgtcctgctcacagctctgtgagggagggactgtctatcccacgtcacagctgaccagtcacacggtgcagaggcagggtcctaagagctgctggacccggatc

SEQ ID NO: 151591 - DNA, 122 bp, Homo sapiens
ggaccggttggaaaccacagccgggatttacacgcccctcgtttacgccagcttcacacccgctcactagtgctcgcccctgtgcctgccatcgctgcctcacccaggcgccgccctccggc

SEQ ID NO: 151592 - DNA, 122 bp, Homo sapiens
ggacccagaagggtgcaggtgcggcgtcccgggtttccgctcgccgtcactctctccgggcgctccaggtagttggcggcagtggcagcccgcactcccaagcggcctgtgtgccaggggag

SEQ ID NO: 151593 - DNA, 122 bp, Homo sapiens
agcagagggtgaggtggggttgaggccagaaaggtgttcagggcctgatcatgcaggcctcgaaggccagagtaaagcatttcccccaagtttttattttggaaaatttcaaacctatagaa

SEQ ID NO: 151594 - DNA, 122 bp, Homo sapiens
aggaaaaaaatgcattgattaaaaggtgcgctgcgtgcaggattatattgcttcaacaatcgcgctgccaaattgcattgcaacaaaactgcattgccaagtagagaagtgtatgagtgagt

SEQ ID NO: 151595 - DNA, 122 bp, Homo sapiens
acaagcataacaaaagatctcagcacatccctccccccacctccacaacgaccctcctagcgccatgaggatgaattctctgggactaagtggtatttgtttctatttgttatgaaatcaaa

SEQ ID NO: 151596 - DNA, 122 bp, Homo sapiens
ttaagaaagtgcaccagatggtacttagctccataagagcacagatgattaccaggtagtcgttactatcttctctccttgatactcatacataactcatggcacatatggaagcaaccttc

SEQ ID NO: 151597 - DNA, 122 bp, Homo sapiens
ctgggggcactgctagggcgcccagaggcaaggttagcccctttgctcagcctcactgaccggcttgtcacatccctctgcggggcatcccggagccacacttcattcccgagaactcggta

SEQ ID NO: 151598 - DNA, 122 bp, Homo sapiens
tcctcttcctcctccagccggttctccccagcactctcgtcgtcgtcctcccggaggctccgggatatgctgtcagactcagacagtcctgggaacatcgccatgtcagctacaccggattg

SEQ ID NO: 151599 - DNA, 122 bp, Homo sapiens
gtgggtgccagccacccaccggccccccgagtccccgtcctccattccacgcttggccagcgcctttcccggatgtatgtttcttttctagatcggttaaggtgctcagtggactgactgac

SEQ ID NO: 151600 - DNA, 122 bp, Homo sapiens
cggacagggtccatgccatctttaagagctataacaccgtggaagcctgggcttcatgctcgaagtcagcgataccatgaacccaccggcaggaaccaaatgcagacacatcattaagggac

SEQ ID NO: 151601 - DNA, 122 bp, Homo sapiens
agattagccaccccgtgcgcccaggtgaaagatatcattcttccgtgcgatccgaagtgccgtggaagttagtgccctagcccagtccaggaggaaggggcgtcgtgccggcggttttaagc

SEQ ID NO: 151602 - DNA, 122 bp, Homo sapiens
tttaaattcagagaaagtactttctttctggaaaccgaatcttgactgctaaaatcctgccgctgttgatagagcatgccttttatcatttgcaaatgcacagagtctaaagagctttcatt

SEQ ID NO: 151603 - DNA, 122 bp, Homo sapiens
tccctgcttggaaagcaggacacctgagtgtggtttggcctctgaccactgtagcatttacgaccttggggagggttaccactctgggacctcagtcacactatctacaaaatgggacactt

SEQ ID NO: 151604 - DNA, 122 bp, Homo sapiens
attgagaagcagctcatcctcttggggttggaacataaggatgctcatctcccatcttggcggaggtacaaggtgtccactaatccagcactgccctgaagccccgccctctgcccaacctg

SEQ ID NO: 151605 - DNA, 122 bp, Homo sapiens
tcagcctcccaaagtgctaggattataggcgtgagccaccgcacccggccgatgaggggacgttttacagaacacttgagcaggcctcctcaagactgtcaaagtcattaaagacaaggaaa

SEQ ID NO: 151606 - DNA, 122 bp, Homo sapiens
ccctcttgagcctcgtagctctgagaagttcatggatcttcagaaatgcgcccagtaagacgaatagtgtttctgtctagagagagtggctctaatgagtcaggcatttcccaggttcatat

SEQ ID NO: 151607 - DNA, 122 bp, Homo sapiens
ttatttcaccaaacacgaaagaaaccagatttctcttgcaaaatacctgcttagtgtccacgaacaattatgtgggtaccctggggttccaaagaacaggttaaagagacccagccctagga

SEQ ID NO: 151608 - DNA, 122 bp, Homo sapiens
tgctaactatctttatgttcagagctcattcagtacagggtgttctccaggataaaacctcgggactctctctccaaccggccctgtcccttgggtgactacctgaggcttctctttacctt

SEQ ID NO: 151609 - DNA, 122 bp, Homo sapiens
gggaggagagtcctctggagcctccgtgggtggagtgggcctgtgtcccatgtcccaccccgtgccccctgccggcccctcgtacttgggatctttgacgagcagccggcgaatgaagtcct

SEQ ID NO: 151610 - DNA, 122 bp, Homo sapiens
ttttcgcgagataacggtcgaaaacgcgctcttgtcgatttcctgtagtgaatcaggcaccggagtgcaggttcgggggtggaatccttgggccgctgggcaagcggcgagacctggccagg

SEQ ID NO: 151611 - DNA, 122 bp, Homo sapiens
cttccctgggccacactggaagaagtgacttgggccacacgtaaaatacactaacaacaacgacagctgatgagcttaaaaaaaacaaatcgcaaaacaaaaatctcatgttttaagaaagt

SEQ ID NO: 151612 - DNA, 122 bp, Homo sapiens
aaacgattgcctggcggaaccatgactgctcagcttccagccaccggaacccccagctcacggcccccatcccttgaagccacggtcttccggtagcgtaaagtcacttccgtattcgagag

SEQ ID NO: 151613 - DNA, 122 bp, Homo sapiens
catctgggatccatctgtgtttccctggaatgggacaggcagctctagtcagtgagaaatcgcagatgtgagagagctgacacatgtccagctaatgaaaggaggaggaaggctggtctccg

SEQ ID NO: 151614 - DNA, 122 bp, Homo sapiens
ctcgatctcctgacctcgtgatccgcccgcctcagcctcccaaagatctgggattacaggcgtgagccactgcacccggccagaagctttttcatttattcgtccagcagcatcttgtacta

SEQ ID NO: 151615 - DNA, 122 bp, Homo sapiens
atccaatgagaactcttatttttttttttaaacacacacacacacacacacacacacacacgttggtagccttgtgtgggagtcctgtttgactctaaagagaagtcagatttgaatgccac

SEQ ID NO: 151616 - DNA, 122 bp, Homo sapiens
ctttcctttcttttcttccttctttccaaaggaacatttagaatctgatttacttggtgccgcgcttaaccgctgctgaaaatagattaacttctgaagagaaattcttttgctatcctctc

SEQ ID NO: 151617 - DNA, 122 bp, Homo sapiens
ccttgaactagaatcaagagattctcggaggctcctgggagcactgcatgtctggatcaacggtggctcaacaagtgttccttcacaatacagactttatatttaatacacactttcatatg

SEQ ID NO: 151618 - DNA, 122 bp, Homo sapiens
cgtcctgctccgccccatcacagaccagaagactctgaggactcgcgtgccctcaagtgacgctgcaccctggacacccacgcccagagtgagaaaactccagacgatgaccccgctgtacc

SEQ ID NO: 151619 - DNA, 122 bp, Homo sapiens
ttcctggaaccttctgctcacattaatcatcttcttgaacacatactgccatttggactgcggatctggccaaactttgagggaggggtgaagaggaagagaagtcctcataagcccagcta

SEQ ID NO: 151620 - DNA, 122 bp, Homo sapiens
acgctagtggggcaggaaagggtagccgagggtcagagtcccagggccaggcgggcaaagcgcgcaagacaacgtggccgcgtccgagcggatgccggcggcagcgtaaaccccaccccagc

SEQ ID NO: 151621 - DNA, 122 bp, Homo sapiens
cctagcaagcagggcaagcccatgacttaagttcagccaaccagatgcttccacccaggacgctccagaaagtgctgcaaaggcacaaggaaggtaaagataagcccagtagtatgataatg

SEQ ID NO: 151622 - DNA, 122 bp, Homo sapiens
ctctctctctctctctctctctctcgcctgtcttcatgtcgtggattgatgaacgcgaatcgcgtgtaagcgccgccaccgccgggagtctgaggaattcgcctgggctgttagaggaaaga

SEQ ID NO: 151623 - DNA, 122 bp, Homo sapiens
agccaggagagcggcgcagcgctgagaggcgacgccagggcgcagcattgtctgcaagatcgcgctgccggagccgggcgctccccgcagctgccggcaggtggcccagggcaaccgcttgc

SEQ ID NO: 151624 - DNA, 122 bp, Homo sapiens
tgaatgtattccaaagctagcttggaggaggggcacacaacgtcctgcctttcaatgtgccgcttcccctttggagcagaaagcaggcacttttataaggtaagggagcaagtgagcaaggg

SEQ ID NO: 151625 - DNA, 122 bp, Homo sapiens
tgaatgctaatgacacacttgaaaaagggcactgtaacaaccattccaagctcttagaggcgtaggcaaatatgtgcaggccatcagtacagtactgtgcagtacagcagcaagaaaatcag

SEQ ID NO: 151626 - DNA, 122 bp, Homo sapiens
atctgagctggtcctgctccaaattctcccaaaaaactatgaggatggggccaatctagccgtctgcctcttcccttactcctcctccagcaagggtgccagaagaagaatgatttgttttt

SEQ ID NO: 151627 - DNA, 122 bp, Homo sapiens
ccgccgcttgcggtccagggctgctggtttctccgctggtctgggaggccctagcatggacgtcgtgaggcggagaaaaccttgggatgggtggaaaagaaggattggagggagggcggcag

SEQ ID NO: 151628 - DNA, 122 bp, Homo sapiens
ggttcacctgctacgggcagaatcaaggtggacagcttctgagcaggagccggaaacgcgcggggccttcaaacaggcacgcctagtgagggcaggagagaggaggacgcacacacacacac

SEQ ID NO: 151629 - DNA, 122 bp, Homo sapiens
aatgctgttttaaagtggcctgatgggagcatgcattctaatgaggagaatgggattgttcgaaagtaggtttgattaatactttacctcttggactgatgcctttcataatcgggagctaa

SEQ ID NO: 151630 - DNA, 122 bp, Homo sapiens
gacgcaatccgcctgcgcgctgggcggggcggggcgggctggggcgggctgtgagcggaccgcgagcgctgggcgggtccgcggcgcggtcggtcggcgcctgttctcgggctgtttggcgg

SEQ ID NO: 151631 - DNA, 122 bp, Homo sapiens
gccccagcgggagccggggctgcgcggggcgctcgctggccagcgcgggttccaggtgggcgccggctctgcgggccccacactctgcacggccggcctgcccctcctgtgcttgatttggg

SEQ ID NO: 151632 - DNA, 122 bp, Homo sapiens
gctcaagagtgacgtgaggtgggcaccggccccaagtgcagagtcaaggcagggagaggccggctggagccaggccccctcgcacgcagcccccaaatcatggacgcacctgtggggagcac

SEQ ID NO: 151633 - DNA, 122 bp, Homo sapiens
ggttaaggttcctagcagctattttaatagcagaagatttctatttgtgtttggtctagccgagatgctggttttaaagtctgtattacagtgatatagtggtaaagagataataagaaagc

SEQ ID NO: 151634 - DNA, 122 bp, Homo sapiens
ggcctccgctcgaatcagacgctgtgcctccgctctccacaccaccctctgtgttttctccgcccctgctggaccccacgtatccagtggagcccaggtagctgctggcgctgacgggtctg

SEQ ID NO: 151635 - DNA, 122 bp, Homo sapiens
aagcgagaagggaagaggcagtgggtgcacgtggaaggcggagtggagcccaacagccagcggctgtttttatagtcaggagacggggccgggcgcagacgccccgccccgcccttgcaccc

SEQ ID NO: 151636 - DNA, 122 bp, Homo sapiens
aaggttaggggtgtaggaggcaattatgtctcttctctagcagctgccagagattactgccgtcagagtgattatcaccaaataattgttccctttcttccctgctgacagggcagaatggg

SEQ ID NO: 151637 - DNA, 122 bp, Homo sapiens
tatgatacggatcaaacatcatgaatcaactcataaatcacttgcaatgcaaaagggtctcgggacactcactgcatttattctctgtatttattctcactgtatttattctctcagcttct

SEQ ID NO: 151638 - DNA, 122 bp, Homo sapiens
gatgtcggccctcgaaaagagcatgcacctcggccgccttccctctcgcccacctctacccggcagcgggggcagtcagagcggagccaagatgcgaatggggtacgtgacccatacccctt

SEQ ID NO: 151639 - DNA, 122 bp, Homo sapiens
aaaggagaggctgggcgaggtggctcatgtctgtaatctcagcactttgggaggctgaggcgggaggatcacttgagcccaagacttcaagaccaccctcagcaacatggcagaaccccatt

SEQ ID NO: 151640 - DNA, 122 bp, Homo sapiens
cagaccccgcaagatccctaaggccaggcctgggtcctctgtgtctgcacttgctccgagcgcccagcgcgggtactgcagttccacaggcggtgctggccccaactaccaggcacgggccg

SEQ ID NO: 151641 - DNA, 122 bp, Homo sapiens
ctcctctagtcttagaccctttccacaaactcgcccatctaagccaggtaaggtcttggccggcccctctcctggaacaggaggtaggtctctgattcacatatggcctggagtggtgacaa

SEQ ID NO: 151642 - DNA, 122 bp, Homo sapiens
ggaggaggacatgggcacggtggtcgccatccacctggggacaacctacccctgtgtcggcgtgttcaagaacggccgcatggagatcatcgccaacgatcagggcaaccgcatcatgccgt

SEQ ID NO: 151643 - DNA, 122 bp, Homo sapiens
aatcaggaggcggaaatgattctccaggttcttctggttccttctcttgctcccagttgccgaggtattgatcctgctattaaagttgtcggaaatttccacagcttcccacagaagtcccc

SEQ ID NO: 151644 - DNA, 122 bp, Homo sapiens
tttcggagcctagccagagacgggaaaactgaccaaggtgaggaaactcgaacctcaagacggggaaagacagggtcctcagatgctgtggctatcagaaaaactagggagaactctagata

SEQ ID NO: 151645 - DNA, 122 bp, Homo sapiens
gtaagtatgatctgatatttaggtcttcagaagcctgtaggtttcatttctatgaggaatcgaggagcgttacatcctgatatccttccaggctgcttaagaatggactgcttcgacactga

SEQ ID NO: 151646 - DNA, 122 bp, Homo sapiens
tgcctggcctctttttaagctttttgaaaatctcagccattggccgggcgtggtggctcacgcctgtaatcccagcactttgggaggctgaggcgggcggatcatgaggtcaggagatggag

SEQ ID NO: 151647 - DNA, 122 bp, Homo sapiens
gctccgtgggctcagggtcccctccgcgtccccctgaagcctggggacggaggtcgcgaccggccgactggggtcctgtcctcttgtcaccttgtatccctcgcatgctccctcccgcctcg

SEQ ID NO: 151648 - DNA, 122 bp, Homo sapiens
agatgtcaaaaaccttgaaaacttccagctggtagaaggtgtccaggaacaagtcaatgccgccctgctggactacacaatgtgtaactacccgcagcagacagagaaatttggacagctac

SEQ ID NO: 151649 - DNA, 122 bp, Homo sapiens
actaatgaggcagctgctccgcgcccagggtaccgaccgaggccacccggccgcgcgacacgtcccccaccccgccggtctcggccaccatgtccgtggcgtcatcccccgcgcctgccatt

SEQ ID NO: 151650 - DNA, 122 bp, Homo sapiens
gagacaggacgggctgcccgtgggggcagcgggtcgtcccccttggcaaggactggtgggcgccgggtgctggggtcccggcgtgggggtgggcgtgggttctcggagaaggcgtgggtgga

SEQ ID NO: 151651 - DNA, 122 bp, Homo sapiens
ttttcatagattctggtagcattggatgtgcatatgttggtgaatacagttccagacttgcgataatagaagttgtatcatacatgttcacccaagagccattgcttgacagaggcatctcc

SEQ ID NO: 151652 - DNA, 122 bp, Homo sapiens
gcaggcgctggcttgatcagagtgtgggagcctgccgagcctgcccccaccgggaacccgcgctggcctacgaaccccgcgcgcagccccggctcccgcccatgcctctccctccacacctc

SEQ ID NO: 151653 - DNA, 122 bp, Homo sapiens
tcaccgggaggtccagggtcgctgagcatctgccatggtcctggctgttggctaggcgcccgggtgacagaggacagagaggctgggcgatggcattcacagaggttggttgagggctctct

SEQ ID NO: 151654 - DNA, 122 bp, Homo sapiens
aaccaaaaatcagagcaatttcattgcccagagccaacggttagtacaggtgtggaaaagcgaggtgggcatggggaagaactaagaggttgctgagttcattggccaacttggccattgtg

SEQ ID NO: 151655 - DNA, 122 bp, Homo sapiens
gtggatgcgtctggaccacaggctggtgttagtatctgcggaggaaagaggagctgtggccgctacacatcaacagagggcaccagagagccacgcacctactttcaggggcagaaattgag

SEQ ID NO: 151656 - DNA, 122 bp, Homo sapiens
attcccagtgttccgtgagcagaggctgccgggcctgtgggccgatgtcggggccacccccgcacagacgcgcccttggacagcccacccagagggagactttctcccaccacaggctggga

SEQ ID NO: 151657 - DNA, 122 bp, Homo sapiens
taggggcagcactgggtgaaggctgcttgtaggaaaggcccataagggaggcaggagggacgggagcaggggatgagggcagaggacaccctacaaatggatcagagaactgcagatagaaa

SEQ ID NO: 151658 - DNA, 122 bp, Homo sapiens
gtcaagccagctttgaaaaggaacaacaaagggagctcgctccaacctggtagctccactcgttcccaaagctctggaaaattgtggagggtcaggaagagatcagttggactgaagacagt

SEQ ID NO: 151659 - DNA, 122 bp, Homo sapiens
ctccgagggtggggagcttttgtttattgattttctgtctcactggtctcccgctgctgacgggcctcctctgcagcagaagtttggatccatgcggagcttccttcatacggtggcttttc

SEQ ID NO: 151660 - DNA, 122 bp, Homo sapiens
cggccaaggtgcagggtcctcgcgtggcacccttgggatctgcccagtttgcggatggagcgcggggctgatcgggcaggtctcacttgtgcaggtgttccctggaaggtgggacctgcaga

SEQ ID NO: 151661 - DNA, 122 bp, Homo sapiens
aggacccacagataaaggctggaatagcagtcagccttcaaagactacctataatgcctgcgcttttaggcacaggccagcccaggcagaggccaaatctgtgagaagccttcaccaaagtt

SEQ ID NO: 151662 - DNA, 122 bp, Homo sapiens
gcggaggctaggagggtgggtcggtacggggaagttcggttggccggcaggctgcggcttcggccacggggtttcctccaattagatccagggtaaaaggacgtcactgttgccatggcgat

SEQ ID NO: 151663 - DNA, 122 bp, Homo sapiens
cctatgcaagatgactgctcccacccacccgcccacccactcactaataagacataatgccgtcctatttttggtaacaattaaagggcctcccggtgaaagcagaaagctgtttattttct

SEQ ID NO: 151664 - DNA, 122 bp, Homo sapiens
cgatttttctgattcagtaacagcgatcaggaattccacctggatttctccatgaggcaacgtggccagttctcagcaaatcccctgtgacacatctctcagtaaagatgaacatgagcgtg

SEQ ID NO: 151665 - DNA, 122 bp, Homo sapiens
ggtcaccctcctgatggatctctgtggtgccaggcaggaatggcctgctaggggatgcagcgagatcccaggtcctttctgctgcttcctctaccactgtttttcactcggctctccaaatt

SEQ ID NO: 151666 - DNA, 122 bp, Homo sapiens
ggctctcccccagcagagtggcggccgggtaacagcacctcgggaaggatgggggtgggtcggacaaggcactgaaaggaacctcagggaacgtgccgggcgaataaacagcaatacggcac

SEQ ID NO: 151667 - DNA, 122 bp, Homo sapiens
ttttgctatttcttgtggcctggcctgccctgccctgtaaagcctgggggaattaaccctcgtctatttcaccagagatctgtaatctcattaggagcagtcaggcagcaggcagcagggaa

SEQ ID NO: 151668 - DNA, 122 bp, Homo sapiens
aagtggcttctgcgttcaccgccccccgccgtttgtggggcggggccgattcataagaatcggttctcaccaatggagggcttagcatgtttaacctcaggatcataaacaaaagacactgc

SEQ ID NO: 151669 - DNA, 122 bp, Homo sapiens
caaacactctgcagggaaccacagtgaaggggaaggtgcccaggagcgtccaaactatcccggggcgggggtggtgaagaacctgtttcaaatgcacacagcacccccaccccagcagcaca

SEQ ID NO: 151670 - DNA, 122 bp, Homo sapiens
cagagcctttgcagtccgcagctgaccggaagacgttgcctttcattcattcattctgcccgcctctgtggactcctttactaggcgaccagccctgaaacagaagttggacattttttaaa

SEQ ID NO: 151671 - DNA, 122 bp, Homo sapiens
aggttccacagttgttccaaggccggttccgggccgccgatgctcgcgcgtctttgttctcgcgagaatgaatgcgtcacttccggtaaccgctgcgagaaggcccttccctaagttctccc

SEQ ID NO: 151672 - DNA, 122 bp, Homo sapiens
ccccggaccgccagctcagaacaggggcagccgtgtagccgaacggaagctgggagcagccgggactggtggcccgcgcccgagctccgcaggcgggaagcaccctggatttaggaagtccc

SEQ ID NO: 151673 - DNA, 122 bp, Homo sapiens
ccgccctctaccggaaccgagggagccagacagctgcgatattgggaaggcctccggagccgcgaagagcgcacgcgcgagcgcgcgcccgcgttctcctggcgggcttggtatttggcgcc

SEQ ID NO: 151674 - DNA, 122 bp, Homo sapiens
atttcagccactgtatcaatgtggtaaagaaggatgttttactacatctctcaagttatacgcagagctgcttgcccactgtcctagtctgttttctgctgctagagcagtctgtcacagcc

SEQ ID NO: 151675 - DNA, 122 bp, Homo sapiens
ttctccctgcaaccggttacagaaataaaaactctcttcctccccagctcatctgcatctcgttattgggccttgaaaaatagcagcccaaccctcagtttggtctgagaacagaaggttgt

SEQ ID NO: 151676 - DNA, 122 bp, Homo sapiens
gccctgcccgcccagcacagcttgtcagcattagaatcctgactcacacctccttttctccggggcccgcgaggcactctgagcttggctgttccgcgtgccctccttcctgcctttttgct

SEQ ID NO: 151677 - DNA, 122 bp, Homo sapiens
aaggaaatggccgcactctcaagttgtgtttttgctgcgcaccggctgtcgggctgtgttcgccgctgggtggcttcgtggaggcctttggggttgcattttcattcttggtggcaccattt

SEQ ID NO: 151678 - DNA, 122 bp, Homo sapiens
tctctttctagcttggcaatccccccagtgtactgggccactgtcaacatccacagcctccgcgctccctcaagccgcctggacccccaggaggtacttccgggcacattccaccaggtgct

SEQ ID NO: 151679 - DNA, 122 bp, Homo sapiens
aagacgccgcgttgtgacctacgtgggcggagtcagccgtgcagacctagaacttagcgccggaagtgtgtctgcgtaaaactgcggctcggaggcgggacaggcagtgctcccgaagcgga

SEQ ID NO: 151680 - DNA, 122 bp, Homo sapiens
agttgaaaggggctgaggagctccagctgctgtggaaccaggggccagtcaagagctgcccgggagccacgccgtaaccatggcgaccctcacccctcccgccagaggctgtaaccaaggcg

SEQ ID NO: 151681 - DNA, 122 bp, Homo sapiens
aacttggtgggccttgtgaacagcatcaggaaccctggggctggaaggcttcccagtgctcggtgctaatgagctctggagcctacagctttgaccggaatcacgtcctctgcaggctgttt

SEQ ID NO: 151682 - DNA, 122 bp, Homo sapiens
tcatgcctgctgcaggcttcctcacagccaggagctgggggatgagtgcagggttgcctccgtgtagtccttatggagaggcgaaggagccagccgcagtctcttcctggccagactgacag

SEQ ID NO: 151683 - DNA, 122 bp, Homo sapiens
caagcatacctaatccaacttaatttgtaaaagtcttcctcatcctcatgccccaagggccgtttctctgcctgcctgtcccatagccccgggaagccattactgctgctccagcctctaat

SEQ ID NO: 151684 - DNA, 122 bp, Homo sapiens
atgacgggaacaactgaatctccagcaccgccaagccccgctggggactggacgaccctgcggcccctcctcactgcagagaagagggcaaagccagcccccacctgcattccccgagtcca

SEQ ID NO: 151685 - DNA, 122 bp, Homo sapiens
cgggtccccgcgggcagagggcatcgctggcgctccgggcagggttggcggggagaggcgcggggatgctggtgagggcgggtggcgagagtcggcggcagcctcccattggctacgtttgt

SEQ ID NO: 151686 - DNA, 122 bp, Homo sapiens
ctctagcggagcaaacagctgggctccagctggccctggcttctgcaactgcgcagtcggcgctgtgacgcccggcgcggctctgtgacgtcacgaatcggtcctctgtaagaggggagggc

SEQ ID NO: 151687 - DNA, 122 bp, Homo sapiens
tggcagctgtgttccccatggtttgtcctggatgtctcccttgtgccatccttgcaagcccgcggccagcgcctccacccacgctccggccttgctcccactcccaccgctctgccacctcc

SEQ ID NO: 151688 - DNA, 122 bp, Homo sapiens
tatgcttcaggctacagttttcatcatcaaatttctccctgtagatggacttgccaccagcgccattacggcgtgtgaagccaccaccctaacacataagccctggaataattctgtgaaag

SEQ ID NO: 151689 - DNA, 122 bp, Homo sapiens
gcggcactcttctgcctggtgactgacaccttggaaatgaagtttatgacgtcatcgttgcggctggccaatagaaaaagctcccgcggagaggtgttccttccccttcgactcagcttctt

SEQ ID NO: 151690 - DNA, 122 bp, Homo sapiens
acaaagaagccaacatgtatttagtttcttttatatattaggggttttactctctccagccgtcacaactctctgtgatattttcatgaaccccactttatctatgaggacaatgagcctca

SEQ ID NO: 151691 - DNA, 122 bp, Homo sapiens
gatgacgtcaaacccccggcattcaaaccttcccaagttctggctgcagctgtccctttccggggaaacaaaggcacctccagcgcccccacccccagccagcctcaccgatcaaggaggcc

SEQ ID NO: 151692 - DNA, 122 bp, Homo sapiens
ttcacaacgagctttttaggatttatgtattttgatatgtgcctcattcttcccaagaaacgaggtcaggcatttccctgattctgacattttagtgcagtgactagtaaaaagatggatag

SEQ ID NO: 151693 - DNA, 122 bp, Homo sapiens
ccctccccgcccccaggtctgatccacgtgcacaggcggaagatgttccaggctacaatccgctcagtggaaaacctgcaaagcagcaagtccacgtgaggacgacggctttaccgcccccc

SEQ ID NO: 151694 - DNA, 122 bp, Homo sapiens
ccacacctggggttaccccctctcattctgttctcacaagatctaggatgtctatcccttcgttcactcattggttctatatggagctactgatatgtgattcctgacccaatagaaaatga

SEQ ID NO: 151695 - DNA, 122 bp, Homo sapiens
caaaggggcggagctcgaggggcgggcctaggtcaaagctgtgggtaggtcccgagcctccgaggccaaaggctcaggctctagggagctaagactaatccacccagcggggctccagggca

SEQ ID NO: 151696 - DNA, 122 bp, Homo sapiens
ggatgtgtgtctcggtcacctttctttaacactgcaaatgttgtgcgggtgtgtggcacacgtctgcattttgtgcctttgcttgtatgcgggtggcggggcatctgcgtgtgtttctgtcc

SEQ ID NO: 151697 - DNA, 122 bp, Homo sapiens
ggaggtccacggggacgacgaagatgaccttatacgtgcactcggcatatcctggagtaacgcgcagtgggggaggtggggaggggagggtcggccgggcaagcccctgcccgctgcgcggc

SEQ ID NO: 151698 - DNA, 122 bp, Homo sapiens
accttcttctaggtgcagggccctcgtccgggtgtgccccaaataaactcaggaacgccccggtgctcgccgcatgttttctttgcacactgcagagctcaaaggggtgctatgagaggccg

SEQ ID NO: 151699 - DNA, 122 bp, Homo sapiens
agatcagctcactcctctcttcagaacttgctgaagccctcctatccttaataatctactcggactgccataacaaaacaccattagactggtggcttacacaacatatttatttctcacag

SEQ ID NO: 151700 - DNA, 122 bp, Homo sapiens
gctaaaacacaggaccactgaatcaagagggcttcttgattctccaccagctctcatgagcggtttccccactactgtatccctctccagaaccaggggaactgttgtcactgaagtcttca

SEQ ID NO: 151701 - DNA, 122 bp, Homo sapiens
acatcaaaaagaagctgtgctacgtggccttggagcccgagaaggagctttcccggaggccggaggaggtcctgagggagtacaagctgcccgacgggaacatcatcagcctcggggacccg

SEQ ID NO: 151702 - DNA, 122 bp, Homo sapiens
tgctttctccctcctttaggttgcattggagttttcgaaagacttatctttctgcaggctcgcctctgagctttgtctccttggagccacctcacttagacagcttcggatgtggatgcaga

SEQ ID NO: 151703 - DNA, 122 bp, Homo sapiens
acctaaaacgtgtaaggaggcagctttaggctaaagtgaacagcacgatctgtacatgcacggcacacatgtaacatgcacagaatggtggccgggaccaagtgagatttaatcaacgctgc

SEQ ID NO: 151704 - DNA, 122 bp, Homo sapiens
gaggccagctcctgggcccgaggatgaggctaatggagaagagaacccaggcccaggccccggccccagacagttccacagtgctgggagctggagatcagcgctccggtagcttctgcgga

SEQ ID NO: 151705 - DNA, 122 bp, Homo sapiens
gctcctcccagcccccgcccgggggatccgaggtgcgcgcaccagcaaagtggcctcagccgctgcagagtccggtcttgttttcctagagccgcctttctcacatgcacgtttgctctttt

SEQ ID NO: 151706 - DNA, 122 bp, Homo sapiens
acgagctgtttccagtttgtcctcctttaattaaaataattagagcctcgtcagtaatgacgagattgcctcactaactgtccaagggtgttagtactaagccacccaaagaacctttttat

SEQ ID NO: 151707 - DNA, 122 bp, Homo sapiens
tccgggacagcaattgcctttctaatcgactgccatgtttagcgattactatgcgccaagcgctttacaggcactctcattaaaataggcaaaccgggccaggcgcggtggctcacgcctgt

SEQ ID NO: 151708 - DNA, 122 bp, Homo sapiens
gggagggtggccgccaggtgtgtaagggccacaaagatgctggcagtctgcctgaagcttcggaatcagagaccgagaggaaagactcccagtttgcagaagaacatctccagggtttattg

SEQ ID NO: 151709 - DNA, 122 bp, Homo sapiens
agggacagccgccctccagccagccaaggctgcaagcgggaaccgcagggagacagcacccgccccacccctgccccacgtctgcgcagcttcgtgctcatctgatcctcacagggacttct

SEQ ID NO: 151710 - DNA, 122 bp, Homo sapiens
caagtccagttcggctctcattggctaccgcacgcagtgagggggcggggaaagtagcggcgaggccccgccctcacgcaggagccaatcctgagcaggctaggagacgaacccggaagtga

SEQ ID NO: 151711 - DNA, 122 bp, Homo sapiens
aagaggaatgtcctggacaccctcaaagacaaatgagacctctgagaggcaaatgcaggccgcgcagacataccaacggcaggacgccgaggtgcccacgaggaaggacgaggaaacacacc

SEQ ID NO: 151712 - DNA, 122 bp, Homo sapiens
tctgatccctagtttaggagaaccccccagcagccctgttctgtaggcagaggccctggacgaccatcaacccagccctgctgtaggcaccatggccatacaggcatcactgttgcacacct

SEQ ID NO: 151713 - DNA, 122 bp, Homo sapiens
tgctccgctaagacaccagaggtgaggagactccggacccagctggctattcgacctcttcgcatttctagaatgcccccgcccccggttcccagacggctactaattctgccttcctttga

SEQ ID NO: 151714 - DNA, 122 bp, Homo sapiens
taaactcacagttccacatggctgcggaggcctcacaatcatgctgaaaggcaaaagttgcgtcttacatggtggctggcaagagagagaatgagaaccaagagaacggggtttccccttat

SEQ ID NO: 151715 - DNA, 122 bp, Homo sapiens
ctgtggaggccccagctggccacggcgctgctttgctccgcgcatgccgagggtgtggcccggctgagcatgccgcatgcacacagccccgccctgccgccctgcccagactggacccggag

SEQ ID NO: 151716 - DNA, 122 bp, Homo sapiens
acaattatctgactttgaacttatctgacatatttccaaaccccatgataacttaggccacgtgaagtcactgcggaagtcttgttcctgtttggggagtgggtaaaaagtgttccctgctt

SEQ ID NO: 151717 - DNA, 122 bp, Homo sapiens
ctcccggcctggcctggttcccgtcagcatcatcggggctgaggatgaggattttgagaacgagctggagacagtgagtgggagatagggtggaaaagctctgtcccaggctcagtgtcccg

SEQ ID NO: 151718 - DNA, 122 bp, Homo sapiens
ttccctgccaccgccacattttgaaaaaggctcctggcctggaggggcgggcccagaaagcggcccccgcagcagttacaggccggggcgaggaggggacggaacccgctctccgtgattga

SEQ ID NO: 151719 - DNA, 122 bp, Homo sapiens
tgtgtgtgtgagtgtgagagagagagagagagtgtgtgtgtgtgtgtgtgtgtgtgtgtgcgtgtgcttctgtattaaagccattaggtaactggttaaagagtcagacatagagagaaacc

SEQ ID NO: 151720 - DNA, 122 bp, Homo sapiens
acggacagagtcggatggagcaaagaagcccggcacacaccaacagagagaacgacatagcgcgggaaggagggtccgaggagacacattccaaacccggaaagggaaatttggaatttagg

SEQ ID NO: 151721 - DNA, 122 bp, Homo sapiens
tcgggcggtggggagcggcgccttgctccccggtcctgccccactctctccgcagaaccgcgttttggggtcagaagtcttgtcagccaccccggtggtgctctgtcacgggatgggtgccg

SEQ ID NO: 151722 - DNA, 122 bp, Homo sapiens
ccaagcccagctgcctcaggtaaagggtcaggaacggggtcacgcaggcttcccgcaccccgcacaccaggtggaagagcttggccacccccagcgccctgctgatgtcccaccgggggttg

SEQ ID NO: 151723 - DNA, 122 bp, Homo sapiens
ccggaatacacttgtagtaaaacaaagtcaggtttatttactctttgcagcaaggaggaacgctcaaggaaaaatggaggcagatgactggaagggatttgaaagggacttttagcagaact

SEQ ID NO: 151724 - DNA, 122 bp, Homo sapiens
cgtcctcgtcgataagggtcgtgttccccacgaagatgtccagctcactggtcatggcgacgcccggggccgcagcgccccgagcaggagcgagcactgctcgggactggcgcgccgccttc

SEQ ID NO: 151725 - DNA, 122 bp, Homo sapiens
gcgagcaaagaaagggttaatccgggcccttgccgacgctttcgttggagactacggggccgcccccggagggccctggcctgcgcacgcgcgcgcacgcgcgcggcttggggcgcgcggag

SEQ ID NO: 151726 - DNA, 122 bp, Homo sapiens
aaaaagaacctgtaggaaaaaatacacgaggctctcctctccatttgaaaggcttttctgcgcctcacaccaaggccaggggccaataaggccaacaggtaagacccaaccaggtaaaaaac

SEQ ID NO: 151727 - DNA, 122 bp, Homo sapiens
cagctagaacacaccccttccgtaaagagcacacagccgagggcgtcatgggtaggagggcgctgagttagtcggggaaggaggaataagaccaacgtcttcccctgttggtgtgcagccct

SEQ ID NO: 151728 - DNA, 122 bp, Homo sapiens
gcaggcccatccaagctcacccaacctcctcaacccccatggagagctggggttcaacatcgatcttatagtcactctggacttagtcagtatgggacccagtcccttgcagaagcccatgg

SEQ ID NO: 151729 - DNA, 122 bp, Homo sapiens
gagggagggagggaggctgcagcttctccccgacagacggagggagctgccgagagccggcgccgagcgaagccgagcggaagcccacccgcagccgacacgcgagccgctgccgcggcggg

SEQ ID NO: 151730 - DNA, 122 bp, Homo sapiens
tggtggtggcagtaacacttgcagggacaggagttaagcacctggaagggcagccagtggcgcgcagcgcgggtgttagctgccccagtctgagaggccccgctgccaccaccccctccacc

SEQ ID NO: 151731 - DNA, 122 bp, Homo sapiens
tttgacaatggaaaataaatgtccaaagtatcagggaaagtgtgcctgtgcgtgcgcgtgcgcgtgtgtactagaaagagaggcagagggcaaaagctaccaggtctgtgtaatcctaggta

SEQ ID NO: 151732 - DNA, 122 bp, Homo sapiens
tgctgcgcgagcgaggatctccagtagtctctgtgtggctgcctctgcgggaacttccagcggcagtgtggacaccgtctgaccagccccccacttcagcggcagtgtggacaacgtccgac

SEQ ID NO: 151733 - DNA, 122 bp, Homo sapiens
ttagctgtgtagatttatgtgagggcttgtaaaactctggtcttgtaaactagtcttaagcgcttttaatatggagacagatgagagcccctctccgctcccgtgtgggcccgcaggagaag

SEQ ID NO: 151734 - DNA, 122 bp, Homo sapiens
cggaccgggaagacagcagggtgctgcgagcaggtctggggaaaccgaagcgcgagcccgcgcgtggggcgaggcgggaccgcgcaggcgcagcgggaagcgacgcagaaagctccaagcgc

SEQ ID NO: 151735 - DNA, 122 bp, Homo sapiens
gggcgcggtcaggtgctggagcggaggggtcctggactcttggccgccgcctcggggcagcgctgctgggggtggcgggggctgcaccaggtggccgggctcacaggcacagcggaggggtc

SEQ ID NO: 151736 - DNA, 122 bp, Homo sapiens
acttattttgggggaatatctattttaactgcttcagacacctagatcccagaactcaggcgcatatgcatattttccctgcaagattagaatggtgctcttcacgttttgacggtggtttt

SEQ ID NO: 151737 - DNA, 122 bp, Homo sapiens
gcagctcaaacacgctgcctctgtctctcagacctcgtgtaacaaactccttccggaaggcgtgcacaaggctttgcgggcatttggggaaatgtagtccttttgtagcactaccgtgctga

SEQ ID NO: 151738 - DNA, 122 bp, Homo sapiens
ttggaggactggggtgggaggcgcagggagagcggggttcgcctgggccgcaggggggagcgcaagtcttccacactggagagtgcaggggtgtcgccagcctgagtgtttgagcgcaaggc

SEQ ID NO: 151739 - DNA, 122 bp, Homo sapiens
ttaactatagatagcatgctgtacaatgggagctcttaaacttattcctcctgggccaggcgcagtgtctcacgcctataatcccagcacattgggaggccaaggtgggcggatcacttgag

SEQ ID NO: 151740 - DNA, 122 bp, Homo sapiens
tgtaaaagttagtaatgatgacccaaattaacttcgataaaacactatcttctactggaacgtaactcttaaacatgacttatactgaaccaaactgcctaaaatatggaagagtggtgttg

SEQ ID NO: 151741 - DNA, 122 bp, Homo sapiens
gtgacacatttggtaaatttggattttatgttagcatgacttagcctcattagggcgttccgtttggcttctcaggtctgttgatggctaaaatcacctttgctttgaggtttggttaaaca

SEQ ID NO: 151742 - DNA, 122 bp, Homo sapiens
cacccagcttctcaccccatggatccccctaattgacgtgtcagttggagtggatctgttcgcccacgcctttgtagcaaatgaagcagaaataatctgtgcttaaaaaacaaaaaactgta

SEQ ID NO: 151743 - DNA, 122 bp, Homo sapiens
cgtccccggtaagcccttgcgccctccagacaagctcctcagtgaaagcaagcgccgcaccggtgcctgtgccagtctcccagaaaggagcataaggagtgttccaccaccactctggattc

SEQ ID NO: 151744 - DNA, 122 bp, Homo sapiens
aggctggtctcgagctcctgacctcaggtgatccaccctccttggcctctcaaagtgctgcgattacaggtatgagccaccgcgcctggccccaagtccttaactaccaagcctggccacct

SEQ ID NO: 151745 - DNA, 122 bp, Homo sapiens
caacacagcgaaaccccgtctccaccaaaaaaatacgaaaaccagtcaggcgtggcggtgcgctcctgcaatcgcagctctcggcaagctgaggcaggagaatcaggcagggaggttgcagt

SEQ ID NO: 151746 - DNA, 122 bp, Homo sapiens
gttcgggaatgagggtaatccctttggctgggctcaagccgggcgccatcttgctcatcgcgggcgtggcgctgaactacatttcccagaaggcgccgcgccctcggcccctcccctcgcga

SEQ ID NO: 151747 - DNA, 122 bp, Homo sapiens
cgtccccgtggtatcggacccccatcgtccctgacacctggcgtctccgccccccgcccccgtcccccgccccgccgtccctggcccctgcagtccctggcccgcgctgcggacctccggct

SEQ ID NO: 151748 - DNA, 122 bp, Homo sapiens
cccccacccacccccactctgaggccagtggcggagaggccaccactgtctcaggagcttcgtccctgcacgtccggtctcctcccagacctgcggcacccagtgtggtgtaggccagtgcc

SEQ ID NO: 151749 - DNA, 122 bp, Homo sapiens
tgcctatgatctatggaggggcactaatctccgagcagggcctctcacattcccgctcttcgacagcgtcttaattaggccagaacgctgccctccccaccccggccctgtgcccacccctg

SEQ ID NO: 151750 - DNA, 122 bp, Homo sapiens
aacctgctcttactatgttgcctaggctgcagactagctcccatgctcaagggatcctaccgctgcctcagcctcctcggtagccgggactactgttgggcaggaacttgttttttctaaga

SEQ ID NO: 151751 - DNA, 122 bp, Homo sapiens
aaaagagagtttcattttaatatcaaacagaaaacccgcactgcaaaactgaaacccttgcgtcctaccaatgcacaccaagtttttgggcctttcctcttaacctcaaagtgctcttttct

SEQ ID NO: 151752 - DNA, 122 bp, Homo sapiens
aatttttcccaaaagccttgtttgagtttgtctgtggtctcagctaatttgcttagttctcgaactctgctttttatttcagcagcatttatatgagtcgtgttaaggggatgcttgagttg

SEQ ID NO: 151753 - DNA, 122 bp, Homo sapiens
ggtcttgactaacctgtgttgagtcatcctcctgtctctagagctgaagaggccccagggcgcataggaaaggagggtgctgccgaggtggctgcctgggggcgggccctacaggggtcatt

SEQ ID NO: 151754 - DNA, 122 bp, Homo sapiens
aaagtaggcagggagaccacagcaaagccaccctgcactgtgctatttctggcggggggccgggccctccagctgcattccaggaggaaatctgaccaaatggttgaaactgaggaatgcag

SEQ ID NO: 151755 - DNA, 122 bp, Homo sapiens
ttctgaagcgtggagccggcttggaacagagccaagacacacggacgcgatgcacacaggcgtcctgaccgagggcgccgagaacgcggcctccggcgactgccacaagcccctccgcctgg

SEQ ID NO: 151756 - DNA, 122 bp, Homo sapiens
cgcccgggactctccgccgcgccgggcacccgctcgccctgcccgggccgtggggctgcgcgccgctggcctccgggaagaacctgccattccccctgcagccgagtccgacgtgagagggg

SEQ ID NO: 151757 - DNA, 122 bp, Homo sapiens
tgaggggatctattgatgtccctatcgtcagggtcccataaccggtgggcgtgctgcccacgagagggctgctgtctgtggacagaaaagagaaaggtcatttggggaggcaccttctcctc

SEQ ID NO: 151758 - DNA, 122 bp, Homo sapiens
ctcaagtctgcgggggtgtcccgccccgggtgggggcagcgcagagcggcagaagtttgccgccggggttccaggaggtgcgcgcggagcggggtgactaggggcttcaccctggaacaagt

SEQ ID NO: 151759 - DNA, 122 bp, Homo sapiens
tctgcaccttggaggccactgcgtctacgcgggacgccatccgaagccagttcacaccttcgttcttcttgcggatggcgttctcggcatacacacgggcacactctacatttttctgcaga

SEQ ID NO: 151760 - DNA, 122 bp, Homo sapiens
gacaccccttgaaaaggagggctgggaactgagatgattgacgccccaaggggaagcgggcgcttcccagaacagcctcggcatgacctggacatggagccaggcggctgctccttgcccaa

SEQ ID NO: 151761 - DNA, 122 bp, Homo sapiens
tctttcttaagtacctgcgctcagctagagctctcccggagcattttaaatactgaatgccgagcggagaagggaaacagagtgtattaatccccactccggttgccggtgtctgcaagcct

SEQ ID NO: 151762 - DNA, 122 bp, Homo sapiens
ggaagagcagagatcatggcctcaaagctctcgagcacctggctgaagcccagtgctgggcgccatgtgagctggaggaagccagggtgggtggagcccaggctggcttgattgtgaggtct

SEQ ID NO: 151763 - DNA, 122 bp, Homo sapiens
ctcaaattcctgtcctcaggtgatccacccacctcggcctcccaaggtgctgagagctaccgcacctgggctatgtacttttaatgcatgaagtcatttaatcctcacaacaactttatgaa

SEQ ID NO: 151764 - DNA, 122 bp, Homo sapiens
agggaaagaattggcagtagcacagttttgttctgtgtctggggctccagtggaatttgacgtgtcatgccagcccacacgcagtcattagaaatgtcaggttgggctggtttcccctgctc

SEQ ID NO: 151765 - DNA, 122 bp, Homo sapiens
tacagggctgagcctgcagcagagctgcagccaggtgccaaatggatgcagtgcccctgccgtgcccttctcagactcccccttgagctgctgccatgcggttgcccagtggatctcatgcc

SEQ ID NO: 151766 - DNA, 122 bp, Homo sapiens
cagaacgctaacggccgttgcccttacatctctcatttggaagtgacaggtattaaataacggcatatgaaagcttaaaagtcatcaaatacaatcactgggtgctttcgattacccaaatc

SEQ ID NO: 151767 - DNA, 122 bp, Homo sapiens
aaccttgcatttatatagcactttatggcttaaaaagggctttcacatctaaaccacattcgagtttcacagccccttcagatgggaagactcggctaaggcgttcccacagtcaactggcc

SEQ ID NO: 151768 - DNA, 122 bp, Homo sapiens
ttctagaattctcagattctgacacactagtatccatgattctagaatctagaggctcaacgtttagagttttatgaatccaagattctaacattccagattcccctggatcaaaaaactcc

SEQ ID NO: 151769 - DNA, 122 bp, Homo sapiens
cgggccctgcagagcacgtgggaggatctccagtgtcacctacttcctgctgcacacacgcgaggggaccctgggtgggcaaaaacgtgctttcccggacggggttgaaggggagaaaggga

SEQ ID NO: 151770 - DNA, 122 bp, Homo sapiens
agggcggcggcgggagcacgtcctcaagcagctggagcgggtcaaggtgaggcctggagccggagtggggagcgcgccggagggtggggagtagggacgagggaggcggagggaggagggcg

SEQ ID NO: 151771 - DNA, 122 bp, Homo sapiens
ttccctcgcattcccttccttttctgcagatcctctgcttaggaatggggcattggcccccgcaggagtgggcggggaaggggcggagcgaacagaggtgggcggctcccgtcctatgacgt

SEQ ID NO: 151772 - DNA, 122 bp, Homo sapiens
gtttgagagcagcccaggcagaggctcatcagggtgcatgggaaacatcctaatttcttccgaaaaatattcctcctacccaccacctctcataggcccaggggctctgaaccctctgacac

SEQ ID NO: 151773 - DNA, 122 bp, Homo sapiens
taggacaggagttaaaacgcatccctttggtttctgtttctgggaataacaatgaaagcacgttaaagaaatatctcctaaaccgtgatgactgaaaaaaattgtaaatgagttccagtgtg

SEQ ID NO: 151774 - DNA, 122 bp, Homo sapiens
cgactgcgcgggctgaaggcgggggcggtgccatgacgcgcctcgggggcggtcctcgggcgcgcaccgctctcttacactcgggcctcagaagtccgtgccagtgaccggaggcggcggcg

SEQ ID NO: 151775 - DNA, 122 bp, Homo sapiens
gtgggtgcgtgggcgggcgacggcgagatagcaaaggcccgggcgcccggccctggctcgcggaatgggcggccagatctcaggccctgcgtgcccgagctcagtcccagttccaaccgggg

SEQ ID NO: 151776 - DNA, 122 bp, Homo sapiens
ttctgggtgtgtccctgactggctgcccaaggtctctgtgtcttcggagacaaagccattcgcttagttggtctactttaaaaggccacttgaactcgctttccatggcgatttgccttgtg

SEQ ID NO: 151777 - DNA, 122 bp, Homo sapiens
caagcaccctgcaatgggcgatgagggcagggcgtggctggacgggccaggcgggccgtgcgggtggtgttcactgctaccccaggcttcggtaagacaactattatgggacaggtcaaaga

SEQ ID NO: 151778 - DNA, 122 bp, Homo sapiens
atcccttccctcctccctcttggtcattgtgttctggtctccttctgtccctccaacatgcgtagctcattccttcctcggcgactttgccttgctgtcctctgtcccaggtctcggcccta

SEQ ID NO: 151779 - DNA, 122 bp, Homo sapiens
ggaggctgcagtgagccgagattgtgcctctgcactacagcctgggcaacagtgagattccgtcttaaaaaaaaaaatcaattaacacaacaagaacttggaaaaagttgattctgaccctc

SEQ ID NO: 151780 - DNA, 122 bp, Homo sapiens
agtcatcgacctccccacaccccggaactcctgactgctccccactgcccctgccctgcccgcccgtgtcagctccacaggcctggcccggccactgttccttccatgctgagttgcctgga

SEQ ID NO: 151781 - DNA, 122 bp, Homo sapiens
agcttgtgggcgaaagtcagaaaaacaaattaggaatcctaagaaagactgactgatagccgagtagagcagtctgaaggtagataaacgtgaaccctccatccatagggagattcagatac

SEQ ID NO: 151782 - DNA, 122 bp, Homo sapiens
gtggaattcaacatcaatagcaatgcttttggaaatattccagaatgcaaaacaacttttcgttttcttattagaaactctggattttttccctcttctgaatggctgaaagtagaataaaa

SEQ ID NO: 151783 - DNA, 122 bp, Homo sapiens
ggttcaggaggcagccggccaggatgctcacaaggacggccactcccagaaagcagactccgcccaccacgccggccagcacgggctgaggcaggaggcccggcagctgcgtgcgcgaaggg

SEQ ID NO: 151784 - DNA, 122 bp, Homo sapiens
tgcgcgccccgcccctcgagccgggcccatgcgcagagacgtcggctcctgggttctaggcggctgctgctcgcacagccagagcagttgggccgcctcccgctgcctggtgccgcccccct

SEQ ID NO: 151785 - DNA, 122 bp, Homo sapiens
agggcggttaaggcgtctctgtctcaaactctccggattttttgcagctaccagggactgcgagggtctgcgtcctgggtggaaggaagcggcgtcagtcaacttcctcgcagcggcggcag

SEQ ID NO: 151786 - DNA, 122 bp, Homo sapiens
cccgcagggtcgagactgaaatcaattggctccccttccggcggccaggcaaacctgcctcgcctctggatctgcttctagacccgctcccggggcttggaagacccctgccgggtagagga

SEQ ID NO: 151787 - DNA, 122 bp, Homo sapiens
ttattgaatcctaagttctgtatatatgaatatacatgtttctcagccttgttgcaccctcgttcccttctgctgaaagagatttacaaaacatttgttttccaaagaatcctacactttat

SEQ ID NO: 151788 - DNA, 122 bp, Homo sapiens
gccgcccgacaccgggctcgaacccgcgcccgacacctcctcgtccccgctctcgggcgacgtccccgatcccgactcagcccaacggctcccgccaccgccaccgcccgcggggcccggag

SEQ ID NO: 151789 - DNA, 122 bp, Homo sapiens
gaattgctcctgcttcaagatgtcaagaccgagggagcttgagctgttctataccttttccgggaaggacaactgaggtgggaaatcatttttgatacttgaatgtcttcaaacttcttttt

SEQ ID NO: 151790 - DNA, 122 bp, Homo sapiens
gataaaattcccaaacatggtatgtgatttctccaggaaccaagaaattgaactaattttcgtgcctttttcctctgtcttgtagctagcaacttaattttggttgtttgggaatgtttcta

SEQ ID NO: 151791 - DNA, 122 bp, Homo sapiens
ggccattcgttcctagctgttttacaggtaggttagctttctcaatgcaagtctgtgggacggatggagaaaaattccccgagccctttgatcctgccccagctgggccccgccgcgctgag

SEQ ID NO: 151792 - DNA, 122 bp, Homo sapiens
aatctatagtatgatccaaagtagatagaggtaaacataaaataagactggctagaaagacgacatattaacacttgtctttagttggtggttctatgggttttatcccactattttctatt

SEQ ID NO: 151793 - DNA, 122 bp, Homo sapiens
tgggccacacccgagcccctgcttgggccctgatctttgagaagggggagcagcagaacccgggcactgacgctacagtgccactcacacccacagatttctccacacaggcatcagtctcg

SEQ ID NO: 151794 - DNA, 122 bp, Homo sapiens
catctttacccacagagcctgatcctgtgctcaggcttttattagcatctgtgttctttccgccacagcgcccagctgccccggcagcctcttggtgaacacttgctgaataaatgcttcac

SEQ ID NO: 151795 - DNA, 122 bp, Homo sapiens
gtggcggcccgcactgcgagggtctacactaggcgggggcggcagattccttgttccccccgagtgacaactttaatgggacctcggctggcagcctctagtccacttgcctctcctctggg

SEQ ID NO: 151796 - DNA, 122 bp, Homo sapiens
ccttagtagtacccacgcccagggggcaggcagagttctgcgtttatgagtgacgccctccgcagtgaatgtttaccgaccacttggcaagtgctccgagcacagaccaagtcaccccagac

SEQ ID NO: 151797 - DNA, 122 bp, Homo sapiens
ggcgggctgcaggtgcggagccctgccctgaggtgaggcagctaaggcccggcgagaaatcgagcacagcgccagtgggccagcactgctgggaaatccagtgcatcctccgcagctactgg

SEQ ID NO: 151798 - DNA, 122 bp, Homo sapiens
tccaactgggagaagctgagttgatagtacatttagtttgtctatggtgagacatgtttacgtgggtcataatcactctatgcatggggaggttgttatttcaagcagtgctcctaccctgc

SEQ ID NO: 151799 - DNA, 122 bp, Homo sapiens
aggtttttctttctcttgttgccctgtcaggtctaatttggcggcattatgctgagagggcgggcctgctcctgacaggagggggttaaatgagattgcaagctttggaggctgtcagcagc

SEQ ID NO: 151800 - DNA, 122 bp, Homo sapiens
tgcataaccagctttttaaaaattatttaactaattaaggggccatgctaatctctgtatcgttgcaattttagcataacatatgtactccccaagcgagcgccacaaccagctgttaacta

SEQ ID NO: 151801 - DNA, 122 bp, Homo sapiens
gtgggggcggcgctcaccggtggtgggactatggcgggagcgcagcgcaccctctccgggcgggtctataaatgccatgtaaaagccaaccccgcaggggcctgcgctctttcccgcttagg

SEQ ID NO: 151802 - DNA, 122 bp, Homo sapiens
tagcaatgaaaaccccattttctgagggaagcgctgacatcatggtccctggagcccctgcgcgggaggggagggggtctggcggatttctgggaccagcagggggacccccgggtgacaga

SEQ ID NO: 151803 - DNA, 122 bp, Homo sapiens
accttgcccagacaggagcctcaggtctaaggaggaggagcagcgctccctgtgcccacacgcacagtgcccggccccctgtcccaggtgctacctctgcaccacacgctgcgcacacaaca

SEQ ID NO: 151804 - DNA, 122 bp, Homo sapiens
gctgcctgattgcttcgacatttaataagtcaattagagtccatccgttttggagggatccgctctccggacctcgaggggtctgccccgcccgagcccagtccccaggttcgggtccccaa

SEQ ID NO: 151805 - DNA, 122 bp, Homo sapiens
ccggccagtagctcatcagctcgtcttccaggcaggttgctgcgatcctggcaggcctgacggtgaggcctgtgagctggaatgagctgcgctgagaaactgacctctccagtgggcaggat

SEQ ID NO: 151806 - DNA, 122 bp, Homo sapiens
ctgagtctactcacctggacaactggaatctggcaccaattctaaaccactcagcttctccgagctcacaccccggagatcacctgaggacccgagccattgatggactcggacgagaccgg

SEQ ID NO: 151807 - DNA, 122 bp, Homo sapiens
taagaaaaattgtgattggcatttaggcatcaagagaaaaagttctcttagtgttattgacgtgctcaatttactgtacaagcaactaaggtgatgggcaaattgtatcctttggattgaaa

SEQ ID NO: 151808 - DNA, 122 bp, Homo sapiens
ctgctgtagaaaagtgcctggctaagtaaacaataggccaccagctttagcacatgggaacgaagtgtcttcaaacaatccagaaattgttatcagcccaggcacaatagcaatacaactgc

SEQ ID NO: 151809 - DNA, 122 bp, Homo sapiens
ccgcaagatggcggctggactcgcagccaggaccacagcgtcccgccagtttctgcgcggcgccagtccggggctctctgggcagctctgcacccgcaatcccgagtatttcccgggttgtt

SEQ ID NO: 151810 - DNA, 122 bp, Homo sapiens
tatctatccatcctagaacattctatgaaaccctattccttgctgaaactcatatgagtacgctgccacttgttgggaataacaacaacctaattattcaaagttaatctgataatgttttt

SEQ ID NO: 151811 - DNA, 122 bp, Homo sapiens
agcctcttccatgactgctggatgcagcctcttgcaggcatgcacgtccttgggaggcggcggtagccctgaccctgggcctctgggacctcgaccctaaccgaggggccagaagctccctc

SEQ ID NO: 151812 - DNA, 122 bp, Homo sapiens
tttgaatctgaatttttaaaaatatctcagggaattttgatgtggtcaatccacagcccacgctttgtgagaaactgccccattcatttcctatctcttctgaaagaacccctggtggcccc

SEQ ID NO: 151813 - DNA, 122 bp, Homo sapiens
ccctgggctaagctacagtaggatcttccccaggggagtccccacagtcagcacaggacccggcgcagagtaggagcccagaaaacctttgttttttttttcccttgagacaggatcttgct

SEQ ID NO: 151814 - DNA, 122 bp, Homo sapiens
taggcgtgagccaccgcctccggctgttatatttacaatacctaagttaccccttggttacggcacactgcagaaaacaacgatttactaggagaaaccatgggggaactaggaagccaggg

SEQ ID NO: 151815 - DNA, 122 bp, Homo sapiens
aggtcccctccccacatagatggaaacactgaggcctgattcatggtgccccctgtgaagcgcctcatggccagcaccggggggcagcaggccagggcggggacacatacccggttctcgtc

SEQ ID NO: 151816 - DNA, 122 bp, Homo sapiens
ttcctgtgtgctgcctctggccagaggcatgaccagatgggagcaagcagatctatatggcgaactggggtaactttaacattcctggactgggactggacataaggtgggggagtataacc

SEQ ID NO: 151817 - DNA, 122 bp, Homo sapiens
tttcatgaccccggagcctccacgtcctggtacagagcctgcctctccgggactgggcttcggccgagcagacaccgcctagctgctctttgaccagcgttctctgctctgcgtctggctgg

SEQ ID NO: 151818 - DNA, 122 bp, Homo sapiens
ttgggacctgcgcaccctggggaaagagaacaaatcagaaggccagctcctagatcacgccgagtagtatctccccgacggcacctcctgctaagcccctgcccacctcccctgacaacctg

SEQ ID NO: 151819 - DNA, 122 bp, Homo sapiens
gcccgtgtcccaccttccctgggtctcatctgtgctctgtggaggccaagggttccctcccggggccaaagcccctgctgcagacagacccaggcccagagaaggacgggggcctgggcgct

SEQ ID NO: 151820 - DNA, 122 bp, Homo sapiens
accaaaatttcaagggtaggaagatggaagaaatagggaaagagcccttttatagcccaccgtagtggtgggtgactggcctctagtttatataattatttacctctttggcagtacagata

SEQ ID NO: 151821 - DNA, 122 bp, Homo sapiens
cagctctggcctgagacaggcgtcgcacagaactccctgtccttccatttcattggaactcgggggacacggcagctgcttttgtgggagggctgatccgagccgcagcgaggggtgggctg

SEQ ID NO: 151822 - DNA, 122 bp, Homo sapiens
caagatgatgttttgaatacatatacatagtgacttgagtactacagccaagctaatcaacgcatccgtctcttgacgtattttatttatttatttatttttgagacagagtcttgctctgt

SEQ ID NO: 151823 - DNA, 122 bp, Homo sapiens
gctcactgcagccgcaaactcctgggataaagtgatcctcccacttcagcctcagcctctcgagtagctaggactacaggtgcacacaaccacaagcagctgattaacacaaattttttttg

SEQ ID NO: 151824 - DNA, 122 bp, Homo sapiens
cagtaggggtgtgagtgttctgatcagaactacttctctctgccagaatttgatgtaattcgaatgcttccacctctgcttgaagggtttaaataataaattaggccctgtcgtgccattat

SEQ ID NO: 151825 - DNA, 122 bp, Homo sapiens
tatatacaggagtatgaaaggcagaagataggtcagagagattttggagatgtcagaacacgggggtggatagtcaaaataatcagagtggatgaaatctcctgaagataatgtatgggtgg

SEQ ID NO: 151826 - DNA, 122 bp, Homo sapiens
agaagtatatcgatctcccagcctggctctggccgcgtgcgtctacctctcgcctgtcttcgaggagtctgtgggtgtcagtctttgtgcctgtccgtggttcccttcccttggttagtata

SEQ ID NO: 151827 - DNA, 122 bp, Homo sapiens
ggagactctctggaaaatgggctactcgaagagagatgctccgttgcctcaggcggagggcggggacgccgggcctgcgacacttcatcttttcctggccccgaggtggctgggatccgttc

SEQ ID NO: 151828 - DNA, 122 bp, Homo sapiens
cctgggtgggagactccttcttaattaaggccagcattggcctgggcgggctaggagccccgcgggcccctcaccgagtgcccagagcccggatccaccagcggccggagagctccctgcca

SEQ ID NO: 151829 - DNA, 122 bp, Homo sapiens
gcgcccacttcacagacggggcggccgggtagaggcactcctcccagatggggtggcggccgggcagaggtgctcctcacatcccagacagggtggcggccaggcagaggcgctcctcacct

SEQ ID NO: 151830 - DNA, 122 bp, Homo sapiens
cctcggctgccgccgccatagcggaccccgcgctgtttccgggccggggtgctgcgcatgcgcactgggtgtgccccgcccacccggccggccctgcagtcctgcgcctagcggtccagtcc

SEQ ID NO: 151831 - DNA, 122 bp, Homo sapiens
agtgggtggtgactgcaaaatgcgaggccggtcggctgctggagagacacagaagtttcacggtgggaggctgagtggctttctcccccggcgccgttctcagggtctttctgcgggtcgaa

SEQ ID NO: 151832 - DNA, 122 bp, Homo sapiens
ccaactgagtggtctagagtccctgctaattacctccttccacagcttttgatttggagccgaactgatggcgccagcggctgaaccacagtcagatctacaggcctctgatttgccaaatg

SEQ ID NO: 151833 - DNA, 122 bp, Homo sapiens
aaaaaaaaaaattaaattcctcttcactctgcatcctagatgagtgattttctgagcctccgcacagtgcctgggagtatcggaattcgtcatttcaggacttgacttaatgtatatctctg

SEQ ID NO: 151834 - DNA, 122 bp, Homo sapiens
gggaaacagagaggacactggggagaggaaagataaagggaaaatccggaacacagagatcgcttctggtctctgcggaggaagccaggcccccagggcgcccatatccaggtgaggagcac

SEQ ID NO: 151835 - DNA, 122 bp, Homo sapiens
cgccgtcgggggctgagacccacttgtactgagtctccagccgcctccctaggctgctggcgcttctaggggcttctgtgctttttgccaaactctgagggtgaccctgaacctaacggctc

SEQ ID NO: 151836 - DNA, 122 bp, Homo sapiens
caggttggacaggagaaggctgtagggcaggggccgggtgctggagggaagagcatggcacgagaatgtggtgggagctgtgcatgcccagcccttggagaagccactttccctctctggat

SEQ ID NO: 151837 - DNA, 122 bp, Homo sapiens
ctgaaaaggagctgagatcacgtgatgcgggggagggaggcccttgctgagggataggggcggagtccctgatgatgagcaaaaggctgctccccaggcgtgctggcgttcctgccccggca

SEQ ID NO: 151838 - DNA, 122 bp, Homo sapiens
cctgggagtatgtggaaacaacggaggagctctgacttcccaactgtcccattctatgggcgaaggaactgctcctgacttcagtggttaagggcagaattgaaaataattctggaggaaga

SEQ ID NO: 151839 - DNA, 122 bp, Homo sapiens
gcagcagcagccgcaggcgcggcccgtggttcttccgggtggtcttgacggcgatgaagacgtcgtcaggccgcaggctgggggcagcgggccgggacgggggcgcgcgcggggccggggcg

SEQ ID NO: 151840 - DNA, 122 bp, Homo sapiens
ggcacagcttggtctgtctctgatgaccctggggctgctctgagacattaaaaatcacctcgatcatacagtaagctgccacctgaggctctggaggtcaccctgagtttccccagccccca

SEQ ID NO: 151841 - DNA, 122 bp, Homo sapiens
agagagcaagtgggagagcggagagcggacgcgcgctgaggagagcgagtgagagcgcggcgctacggggtcaggactcaaaccacccgctccagcccccatgcactgatttgcatgacatt

SEQ ID NO: 151842 - DNA, 122 bp, Homo sapiens
gtgccaggctgtgcactggtgaaattggttttgcgagggagctctgtgatgccgtgagcccgggtgcctgcactctggtcgttggacgtcagcaggctgtgcactggtgaaatcggttttgc

SEQ ID NO: 151843 - DNA, 122 bp, Homo sapiens
tggacccaaagctccgtggcggtgctgaactttagggcagccactagccacggacttaagcggcaattgagctcctcaaagtgggtgagtgcaaatcaaatgtgcgctaaatgtcagataca

SEQ ID NO: 151844 - DNA, 122 bp, Homo sapiens
tcatggcctgaccctcctcaaacgcacccagaggagactcctggtcccctgtccggaccccgccccgaccaggtccagccccgcccaacggcaagttaagagccccccagtgccagacgctc

SEQ ID NO: 151845 - DNA, 122 bp, Homo sapiens
gctgggagtcgggttctgtgccactcaatgccagcaaagcacaagccgtccctgcgccttcgggagctttcattctaggctggtggcagattactcacaaaactcagatgcacacaaaaatg

SEQ ID NO: 151846 - DNA, 122 bp, Homo sapiens
gacggtcggtgcctgcaaagaacaacacattcggttaccaggtggccacgcggggccaggcgcggtgagggcggcgagggccaggccgagccccggctcccgaccacccggtcccgcccctc

SEQ ID NO: 151847 - DNA, 122 bp, Homo sapiens
ccttgaatttcagcgttagaaattaaaggtcaggagacgagaaaagaattagaccaacttcgattgaagtagggctcaagtattagcacatacggggctcttccattaaaaatattttatac

SEQ ID NO: 151848 - DNA, 122 bp, Homo sapiens
agtccaggcgctcagacttttctccttcatgaccctcatctctgctctcgggcctcagcccgcctgtcgtactgcaggaaattttgtttcctgcttgtcttcaaagacttcagggcttagaa

SEQ ID NO: 151849 - DNA, 122 bp, Homo sapiens
agcccgtcgcccggggctcttgttgtctgtgccatttcggtgccttttgtccttgcttcccgccgctccttgaggatgtttaccggctgctggggccgtgccttccaggtgaggcctcggtc

SEQ ID NO: 151850 - DNA, 122 bp, Homo sapiens
gactcctgagtccccctcccactccactccgttgggagcccaggggaatcagggcctgggcgtctggacccccgggtcccttagaacgcccttcagagagaggaactgagaggagaaggaga

SEQ ID NO: 151851 - DNA, 122 bp, Homo sapiens
ctgggattacaggcgcctgccactggaggatggcttctcccagaggggaagacagggtcacggttctcattaagagggtattgtactagtcaagcccggagatgtacttgaactgaaagcaa

SEQ ID NO: 151852 - DNA, 122 bp, Homo sapiens
ggggtttcctcccagctcctccgttccagcttctgcctccaacgtggtggccggcggcctcggggcagcccactgccccccacactggcacctccagcagctccagccttgcgcttaggctt

SEQ ID NO: 151853 - DNA, 122 bp, Homo sapiens
cgcccccttccctgaatcccagcctgcagagcttctcttccagacgcaggtgccaccgttcgcgatgctgggagcagagccgccctggtcgatgtcgggaaaacctctccgtcttggtctgt

SEQ ID NO: 151854 - DNA, 122 bp, Homo sapiens
cacatgtatgtctgtgtggtgtgcatgtgtgcacatgagtgtatgaatggtgtttatgtgcgtctgcatgtgcgtgcccatgtatggtgtttgtgtgcacatgggcatgcatatgtgagggt

SEQ ID NO: 151855 - DNA, 122 bp, Homo sapiens
tccttcctccttcccgggcggtcactgtgcgtggctcacttttagagtttacttcaaccacgtggagcttccatggcggcctctcaggtcctgggggagaagattaacatcctgtcgggaga

SEQ ID NO: 151856 - DNA, 122 bp, Homo sapiens
tcccccgcaccgggaggggccgaggctgggctgctgctgccgaggtcgtgtgcgacgtgccgctcccgggccctgtgtccccagccccagcagggccgcgtggacggcgcggcgcccccgga

SEQ ID NO: 151857 - DNA, 122 bp, Homo sapiens
cagcgtattttcctccccgtgcctttaatctcccgttgtggggacagaaagccctgtacacgcgaaacctcgtagacgtcatgagccattttcaacccaaaacgcatctcagggaacatctg

SEQ ID NO: 151858 - DNA, 122 bp, Homo sapiens
attcgaactcttccctggtgaggccaccctttggcgagcatttacatgggacacacgtatcgtccggtttttgcccacatacctcttctctcagttccctcggtttccttgtcactaatttt

SEQ ID NO: 151859 - DNA, 122 bp, Homo sapiens
tttatattgaaaagcactttcttagtagttcggcccctcacacttggaaacaaacttcaacgacccttcatcattcccatcgttctttaggggacatttatgttgaattattatctatttta

SEQ ID NO: 151860 - DNA, 122 bp, Homo sapiens
gagtggtgggggggaaggtgccttcctacccttgcatttgcatctcaagccacccgtacccgaggcccacccagtccatctgttcattggtagatacaccattccgccattccgccagtggc

SEQ ID NO: 151861 - DNA, 122 bp, Homo sapiens
ctgtccgtcccccactgggcagctagaaggagcctcaggtttgggtcttcccagggccgccgtggcccaagaggatggtgccaggaaggtacctttgctgatcaggtccggctccacgctgc

SEQ ID NO: 151862 - DNA, 122 bp, Homo sapiens
aacccgggataaagtttgtacacagctgcagatgaactactgagagcttatccaaatctgcgtccaacttataactatgttgaaaagaacatgtgtcttttaaaaatcacccttttgggtta

SEQ ID NO: 151863 - DNA, 122 bp, Homo sapiens
tacggccacgctgcacctaatcttcgcggatagcctgcaagaggtattgccagacctcagcgaccgccgggagccctctgacccccaggcaaaactgcagttttacctggttgtggccttgg

SEQ ID NO: 151864 - DNA, 122 bp, Homo sapiens
aggatgagctccaggttttctttgggccgatgcttcgtgtcctccaccagcttatagacgcgatgtcgccggtgcaggcgcggcttccggccctccccggccagcggtaccttccaccagcg

SEQ ID NO: 151865 - DNA, 122 bp, Homo sapiens
cggtagcgcgtaccttgctctcgatctgcttcaccatcttggctgctggagtctgacgagcggctgtaaggaccgatggaaatggatccaaagcaccaaacagagcttcaagactcgctgct

SEQ ID NO: 151866 - DNA, 122 bp, Homo sapiens
cttacaacagtcctctacttcttcccaccaaagcattttgaaaagtgtatatcaaggcagcgataaaaaaaacctggtaaaagttcttcaaactttattgctccagtaggcttaaaaacaat

SEQ ID NO: 151867 - DNA, 122 bp, Homo sapiens
ggccccagtgaccttttcagatgcagactcccacagcatgggtcagcaattctccccttccgtgagacagggattggttacctgtactaggaccttgaggccaacactgactagggggcctc

SEQ ID NO: 151868 - DNA, 122 bp, Homo sapiens
agagcactggccggaaggacagcagctggttgctgttgtggctgctgctgccactccaggcgctccagcgaggatagtctcccttctccagaatgaactgctgtccctggaagtcggggtac

SEQ ID NO: 151869 - DNA, 122 bp, Homo sapiens
acccaatccatagaggcatttctctgctaggacagattccacagtggaatcaagtcccctcggtgtttttcctccttgctgccctcaaagatgtgtactacagaccttttaaggaattaaaa

SEQ ID NO: 151870 - DNA, 122 bp, Homo sapiens
cgttgtcatccatctaaatgctaactatcgtcttttctttccccgcccgagagagtcaaacgctcaaggcattggcttgtcagtggtgggtgtttgccggcgctagtcttgtggcctattga

SEQ ID NO: 151871 - DNA, 122 bp, Homo sapiens
caggcttgaaactctgtgcctggcccaggccgagaggaacctatctgtccgcaggctgaccgggagccacccttcccgccacctgcacgggccagagccaagtcccgccacctgcactgtgc

SEQ ID NO: 151872 - DNA, 122 bp, Homo sapiens
cattagcctaaatacttctgtcttagtcagctcagactgtgcaacttttataaacaacatcgattcattgcttacagttctggaggttgggaagtccaaggtcaaggcactggcagattcgg

SEQ ID NO: 151873 - DNA, 122 bp, Homo sapiens
cggagcggagcggagcggagcgtagagtagaatccacttccccgggttttgggagggggccgcagcccgctttccgggcggcggggaggcggggccaccgcgggggcggagctcggctggga

SEQ ID NO: 151874 - DNA, 122 bp, Homo sapiens
tctttgcacgggctgccaggcttctggttcatacagccccaggtcagtttccagaaccctcgctcttgggtaggggaaagagacattgctctggagtggcaggacggtgggagaagttgagt

SEQ ID NO: 151875 - DNA, 122 bp, Homo sapiens
catagaactacattcctttctttgaaagcactcatcttcacttgtcattatgaattcatacggtaattatctgccctgtcttttccactagcccatatgtcttaggaggtttgcctatgttt

SEQ ID NO: 151876 - DNA, 122 bp, Homo sapiens
gtgttgggattacaggcatgagcctctgcgcccggccttattttatttttcttacttacccgtggaacaaagaatcaggaataaatattagagatgctgatttggccggaagcagtggctca

SEQ ID NO: 151877 - DNA, 122 bp, Homo sapiens
gcttgaagttgggtaatggtggttgtggtaaatagctaaaacatcctatagcaccagtgacgcacaaggagaacaaagttcacatgccattgatcccagtaattgtggtaaatgtgacagat

SEQ ID NO: 151878 - DNA, 122 bp, Homo sapiens
acctggggagtggggatagggtgtgtctcttcgtagctcctccacattctgcagtttgctcgcagttcaattatttactgaaagtgagtaacaaaatcatgtgtttaggcctttgattaaag

SEQ ID NO: 151879 - DNA, 122 bp, Homo sapiens
tggggggtggtctgcgaaagggtctcacccagctccaaagctactcatggcggcgggtggcggagcttcggggccgggggtggagccgggaccggctctgccgcttccggccctgggaggcg

SEQ ID NO: 151880 - DNA, 122 bp, Homo sapiens
gagtgagtgagtaaattagtcgatgatcgaatgaatactttctcctggtgacctttctttcgatagtcataaccggacacagagttgagcagcactaagcgcagtgcatcagtgtcgtttca

SEQ ID NO: 151881 - DNA, 122 bp, Homo sapiens
tgatatattcctgaatagatgaaagaacaagattgtcagtcagcttcaacttaaatatttcgggtaagagggtgagcacattctgttcatgctcagctctacttcttagtatattttatatt

SEQ ID NO: 151882 - DNA, 122 bp, Homo sapiens
tgtgtgtcagcagggaatcgcttgttttgacaataataggatccccaccacacattcctccgcagctgtttactaaccgtgccgcgcggggcagccccggctccaacatatctgagtcattc

SEQ ID NO: 151883 - DNA, 122 bp, Homo sapiens
gagaccccactggggcggtccgcaggacccccgggggtttcctgggaggtcgagggctggcgccgggcgcggggaggctgcgtcttttgtgatgttcgcggctggcttcccgggcccaggct

SEQ ID NO: 151884 - DNA, 122 bp, Homo sapiens
tgagtaactgtaactaaggctgggttgactgcgtgtttgcctttatcgtgcctatcagaacgttgacagtgcgtgtacctccctggtgatgtgcggctcacttgctctttcaggacctacct

SEQ ID NO: 151885 - DNA, 122 bp, Homo sapiens
catcacaatagaaatggttaattaagtttgggccacagtaagtcagacggaaagtgataacggtgtggaagagggcaaccaggaagctgtatatatatggaactgccaccagttgaatgcag

SEQ ID NO: 151886 - DNA, 122 bp, Homo sapiens
cctgtgtcgtacaaatccctcgtgcggcaaaagtagtttgtctttactaggccaccgtctcgtcagcgttacggagtattttgtccgcctgccgccgccgtcccagatattaatcacggagt

SEQ ID NO: 151887 - DNA, 122 bp, Homo sapiens
cttcaggcaccatcgttgaccgcacgtcatgcttttcctggtgtcgtatgtttgtgccagcgtagccctctgcggggcctgtgccggtgctgtgtcaggtgtggtggcctcagagcgcctcc

SEQ ID NO: 151888 - DNA, 122 bp, Homo sapiens
ttattttgcactgtaaatttaaaattttgcagggaatatttggttagtatagcagtgcttcgagcatgtattaataaattatacgttttgttaagcaatgacctgtgcccctattgtatgcc

SEQ ID NO: 151889 - DNA, 122 bp, Homo sapiens
cacagcaaacaggaagcaggaggtgctgtcacatgtaacacagtcagagcttcaagcccccggaaaagctcaatgccagatttcattctctgcccctgatgatgccccgcactttcttaact

SEQ ID NO: 151890 - DNA, 122 bp, Homo sapiens
tggaacagcctgatgtgggcagatggtcgtggaggctgaaaacccgggtgttggccttggcgtcaaagtttgctggttgagtgacctacgcaagttaagccctctgatctttatgtgactta

SEQ ID NO: 151891 - DNA, 122 bp, Homo sapiens
ctcactcacacacggctggtggtacctgggcaggacattctgccattcccatgtacagcacggtgggttcctgacacatatctgaggtgttttagtggggataaagcttttcattccactgg

SEQ ID NO: 151892 - DNA, 122 bp, Homo sapiens
cacacccggcctgccctgagtgaccacaggtgtccccgtcgtgctcacctgcaccggctgcgaggagcagggagctcctcaaagagctcaggaacggacaggacatggtgagtgcagggcag

SEQ ID NO: 151893 - DNA, 122 bp, Homo sapiens
atccaatcaggggccctgggacggggccctgccaactgtcaatccggggaagcagaaggccgcactcagagtctctgcactcctttgttgctggggtccgttgcgttctgcatccagtcctt

SEQ ID NO: 151894 - DNA, 122 bp, Homo sapiens
tctagtggggagcgcctaagccaatggaaatgctcgctgcggcagctgccgggtcctgggcgctgggaggcggtgccgggggcggggtgcggctggggcgaattagttgccattcggagtga

SEQ ID NO: 151895 - DNA, 122 bp, Homo sapiens
gtgtttgatgtcctgaaaaataccgtccacaattacttcacagctagccccagcacttggcgcccagcgggttttcctagtccctccctgccaaatcacgttgggactgagacaagaggcac

SEQ ID NO: 151896 - DNA, 122 bp, Homo sapiens
caatatccacaggctgagtcttgagagcccctggagcccatgggccaggatgcccaccctcgtggaaactaaacagtaaagttaacattgcccttgaatcagctggccaacctctccatttt

SEQ ID NO: 151897 - DNA, 122 bp, Homo sapiens
ctgcagactgctgccctatcactttgttctttcacaatattgccaacttttggctgggtgcggtggctcacgcctgtaatcccagcactttgggaggctgaggcgggatcacttgaggtcag

SEQ ID NO: 151898 - DNA, 122 bp, Homo sapiens
aggactcattgctttgattcccctttttaaaggaaggctttaacaagcaaaggaatatcccgttgtgaataagaatagccattctagagtagagaaagactctatgagtacccatcactaga

SEQ ID NO: 151899 - DNA, 122 bp, Homo sapiens
ccgacccgagacactcacgtaaaagaggatgcccacgtacagatgtggcagcaggccctccgagctgggattcagacccaggtcagcacgactccaaaatctttcctcctctgcagctcctt

SEQ ID NO: 151900 - DNA, 122 bp, Homo sapiens
aaataagttttgttcctaacactctttgtgatatgaagtattcttgctaatcaagctgcccggagactggcgtttcccagagcagtttcgaaagtggaaatgatgctgcatttcctacccac

SEQ ID NO: 151901 - DNA, 122 bp, Homo sapiens
aggacaagcacagtgtcatccctggagcagaaaagcctgagtcagcggctggccgggaggcgtagtggctgggtgctgagtcacggtcccaggatatggctcccctcggagctgactcactc

SEQ ID NO: 151902 - DNA, 122 bp, Homo sapiens
ttaagtctaattgctgaccactattacaagttaaactacttgaggatagagaccagttcacgctgtttatcttttagctgctagtgtgtgtaatggatattttgttgagtaaattaatgaat

SEQ ID NO: 151903 - DNA, 122 bp, Homo sapiens
agcagcgctcctctcttcagccctgacgatggccaggtgctgggctgagcttctgtgtgtcgcatcactgcatcctcacaataaatttagaagggcttgtaatttccccattttgcaggtga

SEQ ID NO: 151904 - DNA, 122 bp, Homo sapiens
agaagaggactggtctttccaccagcatctcagaaatgccggtgtgtctaaacagcatgtcgttctttaatgctttcatgcaatatattttatcaatctcaagttcccctcactatgtatta

SEQ ID NO: 151905 - DNA, 122 bp, Homo sapiens
cgggccgggccggggcggggggtggtctcagcgcctagagcgagatgcgaaattagtagccgcccacccccttctcagttcccgcccccagggaattataatttcctgggaaagtgtctggt

SEQ ID NO: 151906 - DNA, 122 bp, Homo sapiens
gggagtcccacctggagccggggcagccgtgaactaccgaggaggaggcggaggagacggcggctgttccagaggagggagtcgtcataaccggctactgccgctcaccggaaacctcgggc

SEQ ID NO: 151907 - DNA, 122 bp, Homo sapiens
cggagaaaaagaagaccttatccctgcggtccgcgcgcgctgcgggcgcagctgcggctgcggcacctgttacgcccagtgattcacccggccgttttctgctccccgcccccttctgacgc

SEQ ID NO: 151908 - DNA, 122 bp, Homo sapiens
gtgagcatttattccatgtcaggcactatgctaagggttttatagatttaatcatcatggcgaccctgtaagttaagttctattattagttccattttacagatctggaaaccaaggcctag

SEQ ID NO: 151909 - DNA, 122 bp, Homo sapiens
gcagttccctgcgcagccgccaggtggcgtcaaggccgccgcctggggggccgggcaggccgaggcccctgcccgtcgcagtcccagcctcgctcaccacttggcccgggagttggctgcgg

SEQ ID NO: 151910 - DNA, 122 bp, Homo sapiens
ggaacatcccccactcccgaaagtttcccttccggggccacggagtgtgcgcgaggatggcgcggggggcgggagggggtggggtgggggtgcacagagtcgcagccggacccccgaggagg

SEQ ID NO: 151911 - DNA, 122 bp, Homo sapiens
acctgcttcgcacctgagcaggctccacatcaaagtagggtctgaggatgtcgatgttggcgtacaagctgaaggccctggaggcttgtcttttcccagcctgccacatctgaagtaaggaa

SEQ ID NO: 151912 - DNA, 122 bp, Homo sapiens
tgccactctgtgtacttccatagtcgaccgcgccagcaggaggcctcggaggatcctgtccgggcccatagatgtttgctagcgggacaagcttgggtgagttgagcatctgactccgtcct

SEQ ID NO: 151913 - DNA, 122 bp, Homo sapiens
tcgggcccctcctgcagggacagtgaccagggcctgggctgcacgcggccacggtgtttccgaagccaaaccgcgactcgtcctcttcactcccacagtccaggccgctgtccgggctccgg

SEQ ID NO: 151914 - DNA, 122 bp, Homo sapiens
gaactcttccccccactcttcctcgaggtctttgaggatcaggaagtctaaagcctcaggcggccagagggtgtgcggagctggtggggaggagcctggagagaaggggcagagctgggggc

SEQ ID NO: 151915 - DNA, 122 bp, Homo sapiens
ctccaagacgctggccatgctgggggccgtgaactgcggggcggggaaaccagcggtgagcggggctcccgcgctcgccgggccggaggggccgctccgccccggactcaccttgaggggcg

SEQ ID NO: 151916 - DNA, 122 bp, Homo sapiens
cattgccgggtctctcaccgccaaactcgacatgattccggttgtgcagacagccgatagcggattcttcgaggcgtctgtcctcttgcgaccgacacttccgctgagcaacggaagcggct

SEQ ID NO: 151917 - DNA, 122 bp, Homo sapiens
ccccccttcagctgggcacagtgccccagaactcaggaacatgggtaccacctgtccctccgcccacataaaagtcattgaagagcttgtggggctgtgggacctgcgccctctggaggaat

SEQ ID NO: 151918 - DNA, 122 bp, Homo sapiens
ccaggcctgtgaggatcggatgcccgagggtgctcctgcatgtcacgcggaggcgggggacgccagcgatgccctcccgggggcgtgggaaggggctctcggcctcccttgactctccatca

SEQ ID NO: 151919 - DNA, 122 bp, Homo sapiens
ggcggctcccggaggtggtggcttcactttccaggactcaggggcagccacagcgacagccgcgggcagcagcctcaggagccggagctggaacggccgggggcggcggcagcggcggcgct

SEQ ID NO: 151920 - DNA, 122 bp, Homo sapiens
tcgggttttaatttctcctcctaaccttcttcatggagcctatgctttcagcctcacacccgctgcctcctcagggacccacgcacaccgggacggtcactcacccaccgtggtggtcgggg

SEQ ID NO: 151921 - DNA, 122 bp, Homo sapiens
aactgtctgatgctgggtaagtgacgtgatttgtgtgtaagacctctgacttcttccttccgatcccacatggagtagctgatcaggccaagacccctcagggcctcagtgaagggtcactg

SEQ ID NO: 151922 - DNA, 122 bp, Homo sapiens
cggagggctttggtggcggccagaaccatccggggacagttgcaggcgcaggggcaagatcgggggaccggaagacgccagccgcggccgcggccgcctccgccagggacggtaggcccaac

SEQ ID NO: 151923 - DNA, 122 bp, Homo sapiens
taatagtagctacttcacagggttgttgtaggactaaactactaaactactttgtttttacgtgaagggcttgggacagttcatgggtcagggtgaatgctcacttaagcctagggctgctg

SEQ ID NO: 151924 - DNA, 122 bp, Homo sapiens
tgttcaagcaacaggctgtgattaggcctaattataggggcctggtctcttaatattctgcgtggcatgtctcttgccaatcaaatcagtgccatgtgcagtgtgattcctgctttagtggc

SEQ ID NO: 151925 - DNA, 122 bp, Homo sapiens
gtaggcttttaggcaggacaagttttacgcctggccaaataagggtcagactaagcaaggcgcctccgtgcgcctagccagagcggtgccggctgcggaacctgccccgccgggagcctagt

SEQ ID NO: 151926 - DNA, 122 bp, Homo sapiens
aataaaaaatgcactaaaagtctgtagtgggtgatggggtgggggatttaggggtgccgacggggtagacccctattgaaagaggcacgaaaactgggagatgaaaagcataggctcgtttg

SEQ ID NO: 151927 - DNA, 122 bp, Homo sapiens
cgcggcagaggcccgccccgcctgcccgagatcctcgccctccagacccacctcctccgacggccatgaaggtcagggccttccagaacccggagccgctgtccgagctctccgagcacttt

SEQ ID NO: 151928 - DNA, 122 bp, Homo sapiens
ccatggcggccacaaagggactcagcaaagcgcctgaccctgaccctgggaagactcagccgcggccgggccgcggaacacagatcggtaaaactcgcccggctgcgttgacgtcgcaccgg

SEQ ID NO: 151929 - DNA, 122 bp, Homo sapiens
ctgcgtgaggggcgggcctttgcgacatcttggggggcgccttcggtgacgtcacaggggcgggccttctgtcacgtcacaagggctgtacagtgcctggagctgggcagtcttctcagagt

SEQ ID NO: 151930 - DNA, 122 bp, Homo sapiens
acccttgcccctaccgagccctccagggtagcttgggggagaagctcctccctagactgccgggtatttgatgagcctggccagcgcacaggtcttgagcaccatggtcagggaagaaggct

SEQ ID NO: 151931 - DNA, 122 bp, Homo sapiens
aagtatttgaaacatgggcagcagcaaagagttttcattgtttgttcacccaaatctttacgacaacagagaagaatgcattatggatacactaaattctgaactatgaaatctaagctgtg

SEQ ID NO: 151932 - DNA, 122 bp, Homo sapiens
ccagctcgagaccacgcagggccgaggaggttgcgaaaggcgcaggcaggcactgcccagcgtggcgagccaaagacgcccagagatgcagcgagcagcccgccggagcggcggctgttctt

SEQ ID NO: 151933 - DNA, 122 bp, Homo sapiens
cacagatttcttctgccctggagaccacagaacttaccctatcgaatctaggattggcgccgaagctactcccgccctttgacgtccccgggcaccccgcccccttcacctcccagctttgc

SEQ ID NO: 151934 - DNA, 122 bp, Homo sapiens
agcctggcaccacggcttcctaggcccattgccaagggcaggccgccctggtctgctcaacgtcaagaacaaactccaagatcgtgacagaagaacgcaggacagagttcctggcggtggtt

SEQ ID NO: 151935 - DNA, 122 bp, Homo sapiens
actcgccccgctgccaactcccggtgcaggaggaactggcagccgcagacgtgaggaaagcggccgcggcttcaaactccgtagtgcgcaggcgccacacaacgcgcaggcgccgcctagaa

SEQ ID NO: 151936 - DNA, 122 bp, Homo sapiens
tgaaacctcatctttactaaaaacacacacacacaaaaaatagctgggtgtggtggtgcacgcctgtaatcccagctacttggcaggctgaggcaggagaatcgcttgaaccagggacttgg

SEQ ID NO: 151937 - DNA, 122 bp, Homo sapiens
gtccccaccagcccggggtggcaggttctactcgggaagcctgttttatgtcttctttcacgcccatatcacaccgacaagggtgaagctgtggaacttatacctcggctgggccccgccgc

SEQ ID NO: 151938 - DNA, 122 bp, Homo sapiens
attaaatagtgctagatactggaaaagtgacaacatttataactcatatattaccatgcacggggaaaacagtatacacattattaaatctaatataatccacttttttaatgagttaaaaa

SEQ ID NO: 151939 - DNA, 122 bp, Homo sapiens
ccccgcacagctcgccagccacgggagggagcggcctccggcagaccccagccccaggcacgaccccaggcccgggcacgaccccagcccccaccggctgatgcgacgcccacaggggacga

SEQ ID NO: 151940 - DNA, 122 bp, Homo sapiens
tatatcactttgtgtcattttctccagtgtttccagctaagaatttatagacaagatgcacggataagattttgacaggcacctgggtcagaggcatcagacacaggaagtttggatgctga

SEQ ID NO: 151941 - DNA, 122 bp, Homo sapiens
ggggcgactggtaagggcgcgcccctccggagtctcccgggaaggcatttgggaagtgaccggggagggggagcgctgacaagagtaaaatggaaacgagtggggaagatggacttgtgtga

SEQ ID NO: 151942 - DNA, 122 bp, Homo sapiens
gatcaaggtcgtggagacaagtcattctagtgacctcacactgacatagccaccaggccccgcctctgggtgtttcagagaaaactccaggcagcggtaggagaacgctccaagggctgtgt

SEQ ID NO: 151943 - DNA, 122 bp, Homo sapiens
aaaaggaacagagcctttggagctggaatgtgctctccagccaggacacttatttttgcacgctctctgtgggaaatggccttgaaaagacggccgtacggtgttccctttgtgcgtttcaa

SEQ ID NO: 151944 - DNA, 122 bp, Homo sapiens
ccgcccgcgcgcagctccagctccagctcctcctgaggccgctcctgctgcagttgccggcggaactcctccagcagctgctccacgcccgacagctgcgcgtgcagttcggacagcggcgc

SEQ ID NO: 151945 - DNA, 122 bp, Homo sapiens
tccctgctcaggaagaagccagatgagtcagccccattcgtctgtatgcccagtcccatccgtgtcctgctgtaactacatagatctcacctgagtaaagtgatttttttctgaaccagtgg

SEQ ID NO: 151946 - DNA, 122 bp, Homo sapiens
actggccgagtggagccaggaaggcccttcaaactcagcccaagccggggggcgtcatgacgtcggggcacagaggagcctgggtgtccgtgccgtccaccatgggcccgtgctgggcactc

SEQ ID NO: 151947 - DNA, 122 bp, Homo sapiens
taagtgccccacatgtggtagaaactgatagatgtacattttctgcttcttctctgatgccgtggacaggggagactcagtctgcatgagctccattttggatatgcaccaaggattactgg

SEQ ID NO: 151948 - DNA, 122 bp, Homo sapiens
gggcaagcaggacggggcggggctacgcgggatctgggcggggcggggccggtgaggggtcgggggtgctcctgctattcagccggtgcgcgcggcggcgggaggcagtggctggggagtcc

SEQ ID NO: 151949 - DNA, 122 bp, Homo sapiens
ctcgagctcccgaaagggggcggggttaaaactctcagatctcattccgcctccctctgtcgtcgccccttcccaattctcgcgagacctcaaggagcacagcttctgcgcaccgcacgata

SEQ ID NO: 151950 - DNA, 122 bp, Homo sapiens
ttcagattcatccttaccaattacaacaagttgtccatccagagttggtttagtttgcgccgagtcgagatcatttccaacaattcaatccaagcagtctttaacccaactggcgtatatgc

SEQ ID NO: 151951 - DNA, 122 bp, Homo sapiens
gtctcgtcacagccaaattccctttaaaaatacatgtactactaaggctgcctcctttctcgcccctaaacttaagtcgcccgcagcggcgtgtctccgccccacccccacccgcctgcact

SEQ ID NO: 151952 - DNA, 122 bp, Homo sapiens
tcgattggggttatgttttgggggtgagtgccatggggtgaagtgcccttctcattgcctcgcctcgggggcacatgacttcaccatgactcaagtctggtgatgttaaccttgagcccttg

SEQ ID NO: 151953 - DNA, 122 bp, Homo sapiens
tttggggagcaattttcttaatctctttgtgcctcagttttctcttctacaaaaatgagacgacaattgtactactggtcatagagtactaagaggataagcgaaaactgagtgacattgcc

SEQ ID NO: 151954 - DNA, 122 bp, Homo sapiens
ttgcaccaatccagagggggctttccagcgagtccccgcccccttccgacccaccaatcacgcagcgcctctggccgcccaatctcctattacccaggctgagttggcgggtcgcagctgct

SEQ ID NO: 151955 - DNA, 122 bp, Homo sapiens
ggcgcggccaccacatctctccgcccccgactcacctgctccctgcctcagtgatctcggcggagaaatgggggagagcccactcattccaccccgctaacccccaggtgctaccggaggaa

SEQ ID NO: 151956 - DNA, 122 bp, Homo sapiens
tgaggaaagccaggatctgagctcggccgtggaaggagggaggagggacgccggggcggacgggcctgctgcagacccagcccgaggaggcccacctcggcggatacagctgcctgtcttcc

SEQ ID NO: 151957 - DNA, 122 bp, Homo sapiens
agcagccgcagagccggaggtcgcccgtcagcccgcagctccagcagcagcaccaggcggcggccgccgccttcctgcagcagaggaactcctataaccaccaccaggtacggcgggcggcg

SEQ ID NO: 151958 - DNA, 122 bp, Homo sapiens
tttgcccggccgtgcctcccctaggcgtggcatctatggtgagcgtccacgtggagcacccgcaggaggcgtcggtggtggtgcaccaggtggagcgtgtgtctggcccttgggaggaggcg

SEQ ID NO: 151959 - DNA, 122 bp, Homo sapiens
cacacgccaacagcttgaattacccggggtgaaaccggcgagacgtccactcagggctttcggtcctgaccagccacggaacaaacaacgtcaattcattctaagtgcctggtgaaggtaga

SEQ ID NO: 151960 - DNA, 122 bp, Homo sapiens
gcccagggacccctaacccccgctgaccgcaaggcgatctccgactccgaacgaacgcctcgttgcagatcggctcgatcaaccatcaagacttagaaatggaggctgtcgatggacgttct

SEQ ID NO: 151961 - DNA, 122 bp, Homo sapiens
ggctgaggctcccgctccagcactgctccgctccggccgcatccaggccccgcccaagggcggagtctgtgttcgccccgccccggccctcaactcctagcaggtgtaatccgaggtgactc

SEQ ID NO: 151962 - DNA, 122 bp, Homo sapiens
ccgcgtccccttaggattcccgcccaccgcgcgggcgcgcgtcccgctctcgggggcagccgccgggcctgcatttcttgcagccctcaaggcccctcggtgtcagcgaaagagccctcatg

SEQ ID NO: 151963 - DNA, 122 bp, Homo sapiens
gggggcggctgggtttcgtccgaagctgggatcggggtggttcaaatacagaggtggggtcgctctggtgctagagtcggagcatccgggtattgggggttagaagtcagggttcaccacgc

SEQ ID NO: 151964 - DNA, 122 bp, Homo sapiens
gaccgcggccctctctcctcgggctttgccttcgctctctagcttttcttctttcactcccgctcgccgactccagcccgctgggctcacgctctgccggacaccaatcccggcggccctgc

SEQ ID NO: 151965 - DNA, 122 bp, Homo sapiens
cagggaggatgtggagctgggctgtcagaagtagagagcccctccaaagaggatgtttggcgtgggtgtcggcctcgctgcctgtcttccggcctccacctcgtgttgtgggagctgctgcc

SEQ ID NO: 151966 - DNA, 122 bp, Homo sapiens
agagcttgggtctgagtcatcactgtgttccatcccagcccagtgttctctaatgctggccgagtgaatgatgcatgaacattccactttccatctcccttggagggagagcagcttccaaa

SEQ ID NO: 151967 - DNA, 122 bp, Homo sapiens
cgctgcgtgggcctctgacctatgtggcatggcgggaaagtcctacaagactgtgccaagcgagtggcgagtctgtcccgtctctgcccgagcctcggcccggctgggtggacacctcttgt

SEQ ID NO: 151968 - DNA, 122 bp, Homo sapiens
agattattaaagttaaaatctagaaaaagaacctaaagaataaatgatgaagacaagaaccgacagagaaattacatttgtaccatatgatagatgaagaatatacaagagttcttacaaat

SEQ ID NO: 151969 - DNA, 122 bp, Homo sapiens
ctggcagaacaccgtcctacacccaaatgggcagtgacttgtctgagaccctggatgagtcgcttcacctcttggggccttgttcaatcttctctaaaacaaaaactactcagctccacagc

SEQ ID NO: 151970 - DNA, 122 bp, Homo sapiens
ataataatgatggctcacatttactgcgcattaactacatcaagtacttattgtaagtgacgcatgtgaccagttgccaattgttcaggctacagcttggatctgttagcatcctcatttaa

SEQ ID NO: 151971 - DNA, 122 bp, Homo sapiens
cacagggcagaggccaaaccacaactcccagcaggtcacgcggagtagggcgggtaagcgcgccttcttattggatggcgatggacagcgtgctcttacgacccaccccagaaggcaagtcc

SEQ ID NO: 151972 - DNA, 122 bp, Homo sapiens
ctttctgtctcttgctctgagcaagcctctgattgttggtttccctcctccacgcctcggcgcgaagccgaggggaccgcaattgagtggtctcagcgcacctcttccaacgccgctctact

SEQ ID NO: 151973 - DNA, 122 bp, Homo sapiens
aacccggaagccttccgcttcactctggctgcgtgcctgattggacggcttccagcccagcgtccctgattggataatgcttaaatccccgccccctcaggccctgagtgacagaagatatg

SEQ ID NO: 151974 - DNA, 122 bp, Homo sapiens
ttttgaatcttgttagcatttgttgcagagttcattctgtttaagtccattttctattttcgtgattaaggattgacagagacgcaaaatatgaccttaaccccataactttttcagttgac

SEQ ID NO: 151975 - DNA, 122 bp, Homo sapiens
cattacccatgccagaacaaagtagataataaccagaacaagaacctgaacagagccagtcggagaagaagtgtaccaccgtgggaaagacagtagactgtatagttatctccaagatgggg

SEQ ID NO: 151976 - DNA, 122 bp, Homo sapiens
aagaaacaccaagtccacggcgcagccagcgacctaagccgatgcagggaggatagagcacggaggcaagagtcgagtggcagctctgctgtgtgtcactgtgtaacctcagcaaagttgct

SEQ ID NO: 151977 - DNA, 122 bp, Homo sapiens
aaacatgaaccattaacagatgtggcctccctgcagaacttttactttgaaaaagaagtacgtctgaaccagattcacatgtttgatatttggatgcagagaaaatggggcagaaagcatcg

SEQ ID NO: 151978 - DNA, 122 bp, Homo sapiens
gcatcaggagtggctccagcaggctccaggagcccagggtgcacttcccagacatcaggtcggaggttgaaatcagcaatggggggagtatttataccaaagaaatcagcaaacactgccga

SEQ ID NO: 151979 - DNA, 122 bp, Homo sapiens
acgaggaaggtccccataccgcgaagtacattggccttggggtggggctggagggatgggcgcctgtgagaatgtgacggactgtgacacaaggaagggtgcgaggatggaaacttcctctg

SEQ ID NO: 151980 - DNA, 122 bp, Homo sapiens
tatgtgccaggcgctgttctagatgctacagaacaggacaaaacgtcttcctcaagcttacgttcattccaatggggggagtcaattgagaaatcagcaaaacatgtcactgtggcatatat

SEQ ID NO: 151981 - DNA, 122 bp, Homo sapiens
gagctgggcgctgtcttctccacgcctccgtttcttcatctgctcctggggccgcctgcccggtagcggagattgaatcgcatgttgacgtctattacgatgattaatgttcttgtcattcc

SEQ ID NO: 151982 - DNA, 122 bp, Homo sapiens
gagtcgcaaattcccaggcagattggctccatcggtctaatcaagctgcacttgacgctccgcgggcctgctgcgcccccgccccctcaggcgaaaactcgcctctgcccaaggctgtgcgg

SEQ ID NO: 151983 - DNA, 122 bp, Homo sapiens
caccctacgccctgtccggcgcggggcataagccctgcctgcatcctgagatcccgggtccgcaaacttgggccccactgagcagcaacgccagaacccagaagcacttactgccaggaaca

SEQ ID NO: 151984 - DNA, 122 bp, Homo sapiens
cgaggtactctggaaaatgtagtcctgtcacgcgcccacgggtaggaaaaccccaagtcgcgaagccttaacattcaactcacgtttggatctctcagacgagagtttttcaaaacaggtgc

SEQ ID NO: 151985 - DNA, 122 bp, Homo sapiens
tgcagtgtcctggcacgttttattattgtgattttgaatttcttcctccagagacatgcccgtttcaccttctaccctcgggagaatgcttctctttctctctttctttcttctttccttct

SEQ ID NO: 151986 - DNA, 122 bp, Homo sapiens
gcctattgccaattgcatcagagcctgattcactcggtgtaactggggcacgatgtgtatcgcgaggcccttctcagaaccctgctctcctgaggcccggagagaatcagcagttgaatttc

SEQ ID NO: 151987 - DNA, 122 bp, Homo sapiens
cagaggctgagggctgctgactcttaacagagcgatttagaactgtgtgctcaggccaggcgctgtggctcacacctgtaatctcaacactttgggaggccgaggcgggcagatcacttgag

SEQ ID NO: 151988 - DNA, 122 bp, Homo sapiens
cctcccagcctggaaaggcaaaaaggggtgggtctgctgagccatcctcccctcctccctcgccccactcccacaaggcccaaaagaggcgggcaggagaggccagtagtgggaagccgagc

SEQ ID NO: 151989 - DNA, 122 bp, Homo sapiens
aggaagcaagcgagccgctccagtgaccaccaggtctgcaaggcgaggcctcactctcaccgccacagggaccacgcggcactgatgctgctcctgccagccctgcggccccggctaggttc

SEQ ID NO: 151990 - DNA, 122 bp, Homo sapiens
gtctttctatatacaagttgctggtctgttggccacttgcccaatgaaggaaaatgttagcgattgctggaacgtagtggtatttttgctttatgtagtaagcatttttactattttatttt

SEQ ID NO: 151991 - DNA, 122 bp, Homo sapiens
gggttttggtgtggatgggacctgctgacagggatgcggtgggaagagcccctcggcgcccgttctcccaggcttccccttggccaagggtgctcctagcacagggccatgaaagtaagatg

SEQ ID NO: 151992 - DNA, 122 bp, Homo sapiens
tttgtaagagattctttgggtagctttctttaaaagccagcgcctcgtagtatgcccaggcgccccagtttggggaagtcggggtgaagccccctggaacaccctcacactggcaaagaagc

SEQ ID NO: 151993 - DNA, 122 bp, Homo sapiens
gaccacagggggctcgctctgcgatttatggtgcgaggaggaccagacaccccctgtgcccgtcctactcctgcagatcaaactcacagccacacttttcggaatgagaaactggacagtaa

SEQ ID NO: 151994 - DNA, 122 bp, Homo sapiens
cggccggggatgggggtgtggtcccaagtgtacagtggcatcaagctcagcgcgagctcccgggaacgctccaacgccttcagcctgtttcccaggaacggtccccggcttcgcgccccaat

SEQ ID NO: 151995 - DNA, 122 bp, Homo sapiens
ccctggtgcaggatgaagctctgcccacggtcctggtcggcgtgttcatcgaacagcccacgccgtttgtgtccctgttcttccagcggctcctgcggctccactacccccagaaacacatg

SEQ ID NO: 151996 - DNA, 122 bp, Homo sapiens
gccttgcttctggccgccggtgtctgggctcctggagctgctgtggagtctattggtgtccgcctgaaatcaacctgggctcagtctggccctggaggagaggagctaggaaggaggaaggc

SEQ ID NO: 151997 - DNA, 122 bp, Homo sapiens
tgttgggattacaggcgtgaatcactatgcctgtcccctctctctttgtgtctctttcagcgtgtgtctgttcctctctgtacctgtcagacccaggagtccaggcccccagcccctcctcc

SEQ ID NO: 151998 - DNA, 122 bp, Homo sapiens
gccccatgtctttgcaggcacccccgcgtgtatgggtgtgagtgtgcacgtgtgcctgtgcgcgctgcgacgggatttaacctggataccaggccgggagcgcccacgggctttcctccctg

SEQ ID NO: 151999 - DNA, 122 bp, Homo sapiens
ctagggataggattgagtggcagagccgggattagcaactggggagatccgcgacctgcgcgcgccctgtagtggctatagagagtatcacaccccacgcctgctggcttctggtgaccggc

SEQ ID NO: 152000 - DNA, 122 bp, Homo sapiens
ctggacaagggataggtgtcccgtggccccagcccacactacctgtggtggtgatgaaggcgtaggacttggaggtctgccccgcccgcaccccgtggacctccacgtggtaggtggtgccg

SEQ ID NO: 152001 - DNA, 122 bp, Homo sapiens
ggtgctgctttatttcagactctgccccaggttccaggaatccgaaccccggagtgctgacgcggttccccaacttccgccttaagaaaacaggaccagccggcaccaggcccgtctctcac

SEQ ID NO: 152002 - DNA, 122 bp, Homo sapiens
gaggggtattttgatgggtgccaaggtcaggaagtggcgcggctgcacgctggagggggacgggccccggaggttctcagggtccacggagaccatggcagcggcggcggcggtggcgatgg

SEQ ID NO: 152003 - DNA, 122 bp, Homo sapiens
gccagccggaggagggagggggcgcagtcggagggaaaggaagtgagaggagcagggggccgacgggtggatccccaggcattagtgacacagtcttcaaatcgcttcttttcctccccacg

SEQ ID NO: 152004 - DNA, 122 bp, Homo sapiens
tcaccctctactgccaggtcgtctgacccagcgacaggcgcggtaaatgcgcgaccaaaccgcagaggtcccatgcaatctcatgctgacaggattacaggcatctctgtaagacgtcgacc

SEQ ID NO: 152005 - DNA, 122 bp, Homo sapiens
ccctgacatacagtgtgaaatatgactgactgaagctccgctttcaagataaaggatgatcgtcacaacggctagtatttgtgggcttcccgtagttgtctagagttaccaagtggcaagtg

SEQ ID NO: 152006 - DNA, 122 bp, Homo sapiens
attgaaggagaacttattaatttcaaataggcactatgtagacagttcttcctgccctaacgctcaggtgccaattccataagcactttgacttaagaaatctgttttctgaggaggtggtg

SEQ ID NO: 152007 - DNA, 122 bp, Homo sapiens
cccccatggctcctcctgggctggctgtcttcctcctgtgggttctgatgccacctgggccgacggcgtcttctcagcccagggcggccgcgcctccggtgagtttcagctgagggcgcacg

SEQ ID NO: 152008 - DNA, 122 bp, Homo sapiens
tggaaaatcaggtcactcccacccgaatactgcgcttttccgacgggcttaggaaactggcgcacaaggaaattatattccgcacgtggcttggagggtcctacgcccatggagtcttgctg

SEQ ID NO: 152009 - DNA, 122 bp, Homo sapiens
ttacttaaagaaagagtcttgcagcataggctgtgagcccaaactatgagctattcaaagcgcagactgtgagctacatattcaaacatgacagagttacgttttaaaaaaacaaaggcaga

SEQ ID NO: 152010 - DNA, 122 bp, Homo sapiens
cgtctcgccgcagcagccaccctccaggaacccctcaagctctggccaactgcgagtgcccggccttgggaagccacatccccccaccaccaaaaagcatgtggagaagggtccgagggcgg

SEQ ID NO: 152011 - DNA, 122 bp, Homo sapiens
aactttggacaggcaagctccatgagctctccctcactctttgaggcaggttaaagggtacggccatgaccaccaccttaatccttcagggactatttacaaaagattgaaaaatgtgccca

SEQ ID NO: 152012 - DNA, 122 bp, Homo sapiens
cagactcggcctcaactaggtcttccggataatttgggaatagggtgtcatctattctggcggcgagttatagaagtctggctccagaacccaaaaatgtcggtccccacttgccctcccgg

SEQ ID NO: 152013 - DNA, 122 bp, Homo sapiens
gggaaactgaggcagcccagagcagcccccaccctaggtcctgcccgggacacgcccacgcgggacctgtgtcaccaggttaaaaatggaaacagctaggaccttttttttttcttccttta

SEQ ID NO: 152014 - DNA, 122 bp, Homo sapiens
gcccgggcggtcgcctggccgcccactccccgccagcacgcccggcgacgccccccgccccgccaccccacaatctcccgcccagcggtgtcccctcagccccggttggcgtcccattccac

SEQ ID NO: 152015 - DNA, 122 bp, Homo sapiens
tctagtgttgttgccagcagctgcacgtggtcggctgagtccgcctcagactcagagctgcgctcctcgacctcaacgccaggcggttactttgctgctcctcccgctcgctatgtcaacgt

SEQ ID NO: 152016 - DNA, 122 bp, Homo sapiens
aagccacccagcctatgcatccgctcctcaatcctctcctgttggcactgggcctcatggcgcttttgttgaccacggtcattgctctcacttgccttggcggctttgcctccccaggccct

SEQ ID NO: 152017 - DNA, 122 bp, Homo sapiens
cccatgaattcaaatgcacctggtcagaagcgggggaacataaacaagggggatgaggtacgccatggagaggagactcttttacctgtttaggaagtctctcgtgtcctagaagggaaaga

SEQ ID NO: 152018 - DNA, 122 bp, Homo sapiens
ggaggaggatgacgatgatgacaaaggagatggcttcgtggaaggtttgggcacccatgccgaagttgtccctcttccttcagttctttgttattctgatggcaccgccgttcacgaaagcc

SEQ ID NO: 152019 - DNA, 122 bp, Homo sapiens
tctctgacttagcagattcatcaatgggatgtgcaggctatcctagaggaataagtctctcgaagtcagctggagtcaaaggccaccgatgaaggaaaagcctgtcagaaccagactagtcc

SEQ ID NO: 152020 - DNA, 122 bp, Homo sapiens
ggcacccacagctgtggccaggagtgtatgccagtgtgtgcgtgtggatgtgcaggaacacgcatgggcacccacctgcttgtgcatgctccagggacggcacccttgtctggggcaggtgc

SEQ ID NO: 152021 - DNA, 122 bp, Homo sapiens
cccccaagccggccatttacatctcttgcgaaagaaaaagcctctgggcattggcttctccgtcaggcggtggcctcatagcgctcagtgattctcgccaggttatgaaaggccgttttaga

SEQ ID NO: 152022 - DNA, 122 bp, Homo sapiens
cctgccatagcaatcacctgcctttggtgaggctgagcctggccgcgggaccccattgaccgctcctggcctcacactaaatggagttgcattgctcctccaaattccaaccaagaggaccg

SEQ ID NO: 152023 - DNA, 122 bp, Homo sapiens
tccagacttcctggtcgggggaaccccgaacggcaacctgggggggtgtcctggggcgcccgtgccgccgcttcccgactgcgcgtcctgagggaccccgaatgggagccagaggggttcag

SEQ ID NO: 152024 - DNA, 122 bp, Homo sapiens
tccttccctgactctccaaacacgtgcataaatctatttaacaataattagttatcgtctcgctctgcattgggtcataaagggagaaaatatgtcctgaaaggaaaaaagaacagttatat

SEQ ID NO: 152025 - DNA, 122 bp, Homo sapiens
gtcgctccgctccgttccagacgccgccgccgggcgggaccctgctccctggattggggacgctgactcccccaaaagcttgactgtgccggaggaggtcaggggcacttcgtcccccagga

SEQ ID NO: 152026 - DNA, 122 bp, Homo sapiens
ccttcccgggaaggaaggacaagccaaggaacagagcttctcttagggaaatggtttcctcggctctacacagaatcccagtacttcctgaattgcacttttaacttttatgctgagcagca

SEQ ID NO: 152027 - DNA, 122 bp, Homo sapiens
tccagtcaaggatgtgggatagtgggaaggtcttccccatgccccaaagcgaggaacaaacgtggagaatacatttatctgtgtattgatttgtaatacataagtcttctgaagttagaaga

SEQ ID NO: 152028 - DNA, 122 bp, Homo sapiens
ttggagctgagacttcagcctccctctggtcttatgggccaaaggaatttaacatgggatcgtggaaagggctctgggccagggctcaggggcatgtggctcctggggcccagggctggcag

SEQ ID NO: 152029 - DNA, 122 bp, Homo sapiens
gcctgagggtcattcttcaagcctctccaggcaaattgctgtggagaaagttccagattccgagattcatgccagcgaggccctgcagcctctatacttgtacttacaaaacccggaaccga

SEQ ID NO: 152030 - DNA, 122 bp, Homo sapiens
gcacaactggacgaggaagacccctgctttgagttccggcagcagcagctcactgtgcaccgtgtgcatgtcactttcctgccccatgaaccgccacccccccggcctcacgatgtcaccct

SEQ ID NO: 152031 - DNA, 122 bp, Homo sapiens
ctggatagatgctgctgctctgtggatcatcattatcatcaccaaattgcacttattaagcgctctttgagctgtgttttcaaatggaaatcatttactgagttcttgtagaagcttcctgc

SEQ ID NO: 152032 - DNA, 122 bp, Homo sapiens
tgctacagtgttttgtacacggttaaaacactagtaaagctttttcgttattactccttccgctccctgggtttatttccacaaccggccgctgaggcctgttctgacggccgggcggaccc

SEQ ID NO: 152033 - DNA, 122 bp, Homo sapiens
ctgctcccccgtggggcatgtgggctgcggcctggaacgccccgtttcagtgtctgtttccgccttcgttttccagtaggaacagagggaccctggctcctagaaatcggggggccacagaa

SEQ ID NO: 152034 - DNA, 122 bp, Homo sapiens
gccctgacagctgccctaacagaagctccagcctcacggtgcaggcaggaacaagcctggcgcgccagacagctcggccccgcccactcgccgctctcggaaagctggaaccctgccccttt

SEQ ID NO: 152035 - DNA, 122 bp, Homo sapiens
ctgtgcgttggctcacacctgtaatcccagcactttgggaggctaaggcgagtggatcaccggaggtcaggagttcgagaccaggctaaccaatatgatgaaaccccgtctctactaataat

SEQ ID NO: 152036 - DNA, 122 bp, Homo sapiens
tggctaggcagcctgccagggtgcggagcgggagcgggtccttgggctgcacttgggcggcgccggatcggacgcttggcactctgggcggccccccggcggagtggtggtcccaggagaac

SEQ ID NO: 152037 - DNA, 122 bp, Homo sapiens
agggcaggggcctggcctggcctgctcggctcttaagtcctggcttcaccactcactgcccgtgtggatgagctcctcagccctttgggctgcccctggagaatcagatcatgaataacaat

SEQ ID NO: 152038 - DNA, 122 bp, Homo sapiens
atcagacctaaatcagctttcctccctgctaacatcctagtggcaactcttactcctacccgcactatgggattttaagatcaaaggaattagacctagggcaaaaactgagacagcaggga

SEQ ID NO: 152039 - DNA, 122 bp, Homo sapiens
taacgtcttcagggtatccttgcttggaggacatataattcacttcttgccttccagggccgcattcaccccactgcatctgccggaaccccgctgactcttacactgatgtgtatagttga

SEQ ID NO: 152040 - DNA, 122 bp, Homo sapiens
gatttccttgtggaagaccgtgtcttggttgtaggagatgagctcattgctgatgttcaccgtctccaccggcgtgcgggagcagacgtggctgcaccccagcagctgggcaaacaccttcc

SEQ ID NO: 152041 - DNA, 122 bp, Homo sapiens
gagccggcctggggcacggagaggctgtttccgctccgaggaggcctgctgggccccagccgtaggcgccgcgctctccgtggcccgcaggatgggaaggaccatcgatcctccaggcgggg

SEQ ID NO: 152042 - DNA, 122 bp, Homo sapiens
gtcatactcttgtgcgtgccttgttctttgttcattcatctagcaggtattcccagacctcgtgtatgacaggtagctagggagctcttggagatgtagcagttgggattgtgggagattac

SEQ ID NO: 152043 - DNA, 122 bp, Homo sapiens
agcacccccaggccacgtcacgtggcagccgccaaaaccaacgcctaaccccagcaggagcgcagattcggcaacagcggccactcaaaggctccaggttttgacgtgagccactcggccaa

SEQ ID NO: 152044 - DNA, 122 bp, Homo sapiens
ctgctgctataatcaaaccacacggtgactatcactgtagctatcctactgaaggtaaaacggacactaagaggccatgccagctgtccaggccacccagtggcaggggagcaggtctgcct

SEQ ID NO: 152045 - DNA, 122 bp, Homo sapiens
aatcacctattcaggcatctcggacggcctgtcccaggccagctgtcccctcgcggctatcgaccacatcctggacagcagccgccagaagggcaggccgcagagcaaggcccccgacaggt

SEQ ID NO: 152046 - DNA, 122 bp, Homo sapiens
ggtgcagccgctcattgtgggagtgtccgcagggcggccagacccattaagcccagcaggcgtggcgccagcacccgcggcgctttccacagccctcgaaagtgttttcatttctttcataa

SEQ ID NO: 152047 - DNA, 122 bp, Homo sapiens
ggcagcccctccccaggctttgtgagcctggcccaagccagtacaagagggcctggggcacgatgtggtcagccaggaagcataggatgccatttcttttatagattccttggtatttctgg

SEQ ID NO: 152048 - DNA, 122 bp, Homo sapiens
atacacatacacaaagatatgtggcctgtcaccaagtgttagatggatgtttgggccaggcgaggtggctcatgcctgtaatcccagcactttgggaggctgaggcgggtggatcacctgag

SEQ ID NO: 152049 - DNA, 122 bp, Homo sapiens
agtctttagccatatgcaaggtaaatagcatctgtggaaacaacttcaaaacctccaggtcgccataatgctgccttagggaaatgttaggttgactcttgatggacattgagtctagatct

SEQ ID NO: 152050 - DNA, 122 bp, Homo sapiens
tacccccacctcatgggggcccgtaggcagcgggtacgccccggagcccggcctccgccccgagatgcctctgcttcccaggctgcgggggttttatgcagatcagcagctggcagctgcca

SEQ ID NO: 152051 - DNA, 122 bp, Homo sapiens
agataaaacgccttctctccccacccgtggggtgcaaagcacagcgcatggggctggtggcgcccgagagcatcacacaacgcatgcgccagtccgcaggtgtgggcggaggagaaatcgcg

SEQ ID NO: 152052 - DNA, 122 bp, Homo sapiens
aggtggggcgcagaggaaccgagctgtggaatggggttccgtggagcaggttgagtgtgccggtcgtggacgggtcgtgggcgggactccccagtgtgtcaccactgaggcatcttcgccct

SEQ ID NO: 152053 - DNA, 122 bp, Homo sapiens
ccccaaccgcagggcctcgctccttcccgggctctgcccagcttccctctgtctgtcctccggcaggaaggcctccagagataaccaaggcgtggacacgccaggcacccaggtctcagcca

SEQ ID NO: 152054 - DNA, 122 bp, Homo sapiens
cgttcagcccctgaaggggccccgtggggcctgcgctagacccggagggatcgggggctccgaagggggccgcctggtgggtgtcaggacgagtctaggacctccgagagcgacggtgcttc

SEQ ID NO: 152055 - DNA, 122 bp, Homo sapiens
gcgaggtgctggtgctggggctggatggcgcaggcaagagcacgttcctgcgcgtgttgtcggggaagccaccgctggaaggccacatccccacctggggcttcaactccgtgcgtctgccc

SEQ ID NO: 152056 - DNA, 122 bp, Homo sapiens
tcttccaaagggcaggcaacatggtgggtaagcccacctctagtcccaaaggatggccaacgggcagctgttggggggtggacttgatgtaaacctgcaggctgcggtgttcacacacactg

SEQ ID NO: 152057 - DNA, 122 bp, Homo sapiens
tcgtccccagaggaagagcgggaggcagtcagccccgggggggatggcacagtggagagacggacctgcagaagtggtggccaaggcctctgtaagggcttccccaggagatgtgacctttc

SEQ ID NO: 152058 - DNA, 122 bp, Homo sapiens
ctatccttggcactaacttgttgtggacatcgggcaaagcactctacctctctgagattccgttttctacttcaaagtgggagctgggatatcgttattcccattttgcaaatgaggaaagt

SEQ ID NO: 152059 - DNA, 122 bp, Homo sapiens
ctctccacaaccagcccactccactaaggagcagaactcaaggttctgggcttggcgtcccgtcctttccctggcccatcccctactcttcctttccagcctccaggcccaccctggggcaa

SEQ ID NO: 152060 - DNA, 122 bp, Homo sapiens
acgcggcgcaggccgcgctgccgccaggctactccaacctgctgcctccgccgccgccaccgcccccgccgcccacctgccgccagttgtcacccaacccggcccccgacgacctcccgtgg

SEQ ID NO: 152061 - DNA, 122 bp, Homo sapiens
tgtggtgtagaaagttcgttctccaatctctcctccccttgacttttcttaaatctagggcgttgagagtctctaaacccccaagctgtaaacagagttttttcttttttcttttaattata

SEQ ID NO: 152062 - DNA, 122 bp, Homo sapiens
tacttgagtttgtgcccatgtacgtgtacccgagtgtgtgtacgtgcctgagtgtgtgtacgtgcccaagcacaggcacattgtccagatccacataacactccttctttgcagttgcttcc

SEQ ID NO: 152063 - DNA, 122 bp, Homo sapiens
gaaggcagggccccccctcccccccctcccccccccccacacacacacactcccctgcctcgatccctcgatccctggtaactgaccgtcgcccgcctggcactagcagcggcgcagacccg

SEQ ID NO: 152064 - DNA, 122 bp, Homo sapiens
cggtcgtgtcccgagagtggctggtccgcaggctcggactaccagtcccagaatgcactgcgcccgcagcccggggcgggccgtggttgcccctggcaacagagagggtctcccgggagcgg

SEQ ID NO: 152065 - DNA, 122 bp, Homo sapiens
cgaggctacaaccaaccagatcatctgggaggcaccctccaaaccaaagatactgcaattcggagtaatttcctgttctttatttgcatattattttcttgttgtggtttgttattttactt

SEQ ID NO: 152066 - DNA, 122 bp, Homo sapiens
ttatttgggggaaaacaatctttgtcacttcatcatagaggttcttgaaactgaggtctgcgacatttctcttagtggtgctgggaggagaatgcttcttgaatggctaaagtaagagtggg

SEQ ID NO: 152067 - DNA, 122 bp, Homo sapiens
cgtttttatcccatttcttcctgtaggcgtttcaaagtttgcaaaggcagcaaacttttacgtagtgtagttatctgtgcaaagaaattttccaagctgccattgcccccagatggcagaca

SEQ ID NO: 152068 - DNA, 122 bp, Homo sapiens
tgataggcaacaggttaccctttaccggggtaaaacatggtttattctacagtttggtcccgttgtaaggccaggagatagagtctcactagtttgccccggctgaactcaaactgctggac

SEQ ID NO: 152069 - DNA, 122 bp, Homo sapiens
ctcccagcccgtctggtggagcatttctcctgagttaagcatgattattcttcagttgcccgacactgcccttgactcccttccaaattcggcattttcacatcagtatggctattgtacag

SEQ ID NO: 152070 - DNA, 122 bp, Homo sapiens
ccaggaaggggtggggcctgggactacccagtcctttccccgggaggcgatgaacctgctcgcccttgtctcgtggggcctgcggtgggctcccgcccggtgacgccggacgaactacctaa

SEQ ID NO: 152071 - DNA, 122 bp, Homo sapiens
attgcggatccagagggacctgaatcagctgtttcagcaggatagtagcagcaggactggcgaaccttgtgtagcagagctgacagaggagaactttcagaggcttcatgctgagcatgagc

SEQ ID NO: 152072 - DNA, 122 bp, Homo sapiens
cggcgcccgccatcggcagggatctccctcttggtgccaggtacctgcctactgctcagtcgccgaaagtaggggaaagggcaagccagggtgccctagggcgaaactaggggaaaggtcac

SEQ ID NO: 152073 - DNA, 122 bp, Homo sapiens
ttagatacaaaacaacacatacattcatcattcctttctcaatgctttccaaagtcttctcgccaactggccctaaacaacttgattatccttgtcacactgcactcaaatattctctctaa

SEQ ID NO: 152074 - DNA, 122 bp, Homo sapiens
ctgacctctcccccaaaccccacagggccaccaccaccactgaagacccgctctgtgctccggggtgatgatgtcctcctgccctgtgaccagccatccaacctggcccgggccttgtggct

SEQ ID NO: 152075 - DNA, 122 bp, Homo sapiens
cgggaactggagaagaagaagatcctggtgttcacaccatcacgacgcgtgggtggcaagcgggtggtgtgctatgacgacagattcattgtgaagctggcctacgagtctgacgggatcgt

SEQ ID NO: 152076 - DNA, 122 bp, Homo sapiens
agcacacataaaacagagcgaaactcacgcgctgtggtgtgaccttcagtccctgccatccgcttccgggtctatgccaatcagcgcaggacagaggccaggcctgggcgggacccccgaga

SEQ ID NO: 152077 - DNA, 122 bp, Homo sapiens
aaatgtggagaaaaggaaaattaatagcagggatgaaaagtgtgaaggacttgtcacaagcgatgagatgttaatgtattcacaataagctgtaagctacacttcctatcaaattaaaaata

SEQ ID NO: 152078 - DNA, 122 bp, Homo sapiens
atcttggctcattgcaacctctgcctcctgggctcaagcgatcctccctcctcagcctcccgagtagctgggactaccaccatatgcagctaatgtttgaattttctgtagagatgaggttt

SEQ ID NO: 152079 - DNA, 122 bp, Homo sapiens
gttaaactcactactctgtcctcaccccccaagctggatccagaagtttaagcccctacccgcccatctctgctttggatctcgggtgcacagaattaatcatcagtcttggttcagggcac

SEQ ID NO: 152080 - DNA, 122 bp, Homo sapiens
gggcaggaaggggagtggctgcctcctctctgccacggtgcagctcaggtgcccgaggcccggcctgtgcctagtgagggctgagcacatacagatgggctgtttctgacaggcaggtttag

SEQ ID NO: 152081 - DNA, 122 bp, Homo sapiens
ctgggcgacagagcaagactccatctccaaaaaaaaagagaatcagctgggtagaggagacgtacctgactgtctaccccatgacatgccccatgccccagggaaaaaaattccctaaagca

SEQ ID NO: 152082 - DNA, 122 bp, Homo sapiens
cacctgagtttctgccagttttctttctgagtgatatttgcataaaccactcctaagacacgcacatccaactgtgagaggggacattctgaggcctcatcagtttcatgtctcagccccca

SEQ ID NO: 152083 - DNA, 122 bp, Homo sapiens
ccagctgggaggactggttgtgctgctggagaagggctggtgaaggcgatgacatgctgccgctttgacagtccctagcagtcacggtccagatgatgatggtagctgtgcctccagcgggc

SEQ ID NO: 152084 - DNA, 122 bp, Homo sapiens
gacgcaacggcgccaagcacttccggagctgtggggacgactcttctggaggaagcagcgcgggcttgaccggcgtcggcccgccgcctccgctgccgcttcgccccaatccggtccctctg

SEQ ID NO: 152085 - DNA, 122 bp, Homo sapiens
gcccgacggaggcgtccagtggggaggtgtgcagggattggttgggaagcgctcaagccccgcccacagagtgacgtcaggtggcggtattgctacttaaggcgtcgtggcctcccctgccc

SEQ ID NO: 152086 - DNA, 122 bp, Homo sapiens
atttaattctcattgcaagcttgtgaagtaggtagtatgtctttaattaaaaaaaagcagcggcagctcagtcgccccaagggacttgcccaagatggcccagctagtaagtgattcaggca

SEQ ID NO: 152087 - DNA, 122 bp, Homo sapiens
ctcgccgcacggtgaggaccctggccccgccctaacctctaagaatcattttcttggccacgcacctctgcgtgcctcgctcctcctgcagactccgcccctagaatgaccctgcctctgca

SEQ ID NO: 152088 - DNA, 122 bp, Homo sapiens
ttgcatgtgtgagaacattgagaacgtttaaaacagtaccagcaaaaccactgtcactcccgcacgcctggtggctggctctcttggccatcttcagttctggttttacagagattggaaag

SEQ ID NO: 152089 - DNA, 122 bp, Homo sapiens
gggcgcgtcgcaggtgaggagcgggcgcggcgggcgcaggcgggggctggcgggcggggtcgggcggtgggcggtgggcagcggggccgcgggccgcagccagggcagacggcgagacgggc

SEQ ID NO: 152090 - DNA, 122 bp, Homo sapiens
gatggaacccggactgccagacgccttccgcctcacaggcactcctcagccgctgaggcccggccaggctcccaccgccggagtttcacaaagaaagtctcccggcccgagcccctcacgca

SEQ ID NO: 152091 - DNA, 122 bp, Homo sapiens
actcggcagcgcggcagccgacgactgcgcagacgcagggcggcggccgcgcctctccaacgccccgcacccgcccccctcagaagcacgtgcgccttacgtaatttcctgttattcttcgg

SEQ ID NO: 152092 - DNA, 122 bp, Homo sapiens
tgggaaccctgctttttggaccctaggtgtctttggaaagctcctgtcacctgaactgcccggcactgggagccatcgctgtacctcacggcgcccgcgagacgggtggtccagtgcccttt

SEQ ID NO: 152093 - DNA, 122 bp, Homo sapiens
tctgcatttcacagatggaaaaacaagacaccaagaggttaagtggttttaccaaggatacgtggcttgttaagtgccaagctctccatggcatattatgctgccttccaagtgccttaggc

SEQ ID NO: 152094 - DNA, 122 bp, Homo sapiens
ccctccagtcccctatgtacttcttcctgcgcaccctctcggccttggagattggctatacgtctgtcacggtccccctgctacttcaccacctccttactggccggcgccacatctctcgc

SEQ ID NO: 152095 - DNA, 122 bp, Homo sapiens
cagactgcctccagacactcaggaacttcccactggcaaccagtgttacccgggtctcaccgatcccgggtgaacagtggtaatagggaggaagatgaaggatagaaccattgcacagcagc

SEQ ID NO: 152096 - DNA, 122 bp, Homo sapiens
ttccgtgaggtacgtctacttccggttaacgaaccagggggctggcaatctcttccggttcgtcttggcaacgtgtgtgaagggggcgtggccatggtacggaaagtgtaaatattttacca

SEQ ID NO: 152097 - DNA, 122 bp, Homo sapiens
tgtttctggaccgtagccctcagtggtgcttaattcaaaaagaaaccccaagagaaaacccgatcctctctgggagggcccagcctagaggataaagtatctaaaggcctagggattgtaca

SEQ ID NO: 152098 - DNA, 122 bp, Homo sapiens
cttgatgtggcggcaggaagtgtctcccacgcgaggactctgtgctaaacgtgtgactgtcgcccccattgtgagtcttttgggcttcgctccctcgattggatcccgtcattcaacaaggg

SEQ ID NO: 152099 - DNA, 122 bp, Homo sapiens
ggcgcactggagtgacgggcgaggggaccaatcaggttgagggattgcccgcgccaggcccgcccctctcctccctgccccgcctccactaggccccgcccctcgccaagtcatgaagtccg

SEQ ID NO: 152100 - DNA, 122 bp, Homo sapiens
cagtgacctctggtggcagggcaagtgctgacatccccgggctgccgggcacacggccgccggctcacctgctgaatgccacccagaggcctgcgtgatcctccaggggggcagctcctcat

SEQ ID NO: 152101 - DNA, 122 bp, Homo sapiens
ataaaaataaaaataaacacattacctgagccgctgaatgtgtcaacactcagatggactcgctctttctttgtaaatggctggaccttggtgcaaggcatgctgggaacttggatctgtgg

SEQ ID NO: 152102 - DNA, 122 bp, Homo sapiens
gcaactcagaagcgaggagtatgggaagggggtgaggactgaaaaactacctattgggtacgatgtacactactcgggtgacgggtgcactgaaatcccagacttcaccactatgcaattca

SEQ ID NO: 152103 - DNA, 122 bp, Homo sapiens
gcgtgagtgtcatagctctattagaagctgtgggtcatggaagagaaccgttgaacccagcgactagtgttcggctcgattaggacgaacctgggcacttagctgtgcaggaacaatggcaa

SEQ ID NO: 152104 - DNA, 122 bp, Homo sapiens
atgggcccagttctcgtggtccagtgtggaatccgtgaccagagaggtcttgacagaagacgagaatccagggtttccataacaatgctttgccttcctgtttgcaagatgaatgtttcttt

SEQ ID NO: 152105 - DNA, 122 bp, Homo sapiens
gttaactcttccttgaccacctcccctactccctgtgtctagggtaggatatgagactcccgtgtccggcacccaggtgcacccatagccacctgtacagttcttcccagtgctgatatcac

SEQ ID NO: 152106 - DNA, 122 bp, Homo sapiens
gctggctttacagatgagggaactgagttcaaagagatcggggccaggcgcggtggctcacgtctgtaatcccagcacttctgggaggccgaggcgggtggatcacttgaggtcaggagttc

SEQ ID NO: 152107 - DNA, 122 bp, Homo sapiens
ctgcccagccgctgtggaaaatcggcctcgaagtgattgaaattccctgtttatatcaggcggcttctttcagatccatcgtctttctcccggagtatgaatggaaggattcagtatgcgct

SEQ ID NO: 152108 - DNA, 122 bp, Homo sapiens
atacatttaaagtgagctcccagttcaccgcagagccatatagaacatgctgtttgggttcgaatcagggctggagtgtttaattcctttagatatacataccaactttattccaagggcat

SEQ ID NO: 152109 - DNA, 122 bp, Homo sapiens
cggcttttccagccctcctgcccacgtccgccgggccgcgcctccaagactatgcgcaggcgcagtcctgacgtcctacccccggttccaagaccccaagtggtgggaagcctcgcgagcgg

SEQ ID NO: 152110 - DNA, 122 bp, Homo sapiens
aaacaccccgggtattgcatttctcaggcaaacagtcaaactgcaggactgagctattgacgcaattttttttaaaacatacccggccttctccacaggaggtgccatcatttatcatacct

SEQ ID NO: 152111 - DNA, 122 bp, Homo sapiens
gaggcgggacagggttgggtgggaccagggttgaggggtgtggggtctcggggcgctcaccgaggggcttcctgagcttgtgtggattatttccgtgccccaagctgagccctgtgtccatg

SEQ ID NO: 152112 - DNA, 122 bp, Homo sapiens
acatcaggtctctccccagaactcacccaggctcacaaggatacatgaggaaaacagacacgaagatgtgcattgacagaaccatagagactctacaaatattcattatccttcattaaaaa

SEQ ID NO: 152113 - DNA, 122 bp, Homo sapiens
ggttcagcagtcccatgcccggtgcaggcatgtcccgccgctgccctgtggctactcacacgcacgtgcgcaaacggacctgtgccccctccagtggaaccgcaggctcaaggcggggattg

SEQ ID NO: 152114 - DNA, 122 bp, Homo sapiens
gctctcagaatggggagctgtcacctagaaaaaaagaaggaaataaatcccccacaaagacgtagttgtcaccaattttaggaagacaggggagcactaggaccccatctgagggatatgga

SEQ ID NO: 152115 - DNA, 122 bp, Homo sapiens
gaggcccaggcgggcggatcacctgaggtcataagttcgagaccagcctggccaacatggcgaaaccctgtctacgtatataaagaagaggtcacacaatgtcaggaaactggctctgattc

SEQ ID NO: 152116 - DNA, 122 bp, Homo sapiens
cctattaaaggaaatggctgtgggtgtaacagcagcagccacccaagcaccaggagacagcgggagaacatgctgaggatgtcgatttgaaagacagaaggattctcttgcctttcacacta

SEQ ID NO: 152117 - DNA, 122 bp, Homo sapiens
gcacatccagctcttttgccaggttggattattggctgttcctgcctccatgcttttgttcgtttccactacccttcatcccattctacaaaatcttatctatcctctaagagccttctaaa

SEQ ID NO: 152118 - DNA, 122 bp, Homo sapiens
ttatagggtgtgattttatttgactggtatcttcagagcttctggatttttcagtataaccgagaatttccttaagagctgtaaataaaaatcggtaccagttcgaaccctttactggcccg

SEQ ID NO: 152119 - DNA, 122 bp, Homo sapiens
gattcgatatctatgaccccttccaccccaccgacgaggcctactctccaccgcctgctccggagcaaaagtacgacccttttgagcccaccggctccaaccccagctcatcagcggggacc

SEQ ID NO: 152120 - DNA, 122 bp, Homo sapiens
acactagggaggaggatccagttcaggccagcgtagtcttcagctgcgccgtgggactttcgggggagcgcctttgccctctcagaacggctgggcggaacggtgggtttgtgagccctcca

SEQ ID NO: 152121 - DNA, 122 bp, Homo sapiens
gcgcgcagcctgtaccacagcttgcgccacggcggaccctgtggccaggggccaagtttgcgcaataggacgtctagcacccccaaagtgaagggaagtaactccagagaaacgggaagctt

SEQ ID NO: 152122 - DNA, 122 bp, Homo sapiens
cctctcctgcgtggattcattctacggcgcactggtgtattggattaaatctcacgtccgcgtagtgttgacgaggaaacacactctgatgtgtttatagcaaggacgtaggtggggactca

SEQ ID NO: 152123 - DNA, 122 bp, Homo sapiens
tggtggggagtgtaaacatgatgtgtgaccgagctggtaactgggagacacaaacagcttcgtggccagcgacagaggagcatgtagtggtctgcgttggttcctggacccttcacatccac

SEQ ID NO: 152124 - DNA, 122 bp, Homo sapiens
tcattcatttgttcaacaaaaagttgccaggcacgtgctgtgtcccaggatcgaagaatccggccctgagctcctgtcctgctccatttcctccctgccatccccgcctgcagtgtccctgt

SEQ ID NO: 152125 - DNA, 122 bp, Homo sapiens
gcgcctggcccgagtttgtcccgcaggctgcaggcgacaggactgcagggccggcaggagcggggcacacggggacctcaggggatcttggtagccgagggccttcctctgagagctgcaac

SEQ ID NO: 152126 - DNA, 122 bp, Homo sapiens
gaaggacggcctgggctgcgagaaggcagcgcgggcactggctctgggcagatcccagcgcggagctgactccctgggcccgtgccagcggtgggcacctccagccaaacctgtgcagcgcg

SEQ ID NO: 152127 - DNA, 122 bp, Homo sapiens
ggcagcggagcactggcctcgataatcacactcaacaggggccggcagaactgtgctgaccgttctgggtgactcgtcacgagatgcacccagcccagcctcttgcaggcggtagaaagtca

SEQ ID NO: 152128 - DNA, 122 bp, Homo sapiens
cagaaagcccccacaacccacgtcatgaagtccctagtttgtttaagaaggacagtagtgcggccgggcgcggtggctcacgcctgtaatcccagcactttgggaggccgaggcgggcggat

SEQ ID NO: 152129 - DNA, 122 bp, Homo sapiens
ggggaggaaagactggtgtgtcttctgagacgccctgagcagcacagacgactagaaatgcgtttacgctcggctgcttgggctgattgcctttgcaaagaggcacatgaaaccgcagatat

SEQ ID NO: 152130 - DNA, 122 bp, Homo sapiens
tccatcctggctgtgctgtgatatcacaaggtcccagggctggggtcagaaattctctcccgagggaatgaagccacaggagccaagagcaggaggaccaaggccctggcgaaggccgtggc

SEQ ID NO: 152131 - DNA, 122 bp, Homo sapiens
tgtgaccccagcgcccggttagcttgggccacactaccagacctaccagggcgagcccagcgcctcagcctcacccggcaccgcagtggctataactggccactctgatgccgccacctggg

SEQ ID NO: 152132 - DNA, 122 bp, Homo sapiens
gccagggaagatgagctgcatcccaaacaggcagaaaaaagagaaggccggaggtggcgccgagagcccaccgtggactctcctagccactcagaggggaagtcaaataagaaaaggggaaa

SEQ ID NO: 152133 - DNA, 122 bp, Homo sapiens
cagtagccattttagatcagaggatgaagaaataaatgggctcaagacacaaaaggcttgcgagaataccatttcctcagggagggaaaaagggttagagaaagatataaagggtcaaaaat

SEQ ID NO: 152134 - DNA, 122 bp, Homo sapiens
ttcattgttcatttttgtttttggtttttgtttttttttgagatggagtttcgcttttgtcgcccaggctggagtacaatggaggcagtctaggctcactgcaacctccgcctcccaggttc

SEQ ID NO: 152135 - DNA, 122 bp, Homo sapiens
ctaccgccgggctgggaagggcgggaccacgcgtgctgcactggccctcagtacctagcccgcggtaggaggtccgccccaaccctggctagggtcaggtgctgcctgagcacagccccgag

SEQ ID NO: 152136 - DNA, 122 bp, Homo sapiens
tggctcgctctcaaccaacaaatgctgtggaatcccaggaccgctggctgctccctttagcgcagggtctctgggctgctttgtggaaagaaggtttattttgtccagctgggcacaggagc

SEQ ID NO: 152137 - DNA, 122 bp, Homo sapiens
ctgacctcgtgatctgcccgtgtcgtctcccaaagtgctgggattataggtgtgagccaccgtgcctggcctcaaaatattcttttgagggactcttgcatacaagccccaagaggcaggtg

SEQ ID NO: 152138 - DNA, 122 bp, Homo sapiens
cgagggcgggaaccgcttggcggcgcggggcagggcggggctgactggggtggggcggggcgaggagggacggggcggggcgaggcgagccgcgcggccagggggcggtggcggttgtgcgg

SEQ ID NO: 152139 - DNA, 122 bp, Homo sapiens
gctgttcccggagcggatcacggtgctggaccagcacctgaggcccccagcccgccgacccggaaccacaacgccggcccggtgacagctcaaacccaccctctggcccttttctcccggtt

SEQ ID NO: 152140 - DNA, 122 bp, Homo sapiens
cacttgctcgggactccggcttgagccagccccgcagcccgatgcagaccagggcgcgggcgcaccagcactccgcagtcgctcctgcctctccgggcgcccgcccttaccgcgcgcggcca

SEQ ID NO: 152141 - DNA, 122 bp, Homo sapiens
gaggtagggagagcggcggcggaacccgcgggcggaggcctggggctcttggggtgggggcgcgcggcggcgcctgcagggcgaggggcgggggaggcaggacgtcccgagccatgcttggt

SEQ ID NO: 152142 - DNA, 122 bp, Homo sapiens
gcttgttagcgtatttggaggttttgtgcgccagagtgatcagagtgattgtttcccacgcgtttgcaaaggtgtgcatgtacttgagtgtgatgataaatcatagggatgtgtttagttgt

SEQ ID NO: 152143 - DNA, 122 bp, Homo sapiens
gtttttcctgcagatcgggagtcgagcaatgcctacccccgcgctcccgcaccagttgggcgctcccggatgatgccctacccctttggatccacgtggtctgcaacctggtgcgagcagcc

SEQ ID NO: 152144 - DNA, 122 bp, Homo sapiens
ggatttcatctgtgtactacagctcttttcctgaaatgcgtaggtggctcttaaaagagccgttgggttactagaagaaacttctaactgaatttactttttcttgggtgccgctttcttgg

SEQ ID NO: 152145 - DNA, 122 bp, Homo sapiens
ctctttgttgctcagttttcactgtgaggagaaggatatttttttttgcactacccaccccgccaggaatggacaactctggcaccaccctgctgggtatcattgaccatcaggcttaggtt

SEQ ID NO: 152146 - DNA, 122 bp, Homo sapiens
tggcggagcgccgagtccgcatcgtctctagaggtaggacgcagcttttctctctgaacccgcgcagcggcaccttggtcaccgcgggtaggatagaccgggaggagctctgtgctcagagc

SEQ ID NO: 152147 - DNA, 122 bp, Homo sapiens
atggctcctccctcgaatcgcagcctctgggaccagggtcgctccatccgtgctccgcctcgccatgacttcctacagctatcgccagtcgtaggccaagtagtccttctggggcctgggtg

SEQ ID NO: 152148 - DNA, 122 bp, Homo sapiens
cagcgtgggtcccggctcagtgctcgagctactggaggcctgcccgcgcctgcgcgctctcggcctgcacctagccagtttgtcgcacgccatcctcgaagcactggcggcgccagaccgag

SEQ ID NO: 152149 - DNA, 122 bp, Homo sapiens
cacagacatcacagagtcggaaaaatgacgctttacccaaaacaaactcctacaggctcacggaaaaaaacgaacaaacaaacaaacaaaaaaaaacaaaaaaacacttctaccccgttcac

SEQ ID NO: 152150 - DNA, 122 bp, Homo sapiens
cgaggggtgcaggtggctgtctcctcccaatttccagaaaagctggacatgcagattctacgtgctttcggacaccgagcaggaagtgcaggaagccagaggacgagacggcgcatattgta

SEQ ID NO: 152151 - DNA, 122 bp, Homo sapiens
gcggcggcggcggcggtagtggcggcggcggcggtgcctgggcggcagcagcagcagtagcggcagccctgaggacggtgagacggccgcggcggcggcgacagcgcggaagtcgcgcggga

SEQ ID NO: 152152 - DNA, 122 bp, Homo sapiens
ttttattttaaaccagcagcgtgcccatcccttggtccttccagatgtttgcaataaaatcgcaggttttgcctttgggactggaaataaaatttaacggccttcaccctgtaattattctc

SEQ ID NO: 152153 - DNA, 122 bp, Homo sapiens
cgcctgattccctgagggagatgtacaaatgaaatgagtgataatgggtgagaaaccaaacgctcactttattttcagccaagttccttatggactgcagcactgggatgagcctgtgggcc

SEQ ID NO: 152154 - DNA, 122 bp, Homo sapiens
aactgcctccctgaccacagcggccaccgcccaacacccccgagaagccatcgccaccaccggcaggagaacctagggtccataaagccatcttcgcgatcgactaaagctacgtcaacaac

SEQ ID NO: 152155 - DNA, 122 bp, Homo sapiens
gatgtgggtggggccagataagagaataaaaggaggctgccccagccaacagtggcaacccgctccggtcaccttccacattgtgggaggtttgttctttcactatttgcaataaatcttgc

SEQ ID NO: 152156 - DNA, 122 bp, Homo sapiens
aatttagcgaaaccgatttagattccttaatcctcttcattaagtaccgttccgccttctcgtcagaactttgcatagctcgggtcagcactcctagtgctagtcgcagtgggtccgtatcc

SEQ ID NO: 152157 - DNA, 122 bp, Homo sapiens
aagcatttaataactttcaccggcactgcgcacgctacctatctgcctcaatactccgcccggcggtgggcaggatataatgcaagagacgtctgaaaaagcaatgagatgcgcatgacagc

SEQ ID NO: 152158 - DNA, 122 bp, Homo sapiens
accgggcagcggcacaggagacggtgcggctgctgggcgggccagggagcaaggaggggccgccccgagggaaccatgctgccttccaggctgacgtgtctgaggccagggccgccaggtgc

SEQ ID NO: 152159 - DNA, 122 bp, Homo sapiens
attgtctactgtgggcaggtatggagaggccggggctacgtggggtctggagtggatttgcgcctcttgggacatcgtgcatctcaagaattaatcagacatcgaacgggtgcggtagctca

SEQ ID NO: 152160 - DNA, 122 bp, Homo sapiens
ctgagtcacactgtcctttccacccctagtcttaccatcatcctgggtgaattctgagtccgtgcacataccccataaaatgccttgccccacagttcctgggcctcctcattccaataacc

SEQ ID NO: 152161 - DNA, 122 bp, Homo sapiens
ggccctggacggatatttcagggaggctgagagcgaccgcaaggaagcattgtgcctaatcgtggcactcgtccggatatcgtaggaaaattatgaccgaaaatacctcctgaagacagaat

SEQ ID NO: 152162 - DNA, 122 bp, Homo sapiens
ttcccttagctcgccagaccctggctcgtgaattatttatgacccggcttctgggaccaccgcgacggctttcggagagcccgcctcccactgccggccgcggaggggctcaggcggcgctg

SEQ ID NO: 152163 - DNA, 122 bp, Homo sapiens
aatcagtgtgtcttgagccggcaaatcaccagggacgaggaggccgctcgcgttgcatgccggaaattgtagttcagatacgctggttcggatcgatcaaagtgaagattgtgtctgggagg

SEQ ID NO: 152164 - DNA, 122 bp, Homo sapiens
tcggtcaggcgtgtgcagacagcgcctgcaggtctgggtgggtgctgatctgagtgtctgcgcctgggccatgtttttgagcctggcacaggggtgcttagtgaacacatgaccgcctagcg

SEQ ID NO: 152165 - DNA, 122 bp, Homo sapiens
ttctcctcgtaacagacttgcatatgtttgttagtttctgcctgtattgtcactgcgcaacggatggcattcattacaagaagagcccatcatcgttgtgtttgcatggtttttttccttgt

SEQ ID NO: 152166 - DNA, 122 bp, Homo sapiens
tgggatggtggcatcccacagccaagtttactctcaggatccatgctaggcactgcccttcgtgggatcttatttaaacaccacagagatcactccaggcagtggaaaacagccccccactt

SEQ ID NO: 152167 - DNA, 122 bp, Homo sapiens
gggactggagttgcggaaagttaagtagggcccagctgaggatggctcctgcagcgaacgcgctcagccgggctcctggctacgcggcgacggctgggtgactgcgccccacagtgcgggcc

SEQ ID NO: 152168 - DNA, 122 bp, Homo sapiens
gtacaccgtcacaagtcccattttgagaaaaagcagcatttaaagacacaggctgtttctcgacagccaggattaaaagggagaaaagaaggcaggctgaacaaagcatgaactttcttttc

SEQ ID NO: 152169 - DNA, 122 bp, Homo sapiens
gctctccggaacaataaacccccggccccagtgatgtgggccagaccggacctggagaggcggcaccgcgacccctcccgcaacccgcctggcggccgggggcagcgtgacccggcccgcta

SEQ ID NO: 152170 - DNA, 122 bp, Homo sapiens
gacggaaatgctgtctcaggcctggaggctggaagctggcgtgagggtggcagcaggtttcgctccctgggagctcggctgtggtctgcagatggcatctttccgtgtgtcctcacgcagtc

SEQ ID NO: 152171 - DNA, 122 bp, Homo sapiens
gcaagacgcggctccaggcatccttttaacaccacggatcccttaggcccgagctaccatcgttccccggctcaaggtcatggggcggcaaaatggaacgttagctcctagagaaaagcact

SEQ ID NO: 152172 - DNA, 122 bp, Homo sapiens
tgtatgcaaatgtagcggcgcggcgggagcgcgcggctgatacccgggactgggctgcggcggttagtcctctcccggccgccgtcgcctccgacatattgcccgcaggagctgcggcggcg

SEQ ID NO: 152173 - DNA, 122 bp, Homo sapiens
tgtttttccttctaaaaatgtgacacaaaagaataatttacaccaaccgctttttattatcgagtttcagaaacctttcacaagatggtaaaaaaaaaaaaaaagaaaaaagaaaaaaaaaa

SEQ ID NO: 152174 - DNA, 122 bp, Homo sapiens
cccagggtctggtagcctgcgaggaagaggatgggtatgtggaccctgagactgctgccgcggggacaggctcccggcgcccctgccagccgaccctctgctggctcctgtcaacagcccca

SEQ ID NO: 152175 - DNA, 122 bp, Homo sapiens
ctcattgtggtgctggtctccactgatgctgccctccagtcccctatgtacttcttcctgcgcaccctctcggccttggagattggctatacgtctgtcacggtccccctgctacttcacca

SEQ ID NO: 152176 - DNA, 122 bp, Homo sapiens
caggcatgagccaccatgccaggccaagtcggctttttctaaagttacgtctcctgcccacgtgctatagaaactggattgttttctacttcattttttaatgaaaacataacattaacaaa

SEQ ID NO: 152177 - DNA, 122 bp, Homo sapiens
ctcaagggatcctcctgcttcagcctcccaggtagctggcagtataggcgtgcaccactacgcctggctgattttttatttttatttatttatttatttactttttgagacggagtcttgct

SEQ ID NO: 152178 - DNA, 122 bp, Homo sapiens
caatgacgcctcttataaaaacaacctgctcgcaggcgtctgcagccggcaggcggtgaccggctgggcgccgcagtgcatgccgtgacgcgtagtcccgcctgcgcctcctgcccggcagc

SEQ ID NO: 152179 - DNA, 122 bp, Homo sapiens
gccgggtcctcgacgatccagctgcagagacatcaccaatcccagtctccctggttcccgcgtcagcctcgccctgccctgggccacggctgcacagcacgtgcctcctcaccaacaccacg

SEQ ID NO: 152180 - DNA, 122 bp, Homo sapiens
agaaaactgcaccctggtcacaacattcagaggacacacaggtaggattaacagtaaaatcgtcatgtgctgatagcacagtgagatatcgcctgctgcatctcctgatgttcagatatgtt

SEQ ID NO: 152181 - DNA, 122 bp, Homo sapiens
cgcgcccactcggcttcgccgcgcgcctctgcgcagcgcactgccccggatctgtgctcccgcgcatcacctccacgtcggctttgggcgcctgcgcactgcgcctaccctgccgggcgcgg

SEQ ID NO: 152182 - DNA, 122 bp, Homo sapiens
cttaaacagcatttgaaaagtggtcgcagggtgtgtggccccaaagatcccaggcgcttccggaaggcgagccaacgctccccaggcccgtccgcgagcgggtgggcctaagccttggagga

SEQ ID NO: 152183 - DNA, 122 bp, Homo sapiens
ctattgtccttaacacggactagctccaggtgagtcccccggccccgggggtgtggcgggcgtcacccgttgtccgggcacacaccccgcagacccaatcctagcccgctggctagaccatg

SEQ ID NO: 152184 - DNA, 122 bp, Homo sapiens
cctattaagaatattgagttggccaggtatggtggctcatgcctgcaatcccaggcagatcgcttgaggtcaggagtttgagaccagcctggccaacatggtgaaacatgtaataaaaaata

SEQ ID NO: 152185 - DNA, 122 bp, Homo sapiens
atcacccatgacccctaaagactttttagagaattatattttgacaacataacaagaaaacgtggcatctcacacacacacacacacacacacacacacacacacacacacacacacaaaac

SEQ ID NO: 152186 - DNA, 122 bp, Homo sapiens
cgcactttaaactccagccattcccaactccgctgcagccccctccccacgcgctctccccgggggcctcggcccacatttatcagaaactaaaccggactcgcgaagccccaaacttattg

SEQ ID NO: 152187 - DNA, 122 bp, Homo sapiens
gggcgggaactttcggccccgaggtccaccagcccgggcggacccccaccttccctcagtcggcttgctaccggcagcggctactgcggcgtccaaagctaacactacagccgccgcctggc

SEQ ID NO: 152188 - DNA, 122 bp, Homo sapiens
cggggcggggctgcggaccggccgggggagggggtgactccagtagggaagacccacccacgccccgcccgccgccgcggaggccccgcccaccccgcctgcccacccctaccgcacccgca

SEQ ID NO: 152189 - DNA, 122 bp, Homo sapiens
tggctgggggtctgggcattgggtgcagtgggtcgagcagcccctggagcggctccttcccgaagcctcatgtctaccaccccccccaaggggggttccttccccgggaagtcattatagta

SEQ ID NO: 152190 - DNA, 122 bp, Homo sapiens
ttgtaacattctttatttcaaacagcccaaggttgctttttaaggctgatgcccctgctacgtaggtagggttagttaagacaagtcagggtctgagcaccacaaggaaattcttaccaaga

SEQ ID NO: 152191 - DNA, 122 bp, Homo sapiens
gggttctgagaaacatgcctctaccacacactcggtggtagaaatcaggtttgaccctagcgtgagataattctgtaatggtaccgtgagtcatcttactaggaagtgcaggaagaccagtc

SEQ ID NO: 152192 - DNA, 122 bp, Homo sapiens
gcagctctgccgcgcgctggtgtcggcgcaatgggtggcggaggcgctgcgggccccgcgcgctgggcagcctctgcagctgctggacgcctcctggtacctgccgaagctggggcgcgacg

SEQ ID NO: 152193 - DNA, 122 bp, Homo sapiens
ttccctggcctgtgggtgtcatctctgcagactgcactctgggatgttccctgggtccctcgggagctgcagggagagccaccgtctgccgccctggtgcctggactccactcccccaggcc

SEQ ID NO: 152194 - DNA, 122 bp, Homo sapiens
gctttggaatcatgcctcagactttctggcgctctcgcctccacaacctaaaaacagagacgctaggagagaggctgaaagacgcgcaagtcccgccccggccccgccccggccccgccctc

SEQ ID NO: 152195 - DNA, 122 bp, Homo sapiens
agcgcgagtagctgggatgagtacggctgcctccggccaaagcttggcagaggttccacccgagtccaagtggtttatctgctgagaagggcaatacatttatctgcccttctcgagccata

SEQ ID NO: 152196 - DNA, 122 bp, Homo sapiens
ggtctgagccctttgcctaggctgttgctgctggacctgtttgtgcttcatcacattacccgctttgttcttccagcccaagtctggctgggttcatgtcagtgactcaggaaagctgggtt

SEQ ID NO: 152197 - DNA, 122 bp, Homo sapiens
ggtgcctcgacctcccctttcaagcctccctgctgctgtgggctgaccccgtgggcctgacgccctccatgggcgtgaaccagggactcccagtgtcccctgggctccacgcatgtgcggtg

SEQ ID NO: 152198 - DNA, 122 bp, Homo sapiens
ttgcctcccgccactgggcatcgttctctctccactgagcctccagcgtctccagactggcggcgggtttgaactgggccacgagctcctgctgcacgaagcacttgtagacggccggctgg

SEQ ID NO: 152199 - DNA, 122 bp, Homo sapiens
gcgagtctcgaagatccggccaatttgcccagcgcgctgtgctccgcgacggcgcatgcccgcttttgcgcaggcgcggggactacggcgcaggcgcggagactattgcgcaggcaagcgcg

SEQ ID NO: 152200 - DNA, 122 bp, Homo sapiens
ccatcctctaccacgagaactcggcggccgagggcgcggcggctgcagccgcgggggccccggtgccagtcagccagccgctgctcaccttcccgcaccccgtctactactcgcacccggtg

SEQ ID NO: 152201 - DNA, 122 bp, Homo sapiens
agctattcatcttctgtttgctgctttaattgggtgcggttaaaaggccacgtccctaggcgttcaccggctttcttgccatctgctgcatgaaaactgactttgccgaaaaaattaacaaa

SEQ ID NO: 152202 - DNA, 122 bp, Homo sapiens
ccccaggcgcaatcgccggccgccccggtgaccttctgggtagcacaggccgaaggcgggcgggcagcaggaaggcaggccgccggccccccagacttgtctcctagggcaccgtcccgcgg

SEQ ID NO: 152203 - DNA, 122 bp, Homo sapiens
aaaggatcatgtccctttaataaataaacggcattacttcagttctggtctggcctctaccgctccctgaaaactagctgtgggcacaccacatatgtttctgcataaaatggaagcttgcc

SEQ ID NO: 152204 - DNA, 122 bp, Homo sapiens
gtcctatccattagcacatttgaacgtcatactcttacgcaaatctcaagttattatttccgttttggaaacagaagaactgaggttcagagcttaaactgggattggttactaaccaatgt

SEQ ID NO: 152205 - DNA, 122 bp, Homo sapiens
aggctcagactcagctgagggctgtcagaaagaggggggcagggtggccacggggaccagcgcagcccctactcacgttgatgatcacccgcagtttcctgatgtaggaggcctccgtgtgc

SEQ ID NO: 152206 - DNA, 122 bp, Homo sapiens
cgagcggagactagcgcaccggcgtcggtggcgagggtggtgcagaggagtccggctgggcggagggaggaaggatgggtgcgggtaactttttgaccgccttggaagtaccagtagccgcg

SEQ ID NO: 152207 - DNA, 122 bp, Homo sapiens
ggcaaaaggaaggcaggtgtcccgtaacgtaatttgctcagggcataggctgcggcccgtcgatatggtgccgggaccctggaccagcccgggggcaggagcatgggctttgcctgccgtgg

SEQ ID NO: 152208 - DNA, 122 bp, Homo sapiens
gcgggggccgaggggagtcgcccagtcccgccgcttccccaccccctctcctccctcggccggcccggcagccctgctccccgccttggcctcccggagaggccccgccccgtccccgcccg

SEQ ID NO: 152209 - DNA, 122 bp, Homo sapiens
cgcggcgcccgtagcccagttctgcccagtggctgcctcctgggacctatttatacctagcgcgcacgcaggcgcgtcggccgcctcggtctgggcaagggcgcggaggcgggcggtgtgtg

SEQ ID NO: 152210 - DNA, 122 bp, Homo sapiens
gttaatactctgtgaagacgtttcttcataaatcagggccctaatgtgcagtgacttgttcgaagtcctagaagacatcatagaagaatcaagatcataagtcaatgtgatacaggattact

SEQ ID NO: 152211 - DNA, 122 bp, Homo sapiens
agaatcggcgggggcagccgcggggcctcgggggcggaagacgcactcagtggggaagagcgcgcggccgggccccagggcggaagtccctggtggaggtgaagtccgaggaggaggaagag

SEQ ID NO: 152212 - DNA, 122 bp, Homo sapiens
ttgctgatcagagaagtattccagcggctctgcttcacctcctgtaaacatcagatgacccggcttaaacctaaccacgcacattggatgagtccttcatccagtgttgaatttcccccact

SEQ ID NO: 152213 - DNA, 122 bp, Homo sapiens
aaatatcgtagaaggtagagcggtccagggactcacaggtctcactaaagaaaagtctagcgtaggttcacggcacggagagattttaaggctgcctaagactaaagccaaatacgaagtcc

SEQ ID NO: 152214 - DNA, 122 bp, Homo sapiens
gagaggcacaattcaccaagcagaggaagaaataggcaccgcagctgggaccagggccgccggagccagagccgcaggagccaccgcagccggagccaaagttcctctaggtgccgaagtcg

SEQ ID NO: 152215 - DNA, 122 bp, Homo sapiens
aagagagatttgggaaggagggctctctggcgagctgggaggctgtgacctggccacaggcggcggtcgcggcgcggagggcgcccgagggtgtcccaggggccctgggaagcgttctgggc

SEQ ID NO: 152216 - DNA, 122 bp, Homo sapiens
acacataaacatggcatcagcacaatactgaaaccgtgtttggggatgcaatagacagtgcgtatcacttttcaaaaaagattttaatagggaaaataactacttttgaagatatagaaatt

SEQ ID NO: 152217 - DNA, 122 bp, Homo sapiens
ggcagggcgccctggaatgggttcgccccgagagaggggcccgtgccttggaaagcgtcgcggttctggcggcatccggtgagctctcgctggcccttgaaaatccgggggagagggtgtaa

SEQ ID NO: 152218 - DNA, 122 bp, Homo sapiens
catgggcgccgccattgtaactccagggtcttggtcaggtgactcagcctcactatgccgcgaggctccctgggaagcgtagttctggaaatgcattaaaaacgccataggctcggaccgga

SEQ ID NO: 152219 - DNA, 122 bp, Homo sapiens
tctctaattatgaccccatgtattacccatttgaacataaggccctagacgggctccgtgcgatctggggcctcccaagagaaaacttccccgggacaggacgtctgccacgcgcagctaaa

SEQ ID NO: 152220 - DNA, 122 bp, Homo sapiens
tagctactcccgccagcgcgggttcatggatcaggaggctcccagtgtgtcaggggagtgcgaggtgaagatggggagggctgggctggaaatgctcgtcctccgtggaggtcgggggcatc

SEQ ID NO: 152221 - DNA, 122 bp, Homo sapiens
ttcaaatttggacatactttcttctttttttttttcacccaggctggtgtgggttggcagcgtatgagttcatgggagcatgcaggtgaagaggggtggacaatcgatggtgaatgcacatg

SEQ ID NO: 152222 - DNA, 122 bp, Homo sapiens
ttagcagccagcgcctcagtagagacctaagggcgctgaatgagtgggaaagggaaatgccgaccaattgcgctgcggcgggctgtgccactacctacaacaagcacattaacatcagcttc

SEQ ID NO: 152223 - DNA, 122 bp, Homo sapiens
ccaaaagtaaggaggatagtacgttaatttccaggtcaaggtgcgaagccccacctcttccgggggagagggggcgggcactctcgatgcgccgcggctgctgctgcgcaggcccagtgctg

SEQ ID NO: 152224 - DNA, 122 bp, Homo sapiens
acagcctctctgccgcctccaccgtgtctgcctcctcccctctccttgttgaagcacagacgtgtttgcgcagccctttcagcccaggtcctctcgccagctggacgctcacctggtttggt

SEQ ID NO: 152225 - DNA, 122 bp, Homo sapiens
gaggaaaagcggcagaagcgcctgcttccattggtcagtcctggcaggaggcggagcacccgcggcagctgattggtgcgggaggcaaggtgggcggggctctgagccggaggttttgttgt

SEQ ID NO: 152226 - DNA, 122 bp, Homo sapiens
aaggctccgggtcagggcagggcaactccctcgggctcttacgccaggctggggtagctgcggcagctgtgacgtaaggaggggtacgcttcctccagaccgccctcccggattttccggaa

SEQ ID NO: 152227 - DNA, 122 bp, Homo sapiens
agctcccggctgcttggtctccgcagtgttggggctgccagcagggggacgctgggcccccggggacctgacccgtgctccctccccaccccgcagtctccatcgactccatccaggaggtg

SEQ ID NO: 152228 - DNA, 122 bp, Homo sapiens
ggttctcatagtgattgtagatatcaatgacaacgtccctgaatttgctcagcggcgctacgaggtgcaggtcccagagaacacccctataggttcccttgtcatcaccgtctctgccaggg

SEQ ID NO: 152229 - DNA, 122 bp, Homo sapiens
ttctatcttcaaagtgtggaacggggacaacgctttcttgcggccgatggggaccctgctcgcccagatggctcctggacatttgcccagcgtcctactgagcaggaactgagggcccgtaa

SEQ ID NO: 152230 - DNA, 122 bp, Homo sapiens
caggcacacacacatgcatatacatgacccctcagacagggacacatgcatgtacatacacgtgtgcaagtacccagcccggcacaggccgagcacatcaacccgtgtgctctaacagcacc

SEQ ID NO: 152231 - DNA, 122 bp, Homo sapiens
aggaaagaagggtggggcgggggtgaagcgcttagggcacggctcttgtgaggattacggcggaggctgtggaccgcggcggcgctcgcagaggctgcagccattgcacagccgagcatccc

SEQ ID NO: 152232 - DNA, 122 bp, Homo sapiens
gctgctccagtcagccgtcgagtgcgccgcctcgcgcctcaccccagctgcagccaccagcgccgccgcctcccactcacaccaccacagtgagccccgccggcggcgcttcagccgccact

SEQ ID NO: 152233 - DNA, 122 bp, Homo sapiens
gacttttgctgtgatccagttttattgactatgctgctagtctggcacccccagcactcccgtccccctcccatctctggcccagtagtggcgttgcgagtaccagggagacagtgggagga

SEQ ID NO: 152234 - DNA, 122 bp, Homo sapiens
agctcgcccagtgggggcggggccctgtggtcgggctccccgggaggggcggggccaggccgtgtcagctgaccggcctggccaatggcacctggcggcggggcctggcaggccggggcggg

SEQ ID NO: 152235 - DNA, 122 bp, Homo sapiens
gaggcgggagcggccacgggtgacagcggcagcggcggggccgggctgcgctcccgaaggcgttcctggagggccctgggatggactcagagatccccagagccccaggggacggaaaatct

SEQ ID NO: 152236 - DNA, 122 bp, Homo sapiens
cgccgcaccccgaggctcgggccccgcacagctgcagccggtgccctccggccaagcccccgcctggcgtccccggccccagccccggccgcccgccgctgaccttttcctgcgcgcggttg

SEQ ID NO: 152237 - DNA, 122 bp, Homo sapiens
tggcgtccaccccctgtaggggctctcgccagccaactgagatccgggcacgttctcattcgagcagtggcacccctgcagagactctgggtctgcgtggccaggcctcccatgcccaaaaa

SEQ ID NO: 152238 - DNA, 122 bp, Homo sapiens
ttctgagctccttcagataccacaacaagccaaaatccgaaaaaaaagattctgccatatcgccccaggattgtgaactgaggtgtctccagagggaaaagaaagatcctcaaaaataaaga

SEQ ID NO: 152239 - DNA, 122 bp, Homo sapiens
ccactccctgtgccttccctcatcagcccagaactcctcatggccagagtgtgtctcccccgtcaccccagagattcctcagtggctgacatcacccactcctgactcccctcacagggcac

SEQ ID NO: 152240 - DNA, 122 bp, Homo sapiens
gggctcaatctttgagcctcttttctgtctactctcactccctttgtgatttcctccaatcgcttggctttaaatgcaatctcttatataccaacaaactttcaaatcacatctccataccc

SEQ ID NO: 152241 - DNA, 122 bp, Homo sapiens
ctcccagctacccctcccgagcaacgaaggccttggccagtccttccccagctcgcggagcgcccctaaccggacccaagtgtcgggccgcactgggaagtttcccatcccgctgagctgca

SEQ ID NO: 152242 - DNA, 122 bp, Homo sapiens
cttcccctgtttgtgcgcatgttcctaagtgctgggctctgtggagatgggcgctgcgtacgtgccctgaggcagcatgctcacgccatgctgttgaaaggacgggccacagcccagtgaca

SEQ ID NO: 152243 - DNA, 122 bp, Homo sapiens
tgaagaagagttgtcaattactaaagagccaaagtgtataatgggggcagtgcagatagccggaggagcactgtactgggagtcaagaagcttggtggttatacctgttggctacttaggcc

SEQ ID NO: 152244 - DNA, 122 bp, Homo sapiens
tgccaggttggaaagaatgtagggacgttctccgagagcctttggttaggccttaggtggcggagacagcagcagcgcgtggcagcggttcctgcgggacagctggaactgatggagcgcgg

SEQ ID NO: 152245 - DNA, 122 bp, Homo sapiens
caaggaggccaggcccaggccctgaggatgcgccgctcaggtgggagcttccggggagctcgcgcgacagcctgggggagcgcggattcgtctctgcgctacggcggctgcagagggtcaac

SEQ ID NO: 152246 - DNA, 122 bp, Homo sapiens
gttagcgtccgggaaggaagagtttttcgccaataggctttcggcattaggttctcccgccgagcacccttcttggaatcggctggtcttcctagaaactacggtctatgactgtccttgcc

SEQ ID NO: 152247 - DNA, 122 bp, Homo sapiens
tgctgaaagctagacaccacatcctactccacaaccaacgctggaactccccagacaccccgctggctctgccgcccctaaaccggatgcggcagccaccgcggaccccacagcggattctc

SEQ ID NO: 152248 - DNA, 122 bp, Homo sapiens
gaaaacaaaacaaatcggggacctttaaaaggcgtaatgagaccagaaacgatctccttccgcccctctgtcttcccccgttccccaacgcagatcaatcgcggaataagcccgacgcccag

SEQ ID NO: 152249 - DNA, 122 bp, Homo sapiens
tacagtgaaatactatctcacgcctaccaggtctgcaaaatccagcttgggcaagggtgtcgccggccccctcttatgctggtgggggagggcgatttggtaccacccctttaggggcctaa

SEQ ID NO: 152250 - DNA, 122 bp, Homo sapiens
cagagaactgcagaaactctggcatgaactctccattcaaagccctgtgctgattcttgacgaaagtttaacactgctcctcgcggtgtaaggccacctctgggacaacccagctcagtgtt

SEQ ID NO: 152251 - DNA, 122 bp, Homo sapiens
gcggcatcctcggggccgggggcaagatcctcacttttgaccagctggcccctgatgccccgaaaggctgtggcaccgtcctgctctctggtcctcgcaagggctgagaggtgtaccggcat

SEQ ID NO: 152252 - DNA, 122 bp, Homo sapiens
tgcagcccacagcattcgagagctagcctcacccattctctgcgggtgtctgcagcagggcggcctgaggagggcatggccaccagggagacacagggcagaaggggctatgccagttcttg

SEQ ID NO: 152253 - DNA, 122 bp, Homo sapiens
cgatcccggggttggaactggctctgggaccaatggctcgggcgagcgcttttctggcgccgggacctctttctggcgccgtctggcacttgcgcgccctatatagcggtacggtgccttcc

SEQ ID NO: 152254 - DNA, 122 bp, Homo sapiens
ttatcttggctcttgccaggacttatttttctccttctggcaaatgggcaagatgctggccggttttggggaaatcttggtcttcctgttgtaggggaatgttaagactgtcattatcagtg

SEQ ID NO: 152255 - DNA, 122 bp, Homo sapiens
agggactcggcctcacccggcgccgccggcggcctggacccccaggactccgcgcgctcgcgcctctcgtccaacttgtgaccctcgccgaccgccccgcgggcccaggcgggccgggggcg

SEQ ID NO: 152256 - DNA, 122 bp, Homo sapiens
ctcctgagagatgtagtcatttttgcattcctcccatttccgagtttttccttctcccatcgagtttcctgccactcaattgctaggagagaaaaccgggctctgaggtcattcatacttaa

SEQ ID NO: 152257 - DNA, 122 bp, Homo sapiens
aggagccgggagacctgcctaacctaggtcggaagcccacaaccctgagtacaaggtggacgctgtgtatacaacttagcaccttaagatgttaggtgaccaacaacattataaagagagac

SEQ ID NO: 152258 - DNA, 122 bp, Homo sapiens
taagcttcttgttagttcgttggttcaactatagtacccttcagctaagcacacggccgccggccctccctcctctcctcatccagcactagcccccagctgtctctttcctcccggtgccc

SEQ ID NO: 152259 - DNA, 122 bp, Homo sapiens
ctcagcattgactttttgttgttatatctttaaattggaataaaacataattctagttgacgtttttattaatattctgaaaaaagtgaggttggattgcattgttttctgttatctaatga

SEQ ID NO: 152260 - DNA, 122 bp, Homo sapiens
atgcggccgaggctcaaaagactctgtcagcgtttcccaaggacattttccactggaggacgttgttgaggaggcagggggagtctaggacctgcagagggaaaacaccttcctggatggat

SEQ ID NO: 152261 - DNA, 122 bp, Homo sapiens
gaagggcacccccagggtcgaaggcggctgctgggcgggatagccggagttctgctgaaacgcagggctggacagccccccaccgtagcggccctcgcttgcatagctgtcaaccgcctgag

SEQ ID NO: 152262 - DNA, 122 bp, Homo sapiens
ttttgtaactcgaatctacccccaaaaccaattcgaaaaaaagggaggaaagaaacgccccgacagtgttctgaactgggttgaacacacaaaggatgctacaattttccacttgtatacag

SEQ ID NO: 152263 - DNA, 122 bp, Homo sapiens
ggggagactcaaatactgcactgcggtcccaatcttgaaggatctagaggtcaacatctgcggggaggaggcactgtctgggagaggcaggacatttttagagaatactattcagtgatttt

SEQ ID NO: 152264 - DNA, 122 bp, Homo sapiens
actgggtgctacagagcctcgagctccgctgcgaagcacccggctgcctcgctcgccgcccgcacctcggttccccacaggccgcccccgcctccgcctgggccttcgaggattggccgccg

SEQ ID NO: 152265 - DNA, 122 bp, Homo sapiens
agaatgtcccagctccaccagtcttcactctgcagaacctcaagaccagagcctcaggcccggggaggaatgagtggctccctggacctgcccttatccactggtattggtaagagctgggt

SEQ ID NO: 152266 - DNA, 122 bp, Homo sapiens
gttaccccactgcctcctctttatagtgctgggctgccttaaatgaacgagaagagactccgctatgtttgaaagatatatggtggcacagtcaccaacctaagccattgcatccacccctc

SEQ ID NO: 152267 - DNA, 122 bp, Homo sapiens
tttctaagttcctgctcatgtgtttaaattgtgagtctggctcacctcatggcgcgtgctcgtgtggtgggctctgctgcagcctcaagaccccacactgtgctggactcaataaatattgt

SEQ ID NO: 152268 - DNA, 122 bp, Homo sapiens
acgctgatgccagaaaaggacaacctctccagaatcgccgcagtgtgcttccagcgcatgcgctgctaacgccccttaaccccccctccgcgccccgcctcccccacgcgccgctctccagc

SEQ ID NO: 152269 - DNA, 122 bp, Homo sapiens
ctctccagtaataatatctactaccacattctaggacctgggaatcatccttgattctgtcgtcttccttctcctaaagtcaatcaccgatttttatctcataaatattcataaatcccaca

SEQ ID NO: 152270 - DNA, 122 bp, Homo sapiens
ttaaaaaagaagaacaaatttggaggaaccacttcacctgatttgaaacttaccataaatcgacattatcaaagagagtacttaaaaaatagtggacctccaaaaatcctctcctccaaaat

SEQ ID NO: 152271 - DNA, 122 bp, Homo sapiens
cagatgatgcctttatcaacccccacctggctaagatcttcgagcgggtgcggcagagcgcggacttcatgccactgaagcagatgatggtgaggagccaggggctctgcccactctctgtg

SEQ ID NO: 152272 - DNA, 122 bp, Homo sapiens
tctccgccagcttctgctgactgggctgcagcactgagcgcgacatggtggtgctggtgccgccgccgccgccggccgcctcgcgcccagtcacgggcccgcggccttcgcagcagcctctc

SEQ ID NO: 152273 - DNA, 122 bp, Homo sapiens
ccgcgggactgtgctgcctgcctagccagtgtgggccggctctactactggccactgccacgcccctgggacctgctgagcctgccgctgggctggcttggagccaggctgcagggttcggc

SEQ ID NO: 152274 - DNA, 122 bp, Homo sapiens
tacttgtgatactgaaactgacagtttgatttatttatgtgtaacacttctataacactacgtctggccatgctttaagcactccacaaatatttattcatttagcacttagaacaattctg

SEQ ID NO: 152275 - DNA, 122 bp, Homo sapiens
ggtcagaggcctgtgcggctgcaggtagagtgtcttaggtgaggaggtacttttaagcaccgcgcgaaatgggggcgaagagaatttttttacttttgagggtgggactatcctgcaaggtg

SEQ ID NO: 152276 - DNA, 122 bp, Homo sapiens
ctgttgatttttcggagagtgcatgagtgtagactgctgcaggctgtgggcacagtcagccgcaaacgtttttaggtgtccctgggttttgaatttcattcaacttttctgctctggtgttt

SEQ ID NO: 152277 - DNA, 122 bp, Homo sapiens
atcataaatttttcttttggggtgaaagtattttggaactagatagaggtgatggttgcacgacactgtgaatgtcttaaatggcactgaattgtaccctttaaaaggactaattttatgtt

SEQ ID NO: 152278 - DNA, 122 bp, Homo sapiens
acttacagcataatttctatgggagaatgtgttctgagctccaagcaaccaaattataagcgggacataggcacacccaggctcgaatcccagttttttttgttcgtttgttttgttttgtt

SEQ ID NO: 152279 - DNA, 122 bp, Homo sapiens
gaagggagccgggcgatcagctccggagcctcccctcctcccttacccatccccaactcccggccacactcttcccaacccggcttcgcccagggccccggtcacttatgttaaagttcaca

SEQ ID NO: 152280 - DNA, 122 bp, Homo sapiens
aagctgggattacaggcatgcgtcaccacgcctggataattttcgtatttttagtagagacgaggtttcgccatgttggccaggctggtctcgaacccctgacctcaggtgatccacccact

SEQ ID NO: 152281 - DNA, 122 bp, Homo sapiens
gcggccacgccgcgcagtgatgctgtggagtccgcgcccttgtgccgttggaggtccaggcgccgcagggaccctgcccatgagtggcaaacgtcacaaatcccatactccgtgacataagc

SEQ ID NO: 152282 - DNA, 122 bp, Homo sapiens
gcctcgccgattccgtatcagtgaagcaactaaaattgccattttaactgagggcaaggccgagccacttaaccactatcgtcaacctttccaatcgtgctcggttgctcctcagttttcct

SEQ ID NO: 152283 - DNA, 122 bp, Homo sapiens
gtgtgcaggttttttttgtggacataccgttttcaactcatctggctaaataacaaggagcgcacttgctagatcatatgatgaaagtatgcatagctttgtaagaaacttacaaactgtct

SEQ ID NO: 152284 - DNA, 122 bp, Homo sapiens
caaggcctcagtttccctcccagcagcaaagtgagaccctgtagggagtctctgggcctccgtgacggccctgggcggccctctctgtggaacaaggtcgggtcctgtcctcagcgccctgg

SEQ ID NO: 152285 - DNA, 122 bp, Homo sapiens
agaagttaaaaaacaaacgaaagttaccagcagtaaaggtttcccatgttatgacactaacgaaagataatcaattttatttgttttccattttggtgcctattttctttttcatttcattt

SEQ ID NO: 152286 - DNA, 122 bp, Homo sapiens
gggtatttcacaagggctcccacagtgagccaccccgggcctgcccaacgtgaaggctggcggagtcagcccctccgagctgcagcctgctctctggtccctgccccgggtgagtgcccaca

SEQ ID NO: 152287 - DNA, 122 bp, Homo sapiens
aaacacacacctggacagtggaaatccaaatcgcagaatttgcactcaggcccagccctgcgtgtgtgtgaattccctagaaagacgtttctgctgccctgcacttggagcattttggtggc

SEQ ID NO: 152288 - DNA, 122 bp, Homo sapiens
ggaggctgaggtaggaggatcacttgagcccaggaggtcgaggctgcagtgagccatgatcgtgccactgcatgcactctaccctggatgacagagtaagatgctgtctcaaaaaaaagtta

SEQ ID NO: 152289 - DNA, 122 bp, Homo sapiens
cgcgaggcaaagcaggagtgtccttattcggtaggcctctgatgggccaccagagccgtccgaaagtcctagcggagtgattgacagtggccatttcaaagcctgagttcaccttctttgca

SEQ ID NO: 152290 - DNA, 122 bp, Homo sapiens
aggtctcaggcatttcctgggcagcttctctccacttcaagcctgtatcagttcctctaccgatcaagccggcattttctgcctttcccacctctgtgctctctccctcttctctttttcct

SEQ ID NO: 152291 - DNA, 122 bp, Homo sapiens
cggcaggtgggaggtggcaggggcgctgctccgcggggcagggtgggtggatgagcacggcgcccctgggacaggaacccccactgtagcacagtgcttgattcaggggccagtggggaccc

SEQ ID NO: 152292 - DNA, 122 bp, Homo sapiens
gacatttctcaagcatgctgggggacggcccctcaatttaggatgaggacgaggtgggcccggcaggagggcaggagccggggtccagggcgagcaagttctccccgccccacgaggaacgg

SEQ ID NO: 152293 - DNA, 122 bp, Homo sapiens
tgggccgctgtcgagctttggcagcctccttctttttggctgccttcttcttggccaggtcggagggcatgatgatgacccacaggggtaggttactgttgtttcagggagcctgaaggaag

SEQ ID NO: 152294 - DNA, 122 bp, Homo sapiens
agaccccctgccctcaggggcccccagaaacagttgtgcctatggacgtggctgtgtgtgcggagagctggctgattcaggccagtgttctgggacgaagagaagcccacaccccaggccat

SEQ ID NO: 152295 - DNA, 122 bp, Homo sapiens
ggtgcggaggctcaaggctggcgtcctgtttgggatgtccgaccgtggcgagcttgagaacgcagatctcgtggtgctctggaccgatggggacactgcctattttgcggtgagtctctcct

SEQ ID NO: 152296 - DNA, 122 bp, Homo sapiens
tggatacaaaaacatacataatacgcttcgtaggagccagtcttttttctcccactcaaacgaaatctttactttctttcctacattcttacttttaccaattcgattaaaataataataag

SEQ ID NO: 152297 - DNA, 122 bp, Homo sapiens
ctccgaggggaggccccaaccgtccggcggagccctccaggttggtggtgctgggagaagcgctcctccttgcctccgggtccaagggcggagacgctgcctggggagcaggggggacaagg

SEQ ID NO: 152298 - DNA, 122 bp, Homo sapiens
agagctgtgtaaggcaatcctcctgcaggccggctacggcgcacgcagtgccactctccccgccagcccctgcgctctgcgccagggatcagggtgcatacacctccctcgcagggtgggat

SEQ ID NO: 152299 - DNA, 122 bp, Homo sapiens
acaattgcatatgcactggcagatcttgaggtggtgccaatatgtagacatcaattagtacgattcctccttccagctaagaccagcacatacactgtaatccccttacctgcagtccatcc

SEQ ID NO: 152300 - DNA, 122 bp, Homo sapiens
agtggtggaggaagtggcccaagctcaggcggtggctaagtgactccagggcaagcccctcgccccctgtgctggaggaagcccgcgcccaggctctgtcgctgagcagggcacgccttcca

SEQ ID NO: 152301 - DNA, 122 bp, Homo sapiens
ggcgcccggcgccgggggcgcgaggagcggctcatctagtcagaccccccaccccgccaccgccaccagacaccaccatcgctgtgtagtgtgggtttttattcgtgttcgtgtgtgtgtgt

SEQ ID NO: 152302 - DNA, 122 bp, Homo sapiens
attttcgaccctctctccgtcttgttctccagttgcccctcgccatggcctgcagagtctcgggaaagttgccattgcccggcgtatgccacctccagccaaccttccaagcctgaaagccg

SEQ ID NO: 152303 - DNA, 122 bp, Homo sapiens
gctgacaggaagttgcccggggaacggtgcactctgggaaatgtagtccggagcctgggccgtctttaactgccccggacaccgcggtcaccattaacggaccctgcatttgagccccatcc

SEQ ID NO: 152304 - DNA, 122 bp, Homo sapiens
ctccgtctcctgacctcgtgatctgcccacctcggcctcccaaagtgctgggattacaggcgtgagccaccacacctggccccaacaagcagatttctaaggcactaaaatgtgcaggtcat

SEQ ID NO: 152305 - DNA, 122 bp, Homo sapiens
ggtccggccgtaaccccctccccccatccccacgcggtggtctggccctaaccctgtcaccgcatccctaggggggtggtccggccctaaacccgtccccctcatcgcggtgccatggtccg

SEQ ID NO: 152306 - DNA, 122 bp, Homo sapiens
gtgcgtgggagacgtaggattttaagttaatgaggcctcaacctaagcctgttgctgttgcgtgatcagcatggttttccctgaaatttgccttttcagatctcgtctctaagggtcaggaa

SEQ ID NO: 152307 - DNA, 122 bp, Homo sapiens
ggaggtgagcacgcgctgggccctggaccgcgagcagcgggagaagtacgagctggtggccgtgtgcaccgtgcacgccggcgcgcgcgaggaggtggtgatggtgcccttcccggtgaccg

SEQ ID NO: 152308 - DNA, 122 bp, Homo sapiens
acgggcaagattgaattagtggcagagggcaacttgatttttcaaatcatcttacaatcacgattgattcttcatagatcccatctgatgaatactcaaaaccatttgtccaacacgtgtaa

SEQ ID NO: 152309 - DNA, 122 bp, Homo sapiens
gtaaggacactgggggcagtgaggacgctgtggacactgcggacgctgtggggacaatgacgctgtggacagtgaggacgctgtgggggcggtgaggacactgtggagtgaggacactgggg

SEQ ID NO: 152310 - DNA, 122 bp, Homo sapiens
acaaaatacctgctggaagggctagaattacacagagtgctggcaaggatacgcggctgccggagcatgacgccgcgcccctgcctgaagaacagcgactccttccaggcgaaacaatgtcc

SEQ ID NO: 152311 - DNA, 122 bp, Homo sapiens
ctgggacaccgaaagggaaggtcctctaaggaaccgccagactgagtgggaaattccagccgacaataccacatgggggagagacaggctgtctgtcacagcccctctcgagggagtgcctc

SEQ ID NO: 152312 - DNA, 122 bp, Homo sapiens
aagcccgtcagccctcggtagcaggacacccctcggtagggggcggcgctgatgcagcagcggttgccagttttgggggccacagctgagcaggagctgaagttcctggtgaccccgcatcc

SEQ ID NO: 152313 - DNA, 122 bp, Homo sapiens
cctttaggcggagtccttccttaagctcccgcccgcggctccgaactgagtcctctcagccgcccgagggcgctgcgctgagccttacactctatgattgctcctaccgactcccatgagga

SEQ ID NO: 152314 - DNA, 122 bp, Homo sapiens
cttcttcagtgtcttcttggagccacccatgggactgcatgggcaggtgctggcttggggcggggccgcctcaaaagaaggctgagaagtcaggacagtgggaggcctggcaggttttgggg

SEQ ID NO: 152315 - DNA, 122 bp, Homo sapiens
ttttaatctcctgctgcgggtggcagacatgggagagacaggcaagctgcaaagggaagtcgacgaaataaaattaaagccctacaatcgtgttcgtgtcaatgtagatggggtgcccccct

SEQ ID NO: 152316 - DNA, 122 bp, Homo sapiens
tgaactcctgacctcaagtgatctgccggccttggcctaccgaagcgctgggattacaggcgtaagccactgcacctggccaagaagtgctgtgtattttgaaataagaaaggctcatctct

SEQ ID NO: 152317 - DNA, 122 bp, Homo sapiens
agggccaaagcctaagaaatcgctacaagactagatgccgagttcgaactactgcctggacggcagcgcccgagcgcccgcaaaaataagcccccgtgccatttccggtactagcaaatcct

SEQ ID NO: 152318 - DNA, 122 bp, Homo sapiens
ggagcactcttcagtgcagtgcgggggctgcccatgtggccgtggagggcacccctaccccggtgcaggcgcaggctggaggcgtagcccgggcccatccctggcggtgtgtcgcggagggc

SEQ ID NO: 152319 - DNA, 122 bp, Homo sapiens
gggggagggggcacgctgccgggtctgttggaggtgggacggcgtctcggtgggggcgcccggagactctggggtgttgggtggggccttggttgccgaattccgtgccggtgcctccccca

SEQ ID NO: 152320 - DNA, 122 bp, Homo sapiens
tctgggtgcagatgggtgtccaagtgaatatgggagcaggcacgcatgttcacgtgtgtgcgtgtagattaccacttgtgtgaacagaggactgtgcaggggtgtgtgtaggttcgcgggtg

SEQ ID NO: 152321 - DNA, 122 bp, Homo sapiens
ctctgagggctggaggtgtcctagggcccgggtgggtctgacagcacaggcccaaagggtcgtgggccctttaatgagctggctgggccgcagcttctaagcccaggctaaatttggccctg

SEQ ID NO: 152322 - DNA, 122 bp, Homo sapiens
ggactactcgtgagacggagaaaaaaaaaagagaaaatttgggggtaagaagcggttgatcggatctaatctctaattaatctgaagatttgtccgtgcaaaagccattcatttatttttct

SEQ ID NO: 152323 - DNA, 122 bp, Homo sapiens
tcctcggggctaggccgcaggcaggtaaagttgaccaggtagtggtccaggggcagcaggcggggggcaaagtgtgcgcacacctgctcctggcggttgaagcgcaggtagagggagtactt

SEQ ID NO: 152324 - DNA, 122 bp, Homo sapiens
gacaaaaaaaagaggcgcaagcagcagtaccagcagagacagtcggtcatttttcacaagcgcgcacccgagcaggccttgtagaatgaggttgtatcaatagcagtgacaaaacgcacaca

SEQ ID NO: 152325 - DNA, 122 bp, Homo sapiens
tcatggggcaccccccgccaggtccaccctgttccctcgccgaccaactccaaagccgcccgtgagggccacaggttttgatggagcaccgccctagccagcagtggtgaaatctgtgccag

SEQ ID NO: 152326 - DNA, 122 bp, Homo sapiens
gctgcagcagatgtcctgtaactgagggtgtgtgcctagagtcctctgaggaggcatgggcgtccccaaaaccatgcagaagtgttgttccatagaagtgtgtctgcctgatatgggggaca

SEQ ID NO: 152327 - DNA, 122 bp, Homo sapiens
ggtggctcaaaggtccaaccatcagcactgtgagctccacaaccctgcacagtcggtgtgcgtaccatctcaggaggcctgagctccagggcagcagcaagaaccttccagctgggcctgat

SEQ ID NO: 152328 - DNA, 122 bp, Homo sapiens
ccgaccggccccagctaaactccgcatcattcagctggtggatggcctgctggcgtctgccggtgccggtcggtgtgcccttccaccggtatgttcctctcgacgtccagccgcttgtgtgt

SEQ ID NO: 152329 - DNA, 122 bp, Homo sapiens
cgaagctcctacacgctcggtcggggcccagtggcaccccgaagctcctacacgctcggtcggggcccagtggcaccccgaagctcctacacactaggtgtccctagtgtccccgctgtccc

SEQ ID NO: 152330 - DNA, 122 bp, Homo sapiens
tggctaggagctgggtctgaccgttgtatggtttgacctgatatactccattctcccctgcgcctcctcctctgtgttctctccatgtccccctcccaactccccatgcccagttcttaccc

SEQ ID NO: 152331 - DNA, 122 bp, Homo sapiens
ggcggcggcggcggcggcggcgtagccgtagagggtgagtcggtggcaggtcctgacggccggcgggtccttgggaggtggtcgccgtctttcatccttgctctccctgtctctggcttccg

SEQ ID NO: 152332 - DNA, 122 bp, Homo sapiens
cattcctgggtttgctttggaacatatttttccgtgtcttttctgtgtgtttctcacacccgggcagggtttgctggtctggcctggtctgttttgttcaggtctggtctggtctagttttg

SEQ ID NO: 152333 - DNA, 122 bp, Homo sapiens
cttcaaactcaacaagaaggcggcctctggggaagccaagcctaaggctaaaaaggcaggcgcggccaaggccaagaagccagcaggagcggcgaagaagcccaagaaggcgacgggggcgg

SEQ ID NO: 152334 - DNA, 122 bp, Homo sapiens
tctggctccaccctgggccagacctggggctcctcttgggcaaattcaaagtcagtccttcggaactctgacaagtgtggcctcctccccacccccaggctcttgggctggtgcttttgaag

SEQ ID NO: 152335 - DNA, 122 bp, Homo sapiens
tggggccttgcgtcagctccccaggaccgaggagctgcagcaactgctcttcatcaacaacgcgggctctcctggggatgtgtccaaaggcttcgtggacctgggtgactccactcaagtga

SEQ ID NO: 152336 - DNA, 122 bp, Homo sapiens
gcgcggggagcgcaatgtgctggcgggggccggggctggggcccggggaggccaccagggcggggccgggcgcggggcggcgcttcttcgcgcctcccggccccggcctggcgtccgtgggg

SEQ ID NO: 152337 - DNA, 122 bp, Homo sapiens
acggacacgcgacaagggttcctaggaataaaccataaacaggcccgggagctacgctaacgccaaacgccgagcagtgagacgcgcagcacccgccctgcgcctcggtggcagccgtccac

SEQ ID NO: 152338 - DNA, 122 bp, Homo sapiens
ggactcggggagctgttcgggctgttagattttcgtgaggcttccctcacctgcggacttcgtgcatcttagtgtcagatgaactaccgactaggtggtctgcttaagcagagtatactttt

SEQ ID NO: 152339 - DNA, 122 bp, Homo sapiens
caatgacgactccgccaccgagaggcgggcttcctagactctaaaaggtgcaacaacctccggcttgcaaaaccgcttgcaacgggattgcagaacgtcacgtgctttccttcgctctctta

SEQ ID NO: 152340 - DNA, 122 bp, Homo sapiens
cgccaccgttttttggggatacgtgcttctgggggctcactatatttaatgactacaccccggaaagtgttggtgtcctcaagaagtgccccagaaagttcaaagcttggtttttctttagc

SEQ ID NO: 152341 - DNA, 122 bp, Homo sapiens
acccgcgaactcataaataccggggcggcgctggtggcgggagaggcgcgtgcgggcagccggcgcccccgagggtgagccggggtccgggagggcgtcccctttcccggatggtcccgacc

SEQ ID NO: 152342 - DNA, 122 bp, Homo sapiens
gagaccatcctggtgcagcagttggcaatcctttggctctgggggaaggtttctcagtctcggggagtggggcctcaatctgctggttccctgtgtttatcagtctcccccttgtgtgtcct

SEQ ID NO: 152343 - DNA, 122 bp, Homo sapiens
agcccagccaccgcgctcacccagcagtgaagggagaatctccctccactcacttcaccgcgggagagattagagcgacactattattttgagacagggtctcactctcttgcccaggcagg

SEQ ID NO: 152344 - DNA, 122 bp, Homo sapiens
tcactttcggacccaagttgggaattactaatgtagacagtgattccttatcatcacacacgttttttaaaaactgcggacaggccgaaagaggaggagccgccacaaagcccgccacgtct

SEQ ID NO: 152345 - DNA, 122 bp, Homo sapiens
tctgacagtggggtggacctgagtggggattctcaggtgtcatcaggtccctgcagccagcgaagttcccctgatggaggactcaagggggcagcagagggaccccccaagaggcctggagg

SEQ ID NO: 152346 - DNA, 122 bp, Homo sapiens
taacctgtgctgcgcggggtggcactagttttcacccagcgggcgaggaggcagcgaagtcgcgggcccagcgtagcgcgcgcctccgaagggcttggtgcgggcgcgggcgcgggcgcgcg

SEQ ID NO: 152347 - DNA, 122 bp, Homo sapiens
ctggaaagcaggaaagagccgaagctcggggagcagttttgtctgctggttgtaggggttcggcttttagggttttgtgagataaggaaaaagaggctctgggcactgcctcccaccgggct

SEQ ID NO: 152348 - DNA, 122 bp, Homo sapiens
gcgggcggcctgggtgagggggcgctgagcacactcatcccagggtatgcagaggagtgtcgttcccaggtccctttgaccagggactaagaccaaatctctggattcaaagactttcagcc

SEQ ID NO: 152349 - DNA, 122 bp, Homo sapiens
attcacgtggaaccaagagttcccaaactgcctgagcctgagactcaccagttcccaaaccgcctgcgcctgagactcaccggttcccaaaccgcctgcacttgagactcaggggttcccaa

SEQ ID NO: 152350 - DNA, 122 bp, Homo sapiens
tatctactgtttcctttttctttccctataactaacaagaaatcacgaccaactgccatccgtatggcagttctgcattacaactctctgggactagccctaaattatcttcaaaatggtct

SEQ ID NO: 152351 - DNA, 122 bp, Homo sapiens
ttgtctcaaaaaaaggaaagatgaattatcttcaagtcaccagcactttttttcaggggacgtctgccctgcatgtggggtggtggctccctatcagggacgtttgtcatctccctcagtgc

SEQ ID NO: 152352 - DNA, 122 bp, Homo sapiens
cgctctgccccgctgccctgcgctgccgcgggcggccgacctcggactgcggacaccgcgcgccaggctacccagccgctcagctaggaccccgcccggctccgcccagccctgccgggcca

SEQ ID NO: 152353 - DNA, 122 bp, Homo sapiens
gtgtattaggaaagaggtcagcccaactgtgtccttccatagctgcataattcataatgtcgtaaagtaaatatttttttcctctcaaatttcctcagaggcagttggattttatccgtttc

SEQ ID NO: 152354 - DNA, 122 bp, Homo sapiens
gctgcagcctggaacgagcgtgcggcaggtccagggctctggagcctcacactcacttagcgacggactggatgaccttggaggaggtgtccttgaggttggtgaagagccgctctgtccca

SEQ ID NO: 152355 - DNA, 122 bp, Homo sapiens
gataaggccggcaaagcagccagccttgaaaatgccatttaatgagaaaagacccacagccgccgtggcggtggccggggtgtccggcagcagtaaacgctcctggtaccgctgctcgccct

SEQ ID NO: 152356 - DNA, 122 bp, Homo sapiens
gggctggagctggggcggagccaggagcaggagaaagcagaacgtgaagagttttccaggcgccaaacctgcaagcggcgaggagagaaggcagctcgccactgataccgggtctcctgggg

SEQ ID NO: 152357 - DNA, 122 bp, Homo sapiens
acacctcctgttccaggacccagaccctggaagtctgtgcctaagccaagacatgagcagcgtttgtggaatgcggcttcagatagaaaccttctttcaatttgcaggcctggttatgtaat

SEQ ID NO: 152358 - DNA, 122 bp, Homo sapiens
ggcggagccctgtgtctacacacgtagccttgggtcccggggtctgtctgcagctccgcccggcaccgtccatgcagggtgtagacccagacactctcctgcctgggagagcggcccagccg

SEQ ID NO: 152359 - DNA, 122 bp, Homo sapiens
ctcagctgtgacagaagcactgacactgtctactgaagcaggttctgaaacactcatgtgcggtgtttaacagatgctgggcagggcatctgcttgctgtagccaagtctgcaggtgtcttt

SEQ ID NO: 152360 - DNA, 122 bp, Homo sapiens
aaaattagccgggcgtggtggcgcatgcttgtaatcgcggaggttgcggtgagtcgagatcgagccattgcaccccagcccgggcaataagagcgaaactgtctcaaaaaaaaaaaaaaaaa

SEQ ID NO: 152361 - DNA, 122 bp, Homo sapiens
tggagatcgccaggctcggaggaaccggcagctctccacgcccctgcccgaagcctgacccgactgcctctctcagtgaggtacggagatttatctaggctcttccctggctgcgaacccag

SEQ ID NO: 152362 - DNA, 122 bp, Homo sapiens
accctgctcccccctcattctgggagctacaggctggggccacggtcacccctgggcacacgcccccacccccaccttcaacacccccagtgcctcccgcttcccttctgcttcccttccgt

SEQ ID NO: 152363 - DNA, 122 bp, Homo sapiens
agaagagaaatcagtgactccatagcctcacccgcacccgcaccccagacgcccatgaagcggccaccatcgaaaccacctgttgtcaggaatttcagatgagggttaaaaaagaataaagt

SEQ ID NO: 152364 - DNA, 122 bp, Homo sapiens
gttcttcgaatcagaatacggtggccagaaaggttcctctgacgaaagaggggcgtggttcgaagccgtacagtggccggtaaagctcaagaaacatggaacgaaaaggacgcgaagaatcg

SEQ ID NO: 152365 - DNA, 122 bp, Homo sapiens
ggcccctcccccgccccgcccccttccccgcctctcccgcgctgggagggaggggcccaacgtctggagacccggttcgaggcccgacaacccagagccaccgtggccatcgggtccccgcc

SEQ ID NO: 152366 - DNA, 122 bp, Homo sapiens
aggatattgatgtggccgagagcttgcgctttgctgccatgtgaacgtgaactagtcattcggcgtgtccaccccaggcctcgttttcccgtctgtggacagaacatgaggataggatttaa

SEQ ID NO: 152367 - DNA, 122 bp, Homo sapiens
gcttcttttttctgtatttgtggtagagacagggtttgaccgtgttagccaggatggtctcgatctcctgaccttgtgatccacctgcttcggactccctaagtgctgagattacaggcgtg

SEQ ID NO: 152368 - DNA, 122 bp, Homo sapiens
gggtccccctggcgaggggcggcggtgagtggacggaggggtcctcctggcgaggggcggcggtgagtggacggaggggtccccctggtgaggggcggcggtgagtggacggaggggtcctc

SEQ ID NO: 152369 - DNA, 122 bp, Homo sapiens
ctgtagccaaaaaacgaggggccccagggagaggggacccagatggccacacacggaacgcgcctccacagccccgggaggtggctcactctgtacaggtcttcggaggccgtgtttgtatc

SEQ ID NO: 152370 - DNA, 122 bp, Homo sapiens
acacaatttatcaccacctctctcctaccttagcctggtgaactcgtattcaccttattacgtcagcttaattgcttccctgaccccagattttaggtaaactgtctatgcgaatgctttca

SEQ ID NO: 152371 - DNA, 122 bp, Homo sapiens
acttgtgcctgagggaggacagacaatatgctcatcaggattcagggaggagagtgtggacgctcagacagaggagtgctgtctttgtttctcgctgctatatcagaatgccacagactggg

SEQ ID NO: 152372 - DNA, 122 bp, Homo sapiens
ggcgactgggccaggagaccagggactgagggacgcgcccggggagggccagcaacaagccgcggcccgggcgcgacagcggcggtccgcgccgagccgttccagccgccggcctactgtag

SEQ ID NO: 152373 - DNA, 122 bp, Homo sapiens
tttcaaactttgccttccaagtgcaggagttccttggtctttgcaagacccgcaggcgtccgcagtggtgcagagagaggtgcaaggggcgcgcccaaggtcgcaggctgcctggctgcgcg

SEQ ID NO: 152374 - DNA, 122 bp, Homo sapiens
cttctccttttgctgcaagacttggatctgctcttgaatctgcccctgcggaaagagggccgtttggacaggctgtgcctggagatttctggcctcataaaatcctcctggtctcttaggag

SEQ ID NO: 152375 - DNA, 122 bp, Homo sapiens
tagaactgtgtccagcacgaaggcagtgctgtcttgcgggaggcagggctgcaccaccaccggggtgtgaaggggcccagcaggcaggggtgtgaaggggcccagcagtgtttccagctgca

SEQ ID NO: 152376 - DNA, 122 bp, Homo sapiens
gccgccgccgccgctgccaggactctcagtgccggttttaatgggcagctccctcttcgccgcccccctgtgtgtcccctccctcgatttcgctgggaggacgagatggacatttattctac

SEQ ID NO: 152377 - DNA, 122 bp, Homo sapiens
tccctgaacttgccctcattgtcatcctgcttctgcctccctccaaggacagcacaaaggcggcaggcacaggactggctgaagggacaagaaagaattgggagtctagaggagctgtgcca

SEQ ID NO: 152378 - DNA, 122 bp, Homo sapiens
aggggctcaaacccaagtctgtttgtctcccaaactggcactttctccagctaggaagggcgaggagggggtggaggggaaggtagagggtggaggtggaggggagggaagacaagctctgt

SEQ ID NO: 152379 - DNA, 122 bp, Homo sapiens
tgtgtcctgggtgattttagaatttatctggggctactagttcatgcagtgccagtgtaacgtagcagcagagagcactttgaatgcagaaagagctagtttcagtactttcctttagtcta

SEQ ID NO: 152380 - DNA, 122 bp, Homo sapiens
tgctgaggtaggttctgttgtcttctccatttttatagataatgatactgagacacccagcgaagataggtaatttgcaacacaggtcagtggaacaatctctgaccttaaggcctgtacac

SEQ ID NO: 152381 - DNA, 122 bp, Homo sapiens
ctcagttcggcgacgctcggctaggttcggtgcggtctgggcgcggggctcggagggagtcggcggtgttcggagccgagtcggtgctccggcggagagagccgagccgcttcggagggggt

SEQ ID NO: 152382 - DNA, 122 bp, Homo sapiens
cctgtcttccttccaccactgcctccatcctcccacggaggccgccgcggggtggcaaaccggtgtcctgacccagctgcgctcagagccgtggagtgatgttctagtgccacctggtggcc

SEQ ID NO: 152383 - DNA, 122 bp, Homo sapiens
cgcttaaatggaatatacagatgagctttatttttatatctggcatgcttggatccatgccgaccctccagctgctcgggcctgcccttaggggctatggaccgcatgactctatcagcggc

SEQ ID NO: 152384 - DNA, 122 bp, Homo sapiens
agcccgggatcgcccgcaccttcccgccagcggaagcgcaggagccggctggggagggggcgccctagaaagagcagctagaaagctgagacggggaactgaggtcatcctggggggggaca

SEQ ID NO: 152385 - DNA, 122 bp, Homo sapiens
aggagatgctacaagggtaaaggacccgctggcaggagagacggcctttccaaggggaggcggcacggcaggtcgggtggaggctgcacgcagacctgaggctgatggaagggggagatgca

SEQ ID NO: 152386 - DNA, 122 bp, Homo sapiens
ccaccgtgcggtcgctgcacatatgccccacccccatcatggctccacccaccgtgcggtcgctgcacatatgccccacccccatcatggctccgcccaccgtgcagtcgctgcacatatgc

SEQ ID NO: 152387 - DNA, 122 bp, Homo sapiens
tgtagaatcaggaaacttaacctctagtcctagttttcttattacctagctgtgtggcttcgagtaggtcaattaacctttctgaccctcagtttcctcatccttttaatgacaattaaaaa

SEQ ID NO: 152388 - DNA, 122 bp, Homo sapiens
cagccttgccctggtatcctagacacgcctctgcacgcctggcaccagcttcccctcctacgtgaccagcacaggccctggactgggtggcggatgctgagataaggccaaggagggggaaa

SEQ ID NO: 152389 - DNA, 122 bp, Homo sapiens
tctgtaagccctgtggctccacaggtgctgcttctcactggcccagactctgagctccaccggcccagtctgcacggcccatctgcttcaccttccctcccagccacgtgccagtggccaca

SEQ ID NO: 152390 - DNA, 122 bp, Homo sapiens
cacctcagcttctgctttagtctggccagtgtcatggttttctcaggagggccattgaggcggacattcccaaatatccaactctgcttcatgctcactcactgaccctccctccctcctgg

SEQ ID NO: 152391 - DNA, 122 bp, Homo sapiens
caagattaagttccaggcgctggacacagaggaacaggctcctaactggagggctttccacggacaacagagcgcctggcagtctcttcgagattaaatctaggctgtgtgggagggtgggc

SEQ ID NO: 152392 - DNA, 122 bp, Homo sapiens
gcccctcggggggtgggggcaggcacctggtgacccgggagaccaggaagcgctgcatggcgggactgtccaccattgccagggcggccccggcccaggcccgacactgctcctgcgcctgc

SEQ ID NO: 152393 - DNA, 122 bp, Homo sapiens
gggtccgccttaggaggggtaatctgagggtcgagtcggcctgcacgaggaggatactcacggccgctcgggagcctggcgggggccagcagccgggaaaggggacgcagcaaggcggacgg

SEQ ID NO: 152394 - DNA, 122 bp, Homo sapiens
gggaagccttgaaactcaactcctgggtgggccaggaaggttgtccgagttgggcagcgccggccggggcccccctcagagccgagctgctcgcctccctcgagacccagcgcagcctggag

SEQ ID NO: 152395 - DNA, 122 bp, Homo sapiens
cttttccagtacgggagacagtactggggacgcgggtgctgaagtcaccacgattttcctcgtctgaggagcagtggctcaccttggccaggaaacagggcaaatagccgcaaggagagagg

SEQ ID NO: 152396 - DNA, 122 bp, Homo sapiens
agctgctctccacaaatcagggtgggcccgaaagcattatttcatcttaaatgatgaaatcgtcaaggatacagaaaaggacagcgaaaaatgtcacaaacacccagctttaactaatgtta

SEQ ID NO: 152397 - DNA, 122 bp, Homo sapiens
ctgcccagggtgtaaccgccctctctgcctgcacaggagagcgattcataccagcagaaccggaaaaatcacagctgaaagcaaccagggaagaggcaagggccaagagagcaatgtaaagg

SEQ ID NO: 152398 - DNA, 122 bp, Homo sapiens
ggtgagctggctccgggcgaaagtggctgcgcctgagtcgtgggagatctgttgctgcagcgaggcgctctgtagggccgggaaaaagggtcacacggagtccccacccccggggaggtgtg

SEQ ID NO: 152399 - DNA, 122 bp, Homo sapiens
aacacatcaggggaactggaagcagagagggaatcagccactggaaagaagtcacgcagacgaagtggtgacagccacgacaggaaattgctcagcggtggccacaacagagtggcagccag

SEQ ID NO: 152400 - DNA, 122 bp, Homo sapiens
cctgtttttcttcttaccattctggctaatttctacttgtctttcaaggctcagcaaggacgagttgggtagaaagccttgcagggtcgtccacttactttcacactgcattgagtcgcctg

SEQ ID NO: 152401 - DNA, 122 bp, Homo sapiens
ctcctcctccgggcggtgtgttgggagggcccaggtcaaggcgcgcgtgggcggaagcggcggcggcggcgaaggcggcggctgtcagagctggagggccgggcaccgcggccatggagggt

SEQ ID NO: 152402 - DNA, 122 bp, Homo sapiens
ctgcctcctggattcaagcgattctcgcctcagcctcccgagtagctgggactacaggcgcgtgccactgcacctggctaatttatgtatttttaatagagatttggtttcatgatgttggc

SEQ ID NO: 152403 - DNA, 122 bp, Homo sapiens
gacgggcaaaataacagcctgctgggttcagaggcccccactgccggctccaccaaattacgctcttccaagagtaccagctcagaagtcgcagattttccaaaagagagacacatttgctc

SEQ ID NO: 152404 - DNA, 122 bp, Homo sapiens
ggtctggggtctgggtccggtctcatgtgaggacccctgtctgggtggtagggacagtagcgtgatgtcctcgggggtctggggtccgggtctggtcagatgtgatgatttctgtctgggtg

SEQ ID NO: 152405 - DNA, 122 bp, Homo sapiens
gaagtctgtggcatagcctggctcttcttggatttcatctgaattatcaaaattgaccagcgcaacctccatttctttccagccacacacatccattctaggggagccagggaagaagcatg

SEQ ID NO: 152406 - DNA, 122 bp, Homo sapiens
catggatgagagacaacacagagagaaaagaaaaagtccaacaggcaatcttgaaaaactcgagtgtttactggccttgtgaaagaggccaagtttacagagggaactaagcaggagcagac

SEQ ID NO: 152407 - DNA, 122 bp, Homo sapiens
tggtgcattccttcaccagcccacgctccacagggtcaggatggtcaattccgggcaccccggcctaatccaggacatgctcctgccaccagagaaagcccctaggcagcatcccgggtgct

SEQ ID NO: 152408 - DNA, 122 bp, Homo sapiens
cacctcctggctctgccactcaattcctgagcctcagtttcctcagctgtaaaatagagacggtaatctccacagcacagagcactgtccccctccttggattctctttgggaacagtctga

SEQ ID NO: 152409 - DNA, 122 bp, Homo sapiens
tataattagtggtagtgacaggcagctgatacactgctgtttaataaatgtttccgaggccgggtgcggtggctcatgcctgtaatcccaacactttgggaggccaaggcgggcagatcacg

SEQ ID NO: 152410 - DNA, 122 bp, Homo sapiens
gttttcatctccagaccatgattcgtagaactccagctcaggaatggcattctggtacttcggagttggcaccaaaagacaagacagtcttgccaacaccacctacccaagcaactgaattt

SEQ ID NO: 152411 - DNA, 122 bp, Homo sapiens
gaaatgctgcagggagaccagggcttcccagcaccgaggggaaggacccgggcacattgccgggtcagtccctgaaatgaacttaatacttttgtgcggataaccgtctggcctttcagacc

SEQ ID NO: 152412 - DNA, 122 bp, Homo sapiens
ggttactcaatgaatttgagtgtgttccagagacatgcttcatagagatcacttttccttcgagaagatatttttctctccctggggtaacatcacatctacccaccctttcactgcctgtt

SEQ ID NO: 152413 - DNA, 122 bp, Homo sapiens
ggcttatggagcatctgccacgaagagcaatgcattttagaaagtgacaagatggccgggcgtggtggttcatgccggttcagttcaggtaaacagcactcagggaaagagtcagaatcctg

SEQ ID NO: 152414 - DNA, 122 bp, Homo sapiens
tggaacccgagcttgcacggggacagctgatgcctttctggtcgctcctctagagctccgcgggctccggcaaacccccccgttagaacttgcggttccaacgcgcagcgccaaatctggcc

SEQ ID NO: 152415 - DNA, 122 bp, Homo sapiens
ggaccgggagggctagaggggaggcgggaggccgggccgcgggccgtgctggctccgcaccggcctggaggacaggtgggttttgtttgtcttccaggagcggatttccaaggcccgccacg

SEQ ID NO: 152416 - DNA, 122 bp, Homo sapiens
agacgggtgagggctactgggggttgggttggaacgccccgaaggcaccacagcaaccgacgcgggaacgcctgttaaaccagccccgccccgagacgcgcgcgcccggcggtctcgatcca

SEQ ID NO: 152417 - DNA, 122 bp, Homo sapiens
tgctcattgtaggactaggacccttgaggtgacagagagctgtggttagcctgagtccatcgcactgtggtggtctatgaggccgctttgcaggggcagcaaatcagaaggctcggtctgct

SEQ ID NO: 152418 - DNA, 122 bp, Homo sapiens
ccggcggggggtggggagcagcgagggccccgccccctcccgtcctctccccagggcccgcgcaggatgcccccggcccctggcagccccccgggaggtcctgagctcgacgcgccccctct

SEQ ID NO: 152419 - DNA, 122 bp, Homo sapiens
gctcagacccgccgggcctcctctctgcgtctgctgggaggactgtggctccggaagccccgctcgcactcaagggggccacaggcacctgctgcccacaggaagacgcgtgtgggaaccag

SEQ ID NO: 152420 - DNA, 122 bp, Homo sapiens
aaaggttctccaagttcctcactagactcaggagcctggctggcttcactgggtggataccgcacgtgggccacaggtggagctgcctaccagtcccgcacagcgcgcccgcactcctcagc

SEQ ID NO: 152421 - DNA, 122 bp, Homo sapiens
ccactcaagcacggtgctgcagcggctgaacgagcagcgtctccgcgggctcttctgcgacgtcgtcctggtggccgatgagcagcgtgtgccagcccatcgcaacctgctggccgtgtgca

SEQ ID NO: 152422 - DNA, 122 bp, Homo sapiens
tagcattctttgacaatagcagaagcctaaagaacttccactccaaggaaatacagaatccgggaaacaattgttcctagcgattagggaaatctcgcgagattcaggtcctgggagcctgg

SEQ ID NO: 152423 - DNA, 122 bp, Homo sapiens
tagccaggatgagtggggaatccggttgggttccccagctggagctgagggatgagctcccgggcccgggcactgggctcttcccggctggctggggcccggtatgggaaccgggagggcct

SEQ ID NO: 152424 - DNA, 122 bp, Homo sapiens
catccaggtgcaacgtctctgctaagaatgtgtgccaggaatggggcctggcttcctcgtcgagtgcggctgtccgtgggtttctgctagacagataacgttctgaaggagttaaactttca

SEQ ID NO: 152425 - DNA, 122 bp, Homo sapiens
caggatgacgaggtagaaagtctgccctgattaactgtccctctggcgctgagcagggcccggcgtgataaatagcaggaataaaaccgagagaggcgcgcagcaagctgtcggcaggtctg

SEQ ID NO: 152426 - DNA, 122 bp, Homo sapiens
gtccaggcctccgcctggggaaggcttgtgcggcggtgggaaataaaggctgcttctccgcgctgcgcagtgtggtgggttcggtgctgttctccgctggcctgcgcgtccctgcccagccc

SEQ ID NO: 152427 - DNA, 122 bp, Homo sapiens
gaggttcaacccaccaaccgggaaaaagtggatagtttcagaaagtgtggccgggagccacggcaagaatccaaaactgttggtgtctggaatggggcacatagggtaggaagggtctattc

SEQ ID NO: 152428 - DNA, 122 bp, Homo sapiens
agagctcatttgtcagtttgcttagcacagacagcactctgggatgggtcactgagacgccgccactctggagtgcagcctggtggcttttaagaggagacacccggcgaaatgctctccag

SEQ ID NO: 152429 - DNA, 122 bp, Homo sapiens
agccccgccccaggggcggggcctcacctgccgcgggcaggtagacagctacctggtaaccgggtccggcccaggaggcttgggcgcgcgcagccatcccgggcctcgccggggacctaggg

SEQ ID NO: 152430 - DNA, 122 bp, Homo sapiens
tggtgtggcatgccagataatttttgcatggcaatctaaatgattattatgtaaattttgcgtgattaagtattttaatcccataatgttatcacttaccatgaaggcattcattcttcaat

SEQ ID NO: 152431 - DNA, 122 bp, Homo sapiens
ctttaatgaagggaccagttacagaggctcacacaggtgaagacagccagagacaagccacggcgggatgccatggccagcctgagactagagagggcaaggggagcttggaagcatcagag

SEQ ID NO: 152432 - DNA, 122 bp, Homo sapiens
agcacctcggaaagcgcccctcgcggcgccccgggattacgcatgctccttggggcccgccgccttggccgtgcaagtgccaccgtaactggtgagagccgctggcaacccacccggagttg

SEQ ID NO: 152433 - DNA, 122 bp, Homo sapiens
gcctcgtcagcctttctccagcaccggaaaccacaggaaaccaggtcagtgtgtggggcccgctccctctgctccagggctcagctgtgagctctggggcttcctgagcagggcgtactgac

SEQ ID NO: 152434 - DNA, 122 bp, Homo sapiens
cgctctgacagcctgttccctgccttcagttccctgccttcaaccaaagcacgctggtcacgcaggcagaatcttggccttggccatcgctttttgttctcagttccccctacctcctccaa

SEQ ID NO: 152435 - DNA, 122 bp, Homo sapiens
gcccacggagggagtgggaggctcaggaatggcgggctgcctgtcccgagccctgcccggcgggacggcagttaaggcccagcgagaaatcgagcgccccgccggtgggctggaagtgctgg

SEQ ID NO: 152436 - DNA, 122 bp, Homo sapiens
atcagcggccccgcgtggggagggcgtatgctctcggcgggctagagcgccgctgaaacccgctcctcgttctacttggaggacttgttccagccagcgctagtgcgtgagtataaggagag

SEQ ID NO: 152437 - DNA, 122 bp, Homo sapiens
aactttctgtgtagcttctttctttagttggtctttgcttagatttccctgtgtcagagacgacttccctggatatcagtgacagttattgattgctcatgctatgaactcctcccatttct

SEQ ID NO: 152438 - DNA, 122 bp, Homo sapiens
tgcggctacctatgtcgatggcgaagcgcttggcgttctccaggttgcggaagatctcgtcggggggcagcgtgatgctcttgtccagactgtccccgctgctcccgctgccgctcgctcca

SEQ ID NO: 152439 - DNA, 122 bp, Homo sapiens
cgaggaggaggaagaggcggcggcggcggcgattgggtaccgaggtgcgcagggtgcgggcggccggaactgcgcatctcctcctccctctccccgggctcctactggcctgaggttgaggg

SEQ ID NO: 152440 - DNA, 122 bp, Homo sapiens
cctttctcttgacatcagctctgtctgtgcacatagatggacagcatcattggcccagaccgctctggctggggaggtgcatatttgacttaataaatgagagtctgaggtgggggaacagg

SEQ ID NO: 152441 - DNA, 122 bp, Homo sapiens
ccaggcttaacttggagtttcatctcctccccaggagggtctcaagttgccttcctctgccgggaagggcccccactcccccgctccaggccctaatctccacccggcgtcccagtctgagc

SEQ ID NO: 152442 - DNA, 122 bp, Homo sapiens
tatttattggcctgtgggccaaacatttggccttcaagttgccctgaaccgactaataaacgttcgaagagggctccggagaatgtgttctcccgaaggacgaggccccgctcgaatgcccg

SEQ ID NO: 152443 - DNA, 122 bp, Homo sapiens
caagactccgtctcaaaagaaaaaaagtaaaagtctaagaataatcacggaccacaccgacgtgtaaatgctcaatgctcacccagccctaagccagtggtcaatgtgtcaatggagggaca

SEQ ID NO: 152444 - DNA, 122 bp, Homo sapiens
ttcttgctaatgacccagaaggctgcagttattttagaggaaaagtggagaacaaagagacgctcaagtaaacgaggatctctgaaacacagcgaaagttcaattaggcaccatacccaggt

SEQ ID NO: 152445 - DNA, 122 bp, Homo sapiens
cctactcccaccccagggagtgtggcctgaaggggaaggaggggtatgccagagtcagggcgtggcctcactcagggtccttgctggacagatgcctccctgccccacccttcaaagtagcc

SEQ ID NO: 152446 - DNA, 122 bp, Homo sapiens
cgaaggtcccctcctcagtaggggatgtcattctgatagtactggatcatgtcgtaggtccggctcctgaaaggccaaggaagagtgaagggagattcgaggagccagcagggtctggggtc

SEQ ID NO: 152447 - DNA, 122 bp, Homo sapiens
ctggcgcccgaactagagagtgtacttcttccctagctcctgcaccaccgtctgtgtgtacgtctgtctgtccctcccagtccttgctcggtcctaggctttcatttgaaggcagctgaggg

SEQ ID NO: 152448 - DNA, 122 bp, Homo sapiens
aagtagctagggctacaggtgcatgccaccatgcctggctaacattcaaacttctgggcgcgaatgatccacttcagtgtttcaaagtgctgggattacaggtgtaagccactgcacctgac

SEQ ID NO: 152449 - DNA, 122 bp, Homo sapiens
attaatgatcacagtcagcatgcagcacaaagccaggtgaagctttccggtaaggagggtcgcaggcagccagtggctccaccttcgtgtgcagacaccacgtgttctcaatgatcaacaca

SEQ ID NO: 152450 - DNA, 122 bp, Homo sapiens
tccctcccacctcccgctggcggccttttagtccccgaggcccctcgctcgaatcccctccggtatcagcttgagcaccgagtgacctcacgctgatgactcagcaagtctccctccgggct

SEQ ID NO: 152451 - DNA, 122 bp, Homo sapiens
gctgtttgccaacgaccagctggcttaatctgacttcgcagatgtagcagtgttggaaaacgtcggttcttttgctgagggaaggaagagatgggaggggtagaaagggcggtggttattcc

SEQ ID NO: 152452 - DNA, 122 bp, Homo sapiens
gcccccaccccaagctgcagcaaccgccaaggacgctggttagaggagctggggccgcagcgtgcccatccaggccggttggggagggggctcccaccagccccctccacgcccctttccta

SEQ ID NO: 152453 - DNA, 122 bp, Homo sapiens
ctcatcttttcatcccacacccaccacccccctctccgttcacggtgtcccgggaggctgcgacctgcgtagatgatttagcagactgcccctgcccatgctcctgctcctgctcctcctcc

SEQ ID NO: 152454 - DNA, 122 bp, Homo sapiens
aggttgcagtgagccaagatcgtgccactgcactccagcctgggtgacagagtggggctccgtctcaaaaccaaacaaaaaactgagagtggattttgtaagaaatagcaagtcacactgga

SEQ ID NO: 152455 - DNA, 122 bp, Homo sapiens
tgccccagcccccacctcagccccaaccccaaccccagccgcatcccctgccccagctgacgggtcaaagcctcaggagagtgtggctctccccaggcgctaccaggaggggcaggtctcag

SEQ ID NO: 152456 - DNA, 122 bp, Homo sapiens
ctgcgtttccctgttctccagggcaggaaccacatcggtctgttcacccctcccctggaccggcaccgccacagagggtcagagtgttggcacctgtcttccaggtctgttcacccgtcccc

SEQ ID NO: 152457 - DNA, 122 bp, Homo sapiens
aggctcgaggcctcccttggcatcctccactgaacaatactctaggtgttcagtagctggcgctgagattgcaaggcgcccgaaggagaccctggagcacggaggattgctgcgggatctgg

SEQ ID NO: 152458 - DNA, 122 bp, Homo sapiens
gggtgggagggactgctttagggcagccggttttttcaggtttcccccggttttgcagtgcggagaccacgggggcccactccccgtggctccgcggaccccgccccttacgtgcccggccc

SEQ ID NO: 152459 - DNA, 122 bp, Homo sapiens
gaggcgtatgttcacatggaaacacggaggttaccgggctggtttcagggaggcagaggccgaataattcgattccggcactgaggtggaaggaagcaaaggatgaggtccatgtacctgtg

SEQ ID NO: 152460 - DNA, 122 bp, Homo sapiens
tgaggcctggaaagggaggtcaaggttccttcactctgagcaacaggaaatcctgccccacgaaggggagctgctctgggcgctcagcctcacccaccagacccccccacccacaccgagtg

SEQ ID NO: 152461 - DNA, 122 bp, Homo sapiens
aactgggtgtgattagacgtagacattcttcctgccatataaagctgctgggcacaccagcgacgattataatattcctattagtaattcttgttccacttcttcttttgttcagatttcta

SEQ ID NO: 152462 - DNA, 122 bp, Homo sapiens
aggccgacgatgccaaagtggtaggatcgggaaacgtcagggatgatgcactctcggccccggcgttgttcaggcatccgcatccacatgtcccaatcccagagctggcagacatggaccac

SEQ ID NO: 152463 - DNA, 122 bp, Homo sapiens
gtgtctggaggagggcatgggaagagccctcctcacagaaaggctcagaagggacacaaacgcccctgcccttccaacagctgctggccagcaaagtacatcggctttcagtgatcctgcat

SEQ ID NO: 152464 - DNA, 122 bp, Homo sapiens
cctagccttgagctccgggtagtcccagccctagattcagattccctcccagcaaggtgacgcttgcacgagtaggcaggaaatctggcgaccaggcctgcagtcctctgggcgaggacagc

SEQ ID NO: 152465 - DNA, 122 bp, Homo sapiens
aagacttgacactgaactagttgggaaaccctggcagagttgcttaacctctgcaagtatcgcttccttattcataagacagtcatgctacgctctactttgaaggtggtaataggacttgg

SEQ ID NO: 152466 - DNA, 122 bp, Homo sapiens
gtgaggcccttcactagaagacccctgaggcgccctctaactcagagccctgcagttcaacgcaggtgaaaggggaacatggagggtgacgcggcattgacagtgggatgcacgtgtcttcc

SEQ ID NO: 152467 - DNA, 122 bp, Homo sapiens
ggggggcgccgtggccgcaggtcagacctgggaagcagcgggagtctcggagctcctggacgccctcacccttggtggctgccgacacttggcccggggtctttttgttgagggttagggtc

SEQ ID NO: 152468 - DNA, 122 bp, Homo sapiens
acgttgaagaagagcttgttgttgacgatggtctcgaagatgttcatggactccaccagccggttggtgcgcctgtcctccatgaggacctggtcgtactcgctggaggagaccatgaacag

SEQ ID NO: 152469 - DNA, 122 bp, Homo sapiens
aaagcaaagccgcacaaacctgcgggaatcagagtgagggagatggaggtggaacagccacgcggcccgaggaagcagctacagaatgaagtctgttagttcccattcaggcaccagagtgg

SEQ ID NO: 152470 - DNA, 122 bp, Homo sapiens
catccctgagccgccacaccccaccttctgcctccatggaggggtgaggttgtgtgtggacgcctgtcctactcctgtttccccaggtattgagcctggaggaagacttgaattggtcccaa

SEQ ID NO: 152471 - DNA, 122 bp, Homo sapiens
agccaccagtaggtaacaggagctgtgtaccttatcagacacccctcctgggaatctattcgaaggaaatagttcaaaagaagaacaaagagatatatgcaaagatgctttaagcactagtc

SEQ ID NO: 152472 - DNA, 122 bp, Homo sapiens
cctaaaaatgaagtcagaaacggtgtaaagatcaaggctgccagccgtgaaagcggacggcgcagggttcacccttgtgggcctgcacgtcttgccgcctgtgcagctgaccttgtgtgtgc

SEQ ID NO: 152473 - DNA, 122 bp, Homo sapiens
tgctcaccacaatctttgcctctgatttttccttttaagggcttacctctgttctatttacggaattcaataggaaactaatctgcaaaaacaccaactttggtaagaaacatacattttga

SEQ ID NO: 152474 - DNA, 122 bp, Homo sapiens
gttagcacaatgagcatacacaaatgtgagtactcacgaaacactcattacaaagggacgcgttacactgactccaaaactctccttggtggcctaggtgaaacctcatggccaacatcacc

SEQ ID NO: 152475 - DNA, 122 bp, Homo sapiens
tctcctgtggaggctttagcggctcgtggacactgctcccccatttcctttcatttcccccgtcttctcagtgagatttccttggtgagttattggaggagaaaggaaggaaaactagaagc

SEQ ID NO: 152476 - DNA, 122 bp, Homo sapiens
tcagcagaaggcagaccaacagagaagggttgtgaccttctccaaccagcccaggcctcacgccgctgcatcgcagacccagtatcagcagcagagctacggagcacgtcatcctgggagtg

SEQ ID NO: 152477 - DNA, 122 bp, Homo sapiens
actggctttctcattaaggcccaggttttcacttgatccagagagaggtttcaagaacagcggacaggccacacccttccattcagaacggagagcctggcgtgggatttccaaaactccga

SEQ ID NO: 152478 - DNA, 122 bp, Homo sapiens
gtgggtggtgggcgtccgctgggacacgttgagcacgatgacgcaattcatgacaatgagcgtggcgaccaccatgacgaaaataaggaacctgaggagcccggaaggcatgacatcaccgt

SEQ ID NO: 152479 - DNA, 122 bp, Homo sapiens
aagtgctttaagccagagaggggatgggttgagctatggtaagatctgatttgccttgcccgaggcgctctgatcctgtgcagaggaaatattagggggcagttgaattggattaggagtta

SEQ ID NO: 152480 - DNA, 122 bp, Homo sapiens
ctctcacttaagttactagacgaaaagctgacacctgcagctcccactgacccacatgggcgagggaaaaggcctcaggagatggcctaggttcaaagtccctgtattttctctcctcttcc

SEQ ID NO: 152481 - DNA, 122 bp, Homo sapiens
caggctgttgaccgcacacctgctgcctccttggccaccctgtccacacagtagcccgatcgacccccgtggcggccgagacccaggcccatccgcagccctgagacctccctagggattgc

SEQ ID NO: 152482 - DNA, 122 bp, Homo sapiens
gacaaaaaggggagggggagtggagcggcgtggaggttggggggcgggctggagccttgccgtgtttaaccctttagtgacacgaatgaaaaaaaaaagccagaggcgaagttgagggtctt

SEQ ID NO: 152483 - DNA, 122 bp, Homo sapiens
tcttcgtcctggcacccaccatgcggtgcccagccagccctgcacttggtcggccctgctcgagaatccaacctggttccattttcaattttggaagcgttgttgcggattaaaaaccggtc

SEQ ID NO: 152484 - DNA, 122 bp, Homo sapiens
cacgaaggttctgtcttccaaaaaaaatgtacatgttcgtaattattccccagctgcctgcgtttgcaaccgaacctgacacctcggcttcacccgaacttacatgctgttgtgttttccct

SEQ ID NO: 152485 - DNA, 122 bp, Homo sapiens
acaaatataaaagttagccaggtgtggtggcacacagtacacctgtaatcctagctactccgaaggttgaggtggaaggatcgcttgagccaggaggctgaggttgcagtgagccaagatca

SEQ ID NO: 152486 - DNA, 122 bp, Homo sapiens
ccggccgcctggccccagctccaaggcggggaggcagtgggggcggccctcagcccctcccgcaccctgcccgagcgtcccgcccagcgccaggtcttgcgcccctctcccggctcggctcc

SEQ ID NO: 152487 - DNA, 122 bp, Homo sapiens
gccctagggaaggtggtcttgacgctttctattgaagtcaaacttgaaaatatcagctgccgctggactatggggctagcgggggaactgggagcgcgctagcatctgagccttagccccat

SEQ ID NO: 152488 - DNA, 122 bp, Homo sapiens
agaacgattaacagagctgcagaccagtgtttggggtcatctgagtggaaattgtcgagccgactttggctcatacgttccttttctcgttaaggagggagtgacggggcaaatctgcgtgc

SEQ ID NO: 152489 - DNA, 122 bp, Homo sapiens
cttctgtttaacacctccacaggtagctcaggtcgtgagtccactgaccctgagccagaccgggcagacccctccctgacctgggattgtgctggcacctggcatggatgagcatctgtggg

SEQ ID NO: 152490 - DNA, 122 bp, Homo sapiens
gccatgaagcggtgcacctgggagtggaccgagattgtgtgacccagagaaccggctctccgcgctcagctggagcaagcgcaccggcctacggatgtgtgactctcctcacagcccgagcg

SEQ ID NO: 152491 - DNA, 122 bp, Homo sapiens
cacgcgactgcaaaggcggccccgttgggctgagcgccgagtgcttgggaggcgaatggccgcccccgggacctcgggcccgggagtcggggcgagggaagcgcccggggcctgagggcagg

SEQ ID NO: 152492 - DNA, 122 bp, Homo sapiens
ttttaaaaactcaatttgtgttttccttggggagacagcatggtgaaatgaaggagcaatcgggtttaggagtcagataggcttgggtttaaatcctaattcagtcacgtgaccttaggcaa

SEQ ID NO: 152493 - DNA, 122 bp, Homo sapiens
atttcccagggagtgggggcactgcctgtcttctcacgcctcagttgcttgttgctgtgacggtcgcccactcctcctgccagtgtctgtgctgctcacggtagctgcatcagcttcacgct

SEQ ID NO: 152494 - DNA, 122 bp, Homo sapiens
accgcggaaatgcccatgggcgaggtcgccccgctacccctcgggaaaaacacacgcacgcgctaacaacaacaaacccagtccggcaacaccctcgcagtcggtcccggagtgcggaggcc

SEQ ID NO: 152495 - DNA, 122 bp, Homo sapiens
ctatctccttgtgttgtcgttgtctgattagtaagatgctgtcataaagagtattatcctcgagggttgctgagagggttcaaatagccaaagtgactaaacagggtctggccaagaccaaa

SEQ ID NO: 152496 - DNA, 122 bp, Homo sapiens
tgaccatcttagcatagtgtgtggcaatggtaagcactcagtgctgtcagctgtttttaccgctgttattatattactgtgttttcccatgtcattaggtctgtgatccaggcttcagcaga

SEQ ID NO: 152497 - DNA, 122 bp, Homo sapiens
agctgcggccgccgcgcactccccctctcccggagaaccccgagccgacgccgctgccgccgccgccgcgcactccccacccccgcccgcccaggtaacccaggaaaccgagaacaccaccc

SEQ ID NO: 152498 - DNA, 122 bp, Homo sapiens
acctgctttgatgaggcccagaagaagattttcaacctgatggagaaggattcctaccgccgcttcctcaagtctcgattctatcttgatttggtcaacccgtccagctgtggggcagaaaa

SEQ ID NO: 152499 - DNA, 122 bp, Homo sapiens
cacttacttcgttatccgcacgccttcctcgttggcatcagagccggacaaatcccaacccgcgccaggcaaagataaatgactcctggctcccccggcagctcagggggtctgggcggggg

SEQ ID NO: 152500 - DNA, 122 bp, Homo sapiens
agtttctgcttcacgtgtaccatgttcccggcggcctcctcgaagggcctgtgcggccgccggcccagctcccgcaggctgcacagcttgggcagccaggtccacgagccatctgcgggggg

SEQ ID NO: 152501 - DNA, 122 bp, Homo sapiens
tctcccagaagcctgaacagctgtgccctagctcgtagcagtggcactccaggaagggggcgggcggctgtgcccgagctcgtagcagtggcactccaggaagggggcgggcggctgtgtct

SEQ ID NO: 152502 - DNA, 122 bp, Homo sapiens
cctatacattctttgtcagtacattgattttaaagtcgttttataaaagttaatgactcacggggccatctgtgcaacttaaacacaatggcaacctatgcaggtggttgctgtgtgtcata

SEQ ID NO: 152503 - DNA, 122 bp, Homo sapiens
ccaagctccaaagagaagcctccagcaccagcctggggatggagctgcagcgacgaggaccgggaagctggaactacctcaccccgagcccagctcagcccagcccagcccagaaagggccc

SEQ ID NO: 152504 - DNA, 122 bp, Homo sapiens
agcgctcgccgcctcggtcctgaggagggcagtgacgggtacggccgctcactcccagctcggcgctaacacggttaacctccagctcttacagctgccgtcgctccgcctctgccagttca

SEQ ID NO: 152505 - DNA, 122 bp, Homo sapiens
taccgccagcgcgacagccacctggtgccaactcactgagccgcctgccgctggggccgccgcaccctgcaccttggaccggcatccgtagccatggacagaggtccctggtcttccctcat

SEQ ID NO: 152506 - DNA, 122 bp, Homo sapiens
caaaacaaagatggccgagacgactcccatgcccacacgcaaaatggacgctgactatgacgttccctgcaacaatcctcaactggccccgccccaccaatttggaaccccgcctcctcaac

SEQ ID NO: 152507 - DNA, 122 bp, Homo sapiens
tgggccactgccctggctacaccgggaagtctggagctagaaagtgggccgtgcgcgtgacgggcgcgcgtgacgccgagggggcaggtctgagaagcaggctgcgccgggattcggcggtc

SEQ ID NO: 152508 - DNA, 122 bp, Homo sapiens
gttgtggggtcccggggaaagactcgctggtcttgatcgtagggctccgggacttattgacgactggggtgtgtgtgcctgtaagtctcagtttccttggggaggtacacttcacttcatag

SEQ ID NO: 152509 - DNA, 122 bp, Homo sapiens
tctcagcagagccactgcaccttcagcccccaccaccgccctgaggcctggggaggcgaccggggcttggactcagactggcctggctggaatctggaccctccacttgcctgggttcttca

SEQ ID NO: 152510 - DNA, 122 bp, Homo sapiens
cgtcactctgaatcccgtctgtagtcttaagtgagatactaggtgacacattgtcttccacgcggcaatataataacggccaacatagtgttttaacacgtattaattcattaccccgcata

SEQ ID NO: 152511 - DNA, 122 bp, Homo sapiens
tttatggtaaagtatagctttagttgttgagctttgttcactctttgtgctcaagattgacgtggcgacagacttccaacattggtggctgctactgagggccaaagaggagatgtgtactc

SEQ ID NO: 152512 - DNA, 122 bp, Homo sapiens
atacagtactcattcaaagccaaagttaattaacataactagtattgatcttcttacctacgttattaccctgttcctttctatggtctacttcttcatttccttaatctagcctggtctaa

SEQ ID NO: 152513 - DNA, 122 bp, Homo sapiens
aaagtgcctgtaaatacactaggatatagctctgttagagaaggaaggaaaggaacatgccggtatgtcaagagcagccaagcacatctgtttgcctaaacacttctcagcagttgtactgg

SEQ ID NO: 152514 - DNA, 122 bp, Homo sapiens
acccactctcactctctacccaaggctcaggcttgtctcacgttgattggccagagcccacgagggcacgtccaatcagcaatcccccctgcgcaacctatcccggttcttcccgcccccgc

SEQ ID NO: 152515 - DNA, 122 bp, Homo sapiens
ccccagtaaccccaagtgacctgggtggacactgctctcctgttggtcacggttctctttcgctacaaccgacgaggacgctcgattgcttgattcttggtcttcaatgaccttatacctgt

SEQ ID NO: 152516 - DNA, 122 bp, Homo sapiens
gaggtggcggtggtccgagctggcagccgcaatgcagccccaggtagatctaggggcaaacggtaaaggcgctccgaggaagggcgagcgcgcagcctctgggagactacacctcccaggct

SEQ ID NO: 152517 - DNA, 122 bp, Homo sapiens
ctgcgcttcgcccagcacggcgtgcaggtggcacctgccactgaggcgctatcgggctggcggggctccttgcagcggaacgtggggggctccctgccacatagcctgcttgacagagccgc

SEQ ID NO: 152518 - DNA, 122 bp, Homo sapiens
caggggaactgtggctggggcaggcgtgggctggggaaggacatcgagagtagcttgggccgtcctcctgccccgcggttcccagcacgagctctcccgacagaagaggaaaacgcggcgcg

SEQ ID NO: 152519 - DNA, 122 bp, Homo sapiens
aaagcaataatctaaaaggatacaatatgtgcgcaacacagatgaaaagtataattgaatcgcaggcggaagggaaaagaaaaataatcctacaaaggaaggtagtcgttcagctgaaaatc

SEQ ID NO: 152520 - DNA, 122 bp, Homo sapiens
gcggcatctgcagcaagcgcgcatcgcgcaccccagggtagcagcgcaggtctggggctgcgccacagccgcgcccgcagagctatttttagccgctgcagccagcctagccaccagacggg

SEQ ID NO: 152521 - DNA, 122 bp, Homo sapiens
tttattaggttaaaggaaactcgactggagagcccggggcctcgcgccgcttgcgtctggcgagttgttgaagtgaagtcagtggcgctctgcaccttagcctggcccaggctccactgtgg

SEQ ID NO: 152522 - DNA, 122 bp, Homo sapiens
agacggccactcgctttggagcggcggcgaggccggcgccttcccgggcaccagggactgcgtggcttggccggaaatcaggctagaagcagctccgggaagcacagcccttagcccagcgc

SEQ ID NO: 152523 - DNA, 122 bp, Homo sapiens
tccaagcccggggcggacgacggcgggaaggcgcttccctacaggcgagaggagcaggctcgccctctggtcgtcgggccgcgcgcccgcaggtcccgccgggtcaccagggccgccagagg

SEQ ID NO: 152524 - DNA, 122 bp, Homo sapiens
ctcttttagaatttgtccagcaggtcttctagacttcactgaactgccccccaccccccccgcccacacaccaaaaaagatacaagaatgtaagcccagatgtggtgtggtatctggcataa

SEQ ID NO: 152525 - DNA, 122 bp, Homo sapiens
aaaatcctccaggaaaagaaaagcagcagaaaccatgaagtatggattattcgttaaatacgaaaggggcctgcaagagggcttctcctaatgaaatcgtggcacaatttcatgaagaaaca

SEQ ID NO: 152526 - DNA, 122 bp, Homo sapiens
taaaatgctctattcactctgaaaataatttagcaattactcaatctcacatgtctgcggcgtgacccctcctgcttctttaaatatcagctggggaagaggtctgagtaatacctaagagg

SEQ ID NO: 152527 - DNA, 122 bp, Homo sapiens
gctgtcgactcggtcgcgcggagggaattgagcgacggttttggaacggtggtggcggctcggctactgctcgtggaggggaatacaggttgtcaatttatacgctattaatgccgccgtgg

SEQ ID NO: 152528 - DNA, 122 bp, Homo sapiens
tgcgccgtctggctccacgcaggccccgcctccagacccgcctctaccgctcgcgctggccgccgcatgggaggggcctgaacctgtcccgccccgaacctgtcccgcccctggatccctcg

SEQ ID NO: 152529 - DNA, 122 bp, Homo sapiens
ggagggagacgtgcatctgggtagaagctgtgccataaggacagaactcccacagccagccgggtcactccttcctaccctctgggagcgttcccaccaactcttgtgatctcagaggcact

SEQ ID NO: 152530 - DNA, 122 bp, Homo sapiens
caggctaaataggcgtatccttcagcacagcccgacacacaggagaggtgtcctcttctgcgcagaactcttattcacccttcaagacccagtacgagtaacaggtctgtgaagacgccaga

SEQ ID NO: 152531 - DNA, 122 bp, Homo sapiens
ataaatctaaaggacagacgccccacctgtgagcttggagctgggttgcatttggtgaggcgcttggcccgcatccccctgagtcgtttgtaggtggctggggaatggaagcgcccctctgc

SEQ ID NO: 152532 - DNA, 122 bp, Homo sapiens
ccgggcccccgccggtccatctcccctctgaaggtacatgtacccaatcttccggctgagcgaatctccaacctggcttgcccacgaggatggctttctggctatttttggtccttaatgac

SEQ ID NO: 152533 - DNA, 122 bp, Homo sapiens
cctgtctgacagtcctcctttgcagtctctgactgcccacctggccctgactggagatttcggcactccacatcctcctggtccttctcctccaagtctgcccacccctgaggtctcttgct

SEQ ID NO: 152534 - DNA, 122 bp, Homo sapiens
gattggctgagttctctgaggtcggactagcgactgtccaatcaaaagcttcttcttcttcgggttttccgctgcgcgccccgcggtggcgggaaacgtaccatccgggattctctgttcct

SEQ ID NO: 152535 - DNA, 122 bp, Homo sapiens
cttaagcgtgcccgaggagcaggggacacattgaagttctttttctagggaaacaaacttcgaaaagcagtactgccttgggaggttcttttagtcacttgaaataacaaatgcaacttgtt

SEQ ID NO: 152536 - DNA, 122 bp, Homo sapiens
tttacacgaaatccccttggctaggatttccaaatttcctggctgtgaggcggcctggttcggcaactgttaccgatttctccctcaagaaagacacagccagggaggcaaatcggtaagag

SEQ ID NO: 152537 - DNA, 122 bp, Homo sapiens
tgggttcaatttcaaattgaatcaagaaatgattttgagtggctgctccatgccaggccccgttgtgaacctgatattgtccctggtccttctggcttcaaagcccactctaaggtaaccca

SEQ ID NO: 152538 - DNA, 122 bp, Homo sapiens
aaaaaaaataaatcaaaggcgagggccgagctgagctgagcatgcgcaccagggggacggcggaggcagggaaggaaatcgagcgccgcgcccctacccggcgccaggcccggggttgcgag

SEQ ID NO: 152539 - DNA, 122 bp, Homo sapiens
tcaaccaacatgccagtcaaactgaggacgaatccgttcattagtggattcctgggaaggcggctctaacttggctgatgcaactgcgagaaaaggtgggatggggtgcgtcacatgatcga

SEQ ID NO: 152540 - DNA, 122 bp, Homo sapiens
tctgcgggtcccgcccccacgtaggtctcggcccttcggacccggcgcccagcccccgttcgccctgccaggcccgggccgcccgcttgcatccacctcctgtccggacaaggggtcgcctc

SEQ ID NO: 152541 - DNA, 122 bp, Homo sapiens
ggatggagccccgcctgagcccttcgacttctcccgtggccgccaggcgcctcccctccgcgagacctcggccgcctctaactttctggttggctgagcgtcggcttccccggcacgggctg

SEQ ID NO: 152542 - DNA, 122 bp, Homo sapiens
cctcccggctgcgtgccgcgcgcccacaaatgcgaccaaaggacagggagctaaagcgcgcgggaagaagaaaaacaaaatctgtctaaccagtcgggttccttgtttatactgaaactacg

SEQ ID NO: 152543 - DNA, 122 bp, Homo sapiens
tgttaaaggtgaggaatgtagcctctgacagtagtgactctcttcataacactgatccaccgtgttatgcaaaataaatgaaggaaacattgaaataaatactagtttgctctgtcttacgt

SEQ ID NO: 152544 - DNA, 122 bp, Homo sapiens
ttgccccatgccaaccacacctttctgtctgccagcagtagaacctcagcctcaaggactcgccagctgaggcacctcgttgatccagttgccatggtgacctacattccaccttctgccca

SEQ ID NO: 152545 - DNA, 122 bp, Homo sapiens
atacaccgcacacagcagggcgcggggtatcgtggagccgcccgccttgggacgtttcatcgcaggcacagaccttcctcaagttcggacccttccaagttccttggctccttctccaagtg

SEQ ID NO: 152546 - DNA, 122 bp, Homo sapiens
gtcgctggcgccgctgcagagtttcaatcagaaggtgacgcgcaggtgcctttacctgagcgtcgctcctttgcttttaggcggctcagctcacaaggggcgtctccgctttaaagagccgc

SEQ ID NO: 152547 - DNA, 122 bp, Homo sapiens
ggctactaggaccttctgcacttgcaccgagcaagcagcgaaatggctgtggcttcgtaccggtgactcgcgtcttggagattttaacactcctcaacgtccccaagggtgagggggtccaa

SEQ ID NO: 152548 - DNA, 122 bp, Homo sapiens
cgctttcggtctcaactcctctccctgaggagagtggtttaaacggtgaaggctgcggggcgtcgccggaagtgtcgtaaacgtcggatatccggttcttctgggcgctaagggagctgacg

SEQ ID NO: 152549 - DNA, 122 bp, Homo sapiens
ggatgaataagaatcagcctgcaaaagatgtggcagggagggctggacttaccgctcagacgcaggccgagcaaagctgccgagaagaaattccgcgtcttccaggactggaaagaaacagc

SEQ ID NO: 152550 - DNA, 122 bp, Homo sapiens
ggggtgggggaggtgggaagggacggcttaggacagggcaggattgtggattgtttctgccgccttggttgcccatactgggcatctctgcaggcgcgtcggctccctccacccctgctgag

SEQ ID NO: 152551 - DNA, 122 bp, Homo sapiens
tgtagcttagaaaagtggagaaagtctcttactgcaggcgttcatgatagatggaaactccgtgtggtttccaaggccctcctcgatttgaagcatttcaagggagcggttgatgccttagc

SEQ ID NO: 152552 - DNA, 122 bp, Homo sapiens
acagatgcccctgtgttgggtgctctgggaagtgcccgaggctgcccgccctgccccctgcgcatgtggccccgccgcgccccgccccatcacctgtacatgcaggtcttctttagggagca

SEQ ID NO: 152553 - DNA, 122 bp, Homo sapiens
ataaccactttagctctactggcttccccccccaaaaaaaacctagcttccgacctgctccgaatgacttgaggtgaaaatctacagaggctaaagagatgtccttgcaaaaatgctacttc

SEQ ID NO: 152554 - DNA, 122 bp, Homo sapiens
tgagccaccgcgcccggcccctgcaaatggtttctgaggcagcggcagtgcagcaggcaccggcgctgaacggcttctgctgaatgaatgacacgggtgtcacagtgacagaggacaggcgt

SEQ ID NO: 152555 - DNA, 122 bp, Homo sapiens
tgggggaaaggggtaggggcaacgacgctgacttttggttaacaaagcccttccaggctgcggagcaacctcctctgcccttcacctgcccggcccatctctggccaagaagaccctgccgc

SEQ ID NO: 152556 - DNA, 122 bp, Homo sapiens
gagaaaacgtgacgaaaaccagtctgtaaaacccgagcctgggagaggggcttcggtgcgcggggggaatttgcagacgctccctgctggcggagatttcctgacctgtccttcggcgcggg

SEQ ID NO: 152557 - DNA, 122 bp, Homo sapiens
ataatcccacttctcactcccattgggtgccgggtttttagagaagccaatcagcttcgccgcgatcccggcactacgatcccggcactacagtcccggcgcaaccacccgcactcagattc

SEQ ID NO: 152558 - DNA, 122 bp, Homo sapiens
tcatctggcctcctatgtggacaaccatttcggagctccctgatatttttgccagcatttcgtaaatgtgcatacgtctgtgtgtgtgtgtgtgtgtgagagagagagagagagagtacacg

SEQ ID NO: 152559 - DNA, 122 bp, Homo sapiens
agataccaaactcatcaggcatctgtggagataagagcggcaggggatccactgggatcccgctaatcaggcctgcacttagaccccactgcctggccaacaggctggtgtcagaatgtatt

SEQ ID NO: 152560 - DNA, 122 bp, Homo sapiens
caggcactcttcaggcaaatctctggagcacccactgggtgccacacactgcggatgggacgcagggtaccgcacagccccggtcctcagggacccggcggggacagcactggtgaaaaacc

SEQ ID NO: 152561 - DNA, 122 bp, Homo sapiens
gcggcgccggggttcgcctctctggcttttgcccacgttacgtcatagacatgcgcgcgacgccgcgcctacgcattttcctgggcgggaacagcaaaatggcgccagaactagtggcgggc

SEQ ID NO: 152562 - DNA, 122 bp, Homo sapiens
ggtgtccagaaagaaggggcccgacaggtgagctcacctgtggctgaagcagtgggcggccgagaccacccagcgggctcgcagcaggaagcctccgcagtgatgttggcccccgaagcgca

SEQ ID NO: 152563 - DNA, 122 bp, Homo sapiens
caatttacaaaagttccttatagcacataataaattaccatgtaactacaaatgtcaggccgattttataaaaatcacaagcatgtttgtaattttgaacaaaatgtcatgttttaaataaa

SEQ ID NO: 152564 - DNA, 122 bp, Homo sapiens
cagcagctggggcgccgcagcggagctggagtcctgggagctggggtagtacttcttgtccgcgattctcacgcttaagacctggttttctcttctgcggtacagatggcaaatcaggcatc

SEQ ID NO: 152565 - DNA, 122 bp, Homo sapiens
acaggccccgcccacgccgaggccgcaccccgcctctcagccccgcccacaccccgcctccggctccaagctccgcccacgccacgccacgccaccgcagtccgcctccgggctcgtctagc

SEQ ID NO: 152566 - DNA, 122 bp, Homo sapiens
ccccttccgtgcttctgaacaggagcagcttcttagagccgacactccatcgagagttgtcggggatgggaggtcccctggcaggcactaggcttgccgctctgtgcgggggtccatttcca

SEQ ID NO: 152567 - DNA, 122 bp, Homo sapiens
aagcacttgctcattgagacttatcttcttggaacactccttggaaccttgcagccatgccgtaaggaagcccaaacaaccatgaagaaaggcccacatggaggagagaagggccaggggtt

SEQ ID NO: 152568 - DNA, 122 bp, Homo sapiens
gagataaattggtagactgtttttcccgggtcagccagccaggggttcggtgaataggagcgaacgctgctgccattcccttctcccctagttcatcctggaggctctccgctctccccctg

SEQ ID NO: 152569 - DNA, 122 bp, Homo sapiens
ggaggctagtagcctggggcaagttctcaatcctgctcccctactgcctggaaacaaattcggtgctttttgggggaacacagtagaagtgagatttgcttgttgggttgtgtgagagctgg

SEQ ID NO: 152570 - DNA, 122 bp, Homo sapiens
ggtggctggaacgtctgtctgtcgctgtccattttactttgccgctcccgaactggctgccggagctggagtctccccactagcaaacagtctccaatcccagaaatatctagaaccgagaa

SEQ ID NO: 152571 - DNA, 122 bp, Homo sapiens
ggaggcaaacatggagctggcttggagagctttagaccccctttcttgccttggggaccccgggatcctggcataggcctgccctgagtggggaaagacgatgtcagagtccctgggactgc

SEQ ID NO: 152572 - DNA, 122 bp, Homo sapiens
tgggaccaagaaaagggagtaattgaggtagtaatgtggggctgggaaaggggattgaggcggagaaaatgcacaggaaggtggtatagtgtagcaatgtgggcagagaaaagaggtgctgg

SEQ ID NO: 152573 - DNA, 122 bp, Homo sapiens
gcggagagggtggttctcaggagtggcagccatacagagagcagctgcccgtggagctgccgcttcctgctgttgtgttcaagagagagcagctgccggcctgtcagcaccccagggagtga

SEQ ID NO: 152574 - DNA, 122 bp, Homo sapiens
atgcctcctgcctcatttgtttcctactttcccttattgtgaacactgcaataaaaagaacgcttatgaagaggcagacatggaataagaaggaattggttctattttttttttacaatgta

SEQ ID NO: 152575 - DNA, 122 bp, Homo sapiens
tgccgagagcgcagctccgggtgtgacagttcagtgcagctggggcgtgaccccaccgcacgctggccgggcaaggtcaccgctccttcgccagcggggcctattccctttggagcttctcc

SEQ ID NO: 152576 - DNA, 122 bp, Homo sapiens
ccccgctagagggaaaggacggcggcgcgaatggggaagggtaaagcgggcacttcttttcgtggggctgttggtgaagagccccgtctcccatccctaaagttgcgcttgcaaactttttc

SEQ ID NO: 152577 - DNA, 122 bp, Homo sapiens
agcccctgttcaagatggagttggtctggctggaaggcctctgacgaaagcgcctcctcgcgtctctgttccgggatctttcatctccagggggctcctgcgtatgcggaaacgccctcccg

SEQ ID NO: 152578 - DNA, 122 bp, Homo sapiens
tgggacccgggtggccctcgtcatagaaggctgtgttgcccccagcaagagcaaagccaccgctccacgcctgcccggggaattggtggccgagcttatctgggaccactggtccacgcgat

SEQ ID NO: 152579 - DNA, 122 bp, Homo sapiens
tatctaggcccaaaactcagcttctggtgcatatcctgcatacactgtctacggtatttacgaaggcagttttcatcctctttctctttatggattagttcatattcttgaatgctcatctg

SEQ ID NO: 152580 - DNA, 122 bp, Homo sapiens
gagaagtctgacctgttcctgcttgtcctcactggccagtgccaggtgctcagaaaggtccgtgggctccatgaccactttattccaacagacgcgatgtgagcctaggcgcgctggcatct

SEQ ID NO: 152581 - DNA, 122 bp, Homo sapiens
tagcttacgtagtggaacagtaaatagtattaactggctaatgaccgacacagcaggctccgccacctctccctatgctcacccaatgatcacctcaccatcagcccaccctcagcctatag

SEQ ID NO: 152582 - DNA, 122 bp, Homo sapiens
tgtgacagatggggccgggctggtctcaaagccgttgcctagaactcaaccgtgggctggcgttacccttttgaactccccctgcctgctacaattcttctctgctctatcatgggtcccag

SEQ ID NO: 152583 - DNA, 122 bp, Homo sapiens
ttaagcacatatatttctgttattttccaccggacaggtctagagattgtgaattgactccgtagaaataaccatgaccaccttgagcccacacatttttatctcaatgccatttctcacaa

SEQ ID NO: 152584 - DNA, 122 bp, Homo sapiens
tctctccctgaggcccccttaaggttgaagcttctttagcagcttacaccctgcagaggccgaaacggagacgagtgtggtagtgatggggtttcacgactctgccgtcggtggcgaacggt

SEQ ID NO: 152585 - DNA, 122 bp, Homo sapiens
ttctcaggtgggcactttgaattccttccagtcaagactcaggtgttcaacttgttttgtcggccgtcttcctccacccttcttctcccattcaaaacaaaagtacgttttgtgcttaactt

SEQ ID NO: 152586 - DNA, 122 bp, Homo sapiens
cggcacctttccctgcatttccggggcctctctaggcgcctgatggggtgaggtgcatctcgctggtttatcgtcctagccccgcccgacgcagagggtcttgacggtttcccgcatcccga

SEQ ID NO: 152587 - DNA, 122 bp, Homo sapiens
cctgcaatacagcacatcccagagaccagcagaggctgtggccagcactgtccactgccccgcctccgcagcacagagacctcctcagtagcaggctcagccctgtcctgtgctgctggctc

SEQ ID NO: 152588 - DNA, 122 bp, Homo sapiens
caccccctactgcccgcggggccacctgtgtgtgcctttccttcaaaaacaaaggcggggcgggggcggaagtgcctcaaaagaaggcgggccgaagcgaggtgcggctccctgtcgccgcg

SEQ ID NO: 152589 - DNA, 122 bp, Homo sapiens
ttgcgcatcgctctgcgcctgcgcgccaccctagcgaccctgagagttaggggaagaggacgcctgcgcagtgatatgtactcgccgtctcctgcaactccatccgtaccgaacactgccgc

SEQ ID NO: 152590 - DNA, 122 bp, Homo sapiens
agacaggaacatcagggaggagatcagcatgaagaacgagttggtctgagccatgcttagcggcagtgaatctcttgcttaaggagcaaatcagcaatctctgtaggagaacacagggaaga

SEQ ID NO: 152591 - DNA, 122 bp, Homo sapiens
gaatccagaagcaaggaaagagggcctctgaggctccagccagctgtcacagaggccaagcgctctactcaggggaggctctattctgagcctgtttacctgtgggttatttgtaactcctg

SEQ ID NO: 152592 - DNA, 122 bp, Homo sapiens
cacagtccgtgggagtgggggctggtgggagctgggcgtgtccacctccctgggagaagccgggcacctcactcaggtgggggctggtcccactctgtctaagtcataccccctccccaggg

SEQ ID NO: 152593 - DNA, 122 bp, Homo sapiens
catccgaggcggcccctttgggaccataagtttgccctccctttgtaacctaattcttctcgccttttccttatgggcagctaattggcccgcggtgtggggctgggggtggggtgtcaagg

SEQ ID NO: 152594 - DNA, 122 bp, Homo sapiens
ggtttccgctccggggctcgtcggtcgccgttcggttccggttctggccccgccctcacgcgggaaccctccagaagtcttaatatccgggaccagaggctggttgcagcgcacatttccgg

SEQ ID NO: 152595 - DNA, 122 bp, Homo sapiens
aggaataatctaccctttgtttaccatatggatcaagaaataactataaatttactcagtcgagtagcccatactgctgctctgtctatggagtagccatttttttttactctgtggacttg

SEQ ID NO: 152596 - DNA, 122 bp, Homo sapiens
ccgggtgctgggctcctggctatccctgtgatggtagctcagcgagatctggggacctggcgctgagcgcgttgccagccgggatcttcctcttcatctaggcctgggcgctggcgtgagaa

SEQ ID NO: 152597 - DNA, 122 bp, Homo sapiens
caacactcccttctcccagggtcatgcagggatctgctccctcctgcttcccttaccagtcgtgcaccgctgactcccaggaagtctttcctgaagtctgaccacctttcttcttgcttcag

SEQ ID NO: 152598 - DNA, 122 bp, Homo sapiens
gacgcctgcgcggcgcaaacgctcccgggaggtgtagtttgcgcctatttcgcgcaggcgcgctttcccgcagcggccgcctgctgctctttgtggcagtcgcagtccttttgtgggagtcc

SEQ ID NO: 152599 - DNA, 122 bp, Homo sapiens
ggtggctgatgagggttcacggccacacactttccttttctgtttctctcactccagcatcgccagcatcttcatacccacgtcctagaagaacgtgccagtaaagtctgccaagccctcgc

SEQ ID NO: 152600 - DNA, 122 bp, Homo sapiens
aggggtcagggagttccgtttccgagtcaaagaaaggggtgacggacgcacctggaaaatcgggtcactcccaccggaatactgcgcttttccgaccggcttaaaaaaggggcgcgccacaa

SEQ ID NO: 152601 - DNA, 122 bp, Homo sapiens
tggcgcggtgcatcctgggataggctccggccccggccccggcggtggcagcggcatgtgcggagaaggctggcggctctggaacaggttgcctggttgccatgccaacccagggcctgtgt

SEQ ID NO: 152602 - DNA, 122 bp, Homo sapiens
gagagaggggccagctgtgggcgccgggctctgcaggcacagaggggagctgtcgcgctccgcggcccagggttccgcctggctggcaccacccctggaagggcagcccctcgtctcccggc

SEQ ID NO: 152603 - DNA, 122 bp, Homo sapiens
tttcgctgaactaagcaatcctttctcccctagaggtactgcagctgggagctttcagggcgtgtcttccccaccacccaacttctggaaccccagacttctcaattcctgtacccccaaga

SEQ ID NO: 152604 - DNA, 122 bp, Homo sapiens
ggtcactatcactcacttggggcagacaccataagcagctcggaaaggtccgggtacatgcggtcctcttgcaactgacggtcgatgagccgtccagcattttccagagcttcctgcagggc

SEQ ID NO: 152605 - DNA, 122 bp, Homo sapiens
cccaatacagatccgcctgatctcaaagcctgcgctctttatcattgcaccagcggatcccggtgggctatcaggaaatagcgattaattggtgaattcagtcgttcgttcaataaatattt

SEQ ID NO: 152606 - DNA, 122 bp, Homo sapiens
aggaacaggagggaaagttggactcagacagaaatcagatgcttccatgtattcagggcgcgcattgtgagcagtggagtatgagccttgagggcctcatggttgcagggcaggcttccctg

SEQ ID NO: 152607 - DNA, 122 bp, Homo sapiens
aatggcgtgtaaaaatttaatgtagccagattgacctgcagaaacttccgtttacatacacgctcactaaaatgggggagagagcccagaggggagtgtcttttccactgatctgatttaat

SEQ ID NO: 152608 - DNA, 122 bp, Homo sapiens
ataatgctgagataaaagaagcacataatttgattttttttaataaaattatattttggtcggaatgtgtaaagcttataggactcagtgtctgtgtgaggaacaaaataaagcgtgaagat

SEQ ID NO: 152609 - DNA, 122 bp, Homo sapiens
gaggcggacgttgtggtgagccgagatcacgctttcgcactccagcccgggcaagaagagcgaatctccctctcaaaacaaaagtcatttttagccgaacacagtggctcattcctgtaacc

SEQ ID NO: 152610 - DNA, 122 bp, Homo sapiens
gacacctaagccacagcgacgcctatgtcattcggatctgaggctccccaaacgaggacacgacggccaaggtggcagtttgtcccacgggaggacagtcgtttcttttccagcctcctggc

SEQ ID NO: 152611 - DNA, 122 bp, Homo sapiens
gcccgggagcagcccccatgacccacacgcacgtctgcagcagccccgctcacgccccggcgagcctcaacccaggcgtcctgcccctgctctgaccccgggtggcccctacccctggcgac

SEQ ID NO: 152612 - DNA, 122 bp, Homo sapiens
ccaagttcccatcaacaaggtggtctgggcagtggccagccagaaagcagtaattactgtcgaggtgcagggaccccaggtagggcccccacctcccacctctgtgtgggcagtgaatgggc

SEQ ID NO: 152613 - DNA, 122 bp, Homo sapiens
tttgtcattttattttgtgctgcaaatatttttgccattctcccgtttgtcttttcaaaacgttcattttttagttgaagacacttgatgataatgtacgaaggggccactcaaacacgggg

SEQ ID NO: 152614 - DNA, 122 bp, Homo sapiens
aatgaatttattttttcaagagaaaagggacttgatagtattatacagaatatccattgacgccagagtagttagtgaagtgaattttgatgggattgaaatgaaagaaccttattattcat

SEQ ID NO: 152615 - DNA, 122 bp, Homo sapiens
ctaaagcactctggggccaggccctgctccctagctcaggctgcctcatttgcccctccccgcccccaggtctgatccacgtgcacaggcggaagatgttccaggctacaatccgctcagtg

SEQ ID NO: 152616 - DNA, 122 bp, Homo sapiens
gggtgtccgaacaggcaggttggtgggttaaggtcttaatcttgactcgagatctctccccggagttcacagagtaggcgacgaagccgaagcagctggagcgcgacccggaggagtctgac

SEQ ID NO: 152617 - DNA, 122 bp, Homo sapiens
caattcagaaaccagctcccctgggggcaagtttggctctgtgctggttgctggagtcctcgaaactgaaaacaaatttactcaccacggaggtggagcccggccttaatcctagttttaaa

SEQ ID NO: 152618 - DNA, 122 bp, Homo sapiens
gtcctgtgtcgccaggtcgaagatcacagtgaggtagaggccctgccccatccccagggccgccaggcttgctccgtttgctttgagtttttagaccccagagggagatgagcttttccaag

SEQ ID NO: 152619 - DNA, 122 bp, Homo sapiens
gggggatcctggagtgctccttctgcacactggtgttctgcagcttgaacttgaacttctcgaagtcatagggcaccagctcctccagggtggacagcagatggtcactaggggtcttagcc

SEQ ID NO: 152620 - DNA, 122 bp, Homo sapiens
acgctcgccacaatgcccgcaaatttttgtatgtttattagagacagtgtttcaccatgtcggccaggctggtctcgaactcctgacctcaagtgatccgcccgcctcgtcctcccaaagtg

SEQ ID NO: 152621 - DNA, 122 bp, Homo sapiens
tggacctgcagttgctggatggacattgcttcctgatatcccacaggcactcagcctccacgagtccaaaactgaactcgacatcatcacctcgcctgcgtcttctgtctcaacttatggca

SEQ ID NO: 152622 - DNA, 122 bp, Homo sapiens
ttcagggcgcgtgtcagcacaaacacatcacacgggcttcgtgaccatgtgctggctgcacgagatgtcagtgtgctccgcgtaccacctgcttcatccccgccctgccctctcgtgctcct

SEQ ID NO: 152623 - DNA, 122 bp, Homo sapiens
aaacagttcactttcagtaatctggatttccccaaatagtgacacgagagccagtcatttcgaattggacagtttgagttcctcttcaagagtctgcaatgtaggtcagggctctgctgaca

SEQ ID NO: 152624 - DNA, 122 bp, Homo sapiens
gccgccgaaggagaggggtggagttcattggccgtacccttggggaccagtctggtggtccgggcgcctgcgggactgcaggtttccagggtcagtcggggagaggtggaaacccttttcgc

SEQ ID NO: 152625 - DNA, 122 bp, Homo sapiens
cttgcacaggtgaaacgtggccattaggtggcgccatcggataagggcaaggctgcgctgcgcagaggaaaccaggcttgttggttttcatgtggtctacagcagccaagactgaatcgagc

SEQ ID NO: 152626 - DNA, 122 bp, Homo sapiens
agggaacaaagggtgacctccctgcaggctccccgattccacaggaacgactcacagcctcggcctcggggctttgtgaaaccttctttaaacaataagtgctgagctgggcgcttcctctc

SEQ ID NO: 152627 - DNA, 122 bp, Homo sapiens
attaatatgaagcaaaagtcaaatattacctgcagggattctccctagcgctactcaagccgtcagacccacggcatgcacaatcttcctgatagaggagccgccggactcccttatttata

SEQ ID NO: 152628 - DNA, 122 bp, Homo sapiens
gaaagccgtccccatgccggtctcttttttctgccttcttgtttccctccggcgagtcagcgcgactgtgaatttccgtttccggcggtgtccatgctgacctgaggagtcgcggctgcgag

SEQ ID NO: 152629 - DNA, 122 bp, Homo sapiens
ggtctcatggaggagaactgaagatgagattagtctgctcttacagcttcttcctagaaacgacatatggcacttttctcacaggtcccttgcccaggggaaggcacacagtgatgcctacc

SEQ ID NO: 152630 - DNA, 122 bp, Homo sapiens
gtacgacgaccacgggccacccctcgctgcttagttgcccccagaagttagagttgctgccgtgggcgtcgctcctggggccaggcagcgcagaagggtcccattcaagggggaacctggga

SEQ ID NO: 152631 - DNA, 122 bp, Homo sapiens
cgcgcgctctgctctgcccttctctgcagcgccccctgtgagaaagtagggaattgcatgcgccccaacagagccgcgctatggagttaccagggatctggaaaaatacagtgatggaacgg

SEQ ID NO: 152632 - DNA, 122 bp, Homo sapiens
gctgtcagtccgcccccaaaaggcgcgcgggctgtcgatccgcctgtccggattggtggccgcgcgccgtccatgcaaatgaggccccgcccccatcatttgctcctccacctccccacgcc

SEQ ID NO: 152633 - DNA, 122 bp, Homo sapiens
gcgcgcgcactctctctctaagggaggtacgttttcctacagccattagatgttaacttacgtgaataaccataaatggatatgtacaggtagcatacaaataggaggacgggtgtctccac

SEQ ID NO: 152634 - DNA, 122 bp, Homo sapiens
ctccgggctagacgtcccgatggccatccctgtcatctggatgggtgcctgagtaacttacggcagaaagtggaagccctgggaaggggtggtcccccacttcagtccgggctcctcatcca

SEQ ID NO: 152635 - DNA, 122 bp, Homo sapiens
ttccgtaccgcaaaatggcgccattctaatcagaagagttgacacaatcaaatagccacacggcacgaagacgcatgcgtggcgacaacaacaacaaaaaccacaacccacattacttgagg

SEQ ID NO: 152636 - DNA, 122 bp, Homo sapiens
accagcagggagagagcatgcagccggtggaggcttctgagagctggccggggcggcctgcgtaaaaggacaggaatgtcaagaatgcacccggcctggcagagacagggactttaccgagc

SEQ ID NO: 152637 - DNA, 122 bp, Homo sapiens
tcctctttgttctcttcagttccttgcccaggacgacctagagatcaaagccagtggcaacgggagaggcaccatctcggtaggtcttgtattctactgtattagtctgtttaggctgctac

SEQ ID NO: 152638 - DNA, 122 bp, Homo sapiens
gacattcaaggaagccaaacctaaagttgtgaagagaacaatctagggtcacacagaaaccgtgtctgagacttctagcctagcatttttttttctttctctcttgtttattttcatgcagc

SEQ ID NO: 152639 - DNA, 122 bp, Homo sapiens
cagattcattttatttaagcgtccgtggcaccgacagggaccccagagcccagagaggggcggcgagaggccccaggtcacagcgcggggggactgggccgggctgggctgggggcgccgca

SEQ ID NO: 152640 - DNA, 122 bp, Homo sapiens
tcccgcgccccgcgaggtcccgccccgcgcatgagcgacgcaaacaccgccctcgcagcccgcgacagtcagcaccgccccagccaggcgcctgcgcgcccacgcactacctgccgggagtt

SEQ ID NO: 152641 - DNA, 122 bp, Homo sapiens
gcttcgttcaagatcagagaccggccaggtgcccaccgacgggagaatggatgaacacgccgtggcgttttgtgcagtggaatgtcactctgtagcagaaagggacaaatgacagcgtgggt

SEQ ID NO: 152642 - DNA, 122 bp, Homo sapiens
cagggccccgcggggctgggagagggcgggccccactaacccagagaagccgagggtgcccggcttcgccttcaggcggaccttctagagaaaaggaatgcagcggatgacctccgagctga

SEQ ID NO: 152643 - DNA, 122 bp, Homo sapiens
acagacaatgtcagatggtcataaaaagttatagagaaaaacagagactgtgagcaggatcggggtgggtggctattcattttgtagtatggtaaaacttgaaggtctcattggtaagatga

SEQ ID NO: 152644 - DNA, 122 bp, Homo sapiens
tgcagattctcccaggactctgggaggctaagcctgggtgatcacttgaacccagccattcggggctgcagggagctgtgctcatgccgctgtgctttagccagactgagatcttgtctctt

SEQ ID NO: 152645 - DNA, 122 bp, Homo sapiens
cggagggtgaccttggggaaatgttagtgaggtccggccacgtgctgcaggcggggcgggcgctccgggcgcggggggtgcgcgggtcctgcccactacgcgcccgcgggcctgcgcctcgc

SEQ ID NO: 152646 - DNA, 122 bp, Homo sapiens
gtgtgccacctagtggtgaaacctggctactacaggctgcgtctaggcgagaactcggagcgtggttgatttcattcaattttgttcacggcagggctgaggaagggaataagtgaaatgcc

SEQ ID NO: 152647 - DNA, 122 bp, Homo sapiens
gctaagggtgcttctggcatggagtgggttggggcagggacgctgctcagcaccctgcagcgcctaggacagccccacctcagagaacagtctggccccgacgtccacagggccgagtggga

SEQ ID NO: 152648 - DNA, 122 bp, Homo sapiens
ccccgccgcttctcagtcaacccaggacccaagttttcccaggaccccaacttcgggagtcggctttccggctccctggcgcaaccctgagggtggacgcccgaccccacccctgccctcgg

SEQ ID NO: 152649 - DNA, 122 bp, Homo sapiens
gcggcacaacgcacttcaacgcactgtaatccaccaggtgcggacacacctccttcagcacgcgccccttgttgtcccgtccagcaaaaggacagctcggccacagcaggtgaagccacctg

SEQ ID NO: 152650 - DNA, 122 bp, Homo sapiens
cctccctccgggatgagtgtggaaggcgctctgcaccaggagcactcagctttcccaggccgctgttgccgggcacaggctccgggcacacgagggggttccgtgcagcccgctttgcagag

SEQ ID NO: 152651 - DNA, 122 bp, Homo sapiens
ccccgcccacccacccacaggcggccgcccggcaccccggcacccacatgcctgctcccgcgtgaagttcttgtcgggccccaggaggtagggggtgatgaagctctcccctggccgtatct

SEQ ID NO: 152652 - DNA, 122 bp, Homo sapiens
gaggaagagcaggagcccgtccaagctgcctttgcaggaagcctgctgcctggtcggctccgtgtctgttgaacaatcttgtgtgcgttcctgcctctggcgccttgtgcaggtgcctccca

SEQ ID NO: 152653 - DNA, 122 bp, Homo sapiens
tcagcaactactttgtaaaattccagactctgaggacatggtaaaaaaacaaatcagctgcgtgtagtggctcacacctgtacacaacactttgggaggctgaggcagagggattgcttgag

SEQ ID NO: 152654 - DNA, 122 bp, Homo sapiens
ttgagctggatcagcttgaaagcagatcgggaacggtaacctggacaaaacaaccaagtgcgcaaactgcttcactagtaggatttctccggcctcgcaaccgaccaccccttctgcaggag

SEQ ID NO: 152655 - DNA, 122 bp, Homo sapiens
ccgccacaacctctcgctcaacgagtgcttcgtcaaggtgccccgcgacgacaagaagcccggcaagggcagttactggaccctggacccggactcctacaacatgttcgagaacggcagct

SEQ ID NO: 152656 - DNA, 122 bp, Homo sapiens
agggcttcagtttctccccggggtccgcgagggaagggggcagccggcggtgagcaggggcgtttgttattttgctccacgcctgggcagagccacgccccttgtcgcgctattggtggagt

SEQ ID NO: 152657 - DNA, 122 bp, Homo sapiens
ctgcggcgggcggagccgggggcgggcgctgaggggccgtggggccgcaagaggcgggagcgaggggagcagggcggggacgctgctcccaggagctcccggcgacgactcgggcctactgc

SEQ ID NO: 152658 - DNA, 122 bp, Homo sapiens
gtcagacccgtttccccccatcccccgacggcagcagcggcctctcggccccacccgactcgctgtgtcaattcttggttaagggaaaccctgtgcctgtgccccaggtagcatcctcaagc

SEQ ID NO: 152659 - DNA, 122 bp, Homo sapiens
gacagacccacatgttcccgctacccgcacagcgttcacgggtctcccttcccacggagtcggtggcttcccaggcagcctcccagcccaaaagggccagataaaacctcagagaccctctc

SEQ ID NO: 152660 - DNA, 122 bp, Homo sapiens
tcaaccctttcagagcctctcatctatcctagcattaaggaagttgtttgtgtgaagcttcgcactaatatatgtgaagcaatttagcatcacaaagctctgttgcatacatgataatactt

SEQ ID NO: 152661 - DNA, 122 bp, Homo sapiens
tgacagcacacgacacaaagggtcactcatgcctggcttcagctgtcacagcagcagaggcgcctcccccgcgaaacaacaagcacatcccctacaatcctgcgaaacaacaagcacatccc

SEQ ID NO: 152662 - DNA, 122 bp, Homo sapiens
cagggcggggccgctgagatgaagctgtggcacttgcggtgggtggagccgagacgtgcgcgcggatctggaggcaggactgcccttggggagggggcggagccaggcggagccttcgggcc

SEQ ID NO: 152663 - DNA, 122 bp, Homo sapiens
gccgcgcgtggtggccgaggtcagagctgggagcagggtcaggtcagggtccccccagtccgccccgcccggggcgatgtccgccaatgctcccgccagcctgaggccggccaggttcccaa

SEQ ID NO: 152664 - DNA, 122 bp, Homo sapiens
ccgcggcctccgctgccgccatccaccgctgggtgccgtctgcattccctcgccgcgccacggtgcttctctgttgccggctcacatcaaccgaggttccagatgggtgcaaggagatgtgg

SEQ ID NO: 152665 - DNA, 122 bp, Homo sapiens
atgaacagcagctgattctgacaggggcttgggccttacccaggacaagcctcgtgcctccgaacgcagcagcagtgggtggcgtgtgccgcccgtgatgggatttgacgtgaacagccttg

SEQ ID NO: 152666 - DNA, 122 bp, Homo sapiens
cccgccttcctgccctccgctgcctgtggctcctcacttccccggccgtgccgtcaggggcgctccagagcagccccggtgcccacgtctcatcgcagccctctggcaggacagcgcgcgtc

SEQ ID NO: 152667 - DNA, 122 bp, Homo sapiens
cttttgtcctaatagtttcctgaaaagtaccagttaaaaaggacctaaagggaataaacccggaaatataacaaggacatcttactgtggagttgatggaagagaaaaatagggaggagatg

SEQ ID NO: 152668 - DNA, 122 bp, Homo sapiens
tgtaatggggatgatgcaaacccaacccaggagcaaaagtctggctctgacaagaatcaacgctgccaaggaaccgcccccaggctcggcaccgcctctggtccccaggactagggggaggc

SEQ ID NO: 152669 - DNA, 122 bp, Homo sapiens
ctgcctacgttggggttacggcccaataaacccacagccaagctgaaaatcctaagtgtgcgtcttgcgcttccgacacagccagggcatcgctggatgcgcagaggcagggctggacacat

SEQ ID NO: 152670 - DNA, 122 bp, Homo sapiens
acgctattcccgagtccggtcacaagatggcggactggtccggcagaagacgagcagggacgaggaagcggggctaatgaacctgagatacagttagaagactggacagatttgctgttgga

SEQ ID NO: 152671 - DNA, 122 bp, Homo sapiens
cctgtaaaatataagctcacctctatgagagctaggcttttcccctatttaatgaattgccgtctctcctagtattgtgcctggcatatagtaggtgtttagtaagtatttgttatagaagc

SEQ ID NO: 152672 - DNA, 122 bp, Homo sapiens
ctggaggtgggctgtggtgctcctgctcccgtggtgagatgcgacccgtgcagcccttaccgcaccattacgggagactgcaataacaggtggcggggcttggggtgtgggggccgaccatt

SEQ ID NO: 152673 - DNA, 122 bp, Homo sapiens
gggtgctcccagcccagcaggcagcgctggacagtgaccccggagcgggaaccagggctgcgctgggcactgaccgggccctggtaccggggattcaccctccccggggtgttcctgggcct

SEQ ID NO: 152674 - DNA, 122 bp, Homo sapiens
agcggaggctgaggtgagcctagagcggcggttagagccggtgaggtgaaagagagcgaccgttaggacaggctgaggacttctggtctgttcggtacttgaactgccagcaaatttcaact

SEQ ID NO: 152675 - DNA, 122 bp, Homo sapiens
gggggtgccaagtgttgaactacttacagatgctgagtcctgcaggaagctctgagatggcgcctgtctttctggcgcgcccgcaggaagaggtttcagctgaaacagcccgcgagcttcat

SEQ ID NO: 152676 - DNA, 122 bp, Homo sapiens
atctgcggggtgctcctggtgggtgggatatgcggagtgctcagatcaggtgggaacctgcgggtgccccaggtgggggtcttgcggggtgcccagggctagaggggcccgctgggagcccg

SEQ ID NO: 152677 - DNA, 122 bp, Homo sapiens
aacagttattagggcactcctaaaaagactagtggatctcagactacccagctattcccacgtgctaagcagatatcttcaaggccatttcttgggaattgtgagggcaaaaggttttacac

SEQ ID NO: 152678 - DNA, 122 bp, Homo sapiens
acccgagctcaggccccgcccaggccttggcggcggcgctctccgtggtcctgccgcgcccgcagtctgggctttctgctcagctttgtcgctcaactgagctcctggggacacttgattta

SEQ ID NO: 152679 - DNA, 122 bp, Homo sapiens
ctccactttacagatgaagacactgaggctcaggaggtggcgtgactgctccgggtctcacgcttagtaaacggccgcagaaccctggtcggtttgacgcaagaccctggcggatcccagag

SEQ ID NO: 152680 - DNA, 122 bp, Homo sapiens
aaactaagtgaagctacaaaagagatgaggctgagagtgatcgtggagaaataataagcacgtatatttggtcaagcaaatattactttgcagtctgttagctacagttaaatatttaacac

SEQ ID NO: 152681 - DNA, 122 bp, Homo sapiens
tgcgggggacagggaccctaggacccgggccgggctcacctctctgccggcactgcgcggcgacacacagcagcaagaccaggagcacgcccccgcgcatctcgcctccgccgccactcggt

SEQ ID NO: 152682 - DNA, 122 bp, Homo sapiens
gacataataactggattatcccaggggccatcagcaagcagagctggaaacctgcaggtccgggtgggcccagcggtgccttgtaccttgatgggcagaatgacttctttgcttccaacagg

SEQ ID NO: 152683 - DNA, 122 bp, Homo sapiens
ggctggcaggagcaggttcaggagctgggccaaggtattctctgcttccgcctttgtgtccgcccccccgccccctgctccccgcttcccgccagcatctctccttttctgctcaggagtgt

SEQ ID NO: 152684 - DNA, 122 bp, Homo sapiens
gcggttggcggcggtgccggggttggcagcgcccgcgggttgtctacgccgcggggcctacgtctctgtcgggcgtgcacctcgggagccacacctggggcccagagccaccgctcagcacg

SEQ ID NO: 152685 - DNA, 122 bp, Homo sapiens
tttaatgttgtgtcatgtaattatggcttttatcatgcagaaaaaaatgtatagccataccgaagaaaggctttgtgcttctggaaaatcatgccttctctggcaaggcttcagctgttctg

SEQ ID NO: 152686 - DNA, 122 bp, Homo sapiens
ccgaggccgtcgctgggttgttccgagtggcgggaggtgcagctcgctgttgggcactggcggtggcggagcccagaagtctccgtggctgcccggcctcttgtccaagagtcctttgtgat

SEQ ID NO: 152687 - DNA, 122 bp, Homo sapiens
cacacacacacaccccccacacgcagcgcgcgccaatgagcccgggccaggcgcagggggcggggttttcccaggctcgagcacagcagctgctatttaccttcttggcttctcccggggac

SEQ ID NO: 152688 - DNA, 122 bp, Homo sapiens
ttaccccattctcaggaaagcccagttacttcgtgagttcagagcacttccttgctggggcgcctgctaagtggggtgagtttaactggagcacccctcccaacttttgggaaagagttcac

SEQ ID NO: 152689 - DNA, 122 bp, Homo sapiens
gactttttttttgaagatatattttcctcagcttcgacttaacacaaggctaagtaccagcggtcttaaagtttaaagattactacagctttcttaattatatttaattgcctttctacagc

SEQ ID NO: 152690 - DNA, 122 bp, Homo sapiens
tgcatggcttaggatcggcagcaaactgtgtgtgccaatcctgtaacagcaacaacaactcgaggaagctactttataattccattttgcggatgaggaaactgaggcccaaggaaataatt

SEQ ID NO: 152691 - DNA, 122 bp, Homo sapiens
tcttggaaatcggtcagctttctctggcagtggggcaaggggcctagggagctgggttggcgacgttgtcctccgactccgggttcactgggcggctgcaggctggttcctaagaaacccag

SEQ ID NO: 152692 - DNA, 122 bp, Homo sapiens
aggacctggaggggccggggcgagccgagagcaaagagagcgtgggctcccgggacagctcgaagagagagggcctcctggccacccaccctagacctggccaggagcgccctggggtggcc

SEQ ID NO: 152693 - DNA, 122 bp, Homo sapiens
tggtggcacgctgctggcagatgcctcgcaagccctggtgtggtgggtgctggaggcacccgcaggcaccccggtggcatggtgaccttcgagcgggcacggacagatgggcctcaccctgg

SEQ ID NO: 152694 - DNA, 122 bp, Homo sapiens
tctgggtgcgcttgtgtgcccctgtgaggctcctgggttccacggggcgcccaggttatacggatctcagagtcctgtatttattcggtgcttctaacttcatccactctgccttggaaaat

SEQ ID NO: 152695 - DNA, 122 bp, Homo sapiens
ggctgtccctacaataactcctgggctctgagccacttccccagatcccagccgctcccccggccttgccagctgagacttttggaacaggtccggactgggtttcactgttttcagatttc

SEQ ID NO: 152696 - DNA, 122 bp, Homo sapiens
gtggaggtagtccagtgtgctggagctgcgccagagcgggggtgggggccggcgctgagacgcggtgctagctggaggcggttcctgtccggggtgtgcgtccgcgtgcagggtgcgcgcgt

SEQ ID NO: 152697 - DNA, 122 bp, Homo sapiens
cttagggcgggacgtgcaaggcgattggcgaatgcaggcgagaggcggtcgctattggtccgcggcgctgtcggctcggcgggcggtgcccggacgcaggtgccggccggagcggagctagt

SEQ ID NO: 152698 - DNA, 122 bp, Homo sapiens
cacccgcccagaggctgggcgttggagggatgaagggcagctggtgaggcggggacctgacgcgcaagcctgtgtcccccagcagtaaagagtcagggctgggaagtaggaaaaggaatctc

SEQ ID NO: 152699 - DNA, 122 bp, Homo sapiens
tttcatgtttagatccataaatatttaccactatgttgcagttgcctacagtattcaggacggtcacatgctgtacaggtttggtagctaggagcaataggctacaccatatagcttgggcg

SEQ ID NO: 152700 - DNA, 122 bp, Homo sapiens
cacatgcccctcctcagagcctttccgggaagcctgtgcaggagcgcgtgggggctcctgcggaggggcagccagcatctgaccccagcacccctcctggggactctgcagagagcctgtag

SEQ ID NO: 152701 - DNA, 122 bp, Homo sapiens
gtggcatggtcccaaagcctttctgttccccctatctccacttttcggtttttagaataacgatccccagcctttaagttttctataggattcgttagccagtggctattaagtgctgtcac

SEQ ID NO: 152702 - DNA, 122 bp, Homo sapiens
tccctggcttgacctggaggtagcaattccttcaagccatttgctcatcttacattggttcgtgggccatggaatggtgtcgagagctttctgcctatcttccaaggaggtttaggtcctgc

SEQ ID NO: 152703 - DNA, 122 bp, Homo sapiens
agctcggaggggggcgcccagccgaaggaaggcctcacctcggcgtgcgcgccgcggagccgctgctgcccctcgaagtgacaggcgctttccccagtggcgctgccgccctctgagcccgg

SEQ ID NO: 152704 - DNA, 122 bp, Homo sapiens
gtctccgccctccgcactggggctgcggaacttgaagctctggccacgatgggcggggcgcggcggggccaatggcagggcggccttcagataggcggtggggacattcaaatagctgctcc

SEQ ID NO: 152705 - DNA, 122 bp, Homo sapiens
cgctatctcaaacaaacaaacaaacaaacaaacagttacacgggcagcatgcgaactcagcgtactcagggaggcagataaaagccgagaccaaagtgaaggagcccagctgcaaattcaac

SEQ ID NO: 152706 - DNA, 122 bp, Homo sapiens
tttgtttcataatcattgagctctctgccttctctctcttttttggtatggtaacaaattcgacaaaatcaatgccatctagttaaactttttgattaagtagtggatccggtgtcctatcc

SEQ ID NO: 152707 - DNA, 122 bp, Homo sapiens
tgaccatctacgttctgcgccgacaagctttgatgttactgcacggccacaccgaggaaccgcctggactaagtctggatttcctgaagtgctgcaagaggaatacggccgaggaagagaac

SEQ ID NO: 152708 - DNA, 122 bp, Homo sapiens
tcttccctgagcagaaggccaaagttacggcctctgagcaagaatatcaacagccgcaggcgttgaccattcaaaccttccgccagcccagtaacctatccccgctcgcctctaagctgcgt

SEQ ID NO: 152709 - DNA, 122 bp, Homo sapiens
agatatttgcagctttgggggacagcgagagtcgtacggggtcatttcggccctcaagatcgggggtggtggagagggaggtcatagaggactttcgatgggcggttcatccagagaggtgg

SEQ ID NO: 152710 - DNA, 122 bp, Homo sapiens
ataggacccaggttcagcgatgtgactacttgtccaaggtcacacagcgagctggggactcggggaccagtgtcggatctcccacccggttgggacttctgagcgcacaggggcaagatatg

SEQ ID NO: 152711 - DNA, 122 bp, Homo sapiens
aggtaaagcccattgtgtgtctgtgtcatgtaaaaatgttttcacccgagttgcatgtaacgctctgaggccagccagctgtcttctcctggatgagacagactccagagggtaaggagcta

SEQ ID NO: 152712 - DNA, 122 bp, Homo sapiens
taagagaacagatcagcccgggggagcaagcaagaaaccgacaagaaagcagagaaggagcgacagaaatcaaagagaaggaaagctagatagagatgcagagacagagacaaagcttcgaa

SEQ ID NO: 152713 - DNA, 122 bp, Homo sapiens
cggctttagtgttgccagggcaggtgggagtcccagctgggccggctttggcgcgcctcgcgcggctgccgagcggtggagcagccttcccgccttcccgccgcgtcgccggcgcggctcta

SEQ ID NO: 152714 - DNA, 122 bp, Homo sapiens
ctcagagcttccgtgtcggcatgagcctgtcatgaaaatcaagaaatagtcagacctgcacgtcagggtggtgtctggtgagtgagagtgctcagaggcagagtgaacgcggctcggttttc

SEQ ID NO: 152715 - DNA, 122 bp, Homo sapiens
ggggctgcggtcggagggcggcgcccaagttttcttgaaggcctcggagggcagctggagcggcgtagagcctgcgcggggatggcgggggtggccgcgggccggggccgtctgggggcggc

SEQ ID NO: 152716 - DNA, 122 bp, Homo sapiens
ctagagctcgcctgtaggtggcgccctgcttcgctcaggggaatttggagggcgaggacacgggtcaccagctgcctcccctgaaggccaatttaagttgtcccctggcttgaactgagcgc

SEQ ID NO: 152717 - DNA, 122 bp, Homo sapiens
acaaaagtggtgaggtgttttttggcttttaattttagctgcttgcctctgtttttagttcgtgtgattgcctccgcaaaggcagtgaatggagaattctccctaaggtcagcatttaatta

SEQ ID NO: 152718 - DNA, 122 bp, Homo sapiens
accaatctgtaccctacaccccacctccgctccaaaaaaattcatccaatctacaaatatcgatttaatgcctatagtgtgccagtcactttagcaaacaagccaaaaatgatccctgctct

SEQ ID NO: 152719 - DNA, 122 bp, Homo sapiens
acacacttatttaactataggcaggaggtttcttatgaattgaagagaaacttttctttgcgtgggaagctgttctaaagttgggtaaaacacaatagatccaccacctctagcagccactg

SEQ ID NO: 152720 - DNA, 122 bp, Homo sapiens
ctaaacttggggagcgcgtaggctcatgggaaatagagtctgttacttgtcctgggaccgcggtgggtgtccggggaggcggacttccggtgcactcctgcgcgtgtgcacctctccctgcg

SEQ ID NO: 152721 - DNA, 122 bp, Homo sapiens
ggctccagcgccagccaggctcccccagtggaaaccgggacagttgtccttcacagtgaccgggacataaatccccaaataatgagacaggcactgggaacacagaaccagacacagtgcta

SEQ ID NO: 152722 - DNA, 122 bp, Homo sapiens
tccccccggcttccccgcccctctcttcctccttctttccctcctccctctcccggcgcccgaaaggatcattgttagccgcccccgccccgcccaccccggctgtttatttatgcacacgt

SEQ ID NO: 152723 - DNA, 122 bp, Homo sapiens
tgctgcctggcccagccagcgcagcctcccaaggattaaacagaaatcgccttcctgagacggggaggttccatcttggcctgaaattctgcttccaagttcatgttgtggggccggggagc

SEQ ID NO: 152724 - DNA, 122 bp, Homo sapiens
atatctgaaagacgagacagggcttgtatttaaccacagacgaaaaaggctagttgttaacggctgctggaagacctcagaatgtgcagaacagagaatccagagggggcagcagagagcaa

SEQ ID NO: 152725 - DNA, 122 bp, Homo sapiens
cgggggtgaggaggagagtagcgccgagagcctggtgggcagcagcggcgggagcagcagcgacgagacccgctcgttgagccccggcgccgccagcagcagcagcggggatggggacggca

SEQ ID NO: 152726 - DNA, 122 bp, Homo sapiens
gtcgctcccacgcaggtcagagggctcccgtgcaggtcactcccaggcaggtggctcccgcgcaggtcaggcggctcctgtgcaggtcgctcctgggcaggtcgctcccgcgcagggcaggc

SEQ ID NO: 152727 - DNA, 122 bp, Homo sapiens
ggcaggtttgcgcagccctgcggcgatttcaaggcaagtgaccggaatgggtcggaagcgcgtcccggtgagtttcagggagcgtcccttaggtttccgggggcggcgttgaacctccctag

SEQ ID NO: 152728 - DNA, 122 bp, Homo sapiens
caattctactctttctgtctctctctctctgccactgaccatcttaaaacacaactgggacggccctcctcctgtcttgcacctgcaggggcaggctgccgcttagagaaaaagccgagact

SEQ ID NO: 152729 - DNA, 122 bp, Homo sapiens
ggaacgaactcaaggctaacagctgttctgtattcagagccgcacaatcaaggaaaaacacgatcggaggcgggccctggacgggaacaagaagggtgggcttgactgggcggcccgcggtc

SEQ ID NO: 152730 - DNA, 122 bp, Homo sapiens
atctaatcatctctgtaacatttcctgcaaggtaacaacttttaatgtttagataaacaccgaagagcctgtttactctaccacctagtacccaagtgtcttctgacttgtttaaacctgaa

SEQ ID NO: 152731 - DNA, 122 bp, Homo sapiens
gctccctcagtgcccccctagcagccccggcggtcttctccccaccttcagccccctccccggtcccccaggaaggggccagactccagctcagcacccagcgcttcctggtctttcccttc

SEQ ID NO: 152732 - DNA, 122 bp, Homo sapiens
agcagcaacaagttttgcatttcagcaatcaatttcagccattacatttgcaccaatcagcgccgcccaagttccgggctcggggcggggctcgctcttaaggtggtccggggtcctggctg

SEQ ID NO: 152733 - DNA, 122 bp, Homo sapiens
tgtgacatgctcaggggtgacgcgcctcccgaaagagacacttggtagagaaggcacgggcgcgaagcccggctgcgggagagctgggagcctgaatgtcgctggctgccgttcacagcagg

SEQ ID NO: 152734 - DNA, 122 bp, Homo sapiens
ttacccctaaaacaaaaacactgtcacgtgggcaatgaaatataaaggttcttccacccccgatgacaaagttattagcaaactcaaaaccaaaaataaacaaggcattgaggtgctgtctg

SEQ ID NO: 152735 - DNA, 122 bp, Homo sapiens
ctccttgcacatcggtggaactttaggcacaagaaggtaagcaacgaagatagtgatatacgaagggaaaactaaacccaggtagcgttgccagcttaaaagtcctaggcatggggatgggt

SEQ ID NO: 152736 - DNA, 122 bp, Homo sapiens
gcaggaaatgtcagtcagggtcagcaggagaactcagagatcttcaggggactcactacccgctctggggctggactggatttagtgatgaaattcaagctgagagcctacagtggccacca

SEQ ID NO: 152737 - DNA, 122 bp, Homo sapiens
aaaatgtgcttgtatttattggttaactttttagcaatggaaattgtagagaaggacacacgtagagagctggaagtgataaattctcctggcaggaggccaaagaccttaagtaattgatg

SEQ ID NO: 152738 - DNA, 122 bp, Homo sapiens
agactacttctttgtcactaatatttaaattgttaagaaaaaaaaaacaacaaaaggagccgaaatggaaagacttgaatggtcaacagaaaacagggaccttaatccgaatagttttagag

SEQ ID NO: 152739 - DNA, 122 bp, Homo sapiens
atgcaaatgttcttggacatcctggaactgtaatgtaaagggctgcaaatggctacatagcgatccaatgccattgaagcaaggaagtaaaactcagtgatcactagggcgatgaagagaag

SEQ ID NO: 152740 - DNA, 122 bp, Homo sapiens
tgagattctcttgaatattatcagcatgacctaatttggacctaagagctatgacccccccggctgagcaacaccaactgagtacattccaagcctcaccaaaccggttggcaaaggaactg

SEQ ID NO: 152741 - DNA, 122 bp, Homo sapiens
actcttgagagccccagtgtcactttacctcgaccatgatgctaccgtgtatcccacctccggcagggaagaaactctaatcactaacgcagtacccgccgccacagctgtgcagcaccttc

SEQ ID NO: 152742 - DNA, 122 bp, Homo sapiens
aaatatgtgtgtattgttgttgttgttttaaatcctctttggaacattatgacccataggcggaaatagaatttacagtaatgccaaggattaaaaggaatgagcctcttgtttagaaaatt

SEQ ID NO: 152743 - DNA, 122 bp, Homo sapiens
ccaaactttctacattcacagacacctaccaaaccccgaacatggaacaccaaattagaacgctgaccagttcctggtaatgtagaaaacacccaagttaaaacggcaacagagtgacacag

SEQ ID NO: 152744 - DNA, 122 bp, Homo sapiens
tgggcgctttaaacaaatggctgcctcccagcgctctgagttaagggaccggctacctagcgtctagctgaggaggaagacgcgcagctggagaactgttgcctttgtagttgcttctcccg

SEQ ID NO: 152745 - DNA, 122 bp, Homo sapiens
catgcccccacccaagtctcccccaggagctacagaaacaggcctggttcttatgcagagcgcccagtgccctccccaggagggggctgctcccttccggggacttctcctgccagcctcta

SEQ ID NO: 152746 - DNA, 122 bp, Homo sapiens
cgcgcacgcgcggcagcttcttctagccccgccaggagacggcccagaagggctatgcggcgcggcctcgctcctgggggtggttaggaacgactgtttcatttcctccttcacccttcaaa

SEQ ID NO: 152747 - DNA, 122 bp, Homo sapiens
gagacttttgtcattctaaaaccctaagtcagctttgaattcagctcttggggaagcctccgaggacatctggtctatgcagagatcctacctaaatcagtacctaatggttaacaaatgcg

SEQ ID NO: 152748 - DNA, 122 bp, Homo sapiens
attacttcatagtacagctggtactgcaaatagtaggtactcaataatgtaaattccccacgcacaccctctgcagttagtgccctgcaggtctgctttcaggctgtcctgaaagccagttc

SEQ ID NO: 152749 - DNA, 122 bp, Homo sapiens
cactatgcagggtacccacgaggcggaggccagcaggcgccgggcccggccaaagccgcccgcagctctcagcacccgcgcctcctgctccatcggtcgcaggctgcgctcgggacggggcg

SEQ ID NO: 152750 - DNA, 122 bp, Homo sapiens
aggacgatcggctgacgccagcgaggacacggtggcggccactgactcctgccggagcagcgaattggaagggatgaagtcctggtccatgaggtcatgggactcctcccatggaatgtggc

SEQ ID NO: 152751 - DNA, 122 bp, Homo sapiens
ctgccagctgtgcgaccgcaccccgccagagccagcagccacgctctgcgagcagtgcgacgtcctctactgctctgcctgccagctcaagtgccatccatcccggggacccttcgccaagc

SEQ ID NO: 152752 - DNA, 122 bp, Homo sapiens
tagttcatctgctggccggctctcagtccccgtggcgccccctttcctcttgtcccagagcgctctcgactccaccatgccaaggggattcctggtgaagcgaactaaacggacaggcggct

SEQ ID NO: 152753 - DNA, 122 bp, Homo sapiens
ttctaaacgttaaagtgttgaactcccacattctgtttaagaaggacaatcctgagcacacgattagccttgtaaactttagactgacaggccaggtgcagtggctcacgcctttaatcgca

SEQ ID NO: 152754 - DNA, 122 bp, Homo sapiens
gggcttcggtccggcgctaggcagcgcgctgcatgcggcgcgagtccttctggccggcttcgccttctgtgatgcctttttgcaggtgctgagtttccccttgcagttcatgattttcaaaa

SEQ ID NO: 152755 - DNA, 122 bp, Homo sapiens
ctccctccttattttggcaggatgacaagagaaactcttggtgaataaaagggattagggcgaacaaaaatcataaagaatagcatttccaaaagtgtgtctcttggatcacacagatttcg

SEQ ID NO: 152756 - DNA, 122 bp, Homo sapiens
ctcctttttggccactcctgctgaaggtgcgggttgagggctctgggcttctcggtagtacgcgtttcccagtttccccctagccagtccctcatgtcttcctctgctgatggagaaatggg

SEQ ID NO: 152757 - DNA, 122 bp, Homo sapiens
taaaattacaaaccggcggccgccgcgggcagctgggaggaggtgtgcgcgctgcgcccgcgagctcccgggctcggcaaccgtggcatgcttaggattggccatatttaaaagttctgaag

SEQ ID NO: 152758 - DNA, 122 bp, Homo sapiens
ccagtgcggcccttgctgaggactcgagcgaacagatctctacccagcccccgccccacgcgcacccagcctgggtcagctcgccctgcccgcagccacgcagctggtggctaagcgcgggc

SEQ ID NO: 152759 - DNA, 122 bp, Homo sapiens
ttccacatcattttccgtgaaaaatgatttatcgaagacatggccataaacaacacaactcgctcacaaacacacgcagacgcgcacgcacacacacgcgcggacacacacacacacaatgg

SEQ ID NO: 152760 - DNA, 122 bp, Homo sapiens
gaacaagtgaccaaaacgcttaagagcccatcacgcaaattgttatctgctggaaatctacgccctaggctgtggacactggcggccgaaatctgatcccggcttgccaagacaccctcaga

SEQ ID NO: 152761 - DNA, 122 bp, Homo sapiens
atcccctttccgggcagccgccggggctcggggctgtgagcggccgtgaggctgcctccccgggccccctgcctccgccatgttccgcagggcacgccttagcgtgaagccgaatgtcaggc

SEQ ID NO: 152762 - DNA, 122 bp, Homo sapiens
taggggtgtgtaaaaagcacaatcgcacaggacagctatgaggcaagacaaagtggctggcgagttcagtttgcggggcggtttcctaaggatcggataagcctatctggactatttaggca

SEQ ID NO: 152763 - DNA, 122 bp, Homo sapiens
ggaggcggccgggctgagggagcgccgctgatggtggtcttggccaacctccacccccagcgggagacaacagaggctccaagttacattcggtttccgacgcagcatccggtccacaggcc

SEQ ID NO: 152764 - DNA, 122 bp, Homo sapiens
agccctgaccacctgggaggcacaggagggccaacccctgcccggcctgggcagccttgacgctttggggcacaatttagctcaggttcaatttgaaatactgtatgaggtgcccttaggtt

SEQ ID NO: 152765 - DNA, 122 bp, Homo sapiens
cagccaggaggcccttagaaagacctaccacctccaccgcgttatgaacatgcatgagctcggggcccaaggtcccggggtagcccgccctccgaagccgaaaaccacagggaccagggcct

SEQ ID NO: 152766 - DNA, 122 bp, Homo sapiens
gtcgttcttgcacactcgggccacgcgggacaccaccacctgggcgtgacagtggacggacgggggcctgagctctgtgtcccaggaaggcctgttcacaggctgtgccactcaccacccaa

SEQ ID NO: 152767 - DNA, 122 bp, Homo sapiens
tccctactccactgcggcatgctcctgaatccgtcctggcttcgagcagaaccaagtgagcgccgtccattcatgcccttcgtggagtgcgtgactgcagtgatacctcgaagtgtcagatg

SEQ ID NO: 152768 - DNA, 122 bp, Homo sapiens
cctctctgctctgttcttgtctctgccttcattcccgaatggatctggtaggagtggcatcgcctgagcccgggacggcagcggcctggggacccagcaaggtaagtggcagacgagactgg

SEQ ID NO: 152769 - DNA, 122 bp, Homo sapiens
aactggcctttcaggtggggtaagatggcgaaaggtggggtggaggggaaggacccaccacgcaggaccagaagcagtcacaggaagaggtagtgagaacaccctggaaacggcccaggtgg

SEQ ID NO: 152770 - DNA, 122 bp, Homo sapiens
gtcccaagggctgctggtggcccatttttatggttatttcttgatgatatgctaaacaagcggtagattattcatgcctcccctttttagaccatatatggtaacttcctgacgttgctatg

SEQ ID NO: 152771 - DNA, 122 bp, Homo sapiens
tggtttacccatgactgaggggatttttagaaagtgagactttcagtgctaaaatcaggacggtcttgggcaaaccaggaagatcgagcatgctatcaatctcccggctttcaattttatgt

SEQ ID NO: 152772 - DNA, 122 bp, Homo sapiens
aggctgcctccttgctctgtaccccggccgtcctctccagcagagcctccagcctgaacacggtgccctcctgggtgctcccacagaccctggcctgcacagcccagcacatccccggtatc

SEQ ID NO: 152773 - DNA, 122 bp, Homo sapiens
acagtggtcttgtactctgctgaaccctgtgatgaactgtagtcctcaaactcatggactcggatccaggttcaccaagacacttcagtatgcttccaactgtttcatcatcatcttcctgc

SEQ ID NO: 152774 - DNA, 122 bp, Homo sapiens
catttcaataaaacctaagcgactcctgatcctttctcattgtggttccttatgagctttcggtgtctggcggggaaacagttaccgttcgggggtgtggcaaacttttttggcaattaaga

SEQ ID NO: 152775 - DNA, 122 bp, Homo sapiens
gcccctgggctctctctctagtcccatgaacatctaccacaatttactcagaaaaagagccgctgtggagacccagctctaccttgtgctccaggctggagtctttaaacatcagtgagaat

SEQ ID NO: 152776 - DNA, 122 bp, Homo sapiens
aggagctcgcggttccccagaggggcgggcctgcgtccgggtaaccgtgcgcgacgtccacgagtttttaggacgaccagcccttcagcctctaggccccgacgcctgcgccatttaagcca

SEQ ID NO: 152777 - DNA, 122 bp, Homo sapiens
gttagctttgcatactaaaaaatttctcaggtgatgatagaggaaagctattgacaatgccgatgtctctatcagaataggttttctgatgaacctggatggaacaacacaatctaacaacg

SEQ ID NO: 152778 - DNA, 122 bp, Homo sapiens
caggaagaagtagcccctctactaccactgagagagtcacaagtccctccaggtgacgagcgctcagcccccttcttagtttatgaccctttttcttcttctgtcttatataattagaaaac

SEQ ID NO: 152779 - DNA, 122 bp, Homo sapiens
cctagcataattcatgtctttctttaagaaacccatcggacccacaaagatcaaaatcttcggtaacacaccaaactggcgacgctgtggggaagcaagcactctcccaagtggctggcgcg

SEQ ID NO: 152780 - DNA, 122 bp, Homo sapiens
gcggacctctggctcccgctcctttgggcacccgcggtgcggccagaccgctcctgccagcgactctctggctggcaagggagaggaggtggagttcagactggcccctcacgcccagagtg

SEQ ID NO: 152781 - DNA, 122 bp, Homo sapiens
cgagagcagaagattatgatctctgatgctgccttagggctgaagacactcccaactcggcgacgcttagcaatcatcgacttcctcctcctcttggctgcctcggagatcctgttccgggg

SEQ ID NO: 152782 - DNA, 122 bp, Homo sapiens
tgagcgaagcaaggctggggagctccgagcgccgacagcaggaggaggagggtgaccctgcggtgtaacacaggaaggtctgaccgggtggccctgccgccacttgcccacgtcactccacc

SEQ ID NO: 152783 - DNA, 122 bp, Homo sapiens
ccccacgggccgcctaagcggagactctggaaacgcctggggcgggtaccgggtggtctccgcgtccttccctttcaactgttacgtcgatgtggacttcagtcacccgtacaaagctgggc

SEQ ID NO: 152784 - DNA, 122 bp, Homo sapiens
gctgcctttcccaggccttctggtccttgcgcgcgtcgcgtttgagccggcttgccggcgcgactcggctggaatgttagttttgtgggctcacgagctgcctcaattctgcgagtgtttga

SEQ ID NO: 152785 - DNA, 122 bp, Homo sapiens
gctgggcgcgccggggcgcacgcacgccggtttgctggcgacctggcgcatctgcccgcgcgccctggtctcagctgtcgcaggttcctcctgcacccacttccagtcttcaaagccagtgc

SEQ ID NO: 152786 - DNA, 122 bp, Homo sapiens
acagtacctcctttcctcactcgcgccttcccttcttctgggcagcgaacacgtttctatcgcgtgagctacctcttccggggttcctgggtgacaagttccggatcaagaatcacaaagcg

SEQ ID NO: 152787 - DNA, 122 bp, Homo sapiens
cgttgccgggggaagcatcccagtccaggtcggccagtgtgaggttgaaccccggctcttcgctgggcgtcgcgttccacatgctgccggctcagctgaacaggctctgggacgtgactgcg

SEQ ID NO: 152788 - DNA, 122 bp, Homo sapiens
ttgtatcatatgagagaaaaggctccactggctggcggtgtattctgctgccaaacggggcgtgtctcgtcggtccctatttgagttagaggtggggaagaggccgaggcaggccaggggta

SEQ ID NO: 152789 - DNA, 122 bp, Homo sapiens
cacgccccgtgcgaccagcactcggtgttctccgcggttgcacaaaccctccgggcccgacggggctactccaccgagagcagtcccgcaagtgcccaatgctcctcgagcccggggagcat

SEQ ID NO: 152790 - DNA, 122 bp, Homo sapiens
catctccgcctgacgcactcctccctcccttcaactccatttggagtccatttactacagcgcccagaaccccggcactacggctctttttagtctgaggactagctcctttttgggcccaa

SEQ ID NO: 152791 - DNA, 122 bp, Homo sapiens
gaacagataaaccaacggccgatccacacaatggcaggccacccagtgcccacaacaccacgactctccagactgtgcgagcagagcacccgcaagctccctcggtataaaactcaacgcag

SEQ ID NO: 152792 - DNA, 122 bp, Homo sapiens
ccctaattccccctcttcccagattccacccgctccgctacttccctccgcccccggctccgccagcccaatctgtcagagaagttgtgtacaaactgcgcggccgccctgcgcgcgaagct

SEQ ID NO: 152793 - DNA, 122 bp, Homo sapiens
ggggcaggccccgcgcctggggcggaggtgcggggagggcgtccagcagcagcaacaccccgcgcgccccgagcacccactgggggtccactcgccgcatcccctgctccaccctctctact

SEQ ID NO: 152794 - DNA, 122 bp, Homo sapiens
gaacccgcgggaggaagaaagcgccccagaccccggcctatggcagcgcagtccctagaccgagggtttttggaaggggcttgggatccctgctgtcactgcctgcgtctaggcatccattc

SEQ ID NO: 152795 - DNA, 122 bp, Homo sapiens
aataaaaattttttaatgttcggctatacaccaaaggaagagggctgcaggtggtgggagcggggtcaatggagggtcatttactctcctggctgagcttttacggctttgccgcccccgcc

SEQ ID NO: 152796 - DNA, 122 bp, Homo sapiens
ggagtgactctgtcagtccctcctctctgcatagcagcacggagtcgttccgaacattctcgtttgggctctgacagctgtgtcagctgctggcctcactcacaggcaaaaggcacgtcgaa

SEQ ID NO: 152797 - DNA, 122 bp, Homo sapiens
ctttagtctccctcctttcaggaaatgacaccatcatccaccatcagccactgctggaaacgtatgagccaaccccagttctccctccaggcccacctccagtggctgtgcaggtgagtgct

SEQ ID NO: 152798 - DNA, 122 bp, Homo sapiens
ctatgctgtcagtctttgaacacagtgagacctattgtgagtcttcctgctggggagggtcgtgtggtgcctcccacacactggctgtgaacttgttcccaacaaatgagtctgtgggttgg

SEQ ID NO: 152799 - DNA, 122 bp, Homo sapiens
gtctgaggcggcttctctcgggtacgggaaggcggactgctgtgcagctgcgggctcgctcgggaaacccaaagtcacacgaaagcggcagcaccaccgcggctgggatatcgtctcccaac

SEQ ID NO: 152800 - DNA, 122 bp, Homo sapiens
accatccaacacatcctgggcagcggaaaccgaaatggcaaatgaatgaccgcgccggggcgcaagggaggaaaaacaaagccacctcccgccgtccgctacctgcggcgagggccgcgcgc

SEQ ID NO: 152801 - DNA, 122 bp, Homo sapiens
gtggctcctcccgcccggtcgggaaataccagccgggcggggccggtccctcaggcctggcgcccacgttaacccgtctccagctgtcccggcgcgcggccatccaagcggagggcgtcgtc

SEQ ID NO: 152802 - DNA, 122 bp, Homo sapiens
aaccccaggtgtcctcaggccaggctgccgcttcctccccgggccctgcctcctccatctcgctcccttcccaggacactcagtagccggcctcggcttccaacgccggcctggctcccggg

SEQ ID NO: 152803 - DNA, 122 bp, Homo sapiens
acctgtgatggatttggtgtggagggggagtgggttcctgagtcacagcctcgcacggcccggcaggggtggcaggtgctgaggggacagccttcttgactcacttcactcccggagcacgc

SEQ ID NO: 152804 - DNA, 122 bp, Homo sapiens
gtggcgccttggttcgcaggtgtccctcttcacgatcatttgatcattgtgagctgccgccgctctctggtcacccctggtgtcacagtgccccgccacccagccttagagactggcacgag

SEQ ID NO: 152805 - DNA, 122 bp, Homo sapiens
gtgaccaacctctcctcctgggggttcagctccctctggtttcagtccctccccacccagcggggacacggccactcacttccaggtgggctccccagccgaggtcagtccccaggccaggg

SEQ ID NO: 152806 - DNA, 122 bp, Homo sapiens
caatgaccacggaagaagtctttcccaaataacctgggagactccaatgatcagagatcccgtttcccagtagcctgaaaaaatctccctcaaagctcctcgggcactagggccataggacg

SEQ ID NO: 152807 - DNA, 122 bp, Homo sapiens
tgagggaagggagttgatggctccagtatttttcgtgatgttcatcccagcatatgtgtgcgtgtgtgtgcatgtgtgtgcatatgtgtgtgtgcatgtatgtgtgcgtgtgtgtgtgtgtg

SEQ ID NO: 152808 - DNA, 122 bp, Homo sapiens
gcaggaagacacggacttctctaaataggcatatcccatctacaggggacaggcatgctccgtttcagccaactgttgccatgtgggatggaggacttgggtatggccagatcacttgattt

SEQ ID NO: 152809 - DNA, 122 bp, Homo sapiens
gcgtctgcacccgttgccgagtgtgggtggctgagccctgggtgacagcactcgggaccacgcacccatacccttctttatgctcgttgtcagccagttgccaagagcgggagtgaagagcc

SEQ ID NO: 152810 - DNA, 122 bp, Homo sapiens
atcctacagttcaaacatcagccaacttttctcaccagagtgagaattttaggtatacttcgctttctgcacttcatttcttttgctttttcataattttgtttagtttgcagctatgaact

SEQ ID NO: 152811 - DNA, 122 bp, Homo sapiens
tcactgaacaagcataaggcgctgggactgagagaagaagaaagcatttccagccccctgcgcactaagcatgtggtctgggaagtcctgtagcctctctggacttaagtttcctcatcaag

SEQ ID NO: 152812 - DNA, 122 bp, Homo sapiens
gcgattcagccggtggctgtggctgcggcgccggggtcccggccgcgacggcgttcagaacgggctgcagaggctgctccccggcaggcttaacctccacggtctgcccagcgtccggggac

SEQ ID NO: 152813 - DNA, 122 bp, Homo sapiens
agacaggtacactgttctgtttaaaacaaggactcctgcccaagaaaacctatcacaccacggtgtatcatgtaatggtacacttttcctatcagtgatgacactaattgtcaaagtggcca

SEQ ID NO: 152814 - DNA, 122 bp, Homo sapiens
aaagccagttggcacgcacttaaccatacagaatatgggcacttttcctgcttctgacgtcggggctgttcaggcttctgctgtattaacacttgtcttcagaaagaaagcagtggagtttg

SEQ ID NO: 152815 - DNA, 122 bp, Homo sapiens
aatctccagagcgggagacgatattactcacaatatgataaacaggctgtgagtccaccgcggatcctaaaaaccaggggggcaagaggggttagctcttactctgcgcatggcggggcgtg

SEQ ID NO: 152816 - DNA, 122 bp, Homo sapiens
tcggccacgttcagcggacacgggagcaagatggcgattccgggcaggcagtgagtgatccgggagttagggtcaggctgggggatgagaaactacggcgactgtatctttggccgaggagt

SEQ ID NO: 152817 - DNA, 122 bp, Homo sapiens
cacagggacctagggagggggtggggggaggaagggggagggagaaaaaagagggaaaaccgctcatacacgtgatagacgttcaggccagtggcagagcgctgcaccacagccacacaaac

SEQ ID NO: 152818 - DNA, 122 bp, Homo sapiens
agataagcggcacgcagtaggccttcatttaagggcagctagtgatgattcatgaggaggcgtggcccggctcgtaggggtggtcttgttgggtcagtggtctgcgtatagtaggtgggatg

SEQ ID NO: 152819 - DNA, 122 bp, Homo sapiens
agtgtacacacatatctgaaacatgcaccaagagctgagccagcaacaccagtgccaccccgagcagcagccaggggcctcactctcctggtgagagctgacctgtccctgctgggtattcc

SEQ ID NO: 152820 - DNA, 122 bp, Homo sapiens
actctcagcaggaggaaagctaaagcaccaggctccgcagaggcagctctgaaccagtgccgtccctggagtgcagaaatgctcacgtgagaggacgaaattgttttcgtttgtgtcaggtt

SEQ ID NO: 152821 - DNA, 122 bp, Homo sapiens
ttgcacagaaatctaaaatctcggccagaatttctgtggcaaagggagagagtcagaaaccggagctgtgagaggtgccacatttccctgactatgaggggtcttcttccccaatacgcccc

SEQ ID NO: 152822 - DNA, 122 bp, Homo sapiens
cctttcctagtcaaagaaaggggtgacagacggcacctggaaaattgggtcactcccacccgaatactgcgcttttccaacgggctgaaaaaacggcgcaccacgagattatatcctgcacc

SEQ ID NO: 152823 - DNA, 122 bp, Homo sapiens
tgcaatctatgactttctgggtcacacaggcacttggaaccacatagttgcttggagtcccgtgatcttccacaggcacaactaagtgccagcctggaggaaacactctgagggttgcatgc

SEQ ID NO: 152824 - DNA, 122 bp, Homo sapiens
tgggtatgtggttagggtattattacatcgtaggtctataaagggccaagccccttgctccgacatgcaaagaaaggattgcaaactggcaggctgcaggtcataccgtgctcatagacagc

SEQ ID NO: 152825 - DNA, 122 bp, Homo sapiens
ggtgagaccagaaatctccctgtcgaaggtcttttctcgatcgaagggttcgtggtctcacgggcttcaaggaatgaagccgtggaccgcagcggcgagtgttacagctcgattagagaaac

SEQ ID NO: 152826 - DNA, 122 bp, Homo sapiens
taaaaagattctaggctaccagcaattttaaattctcagtgacatggtgatggggcataacgctccctccccatccttcagcttggctcgtgcagctctgccccccacacttcttgccggtg

SEQ ID NO: 152827 - DNA, 122 bp, Homo sapiens
ccgcttcgcagcgtgtgtgcagagccatcaatccttccttcctcaatcccgggggtctcccgcgtccccatacccccaccccggcctctggtatgggaaccagtgacgtctctcccgtgagc

SEQ ID NO: 152828 - DNA, 122 bp, Homo sapiens
ggaatccgggaatgtggggccgcgtggaccggcggcggtggcccgccacgcccgccccgccgaagccctgtttggaatgtgggtttcccccagtggggctcgtgctgccaccacgtctgatt

SEQ ID NO: 152829 - DNA, 122 bp, Homo sapiens
atgtggaagtcagcccattgcagacaagtttgttcatctagggccaggcagggtggctgacgcctgtaatctcagcactttgggaggctgagaagggcagatcacaaggtcaggagttcgag

SEQ ID NO: 152830 - DNA, 122 bp, Homo sapiens
tagagcccacggccacacagcccaagctgccaccggatggctggcaggcctcgtgcggtccgcagctggaggactcacaggacaccaggccgccctcctggcagtggcaaagggaatcacat

SEQ ID NO: 152831 - DNA, 122 bp, Homo sapiens
gcaagcagctcaatacacagatttttagctgaggcaacaccagcgcaggtctgcgtttggcgagctccgtaagttcccacgccccaaacttctctctagcacataactctctaatatgacta

SEQ ID NO: 152832 - DNA, 122 bp, Homo sapiens
tccctcctcccttccccaccacacctgccctctgggttcacacccctgggctctcagggacggtaggtagagcacatttcacttggggagattctgggatgtgtctgttgagggttctggta

SEQ ID NO: 152833 - DNA, 122 bp, Homo sapiens
gtaagtaaggatctgtgggggtagcattaggaagcacccacatatgttccataaaatactcgagaagacattatatactgctgtatttatgtcttttcattcaatatggttgtgttaattac

SEQ ID NO: 152834 - DNA, 122 bp, Homo sapiens
ttggccaactgtggatcgcttcagaacttcagcaaacattccacgaggacttctcggtgccgggggtgccagggagggaagaagatgattcagaagttcccccccacgagggggaggagtta

SEQ ID NO: 152835 - DNA, 122 bp, Homo sapiens
atcccagggcgcagcgcgacagtctgaggtgctgcacgccgtggggagccgcgctgggggcgcctcggaaggacgcggttctccagccctttccgtgcctaaacaggaccgaggctgagttt

SEQ ID NO: 152836 - DNA, 122 bp, Homo sapiens
cctcataagcaagagcatgaagagcacggagaatgtctgtttggtggccgacagccatcacggggtctctacgtgccggccagtcctcacctcgtttgcacgcgtttatgaacttagccctc

SEQ ID NO: 152837 - DNA, 122 bp, Homo sapiens
tgctgggattagaggcttgagtcaccgtgctcagcctatctcccagttttaagccagacccgactgctcccaggcacctcatctcagttcagacctgatctttccctgggtcctgcagagga

SEQ ID NO: 152838 - DNA, 122 bp, Homo sapiens
tctatcgcacccaagaaaacccgacacacgtgtgcggccttttattcaggcgtttctgggcgcgcactcgcctctcccaggcgcgcgcgcgcacaaccctcctccacccccccatccccccc

SEQ ID NO: 152839 - DNA, 122 bp, Homo sapiens
tccgcttctgtgctaggtggccagagggcgggctctacacgagagcctcaggggaccctgcgccaggcgtccgaggccacgtcgggttgccgcgctccgggtcggactgcaccttgaacgct

SEQ ID NO: 152840 - DNA, 122 bp, Homo sapiens
accgaatctcccaggatttcagaatggaaggggctcgtccacctcctcgtcctccatcaccggggagacggtggccatggtgcactccccgcccccgacccgcctcacacacccgctcatcc

SEQ ID NO: 152841 - DNA, 122 bp, Homo sapiens
ttgggctcaggaggtcctcccactttggcctggactgccagcataatgtatcaccacacccgggactgattttcgtttttcaagaacaaaaaccaaaaacatacacaaaccgagagtcaaag

SEQ ID NO: 152842 - DNA, 122 bp, Homo sapiens
agatcacttaaattatgcgtcttggtcagaatgtcctttctgggaaaggttggggcaacacgatttgtagactgcggtaggataagcacatttgacaggtaatgtgtggtttcaatctaagg

SEQ ID NO: 152843 - DNA, 122 bp, Homo sapiens
tactgagacggggagagtgggtcatgaggaggcaggagggttgggcacggatgttgtacgcggagcttcgcagtctgtgattcaaaaaatagaaatcaggctgggtgcggtggctcatgcct

SEQ ID NO: 152844 - DNA, 122 bp, Homo sapiens
atttgctgtgcttctttaatatgttcctttctctctttgttttctggcagctgtgactcacgcaggtcatggagagtatcattccctaaggaaaatacaactccaatatacatctttatcta

SEQ ID NO: 152845 - DNA, 122 bp, Homo sapiens
aataactcagttagaatctcagtaatttccttgcagtacatatgtgctgccagaaggtggcgaaaatactcagagcagagaatttcaagcttcagaggcaatggatgctaagaattacataa

SEQ ID NO: 152846 - DNA, 122 bp, Homo sapiens
tcactagggagtgccagacagtgggcgcaggacagcgggtgcagtgcaccgtgtgcgagccgaagcagggcgaggcattgcctcactcgggaagcgcaaggggtcagggagttccctttcct

SEQ ID NO: 152847 - DNA, 122 bp, Homo sapiens
aattaaaaataaaaataaaaaataaaaaatataatcttacccaggatacactatgattcccgaatcagaagtcatgctttttatgatctccagaagcttcttgggcacttcctgggaatatg

SEQ ID NO: 152848 - DNA, 122 bp, Homo sapiens
aaggtgtgaaagggtctggcacacaagtagggtctcagaaatctgaattaagagggtctccgaaggctttaaacgtccaaagtctatcaattggaatttctctcgtaatgagaaccagtgcc

SEQ ID NO: 152849 - DNA, 122 bp, Homo sapiens
atgccccagagagtgcctgttcaagccctcagaacaagccagagttgggaatggatgctgcgtctgcatctcggagacctggctcctgcattccagctcatctcccgcccactagggaaaca

SEQ ID NO: 152850 - DNA, 122 bp, Homo sapiens
cgccaggcgacgggaagagccgaggcccaggcccgctgcgccgtgaagcgcggggccgtccggaccccatcgattctcctcggcagccgggctggccctcgccgtccttgaccggctgagtc

SEQ ID NO: 152851 - DNA, 122 bp, Homo sapiens
acccgaccccacgcccgccaggccgcccgccccgccccgccccggcctggccgtccggagcgcggaggagggggataaataaattcaactcttaccggaatctgggggccgtctgcgagaga

SEQ ID NO: 152852 - DNA, 122 bp, Homo sapiens
atatagtaagaaccagagtcagctttgaagactacaaccagctcatatctataaggcttacgagttgcttttccttccatgcactcattcagatctgttcacagccctgacaagtcatcatg

SEQ ID NO: 152853 - DNA, 122 bp, Homo sapiens
ggctgctcgctttctaccgcccacgaggcccgcggggcctatttatccccaaggcacggccggccccagggacggcccaccacagccctgcccaacgtccagcctcaaggtaaacagatggc

SEQ ID NO: 152854 - DNA, 122 bp, Homo sapiens
acaagcacacaccaccatgcccaactaatttttgtatttttagtagagacgaggtttcaccgtgttggccaagatggtctcgatctccttgtgatccacccgcctcgtcctcccaaagtgct

SEQ ID NO: 152855 - DNA, 122 bp, Homo sapiens
gtccacgagaggacacctgcattcggggaagtgtagttccatgcgtttgaggcggggtcccggctgagctgttacgcgcccacatgccacaagagggcccctgtgagctggagggccccagg

SEQ ID NO: 152856 - DNA, 122 bp, Homo sapiens
tcagccacagtctctttcatccacaatcactttcacattcagctacccacaatcacgggacgtgatttaaaatacagaagctccctgcactgacaaaatccgccgctcctttcgtcggcaag

SEQ ID NO: 152857 - DNA, 122 bp, Homo sapiens
gcacagatgaggaaacagcataaagacgttagatgttaagtgacctgctgctcaaagccacgggcctggggttgggagcggactcagcacttttgtgcgaggatctagtgcctggtagaagg

SEQ ID NO: 152858 - DNA, 122 bp, Homo sapiens
ctgcgaggggaccctgtgagcctgctgatggccagtgagccgcggtcctctggtcctagccggcctcgggtctgtggtcctccgggcaggacgtgtctggcaggccagaggcggctcctgtg

SEQ ID NO: 152859 - DNA, 122 bp, Homo sapiens
cctgcccacccatcaccctttccatctgtctcagctccccctgtctcaagagaggttgtgcgcataaaaacaaaccagaagacaccgaagaaaaggaaagaaaagcattaacaaccttctgc

SEQ ID NO: 152860 - DNA, 122 bp, Homo sapiens
agccacccgggagagtgggggccggcagcaccactgtgccccgcacgccccgtcaggttccgggggctgagaacagaaatagaaacagcagcttttccctgggcacaagccaaggaagaggg

SEQ ID NO: 152861 - DNA, 122 bp, Homo sapiens
gctctgcgcgggtttcggggactctggcgtgctctgcgcaggtcggtttcctgggactcccgcgtgctctgcgttggtcgatttccggggctctcacttgctccgcgttggtccgtttccgg

SEQ ID NO: 152862 - DNA, 122 bp, Homo sapiens
tggacgtgcacgggcgagccgctcggctccgccatgatgctgcggaggagagcaggaggacgcgccggccgacggacgaccttccacttgaaacttcctttgcctcgccgccgacacctctc

SEQ ID NO: 152863 - DNA, 122 bp, Homo sapiens
cccagctaccttgagggcttccagccggtagcgctgggtggagttggggtccatcatgaccgtcaccgctttcaccagctgctcgcacagcgcgtttacttgatccatcgccatgcctagcg

SEQ ID NO: 152864 - DNA, 122 bp, Homo sapiens
ggattagtgagttacaatggcgttgcaagccatgaaactggttcagaccggctgaatgagcgggacaggaaggggctgaaacacttgagtccttgtgagagccccagctccaggggcagcct

SEQ ID NO: 152865 - DNA, 122 bp, Homo sapiens
gccgagccaccgcaccctcgactcctcggccagatgggcattcatctcttgctcgctgagcggcgtcatgtcctggatctgcttgtagtagcgctgcacgatcttccggtactcaggaatct

SEQ ID NO: 152866 - DNA, 122 bp, Homo sapiens
gtgaagcgcttagggcacggctcttgtgaggattacggcggaggctgtggaccgcggcggcgctcgcagaggctgcagccattgcacagccgagcatcccacattcaacaggaggaacccgc

SEQ ID NO: 152867 - DNA, 122 bp, Homo sapiens
cccggggtggcgggtggcgtgggcggcgcccggggctgggatgcgccgggggctcagtggcggcggcggcgttggcggtggcgtcggcggctgcagggggacgagctagcgccgcggcgctg

SEQ ID NO: 152868 - DNA, 122 bp, Homo sapiens
ctcctgaagtactgggattacaggcatgagccagtacatctggccccttttttaatgtggcgactagagagtttaaactgacatttgcatgtggcctgtgttacatttcttttggacagtgc

SEQ ID NO: 152869 - DNA, 122 bp, Homo sapiens
gagatggtgtcagcagtgactcccaggaatatccagtggtgtggtggcccatcccaggcccggctgggcaggtggctggcttgctgggggatgtgatgatggtggtaggcatgggaggcact

SEQ ID NO: 152870 - DNA, 122 bp, Homo sapiens
caccagatgccacccctcaacgctggccttctcagactctctaactgtaagaaataaattcgttttcttgataaatgatccagtttcaggtattgttataaacaacagaaaacaaactaaga

SEQ ID NO: 152871 - DNA, 122 bp, Homo sapiens
tatgacttcttgctgagcttcacatgagctccttttagataacgtgccttctatcttggacgatttattcactttcatgttccctggaatttattgctaaacgttgacgtgaatgcttacag

SEQ ID NO: 152872 - DNA, 122 bp, Homo sapiens
ttggagtgaccatggggggtggggcagctaacggatgtggcatggggcgggggaccaggccggaggcgggctgccgggaggggggattccctcgtgccccaagggcgaatctcaggtcggag

SEQ ID NO: 152873 - DNA, 122 bp, Homo sapiens
agccgccacagctggacacccgctggcccctgcagtgcagccgccactgagcatcacaaccgcagttgtccaccgagatccaaaccccgcatggtcctacctgaggcttcaagtcacgcttc

SEQ ID NO: 152874 - DNA, 122 bp, Homo sapiens
agctggcgggggccaccgtcgctgcagctggcttctcaggaaggcgttaaggaaaaggcgcgcggtactggctgaatggagagatccactctgaaataaacccggtggccacaagggaaaac

SEQ ID NO: 152875 - DNA, 122 bp, Homo sapiens
ggagctcggtccctgcggatcattttccccaggggcatattattccggaaacgggctaagcggtcccgggttggggacacgtcggctcctgtgtttttagtttcgctggcctaggtgacccc

SEQ ID NO: 152876 - DNA, 122 bp, Homo sapiens
tgaacccaaaacaagacaaggaaacagcatcacttagcacactgaggtaaaggctgggatcggaaacagggatgggggttagggtagaaattagtctgcttttttgtgtgtgcacaactatg

SEQ ID NO: 152877 - DNA, 122 bp, Homo sapiens
gcgcgagccttggagcagggcgcggccattggtgacgcacgccggggagcacggcgcccacgtttccaccattagcgaggcctcacacccggcgctccaagttcggggctggaggcgtcccg

SEQ ID NO: 152878 - DNA, 122 bp, Homo sapiens
tagccccagctgggctgtgcctcggtctctatgcgcctcggtctctgtgcgcctcggtcccgcctcaagcaccgggtggcgtctccgctgtagtgttctgagttcaagttgcctcggaagtc

SEQ ID NO: 152879 - DNA, 122 bp, Homo sapiens
cccattgggaatgcctgggccaccctgttttcgtgcacactcccacgcatgtcccactgccggacacagaccagcttccacctgcgatcgcgctctgtgctgccatccgggcgcagatcctg

SEQ ID NO: 152880 - DNA, 122 bp, Homo sapiens
ggagctgggtcacagcagggaatcttagcttggttttggtgtgctgctggatgaccagaccgggcgtcgggtgagcccagaagtgagagcagttggctgtgccccagtgctgtgtgacccag

SEQ ID NO: 152881 - DNA, 122 bp, Homo sapiens
gggtggtgcctgggaggacctgcagaggagctcccgcatctcctcaggccctttcttctgcgccatcttgtggcagttgagagcaggcccagggcagaagggaggcaggggcattaagagct

SEQ ID NO: 152882 - DNA, 122 bp, Homo sapiens
tccgtggaatcatccctcatgacttctgctctctgatcacatccacactcatgtcatcctcgttcttccaaggtgaggttactagtactgcacaggggctgatgagagcatgtcctgccagg

SEQ ID NO: 152883 - DNA, 122 bp, Homo sapiens
cgggggcctttattagagactttgccccgccggggcctgcagggacaggggcctgggagccgcggcccgccgcgcgcggtgtggggccttggggggcgcccgtgccgcctccccctaccccc

SEQ ID NO: 152884 - DNA, 122 bp, Homo sapiens
gttactgataatgactagaactcaggccaaataaactctacaagtcatgaaagcattcaccgtgtgaaagtcactggattgggcacttctagactgttaggaatttatagctgacttgagga

SEQ ID NO: 152885 - DNA, 122 bp, Homo sapiens
agttctcaccagctctcctctctccgtcccaggagaacggcccttccagtgcaatcagtgcggggcctcattcacccagaagggcaacctgctccggcacatcaagctgcattccggggaga

SEQ ID NO: 152886 - DNA, 122 bp, Homo sapiens
ccaggaggcctcgggtctgcgccccgctcagcccccgcgggacgcctttggcgagagacgcggttctgaaatcagctgtggggtttcgcccaggcccgtcctctggctgcggccatccaagt

SEQ ID NO: 152887 - DNA, 122 bp, Homo sapiens
cttgtgaatacccttctctgctctctgaatgggagggagaagctggatttgctttcagatcgaggtgccagctggggctgcttcaaggttatctgggcaccactccctgtgcacagaactat

SEQ ID NO: 152888 - DNA, 122 bp, Homo sapiens
atgcaaataattaccgggcggcggtgtggggaagtggtggttaccggttggttgtttaagcgtgaatttctgggaaagcagctctgaagctggacatagaatcatcaaagttgcaaatatga

SEQ ID NO: 152889 - DNA, 122 bp, Homo sapiens
ccccttccctgttgccaggcaacattgctgaggggcagtcatttggtccaatcgtggaagcggaggtgtggggcggaacccaagagaggagtcagccaatggtgacgcgcctcacagggagt

SEQ ID NO: 152890 - DNA, 122 bp, Homo sapiens
gtgcagcagggaaagccctgtaaataaccgacatatggaggccacgatgccagggccatgcgcccagcagcaactcagcagtgttgtttctcttcctggagcaggaacgatgaggacggcat

SEQ ID NO: 152891 - DNA, 122 bp, Homo sapiens
attttaaaaccaaaaggaagcttatagtttatcttgtacaacaccctgatgttcagattacgaaactatgaagaagaagtggagtgatcctgaaaatcaagatagtctttaccctgcacaga

SEQ ID NO: 152892 - DNA, 122 bp, Homo sapiens
ggtcccgtagatacgtacgcatggtttatcgccctgcatgcttttcagagttagacctgtcggtggcatatgccaccgtggccacccgctggcagcttacctgtcctggatgctatgacttt

SEQ ID NO: 152893 - DNA, 122 bp, Homo sapiens
aaacagcattttcagctcagtcatcagacaggtgatttgctcctgaatgagaaattggaccgggaggagctatgcggccccacagaaccatgcatactacattttcagatattactgcaaaa

SEQ ID NO: 152894 - DNA, 122 bp, Homo sapiens
ttccaggtgagaaaccttttcaagacatttatctggatattctcttttatgcagaaaaatcgaattttaactgccattagaacctcccacatctcatgattgttctgtggattacagggaac

SEQ ID NO: 152895 - DNA, 122 bp, Homo sapiens
gggaacgggagctgagatcccggagcagaaatggtcagccgtgctctggagcaggcctgtcggagccatcaggatgccgggactagcactgcagcttgcggatgctgcgggagatgcgcttg

SEQ ID NO: 152896 - DNA, 122 bp, Homo sapiens
cagtagcggactgccagtacaggggcctccctgggtgtccctggaaaccgaggaagtaaccgccccctcgggaagccacgcctcctattttgttccggctcgggggcgggacccagccgggg

SEQ ID NO: 152897 - DNA, 122 bp, Homo sapiens
gaactcccaccaggaggtcgtactatttcctactatatgcagaggaaactggcccaggcacgggaagacactaggttcaaggtcggtgggcttcagaagggctaaagcaggattacctggca

SEQ ID NO: 152898 - DNA, 122 bp, Homo sapiens
ctgcagctgccaggacctagtgatggccccaaacctgagagtgggcccagagtcccaccccgctaaccatgctgaaaaaggccacagggcacatgaagcctttgctccctggatcaggtcac

SEQ ID NO: 152899 - DNA, 122 bp, Homo sapiens
tgtgccaggtatcgtccgcagcgttttacacgtacagaattacctctcaatcctcacaaccgccctctgagacaggtattttttaatcatgcccattgtacagatgaggcaactgaggcaca

SEQ ID NO: 152900 - DNA, 122 bp, Homo sapiens
gtaagctgtgtcggttatttgaggtctgcgggctgtgtcggttatttggggtctgcgggccgcgtcagttatttggggtctataagctgtgtcagttatttggggtctgcgggccgcgtcag

SEQ ID NO: 152901 - DNA, 122 bp, Homo sapiens
gtagtgtccataggacgggaaaggcgtgtagtacgcggccaggttctgcgggctgctctccggcgggtagcacaccttgtcctgaggcacggcctcacttggccggggtagagccatcccgg

SEQ ID NO: 152902 - DNA, 122 bp, Homo sapiens
agtggagcacagaagaaagctggaggctcctttccctgcgcctttcagtaacagcaaccccgtctgtgtgagccggaggaggggcttggcttctggaagcagagggggcgaggcctcgggtt

SEQ ID NO: 152903 - DNA, 122 bp, Homo sapiens
aggagcccgcgctcccagcgccatccttagagagccgaggctgagtcctgctcagggcttcggacactacagatcctcctccagcaggggatccgggaacccaggactccttggtagtgcac

SEQ ID NO: 152904 - DNA, 122 bp, Homo sapiens
gagactggaggccagctgcagacctttgagggtgcaattccccaccatctctatttgcatcgcacatgctgagggatttaatttcaagtcctggctgagtgagcaccttctacttagcaggg

SEQ ID NO: 152905 - DNA, 122 bp, Homo sapiens
ttccacaagggggtggggttagaaggttctctcccatccttgtcaaagttgctaaaaccacgcacgacgccatgtgcagttccgtctggcagcccatttacagggctctcgtggtgggtgct

SEQ ID NO: 152906 - DNA, 122 bp, Homo sapiens
caagcgtccccaggattggccagcttggcgccactagataggcttccgggcgtgattgggcgagcgggccagacttccggattcctgacaagccacgtgacccacccacctggaggagagag

SEQ ID NO: 152907 - DNA, 122 bp, Homo sapiens
aataaccactttaatatgcttccagcataccctttcaaattatttcaacaaacacaaagccgggtacagcagtgcgcctgtagtcccagttacttggcaggctgaagcaaggggattgcttg

SEQ ID NO: 152908 - DNA, 122 bp, Homo sapiens
cccagcctggccctcggaagcctcgcggggcgcaggggcccgtcggaaatgtttgggggacgggccggccgcggttcctcccgcagcccaggccgggccggcgcgtcccggggagtcgccgc

SEQ ID NO: 152909 - DNA, 122 bp, Homo sapiens
cccgggaccaccctttctgcgctggggatgcccttggaatgtgacctccctctggggagccgtgctactgccatgggcgtaggcgtcggtctacccgagcgtgcagagcggccttcttcctc

SEQ ID NO: 152910 - DNA, 122 bp, Homo sapiens
agtagatgggggagcaagaagcgagatggtcctccgctggtgtcaggccactcagcgccccgggttctcctccgatcgccctggccaaactctgcgctgttcctccagccatggccagtgta

SEQ ID NO: 152911 - DNA, 122 bp, Homo sapiens
gggggcggggacggtcactcccagcaccaggcaagtggcaaacggttgtccctgcagctgcggtccggcaaccctggtccagctctttccctacccctaaggagctggcctctgatgcccac

SEQ ID NO: 152912 - DNA, 122 bp, Homo sapiens
tatttcctaactcgaaggtcatcgcagttcctggtcaggggataagtacgtctgtggatacgggccccagtggtcagagactgagtgcccgctgtgtgcccgtcactgtactcgcggcttgt

SEQ ID NO: 152913 - DNA, 122 bp, Homo sapiens
gcattttgttcctgttcccattgacacaacttcctttgtcactgtgggaaaaaaacaaatcgtgtgagttctgagaaacggaatgttccccggtgttcaggtgtgatcagcctgcacactcc

SEQ ID NO: 152914 - DNA, 122 bp, Homo sapiens
gcaagcgaaatactacgagctggcccggaaggagcgacagcttcatatgcaactgtaccccggctggtccgcgcgggataactatgtaggtggatcattttcgttaggattggagtctgtag

SEQ ID NO: 152915 - DNA, 122 bp, Homo sapiens
gccggctgaacttggacgcggcccctcccagctccccccacagcccagctgttccctccgcggattctccggggctggttcatcacctccgaatattcctgtgacaggagacgcttgcaaaa

SEQ ID NO: 152916 - DNA, 122 bp, Homo sapiens
acccacccaccccgtccagtgctagctcacttcctcacgctccaagtgctgggcgctcagcgtctccagctgccgccgcagctcttcatttcgctccagaagcatcttgccgagctccgcgg

SEQ ID NO: 152917 - DNA, 122 bp, Homo sapiens
tcaaacacttaagggaggagctgggtggttgggtggagtgacagaaggaaagcttttgtgcggaagaggaaactctggaaaaggcttttctggcttagtgtctagccctggtcggcttagta

SEQ ID NO: 152918 - DNA, 122 bp, Homo sapiens
cttatccctccctcctcctgtctcagtaggcagaaatttggacatccattgcccacctaccgaagaagtctgaacgcagacccctctggcctgggcaaccaagagttcaggcccttgaactc

SEQ ID NO: 152919 - DNA, 122 bp, Homo sapiens
gggaggggtgctcctgatgccccgggtgcagggcgggcaccagcgagcgagacccaagggcgctagaacccaggagcgcaaaccaccgttagggcctgagggacgcagaggcgggtggagta

SEQ ID NO: 152920 - DNA, 122 bp, Homo sapiens
aactgttttcaccaatgagctttccacatttgtaggggagtgtggccagaagacctgctacgtcccttaatgctacgctgaggctttcttattagtaggaccatttaattcctcttttctca

SEQ ID NO: 152921 - DNA, 122 bp, Homo sapiens
ggcagcgcgaggggcgcggctttagtccagggggcggagcctgaccggacctgggtttttcgggcggctggcggacttgacagagagcgggaggggcccggatcctgggcctaaggagggtg

SEQ ID NO: 152922 - DNA, 122 bp, Homo sapiens
gaggaaactcaacaggcccaaagagcccacagcccatatcagtccccagtgagggggccccgtttataaggcttccctggttgctgacctgatttgactctgtcacctcaccccagaatagg

SEQ ID NO: 152923 - DNA, 122 bp, Homo sapiens
ttgctggtgtgaggccctgccaatctcaaatctctcttctgtcaccaacagggctcccatcggcagctgccccatcagttcagtttatagtgatcatgaattgagtaatattgtttggctgt

SEQ ID NO: 152924 - DNA, 122 bp, Homo sapiens
ccgccatcttgtgtcggcggctcggctgtaaggaggtggcagggacaaccacaaccacaacggccgggggaggagaaggcggcagcggcgattctaggcggcccaggcggcggggaggagga

SEQ ID NO: 152925 - DNA, 122 bp, Homo sapiens
cgcggcgtggtgggcagacgcctctctccctgggctccggaggccaggtcggactgggagcgcacttacctcggtgaagaagttatccattgttccagcgcagtcccggactcgccgagtgc

SEQ ID NO: 152926 - DNA, 122 bp, Homo sapiens
acaggggacaatgtgctccgctttccctcattgcagtcaggaaacattttctacagaaaacgtgctgacagggcgcggtccgcacgggcgttttgagcacctcctgacagacggggcagtag

SEQ ID NO: 152927 - DNA, 122 bp, Homo sapiens
ccagccagccagtgggaagctccaggagggctggaggccagtagtgtggggacagatctgcgtgatcttccccagcagacgtgcccctgctcctggagggttctttctgtggccacgtgggg

SEQ ID NO: 152928 - DNA, 122 bp, Homo sapiens
agggaccccaagacccaaagctaattcttgtcagcctgggcacaggctcctactattaatcgaagcctggcttattagcaatgtgtcggtttcatgttaattatcattttcaaagcccaggt

SEQ ID NO: 152929 - DNA, 122 bp, Homo sapiens
ggcaatccacctcccttggcctcccaaagtgcggggtttacaggcgtgagccaccgcgcccggcaaggaattaatattttactaaaacagtttttagaaacaccagggaaaggctcagggct

SEQ ID NO: 152930 - DNA, 122 bp, Homo sapiens
catttaaatgaagaaggaaggaagcttggattcagggaggaaagggagcgggaaagagagcgaaagaagagcgtgagaagaggcaagcattatagtctccggtccacaggggagagatggag

SEQ ID NO: 152931 - DNA, 122 bp, Homo sapiens
aggtggtcgatgaagtagatgcccggctccacggtgagcaccatgcctggctgcaggtgccgtgcagtgcgcaggctccgcaggccgggctcgtcgatgcgctccacgccctgtggggaaca

SEQ ID NO: 152932 - DNA, 122 bp, Homo sapiens
cgcccccggctctccccgatctccgtgcggaaagaatccctggacgggttctcgcgagatcgtaagcactggcctggcttccctagaaaccgaccagggctggctgcagtgcggctcctccc

SEQ ID NO: 152933 - DNA, 122 bp, Homo sapiens
tatgggacatggaggccgggtggaaggcctcaatggggaggcagtaacaggatggtagggcgccctcctgccagggggtcccaccaagggcagccagcaggactgagacagaacccagtccc

SEQ ID NO: 152934 - DNA, 122 bp, Homo sapiens
acacacacacacaccccaaaacaaaaacaactggagtctctcagccctatagctagagaacggagttctgccaacaactgtgcaagcagggaagcagatccttccctagtcaagccacagag

SEQ ID NO: 152935 - DNA, 122 bp, Homo sapiens
tgtcgagatatgccaatatcgagataatgccgagaccgagataacgctaatgtcgagatacgctaatgccaagataagctaatgctgtgcttcacctggacacagggaaacactggaaggag

SEQ ID NO: 152936 - DNA, 122 bp, Homo sapiens
gttctggaagcttcgcccgctctccgcagaccagtgcagggcggtacatattgattggtgcgggcgtgcttgttctattgggaaggagaaagcaagccttcttgcaacaagaaatcccaaga

SEQ ID NO: 152937 - DNA, 122 bp, Homo sapiens
ggggccgcgccggccgcgttcctctcgcagccccaaacaaaacaacacgggccgccgccgcgccgcgccggctacttttccgtcttgcgtttgtcccacgtgcaactttgggacccccgcaa

SEQ ID NO: 152938 - DNA, 122 bp, Homo sapiens
agaaggctattcttggttcttgttttctgtccgccaccattggcaagactatctactatgcgtaggcatgggaaccagttaaagaaagtgtcgattcactagagcgaagctgagaactcagt

SEQ ID NO: 152939 - DNA, 122 bp, Homo sapiens
tgctggcagccactggcccatccgagcatgcgggcggtgagcggcatggagaaatggggccggcgggcaggggctgtttggtttcaggtaaagatagccagaaggtgaacacaggagggatg

SEQ ID NO: 152940 - DNA, 122 bp, Homo sapiens
tgaagagcagaactgtcttataccagccctgtgcggccaggcaggaaggcttccgtggtgcggccacgcgtcctccctttctcaacagaagctgacagtctggagttttcagagagattgcc

SEQ ID NO: 152941 - DNA, 122 bp, Homo sapiens
tgacatcttcccttaggtggtattttagacacttctaactcaactgtcacaaactgaattcgtaatctttcccatccctgaatctcttatcttttcccagtttccttttctcagaaattcca

SEQ ID NO: 152942 - DNA, 122 bp, Homo sapiens
gagaaaaaccacagtaatgtgtgtcgcccagagacactggcaccctgacaactacagcaacgggttctttgtgcacattgtaaaaaggctcaaactaaagtttctgaaaaaccagctcctta

SEQ ID NO: 152943 - DNA, 122 bp, Homo sapiens
tcacaaatcttgttttctttattctctcatcacctccctccctcttctgcctgatgttgccggcccccttgtggaataatctcaacagcatgggctattttgctgttttgctgcgtctctat

SEQ ID NO: 152944 - DNA, 122 bp, Homo sapiens
ctgcctggggccgcccgctcgggcccgtgttgtctcaggcagtagggacactggcgctgacggcgggggtaggaaaccacagagactggcaacttcccaggttcctagagaggaggggcatg

SEQ ID NO: 152945 - DNA, 122 bp, Homo sapiens
ttgattccaggactggctactgcgtacatccacaggttcactaacgggggcaaggtaagccggcttcggcccgggggccgactccacgggctgatttccgaaaagggtggtgggcagggaga

SEQ ID NO: 152946 - DNA, 122 bp, Homo sapiens
tccggccgggcgggctgtgagtcaggctgcaccaggtgagcgtgtgggatgctgctggtgcgagcctccctgcccaggagccctgcgcacccgggtatcggttggggtgtgcccttccagat

SEQ ID NO: 152947 - DNA, 122 bp, Homo sapiens
tttcctgtccctagggagtgcctgttccgggcgtttcatggaactggaatcacacaggcacgtgccttccgcgtctggcttctgtcagcacagcgtcttccgcgttcatccctgctgtgcac

SEQ ID NO: 152948 - DNA, 122 bp, Homo sapiens
cacccagcgaggcggcaaagagctggggctccgcaactcagacatggactacatccagaccgacgccatcatcaacgtgagcctctgtccctctgcgggtggggattggggcagagttttgc

SEQ ID NO: 152949 - DNA, 122 bp, Homo sapiens
gatatcaagtcttttcatactacatctaaatcttcaacttccttccccttacatttcatgcgttcttccatcccggccctgtcctggacattgctatcaagatctcattgatgattgttatc

SEQ ID NO: 152950 - DNA, 122 bp, Homo sapiens
aaagtacagtctctggagtaaagctattatacactcagagagactgttgtgctttgcatgcgttatatcatttagtcctcaaaacatgttgtcaagattggcattattatctccattttaaa

SEQ ID NO: 152951 - DNA, 122 bp, Homo sapiens
atatctacaggggacaggaataatggggcccataggcccataagtaaagtcagcatccgtcgggggttgtgggcagtggcaggacagctggttgattccagtcccccagagcatggttatgc

SEQ ID NO: 152952 - DNA, 122 bp, Homo sapiens
gtggcactaagatctaagcacagcagcttcactgggaacctgcccaccacactgaagagacgggagagccacagacccggcccagagttacacaagttatctgcatcaacagggccctctga

SEQ ID NO: 152953 - DNA, 122 bp, Homo sapiens
ccttccgctcccgcccaagcactgacaaggtttcgcggcaaaggagctttattgctgcggcggcagaacgagctctgcgaagggcgagggggcggcgaatggcgcgcggtcggagagtacga

SEQ ID NO: 152954 - DNA, 122 bp, Homo sapiens
cggaacggccgccagctttgtgcggaggtgctcagcgccctctgctggccccggctggtgcgtgcggcctgcgcagcccaggccttggctgcagactcccctctccagtctgcggttcaagc

SEQ ID NO: 152955 - DNA, 122 bp, Homo sapiens
ggccggagcctcaacggatgggcggggagggggcggggccgggcaacccggaaggtccggcgtcccagccgcctacctcgctgggaccctggtcttgctgtcccccgctggcctcctgccca

SEQ ID NO: 152956 - DNA, 122 bp, Homo sapiens
ccgcagcatttatctgtcagcaggagactattatgagagcacaaactcacattgtattagcgttatcagttaattatgatccttgggaccagtgccagccaatgggctagcagtctgctgac

SEQ ID NO: 152957 - DNA, 122 bp, Homo sapiens
gcgggcactcggcggggaacggcagccggggggcgcccggcggagggtttctgggtcaggcggcgactccgggcccgggccgcgtacctcgcttggctcggccgatctggcccagcttgggg

SEQ ID NO: 152958 - DNA, 122 bp, Homo sapiens
catccaagggatgacaacactgtggccttaggtacctgcaaaagattcctgtggttggcacgcagaaatcctgccttttaagggaccctgtgggcttggacagagggcatcttggtgataat

SEQ ID NO: 152959 - DNA, 122 bp, Homo sapiens
gccacgtgggcgaccacgggcaccctccttacacctgggatgcatttgtctgcaggtgcccgccggcccctcccttcaagcctcacggaattgaaacaaggggctgcaggaatcgattctcc

SEQ ID NO: 152960 - DNA, 122 bp, Homo sapiens
caaacgttgtaaataataggttttatgtaatccacatataaataaattaatcgcctgactcgctctgaatgctaatacgattggggtgacaattggcccacctccctcccccaagtcctagt

SEQ ID NO: 152961 - DNA, 122 bp, Homo sapiens
gtctcgtgggctgtgagctggtatctcctgcccagccttgtgggtgtcccgaggtggtgtcgtgagtcctgttcacacgctacaggcctcgagtctttgagatttccaccgcaggctcacag

SEQ ID NO: 152962 - DNA, 122 bp, Homo sapiens
gcgcgcgccggggcggggtcaggccgaaccaccggtggccgggggtgggaggcggtgctccggcgagggccgggcgctgggtgcgagggggtcgccgggggccaccgttcggcactgggccg

SEQ ID NO: 152963 - DNA, 122 bp, Homo sapiens
caccagctggaggctgtgctatttgaggaggtgcccaggagtagcggatgtggggccaggcggggccaggcggggccagggagggcactggctgctgtccaaggtgctgaccagaatcaggc

SEQ ID NO: 152964 - DNA, 122 bp, Homo sapiens
cttcatagccaaagagaagtaataacaaaaagccttctatcttgcgtgacatcttcccctcgtcctcggccaaagctctaccttactgaactggagagctggcccaggagcaggggattaag

SEQ ID NO: 152965 - DNA, 122 bp, Homo sapiens
agctttgctgcgggctttccctgttcccctgcaccagtgcgaaaagcagagtgtgccaagcggctggcgtctgtaccctgtgggaaaagttaactgtaattcttcggcttttaaaatcaatt

SEQ ID NO: 152966 - DNA, 122 bp, Homo sapiens
tggtgttaggatacgtagctctctgaggtgaggtctgtgtctcaggaggtgggcctggcacgtttctctcgggcagagcgtgatcccgttagggagaggctctcggttagggcgctctatcc

SEQ ID NO: 152967 - DNA, 122 bp, Homo sapiens
cggtcaccaaagtctccagcttttgtggacgtcccgaaaaagcggaacattcgggggtcccggtccctgcccagccagtttgcagggcctcctgggcagggcgcaagcaaggagccacgcca

SEQ ID NO: 152968 - DNA, 122 bp, Homo sapiens
tcggggcatggctggctcagttctgcagttctgctgcctggcatggatgcgtcacaatagcgaggtcaccttcttgccttgggtaatttccctcagaggcaaaacagatccatttttaacag

SEQ ID NO: 152969 - DNA, 122 bp, Homo sapiens
agcagggactgtaaaagaacttgggaagctatacacatgcccacgatactgaccctgtcccggacctctctgcatgagaaggccagagcccagcacccctcctacagaggcactgctgcttc

SEQ ID NO: 152970 - DNA, 122 bp, Homo sapiens
gagaaaataaggaggacacccataaataaatactggaaagacaaccacaccaaaagataacggggcaatctacccaaacctcttctcagcctagaatgccccaggcagtgcagtcagactga

SEQ ID NO: 152971 - DNA, 122 bp, Homo sapiens
gttctgcagtccctcagccgcgacagccgtgtgatgatgtcagtgctcacctgacgctcacgtcttcacagcggggcagctgcgggcccagagtttaaggacccgtgtcctgtagaaggtct

SEQ ID NO: 152972 - DNA, 122 bp, Homo sapiens
cagggtccatgaaggcagatgacagacgggaacccccaagaggcacctaaccagggatcacgtgtgctttccatgaagccacaggaggaccatgactcactcctcagagcagcaacccaggg

SEQ ID NO: 152973 - DNA, 122 bp, Homo sapiens
ccgggaggatgggattggcaaaggcctgtaggacccgggggtgtcagggattctcccattcgatttctgtctgtttgcgacccctgtgaggcgcgaaagaacaggagtggcggacgctcacg

SEQ ID NO: 152974 - DNA, 122 bp, Homo sapiens
tcatccaggtttctgtgttttatttttcctatttaacagttccttgtggagttgccttcacgttgtctcctttatctctttcccgtcagcttctcagaggtctgcatttaccactgtaaagc

SEQ ID NO: 152975 - DNA, 122 bp, Homo sapiens
acccaccacgtggaatgttccaaacgccccgccccccgcactgtcactcaccgcaagtcccgctgcagcacgtcactgatgaaggtctcgtagcgcagcactttctcccccgtggcctccac

SEQ ID NO: 152976 - DNA, 122 bp, Homo sapiens
gccgtcccttggaagcaaatcgcgttgaccacaggccccttgtgagggaaggcttagccccgcccccaagggccatgagcggccaccattggccgaggctcgctgagacccggatgagcacg

SEQ ID NO: 152977 - DNA, 122 bp, Homo sapiens
atccgccccttctccagaaggaggaagaagggccctgctggtcacacaggacccagtctgcggtgggggttttcccgccaccgccccgccctccctggggcccccacctcaccctctcctgg

SEQ ID NO: 152978 - DNA, 122 bp, Homo sapiens
tgagccgggtgggagcccaaacagcagggggcccacaggaggccggcccaggcagcctcgcgtccacttaccaggccaggcccaggcacgtccccagcgacagcaggctcaggcacgttcgg

SEQ ID NO: 152979 - DNA, 122 bp, Homo sapiens
tccctcactgtgctgagtccccgattctcccacaatctttgtatatgtctcttggggcctcgcccctgtccctgagcctctagattctctgaattctgatgagggaatatcctcggtctctc

SEQ ID NO: 152980 - DNA, 122 bp, Homo sapiens
tgcctggcaccgcgtcagcagaaacctgatccccggggaagctcggcaaggccttgggatcgctcggcccccagaactagggcctggcagcgggcacgggacgccccccctccctcgcgccc

SEQ ID NO: 152981 - DNA, 122 bp, Homo sapiens
tgtggagggcaccgaggaacaggggagcgcacacacaccacagaagctggaagtcagacccgacagttcccacgcagtggacattctcctctgaagccattgtgtggtgtgggacaagggag

SEQ ID NO: 152982 - DNA, 122 bp, Homo sapiens
gcttggtttggaaccagctctgcatgtgcctaacaggatgtctgtgggcaaggccaccctcgtgattactggttgtggggcaggctctgaagcaattattcattcatttaacaggcatctgc

SEQ ID NO: 152983 - DNA, 122 bp, Homo sapiens
ttccccactctgcagcccaaggcaaagagtctgagagaccacatttcctaggatgccgtgcggtgcgtctagctgcacttcctccttaggcggaggggaggattcagggaagcttggttaaa

SEQ ID NO: 152984 - DNA, 122 bp, Homo sapiens
gggatcgcaccctcagtgcgcgatcagctgacccacgcgggccaagcgcgccctaaactccggccaattaaatccaccattcggcctgcgcacgcgcagccgtagacggccgagcagtggag

SEQ ID NO: 152985 - DNA, 122 bp, Homo sapiens
tcatgagatgtctccagctcgtggaaacagccaatcttccttgcccgccttccagcggaccgtccagaacaccagggactccgcaacgcagggtgcacaatgacagtggcaccaagcgcgtc

SEQ ID NO: 152986 - DNA, 122 bp, Homo sapiens
acttggaaagtaaggcaatttcttggcacaagatcattaactagaatgctaaatagactacgttatgtgttaaactaacattatattatttggtatagtggaaagtgtgtgtgtgaatattt

SEQ ID NO: 152987 - DNA, 122 bp, Homo sapiens
gtggtgggggattgatatgcagctgttctccagatgccagctcttccccagaagcagctgcgtctcagcaggggccccttttatcaatgtgacaacctgctgagggctttggaacttttcca

SEQ ID NO: 152988 - DNA, 122 bp, Homo sapiens
gtggcctagagcgtgaggccgcgtcctggggcggggtgaggggcgagcggggcgggcccacggcatgctgcgagcccagcctcccgccaagcaccgtcccccatccagccccctgtgggagg

SEQ ID NO: 152989 - DNA, 122 bp, Homo sapiens
gccagcaaggcgatgcccagcagcagcttcatcctcctgcggttgacggcagacacgaggcgcagcagcgccttgctcaccatccccgggagccgcgcgggtccagggccctaccgcgcggg

SEQ ID NO: 152990 - DNA, 122 bp, Homo sapiens
ttcttagaaggtagatctgtcggtaattctctgtgtcaagcggtctcactaccagatcgccgagtagaaatctttcctccagttatttattctaatagagaggggaggggggggaaaaggcc

SEQ ID NO: 152991 - DNA, 122 bp, Homo sapiens
tgatgaggacagagctagagaagtgggttggaaagtgaagtggggacaaggaagcagcaccggatccctgcacaatttagggaagaagttttgccgtgaagaggaacagaggtgggggcctc

SEQ ID NO: 152992 - DNA, 122 bp, Homo sapiens
tcagaacagcctggctgaaaaatcaatgctgactatgaacaaaacctctcctttggggcccggcgagcccaccctggcaaggacgggttccaccgcggtctccaccgcgcagcggcgttggg

SEQ ID NO: 152993 - DNA, 122 bp, Homo sapiens
gacacaggagtcaaacaccaatcctctaaagcaagaacagaaacctaaccaccaaagcaacgtcccagccatcctagaagacaggtagctcgtgtgctgggagcacgagtgatggtcttttc

SEQ ID NO: 152994 - DNA, 122 bp, Homo sapiens
cccctgaggccggtatatgggccattcctgccccaggagacacagtgaaccgcaaagagccgtgtcacggcggtccacctgctgcaggcacggcgccgcactgctctgaacgctcgctactc

SEQ ID NO: 152995 - DNA, 122 bp, Homo sapiens
aattccaggctcggtgattctgcaatacatgctggtaagaacatttgactcatcctggaacgggataaagaaacacagaagaccaaataatgaagaaggactagaaaacatttttgtacgta

SEQ ID NO: 152996 - DNA, 122 bp, Homo sapiens
aatactggttgtggaagggcacgtccgtgtactcgtaactggacgtgttggtaaaataggcgaagtagaccttggccccagccaggtgggagttggtcacgtagagcacaccgcagatcatg

SEQ ID NO: 152997 - DNA, 122 bp, Homo sapiens
cgcgatgaggcaggcccggcgcgggtcttgctccgcccgccgcagagtcacgtggcaggacggcgcaccttgataacgcaatgcccggcccctcggcgccgctcccgccccgccccgccgcc

SEQ ID NO: 152998 - DNA, 122 bp, Homo sapiens
accacctctcggcccggccggaagaagccacctcccccgcacgcgtttagccggcccccgcgattcggcctaatgcgacgattggctatggctccaaatcccgcccttccgattcctgtctc

SEQ ID NO: 152999 - DNA, 122 bp, Homo sapiens
tgggtcctctggaggctgggccgccaagaggcggcggctgcaccatctgatgctagagaacgagaaccgcagtgcgtgcccgacacaaagggaaggacaggggacactggaacaggggagac

SEQ ID NO: 153000 - DNA, 122 bp, Homo sapiens
aggccacgctctgtgggaaagcacggggcatgcaaactcgaaatgaaagcccgggaacgccggaacaagcacaggtgtaagatttcccttttaaaacgtggagaataagaaatcagcccgag

SEQ ID NO: 153001 - DNA, 122 bp, Homo sapiens
ccctcaaaaaatatttgcctcctgttttgccaagctgccacctcctccaccgtgacccaccgcctaatgaatcacagtcccctgcacgggacacaagccccagtggggattcagaggtgtgg

SEQ ID NO: 153002 - DNA, 122 bp, Homo sapiens
ctgccccttccttgtgatcacacccctgccccttccttgtgaaagacctcagcggggaaacgctccgggccacgcccactccccttatcccaattccgcgtgctggtcccgcacacggtcat

SEQ ID NO: 153003 - DNA, 122 bp, Homo sapiens
attgtactttgctttcccttcttgcctgtgagcaacccggaactttggattgtggtttttcgcaagcgaacacctgttctccggtgactagtgtgaggatcagcactgcacaggtgcactgg

SEQ ID NO: 153004 - DNA, 122 bp, Homo sapiens
cagcttccccaaggtgcaggcgcggtgaaaccatcgagacggagggccagagagtcacggcggtgagagggctgagtgacgggttaccccaaaccatgtggctggaggcgcgagctggggtg

SEQ ID NO: 153005 - DNA, 122 bp, Homo sapiens
agcccaacaagcttcccagaccatggggcaatcaaattccccgactgtgcacagaacctgcgctcccggcccgggcagcggcgcgcaggccgcagtggccctggagcgccacccagcggccc

SEQ ID NO: 153006 - DNA, 122 bp, Homo sapiens
cacgcagtgcgtggattcagccgctttggccgtgcccgttgcatgccgggaaacgcagttcgcgagccccggatacgtcgacaatagatgacggggctcacgttgtacgttcacatcaggtc

SEQ ID NO: 153007 - DNA, 122 bp, Homo sapiens
tgaagaatgcgtccctggcaggggcgcccaagtacatagagcacttcagcaagttctccccgtccccgctgtccatgaagcagtttctggacttcggtacggagtgggcgggaggcggctgg

SEQ ID NO: 153008 - DNA, 122 bp, Homo sapiens
tagctattcagcaggattcagcagggcctcatggcctgtgccagagcgggctagggatgccggcttttctgaggcacgcagccctctgggagatgctcctcctctccttctagagagaaaag

SEQ ID NO: 153009 - DNA, 122 bp, Homo sapiens
ggcgtcgggtcgggtaaatgggacagctccgactgcgctcagcctctaggactgtggctccgcccgggctagttcgctctccagtcaggaggcggaggcagctttgagcactgattaaccag

SEQ ID NO: 153010 - DNA, 122 bp, Homo sapiens
cggggaataatgagtgtctgtcaggccgtccccgggtgactgggcggggcggggcggaggcggcgcgggaggcgggggtggcgggggaagggcgcagggcggggtgcgtgtttgcgcgagtg

SEQ ID NO: 153011 - DNA, 122 bp, Homo sapiens
cggaggagggagcgacttcgaattcagtctgcacctgactgacctcgagcaaaaacgaagcgggcgcacgttaccgtcttccatctgggggcccagcagcctccatcttcgccctagcccct

SEQ ID NO: 153012 - DNA, 122 bp, Homo sapiens
ctttttcctcgggtcctgtgattttctttcttctctcttgggcagtgtttctctcatacacggtcctcactccccctgcatgcttcctggccccatccaccgccggcctgcagcttcctgcc

SEQ ID NO: 153013 - DNA, 122 bp, Homo sapiens
tctaggcgcggccggacggcccagtctggagggttcggggcggaggcccgggggggtgcgcgcgcccggggtccggcctctcactcgctcccctctcgtccgcagccgcagggccgtaggca

SEQ ID NO: 153014 - DNA, 122 bp, Homo sapiens
cctgctgctcccaggaccacacttggagtagcagcctgcttccctgggacaaagtttgaccgtagactacagcaaacccacaaacatcttctttatttttttctggcccacacagtgaattt

SEQ ID NO: 153015 - DNA, 122 bp, Homo sapiens
gaggcgtgactcctcctccagctcggagacgcgccgctgcagcctccgcagcgcactcagcgcctccccagcctctgaccgtgcgcgttccagctgtggacggtcccgcagacggaagcgcg

SEQ ID NO: 153016 - DNA, 122 bp, Homo sapiens
agccaatcaaggagccgtgtggctcgccactaacctctgccctgcagccgcgagggcgcgcgggaaatcccgagtgcatctggaatacgcagagtcagtaagaccatggctacgtcctcgat

SEQ ID NO: 153017 - DNA, 122 bp, Homo sapiens
cggcgtggtcctccggcggctgtccggggcggtaggagttggctgcgggatgtgctcagccggggagctgctgcggggcggcgacggcggggaacgcgacgaggacggggacgcgctggcgg

SEQ ID NO: 153018 - DNA, 122 bp, Homo sapiens
tcctctgtcgctaatggaggactaagatgggactgggagcaaaggagcgtctctgaatggcggggcagttgcagcatcccacttggcaagggtccttgaattacctccgcccccgccctgac

SEQ ID NO: 153019 - DNA, 122 bp, Homo sapiens
gccccgcctgaagtccgccccttgcgcagcggcccggaaaggtgggaggagtgcaggctgcgctccccgctcggggagagtcggttcctatttcctgattataaagaagcattctttgggag

SEQ ID NO: 153020 - DNA, 122 bp, Homo sapiens
tgagtgacggacttgagcagccaatgagtgtgcagtttgttgcgatgtggcacccggctccggcattataaagggcgccacgagtcggcattgtcaggcggcggcaccgcgcgggacggagc

SEQ ID NO: 153021 - DNA, 122 bp, Homo sapiens
cggcccccacctacgaagacctggagcgcaagcgattacggggtggcgcagaaagtccctcgaggcaatactcggtcttcggagtccgcccctgaagcatttccagtgttccccgcgactag

SEQ ID NO: 153022 - DNA, 122 bp, Homo sapiens
cgatcagatgaaacctgaggaattgacatttattcattcaggtatagtttattgggctaacgcctttttcagacagggtcttgctctgtctcccagctggagtgcagtgacacaatcacagc

SEQ ID NO: 153023 - DNA, 122 bp, Homo sapiens
ttgttatttcacagttttcatgggtaaggagtctggcacattttagttgggtcctctgctcgagtcttcacaggctgaaatcaaggtataggctgctgggtcccatctagaggcatgaccaa

SEQ ID NO: 153024 - DNA, 122 bp, Homo sapiens
gggggtccaggctgttgctggaacaggaggcagctcggtgtccacggttccgcagggggccgctgtctgcttggatctttcatcaggtcccaggcagagggtgcgctctctactcagcttca

SEQ ID NO: 153025 - DNA, 122 bp, Homo sapiens
gattcgccgtaatgtggtggcaggaagcatgacgccgtgggccgaggctgcctctgctctcgtcgctcccggcggctgcaggcagcgggcgcgcagcgcgggcggcagccgagctacctggc

SEQ ID NO: 153026 - DNA, 122 bp, Homo sapiens
ctggccggccccgaacaggccccagcactccagggagggtcagacggtggaaagtcaagacgctgctaccttcctcctgacacctccgcaccgtgggttccttagaacagaaacggagtgaa

SEQ ID NO: 153027 - DNA, 122 bp, Homo sapiens
acttactccttgattttgaatttttatacaatggttgctaaatccagtaaggtcatagttcgttctttagatcattcagtgttggactcactctgcaccagtgtcagatgacctaattacat

SEQ ID NO: 153028 - DNA, 122 bp, Homo sapiens
ggctcctgggagtccgttgcgggcaggtgggcgccgctgttgtgtcgggagagccaggagcgacagactcaaactcagaaacccaaccacctccgctccctccgcgatgcgtgtaacgtgcg

SEQ ID NO: 153029 - DNA, 122 bp, Homo sapiens
gcagtgactcgctctccctcctccctgtgtttggccttagtgtccacaggatgaaatgtccgagtcaggccagtcctcggcggccgccacacccagcaccacaggcaccaagtccaacacgc

SEQ ID NO: 153030 - DNA, 122 bp, Homo sapiens
atatgtgaatcaatcaaagacggctgatggaggggctcagccaatggcgcacactgtcatcgagtcggaggcggccccacttcagtggagagtcatcctgccttcctcgccatcagctccca

SEQ ID NO: 153031 - DNA, 122 bp, Homo sapiens
tgggctacggagagtgtcaaggccagagaagccacgccggcctttggacctggggcgcctcgggcagccaaggagagctgcggtggccgctcctccccgcgctctgatctcgggagtccctg

SEQ ID NO: 153032 - DNA, 122 bp, Homo sapiens
ctgtctcacgctcagagaccaatcacggggtggttggacggatgtttcctattttgaaggcgtccacttgggggaaaaaaatgaaaggaaaaatatttcaacccggctgtcggtctaaaaga

SEQ ID NO: 153033 - DNA, 122 bp, Homo sapiens
cttcgcgaagggctgaggtagcggcggcggtggctcggcgctcacggctcggcgcggcggcgacggccccactccgtccccatcgccggccagcagctgcctccccgctcccctgaggagag

SEQ ID NO: 153034 - DNA, 122 bp, Homo sapiens
cccaaaggacatgacaggagtgggtagcccacgggacactggcacgagcgccatgatgggcggagacgcgcggaatcggccggcccggaagtgccagctgcctgcgtcggccggaagtgccg

SEQ ID NO: 153035 - DNA, 122 bp, Homo sapiens
accccactgacctgcgtctgcaccgcttttccacagatagcgtgtggctcactctcatcccgcagggttccgtttcagtgtttcccatgggagaggtttccctggtgattttatctaaaatt

SEQ ID NO: 153036 - DNA, 122 bp, Homo sapiens
ggtgaactccagttcaccaggacaggaagtgacagcggaacgccggaaaccgcagatccacggaggtcagggccgcggagagctgtagttccccggaaccggaagtgatggcggacctccgg

SEQ ID NO: 153037 - DNA, 122 bp, Homo sapiens
tcctcatcccagcgagtgcaagggcatttctctattaccgtggcaatatattcaaatattcgaggtaaagatcgtccagccttcataggccacctggttccgtccccctcccccagctactc

SEQ ID NO: 153038 - DNA, 122 bp, Homo sapiens
gtggcgccctgagctgctcagttaccagagccgttggggccgatgatgcaggtgaacctccggaaggggccaatgacctggcggccccgccacgacttgaaattttccacaagcagcagctc

SEQ ID NO: 153039 - DNA, 122 bp, Homo sapiens
tcctgctctgaacccttgccctagtgcccctagcctggctgagaacggagggtcaagtgccggggttctaatctcaattactttatccaagcatccgctcgctcatttacatgtttccctgg

SEQ ID NO: 153040 - DNA, 122 bp, Homo sapiens
gggtgctaggaatacactgatgaatatggcatggtcccctgccctgcagtgcgtgctgagcggtagacagatcattgcaatgtgctatgagaagggctctcctcaaccctacctctgcagaa

SEQ ID NO: 153041 - DNA, 122 bp, Homo sapiens
agcgggggtccacgaacttgttgagggcctccaggatcacggtgtgcacgggctgggattcgaagtccaggcgctgcgggagggagcagagggccggttagtgggtggggtctggtggacac

SEQ ID NO: 153042 - DNA, 122 bp, Homo sapiens
gactgcccccagcggctacaagagcaccgtgaagggcgctatccactacccgggctgcggcgcgcccctcgccaaggtggtcttccggaatgcaccggtttaagaagtggacgcagctgttc

SEQ ID NO: 153043 - DNA, 122 bp, Homo sapiens
gagcgcgggacacaactacgcgtccctccccgcaccacgagggcgagtcggagtgggaatcggctttccaggcagcccagcctgtgctggcgggggcatctggcattttcacaccctttcct

SEQ ID NO: 153044 - DNA, 122 bp, Homo sapiens
cccacctcatctggaccttcacaaacctaaactggaaccgccggaaaaatgactgacaaccggccacacaagccaggcagagacgcggggagaggctgaccacaagaaaggaggacgtagaa

SEQ ID NO: 153045 - DNA, 122 bp, Homo sapiens
ttgaaaatgtacaaaaggaaatgtcaagaggcctaggttccctctcatgacagaaacagacgtcagcagagcaggtcgctcagcccagttcagctctgtgtatgaaacagagattctagccc

SEQ ID NO: 153046 - DNA, 122 bp, Homo sapiens
tcctctctgtccttagctgattggctgcagcctctgataaggcaaagcaaggcaaggcggcgggggggcactgtttctggggcacaaacttcacgttggcctgtctggggctggggttaaag

SEQ ID NO: 153047 - DNA, 122 bp, Homo sapiens
cttccaccagggcctttttggccatggcagcggcccggtgcgagctgaatttgagcagagcgatctgcccgggcgccggtccggggctgggcagcagccgcgcctcctgcaagccgggaccc

SEQ ID NO: 153048 - DNA, 122 bp, Homo sapiens
ttttcctcaagcatgcagagcccaccaggactccagcaccgaggacagcgctcaggcagccgggccttctctatacgcagccctcccaggccaggagctggctgagccacagcccagaaaga

SEQ ID NO: 153049 - DNA, 122 bp, Homo sapiens
cacattcccacaatcccgggcggccccgccccggctcccggctgcgcgtcccccttcccacgtcggcgcaaccaaacccgcgggccccccgccctcgccccgccccgcccctttcgcgcccg

SEQ ID NO: 153050 - DNA, 122 bp, Homo sapiens
ggctaggggcggggcgcgggtgggctctaaaagtcggtgcccactcgctccgcgctgccgcggcaaccagcacaccccggcacctcctctgcggcagctgcgcctcgcaagcgcagtgccgc

SEQ ID NO: 153051 - DNA, 122 bp, Homo sapiens
cgcagaggcgacccgactctgctccctccatactaaacacacagaccagacaagctcctacgaaaagccaacgctccacgcccattttcgtcagggaatatgtacccatcggctttagataa

SEQ ID NO: 153052 - DNA, 122 bp, Homo sapiens
agctccccgtctgcccataggagccccgccatcacccacgggaagcagcactgcaatctccgagcctcaccctccgcaggacaccaggagcgtcagcatgctgccatccacagagccccgtg

SEQ ID NO: 153053 - DNA, 122 bp, Homo sapiens
gaactgtgagcgcctactgtgtgtggatgcccgggccgtgaccagggttgggggagtccacgtcgccctcgttgctctgggtggcacccggcccctgctctggcacggatggaggtccgcag

SEQ ID NO: 153054 - DNA, 122 bp, Homo sapiens
tcctagtgagcctcctgggcaggggtctggagggtcggagaaggagccccgcggctcccacgcccccacctgcctccagtcttgaagtggctgtgccgccagaagctggcagccctacctgt

SEQ ID NO: 153055 - DNA, 122 bp, Homo sapiens
aaggagatgcacggcctacgagaggggtagtgtgggactgagccaatgcgtacggcgtgacgccatcccgctgcgaccggcgctccccggggcaggtggctgcatagtcttggcggaggtga

SEQ ID NO: 153056 - DNA, 122 bp, Homo sapiens
cttttcccctgccctgctctattttatcttttttaataaagatggctcctgataaatgaccgtttcctgcaaatcttgtagtagcattggaaaagtggcaggtgggtcacagacactctgct

SEQ ID NO: 153057 - DNA, 122 bp, Homo sapiens
cacctgtagttccagctacttggaacggtgaggcggcaggatcatctcagcctggaagatcgaggctgcagtgagccatgatggcaccacagcactccagcctgggtgacagagtgagaccc

SEQ ID NO: 153058 - DNA, 122 bp, Homo sapiens
tccgctggggtagaggagactctagggatgttcctacagtctggaccgattttacatttccgagacttgcttgtggatctacacggctatcgcagagctgtgcaatctgagagctggaaggc

SEQ ID NO: 153059 - DNA, 122 bp, Homo sapiens
gtatcactgtcagcacagactatgtccaagttgataactgtaggtccttttggtgaaggacggggggagtcagttacatacgctttccttcagtaaatgcgttccaggtctgaaaactggtt

SEQ ID NO: 153060 - DNA, 122 bp, Homo sapiens
ccggcccgcctggcgcagccttccccatccagctgtggatccgtcctgggatgcgtgtcccggcctgctgtctctccgtcacagaagggaatgttagaatcccgagagagagctgttaaggg

SEQ ID NO: 153061 - DNA, 122 bp, Homo sapiens
tgaagacctgacaacagccgttactctggctgacaagtcattggatttctggcgcacgcgcggcgcggcacgggcagcttccggtttccagccttgcccccgcccctaccttccgccccacc

SEQ ID NO: 153062 - DNA, 122 bp, Homo sapiens
cccaggccccgggttggggtgcagggggcgcaggggttggtcgggccagcgccgcagctccggccccggagtctctccgccttcacaaggaagcggaggggatctggctccgtccatttcct

SEQ ID NO: 153063 - DNA, 122 bp, Homo sapiens
ctctgcggcagctgggagttggggcggaggctggatccaggcaaaggctcttcgcttccacgtcgggtcacgaggtccagggctgtgtggcctgggcctcctcacagcatagaggccgggtc

SEQ ID NO: 153064 - DNA, 122 bp, Homo sapiens
ctccgttagaggctgactctccaaactaggacgatcttgctcctatgcgggacgacccagcgctaaaaagggatgaccctataccaccgggggtgaccctgctttgagtgggtctgaccctg

SEQ ID NO: 153065 - DNA, 122 bp, Homo sapiens
aaagggagccccaggctgttgggcctattgataagttctgtctctttcaccctgactactcgttcataagtcctctgtgcaagcataagtgtgcaagcaccacctctctcagtgttggctga

SEQ ID NO: 153066 - DNA, 122 bp, Homo sapiens
gctcgcgcacagacatggtcaccagctgctcgtcggagaagcggtcgtcgaagtgcaggccgccggcggcgtggtgcgggtgcagggcgccccccgcccccgccgcgcccccgccgcctccg

SEQ ID NO: 153067 - DNA, 122 bp, Homo sapiens
ctgctacagggaaacaggccctggactataaggacttctgcacacgtcgactcctggtcacgtgagagtcgcgtcatcactgagctcgagtccccagttacccctcccattaacactgcagc

SEQ ID NO: 153068 - DNA, 122 bp, Homo sapiens
agacccaggagggaagaagagccgggacccggtagccctgaggggctgccgggcctgcggcgctttctccgccgcagaggggttgggtgggagacgcaggcgggaaggaccctgtcccagcc

SEQ ID NO: 153069 - DNA, 122 bp, Homo sapiens
cttgataggggctgggggtcctccccggtgccttttgtcccaggctctgagagctcatggcgagtcttttcatgaggagggaggaagctgaaccagcaagggccccagggcactcagcaggg

SEQ ID NO: 153070 - DNA, 122 bp, Homo sapiens
cctcctttgacggccacgtttgaaataaccacagccttggggttggtcccatcctttattcgagtttccttgcccctaccctagccccgaccctgacgttggccagctaggtgcggctgcag

SEQ ID NO: 153071 - DNA, 122 bp, Homo sapiens
ggtcactgagccaggcccagatggggctttttaaatcactttatatgtgctctatgataccggtagggaagtagggggaaacataattcagaaaggactacaaacatatgctgtgtctcgct

SEQ ID NO: 153072 - DNA, 122 bp, Homo sapiens
aaacctggcaagagaggtggcgagatgtgggaagggcgggggccctgcccggtcagtggccggctgcgctgctgcctcccgccagctctactgtgctggacagtcaagcgtgaagtttcaag

SEQ ID NO: 153073 - DNA, 122 bp, Homo sapiens
cctgcgcattccagagcagtactctccaaggtgggaaacctaggagtttggagtctcctccgggatggagaagctgccgctagcttagttcgctttggggaccggaggggctagaaaggaaa

SEQ ID NO: 153074 - DNA, 122 bp, Homo sapiens
gcctccgcggcagcgccttttaccccggcctccgcggcagcgcctttcccccggcctccgcggcagcgccttgtggaaacctccactgtagttctccctacaccccacggagatgcctgtgc

SEQ ID NO: 153075 - DNA, 122 bp, Homo sapiens
tcaaaggatcggtaatgttttaatagctctgattagtaagcggagtattgggtgttatttcgaagtcaaaaattctatcttggttgatttaccctataacctggagcattttcgagaggcaa

SEQ ID NO: 153076 - DNA, 122 bp, Homo sapiens
aaagggagagggtttgagagggagcaaaagaaaatggtaggcgcgcgtagttaattcatgcggctctcttactctgtttacatcctagagctagagtgctcggctgcccggctgagtctcct

SEQ ID NO: 153077 - DNA, 122 bp, Homo sapiens
cttccacctatgtttacctctcaaacgtgcttattaggaaatttagaattacatacacagcgtgtgttcaagtgctgtttccctcggacgttgctgatggggatgtcggattattgatctcg

SEQ ID NO: 153078 - DNA, 122 bp, Homo sapiens
gaccagggccgaggcccgggacgtcacggtggggggtggggtctcgggaggcacgtgatgcgccgtgatgacgtcagtgggagcggaggcgatttggcctagagctggggctgagcacgtgg

SEQ ID NO: 153079 - DNA, 122 bp, Homo sapiens
agcccggggcgggccgtcatccaggcgcagggctgggtgggcgtgggcagcccttcccagcgcctctgtctgggtggagcggcaggttggagttgcagcggcgtctccctcatttccataag

SEQ ID NO: 153080 - DNA, 122 bp, Homo sapiens
ggatcaatatctttttaaaaaattccacactgggagacatttggtgtaggactgaatccccgtattttagaagccgccttgtctcttcttgcctcgatttcccatcctgttaatcaggagac

SEQ ID NO: 153081 - DNA, 122 bp, Homo sapiens
tatacctacttttaattacatgtagattaaggggcagtttacgcagaaatttctagggaacggggaataacttttgggtcatcaggtcattgccacagaaagaggtggtaactccaaggtgt

SEQ ID NO: 153082 - DNA, 122 bp, Homo sapiens
cccagggaagctaaaagtttggacacccctggttagaccaaggttctcgacacaagcatgcgtcagggttatccagagagttagatgaaacacaggttcctgggctccagggtttctggtcc

SEQ ID NO: 153083 - DNA, 122 bp, Homo sapiens
ctcctagagggtggggatccgtggtgcttcttcgggaacagcctcctgcaggaagaccctcgctggacctttacctcgctgcctagattccgaggaaaaggagataggagacgaaaagccag

SEQ ID NO: 153084 - DNA, 122 bp, Homo sapiens
aaaaaaaaaaaaaaaaaaaaaaaaaaaaggatcaggcagcagacaagctaggaggcgatgcggccaccgcatttaaaaggccctctggggactcccgcagagctggcaaaatttttgtcagt

SEQ ID NO: 153085 - DNA, 122 bp, Homo sapiens
aaaacaacggccgtgtttctgttctgcgctgggccctgaagctcatgtcatcagccctgccggctgtggggctcccggattctctgaccttgacccatgctgcagccactccgcctgtttcc

SEQ ID NO: 153086 - DNA, 122 bp, Homo sapiens
ggagacaaaatggcctctagtaaatccggagccggagccggcgaagccgcggagttgaggcgcgcctgggagagccaaggcccggcgggctatgcaggtgcatgcccccccctccgcccaag

SEQ ID NO: 153087 - DNA, 122 bp, Homo sapiens
cacagagagaccctcccagagacaatgccagtcctaggctctgcacagtccccccccccccgcccactggctcgccaggtctgggccctgtgccaggcacttggaggaaggctggatttggc

SEQ ID NO: 153088 - DNA, 122 bp, Homo sapiens
ccgcggggcgccgacgaggagtgcaggactcaggaagggcgagtgcgcggcgacagagcccggggaaggaggcagggcaaggccgggcttgggggcaggtggtccgggcatccagccttgaa

SEQ ID NO: 153089 - DNA, 122 bp, Homo sapiens
ccagtggctcacgcctcctgcatacgggatgaggtgagcagcgccgctgctgagagggggcgcgcgcgggtgtgagcgtgtgtccgtgtgcgagtgtgtgtgcgccgggcgggcgggcactg

SEQ ID NO: 153090 - DNA, 122 bp, Homo sapiens
gggtgttgatgcgtcttcacttttgcccctagggtaaggtggcttttcgttgcctggacccggtaccgcaccctatcaacttcggaggccctcacaacttcgttcaagtgcccggtttccca

SEQ ID NO: 153091 - DNA, 122 bp, Homo sapiens
aactgtgggtagtaccaaaccctatatatactatgttttttaatacatacacaactataacgtttaatttataaattaggcacagtaagagattaagaacaataattaataaaatgcagcaa

SEQ ID NO: 153092 - DNA, 122 bp, Homo sapiens
tgggaggtgtggagggaggggcgcaggcgggaacaggggcccgaggtgcttgcgggccagcgcgagttccaggtgggcataggctcgccagccccgcactcggagcggcaggccggcaagcc

SEQ ID NO: 153093 - DNA, 122 bp, Homo sapiens
ccgtgacttacccaggttcatacggtgaggatgcacagaaccgaatgcaagccccagatccggacctcctgacctccactcctgtgttctggacacagctccctactactcaggggagtgga

SEQ ID NO: 153094 - DNA, 122 bp, Homo sapiens
ccttccttccccggagcactcctccagggactgagaatctgcagagccaggctcagcgctcgcctgcagagcctgcggtctgtgggacccgccagcaagatgaggaatcactttcgggagga

SEQ ID NO: 153095 - DNA, 122 bp, Homo sapiens
atctctgcttactgcaacctcactgctcctgggctcaagggatcctcccacctcagcctccggagtagctggggtacaggcacacatcaccatgctgggctgattttttgtagagagagtat

SEQ ID NO: 153096 - DNA, 122 bp, Homo sapiens
agtgagggtcgcccgggggccctgccaggccgggtcatggggcttctagatctttcggaacggtatcctgcaggtgcctggtgcccccagctcactctgaagtctgtccacgctggccgccc

SEQ ID NO: 153097 - DNA, 122 bp, Homo sapiens
cttaccggatttgaaattggtgagatgtttctcgggctggtcggtctgaggacctgaggtcgtaggtggatctttctcagggagcaaagagcaggaggacgggggattgatctcccaaggga

SEQ ID NO: 153098 - DNA, 122 bp, Homo sapiens
ccttgcgcccgggccccgcgctggcgccccccgggccgccgcccggcgcgggggccatggcgttcaccttcgccgcgttctgctacatgctcaccctggtgctgtgcgcctccctcatcttc

SEQ ID NO: 153099 - DNA, 122 bp, Homo sapiens
ataaataataatgaatccattcttccttcggtcgtgggtctggcaggcataaattccggccgggattccgaccccagggccagagcaggactcgccttggcgtctatgagtgggcggggctt

SEQ ID NO: 153100 - DNA, 122 bp, Homo sapiens
tttttcaagcaagataggatgggcatggagcccctgcaagagcaagccacgggcgccctccgagcccatcgccgctcagaacctgaacagagcacataagcaaggctcacggcgaccacagg

SEQ ID NO: 153101 - DNA, 122 bp, Homo sapiens
cctgagtgaatggaaccaagagagttacaccatcttaaattgtcaagtcgatccatatgtcggcacagataatcacagtgcataggcaaagcttgagctaccagggcgttcgccccaacatt

SEQ ID NO: 153102 - DNA, 122 bp, Homo sapiens
ggtcctggggatttggggacccttggggtccacatgcacctggctgacctggctgaaagccgctgtctcggagccccccacagcattttgttcccctcccgctggcccgggggccccacctt

SEQ ID NO: 153103 - DNA, 122 bp, Homo sapiens
cctgggccctcagcacagagcctctctctaggagctaccagccggagaatacagtccctccgcattatttgcagattccaaatttgtgacttcacctcgaaaatcagtacttggagcacctc

SEQ ID NO: 153104 - DNA, 122 bp, Homo sapiens
cggctggccaaaaagagaggggcagccccgcgtcctgggggcccctagcaggggaagtggcggttgttgcgctgggcatcctgtctggggcatctgtctgggaccctgtcggtgcctctcac

SEQ ID NO: 153105 - DNA, 122 bp, Homo sapiens
agcggcagccccagggggcgacaccgcagccaatcccggggtcccagctactctaggtcccgcagcagatctcactatggggggtctcgctatagcctgtctatctacaggagatctcgcta

SEQ ID NO: 153106 - DNA, 122 bp, Homo sapiens
ctcacagagcctggctctgccctcggagtgtgtggctgagcctctcacctttgcagtgggcgtagggcatggtaagggtgtaatcctcggctcggttcaggaaggtgagcgtggctttgccg

SEQ ID NO: 153107 - DNA, 122 bp, Homo sapiens
aaagcctgaaaagcctgcctcagaggatgtgaaagctctcgtttagttcagtgtggtcctcgggaaagctcttctgctcaccgcaagttggctggtttccaaagctgtgcgtgccagcttgg

SEQ ID NO: 153108 - DNA, 122 bp, Homo sapiens
atggtgcagaacccagaattagaagtttgtggttacagcatactctgtccttcagaaaggcgtgattctagctgttgaccccttgcagctgttggaatctctgcaagaacctctgtattctt

SEQ ID NO: 153109 - DNA, 122 bp, Homo sapiens
ccgtgagaaaaggagtgagtgttaagtccacctagttagtggtcattcattaccgtagcccgggacacttacgtgaacttcagacctcaaatcctccccatcttgcagccccaggcgcagac

SEQ ID NO: 153110 - DNA, 122 bp, Homo sapiens
ggtaggagcccggcaggttgacgcagcggccagggcggcaggctgccgggtcctggcactcgtccacgtctacgaacagcgagggggtgggtgggggccgtcacagctcggcccgggccccg

SEQ ID NO: 153111 - DNA, 122 bp, Homo sapiens
ggccccgagccttagacccttagcccctagccttgctcagagtggccacagagaggttaacgcttctgctggcttccctgctgcgctggggacgcgtggtgggtgggcactcataggttggg

SEQ ID NO: 153112 - DNA, 122 bp, Homo sapiens
ggtccagccatgccgcaactggcttcctccttgggtgccgacatctagacgagggggatgcgatggcgtccgaaaacatggagaagccagcaaacgcagagccccaaggagtgttacagctt

SEQ ID NO: 153113 - DNA, 122 bp, Homo sapiens
cctcctgtgctgaaggcagctccctggcctccagaaactcacagtcagtggtgggagggccgtaacagacccgcgcagttaagaaccagatgatgatgttgctgtagtatagtttggagagt

SEQ ID NO: 153114 - DNA, 122 bp, Homo sapiens
aatgcgcagtaagccaaacaccgacatattcagtgcttaggagcgggggaaggtttattccgtttggccaaagcgagagagcgggagaagaagtctctcaaatactgacatgccttagaacg

SEQ ID NO: 153115 - DNA, 122 bp, Homo sapiens
tccccttctcttagggttaagcaacatcattggcatcatagtttatatatcagccaacgccggagaccccgggcagcgtgactccaaaaaaagttactcctatggttggtccttttatttcg

SEQ ID NO: 153116 - DNA, 122 bp, Homo sapiens
ctctgctgagcttgcacaaggcagggtcactccagatggccatgggagctgtgcttacctcggaacccacagaccaaacccaagaactccctgcccaggcatggccatgtcttcagggcata

SEQ ID NO: 153117 - DNA, 122 bp, Homo sapiens
gctcaataaacgttggtcgctccttactccttaccactgagtctcagggcgaaagagtggcgcctgtctctttaaattatgcaaatagactgcgggtggcgtaagggggggaacataaaaag

SEQ ID NO: 153118 - DNA, 122 bp, Homo sapiens
cttaccatgcacgcctgggacccagcactctgtgcaggcactcacatgcgaacagccagccggccccccagcagtccctctgagagcaagcaaaaacaggcagcaagtgatgactggaaaag

SEQ ID NO: 153119 - DNA, 122 bp, Homo sapiens
tcctggaagtttggaggcacgggaactacattgcccaaaaggcgcagcgccgcgaggcggcgatccctgaccaatgaaaagaggtctgcccgagcgtgcgacacgcaatgggcgggacttcc

SEQ ID NO: 153120 - DNA, 122 bp, Homo sapiens
tccttcccacccacctgaaaatgttccccagttgccaaatcagaagggcaggggcagcgacgcggaagatgactcagggcccactttgaacctcctgggtacttgagcaagctcaagggtgt

SEQ ID NO: 153121 - DNA, 122 bp, Homo sapiens
ccccgggaacagcctctcaactgcgccatcactgatggccccgtcggtccccgcatcacacgtcacagcctctcaactgcgccatcactgacggccccgtcggtccccacatcacacgtcac

SEQ ID NO: 153122 - DNA, 122 bp, Homo sapiens
atgctccaggccgtggggggaacccgaggcgtggcggcaaatgcgtagagtcactcaacacgcactcggcctctttggagggtgagggtttctcatagttggcgtcttctaaaggaaaaaca

SEQ ID NO: 153123 - DNA, 122 bp, Homo sapiens
gccgaggcgtagctgctggaatcatcgcccatttttctaatttgcagcctaggagctgatcgtgcaaccctgttagggagctaatataggatgaagatgggacaagttggtgtcgagagtaa

SEQ ID NO: 153124 - DNA, 122 bp, Homo sapiens
agagattataacaaatttttcaaatcattccttagataccttgaaaggcaggaagggaagcgtatatacttaagaatacacaggatattttggggggcagagaataaaacgttagttaatcc

SEQ ID NO: 153125 - DNA, 122 bp, Homo sapiens
cggccgccttccttccctggggcggcttgtctgggagccgctttcccgggaagtgattgtcgtccggctccgaggcgttcctgccccctcccccttcccggccgctgagacttcccgatggg

SEQ ID NO: 153126 - DNA, 122 bp, Homo sapiens
cccacagcggcccctggcggccggaggactgcgccgcaccggacccggacgggtctcccacgcccctcccaacccggcagccccgcagtccggcaggtcccagcgaggcaggtgcaggtccc

SEQ ID NO: 153127 - DNA, 122 bp, Homo sapiens
ctctcgcgatctggcccataggctgtagtttgcagacccttgctatagctgaacaccagtcgcccacactgggtttgcggtgttccggggtgggaagtcgctccgggctgcgaagcacctcg

SEQ ID NO: 153128 - DNA, 122 bp, Homo sapiens
agggtgaggggagcgtgcagggaagcggtaccggctgccgacgccgcagcctgtctctaccgtgggcacacaaaagaatcaggccggtgccccctaagcctacctccccagagggcattcga

SEQ ID NO: 153129 - DNA, 122 bp, Homo sapiens
gtggcgcagcccgggctgggagactgacggaccgcgcccggtgtctctttgaggccctgacgtggacacacttcgggtttcacgactccgggtttctccaggggatgggccggccggtagag

SEQ ID NO: 153130 - DNA, 122 bp, Homo sapiens
tggcaaatgtttaatcagctgttgactgaagaaaataaggtccgcctgcccaacagcaaccgtttgtagagtctcagaggcccagcttctgtctgtatctacctcatgccccagaggcagct

SEQ ID NO: 153131 - DNA, 122 bp, Homo sapiens
ttctgcaatctttagaaataaatatttccttacaagttttcttttaggctgttgaatattcgttttgataagaataattgaagacatgggaaacccttcattacattgcagagtgacttaaa

SEQ ID NO: 153132 - DNA, 122 bp, Homo sapiens
aggggccactgcctttaaaaaagaaaaaaaaaaaaaatctctgcagttttgccagggagccgcctcctgcctgactctcacatgatgacctggaggccatctatgggtacggccctcaagcc

SEQ ID NO: 153133 - DNA, 122 bp, Homo sapiens
gccttgtgctttgttgggtttagggcgatgccaacagatccgacacggacgaggacaagacgtcggtccacttcgaggaggacttccacaagctcagagaactccagaccacaggtgcgtgt

SEQ ID NO: 153134 - DNA, 122 bp, Homo sapiens
aaaacaaacaaagaaaaaaaacaagggagcttgaaaactgagggatgctgtaggattctgcggcctgctaaccgattatgtgtattaatcagataggctaattgttgtaaccaccctctaat

SEQ ID NO: 153135 - DNA, 122 bp, Homo sapiens
cggactctgaaaactctggtatgattttgtgactcagaaaaccaactcacaggccgggtgcggtggctcacgcctgtaatcccagcactttgggaggccgaggcggcggattacgaggttag

SEQ ID NO: 153136 - DNA, 122 bp, Homo sapiens
atatggtgaaaccatgacagtcagtgaatgaggtgagtataagcaaagggccgtttgccacgatgtaacactacagtaaggataacagccaagcccgcacaatgaggaaacacctcgtcttc

SEQ ID NO: 153137 - DNA, 122 bp, Homo sapiens
aagcctgaatgacagcctggcggtcagagtaaggagtctggagactgagaaccggaagctcgaaagcaaaatccgggagcacttggagaagaagggaccccaggtcagagactggagccatt

SEQ ID NO: 153138 - DNA, 122 bp, Homo sapiens
ccagcagccctaggagcttcgagttctttattcatcattcgaatgctgtgggtataaaaacgtgccggctcaccagatggagccttatccactccacagacacacttgcgtgtcctctaaga

SEQ ID NO: 153139 - DNA, 122 bp, Homo sapiens
gaatttgaggacacagagaggcgcccggagacgtacgatctgcgcccggtgcaggggtggcggaagcagcttccaaggaggcaggggatcagtctgagatcgcactgctgctgacgggtccg

SEQ ID NO: 153140 - DNA, 122 bp, Homo sapiens
cagcagcctcaggcgtggctgctccgcccatctcgccccgcccccaagtccaccaggccccgcccctcaaacccacctggaggcgccggagccccagcctcaatttgcagcccgctttccgc

SEQ ID NO: 153141 - DNA, 122 bp, Homo sapiens
catggttacatctaaagcagcttccagagacaggaacaaacagttcagcagaaatagattcgcatcacaattttctgtaagaatgaattgagaaagcactaatagccctttggttaattaag

SEQ ID NO: 153142 - DNA, 122 bp, Homo sapiens
attaggatattggcttctgcagacacctctggctaagcccaacggtctgtttatttacctcgtaggaagctcttagcacatcaaaaaggtatttcaaacacaaccctcacccccaacaatta

SEQ ID NO: 153143 - DNA, 122 bp, Homo sapiens
tttgagagtccctgaagccaggatactagaagagtctggcttgtctgaacagctgaactacgaaataatggagtagggcaggtgggtgggggagcagggcgttctgtcgataaacgagctcc

SEQ ID NO: 153144 - DNA, 122 bp, Homo sapiens
tgcggctgtgtatcacagaggaagacagcagcactgccactggggctgacctggaaggtgcgtggggctctggggtagacccagccctggcacacagggcttcaggcactggagacctcacc

SEQ ID NO: 153145 - DNA, 122 bp, Homo sapiens
tttcactgcagaaggatgacccctctaggtgaatgtagtcactgtggtcggacacaaccccgtcctggtcgctgtcggaaaactccacgtgtgctcggggctgctcatcgctggtgacttca

SEQ ID NO: 153146 - DNA, 122 bp, Homo sapiens
tccagggtgatgcagggctcagatcatgatgaaatcactctacagaacaaacgtcacagccgcccagctgccacttgtccccaactccacacccactaagttaccatagaactggggtaaac

SEQ ID NO: 153147 - DNA, 122 bp, Homo sapiens
ggcccttctcctacactgacacgtaattgtcagattgttttatgagagcagcttcctgcccgcttcctgcctggcttccaaatgtgctcattcccgaggaagcctcacttctccttctcgcc

SEQ ID NO: 153148 - DNA, 122 bp, Homo sapiens
taaggattaattcttttgattgtcgaattacgtcttgtgcggatttgccattttcagaagcgcacagagctcacctgttgagtaaccgcgccacttcctggtccctaccacaggccggccag

SEQ ID NO: 153149 - DNA, 122 bp, Homo sapiens
cacggtgaaatagacaagctacgccggaagcaatcaagtttagggtatggatgtagtcggcggctactggttaaacgcttaacagaattccggccttagtaaaagaatcatttttcttcctt

SEQ ID NO: 153150 - DNA, 122 bp, Homo sapiens
aaagctgaagttagactgagatctacccctgcatttcccctcctcgattttcatctttcacggattgaggaaacaacctgtgaacggcccaaagccggctagacccaacctaaccatccgtt

SEQ ID NO: 153151 - DNA, 122 bp, Homo sapiens
ggccattgatgaaaagtcaaacaagcgcacagtactcggtgtaatcaggggcatttttagcgagatacctgggatgaaaacgggtgaccacctgaatcagagagcagctccggcgcaccctc

SEQ ID NO: 153152 - DNA, 122 bp, Homo sapiens
tcttttcctgccccttttcagcttgttcaggctcataaccatccagtgtctgccaagcaacggtctgattgatggtaaacaaccaaatcagaacacgcgtctctgtgcctgaactttcccta

SEQ ID NO: 153153 - DNA, 122 bp, Homo sapiens
cggaggtccccggaccgcggtgacggacggggctgcgatcgtggccggtgagactgggagcggagggctggggcggcgcccgagggagggcacaaacccgggaggcctcagccgacggcgca

SEQ ID NO: 153154 - DNA, 122 bp, Homo sapiens
aataatgaaacttaactttaaaaatgtttttattgcagtaaggtatataaaacatgaattcgacagtttaactatttctatgcatacaagtgagtggtattaattacattcacaatgttaag

SEQ ID NO: 153155 - DNA, 122 bp, Homo sapiens
tcgggacccggggtttccggggtggcagggggttcccatgccgcctgcgaggcctcggctcgggccgctcccggaacctgcacttcaggggtcctggtccgccgcccccagcaggagcaaaa

SEQ ID NO: 153156 - DNA, 122 bp, Homo sapiens
tcagtttcaatagtagtgtcaaagttcactatatacagacattcgcgcagatccccctttcggaaacattgctctgcgagtcctcccgtttaaacgcattcaatttttgggtctctctctct

SEQ ID NO: 153157 - DNA, 122 bp, Homo sapiens
tctgcgcgcctctctgggtagcggcggccgccccccggcagcccgcggccggccgcgccgcggcagcccccacccttgccgagacactcgccgggcagtgccctggggccggggctgggggg

SEQ ID NO: 153158 - DNA, 122 bp, Homo sapiens
gagggtgtggagtgcagggctccttattgcgcaggcgcaaggactgcccggtaggacgagcggtctatcaaggggagggaagatgaggttgaagagattaaaaaaccgggtgcgcctgcgcg

SEQ ID NO: 153159 - DNA, 122 bp, Homo sapiens
aattctgcggtgaatcagaaaagctgtcctgatttcctctcgctgtatacctggagccggcgagcgcctggggcttgccttgtattattgaaccctcatcacaacactgggaggggattagc

SEQ ID NO: 153160 - DNA, 122 bp, Homo sapiens
agttccgtgtggggcaaccaccaacgaccagaagctgcggctctcgggcaagagtcattgcgggtctggccgccgggccgccgcccacattgacgcgggtcctgatggtgctggggtcccac

SEQ ID NO: 153161 - DNA, 122 bp, Homo sapiens
cactactggagagactcccaggagtttctctgggtggcaacatctcccatctgtgtgccccggtaaggagggacacacttactctgccattgaatgcaccctcagtttattggccttgactc

SEQ ID NO: 153162 - DNA, 122 bp, Homo sapiens
aagagccgtgttctgggagagaatcgctgggtgccgacgccagttggattcctggaaaggcgtccctaagggaggggtgcaggcagttaccggtcctccctccagtggaactgcccgtgttc

SEQ ID NO: 153163 - DNA, 122 bp, Homo sapiens
tgttgttaagggataagatagaacgagtgagaaaaccagcaagtcagagggtcgcaggaccgtggaccgtccactggggacagcttagtgcctcctggtttaacttcagctgctctgcgggc

SEQ ID NO: 153164 - DNA, 122 bp, Homo sapiens
cacccgaggaacctgagaggctcctgtgagctagggcaggcttgaggctctgctcaccagcgcattcagcagggaggagaggctggcacatgcaaattcctttctttagtcatctttattgt

SEQ ID NO: 153165 - DNA, 122 bp, Homo sapiens
tgccctgggcgtactgaggcgcggtggcctgagcccggccgccatcgatgaccccggtcgcggacttgcttcaggctggccaccccccgtgagtaccgtccgcctccctcttctcccctctg

SEQ ID NO: 153166 - DNA, 122 bp, Homo sapiens
agcgctcccatggttcgaacgggatggatgcagagcagctgggcccgcaggaagctcgggcgggggcaggaaggggacaggatggggaaagtggcaatccctgtgggggctgggaccaaagg

SEQ ID NO: 153167 - DNA, 122 bp, Homo sapiens
tgaaattctgatggggtcagcgggttctttgatgttgcccaccagaagattgtctctttccgatccactctctctccttttgttttttcctcatctacactcacgttggttttatttagcta

SEQ ID NO: 153168 - DNA, 122 bp, Homo sapiens
gggcgagccagggcggggcggggcgagccagggcggggcggggccctgactggactgcgtcgcgctcgggggccgcgccgggtagcgtttctttttagtgcctgaggcagctctggctcgga

SEQ ID NO: 153169 - DNA, 122 bp, Homo sapiens
tctccagacacggtcggttcctgtggccccgctgcgccgcggcggcaccacctccacttgcgcctgtggctccacttgcttggttctggtccactggacgctcaccctgagaaaacacgctg

SEQ ID NO: 153170 - DNA, 122 bp, Homo sapiens
atagggttgtttgttattggtttgcaagtgttttatacagtctggatacaaattcattatcgtatatatgttcacagcatttccttcgagtctgagtctgtagtttgtcctttcattttctt

SEQ ID NO: 153171 - DNA, 122 bp, Homo sapiens
aggtttggctcagaaagcagcagcagggcagctggagtccaaagacttgcatctttcaaccgggaaaaatctgtttataggtccttggaaattttggatccttgcggtctggactggctagg

SEQ ID NO: 153172 - DNA, 122 bp, Homo sapiens
acgaagcacctgcactcttggctgctttacgctcccttcagtgcgtgagggttccgggctcggcacatcctcagcagcccttgttactgcccatctgcgtcgcgaccgccatgctagtgggt

SEQ ID NO: 153173 - DNA, 122 bp, Homo sapiens
ctagcgcggcccaacctttactccagagatcatggctgccgaggatgtggtggcgactggcgccgacccaagcgatctggagagcggcgggctgctgcatgagattttcacgtcgccgctca

SEQ ID NO: 153174 - DNA, 122 bp, Homo sapiens
tccttacagtaccattcaggaatggggactgtggagaactggactgacggatgactctcacgtctcctccatagccccgggaccgtgttgctccagtattaacctctgtgggtggcctgcac

SEQ ID NO: 153175 - DNA, 122 bp, Homo sapiens
gccccgctgtgcggtctagggccagtatctccaggagggccacaaacccgccccgctgtgcggtctagggcgaatatctgcaggagggccacaaacccaccccgctgtgtgatctagggcga

SEQ ID NO: 153176 - DNA, 122 bp, Homo sapiens
aaaacgtagctccgcaggtcctggggctgggagcgaggtgggtgtcaaggtgggccgtggcgctcaggccctgcccttccatggcatccaactagcagtcacgatctctgatgtcctagcct

SEQ ID NO: 153177 - DNA, 122 bp, Homo sapiens
tggcaggcggcctgggcctcttcctctcctatgtgtggaagtgggtcaggctctccctcccggggcctgggtttctagctctgggcagcgcccaggccttactcatcctcttgcttatagcc

SEQ ID NO: 153178 - DNA, 122 bp, Homo sapiens
ttctttttagtcaccaggaaggagtaaattatgagggagggtcggagttctgcagagcaccgagggccacatggggaaggcgttcttgtttctagaggccgctttaaccagacccacttggg

SEQ ID NO: 153179 - DNA, 122 bp, Homo sapiens
tgggcagggttccttctgtgtctgggatgtgcgggtgtcttggcgctgacgagggtctcccggtcccaactcctctcacccgttgccgagcctgtgctgctgtccccggagggagccgtcgg

SEQ ID NO: 153180 - DNA, 122 bp, Homo sapiens
ttgatctatcgtggcctgctcgtcgcagtccaaacccgcccaagactgcagcccaatcaacgcctggagcctcattctgtttccagctttgtccagggcagcctgttttacccagatgggcc

SEQ ID NO: 153181 - DNA, 122 bp, Homo sapiens
ccacagggtggcaaggggccacttggtgcccagaacaacttctgctcccagaaagccttgcgttccccggacataaagaggctttgagctcggggagccccgccccgtgcggcccctcccac

SEQ ID NO: 153182 - DNA, 122 bp, Homo sapiens
tttttgagagttaaaaggaccctctcaaaaaccgaccgcggtcctccactgggtagggggcgctccaagacagggactcttctagcctgttgcctctccatgttagcgatatcctcgttgct

SEQ ID NO: 153183 - DNA, 122 bp, Homo sapiens
gtcaggttggtttgagaggcgggtgggtataaaagtgcaaggcgggcggcggcgtccgtccgtactgcagagccgctgccggagggtcgttttaaagggcccgcgcgttgccgccccctcgg

SEQ ID NO: 153184 - DNA, 122 bp, Homo sapiens
ggaaagggccttttccttctggtagagcaaatgtcacagtaaagggcagctggtcctggccgggtcagagccgtggtgaggcacgcactggagcagccgcgggagcctccctggtgaaggga

SEQ ID NO: 153185 - DNA, 122 bp, Homo sapiens
atacaaaactgagtgttgtgtctgccctcctgcactcatgtgtgtaagtgcacacatgcacgcacacacacacacaccccaatttcctggcatcgtccacccgagtggatgagtggatggtg

SEQ ID NO: 153186 - DNA, 122 bp, Homo sapiens
tacctggcttccaactctgcggcagaaaccgcaaacgtcaaagtacacaccaacgcttaccgggagtggggctcgaacccacgcggacacctgtccattggatcttaagtccaacgccttaa

SEQ ID NO: 153187 - DNA, 122 bp, Homo sapiens
ctggggagcaacaggctggggtgggctgagcgtgggaaaggcaggatcctccttctgggacggctgttctgctatcactctgtcctgagcctgggccctagaccctgagttcccactctagg

SEQ ID NO: 153188 - DNA, 122 bp, Homo sapiens
tacggaagaatggtaaaaacgtacttggcctccccgtcggggaatcgaaccccggtctcccgcgtgacaggcggggatactcaccactatactaacgaggaccgcccataaaacaggttctt

SEQ ID NO: 153189 - DNA, 122 bp, Homo sapiens
gggcggggcctgggcgaggtaggggcggggcgccaggcggagagacctgccctgtagaaccggcagacgcggggcgggggcggatctgtgcttctctcagccgcgtacctagccgctgtttt

SEQ ID NO: 153190 - DNA, 122 bp, Homo sapiens
ttaaaactctgccgctgctgccggagactgatctgggcggcagttggcggcctcggctagcggccaggagccacttctgcgggtgcccagagaagcaaaagtcgccggtcccatgtcgtcgc

SEQ ID NO: 153191 - DNA, 122 bp, Homo sapiens
attttgcatcgctcatctcccatacacacgcacagccttccaaacctggctttcaggcggcgctttctggagcctggctgtctattgtcagcacgcagaagcccccgaaacctgtgaagccg

SEQ ID NO: 153192 - DNA, 122 bp, Homo sapiens
atgggccgtccggctgaacaaagctgtcctaagtgctcagcgcaaagtcgagtcaggtcccgcccatggcacccggagtggagcctcagaaatcatgactgctccctgtgaatattctagtg

SEQ ID NO: 153193 - DNA, 122 bp, Homo sapiens
ttccttctgagatgatgaaatattttgagactgcatagtggtgatagttggacaatattgcggatatgctgaaagctactgaatcgttcactttaaaatggatccaattgtgtttgtgttat

SEQ ID NO: 153194 - DNA, 122 bp, Homo sapiens
tgttcctggctggacttgatgtccagggcctgaggggttttctcgccgagtctcctggggcggtccggaggctcgtgccctgttgtggggcccccatttgccgccgccatgcccacggccgc

SEQ ID NO: 153195 - DNA, 122 bp, Homo sapiens
gagatctgtgcttttggaaggaggggcaatttaaattaagaagtggttaggcatgggtctcgaatcttagcttccccgcgaggtctgggacaagtgaagagaggtttcttttctggacctca

SEQ ID NO: 153196 - DNA, 122 bp, Homo sapiens
ctcatggaggctgaacttttggcaggaggtctgaacagcagtccttctggtggtgcagcccgtgactgatggtttctttcaactgccccgttactcccctgggaaggacacaaccctcatga

SEQ ID NO: 153197 - DNA, 122 bp, Homo sapiens
cgcacataatggcactgtgaccacactgcacactggtgcgtacgaagtggagacagggttcgggtgacactcaaacaggagagtctgcaatcagggccgcatcctggggctggacggggcca

SEQ ID NO: 153198 - DNA, 122 bp, Homo sapiens
ccagctcagcttgcgtttattggaaactgcttacccagcactccacaaaggagcttacagcggggtgacacttaggactcctatggcctaatcctgggattagcacagggccatgggctggt

SEQ ID NO: 153199 - DNA, 122 bp, Homo sapiens
agctaggtctcagtgcgcagctgcaggagtgccgcagtctacagggtactgacccccgcccgggtcccccacagccttctgcaagggagacacccagctaggtctctgcacagctgcaggag

SEQ ID NO: 153200 - DNA, 122 bp, Homo sapiens
agacggagtctcactctgttgcccaggctggagtgcaatggcaatctcagctcactgcaacgtctgcctcctggggtcaagcaattctgcctcaacctcccgagtagctgggattacagggg

SEQ ID NO: 153201 - DNA, 122 bp, Homo sapiens
aaatatcccgggccctagaggcggtcgcacaagggcgagctggagcactagtggagttggcgggaaaggcacggctgcgggcgccccctgtccgcacggaggagccgaagtcccgcagggtg

SEQ ID NO: 153202 - DNA, 122 bp, Homo sapiens
tcgtcgtcctcggaccatcactttggcatttctcgattttgtctgcttctgaagggaccgcgttgtcaggcgagggacggaatcttggaggctccctgggcccatggaaacaggagcgagga

SEQ ID NO: 153203 - DNA, 122 bp, Homo sapiens
ccacaaatgccttgaactgttgtctgggattgttttgtggggggagggaagggagtgttccgaagatgctgtagtaactgcctcagtgtttcacgtaagactttttggtttgatcatctttg

SEQ ID NO: 153204 - DNA, 122 bp, Homo sapiens
tttcaaaatatactatgacattatatgtctttttaactatggtgacacattcaccaatggcgcaaaaacaatggtgggtaaaagcaccagcatctttgaaatgaggcactagtagtcattgt

SEQ ID NO: 153205 - DNA, 122 bp, Homo sapiens
atctccctggggactgtggggacccagatcagtctggggtccttcctggtctttccccatcgtggtctggtctggcctggctggaaaggcactgcatgaaaacccaggcatcagatcccagg

SEQ ID NO: 153206 - DNA, 122 bp, Homo sapiens
cgctcagaaggaaagccaggtcgctaaagctgccgagagagacaccaggagcaccgggaacgccgggagcagggaccccgccgccccgttgccgctgccgcagagttcgaataagctgcctt

SEQ ID NO: 153207 - DNA, 122 bp, Homo sapiens
ccttggatgccgcaggcagcgtctgtgatgtctgtttcatacaccctttggaaagtcctacgctcaaggcaaacaagtttgccgctgccacatcccctttgaacagacgtaccagtgactat

SEQ ID NO: 153208 - DNA, 122 bp, Homo sapiens
gacattgggtagatgggaggaaacattaagaacagatggagaagtactggccagagagaacggcagagaggtggtccagtgccttgccctcagtgctccctggcaactttctccaggaggta

SEQ ID NO: 153209 - DNA, 122 bp, Homo sapiens
ctgggccaatttttgcttgtaagtctttccggagacccctggaatttaaatcattagcaccgcgcccttccccgaagagtcttcgaagggttgccgcttttcggtggcgcagttctcgcgag

SEQ ID NO: 153210 - DNA, 122 bp, Homo sapiens
atatattcaaagaaaaataaattattgtaccaaaaaagacacatgcaaccatatgttcgtcgccacactattcactatagcaaagacatggaatcaatctatgtacccatcaatagtgggtt

SEQ ID NO: 153211 - DNA, 122 bp, Homo sapiens
ccactgagtcaccggcgctcggggaggggccaggtccactgccagttgaatctggttctgcggtcgcttgctttggggaactcaggcaagcgtcctgaacacttcaaaacctcccaatgatc

SEQ ID NO: 153212 - DNA, 122 bp, Homo sapiens
tcaaacagttactgcaaatgactaaaacaatctgagccttaaaacttggttgtgcaagttcggctactagagttcatcatctgttatgggcattgttcttgaaaaagtaccaaacaaacatc

SEQ ID NO: 153213 - DNA, 122 bp, Homo sapiens
cgtggcagcttgctctgcaatggcaaacaccacaccaaaccaggaggagctagcctgtgccgacacctgcacacacggctgccccaaagtcccacacccaggggtgggatgctggagatgaa

SEQ ID NO: 153214 - DNA, 122 bp, Homo sapiens
ctcccgcagaggccgagttgcctcccgggagcgcgcttctgcgggatgctggggcgcgagcgggactgttgactaagcttcgttactgggccctggaagcgaggtcagagctggaaatggcc

SEQ ID NO: 153215 - DNA, 122 bp, Homo sapiens
cctccctgtacatcacagaggccaacctgaaggaggaggcttagccatccactgggggagcgttcttctcacccagctgctttgagcctggctgagatggaggctagacttcaggaaggact

SEQ ID NO: 153216 - DNA, 122 bp, Homo sapiens
gactcgccccttcaggcctcaccgccagtctccccctgtctcggtcctcatcaccatgcccgccccccggaggaccgacctccagcaccgtctcttgctctccgtgttccacacctttgtct

SEQ ID NO: 153217 - DNA, 122 bp, Homo sapiens
aggcccagctgctctgtgaaaccagaggctccccgaggcacacgcctccctcgcccgccccggcctggcatctgccagtcccaccattttgctgagactctgtgaaggtgaatggggttgct

SEQ ID NO: 153218 - DNA, 122 bp, Homo sapiens
gaaaaagcataggcgttgggatcagaggtttatttccatttaacagatgttttttgaaagcgtaacatgatccaggcccttggcagggcactagagatgcaagaatgaataagaattcaatt

SEQ ID NO: 153219 - DNA, 122 bp, Homo sapiens
gtgtcccctggtcaccgtcgtgctgttctctggtgataggctgtgtcccctggtcaccgtcgtactgttctctggtgacagcgaggctgtgtccgctggtcaccgtcgtgctgttctctggt

SEQ ID NO: 153220 - DNA, 122 bp, Homo sapiens
gctccattagaagaggcgccgaggaggaagtttgcccgcgaccatgaagagggggagcgacgcccccaatagttggaacaaagtccacttgagattggaaatgactttcgggcttgtcagaa

SEQ ID NO: 153221 - DNA, 122 bp, Homo sapiens
gcgctcatcctgtgcttctggtacggccgcttcgccttcagcccggccacctacgcctgccgcctggcctcacactgcctggcctacgccaactcctgcctcaacccgctcgtctacgcgct

SEQ ID NO: 153222 - DNA, 122 bp, Homo sapiens
acatcttattggccttttttccaaccactatatgcctggggacctcaaaatgggagccagcgatagaggtaattcaatgcccttcccactgtgactattgcgacatgtcttaaagcttctga

SEQ ID NO: 153223 - DNA, 122 bp, Homo sapiens
ttgttactctcccttagtttgcacaacactgaaccatctcattttgaaattcaagagtggcgaggaggcctttggtggaagattgtaatttgggagaagggaaagtcaagagcaagatcgcc

SEQ ID NO: 153224 - DNA, 122 bp, Homo sapiens
ctccagctccaagctttggggtttccaaaattctgggggcttgtctccctgtcccccccccgccccaagtttccctccgtcgctggcgctgtccggtgccttcggtcgctcgggccgccccc

SEQ ID NO: 153225 - DNA, 122 bp, Homo sapiens
acaggcatgagccacagcgcccagcctgtagtaaaattgtttaaaaagatgatactgggccgggcacggtggctcacgcctgtaatcccagcactttgggaggccaaggcagttggatcgtc

SEQ ID NO: 153226 - DNA, 122 bp, Homo sapiens
cgagactcagaccatctccttctgtggctgtctcacacagatgtatttcgttttcatgttcgtggacatggacaatttcctcctagctgtgatggcctatgaccactttgtcgccgtgtgcc

SEQ ID NO: 153227 - DNA, 122 bp, Homo sapiens
acgctgtgatctaatcaaggaaaacctgggacgcagctaatagatgcgcatcgagtgtatcgacgctctaagtacgagggctggaacagtgagcaggatcagtccattgcttttgcctacct

SEQ ID NO: 153228 - DNA, 122 bp, Homo sapiens
cctgaaagtcgcaagagcgtgcccgtgacaggaggctgtgcgcaagaagacgtttacagccgttttatttgtaatagccccaaactggaaagcagacgggtgtccttcaacaggagaataga

SEQ ID NO: 153229 - DNA, 122 bp, Homo sapiens
cgcccaccgtgcctggcccctccggatgcactcacgttctgataaggccccaccagaaagcggtcgtgcacgtagcgctccaccaggctagtcttgcccacgtactccttgcccagcatcac

SEQ ID NO: 153230 - DNA, 122 bp, Homo sapiens
cgagttccgattggttccacatgaggggcgtggctctctgtcgtcactggggagcgccttcgctgacgtcacaggcgcgggccctcggcgacgcaatagcgccaggccttccgcgtcgtcag

SEQ ID NO: 153231 - DNA, 122 bp, Homo sapiens
ttggaaaaggcttgttgaactctaaaaggtttctcccaggcctcaatcactttcacccaccgggagcatccagcactgctaactatccctcctcgcttctccagtatctctgaacactcttc

SEQ ID NO: 153232 - DNA, 122 bp, Homo sapiens
ctgcgccagggttcgctggcgcacaggtgtgttcaatgactcggctccggccgagacccgcggactgctgaggagtggtccctgggagactgtcacctgctccgttagcatcgggggaaggg

SEQ ID NO: 153233 - DNA, 122 bp, Homo sapiens
agtcattttctcttttcctgatctttgaagatttataaccagagattaaaatccatgccacgattcctgagatgaattgttttactatcgaatgctcattatatacaatccctgaaagggtc

SEQ ID NO: 153234 - DNA, 122 bp, Homo sapiens
tgagcgcgatcccgcacatcctctcctgcgtttacggacacgcgcagcaatcgccgtgtgcgaatgggatcctgcgccacacgctgatttgtaacctttctacactttgttccactcgcccc

SEQ ID NO: 153235 - DNA, 122 bp, Homo sapiens
ctcggcgtccgcggccccccgcgatcgcagcagcgcccgggctcgctccgggcgaccgtgcgtgtggcggcggcggctcccccatgccaccagcctccctcggcgaccactcgccgggccgc

SEQ ID NO: 153236 - DNA, 122 bp, Homo sapiens
ctccgtctcaaataaacaaaccaaaactgaactacggagacgccctcgacagttctttcccggctgcgtcgccgctggctgaggtcagaaacgccggccttcggctgcggcggcggctgcgg

SEQ ID NO: 153237 - DNA, 122 bp, Homo sapiens
atcaaagcctgggtctctaattcccaggctggagattctgggctgcctgctcctcctgcacggggcgaaaagcccacctgggatccgagcgggcggccgcgccactctcgcaggctccatac

SEQ ID NO: 153238 - DNA, 122 bp, Homo sapiens
tgccagaggcagcgcacacaagctgggaaatcctcagggctcctaccagcaggactgcctcgctgccccacctcccgctccttggcctgtccccagattccttccctggttgacttgactca

SEQ ID NO: 153239 - DNA, 122 bp, Homo sapiens
gcaggcggcggcccggcccctttgtgcctggagtgtcacgcgcgggcgctcctgccgccgcgcctgggagaggcctccggcaccccgggcccctttccaagcacaacagcagccctgccgcg

SEQ ID NO: 153240 - DNA, 122 bp, Homo sapiens
aaagcacaggttcaaactggtgcagaggctgccgctggagcagggaggctccctgggaaacgtgggcgcagtcaccagcaggaaaaacaggcgcctgcaggaggagcagctagggaagtctg

SEQ ID NO: 153241 - DNA, 122 bp, Homo sapiens
gtggaggagggcgccttccagaacctctcgggtctcctcgcgctgcacctcaacggcaaccgcctcaccgtgctcgcctgggtcgccttccagcccggcttcttcctgggccgcctcttcct

SEQ ID NO: 153242 - DNA, 122 bp, Homo sapiens
ggcgccgggagcaaggtgcgccgcgcccccgccccggctgctctgccgcgcccaccggagcgccgcccccgccccgccccgccccgcctgctcagagtcccgacccggcccgcggcgagcgt

SEQ ID NO: 153243 - DNA, 122 bp, Homo sapiens
caataattttctttctatgtctgcttatttcacttagcataatggtctccctgtccacctcggctcccgcgcggggaggaggggcaagggccctccgcccgggccccgcctccccgcgcgcc

SEQ ID NO: 153244 - DNA, 122 bp, Homo sapiens
taactgttgaatgtgctaggaatgcaatatccggagataaggaggaactacatggaagagcgtgggctctggtcatgttcctccaagaagaggatgccctctaacactttagcacagcatgt

SEQ ID NO: 153245 - DNA, 122 bp, Homo sapiens
accccgaccgcttcccccaagttctgctgttggactctggactgtttcccctctcagcatcgcttttgctgggccgtgatcgtccccctttgtgggctggaaaagcaggtgagggtgggctg

SEQ ID NO: 153246 - DNA, 122 bp, Homo sapiens
gtgaatcagaaggacgtagatcccctcactgtatcactgtgtgtgtatctactcactgtgcgtgcgtgttctcacggccccattgcattatttaaagggacactagtttattcggatggaga

SEQ ID NO: 153247 - DNA, 122 bp, Homo sapiens
tggcccgaggtagtctgtgaaatggcacctgtgcctgctgcctagccctaccttgccagccgcaaaagcgattctgtctgagattgcagatcctgaggctgggcttcttggcactgttgctg

SEQ ID NO: 153248 - DNA, 122 bp, Homo sapiens
ccttaccggagggacagccaaggtccttctccccagggacaccatggctctatgcgggggcgggtcctcctcggggacactgtggccctccgtgggggcggatcctccccagtggcttccca

SEQ ID NO: 153249 - DNA, 122 bp, Homo sapiens
ccctgaacttgtcttcaaagttctcctacggggttggcagccccctcttgaaagctgctccgtagccgaggcagcatatggactgttgacagagcagctgctggggaagaagacgctgaaag

SEQ ID NO: 153250 - DNA, 122 bp, Homo sapiens
ctgcacgcctactgcaggtgcagcaccctcagcccatgtttcatgtattatctcatttaacgcatgtatcatctcatttaatgcatgcattatctcatttaattctcacaacccctcaggtg

SEQ ID NO: 153251 - DNA, 122 bp, Homo sapiens
cccgccctctgtatctggcccctgggcagctgcccggggaggcggccagcgagctggggccgcgcaatgtcgcacggagccgggctcgtccgcaccacgtgcagcagcggcagcgcgctcgg

SEQ ID NO: 153252 - DNA, 122 bp, Homo sapiens
cgttgcaggcgcctggatgagtgtttattctgtgattctttgacttccttgaccatggaacgttttttttccccatgggaatatagttcgggaattgcctctccagcctgatggaaggttgg

SEQ ID NO: 153253 - DNA, 122 bp, Homo sapiens
attgattggtgcatgcctgaatgcagccatgacattggtacaccctgctctttgttagaacgtcacaaaaatgaatatgtaagttatatgtaattccacaagggggcacaatagaaacaaaa

SEQ ID NO: 153254 - DNA, 122 bp, Homo sapiens
gcctgggtcatggagatgcggtgtcctcagaggactcggcttctggcccgaggcctctcccggcagggtctgagaaacgaaagctgcctcaccatgaatgccagtcctgcgtttttgttttt

SEQ ID NO: 153255 - DNA, 122 bp, Homo sapiens
ggcgagtcgagggttcaggtggtgcgccgtggcgccgcctgcgaccggcagctcgttcgccgcactttggaggcttcggctgcccctccgacccacgtagggcccggacccgggcctccttg

SEQ ID NO: 153256 - DNA, 122 bp, Homo sapiens
ccatttcttctgggactaccagaagatatatcgggagcactgagctctgctttggcaacacgctcttaccttctgctcaagatcttagaccaagtacacgcttcgctgccagaggcacgaaa

SEQ ID NO: 153257 - DNA, 122 bp, Homo sapiens
ctgtggagcaatggaattggagcaatggaaacctctaaaacacttaattcgtttaacatccgctcctcaaaccctgcttgggcattactcttctccaaattttgatggagtagagttagcag

SEQ ID NO: 153258 - DNA, 122 bp, Homo sapiens
acctccgcgtgcagggtctctgcctctgtgagggctcaggtctgaacattcttgctagtgcgcgcgcgtgccggttgggtgcacgcttggtgttggcgacagagcctgcagcacgtggggag

SEQ ID NO: 153259 - DNA, 122 bp, Homo sapiens
cggacggctggtgaattgtgcggcgggcgcggggccctgggaggcagccccctcctgggtcgctgcccgcgggataaagcaatttccaagcacccgcgatatctccccgctccccgcaggag

SEQ ID NO: 153260 - DNA, 122 bp, Homo sapiens
ggctgtgttggtacgcaagcagtcacattgcctcccgatgcccagaacaaggatgttaaccgcacactggctcctgaagccagggaacattcccttcaagatggcagaggaaaggcgggggc

SEQ ID NO: 153261 - DNA, 122 bp, Homo sapiens
tgaaaaagttattttaaagggctctatcatcaccaagttatgtgggccccatctaacctacgccaatttcaaaaatgacacatggataggagataatttactctttcaagtcacacaagatt

SEQ ID NO: 153262 - DNA, 122 bp, Homo sapiens
ctgagtgggtgagccttggcctgctcccacagccaattgctccacttgttggaaaccaggcgtacaggctgagcccctcaaaacacacagttcctcacacagggcaccacatttgtaactga

SEQ ID NO: 153263 - DNA, 122 bp, Homo sapiens
tatatagtgcagtcagtcacaatacttaaaagattaagctgaggttgtaagagctgcaaacgctgtttccccatgctatgttacatagtaatctagaatatctgtggcccagatgtagacta

SEQ ID NO: 153264 - DNA, 122 bp, Homo sapiens
gccgcagcctccggactgactgggacaaaatggccgagccgcaaagaaggtcaagacagccggcccacctgacccggaagtactgcccctcgcgttcaccacctctccccccgcccccgccg

SEQ ID NO: 153265 - DNA, 122 bp, Homo sapiens
ccctccaggccgcgcctccgccctcggcatctgggcctgcgaggggagtgttgggtgctgcgacagaccttgggatcctcagaggctgaggaggccttctctagccaaggccggtcgaaacc

SEQ ID NO: 153266 - DNA, 122 bp, Homo sapiens
cagtacatgaacacagtggtcagtacatatgtgactactaacgtctcccttattccacctcggagtgagcaactggtatgctgttcttttaggaatcttgccccacaggcctaagagaagag

SEQ ID NO: 153267 - DNA, 122 bp, Homo sapiens
cggcccccgccccatcccgggcctgctgctgcggagaccgtgggccggcgctggacggcgcggcctccagaagtgatagctaattggggagagaaagggcccaattgtctggcggggccgga

SEQ ID NO: 153268 - DNA, 122 bp, Homo sapiens
agggaagggacgagggtgtgggagttgaagagttgacaccggcttagtcactaacgagcccgtagcccgcggcggggctgaggcccggggaggcgggaagagcaacaggcgaggggcgcacg

SEQ ID NO: 153269 - DNA, 122 bp, Homo sapiens
caaagatcaacctctgctggtcaggaggaatgccttccttgtcctggatctttgctttgacgttctcgatggtgtcactgggctcgacctcaagggtgatggtcttgccagtgagtgtcttc

SEQ ID NO: 153270 - DNA, 122 bp, Homo sapiens
gttgtggaccattcagaccacctaagggttgagtacccccaagtgaactccttcaagccacgcagagaaaaacaaaacccacccagctgagcctgagccttctctgaatttctgacccatga

SEQ ID NO: 153271 - DNA, 122 bp, Homo sapiens
cacttcctaactccccgtatgggaccagcactaccctgaaatcaaaaccagacaagaaaacgagaggacagtgttcccaatgggcagacacacaaaatcctaaacaaaacgttagcaaatta

SEQ ID NO: 153272 - DNA, 122 bp, Homo sapiens
gggagggaaggggcagttgcagtgggtgggcatgggggctcagctactggcacagcaacacgagggaaccacggagagcaggagggaggacgtgggggcgggcgcagggcgggagcaccggg

SEQ ID NO: 153273 - DNA, 122 bp, Homo sapiens
cgagacagtgccgggacggggagccaggcttccgagtgcgcccggtcactgactcctccgcgctttcctcgtgcgcctgcagcccttggttcttggaaacgccggcgccttgttcagggctg

SEQ ID NO: 153274 - DNA, 122 bp, Homo sapiens
ggcagctcctgatcccacagggctgtcccttggttctcctgtgcccaccttgtacccaggcgctctgggctgtgtccaccacagaagccctttgtgagaagacaatggaccgttctgtaaaa

SEQ ID NO: 153275 - DNA, 122 bp, Homo sapiens
gccgccccgtccgggagggaggtgggggggtcagccccccgcctggccagccgccacgtccgggagggagttaggggggtcagccccctgcccagccagccccctcgtcccggggggtgagg

SEQ ID NO: 153276 - DNA, 122 bp, Homo sapiens
ttcgcttctctcaggtctccccaaggctgacccgggtcattggtgggccagcttctttttcgggaagtccaccctcccgttcatggccacggtgttggagtccgcagagcactcggaacctc

SEQ ID NO: 153277 - DNA, 122 bp, Homo sapiens
tggccgccgcgattcctttaacttcgcattccggaggctcgagggggctctgggaccgagcggcctcgcagcggcgacagaaatacatattttacgaaaaagaaaaaaaaaaaaacgagtcg

SEQ ID NO: 153278 - DNA, 122 bp, Homo sapiens
ggaacgcgactgcacactctcacagctccctggcgttctccacgtgggcgaaggggccgacgggaaggcacccagtgaacatgcgcactgaggctagcacccaaaggtggggagggctgcag

SEQ ID NO: 153279 - DNA, 122 bp, Homo sapiens
ctgggagaaaaaaaataccagtccagagcaagaaagctggctgggggttccagagatgaccgagtagtttaatggaacataaaagcattcctaagagaattctccaaaatttacttaaagat

SEQ ID NO: 153280 - DNA, 122 bp, Homo sapiens
gtggactacatcgctccctggtgggtcgtgtggctgcacagcgtcccgcacgtcggcctgcgcctgcagcccgtgaacagcaccttcagccccggcgacgagagttaccaggaggtaagttt

SEQ ID NO: 153281 - DNA, 122 bp, Homo sapiens
cggacaggtccagctcatagctccgctccaggcagcgcacgcggcacacagtaggtacgccgctgcggctcagttccgccccctccgcaggctccacccacggctcagctttgagcctccct

SEQ ID NO: 153282 - DNA, 122 bp, Homo sapiens
ggcactgactgggtttgctgctgaacctcctggcctggcagctctggttgctgatccacccgcttctttctttatagagattaagagcggctccagtgtgtgtacggagagcctctttgaag

SEQ ID NO: 153283 - DNA, 122 bp, Homo sapiens
cgccgcggaagaggcaggagagggaagaaaagcctcgggcggccgaggtgggggtgggggcgaaaggggacggccagccccagatccaaaccagttccaacgacaaaaacagccagcggcgg

SEQ ID NO: 153284 - DNA, 122 bp, Homo sapiens
accattcactgttgttaggtgaactctttaaaccttcttaagaccctaagcttcagtatacgaacagactcatacacctagagaaatcaagttggtctctatttgcaccttggatgactcag

SEQ ID NO: 153285 - DNA, 122 bp, Homo sapiens
ggcttaactttctccagcctcagtttccacttctgaatgggaccatcgagggcagtgtggcgaggattcaccaacatcgtccaggtgaaattggcagacacagaatgggcgctccgaaagca

SEQ ID NO: 153286 - DNA, 122 bp, Homo sapiens
atggccgagaagggagcatcccggggaaccctgcggcggctgtggtcactgcccaggaggcgccggggaactgcagggcgctcgaggccaggtgagatacaatggggtcgcagggcatgggg

SEQ ID NO: 153287 - DNA, 122 bp, Homo sapiens
gtccacactacttttatgaggtgtaacactcaccgcaggggtatgcagtttcactcctgacgctagcgagagcacgaaccccccgggaggaacaaacaactccagaggcgccgcatttaaga

SEQ ID NO: 153288 - DNA, 122 bp, Homo sapiens
cccctgaatccccatagttagttgctgtcattcttgatgacgacctctaatccgtggtgccgcaactgagctcgaagcagcagattcttgtttttaagatcttccacctgacatgggaagga

SEQ ID NO: 153289 - DNA, 122 bp, Homo sapiens
aatctcagacactttcggagcgtgttttttttttcttgtcctttcgctccccttttcgggcgccagctttcaaaccagaccaaaggtgtgctttcccccattatctcccagccttctttcct

SEQ ID NO: 153290 - DNA, 122 bp, Homo sapiens
gccccgctccggagcagccagggagcccggccgagccttgacgaggatgagctcggagaccgcagcagctaccgcccgctagcacctgagctcccagggggcggggcctcctccaggtgtgc

SEQ ID NO: 153291 - DNA, 122 bp, Homo sapiens
ttaaactttgcaactcgcgaatgagaagattgaaattatttgtaggtaattgcactattccgattttttaatgtatgaggcaaacaaataaattctatgtacagtgtgctgtgaatggtttt

SEQ ID NO: 153292 - DNA, 122 bp, Homo sapiens
gatggggctataaaaggggccctgacctcacgagatccacctgcatcccacagggctggccgtgggcagaggcacagctgtggccaatctgctgtggggcggttcctgataaggaaactggg

SEQ ID NO: 153293 - DNA, 122 bp, Homo sapiens
gctaactctagttggagaaaacacctaactttgttgagcgaacttattttaaatatgcaacgctaaaccttaatatgggcatttgatcctcctccttttggttttttttttttttttttttt

SEQ ID NO: 153294 - DNA, 122 bp, Homo sapiens
ccctaggaacacagtcttcattgcctcaaactggccttcctccctagtctagctgtcagccgtcatcacgctaccaccatgccacagtgggatcagcattattctcattggtcttctaccca

SEQ ID NO: 153295 - DNA, 122 bp, Homo sapiens
tgccaattctacactcctgaacccaacttcaaagagcctccaccaaatacctccttaagacgataaaaagcactaagttacaaataaacacgtcccggagcaaggcccggctgccgcgcgcc

SEQ ID NO: 153296 - DNA, 122 bp, Homo sapiens
ggcttcagttgtgtggccttgggcaagccacttaacttgtctgtgcctcagtttccctgacgtttaagtgagatatttgagaatctacaaaaccatttattggtctgctccttctggtcaag

SEQ ID NO: 153297 - DNA, 122 bp, Homo sapiens
ggagcccgacctggggctgactgcagagcaggctgctggcagggaccaaaaggagctccgcgccaggccggaggctgcgcccgtcactcgcggtcccggccgggtccctggcgcgtagtcag

SEQ ID NO: 153298 - DNA, 122 bp, Homo sapiens
gcaccccctgccccggcgcaggcgcgatcgcgggccgcccctcccgccgggcgccctgcacgcgcccccgccccgcctccgcaggctcccccgctccgggcgcctctgattggctctcggcc

SEQ ID NO: 153299 - DNA, 122 bp, Homo sapiens
ctccacagccttccacatgctggctaagctacaacttgaattccaaaaccagaatgatgtcggcatcattgtaacacacccagatatttgaggaagaagattcaaagctaaacagcccagga

SEQ ID NO: 153300 - DNA, 122 bp, Homo sapiens
ggtctccgcaaaccgggagcccagggagggcgggaagactggcgggggtccgaggcagcccgctacaggatacgtgatggacgcccagagacaccgccctccagctggtgggggaggagccc

SEQ ID NO: 153301 - DNA, 122 bp, Homo sapiens
tggcctgtagcgacaggtgattggctgagacgccctttatcacagcgaatgctaggcgttcggctcgtggtatcccctagcaaccgcctcttgtcacagatctgaaccaatcataagttggc

SEQ ID NO: 153302 - DNA, 122 bp, Homo sapiens
attttttttttttctatttttaaaatagggattctagttctgttgcctgggctggagtgccgtggcgccatctcggctcaccgcaatctctgccttccggattcaagctattctcttgcctc

SEQ ID NO: 153303 - DNA, 122 bp, Homo sapiens
gctactcacttgaaacctgggtggccctacctagcagaaaattggggaaaccccattaaacgcccggcagtgttgggcccgcctgaaagggtcctcgccgcgacccagatgccttcccgcgg

SEQ ID NO: 153304 - DNA, 122 bp, Homo sapiens
gtttcgtttaaactaacaacaaattatctaattaatatgtttcaattacagcatgaaaggcgcagcccctggaccgcccgccgtggaggcacaatagccccagagcccactctaggaattta

SEQ ID NO: 153305 - DNA, 122 bp, Homo sapiens
ctgtggaaagtggactaccctcaggggatgaagagagaattgagtggcccagcactcctacggttggtgaactgccctctggagctgagatcctagagggctctgcctctggagttggggat

SEQ ID NO: 153306 - DNA, 122 bp, Homo sapiens
agtaataccgtagtgtgatagatgagggaacaatagcatgagtttggccaaatcgctattcgtaatgtttgtttaacagatgaagaagtcaggtgacattttccattggtgtgttgtgcaat

SEQ ID NO: 153307 - DNA, 122 bp, Homo sapiens
acggtgggcggccgggatcaaaatgaaagccataaaggaagcgcgctgatcgtgctgttccgggggtgttaatcacagtggatcccctgggagaggacacgtccctagtcccatttcacaga

SEQ ID NO: 153308 - DNA, 122 bp, Homo sapiens
agaatgtctatcagccttattgataacgtctccaaaccctgattacatcaagtgtccgaccgcaggaggacggacgagaacgggtggcccttcacagaacaggctaattctcagcatgtggg

SEQ ID NO: 153309 - DNA, 122 bp, Homo sapiens
gggtgacagcgagtgcccagtctcctgccggaaagtgctgctgaagtcagaccacaggggcgctccgaggggggcgggatcgcacggcgggcggggtaacagtgctgaccaaggctgggaaa

SEQ ID NO: 153310 - DNA, 122 bp, Homo sapiens
gaccctcggccgaggatgccagctgctgagactgattgggggctggggagcgacctggcgcgatgtgggggaggaggagcgccgggccgggacgctgtcccggtgggatgggggagaaagag

SEQ ID NO: 153311 - DNA, 122 bp, Homo sapiens
tgcgccggcgtctgctgatcaagggcccagtacaaaggccgtcatggagatccaggccttcgccaacagcggcctgttctggtgcaagggccagccgggcagcccaaggacctcacgactgg

SEQ ID NO: 153312 - DNA, 122 bp, Homo sapiens
gctcccaccagaaggtacagcaaggagaatgatggaaaacagctgtaattgccggcaagtcgaagtttgtaaccccttggcccataggggctggctactgaggacaagttctgagttcgctg

SEQ ID NO: 153313 - DNA, 122 bp, Homo sapiens
tggtagaagcacaaacatgtaattgcagcaaatgcctagcagagatacctgtttaatgcccgtctgataaatgagtgtctgaaggaagcacctgtcagattaatatatcaaaaaccactttc

SEQ ID NO: 153314 - DNA, 122 bp, Homo sapiens
ccagagaggtgaagggctgttcggtcattgcccatggagccaggggagctgtgggccttccgccgccaacctctgggctagccctgcagagatgctaggaggatgcagggaggtgaggtggg

SEQ ID NO: 153315 - DNA, 122 bp, Homo sapiens
agtattattaggaaagaattttgacctcatgagccttccttaaaaggtctcagggacctccgggggtctccagaccacactttaagaaccagtgttatactagaaagaaaaagtgaaatatg

SEQ ID NO: 153316 - DNA, 122 bp, Homo sapiens
taaaccacaataatcataaaagatgactgtaattaagactctttctgaaaccagaaaccgcgagttcatgcccccacctcaagagcccgagcttccccctctctgaaccgcccccacacccg

SEQ ID NO: 153317 - DNA, 122 bp, Homo sapiens
tggaccccaaggtcttccttggtggattcccagggagctcccctccgtcccccatattcacgtgtctctctggcgatctgggaatctgtgtccctcacgttagtctctgtcgggttttcttt

SEQ ID NO: 153318 - DNA, 122 bp, Homo sapiens
gccggttttgggaatatgtgatcatcatgctcattcgccctctctggagctacagaaacccgatgggtggtgcagaatctcactatggttccatttgcttttgatctttcggctggataagg

SEQ ID NO: 153319 - DNA, 122 bp, Homo sapiens
aggcggtggatgatgcccaagtgaagccgttcaggcctcgtggcagcaccagatcaagggcgaggttgcgctgctcgtcctcagagtacacaggccggtagcccagcagctgcagcgcacca

SEQ ID NO: 153320 - DNA, 122 bp, Homo sapiens
gtcttgcaggagagtgggacagaggccggagaggggaccggggtctgggctggacctgggcggggagcaaagttcccacgagaagtcagccgagaaggctctggagttcccggacagcaaag

SEQ ID NO: 153321 - DNA, 122 bp, Homo sapiens
caggcgcggtgagaagccagcccgtagtgcctcccgaaggagcccgggcgcagggagggtcgccctgaggacacggaggccgccaggcaggccaagggccgaggtgactgggctggggcggt

SEQ ID NO: 153322 - DNA, 122 bp, Homo sapiens
agggattcacttcacctctctaagcctcagtttcccatttgcaaaatgggcagaatgactcgcacctctggggatgaagaaaatgcacatgtgagcacgtgggtacttggcgacccggagat

SEQ ID NO: 153323 - DNA, 122 bp, Homo sapiens
tcacagttgggttctatgagaatggaacggcaccactcatttgacaggtggcagagctcacgcggtaatgcgagggatggggagcggctgtttctacagatgaagctttgctccctggctgg

SEQ ID NO: 153324 - DNA, 122 bp, Homo sapiens
catttgagggtcatttggccaggtaaagatcctggcagtcctaagcagcctcgctggtgccgtgggtcctgggtgctgcctgccagcatcctcggttgaggagtgtggagtgggacctcagg

SEQ ID NO: 153325 - DNA, 122 bp, Homo sapiens
cgtctgggataagcggttatgtcaaccagtcagacacaggagctttgattctgcactttgcgcgagccactcaggggcgggctgtaaagtcaggcttggctgacgtcagttgagtgggcgcg

SEQ ID NO: 153326 - DNA, 122 bp, Homo sapiens
gggggccaatttggtcctgggctgtggcttacctacccttgacctaagtcaaaaagcagacgcaataaatgggatacgcatcataataatgacagctgtatgccgagtgctttccaggcata

SEQ ID NO: 153327 - DNA, 122 bp, Homo sapiens
ggaaggcggcgcccatctggggcggggctgagaactaggctggcgccgctgcctggtaagcggggaccaagaggcccacggcctccatcaggaaccaggtgcttgtccaaatcccggacttc

SEQ ID NO: 153328 - DNA, 122 bp, Homo sapiens
ctgacctcccagagtcgggaagcctgggccaaccagggaagacttcctggaagaggtgaccggggcggagacccagtgatgcgtctgctccaggctaggggctcggtcctcttttctgtttt

SEQ ID NO: 153329 - DNA, 122 bp, Homo sapiens
gcgccatgcggggtcatcaagcccctaaatgcaccctcctgttccccaggagatgaaagccgatttggcggggctgggggctgctgctgctgcttttaaggggcccaaccttttaactgcag

SEQ ID NO: 153330 - DNA, 122 bp, Homo sapiens
agaggacagtggtggtagcagcagcaacagcagcagcagcagtgaatgacaccaaaggaccgcttggtagccactggaaccctttccagaactgctgtttggttcttctccatcctcaattt

SEQ ID NO: 153331 - DNA, 122 bp, Homo sapiens
gacacatattaggtgctttgcaaatattgaatgaaagaatacgccccatcagtatctcaccgcgcctgcgctagatgccctaggtggggccagccttgacgcgctgcgcctgcgcaatgtct

SEQ ID NO: 153332 - DNA, 122 bp, Homo sapiens
gagctcatcttctgcttgccaagttcattctcacctcctgacctttgcatttgcaatccacgctgccaggaacaccgttcctgagccaccccgtggactggctccataggccaatcaaggct

SEQ ID NO: 153333 - DNA, 122 bp, Homo sapiens
gtagggcaccaaggagggtgccaggctgaaccttggaggggaaaggacaggagaagaccacgagggctttgtggaggaggcgatgacccaaccgcatctacatttgtccaaacacatgaatt

SEQ ID NO: 153334 - DNA, 122 bp, Homo sapiens
aaatatagggcttcagctggggctcaggtctgcatgattaaaacgggcgtgaacgtatgacgggcctgaactccgagtccagatggagcgtgcccagggagtggctctgtgaggtctccggt

SEQ ID NO: 153335 - DNA, 122 bp, Homo sapiens
tctgttgcccaggtttgagtgcagtggcgctatttgcatcctccgcctactggcttcaagcgattctcctgccccagcctcccaagtagctgggattacaggttcctgctaccacgcccagc

SEQ ID NO: 153336 - DNA, 122 bp, Homo sapiens
gcagagctgggatttgaacacaagtaatctatctctgtgtccagcccttagccattccaccgggtctcacacttgattaaggatctcaatggcaggcatggtggtgcacacctgtaatccca

SEQ ID NO: 153337 - DNA, 122 bp, Homo sapiens
gcaggggccgggggcgcaggaggagccgggccgaagcgcacgcgcagtgggcgcgccttgcgctctgcagctcccgccgccggaagttgccgagaccccaggctctagcgcggcggggcggg

SEQ ID NO: 153338 - DNA, 122 bp, Homo sapiens
accatgaagcccaacttctccctgcgactgcggatcttcaacctcaactgctggtgagtgcgtctgcggagtgcggtctgggggccaccttccgttcgcacccatgcagccttcctccccct

SEQ ID NO: 153339 - DNA, 122 bp, Homo sapiens
tgcctcagcagttgaaagtgcattcagaggtgatgttcaaatatagagcaagttgttaaacgtttgcttaactggttcgagatgtgtatgcactctctgctttaaagaaagcaagcatacat

SEQ ID NO: 153340 - DNA, 122 bp, Homo sapiens
ggttgggaactccaaaatgggagtagagtggtccttgatggaaggagcgtttaagagtgtcgcctagccatcacctgcagttcgcaatctgtgggtacactaacccgcgaaaattggcaggg

SEQ ID NO: 153341 - DNA, 122 bp, Homo sapiens
gtccgtgacactccagccagaggcgatgccgacggctgccggagaaagccgggcttagagcgccacagttccacgcccgccgccggcctctcagcccagccggtcgccgcaacctcgcctct

SEQ ID NO: 153342 - DNA, 122 bp, Homo sapiens
cataagagaaaaatgtctgcatgtgctattttaagttgcgtcccatgtgtcagaggtagccgtgtcactaataaccttccttgatgatctattagtacatatgctaatgtttggtgcccaca

SEQ ID NO: 153343 - DNA, 122 bp, Homo sapiens
tgggctagaggtacacccttggaggcactatcatatagatggtattaaaacagattgggccgggtgcggtggctcatgtctgtaatcccagcattttgggaggctgaggtgggaagattact

SEQ ID NO: 153344 - DNA, 122 bp, Homo sapiens
tcatccttttgagggccccctctccttcccaaaaccataccactacctggaaagcttgctcgggataaggacaattgaggaaggagctctaacctccaatttttcaaggtatcactggcatc

SEQ ID NO: 153345 - DNA, 122 bp, Homo sapiens
ccctctgaggcagaaaaagcaagggttgttaacctctcttgaaatgaggaaacaaacacacggaagtcaagtcgtttgcctcacaagtcattccagggatgggctggaactcaggccaagag

SEQ ID NO: 153346 - DNA, 122 bp, Homo sapiens
tgtgtgcgctgcgcttggtcctccagacgagtctgatggcatctcactagcaaaggggagcgggggctcgtctccgagcacgtatggggcggggtgggtctgaagggagaaccccaaagtca

SEQ ID NO: 153347 - DNA, 122 bp, Homo sapiens
tttttttgttttcgttttcaaatatcagcctctatattcaagacacagttttattcttaacgaaactgaattcctgtctaccttcaggtagacttctgctgggatggctactaactttacct

SEQ ID NO: 153348 - DNA, 122 bp, Homo sapiens
gaggaaggagggcgcacagccgcgactaacctgagatgccgccccccaccacgaccacgtcgcatttgttgctcatggcgctcgccccgttccaggcctccctggtgcccgctgctccgttt

SEQ ID NO: 153349 - DNA, 122 bp, Homo sapiens
agatggctttcatttgcacaactgaataaaccatttatgcctagtgttccattactggaacgctaagcttatgggagttatttatatcttactgctcgaggtcctcaccaagatctgatttt

SEQ ID NO: 153350 - DNA, 122 bp, Homo sapiens
gactctttctttcaaatcagcatccatttacccaacggtgacggtgacgtgggcagctgccgcagttagttattctgcgtactcaaagcacggttacatcctgaaaattcttcagtcatgct

SEQ ID NO: 153351 - DNA, 122 bp, Homo sapiens
actgcagcaaatattgttaaaatttgctttaggctatctatcatcaaaatgaacttataccgctaggcttagataaaataccaagaaatactactgctagaggcaaacggcagctagtagga

SEQ ID NO: 153352 - DNA, 122 bp, Homo sapiens
ccccgactccgccctcagctccgacctcgactccgcccccaggcccacctcagcgcgccccgactccgacccgactctgccctcagcccgacctcgactccgcccacaggaccacctcagcc

SEQ ID NO: 153353 - DNA, 122 bp, Homo sapiens
caaagtaacaaatttgctggtgccaaaatttatttagcctgtttcactgggacaaactcacgttcaatgccactcagtataatttcaagtctgataagcatctaagtatttttaccccgctt

SEQ ID NO: 153354 - DNA, 122 bp, Homo sapiens
ataattaattctgcctgctgttgagttccatgtagatgggctagttgtaggaggacccttcgtgagcgtaggcattcactgagcacggtgctgctgtcagtgcactcttctttactgctaag

SEQ ID NO: 153355 - DNA, 122 bp, Homo sapiens
gaaacagggtactctgtggggctgctctgactggacggacatgagaggaggtcctgatgccgggctgatgtaccccacgcgcaggcgtgaggcgaggacgtcccaaagccaggggcctcctt

SEQ ID NO: 153356 - DNA, 122 bp, Homo sapiens
acctggaaggactccccttcccttcttcctaccatactcccccttcttatttgagctggccggaccacatactgatgacatacaaccctggtaataaagcactgctaagggtgacattcact

SEQ ID NO: 153357 - DNA, 122 bp, Homo sapiens
tgattcgttgttgactgcagcatcactaggtgggacatcactgcgttttccttgaacttccgcgggttctcctaaagttacttggtgactttttatgattgctttctgctcgtctgaataaa

SEQ ID NO: 153358 - DNA, 122 bp, Homo sapiens
agttgctggggagggcatttcaggacagccttgatcaaagggctggggagatggtccaggcgatgccaaccggaagccccagaggaggagaggaaagccatccactaggggaccatcgctgg

SEQ ID NO: 153359 - DNA, 122 bp, Homo sapiens
tcgcgccacagccaatgtctcctgttgctgtccgcccccgcgaagcgctgcaagggccagcgcccaacctgtcgctgcggaagaccggggcatagaacctgtcctggtgctgggcaagcgct

SEQ ID NO: 153360 - DNA, 122 bp, Homo sapiens
cattccttcccgggaggcggggcccacaggcctggggtgcggcaaggcaggagccagtgccgtgaagggcaacccagggctggtctcccgccaacctgtctgcagcccgagcacctgggcca

SEQ ID NO: 153361 - DNA, 122 bp, Homo sapiens
ggtccctgtgctgcctctggtgatcatgtgctgtggtcctggcagattgtcttacctctccggactcaggtcctgcgtctatggaagggtcacgaactggccatcttcaggcaggatctgac

SEQ ID NO: 153362 - DNA, 122 bp, Homo sapiens
gctctttgcaccccttactctgctgttggattggttgattggtttttgttttttagtcttcgcacttaacaccttccaacagacaaaatgttgatgtatttttgtgcctgttatttattccc

SEQ ID NO: 153363 - DNA, 122 bp, Homo sapiens
tccggccgcggccaggtgagcccgggggagcgcgtgcgctggcgccagggagtggggctccgaaccgggtgccgccccttcgccccgactgcctgcctctgctcgcgtctgcggggttgggg

SEQ ID NO: 153364 - DNA, 122 bp, Homo sapiens
gaggggagtggagttttgctgcctgatgcaatgtctggcagggccgtcccttatcacagccgacttgctgggacccccaccttccccggaggaggccggaacaggccgcagtccattttggg

SEQ ID NO: 153365 - DNA, 122 bp, Homo sapiens
gtgacttccatccagcactgggttcagaagaccatagctgagaactaatgcaaggctggccggaagcccttgcctgaaagcaagatttcagcctggaagagggcaaagtggacgggagtgga

SEQ ID NO: 153366 - DNA, 122 bp, Homo sapiens
tggggctgtccacccggaccccgtctgtgagcacttctgagtcaagcgcgggcgcgggcacgggcacgggtaccagcaccccgtccacacccaccaccaccagccagagccgcctcatcgcc

SEQ ID NO: 153367 - DNA, 122 bp, Homo sapiens
gccacttttcggagtcccccgccctcgtcactgcctccccggagctgcggggcagtcggacgcagagctgcctaaccgcaagaacgcctggccggagctgccctctgcagccgagccggcgc

SEQ ID NO: 153368 - DNA, 122 bp, Homo sapiens
ccaactcatcctgggtagtcagggaaagacggatgtccgggaaggcaagagcacaccaggcggagggaagaatatctgcagagaccctgaggatgaggaaatcagagcgcttgtgaagcgcg

SEQ ID NO: 153369 - DNA, 122 bp, Homo sapiens
ggaaacaattttctctaaaaataaacagtttcactgccgggctacacagaacttcctgcccgcctaggatgcgtccgggcccaggggcgcagtagggatagagggccgggtggaggcccagg

SEQ ID NO: 153370 - DNA, 122 bp, Homo sapiens
ctctgcccccggcgccggcgcatggaccacgccgctctaggcttgcctgccacgctccgccgcctcgccctggaacccgggcccggaccccgctccagcacacctgaccctggccgcttaac

SEQ ID NO: 153371 - DNA, 122 bp, Homo sapiens
ctggagtcagccgtgagccggggagagttggcccccgccgctctgtccctctcaggtcttcgtgagctctctggtaactgcaggcacttcctgtgtgttttcattttgtctggcttttaaaa

SEQ ID NO: 153372 - DNA, 122 bp, Homo sapiens
tggtcccgactcagtgcccaggtggcttcagtcggaaatgtctgccctcttccaacctcccgatcccggctgcctcgcggatcaggtacgcagcgccccagccgcaggtctggacatgccgg

SEQ ID NO: 153373 - DNA, 122 bp, Homo sapiens
catctttgagaaacatttaataatgtaatgtgtttgtcatacagggtgaatacagatgcacgggaggccatacggtttaggcaaaggggagcacaaaagttgaagatgaggcgctgccatca

SEQ ID NO: 153374 - DNA, 122 bp, Homo sapiens
atccaaggcaaaaaacaattgcaagcgcccttacttccgtgttgcttcatactcctcttgcgcctgcgctgtctccttggagcagaggcggggccaacaagcctgttttagaaaccctccag

SEQ ID NO: 153375 - DNA, 122 bp, Homo sapiens
tgcgtgagcactatgtagattcgacttcgtgttgcctgtgacacacaggcagggcaaagccgcctcccagcgtctcagttgaacccttaccctcaacaccagtgcactcctgtgggtggcct

SEQ ID NO: 153376 - DNA, 122 bp, Homo sapiens
gaatgttagcgggtgggaggtgcggctgggttgctacagccagagctgggcggtggcgggcgctgctgaaggagtctcgctgagctcgaggaggtggcgcgatggagggactggaaggtgag

SEQ ID NO: 153377 - DNA, 122 bp, Homo sapiens
ctttctcctctccctctctctctcttcctctctccgccccctaacattcccccccaaccccgcccagcaggaaaatgtcagaaagcagaaatggatccatctatcccgaggacagtggcgga

SEQ ID NO: 153378 - DNA, 122 bp, Homo sapiens
gggagcgcctcgtgccccagtgacacacttttccaacagccggcacgttgagctcttgcgcgcctgcgcaacgacaagactgtcgggatttgtagtccaccgacaaagtgggcggactgcgt

SEQ ID NO: 153379 - DNA, 122 bp, Homo sapiens
gctgtcaaagccgaagcctgggagcgggcaaagatgggatcagggggcagcttctgcagccgattggaggtgagatccaggcgggccagtttctgcaggtctgcaaaggtgccctcggcgat

SEQ ID NO: 153380 - DNA, 122 bp, Homo sapiens
tcttccaggccggccacaagtcccgctgcctcccaaccccggctccagcccctccgcggccgcagccttcaggccagaggaattttcctctggatcctgctagaagcctcggcagcagaagg

SEQ ID NO: 153381 - DNA, 122 bp, Homo sapiens
agacaaagatgatgtaaaacacccgcgtcagggttgtgacatcctcctgacgtcgaggagcgaccgccccttcccggatgatgtggctcgcacagcttacactttctccacctccgctggcc

SEQ ID NO: 153382 - DNA, 122 bp, Homo sapiens
acacaggacttgcagattcctgaagacaagtggctgcagatgtttccatgataatctccccgtgagggttccaggagttccatctttctatgagctgttttcctgagtagcttcctgatccc

SEQ ID NO: 153383 - DNA, 122 bp, Homo sapiens
ttcgctctagactaggcttccagagactactggaactgatttttcggacctcgcgctcatcgaacgcggtccagcagtgtgatgtcttattaccaacggggggcggggggccgggctgttca

SEQ ID NO: 153384 - DNA, 122 bp, Homo sapiens
tctgtgtcaaaaaaaaaaaaacaaaaagtaacacacttctggaaaacaatcatagagccccgtgtgtgagcctcctctatgctgcagaggcactctttatttggccatgtcaggtcctcaac

SEQ ID NO: 153385 - DNA, 122 bp, Homo sapiens
tgttcacacaagctgtgcactttcctttccaaagcaaaaaagcgactctgtcctgccacacgttagaatatttgttattttaaatagagctaatactcaagatgggagggaacaaaggcagc

SEQ ID NO: 153386 - DNA, 122 bp, Homo sapiens
tgccttgggggtgggaggctaaggaactgttcacggtcttctgggtgggccctggattcccgcacttctggagcagtcctcagacagccaagggatccatccacgggccagggcttcccgag

SEQ ID NO: 153387 - DNA, 122 bp, Homo sapiens
cgtgatccgcccgcctcggcttcccaaagtgctgggattacaggcgtgagccaccgcgcccggccacatttctttaagattccaacactgggccgggcacggtggctcacgcctgtaatccc

SEQ ID NO: 153388 - DNA, 122 bp, Homo sapiens
tttaaaccataaaatactgtcggcgaaatctcatctgggccatttgatgtaatctttctgcgtccctttcaggaaggaaggtgcgacaacacaatgaagacagcctgttgctttccttggta

SEQ ID NO: 153389 - DNA, 122 bp, Homo sapiens
ctccatccacgggagaaacctggatttgggggagggaatcccagggggaggggaggggagcggtccaccccgggacacatgcaccccctccagggtcccctctgcagatcggcccagctgtc

SEQ ID NO: 153390 - DNA, 122 bp, Homo sapiens
ccgatgtaaaagcctagaagactgataccacgtctgtgagcagatgctgaaagcagaaggcgggagagcgcagttcgcagcacgtgatgggcagcgcctggcccagggggagcagacgaccc

SEQ ID NO: 153391 - DNA, 122 bp, Homo sapiens
ggaccaagggctccctttctttctcatggattagatgatcaccactgagagccagcttgccgccaccagtttagggtgaagctgacactgtagacgcagagaagagtgatggaacgatggcc

SEQ ID NO: 153392 - DNA, 122 bp, Homo sapiens
ccggatcaagactcactgcgcagtctgataaggtaacctaccatttactcagcacaaggacgcgtcctaacgagaaataacccggactcagcctgttatctccattggcagtgatgatatat

SEQ ID NO: 153393 - DNA, 122 bp, Homo sapiens
agggcagagcccaaggccagggagcagtgtccacgggtgggggcatgttcacaggccaggcgggcgccaggacggacgctggggtccaagtgcggcatggggttcgcgtgggccccccgcca

SEQ ID NO: 153394 - DNA, 122 bp, Homo sapiens
tgtcacctattcatgcggtggagctacaagaaccagctttatctcctcactgctgcagggcgctgagcccaaagtagtaggttccagcatcagcaaggagcaggtgtgagcctgctattgtt

SEQ ID NO: 153395 - DNA, 122 bp, Homo sapiens
actgaaaatgggcttcacgaaggtgctggcggtagaagtagcttggcggacgccgctccccgccatcttgccaaagcatccactccacaaccccacccctttgcaagcagcgcgtgcggacc

SEQ ID NO: 153396 - DNA, 122 bp, Homo sapiens
gggccaggcgggccgttcctggggggcggggccagcctcggtccaataaggggtactcgacgccccattggccacctgcctcgaaagggggaagacagtctgggcgggcaggacgtgcggag

SEQ ID NO: 153397 - DNA, 122 bp, Homo sapiens
cgaggctggggaagaccagcagggggtggcctgcgggcagggggcccccatctccaactgcggtgaggcgccctcgccaagacaagcccatatttagccccctgccattgcctcaccgagcc

SEQ ID NO: 153398 - DNA, 122 bp, Homo sapiens
agagcaaacgcggagtgaaaggaaagaacagaacaagtcagaacgggacgagaactagggcgacagggcagaaacgggaaagtgacacggtccaaacgtcactttttcaagtgattccgcaa

SEQ ID NO: 153399 - DNA, 122 bp, Homo sapiens
cacgttactgctaagtgagggagcccaagtcatgaagtcatgcgtcagcatccaaccctgcgcttattgtttgctaagaactagacagatgctgtggttacaaagcgaataccacaaaagct

SEQ ID NO: 153400 - DNA, 122 bp, Homo sapiens
agaactacgactcccggcgccccgcaaagggaactccgttacgcatgcgcacgggcggggcgaaaaagcttctatataaaaggggcgcagaggactgggagacagcagttggaagttggcag

SEQ ID NO: 153401 - DNA, 122 bp, Homo sapiens
gccaaggcttcatactcaaggatgtctatgcttccccgtgagcttcctggaaaaaacccccgggagtcgtcagtacccctgggccactgctaacaagcacctaacaaggggcccagagcccc

SEQ ID NO: 153402 - DNA, 122 bp, Homo sapiens
gtgatagtgctcgtcactttgcttgcaccaggccgtgaggagaggtgattcctgggagagcgaaggacagtgccggtggaaacctccttttcggctgtcacgtttactggtcggacagtaat

SEQ ID NO: 153403 - DNA, 122 bp, Homo sapiens
aaagccaacggaggcccggagccccctctgtcgagagaggtgacccagcctggtcactcccgtgacgccagtcaaggccggctcacaggccctgctctcgctccctatgtgagaaccagact

SEQ ID NO: 153404 - DNA, 122 bp, Homo sapiens
acgagggagaggggcaggctgcagccgggcagataacaaaacacaccccaaagtgggcctcgcatcggccctcgcattcctgtagagccttccttcccaaagcgcgctgccatctgtctgga

SEQ ID NO: 153405 - DNA, 122 bp, Homo sapiens
tacagagtccacactccacgttacagagtccacactccatgttacagaatccacactccacgttacagaatccacgctccacgttacagagtccacactccacgttagagtccacactccac

SEQ ID NO: 153406 - DNA, 122 bp, Homo sapiens
tgcaggtgtggccagttgatcccctgtggagacagtaaagattaagaggatcataaactgcgtccagcggctgccccgggagaaatctcctcaagccagagcctgtgctgtgaggggcttcg

SEQ ID NO: 153407 - DNA, 122 bp, Homo sapiens
aaaataaaactggacaggggcgagcactcttgggaatgcccctggacccttcctctttggcgtgttctctgcaggctcccccaaggcagctgctgcaaggcaaggagggatccagggtagag

SEQ ID NO: 153408 - DNA, 122 bp, Homo sapiens
acctgatggagaacttcacagatcaacaaagtcacgggcaagtggagctagaagggtccacgtgggtgatactatctgacccaacaaagggtagtgtcctttaatgattgtgttgacttttg

SEQ ID NO: 153409 - DNA, 122 bp, Homo sapiens
cgatagacttggactaggtggtccaggctctacttccaagtgggccattgacaggcggggcggccctcagcacaaaatcaccaggctggatgctccagggtttcccaacattactcgctcag

SEQ ID NO: 153410 - DNA, 122 bp, Homo sapiens
cgcagctcggagtcagggcttccgtgtgagccccagccgcaggcctctgaaacttcagtgcgtgctggcggccaccgcggtcacacatttgatctataacagatcaacagcatggtggattc

SEQ ID NO: 153411 - DNA, 122 bp, Homo sapiens
ctgtgctacacactcaccttggatcgacgtctttgaagcctccgggggctgcatgtgtagcggaacaggcgatgctgaagtcttcctcagtgacttctctgaaaagcgagcgttccacgttg

SEQ ID NO: 153412 - DNA, 122 bp, Homo sapiens
agaagcgtgctgctttctctctgagaaaacactcctaggcttcaagggggcccaagagctcgactgggcgggatgatcccggcggcccctgggccgggtctgtggacggctctgctgtgtgc

SEQ ID NO: 153413 - DNA, 122 bp, Homo sapiens
gctttaatttaatcttcagcttgtctcatcttcctgaaggtgatcagggagatatcacttcgctcaaatcctcaatcctctcattacaaagttggtctttctggggtgatcagctctcatcc

SEQ ID NO: 153414 - DNA, 122 bp, Homo sapiens
ccccggcctcggttcttagtgacaaggcagtgaagcctcagctggctcccttgcacctcccgcccatcccgcccccgctccctctgctcccaccttgtgggtatccggggctcaaagcggag

SEQ ID NO: 153415 - DNA, 122 bp, Homo sapiens
gtgccttctgccaggaacacacctccctctcctctgctgcctggaggacagctcagacatcgcctcttctgagccctccttgatctccccactacctgctgggtgagctcaccaagtcaaac

SEQ ID NO: 153416 - DNA, 122 bp, Homo sapiens
ccaaaagctctgcagcaaatgcattcagctgcagtttcccacttctgtgcatgtggtttccgggtatgtggtttcctctttcaaaacctttaactgtctcatcgtgcacgtccttatgacct

SEQ ID NO: 153417 - DNA, 122 bp, Homo sapiens
tccagcatacggcttaactgaggtaacacacgttgttcatgtcagctgttgctttcatgccggctctgcctaggtctccccatggcaacaggataggagttctctgcctgtgcgtcagtttt

SEQ ID NO: 153418 - DNA, 122 bp, Homo sapiens
aatttacaaataatgggttgccacttccaaagtgaagatgtagatcaggtggaaataacacgaaaggagggtcctttattagatacttcatctgaagttttgtccttaactttgttgaggca

SEQ ID NO: 153419 - DNA, 122 bp, Homo sapiens
tagatgtctaggaattgggagttttgcggcgggtgtgggcgccccctgatggagaagtcccgcacaggcggagaaaaacaagccccccagaccaagcgagcatctttcacaaccttgtgttc

SEQ ID NO: 153420 - DNA, 122 bp, Homo sapiens
gaccacgcagtctgtgatggggtttgatcctctgcctccttcggacacaatctactcctacgtcaggccagagaggtacctccctccttccagttcccacctcccagctcccacctccctcc

SEQ ID NO: 153421 - DNA, 122 bp, Homo sapiens
gctctgctgactgcgatcctcccaggagactggcagctcccaaaccaactcccgtgcccacgcctggcaatggggtaatcaatggggtgatgctcagtgttacccaacaggcgtggggcagg

SEQ ID NO: 153422 - DNA, 122 bp, Homo sapiens
gtcctggaattgggggttactatcttggaatctaggggcactccaggctctgggctcagacggctggcttctgcctacccgagccttaacctttcaaggaccagaaggattccagagctctt

SEQ ID NO: 153423 - DNA, 122 bp, Homo sapiens
ataccagctcctttgttaggaagctcagatgaggtcatctacatggaagggctttgtaagcggagtaatgctgacaaaagaaagggggcatatattctgctgatactgaccaaaagcaccct

SEQ ID NO: 153424 - DNA, 122 bp, Homo sapiens
aagaaggcggcggtggcagaggaaagcttgcacgaagcaggcactcaagtgttgatgaaacgatgaaatctactgaatgcactgaaaggatgagtgaccagcttggggcggatgctggaacc

SEQ ID NO: 153425 - DNA, 122 bp, Homo sapiens
aaatagggcgggcggcctgtggcgatgggcaggaccctctcgcccaccacacgcggaactcgctggatcctctccacatccaggccgcgtccactggctttccaacctgctcaggtccttaa

SEQ ID NO: 153426 - DNA, 122 bp, Homo sapiens
tcttccttatctttccatgtctgcacacaggaagcggcatcacttgtttttcatgtcctgcgcatcgaggcacactttctgctcctctttgtgccgccagccggcccaggcccacagatggt

SEQ ID NO: 153427 - DNA, 122 bp, Homo sapiens
gaaggaaggggagtgggtgggcggcgcggggaacggggctgtgtcttggttcagtgacgccgctggaagctgtggggtggcgggcgagccctggctggactgagcggaagccctccccgccc

SEQ ID NO: 153428 - DNA, 122 bp, Homo sapiens
atctttaagtgggagttcctgtcctaatttttatggctctttggacttgccattccagctcgggtggcctgggagtctccacacagaagccgtctgaggagaagggcgccaggacgatctgg

SEQ ID NO: 153429 - DNA, 122 bp, Homo sapiens
gaagatctcaggcagtgaccctctagatggaagcactgtctgttgtataaaagaaaagatcgtgcatccctttagagtgttactgtttgagacaagcaacgttgaagatgctgctgatcttg

SEQ ID NO: 153430 - DNA, 122 bp, Homo sapiens
tggctcgcgtggacaggtggacggacgctgtggccgcatggaaccttgagaacccagggacgagccagtgccgggaaggaactgccgggactcaccgagctgcacttaactgttctctttct

SEQ ID NO: 153431 - DNA, 122 bp, Homo sapiens
aaaaatcctacacaaagacatacagacgtagagagaaaggggcacgggggagagtacacacgcagggctgtgcaagagacagcaagcatgcggaatgttggtctttggtggatatgggtgaa

SEQ ID NO: 153432 - DNA, 122 bp, Homo sapiens
atttatggaaataaaagtgacatcattgtccaatacgttataatacacagacttgtttatcggagagcaaacagggctaacacagaaagcccttgtaaaaaacagaacgacatgaaacaact

SEQ ID NO: 153433 - DNA, 122 bp, Homo sapiens
gacctctatcaacctcagggcattaattctaaacctattgccttaacacaaattgtaccacgtctctcaacctgttgattttggctttgaatttcatgattgattgcccttttggggcctta

SEQ ID NO: 153434 - DNA, 122 bp, Homo sapiens
agagtcaccaatggatctgccaagagtcaggtcactcacacgcagtctacacaatctaagcgccttctgcgtggagcagacaaattaacaaaacatcatgaaaccctcttatgaagtgagta

SEQ ID NO: 153435 - DNA, 122 bp, Homo sapiens
cggggcgtagcccatgtgaggcctgcaagctccgggcgcctggcctacctaactcagccccgcagtctctgcagaaccccctgcagccccgtggcccagtttctccatttgctcacaatggc

SEQ ID NO: 153436 - DNA, 122 bp, Homo sapiens
ttctgccctactaaaataagctgttacttcataggcaacctgttgcaaattcaatctagccgcagattaaacatacagtatataccgttcatgttctgatttcattactgtggacaaatgca

SEQ ID NO: 153437 - DNA, 122 bp, Homo sapiens
agggtgagagggagggtggggctgtgtttctgggactttcctcgctgaggtcagaggcaccgaaatagacgcgctgcagcgagcgcccggaggcccggtcacaccctgtgcccggcccgccg

SEQ ID NO: 153438 - DNA, 122 bp, Homo sapiens
tctgcaatggcggaaacatcctatatctacacaatccaaatacagtagccgctagccatgcgtggctattgaacatctgaaacagaaagagagggagaattttgtttttacctagtttttag

SEQ ID NO: 153439 - DNA, 122 bp, Homo sapiens
tgctgagctgcaaatcaccgtgatagtggctgcccaacccagtaacccacaaggctaccacgccttgtcagtgccactgtggtgtgaattagacctttttacaggttacatcaatgcgggag

SEQ ID NO: 153440 - DNA, 122 bp, Homo sapiens
gggcgcaccgcctcactattggccagggctccaggactgtgcctggcctcagccagtaaacggcctgtgcacgtgcacgccggagcctcccgattggccaacactccctgatcacgcacggc

SEQ ID NO: 153441 - DNA, 122 bp, Homo sapiens
gctcaatcttctgatgcccctcgtctctagatagaaaacaaacattccagcagaaggaaccggtgtgatgagactgctgtacctgagttcagtaaggttccatttttttctgggtaaagtac

SEQ ID NO: 153442 - DNA, 122 bp, Homo sapiens
cggtgggtgcgcgctcgtgcagttgtttgtgtttgaaattcaattgctccctcctctgcgcgaggcctcttcctccaccccccgcccggtccccactcctcctcctccctcctcccggaccc

SEQ ID NO: 153443 - DNA, 122 bp, Homo sapiens
agcacactgcttctctcttgccctcattagagtcagctgtctccagcatacagagaaggacgtgcagagcctctgtatgcatgtagcatggtgcacctggagaggtgacagaagggcagggc

SEQ ID NO: 153444 - DNA, 122 bp, Homo sapiens
gaggtggccatggaaagaaaggagaggaggaggctttccataaccatgacttgaaatgaccgagtcagaaggttatggctgttaggaggagttaggaccaagaaacatgcactttctgccag

SEQ ID NO: 153445 - DNA, 122 bp, Homo sapiens
ggtccaggtcgtcgggcggcgcgcggccgccgggcgcgcccaggctcagtcctgggcccgcgtactggtacaagatgagcatgaagcacaccgagcccgccaccaccagcacgaacttgctg

SEQ ID NO: 153446 - DNA, 122 bp, Homo sapiens
gtcggtggtgcccgggatcagcgggcacccggagccgcgtcacgacgccctcatccccgtcgaaggctaccagcactgggctctctccaatggctgggacagtcaggtgtactgctccaagg

SEQ ID NO: 153447 - DNA, 122 bp, Homo sapiens
ggcttagtcctccatggggctagaagagagaaggacggagtcgagtggcaccctagaagacgctctgtgccttcggaggtctttctgcctgcctgtaagccggggttggtgctggggcagga

SEQ ID NO: 153448 - DNA, 122 bp, Homo sapiens
aaagctcaaaccggcagcgaagtcggtcctagccaagctgaaaaaacgtctcggatttcgcggacagcggcctagacacagcccgatcttccagtcctagtgccctggtcgagacggttcta

SEQ ID NO: 153449 - DNA, 122 bp, Homo sapiens
ctgcggttcaccgcgtacctactgtgctgcgggcgcaccggcgggacgcctcaaaccatccgttaagcgccccgcaagcagcccagcgcgacggacctgactcaaactcttaattctgtaaa

SEQ ID NO: 153450 - DNA, 122 bp, Homo sapiens
gcacagccccagccaccgccccccaaccagggagcaagaggagacgcctgggtcctgttccgcacgcggatttgctggtctgtttaactggtgtccatctgaaacacagaggagaaagaggc

SEQ ID NO: 153451 - DNA, 122 bp, Homo sapiens
ggccccgcaccaccgagacctggcggaccccgttgctagagcggcagattgcggctcaagcgtctgagaaaatctaggctggggtcgagagtccgcaacagtggcacctggagccagaccca

SEQ ID NO: 153452 - DNA, 122 bp, Homo sapiens
ggcgggcggggccgggacaggggcgggggccgcgggcggggggcgggccgggggcgggggcgtggggcggcccatttcctcctcctagccggactggagggagacaaagcagcgcccgtctg

SEQ ID NO: 153453 - DNA, 122 bp, Homo sapiens
ataagtcagaggtcacacagaagccctacttccatgtcagcatgagacagaaagactttccgaagagggagggcccgtgggtgctcaagcttgtgaaggaaccacctttcctcttggctttg

SEQ ID NO: 153454 - DNA, 122 bp, Homo sapiens
aaagggaggcatgagagtaagttctgcacatctgaaaacgtgtcgattctccccttcacgcgtcctgactttggctgggtatagaattccagcttgaagaccatccttcgccttcgggattc

SEQ ID NO: 153455 - DNA, 122 bp, Homo sapiens
ctcagtacaagaagcttttaatagcctgcagatccaaatatagtttcaaagaacttatctcgtggacacaggtgtcctggaatgcactataacatttgcctttgaaaactgaaccatagtac

SEQ ID NO: 153456 - DNA, 122 bp, Homo sapiens
agttgtaggcgtgctcacttgaggcgttcttccctgtccagtctagcattcctagaggaacgtcatgcaccaggtaaattccgccatgttgcctcttaatgcgcatgcttgagcccactcgc

SEQ ID NO: 153457 - DNA, 122 bp, Homo sapiens
gcggggccgcggggcgggcggggccgcggggcggggtcgcggggcggggcggggtggggtcgcggggcggggcggggtcgcggggcggggcggggcggggcggggcgggcggggcggccggg

SEQ ID NO: 153458 - DNA, 122 bp, Homo sapiens
gaccacacattgaccgctctcccggggtcccgggactcagtgcagggtgggagctggtgccgaaactctagagcgcggaggcggggccatgcggggcggggccggagcggaggaggggctct

SEQ ID NO: 153459 - DNA, 122 bp, Homo sapiens
cctaggctctgcaactgggggctgcgagccttctgcggctctttggtttcaaggacacagcgagctgctcaggactttgggagccaacatctgtctgactggtgacgtcagcagcccgtgta

SEQ ID NO: 153460 - DNA, 122 bp, Homo sapiens
ctcggaaagccggcttgggtcctgctaattattctgaaggcaaagtacctgcactctccccgccgaggctggctggcggcgccgcgccggaggggaggaggctcgggaggaggaggagaaag

SEQ ID NO: 153461 - DNA, 122 bp, Homo sapiens
ctgctaattatgaattaatcctctaaagagcatgttcattattctaatttaattgtgcttcgtttcagaaaataactaaacccagcgtggaataaactccaatgctgatcagttttcaagaa

SEQ ID NO: 153462 - DNA, 122 bp, Homo sapiens
tgggaagatctgggaggacgaggcttagggaggcgtggagggtgtcaccaccctcagctgcggacgtcgtctccactccccgctaacccctaacagtccttcctcctcctctccgtgctcca

SEQ ID NO: 153463 - DNA, 122 bp, Homo sapiens
tgaggaaaggaatccttattgtgtgtggcagaaagggtgtgtcatgctcattttcagtctcgttccatgatttaccacaggtacacctgtgcatcttcttgacagtgaagttttaaatatag

SEQ ID NO: 153464 - DNA, 122 bp, Homo sapiens
tgcagctagtttgtgagtctagccctttgtcctctgtccggtggcttcagggagcgggagcggcttctcttagtttcctgccttttcgccttcccaggcctgagcttggctgcttttgcgct

SEQ ID NO: 153465 - DNA, 122 bp, Homo sapiens
tcctccgcggaggctgcctcggggacttccgcagacatagtgctccctctgcagacgagacgccgggaaaagatgcaattagcgggtggccgaggccacccggccgccgcccgtcccagctc

SEQ ID NO: 153466 - DNA, 122 bp, Homo sapiens
tacacccatattctgtccacattgaaacttcacacagccagtattggcgggcattgatagcgcctgcctaaatcagtcaccattgtgatggctgccaaatggcaattttccatttgcacctt

SEQ ID NO: 153467 - DNA, 122 bp, Homo sapiens
agcagtattgccgtctgtactgttaatatacagaggaacttgattgttgattgtcgttaacgtacagaggaacttgattgattgatggtttacttgccttacgaattactggccccagcttc

SEQ ID NO: 153468 - DNA, 122 bp, Homo sapiens
ctatccaacactgcctcacagacccttaggcgctgccccctctttgcccctgtcctcctgcggtgcgagaaacccgaccactctgcttctacccgaaccccaggacgcaacagtaaaatcaa

SEQ ID NO: 153469 - DNA, 122 bp, Homo sapiens
ttcacctccctcaccttcaggtatttaaggttccatgggatctgccaggagacagtgaggcgggcctcggaggcgccatgcactgacgcctggcaccgtgcctcccgcaccttgcctggata

SEQ ID NO: 153470 - DNA, 122 bp, Homo sapiens
tgggagacccacactgcacacccgggcaccgtatgaacaggaaagaggaaggaagctggacgaagcccctcagggaccctgtgctgaccatgctgggcccaccggcaaaagggagatattca

SEQ ID NO: 153471 - DNA, 122 bp, Homo sapiens
gaaatgagcgaacgtgtgtgtggaagtttctacctgcagcataaatagacatggtgctttcgtcttgcgccttggcccttgtgttgatttgtgtgtgtgtgcagctcgggagagatcttggg

SEQ ID NO: 153472 - DNA, 122 bp, Homo sapiens
gctagttgagatggtgacaggattcagcaacacgaaattcggcgtttagagctgctctgccgccgccgtcacagacaccacagccaccgctttgtctccgatagtgcacacagccccggcca

SEQ ID NO: 153473 - DNA, 122 bp, Homo sapiens
gcgctggaacatgatcaaggttatgtctaacacttaagaagtgaccggtacgtttgtgaacgacgacaaggtttctaaaacactagtggggccgggcatggtggttcacgcctgtaacccca

SEQ ID NO: 153474 - DNA, 122 bp, Homo sapiens
gagccactgcacctggcccctcttggtccctcttggctgggcagggcggtagcctgtttccgctcgggcattctgggaagtgtagtgcagaagccgttgcaaccttgtgtacttccgctgca

SEQ ID NO: 153475 - DNA, 122 bp, Homo sapiens
gtttgtaaacgcaccaatcagcactctgtgtctgtgccacccgagccagtgggggcaacacgtttgggtttccttccttgctgtggaaggtttgttcttttgctctttgtgctaaatcttgc

SEQ ID NO: 153476 - DNA, 122 bp, Homo sapiens
cttgggaacttgactatcatttttaacattgtttatatgagaaaaatgtgttttaaattccgaaaagggagatttaccaagtatttagaacatgattgtaggttgtcaattacttgtatatt

SEQ ID NO: 153477 - DNA, 122 bp, Homo sapiens
ttgggcatggagggcagagccttcaatttcattggccactcggagcgtgactgtcttgatcgaaggtttcactgaactcattggctggtctggtaaaaggtagcggggtgcttccccagctg

SEQ ID NO: 153478 - DNA, 122 bp, Homo sapiens
gctcaggggcactcaggatgcagtgagcgcacagccctgcggtggcatgggtgggagacgcgcaccatggagccggtggaaggtagacattcgagcgagctggggccagttcctggaagtgt

SEQ ID NO: 153479 - DNA, 122 bp, Homo sapiens
tcttcacagcagcctactcacatgtttccgtgtggccaatacagttttattgttcttgcacgatagtaattttaaaacacggacatgcacattctttgacactcttctcattcagactttga

SEQ ID NO: 153480 - DNA, 122 bp, Homo sapiens
agaacggccctcaggacctgcgttgatgcagcgctgctggcctgggctagaaaagtttttcgcgattctctgccctggcgagtggctgcagggtcctgcccaccccaatgcagcccagcccg

SEQ ID NO: 153481 - DNA, 122 bp, Homo sapiens
atttttgaaacagaatctcccccatcactcagcctgcagtgtagtggcatgatcatggctcgctgcagccttgacctcttgggttcaagtgattctcccatctcagcctcctgagaccacag

SEQ ID NO: 153482 - DNA, 122 bp, Homo sapiens
gcagtaacagcacatctcacacctgacacacacaatgcgaatcattatttatccttactacgggtgatgcacactaattttaatttcattcgaaaggaaagtactggcctatgacccacaag

SEQ ID NO: 153483 - DNA, 122 bp, Homo sapiens
cttggtgcacaggaggtcctcaataaatggcagttgagtgaagctgcagggaacaagaaacgggcagattccagcaactttgcagatccatgggatttggagactaatgggtgatttctggt

SEQ ID NO: 153484 - DNA, 122 bp, Homo sapiens
cccccggcccagccctgcaggtatattgcaggggcctgggggcggccctggactggcgggcggttccccagtggggtgccctggaggctgccgggcagagtggagcagcttggggccgtgcc

SEQ ID NO: 153485 - DNA, 122 bp, Homo sapiens
tgcttcgggcttgtggtgagtgagctccatgagtgttgattgacccccacatctcagggccggcccagtgccctatttgttgaggctgcatgaatgaaacctcagttttccaacaaggaacc

SEQ ID NO: 153486 - DNA, 122 bp, Homo sapiens
tcctttgcctactagcacccagtttcatttgagaaacatcatcagctgacagatcctttgcgtgaccattgcaagctgtgaagaggaggcagtgctgtctcagatggggtcttcttcctgtt

SEQ ID NO: 153487 - DNA, 122 bp, Homo sapiens
accccgtgatccgcccaccttggcctcccaaagggctgggattacaggcatgagccaccgcgcccggctgaactgatttttttttaatgaagtgcatcgtgttcccacttgcacttaaagtt

SEQ ID NO: 153488 - DNA, 122 bp, Homo sapiens
acctcagggatcctgtgaacatcagcttctggcacaaccaaagcctggtactgctgggggcgcccccgtttccactgcacccctgcccctctgtgactctcctgttgaacactggtttgact

SEQ ID NO: 153489 - DNA, 122 bp, Homo sapiens
ggctccaggacacagctgagccggcggtcagagcgagacctgcagcagagacgacggaggcggaagcatctcgatccgggaggcggcggcgtggggagccggggccgcctgggatgttcagt

SEQ ID NO: 153490 - DNA, 122 bp, Homo sapiens
tgcagctgctgcgcgtcccaccgacccgctgctcgccgtccctgggccgtgctggccctccgccctcggcccagacccggaccgggccatgctccacaccaatgggaccagtcgggagggcc

SEQ ID NO: 153491 - DNA, 122 bp, Homo sapiens
cacctccgaggggtaaggtctcgtgagatacaatatgcagaggccagttttggggcgagccggaggccgggcgcgtctaacctgcggggaagggaaagcggagggtaaggcaagggctgctg

SEQ ID NO: 153492 - DNA, 122 bp, Homo sapiens
acccgtgcgggaggaaagctccagggcttggcgctctcgccgcgacctgcttaattggggcgccgagcagccacagcgggaaggcaggttcggtctggtttttgtttttctttctttcttta

SEQ ID NO: 153493 - DNA, 122 bp, Homo sapiens
tccacggtcacaagtctcttaattcatgctgctaggctgcatctcttgtgcttgccaaaacgcatttttgagctttttcaagaactttctccttcttcagaggagaggttgggaagggagtc

SEQ ID NO: 153494 - DNA, 122 bp, Homo sapiens
agacggtggcgtagacaccaggtgcgccctctggggctcagagcaacggatggtcagctgcgaacagtctcgtccgatgttaggaaatggtcctacggccgcgcctttgtgttcctgtcttc

SEQ ID NO: 153495 - DNA, 122 bp, Homo sapiens
ctccacgaggagacgatgcaggtggcccaccgggacagtgggaagctcactgggcgtcagcgtgggcctctcacagaactactgtcagagagctgcccgcgcttcccgctaagaccaacaca

SEQ ID NO: 153496 - DNA, 122 bp, Homo sapiens
tctatcatcttaaaatagtgcggttagaattcccagtattatactgcaatttacttccctcgttttgaaatgttaccattacatcttccttaaactaaaaacaaaacattaagtttactata

SEQ ID NO: 153497 - DNA, 122 bp, Homo sapiens
agaatgcttcctttcactaaaaggttatcctcaggaaagcatgattcagattatcataatcgccgccttttctgatagaaagcacgtaggggttttcctctgatggagctgacagactgtct

SEQ ID NO: 153498 - DNA, 122 bp, Homo sapiens
ttaccctgaagagattttcccaatccctggcccagcttccacccatgtttctggagtaagcggtgtccaatattatcctgacagacagaacagagagacaaaccaaaaatattccaataata

SEQ ID NO: 153499 - DNA, 122 bp, Homo sapiens
ctccgggagactctctcttggacggcaaggatggccccgtgggagtcccaggcccaggtacggccccgaccccgcccaggcggtgccggcgctcacagtgtcctcggtggcgcatgaagctg

SEQ ID NO: 153500 - DNA, 122 bp, Homo sapiens
ggaagacagggactacatctgtttaattcttcgtgtattgcccagtagagcccaccatcacgattatcatacatagatgactcataattgctttctgataataggaagcaatagtttgataa

SEQ ID NO: 153501 - DNA, 122 bp, Homo sapiens
ggccagagaggacagtgaacaaacacaaatggaactcatggcactggttcagcctgtcaccggggaagccaggcaggacgcagggggatggtggctggccttggagcacaggctgaggtgac

SEQ ID NO: 153502 - DNA, 122 bp, Homo sapiens
ttcatcttctatttctaaggtctgacttcagtctttcaggaaacacctcccaacctccttcgctttcctcctcttggttgtcagattctccacatgaagggtagaacctaaggctcaagaat

SEQ ID NO: 153503 - DNA, 122 bp, Homo sapiens
cccagcgccaaccccgccgagcccgacggcgccgccgagccgcccgtggtcaagcggccgcgcaagaagatgaagtggatccccaccagcaacccgcttccgcagcccttcaaggagccgct

SEQ ID NO: 153504 - DNA, 122 bp, Homo sapiens
ccacttgtcccctcctcgccatcctcgagggcaggaccgtatgaacccctcagattcctccgtggaagaactgtggctccaccagatcccaaaaagcaaggcccgtttcctacaacccccga

SEQ ID NO: 153505 - DNA, 122 bp, Homo sapiens
ctttttcaaatctcctacctcaggtcctgctcctgtgagggctgaggtttcctcattctgcgaggcagcgtctcaggcagagtcctaccaggatggcttaagcctgtggaaaactcatgcat

SEQ ID NO: 153506 - DNA, 122 bp, Homo sapiens
gccgtatgaggtcagtactctcctgtgatgaggggcggtgactgcagccccagcgggccacgtgatcaggagggggccgaatgtcccgaggggctctgcgtgcagggggttttgccggactg

SEQ ID NO: 153507 - DNA, 122 bp, Homo sapiens
aatagaaagaacaggcaaagcagttcaatccccattcgtttcagttcttgctgtgcagaccgattaaaaaatgaattaccttcagcgttacaagaccaacgctgaatatcgttaaagtcttt

SEQ ID NO: 153508 - DNA, 122 bp, Homo sapiens
ccaccaggaggcctgctttagaaaataactgacctgagaattcgcattttttcaggtttgcggagttgatagcttccaagacaggggtgatccaattcacgggaacgatatgggcaaggatt

SEQ ID NO: 153509 - DNA, 122 bp, Homo sapiens
gtctatcgccctaaagccaactctggaggtaaaggccgagctcgggaaaggcggtgtcaccggcaaacccacaccatagggccctctacagttgtgtgtaaggaattcttggcctgtcctgg

SEQ ID NO: 153510 - DNA, 122 bp, Homo sapiens
ggtttcaccatgttggccaggctagtctcgaactcctgacctcaagtgatccacctgcctcggtctccaaacataatgatctgttttaaggttgcaagtatttccattaggtatttatgggg

SEQ ID NO: 153511 - DNA, 122 bp, Homo sapiens
tcggctggagttcgagtcctcagatcgggaattcacgcgcgggaaaagcgcaaaagagagcgaagcctgctgacgaacgggacaaacgaaaaccccacaaacttaccttactggcaagtcgc

SEQ ID NO: 153512 - DNA, 122 bp, Homo sapiens
cgaacacccggggcccagagctggcgagggcagcgtagacgcctttggtgctggtggtcccgctgtgtcccgtccctggcccccgagcagcgctcaccatctccggaccttctcgatggtcg

SEQ ID NO: 153513 - DNA, 122 bp, Homo sapiens
ctcgcttcccacactctggaaatgtcgctggaaactctgagtggcccgtgtcgggccgcccgacccctccccgacgccagccctgcggtaggggccgggatggcagctgggaaaccagagag

SEQ ID NO: 153514 - DNA, 122 bp, Homo sapiens
aatttacacccgcgacgagttcgagcttgaaggctcccgctgggcttgggctgcatggagcggggtccagcgctgcctggcggcttcacgcgaaccctgggcgcgtcccttgcggaggtgcc

SEQ ID NO: 153515 - DNA, 122 bp, Homo sapiens
tctggaatgtaaagtgagcactctgcccctcctcactttgcttctctgatctgacattttcgtagttaccaagttccctcagatgaaggaagggagaaccctaatctgaagaggggaggtct

SEQ ID NO: 153516 - DNA, 122 bp, Homo sapiens
taaaccttgctgatgggcacagaggtgaacccaggggatgctcgcaaagggctaaccccacgtgtccctacaatggtgcatctcccgcgtggttaaaccccatcgtgcatgccaaggtaaag

SEQ ID NO: 153517 - DNA, 122 bp, Homo sapiens
ccggacagagccttggtgctgcaggtggccaggttgtacacctccccgggggtcagcttgcggtcccagatgttgaagtgggccagctcacccacaaatgcctgggtggcatcaaacccacc

SEQ ID NO: 153518 - DNA, 122 bp, Homo sapiens
ttgcagcctctccgctacgctctgcctttagagtccctctagccgtggtccctgtgttgccgcttgcccctgggtacctgactgatgaagacaggctctggggctcgccgttgaaggtgctg

SEQ ID NO: 153519 - DNA, 122 bp, Homo sapiens
acggagtttcaccatgttggcctgggtggtcttgaacgactgacctcaagtgatacaccacgcccggcgcgctcccggcccctcgcccgtgttcttaatgggagaggtgttgatttgatgtt

SEQ ID NO: 153520 - DNA, 122 bp, Homo sapiens
caccatctgttaatatcttggtattggaaagttcggtgcctgaggcaaagccagggttggcggcgaagagctcccagcctacacttcactactccagggcagggaatgtacttccctttgat

SEQ ID NO: 153521 - DNA, 122 bp, Homo sapiens
ctgagcgcagctggacccagcagccgctgtctccagtgccgcagcagcaggtaggggaggcgcgcggccccggccccgggcatctgggggtcccgggctgatttgagtccttcctctccctt

SEQ ID NO: 153522 - DNA, 122 bp, Homo sapiens
tttcgtaaattttctgcctgggaactcctattaatctttaaaaatgcagtccagtgagatcgaccacgaactctttcttgacgctccaattaccattccttccattatgtctgtaagtctcc

SEQ ID NO: 153523 - DNA, 122 bp, Homo sapiens
cctctaggggctttggcatttgacccagaactcccctcacattacagcagcagttcccagcgggtaggagctttcccttgtacttctgcctcattgcctccacaactgacgcaaggatctcc

SEQ ID NO: 153524 - DNA, 122 bp, Homo sapiens
gctcatgcggcacggcatggagaagatctggaggcccaaccgaggtgggtgggcgggcgccggccagccctgaggtccccgaacctgggctgccctgatcacatggaggctgaggggggcca

SEQ ID NO: 153525 - DNA, 122 bp, Homo sapiens
actgcgcgttctaagacttttggcggagactttcttggcaaaacccattccccaaagctacgcttcccctgctgagatagcccctacccccacctccacaggctgggacagccccgtcccca

SEQ ID NO: 153526 - DNA, 122 bp, Homo sapiens
cgcttgccttttgtttcttctgggtcttcgctgtgatctctttccctgtcccccgccggccgcacctggacacagtaaagggccacagtgagggctctcaagctttggagccgctgagtcat

SEQ ID NO: 153527 - DNA, 122 bp, Homo sapiens
aaaaaaaaaaaaaaaaaaatcctatgagaattaagctcctgcacagatatgtggttgtttcggtaaaacacacatttatgaaattcatcacttttactaagaacatgcgctatgttgtgcaa

SEQ ID NO: 153528 - DNA, 122 bp, Homo sapiens
tgaccttgtgactgtgactgggagacagagccggcacccactcaccagagttcaagggggcggtgggcgggaatgttggagtgtggtgtggcccggggtggtggatatttcaacaatgatta

SEQ ID NO: 153529 - DNA, 122 bp, Homo sapiens
tacagactgagatgaggagtggaaagaatccggctgcctcctcccccaggaggctgctgccgtgagaacagtgggtttacactccagcgtcactttcccagtgtctgcgctgttggcatctg

SEQ ID NO: 153530 - DNA, 122 bp, Homo sapiens
aatcccgcccctctaaagccctgcctgctattggtcacggtaggctgcccttcagagaggcgtgcccctgcccgccccccgccccccgccccgggaggtattttccattctggtgggggttg

SEQ ID NO: 153531 - DNA, 122 bp, Homo sapiens
gcctgatccagttcgtttccctccggtctccacattttcccttccagccctccacttctccggatcaatgtgtagtacggttccaactcccagctcgcacaccgctggcggacaccccagta

SEQ ID NO: 153532 - DNA, 122 bp, Homo sapiens
tgggtcggatcaccaggtgggtgatgctgccattgttgagggagcaatggagccagccttcgggaggaaactgcagcgctgtgtcctgtcatctgcagcgaatgacactggcgtgacatcgg

SEQ ID NO: 153533 - DNA, 122 bp, Homo sapiens
aggaacagacggggtaccctgtgcttctaggagcaatctgagcagcaccaaccttgaaagcggactccaggcagaccgcgccgtctgtcttctctcttgctgccacgtgtccgccatccctc

SEQ ID NO: 153534 - DNA, 122 bp, Homo sapiens
ccagccgcctgagccatcccgcgggtgggcgctgcgctcggcagtcgcgccgtgtgccggcgtctcctcagctccggagcatcgtcgtcgcgcgccgccgcctcaccatccccggaaccgcc

SEQ ID NO: 153535 - DNA, 122 bp, Homo sapiens
gagataacaaaggctccgtttcctttctgtgagagaaggcttttgtctttcctcctgctacgatgtcagtgtctggcaagaaagagtttgatgtgaaacagatcctaaggctacgctggagg

SEQ ID NO: 153536 - DNA, 122 bp, Homo sapiens
ccaccgcgctccacggcgcggccggcggcggtagggaaactctcaggggctccttctccgcggctgttctccccgccgcctggctcgcgcatctcccgccagtttgcttttgcttcctccca

SEQ ID NO: 153537 - DNA, 122 bp, Homo sapiens
tctgtctctgaactcgtgtcggaccgaggggacgccacccagcgggcagggtgacgtcaccgtctccctgacactccacattaaagggctggcatgttacagggagggagggggagagcgaa

SEQ ID NO: 153538 - DNA, 122 bp, Homo sapiens
ccccgccccaccgcctgccggccccgagcacacgtgactccgccccggcccgccccgccccgccgtcccagcgcgggctcccattggcctttctgggaggccccgtccccagccggggagga

SEQ ID NO: 153539 - DNA, 122 bp, Homo sapiens
ggctgtcctgggccgctcacagctgtgccgctctgttccagatgtggacgagtgtgcggccgagccgcctccctgcagcgctgcgcagttctgtaagaacgccaacggctcctacacgtgcg

SEQ ID NO: 153540 - DNA, 122 bp, Homo sapiens
cgctcccacccctcgtaggggcaggcaagctcaggcagccgggtgcaagggggcccaaaccgcagttgcctcccgaacgctttgaggctatgggcccacgccggtcttgaaccaagcggaga

SEQ ID NO: 153541 - DNA, 122 bp, Homo sapiens
atctattccccaaaaccccctaatgttactcctttgtgggcatgaagactgtgcatggatcgatgatgactttcatacatgcattccttggaaagctgaacaaaatgagtgaaaactctata

SEQ ID NO: 153542 - DNA, 122 bp, Homo sapiens
tccttatctctgcctctaaaatatgccacctaaattaacagatcgtggcattgcatggctcgtcacagagaagccaaggcaaattcttgtggaaggcggcacttgtctggaaacagactcag

SEQ ID NO: 153543 - DNA, 122 bp, Homo sapiens
cagacccggcgtcggggtgcgcttccgggcgggcgctaggaccggggacaatcaggagggcgcagagcgggctggggcggtgcagggggcggggctgccgcggcattgcggatcggcgggca

SEQ ID NO: 153544 - DNA, 122 bp, Homo sapiens
gatcctgtgtagcggctgcagagggtgccgccgccctaggcgaagtagggccgtcctgagcgaaagaaccgcccccagcaggagcaccaccacggcttagcaaagaatcccagaccccgccc

SEQ ID NO: 153545 - DNA, 122 bp, Homo sapiens
tctctcccgcctgccggcctgcctgccacagccggactccgccactccggtaggattccccgcctgtcattccctagcccagctcttgggaaactgcagaggggtccagaggatttgcagtt

SEQ ID NO: 153546 - DNA, 122 bp, Homo sapiens
cctggggccccgaccccccgaagaacttgaacaccaagttgcagatgtacttccagagcccgaagaggtcgggaggcggcgagtgtgaggtccgccaggatcccaggagcccatcccgcttc

SEQ ID NO: 153547 - DNA, 122 bp, Homo sapiens
tgtcaggactgggatatcatctgggacacattaccccacaggtatcctgttggacctcaacgaggaagttggcaacagaggaaccaggagatgagagagatcggttggttgtgcctgtgaac

SEQ ID NO: 153548 - DNA, 122 bp, Homo sapiens
actgtgagggtctcaagatgtgtcccatctcggttgtttgtcaacctagtcctgctatgtcgtggggactgagcaggccgactcctcccccatcgcacgtccaggatgaagagcgctgttta

SEQ ID NO: 153549 - DNA, 122 bp, Homo sapiens
cacttagtaaacagggccaagatgtcatccagtgcctccacccacacccttctgccccatcgctacacagatgcctggagtaaagccagccaagacacagacagcttgcccttgaatgcgtg

SEQ ID NO: 153550 - DNA, 122 bp, Homo sapiens
gcaggggcgtgcgcttgctctgctggtcgctctggaagttggggtccaggttgtccactgcggggagagcccgccacaccgggagagggagggacaagtggtaagcaagctagggggcaggt

SEQ ID NO: 153551 - DNA, 122 bp, Homo sapiens
tttcttcagaacacggtgacgctttcccagcagggctggaagggcggacgctggcatccccgtcgctcctagaagcccccctgacagggtctgccctgggctagaagccggtgcacctccct

SEQ ID NO: 153552 - DNA, 122 bp, Homo sapiens
agcggcaggagaaaaccttcttggggcaaagggcgtcaccaaagggggtcaccggagccccgcaggttggggtgggagggctgggctggaggtgagcaaagctgcacggggagaatgaatta

SEQ ID NO: 153553 - DNA, 122 bp, Homo sapiens
tgggatgacaggcctgagccaccgcgcccagcccggcaggtcttcacctttcagtgggagcgttcttagtggcaaagttcaggtcgtaaattgcagctcacacagccgggtgatggcgttca

SEQ ID NO: 153554 - DNA, 122 bp, Homo sapiens
ccgtgttgcaaggctctctgggtggccacagcagcttgcgctgcgcccacattgcttctgcgtgtttacagttgggcacgagaaggctcagcacgcacgcacagcaggtgggggcccgccct

SEQ ID NO: 153555 - DNA, 122 bp, Homo sapiens
gtgaatgatcctcaaggtgtagcagaggaatttgtaggagagagggatgattgacatcttcgtgtagccctccatccatcccagttagcatggagggattttaggtaggtcatacagaaacc

SEQ ID NO: 153556 - DNA, 122 bp, Homo sapiens
gcgccggctttcctgcagaaggcatgattggagaggtgagtttttacctatagtctttgccgtggtggtgcgacgttattacatcttagatggggccccctgctgtctttgattagaattag

SEQ ID NO: 153557 - DNA, 122 bp, Homo sapiens
gcaactcagttgccttggctaaggcccaaccagtcccaagtgctcaggacagaggctggacgggctccttcctgcacccctgctcttgggacacagtgccctccggctctaataggccagga

SEQ ID NO: 153558 - DNA, 122 bp, Homo sapiens
ggtagagaaatcaataaaacgaacacttcacagcaaacagccccaattaacacgggtacccgggagcgaagcaaccacacgagagcgtcgttattgggtgagcttggcgggatgtcaccccg

SEQ ID NO: 153559 - DNA, 122 bp, Homo sapiens
cttcattacacaatctgtccacaccatggcccggtgcccaggtgggaggactccaaagtgcggggaacagttggaaacagtcggagtgcaaactgcagcctttccggccagctcctgatttg

SEQ ID NO: 153560 - DNA, 122 bp, Homo sapiens
ggcttcctcacaccagctaggaagggcagcaacagcacgtgcacgcacacacgcacacaacgcgcacacacacgcatgtgtcagtgctaatttttgggcagagcgatgtctgcctacaggag

SEQ ID NO: 153561 - DNA, 122 bp, Homo sapiens
ccgaagtctcgaggaagagctggctagtctcgagggactcctcgcgcggggattggagcccgagtctgcggaagagcgggggtgtcagaggggcacaattgcccgctcacaacccctggtgt

SEQ ID NO: 153562 - DNA, 122 bp, Homo sapiens
cttaatttctttttctctccttccccttcccgcagcccgaatccgaggtatttgagatcacggacttcaccactgcctcggaatgggaaaggtgagtgaatcgcatttttggttaccagctc

SEQ ID NO: 153563 - DNA, 122 bp, Homo sapiens
tgtccccagcaaggggccaggatttcacaaggctttcaagggctgcccacctaccgggcacgatcttcatcggggacggtggcaggagcccacggggcagacggagcgggccaggggtgtgg

SEQ ID NO: 153564 - DNA, 122 bp, Homo sapiens
gcggcatctgtgtcctgtggggggtgtttgtgcctatacatatgtatggccatatgggagcgtcagaaaactcgggtgtgtacacgcaactcggcaatcatctgcggcggaatgtcactccc

SEQ ID NO: 153565 - DNA, 122 bp, Homo sapiens
gaacatttgtgtgctgcctgctggcagaaaaatgcacttcaagctgaggacttttggagccgctaagggtattcaaagcatgtcacactatgatgagagccacggccatactgggcttagtg

SEQ ID NO: 153566 - DNA, 122 bp, Homo sapiens
ctctcttctgggaccagaggtggtggccatttgcagggttactaacagaacctgtgggttcgttctacagtctaatgtgctgcagctacaaacattagctatttctctttttttgagacgga

SEQ ID NO: 153567 - DNA, 122 bp, Homo sapiens
atcaggccgcttgccctgagccctcaggtctggacccgggctccctgccagccacacgagcgcccccacttggtcagggagaggagctgcctggacagatctcgttcggcaggggtcccagg

SEQ ID NO: 153568 - DNA, 122 bp, Homo sapiens
tgggttggtgacgttcacttgaaggtggcgcttctcactgcaggaaccaaaaacaccagacgggcagttagcaggcagcatgagaacagggcacctgcccggcagctcccggccaccattgg

SEQ ID NO: 153569 - DNA, 122 bp, Homo sapiens
gataatatcaagaaaaaaattaccctggaggatgttgtagaccctgttatccagtacacgcggagaactgggaagacagaaagaacaatcctttaagggagaacctagaagccattcaacaa

SEQ ID NO: 153570 - DNA, 122 bp, Homo sapiens
gaaaagagcaacaataactaactgttagaggattttcgggaatgttagcacaaagtgctccgggaattctgcagacaatcctacggaaacatacacatgccgtgctgttctgccctccgagt

SEQ ID NO: 153571 - DNA, 122 bp, Homo sapiens
cagtcagtatattcacgttcagtaaagttccaggatcactcttcccctactgcaaaataacgtctgttcacttatgtgtcaagagctggctttccactctgctccctaatccagaaaactgt

SEQ ID NO: 153572 - DNA, 122 bp, Homo sapiens
gaaaagatgaacggagcaaagagtgacccttggccttctccgggttcaaggtaggagttccggctcctcacgccttctttaccaagcaccagccggagcttctcgcttccgcaccgagttag

SEQ ID NO: 153573 - DNA, 122 bp, Homo sapiens
cttatttgaattctacaatctgctctccagtcagttggtcagccatgctgaaagcgctaccggtttccgagacgcgactgcacgaccactcggctcgctcgctccactcggactcccttcta

SEQ ID NO: 153574 - DNA, 122 bp, Homo sapiens
agaaagagactcaggaggagattgtgtccttctctttctctggatcttgttgtttacattcgaaacctggtcacactgcagtcgtcttagcaccggtttgaagatgaagccaactcagaggg

SEQ ID NO: 153575 - DNA, 122 bp, Homo sapiens
tgttaatttaaataaatgcatacataacattctttaacaaacacagcccccaaaccaggccgatctaacttgacctcaagcagacaaatgaaagttactagagtaagtagcaaagggtagct

SEQ ID NO: 153576 - DNA, 122 bp, Homo sapiens
cctgggactgtctctctctggagcacaggaggcccctttcaatctggaggctccctggggcgcaccctttctgcagcccaggatcaaggacctcgtgggggaggggtggtcctcgaacctgg

SEQ ID NO: 153577 - DNA, 122 bp, Homo sapiens
ggcttgttttattattattttcttaattttagtaagcaagaaaaagttctgttgggagcccgttcaaaagtagcaattttcttaatgggaagcatacgcttgccacccacgtgaggaggctg

SEQ ID NO: 153578 - DNA, 122 bp, Homo sapiens
tgtcccccgaaagaccgagacaaagaggcgccccccgcccgaacaaaccggcggtactcacgcaagtgccacccagcttgtggctctccaccacggcggccctggcacccagctcggccgcc

SEQ ID NO: 153579 - DNA, 122 bp, Homo sapiens
gacctcctcggctgctttcgtcacttccatcctcagcagagagggcgggggaggaggaggcgccctcccgccggttcccagcctcacctcgccgcacccagcagcgtctccctttcctttct

SEQ ID NO: 153580 - DNA, 122 bp, Homo sapiens
cccttttaggtagggagtggaggtttgtccaaaagcaccagctctggggttgccacaagccgcctgttataaaaatgctcccacccccagcacagtggaattttggggctggaaatagactt

SEQ ID NO: 153581 - DNA, 122 bp, Homo sapiens
taattcatgcagagccggccgtgcgggagaccagagttttattactcaaatcagtctccccgaaaactctgatcagtttttaaggataatttggtggatggggggggccagtgaatcaggag

SEQ ID NO: 153582 - DNA, 122 bp, Homo sapiens
ccaaaagtgttacatggatacacacaaggcccaagcagcaccacagttagaatgccgggtcgtgtggctatgagacacaggcctgccacagaagccatgcctggcttcttgaacattctagg

SEQ ID NO: 153583 - DNA, 122 bp, Homo sapiens
tggaaaatcagtaaacctgagtaataagagctaggcagacccttcgcatctatctaggtccgggctgtctaagagcaagctgaatgggcactgaaaaggtgggggaacataggggtacaaaa

SEQ ID NO: 153584 - DNA, 122 bp, Homo sapiens
aacgagccgcgcgggacggaagagctgcgggtggggagggacaagcgggcggagaaggggcggccctgctggaggcccagcgagtctgagtgattgacaagtgaatgagctgggaatgaaga

SEQ ID NO: 153585 - DNA, 122 bp, Homo sapiens
caggcgcagtgaacgggcgccgttataagggggcggggcacaaggggcggggatccacgccgaggctccacccctccttagggcaggtatgaccgagagctggggcgggagcgttgacctgt

SEQ ID NO: 153586 - DNA, 122 bp, Homo sapiens
gcggccggccaatgctggggagccccacggcgccgagctccgccaatgggcgcggccgggcgaaaagagaaacagtgagggccccacaggccgcaggattcgaatcgaacgtccttacggga

SEQ ID NO: 153587 - DNA, 122 bp, Homo sapiens
caacaaggcccttcccagctaggcttctccatgctgaggtttccctggtccacaaagcatcgattgttggcagttctttgcactcacctcaccaacccccacctccacccattcattgattc

SEQ ID NO: 153588 - DNA, 122 bp, Homo sapiens
cgcagagctgaggctactgctcacgcaaggtcgggatgctacaggacactttaagaagagcgtttcaatggcttcttccgacacctcactctctccccctgggcctgacctcagaatgccag

SEQ ID NO: 153589 - DNA, 122 bp, Homo sapiens
cagaatgaagggctgtgttgcaggtgaccaaacagagatcactgtagcagagcagtagcccgcctttattagttttggaaatgcgtcagggttctgtgcagtgaactaaaagggatgggaga

SEQ ID NO: 153590 - DNA, 122 bp, Homo sapiens
tgggcggtagatggggtgcattgggaggcaagatccaggtcaccttagagcttgttttctcgtgcaggcaagaagccagatgatcagctgagagagagggaggaagcagggtctcgctcttg

SEQ ID NO: 153591 - DNA, 122 bp, Homo sapiens
aacctcctgcctggactgatccgtgctgaaatctaagcttctgcctctgtaatggaacagcggccacaataggagcactagtgactgacagggtggcttcatgggttcacagggggcctgcc

SEQ ID NO: 153592 - DNA, 122 bp, Homo sapiens
cgggcagagacgctcgtcacttcctagacggggtggcggccgggcagaggctgcaatctccgcactttgggaggccaaggcaggcggctgggaggtggaggttgtagcgagccgagatcgcg

SEQ ID NO: 153593 - DNA, 122 bp, Homo sapiens
gcaaatgcagctgtgtgataccaccccatacactggcggggctgaagggaggttgggttccgtatcagtcagggaccttagggatgcacgagatggaaatatgactcaagttcagtcaagtt

SEQ ID NO: 153594 - DNA, 122 bp, Homo sapiens
actgcaaacttcttagcagaatccactctaacttctgaaagttccctcctgcctgtacctcgtccctcaggttcacagtcacctctccaaggacttctttccaattccaggtttgtactgag

SEQ ID NO: 153595 - DNA, 122 bp, Homo sapiens
ttcagaaacatttcctctgttttcactcatgactgagctttccgtcggccgtggcccccacgtgtagcaggcacctgcaggctgcccatcttcaccacatgtgctccccacctaagcaatgc

SEQ ID NO: 153596 - DNA, 122 bp, Homo sapiens
ccgcacgcaaggtccaaagcaaacgcaactgcggcgggagccaccggcgcaggcctcgggcggtggagacaggcttagcttccaggaaagagcagcagagagcgattcccagaacgcgaggg

SEQ ID NO: 153597 - DNA, 122 bp, Homo sapiens
aaagtggggtacagaaacgaaaactccgggaagaaacggccagcacgggcctcgccgtgccggctactcaacacgccttcctgagagcacagaacatccacagccctatacagcgcgccatc

SEQ ID NO: 153598 - DNA, 122 bp, Homo sapiens
cagagactccacctagactgcctgagttcaaaaatcccaggtgggtcacttattaccttccggcaggtcaccgtcccctagtctcctcatccataaatttggagaacaggaactatctaata

SEQ ID NO: 153599 - DNA, 122 bp, Homo sapiens
tgggtaggaaggtgcaatgcaagccaattgtttactgtatcttgtccgctcccagagctgcgcccgagctctcgcgttaactaggcaacatcgttgccacggtaactgggaggcgcgggagg

SEQ ID NO: 153600 - DNA, 122 bp, Homo sapiens
agataaagaacctaggaagaaaggcttcggttgccccccgaccagtacgccatcctcatacggagtgcgggagacgaccctttgttgtcggtgctgtcaccctatccctccctgcttgcgta

SEQ ID NO: 153601 - DNA, 122 bp, Homo sapiens
cgggggaaagccgcgagaaggccagcgtccctcgctgggagcagagctagccgagtagggcgcccggctgtcaaactggccggcgcagtgcacgctgggccgccccggagcgatcgcagagc

SEQ ID NO: 153602 - DNA, 122 bp, Homo sapiens
ccacggccaggagcggactgtgggggagctgggccccgccgtgggcagccgaggcgctgacgtctctgatgtccaatctgccagcccagctgtgttgggggagctcctctaccctgagggaa

SEQ ID NO: 153603 - DNA, 122 bp, Homo sapiens
ctgcacccaagtcagccgcacagactccgtcacgtcccagccccggccccgtcacgcccacgacacacacacccgggcctgaggcgcgggctcccgcccctctgcgatactgcagtggcccc

SEQ ID NO: 153604 - DNA, 122 bp, Homo sapiens
tatcctttggggagaggaggcttggggaagcagagatttgggtgtggagaggagttttaccgtctttgtaatgatgaattaggggcaatttggccagatctgttgaatgagctgtgggtttc

SEQ ID NO: 153605 - DNA, 122 bp, Homo sapiens
acctgtctgaggtcacaccgctgggaagtggccccagtcagaccgaccttccagtccagccgactccagaccccatgctcatttccaacccatgagaaaggaaggagagggggtggggggaa

SEQ ID NO: 153606 - DNA, 122 bp, Homo sapiens
aattgttcattgtcaaagtcagttatgtcccaattcaattaagaagaaaagctacaaatgcgtgaatctgtaactgtagaattactatgagctactgatgctggcgtattttcaccacattg

SEQ ID NO: 153607 - DNA, 122 bp, Homo sapiens
gtcaggcccggccctagctctggaggtggttggattggttcaagggctgcagccccacctcgcgtcttcccaccgcgtcggaggacgtaggcgcctgggatcctggaaggcggccagcctct

SEQ ID NO: 153608 - DNA, 122 bp, Homo sapiens
ccgggtgtcaggaaagatgggccgtctgggggacagcagggagtccgggggaaacgcaggcgtcgggcacagagtcggcaccggcgtccccagctctgccgaagatcgcggtcgggtctggc

SEQ ID NO: 153609 - DNA, 122 bp, Homo sapiens
tgaggtctttcagctggacatcttctccggggagctgacagccctggtagacttagactacgaggaccggcctgagtacgtcctggtcatccaggccacgtcagctcctctggtgagccggg

SEQ ID NO: 153610 - DNA, 122 bp, Homo sapiens
ggtgcgcacgcttatcgcgtgtctgcatttccaaatgccgctgcgtcagccgggctggggcggttgtgctgcaggacagataacccccccaaggcccagtggctggacacgcgaggtctagt

SEQ ID NO: 153611 - DNA, 122 bp, Homo sapiens
tctaggccgccccctccgcgggcgcaccgatgcctggcactgcccgccggggcgtgggcgcgcccacaccgtccaccctgctcctgcccagagcgggtcctctgccgaaggaatttgcgctg

SEQ ID NO: 153612 - DNA, 122 bp, Homo sapiens
ctgcctaattcctttccctgggacaggccagagatgtcagagtcacatccaaattggatccgtgctatactaggccagcttccttccttattaggaggctgatgtctgtggaggcggtgtgg

SEQ ID NO: 153613 - DNA, 122 bp, Homo sapiens
ttgatacttgattcatttgtatttgcttctgtactgttttaaatagagacctgttaaaaacgggtctctatttgacccatcttgtgttaggttccaaataagaggtaacttcttgtccttga

SEQ ID NO: 153614 - DNA, 122 bp, Homo sapiens
ttggtttagcagagcagtttcttcccccaaatgcaatatgggcagaacatttggaatattcgttctaacaatggcccgtcaagaagtgggcagatgattttgtcccagaatgttcacacgtc

SEQ ID NO: 153615 - DNA, 122 bp, Homo sapiens
gtgatctcggctcgctacaacctccacctcccagccgcctgccttggcctcccaaagtgccgagattgcagcctctgcctcgccaccaccccgtttgggaagtgaggagcgtctctgcctgg

SEQ ID NO: 153616 - DNA, 122 bp, Homo sapiens
gctgctctggcgaggtgttccaccgaggcaatttcctacccgggagcgctctttagctcacgtcactcaggctggccggagtcccccgcagggatgctccacggggcaggcctaagccgcct

SEQ ID NO: 153617 - DNA, 122 bp, Homo sapiens
tatcaggaggggagtctgattcactcactgttgtagctgccgagcctgacatgtatttaacgcccccaaactgttgaataagtaaatgaatgttaataatagttgataattttaccattaat

SEQ ID NO: 153618 - DNA, 122 bp, Homo sapiens
tcataatacacagttacctggccaggaaagagtacacatcacagggatctgctcactgcacgtgtgcctgagctctccctcactttctgccttcttcaagaattcttccctgattggtccaa

SEQ ID NO: 153619 - DNA, 122 bp, Homo sapiens
gctggctgcgctctcacctacgaaggaggccgcggggccctgtgtggtggtcacgggccacgcggcaggcagtgctaagacaacatgagactccggaacacagacagcacaagtcccaggcc

SEQ ID NO: 153620 - DNA, 122 bp, Homo sapiens
tagcgccatctccgagctccgagagtctgcgacagcagctgccagtgcgtcatcagagagcgccggaagcggtccgagaatgaagagtaagcggggccgcgaagttggagagggttggggac

SEQ ID NO: 153621 - DNA, 122 bp, Homo sapiens
ttatataaagttgtttattaacattgtatttttaacaaagttctgcagttttgaaatgttcggtccccccaggtgtcaaggaaacggaaataaatatttttaacattttcaggtgtatctca

SEQ ID NO: 153622 - DNA, 122 bp, Homo sapiens
cacgcgagcgaagggtcaaaggggagcaccgcccacgaggaatgccgggagctgagagttcgtttttcgatttcccgccccactttcctctccacccagcggaaacccgaggcaaggcagcc

SEQ ID NO: 153623 - DNA, 122 bp, Homo sapiens
gagaagccttccttaggcagatgacatctgagtgactctcggaaaacgaaaaacagctttcgaaataggacaggcagggcatacagggcataacagaaagaggtcatccaatctatagcttt

SEQ ID NO: 153624 - DNA, 122 bp, Homo sapiens
ctcactggggtgtgccagacagtgggtgcagcgcaccgtgcgtgagccaaagcagggcgacgcatcacctcacccaggaagcacaaggggtcagggaattccctttcctagtcaaagaaagg

SEQ ID NO: 153625 - DNA, 122 bp, Homo sapiens
gaggaaagtccccctcagccgcactcgggcccccaacccggccaaggggtcgccaactcgcggcactttctgcctgtttgttttcgctcagtactcacagtttagatgctaagccggctcct

SEQ ID NO: 153626 - DNA, 122 bp, Homo sapiens
cggacagctcccttcccaggctctgcagtgggaactgatgcctggaacagttcctgcagccggtctccagtgtgattcaggtcctgcggcaagttctaggtggtccaagtgaggcagaagcc

SEQ ID NO: 153627 - DNA, 122 bp, Homo sapiens
cattgcttttgggggctgtgagaatttccgcctctcatcctccacagtgaggagggtagtcgggaaaggctttctcccttaagttttcgtcaactttgaaaataaggactgtgctccctaca

SEQ ID NO: 153628 - DNA, 122 bp, Homo sapiens
tcaaaaaaaaaaaagaaaagaataaaaggacagctggttgtccctggctcatgtagtaggcgaggccaggaagggagttttcaaggcaatggcacagacgatggtgagaaggagcatcactt

SEQ ID NO: 153629 - DNA, 122 bp, Homo sapiens
ctagaacgatttgcagcatgctgactcaacttgtcggagccggaagccccttggcagacacgagaactatctcatctctcagatctgtgtggaaagggaaattgattcactgttttcattcc

SEQ ID NO: 153630 - DNA, 122 bp, Homo sapiens
ttccccctctgctccaccgtggttgaggggggtggggcctggccccgcacacaggtgagtcgtgtacaagcctaacccatggcacctcagaggctccacctgtgggtcctggttcatgggtg

SEQ ID NO: 153631 - DNA, 122 bp, Homo sapiens
ttacacacactgtcttacacatgcttacacacggatactcatgggatgctcacattcacacgcactctgggggccgcccttccctgccagccaccacacggtgcctctttcctgcccagtgg

SEQ ID NO: 153632 - DNA, 122 bp, Homo sapiens
tcttgtctctcgctggcattagcagctattcattttttgcttcctcctcagtacccaaaacggtgccttggaaatcacaagtgctaattaaatatttgttgaattgaactggcacgcttctg

SEQ ID NO: 153633 - DNA, 122 bp, Homo sapiens
gggcttgggtggtgggtgtgggggcttatgcggagctggggcctgggcctggggtgggctcggagctttgggcggccgggcacctgcagtagagcgcggagatagcgttggaccagtctcct

SEQ ID NO: 153634 - DNA, 122 bp, Homo sapiens
gttgctgtgagctgcagcccatgatacatgctgtgcagaccaggggtctccatcacccatcgcccttccctatggccacactgaatcggcacatgctccggtgactcacaggttcccaagcc

SEQ ID NO: 153635 - DNA, 122 bp, Homo sapiens
agcgcctcctggggaggggccaggcaggaaccccatgcatgcagtgttgggtgggtacttcgtgtaccggccgggatgctggggtgtggggccccggccacgtgagctgccctgtgcgcgag

SEQ ID NO: 153636 - DNA, 122 bp, Homo sapiens
catcaccagcgtccagttggaggcggtcatgggctggacccggctctgctccggcggcagcgcggcctcctcggggcctgccgtcgccgccacagccgcgatccaggcggccaggagcgccg

SEQ ID NO: 153637 - DNA, 122 bp, Homo sapiens
tgcacaatctgcaaaacataaaatactccataaatggaagcagtaaatcttccccgagctcgagactccaaaggccctgagcccagtaccagtaacagcacccaggtaagtaggctggctga

SEQ ID NO: 153638 - DNA, 122 bp, Homo sapiens
ttcctggccacccaccaggccccggcccagcgggggccgcacgtccggccgcgtcagtcccgccaggagtttgagcagcgcctcctgcgggaccttgcagcctcagcccttcatgccggaga

SEQ ID NO: 153639 - DNA, 122 bp, Homo sapiens
gggagggccctcgaaacggaaacaggagattaacgattccttcgaggaaaaaggcaccctcggcttcttgagagcagggctggactctgctgcatggttggagaagctctagcacctagctc

SEQ ID NO: 153640 - DNA, 122 bp, Homo sapiens
aactcagttacaaatgtcactttccattgctttctcactaagtaaagtagccaacttccccgaggatgcttctactattcctgtcaattgcccatctgcctgccccttcctaattctgaaaa

SEQ ID NO: 153641 - DNA, 122 bp, Homo sapiens
ccgcagccgagcaggggccacaggtacctaccccgcccccgctcaccatggcagtgagcccgtcctccaccaagtcgaagttgcatgtgtcggtggcaccttcgaaatccggtgtaaagggg

SEQ ID NO: 153642 - DNA, 122 bp, Homo sapiens
ctgtacgggaagcgctcacttaccggggatgcagtatctcacaggtggcgccatgattgccgctgtcccaaaaccaggatgaaaacgaagtcgatttctcattggccaaacccaggcacagt

SEQ ID NO: 153643 - DNA, 122 bp, Homo sapiens
ctcgggttcgcgcgttccacacaagtttcctgtctgcctctgcacacctggtggacaaaccgggcgtccaggccacaccgtcttcccccttcgcgggggcgcgggggatgtttccctccggc

SEQ ID NO: 153644 - DNA, 122 bp, Homo sapiens
tgcctcacaattccatttgtacaaaggagcaagtacaggactagggccctggctcactagcgcccaccctggagggactgcaccaggaggacttactcacatatgagggtgcagcacagcat

SEQ ID NO: 153645 - DNA, 122 bp, Homo sapiens
attcaataaggtgagaaagaagttcatgacacaggtaaggaggacaatgagattttttcacgaatccacattatcaaagatgcagctgcctgggagaaaaaagaagagcagaaaagcctgca

SEQ ID NO: 153646 - DNA, 122 bp, Homo sapiens
tagagtgtagagcattctcagcacacccaggagacacgccacagtgccctagaatccagccggccacctcccctagagacgagacctacacagacttcaaacagtggctcgagtacgaggta

SEQ ID NO: 153647 - DNA, 122 bp, Homo sapiens
aaacattgtctttggatcatctaagttggctacagaacaacagcacagtgggaggttaatcgagattcagcaacctgcggctaattgtaatttcttttggtttcctctctaaatcattttct

SEQ ID NO: 153648 - DNA, 122 bp, Homo sapiens
cccagtgtccagggagggagtgcaggccaggcgggcgccctgggccagaggcaagcctggcgccggcatcccaggttcccttgagggtcgaggaccgccaaaccctggggaggagcgggggt

SEQ ID NO: 153649 - DNA, 122 bp, Homo sapiens
tcacctttgtggcagtgggacaggaagtaggcgcgggccctcaggttctccctatcgaagcggtctatggagatagttggatactcggccatctgcccctcgaaagaactcatagcgccgcc

SEQ ID NO: 153650 - DNA, 122 bp, Homo sapiens
gtgccaggctgcccggcctttagggccttggctgaggacacccctttcctccccaccagacggagcgaccgccctttgccaaccccaagcaaagctggggtcccaaccttacgtgcgctacc

SEQ ID NO: 153651 - DNA, 122 bp, Homo sapiens
gtacgtttagtatgtggagtgacaatgggcgctagctcgtaatataatgctattaataaacgaaaagagatacaaaaaatagtcatgatatgcatatatattgcaataaaccatgatttctg

SEQ ID NO: 153652 - DNA, 122 bp, Homo sapiens
gtagaatgtggaccagagactgagagagtccagcaggagagctgctgcctctccacagcacgctgcccatctgcgttctgccggtgctaggaagccccacggcaggggccatcgggcagcca

SEQ ID NO: 153653 - DNA, 122 bp, Homo sapiens
gggcatcagacttgccctttggcctgaggttattgcaggtcctgccccccgctgcagacacgcagttccacagagtctcgcttcccagggctctatccctccagcccctctgagcagcagtt

SEQ ID NO: 153654 - DNA, 122 bp, Homo sapiens
tttaactttctgtgacaataataagtgctggctgagttcagagggagtagagttccccaccgcctgggaggggtcagggagatttcttgctgattccacactgaccttgagtcacatgtggg

SEQ ID NO: 153655 - DNA, 122 bp, Homo sapiens
ccattggggtctaggtctgggtccatcggggtctaggttggggtccattggggtctaggtcggggtccatcggtgtctgggtcagcgtccatggaggtctgggtcggggtccatcggtgtct

SEQ ID NO: 153656 - DNA, 122 bp, Homo sapiens
caaagtgggaaaccacaccttcctgggttctatttttcagttaaagcctctggaaggggacgtgcccgcagtctgtcccagccgaccccggtggccgcggcagcagcaaggccgctctggtg

SEQ ID NO: 153657 - DNA, 122 bp, Homo sapiens
atgggaaaaggcaggcctcgccgcaagaagcctgttgttgccgctaaccaaattagtcatcgtaatagccctggcgtgaagctctcgactgctccgtgcctccgccggcccctgtaatttaa

SEQ ID NO: 153658 - DNA, 122 bp, Homo sapiens
acatgcccccagttgcagctaccgcgaggggcgggccgggaacagcaatccctacgccttcggtgccttgggccaagaaacccgggttccaggtccaccctgttgcgtccccggagttagcc

SEQ ID NO: 153659 - DNA, 122 bp, Homo sapiens
ccgcggccctgaggcctgtgggaaacgtagtccaacaacgaaagagccctgaagctcaagcggagcccgctggccgcaggggccgcaccacgccccagaccctggagtttccgggtgcgcag

SEQ ID NO: 153660 - DNA, 122 bp, Homo sapiens
tacagtcggctgtgtatgatgtgattcaaatattcccccaggcctgcttttaatgtccaacgaaaaaaatagtttccttactttgtacttaattttttttttctacctaatggctctgctta

SEQ ID NO: 153661 - DNA, 122 bp, Homo sapiens
acgccccacccgagagaagaggagaaggcgcaggacttgcggcgcggcggcggagccatgcgaaccaactccgccacccctgaggctgtttgcaaacactcactctcgggagcgtcgcgggc

SEQ ID NO: 153662 - DNA, 122 bp, Homo sapiens
gggcgcgggggcgctgaacggcggagcgggagcggccggaggagccatggactgcagcctcgtgcggacgctcgtgcacagatacgtgagtgctcccggcgcgggctgggggacccggggac

SEQ ID NO: 153663 - DNA, 122 bp, Homo sapiens
ctagcctgttgtgacacacggtgtggggatgaacacgccgccctagcccgtgacacacggcgtggggatgaacacgccacataatgcactggtgaccctgttttgtaagcagtactcccaac

SEQ ID NO: 153664 - DNA, 122 bp, Homo sapiens
cacacccagcgtctgcgtgactcatgtccttgaattagccattgttgggcccgagggaggcgaacgggaaaaccgaacggaagaaaggtttggggaagggaacgttctgttctgtcctccaa

SEQ ID NO: 153665 - DNA, 122 bp, Homo sapiens
gttaaattctttatggatcatgcacatgctactaagttaattatgaaatttagtgtttaacgcaggtcagttgcaaaaacaagaatattgcttgcttcaacccaggaggacaggttattgcc

SEQ ID NO: 153666 - DNA, 122 bp, Homo sapiens
cacccacattaccagcaccagatccagaagcagaacccaccagcccctaacttctaacagcgaggactggtttttatttacatagacggaactctacaattcgtactcgtcagcatctggct

SEQ ID NO: 153667 - DNA, 122 bp, Homo sapiens
cgccgcgcccctggggagacgccgcaccacatcagtgcacaggaggcatctcacgttttgcggggcttgggagagagggacccatgacgagaggacccccgcccaaccacgtgtcgcgagag

SEQ ID NO: 153668 - DNA, 122 bp, Homo sapiens
gaccctgtcacagacccacacaccggggacagaacaaagaacggaagttccccctcgtttcgcttccgggtcggttgttcttgccactcacccgtacccccaacgcccacttgttctgtcta

SEQ ID NO: 153669 - DNA, 122 bp, Homo sapiens
tcgtactgctccttgcgggtctggaagacgtagctgcgccggtacatggctgctctggcgcgggcgcgcgggcggcgccgagccggctctccaggaggcccccggcgcagcccgcagcccgc

SEQ ID NO: 153670 - DNA, 122 bp, Homo sapiens
atgaagtggtgctcttcagttgccatctgcctagcaacacctgctcagttcaagggttaacgcacatgaagcatttcttactcttttcagtccttcattgctttgtaactgaccaatctctc

SEQ ID NO: 153671 - DNA, 122 bp, Homo sapiens
accacgctccgaccctcacctcgcagctgcttctcggcaccgtcttgcgtttccagcagccgctccaccacctgctcgtggcgccccagcagccgtcgctgctgcgcctccgcgcggttggc

SEQ ID NO: 153672 - DNA, 122 bp, Homo sapiens
cactattttcacttctgcatcccaacatcccttgaagtggatgtttgggcttattattcccgcaagcgagcggtggtgtaaagttgatgaaatatcatcaacgtgacactgatgtcacacta

SEQ ID NO: 153673 - DNA, 122 bp, Homo sapiens
tccagcaaagtcttcctttctttggggatggaccctccctcctcacctggagcagctccacgtcaggcatgaggcacgtctcccacagctctctgtacatgtctttcatcctttctaaatgt

SEQ ID NO: 153674 - DNA, 122 bp, Homo sapiens
ggcgtcaacttttggtgtaggaatgtggcggatggtgaggcagggagatgccagcggggacgggaacttggagcagccacttagacgcaacgggggagaatcttcaagtcgggggcagccga

SEQ ID NO: 153675 - DNA, 122 bp, Homo sapiens
tattactggattagaactggtctatttattttggattctaacttgaaaagactggcaagtcgctgcagtgctaaaatagaagtgtaagggagacatcacacacacaagctacctgtgggtcc

SEQ ID NO: 153676 - DNA, 122 bp, Homo sapiens
gaaactcagaggcagtgtttgttactctcacttgacatgtgaacaaacagaacgatgcaacggtcaggtgcattgctccaagctgttgagcatagcttcatgggtaagagttcagggtctgg

SEQ ID NO: 153677 - DNA, 122 bp, Homo sapiens
ggccccgaggacaggctcctgacgggcgggggatgctgcccctgaaaagcctggcagctgcggggacgcctctgcgtgcggaagtctccactcagaagcaactttggggtcacttccccgac

SEQ ID NO: 153678 - DNA, 122 bp, Homo sapiens
caccgtcctccggccctcaacagccgtctctgcgactggacacctgcctcgcatgccacacgatcaccttcactacagacagtgtctaaaaacaaggatgtggtccaggcaccaggggtagg

SEQ ID NO: 153679 - DNA, 122 bp, Homo sapiens
tgcaccaccacgcccggctttttgtatttttggtagagaacgggtttcgccatgttgccccggttggtctcagactcccgagctcaggatatccgcccgcctcagcctcccaaagtgttggg

SEQ ID NO: 153680 - DNA, 122 bp, Homo sapiens
aatggcacgtggtgcttggtcaggagcccacgggagtggtggggatgggtggccgggccacggtgaattgtgagttctggctccggctcagctcccaacaactgtggttttgtcggagccta

SEQ ID NO: 153681 - DNA, 122 bp, Homo sapiens
gtgctgatggccacccgctggaaaacaggagccaactgaccccggaaatcagctcccacccggctgaaggacagcccaaagtacatgcactggcccagcagagagtccaggtggccgcctat

SEQ ID NO: 153682 - DNA, 122 bp, Homo sapiens
ggtggtgagcgcggctggggtgcggggttcagtccctcagcgtgggatccctcaggggagcgggtggaagccttttctgttcggatccggggcccggcgcgctcagcttcctgatttcacgg

SEQ ID NO: 153683 - DNA, 122 bp, Homo sapiens
ttgtaactgaggattggcggtttcagaccccgcacaaaagtctttgtgagttttctcagccgcagacacttgggcctctttgttttggatggcaatgtcacaccgaatgcaaattcgaggag

SEQ ID NO: 153684 - DNA, 122 bp, Homo sapiens
gagaccctgtctaaaacaaacaaacaaaaaaggatattagcaaagagatgacaatgtattcgaggactgacttgttgagggcatggcgttgaaccctcagcatctttcccgttggcctagca

SEQ ID NO: 153685 - DNA, 122 bp, Homo sapiens
cgacctaatcggcaactaggcagtatggtggaaattgccaagcagctccaggccgtcaagcggaagatccgggatgagagcctctgcccccaacaccatgaggccctcagccttttctgtta

SEQ ID NO: 153686 - DNA, 122 bp, Homo sapiens
gggacagcgacaaacacctcatactcaaaacaaggggactttccgtgtcatttgtgccatcgggccattgcaaatgtccacgctgagatgcctaccttgtcactcgacgcagccgccaaagc

SEQ ID NO: 153687 - DNA, 122 bp, Homo sapiens
cccgctctccagaggcagtctgcaccttgcctccttcgctcgagccccagcccccagactcgggcaatacccacaagcaagatggcggcaacggcggcaccccctactgcttagcaccctga

SEQ ID NO: 153688 - DNA, 122 bp, Homo sapiens
ttctctctccttttactttccaagcgagcattaaagaagcttggactcaagactcaagtccgctgtgcatgagcgagggacttgcgggggggcgggggggggggaagtgattctgtccgaac

SEQ ID NO: 153689 - DNA, 122 bp, Homo sapiens
gggtcgcaggggcagaaaaccccaggtcctgaacgcgcctgggccccgcggcgaacctggcgtccccaccagacaccagaatcagattcaggccaggccaggaaccaccccagcttcctgca

SEQ ID NO: 153690 - DNA, 122 bp, Homo sapiens
ccaaactccggttttcccgaaggcgccgggccaacacaggatctgatagtgcagggtcaacgcctacgtgggaagacataaagtcagagcactcagcccttgaagggactagaagagtaaaa

SEQ ID NO: 153691 - DNA, 122 bp, Homo sapiens
atcagggcgctccggcaccttcaggagggaggtgactgcagggcgcacagacagcgcccccgctacatggtttatggctttgctctgcgcgtgaagcattaattaaagggggaccacaacac

SEQ ID NO: 153692 - DNA, 122 bp, Homo sapiens
aagaaataaatctcttccacatattaaaaccacattcatcctgacagtcatagcccagctcgaaagccttcgagagtgcttttacctcccaccacatcaaatctagatttcttcctttcatc

SEQ ID NO: 153693 - DNA, 122 bp, Homo sapiens
ggacgggctggggacgcactggggcggaggaccagggcacaggcgagctagcggaggagtcggctgaggccattcagccgctgattttcgtcctggaacggacttcgcgtaaacacaccgag

SEQ ID NO: 153694 - DNA, 122 bp, Homo sapiens
cgcctccagacttcctggtcgggggaaccccgaacggcaacctgggggggtgtcctggggcgcccgtgccgccgcttcccgactgcgcgtcctgagggaccccgaatgggagccagaggggt

SEQ ID NO: 153695 - DNA, 122 bp, Homo sapiens
ttaagaaactgcccattttccaaagtggctgttccattttacattctcaccagcagcgtacgagagcattccggttgctccatatccttgccagcagtagatacagtcttcttctgattttt

SEQ ID NO: 153696 - DNA, 122 bp, Homo sapiens
cagataggcagacagggagcagcattgagaaatactatacatggtttaccacaccatacccgcttcccccattaccaaactgaaaatattttctaaatctaggtgtagatgaagaaagggca

SEQ ID NO: 153697 - DNA, 122 bp, Homo sapiens
ctttccgtcctaggcctgattatggactgccaagactttttggagaaagcagtttcttgtcgctcttcttttttcattcttcttgatttgcttccctctaactattgtcccgaatctcctcc

SEQ ID NO: 153698 - DNA, 122 bp, Homo sapiens
tctgggggccgcggtgacatggggaggatgcgtttcccacagccacagcccaagggtccccgagaagacctaagagccccctccccggccgaagcccccgccctcgccgccagacattccca

SEQ ID NO: 153699 - DNA, 122 bp, Homo sapiens
tggagcggcgcttctcccgggtccaagaggtcgtgcaggtgctaagggctctccgagccacgtaccagctcaccaaagcccggccccgaggtgaggcaaggcgggtcctgggctcggatccc

SEQ ID NO: 153700 - DNA, 122 bp, Homo sapiens
cccgctcgcccggcctgatgtctcccacccggcactttgatcctctgaaagcctgtagaccgcgggctctataacctcaagatttgtgtgccgggtgggtctggaggtcccgcgtctcagcg

SEQ ID NO: 153701 - DNA, 122 bp, Homo sapiens
aaaaaaaaatatttggacacagctcttttttccactgggctttgagaaaaccccatcttgcgtgctcttactgtatctctcactgataagtccgctcataaaaccagggccttatccagggc

SEQ ID NO: 153702 - DNA, 122 bp, Homo sapiens
cggccacgccccctaggcaccgcggccaatcctcggccagctctggtccgtctccttccgcgaaacccaatcagcatgctcgctcctcgctcgacccgctagttctccggcccattcctcga

SEQ ID NO: 153703 - DNA, 122 bp, Homo sapiens
gttattgtcgtatttcccgtcatcactgctttagagtacggaggtaaaataataggcgggcgtcaaaatccttcgattttagagcttttgcaggggataccaagactgaggtagaacagccc

SEQ ID NO: 153704 - DNA, 122 bp, Homo sapiens
gcatgtgaaatcttcatgcctgacccataagcactaaataaacagcaattgtctttaacccgtgcttattccactctgtcacactgcctgccaacttaacgcacttggtcttttttcaaggt

SEQ ID NO: 153705 - DNA, 122 bp, Homo sapiens
ggctaatctgcagagccctcgagtggctttgtctccaagctctggtgcatccatggctcccgtcacccgcgtctcatccgcctgcggctccgtctcccttctcgctagcgcatgtcacgttg

SEQ ID NO: 153706 - DNA, 122 bp, Homo sapiens
aggaagttgtgtcttctccatccaaccatccaaagccctccccagatttagccggcagtgcgtggtggacaaagacaagaggaaccagtgccgctactgcaggctcaagaaatgcttccggg

SEQ ID NO: 153707 - DNA, 122 bp, Homo sapiens
atttgaatcctgtgggccgttgaatgtggctgctcgcggtcggcgtgccccgacgtacagcgggccgggaaaagtggcactgaggctctggaacttctgcccagctctccttggtgagtaaa

SEQ ID NO: 153708 - DNA, 122 bp, Homo sapiens
tccgcggctctggacaccaggtgccgcctctgaatcaccctctgtggaggacccggggcccggaggtacaggcgccctttcccgcagggctctccctggaaagggcctgccgatggcggcct

SEQ ID NO: 153709 - DNA, 122 bp, Homo sapiens
ttcctctgctatagggagttgatgctggcggctgggtgccaaggccgcaaaacaagccagcgttctattttcaagttcttctgtggacattatccaaggtctcaggagaggattgggtggta

SEQ ID NO: 153710 - DNA, 122 bp, Homo sapiens
atgacggtgctatacaagtcaaaaaatacatgcctgcctcgtagtgaagttgtagctctccgtaatatgtatattttactcagttttcaacattttgtgaatgttgactacctgaagttcct

SEQ ID NO: 153711 - DNA, 122 bp, Homo sapiens
gggtagaacctaattccgaagggcagcattttggagacgcagagaagagaacgaaaccgacgagtcaggtgaactgtaatacaacgttctacccgaatgtaagtcatctgattggcttttgg

SEQ ID NO: 153712 - DNA, 122 bp, Homo sapiens
ccaggccacgcaggaccttgtggtatggggtaaggccactgagtctaatgtgaaaagctacgggaaatcaatgaaggattttaaattaaggaaagaatggcaatgatcagatttatatttta

SEQ ID NO: 153713 - DNA, 122 bp, Homo sapiens
ttctgcgctctccggggaggctgggtcagagctccagctcaaaaatgtcttaaatccgttcgggaagatcatctcgcactgaggccatttgacctggtgataccaggttgttagtaacgctt

SEQ ID NO: 153714 - DNA, 122 bp, Homo sapiens
gctggagtgctttctctcactttcctttttgctgcttctctttccttcctttccctttcccgcctgtgtcattaaacttccaagatagactacaggggcaggacccccagggacaggcatct

SEQ ID NO: 153715 - DNA, 122 bp, Homo sapiens
ggaccccgggaggatgaacacctgtgagtggctgagatctttctgtggtgcaatctcaaccgtaatcttaggggaattcactgagctccaactacaggtaaagctcatgctaggtcccaaca

SEQ ID NO: 153716 - DNA, 122 bp, Homo sapiens
ggggtctcaggcagaagccgcgggctgtttggttgtgggtttcacacccattttcctgcacgattcggccggcaagctggctttcctttctgacacccctcgggacgtggtccctggtaaag

SEQ ID NO: 153717 - DNA, 122 bp, Homo sapiens
taaactagttccattccacagttctagttcaaaccagtttttacagcctcctgggtgggtcgtcttgacccaaactcttgtgttgttacattttgagaggttttcataccagaatgtaccaa

SEQ ID NO: 153718 - DNA, 122 bp, Homo sapiens
aaccgtctctctatttattttacgatatttcaccagcgtaacccaatccccacccctcaccgcctgtttaccgtggcccaggacagcgcatctgtccctcatagccctcggctgctgccctg

SEQ ID NO: 153719 - DNA, 122 bp, Homo sapiens
gcccgacgggcgccagctggctagatgcctggcaaggaggcggcggcgtgctccactgcccgcccgacctgcctgcccttcgccgcccgagagtgcgcggcgcgctcaacgtcaccttcgac

SEQ ID NO: 153720 - DNA, 122 bp, Homo sapiens
caaagtttctagtttgtcgagaggaatccagttgccccttctctccctaggggagttgcacgggacggactgtgcccgaattcattccttccatgggaacactggagtgccctccctgtgtc

SEQ ID NO: 153721 - DNA, 122 bp, Homo sapiens
gcggggtttgctggaggggtaacagagcgtgcgcggagtggagagggtacggaggctcaccgcccagcatccccaaccccggcgctcagaagagcagcgcgctccggagctcggcgcgcgcg

SEQ ID NO: 153722 - DNA, 122 bp, Homo sapiens
tgattttgtaaaacgtatttgctgctgattaaaaacctagtctatataataacagaagctcgattaaactgcatttattaactaattaagcaaaaaatttaatgttagtaatagcattttta

SEQ ID NO: 153723 - DNA, 122 bp, Homo sapiens
tgaggtcgatcttcagggccagctcctcccgagtgtagatgtcggggtagtgagtctccgcgaagaccctttccagctctttgagctgggcactggtgaaagtggtgcggatgcgccgctgc

SEQ ID NO: 153724 - DNA, 122 bp, Homo sapiens
ctctgttctgctagagcctggtagaggtcgcagagctccaggcctgttgacagcaacactcgggtaaattattctggttaaagccaactttgagtgactcttctgtctcatttgctaccttt

SEQ ID NO: 153725 - DNA, 122 bp, Homo sapiens
ttccctggcgtgcagcccagtgagtgtggctcttgcccacttaatatttcaatgagggaacggttctgtcaatatgcacaaattataatggcaattgatttgcagatctcttctttcctcct

SEQ ID NO: 153726 - DNA, 122 bp, Homo sapiens
ttcagtctgagaaccagcttctcccaagctcttgggtccctggcctgagcccaggatgcacggggctctgcccacctgccctccttgcagcatcataagaaagggtggtcatccaggtagcc

SEQ ID NO: 153727 - DNA, 122 bp, Homo sapiens
cagcctcgccagtagccaagccctgccccaggacagagctctaaaaataagtcagaccaacgaagcgaccccagggccaaactgctcggaggttaggaggaagcggcactccagcagaactg

SEQ ID NO: 153728 - DNA, 122 bp, Homo sapiens
cttacgtgtgaggcagggatttggcggctctggcccggggatggtacgactccttgcgggcggggggagaccaaggagataaatccatcgtagcttctttgtattaatctttcttgggtcac

SEQ ID NO: 153729 - DNA, 122 bp, Homo sapiens
gccagattatctacaaaggcagctgtttgtactgactcagtaatagatgcgagagcaacgcgagcagttgccaggatgactatggctgagactataaaagccataagtgtaactatgaatct

SEQ ID NO: 153730 - DNA, 122 bp, Homo sapiens
ggattacaggcgtagccaccacgcccagccctgttgttatatcattttctattctctgtgcgtatgaaataatccacagggggccaggcatggtggctcatgcctgtaatcccagcactttg

SEQ ID NO: 153731 - DNA, 122 bp, Homo sapiens
aagtgttagcaatcattctgctactgtgtgcaaggctttatccatgctctaccaaccacccgtgatgggtctgtcaaccagaaagtatctgaggcagggctccatcaatttagaagtttatt

SEQ ID NO: 153732 - DNA, 122 bp, Homo sapiens
atgcagtggctcaaaggaccgagcgggcggtgcaggttggaacccgcggggcggaccaatcgcggctcggccacagcctcgcccgctgattggtccctccaggccccgcccccgctcgcccc

SEQ ID NO: 153733 - DNA, 122 bp, Homo sapiens
gctgtcactagtgctgctgctagagctactgctgtcagattcttccccagaatcactagtcgagctagccatctcctcttcggcaaccccatgggcgacaggttccgagaccattttaaaat

SEQ ID NO: 153734 - DNA, 122 bp, Homo sapiens
ccaggggcttctgggaaacgggggccaacagccgccaggtacacgaattgacgtcgagcacgcactacaatccccagagggctccgcccgtccaggggacgagccacccccctcaccccgct

SEQ ID NO: 153735 - DNA, 122 bp, Homo sapiens
gttccagcgcgccggcatgacgtcactccccgggggcgggctcagtaagtggagctccaccgtcattggtccggggccccgcagtaaccaggggaactgcaaacagtgtagaggccgcttcc

SEQ ID NO: 153736 - DNA, 122 bp, Homo sapiens
agttgagtaatttgctcaaaattacacagatggggttcaaattaaagtgtcctgagtgttcgccatcaagctctctgcttacctacctacctacctattcaaacttatttccaactactggc

SEQ ID NO: 153737 - DNA, 122 bp, Homo sapiens
cccaaagcggcccattctgtctgttgctgtcagctatgactcagtcccctgattaacttacgcaccacccattttatcccctgcagagatgctgcccccacccccttaggcccgagggatca

SEQ ID NO: 153738 - DNA, 122 bp, Homo sapiens
acgttattttgaccgaagggtaagtatgtgaaaatagaaatcttagaggcattcctggaacgggttcatcagaaacgaacatggcagatgagcatccaggatggagctgctttagcctccag

SEQ ID NO: 153739 - DNA, 122 bp, Homo sapiens
agaagtccagcctgacattgtagcccgcctttggcaagatgtacaataattaataacatgcgtttgggatgctagtgttccccattttcatccttttccccatttaaaagcaaaaacctttc

SEQ ID NO: 153740 - DNA, 122 bp, Homo sapiens
ggtggcctgagtcttcgccctctaccttttccaccatgccacactgccttccacccaacgcgtgaaaactttggcctgaaaatcgggtgatgtgactgtaagaaatgcacccattattccca

SEQ ID NO: 153741 - DNA, 122 bp, Homo sapiens
ccagttactacagtccctccattggcttctcctattctttgggtgaagctgcttggtctacggggggtgacacagccatgccctacttaacttcttatggacagctgagcaacggagagccc

SEQ ID NO: 153742 - DNA, 122 bp, Homo sapiens
cggcagttaccgcacctgccttcaccggtgaacctttagccagctgaacaaccaccaaagcgccctgcagagacaagtcatcgagccctctggcatgtccctggtagcccgggcaccagccg

SEQ ID NO: 153743 - DNA, 122 bp, Homo sapiens
agaagacacgtgcggatgagggcttctgtcaccgaaaaggggtcgcagttggcagaggggcgacgatcttcaaagtaacccttcttctcctggccaacagtccggggaatgcgtatgctggc

SEQ ID NO: 153744 - DNA, 122 bp, Homo sapiens
ggatcatcaccatgccacccggggtaggctctggtcctaaccggcctggactctgagcaacggtgtcctgactgctctcctgacaactgtcactcccaggcccggccactcgccgtctcagc

SEQ ID NO: 153745 - DNA, 122 bp, Homo sapiens
gagcgcgagcgccagcagggcggagggcggggcgtgggcggcgcccggccttcccgctcccgcggcgctgcaactctgccgagcctccttaaaactctgccgttaaaatgggggcgggtttt

SEQ ID NO: 153746 - DNA, 122 bp, Homo sapiens
gccatcccctgggtgattcggtttcccattttctgggatgtgctgatagggcttgtctcccgccccctcttatataaggaggcagggtgcatctagtgccagattttattcaaccctgtaac

SEQ ID NO: 153747 - DNA, 122 bp, Homo sapiens
taatgccctgggttggccctctaagaagctggccacctacttcgggcctcaggtgtcagacgccccagcttcgaggtctatggctcccagcaactcgagcgcctgcgcctgcgcattctcag

SEQ ID NO: 153748 - DNA, 122 bp, Homo sapiens
caccttcctctaccaaagaaggaattcccatggttcaaggaacggagcgctaagcacttccgccagcacatccatgtctgtgcttcccggtggatttctcccaattaaatggatcccctccc

SEQ ID NO: 153749 - DNA, 122 bp, Homo sapiens
gatgtgcagagctacagggggaatattccaggcaaaggaaaaaggcaagaaacaaaactccgagacaaggataagtttggcatggcaaaaaggaagcctacgtagccaagatacagtgaagt

SEQ ID NO: 153750 - DNA, 122 bp, Homo sapiens
gggggcagtgctgcatgctggccagcagggcggacgctggctgccatcccggctgacccacggccacccgagtgaccttggagtcactcgccctctctgtgcctcaggctctccacctgcaa

SEQ ID NO: 153751 - DNA, 122 bp, Homo sapiens
gagttttgcttgcttgcgttccagtttccatggcagcttttcgcggtggccctaaatctgcggaaacctgtggcttcccccgacagatagggacctgagatctaaatcgatctcaggctatc

SEQ ID NO: 153752 - DNA, 122 bp, Homo sapiens
cctgatgacatccagcaactcatgggacagtcccacacaatacagaaatgtcccacatgccggctcatttcagaacctgccactaacattcttatccgcacgggacagtcccacacaatgca

SEQ ID NO: 153753 - DNA, 122 bp, Homo sapiens
cggctcagggcctctggctgggatgctgctccacagtgctcttcctcctccttttcatcccgtggtctccccaaggagcctttcctggcctctctgtctaaaagcaccctgcggagcacagt

SEQ ID NO: 153754 - DNA, 122 bp, Homo sapiens
aatcgggaagggcatgagtgcaagtgagaacagcccgggtgtgggcacaggggcagggaacgctggcgagcccccggtccggggtgagcagccagcatcccagaggaacgtgcgccaggacc

SEQ ID NO: 153755 - DNA, 122 bp, Homo sapiens
ccctggaggtggtgctgtgaccccactgcggacatctgtatggagagaactggaaaatcacggccaagaggacagtgtccagtcaagaggaagcaccaccctcttgatgacagctgcagcca

SEQ ID NO: 153756 - DNA, 122 bp, Homo sapiens
cagagacgagcgttagagcagcgctaccctggagtaccagttcttcggaatgttgaccgccggccacgcaccgcttgacagccacggatccgctggcggagccgcaagttacaacccaggcg

SEQ ID NO: 153757 - DNA, 122 bp, Homo sapiens
ccgacgtgcctgagaagcccaggtaagcgaatgggcagtgcctagccagtgctactcctgcgccgcctccctgaccggtgcctggtccctggggctgtgctgccgctcttccatgtgcggcc

SEQ ID NO: 153758 - DNA, 122 bp, Homo sapiens
gtcccggctgcggagtcgatacctgggtgagcgggggccccggggcggaggcgctgaggtcgccgcctagagtgggggagggggcacgctgccgggtctgttggaggtgggacggcgtctcg

SEQ ID NO: 153759 - DNA, 122 bp, Homo sapiens
ggctgcacctgtgacagcaaggagggcgggactaccgtgacgttgtccctgggccccactcgctcactgggatggcattccttcctgctggtgctatcagccccaggccttcctgtctgact

SEQ ID NO: 153760 - DNA, 122 bp, Homo sapiens
gactcaggcacagtgggcaacacacttttgctcggaggtaggaaaaggccatcaacatatcgtcctctattgtgatggaaaacgcagtttaatttttgacatcctgttggctgattttccca

SEQ ID NO: 153761 - DNA, 122 bp, Homo sapiens
tccatccccggggtaggcttggtcccctgtacactccagcggaactacaactcccagcaccgtggctgcccggactcccggaagccgaatcccggctgggaggaagcagctgagacccggcc

SEQ ID NO: 153762 - DNA, 122 bp, Homo sapiens
ttctacatggtactaggagaggaaagtggtctgatgccattttccaaaagacctaatatgcggacctcatgtccctcagaagccagctttagtagggcatttttccagaacagatataagtt

SEQ ID NO: 153763 - DNA, 122 bp, Homo sapiens
agattgtttaaggcgttcgataaagtcggttgatgacagacacagatgtgtgttcccagccgcatttgtgctctggtgtgtgacaggtctgtccttgcctgctttcagctcccagggcccct

SEQ ID NO: 153764 - DNA, 122 bp, Homo sapiens
ccagcgcgtcttcgtaagtggccgcacttggaactggagccggccccctcccccaccgcgcgcacccacccagcgtttctccattgggattgatttccgagagatcccggcgtctgtctgtc

SEQ ID NO: 153765 - DNA, 122 bp, Homo sapiens
acagagctgcctcaggctgtcgctggccgtggcaacatgcgggcccagcagagtgcagtgcggctcaccgaggtgaggcccagggcagggggacccccgggctccaccagtcccaacggtgg

SEQ ID NO: 153766 - DNA, 122 bp, Homo sapiens
caacttccggcttgaggcacgatagcggttggcgagaggccacatttccgccacgtgacccgcgcatgcgcctgcttgctggagagcgagcgtcttttgccacgaacacctgcggcgtgccg

SEQ ID NO: 153767 - DNA, 122 bp, Homo sapiens
ggactggcagcacgtgggtccgggtgagcgcgcggggcggggcctagggcagagcagggacggggctggggcagacaaaaggcccggggagggcagggttgtcgtctccgctagaagtaggc

SEQ ID NO: 153768 - DNA, 122 bp, Homo sapiens
cgccgccgggggcacgagtagggcctgggctgactgggacacggactcgagcgacgaggacgacgcctactacgcggcgccgcgcgttgggggcatcgtgtggcggcccgggccgctcaagg

SEQ ID NO: 153769 - DNA, 122 bp, Homo sapiens
tgtattcaaaaggaaactactccaaaatcacatctgaaaataaccacttccaaaatacagcgaacttgggaaaaaccaactgctttcatgcaacaatcaagggaatcaagagttattcttgt

SEQ ID NO: 153770 - DNA, 122 bp, Homo sapiens
acatatttgggcagtggaatgaaccctggaagctgacaaagtcgaagcaagtcactgcgccgccccccacccccacccccaccccaaataaaaacagagagacaatccttcaattataaaga

SEQ ID NO: 153771 - DNA, 122 bp, Homo sapiens
aatgtcagaaatttactgacttctttctccctgagatgtttttctcttgcagtattattacggggacagcagtattctgtttacttgttgccgggtggtttttgagacctctgttgcaattg

SEQ ID NO: 153772 - DNA, 122 bp, Homo sapiens
caggaacttggatctcaaccccagggctaggtgcctcctcccgctgctttccgccagctgcggggtgtgagattaatccccgccgattagcgccaggtgtactaatccctggatggttccct

SEQ ID NO: 153773 - DNA, 122 bp, Homo sapiens
caatttccaaggcacatgaataatattaaaaatcactgaaaaggatgtgctaagcacccacgtgcaaattttttggtggccagtctaagatgtttaaagaaactttgggagtgatttgggag

SEQ ID NO: 153774 - DNA, 122 bp, Homo sapiens
ggttgcaactgcaccgcagcccgggcaagagcgagaccctgtctctaaataaatcacacgcgcgcagtcatgaaagtaagacggacgccagaatctcacatgcttttaagttctttgtggaa

SEQ ID NO: 153775 - DNA, 122 bp, Homo sapiens
gttaaatttgtcagcatccctaatagaaaccaccattgtaataagatttttttttcaaaccgctatatatttaaaagtcagactgaaatatatgtgagtctttcaactctgtctgtgacagt

SEQ ID NO: 153776 - DNA, 122 bp, Homo sapiens
aggtcggccctgggaggtgggggttggggggcagggctgcattctaaagtcctgtaacaacgcacaagtacaactgaatagaactcggaacaaaggcatcagggccacggtgcaagtctttg

SEQ ID NO: 153777 - DNA, 122 bp, Homo sapiens
tttgcgggtgtagacactgcggcgcctgggtctgcaggtctggccggggaagcgggtgggcgggaacagggggcggggccggcagtgggcgggaggaggcgaggcctgggggccctggcgcc

SEQ ID NO: 153778 - DNA, 122 bp, Homo sapiens
tacgtgtatatgtgtgtatgtatgtatacatagatgcatatgtgtgtatacatgtatatgcgtgtacatctgtgtgcccataaagatatatgcatgtgtatgtgcatacgcatgtatgtgtg

SEQ ID NO: 153779 - DNA, 122 bp, Homo sapiens
tccacctgagaagcccccaggcaggggtccccggctgccccccgcccccaggctgccccccgccccccgggcagccatggccaccgctgctgcttccaccaggcccgaggtggcccccacgc

SEQ ID NO: 153780 - DNA, 122 bp, Homo sapiens
ccactttgtgctctgcgttttgccacgttccagttgtatgtgagctgcagggccgcggagcgtggtgcaggggacggggttcatggagcttatgacggtttccccagtggcattcagagcgc

SEQ ID NO: 153781 - DNA, 122 bp, Homo sapiens
cagactgccagagggcacatgcgtcaccctctcaccccaggacaaaagacactttctaagcggatacagccttctgaataacaggatatgaggggagcaggcggatctggatctactctgtg

SEQ ID NO: 153782 - DNA, 122 bp, Homo sapiens
ggtgagaaaggtctgttcctattcctattccaatagtgggcttccagagtgtgcagtcgacgcgctgcccctcactgccttctgtcttccttcacggcccctagtcaactccacagagaaag

SEQ ID NO: 153783 - DNA, 122 bp, Homo sapiens
tcatctgatacccgcgctcctccactgtctgaaccaagttaggagccctgattaaacctccgcggctgcagtcgccaccttccgccggggtgaccccattggagatgacaaatgaaggatgt

SEQ ID NO: 153784 - DNA, 122 bp, Homo sapiens
tgagccgcccctgagagaggcaggtgcagctgcctcatctgggagatccgaatccggatccggatctggagctggccagaagtcaggagagctccaccccgggaggcagagcaccctcccgg

SEQ ID NO: 153785 - DNA, 122 bp, Homo sapiens
atggcagaagctccttcttggccaggagcagtggctcatgcctttaatactagcactttgcgaggctgaagcaggaggatggcttaaggccaggagttcaagactggcctgggcaacatagt

SEQ ID NO: 153786 - DNA, 122 bp, Homo sapiens
ggcagcagcgcctcctccactccggcgggcccgggttcggccggccgcccatcggactggcggactggctgactgacacgcctcgcttgcccccgcctccgcccgtgccccgcccagcttca

SEQ ID NO: 153787 - DNA, 122 bp, Homo sapiens
gaggcctcacgatctgagtctccactcactggtgagccccatttccatgtgaggtgtaggcgctgggtgctgccaagaggacaagcccagatgcggctcctccgcctctcccaacctctgtt

SEQ ID NO: 153788 - DNA, 122 bp, Homo sapiens
tttgtagctctaagaagctaacaggagttttcacaacacaaatggctaatgttagcagcacgccgagttggcagtcctgtcgtctgcctgatcaacaatatgccatgctgttcgagatttat

SEQ ID NO: 153789 - DNA, 122 bp, Homo sapiens
caaaggacccagtgcatgctcggcacgcagaggcaggtaacaaaggacccactgcaggctcggcacgcagaggcaggtaacaaacgaccagcctcagaagcagatgtgcttgctgcaaacca

SEQ ID NO: 153790 - DNA, 122 bp, Homo sapiens
tgcagccccagggagctgatgaaacccagacgagctgtcactggctgctgctcaggagaccgagcagctctttacaaagcccatgctggaccctgggcttagttgctcgctccttaggaaag

SEQ ID NO: 153791 - DNA, 122 bp, Homo sapiens
aggcctctcccagagatagttaagtagccactgccagagctgccacctaccagcaatagtcgtgtgggtgttttagggtctggcaccaatacagcatcagacctatgcagcaagagcattta

SEQ ID NO: 153792 - DNA, 122 bp, Homo sapiens
ggaggaatctgagctctgaatcaccgtgaagaagtctgctggatgaacacttgcttgcaccgtggagtgggcaagaactctcaaatctcaatggcttaacaacaaagctgtgcttgttatat

SEQ ID NO: 153793 - DNA, 122 bp, Homo sapiens
gcagttgcagatgagcccacaattgaggctgttggggctgctcccaggttgttagagggtcgccgagttcaccgacatgccaccctaggttacgctcttggcccgcacccagagcgccgggt

SEQ ID NO: 153794 - DNA, 122 bp, Homo sapiens
cgggccaggctcccgcggggctccgcaagacccccgcgtcgtctcccgcgctacggcaggcgctgccccagctcggtctcctcagccgcgctcggtccccgcgacccgcacggcccggacac

SEQ ID NO: 153795 - DNA, 122 bp, Homo sapiens
agcagcaggtacagtgagtgctggccccctggcttctgcccatacttagcactccaccaacgcttgccacccccgatgtgcagagggcagtctggatgatcttggtgtaccaggacccatat

SEQ ID NO: 153796 - DNA, 122 bp, Homo sapiens
atgcctggagggcctccactttgtggccagcctgtggtggtggctctgaggcctaggcaacgagcgacagggctgccagttgcccctgggttcctttgtgctgctgtgtgcctcctctcctg

SEQ ID NO: 153797 - DNA, 122 bp, Homo sapiens
ccctgcggcgagccggtgtcggggaaactggcatacagcgctccgcattcgtgtgtacctcgtggagctttctaaaatttaattccgttggcaggcgaagtcttgggacatttctgacttac

SEQ ID NO: 153798 - DNA, 122 bp, Homo sapiens
ctgaagtgcctcaggaagtacctgtctctgtatctcagtaaagcggttgtccgcctctggcgctgggaataggcgtggggtctgttggaaaaggcgcgcacgtaaaacaccgttcaatgaat

SEQ ID NO: 153799 - DNA, 122 bp, Homo sapiens
gcagaaagcaacagaacagcaggtgcagaaatgagagaggcaggggagaatgaagggaagcggggcagtcccaagttccctaactctgtgaccttgggccaggcactgcccctttttgggcc

SEQ ID NO: 153800 - DNA, 122 bp, Homo sapiens
ccaggcaaacaacaagggcaatctataccaaccatctgctccacacattaaaattcaaagcgactgtaggaggcagccccattgctgcttggagacctaacagtgcctgactgtccttggct

SEQ ID NO: 153801 - DNA, 122 bp, Homo sapiens
aaagagcaaccaagggcaagcccttcttggagaggcagcattataattgccatgtggcaccggtttgcagtcactgttcaggtaattgctttgtaattgactgcatcaccttcttcctgttt

SEQ ID NO: 153802 - DNA, 122 bp, Homo sapiens
gtgtccaccttgatgagcctgttgatgtaggtgctgcagcccgagctcttggttgcaccccggtggggctcctcctccgtggcccgggagtttttgcggcccttgcccgcggcggcctgaat

SEQ ID NO: 153803 - DNA, 122 bp, Homo sapiens
gggaagatctacaacttcactccttgagccagggagaccacgaacccctcggggaaggaacgaagaattccagacgcaccgtcttaagagctgtaacgctcaccgcgaaggtctgcagcttc

SEQ ID NO: 153804 - DNA, 122 bp, Homo sapiens
ttacttgtgccatcctgcccaagactgtgacttctgaccacctgtactttaaaaccagaacgctaacactttttttataggcatattaaaatcatcctttaacacagaccactttaaaagta

SEQ ID NO: 153805 - DNA, 122 bp, Homo sapiens
gctgcccctggcggggtcccactcctagtgccctcgaacctacatgaagctgggggcttccgggagtgggggcagggcccagagagtgagaaaaaggcaaaggtccctgttcagcctccgca

SEQ ID NO: 153806 - DNA, 122 bp, Homo sapiens
tcagtgcaacaaacatggttttttgtttgtttgtttaattgttgttttgttttttggagacggagtctcgctctgttccccgggctacagtgcaatggtgcaatctcggctcactgcaacct

SEQ ID NO: 153807 - DNA, 122 bp, Homo sapiens
acccgcctcggaggaatcgatggagcacctttgagtgcgcgagttgccgctctccgggtacggggcccggagcgttagcctcccgcgagtatcggtgagcggctgccgaactgccatgggcg

SEQ ID NO: 153808 - DNA, 122 bp, Homo sapiens
ggcctcccgggggctctggtcccctcctcggtgagtcatggcttctggttttgcagtaaacggaaccagggagaggagggaacgcacaatttccacaactggttagatttcaagttggaaat

SEQ ID NO: 153809 - DNA, 122 bp, Homo sapiens
ccactgggtggccgtgggactgctgacctgggcgaccttggggcttctggtggctggactcgggggtcatgacgacctgcacgacgatctgcaagaggacttccatggccacagccacaggc

SEQ ID NO: 153810 - DNA, 122 bp, Homo sapiens
gaaaggggagagaagatgcctttctggccttgcatgagtcgtggcagaaaggaggaatcgcgaagaggagccggccatacccagcacacaccccgaagccaagctgctcattactagaaagg

SEQ ID NO: 153811 - DNA, 122 bp, Homo sapiens
agagtagctccgtctggatttggagaaatcctcctgactgttgtgaaaatcgtctcccatcggctgtgccgggaccctcccctccttccgttccttttcccgcaccctctcttagcagaaca

SEQ ID NO: 153812 - DNA, 122 bp, Homo sapiens
ctccttgcaactgcatcctggtcttcaccacctccaggggattggtgaatacacaggccccgcaggctgccaggccactcatcaagaagtccatggtgggatagctgtagcaggaactgacc

SEQ ID NO: 153813 - DNA, 122 bp, Homo sapiens
cgggcgagccggcgggcgggtcggcgggccagcgggcggggcagcgcgggaagcgctaggcgctcatgcactcggtaaccttcaggcgccccggccgcccgcctgcaacctgcggagcccgc

SEQ ID NO: 153814 - DNA, 122 bp, Homo sapiens
tgctgcccgtgcgctggatgtctcctgagtccctcaaggatggagtcttcaccacttactcggacgtctggtatgagaacctttactgcattgccagcctggagcccccagcctctgcactt

SEQ ID NO: 153815 - DNA, 122 bp, Homo sapiens
agggaaaggaggccgtgcgattaggctgtttccccaacaccatccggagccggtgcagggcgatcactgccactgtcttcagagacatgatgatgaagcctgaactggtgagatggaaagtg

SEQ ID NO: 153816 - DNA, 122 bp, Homo sapiens
ctccggaaatgtgggacgcaaggctggggtgtcgcggcagtggctgaagcttcccttcgccgcatctctctgcagcaactcggtgagggctttccctccagcctggcggtgtggacgcggcc

SEQ ID NO: 153817 - DNA, 122 bp, Homo sapiens
tctccaagggcggacagcgggtcggcgagagtcgataatgggttccagcagattggacgccgttcagatctaactcgagcctggcgccctttgcagacttggagtccaagtcctcctcatgc

SEQ ID NO: 153818 - DNA, 122 bp, Homo sapiens
tgtcatgaatctgacaactaaaattctgcttacaattcttactgggtcaaactgttcccccgtgttgttttgtttgttttgctgacagggaaaaataaatgttgttccatcattgtacctac

SEQ ID NO: 153819 - DNA, 122 bp, Homo sapiens
acaggcctccgaagcgtctctcctggcttagaggatagtggcttggaacctttgccctgccgcctaacacacaatgcttgcgtatagtatggtcttatactgaatcaaaacatcttatccag

SEQ ID NO: 153820 - DNA, 122 bp, Homo sapiens
gctacctttttgaggcaaagagtaccctcagtgaagaaaccaagacataggtaaatatctcgataaattgctctgccataaaaccacccatgaatttctttaatttctttaattacttaatt

SEQ ID NO: 153821 - DNA, 122 bp, Homo sapiens
ttgaagctgcagctggtgtccagatctgttccatgtatttgtgatcctcctcagccctcccgggtacttgaagcatgttattgttgtggccaaagtcaggagtgcaacctgcctgtgcaaaa

SEQ ID NO: 153822 - DNA, 122 bp, Homo sapiens
ctcacgaagctctggtcctgataccccgtccctctggctgtgccccaggccaggcagcggcgaccaatgcctgcccactagccctgtggttggtgaaccaccatcgccatcgcctgaggtcc

SEQ ID NO: 153823 - DNA, 122 bp, Homo sapiens
ggcaccgggcagggtgtggggtgcgtcctcctgatataaagtgcccgtgcggtgccacggcgtcagcgccacctggggcgctcgccgtgagatctgctccggtggtcgcagtgtggggccct

SEQ ID NO: 153824 - DNA, 122 bp, Homo sapiens
tgactgtcatttactagcagggacacctgggacatatgttctttaactacctgtgcctctcgtatcatcagaaaacaaggaaaacccctatttcatgagattgttaagataattaaatgaat

SEQ ID NO: 153825 - DNA, 122 bp, Homo sapiens
cagggggtgtggaaatgatgcgatgcagactggatggtctaagagcctccctggactgagcgggacgtgggcagggaaggagcctggtgggatgcgaccaccgggggcccctggcggctccc

SEQ ID NO: 153826 - DNA, 122 bp, Homo sapiens
aatagcgacacggatatggccccgcgggcggggtttaggcccaaagtggtgtcggagcagcgcctattagtgtcatcctcaccgtcacggccggcgcctcctcctggattcattcactcgct

SEQ ID NO: 153827 - DNA, 122 bp, Homo sapiens
ctccgccgcccctgctttgcatacgcccgtcccactggctgcccggggtttgctggggttcggcaaggtttgcagccgccacggccgctgctgcgctccggtgcagggcaggctggcgccga

SEQ ID NO: 153828 - DNA, 122 bp, Homo sapiens
gccgtctggctccacgcaggccccgcctccagacccgcctctaccgctcgcgctggccgccgcatgggaggggcctgaacctgtcccgccccgaacctgtcccgcccctggatccctcgtcg

SEQ ID NO: 153829 - DNA, 122 bp, Homo sapiens
gccattgtggacgggcacctgcaactgagctacaacctgggctcccagcccgtggtgctgcgttccaccgtgcccgtcaacaccaaccgctggttgcgggtcgtggcacataggtgagtagg

SEQ ID NO: 153830 - DNA, 122 bp, Homo sapiens
caggtccactgtaacaacatgcacacgctgggagcccgtctgcctggcggggtggaatgtcgcttccggcgtggccctgccatggcctgggagggggagcccatgcgccacaacctaggggg

SEQ ID NO: 153831 - DNA, 122 bp, Homo sapiens
ggtcgatgggactgggtcctgtggagcagggggcggcactcgtgggggaggctcaggccgcgcaggagcccatgacgcgggggaggaggctcaggtatggcgggctgcaggtcccgagccat

SEQ ID NO: 153832 - DNA, 122 bp, Homo sapiens
agggggccagccttgtgttttataaatctctcctatgcatttccaattcttctgaggctgcgcttgagggagatctcattgcctcttttgtgtctcttaattcgcaaccactccaggaccta

SEQ ID NO: 153833 - DNA, 122 bp, Homo sapiens
cggaaaccgctgagcaatagcctctcagaataggaaatcaagacacagtcagaggaagggcgggacagaaagagcctagcatctctcggggctctgggttggccacccagtcctcccctggt

SEQ ID NO: 153834 - DNA, 122 bp, Homo sapiens
tctgcatgaggatttgcgagctccatccaggccattcagtgccccccatccctggccttccgcagccccctggcccaccttagagtgatctgtgccactgaatctattccctaaagtagggg

SEQ ID NO: 153835 - DNA, 122 bp, Homo sapiens
gcttctgcactgtggccctgagagggtgggctaggtcgaggctggggcttctgaagtggccgagcctggtgcttcttgcagctctgaacccacaaggggagggatgccagcttccactgggc

SEQ ID NO: 153836 - DNA, 122 bp, Homo sapiens
gggtaccttgcaagtttgcacagaaagtggagcccgtctgttccttctggggtgtgcgagcggggcctcggggagcaggtgcaggacagggcacaggaggaacaggcacggctggtggtgtg

SEQ ID NO: 153837 - DNA, 122 bp, Homo sapiens
caaatgagcactccaaacagtaagagtttttgaagtatacgctttcttctgagaaatgaacgtgtcccagaggagggtgccttcagatggaccttaagagagatgtggccatcccctgagtc

SEQ ID NO: 153838 - DNA, 122 bp, Homo sapiens
aggcggccgagaccctcggagactaggggagggggcgggcccgggggcgctgggggccctcggtctgcgcccagccgccgccggctccagcgaacctcctaccccgcccccactcacccggc

SEQ ID NO: 153839 - DNA, 122 bp, Homo sapiens
attttccaggtgccatccatcacccctaggaaagggaattccctgaccccttgtactttccgggtgaggccatgcctcgccctgcttcagctcaggctcagtgcactgcacccactgtcctg

SEQ ID NO: 153840 - DNA, 122 bp, Homo sapiens
ctttttaatttaaagcagggtctgcatatcatctgaagtaatctctctttggggacaccccgcatgtccagaactgccatccggtattgtggtggccctaaggctaggggtagcatggagac

SEQ ID NO: 153841 - DNA, 122 bp, Homo sapiens
cactgtggccttgtgacttggtcggcatttcgtagtctgctgaaggtgggtgctgggttccgctttggtggggagacctgttgcctacagcacccacccccgcccgacgcccccgcatgtcc

SEQ ID NO: 153842 - DNA, 122 bp, Homo sapiens
agtcaaataacaaaatttgtagcctaaccaatgctataaaagcacttgattttatagaaccgagggcccattttgcacattacatatgatcacacctcgagccgtgtttttattttggtggt

SEQ ID NO: 153843 - DNA, 122 bp, Homo sapiens
cttgaacagcggaagggagccggtagctgacgctagctctgtggagtcaggggcccgaggcgaaagagaagccctggccgggggtggtctgtggtgagggcggcctggggtggatcggaggt

SEQ ID NO: 153844 - DNA, 122 bp, Homo sapiens
gctactattggctgccaagaaaccccgcccatcttcctgctcattggccggtgcggtttacgtaagaggagcctgttgctgagcgaaaagtctgttctgcaattttcgctaaggagttgtta

SEQ ID NO: 153845 - DNA, 122 bp, Homo sapiens
gctgtttccataggagtcattaatgtttttcagagcgttctctttgccaaggttcagacacgattgtgatcataagaagatgggcaggaagggaacgagaaagttgcagagggttagaagag

SEQ ID NO: 153846 - DNA, 122 bp, Homo sapiens
taattacctttcaatttgaatatactaacttttcatccttattatcttttctttcccctacgcaattaaaattctcttccatttaaaaaatactcttagtccaatttaatgttataagaaat

SEQ ID NO: 153847 - DNA, 122 bp, Homo sapiens
ggttttacttgttgctttacaatgaactgtgtaaacacaagctggaagagatcagctatgcgctggaagggttggttaaatattgagactgccttgctgagggaagccttttaatgaatctc

SEQ ID NO: 153848 - DNA, 122 bp, Homo sapiens
cagtctctgtgctcgggttcagcccagtcgggcaagaaagtctgggcagctggagaaggtcgtcacagtctcccgtggaatcttgttgcctgagagccccataacggaaagggctaagacga

SEQ ID NO: 153849 - DNA, 122 bp, Homo sapiens
agtagggagcgggtggtgggatcagtgggctgacaggagctacctcaggaagacgcggcacgacggttgcctgggcaacgggcggcaggcgcgcgggtggccggcgcgcggctgagggcggg

SEQ ID NO: 153850 - DNA, 122 bp, Homo sapiens
gatcactgatactggtggaggcgggggaggggagcgactgtggctccgggctagacgtcccgatggccatccctgtcatctggatgggtgcctgagtaacttacggcagaaagtggaagccc

SEQ ID NO: 153851 - DNA, 122 bp, Homo sapiens
cctggtcctcgtccaggaatccttccagggcttggggatgggttggcagctcctggtcttcgaccttcgctcgctttctgggccggggcctggtgagagtcagggggccggggcccctgagg

SEQ ID NO: 153852 - DNA, 122 bp, Homo sapiens
gtcttgttagtttacctccctgatatcttttgagtatcttctctgttgctgttgccttcacgcagctggttagcatgttttcctggcttattgccactgttccctaatggtttgctctgctt

SEQ ID NO: 153853 - DNA, 122 bp, Homo sapiens
tttagtagagacagggtttcaccatgttgggcaggctggtctcaaactcctgagctcaagcgatctgccctactcagcctcccaaagtcctgggattaccagcgtgagccaccgcgcctggc

SEQ ID NO: 153854 - DNA, 122 bp, Homo sapiens
gtcgccggcgcggagggggcgtgctcccaggcttagaaacagtgagggagagcaaattcgcgcacctgatgtctgcttaagctacctgctagactgagactttctgcgaagccggcgtgtct

SEQ ID NO: 153855 - DNA, 122 bp, Homo sapiens
caagtggctgatcgtcgagagcccaccggtagaagagcacaccaacaggcacaagcacaacgacgtggagtttgaccggagctgttggagaagagtccaggagaaaaccatctcccttccgg

SEQ ID NO: 153856 - DNA, 122 bp, Homo sapiens
ttttttttttttttttttgagacggagtcttgctctgtcgcccaggctggagtgcagtggcgcgatctccgctcactgcaagctcccgggttcacgccattctcctgcctcagcctcccgag

SEQ ID NO: 153857 - DNA, 122 bp, Homo sapiens
gctcattcacccattttattctccatgcccttgcctttaaaaaaaaatacagcactgggccgggcgtggtggctcatgcttgtaatcccagcagtttttgggaagccgaggtggtaggatcg

SEQ ID NO: 153858 - DNA, 122 bp, Homo sapiens
gattccggtgaggtgtctttttccccccccggttccttcgggacctcgaggtgaaatgagcggaaggatgagagatggacacattttgaggtgccgcatacgtttccagacctgcctttcct

SEQ ID NO: 153859 - DNA, 122 bp, Homo sapiens
aaaaccaggggcccagagtcagaccctgaattgaacctccgaagaagctggattccagcccgctggtgcggcccgctcagagcaggggacagagcacgcccgcgggaggcggcggggggcag

SEQ ID NO: 153860 - DNA, 122 bp, Homo sapiens
cagagtgacagcgggcagcggggactcgcgggcggggcgagggggtgccccctgaggatgcgggaggagcgggcatcaccaagtgtgtgcaggtgtgcgtgttggggcgagggaaggcaagg

SEQ ID NO: 153861 - DNA, 122 bp, Homo sapiens
gttatggatgaggtagatggtatagtgtaagcaacaggtccaaaaaggcagaataaccagcgaacacttggtagcatctcagatgtggggaaataggtgttttatactccaaacgctagtgt

SEQ ID NO: 153862 - DNA, 122 bp, Homo sapiens
tttcatagttctgattccctctgtaatgactgcggccctctgtttccatctgatatcgaacgctagtaacactgagaaggaagcagaaaacaatgctcccaagtgcgagaaagagtgagttt

SEQ ID NO: 153863 - DNA, 122 bp, Homo sapiens
cgtctaaaagatctcatgggcttgggctctgtaggagttggcagtagtaacaccatcacccgatcatctgctggtggccaaaaggaaagcccttatcaaaaaggtatttaggagcctggagt

SEQ ID NO: 153864 - DNA, 122 bp, Homo sapiens
agccgccggggtgaacagcagagaacgcagcagaggcgcgcaaatgtcactcgtcctcgacgtggagttctgctgaaggtctcagtggccctcgctgtttcccacagcaactgccactgcgc

SEQ ID NO: 153865 - DNA, 122 bp, Homo sapiens
tgccagtctgcagccgaccaatccgcgtcctcttgaggcggggccggagccgcgaggccccgcccccaagccgaggcctcataaatgctgcgacgcacgcccagccgcaaacagccggggct

SEQ ID NO: 153866 - DNA, 122 bp, Homo sapiens
cttccatgaggaaatgagttttgaggtgactgataatactacaccagactttataagggccgtatttggacctgcaatgagttctgtcctatttgaactcagaacattaattttcttttgct

SEQ ID NO: 153867 - DNA, 122 bp, Homo sapiens
cctgagattctcagagcttgtggctagctgcccccaccttgctgctgcctgctttgcagacgttgcccacttgtgatctgggcagaagtgttgctctgctgccacgtggctcctctgtcccg

SEQ ID NO: 153868 - DNA, 122 bp, Homo sapiens
ccagggcggtgcagtggaacacaagctgggccacggtgctgggtcacggtgccgtgttcccgtctgtgctctgctacttagagctgtgagtgttggaggaagccactctgtgtttcaatttt

SEQ ID NO: 153869 - DNA, 122 bp, Homo sapiens
ttctagacatttttgtgcgtctgggggacttttccccttctcgccagtctctggtgcgcccgccgctccccactgctcttttcctgcttctgttttgcctccttccccagtttcttctagct

SEQ ID NO: 153870 - DNA, 122 bp, Homo sapiens
ggacaaaggcggagacgggcgcgcggcggggtcccacgggcagaagagcctggcctccagcgcccggcgcccggttcgctgcctccggagcccccaagagcctctctgagggcgggagcggt

SEQ ID NO: 153871 - DNA, 122 bp, Homo sapiens
aagagtttcctccaggcgccagaaatgcgtgtgggtaggaggcgacccaggtcagggaaccgtgtcccgctcgcactcccggtgagggctgcatggaggcgccgctgccgcggagcagctcc

SEQ ID NO: 153872 - DNA, 122 bp, Homo sapiens
ccaggagcgtccggccggaagagacagtgggagatgaggaaactgagattgggagggggacgtgatggggtaaggccattcctaaggcttgtggcagagctgcctcttcaccccacccccat

SEQ ID NO: 153873 - DNA, 122 bp, Homo sapiens
cagagactccctgggacccagatgccttccctcccttctctttcaaagaattttgggtatcgctgcaaagtcaagggagccgaggcctgggaaagacagataaccagcgtgaaagcatcttc

SEQ ID NO: 153874 - DNA, 122 bp, Homo sapiens
aataggttccggagattgaactgaagtctcctgttgaattgctaaaggtccagcatcttccggtgactctggaggaagaggtgggcccccgtgctggatagtgggaggttctacatcattac

SEQ ID NO: 153875 - DNA, 122 bp, Homo sapiens
agagcacagggagcgctcgagtcggccccacacccacggccctccacgcgccccccaccccggggagttacctccttgctcaggcccgtgggctgcttcttcacgttcttgtagccactgcg

SEQ ID NO: 153876 - DNA, 122 bp, Homo sapiens
cccctcccggcagccggcgaggtgggcagttcgtgggtcaccgaaagctcgcggaggggacgcgcatcacatggcagctcgttcccagccccccgagtgcgccgggaagggggaggggaagg

SEQ ID NO: 153877 - DNA, 122 bp, Homo sapiens
cagctgataaagtgacagtgcagggatatggaggcggatctgtctgggagggaatgtgtacgtaagtggtataacatctgtgtagtgtcattccgctgtgctctgaggagtaacaggtctga

SEQ ID NO: 153878 - DNA, 122 bp, Homo sapiens
tcttccagtgactggctggataccccaggcaagtcatttcacctaactctcaactccctacgtcaaacaaggataataacaagtagtcaaccccagagataaagccgggaggcccatagaac

SEQ ID NO: 153879 - DNA, 122 bp, Homo sapiens
cccagttctgcaggaaactggccctcaggggtaggactggggcaggcttcatgtacctcccgggggcggccctggtgcagggcgacacgcttgtgccactcgtgcacgtggtgtgggttttg

SEQ ID NO: 153880 - DNA, 122 bp, Homo sapiens
agcttttcctggattctcttctcaatgacaagctgttcaaacagagaacacctatcaaaacgaatatcatcatctgctcctttctttcttcctttcaggatatactgctgtccagcagggga

SEQ ID NO: 153881 - DNA, 122 bp, Homo sapiens
aatgattcacctcacaatcttgtatgtgctaagtaaaaatccccagctaattgtaaatagcgctaaaatagtgaaagcaagcactaggtacaaattgttgctgttctaaaccccatacacaa

SEQ ID NO: 153882 - DNA, 122 bp, Homo sapiens
ggtcccgagctcttccccatgcagaggccgctgagaccgggtgagaattcaagcatggcacgggcccgccggcagtgctgggggacctggcgccccctctgcagctgctggcccgggtgcta

SEQ ID NO: 153883 - DNA, 122 bp, Homo sapiens
tttcctttctttaagcctcagctgctgctctaggtgtaaaaccggcataaaatagcactacgtaccttgcagagttgctcggaggattgaaggagataatgtaagagagtttggctagtttg

SEQ ID NO: 153884 - DNA, 122 bp, Homo sapiens
tatttccatgctgggtgcctgggaagtatgtacacggggtacgtgccaagcatcctcgcgcgaccccgagagcctggggagcgggggcttgccggccgtggcactcatttacccggagacag

SEQ ID NO: 153885 - DNA, 122 bp, Homo sapiens
tcttgagtgagtggccatgagctgggctgcaagagtcctggggagcagccagagagcgggcgccgcgggagcgaattgtttttgcccaaggatggttctgtgtctccgccaggcggcatgtg

SEQ ID NO: 153886 - DNA, 122 bp, Homo sapiens
gctgttccgtcagctgccgctcctcctcccagacgcagagcgccgctctgccccgccccccgcgcaggctgccgtccctacatccgggtaccgactccagccgcctagacgctggcactatg

SEQ ID NO: 153887 - DNA, 122 bp, Homo sapiens
gctggaagcaaccgaggccgatagctgggatggggctgaagagccctggctctgttttaccggaggcttcagggctttctggttggcacactctctgccggtgtagacgcggcaggtctatt

SEQ ID NO: 153888 - DNA, 122 bp, Homo sapiens
tgaccatggggcagggcactctcaccccttctgctcacactgaatgagcaggtgatttctcggtcactcagggtggcagacacaaaagggcaagagaatgagtcaccaggcaccaggcagga

SEQ ID NO: 153889 - DNA, 122 bp, Homo sapiens
tgagccatcgcgcccggccccaagatcttttaagaccgcagctccagcctctcctcccagcgaggtggtccctgccacttcgacccgcttatatccgaactggatgggagttctgcctaagg

SEQ ID NO: 153890 - DNA, 122 bp, Homo sapiens
cgtacctttggctgaagaaagagtgctcccggccagcgcggggtcgcctagggggttccgcgctgcctaatgcaaaggatggaaaagttacagaagcaggtcctgacaccacctatgtctag

SEQ ID NO: 153891 - DNA, 122 bp, Homo sapiens
tctggctatagtcgtttctgttaaaataattattaagtgtagtgaggtcgctctctggctcgccaggaattgtctagtgaatgtactgctgtctttagtgataaaagatcttgtaagaccac

SEQ ID NO: 153892 - DNA, 122 bp, Homo sapiens
tagggcttcaaggttacagtgagctatgatcatgccactgcatcccagcttggcaacaagcgagaccctgtctctaaaataaataaataaataaaaattgaaaaccattttctacatctatt

SEQ ID NO: 153893 - DNA, 122 bp, Homo sapiens
tgttttgttattgctagatgatggaatccacaacagtatccaattctttttccaaggcaacgacttctgcaaaaaaccgagatgtgcagtctctcttgctaagtcaccgatcacctatactc

SEQ ID NO: 153894 - DNA, 122 bp, Homo sapiens
caacctggtgggcgaggagcaggtgcgttcacctgtgctgcccaggacggcctgtgctcccggatagaagctcacacacatgggtgccacatccccagcactgccggagacactctccctca

SEQ ID NO: 153895 - DNA, 122 bp, Homo sapiens
gatctgacttaagagcctcccccagcctgtaattggtcagaggccgcgcacagctccgctcgttccaggtgagtaaagcgcctggactcagacgtaattgattctgactgatatccaggttg

SEQ ID NO: 153896 - DNA, 122 bp, Homo sapiens
ggagcgagggaggcctcgggggtccccagccgggtaggagtcacctcaggcaggagggcccggccttgtcggggtcacctggcgggagggtcccggggtggggcggggccgcctgtgaggag

SEQ ID NO: 153897 - DNA, 122 bp, Homo sapiens
ggcacgtgtgcagggaaggctgtgtatgtggcatgtgcaggcagcagcagcaacgcgggacgatggggagagagcccaggggagggaggatgcctgcagaagcggctgtgatgtgtgggaag

SEQ ID NO: 153898 - DNA, 122 bp, Homo sapiens
atcttagaataaaacccacagtccttaccatagcctgaagtcaattccccttctgtgcaccgtgacctcaagcctactgctctcccttgctcactaagcttctgtcacactggcctccttga

SEQ ID NO: 153899 - DNA, 122 bp, Homo sapiens
gatctgggggacccgagctgcgcacagtggcgggaaacgagcgggctcagctggccgggccgcgtcccctagccaccgcccgcccgcccgctgctttggcctccggagaagcctggagaggg

SEQ ID NO: 153900 - DNA, 122 bp, Homo sapiens
atgaatatatacagactcatatttccttggtggttaattgtatattaccatgcctatattcgctcaaacaccattttatgttcatgcaaaattttgttagtcctcactagatgagagtgggc

SEQ ID NO: 153901 - DNA, 122 bp, Homo sapiens
catggagtgggggcctgagttgctgtggagggtcgagagggcaggttggctggtgcccatcgaggactggggacccagcagtgcagccgctgcaggctctgggctgtgacttctggcttgca

SEQ ID NO: 153902 - DNA, 122 bp, Homo sapiens
atgtggttttggagaagcagtgcaaacgcagccggccaggatgccagcagtgcctgcccacgtgagctaggcgacatccccctaagcggctgcggcgcatgcccacagcgggcgaggcgcta

SEQ ID NO: 153903 - DNA, 122 bp, Homo sapiens
aagtgcttgtgtatgtgtagtgtgtggctatgtggctgtgcatgtgcttgtgtaagcctgcgcacgtatgtgttcctgtgtctccaaatgctcgtctttgtatttggacctgtctcttagca

SEQ ID NO: 153904 - DNA, 122 bp, Homo sapiens
cctacttccgggcgtacatgatcctcctccccttctcggagacgtttttctacctcagctcggtcatcaacccgctcctgtacacggtgtcctcgcagcagtttcggcgggtgttcgtgcag

SEQ ID NO: 153905 - DNA, 122 bp, Homo sapiens
gaaatcaaagaactcacgtaatgcatatgaatacacattgatttatttactatacaaattcggagttttatataaagtgctggatttccttaaacagcatgagttgaggaaactcttttaat

SEQ ID NO: 153906 - DNA, 122 bp, Homo sapiens
acaggagaaacttactttctttgcatagtctactcacaagggaggcctggccctgggacccgggtccgcgcccgtcccccttctccccgcccacctcgagcctgcaggagaggggaccccga

SEQ ID NO: 153907 - DNA, 122 bp, Homo sapiens
cgaggtctgtgattggtgaagagcgacgggccaattggaggagttgttgttaggccgtcccggagacccggtcgggagggaggaaggtggcaagatggtgttggaaagcactatggtgtggt

SEQ ID NO: 153908 - DNA, 122 bp, Homo sapiens
cccgcggaggaacatcggctgggctgacggaggagtttagtggggccgggggaacctgggcggagtcaggggcagtggtgaggagcggggtcaggtgaccagtgggggaccgggacgaggag

SEQ ID NO: 153909 - DNA, 122 bp, Homo sapiens
aaaggggcggctgcaatctgggtaataaccctatccccactccagaagtcacagtcacatcgttaagccttcctcccctcttgtcccaggacagctttaaaaacgttaaaagcatttctgct

SEQ ID NO: 153910 - DNA, 122 bp, Homo sapiens
ccgccccagctgggcgccgctccctgcgtgaaaatgggcccgggggctgagctagaagcccgctccccaccaccatcgcaggtcactgcaaaacctgctggactcctagttgcgtgccctgt

SEQ ID NO: 153911 - DNA, 122 bp, Homo sapiens
gcctcagcgccggtgtcccccggcggtgagctccgagccgttaggcggccccgggttctccggcccagggcccctgcccccaggcccccaccccagaaggtcgggccagacttgtgggcagc

SEQ ID NO: 153912 - DNA, 122 bp, Homo sapiens
cagctccgcttccgagggacacgtgtcccgggacaggtgtgcaccaggcagccgggcatgcgctgacacctggccacaggtatttttgccaacacttcacattgcgactccccagtagcagg

SEQ ID NO: 153913 - DNA, 122 bp, Homo sapiens
tgtatttgccaggtacacaggtaccaggtgccaggtgctgaaccaggacttgccctccatcgactgtgcctgagtatgggtgtcctttggcttctccaagtgggcattaaaatgactgctgc

SEQ ID NO: 153914 - DNA, 122 bp, Homo sapiens
cagccatcagtgcccagagccagcctggaacctctcattcagggccctcagttccttctgcggccccaggatggcccgcccgtctgccctccgccttgccccgcccacccagctccacctcc

SEQ ID NO: 153915 - DNA, 122 bp, Homo sapiens
ctgcggtcctaagtcacgtgtgacattctgtatccagtctatcggttatcccaaggagaacgccctgccggaatggccaatcgccttgagatgtccccgccctattcgccatcttaacatag

SEQ ID NO: 153916 - DNA, 122 bp, Homo sapiens
acgtgctgcgctcgtgagcggaggtgttcaaagagggggcagatgagttacttcccgagacggaaccgggggtcccacgtccgccgccttcagtagcacaaccaatctctgaacactcaaac

SEQ ID NO: 153917 - DNA, 122 bp, Homo sapiens
gctgtcctcctgtcacctgtctgtcacattaggtccccagagtttcaccggtgaggactgcgtggagttccacgtgcatggaggcccggcagtggtgagcggcgtcctgcaggccttgggtg

SEQ ID NO: 153918 - DNA, 122 bp, Homo sapiens
cgtccagtcatttgtaccaggagaaaggtacggtggcatgaataatgataaacagcccaacgtcgtgtgtgccatttacaggagaatccagaacatggggtttgtttttgcagttgatttat

SEQ ID NO: 153919 - DNA, 122 bp, Homo sapiens
cagaaaaatagtggctactggatcccagggcaggactcactctagtagtgggtccagtttcgagatggcactgtgtcatacagctttggtgtggggagtggggtgtgtgtgtgtgcacaaaa

SEQ ID NO: 153920 - DNA, 122 bp, Homo sapiens
catgcagtgatccctgtcacatgcggttgttaggggtgggggccctggcattggtccccccgtgtttacatcccagcctggctgtttgtcagctgtgtgaccttgggcatgtgtcttgacca

SEQ ID NO: 153921 - DNA, 122 bp, Homo sapiens
ggaggaggcgggcccagtctctagggagcgaagtggaggtgccttcctgggccgagccctcggagcatgcgcaccgagcagccaccctttcccggctctttttacccggaacccggcgcgcc

SEQ ID NO: 153922 - DNA, 122 bp, Homo sapiens
tgttccagcagtgaaatgggatgctctgggctcaggtacaaacaagggtgtttagaaacgcggatctccagggctcatgtgcccatttcagagtgcagacacgcagctcacccacagggaag

SEQ ID NO: 153923 - DNA, 122 bp, Homo sapiens
gaagtaggtaccgcgcagcagggccgggccgttgctgggggaggcgggtggaagcacatccgggctgccgtggggggagctggccatggtcagcagcgaaggggatgggcggatgatctcat

SEQ ID NO: 153924 - DNA, 122 bp, Homo sapiens
cctctgattccaattcccacacagggttcattctaaggttctgcctttccgtaggcataacgtcctcttccaacagtgagaaagctggtttccattatctttaatgtgtttacttctttgat

SEQ ID NO: 153925 - DNA, 122 bp, Homo sapiens
gctgggccgcccgtagcgacggcaggagtaggggagagggagggacgcttggagtgtgagcgcaccagtctgttcatatttaatttacaaagcagcctcggaaccccgggccgggtggtctc

SEQ ID NO: 153926 - DNA, 122 bp, Homo sapiens
gaatctctccgtgtgcctccgtttcctcacctggaatgtgggcgacctcacacaggaagccgcctcttctagtgggcaccgacggagcgagcgcgcgtctgcagcgggactgagcgccggga

SEQ ID NO: 153927 - DNA, 122 bp, Homo sapiens
gagacaggaggacaaggatccccgcctctcgtggggtgccagcggcatgagattattacacgtggtggagaaaatgcagcgcagtaaggggagagagcacccacctctccaaccccctgccc

SEQ ID NO: 153928 - DNA, 122 bp, Homo sapiens
gcagacacagtggagcatcctgcagtagggatccgaagccgtggaatctccaaagggccacgactgcttcccagaagctctagcccgttgcccggaaagcccaggtggtctttggcaagacc

SEQ ID NO: 153929 - DNA, 122 bp, Homo sapiens
ggcctccagccctgcagcagccttccctagcaccagtgggagcacagcttccttcaccctcggcccagggagcagttggccacagctctgtcaccacagctgttctatggaatcagaaacca

SEQ ID NO: 153930 - DNA, 122 bp, Homo sapiens
ttgccaaggagatgcgagtaccggaaatgcggaattcggggagagcgcgcatgcctggtccggtggagggagggtgccgggcgtcacaggtcctgacagggaagaagttggcaggtcctggc

SEQ ID NO: 153931 - DNA, 122 bp, Homo sapiens
acgtttgagaaagctctgggggacgcctccccactgggacccatgccctggactgttgggcgccctgcaccacgcacggcctggagctggcccggtaacgcggccacaggaacgtggtgcgc

SEQ ID NO: 153932 - DNA, 122 bp, Homo sapiens
aaaggtcaccagattattcatgcacgtctctcctccccacttagccctccccacccccaccggctgctgccacgtcccccacgaggtcccatgcccaacctctccaccaggccatcagtgtg

SEQ ID NO: 153933 - DNA, 122 bp, Homo sapiens
cgcggagccggacctgctctactacccacctggcgtcgtggtctacagcggggggcgctacgacctgctgcccagcagctctgcctactgacgcaggcctcaggcccagggcgcgccgtcgg

SEQ ID NO: 153934 - DNA, 122 bp, Homo sapiens
gcactcaaaatggagcgtccttctagtctgggctggggctgatatgcgctgagaagaggccgcagggtgggagcagccctgtcgctgctcagaggggcctcacctctccagagatgggttgg

SEQ ID NO: 153935 - DNA, 122 bp, Homo sapiens
cttcaaatgtatacaggaaatgccactgtgctatgtcttaagataaagaaaacgatatgtcgatcccacctcctgagagtgtgctaacaggctctcacaatcacaggactctgatataccca

SEQ ID NO: 153936 - DNA, 122 bp, Homo sapiens
ccccatctcaaattcaagaaagcactgatttatatgccaggcttctgggagttccactcccgatatttcttacttctgcaccccttggctggctaacaggctttgctgctcagccctagacc

SEQ ID NO: 153937 - DNA, 122 bp, Homo sapiens
agctggggccggctcggctgcgggagtaggaagcagctttgcgcgcccgggcggccgatgcgggcactttgaagaatcacgtgtgttgaggccctcttaaagagataggcacctacttttcc

SEQ ID NO: 153938 - DNA, 122 bp, Homo sapiens
gcaggaaggatccagcaggacatagtggacctcacgatagcgcggatctaagggggagaccgccaggaagtcctcctcagccagctcacagcaggagacgccagcccaggccagcagcgtgg

SEQ ID NO: 153939 - DNA, 122 bp, Homo sapiens
tgcggaagtctggggcgagggagctccttcccggagcccagcagcctccttcttcgaccccgggtgttgtgccgatgtaacccctcaaatccccgtctttgccgggccagggagaatattaa

SEQ ID NO: 153940 - DNA, 122 bp, Homo sapiens
gggcaagggcaccgtgtgccagaggatcgcccagaactttggtctccagcatctctccagcggccacttcttgcgggagaacatcaaggccagcaccgaagttggtgagatggcaaagcagt

SEQ ID NO: 153941 - DNA, 122 bp, Homo sapiens
cttcatttcgcctctgtccagtttctctgacgccccctgatggtcagtctgtgagtgcttcgctcacgcattcattcaacaagtgaaattaatttaatggatgcctaatgtgtgctcattgc

SEQ ID NO: 153942 - DNA, 122 bp, Homo sapiens
cttcaaaaccgttccagcctctatccattacccaatttcaaagctgcttccagctgggcgcggtggctcacgcctgtaattccagcactttgggaggccgaggcaggtggatcacgaggtga

SEQ ID NO: 153943 - DNA, 122 bp, Homo sapiens
ggaagggggaggccgcgggtcagttgacccggaaacctgagaggtgctgaggaacaggcccgggcgcccctccggagcagctcagcaaggaggggctggggtcggaggcgaggagagggaga

SEQ ID NO: 153944 - DNA, 122 bp, Homo sapiens
ctggtatgacataaagaacgttgcgtaacagcttgtttttctttagcactacgtgcctgccgctctgctatgcattttacgtggattgtcttatgtaattttcacaacagcccagctaataa

SEQ ID NO: 153945 - DNA, 122 bp, Homo sapiens
ctgaggctgcagccaggatggatgcttcctttgagagcaatgcttttcagaaaatgctagcgcgctcctgtcagatttcttgcaagcttcctgcagagagagacaagtttgtggcgaggttt

SEQ ID NO: 153946 - DNA, 122 bp, Homo sapiens
tgcaaaagcatgaaggtgtgagtaaggtttgtgtgggggtggagcaagttcagtatgacccgaggatagtttgcaaaagaggcctttgattgtatagtgtagcactcagtaaatagtgttgg

SEQ ID NO: 153947 - DNA, 122 bp, Homo sapiens
tagaaagcccaaacatgtattcttaacatagtaggcaccagctgaaactgagtaattaaacggtcccctgaagccaagtattccctggttagtcgccaccccaccactccttcctgtctcta

SEQ ID NO: 153948 - DNA, 122 bp, Homo sapiens
tgggttgtgtatttagacctgggacgcgtcttgagtgaggtttcttacatggtatagcgtcggcacaggcaccttgacgcccagcggtgcccaccccaattgctgggagggctcccctctcc

SEQ ID NO: 153949 - DNA, 122 bp, Homo sapiens
tcccacctcagggtcaatgctgagctgggcaggtgtcctgcaatcctggtgaatattcagcggtctgtgtccccttggctagctcctgcctatgcaaacagccacctgagaaggggaagcag

SEQ ID NO: 153950 - DNA, 122 bp, Homo sapiens
cgggacgtagcgacgtactgcgtgcgtgcgtgcgcacaaacgagggcgcgcatgtcgggacggaactagaaaagctcagtggggctggcggcaactctaggtctaacatccctcggaagttc

SEQ ID NO: 153951 - DNA, 122 bp, Homo sapiens
cggagaagctcaaggatcccgcctcggcgaagccaatcgcggacgagcccgccgcgcgtgcgcactacctagccgctgcactgccctgtcctgccctactctgattggacgaccctactgca

SEQ ID NO: 153952 - DNA, 122 bp, Homo sapiens
tcactggcccgggtctccttgaagccagcattgagtgccccagccagggagaaatccacccgggtcgggagtggagggggcattcgagccagggagaggcgggtgccaggacccagacggcg

SEQ ID NO: 153953 - DNA, 122 bp, Homo sapiens
gacaccattgggatgagctccagatgccctgctgacttccaccaagcacccctgggccatcgcttaaggcatccatcttaatcctggggctttaagaacatcttctttgctttaattggtgt

SEQ ID NO: 153954 - DNA, 122 bp, Homo sapiens
ccctctgtcccatctaaccctgttgtcctgggcatctttatcggctccggcctggagaagcgagcgggcggctcgggcgttgttcacggcagcagcccagtgcagcgcagttttccctaggg

SEQ ID NO: 153955 - DNA, 122 bp, Homo sapiens
aaaagcgggtgcgagcagggtttcattttcatctttagcaaggtgcccaaggaaggttgccgtcttttcagtataagatcctacctgggtcttgcactcaacttctgggaagagtctctaga

SEQ ID NO: 153956 - DNA, 122 bp, Homo sapiens
tagaggaaaggtagccgaggtgctgggacacgctttcgcgaggtcaaaagctagtgggcgcgcatttcggcctcaaacgctgcagagagggtcagaagctacccaggtcccacttagtggtt

SEQ ID NO: 153957 - DNA, 122 bp, Homo sapiens
ctcaatgaaggcctcacccagatggtgactctgtgggcaaaggcatgcaggggcgtggcacgccctgcagatacttgggggcagtgatccaggggaagggggccagcagtgcaaaggctggg

SEQ ID NO: 153958 - DNA, 122 bp, Homo sapiens
ggagagtctcaccttatcccctctactatgggacttttccttgagcttccttcaactggacggcagtgcccttccttggtgtccaaccacctatgtcccctctctacctcctccagaaagcc

SEQ ID NO: 153959 - DNA, 122 bp, Homo sapiens
cccgggctatgagccaggggatctgggcgcggtgggcgggggccccctcctgtgggtgaacgcgccagcgctcagccccaagtcctacgcttcgggtcccgggcctgcgccgccctacgcgg

SEQ ID NO: 153960 - DNA, 122 bp, Homo sapiens
aacaccacgagcggcatcctctcagggagcgaccattggcaaccgcgctgcgccaacttccgggttgtacgcgtctccgacgtaagccggaagtgcaaactgctcttcctgtctcccttgac

SEQ ID NO: 153961 - DNA, 122 bp, Homo sapiens
gtccgtggcctttgagctgccatcgcgcaatgtgaccgtgaacgagagcgagcgggagttcgtgtactcggagcgcagcggcctcgtgctcaccagcatcctcacgctgcgggggcaggccc

SEQ ID NO: 153962 - DNA, 122 bp, Homo sapiens
cggctcggggagccgaagggacagcgccccaagttcatctggccgcgggagcaaaaaaagcgcccaaaggggaaggaaggaaacagaaagaaaggggctccggaatttgggggggtggctag

SEQ ID NO: 153963 - DNA, 122 bp, Homo sapiens
gatctcagccctggtaggggtaaccactcactacaggcggtgactgttttctaactgtgccgcctactgatcccttctccgtaaattcatgcttaatcacctgctactcagtgaaatgctga

SEQ ID NO: 153964 - DNA, 122 bp, Homo sapiens
gtcaccatccgaggagcggcggaggcagcgcgggtccccactctggcctttggatgctgccgcgcgagtggtgtcctctctccttgctgccctgcgtctcctccgttgcccctccggatccc

SEQ ID NO: 153965 - DNA, 122 bp, Homo sapiens
ggccctgcctcagtcctgccactcctcccatgtgactggaatgcccatagctgagtttgtcggtcttcttttctgttttccctgagaacgtaaaacagcaggggccgatcctgacaaagcac

SEQ ID NO: 153966 - DNA, 122 bp, Homo sapiens
gcggtacctgaggaccacgcctgcgcgcggggttacgcaagcgcgcagcctttgcgcacgcgcacgaacgcacggccgcgcagcatctgtcttgctggaagctttttcctagaggttgagcg

SEQ ID NO: 153967 - DNA, 122 bp, Homo sapiens
caggcagcccccagccccctgaggccctgtccatcttctccccaccaccgccccggtgtgcgtacccaggcgcacgtgctgcagcccccggaggccccgctgaaacctgggctgcccttccc

SEQ ID NO: 153968 - DNA, 122 bp, Homo sapiens
gaactttattaatatgatgtctagagaatgaaagaggcacatgtgccctagaggaagagccgatgtcctctgtgagttctcctctatcaggggtcaggttggatgaaatctaacccccacct

SEQ ID NO: 153969 - DNA, 122 bp, Homo sapiens
gggaaggggagaaaatgtgcctactctatgttaagtacaagctaaatcttttgcacttatcgtatcatcttatttaatcatcacgacaaccttatgaggtaaaatactttttaccgttttac

SEQ ID NO: 153970 - DNA, 122 bp, Homo sapiens
gtagaaactgaaatacaaggaactcagctagtggtcaggaaggagcttagctggaggtggcgactgtttcgtcagaagttagtatctggttgtcattgtcatagagagatctctggtttctt

SEQ ID NO: 153971 - DNA, 122 bp, Homo sapiens
cctgactcgaaagcctctcagtctccctcctccacacagtcctccgtggacttgtcacggcgaatcccattttagagatggacaaactgaggcttggcaagggcaatcaaggtcacaaggct

SEQ ID NO: 153972 - DNA, 122 bp, Homo sapiens
atccggccgtcggggagcacctggaggtgaaagccgatgcccacgttgcagtagagcctccgctgccgcttgatccccaccaaatagccactttcccagttcaccccggcaatctctccagc

SEQ ID NO: 153973 - DNA, 122 bp, Homo sapiens
cgctctgggctgcggagggccgcggccgtgcccgcaccgggagccgcggggggctgggcccggctattgtcgcctgtcagcggccgcccaggcccattcgtcccggccttcatggtccgcgc

SEQ ID NO: 153974 - DNA, 122 bp, Homo sapiens
ccccacgccacccagggccagtcgggtctgctcacagcccgaggaggccgcgtgtccagccgcgggcaagagacagagcaggtccctgtgtctccaagtccctgagcccgtgacaccggccc

SEQ ID NO: 153975 - DNA, 122 bp, Homo sapiens
gggaccgagctccccgaaagccccgctcggtacctacctcatccctccacgaccttggtccgtgtgtctgggaccccaggagaggactgactggaccagagctcctggctggagaagggaga

SEQ ID NO: 153976 - DNA, 122 bp, Homo sapiens
ccctaggcagggaaagctgtcaagactcctgccaggaatggggggtgctgagtcatctcacgaagaatccctcactcttcccgggttcagcccagaagcccttccaggcatgatcttcccca

SEQ ID NO: 153977 - DNA, 122 bp, Homo sapiens
acccgaggagtcaggggagacacctagccccagggacccaggcggccgcctgagaggaggcgggggctgttacctgcaacatcccggttgtccatcttgagactcatccaatcccacaatgc

SEQ ID NO: 153978 - DNA, 122 bp, Homo sapiens
gctgccctctcctcctaagaattgccctcagcagagcaggagcagcctctccctggctgccgcagagcacaatgctcactccaggggtccccgtgggatcagactgaagctagtctcacctg

SEQ ID NO: 153979 - DNA, 122 bp, Homo sapiens
caaatagggcaaggcccggccatgaccggcaaggaaggggcctgcacggggcggccggcacgaccttgcccagggtccgaggctgcagccccagaactggtcacagaacggccagaggggca

SEQ ID NO: 153980 - DNA, 122 bp, Homo sapiens
gaacggggctgccaaacaatccaatccaaaaagcagcccaggacaaccggaagcaggacccgagggagcccaggagcggcccagccaggcggctcctgcagtagaagcagaaggtcccggca

SEQ ID NO: 153981 - DNA, 122 bp, Homo sapiens
cggcagacctgctccagaaaatacggcaggctgcattcggcaggcctgcttcagaaaatacggcaggctgcatttgacagacctgctccagaaaatacagcaaggctgcattcggcagacct

SEQ ID NO: 153982 - DNA, 122 bp, Homo sapiens
aacctttgcagatggcgccgctattgctgagaaatggattgcttaataaagcgtatcatccggcatatttgctgcttggctagccaaatagaagttgttttttgcacaaatttccttgtcaa

SEQ ID NO: 153983 - DNA, 122 bp, Homo sapiens
ggggcacgcaaggaggcagagaggacgggagaggggagaggccaaagcgccaggaagcaccgtcaagactgaggcaatataggcaggaccgataaaaaatggggtgggctaggagtctcaga

SEQ ID NO: 153984 - DNA, 122 bp, Homo sapiens
ttagtcctagcgctttgctcttctctttcttttctttttctttgagacagtgtagtggcgcgatctccactcactgtagccttcacctccagggttcaagcggttctcctgcctcagcctcc

SEQ ID NO: 153985 - DNA, 122 bp, Homo sapiens
ttacatcagcatcaacaattatctaatggattggaacagtgtacacaggcagcttagctacgtcaagtcacgatttttactttaacttcaattccagagtcttggcctgatttccctcaaga

SEQ ID NO: 153986 - DNA, 122 bp, Homo sapiens
atactaatttgtttccaaagtacatattcttttaacaatttgagaaaattatctagcatacgacagtaatttaatgtaaagactctatagtagtgattaaggaaaaatagaactgttttggg

SEQ ID NO: 153987 - DNA, 122 bp, Homo sapiens
tcgtgatcagcccacctcggcctcctaaagtgctaggattacagccatgagccaccgtgccgggtctggtgaattcttttggactttgcacaattatgccatctgtgaacaaagttttattc

SEQ ID NO: 153988 - DNA, 122 bp, Homo sapiens
ctgcataaggtcagcaccctccgtatgaccccaccccaaatccagccactccgggtatgtcgtgatgaactaagcattagagcatggggcctaacgatggcatggctgcaggccaaatcctg

SEQ ID NO: 153989 - DNA, 122 bp, Homo sapiens
cttccacccagagcaggacgccgggaaggtcttcaaagggcacaggtggggacgtgggaacggggcgggggctcccaggcacgtcctgtctggcacgtcccaggtgacccctgtctgtctgt

SEQ ID NO: 153990 - DNA, 122 bp, Homo sapiens
tcatcgctattagaattggggtcaatacccatcatcactgttagacttgaggccgatacccgtcatcactgttagactcggggtcgatatcatcatcactgttagactcggggtcaataccc

SEQ ID NO: 153991 - DNA, 122 bp, Homo sapiens
agcccgccctaatttatttttggtcccatgcataggagccagtgcttattttgataaccgcgtttatgctttcaagctttgacagacaaatcattgccctgggcttcctggcggccacgagc

SEQ ID NO: 153992 - DNA, 122 bp, Homo sapiens
cagctgcacacgcgacgagtcttttctttatcaagtagaggaccatcaggaccagggaggcgacaatagagtccgcattaccgcggctggatactgccataggcagggggttaagaagccaa

SEQ ID NO: 153993 - DNA, 122 bp, Homo sapiens
aagaccgttgtggcgacaatggccttgctttagatgagaaataacagagtgccgtggagccgcggtccccggcctcgctggcaccagggatcggttcaacggaagacagtttttccacggat

SEQ ID NO: 153994 - DNA, 122 bp, Homo sapiens
agtacccgggcccaaggctgagggacccggtggagcggaagtcactccctgaggcagtggcgacagcggcggcgagaggatgaacaacaagttcgacgcgtgagtggctcgtggccgccccc

SEQ ID NO: 153995 - DNA, 122 bp, Homo sapiens
acgaatgcaaattagagaagcagagccggcttggtcacgtgcccagggcgggaaatctgacgaccaggccgagctggaaacctccacggaatcgtggctcggggctggaaacagacctcacg

SEQ ID NO: 153996 - DNA, 122 bp, Homo sapiens
aggacagcggggcgccgaggctgcagcggcggcgggagggagggacccgagcgcgccccgcggccgccacccccgttcccggcagcctcgccccctagttctgcaggagccggcccggggga

SEQ ID NO: 153997 - DNA, 122 bp, Homo sapiens
gcctaggatccagaagcttccagagcacggctgtcagctgtgctgtccttcctccttctgcgctgagactcttcccggtggaaggagcacttctcaagctcatgggcagggtcaggccgagg

SEQ ID NO: 153998 - DNA, 122 bp, Homo sapiens
cctggactgtaagtcattcttctgaatcttagtgtggtgctctaccaggcaacactgttccgagtaatgcaattctcttcttttccttatttagtcaaagtgtaattgaattaaatactgga

SEQ ID NO: 153999 - DNA, 122 bp, Homo sapiens
ttcccatagaaggatgaagaccgctctgacggtgtggcgctccctctagtggctgagagtcgctaactcaccggcgaggcttcccaaggccggagggcggcttctcaaaagtttgttccaga

SEQ ID NO: 154000 - DNA, 122 bp, Homo sapiens
ttaggctgctggtagggttggcctccttccagcttgctgaatggctgccgctcatataatcggtttgcattgtggcagtataatcaggttgacaaaagtggacaagatttttggaggcaatc

SEQ ID NO: 154001 - DNA, 122 bp, Homo sapiens
caaaacagacccttctctggtacaaaatctctacttttttttggcaggctccagggagatcgttcccgggggacttgtgtcagagcagctttaggagaaaggaatctgaacttgatccaata

SEQ ID NO: 154002 - DNA, 122 bp, Homo sapiens
cctctgggaaagctgagacccacatgcacaaaataagaaaacaggccacagggtcgcagccggtctcacccaccgtgaggttatctgatttattcccttggttgcctttacggctgggttcg

SEQ ID NO: 154003 - DNA, 122 bp, Homo sapiens
ttccttatgaatcaactggggacagtaatacctcacagggttgtgaaagtaaatgagtaacgcaaattaatgcacctaccacagcacctggcacaggatgaatcataaatgaaaaactttaa

SEQ ID NO: 154004 - DNA, 122 bp, Homo sapiens
cctcaggcgttccagccacacctcattctgatacaaagctagtcttcgcaaaaccagccacggtagatacttggagtgataaaatcagggtaaaaacacaccaccagccgctgcttgctttc

SEQ ID NO: 154005 - DNA, 122 bp, Homo sapiens
aggaggtgagggtctggtaatccagcattaccacctgagctccgccttcggtcagatcagcggccacgtgagattctcataggcgctggaaccctattgtgaactgcgcatgcaagggatct

SEQ ID NO: 154006 - DNA, 122 bp, Homo sapiens
tcggccgccccccgccgcccccgccgctgtcgcccccgccgcgcggctcctccttcctgccgctctccagcaccagcacctcggcaagtccgtcgtgggtcctgctcctcaccagccccgtc

SEQ ID NO: 154007 - DNA, 122 bp, Homo sapiens
caagtcccagatcagaaactgaggcgggggcttgctcagtgtcgcgtggctggcaatccgcggcggcctccggcgcatgcgcagttcttctctgcacggcggccttgcagccccgcttccac

SEQ ID NO: 154008 - DNA, 122 bp, Homo sapiens
gccagagcgggcgtccccgccagtgaccccacgccgcccgtccgcgcccaacccggcctccgccgagtgtccaaaccaaaagcgaaaggaacccgaccccgcgtcccctccggcggctccgt

SEQ ID NO: 154009 - DNA, 122 bp, Homo sapiens
agctcctgctacatcggtcgccctctttccatcctgggaaccgctcagcgctttgaggtacgcgcaagttaaaaatgcaatcactaccataaggaacccgggcttagcggggggcaaagcgg

SEQ ID NO: 154010 - DNA, 122 bp, Homo sapiens
gggttccttccttctcggtgtaactaggtcagcgcaaggtgatcctgaggagataggcggcgctcggggggcgccctcgttcctcttatcgcgcctttgtccctccctccgttccttgcccc

SEQ ID NO: 154011 - DNA, 122 bp, Homo sapiens
ccaggggaccacctccccgtagaaagcaccttcttgcagaatgcggcagcatagaggtcacggtagctcccgggcagcccttccctcctacaaagtcaggcccgtgtgtaaacctgcggatc

SEQ ID NO: 154012 - DNA, 122 bp, Homo sapiens
tggaaggcaaatggatacagagagaatgagggaggcttagaaaaacaaatcccacagcatcgcaaggaactcagggccccatgaatgtaagggatttctttttgactctggctacctgtaaa

SEQ ID NO: 154013 - DNA, 122 bp, Homo sapiens
aatgtttcgacagccaagttttcttcaaaatattatgtgacagaatacgactcaattcaccggctacaacaattcatagaatttttcaatgttttcttgagatgcaaaagttcactgttgca

SEQ ID NO: 154014 - DNA, 122 bp, Homo sapiens
tacagttgatgcctgttattcgtggattccacgtctgcgaatttaactgcttgctaaagtcgatactcgtggtactttcgcagtcactaacgaacgtgtgcagagaggtgacagcatccatg

SEQ ID NO: 154015 - DNA, 122 bp, Homo sapiens
tcaaggtacatcaaggaaatgaatagcagcaacaaaaaaatgttggtgcctagtttcatgcgggaaccactagccaggtcaaatgctgtggctcaatttcttcattaagtaattctcagatt

SEQ ID NO: 154016 - DNA, 122 bp, Homo sapiens
gggttgtgagtggtgggggcggggtctggagcagcaggcgccgcgtttgcgagctaaggtcggagttctgcaccggcgggggcggggctctgcgtggccggggcgggctcgggatccgcggg

SEQ ID NO: 154017 - DNA, 122 bp, Homo sapiens
gctagccggagcatcaccatgaagttcaatcccttcgtgaacttggaccgcagcaaaaaccgcaaacgtcacttccatgcccccttgcacgtgcaccggaagatcatgtcatccccgctctc

SEQ ID NO: 154018 - DNA, 122 bp, Homo sapiens
gcctgcgagccaaggtgtccgagtctgtggggcgggaagggcccccaaacaaggaagcgtcgcctgcagggcctcgcccctgcccccttggtgaagggtggaccccctactctctaaacgca

SEQ ID NO: 154019 - DNA, 122 bp, Homo sapiens
aattttatatgtatctttttcttaaagaaggttccgctatcccccaaaacatgcaagattcgggctgcatagaagctggatctgtccagcccctgactaacatttgtttctggcattaaatg

SEQ ID NO: 154020 - DNA, 122 bp, Homo sapiens
ggtgctggagtcttggagatgctgtttgtgtgtgtgtgtgtgtttgattcattagtatcccgactccctaaaattgtatttgacagttcttgacaggttaccccgtaagacagtgaaaatat

SEQ ID NO: 154021 - DNA, 122 bp, Homo sapiens
cgaagtgctgagatcataggcatgggccaccgtgcctagtctataataaagcttgttatccggtagcacaagttttcctcctcccactccttctcctcttctttttttttcttcctcctctt

SEQ ID NO: 154022 - DNA, 122 bp, Homo sapiens
attgccaccattattagcattgacttttccttgaaaaattggcgccccgtggccatgggccgacctaggcagtttctgcagggacgagcgtgagttttgtaccgcggttaccacctactttc

SEQ ID NO: 154023 - DNA, 122 bp, Homo sapiens
cagcccagctctcagtggccatgcagaaagcccggggcacgcgaggcgaggatgcgggcacgagggcaccccccagccccggagtgcccccgaaaagggccaaggtgggggccggcggcggg

SEQ ID NO: 154024 - DNA, 122 bp, Homo sapiens
acagccacgttccttccttgatgttaaacaggttacaagccctgtgacccccaggtgatccgagaccgcgtggcccacatggagttctgttatcaagagctttgccagctggcggctgagcg

SEQ ID NO: 154025 - DNA, 122 bp, Homo sapiens
cccagatgagtgaggtgatgcaagccagaaacttaatttccctgggcacaacctgatgaacgggtgaccttccacgggggatgttctaaaccttttaattgctaacccttttaatttctttg

SEQ ID NO: 154026 - DNA, 122 bp, Homo sapiens
ctttcttttcggagagtagctgttagtttcacacttgcttagtgggtctgtggctgcaggcgggactgtggttctccagccctggcccacagatgtgcctggagataattgactctccaact

SEQ ID NO: 154027 - DNA, 122 bp, Homo sapiens
gggaccccatccttcctgtcttcgcagaggagtcctcgcgtggtgagtatgcggtgaggacgttttttttttaaagatcacgttcattccccgtgcttatcgggagctgcgggagatggagt

SEQ ID NO: 154028 - DNA, 122 bp, Homo sapiens
tgcgctcctttaacttcgagcagaccaaggcttttgagttcaaggtgcttgctaaggactcgggggcgcccgcgcacttggagagcaacgccacggtgagggtgacagtgctagacgtgaat

SEQ ID NO: 154029 - DNA, 122 bp, Homo sapiens
agtgatccacctgcctcggccttccaaattgctgggctttcaagtgtgagccaccgtgcccggcccaggtccaatgtaatctctatcaaaattccagctgccttttttggcaaaaatagaca

SEQ ID NO: 154030 - DNA, 122 bp, Homo sapiens
aggctctctgtgtttgctaattggctttactcagagtaaaagtaaactttcttatattttcgtgaaaggaagtagttttacaacttggagcaaggcacttcactgaaatcaggcacttatcc

SEQ ID NO: 154031 - DNA, 122 bp, Homo sapiens
taacaccaatatgcagagaagcagtaaatccattgtcgttaaacagcggggagccgctggcgctggcagcctgcccaccggcgacggtgaaccgggctggcaccgagcagggagccgggcct

SEQ ID NO: 154032 - DNA, 122 bp, Homo sapiens
cacgcagcagtgttgcccaaggggcgcggcgaggcttccggctctgcggcctgcaggtagcgcgaaagtcctgcgcgtcccagatgcccaactaaaagcttcgctgcgggaagaaagcctga

SEQ ID NO: 154033 - DNA, 122 bp, Homo sapiens
agcagtgtagcctcttcaggaagtggtgggagtgaacacttagaagatcagaccactgctcgtaacacattccaagaagaaggtagtgggatgaaaggtgagtgactaaatgagaaaccact

SEQ ID NO: 154034 - DNA, 122 bp, Homo sapiens
cttgacctccacaggtttaggatttttcattttaagcagtcaatatgacgttaagaaattcgtagttctcaccaaactccaagtagagaaaattatgtcctgagatccttgggctaggcatg

SEQ ID NO: 154035 - DNA, 122 bp, Homo sapiens
tgggccgcggagttgtgaatggtgcgtcttgtttgccggagttggaggcgggcgggcgcgcgaggaggaggggtggggccggcgggggcggggtgggcggtgagaggaagtggcggcggcgg

SEQ ID NO: 154036 - DNA, 122 bp, Homo sapiens
atgaaacttactatcacccttttccagtgcagcgtccaggggcatcaagcacattcacaccgcggcgcagccgtcaccaccctccatctccaggtcttctccatctccccagacagaacctc

SEQ ID NO: 154037 - DNA, 122 bp, Homo sapiens
agaggctacgccgggggctgaggcggcttagagggtcattaatcaaaccctccggcggggcgggctcgggggcggggcgtcctcctggccccgcccctcggctcactgcctcacgctgcttt

SEQ ID NO: 154038 - DNA, 122 bp, Homo sapiens
gttaggaccaaggagaaacatctgtgactattttgaaatgttgaccttcattgaggaaatcgagtgaaaaatttattttggtgggcaaggggaggaatattgggttctaggtctgtggagaa

SEQ ID NO: 154039 - DNA, 122 bp, Homo sapiens
cgcgggaggtggggaggagctgttttgttctcttcaatgaaggaaacctgcagtcgggagcgctcagtcatctcgaagcccagaagcccagtctctggcccgagccagccccacacacgcct

SEQ ID NO: 154040 - DNA, 122 bp, Homo sapiens
aggtcccttgtggggctgcctgtgcgggtcgctagggcggtggacatcacgctgctattccgggccagcgtcaagaccgtgaagacgcagaacaaggcactgggagtggcagtgggtggcag

SEQ ID NO: 154041 - DNA, 122 bp, Homo sapiens
tcagtggcctgcagaataaaaccccaaatccttaacatgtcccagtttggtattttcctacgcttggccctacccgggccacccctttccaggctctttaatggcggagcctagctcttttc

SEQ ID NO: 154042 - DNA, 122 bp, Homo sapiens
tatgggccaggtagtggattctagagctgtctgagttcaaagcccatgttttgttgttaccgtatcttctaaccatttgaagactgggatagggaagggcttagagatgaaaggaagattgt

SEQ ID NO: 154043 - DNA, 122 bp, Homo sapiens
tgagaaccggaacaagactcctaactccccctcctcacctctgcactcctgcactcttaccgggcagaccagaaaccaggagacctgaactctggccaagctcggggagaagagaatccaaa

SEQ ID NO: 154044 - DNA, 122 bp, Homo sapiens
ggggcagcgtcagccgggctcagcagccagctctggaagtagggcctttcctgatgacagcgcgaggccggaccgaagaggaagggttcgtggagcatggggtgcgcagggtgcgggtggtg

SEQ ID NO: 154045 - DNA, 122 bp, Homo sapiens
gagaagcctcctgacagccaaggagaccagcagccagtagagcaggtgttgtaacaaggccgaggaccctcagacaccaattttgctggtaagaccgctgcccaggatgcaccgtacaagag

SEQ ID NO: 154046 - DNA, 122 bp, Homo sapiens
aaagacaactgagaacactgggggtgggggtggggtggggggtagcagcaggattgaagacggagtcagacctggagaaaagacccatacaagggtgaacttctcatttctcccctctttct

SEQ ID NO: 154047 - DNA, 122 bp, Homo sapiens
cctatatagaggggcaaaccaatcttcctaactcatttactttgcagatgaactatggcgcgtactaagcagacggctcgtaaatccacaggcggtaaagcaccgcgcaaacagctggccac

SEQ ID NO: 154048 - DNA, 122 bp, Homo sapiens
gagtcttaactttccctccgtcgaaggtgttagtcttaccttcccgaggttagataaagccgctaaaagctgctgtttgttattgaatctcatctgctaattacggcggcgggacttgggtt

SEQ ID NO: 154049 - DNA, 122 bp, Homo sapiens
gcctgcggcgccgctggttgaggaagtgccagtggaagcaggtgaacggccggtgctgcgcgcacttgtgctgtgaaaacagggggcactgctccgtcctgaactccttcaggtacctacaa

SEQ ID NO: 154050 - DNA, 122 bp, Homo sapiens
cttttcaagagtgcagtaagaaagggtggatattagaagacttgctttacctgttctgtccgaaccagtggcggtgttgacagtagcctaattaggtcactgaagttcacacctcatattac

SEQ ID NO: 154051 - DNA, 122 bp, Homo sapiens
atacctgaggctgagtaatatataaagaaaaaaaggtggcttttttttttttttttggctcgcagttctgcaggctgtgagagaaacatagcctctgctcctggggaggcctcaggaagttt

SEQ ID NO: 154052 - DNA, 122 bp, Homo sapiens
atttttatttgtaagaagaaagaaaaaaagagttccagccttgaaccagactgactgcggcgtccccactgggaagcagcaggtgtccctcctgcctatgttgcaataagcagcagcacctg

SEQ ID NO: 154053 - DNA, 122 bp, Homo sapiens
gaagtcaatccctgcagaaggaatctaggctgagctcaccaagaagctgactgtggaccacgtctaggagaggtactcagggccattatccagcatcgcagtacagcagatattaactttgt

SEQ ID NO: 154054 - DNA, 122 bp, Homo sapiens
tgccaggcctgacatggccttgcctctcctgcagtcttggtgactgagacccttgggtggcgcttcccagctctgcaggccctcctggccttttctgcagggtggacacagggtctgtgtgt

SEQ ID NO: 154055 - DNA, 122 bp, Homo sapiens
accaagcgcgtgccaccacgtgtttgtgtcaggtatgtctgtgtgtttgtgcctgcacagcggaacccctcacctggcatctgaagcttccccttgtggccgccacctcgttttccctggct

SEQ ID NO: 154056 - DNA, 122 bp, Homo sapiens
cccgcgcgccggctctgcgacccctaggcaagacgcagcccaggaggctccctcccgagtcgcgccccggaccacgccgcaatgcctcgtcaccccagcaacaagctcttccttgtcctccc

SEQ ID NO: 154057 - DNA, 122 bp, Homo sapiens
tcgatgtaccgggattctgtcaagtgcctgagaacatgttcaaaaagctgctctccatctcgactttcacgtctccccaccgctctctaggcttcggctccccaatcagccatccgcgctct

SEQ ID NO: 154058 - DNA, 122 bp, Homo sapiens
cgcccgggggaactgcaggctgcgggggagggcggggggcggccgccgaggggctccgggcggggcctgtccaaggccgtcgcctgtccaaggccgtcagcctcatttggaggttgctggga

SEQ ID NO: 154059 - DNA, 122 bp, Homo sapiens
gcggcagccgcctgagctatatttagatcccagaagccaccaagctccctccgcactccccgcccttgtgcatgctgttccctctgcctggtcccggctctgtgaggtgtgaggtctccccg

SEQ ID NO: 154060 - DNA, 122 bp, Homo sapiens
caggctcgtgcgtccctcctgagctcgaagccaaccaggcctcgagcggctcgctgcggccggttcatgccggtcagctcccgcccctcgagaaggatggcctggaactgctgagacgaggc

SEQ ID NO: 154061 - DNA, 122 bp, Homo sapiens
tgtgaattgggtgggcagagacaactgaaagccacaggacccggttggcacctttttggccgcctgcgcctttgcctgcagccccgctccctgggtcacccgaaggaggagctggcgctctt

SEQ ID NO: 154062 - DNA, 122 bp, Homo sapiens
ttgagtctctgctcagttaggtgaggttggacagaggtttgcatcaatgccttgagccggcgagtctctccccagtgctgagggctttgtgtgtgtggtgcactcctgcccctgccgcactc

SEQ ID NO: 154063 - DNA, 122 bp, Homo sapiens
cgggagggagggagggaggctgcagcttctccccgacagacggagggagctgccgagagccggcgccgagcgaagccgagcggaagcccacccgcagccgacacgcgagccgctgccgcggc

SEQ ID NO: 154064 - DNA, 122 bp, Homo sapiens
taggttccaggacatccaaaggagcgtaggtaaccgacgtctacgtagtatttctgtccccggaagactggatctcagggaattattatggaagatactgctgagcccctttcatcctttcc

SEQ ID NO: 154065 - DNA, 122 bp, Homo sapiens
gcggggttaggcaggtgagtgacaggctccagggggccggcccctgcctggtgccccgagcgagccgggagtagctgcggcggtgcccgccccctctctccgcccctccagcggagctggtc

SEQ ID NO: 154066 - DNA, 122 bp, Homo sapiens
tccagggcctcttctccactcagctgactcccctggcctgcctaacgctcctgactgagacggttttccggcttcctctaacaggttggcgggaagttgatctgcaaacgcgaggcaaagca

SEQ ID NO: 154067 - DNA, 122 bp, Homo sapiens
cccgcctgagcctgtttatcatttaagtggataccatgctctggcagctgagggtaattacgggggctgcgtccttgaggacgggtctgcgcatgtgcttctcgcggggctggtggcccagc

SEQ ID NO: 154068 - DNA, 122 bp, Homo sapiens
agagcagctgtctctgctgtgcccaaagccatggagcaggaggccacggttgcaccacgtcgccatctgcgctggtgcgctacgcgtgcagcatcggcgtgaacatcatccgggccagaccc

SEQ ID NO: 154069 - DNA, 122 bp, Homo sapiens
cgacctcaagatccaggctgggcacgctacccgaccaactccttacttgagctcttcagccgaatacatcccgaaggaaatgccctgcagccgccgccagggcatgttcttggagatcaaca

SEQ ID NO: 154070 - DNA, 122 bp, Homo sapiens
ggagaggaaggaggaaggacgctcacggtgcgacagctctggccacgctggcgggagctacgtgatgatcctggcgatggcttgcagggaggggaagtcgtcgtcccgggcagcatgcagcg

SEQ ID NO: 154071 - DNA, 122 bp, Homo sapiens
accaggcggagacaagtcactgtgaagtgggcagcacaggaccccccggagggcaggcgccggaaactacatatcccggcgtgccccgctcgcgagcacagtggagcctgccgccattcggt

SEQ ID NO: 154072 - DNA, 122 bp, Homo sapiens
gcttaggcgggggtgctcgggtgaagaggggggacccagggagcatggcgcggctggccccgtgctcccagaaggcgttctgcagcttgaagatcatgctgagggggatgggacgctggcgc

SEQ ID NO: 154073 - DNA, 122 bp, Homo sapiens
caaaggcaaggccctgcgtggggccagggccgggccgggctgagcttgcagagccagagccgcaccttttcaaagagcaccacctggagcttgtcggagaagtagaggctttcgtggtcggg

SEQ ID NO: 154074 - DNA, 122 bp, Homo sapiens
agggggatcgatctgggggtacctgcgggtgaataaagactggatgactgaaggaagccccgccccaccccctggcaaggaatagggcaaaacttatgactaggccacttcactccaagtta

SEQ ID NO: 154075 - DNA, 122 bp, Homo sapiens
aaggcaagttacacggactctgcgcttggccccggggaacaggttctctgttaggaaaagcgtttctgaacattcctttattcacatgtgcacgcacacagcactataagcaagtgagatct

SEQ ID NO: 154076 - DNA, 122 bp, Homo sapiens
gaacgctcactttggagcaggatgcgagcccgggccacgattgggtcaggttgcgccgctcgcgtggccgcgggaatccccgaccggccccttccctagggtccctcctggcgcacctgccc

SEQ ID NO: 154077 - DNA, 122 bp, Homo sapiens
ctggctttgcaacctcgtctgtagtggtggagtgagtgcaggtccagaaacaaaccagaccggccttgaaattctgccctaacttcagagctgtaatcctaggcaggttacttttaatactt

SEQ ID NO: 154078 - DNA, 122 bp, Homo sapiens
gaaagcattagagtttcctgagtagttttaaaagggtgattttgggggtgatgtgaggtgcgatcagaggaggtaagactaatggcagacagatgtgtctgagggatgtttcaagagtccac

SEQ ID NO: 154079 - DNA, 122 bp, Homo sapiens
cctagcgtgtttgcaaggcgaccagattggaaagagtgtggtcagagtgaccccaagccacgctttaaaagttcagggtactttgcagtagtaactttggcagctccaccagtgcgcgcaac

SEQ ID NO: 154080 - DNA, 122 bp, Homo sapiens
aacacccaagtgtggtgcaatcaccatcgctctgagtagagattgagccagcattttacacgcatatctgtgtacgcatttaccagttcataaagcattcctgtgtacatcagaactctcta

SEQ ID NO: 154081 - DNA, 122 bp, Homo sapiens
tagctattaaaatggcatgtgcaattacctgtctttcacaagaaaagaatccccatggctcgcagacatttctgacctctttctggagttgtactacttagaaattgctatttcacaattga

SEQ ID NO: 154082 - DNA, 122 bp, Homo sapiens
tgcagccatcactggggcatttatgcttcctagcttcacctccctgttttgagatgtttacgcagtctaattcctcctaaaatcatcagagatgtagcattgttaagaagttaacagtgcct

SEQ ID NO: 154083 - DNA, 122 bp, Homo sapiens
gggcagccgaggtccggcctccagcggcgcgcaccggcctcgggccctcctgggcgctggcgggctcgctcctccataaataaaatacagggcgtcgactttcgcaagtgaccccgaggagc

SEQ ID NO: 154084 - DNA, 122 bp, Homo sapiens
tgtctttactaggccaccgtctcgtcagcgttacggagtattttgtccgcctgccgccgccgtcccagatattaatcacggagttccagggagaaggaacttgtgaaatgggggagccggct

SEQ ID NO: 154085 - DNA, 122 bp, Homo sapiens
gtgtggcctcccggcgtcccgcccactccggcgcctgcgtcattttgggcaccatggcaacgaagtaaacaagcgggtaaataatagacccctgacagccagagacccggagaaacaaagac

SEQ ID NO: 154086 - DNA, 122 bp, Homo sapiens
gtcgcggggttccaggatgccgatgccaagcaggaaagatcacctcgttgcttcttccaccggcctctccgcgagacatagctaaacttgaacttggcattccaagggtctggaaacatctt

SEQ ID NO: 154087 - DNA, 122 bp, Homo sapiens
cggtgagagggggcggggggcggggccgcggtgagatggggcggggccgcggtgagggggcggggccgcggtgagagggggcgggaccgcggtgagagggggcgggaccgcggtgagagggg

SEQ ID NO: 154088 - DNA, 122 bp, Homo sapiens
ttcttgctgtttctggagagacctctcagagcgcatgctcttcggatagtcggtctgtagcgccattttcgtatggaagggactgcactctgattaggtacagccttaggacgcccagcgtt

SEQ ID NO: 154089 - DNA, 122 bp, Homo sapiens
ggcctgtggagcggtgctgcggagccctgagaggtgcacggctgtgaggcctgagaggggcgtgccgtagggagctgtgatgggcggggctgagacctgtgaggagagtgagtgggaagaac

SEQ ID NO: 154090 - DNA, 122 bp, Homo sapiens
ttctggccatctggggacagttctcatgtggtccccagcccagtctcgagggttctgggccggtcaccctgcagcctcggtgctgcgcctctggatccagcctccgcaggaagaaccctggg

SEQ ID NO: 154091 - DNA, 122 bp, Homo sapiens
actgcctctccactgcctggaggtcatcaaatgcccctggaccacctcctacgtgccacacgctgtgttggccatccaaggttccatattgagcataaaacagccctctgccctaaaggagt

SEQ ID NO: 154092 - DNA, 122 bp, Homo sapiens
ccttgatgccagctgtctgttgagtagctactctaaccataaacccttaacaaccttgtacgatgtgctgggcacatggagaaaagtatgacatggtcccagaaatagaagaactttcagtg

SEQ ID NO: 154093 - DNA, 122 bp, Homo sapiens
ctgctgccagaaccttggggatgtgcctagacccggcgcagcacacgtccgggccaaccgcgagcagaacaaacctttggcgggcggccaggaggctccctcccagccaccgcccccctcca

SEQ ID NO: 154094 - DNA, 122 bp, Homo sapiens
aatgcagggccccattctgagactgcattcctagcaaatgactctccctggtcaaggagacggctactctaacaagggcatggggaatacacgtctgggaaagaatgggtgctcaccctgtt

SEQ ID NO: 154095 - DNA, 122 bp, Homo sapiens
tgaccttgtgatccacccgcctcggcctcccaaagtgctgggattataggcgtgagccaccgcgcccggcttatatttctgttagactgtgctgctgtagaaatttacaatgtatctcaagg

SEQ ID NO: 154096 - DNA, 122 bp, Homo sapiens
cagggtgcgctccgctcactgccgccccctgcaggctacccctgccaccgaatccccccacgtcatggactgcagcctcgccagctgccagccacacccttgccacgttcctcctcctgttc

SEQ ID NO: 154097 - DNA, 122 bp, Homo sapiens
gtccaccttgcagcacctgagactgaagctcctcccaagacagaggcgcatgtttccttccgaactctgctttcacatggaagattggctttaagatgaaggcctgcatttgcaaacagaaa

SEQ ID NO: 154098 - DNA, 122 bp, Homo sapiens
cctctccctatggtgtggctggctagcccgggggtctctacgctgcttggtctttgttaacggagatgaaggcagtaatttttcagtaacaggtttcagatataagtcccttggtgatgcta

SEQ ID NO: 154099 - DNA, 122 bp, Homo sapiens
ggaaccccggggggggcggggcctcgcggccctgcagcctcgtcaggctcagtcccctcccgataaacccctaaatagggactttcccggggggtgaccctggcttttttggcgaaaacccc

SEQ ID NO: 154100 - DNA, 122 bp, Homo sapiens
ctctcaaggccagccagtgctctgtctcctgggaagagaggttgtgagaggagaaagactcgggtttgaatctcagacctgctcatagttgtgggaccttgagcaagccatgaaacttttct

SEQ ID NO: 154101 - DNA, 122 bp, Homo sapiens
aaaaaatcagctgggtgcgctggcaaacacttgtaatcccagcactttgggaggccgagacgggaggatcacctgaggtcatgttcaagactaacagggctgaaatagcaaaacctcatctc

SEQ ID NO: 154102 - DNA, 122 bp, Homo sapiens
gctgaggcacagagaggttaaataacctgcctgagacaacacagctggtcagtagtggaccgggatttaaaccccacaatgctgctccagatttcacatcttaaccacttcctgcttccatg

SEQ ID NO: 154103 - DNA, 122 bp, Homo sapiens
ccagcaggttggttccttccgaggctgtgaaggatggatctgttccaggcccctcctcggcgtgcaggtctacacgttcacatgaagttctcccttcacagccgcctgtggccaaatgtccc

SEQ ID NO: 154104 - DNA, 122 bp, Homo sapiens
tgaagagggagttggtgagctccacggacacgcgcttccggtagtctgggttcttgtcctcggagatgcggaacaggacggcagcagcgtaggtggctgagcagagaggaaaggaaaagcca

SEQ ID NO: 154105 - DNA, 122 bp, Homo sapiens
gggagtggaaagcgccggatcctgggagccagtcgccctactcgatcaagcattttctgacggccctatccaataacgtggggacgcagctgaaaaccatgcaagctgatcgctgccctccc

SEQ ID NO: 154106 - DNA, 122 bp, Homo sapiens
ctggctcttctctccaggctcgcctgcctgttcctgaaacggggagctgatctgggggctcgagactctgaaggcagggaccctctgaccatcgccatggaaacagccaacgctgacatcgt

SEQ ID NO: 154107 - DNA, 122 bp, Homo sapiens
aataaaagaattgacaatacactctaggctggggtcgcctgggagaccgatgcggaaagccgcgaaggcaaaagacccgggctccgcgacccccacccgcgcgacgacgccgccgccaccgc

SEQ ID NO: 154108 - DNA, 122 bp, Homo sapiens
tttttacaaagcgttgatttctcggcacccggcagggagggcaactggcagggtctctggcgcaccttctgcgcggtggagccacgggggctcagctgggcggtggtgcggccgtggggtgg

SEQ ID NO: 154109 - DNA, 122 bp, Homo sapiens
gatctgctgcgaggaagctggccccatacctgggtcatccatgttaaaagacacccaatacgcagacccagaggaatcgcttttctcactgggtaatggctcacgagggcaggacagccccc

SEQ ID NO: 154110 - DNA, 122 bp, Homo sapiens
cgaccgagcatcctggcggcgccgggccactgggaggtaacgggctgggccatgggcgggcgcgccgggagcggggccggggctgggccgcgttctgtgggagccgaaccctgtgggtcttc

SEQ ID NO: 154111 - DNA, 122 bp, Homo sapiens
actttctcttctggataagtggagctcatagtaatacttgcctcttagagttgtgacatgcgctgaatgagttgatggcagagcttagaggtgcacatgaaacatgctcagagctcagtaaa

SEQ ID NO: 154112 - DNA, 122 bp, Homo sapiens
tgaccctagaacatatgcagatcataatcatccatggaaaagcaactgcgtttggcaacccgggcaatggaatcaaagctggaagacctggttcaagggccagtttggatccttcctagctg

SEQ ID NO: 154113 - DNA, 122 bp, Homo sapiens
tttgagagcagaactcagggactcaggaatgacctggctctcattctgccctggcagctccgcatggcttgtggaactaagacaaggagctggaggttgcaaaggatgggtgagcagtacat

SEQ ID NO: 154114 - DNA, 122 bp, Homo sapiens
taaaaatgagtagcgtctttgcccgtgtgatttggggccactaggtgtcattgtaaccagcgtggatcctcgttagggcatgcagggatgaaagagacatggcaaatgaattttggatcgct

SEQ ID NO: 154115 - DNA, 122 bp, Homo sapiens
ccaggcagaataaacacatttattgtttgcttgaattatgtagtgctaatggcctcctgccgtcactttggttttgtgtattttaaaaggccccagtgaaagcctgggacccagggggtaat

SEQ ID NO: 154116 - DNA, 122 bp, Homo sapiens
attaagttaccctgagaaagactcttaatattaccagtgttttcagggccccctgaccaacgcatggaagagcaacttgtaggctctagccttttaacaatacctacataaagaatattttg

SEQ ID NO: 154117 - DNA, 122 bp, Homo sapiens
aaaaagaaagaaagaaagaaagaaagaaaattcactgattagggagctgcaagattcctgcgaatgtgtaggaaggtagtttactacaagtatcgaggatcttggaaaatctaaaggaaagc

SEQ ID NO: 154118 - DNA, 122 bp, Homo sapiens
ctgacgcccgcagacgtcactcacaaccacactctcaccataagaggtgacacctgcaaacgtcactcacacccacactctcaccataagaggtgacgcccatagacgtcactcacacccac

SEQ ID NO: 154119 - DNA, 122 bp, Homo sapiens
gaaaccgcccccccatggactctcccgccccctctccatggggcacctcatggtccctcccggctctgcctgggatcccccaacgggctctcctgccccggctccttggatccctccatggt

SEQ ID NO: 154120 - DNA, 122 bp, Homo sapiens
gtcgtcgcgcaccaggttgtacgccgcccggcaagcctctttgtcgatcttggtggccatcgccgcggagccgcagcgggacactgtccggggcggccgagcgcgcccctggccggcggcgg

SEQ ID NO: 154121 - DNA, 122 bp, Homo sapiens
ctagtgtaaatgtgtctgtatgttcctgcctatccgtcctaggccctgggtcagaatgggcggagaagccttccatgccctaacctgtgctcttacccagcccccctcctgctcagccccat

SEQ ID NO: 154122 - DNA, 122 bp, Homo sapiens
tggaggtcgactggcaagaagcaggcagctaatctaacggatagtgtcttgagagaaccccgcctacaaaaccacagatctaacacagcatgggggctaggcatcgcctaaaatctgcaggt
